United States Patent Application Publication US 2012/0295819 A1 - sequence listing, part 2

SEQ ID NO: 31357 - DNA, 19 bp, Artificial Sequence
  Synthetic
gccuggactggguggaaac

SEQ ID NO: 31358 - DNA, 22 bp, Artificial Sequence
  Synthetic
gtctacacagccugatgctcuc

SEQ ID NO: 31359 - DNA, 22 bp, Artificial Sequence
  Synthetic
cttgagtgucagactccaguca

SEQ ID NO: 31360 - DNA, 20 bp, Artificial Sequence
  Synthetic
gcacagcugactctcgagug

SEQ ID NO: 31361 - DNA, 20 bp, Artificial Sequence
  Synthetic
cauggcgatguccaggagat

SEQ ID NO: 31362 - DNA, 17 bp, Artificial Sequence
  Synthetic
gctgaccuggccccauc

SEQ ID NO: 31363 - DNA, 20 bp, Artificial Sequence
  Synthetic
ggaagggucccagagtgcua

SEQ ID NO: 31364 - DNA, 21 bp, Artificial Sequence
  Synthetic
ttcacatguacgtgggtgucc

SEQ ID NO: 31365 - DNA, 23 bp, Artificial Sequence
  Synthetic
ctgcattctuagccatggagcua

SEQ ID NO: 31366 - DNA, 22 bp, Artificial Sequence
  Synthetic
gcctccacuctgatgtctctug

SEQ ID NO: 31367 - DNA, 22 bp, Artificial Sequence
  Synthetic
aaagctaaguaccccactgcug

SEQ ID NO: 31368 - DNA, 28 bp, Artificial Sequence
  Synthetic
aacagagcaacacccugtctaaaaauat

SEQ ID NO: 31369 - DNA, 23 bp, Artificial Sequence
  Synthetic
ctaagctggucctcatactgcut

SEQ ID NO: 31370 - DNA, 20 bp, Artificial Sequence
  Synthetic
cagccccgaauctagccuac

SEQ ID NO: 31371 - DNA, 27 bp, Artificial Sequence
  Synthetic
gaagatagccuttacatccctaauccc

SEQ ID NO: 31372 - DNA, 24 bp, Artificial Sequence
  Synthetic
cgtcatctcuggaatccccatcua

SEQ ID NO: 31373 - DNA, 21 bp, Artificial Sequence
  Synthetic
gguggaggcacagauagacgt

SEQ ID NO: 31374 - DNA, 17 bp, Artificial Sequence
  Synthetic
ccggucccctcuacacc

SEQ ID NO: 31375 - DNA, 28 bp, Artificial Sequence
  Synthetic
tcctggaagaacacucagaaaaacuaaa

SEQ ID NO: 31376 - DNA, 25 bp, Artificial Sequence
  Synthetic
tcatgtgagugtgaatgagtgugag

SEQ ID NO: 31377 - DNA, 24 bp, Artificial Sequence
  Synthetic
attgtuccggcagaagaagaugat

SEQ ID NO: 31378 - DNA, 21 bp, Artificial Sequence
  Synthetic
ctgacctgccutctctgtguc

SEQ ID NO: 31379 - DNA, 20 bp, Artificial Sequence
  Synthetic
gaagatgcuacggtggcugt

SEQ ID NO: 31380 - DNA, 20 bp, Artificial Sequence
  Synthetic
tgacgacagutcagcguacc

SEQ ID NO: 31381 - DNA, 22 bp, Artificial Sequence
  Synthetic
tcggtgtuccacaaatcctucc

SEQ ID NO: 31382 - DNA, 24 bp, Artificial Sequence
  Synthetic
acccactggaucacttcgauaagt

SEQ ID NO: 31383 - DNA, 18 bp, Artificial Sequence
  Synthetic
gcaacugctgcagaugct

SEQ ID NO: 31384 - DNA, 22 bp, Artificial Sequence
  Synthetic
gggcacagcauagttgtgtuga

SEQ ID NO: 31385 - DNA, 23 bp, Artificial Sequence
  Synthetic
ctcuccagucaaagacctaagut

SEQ ID NO: 31386 - DNA, 21 bp, Artificial Sequence
  Synthetic
ggutggctccaugaccaagat

SEQ ID NO: 31387 - DNA, 23 bp, Artificial Sequence
  Synthetic
tcaaggcuactccatcaaugcag

SEQ ID NO: 31388 - DNA, 20 bp, Artificial Sequence
  Synthetic
tgutacaaagugccccagca

SEQ ID NO: 31389 - DNA, 19 bp, Artificial Sequence
  Synthetic
aaggcggagautgcaguga

SEQ ID NO: 31390 - DNA, 20 bp, Artificial Sequence
  Synthetic
cccggagucgaagacagtuc

SEQ ID NO: 31391 - DNA, 19 bp, Artificial Sequence
  Synthetic
gtgttgaccucgccctcuc

SEQ ID NO: 31392 - DNA, 22 bp, Artificial Sequence
  Synthetic
agggugagccctatatcuggac

SEQ ID NO: 31393 - DNA, 24 bp, Artificial Sequence
  Synthetic
ctatgcctcuttcttctcctucca

SEQ ID NO: 31394 - DNA, 18 bp, Artificial Sequence
  Synthetic
gggagguaaggacgguga

SEQ ID NO: 31395 - DNA, 18 bp, Artificial Sequence
  Synthetic
ccuggaggaggaggugct

SEQ ID NO: 31396 - DNA, 24 bp, Artificial Sequence
  Synthetic
cctcacctttuctctcccaatugt

SEQ ID NO: 31397 - DNA, 24 bp, Artificial Sequence
  Synthetic
ccagagaaucagcattctgtcucc

SEQ ID NO: 31398 - DNA, 23 bp, Artificial Sequence
  Synthetic
gtgatucaggacccuagaaggua

SEQ ID NO: 31399 - DNA, 23 bp, Artificial Sequence
  Synthetic
ctttacaccggauttcgaaggug

SEQ ID NO: 31400 - DNA, 19 bp, Artificial Sequence
  Synthetic
gcagagagaggugctccug

SEQ ID NO: 31401 - DNA, 21 bp, Artificial Sequence
  Synthetic
cgctgggugtattcgcctaug

SEQ ID NO: 31402 - DNA, 23 bp, Artificial Sequence
  Synthetic
ctctttucccctccaaauccagt

SEQ ID NO: 31403 - DNA, 25 bp, Artificial Sequence
  Synthetic
ggttcatttaucccacccttctcut

SEQ ID NO: 31404 - DNA, 21 bp, Artificial Sequence
  Synthetic
cacccccaaucctagagctuc

SEQ ID NO: 31405 - DNA, 17 bp, Artificial Sequence
  Synthetic
ggtgcccugcaggtguc

SEQ ID NO: 31406 - DNA, 25 bp, Artificial Sequence
  Synthetic
gttctaaggcucggtcattcaucaa

SEQ ID NO: 31407 - DNA, 22 bp, Artificial Sequence
  Synthetic
catcgtggugaggctuaaggag

SEQ ID NO: 31408 - DNA, 22 bp, Artificial Sequence
  Synthetic
tctcagctucaccctaggacug

SEQ ID NO: 31409 - DNA, 22 bp, Artificial Sequence
  Synthetic
tgtccttcugcagactccgtua

SEQ ID NO: 31410 - DNA, 21 bp, Artificial Sequence
  Synthetic
cgtcaccccauggtgaguaac

SEQ ID NO: 31411 - DNA, 23 bp, Artificial Sequence
  Synthetic
gugccaagagaaaugactguact

SEQ ID NO: 31412 - DNA, 22 bp, Artificial Sequence
  Synthetic
cactgttugccaagacccagua

SEQ ID NO: 31413 - DNA, 23 bp, Artificial Sequence
  Synthetic
cctcctcccaucactctttgtuc

SEQ ID NO: 31414 - DNA, 21 bp, Artificial Sequence
  Synthetic
caagacccuccacagatgugt

SEQ ID NO: 31415 - DNA, 20 bp, Artificial Sequence
  Synthetic
gggcgtaggucatggcauag

SEQ ID NO: 31416 - DNA, 22 bp, Artificial Sequence
  Synthetic
tccctaucaggccagagctaug

SEQ ID NO: 31417 - DNA, 22 bp, Artificial Sequence
  Synthetic
cgatggagagagauggagacug

SEQ ID NO: 31418 - DNA, 22 bp, Artificial Sequence
  Synthetic
caagttttuagggaacgcugct

SEQ ID NO: 31419 - DNA, 22 bp, Artificial Sequence
  Synthetic
catagctuggcgatggtctuga

SEQ ID NO: 31420 - DNA, 23 bp, Artificial Sequence
  Synthetic
gggtgauacaggcttcttttuga

SEQ ID NO: 31421 - DNA, 24 bp, Artificial Sequence
  Synthetic
cugagaaggagatauacccagcca

SEQ ID NO: 31422 - DNA, 21 bp, Artificial Sequence
  Synthetic
gacaacctccugtcccgttua

SEQ ID NO: 31423 - DNA, 20 bp, Artificial Sequence
  Synthetic
ccatcgtcuccagacccuga

SEQ ID NO: 31424 - DNA, 18 bp, Artificial Sequence
  Synthetic
ctgucggaggaggagcug

SEQ ID NO: 31425 - DNA, 21 bp, Artificial Sequence
  Synthetic
caaggucacagtgucagcaga

SEQ ID NO: 31426 - DNA, 23 bp, Artificial Sequence
  Synthetic
gttgctttgcugttacctctguc

SEQ ID NO: 31427 - DNA, 20 bp, Artificial Sequence
  Synthetic
cctcaccuttccctccucac

SEQ ID NO: 31428 - DNA, 17 bp, Artificial Sequence
  Synthetic
gggtccgguaggcaugg

SEQ ID NO: 31429 - DNA, 17 bp, Artificial Sequence
  Synthetic
ggcgctcugggagtcug

SEQ ID NO: 31430 - DNA, 18 bp, Artificial Sequence
  Synthetic
gatcgcagccuccctguc

SEQ ID NO: 31431 - DNA, 21 bp, Artificial Sequence
  Synthetic
ctcatccuggccttctucaca

SEQ ID NO: 31432 - DNA, 21 bp, Artificial Sequence
  Synthetic
agaguggccttatguccacct

SEQ ID NO: 31433 - DNA, 22 bp, Artificial Sequence
  Synthetic
aagacctgcuctagcccauact

SEQ ID NO: 31434 - DNA, 22 bp, Artificial Sequence
  Synthetic
cgcggtcugctatacgatguac

SEQ ID NO: 31435 - DNA, 24 bp, Artificial Sequence
  Synthetic
guagaagaggacgacauggacaaa

SEQ ID NO: 31436 - DNA, 22 bp, Artificial Sequence
  Synthetic
gttggccccaugtttctcaaug

SEQ ID NO: 31437 - DNA, 25 bp, Artificial Sequence
  Synthetic
gttaattggtttugtgcctgcctua

SEQ ID NO: 31438 - DNA, 20 bp, Artificial Sequence
  Synthetic
cgaacugccttgccaucgaa

SEQ ID NO: 31439 - DNA, 27 bp, Artificial Sequence
  Synthetic
caatcttacacgugtgtgggttttuaa

SEQ ID NO: 31440 - DNA, 23 bp, Artificial Sequence
  Synthetic
gatgtucgcacagttatccuggt

SEQ ID NO: 31441 - DNA, 24 bp, Artificial Sequence
  Synthetic
ctaagctgccagcutctgttttuc

SEQ ID NO: 31442 - DNA, 28 bp, Artificial Sequence
  Synthetic
gtggcttattugtgaaaagtcaaauggt

SEQ ID NO: 31443 - DNA, 26 bp, Artificial Sequence
  Synthetic
ccctaaactugaactccatttcucct

SEQ ID NO: 31444 - DNA, 23 bp, Artificial Sequence
  Synthetic
acacacacacacgauagtggaug

SEQ ID NO: 31445 - DNA, 29 bp, Artificial Sequence
  Synthetic
ttgggtattaggaaaauaagtggtggtut

SEQ ID NO: 31446 - DNA, 26 bp, Artificial Sequence
  Synthetic
gaaccagguccagagaaauatcauaa

SEQ ID NO: 31447 - DNA, 21 bp, Artificial Sequence
  Synthetic
ggtggcaccugctatgaugag

SEQ ID NO: 31448 - DNA, 21 bp, Artificial Sequence
  Synthetic
ggaagggucccagagauagca

SEQ ID NO: 31449 - DNA, 25 bp, Artificial Sequence
  Synthetic
ccgattgtcucccctttgattcuag

SEQ ID NO: 31450 - DNA, 22 bp, Artificial Sequence
  Synthetic
attcccggaugagggagtctua

SEQ ID NO: 31451 - DNA, 27 bp, Artificial Sequence
  Synthetic
tgatctgaucccaagcctatcttcuag

SEQ ID NO: 31452 - DNA, 21 bp, Artificial Sequence
  Synthetic
cttggccauctgaggtttugc

SEQ ID NO: 31453 - DNA, 24 bp, Artificial Sequence
  Synthetic
tctctctccccutctcctcttcua

SEQ ID NO: 31454 - DNA, 21 bp, Artificial Sequence
  Synthetic
gcaagtcggcuacccaagtut

SEQ ID NO: 31455 - DNA, 24 bp, Artificial Sequence
  Synthetic
atttctcatgcucatccccatcuc

SEQ ID NO: 31456 - DNA, 22 bp, Artificial Sequence
  Synthetic
tcacacuggacaagcctaggua

SEQ ID NO: 31457 - DNA, 21 bp, Artificial Sequence
  Synthetic
gactgccaucctggttttugc

SEQ ID NO: 31458 - DNA, 21 bp, Artificial Sequence
  Synthetic
accctggguctcatcccuaag

SEQ ID NO: 31459 - DNA, 27 bp, Artificial Sequence
  Synthetic
tctcttaacgtucaaaaggctaaccug

SEQ ID NO: 31460 - DNA, 25 bp, Artificial Sequence
  Synthetic
gggtgauaaatggacacuaaaagca

SEQ ID NO: 31461 - DNA, 21 bp, Artificial Sequence
  Synthetic
agtatcagauccgcgugacct

SEQ ID NO: 31462 - DNA, 28 bp, Artificial Sequence
  Synthetic
aaatgctaagtacuaaggagacagaucc

SEQ ID NO: 31463 - DNA, 28 bp, Artificial Sequence
  Synthetic
gaccctgtttcugaattgctaaattgut

SEQ ID NO: 31464 - DNA, 23 bp, Artificial Sequence
  Synthetic
acugatactcctugaggcacact

SEQ ID NO: 31465 - DNA, 28 bp, Artificial Sequence
  Synthetic
tctatacucgaagaaaacagctttcucc

SEQ ID NO: 31466 - DNA, 18 bp, Artificial Sequence
  Synthetic
ctccuaccttggcucgca

SEQ ID NO: 31467 - DNA, 17 bp, Artificial Sequence
  Synthetic
gcuccaaucggcggagt

SEQ ID NO: 31468 - DNA, 22 bp, Artificial Sequence
  Synthetic
ggaaaggaggguggatccugat

SEQ ID NO: 31469 - DNA, 20 bp, Artificial Sequence
  Synthetic
ggcctuggctgctagtugag

SEQ ID NO: 31470 - DNA, 21 bp, Artificial Sequence
  Synthetic
ccugagaccagcgucaagaag

SEQ ID NO: 31471 - DNA, 22 bp, Artificial Sequence
  Synthetic
aatuaagcaggaccccuaggga

SEQ ID NO: 31472 - DNA, 22 bp, Artificial Sequence
  Synthetic
ggcatcagagcucaccttugaa

SEQ ID NO: 31473 - DNA, 19 bp, Artificial Sequence
  Synthetic
gccccaccucggatttcuc

SEQ ID NO: 31474 - DNA, 19 bp, Artificial Sequence
  Synthetic
cactgaccaugagggcugt

SEQ ID NO: 31475 - DNA, 23 bp, Artificial Sequence
  Synthetic
cggtgtacuctctgtccaugagt

SEQ ID NO: 31476 - DNA, 20 bp, Artificial Sequence
  Synthetic
ctgttcaagggugcggguat

SEQ ID NO: 31477 - DNA, 20 bp, Artificial Sequence
  Synthetic
ccactactucgggcacucac

SEQ ID NO: 31478 - DNA, 21 bp, Artificial Sequence
  Synthetic
ggacuaccatcugaccgaggt

SEQ ID NO: 31479 - DNA, 21 bp, Artificial Sequence
  Synthetic
ctggugacagcactgatcuca

SEQ ID NO: 31480 - DNA, 22 bp, Artificial Sequence
  Synthetic
gcaagacaagccuctgagtugg

SEQ ID NO: 31481 - DNA, 25 bp, Artificial Sequence
  Synthetic
gtctgtcttaucggagatttgguca

SEQ ID NO: 31482 - DNA, 22 bp, Artificial Sequence
  Synthetic
cctaccccuctgaaggtgacuc

SEQ ID NO: 31483 - DNA, 24 bp, Artificial Sequence
  Synthetic
ggcctcaaagguctcttcaucaaa

SEQ ID NO: 31484 - DNA, 19 bp, Artificial Sequence
  Synthetic
agguagagaggccagcuga

SEQ ID NO: 31485 - DNA, 19 bp, Artificial Sequence
  Synthetic
caccctgaauccagcggua

SEQ ID NO: 31486 - DNA, 22 bp, Artificial Sequence
  Synthetic
aaccgctucaagaagaucagca

SEQ ID NO: 31487 - DNA, 18 bp, Artificial Sequence
  Synthetic
gaagcggucactgcaugg

SEQ ID NO: 31488 - DNA, 22 bp, Artificial Sequence
  Synthetic
cttcctgaccccuctgtgatuc

SEQ ID NO: 31489 - DNA, 22 bp, Artificial Sequence
  Synthetic
agtcccaucagcatcctctuca

SEQ ID NO: 31490 - DNA, 24 bp, Artificial Sequence
  Synthetic
ctcatacacggucttatcgtccug

SEQ ID NO: 31491 - DNA, 23 bp, Artificial Sequence
  Synthetic
catcuggaagctctuccgaaact

SEQ ID NO: 31492 - DNA, 19 bp, Artificial Sequence
  Synthetic
cgtguccgagggcttctuc

SEQ ID NO: 31493 - DNA, 18 bp, Artificial Sequence
  Synthetic
cgcagccucgaagugact

SEQ ID NO: 31494 - DNA, 19 bp, Artificial Sequence
  Synthetic
gucctguacagcgagagca

SEQ ID NO: 31495 - DNA, 19 bp, Artificial Sequence
  Synthetic
cuacagcccggactgugac

SEQ ID NO: 31496 - DNA, 22 bp, Artificial Sequence
  Synthetic
gttcatcctucttgggctgugt

SEQ ID NO: 31497 - DNA, 23 bp, Artificial Sequence
  Synthetic
gaattcatcugcactgtgtuggg

SEQ ID NO: 31498 - DNA, 24 bp, Artificial Sequence
  Synthetic
caacttttugcaaagcagcauagc

SEQ ID NO: 31499 - DNA, 24 bp, Artificial Sequence
  Synthetic
gaaaacaagatugcggtcagcuaa

SEQ ID NO: 31500 - DNA, 22 bp, Artificial Sequence
  Synthetic
gagccauccatctuggagacag

SEQ ID NO: 31501 - DNA, 23 bp, Artificial Sequence
  Synthetic
guacggauggaaaaagagtcuca

SEQ ID NO: 31502 - DNA, 24 bp, Artificial Sequence
  Synthetic
ggaatggaaggauggaagaacuca

SEQ ID NO: 31503 - DNA, 22 bp, Artificial Sequence
  Synthetic
aagaacttcucgtctgcuagcg

SEQ ID NO: 31504 - DNA, 23 bp, Artificial Sequence
  Synthetic
cacaaatgugccaggaactucaa

SEQ ID NO: 31505 - DNA, 31 bp, Artificial Sequence
  Synthetic
aactagcaggcagutatttttaaagatcuct

SEQ ID NO: 31506 - DNA, 23 bp, Artificial Sequence
  Synthetic
gatgcttucggcttgactatugg

SEQ ID NO: 31507 - DNA, 22 bp, Artificial Sequence
  Synthetic
cttagaugccccagggaaagug

SEQ ID NO: 31508 - DNA, 24 bp, Artificial Sequence
  Synthetic
acttcctcuacatcgatgcttucg

SEQ ID NO: 31509 - DNA, 22 bp, Artificial Sequence
  Synthetic
agttcactaaugccgtgaugct

SEQ ID NO: 31510 - DNA, 20 bp, Artificial Sequence
  Synthetic
ggtgtgggugcgataaugca

SEQ ID NO: 31511 - DNA, 23 bp, Artificial Sequence
  Synthetic
gggugggaccaaactataatucc

SEQ ID NO: 31512 - DNA, 21 bp, Artificial Sequence
  Synthetic
agcccuacagaggtggtuaca

SEQ ID NO: 31513 - DNA, 20 bp, Artificial Sequence
  Synthetic
tgctctguctgtggtcaucg

SEQ ID NO: 31514 - DNA, 23 bp, Artificial Sequence
  Synthetic
cttcccctuccctttcttggaug

SEQ ID NO: 31515 - DNA, 22 bp, Artificial Sequence
  Synthetic
tgcctugaaacaagccaagcua

SEQ ID NO: 31516 - DNA, 20 bp, Artificial Sequence
  Synthetic
atgtucacctggaugcggat

SEQ ID NO: 31517 - DNA, 24 bp, Artificial Sequence
  Synthetic
ccccaggacauaagctattuagcc

SEQ ID NO: 31518 - DNA, 20 bp, Artificial Sequence
  Synthetic
gccattcuccctgugacagt

SEQ ID NO: 31519 - DNA, 21 bp, Artificial Sequence
  Synthetic
cgtctgugagaaatgctgugc

SEQ ID NO: 31520 - DNA, 18 bp, Artificial Sequence
  Synthetic
cgtacguccgggaagcuc

SEQ ID NO: 31521 - DNA, 20 bp, Artificial Sequence
  Synthetic
gcaaataacugcggctcucc

SEQ ID NO: 31522 - DNA, 19 bp, Artificial Sequence
  Synthetic
gggttuccgttgcagucct

SEQ ID NO: 31523 - DNA, 19 bp, Artificial Sequence
  Synthetic
cccgctccuagcaaaggug

SEQ ID NO: 31524 - DNA, 23 bp, Artificial Sequence
  Synthetic
agcactttcuccatgggaagtut

SEQ ID NO: 31525 - DNA, 29 bp, Artificial Sequence
  Synthetic
tcgccattatuacaagagttaagcatcut

SEQ ID NO: 31526 - DNA, 22 bp, Artificial Sequence
  Synthetic
tgggtattgtugggaggaggua

SEQ ID NO: 31527 - DNA, 24 bp, Artificial Sequence
  Synthetic
caagggaatguttattgggcgauc

SEQ ID NO: 31528 - DNA, 25 bp, Artificial Sequence
  Synthetic
cgttttcctaaccutgttcgccuat

SEQ ID NO: 31529 - DNA, 29 bp, Artificial Sequence
  Synthetic
gtacaggatgacauagtagaagttcucag

SEQ ID NO: 31530 - DNA, 22 bp, Artificial Sequence
  Synthetic
ccaatgaccccuaccaccagua

SEQ ID NO: 31531 - DNA, 23 bp, Artificial Sequence
  Synthetic
catctcttcaugtctggacguca

SEQ ID NO: 31532 - DNA, 29 bp, Artificial Sequence
  Synthetic
catttcaatcucagtgatttatgctugct

SEQ ID NO: 31533 - DNA, 28 bp, Artificial Sequence
  Synthetic
gtcacacacaaaugatgtttcaugagaa

SEQ ID NO: 31534 - DNA, 23 bp, Artificial Sequence
  Synthetic
ggatgtguccagtttuagccagt

SEQ ID NO: 31535 - DNA, 20 bp, Artificial Sequence
  Synthetic
agcacucgaacgacccatuc

SEQ ID NO: 31536 - DNA, 20 bp, Artificial Sequence
  Synthetic
ccaccctgcugaactgtcuc

SEQ ID NO: 31537 - DNA, 21 bp, Artificial Sequence
  Synthetic
acgtgtgggutttggccaaua

SEQ ID NO: 31538 - DNA, 17 bp, Artificial Sequence
  Synthetic
gcuacgccggcttcuga

SEQ ID NO: 31539 - DNA, 20 bp, Artificial Sequence
  Synthetic
gggactauccctggcucaca

SEQ ID NO: 31540 - DNA, 21 bp, Artificial Sequence
  Synthetic
cttctggagggugctgtucaa

SEQ ID NO: 31541 - DNA, 21 bp, Artificial Sequence
  Synthetic
cctcaaacaccacuccggtuc

SEQ ID NO: 31542 - DNA, 19 bp, Artificial Sequence
  Synthetic
cgtccccaaggcuttggua

SEQ ID NO: 31543 - DNA, 19 bp, Artificial Sequence
  Synthetic
aagacuggagacccuggct

SEQ ID NO: 31544 - DNA, 20 bp, Artificial Sequence
  Synthetic
ctgcctgcutctggcauaga

SEQ ID NO: 31545 - DNA, 17 bp, Artificial Sequence
  Synthetic
cccgccacagcgucuac

SEQ ID NO: 31546 - DNA, 18 bp, Artificial Sequence
  Synthetic
cattgcugacgccccuct

SEQ ID NO: 31547 - DNA, 20 bp, Artificial Sequence
  Synthetic
tccctgagugcccagguaaa

SEQ ID NO: 31548 - DNA, 17 bp, Artificial Sequence
  Synthetic
cctgccguggtgggtua

SEQ ID NO: 31549 - DNA, 23 bp, Artificial Sequence
  Synthetic
caggtaccacutcctccagaauc

SEQ ID NO: 31550 - DNA, 18 bp, Artificial Sequence
  Synthetic
cgcugaggucgggagaga

SEQ ID NO: 31551 - DNA, 21 bp, Artificial Sequence
  Synthetic
cctgaaatuctgcccugacca

SEQ ID NO: 31552 - DNA, 19 bp, Artificial Sequence
  Synthetic
tctgcaugggcgtctctug

SEQ ID NO: 31553 - DNA, 19 bp, Artificial Sequence
  Synthetic
gcttcccutcagggucagt

SEQ ID NO: 31554 - DNA, 18 bp, Artificial Sequence
  Synthetic
agggucccagcagucact

SEQ ID NO: 31555 - DNA, 19 bp, Artificial Sequence
  Synthetic
ccggcaggugcttguagac

SEQ ID NO: 31556 - DNA, 17 bp, Artificial Sequence
  Synthetic
cgcugttgccucccaca

SEQ ID NO: 31557 - DNA, 17 bp, Artificial Sequence
  Synthetic
ccgaccacgcucacuca

SEQ ID NO: 31558 - DNA, 22 bp, Artificial Sequence
  Synthetic
gttgggcugacctcttctctut

SEQ ID NO: 31559 - DNA, 21 bp, Artificial Sequence
  Synthetic
ctgagttuccacggcucaaga

SEQ ID NO: 31560 - DNA, 20 bp, Artificial Sequence
  Synthetic
gggacaugcagctctgauga

SEQ ID NO: 31561 - DNA, 25 bp, Artificial Sequence
  Synthetic
ggtttaattuccaggcacatgaugg

SEQ ID NO: 31562 - DNA, 21 bp, Artificial Sequence
  Synthetic
gtgcctguaatcccagcuaca

SEQ ID NO: 31563 - DNA, 22 bp, Artificial Sequence
  Synthetic
gtggtggcaauggttacaugag

SEQ ID NO: 31564 - DNA, 20 bp, Artificial Sequence
  Synthetic
cttggacccggacucgtuat

SEQ ID NO: 31565 - DNA, 19 bp, Artificial Sequence
  Synthetic
ggaaguccaggugcaccac

SEQ ID NO: 31566 - DNA, 27 bp, Artificial Sequence
  Synthetic
ggaaccacttcuaactgaaattggtut

SEQ ID NO: 31567 - DNA, 27 bp, Artificial Sequence
  Synthetic
gatctgatgagucagcaaagaagacut

SEQ ID NO: 31568 - DNA, 21 bp, Artificial Sequence
  Synthetic
gagcctuggcagaattucacg

SEQ ID NO: 31569 - DNA, 23 bp, Artificial Sequence
  Synthetic
tttacagaggucgcagagggaua

SEQ ID NO: 31570 - DNA, 20 bp, Artificial Sequence
  Synthetic
ggtgggacgutcactguagt

SEQ ID NO: 31571 - DNA, 20 bp, Artificial Sequence
  Synthetic
gctctgtcgcuctgcttcug

SEQ ID NO: 31572 - DNA, 18 bp, Artificial Sequence
  Synthetic
gtcccccaacucccctut

SEQ ID NO: 31573 - DNA, 18 bp, Artificial Sequence
  Synthetic
tcaugcgggaagcgaugg

SEQ ID NO: 31574 - DNA, 23 bp, Artificial Sequence
  Synthetic
tgtccttccccautggtttgtua

SEQ ID NO: 31575 - DNA, 24 bp, Artificial Sequence
  Synthetic
cagtttcaucgagttcuagcccaa

SEQ ID NO: 31576 - DNA, 22 bp, Artificial Sequence
  Synthetic
cacctcacutccacucacagag

SEQ ID NO: 31577 - DNA, 28 bp, Artificial Sequence
  Synthetic
ccaaatuaacgcucaggaaaaatacaut

SEQ ID NO: 31578 - DNA, 30 bp, Artificial Sequence
  Synthetic
gcaaacaataccaaauttacttcatgtgua

SEQ ID NO: 31579 - DNA, 26 bp, Artificial Sequence
  Synthetic
agcccauaaaggaatguaaaccaaca

SEQ ID NO: 31580 - DNA, 23 bp, Artificial Sequence
  Synthetic
ggcgcttacaguagctgttctua

SEQ ID NO: 31581 - DNA, 23 bp, Artificial Sequence
  Synthetic
ccatctgcaguacacacatgucc

SEQ ID NO: 31582 - DNA, 26 bp, Artificial Sequence
  Synthetic
cagtaggcagugaagtaaatttgugg

SEQ ID NO: 31583 - DNA, 28 bp, Artificial Sequence
  Synthetic
acagtgacaucatcagtuaaaacaaggt

SEQ ID NO: 31584 - DNA, 22 bp, Artificial Sequence
  Synthetic
aacagcacaugatcccactuca

SEQ ID NO: 31585 - DNA, 20 bp, Artificial Sequence
  Synthetic
cgaatcgcugtggcctugat

SEQ ID NO: 31586 - DNA, 23 bp, Artificial Sequence
  Synthetic
ccctcttctgugaagctgacauc

SEQ ID NO: 31587 - DNA, 26 bp, Artificial Sequence
  Synthetic
aggaaagagaacaucaccaggacuaa

SEQ ID NO: 31588 - DNA, 22 bp, Artificial Sequence
  Synthetic
tgatgcatgauaccctctugcc

SEQ ID NO: 31589 - DNA, 28 bp, Artificial Sequence
  Synthetic
tccugatcagcaaaauacaagaaagaga

SEQ ID NO: 31590 - DNA, 21 bp, Artificial Sequence
  Synthetic
cuggtttagccucaagcccaa

SEQ ID NO: 31591 - DNA, 21 bp, Artificial Sequence
  Synthetic
cagggtgggugcctactttua

SEQ ID NO: 31592 - DNA, 23 bp, Artificial Sequence
  Synthetic
gtggccttcuttgaagagctcua

SEQ ID NO: 31593 - DNA, 26 bp, Artificial Sequence
  Synthetic
gagagaaatctcuacagggtcguagt

SEQ ID NO: 31594 - DNA, 21 bp, Artificial Sequence
  Synthetic
cttgagcagcugaagctgtut

SEQ ID NO: 31595 - DNA, 17 bp, Artificial Sequence
  Synthetic
ctcctcucgccctugcc

SEQ ID NO: 31596 - DNA, 20 bp, Artificial Sequence
  Synthetic
gccaaggauctgggaucagg

SEQ ID NO: 31597 - DNA, 21 bp, Artificial Sequence
  Synthetic
ccttgauggcgaactgaguga

SEQ ID NO: 31598 - DNA, 17 bp, Artificial Sequence
  Synthetic
gctgcccugctggcaua

SEQ ID NO: 31599 - DNA, 22 bp, Artificial Sequence
  Synthetic
cccagtgcuaactccagtctut

SEQ ID NO: 31600 - DNA, 17 bp, Artificial Sequence
  Synthetic
gccuccacggacaggut

SEQ ID NO: 31601 - DNA, 17 bp, Artificial Sequence
  Synthetic
cccutgatgcucccgca

SEQ ID NO: 31602 - DNA, 18 bp, Artificial Sequence
  Synthetic
caccccaaggugccacut

SEQ ID NO: 31603 - DNA, 21 bp, Artificial Sequence
  Synthetic
cuctctcuagggaaggccaca

SEQ ID NO: 31604 - DNA, 20 bp, Artificial Sequence
  Synthetic
ggtccaggutgggagtggua

SEQ ID NO: 31605 - DNA, 20 bp, Artificial Sequence
  Synthetic
cccuccctctctugggacag

SEQ ID NO: 31606 - DNA, 28 bp, Artificial Sequence
  Synthetic
aagaattgttgaguctgaggaatauggg

SEQ ID NO: 31607 - DNA, 27 bp, Artificial Sequence
  Synthetic
ctgaatactgagcautttctgaagcug

SEQ ID NO: 31608 - DNA, 21 bp, Artificial Sequence
  Synthetic
ccacccacutgagacacctuc

SEQ ID NO: 31609 - DNA, 23 bp, Artificial Sequence
  Synthetic
tgactgccaugtgtctttctguc

SEQ ID NO: 31610 - DNA, 20 bp, Artificial Sequence
  Synthetic
cttctggucacgcaugcaac

SEQ ID NO: 31611 - DNA, 28 bp, Artificial Sequence
  Synthetic
ccatacatagtuccttctgttctucaca

SEQ ID NO: 31612 - DNA, 25 bp, Artificial Sequence
  Synthetic
ttcccugcaagacaacacattauga

SEQ ID NO: 31613 - DNA, 21 bp, Artificial Sequence
  Synthetic
gctgttgtgcutgtccccuag

SEQ ID NO: 31614 - DNA, 25 bp, Artificial Sequence
  Synthetic
gtgagaaccugcatttcuaacagac

SEQ ID NO: 31615 - DNA, 24 bp, Artificial Sequence
  Synthetic
ttttgttgacagcguctcggauat

SEQ ID NO: 31616 - DNA, 17 bp, Artificial Sequence
  Synthetic
gcaccagucgggtcuca

SEQ ID NO: 31617 - DNA, 17 bp, Artificial Sequence
  Synthetic
ctgggccutcugcagct

SEQ ID NO: 31618 - DNA, 25 bp, Artificial Sequence
  Synthetic
aaattatcuacccagcactgcagut

SEQ ID NO: 31619 - DNA, 17 bp, Artificial Sequence
  Synthetic
gtccgcautgccauccg

SEQ ID NO: 31620 - DNA, 23 bp, Artificial Sequence
  Synthetic
cgagctgaagutggtttgggaua

SEQ ID NO: 31621 - DNA, 26 bp, Artificial Sequence
  Synthetic
atcaaagtgattucagggatccucac

SEQ ID NO: 31622 - DNA, 21 bp, Artificial Sequence
  Synthetic
acgctgguagagaggcctaut

SEQ ID NO: 31623 - DNA, 24 bp, Artificial Sequence
  Synthetic
ccatatcacaagccuctgggttuc

SEQ ID NO: 31624 - DNA, 24 bp, Artificial Sequence
  Synthetic
autcagctgagugggaaaaaggaa

SEQ ID NO: 31625 - DNA, 22 bp, Artificial Sequence
  Synthetic
gcctttgaccgugacttttcug

SEQ ID NO: 31626 - DNA, 27 bp, Artificial Sequence
  Synthetic
tgcaatgaatgucaatggttgaauagc

SEQ ID NO: 31627 - DNA, 21 bp, Artificial Sequence
  Synthetic
gaggccagggcucaactuaat

SEQ ID NO: 31628 - DNA, 25 bp, Artificial Sequence
  Synthetic
gcgggaaucaggagttguaaaacat

SEQ ID NO: 31629 - DNA, 28 bp, Artificial Sequence
  Synthetic
ctatctgcaccutttgtaaagtctguct

SEQ ID NO: 31630 - DNA, 22 bp, Artificial Sequence
  Synthetic
cctgaucccagcaaatcugagt

SEQ ID NO: 31631 - DNA, 31 bp, Artificial Sequence
  Synthetic
tgtaatcatggcccuttaatatctgtttuct

SEQ ID NO: 31632 - DNA, 22 bp, Artificial Sequence
  Synthetic
cgaaguttgacugccaaccact

SEQ ID NO: 31633 - DNA, 27 bp, Artificial Sequence
  Synthetic
gggtcaaaatttaugagtcctgagugt

SEQ ID NO: 31634 - DNA, 27 bp, Artificial Sequence
  Synthetic
ctgtttattgtggucttccaggattug

SEQ ID NO: 31635 - DNA, 27 bp, Artificial Sequence
  Synthetic
tttttgatgccaauaggaatcugcaag

SEQ ID NO: 31636 - DNA, 23 bp, Artificial Sequence
  Synthetic
ctcccctcttucctcactctcua

SEQ ID NO: 31637 - DNA, 24 bp, Artificial Sequence
  Synthetic
ccuaacccccaaagcaaaauaagg

SEQ ID NO: 31638 - DNA, 31 bp, Artificial Sequence
  Synthetic
aggttagctttccutggttagttattucaat

SEQ ID NO: 31639 - DNA, 27 bp, Artificial Sequence
  Synthetic
tgtataacataacugtgtggtgggtut

SEQ ID NO: 31640 - DNA, 24 bp, Artificial Sequence
  Synthetic
actactcacguttccatgttgucc

SEQ ID NO: 31641 - DNA, 24 bp, Artificial Sequence
  Synthetic
cagaagacuggagtggtcatuagt

SEQ ID NO: 31642 - DNA, 21 bp, Artificial Sequence
  Synthetic
cagcaacuggcacaggagaua

SEQ ID NO: 31643 - DNA, 23 bp, Artificial Sequence
  Synthetic
ctagacuggatgagacuggaacc

SEQ ID NO: 31644 - DNA, 28 bp, Artificial Sequence
  Synthetic
acugaagagctaataugagaaaacgaag

SEQ ID NO: 31645 - DNA, 28 bp, Artificial Sequence
  Synthetic
gcatgautctatccaaatuccaagacag

SEQ ID NO: 31646 - DNA, 26 bp, Artificial Sequence
  Synthetic
aatctgctgucaaataagaacaguct

SEQ ID NO: 31647 - DNA, 29 bp, Artificial Sequence
  Synthetic
ggtcagtaattgutttctgctttgatuct

SEQ ID NO: 31648 - DNA, 23 bp, Artificial Sequence
  Synthetic
acgttgaccaaautgttgtgcuc

SEQ ID NO: 31649 - DNA, 28 bp, Artificial Sequence
  Synthetic
ggacacugaaaggaaggttttautctut

SEQ ID NO: 31650 - DNA, 26 bp, Artificial Sequence
  Synthetic
gtcacctgucatttaactuggaggaa

SEQ ID NO: 31651 - DNA, 30 bp, Artificial Sequence
  Synthetic
aaagcaaaaatcaugttgttgttattgtug

SEQ ID NO: 31652 - DNA, 22 bp, Artificial Sequence
  Synthetic
gccaggcuaatgtcgcatttua

SEQ ID NO: 31653 - DNA, 27 bp, Artificial Sequence
  Synthetic
gaatttgacctccutgcctttctttut

SEQ ID NO: 31654 - DNA, 27 bp, Artificial Sequence
  Synthetic
aaaggacaacaaugtttacaatgugct

SEQ ID NO: 31655 - DNA, 27 bp, Artificial Sequence
  Synthetic
ccaatttgcutttgactatugcacaca

SEQ ID NO: 31656 - DNA, 21 bp, Artificial Sequence
  Synthetic
cctcttgaagutcccggaguc

SEQ ID NO: 31657 - DNA, 28 bp, Artificial Sequence
  Synthetic
gcctaaaacctugtcatattgccaatut

SEQ ID NO: 31658 - DNA, 24 bp, Artificial Sequence
  Synthetic
ctatgtgcutaacatgugcaaggc

SEQ ID NO: 31659 - DNA, 22 bp, Artificial Sequence
  Synthetic
acatggtacgcugctgttctut

SEQ ID NO: 31660 - DNA, 29 bp, Artificial Sequence
  Synthetic
aggaccttgguaagagttatgauaagagg

SEQ ID NO: 31661 - DNA, 27 bp, Artificial Sequence
  Synthetic
tgtaagcaaagutggcatttuaaagca

SEQ ID NO: 31662 - DNA, 23 bp, Artificial Sequence
  Synthetic
ccttggagtcutctaggagccut

SEQ ID NO: 31663 - DNA, 25 bp, Artificial Sequence
  Synthetic
catctgaacauttggtccttugcag

SEQ ID NO: 31664 - DNA, 26 bp, Artificial Sequence
  Synthetic
ctccaagaggcautgatattctcugt

SEQ ID NO: 31665 - DNA, 29 bp, Artificial Sequence
  Synthetic
gctgtttacgaaguattttaagacacucc

SEQ ID NO: 31666 - DNA, 26 bp, Artificial Sequence
  Synthetic
tccagccattgugttgaatccttuaa

SEQ ID NO: 31667 - DNA, 28 bp, Artificial Sequence
  Synthetic
atgtgagataacguttggaagttacaut

SEQ ID NO: 31668 - DNA, 23 bp, Artificial Sequence
  Synthetic
taagaactggugggaaatgguct

SEQ ID NO: 31669 - DNA, 20 bp, Artificial Sequence
  Synthetic
gcagattucaaccgggctug

SEQ ID NO: 31670 - DNA, 23 bp, Artificial Sequence
  Synthetic
gccaaagagaaugggatccagua

SEQ ID NO: 31671 - DNA, 30 bp, Artificial Sequence
  Synthetic
ttcaccaaatggautaagatgttcaugaat

SEQ ID NO: 31672 - DNA, 29 bp, Artificial Sequence
  Synthetic
ccaaatgagaaaautcagtgatatugcca

SEQ ID NO: 31673 - DNA, 28 bp, Artificial Sequence
  Synthetic
tgaagacctugaagagcagttaaaucat

SEQ ID NO: 31674 - DNA, 25 bp, Artificial Sequence
  Synthetic
gcaacattuaacacatgugacggaa

SEQ ID NO: 31675 - DNA, 24 bp, Artificial Sequence
  Synthetic
acgttgttgcauttgtctgttuca

SEQ ID NO: 31676 - DNA, 28 bp, Artificial Sequence
  Synthetic
ttttcttttagtugctgctctttuccag

SEQ ID NO: 31677 - DNA, 28 bp, Artificial Sequence
  Synthetic
gtgtcccagttugcattaacaaatagut

SEQ ID NO: 31678 - DNA, 21 bp, Artificial Sequence
  Synthetic
cgcagautcaggctucccaat

SEQ ID NO: 31679 - DNA, 30 bp, Artificial Sequence
  Synthetic
gcttcatttttgttutgcctttttggtauc

SEQ ID NO: 31680 - DNA, 29 bp, Artificial Sequence
  Synthetic
ccatggaggguactgaaataaattcuaca

SEQ ID NO: 31681 - DNA, 27 bp, Artificial Sequence
  Synthetic
aggtcggatugacattattcauagcaa

SEQ ID NO: 31682 - DNA, 27 bp, Artificial Sequence
  Synthetic
agtcaattgttcuggcactatgaauga

SEQ ID NO: 31683 - DNA, 26 bp, Artificial Sequence
  Synthetic
ctcacaagcccuattagaaguggaac

SEQ ID NO: 31684 - DNA, 23 bp, Artificial Sequence
  Synthetic
gttgcaaacacauacgtgggtut

SEQ ID NO: 31685 - DNA, 20 bp, Artificial Sequence
  Synthetic
gaatgcagugcguaggcaag

SEQ ID NO: 31686 - DNA, 21 bp, Artificial Sequence
  Synthetic
cctttcatcuctgggcucagg

SEQ ID NO: 31687 - DNA, 26 bp, Artificial Sequence
  Synthetic
gcagccagaagugcactatacataua

SEQ ID NO: 31688 - DNA, 23 bp, Artificial Sequence
  Synthetic
cctccagtggutcaagcaattut

SEQ ID NO: 31689 - DNA, 28 bp, Artificial Sequence
  Synthetic
gattagttuagcaauaggaggttgaaua

SEQ ID NO: 31690 - DNA, 28 bp, Artificial Sequence
  Synthetic
aggacaaagatgautgaagtaactggug

SEQ ID NO: 31691 - DNA, 28 bp, Artificial Sequence
  Synthetic
tgccatggtaugtctctgtacaatuaag

SEQ ID NO: 31692 - DNA, 27 bp, Artificial Sequence
  Synthetic
gaggtgacagcuatccagttactatuc

SEQ ID NO: 31693 - DNA, 24 bp, Artificial Sequence
  Synthetic
aaggtcaaugctctcctttucaca

SEQ ID NO: 31694 - DNA, 28 bp, Artificial Sequence
  Synthetic
aggcaactucagaatccaaattacuagg

SEQ ID NO: 31695 - DNA, 28 bp, Artificial Sequence
  Synthetic
cutttcagguaacagaaagaaagcaaca

SEQ ID NO: 31696 - DNA, 20 bp, Artificial Sequence
  Synthetic
ccugcgtattugccaccaga

SEQ ID NO: 31697 - DNA, 25 bp, Artificial Sequence
  Synthetic
agtgccttttuacactgtcctuaca

SEQ ID NO: 31698 - DNA, 29 bp, Artificial Sequence
  Synthetic
aagttagaaacacugcaacattttgtuga

SEQ ID NO: 31699 - DNA, 24 bp, Artificial Sequence
  Synthetic
acttaauccaggagtcccucacat

SEQ ID NO: 31700 - DNA, 28 bp, Artificial Sequence
  Synthetic
tgatagcttttcugtaatcctgcugaac

SEQ ID NO: 31701 - DNA, 29 bp, Artificial Sequence
  Synthetic
cgtgatattgugattgattttcaugcaga

SEQ ID NO: 31702 - DNA, 26 bp, Artificial Sequence
  Synthetic
gctcattttatcugagaggcctguat

SEQ ID NO: 31703 - DNA, 22 bp, Artificial Sequence
  Synthetic
gautcgcatatuggcacagacc

SEQ ID NO: 31704 - DNA, 29 bp, Artificial Sequence
  Synthetic
ggatttgtctuctatttggtactugacct

SEQ ID NO: 31705 - DNA, 26 bp, Artificial Sequence
  Synthetic
ttctttcttaggaaguttgggcaugt

SEQ ID NO: 31706 - DNA, 22 bp, Artificial Sequence
  Synthetic
gtggagcutgagctaugacact

SEQ ID NO: 31707 - DNA, 29 bp, Artificial Sequence
  Synthetic
aactgggatgtugtgagaaagaaattaua

SEQ ID NO: 31708 - DNA, 31 bp, Artificial Sequence
  Synthetic
actgctttctgtaautcatctggagtttuat

SEQ ID NO: 31709 - DNA, 28 bp, Artificial Sequence
  Synthetic
tgtttgtttgtttugtggaaggtctaug

SEQ ID NO: 31710 - DNA, 29 bp, Artificial Sequence
  Synthetic
tgagtgttaagttcuttgagttctgtcuc

SEQ ID NO: 31711 - DNA, 27 bp, Artificial Sequence
  Synthetic
gccatcagucccaattttacatttuct

SEQ ID NO: 31712 - DNA, 25 bp, Artificial Sequence
  Synthetic
ctgaaggucaaatgcttatguacct

SEQ ID NO: 31713 - DNA, 22 bp, Artificial Sequence
  Synthetic
aaatugagggacgcuggaagaa

SEQ ID NO: 31714 - DNA, 24 bp, Artificial Sequence
  Synthetic
gtgaatgcttgauaagcgtgctut

SEQ ID NO: 31715 - DNA, 22 bp, Artificial Sequence
  Synthetic
cgctaucaggagaccatgagug

SEQ ID NO: 31716 - DNA, 23 bp, Artificial Sequence
  Synthetic
agtaccutctggattuccccaca

SEQ ID NO: 31717 - DNA, 26 bp, Artificial Sequence
  Synthetic
aattcaaagcauagcccugaaagaga

SEQ ID NO: 31718 - DNA, 28 bp, Artificial Sequence
  Synthetic
cctattgatuatgctccaaauggaagga

SEQ ID NO: 31719 - DNA, 30 bp, Artificial Sequence
  Synthetic
tcatcgcttuctataatcagcuacaacaat

SEQ ID NO: 31720 - DNA, 28 bp, Artificial Sequence
  Synthetic
acaagtgctugtctgatataatucagct

SEQ ID NO: 31721 - DNA, 27 bp, Artificial Sequence
  Synthetic
tgaattactcauctttgctctcaugct

SEQ ID NO: 31722 - DNA, 22 bp, Artificial Sequence
  Synthetic
gcugaagugaaaacaccaccaa

SEQ ID NO: 31723 - DNA, 23 bp, Artificial Sequence
  Synthetic
aagggaacagaucctgguaaagc

SEQ ID NO: 31724 - DNA, 27 bp, Artificial Sequence
  Synthetic
aatctggttgctucttttgtagggtua

SEQ ID NO: 31725 - DNA, 25 bp, Artificial Sequence
  Synthetic
gaauaagtcagugacccagaagacg

SEQ ID NO: 31726 - DNA, 30 bp, Artificial Sequence
  Synthetic
actgggtttttauaagaccattgaaagcua

SEQ ID NO: 31727 - DNA, 28 bp, Artificial Sequence
  Synthetic
aattctttaatgtcutgcagtgccttut

SEQ ID NO: 31728 - DNA, 26 bp, Artificial Sequence
  Synthetic
ctgacctuaagttgttctuccaaagc

SEQ ID NO: 31729 - DNA, 28 bp, Artificial Sequence
  Synthetic
gagagcaaatcauttcaacacacatgua

SEQ ID NO: 31730 - DNA, 27 bp, Artificial Sequence
  Synthetic
acaaactgagaaucgtaactuaaccat

SEQ ID NO: 31731 - DNA, 29 bp, Artificial Sequence
  Synthetic
tgaagtacaagagcagaugaatctccuaa

SEQ ID NO: 31732 - DNA, 25 bp, Artificial Sequence
  Synthetic
tgaggaaaaaggaugacttgccaut

SEQ ID NO: 31733 - DNA, 29 bp, Artificial Sequence
  Synthetic
cagctttagaagaaguattatcgtggcut

SEQ ID NO: 31734 - DNA, 25 bp, Artificial Sequence
  Synthetic
cttggaagcagutctctggtttgua

SEQ ID NO: 31735 - DNA, 24 bp, Artificial Sequence
  Synthetic
tggtttttcccccucctctctauc

SEQ ID NO: 31736 - DNA, 28 bp, Artificial Sequence
  Synthetic
ctgttgagaatagugcatttgatgaugt

SEQ ID NO: 31737 - DNA, 30 bp, Artificial Sequence
  Synthetic
ccaaaaattgatgugtagtgttaatgugct

SEQ ID NO: 31738 - DNA, 24 bp, Artificial Sequence
  Synthetic
aaagtaggacaugatcuggaacca

SEQ ID NO: 31739 - DNA, 30 bp, Artificial Sequence
  Synthetic
acaatcaactcguaattatccacaggtuaa

SEQ ID NO: 31740 - DNA, 24 bp, Artificial Sequence
  Synthetic
ccucacaacaaaagucccaattua

SEQ ID NO: 31741 - DNA, 23 bp, Artificial Sequence
  Synthetic
cagccuccgcagaatttgaaaug

SEQ ID NO: 31742 - DNA, 29 bp, Artificial Sequence
  Synthetic
caatctacctaautagtgagcttgucaca

SEQ ID NO: 31743 - DNA, 28 bp, Artificial Sequence
  Synthetic
cctacuggagcaataaagttugaagaac

SEQ ID NO: 31744 - DNA, 27 bp, Artificial Sequence
  Synthetic
tcatggccagcutctaattgtattugt

SEQ ID NO: 31745 - DNA, 24 bp, Artificial Sequence
  Synthetic
gggagctgutggaattcaaauaga

SEQ ID NO: 31746 - DNA, 31 bp, Artificial Sequence
  Synthetic
gtcctttacacaatuaaaagaagatgctgut

SEQ ID NO: 31747 - DNA, 28 bp, Artificial Sequence
  Synthetic
gaaagaggcctuactgcagaatatagut

SEQ ID NO: 31748 - DNA, 21 bp, Artificial Sequence
  Synthetic
ggccgtgaccutctcactcua

SEQ ID NO: 31749 - DNA, 23 bp, Artificial Sequence
  Synthetic
ttctttgggaaggcugccttuaa

SEQ ID NO: 31750 - DNA, 28 bp, Artificial Sequence
  Synthetic
attttgactttucagttgagatgaugcc

SEQ ID NO: 31751 - DNA, 28 bp, Artificial Sequence
  Synthetic
ttcugaaatcagcttuggagagaagaaa

SEQ ID NO: 31752 - DNA, 24 bp, Artificial Sequence
  Synthetic
gatttggacacccuggcuaaagaa

SEQ ID NO: 31753 - DNA, 26 bp, Artificial Sequence
  Synthetic
actgtttcacutaaagcaagucagga

SEQ ID NO: 31754 - DNA, 25 bp, Artificial Sequence
  Synthetic
ggaaggagacgcgauatugaaaaga

SEQ ID NO: 31755 - DNA, 28 bp, Artificial Sequence
  Synthetic
tgggacaguaaaaggcaataatagctut

SEQ ID NO: 31756 - DNA, 27 bp, Artificial Sequence
  Synthetic
ctgaagaaaacaaauatgacugccaca

SEQ ID NO: 31757 - DNA, 26 bp, Artificial Sequence
  Synthetic
tcctccattccutgtttcttgctuac

SEQ ID NO: 31758 - DNA, 22 bp, Artificial Sequence
  Synthetic
cctcagcuccagaagccuaaat

SEQ ID NO: 31759 - DNA, 26 bp, Artificial Sequence
  Synthetic
caaagttaagcacguattacagugca

SEQ ID NO: 31760 - DNA, 22 bp, Artificial Sequence
  Synthetic
tctaggaagugcctgagcuagt

SEQ ID NO: 31761 - DNA, 21 bp, Artificial Sequence
  Synthetic
ggcggcuacacgactttcaut

SEQ ID NO: 31762 - DNA, 22 bp, Artificial Sequence
  Synthetic
cgguagcaggacaacagttuct

SEQ ID NO: 31763 - DNA, 24 bp, Artificial Sequence
  Synthetic
gctaatgtgcacutgcaatctcug

SEQ ID NO: 31764 - DNA, 30 bp, Artificial Sequence
  Synthetic
tttggatgttttcaauggtactatccugaa

SEQ ID NO: 31765 - DNA, 26 bp, Artificial Sequence
  Synthetic
ttgagctctucggtagtaggtauagg

SEQ ID NO: 31766 - DNA, 28 bp, Artificial Sequence
  Synthetic
gctgttgutgcattttauacagagaaat

SEQ ID NO: 31767 - DNA, 24 bp, Artificial Sequence
  Synthetic
gaaaaaccctutgagcatccucag

SEQ ID NO: 31768 - DNA, 25 bp, Artificial Sequence
  Synthetic
caaagaagatgcuggagattctuca

SEQ ID NO: 31769 - DNA, 28 bp, Artificial Sequence
  Synthetic
ttggtcccatugaatatctcgttuacaa

SEQ ID NO: 31770 - DNA, 26 bp, Artificial Sequence
  Synthetic
gctttggcattcugaagtacttggua

SEQ ID NO: 31771 - DNA, 30 bp, Artificial Sequence
  Synthetic
caaattcuatattcacaagtugggaaaggc

SEQ ID NO: 31772 - DNA, 23 bp, Artificial Sequence
  Synthetic
ggttcttcugtcagaggatuggg

SEQ ID NO: 31773 - DNA, 21 bp, Artificial Sequence
  Synthetic
cagccagacuacagugaacga

SEQ ID NO: 31774 - DNA, 22 bp, Artificial Sequence
  Synthetic
caggcagtuggcagttgauaga

SEQ ID NO: 31775 - DNA, 26 bp, Artificial Sequence
  Synthetic
gacaacugggagaagggtgauaaaaa

SEQ ID NO: 31776 - DNA, 20 bp, Artificial Sequence
  Synthetic
gtgttgggcucatggatugg

SEQ ID NO: 31777 - DNA, 24 bp, Artificial Sequence
  Synthetic
tttccctcaucctctttctccuca

SEQ ID NO: 31778 - DNA, 22 bp, Artificial Sequence
  Synthetic
tcttttctgcccaugtacccut

SEQ ID NO: 31779 - DNA, 26 bp, Artificial Sequence
  Synthetic
aaaaaggagauccacctcuaccaaac

SEQ ID NO: 31780 - DNA, 22 bp, Artificial Sequence
  Synthetic
gatccaacccaccucttctuca

SEQ ID NO: 31781 - DNA, 25 bp, Artificial Sequence
  Synthetic
tgccttcatttuctccccaatcuag

SEQ ID NO: 31782 - DNA, 17 bp, Artificial Sequence
  Synthetic
cgatggtucccggcgua

SEQ ID NO: 31783 - DNA, 21 bp, Artificial Sequence
  Synthetic
cguagctcaagaucccgaagg

SEQ ID NO: 31784 - DNA, 22 bp, Artificial Sequence
  Synthetic
aaacaacuaaacgccgcttucc

SEQ ID NO: 31785 - DNA, 22 bp, Artificial Sequence
  Synthetic
tcttccagccutttcctucagc

SEQ ID NO: 31786 - DNA, 23 bp, Artificial Sequence
  Synthetic
ggataacttcuggctggtgacug

SEQ ID NO: 31787 - DNA, 22 bp, Artificial Sequence
  Synthetic
gagctgacacccaugtagctua

SEQ ID NO: 31788 - DNA, 23 bp, Artificial Sequence
  Synthetic
gcacccagccaguagaaggauat

SEQ ID NO: 31789 - DNA, 23 bp, Artificial Sequence
  Synthetic
cggattgccaccuctacatcaug

SEQ ID NO: 31790 - DNA, 21 bp, Artificial Sequence
  Synthetic
gccccagtugtggttctctuc

SEQ ID NO: 31791 - DNA, 25 bp, Artificial Sequence
  Synthetic
ccagtaccaaaautccaagcctuac

SEQ ID NO: 31792 - DNA, 22 bp, Artificial Sequence
  Synthetic
gatggtgugagcagtcacucat

SEQ ID NO: 31793 - DNA, 24 bp, Artificial Sequence
  Synthetic
gctatctcucaatgcttcctuggg

SEQ ID NO: 31794 - DNA, 23 bp, Artificial Sequence
  Synthetic
ggctctggccutttatatgccut

SEQ ID NO: 31795 - DNA, 28 bp, Artificial Sequence
  Synthetic
ctatccccatccuttcctcaaacataut

SEQ ID NO: 31796 - DNA, 23 bp, Artificial Sequence
  Synthetic
ccctacctuactcctccttcuct

SEQ ID NO: 31797 - DNA, 27 bp, Artificial Sequence
  Synthetic
cttgttctcttauctctgccctcuaac

SEQ ID NO: 31798 - DNA, 29 bp, Artificial Sequence
  Synthetic
tgatcactcttatuattgccttaggtgug

SEQ ID NO: 31799 - DNA, 25 bp, Artificial Sequence
  Synthetic
tgtgggagaaaacaucatgucgaat

SEQ ID NO: 31800 - DNA, 23 bp, Artificial Sequence
  Synthetic
caatctggucttctctcuccact

SEQ ID NO: 31801 - DNA, 22 bp, Artificial Sequence
  Synthetic
gccacgcucaggattgaactua

SEQ ID NO: 31802 - DNA, 23 bp, Artificial Sequence
  Synthetic
cagatgucgagaaggaggugaag

SEQ ID NO: 31803 - DNA, 22 bp, Artificial Sequence
  Synthetic
cacatccucagaacagcuccaa

SEQ ID NO: 31804 - DNA, 22 bp, Artificial Sequence
  Synthetic
agtcatgucccaatgtcctguc

SEQ ID NO: 31805 - DNA, 24 bp, Artificial Sequence
  Synthetic
aatatguacagggaggtgcuaggt

SEQ ID NO: 31806 - DNA, 21 bp, Artificial Sequence
  Synthetic
tctcacucccactgccctuat

SEQ ID NO: 31807 - DNA, 23 bp, Artificial Sequence
  Synthetic
ctatatggcaugaactccugcct

SEQ ID NO: 31808 - DNA, 23 bp, Artificial Sequence
  Synthetic
ccagaggcutgaatctgttugga

SEQ ID NO: 31809 - DNA, 24 bp, Artificial Sequence
  Synthetic
ccccttacctuccacctctctuac

SEQ ID NO: 31810 - DNA, 25 bp, Artificial Sequence
  Synthetic
ctaggcaagagucttagugagaacc

SEQ ID NO: 31811 - DNA, 21 bp, Artificial Sequence
  Synthetic
ggttgtaguacctcccgggua

SEQ ID NO: 31812 - DNA, 22 bp, Artificial Sequence
  Synthetic
ctccacacugagtcatggtguc

SEQ ID NO: 31813 - DNA, 27 bp, Artificial Sequence
  Synthetic
tccagtgtgtautgaaatttgagguct

SEQ ID NO: 31814 - DNA, 22 bp, Artificial Sequence
  Synthetic
ctgcctccguggattctactut

SEQ ID NO: 31815 - DNA, 23 bp, Artificial Sequence
  Synthetic
cuatacacacttcuggcaccact

SEQ ID NO: 31816 - DNA, 30 bp, Artificial Sequence
  Synthetic
actatacattgtgutccttaacaacuccag

SEQ ID NO: 31817 - DNA, 22 bp, Artificial Sequence
  Synthetic
tcattguccagcagtcgatgug

SEQ ID NO: 31818 - DNA, 24 bp, Artificial Sequence
  Synthetic
gtgattcaatgutgcaggagauca

SEQ ID NO: 31819 - DNA, 21 bp, Artificial Sequence
  Synthetic
acacatggagcugaacgugag

SEQ ID NO: 31820 - DNA, 22 bp, Artificial Sequence
  Synthetic
ccctgtgucctctgtctgtuct

SEQ ID NO: 31821 - DNA, 23 bp, Artificial Sequence
  Synthetic
caatcttgguccactcccuaagc

SEQ ID NO: 31822 - DNA, 25 bp, Artificial Sequence
  Synthetic
ctgataaacatautggctgctgugg

SEQ ID NO: 31823 - DNA, 21 bp, Artificial Sequence
  Synthetic
ttttgcacuccgcattuccag

SEQ ID NO: 31824 - DNA, 29 bp, Artificial Sequence
  Synthetic
atcttcacctctutcttctttggtttuct

SEQ ID NO: 31825 - DNA, 23 bp, Artificial Sequence
  Synthetic
gattccaguaaccgcaaacctug

SEQ ID NO: 31826 - DNA, 25 bp, Artificial Sequence
  Synthetic
ctacaaatgctugcagtcttctgut

SEQ ID NO: 31827 - DNA, 20 bp, Artificial Sequence
  Synthetic
tgugtgguagagcagcaacc

SEQ ID NO: 31828 - DNA, 21 bp, Artificial Sequence
  Synthetic
cctgctccuaccctgcuagag

SEQ ID NO: 31829 - DNA, 22 bp, Artificial Sequence
  Synthetic
cgtcatgaagugagaggctgug

SEQ ID NO: 31830 - DNA, 23 bp, Artificial Sequence
  Synthetic
tgaggagcuatggatgucaagga

SEQ ID NO: 31831 - DNA, 22 bp, Artificial Sequence
  Synthetic
tgccgguacacagaggtctuat

SEQ ID NO: 31832 - DNA, 22 bp, Artificial Sequence
  Synthetic
cacutgggatctucacaaggac

SEQ ID NO: 31833 - DNA, 23 bp, Artificial Sequence
  Synthetic
agtctcacaaucccaggctctua

SEQ ID NO: 31834 - DNA, 25 bp, Artificial Sequence
  Synthetic
cacccttcuaccaatcctactctug

SEQ ID NO: 31835 - DNA, 25 bp, Artificial Sequence
  Synthetic
caaatgctcccutatacctcugcat

SEQ ID NO: 31836 - DNA, 29 bp, Artificial Sequence
  Synthetic
catgataagtaccaugactccaatgagug

SEQ ID NO: 31837 - DNA, 23 bp, Artificial Sequence
  Synthetic
ccagatgaaaucccagtgcctua

SEQ ID NO: 31838 - DNA, 23 bp, Artificial Sequence
  Synthetic
ggatugggaaaggaggtugaaga

SEQ ID NO: 31839 - DNA, 23 bp, Artificial Sequence
  Synthetic
ccgcccccuaaatttattccaug

SEQ ID NO: 31840 - DNA, 26 bp, Artificial Sequence
  Synthetic
agtaccaacatauttggacgctacug

SEQ ID NO: 31841 - DNA, 21 bp, Artificial Sequence
  Synthetic
caacagcucaatgccucacat

SEQ ID NO: 31842 - DNA, 22 bp, Artificial Sequence
  Synthetic
ccaucatgucagacacggacag

SEQ ID NO: 31843 - DNA, 21 bp, Artificial Sequence
  Synthetic
gcacctccutcctctgctuag

SEQ ID NO: 31844 - DNA, 24 bp, Artificial Sequence
  Synthetic
tgggaattauctgagggagugagg

SEQ ID NO: 31845 - DNA, 26 bp, Artificial Sequence
  Synthetic
gttcaagccaauacaccaaagaauca

SEQ ID NO: 31846 - DNA, 22 bp, Artificial Sequence
  Synthetic
tggcatugagccatgtgtauag

SEQ ID NO: 31847 - DNA, 24 bp, Artificial Sequence
  Synthetic
agtcagaggaacuactgaagucca

SEQ ID NO: 31848 - DNA, 23 bp, Artificial Sequence
  Synthetic
gctgctgtttucccatctgacut

SEQ ID NO: 31849 - DNA, 23 bp, Artificial Sequence
  Synthetic
gattctacugagcactccaccuc

SEQ ID NO: 31850 - DNA, 24 bp, Artificial Sequence
  Synthetic
tttctctaagutcccctccugact

SEQ ID NO: 31851 - DNA, 31 bp, Artificial Sequence
  Synthetic
ctcttggtttgguatctgtcactttatcuat

SEQ ID NO: 31852 - DNA, 28 bp, Artificial Sequence
  Synthetic
ctttaatguggaatttggaguggaaacc

SEQ ID NO: 31853 - DNA, 23 bp, Artificial Sequence
  Synthetic
gatatcaucctcccaaugcagct

SEQ ID NO: 31854 - DNA, 30 bp, Artificial Sequence
  Synthetic
acatgagtaacuctttttatcttugccaga

SEQ ID NO: 31855 - DNA, 28 bp, Artificial Sequence
  Synthetic
gtccatataccagaucctcattgucaat

SEQ ID NO: 31856 - DNA, 24 bp, Artificial Sequence
  Synthetic
aggaaaggugaatctucagggaga

SEQ ID NO: 31857 - DNA, 28 bp, Artificial Sequence
  Synthetic
cuttctttgttcttcuaaacaccaagcc

SEQ ID NO: 31858 - DNA, 21 bp, Artificial Sequence
  Synthetic
ggagaaccccauggctttgut

SEQ ID NO: 31859 - DNA, 21 bp, Artificial Sequence
  Synthetic
tggaacugccggagtttgaug

SEQ ID NO: 31860 - DNA, 27 bp, Artificial Sequence
  Synthetic
tgtttttggtgugtttgtctcagatug

SEQ ID NO: 31861 - DNA, 23 bp, Artificial Sequence
  Synthetic
agatcaccauctttgcctgugag

SEQ ID NO: 31862 - DNA, 27 bp, Artificial Sequence
  Synthetic
ctaaataactgggucttctgtgtucct

SEQ ID NO: 31863 - DNA, 31 bp, Artificial Sequence
  Synthetic
actggttcctcatutatcaatttccttagut

SEQ ID NO: 31864 - DNA, 31 bp, Artificial Sequence
  Synthetic
ctttttcgtgcuccaatttatcttcauaaga

SEQ ID NO: 31865 - DNA, 21 bp, Artificial Sequence
  Synthetic
acaacccaaucccctcccuat

SEQ ID NO: 31866 - DNA, 26 bp, Artificial Sequence
  Synthetic
ttgctgtcaataaauatcagggccut

SEQ ID NO: 31867 - DNA, 24 bp, Artificial Sequence
  Synthetic
tggtgtcuaagaggaaggtgtuca

SEQ ID NO: 31868 - DNA, 23 bp, Artificial Sequence
  Synthetic
caagtgtctgcuagaggtgacug

SEQ ID NO: 31869 - DNA, 28 bp, Artificial Sequence
  Synthetic
gcatctaagtcautctgctacctuaact

SEQ ID NO: 31870 - DNA, 25 bp, Artificial Sequence
  Synthetic
tttgtgtgtggcuatttgtctcgua

SEQ ID NO: 31871 - DNA, 23 bp, Artificial Sequence
  Synthetic
cctctttguaacgctcttgaugc

SEQ ID NO: 31872 - DNA, 28 bp, Artificial Sequence
  Synthetic
gtatgcctttutaaggttgattucccaa

SEQ ID NO: 31873 - DNA, 28 bp, Artificial Sequence
  Synthetic
catgttctcaaugttctttcccattuct

SEQ ID NO: 31874 - DNA, 25 bp, Artificial Sequence
  Synthetic
gtggcatgtugaactttgatagcuc

SEQ ID NO: 31875 - DNA, 23 bp, Artificial Sequence
  Synthetic
cagtggcagaagagutaaggcua

SEQ ID NO: 31876 - DNA, 23 bp, Artificial Sequence
  Synthetic
tttttcttccuctgctgcucaca

SEQ ID NO: 31877 - DNA, 29 bp, Artificial Sequence
  Synthetic
cgttagctgtaaucacaccacattauact

SEQ ID NO: 31878 - DNA, 25 bp, Artificial Sequence
  Synthetic
gactaacaaattcugccccctcuat

SEQ ID NO: 31879 - DNA, 24 bp, Artificial Sequence
  Synthetic
cacttcctgccuggtatctctuac

SEQ ID NO: 31880 - DNA, 25 bp, Artificial Sequence
  Synthetic
tttttggtcugaggaagcattcuga

SEQ ID NO: 31881 - DNA, 29 bp, Artificial Sequence
  Synthetic
gccttgacauccctactatagatauccaa

SEQ ID NO: 31882 - DNA, 26 bp, Artificial Sequence
  Synthetic
cagtcaaugcaaaggttguaaaggac

SEQ ID NO: 31883 - DNA, 27 bp, Artificial Sequence
  Synthetic
tgcaatcacggaacauttgattctuac

SEQ ID NO: 31884 - DNA, 24 bp, Artificial Sequence
  Synthetic
cccggcaaautgtccttaacttut

SEQ ID NO: 31885 - DNA, 25 bp, Artificial Sequence
  Synthetic
agtattuggcacagagacagctuac

SEQ ID NO: 31886 - DNA, 23 bp, Artificial Sequence
  Synthetic
gaccatacguaaggtgagugagt

SEQ ID NO: 31887 - DNA, 31 bp, Artificial Sequence
  Synthetic
gacggattcauggaaagaaaataaugagaaa

SEQ ID NO: 31888 - DNA, 32 bp, Artificial Sequence
  Synthetic
ataagctccatgaagauagatatttttgtcut

SEQ ID NO: 31889 - DNA, 24 bp, Artificial Sequence
  Synthetic
ccaggcttuctaattctgctucct

SEQ ID NO: 31890 - DNA, 28 bp, Artificial Sequence
  Synthetic
tccctttcctagauagaagctaagtugt

SEQ ID NO: 31891 - DNA, 31 bp, Artificial Sequence
  Synthetic
gcaggcacaauaacaatcttauaaagagaaa

SEQ ID NO: 31892 - DNA, 26 bp, Artificial Sequence
  Synthetic
agatgtgugagagttactagttuggg

SEQ ID NO: 31893 - DNA, 28 bp, Artificial Sequence
  Synthetic
gacatcatgctutcttcattttccaugt

SEQ ID NO: 31894 - DNA, 23 bp, Artificial Sequence
  Synthetic
gatccttuggtggcacugagaat

SEQ ID NO: 31895 - DNA, 20 bp, Artificial Sequence
  Synthetic
tggaccuggcttaguacgct

SEQ ID NO: 31896 - DNA, 26 bp, Artificial Sequence
  Synthetic
caataatttctuggcctttgcucaga

SEQ ID NO: 31897 - DNA, 28 bp, Artificial Sequence
  Synthetic
tctagatgtcauggatgaagaatccuga

SEQ ID NO: 31898 - DNA, 22 bp, Artificial Sequence
  Synthetic
tgtgcagcuatcagtcttuggt

SEQ ID NO: 31899 - DNA, 22 bp, Artificial Sequence
  Synthetic
gtgagacugctgaacacatugc

SEQ ID NO: 31900 - DNA, 22 bp, Artificial Sequence
  Synthetic
tctctgtggaggutgcaaagug

SEQ ID NO: 31901 - DNA, 22 bp, Artificial Sequence
  Synthetic
gcaacaagucctgaatccctug

SEQ ID NO: 31902 - DNA, 30 bp, Artificial Sequence
  Synthetic
accatgtatgatauatcttccactgcuact

SEQ ID NO: 31903 - DNA, 24 bp, Artificial Sequence
  Synthetic
tcatcactgaguacatggccaaug

SEQ ID NO: 31904 - DNA, 28 bp, Artificial Sequence
  Synthetic
cctctcttacugtaagtcatcttuaagc

SEQ ID NO: 31905 - DNA, 23 bp, Artificial Sequence
  Synthetic
acgtggccaucaagatgaucaaa

SEQ ID NO: 31906 - DNA, 22 bp, Artificial Sequence
  Synthetic
gcagaacagugtaccucaagga

SEQ ID NO: 31907 - DNA, 24 bp, Artificial Sequence
  Synthetic
gcatgaccuctctctctgttucag

SEQ ID NO: 31908 - DNA, 21 bp, Artificial Sequence
  Synthetic
ggcacagcaucaaggagcuat

SEQ ID NO: 31909 - DNA, 26 bp, Artificial Sequence
  Synthetic
agacagcttcuttttcgttgttucag

SEQ ID NO: 31910 - DNA, 23 bp, Artificial Sequence
  Synthetic
gagagagagagutcctccuggaa

SEQ ID NO: 31911 - DNA, 24 bp, Artificial Sequence
  Synthetic
gtgggcataugaatctgtctccug

SEQ ID NO: 31912 - DNA, 30 bp, Artificial Sequence
  Synthetic
gctttccuccaagataaaatattcaucacc

SEQ ID NO: 31913 - DNA, 27 bp, Artificial Sequence
  Synthetic
aaaccctcctaccutttctcctaacua

SEQ ID NO: 31914 - DNA, 21 bp, Artificial Sequence
  Synthetic
acagacccutgggagagugat

SEQ ID NO: 31915 - DNA, 26 bp, Artificial Sequence
  Synthetic
tgatctctctcutctttcctgcuaca

SEQ ID NO: 31916 - DNA, 21 bp, Artificial Sequence
  Synthetic
cccaccaccccutctaatugt

SEQ ID NO: 31917 - DNA, 28 bp, Artificial Sequence
  Synthetic
agcaatgcaucaaccaataaccatttut

SEQ ID NO: 31918 - DNA, 22 bp, Artificial Sequence
  Synthetic
ccccucctccuaccaacgaaaa

SEQ ID NO: 31919 - DNA, 25 bp, Artificial Sequence
  Synthetic
ctaaactucaagaagcgcctgttuc

SEQ ID NO: 31920 - DNA, 27 bp, Artificial Sequence
  Synthetic
gccttgagcutttaaagtgaauggaga

SEQ ID NO: 31921 - DNA, 23 bp, Artificial Sequence
  Synthetic
tgtaatccugcctgcttcaucac

SEQ ID NO: 31922 - DNA, 26 bp, Artificial Sequence
  Synthetic
gauagtaacaucaagagcaagggaaa

SEQ ID NO: 31923 - DNA, 25 bp, Artificial Sequence
  Synthetic
caaagctcuccttcaggauaaggac

SEQ ID NO: 31924 - DNA, 23 bp, Artificial Sequence
  Synthetic
tcctcccaggaacuttacctgua

SEQ ID NO: 31925 - DNA, 26 bp, Artificial Sequence
  Synthetic
tcttggacuggacatctttuaaccag

SEQ ID NO: 31926 - DNA, 25 bp, Artificial Sequence
  Synthetic
tttgaaggagaccutggtttcctut

SEQ ID NO: 31927 - DNA, 23 bp, Artificial Sequence
  Synthetic
ccccagcuggaaattcatttcut

SEQ ID NO: 31928 - DNA, 22 bp, Artificial Sequence
  Synthetic
agcagatcuactccccagucag

SEQ ID NO: 31929 - DNA, 26 bp, Artificial Sequence
  Synthetic
tgtgcttctacaauggtgactcttut

SEQ ID NO: 31930 - DNA, 21 bp, Artificial Sequence
  Synthetic
gggagccauccaacagtcauc

SEQ ID NO: 31931 - DNA, 28 bp, Artificial Sequence
  Synthetic
gcctaataaaugggaggtacctaagugt

SEQ ID NO: 31932 - DNA, 20 bp, Artificial Sequence
  Synthetic
cgcagcccagaugtagtuct

SEQ ID NO: 31933 - DNA, 21 bp, Artificial Sequence
  Synthetic
gagggugattggtuagcggaa

SEQ ID NO: 31934 - DNA, 25 bp, Artificial Sequence
  Synthetic
cttggatttguactctggactcuga

SEQ ID NO: 31935 - DNA, 25 bp, Artificial Sequence
  Synthetic
aaacuaaagcagacatuccagagct

SEQ ID NO: 31936 - DNA, 24 bp, Artificial Sequence
  Synthetic
gtcctccauaaatgaagucagcgt

SEQ ID NO: 31937 - DNA, 26 bp, Artificial Sequence
  Synthetic
tctactaagctguctgtgtcctttug

SEQ ID NO: 31938 - DNA, 21 bp, Artificial Sequence
  Synthetic
tggaggaagaguccgucaaca

SEQ ID NO: 31939 - DNA, 22 bp, Artificial Sequence
  Synthetic
cccactctuttgagcaagucct

SEQ ID NO: 31940 - DNA, 22 bp, Artificial Sequence
  Synthetic
gggctttcauattggcagaugt

SEQ ID NO: 31941 - DNA, 31 bp, Artificial Sequence
  Synthetic
cagtgtcagtgugtattagtttggtuagaat

SEQ ID NO: 31942 - DNA, 24 bp, Artificial Sequence
  Synthetic
gtgtaaatguaacgcactcccuga

SEQ ID NO: 31943 - DNA, 23 bp, Artificial Sequence
  Synthetic
acugtagcttcuaccgaaccaga

SEQ ID NO: 31944 - DNA, 24 bp, Artificial Sequence
  Synthetic
gggttgggaguaagagauagagag

SEQ ID NO: 31945 - DNA, 23 bp, Artificial Sequence
  Synthetic
actgttagtcaugtgggcatgug

SEQ ID NO: 31946 - DNA, 25 bp, Artificial Sequence
  Synthetic
gaagcagtcuttgcatttcaguaca

SEQ ID NO: 31947 - DNA, 26 bp, Artificial Sequence
  Synthetic
ccccagcttauttcttatgaatgucg

SEQ ID NO: 31948 - DNA, 20 bp, Artificial Sequence
  Synthetic
gcugttccucaaacgacacg

SEQ ID NO: 31949 - DNA, 19 bp, Artificial Sequence
  Synthetic
cccttctcuccggcggaua

SEQ ID NO: 31950 - DNA, 30 bp, Artificial Sequence
  Synthetic
acagactagatttguataacaggacaguga

SEQ ID NO: 31951 - DNA, 28 bp, Artificial Sequence
  Synthetic
aaagctagtaccutgaacacatcugaag

SEQ ID NO: 31952 - DNA, 24 bp, Artificial Sequence
  Synthetic
gatctggaccutcttctgtuaacc

SEQ ID NO: 31953 - DNA, 26 bp, Artificial Sequence
  Synthetic
ggaacttcaaacagugttcctcauca

SEQ ID NO: 31954 - DNA, 26 bp, Artificial Sequence
  Synthetic
ccctgcauataaggaatgtugaaaga

SEQ ID NO: 31955 - DNA, 28 bp, Artificial Sequence
  Synthetic
caacaaggaaaucaggaacuttttagua

SEQ ID NO: 31956 - DNA, 29 bp, Artificial Sequence
  Synthetic
tcagtgaataaaaugtaagtcccatguga

SEQ ID NO: 31957 - DNA, 24 bp, Artificial Sequence
  Synthetic
tgccaggauatgtttgaugagacc

SEQ ID NO: 31958 - DNA, 25 bp, Artificial Sequence
  Synthetic
tgaacauacctttgtauggaagcga

SEQ ID NO: 31959 - DNA, 26 bp, Artificial Sequence
  Synthetic
ccaaaaggaaautccagaagtgtuct

SEQ ID NO: 31960 - DNA, 25 bp, Artificial Sequence
  Synthetic
attaaccutttgtaacuccccggaa

SEQ ID NO: 31961 - DNA, 29 bp, Artificial Sequence
  Synthetic
caagcaactgaacuttacatgaacaugaa

SEQ ID NO: 31962 - DNA, 27 bp, Artificial Sequence
  Synthetic
ctgugagatttgtattucacaacacca

SEQ ID NO: 31963 - DNA, 25 bp, Artificial Sequence
  Synthetic
ggctacaggugagttaaccactuac

SEQ ID NO: 31964 - DNA, 31 bp, Artificial Sequence
  Synthetic
aagatagtgttatccugcttatttgatgcut

SEQ ID NO: 31965 - DNA, 25 bp, Artificial Sequence
  Synthetic
gatcaagcctuaaccttctctguga

SEQ ID NO: 31966 - DNA, 26 bp, Artificial Sequence
  Synthetic
accgaautcttuggagaggaacaaat

SEQ ID NO: 31967 - DNA, 29 bp, Artificial Sequence
  Synthetic
gctgaattactgauctgttctgagtcuaa

SEQ ID NO: 31968 - DNA, 24 bp, Artificial Sequence
  Synthetic
gatgcatgttugtgtctgtctgut

SEQ ID NO: 31969 - DNA, 27 bp, Artificial Sequence
  Synthetic
cagagacaatgguaaagggaaaacuca

SEQ ID NO: 31970 - DNA, 24 bp, Artificial Sequence
  Synthetic
tcagcaaagacuctgtaaccaucc

SEQ ID NO: 31971 - DNA, 27 bp, Artificial Sequence
  Synthetic
aggtttatgtctugggacagttctuac

SEQ ID NO: 31972 - DNA, 22 bp, Artificial Sequence
  Synthetic
gcttcctgcugctcttctgauc

SEQ ID NO: 31973 - DNA, 23 bp, Artificial Sequence
  Synthetic
gcttctuaagctttggucgcaaa

SEQ ID NO: 31974 - DNA, 26 bp, Artificial Sequence
  Synthetic
cagcagctguaagttcctcttactut

SEQ ID NO: 31975 - DNA, 22 bp, Artificial Sequence
  Synthetic
cgtgttgcaugaagcactctua

SEQ ID NO: 31976 - DNA, 21 bp, Artificial Sequence
  Synthetic
gctugggagcgaagaagacua

SEQ ID NO: 31977 - DNA, 29 bp, Artificial Sequence
  Synthetic
ctttggctuggcaatataagtcuaaaagt

SEQ ID NO: 31978 - DNA, 24 bp, Artificial Sequence
  Synthetic
gutccctttaucgaggaagaccac

SEQ ID NO: 31979 - DNA, 24 bp, Artificial Sequence
  Synthetic
aggacaacgagauaagcaccttuc

SEQ ID NO: 31980 - DNA, 23 bp, Artificial Sequence
  Synthetic
cctcctcctcuctctcggttaut

SEQ ID NO: 31981 - DNA, 28 bp, Artificial Sequence
  Synthetic
tgacaaacctttuctttaccttcaccut

SEQ ID NO: 31982 - DNA, 21 bp, Artificial Sequence
  Synthetic
ccagcaaagggugtcgtttuc

SEQ ID NO: 31983 - DNA, 27 bp, Artificial Sequence
  Synthetic
gcctttctgucatgctgauaaggaaat

SEQ ID NO: 31984 - DNA, 28 bp, Artificial Sequence
  Synthetic
gctggataagguttcttcatgttcuaca

SEQ ID NO: 31985 - DNA, 25 bp, Artificial Sequence
  Synthetic
gggaagaaatugaagtgccttucag

SEQ ID NO: 31986 - DNA, 25 bp, Artificial Sequence
  Synthetic
acaagttctucaagggacagaaugt

SEQ ID NO: 31987 - DNA, 26 bp, Artificial Sequence
  Synthetic
aggctctgaaucttggaattgaagug

SEQ ID NO: 31988 - DNA, 22 bp, Artificial Sequence
  Synthetic
cctgggttcautagctggguat

SEQ ID NO: 31989 - DNA, 23 bp, Artificial Sequence
  Synthetic
gutcaagaacaacuacccaagcc

SEQ ID NO: 31990 - DNA, 26 bp, Artificial Sequence
  Synthetic
gcagcacauctaaaataauccccaga

SEQ ID NO: 31991 - DNA, 28 bp, Artificial Sequence
  Synthetic
ctgcttactgaaacaugaaaaccttgut

SEQ ID NO: 31992 - DNA, 19 bp, Artificial Sequence
  Synthetic
ctgucccgggaaguccaag

SEQ ID NO: 31993 - DNA, 22 bp, Artificial Sequence
  Synthetic
ggtagcugcgaggaaactttug

SEQ ID NO: 31994 - DNA, 25 bp, Artificial Sequence
  Synthetic
ctagtggctugtattcctagtugct

SEQ ID NO: 31995 - DNA, 26 bp, Artificial Sequence
  Synthetic
caaatcttatgucagcaggtcctuac

SEQ ID NO: 31996 - DNA, 27 bp, Artificial Sequence
  Synthetic
ggtaaaatcacuctgaaagcatauggt

SEQ ID NO: 31997 - DNA, 28 bp, Artificial Sequence
  Synthetic
ccataggaatttuctcctctacttgucg

SEQ ID NO: 31998 - DNA, 28 bp, Artificial Sequence
  Synthetic
aggtaagtgaaucttctcccttaatuga

SEQ ID NO: 31999 - DNA, 24 bp, Artificial Sequence
  Synthetic
gctgaggagagcacuggaattuac

SEQ ID NO: 32000 - DNA, 25 bp, Artificial Sequence
  Synthetic
tccagagaugaggtcaagcaauact

SEQ ID NO: 32001 - DNA, 28 bp, Artificial Sequence
  Synthetic
caagagaaacgutaattgcagtacucac

SEQ ID NO: 32002 - DNA, 26 bp, Artificial Sequence
  Synthetic
gtcggtatgagugggaaacgaaauaa

SEQ ID NO: 32003 - DNA, 27 bp, Artificial Sequence
  Synthetic
catatguaagctaagtguccagcacat

SEQ ID NO: 32004 - DNA, 27 bp, Artificial Sequence
  Synthetic
gccgaactttucttcttagacatucat

SEQ ID NO: 32005 - DNA, 33 bp, Artificial Sequence
  Synthetic
aaggaatttaaaaataugtccattccacuaaac

SEQ ID NO: 32006 - DNA, 19 bp, Artificial Sequence
  Synthetic
tgacatccutggccaugct

SEQ ID NO: 32007 - DNA, 32 bp, Artificial Sequence
  Synthetic
acaactagttttaaaaucctgaatggtaguga

SEQ ID NO: 32008 - DNA, 25 bp, Artificial Sequence
  Synthetic
agtttcagucccagtttttcaugct

SEQ ID NO: 32009 - DNA, 28 bp, Artificial Sequence
  Synthetic
gactacatacattutggcaagcctaaug

SEQ ID NO: 32010 - DNA, 31 bp, Artificial Sequence
  Synthetic
ccccttctatacuaaagaaatcaatcgagut

SEQ ID NO: 32011 - DNA, 27 bp, Artificial Sequence
  Synthetic
acattatcuaaggcaagcagtugacat

SEQ ID NO: 32012 - DNA, 22 bp, Artificial Sequence
  Synthetic
cccatgugcaaactcacttcug

SEQ ID NO: 32013 - DNA, 22 bp, Artificial Sequence
  Synthetic
tcctttcttcugattgccgugt

SEQ ID NO: 32014 - DNA, 21 bp, Artificial Sequence
  Synthetic
ctcctgtccuggactccacua

SEQ ID NO: 32015 - DNA, 20 bp, Artificial Sequence
  Synthetic
cgacagccuggccgattaug

SEQ ID NO: 32016 - DNA, 17 bp, Artificial Sequence
  Synthetic
gugaaggccagggugga

SEQ ID NO: 32017 - DNA, 20 bp, Artificial Sequence
  Synthetic
cgctgtugagacagagugct

SEQ ID NO: 32018 - DNA, 18 bp, Artificial Sequence
  Synthetic
caugcttcccuggcaggt

SEQ ID NO: 32019 - DNA, 17 bp, Artificial Sequence
  Synthetic
accctcuctcccuggca

SEQ ID NO: 32020 - DNA, 20 bp, Artificial Sequence
  Synthetic
ctccctgtuggcaggtcaut

SEQ ID NO: 32021 - DNA, 18 bp, Artificial Sequence
  Synthetic
gccaaccccugtctgucc

SEQ ID NO: 32022 - DNA, 20 bp, Artificial Sequence
  Synthetic
cagaaccgaguggcagguag

SEQ ID NO: 32023 - DNA, 21 bp, Artificial Sequence
  Synthetic
agtgtcatccucagtggctug

SEQ ID NO: 32024 - DNA, 21 bp, Artificial Sequence
  Synthetic
cctcaccaucctgtcgcttua

SEQ ID NO: 32025 - DNA, 25 bp, Artificial Sequence
  Synthetic
ctctatccaagucactggtggttuc

SEQ ID NO: 32026 - DNA, 23 bp, Artificial Sequence
  Synthetic
gcctggacuttgatctcauaggg

SEQ ID NO: 32027 - DNA, 23 bp, Artificial Sequence
  Synthetic
gccaaagaaugctggtgttctug

SEQ ID NO: 32028 - DNA, 21 bp, Artificial Sequence
  Synthetic
ctctcuaagccctccctucac

SEQ ID NO: 32029 - DNA, 20 bp, Artificial Sequence
  Synthetic
ctgtcgcccuatgtccacua

SEQ ID NO: 32030 - DNA, 21 bp, Artificial Sequence
  Synthetic
gcactgagcucaagcctctua

SEQ ID NO: 32031 - DNA, 21 bp, Artificial Sequence
  Synthetic
gtaagucctaggguggaagcc

SEQ ID NO: 32032 - DNA, 20 bp, Artificial Sequence
  Synthetic
ccccttucaccgtcactguc

SEQ ID NO: 32033 - DNA, 22 bp, Artificial Sequence
  Synthetic
gaggacaacagagugactuccc

SEQ ID NO: 32034 - DNA, 20 bp, Artificial Sequence
  Synthetic
agtagcguccggtgtcatug

SEQ ID NO: 32035 - DNA, 20 bp, Artificial Sequence
  Synthetic
ctggtaguggtgagtgucgt

SEQ ID NO: 32036 - DNA, 21 bp, Artificial Sequence
  Synthetic
gcagggacagacugggagtua

SEQ ID NO: 32037 - DNA, 17 bp, Artificial Sequence
  Synthetic
ccaccugctgcaugcac

SEQ ID NO: 32038 - DNA, 21 bp, Artificial Sequence
  Synthetic
ccatgacagugggcaucacag

SEQ ID NO: 32039 - DNA, 23 bp, Artificial Sequence
  Synthetic
gucaccuaccagaaccacaacaa

SEQ ID NO: 32040 - DNA, 18 bp, Artificial Sequence
  Synthetic
aucaccccagcccccuat

SEQ ID NO: 32041 - DNA, 19 bp, Artificial Sequence
  Synthetic
cacccacuttctccuggca

SEQ ID NO: 32042 - DNA, 19 bp, Artificial Sequence
  Synthetic
gaagtcaugaccccgucca

SEQ ID NO: 32043 - DNA, 19 bp, Artificial Sequence
  Synthetic
gagtgucagcccgtctguc

SEQ ID NO: 32044 - DNA, 22 bp, Artificial Sequence
  Synthetic
acctcugagcaaagttgctgut

SEQ ID NO: 32045 - DNA, 19 bp, Artificial Sequence
  Synthetic
cttgcaccugtcccuccag

SEQ ID NO: 32046 - DNA, 22 bp, Artificial Sequence
  Synthetic
ctgactgugcttgtcgguaaga

SEQ ID NO: 32047 - DNA, 22 bp, Artificial Sequence
  Synthetic
cgtgaccgagagagutagcuga

SEQ ID NO: 32048 - DNA, 22 bp, Artificial Sequence
  Synthetic
ctgagtctuagctggctcctug

SEQ ID NO: 32049 - DNA, 20 bp, Artificial Sequence
  Synthetic
caccacucagaguccccaaa

SEQ ID NO: 32050 - DNA, 24 bp, Artificial Sequence
  Synthetic
cttacaggtcutcagtccttuccc

SEQ ID NO: 32051 - DNA, 22 bp, Artificial Sequence
  Synthetic
gaaagccgugaaggagtctuct

SEQ ID NO: 32052 - DNA, 21 bp, Artificial Sequence
  Synthetic
cgtttctugggaatggccuga

SEQ ID NO: 32053 - DNA, 21 bp, Artificial Sequence
  Synthetic
agagggugtgcaggugaaaag

SEQ ID NO: 32054 - DNA, 21 bp, Artificial Sequence
  Synthetic
ccctcucccagttaccgugaa

SEQ ID NO: 32055 - DNA, 22 bp, Artificial Sequence
  Synthetic
tgtcuttctgtttguccccaca

SEQ ID NO: 32056 - DNA, 18 bp, Artificial Sequence
  Synthetic
tccccggucacggaugat

SEQ ID NO: 32057 - DNA, 27 bp, Artificial Sequence
  Synthetic
aacccctcaaguttaaaaaggugaaga

SEQ ID NO: 32058 - DNA, 24 bp, Artificial Sequence
  Synthetic
gauggccaaaucaggacatauact

SEQ ID NO: 32059 - DNA, 22 bp, Artificial Sequence
  Synthetic
aaaaaggtcgugcagctcaaug

SEQ ID NO: 32060 - DNA, 19 bp, Artificial Sequence
  Synthetic
gcaaaucgcatugcgcaga

SEQ ID NO: 32061 - DNA, 17 bp, Artificial Sequence
  Synthetic
ccutccgcauccgccat

SEQ ID NO: 32062 - DNA, 25 bp, Artificial Sequence
  Synthetic
aaaatccatttccuacctgcccuaa

SEQ ID NO: 32063 - DNA, 30 bp, Artificial Sequence
  Synthetic
tcaaagtgaagucaaacacattactacuca

SEQ ID NO: 32064 - DNA, 22 bp, Artificial Sequence
  Synthetic
gtttgtgggccacauagtggua

SEQ ID NO: 32065 - DNA, 24 bp, Artificial Sequence
  Synthetic
agaaagtaaguttgcacagugcct

SEQ ID NO: 32066 - DNA, 24 bp, Artificial Sequence
  Synthetic
atcccaaggugactggttgttuaa

SEQ ID NO: 32067 - DNA, 31 bp, Artificial Sequence
  Synthetic
tcttaaugaagaaatagttuccagcagacaa

SEQ ID NO: 32068 - DNA, 22 bp, Artificial Sequence
  Synthetic
ggaccagugactgcacatguac

SEQ ID NO: 32069 - DNA, 21 bp, Artificial Sequence
  Synthetic
ccacucacaggcctaaugact

SEQ ID NO: 32070 - DNA, 28 bp, Artificial Sequence
  Synthetic
ctgatgggcugagatacaaataaacuga

SEQ ID NO: 32071 - DNA, 30 bp, Artificial Sequence
  Synthetic
ccaaatataaactccuaacccggaactuac

SEQ ID NO: 32072 - DNA, 27 bp, Artificial Sequence
  Synthetic
gggctcatcaautatcaattcttucac

SEQ ID NO: 32073 - DNA, 21 bp, Artificial Sequence
  Synthetic
acgcaacccaguaccactuac

SEQ ID NO: 32074 - DNA, 23 bp, Artificial Sequence
  Synthetic
tttgatgguggctttagactugc

SEQ ID NO: 32075 - DNA, 23 bp, Artificial Sequence
  Synthetic
acautccaaacugaggacagcat

SEQ ID NO: 32076 - DNA, 23 bp, Artificial Sequence
  Synthetic
gcttgcttgacugtggaccttua

SEQ ID NO: 32077 - DNA, 22 bp, Artificial Sequence
  Synthetic
agcttcaaguggccttcacuac

SEQ ID NO: 32078 - DNA, 28 bp, Artificial Sequence
  Synthetic
aagagttaagutaaattggaugcaccct

SEQ ID NO: 32079 - DNA, 20 bp, Artificial Sequence
  Synthetic
aggcacaggaccuctacuga

SEQ ID NO: 32080 - DNA, 22 bp, Artificial Sequence
  Synthetic
gaagguagcgagtcaguaacgg

SEQ ID NO: 32081 - DNA, 28 bp, Artificial Sequence
  Synthetic
gactacuggaaacaactagaagugagaa

SEQ ID NO: 32082 - DNA, 29 bp, Artificial Sequence
  Synthetic
ctgctctgagucagttaaacagtaaauct

SEQ ID NO: 32083 - DNA, 27 bp, Artificial Sequence
  Synthetic
gcatgtccttgugataaccttctttut

SEQ ID NO: 32084 - DNA, 22 bp, Artificial Sequence
  Synthetic
catgttcagauggagaggcugt

SEQ ID NO: 32085 - DNA, 17 bp, Artificial Sequence
  Synthetic
ctgccccutgcccugat

SEQ ID NO: 32086 - DNA, 24 bp, Artificial Sequence
  Synthetic
gccacttctucccatcaagacuat

SEQ ID NO: 32087 - DNA, 30 bp, Artificial Sequence
  Synthetic
agtttcaggagguagcacatacattuaaaa

SEQ ID NO: 32088 - DNA, 26 bp, Artificial Sequence
  Synthetic
agaagcatggagauggattcattauc

SEQ ID NO: 32089 - DNA, 23 bp, Artificial Sequence
  Synthetic
tgtgtuccacccgtttcattuca

SEQ ID NO: 32090 - DNA, 25 bp, Artificial Sequence
  Synthetic
tctgctttgaucactgattgtgtuc

SEQ ID NO: 32091 - DNA, 28 bp, Artificial Sequence
  Synthetic
gcagcaatgaaaacauccattctatuca

SEQ ID NO: 32092 - DNA, 30 bp, Artificial Sequence
  Synthetic
aataaatacaatgtucaagtccctggauca

SEQ ID NO: 32093 - DNA, 26 bp, Artificial Sequence
  Synthetic
accaaaagcuggtacttcacugaaaa

SEQ ID NO: 32094 - DNA, 27 bp, Artificial Sequence
  Synthetic
aagcttcttatugcacgtaggauaaat

SEQ ID NO: 32095 - DNA, 30 bp, Artificial Sequence
  Synthetic
gtcaagcctaaugaaaccaaaacttactut

SEQ ID NO: 32096 - DNA, 29 bp, Artificial Sequence
  Synthetic
ccaaaagtgggaauacattatagucagca

SEQ ID NO: 32097 - DNA, 24 bp, Artificial Sequence
  Synthetic
gctcctttacucagcccttauacc

SEQ ID NO: 32098 - DNA, 25 bp, Artificial Sequence
  Synthetic
gagcagagcaaaggaauaaccaaug

SEQ ID NO: 32099 - DNA, 30 bp, Artificial Sequence
  Synthetic
gtcagatcaagaggaaautgactatgauga

SEQ ID NO: 32100 - DNA, 24 bp, Artificial Sequence
  Synthetic
ttcgggcttautttgtccctcaut

SEQ ID NO: 32101 - DNA, 23 bp, Artificial Sequence
  Synthetic
agaguagcaacagaaagctcugc

SEQ ID NO: 32102 - DNA, 28 bp, Artificial Sequence
  Synthetic
agggaatagguccttctgataaatguga

SEQ ID NO: 32103 - DNA, 27 bp, Artificial Sequence
  Synthetic
cagucatttctuacaaggagccaaaaa

SEQ ID NO: 32104 - DNA, 28 bp, Artificial Sequence
  Synthetic
cctttgcaatggguaatggagatctaut

SEQ ID NO: 32105 - DNA, 26 bp, Artificial Sequence
  Synthetic
ggataattguggatgacaccucaacc

SEQ ID NO: 32106 - DNA, 30 bp, Artificial Sequence
  Synthetic
gcatatttctcuacaatttgcttggttuga

SEQ ID NO: 32107 - DNA, 28 bp, Artificial Sequence
  Synthetic
gactggcacuaagaatttcaugaagaac

SEQ ID NO: 32108 - DNA, 26 bp, Artificial Sequence
  Synthetic
gtaagaaatagguttctgctgctugg

SEQ ID NO: 32109 - DNA, 25 bp, Artificial Sequence
  Synthetic
agaaucagcaaggtggauacaaagg

SEQ ID NO: 32110 - DNA, 27 bp, Artificial Sequence
  Synthetic
gatttagccucaaagctgtagcattut

SEQ ID NO: 32111 - DNA, 31 bp, Artificial Sequence
  Synthetic
acaaacaaaactuccaataattcagcaacua

SEQ ID NO: 32112 - DNA, 27 bp, Artificial Sequence
  Synthetic
accactctctgutgacgatacatttut

SEQ ID NO: 32113 - DNA, 29 bp, Artificial Sequence
  Synthetic
cagcaggtactgauaatacaagttcctua

SEQ ID NO: 32114 - DNA, 29 bp, Artificial Sequence
  Synthetic
tctcatttaatctuaattggaggccugac

SEQ ID NO: 32115 - DNA, 27 bp, Artificial Sequence
  Synthetic
ctcctctagtgauttgttgatgctcut

SEQ ID NO: 32116 - DNA, 23 bp, Artificial Sequence
  Synthetic
gggtgucttgaattcugggagaa

SEQ ID NO: 32117 - DNA, 29 bp, Artificial Sequence
  Synthetic
gagtaaccagagucttattcttcctcauc

SEQ ID NO: 32118 - DNA, 24 bp, Artificial Sequence
  Synthetic
agacagtttcucctgagaauggga

SEQ ID NO: 32119 - DNA, 26 bp, Artificial Sequence
  Synthetic
atctctttuccccattgttttugcag

SEQ ID NO: 32120 - DNA, 28 bp, Artificial Sequence
  Synthetic
tcttttacugacctatatugcaaaccat

SEQ ID NO: 32121 - DNA, 24 bp, Artificial Sequence
  Synthetic
gatctagctucaggactcatuggc

SEQ ID NO: 32122 - DNA, 22 bp, Artificial Sequence
  Synthetic
agcuggagaaaggaccaacaua

SEQ ID NO: 32123 - DNA, 26 bp, Artificial Sequence
  Synthetic
cagaccatauaacatctacccucacg

SEQ ID NO: 32124 - DNA, 23 bp, Artificial Sequence
  Synthetic
tccatuggagacaaggctgaaut

SEQ ID NO: 32125 - DNA, 25 bp, Artificial Sequence
  Synthetic
ctcgtgaagcuattcagcatgaauc

SEQ ID NO: 32126 - DNA, 25 bp, Artificial Sequence
  Synthetic
ctaacctuaaacatggctucaggat

SEQ ID NO: 32127 - DNA, 25 bp, Artificial Sequence
  Synthetic
ctttatccaaautcgctcagtugcc

SEQ ID NO: 32128 - DNA, 26 bp, Artificial Sequence
  Synthetic
ccttcagcaacacacuatattccugt

SEQ ID NO: 32129 - DNA, 26 bp, Artificial Sequence
  Synthetic
ctttccttacugctcaaacactctug

SEQ ID NO: 32130 - DNA, 22 bp, Artificial Sequence
  Synthetic
ccgagcugtttgtgaacugaag

SEQ ID NO: 32131 - DNA, 27 bp, Artificial Sequence
  Synthetic
actctatcttugccttctctctcauca

SEQ ID NO: 32132 - DNA, 23 bp, Artificial Sequence
  Synthetic
tcaggugaaggaacacaaaugct

SEQ ID NO: 32133 - DNA, 29 bp, Artificial Sequence
  Synthetic
gtgccttacctacucatatctttctcaug

SEQ ID NO: 32134 - DNA, 22 bp, Artificial Sequence
  Synthetic
guaacgccaccatuacaaagca

SEQ ID NO: 32135 - DNA, 23 bp, Artificial Sequence
  Synthetic
tggcggacauctcattctuacag

SEQ ID NO: 32136 - DNA, 24 bp, Artificial Sequence
  Synthetic
aagcagactuacatccccacaauc

SEQ ID NO: 32137 - DNA, 29 bp, Artificial Sequence
  Synthetic
ccagttgaacauttgtagcaataagucat

SEQ ID NO: 32138 - DNA, 20 bp, Artificial Sequence
  Synthetic
cccagucccctacaucgaca

SEQ ID NO: 32139 - DNA, 19 bp, Artificial Sequence
  Synthetic
ctcccagccguatgcugag

SEQ ID NO: 32140 - DNA, 22 bp, Artificial Sequence
  Synthetic
tctcugtggagcugggaaaaac

SEQ ID NO: 32141 - DNA, 20 bp, Artificial Sequence
  Synthetic
cagccctguggaacctguac

SEQ ID NO: 32142 - DNA, 24 bp, Artificial Sequence
  Synthetic
cgtcttctaacccucctcctctuc

SEQ ID NO: 32143 - DNA, 22 bp, Artificial Sequence
  Synthetic
aaccagugaaagggtgcugaat

SEQ ID NO: 32144 - DNA, 22 bp, Artificial Sequence
  Synthetic
ggaacgtctgugcctgtgaaut

SEQ ID NO: 32145 - DNA, 21 bp, Artificial Sequence
  Synthetic
gacaagagugaagggcacaug

SEQ ID NO: 32146 - DNA, 22 bp, Artificial Sequence
  Synthetic
tcctcccctucttctccctcua

SEQ ID NO: 32147 - DNA, 19 bp, Artificial Sequence
  Synthetic
agtggtaggugaccgugga

SEQ ID NO: 32148 - DNA, 24 bp, Artificial Sequence
  Synthetic
aggatgaggaggaugatgatguga

SEQ ID NO: 32149 - DNA, 22 bp, Artificial Sequence
  Synthetic
gcacactagaugccatccucag

SEQ ID NO: 32150 - DNA, 17 bp, Artificial Sequence
  Synthetic
cccgucgcgaagttucc

SEQ ID NO: 32151 - DNA, 19 bp, Artificial Sequence
  Synthetic
cccatucaggtcgtuccca

SEQ ID NO: 32152 - DNA, 23 bp, Artificial Sequence
  Synthetic
ggccagcccuggaaaaatattuc

SEQ ID NO: 32153 - DNA, 19 bp, Artificial Sequence
  Synthetic
ggaagcccugacccaccua

SEQ ID NO: 32154 - DNA, 21 bp, Artificial Sequence
  Synthetic
ggagctccugaagaagtuccg

SEQ ID NO: 32155 - DNA, 21 bp, Artificial Sequence
  Synthetic
acacccagautgcacgucaaa

SEQ ID NO: 32156 - DNA, 21 bp, Artificial Sequence
  Synthetic
ccccacacugggtgagatgua

SEQ ID NO: 32157 - DNA, 23 bp, Artificial Sequence
  Synthetic
cttcctaucacccctcugaggat

SEQ ID NO: 32158 - DNA, 19 bp, Artificial Sequence
  Synthetic
cutctctgugaccccacgt

SEQ ID NO: 32159 - DNA, 21 bp, Artificial Sequence
  Synthetic
aatcacccauctcgccatcuc

SEQ ID NO: 32160 - DNA, 20 bp, Artificial Sequence
  Synthetic
cagugacaggaggtgcuaca

SEQ ID NO: 32161 - DNA, 20 bp, Artificial Sequence
  Synthetic
agtactguggcccacaacuc

SEQ ID NO: 32162 - DNA, 20 bp, Artificial Sequence
  Synthetic
tcctactgaggugctcccut

SEQ ID NO: 32163 - DNA, 22 bp, Artificial Sequence
  Synthetic
gcagaagccagaugaaggtguc

SEQ ID NO: 32164 - DNA, 18 bp, Artificial Sequence
  Synthetic
gaggaggcugcactgtug

SEQ ID NO: 32165 - DNA, 17 bp, Artificial Sequence
  Synthetic
tgtgcaggugggtggug

SEQ ID NO: 32166 - DNA, 20 bp, Artificial Sequence
  Synthetic
agccaatggugaggacccua

SEQ ID NO: 32167 - DNA, 21 bp, Artificial Sequence
  Synthetic
ggcaagcaguttcccttcugt

SEQ ID NO: 32168 - DNA, 23 bp, Artificial Sequence
  Synthetic
ggccatccuagaattctgccuaa

SEQ ID NO: 32169 - DNA, 18 bp, Artificial Sequence
  Synthetic
cccgcaucctggctaugc

SEQ ID NO: 32170 - DNA, 21 bp, Artificial Sequence
  Synthetic
ggccactgaugctttctguct

SEQ ID NO: 32171 - DNA, 20 bp, Artificial Sequence
  Synthetic
ggcctggccaautagggauc

SEQ ID NO: 32172 - DNA, 24 bp, Artificial Sequence
  Synthetic
ccccatautcttgattcuccccaa

SEQ ID NO: 32173 - DNA, 28 bp, Artificial Sequence
  Synthetic
agccatgtguctcttatttttctugact

SEQ ID NO: 32174 - DNA, 21 bp, Artificial Sequence
  Synthetic
tccagactugggactguggaa

SEQ ID NO: 32175 - DNA, 20 bp, Artificial Sequence
  Synthetic
gtgggtgccucaaggactua

SEQ ID NO: 32176 - DNA, 21 bp, Artificial Sequence
  Synthetic
caaugggaagagcaccgugat

SEQ ID NO: 32177 - DNA, 21 bp, Artificial Sequence
  Synthetic
cgtgucacaacggaggactug

SEQ ID NO: 32178 - DNA, 20 bp, Artificial Sequence
  Synthetic
ctcacaagucccaggtcugt

SEQ ID NO: 32179 - DNA, 19 bp, Artificial Sequence
  Synthetic
gcugggagctugggagaag

SEQ ID NO: 32180 - DNA, 21 bp, Artificial Sequence
  Synthetic
ccaccuacactcactcuggac

SEQ ID NO: 32181 - DNA, 28 bp, Artificial Sequence
  Synthetic
gaaaaggaggacauctgttctcatcaut

SEQ ID NO: 32182 - DNA, 22 bp, Artificial Sequence
  Synthetic
ctggcagugaaaaccagaguct

SEQ ID NO: 32183 - DNA, 25 bp, Artificial Sequence
  Synthetic
acctatctgcagucttggactctua

SEQ ID NO: 32184 - DNA, 22 bp, Artificial Sequence
  Synthetic
tgagaggaaggaugtgccauct

SEQ ID NO: 32185 - DNA, 21 bp, Artificial Sequence
  Synthetic
acctgttgcuccatgacucac

SEQ ID NO: 32186 - DNA, 21 bp, Artificial Sequence
  Synthetic
tgguagagccctgtcuccaag

SEQ ID NO: 32187 - DNA, 23 bp, Artificial Sequence
  Synthetic
acacagctugtcacagttuaggt

SEQ ID NO: 32188 - DNA, 21 bp, Artificial Sequence
  Synthetic
agactcaauacgtcccccuca

SEQ ID NO: 32189 - DNA, 20 bp, Artificial Sequence
  Synthetic
cttcccgagcagaacugguc

SEQ ID NO: 32190 - DNA, 21 bp, Artificial Sequence
  Synthetic
gggctctauggcctcctcuac

SEQ ID NO: 32191 - DNA, 22 bp, Artificial Sequence
  Synthetic
ctgacccugcctaaaggaaguc

SEQ ID NO: 32192 - DNA, 21 bp, Artificial Sequence
  Synthetic
tgtcaagcguccttaggaugg

SEQ ID NO: 32193 - DNA, 20 bp, Artificial Sequence
  Synthetic
ggagcccacauggcactuag

SEQ ID NO: 32194 - DNA, 17 bp, Artificial Sequence
  Synthetic
ctgctgcugcgctucac

SEQ ID NO: 32195 - DNA, 17 bp, Artificial Sequence
  Synthetic
gaacugccgcugcaacc

SEQ ID NO: 32196 - DNA, 24 bp, Artificial Sequence
  Synthetic
cacggtgcautcttttctcaucac

SEQ ID NO: 32197 - DNA, 22 bp, Artificial Sequence
  Synthetic
ctctttgucacctccaggtuct

SEQ ID NO: 32198 - DNA, 21 bp, Artificial Sequence
  Synthetic
tuacaggcagggctuacaagg

SEQ ID NO: 32199 - DNA, 24 bp, Artificial Sequence
  Synthetic
gaagttgcuctcaaagaaguccca

SEQ ID NO: 32200 - DNA, 21 bp, Artificial Sequence
  Synthetic
ctggtcgacuaccctgatgug

SEQ ID NO: 32201 - DNA, 23 bp, Artificial Sequence
  Synthetic
gttcuccaaaaccccctgaucaa

SEQ ID NO: 32202 - DNA, 24 bp, Artificial Sequence
  Synthetic
ggaggagaaauggtcactttgcut

SEQ ID NO: 32203 - DNA, 21 bp, Artificial Sequence
  Synthetic
catgacacacucgggacucac

SEQ ID NO: 32204 - DNA, 22 bp, Artificial Sequence
  Synthetic
ccatcgccuatgaaatctucgg

SEQ ID NO: 32205 - DNA, 23 bp, Artificial Sequence
  Synthetic
gagaacagagguttcuacccaca

SEQ ID NO: 32206 - DNA, 25 bp, Artificial Sequence
  Synthetic
gggtgaacauattctagcccugaag

SEQ ID NO: 32207 - DNA, 20 bp, Artificial Sequence
  Synthetic
ctccaugcagggacaucaca

SEQ ID NO: 32208 - DNA, 20 bp, Artificial Sequence
  Synthetic
acccacgucgattgcatcuc

SEQ ID NO: 32209 - DNA, 20 bp, Artificial Sequence
  Synthetic
cacctgtguccccaagcaua

SEQ ID NO: 32210 - DNA, 20 bp, Artificial Sequence
  Synthetic
aagcaggcugatuggagagg

SEQ ID NO: 32211 - DNA, 28 bp, Artificial Sequence
  Synthetic
ctggatactggauatacagaccugaact

SEQ ID NO: 32212 - DNA, 21 bp, Artificial Sequence
  Synthetic
ggacaccccgauctgtggaua

SEQ ID NO: 32213 - DNA, 20 bp, Artificial Sequence
  Synthetic
catgagcuggtaggcgaugt

SEQ ID NO: 32214 - DNA, 21 bp, Artificial Sequence
  Synthetic
cagaagtgauggctcctguct

SEQ ID NO: 32215 - DNA, 19 bp, Artificial Sequence
  Synthetic
ccaucacaggccacctcug

SEQ ID NO: 32216 - DNA, 19 bp, Artificial Sequence
  Synthetic
ggucacagcctcucagcat

SEQ ID NO: 32217 - DNA, 18 bp, Artificial Sequence
  Synthetic
ccagggccgugttuccag

SEQ ID NO: 32218 - DNA, 21 bp, Artificial Sequence
  Synthetic
cctccucggaagacactcuga

SEQ ID NO: 32219 - DNA, 21 bp, Artificial Sequence
  Synthetic
ccagguggguagacaggagac

SEQ ID NO: 32220 - DNA, 20 bp, Artificial Sequence
  Synthetic
ggctcucagcaggtgttucc

SEQ ID NO: 32221 - DNA, 18 bp, Artificial Sequence
  Synthetic
aggctgcauacgccauca

SEQ ID NO: 32222 - DNA, 19 bp, Artificial Sequence
  Synthetic
tttgccaaaugcgcctcuc

SEQ ID NO: 32223 - DNA, 22 bp, Artificial Sequence
  Synthetic
ggauggcgacggauaaaggaaa

SEQ ID NO: 32224 - DNA, 22 bp, Artificial Sequence
  Synthetic
catggagauggtgttcugggaa

SEQ ID NO: 32225 - DNA, 27 bp, Artificial Sequence
  Synthetic
gtgctgatcaauatcactccatuaggg

SEQ ID NO: 32226 - DNA, 29 bp, Artificial Sequence
  Synthetic
ctttgaagatcugtctgtaatgtgugagt

SEQ ID NO: 32227 - DNA, 28 bp, Artificial Sequence
  Synthetic
accacttcactugagataaatcagctut

SEQ ID NO: 32228 - DNA, 30 bp, Artificial Sequence
  Synthetic
aaagtcacctattcautcatacgatggtut

SEQ ID NO: 32229 - DNA, 23 bp, Artificial Sequence
  Synthetic
agtcaaagtccutctgctcaucc

SEQ ID NO: 32230 - DNA, 21 bp, Artificial Sequence
  Synthetic
agctcatcutcgtcacaugcc

SEQ ID NO: 32231 - DNA, 23 bp, Artificial Sequence
  Synthetic
agcagguagaggaagaggaacuc

SEQ ID NO: 32232 - DNA, 19 bp, Artificial Sequence
  Synthetic
gccgtcugcatcgtacuca

SEQ ID NO: 32233 - DNA, 20 bp, Artificial Sequence
  Synthetic
ggtcaggutgggtgcugaag

SEQ ID NO: 32234 - DNA, 21 bp, Artificial Sequence
  Synthetic
gagtgaccccacuctgagtuc

SEQ ID NO: 32235 - DNA, 24 bp, Artificial Sequence
  Synthetic
ttgcaggcagcguagatagtuaat

SEQ ID NO: 32236 - DNA, 23 bp, Artificial Sequence
  Synthetic
gtaagagaggugagaagtgcucc

SEQ ID NO: 32237 - DNA, 24 bp, Artificial Sequence
  Synthetic
tgggtatcuccagaacctctaguc

SEQ ID NO: 32238 - DNA, 21 bp, Artificial Sequence
  Synthetic
catcttccuccccacaacugt

SEQ ID NO: 32239 - DNA, 22 bp, Artificial Sequence
  Synthetic
agggcttaccuttccctaccut

SEQ ID NO: 32240 - DNA, 27 bp, Artificial Sequence
  Synthetic
agctctattgugaactatacgggttuc

SEQ ID NO: 32241 - DNA, 30 bp, Artificial Sequence
  Synthetic
acgtacttaccautttactccaaaactuca

SEQ ID NO: 32242 - DNA, 22 bp, Artificial Sequence
  Synthetic
cggccagcagcccuatttuaat

SEQ ID NO: 32243 - DNA, 25 bp, Artificial Sequence
  Synthetic
gatggtaaugaccttaggtgtugct

SEQ ID NO: 32244 - DNA, 24 bp, Artificial Sequence
  Synthetic
cacaaggaacuactgctggaauca

SEQ ID NO: 32245 - DNA, 27 bp, Artificial Sequence
  Synthetic
gagtggatattugtcatctaccacugt

SEQ ID NO: 32246 - DNA, 28 bp, Artificial Sequence
  Synthetic
gataggugacaatcttgaatuggaggag

SEQ ID NO: 32247 - DNA, 26 bp, Artificial Sequence
  Synthetic
cacttgcuaaggatcctaaatugcag

SEQ ID NO: 32248 - DNA, 28 bp, Artificial Sequence
  Synthetic
aaacacaaggcaaagcautttaacagua

SEQ ID NO: 32249 - DNA, 27 bp, Artificial Sequence
  Synthetic
tttccatcattgugttttgttggcuag

SEQ ID NO: 32250 - DNA, 17 bp, Artificial Sequence
  Synthetic
ggcggguccagatgcug

SEQ ID NO: 32251 - DNA, 17 bp, Artificial Sequence
  Synthetic
tgcgcaggutgcgauct

SEQ ID NO: 32252 - DNA, 17 bp, Artificial Sequence
  Synthetic
agctaguggcgcucacg

SEQ ID NO: 32253 - DNA, 17 bp, Artificial Sequence
  Synthetic
ccgcuccagcacgtugt

SEQ ID NO: 32254 - DNA, 22 bp, Artificial Sequence
  Synthetic
ggagacugaggaccagaacuca

SEQ ID NO: 32255 - DNA, 24 bp, Artificial Sequence
  Synthetic
cucattaccgaugacacagaaggg

SEQ ID NO: 32256 - DNA, 20 bp, Artificial Sequence
  Synthetic
gtaggcuggctgtgatcucg

SEQ ID NO: 32257 - DNA, 20 bp, Artificial Sequence
  Synthetic
ctatgcgcguagaccacuga

SEQ ID NO: 32258 - DNA, 18 bp, Artificial Sequence
  Synthetic
ctutcccgtguggaagcc

SEQ ID NO: 32259 - DNA, 20 bp, Artificial Sequence
  Synthetic
ccuacaaagacccucacgca

SEQ ID NO: 32260 - DNA, 20 bp, Artificial Sequence
  Synthetic
gacaccctugcagcctctua

SEQ ID NO: 32261 - DNA, 21 bp, Artificial Sequence
  Synthetic
cttctucccgggcatcttgua

SEQ ID NO: 32262 - DNA, 21 bp, Artificial Sequence
  Synthetic
gcaggaccuggcaagatcuga

SEQ ID NO: 32263 - DNA, 17 bp, Artificial Sequence
  Synthetic
ggtgcuccgtcggguac

SEQ ID NO: 32264 - DNA, 21 bp, Artificial Sequence
  Synthetic
gctctggcuaacttggctcuc

SEQ ID NO: 32265 - DNA, 21 bp, Artificial Sequence
  Synthetic
gctccagcucttttgcaccut

SEQ ID NO: 32266 - DNA, 25 bp, Artificial Sequence
  Synthetic
cctattggacacuctactggtggut

SEQ ID NO: 32267 - DNA, 20 bp, Artificial Sequence
  Synthetic
gcctcaggccucagtctuac

SEQ ID NO: 32268 - DNA, 23 bp, Artificial Sequence
  Synthetic
ggaaatucaaggagacacugcga

SEQ ID NO: 32269 - DNA, 22 bp, Artificial Sequence
  Synthetic
ggttggccucagacttcatuca

SEQ ID NO: 32270 - DNA, 17 bp, Artificial Sequence
  Synthetic
ccacuccaccggcuagg

SEQ ID NO: 32271 - DNA, 18 bp, Artificial Sequence
  Synthetic
gucgaacagcggcactug

SEQ ID NO: 32272 - DNA, 19 bp, Artificial Sequence
  Synthetic
tcggucagcaccaacaugg

SEQ ID NO: 32273 - DNA, 19 bp, Artificial Sequence
  Synthetic
catcucacgctccugaggt

SEQ ID NO: 32274 - DNA, 22 bp, Artificial Sequence
  Synthetic
ctugagacttcatuccccagca

SEQ ID NO: 32275 - DNA, 23 bp, Artificial Sequence
  Synthetic
cagtugcaacgaagccaatcaua

SEQ ID NO: 32276 - DNA, 21 bp, Artificial Sequence
  Synthetic
ccucaagcccttctugcagag

SEQ ID NO: 32277 - DNA, 20 bp, Artificial Sequence
  Synthetic
tgaagtggcucctagcccua

SEQ ID NO: 32278 - DNA, 21 bp, Artificial Sequence
  Synthetic
acaggccuagcttgcaaugat

SEQ ID NO: 32279 - DNA, 24 bp, Artificial Sequence
  Synthetic
cgatacggucagctcttgtaggua

SEQ ID NO: 32280 - DNA, 22 bp, Artificial Sequence
  Synthetic
agaaggccuacttctccacucc

SEQ ID NO: 32281 - DNA, 23 bp, Artificial Sequence
  Synthetic
ccaccauaaatcaggguccacat

SEQ ID NO: 32282 - DNA, 23 bp, Artificial Sequence
  Synthetic
aggaattgcutgctcaacucagt

SEQ ID NO: 32283 - DNA, 24 bp, Artificial Sequence
  Synthetic
ggctgaaguggagattaacauccc

SEQ ID NO: 32284 - DNA, 26 bp, Artificial Sequence
  Synthetic
caaccttacucctttccuaacgaact

SEQ ID NO: 32285 - DNA, 30 bp, Artificial Sequence
  Synthetic
tgcttgatugatttttctttcucacaaaca

SEQ ID NO: 32286 - DNA, 28 bp, Artificial Sequence
  Synthetic
gagcacatgctuaggaaaactcttaauc

SEQ ID NO: 32287 - DNA, 27 bp, Artificial Sequence
  Synthetic
actgaggtttcugttatcttctcucct

SEQ ID NO: 32288 - DNA, 28 bp, Artificial Sequence
  Synthetic
gttttagatgtgautcagattgagugca

SEQ ID NO: 32289 - DNA, 26 bp, Artificial Sequence
  Synthetic
ctttcaaccucttccatcacaucaac

SEQ ID NO: 32290 - DNA, 29 bp, Artificial Sequence
  Synthetic
acacatcttctucagaatcacaaactuga

SEQ ID NO: 32291 - DNA, 24 bp, Artificial Sequence
  Synthetic
caagcccauttgtgtttcugaaca

SEQ ID NO: 32292 - DNA, 30 bp, Artificial Sequence
  Synthetic
agacacttatttucagaagaggacagatug

SEQ ID NO: 32293 - DNA, 26 bp, Artificial Sequence
  Synthetic
ctcaacuggaggacattcacttuact

SEQ ID NO: 32294 - DNA, 26 bp, Artificial Sequence
  Synthetic
tcagtccaguaattttcaagccauga

SEQ ID NO: 32295 - DNA, 27 bp, Artificial Sequence
  Synthetic
tcttccctatguttcaatgtcctucag

SEQ ID NO: 32296 - DNA, 23 bp, Artificial Sequence
  Synthetic
cacugagagaugccaaggaauag

SEQ ID NO: 32297 - DNA, 28 bp, Artificial Sequence
  Synthetic
cttcttccttatucttccaccattucag

SEQ ID NO: 32298 - DNA, 21 bp, Artificial Sequence
  Synthetic
cagaagugcatgggacugaca

SEQ ID NO: 32299 - DNA, 21 bp, Artificial Sequence
  Synthetic
ctagcagctutggcctccaua

SEQ ID NO: 32300 - DNA, 25 bp, Artificial Sequence
  Synthetic
aagtcagttucggtttccttcugaa

SEQ ID NO: 32301 - DNA, 23 bp, Artificial Sequence
  Synthetic
gagtccatgugatctcctuccac

SEQ ID NO: 32302 - DNA, 22 bp, Artificial Sequence
  Synthetic
gggaatgttaugcctccctcut

SEQ ID NO: 32303 - DNA, 22 bp, Artificial Sequence
  Synthetic
ggagaggcacuacaacatgcuc

SEQ ID NO: 32304 - DNA, 22 bp, Artificial Sequence
  Synthetic
gcaggacucttccaagtgucaa

SEQ ID NO: 32305 - DNA, 21 bp, Artificial Sequence
  Synthetic
ggaatccuctcctgcucacct

SEQ ID NO: 32306 - DNA, 21 bp, Artificial Sequence
  Synthetic
aagagacccagcacutggtut

SEQ ID NO: 32307 - DNA, 26 bp, Artificial Sequence
  Synthetic
ctccaaatggcauttctttctctucc

SEQ ID NO: 32308 - DNA, 22 bp, Artificial Sequence
  Synthetic
gggtctgaugatcaccctucct

SEQ ID NO: 32309 - DNA, 24 bp, Artificial Sequence
  Synthetic
aggctagctcugtgttttctccua

SEQ ID NO: 32310 - DNA, 24 bp, Artificial Sequence
  Synthetic
ctaaccagcaccuccaaactcaua

SEQ ID NO: 32311 - DNA, 21 bp, Artificial Sequence
  Synthetic
ggtcccauggaaaggacagug

SEQ ID NO: 32312 - DNA, 20 bp, Artificial Sequence
  Synthetic
cggtaacccucccagcttug

SEQ ID NO: 32313 - DNA, 24 bp, Artificial Sequence
  Synthetic
cgtttccaacagucctacttcuct

SEQ ID NO: 32314 - DNA, 25 bp, Artificial Sequence
  Synthetic
ttatgcucacccggttattcucaaa

SEQ ID NO: 32315 - DNA, 26 bp, Artificial Sequence
  Synthetic
cactctgagutgtctcattucacaca

SEQ ID NO: 32316 - DNA, 21 bp, Artificial Sequence
  Synthetic
cctcttgguctggtcctucag

SEQ ID NO: 32317 - DNA, 22 bp, Artificial Sequence
  Synthetic
tgaacaaauccaagcaccucca

SEQ ID NO: 32318 - DNA, 24 bp, Artificial Sequence
  Synthetic
ggtatgtgaagugtgaggcactua

SEQ ID NO: 32319 - DNA, 21 bp, Artificial Sequence
  Synthetic
caaggagcagcucucagagat

SEQ ID NO: 32320 - DNA, 23 bp, Artificial Sequence
  Synthetic
gggtttgguagctggaagacaut

SEQ ID NO: 32321 - DNA, 28 bp, Artificial Sequence
  Synthetic
gaggcctcuaaagaaatacctgattucc

SEQ ID NO: 32322 - DNA, 28 bp, Artificial Sequence
  Synthetic
gcaagtcaaaaaucctactcaaatcucc

SEQ ID NO: 32323 - DNA, 23 bp, Artificial Sequence
  Synthetic
tggtctgaggauttcctgttucc

SEQ ID NO: 32324 - DNA, 27 bp, Artificial Sequence
  Synthetic
tuaatatcttcuacagggagccaggat

SEQ ID NO: 32325 - DNA, 27 bp, Artificial Sequence
  Synthetic
gaagacaacaagcaguttcacaaacua

SEQ ID NO: 32326 - DNA, 21 bp, Artificial Sequence
  Synthetic
ggatggugaagggttgaccug

SEQ ID NO: 32327 - DNA, 28 bp, Artificial Sequence
  Synthetic
agcaactttgaggcugattatggaauat

SEQ ID NO: 32328 - DNA, 20 bp, Artificial Sequence
  Synthetic
gcccttcuaagcagcatgug

SEQ ID NO: 32329 - DNA, 26 bp, Artificial Sequence
  Synthetic
tttattccacguctattcucccacag

SEQ ID NO: 32330 - DNA, 17 bp, Artificial Sequence
  Synthetic
gcccuctgggugagcag

SEQ ID NO: 32331 - DNA, 28 bp, Artificial Sequence
  Synthetic
cattagagauccagaccttataggcaut

SEQ ID NO: 32332 - DNA, 23 bp, Artificial Sequence
  Synthetic
actugacagaaaccagcuggaat

SEQ ID NO: 32333 - DNA, 28 bp, Artificial Sequence
  Synthetic
ggtcaagaacutatcttccttctuccaa

SEQ ID NO: 32334 - DNA, 22 bp, Artificial Sequence
  Synthetic
ctgcagaaguacccagtgtuct

SEQ ID NO: 32335 - DNA, 23 bp, Artificial Sequence
  Synthetic
tcagtcatcccauccatctgtug

SEQ ID NO: 32336 - DNA, 20 bp, Artificial Sequence
  Synthetic
tcatctugcgcaccaaggut

SEQ ID NO: 32337 - DNA, 23 bp, Artificial Sequence
  Synthetic
gtacacccuttaccaacaaugcc

SEQ ID NO: 32338 - DNA, 20 bp, Artificial Sequence
  Synthetic
ggagccauggatttgccauc

SEQ ID NO: 32339 - DNA, 21 bp, Artificial Sequence
  Synthetic
agccactgcutttctcgtugt

SEQ ID NO: 32340 - DNA, 22 bp, Artificial Sequence
  Synthetic
gaaagaguagacagccgcugat

SEQ ID NO: 32341 - DNA, 24 bp, Artificial Sequence
  Synthetic
gtctgaacaucaccttcuacgaga

SEQ ID NO: 32342 - DNA, 25 bp, Artificial Sequence
  Synthetic
agagagtcagtutcctaggcttcut

SEQ ID NO: 32343 - DNA, 21 bp, Artificial Sequence
  Synthetic
actggctuctgattggugcag

SEQ ID NO: 32344 - DNA, 23 bp, Artificial Sequence
  Synthetic
ccagtaggatutgctggtggaut

SEQ ID NO: 32345 - DNA, 22 bp, Artificial Sequence
  Synthetic
cttgatgcugctgtctauggct

SEQ ID NO: 32346 - DNA, 23 bp, Artificial Sequence
  Synthetic
ccctuccaaggaaacgtgttgua

SEQ ID NO: 32347 - DNA, 23 bp, Artificial Sequence
  Synthetic
gttcttgttggcuttctccacug

SEQ ID NO: 32348 - DNA, 22 bp, Artificial Sequence
  Synthetic
agctagatgucacgctctccut

SEQ ID NO: 32349 - DNA, 24 bp, Artificial Sequence
  Synthetic
caatgcagtgauttggtgtaccug

SEQ ID NO: 32350 - DNA, 19 bp, Artificial Sequence
  Synthetic
ggaggaggaucgcgaacut

SEQ ID NO: 32351 - DNA, 23 bp, Artificial Sequence
  Synthetic
ctttgtcccuctgtgtcttcuca

SEQ ID NO: 32352 - DNA, 20 bp, Artificial Sequence
  Synthetic
agagctgguccagggauaca

SEQ ID NO: 32353 - DNA, 24 bp, Artificial Sequence
  Synthetic
tcctcctcacacuctctcaactut

SEQ ID NO: 32354 - DNA, 21 bp, Artificial Sequence
  Synthetic
gagggtgcgaucagtgatgut

SEQ ID NO: 32355 - DNA, 27 bp, Artificial Sequence
  Synthetic
gcagtgacugtatttcttctucccaag

SEQ ID NO: 32356 - DNA, 24 bp, Artificial Sequence
  Synthetic
cccccttacuctgatcatgtucat

SEQ ID NO: 32357 - DNA, 25 bp, Artificial Sequence
  Synthetic
ctgttcgtgtcuctgtcttgatcuc

SEQ ID NO: 32358 - DNA, 22 bp, Artificial Sequence
  Synthetic
cuaaggccacucagcaagacaa

SEQ ID NO: 32359 - DNA, 25 bp, Artificial Sequence
  Synthetic
ctctcctucaactggtaugaagaca

SEQ ID NO: 32360 - DNA, 25 bp, Artificial Sequence
  Synthetic
caggctacucacctcttgaattcut

SEQ ID NO: 32361 - DNA, 27 bp, Artificial Sequence
  Synthetic
tgttttactgucaattacagctuccca

SEQ ID NO: 32362 - DNA, 21 bp, Artificial Sequence
  Synthetic
gccuggagctttugcaaggat

SEQ ID NO: 32363 - DNA, 26 bp, Artificial Sequence
  Synthetic
cctacagtggauagaagacactcugt

SEQ ID NO: 32364 - DNA, 20 bp, Artificial Sequence
  Synthetic
ctttctcaggcugggtgcut

SEQ ID NO: 32365 - DNA, 28 bp, Artificial Sequence
  Synthetic
ttcaacacccugttctttctcttatuca

SEQ ID NO: 32366 - DNA, 21 bp, Artificial Sequence
  Synthetic
ccggagggugtccatgaatug

SEQ ID NO: 32367 - DNA, 24 bp, Artificial Sequence
  Synthetic
ctgggugacagagcgagauaaaaa

SEQ ID NO: 32368 - DNA, 22 bp, Artificial Sequence
  Synthetic
cacucccacccuaagatcttuc

SEQ ID NO: 32369 - DNA, 26 bp, Artificial Sequence
  Synthetic
agcaccacugaactttctctctttut

SEQ ID NO: 32370 - DNA, 23 bp, Artificial Sequence
  Synthetic
guccagttctuccagagcaaaag

SEQ ID NO: 32371 - DNA, 29 bp, Artificial Sequence
  Synthetic
ccccaacuaagggcttatgtgtaatuaaa

SEQ ID NO: 32372 - DNA, 32 bp, Artificial Sequence
  Synthetic
aatatgaatatggaucacatctcuaccagagt

SEQ ID NO: 32373 - DNA, 26 bp, Artificial Sequence
  Synthetic
ccaacaaggacagutgauacaaaaca

SEQ ID NO: 32374 - DNA, 27 bp, Artificial Sequence
  Synthetic
aaaagctctatctuccctagtgtggua

SEQ ID NO: 32375 - DNA, 22 bp, Artificial Sequence
  Synthetic
gagtacagugccaugagagacc

SEQ ID NO: 32376 - DNA, 27 bp, Artificial Sequence
  Synthetic
cagaatatggguaaagatgauccgaca

SEQ ID NO: 32377 - DNA, 24 bp, Artificial Sequence
  Synthetic
accctgautactggttuccaacag

SEQ ID NO: 32378 - DNA, 22 bp, Artificial Sequence
  Synthetic
ctgucaaagagggagutggaug

SEQ ID NO: 32379 - DNA, 22 bp, Artificial Sequence
  Synthetic
ccctuccccacacagttcaaug

SEQ ID NO: 32380 - DNA, 26 bp, Artificial Sequence
  Synthetic
ggagggauacagcttttctttcauct

SEQ ID NO: 32381 - DNA, 26 bp, Artificial Sequence
  Synthetic
tttgcttccaguccctaatcacuaac

SEQ ID NO: 32382 - DNA, 24 bp, Artificial Sequence
  Synthetic
tgtgtgtttguctgcctgtctuaa

SEQ ID NO: 32383 - DNA, 22 bp, Artificial Sequence
  Synthetic
gctttcctugccttctcaaugg

SEQ ID NO: 32384 - DNA, 25 bp, Artificial Sequence
  Synthetic
gcttgccutaatgttccauacagga

SEQ ID NO: 32385 - DNA, 22 bp, Artificial Sequence
  Synthetic
gutccctctucacagcacgaat

SEQ ID NO: 32386 - DNA, 27 bp, Artificial Sequence
  Synthetic
acacattctgutttctatgacuccaat

SEQ ID NO: 32387 - DNA, 23 bp, Artificial Sequence
  Synthetic
gtcccaccacucaattucaggaa

SEQ ID NO: 32388 - DNA, 26 bp, Artificial Sequence
  Synthetic
tctcttagaaucatctcuacccgcat

SEQ ID NO: 32389 - DNA, 25 bp, Artificial Sequence
  Synthetic
ctgctcuagagacttgatucaggaa

SEQ ID NO: 32390 - DNA, 28 bp, Artificial Sequence
  Synthetic
gcacagaaggaacuacaagaaaaaguca

SEQ ID NO: 32391 - DNA, 28 bp, Artificial Sequence
  Synthetic
aggattaaagacauaaacttgccacuct

SEQ ID NO: 32392 - DNA, 22 bp, Artificial Sequence
  Synthetic
agccctgccuctgatctucaat

SEQ ID NO: 32393 - DNA, 20 bp, Artificial Sequence
  Synthetic
ggcccaguatggacaccuac

SEQ ID NO: 32394 - DNA, 26 bp, Artificial Sequence
  Synthetic
ggttctttcuaccccatcatctucca

SEQ ID NO: 32395 - DNA, 22 bp, Artificial Sequence
  Synthetic
ccccctuaatcccctcuaaccc

SEQ ID NO: 32396 - DNA, 33 bp, Artificial Sequence
  Synthetic
tttattatatatcucttttctaggguacagcca

SEQ ID NO: 32397 - DNA, 21 bp, Artificial Sequence
  Synthetic
agtgtucagccccatgcttut

SEQ ID NO: 32398 - DNA, 20 bp, Artificial Sequence
  Synthetic
acgtcgcugtaagcucacac

SEQ ID NO: 32399 - DNA, 24 bp, Artificial Sequence
  Synthetic
caatctcaccuggctactccatuc

SEQ ID NO: 32400 - DNA, 20 bp, Artificial Sequence
  Synthetic
tctucagcccactucccaga

SEQ ID NO: 32401 - DNA, 25 bp, Artificial Sequence
  Synthetic
tgggtgacttcutagatgagggtut

SEQ ID NO: 32402 - DNA, 25 bp, Artificial Sequence
  Synthetic
ggtgatgtcuacaatgatgggacug

SEQ ID NO: 32403 - DNA, 24 bp, Artificial Sequence
  Synthetic
atgtgaccctuacctacactcuct

SEQ ID NO: 32404 - DNA, 21 bp, Artificial Sequence
  Synthetic
cacactctgcucccagaacut

SEQ ID NO: 32405 - DNA, 22 bp, Artificial Sequence
  Synthetic
gtccaggaucagttgctctucc

SEQ ID NO: 32406 - DNA, 20 bp, Artificial Sequence
  Synthetic
cctaggucacgggcaaugaa

SEQ ID NO: 32407 - DNA, 18 bp, Artificial Sequence
  Synthetic
cacccagcuggtctgguc

SEQ ID NO: 32408 - DNA, 21 bp, Artificial Sequence
  Synthetic
tgagtgaccccutcccatuca

SEQ ID NO: 32409 - DNA, 20 bp, Artificial Sequence
  Synthetic
ggaggcuaatggcugaaccg

SEQ ID NO: 32410 - DNA, 29 bp, Artificial Sequence
  Synthetic
aaaaacgaaaagtutcaatggctctaugt

SEQ ID NO: 32411 - DNA, 25 bp, Artificial Sequence
  Synthetic
gatacccttatuccctgtggatguc

SEQ ID NO: 32412 - DNA, 20 bp, Artificial Sequence
  Synthetic
ccatacucagctccauccgt

SEQ ID NO: 32413 - DNA, 23 bp, Artificial Sequence
  Synthetic
cctagcagaugtgtccattcucc

SEQ ID NO: 32414 - DNA, 21 bp, Artificial Sequence
  Synthetic
tgctgatugggagctctcuct

SEQ ID NO: 32415 - DNA, 23 bp, Artificial Sequence
  Synthetic
gctcctagucatcacaugaccca

SEQ ID NO: 32416 - DNA, 22 bp, Artificial Sequence
  Synthetic
ccaccaagucctcatcactcuc

SEQ ID NO: 32417 - DNA, 24 bp, Artificial Sequence
  Synthetic
cactctttauccctggactccuca

SEQ ID NO: 32418 - DNA, 22 bp, Artificial Sequence
  Synthetic
ggtccagcaauttgagucaggt

SEQ ID NO: 32419 - DNA, 24 bp, Artificial Sequence
  Synthetic
gtagatgugagaagggatgctugg

SEQ ID NO: 32420 - DNA, 22 bp, Artificial Sequence
  Synthetic
tccaccccaucagttctctcut

SEQ ID NO: 32421 - DNA, 23 bp, Artificial Sequence
  Synthetic
aattagcaaggucaccaggacuc

SEQ ID NO: 32422 - DNA, 17 bp, Artificial Sequence
  Synthetic
cccctgacucccccugt

SEQ ID NO: 32423 - DNA, 17 bp, Artificial Sequence
  Synthetic
catgguccagcccugct

SEQ ID NO: 32424 - DNA, 22 bp, Artificial Sequence
  Synthetic
gatctgccuccctcctccttua

SEQ ID NO: 32425 - DNA, 24 bp, Artificial Sequence
  Synthetic
gatgtcccggaacuctttacucac

SEQ ID NO: 32426 - DNA, 21 bp, Artificial Sequence
  Synthetic
ggctcccugacaatctccauc

SEQ ID NO: 32427 - DNA, 20 bp, Artificial Sequence
  Synthetic
catccaggacuggcacucac

SEQ ID NO: 32428 - DNA, 23 bp, Artificial Sequence
  Synthetic
tctcctgtcuccatccttcacut

SEQ ID NO: 32429 - DNA, 24 bp, Artificial Sequence
  Synthetic
attgtagacaguggaagaggctuc

SEQ ID NO: 32430 - DNA, 25 bp, Artificial Sequence
  Synthetic
tgagaatggctuttcataccctgug

SEQ ID NO: 32431 - DNA, 23 bp, Artificial Sequence
  Synthetic
ctccugaaagcacuaaggcaaag

SEQ ID NO: 32432 - DNA, 23 bp, Artificial Sequence
  Synthetic
cgtuaagcagagaguaacaccuc

SEQ ID NO: 32433 - DNA, 21 bp, Artificial Sequence
  Synthetic
gtgctgcugtcatcctaguca

SEQ ID NO: 32434 - DNA, 24 bp, Artificial Sequence
  Synthetic
tcagagaggaaaacgugttgtgut

SEQ ID NO: 32435 - DNA, 27 bp, Artificial Sequence
  Synthetic
gatggatctucacgtctgtccuaaaaa

SEQ ID NO: 32436 - DNA, 24 bp, Artificial Sequence
  Synthetic
cacctagguctagcagtatugcat

SEQ ID NO: 32437 - DNA, 27 bp, Artificial Sequence
  Synthetic
caguttgaaaaataucaggagcagcac

SEQ ID NO: 32438 - DNA, 30 bp, Artificial Sequence
  Synthetic
ggaaaaugaagagaaaaagcagaaauggaa

SEQ ID NO: 32439 - DNA, 25 bp, Artificial Sequence
  Synthetic
tgctcacctcutacttgtcctauct

SEQ ID NO: 32440 - DNA, 29 bp, Artificial Sequence
  Synthetic
atcatgattgcuatcaacttcacuaagaa

SEQ ID NO: 32441 - DNA, 22 bp, Artificial Sequence
  Synthetic
aaggagutggcugaggaagaac

SEQ ID NO: 32442 - DNA, 20 bp, Artificial Sequence
  Synthetic
acattccccuctggcccaua

SEQ ID NO: 32443 - DNA, 25 bp, Artificial Sequence
  Synthetic
cacaccatguctcttgtctcugaag

SEQ ID NO: 32444 - DNA, 18 bp, Artificial Sequence
  Synthetic
gggtggcgaucacttguc

SEQ ID NO: 32445 - DNA, 25 bp, Artificial Sequence
  Synthetic
gggagtcucgcaaggataagaaaua

SEQ ID NO: 32446 - DNA, 20 bp, Artificial Sequence
  Synthetic
gggcttgacugttcccaucc

SEQ ID NO: 32447 - DNA, 25 bp, Artificial Sequence
  Synthetic
caaacgtacagcaguctctcttcut

SEQ ID NO: 32448 - DNA, 22 bp, Artificial Sequence
  Synthetic
cctctucccccaacctaucagt

SEQ ID NO: 32449 - DNA, 22 bp, Artificial Sequence
  Synthetic
ctacagtgacaauggcacgtuc

SEQ ID NO: 32450 - DNA, 22 bp, Artificial Sequence
  Synthetic
gttauccaaccccaggatuccc

SEQ ID NO: 32451 - DNA, 23 bp, Artificial Sequence
  Synthetic
atctgatuccccactttgtgcut

SEQ ID NO: 32452 - DNA, 28 bp, Artificial Sequence
  Synthetic
ttcagcaatgttgutactggaaatgtuc

SEQ ID NO: 32453 - DNA, 28 bp, Artificial Sequence
  Synthetic
cctgtctatuacaacaacatgctacuca

SEQ ID NO: 32454 - DNA, 29 bp, Artificial Sequence
  Synthetic
gcatttacaaaucagtcttttccaacuct

SEQ ID NO: 32455 - DNA, 28 bp, Artificial Sequence
  Synthetic
gacttcttcagcautatgacaagagcua

SEQ ID NO: 32456 - DNA, 31 bp, Artificial Sequence
  Synthetic
cagtgtaaauaaacatcctgatttugcaact

SEQ ID NO: 32457 - DNA, 23 bp, Artificial Sequence
  Synthetic
gtcagttatguggctagcagcut

SEQ ID NO: 32458 - DNA, 22 bp, Artificial Sequence
  Synthetic
ggtgcucaccagaatauccact

SEQ ID NO: 32459 - DNA, 28 bp, Artificial Sequence
  Synthetic
gtaaattgttcutgaggaaggtuccaaa

SEQ ID NO: 32460 - DNA, 30 bp, Artificial Sequence
  Synthetic
atatggaccaauaaaacaagagggaaauat

SEQ ID NO: 32461 - DNA, 22 bp, Artificial Sequence
  Synthetic
ccctcaaauatggtcccaucct

SEQ ID NO: 32462 - DNA, 28 bp, Artificial Sequence
  Synthetic
aggagtattucctcctctactugagaag

SEQ ID NO: 32463 - DNA, 26 bp, Artificial Sequence
  Synthetic
tccaaagttatugtcactggcatuca

SEQ ID NO: 32464 - DNA, 25 bp, Artificial Sequence
  Synthetic
ctcacugatataaagtugcgagcca

SEQ ID NO: 32465 - DNA, 24 bp, Artificial Sequence
  Synthetic
gccaaaauaaacttccauggccaa

SEQ ID NO: 32466 - DNA, 21 bp, Artificial Sequence
  Synthetic
tcgtugaaacccaugcagaca

SEQ ID NO: 32467 - DNA, 30 bp, Artificial Sequence
  Synthetic
gtctgggtatugtcagtaacttucagaaat

SEQ ID NO: 32468 - DNA, 23 bp, Artificial Sequence
  Synthetic
ctctcugagacagacagggauca

SEQ ID NO: 32469 - DNA, 26 bp, Artificial Sequence
  Synthetic
gccagaaauaaaccaggaaaaaugcc

SEQ ID NO: 32470 - DNA, 24 bp, Artificial Sequence
  Synthetic
tgutcttgtucagacacagccaat

SEQ ID NO: 32471 - DNA, 23 bp, Artificial Sequence
  Synthetic
aaataccuccatgtuggcaggag

SEQ ID NO: 32472 - DNA, 25 bp, Artificial Sequence
  Synthetic
aggatggaatugatggttactccug

SEQ ID NO: 32473 - DNA, 26 bp, Artificial Sequence
  Synthetic
gctaactacaccauctgtgatucaga

SEQ ID NO: 32474 - DNA, 22 bp, Artificial Sequence
  Synthetic
tgttggucccagccttgttuaa

SEQ ID NO: 32475 - DNA, 20 bp, Artificial Sequence
  Synthetic
cuaagccaaucacccaacgc

SEQ ID NO: 32476 - DNA, 29 bp, Artificial Sequence
  Synthetic
ttactttccagauatagctgtaacugcac

SEQ ID NO: 32477 - DNA, 26 bp, Artificial Sequence
  Synthetic
attggtggaagguattttgtcacuca

SEQ ID NO: 32478 - DNA, 22 bp, Artificial Sequence
  Synthetic
gcaataguaacccctgccaguc

SEQ ID NO: 32479 - DNA, 28 bp, Artificial Sequence
  Synthetic
agaaagtcaagtcauatcccatctccut

SEQ ID NO: 32480 - DNA, 25 bp, Artificial Sequence
  Synthetic
aatgaatgttcutcaaaccctugcc

SEQ ID NO: 32481 - DNA, 26 bp, Artificial Sequence
  Synthetic
aagtgagggaugcatgttccattaut

SEQ ID NO: 32482 - DNA, 22 bp, Artificial Sequence
  Synthetic
ggtcaaaaguggctcagugaca

SEQ ID NO: 32483 - DNA, 23 bp, Artificial Sequence
  Synthetic
ctggtgtugtgggaaaugaacag

SEQ ID NO: 32484 - DNA, 20 bp, Artificial Sequence
  Synthetic
gcaucgcgaaagctccuact

SEQ ID NO: 32485 - DNA, 23 bp, Artificial Sequence
  Synthetic
atgaugagccagaugagatgtuc

SEQ ID NO: 32486 - DNA, 29 bp, Artificial Sequence
  Synthetic
ttttctcctccucctctattttgacatug

SEQ ID NO: 32487 - DNA, 27 bp, Artificial Sequence
  Synthetic
ccagacacggauatattgataagugct

SEQ ID NO: 32488 - DNA, 28 bp, Artificial Sequence
  Synthetic
ctgtatcagtcutcacaaaaccuaggat

SEQ ID NO: 32489 - DNA, 31 bp, Artificial Sequence
  Synthetic
gaaagaattccagautttggttgtttaguct

SEQ ID NO: 32490 - DNA, 25 bp, Artificial Sequence
  Synthetic
aaacagatatguggtttcaccguca

SEQ ID NO: 32491 - DNA, 22 bp, Artificial Sequence
  Synthetic
tgaatccacaccacugaaccuc

SEQ ID NO: 32492 - DNA, 29 bp, Artificial Sequence
  Synthetic
tcaccttctctcautaggtattgcaaaug

SEQ ID NO: 32493 - DNA, 23 bp, Artificial Sequence
  Synthetic
gctgttgccacuttgcaatugaa

SEQ ID NO: 32494 - DNA, 24 bp, Artificial Sequence
  Synthetic
gcaaauggaaguggacaacgaaac

SEQ ID NO: 32495 - DNA, 30 bp, Artificial Sequence
  Synthetic
agtaagagagataaaugcctccgatttcua

SEQ ID NO: 32496 - DNA, 21 bp, Artificial Sequence
  Synthetic
cccugtttgcauggaggaaac

SEQ ID NO: 32497 - DNA, 28 bp, Artificial Sequence
  Synthetic
ttgtctatauccacttcacagtucacac

SEQ ID NO: 32498 - DNA, 28 bp, Artificial Sequence
  Synthetic
cttgaatgagaugaacaagaugaacagc

SEQ ID NO: 32499 - DNA, 25 bp, Artificial Sequence
  Synthetic
tcttccagaaggcuctaatgugact

SEQ ID NO: 32500 - DNA, 23 bp, Artificial Sequence
  Synthetic
cttgctctggutggtcttcatuc

SEQ ID NO: 32501 - DNA, 21 bp, Artificial Sequence
  Synthetic
acaauggccagcaagaggauc

SEQ ID NO: 32502 - DNA, 21 bp, Artificial Sequence
  Synthetic
ccctgcaauggagagacugat

SEQ ID NO: 32503 - DNA, 19 bp, Artificial Sequence
  Synthetic
acaauggtgucgagcggaa

SEQ ID NO: 32504 - DNA, 21 bp, Artificial Sequence
  Synthetic
ggattccuccccaguggagaa

SEQ ID NO: 32505 - DNA, 22 bp, Artificial Sequence
  Synthetic
cctaaaguacagccuggaccac

SEQ ID NO: 32506 - DNA, 23 bp, Artificial Sequence
  Synthetic
cacttgcagguggcataguagag

SEQ ID NO: 32507 - DNA, 21 bp, Artificial Sequence
  Synthetic
cctcctgcugctgttccatut

SEQ ID NO: 32508 - DNA, 22 bp, Artificial Sequence
  Synthetic
cattgagcuaactccgcctuct

SEQ ID NO: 32509 - DNA, 23 bp, Artificial Sequence
  Synthetic
ccagatcuccctcttuccacaaa

SEQ ID NO: 32510 - DNA, 23 bp, Artificial Sequence
  Synthetic
tgtaccactcuccaccatgguaa

SEQ ID NO: 32511 - DNA, 19 bp, Artificial Sequence
  Synthetic
gctccccaacguggactug

SEQ ID NO: 32512 - DNA, 22 bp, Artificial Sequence
  Synthetic
gctgaugcactgaacaugggaa

SEQ ID NO: 32513 - DNA, 20 bp, Artificial Sequence
  Synthetic
atuagggcagucgaggaauc

SEQ ID NO: 32514 - DNA, 20 bp, Artificial Sequence
  Synthetic
tcctgtcugcctcctccuac

SEQ ID NO: 32515 - DNA, 22 bp, Artificial Sequence
  Synthetic
agatggctugcaccccaatauc

SEQ ID NO: 32516 - DNA, 20 bp, Artificial Sequence
  Synthetic
gtcccugagctgguccaaaa

SEQ ID NO: 32517 - DNA, 17 bp, Artificial Sequence
  Synthetic
ccacccccuctcccucc

SEQ ID NO: 32518 - DNA, 23 bp, Artificial Sequence
  Synthetic
gaagcttcugtcaagactcucca

SEQ ID NO: 32519 - DNA, 23 bp, Artificial Sequence
  Synthetic
agtgtaagcucctctcccttcuc

SEQ ID NO: 32520 - DNA, 19 bp, Artificial Sequence
  Synthetic
ctgcugagaactgcucgga

SEQ ID NO: 32521 - DNA, 21 bp, Artificial Sequence
  Synthetic
cacccttgcutccagaccuat

SEQ ID NO: 32522 - DNA, 18 bp, Artificial Sequence
  Synthetic
gcctgaugccttgucgca

SEQ ID NO: 32523 - DNA, 23 bp, Artificial Sequence
  Synthetic
tgtagaaagagccucaggucaga

SEQ ID NO: 32524 - DNA, 20 bp, Artificial Sequence
  Synthetic
cggaccacccucacttcgua

SEQ ID NO: 32525 - DNA, 18 bp, Artificial Sequence
  Synthetic
ggacaugccgtgugacga

SEQ ID NO: 32526 - DNA, 20 bp, Artificial Sequence
  Synthetic
gggcauaccccctctgtcua

SEQ ID NO: 32527 - DNA, 20 bp, Artificial Sequence
  Synthetic
ggagagcgcugtgacctaug

SEQ ID NO: 32528 - DNA, 21 bp, Artificial Sequence
  Synthetic
agccaagutttcatgcuccct

SEQ ID NO: 32529 - DNA, 20 bp, Artificial Sequence
  Synthetic
aagaactgugagcggtguca

SEQ ID NO: 32530 - DNA, 19 bp, Artificial Sequence
  Synthetic
cacucgacccagacccuac

SEQ ID NO: 32531 - DNA, 26 bp, Artificial Sequence
  Synthetic
gcccttcttugttgattactccugat

SEQ ID NO: 32532 - DNA, 19 bp, Artificial Sequence
  Synthetic
agcauggccgugacagaag

SEQ ID NO: 32533 - DNA, 28 bp, Artificial Sequence
  Synthetic
catatgaaggagacuctatgtgcctcua

SEQ ID NO: 32534 - DNA, 23 bp, Artificial Sequence
  Synthetic
gaacagtgggacaucagggatut

SEQ ID NO: 32535 - DNA, 20 bp, Artificial Sequence
  Synthetic
gatugagcgctccucagact

SEQ ID NO: 32536 - DNA, 22 bp, Artificial Sequence
  Synthetic
gagagacaaggacacugtgcuc

SEQ ID NO: 32537 - DNA, 23 bp, Artificial Sequence
  Synthetic
tggacagtcuctggatgacagut

SEQ ID NO: 32538 - DNA, 20 bp, Artificial Sequence
  Synthetic
ttccuccagtccugggaagt

SEQ ID NO: 32539 - DNA, 21 bp, Artificial Sequence
  Synthetic
tggactgcuccatcacacauc

SEQ ID NO: 32540 - DNA, 22 bp, Artificial Sequence
  Synthetic
gaccuttccuaggacacagcaa

SEQ ID NO: 32541 - DNA, 22 bp, Artificial Sequence
  Synthetic
tcacaugccactugagacaagg

SEQ ID NO: 32542 - DNA, 20 bp, Artificial Sequence
  Synthetic
gcucaaccccggatcugaac

SEQ ID NO: 32543 - DNA, 25 bp, Artificial Sequence
  Synthetic
gtatgttaccugtctttaccugcct

SEQ ID NO: 32544 - DNA, 31 bp, Artificial Sequence
  Synthetic
atutcttagacctctatuaggaaggaacact

SEQ ID NO: 32545 - DNA, 23 bp, Artificial Sequence
  Synthetic
tgacuaaggaacgcaccacatuc

SEQ ID NO: 32546 - DNA, 21 bp, Artificial Sequence
  Synthetic
ggcagcatucggtgaaguaca

SEQ ID NO: 32547 - DNA, 24 bp, Artificial Sequence
  Synthetic
ccagcucatggacatucaagacaa

SEQ ID NO: 32548 - DNA, 24 bp, Artificial Sequence
  Synthetic
tccttgtuaccatggctaugacac

SEQ ID NO: 32549 - DNA, 22 bp, Artificial Sequence
  Synthetic
tggccatttutctgtcccugat

SEQ ID NO: 32550 - DNA, 29 bp, Artificial Sequence
  Synthetic
aacatatgtgtgtutcttgaggaagauga

SEQ ID NO: 32551 - DNA, 28 bp, Artificial Sequence
  Synthetic
ccctatttguaggtgttgaaugaacaag

SEQ ID NO: 32552 - DNA, 19 bp, Artificial Sequence
  Synthetic
ccctccgucggtuaacacg

SEQ ID NO: 32553 - DNA, 23 bp, Artificial Sequence
  Synthetic
cctgcactccutcaaagaggtua

SEQ ID NO: 32554 - DNA, 20 bp, Artificial Sequence
  Synthetic
gatccacucggaagccguac

SEQ ID NO: 32555 - DNA, 27 bp, Artificial Sequence
  Synthetic
gtcttgactcuacgtatccattcucat

SEQ ID NO: 32556 - DNA, 22 bp, Artificial Sequence
  Synthetic
gtgcaggccuctactccaauag

SEQ ID NO: 32557 - DNA, 25 bp, Artificial Sequence
  Synthetic
tttgtaggaggugggatcttggaua

SEQ ID NO: 32558 - DNA, 22 bp, Artificial Sequence
  Synthetic
actgatgtugaccactgctugg

SEQ ID NO: 32559 - DNA, 28 bp, Artificial Sequence
  Synthetic
cttgcttttgacagucttgttgattuct

SEQ ID NO: 32560 - DNA, 26 bp, Artificial Sequence
  Synthetic
agcttccgtuatagattaggacugga

SEQ ID NO: 32561 - DNA, 25 bp, Artificial Sequence
  Synthetic
aagtgacuggacattcauacagacc

SEQ ID NO: 32562 - DNA, 23 bp, Artificial Sequence
  Synthetic
ccaagggcucaggcaauagaaag

SEQ ID NO: 32563 - DNA, 30 bp, Artificial Sequence
  Synthetic
cagtgagaacaaauggtgatatcatcaaut

SEQ ID NO: 32564 - DNA, 22 bp, Artificial Sequence
  Synthetic
gactcaaaauaccccctuggct

SEQ ID NO: 32565 - DNA, 22 bp, Artificial Sequence
  Synthetic
ccuggaaaccuccaagaaaccc

SEQ ID NO: 32566 - DNA, 20 bp, Artificial Sequence
  Synthetic
cctccatucgtgcaggcuac

SEQ ID NO: 32567 - DNA, 23 bp, Artificial Sequence
  Synthetic
agaagtcagcccuccagatctut

SEQ ID NO: 32568 - DNA, 28 bp, Artificial Sequence
  Synthetic
aaagtcacaggaucaaagcuaaaaggat

SEQ ID NO: 32569 - DNA, 23 bp, Artificial Sequence
  Synthetic
aattcagcugggcatacctguag

SEQ ID NO: 32570 - DNA, 21 bp, Artificial Sequence
  Synthetic
ccccaagcutttcccucgaag

SEQ ID NO: 32571 - DNA, 22 bp, Artificial Sequence
  Synthetic
ctctctacacacugacccugga

SEQ ID NO: 32572 - DNA, 24 bp, Artificial Sequence
  Synthetic
ggcatgucagggctcatctattua

SEQ ID NO: 32573 - DNA, 25 bp, Artificial Sequence
  Synthetic
gcaggagaaautttaagccctugga

SEQ ID NO: 32574 - DNA, 28 bp, Artificial Sequence
  Synthetic
gcatgtctgtuacttttctaaaggguct

SEQ ID NO: 32575 - DNA, 22 bp, Artificial Sequence
  Synthetic
acacaaacuctggaagcuccac

SEQ ID NO: 32576 - DNA, 21 bp, Artificial Sequence
  Synthetic
gtgttggagcaguacgcatuc

SEQ ID NO: 32577 - DNA, 25 bp, Artificial Sequence
  Synthetic
tttcaaggaagutgtggagtuagca

SEQ ID NO: 32578 - DNA, 28 bp, Artificial Sequence
  Synthetic
tcaccattttgacaugcttgtatcctua

SEQ ID NO: 32579 - DNA, 31 bp, Artificial Sequence
  Synthetic
tgtttttaatgttcuctctctctctctcuct

SEQ ID NO: 32580 - DNA, 27 bp, Artificial Sequence
  Synthetic
atttcttctggtgutgacataggtgut

SEQ ID NO: 32581 - DNA, 30 bp, Artificial Sequence
  Synthetic
tcacaaatttaggacuaagcaattgauaca

SEQ ID NO: 32582 - DNA, 26 bp, Artificial Sequence
  Synthetic
ggaaaagcaaguttccattacgacuc

SEQ ID NO: 32583 - DNA, 25 bp, Artificial Sequence
  Synthetic
gggatggugtgacttttgauacact

SEQ ID NO: 32584 - DNA, 26 bp, Artificial Sequence
  Synthetic
gugacctcatataucaaacacacacc

SEQ ID NO: 32585 - DNA, 22 bp, Artificial Sequence
  Synthetic
agagtaccagaucaggcaggut

SEQ ID NO: 32586 - DNA, 22 bp, Artificial Sequence
  Synthetic
ctgaaccccutttcccagagut

SEQ ID NO: 32587 - DNA, 28 bp, Artificial Sequence
  Synthetic
tcaaatgcagtcauttttctgcttctut

SEQ ID NO: 32588 - DNA, 28 bp, Artificial Sequence
  Synthetic
ttcaagattgtctautttggtccacgua

SEQ ID NO: 32589 - DNA, 27 bp, Artificial Sequence
  Synthetic
tttttctcttuccagatgtgaaccuca

SEQ ID NO: 32590 - DNA, 27 bp, Artificial Sequence
  Synthetic
aacacatttctucaattgatgcctucc

SEQ ID NO: 32591 - DNA, 28 bp, Artificial Sequence
  Synthetic
cacaaaagccuaccctatgtatgtcuaa

SEQ ID NO: 32592 - DNA, 23 bp, Artificial Sequence
  Synthetic
tggcaccgggucattcttttuaa

SEQ ID NO: 32593 - DNA, 27 bp, Artificial Sequence
  Synthetic
actttatagcagccucagttttctucc

SEQ ID NO: 32594 - DNA, 23 bp, Artificial Sequence
  Synthetic
cacagcaaauctggtttccugag

SEQ ID NO: 32595 - DNA, 23 bp, Artificial Sequence
  Synthetic
aatcagttgggauctgcaagaug

SEQ ID NO: 32596 - DNA, 30 bp, Artificial Sequence
  Synthetic
acatcatggtgugagaagctaataattuca

SEQ ID NO: 32597 - DNA, 28 bp, Artificial Sequence
  Synthetic
gtatccatgcgcuaaaactcaaaagtua

SEQ ID NO: 32598 - DNA, 27 bp, Artificial Sequence
  Synthetic
cattaaatgagautgtcatggcugaga

SEQ ID NO: 32599 - DNA, 24 bp, Artificial Sequence
  Synthetic
cccaaautaccactguggaagaca

SEQ ID NO: 32600 - DNA, 22 bp, Artificial Sequence
  Synthetic
cacttgaagacauagccuggca

SEQ ID NO: 32601 - DNA, 25 bp, Artificial Sequence
  Synthetic
gtgtcatcuggacatctcctucaaa

SEQ ID NO: 32602 - DNA, 30 bp, Artificial Sequence
  Synthetic
gaaattttataauggagggatgactgauct

SEQ ID NO: 32603 - DNA, 28 bp, Artificial Sequence
  Synthetic
aagccaaacacagaguattggatcttua

SEQ ID NO: 32604 - DNA, 31 bp, Artificial Sequence
  Synthetic
gggaggttcataguaaagaaagaatatgcut

SEQ ID NO: 32605 - DNA, 22 bp, Artificial Sequence
  Synthetic
tgtgacaacgutagctggtcut

SEQ ID NO: 32606 - DNA, 27 bp, Artificial Sequence
  Synthetic
actttgaacuattcaacaugcccagaa

SEQ ID NO: 32607 - DNA, 27 bp, Artificial Sequence
  Synthetic
gatgttcctgcutgtcttttgcttuag

SEQ ID NO: 32608 - DNA, 25 bp, Artificial Sequence
  Synthetic
acttagtggaaucacagacaauggg

SEQ ID NO: 32609 - DNA, 21 bp, Artificial Sequence
  Synthetic
gcctgacccucacatcactut

SEQ ID NO: 32610 - DNA, 24 bp, Artificial Sequence
  Synthetic
tcaacacagagucaatccagggua

SEQ ID NO: 32611 - DNA, 27 bp, Artificial Sequence
  Synthetic
gctcttagcccauggacaaaataugaa

SEQ ID NO: 32612 - DNA, 25 bp, Artificial Sequence
  Synthetic
gggtugccaagatataaucacagat

SEQ ID NO: 32613 - DNA, 25 bp, Artificial Sequence
  Synthetic
ctggaaaugtcactaatugcacagt

SEQ ID NO: 32614 - DNA, 27 bp, Artificial Sequence
  Synthetic
cctatgtagaagacauttggctgtgua

SEQ ID NO: 32615 - DNA, 29 bp, Artificial Sequence
  Synthetic
tttcccatacaggutattttccaatccut

SEQ ID NO: 32616 - DNA, 28 bp, Artificial Sequence
  Synthetic
agatagccaacauttgcatagactuacc

SEQ ID NO: 32617 - DNA, 23 bp, Artificial Sequence
  Synthetic
gucatguacaguggagaagagac

SEQ ID NO: 32618 - DNA, 30 bp, Artificial Sequence
  Synthetic
caaattacctggguctacatagaatauccc

SEQ ID NO: 32619 - DNA, 24 bp, Artificial Sequence
  Synthetic
actcacagguggaaaatcgaacuc

SEQ ID NO: 32620 - DNA, 21 bp, Artificial Sequence
  Synthetic
tgagucaccgccacttactuc

SEQ ID NO: 32621 - DNA, 23 bp, Artificial Sequence
  Synthetic
ctatcgtgctuacggatttgcuc

SEQ ID NO: 32622 - DNA, 25 bp, Artificial Sequence
  Synthetic
attaagcaccacauataagcugcca

SEQ ID NO: 32623 - DNA, 21 bp, Artificial Sequence
  Synthetic
cugacgaggacauacccgaag

SEQ ID NO: 32624 - DNA, 23 bp, Artificial Sequence
  Synthetic
gggagaagaaguggaaggaaugg

SEQ ID NO: 32625 - DNA, 29 bp, Artificial Sequence
  Synthetic
gtgggattcuggaacgctatgtattauat

SEQ ID NO: 32626 - DNA, 25 bp, Artificial Sequence
  Synthetic
ccagcatgugagagagacaacatut

SEQ ID NO: 32627 - DNA, 29 bp, Artificial Sequence
  Synthetic
gctgagtaaattcutgtttctccctaucc

SEQ ID NO: 32628 - DNA, 24 bp, Artificial Sequence
  Synthetic
gcctcccauccatgtauaaacagt

SEQ ID NO: 32629 - DNA, 27 bp, Artificial Sequence
  Synthetic
tccatgatttatuggtttgggtcugaa

SEQ ID NO: 32630 - DNA, 29 bp, Artificial Sequence
  Synthetic
tgcaaacaaaaaggaagutaataggguct

SEQ ID NO: 32631 - DNA, 28 bp, Artificial Sequence
  Synthetic
ctgttgtcagaggugtaattgagaagua

SEQ ID NO: 32632 - DNA, 24 bp, Artificial Sequence
  Synthetic
gtgtgtgugcacatatgcattuga

SEQ ID NO: 32633 - DNA, 28 bp, Artificial Sequence
  Synthetic
gccagccccucattaatctatatgagua

SEQ ID NO: 32634 - DNA, 23 bp, Artificial Sequence
  Synthetic
atccagautgactcugacagcac

SEQ ID NO: 32635 - DNA, 25 bp, Artificial Sequence
  Synthetic
ctgcagaggacaaaaaugattggua

SEQ ID NO: 32636 - DNA, 21 bp, Artificial Sequence
  Synthetic
actccgaugcatgcttcauca

SEQ ID NO: 32637 - DNA, 30 bp, Artificial Sequence
  Synthetic
ccttctgcagccuttttatatacctactut

SEQ ID NO: 32638 - DNA, 30 bp, Artificial Sequence
  Synthetic
caatccatttaatuggtcagttctgaacut

SEQ ID NO: 32639 - DNA, 28 bp, Artificial Sequence
  Synthetic
tcctagagttucttagcaccctuacaat

SEQ ID NO: 32640 - DNA, 21 bp, Artificial Sequence
  Synthetic
cctcccagcugttauacacgt

SEQ ID NO: 32641 - DNA, 28 bp, Artificial Sequence
  Synthetic
gcctatttcuttgactttaauggcacat

SEQ ID NO: 32642 - DNA, 27 bp, Artificial Sequence
  Synthetic
acagaaaagtauggcaacaccaacaua

SEQ ID NO: 32643 - DNA, 30 bp, Artificial Sequence
  Synthetic
agtaactacaacuaatgatcauggcaaaca

SEQ ID NO: 32644 - DNA, 23 bp, Artificial Sequence
  Synthetic
tttacctcaguaccaggcaccua

SEQ ID NO: 32645 - DNA, 25 bp, Artificial Sequence
  Synthetic
tttgctgaucacacttgtctuacca

SEQ ID NO: 32646 - DNA, 27 bp, Artificial Sequence
  Synthetic
cttcgtgtcucctaaataaagcaaugt

SEQ ID NO: 32647 - DNA, 29 bp, Artificial Sequence
  Synthetic
cctatatatcagcuggaaaggagagaguc

SEQ ID NO: 32648 - DNA, 29 bp, Artificial Sequence
  Synthetic
tcatatccatuaaaacttgcttaccugct

SEQ ID NO: 32649 - DNA, 23 bp, Artificial Sequence
  Synthetic
aagctgtugcacactgctaaauc

SEQ ID NO: 32650 - DNA, 22 bp, Artificial Sequence
  Synthetic
tgtccaaaugaagcccuaagcc

SEQ ID NO: 32651 - DNA, 23 bp, Artificial Sequence
  Synthetic
tcaauatctccugggagaagcca

SEQ ID NO: 32652 - DNA, 28 bp, Artificial Sequence
  Synthetic
aatttgaggaaacauttgcatucagagg

SEQ ID NO: 32653 - DNA, 28 bp, Artificial Sequence
  Synthetic
gtagaatcggccaaugaaaatgcatuaa

SEQ ID NO: 32654 - DNA, 22 bp, Artificial Sequence
  Synthetic
gggaatcucagccttggatuct

SEQ ID NO: 32655 - DNA, 23 bp, Artificial Sequence
  Synthetic
cagctaccauctggaatctggut

SEQ ID NO: 32656 - DNA, 28 bp, Artificial Sequence
  Synthetic
acagagtcugagccaataggaatgauat

SEQ ID NO: 32657 - DNA, 29 bp, Artificial Sequence
  Synthetic
ttcaccaacttgugaaatgtaactttgut

SEQ ID NO: 32658 - DNA, 27 bp, Artificial Sequence
  Synthetic
ccatccctgaguaaactgtaaguaagc

SEQ ID NO: 32659 - DNA, 28 bp, Artificial Sequence
  Synthetic
tgctggatatctuacttcagtttgctut

SEQ ID NO: 32660 - DNA, 21 bp, Artificial Sequence
  Synthetic
cacugggaacacaagcaucac

SEQ ID NO: 32661 - DNA, 30 bp, Artificial Sequence
  Synthetic
tcttactctacaaugctattggtaggtgua

SEQ ID NO: 32662 - DNA, 22 bp, Artificial Sequence
  Synthetic
acacacugaccagtcaggcuat

SEQ ID NO: 32663 - DNA, 29 bp, Artificial Sequence
  Synthetic
cttggtagagtatuctgtttttctgtgua

SEQ ID NO: 32664 - DNA, 23 bp, Artificial Sequence
  Synthetic
ggtcaaatugtacctgugaggct

SEQ ID NO: 32665 - DNA, 22 bp, Artificial Sequence
  Synthetic
catcugcaagcccaatgtugaa

SEQ ID NO: 32666 - DNA, 25 bp, Artificial Sequence
  Synthetic
cactgaagtccuttggcttctttut

SEQ ID NO: 32667 - DNA, 27 bp, Artificial Sequence
  Synthetic
gaatgaaatcautttcccatccucacc

SEQ ID NO: 32668 - DNA, 22 bp, Artificial Sequence
  Synthetic
agccatcaggauccaactctug

SEQ ID NO: 32669 - DNA, 31 bp, Artificial Sequence
  Synthetic
cctgtcttgtaccuaatgagcaaattatcua

SEQ ID NO: 32670 - DNA, 25 bp, Artificial Sequence
  Synthetic
tgcautgtagauagaagcacacagg

SEQ ID NO: 32671 - DNA, 28 bp, Artificial Sequence
  Synthetic
tcaattguaaaccttgtcaaugcaacag

SEQ ID NO: 32672 - DNA, 26 bp, Artificial Sequence
  Synthetic
aatgtaaagctugaaatctggctugc

SEQ ID NO: 32673 - DNA, 24 bp, Artificial Sequence
  Synthetic
gagttcguaaaagccacgcaaaua

SEQ ID NO: 32674 - DNA, 21 bp, Artificial Sequence
  Synthetic
gaagtcuccaccagccuagag

SEQ ID NO: 32675 - DNA, 24 bp, Artificial Sequence
  Synthetic
aggaattgtggugcttttggaaug

SEQ ID NO: 32676 - DNA, 24 bp, Artificial Sequence
  Synthetic
gacatgaagtutgtgggcattugt

SEQ ID NO: 32677 - DNA, 27 bp, Artificial Sequence
  Synthetic
gataatagagtgucacggttgaaucct

SEQ ID NO: 32678 - DNA, 27 bp, Artificial Sequence
  Synthetic
agtgaattcagcauttatccttucggt

SEQ ID NO: 32679 - DNA, 29 bp, Artificial Sequence
  Synthetic
ggtattgcttgguaaacagagacttctua

SEQ ID NO: 32680 - DNA, 26 bp, Artificial Sequence
  Synthetic
atttctucacaagaattcuccccagt

SEQ ID NO: 32681 - DNA, 24 bp, Artificial Sequence
  Synthetic
tctcttttccggutgcttccuaag

SEQ ID NO: 32682 - DNA, 22 bp, Artificial Sequence
  Synthetic
ctatgggcgutaggaugcagat

SEQ ID NO: 32683 - DNA, 22 bp, Artificial Sequence
  Synthetic
gaaaguttccatcgugccaacc

SEQ ID NO: 32684 - DNA, 24 bp, Artificial Sequence
  Synthetic
ccaatgaaagaacugggcaatuca

SEQ ID NO: 32685 - DNA, 25 bp, Artificial Sequence
  Synthetic
gataccagcagcuactcatgtctuc

SEQ ID NO: 32686 - DNA, 22 bp, Artificial Sequence
  Synthetic
ctcugacagugaggaagaagug

SEQ ID NO: 32687 - DNA, 23 bp, Artificial Sequence
  Synthetic
gcatcagggaaugaatgtcuggt

SEQ ID NO: 32688 - DNA, 22 bp, Artificial Sequence
  Synthetic
agagcugaccctcaaauacgga

SEQ ID NO: 32689 - DNA, 22 bp, Artificial Sequence
  Synthetic
cagguacagugaccaacacagg

SEQ ID NO: 32690 - DNA, 20 bp, Artificial Sequence
  Synthetic
tcctcaacuccgtgcugaac

SEQ ID NO: 32691 - DNA, 24 bp, Artificial Sequence
  Synthetic
gtgtttttcuaaaggcggctgtut

SEQ ID NO: 32692 - DNA, 21 bp, Artificial Sequence
  Synthetic
ggttgggacugaatggtggua

SEQ ID NO: 32693 - DNA, 23 bp, Artificial Sequence
  Synthetic
gcactgaucatgatgagguaggc

SEQ ID NO: 32694 - DNA, 24 bp, Artificial Sequence
  Synthetic
tgacaaggaugtctctgtctucct

SEQ ID NO: 32695 - DNA, 21 bp, Artificial Sequence
  Synthetic
cccagucaactcugaaagcca

SEQ ID NO: 32696 - DNA, 21 bp, Artificial Sequence
  Synthetic
agctttgtuccctgguaacac

SEQ ID NO: 32697 - DNA, 21 bp, Artificial Sequence
  Synthetic
cgtgtgaacaugggcacctua

SEQ ID NO: 32698 - DNA, 21 bp, Artificial Sequence
  Synthetic
gtccucgaacaagctcctgug

SEQ ID NO: 32699 - DNA, 21 bp, Artificial Sequence
  Synthetic
aaagaugagcccgaacgugat

SEQ ID NO: 32700 - DNA, 17 bp, Artificial Sequence
  Synthetic
gtggacggcucggtgut

SEQ ID NO: 32701 - DNA, 22 bp, Artificial Sequence
  Synthetic
gcctgaagaaucccacacucac

SEQ ID NO: 32702 - DNA, 21 bp, Artificial Sequence
  Synthetic
cccccaccuattctuccaagg

SEQ ID NO: 32703 - DNA, 24 bp, Artificial Sequence
  Synthetic
gcttgcugaacaaatctacugggt

SEQ ID NO: 32704 - DNA, 24 bp, Artificial Sequence
  Synthetic
ggatgctaccutttcagctgtcua

SEQ ID NO: 32705 - DNA, 22 bp, Artificial Sequence
  Synthetic
gcccagaggucttcattcucag

SEQ ID NO: 32706 - DNA, 24 bp, Artificial Sequence
  Synthetic
caaauttatgcagttugcaagcca

SEQ ID NO: 32707 - DNA, 25 bp, Artificial Sequence
  Synthetic
tcttcagauacggcagcaaaaucat

SEQ ID NO: 32708 - DNA, 27 bp, Artificial Sequence
  Synthetic
ccattactatuctgttggaccuccaaa

SEQ ID NO: 32709 - DNA, 25 bp, Artificial Sequence
  Synthetic
gttgctgctuggaaactttactuga

SEQ ID NO: 32710 - DNA, 25 bp, Artificial Sequence
  Synthetic
cautgggaaagauggagaaaagcaa

SEQ ID NO: 32711 - DNA, 23 bp, Artificial Sequence
  Synthetic
aaaugtaaccaggucaccagacc

SEQ ID NO: 32712 - DNA, 20 bp, Artificial Sequence
  Synthetic
gaccttuccgagccctctut

SEQ ID NO: 32713 - DNA, 20 bp, Artificial Sequence
  Synthetic
tctaggtgcuctccagggut

SEQ ID NO: 32714 - DNA, 17 bp, Artificial Sequence
  Synthetic
cccagccaugctgugct

SEQ ID NO: 32715 - DNA, 18 bp, Artificial Sequence
  Synthetic
gctucagacccgccagug

SEQ ID NO: 32716 - DNA, 22 bp, Artificial Sequence
  Synthetic
cgaaggugaaccagacacaguc

SEQ ID NO: 32717 - DNA, 25 bp, Artificial Sequence
  Synthetic
gtatactccacaaucctaccugcac

SEQ ID NO: 32718 - DNA, 20 bp, Artificial Sequence
  Synthetic
gguggagggaugccagaaac

SEQ ID NO: 32719 - DNA, 17 bp, Artificial Sequence
  Synthetic
ggccaacgugggcuacc

SEQ ID NO: 32720 - DNA, 23 bp, Artificial Sequence
  Synthetic
ctcattagggcccuctcctctua

SEQ ID NO: 32721 - DNA, 23 bp, Artificial Sequence
  Synthetic
gcacttcgcuttcttttgauccc

SEQ ID NO: 32722 - DNA, 22 bp, Artificial Sequence
  Synthetic
tggtgagatgguccctgagaut

SEQ ID NO: 32723 - DNA, 21 bp, Artificial Sequence
  Synthetic
gctgttucccttgtggauccg

SEQ ID NO: 32724 - DNA, 21 bp, Artificial Sequence
  Synthetic
agggaucagcaggcactgaua

SEQ ID NO: 32725 - DNA, 21 bp, Artificial Sequence
  Synthetic
cgtgtgcacugacacctaugt

SEQ ID NO: 32726 - DNA, 26 bp, Artificial Sequence
  Synthetic
tgcaccacacuttatttaacgcttug

SEQ ID NO: 32727 - DNA, 22 bp, Artificial Sequence
  Synthetic
gacagugaggaccccaaaugag

SEQ ID NO: 32728 - DNA, 24 bp, Artificial Sequence
  Synthetic
aaggaaaguaaaaccctgtgcuca

SEQ ID NO: 32729 - DNA, 18 bp, Artificial Sequence
  Synthetic
cctccugcagaccuccca

SEQ ID NO: 32730 - DNA, 20 bp, Artificial Sequence
  Synthetic
cagagtccccauggagctug

SEQ ID NO: 32731 - DNA, 20 bp, Artificial Sequence
  Synthetic
tgggatacuggcaggaugct

SEQ ID NO: 32732 - DNA, 22 bp, Artificial Sequence
  Synthetic
tgcagttccuttcctgtgtuca

SEQ ID NO: 32733 - DNA, 30 bp, Artificial Sequence
  Synthetic
tctcaaaactagaagugtaagctggauaga

SEQ ID NO: 32734 - DNA, 18 bp, Artificial Sequence
  Synthetic
ggtgggcucaggtuggaa

SEQ ID NO: 32735 - DNA, 17 bp, Artificial Sequence
  Synthetic
ggcuccagccggctuac

SEQ ID NO: 32736 - DNA, 23 bp, Artificial Sequence
  Synthetic
cctctggtcuactctctgctcuc

SEQ ID NO: 32737 - DNA, 20 bp, Artificial Sequence
  Synthetic
ctcaccgucaaagacugcac

SEQ ID NO: 32738 - DNA, 20 bp, Artificial Sequence
  Synthetic
gcactctuagcaccccaucc

SEQ ID NO: 32739 - DNA, 23 bp, Artificial Sequence
  Synthetic
gctttgggcaagutttcacucac

SEQ ID NO: 32740 - DNA, 20 bp, Artificial Sequence
  Synthetic
gctgugagaaccuggcacat

SEQ ID NO: 32741 - DNA, 21 bp, Artificial Sequence
  Synthetic
gatttggcucaggtgaugggt

SEQ ID NO: 32742 - DNA, 19 bp, Artificial Sequence
  Synthetic
gaccaccacccuctgtuca

SEQ ID NO: 32743 - DNA, 29 bp, Artificial Sequence
  Synthetic
ggaaaaatacgaucatgactugggaaaaa

SEQ ID NO: 32744 - DNA, 20 bp, Artificial Sequence
  Synthetic
ttgcugaaaccgtgaguacc

SEQ ID NO: 32745 - DNA, 22 bp, Artificial Sequence
  Synthetic
ccttggguagcttgatctugcc

SEQ ID NO: 32746 - DNA, 21 bp, Artificial Sequence
  Synthetic
ctccaggagguggtagaugga

SEQ ID NO: 32747 - DNA, 22 bp, Artificial Sequence
  Synthetic
ccaaatgtcuagaccccaccug

SEQ ID NO: 32748 - DNA, 19 bp, Artificial Sequence
  Synthetic
gggaacugccaagcaauga

SEQ ID NO: 32749 - DNA, 18 bp, Artificial Sequence
  Synthetic
gugaccacaggccucact

SEQ ID NO: 32750 - DNA, 22 bp, Artificial Sequence
  Synthetic
gggatctaacuctctgggcuag

SEQ ID NO: 32751 - DNA, 23 bp, Artificial Sequence
  Synthetic
acacaccctuatcaccccauaga

SEQ ID NO: 32752 - DNA, 22 bp, Artificial Sequence
  Synthetic
cacauggctcuggagaagacat

SEQ ID NO: 32753 - DNA, 21 bp, Artificial Sequence
  Synthetic
cgccaaagauctcgatcucgt

SEQ ID NO: 32754 - DNA, 23 bp, Artificial Sequence
  Synthetic
ctgggtaagggaugctgattcut

SEQ ID NO: 32755 - DNA, 24 bp, Artificial Sequence
  Synthetic
gatctggatauagaccagccucac

SEQ ID NO: 32756 - DNA, 18 bp, Artificial Sequence
  Synthetic
cgcctagugcgcctugat

SEQ ID NO: 32757 - DNA, 21 bp, Artificial Sequence
  Synthetic
ctggctucaccttccctcuac

SEQ ID NO: 32758 - DNA, 24 bp, Artificial Sequence
  Synthetic
cactctcctcautctgtgtgctua

SEQ ID NO: 32759 - DNA, 21 bp, Artificial Sequence
  Synthetic
ggtgcagaugtcaaagtuggg

SEQ ID NO: 32760 - DNA, 19 bp, Artificial Sequence
  Synthetic
ggatucaggccagtgcgut

SEQ ID NO: 32761 - DNA, 22 bp, Artificial Sequence
  Synthetic
ccatcatcuccccttccccuac

SEQ ID NO: 32762 - DNA, 21 bp, Artificial Sequence
  Synthetic
gtcagagagcgcuacctctug

SEQ ID NO: 32763 - DNA, 29 bp, Artificial Sequence
  Synthetic
ggagcccacaaauaagtaaacagtacaua

SEQ ID NO: 32764 - DNA, 25 bp, Artificial Sequence
  Synthetic
cttgtttccttucctttgctgtugt

SEQ ID NO: 32765 - DNA, 24 bp, Artificial Sequence
  Synthetic
gttagggacgucttcgaggattua

SEQ ID NO: 32766 - DNA, 20 bp, Artificial Sequence
  Synthetic
caggagtgcutggtccguat

SEQ ID NO: 32767 - DNA, 24 bp, Artificial Sequence
  Synthetic
ctactaugaactcccugaggcaga

SEQ ID NO: 32768 - DNA, 23 bp, Artificial Sequence
  Synthetic
ggtagtttcgagcucttgtccug

SEQ ID NO: 32769 - DNA, 22 bp, Artificial Sequence
  Synthetic
gtctcaccgaucttttcgucct

SEQ ID NO: 32770 - DNA, 24 bp, Artificial Sequence
  Synthetic
gagtgtcctugaagcatctcauct

SEQ ID NO: 32771 - DNA, 20 bp, Artificial Sequence
  Synthetic
cgagagcccaccauggttug

SEQ ID NO: 32772 - DNA, 20 bp, Artificial Sequence
  Synthetic
ctgttcugtgcccucagcat

SEQ ID NO: 32773 - DNA, 18 bp, Artificial Sequence
  Synthetic
cctgtggcugggcaaguc

SEQ ID NO: 32774 - DNA, 29 bp, Artificial Sequence
  Synthetic
actgtgttggaaaucttaatgagaacuat

SEQ ID NO: 32775 - DNA, 21 bp, Artificial Sequence
  Synthetic
gggaaucggaaggacacugac

SEQ ID NO: 32776 - DNA, 24 bp, Artificial Sequence
  Synthetic
ttggccaaaaacuacctctctgut

SEQ ID NO: 32777 - DNA, 22 bp, Artificial Sequence
  Synthetic
gggcuggaggaagtagactuac

SEQ ID NO: 32778 - DNA, 20 bp, Artificial Sequence
  Synthetic
cagttgaccuccgggatcuc

SEQ ID NO: 32779 - DNA, 21 bp, Artificial Sequence
  Synthetic
cucccccatuagacccagagt

SEQ ID NO: 32780 - DNA, 19 bp, Artificial Sequence
  Synthetic
ctggugaagccctucagct

SEQ ID NO: 32781 - DNA, 23 bp, Artificial Sequence
  Synthetic
gggagaaggaaaugatggaagug

SEQ ID NO: 32782 - DNA, 24 bp, Artificial Sequence
  Synthetic
acccaaaaguaaatgccucaggac

SEQ ID NO: 32783 - DNA, 25 bp, Artificial Sequence
  Synthetic
atcttgatttcugcctgctcttuct

SEQ ID NO: 32784 - DNA, 21 bp, Artificial Sequence
  Synthetic
cccttguaccaagcaccuagc

SEQ ID NO: 32785 - DNA, 23 bp, Artificial Sequence
  Synthetic
tgttgggcacagcauaatagugt

SEQ ID NO: 32786 - DNA, 20 bp, Artificial Sequence
  Synthetic
acctgacccuctaggcugac

SEQ ID NO: 32787 - DNA, 22 bp, Artificial Sequence
  Synthetic
cgtggaugtccttuccagcaat

SEQ ID NO: 32788 - DNA, 24 bp, Artificial Sequence
  Synthetic
gttggagcugagatgttuagagca

SEQ ID NO: 32789 - DNA, 28 bp, Artificial Sequence
  Synthetic
caccagctatttutcttccactttguag

SEQ ID NO: 32790 - DNA, 22 bp, Artificial Sequence
  Synthetic
gctccugacccgtguaaaaagg

SEQ ID NO: 32791 - DNA, 21 bp, Artificial Sequence
  Synthetic
cacttgucagagctgguggag

SEQ ID NO: 32792 - DNA, 22 bp, Artificial Sequence
  Synthetic
ccucaagaagaugcccagcaaa

SEQ ID NO: 32793 - DNA, 21 bp, Artificial Sequence
  Synthetic
gcugagatcgucaccaagacc

SEQ ID NO: 32794 - DNA, 27 bp, Artificial Sequence
  Synthetic
attaaagaatccautctgaggcuacgg

SEQ ID NO: 32795 - DNA, 22 bp, Artificial Sequence
  Synthetic
cgtgttgagguggcttttccut

SEQ ID NO: 32796 - DNA, 20 bp, Artificial Sequence
  Synthetic
cccttgctaugctcccctuc

SEQ ID NO: 32797 - DNA, 21 bp, Artificial Sequence
  Synthetic
actacuctgagcugagccagt

SEQ ID NO: 32798 - DNA, 22 bp, Artificial Sequence
  Synthetic
agacaaugacaggcttctuggg

SEQ ID NO: 32799 - DNA, 24 bp, Artificial Sequence
  Synthetic
gggtgtcacauagatcctgaguga

SEQ ID NO: 32800 - DNA, 20 bp, Artificial Sequence
  Synthetic
gagtgccacaaugcgaaugg

SEQ ID NO: 32801 - DNA, 22 bp, Artificial Sequence
  Synthetic
tgaggtcattutgaggctgtug

SEQ ID NO: 32802 - DNA, 24 bp, Artificial Sequence
  Synthetic
ggaaagtatgucccacttcucagg

SEQ ID NO: 32803 - DNA, 23 bp, Artificial Sequence
  Synthetic
tttggcatcucaggttttccuca

SEQ ID NO: 32804 - DNA, 24 bp, Artificial Sequence
  Synthetic
ccagaggagggauggaaacactua

SEQ ID NO: 32805 - DNA, 29 bp, Artificial Sequence
  Synthetic
cttatatcctucctgtttcttttcuggca

SEQ ID NO: 32806 - DNA, 23 bp, Artificial Sequence
  Synthetic
aatgtaatgaggugctcgtccug

SEQ ID NO: 32807 - DNA, 24 bp, Artificial Sequence
  Synthetic
cactcagtcuacgttgacucacat

SEQ ID NO: 32808 - DNA, 24 bp, Artificial Sequence
  Synthetic
ggccuaggaacaggaagacuacat

SEQ ID NO: 32809 - DNA, 22 bp, Artificial Sequence
  Synthetic
gctttgccuccttcctggauag

SEQ ID NO: 32810 - DNA, 22 bp, Artificial Sequence
  Synthetic
acagcacacagggautgaacug

SEQ ID NO: 32811 - DNA, 23 bp, Artificial Sequence
  Synthetic
gactgttcagugattggtcucct

SEQ ID NO: 32812 - DNA, 20 bp, Artificial Sequence
  Synthetic
gccccaucatgctgcauagg

SEQ ID NO: 32813 - DNA, 25 bp, Artificial Sequence
  Synthetic
gcactggatugagtctaccttcuct

SEQ ID NO: 32814 - DNA, 23 bp, Artificial Sequence
  Synthetic
gggatctcccutgaggtcaucat

SEQ ID NO: 32815 - DNA, 24 bp, Artificial Sequence
  Synthetic
caattcaugggagcctgtcattug

SEQ ID NO: 32816 - DNA, 23 bp, Artificial Sequence
  Synthetic
caggtaguactgtagcuccccat

SEQ ID NO: 32817 - DNA, 28 bp, Artificial Sequence
  Synthetic
gcagatcagagguctagttctgtaaugt

SEQ ID NO: 32818 - DNA, 23 bp, Artificial Sequence
  Synthetic
agcaaacauggcacaaactugac

SEQ ID NO: 32819 - DNA, 22 bp, Artificial Sequence
  Synthetic
cctcatccccggutctttgtuc

SEQ ID NO: 32820 - DNA, 29 bp, Artificial Sequence
  Synthetic
caatcttccccaautattggtgaaucaaa

SEQ ID NO: 32821 - DNA, 28 bp, Artificial Sequence
  Synthetic
gcctcatttgtcuaactgttgaactuct

SEQ ID NO: 32822 - DNA, 22 bp, Artificial Sequence
  Synthetic
gtcaacacguagaaagguggct

SEQ ID NO: 32823 - DNA, 26 bp, Artificial Sequence
  Synthetic
ggtaatttctgucctccaattccgua

SEQ ID NO: 32824 - DNA, 22 bp, Artificial Sequence
  Synthetic
ccaguatcctcugcaggaaagt

SEQ ID NO: 32825 - DNA, 22 bp, Artificial Sequence
  Synthetic
gtgaauaggcgttctcauccct

SEQ ID NO: 32826 - DNA, 27 bp, Artificial Sequence
  Synthetic
tgaaacaaggcuacattttggtcaaug

SEQ ID NO: 32827 - DNA, 24 bp, Artificial Sequence
  Synthetic
cactttauggccaataaacgcugt

SEQ ID NO: 32828 - DNA, 22 bp, Artificial Sequence
  Synthetic
gccgagcaagugagtttuccat

SEQ ID NO: 32829 - DNA, 30 bp, Artificial Sequence
  Synthetic
ggacaagaaccuatgatactgatgaatugt

SEQ ID NO: 32830 - DNA, 24 bp, Artificial Sequence
  Synthetic
aaaagaaacaagcacutaggcugt

SEQ ID NO: 32831 - DNA, 24 bp, Artificial Sequence
  Synthetic
ttaatggtggugttacctgctcuc

SEQ ID NO: 32832 - DNA, 24 bp, Artificial Sequence
  Synthetic
aaaaugcatcaataucccgagggt

SEQ ID NO: 32833 - DNA, 25 bp, Artificial Sequence
  Synthetic
gtgggctauggattgtcaaguagaa

SEQ ID NO: 32834 - DNA, 27 bp, Artificial Sequence
  Synthetic
ctagagagcutgtttacacuagaaggg

SEQ ID NO: 32835 - DNA, 28 bp, Artificial Sequence
  Synthetic
gccctctttttcuaatccttcattgtut

SEQ ID NO: 32836 - DNA, 21 bp, Artificial Sequence
  Synthetic
ccaggtucactagcacauggt

SEQ ID NO: 32837 - DNA, 29 bp, Artificial Sequence
  Synthetic
cgttctcaatatuggttggttgtttctug

SEQ ID NO: 32838 - DNA, 21 bp, Artificial Sequence
  Synthetic
acctcatagguctcccgaguc

SEQ ID NO: 32839 - DNA, 27 bp, Artificial Sequence
  Synthetic
gttctgccautcaatatcacatugcat

SEQ ID NO: 32840 - DNA, 22 bp, Artificial Sequence
  Synthetic
cgttgagccutgtctcccauac

SEQ ID NO: 32841 - DNA, 22 bp, Artificial Sequence
  Synthetic
cctgctcaugtcaaagctucaa

SEQ ID NO: 32842 - DNA, 17 bp, Artificial Sequence
  Synthetic
gcttggcuccgccacuc

SEQ ID NO: 32843 - DNA, 18 bp, Artificial Sequence
  Synthetic
gggcgcacucacctcuac

SEQ ID NO: 32844 - DNA, 22 bp, Artificial Sequence
  Synthetic
agtgctctcucttcttggccua

SEQ ID NO: 32845 - DNA, 21 bp, Artificial Sequence
  Synthetic
ggataacagcggugtgtgguc

SEQ ID NO: 32846 - DNA, 21 bp, Artificial Sequence
  Synthetic
tgtcgaaucaaagccccuacc

SEQ ID NO: 32847 - DNA, 22 bp, Artificial Sequence
  Synthetic
gtaatugcatgatgugccccaa

SEQ ID NO: 32848 - DNA, 28 bp, Artificial Sequence
  Synthetic
ctatcacagcauatgacaaagaagtuga

SEQ ID NO: 32849 - DNA, 22 bp, Artificial Sequence
  Synthetic
ggactctgguctgtggactuac

SEQ ID NO: 32850 - DNA, 26 bp, Artificial Sequence
  Synthetic
cauagaattgtagugaacagcagcct

SEQ ID NO: 32851 - DNA, 20 bp, Artificial Sequence
  Synthetic
gagcctagccutgctgctua

SEQ ID NO: 32852 - DNA, 24 bp, Artificial Sequence
  Synthetic
cctgacatucccaccaccttacua

SEQ ID NO: 32853 - DNA, 25 bp, Artificial Sequence
  Synthetic
ttcattcaugcaggaaacaccaaug

SEQ ID NO: 32854 - DNA, 22 bp, Artificial Sequence
  Synthetic
tctgtgtgugctttgtggtuct

SEQ ID NO: 32855 - DNA, 26 bp, Artificial Sequence
  Synthetic
tcgtgctcttcuagggtttagactua

SEQ ID NO: 32856 - DNA, 24 bp, Artificial Sequence
  Synthetic
tcaaacccaugactggtctatugg

SEQ ID NO: 32857 - DNA, 26 bp, Artificial Sequence
  Synthetic
gcaaacattttuagctgggagactua

SEQ ID NO: 32858 - DNA, 28 bp, Artificial Sequence
  Synthetic
attatcaagugaaagaaaacacgcugac

SEQ ID NO: 32859 - DNA, 28 bp, Artificial Sequence
  Synthetic
aaactgctacctucttatcccacattut

SEQ ID NO: 32860 - DNA, 24 bp, Artificial Sequence
  Synthetic
ttcctgaccugggtttuagagaac

SEQ ID NO: 32861 - DNA, 23 bp, Artificial Sequence
  Synthetic
actcctgcauttctcggaaguac

SEQ ID NO: 32862 - DNA, 23 bp, Artificial Sequence
  Synthetic
ggcagaaacugcttgcaagttut

SEQ ID NO: 32863 - DNA, 21 bp, Artificial Sequence
  Synthetic
ccaaacccutccaggauagcc

SEQ ID NO: 32864 - DNA, 22 bp, Artificial Sequence
  Synthetic
gctttguggaaaggcttgcauc

SEQ ID NO: 32865 - DNA, 23 bp, Artificial Sequence
  Synthetic
caugcagagtauggaagggagac

SEQ ID NO: 32866 - DNA, 28 bp, Artificial Sequence
  Synthetic
caagcagacgutatttacgtcaauacac

SEQ ID NO: 32867 - DNA, 24 bp, Artificial Sequence
  Synthetic
agtcagatcutcccattccucact

SEQ ID NO: 32868 - DNA, 24 bp, Artificial Sequence
  Synthetic
cgatgaacutttgtttgcugacga

SEQ ID NO: 32869 - DNA, 28 bp, Artificial Sequence
  Synthetic
gacagcttactuaacaacattcatcugg

SEQ ID NO: 32870 - DNA, 23 bp, Artificial Sequence
  Synthetic
gctaagcucagctcattttcugc

SEQ ID NO: 32871 - DNA, 23 bp, Artificial Sequence
  Synthetic
aaaccacctuagggagactcugt

SEQ ID NO: 32872 - DNA, 21 bp, Artificial Sequence
  Synthetic
cctcgauggcactttucacct

SEQ ID NO: 32873 - DNA, 29 bp, Artificial Sequence
  Synthetic
ggacaataattcucatgcatggatttcut

SEQ ID NO: 32874 - DNA, 24 bp, Artificial Sequence
  Synthetic
tgtgttgaugacgatgacagugat

SEQ ID NO: 32875 - DNA, 25 bp, Artificial Sequence
  Synthetic
ccagatggguagttgtgggatttut

SEQ ID NO: 32876 - DNA, 25 bp, Artificial Sequence
  Synthetic
gatgacgtugacgatgaaguagagg

SEQ ID NO: 32877 - DNA, 25 bp, Artificial Sequence
  Synthetic
ttccaaaccucacttcctttcucag

SEQ ID NO: 32878 - DNA, 23 bp, Artificial Sequence
  Synthetic
gctgcagutctgttcaucaaagg

SEQ ID NO: 32879 - DNA, 27 bp, Artificial Sequence
  Synthetic
gccattttccucttttatcccaatugt

SEQ ID NO: 32880 - DNA, 29 bp, Artificial Sequence
  Synthetic
ccagatcttttcugaaggaatgtgaatut

SEQ ID NO: 32881 - DNA, 26 bp, Artificial Sequence
  Synthetic
gtcaatactgaautcccatgcacauc

SEQ ID NO: 32882 - DNA, 29 bp, Artificial Sequence
  Synthetic
ttggtatatatcccugttacccatatuga

SEQ ID NO: 32883 - DNA, 26 bp, Artificial Sequence
  Synthetic
ctctctcccccauaaaaatgatccut

SEQ ID NO: 32884 - DNA, 22 bp, Artificial Sequence
  Synthetic
cctccagcacuttagccucaaa

SEQ ID NO: 32885 - DNA, 23 bp, Artificial Sequence
  Synthetic
acaauagctctagugagccgact

SEQ ID NO: 32886 - DNA, 29 bp, Artificial Sequence
  Synthetic
agtcagatccaaautcattccctaaacuc

SEQ ID NO: 32887 - DNA, 22 bp, Artificial Sequence
  Synthetic
gtgagccuaccccagaaguaac

SEQ ID NO: 32888 - DNA, 27 bp, Artificial Sequence
  Synthetic
ctaaagacuacaccatgttactuggct

SEQ ID NO: 32889 - DNA, 27 bp, Artificial Sequence
  Synthetic
catgacugagatgaaattugcaagcat

SEQ ID NO: 32890 - DNA, 26 bp, Artificial Sequence
  Synthetic
aaggcttctuagagttttctgtgcut

SEQ ID NO: 32891 - DNA, 26 bp, Artificial Sequence
  Synthetic
cgacaguggaaagtacacaatuaagg

SEQ ID NO: 32892 - DNA, 28 bp, Artificial Sequence
  Synthetic
agaaatgttgaagutcttcagatgugga

SEQ ID NO: 32893 - DNA, 28 bp, Artificial Sequence
  Synthetic
cttcatcucacagcctagatcucaaaat

SEQ ID NO: 32894 - DNA, 23 bp, Artificial Sequence
  Synthetic
ccttcatctcugtgactggctug

SEQ ID NO: 32895 - DNA, 28 bp, Artificial Sequence
  Synthetic
tcagaactcatgcugagattaaagcaut

SEQ ID NO: 32896 - DNA, 23 bp, Artificial Sequence
  Synthetic
gaagcttccuctttgagggcuaa

SEQ ID NO: 32897 - DNA, 30 bp, Artificial Sequence
  Synthetic
gggtctctttcuaattaagtttgcctuaca

SEQ ID NO: 32898 - DNA, 30 bp, Artificial Sequence
  Synthetic
aaagagacattuaagaactggttaccttuc

SEQ ID NO: 32899 - DNA, 25 bp, Artificial Sequence
  Synthetic
aaccaaaagcucctgaaccaattuc

SEQ ID NO: 32900 - DNA, 29 bp, Artificial Sequence
  Synthetic
gccccataaatugtaagttggtttuagac

SEQ ID NO: 32901 - DNA, 24 bp, Artificial Sequence
  Synthetic
cctgtgtggutgaaagcagtguat

SEQ ID NO: 32902 - DNA, 24 bp, Artificial Sequence
  Synthetic
gggtgagaaggutctggagattuc

SEQ ID NO: 32903 - DNA, 23 bp, Artificial Sequence
  Synthetic
gagatctctucagtccaggctuc

SEQ ID NO: 32904 - DNA, 20 bp, Artificial Sequence
  Synthetic
cctcguagacggtcauggac

SEQ ID NO: 32905 - DNA, 24 bp, Artificial Sequence
  Synthetic
atctgagauggaagcttcgtctuc

SEQ ID NO: 32906 - DNA, 22 bp, Artificial Sequence
  Synthetic
cgttgcatagucagaagctucg

SEQ ID NO: 32907 - DNA, 22 bp, Artificial Sequence
  Synthetic
ccatguggccaaaatacacgut

SEQ ID NO: 32908 - DNA, 28 bp, Artificial Sequence
  Synthetic
ctttcatggacucataccuggaaaagat

SEQ ID NO: 32909 - DNA, 23 bp, Artificial Sequence
  Synthetic
cgctccctguctccaacttauat

SEQ ID NO: 32910 - DNA, 24 bp, Artificial Sequence
  Synthetic
ctttgacaugaagtcaagtucgct

SEQ ID NO: 32911 - DNA, 28 bp, Artificial Sequence
  Synthetic
ggaggaaauaagaaaagacutcagguat

SEQ ID NO: 32912 - DNA, 29 bp, Artificial Sequence
  Synthetic
ctctcttcctcugttcttttcattgcuaa

SEQ ID NO: 32913 - DNA, 24 bp, Artificial Sequence
  Synthetic
ggcgtatucctaaactgucccaag

SEQ ID NO: 32914 - DNA, 23 bp, Artificial Sequence
  Synthetic
gggtcgttuctgtacaactcugt

SEQ ID NO: 32915 - DNA, 30 bp, Artificial Sequence
  Synthetic
gggaatucagacttgagauagaagaaaaga

SEQ ID NO: 32916 - DNA, 26 bp, Artificial Sequence
  Synthetic
agaatttcagccautctgagggttut

SEQ ID NO: 32917 - DNA, 24 bp, Artificial Sequence
  Synthetic
ggcttggautattatgctcugcac

SEQ ID NO: 32918 - DNA, 23 bp, Artificial Sequence
  Synthetic
gccagtaaccutttgaacauggg

SEQ ID NO: 32919 - DNA, 24 bp, Artificial Sequence
  Synthetic
aggtcagaaaaucaaaccagguga

SEQ ID NO: 32920 - DNA, 23 bp, Artificial Sequence
  Synthetic
tcattgtgtcugttctgcgctua

SEQ ID NO: 32921 - DNA, 27 bp, Artificial Sequence
  Synthetic
gagaacagugagaaatacgaaaucacc

SEQ ID NO: 32922 - DNA, 26 bp, Artificial Sequence
  Synthetic
caatggaugccactttaacttuagca

SEQ ID NO: 32923 - DNA, 22 bp, Artificial Sequence
  Synthetic
gaaatctcgcaugacagcaucg

SEQ ID NO: 32924 - DNA, 21 bp, Artificial Sequence
  Synthetic
agccaggaaugggttgauacc

SEQ ID NO: 32925 - DNA, 30 bp, Artificial Sequence
  Synthetic
aaaccagaagaagcuctaccattaaaauca

SEQ ID NO: 32926 - DNA, 30 bp, Artificial Sequence
  Synthetic
ctctttcattaagutcaaaagcacttgugt

SEQ ID NO: 32927 - DNA, 27 bp, Artificial Sequence
  Synthetic
ctcaaagaagacauacatggccaaaut

SEQ ID NO: 32928 - DNA, 25 bp, Artificial Sequence
  Synthetic
gatgctttagucatggagactuccc

SEQ ID NO: 32929 - DNA, 22 bp, Artificial Sequence
  Synthetic
gaaagatggcuccgtguaggac

SEQ ID NO: 32930 - DNA, 21 bp, Artificial Sequence
  Synthetic
ggucaggaacaucagccacat

SEQ ID NO: 32931 - DNA, 23 bp, Artificial Sequence
  Synthetic
ccuggcagaaaggauaagatcuc

SEQ ID NO: 32932 - DNA, 25 bp, Artificial Sequence
  Synthetic
ctccacccccaagutaataacucat

SEQ ID NO: 32933 - DNA, 29 bp, Artificial Sequence
  Synthetic
ggcaaagaaatcautgcagatggatuaaa

SEQ ID NO: 32934 - DNA, 23 bp, Artificial Sequence
  Synthetic
ttcctcttuaaagtgtggugcct

SEQ ID NO: 32935 - DNA, 29 bp, Artificial Sequence
  Synthetic
cgtgagaagaaguagaauaaatggattuc

SEQ ID NO: 32936 - DNA, 28 bp, Artificial Sequence
  Synthetic
tgcaaagauggaactttaccauaggaag

SEQ ID NO: 32937 - DNA, 22 bp, Artificial Sequence
  Synthetic
ggtgtctucagccatctcagug

SEQ ID NO: 32938 - DNA, 27 bp, Artificial Sequence
  Synthetic
gggaaaatacaautgtggtggtttuca

SEQ ID NO: 32939 - DNA, 25 bp, Artificial Sequence
  Synthetic
cgtaagactcaugctgggaaauaca

SEQ ID NO: 32940 - DNA, 21 bp, Artificial Sequence
  Synthetic
ccauggaaccaagtcauggca

SEQ ID NO: 32941 - DNA, 26 bp, Artificial Sequence
  Synthetic
ccaatgaggutggagaaguagaaacc

SEQ ID NO: 32942 - DNA, 23 bp, Artificial Sequence
  Synthetic
ttccggcttugtatgagctctut

SEQ ID NO: 32943 - DNA, 31 bp, Artificial Sequence
  Synthetic
cctgatauacaaggauaaaggattacagaut

SEQ ID NO: 32944 - DNA, 27 bp, Artificial Sequence
  Synthetic
gtgaattgcttguccttaatacgtucc

SEQ ID NO: 32945 - DNA, 28 bp, Artificial Sequence
  Synthetic
ccagtaaagcugactcccttttcatuat

SEQ ID NO: 32946 - DNA, 23 bp, Artificial Sequence
  Synthetic
ttgtggtggugatctgagtctug

SEQ ID NO: 32947 - DNA, 28 bp, Artificial Sequence
  Synthetic
gggactgtattcuaatacatgtgtgcut

SEQ ID NO: 32948 - DNA, 26 bp, Artificial Sequence
  Synthetic
tgctgaaacacggaaauggtattcua

SEQ ID NO: 32949 - DNA, 23 bp, Artificial Sequence
  Synthetic
agaagggccacuggaatatgaug

SEQ ID NO: 32950 - DNA, 25 bp, Artificial Sequence
  Synthetic
cagtgtgtguttcagatgtugcaat

SEQ ID NO: 32951 - DNA, 22 bp, Artificial Sequence
  Synthetic
cttagtcccccuaccccaaaug

SEQ ID NO: 32952 - DNA, 23 bp, Artificial Sequence
  Synthetic
ctctcgaatcutggttggagugg

SEQ ID NO: 32953 - DNA, 29 bp, Artificial Sequence
  Synthetic
caactttgcagcaacuttaaccagtauat

SEQ ID NO: 32954 - DNA, 20 bp, Artificial Sequence
  Synthetic
ggagcgguaccgtgtcatug

SEQ ID NO: 32955 - DNA, 23 bp, Artificial Sequence
  Synthetic
tcgtgttaaccuctgtcttgcug

SEQ ID NO: 32956 - DNA, 22 bp, Artificial Sequence
  Synthetic
gatgagcgucacgttgttcuac

SEQ ID NO: 32957 - DNA, 30 bp, Artificial Sequence
  Synthetic
gttcagtcacccaautttgatttgaaguaa

SEQ ID NO: 32958 - DNA, 26 bp, Artificial Sequence
  Synthetic
gtggtttcacggauggttaattuagc

SEQ ID NO: 32959 - DNA, 26 bp, Artificial Sequence
  Synthetic
aatgcctgattuctttcccatagugt

SEQ ID NO: 32960 - DNA, 25 bp, Artificial Sequence
  Synthetic
gtgctctaggacugtgggtttuaag

SEQ ID NO: 32961 - DNA, 23 bp, Artificial Sequence
  Synthetic
gcatuggagaaccttgugaaaca

SEQ ID NO: 32962 - DNA, 27 bp, Artificial Sequence
  Synthetic
tctcaacgaugtaattgttgacuggag

SEQ ID NO: 32963 - DNA, 27 bp, Artificial Sequence
  Synthetic
tgatcacctctcuagaaaggaactaug

SEQ ID NO: 32964 - DNA, 22 bp, Artificial Sequence
  Synthetic
tgagtagctcucagtggtguca

SEQ ID NO: 32965 - DNA, 26 bp, Artificial Sequence
  Synthetic
tttcttctcacaccugtccatgaaut

SEQ ID NO: 32966 - DNA, 23 bp, Artificial Sequence
  Synthetic
gcaattgatucgctgtatucgct

SEQ ID NO: 32967 - DNA, 28 bp, Artificial Sequence
  Synthetic
ggtactgacatugtaggatatgttcugg

SEQ ID NO: 32968 - DNA, 30 bp, Artificial Sequence
  Synthetic
agagattgtgtgutggaaaattatctguca

SEQ ID NO: 32969 - DNA, 24 bp, Artificial Sequence
  Synthetic
atggagggtugtgattaccagtuc

SEQ ID NO: 32970 - DNA, 26 bp, Artificial Sequence
  Synthetic
tgatttcatugccaccatcagatuca

SEQ ID NO: 32971 - DNA, 23 bp, Artificial Sequence
  Synthetic
gaagggagaaggguagucttauc

SEQ ID NO: 32972 - DNA, 23 bp, Artificial Sequence
  Synthetic
gttcttgaugagcctgguaacga

SEQ ID NO: 32973 - DNA, 24 bp, Artificial Sequence
  Synthetic
ggcttgtcautacacctgttucag

SEQ ID NO: 32974 - DNA, 21 bp, Artificial Sequence
  Synthetic
cagttgcucgtttgccaguat

SEQ ID NO: 32975 - DNA, 29 bp, Artificial Sequence
  Synthetic
ttcattcatatcugttttgcctacugaca

SEQ ID NO: 32976 - DNA, 25 bp, Artificial Sequence
  Synthetic
gctaacacacggaacucataagugt

SEQ ID NO: 32977 - DNA, 28 bp, Artificial Sequence
  Synthetic
agatcaacagtaucactgatttggtcug

SEQ ID NO: 32978 - DNA, 28 bp, Artificial Sequence
  Synthetic
agttctgaactgauattccagtcctuct

SEQ ID NO: 32979 - DNA, 19 bp, Artificial Sequence
  Synthetic
gcgctccuaccagaccuga

SEQ ID NO: 32980 - DNA, 22 bp, Artificial Sequence
  Synthetic
ctggaatugacaagcugccaag

SEQ ID NO: 32981 - DNA, 25 bp, Artificial Sequence
  Synthetic
ccctggaaaauacagctggtgtuaa

SEQ ID NO: 32982 - DNA, 22 bp, Artificial Sequence
  Synthetic
caggacgaccacugattgguac

SEQ ID NO: 32983 - DNA, 26 bp, Artificial Sequence
  Synthetic
gtagagcgtcutgttgagaaaacuga

SEQ ID NO: 32984 - DNA, 23 bp, Artificial Sequence
  Synthetic
tggtcaggtutaagccaagcuaa

SEQ ID NO: 32985 - DNA, 24 bp, Artificial Sequence
  Synthetic
ggcaggttaucagtgaaaaaugca

SEQ ID NO: 32986 - DNA, 22 bp, Artificial Sequence
  Synthetic
gcctggagugtctagcacttuc

SEQ ID NO: 32987 - DNA, 24 bp, Artificial Sequence
  Synthetic
gcaaaccagacuctaacctuagcc

SEQ ID NO: 32988 - DNA, 26 bp, Artificial Sequence
  Synthetic
acaacatgaguctgtttgaagttugc

SEQ ID NO: 32989 - DNA, 22 bp, Artificial Sequence
  Synthetic
acutaggagacuggcacaaggt

SEQ ID NO: 32990 - DNA, 22 bp, Artificial Sequence
  Synthetic
ggttgacgggcuctctacatut

SEQ ID NO: 32991 - DNA, 29 bp, Artificial Sequence
  Synthetic
ggcagtgaaatucaacagtatatcctuga

SEQ ID NO: 32992 - DNA, 26 bp, Artificial Sequence
  Synthetic
acataguaccgcttaguaaaaacgca

SEQ ID NO: 32993 - DNA, 27 bp, Artificial Sequence
  Synthetic
cuacatcatugaaaaaugggaaaccag

SEQ ID NO: 32994 - DNA, 28 bp, Artificial Sequence
  Synthetic
ctagagttagtutctttttccttgucca

SEQ ID NO: 32995 - DNA, 25 bp, Artificial Sequence
  Synthetic
ttggauccaccagcctatttgtuag

SEQ ID NO: 32996 - DNA, 26 bp, Artificial Sequence
  Synthetic
tggtcttcctugtaccaaagcttuaa

SEQ ID NO: 32997 - DNA, 27 bp, Artificial Sequence
  Synthetic
ccttgtgatauggcactacugaaaaat

SEQ ID NO: 32998 - DNA, 23 bp, Artificial Sequence
  Synthetic
tgacgtcaguaaagttgcatcuc

SEQ ID NO: 32999 - DNA, 28 bp, Artificial Sequence
  Synthetic
gacctggttacaaaugtaatgatgcaut

SEQ ID NO: 33000 - DNA, 27 bp, Artificial Sequence
  Synthetic
tcagcatauacacggaattggtaaucc

SEQ ID NO: 33001 - DNA, 24 bp, Artificial Sequence
  Synthetic
cccccaggaaagucagutatauac

SEQ ID NO: 33002 - DNA, 22 bp, Artificial Sequence
  Synthetic
gtcgttcuggcaacactugaac

SEQ ID NO: 33003 - DNA, 27 bp, Artificial Sequence
  Synthetic
gataatgcagtgugtagaattgcaguc

SEQ ID NO: 33004 - DNA, 23 bp, Artificial Sequence
  Synthetic
ctgatggauggtttgggtttucc

SEQ ID NO: 33005 - DNA, 22 bp, Artificial Sequence
  Synthetic
agtcagucctggagtucagagt

SEQ ID NO: 33006 - DNA, 22 bp, Artificial Sequence
  Synthetic
gtccagcugaggatgacagaug

SEQ ID NO: 33007 - DNA, 23 bp, Artificial Sequence
  Synthetic
ccaagagaacauggtctgtcgug

SEQ ID NO: 33008 - DNA, 22 bp, Artificial Sequence
  Synthetic
agctggtgugtcaagcacttua

SEQ ID NO: 33009 - DNA, 28 bp, Artificial Sequence
  Synthetic
ctgtcacauggagaaaagaugagaagaa

SEQ ID NO: 33010 - DNA, 28 bp, Artificial Sequence
  Synthetic
aaaaagagtgatutcctggaagtaugct

SEQ ID NO: 33011 - DNA, 26 bp, Artificial Sequence
  Synthetic
caacctgaaaccuggagtcaatuact

SEQ ID NO: 33012 - DNA, 24 bp, Artificial Sequence
  Synthetic
ccatcauagacaggcttacuccag

SEQ ID NO: 33013 - DNA, 22 bp, Artificial Sequence
  Synthetic
gcagcatctucacctgtgtcut

SEQ ID NO: 33014 - DNA, 24 bp, Artificial Sequence
  Synthetic
tttttgtctggugtcacggauagt

SEQ ID NO: 33015 - DNA, 28 bp, Artificial Sequence
  Synthetic
ttgtaccttgtttucccttcctttcuaa

SEQ ID NO: 33016 - DNA, 27 bp, Artificial Sequence
  Synthetic
aattttggtggtugtaatgatgcacuc

SEQ ID NO: 33017 - DNA, 27 bp, Artificial Sequence
  Synthetic
acatcgtgttttgucctttcactgaua

SEQ ID NO: 33018 - DNA, 23 bp, Artificial Sequence
  Synthetic
agcccatggcautccttagttut

SEQ ID NO: 33019 - DNA, 23 bp, Artificial Sequence
  Synthetic
caggtacauctgtgaagcucaga

SEQ ID NO: 33020 - DNA, 25 bp, Artificial Sequence
  Synthetic
aaccaggaaaagguatgcggaaaua

SEQ ID NO: 33021 - DNA, 27 bp, Artificial Sequence
  Synthetic
agcttcaccaaugttactgaaacucaa

SEQ ID NO: 33022 - DNA, 23 bp, Artificial Sequence
  Synthetic
gagaagcagautagcggcactua

SEQ ID NO: 33023 - DNA, 30 bp, Artificial Sequence
  Synthetic
gacttatttatgaautcagggtgtaugcag

SEQ ID NO: 33024 - DNA, 26 bp, Artificial Sequence
  Synthetic
actgtttcugtctttcattuccaggt

SEQ ID NO: 33025 - DNA, 28 bp, Artificial Sequence
  Synthetic
ccaacttttcaaagauccaggttttcut

SEQ ID NO: 33026 - DNA, 23 bp, Artificial Sequence
  Synthetic
ttttctgcctugatgcggaatug

SEQ ID NO: 33027 - DNA, 30 bp, Artificial Sequence
  Synthetic
caactggcccugttgttattagtgatauaa

SEQ ID NO: 33028 - DNA, 27 bp, Artificial Sequence
  Synthetic
caggttctcagcaguaatttcggtaut

SEQ ID NO: 33029 - DNA, 31 bp, Artificial Sequence
  Synthetic
cactutctatactcattttucagaaccacct

SEQ ID NO: 33030 - DNA, 22 bp, Artificial Sequence
  Synthetic
gccacugcacattuaacccagt

SEQ ID NO: 33031 - DNA, 28 bp, Artificial Sequence
  Synthetic
gaagagtgcacauttaaaagtgctguaa

SEQ ID NO: 33032 - DNA, 21 bp, Artificial Sequence
  Synthetic
ggagaggcggutacagttgut

SEQ ID NO: 33033 - DNA, 24 bp, Artificial Sequence
  Synthetic
aatgttttgagugctgcttcacug

SEQ ID NO: 33034 - DNA, 23 bp, Artificial Sequence
  Synthetic
ggcttacuccacaagacatuggg

SEQ ID NO: 33035 - DNA, 27 bp, Artificial Sequence
  Synthetic
acaacaggagcugaatatgtttucaga

SEQ ID NO: 33036 - DNA, 21 bp, Artificial Sequence
  Synthetic
cggctuaacccaggcaauagt

SEQ ID NO: 33037 - DNA, 28 bp, Artificial Sequence
  Synthetic
gacttcgggaaggaugtgaatatgaaua

SEQ ID NO: 33038 - DNA, 26 bp, Artificial Sequence
  Synthetic
ttgaccagcaaagugtcatagatuct

SEQ ID NO: 33039 - DNA, 27 bp, Artificial Sequence
  Synthetic
gcatggacaataugtgaaggagagtua

SEQ ID NO: 33040 - DNA, 23 bp, Artificial Sequence
  Synthetic
tggtggaccaggcutatcaagua

SEQ ID NO: 33041 - DNA, 22 bp, Artificial Sequence
  Synthetic
cgacctcugccagtaattucct

SEQ ID NO: 33042 - DNA, 22 bp, Artificial Sequence
  Synthetic
cagtggatucagatggcucact

SEQ ID NO: 33043 - DNA, 27 bp, Artificial Sequence
  Synthetic
agtgtcacutaaatggtcuaaaccaca

SEQ ID NO: 33044 - DNA, 28 bp, Artificial Sequence
  Synthetic
acacgatactcauacatcagtcctucat

SEQ ID NO: 33045 - DNA, 23 bp, Artificial Sequence
  Synthetic
cctggtacucctaaagttgugca

SEQ ID NO: 33046 - DNA, 23 bp, Artificial Sequence
  Synthetic
gatgttctugcaactgcttguga

SEQ ID NO: 33047 - DNA, 31 bp, Artificial Sequence
  Synthetic
tgctggatccauaacagttcctattactaua

SEQ ID NO: 33048 - DNA, 28 bp, Artificial Sequence
  Synthetic
tctagttgtcuctttaagagtcugacca

SEQ ID NO: 33049 - DNA, 23 bp, Artificial Sequence
  Synthetic
gtcttcaggguagctgcagtuaa

SEQ ID NO: 33050 - DNA, 26 bp, Artificial Sequence
  Synthetic
acttttcactcccuttagtctgcaut

SEQ ID NO: 33051 - DNA, 22 bp, Artificial Sequence
  Synthetic
ctacttccgagucttggctucc

SEQ ID NO: 33052 - DNA, 22 bp, Artificial Sequence
  Synthetic
aataaguggtggtucccaggac

SEQ ID NO: 33053 - DNA, 27 bp, Artificial Sequence
  Synthetic
cagctcattuacaatgttggtgatuga

SEQ ID NO: 33054 - DNA, 23 bp, Artificial Sequence
  Synthetic
cagaacgaccaccuttcugagat

SEQ ID NO: 33055 - DNA, 26 bp, Artificial Sequence
  Synthetic
caacaggatuacaaggaaagcagtuc

SEQ ID NO: 33056 - DNA, 24 bp, Artificial Sequence
  Synthetic
ggagacagaagauctggaagtguc

SEQ ID NO: 33057 - DNA, 24 bp, Artificial Sequence
  Synthetic
gauggaccaagugcaacaagaaaa

SEQ ID NO: 33058 - DNA, 22 bp, Artificial Sequence
  Synthetic
gaggaccuggtggcttauaagg

SEQ ID NO: 33059 - DNA, 21 bp, Artificial Sequence
  Synthetic
gactctctuggacccaggtut

SEQ ID NO: 33060 - DNA, 22 bp, Artificial Sequence
  Synthetic
cctggcctgucaagtaccttua

SEQ ID NO: 33061 - DNA, 29 bp, Artificial Sequence
  Synthetic
ctgatgttgtutggtcaaaagauggaaaa

SEQ ID NO: 33062 - DNA, 24 bp, Artificial Sequence
  Synthetic
ggcaccacuactatcagatggtuc

SEQ ID NO: 33063 - DNA, 23 bp, Artificial Sequence
  Synthetic
actgaaauggaagaaaccugcct

SEQ ID NO: 33064 - DNA, 26 bp, Artificial Sequence
  Synthetic
ccaaugccaacaatatttucagcaga

SEQ ID NO: 33065 - DNA, 24 bp, Artificial Sequence
  Synthetic
gtgaatgauggaggcaccaaaaut

SEQ ID NO: 33066 - DNA, 23 bp, Artificial Sequence
  Synthetic
gggcacttttuccatacctgtut

SEQ ID NO: 33067 - DNA, 26 bp, Artificial Sequence
  Synthetic
tgcagacttugtagtcatatctuggg

SEQ ID NO: 33068 - DNA, 30 bp, Artificial Sequence
  Synthetic
gtcatctttgtuaccttctttaatgugcaa

SEQ ID NO: 33069 - DNA, 28 bp, Artificial Sequence
  Synthetic
acacatataguatccaagcuggagaaga

SEQ ID NO: 33070 - DNA, 29 bp, Artificial Sequence
  Synthetic
attataagcctugacacggaactgataut

SEQ ID NO: 33071 - DNA, 22 bp, Artificial Sequence
  Synthetic
ctuccccaucaggaaaggtuac

SEQ ID NO: 33072 - DNA, 28 bp, Artificial Sequence
  Synthetic
aacttgttttgcugcatttactacucac

SEQ ID NO: 33073 - DNA, 24 bp, Artificial Sequence
  Synthetic
ggaaaacagcaguggatcaaaguc

SEQ ID NO: 33074 - DNA, 24 bp, Artificial Sequence
  Synthetic
gttggacgaccuttgaatggaaug

SEQ ID NO: 33075 - DNA, 30 bp, Artificial Sequence
  Synthetic
tcaaaactcacugaacaccaagagtauaaa

SEQ ID NO: 33076 - DNA, 21 bp, Artificial Sequence
  Synthetic
gttuaccccaggcaagtguga

SEQ ID NO: 33077 - DNA, 23 bp, Artificial Sequence
  Synthetic
gccgcatuacagatttgcgtcua

SEQ ID NO: 33078 - DNA, 28 bp, Artificial Sequence
  Synthetic
gcaatatttgtgacutccaagcttttug

SEQ ID NO: 33079 - DNA, 21 bp, Artificial Sequence
  Synthetic
gagaaaccagucgactugcct

SEQ ID NO: 33080 - DNA, 28 bp, Artificial Sequence
  Synthetic
tggaggtcctgguctatctaatacttut

SEQ ID NO: 33081 - DNA, 30 bp, Artificial Sequence
  Synthetic
gtggttaagaggagauaaggaaatugaaga

SEQ ID NO: 33082 - DNA, 26 bp, Artificial Sequence
  Synthetic
ttggatccautgaaattctugggagt

SEQ ID NO: 33083 - DNA, 25 bp, Artificial Sequence
  Synthetic
gtagagaaacgugatttgcctgaug

SEQ ID NO: 33084 - DNA, 22 bp, Artificial Sequence
  Synthetic
tcacagggauctctggcuacat

SEQ ID NO: 33085 - DNA, 27 bp, Artificial Sequence
  Synthetic
gutaccaccuggagagaaaagaaagaa

SEQ ID NO: 33086 - DNA, 23 bp, Artificial Sequence
  Synthetic
ggcctggtuctttgtagggauat

SEQ ID NO: 33087 - DNA, 22 bp, Artificial Sequence
  Synthetic
caaccaccacaguatgggaugt

SEQ ID NO: 33088 - DNA, 29 bp, Artificial Sequence
  Synthetic
ccttttggaggaucaggtttatcuagagt

SEQ ID NO: 33089 - DNA, 20 bp, Artificial Sequence
  Synthetic
cuggacgtccuaagccaacc

SEQ ID NO: 33090 - DNA, 27 bp, Artificial Sequence
  Synthetic
aggatcacttcuccccttttcattuac

SEQ ID NO: 33091 - DNA, 23 bp, Artificial Sequence
  Synthetic
gtcaccagaaacagugtctcuct

SEQ ID NO: 33092 - DNA, 24 bp, Artificial Sequence
  Synthetic
ttggagcugatcgatttuccaaga

SEQ ID NO: 33093 - DNA, 26 bp, Artificial Sequence
  Synthetic
tttgttactgugagagttcuggacac

SEQ ID NO: 33094 - DNA, 23 bp, Artificial Sequence
  Synthetic
ctcggattucaccatccacctut

SEQ ID NO: 33095 - DNA, 30 bp, Artificial Sequence
  Synthetic
gctattaauaaagctggagtuggagaacat

SEQ ID NO: 33096 - DNA, 27 bp, Artificial Sequence
  Synthetic
caccaacacucacatcacattttucaa

SEQ ID NO: 33097 - DNA, 24 bp, Artificial Sequence
  Synthetic
gttcagagttuctgctgagaaugc

SEQ ID NO: 33098 - DNA, 23 bp, Artificial Sequence
  Synthetic
cagatgctgguctttcccauaca

SEQ ID NO: 33099 - DNA, 23 bp, Artificial Sequence
  Synthetic
tctcagcugcaaggttacuaagc

SEQ ID NO: 33100 - DNA, 25 bp, Artificial Sequence
  Synthetic
tgtgcattttuctgctgtaacucct

SEQ ID NO: 33101 - DNA, 27 bp, Artificial Sequence
  Synthetic
cacagcucgattagaaauaaagagcac

SEQ ID NO: 33102 - DNA, 23 bp, Artificial Sequence
  Synthetic
tcgtggtggauctacctcatcuc

SEQ ID NO: 33103 - DNA, 27 bp, Artificial Sequence
  Synthetic
tggaagcaagaucactggttatatugt

SEQ ID NO: 33104 - DNA, 22 bp, Artificial Sequence
  Synthetic
ggtcacgagccacauaacatuc

SEQ ID NO: 33105 - DNA, 23 bp, Artificial Sequence
  Synthetic
gccaatcagugatggaggaagua

SEQ ID NO: 33106 - DNA, 25 bp, Artificial Sequence
  Synthetic
tcccatatcugttttcagcugcaat

SEQ ID NO: 33107 - DNA, 26 bp, Artificial Sequence
  Synthetic
ccagttaaaauggatgaagugacagc

SEQ ID NO: 33108 - DNA, 24 bp, Artificial Sequence
  Synthetic
aggcgtcctutattgtcagtagug

SEQ ID NO: 33109 - DNA, 20 bp, Artificial Sequence
  Synthetic
actgagtgugccagtgaucg

SEQ ID NO: 33110 - DNA, 24 bp, Artificial Sequence
  Synthetic
ttggtctgcauctccacaatguag

SEQ ID NO: 33111 - DNA, 28 bp, Artificial Sequence
  Synthetic
cttcaagaaggcugtagctactattuca

SEQ ID NO: 33112 - DNA, 22 bp, Artificial Sequence
  Synthetic
gtcccaugtgagtgugacagat

SEQ ID NO: 33113 - DNA, 24 bp, Artificial Sequence
  Synthetic
agcatcgaauccacaagctctuac

SEQ ID NO: 33114 - DNA, 23 bp, Artificial Sequence
  Synthetic
agutcaatttcuggaggcagcat

SEQ ID NO: 33115 - DNA, 26 bp, Artificial Sequence
  Synthetic
atcactgggtauatggttgagatugc

SEQ ID NO: 33116 - DNA, 24 bp, Artificial Sequence
  Synthetic
agccttgtaaaauggactgguagg

SEQ ID NO: 33117 - DNA, 25 bp, Artificial Sequence
  Synthetic
gattctgatgguggaagtgaaauca

SEQ ID NO: 33118 - DNA, 28 bp, Artificial Sequence
  Synthetic
ccactccatatutatttacagccaugac

SEQ ID NO: 33119 - DNA, 28 bp, Artificial Sequence
  Synthetic
actgaagtgacaucagaaaagtgtguac

SEQ ID NO: 33120 - DNA, 22 bp, Artificial Sequence
  Synthetic
agtcgcugtaagggtauaggca

SEQ ID NO: 33121 - DNA, 29 bp, Artificial Sequence
  Synthetic
cggttatatuaaaagcaggtgaagcatuc

SEQ ID NO: 33122 - DNA, 24 bp, Artificial Sequence
  Synthetic
cgatcacacggaautcataugcag

SEQ ID NO: 33123 - DNA, 26 bp, Artificial Sequence
  Synthetic
cacctggaaaaccaguacctcuaaat

SEQ ID NO: 33124 - DNA, 27 bp, Artificial Sequence
  Synthetic
cacttgatttgaaaaugttgcctggua

SEQ ID NO: 33125 - DNA, 22 bp, Artificial Sequence
  Synthetic
catcagcaugcatagtugccaa

SEQ ID NO: 33126 - DNA, 21 bp, Artificial Sequence
  Synthetic
cagtctgccgcauttccacua

SEQ ID NO: 33127 - DNA, 27 bp, Artificial Sequence
  Synthetic
cctatccatuaacagcaaggaacatug

SEQ ID NO: 33128 - DNA, 22 bp, Artificial Sequence
  Synthetic
cgaccgagcacuggaattucaa

SEQ ID NO: 33129 - DNA, 25 bp, Artificial Sequence
  Synthetic
cgtgaaagggutagaatgtgttgug

SEQ ID NO: 33130 - DNA, 22 bp, Artificial Sequence
  Synthetic
atgttaaggcugtctgguggag

SEQ ID NO: 33131 - DNA, 26 bp, Artificial Sequence
  Synthetic
aatcttatuccacagccaccacuaag

SEQ ID NO: 33132 - DNA, 20 bp, Artificial Sequence
  Synthetic
gcgtguccaagactcugacg

SEQ ID NO: 33133 - DNA, 28 bp, Artificial Sequence
  Synthetic
tggaccaaagauaacatcaaccugaaaa

SEQ ID NO: 33134 - DNA, 21 bp, Artificial Sequence
  Synthetic
gccatcucccgttctacgaut

SEQ ID NO: 33135 - DNA, 23 bp, Artificial Sequence
  Synthetic
ggtggactugaaatcactggcua

SEQ ID NO: 33136 - DNA, 30 bp, Artificial Sequence
  Synthetic
aagtatatatucagagtttggctttugggt

SEQ ID NO: 33137 - DNA, 22 bp, Artificial Sequence
  Synthetic
cgaattccgugtcagugcagaa

SEQ ID NO: 33138 - DNA, 24 bp, Artificial Sequence
  Synthetic
catcgcaggcutttcttttctcuc

SEQ ID NO: 33139 - DNA, 29 bp, Artificial Sequence
  Synthetic
agggaattgacauggaaacatttauagca

SEQ ID NO: 33140 - DNA, 24 bp, Artificial Sequence
  Synthetic
ccacatgccugcaagactgaauat

SEQ ID NO: 33141 - DNA, 23 bp, Artificial Sequence
  Synthetic
cgaaggtggaacaugtgaaggua

SEQ ID NO: 33142 - DNA, 30 bp, Artificial Sequence
  Synthetic
gtgatatctgauggtctaatgtctttucct

SEQ ID NO: 33143 - DNA, 28 bp, Artificial Sequence
  Synthetic
agcctccttccutttctgattaaaaugt

SEQ ID NO: 33144 - DNA, 25 bp, Artificial Sequence
  Synthetic
caaggucagttacaguaaaggcaca

SEQ ID NO: 33145 - DNA, 27 bp, Artificial Sequence
  Synthetic
ctggtatttgttugactggttttgcut

SEQ ID NO: 33146 - DNA, 21 bp, Artificial Sequence
  Synthetic
cttgcccacaccugctaaaut

SEQ ID NO: 33147 - DNA, 27 bp, Artificial Sequence
  Synthetic
cttgatacatcccugggtcttttguag

SEQ ID NO: 33148 - DNA, 30 bp, Artificial Sequence
  Synthetic
atttataauaagaagcctccucaaaaccgt

SEQ ID NO: 33149 - DNA, 28 bp, Artificial Sequence
  Synthetic
gaaaaccaccttuagagtaaccagacut

SEQ ID NO: 33150 - DNA, 23 bp, Artificial Sequence
  Synthetic
ggcttctgcugtgacttcaucaa

SEQ ID NO: 33151 - DNA, 26 bp, Artificial Sequence
  Synthetic
gaagatcctcuagcaactgacacuag

SEQ ID NO: 33152 - DNA, 24 bp, Artificial Sequence
  Synthetic
agataagcuagtgagugggacaca

SEQ ID NO: 33153 - DNA, 29 bp, Artificial Sequence
  Synthetic
caacgagttaugaaatccttaagccuaca

SEQ ID NO: 33154 - DNA, 27 bp, Artificial Sequence
  Synthetic
gcaaaggagaaaugataagtguaagcc

SEQ ID NO: 33155 - DNA, 28 bp, Artificial Sequence
  Synthetic
tccaaaacaagcutcagagtagctaaut

SEQ ID NO: 33156 - DNA, 28 bp, Artificial Sequence
  Synthetic
tgaaatagactuaccaagcacttucaca

SEQ ID NO: 33157 - DNA, 28 bp, Artificial Sequence
  Synthetic
ccacctccaaagautacttggtcuaaac

SEQ ID NO: 33158 - DNA, 23 bp, Artificial Sequence
  Synthetic
gccttatgtacuccccctgguaa

SEQ ID NO: 33159 - DNA, 20 bp, Artificial Sequence
  Synthetic
gctgacuccgataacugggt

SEQ ID NO: 33160 - DNA, 24 bp, Artificial Sequence
  Synthetic
ttcatgaaaacutccttccugggt

SEQ ID NO: 33161 - DNA, 28 bp, Artificial Sequence
  Synthetic
gaacatuaaaagcaacaggtctucaaga

SEQ ID NO: 33162 - DNA, 23 bp, Artificial Sequence
  Synthetic
cttccagcugactgtcatgugat

SEQ ID NO: 33163 - DNA, 27 bp, Artificial Sequence
  Synthetic
caaaaacccatauggtaggaacattuc

SEQ ID NO: 33164 - DNA, 21 bp, Artificial Sequence
  Synthetic
gcagagactugagcccagtug

SEQ ID NO: 33165 - DNA, 26 bp, Artificial Sequence
  Synthetic
aggtctccagaccuctactctauact

SEQ ID NO: 33166 - DNA, 27 bp, Artificial Sequence
  Synthetic
gcagtaatggtauagtctcctgagucc

SEQ ID NO: 33167 - DNA, 26 bp, Artificial Sequence
  Synthetic
tgcttggatgcuactgtttttgguaa

SEQ ID NO: 33168 - DNA, 27 bp, Artificial Sequence
  Synthetic
tgaccatcatgaaugctgttacatcut

SEQ ID NO: 33169 - DNA, 22 bp, Artificial Sequence
  Synthetic
ggtgataaaugggtacggugca

SEQ ID NO: 33170 - DNA, 27 bp, Artificial Sequence
  Synthetic
cttagacuccgagatttaaatgugcct

SEQ ID NO: 33171 - DNA, 24 bp, Artificial Sequence
  Synthetic
tgatactcttguccggtcaacuga

SEQ ID NO: 33172 - DNA, 28 bp, Artificial Sequence
  Synthetic
gaagacaaggaagaugtcagtttcuaca

SEQ ID NO: 33173 - DNA, 23 bp, Artificial Sequence
  Synthetic
cggctcuagcttcagucacaaaa

SEQ ID NO: 33174 - DNA, 29 bp, Artificial Sequence
  Synthetic
tttctgagcttcauatttagatggccaut

SEQ ID NO: 33175 - DNA, 22 bp, Artificial Sequence
  Synthetic
atgaagutgtcacauccagcca

SEQ ID NO: 33176 - DNA, 27 bp, Artificial Sequence
  Synthetic
aatttctagagcuagattccucaggga

SEQ ID NO: 33177 - DNA, 27 bp, Artificial Sequence
  Synthetic
tggccuaaaggaaggaaagaaauacaa

SEQ ID NO: 33178 - DNA, 23 bp, Artificial Sequence
  Synthetic
gccatcgautttagcaccuccat

SEQ ID NO: 33179 - DNA, 30 bp, Artificial Sequence
  Synthetic
acattggagcaaauccatactaaaactcut

SEQ ID NO: 33180 - DNA, 28 bp, Artificial Sequence
  Synthetic
catggaagctugttttcttaacttcugg

SEQ ID NO: 33181 - DNA, 28 bp, Artificial Sequence
  Synthetic
gatgctgaggagacaugtatatctgaut

SEQ ID NO: 33182 - DNA, 22 bp, Artificial Sequence
  Synthetic
ggccatagugtcaaccagauca

SEQ ID NO: 33183 - DNA, 31 bp, Artificial Sequence
  Synthetic
cccacattctgaaaaaucaattaatgaccut

SEQ ID NO: 33184 - DNA, 23 bp, Artificial Sequence
  Synthetic
attacaccguttccagcctucat

SEQ ID NO: 33185 - DNA, 23 bp, Artificial Sequence
  Synthetic
tttacttucagagccacctgguc

SEQ ID NO: 33186 - DNA, 23 bp, Artificial Sequence
  Synthetic
tcautttctgcctugacacggaa

SEQ ID NO: 33187 - DNA, 26 bp, Artificial Sequence
  Synthetic
gtaagcaaagaagagaugactguggt

SEQ ID NO: 33188 - DNA, 23 bp, Artificial Sequence
  Synthetic
ggaggcccugtgcctattttaut

SEQ ID NO: 33189 - DNA, 25 bp, Artificial Sequence
  Synthetic
ttgttgatgtguccagtgataggug

SEQ ID NO: 33190 - DNA, 23 bp, Artificial Sequence
  Synthetic
ccatcactucgctttgcttuagt

SEQ ID NO: 33191 - DNA, 31 bp, Artificial Sequence
  Synthetic
agacttacaaaaaccaguacttgatcugaaa

SEQ ID NO: 33192 - DNA, 28 bp, Artificial Sequence
  Synthetic
ccatgtagtgaguttctttaatgctucc

SEQ ID NO: 33193 - DNA, 29 bp, Artificial Sequence
  Synthetic
aaacaaaaactcccautctggctatuaac

SEQ ID NO: 33194 - DNA, 23 bp, Artificial Sequence
  Synthetic
cctttctggtutggtttgcgaua

SEQ ID NO: 33195 - DNA, 27 bp, Artificial Sequence
  Synthetic
tgatcatggcaaguatatcatcucagc

SEQ ID NO: 33196 - DNA, 23 bp, Artificial Sequence
  Synthetic
gactcgagcuagaatgcggauag

SEQ ID NO: 33197 - DNA, 23 bp, Artificial Sequence
  Synthetic
attaggcaaugtgccttuagggt

SEQ ID NO: 33198 - DNA, 23 bp, Artificial Sequence
  Synthetic
agctgtttctcugctcttgtcut

SEQ ID NO: 33199 - DNA, 24 bp, Artificial Sequence
  Synthetic
ggtcaacaaaacaccuatcgcuga

SEQ ID NO: 33200 - DNA, 25 bp, Artificial Sequence
  Synthetic
ggagacggaggacuaaatttaugct

SEQ ID NO: 33201 - DNA, 31 bp, Artificial Sequence
  Synthetic
ggaagccctgugataaattatattgtugaga

SEQ ID NO: 33202 - DNA, 25 bp, Artificial Sequence
  Synthetic
gcccaggaacaucaagaacaguaag

SEQ ID NO: 33203 - DNA, 25 bp, Artificial Sequence
  Synthetic
ctgctattauaagaggtgtgccugt

SEQ ID NO: 33204 - DNA, 27 bp, Artificial Sequence
  Synthetic
gaggcacugaaaagtaaacaugaaaaa

SEQ ID NO: 33205 - DNA, 25 bp, Artificial Sequence
  Synthetic
aaagctgaaaacautgtgggtctug

SEQ ID NO: 33206 - DNA, 30 bp, Artificial Sequence
  Synthetic
gggatctttucaaagaagaagttatgauga

SEQ ID NO: 33207 - DNA, 24 bp, Artificial Sequence
  Synthetic
tcacttcgcuaagcatctgaauga

SEQ ID NO: 33208 - DNA, 25 bp, Artificial Sequence
  Synthetic
agacagttttugaaccagctggaut

SEQ ID NO: 33209 - DNA, 26 bp, Artificial Sequence
  Synthetic
aagacttagugccatcaucaaaggag

SEQ ID NO: 33210 - DNA, 31 bp, Artificial Sequence
  Synthetic
catacaatcagacauctattttcctugcaaa

SEQ ID NO: 33211 - DNA, 25 bp, Artificial Sequence
  Synthetic
ccctgagtcaugtcctgaaacuaaa

SEQ ID NO: 33212 - DNA, 26 bp, Artificial Sequence
  Synthetic
ccaattggatcuttagcaaagacugg

SEQ ID NO: 33213 - DNA, 28 bp, Artificial Sequence
  Synthetic
cacaaacuacatccuggaaaagagagaa

SEQ ID NO: 33214 - DNA, 23 bp, Artificial Sequence
  Synthetic
aggaaccccugtaacaaatgtug

SEQ ID NO: 33215 - DNA, 28 bp, Artificial Sequence
  Synthetic
cggatacatgcugaaaatctgtauggaa

SEQ ID NO: 33216 - DNA, 27 bp, Artificial Sequence
  Synthetic
gtctttacccacutccttcttcucaat

SEQ ID NO: 33217 - DNA, 28 bp, Artificial Sequence
  Synthetic
ggcaataacatttugtgccatgatttut

SEQ ID NO: 33218 - DNA, 25 bp, Artificial Sequence
  Synthetic
gttcuccacaaccauacagtattug

SEQ ID NO: 33219 - DNA, 20 bp, Artificial Sequence
  Synthetic
cctcacuggccgttacucag

SEQ ID NO: 33220 - DNA, 30 bp, Artificial Sequence
  Synthetic
acaaatctacaaaugtgcaagttucagaag

SEQ ID NO: 33221 - DNA, 28 bp, Artificial Sequence
  Synthetic
ggactgagaagutccacaaagtuacaaa

SEQ ID NO: 33222 - DNA, 28 bp, Artificial Sequence
  Synthetic
cttaggaggatuccaagtcaaagtuaca

SEQ ID NO: 33223 - DNA, 31 bp, Artificial Sequence
  Synthetic
tgcaatctucagaaaaggaatattcacuaca

SEQ ID NO: 33224 - DNA, 21 bp, Artificial Sequence
  Synthetic
gcggtcagautcacgctttuc

SEQ ID NO: 33225 - DNA, 30 bp, Artificial Sequence
  Synthetic
aaggcaaacagcutgaattattttcttcut

SEQ ID NO: 33226 - DNA, 21 bp, Artificial Sequence
  Synthetic
ggtggcutcttgagguaaggt

SEQ ID NO: 33227 - DNA, 31 bp, Artificial Sequence
  Synthetic
ttccttatgccaucagtatttatgttucaga

SEQ ID NO: 33228 - DNA, 26 bp, Artificial Sequence
  Synthetic
cagcaatgttgacugctctaactcua

SEQ ID NO: 33229 - DNA, 26 bp, Artificial Sequence
  Synthetic
tggtgatgctutaggaagccatuaaa

SEQ ID NO: 33230 - DNA, 22 bp, Artificial Sequence
  Synthetic
gcugcaaagagccagtauacgt

SEQ ID NO: 33231 - DNA, 27 bp, Artificial Sequence
  Synthetic
ggtcttattgaaggutccgactaucaa

SEQ ID NO: 33232 - DNA, 23 bp, Artificial Sequence
  Synthetic
agagccuccatcatattcuggct

SEQ ID NO: 33233 - DNA, 28 bp, Artificial Sequence
  Synthetic
agaaacctcutctgtaaguaggagaaca

SEQ ID NO: 33234 - DNA, 24 bp, Artificial Sequence
  Synthetic
cttaggttcacuggagacauggac

SEQ ID NO: 33235 - DNA, 28 bp, Artificial Sequence
  Synthetic
catctgagtgauaaagggttccttctut

SEQ ID NO: 33236 - DNA, 28 bp, Artificial Sequence
  Synthetic
aagtatcatcuaccaccagtttgtugac

SEQ ID NO: 33237 - DNA, 28 bp, Artificial Sequence
  Synthetic
tgctttttgctccuaatgacaactttut

SEQ ID NO: 33238 - DNA, 28 bp, Artificial Sequence
  Synthetic
actaggtctucaacagtaaattgcagut

SEQ ID NO: 33239 - DNA, 26 bp, Artificial Sequence
  Synthetic
tttttacagatccucctgatccucct

SEQ ID NO: 33240 - DNA, 26 bp, Artificial Sequence
  Synthetic
caggcttttccaucaatagtcctcut

SEQ ID NO: 33241 - DNA, 30 bp, Artificial Sequence
  Synthetic
cgttgcttatautgtgatttacauccaaca

SEQ ID NO: 33242 - DNA, 27 bp, Artificial Sequence
  Synthetic
ctccagctguacaaagaaaataguagt

SEQ ID NO: 33243 - DNA, 29 bp, Artificial Sequence
  Synthetic
gcaatgaagguaggaaaataaccattcuc

SEQ ID NO: 33244 - DNA, 26 bp, Artificial Sequence
  Synthetic
tactagtaccutgaatatcaguggca

SEQ ID NO: 33245 - DNA, 28 bp, Artificial Sequence
  Synthetic
agcccaaucaaaggatacattguagaaa

SEQ ID NO: 33246 - DNA, 21 bp, Artificial Sequence
  Synthetic
guccccagaaauggaagcaua

SEQ ID NO: 33247 - DNA, 23 bp, Artificial Sequence
  Synthetic
ggaagtcctuattggtcacgugt

SEQ ID NO: 33248 - DNA, 28 bp, Artificial Sequence
  Synthetic
ggcgataaggaucttgaatgactactut

SEQ ID NO: 33249 - DNA, 28 bp, Artificial Sequence
  Synthetic
agtcatcccucccaaaataagttgaaut

SEQ ID NO: 33250 - DNA, 23 bp, Artificial Sequence
  Synthetic
tcctacttgcaucacgtttguca

SEQ ID NO: 33251 - DNA, 31 bp, Artificial Sequence
  Synthetic
cttctcaatattcuctgttgattccttucca

SEQ ID NO: 33252 - DNA, 21 bp, Artificial Sequence
  Synthetic
ggaccgctutgggaatgcuaa

SEQ ID NO: 33253 - DNA, 25 bp, Artificial Sequence
  Synthetic
acuatcaaagtuaaggcaggagagc

SEQ ID NO: 33254 - DNA, 27 bp, Artificial Sequence
  Synthetic
caacttatgggauaaaggcacactgua

SEQ ID NO: 33255 - DNA, 27 bp, Artificial Sequence
  Synthetic
ctttgaaagagtuaacaagcgactcug

SEQ ID NO: 33256 - DNA, 24 bp, Artificial Sequence
  Synthetic
attttgagacugttgggagttuga

SEQ ID NO: 33257 - DNA, 27 bp, Artificial Sequence
  Synthetic
gagggacaagaauataagttccgtgut

SEQ ID NO: 33258 - DNA, 28 bp, Artificial Sequence
  Synthetic
gataaagcctgutatttcacttccucca

SEQ ID NO: 33259 - DNA, 28 bp, Artificial Sequence
  Synthetic
cacaggatttucccaagtgatactauct

SEQ ID NO: 33260 - DNA, 30 bp, Artificial Sequence
  Synthetic
gtgcatccttgauaattagttcagattugg

SEQ ID NO: 33261 - DNA, 27 bp, Artificial Sequence
  Synthetic
ctaatgcaugactgttctcttucaaca

SEQ ID NO: 33262 - DNA, 20 bp, Artificial Sequence
  Synthetic
atugacagcacucacccgaa

SEQ ID NO: 33263 - DNA, 24 bp, Artificial Sequence
  Synthetic
caagagtcacugacacaagctcua

SEQ ID NO: 33264 - DNA, 27 bp, Artificial Sequence
  Synthetic
gacataggugagtccttctaauaagcc

SEQ ID NO: 33265 - DNA, 21 bp, Artificial Sequence
  Synthetic
gaccacctgaugcaccagaua

SEQ ID NO: 33266 - DNA, 27 bp, Artificial Sequence
  Synthetic
tgcaatgtcuaagtgttgaagugacaa

SEQ ID NO: 33267 - DNA, 28 bp, Artificial Sequence
  Synthetic
ccttcccacacaaauttttgattacugt

SEQ ID NO: 33268 - DNA, 23 bp, Artificial Sequence
  Synthetic
gaggcaggacaaauggttctuct

SEQ ID NO: 33269 - DNA, 25 bp, Artificial Sequence
  Synthetic
aggtgatgaaauagcacttgaugca

SEQ ID NO: 33270 - DNA, 22 bp, Artificial Sequence
  Synthetic
gggaaaguggcaactccaugaa

SEQ ID NO: 33271 - DNA, 25 bp, Artificial Sequence
  Synthetic
gaagaaagguggaagagatgcaaug

SEQ ID NO: 33272 - DNA, 22 bp, Artificial Sequence
  Synthetic
gccatagugcatccatguccaa

SEQ ID NO: 33273 - DNA, 21 bp, Artificial Sequence
  Synthetic
cautatgtccuggagcgcaga

SEQ ID NO: 33274 - DNA, 26 bp, Artificial Sequence
  Synthetic
tcctctacatgugaagaatgtcuggt

SEQ ID NO: 33275 - DNA, 29 bp, Artificial Sequence
  Synthetic
ggcaaagaagtuaaagcaagtgatagaut

SEQ ID NO: 33276 - DNA, 27 bp, Artificial Sequence
  Synthetic
cagagtatgucaaaatgcaatgcauga

SEQ ID NO: 33277 - DNA, 28 bp, Artificial Sequence
  Synthetic
ttgttccugacaaagaatatgtccugag

SEQ ID NO: 33278 - DNA, 26 bp, Artificial Sequence
  Synthetic
actggacacauttcaacatggtaucc

SEQ ID NO: 33279 - DNA, 28 bp, Artificial Sequence
  Synthetic
gaagatccaacaaguaagtagtgcugat

SEQ ID NO: 33280 - DNA, 27 bp, Artificial Sequence
  Synthetic
aaaaacacagutaagaattugcagcca

SEQ ID NO: 33281 - DNA, 29 bp, Artificial Sequence
  Synthetic
cctttcctctggutttcctaatcattgut

SEQ ID NO: 33282 - DNA, 21 bp, Artificial Sequence
  Synthetic
ccactgttugccagcctttuc

SEQ ID NO: 33283 - DNA, 22 bp, Artificial Sequence
  Synthetic
gcctgcactutcagactgacua

SEQ ID NO: 33284 - DNA, 24 bp, Artificial Sequence
  Synthetic
agccttatucacagctctaacucg

SEQ ID NO: 33285 - DNA, 22 bp, Artificial Sequence
  Synthetic
ccagaacaugatggaggugcaa

SEQ ID NO: 33286 - DNA, 30 bp, Artificial Sequence
  Synthetic
cattgtttaggttugtcaaaaaggagtuca

SEQ ID NO: 33287 - DNA, 28 bp, Artificial Sequence
  Synthetic
atgatgatacacaugcactttgttccua

SEQ ID NO: 33288 - DNA, 22 bp, Artificial Sequence
  Synthetic
ccatcaucatctggcucacacc

SEQ ID NO: 33289 - DNA, 28 bp, Artificial Sequence
  Synthetic
aaggatgcttatgucaaacttgcattut

SEQ ID NO: 33290 - DNA, 25 bp, Artificial Sequence
  Synthetic
gggattaattuggtggcctugaagt

SEQ ID NO: 33291 - DNA, 25 bp, Artificial Sequence
  Synthetic
ttctgcatcugtaatgccauacaca

SEQ ID NO: 33292 - DNA, 30 bp, Artificial Sequence
  Synthetic
cattttcaatgguaattcttttgtccugct

SEQ ID NO: 33293 - DNA, 27 bp, Artificial Sequence
  Synthetic
cctctgacctuaaatctgcttgaacut

SEQ ID NO: 33294 - DNA, 24 bp, Artificial Sequence
  Synthetic
ccaacaaagcccautttagugact

SEQ ID NO: 33295 - DNA, 26 bp, Artificial Sequence
  Synthetic
catgggauccacctaaaaatgauggt

SEQ ID NO: 33296 - DNA, 22 bp, Artificial Sequence
  Synthetic
gcctugccccataactucaact

SEQ ID NO: 33297 - DNA, 31 bp, Artificial Sequence
  Synthetic
cctgatcttgtucaaggaaaagagtactuat

SEQ ID NO: 33298 - DNA, 25 bp, Artificial Sequence
  Synthetic
ttcccctactcucatttttggcaut

SEQ ID NO: 33299 - DNA, 23 bp, Artificial Sequence
  Synthetic
cagtgactcgugagtgcatttut

SEQ ID NO: 33300 - DNA, 24 bp, Artificial Sequence
  Synthetic
gagaaatgacaagutcggcauagg

SEQ ID NO: 33301 - DNA, 30 bp, Artificial Sequence
  Synthetic
actgcaaactcautaacttttcttcttugt

SEQ ID NO: 33302 - DNA, 27 bp, Artificial Sequence
  Synthetic
cacatacagtuatgtccatgauccaca

SEQ ID NO: 33303 - DNA, 27 bp, Artificial Sequence
  Synthetic
ctgaaagauggaggaagcccaatatua

SEQ ID NO: 33304 - DNA, 28 bp, Artificial Sequence
  Synthetic
ggcctaatatcuggatttcatgcaguaa

SEQ ID NO: 33305 - DNA, 23 bp, Artificial Sequence
  Synthetic
ggatacugccatgactgugagag

SEQ ID NO: 33306 - DNA, 28 bp, Artificial Sequence
  Synthetic
ccacagaagaagaaaauatgagttuggg

SEQ ID NO: 33307 - DNA, 25 bp, Artificial Sequence
  Synthetic
gttgagtacctautccgtgtgagug

SEQ ID NO: 33308 - DNA, 29 bp, Artificial Sequence
  Synthetic
tctttctcttaaugtcacgtcttucaaca

SEQ ID NO: 33309 - DNA, 28 bp, Artificial Sequence
  Synthetic
cacaattuaaaagcaagauagcacacua

SEQ ID NO: 33310 - DNA, 26 bp, Artificial Sequence
  Synthetic
cctttgtctccuttcttggcttcuaa

SEQ ID NO: 33311 - DNA, 28 bp, Artificial Sequence
  Synthetic
agcgttcacatgutatctttctcacuag

SEQ ID NO: 33312 - DNA, 27 bp, Artificial Sequence
  Synthetic
ccttcactcaucatctggtgtttauca

SEQ ID NO: 33313 - DNA, 29 bp, Artificial Sequence
  Synthetic
ttctttccagaaautcctgttgagaucat

SEQ ID NO: 33314 - DNA, 27 bp, Artificial Sequence
  Synthetic
aggagacattggautatcagttagcut

SEQ ID NO: 33315 - DNA, 24 bp, Artificial Sequence
  Synthetic
cacttggaagaucagacagucact

SEQ ID NO: 33316 - DNA, 22 bp, Artificial Sequence
  Synthetic
catcugggaagccacagtctut

SEQ ID NO: 33317 - DNA, 27 bp, Artificial Sequence
  Synthetic
tuttctccttuacaacagaggaagacc

SEQ ID NO: 33318 - DNA, 27 bp, Artificial Sequence
  Synthetic
ctgcactttuaacattttcacctcugt

SEQ ID NO: 33319 - DNA, 28 bp, Artificial Sequence
  Synthetic
caaagccaaauggttcagaaaugaagaa

SEQ ID NO: 33320 - DNA, 29 bp, Artificial Sequence
  Synthetic
catctttcacaacuaggaccctcttttua

SEQ ID NO: 33321 - DNA, 28 bp, Artificial Sequence
  Synthetic
caaagccucaaaaccttgaaatactuga

SEQ ID NO: 33322 - DNA, 26 bp, Artificial Sequence
  Synthetic
ttcctgtttcaaugatctcctcaucc

SEQ ID NO: 33323 - DNA, 28 bp, Artificial Sequence
  Synthetic
ccagcttaacucaatgtggtttttgtut

SEQ ID NO: 33324 - DNA, 30 bp, Artificial Sequence
  Synthetic
ccttacttcacaggaauattcagcttcauc

SEQ ID NO: 33325 - DNA, 24 bp, Artificial Sequence
  Synthetic
cttaaggacaccugtgugaaggaa

SEQ ID NO: 33326 - DNA, 28 bp, Artificial Sequence
  Synthetic
aagtgttgtgtugttttgttgttguagt

SEQ ID NO: 33327 - DNA, 27 bp, Artificial Sequence
  Synthetic
aagaagtatgaaautgttgctgauggc

SEQ ID NO: 33328 - DNA, 24 bp, Artificial Sequence
  Synthetic
attgttcaugagcctctgcctuat

SEQ ID NO: 33329 - DNA, 30 bp, Artificial Sequence
  Synthetic
cacccatatactagautgctgtttcatgua

SEQ ID NO: 33330 - DNA, 30 bp, Artificial Sequence
  Synthetic
ctttcacctgutcttttctaatucacacag

SEQ ID NO: 33331 - DNA, 22 bp, Artificial Sequence
  Synthetic
atgctggcccutcacttttcua

SEQ ID NO: 33332 - DNA, 26 bp, Artificial Sequence
  Synthetic
gctttctttaggautagcatgcgtut

SEQ ID NO: 33333 - DNA, 29 bp, Artificial Sequence
  Synthetic
aaagcttttcacutatactttactugcag

SEQ ID NO: 33334 - DNA, 27 bp, Artificial Sequence
  Synthetic
gaatgtgatcgaaugagttttccctuc

SEQ ID NO: 33335 - DNA, 24 bp, Artificial Sequence
  Synthetic
ttcctcaccccuctcaaagatgua

SEQ ID NO: 33336 - DNA, 29 bp, Artificial Sequence
  Synthetic
tcctttataagcucaaatctgtcaucacc

SEQ ID NO: 33337 - DNA, 25 bp, Artificial Sequence
  Synthetic
cttcatccacugtccacttcttuca

SEQ ID NO: 33338 - DNA, 23 bp, Artificial Sequence
  Synthetic
accaagcaaccccuctcctauat

SEQ ID NO: 33339 - DNA, 30 bp, Artificial Sequence
  Synthetic
cagtcatgcuaacaaaactgtatcattuca

SEQ ID NO: 33340 - DNA, 24 bp, Artificial Sequence
  Synthetic
gcctttatcttuaaggtccgccut

SEQ ID NO: 33341 - DNA, 26 bp, Artificial Sequence
  Synthetic
gcuaaatgtctttuacagaggccgat

SEQ ID NO: 33342 - DNA, 30 bp, Artificial Sequence
  Synthetic
caatgtcacttctutcatttccaatttgug

SEQ ID NO: 33343 - DNA, 27 bp, Artificial Sequence
  Synthetic
tctgaggcattauctatgcttgcatut

SEQ ID NO: 33344 - DNA, 31 bp, Artificial Sequence
  Synthetic
agcgatgatatcaaauttgtcagatgactua

SEQ ID NO: 33345 - DNA, 27 bp, Artificial Sequence
  Synthetic
tcaactttattucacttccctgugcat

SEQ ID NO: 33346 - DNA, 23 bp, Artificial Sequence
  Synthetic
attgcatuaagggcctgguagag

SEQ ID NO: 33347 - DNA, 30 bp, Artificial Sequence
  Synthetic
tgtatctgaaacacutctcctauagggaat

SEQ ID NO: 33348 - DNA, 25 bp, Artificial Sequence
  Synthetic
tcagtttccatugtccaggaatguc

SEQ ID NO: 33349 - DNA, 24 bp, Artificial Sequence
  Synthetic
caaagcatcgutgggttgtcuaaa

SEQ ID NO: 33350 - DNA, 29 bp, Artificial Sequence
  Synthetic
agcaatatcttcuggcatagcattctuaa

SEQ ID NO: 33351 - DNA, 25 bp, Artificial Sequence
  Synthetic
gaagtcattagagautggctgguga

SEQ ID NO: 33352 - DNA, 22 bp, Artificial Sequence
  Synthetic
aatcttgccauccttccuccag

SEQ ID NO: 33353 - DNA, 27 bp, Artificial Sequence
  Synthetic
agtagcaactugcattgtagtttuaca

SEQ ID NO: 33354 - DNA, 23 bp, Artificial Sequence
  Synthetic
gtgtatucaccagcaucggaaag

SEQ ID NO: 33355 - DNA, 31 bp, Artificial Sequence
  Synthetic
tgaaagaaaucaaagacatcatctugacaga

SEQ ID NO: 33356 - DNA, 26 bp, Artificial Sequence
  Synthetic
ttcccctugaatatgaacttuggaaa

SEQ ID NO: 33357 - DNA, 28 bp, Artificial Sequence
  Synthetic
ctcaccctccauggtttactatuaaaca

SEQ ID NO: 33358 - DNA, 29 bp, Artificial Sequence
  Synthetic
tgtgtgtgaauacagaaagaatatgcugt

SEQ ID NO: 33359 - DNA, 28 bp, Artificial Sequence
  Synthetic
tccaagatacgugggcttaattttagut

SEQ ID NO: 33360 - DNA, 27 bp, Artificial Sequence
  Synthetic
tgtaccttttgtuggttcaggaatcut

SEQ ID NO: 33361 - DNA, 33 bp, Artificial Sequence
  Synthetic
gaaaaataaattgatatutcagatgaggtgcut

SEQ ID NO: 33362 - DNA, 24 bp, Artificial Sequence
  Synthetic
acttaacgcugacagaatggtuga

SEQ ID NO: 33363 - DNA, 30 bp, Artificial Sequence
  Synthetic
agagacatttttctugttgaaattccgtut

SEQ ID NO: 33364 - DNA, 27 bp, Artificial Sequence
  Synthetic
ctggatagaaguttgaagcaggcuaat

SEQ ID NO: 33365 - DNA, 32 bp, Artificial Sequence
  Synthetic
atccacatgcuaacatatacatatacuaacac

SEQ ID NO: 33366 - DNA, 20 bp, Artificial Sequence
  Synthetic
tgtaccugctggagguggaa

SEQ ID NO: 33367 - DNA, 30 bp, Artificial Sequence
  Synthetic
atcgtgtttagugtttgtccatctuagaat

SEQ ID NO: 33368 - DNA, 26 bp, Artificial Sequence
  Synthetic
aggtgacttautagacaagggugagt

SEQ ID NO: 33369 - DNA, 29 bp, Artificial Sequence
  Synthetic
gtgatgaatgttuactggtgattgttuct

SEQ ID NO: 33370 - DNA, 29 bp, Artificial Sequence
  Synthetic
tgaaaugtgaaaatcaugaagcagaacag

SEQ ID NO: 33371 - DNA, 28 bp, Artificial Sequence
  Synthetic
gcttttgtcttguttctcaatcttcgut

SEQ ID NO: 33372 - DNA, 19 bp, Artificial Sequence
  Synthetic
gggaggacuttccggttug

SEQ ID NO: 33373 - DNA, 20 bp, Artificial Sequence
  Synthetic
agugccacccacaaaaggua

SEQ ID NO: 33374 - DNA, 28 bp, Artificial Sequence
  Synthetic
gatcatcugaagcctaaaatcagugaca

SEQ ID NO: 33375 - DNA, 29 bp, Artificial Sequence
  Synthetic
ttgagtttaagcgucagaagatctatcuc

SEQ ID NO: 33376 - DNA, 22 bp, Artificial Sequence
  Synthetic
catagccaucttgtggcatuga

SEQ ID NO: 33377 - DNA, 29 bp, Artificial Sequence
  Synthetic
gtgccuaagaaaattgtgguagaagaaaa

SEQ ID NO: 33378 - DNA, 25 bp, Artificial Sequence
  Synthetic
gacatcaaguggaatgcaaactugt

SEQ ID NO: 33379 - DNA, 28 bp, Artificial Sequence
  Synthetic
agtgctccaaaauacttcaagagtucat

SEQ ID NO: 33380 - DNA, 25 bp, Artificial Sequence
  Synthetic
cttccactucttcagccucaaaaac

SEQ ID NO: 33381 - DNA, 26 bp, Artificial Sequence
  Synthetic
agaaatuccggaagaagaagagtucc

SEQ ID NO: 33382 - DNA, 28 bp, Artificial Sequence
  Synthetic
caucaaaaacaaucaagacacagagaca

SEQ ID NO: 33383 - DNA, 29 bp, Artificial Sequence
  Synthetic
ttgaacattcucagctaacuaaaacacct

SEQ ID NO: 33384 - DNA, 25 bp, Artificial Sequence
  Synthetic
tcctctatgcuaggtggttcttcug

SEQ ID NO: 33385 - DNA, 21 bp, Artificial Sequence
  Synthetic
acaagcgtutcgaaggcugag

SEQ ID NO: 33386 - DNA, 24 bp, Artificial Sequence
  Synthetic
actggagaugaacaaaaggauggg

SEQ ID NO: 33387 - DNA, 26 bp, Artificial Sequence
  Synthetic
aggaagttccucccgaagaagaauat

SEQ ID NO: 33388 - DNA, 26 bp, Artificial Sequence
  Synthetic
agaacttccucttcctcagguagaac

SEQ ID NO: 33389 - DNA, 28 bp, Artificial Sequence
  Synthetic
cctttcataagcutcttcattgttguga

SEQ ID NO: 33390 - DNA, 24 bp, Artificial Sequence
  Synthetic
tgcaacatugcaagttcatguacc

SEQ ID NO: 33391 - DNA, 21 bp, Artificial Sequence
  Synthetic
ggccttacautgccagcctua

SEQ ID NO: 33392 - DNA, 23 bp, Artificial Sequence
  Synthetic
gugacacauacacaaggtttuga

SEQ ID NO: 33393 - DNA, 29 bp, Artificial Sequence
  Synthetic
ttctttcctgcaaaauttccaacattcut

SEQ ID NO: 33394 - DNA, 26 bp, Artificial Sequence
  Synthetic
ttcccacaaaagaaguttucacacac

SEQ ID NO: 33395 - DNA, 25 bp, Artificial Sequence
  Synthetic
tgggtggccutttactgacaauaaa

SEQ ID NO: 33396 - DNA, 24 bp, Artificial Sequence
  Synthetic
acucagcaaaaauacagaccauca

SEQ ID NO: 33397 - DNA, 28 bp, Artificial Sequence
  Synthetic
ctagcctugagaaacctgtttcaattut

SEQ ID NO: 33398 - DNA, 25 bp, Artificial Sequence
  Synthetic
tgagtgtgcacauatttagtguggt

SEQ ID NO: 33399 - DNA, 28 bp, Artificial Sequence
  Synthetic
gcttatacccuagaagaagaagctgtut

SEQ ID NO: 33400 - DNA, 29 bp, Artificial Sequence
  Synthetic
agtataggagucagattgggaacuagaag

SEQ ID NO: 33401 - DNA, 28 bp, Artificial Sequence
  Synthetic
acacacatttucagaatcttgcaatuca

SEQ ID NO: 33402 - DNA, 23 bp, Artificial Sequence
  Synthetic
cagcccccauaaccagtgtatut

SEQ ID NO: 33403 - DNA, 30 bp, Artificial Sequence
  Synthetic
cgtccactttgatauaactccctaatccua

SEQ ID NO: 33404 - DNA, 27 bp, Artificial Sequence
  Synthetic
ggcacacttatuttctggttaatgtut

SEQ ID NO: 33405 - DNA, 29 bp, Artificial Sequence
  Synthetic
acctaatcttuctaaagttccugaagcac

SEQ ID NO: 33406 - DNA, 29 bp, Artificial Sequence
  Synthetic
ggtctguagacaatttgugaaagaaaaca

SEQ ID NO: 33407 - DNA, 28 bp, Artificial Sequence
  Synthetic
cagcaggctgaauttaaatgaaacctua

SEQ ID NO: 33408 - DNA, 28 bp, Artificial Sequence
  Synthetic
cagaccagauggaaaaagcaagaattua

SEQ ID NO: 33409 - DNA, 24 bp, Artificial Sequence
  Synthetic
actgggctucaatgagatcacaut

SEQ ID NO: 33410 - DNA, 26 bp, Artificial Sequence
  Synthetic
gacatgcaautaaagaggctugaagg

SEQ ID NO: 33411 - DNA, 24 bp, Artificial Sequence
  Synthetic
tccacccguctgctttctuaaaaa

SEQ ID NO: 33412 - DNA, 28 bp, Artificial Sequence
  Synthetic
agacaaaggcagcauagtacataugaag

SEQ ID NO: 33413 - DNA, 30 bp, Artificial Sequence
  Synthetic
tctcagaaggtgacuagaatattccacaut

SEQ ID NO: 33414 - DNA, 28 bp, Artificial Sequence
  Synthetic
tcgtttcagatutgtgagttactuagca

SEQ ID NO: 33415 - DNA, 29 bp, Artificial Sequence
  Synthetic
gtacctgaagttucaaagaagattgtucc

SEQ ID NO: 33416 - DNA, 22 bp, Artificial Sequence
  Synthetic
gtgcctatuggattgaacugct

SEQ ID NO: 33417 - DNA, 29 bp, Artificial Sequence
  Synthetic
agcatcccttcutattcctgtgttttuat

SEQ ID NO: 33418 - DNA, 22 bp, Artificial Sequence
  Synthetic
tccccttcgucatagccttcut

SEQ ID NO: 33419 - DNA, 26 bp, Artificial Sequence
  Synthetic
cacaaggagaagagagucttcatuga

SEQ ID NO: 33420 - DNA, 29 bp, Artificial Sequence
  Synthetic
agaatagtuagcagaagtgcaaatcucag

SEQ ID NO: 33421 - DNA, 28 bp, Artificial Sequence
  Synthetic
caaacaactaacaaugatgtggaggaut

SEQ ID NO: 33422 - DNA, 22 bp, Artificial Sequence
  Synthetic
tcutgaccacuagagggccaat

SEQ ID NO: 33423 - DNA, 21 bp, Artificial Sequence
  Synthetic
tcctgtggtugctcctccuat

SEQ ID NO: 33424 - DNA, 20 bp, Artificial Sequence
  Synthetic
tgcagtttggucgctgguat

SEQ ID NO: 33425 - DNA, 29 bp, Artificial Sequence
  Synthetic
ctctatgcttatuacatgtcccttuccag

SEQ ID NO: 33426 - DNA, 26 bp, Artificial Sequence
  Synthetic
agaatggtatagguaggctacgtgut

SEQ ID NO: 33427 - DNA, 30 bp, Artificial Sequence
  Synthetic
gcaacataucagaaaacaaaagttggauga

SEQ ID NO: 33428 - DNA, 21 bp, Artificial Sequence
  Synthetic
cggccatcautcctgaagtug

SEQ ID NO: 33429 - DNA, 30 bp, Artificial Sequence
  Synthetic
aatctaacttugaaccctctttgtactuaa

SEQ ID NO: 33430 - DNA, 22 bp, Artificial Sequence
  Synthetic
ctggtcttcugctcgaacauct

SEQ ID NO: 33431 - DNA, 26 bp, Artificial Sequence
  Synthetic
aaaatgcgtgutgtatcacaugaaca

SEQ ID NO: 33432 - DNA, 28 bp, Artificial Sequence
  Synthetic
cggtcaccaucaatgcttatttcaaaut

SEQ ID NO: 33433 - DNA, 31 bp, Artificial Sequence
  Synthetic
agggaaggaguaacaaatgtgttttaatuct

SEQ ID NO: 33434 - DNA, 28 bp, Artificial Sequence
  Synthetic
tgacgtcatauaactataggattcuggt

SEQ ID NO: 33435 - DNA, 23 bp, Artificial Sequence
  Synthetic
cactgactuccgaggtcttctuc

SEQ ID NO: 33436 - DNA, 21 bp, Artificial Sequence
  Synthetic
gtggaugcggaacccactuat

SEQ ID NO: 33437 - DNA, 27 bp, Artificial Sequence
  Synthetic
acaaaaactgautctgggttauaccga

SEQ ID NO: 33438 - DNA, 24 bp, Artificial Sequence
  Synthetic
agtgcacttacuttctacgacuct

SEQ ID NO: 33439 - DNA, 28 bp, Artificial Sequence
  Synthetic
caacctccuaaggcttatttuacaaagg

SEQ ID NO: 33440 - DNA, 22 bp, Artificial Sequence
  Synthetic
actagcaaagcugaagcugcat

SEQ ID NO: 33441 - DNA, 30 bp, Artificial Sequence
  Synthetic
gcctttatgttccucatgaaaataccttut

SEQ ID NO: 33442 - DNA, 23 bp, Artificial Sequence
  Synthetic
gcatcatuggacactttgcaugt

SEQ ID NO: 33443 - DNA, 23 bp, Artificial Sequence
  Synthetic
ctttcaaactugagggacgtgug

SEQ ID NO: 33444 - DNA, 24 bp, Artificial Sequence
  Synthetic
tcauaaaaacgacacctucaggct

SEQ ID NO: 33445 - DNA, 22 bp, Artificial Sequence
  Synthetic
gaaguggcggaaaguaccagat

SEQ ID NO: 33446 - DNA, 24 bp, Artificial Sequence
  Synthetic
tctggaccaugtcagtttacugaa

SEQ ID NO: 33447 - DNA, 29 bp, Artificial Sequence
  Synthetic
catttttagacaauacagccacacucaat

SEQ ID NO: 33448 - DNA, 24 bp, Artificial Sequence
  Synthetic
aggccuccccagacattttaaauc

SEQ ID NO: 33449 - DNA, 24 bp, Artificial Sequence
  Synthetic
acccacuacgacttacaaaaugca

SEQ ID NO: 33450 - DNA, 23 bp, Artificial Sequence
  Synthetic
ggttcugcagccaagagagauaa

SEQ ID NO: 33451 - DNA, 25 bp, Artificial Sequence
  Synthetic
tgcaggacaauacaactgctacaut

SEQ ID NO: 33452 - DNA, 25 bp, Artificial Sequence
  Synthetic
ccatttttcutccagguaaccgaaa

SEQ ID NO: 33453 - DNA, 29 bp, Artificial Sequence
  Synthetic
tgtcagactgcucttctagatttauacga

SEQ ID NO: 33454 - DNA, 22 bp, Artificial Sequence
  Synthetic
ctccaaagacacgutgcatcug

SEQ ID NO: 33455 - DNA, 31 bp, Artificial Sequence
  Synthetic
aaccttttctgataugtgcttttgtgttuag

SEQ ID NO: 33456 - DNA, 24 bp, Artificial Sequence
  Synthetic
auttccttcauggaaccaggagac

SEQ ID NO: 33457 - DNA, 28 bp, Artificial Sequence
  Synthetic
tccatcaaaaagacagutctctctucaa

SEQ ID NO: 33458 - DNA, 30 bp, Artificial Sequence
  Synthetic
gtatttgttgtcacutgttagctctttucc

SEQ ID NO: 33459 - DNA, 28 bp, Artificial Sequence
  Synthetic
cacactcaccaggauctgtattttctut

SEQ ID NO: 33460 - DNA, 30 bp, Artificial Sequence
  Synthetic
aaatccatatgtugtcactttctcuaacga

SEQ ID NO: 33461 - DNA, 24 bp, Artificial Sequence
  Synthetic
ccaggcttucctcctttttcauca

SEQ ID NO: 33462 - DNA, 25 bp, Artificial Sequence
  Synthetic
aggatguggatactggtuaggaagt

SEQ ID NO: 33463 - DNA, 29 bp, Artificial Sequence
  Synthetic
acttacagaatacauccgtattttcctut

SEQ ID NO: 33464 - DNA, 24 bp, Artificial Sequence
  Synthetic
accgagucaacgaatgacattcug

SEQ ID NO: 33465 - DNA, 26 bp, Artificial Sequence
  Synthetic
ctgtgtttttccucttggttccauag

SEQ ID NO: 33466 - DNA, 25 bp, Artificial Sequence
  Synthetic
gagaactgucagagtggcagtatut

SEQ ID NO: 33467 - DNA, 27 bp, Artificial Sequence
  Synthetic
caccatgttggucttcattctttucag

SEQ ID NO: 33468 - DNA, 31 bp, Artificial Sequence
  Synthetic
tctgcaaatuagcatcatcttucaaaagaac

SEQ ID NO: 33469 - DNA, 26 bp, Artificial Sequence
  Synthetic
gtggatgcctuctcacctgtaaauaa

SEQ ID NO: 33470 - DNA, 27 bp, Artificial Sequence
  Synthetic
aggaagcaacgutatttttgaatugca

SEQ ID NO: 33471 - DNA, 26 bp, Artificial Sequence
  Synthetic
gctgactaccaucctttgtaccauag

SEQ ID NO: 33472 - DNA, 28 bp, Artificial Sequence
  Synthetic
gctctcaagaauttccagtatgguagat

SEQ ID NO: 33473 - DNA, 30 bp, Artificial Sequence
  Synthetic
caagaattttacccacaugttttctcctua

SEQ ID NO: 33474 - DNA, 22 bp, Artificial Sequence
  Synthetic
tctaatggcugcaccucaaaca

SEQ ID NO: 33475 - DNA, 23 bp, Artificial Sequence
  Synthetic
cccttccgccutgcaatatcuag

SEQ ID NO: 33476 - DNA, 26 bp, Artificial Sequence
  Synthetic
ctccaacaagcucagattcaaaguac

SEQ ID NO: 33477 - DNA, 23 bp, Artificial Sequence
  Synthetic
gcaaaactacccutccccacaua

SEQ ID NO: 33478 - DNA, 28 bp, Artificial Sequence
  Synthetic
atgaatgtaatgugatgtttgctgtcug

SEQ ID NO: 33479 - DNA, 29 bp, Artificial Sequence
  Synthetic
cactcttgagttugaaaggttactttgut

SEQ ID NO: 33480 - DNA, 28 bp, Artificial Sequence
  Synthetic
gaaatcctggtautttcactctctcuga

SEQ ID NO: 33481 - DNA, 25 bp, Artificial Sequence
  Synthetic
gtgtggccaugattctcacatttut

SEQ ID NO: 33482 - DNA, 28 bp, Artificial Sequence
  Synthetic
tcattagtagcuttgcagtgatatuccc

SEQ ID NO: 33483 - DNA, 23 bp, Artificial Sequence
  Synthetic
gccttctccaguaggagctctua

SEQ ID NO: 33484 - DNA, 24 bp, Artificial Sequence
  Synthetic
cuaagagcccaaaucagaggagaa

SEQ ID NO: 33485 - DNA, 30 bp, Artificial Sequence
  Synthetic
tgaaagttggaaauacaacatgtcatucat

SEQ ID NO: 33486 - DNA, 31 bp, Artificial Sequence
  Synthetic
gtaaggaacaaauattgtcaaaagtcaugga

SEQ ID NO: 33487 - DNA, 28 bp, Artificial Sequence
  Synthetic
ctggaggaaacuatacaatcacatgugt

SEQ ID NO: 33488 - DNA, 25 bp, Artificial Sequence
  Synthetic
ccacagttugcaaagaaaaagagug

SEQ ID NO: 33489 - DNA, 21 bp, Artificial Sequence
  Synthetic
cccatccaagugtgctgguat

SEQ ID NO: 33490 - DNA, 31 bp, Artificial Sequence
  Synthetic
cttaaggtgttaggagaugaaatgagaagut

SEQ ID NO: 33491 - DNA, 26 bp, Artificial Sequence
  Synthetic
aacatcaaugacagtggagaguacac

SEQ ID NO: 33492 - DNA, 26 bp, Artificial Sequence
  Synthetic
ggccgtaattuggtatctcctttgua

SEQ ID NO: 33493 - DNA, 31 bp, Artificial Sequence
  Synthetic
tcatttgcattctuctaacatgtagcauagt

SEQ ID NO: 33494 - DNA, 23 bp, Artificial Sequence
  Synthetic
acatcccttccugcctcatttuc

SEQ ID NO: 33495 - DNA, 26 bp, Artificial Sequence
  Synthetic
acctacacuggaacacttccaattuc

SEQ ID NO: 33496 - DNA, 29 bp, Artificial Sequence
  Synthetic
cagtuaaacacaagaaaaauacaaggaug

SEQ ID NO: 33497 - DNA, 24 bp, Artificial Sequence
  Synthetic
ggagaccggugcaacatctattut

SEQ ID NO: 33498 - DNA, 25 bp, Artificial Sequence
  Synthetic
tgtcaacatagaugtgcaccugaag

SEQ ID NO: 33499 - DNA, 30 bp, Artificial Sequence
  Synthetic
gcaaaguaccaaaccauattttcagauaat

SEQ ID NO: 33500 - DNA, 28 bp, Artificial Sequence
  Synthetic
ttgtaaaaggaauttgcauaagcaacca

SEQ ID NO: 33501 - DNA, 22 bp, Artificial Sequence
  Synthetic
caaggauggaaagctgtugacc

SEQ ID NO: 33502 - DNA, 22 bp, Artificial Sequence
  Synthetic
cagcattuggcaccagtttcua

SEQ ID NO: 33503 - DNA, 25 bp, Artificial Sequence
  Synthetic
guccagtggctuaaagagaaggaag

SEQ ID NO: 33504 - DNA, 21 bp, Artificial Sequence
  Synthetic
gtccagatcaugcgagaguga

SEQ ID NO: 33505 - DNA, 30 bp, Artificial Sequence
  Synthetic
gcaagaaauacaagattgcauccaaaaact

SEQ ID NO: 33506 - DNA, 27 bp, Artificial Sequence
  Synthetic
gggagaagguggttttcatttaaugag

SEQ ID NO: 33507 - DNA, 28 bp, Artificial Sequence
  Synthetic
gccagtgataaguacagaatgacttuca

SEQ ID NO: 33508 - DNA, 30 bp, Artificial Sequence
  Synthetic
agacautgtaactgaauacagagaaccaaa

SEQ ID NO: 33509 - DNA, 28 bp, Artificial Sequence
  Synthetic
ggaacttgtcucaggtcctaaatgttuc

SEQ ID NO: 33510 - DNA, 30 bp, Artificial Sequence
  Synthetic
atttuagctctaaaggauacaaaggcaaga

SEQ ID NO: 33511 - DNA, 22 bp, Artificial Sequence
  Synthetic
cagacttgugtgccaugagaga

SEQ ID NO: 33512 - DNA, 24 bp, Artificial Sequence
  Synthetic
caaugcaaacagcaaaacacaucc

SEQ ID NO: 33513 - DNA, 22 bp, Artificial Sequence
  Synthetic
gacagcggucagtacacttuca

SEQ ID NO: 33514 - DNA, 24 bp, Artificial Sequence
  Synthetic
gccatttcacuttgagttctggug

SEQ ID NO: 33515 - DNA, 27 bp, Artificial Sequence
  Synthetic
gtctauagcgacagtttcatuagcaga

SEQ ID NO: 33516 - DNA, 28 bp, Artificial Sequence
  Synthetic
tgtccattauccacacttctgattugaa

SEQ ID NO: 33517 - DNA, 30 bp, Artificial Sequence
  Synthetic
tcacacuctcttatttaaucacagaaccac

SEQ ID NO: 33518 - DNA, 24 bp, Artificial Sequence
  Synthetic
tgctgcttcgaauttccctgtuat

SEQ ID NO: 33519 - DNA, 30 bp, Artificial Sequence
  Synthetic
agtaagctactgucttccttttgaatctut

SEQ ID NO: 33520 - DNA, 24 bp, Artificial Sequence
  Synthetic
ccatcaaugaaggaaatgccaugt

SEQ ID NO: 33521 - DNA, 25 bp, Artificial Sequence
  Synthetic
gttttgcccagugacctgttttuaa

SEQ ID NO: 33522 - DNA, 23 bp, Artificial Sequence
  Synthetic
gaggtgtcauccttccaaacuga

SEQ ID NO: 33523 - DNA, 23 bp, Artificial Sequence
  Synthetic
tctttcaccucagaaccccctua

SEQ ID NO: 33524 - DNA, 29 bp, Artificial Sequence
  Synthetic
ggcagtattgucatgaaaagagaattugt

SEQ ID NO: 33525 - DNA, 25 bp, Artificial Sequence
  Synthetic
ctccttcatucaccaaaaagcugaa

SEQ ID NO: 33526 - DNA, 23 bp, Artificial Sequence
  Synthetic
gggtcagttcutggccatcttua

SEQ ID NO: 33527 - DNA, 25 bp, Artificial Sequence
  Synthetic
ggtaaugcacaacccacatctaucc

SEQ ID NO: 33528 - DNA, 24 bp, Artificial Sequence
  Synthetic
tcttcagtgauttcatcgctguct

SEQ ID NO: 33529 - DNA, 28 bp, Artificial Sequence
  Synthetic
ctggcttttcugaagagtcaattcttut

SEQ ID NO: 33530 - DNA, 24 bp, Artificial Sequence
  Synthetic
ggctaaccagaugatcctgaauga

SEQ ID NO: 33531 - DNA, 22 bp, Artificial Sequence
  Synthetic
cccctccucccttaaugcaaat

SEQ ID NO: 33532 - DNA, 27 bp, Artificial Sequence
  Synthetic
cagtagacuccacaaaagacattcugt

SEQ ID NO: 33533 - DNA, 31 bp, Artificial Sequence
  Synthetic
ctcacatttcttaauaacttccttcctucca

SEQ ID NO: 33534 - DNA, 27 bp, Artificial Sequence
  Synthetic
agcttctttgguaatatagcagctucc

SEQ ID NO: 33535 - DNA, 28 bp, Artificial Sequence
  Synthetic
tcccttagaucaaccctcttaactctut

SEQ ID NO: 33536 - DNA, 22 bp, Artificial Sequence
  Synthetic
gtgcctuccacaaatgctaucc

SEQ ID NO: 33537 - DNA, 21 bp, Artificial Sequence
  Synthetic
cucccttcttgugcaacacac

SEQ ID NO: 33538 - DNA, 28 bp, Artificial Sequence
  Synthetic
agctgggcaacautgtttttaaaactua

SEQ ID NO: 33539 - DNA, 25 bp, Artificial Sequence
  Synthetic
cctaacaagcauttagggtgcuaac

SEQ ID NO: 33540 - DNA, 24 bp, Artificial Sequence
  Synthetic
gcaacaccatuggaaaagctcaut

SEQ ID NO: 33541 - DNA, 30 bp, Artificial Sequence
  Synthetic
gtgttgaaagtgtutgggaattgatatgut

SEQ ID NO: 33542 - DNA, 22 bp, Artificial Sequence
  Synthetic
gccacactugccgacttcatua

SEQ ID NO: 33543 - DNA, 22 bp, Artificial Sequence
  Synthetic
cttcagugtgaagtcucaggca

SEQ ID NO: 33544 - DNA, 25 bp, Artificial Sequence
  Synthetic
ctacaaaagcaugaaagcattgugt

SEQ ID NO: 33545 - DNA, 28 bp, Artificial Sequence
  Synthetic
gtaaaagtugaagacagtgggagtuact

SEQ ID NO: 33546 - DNA, 26 bp, Artificial Sequence
  Synthetic
agtttttctacugaggattcctugca

SEQ ID NO: 33547 - DNA, 27 bp, Artificial Sequence
  Synthetic
ccccagggaaagautataagatctgut

SEQ ID NO: 33548 - DNA, 29 bp, Artificial Sequence
  Synthetic
ggctctaattcttuaatgaaatgtggcut

SEQ ID NO: 33549 - DNA, 26 bp, Artificial Sequence
  Synthetic
gggactcctgugatagaaaccattug

SEQ ID NO: 33550 - DNA, 25 bp, Artificial Sequence
  Synthetic
ccagttgguaatacaagcattuccc

SEQ ID NO: 33551 - DNA, 27 bp, Artificial Sequence
  Synthetic
tcgatctucaaagtatatcuccagcct

SEQ ID NO: 33552 - DNA, 23 bp, Artificial Sequence
  Synthetic
tctggaaguggcagataagugaa

SEQ ID NO: 33553 - DNA, 27 bp, Artificial Sequence
  Synthetic
tcgacaaagtaaauaccgaagaccauc

SEQ ID NO: 33554 - DNA, 26 bp, Artificial Sequence
  Synthetic
ttcctcagaaacagugtccacuaaag

SEQ ID NO: 33555 - DNA, 26 bp, Artificial Sequence
  Synthetic
ggttaaatatttggaugccacaccug

SEQ ID NO: 33556 - DNA, 22 bp, Artificial Sequence
  Synthetic
acttgtttuggctccttgcuga

SEQ ID NO: 33557 - DNA, 22 bp, Artificial Sequence
  Synthetic
ggtcgaggcugtaaacaucacc

SEQ ID NO: 33558 - DNA, 24 bp, Artificial Sequence
  Synthetic
ccttagaaagaagguccctuccct

SEQ ID NO: 33559 - DNA, 22 bp, Artificial Sequence
  Synthetic
acuggaaaaugcagggcaagat

SEQ ID NO: 33560 - DNA, 21 bp, Artificial Sequence
  Synthetic
gtcccucagctaagctcugac

SEQ ID NO: 33561 - DNA, 29 bp, Artificial Sequence
  Synthetic
aactttattagcugaacctgaagggaaut

SEQ ID NO: 33562 - DNA, 24 bp, Artificial Sequence
  Synthetic
ctttggagaaggutttcugggact

SEQ ID NO: 33563 - DNA, 28 bp, Artificial Sequence
  Synthetic
agaaaaccagcaacuatcttaugagcat

SEQ ID NO: 33564 - DNA, 22 bp, Artificial Sequence
  Synthetic
tggaaaatccucaggagccuct

SEQ ID NO: 33565 - DNA, 28 bp, Artificial Sequence
  Synthetic
ctttgcaccagugtttattacactauca

SEQ ID NO: 33566 - DNA, 21 bp, Artificial Sequence
  Synthetic
ccucccagctttuccagagat

SEQ ID NO: 33567 - DNA, 29 bp, Artificial Sequence
  Synthetic
ctattaacccctuctgctgactacaaaut

SEQ ID NO: 33568 - DNA, 24 bp, Artificial Sequence
  Synthetic
gtgccttccutttcggaaucaaat

SEQ ID NO: 33569 - DNA, 26 bp, Artificial Sequence
  Synthetic
gccatcaacuggtgtctaattcttug

SEQ ID NO: 33570 - DNA, 28 bp, Artificial Sequence
  Synthetic
attttaagtuaaggtgagtgcugcaaag

SEQ ID NO: 33571 - DNA, 30 bp, Artificial Sequence
  Synthetic
caaagauggaaaattaguccaaggaagaag

SEQ ID NO: 33572 - DNA, 24 bp, Artificial Sequence
  Synthetic
ccttccaccaccugaaatucaaaa

SEQ ID NO: 33573 - DNA, 22 bp, Artificial Sequence
  Synthetic
agtgcaacauacaggugcagag

SEQ ID NO: 33574 - DNA, 26 bp, Artificial Sequence
  Synthetic
gggatccctaugactgaacattugaa

SEQ ID NO: 33575 - DNA, 27 bp, Artificial Sequence
  Synthetic
gttcccgaattuactcctgaccauaaa

SEQ ID NO: 33576 - DNA, 26 bp, Artificial Sequence
  Synthetic
gacaatttctugaggagaaggtgtuc

SEQ ID NO: 33577 - DNA, 28 bp, Artificial Sequence
  Synthetic
agagtacatgtgucatgctgtaaacauc

SEQ ID NO: 33578 - DNA, 26 bp, Artificial Sequence
  Synthetic
auttcgataccattucacaccaggaa

SEQ ID NO: 33579 - DNA, 27 bp, Artificial Sequence
  Synthetic
caaatgagcatutctacacaccuacag

SEQ ID NO: 33580 - DNA, 24 bp, Artificial Sequence
  Synthetic
gggtgtggaauatcgctcuagagt

SEQ ID NO: 33581 - DNA, 27 bp, Artificial Sequence
  Synthetic
gttgctgaaagauattcaacacctucc

SEQ ID NO: 33582 - DNA, 28 bp, Artificial Sequence
  Synthetic
gggacttuggagattcaaaatatucaac

SEQ ID NO: 33583 - DNA, 29 bp, Artificial Sequence
  Synthetic
tggaagaagtaacuttcaacactgtguat

SEQ ID NO: 33584 - DNA, 24 bp, Artificial Sequence
  Synthetic
acgcttuccagcagcaagtaaaua

SEQ ID NO: 33585 - DNA, 31 bp, Artificial Sequence
  Synthetic
agaatccaggugaacaaataaguacaaacat

SEQ ID NO: 33586 - DNA, 25 bp, Artificial Sequence
  Synthetic
gtggcatctguatattcctgtgucc

SEQ ID NO: 33587 - DNA, 22 bp, Artificial Sequence
  Synthetic
gtgccctacutccaacctcauc

SEQ ID NO: 33588 - DNA, 29 bp, Artificial Sequence
  Synthetic
ctgtacatgucggacttctttttcuaaag

SEQ ID NO: 33589 - DNA, 27 bp, Artificial Sequence
  Synthetic
aaacuagggaacaguaggaaatacaut

SEQ ID NO: 33590 - DNA, 29 bp, Artificial Sequence
  Synthetic
ctggttgaccacuatctaattctuggaat

SEQ ID NO: 33591 - DNA, 26 bp, Artificial Sequence
  Synthetic
agctgctttccuctcaaactcauaaa

SEQ ID NO: 33592 - DNA, 30 bp, Artificial Sequence
  Synthetic
gcttgatcttgautctctttgctttaauga

SEQ ID NO: 33593 - DNA, 27 bp, Artificial Sequence
  Synthetic
gccattgtataugaagaatccctuggt

SEQ ID NO: 33594 - DNA, 25 bp, Artificial Sequence
  Synthetic
cactttgggcacautcttgtacaut

SEQ ID NO: 33595 - DNA, 27 bp, Artificial Sequence
  Synthetic
ttcaagaaccauaaaaaucagcaagcc

SEQ ID NO: 33596 - DNA, 28 bp, Artificial Sequence
  Synthetic
gtctcaaggcttugaaaatagtccctua

SEQ ID NO: 33597 - DNA, 27 bp, Artificial Sequence
  Synthetic
ggcagttgaaagugtttcagatcuaac

SEQ ID NO: 33598 - DNA, 25 bp, Artificial Sequence
  Synthetic
tggttctgcuttaaaaggacuccat

SEQ ID NO: 33599 - DNA, 25 bp, Artificial Sequence
  Synthetic
gaacctaaagcaaugcctcaagauc

SEQ ID NO: 33600 - DNA, 28 bp, Artificial Sequence
  Synthetic
ggaactggugggttagttttuaacaaat

SEQ ID NO: 33601 - DNA, 29 bp, Artificial Sequence
  Synthetic
tggaacaguaaaaacaaccagtatgctua

SEQ ID NO: 33602 - DNA, 23 bp, Artificial Sequence
  Synthetic
gtgggatuggcatgtcattgtua

SEQ ID NO: 33603 - DNA, 28 bp, Artificial Sequence
  Synthetic
tctctgcttcuacacgaattgatgaaut

SEQ ID NO: 33604 - DNA, 28 bp, Artificial Sequence
  Synthetic
tgtggtgtaatagcutgagacacattut

SEQ ID NO: 33605 - DNA, 27 bp, Artificial Sequence
  Synthetic
tccagacugaaataagaaugagccaag

SEQ ID NO: 33606 - DNA, 31 bp, Artificial Sequence
  Synthetic
actctcagctgaaugatctaccttataacut

SEQ ID NO: 33607 - DNA, 22 bp, Artificial Sequence
  Synthetic
ccuggacaaggagaucaaagug

SEQ ID NO: 33608 - DNA, 28 bp, Artificial Sequence
  Synthetic
cattcccttttgutccacatcttgttut

SEQ ID NO: 33609 - DNA, 30 bp, Artificial Sequence
  Synthetic
tgttatucaaaaagggcaagaugagaaaua

SEQ ID NO: 33610 - DNA, 28 bp, Artificial Sequence
  Synthetic
gaatctctgtctuggacccttttaauct

SEQ ID NO: 33611 - DNA, 28 bp, Artificial Sequence
  Synthetic
agccttctttuacccagaaacttacaut

SEQ ID NO: 33612 - DNA, 22 bp, Artificial Sequence
  Synthetic
aagctgcauaaagcgaugagga

SEQ ID NO: 33613 - DNA, 24 bp, Artificial Sequence
  Synthetic
cacgaaggugcaaagauagaggaa

SEQ ID NO: 33614 - DNA, 23 bp, Artificial Sequence
  Synthetic
ccgtggacuctttagcacatucc

SEQ ID NO: 33615 - DNA, 23 bp, Artificial Sequence
  Synthetic
agtggcagautcctcttucacaa

SEQ ID NO: 33616 - DNA, 26 bp, Artificial Sequence
  Synthetic
cacaguatgcaauaaaacaaacagca

SEQ ID NO: 33617 - DNA, 27 bp, Artificial Sequence
  Synthetic
gcttatagtugatgcttacucagagca

SEQ ID NO: 33618 - DNA, 24 bp, Artificial Sequence
  Synthetic
ccattggauttctggctugggaat

SEQ ID NO: 33619 - DNA, 30 bp, Artificial Sequence
  Synthetic
gcaaggtaagacautaaaaattggtaugct

SEQ ID NO: 33620 - DNA, 23 bp, Artificial Sequence
  Synthetic
cttggccuacagcattacuagca

SEQ ID NO: 33621 - DNA, 28 bp, Artificial Sequence
  Synthetic
tgaagtatctcutttcttttgtgucgca

SEQ ID NO: 33622 - DNA, 25 bp, Artificial Sequence
  Synthetic
ggaaaggacaaaagccugcttctua

SEQ ID NO: 33623 - DNA, 27 bp, Artificial Sequence
  Synthetic
ttcaagtgcaaauttcttcatgauggg

SEQ ID NO: 33624 - DNA, 27 bp, Artificial Sequence
  Synthetic
ggaggattauttctgatggauccacaa

SEQ ID NO: 33625 - DNA, 29 bp, Artificial Sequence
  Synthetic
acgacacaaauatgtaguggaaagaagaa

SEQ ID NO: 33626 - DNA, 27 bp, Artificial Sequence
  Synthetic
ggatggtggutagaaaatguaaaaggg

SEQ ID NO: 33627 - DNA, 24 bp, Artificial Sequence
  Synthetic
cgtgtcaacugcaaaactcttugt

SEQ ID NO: 33628 - DNA, 25 bp, Artificial Sequence
  Synthetic
gtttaccguatggtgatucagagga

SEQ ID NO: 33629 - DNA, 26 bp, Artificial Sequence
  Synthetic
tttctacatgcuattttccagcucgt

SEQ ID NO: 33630 - DNA, 30 bp, Artificial Sequence
  Synthetic
gatttgattuccacaccattcttuaaccat

SEQ ID NO: 33631 - DNA, 26 bp, Artificial Sequence
  Synthetic
ttacgtaaagtcuccttgggtgttut

SEQ ID NO: 33632 - DNA, 23 bp, Artificial Sequence
  Synthetic
ttggtcatugccacagacaaaug

SEQ ID NO: 33633 - DNA, 24 bp, Artificial Sequence
  Synthetic
caaaactgccucttttgagtguga

SEQ ID NO: 33634 - DNA, 23 bp, Artificial Sequence
  Synthetic
gggttcatuaaggaaagggcugt

SEQ ID NO: 33635 - DNA, 25 bp, Artificial Sequence
  Synthetic
acaaacacagacuggtcucagaaag

SEQ ID NO: 33636 - DNA, 26 bp, Artificial Sequence
  Synthetic
ggagcaatucagtgatagggtuaact

SEQ ID NO: 33637 - DNA, 22 bp, Artificial Sequence
  Synthetic
ggagttgtgcuggaatccaaug

SEQ ID NO: 33638 - DNA, 28 bp, Artificial Sequence
  Synthetic
tttatggtauccaaaatggccataucgt

SEQ ID NO: 33639 - DNA, 25 bp, Artificial Sequence
  Synthetic
atggccauaaaaggagacutaucat

SEQ ID NO: 33640 - DNA, 29 bp, Artificial Sequence
  Synthetic
ggttaataaauataccaaccugccacagt

SEQ ID NO: 33641 - DNA, 28 bp, Artificial Sequence
  Synthetic
ggaattgatgucctgtggaatttuaagg

SEQ ID NO: 33642 - DNA, 28 bp, Artificial Sequence
  Synthetic
tctcttggtuattgttacacugggaaag

SEQ ID NO: 33643 - DNA, 25 bp, Artificial Sequence
  Synthetic
gtacaggccautgtgaaaggtacua

SEQ ID NO: 33644 - DNA, 27 bp, Artificial Sequence
  Synthetic
acacacacaagaugaatgaattttgut

SEQ ID NO: 33645 - DNA, 27 bp, Artificial Sequence
  Synthetic
gacatgacuaaggaagatgcuggaaat

SEQ ID NO: 33646 - DNA, 22 bp, Artificial Sequence
  Synthetic
cgtctttcauccagacgcctuc

SEQ ID NO: 33647 - DNA, 27 bp, Artificial Sequence
  Synthetic
ctgcagtgagcaucattatggtttaut

SEQ ID NO: 33648 - DNA, 23 bp, Artificial Sequence
  Synthetic
acgtccacgacgagaugtaatug

SEQ ID NO: 33649 - DNA, 29 bp, Artificial Sequence
  Synthetic
ctaagtctagaugcatacctcuccaaaaa

SEQ ID NO: 33650 - DNA, 25 bp, Artificial Sequence
  Synthetic
tcaauggtcagtauggagaggaagt

SEQ ID NO: 33651 - DNA, 26 bp, Artificial Sequence
  Synthetic
ctttttcccccaccuttttcttguag

SEQ ID NO: 33652 - DNA, 20 bp, Artificial Sequence
  Synthetic
tcttcgggccaguaccagua

SEQ ID NO: 33653 - DNA, 28 bp, Artificial Sequence
  Synthetic
aaggcaaaaucacgattccaactttuaa

SEQ ID NO: 33654 - DNA, 25 bp, Artificial Sequence
  Synthetic
ggtaatggctucataatagcccuct

SEQ ID NO: 33655 - DNA, 22 bp, Artificial Sequence
  Synthetic
aaggccugagtttcacguacat

SEQ ID NO: 33656 - DNA, 22 bp, Artificial Sequence
  Synthetic
tccacgatguccaggtaaugga

SEQ ID NO: 33657 - DNA, 24 bp, Artificial Sequence
  Synthetic
aggtgcacutacaggtguaacaac

SEQ ID NO: 33658 - DNA, 26 bp, Artificial Sequence
  Synthetic
ccatatttgtuagtggctcugcaagt

SEQ ID NO: 33659 - DNA, 24 bp, Artificial Sequence
  Synthetic
tccttaagacutaagcgcttuggg

SEQ ID NO: 33660 - DNA, 22 bp, Artificial Sequence
  Synthetic
tctatatgucccccgtgggaug

SEQ ID NO: 33661 - DNA, 27 bp, Artificial Sequence
  Synthetic
attgattattcccucccccaactttut

SEQ ID NO: 33662 - DNA, 24 bp, Artificial Sequence
  Synthetic
tcaaccatacaaugtcagggtugg

SEQ ID NO: 33663 - DNA, 26 bp, Artificial Sequence
  Synthetic
caggtatttcagccutactccctcua

SEQ ID NO: 33664 - DNA, 28 bp, Artificial Sequence
  Synthetic
ggcagggacaauaattagtgattgagua

SEQ ID NO: 33665 - DNA, 29 bp, Artificial Sequence
  Synthetic
tgcucatgaatcauaaaaacacaaaaaca

SEQ ID NO: 33666 - DNA, 28 bp, Artificial Sequence
  Synthetic
gaaacaggtttuaacacaaagactggut

SEQ ID NO: 33667 - DNA, 24 bp, Artificial Sequence
  Synthetic
gcctcacgaaaguattgtgtguct

SEQ ID NO: 33668 - DNA, 23 bp, Artificial Sequence
  Synthetic
ggaatgtaagucggagcuccaag

SEQ ID NO: 33669 - DNA, 22 bp, Artificial Sequence
  Synthetic
caagcgcaucaaacauggagaa

SEQ ID NO: 33670 - DNA, 27 bp, Artificial Sequence
  Synthetic
ccaatttguatctttactguggcaagg

SEQ ID NO: 33671 - DNA, 25 bp, Artificial Sequence
  Synthetic
atggagaagaaaagauggcagtuga

SEQ ID NO: 33672 - DNA, 21 bp, Artificial Sequence
  Synthetic
tcuaaccccgagctcaucact

SEQ ID NO: 33673 - DNA, 29 bp, Artificial Sequence
  Synthetic
cacctggatttguatactctgagtaugaa

SEQ ID NO: 33674 - DNA, 23 bp, Artificial Sequence
  Synthetic
gcacauagaaactggagtugcac

SEQ ID NO: 33675 - DNA, 28 bp, Artificial Sequence
  Synthetic
cccacagaagagutgttgataactgaut

SEQ ID NO: 33676 - DNA, 23 bp, Artificial Sequence
  Synthetic
ccagtttcuggaccactggttut

SEQ ID NO: 33677 - DNA, 23 bp, Artificial Sequence
  Synthetic
ccagtautggcaaatugcaaccc

SEQ ID NO: 33678 - DNA, 23 bp, Artificial Sequence
  Synthetic
aagtgatggcaugtgcatuagga

SEQ ID NO: 33679 - DNA, 22 bp, Artificial Sequence
  Synthetic
gacagugacatgguacagggaa

SEQ ID NO: 33680 - DNA, 25 bp, Artificial Sequence
  Synthetic
gagaaactgauctttgcaaacgugt

SEQ ID NO: 33681 - DNA, 29 bp, Artificial Sequence
  Synthetic
tgcatgagcuaagagtttatgagattucc

SEQ ID NO: 33682 - DNA, 22 bp, Artificial Sequence
  Synthetic
aacgccagcutcactcttguaa

SEQ ID NO: 33683 - DNA, 30 bp, Artificial Sequence
  Synthetic
tgactttattttcugactctgtttccaugt

SEQ ID NO: 33684 - DNA, 24 bp, Artificial Sequence
  Synthetic
tgaggctugctttaccaugaacaa

SEQ ID NO: 33685 - DNA, 27 bp, Artificial Sequence
  Synthetic
cactttggaguacggatauaaggaacg

SEQ ID NO: 33686 - DNA, 23 bp, Artificial Sequence
  Synthetic
gggauttcacactuggaacaaca

SEQ ID NO: 33687 - DNA, 31 bp, Artificial Sequence
  Synthetic
aagccctgttcaacutaaatcttgatttuac

SEQ ID NO: 33688 - DNA, 22 bp, Artificial Sequence
  Synthetic
agtgacuttcacatuggcagga

SEQ ID NO: 33689 - DNA, 29 bp, Artificial Sequence
  Synthetic
gtcttcccatugcttttgtatctttugaa

SEQ ID NO: 33690 - DNA, 31 bp, Artificial Sequence
  Synthetic
gcttcttgagttacutgtttctgtttctuag

SEQ ID NO: 33691 - DNA, 28 bp, Artificial Sequence
  Synthetic
accatattattucattgggcaucaggaa

SEQ ID NO: 33692 - DNA, 23 bp, Artificial Sequence
  Synthetic
ctcagtggauggtggttgagtua

SEQ ID NO: 33693 - DNA, 22 bp, Artificial Sequence
  Synthetic
gttgttgcugccgttgataugg

SEQ ID NO: 33694 - DNA, 31 bp, Artificial Sequence
  Synthetic
tgaaauaaggaaaaauaaaaccattcugaca

SEQ ID NO: 33695 - DNA, 23 bp, Artificial Sequence
  Synthetic
gaggcugagaugagagagacaac

SEQ ID NO: 33696 - DNA, 24 bp, Artificial Sequence
  Synthetic
ggacaagggaauctttctcgttuc

SEQ ID NO: 33697 - DNA, 22 bp, Artificial Sequence
  Synthetic
aagucaagauccccaacaccac

SEQ ID NO: 33698 - DNA, 26 bp, Artificial Sequence
  Synthetic
aagatuaaaacaaagcccacgtugag

SEQ ID NO: 33699 - DNA, 24 bp, Artificial Sequence
  Synthetic
acattcauctttccctucccacag

SEQ ID NO: 33700 - DNA, 24 bp, Artificial Sequence
  Synthetic
gtagaggucgccttcttgugaaat

SEQ ID NO: 33701 - DNA, 27 bp, Artificial Sequence
  Synthetic
tctcactcttgacuttgttctcttguc

SEQ ID NO: 33702 - DNA, 22 bp, Artificial Sequence
  Synthetic
agatccatuggtggcttucagg

SEQ ID NO: 33703 - DNA, 27 bp, Artificial Sequence
  Synthetic
tgcccattcaaacauaaaggtgaatug

SEQ ID NO: 33704 - DNA, 24 bp, Artificial Sequence
  Synthetic
gtgccatgtucctcaagagaauct

SEQ ID NO: 33705 - DNA, 29 bp, Artificial Sequence
  Synthetic
gaagcatggaagaaaugattccaaaguaa

SEQ ID NO: 33706 - DNA, 22 bp, Artificial Sequence
  Synthetic
accaactgccugctttgauagt

SEQ ID NO: 33707 - DNA, 30 bp, Artificial Sequence
  Synthetic
cttcagaaaattgtutcccttggaatguag

SEQ ID NO: 33708 - DNA, 24 bp, Artificial Sequence
  Synthetic
ccttcttaugaggcaggatucgat

SEQ ID NO: 33709 - DNA, 27 bp, Artificial Sequence
  Synthetic
gaagtatggcucttataatugcccgaa

SEQ ID NO: 33710 - DNA, 28 bp, Artificial Sequence
  Synthetic
acagtctaaagguaatgaaagtgatugg

SEQ ID NO: 33711 - DNA, 31 bp, Artificial Sequence
  Synthetic
cgcgttatctgttutatgtctttgttttgut

SEQ ID NO: 33712 - DNA, 28 bp, Artificial Sequence
  Synthetic
aaatgatatttcacagucttctgcccua

SEQ ID NO: 33713 - DNA, 27 bp, Artificial Sequence
  Synthetic
aaaaatatcgauggatgtccccuaacc

SEQ ID NO: 33714 - DNA, 25 bp, Artificial Sequence
  Synthetic
agagggagaagggucagtttaauga

SEQ ID NO: 33715 - DNA, 29 bp, Artificial Sequence
  Synthetic
tgccttctttgcutgatttgtattttuct

SEQ ID NO: 33716 - DNA, 30 bp, Artificial Sequence
  Synthetic
ccaaatatguagctaaaactagugaaggca

SEQ ID NO: 33717 - DNA, 26 bp, Artificial Sequence
  Synthetic
gtcactttgtguatgtgtgtgtgtut

SEQ ID NO: 33718 - DNA, 22 bp, Artificial Sequence
  Synthetic
cctgcaagcutcaacagaggut

SEQ ID NO: 33719 - DNA, 27 bp, Artificial Sequence
  Synthetic
acagacttgugtgtcatttuaaaggga

SEQ ID NO: 33720 - DNA, 29 bp, Artificial Sequence
  Synthetic
ttttgttccttuttcaagcagaugaagag

SEQ ID NO: 33721 - DNA, 28 bp, Artificial Sequence
  Synthetic
tgttcctctctaugaaacacaatggtut

SEQ ID NO: 33722 - DNA, 19 bp, Artificial Sequence
  Synthetic
cagcaccacgucacaacug

SEQ ID NO: 33723 - DNA, 17 bp, Artificial Sequence
  Synthetic
gccaugcccuggaggag

SEQ ID NO: 33724 - DNA, 31 bp, Artificial Sequence
  Synthetic
tctattatatttuagaacagtctgctugccc

SEQ ID NO: 33725 - DNA, 25 bp, Artificial Sequence
  Synthetic
agaagaggaagaccuggagcaauaa

SEQ ID NO: 33726 - DNA, 30 bp, Artificial Sequence
  Synthetic
tttttgtttucagaguagattcttcatauc

SEQ ID NO: 33727 - DNA, 22 bp, Artificial Sequence
  Synthetic
tgacugtgaattgucccagcat

SEQ ID NO: 33728 - DNA, 26 bp, Artificial Sequence
  Synthetic
tttatctccctuccaggagaaatugc

SEQ ID NO: 33729 - DNA, 26 bp, Artificial Sequence
  Synthetic
actagaccauatgaagagctuggaca

SEQ ID NO: 33730 - DNA, 31 bp, Artificial Sequence
  Synthetic
ggaattgaatatutggttctggtauacagca

SEQ ID NO: 33731 - DNA, 22 bp, Artificial Sequence
  Synthetic
cuccaagcactguacaccaaag

SEQ ID NO: 33732 - DNA, 32 bp, Artificial Sequence
  Synthetic
agaaggattcacutgtataaaatauccaccag

SEQ ID NO: 33733 - DNA, 21 bp, Artificial Sequence
  Synthetic
cgugcaagauggaggaagcaa

SEQ ID NO: 33734 - DNA, 29 bp, Artificial Sequence
  Synthetic
gggattgacauatgttttagaugagaaga

SEQ ID NO: 33735 - DNA, 27 bp, Artificial Sequence
  Synthetic
gcttttgagagaacucattacccugac

SEQ ID NO: 33736 - DNA, 22 bp, Artificial Sequence
  Synthetic
cacaggtuaaacccccucacat

SEQ ID NO: 33737 - DNA, 23 bp, Artificial Sequence
  Synthetic
agcutttatgcccucaggaaagg

SEQ ID NO: 33738 - DNA, 26 bp, Artificial Sequence
  Synthetic
gcacaatucacagttctagaauccca

SEQ ID NO: 33739 - DNA, 17 bp, Artificial Sequence
  Synthetic
gagggcaucggcuagct

SEQ ID NO: 33740 - DNA, 21 bp, Artificial Sequence
  Synthetic
gctgtgttuggccttcttcuc

SEQ ID NO: 33741 - DNA, 20 bp, Artificial Sequence
  Synthetic
acagcccugcttgtcucaac

SEQ ID NO: 33742 - DNA, 20 bp, Artificial Sequence
  Synthetic
atuggagagucccagatguc

SEQ ID NO: 33743 - DNA, 20 bp, Artificial Sequence
  Synthetic
gcgtcuccaagatcctgugc

SEQ ID NO: 33744 - DNA, 18 bp, Artificial Sequence
  Synthetic
cgctgaggcccuccctua

SEQ ID NO: 33745 - DNA, 18 bp, Artificial Sequence
  Synthetic
gtucccgagggtcauccg

SEQ ID NO: 33746 - DNA, 30 bp, Artificial Sequence
  Synthetic
aaagaataaagauggagggtgtgataaucc

SEQ ID NO: 33747 - DNA, 22 bp, Artificial Sequence
  Synthetic
cggtttcuggactcttcctuga

SEQ ID NO: 33748 - DNA, 27 bp, Artificial Sequence
  Synthetic
caaaaaggaaguaggaaaugctcttua

SEQ ID NO: 33749 - DNA, 22 bp, Artificial Sequence
  Synthetic
tgatgacagcugtgctaacguc

SEQ ID NO: 33750 - DNA, 23 bp, Artificial Sequence
  Synthetic
tgaaggctcccuttggtacatug

SEQ ID NO: 33751 - DNA, 22 bp, Artificial Sequence
  Synthetic
caccttgtguccaacctcucag

SEQ ID NO: 33752 - DNA, 24 bp, Artificial Sequence
  Synthetic
ttagagtcattugcttccccaucc

SEQ ID NO: 33753 - DNA, 29 bp, Artificial Sequence
  Synthetic
tctgtccuccaagaataaatcucaagaga

SEQ ID NO: 33754 - DNA, 23 bp, Artificial Sequence
  Synthetic
gctccacttcuccttcaaggaut

SEQ ID NO: 33755 - DNA, 27 bp, Artificial Sequence
  Synthetic
gatccaagaaugggctttttctuacag

SEQ ID NO: 33756 - DNA, 17 bp, Artificial Sequence
  Synthetic
ggguggagctuccagca

SEQ ID NO: 33757 - DNA, 28 bp, Artificial Sequence
  Synthetic
gcttgaagattgtuaacctatgaggcut

SEQ ID NO: 33758 - DNA, 24 bp, Artificial Sequence
  Synthetic
cctcagtguaagacagctcugaat

SEQ ID NO: 33759 - DNA, 22 bp, Artificial Sequence
  Synthetic
ttctccauggtgttucccaagg

SEQ ID NO: 33760 - DNA, 27 bp, Artificial Sequence
  Synthetic
agaataaaattcaacccuccacagcut

SEQ ID NO: 33761 - DNA, 29 bp, Artificial Sequence
  Synthetic
acaagattgggagaucaatgtttguaact

SEQ ID NO: 33762 - DNA, 21 bp, Artificial Sequence
  Synthetic
agcccccuctctagaagaucc

SEQ ID NO: 33763 - DNA, 25 bp, Artificial Sequence
  Synthetic
tgcttgctgutcctgagatcuaaaa

SEQ ID NO: 33764 - DNA, 27 bp, Artificial Sequence
  Synthetic
gacaataaaagucaagatgctgggaut

SEQ ID NO: 33765 - DNA, 22 bp, Artificial Sequence
  Synthetic
gagtcagugagcctggaacauc

SEQ ID NO: 33766 - DNA, 23 bp, Artificial Sequence
  Synthetic
gggatuaacgtgcatatuccaca

SEQ ID NO: 33767 - DNA, 28 bp, Artificial Sequence
  Synthetic
tggtgacatugttcagtcaaatuaacct

SEQ ID NO: 33768 - DNA, 17 bp, Artificial Sequence
  Synthetic
gctgggcugccauggaa

SEQ ID NO: 33769 - DNA, 23 bp, Artificial Sequence
  Synthetic
gcccagccuttgcttctatttut

SEQ ID NO: 33770 - DNA, 21 bp, Artificial Sequence
  Synthetic
gctcaucccaacctcatgguc

SEQ ID NO: 33771 - DNA, 21 bp, Artificial Sequence
  Synthetic
gctccttgutgtagccctuct

SEQ ID NO: 33772 - DNA, 24 bp, Artificial Sequence
  Synthetic
agagagagagagagugggtgaaug

SEQ ID NO: 33773 - DNA, 19 bp, Artificial Sequence
  Synthetic
ccctcggccutccaaagug

SEQ ID NO: 33774 - DNA, 21 bp, Artificial Sequence
  Synthetic
tcaccctgccucctttcctua

SEQ ID NO: 33775 - DNA, 19 bp, Artificial Sequence
  Synthetic
guggcagccaguacacgaa

SEQ ID NO: 33776 - DNA, 21 bp, Artificial Sequence
  Synthetic
gagtgtcacuctctgcccaut

SEQ ID NO: 33777 - DNA, 20 bp, Artificial Sequence
  Synthetic
tgugtgtgtcugagggacct

SEQ ID NO: 33778 - DNA, 19 bp, Artificial Sequence
  Synthetic
ccgcaagccccucttcuac

SEQ ID NO: 33779 - DNA, 19 bp, Artificial Sequence
  Synthetic
ggcucccaggaggaaguga

SEQ ID NO: 33780 - DNA, 20 bp, Artificial Sequence
  Synthetic
gctccaagcugagtgttugc

SEQ ID NO: 33781 - DNA, 24 bp, Artificial Sequence
  Synthetic
ccaggattacaguggtgagcttut

SEQ ID NO: 33782 - DNA, 20 bp, Artificial Sequence
  Synthetic
gccgaggaguacttccugct

SEQ ID NO: 33783 - DNA, 17 bp, Artificial Sequence
  Synthetic
gggccagagugggtgug

SEQ ID NO: 33784 - DNA, 18 bp, Artificial Sequence
  Synthetic
tctcugccccuacccaca

SEQ ID NO: 33785 - DNA, 18 bp, Artificial Sequence
  Synthetic
tcucctggcuccccaaca

SEQ ID NO: 33786 - DNA, 22 bp, Artificial Sequence
  Synthetic
ccuatttagcuggcagggacat

SEQ ID NO: 33787 - DNA, 21 bp, Artificial Sequence
  Synthetic
aggtcaatcuccttgcagugg

SEQ ID NO: 33788 - DNA, 19 bp, Artificial Sequence
  Synthetic
tcugacacaugcacgcaca

SEQ ID NO: 33789 - DNA, 23 bp, Artificial Sequence
  Synthetic
cagtactuggagacagugaaggt

SEQ ID NO: 33790 - DNA, 21 bp, Artificial Sequence
  Synthetic
gcatctccutctgccacauct

SEQ ID NO: 33791 - DNA, 20 bp, Artificial Sequence
  Synthetic
cccaccuggctttagaccuc

SEQ ID NO: 33792 - DNA, 19 bp, Artificial Sequence
  Synthetic
cgtuacaacggccuacggt

SEQ ID NO: 33793 - DNA, 17 bp, Artificial Sequence
  Synthetic
ccagttcuccgcccucc

SEQ ID NO: 33794 - DNA, 22 bp, Artificial Sequence
  Synthetic
gtcatcttcugcaatcgcaguc

SEQ ID NO: 33795 - DNA, 20 bp, Artificial Sequence
  Synthetic
gcttcagaccgugctaucgt

SEQ ID NO: 33796 - DNA, 22 bp, Artificial Sequence
  Synthetic
ccctagtcugccactgaggaut

SEQ ID NO: 33797 - DNA, 25 bp, Artificial Sequence
  Synthetic
acagaaatctucaatctcccauccg

SEQ ID NO: 33798 - DNA, 19 bp, Artificial Sequence
  Synthetic
accagcacugcaaauggct

SEQ ID NO: 33799 - DNA, 19 bp, Artificial Sequence
  Synthetic
cgaggcugcctgtcttcua

SEQ ID NO: 33800 - DNA, 26 bp, Artificial Sequence
  Synthetic
cccaccttauattgccatcttuacga

SEQ ID NO: 33801 - DNA, 25 bp, Artificial Sequence
  Synthetic
agctcagctgutttctttccctuag

SEQ ID NO: 33802 - DNA, 27 bp, Artificial Sequence
  Synthetic
acgctttaagtutgcacataaatcucc

SEQ ID NO: 33803 - DNA, 26 bp, Artificial Sequence
  Synthetic
aaaccagaguccttaacaagcatuga

SEQ ID NO: 33804 - DNA, 26 bp, Artificial Sequence
  Synthetic
gaatcgcttaauggactagaaggcut

SEQ ID NO: 33805 - DNA, 23 bp, Artificial Sequence
  Synthetic
atguccaggagaccaagttucag

SEQ ID NO: 33806 - DNA, 21 bp, Artificial Sequence
  Synthetic
cggcacaguccactaactcua

SEQ ID NO: 33807 - DNA, 24 bp, Artificial Sequence
  Synthetic
gcactgacugccaactaatttugc

SEQ ID NO: 33808 - DNA, 30 bp, Artificial Sequence
  Synthetic
tctaatttccaacgagguttttcttacuga

SEQ ID NO: 33809 - DNA, 28 bp, Artificial Sequence
  Synthetic
tgtggcttctguttgtcttgtctatuaa

SEQ ID NO: 33810 - DNA, 27 bp, Artificial Sequence
  Synthetic
accccattaautgactgacatuaccac

SEQ ID NO: 33811 - DNA, 28 bp, Artificial Sequence
  Synthetic
ccaatcatggaautttctttctccucct

SEQ ID NO: 33812 - DNA, 27 bp, Artificial Sequence
  Synthetic
tcctcatcccuatcttccttggauaaa

SEQ ID NO: 33813 - DNA, 30 bp, Artificial Sequence
  Synthetic
gcataatttacaccugtgttcttgttguag

SEQ ID NO: 33814 - DNA, 31 bp, Artificial Sequence
  Synthetic
caaacatagctatutgaagctagaagaucct

SEQ ID NO: 33815 - DNA, 22 bp, Artificial Sequence
  Synthetic
gttggtccuaaaggtggtccut

SEQ ID NO: 33816 - DNA, 22 bp, Artificial Sequence
  Synthetic
gctgauagccaaactgcugaac

SEQ ID NO: 33817 - DNA, 32 bp, Artificial Sequence
  Synthetic
tgggttgaatacutttgttctagagtuacaat

SEQ ID NO: 33818 - DNA, 18 bp, Artificial Sequence
  Synthetic
ccagcuggagcgtttucg

SEQ ID NO: 33819 - DNA, 18 bp, Artificial Sequence
  Synthetic
cccuccccaaguccaact

SEQ ID NO: 33820 - DNA, 21 bp, Artificial Sequence
  Synthetic
ctgaccaucacgaggcugaat

SEQ ID NO: 33821 - DNA, 25 bp, Artificial Sequence
  Synthetic
tgtatgagagaaacucaggtuccga

SEQ ID NO: 33822 - DNA, 24 bp, Artificial Sequence
  Synthetic
tgggatuacaggcaaaaaccucat

SEQ ID NO: 33823 - DNA, 20 bp, Artificial Sequence
  Synthetic
ggtagcggucaacaagggut

SEQ ID NO: 33824 - DNA, 23 bp, Artificial Sequence
  Synthetic
cctcagagacuacaaggugaagc

SEQ ID NO: 33825 - DNA, 25 bp, Artificial Sequence
  Synthetic
ggtgactttugggattttccatguc

SEQ ID NO: 33826 - DNA, 22 bp, Artificial Sequence
  Synthetic
gaaggatgcucaggaaguccac

SEQ ID NO: 33827 - DNA, 22 bp, Artificial Sequence
  Synthetic
tgtgugaagcccaucaaagacc

SEQ ID NO: 33828 - DNA, 29 bp, Artificial Sequence
  Synthetic
ggcaacttcaguacttcctatatcttucc

SEQ ID NO: 33829 - DNA, 22 bp, Artificial Sequence
  Synthetic
agtgcaaggcugtcaacaugat

SEQ ID NO: 33830 - DNA, 18 bp, Artificial Sequence
  Synthetic
acatcuggcccgcacauc

SEQ ID NO: 33831 - DNA, 17 bp, Artificial Sequence
  Synthetic
ggcgauacgcguccaca

SEQ ID NO: 33832 - DNA, 28 bp, Artificial Sequence
  Synthetic
tcaaaacagttucactttcctgtcauct

SEQ ID NO: 33833 - DNA, 29 bp, Artificial Sequence
  Synthetic
agtgagggagcaugactaaaaauagaaaa

SEQ ID NO: 33834 - DNA, 25 bp, Artificial Sequence
  Synthetic
cagtcaagttuccacaactgtguaa

SEQ ID NO: 33835 - DNA, 29 bp, Artificial Sequence
  Synthetic
acactgactgtgugtactatgagaauaca

SEQ ID NO: 33836 - DNA, 21 bp, Artificial Sequence
  Synthetic
caagctccccuaccatgacut

SEQ ID NO: 33837 - DNA, 27 bp, Artificial Sequence
  Synthetic
ccacaccctuaagagaagaaaacucac

SEQ ID NO: 33838 - DNA, 23 bp, Artificial Sequence
  Synthetic
ctgggagtugccatatctgucat

SEQ ID NO: 33839 - DNA, 21 bp, Artificial Sequence
  Synthetic
gutgatgttgtuggcacacgt

SEQ ID NO: 33840 - DNA, 24 bp, Artificial Sequence
  Synthetic
cagaacactucagagcagttugag

SEQ ID NO: 33841 - DNA, 22 bp, Artificial Sequence
  Synthetic
gtactcctguaggttgccctug

SEQ ID NO: 33842 - DNA, 24 bp, Artificial Sequence
  Synthetic
gacctcaagagcuccaatatccuc

SEQ ID NO: 33843 - DNA, 25 bp, Artificial Sequence
  Synthetic
ggagatatggaucaagagguagggt

SEQ ID NO: 33844 - DNA, 24 bp, Artificial Sequence
  Synthetic
catctcaccaugctcatttcctut

SEQ ID NO: 33845 - DNA, 27 bp, Artificial Sequence
  Synthetic
tgacctttguaaacactcactcctuac

SEQ ID NO: 33846 - DNA, 21 bp, Artificial Sequence
  Synthetic
gacggcuccctaaacacuacc

SEQ ID NO: 33847 - DNA, 26 bp, Artificial Sequence
  Synthetic
tgacaatgucaaaggcatagaaugct

SEQ ID NO: 33848 - DNA, 24 bp, Artificial Sequence
  Synthetic
catctagacgtutccttggctcut

SEQ ID NO: 33849 - DNA, 21 bp, Artificial Sequence
  Synthetic
cccgttaagucgtagccctua

SEQ ID NO: 33850 - DNA, 32 bp, Artificial Sequence
  Synthetic
ttttggtatcuaacagaaagaagatutggaua

SEQ ID NO: 33851 - DNA, 24 bp, Artificial Sequence
  Synthetic
cagacaaugtcaucacaggaggat

SEQ ID NO: 33852 - DNA, 32 bp, Artificial Sequence
  Synthetic
taatagagaactgauagaaattggatgugagg

SEQ ID NO: 33853 - DNA, 21 bp, Artificial Sequence
  Synthetic
ctgtgggugtttcctgugagt

SEQ ID NO: 33854 - DNA, 22 bp, Artificial Sequence
  Synthetic
gctttttcuccccctcccacua

SEQ ID NO: 33855 - DNA, 19 bp, Artificial Sequence
  Synthetic
ggaugagaagcgcccugac

SEQ ID NO: 33856 - DNA, 23 bp, Artificial Sequence
  Synthetic
ccaccagauggttcgtacagaut

SEQ ID NO: 33857 - DNA, 23 bp, Artificial Sequence
  Synthetic
ctgattttuggcagccactucag

SEQ ID NO: 33858 - DNA, 26 bp, Artificial Sequence
  Synthetic
atgatctgcacutccttttcttcaut

SEQ ID NO: 33859 - DNA, 21 bp, Artificial Sequence
  Synthetic
gcagtugaggccctatgcauc

SEQ ID NO: 33860 - DNA, 28 bp, Artificial Sequence
  Synthetic
gttgtatctcaagcaugaattcagctut

SEQ ID NO: 33861 - DNA, 28 bp, Artificial Sequence
  Synthetic
gagctactatttucagaaacgatcagut

SEQ ID NO: 33862 - DNA, 29 bp, Artificial Sequence
  Synthetic
ctatgacagcatuatttcttgttccctug

SEQ ID NO: 33863 - DNA, 28 bp, Artificial Sequence
  Synthetic
aaatgcttagtauctgcttgatcacuga

SEQ ID NO: 33864 - DNA, 22 bp, Artificial Sequence
  Synthetic
gacaccagugtatgttgggaug

SEQ ID NO: 33865 - DNA, 26 bp, Artificial Sequence
  Synthetic
ctgcaggatatutccatcttctguga

SEQ ID NO: 33866 - DNA, 21 bp, Artificial Sequence
  Synthetic
caggtctauctgaggccucca

SEQ ID NO: 33867 - DNA, 19 bp, Artificial Sequence
  Synthetic
ccgtgaguccatcgtguga

SEQ ID NO: 33868 - DNA, 20 bp, Artificial Sequence
  Synthetic
acctggaggutatcgcuggt

SEQ ID NO: 33869 - DNA, 22 bp, Artificial Sequence
  Synthetic
tctttgaagcaugcctcctucc

SEQ ID NO: 33870 - DNA, 22 bp, Artificial Sequence
  Synthetic
gacccutttggugaaggcaaag

SEQ ID NO: 33871 - DNA, 29 bp, Artificial Sequence
  Synthetic
tcgatatgtuctatgagatcugggagaaa

SEQ ID NO: 33872 - DNA, 26 bp, Artificial Sequence
  Synthetic
gatgaggaaggagaugatgatguagg

SEQ ID NO: 33873 - DNA, 21 bp, Artificial Sequence
  Synthetic
tggcaucgacgacatgtucaa

SEQ ID NO: 33874 - DNA, 21 bp, Artificial Sequence
  Synthetic
tctccguccagctgacttgua

SEQ ID NO: 33875 - DNA, 25 bp, Artificial Sequence
  Synthetic
gtcctgagaaaaucaacatctuggc

SEQ ID NO: 33876 - DNA, 20 bp, Artificial Sequence
  Synthetic
gactgugaagcggctcugat

SEQ ID NO: 33877 - DNA, 21 bp, Artificial Sequence
  Synthetic
gttggugccttctcttugcac

SEQ ID NO: 33878 - DNA, 23 bp, Artificial Sequence
  Synthetic
ggctttcagaugcagacacugat

SEQ ID NO: 33879 - DNA, 29 bp, Artificial Sequence
  Synthetic
agcgaggtacagaautaaatgattgtcut

SEQ ID NO: 33880 - DNA, 24 bp, Artificial Sequence
  Synthetic
gctcttgttgtucacgatggtgua

SEQ ID NO: 33881 - DNA, 22 bp, Artificial Sequence
  Synthetic
gaactgagccacutctctgucc

SEQ ID NO: 33882 - DNA, 17 bp, Artificial Sequence
  Synthetic
cutcgggugcccacact

SEQ ID NO: 33883 - DNA, 19 bp, Artificial Sequence
  Synthetic
ttgtcuggccttgtcugca

SEQ ID NO: 33884 - DNA, 22 bp, Artificial Sequence
  Synthetic
tgaatgtcucgaaccagctgug

SEQ ID NO: 33885 - DNA, 27 bp, Artificial Sequence
  Synthetic
ctttctcucagtcatctctucaaccat

SEQ ID NO: 33886 - DNA, 22 bp, Artificial Sequence
  Synthetic
tcagggacaaaggcaugcatua

SEQ ID NO: 33887 - DNA, 21 bp, Artificial Sequence
  Synthetic
ggtgtgtggacucagctcaua

SEQ ID NO: 33888 - DNA, 25 bp, Artificial Sequence
  Synthetic
ctgttctccucatcttcttctuggt

SEQ ID NO: 33889 - DNA, 19 bp, Artificial Sequence
  Synthetic
gcatugccaccccctacuc

SEQ ID NO: 33890 - DNA, 24 bp, Artificial Sequence
  Synthetic
gaggttgttcauctctctgtccuc

SEQ ID NO: 33891 - DNA, 24 bp, Artificial Sequence
  Synthetic
cctcagttuccccatcauagaact

SEQ ID NO: 33892 - DNA, 20 bp, Artificial Sequence
  Synthetic
gcauaatgacugccccgaca

SEQ ID NO: 33893 - DNA, 23 bp, Artificial Sequence
  Synthetic
ccatcatcgugttcatcttugct

SEQ ID NO: 33894 - DNA, 24 bp, Artificial Sequence
  Synthetic
cagatcaaaguagggaugaccaag

SEQ ID NO: 33895 - DNA, 23 bp, Artificial Sequence
  Synthetic
tggaacatcutcgacagcaucat

SEQ ID NO: 33896 - DNA, 22 bp, Artificial Sequence
  Synthetic
gcaggaucccttcttcctuacc

SEQ ID NO: 33897 - DNA, 24 bp, Artificial Sequence
  Synthetic
ctcaccatcacuatgtgcatcgua

SEQ ID NO: 33898 - DNA, 24 bp, Artificial Sequence
  Synthetic
gctgggauaaagatgaggguacct

SEQ ID NO: 33899 - DNA, 22 bp, Artificial Sequence
  Synthetic
cgcaaatcucctgattgcacuc

SEQ ID NO: 33900 - DNA, 23 bp, Artificial Sequence
  Synthetic
ccagtaaugagaccaccccatug

SEQ ID NO: 33901 - DNA, 23 bp, Artificial Sequence
  Synthetic
cctgggttcugaagcagatttug

SEQ ID NO: 33902 - DNA, 22 bp, Artificial Sequence
  Synthetic
gctagaaccacagcugggatua

SEQ ID NO: 33903 - DNA, 22 bp, Artificial Sequence
  Synthetic
cgtccgttccuccactctttuc

SEQ ID NO: 33904 - DNA, 22 bp, Artificial Sequence
  Synthetic
caggtucaccagguagaaggac

SEQ ID NO: 33905 - DNA, 22 bp, Artificial Sequence
  Synthetic
gctattugaaccccuggcacaa

SEQ ID NO: 33906 - DNA, 29 bp, Artificial Sequence
  Synthetic
ggtcagggcauaaatagaaaatacaguca

SEQ ID NO: 33907 - DNA, 26 bp, Artificial Sequence
  Synthetic
tcaccagcaugatgtttctctuacag

SEQ ID NO: 33908 - DNA, 20 bp, Artificial Sequence
  Synthetic
cgttgagcgcugtgaagtug

SEQ ID NO: 33909 - DNA, 19 bp, Artificial Sequence
  Synthetic
gtgaccccgugcttgtuct

SEQ ID NO: 33910 - DNA, 22 bp, Artificial Sequence
  Synthetic
accaauaggagacacacaguca

SEQ ID NO: 33911 - DNA, 25 bp, Artificial Sequence
  Synthetic
ccaataactguggtttgattcugca

SEQ ID NO: 33912 - DNA, 20 bp, Artificial Sequence
  Synthetic
caggagccauggcauggaat

SEQ ID NO: 33913 - DNA, 20 bp, Artificial Sequence
  Synthetic
gctgcucagctttcctugac

SEQ ID NO: 33914 - DNA, 19 bp, Artificial Sequence
  Synthetic
tggaggugggtggtaguca

SEQ ID NO: 33915 - DNA, 18 bp, Artificial Sequence
  Synthetic
ccaucgagaagcgcaugg

SEQ ID NO: 33916 - DNA, 20 bp, Artificial Sequence
  Synthetic
ggcagcaggaugtcaaguga

SEQ ID NO: 33917 - DNA, 20 bp, Artificial Sequence
  Synthetic
cttccccaugttgcacucct

SEQ ID NO: 33918 - DNA, 23 bp, Artificial Sequence
  Synthetic
ctccattucaccaatgggucaca

SEQ ID NO: 33919 - DNA, 24 bp, Artificial Sequence
  Synthetic
cuccagcacattuccaagaacaag

SEQ ID NO: 33920 - DNA, 23 bp, Artificial Sequence
  Synthetic
tctccccgguactaacactaugg

SEQ ID NO: 33921 - DNA, 19 bp, Artificial Sequence
  Synthetic
ggagtguctgtggcucact

SEQ ID NO: 33922 - DNA, 22 bp, Artificial Sequence
  Synthetic
ccactctgggauccactcacut

SEQ ID NO: 33923 - DNA, 23 bp, Artificial Sequence
  Synthetic
ctctgtactuacagcccccaaug

SEQ ID NO: 33924 - DNA, 18 bp, Artificial Sequence
  Synthetic
guggcaggagccacaaug

SEQ ID NO: 33925 - DNA, 19 bp, Artificial Sequence
  Synthetic
aggtacugcccaggacuga

SEQ ID NO: 33926 - DNA, 18 bp, Artificial Sequence
  Synthetic
gauccaggcaggcucagt

SEQ ID NO: 33927 - DNA, 19 bp, Artificial Sequence
  Synthetic
gtaccaucgggctgugaca

SEQ ID NO: 33928 - DNA, 23 bp, Artificial Sequence
  Synthetic
gtgggaaucagagagggtugaaa

SEQ ID NO: 33929 - DNA, 27 bp, Artificial Sequence
  Synthetic
ggatgatgaguactctgaatacuccga

SEQ ID NO: 33930 - DNA, 20 bp, Artificial Sequence
  Synthetic
ccugcattcauggacaccca

SEQ ID NO: 33931 - DNA, 20 bp, Artificial Sequence
  Synthetic
gctgcccauggtgactucag

SEQ ID NO: 33932 - DNA, 22 bp, Artificial Sequence
  Synthetic
cttcttgacugcttgccctgua

SEQ ID NO: 33933 - DNA, 24 bp, Artificial Sequence
  Synthetic
ctttatggtcccugtggtcttcug

SEQ ID NO: 33934 - DNA, 22 bp, Artificial Sequence
  Synthetic
tcugaccucagggacaacagaa

SEQ ID NO: 33935 - DNA, 21 bp, Artificial Sequence
  Synthetic
ccaacctgccugactctgauc

SEQ ID NO: 33936 - DNA, 28 bp, Artificial Sequence
  Synthetic
ggagatauaggacagagtcagtaaucag

SEQ ID NO: 33937 - DNA, 23 bp, Artificial Sequence
  Synthetic
ctctcatgcutcttctgtuccca

SEQ ID NO: 33938 - DNA, 18 bp, Artificial Sequence
  Synthetic
cccccucattcugagcgt

SEQ ID NO: 33939 - DNA, 24 bp, Artificial Sequence
  Synthetic
gauggagagaagggagauaaggua

SEQ ID NO: 33940 - DNA, 25 bp, Artificial Sequence
  Synthetic
gggtcactauaaggtcaaaagcuac

SEQ ID NO: 33941 - DNA, 20 bp, Artificial Sequence
  Synthetic
gcauctgaguggccacacat

SEQ ID NO: 33942 - DNA, 21 bp, Artificial Sequence
  Synthetic
ccctcacagaugctguggaac

SEQ ID NO: 33943 - DNA, 23 bp, Artificial Sequence
  Synthetic
ccgugacttctuacccaaaccaa

SEQ ID NO: 33944 - DNA, 21 bp, Artificial Sequence
  Synthetic
caggcaggaaucagaggaguc

SEQ ID NO: 33945 - DNA, 29 bp, Artificial Sequence
  Synthetic
gggtgagtggaucttgtatgatatuagaa

SEQ ID NO: 33946 - DNA, 22 bp, Artificial Sequence
  Synthetic
ggactgaagucacagcactguc

SEQ ID NO: 33947 - DNA, 22 bp, Artificial Sequence
  Synthetic
gtcttacuccacagccgaacuc

SEQ ID NO: 33948 - DNA, 20 bp, Artificial Sequence
  Synthetic
ggtcaugggaggtcagugga

SEQ ID NO: 33949 - DNA, 21 bp, Artificial Sequence
  Synthetic
ctcgugaggacttaggauggg

SEQ ID NO: 33950 - DNA, 22 bp, Artificial Sequence
  Synthetic
ggattcaccaugcccctacaug

SEQ ID NO: 33951 - DNA, 22 bp, Artificial Sequence
  Synthetic
cattgaccatuccctcccttug

SEQ ID NO: 33952 - DNA, 23 bp, Artificial Sequence
  Synthetic
ggucacccttugaggaaaagagg

SEQ ID NO: 33953 - DNA, 24 bp, Artificial Sequence
  Synthetic
ctgaactctgugctcatgttccua

SEQ ID NO: 33954 - DNA, 22 bp, Artificial Sequence
  Synthetic
gagccttctcugctcagtaguc

SEQ ID NO: 33955 - DNA, 23 bp, Artificial Sequence
  Synthetic
gcauatttaagctcuggccccat

SEQ ID NO: 33956 - DNA, 22 bp, Artificial Sequence
  Synthetic
gagaggtcagugggattcctug

SEQ ID NO: 33957 - DNA, 22 bp, Artificial Sequence
  Synthetic
acccacaagccugttuccaaat

SEQ ID NO: 33958 - DNA, 20 bp, Artificial Sequence
  Synthetic
tgctgccccacucctcauat

SEQ ID NO: 33959 - DNA, 21 bp, Artificial Sequence
  Synthetic
ctgacagagcucttccctcuc

SEQ ID NO: 33960 - DNA, 23 bp, Artificial Sequence
  Synthetic
ggatgucagggtgacaauggaca

SEQ ID NO: 33961 - DNA, 24 bp, Artificial Sequence
  Synthetic
cacaggutagggtcauagggagat

SEQ ID NO: 33962 - DNA, 18 bp, Artificial Sequence
  Synthetic
gaggtuggcgcacacuac

SEQ ID NO: 33963 - DNA, 23 bp, Artificial Sequence
  Synthetic
gccttctcugtgttaatcccuga

SEQ ID NO: 33964 - DNA, 22 bp, Artificial Sequence
  Synthetic
accaaggaaacugaggcaguac

SEQ ID NO: 33965 - DNA, 25 bp, Artificial Sequence
  Synthetic
guatggaaatugacccccaaggaaa

SEQ ID NO: 33966 - DNA, 21 bp, Artificial Sequence
  Synthetic
gcataugcacaccacctcuag

SEQ ID NO: 33967 - DNA, 24 bp, Artificial Sequence
  Synthetic
gctaaggtcagugtgtggaaucag

SEQ ID NO: 33968 - DNA, 22 bp, Artificial Sequence
  Synthetic
gggttauggcacacacuaccat

SEQ ID NO: 33969 - DNA, 23 bp, Artificial Sequence
  Synthetic
ccaccccatuttcttgtttccug

SEQ ID NO: 33970 - DNA, 22 bp, Artificial Sequence
  Synthetic
ctgaaatgcaaauagcggguga

SEQ ID NO: 33971 - DNA, 21 bp, Artificial Sequence
  Synthetic
gagccuggaaagcctggtaut

SEQ ID NO: 33972 - DNA, 18 bp, Artificial Sequence
  Synthetic
cagccccuatgcctgugg

SEQ ID NO: 33973 - DNA, 20 bp, Artificial Sequence
  Synthetic
gggtgugaaggtgcttucct

SEQ ID NO: 33974 - DNA, 24 bp, Artificial Sequence
  Synthetic
gagagaugaagacaaactgcuagg

SEQ ID NO: 33975 - DNA, 20 bp, Artificial Sequence
  Synthetic
ccaaggtgagugcggatgut

SEQ ID NO: 33976 - DNA, 22 bp, Artificial Sequence
  Synthetic
ggagggutgcccatugaaacat

SEQ ID NO: 33977 - DNA, 23 bp, Artificial Sequence
  Synthetic
ccactctttuctgaggtcucagg

SEQ ID NO: 33978 - DNA, 24 bp, Artificial Sequence
  Synthetic
gcctgaatcucctttctctcccua

SEQ ID NO: 33979 - DNA, 22 bp, Artificial Sequence
  Synthetic
gccagacaccagugaatgttug

SEQ ID NO: 33980 - DNA, 22 bp, Artificial Sequence
  Synthetic
ctgtgggaacagaucactggut

SEQ ID NO: 33981 - DNA, 29 bp, Artificial Sequence
  Synthetic
cagaggcccuataaatctuaacaaagact

SEQ ID NO: 33982 - DNA, 22 bp, Artificial Sequence
  Synthetic
ggtctagggucctcatgugaag

SEQ ID NO: 33983 - DNA, 26 bp, Artificial Sequence
  Synthetic
gcctctuaccactctatttuccacag

SEQ ID NO: 33984 - DNA, 22 bp, Artificial Sequence
  Synthetic
ctggagggaauagggucagaua

SEQ ID NO: 33985 - DNA, 23 bp, Artificial Sequence
  Synthetic
ggaaagggugagtgtgattgguc

SEQ ID NO: 33986 - DNA, 21 bp, Artificial Sequence
  Synthetic
cttgcugaggaacagcctuga

SEQ ID NO: 33987 - DNA, 22 bp, Artificial Sequence
  Synthetic
ccccttgtugagccattctuct

SEQ ID NO: 33988 - DNA, 21 bp, Artificial Sequence
  Synthetic
ctccagaccccutgtgugaag

SEQ ID NO: 33989 - DNA, 23 bp, Artificial Sequence
  Synthetic
aaggcuaccaacattcccaugag

SEQ ID NO: 33990 - DNA, 23 bp, Artificial Sequence
  Synthetic
cctcagcctutcctatcacctuc

SEQ ID NO: 33991 - DNA, 24 bp, Artificial Sequence
  Synthetic
tccctgagugagttagatccugac

SEQ ID NO: 33992 - DNA, 21 bp, Artificial Sequence
  Synthetic
ggtuccaagaacccccaugat

SEQ ID NO: 33993 - DNA, 22 bp, Artificial Sequence
  Synthetic
cttgagaacugcttgctucgag

SEQ ID NO: 33994 - DNA, 21 bp, Artificial Sequence
  Synthetic
caggactuagtcaggguccca

SEQ ID NO: 33995 - DNA, 24 bp, Artificial Sequence
  Synthetic
ggtgaaggttgucttcctgactuc

SEQ ID NO: 33996 - DNA, 23 bp, Artificial Sequence
  Synthetic
ccaagtcccauagataggcccua

SEQ ID NO: 33997 - DNA, 26 bp, Artificial Sequence
  Synthetic
acctccatuccaatgaagacttugat

SEQ ID NO: 33998 - DNA, 22 bp, Artificial Sequence
  Synthetic
gagucaccuaggagcccaaaat

SEQ ID NO: 33999 - DNA, 22 bp, Artificial Sequence
  Synthetic
caggagugggacttttgtgugt

SEQ ID NO: 34000 - DNA, 22 bp, Artificial Sequence
  Synthetic
gucaagggcaagaagucagaac

SEQ ID NO: 34001 - DNA, 23 bp, Artificial Sequence
  Synthetic
ctggagagaagguaagugcaacc

SEQ ID NO: 34002 - DNA, 23 bp, Artificial Sequence
  Synthetic
ctggagggaacucttatctccut

SEQ ID NO: 34003 - DNA, 26 bp, Artificial Sequence
  Synthetic
caaatctcugaacccccaaattcauc

SEQ ID NO: 34004 - DNA, 21 bp, Artificial Sequence
  Synthetic
accccagaacugggacaucat

SEQ ID NO: 34005 - DNA, 18 bp, Artificial Sequence
  Synthetic
gggtgtggguctctccug

SEQ ID NO: 34006 - DNA, 22 bp, Artificial Sequence
  Synthetic
gaacagcaggucagggaaugaa

SEQ ID NO: 34007 - DNA, 24 bp, Artificial Sequence
  Synthetic
cctcatcacucctggtatcttugg

SEQ ID NO: 34008 - DNA, 24 bp, Artificial Sequence
  Synthetic
gagacaaaguataaggugcaaccc

SEQ ID NO: 34009 - DNA, 22 bp, Artificial Sequence
  Synthetic
cccactgcuctctgtcctuaca

SEQ ID NO: 34010 - DNA, 23 bp, Artificial Sequence
  Synthetic
gaagaacccugggaagacactua

SEQ ID NO: 34011 - DNA, 22 bp, Artificial Sequence
  Synthetic
ctaaaggugagcaagccttguc

SEQ ID NO: 34012 - DNA, 22 bp, Artificial Sequence
  Synthetic
tcccgatgautctaactcugct

SEQ ID NO: 34013 - DNA, 25 bp, Artificial Sequence
  Synthetic
cccacctaacugctatcttcttuca

SEQ ID NO: 34014 - DNA, 23 bp, Artificial Sequence
  Synthetic
ggaaagacaugtcagatgugggt

SEQ ID NO: 34015 - DNA, 25 bp, Artificial Sequence
  Synthetic
gggactggguggtagaatauaaggg

SEQ ID NO: 34016 - DNA, 24 bp, Artificial Sequence
  Synthetic
aagaaggtcuggacagagtccaua

SEQ ID NO: 34017 - DNA, 22 bp, Artificial Sequence
  Synthetic
ccaggcttcuggtaaggaguag

SEQ ID NO: 34018 - DNA, 20 bp, Artificial Sequence
  Synthetic
caccaagcucccagtggaua

SEQ ID NO: 34019 - DNA, 21 bp, Artificial Sequence
  Synthetic
caggctcugtgtttcctucca

SEQ ID NO: 34020 - DNA, 22 bp, Artificial Sequence
  Synthetic
ccttcccacuacgcccactaua

SEQ ID NO: 34021 - DNA, 27 bp, Artificial Sequence
  Synthetic
ctttttaatcaagutctgtctccugca

SEQ ID NO: 34022 - DNA, 19 bp, Artificial Sequence
  Synthetic
ccaaggugaggcaggctua

SEQ ID NO: 34023 - DNA, 23 bp, Artificial Sequence
  Synthetic
tgtcactaucccacatgctctug

SEQ ID NO: 34024 - DNA, 24 bp, Artificial Sequence
  Synthetic
actaccaatccuggtcctttcucc

SEQ ID NO: 34025 - DNA, 22 bp, Artificial Sequence
  Synthetic
acucccaggaaauacagacuct

SEQ ID NO: 34026 - DNA, 20 bp, Artificial Sequence
  Synthetic
gtgatccguagaacgucgct

SEQ ID NO: 34027 - DNA, 24 bp, Artificial Sequence
  Synthetic
acactaaccucacactgacttuca

SEQ ID NO: 34028 - DNA, 20 bp, Artificial Sequence
  Synthetic
ccaccuggacccccaauaaa

SEQ ID NO: 34029 - DNA, 20 bp, Artificial Sequence
  Synthetic
ttccagcagacuccccatug

SEQ ID NO: 34030 - DNA, 21 bp, Artificial Sequence
  Synthetic
gcacccauaccctcattgguc

SEQ ID NO: 34031 - DNA, 27 bp, Artificial Sequence
  Synthetic
acttctgacttcugtctgtaactccua

SEQ ID NO: 34032 - DNA, 21 bp, Artificial Sequence
  Synthetic
aggtacacucagaccccucag

SEQ ID NO: 34033 - DNA, 22 bp, Artificial Sequence
  Synthetic
tctatgcugtgctcuccaacag

SEQ ID NO: 34034 - DNA, 22 bp, Artificial Sequence
  Synthetic
caagccugcaagauaacagggt

SEQ ID NO: 34035 - DNA, 19 bp, Artificial Sequence
  Synthetic
gaggccacugacaucccat

SEQ ID NO: 34036 - DNA, 22 bp, Artificial Sequence
  Synthetic
gccttgcagacucaggactcua

SEQ ID NO: 34037 - DNA, 21 bp, Artificial Sequence
  Synthetic
tgaatcccuggtgggactcuc

SEQ ID NO: 34038 - DNA, 24 bp, Artificial Sequence
  Synthetic
cagggcaagaggucactttatcut

SEQ ID NO: 34039 - DNA, 25 bp, Artificial Sequence
  Synthetic
caatcctugagagtacaguggacag

SEQ ID NO: 34040 - DNA, 21 bp, Artificial Sequence
  Synthetic
gtctaggucaggguacaccgt

SEQ ID NO: 34041 - DNA, 21 bp, Artificial Sequence
  Synthetic
gtcctgaugggtcgtcactuc

SEQ ID NO: 34042 - DNA, 21 bp, Artificial Sequence
  Synthetic
ggttccccuggacacttcaut

SEQ ID NO: 34043 - DNA, 23 bp, Artificial Sequence
  Synthetic
ccatccgugagcttagcuacaag

SEQ ID NO: 34044 - DNA, 19 bp, Artificial Sequence
  Synthetic
gggttuccagggtctccuc

SEQ ID NO: 34045 - DNA, 24 bp, Artificial Sequence
  Synthetic
gttcttactggauggctcctcauc

SEQ ID NO: 34046 - DNA, 19 bp, Artificial Sequence
  Synthetic
ggaugaaggccgaguggag

SEQ ID NO: 34047 - DNA, 21 bp, Artificial Sequence
  Synthetic
gctgacggcutttactgccua

SEQ ID NO: 34048 - DNA, 22 bp, Artificial Sequence
  Synthetic
gcaaaacuccuggaagggacag

SEQ ID NO: 34049 - DNA, 23 bp, Artificial Sequence
  Synthetic
aagaatguggcgatgggttaugt

SEQ ID NO: 34050 - DNA, 22 bp, Artificial Sequence
  Synthetic
ccugggaagagauaagggttuc

SEQ ID NO: 34051 - DNA, 26 bp, Artificial Sequence
  Synthetic
gcttatgtcucatgtgtcattcucca

SEQ ID NO: 34052 - DNA, 25 bp, Artificial Sequence
  Synthetic
acaggtgtagugtgttcatcaaugt

SEQ ID NO: 34053 - DNA, 22 bp, Artificial Sequence
  Synthetic
tgccctcuggtgtttcauacag

SEQ ID NO: 34054 - DNA, 21 bp, Artificial Sequence
  Synthetic
aagcagucaaugaagccagga

SEQ ID NO: 34055 - DNA, 28 bp, Artificial Sequence
  Synthetic
cagatgctcttgugtttctgtctttuag

SEQ ID NO: 34056 - DNA, 20 bp, Artificial Sequence
  Synthetic
cccatttgcuggctcaugac

SEQ ID NO: 34057 - DNA, 23 bp, Artificial Sequence
  Synthetic
gcctgaggcuttcaatctctucc

SEQ ID NO: 34058 - DNA, 18 bp, Artificial Sequence
  Synthetic
gtgcaggugcgagucagt

SEQ ID NO: 34059 - DNA, 18 bp, Artificial Sequence
  Synthetic
ggcccuggtggcacuaag

SEQ ID NO: 34060 - DNA, 22 bp, Artificial Sequence
  Synthetic
cagagccagauagcagacctug

SEQ ID NO: 34061 - DNA, 22 bp, Artificial Sequence
  Synthetic
gagttcaugaagggtguggagt

SEQ ID NO: 34062 - DNA, 19 bp, Artificial Sequence
  Synthetic
gcauggaggcaggagauca

SEQ ID NO: 34063 - DNA, 18 bp, Artificial Sequence
  Synthetic
ccacagcccuacccugag

SEQ ID NO: 34064 - DNA, 22 bp, Artificial Sequence
  Synthetic
ggctcggauaggctaaatugct

SEQ ID NO: 34065 - DNA, 20 bp, Artificial Sequence
  Synthetic
gggcaaggugatgaggaugc

SEQ ID NO: 34066 - DNA, 20 bp, Artificial Sequence
  Synthetic
accaagccuctggtctcugg

SEQ ID NO: 34067 - DNA, 22 bp, Artificial Sequence
  Synthetic
tcagcagcagcuataccugagt

SEQ ID NO: 34068 - DNA, 21 bp, Artificial Sequence
  Synthetic
cctttucccggagctctucaa

SEQ ID NO: 34069 - DNA, 22 bp, Artificial Sequence
  Synthetic
tggtaaugagcaaagccgtcuc

SEQ ID NO: 34070 - DNA, 26 bp, Artificial Sequence
  Synthetic
atgcagaaagucaacttauggaagga

SEQ ID NO: 34071 - DNA, 28 bp, Artificial Sequence
  Synthetic
ccatcacttttccauggattatcactug

SEQ ID NO: 34072 - DNA, 24 bp, Artificial Sequence
  Synthetic
tggttctgtaauaggcctcaccut

SEQ ID NO: 34073 - DNA, 25 bp, Artificial Sequence
  Synthetic
catacaattucaggcaaggccauac

SEQ ID NO: 34074 - DNA, 24 bp, Artificial Sequence
  Synthetic
ccugaagaagaaggaggttuaugt

SEQ ID NO: 34075 - DNA, 28 bp, Artificial Sequence
  Synthetic
ctgaggatacutaaaggtacugaaaggt

SEQ ID NO: 34076 - DNA, 29 bp, Artificial Sequence
  Synthetic
cttccaacaauaggattcagcauagagaa

SEQ ID NO: 34077 - DNA, 24 bp, Artificial Sequence
  Synthetic
gggtaggaagaaugaccagguaga

SEQ ID NO: 34078 - DNA, 24 bp, Artificial Sequence
  Synthetic
cttaggtuaggaaatgcccaugga

SEQ ID NO: 34079 - DNA, 28 bp, Artificial Sequence
  Synthetic
agatacagacugaaagacacacacauac

SEQ ID NO: 34080 - DNA, 25 bp, Artificial Sequence
  Synthetic
tgtaaaagtgtcucagttgctgugt

SEQ ID NO: 34081 - DNA, 27 bp, Artificial Sequence
  Synthetic
gcttataugccaccatgtttgaucact

SEQ ID NO: 34082 - DNA, 22 bp, Artificial Sequence
  Synthetic
tgggccacauagcaagatccua

SEQ ID NO: 34083 - DNA, 29 bp, Artificial Sequence
  Synthetic
tgctgaggttuccaactattatctttuca

SEQ ID NO: 34084 - DNA, 28 bp, Artificial Sequence
  Synthetic
cttgcatttatggacuctgaccttttua

SEQ ID NO: 34085 - DNA, 28 bp, Artificial Sequence
  Synthetic
gggatgagatggcutataactgacttut

SEQ ID NO: 34086 - DNA, 25 bp, Artificial Sequence
  Synthetic
caaccaucaaucagaaaaaggaggg

SEQ ID NO: 34087 - DNA, 26 bp, Artificial Sequence
  Synthetic
agcaagacaagugaagtcaactgtua

SEQ ID NO: 34088 - DNA, 29 bp, Artificial Sequence
  Synthetic
ttcttctaacaacautctgacacctuacc

SEQ ID NO: 34089 - DNA, 21 bp, Artificial Sequence
  Synthetic
tgcuacaactguggcaaacca

SEQ ID NO: 34090 - DNA, 21 bp, Artificial Sequence
  Synthetic
gcatgtgcucacctcuccaag

SEQ ID NO: 34091 - DNA, 24 bp, Artificial Sequence
  Synthetic
ctggtctgacuagccgaattctut

SEQ ID NO: 34092 - DNA, 18 bp, Artificial Sequence
  Synthetic
cctcugccacggcttcuc

SEQ ID NO: 34093 - DNA, 28 bp, Artificial Sequence
  Synthetic
aaaagaactttcaguggtttaatgcugt

SEQ ID NO: 34094 - DNA, 22 bp, Artificial Sequence
  Synthetic
cttctacgugcccttcuccaat

SEQ ID NO: 34095 - DNA, 20 bp, Artificial Sequence
  Synthetic
cggctaggutgagcaggaug

SEQ ID NO: 34096 - DNA, 23 bp, Artificial Sequence
  Synthetic
cctagctacccuctccctgtcua

SEQ ID NO: 34097 - DNA, 21 bp, Artificial Sequence
  Synthetic
cccatgauggcatggttcucc

SEQ ID NO: 34098 - DNA, 21 bp, Artificial Sequence
  Synthetic
ctgtucccaagtcccucacag

SEQ ID NO: 34099 - DNA, 28 bp, Artificial Sequence
  Synthetic
tgcccauagcagaaaaagatgataauca

SEQ ID NO: 34100 - DNA, 19 bp, Artificial Sequence
  Synthetic
ctggaggagccauggtcug

SEQ ID NO: 34101 - DNA, 22 bp, Artificial Sequence
  Synthetic
gaagaugggaccgaagtuggag

SEQ ID NO: 34102 - DNA, 20 bp, Artificial Sequence
  Synthetic
gggcgaaccucactaacgug

SEQ ID NO: 34103 - DNA, 23 bp, Artificial Sequence
  Synthetic
acagagtccuaggcaggtctuag

SEQ ID NO: 34104 - DNA, 27 bp, Artificial Sequence
  Synthetic
aaatcttcctctuttaactagctgcug

SEQ ID NO: 34105 - DNA, 24 bp, Artificial Sequence
  Synthetic
cctggttguactgtagcttgtugt

SEQ ID NO: 34106 - DNA, 22 bp, Artificial Sequence
  Synthetic
cgggttucacatttctcctucc

SEQ ID NO: 34107 - DNA, 24 bp, Artificial Sequence
  Synthetic
tcaaaaacaaaugtccccggauct

SEQ ID NO: 34108 - DNA, 26 bp, Artificial Sequence
  Synthetic
tcctaactcugaacacagcttttuga

SEQ ID NO: 34109 - DNA, 27 bp, Artificial Sequence
  Synthetic
gttttgtttgaaagaucggtggaacut

SEQ ID NO: 34110 - DNA, 23 bp, Artificial Sequence
  Synthetic
tctgaacagcutcaagagggtuc

SEQ ID NO: 34111 - DNA, 21 bp, Artificial Sequence
  Synthetic
acctctuggccttctcucaca

SEQ ID NO: 34112 - DNA, 23 bp, Artificial Sequence
  Synthetic
gcacaggaggacauaaacugagg

SEQ ID NO: 34113 - DNA, 17 bp, Artificial Sequence
  Synthetic
cgcgccucgatctcuga

SEQ ID NO: 34114 - DNA, 17 bp, Artificial Sequence
  Synthetic
gtgcagauggtgugcgt

SEQ ID NO: 34115 - DNA, 17 bp, Artificial Sequence
  Synthetic
gccgcugtggucaaggg

SEQ ID NO: 34116 - DNA, 20 bp, Artificial Sequence
  Synthetic
gccacgagutgtugaggaag

SEQ ID NO: 34117 - DNA, 19 bp, Artificial Sequence
  Synthetic
cggccugcgaagacatgut

SEQ ID NO: 34118 - DNA, 20 bp, Artificial Sequence
  Synthetic
aacgggaacutcgcgaugat

SEQ ID NO: 34119 - DNA, 17 bp, Artificial Sequence
  Synthetic
cugcuggccccagagac

SEQ ID NO: 34120 - DNA, 18 bp, Artificial Sequence
  Synthetic
guccgctuacggccaagt

SEQ ID NO: 34121 - DNA, 18 bp, Artificial Sequence
  Synthetic
ccggagccccuctctgut

SEQ ID NO: 34122 - DNA, 24 bp, Artificial Sequence
  Synthetic
ggaaacttgtguggcttggtttua

SEQ ID NO: 34123 - DNA, 25 bp, Artificial Sequence
  Synthetic
ttttcttgccaautttaagcucgca

SEQ ID NO: 34124 - DNA, 30 bp, Artificial Sequence
  Synthetic
tccaactatatcagcutgtattcctctuct

SEQ ID NO: 34125 - DNA, 27 bp, Artificial Sequence
  Synthetic
cgtccattttgcuaaaaaccatacuca

SEQ ID NO: 34126 - DNA, 18 bp, Artificial Sequence
  Synthetic
tguccgcccctcuaacga

SEQ ID NO: 34127 - DNA, 17 bp, Artificial Sequence
  Synthetic
gcugctccguccccaag

SEQ ID NO: 34128 - DNA, 21 bp, Artificial Sequence
  Synthetic
ccactgtcugggtcaaggaug

SEQ ID NO: 34129 - DNA, 21 bp, Artificial Sequence
  Synthetic
actcggcucctttctguagct

SEQ ID NO: 34130 - DNA, 17 bp, Artificial Sequence
  Synthetic
cctctgcucccacucgg

SEQ ID NO: 34131 - DNA, 17 bp, Artificial Sequence
  Synthetic
cgcccaccutgaugcct

SEQ ID NO: 34132 - DNA, 20 bp, Artificial Sequence
  Synthetic
gtggagccuggtcauggaaa

SEQ ID NO: 34133 - DNA, 18 bp, Artificial Sequence
  Synthetic
ggcagaugacgcucaggg

SEQ ID NO: 34134 - DNA, 21 bp, Artificial Sequence
  Synthetic
actgcaaggugtacagugacg

SEQ ID NO: 34135 - DNA, 22 bp, Artificial Sequence
  Synthetic
ctagacccaaauccucacgcaa

SEQ ID NO: 34136 - DNA, 18 bp, Artificial Sequence
  Synthetic
ctcgccuatcgctcugct

SEQ ID NO: 34137 - DNA, 17 bp, Artificial Sequence
  Synthetic
gcgucccccagacagug

SEQ ID NO: 34138 - DNA, 22 bp, Artificial Sequence
  Synthetic
gtatgcaggcaucctcagcuac

SEQ ID NO: 34139 - DNA, 26 bp, Artificial Sequence
  Synthetic
agctcagaaccuggtatctacttuct

SEQ ID NO: 34140 - DNA, 18 bp, Artificial Sequence
  Synthetic
gctgagagugggcgagut

SEQ ID NO: 34141 - DNA, 17 bp, Artificial Sequence
  Synthetic
ccagcccugctcugcac

SEQ ID NO: 34142 - DNA, 17 bp, Artificial Sequence
  Synthetic
cggtaggugcgguagcg

SEQ ID NO: 34143 - DNA, 20 bp, Artificial Sequence
  Synthetic
cttgaaggugagctgcucct

SEQ ID NO: 34144 - DNA, 20 bp, Artificial Sequence
  Synthetic
ggagagguggagaggctuca

SEQ ID NO: 34145 - DNA, 19 bp, Artificial Sequence
  Synthetic
cgtccuactggcaugaccc

SEQ ID NO: 34146 - DNA, 20 bp, Artificial Sequence
  Synthetic
ggtgtctgucctgggaguct

SEQ ID NO: 34147 - DNA, 18 bp, Artificial Sequence
  Synthetic
gccagggaugccacucac

SEQ ID NO: 34148 - DNA, 19 bp, Artificial Sequence
  Synthetic
ctgcccgcagguacaugat

SEQ ID NO: 34149 - DNA, 19 bp, Artificial Sequence
  Synthetic
cccacaccucagcactcug

SEQ ID NO: 34150 - DNA, 18 bp, Artificial Sequence
  Synthetic
gggacgacuccgtgttug

SEQ ID NO: 34151 - DNA, 23 bp, Artificial Sequence
  Synthetic
cacacagaccaaagcuctgtgua

SEQ ID NO: 34152 - DNA, 26 bp, Artificial Sequence
  Synthetic
atctgtcagcagauctcaagaaacug

SEQ ID NO: 34153 - DNA, 23 bp, Artificial Sequence
  Synthetic
gggagccatutcctatctcatug

SEQ ID NO: 34154 - DNA, 30 bp, Artificial Sequence
  Synthetic
cgtaatcucaccagcttataaatguaacac

SEQ ID NO: 34155 - DNA, 26 bp, Artificial Sequence
  Synthetic
caccctttaatcugttgttgctctut

SEQ ID NO: 34156 - DNA, 24 bp, Artificial Sequence
  Synthetic
cactcaugaacaagcaccaaacug

SEQ ID NO: 34157 - DNA, 28 bp, Artificial Sequence
  Synthetic
ccccgaaagttcucattcaaagtgtaut

SEQ ID NO: 34158 - DNA, 23 bp, Artificial Sequence
  Synthetic
aggcctttuaagagcaccttucc

SEQ ID NO: 34159 - DNA, 31 bp, Artificial Sequence
  Synthetic
ggtcctttaaggtugtttgtacacataatut

SEQ ID NO: 34160 - DNA, 27 bp, Artificial Sequence
  Synthetic
gaggccauaactcttgtagaaucaact

SEQ ID NO: 34161 - DNA, 30 bp, Artificial Sequence
  Synthetic
gccattcgatugcaaactatttagacttut

SEQ ID NO: 34162 - DNA, 24 bp, Artificial Sequence
  Synthetic
agggagaaauggcataaagcacut

SEQ ID NO: 34163 - DNA, 22 bp, Artificial Sequence
  Synthetic
tcacgccucctaaagttccuct

SEQ ID NO: 34164 - DNA, 28 bp, Artificial Sequence
  Synthetic
ggaaatggtcaaugtagttgagaaaguc

SEQ ID NO: 34165 - DNA, 27 bp, Artificial Sequence
  Synthetic
aaataattaccugcagctcatctccuc

SEQ ID NO: 34166 - DNA, 24 bp, Artificial Sequence
  Synthetic
gaccguaagaattaacuggcaggt

SEQ ID NO: 34167 - DNA, 22 bp, Artificial Sequence
  Synthetic
tttctgttgcutccgtcgttug

SEQ ID NO: 34168 - DNA, 21 bp, Artificial Sequence
  Synthetic
caguccgggaacagatuccac

SEQ ID NO: 34169 - DNA, 28 bp, Artificial Sequence
  Synthetic
acaaagaagauaagagcaccauacaaua

SEQ ID NO: 34170 - DNA, 28 bp, Artificial Sequence
  Synthetic
gaagauaaagggaggaacaguttttaug

SEQ ID NO: 34171 - DNA, 22 bp, Artificial Sequence
  Synthetic
gcttgtuggagaccaccttcug

SEQ ID NO: 34172 - DNA, 21 bp, Artificial Sequence
  Synthetic
ctggucaatcaccuggacgag

SEQ ID NO: 34173 - DNA, 22 bp, Artificial Sequence
  Synthetic
cccctgggagucacacatcaua

SEQ ID NO: 34174 - DNA, 22 bp, Artificial Sequence
  Synthetic
tcttcctatggauggctggcua

SEQ ID NO: 34175 - DNA, 24 bp, Artificial Sequence
  Synthetic
ctgaactgccugagaagatucaga

SEQ ID NO: 34176 - DNA, 28 bp, Artificial Sequence
  Synthetic
cctttcttuaaaaacaagcagccacuaa

SEQ ID NO: 34177 - DNA, 27 bp, Artificial Sequence
  Synthetic
ctagctcttgucgaagatttgagtuct

SEQ ID NO: 34178 - DNA, 33 bp, Artificial Sequence
  Synthetic
ttgtgttcttttuaacaggaagtactuaaacaa

SEQ ID NO: 34179 - DNA, 25 bp, Artificial Sequence
  Synthetic
cgagagaagcugtacttggatcuac

SEQ ID NO: 34180 - DNA, 22 bp, Artificial Sequence
  Synthetic
cttauggaagucgggaaggauc

SEQ ID NO: 34181 - DNA, 26 bp, Artificial Sequence
  Synthetic
aacaauaaactggaguacacaaggca

SEQ ID NO: 34182 - DNA, 32 bp, Artificial Sequence
  Synthetic
gtggttttagtttuccttacaaacagatauga

SEQ ID NO: 34183 - DNA, 30 bp, Artificial Sequence
  Synthetic
cctaatagctctucgctgttttatcactua

SEQ ID NO: 34184 - DNA, 26 bp, Artificial Sequence
  Synthetic
gaaagcctacaccauttttgcatgua

SEQ ID NO: 34185 - DNA, 29 bp, Artificial Sequence
  Synthetic
agaaccatctugcttcatacttttcugat

SEQ ID NO: 34186 - DNA, 30 bp, Artificial Sequence
  Synthetic
agtaaatatcccautcatcacttaatuggt

SEQ ID NO: 34187 - DNA, 24 bp, Artificial Sequence
  Synthetic
gggagcuagacatagcuagcaaag

SEQ ID NO: 34188 - DNA, 22 bp, Artificial Sequence
  Synthetic
tgcagcacuccacaacatcaut

SEQ ID NO: 34189 - DNA, 30 bp, Artificial Sequence
  Synthetic
gcactacgatguacactatagagaacauac

SEQ ID NO: 34190 - DNA, 26 bp, Artificial Sequence
  Synthetic
gattttattttucagtgccagcucct

SEQ ID NO: 34191 - DNA, 31 bp, Artificial Sequence
  Synthetic
ccatgatttaaaaauccaccagtaattguct

SEQ ID NO: 34192 - DNA, 28 bp, Artificial Sequence
  Synthetic
cagaattatugcaagtggactgugaaat

SEQ ID NO: 34193 - DNA, 32 bp, Artificial Sequence
  Synthetic
taactcataccugagctatcttaagaaauaca

SEQ ID NO: 34194 - DNA, 27 bp, Artificial Sequence
  Synthetic
tgattaatttgcaggutattgcgagug

SEQ ID NO: 34195 - DNA, 29 bp, Artificial Sequence
  Synthetic
caggtaagaaautaggaaatctcauggct

SEQ ID NO: 34196 - DNA, 22 bp, Artificial Sequence
  Synthetic
gctgtagauggtgcactugcat

SEQ ID NO: 34197 - DNA, 32 bp, Artificial Sequence
  Synthetic
tgcttacaattagguctttttgagagtaugaa

SEQ ID NO: 34198 - DNA, 26 bp, Artificial Sequence
  Synthetic
tctcagcaagaaauccuaaagaccag

SEQ ID NO: 34199 - DNA, 28 bp, Artificial Sequence
  Synthetic
cttctagggctutttgtttcctaacaug

SEQ ID NO: 34200 - DNA, 28 bp, Artificial Sequence
  Synthetic
ccaatcgacaugatgataataggucaga

SEQ ID NO: 34201 - DNA, 23 bp, Artificial Sequence
  Synthetic
ctgcaaaccucgcttugaagaag

SEQ ID NO: 34202 - DNA, 21 bp, Artificial Sequence
  Synthetic
gaagaagctcugctgcccaua

SEQ ID NO: 34203 - DNA, 31 bp, Artificial Sequence
  Synthetic
ctgcaaaactuactttcatcatctucagaat

SEQ ID NO: 34204 - DNA, 22 bp, Artificial Sequence
  Synthetic
ctggaaggcaaagucctucaca

SEQ ID NO: 34205 - DNA, 24 bp, Artificial Sequence
  Synthetic
cgatttgttuctgaaccatuggct

SEQ ID NO: 34206 - DNA, 33 bp, Artificial Sequence
  Synthetic
gaagaagaagagagaucaacaaautatagcaua

SEQ ID NO: 34207 - DNA, 23 bp, Artificial Sequence
  Synthetic
gcctctuggcattagaugaaggt

SEQ ID NO: 34208 - DNA, 32 bp, Artificial Sequence
  Synthetic
agaagatactccaauatgtttttcaagatgua

SEQ ID NO: 34209 - DNA, 23 bp, Artificial Sequence
  Synthetic
gatttggttcuagggtgctguga

SEQ ID NO: 34210 - DNA, 22 bp, Artificial Sequence
  Synthetic
acuatgtucaggagaccccact

SEQ ID NO: 34211 - DNA, 23 bp, Artificial Sequence
  Synthetic
gcttggttugagctgttugagga

SEQ ID NO: 34212 - DNA, 25 bp, Artificial Sequence
  Synthetic
cacggaaagtacuccagatggatut

SEQ ID NO: 34213 - DNA, 32 bp, Artificial Sequence
  Synthetic
ctgaatcatctaauaggtccttttcagaauca

SEQ ID NO: 34214 - DNA, 21 bp, Artificial Sequence
  Synthetic
attaccuccacctguggcaag

SEQ ID NO: 34215 - DNA, 23 bp, Artificial Sequence
  Synthetic
tctaactcctuctccagcagcua

SEQ ID NO: 34216 - DNA, 29 bp, Artificial Sequence
  Synthetic
gatgacaauaaaguagaggaaggtgauat

SEQ ID NO: 34217 - DNA, 30 bp, Artificial Sequence
  Synthetic
cacgtgtcctatautcagtattttgtggua

SEQ ID NO: 34218 - DNA, 25 bp, Artificial Sequence
  Synthetic
caaggtctucaatgataagcuccca

SEQ ID NO: 34219 - DNA, 27 bp, Artificial Sequence
  Synthetic
cctctgatuccttattttctttugcct

SEQ ID NO: 34220 - DNA, 26 bp, Artificial Sequence
  Synthetic
agtcauccaaagacauaccagacaga

SEQ ID NO: 34221 - DNA, 24 bp, Artificial Sequence
  Synthetic
tgatttaggagcauagcctgaugc

SEQ ID NO: 34222 - DNA, 28 bp, Artificial Sequence
  Synthetic
ccttcaagacucaagggtgataaugaaa

SEQ ID NO: 34223 - DNA, 27 bp, Artificial Sequence
  Synthetic
ttactatggaatutgcaccttccugaa

SEQ ID NO: 34224 - DNA, 28 bp, Artificial Sequence
  Synthetic
acctgaucaagaagaaaaacccttuaca

SEQ ID NO: 34225 - DNA, 24 bp, Artificial Sequence
  Synthetic
cctcgagagautgaaggcatgtut

SEQ ID NO: 34226 - DNA, 22 bp, Artificial Sequence
  Synthetic
gccuccaaaagccctagugaag

SEQ ID NO: 34227 - DNA, 23 bp, Artificial Sequence
  Synthetic
gttucggucaggagactgtauag

SEQ ID NO: 34228 - DNA, 22 bp, Artificial Sequence
  Synthetic
cagguagacagaugagccaaca

SEQ ID NO: 34229 - DNA, 30 bp, Artificial Sequence
  Synthetic
gcgtactaatacagguctttctgatctauc

SEQ ID NO: 34230 - DNA, 25 bp, Artificial Sequence
  Synthetic
gcacaaacuccagttttaagtccut

SEQ ID NO: 34231 - DNA, 24 bp, Artificial Sequence
  Synthetic
gtttccaggtucctgacctatuga

SEQ ID NO: 34232 - DNA, 28 bp, Artificial Sequence
  Synthetic
aaacatgugaactctattucaggaacca

SEQ ID NO: 34233 - DNA, 26 bp, Artificial Sequence
  Synthetic
ctcacccaaacaucctctgtttuaga

SEQ ID NO: 34234 - DNA, 30 bp, Artificial Sequence; identical to SEQ ID NO: 5832
  Synthetic

SEQ ID NO: 34235 - DNA, 23 bp, Artificial Sequence
  Synthetic
tttgcttgagcugctagaacuga

SEQ ID NO: 34236 - DNA, 19 bp, Artificial Sequence
  Synthetic
cagcucggccatcucagat

SEQ ID NO: 34237 - DNA, 33 bp, Artificial Sequence
  Synthetic
catagaattttcttaguttcattcttcctcuct

SEQ ID NO: 34238 - DNA, 27 bp, Artificial Sequence
  Synthetic
cctgtctauacaagtcatgagttuggg

SEQ ID NO: 34239 - DNA, 23 bp, Artificial Sequence
  Synthetic
agcttatuccaagctgagtugct

SEQ ID NO: 34240 - DNA, 27 bp, Artificial Sequence
  Synthetic
gccaataccaauagaattgttagguga

SEQ ID NO: 34241 - DNA, 27 bp, Artificial Sequence
  Synthetic
ttaaatcccauaggcaatagctuggaa

SEQ ID NO: 34242 - DNA, 23 bp, Artificial Sequence
  Synthetic
gcagagcccucagcaaatacuac

SEQ ID NO: 34243 - DNA, 27 bp, Artificial Sequence
  Synthetic
cagaaatgucccagaactuaaagcaat

SEQ ID NO: 34244 - DNA, 30 bp, Artificial Sequence
  Synthetic
ttcattttctaatuccatcctcttgtucca

SEQ ID NO: 34245 - DNA, 23 bp, Artificial Sequence
  Synthetic
tctgactccucttctggcttcut

SEQ ID NO: 34246 - DNA, 21 bp, Artificial Sequence
  Synthetic
agagcaagcugccctttctut

SEQ ID NO: 34247 - DNA, 21 bp, Artificial Sequence
  Synthetic
tgctctctgagucctcctcug

SEQ ID NO: 34248 - DNA, 21 bp, Artificial Sequence
  Synthetic
cttctgtacguggtgtccugt

SEQ ID NO: 34249 - DNA, 17 bp, Artificial Sequence
  Synthetic
gctgcuctgcgagucct

SEQ ID NO: 34250 - DNA, 22 bp, Artificial Sequence
  Synthetic
tcccctcaucctgtttcucact

SEQ ID NO: 34251 - DNA, 21 bp, Artificial Sequence
  Synthetic
gcttcttgagucctcctccug

SEQ ID NO: 34252 - DNA, 24 bp, Artificial Sequence
  Synthetic
ctcactcacautctccttcuggac

SEQ ID NO: 34253 - DNA, 23 bp, Artificial Sequence
  Synthetic
tctgatgacucctcactacugct

SEQ ID NO: 34254 - DNA, 23 bp, Artificial Sequence
  Synthetic
tcacacugggactctgtcuacaa

SEQ ID NO: 34255 - DNA, 20 bp, Artificial Sequence
  Synthetic
tgctctccgagutgtccaug

SEQ ID NO: 34256 - DNA, 23 bp, Artificial Sequence
  Synthetic
gaaccttcuccagcctttcttug

SEQ ID NO: 34257 - DNA, 23 bp, Artificial Sequence
  Synthetic
gaagaatcctcugctggtctcug

SEQ ID NO: 34258 - DNA, 22 bp, Artificial Sequence
  Synthetic
actccuggagacacctctctuc

SEQ ID NO: 34259 - DNA, 23 bp, Artificial Sequence
  Synthetic
tcctcactgcuctcagagtctuc

SEQ ID NO: 34260 - DNA, 25 bp, Artificial Sequence
  Synthetic
ccctccttaautcccttttcuccac

SEQ ID NO: 34261 - DNA, 22 bp, Artificial Sequence
  Synthetic
agtgactggucctcctctcuac

SEQ ID NO: 34262 - DNA, 23 bp, Artificial Sequence
  Synthetic
ccctacatgggaugtaacaccut

SEQ ID NO: 34263 - DNA, 21 bp, Artificial Sequence
  Synthetic
ctgtctucccaggaggtgtug

SEQ ID NO: 34264 - DNA, 24 bp, Artificial Sequence
  Synthetic
gttgaagcaguttccccaaatuct

SEQ ID NO: 34265 - DNA, 22 bp, Artificial Sequence
  Synthetic
gcagtggagcacaugaagguat

SEQ ID NO: 34266 - DNA, 21 bp, Artificial Sequence
  Synthetic
gtggacccuttgccttguaaa

SEQ ID NO: 34267 - DNA, 18 bp, Artificial Sequence
  Synthetic
gggcttgugcgggtguag

SEQ ID NO: 34268 - DNA, 20 bp, Artificial Sequence
  Synthetic
ccccatcucgctccattuca

SEQ ID NO: 34269 - DNA, 26 bp, Artificial Sequence
  Synthetic
cacatgtggguaagtatggaaguagg

SEQ ID NO: 34270 - DNA, 22 bp, Artificial Sequence
  Synthetic
gaccaggtcutacttgcccuaa

SEQ ID NO: 34271 - DNA, 21 bp, Artificial Sequence
  Synthetic
tgaagaactgucgctgctguc

SEQ ID NO: 34272 - DNA, 22 bp, Artificial Sequence
  Synthetic
gggcuaccaacaggatactgug

SEQ ID NO: 34273 - DNA, 21 bp, Artificial Sequence
  Synthetic
cctgagggaucggguagacag

SEQ ID NO: 34274 - DNA, 23 bp, Artificial Sequence
  Synthetic
tgaccccacautctctctccaua

SEQ ID NO: 34275 - DNA, 24 bp, Artificial Sequence
  Synthetic
cttctttcuttcctgtuccagcag

SEQ ID NO: 34276 - DNA, 24 bp, Artificial Sequence
  Synthetic
ctctgttuccccagaaaagaccuc

SEQ ID NO: 34277 - DNA, 23 bp, Artificial Sequence
  Synthetic
tgctttgauctccacctucaacc

SEQ ID NO: 34278 - DNA, 24 bp, Artificial Sequence
  Synthetic
ggaattcacuagtccucaggaggt

SEQ ID NO: 34279 - DNA, 24 bp, Artificial Sequence
  Synthetic
accctgaatgcucaggaatgatug

SEQ ID NO: 34280 - DNA, 27 bp, Artificial Sequence
  Synthetic
ttttctcttctcucagcggtttaaugt

SEQ ID NO: 34281 - DNA, 29 bp, Artificial Sequence
  Synthetic
aguattaaaatcaugaggagcaggacaaa

SEQ ID NO: 34282 - DNA, 26 bp, Artificial Sequence
  Synthetic
acagcctgaggugttttgaaatttug

SEQ ID NO: 34283 - DNA, 24 bp, Artificial Sequence
  Synthetic
aataatgccuccttctcucagcag

SEQ ID NO: 34284 - DNA, 28 bp, Artificial Sequence
  Synthetic
actaatggtgtttuctctctctctcuct

SEQ ID NO: 34285 - DNA, 31 bp, Artificial Sequence
  Synthetic
gcatcaaacaagutaaatgattcaagttucc

SEQ ID NO: 34286 - DNA, 27 bp, Artificial Sequence
  Synthetic
ggatctttatugacgatcttgggtgut

SEQ ID NO: 34287 - DNA, 23 bp, Artificial Sequence
  Synthetic
gtcaaccagtuatgggaagggut

SEQ ID NO: 34288 - DNA, 28 bp, Artificial Sequence
  Synthetic
gaattgaacatucacttgctgtttcuga

SEQ ID NO: 34289 - DNA, 24 bp, Artificial Sequence
  Synthetic
ctgccugagacaggaataatcucc

SEQ ID NO: 34290 - DNA, 27 bp, Artificial Sequence
  Synthetic
ctcagattaatugctgtgctttuggat

SEQ ID NO: 34291 - DNA, 23 bp, Artificial Sequence
  Synthetic
gcattttgggaugttccacugac

SEQ ID NO: 34292 - DNA, 21 bp, Artificial Sequence
  Synthetic
autcaagagcucagacgccaa

SEQ ID NO: 34293 - DNA, 27 bp, Artificial Sequence
  Synthetic
gttctggguccatttcagaatcuacat

SEQ ID NO: 34294 - DNA, 21 bp, Artificial Sequence
  Synthetic
gagtagacacggugcagucaa

SEQ ID NO: 34295 - DNA, 31 bp, Artificial Sequence
  Synthetic
ctggaatctggaucatcctgaaaagauaaat

SEQ ID NO: 34296 - DNA, 28 bp, Artificial Sequence
  Synthetic
ttgattcttattgaugccccatgtttug

SEQ ID NO: 34297 - DNA, 30 bp, Artificial Sequence
  Synthetic
tgcctttaacatguataatcactgcaagua

SEQ ID NO: 34298 - DNA, 22 bp, Artificial Sequence
  Synthetic
gctggaaaagcaaucgtcaugt

SEQ ID NO: 34299 - DNA, 30 bp, Artificial Sequence
  Synthetic
tctgtctcgaaaauaaataagaggccatut

SEQ ID NO: 34300 - DNA, 25 bp, Artificial Sequence
  Synthetic
gcagaacaguatgatgtucccaagg

SEQ ID NO: 34301 - DNA, 27 bp, Artificial Sequence
  Synthetic
agaatgttcagaaucaaaagccaguga

SEQ ID NO: 34302 - DNA, 23 bp, Artificial Sequence
  Synthetic
gattccagagaaccutggccuaa

SEQ ID NO: 34303 - DNA, 25 bp, Artificial Sequence
  Synthetic
gcaagcccaauaaagagtcaccaut

SEQ ID NO: 34304 - DNA, 28 bp, Artificial Sequence
  Synthetic
cgaagtgatuccattagtatctguacca

SEQ ID NO: 34305 - DNA, 27 bp, Artificial Sequence
  Synthetic
actaatgagaggcutctgttttgctut

SEQ ID NO: 34306 - DNA, 25 bp, Artificial Sequence
  Synthetic
tgctctctcuccaaaattcaaccug

SEQ ID NO: 34307 - DNA, 24 bp, Artificial Sequence
  Synthetic
ggagagccuttggtaucagaagag

SEQ ID NO: 34308 - DNA, 27 bp, Artificial Sequence
  Synthetic
ctcttacagatccutaggtgaggaugt

SEQ ID NO: 34309 - DNA, 21 bp, Artificial Sequence
  Synthetic
caggacuccgguaagagacca

SEQ ID NO: 34310 - DNA, 23 bp, Artificial Sequence
  Synthetic
attatctggcgagutgtctgcut

SEQ ID NO: 34311 - DNA, 21 bp, Artificial Sequence
  Synthetic
cagttttcutttgcgcucggt

SEQ ID NO: 34312 - DNA, 27 bp, Artificial Sequence
  Synthetic
gaagatggtgaccauttttctgatgug

SEQ ID NO: 34313 - DNA, 21 bp, Artificial Sequence
  Synthetic
tgttcatgcgcutacgaggut

SEQ ID NO: 34314 - DNA, 24 bp, Artificial Sequence
  Synthetic
caagcatactugaggaaccacuga

SEQ ID NO: 34315 - DNA, 29 bp, Artificial Sequence
  Synthetic
gacaatgtttaucagcactttctccaaut

SEQ ID NO: 34316 - DNA, 25 bp, Artificial Sequence
  Synthetic
attacaacaatuttggcctguggac

SEQ ID NO: 34317 - DNA, 21 bp, Artificial Sequence
  Synthetic
aaaacggagccucccttucaa

SEQ ID NO: 34318 - DNA, 28 bp, Artificial Sequence
  Synthetic
tgtgcccagtutctaaatcatctaaugt

SEQ ID NO: 34319 - DNA, 32 bp, Artificial Sequence
  Synthetic
aaaaauaacataccttttuagaaaggccaagg

SEQ ID NO: 34320 - DNA, 30 bp, Artificial Sequence
  Synthetic
ggataagagatttuggacatgtgtgtuagt

SEQ ID NO: 34321 - DNA, 28 bp, Artificial Sequence
  Synthetic
gaaggtgaaaagaucaggaactgaguaa

SEQ ID NO: 34322 - DNA, 26 bp, Artificial Sequence
  Synthetic
ctttaacccacugacactggtttuac

SEQ ID NO: 34323 - DNA, 28 bp, Artificial Sequence
  Synthetic
gaggaagaccgutcgatatctacttuac

SEQ ID NO: 34324 - DNA, 21 bp, Artificial Sequence
  Synthetic
gccttcuacccttgtguggaa

SEQ ID NO: 34325 - DNA, 28 bp, Artificial Sequence
  Synthetic
gaggttttacaautagactgguccacat

SEQ ID NO: 34326 - DNA, 22 bp, Artificial Sequence
  Synthetic
gctgggucaaagatcctugcat

SEQ ID NO: 34327 - DNA, 31 bp, Artificial Sequence
  Synthetic
ccagtggcaataugatgaaaagtattttugt

SEQ ID NO: 34328 - DNA, 26 bp, Artificial Sequence
  Synthetic
cagacagacatugctaatccttacut

SEQ ID NO: 34329 - DNA, 28 bp, Artificial Sequence
  Synthetic
ctcccacatcaugtctcatcttaucaat

SEQ ID NO: 34330 - DNA, 31 bp, Artificial Sequence
  Synthetic
aataagtaatuccacccagagatttugaagt

SEQ ID NO: 34331 - DNA, 25 bp, Artificial Sequence
  Synthetic
gagccagctautccatttctctuct

SEQ ID NO: 34332 - DNA, 23 bp, Artificial Sequence
  Synthetic
ctgtgggauagactctgaaugca

SEQ ID NO: 34333 - DNA, 25 bp, Artificial Sequence
  Synthetic
aagcaacugcaaagaggagaaagua

SEQ ID NO: 34334 - DNA, 22 bp, Artificial Sequence
  Synthetic
gcagaggtcucaggaagtcuga

SEQ ID NO: 34335 - DNA, 25 bp, Artificial Sequence
  Synthetic
tcagctgcagaaucctgaaatgaut

SEQ ID NO: 34336 - DNA, 25 bp, Artificial Sequence
  Synthetic
gaatgaggcucagagagggtagtua

SEQ ID NO: 34337 - DNA, 26 bp, Artificial Sequence
  Synthetic
tccccacaacuaaaacactcatctuc

SEQ ID NO: 34338 - DNA, 22 bp, Artificial Sequence
  Synthetic
tcatccacaccutcggactgua

SEQ ID NO: 34339 - DNA, 25 bp, Artificial Sequence
  Synthetic
ggaaatgaaaagcaucccttcucga

SEQ ID NO: 34340 - DNA, 22 bp, Artificial Sequence
  Synthetic
agagcaaucaacaggaauggct

SEQ ID NO: 34341 - DNA, 23 bp, Artificial Sequence
  Synthetic
ggaaaccaaggautgggattugg

SEQ ID NO: 34342 - DNA, 22 bp, Artificial Sequence
  Synthetic
caaccacuggaaagacctcugg

SEQ ID NO: 34343 - DNA, 21 bp, Artificial Sequence
  Synthetic
tttctcaggaggugggaguct

SEQ ID NO: 34344 - DNA, 21 bp, Artificial Sequence
  Synthetic
gcttcaccucatcaggucaca

SEQ ID NO: 34345 - DNA, 22 bp, Artificial Sequence
  Synthetic
gcaggaggcugagaaagaaguc

SEQ ID NO: 34346 - DNA, 20 bp, Artificial Sequence
  Synthetic
ccagcaacuacctgcactug

SEQ ID NO: 34347 - DNA, 22 bp, Artificial Sequence
  Synthetic
cagtgtctguccagccactaug

SEQ ID NO: 34348 - DNA, 22 bp, Artificial Sequence
  Synthetic
cttccagucacaagtgugcaga

SEQ ID NO: 34349 - DNA, 20 bp, Artificial Sequence
  Synthetic
acaaccauaagcccccacug

SEQ ID NO: 34350 - DNA, 17 bp, Artificial Sequence
  Synthetic
cgaccucgcgagcctuc

SEQ ID NO: 34351 - DNA, 17 bp, Artificial Sequence
  Synthetic
gacucggcgcggaucat

SEQ ID NO: 34352 - DNA, 22 bp, Artificial Sequence
  Synthetic
agtggttttgucccgttttugc

SEQ ID NO: 34353 - DNA, 23 bp, Artificial Sequence
  Synthetic
cgaugggaauagggaaagctuac

SEQ ID NO: 34354 - DNA, 22 bp, Artificial Sequence
  Synthetic
ttgcccagaacgggutttcaua

SEQ ID NO: 34355 - DNA, 24 bp, Artificial Sequence
  Synthetic
tggtgacatguttggtgaacucat

SEQ ID NO: 34356 - DNA, 23 bp, Artificial Sequence
  Synthetic
gcgtaagugaaacaggugcaaag

SEQ ID NO: 34357 - DNA, 30 bp, Artificial Sequence
  Synthetic
tgaagacuctaaaaugaaacacagacaagt

SEQ ID NO: 34358 - DNA, 20 bp, Artificial Sequence
  Synthetic
ctgccttugaacctcctgug

SEQ ID NO: 34359 - DNA, 22 bp, Artificial Sequence
  Synthetic
aacaggcucaagacaagcauct

SEQ ID NO: 34360 - DNA, 28 bp, Artificial Sequence
  Synthetic
ctcaataagcugaaacaagaaagugacc

SEQ ID NO: 34361 - DNA, 25 bp, Artificial Sequence
  Synthetic
tggcacggcuttaagtcatauaaga

SEQ ID NO: 34362 - DNA, 23 bp, Artificial Sequence
  Synthetic
cgcagtggagutggattctucag

SEQ ID NO: 34363 - DNA, 31 bp, Artificial Sequence
  Synthetic
tgcaacattttgaagautattttcagtgcut

SEQ ID NO: 34364 - DNA, 28 bp, Artificial Sequence
  Synthetic
gtagctacattaaugcaggttgaaaauc

SEQ ID NO: 34365 - DNA, 25 bp, Artificial Sequence
  Synthetic
ggtttattgcutctgtagtcugggt

SEQ ID NO: 34366 - DNA, 29 bp, Artificial Sequence
  Synthetic
acacauacttatgaauaaagccaaaccct

SEQ ID NO: 34367 - DNA, 24 bp, Artificial Sequence
  Synthetic
gctttgggaacutggatgactuac

SEQ ID NO: 34368 - DNA, 22 bp, Artificial Sequence
  Synthetic
cccatctagugggtggcattut

SEQ ID NO: 34369 - DNA, 30 bp, Artificial Sequence
  Synthetic
ggctatttctgaugaactcttggtaatgua

SEQ ID NO: 34370 - DNA, 22 bp, Artificial Sequence
  Synthetic
aggcctagcaccutgataccua

SEQ ID NO: 34371 - DNA, 23 bp, Artificial Sequence
  Synthetic
cgaatcttcugcagctccaucag

SEQ ID NO: 34372 - DNA, 31 bp, Artificial Sequence
  Synthetic
tgtgtctatgtguattaaaacagcatatugt

SEQ ID NO: 34373 - DNA, 25 bp, Artificial Sequence
  Synthetic
cctctgaagtuggcaagcatatcut

SEQ ID NO: 34374 - DNA, 30 bp, Artificial Sequence
  Synthetic
ggcaaatctucacagactaattatgucact

SEQ ID NO: 34375 - DNA, 25 bp, Artificial Sequence
  Synthetic
ggccactgtuataagctttcaagut

SEQ ID NO: 34376 - DNA, 27 bp, Artificial Sequence
  Synthetic
actaugaagacagaacuacagaaagcc

SEQ ID NO: 34377 - DNA, 28 bp, Artificial Sequence
  Synthetic
caagtgacautatcttgugaacaaccaa

SEQ ID NO: 34378 - DNA, 23 bp, Artificial Sequence
  Synthetic
actatcaggcuttctgcaagugg

SEQ ID NO: 34379 - DNA, 28 bp, Artificial Sequence
  Synthetic
ccagaggaaaacaugaatuacacccaat

SEQ ID NO: 34380 - DNA, 27 bp, Artificial Sequence
  Synthetic
gaaatatcuggcaaacgagacaaauca

SEQ ID NO: 34381 - DNA, 29 bp, Artificial Sequence
  Synthetic
gctatcctcaggaagugtatacgcttuac

SEQ ID NO: 34382 - DNA, 24 bp, Artificial Sequence
  Synthetic
ctttccutccttttcuccaaggct

SEQ ID NO: 34383 - DNA, 27 bp, Artificial Sequence
  Synthetic
ccaggatgtguccaaatccatgttaua

SEQ ID NO: 34384 - DNA, 24 bp, Artificial Sequence
  Synthetic
gcagaaauaccaggcagagtgtuc

SEQ ID NO: 34385 - DNA, 31 bp, Artificial Sequence
  Synthetic
cttccacagatttucttcttctcttttcauc

SEQ ID NO: 34386 - DNA, 25 bp, Artificial Sequence
  Synthetic
ggagaaggaguacgagatugaaagg

SEQ ID NO: 34387 - DNA, 30 bp, Artificial Sequence
  Synthetic
tctatcaagcuggtttctaagattttugga

SEQ ID NO: 34388 - DNA, 26 bp, Artificial Sequence
  Synthetic
gcuctgagataaugcagaagaagcag

SEQ ID NO: 34389 - DNA, 23 bp, Artificial Sequence
  Synthetic
ctcctccugaaactcagcttuga

SEQ ID NO: 34390 - DNA, 24 bp, Artificial Sequence
  Synthetic
tttgagaccgagaucaacaucacc

SEQ ID NO: 34391 - DNA, 21 bp, Artificial Sequence
  Synthetic
agtggccutttgctgtuggat

SEQ ID NO: 34392 - DNA, 30 bp, Artificial Sequence
  Synthetic
aaaaccatccaggauaaaaacaaggagaua

SEQ ID NO: 34393 - DNA, 23 bp, Artificial Sequence
  Synthetic
cagttcttgcucctgaacctuca

SEQ ID NO: 34394 - DNA, 20 bp, Artificial Sequence
  Synthetic
gaggagcugaatcggcugaa

SEQ ID NO: 34395 - DNA, 23 bp, Artificial Sequence
  Synthetic
gaggtcatccucactcctctuct

SEQ ID NO: 34396 - DNA, 24 bp, Artificial Sequence
  Synthetic
tcacttgaggaaugagcattucca

SEQ ID NO: 34397 - DNA, 22 bp, Artificial Sequence
  Synthetic
ggctcctuagttccaagauggt

SEQ ID NO: 34398 - DNA, 27 bp, Artificial Sequence
  Synthetic
catttcttucttcttcaatuccaggca

SEQ ID NO: 34399 - DNA, 25 bp, Artificial Sequence
  Synthetic
gaatttgctguttctcacacuccag

SEQ ID NO: 34400 - DNA, 25 bp, Artificial Sequence
  Synthetic
gtctuaggagtgagaucgaaagact

SEQ ID NO: 34401 - DNA, 21 bp, Artificial Sequence
  Synthetic
cccaucaaacaccagctugga

SEQ ID NO: 34402 - DNA, 25 bp, Artificial Sequence
  Synthetic
gaagaagtcaguggaagaagtugct

SEQ ID NO: 34403 - DNA, 21 bp, Artificial Sequence
  Synthetic
tcagcttcucattccgauggg

SEQ ID NO: 34404 - DNA, 28 bp, Artificial Sequence
  Synthetic
agtatctgttucagaagccaucaagaaa

SEQ ID NO: 34405 - DNA, 24 bp, Artificial Sequence
  Synthetic
ttttggugactggauccacaaagt

SEQ ID NO: 34406 - DNA, 23 bp, Artificial Sequence
  Synthetic
tgaccgtcacugagctaguagat

SEQ ID NO: 34407 - DNA, 21 bp, Artificial Sequence
  Synthetic
actccagagcaguaccagguc

SEQ ID NO: 34408 - DNA, 25 bp, Artificial Sequence
  Synthetic
agctgtcacugggtataatgaucct

SEQ ID NO: 34409 - DNA, 30 bp, Artificial Sequence
  Synthetic
ccctcttatatgcuatgtcaactgguaaac

SEQ ID NO: 34410 - DNA, 22 bp, Artificial Sequence
  Synthetic
gatgaggaaauagggcuctguc

SEQ ID NO: 34411 - DNA, 28 bp, Artificial Sequence
  Synthetic
gatggttatttcutcccattcacatucc

SEQ ID NO: 34412 - DNA, 22 bp, Artificial Sequence
  Synthetic
ctcagccucactcaatttgcug

SEQ ID NO: 34413 - DNA, 24 bp, Artificial Sequence
  Synthetic
aggttttcugtgtcaaagauggct

SEQ ID NO: 34414 - DNA, 21 bp, Artificial Sequence
  Synthetic
gtcactucaggacgcagtcuc

SEQ ID NO: 34415 - DNA, 20 bp, Artificial Sequence
  Synthetic
acutccgggucaacaagacc

SEQ ID NO: 34416 - DNA, 22 bp, Artificial Sequence
  Synthetic
ccagcagcuatgccaaaaucct

SEQ ID NO: 34417 - DNA, 22 bp, Artificial Sequence
  Synthetic
cggagccgaagacaugttguaa

SEQ ID NO: 34418 - DNA, 20 bp, Artificial Sequence
  Synthetic
ccgctcacugacagacacuc

SEQ ID NO: 34419 - DNA, 22 bp, Artificial Sequence
  Synthetic
gccggtctaaugtaggcaagua

SEQ ID NO: 34420 - DNA, 23 bp, Artificial Sequence
  Synthetic
caggcaaucccattttctcugga

SEQ ID NO: 34421 - DNA, 22 bp, Artificial Sequence
  Synthetic
cgcttacccucaagaaccugaa

SEQ ID NO: 34422 - DNA, 23 bp, Artificial Sequence
  Synthetic
acccttaaucctgcctcauagaa

SEQ ID NO: 34423 - DNA, 26 bp, Artificial Sequence
  Synthetic
gtagagaggatugaagacagccauag

SEQ ID NO: 34424 - DNA, 21 bp, Artificial Sequence
  Synthetic
caccttcttuagctccccgut

SEQ ID NO: 34425 - DNA, 19 bp, Artificial Sequence
  Synthetic
ctcacacgutcgucaccac

SEQ ID NO: 34426 - DNA, 21 bp, Artificial Sequence
  Synthetic
gtaggtgatugcttgctgcug

SEQ ID NO: 34427 - DNA, 22 bp, Artificial Sequence
  Synthetic
cccutctacccucaacgacaaa

SEQ ID NO: 34428 - DNA, 18 bp, Artificial Sequence
  Synthetic
gtgccuggactcguacgg

SEQ ID NO: 34429 - DNA, 20 bp, Artificial Sequence
  Synthetic
cgucatgcaauacgccgact

SEQ ID NO: 34430 - DNA, 19 bp, Artificial Sequence
  Synthetic
cggugttcugcggagaact

SEQ ID NO: 34431 - DNA, 19 bp, Artificial Sequence
  Synthetic
gccaacaugggcagtcuga

SEQ ID NO: 34432 - DNA, 22 bp, Artificial Sequence
  Synthetic
gctggcauaggttccactguat

SEQ ID NO: 34433 - DNA, 28 bp, Artificial Sequence
  Synthetic
gcttggttuacaacagggaataggttua

SEQ ID NO: 34434 - DNA, 17 bp, Artificial Sequence
  Synthetic
ccacccgguggttgucg

SEQ ID NO: 34435 - DNA, 25 bp, Artificial Sequence
  Synthetic
ctaaaaucagagccauccagacagt

SEQ ID NO: 34436 - DNA, 25 bp, Artificial Sequence
  Synthetic
gcctatactucaccatggagactuc

SEQ ID NO: 34437 - DNA, 28 bp, Artificial Sequence
  Synthetic
aacaagtgattugatgatgtgttuacct

SEQ ID NO: 34438 - DNA, 25 bp, Artificial Sequence
  Synthetic
gtgaagtgaugcccgatgacattua

SEQ ID NO: 34439 - DNA, 29 bp, Artificial Sequence
  Synthetic
ggcattttcattcugacttggtatttugt

SEQ ID NO: 34440 - DNA, 27 bp, Artificial Sequence
  Synthetic
tgaatgagtgaaugtgtgaatggauga

SEQ ID NO: 34441 - DNA, 26 bp, Artificial Sequence
  Synthetic
agtcctcaactucttccgtttctaug

SEQ ID NO: 34442 - DNA, 27 bp, Artificial Sequence
  Synthetic
ttctgctguaggagagagagaacuaaa

SEQ ID NO: 34443 - DNA, 22 bp, Artificial Sequence
  Synthetic
cugcaaaagcaucaggaggaga

SEQ ID NO: 34444 - DNA, 22 bp, Artificial Sequence
  Synthetic
ctccccucctactacacauggt

SEQ ID NO: 34445 - DNA, 23 bp, Artificial Sequence
  Synthetic
cagccacatcuggcttgaaatuc

SEQ ID NO: 34446 - DNA, 23 bp, Artificial Sequence
  Synthetic
gcttccugagatcatttggucct

SEQ ID NO: 34447 - DNA, 21 bp, Artificial Sequence
  Synthetic
ggttctgcugctctccaaucc

SEQ ID NO: 34448 - DNA, 21 bp, Artificial Sequence
  Synthetic
gtcttccuggcaaggguaaac

SEQ ID NO: 34449 - DNA, 23 bp, Artificial Sequence
  Synthetic
gctgcttatccutcagccactuc

SEQ ID NO: 34450 - DNA, 23 bp, Artificial Sequence
  Synthetic
gcagtgagaugaggatctgcuct

SEQ ID NO: 34451 - DNA, 23 bp, Artificial Sequence
  Synthetic
agacttcccccutgttcctacuc

SEQ ID NO: 34452 - DNA, 22 bp, Artificial Sequence
  Synthetic
acgtcttagcugaacgtgagug

SEQ ID NO: 34453 - DNA, 18 bp, Artificial Sequence
  Synthetic
gaucaccggcaugcagga

SEQ ID NO: 34454 - DNA, 24 bp, Artificial Sequence
  Synthetic
gaauggacaggaucagacagagac

SEQ ID NO: 34455 - DNA, 23 bp, Artificial Sequence
  Synthetic
catcctgcucacactttctucct

SEQ ID NO: 34456 - DNA, 19 bp, Artificial Sequence
  Synthetic
ggguaggagacgtccuggt

SEQ ID NO: 34457 - DNA, 20 bp, Artificial Sequence
  Synthetic
gctgtccuggtgccguagat

SEQ ID NO: 34458 - DNA, 21 bp, Artificial Sequence
  Synthetic
ggagatgttugtgcacccuga

SEQ ID NO: 34459 - DNA, 22 bp, Artificial Sequence
  Synthetic
atgcaggaagaugaggccauac

SEQ ID NO: 34460 - DNA, 22 bp, Artificial Sequence
  Synthetic
gcaagagacaaggutggtguga

SEQ ID NO: 34461 - DNA, 27 bp, Artificial Sequence
  Synthetic
tccatgaccugatttattccttgucag

SEQ ID NO: 34462 - DNA, 22 bp, Artificial Sequence
  Synthetic
tgcttgtuaggctggtagtucc

SEQ ID NO: 34463 - DNA, 21 bp, Artificial Sequence
  Synthetic
aaccagccacuacccttccua

SEQ ID NO: 34464 - DNA, 19 bp, Artificial Sequence
  Synthetic
cacttgggucccacaggut

SEQ ID NO: 34465 - DNA, 24 bp, Artificial Sequence
  Synthetic
cccacctcucccttaagagaauga

SEQ ID NO: 34466 - DNA, 19 bp, Artificial Sequence
  Synthetic
gaggagcauccccacacug

SEQ ID NO: 34467 - DNA, 24 bp, Artificial Sequence
  Synthetic
aggacacatuccttgtgtgtgtut

SEQ ID NO: 34468 - DNA, 19 bp, Artificial Sequence
  Synthetic
cccatcccaccugccatug

SEQ ID NO: 34469 - DNA, 23 bp, Artificial Sequence
  Synthetic
ttggcuggaggataaacacucag

SEQ ID NO: 34470 - DNA, 20 bp, Artificial Sequence
  Synthetic
ccggcutcccaauacccaag

SEQ ID NO: 34471 - DNA, 24 bp, Artificial Sequence
  Synthetic
tgtgacccugactcttattcucca

SEQ ID NO: 34472 - DNA, 21 bp, Artificial Sequence
  Synthetic
tgcagaggagutccagcucaa

SEQ ID NO: 34473 - DNA, 28 bp, Artificial Sequence
  Synthetic
gaaggagaggagguttttgactctaauc

SEQ ID NO: 34474 - DNA, 21 bp, Artificial Sequence
  Synthetic
ttggccccugagacgatacua

SEQ ID NO: 34475 - DNA, 25 bp, Artificial Sequence
  Synthetic
ctcatctguggtgtatctgttuccc

SEQ ID NO: 34476 - DNA, 21 bp, Artificial Sequence
  Synthetic
ggcaaaacaucaccccaucct

SEQ ID NO: 34477 - DNA, 23 bp, Artificial Sequence
  Synthetic
cctgtgtccutgtctctgcttuc

SEQ ID NO: 34478 - DNA, 25 bp, Artificial Sequence
  Synthetic
gguaagagaagagagucagagacac

SEQ ID NO: 34479 - DNA, 28 bp, Artificial Sequence
  Synthetic
ttctctaatatctugtctgccttcucct

SEQ ID NO: 34480 - DNA, 23 bp, Artificial Sequence
  Synthetic
caccccacaggaaacutgtcaua

SEQ ID NO: 34481 - DNA, 23 bp, Artificial Sequence
  Synthetic
ggtctgaccauctgctttcucag

SEQ ID NO: 34482 - DNA, 21 bp, Artificial Sequence
  Synthetic
actcaggaugcttggtgctug

SEQ ID NO: 34483 - DNA, 24 bp, Artificial Sequence
  Synthetic
gtttaattugggagcatggctgug

SEQ ID NO: 34484 - DNA, 22 bp, Artificial Sequence
  Synthetic
ggcagacagacuaatgcuaggg

SEQ ID NO: 34485 - DNA, 22 bp, Artificial Sequence
  Synthetic
gatccttccucctgggaatcug

SEQ ID NO: 34486 - DNA, 22 bp, Artificial Sequence
  Synthetic
caggtgaacuctcagcuggaaa

SEQ ID NO: 34487 - DNA, 20 bp, Artificial Sequence
  Synthetic
gaagctgagutcccccacuc

SEQ ID NO: 34488 - DNA, 20 bp, Artificial Sequence
  Synthetic
aagagctgcuttccagcugt

SEQ ID NO: 34489 - DNA, 24 bp, Artificial Sequence
  Synthetic
tgacaactccucttccctctguag

SEQ ID NO: 34490 - DNA, 23 bp, Artificial Sequence
  Synthetic
agagagaacautacccaggguga

SEQ ID NO: 34491 - DNA, 29 bp, Artificial Sequence
  Synthetic
ctgaaccctaccuttcataacttcucaat

SEQ ID NO: 34492 - DNA, 21 bp, Artificial Sequence
  Synthetic
tcaactgacuggctgactuca

SEQ ID NO: 34493 - DNA, 21 bp, Artificial Sequence
  Synthetic
ctgtccutccctcucacacag

SEQ ID NO: 34494 - DNA, 23 bp, Artificial Sequence
  Synthetic
gaaggcagugaagagaggagaug

SEQ ID NO: 34495 - DNA, 23 bp, Artificial Sequence
  Synthetic
tcttaggagcutggtcctuccaa

SEQ ID NO: 34496 - DNA, 27 bp, Artificial Sequence
  Synthetic
agagccauatgaataaugagacaaggg

SEQ ID NO: 34497 - DNA, 23 bp, Artificial Sequence
  Synthetic
gggccacuggtcacattttcuat

SEQ ID NO: 34498 - DNA, 26 bp, Artificial Sequence
  Synthetic
acagacaaaaucccagcagacattua

SEQ ID NO: 34499 - DNA, 24 bp, Artificial Sequence
  Synthetic
ccttgttgcucatgctttgaaucc

SEQ ID NO: 34500 - DNA, 22 bp, Artificial Sequence
  Synthetic
ggtgggauctcctatccaucac

SEQ ID NO: 34501 - DNA, 20 bp, Artificial Sequence
  Synthetic
tggagguctgaccgucacac

SEQ ID NO: 34502 - DNA, 24 bp, Artificial Sequence
  Synthetic
agacggcaugaatggataaaacug

SEQ ID NO: 34503 - DNA, 25 bp, Artificial Sequence
  Synthetic
ggtaagtguagtggcaaatguaggg

SEQ ID NO: 34504 - DNA, 22 bp, Artificial Sequence
  Synthetic
ctcccttcccuacctatccuca

SEQ ID NO: 34505 - DNA, 19 bp, Artificial Sequence
  Synthetic
acagggucgtgtccucact

SEQ ID NO: 34506 - DNA, 22 bp, Artificial Sequence
  Synthetic
ccugggagaauaagggaagugt

SEQ ID NO: 34507 - DNA, 21 bp, Artificial Sequence
  Synthetic
ccctcccuatgcctccuaacc

SEQ ID NO: 34508 - DNA, 25 bp, Artificial Sequence
  Synthetic
caaaagaagccccuttccagaacua

SEQ ID NO: 34509 - DNA, 23 bp, Artificial Sequence
  Synthetic
gaagggtgaauttggagagugct

SEQ ID NO: 34510 - DNA, 23 bp, Artificial Sequence
  Synthetic
tcctccauatctttccugcccat

SEQ ID NO: 34511 - DNA, 24 bp, Artificial Sequence
  Synthetic
tcttttgcatuctcttcccacucc

SEQ ID NO: 34512 - DNA, 23 bp, Artificial Sequence
  Synthetic
gaaggctcagaugagcacauaga

SEQ ID NO: 34513 - DNA, 24 bp, Artificial Sequence
  Synthetic
ggcaguggaaauaggagaagcaag

SEQ ID NO: 34514 - DNA, 26 bp, Artificial Sequence
  Synthetic
gaucgaaaccaauaagaagcaatuct

SEQ ID NO: 34515 - DNA, 22 bp, Artificial Sequence
  Synthetic
gggcccuacgattacacctaug

SEQ ID NO: 34516 - DNA, 21 bp, Artificial Sequence
  Synthetic
atcaagacgucatgggcugag

SEQ ID NO: 34517 - DNA, 23 bp, Artificial Sequence
  Synthetic
actcttctccutctctcctuggg

SEQ ID NO: 34518 - DNA, 22 bp, Artificial Sequence
  Synthetic
ggacacagtuccaggaagacug

SEQ ID NO: 34519 - DNA, 22 bp, Artificial Sequence
  Synthetic
cccaggcauctctcctcctuag

SEQ ID NO: 34520 - DNA, 22 bp, Artificial Sequence
  Synthetic
ggttcctgautttgtggccugt

SEQ ID NO: 34521 - DNA, 24 bp, Artificial Sequence
  Synthetic
cgctccatcuctctcatgtcttug

SEQ ID NO: 34522 - DNA, 26 bp, Artificial Sequence
  Synthetic
gtctcaaggguttcacagttuagagt

SEQ ID NO: 34523 - DNA, 22 bp, Artificial Sequence
  Synthetic
cgcutcctgtaugaagaccaga

SEQ ID NO: 34524 - DNA, 19 bp, Artificial Sequence
  Synthetic
gccuaccccaccatgucac

SEQ ID NO: 34525 - DNA, 24 bp, Artificial Sequence
  Synthetic
tcctgataaucatggactcuccca

SEQ ID NO: 34526 - DNA, 18 bp, Artificial Sequence
  Synthetic
cucttaccugcccagcct

SEQ ID NO: 34527 - DNA, 17 bp, Artificial Sequence
  Synthetic
ccgcagccuctgaccuc

SEQ ID NO: 34528 - DNA, 25 bp, Artificial Sequence
  Synthetic
gacccacccauactatatgacaucc

SEQ ID NO: 34529 - DNA, 26 bp, Artificial Sequence
  Synthetic
cagtgagttgucttcccttgttcuat

SEQ ID NO: 34530 - DNA, 22 bp, Artificial Sequence
  Synthetic
gctgaagggauttgtgugggaa

SEQ ID NO: 34531 - DNA, 28 bp, Artificial Sequence
  Synthetic
gccttaacaguagttttctgcctuacag

SEQ ID NO: 34532 - DNA, 26 bp, Artificial Sequence
  Synthetic
gaccctaaactuaaattccaccguca

SEQ ID NO: 34533 - DNA, 20 bp, Artificial Sequence
  Synthetic
tgugaagaagcugggcaagg

SEQ ID NO: 34534 - DNA, 21 bp, Artificial Sequence
  Synthetic
ggaggctcuccttaccctcua

SEQ ID NO: 34535 - DNA, 23 bp, Artificial Sequence
  Synthetic
cacacuacagtuacgaccaccag

SEQ ID NO: 34536 - DNA, 23 bp, Artificial Sequence
  Synthetic
tgagcctcagugtccccaataua

SEQ ID NO: 34537 - DNA, 25 bp, Artificial Sequence
  Synthetic
caggtgtttcaugaagaagaccauc

SEQ ID NO: 34538 - DNA, 27 bp, Artificial Sequence
  Synthetic
ggaagaggaugatgtugaagagaacac

SEQ ID NO: 34539 - DNA, 29 bp, Artificial Sequence
  Synthetic
cgatgtgatgaauaattctgagagccaut

SEQ ID NO: 34540 - DNA, 24 bp, Artificial Sequence
  Synthetic
ggtcaaactugactttcaguagcg

SEQ ID NO: 34541 - DNA, 19 bp, Artificial Sequence
  Synthetic
ccugccaccactacugcat

SEQ ID NO: 34542 - DNA, 22 bp, Artificial Sequence
  Synthetic
gctcacgtcucttatgctggut

SEQ ID NO: 34543 - DNA, 19 bp, Artificial Sequence
  Synthetic
ccccttucaattgcugcga

SEQ ID NO: 34544 - DNA, 20 bp, Artificial Sequence
  Synthetic
gctcctcucctgtctccuca

SEQ ID NO: 34545 - DNA, 23 bp, Artificial Sequence
  Synthetic
actgtgctugggaaaagauaccc

SEQ ID NO: 34546 - DNA, 22 bp, Artificial Sequence
  Synthetic
cctcacctccugcctgtctuat

SEQ ID NO: 34547 - DNA, 24 bp, Artificial Sequence
  Synthetic
gctcccautctatagcaugaaggg

SEQ ID NO: 34548 - DNA, 30 bp, Artificial Sequence
  Synthetic
atgtatgagacauttttcagtctguaagca

SEQ ID NO: 34549 - DNA, 26 bp, Artificial Sequence
  Synthetic
attcaguacacccggaaactatucag

SEQ ID NO: 34550 - DNA, 23 bp, Artificial Sequence
  Synthetic
catagcagcagcagcugatttug

SEQ ID NO: 34551 - DNA, 25 bp, Artificial Sequence
  Synthetic
agttgatgaauggagtguccagaag

SEQ ID NO: 34552 - DNA, 22 bp, Artificial Sequence
  Synthetic
tcatctccacccuccaagctua

SEQ ID NO: 34553 - DNA, 26 bp, Artificial Sequence
  Synthetic
tggtcccacutacaacugaacaaaaa

SEQ ID NO: 34554 - DNA, 29 bp, Artificial Sequence
  Synthetic
agtagcuattcccactauaagggagaaag

SEQ ID NO: 34555 - DNA, 28 bp, Artificial Sequence
  Synthetic
aggcagaaacucaagatggttatgtuag

SEQ ID NO: 34556 - DNA, 24 bp, Artificial Sequence
  Synthetic
tgctatgaatucctaatggcugca

SEQ ID NO: 34557 - DNA, 25 bp, Artificial Sequence
  Synthetic
ctccctcctccuattcccatttcua

SEQ ID NO: 34558 - DNA, 23 bp, Artificial Sequence
  Synthetic
ccatcugaaggctggacuaggat

SEQ ID NO: 34559 - DNA, 29 bp, Artificial Sequence
  Synthetic
tttcactgguaataatggattguggaaaa

SEQ ID NO: 34560 - DNA, 26 bp, Artificial Sequence
  Synthetic
tcagaacattctcuagtaccccaguc

SEQ ID NO: 34561 - DNA, 21 bp, Artificial Sequence
  Synthetic
gttggtcaacguaggcctcuc

SEQ ID NO: 34562 - DNA, 27 bp, Artificial Sequence
  Synthetic
tggttttggccaauctgtaagaagtua

SEQ ID NO: 34563 - DNA, 27 bp, Artificial Sequence
  Synthetic
tcagcttcctuattgctgaatgaauct

SEQ ID NO: 34564 - DNA, 26 bp, Artificial Sequence
  Synthetic
caaaacttgaggaguttgatccauga

SEQ ID NO: 34565 - DNA, 22 bp, Artificial Sequence
  Synthetic
ttcttgauagcgctgaugccat

SEQ ID NO: 34566 - DNA, 25 bp, Artificial Sequence
  Synthetic
tctttgatctguaccatcctcucca

SEQ ID NO: 34567 - DNA, 27 bp, Artificial Sequence
  Synthetic
gagcaggcttugaagatttcagaauag

SEQ ID NO: 34568 - DNA, 22 bp, Artificial Sequence
  Synthetic
cctcuaccacaggcattgcaut

SEQ ID NO: 34569 - DNA, 26 bp, Artificial Sequence
  Synthetic
gagttgcttuttgactgtctucacag

SEQ ID NO: 34570 - DNA, 22 bp, Artificial Sequence
  Synthetic
gtcctctcugctgttatugggt

SEQ ID NO: 34571 - DNA, 29 bp, Artificial Sequence
  Synthetic
cgatatttgtggcuggtggtttataugat

SEQ ID NO: 34572 - DNA, 21 bp, Artificial Sequence
  Synthetic
cugaggtgaauacaggccaca

SEQ ID NO: 34573 - DNA, 25 bp, Artificial Sequence
  Synthetic
ctgcuccacaaaattccgucaaaaa

SEQ ID NO: 34574 - DNA, 25 bp, Artificial Sequence
  Synthetic
catggcaccauagtcaaagttctug

SEQ ID NO: 34575 - DNA, 20 bp, Artificial Sequence
  Synthetic
catcaaccuccauggcaacg

SEQ ID NO: 34576 - DNA, 22 bp, Artificial Sequence
  Synthetic
ccagctgugccaaacacaauat

SEQ ID NO: 34577 - DNA, 29 bp, Artificial Sequence
  Synthetic
gaaagtacctgaugacatgcatttgttua

SEQ ID NO: 34578 - DNA, 23 bp, Artificial Sequence
  Synthetic
acaaacagtcuccccctacauga

SEQ ID NO: 34579 - DNA, 29 bp, Artificial Sequence
  Synthetic
ccagctagtgatutttgaaacaggtttut

SEQ ID NO: 34580 - DNA, 30 bp, Artificial Sequence
  Synthetic
cauattgtaacaaaatcucaagcagaagca

SEQ ID NO: 34581 - DNA, 27 bp, Artificial Sequence
  Synthetic
tggctttcattccuctgaaggatttut

SEQ ID NO: 34582 - DNA, 21 bp, Artificial Sequence
  Synthetic
caacatgcucgcaatcctugt

SEQ ID NO: 34583 - DNA, 31 bp, Artificial Sequence
  Synthetic
tgacatatcugagcaatttctttttctucca

SEQ ID NO: 34584 - DNA, 23 bp, Artificial Sequence
  Synthetic
cttcttcaacaccutgccatgut

SEQ ID NO: 34585 - DNA, 24 bp, Artificial Sequence
  Synthetic
ttcttugggaggtgaaaauaccac

SEQ ID NO: 34586 - DNA, 24 bp, Artificial Sequence
  Synthetic
tgtctggaatugaagggtgatugg

SEQ ID NO: 34587 - DNA, 24 bp, Artificial Sequence
  Synthetic
cgagtgggtcugtcttttccatut

SEQ ID NO: 34588 - DNA, 21 bp, Artificial Sequence
  Synthetic
aacgagauaacctgctccuct

SEQ ID NO: 34589 - DNA, 29 bp, Artificial Sequence
  Synthetic
aacaaccactgucaattatgtacgtgaua

SEQ ID NO: 34590 - DNA, 22 bp, Artificial Sequence
  Synthetic
cutctataagccucgacagcca

SEQ ID NO: 34591 - DNA, 23 bp, Artificial Sequence
  Synthetic
tggaaacccuttcagcttctugt

SEQ ID NO: 34592 - DNA, 27 bp, Artificial Sequence
  Synthetic
tgggccttattuatcatctgttctguc

SEQ ID NO: 34593 - DNA, 29 bp, Artificial Sequence
  Synthetic
atgtgtccagtuttcttattttgcttuca

SEQ ID NO: 34594 - DNA, 24 bp, Artificial Sequence
  Synthetic
tgctgugagaaaacaagugacagt

SEQ ID NO: 34595 - DNA, 30 bp, Artificial Sequence
  Synthetic
ctgtttcacttttuaggtatggtctcttug

SEQ ID NO: 34596 - DNA, 25 bp, Artificial Sequence
  Synthetic
acacccctgautgagaaagaactut

SEQ ID NO: 34597 - DNA, 27 bp, Artificial Sequence
  Synthetic
gatcccctggauttgttgaaacatuag

SEQ ID NO: 34598 - DNA, 24 bp, Artificial Sequence
  Synthetic
tgtgtccuacacaagaaugcagaa

SEQ ID NO: 34599 - DNA, 28 bp, Artificial Sequence
  Synthetic
tcaacagaatcucaggagccatatcuaa

SEQ ID NO: 34600 - DNA, 22 bp, Artificial Sequence
  Synthetic
cagatgcttauggaaggctugc

SEQ ID NO: 34601 - DNA, 26 bp, Artificial Sequence
  Synthetic
ggagatttgtcuggaagcatgttcua

SEQ ID NO: 34602 - DNA, 26 bp, Artificial Sequence
  Synthetic
tgaaagaccccaauacaaatguccag

SEQ ID NO: 34603 - DNA, 22 bp, Artificial Sequence
  Synthetic
gttaaaggugccaaaccgaugg

SEQ ID NO: 34604 - DNA, 24 bp, Artificial Sequence
  Synthetic
ggcucagcaactatagucaaggac

SEQ ID NO: 34605 - DNA, 23 bp, Artificial Sequence
  Synthetic
cctactcaacucccttcttuccc

SEQ ID NO: 34606 - DNA, 26 bp, Artificial Sequence
  Synthetic
ctggaacttauccagaaagttuccct

SEQ ID NO: 34607 - DNA, 22 bp, Artificial Sequence
  Synthetic
gacaacgucacagtggagaaug

SEQ ID NO: 34608 - DNA, 24 bp, Artificial Sequence
  Synthetic
tatcgctgccauttggactaaaut

SEQ ID NO: 34609 - DNA, 20 bp, Artificial Sequence
  Synthetic
ggagtgugagacgcccaauc

SEQ ID NO: 34610 - DNA, 21 bp, Artificial Sequence
  Synthetic
ccagccuacactctctgaugg

SEQ ID NO: 34611 - DNA, 24 bp, Artificial Sequence
  Synthetic
catttgcgaggaaagutcccaaug

SEQ ID NO: 34612 - DNA, 28 bp, Artificial Sequence
  Synthetic
agtagtcaguacagcattaaucacaaaa

SEQ ID NO: 34613 - DNA, 25 bp, Artificial Sequence
  Synthetic
ggattttcuccagggaatgtcucag

SEQ ID NO: 34614 - DNA, 25 bp, Artificial Sequence
  Synthetic
gtgtgctgtcutatttgcttgacut

SEQ ID NO: 34615 - DNA, 25 bp, Artificial Sequence
  Synthetic
aggagcugcaaacattgacatttut

SEQ ID NO: 34616 - DNA, 27 bp, Artificial Sequence
  Synthetic
actcctatgtgauaccaaagtccauct

SEQ ID NO: 34617 - DNA, 30 bp, Artificial Sequence
  Synthetic
ccccaagtguttcattattttccuaagaat

SEQ ID NO: 34618 - DNA, 24 bp, Artificial Sequence
  Synthetic
acacaacguggcttgcatuaaaaa

SEQ ID NO: 34619 - DNA, 21 bp, Artificial Sequence
  Synthetic
agtcctggucaatgggcuaac

SEQ ID NO: 34620 - DNA, 26 bp, Artificial Sequence
  Synthetic
ccuccttctagagtuaagaagcaacc

SEQ ID NO: 34621 - DNA, 20 bp, Artificial Sequence
  Synthetic
caacgugagcctgtcuggat

SEQ ID NO: 34622 - DNA, 21 bp, Artificial Sequence
  Synthetic
tttctcctugcatggcaguga

SEQ ID NO: 34623 - DNA, 25 bp, Artificial Sequence
  Synthetic
cctgtgacautgtgaactuaacgga

SEQ ID NO: 34624 - DNA, 23 bp, Artificial Sequence
  Synthetic
ctctctgaccucactggcaaaut

SEQ ID NO: 34625 - DNA, 31 bp, Artificial Sequence
  Synthetic
gttatttcctaaacauctgcctatcttcugt

SEQ ID NO: 34626 - DNA, 21 bp, Artificial Sequence
  Synthetic
gacgtggacutccacauccaa

SEQ ID NO: 34627 - DNA, 28 bp, Artificial Sequence
  Synthetic
gtgacugtgaatttaauccaaaaagaca

SEQ ID NO: 34628 - DNA, 31 bp, Artificial Sequence
  Synthetic
gtcacaauaactggattuaaggaagagacat

SEQ ID NO: 34629 - DNA, 27 bp, Artificial Sequence
  Synthetic
gagttctcttcccutaagtcagtccua

SEQ ID NO: 34630 - DNA, 22 bp, Artificial Sequence
  Synthetic
ctgtgagacccuccccagatua

SEQ ID NO: 34631 - DNA, 30 bp, Artificial Sequence
  Synthetic
gtgaacaaaacgagutgcaaagttatttuc

SEQ ID NO: 34632 - DNA, 24 bp, Artificial Sequence
  Synthetic
tggcctcuaacaaaatcacugcaa

SEQ ID NO: 34633 - DNA, 31 bp, Artificial Sequence
  Synthetic
cctggtagataugaaatgcataaaauggaaa

SEQ ID NO: 34634 - DNA, 22 bp, Artificial Sequence
  Synthetic
gcagcaaauccatgccacuaga

SEQ ID NO: 34635 - DNA, 23 bp, Artificial Sequence
  Synthetic
ccgatgactucacatccagguac

SEQ ID NO: 34636 - DNA, 22 bp, Artificial Sequence
  Synthetic
tgttccctugggaatgtgagug

SEQ ID NO: 34637 - DNA, 22 bp, Artificial Sequence
  Synthetic
ctttguttctgacgugccacag

SEQ ID NO: 34638 - DNA, 23 bp, Artificial Sequence
  Synthetic
cagtaaccccuagcaggaaagut

SEQ ID NO: 34639 - DNA, 23 bp, Artificial Sequence
  Synthetic
ccagtgcuggttcatcagaucaa

SEQ ID NO: 34640 - DNA, 23 bp, Artificial Sequence
  Synthetic
ggtaactguccccaaaacaguga

SEQ ID NO: 34641 - DNA, 28 bp, Artificial Sequence
  Synthetic
aactgaaggactuatttggtgtccauag

SEQ ID NO: 34642 - DNA, 28 bp, Artificial Sequence
  Synthetic
gatgaaaaagacaaucagaaugaagcca

SEQ ID NO: 34643 - DNA, 28 bp, Artificial Sequence
  Synthetic
gggtggtcttuatgctcatgatauaaat

SEQ ID NO: 34644 - DNA, 21 bp, Artificial Sequence
  Synthetic
gctccaugggacuggaaagag

SEQ ID NO: 34645 - DNA, 22 bp, Artificial Sequence
  Synthetic
tggagccaugtactaccuggaa

SEQ ID NO: 34646 - DNA, 24 bp, Artificial Sequence
  Synthetic
guatgggacuggcaacagagaaaa

SEQ ID NO: 34647 - DNA, 31 bp, Artificial Sequence
  Synthetic
ctcttgcttgacuctatgttctacttuacag

SEQ ID NO: 34648 - DNA, 21 bp, Artificial Sequence
  Synthetic
ctcgccagcccaucatgatua

SEQ ID NO: 34649 - DNA, 31 bp, Artificial Sequence
  Synthetic
acctacacauacacacauacataaatttcut

SEQ ID NO: 34650 - DNA, 27 bp, Artificial Sequence
  Synthetic
gttaatggucatcaagaaauggccaaa

SEQ ID NO: 34651 - DNA, 30 bp, Artificial Sequence
  Synthetic
gcaatcccagutgatattttcatucaaaac

SEQ ID NO: 34652 - DNA, 25 bp, Artificial Sequence
  Synthetic
tcctcaugagaaccaatctugcaat

SEQ ID NO: 34653 - DNA, 31 bp, Artificial Sequence
  Synthetic
tcattcttacctcaguttgtcttttcctuag

SEQ ID NO: 34654 - DNA, 28 bp, Artificial Sequence
  Synthetic
cacttacctatcaaugtactcagcauca

SEQ ID NO: 34655 - DNA, 31 bp, Artificial Sequence
  Synthetic
ttgccauattgagtatauacaaccaaaaaga

SEQ ID NO: 34656 - DNA, 21 bp, Artificial Sequence
  Synthetic
cagacacgcuggctcattuac

SEQ ID NO: 34657 - DNA, 27 bp, Artificial Sequence
  Synthetic
cataaggattuccactttctgtccuca

SEQ ID NO: 34658 - DNA, 28 bp, Artificial Sequence
  Synthetic
ccugtcctuagaaaaggaagaaaaucaa

SEQ ID NO: 34659 - DNA, 25 bp, Artificial Sequence
  Synthetic
ggtagtggttugaatctgacctuca

SEQ ID NO: 34660 - DNA, 26 bp, Artificial Sequence
  Synthetic
tcaatactcaucagagagaucagcca

SEQ ID NO: 34661 - DNA, 27 bp, Artificial Sequence
  Synthetic
ctcatctcctuaatttcccaggttuca

SEQ ID NO: 34662 - DNA, 24 bp, Artificial Sequence
  Synthetic
gcccctttcauccagaacatttut

SEQ ID NO: 34663 - DNA, 20 bp, Artificial Sequence
  Synthetic
caagggcucagacgacucag

SEQ ID NO: 34664 - DNA, 21 bp, Artificial Sequence
  Synthetic
caggaccacgagugtgatucc

SEQ ID NO: 34665 - DNA, 26 bp, Artificial Sequence
  Synthetic
gtcttcctccugaaaaacgtcaaauc

SEQ ID NO: 34666 - DNA, 27 bp, Artificial Sequence
  Synthetic
gcttcttcaaaugctcttgacatguat

SEQ ID NO: 34667 - DNA, 30 bp, Artificial Sequence
  Synthetic
caactcattctcautttgtagtgcaucaaa

SEQ ID NO: 34668 - DNA, 28 bp, Artificial Sequence
  Synthetic
agtgguggagaaagtagaataucgagat

SEQ ID NO: 34669 - DNA, 23 bp, Artificial Sequence
  Synthetic
ggattgggugggtatcaguaagc

SEQ ID NO: 34670 - DNA, 25 bp, Artificial Sequence
  Synthetic
gatgtagcugaagagagggacaaug

SEQ ID NO: 34671 - DNA, 30 bp, Artificial Sequence
  Synthetic
caataacaatttgugcaggtataactggug

SEQ ID NO: 34672 - DNA, 21 bp, Artificial Sequence
  Synthetic
ggaacccacgucagtcctcua

SEQ ID NO: 34673 - DNA, 25 bp, Artificial Sequence
  Synthetic
agattgagaagugcaaagctccuac

SEQ ID NO: 34674 - DNA, 30 bp, Artificial Sequence
  Synthetic
gcttacacaguagattcttgtctagtuagg

SEQ ID NO: 34675 - DNA, 27 bp, Artificial Sequence
  Synthetic
aaatggctttguaagtggtcagauact

SEQ ID NO: 34676 - DNA, 23 bp, Artificial Sequence
  Synthetic
gaauaccccaguggaccagaaat

SEQ ID NO: 34677 - DNA, 28 bp, Artificial Sequence
  Synthetic
cagtgtcacauaaaaccaggctaattut

SEQ ID NO: 34678 - DNA, 17 bp, Artificial Sequence
  Synthetic
ggaggtgucctcgcuca

SEQ ID NO: 34679 - DNA, 20 bp, Artificial Sequence
  Synthetic
gcctcctccucgttctccuc

SEQ ID NO: 34680 - DNA, 22 bp, Artificial Sequence
  Synthetic
ggtucacggaggagaaauggag

SEQ ID NO: 34681 - DNA, 22 bp, Artificial Sequence
  Synthetic
tgtctccccugggtagtttugt

SEQ ID NO: 34682 - DNA, 28 bp, Artificial Sequence
  Synthetic
ccaagagaugcaaaccataaacttgtut

SEQ ID NO: 34683 - DNA, 28 bp, Artificial Sequence
  Synthetic
tcaaatgtcauggagataagugaaagct

SEQ ID NO: 34684 - DNA, 31 bp, Artificial Sequence
  Synthetic
ggtcctgttttacutcacaagatatggaaua

SEQ ID NO: 34685 - DNA, 22 bp, Artificial Sequence
  Synthetic
ctggccuggctctctacttuaa

SEQ ID NO: 34686 - DNA, 29 bp, Artificial Sequence
  Synthetic
gttattgaatggucacatcaaauccaaga

SEQ ID NO: 34687 - DNA, 28 bp, Artificial Sequence
  Synthetic
cagctcaggacacuttgctaatttaaut

SEQ ID NO: 34688 - DNA, 24 bp, Artificial Sequence
  Synthetic
ccatgttgtttuacgtggctcuct

SEQ ID NO: 34689 - DNA, 30 bp, Artificial Sequence
  Synthetic
acagatggtatgaaauaatggagcgatuaa

SEQ ID NO: 34690 - DNA, 27 bp, Artificial Sequence
  Synthetic
tgattcttugaaacagagacggtuaca

SEQ ID NO: 34691 - DNA, 28 bp, Artificial Sequence
  Synthetic
cttcccataaaguagcttgccaatttut

SEQ ID NO: 34692 - DNA, 25 bp, Artificial Sequence
  Synthetic
tgctcaatgtaguggaaaggtctut

SEQ ID NO: 34693 - DNA, 31 bp, Artificial Sequence
  Synthetic
ggtcataagtgcuctgtttaaaaagttuaca

SEQ ID NO: 34694 - DNA, 23 bp, Artificial Sequence
  Synthetic
gcgagugagagagagcuaaagua

SEQ ID NO: 34695 - DNA, 25 bp, Artificial Sequence
  Synthetic
aataattgucccaagccttctguca

SEQ ID NO: 34696 - DNA, 26 bp, Artificial Sequence
  Synthetic
actcatagtgcutaatgttgcctuca

SEQ ID NO: 34697 - DNA, 25 bp, Artificial Sequence
  Synthetic
gtgtccaaccutatccaccactuac

SEQ ID NO: 34698 - DNA, 32 bp, Artificial Sequence
  Synthetic
atacgtataaaccaguagaaaaaccttatucc

SEQ ID NO: 34699 - DNA, 28 bp, Artificial Sequence
  Synthetic
gaccatttauggcactgaattuaaccaa

SEQ ID NO: 34700 - DNA, 29 bp, Artificial Sequence
  Synthetic
gctaacatattuggcactttttgtttugg

SEQ ID NO: 34701 - DNA, 19 bp, Artificial Sequence
  Synthetic
gccatgucagccacgtugt

SEQ ID NO: 34702 - DNA, 21 bp, Artificial Sequence
  Synthetic
ggtgauccagcagaccaugag

SEQ ID NO: 34703 - DNA, 29 bp, Artificial Sequence
  Synthetic
agatttttgctctuctctgaactcaauga

SEQ ID NO: 34704 - DNA, 27 bp, Artificial Sequence
  Synthetic
tccctctctggauacctggaaaattua

SEQ ID NO: 34705 - DNA, 27 bp, Artificial Sequence
  Synthetic
cctctctgtcuagggaaggttuaaaca

SEQ ID NO: 34706 - DNA, 26 bp, Artificial Sequence
  Synthetic
actctcccttugaagaattacctugg

SEQ ID NO: 34707 - DNA, 25 bp, Artificial Sequence
  Synthetic
gtctccagggugtttctgaaatcua

SEQ ID NO: 34708 - DNA, 28 bp, Artificial Sequence
  Synthetic
gcaaggaaaacccutagcatttaatgua

SEQ ID NO: 34709 - DNA, 23 bp, Artificial Sequence
  Synthetic
aaaggcttcaugtccacctugaa

SEQ ID NO: 34710 - DNA, 32 bp, Artificial Sequence
  Synthetic
aagattcaatcagaagucttatactgcuaaat

SEQ ID NO: 34711 - DNA, 24 bp, Artificial Sequence
  Synthetic
tgcaccaugatgtcaacuaaacca

SEQ ID NO: 34712 - DNA, 26 bp, Artificial Sequence
  Synthetic
tgaagtaattucgcatttgtgcctut

SEQ ID NO: 34713 - DNA, 28 bp, Artificial Sequence
  Synthetic
acaaaaacttgguaactagcttacguca

SEQ ID NO: 34714 - DNA, 27 bp, Artificial Sequence
  Synthetic
gttcagagagagautcagacactaugc

SEQ ID NO: 34715 - DNA, 27 bp, Artificial Sequence
  Synthetic
gcaaaacaaagacaaaaugtggcagua

SEQ ID NO: 34716 - DNA, 26 bp, Artificial Sequence
  Synthetic
gaagaagaaaugttgcagaugcaaga

SEQ ID NO: 34717 - DNA, 30 bp, Artificial Sequence
  Synthetic
tccacaaactgcauatgtaaaagaacuact

SEQ ID NO: 34718 - DNA, 28 bp, Artificial Sequence
  Synthetic
ccaggagtugggaaatatatgucaaagg

SEQ ID NO: 34719 - DNA, 22 bp, Artificial Sequence
  Synthetic
gtaactctgugatggcccucag

SEQ ID NO: 34720 - DNA, 26 bp, Artificial Sequence
  Synthetic
aggcaaaaggaaccgutcatataugt

SEQ ID NO: 34721 - DNA, 28 bp, Artificial Sequence
  Synthetic
aaaattagccaaguagaaaugacccagt

SEQ ID NO: 34722 - DNA, 26 bp, Artificial Sequence
  Synthetic
cagagtagatauagtgcctcccucat

SEQ ID NO: 34723 - DNA, 31 bp, Artificial Sequence
  Synthetic
tgaagatgaccaaguctgctatgtttaatut

SEQ ID NO: 34724 - DNA, 21 bp, Artificial Sequence
  Synthetic
tctaatauccacggccccgua

SEQ ID NO: 34725 - DNA, 29 bp, Artificial Sequence
  Synthetic
ggttgcaccuccataacacagtatuaaat

SEQ ID NO: 34726 - DNA, 28 bp, Artificial Sequence
  Synthetic
cataacgttucatgacttcatauggcat

SEQ ID NO: 34727 - DNA, 22 bp, Artificial Sequence
  Synthetic
ctgtacatuccaactgcccugt

SEQ ID NO: 34728 - DNA, 22 bp, Artificial Sequence
  Synthetic
ccttagagccaguaggaggaug

SEQ ID NO: 34729 - DNA, 27 bp, Artificial Sequence
  Synthetic
aatcaaaaatccacagutccctaggut

SEQ ID NO: 34730 - DNA, 31 bp, Artificial Sequence
  Synthetic
gctcttaaattctguatttgtaacccttcuc

SEQ ID NO: 34731 - DNA, 20 bp, Artificial Sequence
  Synthetic
agtttugccaccacgtcuct

SEQ ID NO: 34732 - DNA, 21 bp, Artificial Sequence
  Synthetic
ccagtgtccugcgtatgauga

SEQ ID NO: 34733 - DNA, 29 bp, Artificial Sequence
  Synthetic
ctatctggacggaaacuttgaattgtuac

SEQ ID NO: 34734 - DNA, 27 bp, Artificial Sequence
  Synthetic
gcgtaaaaaccccutctgttaaatuct

SEQ ID NO: 34735 - DNA, 20 bp, Artificial Sequence
  Synthetic
gatagccugcatgccacuca

SEQ ID NO: 34736 - DNA, 28 bp, Artificial Sequence
  Synthetic
tcagcaatttguacttatcaccttguca

SEQ ID NO: 34737 - DNA, 28 bp, Artificial Sequence
  Synthetic
caagaaaacguaacaaatgatcccucac

SEQ ID NO: 34738 - DNA, 26 bp, Artificial Sequence
  Synthetic
ggtgtttgtuagaccttgtatuggct

SEQ ID NO: 34739 - DNA, 23 bp, Artificial Sequence
  Synthetic
catctgtucaaagtgcagctucc

SEQ ID NO: 34740 - DNA, 23 bp, Artificial Sequence
  Synthetic
ggcutgggtguaaggaaagaaga

SEQ ID NO: 34741 - DNA, 27 bp, Artificial Sequence
  Synthetic
gacaacaaatgtuctttccatagcugt

SEQ ID NO: 34742 - DNA, 23 bp, Artificial Sequence
  Synthetic
gaaacagaagccgguttggaaug

SEQ ID NO: 34743 - DNA, 24 bp, Artificial Sequence
  Synthetic
gcttgtacugaaaaacggcttuct

SEQ ID NO: 34744 - DNA, 24 bp, Artificial Sequence
  Synthetic
acacagcctgugatacttctggua

SEQ ID NO: 34745 - DNA, 26 bp, Artificial Sequence
  Synthetic
cgctcctuaagtgatgtatcucaaac

SEQ ID NO: 34746 - DNA, 24 bp, Artificial Sequence
  Synthetic
tctgctttucaagcctagtgtuca

SEQ ID NO: 34747 - DNA, 25 bp, Artificial Sequence
  Synthetic
tuaaatggcguaaccgaagacaaac

SEQ ID NO: 34748 - DNA, 24 bp, Artificial Sequence
  Synthetic
cttgctgacucctgaaaatguacc

SEQ ID NO: 34749 - DNA, 22 bp, Artificial Sequence
  Synthetic
gttttaaccuccccaugaccct

SEQ ID NO: 34750 - DNA, 23 bp, Artificial Sequence
  Synthetic
gtgguggcagaaagagaugaaag

SEQ ID NO: 34751 - DNA, 30 bp, Artificial Sequence
  Synthetic
ctaatacaattgctaugttccacacaccua

SEQ ID NO: 34752 - DNA, 30 bp, Artificial Sequence
  Synthetic
aaggaaaacctcuaatgctagtaggaaaug

SEQ ID NO: 34753 - DNA, 28 bp, Artificial Sequence
  Synthetic
ccttgatgatttutgatcccttgttuct

SEQ ID NO: 34754 - DNA, 28 bp, Artificial Sequence
  Synthetic
ggtcataactatggucctggaggaaaua

SEQ ID NO: 34755 - DNA, 29 bp, Artificial Sequence
  Synthetic
gatttugggagagagtaaacuacagagac

SEQ ID NO: 34756 - DNA, 22 bp, Artificial Sequence
  Synthetic
cctggauacagggaggagugaa

SEQ ID NO: 34757 - DNA, 26 bp, Artificial Sequence
  Synthetic
tgctgttggaaauggaagcuaaagat

SEQ ID NO: 34758 - DNA, 28 bp, Artificial Sequence
  Synthetic
gcctctgaautaaaggtatttuccccat

SEQ ID NO: 34759 - DNA, 25 bp, Artificial Sequence
  Synthetic
tgacctctgacautcatacgctuac

SEQ ID NO: 34760 - DNA, 23 bp, Artificial Sequence
  Synthetic
ccctcattuattgccacttugct

SEQ ID NO: 34761 - DNA, 27 bp, Artificial Sequence
  Synthetic
gaaaagcatcgugactagttaacucac

SEQ ID NO: 34762 - DNA, 21 bp, Artificial Sequence
  Synthetic
caacgccgcaucagcatttua

SEQ ID NO: 34763 - DNA, 29 bp, Artificial Sequence
  Synthetic
ggaagatcttucaagaaatgtgttggtut

SEQ ID NO: 34764 - DNA, 29 bp, Artificial Sequence
  Synthetic
gcgatgaagatguggacaagataattuct

SEQ ID NO: 34765 - DNA, 28 bp, Artificial Sequence
  Synthetic
gcaatagcaggutttaactaacaugcaa

SEQ ID NO: 34766 - DNA, 29 bp, Artificial Sequence
  Synthetic
ttgagaggattucacatgaactgtaaugt

SEQ ID NO: 34767 - DNA, 28 bp, Artificial Sequence
  Synthetic
gcttcttctucaacaggttctuaaacag

SEQ ID NO: 34768 - DNA, 23 bp, Artificial Sequence
  Synthetic
atttgttgugaacaaggccagug

SEQ ID NO: 34769 - DNA, 26 bp, Artificial Sequence
  Synthetic
gctccgcacuctaaatgttggaatua

SEQ ID NO: 34770 - DNA, 22 bp, Artificial Sequence
  Synthetic
tccagactuccgctaatccugt

SEQ ID NO: 34771 - DNA, 22 bp, Artificial Sequence
  Synthetic
aggautttcatctugccaggct

SEQ ID NO: 34772 - DNA, 30 bp, Artificial Sequence
  Synthetic
gcaagcautaattaactaugacaaagagca

SEQ ID NO: 34773 - DNA, 25 bp, Artificial Sequence
  Synthetic
ccctttguggagaacatctguaaac

SEQ ID NO: 34774 - DNA, 27 bp, Artificial Sequence
  Synthetic
ggtttgtccauttaccttacaguaaca

SEQ ID NO: 34775 - DNA, 23 bp, Artificial Sequence
  Synthetic
ttctugacaccggactttcucag

SEQ ID NO: 34776 - DNA, 21 bp, Artificial Sequence
  Synthetic
tggaaggacguaaacctugcc

SEQ ID NO: 34777 - DNA, 25 bp, Artificial Sequence
  Synthetic
aagaacatcuccacagagtgtctuc

SEQ ID NO: 34778 - DNA, 25 bp, Artificial Sequence
  Synthetic
acctagggtuactttctcatgacut

SEQ ID NO: 34779 - DNA, 21 bp, Artificial Sequence
  Synthetic
gttatuccaggcggcaatugt

SEQ ID NO: 34780 - DNA, 28 bp, Artificial Sequence
  Synthetic
ccactgaatttuaaggtttttgaaugcc

SEQ ID NO: 34781 - DNA, 25 bp, Artificial Sequence
  Synthetic
gctgctgcugaaaatcattuagcaa

SEQ ID NO: 34782 - DNA, 31 bp, Artificial Sequence
  Synthetic
atgtgaatttaacaagaacuttcgccttauc

SEQ ID NO: 34783 - DNA, 25 bp, Artificial Sequence
  Synthetic
actaagtgtuggtggtgacguaaac

SEQ ID NO: 34784 - DNA, 22 bp, Artificial Sequence
  Synthetic
agggaagcuttctggaugacac

SEQ ID NO: 34785 - DNA, 28 bp, Artificial Sequence
  Synthetic
gtcctcttagaggaautaccaagtcuga

SEQ ID NO: 34786 - DNA, 29 bp, Artificial Sequence
  Synthetic
ggtgatugaagccaaagaaaaugaaagaa

SEQ ID NO: 34787 - DNA, 28 bp, Artificial Sequence
  Synthetic
ccaatgtuccagaaacaaattgaacucc

SEQ ID NO: 34788 - DNA, 21 bp, Artificial Sequence
  Synthetic
catgcagggacgcauctcuat

SEQ ID NO: 34789 - DNA, 21 bp, Artificial Sequence
  Synthetic
agaggcatcugcctttggtuc

SEQ ID NO: 34790 - DNA, 28 bp, Artificial Sequence
  Synthetic
agatagacccucttgaattggattucct

SEQ ID NO: 34791 - DNA, 29 bp, Artificial Sequence
  Synthetic
tttacatttcaacacuggagagagcuaat

SEQ ID NO: 34792 - DNA, 31 bp, Artificial Sequence
  Synthetic
gtgtucagaaaaagaaaaautaccucaagaa

SEQ ID NO: 34793 - DNA, 27 bp, Artificial Sequence
  Synthetic
cagatcctccuaactcttcagacuaca

SEQ ID NO: 34794 - DNA, 22 bp, Artificial Sequence
  Synthetic
gugcgaagtatguggagaggac

SEQ ID NO: 34795 - DNA, 29 bp, Artificial Sequence
  Synthetic
aaaagaaactaagaucactgtgaacugaa

SEQ ID NO: 34796 - DNA, 25 bp, Artificial Sequence
  Synthetic
agtaataugcctcacctucacagga

SEQ ID NO: 34797 - DNA, 22 bp, Artificial Sequence
  Synthetic
tcatctggugtaggugcagact

SEQ ID NO: 34798 - DNA, 23 bp, Artificial Sequence
  Synthetic
gacccttgcucttggaaaccaua

SEQ ID NO: 34799 - DNA, 22 bp, Artificial Sequence
  Synthetic
aaaaggauagcttcggcuccag

SEQ ID NO: 34800 - DNA, 20 bp, Artificial Sequence
  Synthetic
cgtgctacuggttggcuact

SEQ ID NO: 34801 - DNA, 29 bp, Artificial Sequence
  Synthetic
ttcaugaattcttctaaauacacccgaca

SEQ ID NO: 34802 - DNA, 23 bp, Artificial Sequence
  Synthetic
cctccacccaaaugctgaaauag

SEQ ID NO: 34803 - DNA, 30 bp, Artificial Sequence
  Synthetic
cctagguaaaaacttattgattugcacaat

SEQ ID NO: 34804 - DNA, 26 bp, Artificial Sequence
  Synthetic
gcttccaagaaugtgagaggaugaat

SEQ ID NO: 34805 - DNA, 22 bp, Artificial Sequence
  Synthetic
gataatgccaautccccctugc

SEQ ID NO: 34806 - DNA, 24 bp, Artificial Sequence
  Synthetic
aacagcaaguttttcttccuccct

SEQ ID NO: 34807 - DNA, 22 bp, Artificial Sequence
  Synthetic
gtaaacaaagcagggcutcugg

SEQ ID NO: 34808 - DNA, 28 bp, Artificial Sequence
  Synthetic
aaccagaatgtugaatgtttattgcauc

SEQ ID NO: 34809 - DNA, 24 bp, Artificial Sequence
  Synthetic
ctgtttggtutcttgtctguccac

SEQ ID NO: 34810 - DNA, 19 bp, Artificial Sequence
  Synthetic
gctggaguggctctgctuc

SEQ ID NO: 34811 - DNA, 18 bp, Artificial Sequence
  Synthetic
acagucgtgugccaccac

SEQ ID NO: 34812 - DNA, 17 bp, Artificial Sequence
  Synthetic
ggcgugaaccgagcuga

SEQ ID NO: 34813 - DNA, 17 bp, Artificial Sequence
  Synthetic
gtcguccgtcacuccca

SEQ ID NO: 34814 - DNA, 23 bp, Artificial Sequence
  Synthetic
gtattgccaagcuaggctaguga

SEQ ID NO: 34815 - DNA, 31 bp, Artificial Sequence
  Synthetic
ggcatgttttaccutaagatacttacttgug

SEQ ID NO: 34816 - DNA, 25 bp, Artificial Sequence
  Synthetic
gggctatuaggatacatuccacagt

SEQ ID NO: 34817 - DNA, 28 bp, Artificial Sequence
  Synthetic
aatcaacacacatuttcttcacaggtuc

SEQ ID NO: 34818 - DNA, 28 bp, Artificial Sequence
  Synthetic
actcaactaattutcctgaagtcaugct

SEQ ID NO: 34819 - DNA, 31 bp, Artificial Sequence
  Synthetic
gttttgtaaactucagtaaagtgctgaugaa

SEQ ID NO: 34820 - DNA, 23 bp, Artificial Sequence
  Synthetic
ctccttatgaggutctctcccut

SEQ ID NO: 34821 - DNA, 28 bp, Artificial Sequence
  Synthetic
cctgacttuagcaaggatatcaaccaua

SEQ ID NO: 34822 - DNA, 22 bp, Artificial Sequence
  Synthetic
ctgaagttcutgaagcgtugcc

SEQ ID NO: 34823 - DNA, 29 bp, Artificial Sequence
  Synthetic
agugattucaaagacaauaacaaaaacca

SEQ ID NO: 34824 - DNA, 24 bp, Artificial Sequence
  Synthetic
catgcgtgttutgggacaatguag

SEQ ID NO: 34825 - DNA, 30 bp, Artificial Sequence
  Synthetic
ccccaaaccaaaauacttaagaagtcctua

SEQ ID NO: 34826 - DNA, 23 bp, Artificial Sequence
  Synthetic
gtggaagccaauggcctaatcua

SEQ ID NO: 34827 - DNA, 28 bp, Artificial Sequence
  Synthetic
gtcttttgacatcucctacagagctuat

SEQ ID NO: 34828 - DNA, 30 bp, Artificial Sequence
  Synthetic
ttgttcatgtttuattcttttgaagguggt

SEQ ID NO: 34829 - DNA, 27 bp, Artificial Sequence
  Synthetic
caacccatttguctgtttcggtatuat

SEQ ID NO: 34830 - DNA, 26 bp, Artificial Sequence
  Synthetic
gcaaatgaagagacccutgaaacaug

SEQ ID NO: 34831 - DNA, 21 bp, Artificial Sequence
  Synthetic
tcttggttttguggccagcua

SEQ ID NO: 34832 - DNA, 25 bp, Artificial Sequence
  Synthetic
tttgcaaatuggttgtgacugagat

SEQ ID NO: 34833 - DNA, 27 bp, Artificial Sequence
  Synthetic
agaactctcaauctgccaacatctuac

SEQ ID NO: 34834 - DNA, 29 bp, Artificial Sequence
  Synthetic
tttttaaaccctaugcagacacatugaac

SEQ ID NO: 34835 - DNA, 23 bp, Artificial Sequence
  Synthetic
acagttccatugctgctggauac

SEQ ID NO: 34836 - DNA, 27 bp, Artificial Sequence
  Synthetic
agagaguaggtttctatcucaggcaaa

SEQ ID NO: 34837 - DNA, 23 bp, Artificial Sequence
  Synthetic
auctttagctgugagaccagcac

SEQ ID NO: 34838 - DNA, 30 bp, Artificial Sequence
  Synthetic
tgggaagattcauatgagaattgattgugt

SEQ ID NO: 34839 - DNA, 22 bp, Artificial Sequence
  Synthetic
agacgacaauggtgagcaaucc

SEQ ID NO: 34840 - DNA, 30 bp, Artificial Sequence
  Synthetic
gttagaaagtucagcattatttggtugaca

SEQ ID NO: 34841 - DNA, 25 bp, Artificial Sequence
  Synthetic
agtacuaagaggaacaccacacuca

SEQ ID NO: 34842 - DNA, 29 bp, Artificial Sequence
  Synthetic
cttaatgtactucctgaaatacucagcga

SEQ ID NO: 34843 - DNA, 28 bp, Artificial Sequence
  Synthetic
ctgagatggataucataaggctgttgut

SEQ ID NO: 34844 - DNA, 30 bp, Artificial Sequence
  Synthetic
tttaacaatcatcacauggaaaaccatucc

SEQ ID NO: 34845 - DNA, 28 bp, Artificial Sequence
  Synthetic
ggcaggaagcauataagaaccaaatcut

SEQ ID NO: 34846 - DNA, 21 bp, Artificial Sequence
  Synthetic
acaccagaaugatgggctcut

SEQ ID NO: 34847 - DNA, 27 bp, Artificial Sequence
  Synthetic
cagcaaatgtcucacaaaggtactuac

SEQ ID NO: 34848 - DNA, 23 bp, Artificial Sequence
  Synthetic
gccttuccagataacagtugcca

SEQ ID NO: 34849 - DNA, 28 bp, Artificial Sequence
  Synthetic
ctgctctcaucagggaaaggaaataaut

SEQ ID NO: 34850 - DNA, 27 bp, Artificial Sequence
  Synthetic
gcttttgagccugatgaggatatugaa

SEQ ID NO: 34851 - DNA, 31 bp, Artificial Sequence
  Synthetic
tccaaaugtataatucagaaaaccagaacct

SEQ ID NO: 34852 - DNA, 27 bp, Artificial Sequence
  Synthetic
tcctaggaacuaacaaaacattgtguc

SEQ ID NO: 34853 - DNA, 25 bp, Artificial Sequence
  Synthetic
aaccttgacccucttgagattucac

SEQ ID NO: 34854 - DNA, 28 bp, Artificial Sequence
  Synthetic
tgggttgaugctattctatttcuaccct

SEQ ID NO: 34855 - DNA, 28 bp, Artificial Sequence
  Synthetic
atgttccctgacagutcttaatcagaua

SEQ ID NO: 34856 - DNA, 22 bp, Artificial Sequence
  Synthetic
gctatgcguacacttgcaucct

SEQ ID NO: 34857 - DNA, 27 bp, Artificial Sequence
  Synthetic
cgtctgaataautctagccatttugcc

SEQ ID NO: 34858 - DNA, 22 bp, Artificial Sequence
  Synthetic
tggagaacccguagtgcaaauc

SEQ ID NO: 34859 - DNA, 21 bp, Artificial Sequence
  Synthetic
gtccacacacccacucttgut

SEQ ID NO: 34860 - DNA, 22 bp, Artificial Sequence
  Synthetic
atggaccuaggaggaagguagg

SEQ ID NO: 34861 - DNA, 23 bp, Artificial Sequence
  Synthetic
ccaggacaaaggauccatucaga

SEQ ID NO: 34862 - DNA, 20 bp, Artificial Sequence
  Synthetic
ctgaagggutgtgggcugat

SEQ ID NO: 34863 - DNA, 23 bp, Artificial Sequence
  Synthetic
cactaatcccutgcccactguag

SEQ ID NO: 34864 - DNA, 22 bp, Artificial Sequence
  Synthetic
gccuggcagagagagtactuga

SEQ ID NO: 34865 - DNA, 23 bp, Artificial Sequence
  Synthetic
gcatcccaucctcacattgtucc

SEQ ID NO: 34866 - DNA, 22 bp, Artificial Sequence
  Synthetic
aggtgaaccugggtcctcauaa

SEQ ID NO: 34867 - DNA, 23 bp, Artificial Sequence
  Synthetic
agaagaaccgagacuaccctcug

SEQ ID NO: 34868 - DNA, 22 bp, Artificial Sequence
  Synthetic
agtctggtugctgggauaacct

SEQ ID NO: 34869 - DNA, 21 bp, Artificial Sequence
  Synthetic
ccaaccugcaggcaaatgtuc

SEQ ID NO: 34870 - DNA, 24 bp, Artificial Sequence
  Synthetic
tctcagcaagaaagucgatgtcuc

SEQ ID NO: 34871 - DNA, 22 bp, Artificial Sequence
  Synthetic
cctggctttcutccagccttut

SEQ ID NO: 34872 - DNA, 21 bp, Artificial Sequence
  Synthetic
ccaccatggucagttcctgug

SEQ ID NO: 34873 - DNA, 25 bp, Artificial Sequence
  Synthetic
tgataaactcttuacgtgggctgug

SEQ ID NO: 34874 - DNA, 17 bp, Artificial Sequence
  Synthetic
tggaugcgcgcaccuag

SEQ ID NO: 34875 - DNA, 17 bp, Artificial Sequence
  Synthetic
cggcgucagcaguagca

SEQ ID NO: 34876 - DNA, 29 bp, Artificial Sequence
  Synthetic
ctgaagatagttcuaggaggaaacagcua

SEQ ID NO: 34877 - DNA, 28 bp, Artificial Sequence
  Synthetic
acaggtcguaaaaaccttccctaaaauc

SEQ ID NO: 34878 - DNA, 17 bp, Artificial Sequence
  Synthetic
agtgaguggccccucca

SEQ ID NO: 34879 - DNA, 18 bp, Artificial Sequence
  Synthetic
cccagucgacucccggat

SEQ ID NO: 34880 - DNA, 22 bp, Artificial Sequence
  Synthetic
gaatatggagcaaucccgguca

SEQ ID NO: 34881 - DNA, 23 bp, Artificial Sequence
  Synthetic
ccctctccccutagagcacttua

SEQ ID NO: 34882 - DNA, 27 bp, Artificial Sequence
  Synthetic
tctctctctctcuctctctgtctcuac

SEQ ID NO: 34883 - DNA, 18 bp, Artificial Sequence
  Synthetic
gagccaucagcaguccca

SEQ ID NO: 34884 - DNA, 21 bp, Artificial Sequence
  Synthetic
gctcagccaugttctgccuaa

SEQ ID NO: 34885 - DNA, 21 bp, Artificial Sequence
  Synthetic
gagtctgguggcaagttcuca

SEQ ID NO: 34886 - DNA, 22 bp, Artificial Sequence
  Synthetic
cacagugcctggaguaaggaat

SEQ ID NO: 34887 - DNA, 24 bp, Artificial Sequence
  Synthetic
agctcatttcacugtctcaaccut

SEQ ID NO: 34888 - DNA, 20 bp, Artificial Sequence
  Synthetic
cccccaaccacacutctgug

SEQ ID NO: 34889 - DNA, 24 bp, Artificial Sequence
  Synthetic
caccccatucccagcttttctaut

SEQ ID NO: 34890 - DNA, 26 bp, Artificial Sequence
  Synthetic
ctgcagtagtuatgtccaagagauga

SEQ ID NO: 34891 - DNA, 28 bp, Artificial Sequence
  Synthetic
actctuggagaaaucagaaagtaaaugg

SEQ ID NO: 34892 - DNA, 21 bp, Artificial Sequence
  Synthetic
ctggagaauccacccuttcug

SEQ ID NO: 34893 - DNA, 23 bp, Artificial Sequence
  Synthetic
gatggaggttuagggtgttgcua

SEQ ID NO: 34894 - DNA, 27 bp, Artificial Sequence
  Synthetic
tttgttcttaaugcccaaggagagaut

SEQ ID NO: 34895 - DNA, 23 bp, Artificial Sequence
  Synthetic
cagggaagugggaatgtttcuca

SEQ ID NO: 34896 - DNA, 22 bp, Artificial Sequence
  Synthetic
acagctgugatttgctucgaat

SEQ ID NO: 34897 - DNA, 27 bp, Artificial Sequence
  Synthetic
cagatctgaacuaattccgtctagugc

SEQ ID NO: 34898 - DNA, 21 bp, Artificial Sequence
  Synthetic
gcctctccugttccttcucag

SEQ ID NO: 34899 - DNA, 18 bp, Artificial Sequence
  Synthetic
gcgcctucccgtcguaag

SEQ ID NO: 34900 - DNA, 22 bp, Artificial Sequence
  Synthetic
gctcccaggcugagacttctua

SEQ ID NO: 34901 - DNA, 23 bp, Artificial Sequence
  Synthetic
aggucctagugaccagagagaac

SEQ ID NO: 34902 - DNA, 22 bp, Artificial Sequence
  Synthetic
cagggagggauggctattgtut

SEQ ID NO: 34903 - DNA, 23 bp, Artificial Sequence
  Synthetic
tgauagaacaauccaccccaggt

SEQ ID NO: 34904 - DNA, 22 bp, Artificial Sequence
  Synthetic
tgcacaaggugagtctttugct

SEQ ID NO: 34905 - DNA, 25 bp, Artificial Sequence
  Synthetic
ctcaaatgggacacaucgtgatuac

SEQ ID NO: 34906 - DNA, 20 bp, Artificial Sequence
  Synthetic
agctuccggaacacgactuc

SEQ ID NO: 34907 - DNA, 19 bp, Artificial Sequence
  Synthetic
ggactcuccaccagcucca

SEQ ID NO: 34908 - DNA, 21 bp, Artificial Sequence
  Synthetic
agaaggacaggugtgagctug

SEQ ID NO: 34909 - DNA, 24 bp, Artificial Sequence
  Synthetic
gggacatuacaggaggccaaauag

SEQ ID NO: 34910 - DNA, 19 bp, Artificial Sequence
  Synthetic
ggaggcutggguagcacac

SEQ ID NO: 34911 - DNA, 21 bp, Artificial Sequence
  Synthetic
ttgagccucactgtccatguc

SEQ ID NO: 34912 - DNA, 17 bp, Artificial Sequence
  Synthetic
ctcacgccccacuccuc

SEQ ID NO: 34913 - DNA, 18 bp, Artificial Sequence
  Synthetic
accccuggcctcuggaaa

SEQ ID NO: 34914 - DNA, 22 bp, Artificial Sequence
  Synthetic
gcgacaaacacucacctctgua

SEQ ID NO: 34915 - DNA, 28 bp, Artificial Sequence
  Synthetic
tctaactgttctutctctattgccaugc

SEQ ID NO: 34916 - DNA, 19 bp, Artificial Sequence
  Synthetic
gctggcccutggtgacaua

SEQ ID NO: 34917 - DNA, 19 bp, Artificial Sequence
  Synthetic
gcuggaagcaggtgtugct

SEQ ID NO: 34918 - DNA, 18 bp, Artificial Sequence
  Synthetic
ctgagccacugggtcugt

SEQ ID NO: 34919 - DNA, 17 bp, Artificial Sequence
  Synthetic
tgcugtggcugcaggag

SEQ ID NO: 34920 - DNA, 18 bp, Artificial Sequence
  Synthetic
ctggtccccuggctccua

SEQ ID NO: 34921 - DNA, 21 bp, Artificial Sequence
  Synthetic
ccaccatcutcctcccugaca

SEQ ID NO: 34922 - DNA, 19 bp, Artificial Sequence
  Synthetic
acgauacccaaccggugac

SEQ ID NO: 34923 - DNA, 22 bp, Artificial Sequence
  Synthetic
gtctacacucaccaccaaccuc

SEQ ID NO: 34924 - DNA, 17 bp, Artificial Sequence
  Synthetic
ccccagccccuctccua

SEQ ID NO: 34925 - DNA, 20 bp, Artificial Sequence
  Synthetic
gttctcuccgtggucagcag

SEQ ID NO: 34926 - DNA, 20 bp, Artificial Sequence
  Synthetic
aaaccacugagcaggtgcut

SEQ ID NO: 34927 - DNA, 18 bp, Artificial Sequence
  Synthetic
cucagcaagugcggaggt

SEQ ID NO: 34928 - DNA, 22 bp, Artificial Sequence
  Synthetic
gtggtccacucataaagccuac

SEQ ID NO: 34929 - DNA, 21 bp, Artificial Sequence
  Synthetic
ctttuccaggcacugcagaac

SEQ ID NO: 34930 - DNA, 21 bp, Artificial Sequence
  Synthetic
cattcaaacugctccgagugc

SEQ ID NO: 34931 - DNA, 22 bp, Artificial Sequence
  Synthetic
atccuacccacccacuaaaggt

SEQ ID NO: 34932 - DNA, 23 bp, Artificial Sequence
  Synthetic
cgtugccaagagtaugaacaagg

SEQ ID NO: 34933 - DNA, 24 bp, Artificial Sequence
  Synthetic
ggttgtttggcutaaactctggug

SEQ ID NO: 34934 - DNA, 24 bp, Artificial Sequence
  Synthetic
gctgcctuctcttttcaucacagt

SEQ ID NO: 34935 - DNA, 21 bp, Artificial Sequence
  Synthetic
cttgccacccuacctagtguc

SEQ ID NO: 34936 - DNA, 21 bp, Artificial Sequence
  Synthetic
ccacagggucactctugagat

SEQ ID NO: 34937 - DNA, 17 bp, Artificial Sequence
  Synthetic
gcttcccccuggctucc

SEQ ID NO: 34938 - DNA, 20 bp, Artificial Sequence
  Synthetic
gtctcacgaugccgttcuct

SEQ ID NO: 34939 - DNA, 22 bp, Artificial Sequence
  Synthetic
tgtaaggtgcutgggacatgug

SEQ ID NO: 34940 - DNA, 18 bp, Artificial Sequence
  Synthetic
cgtgtggguggcagucag

SEQ ID NO: 34941 - DNA, 19 bp, Artificial Sequence
  Synthetic
cttcctcucgcccaucaca

SEQ ID NO: 34942 - DNA, 20 bp, Artificial Sequence
  Synthetic
ccgacatcucctcgggctua

SEQ ID NO: 34943 - DNA, 21 bp, Artificial Sequence
  Synthetic
ctctaacacccugtggctcuc

SEQ ID NO: 34944 - DNA, 22 bp, Artificial Sequence
  Synthetic
ccactcctugcttctcagauga

SEQ ID NO: 34945 - DNA, 21 bp, Artificial Sequence
  Synthetic
cagtgcauacaccgagaccug

SEQ ID NO: 34946 - DNA, 23 bp, Artificial Sequence
  Synthetic
acgccaccacaagaugataaguc

SEQ ID NO: 34947 - DNA, 22 bp, Artificial Sequence
  Synthetic
ggctggaauactgcuacaaccc

SEQ ID NO: 34948 - DNA, 22 bp, Artificial Sequence
  Synthetic
ggactgauaccccagcucagat

SEQ ID NO: 34949 - DNA, 30 bp, Artificial Sequence
  Synthetic
caagtaaatgagtcucaacgtgttcttuaa

SEQ ID NO: 34950 - DNA, 23 bp, Artificial Sequence
  Synthetic
agaauagcaagcaaggaaugcct

SEQ ID NO: 34951 - DNA, 20 bp, Artificial Sequence
  Synthetic
gctctagggugaccccacuc

SEQ ID NO: 34952 - DNA, 23 bp, Artificial Sequence
  Synthetic
ggctgtggaagucactcttctug

SEQ ID NO: 34953 - DNA, 21 bp, Artificial Sequence
  Synthetic
ctaacacccugttcgcacuga

SEQ ID NO: 34954 - DNA, 25 bp, Artificial Sequence
  Synthetic
tggcatttgtutttccaactctucg

SEQ ID NO: 34955 - DNA, 19 bp, Artificial Sequence
  Synthetic
tgggtggugctggtctgua

SEQ ID NO: 34956 - DNA, 23 bp, Artificial Sequence
  Synthetic
atccctacugagatggagtgugt

SEQ ID NO: 34957 - DNA, 21 bp, Artificial Sequence
  Synthetic
gcacaucgaggtgaaugggag

SEQ ID NO: 34958 - DNA, 22 bp, Artificial Sequence
  Synthetic
cctggctctucccactaaacuc

SEQ ID NO: 34959 - DNA, 24 bp, Artificial Sequence
  Synthetic
tctggacccucaatgtatccctut

SEQ ID NO: 34960 - DNA, 23 bp, Artificial Sequence
  Synthetic
cctcutaaacccaaugcccagac

SEQ ID NO: 34961 - DNA, 22 bp, Artificial Sequence
  Synthetic
aactgcacuagccttggugaaa

SEQ ID NO: 34962 - DNA, 21 bp, Artificial Sequence
  Synthetic
gttgatgctcugcacatcguc

SEQ ID NO: 34963 - DNA, 23 bp, Artificial Sequence
  Synthetic
agcgtaatuccctttgtctcucc

SEQ ID NO: 34964 - DNA, 19 bp, Artificial Sequence
  Synthetic
cctagcggugcagagtgug

SEQ ID NO: 34965 - DNA, 21 bp, Artificial Sequence
  Synthetic
ctttccccucccctaccuaga

SEQ ID NO: 34966 - DNA, 26 bp, Artificial Sequence
  Synthetic
gatacccctuctactggttttuccat

SEQ ID NO: 34967 - DNA, 24 bp, Artificial Sequence
  Synthetic
agttauccagcagagcaucaaagg

SEQ ID NO: 34968 - DNA, 22 bp, Artificial Sequence
  Synthetic
gcgagtccuacctatgtuccca

SEQ ID NO: 34969 - DNA, 21 bp, Artificial Sequence
  Synthetic
gacccucctgcucagaagaac

SEQ ID NO: 34970 - DNA, 23 bp, Artificial Sequence
  Synthetic
caagccuaggaggttgttgatut

SEQ ID NO: 34971 - DNA, 28 bp, Artificial Sequence
  Synthetic
atctaguaggaagcaaguattttuggat

SEQ ID NO: 34972 - DNA, 24 bp, Artificial Sequence
  Synthetic
tgctgcctcutcctttggatatut

SEQ ID NO: 34973 - DNA, 29 bp, Artificial Sequence
  Synthetic
gccaagtactttucaggaacaaaagaaua

SEQ ID NO: 34974 - DNA, 25 bp, Artificial Sequence
  Synthetic
ggcactaugacagttgagaugaaag

SEQ ID NO: 34975 - DNA, 26 bp, Artificial Sequence
  Synthetic
gagaatgaacaugctgcaagcttuaa

SEQ ID NO: 34976 - DNA, 23 bp, Artificial Sequence
  Synthetic
gctagtugggagaatgctacugt

SEQ ID NO: 34977 - DNA, 29 bp, Artificial Sequence
  Synthetic
ccctttcttcacuatatgaaaactgucca

SEQ ID NO: 34978 - DNA, 30 bp, Artificial Sequence
  Synthetic
gatcaaauggaggagtcatcatuagaaaga

SEQ ID NO: 34979 - DNA, 27 bp, Artificial Sequence
  Synthetic
tgataccagtuttgttgtccaauacca

SEQ ID NO: 34980 - DNA, 27 bp, Artificial Sequence
  Synthetic
caaaaatatttcugaggctccagctuc

SEQ ID NO: 34981 - DNA, 22 bp, Artificial Sequence
  Synthetic
gttgcaagcugtccatctugat

SEQ ID NO: 34982 - DNA, 28 bp, Artificial Sequence
  Synthetic
ggaagaccuccagaaaagtgatactgua

SEQ ID NO: 34983 - DNA, 30 bp, Artificial Sequence
  Synthetic
aacactttatctctutgaccgatttctcut

SEQ ID NO: 34984 - DNA, 31 bp, Artificial Sequence
  Synthetic
tgaaagcaagugctattttaaguaaacaaca

SEQ ID NO: 34985 - DNA, 27 bp, Artificial Sequence
  Synthetic
gctacaattuaccacactcgtttcaut

SEQ ID NO: 34986 - DNA, 28 bp, Artificial Sequence
  Synthetic
ccggttugacaggagataatutatguaa

SEQ ID NO: 34987 - DNA, 31 bp, Artificial Sequence
  Synthetic
cctgattttucagcagutatatgactttuag

SEQ ID NO: 34988 - DNA, 23 bp, Artificial Sequence
  Synthetic
ctcttaccagucctgatgctuca

SEQ ID NO: 34989 - DNA, 27 bp, Artificial Sequence
  Synthetic
agcatcaactugacagaagctatucat

SEQ ID NO: 34990 - DNA, 22 bp, Artificial Sequence
  Synthetic
caagccactutggactcaguga

SEQ ID NO: 34991 - DNA, 26 bp, Artificial Sequence
  Synthetic
gccttattuacagtgcacatcucaca

SEQ ID NO: 34992 - DNA, 28 bp, Artificial Sequence
  Synthetic
gatactgtgtttuctgataaggcttgug

SEQ ID NO: 34993 - DNA, 30 bp, Artificial Sequence
  Synthetic
attcagggtctgucaaaatatttagatcut

SEQ ID NO: 34994 - DNA, 31 bp, Artificial Sequence
  Synthetic
cctaagugaaaaagaaguagaacttgauaag

SEQ ID NO: 34995 - DNA, 27 bp, Artificial Sequence
  Synthetic
tttctttcacttgaugtcatgctgtug

SEQ ID NO: 34996 - DNA, 28 bp, Artificial Sequence
  Synthetic
caacaccaccauctttagatttttgcua

SEQ ID NO: 34997 - DNA, 26 bp, Artificial Sequence
  Synthetic
actggatgtttuatatggctgcucac

SEQ ID NO: 34998 - DNA, 22 bp, Artificial Sequence
  Synthetic
cgcaaatcucaggtttgtccut

SEQ ID NO: 34999 - DNA, 29 bp, Artificial Sequence
  Synthetic
gcactaacatcacacutatcttgtcttuc

SEQ ID NO: 35000 - DNA, 26 bp, Artificial Sequence
  Synthetic
tcacagacauagaggaaggagtacug

SEQ ID NO: 35001 - DNA, 23 bp, Artificial Sequence
  Synthetic
cagttccucgagttcugaagagg

SEQ ID NO: 35002 - DNA, 25 bp, Artificial Sequence
  Synthetic
tgaaacctgugccaaggaaagaaua

SEQ ID NO: 35003 - DNA, 29 bp, Artificial Sequence
  Synthetic
ccacaaagagcauacagtttauccaaaga

SEQ ID NO: 35004 - DNA, 30 bp, Artificial Sequence
  Synthetic
acacccauatttactucagacagacaaaaa

SEQ ID NO: 35005 - DNA, 26 bp, Artificial Sequence
  Synthetic
attaccutcttcctcuaaccccaaga

SEQ ID NO: 35006 - DNA, 28 bp, Artificial Sequence
  Synthetic
gggtaatguggattcaaauacacaagac

SEQ ID NO: 35007 - DNA, 26 bp, Artificial Sequence
  Synthetic
tttaaggagguctcaactuggcaaat

SEQ ID NO: 35008 - DNA, 28 bp, Artificial Sequence
  Synthetic
tcutgaaagcaguagagaacaagaagat

SEQ ID NO: 35009 - DNA, 26 bp, Artificial Sequence
  Synthetic
tgaaagucaaactggttauccaaggg

SEQ ID NO: 35010 - DNA, 22 bp, Artificial Sequence
  Synthetic
caccucagtgaagugaagcaca

SEQ ID NO: 35011 - DNA, 26 bp, Artificial Sequence
  Synthetic
gcatttgcugacccataggattuact

SEQ ID NO: 35012 - DNA, 27 bp, Artificial Sequence
  Synthetic
aaacaaagcugacacattttgaucact

SEQ ID NO: 35013 - DNA, 20 bp, Artificial Sequence
  Synthetic
cacaaaggautgcccaugcc

SEQ ID NO: 35014 - DNA, 22 bp, Artificial Sequence
  Synthetic
gcagcagaugggcagctataug

SEQ ID NO: 35015 - DNA, 20 bp, Artificial Sequence
  Synthetic
cgagugacgcaaggaaggug

SEQ ID NO: 35016 - DNA, 21 bp, Artificial Sequence
  Synthetic
gtuaggccgcaaaccctuaac

SEQ ID NO: 35017 - DNA, 23 bp, Artificial Sequence
  Synthetic
ccttgaccacugtttgaugggaa

SEQ ID NO: 35018 - DNA, 23 bp, Artificial Sequence
  Synthetic
catgtcacccaugaaagcaauga

SEQ ID NO: 35019 - DNA, 24 bp, Artificial Sequence
  Synthetic
gcctataaauggacgagactgcug

SEQ ID NO: 35020 - DNA, 22 bp, Artificial Sequence
  Synthetic
cgacugataccuggccaacaac

SEQ ID NO: 35021 - DNA, 21 bp, Artificial Sequence
  Synthetic
gtaggctcugtgtcccctuac

SEQ ID NO: 35022 - DNA, 23 bp, Artificial Sequence
  Synthetic
ccggatatgacucaggttagugg

SEQ ID NO: 35023 - DNA, 23 bp, Artificial Sequence
  Synthetic
ttttcttctugggacccauccag

SEQ ID NO: 35024 - DNA, 22 bp, Artificial Sequence
  Synthetic
cgaaagccccuaagatucccaa

SEQ ID NO: 35025 - DNA, 22 bp, Artificial Sequence
  Synthetic
cacccctcauttcataggcugt

SEQ ID NO: 35026 - DNA, 26 bp, Artificial Sequence
  Synthetic
gctcggccacauttttctttttaauc

SEQ ID NO: 35027 - DNA, 28 bp, Artificial Sequence
  Synthetic
ccataaatcccacagauctggtacuaac

SEQ ID NO: 35028 - DNA, 27 bp, Artificial Sequence
  Synthetic
tttcagtcctautttgtgctcataugg

SEQ ID NO: 35029 - DNA, 30 bp, Artificial Sequence
  Synthetic
cccccatuaaaaacagaatcacaattuact

SEQ ID NO: 35030 - DNA, 29 bp, Artificial Sequence
  Synthetic
tgtatgtggtcaaaugaatccaattcuga

SEQ ID NO: 35031 - DNA, 26 bp, Artificial Sequence
  Synthetic
gctcccuggacattagtttcucaaac

SEQ ID NO: 35032 - DNA, 25 bp, Artificial Sequence
  Synthetic
gacagcagtgugtcatatccauact

SEQ ID NO: 35033 - DNA, 21 bp, Artificial Sequence
  Synthetic
aggttcggaautcccttuccc

SEQ ID NO: 35034 - DNA, 26 bp, Artificial Sequence
  Synthetic
tcagagttgutcttatagggucgagt

SEQ ID NO: 35035 - DNA, 24 bp, Artificial Sequence
  Synthetic
tgcaatcaccaauatggtcacuga

SEQ ID NO: 35036 - DNA, 27 bp, Artificial Sequence
  Synthetic
acttgcaagcaaaucatgacactagua

SEQ ID NO: 35037 - DNA, 29 bp, Artificial Sequence
  Synthetic
cttctgaatgttugttagctcaactucaa

SEQ ID NO: 35038 - DNA, 26 bp, Artificial Sequence
  Synthetic
cagtattcacgutatgctgtccaauc

SEQ ID NO: 35039 - DNA, 24 bp, Artificial Sequence
  Synthetic
gtagtctuccagtatguccaagca

SEQ ID NO: 35040 - DNA, 25 bp, Artificial Sequence
  Synthetic
aaaaggagcaaguatgttgtcgcua

SEQ ID NO: 35041 - DNA, 27 bp, Artificial Sequence
  Synthetic
guacacaggaggaaaauaaacctauca

SEQ ID NO: 35042 - DNA, 24 bp, Artificial Sequence
  Synthetic
ataccaucacattggaaugagggt

SEQ ID NO: 35043 - DNA, 28 bp, Artificial Sequence
  Synthetic
tgtcgaacattuccctttcataggaaut

SEQ ID NO: 35044 - DNA, 28 bp, Artificial Sequence
  Synthetic
actctctttgagaaaaaugcagcattug

SEQ ID NO: 35045 - DNA, 27 bp, Artificial Sequence
  Synthetic
cttcacagaatutagacccttcaucct

SEQ ID NO: 35046 - DNA, 28 bp, Artificial Sequence
  Synthetic
ataaacaaaagcugctttacattcugct

SEQ ID NO: 35047 - DNA, 25 bp, Artificial Sequence
  Synthetic
gtgttcgaaugggacttcttacuca

SEQ ID NO: 35048 - DNA, 23 bp, Artificial Sequence
  Synthetic
gctcuacagtgcagugaaggaag

SEQ ID NO: 35049 - DNA, 28 bp, Artificial Sequence
  Synthetic
ccagttgggaautctaactactgtuaca

SEQ ID NO: 35050 - DNA, 23 bp, Artificial Sequence
  Synthetic
gccaactcacugagcaagatgua

SEQ ID NO: 35051 - DNA, 22 bp, Artificial Sequence
  Synthetic
caaacagcauggtggagaccua

SEQ ID NO: 35052 - DNA, 24 bp, Artificial Sequence
  Synthetic
gattctaggttugtcagctccugt

SEQ ID NO: 35053 - DNA, 25 bp, Artificial Sequence
  Synthetic
aaaagggaatuaagctctccagguc

SEQ ID NO: 35054 - DNA, 21 bp, Artificial Sequence
  Synthetic
ggagagagggcaugtgagcua

SEQ ID NO: 35055 - DNA, 30 bp, Artificial Sequence
  Synthetic
gagatgtatucaaacagaaacgtcactuac

SEQ ID NO: 35056 - DNA, 25 bp, Artificial Sequence
  Synthetic
aaagtagcacugggcagattatuac

SEQ ID NO: 35057 - DNA, 31 bp, Artificial Sequence
  Synthetic
ggagctataaaagccaauatactcaagtuca

SEQ ID NO: 35058 - DNA, 30 bp, Artificial Sequence
  Synthetic
actgtcatttgaaucttaatgagtcaucct

SEQ ID NO: 35059 - DNA, 22 bp, Artificial Sequence
  Synthetic
cagacgtguagtcagggtugaa

SEQ ID NO: 35060 - DNA, 27 bp, Artificial Sequence
  Synthetic
tcttttcctgaaguatgatgcaagcua

SEQ ID NO: 35061 - DNA, 31 bp, Artificial Sequence
  Synthetic
ctgaagtatttcuccaaactctcatcagaut

SEQ ID NO: 35062 - DNA, 27 bp, Artificial Sequence
  Synthetic
aaagtgtacaatguagaatgccctuga

SEQ ID NO: 35063 - DNA, 21 bp, Artificial Sequence
  Synthetic
gcagagctuaagcctctcucc

SEQ ID NO: 35064 - DNA, 26 bp, Artificial Sequence
  Synthetic
cctcaatgacccugagttatcctuct

SEQ ID NO: 35065 - DNA, 22 bp, Artificial Sequence
  Synthetic
gttttcaggcucctccacttug

SEQ ID NO: 35066 - DNA, 24 bp, Artificial Sequence
  Synthetic
gcagacacugggtccaaatctaut

SEQ ID NO: 35067 - DNA, 24 bp, Artificial Sequence
  Synthetic
agtactcgugaaaaagagcaggug

SEQ ID NO: 35068 - DNA, 26 bp, Artificial Sequence
  Synthetic
gagatgaaacccgagauggattcuac

SEQ ID NO: 35069 - DNA, 27 bp, Artificial Sequence
  Synthetic
tcaagcuagaaagatttcctcuaccct

SEQ ID NO: 35070 - DNA, 23 bp, Artificial Sequence
  Synthetic
aagcagtgtugaaaggcaaaugg

SEQ ID NO: 35071 - DNA, 25 bp, Artificial Sequence
  Synthetic
cucccttttaagcugcagaaacaag

SEQ ID NO: 35072 - DNA, 21 bp, Artificial Sequence
  Synthetic
ccagctucgagagtcucaggt

SEQ ID NO: 35073 - DNA, 27 bp, Artificial Sequence
  Synthetic
agttccatttgagucttaaaggcauca

SEQ ID NO: 35074 - DNA, 29 bp, Artificial Sequence
  Synthetic
atccattctaggauagcgttttctugaaa

SEQ ID NO: 35075 - DNA, 25 bp, Artificial Sequence
  Synthetic
agcctagtcccaucttcaagatuga

SEQ ID NO: 35076 - DNA, 26 bp, Artificial Sequence
  Synthetic
atgatctgacagutctctttggcaut

SEQ ID NO: 35077 - DNA, 31 bp, Artificial Sequence
  Synthetic
ctttcttctccugtcaaagtgtttataucca

SEQ ID NO: 35078 - DNA, 29 bp, Artificial Sequence
  Synthetic
gggaagactgugtttttaatcatttguca

SEQ ID NO: 35079 - DNA, 28 bp, Artificial Sequence
  Synthetic
ggccaacagaaaauaagaaagacuaagg

SEQ ID NO: 35080 - DNA, 21 bp, Artificial Sequence
  Synthetic
atgttugaccgccttcucact

SEQ ID NO: 35081 - DNA, 22 bp, Artificial Sequence
  Synthetic
tctggagatuctgaaggcucgt

SEQ ID NO: 35082 - DNA, 19 bp, Artificial Sequence
  Synthetic
ttgggcgggcugttgaaua

SEQ ID NO: 35083 - DNA, 21 bp, Artificial Sequence
  Synthetic
gatccatucgcagagucagca

SEQ ID NO: 35084 - DNA, 23 bp, Artificial Sequence
  Synthetic
acccatccaugtttctaccucca

SEQ ID NO: 35085 - DNA, 22 bp, Artificial Sequence
  Synthetic
ctgcagtctuatccaggctcuc

SEQ ID NO: 35086 - DNA, 32 bp, Artificial Sequence
  Synthetic
actaatattaagaattuaaacacggtgcatut

SEQ ID NO: 35087 - DNA, 22 bp, Artificial Sequence
  Synthetic
gtggcacagaaguacacaguct

SEQ ID NO: 35088 - DNA, 21 bp, Artificial Sequence
  Synthetic
cctatggtgugaggcatggug

SEQ ID NO: 35089 - DNA, 28 bp, Artificial Sequence
  Synthetic
ttggcttugaatacatgaauagggaact

SEQ ID NO: 35090 - DNA, 28 bp, Artificial Sequence
  Synthetic
caaaagtccaaucacaaaatucacacac

SEQ ID NO: 35091 - DNA, 28 bp, Artificial Sequence
  Synthetic
agataucagccauccagtaaaaaucaaa

SEQ ID NO: 35092 - DNA, 20 bp, Artificial Sequence
  Synthetic
cgagcuaacagcccaggtut

SEQ ID NO: 35093 - DNA, 27 bp, Artificial Sequence
  Synthetic
ttttccuagagacctucagagaagaca

SEQ ID NO: 35094 - DNA, 28 bp, Artificial Sequence
  Synthetic
gacaatcctuccattgaagaaguaggaa

SEQ ID NO: 35095 - DNA, 27 bp, Artificial Sequence
  Synthetic
attattcacctugctccaaggatauct

SEQ ID NO: 35096 - DNA, 23 bp, Artificial Sequence
  Synthetic
ttgtgacaagaagucccacguag

SEQ ID NO: 35097 - DNA, 22 bp, Artificial Sequence
  Synthetic
ggtgttgcaacutgttccctug

SEQ ID NO: 35098 - DNA, 28 bp, Artificial Sequence
  Synthetic
tttgttgtattgaagutttggcaacuga

SEQ ID NO: 35099 - DNA, 28 bp, Artificial Sequence
  Synthetic
ggaagattttcauttggaaacctgtuct

SEQ ID NO: 35100 - DNA, 25 bp, Artificial Sequence
  Synthetic
gggtgcguagataataaacaaucca

SEQ ID NO: 35101 - DNA, 24 bp, Artificial Sequence
  Synthetic
gttctttcucttgcttgugcacag

SEQ ID NO: 35102 - DNA, 29 bp, Artificial Sequence
  Synthetic
ctctttagtacautcgtaaaggcuacagt

SEQ ID NO: 35103 - DNA, 23 bp, Artificial Sequence
  Synthetic
ctttgaccgugccttcttgttut

SEQ ID NO: 35104 - DNA, 24 bp, Artificial Sequence
  Synthetic
ccattuagaccaaaggtucccaag

SEQ ID NO: 35105 - DNA, 29 bp, Artificial Sequence
  Synthetic
atctctttaaggaugaattctgagccaut

SEQ ID NO: 35106 - DNA, 30 bp, Artificial Sequence
  Synthetic
tctagtaaactttcutgttgacatttcuga

SEQ ID NO: 35107 - DNA, 27 bp, Artificial Sequence
  Synthetic
tggcaggaagaaguatctcgtatcaua

SEQ ID NO: 35108 - DNA, 22 bp, Artificial Sequence
  Synthetic
ggcattcuagtccatgcugcaa

SEQ ID NO: 35109 - DNA, 30 bp, Artificial Sequence
  Synthetic
tggatttcgtuaggactgaatttttcguaa

SEQ ID NO: 35110 - DNA, 21 bp, Artificial Sequence
  Synthetic
ccccagaauatggcaggugac

SEQ ID NO: 35111 - DNA, 24 bp, Artificial Sequence
  Synthetic
cauaaagctucagacccacgacat

SEQ ID NO: 35112 - DNA, 24 bp, Artificial Sequence
  Synthetic
aaacagcagutatcuggcaagagt

SEQ ID NO: 35113 - DNA, 25 bp, Artificial Sequence
  Synthetic
accttattttucttccagctugcct

SEQ ID NO: 35114 - DNA, 25 bp, Artificial Sequence
  Synthetic
ttcttgcatgauggatgtgaaacug

SEQ ID NO: 35115 - DNA, 29 bp, Artificial Sequence
  Synthetic
acattaaagaggaggutctgatcacaaug

SEQ ID NO: 35116 - DNA, 21 bp, Artificial Sequence
  Synthetic
tgggtgggucataaggtguga

SEQ ID NO: 35117 - DNA, 30 bp, Artificial Sequence
  Synthetic
acaggaattcgaggauttcagtattttcut

SEQ ID NO: 35118 - DNA, 30 bp, Artificial Sequence
  Synthetic
aaagctaagactguggtgatattcatucaa

SEQ ID NO: 35119 - DNA, 25 bp, Artificial Sequence
  Synthetic
cacttttcctguttctagcctguga

SEQ ID NO: 35120 - DNA, 24 bp, Artificial Sequence
  Synthetic
gctacttcauaaactaggccugca

SEQ ID NO: 35121 - DNA, 28 bp, Artificial Sequence
  Synthetic
tgccttgaagugagtaggaattuaacaa

SEQ ID NO: 35122 - DNA, 28 bp, Artificial Sequence
  Synthetic
actatctctcucatttttgcttgauggg

SEQ ID NO: 35123 - DNA, 23 bp, Artificial Sequence
  Synthetic
gcaaatgtugccaacagcttuct

SEQ ID NO: 35124 - DNA, 25 bp, Artificial Sequence
  Synthetic
gaccaaugaccatactgaugaagga

SEQ ID NO: 35125 - DNA, 29 bp, Artificial Sequence
  Synthetic
ctttgtttcccautgtgaatatgacucag

SEQ ID NO: 35126 - DNA, 32 bp, Artificial Sequence
  Synthetic
attacttactagaagutgttttccatctucat

SEQ ID NO: 35127 - DNA, 25 bp, Artificial Sequence
  Synthetic
cctggcatccugccttatctttuaa

SEQ ID NO: 35128 - DNA, 28 bp, Artificial Sequence
  Synthetic
tccttaacctuacagagtttcatggtuc

SEQ ID NO: 35129 - DNA, 28 bp, Artificial Sequence
  Synthetic
agtttattcctgcugtgttcaggtuaaa

SEQ ID NO: 35130 - DNA, 23 bp, Artificial Sequence
  Synthetic
gttctcggcuagaaaguccaaca

SEQ ID NO: 35131 - DNA, 25 bp, Artificial Sequence
  Synthetic
gtgtacacaugtgcttcctuaaaca

SEQ ID NO: 35132 - DNA, 22 bp, Artificial Sequence
  Synthetic
tgcaucgttugagaacggaaca

SEQ ID NO: 35133 - DNA, 29 bp, Artificial Sequence
  Synthetic
gcgtggcattutaattactagaaagugat

SEQ ID NO: 35134 - DNA, 25 bp, Artificial Sequence
  Synthetic
ctcagtgaagautctgttgcagcua

SEQ ID NO: 35135 - DNA, 22 bp, Artificial Sequence
  Synthetic
ggagttugagcgggtgactuac

SEQ ID NO: 35136 - DNA, 22 bp, Artificial Sequence
  Synthetic
gcggcagaauttgagagatugt

SEQ ID NO: 35137 - DNA, 29 bp, Artificial Sequence
  Synthetic
gggtgacttgauggagtcattaatcttua

SEQ ID NO: 35138 - DNA, 18 bp, Artificial Sequence
  Synthetic
cctccctgugctctgcut

SEQ ID NO: 35139 - DNA, 20 bp, Artificial Sequence
  Synthetic
ctcccagucctccttuccag

SEQ ID NO: 35140 - DNA, 18 bp, Artificial Sequence
  Synthetic
caacgaguccacgtcguc

SEQ ID NO: 35141 - DNA, 19 bp, Artificial Sequence
  Synthetic
gcagtccucctcguccaca

SEQ ID NO: 35142 - DNA, 19 bp, Artificial Sequence
  Synthetic
acgagagugagcgggacua

SEQ ID NO: 35143 - DNA, 19 bp, Artificial Sequence
  Synthetic
ggccagguggacagaagug

SEQ ID NO: 35144 - DNA, 23 bp, Artificial Sequence
  Synthetic
cctcatccuccattcccatucac

SEQ ID NO: 35145 - DNA, 25 bp, Artificial Sequence
  Synthetic
gaaaggacacuagctcctagaucct

SEQ ID NO: 35146 - DNA, 23 bp, Artificial Sequence
  Synthetic
catttguggagcacttgauccct

SEQ ID NO: 35147 - DNA, 22 bp, Artificial Sequence
  Synthetic
ggtagaugagctccucagcaga

SEQ ID NO: 35148 - DNA, 21 bp, Artificial Sequence
  Synthetic
tggaagcuaagggtccgtcut

SEQ ID NO: 35149 - DNA, 18 bp, Artificial Sequence
  Synthetic
ggagcugttcccgugcag

SEQ ID NO: 35150 - DNA, 21 bp, Artificial Sequence
  Synthetic
ggtgggacugtgctttcugac

SEQ ID NO: 35151 - DNA, 26 bp, Artificial Sequence
  Synthetic
cacagtgagaaugaaattagggcuct

SEQ ID NO: 35152 - DNA, 20 bp, Artificial Sequence
  Synthetic
cagtgcugtgacuggacact

SEQ ID NO: 35153 - DNA, 22 bp, Artificial Sequence
  Synthetic
tggatcuaagccacaugacgac

SEQ ID NO: 35154 - DNA, 23 bp, Artificial Sequence
  Synthetic
cugatatgtggugaagccagact

SEQ ID NO: 35155 - DNA, 17 bp, Artificial Sequence
  Synthetic
agugctgggugcagacg

SEQ ID NO: 35156 - DNA, 19 bp, Artificial Sequence
  Synthetic
ccacccgcuttctgtcuct

SEQ ID NO: 35157 - DNA, 17 bp, Artificial Sequence
  Synthetic
ccugccccauccagagg

SEQ ID NO: 35158 - DNA, 23 bp, Artificial Sequence
  Synthetic
catctgctcuccctagacagcua

SEQ ID NO: 35159 - DNA, 22 bp, Artificial Sequence
  Synthetic
ggtcctggcugttgtaagacuc

SEQ ID NO: 35160 - DNA, 19 bp, Artificial Sequence
  Synthetic
tgtggacccccutgacuga

SEQ ID NO: 35161 - DNA, 19 bp, Artificial Sequence
  Synthetic
gacagugagcggcacugat

SEQ ID NO: 35162 - DNA, 23 bp, Artificial Sequence
  Synthetic
ccttaacuaacacgggctctcut

SEQ ID NO: 35163 - DNA, 20 bp, Artificial Sequence
  Synthetic
cctcagcuagccctccucat

SEQ ID NO: 35164 - DNA, 21 bp, Artificial Sequence
  Synthetic
ctacatcgcaguctcctucgt

SEQ ID NO: 35165 - DNA, 19 bp, Artificial Sequence
  Synthetic
agccccagccauaaaggug

SEQ ID NO: 35166 - DNA, 24 bp, Artificial Sequence
  Synthetic
ctctcgaugcaactctatcgucac

SEQ ID NO: 35167 - DNA, 28 bp, Artificial Sequence
  Synthetic
ccgcaaatcccacuagctaaatatcuaa

SEQ ID NO: 35168 - DNA, 22 bp, Artificial Sequence
  Synthetic
cactgaauagggctttggccut

SEQ ID NO: 35169 - DNA, 21 bp, Artificial Sequence
  Synthetic
caattggtggugtggccaauc

SEQ ID NO: 35170 - DNA, 23 bp, Artificial Sequence
  Synthetic
gttcctccucagcctctttctut

SEQ ID NO: 35171 - DNA, 22 bp, Artificial Sequence
  Synthetic
gccttccaguttggacctccua

SEQ ID NO: 35172 - DNA, 20 bp, Artificial Sequence
  Synthetic
cctgcuccaccgaggtctua

SEQ ID NO: 35173 - DNA, 22 bp, Artificial Sequence
  Synthetic
cautccccaaacugccaaacag

SEQ ID NO: 35174 - DNA, 22 bp, Artificial Sequence
  Synthetic
tctttagccaguggcttggtut

SEQ ID NO: 35175 - DNA, 25 bp, Artificial Sequence
  Synthetic
cagataccagaaucagaggacucac

SEQ ID NO: 35176 - DNA, 22 bp, Artificial Sequence
  Synthetic
cctcttgcucctctgcttaguc

SEQ ID NO: 35177 - DNA, 23 bp, Artificial Sequence
  Synthetic
gaatgcctccucctcatttcuca

SEQ ID NO: 35178 - DNA, 24 bp, Artificial Sequence
  Synthetic
ggacatgcutctcttaactuccct

SEQ ID NO: 35179 - DNA, 27 bp, Artificial Sequence
  Synthetic
aggaaagtccugatttctttagctugg

SEQ ID NO: 35180 - DNA, 23 bp, Artificial Sequence
  Synthetic
ccagtgcttcuccctcaactaug

SEQ ID NO: 35181 - DNA, 23 bp, Artificial Sequence
  Synthetic
ccttgaggugaggaactttgcut

SEQ ID NO: 35182 - DNA, 20 bp, Artificial Sequence
  Synthetic
cccttcagauggccctggua

SEQ ID NO: 35183 - DNA, 21 bp, Artificial Sequence
  Synthetic
ccaggucagacgctcauagac

SEQ ID NO: 35184 - DNA, 20 bp, Artificial Sequence
  Synthetic
agtggcaucttgcuccacac

SEQ ID NO: 35185 - DNA, 20 bp, Artificial Sequence
  Synthetic
acccuggagccctaacctut

SEQ ID NO: 35186 - DNA, 18 bp, Artificial Sequence
  Synthetic
ccugcagcccagcagaua

SEQ ID NO: 35187 - DNA, 20 bp, Artificial Sequence
  Synthetic
ggtaugagccagctctucca

SEQ ID NO: 35188 - DNA, 18 bp, Artificial Sequence
  Synthetic
cttctuccgccagucggt

SEQ ID NO: 35189 - DNA, 18 bp, Artificial Sequence
  Synthetic
gtcctccgcucggctuag

SEQ ID NO: 35190 - DNA, 22 bp, Artificial Sequence
  Synthetic
atgaagccaccaugcctacaut

SEQ ID NO: 35191 - DNA, 22 bp, Artificial Sequence
  Synthetic
ggcccacuaagatgggcattut

SEQ ID NO: 35192 - DNA, 23 bp, Artificial Sequence
  Synthetic
tgatgctggccucatatgttugt

SEQ ID NO: 35193 - DNA, 27 bp, Artificial Sequence
  Synthetic
acutacttcttcauaacgaggaacagc

SEQ ID NO: 35194 - DNA, 21 bp, Artificial Sequence
  Synthetic
gtcgaugtgtgguagccagag

SEQ ID NO: 35195 - DNA, 20 bp, Artificial Sequence
  Synthetic
gatggugcagcaggttccua

SEQ ID NO: 35196 - DNA, 24 bp, Artificial Sequence
  Synthetic
gagttcagatuagcccatggauca

SEQ ID NO: 35197 - DNA, 22 bp, Artificial Sequence
  Synthetic
gccguagaagggatugacaagc

SEQ ID NO: 35198 - DNA, 23 bp, Artificial Sequence
  Synthetic
ctcacuaacaaagcaggcttugg

SEQ ID NO: 35199 - DNA, 26 bp, Artificial Sequence
  Synthetic
gccaaccaucttgtctaactucagat

SEQ ID NO: 35200 - DNA, 20 bp, Artificial Sequence
  Synthetic
ctcctccuctgctcauggag

SEQ ID NO: 35201 - DNA, 22 bp, Artificial Sequence
  Synthetic
aggactgcagacugaactcuca

SEQ ID NO: 35202 - DNA, 22 bp, Artificial Sequence
  Synthetic
acgtctggagauaggaggcuat

SEQ ID NO: 35203 - DNA, 22 bp, Artificial Sequence
  Synthetic
ctagctaggugtcctgtuccac

SEQ ID NO: 35204 - DNA, 21 bp, Artificial Sequence
  Synthetic
ccatctccugaccctcctcuc

SEQ ID NO: 35205 - DNA, 17 bp, Artificial Sequence
  Synthetic
actgcucccccgacuca

SEQ ID NO: 35206 - DNA, 20 bp, Artificial Sequence
  Synthetic
cctugagccagggctguaag

SEQ ID NO: 35207 - DNA, 17 bp, Artificial Sequence
  Synthetic
cuccugcccaccagagg

SEQ ID NO: 35208 - DNA, 19 bp, Artificial Sequence
  Synthetic
ggtcaguccttccgacuct

SEQ ID NO: 35209 - DNA, 18 bp, Artificial Sequence
  Synthetic
gctccgagccaugcaucc

SEQ ID NO: 35210 - DNA, 21 bp, Artificial Sequence
  Synthetic
gcagatcttccucccctccuc

SEQ ID NO: 35211 - DNA, 23 bp, Artificial Sequence
  Synthetic
accaaatgugaagacgugggaat

SEQ ID NO: 35212 - DNA, 18 bp, Artificial Sequence
  Synthetic
cccagcaugaccccugaa

SEQ ID NO: 35213 - DNA, 19 bp, Artificial Sequence
  Synthetic
tgggtccuggaggtcucac

SEQ ID NO: 35214 - DNA, 20 bp, Artificial Sequence
  Synthetic
gcguccacgagcagaacuac

SEQ ID NO: 35215 - DNA, 21 bp, Artificial Sequence
  Synthetic
tgtgggaagutggcatctguc

SEQ ID NO: 35216 - DNA, 22 bp, Artificial Sequence
  Synthetic
ccctcagcugtgagtgtatuga

SEQ ID NO: 35217 - DNA, 24 bp, Artificial Sequence
  Synthetic
accctgtatguccttgtgacuact

SEQ ID NO: 35218 - DNA, 24 bp, Artificial Sequence
  Synthetic
gagggagutgaagaugacaaggaa

SEQ ID NO: 35219 - DNA, 30 bp, Artificial Sequence
  Synthetic
caggagugggaaaagautaaatattcauac

SEQ ID NO: 35220 - DNA, 31 bp, Artificial Sequence
  Synthetic
gttcatgtatcaaucagatgtgaattcucaa

SEQ ID NO: 35221 - DNA, 25 bp, Artificial Sequence
  Synthetic
auccttucacagaauacacaacaga

SEQ ID NO: 35222 - DNA, 20 bp, Artificial Sequence
  Synthetic
gtatacguggtggcugcaga

SEQ ID NO: 35223 - DNA, 19 bp, Artificial Sequence
  Synthetic
cgugcaggaugaccagcag

SEQ ID NO: 35224 - DNA, 24 bp, Artificial Sequence
  Synthetic
agcctcatctucaagctcatcaut

SEQ ID NO: 35225 - DNA, 21 bp, Artificial Sequence
  Synthetic
tgagguagcagagcucacaga

SEQ ID NO: 35226 - DNA, 23 bp, Artificial Sequence
  Synthetic
auccagacccaggcaauaacaag

SEQ ID NO: 35227 - DNA, 27 bp, Artificial Sequence
  Synthetic
gccaaaacgaaagutgcataactuagt

SEQ ID NO: 35228 - DNA, 25 bp, Artificial Sequence
  Synthetic
aggacauagacttugaaacaagcga

SEQ ID NO: 35229 - DNA, 22 bp, Artificial Sequence
  Synthetic
catcacttttugtgtggccucc

SEQ ID NO: 35230 - DNA, 22 bp, Artificial Sequence
  Synthetic
gtctggagggcugagaaugaac

SEQ ID NO: 35231 - DNA, 22 bp, Artificial Sequence
  Synthetic
gatgttctaucagcgcauccac

SEQ ID NO: 35232 - DNA, 24 bp, Artificial Sequence
  Synthetic
ccatatgguaacagaagauggcaa

SEQ ID NO: 35233 - DNA, 24 bp, Artificial Sequence
  Synthetic
cccacatcauaccattcctuggat

SEQ ID NO: 35234 - DNA, 21 bp, Artificial Sequence
  Synthetic
guaaaggaaagggcuccagca

SEQ ID NO: 35235 - DNA, 26 bp, Artificial Sequence
  Synthetic
gctgtgtgtcauatctgagcttctut

SEQ ID NO: 35236 - DNA, 23 bp, Artificial Sequence
  Synthetic
ccaggacaguttggguaaacagt

SEQ ID NO: 35237 - DNA, 28 bp, Artificial Sequence
  Synthetic
cctgtagcttgaucacctcattctttut

SEQ ID NO: 35238 - DNA, 25 bp, Artificial Sequence
  Synthetic
ggctgatgucttgtgcaaatauagt

SEQ ID NO: 35239 - DNA, 26 bp, Artificial Sequence
  Synthetic
tcggagcuaaaactcccttttatucc

SEQ ID NO: 35240 - DNA, 25 bp, Artificial Sequence
  Synthetic
agaatcccauagcattgtagcctug

SEQ ID NO: 35241 - DNA, 26 bp, Artificial Sequence
  Synthetic
agaagatgucagtggttgtttucagt

SEQ ID NO: 35242 - DNA, 21 bp, Artificial Sequence
  Synthetic
cctcuacacccgcatttugca

SEQ ID NO: 35243 - DNA, 22 bp, Artificial Sequence
  Synthetic
ggucatgugacacagcgaagat

SEQ ID NO: 35244 - DNA, 17 bp, Artificial Sequence
  Synthetic
gtccgagccaugcguct

SEQ ID NO: 35245 - DNA, 17 bp, Artificial Sequence
  Synthetic
ccctgutcgctcugcac

SEQ ID NO: 35246 - DNA, 23 bp, Artificial Sequence
  Synthetic
taatgttctccuctcttggcuct

SEQ ID NO: 35247 - DNA, 19 bp, Artificial Sequence
  Synthetic
ccggacucccagcactuac

SEQ ID NO: 35248 - DNA, 20 bp, Artificial Sequence
  Synthetic
gagtacatcguccgggtcug

SEQ ID NO: 35249 - DNA, 21 bp, Artificial Sequence
  Synthetic
tcagagtcgggautgggagua

SEQ ID NO: 35250 - DNA, 18 bp, Artificial Sequence
  Synthetic
gcagatccugcgcauggt

SEQ ID NO: 35251 - DNA, 19 bp, Artificial Sequence
  Synthetic
agacagccccuctgaccuc

SEQ ID NO: 35252 - DNA, 20 bp, Artificial Sequence
  Synthetic
gtgaccagucctgcctguaa

SEQ ID NO: 35253 - DNA, 20 bp, Artificial Sequence
  Synthetic
tccccaggcaaaugtgugac

SEQ ID NO: 35254 - DNA, 19 bp, Artificial Sequence
  Synthetic
gggacugagaggccucact

SEQ ID NO: 35255 - DNA, 22 bp, Artificial Sequence
  Synthetic
cacttgtccucaaagggcatug

SEQ ID NO: 35256 - DNA, 21 bp, Artificial Sequence
  Synthetic
tcttgttugagcacgugcaac

SEQ ID NO: 35257 - DNA, 25 bp, Artificial Sequence
  Synthetic
gtcugagagaggaugaagacagaga

SEQ ID NO: 35258 - DNA, 21 bp, Artificial Sequence
  Synthetic
gcatcuggcaccuccaacaat

SEQ ID NO: 35259 - DNA, 18 bp, Artificial Sequence
  Synthetic
gccctcgaucggacucag

SEQ ID NO: 35260 - DNA, 23 bp, Artificial Sequence
  Synthetic
gggauagcaaagagauggagagg

SEQ ID NO: 35261 - DNA, 22 bp, Artificial Sequence
  Synthetic
gcctgctgaguactgctcaaug

SEQ ID NO: 35262 - DNA, 23 bp, Artificial Sequence
  Synthetic
cctctgatggutcccttacccut

SEQ ID NO: 35263 - DNA, 21 bp, Artificial Sequence
  Synthetic
gcttcttgguatggccagcuc

SEQ ID NO: 35264 - DNA, 19 bp, Artificial Sequence
  Synthetic
gcttctautcgcgcugcct

SEQ ID NO: 35265 - DNA, 21 bp, Artificial Sequence
  Synthetic
gcctcugagaagtcccucagt

SEQ ID NO: 35266 - DNA, 24 bp, Artificial Sequence
  Synthetic
tgtcuccaaggaggaaaugaacua

SEQ ID NO: 35267 - DNA, 22 bp, Artificial Sequence
  Synthetic
gtgtcctcgaucttctgctuca

SEQ ID NO: 35268 - DNA, 21 bp, Artificial Sequence
  Synthetic
aggcctgaaggutaaggtgug

SEQ ID NO: 35269 - DNA, 20 bp, Artificial Sequence
  Synthetic
tcagtcagcautcggaggug

SEQ ID NO: 35270 - DNA, 22 bp, Artificial Sequence
  Synthetic
cataacucccctcatgcugaca

SEQ ID NO: 35271 - DNA, 27 bp, Artificial Sequence
  Synthetic
agcctctattuacattttccctcucac

SEQ ID NO: 35272 - DNA, 23 bp, Artificial Sequence
  Synthetic
acccagaaaaccucatgactgug

SEQ ID NO: 35273 - DNA, 20 bp, Artificial Sequence
  Synthetic
cccaauagggccaatcgtug

SEQ ID NO: 35274 - DNA, 17 bp, Artificial Sequence
  Synthetic
gcatccccuggccctug

SEQ ID NO: 35275 - DNA, 24 bp, Artificial Sequence
  Synthetic
aaactcattugaaggcagauggga

SEQ ID NO: 35276 - DNA, 24 bp, Artificial Sequence
  Synthetic
ttgaacaguccatgaaaggugaca

SEQ ID NO: 35277 - DNA, 31 bp, Artificial Sequence
  Synthetic
cttgggctttuaaaaactcaatattgccuaa

SEQ ID NO: 35278 - DNA, 28 bp, Artificial Sequence
  Synthetic
tgtgagaaagaaaaaucaaucaagcaat

SEQ ID NO: 35279 - DNA, 27 bp, Artificial Sequence
  Synthetic
ttcctaagcatgugctctatttcguag

SEQ ID NO: 35280 - DNA, 25 bp, Artificial Sequence
  Synthetic
ggaggacaatucctgagagagauga

SEQ ID NO: 35281 - DNA, 30 bp, Artificial Sequence
  Synthetic
cctgtgctcatguttgactttttattttug

SEQ ID NO: 35282 - DNA, 28 bp, Artificial Sequence
  Synthetic
caatcagaaacccautgtcttcauaggt

SEQ ID NO: 35283 - DNA, 30 bp, Artificial Sequence
  Synthetic
caagtttgtgattcugaagaagatgtgtut

SEQ ID NO: 35284 - DNA, 27 bp, Artificial Sequence
  Synthetic
gtgatcaggatuggtatcaaagguagg

SEQ ID NO: 35285 - DNA, 27 bp, Artificial Sequence
  Synthetic
ctcttccaaagccutttaaaaccacut

SEQ ID NO: 35286 - DNA, 30 bp, Artificial Sequence
  Synthetic
aaattctaaattccugaacatcaccuagca

SEQ ID NO: 35287 - DNA, 28 bp, Artificial Sequence
  Synthetic
catggcttgaaaautactggacugaaaa

SEQ ID NO: 35288 - DNA, 21 bp, Artificial Sequence
  Synthetic
ccaagcuaggccctacttuga

SEQ ID NO: 35289 - DNA, 24 bp, Artificial Sequence
  Synthetic
aatgttctgtcuccccttcaucac

SEQ ID NO: 35290 - DNA, 25 bp, Artificial Sequence
  Synthetic
caggtcattaaucaatgccttcuct

SEQ ID NO: 35291 - DNA, 28 bp, Artificial Sequence
  Synthetic
ccaaagccataacuccttttaagggaut

SEQ ID NO: 35292 - DNA, 24 bp, Artificial Sequence
  Synthetic
cagatcugcttgaaaugagagcaa

SEQ ID NO: 35293 - DNA, 23 bp, Artificial Sequence
  Synthetic
gcagcgaatucagaaagagguct

SEQ ID NO: 35294 - DNA, 21 bp, Artificial Sequence
  Synthetic
gggctctcugtaggaggcaua

SEQ ID NO: 35295 - DNA, 26 bp, Artificial Sequence
  Synthetic
cctaatctcgcucttctcttaccuct

SEQ ID NO: 35296 - DNA, 21 bp, Artificial Sequence
  Synthetic
ggaggaggagaccuggaacug

SEQ ID NO: 35297 - DNA, 23 bp, Artificial Sequence
  Synthetic
ctuaggcccaaccacuaacagag

SEQ ID NO: 35298 - DNA, 20 bp, Artificial Sequence
  Synthetic
ccagcccugggaatctctug

SEQ ID NO: 35299 - DNA, 21 bp, Artificial Sequence
  Synthetic
ctgtcagcucatccuccacag

SEQ ID NO: 35300 - DNA, 24 bp, Artificial Sequence
  Synthetic
gtggccauaacaaaacautttuca

SEQ ID NO: 35301 - DNA, 28 bp, Artificial Sequence
  Synthetic
tccactcctugaaggatactcagtaaut

SEQ ID NO: 35302 - DNA, 27 bp, Artificial Sequence
  Synthetic
gtgacttgcatuatggcattatgtucc

SEQ ID NO: 35303 - DNA, 23 bp, Artificial Sequence
  Synthetic
tctcagttcucagtccggttuct

SEQ ID NO: 35304 - DNA, 24 bp, Artificial Sequence
  Synthetic
tgggtataagguccagttcuggat

SEQ ID NO: 35305 - DNA, 26 bp, Artificial Sequence
  Synthetic
tgaagtggacucaattcctgttgaug

SEQ ID NO: 35306 - DNA, 22 bp, Artificial Sequence
  Synthetic
ggaggaagaaaguggcacucat

SEQ ID NO: 35307 - DNA, 29 bp, Artificial Sequence
  Synthetic
gcagtgctattaccutcatcttggaatua

SEQ ID NO: 35308 - DNA, 22 bp, Artificial Sequence
  Synthetic
cccaggutttctgucaggagat

SEQ ID NO: 35309 - DNA, 22 bp, Artificial Sequence
  Synthetic
tgctctccucttctcttuccga

SEQ ID NO: 35310 - DNA, 21 bp, Artificial Sequence
  Synthetic
gggctcacuccactgauaaac

SEQ ID NO: 35311 - DNA, 23 bp, Artificial Sequence
  Synthetic
tccttctgcucttccctctucat

SEQ ID NO: 35312 - DNA, 21 bp, Artificial Sequence
  Synthetic
gctgtgguggcttacactgua

SEQ ID NO: 35313 - DNA, 21 bp, Artificial Sequence
  Synthetic
ctcagaugtcctcuccaccct

SEQ ID NO: 35314 - DNA, 29 bp, Artificial Sequence
  Synthetic
ggtcaagtacctuaatgttgtcttcagut

SEQ ID NO: 35315 - DNA, 26 bp, Artificial Sequence
  Synthetic
gggtatguaaacagactggagattug

SEQ ID NO: 35316 - DNA, 22 bp, Artificial Sequence
  Synthetic
gtgtcttgugacttccugagca

SEQ ID NO: 35317 - DNA, 28 bp, Artificial Sequence
  Synthetic
tgctgtacttguggtattcattgcatua

SEQ ID NO: 35318 - DNA, 27 bp, Artificial Sequence
  Synthetic
ctgccagttugaaatgttagtttguga

SEQ ID NO: 35319 - DNA, 23 bp, Artificial Sequence
  Synthetic
tgtuccagaagcagaaauggaca

SEQ ID NO: 35320 - DNA, 20 bp, Artificial Sequence
  Synthetic
caacgccugccatctugaac

SEQ ID NO: 35321 - DNA, 25 bp, Artificial Sequence
  Synthetic
ccagtcacatguctcactctgtcua

SEQ ID NO: 35322 - DNA, 23 bp, Artificial Sequence
  Synthetic
cagcuaaacaccgaccgacaaua

SEQ ID NO: 35323 - DNA, 21 bp, Artificial Sequence
  Synthetic
ccaggacuccaatgtctgcuc

SEQ ID NO: 35324 - DNA, 21 bp, Artificial Sequence
  Synthetic
ccagccccutagacttucgag

SEQ ID NO: 35325 - DNA, 27 bp, Artificial Sequence
  Synthetic
caacaaaacagagcutgggttagatut

SEQ ID NO: 35326 - DNA, 28 bp, Artificial Sequence
  Synthetic
gcatatgctctgugcttgaagttctuat

SEQ ID NO: 35327 - DNA, 23 bp, Artificial Sequence
  Synthetic
acagagcuggcatcagtctttut

SEQ ID NO: 35328 - DNA, 24 bp, Artificial Sequence
  Synthetic
aaatcttcugcaaatggucccaga

SEQ ID NO: 35329 - DNA, 21 bp, Artificial Sequence
  Synthetic
ctttggcacaggcutgtacut

SEQ ID NO: 35330 - DNA, 21 bp, Artificial Sequence
  Synthetic
gagacugagcagcagctgtua

SEQ ID NO: 35331 - DNA, 24 bp, Artificial Sequence
  Synthetic
cttaactctcccguccttcttgug

SEQ ID NO: 35332 - DNA, 21 bp, Artificial Sequence
  Synthetic
tgggctcuagagaagtgugct

SEQ ID NO: 35333 - DNA, 19 bp, Artificial Sequence
  Synthetic
cactgacgccugtgttcug

SEQ ID NO: 35334 - DNA, 20 bp, Artificial Sequence
  Synthetic
caggaaugcggtgatcuggt

SEQ ID NO: 35335 - DNA, 27 bp, Artificial Sequence
  Synthetic
gggccatgtaautaggcattatgttua

SEQ ID NO: 35336 - DNA, 21 bp, Artificial Sequence
  Synthetic
cguttacauagagggccacct

SEQ ID NO: 35337 - DNA, 25 bp, Artificial Sequence
  Synthetic
gtaaggtaggauagggagactccut

SEQ ID NO: 35338 - DNA, 23 bp, Artificial Sequence
  Synthetic
ctgatcaagguaccaagcgagua

SEQ ID NO: 35339 - DNA, 22 bp, Artificial Sequence
  Synthetic
gctctttttcugtgccctcucc

SEQ ID NO: 35340 - DNA, 21 bp, Artificial Sequence
  Synthetic
cagaaagcacagcaugauggt

SEQ ID NO: 35341 - DNA, 22 bp, Artificial Sequence
  Synthetic
gcacatggagugtgcguagaaa

SEQ ID NO: 35342 - DNA, 22 bp, Artificial Sequence
  Synthetic
gauggagaagctguccaggaac

SEQ ID NO: 35343 - DNA, 27 bp, Artificial Sequence
  Synthetic
gcactctactatuctgcttctctccut

SEQ ID NO: 35344 - DNA, 27 bp, Artificial Sequence
  Synthetic
tgatttatgaguccagtctcaauccct

SEQ ID NO: 35345 - DNA, 21 bp, Artificial Sequence
  Synthetic
ccggaguggtattcccugaca

SEQ ID NO: 35346 - DNA, 25 bp, Artificial Sequence
  Synthetic
gggatgtagggautcttgtttctuc

SEQ ID NO: 35347 - DNA, 25 bp, Artificial Sequence
  Synthetic
caacttcgacuggagggacatatut

SEQ ID NO: 35348 - DNA, 23 bp, Artificial Sequence
  Synthetic
gggcctgcutgttgtatttugat

SEQ ID NO: 35349 - DNA, 25 bp, Artificial Sequence
  Synthetic
guacttcttugacaacagcacacag

SEQ ID NO: 35350 - DNA, 20 bp, Artificial Sequence
  Synthetic
gggagguccaggguacacaa

SEQ ID NO: 35351 - DNA, 26 bp, Artificial Sequence
  Synthetic
tctgtaaaatcugtcccttgtcucct

SEQ ID NO: 35352 - DNA, 27 bp, Artificial Sequence
  Synthetic
caatcccuagaaaggccutatagtuat

SEQ ID NO: 35353 - DNA, 22 bp, Artificial Sequence
  Synthetic
ctgaagacttugccttgcccua

SEQ ID NO: 35354 - DNA, 28 bp, Artificial Sequence
  Synthetic
cctcttgaatucttggtgacataucaga

SEQ ID NO: 35355 - DNA, 30 bp, Artificial Sequence
  Synthetic
aaattgttttactgucaattacagctuccc

SEQ ID NO: 35356 - DNA, 23 bp, Artificial Sequence
  Synthetic
agagcttgaagaaguccacgtug

SEQ ID NO: 35357 - DNA, 21 bp, Artificial Sequence
  Synthetic
ccacagggcaguttctagugt

SEQ ID NO: 35358 - DNA, 21 bp, Artificial Sequence
  Synthetic
ccttcctgccuccgctaguat

SEQ ID NO: 35359 - DNA, 22 bp, Artificial Sequence
  Synthetic
gacagagcuacacatcttgucc

SEQ ID NO: 35360 - DNA, 22 bp, Artificial Sequence
  Synthetic
tgcatgguagggatcucaacac

SEQ ID NO: 35361 - DNA, 27 bp, Artificial Sequence
  Synthetic
ccgtcttgtccucattttctgtttuaa

SEQ ID NO: 35362 - DNA, 22 bp, Artificial Sequence
  Synthetic
ccccacactuccaacctgttua

SEQ ID NO: 35363 - DNA, 22 bp, Artificial Sequence
  Synthetic
gggcttcgugagacagauacag

SEQ ID NO: 35364 - DNA, 29 bp, Artificial Sequence
  Synthetic
tgtaattaugccaagaaaucatatgcuca

SEQ ID NO: 35365 - DNA, 29 bp, Artificial Sequence
  Synthetic
tgcaagagagcutataatttggattgugt

SEQ ID NO: 35366 - DNA, 21 bp, Artificial Sequence
  Synthetic
cgtaactcutggccagtucgt

SEQ ID NO: 35367 - DNA, 29 bp, Artificial Sequence
  Synthetic
ctgtacccagccuaatcttgtttttctua

SEQ ID NO: 35368 - DNA, 22 bp, Artificial Sequence
  Synthetic
ccttcgccugtcctcatgtaut

SEQ ID NO: 35369 - DNA, 32 bp, Artificial Sequence
  Synthetic
cctgtggttttuaataaaaattgaactuccct

SEQ ID NO: 35370 - DNA, 31 bp, Artificial Sequence
  Synthetic
tttttaggtgtaguattgagtcctgttugag

SEQ ID NO: 35371 - DNA, 27 bp, Artificial Sequence
  Synthetic
cttcactgtctuctctatccatggtut

SEQ ID NO: 35372 - DNA, 26 bp, Artificial Sequence
  Synthetic
gactgtguactcttaccttuccaacc

SEQ ID NO: 35373 - DNA, 28 bp, Artificial Sequence
  Synthetic
gtcctgagcucattagacagtaaatugt

SEQ ID NO: 35374 - DNA, 25 bp, Artificial Sequence
  Synthetic
tgaaugggagaaguaagaaggagaa

SEQ ID NO: 35375 - DNA, 27 bp, Artificial Sequence
  Synthetic
tgtgccaaagautattctgtucagagt

SEQ ID NO: 35376 - DNA, 23 bp, Artificial Sequence
  Synthetic
ggctgccacuttcatgaatgaug

SEQ ID NO: 35377 - DNA, 28 bp, Artificial Sequence
  Synthetic
aggtatttatugcttctcaaactucaga

SEQ ID NO: 35378 - DNA, 23 bp, Artificial Sequence
  Synthetic
gcaugcctactcugaaagccaat

SEQ ID NO: 35379 - DNA, 23 bp, Artificial Sequence
  Synthetic
ctaagccagauacctttguccgt

SEQ ID NO: 35380 - DNA, 28 bp, Artificial Sequence
  Synthetic
cctaagaaggagcuaaaggaaggagaua

SEQ ID NO: 35381 - DNA, 30 bp, Artificial Sequence
  Synthetic
tgagtcttaaacucagctgattaaaaacug

SEQ ID NO: 35382 - DNA, 29 bp, Artificial Sequence
  Synthetic
ctttggtatacuaatatctctgccugaca

SEQ ID NO: 35383 - DNA, 22 bp, Artificial Sequence
  Synthetic
ccactgagaaaugcaccttugg

SEQ ID NO: 35384 - DNA, 21 bp, Artificial Sequence
  Synthetic
ccagcuggagaagtgactuca

SEQ ID NO: 35385 - DNA, 21 bp, Artificial Sequence
  Synthetic
gaggttuccacccaaucccat

SEQ ID NO: 35386 - DNA, 22 bp, Artificial Sequence
  Synthetic
aggcagcugctgatgcuaaaat

SEQ ID NO: 35387 - DNA, 25 bp, Artificial Sequence
  Synthetic
tctccctcaaguttttcagacucac

SEQ ID NO: 35388 - DNA, 33 bp, Artificial Sequence
  Synthetic
atattatttgtttagaaccugaatctcaaguct

SEQ ID NO: 35389 - DNA, 28 bp, Artificial Sequence
  Synthetic
caggagttggcuaaagttttacaatgut

SEQ ID NO: 35390 - DNA, 22 bp, Artificial Sequence
  Synthetic
ctacagagaacauggctcguga

SEQ ID NO: 35391 - DNA, 19 bp, Artificial Sequence
  Synthetic
aggcaagggcutgcaguag

SEQ ID NO: 35392 - DNA, 21 bp, Artificial Sequence
  Synthetic
ctgctgugccctctttaguca

SEQ ID NO: 35393 - DNA, 19 bp, Artificial Sequence
  Synthetic
tcagcttcucctcccugct

SEQ ID NO: 35394 - DNA, 21 bp, Artificial Sequence
  Synthetic
tccctcguggtgtagagugat

SEQ ID NO: 35395 - DNA, 20 bp, Artificial Sequence
  Synthetic
tgggtgcguaactttgucga

SEQ ID NO: 35396 - DNA, 27 bp, Artificial Sequence
  Synthetic
gcttctgtcaguctttggtgaaacuag

SEQ ID NO: 35397 - DNA, 21 bp, Artificial Sequence
  Synthetic
caccatgcuctttgccucaga

SEQ ID NO: 35398 - DNA, 27 bp, Artificial Sequence
  Synthetic
catagttggguagagaaatcgctcuaa

SEQ ID NO: 35399 - DNA, 20 bp, Artificial Sequence
  Synthetic
ccccugaacaucagcgagac

SEQ ID NO: 35400 - DNA, 24 bp, Artificial Sequence
  Synthetic
ggacacagaucagcatggcuaaat

SEQ ID NO: 35401 - DNA, 21 bp, Artificial Sequence
  Synthetic
catcacccacutggcucaaga

SEQ ID NO: 35402 - DNA, 22 bp, Artificial Sequence
  Synthetic
agtttcucaacccccagacauc

SEQ ID NO: 35403 - DNA, 26 bp, Artificial Sequence
  Synthetic
gaatcggatauaacatcatccgggua

SEQ ID NO: 35404 - DNA, 22 bp, Artificial Sequence
  Synthetic
guatcaguacccagcgggaaac

SEQ ID NO: 35405 - DNA, 23 bp, Artificial Sequence
  Synthetic
cttcagccgcuatgagaguacac

SEQ ID NO: 35406 - DNA, 24 bp, Artificial Sequence
  Synthetic
actggaaggcuaccaaaggacuat

SEQ ID NO: 35407 - DNA, 21 bp, Artificial Sequence
  Synthetic
tgcccaggagaguagtugagg

SEQ ID NO: 35408 - DNA, 20 bp, Artificial Sequence
  Synthetic
actgcucacccagaaagugc

SEQ ID NO: 35409 - DNA, 21 bp, Artificial Sequence
  Synthetic
ttcctgctgucggacactuac

SEQ ID NO: 35410 - DNA, 23 bp, Artificial Sequence
  Synthetic
gctggutatttcacaucagagca

SEQ ID NO: 35411 - DNA, 23 bp, Artificial Sequence
  Synthetic
gctctctacccacuctaccccua

SEQ ID NO: 35412 - DNA, 24 bp, Artificial Sequence
  Synthetic
cctctatgtcccuttcccttccut

SEQ ID NO: 35413 - DNA, 25 bp, Artificial Sequence
  Synthetic
atgaagugggaaacctgatacucac

SEQ ID NO: 35414 - DNA, 21 bp, Artificial Sequence
  Synthetic
ctcagtcccuaagcccatcug

SEQ ID NO: 35415 - DNA, 25 bp, Artificial Sequence
  Synthetic
ctccctattggutctcctccagtua

SEQ ID NO: 35416 - DNA, 22 bp, Artificial Sequence
  Synthetic
gaccacagacaaugttcccuct

SEQ ID NO: 35417 - DNA, 24 bp, Artificial Sequence
  Synthetic
gtatgtgtagacugtgctcagugt

SEQ ID NO: 35418 - DNA, 22 bp, Artificial Sequence
  Synthetic
agttgggaagggauctguggat

SEQ ID NO: 35419 - DNA, 21 bp, Artificial Sequence
  Synthetic
ccacuggaaggccatttgaug

SEQ ID NO: 35420 - DNA, 22 bp, Artificial Sequence
  Synthetic
cctacctucttccctacugcac

SEQ ID NO: 35421 - DNA, 21 bp, Artificial Sequence
  Synthetic
cctggugagtggtccuacact

SEQ ID NO: 35422 - DNA, 26 bp, Artificial Sequence
  Synthetic
ttggcctcttautattggagtcaugg

SEQ ID NO: 35423 - DNA, 21 bp, Artificial Sequence
  Synthetic
gctguccacccaguaggagat

SEQ ID NO: 35424 - DNA, 23 bp, Artificial Sequence
  Synthetic
cactttgtcacugtcactgucct

SEQ ID NO: 35425 - DNA, 21 bp, Artificial Sequence
  Synthetic
cctgcattccutgggagacug

SEQ ID NO: 35426 - DNA, 23 bp, Artificial Sequence
  Synthetic
acagaaauggcctgugaaacaga

SEQ ID NO: 35427 - DNA, 24 bp, Artificial Sequence
  Synthetic
ggtgaacagugtctgatcatguga

SEQ ID NO: 35428 - DNA, 24 bp, Artificial Sequence
  Synthetic
gccacaatttucaccttaggugga

SEQ ID NO: 35429 - DNA, 28 bp, Artificial Sequence
  Synthetic
tgggcttttctcuatttcatgttccaut

SEQ ID NO: 35430 - DNA, 24 bp, Artificial Sequence
  Synthetic
ctcacatautttgcacaugacgct

SEQ ID NO: 35431 - DNA, 28 bp, Artificial Sequence
  Synthetic
aatcacattgtuctgattacccauccat

SEQ ID NO: 35432 - DNA, 26 bp, Artificial Sequence
  Synthetic
acagactugggatgatacucaaagca

SEQ ID NO: 35433 - DNA, 22 bp, Artificial Sequence
  Synthetic
aaactccuaaatgacgcuggct

SEQ ID NO: 35434 - DNA, 23 bp, Artificial Sequence
  Synthetic
ctctgagagcutttggaacugct

SEQ ID NO: 35435 - DNA, 21 bp, Artificial Sequence
  Synthetic
gccaggugcagtgtagtccua

SEQ ID NO: 35436 - DNA, 20 bp, Artificial Sequence
  Synthetic
cagaaugggtccucacacgt

SEQ ID NO: 35437 - DNA, 21 bp, Artificial Sequence
  Synthetic
autggtuacccgaggcagaag

SEQ ID NO: 35438 - DNA, 23 bp, Artificial Sequence
  Synthetic
atctcgaugaccatcaccttugg

SEQ ID NO: 35439 - DNA, 19 bp, Artificial Sequence
  Synthetic
cagtcgcucggtgacugat

SEQ ID NO: 35440 - DNA, 20 bp, Artificial Sequence
  Synthetic
ggaguagtcuccgcccagat

SEQ ID NO: 35441 - DNA, 22 bp, Artificial Sequence
  Synthetic
acttctttucccacccctccua

SEQ ID NO: 35442 - DNA, 23 bp, Artificial Sequence
  Synthetic
ggaggguttttgacgucacaagt

SEQ ID NO: 35443 - DNA, 24 bp, Artificial Sequence
  Synthetic
catgcttccccucattcctcauag

SEQ ID NO: 35444 - DNA, 22 bp, Artificial Sequence
  Synthetic
gattgcugagagacaccugagt

SEQ ID NO: 35445 - DNA, 24 bp, Artificial Sequence
  Synthetic
gggatttuaagcaggtuccaggaa

SEQ ID NO: 35446 - DNA, 27 bp, Artificial Sequence
  Synthetic
aagggatgacugtaattactuggaacc

SEQ ID NO: 35447 - DNA, 25 bp, Artificial Sequence
  Synthetic
ctgggaaacacaucatctcttugga

SEQ ID NO: 35448 - DNA, 30 bp, Artificial Sequence
  Synthetic
ttttcatactgtatcugccaaaaccattug

SEQ ID NO: 35449 - DNA, 22 bp, Artificial Sequence
  Synthetic
agcaucaaagacagccgatuct

SEQ ID NO: 35450 - DNA, 26 bp, Artificial Sequence
  Synthetic
tgactcaaacugccatgtatttcuca

SEQ ID NO: 35451 - DNA, 20 bp, Artificial Sequence
  Synthetic
acgagagucacccgaguacc

SEQ ID NO: 35452 - DNA, 19 bp, Artificial Sequence
  Synthetic
catgctgcucgtcacucga

SEQ ID NO: 35453 - DNA, 23 bp, Artificial Sequence
  Synthetic
cuaaaagccaguaggcataucac

SEQ ID NO: 35454 - DNA, 21 bp, Artificial Sequence
  Synthetic
cagagaccucggccattttug

SEQ ID NO: 35455 - DNA, 23 bp, Artificial Sequence
  Synthetic
aagccaatcacugctatggtuga

SEQ ID NO: 35456 - DNA, 22 bp, Artificial Sequence
  Synthetic
gggaaaatuacaggctggucct

SEQ ID NO: 35457 - DNA, 29 bp, Artificial Sequence
  Synthetic
cagttccaagcautcataaattctcacut

SEQ ID NO: 35458 - DNA, 23 bp, Artificial Sequence
  Synthetic
ggctgttuctcacagaucccaaa

SEQ ID NO: 35459 - DNA, 22 bp, Artificial Sequence
  Synthetic
aagcaaggcutctgaagtcucc

SEQ ID NO: 35460 - DNA, 28 bp, Artificial Sequence
  Synthetic
aagcacaaacugcattttgaatcuaagt

SEQ ID NO: 35461 - DNA, 30 bp, Artificial Sequence
  Synthetic
tgaggtagaagaugagaaggtagttaaugt

SEQ ID NO: 35462 - DNA, 20 bp, Artificial Sequence
  Synthetic
gtugaggcagcacaaagguc

SEQ ID NO: 35463 - DNA, 27 bp, Artificial Sequence
  Synthetic
catgttgtcacaguctttgtccaaaut

SEQ ID NO: 35464 - DNA, 22 bp, Artificial Sequence
  Synthetic
ccattggutcctguggcaagaa

SEQ ID NO: 35465 - DNA, 24 bp, Artificial Sequence
  Synthetic
ccutgatatccugggacacagaag

SEQ ID NO: 35466 - DNA, 24 bp, Artificial Sequence
  Synthetic
tttgacaagugctctgguaaacaa

SEQ ID NO: 35467 - DNA, 22 bp, Artificial Sequence
  Synthetic
gcatccugacaagtugcaccat

SEQ ID NO: 35468 - DNA, 21 bp, Artificial Sequence
  Synthetic
gccatgggucttgggttgaua

SEQ ID NO: 35469 - DNA, 23 bp, Artificial Sequence
  Synthetic
ccaacaaagaggcaucaagguct

SEQ ID NO: 35470 - DNA, 23 bp, Artificial Sequence
  Synthetic
gccagtauagcagtcaaccucct

SEQ ID NO: 35471 - DNA, 21 bp, Artificial Sequence
  Synthetic
agctccacacautccccatug

SEQ ID NO: 35472 - DNA, 28 bp, Artificial Sequence
  Synthetic
tcatgcactuctgcaagattauacaagt

SEQ ID NO: 35473 - DNA, 26 bp, Artificial Sequence
  Synthetic
caagttctcacaaguaccaccattut

SEQ ID NO: 35474 - DNA, 23 bp, Artificial Sequence
  Synthetic
gctgtacccaucagcaatgtcua

SEQ ID NO: 35475 - DNA, 25 bp, Artificial Sequence
  Synthetic
ctatgttacaaacugagccctuggt

SEQ ID NO: 35476 - DNA, 26 bp, Artificial Sequence
  Synthetic
aggtcaataatcagucaaaggtgcut

SEQ ID NO: 35477 - DNA, 29 bp, Artificial Sequence
  Synthetic
gcacatattgatugatcactttcaagugg

SEQ ID NO: 35478 - DNA, 27 bp, Artificial Sequence
  Synthetic
aattgattggaaucacattacccugga

SEQ ID NO: 35479 - DNA, 24 bp, Artificial Sequence
  Synthetic
ccatagcacucagctttctcucac

SEQ ID NO: 35480 - DNA, 26 bp, Artificial Sequence
  Synthetic
caggcttacutctagcttuggaaaac

SEQ ID NO: 35481 - DNA, 28 bp, Artificial Sequence
  Synthetic
tcgattttccacguagaagcagaaauaa

SEQ ID NO: 35482 - DNA, 26 bp, Artificial Sequence
  Synthetic
aatggtggattcutcaaaggctguat

SEQ ID NO: 35483 - DNA, 30 bp, Artificial Sequence
  Synthetic
acctagtttgtaugagtaatcattacctug

SEQ ID NO: 35484 - DNA, 21 bp, Artificial Sequence
  Synthetic
ctcacaagugggaaagccugt

SEQ ID NO: 35485 - DNA, 29 bp, Artificial Sequence
  Synthetic
aactggctttguctatactctttttcugt

SEQ ID NO: 35486 - DNA, 25 bp, Artificial Sequence
  Synthetic
gcaugcagaaaaagaguctgaatut

SEQ ID NO: 35487 - DNA, 23 bp, Artificial Sequence
  Synthetic
caautgtgctggucacaaaaggt

SEQ ID NO: 35488 - DNA, 23 bp, Artificial Sequence
  Synthetic
cctgcaagggugtctaaguacaa

SEQ ID NO: 35489 - DNA, 30 bp, Artificial Sequence
  Synthetic
gcaatgataagagcuatagatgtctucaca

SEQ ID NO: 35490 - DNA, 22 bp, Artificial Sequence
  Synthetic
acatgtgagccuggatacacug

SEQ ID NO: 35491 - DNA, 26 bp, Artificial Sequence
  Synthetic
accaagcttcauatggactttaugct

SEQ ID NO: 35492 - DNA, 28 bp, Artificial Sequence
  Synthetic
actttttcttcccauttcacaaccaaug

SEQ ID NO: 35493 - DNA, 25 bp, Artificial Sequence
  Synthetic
gagacauaaaaggagaggctgctua

SEQ ID NO: 35494 - DNA, 22 bp, Artificial Sequence
  Synthetic
cagtgactgucgccttgtuact

SEQ ID NO: 35495 - DNA, 22 bp, Artificial Sequence
  Synthetic
cgaagggacacaaugctccuaa

SEQ ID NO: 35496 - DNA, 23 bp, Artificial Sequence
  Synthetic
gcttgaauagaggaguccccaca

SEQ ID NO: 35497 - DNA, 20 bp, Artificial Sequence
  Synthetic
gcagtaucccccgccttuag

SEQ ID NO: 35498 - DNA, 27 bp, Artificial Sequence
  Synthetic
gctcaggguaatcttactagcuacaca

SEQ ID NO: 35499 - DNA, 20 bp, Artificial Sequence
  Synthetic
tccgugaccacatcaauggg

SEQ ID NO: 35500 - DNA, 22 bp, Artificial Sequence
  Synthetic
tgaatgcccaauagtccaugcc

SEQ ID NO: 35501 - DNA, 28 bp, Artificial Sequence
  Synthetic
tgacaatgacacugagactattcuacct

SEQ ID NO: 35502 - DNA, 21 bp, Artificial Sequence
  Synthetic
ggaggaagccauaatgccuca

SEQ ID NO: 35503 - DNA, 25 bp, Artificial Sequence
  Synthetic
acacattgatucactgttcacucat

SEQ ID NO: 35504 - DNA, 20 bp, Artificial Sequence
  Synthetic
gcaatgtccugcttggtcug

SEQ ID NO: 35505 - DNA, 21 bp, Artificial Sequence
  Synthetic
aggttagugggctccuacagt

SEQ ID NO: 35506 - DNA, 23 bp, Artificial Sequence
  Synthetic
ggcactggautgaatctgugagg

SEQ ID NO: 35507 - DNA, 22 bp, Artificial Sequence
  Synthetic
ccacatgtaagcugggttggut

SEQ ID NO: 35508 - DNA, 20 bp, Artificial Sequence
  Synthetic
gacauagcucaccagggcat

SEQ ID NO: 35509 - DNA, 23 bp, Artificial Sequence
  Synthetic
tcatggagatguctggctgttuc

SEQ ID NO: 35510 - DNA, 23 bp, Artificial Sequence
  Synthetic
cgagaagcaugaggaauggagat

SEQ ID NO: 35511 - DNA, 20 bp, Artificial Sequence
  Synthetic
gutgtccctuccgagagacc

SEQ ID NO: 35512 - DNA, 26 bp, Artificial Sequence
  Synthetic
agcactgtgaaaaugcctttaaacug

SEQ ID NO: 35513 - DNA, 28 bp, Artificial Sequence
  Synthetic
ctagaugcaaagagtaagatugagcaga

SEQ ID NO: 35514 - DNA, 21 bp, Artificial Sequence
  Synthetic
ggcatugcggagtcuaccaaa

SEQ ID NO: 35515 - DNA, 23 bp, Artificial Sequence
  Synthetic
cctagcctgugactgtgattucc

SEQ ID NO: 35516 - DNA, 18 bp, Artificial Sequence
  Synthetic
cgucccccaggcttugag

SEQ ID NO: 35517 - DNA, 23 bp, Artificial Sequence
  Synthetic
aatctaggacacagucccugaca

SEQ ID NO: 35518 - DNA, 19 bp, Artificial Sequence
  Synthetic
attugggacccaccacgut

SEQ ID NO: 35519 - DNA, 21 bp, Artificial Sequence
  Synthetic
gccaugtcatcugcagggaag

SEQ ID NO: 35520 - DNA, 21 bp, Artificial Sequence
  Synthetic
gtaggugagtccagugaagcc

SEQ ID NO: 35521 - DNA, 21 bp, Artificial Sequence
  Synthetic
gctcctggaauctgctcugaa

SEQ ID NO: 35522 - DNA, 20 bp, Artificial Sequence
  Synthetic
cggtuccggaaatagugcag

SEQ ID NO: 35523 - DNA, 22 bp, Artificial Sequence
  Synthetic
caaaggtgugggtcagatguca

SEQ ID NO: 35524 - DNA, 25 bp, Artificial Sequence
  Synthetic
cttagatttagugcccttcctgcut

SEQ ID NO: 35525 - DNA, 22 bp, Artificial Sequence
  Synthetic
ctactatgctgugtcccagcuc

SEQ ID NO: 35526 - DNA, 21 bp, Artificial Sequence
  Synthetic
ggcaaguagggcaaguaucaa

SEQ ID NO: 35527 - DNA, 24 bp, Artificial Sequence
  Synthetic
cttctctttcccutccctctguag

SEQ ID NO: 35528 - DNA, 19 bp, Artificial Sequence
  Synthetic
acucgccaggtctuaccga

SEQ ID NO: 35529 - DNA, 21 bp, Artificial Sequence
  Synthetic
tgtggtaugccaggaggttug

SEQ ID NO: 35530 - DNA, 21 bp, Artificial Sequence
  Synthetic
cctgtggaggcugtacagtut

SEQ ID NO: 35531 - DNA, 23 bp, Artificial Sequence
  Synthetic
tgagtgtctgcuatctccctcuc

SEQ ID NO: 35532 - DNA, 22 bp, Artificial Sequence
  Synthetic
actgaagggacuacaggugaca

SEQ ID NO: 35533 - DNA, 22 bp, Artificial Sequence
  Synthetic
gcactgttguacccagttugct

SEQ ID NO: 35534 - DNA, 24 bp, Artificial Sequence
  Synthetic
ttggaaaatgcuggagctcuagac

SEQ ID NO: 35535 - DNA, 23 bp, Artificial Sequence
  Synthetic
actaggtctuggccctttcuaca

SEQ ID NO: 35536 - DNA, 22 bp, Artificial Sequence
  Synthetic
accaggcagguaaagacaggua

SEQ ID NO: 35537 - DNA, 20 bp, Artificial Sequence
  Synthetic
cagtgacgacagaugggugt

SEQ ID NO: 35538 - DNA, 22 bp, Artificial Sequence
  Synthetic
tgcattccagggutacgtctuc

SEQ ID NO: 35539 - DNA, 30 bp, Artificial Sequence
  Synthetic
ttgatagcaagtaugtagccaatgatgaut

SEQ ID NO: 35540 - DNA, 26 bp, Artificial Sequence
  Synthetic
acagtgagttguccatcaagacttuc

SEQ ID NO: 35541 - DNA, 27 bp, Artificial Sequence
  Synthetic
gaaatacucacagcaacttccttcuca

SEQ ID NO: 35542 - DNA, 27 bp, Artificial Sequence
  Synthetic
ggctctttguggatttttctttguagt

SEQ ID NO: 35543 - DNA, 28 bp, Artificial Sequence
  Synthetic
ccagagaugacaaaaatgctttcugaaa

SEQ ID NO: 35544 - DNA, 25 bp, Artificial Sequence
  Synthetic
tctgctggucagctttcagattuag

SEQ ID NO: 35545 - DNA, 21 bp, Artificial Sequence
  Synthetic
gaacggccaacugaaggagua

SEQ ID NO: 35546 - DNA, 26 bp, Artificial Sequence
  Synthetic
gtttttaaaaguggcttctccgagut

SEQ ID NO: 35547 - DNA, 23 bp, Artificial Sequence
  Synthetic
ccacatacaagcugagagtggug

SEQ ID NO: 35548 - DNA, 22 bp, Artificial Sequence
  Synthetic
catccttcugcctgacccatua

SEQ ID NO: 35549 - DNA, 24 bp, Artificial Sequence
  Synthetic
gccttcaagccutcactaacuact

SEQ ID NO: 35550 - DNA, 29 bp, Artificial Sequence
  Synthetic
tgatttttaaaagucaaccagtccuggat

SEQ ID NO: 35551 - DNA, 25 bp, Artificial Sequence
  Synthetic
ccacgttccaugtgatctcttcuac

SEQ ID NO: 35552 - DNA, 27 bp, Artificial Sequence
  Synthetic
tctttaagtgccutttcaaattgugca

SEQ ID NO: 35553 - DNA, 27 bp, Artificial Sequence
  Synthetic
aatagcaacucagcctagaaaauccaa

SEQ ID NO: 35554 - DNA, 24 bp, Artificial Sequence
  Synthetic
gttgcaucaaaggtgcaatcucag

SEQ ID NO: 35555 - DNA, 28 bp, Artificial Sequence
  Synthetic
cctggtgtttuaaagattcttcccauga

SEQ ID NO: 35556 - DNA, 27 bp, Artificial Sequence
  Synthetic
caaatagttcacggaugaagaggguat

SEQ ID NO: 35557 - DNA, 22 bp, Artificial Sequence
  Synthetic
cuacacagtaacugccagcaac

SEQ ID NO: 35558 - DNA, 27 bp, Artificial Sequence
  Synthetic
agttcataacttcugatctggccatut

SEQ ID NO: 35559 - DNA, 28 bp, Artificial Sequence
  Synthetic
gccttactctcaguataacttctcccut

SEQ ID NO: 35560 - DNA, 26 bp, Artificial Sequence
  Synthetic
catacattcattugagtggcacugac

SEQ ID NO: 35561 - DNA, 25 bp, Artificial Sequence
  Synthetic
aggcttcaaaggaaugaaatgcuct

SEQ ID NO: 35562 - DNA, 24 bp, Artificial Sequence
  Synthetic
aatgtccucaccacatuccaagag

SEQ ID NO: 35563 - DNA, 23 bp, Artificial Sequence
  Synthetic
cgctatgaagugattcgcagaug

SEQ ID NO: 35564 - DNA, 21 bp, Artificial Sequence
  Synthetic
ggcutcatctguccacagagg

SEQ ID NO: 35565 - DNA, 28 bp, Artificial Sequence
  Synthetic
ctacacaaagaaautgtatgcugcaagt

SEQ ID NO: 35566 - DNA, 27 bp, Artificial Sequence
  Synthetic
gggaagattcuaaggtttgaaucagag

SEQ ID NO: 35567 - DNA, 28 bp, Artificial Sequence
  Synthetic
ggttcagagaaugactttccagcaauat

SEQ ID NO: 35568 - DNA, 24 bp, Artificial Sequence
  Synthetic
cccaaggagcuggaaaatctugag

SEQ ID NO: 35569 - DNA, 21 bp, Artificial Sequence
  Synthetic
gcctgctuggtttccttucag

SEQ ID NO: 35570 - DNA, 31 bp, Artificial Sequence
  Synthetic
gtctttatattuggactgagaatgtatucct

SEQ ID NO: 35571 - DNA, 24 bp, Artificial Sequence
  Synthetic
ggtcatcatcaauccacccttcug

SEQ ID NO: 35572 - DNA, 29 bp, Artificial Sequence
  Synthetic
tccuttaaaatgttuacacacacacacac

SEQ ID NO: 35573 - DNA, 28 bp, Artificial Sequence
  Synthetic
gcagtgctagugatgattacattgtuca

SEQ ID NO: 35574 - DNA, 29 bp, Artificial Sequence
  Synthetic
aacaatttaacaacuttcagtgggacaug

SEQ ID NO: 35575 - DNA, 27 bp, Artificial Sequence
  Synthetic
caatggcctcguttctcaatatcaaut

SEQ ID NO: 35576 - DNA, 28 bp, Artificial Sequence
  Synthetic
gttatgaaggaguttacagatuccacct

SEQ ID NO: 35577 - DNA, 29 bp, Artificial Sequence
  Synthetic
tgcactttatttcutgcttgctttttcua

SEQ ID NO: 35578 - DNA, 22 bp, Artificial Sequence
  Synthetic
cagtgtggaugagaccttuccc

SEQ ID NO: 35579 - DNA, 26 bp, Artificial Sequence
  Synthetic
attgctgcttaautcctacgtctuca

SEQ ID NO: 35580 - DNA, 27 bp, Artificial Sequence
  Synthetic
ggttagatgcauagggcaattaaaugt

SEQ ID NO: 35581 - DNA, 22 bp, Artificial Sequence
  Synthetic
gatgtgccucaaggagtgaguc

SEQ ID NO: 35582 - DNA, 26 bp, Artificial Sequence
  Synthetic
agtttaaggagagutgatgucagagt

SEQ ID NO: 35583 - DNA, 26 bp, Artificial Sequence
  Synthetic
gataagaggguctcacaatuccacag

SEQ ID NO: 35584 - DNA, 22 bp, Artificial Sequence
  Synthetic
cgccuccgagagcttttctauc

SEQ ID NO: 35585 - DNA, 25 bp, Artificial Sequence
  Synthetic
tccagtggagaguctaaagcacaua

SEQ ID NO: 35586 - DNA, 26 bp, Artificial Sequence
  Synthetic
tctagggcaaauttctcactctcuct

SEQ ID NO: 35587 - DNA, 20 bp, Artificial Sequence
  Synthetic
tgtggcagaaugccgtacuc

SEQ ID NO: 35588 - DNA, 26 bp, Artificial Sequence
  Synthetic
cccatagtttutgagtacaccuggaa

SEQ ID NO: 35589 - DNA, 27 bp, Artificial Sequence
  Synthetic
ttcaaacttucaggtttgttguaacgg

SEQ ID NO: 35590 - DNA, 22 bp, Artificial Sequence
  Synthetic
gctcatcacuctgatccugcac

SEQ ID NO: 35591 - DNA, 28 bp, Artificial Sequence
  Synthetic
tgccacttttuacttaagactgauagca

SEQ ID NO: 35592 - DNA, 25 bp, Artificial Sequence
  Synthetic
gtgggtgtuggtatatcactuggag

SEQ ID NO: 35593 - DNA, 27 bp, Artificial Sequence
  Synthetic
ggaaggtgggautcagactattgtuag

SEQ ID NO: 35594 - DNA, 23 bp, Artificial Sequence
  Synthetic
actcagugacaacaccattuggg

SEQ ID NO: 35595 - DNA, 28 bp, Artificial Sequence
  Synthetic
gcatttagctuaacatgtgcttttucag

SEQ ID NO: 35596 - DNA, 24 bp, Artificial Sequence
  Synthetic
tguggactccatugaagacagaga

SEQ ID NO: 35597 - DNA, 26 bp, Artificial Sequence
  Synthetic
ccatgtccugcatttattgtugacag

SEQ ID NO: 35598 - DNA, 22 bp, Artificial Sequence
  Synthetic
tgagattggcucctctctcugg

SEQ ID NO: 35599 - DNA, 28 bp, Artificial Sequence
  Synthetic
ggaaggaaaucctgtattttgugaagaa

SEQ ID NO: 35600 - DNA, 26 bp, Artificial Sequence
  Synthetic
ggaataaaagccuccttcattuccct

SEQ ID NO: 35601 - DNA, 22 bp, Artificial Sequence
  Synthetic
cccaccguacctcagaatgtug

SEQ ID NO: 35602 - DNA, 21 bp, Artificial Sequence
  Synthetic
actgcggaagucacattggut

SEQ ID NO: 35603 - DNA, 21 bp, Artificial Sequence
  Synthetic
ggcctcgugaacttcaatugc

SEQ ID NO: 35604 - DNA, 23 bp, Artificial Sequence
  Synthetic
agagtgctcaucagtacccgaua

SEQ ID NO: 35605 - DNA, 25 bp, Artificial Sequence
  Synthetic
cagagctgutctctgatacuccaac

SEQ ID NO: 35606 - DNA, 24 bp, Artificial Sequence
  Synthetic
gcagtgtaugggtgtaaatgcauc

SEQ ID NO: 35607 - DNA, 25 bp, Artificial Sequence
  Synthetic
ccaagaggtcugactttctggatut

SEQ ID NO: 35608 - DNA, 27 bp, Artificial Sequence
  Synthetic
tgtataacccagcugatagaauggaca

SEQ ID NO: 35609 - DNA, 28 bp, Artificial Sequence
  Synthetic
ctgctctaatucatctgtgttttucgac

SEQ ID NO: 35610 - DNA, 28 bp, Artificial Sequence
  Synthetic
aggcattgcaatugttataggatcagut

SEQ ID NO: 35611 - DNA, 30 bp, Artificial Sequence
  Synthetic
cagtaggtaataacuacacccttctgaaug

SEQ ID NO: 35612 - DNA, 22 bp, Artificial Sequence
  Synthetic
gaguccatuagggcgaaaaggt

SEQ ID NO: 35613 - DNA, 29 bp, Artificial Sequence
  Synthetic
tttactucacaguaaaaagagattcttug

SEQ ID NO: 35614 - DNA, 27 bp, Artificial Sequence
  Synthetic
ggactcugaaggaatgtaaacuccaag

SEQ ID NO: 35615 - DNA, 28 bp, Artificial Sequence
  Synthetic
cttgctttctuaagaccttctttgcuat

SEQ ID NO: 35616 - DNA, 23 bp, Artificial Sequence
  Synthetic
ggtgaataugagtgggcttuggg

SEQ ID NO: 35617 - DNA, 28 bp, Artificial Sequence
  Synthetic
ttcctcaatgtucatgaaaactttuggg

SEQ ID NO: 35618 - DNA, 30 bp, Artificial Sequence
  Synthetic
catatgatccuggaaaagttctgtactgut

SEQ ID NO: 35619 - DNA, 28 bp, Artificial Sequence
  Synthetic
aaaaagtgucacaaatccaagtucaaat

SEQ ID NO: 35620 - DNA, 23 bp, Artificial Sequence
  Synthetic
tgcagatauggaacccctggaua

SEQ ID NO: 35621 - DNA, 30 bp, Artificial Sequence
  Synthetic
ccaaaaaggcaaauggtattataacucagt

SEQ ID NO: 35622 - DNA, 27 bp, Artificial Sequence
  Synthetic
ttcatgacugaaatgtggaagucaaga

SEQ ID NO: 35623 - DNA, 23 bp, Artificial Sequence
  Synthetic
gtaaacacgcaacccuctttugt

SEQ ID NO: 35624 - DNA, 27 bp, Artificial Sequence
  Synthetic
ctgtcctcactauaggctttcagaaug

SEQ ID NO: 35625 - DNA, 28 bp, Artificial Sequence
  Synthetic
agaactgccattutccctattttctcut

SEQ ID NO: 35626 - DNA, 25 bp, Artificial Sequence
  Synthetic
tttagaggaccuccacattaccugt

SEQ ID NO: 35627 - DNA, 23 bp, Artificial Sequence
  Synthetic
cgttaactuggcatctgtgucca

SEQ ID NO: 35628 - DNA, 27 bp, Artificial Sequence
  Synthetic
autgctatctctugaaacacagaacca

SEQ ID NO: 35629 - DNA, 27 bp, Artificial Sequence
  Synthetic
ctttcataucagcaagtgtgaauggac

SEQ ID NO: 35630 - DNA, 28 bp, Artificial Sequence
  Synthetic
taaagaaaccccaautaagtgtaaugcc

SEQ ID NO: 35631 - DNA, 28 bp, Artificial Sequence
  Synthetic
tggtggaatgaacuttgagatttcctut

SEQ ID NO: 35632 - DNA, 27 bp, Artificial Sequence
  Synthetic
gaggucaagttaaucaaacaggagaga

SEQ ID NO: 35633 - DNA, 25 bp, Artificial Sequence
  Synthetic
tggcagagtuctgaagaacaaauca

SEQ ID NO: 35634 - DNA, 31 bp, Artificial Sequence
  Synthetic
aaacaggttctautctaagtttggaugacaa

SEQ ID NO: 35635 - DNA, 28 bp, Artificial Sequence
  Synthetic
aaggtgtatttcucatctcctcttcuct

SEQ ID NO: 35636 - DNA, 25 bp, Artificial Sequence
  Synthetic
caaaagccugatgcctaauagcaat

SEQ ID NO: 35637 - DNA, 33 bp, Artificial Sequence
  Synthetic
ttgtaaattggtttauaacaaatatgtgtgugt

SEQ ID NO: 35638 - DNA, 28 bp, Artificial Sequence
  Synthetic
tttttcctttcctucacttacctgacut

SEQ ID NO: 35639 - DNA, 26 bp, Artificial Sequence
  Synthetic
acagacttcacuggtaagtgtgttug

SEQ ID NO: 35640 - DNA, 23 bp, Artificial Sequence
  Synthetic
tggtcaucagagctgguagagat

SEQ ID NO: 35641 - DNA, 29 bp, Artificial Sequence
  Synthetic
tgtcuagagacagaaaucaaattctugaa

SEQ ID NO: 35642 - DNA, 31 bp, Artificial Sequence
  Synthetic
ccaactgaatugcagagagtaataguaaact

SEQ ID NO: 35643 - DNA, 24 bp, Artificial Sequence
  Synthetic
ccctctguctgaattcauggaact

SEQ ID NO: 35644 - DNA, 29 bp, Artificial Sequence
  Synthetic
catattgatgtcauaccccacaactttuc

SEQ ID NO: 35645 - DNA, 25 bp, Artificial Sequence
  Synthetic
gggacgacautcattgttttgaugt

SEQ ID NO: 35646 - DNA, 24 bp, Artificial Sequence
  Synthetic
tggttgtcatugtttgaggaggut

SEQ ID NO: 35647 - DNA, 29 bp, Artificial Sequence
  Synthetic
gtctgatgagtuacgtaggttcactatut

SEQ ID NO: 35648 - DNA, 28 bp, Artificial Sequence
  Synthetic
gtacagaaaaaucgtacttggcaaaugg

SEQ ID NO: 35649 - DNA, 22 bp, Artificial Sequence
  Synthetic
gtcccagagggaaacutgacut

SEQ ID NO: 35650 - DNA, 26 bp, Artificial Sequence
  Synthetic
gaaaccacaacagcauttatccucaa

SEQ ID NO: 35651 - DNA, 22 bp, Artificial Sequence
  Synthetic
ctgattctccaaaugcccacug

SEQ ID NO: 35652 - DNA, 24 bp, Artificial Sequence
  Synthetic
agcctttctgaugggttctaaaug

SEQ ID NO: 35653 - DNA, 27 bp, Artificial Sequence
  Synthetic
gtaaacaattugtcactggcucaaagt

SEQ ID NO: 35654 - DNA, 24 bp, Artificial Sequence
  Synthetic
gaagttatugctttgcaacugcca

SEQ ID NO: 35655 - DNA, 26 bp, Artificial Sequence
  Synthetic
aactggtgcagutaatcacatctgua

SEQ ID NO: 35656 - DNA, 26 bp, Artificial Sequence
  Synthetic
aggaatgtcatugtgcactgaaaaug

SEQ ID NO: 35657 - DNA, 23 bp, Artificial Sequence
  Synthetic
aggtcttcgcugtaatcagtgug

SEQ ID NO: 35658 - DNA, 25 bp, Artificial Sequence
  Synthetic
cctccaaacauttattgcactguct

SEQ ID NO: 35659 - DNA, 24 bp, Artificial Sequence
  Synthetic
caaattctgcaaucctcactcugg

SEQ ID NO: 35660 - DNA, 27 bp, Artificial Sequence
  Synthetic
tccagatggtaauagagatgtgacugt

SEQ ID NO: 35661 - DNA, 27 bp, Artificial Sequence
  Synthetic
cagtgccagaauggattctacaatcua

SEQ ID NO: 35662 - DNA, 26 bp, Artificial Sequence
  Synthetic
acatccaaauaagtttcuggcagaca

SEQ ID NO: 35663 - DNA, 23 bp, Artificial Sequence
  Synthetic
tgcataaccuttccctgaugcag

SEQ ID NO: 35664 - DNA, 24 bp, Artificial Sequence
  Synthetic
ttgtaatggcagcutttggaaugg

SEQ ID NO: 35665 - DNA, 30 bp, Artificial Sequence
  Synthetic
tctggtgaaaggccuaacatatcaauaaaa

SEQ ID NO: 35666 - DNA, 25 bp, Artificial Sequence
  Synthetic
agtacugcccatgaaaaugaaacct

SEQ ID NO: 35667 - DNA, 29 bp, Artificial Sequence
  Synthetic
tctcaacatttugatttctgtttugccaa

SEQ ID NO: 35668 - DNA, 26 bp, Artificial Sequence
  Synthetic
gaaagctgaagacagutgacagaauc

SEQ ID NO: 35669 - DNA, 28 bp, Artificial Sequence
  Synthetic
atcatucagttctttaguccacaaccaa

SEQ ID NO: 35670 - DNA, 23 bp, Artificial Sequence
  Synthetic
acaaaagagagaggaugggctuc

SEQ ID NO: 35671 - DNA, 24 bp, Artificial Sequence
  Synthetic
gtccttacaguctccctctugact

SEQ ID NO: 35672 - DNA, 26 bp, Artificial Sequence
  Synthetic
atactgctgcagautttgtgaguaga

SEQ ID NO: 35673 - DNA, 29 bp, Artificial Sequence
  Synthetic
ggtttgcaaccuccaataaaagtaaugac

SEQ ID NO: 35674 - DNA, 28 bp, Artificial Sequence
  Synthetic
aatgatcttcacuactactggtttuggg

SEQ ID NO: 35675 - DNA, 23 bp, Artificial Sequence
  Synthetic
ctgcaucacaccagacaagaaug

SEQ ID NO: 35676 - DNA, 22 bp, Artificial Sequence
  Synthetic
ctgggaguccacatactgctug

SEQ ID NO: 35677 - DNA, 27 bp, Artificial Sequence
  Synthetic
tgctttaucaggaggagaatgutttut

SEQ ID NO: 35678 - DNA, 20 bp, Artificial Sequence
  Synthetic
tgtgtccaaguctccagguc

SEQ ID NO: 35679 - DNA, 21 bp, Artificial Sequence
  Synthetic
cattagggacguccgctcauc

SEQ ID NO: 35680 - DNA, 22 bp, Artificial Sequence
  Synthetic
ctggtuccaaaaatccgugcat

SEQ ID NO: 35681 - DNA, 22 bp, Artificial Sequence
  Synthetic
aaacagcatgaucacgtgctuc

SEQ ID NO: 35682 - DNA, 22 bp, Artificial Sequence
  Synthetic
ccctagcagguccagaaucact

SEQ ID NO: 35683 - DNA, 23 bp, Artificial Sequence
  Synthetic
cgatgacgcugatcatgaugagg

SEQ ID NO: 35684 - DNA, 22 bp, Artificial Sequence
  Synthetic
gaagagcatucaggcttgggua

SEQ ID NO: 35685 - DNA, 21 bp, Artificial Sequence
  Synthetic
ggaccctgcugcttatctguc

SEQ ID NO: 35686 - DNA, 20 bp, Artificial Sequence
  Synthetic
atggtgugcatccacuggaa

SEQ ID NO: 35687 - DNA, 19 bp, Artificial Sequence
  Synthetic
gatttggcccuggacaucg

SEQ ID NO: 35688 - DNA, 21 bp, Artificial Sequence
  Synthetic
ccgcctgagaugtgaacctut

SEQ ID NO: 35689 - DNA, 22 bp, Artificial Sequence
  Synthetic
gaacucatgcctcucagggaag

SEQ ID NO: 35690 - DNA, 17 bp, Artificial Sequence
  Synthetic
gagcagcugggcctuct

SEQ ID NO: 35691 - DNA, 18 bp, Artificial Sequence
  Synthetic
gcauccccagccacucac

SEQ ID NO: 35692 - DNA, 22 bp, Artificial Sequence
  Synthetic
ctgcutgctgtgtucaagaagg

SEQ ID NO: 35693 - DNA, 24 bp, Artificial Sequence
  Synthetic
ccaatgaaaatuccctgcagctug

SEQ ID NO: 35694 - DNA, 27 bp, Artificial Sequence
  Synthetic
atttgtcauagcaccaggtatauagga

SEQ ID NO: 35695 - DNA, 23 bp, Artificial Sequence
  Synthetic
ctacttcctguctgctgtgaugg

SEQ ID NO: 35696 - DNA, 22 bp, Artificial Sequence
  Synthetic
gcctccgugtagatgatctucc

SEQ ID NO: 35697 - DNA, 26 bp, Artificial Sequence
  Synthetic
catccaatacagcccugaaactgtua

SEQ ID NO: 35698 - DNA, 25 bp, Artificial Sequence
  Synthetic
cggaugttaggttuaagaagaggct

SEQ ID NO: 35699 - DNA, 27 bp, Artificial Sequence
  Synthetic
gaacctgttcccutacagttctctuac

SEQ ID NO: 35700 - DNA, 23 bp, Artificial Sequence
  Synthetic
ccaugtagtugccagagcagaat

SEQ ID NO: 35701 - DNA, 30 bp, Artificial Sequence
  Synthetic
agttaactaacaaugaacaagatccttugt

SEQ ID NO: 35702 - DNA, 25 bp, Artificial Sequence
  Synthetic
aagaaaagguaggaaaacgguggaa

SEQ ID NO: 35703 - DNA, 29 bp, Artificial Sequence
  Synthetic
gcaggcaaacaugaaagatatcaaagauc

SEQ ID NO: 35704 - DNA, 17 bp, Artificial Sequence
  Synthetic
cccagccuagcccacug

SEQ ID NO: 35705 - DNA, 22 bp, Artificial Sequence
  Synthetic
agaggaugaagacccucagcat

SEQ ID NO: 35706 - DNA, 18 bp, Artificial Sequence
  Synthetic
cctcucccaggcatuggt

SEQ ID NO: 35707 - DNA, 19 bp, Artificial Sequence
  Synthetic
cggtcctucttcgcacugg

SEQ ID NO: 35708 - DNA, 23 bp, Artificial Sequence
  Synthetic
tctcagaagcugagcctaacuca

SEQ ID NO: 35709 - DNA, 21 bp, Artificial Sequence
  Synthetic
ccctaacutgtcccugcagac

SEQ ID NO: 35710 - DNA, 21 bp, Artificial Sequence
  Synthetic
cagggtgccutaggctagtut

SEQ ID NO: 35711 - DNA, 22 bp, Artificial Sequence
  Synthetic
caatgcctuggaccttaaccug

SEQ ID NO: 35712 - DNA, 23 bp, Artificial Sequence
  Synthetic
gtgcagtaggutggtttcctuca

SEQ ID NO: 35713 - DNA, 23 bp, Artificial Sequence
  Synthetic
agctagugagacagtuacaggga

SEQ ID NO: 35714 - DNA, 24 bp, Artificial Sequence
  Synthetic
caaggaaacuaccttcacgtccuc

SEQ ID NO: 35715 - DNA, 21 bp, Artificial Sequence
  Synthetic
cttccccugaagcuggacaaa

SEQ ID NO: 35716 - DNA, 23 bp, Artificial Sequence
  Synthetic
catcaagccugtggtcaaggtua

SEQ ID NO: 35717 - DNA, 28 bp, Artificial Sequence
  Synthetic
ccatacgtaaacacucttgaatgaatug

SEQ ID NO: 35718 - DNA, 24 bp, Artificial Sequence
  Synthetic
aagtgtuggcagttattgttuggg

SEQ ID NO: 35719 - DNA, 29 bp, Artificial Sequence
  Synthetic
agtgagaacugactgctttcauagaaaat

SEQ ID NO: 35720 - DNA, 23 bp, Artificial Sequence
  Synthetic
gggtcttcugattctgggaucac

SEQ ID NO: 35721 - DNA, 24 bp, Artificial Sequence
  Synthetic
gaagacccagggaaaugtacucac

SEQ ID NO: 35722 - DNA, 23 bp, Artificial Sequence
  Synthetic
gggacagucagggtttuagagga

SEQ ID NO: 35723 - DNA, 20 bp, Artificial Sequence
  Synthetic
gaaaguccccucccgagaga

SEQ ID NO: 35724 - DNA, 21 bp, Artificial Sequence
  Synthetic
catccugccagtaucccagac

SEQ ID NO: 35725 - DNA, 26 bp, Artificial Sequence
  Synthetic
ccctaaagacuccaagacucagaact

SEQ ID NO: 35726 - DNA, 22 bp, Artificial Sequence
  Synthetic
ccatccacagccugttcatgua

SEQ ID NO: 35727 - DNA, 23 bp, Artificial Sequence
  Synthetic
cucaggcaaaucaaaaaccccat

SEQ ID NO: 35728 - DNA, 20 bp, Artificial Sequence
  Synthetic
gctccttgugacctgaccuc

SEQ ID NO: 35729 - DNA, 20 bp, Artificial Sequence
  Synthetic
caugacaccucaaggccagt

SEQ ID NO: 35730 - DNA, 22 bp, Artificial Sequence
  Synthetic
gggaacaagutcgacaugacct

SEQ ID NO: 35731 - DNA, 22 bp, Artificial Sequence
  Synthetic
gagtagactcuggcagcttucc

SEQ ID NO: 35732 - DNA, 17 bp, Artificial Sequence
  Synthetic
accctcugccctguggt

SEQ ID NO: 35733 - DNA, 20 bp, Artificial Sequence
  Synthetic
cagtugagccaggagaggug

SEQ ID NO: 35734 - DNA, 21 bp, Artificial Sequence
  Synthetic
ggaccaguacctguaccagct

SEQ ID NO: 35735 - DNA, 21 bp, Artificial Sequence
  Synthetic
ttgtcccugccagttctgaug

SEQ ID NO: 35736 - DNA, 22 bp, Artificial Sequence
  Synthetic
gactgtggguttctgtcctuct

SEQ ID NO: 35737 - DNA, 20 bp, Artificial Sequence
  Synthetic
caaggcagcuccaggtagug

SEQ ID NO: 35738 - DNA, 22 bp, Artificial Sequence
  Synthetic
accccaagutttctgacgucac

SEQ ID NO: 35739 - DNA, 21 bp, Artificial Sequence
  Synthetic
caaaaggagggugcaguccat

SEQ ID NO: 35740 - DNA, 23 bp, Artificial Sequence
  Synthetic
ctgtctgtcucctctcattgcut

SEQ ID NO: 35741 - DNA, 20 bp, Artificial Sequence
  Synthetic
cautcagtcguccccaccag

SEQ ID NO: 35742 - DNA, 21 bp, Artificial Sequence
  Synthetic
tctgagtcugccccttctcut

SEQ ID NO: 35743 - DNA, 20 bp, Artificial Sequence
  Synthetic
gacaagugcagccccacaua

SEQ ID NO: 35744 - DNA, 22 bp, Artificial Sequence
  Synthetic
ctcactcuggcacctctgttut

SEQ ID NO: 35745 - DNA, 24 bp, Artificial Sequence
  Synthetic
gatgtctccautcccagatcucag

SEQ ID NO: 35746 - DNA, 20 bp, Artificial Sequence
  Synthetic
ggaccagacgcucatctuct

SEQ ID NO: 35747 - DNA, 20 bp, Artificial Sequence
  Synthetic
agaccccaccuttgcacaug

SEQ ID NO: 35748 - DNA, 22 bp, Artificial Sequence
  Synthetic
atggactguctgatcacugaca

SEQ ID NO: 35749 - DNA, 26 bp, Artificial Sequence
  Synthetic
gcaatcagttugaagaaggaaagguc

SEQ ID NO: 35750 - DNA, 27 bp, Artificial Sequence
  Synthetic
cacttggcattuctttctgtcctauct

SEQ ID NO: 35751 - DNA, 17 bp, Artificial Sequence
  Synthetic
ggacggcucaccucgat

SEQ ID NO: 35752 - DNA, 21 bp, Artificial Sequence
  Synthetic
gcagtccugtgtcaucaggaa

SEQ ID NO: 35753 - DNA, 19 bp, Artificial Sequence
  Synthetic
aucccgcagggaatuggag

SEQ ID NO: 35754 - DNA, 22 bp, Artificial Sequence
  Synthetic
gtcttgtctuggtcccttggut

SEQ ID NO: 35755 - DNA, 20 bp, Artificial Sequence
  Synthetic
ctggaggaugcccatccuac

SEQ ID NO: 35756 - DNA, 23 bp, Artificial Sequence
  Synthetic
gggtttccaacuctgaagaaugc

SEQ ID NO: 35757 - DNA, 23 bp, Artificial Sequence
  Synthetic
gtcagacugaagagaggcctuac

SEQ ID NO: 35758 - DNA, 26 bp, Artificial Sequence
  Synthetic
cacagccaaaccauatcaacaaugat

SEQ ID NO: 35759 - DNA, 22 bp, Artificial Sequence
  Synthetic
gccaaatgcucggacaatguag

SEQ ID NO: 35760 - DNA, 22 bp, Artificial Sequence
  Synthetic
ggcactcaugaagccucaaaga

SEQ ID NO: 35761 - DNA, 23 bp, Artificial Sequence
  Synthetic
agacccaagaugccccaattuac

SEQ ID NO: 35762 - DNA, 26 bp, Artificial Sequence
  Synthetic
tctctatgactaugacctcctcucca

SEQ ID NO: 35763 - DNA, 23 bp, Artificial Sequence
  Synthetic
ggugtgttgucagagaagacagg

SEQ ID NO: 35764 - DNA, 20 bp, Artificial Sequence
  Synthetic
ctgggcagccccautatcuc

SEQ ID NO: 35765 - DNA, 20 bp, Artificial Sequence
  Synthetic
cccaagggucaaggtccuac

SEQ ID NO: 35766 - DNA, 28 bp, Artificial Sequence
  Synthetic
tctaggtggatuagagtgataccttucc

SEQ ID NO: 35767 - DNA, 19 bp, Artificial Sequence
  Synthetic
ttcccutcccugagccaga

SEQ ID NO: 35768 - DNA, 22 bp, Artificial Sequence
  Synthetic
aagggaacacugcctctctcua

SEQ ID NO: 35769 - DNA, 24 bp, Artificial Sequence
  Synthetic
tgggattcuagcaatagcgctuac

SEQ ID NO: 35770 - DNA, 22 bp, Artificial Sequence
  Synthetic
ccctaaccaagugctctctguc

SEQ ID NO: 35771 - DNA, 21 bp, Artificial Sequence
  Synthetic
ctcctggacugtggcctauac

SEQ ID NO: 35772 - DNA, 20 bp, Artificial Sequence
  Synthetic
gatcaccaugggtccctguc

SEQ ID NO: 35773 - DNA, 21 bp, Artificial Sequence
  Synthetic
acaatcaggccuaggagguct

SEQ ID NO: 35774 - DNA, 24 bp, Artificial Sequence
  Synthetic
atttatgcutgacccaugacacct

SEQ ID NO: 35775 - DNA, 26 bp, Artificial Sequence
  Synthetic
ctgagacagacagugattcagatuga

SEQ ID NO: 35776 - DNA, 25 bp, Artificial Sequence
  Synthetic
gaaagaguaggcagaaaucaagaug

SEQ ID NO: 35777 - DNA, 27 bp, Artificial Sequence
  Synthetic
gctgaaattctuggttttggatcacug

SEQ ID NO: 35778 - DNA, 23 bp, Artificial Sequence
  Synthetic
acuattatgctgugcccaacagg

SEQ ID NO: 35779 - DNA, 26 bp, Artificial Sequence
  Synthetic
ctttcctgacguctgaatactcacug

SEQ ID NO: 35780 - DNA, 21 bp, Artificial Sequence
  Synthetic
ccatcugggccagttccauag

SEQ ID NO: 35781 - DNA, 23 bp, Artificial Sequence
  Synthetic
ccttaguaaggtagagtgugggt

SEQ ID NO: 35782 - DNA, 22 bp, Artificial Sequence
  Synthetic
ccgaguttgttgtucccaggat

SEQ ID NO: 35783 - DNA, 27 bp, Artificial Sequence
  Synthetic
gcttctctcacauttcctttttctguc

SEQ ID NO: 35784 - DNA, 21 bp, Artificial Sequence
  Synthetic
atctcgtccucgatgctgaug

SEQ ID NO: 35785 - DNA, 21 bp, Artificial Sequence
  Synthetic
acacgtgaucctttggtggut

SEQ ID NO: 35786 - DNA, 23 bp, Artificial Sequence
  Synthetic
acagcatccugcttgttcucaat

SEQ ID NO: 35787 - DNA, 30 bp, Artificial Sequence
  Synthetic
tgaccgtgttgucactaattctttatuact

SEQ ID NO: 35788 - DNA, 26 bp, Artificial Sequence
  Synthetic
tcattttaggaaggagguctgtgcua

SEQ ID NO: 35789 - DNA, 22 bp, Artificial Sequence
  Synthetic
catgaggcagugagcctactuc

SEQ ID NO: 35790 - DNA, 20 bp, Artificial Sequence
  Synthetic
gggcuaaccccaccctcaua

SEQ ID NO: 35791 - DNA, 21 bp, Artificial Sequence
  Synthetic
catgctaucaccaagcacucg

SEQ ID NO: 35792 - DNA, 22 bp, Artificial Sequence
  Synthetic
gacctgggucactcaggatcua

SEQ ID NO: 35793 - DNA, 23 bp, Artificial Sequence
  Synthetic
gctacatcucctcccagatugag

SEQ ID NO: 35794 - DNA, 22 bp, Artificial Sequence
  Synthetic
ccgtccucagacccaaacatua

SEQ ID NO: 35795 - DNA, 25 bp, Artificial Sequence
  Synthetic
gcaaagggaacautatcaucagcac

SEQ ID NO: 35796 - DNA, 27 bp, Artificial Sequence
  Synthetic
gaaatgcttctugggaaattcacauga

SEQ ID NO: 35797 - DNA, 24 bp, Artificial Sequence
  Synthetic
ctgcttcttuctgttggttuccag

SEQ ID NO: 35798 - DNA, 22 bp, Artificial Sequence
  Synthetic
cgggacaaagugcaagacatuc

SEQ ID NO: 35799 - DNA, 26 bp, Artificial Sequence
  Synthetic
agtattttctccucaaggccaaguac

SEQ ID NO: 35800 - DNA, 21 bp, Artificial Sequence
  Synthetic
gactgagcaccuccaauccag

SEQ ID NO: 35801 - DNA, 26 bp, Artificial Sequence
  Synthetic
gcctcagtacuctcatttccttguag

SEQ ID NO: 35802 - DNA, 21 bp, Artificial Sequence
  Synthetic
ctgaggcuttcccaucagacc

SEQ ID NO: 35803 - DNA, 22 bp, Artificial Sequence
  Synthetic
acagtgggaaugctgcttctut

SEQ ID NO: 35804 - DNA, 25 bp, Artificial Sequence
  Synthetic
ggaaaccacacaugaacccaaatuc

SEQ ID NO: 35805 - DNA, 22 bp, Artificial Sequence
  Synthetic
cccttgaccutttcctcctugt

SEQ ID NO: 35806 - DNA, 22 bp, Artificial Sequence
  Synthetic
ccaacaacutttgcugagacct

SEQ ID NO: 35807 - DNA, 22 bp, Artificial Sequence
  Synthetic
ccaaccctcuatggcatctcuc

SEQ ID NO: 35808 - DNA, 22 bp, Artificial Sequence
  Synthetic
gcaugaagcacaacaagcaguc

SEQ ID NO: 35809 - DNA, 25 bp, Artificial Sequence
  Synthetic
ggtgaaggcauactcatcacatcuc

SEQ ID NO: 35810 - DNA, 22 bp, Artificial Sequence
  Synthetic
ctttccagcauccctgcattuc

SEQ ID NO: 35811 - DNA, 26 bp, Artificial Sequence
  Synthetic
cctcattacctugttttgcctctgua

SEQ ID NO: 35812 - DNA, 22 bp, Artificial Sequence
  Synthetic
gctgccagguaggaaugagaga

SEQ ID NO: 35813 - DNA, 23 bp, Artificial Sequence
  Synthetic
tctcgtgacugtagcaaactgug

SEQ ID NO: 35814 - DNA, 24 bp, Artificial Sequence
  Synthetic
cttcuaaaacccaacccaguagca

SEQ ID NO: 35815 - DNA, 24 bp, Artificial Sequence
  Synthetic
cacccuacccaactatgaagaugt

SEQ ID NO: 35816 - DNA, 26 bp, Artificial Sequence
  Synthetic
gactctatatuctacgactgcuccca

SEQ ID NO: 35817 - DNA, 24 bp, Artificial Sequence
  Synthetic
cctgatguagttttccucccacag

SEQ ID NO: 35818 - DNA, 24 bp, Artificial Sequence
  Synthetic
caacggaaacuccacaccatatuc

SEQ ID NO: 35819 - DNA, 31 bp, Artificial Sequence
  Synthetic
acatgatattgauggcacttcttttcttcua

SEQ ID NO: 35820 - DNA, 22 bp, Artificial Sequence
  Synthetic
ggaaggatccaucaggaagcug

SEQ ID NO: 35821 - DNA, 24 bp, Artificial Sequence
  Synthetic
tgatggauggaaaactcactugct

SEQ ID NO: 35822 - DNA, 21 bp, Artificial Sequence
  Synthetic
cugcaatcttcuagccaccgt

SEQ ID NO: 35823 - DNA, 25 bp, Artificial Sequence
  Synthetic
cctttgttccutttgttgtggguag

SEQ ID NO: 35824 - DNA, 23 bp, Artificial Sequence
  Synthetic
ccaaagccauctgccacttcaua

SEQ ID NO: 35825 - DNA, 26 bp, Artificial Sequence
  Synthetic
gatgagtuccaagaagaaggattugc

SEQ ID NO: 35826 - DNA, 27 bp, Artificial Sequence
  Synthetic
ctcaataaatguaacaggaccuaggca

SEQ ID NO: 35827 - DNA, 22 bp, Artificial Sequence
  Synthetic
tccagatcauggttgagtuggg

SEQ ID NO: 35828 - DNA, 28 bp, Artificial Sequence
  Synthetic
gaatgatgcuagaagatgcatgttuagg

SEQ ID NO: 35829 - DNA, 25 bp, Artificial Sequence
  Synthetic
ctgggucaaacagatgauaccagat

SEQ ID NO: 35830 - DNA, 29 bp, Artificial Sequence
  Synthetic
aaaaagatactuagcacttcgaagatucc

SEQ ID NO: 35831 - DNA, 28 bp, Artificial Sequence
  Synthetic
gcatcatcuacaagcccaaaacuaaaga

SEQ ID NO: 35832 - DNA, 23 bp, Artificial Sequence
  Synthetic
actgatctuacaccaagcatucc

SEQ ID NO: 35833 - DNA, 20 bp, Artificial Sequence
  Synthetic
gagaggtgcugtcccttgut

SEQ ID NO: 35834 - DNA, 21 bp, Artificial Sequence
  Synthetic
actcctgagccuggaatccut

SEQ ID NO: 35835 - DNA, 22 bp, Artificial Sequence
  Synthetic
cgtttctttuccttccccagug

SEQ ID NO: 35836 - DNA, 19 bp, Artificial Sequence
  Synthetic
gttcgggacguccatcugt

SEQ ID NO: 35837 - DNA, 17 bp, Artificial Sequence
  Synthetic
gaggccccugcttccuc

SEQ ID NO: 35838 - DNA, 22 bp, Artificial Sequence
  Synthetic
ctatucccgggacctttuccag

SEQ ID NO: 35839 - DNA, 24 bp, Artificial Sequence
  Synthetic
caacugtgtgttugaaggcaagag

SEQ ID NO: 35840 - DNA, 23 bp, Artificial Sequence
  Synthetic
cttgguggaaagaugggaaggaa

SEQ ID NO: 35841 - DNA, 27 bp, Artificial Sequence
  Synthetic
ggctacagaaugatactctgtcucaat

SEQ ID NO: 35842 - DNA, 31 bp, Artificial Sequence
  Synthetic
atctgaaacattcutttgtgtaacgtttuct

SEQ ID NO: 35843 - DNA, 19 bp, Artificial Sequence
  Synthetic
gcccacagcucggactuac

SEQ ID NO: 35844 - DNA, 28 bp, Artificial Sequence
  Synthetic
ggtattaatgcauttgtttggtagcugt

SEQ ID NO: 35845 - DNA, 23 bp, Artificial Sequence
  Synthetic
tccctctucaccctggaacttua

SEQ ID NO: 35846 - DNA, 22 bp, Artificial Sequence
  Synthetic
tgcaagcccuggctaatuacag

SEQ ID NO: 35847 - DNA, 24 bp, Artificial Sequence
  Synthetic
gcaaagttucaactctcagucagg

SEQ ID NO: 35848 - DNA, 23 bp, Artificial Sequence
  Synthetic
gcccagaccucagtgttttcaut

SEQ ID NO: 35849 - DNA, 23 bp, Artificial Sequence
  Synthetic
cccttacugggtatagctcucac

SEQ ID NO: 35850 - DNA, 22 bp, Artificial Sequence
  Synthetic
gccccaguagccctgttttuat

SEQ ID NO: 35851 - DNA, 30 bp, Artificial Sequence
  Synthetic
ctgtctattgauccttctttgttcucaact

SEQ ID NO: 35852 - DNA, 24 bp, Artificial Sequence
  Synthetic
ctcucataccacaugaaaccagca

SEQ ID NO: 35853 - DNA, 27 bp, Artificial Sequence
  Synthetic
cctagaagaaugggattcatcacugat

SEQ ID NO: 35854 - DNA, 24 bp, Artificial Sequence
  Synthetic
gggcttttcuggtcacaguaacaa

SEQ ID NO: 35855 - DNA, 24 bp, Artificial Sequence
  Synthetic
cacataagcccugagaagtgtuca

SEQ ID NO: 35856 - DNA, 20 bp, Artificial Sequence
  Synthetic
ctgacgcugctgaagacgua

SEQ ID NO: 35857 - DNA, 25 bp, Artificial Sequence
  Synthetic
cccctgaaucaaagctgtgtacaua

SEQ ID NO: 35858 - DNA, 23 bp, Artificial Sequence
  Synthetic
caaaggcauggatugcacaaaga

SEQ ID NO: 35859 - DNA, 20 bp, Artificial Sequence
  Synthetic
cucagagctcuccagcaact

SEQ ID NO: 35860 - DNA, 24 bp, Artificial Sequence
  Synthetic
catgaaggacgguacatccugaat

SEQ ID NO: 35861 - DNA, 22 bp, Artificial Sequence
  Synthetic
ggacttcugagccttcugagga

SEQ ID NO: 35862 - DNA, 26 bp, Artificial Sequence
  Synthetic
cagcagaacuaaagggagaagcaaua

SEQ ID NO: 35863 - DNA, 29 bp, Artificial Sequence
  Synthetic
gactcattgaatuaaatcagcaaggauga

SEQ ID NO: 35864 - DNA, 23 bp, Artificial Sequence
  Synthetic
ctgttgtaugccacctacttgut

SEQ ID NO: 35865 - DNA, 22 bp, Artificial Sequence
  Synthetic
cactcucccctgaucaaacacc

SEQ ID NO: 35866 - DNA, 29 bp, Artificial Sequence
  Synthetic
ctaaatagccccaaguattagcuagaaac

SEQ ID NO: 35867 - DNA, 23 bp, Artificial Sequence
  Synthetic
tgttcgtcatugcctccatcauc

SEQ ID NO: 35868 - DNA, 24 bp, Artificial Sequence
  Synthetic
tctgcctgtutgttagcacaugat

SEQ ID NO: 35869 - DNA, 21 bp, Artificial Sequence
  Synthetic
cacctaccacutcgtcaugca

SEQ ID NO: 35870 - DNA, 27 bp, Artificial Sequence
  Synthetic
tctaactggtacugagagcctatgaut

SEQ ID NO: 35871 - DNA, 23 bp, Artificial Sequence
  Synthetic
tgagatcatcgucacccacttuc

SEQ ID NO: 35872 - DNA, 20 bp, Artificial Sequence
  Synthetic
cagtggugagaagcatuccg

SEQ ID NO: 35873 - DNA, 23 bp, Artificial Sequence
  Synthetic
agatgactauggcggtgugaaaa

SEQ ID NO: 35874 - DNA, 21 bp, Artificial Sequence
  Synthetic
cgacgtgcucacactgttuca

SEQ ID NO: 35875 - DNA, 26 bp, Artificial Sequence
  Synthetic
cactaggtcttuctccttttctgugg

SEQ ID NO: 35876 - DNA, 18 bp, Artificial Sequence
  Synthetic
gcccccagugctcttguc

SEQ ID NO: 35877 - DNA, 22 bp, Artificial Sequence
  Synthetic
gttggtgtcauctgctgtcuca

SEQ ID NO: 35878 - DNA, 26 bp, Artificial Sequence
  Synthetic
acagttcagaaagautagtccgtgug

SEQ ID NO: 35879 - DNA, 27 bp, Artificial Sequence
  Synthetic
gaaacaagauggtggactttauaccct

SEQ ID NO: 35880 - DNA, 24 bp, Artificial Sequence
  Synthetic
auttttctuccaccacaggaccat

SEQ ID NO: 35881 - DNA, 30 bp, Artificial Sequence
  Synthetic
gtacacacaattcaguagaaagcaaatcut

SEQ ID NO: 35882 - DNA, 20 bp, Artificial Sequence
  Synthetic
aggacaugcttugggcagac

SEQ ID NO: 35883 - DNA, 23 bp, Artificial Sequence
  Synthetic
actgtgtauctgctatgcuccac

SEQ ID NO: 35884 - DNA, 21 bp, Artificial Sequence
  Synthetic
acuggccacggaaattttugg

SEQ ID NO: 35885 - DNA, 28 bp, Artificial Sequence
  Synthetic
tccacatcugaagaacttcaacattuct

SEQ ID NO: 35886 - DNA, 30 bp, Artificial Sequence
  Synthetic
tcacaagtaaagagaacautttgtcctuca

SEQ ID NO: 35887 - DNA, 23 bp, Artificial Sequence
  Synthetic
gcgaucagaccctaaccaucaag

SEQ ID NO: 35888 - DNA, 27 bp, Artificial Sequence
  Synthetic
ccttcgtttaugctcatctgaguagaa

SEQ ID NO: 35889 - DNA, 28 bp, Artificial Sequence
  Synthetic
gatgucagaggcaaaatcucaagaaaag

SEQ ID NO: 35890 - DNA, 25 bp, Artificial Sequence
  Synthetic
gtggguaaaaacaaaagccaaccua

SEQ ID NO: 35891 - DNA, 26 bp, Artificial Sequence
  Synthetic
caaatcauttgcattcuacaggccat

SEQ ID NO: 35892 - DNA, 27 bp, Artificial Sequence
  Synthetic
tgtatccugcaacccagtaacaatuac

SEQ ID NO: 35893 - DNA, 24 bp, Artificial Sequence
  Synthetic
tgagatttcuggtgaagguggaac

SEQ ID NO: 35894 - DNA, 22 bp, Artificial Sequence
  Synthetic
caggtgaccucttttgccctua

SEQ ID NO: 35895 - DNA, 25 bp, Artificial Sequence
  Synthetic
aagcagutaagtcuccaaaacgagt

SEQ ID NO: 35896 - DNA, 21 bp, Artificial Sequence
  Synthetic
ccacgctguaattgcccucat

SEQ ID NO: 35897 - DNA, 25 bp, Artificial Sequence
  Synthetic
tttggcagcaagaautcuaacaaag

SEQ ID NO: 35898 - DNA, 25 bp, Artificial Sequence
  Synthetic
catctgtgatutcacttcccugaca

SEQ ID NO: 35899 - DNA, 21 bp, Artificial Sequence
  Synthetic
ctgtgugcaccaacuacaagg

SEQ ID NO: 35900 - DNA, 31 bp, Artificial Sequence
  Synthetic
gcagttggctuagactgaacatttaaaauaa

SEQ ID NO: 35901 - DNA, 27 bp, Artificial Sequence
  Synthetic
agatttgagagguctgcaagattugat

SEQ ID NO: 35902 - DNA, 23 bp, Artificial Sequence
  Synthetic
cagacacuggcctcattaacuca

SEQ ID NO: 35903 - DNA, 25 bp, Artificial Sequence
  Synthetic
cacccagcauctctcagaauacaaa

SEQ ID NO: 35904 - DNA, 24 bp, Artificial Sequence
  Synthetic
cttcgttgggaugtgataggtuga

SEQ ID NO: 35905 - DNA, 27 bp, Artificial Sequence
  Synthetic
gaattactccuccccattgatgacuac

SEQ ID NO: 35906 - DNA, 25 bp, Artificial Sequence
  Synthetic
gctggtcucactatctcaagaucat

SEQ ID NO: 35907 - DNA, 25 bp, Artificial Sequence
  Synthetic
cagtatgaaaugcctgggaaactug

SEQ ID NO: 35908 - DNA, 22 bp, Artificial Sequence
  Synthetic
atccggagutttctctccucct

SEQ ID NO: 35909 - DNA, 25 bp, Artificial Sequence
  Synthetic
gcgacacguacaaaaacaaatugac

SEQ ID NO: 35910 - DNA, 22 bp, Artificial Sequence
  Synthetic
cttcaggcaaagugtcccugat

SEQ ID NO: 35911 - DNA, 27 bp, Artificial Sequence
  Synthetic
ccacctccaacagauagtacctuaaga

SEQ ID NO: 35912 - DNA, 29 bp, Artificial Sequence
  Synthetic
ctgactcaaatgugtacttcttgtcatug

SEQ ID NO: 35913 - DNA, 25 bp, Artificial Sequence
  Synthetic
actgccguagaaccaugaagaaaat

SEQ ID NO: 35914 - DNA, 21 bp, Artificial Sequence
  Synthetic
gatggccacuccatcttcgua

SEQ ID NO: 35915 - DNA, 23 bp, Artificial Sequence
  Synthetic
cgatcucagaagggagtgagugt

SEQ ID NO: 35916 - DNA, 24 bp, Artificial Sequence
  Synthetic
ctatcttcugcttcaaccaugggt

SEQ ID NO: 35917 - DNA, 27 bp, Artificial Sequence
  Synthetic
ggaacactgguatatgtgctatugagt

SEQ ID NO: 35918 - DNA, 23 bp, Artificial Sequence
  Synthetic
ctgacgggcutgaccaaattcua

SEQ ID NO: 35919 - DNA, 26 bp, Artificial Sequence
  Synthetic
aggacttgacauatttgagcgcatua

SEQ ID NO: 35920 - DNA, 26 bp, Artificial Sequence
  Synthetic
cctgatcaguccctttgacttuaaca

SEQ ID NO: 35921 - DNA, 30 bp, Artificial Sequence
  Synthetic
tgaactatgaugaagaggtagaugaaacca

SEQ ID NO: 35922 - DNA, 27 bp, Artificial Sequence
  Synthetic
aagttgatcacgguataacgtgttuct

SEQ ID NO: 35923 - DNA, 27 bp, Artificial Sequence
  Synthetic
gaattgaucagaagacagttgaacugg

SEQ ID NO: 35924 - DNA, 26 bp, Artificial Sequence
  Synthetic
acttggtaguggccattattgucaat

SEQ ID NO: 35925 - DNA, 29 bp, Artificial Sequence
  Synthetic
cacttaaacacauactgttagatgtugct

SEQ ID NO: 35926 - DNA, 31 bp, Artificial Sequence
  Synthetic
gtagccaccctuaaattcttgaatcctauat

SEQ ID NO: 35927 - DNA, 25 bp, Artificial Sequence
  Synthetic
actcccaaatcugatgtcccaatuc

SEQ ID NO: 35928 - DNA, 28 bp, Artificial Sequence
  Synthetic
agtttctcgaauttcttctgttgucaca

SEQ ID NO: 35929 - DNA, 30 bp, Artificial Sequence
  Synthetic
cctgtttcatctcaugactcaaatctttut

SEQ ID NO: 35930 - DNA, 26 bp, Artificial Sequence
  Synthetic
gtgaggttcacaautctacaggtugt

SEQ ID NO: 35931 - DNA, 25 bp, Artificial Sequence
  Synthetic
ccacaautgtatttucccccaacag

SEQ ID NO: 35932 - DNA, 24 bp, Artificial Sequence
  Synthetic
caaaaacattgcugagctggacut

SEQ ID NO: 35933 - DNA, 26 bp, Artificial Sequence
  Synthetic
gttatgtacatuggtcgtccaguacc

SEQ ID NO: 35934 - DNA, 23 bp, Artificial Sequence
  Synthetic
gctugcaggagaagcttacuact

SEQ ID NO: 35935 - DNA, 29 bp, Artificial Sequence
  Synthetic
ttcctgacatuaaatggtacagattuggt

SEQ ID NO: 35936 - DNA, 28 bp, Artificial Sequence
  Synthetic
gggaattagccutaacttgtttagttug

SEQ ID NO: 35937 - DNA, 24 bp, Artificial Sequence
  Synthetic
cagtgccuggaagaagagcaauaa

SEQ ID NO: 35938 - DNA, 24 bp, Artificial Sequence
  Synthetic
gaccaaacauggcttgcttcttua

SEQ ID NO: 35939 - DNA, 22 bp, Artificial Sequence
  Synthetic
ctgacaagugggucagacacaa

SEQ ID NO: 35940 - DNA, 28 bp, Artificial Sequence
  Synthetic
cagtcccaaguattataagccaaugact

SEQ ID NO: 35941 - DNA, 25 bp, Artificial Sequence
  Synthetic
gtggtaaaaggccucaaagagaaug

SEQ ID NO: 35942 - DNA, 20 bp, Artificial Sequence
  Synthetic
cacagagcggacutggaugt

SEQ ID NO: 35943 - DNA, 25 bp, Artificial Sequence
  Synthetic
ccaggatattaguaagcgtgccaug

SEQ ID NO: 35944 - DNA, 28 bp, Artificial Sequence
  Synthetic
gggactaagaaauaagtctatggcaaut

SEQ ID NO: 35945 - DNA, 26 bp, Artificial Sequence
  Synthetic
tcaacatgaauggaccaagtguaaca

SEQ ID NO: 35946 - DNA, 31 bp, Artificial Sequence
  Synthetic
tcaatttgactgauacaaaatgtcctuacca

SEQ ID NO: 35947 - DNA, 26 bp, Artificial Sequence
  Synthetic
ggtccgtguaaataaagtacctguga

SEQ ID NO: 35948 - DNA, 20 bp, Artificial Sequence
  Synthetic
tggaagggccugtggactua

SEQ ID NO: 35949 - DNA, 22 bp, Artificial Sequence
  Synthetic
tgctccacugagtggttatgug

SEQ ID NO: 35950 - DNA, 28 bp, Artificial Sequence
  Synthetic
acttcaaatcaaaautgggtgacugaac

SEQ ID NO: 35951 - DNA, 28 bp, Artificial Sequence
  Synthetic
tgtcacagttgaaacucacactaaagua

SEQ ID NO: 35952 - DNA, 26 bp, Artificial Sequence
  Synthetic
gctatttggtacauacctctgagguc

SEQ ID NO: 35953 - DNA, 25 bp, Artificial Sequence
  Synthetic
cagagagauggatgaaggttgucac

SEQ ID NO: 35954 - DNA, 22 bp, Artificial Sequence
  Synthetic
ctgagaccaguactgcaucaga

SEQ ID NO: 35955 - DNA, 22 bp, Artificial Sequence
  Synthetic
attcccacgautgatgguggag

SEQ ID NO: 35956 - DNA, 27 bp, Artificial Sequence
  Synthetic
agaggtgatcaaucataggtcaagcua

SEQ ID NO: 35957 - DNA, 20 bp, Artificial Sequence
  Synthetic
ctugcaagccgggcaatuat

SEQ ID NO: 35958 - DNA, 30 bp, Artificial Sequence
  Synthetic
caagatctggtauttctggaaagttaauga

SEQ ID NO: 35959 - DNA, 21 bp, Artificial Sequence
  Synthetic
gccgtgaacgugaagggtaug

SEQ ID NO: 35960 - DNA, 25 bp, Artificial Sequence
  Synthetic
tgatcagtgtccutctcttgcatut

SEQ ID NO: 35961 - DNA, 31 bp, Artificial Sequence
  Synthetic
ccttatttgcctaauatctgcatctcactut

SEQ ID NO: 35962 - DNA, 22 bp, Artificial Sequence
  Synthetic
actgtuaccagctgcatucact

SEQ ID NO: 35963 - DNA, 27 bp, Artificial Sequence
  Synthetic
gcataucatcattcaguggacaaaacc

SEQ ID NO: 35964 - DNA, 23 bp, Artificial Sequence
  Synthetic
tgataagacugcccttctcccut

SEQ ID NO: 35965 - DNA, 23 bp, Artificial Sequence
  Synthetic
cgaatgcccaacccuatcctaug

SEQ ID NO: 35966 - DNA, 24 bp, Artificial Sequence
  Synthetic
tgcccacacuggaaaatgctauat

SEQ ID NO: 35967 - DNA, 26 bp, Artificial Sequence
  Synthetic
tctctgugaaaaagtctcttugcagt

SEQ ID NO: 35968 - DNA, 22 bp, Artificial Sequence
  Synthetic
gagcugtcaguaggcaaaacag

SEQ ID NO: 35969 - DNA, 22 bp, Artificial Sequence
  Synthetic
gtgacugctctcagugaaggag

SEQ ID NO: 35970 - DNA, 22 bp, Artificial Sequence
  Synthetic
caaccttgcugcctccatcaua

SEQ ID NO: 35971 - DNA, 28 bp, Artificial Sequence
  Synthetic
gttggtatguatcacaattuaagggcat

SEQ ID NO: 35972 - DNA, 30 bp, Artificial Sequence
  Synthetic
tttttcttaccaaauggatgttcagcaaut

SEQ ID NO: 35973 - DNA, 21 bp, Artificial Sequence
  Synthetic
agcgtgaaucggguacaacag

SEQ ID NO: 35974 - DNA, 23 bp, Artificial Sequence
  Synthetic
ccacaactgugacgctaaatgut

SEQ ID NO: 35975 - DNA, 23 bp, Artificial Sequence
  Synthetic
caggaagcccauttaccatugac

SEQ ID NO: 35976 - DNA, 24 bp, Artificial Sequence
  Synthetic
ttggcctucacacggaattcauat

SEQ ID NO: 35977 - DNA, 23 bp, Artificial Sequence
  Synthetic
atactagcaaaucctccgcaguc

SEQ ID NO: 35978 - DNA, 25 bp, Artificial Sequence
  Synthetic
tcattgaccutgaagatcugacgag

SEQ ID NO: 35979 - DNA, 26 bp, Artificial Sequence
  Synthetic
ggtagtaagucaatcacatucaccgt

SEQ ID NO: 35980 - DNA, 24 bp, Artificial Sequence
  Synthetic
ctgutgtatggataucagcccgaa

SEQ ID NO: 35981 - DNA, 29 bp, Artificial Sequence
  Synthetic
ggttaacagcucctgagttagacauagat

SEQ ID NO: 35982 - DNA, 23 bp, Artificial Sequence
  Synthetic
ttttcacacaugcctctgcatuc

SEQ ID NO: 35983 - DNA, 24 bp, Artificial Sequence
  Synthetic
gcaagtggcauctcaagactcaut

SEQ ID NO: 35984 - DNA, 28 bp, Artificial Sequence
  Synthetic
ccatcttgtgcutttcttttctcttcut

SEQ ID NO: 35985 - DNA, 27 bp, Artificial Sequence
  Synthetic
caagcaaatgcauctaattgattuggg

SEQ ID NO: 35986 - DNA, 22 bp, Artificial Sequence
  Synthetic
caattagugcccaggcaaguct

SEQ ID NO: 35987 - DNA, 29 bp, Artificial Sequence
  Synthetic
agacatgccuagttgtattttaauggaca

SEQ ID NO: 35988 - DNA, 21 bp, Artificial Sequence
  Synthetic
cgatggucccgagtagcauct

SEQ ID NO: 35989 - DNA, 28 bp, Artificial Sequence
  Synthetic
attattaaguccggagagagcctuagaa

SEQ ID NO: 35990 - DNA, 28 bp, Artificial Sequence
  Synthetic
aaatgtgaatgcucttagtctcatugga

SEQ ID NO: 35991 - DNA, 20 bp, Artificial Sequence
  Synthetic
caaggaaaugaacgcugggt

SEQ ID NO: 35992 - DNA, 28 bp, Artificial Sequence
  Synthetic
augtaagaaggtgaugcagagaagaaaa

SEQ ID NO: 35993 - DNA, 22 bp, Artificial Sequence
  Synthetic
ccactggacuggtagaagguct

SEQ ID NO: 35994 - DNA, 24 bp, Artificial Sequence
  Synthetic
tgacatgccaucagaagtcacaut

SEQ ID NO: 35995 - DNA, 26 bp, Artificial Sequence
  Synthetic
ttcacaaactaacuggaagatggugt

SEQ ID NO: 35996 - DNA, 23 bp, Artificial Sequence
  Synthetic
ccaagggugatgactgtaauggg

SEQ ID NO: 35997 - DNA, 28 bp, Artificial Sequence
  Synthetic
cacaatgtgcaccutgaattaccttaua

SEQ ID NO: 35998 - DNA, 26 bp, Artificial Sequence
  Synthetic
tcagtccuttctcattttuggcaaac

SEQ ID NO: 35999 - DNA, 29 bp, Artificial Sequence
  Synthetic
tgatctcucaatgaaagacucaacaaaga

SEQ ID NO: 36000 - DNA, 25 bp, Artificial Sequence
  Synthetic
aggatgtgcuagaacatttgtguga

SEQ ID NO: 36001 - DNA, 26 bp, Artificial Sequence
  Synthetic
gaacctaagtcutcaactgtgagugt

SEQ ID NO: 36002 - DNA, 22 bp, Artificial Sequence
  Synthetic
gtatcuggcatcacugccaaga

SEQ ID NO: 36003 - DNA, 28 bp, Artificial Sequence
  Synthetic
agcatactuccaggaaatcactctttut

SEQ ID NO: 36004 - DNA, 23 bp, Artificial Sequence
  Synthetic
guttacagcagauacccggaagt

SEQ ID NO: 36005 - DNA, 23 bp, Artificial Sequence
  Synthetic
caaccaagtcauccatcacccut

SEQ ID NO: 36006 - DNA, 22 bp, Artificial Sequence
  Synthetic
caggtgaagaugctgcagguat

SEQ ID NO: 36007 - DNA, 31 bp, Artificial Sequence
  Synthetic
gagcctaggauggtttaaagtacuaaaagag

SEQ ID NO: 36008 - DNA, 23 bp, Artificial Sequence
  Synthetic
aagcataugcacaggttagcgua

SEQ ID NO: 36009 - DNA, 26 bp, Artificial Sequence
  Synthetic
ggtctatggugtctgaacattuggaa

SEQ ID NO: 36010 - DNA, 26 bp, Artificial Sequence
  Synthetic
ggacaaaacacgaugttagtactuct

SEQ ID NO: 36011 - DNA, 28 bp, Artificial Sequence
  Synthetic
atcgccttaataguggatgctatgaaut

SEQ ID NO: 36012 - DNA, 23 bp, Artificial Sequence
  Synthetic
cactcaataguaggcgcaggtut

SEQ ID NO: 36013 - DNA, 29 bp, Artificial Sequence
  Synthetic
ccttactttaaggutggtgcaactattut

SEQ ID NO: 36014 - DNA, 24 bp, Artificial Sequence
  Synthetic
ctgagucaagccagagatgaugaa

SEQ ID NO: 36015 - DNA, 28 bp, Artificial Sequence
  Synthetic
cgctaatcugcttctcttatuaccacag

SEQ ID NO: 36016 - DNA, 24 bp, Artificial Sequence
  Synthetic
gttttccaacuccagcagcattut

SEQ ID NO: 36017 - DNA, 21 bp, Artificial Sequence
  Synthetic
gcagtgcagucgtaggctauc

SEQ ID NO: 36018 - DNA, 25 bp, Artificial Sequence
  Synthetic
aggugttgcuacaaaagagagaaat

SEQ ID NO: 36019 - DNA, 27 bp, Artificial Sequence
  Synthetic
atgaaacugaccacaggagaagaauac

SEQ ID NO: 36020 - DNA, 26 bp, Artificial Sequence
  Synthetic
ccatttgagagucacactttctucag

SEQ ID NO: 36021 - DNA, 24 bp, Artificial Sequence
  Synthetic
cccctuaaggcaaccatgagatut

SEQ ID NO: 36022 - DNA, 29 bp, Artificial Sequence
  Synthetic
cacaaaattagacauacctagttgcucct

SEQ ID NO: 36023 - DNA, 28 bp, Artificial Sequence
  Synthetic
gutgaagcacuagaaaaaggacagaaaa

SEQ ID NO: 36024 - DNA, 30 bp, Artificial Sequence
  Synthetic
tcacactattcuagcaaaattaacguggat

SEQ ID NO: 36025 - DNA, 22 bp, Artificial Sequence
  Synthetic
gcaagaaagcaugggtctcugt

SEQ ID NO: 36026 - DNA, 28 bp, Artificial Sequence
  Synthetic
gggtatcuaaaactttgacaacuaaggt

SEQ ID NO: 36027 - DNA, 21 bp, Artificial Sequence
  Synthetic
ccttuccgaggaagaccagua

SEQ ID NO: 36028 - DNA, 30 bp, Artificial Sequence
  Synthetic
actagcaccaaccutattgacagatttuac

SEQ ID NO: 36029 - DNA, 25 bp, Artificial Sequence
  Synthetic
tgtggacucaggcaagacaactaua

SEQ ID NO: 36030 - DNA, 24 bp, Artificial Sequence
  Synthetic
gcagcautttctgcauaaacacga

SEQ ID NO: 36031 - DNA, 28 bp, Artificial Sequence
  Synthetic
cgtctttggaaautacttctgugaccaa

SEQ ID NO: 36032 - DNA, 28 bp, Artificial Sequence
  Synthetic
acttggttacttuacaggatgtcatcug

SEQ ID NO: 36033 - DNA, 22 bp, Artificial Sequence
  Synthetic
tctguggccgttaatugcaaag

SEQ ID NO: 36034 - DNA, 31 bp, Artificial Sequence
  Synthetic
cttgctctttctucaatttctataccaucct

SEQ ID NO: 36035 - DNA, 22 bp, Artificial Sequence
  Synthetic
aaggaatgcugctgactcagut

SEQ ID NO: 36036 - DNA, 26 bp, Artificial Sequence
  Synthetic
ctgtgatcttagcuccaccatcauaa

SEQ ID NO: 36037 - DNA, 22 bp, Artificial Sequence
  Synthetic
caaatgaaaguctccggcctug

SEQ ID NO: 36038 - DNA, 23 bp, Artificial Sequence
  Synthetic
caagcatgguagattttguggca

SEQ ID NO: 36039 - DNA, 25 bp, Artificial Sequence
  Synthetic
cacctctacaacauggcacatagut

SEQ ID NO: 36040 - DNA, 22 bp, Artificial Sequence
  Synthetic
gtccuggtctgucaaggacaat

SEQ ID NO: 36041 - DNA, 26 bp, Artificial Sequence
  Synthetic
caagcuactgtgaacuggagaaaaga

SEQ ID NO: 36042 - DNA, 26 bp, Artificial Sequence
  Synthetic
ttgtcttggaucacttcttcccttut

SEQ ID NO: 36043 - DNA, 27 bp, Artificial Sequence
  Synthetic
cagcaaaattacuggttatgtggtuga

SEQ ID NO: 36044 - DNA, 25 bp, Artificial Sequence
  Synthetic
ctggcaaaccaaucccatattcaut

SEQ ID NO: 36045 - DNA, 25 bp, Artificial Sequence
  Synthetic
aagtgaagaaagacucagtgacgut

SEQ ID NO: 36046 - DNA, 27 bp, Artificial Sequence
  Synthetic
cgaccactgucaaatctggtaacatua

SEQ ID NO: 36047 - DNA, 25 bp, Artificial Sequence
  Synthetic
ccaccagaaauagaactcgatgcug

SEQ ID NO: 36048 - DNA, 26 bp, Artificial Sequence
  Synthetic
gtgttttcttuaagcttggtcacugt

SEQ ID NO: 36049 - DNA, 22 bp, Artificial Sequence
  Synthetic
cccaagcaauccaaaagugacg

SEQ ID NO: 36050 - DNA, 21 bp, Artificial Sequence
  Synthetic
tgagccgcagauccgttaaug

SEQ ID NO: 36051 - DNA, 20 bp, Artificial Sequence
  Synthetic
ggcctgtuacggcctguaat

SEQ ID NO: 36052 - DNA, 23 bp, Artificial Sequence
  Synthetic
gttaagggccugtacctcagtug

SEQ ID NO: 36053 - DNA, 27 bp, Artificial Sequence
  Synthetic
gtggtacaaaguctatacccatcacug

SEQ ID NO: 36054 - DNA, 27 bp, Artificial Sequence
  Synthetic
cattctagcagcugtttcttcaagtuc

SEQ ID NO: 36055 - DNA, 26 bp, Artificial Sequence
  Synthetic
caagaaatgcagcuggaaacttuagt

SEQ ID NO: 36056 - DNA, 26 bp, Artificial Sequence
  Synthetic
acctgttatttugctaccaccaucat

SEQ ID NO: 36057 - DNA, 25 bp, Artificial Sequence
  Synthetic
gggccttgaguatgagttcaaagut

SEQ ID NO: 36058 - DNA, 27 bp, Artificial Sequence
  Synthetic
ttctttctgutcaagatgguagccaat

SEQ ID NO: 36059 - DNA, 28 bp, Artificial Sequence
  Synthetic
cggagtaccaguttagaatttttgcuga

SEQ ID NO: 36060 - DNA, 22 bp, Artificial Sequence
  Synthetic
ccaccagtauaggctggaggut

SEQ ID NO: 36061 - DNA, 27 bp, Artificial Sequence
  Synthetic
gctacctcaacugttttgcacatuaaa

SEQ ID NO: 36062 - DNA, 31 bp, Artificial Sequence
  Synthetic
ggtcggcctauaactggaatttctatttuaa

SEQ ID NO: 36063 - DNA, 26 bp, Artificial Sequence
  Synthetic
tgttactgguttgagttcuggacaag

SEQ ID NO: 36064 - DNA, 21 bp, Artificial Sequence
  Synthetic
gtcugggacacatcagugagt

SEQ ID NO: 36065 - DNA, 26 bp, Artificial Sequence
  Synthetic
agtcaaucagaaaagcguatgcuaat

SEQ ID NO: 36066 - DNA, 28 bp, Artificial Sequence
  Synthetic
gtcaagaacuttcacagtuacaaaagca

SEQ ID NO: 36067 - DNA, 22 bp, Artificial Sequence
  Synthetic
ctggtggauctgccagaatuca

SEQ ID NO: 36068 - DNA, 21 bp, Artificial Sequence
  Synthetic
gttgagggcacagacucguat

SEQ ID NO: 36069 - DNA, 30 bp, Artificial Sequence
  Synthetic
cacacattguagacaccactaaaaatucaa

SEQ ID NO: 36070 - DNA, 28 bp, Artificial Sequence
  Synthetic
catgatcttctgutaatcctgtcacuct

SEQ ID NO: 36071 - DNA, 25 bp, Artificial Sequence
  Synthetic
aaaaatccattugtgcttccuggac

SEQ ID NO: 36072 - DNA, 24 bp, Artificial Sequence
  Synthetic
caacttcugaagcaacaacagucc

SEQ ID NO: 36073 - DNA, 28 bp, Artificial Sequence
  Synthetic
caggttctaagucattcccagtaaaugt

SEQ ID NO: 36074 - DNA, 30 bp, Artificial Sequence
  Synthetic
tctgtgttctutatttcacatcuagcagat

SEQ ID NO: 36075 - DNA, 25 bp, Artificial Sequence
  Synthetic
caataacugccaaggatgaggtuga

SEQ ID NO: 36076 - DNA, 21 bp, Artificial Sequence
  Synthetic
agcuagctttcauccaacgac

SEQ ID NO: 36077 - DNA, 25 bp, Artificial Sequence
  Synthetic
aaagcaagcaagaautctgaaugct

SEQ ID NO: 36078 - DNA, 27 bp, Artificial Sequence
  Synthetic
tgttgacctttguccacaaaatacugt

SEQ ID NO: 36079 - DNA, 27 bp, Artificial Sequence
  Synthetic
cttagagtctgauccaattgtagcuca

SEQ ID NO: 36080 - DNA, 27 bp, Artificial Sequence
  Synthetic
gtagttcuagcaacaguagcagaaaca

SEQ ID NO: 36081 - DNA, 26 bp, Artificial Sequence
  Synthetic
agaagacagcauccatcgaaattgua

SEQ ID NO: 36082 - DNA, 26 bp, Artificial Sequence
  Synthetic
gggagaccauctttagtccagguaat

SEQ ID NO: 36083 - DNA, 29 bp, Artificial Sequence
  Synthetic
gggaagaatatcuttttagagttgtugct

SEQ ID NO: 36084 - DNA, 26 bp, Artificial Sequence
  Synthetic
catcatgttcaggutttgtccaacuc

SEQ ID NO: 36085 - DNA, 28 bp, Artificial Sequence
  Synthetic
tgctgttguaactaactgccauaagaat

SEQ ID NO: 36086 - DNA, 25 bp, Artificial Sequence
  Synthetic
actttcaggtuaacaggtggactug

SEQ ID NO: 36087 - DNA, 25 bp, Artificial Sequence
  Synthetic
cgtccuacaccagaagttaaauggg

SEQ ID NO: 36088 - DNA, 25 bp, Artificial Sequence
  Synthetic
actataatagguccagggacgucag

SEQ ID NO: 36089 - DNA, 27 bp, Artificial Sequence
  Synthetic
gtggctgtgaaautcaaggatacatug

SEQ ID NO: 36090 - DNA, 22 bp, Artificial Sequence
  Synthetic
gcttggutcactaaguccagca

SEQ ID NO: 36091 - DNA, 25 bp, Artificial Sequence
  Synthetic
cagtgaccaaggacucaatgatugt

SEQ ID NO: 36092 - DNA, 29 bp, Artificial Sequence
  Synthetic
acggaaagtauattcattgcctucaagaa

SEQ ID NO: 36093 - DNA, 25 bp, Artificial Sequence
  Synthetic
cacctgaaggaccugttgttatcuc

SEQ ID NO: 36094 - DNA, 20 bp, Artificial Sequence
  Synthetic
tgagactgguggcaaagucg

SEQ ID NO: 36095 - DNA, 24 bp, Artificial Sequence
  Synthetic
aaagcacaggagcaauaacagcua

SEQ ID NO: 36096 - DNA, 25 bp, Artificial Sequence
  Synthetic
gccctcagguaattctttcttcuca

SEQ ID NO: 36097 - DNA, 24 bp, Artificial Sequence
  Synthetic
attggcaagccgaguaaagtauca

SEQ ID NO: 36098 - DNA, 26 bp, Artificial Sequence
  Synthetic
cttgcgttcuagatgatagccaauga

SEQ ID NO: 36099 - DNA, 30 bp, Artificial Sequence
  Synthetic
ctgaagactggaugtgaatatcagttuaga

SEQ ID NO: 36100 - DNA, 26 bp, Artificial Sequence
  Synthetic
ggcccuaggaaagaguaatactauca

SEQ ID NO: 36101 - DNA, 31 bp, Artificial Sequence
  Synthetic
agagtaaaugcagagaguacagaaaataaut

SEQ ID NO: 36102 - DNA, 24 bp, Artificial Sequence
  Synthetic
ctggtggaaugacaagatcttugg

SEQ ID NO: 36103 - DNA, 21 bp, Artificial Sequence
  Synthetic
atggaggcagccgaautcuag

SEQ ID NO: 36104 - DNA, 25 bp, Artificial Sequence
  Synthetic
ccauattcattttcugcgagaaccc

SEQ ID NO: 36105 - DNA, 29 bp, Artificial Sequence
  Synthetic
gatctgaagguaaaagaggtcacuaagac

SEQ ID NO: 36106 - DNA, 27 bp, Artificial Sequence
  Synthetic
gtttacauttccaacaauaagcagggt

SEQ ID NO: 36107 - DNA, 23 bp, Artificial Sequence
  Synthetic
gaacuccaaaggcugaagacaga

SEQ ID NO: 36108 - DNA, 24 bp, Artificial Sequence
  Synthetic
aatctgccatucatcttcctcugg

SEQ ID NO: 36109 - DNA, 22 bp, Artificial Sequence
  Synthetic
tgcuggaattagugcaccaagt

SEQ ID NO: 36110 - DNA, 25 bp, Artificial Sequence
  Synthetic
tcacgccgtuccacaatataatuga

SEQ ID NO: 36111 - DNA, 29 bp, Artificial Sequence
  Synthetic
tcttgaaaggcaaugaatacatatuccgt

SEQ ID NO: 36112 - DNA, 22 bp, Artificial Sequence
  Synthetic
tccaguggagggaaccatgaua

SEQ ID NO: 36113 - DNA, 28 bp, Artificial Sequence
  Synthetic
acaaagatucaacaagaagggatagugg

SEQ ID NO: 36114 - DNA, 23 bp, Artificial Sequence
  Synthetic
cctgaaacaucagcttccaguct

SEQ ID NO: 36115 - DNA, 24 bp, Artificial Sequence
  Synthetic
cagtcagtggccuaacagaagaug

SEQ ID NO: 36116 - DNA, 26 bp, Artificial Sequence
  Synthetic
ggcttagcccauttaagtgttacugt

SEQ ID NO: 36117 - DNA, 23 bp, Artificial Sequence
  Synthetic
gcagactgugagcaaagcttuag

SEQ ID NO: 36118 - DNA, 26 bp, Artificial Sequence
  Synthetic
gaggtccaggaaccutaaatggauag

SEQ ID NO: 36119 - DNA, 26 bp, Artificial Sequence
  Synthetic
tggtggtguaccaataagcaactaug

SEQ ID NO: 36120 - DNA, 24 bp, Artificial Sequence
  Synthetic
tgatgacaucaccaacctctccua

SEQ ID NO: 36121 - DNA, 24 bp, Artificial Sequence
  Synthetic
ccaaagcuggtgacaacaucaaag

SEQ ID NO: 36122 - DNA, 30 bp, Artificial Sequence
  Synthetic
ggtatattcctcuccttcagttagatucct

SEQ ID NO: 36123 - DNA, 23 bp, Artificial Sequence
  Synthetic
cguaaaagcctcugaagcaccat

SEQ ID NO: 36124 - DNA, 28 bp, Artificial Sequence
  Synthetic
cggtaactttauatgtgcatttauggca

SEQ ID NO: 36125 - DNA, 24 bp, Artificial Sequence
  Synthetic
tgggaagaaaaguggctttgugaa

SEQ ID NO: 36126 - DNA, 23 bp, Artificial Sequence
  Synthetic
cgtattttcaaugttggcucggt

SEQ ID NO: 36127 - DNA, 21 bp, Artificial Sequence
  Synthetic
cagcggtgautccagatgtug

SEQ ID NO: 36128 - DNA, 24 bp, Artificial Sequence
  Synthetic
cctacuttttgatgcuccacgaca

SEQ ID NO: 36129 - DNA, 28 bp, Artificial Sequence
  Synthetic
cgttcattccagagugccaatatttuat

SEQ ID NO: 36130 - DNA, 22 bp, Artificial Sequence
  Synthetic
gtggaccaatucctgctctgut

SEQ ID NO: 36131 - DNA, 30 bp, Artificial Sequence
  Synthetic
cagcgaaatuacaggatatcatguagaaag

SEQ ID NO: 36132 - DNA, 31 bp, Artificial Sequence
  Synthetic
ttcctaaactctgcuataaatgtttccaugt

SEQ ID NO: 36133 - DNA, 25 bp, Artificial Sequence
  Synthetic
cttttgtggacaguggtttcugaag

SEQ ID NO: 36134 - DNA, 22 bp, Artificial Sequence
  Synthetic
gaccagguacatcaaggacugt

SEQ ID NO: 36135 - DNA, 23 bp, Artificial Sequence
  Synthetic
ccaaaaucaagttgguccaaggc

SEQ ID NO: 36136 - DNA, 30 bp, Artificial Sequence
  Synthetic
acattttaaucagaaaaggaaggaggutua

SEQ ID NO: 36137 - DNA, 24 bp, Artificial Sequence
  Synthetic
gccaaccaugttaatgucccagaa

SEQ ID NO: 36138 - DNA, 27 bp, Artificial Sequence
  Synthetic
tccaggaggauctaaaacauaaaagca

SEQ ID NO: 36139 - DNA, 30 bp, Artificial Sequence
  Synthetic
cttgaatatgaatuccgagttatggcaauc

SEQ ID NO: 36140 - DNA, 27 bp, Artificial Sequence
  Synthetic
actgttcucagggaaatatttgugagg

SEQ ID NO: 36141 - DNA, 24 bp, Artificial Sequence
  Synthetic
acggtttugaggaggcttcttaut

SEQ ID NO: 36142 - DNA, 26 bp, Artificial Sequence
  Synthetic
ctgaaggtatatuccatgccctcaug

SEQ ID NO: 36143 - DNA, 23 bp, Artificial Sequence
  Synthetic
catccccacuggaccaaucaaat

SEQ ID NO: 36144 - DNA, 22 bp, Artificial Sequence
  Synthetic
cgcagaugactcaacacugact

SEQ ID NO: 36145 - DNA, 30 bp, Artificial Sequence
  Synthetic
cgcctggcctuaaaaataacagtaattuat

SEQ ID NO: 36146 - DNA, 27 bp, Artificial Sequence
  Synthetic
ccttcagtcaaaucttttgcagaguac

SEQ ID NO: 36147 - DNA, 28 bp, Artificial Sequence
  Synthetic
gcttacacttatcauttctcctttgcut

SEQ ID NO: 36148 - DNA, 25 bp, Artificial Sequence
  Synthetic
aagaagtaggautttccctccucca

SEQ ID NO: 36149 - DNA, 19 bp, Artificial Sequence
  Synthetic
agauactccugggccacct

SEQ ID NO: 36150 - DNA, 28 bp, Artificial Sequence
  Synthetic
gtccaatcctguctcttagattgacaut

SEQ ID NO: 36151 - DNA, 21 bp, Artificial Sequence
  Synthetic
aaggccaguccctggaaauac

SEQ ID NO: 36152 - DNA, 24 bp, Artificial Sequence
  Synthetic
agattctgtgguaagttgcaccuc

SEQ ID NO: 36153 - DNA, 27 bp, Artificial Sequence
  Synthetic
catuaaacacucaggaaggaagtttuc

SEQ ID NO: 36154 - DNA, 23 bp, Artificial Sequence
  Synthetic
cacggaacucatattcgguacct

SEQ ID NO: 36155 - DNA, 29 bp, Artificial Sequence
  Synthetic
atcctcctgutattagcaacauaaccaaa

SEQ ID NO: 36156 - DNA, 25 bp, Artificial Sequence
  Synthetic
aatgaaaaaccaucgggaaaugtuc

SEQ ID NO: 36157 - DNA, 24 bp, Artificial Sequence
  Synthetic
ttgutgacaaacgugaaacaagca

SEQ ID NO: 36158 - DNA, 29 bp, Artificial Sequence
  Synthetic
gtcttctcccacautattctgtaaaucct

SEQ ID NO: 36159 - DNA, 21 bp, Artificial Sequence
  Synthetic
gcuattcagcgugaaccggaa

SEQ ID NO: 36160 - DNA, 21 bp, Artificial Sequence
  Synthetic
caagaaacugttggcaucggt

SEQ ID NO: 36161 - DNA, 28 bp, Artificial Sequence
  Synthetic
agaagcagcataugaatttcccactaut

SEQ ID NO: 36162 - DNA, 22 bp, Artificial Sequence
  Synthetic
ggaatctggugaggtgcaguat

SEQ ID NO: 36163 - DNA, 31 bp, Artificial Sequence
  Synthetic
gataaatggtgagugtacctctttttgttut

SEQ ID NO: 36164 - DNA, 23 bp, Artificial Sequence
  Synthetic
cuacaaggccaguacaaggauat

SEQ ID NO: 36165 - DNA, 26 bp, Artificial Sequence
  Synthetic
gacatcttccutgtcttcatcuccag

SEQ ID NO: 36166 - DNA, 21 bp, Artificial Sequence
  Synthetic
cuttccaacccugcaggaagt

SEQ ID NO: 36167 - DNA, 29 bp, Artificial Sequence
  Synthetic
tcttacatttcttucctcttggttcaugt

SEQ ID NO: 36168 - DNA, 22 bp, Artificial Sequence
  Synthetic
gagctgtcugctttatgcacug

SEQ ID NO: 36169 - DNA, 24 bp, Artificial Sequence
  Synthetic
ccaccagaagaaacutauccacct

SEQ ID NO: 36170 - DNA, 24 bp, Artificial Sequence
  Synthetic
gcatttcuggccgctactcuaaat

SEQ ID NO: 36171 - DNA, 20 bp, Artificial Sequence
  Synthetic
ctggttaccucccctacgug

SEQ ID NO: 36172 - DNA, 30 bp, Artificial Sequence
  Synthetic
agtatcttgaccutgctaaaauaggagact

SEQ ID NO: 36173 - DNA, 21 bp, Artificial Sequence
  Synthetic
aagacatggucgaccgtuacc

SEQ ID NO: 36174 - DNA, 22 bp, Artificial Sequence
  Synthetic
acatgtctccucagcatcccua

SEQ ID NO: 36175 - DNA, 28 bp, Artificial Sequence
  Synthetic
tugataatgtggucagaaaaggacaagt

SEQ ID NO: 36176 - DNA, 26 bp, Artificial Sequence
  Synthetic
gaatgaaucacatgcuaagggaagga

SEQ ID NO: 36177 - DNA, 24 bp, Artificial Sequence
  Synthetic
caaaaatagcagaugcgtctccug

SEQ ID NO: 36178 - DNA, 29 bp, Artificial Sequence
  Synthetic
cgaatacttcugtgcttgagatuaagagt

SEQ ID NO: 36179 - DNA, 25 bp, Artificial Sequence
  Synthetic
tctccucccagaccatgaataucag

SEQ ID NO: 36180 - DNA, 26 bp, Artificial Sequence
  Synthetic
caccatcatautcaggtggatuccaa

SEQ ID NO: 36181 - DNA, 29 bp, Artificial Sequence
  Synthetic
atgaatatatttucagagtccgugcagaa

SEQ ID NO: 36182 - DNA, 21 bp, Artificial Sequence
  Synthetic
ggtggaucccagcaaacagua

SEQ ID NO: 36183 - DNA, 28 bp, Artificial Sequence
  Synthetic
ccgtgctgatucatctaaattttctcut

SEQ ID NO: 36184 - DNA, 25 bp, Artificial Sequence
  Synthetic
ctttgacagtuaggaccccactuaa

SEQ ID NO: 36185 - DNA, 25 bp, Artificial Sequence
  Synthetic
cgatgacugggaaagagtgcauaaa

SEQ ID NO: 36186 - DNA, 22 bp, Artificial Sequence
  Synthetic
gctcaccuggtctgtcaauagg

SEQ ID NO: 36187 - DNA, 31 bp, Artificial Sequence
  Synthetic
tggctcagaaauaacaaacttcataguagaa

SEQ ID NO: 36188 - DNA, 22 bp, Artificial Sequence
  Synthetic
ggcatgtccacugctgttctua

SEQ ID NO: 36189 - DNA, 25 bp, Artificial Sequence
  Synthetic
gttattaccgugagaguaggccaaa

SEQ ID NO: 36190 - DNA, 28 bp, Artificial Sequence
  Synthetic
gtactcattuccttcaattaguccaggt

SEQ ID NO: 36191 - DNA, 28 bp, Artificial Sequence
  Synthetic
cctggaccaccuattaatcctaaacuga

SEQ ID NO: 36192 - DNA, 23 bp, Artificial Sequence
  Synthetic
gtccagucactctgaactucagg

SEQ ID NO: 36193 - DNA, 23 bp, Artificial Sequence
  Synthetic
tgactccacaccuactgttgcua

SEQ ID NO: 36194 - DNA, 26 bp, Artificial Sequence
  Synthetic
ccacgtgtcttuccttgtatcttgut

SEQ ID NO: 36195 - DNA, 24 bp, Artificial Sequence
  Synthetic
ggtagcaaaacaguagccguacat

SEQ ID NO: 36196 - DNA, 22 bp, Artificial Sequence
  Synthetic
ggttgtccacuttgcaguagga

SEQ ID NO: 36197 - DNA, 30 bp, Artificial Sequence
  Synthetic
aaactaggtaattttuggactagcagtaut

SEQ ID NO: 36198 - DNA, 23 bp, Artificial Sequence
  Synthetic
cctgggtgccutcttcttgauat

SEQ ID NO: 36199 - DNA, 29 bp, Artificial Sequence
  Synthetic
cgtaagttgcuttctctgaauacaaaact

SEQ ID NO: 36200 - DNA, 20 bp, Artificial Sequence
  Synthetic
ggaagagguactggtugcct

SEQ ID NO: 36201 - DNA, 25 bp, Artificial Sequence
  Synthetic
cuttttagataaaccugggccacct

SEQ ID NO: 36202 - DNA, 24 bp, Artificial Sequence
  Synthetic
tccaagttacutttgggaauggca

SEQ ID NO: 36203 - DNA, 29 bp, Artificial Sequence
  Synthetic
gtttgcaaggaaaauagatgtctgatugt

SEQ ID NO: 36204 - DNA, 23 bp, Artificial Sequence
  Synthetic
tcccgaagaccggugactttaua

SEQ ID NO: 36205 - DNA, 23 bp, Artificial Sequence
  Synthetic
ttagctaaaccaaguccaccugt

SEQ ID NO: 36206 - DNA, 30 bp, Artificial Sequence
  Synthetic
gtgtatggatgaauaggatctttgguaact

SEQ ID NO: 36207 - DNA, 22 bp, Artificial Sequence
  Synthetic
tgatgcaccugatcagccaaut

SEQ ID NO: 36208 - DNA, 26 bp, Artificial Sequence
  Synthetic
tgaatcagauaccagaggaucactua

SEQ ID NO: 36209 - DNA, 31 bp, Artificial Sequence
  Synthetic
tgatggaggcaguaaaatcaccaattataut

SEQ ID NO: 36210 - DNA, 26 bp, Artificial Sequence
  Synthetic
tggcacaaaaugttattgccattuct

SEQ ID NO: 36211 - DNA, 24 bp, Artificial Sequence
  Synthetic
agatcaaggccaaacgutcagaut

SEQ ID NO: 36212 - DNA, 24 bp, Artificial Sequence
  Synthetic
tgaaccaggaaaccutaggcttug

SEQ ID NO: 36213 - DNA, 30 bp, Artificial Sequence
  Synthetic
acttctgaaactugcacatttgtagattug

SEQ ID NO: 36214 - DNA, 27 bp, Artificial Sequence
  Synthetic
cagtgtattttcugctaagcaagtugt

SEQ ID NO: 36215 - DNA, 31 bp, Artificial Sequence
  Synthetic
aagacctggaagucaaagaagttacuaaaaa

SEQ ID NO: 36216 - DNA, 22 bp, Artificial Sequence
  Synthetic
ggctctcugataacaagugcct

SEQ ID NO: 36217 - DNA, 27 bp, Artificial Sequence
  Synthetic
ggctctccaaucaccaattatgtcaut

SEQ ID NO: 36218 - DNA, 28 bp, Artificial Sequence
  Synthetic
gaatgttgguttaaaaagtugcacagac

SEQ ID NO: 36219 - DNA, 25 bp, Artificial Sequence
  Synthetic
cgtcaccuggaacatgaaugaaaga

SEQ ID NO: 36220 - DNA, 24 bp, Artificial Sequence
  Synthetic
tcaggtgaaacuggaagcaatuga

SEQ ID NO: 36221 - DNA, 30 bp, Artificial Sequence
  Synthetic
aggattaaaggaaggaguautctacaaaut

SEQ ID NO: 36222 - DNA, 26 bp, Artificial Sequence
  Synthetic
attcatagtgcauttccttagugcca

SEQ ID NO: 36223 - DNA, 25 bp, Artificial Sequence
  Synthetic
actaacgtauactggctcttugcag

SEQ ID NO: 36224 - DNA, 24 bp, Artificial Sequence
  Synthetic
agcautgattgcatauacccggaa

SEQ ID NO: 36225 - DNA, 23 bp, Artificial Sequence
  Synthetic
ctccatgacugtcaacugggaag

SEQ ID NO: 36226 - DNA, 27 bp, Artificial Sequence
  Synthetic
tggctttgtaugtgaaaatgttcucct

SEQ ID NO: 36227 - DNA, 26 bp, Artificial Sequence
  Synthetic
aaagagaagcuaacaggaagacaugg

SEQ ID NO: 36228 - DNA, 29 bp, Artificial Sequence
  Synthetic
caagtaatttuaaccaaaccatgcaguct

SEQ ID NO: 36229 - DNA, 25 bp, Artificial Sequence
  Synthetic
agaaccugttctctaugacacccat

SEQ ID NO: 36230 - DNA, 28 bp, Artificial Sequence
  Synthetic
gaactatuattgaacaccuaggaaggca

SEQ ID NO: 36231 - DNA, 23 bp, Artificial Sequence
  Synthetic
gtgcaauaagcgtgatguggaag

SEQ ID NO: 36232 - DNA, 23 bp, Artificial Sequence
  Synthetic
gcttacataucggatctcuggca

SEQ ID NO: 36233 - DNA, 28 bp, Artificial Sequence
  Synthetic
agacaggaucaaaggctatgttatugag

SEQ ID NO: 36234 - DNA, 30 bp, Artificial Sequence
  Synthetic
gatgtaaatcacaauataagcaacgtucct

SEQ ID NO: 36235 - DNA, 21 bp, Artificial Sequence
  Synthetic
gtacagcuggagactgcugaa

SEQ ID NO: 36236 - DNA, 28 bp, Artificial Sequence
  Synthetic
tccatcctatuagaaaaggagacaguca

SEQ ID NO: 36237 - DNA, 22 bp, Artificial Sequence
  Synthetic
gattccugctgtcaucaaggga

SEQ ID NO: 36238 - DNA, 25 bp, Artificial Sequence
  Synthetic
cagtcagtaguaccttcttctugca

SEQ ID NO: 36239 - DNA, 25 bp, Artificial Sequence
  Synthetic
cagcacttcaucagcttcaaaauct

SEQ ID NO: 36240 - DNA, 22 bp, Artificial Sequence
  Synthetic
tttggttattggugctcggcua

SEQ ID NO: 36241 - DNA, 27 bp, Artificial Sequence
  Synthetic
ggaatcagtgaugagtgcaaaucagat

SEQ ID NO: 36242 - DNA, 31 bp, Artificial Sequence
  Synthetic
aggttauattaaaatggcaucaaaccagagt

SEQ ID NO: 36243 - DNA, 27 bp, Artificial Sequence
  Synthetic
tggcagtgaaaucacccattatgtuat

SEQ ID NO: 36244 - DNA, 23 bp, Artificial Sequence
  Synthetic
cggtcuggaaaggaaucaacaga

SEQ ID NO: 36245 - DNA, 22 bp, Artificial Sequence
  Synthetic
ccgaagugaggcaaaaacugag

SEQ ID NO: 36246 - DNA, 22 bp, Artificial Sequence
  Synthetic
cattggaaggccugtcacauct

SEQ ID NO: 36247 - DNA, 30 bp, Artificial Sequence
  Synthetic
tttaatgcatttuacagtgtgcctttaucc

SEQ ID NO: 36248 - DNA, 28 bp, Artificial Sequence
  Synthetic
caagatttucaaccagaaaagatguggt

SEQ ID NO: 36249 - DNA, 24 bp, Artificial Sequence
  Synthetic
tcattttcactugcctctggcuaa

SEQ ID NO: 36250 - DNA, 23 bp, Artificial Sequence
  Synthetic
cagccaaacutgttctuggcaat

SEQ ID NO: 36251 - DNA, 27 bp, Artificial Sequence
  Synthetic
acttaactggtcugatccagaagauga

SEQ ID NO: 36252 - DNA, 28 bp, Artificial Sequence
  Synthetic
gatagtatcactugggaaaatcctguga

SEQ ID NO: 36253 - DNA, 25 bp, Artificial Sequence
  Synthetic
cgtgttgtaauagacaacgtuggaa

SEQ ID NO: 36254 - DNA, 25 bp, Artificial Sequence
  Synthetic
tctgtugaaagagaacagtcaugca

SEQ ID NO: 36255 - DNA, 23 bp, Artificial Sequence
  Synthetic
ccgagagggugctgatuacaaac

SEQ ID NO: 36256 - DNA, 26 bp, Artificial Sequence
  Synthetic
gggttcccatuctagttcaatagtug

SEQ ID NO: 36257 - DNA, 30 bp, Artificial Sequence
  Synthetic
aatctguaagtagttcctuaagaagaaggt

SEQ ID NO: 36258 - DNA, 27 bp, Artificial Sequence
  Synthetic
ccaaaguacatgguaaaaaggcaaact

SEQ ID NO: 36259 - DNA, 24 bp, Artificial Sequence
  Synthetic
caaaacccgacucagaatggatug

SEQ ID NO: 36260 - DNA, 30 bp, Artificial Sequence
  Synthetic
tccattggaaagugtagttttaatgacuca

SEQ ID NO: 36261 - DNA, 24 bp, Artificial Sequence
  Synthetic
gagaaggaagggugaagtucaaga

SEQ ID NO: 36262 - DNA, 26 bp, Artificial Sequence
  Synthetic
gttgggtaaggugatccagaaauact

SEQ ID NO: 36263 - DNA, 24 bp, Artificial Sequence
  Synthetic
gagttgccacuttcccatttugaa

SEQ ID NO: 36264 - DNA, 22 bp, Artificial Sequence
  Synthetic
gtcaggattgguaccaggtgut

SEQ ID NO: 36265 - DNA, 30 bp, Artificial Sequence
  Synthetic
agaaggtggtttucctgatactaacattut

SEQ ID NO: 36266 - DNA, 27 bp, Artificial Sequence
  Synthetic
tggtatatatgttcucctcccagctuc

SEQ ID NO: 36267 - DNA, 28 bp, Artificial Sequence
  Synthetic
ccccactuagagacaagtgcattatuaa

SEQ ID NO: 36268 - DNA, 28 bp, Artificial Sequence
  Synthetic
tgcagagatgtgaucattcttcattgut

SEQ ID NO: 36269 - DNA, 29 bp, Artificial Sequence
  Synthetic
tgcattgcatttugacatactctgtttut

SEQ ID NO: 36270 - DNA, 24 bp, Artificial Sequence
  Synthetic
ccaatagcautgactgctcucact

SEQ ID NO: 36271 - DNA, 29 bp, Artificial Sequence
  Synthetic
cagagaaaaatgguggaagtcctatcaua

SEQ ID NO: 36272 - DNA, 22 bp, Artificial Sequence
  Synthetic
gugagggaggaccugagaaaag

SEQ ID NO: 36273 - DNA, 24 bp, Artificial Sequence
  Synthetic
gaaggaacagagguccagttucag

SEQ ID NO: 36274 - DNA, 28 bp, Artificial Sequence
  Synthetic
tgtcacaaagatuaagtgcaagagcaua

SEQ ID NO: 36275 - DNA, 24 bp, Artificial Sequence
  Synthetic
attguggaaaagagagacgucagg

SEQ ID NO: 36276 - DNA, 23 bp, Artificial Sequence
  Synthetic
tctcauatcgtagcucacaggca

SEQ ID NO: 36277 - DNA, 27 bp, Artificial Sequence
  Synthetic
ctcatggaaggauaggaauactcatuc

SEQ ID NO: 36278 - DNA, 30 bp, Artificial Sequence
  Synthetic
tcagcatttcaaugacataagactcaauct

SEQ ID NO: 36279 - DNA, 28 bp, Artificial Sequence
  Synthetic
tcatatgaactccuttttgacaaaccua

SEQ ID NO: 36280 - DNA, 25 bp, Artificial Sequence
  Synthetic
actgctgtcutaacatcttgauggg

SEQ ID NO: 36281 - DNA, 24 bp, Artificial Sequence
  Synthetic
ctaaagacgcagugactcucacat

SEQ ID NO: 36282 - DNA, 29 bp, Artificial Sequence
  Synthetic
aaatatgacaccaaaaugcaagttugaca

SEQ ID NO: 36283 - DNA, 23 bp, Artificial Sequence
  Synthetic
ctcatccaccgucaaggauacaa

SEQ ID NO: 36284 - DNA, 29 bp, Artificial Sequence
  Synthetic
tccccttttaaaaugagaaccttcctuac

SEQ ID NO: 36285 - DNA, 27 bp, Artificial Sequence
  Synthetic
cttggacaaaggcugatatgattcuga

SEQ ID NO: 36286 - DNA, 24 bp, Artificial Sequence
  Synthetic
agcagatttaaggucagaggccua

SEQ ID NO: 36287 - DNA, 29 bp, Artificial Sequence
  Synthetic
tcgacatcacaguaaaacatcctattcug

SEQ ID NO: 36288 - DNA, 29 bp, Artificial Sequence
  Synthetic
tcaactatataucctttgatgcgugaacc

SEQ ID NO: 36289 - DNA, 24 bp, Artificial Sequence
  Synthetic
tggcaatgugaagagaactgcaua

SEQ ID NO: 36290 - DNA, 28 bp, Artificial Sequence
  Synthetic
ccacatttgtuacgagcacaaacttuaa

SEQ ID NO: 36291 - DNA, 26 bp, Artificial Sequence
  Synthetic
ccctggtcauggtaaaaatctttugg

SEQ ID NO: 36292 - DNA, 22 bp, Artificial Sequence
  Synthetic
aaatgcacucacgagtcacugt

SEQ ID NO: 36293 - DNA, 24 bp, Artificial Sequence
  Synthetic
gggtgaaaaugaagaccttgtcug

SEQ ID NO: 36294 - DNA, 22 bp, Artificial Sequence
  Synthetic
cctgtugccccaaagtagcuat

SEQ ID NO: 36295 - DNA, 29 bp, Artificial Sequence
  Synthetic
tggatcatggacauaactgtatgtgttut

SEQ ID NO: 36296 - DNA, 26 bp, Artificial Sequence
  Synthetic
tcttcgcaucgctcaattatauagcc

SEQ ID NO: 36297 - DNA, 27 bp, Artificial Sequence
  Synthetic
actaacgtaaatgguatgctccaacuc

SEQ ID NO: 36298 - DNA, 22 bp, Artificial Sequence
  Synthetic
acagtugcagacaggtctucag

SEQ ID NO: 36299 - DNA, 30 bp, Artificial Sequence
  Synthetic
tcatattttcttcutctgtggtgaaaucca

SEQ ID NO: 36300 - DNA, 22 bp, Artificial Sequence
  Synthetic
ccagtgccaacuctgtttctug

SEQ ID NO: 36301 - DNA, 26 bp, Artificial Sequence
  Synthetic
ggtggaagcaaaaucataggtuacgt

SEQ ID NO: 36302 - DNA, 25 bp, Artificial Sequence
  Synthetic
tgctgtctugcttttaaattgugct

SEQ ID NO: 36303 - DNA, 26 bp, Artificial Sequence
  Synthetic
cggctgaacaaacutctttcagaaut

SEQ ID NO: 36304 - DNA, 31 bp, Artificial Sequence
  Synthetic
ctgaaatctaaacuctgtgatatuggaagga

SEQ ID NO: 36305 - DNA, 28 bp, Artificial Sequence
  Synthetic
tccaatggcuaagaaataacatggtugt

SEQ ID NO: 36306 - DNA, 32 bp, Artificial Sequence
  Synthetic
cttaatatgtaccutccacaaaaagtcuagca

SEQ ID NO: 36307 - DNA, 27 bp, Artificial Sequence
  Synthetic
tgcaagctaacugataatccaatguct

SEQ ID NO: 36308 - DNA, 22 bp, Artificial Sequence
  Synthetic
agaagacagcgucatcgaacuc

SEQ ID NO: 36309 - DNA, 30 bp, Artificial Sequence
  Synthetic
gttgataaguacaaguacatgttaaccaut

SEQ ID NO: 36310 - DNA, 26 bp, Artificial Sequence
  Synthetic
aggtctucctctgttguaaaggagaa

SEQ ID NO: 36311 - DNA, 28 bp, Artificial Sequence
  Synthetic
gccaactataatgugtctttgaccaauc

SEQ ID NO: 36312 - DNA, 27 bp, Artificial Sequence
  Synthetic
acccuaaaagcaagaacaaactuacca

SEQ ID NO: 36313 - DNA, 31 bp, Artificial Sequence
  Synthetic
ggatgataagacacutgaatctggagauaaa

SEQ ID NO: 36314 - DNA, 31 bp, Artificial Sequence
  Synthetic
cactgtagtttucataccatgtacttugact

SEQ ID NO: 36315 - DNA, 25 bp, Artificial Sequence
  Synthetic
gcgcagaagugatttggtauaaagg

SEQ ID NO: 36316 - DNA, 27 bp, Artificial Sequence
  Synthetic
caaaaaccacautgagttaagcuggaa

SEQ ID NO: 36317 - DNA, 29 bp, Artificial Sequence
  Synthetic
ttcttgtcaucaacaaatgtctacuggat

SEQ ID NO: 36318 - DNA, 28 bp, Artificial Sequence
  Synthetic
tgacagtacaagaugacaggtauacagt

SEQ ID NO: 36319 - DNA, 30 bp, Artificial Sequence
  Synthetic
atgtcagagtaaatutccagaaacctcaut

SEQ ID NO: 36320 - DNA, 29 bp, Artificial Sequence
  Synthetic
cagtcatgtauaacaagttttcugaccct

SEQ ID NO: 36321 - DNA, 28 bp, Artificial Sequence
  Synthetic
gagtaccttggcuaatgagtatgatuct

SEQ ID NO: 36322 - DNA, 23 bp, Artificial Sequence
  Synthetic
aagtgaagguggaagaacuccag

SEQ ID NO: 36323 - DNA, 23 bp, Artificial Sequence
  Synthetic
aaagctgttucttccctcucgaa

SEQ ID NO: 36324 - DNA, 22 bp, Artificial Sequence
  Synthetic
cuagaaaagugaagggccagca

SEQ ID NO: 36325 - DNA, 24 bp, Artificial Sequence
  Synthetic
gctgttatuaaggcagauggcaag

SEQ ID NO: 36326 - DNA, 29 bp, Artificial Sequence
  Synthetic
aaauttaaaaagcactuaccaagcacagt

SEQ ID NO: 36327 - DNA, 21 bp, Artificial Sequence
  Synthetic
ttcaagaaugaccagcgccua

SEQ ID NO: 36328 - DNA, 29 bp, Artificial Sequence
  Synthetic
actatttacctucaatgatcagttugcca

SEQ ID NO: 36329 - DNA, 25 bp, Artificial Sequence
  Synthetic
gcuaaaaggaacccaggaaaucaca

SEQ ID NO: 36330 - DNA, 22 bp, Artificial Sequence
  Synthetic
gggtgtaucaggaagtctugca

SEQ ID NO: 36331 - DNA, 24 bp, Artificial Sequence
  Synthetic
ccttcuaaccctcacuccaaacag

SEQ ID NO: 36332 - DNA, 29 bp, Artificial Sequence
  Synthetic
ttttattagucgagctgaaatgauacagt

SEQ ID NO: 36333 - DNA, 23 bp, Artificial Sequence
  Synthetic
tgcgccgcaucttaaaaaucaaa

SEQ ID NO: 36334 - DNA, 22 bp, Artificial Sequence
  Synthetic
ccccacucccatgatucagaaa

SEQ ID NO: 36335 - DNA, 23 bp, Artificial Sequence
  Synthetic
tcauctcttcugagggcaagact

SEQ ID NO: 36336 - DNA, 25 bp, Artificial Sequence
  Synthetic
tgggatgucacagatctcatuagct

SEQ ID NO: 36337 - DNA, 27 bp, Artificial Sequence
  Synthetic
agaggcaaaugttatatgguccaaagg

SEQ ID NO: 36338 - DNA, 29 bp, Artificial Sequence
  Synthetic
aaaatcagacatuaagaatgaggctttuc

SEQ ID NO: 36339 - DNA, 22 bp, Artificial Sequence
  Synthetic
gcacaaagucaaacuggaccaa

SEQ ID NO: 36340 - DNA, 29 bp, Artificial Sequence
  Synthetic
ctccattattatuaaagcaacccgaauct

SEQ ID NO: 36341 - DNA, 24 bp, Artificial Sequence
  Synthetic
tttgaugcagaaatcucagaggca

SEQ ID NO: 36342 - DNA, 25 bp, Artificial Sequence
  Synthetic
ccaacgatgcuttgcttttatgugt

SEQ ID NO: 36343 - DNA, 29 bp, Artificial Sequence
  Synthetic
gagagatggaaaucatctgtaccucaaaa

SEQ ID NO: 36344 - DNA, 27 bp, Artificial Sequence
  Synthetic
gaacgaaatcucccaggaaagtacuaa

SEQ ID NO: 36345 - DNA, 24 bp, Artificial Sequence
  Synthetic
gagttaaacaaagagcgugacgug

SEQ ID NO: 36346 - DNA, 26 bp, Artificial Sequence
  Synthetic
caatgcaagtugctactaaggttugt

SEQ ID NO: 36347 - DNA, 26 bp, Artificial Sequence
  Synthetic
gaaagctgcacaucattgatgtucaa

SEQ ID NO: 36348 - DNA, 23 bp, Artificial Sequence
  Synthetic
cugaagagucaacgaactcugat

SEQ ID NO: 36349 - DNA, 29 bp, Artificial Sequence
  Synthetic
tcctaaggagaugccaaatcaacttttua

SEQ ID NO: 36350 - DNA, 27 bp, Artificial Sequence
  Synthetic
gcagcauaaacagggcttgaatttuaa

SEQ ID NO: 36351 - DNA, 28 bp, Artificial Sequence
  Synthetic
cactaatgcaauggacttctctcuacag

SEQ ID NO: 36352 - DNA, 28 bp, Artificial Sequence
  Synthetic
ttaaggtcatgugttcaaatcttgaugt

SEQ ID NO: 36353 - DNA, 25 bp, Artificial Sequence
  Synthetic
caaaacctgutgaagaggtugaagt

SEQ ID NO: 36354 - DNA, 27 bp, Artificial Sequence
  Synthetic
acaaattgtcacugagattcctaccug

SEQ ID NO: 36355 - DNA, 29 bp, Artificial Sequence
  Synthetic
ttgcatttgtcaagcutattcaacatcut

SEQ ID NO: 36356 - DNA, 23 bp, Artificial Sequence
  Synthetic
cagaacautcgauggaggcagaa

SEQ ID NO: 36357 - DNA, 29 bp, Artificial Sequence
  Synthetic
ggagtagaaagutaatcacttgctucaga

SEQ ID NO: 36358 - DNA, 27 bp, Artificial Sequence
  Synthetic
caacacaacacacaauaagaagagugt

SEQ ID NO: 36359 - DNA, 31 bp, Artificial Sequence
  Synthetic
agaaattcctatuattcaagtgccugaagag

SEQ ID NO: 36360 - DNA, 31 bp, Artificial Sequence
  Synthetic
acaaagcttaaatuagaaatagtcgcaagug

SEQ ID NO: 36361 - DNA, 28 bp, Artificial Sequence
  Synthetic
gcaaaatgtgaagucgatgtggtauaaa

SEQ ID NO: 36362 - DNA, 28 bp, Artificial Sequence
  Synthetic
caatcaccaguaaacattcatcacatut

SEQ ID NO: 36363 - DNA, 31 bp, Artificial Sequence
  Synthetic
tcattgaaaccaugagcttaaacaactacua

SEQ ID NO: 36364 - DNA, 24 bp, Artificial Sequence
  Synthetic
aaaagcucagagcacccagaatua

SEQ ID NO: 36365 - DNA, 25 bp, Artificial Sequence
  Synthetic
tgagctcatguctttaaagtgtucg

SEQ ID NO: 36366 - DNA, 27 bp, Artificial Sequence
  Synthetic
caaacaataucaaacacagcaccauga

SEQ ID NO: 36367 - DNA, 26 bp, Artificial Sequence
  Synthetic
gatcaaacucttctgctcuggaaagt

SEQ ID NO: 36368 - DNA, 22 bp, Artificial Sequence
  Synthetic
gagaucggcggacacttctaug

SEQ ID NO: 36369 - DNA, 31 bp, Artificial Sequence
  Synthetic
catccatcatuttcaccttttcuaaacacaa

SEQ ID NO: 36370 - DNA, 26 bp, Artificial Sequence
  Synthetic
gaaaagccagtuacctttagttggug

SEQ ID NO: 36371 - DNA, 24 bp, Artificial Sequence
  Synthetic
attgttgctgugttctgttctgug

SEQ ID NO: 36372 - DNA, 26 bp, Artificial Sequence
  Synthetic
gggtttctaaucttccaaacugaaca

SEQ ID NO: 36373 - DNA, 30 bp, Artificial Sequence
  Synthetic
gttgaagaagaauacagagutgaaaaagut

SEQ ID NO: 36374 - DNA, 25 bp, Artificial Sequence
  Synthetic
tgcatgcaacaauacacgaaaaucc

SEQ ID NO: 36375 - DNA, 24 bp, Artificial Sequence
  Synthetic
ctatgaaagcutgctcucgacagt

SEQ ID NO: 36376 - DNA, 29 bp, Artificial Sequence
  Synthetic
cgatataagaaaagcauactggtgaauct

SEQ ID NO: 36377 - DNA, 24 bp, Artificial Sequence
  Synthetic
gagccugaagaagagcctattuca

SEQ ID NO: 36378 - DNA, 28 bp, Artificial Sequence
  Synthetic
cttttauaggagaaggaaggaaauggca

SEQ ID NO: 36379 - DNA, 25 bp, Artificial Sequence
  Synthetic
tgttaacacautggtctttcugggt

SEQ ID NO: 36380 - DNA, 26 bp, Artificial Sequence
  Synthetic
caggtacaaautcttcttccucaggt

SEQ ID NO: 36381 - DNA, 28 bp, Artificial Sequence
  Synthetic
aagaagaaautgttccugaagaggaagt

SEQ ID NO: 36382 - DNA, 24 bp, Artificial Sequence
  Synthetic
cuaaagagttgcaucccaaagagt

SEQ ID NO: 36383 - DNA, 21 bp, Artificial Sequence
  Synthetic
gaagugcccaagaaacctgug

SEQ ID NO: 36384 - DNA, 24 bp, Artificial Sequence
  Synthetic
gaaagatcugctatggcucaccaa

SEQ ID NO: 36385 - DNA, 30 bp, Artificial Sequence
  Synthetic
agctgtgttttauatggatgtgttgtuact

SEQ ID NO: 36386 - DNA, 22 bp, Artificial Sequence
  Synthetic
ccttugcaggaggcatcatcua

SEQ ID NO: 36387 - DNA, 31 bp, Artificial Sequence
  Synthetic
gtcattggcaaaugtccaacttaaagauaat

SEQ ID NO: 36388 - DNA, 27 bp, Artificial Sequence
  Synthetic
agaaaagaucacaaucgaggaaggaaa

SEQ ID NO: 36389 - DNA, 28 bp, Artificial Sequence
  Synthetic
gttcttgtccugattcttacattucagt

SEQ ID NO: 36390 - DNA, 26 bp, Artificial Sequence
  Synthetic
acagacauggaggaaacaaagatcuc

SEQ ID NO: 36391 - DNA, 32 bp, Artificial Sequence
  Synthetic
aagtctaacatgaaauaccttgtatgtactut

SEQ ID NO: 36392 - DNA, 27 bp, Artificial Sequence
  Synthetic
cctcatattcttcutcccgttgtacug

SEQ ID NO: 36393 - DNA, 31 bp, Artificial Sequence
  Synthetic
cgcaaaagaataaaaucaaagcacattgtua

SEQ ID NO: 36394 - DNA, 26 bp, Artificial Sequence
  Synthetic
agtcagtataccuttagctggtggut

SEQ ID NO: 36395 - DNA, 26 bp, Artificial Sequence
  Synthetic
gctactactttauggctgccttttug

SEQ ID NO: 36396 - DNA, 26 bp, Artificial Sequence
  Synthetic
acccaccaacauataaacagtaugac

SEQ ID NO: 36397 - DNA, 30 bp, Artificial Sequence
  Synthetic
tgtttgatggtatugcctggtatctttuaa

SEQ ID NO: 36398 - DNA, 28 bp, Artificial Sequence
  Synthetic
cataagacagutatgcaaatgugaaggt

SEQ ID NO: 36399 - DNA, 31 bp, Artificial Sequence
  Synthetic
tuttataatcttttcaagugacagagaggca

SEQ ID NO: 36400 - DNA, 25 bp, Artificial Sequence
  Synthetic
cttugaggaaauacacacaaacuca

SEQ ID NO: 36401 - DNA, 28 bp, Artificial Sequence
  Synthetic
ctcttccccaaautctagaaagugagaa

SEQ ID NO: 36402 - DNA, 23 bp, Artificial Sequence
  Synthetic
agaaatacacccacagugcacuc

SEQ ID NO: 36403 - DNA, 27 bp, Artificial Sequence
  Synthetic
tgctcatttauttggccttttugacaa

SEQ ID NO: 36404 - DNA, 22 bp, Artificial Sequence
  Synthetic
gctttacgucgaaagccacugt

SEQ ID NO: 36405 - DNA, 28 bp, Artificial Sequence
  Synthetic
gcatgtgccuatgttctttcauaaaagt

SEQ ID NO: 36406 - DNA, 26 bp, Artificial Sequence
  Synthetic
acaacaagagggauaaaaatcugcct

SEQ ID NO: 36407 - DNA, 29 bp, Artificial Sequence
  Synthetic
ccatgtgtttgauctgatgtcttgtacua

SEQ ID NO: 36408 - DNA, 22 bp, Artificial Sequence
  Synthetic
cttgtgtacaugggtgcuagga

SEQ ID NO: 36409 - DNA, 31 bp, Artificial Sequence
  Synthetic
acatauauacagagagagagagauagagaga

SEQ ID NO: 36410 - DNA, 28 bp, Artificial Sequence
  Synthetic
atttcacataaacugcaaatcaggtuca

SEQ ID NO: 36411 - DNA, 27 bp, Artificial Sequence
  Synthetic
aagaagggcaagaauactaugaaaggg

SEQ ID NO: 36412 - DNA, 27 bp, Artificial Sequence
  Synthetic
agttcgtcauaaggttctucgaaagat

SEQ ID NO: 36413 - DNA, 29 bp, Artificial Sequence
  Synthetic
tttagtgaagcagutggatggatagaaut

SEQ ID NO: 36414 - DNA, 22 bp, Artificial Sequence
  Synthetic
cttccttcacccuccactgtut

SEQ ID NO: 36415 - DNA, 30 bp, Artificial Sequence
  Synthetic
cctgaaagcautttagttactuacaccaga

SEQ ID NO: 36416 - DNA, 24 bp, Artificial Sequence
  Synthetic
acgttttgguggtggtttctttuc

SEQ ID NO: 36417 - DNA, 29 bp, Artificial Sequence
  Synthetic
tgaagtactgaaagaaaugcatgagacut

SEQ ID NO: 36418 - DNA, 32 bp, Artificial Sequence
  Synthetic
agatatcttatacatuttagtttggcttcugt

SEQ ID NO: 36419 - DNA, 25 bp, Artificial Sequence
  Synthetic
acgtagccuacctataccattcuga

SEQ ID NO: 36420 - DNA, 25 bp, Artificial Sequence
  Synthetic
gatagaatgagagcaugagcgcaua

SEQ ID NO: 36421 - DNA, 25 bp, Artificial Sequence
  Synthetic
cagaacugacagagagccagaaaua

SEQ ID NO: 36422 - DNA, 24 bp, Artificial Sequence
  Synthetic
cactttggtgugtgtctacaggua

SEQ ID NO: 36423 - DNA, 27 bp, Artificial Sequence
  Synthetic
acacaaagtccauaaattgaccatugc

SEQ ID NO: 36424 - DNA, 23 bp, Artificial Sequence
  Synthetic
acgcagatgugctcaacaguaat

SEQ ID NO: 36425 - DNA, 26 bp, Artificial Sequence
  Synthetic
aactgaaaaacuggaacccagtgaua

SEQ ID NO: 36426 - DNA, 26 bp, Artificial Sequence
  Synthetic
ctttttacctcugtctgtgacaguct

SEQ ID NO: 36427 - DNA, 28 bp, Artificial Sequence
  Synthetic
gctgaatatagucatgcgtcctcuaaat

SEQ ID NO: 36428 - DNA, 24 bp, Artificial Sequence
  Synthetic
tttgcttgagcagutcaaatgcut

SEQ ID NO: 36429 - DNA, 29 bp, Artificial Sequence
  Synthetic
agtagaagacaggugttttatccttacut

SEQ ID NO: 36430 - DNA, 22 bp, Artificial Sequence
  Synthetic
caugttcgttaaaugccacgca

SEQ ID NO: 36431 - DNA, 28 bp, Artificial Sequence
  Synthetic
tttcattattccutagaaaccacugcga

SEQ ID NO: 36432 - DNA, 22 bp, Artificial Sequence
  Synthetic
tgctggctugagctgcataaua

SEQ ID NO: 36433 - DNA, 24 bp, Artificial Sequence
  Synthetic
cagggaaauaaagcctucagacag

SEQ ID NO: 36434 - DNA, 30 bp, Artificial Sequence
  Synthetic
tggtcaagatatcauaagaaatgctcaugg

SEQ ID NO: 36435 - DNA, 21 bp, Artificial Sequence
  Synthetic
catgaacgacgcuggtttgua

SEQ ID NO: 36436 - DNA, 27 bp, Artificial Sequence
  Synthetic
ttttgtaucaggcaacagutataggut

SEQ ID NO: 36437 - DNA, 30 bp, Artificial Sequence
  Synthetic
agcttcatattaguaatctgcttctagcut

SEQ ID NO: 36438 - DNA, 23 bp, Artificial Sequence
  Synthetic
gggcgctgutttccagataacua

SEQ ID NO: 36439 - DNA, 29 bp, Artificial Sequence
  Synthetic
ctgaaaccttgtcuttctgctctactaut

SEQ ID NO: 36440 - DNA, 25 bp, Artificial Sequence
  Synthetic
caaggcuccggtcagtttuaaaaat

SEQ ID NO: 36441 - DNA, 26 bp, Artificial Sequence
  Synthetic
tctgttccuacagagcaaaaactucc

SEQ ID NO: 36442 - DNA, 29 bp, Artificial Sequence
  Synthetic
tgaaaaccagtguagcaacattattccua

SEQ ID NO: 36443 - DNA, 24 bp, Artificial Sequence
  Synthetic
gcatgtctccutcatgactgatug

SEQ ID NO: 36444 - DNA, 26 bp, Artificial Sequence
  Synthetic
caggaatctttuccagaggcatttuc

SEQ ID NO: 36445 - DNA, 22 bp, Artificial Sequence
  Synthetic
acattcacuggaactccuccca

SEQ ID NO: 36446 - DNA, 29 bp, Artificial Sequence
  Synthetic
tcgtataaatcuagaagagcagtcugaca

SEQ ID NO: 36447 - DNA, 23 bp, Artificial Sequence
  Synthetic
agcagtgaacuagtaccagguga

SEQ ID NO: 36448 - DNA, 29 bp, Artificial Sequence
  Synthetic
tttactgttttguaaactgacctcucaca

SEQ ID NO: 36449 - DNA, 23 bp, Artificial Sequence
  Synthetic
tctatgggucacctccaatcuct

SEQ ID NO: 36450 - DNA, 26 bp, Artificial Sequence
  Synthetic
tgaugaaggaaaaguccaagaaauca

SEQ ID NO: 36451 - DNA, 29 bp, Artificial Sequence
  Synthetic
ctgaactcaguactaagtggttuaaggat

SEQ ID NO: 36452 - DNA, 22 bp, Artificial Sequence
  Synthetic
tggtgagtgugtgccttgtauc

SEQ ID NO: 36453 - DNA, 26 bp, Artificial Sequence
  Synthetic
ggtguggttcaaagauaagggagaaa

SEQ ID NO: 36454 - DNA, 27 bp, Artificial Sequence
  Synthetic
gggcaacagaguattacaatuagaagg

SEQ ID NO: 36455 - DNA, 28 bp, Artificial Sequence
  Synthetic
ggcaagaaguacaagataatgtcugaga

SEQ ID NO: 36456 - DNA, 27 bp, Artificial Sequence
  Synthetic
gaggacaatuaaagaggaggctaaugt

SEQ ID NO: 36457 - DNA, 30 bp, Artificial Sequence
  Synthetic
cgagactgaaatucaagagagcagtaaaut

SEQ ID NO: 36458 - DNA, 22 bp, Artificial Sequence
  Synthetic
agcacacccacccucctataut

SEQ ID NO: 36459 - DNA, 26 bp, Artificial Sequence
  Synthetic
ggcaactacaagaugactttgguaga

SEQ ID NO: 36460 - DNA, 24 bp, Artificial Sequence
  Synthetic
gcagtgaagcugctttacaaugaa

SEQ ID NO: 36461 - DNA, 23 bp, Artificial Sequence
  Synthetic
aagtgtctuggtacaaggauggg

SEQ ID NO: 36462 - DNA, 28 bp, Artificial Sequence
  Synthetic
gaaaatgaatctgutcacacacacuagg

SEQ ID NO: 36463 - DNA, 26 bp, Artificial Sequence
  Synthetic
gctacgatcagcucctgcatauaaaa

SEQ ID NO: 36464 - DNA, 22 bp, Artificial Sequence
  Synthetic
agcaagtcagucatgccatgua

SEQ ID NO: 36465 - DNA, 31 bp, Artificial Sequence
  Synthetic
ctgagagaugcagtattactaugacagaaaa

SEQ ID NO: 36466 - DNA, 27 bp, Artificial Sequence
  Synthetic
ggttctauaaggagaaaacatgugggt

SEQ ID NO: 36467 - DNA, 26 bp, Artificial Sequence
  Synthetic
ggaagatttugtcacagaacuggagt

SEQ ID NO: 36468 - DNA, 24 bp, Artificial Sequence
  Synthetic
cacgtccacaugaaagaggtgtua

SEQ ID NO: 36469 - DNA, 22 bp, Artificial Sequence
  Synthetic
tccagctttucggaaaacguct

SEQ ID NO: 36470 - DNA, 21 bp, Artificial Sequence
  Synthetic
ccctccacccccuggaaauat

SEQ ID NO: 36471 - DNA, 28 bp, Artificial Sequence
  Synthetic
tggttcaaagauggaagagaattgtcug

SEQ ID NO: 36472 - DNA, 21 bp, Artificial Sequence
  Synthetic
tctctggcugtgctttgcuac

SEQ ID NO: 36473 - DNA, 25 bp, Artificial Sequence
  Synthetic
tggctgaaagauagaggtgaaguca

SEQ ID NO: 36474 - DNA, 25 bp, Artificial Sequence
  Synthetic
aaaaaugtgagaatcauggccacac

SEQ ID NO: 36475 - DNA, 25 bp, Artificial Sequence
  Synthetic
ccttaatctugaagcctccgatguc

SEQ ID NO: 36476 - DNA, 26 bp, Artificial Sequence
  Synthetic
acattggagaaucacatcagaaccut

SEQ ID NO: 36477 - DNA, 28 bp, Artificial Sequence
  Synthetic
tcatatgaucacaccagtcactctucaa

SEQ ID NO: 36478 - DNA, 26 bp, Artificial Sequence
  Synthetic
tgatcgtaagcaaugccacagaatua

SEQ ID NO: 36479 - DNA, 28 bp, Artificial Sequence
  Synthetic
ccttactgacugttttgtttggttuact

SEQ ID NO: 36480 - DNA, 27 bp, Artificial Sequence
  Synthetic
agaattctcaaaugaggagtgttuccc

SEQ ID NO: 36481 - DNA, 24 bp, Artificial Sequence
  Synthetic
cattgccttucttctcatccucca

SEQ ID NO: 36482 - DNA, 29 bp, Artificial Sequence
  Synthetic
tcatcgtctctuaaaagtactccatcuct

SEQ ID NO: 36483 - DNA, 28 bp, Artificial Sequence
  Synthetic
gaacttctcauttcatctccuaacacct

SEQ ID NO: 36484 - DNA, 29 bp, Artificial Sequence
  Synthetic
cagttcctatacuattttctgcttugcat

SEQ ID NO: 36485 - DNA, 24 bp, Artificial Sequence
  Synthetic
ctgggacaccagaaautacagugt

SEQ ID NO: 36486 - DNA, 22 bp, Artificial Sequence
  Synthetic
gaaaggcucacagtuagcaact

SEQ ID NO: 36487 - DNA, 21 bp, Artificial Sequence
  Synthetic
gggcagtatucctgcgagaut

SEQ ID NO: 36488 - DNA, 28 bp, Artificial Sequence
  Synthetic
gttaaaaccaucctttttccaagugaca

SEQ ID NO: 36489 - DNA, 28 bp, Artificial Sequence
  Synthetic
ccttgtgttttucttgtgtttaacugct

SEQ ID NO: 36490 - DNA, 22 bp, Artificial Sequence
  Synthetic
ccagttcugccacagtgtctuc

SEQ ID NO: 36491 - DNA, 31 bp, Artificial Sequence
  Synthetic
gcttacaggatcutttaattgttctccaugt

SEQ ID NO: 36492 - DNA, 24 bp, Artificial Sequence
  Synthetic
agaattcaacugcaatgugcagac

SEQ ID NO: 36493 - DNA, 25 bp, Artificial Sequence
  Synthetic
tgagtctcutacctttccucacaca

SEQ ID NO: 36494 - DNA, 25 bp, Artificial Sequence
  Synthetic
agctaaatttgugtttttggcugct

SEQ ID NO: 36495 - DNA, 28 bp, Artificial Sequence
  Synthetic
agactttgacagauggatatcacgttut

SEQ ID NO: 36496 - DNA, 31 bp, Artificial Sequence
  Synthetic
atcctgatgtttucactttctctaatcacut

SEQ ID NO: 36497 - DNA, 28 bp, Artificial Sequence
  Synthetic
acaatttccatccaucttttcctgtuca

SEQ ID NO: 36498 - DNA, 28 bp, Artificial Sequence
  Synthetic
acattgagaatgugaatacttgtgugga

SEQ ID NO: 36499 - DNA, 28 bp, Artificial Sequence
  Synthetic
agtagcccaatucatgagaaattctugt

SEQ ID NO: 36500 - DNA, 21 bp, Artificial Sequence
  Synthetic
gtatgacggccacugagucaa

SEQ ID NO: 36501 - DNA, 29 bp, Artificial Sequence
  Synthetic
tgatactctcctcuttcctgactcttuag

SEQ ID NO: 36502 - DNA, 20 bp, Artificial Sequence
  Synthetic
gucgaccctuccaagccaat

SEQ ID NO: 36503 - DNA, 31 bp, Artificial Sequence
  Synthetic
tgtcacaataatucaactgcaagcaattuaa

SEQ ID NO: 36504 - DNA, 29 bp, Artificial Sequence
  Synthetic
tccagautattaactuccagagacacaga

SEQ ID NO: 36505 - DNA, 23 bp, Artificial Sequence
  Synthetic
gttttgcugtttgcatuggacag

SEQ ID NO: 36506 - DNA, 23 bp, Artificial Sequence
  Synthetic
gcttccgaagucatttuccacct

SEQ ID NO: 36507 - DNA, 23 bp, Artificial Sequence
  Synthetic
catgacctuggaatgtgttgugg

SEQ ID NO: 36508 - DNA, 27 bp, Artificial Sequence
  Synthetic
ctgctaatgaaacugtcgctauagact

SEQ ID NO: 36509 - DNA, 29 bp, Artificial Sequence
  Synthetic
tgtctatatttcatutgtggacagtgugg

SEQ ID NO: 36510 - DNA, 31 bp, Artificial Sequence
  Synthetic
cagaatttttatttgauaggctgcttctugt

SEQ ID NO: 36511 - DNA, 24 bp, Artificial Sequence
  Synthetic
cgtttgaagucacttggcugaaga

SEQ ID NO: 36512 - DNA, 23 bp, Artificial Sequence
  Synthetic
cucaagggaagaucccaaactua

SEQ ID NO: 36513 - DNA, 26 bp, Artificial Sequence
  Synthetic
gggaatgaaauaacagccatucagaa

SEQ ID NO: 36514 - DNA, 29 bp, Artificial Sequence
  Synthetic
caagaaaatcuagacaagcaagaaaguga

SEQ ID NO: 36515 - DNA, 25 bp, Artificial Sequence
  Synthetic
aacaaagagutacacucaggagcag

SEQ ID NO: 36516 - DNA, 31 bp, Artificial Sequence
  Synthetic
cttgataaguggaaataaaattugccaacct

SEQ ID NO: 36517 - DNA, 22 bp, Artificial Sequence
  Synthetic
cccataagcauccagtggtuca

SEQ ID NO: 36518 - DNA, 24 bp, Artificial Sequence
  Synthetic
cccaaucctctctguagaagaaca

SEQ ID NO: 36519 - DNA, 27 bp, Artificial Sequence
  Synthetic
gactaaggagatuacagccaaatggut

SEQ ID NO: 36520 - DNA, 21 bp, Artificial Sequence
  Synthetic
ccaaggcaaacgutcugaacc

SEQ ID NO: 36521 - DNA, 24 bp, Artificial Sequence
  Synthetic
gccaattacggugacttggcuaaa

SEQ ID NO: 36522 - DNA, 22 bp, Artificial Sequence
  Synthetic
cttcagaaaagccagucccuca

SEQ ID NO: 36523 - DNA, 28 bp, Artificial Sequence
  Synthetic
ctgcgaagtgguagaaagtataagacut

SEQ ID NO: 36524 - DNA, 22 bp, Artificial Sequence
  Synthetic
ggccauaacttuggcaacacaa

SEQ ID NO: 36525 - DNA, 29 bp, Artificial Sequence
  Synthetic
tgauagagaaatuaaggagagcagcaaac

SEQ ID NO: 36526 - DNA, 26 bp, Artificial Sequence
  Synthetic
acaaggtuagcacaaagatgucaaga

SEQ ID NO: 36527 - DNA, 22 bp, Artificial Sequence
  Synthetic
caacaaagagcuggtttcuggt

SEQ ID NO: 36528 - DNA, 24 bp, Artificial Sequence
  Synthetic
gataaaaugcaaagtcuccagcca

SEQ ID NO: 36529 - DNA, 28 bp, Artificial Sequence
  Synthetic
aaagaaatagcugcttctgacagauaca

SEQ ID NO: 36530 - DNA, 26 bp, Artificial Sequence
  Synthetic
gttgggttucaaatgcatatguagca

SEQ ID NO: 36531 - DNA, 23 bp, Artificial Sequence
  Synthetic
gtacaaagaugggagaccctugg

SEQ ID NO: 36532 - DNA, 29 bp, Artificial Sequence
  Synthetic
gcaatttgagguttaaatgttccuacaca

SEQ ID NO: 36533 - DNA, 27 bp, Artificial Sequence
  Synthetic
ggtcaucagagaagacggaaaaaucaa

SEQ ID NO: 36534 - DNA, 28 bp, Artificial Sequence
  Synthetic
gataggauaagagaagaaaguaccagut

SEQ ID NO: 36535 - DNA, 27 bp, Artificial Sequence
  Synthetic
tgttggtgaataugaatgtgttgtugc

SEQ ID NO: 36536 - DNA, 26 bp, Artificial Sequence
  Synthetic
gaaccagcuaatttcaaatgguccag

SEQ ID NO: 36537 - DNA, 25 bp, Artificial Sequence
  Synthetic
ggtttgtttacugagtttccaucca

SEQ ID NO: 36538 - DNA, 22 bp, Artificial Sequence
  Synthetic
ggatcacaggugagccttucag

SEQ ID NO: 36539 - DNA, 24 bp, Artificial Sequence
  Synthetic
ttatgtgtgtugggtctctttgut

SEQ ID NO: 36540 - DNA, 30 bp, Artificial Sequence
  Synthetic
ccaaaggaatcucaagtgttgctatttuat

SEQ ID NO: 36541 - DNA, 25 bp, Artificial Sequence
  Synthetic
gccaagcagagutgatcatcatuga

SEQ ID NO: 36542 - DNA, 22 bp, Artificial Sequence
  Synthetic
agagtgcagcaccauctttcug

SEQ ID NO: 36543 - DNA, 29 bp, Artificial Sequence
  Synthetic
gacttaactcaucttttctctgtctugga

SEQ ID NO: 36544 - DNA, 22 bp, Artificial Sequence
  Synthetic
cacctgggutctcaggattuca

SEQ ID NO: 36545 - DNA, 26 bp, Artificial Sequence
  Synthetic
ttaatggactcuacttcccttugcag

SEQ ID NO: 36546 - DNA, 23 bp, Artificial Sequence
  Synthetic
ggcctcacagacauactctccut

SEQ ID NO: 36547 - DNA, 23 bp, Artificial Sequence
  Synthetic
ggatggccccaugatacauacac

SEQ ID NO: 36548 - DNA, 22 bp, Artificial Sequence
  Synthetic
gctgaagcaaccccuttaguga

SEQ ID NO: 36549 - DNA, 24 bp, Artificial Sequence
  Synthetic
cctaacagcugagggtccuagaat

SEQ ID NO: 36550 - DNA, 22 bp, Artificial Sequence
  Synthetic
acatgatgtguctgggctctug

SEQ ID NO: 36551 - DNA, 25 bp, Artificial Sequence
  Synthetic
ggcaataaagaaagugcaggaggua

SEQ ID NO: 36552 - DNA, 22 bp, Artificial Sequence
  Synthetic
cutcctcaattcugaccgcaga

SEQ ID NO: 36553 - DNA, 21 bp, Artificial Sequence
  Synthetic
cacaaagugcgctcatctuga

SEQ ID NO: 36554 - DNA, 26 bp, Artificial Sequence
  Synthetic
tggaggttcuattgaagactguggat

SEQ ID NO: 36555 - DNA, 24 bp, Artificial Sequence
  Synthetic
ccaacctacagcugcagattguac

SEQ ID NO: 36556 - DNA, 26 bp, Artificial Sequence
  Synthetic
ctgctcaatucattggcttuagcaat

SEQ ID NO: 36557 - DNA, 21 bp, Artificial Sequence
  Synthetic
cugcaaagcaaaguccacacc

SEQ ID NO: 36558 - DNA, 25 bp, Artificial Sequence
  Synthetic
gttccagagccautagggttaugaa

SEQ ID NO: 36559 - DNA, 23 bp, Artificial Sequence
  Synthetic
gaaacagaaucagcaguggcaaa

SEQ ID NO: 36560 - DNA, 25 bp, Artificial Sequence
  Synthetic
gctatgaucatcaccgucaaaaaca

SEQ ID NO: 36561 - DNA, 27 bp, Artificial Sequence
  Synthetic
gtctgaatcuccagtttacccaacuaa

SEQ ID NO: 36562 - DNA, 24 bp, Artificial Sequence
  Synthetic
gggtcuccaaggtaatgaatucaa

SEQ ID NO: 36563 - DNA, 25 bp, Artificial Sequence
  Synthetic
caaacaaaucaggaatggcugagag

SEQ ID NO: 36564 - DNA, 22 bp, Artificial Sequence
  Synthetic
gccacttucctcaacagugaac

SEQ ID NO: 36565 - DNA, 28 bp, Artificial Sequence
  Synthetic
tcttaaagagcaacuacacagacagtut

SEQ ID NO: 36566 - DNA, 26 bp, Artificial Sequence
  Synthetic
agatagcctcucctacacaatucaca

SEQ ID NO: 36567 - DNA, 31 bp, Artificial Sequence
  Synthetic
ttttaaaattccagaaaautcagatgctgua

SEQ ID NO: 36568 - DNA, 30 bp, Artificial Sequence
  Synthetic
tggaagaacatcuagactcacaatcauact

SEQ ID NO: 36569 - DNA, 25 bp, Artificial Sequence
  Synthetic
gattuggaacacaccacatcaucaa

SEQ ID NO: 36570 - DNA, 23 bp, Artificial Sequence
  Synthetic
gcaaagctctutgcttccccuat

SEQ ID NO: 36571 - DNA, 26 bp, Artificial Sequence
  Synthetic
cattgttgaagutgaaggtctuccag

SEQ ID NO: 36572 - DNA, 28 bp, Artificial Sequence
  Synthetic
catatttcataagcugaacccctctcut

SEQ ID NO: 36573 - DNA, 23 bp, Artificial Sequence
  Synthetic
actcuggagagatacuccacacc

SEQ ID NO: 36574 - DNA, 27 bp, Artificial Sequence
  Synthetic
ggagtatctttcucctacctcacctuc

SEQ ID NO: 36575 - DNA, 27 bp, Artificial Sequence
  Synthetic
gatcagttttauaccccaccatcauct

SEQ ID NO: 36576 - DNA, 31 bp, Artificial Sequence
  Synthetic
ctagtgattcctguttctggttgtagtatuc

SEQ ID NO: 36577 - DNA, 25 bp, Artificial Sequence
  Synthetic
agaatcugagacctcccuaacacaa

SEQ ID NO: 36578 - DNA, 25 bp, Artificial Sequence
  Synthetic
acatttttcttcuccagaggcauga

SEQ ID NO: 36579 - DNA, 22 bp, Artificial Sequence
  Synthetic
gcattuccaaagcaggatggug

SEQ ID NO: 36580 - DNA, 28 bp, Artificial Sequence
  Synthetic
aggacaacttttcucagaaagatcagut

SEQ ID NO: 36581 - DNA, 28 bp, Artificial Sequence
  Synthetic
gagctttcaaauagaactatgguggaga

SEQ ID NO: 36582 - DNA, 27 bp, Artificial Sequence
  Synthetic
tgtaacgttucagggctaggaatttut

SEQ ID NO: 36583 - DNA, 28 bp, Artificial Sequence
  Synthetic
cacactcaaauaaaacacacagatguga

SEQ ID NO: 36584 - DNA, 24 bp, Artificial Sequence
  Synthetic
ttccctttctugtgcgtcaaatuc

SEQ ID NO: 36585 - DNA, 29 bp, Artificial Sequence
  Synthetic
ctcaaaagaagatugatgacaaagcctut

SEQ ID NO: 36586 - DNA, 24 bp, Artificial Sequence
  Synthetic
ctttttccccggguagtgtatcuc

SEQ ID NO: 36587 - DNA, 29 bp, Artificial Sequence
  Synthetic
ttggaaaacutggtagaucagaaaaggaa

SEQ ID NO: 36588 - DNA, 26 bp, Artificial Sequence
  Synthetic
gacattgtatgaautcagccctgaug

SEQ ID NO: 36589 - DNA, 31 bp, Artificial Sequence
  Synthetic
actccctggacaaaugtaaaagaatatucag

SEQ ID NO: 36590 - DNA, 25 bp, Artificial Sequence
  Synthetic
ttctctataagugacaggcuccact

SEQ ID NO: 36591 - DNA, 25 bp, Artificial Sequence
  Synthetic
cagccagtugtaacatggttucaaa

SEQ ID NO: 36592 - DNA, 30 bp, Artificial Sequence
  Synthetic
caaatctgtgtttuggtgattgagtaacut

SEQ ID NO: 36593 - DNA, 24 bp, Artificial Sequence
  Synthetic
gtcaagagggucaaacaaauctuc

SEQ ID NO: 36594 - DNA, 29 bp, Artificial Sequence
  Synthetic
gacatcatgttttugttttgctttcacut

SEQ ID NO: 36595 - DNA, 28 bp, Artificial Sequence
  Synthetic
gatatcctcaaccuatagtgacgtggua

SEQ ID NO: 36596 - DNA, 27 bp, Artificial Sequence
  Synthetic
atgttttcttccutctgttcggtttug

SEQ ID NO: 36597 - DNA, 27 bp, Artificial Sequence
  Synthetic
agaaggaggaaguatatgagactccug

SEQ ID NO: 36598 - DNA, 25 bp, Artificial Sequence
  Synthetic
ggtagactttccuttaccagtgcut

SEQ ID NO: 36599 - DNA, 29 bp, Artificial Sequence
  Synthetic
ctctagagaggacaugaaaatcagatcua

SEQ ID NO: 36600 - DNA, 22 bp, Artificial Sequence
  Synthetic
cctccctuaaacgttgcaacut

SEQ ID NO: 36601 - DNA, 25 bp, Artificial Sequence
  Synthetic
ggtttactggcuctcccttuaacaa

SEQ ID NO: 36602 - DNA, 29 bp, Artificial Sequence
  Synthetic
tccgttctgcucttttcagaaattcuaaa

SEQ ID NO: 36603 - DNA, 27 bp, Artificial Sequence
  Synthetic
atttacaccatcacucttccagctuag

SEQ ID NO: 36604 - DNA, 28 bp, Artificial Sequence
  Synthetic
aaccggttcacccuctaaaacatattua

SEQ ID NO: 36605 - DNA, 25 bp, Artificial Sequence
  Synthetic
gggaauctgaacatucagaaaggga

SEQ ID NO: 36606 - DNA, 26 bp, Artificial Sequence
  Synthetic
ttttgtgattguttcagtctcucgga

SEQ ID NO: 36607 - DNA, 27 bp, Artificial Sequence
  Synthetic
aattgcagaaagcacugagctatcuaa

SEQ ID NO: 36608 - DNA, 27 bp, Artificial Sequence
  Synthetic
ccttttgagatautttgctctccucct

SEQ ID NO: 36609 - DNA, 29 bp, Artificial Sequence
  Synthetic
gggcaagugacaaaguttagatcttaaua

SEQ ID NO: 36610 - DNA, 24 bp, Artificial Sequence
  Synthetic
actattggcugctttgcaagagua

SEQ ID NO: 36611 - DNA, 22 bp, Artificial Sequence
  Synthetic
gatttcaugcgagggtttcugg

SEQ ID NO: 36612 - DNA, 29 bp, Artificial Sequence
  Synthetic
ggaacaacaatgauttacatgaactctug

SEQ ID NO: 36613 - DNA, 27 bp, Artificial Sequence
  Synthetic
agaagatgaaggaacutacacgttugt

SEQ ID NO: 36614 - DNA, 29 bp, Artificial Sequence
  Synthetic
tttgtaagtatuggcaatgacacctttug

SEQ ID NO: 36615 - DNA, 28 bp, Artificial Sequence
  Synthetic
tgtgaggtctcuatggtgacttaaucat

SEQ ID NO: 36616 - DNA, 28 bp, Artificial Sequence
  Synthetic
cttcaatuagcaaaagugtgtattctug

SEQ ID NO: 36617 - DNA, 27 bp, Artificial Sequence
  Synthetic
atgggctattugtcaacatttacucct

SEQ ID NO: 36618 - DNA, 25 bp, Artificial Sequence
  Synthetic
gtctcagagauaaacattcggugga

SEQ ID NO: 36619 - DNA, 28 bp, Artificial Sequence
  Synthetic
gagcttcaagttuttgttgttgttgtug

SEQ ID NO: 36620 - DNA, 22 bp, Artificial Sequence
  Synthetic
gatgcgaacauctctgcctuct

SEQ ID NO: 36621 - DNA, 28 bp, Artificial Sequence
  Synthetic
ggtaaactcgaauttccatttcauccat

SEQ ID NO: 36622 - DNA, 28 bp, Artificial Sequence
  Synthetic
tgaaaccataccutccacataaagtgug

SEQ ID NO: 36623 - DNA, 28 bp, Artificial Sequence
  Synthetic
cagtgaactaugaaggcatctctuacaa

SEQ ID NO: 36624 - DNA, 22 bp, Artificial Sequence
  Synthetic
agtggucagcaaagtguaggat

SEQ ID NO: 36625 - DNA, 22 bp, Artificial Sequence
  Synthetic
acagaggacucggcagaauaca

SEQ ID NO: 36626 - DNA, 21 bp, Artificial Sequence
  Synthetic
gggacautgaagugggacacc

SEQ ID NO: 36627 - DNA, 28 bp, Artificial Sequence
  Synthetic
tgaaccccatguatctatttgtttggut

SEQ ID NO: 36628 - DNA, 22 bp, Artificial Sequence
  Synthetic
cagcatcagcutgtggacttuc

SEQ ID NO: 36629 - DNA, 28 bp, Artificial Sequence
  Synthetic
tcactgaattgcuccaattttcctctua

SEQ ID NO: 36630 - DNA, 30 bp, Artificial Sequence
  Synthetic
ttgttccttugacagagataguatacttut

SEQ ID NO: 36631 - DNA, 28 bp, Artificial Sequence
  Synthetic
ggacttcttttccutgatgatgtcauct

SEQ ID NO: 36632 - DNA, 23 bp, Artificial Sequence
  Synthetic
tgtcauctaatttgguggcagca

SEQ ID NO: 36633 - DNA, 29 bp, Artificial Sequence
  Synthetic
actcatactguacatctcttgtuccaaag

SEQ ID NO: 36634 - DNA, 26 bp, Artificial Sequence
  Synthetic
tttagaactgggcutgatttcctugt

SEQ ID NO: 36635 - DNA, 29 bp, Artificial Sequence
  Synthetic
tttcccagtguaacaataaccaagagaut

SEQ ID NO: 36636 - DNA, 24 bp, Artificial Sequence
  Synthetic
ttcggttaatgacuagtcgctgut

SEQ ID NO: 36637 - DNA, 29 bp, Artificial Sequence
  Synthetic
attcatcttgtgugtgtatgatttugcag

SEQ ID NO: 36638 - DNA, 22 bp, Artificial Sequence
  Synthetic
gggctggaauggtgaaagagua

SEQ ID NO: 36639 - DNA, 28 bp, Artificial Sequence
  Synthetic
tgaagttaaagtcuccttggaaagtgug

SEQ ID NO: 36640 - DNA, 21 bp, Artificial Sequence
  Synthetic
gcugacaggaaugggaggact

SEQ ID NO: 36641 - DNA, 29 bp, Artificial Sequence
  Synthetic
tgtggagcttaaauccaatggcaaataua

SEQ ID NO: 36642 - DNA, 27 bp, Artificial Sequence
  Synthetic
ctaattttaccacaugctaagggugac

SEQ ID NO: 36643 - DNA, 24 bp, Artificial Sequence
  Synthetic
ggatgcactcugacagaaaggtuc

SEQ ID NO: 36644 - DNA, 27 bp, Artificial Sequence
  Synthetic
aatacaaagacagguccaucaaaggaa

SEQ ID NO: 36645 - DNA, 21 bp, Artificial Sequence
  Synthetic
attgaacgguctgaccggauc

SEQ ID NO: 36646 - DNA, 28 bp, Artificial Sequence
  Synthetic
actaggactuagttcaatcttgucaggt

SEQ ID NO: 36647 - DNA, 24 bp, Artificial Sequence
  Synthetic
caguaaatucaagcgcagaacaga

SEQ ID NO: 36648 - DNA, 25 bp, Artificial Sequence
  Synthetic
cttcaaactgaagcuttcctggtuc

SEQ ID NO: 36649 - DNA, 25 bp, Artificial Sequence
  Synthetic
aggttcagagtucgctatgatggua

SEQ ID NO: 36650 - DNA, 26 bp, Artificial Sequence
  Synthetic
ctggcttttgcutttctttctgauct

SEQ ID NO: 36651 - DNA, 30 bp, Artificial Sequence
  Synthetic
gttgcatattcuagagacagtggtatcaut

SEQ ID NO: 36652 - DNA, 23 bp, Artificial Sequence
  Synthetic
gtgttagccugcattcaaagugg

SEQ ID NO: 36653 - DNA, 24 bp, Artificial Sequence
  Synthetic
gccugagccagagagaaagtuaat

SEQ ID NO: 36654 - DNA, 28 bp, Artificial Sequence
  Synthetic
atcaatatagtgguatagcttcccuggt

SEQ ID NO: 36655 - DNA, 26 bp, Artificial Sequence
  Synthetic
acttgaaaugaaagtcagagcuacgg

SEQ ID NO: 36656 - DNA, 28 bp, Artificial Sequence
  Synthetic
gctgaaataccugtttataacccaagug

SEQ ID NO: 36657 - DNA, 31 bp, Artificial Sequence
  Synthetic
agcaaattgtcaaugactatacccauaaagt

SEQ ID NO: 36658 - DNA, 29 bp, Artificial Sequence
  Synthetic
gattcatgagcaaaaacutatcacgctua

SEQ ID NO: 36659 - DNA, 28 bp, Artificial Sequence
  Synthetic
acagatgagucacaacttgagagacuat

SEQ ID NO: 36660 - DNA, 27 bp, Artificial Sequence
  Synthetic
ttagcccucgattttcttctuacacaa

SEQ ID NO: 36661 - DNA, 23 bp, Artificial Sequence
  Synthetic
gaaattgtatguggagcctgcug

SEQ ID NO: 36662 - DNA, 29 bp, Artificial Sequence
  Synthetic
ccatcttgtagaaaguccatttggtauct

SEQ ID NO: 36663 - DNA, 26 bp, Artificial Sequence
  Synthetic
aacatttatcauagctcctugccaca

SEQ ID NO: 36664 - DNA, 29 bp, Artificial Sequence
  Synthetic
ctgattcaacagcutcagattcagaaaug

SEQ ID NO: 36665 - DNA, 27 bp, Artificial Sequence
  Synthetic
aacagtctagcucagatacatctccut

SEQ ID NO: 36666 - DNA, 28 bp, Artificial Sequence
  Synthetic
actacagtatctutggccattttctucc

SEQ ID NO: 36667 - DNA, 26 bp, Artificial Sequence
  Synthetic
tuactgatgaagucccagcaagaaat

SEQ ID NO: 36668 - DNA, 25 bp, Artificial Sequence
  Synthetic
gggtgaguaaattctactcuaggct

SEQ ID NO: 36669 - DNA, 22 bp, Artificial Sequence
  Synthetic
ctgccgcgccutactttatuac

SEQ ID NO: 36670 - DNA, 22 bp, Artificial Sequence
  Synthetic
ccctcatatuagcttccgggut

SEQ ID NO: 36671 - DNA, 27 bp, Artificial Sequence
  Synthetic
gggtcactaaacauctcatctcaauga

SEQ ID NO: 36672 - DNA, 27 bp, Artificial Sequence
  Synthetic
gtcaatggaactutcgatttggtaguc

SEQ ID NO: 36673 - DNA, 28 bp, Artificial Sequence
  Synthetic
gcagttgaaaugcataagttcaaacuct

SEQ ID NO: 36674 - DNA, 21 bp, Artificial Sequence
  Synthetic
gcaagacuccactggctacut

SEQ ID NO: 36675 - DNA, 21 bp, Artificial Sequence
  Synthetic
ccttcgcugacacaccagaua

SEQ ID NO: 36676 - DNA, 24 bp, Artificial Sequence
  Synthetic
cagagatgctcugtttcacaggut

SEQ ID NO: 36677 - DNA, 28 bp, Artificial Sequence
  Synthetic
ggtatcacugagtttcatttcaaugcag

SEQ ID NO: 36678 - DNA, 20 bp, Artificial Sequence
  Synthetic
ctaccttugcggcggaaaug

SEQ ID NO: 36679 - DNA, 31 bp, Artificial Sequence
  Synthetic
ccagcctgatcucgatattcctatgtatuaa

SEQ ID NO: 36680 - DNA, 25 bp, Artificial Sequence
  Synthetic
tcaccttcucctgagttattugcac

SEQ ID NO: 36681 - DNA, 28 bp, Artificial Sequence
  Synthetic
cctcctttctttutgacttacgtttcut

SEQ ID NO: 36682 - DNA, 27 bp, Artificial Sequence
  Synthetic
aagacttctccauttaagggtttugac

SEQ ID NO: 36683 - DNA, 30 bp, Artificial Sequence
  Synthetic
gctaaagucaaagaacaagaaacuagaaut

SEQ ID NO: 36684 - DNA, 27 bp, Artificial Sequence
  Synthetic
tgattatctgtgutgacccctguaaga

SEQ ID NO: 36685 - DNA, 29 bp, Artificial Sequence
  Synthetic
gtgttttctucctttctctaugaaaagca

SEQ ID NO: 36686 - DNA, 24 bp, Artificial Sequence
  Synthetic
ctgatcactggutctctcactcug

SEQ ID NO: 36687 - DNA, 24 bp, Artificial Sequence
  Synthetic
gtattttgcuctaggtggcucagt

SEQ ID NO: 36688 - DNA, 24 bp, Artificial Sequence
  Synthetic
ctgatctgaguagaggttgucagc

SEQ ID NO: 36689 - DNA, 24 bp, Artificial Sequence
  Synthetic
tcttgacctcugccttttggttut

SEQ ID NO: 36690 - DNA, 21 bp, Artificial Sequence
  Synthetic
gtgcttuggcagcaauagacg

SEQ ID NO: 36691 - DNA, 26 bp, Artificial Sequence
  Synthetic
ctcaacgtgggcuttgttttaatcut

SEQ ID NO: 36692 - DNA, 23 bp, Artificial Sequence
  Synthetic
ctuggccccattuagacacaaac

SEQ ID NO: 36693 - DNA, 22 bp, Artificial Sequence
  Synthetic
ccagagcucccttgattuccaa

SEQ ID NO: 36694 - DNA, 22 bp, Artificial Sequence
  Synthetic
gcatctaccuctgcccauagct

SEQ ID NO: 36695 - DNA, 26 bp, Artificial Sequence
  Synthetic
actaaagccaacaguggacgatatuc

SEQ ID NO: 36696 - DNA, 22 bp, Artificial Sequence
  Synthetic
tcaagtccugcagcaacgtuaa

SEQ ID NO: 36697 - DNA, 26 bp, Artificial Sequence
  Synthetic
ccttagcugggacaccctaatttaut

SEQ ID NO: 36698 - DNA, 24 bp, Artificial Sequence
  Synthetic
aggtttaaagcauggccacattuc

SEQ ID NO: 36699 - DNA, 25 bp, Artificial Sequence
  Synthetic
tttgtatttggcautggcattgugt

SEQ ID NO: 36700 - DNA, 26 bp, Artificial Sequence
  Synthetic
tgatgcaacutccattaagucaccat

SEQ ID NO: 36701 - DNA, 28 bp, Artificial Sequence
  Synthetic
gcgttagtagcuagagataaaccaagua

SEQ ID NO: 36702 - DNA, 25 bp, Artificial Sequence
  Synthetic
ccaacagttaautggatacccugga

SEQ ID NO: 36703 - DNA, 28 bp, Artificial Sequence
  Synthetic
gtgagggaaaauaaccaatcacttucat

SEQ ID NO: 36704 - DNA, 29 bp, Artificial Sequence
  Synthetic
cattgagttttuacctacctttctugcac

SEQ ID NO: 36705 - DNA, 26 bp, Artificial Sequence
  Synthetic
ggcactggcaaaacutaagtaaguct

SEQ ID NO: 36706 - DNA, 25 bp, Artificial Sequence
  Synthetic
gaacctgccutttcttaaagtcuga

SEQ ID NO: 36707 - DNA, 26 bp, Artificial Sequence
  Synthetic
gtgcatgttutaaaattgcttuggca

SEQ ID NO: 36708 - DNA, 26 bp, Artificial Sequence
  Synthetic
ttacacatcaguccaacacttuagca

SEQ ID NO: 36709 - DNA, 29 bp, Artificial Sequence
  Synthetic
aatttaggtaugttattcacagugggcat

SEQ ID NO: 36710 - DNA, 27 bp, Artificial Sequence
  Synthetic
ttacaagtagttucccaagtttgcaut

SEQ ID NO: 36711 - DNA, 28 bp, Artificial Sequence
  Synthetic
gctacccaggtutattatgagaaggtug

SEQ ID NO: 36712 - DNA, 28 bp, Artificial Sequence
  Synthetic
ggctgattaaaattucccatgaggagua

SEQ ID NO: 36713 - DNA, 30 bp, Artificial Sequence
  Synthetic
cagagaagtgguactttattaggtaucaca

SEQ ID NO: 36714 - DNA, 20 bp, Artificial Sequence
  Synthetic
agcaaaagcucgtgggtgua

SEQ ID NO: 36715 - DNA, 20 bp, Artificial Sequence
  Synthetic
aucttcgagaucgggaggga

SEQ ID NO: 36716 - DNA, 17 bp, Artificial Sequence
  Synthetic
gcacucacccggtucct

SEQ ID NO: 36717 - DNA, 17 bp, Artificial Sequence
  Synthetic
gccagggugctggacug

SEQ ID NO: 36718 - DNA, 28 bp, Artificial Sequence
  Synthetic
ccattgcctuaaaatgttgcatttguct

SEQ ID NO: 36719 - DNA, 21 bp, Artificial Sequence
  Synthetic
gtttctggtcutcgcagccua

SEQ ID NO: 36720 - DNA, 26 bp, Artificial Sequence
  Synthetic
cacgtcucaacaattaauaaccgcaa

SEQ ID NO: 36721 - DNA, 27 bp, Artificial Sequence
  Synthetic
ggacaaaguaagccttggacttttuag

SEQ ID NO: 36722 - DNA, 23 bp, Artificial Sequence
  Synthetic
gtaggacugagatgtuggcagac

SEQ ID NO: 36723 - DNA, 25 bp, Artificial Sequence
  Synthetic
attttaacctcutcccaatcuggct

SEQ ID NO: 36724 - DNA, 22 bp, Artificial Sequence
  Synthetic
gctgtctgggutggaaggaauc

SEQ ID NO: 36725 - DNA, 22 bp, Artificial Sequence
  Synthetic
ggtggcugatgaactttugcac

SEQ ID NO: 36726 - DNA, 24 bp, Artificial Sequence
  Synthetic
ggttgaaagccaucagttgatugg

SEQ ID NO: 36727 - DNA, 28 bp, Artificial Sequence
  Synthetic
tttcagtaagaagccuctaatctgttut

SEQ ID NO: 36728 - DNA, 25 bp, Artificial Sequence
  Synthetic
gggccagtucctccctagtauaaat

SEQ ID NO: 36729 - DNA, 33 bp, Artificial Sequence
  Synthetic
cattttatgatgtttugttcttctgtgctttua

SEQ ID NO: 36730 - DNA, 25 bp, Artificial Sequence
  Synthetic
cuctctcctttaaugcgaggaaact

SEQ ID NO: 36731 - DNA, 22 bp, Artificial Sequence
  Synthetic
tcttaaccacuttcagccccug

SEQ ID NO: 36732 - DNA, 20 bp, Artificial Sequence
  Synthetic
ctgccgucagatcaccaaug

SEQ ID NO: 36733 - DNA, 25 bp, Artificial Sequence
  Synthetic
agtaaatucgggaaaggugaagagg

SEQ ID NO: 36734 - DNA, 22 bp, Artificial Sequence
  Synthetic
gggagaggutaatgggccuagt

SEQ ID NO: 36735 - DNA, 21 bp, Artificial Sequence
  Synthetic
tgcccgccugttctctuaaag

SEQ ID NO: 36736 - DNA, 22 bp, Artificial Sequence
  Synthetic
gtatggagccaguctcctggua

SEQ ID NO: 36737 - DNA, 24 bp, Artificial Sequence
  Synthetic
gcttctcuttttcacctucccaca

SEQ ID NO: 36738 - DNA, 18 bp, Artificial Sequence
  Synthetic
caucatccugggcacagc

SEQ ID NO: 36739 - DNA, 18 bp, Artificial Sequence
  Synthetic
tttcccgggutccagcuc

SEQ ID NO: 36740 - DNA, 26 bp, Artificial Sequence
  Synthetic
ggatgcutcagtcttuacagaacagg

SEQ ID NO: 36741 - DNA, 26 bp, Artificial Sequence
  Synthetic
agtgatttgauggctgtaatcctuca

SEQ ID NO: 36742 - DNA, 21 bp, Artificial Sequence
  Synthetic
ccagaucagcccccaaattuc

SEQ ID NO: 36743 - DNA, 28 bp, Artificial Sequence
  Synthetic
ctgtttctaagcugcatttcacttucaa

SEQ ID NO: 36744 - DNA, 20 bp, Artificial Sequence
  Synthetic
gccctttccauctggaggug

SEQ ID NO: 36745 - DNA, 19 bp, Artificial Sequence
  Synthetic
ctagcggugcccacgtuat

SEQ ID NO: 36746 - DNA, 30 bp, Artificial Sequence
  Synthetic
gagagggtaguagaaattcacttgctatut

SEQ ID NO: 36747 - DNA, 25 bp, Artificial Sequence
  Synthetic
tggguacagacattcacuaggaagt

SEQ ID NO: 36748 - DNA, 25 bp, Artificial Sequence
  Synthetic
cctgatcaatuacacacacggguat

SEQ ID NO: 36749 - DNA, 30 bp, Artificial Sequence
  Synthetic
agactgaauaacacaaaactgttctctuct

SEQ ID NO: 36750 - DNA, 29 bp, Artificial Sequence
  Synthetic
ttcaaatagcagatuccatcattagccut

SEQ ID NO: 36751 - DNA, 26 bp, Artificial Sequence
  Synthetic
gggagcucactaaactatucacaagt

SEQ ID NO: 36752 - DNA, 22 bp, Artificial Sequence
  Synthetic
ggcagattccaucatcagccut

SEQ ID NO: 36753 - DNA, 29 bp, Artificial Sequence
  Synthetic
gctcacugaagacccuaatttaaactaut

SEQ ID NO: 36754 - DNA, 21 bp, Artificial Sequence
  Synthetic
gtggtcacauagtggtgcuct

SEQ ID NO: 36755 - DNA, 27 bp, Artificial Sequence
  Synthetic
ctggatctgagcuctgaaatgactuat

SEQ ID NO: 36756 - DNA, 21 bp, Artificial Sequence
  Synthetic
cccaccauagcctcttggtug

SEQ ID NO: 36757 - DNA, 29 bp, Artificial Sequence
  Synthetic
agtccctgcaauctgtaataatttcctut

SEQ ID NO: 36758 - DNA, 22 bp, Artificial Sequence
  Synthetic
tcaggatctcaucgctttgcug

SEQ ID NO: 36759 - DNA, 22 bp, Artificial Sequence
  Synthetic
agggtactgaugtgtgtcccut

SEQ ID NO: 36760 - DNA, 25 bp, Artificial Sequence
  Synthetic
gcttctgtaaaucgtcaccagatug

SEQ ID NO: 36761 - DNA, 28 bp, Artificial Sequence
  Synthetic
ccatttttauaggaatctcuggaagcct

SEQ ID NO: 36762 - DNA, 21 bp, Artificial Sequence
  Synthetic
cctcatuccacagccctguag

SEQ ID NO: 36763 - DNA, 21 bp, Artificial Sequence
  Synthetic
gggaguggagtgagugaggag

SEQ ID NO: 36764 - DNA, 21 bp, Artificial Sequence
  Synthetic
tgauccggcacctgttucaag

SEQ ID NO: 36765 - DNA, 22 bp, Artificial Sequence
  Synthetic
ctaucctggtacuggaaagcca

SEQ ID NO: 36766 - DNA, 20 bp, Artificial Sequence
  Synthetic
gcactggugacatgccttug

SEQ ID NO: 36767 - DNA, 20 bp, Artificial Sequence
  Synthetic
actcacgacuggcagagtug

SEQ ID NO: 36768 - DNA, 21 bp, Artificial Sequence
  Synthetic
cgtgcttguctaccacuacgg

SEQ ID NO: 36769 - DNA, 21 bp, Artificial Sequence
  Synthetic
gggtgctucagtcaccttcut

SEQ ID NO: 36770 - DNA, 21 bp, Artificial Sequence
  Synthetic
cctggccugaccctaagaugt

SEQ ID NO: 36771 - DNA, 21 bp, Artificial Sequence
  Synthetic
gggcaccaggaugttgaugat

SEQ ID NO: 36772 - DNA, 22 bp, Artificial Sequence
  Synthetic
cccaaggucacagctaagtcug

SEQ ID NO: 36773 - DNA, 20 bp, Artificial Sequence
  Synthetic
gggcaaacacucagctugga

SEQ ID NO: 36774 - DNA, 20 bp, Artificial Sequence
  Synthetic
cctttcttguggcccctuga

SEQ ID NO: 36775 - DNA, 21 bp, Artificial Sequence
  Synthetic
tctcgaacaugaggtcacugc

SEQ ID NO: 36776 - DNA, 22 bp, Artificial Sequence
  Synthetic
tggtcttggutttcagcccauc

SEQ ID NO: 36777 - DNA, 21 bp, Artificial Sequence
  Synthetic
ggcaatccugtggtccctuac

SEQ ID NO: 36778 - DNA, 21 bp, Artificial Sequence
  Synthetic
gcaggacaagcgcutcatcua

SEQ ID NO: 36779 - DNA, 21 bp, Artificial Sequence
  Synthetic
gatgtccacccucagaccauc

SEQ ID NO: 36780 - DNA, 22 bp, Artificial Sequence
  Synthetic
aggcccagaucgtcaaggauat

SEQ ID NO: 36781 - DNA, 22 bp, Artificial Sequence
  Synthetic
ggaaacugtgtcugcagcagat

SEQ ID NO: 36782 - DNA, 21 bp, Artificial Sequence
  Synthetic
cgtguggaaggtgagcuacac

SEQ ID NO: 36783 - DNA, 26 bp, Artificial Sequence
  Synthetic
tggatctcgaucaggtagctctuaat

SEQ ID NO: 36784 - DNA, 17 bp, Artificial Sequence
  Synthetic
aagguggtgcugcggaa

SEQ ID NO: 36785 - DNA, 20 bp, Artificial Sequence
  Synthetic
cgaagggccautgtgctuct

SEQ ID NO: 36786 - DNA, 17 bp, Artificial Sequence
  Synthetic
gtgguctggaucgcgga

SEQ ID NO: 36787 - DNA, 18 bp, Artificial Sequence
  Synthetic
cggccuccatctccucct

SEQ ID NO: 36788 - DNA, 22 bp, Artificial Sequence
  Synthetic
cggtguggctcttuaacaacct

SEQ ID NO: 36789 - DNA, 28 bp, Artificial Sequence
  Synthetic
cctgtactuaccacaacaaccttatcut

SEQ ID NO: 36790 - DNA, 19 bp, Artificial Sequence
  Synthetic
ggagcgcautgcacaucaa

SEQ ID NO: 36791 - DNA, 25 bp, Artificial Sequence
  Synthetic
gatgttugcccctaaacaucacaat

SEQ ID NO: 36792 - DNA, 23 bp, Artificial Sequence
  Synthetic
cctgaagacaggugcaaagucaa

SEQ ID NO: 36793 - DNA, 24 bp, Artificial Sequence
  Synthetic
cagggtacaucctgtgtcttugag

SEQ ID NO: 36794 - DNA, 20 bp, Artificial Sequence
  Synthetic
ccacgagtugggtccttucg

SEQ ID NO: 36795 - DNA, 28 bp, Artificial Sequence
  Synthetic
ggtgataaaugcacttttgtcatauggt

SEQ ID NO: 36796 - DNA, 22 bp, Artificial Sequence
  Synthetic
caccgagagccacutgtgauag

SEQ ID NO: 36797 - DNA, 31 bp, Artificial Sequence
  Synthetic
tctactcatgccccucaaacttattttuaat

SEQ ID NO: 36798 - DNA, 24 bp, Artificial Sequence
  Synthetic
ggcaatgucaattagcuggaacat

SEQ ID NO: 36799 - DNA, 22 bp, Artificial Sequence
  Synthetic
gtagacctcccugagcacttuc

SEQ ID NO: 36800 - DNA, 21 bp, Artificial Sequence
  Synthetic
acaccaaagcccugcagtuag

SEQ ID NO: 36801 - DNA, 32 bp, Artificial Sequence
  Synthetic
ccctcattaucaaaagattattaccatugcat

SEQ ID NO: 36802 - DNA, 27 bp, Artificial Sequence
  Synthetic
cacacaaggauaagccaacagaagaua

SEQ ID NO: 36803 - DNA, 24 bp, Artificial Sequence
  Synthetic
cctcccucagagaaaauctttugt

SEQ ID NO: 36804 - DNA, 22 bp, Artificial Sequence
  Synthetic
ggagggaaugcgaagaaacuct

SEQ ID NO: 36805 - DNA, 25 bp, Artificial Sequence
  Synthetic
cctaaaaaccaguctttccctgcut

SEQ ID NO: 36806 - DNA, 23 bp, Artificial Sequence
  Synthetic
cccucaacaugccagaaagagaa

SEQ ID NO: 36807 - DNA, 33 bp, Artificial Sequence
  Synthetic
tggtagctgttgutatttctattgaacttugat

SEQ ID NO: 36808 - DNA, 32 bp, Artificial Sequence
  Synthetic
tgaatattttgcctguctttaagttgaacaug

SEQ ID NO: 36809 - DNA, 24 bp, Artificial Sequence
  Synthetic
tccagctgcauctctcctacaaua

SEQ ID NO: 36810 - DNA, 20 bp, Artificial Sequence
  Synthetic
agaactgcgcuctcttcucg

SEQ ID NO: 36811 - DNA, 20 bp, Artificial Sequence
  Synthetic
cccctccguacctgctctua

SEQ ID NO: 36812 - DNA, 30 bp, Artificial Sequence
  Synthetic
aataaatcacagcugcaaacgttaaatuct

SEQ ID NO: 36813 - DNA, 22 bp, Artificial Sequence
  Synthetic
tcauacacggcagccacauaat

SEQ ID NO: 36814 - DNA, 23 bp, Artificial Sequence
  Synthetic
cggttcttccugccatctgauaa

SEQ ID NO: 36815 - DNA, 24 bp, Artificial Sequence
  Synthetic
acugaggaaaaagguaggaaucac

SEQ ID NO: 36816 - DNA, 26 bp, Artificial Sequence
  Synthetic
acaaatgtcgugttcagcaataaugg

SEQ ID NO: 36817 - DNA, 21 bp, Artificial Sequence
  Synthetic
aggcagutggguacacaacat

SEQ ID NO: 36818 - DNA, 23 bp, Artificial Sequence
  Synthetic
ctctggaguccttttgguaccat

SEQ ID NO: 36819 - DNA, 21 bp, Artificial Sequence
  Synthetic
ggagcatucacgttccactug

SEQ ID NO: 36820 - DNA, 24 bp, Artificial Sequence
  Synthetic
accttauccaaagagctgtaugcc

SEQ ID NO: 36821 - DNA, 24 bp, Artificial Sequence
  Synthetic
gtcatcccugaggucagaaacaaa

SEQ ID NO: 36822 - DNA, 21 bp, Artificial Sequence
  Synthetic
gcgcttgtaugagagggacua

SEQ ID NO: 36823 - DNA, 28 bp, Artificial Sequence
  Synthetic
aatgtctcgaugattgaggttuaagagg

SEQ ID NO: 36824 - DNA, 17 bp, Artificial Sequence
  Synthetic
tcuggcccgcacatcug

SEQ ID NO: 36825 - DNA, 17 bp, Artificial Sequence
  Synthetic
tgaacgugcggugggat

SEQ ID NO: 36826 - DNA, 31 bp, Artificial Sequence
  Synthetic
ttcatttgaaatugcataacatctucaggaa

SEQ ID NO: 36827 - DNA, 27 bp, Artificial Sequence
  Synthetic
caggtggaaaauctcacaucacaaaat

SEQ ID NO: 36828 - DNA, 24 bp, Artificial Sequence
  Synthetic
cctttctgtcuggaggccatatua

SEQ ID NO: 36829 - DNA, 24 bp, Artificial Sequence
  Synthetic
ggagaagcagcaucttccagaaua

SEQ ID NO: 36830 - DNA, 23 bp, Artificial Sequence
  Synthetic
catgaacccacutcctgacagua

SEQ ID NO: 36831 - DNA, 23 bp, Artificial Sequence
  Synthetic
cgcggtagcaguagaagatgaug

SEQ ID NO: 36832 - DNA, 21 bp, Artificial Sequence
  Synthetic
ggaagaugaccgctcugacat

SEQ ID NO: 36833 - DNA, 23 bp, Artificial Sequence
  Synthetic
ggaaagatctugactgccacugt

SEQ ID NO: 36834 - DNA, 23 bp, Artificial Sequence
  Synthetic
ggaaacaauactggctgaucacc

SEQ ID NO: 36835 - DNA, 22 bp, Artificial Sequence
  Synthetic
agcaggtuaggtcgttctucac

SEQ ID NO: 36836 - DNA, 28 bp, Artificial Sequence
  Synthetic
ttgtgaaaauaaaaaggcagctggaaut

SEQ ID NO: 36837 - DNA, 22 bp, Artificial Sequence
  Synthetic
aatgatgctgguccacaccuac

SEQ ID NO: 36838 - DNA, 22 bp, Artificial Sequence
  Synthetic
atggtgcccuttggatctctut

SEQ ID NO: 36839 - DNA, 21 bp, Artificial Sequence
  Synthetic
ccugcccuagaagagctatut

SEQ ID NO: 36840 - DNA, 17 bp, Artificial Sequence
  Synthetic
gggcuggatggcguaag

SEQ ID NO: 36841 - DNA, 19 bp, Artificial Sequence
  Synthetic
cggtucaccactgtcucgt

SEQ ID NO: 36842 - DNA, 32 bp, Artificial Sequence
  Synthetic
gagtagttgcagacugataaattattttcugt

SEQ ID NO: 36843 - DNA, 24 bp, Artificial Sequence
  Synthetic
gcacaaacaucctgctacttugag

SEQ ID NO: 36844 - DNA, 26 bp, Artificial Sequence
  Synthetic
ccccttgggautagtatctatctcuc

SEQ ID NO: 36845 - DNA, 26 bp, Artificial Sequence
  Synthetic
agcttcaacaauttactctcccaugt

SEQ ID NO: 36846 - DNA, 21 bp, Artificial Sequence
  Synthetic
ctcaccccucaggacagttut

SEQ ID NO: 36847 - DNA, 25 bp, Artificial Sequence
  Synthetic
ggttgaggaguttggtgctacatua

SEQ ID NO: 36848 - DNA, 28 bp, Artificial Sequence
  Synthetic
ttaatacagacttugctaccaggactug

SEQ ID NO: 36849 - DNA, 20 bp, Artificial Sequence
  Synthetic
tttgcucagaggcugcagaa

SEQ ID NO: 36850 - DNA, 25 bp, Artificial Sequence
  Synthetic
gcaagatgaggagaugcttgaacuc

SEQ ID NO: 36851 - DNA, 24 bp, Artificial Sequence
  Synthetic
acagaataaaggagguaggctgua

SEQ ID NO: 36852 - DNA, 27 bp, Artificial Sequence
  Synthetic
gggttgguaggattctattactuacct

SEQ ID NO: 36853 - DNA, 26 bp, Artificial Sequence
  Synthetic
gcttgttcacacacucagctgattua

SEQ ID NO: 36854 - DNA, 25 bp, Artificial Sequence
  Synthetic
gttaaagcttgcuccttcatgtuct

SEQ ID NO: 36855 - DNA, 27 bp, Artificial Sequence
  Synthetic
acagaagtauaagaatggctgucacac

SEQ ID NO: 36856 - DNA, 26 bp, Artificial Sequence
  Synthetic
ggtattgaatttcuttggaccaggug

SEQ ID NO: 36857 - DNA, 27 bp, Artificial Sequence
  Synthetic
aaagattgtaugaggtcctgtccuagt

SEQ ID NO: 36858 - DNA, 25 bp, Artificial Sequence
  Synthetic
tcacacattcugcctcctaaacaut

SEQ ID NO: 36859 - DNA, 28 bp, Artificial Sequence
  Synthetic
cagaaggcaaguataagtcttaagugct

SEQ ID NO: 36860 - DNA, 24 bp, Artificial Sequence
  Synthetic
gaaaaaggcugcttttcagtgugt

SEQ ID NO: 36861 - DNA, 24 bp, Artificial Sequence
  Synthetic
caccctcctaugacagtgtcacua

SEQ ID NO: 36862 - DNA, 20 bp, Artificial Sequence
  Synthetic
gauaaccauggccgacacct

SEQ ID NO: 36863 - DNA, 22 bp, Artificial Sequence
  Synthetic
cgcatccatugcatggacatuc

SEQ ID NO: 36864 - DNA, 27 bp, Artificial Sequence
  Synthetic
gacaggaccgaauactcaataaacuga

SEQ ID NO: 36865 - DNA, 21 bp, Artificial Sequence
  Synthetic
gtgggcaucctcttctucacc

SEQ ID NO: 36866 - DNA, 20 bp, Artificial Sequence
  Synthetic
ctgtuggcgaaggtcuggaa

SEQ ID NO: 36867 - DNA, 20 bp, Artificial Sequence
  Synthetic
gcatccucagactgauccga

SEQ ID NO: 36868 - DNA, 23 bp, Artificial Sequence
  Synthetic
ccacaaagagcaggutgatctug

SEQ ID NO: 36869 - DNA, 25 bp, Artificial Sequence
  Synthetic
actttccattugcctctccttucag

SEQ ID NO: 36870 - DNA, 17 bp, Artificial Sequence
  Synthetic
ccctcaauccccuggca

SEQ ID NO: 36871 - DNA, 23 bp, Artificial Sequence
  Synthetic
tctccctgtgugatttctcccut

SEQ ID NO: 36872 - DNA, 21 bp, Artificial Sequence
  Synthetic
gaagucccttctcuccaggac

SEQ ID NO: 36873 - DNA, 22 bp, Artificial Sequence
  Synthetic
agagggagacutgccttugaac

SEQ ID NO: 36874 - DNA, 20 bp, Artificial Sequence
  Synthetic
gaaggcagccaccuctctua

SEQ ID NO: 36875 - DNA, 23 bp, Artificial Sequence
  Synthetic
atcctccccauttctacttugcc

SEQ ID NO: 36876 - DNA, 23 bp, Artificial Sequence
  Synthetic
ccagtttcugacctgacttucca

SEQ ID NO: 36877 - DNA, 21 bp, Artificial Sequence
  Synthetic
caagaccugctaccacaucgt

SEQ ID NO: 36878 - DNA, 20 bp, Artificial Sequence
  Synthetic
tctggguggaactgaggcua

SEQ ID NO: 36879 - DNA, 21 bp, Artificial Sequence
  Synthetic
ctacucagcccacacucacac

SEQ ID NO: 36880 - DNA, 21 bp, Artificial Sequence
  Synthetic
gggaagcugcttugagagagg

SEQ ID NO: 36881 - DNA, 20 bp, Artificial Sequence
  Synthetic
ggccgagucagacacagaug

SEQ ID NO: 36882 - DNA, 19 bp, Artificial Sequence
  Synthetic
gcaccttcuccgtctcugg

SEQ ID NO: 36883 - DNA, 19 bp, Artificial Sequence
  Synthetic
caaccucacagccccugat

SEQ ID NO: 36884 - DNA, 28 bp, Artificial Sequence
  Synthetic
ggtagatggatugatagaagggtaagua

SEQ ID NO: 36885 - DNA, 22 bp, Artificial Sequence
  Synthetic
tctguggagagtggaucgagac

SEQ ID NO: 36886 - DNA, 21 bp, Artificial Sequence
  Synthetic
gttctugccaaagagcugcat

SEQ ID NO: 36887 - DNA, 20 bp, Artificial Sequence
  Synthetic
ccagagcccutcacaagguc

SEQ ID NO: 36888 - DNA, 22 bp, Artificial Sequence
  Synthetic
gctccaugaggctaaggaugac

SEQ ID NO: 36889 - DNA, 20 bp, Artificial Sequence
  Synthetic
ggccagggaguctttccauc

SEQ ID NO: 36890 - DNA, 21 bp, Artificial Sequence
  Synthetic
cgccaugaagagtgtgtugag

SEQ ID NO: 36891 - DNA, 27 bp, Artificial Sequence
  Synthetic
acagaatcaaacuaactcattggcugt

SEQ ID NO: 36892 - DNA, 23 bp, Artificial Sequence
  Synthetic
cgtgtatutttggactuggcact

SEQ ID NO: 36893 - DNA, 24 bp, Artificial Sequence
  Synthetic
caaaaagaacagcacugtggacug

SEQ ID NO: 36894 - DNA, 23 bp, Artificial Sequence
  Synthetic
cgctgtgcugttttcatcatcug

SEQ ID NO: 36895 - DNA, 21 bp, Artificial Sequence
  Synthetic
aagagcacaugtcatggucgt

SEQ ID NO: 36896 - DNA, 22 bp, Artificial Sequence
  Synthetic
cctacagtcaggugagggctua

SEQ ID NO: 36897 - DNA, 26 bp, Artificial Sequence
  Synthetic
tcttcttcatgcutgtcatcttccug

SEQ ID NO: 36898 - DNA, 20 bp, Artificial Sequence
  Synthetic
acttgugtagccuggaccct

SEQ ID NO: 36899 - DNA, 22 bp, Artificial Sequence
  Synthetic
aacaaagtcuctgtgtguggct

SEQ ID NO: 36900 - DNA, 22 bp, Artificial Sequence
  Synthetic
ggtctgctgguctcacaaaguc

SEQ ID NO: 36901 - DNA, 22 bp, Artificial Sequence
  Synthetic
cagctcttcaugggcaaccuaa

SEQ ID NO: 36902 - DNA, 21 bp, Artificial Sequence
  Synthetic
ggcatatcccuctagcctugg

SEQ ID NO: 36903 - DNA, 26 bp, Artificial Sequence
  Synthetic
gttgtcattgtcucgtgtgtgaatut

SEQ ID NO: 36904 - DNA, 23 bp, Artificial Sequence
  Synthetic
aggcauagcacagcauagcaaat

SEQ ID NO: 36905 - DNA, 21 bp, Artificial Sequence
  Synthetic
gctcaggccucccuaagaaac

SEQ ID NO: 36906 - DNA, 24 bp, Artificial Sequence
  Synthetic
ggtacucagcaggtattaacugca

SEQ ID NO: 36907 - DNA, 22 bp, Artificial Sequence
  Synthetic
agggcctaaugctactgtcugt

SEQ ID NO: 36908 - DNA, 20 bp, Artificial Sequence
  Synthetic
gctctccugcaaggtggtug

SEQ ID NO: 36909 - DNA, 22 bp, Artificial Sequence
  Synthetic
tctctguccctgggcauagaat

SEQ ID NO: 36910 - DNA, 18 bp, Artificial Sequence
  Synthetic
agcacuccccucccagaa

SEQ ID NO: 36911 - DNA, 23 bp, Artificial Sequence
  Synthetic
ccatcuagagggattcagugggt

SEQ ID NO: 36912 - DNA, 21 bp, Artificial Sequence
  Synthetic
gtcctcataggugcctgtguc

SEQ ID NO: 36913 - DNA, 24 bp, Artificial Sequence
  Synthetic
ggatagcucctcattaucaggcat

SEQ ID NO: 36914 - DNA, 18 bp, Artificial Sequence
  Synthetic
gtcagccuaccccacucc

SEQ ID NO: 36915 - DNA, 20 bp, Artificial Sequence
  Synthetic
ggtguggccccacctttuaa

SEQ ID NO: 36916 - DNA, 22 bp, Artificial Sequence
  Synthetic
cttcttgggcuctggcttttug

SEQ ID NO: 36917 - DNA, 23 bp, Artificial Sequence
  Synthetic
aatagccccuaagcctagccaua

SEQ ID NO: 36918 - DNA, 22 bp, Artificial Sequence
  Synthetic
actgaaauaacggacgugcaca

SEQ ID NO: 36919 - DNA, 20 bp, Artificial Sequence
  Synthetic
agatggcugacgaccgttuc

SEQ ID NO: 36920 - DNA, 23 bp, Artificial Sequence
  Synthetic
accauagacaaaagggugacagg

SEQ ID NO: 36921 - DNA, 22 bp, Artificial Sequence
  Synthetic
ctgaccttucaaccctctcuga

SEQ ID NO: 36922 - DNA, 24 bp, Artificial Sequence
  Synthetic
catcactaucccaaggagctucag

SEQ ID NO: 36923 - DNA, 22 bp, Artificial Sequence
  Synthetic
tgtgcacacaguggaaaucagt

SEQ ID NO: 36924 - DNA, 20 bp, Artificial Sequence
  Synthetic
ccugagaggaccccagtuga

SEQ ID NO: 36925 - DNA, 23 bp, Artificial Sequence
  Synthetic
tgtctctccaucttcccatccut

SEQ ID NO: 36926 - DNA, 18 bp, Artificial Sequence
  Synthetic
tgctgggugagggaggua

SEQ ID NO: 36927 - DNA, 20 bp, Artificial Sequence
  Synthetic
cctgaggucagaggucacag

SEQ ID NO: 36928 - DNA, 22 bp, Artificial Sequence
  Synthetic
ggcaggcuggaagatggttaug

SEQ ID NO: 36929 - DNA, 29 bp, Artificial Sequence
  Synthetic
cctctgattacugactctgtcctatauct

SEQ ID NO: 36930 - DNA, 21 bp, Artificial Sequence
  Synthetic
ccactguccacagaccctgua

SEQ ID NO: 36931 - DNA, 23 bp, Artificial Sequence
  Synthetic
cacaaaggagagauggtgagugt

SEQ ID NO: 36932 - DNA, 22 bp, Artificial Sequence
  Synthetic
cccagugccctaatatcugacc

SEQ ID NO: 36933 - DNA, 24 bp, Artificial Sequence
  Synthetic
gattctcttuggtccctcacugac

SEQ ID NO: 36934 - DNA, 23 bp, Artificial Sequence
  Synthetic
cactuaagaggauccccaggaua

SEQ ID NO: 36935 - DNA, 22 bp, Artificial Sequence
  Synthetic
cctgatcuggtcctgacugaat

SEQ ID NO: 36936 - DNA, 23 bp, Artificial Sequence
  Synthetic
tctgggaguttgagctcucagat

SEQ ID NO: 36937 - DNA, 21 bp, Artificial Sequence
  Synthetic
tcccgacucctctgattccug

SEQ ID NO: 36938 - DNA, 19 bp, Artificial Sequence
  Synthetic
gccccgcaccugaattcua

SEQ ID NO: 36939 - DNA, 22 bp, Artificial Sequence
  Synthetic
ctttgtctgguccccactgtut

SEQ ID NO: 36940 - DNA, 22 bp, Artificial Sequence
  Synthetic
caccctggauggtgacatuagg

SEQ ID NO: 36941 - DNA, 21 bp, Artificial Sequence
  Synthetic
ccactgatucccctcacugat

SEQ ID NO: 36942 - DNA, 21 bp, Artificial Sequence
  Synthetic
ccccaucctaagtccucacga

SEQ ID NO: 36943 - DNA, 21 bp, Artificial Sequence
  Synthetic
gggttcccaagucactctcug

SEQ ID NO: 36944 - DNA, 22 bp, Artificial Sequence
  Synthetic
cctcccaggacuctcaucagaa

SEQ ID NO: 36945 - DNA, 23 bp, Artificial Sequence
  Synthetic
tccgatgccucttttccucaaag

SEQ ID NO: 36946 - DNA, 20 bp, Artificial Sequence
  Synthetic
cccaagaguggccccttaug

SEQ ID NO: 36947 - DNA, 22 bp, Artificial Sequence
  Synthetic
gccugactacugagcagagaag

SEQ ID NO: 36948 - DNA, 24 bp, Artificial Sequence
  Synthetic
gtcatgagggugggtaaactaugg

SEQ ID NO: 36949 - DNA, 21 bp, Artificial Sequence
  Synthetic
caaggaaucccactgaccuct

SEQ ID NO: 36950 - DNA, 22 bp, Artificial Sequence
  Synthetic
catggcattuggaaacaggcut

SEQ ID NO: 36951 - DNA, 22 bp, Artificial Sequence
  Synthetic
gggcctgaaauatgaggagugg

SEQ ID NO: 36952 - DNA, 21 bp, Artificial Sequence
  Synthetic
ccugagagggaagagctcugt

SEQ ID NO: 36953 - DNA, 23 bp, Artificial Sequence
  Synthetic
gttctctcatgucgtcctgtguc

SEQ ID NO: 36954 - DNA, 23 bp, Artificial Sequence
  Synthetic
cccuggaggaagagaaagtucag

SEQ ID NO: 36955 - DNA, 24 bp, Artificial Sequence
  Synthetic
gtcatctccugcaatgaggaugag

SEQ ID NO: 36956 - DNA, 20 bp, Artificial Sequence
  Synthetic
cagagaaggccuggctcauc

SEQ ID NO: 36957 - DNA, 22 bp, Artificial Sequence
  Synthetic
gtgaccaguactgcctcagtut

SEQ ID NO: 36958 - DNA, 25 bp, Artificial Sequence
  Synthetic
caatacatgugagagccaccttcut

SEQ ID NO: 36959 - DNA, 23 bp, Artificial Sequence
  Synthetic
cacactagagguggtgtgcauat

SEQ ID NO: 36960 - DNA, 23 bp, Artificial Sequence
  Synthetic
gggatgagaugtcaagtcagucc

SEQ ID NO: 36961 - DNA, 26 bp, Artificial Sequence
  Synthetic
cctataacccuctgtgatccugagat

SEQ ID NO: 36962 - DNA, 20 bp, Artificial Sequence
  Synthetic
catcuctgcccugcaggaaa

SEQ ID NO: 36963 - DNA, 18 bp, Artificial Sequence
  Synthetic
cuggccaggagagugagg

SEQ ID NO: 36964 - DNA, 22 bp, Artificial Sequence
  Synthetic
cugcaggaguggaagagagaat

SEQ ID NO: 36965 - DNA, 20 bp, Artificial Sequence
  Synthetic
gacctctugctgtcccucag

SEQ ID NO: 36966 - DNA, 22 bp, Artificial Sequence
  Synthetic
acagaacctauggagcctcaug

SEQ ID NO: 36967 - DNA, 26 bp, Artificial Sequence
  Synthetic
gttcctagcaguttgtcttcatcuct

SEQ ID NO: 36968 - DNA, 21 bp, Artificial Sequence
  Synthetic
cacggucacccugaaaacaag

SEQ ID NO: 36969 - DNA, 22 bp, Artificial Sequence
  Synthetic
gccatgaugtttcaaugggcaa

SEQ ID NO: 36970 - DNA, 23 bp, Artificial Sequence
  Synthetic
acccugagaccucagaaaagagt

SEQ ID NO: 36971 - DNA, 21 bp, Artificial Sequence
  Synthetic
gaaggtaaagucccccaccug

SEQ ID NO: 36972 - DNA, 21 bp, Artificial Sequence
  Synthetic
gtctacacgugtgcctcaugt

SEQ ID NO: 36973 - DNA, 23 bp, Artificial Sequence
  Synthetic
acatccaaccagugatctgtucc

SEQ ID NO: 36974 - DNA, 23 bp, Artificial Sequence
  Synthetic
actctctcggaugctgtgacuat

SEQ ID NO: 36975 - DNA, 23 bp, Artificial Sequence
  Synthetic
ccttaggcucacagggacuagag

SEQ ID NO: 36976 - DNA, 22 bp, Artificial Sequence
  Synthetic
ccggtcacccugtggaaaauag

SEQ ID NO: 36977 - DNA, 26 bp, Artificial Sequence
  Synthetic
ccatcttacccucacctcttatcuga

SEQ ID NO: 36978 - DNA, 21 bp, Artificial Sequence
  Synthetic
cgaaacccutcaatgcccuga

SEQ ID NO: 36979 - DNA, 22 bp, Artificial Sequence
  Synthetic
ctcagcaagcutatctcugcca

SEQ ID NO: 36980 - DNA, 21 bp, Artificial Sequence
  Synthetic
gggaagugggagttaguggaa

SEQ ID NO: 36981 - DNA, 20 bp, Artificial Sequence
  Synthetic
gggaccugagggctcctaut

SEQ ID NO: 36982 - DNA, 23 bp, Artificial Sequence
  Synthetic
gagggtttagcautacagggtug

SEQ ID NO: 36983 - DNA, 26 bp, Artificial Sequence
  Synthetic
caaaatatugggagggtctgtcucag

SEQ ID NO: 36984 - DNA, 21 bp, Artificial Sequence
  Synthetic
gcagggaguggatggaugaac

SEQ ID NO: 36985 - DNA, 20 bp, Artificial Sequence
  Synthetic
tcatggcggguaagggagua

SEQ ID NO: 36986 - DNA, 22 bp, Artificial Sequence
  Synthetic
ctcgaagcaagcagutcucaag

SEQ ID NO: 36987 - DNA, 22 bp, Artificial Sequence
  Synthetic
ccgggugaatcaatgugggaat

SEQ ID NO: 36988 - DNA, 23 bp, Artificial Sequence
  Synthetic
gccctguggatggaaggauaaga

SEQ ID NO: 36989 - DNA, 22 bp, Artificial Sequence
  Synthetic
agggcctauctatgggactugg

SEQ ID NO: 36990 - DNA, 22 bp, Artificial Sequence
  Synthetic
ctgtggaaucacagcccagaua

SEQ ID NO: 36991 - DNA, 22 bp, Artificial Sequence
  Synthetic
gattttgggcucctaggugact

SEQ ID NO: 36992 - DNA, 22 bp, Artificial Sequence
  Synthetic
ggccccugaatguagagaaagt

SEQ ID NO: 36993 - DNA, 23 bp, Artificial Sequence
  Synthetic
tctagcccugtctgtccataucc

SEQ ID NO: 36994 - DNA, 25 bp, Artificial Sequence
  Synthetic
aaaagaagaggucagagctgagtug

SEQ ID NO: 36995 - DNA, 21 bp, Artificial Sequence
  Synthetic
gagttugggaccccttgtcug

SEQ ID NO: 36996 - DNA, 23 bp, Artificial Sequence
  Synthetic
ggagcaguggttgatgatugagg

SEQ ID NO: 36997 - DNA, 24 bp, Artificial Sequence
  Synthetic
ctgacttgaugatgtcccagtuct

SEQ ID NO: 36998 - DNA, 25 bp, Artificial Sequence
  Synthetic
aataugagccaagaactaugaagcc

SEQ ID NO: 36999 - DNA, 22 bp, Artificial Sequence
  Synthetic
attcccctgutcattcccugac

SEQ ID NO: 37000 - DNA, 21 bp, Artificial Sequence
  Synthetic
ggucacaagggccagaguaac

SEQ ID NO: 37001 - DNA, 26 bp, Artificial Sequence
  Synthetic
caccttatacttugtctcctccauca

SEQ ID NO: 37002 - DNA, 18 bp, Artificial Sequence
  Synthetic
ctgcacaggguctggugt

SEQ ID NO: 37003 - DNA, 20 bp, Artificial Sequence
  Synthetic
cagtgcccacgutgacatuc

SEQ ID NO: 37004 - DNA, 20 bp, Artificial Sequence
  Synthetic
ggagagcccugcaaauggag

SEQ ID NO: 37005 - DNA, 21 bp, Artificial Sequence
  Synthetic
cccttcctgucctgacctcut

SEQ ID NO: 37006 - DNA, 22 bp, Artificial Sequence
  Synthetic
ggcccuaggaagggtaaucagt

SEQ ID NO: 37007 - DNA, 22 bp, Artificial Sequence
  Synthetic
ccctcaucgagaggugaacaga

SEQ ID NO: 37008 - DNA, 25 bp, Artificial Sequence
  Synthetic
gaacccucagaccccutatattcua

SEQ ID NO: 37009 - DNA, 25 bp, Artificial Sequence
  Synthetic
cttaatgtggugatgttgggaaugg

SEQ ID NO: 37010 - DNA, 22 bp, Artificial Sequence
  Synthetic
ttccccaucagcctactcctua

SEQ ID NO: 37011 - DNA, 24 bp, Artificial Sequence
  Synthetic
gttctgacaugtccttcctuccag

SEQ ID NO: 37012 - DNA, 22 bp, Artificial Sequence
  Synthetic
gccucagggagaggtagaauct

SEQ ID NO: 37013 - DNA, 25 bp, Artificial Sequence
  Synthetic
tcagtaacttgutccccttccuaca

SEQ ID NO: 37014 - DNA, 27 bp, Artificial Sequence
  Synthetic
acttgatuaaaaagctgtcuccacaga

SEQ ID NO: 37015 - DNA, 25 bp, Artificial Sequence
  Synthetic
cctcgatcttucattcctcctucag

SEQ ID NO: 37016 - DNA, 22 bp, Artificial Sequence
  Synthetic
cccaatgguccctaacttccuc

SEQ ID NO: 37017 - DNA, 23 bp, Artificial Sequence
  Synthetic
ccctgattccugagctttctcuc

SEQ ID NO: 37018 - DNA, 21 bp, Artificial Sequence
  Synthetic
actcgcacugagtagcugact

SEQ ID NO: 37019 - DNA, 21 bp, Artificial Sequence
  Synthetic
gtgaaggtauggctcccugac

SEQ ID NO: 37020 - DNA, 20 bp, Artificial Sequence
  Synthetic
gctaatgcggugtggcuagt

SEQ ID NO: 37021 - DNA, 21 bp, Artificial Sequence
  Synthetic
cagagttugctagcccuggag

SEQ ID NO: 37022 - DNA, 21 bp, Artificial Sequence
  Synthetic
gggtcugaaagagcaauggag

SEQ ID NO: 37023 - DNA, 21 bp, Artificial Sequence
  Synthetic
catgccagcauttccctcuga

SEQ ID NO: 37024 - DNA, 21 bp, Artificial Sequence
  Synthetic
cacaagccucctgcagtacuc

SEQ ID NO: 37025 - DNA, 24 bp, Artificial Sequence
  Synthetic
ccacctacccugacttctctctua

SEQ ID NO: 37026 - DNA, 18 bp, Artificial Sequence
  Synthetic
cgacaccucccccacuca

SEQ ID NO: 37027 - DNA, 23 bp, Artificial Sequence
  Synthetic
ggtctgacccugttatctugcag

SEQ ID NO: 37028 - DNA, 21 bp, Artificial Sequence
  Synthetic
tgaagaaagugcccagcctuc

SEQ ID NO: 37029 - DNA, 22 bp, Artificial Sequence
  Synthetic
ctgtagagucctgagtcugcaa

SEQ ID NO: 37030 - DNA, 20 bp, Artificial Sequence
  Synthetic
ggtcagaggcuggcagaaut

SEQ ID NO: 37031 - DNA, 24 bp, Artificial Sequence
  Synthetic
ctgggcaagauaaagtgacctcut

SEQ ID NO: 37032 - DNA, 21 bp, Artificial Sequence
  Synthetic
ggacctugtagccagucacag

SEQ ID NO: 37033 - DNA, 24 bp, Artificial Sequence
  Synthetic
tgattccatccuatgtgctccuga

SEQ ID NO: 37034 - DNA, 20 bp, Artificial Sequence
  Synthetic
tcactcctgcucggtcctua

SEQ ID NO: 37035 - DNA, 23 bp, Artificial Sequence
  Synthetic
gatgaccccaaaugaagtgucca

SEQ ID NO: 37036 - DNA, 22 bp, Artificial Sequence
  Synthetic
tggtcagccacauggagaatug

SEQ ID NO: 37037 - DNA, 22 bp, Artificial Sequence
  Synthetic
gatacccguaaccctcacccua

SEQ ID NO: 37038 - DNA, 19 bp, Artificial Sequence
  Synthetic
ggaccucgcggaaatugct

SEQ ID NO: 37039 - DNA, 20 bp, Artificial Sequence
  Synthetic
accatcccaagucccaguga

SEQ ID NO: 37040 - DNA, 23 bp, Artificial Sequence
  Synthetic
tcagtgggaucatggacugaaac

SEQ ID NO: 37041 - DNA, 19 bp, Artificial Sequence
  Synthetic
gggccacaccaccuatucc

SEQ ID NO: 37042 - DNA, 21 bp, Artificial Sequence
  Synthetic
tgtcccuggacgactgtacuc

SEQ ID NO: 37043 - DNA, 20 bp, Artificial Sequence
  Synthetic
ggtgctgaugcgtggctuat

SEQ ID NO: 37044 - DNA, 20 bp, Artificial Sequence
  Synthetic
cctgaccuccaggacccuat

SEQ ID NO: 37045 - DNA, 21 bp, Artificial Sequence
  Synthetic
gcctctgccugtatgggaaug

SEQ ID NO: 37046 - DNA, 21 bp, Artificial Sequence
  Synthetic
ccccacaccacutctugacac

SEQ ID NO: 37047 - DNA, 21 bp, Artificial Sequence
  Synthetic
ggatgcugggacctggauact

SEQ ID NO: 37048 - DNA, 27 bp, Artificial Sequence
  Synthetic
acaaggauactgctctaugaacaagga

SEQ ID NO: 37049 - DNA, 22 bp, Artificial Sequence
  Synthetic
aaaacgctccacuttggtccua

SEQ ID NO: 37050 - DNA, 23 bp, Artificial Sequence
  Synthetic
ggaccacuguaaacagggaggaa

SEQ ID NO: 37051 - DNA, 19 bp, Artificial Sequence
  Synthetic
gcaguaccgggacagucac

SEQ ID NO: 37052 - DNA, 19 bp, Artificial Sequence
  Synthetic
ccacccuccaagaucagca

SEQ ID NO: 37053 - DNA, 17 bp, Artificial Sequence
  Synthetic
cgccgtcugcactcgut

SEQ ID NO: 37054 - DNA, 20 bp, Artificial Sequence
  Synthetic
ccaggacucagctggagtug

SEQ ID NO: 37055 - DNA, 22 bp, Artificial Sequence
  Synthetic
ccgcatcgacuatgatgguaag

SEQ ID NO: 37056 - DNA, 22 bp, Artificial Sequence
  Synthetic
aatctgagacugccctcctgua

SEQ ID NO: 37057 - DNA, 20 bp, Artificial Sequence
  Synthetic
ctacccuggcctctguaacg

SEQ ID NO: 37058 - DNA, 22 bp, Artificial Sequence
  Synthetic
tccacctcaucgatcatcucct

SEQ ID NO: 37059 - DNA, 20 bp, Artificial Sequence
  Synthetic
ctgctgagcccugactacug

SEQ ID NO: 37060 - DNA, 19 bp, Artificial Sequence
  Synthetic
gctacuaaccccgcacuct

SEQ ID NO: 37061 - DNA, 20 bp, Artificial Sequence
  Synthetic
gcuggaggatacuacacgca

SEQ ID NO: 37062 - DNA, 21 bp, Artificial Sequence
  Synthetic
tgccggtttucccaacttcua

SEQ ID NO: 37063 - DNA, 20 bp, Artificial Sequence
  Synthetic
aaccggcgutgaggagauac

SEQ ID NO: 37064 - DNA, 27 bp, Artificial Sequence
  Synthetic
gctcttcuaaattgtgtgucccaaaat

SEQ ID NO: 37065 - DNA, 33 bp, Artificial Sequence
  Synthetic
tttagaacttatgttutaaaaacgacaactuct

SEQ ID NO: 37066 - DNA, 24 bp, Artificial Sequence
  Synthetic
ccataactuaaggtgccttugggt

SEQ ID NO: 37067 - DNA, 26 bp, Artificial Sequence
  Synthetic
cacuattatcuagcccaaggcacaaa

SEQ ID NO: 37068 - DNA, 29 bp, Artificial Sequence
  Synthetic
cttgaggaaaacucatctctggtaatugt

SEQ ID NO: 37069 - DNA, 28 bp, Artificial Sequence
  Synthetic
gggataaagtggautacctggatgatut

SEQ ID NO: 37070 - DNA, 28 bp, Artificial Sequence
  Synthetic
ggcacatgtugaatattgcataugaagg

SEQ ID NO: 37071 - DNA, 28 bp, Artificial Sequence
  Synthetic
aaccatctagutaagcaacatucacaga

SEQ ID NO: 37072 - DNA, 27 bp, Artificial Sequence
  Synthetic
caaaatgaccuaaaaagctggaagugt

SEQ ID NO: 37073 - DNA, 28 bp, Artificial Sequence
  Synthetic
gccagggtttauctttgatgttctcuaa

SEQ ID NO: 37074 - DNA, 28 bp, Artificial Sequence
  Synthetic
tcaatttcaatgcutaaccagtttugct

SEQ ID NO: 37075 - DNA, 28 bp, Artificial Sequence
  Synthetic
gctgaagacacacaguattttgtaaugt

SEQ ID NO: 37076 - DNA, 25 bp, Artificial Sequence
  Synthetic
tcagatcagauccagactgugaaga

SEQ ID NO: 37077 - DNA, 28 bp, Artificial Sequence
  Synthetic
ccaaattagcauacctgaagtcctaugt

SEQ ID NO: 37078 - DNA, 27 bp, Artificial Sequence
  Synthetic
cagttataagccauctcatcccaucat

SEQ ID NO: 37079 - DNA, 19 bp, Artificial Sequence
  Synthetic
caaagcgcacuagtuggca

SEQ ID NO: 37080 - DNA, 21 bp, Artificial Sequence
  Synthetic
aattgtgcautcccgugcaag

SEQ ID NO: 37081 - DNA, 24 bp, Artificial Sequence
  Synthetic
tctgaggcccautgtgaaaactut

SEQ ID NO: 37082 - DNA, 18 bp, Artificial Sequence
  Synthetic
gcatggucgcagucacga

SEQ ID NO: 37083 - DNA, 28 bp, Artificial Sequence
  Synthetic
aaaggttttatagucttggcctgttuct

SEQ ID NO: 37084 - DNA, 29 bp, Artificial Sequence
  Synthetic
gaccagtcttgauactaacaaatacugaa

SEQ ID NO: 37085 - DNA, 17 bp, Artificial Sequence
  Synthetic
ggccguggtcguggaat

SEQ ID NO: 37086 - DNA, 24 bp, Artificial Sequence
  Synthetic
gggaggtcacuttataagggtcug

SEQ ID NO: 37087 - DNA, 24 bp, Artificial Sequence
  Synthetic
caggtagtacugtgggtacucgaa

SEQ ID NO: 37088 - DNA, 18 bp, Artificial Sequence
  Synthetic
gcgcacgccuctcaacua

SEQ ID NO: 37089 - DNA, 19 bp, Artificial Sequence
  Synthetic
tctcccagaccccuccaug

SEQ ID NO: 37090 - DNA, 22 bp, Artificial Sequence
  Synthetic
tgtaagcccaugagcaactucc

SEQ ID NO: 37091 - DNA, 23 bp, Artificial Sequence
  Synthetic
gaaccagacacuactgggttuga

SEQ ID NO: 37092 - DNA, 21 bp, Artificial Sequence
  Synthetic
ttcgtgguccacttcaccauc

SEQ ID NO: 37093 - DNA, 19 bp, Artificial Sequence
  Synthetic
gtccagaccauggctccuc

SEQ ID NO: 37094 - DNA, 24 bp, Artificial Sequence
  Synthetic
gcautctacatctucacccaccag

SEQ ID NO: 37095 - DNA, 21 bp, Artificial Sequence
  Synthetic
ggaagtagcutgtcctuggca

SEQ ID NO: 37096 - DNA, 19 bp, Artificial Sequence
  Synthetic
cuaccgtguccaagacgga

SEQ ID NO: 37097 - DNA, 18 bp, Artificial Sequence
  Synthetic
tcucaggctgucccaggt

SEQ ID NO: 37098 - DNA, 28 bp, Artificial Sequence
  Synthetic
cacaacaaaagtgcuctagttctctcua

SEQ ID NO: 37099 - DNA, 27 bp, Artificial Sequence
  Synthetic
ttttgtttttcaaaccucctgcttcuc

SEQ ID NO: 37100 - DNA, 20 bp, Artificial Sequence
  Synthetic
cctccaggacutgcaucgaa

SEQ ID NO: 37101 - DNA, 26 bp, Artificial Sequence
  Synthetic
agatttgcgtuagagtttttgtuggg

SEQ ID NO: 37102 - DNA, 20 bp, Artificial Sequence
  Synthetic
cggtugcccggtgaatttut

SEQ ID NO: 37103 - DNA, 21 bp, Artificial Sequence
  Synthetic
cggcctguactcggttuacac

SEQ ID NO: 37104 - DNA, 19 bp, Artificial Sequence
  Synthetic
cgcgtcuagccatggacug

SEQ ID NO: 37105 - DNA, 23 bp, Artificial Sequence
  Synthetic
ctttctacugggctcgtctctut

SEQ ID NO: 37106 - DNA, 18 bp, Artificial Sequence
  Synthetic
ctgcaucctcgcauccgt

SEQ ID NO: 37107 - DNA, 18 bp, Artificial Sequence
  Synthetic
gcctgcagutcgcttgug

SEQ ID NO: 37108 - DNA, 17 bp, Artificial Sequence
  Synthetic
gtguacggcccguacga

SEQ ID NO: 37109 - DNA, 19 bp, Artificial Sequence
  Synthetic
ccccaaguacctgcaguct

SEQ ID NO: 37110 - DNA, 19 bp, Artificial Sequence
  Synthetic
gccggtagutgcccttcuc

SEQ ID NO: 37111 - DNA, 20 bp, Artificial Sequence
  Synthetic
ctgtccggcauctaccagua

SEQ ID NO: 37112 - DNA, 18 bp, Artificial Sequence
  Synthetic
ggctccutgactgugcga

SEQ ID NO: 37113 - DNA, 22 bp, Artificial Sequence
  Synthetic
ccgcagtcuccagaagttugag

SEQ ID NO: 37114 - DNA, 19 bp, Artificial Sequence
  Synthetic
ggagtggagcucagccuct

SEQ ID NO: 37115 - DNA, 18 bp, Artificial Sequence
  Synthetic
ggucgtgctucgggaaac

SEQ ID NO: 37116 - DNA, 31 bp, Artificial Sequence
  Synthetic
agcttatgtttcaugttgtgtatcttttgug

SEQ ID NO: 37117 - DNA, 28 bp, Artificial Sequence
  Synthetic
cccaaaaccuaccagtgtcataaactua

SEQ ID NO: 37118 - DNA, 28 bp, Artificial Sequence
  Synthetic
tggtagccttucagagatttatccguat

SEQ ID NO: 37119 - DNA, 31 bp, Artificial Sequence
  Synthetic
acctctatcatttuaagcatgtagcaaauca

SEQ ID NO: 37120 - DNA, 21 bp, Artificial Sequence
  Synthetic
cctcatggutgcccatctucc

SEQ ID NO: 37121 - DNA, 19 bp, Artificial Sequence
  Synthetic
gtcctcgugggaggcatuc

SEQ ID NO: 37122 - DNA, 19 bp, Artificial Sequence
  Synthetic
cattggtugcggccatcuc

SEQ ID NO: 37123 - DNA, 19 bp, Artificial Sequence
  Synthetic
gggccutagtcccucagct

SEQ ID NO: 37124 - DNA, 21 bp, Artificial Sequence
  Synthetic
gcattggaggcaucaaggugg

SEQ ID NO: 37125 - DNA, 20 bp, Artificial Sequence
  Synthetic
aacutgttcuccacgacgca

SEQ ID NO: 37126 - DNA, 17 bp, Artificial Sequence
  Synthetic
gccccugagcgtcauct

SEQ ID NO: 37127 - DNA, 20 bp, Artificial Sequence
  Synthetic
attcaccuccacgtgctuga

SEQ ID NO: 37128 - DNA, 19 bp, Artificial Sequence
  Synthetic
ctgagccggguctcttguc

SEQ ID NO: 37129 - DNA, 21 bp, Artificial Sequence
  Synthetic
ggcaugggacagagtcgtuac

SEQ ID NO: 37130 - DNA, 22 bp, Artificial Sequence
  Synthetic
ggccucaacgcccatgtcttug

SEQ ID NO: 37131 - DNA, 21 bp, Artificial Sequence
  Synthetic
gcgggagaucttgugcacggt

SEQ ID NO: 37132 - DNA, 18 bp, Artificial Sequence
  Synthetic
tgtaccuccacgcccugt

SEQ ID NO: 37133 - DNA, 17 bp, Artificial Sequence
  Synthetic
gcccucagcaccacuga

SEQ ID NO: 37134 - DNA, 22 bp, Artificial Sequence
  Synthetic
ccgtgaagaugctgaaagguga

SEQ ID NO: 37135 - DNA, 17 bp, Artificial Sequence
  Synthetic
gccgcuaccgcaccuac

SEQ ID NO: 37136 - DNA, 21 bp, Artificial Sequence
  Synthetic
ctactcctucgacaccugcaa

SEQ ID NO: 37137 - DNA, 20 bp, Artificial Sequence
  Synthetic
gctgaagccuctccaccuct

SEQ ID NO: 37138 - DNA, 18 bp, Artificial Sequence
  Synthetic
tcaugccaguaggacgcc

SEQ ID NO: 37139 - DNA, 17 bp, Artificial Sequence
  Synthetic
tccuggctcugcccagt

SEQ ID NO: 37140 - DNA, 21 bp, Artificial Sequence
  Synthetic
ccttcaggcugttcccgaaua

SEQ ID NO: 37141 - DNA, 18 bp, Artificial Sequence
  Synthetic
gcacucacgtcgguggac

SEQ ID NO: 37142 - DNA, 18 bp, Artificial Sequence
  Synthetic
agagguggctgugcgaag

SEQ ID NO: 37143 - DNA, 17 bp, Artificial Sequence
  Synthetic
cccutcacguccgcgag

SEQ ID NO: 37144 - DNA, 26 bp, Artificial Sequence
  Synthetic
accatgtatucacttcagugaaaggg

SEQ ID NO: 37145 - DNA, 24 bp, Artificial Sequence
  Synthetic
caagactacgaaccugaagccuaa

SEQ ID NO: 37146 - DNA, 28 bp, Artificial Sequence
  Synthetic
gagagcaaatgatuctcactaagcacua

SEQ ID NO: 37147 - DNA, 30 bp, Artificial Sequence
  Synthetic
cttcatcatgttcuttttgtgcttctuact

SEQ ID NO: 37148 - DNA, 23 bp, Artificial Sequence
  Synthetic
ggaaucttgaatacugggccaca

SEQ ID NO: 37149 - DNA, 25 bp, Artificial Sequence
  Synthetic
cagcaattuaaggctagctugagac

SEQ ID NO: 37150 - DNA, 26 bp, Artificial Sequence
  Synthetic
tatcgaactggcuaacatgttttuct

SEQ ID NO: 37151 - DNA, 29 bp, Artificial Sequence
  Synthetic
acttgagtgaaagaugaagtggtaacauc

SEQ ID NO: 37152 - DNA, 24 bp, Artificial Sequence
  Synthetic
ctgctgucagatggctuaaagaga

SEQ ID NO: 37153 - DNA, 23 bp, Artificial Sequence
  Synthetic
gctaactcctutttcctgctgug

SEQ ID NO: 37154 - DNA, 31 bp, Artificial Sequence
  Synthetic
ctgatcgtagtuctgatttcatttgttucat

SEQ ID NO: 37155 - DNA, 23 bp, Artificial Sequence
  Synthetic
ccccagaccuctgcaatugaaaa

SEQ ID NO: 37156 - DNA, 24 bp, Artificial Sequence
  Synthetic
gcatacaucaggccatctccuact

SEQ ID NO: 37157 - DNA, 30 bp, Artificial Sequence
  Synthetic
tttagcaaatauctgctgaaugaacaaaaa

SEQ ID NO: 37158 - DNA, 31 bp, Artificial Sequence
  Synthetic
tgttggttgtcatuaaatgtttctgatcuct

SEQ ID NO: 37159 - DNA, 28 bp, Artificial Sequence
  Synthetic
gaaagatacagaaugcaagcaagctuac

SEQ ID NO: 37160 - DNA, 27 bp, Artificial Sequence
  Synthetic
tgaaagattuccaggacctaatgctug

SEQ ID NO: 37161 - DNA, 26 bp, Artificial Sequence
  Synthetic
cccaaugagaaccttttgtuccagaa

SEQ ID NO: 37162 - DNA, 18 bp, Artificial Sequence
  Synthetic
cccggcgagcutaactug

SEQ ID NO: 37163 - DNA, 21 bp, Artificial Sequence
  Synthetic
ctcgguggaaagagctggtut

SEQ ID NO: 37164 - DNA, 19 bp, Artificial Sequence
  Synthetic
gcccugacagacgacaugg

SEQ ID NO: 37165 - DNA, 22 bp, Artificial Sequence
  Synthetic
tgagcagugcctttttcuggag

SEQ ID NO: 37166 - DNA, 27 bp, Artificial Sequence
  Synthetic
gtttagccaccuttcctaatttuccaa

SEQ ID NO: 37167 - DNA, 24 bp, Artificial Sequence
  Synthetic
acagaauacacacactgacauggg

SEQ ID NO: 37168 - DNA, 22 bp, Artificial Sequence
  Synthetic
caagtugaggcactgaagaugg

SEQ ID NO: 37169 - DNA, 31 bp, Artificial Sequence
  Synthetic
cctcaagttuacaagagggaatautgaauaa

SEQ ID NO: 37170 - DNA, 32 bp, Artificial Sequence
  Synthetic
aagaatattttagacugcttaaagcaattgut

SEQ ID NO: 37171 - DNA, 23 bp, Artificial Sequence
  Synthetic
cactcuccagaacggcttgauac

SEQ ID NO: 37172 - DNA, 27 bp, Artificial Sequence
  Synthetic
tgatgtaagtatugctcttctgcaguc

SEQ ID NO: 37173 - DNA, 31 bp, Artificial Sequence
  Synthetic
agtttcaaataagtugtactgccaagtuact

SEQ ID NO: 37174 - DNA, 28 bp, Artificial Sequence
  Synthetic
gagcttttaaguggtagccatagtauga

SEQ ID NO: 37175 - DNA, 33 bp, Artificial Sequence
  Synthetic
aauaactacctatttttauacccacaaacaaga

SEQ ID NO: 37176 - DNA, 30 bp, Artificial Sequence
  Synthetic
gtttatcatacagacacutcatttggagua

SEQ ID NO: 37177 - DNA, 27 bp, Artificial Sequence
  Synthetic
gtgaccaggguttgtaatcttctgtua

SEQ ID NO: 37178 - DNA, 27 bp, Artificial Sequence
  Synthetic
ctcatgauaaggatgatatgucgcgaa

SEQ ID NO: 37179 - DNA, 22 bp, Artificial Sequence
  Synthetic
tcttgtcaucaggctgtgagug

SEQ ID NO: 37180 - DNA, 28 bp, Artificial Sequence
  Synthetic
agggttatattagugatccctgcataut

SEQ ID NO: 37181 - DNA, 31 bp, Artificial Sequence
  Synthetic
catgtctatgctcutcatcaaatgaaagtut

SEQ ID NO: 37182 - DNA, 26 bp, Artificial Sequence
  Synthetic
agttaccaactuggtaccagtttgut

SEQ ID NO: 37183 - DNA, 30 bp, Artificial Sequence
  Synthetic
attccagcatatcgucttagtgtaatacug

SEQ ID NO: 37184 - DNA, 28 bp, Artificial Sequence
  Synthetic
agcttggctucaagttgtctttttaaug

SEQ ID NO: 37185 - DNA, 23 bp, Artificial Sequence
  Synthetic
agattgcacaacugccctcuaag

SEQ ID NO: 37186 - DNA, 33 bp, Artificial Sequence
  Synthetic
gtaacatagaagtuaatgagagacaaatuccaa

SEQ ID NO: 37187 - DNA, 25 bp, Artificial Sequence
  Synthetic
cgguaagtaagagugccaaccaaaa

SEQ ID NO: 37188 - DNA, 26 bp, Artificial Sequence
  Synthetic
tgttactgcauacacattgtgaccut

SEQ ID NO: 37189 - DNA, 22 bp, Artificial Sequence
  Synthetic
cccccatgucccataatgctuc

SEQ ID NO: 37190 - DNA, 21 bp, Artificial Sequence
  Synthetic
ggctcaagcutgccatctcut

SEQ ID NO: 37191 - DNA, 29 bp, Artificial Sequence
  Synthetic
ggacagtcatgtugccagtattaaaatug

SEQ ID NO: 37192 - DNA, 24 bp, Artificial Sequence
  Synthetic
auccagcaacagaaaauccaggaa

SEQ ID NO: 37193 - DNA, 32 bp, Artificial Sequence
  Synthetic
cgacttagtgaaatugtaagtgtttgaatgug

SEQ ID NO: 37194 - DNA, 26 bp, Artificial Sequence
  Synthetic
tcaaatgaaacccucgattgaaucct

SEQ ID NO: 37195 - DNA, 23 bp, Artificial Sequence
  Synthetic
tgggtctugcccatctttcatuc

SEQ ID NO: 37196 - DNA, 22 bp, Artificial Sequence
  Synthetic
gtttctccauacaggucacggg

SEQ ID NO: 37197 - DNA, 28 bp, Artificial Sequence
  Synthetic
tgatccacaugacgtttctcttcatuat

SEQ ID NO: 37198 - DNA, 23 bp, Artificial Sequence
  Synthetic
tcaagcagugagaatacguccac

SEQ ID NO: 37199 - DNA, 30 bp, Artificial Sequence
  Synthetic
atcttcagctgaugacaaagatgataauga

SEQ ID NO: 37200 - DNA, 22 bp, Artificial Sequence
  Synthetic
aagatcctgugagcgaagtucc

SEQ ID NO: 37201 - DNA, 28 bp, Artificial Sequence
  Synthetic
gaactgacagaaguacatctgcuaaaca

SEQ ID NO: 37202 - DNA, 23 bp, Artificial Sequence
  Synthetic
cagaaguaaaacaccuccaccac

SEQ ID NO: 37203 - DNA, 21 bp, Artificial Sequence
  Synthetic
gcacucaggctggaugaacaa

SEQ ID NO: 37204 - DNA, 30 bp, Artificial Sequence
  Synthetic
gccuaaagaatcaaaugaaaaccaagagaa

SEQ ID NO: 37205 - DNA, 22 bp, Artificial Sequence
  Synthetic
tttguacacaggcagctgacut

SEQ ID NO: 37206 - DNA, 24 bp, Artificial Sequence
  Synthetic
caatcgaaucccctccaaaugagt

SEQ ID NO: 37207 - DNA, 28 bp, Artificial Sequence
  Synthetic
catagcagaautaatgcattcugcaaga

SEQ ID NO: 37208 - DNA, 28 bp, Artificial Sequence
  Synthetic
aagaaaccaactucaccagtaaaaccua

SEQ ID NO: 37209 - DNA, 32 bp, Artificial Sequence
  Synthetic
gcaaaacttcctcugactctatcttcattaut

SEQ ID NO: 37210 - DNA, 26 bp, Artificial Sequence
  Synthetic
ttccagggaaaaggcugaatuaagaa

SEQ ID NO: 37211 - DNA, 21 bp, Artificial Sequence
  Synthetic
cttttcaucagttgcugcccc

SEQ ID NO: 37212 - DNA, 24 bp, Artificial Sequence
  Synthetic
cagggagaaccaaguaaaccucaa

SEQ ID NO: 37213 - DNA, 25 bp, Artificial Sequence
  Synthetic
ccacccatattuctgggactatgut

SEQ ID NO: 37214 - DNA, 31 bp, Artificial Sequence
  Synthetic
cctgattcagaaaautttgattggaaagcua

SEQ ID NO: 37215 - DNA, 29 bp, Artificial Sequence
  Synthetic
ggttttagaattcgugggcctttatuact

SEQ ID NO: 37216 - DNA, 22 bp, Artificial Sequence
  Synthetic
aaaugaaacagcccctucaagc

SEQ ID NO: 37217 - DNA, 21 bp, Artificial Sequence
  Synthetic
gagaagtgguggctgttugac

SEQ ID NO: 37218 - DNA, 23 bp, Artificial Sequence
  Synthetic
tgcccagcaaccautaaguagac

SEQ ID NO: 37219 - DNA, 28 bp, Artificial Sequence
  Synthetic
ggataaacctgtutgtttggtaaggtuc

SEQ ID NO: 37220 - DNA, 30 bp, Artificial Sequence
  Synthetic
tcttcaactaaaucaagtggaagtgaauct

SEQ ID NO: 37221 - DNA, 26 bp, Artificial Sequence
  Synthetic
tgtggauagagacataucaggaaggg

SEQ ID NO: 37222 - DNA, 28 bp, Artificial Sequence
  Synthetic
cattctgaaaguccttctagactuccaa

SEQ ID NO: 37223 - DNA, 28 bp, Artificial Sequence
  Synthetic
gcggatacttggutttctttactttgut

SEQ ID NO: 37224 - DNA, 27 bp, Artificial Sequence
  Synthetic
ctaatttatcaaauggcacctgctgut

SEQ ID NO: 37225 - DNA, 21 bp, Artificial Sequence
  Synthetic
gcatgggaacacugccatuac

SEQ ID NO: 37226 - DNA, 25 bp, Artificial Sequence
  Synthetic
agttctataguggaacguaccccat

SEQ ID NO: 37227 - DNA, 27 bp, Artificial Sequence
  Synthetic
ctttgtgttgtuattcactggagtugg

SEQ ID NO: 37228 - DNA, 26 bp, Artificial Sequence
  Synthetic
gggtcttacctugtgacatctgttua

SEQ ID NO: 37229 - DNA, 22 bp, Artificial Sequence
  Synthetic
ctaaccaucaagagtgccuccc

SEQ ID NO: 37230 - DNA, 23 bp, Artificial Sequence
  Synthetic
gttgttctgucacccagttggua

SEQ ID NO: 37231 - DNA, 27 bp, Artificial Sequence
  Synthetic
tcaatattccauagcctgtucccaaag

SEQ ID NO: 37232 - DNA, 22 bp, Artificial Sequence
  Synthetic
aagtggccugtgctcttagtuc

SEQ ID NO: 37233 - DNA, 23 bp, Artificial Sequence
  Synthetic
cctccucagtttcugagaccaac

SEQ ID NO: 37234 - DNA, 23 bp, Artificial Sequence
  Synthetic
ctttgatgagcagcuggtttgug

SEQ ID NO: 37235 - DNA, 22 bp, Artificial Sequence
  Synthetic
tcctagggaugggtggcaatua

SEQ ID NO: 37236 - DNA, 21 bp, Artificial Sequence
  Synthetic
atgugacaccccaggucaaag

SEQ ID NO: 37237 - DNA, 20 bp, Artificial Sequence
  Synthetic
cagaggugctcauggcagag

SEQ ID NO: 37238 - DNA, 19 bp, Artificial Sequence
  Synthetic
guagccucccagaccaagg

SEQ ID NO: 37239 - DNA, 22 bp, Artificial Sequence
  Synthetic
cagagugggagaacaagtccug

SEQ ID NO: 37240 - DNA, 17 bp, Artificial Sequence
  Synthetic
ggccugcagtugccaag

SEQ ID NO: 37241 - DNA, 20 bp, Artificial Sequence
  Synthetic
tguggagacaggagcuggat

SEQ ID NO: 37242 - DNA, 20 bp, Artificial Sequence
  Synthetic
cuaggaaaacagggccugca

SEQ ID NO: 37243 - DNA, 28 bp, Artificial Sequence
  Synthetic
tctaggtucagagaggaaaagucaaaac

SEQ ID NO: 37244 - DNA, 17 bp, Artificial Sequence
  Synthetic
ccugcaacccccucagc

SEQ ID NO: 37245 - DNA, 24 bp, Artificial Sequence
  Synthetic
agattgtagacagagucccagugt

SEQ ID NO: 37246 - DNA, 21 bp, Artificial Sequence
  Synthetic
gtccaggucaaggcugaaaag

SEQ ID NO: 37247 - DNA, 20 bp, Artificial Sequence
  Synthetic
aaaacccaugctctgccuga

SEQ ID NO: 37248 - DNA, 21 bp, Artificial Sequence
  Synthetic
gacttcuccagcaggctcauc

SEQ ID NO: 37249 - DNA, 21 bp, Artificial Sequence
  Synthetic
aggaguccaaaggaccacgua

SEQ ID NO: 37250 - DNA, 22 bp, Artificial Sequence
  Synthetic
ccaggugaaagcugaaaagcag

SEQ ID NO: 37251 - DNA, 21 bp, Artificial Sequence
  Synthetic
caacacuagcccccagucaag

SEQ ID NO: 37252 - DNA, 25 bp, Artificial Sequence
  Synthetic
ctccaatacuattatcccccugcaa

SEQ ID NO: 37253 - DNA, 19 bp, Artificial Sequence
  Synthetic
tccattcccucccccucac

SEQ ID NO: 37254 - DNA, 20 bp, Artificial Sequence
  Synthetic
accagaucagagctgcctug

SEQ ID NO: 37255 - DNA, 22 bp, Artificial Sequence
  Synthetic
ccgttcugaggagtgagtgtug

SEQ ID NO: 37256 - DNA, 25 bp, Artificial Sequence
  Synthetic
tctgttuaggaucaggagtcttcut

SEQ ID NO: 37257 - DNA, 21 bp, Artificial Sequence
  Synthetic
cagggtucacacagaagctug

SEQ ID NO: 37258 - DNA, 23 bp, Artificial Sequence
  Synthetic
tgtcgacccuaatcgtaguccag

SEQ ID NO: 37259 - DNA, 20 bp, Artificial Sequence
  Synthetic
ctcccaccacugcauaaggg

SEQ ID NO: 37260 - DNA, 21 bp, Artificial Sequence
  Synthetic
gcaucccaaggacttgugagt

SEQ ID NO: 37261 - DNA, 18 bp, Artificial Sequence
  Synthetic
gcacctuctacgcuccgt

SEQ ID NO: 37262 - DNA, 23 bp, Artificial Sequence
  Synthetic
ctgagagcucagatgacagugag

SEQ ID NO: 37263 - DNA, 24 bp, Artificial Sequence
  Synthetic
tgagtctgagauatggagcugagg

SEQ ID NO: 37264 - DNA, 21 bp, Artificial Sequence
  Synthetic
gcctcttucacaatgggctuc

SEQ ID NO: 37265 - DNA, 23 bp, Artificial Sequence
  Synthetic
ccctccugcagaccttaactuac

SEQ ID NO: 37266 - DNA, 21 bp, Artificial Sequence
  Synthetic
tcagtggugaaggtccugact

SEQ ID NO: 37267 - DNA, 20 bp, Artificial Sequence
  Synthetic
gctttccccutggaagucgt

SEQ ID NO: 37268 - DNA, 20 bp, Artificial Sequence
  Synthetic
cctgtgcaccucccaacaut

SEQ ID NO: 37269 - DNA, 22 bp, Artificial Sequence
  Synthetic
ggtctgttutctggccugagac

SEQ ID NO: 37270 - DNA, 24 bp, Artificial Sequence
  Synthetic
cattttguaagaatggcatugcct

SEQ ID NO: 37271 - DNA, 20 bp, Artificial Sequence
  Synthetic
gcttcgcucccgggaatuac

SEQ ID NO: 37272 - DNA, 22 bp, Artificial Sequence
  Synthetic
gcggaaacgaugcctgtattuc

SEQ ID NO: 37273 - DNA, 24 bp, Artificial Sequence
  Synthetic
tccacattccutcatcatctugcc

SEQ ID NO: 37274 - DNA, 22 bp, Artificial Sequence
  Synthetic
gctaaagccauttcagccccut

SEQ ID NO: 37275 - DNA, 27 bp, Artificial Sequence
  Synthetic
gcactgttaagutctcccttttctuac

SEQ ID NO: 37276 - DNA, 23 bp, Artificial Sequence
  Synthetic
taatggatucgctgcattuagct

SEQ ID NO: 37277 - DNA, 28 bp, Artificial Sequence
  Synthetic
tcaatgcaaaccaaagucagaagttuac

SEQ ID NO: 37278 - DNA, 26 bp, Artificial Sequence
  Synthetic
gaaggacagaagutcaaagagcuaca

SEQ ID NO: 37279 - DNA, 30 bp, Artificial Sequence
  Synthetic
taattctgtactuggaatacatgccatuat

SEQ ID NO: 37280 - DNA, 17 bp, Artificial Sequence
  Synthetic
ctgcgtcugcgccaaug

SEQ ID NO: 37281 - DNA, 21 bp, Artificial Sequence
  Synthetic
acgcacacacacguacacaua

SEQ ID NO: 37282 - DNA, 25 bp, Artificial Sequence
  Synthetic
tgggtgtacuatgcagttaucgact

SEQ ID NO: 37283 - DNA, 23 bp, Artificial Sequence
  Synthetic
aggacucaaggaagugcaaacaa

SEQ ID NO: 37284 - DNA, 26 bp, Artificial Sequence
  Synthetic
gaattttacttgugtggacgaugcag

SEQ ID NO: 37285 - DNA, 22 bp, Artificial Sequence
  Synthetic
agctaauggcaagaauggcgat

SEQ ID NO: 37286 - DNA, 28 bp, Artificial Sequence
  Synthetic
cccttttcacuaggagacacaaacatua

SEQ ID NO: 37287 - DNA, 23 bp, Artificial Sequence
  Synthetic
aagtttccctutaagtggccugt

SEQ ID NO: 37288 - DNA, 21 bp, Artificial Sequence
  Synthetic
cttcttuggcggcaatgaugt

SEQ ID NO: 37289 - DNA, 25 bp, Artificial Sequence
  Synthetic
tcttcgaattgaugtctgcctucaa

SEQ ID NO: 37290 - DNA, 26 bp, Artificial Sequence
  Synthetic
agcttctgattucatctccctttucc

SEQ ID NO: 37291 - DNA, 27 bp, Artificial Sequence
  Synthetic
caggaatacautttcggttcttugacc

SEQ ID NO: 37292 - DNA, 25 bp, Artificial Sequence
  Synthetic
cctgttgctuaatggctgttugaaa

SEQ ID NO: 37293 - DNA, 30 bp, Artificial Sequence
  Synthetic
gcgtatcagatauatccccagagauaaagt

SEQ ID NO: 37294 - DNA, 28 bp, Artificial Sequence
  Synthetic
cactgcaaagaaagaauttgagactuca

SEQ ID NO: 37295 - DNA, 24 bp, Artificial Sequence
  Synthetic
ggtcacugcttccatcaucagaag

SEQ ID NO: 37296 - DNA, 21 bp, Artificial Sequence
  Synthetic
gctgccacaaacacuagggua

SEQ ID NO: 37297 - DNA, 26 bp, Artificial Sequence
  Synthetic
gagttctcacuggatatgcttgauga

SEQ ID NO: 37298 - DNA, 23 bp, Artificial Sequence
  Synthetic
gaggagtgcaguttgaaatgcug

SEQ ID NO: 37299 - DNA, 23 bp, Artificial Sequence
  Synthetic
ggctttgaugttccagagucact

SEQ ID NO: 37300 - DNA, 22 bp, Artificial Sequence
  Synthetic
gcggttgaugactgcucaaaac

SEQ ID NO: 37301 - DNA, 21 bp, Artificial Sequence
  Synthetic
tgtcggacaguaagccaggua

SEQ ID NO: 37302 - DNA, 25 bp, Artificial Sequence
  Synthetic
cacagtgaaccguaaagcctuaaag

SEQ ID NO: 37303 - DNA, 28 bp, Artificial Sequence
  Synthetic
cagattgcttaaccutgctatcgaaaug

SEQ ID NO: 37304 - DNA, 22 bp, Artificial Sequence
  Synthetic
cgttuaaaccaaaggcgcacua

SEQ ID NO: 37305 - DNA, 23 bp, Artificial Sequence
  Synthetic
gcagtcagcaugattttgctcug

SEQ ID NO: 37306 - DNA, 26 bp, Artificial Sequence
  Synthetic
ggtctcauaaaaacagtgggtttucc

SEQ ID NO: 37307 - DNA, 25 bp, Artificial Sequence
  Synthetic
ggaccagugaaagtttgctgaaaut

SEQ ID NO: 37308 - DNA, 24 bp, Artificial Sequence
  Synthetic
attucaaccaaagaagagccucca

SEQ ID NO: 37309 - DNA, 23 bp, Artificial Sequence
  Synthetic
cugctcaaatacugagaccccaa

SEQ ID NO: 37310 - DNA, 23 bp, Artificial Sequence
  Synthetic
tcaatatccauggcagcugacaa

SEQ ID NO: 37311 - DNA, 28 bp, Artificial Sequence
  Synthetic
gcacttcaaacutactactgcatuacgt

SEQ ID NO: 37312 - DNA, 24 bp, Artificial Sequence
  Synthetic
gggtcaaauggaagagacaucaat

SEQ ID NO: 37313 - DNA, 25 bp, Artificial Sequence
  Synthetic
cacaagugggcaaacatttctcuac

SEQ ID NO: 37314 - DNA, 30 bp, Artificial Sequence
  Synthetic
tgaacttttcaccuaatggtttagcattug

SEQ ID NO: 37315 - DNA, 26 bp, Artificial Sequence
  Synthetic
ctggacacacucttcatgguaaaact

SEQ ID NO: 37316 - DNA, 31 bp, Artificial Sequence
  Synthetic
agtgctaacaaauagacttgaataacucaca

SEQ ID NO: 37317 - DNA, 27 bp, Artificial Sequence
  Synthetic
ggtaaagtgatuagggcagatgauact

SEQ ID NO: 37318 - DNA, 24 bp, Artificial Sequence
  Synthetic
cttgcagtcutgtgatctgaaugc

SEQ ID NO: 37319 - DNA, 27 bp, Artificial Sequence
  Synthetic
gagatgagtgcuattcttcaggctuac

SEQ ID NO: 37320 - DNA, 21 bp, Artificial Sequence
  Synthetic
cctcgagcugttcctuccaac

SEQ ID NO: 37321 - DNA, 25 bp, Artificial Sequence
  Synthetic
gtcugtgtttgccugagaaacaaaa

SEQ ID NO: 37322 - DNA, 25 bp, Artificial Sequence
  Synthetic
gtttgccttttucaggacgtgaaut

SEQ ID NO: 37323 - DNA, 20 bp, Artificial Sequence
  Synthetic
tcatagagcagcaugcggut

SEQ ID NO: 37324 - DNA, 26 bp, Artificial Sequence
  Synthetic
tgtatacattuggataccagtgucct

SEQ ID NO: 37325 - DNA, 27 bp, Artificial Sequence
  Synthetic
cagtgaaaacagcauttcccattacut

SEQ ID NO: 37326 - DNA, 24 bp, Artificial Sequence
  Synthetic
ctgttctctugggagttggtaucc

SEQ ID NO: 37327 - DNA, 22 bp, Artificial Sequence
  Synthetic
agcagaaguctagaaggguggt

SEQ ID NO: 37328 - DNA, 22 bp, Artificial Sequence
  Synthetic
gggugaaaucacaaaggagcga

SEQ ID NO: 37329 - DNA, 24 bp, Artificial Sequence
  Synthetic
gaacgaguagcggtacaaauggat

SEQ ID NO: 37330 - DNA, 22 bp, Artificial Sequence
  Synthetic
ccagcuccttttguaagcagca

SEQ ID NO: 37331 - DNA, 25 bp, Artificial Sequence
  Synthetic
tttatctgacatuttgggtgccuga

SEQ ID NO: 37332 - DNA, 25 bp, Artificial Sequence
  Synthetic
cccagccuttagataaggucagaga

SEQ ID NO: 37333 - DNA, 23 bp, Artificial Sequence
  Synthetic
ggatttauccagccttgggucag

SEQ ID NO: 37334 - DNA, 21 bp, Artificial Sequence
  Synthetic
gacaaaccccaugcctcttug

SEQ ID NO: 37335 - DNA, 22 bp, Artificial Sequence
  Synthetic
ggcatcttcucatcagcctgug

SEQ ID NO: 37336 - DNA, 24 bp, Artificial Sequence
  Synthetic
gcaagcugttaaatcacucaccca

SEQ ID NO: 37337 - DNA, 25 bp, Artificial Sequence
  Synthetic
gagacctaaaagautgcccactcut

SEQ ID NO: 37338 - DNA, 21 bp, Artificial Sequence
  Synthetic
cccugggaaaagcctcaucac

SEQ ID NO: 37339 - DNA, 30 bp, Artificial Sequence
  Synthetic
gacattgattgguactacttctgttcugat

SEQ ID NO: 37340 - DNA, 19 bp, Artificial Sequence
  Synthetic
cccgcggaucaacactcug

SEQ ID NO: 37341 - DNA, 17 bp, Artificial Sequence
  Synthetic
ggacgguccctcccugt

SEQ ID NO: 37342 - DNA, 29 bp, Artificial Sequence
  Synthetic
aaggttttcttccuggtagtatgtgttut

SEQ ID NO: 37343 - DNA, 23 bp, Artificial Sequence
  Synthetic
cgatccatgcuctgtggacaaua

SEQ ID NO: 37344 - DNA, 22 bp, Artificial Sequence
  Synthetic
gaggctacacutgtcagagugg

SEQ ID NO: 37345 - DNA, 26 bp, Artificial Sequence
  Synthetic
tgaggtcuagaagactctttgucaca

SEQ ID NO: 37346 - DNA, 24 bp, Artificial Sequence
  Synthetic
ctgaggccaguatcugaagaaaag

SEQ ID NO: 37347 - DNA, 29 bp, Artificial Sequence
  Synthetic
tcgatgcactugagaaataaatcagctua

SEQ ID NO: 37348 - DNA, 25 bp, Artificial Sequence
  Synthetic
gggtgauggaagtttaatgaugact

SEQ ID NO: 37349 - DNA, 25 bp, Artificial Sequence
  Synthetic
gcctaccucaattttgtcugaagct

SEQ ID NO: 37350 - DNA, 24 bp, Artificial Sequence
  Synthetic
aaactgctuactagctttcaugca

SEQ ID NO: 37351 - DNA, 25 bp, Artificial Sequence
  Synthetic
gatgaacatcaaugcacttggugat

SEQ ID NO: 37352 - DNA, 30 bp, Artificial Sequence
  Synthetic
gacaatcctugaaacagaactactagauga

SEQ ID NO: 37353 - DNA, 22 bp, Artificial Sequence
  Synthetic
ggttctggguctgagacgauac

SEQ ID NO: 37354 - DNA, 23 bp, Artificial Sequence
  Synthetic
gattgtacagcugaagcctcgua

SEQ ID NO: 37355 - DNA, 31 bp, Artificial Sequence
  Synthetic
actctagattaaaugttgctttcttgaugga

SEQ ID NO: 37356 - DNA, 22 bp, Artificial Sequence
  Synthetic
agcctggcuctagcatgtttuc

SEQ ID NO: 37357 - DNA, 22 bp, Artificial Sequence
  Synthetic
cctaagtggcccugaggacaua

SEQ ID NO: 37358 - DNA, 21 bp, Artificial Sequence
  Synthetic
agacgauagccgacctugagt

SEQ ID NO: 37359 - DNA, 27 bp, Artificial Sequence
  Synthetic
tgauacaaagagaaagatgucccaagc

SEQ ID NO: 37360 - DNA, 28 bp, Artificial Sequence
  Synthetic
agaaaaugacaaguaagaaacatggaug

SEQ ID NO: 37361 - DNA, 25 bp, Artificial Sequence
  Synthetic
ccaggcaaaauactagcagauacct

SEQ ID NO: 37362 - DNA, 22 bp, Artificial Sequence
  Synthetic
gctgaggttcucaaccagctua

SEQ ID NO: 37363 - DNA, 27 bp, Artificial Sequence
  Synthetic
aaaugaagauccagaaaaagaagctug

SEQ ID NO: 37364 - DNA, 22 bp, Artificial Sequence
  Synthetic
ccgcccaatutggtgacttgua

SEQ ID NO: 37365 - DNA, 23 bp, Artificial Sequence
  Synthetic
gaagtctgagaguggatctgcug

SEQ ID NO: 37366 - DNA, 30 bp, Artificial Sequence
  Synthetic
cttgggtatataucaagtgaatttcugggt

SEQ ID NO: 37367 - DNA, 21 bp, Artificial Sequence
  Synthetic
gcggcguttagcatcauagag

SEQ ID NO: 37368 - DNA, 29 bp, Artificial Sequence
  Synthetic
agggtacaaauaacagtggtaaaagagug

SEQ ID NO: 37369 - DNA, 26 bp, Artificial Sequence
  Synthetic
cttaattgaatuggcgcaaagtucag

SEQ ID NO: 37370 - DNA, 28 bp, Artificial Sequence
  Synthetic
tgatttaaaactguggaactgtagcugt

SEQ ID NO: 37371 - DNA, 27 bp, Artificial Sequence
  Synthetic
gggcaggtttuaagagatatgtgauga

SEQ ID NO: 37372 - DNA, 26 bp, Artificial Sequence
  Synthetic
gggaaaagtacugcttctttctugga

SEQ ID NO: 37373 - DNA, 21 bp, Artificial Sequence
  Synthetic
gcaagctucgctttgaacugg

SEQ ID NO: 37374 - DNA, 25 bp, Artificial Sequence
  Synthetic
cacccgacugacttatgagatugaa

SEQ ID NO: 37375 - DNA, 23 bp, Artificial Sequence
  Synthetic
tcttcctgcaguagaacccucaa

SEQ ID NO: 37376 - DNA, 28 bp, Artificial Sequence
  Synthetic
ggagatatccaugcaaaaagaggaugat

SEQ ID NO: 37377 - DNA, 25 bp, Artificial Sequence
  Synthetic
cctgcttcagutctatctccagaug

SEQ ID NO: 37378 - DNA, 28 bp, Artificial Sequence
  Synthetic
tcaggacaaaaauaaggagaucgagaga

SEQ ID NO: 37379 - DNA, 23 bp, Artificial Sequence
  Synthetic
gtatcctctuccttctgcauggt

SEQ ID NO: 37380 - DNA, 22 bp, Artificial Sequence
  Synthetic
tcucaggaggguggaagaagac

SEQ ID NO: 37381 - DNA, 30 bp, Artificial Sequence
  Synthetic
ttctttgtcgaucagttgttttaaccttuc

SEQ ID NO: 37382 - DNA, 24 bp, Artificial Sequence
  Synthetic
gugcgacggagacaauaaacaaac

SEQ ID NO: 37383 - DNA, 22 bp, Artificial Sequence
  Synthetic
cctctugcaggagtcttcugac

SEQ ID NO: 37384 - DNA, 22 bp, Artificial Sequence
  Synthetic
ctggagcaggcauccattgtua

SEQ ID NO: 37385 - DNA, 27 bp, Artificial Sequence
  Synthetic
cttctgcttttaucttctatcgcctuc

SEQ ID NO: 37386 - DNA, 24 bp, Artificial Sequence
  Synthetic
gaagcggacagugataaaaaugca

SEQ ID NO: 37387 - DNA, 28 bp, Artificial Sequence
  Synthetic
agtgaagctgugatcaagtatttgugaa

SEQ ID NO: 37388 - DNA, 26 bp, Artificial Sequence
  Synthetic
tgcaaaaucaactcuagaggcagaaa

SEQ ID NO: 37389 - DNA, 27 bp, Artificial Sequence
  Synthetic
tcttcaattctcutgatctctgctugg

SEQ ID NO: 37390 - DNA, 20 bp, Artificial Sequence
  Synthetic
tgtgaguggaccgtugacac

SEQ ID NO: 37391 - DNA, 23 bp, Artificial Sequence
  Synthetic
cgaaggaauggctggattucaga

SEQ ID NO: 37392 - DNA, 26 bp, Artificial Sequence
  Synthetic
ggcagctacagguggtataattgauc

SEQ ID NO: 37393 - DNA, 28 bp, Artificial Sequence
  Synthetic
gcattccggttuctctatcaatcaaaut

SEQ ID NO: 37394 - DNA, 26 bp, Artificial Sequence
  Synthetic
gaatgauccccgagatagucagaaaa

SEQ ID NO: 37395 - DNA, 24 bp, Artificial Sequence
  Synthetic
agtggacgguctcaatauaccaga

SEQ ID NO: 37396 - DNA, 23 bp, Artificial Sequence
  Synthetic
ggccatgaaaautggcttagucc

SEQ ID NO: 37397 - DNA, 28 bp, Artificial Sequence
  Synthetic
ggaacaaagagaugatgtttcctgttuc

SEQ ID NO: 37398 - DNA, 22 bp, Artificial Sequence
  Synthetic
atugauccaaaggagagccauc

SEQ ID NO: 37399 - DNA, 28 bp, Artificial Sequence
  Synthetic
tguttcttcttttcttucagaggcagaa

SEQ ID NO: 37400 - DNA, 23 bp, Artificial Sequence
  Synthetic
acctucaaagaactgtgugagca

SEQ ID NO: 37401 - DNA, 26 bp, Artificial Sequence
  Synthetic
gacaccattttucaaggagatcaugt

SEQ ID NO: 37402 - DNA, 21 bp, Artificial Sequence
  Synthetic
tggaagaaucgagccccatug

SEQ ID NO: 37403 - DNA, 23 bp, Artificial Sequence
  Synthetic
catgucttggtcaaucacaccct

SEQ ID NO: 37404 - DNA, 22 bp, Artificial Sequence
  Synthetic
tcctggagutccagtaccucac

SEQ ID NO: 37405 - DNA, 28 bp, Artificial Sequence
  Synthetic
gagcgatttauggcatccttataggaua

SEQ ID NO: 37406 - DNA, 28 bp, Artificial Sequence
  Synthetic
catttagcagtagutctattgggcacua

SEQ ID NO: 37407 - DNA, 29 bp, Artificial Sequence
  Synthetic
augagctaagaagauaaaaagccagaaca

SEQ ID NO: 37408 - DNA, 31 bp, Artificial Sequence
  Synthetic
cctacagtacaguaatctggatacaaaugat

SEQ ID NO: 37409 - DNA, 24 bp, Artificial Sequence
  Synthetic
cgcaaacuggagaagucagaagac

SEQ ID NO: 37410 - DNA, 22 bp, Artificial Sequence
  Synthetic
gcccttttuaacagagccgtuc

SEQ ID NO: 37411 - DNA, 25 bp, Artificial Sequence
  Synthetic
atttgttccctuccttcttcctcuc

SEQ ID NO: 37412 - DNA, 19 bp, Artificial Sequence
  Synthetic
gacggcgaacugtaucacg

SEQ ID NO: 37413 - DNA, 23 bp, Artificial Sequence
  Synthetic
tgaaaggcuccatcatccagtug

SEQ ID NO: 37414 - DNA, 21 bp, Artificial Sequence
  Synthetic
aagttcucgctctugggaagg

SEQ ID NO: 37415 - DNA, 20 bp, Artificial Sequence
  Synthetic
ccctgtcaucggctaccuga

SEQ ID NO: 37416 - DNA, 21 bp, Artificial Sequence
  Synthetic
cutccctaaaugcaggccact

SEQ ID NO: 37417 - DNA, 19 bp, Artificial Sequence
  Synthetic
cggcaagucggttccucac

SEQ ID NO: 37418 - DNA, 21 bp, Artificial Sequence
  Synthetic
gctgctcucagctttctuggt

SEQ ID NO: 37419 - DNA, 23 bp, Artificial Sequence
  Synthetic
agaaccaguacgtccacattucc

SEQ ID NO: 37420 - DNA, 17 bp, Artificial Sequence
  Synthetic
cttgtgucccggcguct

SEQ ID NO: 37421 - DNA, 20 bp, Artificial Sequence
  Synthetic
cagttcatugggtccuccca

SEQ ID NO: 37422 - DNA, 21 bp, Artificial Sequence
  Synthetic
ccctguggacaatgctttgug

SEQ ID NO: 37423 - DNA, 20 bp, Artificial Sequence
  Synthetic
gaatgccugccucccaagaa

SEQ ID NO: 37424 - DNA, 26 bp, Artificial Sequence
  Synthetic
agccactacacauattgttcttggut

SEQ ID NO: 37425 - DNA, 28 bp, Artificial Sequence
  Synthetic
acutctctgugaaaggaagaaagaauac

SEQ ID NO: 37426 - DNA, 26 bp, Artificial Sequence
  Synthetic
gaaagatucaaaggatcacucaccct

SEQ ID NO: 37427 - DNA, 32 bp, Artificial Sequence
  Synthetic
ttggactgattuagagaatggagttattaaut

SEQ ID NO: 37428 - DNA, 25 bp, Artificial Sequence
  Synthetic
attttccaggucaggactttaucct

SEQ ID NO: 37429 - DNA, 23 bp, Artificial Sequence
  Synthetic
tttggatttccuctcctgcacuc

SEQ ID NO: 37430 - DNA, 23 bp, Artificial Sequence
  Synthetic
gguagagggagagaaacaauguc

SEQ ID NO: 37431 - DNA, 24 bp, Artificial Sequence
  Synthetic
aggaggaggagagaguagaguaua

SEQ ID NO: 37432 - DNA, 18 bp, Artificial Sequence
  Synthetic
ggagccauccccgttucc

SEQ ID NO: 37433 - DNA, 25 bp, Artificial Sequence
  Synthetic
caagugcaaagaaaaagcuagttuc

SEQ ID NO: 37434 - DNA, 22 bp, Artificial Sequence
  Synthetic
cgaactccaugggtttccagua

SEQ ID NO: 37435 - DNA, 24 bp, Artificial Sequence
  Synthetic
gaaaagctcugacaaccucaggaa

SEQ ID NO: 37436 - DNA, 22 bp, Artificial Sequence
  Synthetic
ccttgaatuctgcccugacaca

SEQ ID NO: 37437 - DNA, 24 bp, Artificial Sequence
  Synthetic
tccactcugccactagagtauagg

SEQ ID NO: 37438 - DNA, 22 bp, Artificial Sequence
  Synthetic
acuacccccagaacaucaccat

SEQ ID NO: 37439 - DNA, 23 bp, Artificial Sequence
  Synthetic
cctggctcucatcagtcacauac

SEQ ID NO: 37440 - DNA, 26 bp, Artificial Sequence
  Synthetic
ctaaattgagaugggtgaaugaggaa

SEQ ID NO: 37441 - DNA, 24 bp, Artificial Sequence
  Synthetic
ctagtuttgtctcctucccacagt

SEQ ID NO: 37442 - DNA, 18 bp, Artificial Sequence
  Synthetic
gagccccagaugccacuc

SEQ ID NO: 37443 - DNA, 21 bp, Artificial Sequence
  Synthetic
gcctgtcugcttcatgggaua

SEQ ID NO: 37444 - DNA, 21 bp, Artificial Sequence
  Synthetic
cctccagccugagtcugagat

SEQ ID NO: 37445 - DNA, 19 bp, Artificial Sequence
  Synthetic
gtgtgguccagctcaccut

SEQ ID NO: 37446 - DNA, 24 bp, Artificial Sequence
  Synthetic
gucaccaaaauccagaaaccacua

SEQ ID NO: 37447 - DNA, 19 bp, Artificial Sequence
  Synthetic
ccuctcccucacccaacag

SEQ ID NO: 37448 - DNA, 22 bp, Artificial Sequence
  Synthetic
tcgagugagccaaagatcucct

SEQ ID NO: 37449 - DNA, 23 bp, Artificial Sequence
  Synthetic
cctcacaccaaccutgtctctug

SEQ ID NO: 37450 - DNA, 22 bp, Artificial Sequence
  Synthetic
gggagtcuatttgtccuggaga

SEQ ID NO: 37451 - DNA, 20 bp, Artificial Sequence
  Synthetic
cctgtggacutgggacctug

SEQ ID NO: 37452 - DNA, 21 bp, Artificial Sequence
  Synthetic
tgagtcccaacuccaacucca

SEQ ID NO: 37453 - DNA, 21 bp, Artificial Sequence
  Synthetic
cattctctugactgccugcac

SEQ ID NO: 37454 - DNA, 18 bp, Artificial Sequence
  Synthetic
cuccccaacagccuccac

SEQ ID NO: 37455 - DNA, 18 bp, Artificial Sequence
  Synthetic
gggatgcucctccugacc

SEQ ID NO: 37456 - DNA, 20 bp, Artificial Sequence
  Synthetic
catcuggagacggaggcauc

SEQ ID NO: 37457 - DNA, 25 bp, Artificial Sequence
  Synthetic
tgtaugtgtgtgtcuaggacaggaa

SEQ ID NO: 37458 - DNA, 22 bp, Artificial Sequence
  Synthetic
gggtaaagaggaugaggctugg

SEQ ID NO: 37459 - DNA, 25 bp, Artificial Sequence
  Synthetic
ggtattgacagutttggaggtgaug

SEQ ID NO: 37460 - DNA, 23 bp, Artificial Sequence
  Synthetic
acccatatucccaggtctgucat

SEQ ID NO: 37461 - DNA, 21 bp, Artificial Sequence
  Synthetic
ttcaagattcccugggccauc

SEQ ID NO: 37462 - DNA, 25 bp, Artificial Sequence
  Synthetic
ccacatctcautctcttttgtcucc

SEQ ID NO: 37463 - DNA, 23 bp, Artificial Sequence
  Synthetic
cacctccaucctaagcaaugaca

SEQ ID NO: 37464 - DNA, 18 bp, Artificial Sequence
  Synthetic
gccagggagutggcagug

SEQ ID NO: 37465 - DNA, 24 bp, Artificial Sequence
  Synthetic
ctgggcccaugttttgtatactug

SEQ ID NO: 37466 - DNA, 17 bp, Artificial Sequence
  Synthetic
ccctgcucccacuccca

SEQ ID NO: 37467 - DNA, 25 bp, Artificial Sequence
  Synthetic
gtctctgacuctcttctctuaccca

SEQ ID NO: 37468 - DNA, 23 bp, Artificial Sequence
  Synthetic
gtcagccauctcatcuggaaaga

SEQ ID NO: 37469 - DNA, 21 bp, Artificial Sequence
  Synthetic
gccatgacuccttcctccugt

SEQ ID NO: 37470 - DNA, 21 bp, Artificial Sequence
  Synthetic
agccccuggtggtaucagaat

SEQ ID NO: 37471 - DNA, 26 bp, Artificial Sequence
  Synthetic
atcttccccaaaugtctggttcauag

SEQ ID NO: 37472 - DNA, 23 bp, Artificial Sequence
  Synthetic
ccctcaaatcuccaactaccugt

SEQ ID NO: 37473 - DNA, 25 bp, Artificial Sequence
  Synthetic
caggaactctcuctgcttttgtcua

SEQ ID NO: 37474 - DNA, 21 bp, Artificial Sequence
  Synthetic
cctgagaauggguagccagga

SEQ ID NO: 37475 - DNA, 21 bp, Artificial Sequence
  Synthetic
gtaagtugaccccgagctcug

SEQ ID NO: 37476 - DNA, 21 bp, Artificial Sequence
  Synthetic
gggaactcagcutccttccug

SEQ ID NO: 37477 - DNA, 23 bp, Artificial Sequence
  Synthetic
cttcccacuccttgactctgtut

SEQ ID NO: 37478 - DNA, 23 bp, Artificial Sequence
  Synthetic
ccuauagagggaagaggagtugt

SEQ ID NO: 37479 - DNA, 23 bp, Artificial Sequence
  Synthetic
ctcacccugggtaatgttctcuc

SEQ ID NO: 37480 - DNA, 23 bp, Artificial Sequence
  Synthetic
cctgcatcugtgctttcuggaat

SEQ ID NO: 37481 - DNA, 23 bp, Artificial Sequence
  Synthetic
cctcctctcacucctaactgcut

SEQ ID NO: 37482 - DNA, 23 bp, Artificial Sequence
  Synthetic
ggaguctggagacucaggagaat

SEQ ID NO: 37483 - DNA, 24 bp, Artificial Sequence
  Synthetic
gccctctcaccuctatctttcuca

SEQ ID NO: 37484 - DNA, 22 bp, Artificial Sequence
  Synthetic
gttggaaggaucaagcuccuaa

SEQ ID NO: 37485 - DNA, 23 bp, Artificial Sequence
  Synthetic
gaggccccuttataaatgccuct

SEQ ID NO: 37486 - DNA, 21 bp, Artificial Sequence
  Synthetic
cctttcagugcaagggucact

SEQ ID NO: 37487 - DNA, 22 bp, Artificial Sequence
  Synthetic
tgctgggautttgtctgtgucc

SEQ ID NO: 37488 - DNA, 27 bp, Artificial Sequence
  Synthetic
ctgaaacccttaauttcctgtatccut

SEQ ID NO: 37489 - DNA, 22 bp, Artificial Sequence
  Synthetic
gtgcctggucacctgtttcuag

SEQ ID NO: 37490 - DNA, 22 bp, Artificial Sequence
  Synthetic
gaaggcagcuagaaagguggag

SEQ ID NO: 37491 - DNA, 28 bp, Artificial Sequence
  Synthetic
actaaagggacacagutttatccatuca

SEQ ID NO: 37492 - DNA, 23 bp, Artificial Sequence
  Synthetic
ggtaaagctgcugtgccttcuag

SEQ ID NO: 37493 - DNA, 26 bp, Artificial Sequence
  Synthetic
cagtgaaagtaauggatgggcuaagt

SEQ ID NO: 37494 - DNA, 23 bp, Artificial Sequence
  Synthetic
ggaagccuggagaactaggucat

SEQ ID NO: 37495 - DNA, 24 bp, Artificial Sequence
  Synthetic
cttgttctgacacutcccttgtuc

SEQ ID NO: 37496 - DNA, 22 bp, Artificial Sequence
  Synthetic
gagacugagctggugaacagat

SEQ ID NO: 37497 - DNA, 23 bp, Artificial Sequence
  Synthetic
ggtguggatagttcuggaaaggg

SEQ ID NO: 37498 - DNA, 18 bp, Artificial Sequence
  Synthetic
cctgccgcacacucacuc

SEQ ID NO: 37499 - DNA, 22 bp, Artificial Sequence
  Synthetic
ggaccttcuctccttgaccuca

SEQ ID NO: 37500 - DNA, 24 bp, Artificial Sequence
  Synthetic
acaagccaccuaacaggaaatuac

SEQ ID NO: 37501 - DNA, 24 bp, Artificial Sequence
  Synthetic
tgacccctacucttttgttccuca

SEQ ID NO: 37502 - DNA, 24 bp, Artificial Sequence
  Synthetic
ggutaaaaaucagaggcgacagga

SEQ ID NO: 37503 - DNA, 22 bp, Artificial Sequence
  Synthetic
ggctacatgugtgtctcctuca

SEQ ID NO: 37504 - DNA, 24 bp, Artificial Sequence
  Synthetic
cctcacgauaatcatccccauagc

SEQ ID NO: 37505 - DNA, 22 bp, Artificial Sequence
  Synthetic
cagccctaacauccccatcuac

SEQ ID NO: 37506 - DNA, 24 bp, Artificial Sequence
  Synthetic
gaaggtgtccuaggagatgatugc

SEQ ID NO: 37507 - DNA, 22 bp, Artificial Sequence
  Synthetic
tcaccccacaccutccaatuac

SEQ ID NO: 37508 - DNA, 31 bp, Artificial Sequence
  Synthetic
tgaaaataaaaaggcugatgaatgaggacua

SEQ ID NO: 37509 - DNA, 22 bp, Artificial Sequence
  Synthetic
cagcagcaaccaucaagactuc

SEQ ID NO: 37510 - DNA, 22 bp, Artificial Sequence
  Synthetic
cagaagtcaaucctgcctcuga

SEQ ID NO: 37511 - DNA, 25 bp, Artificial Sequence
  Synthetic
ttcacttgaaccucttccaccatut

SEQ ID NO: 37512 - DNA, 20 bp, Artificial Sequence
  Synthetic
cctcggaagacuggcugaga

SEQ ID NO: 37513 - DNA, 24 bp, Artificial Sequence
  Synthetic
actctgtgtguatctctctcggut

SEQ ID NO: 37514 - DNA, 22 bp, Artificial Sequence
  Synthetic
ccaggcaucaggactcctctua

SEQ ID NO: 37515 - DNA, 23 bp, Artificial Sequence
  Synthetic
tcatagtctgcuccctgtctuct

SEQ ID NO: 37516 - DNA, 21 bp, Artificial Sequence
  Synthetic
gcctgtacugccccattuaca

SEQ ID NO: 37517 - DNA, 26 bp, Artificial Sequence
  Synthetic
gctgatgtgaugtgctttctctuaca

SEQ ID NO: 37518 - DNA, 22 bp, Artificial Sequence
  Synthetic
ccagcugtgagaauccagacat

SEQ ID NO: 37519 - DNA, 29 bp, Artificial Sequence
  Synthetic
gtgttcacagtguggtttgatttacauag

SEQ ID NO: 37520 - DNA, 22 bp, Artificial Sequence
  Synthetic
gggaggaagauccatcccauct

SEQ ID NO: 37521 - DNA, 23 bp, Artificial Sequence
  Synthetic
ttgacaatcguctccttctugca

SEQ ID NO: 37522 - DNA, 18 bp, Artificial Sequence
  Synthetic
tcggctuccacctggtug

SEQ ID NO: 37523 - DNA, 20 bp, Artificial Sequence
  Synthetic
gcgattcucccagatugcct

SEQ ID NO: 37524 - DNA, 19 bp, Artificial Sequence
  Synthetic
acaggtugagctccuccgt

SEQ ID NO: 37525 - DNA, 22 bp, Artificial Sequence
  Synthetic
cccatcuccagctgtctgttuc

SEQ ID NO: 37526 - DNA, 22 bp, Artificial Sequence
  Synthetic
tgaactcgauctgcagcatguc

SEQ ID NO: 37527 - DNA, 21 bp, Artificial Sequence
  Synthetic
tgaagccguacctggctauct

SEQ ID NO: 37528 - DNA, 23 bp, Artificial Sequence
  Synthetic
cccuatcaatgagtugggcacaa

SEQ ID NO: 37529 - DNA, 21 bp, Artificial Sequence
  Synthetic
gactacactuggcaagcaugg

SEQ ID NO: 37530 - DNA, 20 bp, Artificial Sequence
  Synthetic
tggaaccuagcgtccagcua

SEQ ID NO: 37531 - DNA, 19 bp, Artificial Sequence
  Synthetic
catagcgguagtcgcgcut

SEQ ID NO: 37532 - DNA, 23 bp, Artificial Sequence
  Synthetic
gggtgatgugaatattgtuggca

SEQ ID NO: 37533 - DNA, 22 bp, Artificial Sequence
  Synthetic
ctctctttuaggccctccucct

SEQ ID NO: 37534 - DNA, 21 bp, Artificial Sequence
  Synthetic
gggtttugggctaaccaucat

SEQ ID NO: 37535 - DNA, 24 bp, Artificial Sequence
  Synthetic
tggcctccagguaatggactatua

SEQ ID NO: 37536 - DNA, 22 bp, Artificial Sequence
  Synthetic
tggcgagaagaacauggactug

SEQ ID NO: 37537 - DNA, 22 bp, Artificial Sequence
  Synthetic
gtgggccuttcagaatcuggaa

SEQ ID NO: 37538 - DNA, 22 bp, Artificial Sequence
  Synthetic
aacttcccugatcacagtugct

SEQ ID NO: 37539 - DNA, 23 bp, Artificial Sequence
  Synthetic
caagagcagutgctcagauacca

SEQ ID NO: 37540 - DNA, 22 bp, Artificial Sequence
  Synthetic
gacaatguggcggctaacttuc

SEQ ID NO: 37541 - DNA, 30 bp, Artificial Sequence
  Synthetic
gtcagaaatgcuaagtatgcaaaatgtgua

SEQ ID NO: 37542 - DNA, 26 bp, Artificial Sequence
  Synthetic
acttctgctuttgcttctttuaagcc

SEQ ID NO: 37543 - DNA, 20 bp, Artificial Sequence
  Synthetic
aucttctttuccccgccaca

SEQ ID NO: 37544 - DNA, 24 bp, Artificial Sequence
  Synthetic
cagttugacccagagaucaagact

SEQ ID NO: 37545 - DNA, 25 bp, Artificial Sequence
  Synthetic
tcctttattguccaaatgtcugcct

SEQ ID NO: 37546 - DNA, 27 bp, Artificial Sequence
  Synthetic
cacactctaaaagauaggctgaaugct

SEQ ID NO: 37547 - DNA, 29 bp, Artificial Sequence
  Synthetic
ttgatatatatucggccctatgcacttuc

SEQ ID NO: 37548 - DNA, 29 bp, Artificial Sequence
  Synthetic
tcagtgtaaguagattgacattugcaaca

SEQ ID NO: 37549 - DNA, 23 bp, Artificial Sequence
  Synthetic
catcgagucatcactgcucaaca

SEQ ID NO: 37550 - DNA, 26 bp, Artificial Sequence
  Synthetic
gccctatgugagttcatttccaucat

SEQ ID NO: 37551 - DNA, 31 bp, Artificial Sequence
  Synthetic
gctgggaaataguaatactcgaaagacuaac

SEQ ID NO: 37552 - DNA, 27 bp, Artificial Sequence
  Synthetic
catgaugttgaaatagtuggcaccaat

SEQ ID NO: 37553 - DNA, 22 bp, Artificial Sequence
  Synthetic
aggcaaaucaccaaagtcugct

SEQ ID NO: 37554 - DNA, 28 bp, Artificial Sequence
  Synthetic
aactggatauaacttctgaatugcccaa

SEQ ID NO: 37555 - DNA, 29 bp, Artificial Sequence
  Synthetic
tgatggcaagagugatggattacaaauaa

SEQ ID NO: 37556 - DNA, 29 bp, Artificial Sequence
  Synthetic
cctcattaatcttucaaagttcagctucc

SEQ ID NO: 37557 - DNA, 23 bp, Artificial Sequence
  Synthetic
tttggaugcaatguggaaagcat

SEQ ID NO: 37558 - DNA, 26 bp, Artificial Sequence
  Synthetic
gtttaggguttgaagaatugccaagt

SEQ ID NO: 37559 - DNA, 27 bp, Artificial Sequence
  Synthetic
caaatgcagagaacaguggaattaugc

SEQ ID NO: 37560 - DNA, 24 bp, Artificial Sequence
  Synthetic
tgcatggaugtatgaaauggcact

SEQ ID NO: 37561 - DNA, 25 bp, Artificial Sequence
  Synthetic
ccaagaggaggucgaattggtatuc

SEQ ID NO: 37562 - DNA, 25 bp, Artificial Sequence
  Synthetic
tgaattccuaagcacaatcugcact

SEQ ID NO: 37563 - DNA, 23 bp, Artificial Sequence
  Synthetic
agaatctctggcutcttggctut

SEQ ID NO: 37564 - DNA, 22 bp, Artificial Sequence
  Synthetic
agtctcuctgatccugccacaa

SEQ ID NO: 37565 - DNA, 28 bp, Artificial Sequence
  Synthetic
gccagtcauggagtacttttaaaugaca

SEQ ID NO: 37566 - DNA, 27 bp, Artificial Sequence
  Synthetic
gaaaattctcacagutgggatttcugg

SEQ ID NO: 37567 - DNA, 28 bp, Artificial Sequence
  Synthetic
ccgaaatatacaaautcagcctgacgua

SEQ ID NO: 37568 - DNA, 25 bp, Artificial Sequence
  Synthetic
ggtcttccuagctcattcactuacc

SEQ ID NO: 37569 - DNA, 25 bp, Artificial Sequence
  Synthetic
ccaatgccautgttatgctgtuaca

SEQ ID NO: 37570 - DNA, 28 bp, Artificial Sequence
  Synthetic
guatttctctaucagacacaagcacaca

SEQ ID NO: 37571 - DNA, 28 bp, Artificial Sequence
  Synthetic
atccctuagaaaaggaacaaaagctuct

SEQ ID NO: 37572 - DNA, 28 bp, Artificial Sequence
  Synthetic
ttccaaactcuttactgtgttguacaat

SEQ ID NO: 37573 - DNA, 26 bp, Artificial Sequence
  Synthetic
cctgaatcagcuttaaaatgguccct

SEQ ID NO: 37574 - DNA, 26 bp, Artificial Sequence
  Synthetic
acctgcctguttattaacagtaugac

SEQ ID NO: 37575 - DNA, 25 bp, Artificial Sequence
  Synthetic
atgcaagttguggcttttggtatut

SEQ ID NO: 37576 - DNA, 22 bp, Artificial Sequence
  Synthetic
ggttcugacctggtgauggaag

SEQ ID NO: 37577 - DNA, 29 bp, Artificial Sequence
  Synthetic
ggttccttactaaaugagcactattgugt

SEQ ID NO: 37578 - DNA, 21 bp, Artificial Sequence
  Synthetic
agccacgagggutagacaaug

SEQ ID NO: 37579 - DNA, 31 bp, Artificial Sequence
  Synthetic
aggaatgtattggautcagaatgagcaaaua

SEQ ID NO: 37580 - DNA, 23 bp, Artificial Sequence
  Synthetic
cgaccaaagcutgaatugaccaa

SEQ ID NO: 37581 - DNA, 30 bp, Artificial Sequence
  Synthetic
gccattgtgtaauaatctttctgtttucca

SEQ ID NO: 37582 - DNA, 24 bp, Artificial Sequence
  Synthetic
ggcccagcacaugtaattttgtug

SEQ ID NO: 37583 - DNA, 29 bp, Artificial Sequence
  Synthetic
gacctttgctguaacatgctgtatttuat

SEQ ID NO: 37584 - DNA, 30 bp, Artificial Sequence
  Synthetic
tgtgaaatcauaagacagccaaaacauaga

SEQ ID NO: 37585 - DNA, 28 bp, Artificial Sequence
  Synthetic
tctttcttuccagcaaccttatcauaca

SEQ ID NO: 37586 - DNA, 27 bp, Artificial Sequence
  Synthetic
aaacttaagagaccuaacatttugcca

SEQ ID NO: 37587 - DNA, 27 bp, Artificial Sequence
  Synthetic
agcatctctugttttcctaagugacat

SEQ ID NO: 37588 - DNA, 27 bp, Artificial Sequence
  Synthetic
ccctcaaaucccacatatcatctauca

SEQ ID NO: 37589 - DNA, 22 bp, Artificial Sequence
  Synthetic
ggagtgcaguttcaagtctugg

SEQ ID NO: 37590 - DNA, 27 bp, Artificial Sequence
  Synthetic
gcucattagacttuccaacaaaacact

SEQ ID NO: 37591 - DNA, 29 bp, Artificial Sequence
  Synthetic
gatgtcctcagtuctatcatcctctttut

SEQ ID NO: 37592 - DNA, 25 bp, Artificial Sequence
  Synthetic
acagtttccacagugacaatctcut

SEQ ID NO: 37593 - DNA, 22 bp, Artificial Sequence
  Synthetic
acttttccucgggctgcttuag

SEQ ID NO: 37594 - DNA, 22 bp, Artificial Sequence
  Synthetic
cagccaggaacutgactccaua

SEQ ID NO: 37595 - DNA, 28 bp, Artificial Sequence
  Synthetic
gactgacaatttuccctttgtccatuag

SEQ ID NO: 37596 - DNA, 27 bp, Artificial Sequence
  Synthetic
cagtaagttgaggaugcttgtgtuagt

SEQ ID NO: 37597 - DNA, 22 bp, Artificial Sequence
  Synthetic
ccaacccagcuctctgtttucc

SEQ ID NO: 37598 - DNA, 26 bp, Artificial Sequence
  Synthetic
ctcagtaatcutgacggtaatuggct

SEQ ID NO: 37599 - DNA, 28 bp, Artificial Sequence
  Synthetic
catutcattaagattgaugacaccccat

SEQ ID NO: 37600 - DNA, 22 bp, Artificial Sequence
  Synthetic
ccaaugatcuggcacaaagagg

SEQ ID NO: 37601 - DNA, 26 bp, Artificial Sequence
  Synthetic
tggttctttccuaatggtgactgtut

SEQ ID NO: 37602 - DNA, 22 bp, Artificial Sequence
  Synthetic
ctgtagcatuagccaggacucg

SEQ ID NO: 37603 - DNA, 25 bp, Artificial Sequence
  Synthetic
agaatgggtagugaggaagcaaaug

SEQ ID NO: 37604 - DNA, 22 bp, Artificial Sequence
  Synthetic
ccacacagggugacattccuat

SEQ ID NO: 37605 - DNA, 22 bp, Artificial Sequence
  Synthetic
ctgttgcccuggaaauagaggt

SEQ ID NO: 37606 - DNA, 22 bp, Artificial Sequence
  Synthetic
ggcttccaccaugtaagcugaa

SEQ ID NO: 37607 - DNA, 27 bp, Artificial Sequence
  Synthetic
gatgatcaactuccttgcaatguaact

SEQ ID NO: 37608 - DNA, 20 bp, Artificial Sequence
  Synthetic
caattccccugacacucgct

SEQ ID NO: 37609 - DNA, 23 bp, Artificial Sequence
  Synthetic
gtgggaccauacttactgugagg

SEQ ID NO: 37610 - DNA, 22 bp, Artificial Sequence
  Synthetic
ccagactgugaagagggaugga

SEQ ID NO: 37611 - DNA, 25 bp, Artificial Sequence
  Synthetic
ggaaaggctucaccttcatgtauga

SEQ ID NO: 37612 - DNA, 21 bp, Artificial Sequence
  Synthetic
agggttucacaccagatgcuc

SEQ ID NO: 37613 - DNA, 24 bp, Artificial Sequence
  Synthetic
ccctaccutccacttaatugacct

SEQ ID NO: 37614 - DNA, 24 bp, Artificial Sequence
  Synthetic
cctagctgaaugctagaccaucaa

SEQ ID NO: 37615 - DNA, 23 bp, Artificial Sequence
  Synthetic
cgaggcugatgaactauacggat

SEQ ID NO: 37616 - DNA, 24 bp, Artificial Sequence
  Synthetic
tttcagaggacautgattgcccut

SEQ ID NO: 37617 - DNA, 25 bp, Artificial Sequence
  Synthetic
gactattcugcagttctucccagag

SEQ ID NO: 37618 - DNA, 27 bp, Artificial Sequence
  Synthetic
gttatattaacaguggtcacucaccca

SEQ ID NO: 37619 - DNA, 28 bp, Artificial Sequence
  Synthetic
ggtgatcccatutgaatatgctgtttut

SEQ ID NO: 37620 - DNA, 25 bp, Artificial Sequence
  Synthetic
gacagactacautggtctggttuga

SEQ ID NO: 37621 - DNA, 28 bp, Artificial Sequence
  Synthetic
aggaacatttgaugatagtgagagguct

SEQ ID NO: 37622 - DNA, 27 bp, Artificial Sequence
  Synthetic
catgttacaaaucagtgaggagugagt

SEQ ID NO: 37623 - DNA, 30 bp, Artificial Sequence
  Synthetic
acagaatttaccagaaaugtaaccatcuca

SEQ ID NO: 37624 - DNA, 23 bp, Artificial Sequence
  Synthetic
acagtgaagucactggcatugag

SEQ ID NO: 37625 - DNA, 26 bp, Artificial Sequence
  Synthetic
tccttgaggaugaaactctguaaggt

SEQ ID NO: 37626 - DNA, 22 bp, Artificial Sequence
  Synthetic
ctcaaggucaacaagcautcut

SEQ ID NO: 37627 - DNA, 30 bp, Artificial Sequence
  Synthetic
acttgatagtaatuggatcactggtctcua

SEQ ID NO: 37628 - DNA, 20 bp, Artificial Sequence
  Synthetic
cauagaacaggcccgtcucc

SEQ ID NO: 37629 - DNA, 22 bp, Artificial Sequence
  Synthetic
ggtugggaacaagggctcuaac

SEQ ID NO: 37630 - DNA, 25 bp, Artificial Sequence
  Synthetic
agagagcaauaccaataccuaccca

SEQ ID NO: 37631 - DNA, 29 bp, Artificial Sequence
  Synthetic
gcctttctatttuatctgaactgcaucca

SEQ ID NO: 37632 - DNA, 22 bp, Artificial Sequence
  Synthetic
cauaaagaccauccccagtuct

SEQ ID NO: 37633 - DNA, 29 bp, Artificial Sequence
  Synthetic
ccatcatttagtcutgtctgtcttgacut

SEQ ID NO: 37634 - DNA, 21 bp, Artificial Sequence
  Synthetic
gggctatcccaugatgctcug

SEQ ID NO: 37635 - DNA, 27 bp, Artificial Sequence
  Synthetic
cacttagtgtutgagaaagagaugcct

SEQ ID NO: 37636 - DNA, 25 bp, Artificial Sequence
  Synthetic
cctaggtuagcaaaggtgctttuga

SEQ ID NO: 37637 - DNA, 29 bp, Artificial Sequence
  Synthetic
cctgtaatgtttaugcgatctacatguct

SEQ ID NO: 37638 - DNA, 22 bp, Artificial Sequence
  Synthetic
catcccucatgccauacagaca

SEQ ID NO: 37639 - DNA, 30 bp, Artificial Sequence
  Synthetic
actcttgcagaaauattatctgtgttucca

SEQ ID NO: 37640 - DNA, 29 bp, Artificial Sequence
  Synthetic
agaaagtaagcaagaugagagagauaggt

SEQ ID NO: 37641 - DNA, 22 bp, Artificial Sequence
  Synthetic
cccagaagacucgtgcagatuc

SEQ ID NO: 37642 - DNA, 27 bp, Artificial Sequence
  Synthetic
gagaaagagagagaaugtgtgtgtgut

SEQ ID NO: 37643 - DNA, 30 bp, Artificial Sequence
  Synthetic
ggagtattgcacaautatctcttgtcttut

SEQ ID NO: 37644 - DNA, 24 bp, Artificial Sequence
  Synthetic
tcccactcauaaaaaccacucacc

SEQ ID NO: 37645 - DNA, 29 bp, Artificial Sequence
  Synthetic
acatgctcactugtggtactattttcuaa

SEQ ID NO: 37646 - DNA, 24 bp, Artificial Sequence
  Synthetic
agcaaaaatcccucatcctgtcug

SEQ ID NO: 37647 - DNA, 27 bp, Artificial Sequence
  Synthetic
gcctgagatttcuttcccttgtgtuag

SEQ ID NO: 37648 - DNA, 30 bp, Artificial Sequence
  Synthetic
tctcaaggtaaccuattgtgttcttaccua

SEQ ID NO: 37649 - DNA, 27 bp, Artificial Sequence
  Synthetic
tgctccaaucaaaactgaaaatgctut

SEQ ID NO: 37650 - DNA, 22 bp, Artificial Sequence
  Synthetic
gcggugagtttttcugagagga

SEQ ID NO: 37651 - DNA, 26 bp, Artificial Sequence
  Synthetic
tcttggttttcuttttcttgctucgg

SEQ ID NO: 37652 - DNA, 20 bp, Artificial Sequence
  Synthetic
tcuagagccaagacgccuct

SEQ ID NO: 37653 - DNA, 22 bp, Artificial Sequence
  Synthetic
aggataaggugtcccagctuca

SEQ ID NO: 37654 - DNA, 24 bp, Artificial Sequence
  Synthetic
acaacgcuaaacagaaagagcuga

SEQ ID NO: 37655 - DNA, 27 bp, Artificial Sequence
  Synthetic
cctcttgcttugccaaacatttatcut

SEQ ID NO: 37656 - DNA, 27 bp, Artificial Sequence
  Synthetic
caagatgtgaagauggcacatttuagt

SEQ ID NO: 37657 - DNA, 22 bp, Artificial Sequence
  Synthetic
ccacagccautcgtcccaaaua

SEQ ID NO: 37658 - DNA, 22 bp, Artificial Sequence
  Synthetic
gcatattucttgcccucaagca

SEQ ID NO: 37659 - DNA, 27 bp, Artificial Sequence
  Synthetic
cctcatcttcaugagcttcactttcuc

SEQ ID NO: 37660 - DNA, 24 bp, Artificial Sequence
  Synthetic
caggaagaccaugggtgaagtuac

SEQ ID NO: 37661 - DNA, 28 bp, Artificial Sequence
  Synthetic
cttcctctucaccaaactgataaaaucc

SEQ ID NO: 37662 - DNA, 27 bp, Artificial Sequence
  Synthetic
ggtccccatuagactactaaatctugc

SEQ ID NO: 37663 - DNA, 28 bp, Artificial Sequence
  Synthetic
tgtttgtgtgtcugtgtgtgataauagt

SEQ ID NO: 37664 - DNA, 28 bp, Artificial Sequence
  Synthetic
acagaagggtcaguttttctgagaaaut

SEQ ID NO: 37665 - DNA, 27 bp, Artificial Sequence
  Synthetic
tccacactaggaucatccatttctgua

SEQ ID NO: 37666 - DNA, 28 bp, Artificial Sequence
  Synthetic
tgaggaagaugaagatgaggaagaugat

SEQ ID NO: 37667 - DNA, 29 bp, Artificial Sequence
  Synthetic
gcttgatttucaagattgagatttugcag

SEQ ID NO: 37668 - DNA, 19 bp, Artificial Sequence
  Synthetic
cgaccctucgcctaaccuc

SEQ ID NO: 37669 - DNA, 24 bp, Artificial Sequence
  Synthetic
ggttgtccucgctttccaaauact

SEQ ID NO: 37670 - DNA, 27 bp, Artificial Sequence
  Synthetic
gtttcttctgcuagcaatacagcuaca

SEQ ID NO: 37671 - DNA, 29 bp, Artificial Sequence
  Synthetic
gaaaagtcattuactccaatgcttucagt

SEQ ID NO: 37672 - DNA, 25 bp, Artificial Sequence
  Synthetic
tggacagtttugttgccaatttugt

SEQ ID NO: 37673 - DNA, 28 bp, Artificial Sequence
  Synthetic
agttcttctagacautttgccccuaaaa

SEQ ID NO: 37674 - DNA, 33 bp, Artificial Sequence
  Synthetic
ggatgcctaaaauaactattaaagtctatguct

SEQ ID NO: 37675 - DNA, 28 bp, Artificial Sequence
  Synthetic
acgctgcacugaatctctttctataaut

SEQ ID NO: 37676 - DNA, 24 bp, Artificial Sequence
  Synthetic
tttaacttagcutcaggcaccugt

SEQ ID NO: 37677 - DNA, 22 bp, Artificial Sequence
  Synthetic
ggguaaataucaaggccgagca

SEQ ID NO: 37678 - DNA, 22 bp, Artificial Sequence
  Synthetic
ggaatucccacagacacgcaua

SEQ ID NO: 37679 - DNA, 27 bp, Artificial Sequence
  Synthetic
cctaccucacagcaacaattcttatug

SEQ ID NO: 37680 - DNA, 29 bp, Artificial Sequence
  Synthetic
gtggctgttaacaucttaaagacttucaa

SEQ ID NO: 37681 - DNA, 22 bp, Artificial Sequence
  Synthetic
gcttttugcacccacctucaac

SEQ ID NO: 37682 - DNA, 28 bp, Artificial Sequence
  Synthetic
cgagatgagugaagaacttatggaacuc

SEQ ID NO: 37683 - DNA, 27 bp, Artificial Sequence
  Synthetic
gatggtccctatuatcactgtgaccua

SEQ ID NO: 37684 - DNA, 27 bp, Artificial Sequence
  Synthetic
ggcatttaaguccaaaactctggaaut

SEQ ID NO: 37685 - DNA, 27 bp, Artificial Sequence
  Synthetic
attcaccccttucatttaacagccuat

SEQ ID NO: 37686 - DNA, 23 bp, Artificial Sequence
  Synthetic
ttgcutacagggtuggaaaccat

SEQ ID NO: 37687 - DNA, 28 bp, Artificial Sequence
  Synthetic
ttgccatgaccuaagcttaactactuac

SEQ ID NO: 37688 - DNA, 29 bp, Artificial Sequence
  Synthetic
caatcctgaucacgctttagtttaucaaa

SEQ ID NO: 37689 - DNA, 26 bp, Artificial Sequence
  Synthetic
cctaccttugggtcaaaatugacaca

SEQ ID NO: 37690 - DNA, 21 bp, Artificial Sequence
  Synthetic
gctatugacgagcagcugaca

SEQ ID NO: 37691 - DNA, 20 bp, Artificial Sequence
  Synthetic
gtgctctcucctgggaggua

SEQ ID NO: 37692 - DNA, 30 bp, Artificial Sequence
  Synthetic
caatgcagtctcutcttttacaaactatut

SEQ ID NO: 37693 - DNA, 27 bp, Artificial Sequence
  Synthetic
accacaatgucgtcaatgaattcuaca

SEQ ID NO: 37694 - DNA, 24 bp, Artificial Sequence
  Synthetic
tgatcttgtugcctcctgagatug

SEQ ID NO: 37695 - DNA, 28 bp, Artificial Sequence
  Synthetic
ccatacucagccacaatttgttttugaa

SEQ ID NO: 37696 - DNA, 26 bp, Artificial Sequence
  Synthetic
agtggtgaatgucatcaacaaaguct

SEQ ID NO: 37697 - DNA, 30 bp, Artificial Sequence
  Synthetic
cactacattaaatgcuaagggttttcctug

SEQ ID NO: 37698 - DNA, 29 bp, Artificial Sequence
  Synthetic
ttgaggacttuagagtgtttgatagtugg

SEQ ID NO: 37699 - DNA, 28 bp, Artificial Sequence
  Synthetic
catgaaactggcaacautaatacgctua

SEQ ID NO: 37700 - DNA, 23 bp, Artificial Sequence
  Synthetic
acagatuccggactucagagaga

SEQ ID NO: 37701 - DNA, 31 bp, Artificial Sequence
  Synthetic
tggtaattatgattatutcacctctgcacut

SEQ ID NO: 37702 - DNA, 31 bp, Artificial Sequence
  Synthetic
gctagtuaccaagtttttgtttuaagaaagg

SEQ ID NO: 37703 - DNA, 26 bp, Artificial Sequence
  Synthetic
cgctgtgtauggattttctgcatuaa

SEQ ID NO: 37704 - DNA, 30 bp, Artificial Sequence
  Synthetic
aaaatcaaagatugaaatgtcgagauaacc

SEQ ID NO: 37705 - DNA, 26 bp, Artificial Sequence
  Synthetic
gagccactucaaaaagacgaguagat

SEQ ID NO: 37706 - DNA, 30 bp, Artificial Sequence
  Synthetic
agtttatatatttugctgcagagactugct

SEQ ID NO: 37707 - DNA, 28 bp, Artificial Sequence
  Synthetic
gtggtgcugagaaagataaattgttgua

SEQ ID NO: 37708 - DNA, 23 bp, Artificial Sequence
  Synthetic
cacagutaaggacaugacagcct

SEQ ID NO: 37709 - DNA, 25 bp, Artificial Sequence
  Synthetic
cacttcauctcagatgaugcaaacc

SEQ ID NO: 37710 - DNA, 22 bp, Artificial Sequence
  Synthetic
gaaatcagucagaccugggcaa

SEQ ID NO: 37711 - DNA, 29 bp, Artificial Sequence
  Synthetic
tgtaaacatacaucaaaacatcacauggt

SEQ ID NO: 37712 - DNA, 24 bp, Artificial Sequence
  Synthetic
gagcaagugttaagcuggcaaaat

SEQ ID NO: 37713 - DNA, 24 bp, Artificial Sequence
  Synthetic
gcatacagccugtcttugacaaac

SEQ ID NO: 37714 - DNA, 27 bp, Artificial Sequence
  Synthetic
ccgaagutttaatgacugaagggacaa

SEQ ID NO: 37715 - DNA, 31 bp, Artificial Sequence
  Synthetic
cagctaacacaguataatacgagacttucaa

SEQ ID NO: 37716 - DNA, 25 bp, Artificial Sequence
  Synthetic
gaagacaaucaggatgtttcugcac

SEQ ID NO: 37717 - DNA, 27 bp, Artificial Sequence
  Synthetic
ttgcttgttgaacucaaccttcuaaga

SEQ ID NO: 37718 - DNA, 21 bp, Artificial Sequence
  Synthetic
ccauagtggccuacgaggaaa

SEQ ID NO: 37719 - DNA, 31 bp, Artificial Sequence
  Synthetic
cttgaagttccuttatgtctcaaaaucacaa

SEQ ID NO: 37720 - DNA, 25 bp, Artificial Sequence
  Synthetic
ctggagauagacagaagaucaugac

SEQ ID NO: 37721 - DNA, 27 bp, Artificial Sequence
  Synthetic
aaacaacgacttucttggaactacuct

SEQ ID NO: 37722 - DNA, 28 bp, Artificial Sequence
  Synthetic
gactgtgatguttgtgttttctatugct

SEQ ID NO: 37723 - DNA, 30 bp, Artificial Sequence
  Synthetic
ctaacttactttguagtccatttgctcuga

SEQ ID NO: 37724 - DNA, 23 bp, Artificial Sequence
  Synthetic
gcattttgcaguggtttgcatut

SEQ ID NO: 37725 - DNA, 25 bp, Artificial Sequence
  Synthetic
gctaagccacaaagcauaacactug

SEQ ID NO: 37726 - DNA, 31 bp, Artificial Sequence
  Synthetic
gaactccttctuaaaaactttcagctctuac

SEQ ID NO: 37727 - DNA, 28 bp, Artificial Sequence
  Synthetic
gccagctacucactcaacaaaatcauat

SEQ ID NO: 37728 - DNA, 22 bp, Artificial Sequence
  Synthetic
tgacgacaucccagtgtttcug

SEQ ID NO: 37729 - DNA, 29 bp, Artificial Sequence
  Synthetic
caattagccacaautatttccacugacaa

SEQ ID NO: 37730 - DNA, 31 bp, Artificial Sequence
  Synthetic
ggaacatataatgaauacggaaaactctuca

SEQ ID NO: 37731 - DNA, 26 bp, Artificial Sequence
  Synthetic
tgttgtcacagcuttagggttuaagt

SEQ ID NO: 37732 - DNA, 26 bp, Artificial Sequence
  Synthetic
aggtctcttcucatccattcuacgag

SEQ ID NO: 37733 - DNA, 29 bp, Artificial Sequence
  Synthetic
gaatcgaactctuaatacactcaggaugt

SEQ ID NO: 37734 - DNA, 22 bp, Artificial Sequence
  Synthetic
tcactccctucatgaggctuct

SEQ ID NO: 37735 - DNA, 25 bp, Artificial Sequence
  Synthetic
ctgtgcaacaacaugaatgtgctua

SEQ ID NO: 37736 - DNA, 28 bp, Artificial Sequence
  Synthetic
atgtactctcutaaggataaaguggagt

SEQ ID NO: 37737 - DNA, 27 bp, Artificial Sequence
  Synthetic
tcataaacttcutttgggctgucagaa

SEQ ID NO: 37738 - DNA, 28 bp, Artificial Sequence
  Synthetic
aggtttctaccccuatgatattgtuact

SEQ ID NO: 37739 - DNA, 21 bp, Artificial Sequence
  Synthetic
cctgcgacggaaauttcacug

SEQ ID NO: 37740 - DNA, 24 bp, Artificial Sequence
  Synthetic
acgcactcuctctctctttcugat

SEQ ID NO: 37741 - DNA, 24 bp, Artificial Sequence
  Synthetic
caaagactgttuttcccactccug

SEQ ID NO: 37742 - DNA, 24 bp, Artificial Sequence
  Synthetic
guggatgaaaucgacagaagaagt

SEQ ID NO: 37743 - DNA, 31 bp, Artificial Sequence
  Synthetic
gcatgttcatgucgtcgataaaataaaucaa

SEQ ID NO: 37744 - DNA, 24 bp, Artificial Sequence
  Synthetic
taaggagguaatctgcgaugaaga

SEQ ID NO: 37745 - DNA, 26 bp, Artificial Sequence
  Synthetic
tttgagagcaguattcaacacccuac

SEQ ID NO: 37746 - DNA, 24 bp, Artificial Sequence
  Synthetic
gcacuaaacaccatctauggccaa

SEQ ID NO: 37747 - DNA, 25 bp, Artificial Sequence
  Synthetic
ggcataacauagagcagtcaaggua

SEQ ID NO: 37748 - DNA, 21 bp, Artificial Sequence
  Synthetic
gtgtgggtcugcaagctttuc

SEQ ID NO: 37749 - DNA, 25 bp, Artificial Sequence
  Synthetic
tgtaatgtggguccttccctctauc

SEQ ID NO: 37750 - DNA, 20 bp, Artificial Sequence
  Synthetic
gccataaugggcgcttccut

SEQ ID NO: 37751 - DNA, 21 bp, Artificial Sequence
  Synthetic
gaagggucagaagaacugcct

SEQ ID NO: 37752 - DNA, 28 bp, Artificial Sequence
  Synthetic
gctgaactttgucttgtaaaacattuca

SEQ ID NO: 37753 - DNA, 28 bp, Artificial Sequence
  Synthetic
ccagagcaugaacttcattatgaatucc

SEQ ID NO: 37754 - DNA, 20 bp, Artificial Sequence
  Synthetic
tcattcaucacccgcctgut

SEQ ID NO: 37755 - DNA, 18 bp, Artificial Sequence
  Synthetic
caggcugacacggcauac

SEQ ID NO: 37756 - DNA, 26 bp, Artificial Sequence
  Synthetic
ccaccccaaagagutttcuagaacaa

SEQ ID NO: 37757 - DNA, 30 bp, Artificial Sequence
  Synthetic
agaaatggatutagtagtgctucaaaagga

SEQ ID NO: 37758 - DNA, 27 bp, Artificial Sequence
  Synthetic
catctgagtcaaccuccatttttctut

SEQ ID NO: 37759 - DNA, 30 bp, Artificial Sequence
  Synthetic
gaggaaacucagggaucaataaattatcut

SEQ ID NO: 37760 - DNA, 27 bp, Artificial Sequence
  Synthetic
ttttgtaatgtgagucctaaaagcuga

SEQ ID NO: 37761 - DNA, 27 bp, Artificial Sequence
  Synthetic
accacttttagacagutctctggaaug

SEQ ID NO: 37762 - DNA, 26 bp, Artificial Sequence
  Synthetic
tgtaaagcauccatcctatcugggat

SEQ ID NO: 37763 - DNA, 27 bp, Artificial Sequence
  Synthetic
ccttttcaatgucatagtttgcacuca

SEQ ID NO: 37764 - DNA, 24 bp, Artificial Sequence
  Synthetic
cggcutcattugaaaaagcaacag

SEQ ID NO: 37765 - DNA, 24 bp, Artificial Sequence
  Synthetic
aaaatccccacaagcugatcugaa

SEQ ID NO: 37766 - DNA, 28 bp, Artificial Sequence
  Synthetic
aatccattaagucctttgaagcucaaga

SEQ ID NO: 37767 - DNA, 25 bp, Artificial Sequence
  Synthetic
gctgacaagguaaggaactgaacut

SEQ ID NO: 37768 - DNA, 25 bp, Artificial Sequence
  Synthetic
gatatccatgutgacggatgaugct

SEQ ID NO: 37769 - DNA, 26 bp, Artificial Sequence
  Synthetic
agccagtctcutcaaacttcacauac

SEQ ID NO: 37770 - DNA, 26 bp, Artificial Sequence
  Synthetic
tggccaagguccattataagaauaca

SEQ ID NO: 37771 - DNA, 26 bp, Artificial Sequence
  Synthetic
tgaggattugccaattttgtgugaag

SEQ ID NO: 37772 - DNA, 26 bp, Artificial Sequence
  Synthetic
gtacttaaccaccauttcccacacut

SEQ ID NO: 37773 - DNA, 24 bp, Artificial Sequence
  Synthetic
gcctccaatcuctctaccagttug

SEQ ID NO: 37774 - DNA, 29 bp, Artificial Sequence
  Synthetic
ctcataatttttcauttcaggtacgucct

SEQ ID NO: 37775 - DNA, 21 bp, Artificial Sequence
  Synthetic
cttgctgccacuggtctguaa

SEQ ID NO: 37776 - DNA, 24 bp, Artificial Sequence
  Synthetic
aaccttaaactgutgccctgtgua

SEQ ID NO: 37777 - DNA, 22 bp, Artificial Sequence
  Synthetic
catgggtgaugctctccaucag

SEQ ID NO: 37778 - DNA, 22 bp, Artificial Sequence
  Synthetic
ttctgcctacucagtcatguct

SEQ ID NO: 37779 - DNA, 24 bp, Artificial Sequence
  Synthetic
gtgtgtucaactgtgaaucgaagc

SEQ ID NO: 37780 - DNA, 27 bp, Artificial Sequence
  Synthetic
actgtaaagtaucgttcacaccatucc

SEQ ID NO: 37781 - DNA, 31 bp, Artificial Sequence
  Synthetic
tcagcttctgtautaaacttttcttctucca

SEQ ID NO: 37782 - DNA, 22 bp, Artificial Sequence
  Synthetic
tacttctatcgugtgcctgugt

SEQ ID NO: 37783 - DNA, 29 bp, Artificial Sequence
  Synthetic
cttcgaatgcttuaactaagtccaatcug

SEQ ID NO: 37784 - DNA, 22 bp, Artificial Sequence
  Synthetic
acagaatuccaggctcctcuca

SEQ ID NO: 37785 - DNA, 28 bp, Artificial Sequence
  Synthetic
agtgtcttcccugaaacttaatacucac

SEQ ID NO: 37786 - DNA, 26 bp, Artificial Sequence
  Synthetic
agattacagggutttcatgagtgcug

SEQ ID NO: 37787 - DNA, 22 bp, Artificial Sequence
  Synthetic
gacttcatugtctgccuagcct

SEQ ID NO: 37788 - DNA, 25 bp, Artificial Sequence
  Synthetic
gagcaggagtutaaaagcatcctut

SEQ ID NO: 37789 - DNA, 23 bp, Artificial Sequence
  Synthetic
gcccaaagacugacagctttgua

SEQ ID NO: 37790 - DNA, 25 bp, Artificial Sequence
  Synthetic
ttgaggaagugaaaatggatgccua

SEQ ID NO: 37791 - DNA, 24 bp, Artificial Sequence
  Synthetic
tgttggatgucactgtcaggaaut

SEQ ID NO: 37792 - DNA, 28 bp, Artificial Sequence
  Synthetic
caccaugacgaaaactgaaauagaaagg

SEQ ID NO: 37793 - DNA, 31 bp, Artificial Sequence
  Synthetic
caagtgatatacguatttcccgaaugagaat

SEQ ID NO: 37794 - DNA, 25 bp, Artificial Sequence
  Synthetic
attggaagauattcactgtguggct

SEQ ID NO: 37795 - DNA, 26 bp, Artificial Sequence
  Synthetic
cautattcagaacacuaacccagcac

SEQ ID NO: 37796 - DNA, 22 bp, Artificial Sequence
  Synthetic
cgggaaccutacaugcaacact

SEQ ID NO: 37797 - DNA, 20 bp, Artificial Sequence
  Synthetic
ggttccccacutacccctug

SEQ ID NO: 37798 - DNA, 24 bp, Artificial Sequence
  Synthetic
ctatgccggucatcttugcaaaag

SEQ ID NO: 37799 - DNA, 23 bp, Artificial Sequence
  Synthetic
gccagtgtuaccttacgcttcua

SEQ ID NO: 37800 - DNA, 17 bp, Artificial Sequence
  Synthetic
cgcccggccutgtctut

SEQ ID NO: 37801 - DNA, 22 bp, Artificial Sequence
  Synthetic
tcttcttgcugctcttcuccac

SEQ ID NO: 37802 - DNA, 22 bp, Artificial Sequence
  Synthetic
accccatcuaataagggccuca

SEQ ID NO: 37803 - DNA, 28 bp, Artificial Sequence
  Synthetic
cccacgttcuattctttgttatauccca

SEQ ID NO: 37804 - DNA, 21 bp, Artificial Sequence
  Synthetic
ccgtggutcctcagucaaact

SEQ ID NO: 37805 - DNA, 31 bp, Artificial Sequence
  Synthetic
ccatggtagauaccaacattacttctcuaaa

SEQ ID NO: 37806 - DNA, 26 bp, Artificial Sequence
  Synthetic
tggatguagcaaaccaauatcagaut

SEQ ID NO: 37807 - DNA, 29 bp, Artificial Sequence
  Synthetic
gttaaatgcggauacttaaaatcagccut

SEQ ID NO: 37808 - DNA, 28 bp, Artificial Sequence
  Synthetic
gaattgaaagcaacugcagatgacttua

SEQ ID NO: 37809 - DNA, 28 bp, Artificial Sequence
  Synthetic
gtgtccaaacaugagtttuaagaaacca

SEQ ID NO: 37810 - DNA, 22 bp, Artificial Sequence
  Synthetic
atgaacctaaucgccagccaut

SEQ ID NO: 37811 - DNA, 27 bp, Artificial Sequence
  Synthetic
gagaaactggcuacatgatcaggtuat

SEQ ID NO: 37812 - DNA, 30 bp, Artificial Sequence
  Synthetic
tttttgactgtatcuttgcattgtccttut

SEQ ID NO: 37813 - DNA, 24 bp, Artificial Sequence
  Synthetic
gctgagagccucccaaaatgtaua

SEQ ID NO: 37814 - DNA, 28 bp, Artificial Sequence
  Synthetic
aagatctacagucagttcttuccaaacc

SEQ ID NO: 37815 - DNA, 25 bp, Artificial Sequence
  Synthetic
guttcctaaactuccaccacaaaca

SEQ ID NO: 37816 - DNA, 28 bp, Artificial Sequence
  Synthetic
tcutttacttcctguaaacaagcacact

SEQ ID NO: 37817 - DNA, 28 bp, Artificial Sequence
  Synthetic
gaaagtggaacagugaattaacaucaca

SEQ ID NO: 37818 - DNA, 25 bp, Artificial Sequence
  Synthetic
ggtcgatuaggacacattcucgaat

SEQ ID NO: 37819 - DNA, 25 bp, Artificial Sequence
  Synthetic
tctctgatgaguctgaagtccacuc

SEQ ID NO: 37820 - DNA, 18 bp, Artificial Sequence
  Synthetic
ctcctcgcugtcctcugg

SEQ ID NO: 37821 - DNA, 19 bp, Artificial Sequence
  Synthetic
ctccgcutctctcuacgca

SEQ ID NO: 37822 - DNA, 27 bp, Artificial Sequence
  Synthetic
tgaatgtaatcacuttgcatgtgctut

SEQ ID NO: 37823 - DNA, 28 bp, Artificial Sequence
  Synthetic
caccaaccuaatagaggtataaugcact

SEQ ID NO: 37824 - DNA, 24 bp, Artificial Sequence
  Synthetic
aatggtgggauctgttgttcugag

SEQ ID NO: 37825 - DNA, 28 bp, Artificial Sequence
  Synthetic
ttcautacctgtataatuccaaccagca

SEQ ID NO: 37826 - DNA, 21 bp, Artificial Sequence
  Synthetic
ttggcagaucctttggtuggt

SEQ ID NO: 37827 - DNA, 22 bp, Artificial Sequence
  Synthetic
ggcccagacucagagaaugaat

SEQ ID NO: 37828 - DNA, 24 bp, Artificial Sequence
  Synthetic
accaatctugctgatttcacugct

SEQ ID NO: 37829 - DNA, 28 bp, Artificial Sequence
  Synthetic
ttgtttgucaaccaaataatgcugaact

SEQ ID NO: 37830 - DNA, 22 bp, Artificial Sequence
  Synthetic
tggtggucaaatctucacagca

SEQ ID NO: 37831 - DNA, 26 bp, Artificial Sequence
  Synthetic
ccuataaaaccagtucagcaaaaggg

SEQ ID NO: 37832 - DNA, 22 bp, Artificial Sequence
  Synthetic
gtctgugaacaggctgtcucat

SEQ ID NO: 37833 - DNA, 25 bp, Artificial Sequence
  Synthetic
ggtaugcagagaaguagggttauac

SEQ ID NO: 37834 - DNA, 28 bp, Artificial Sequence
  Synthetic
aggtagttatcacaugatggtaccugat

SEQ ID NO: 37835 - DNA, 27 bp, Artificial Sequence
  Synthetic
aggaaatctgggutttacgttacucac

SEQ ID NO: 37836 - DNA, 29 bp, Artificial Sequence
  Synthetic
tgaggctugaaattatttaaucccagaca

SEQ ID NO: 37837 - DNA, 28 bp, Artificial Sequence
  Synthetic
ggaccccaguaaatacttgtagaaugaa

SEQ ID NO: 37838 - DNA, 22 bp, Artificial Sequence
  Synthetic
taccaaggaacagugtguaggt

SEQ ID NO: 37839 - DNA, 26 bp, Artificial Sequence
  Synthetic
gttgggatatcaagutcctccagauc

SEQ ID NO: 37840 - DNA, 28 bp, Artificial Sequence
  Synthetic
tgaaagtaataaugtttctccugagcaa

SEQ ID NO: 37841 - DNA, 30 bp, Artificial Sequence
  Synthetic
cgggaaagtctuacaggtagatatguagat

SEQ ID NO: 37842 - DNA, 28 bp, Artificial Sequence
  Synthetic
gacggtccatgaugctatactctatcua

SEQ ID NO: 37843 - DNA, 30 bp, Artificial Sequence
  Synthetic
cttaaaattcaacagcuagactagactugt

SEQ ID NO: 37844 - DNA, 28 bp, Artificial Sequence
  Synthetic
aatgcagactuaaggagaattcagtugt

SEQ ID NO: 37845 - DNA, 30 bp, Artificial Sequence
  Synthetic
tcttagtgcttcuctttcaatggcttaaua

SEQ ID NO: 37846 - DNA, 19 bp, Artificial Sequence
  Synthetic
cgggagcagucctgacuct

SEQ ID NO: 37847 - DNA, 22 bp, Artificial Sequence
  Synthetic
acagtuacgaaaagcggctgua

SEQ ID NO: 37848 - DNA, 22 bp, Artificial Sequence
  Synthetic
aacctcagcutgaccucagaac

SEQ ID NO: 37849 - DNA, 22 bp, Artificial Sequence
  Synthetic
ctgatctgcuccacctacctuc

SEQ ID NO: 37850 - DNA, 21 bp, Artificial Sequence
  Synthetic
cuatgagguagggcacgaact

SEQ ID NO: 37851 - DNA, 24 bp, Artificial Sequence
  Synthetic
ggtatcccguttttgccctuaaga

SEQ ID NO: 37852 - DNA, 20 bp, Artificial Sequence
  Synthetic
cccaauccccagcacatuct

SEQ ID NO: 37853 - DNA, 21 bp, Artificial Sequence
  Synthetic
gactcttcuctgccttgugca

SEQ ID NO: 37854 - DNA, 22 bp, Artificial Sequence
  Synthetic
ccaggagccauaccatcaccua

SEQ ID NO: 37855 - DNA, 22 bp, Artificial Sequence
  Synthetic
gctcttccgucctttcucacag

SEQ ID NO: 37856 - DNA, 22 bp, Artificial Sequence
  Synthetic
ctgcttcugggaatcctuggag

SEQ ID NO: 37857 - DNA, 25 bp, Artificial Sequence
  Synthetic
ccactttcatcutcaccctccuaaa

SEQ ID NO: 37858 - DNA, 20 bp, Artificial Sequence
  Synthetic
cagcgtgagggucctctcua

SEQ ID NO: 37859 - DNA, 20 bp, Artificial Sequence
  Synthetic
gcatggctuctctggcaucc

SEQ ID NO: 37860 - DNA, 20 bp, Artificial Sequence
  Synthetic
cagggagugtagcagugcag

SEQ ID NO: 37861 - DNA, 24 bp, Artificial Sequence
  Synthetic
gaccacactucccttctacaucag

SEQ ID NO: 37862 - DNA, 23 bp, Artificial Sequence
  Synthetic
aaagtctcuccatctctccaugc

SEQ ID NO: 37863 - DNA, 26 bp, Artificial Sequence
  Synthetic
tccccactaauaacactcacttcuct

SEQ ID NO: 37864 - DNA, 21 bp, Artificial Sequence
  Synthetic
cgtctucggagagacctugag

SEQ ID NO: 37865 - DNA, 22 bp, Artificial Sequence
  Synthetic
gacttggctuacccctcctuag

SEQ ID NO: 37866 - DNA, 17 bp, Artificial Sequence
  Synthetic
ctcgtgucccgggtgut

SEQ ID NO: 37867 - DNA, 17 bp, Artificial Sequence
  Synthetic
cctccucgggacucgac

SEQ ID NO: 37868 - DNA, 25 bp, Artificial Sequence
  Synthetic
tctataaauagctggaggugggcat

SEQ ID NO: 37869 - DNA, 26 bp, Artificial Sequence
  Synthetic
gttcaaagggcauatactggtacugg

SEQ ID NO: 37870 - DNA, 23 bp, Artificial Sequence
  Synthetic
tgtctgcuggcctctgtctatua

SEQ ID NO: 37871 - DNA, 27 bp, Artificial Sequence
  Synthetic
atttctttattccucagtccccaucac

SEQ ID NO: 37872 - DNA, 21 bp, Artificial Sequence
  Synthetic
acgggatctutctggtgctuc

SEQ ID NO: 37873 - DNA, 21 bp, Artificial Sequence
  Synthetic
acacccugcttaacatucgct

SEQ ID NO: 37874 - DNA, 25 bp, Artificial Sequence
  Synthetic
ggacattcatcucccttttcaccut

SEQ ID NO: 37875 - DNA, 21 bp, Artificial Sequence
  Synthetic
ccagctcuggcttcagtcaug

SEQ ID NO: 37876 - DNA, 23 bp, Artificial Sequence
  Synthetic
cctctctuccacctgtttctcug

SEQ ID NO: 37877 - DNA, 29 bp, Artificial Sequence
  Synthetic
gcacttgtggauactgattaaaactgtut

SEQ ID NO: 37878 - DNA, 22 bp, Artificial Sequence
  Synthetic
tgaaaacugcccacctctgtut

SEQ ID NO: 37879 - DNA, 23 bp, Artificial Sequence
  Synthetic
caatcuacagcctcacuccacac

SEQ ID NO: 37880 - DNA, 24 bp, Artificial Sequence
  Synthetic
gactacgguggacuaaaggaaact

SEQ ID NO: 37881 - DNA, 24 bp, Artificial Sequence
  Synthetic
gtgctgtttccuctttaccatgug

SEQ ID NO: 37882 - DNA, 23 bp, Artificial Sequence
  Synthetic
tgcagaaaggaggauagugggaa

SEQ ID NO: 37883 - DNA, 25 bp, Artificial Sequence
  Synthetic
ctagatugcaactctcagucagacc

SEQ ID NO: 37884 - DNA, 25 bp, Artificial Sequence
  Synthetic
tcatgtctctcautccgtgttatuc

SEQ ID NO: 37885 - DNA, 23 bp, Artificial Sequence
  Synthetic
gatgtgagcaauctgacccgtua

SEQ ID NO: 37886 - DNA, 22 bp, Artificial Sequence
  Synthetic
caccatgcttuctccctccaua

SEQ ID NO: 37887 - DNA, 24 bp, Artificial Sequence
  Synthetic
actagctcuggagtcgacttctuc

SEQ ID NO: 37888 - DNA, 18 bp, Artificial Sequence
  Synthetic
gauggcgcggaagttguc

SEQ ID NO: 37889 - DNA, 22 bp, Artificial Sequence
  Synthetic
cgcttttcccuttgctccugat

SEQ ID NO: 37890 - DNA, 23 bp, Artificial Sequence
  Synthetic
cagctcttuggaggcaaatgtua

SEQ ID NO: 37891 - DNA, 24 bp, Artificial Sequence
  Synthetic
gtatccccaaacacauctcctcuc

SEQ ID NO: 37892 - DNA, 24 bp, Artificial Sequence
  Synthetic
ggtgaaaggaggcuctgtgattut

SEQ ID NO: 37893 - DNA, 22 bp, Artificial Sequence
  Synthetic
ccugagcagucagcaaaagact

SEQ ID NO: 37894 - DNA, 27 bp, Artificial Sequence
  Synthetic
ttcctttcattguacctgttctttuct

SEQ ID NO: 37895 - DNA, 20 bp, Artificial Sequence
  Synthetic
ccccgguactctttcgagut

SEQ ID NO: 37896 - DNA, 20 bp, Artificial Sequence
  Synthetic
gcaagguagagggcgagtug

SEQ ID NO: 37897 - DNA, 21 bp, Artificial Sequence
  Synthetic
cccacacaagutcacccucag

SEQ ID NO: 37898 - DNA, 20 bp, Artificial Sequence
  Synthetic
cgaucccagacaccuagcat

SEQ ID NO: 37899 - DNA, 27 bp, Artificial Sequence
  Synthetic
ctggccagaguattccttttaaguagg

SEQ ID NO: 37900 - DNA, 17 bp, Artificial Sequence
  Synthetic
tgccugcggccttgaut

SEQ ID NO: 37901 - DNA, 19 bp, Artificial Sequence
  Synthetic
gcagctgcuacctggaugc

SEQ ID NO: 37902 - DNA, 20 bp, Artificial Sequence
  Synthetic
tgggacuggacgagcttcua

SEQ ID NO: 37903 - DNA, 20 bp, Artificial Sequence
  Synthetic
ctgagcgcuctttcctccuc

SEQ ID NO: 37904 - DNA, 21 bp, Artificial Sequence
  Synthetic
gcagacaggcaugggaguaga

SEQ ID NO: 37905 - DNA, 19 bp, Artificial Sequence
  Synthetic
catgacccccuacccugac

SEQ ID NO: 37906 - DNA, 18 bp, Artificial Sequence
  Synthetic
cagctcccuctccccugt

SEQ ID NO: 37907 - DNA, 19 bp, Artificial Sequence
  Synthetic
ccuccttccttucccacca

SEQ ID NO: 37908 - DNA, 19 bp, Artificial Sequence
  Synthetic
cuggaagagguggaagcca

SEQ ID NO: 37909 - DNA, 19 bp, Artificial Sequence
  Synthetic
cuctgcaggaugaccgcat

SEQ ID NO: 37910 - DNA, 22 bp, Artificial Sequence
  Synthetic
tgctaaaguccccggagactuc

SEQ ID NO: 37911 - DNA, 21 bp, Artificial Sequence
  Synthetic
gggtgguggatgggttuaaca

SEQ ID NO: 37912 - DNA, 21 bp, Artificial Sequence
  Synthetic
ggacaaucagacgggaagcug

SEQ ID NO: 37913 - DNA, 26 bp, Artificial Sequence
  Synthetic
ctgtgatuaccttgatttcuggacct

SEQ ID NO: 37914 - DNA, 21 bp, Artificial Sequence
  Synthetic
ccttagguctaggagcuggca

SEQ ID NO: 37915 - DNA, 17 bp, Artificial Sequence
  Synthetic
ccugacagccggcucag

SEQ ID NO: 37916 - DNA, 18 bp, Artificial Sequence
  Synthetic
cccucccagaggcgauct

SEQ ID NO: 37917 - DNA, 19 bp, Artificial Sequence
  Synthetic
gctctcccugcaaaacugg

SEQ ID NO: 37918 - DNA, 18 bp, Artificial Sequence
  Synthetic
cgatgtgucccgcaccuc

SEQ ID NO: 37919 - DNA, 22 bp, Artificial Sequence
  Synthetic
ccaagcugaagaagacauggct

SEQ ID NO: 37920 - DNA, 19 bp, Artificial Sequence
  Synthetic
ctccuggcactucccacaa

SEQ ID NO: 37921 - DNA, 19 bp, Artificial Sequence
  Synthetic
cagacacugtgcccuggac

SEQ ID NO: 37922 - DNA, 21 bp, Artificial Sequence
  Synthetic
catccctcuggtgcagugaag

SEQ ID NO: 37923 - DNA, 22 bp, Artificial Sequence
  Synthetic
cttgtcagutctgcccauccat

SEQ ID NO: 37924 - DNA, 21 bp, Artificial Sequence
  Synthetic
gccagtcacauggatgctcug

SEQ ID NO: 37925 - DNA, 20 bp, Artificial Sequence
  Synthetic
ccctgaugcctgagcauagt

SEQ ID NO: 37926 - DNA, 21 bp, Artificial Sequence
  Synthetic
cacaagugggagcatgtccut

SEQ ID NO: 37927 - DNA, 19 bp, Artificial Sequence
  Synthetic
ggagaguacgcccagctuc

SEQ ID NO: 37928 - DNA, 18 bp, Artificial Sequence
  Synthetic
tcucaccagcagguggag

SEQ ID NO: 37929 - DNA, 19 bp, Artificial Sequence
  Synthetic
tgccaauggcggacucaaa

SEQ ID NO: 37930 - DNA, 17 bp, Artificial Sequence
  Synthetic
ccctgcucagggaggug

SEQ ID NO: 37931 - DNA, 21 bp, Artificial Sequence
  Synthetic
cgtcccugaccttacagucct

SEQ ID NO: 37932 - DNA, 22 bp, Artificial Sequence
  Synthetic
agaaagaggacucctcagucca

SEQ ID NO: 37933 - DNA, 19 bp, Artificial Sequence
  Synthetic
tcccctgugctgcttucag

SEQ ID NO: 37934 - DNA, 26 bp, Artificial Sequence
  Synthetic
agtctgctatcutcatcacattgucc

SEQ ID NO: 37935 - DNA, 24 bp, Artificial Sequence
  Synthetic
gttctaugagacaagtcggcuagt

SEQ ID NO: 37936 - DNA, 19 bp, Artificial Sequence
  Synthetic
ctcctcugggttgtggcug

SEQ ID NO: 37937 - DNA, 23 bp, Artificial Sequence
  Synthetic
tuctttgaggugaagccaaacct

SEQ ID NO: 37938 - DNA, 21 bp, Artificial Sequence
  Synthetic
ctgttugcttggaaugggaca

SEQ ID NO: 37939 - DNA, 24 bp, Artificial Sequence
  Synthetic
ccaacttaugccactctctgttuc

SEQ ID NO: 37940 - DNA, 27 bp, Artificial Sequence
  Synthetic
ccaaagctauaaattagggacaaugga

SEQ ID NO: 37941 - DNA, 27 bp, Artificial Sequence
  Synthetic
catcgtctacaagaugaagagtgguac

SEQ ID NO: 37942 - DNA, 24 bp, Artificial Sequence
  Synthetic
gcaggacaucgagaggagaagtua

SEQ ID NO: 37943 - DNA, 26 bp, Artificial Sequence
  Synthetic
cattttgcttccgutgtctcttcuag

SEQ ID NO: 37944 - DNA, 24 bp, Artificial Sequence
  Synthetic
agtgacgttgcuctcaaagctuat

SEQ ID NO: 37945 - DNA, 22 bp, Artificial Sequence
  Synthetic
ccgaatgggaucattccucacg

SEQ ID NO: 37946 - DNA, 21 bp, Artificial Sequence
  Synthetic
caggttgtcugggccaatcut

SEQ ID NO: 37947 - DNA, 22 bp, Artificial Sequence
  Synthetic
cctctttagccauggcaagguc

SEQ ID NO: 37948 - DNA, 22 bp, Artificial Sequence
  Synthetic
cuaactttcgcaugcacacaca

SEQ ID NO: 37949 - DNA, 21 bp, Artificial Sequence
  Synthetic
cctgtctcucttggcttuccc

SEQ ID NO: 37950 - DNA, 18 bp, Artificial Sequence
  Synthetic
gcagggcutggcuaccaa

SEQ ID NO: 37951 - DNA, 17 bp, Artificial Sequence
  Synthetic
ctgcagcutcgctgucg

SEQ ID NO: 37952 - DNA, 23 bp, Artificial Sequence
  Synthetic
ccacatcaccugcaaccatauca

SEQ ID NO: 37953 - DNA, 23 bp, Artificial Sequence
  Synthetic
acctctaacugcagaacugggat

SEQ ID NO: 37954 - DNA, 24 bp, Artificial Sequence
  Synthetic
gaatatcctggaugtctgcagcua

SEQ ID NO: 37955 - DNA, 26 bp, Artificial Sequence
  Synthetic
gaccttcagaagacguaggatgaaug

SEQ ID NO: 37956 - DNA, 22 bp, Artificial Sequence
  Synthetic
gtcaacccucgctccttuaagt

SEQ ID NO: 37957 - DNA, 21 bp, Artificial Sequence
  Synthetic
ctttguccaggtcuacaggct

SEQ ID NO: 37958 - DNA, 22 bp, Artificial Sequence
  Synthetic
gcctagtggucttcaggaaugg

SEQ ID NO: 37959 - DNA, 28 bp, Artificial Sequence
  Synthetic
attcataucccacacgaatccaatuagt

SEQ ID NO: 37960 - DNA, 28 bp, Artificial Sequence
  Synthetic
ggagccattuaaaccaggaaattaugac

SEQ ID NO: 37961 - DNA, 21 bp, Artificial Sequence
  Synthetic
catggatttugccgtcctuga

SEQ ID NO: 37962 - DNA, 28 bp, Artificial Sequence
  Synthetic
ggtcccagattuattctgtttcttcuga

SEQ ID NO: 37963 - DNA, 30 bp, Artificial Sequence
  Synthetic
tggtttcttccucttttattctgaaucgaa

SEQ ID NO: 37964 - DNA, 26 bp, Artificial Sequence
  Synthetic
gaagaacagaaagucgatcatcuggt

SEQ ID NO: 37965 - DNA, 24 bp, Artificial Sequence
  Synthetic
gttccctggaugatatctgtgucc

SEQ ID NO: 37966 - DNA, 30 bp, Artificial Sequence
  Synthetic
atctgaaactgaggutcaagagaaaaugat

SEQ ID NO: 37967 - DNA, 28 bp, Artificial Sequence
  Synthetic
cttgacttaagcagacugttttccttut

SEQ ID NO: 37968 - DNA, 26 bp, Artificial Sequence
  Synthetic
tgtggaggaagaugtagttgattgug

SEQ ID NO: 37969 - DNA, 23 bp, Artificial Sequence
  Synthetic
cagtgacaguagaggatgctuct

SEQ ID NO: 37970 - DNA, 24 bp, Artificial Sequence
  Synthetic
gacagcaagcaauaaatuccaggt

SEQ ID NO: 37971 - DNA, 29 bp, Artificial Sequence
  Synthetic
cgtggaatugagattactttuggaacaaa

SEQ ID NO: 37972 - DNA, 29 bp, Artificial Sequence
  Synthetic
guatttaacatcctugagcaaaaacccaa

SEQ ID NO: 37973 - DNA, 22 bp, Artificial Sequence
  Synthetic
agaatttgcccuggttguagca

SEQ ID NO: 37974 - DNA, 29 bp, Artificial Sequence
  Synthetic
agcctataaaaucagctccagtatguaga

SEQ ID NO: 37975 - DNA, 28 bp, Artificial Sequence
  Synthetic
accagtgtcatuggcaataaaagactua

SEQ ID NO: 37976 - DNA, 31 bp, Artificial Sequence
  Synthetic
ctgtactttgucacagtcagctattaaugat

SEQ ID NO: 37977 - DNA, 23 bp, Artificial Sequence
  Synthetic
caggaacugaagcttgcaatugg

SEQ ID NO: 37978 - DNA, 25 bp, Artificial Sequence
  Synthetic
cttggugctaaaccuaaagggaagt

SEQ ID NO: 37979 - DNA, 30 bp, Artificial Sequence
  Synthetic
agatctattggaaccaugtcttgttcttuc

SEQ ID NO: 37980 - DNA, 23 bp, Artificial Sequence
  Synthetic
ttttggaagugacttgctcucca

SEQ ID NO: 37981 - DNA, 27 bp, Artificial Sequence
  Synthetic
ccctcatagguatggttctcctttuga

SEQ ID NO: 37982 - DNA, 28 bp, Artificial Sequence
  Synthetic
ctgaagagtuagaaagaggtgaugacat

SEQ ID NO: 37983 - DNA, 31 bp, Artificial Sequence
  Synthetic
tcatcctgaaactuccttagtgaacaattut

SEQ ID NO: 37984 - DNA, 25 bp, Artificial Sequence
  Synthetic
ggagagcaagccacugaagaatuaa

SEQ ID NO: 37985 - DNA, 31 bp, Artificial Sequence
  Synthetic
ggtctccttttcacuattttgcttagaauca

SEQ ID NO: 37986 - DNA, 21 bp, Artificial Sequence
  Synthetic
actatcggccugacagugaca

SEQ ID NO: 37987 - DNA, 29 bp, Artificial Sequence
  Synthetic
cctggaacacugaaattccacagaatuat

SEQ ID NO: 37988 - DNA, 25 bp, Artificial Sequence
  Synthetic
atctatgtugcaggaatuccaggag

SEQ ID NO: 37989 - DNA, 24 bp, Artificial Sequence
  Synthetic
cagaagccauttgcctttgucaat

SEQ ID NO: 37990 - DNA, 21 bp, Artificial Sequence
  Synthetic
gcccaacgauggatgaacuct

SEQ ID NO: 37991 - DNA, 26 bp, Artificial Sequence
  Synthetic
cccttctccuctgtatgatgattugc

SEQ ID NO: 37992 - DNA, 23 bp, Artificial Sequence
  Synthetic
atggtacacutcaggaagcugac

SEQ ID NO: 37993 - DNA, 27 bp, Artificial Sequence
  Synthetic
gctttattgtuctcttcccugaacaca

SEQ ID NO: 37994 - DNA, 29 bp, Artificial Sequence
  Synthetic
cacatttgacutgatggguaaaagaagaa

SEQ ID NO: 37995 - DNA, 24 bp, Artificial Sequence
  Synthetic
gatttcatttguctgaccgcugag

SEQ ID NO: 37996 - DNA, 24 bp, Artificial Sequence
  Synthetic
cttggtcaagcutgcctctuagat

SEQ ID NO: 37997 - DNA, 31 bp, Artificial Sequence
  Synthetic
gacaaagaatgagugtgctgatattgaaaut

SEQ ID NO: 37998 - DNA, 19 bp, Artificial Sequence
  Synthetic
caccccaaacuccctucca

SEQ ID NO: 37999 - DNA, 23 bp, Artificial Sequence
  Synthetic
ctcatcatucctggatcugccat

SEQ ID NO: 38000 - DNA, 24 bp, Artificial Sequence
  Synthetic
agaatgtggtuacccggaaaaucc

SEQ ID NO: 38001 - DNA, 30 bp, Artificial Sequence
  Synthetic
gatgcatcttttgutgttcatactgatuat

SEQ ID NO: 38002 - DNA, 21 bp, Artificial Sequence
  Synthetic
gtctacccuggcaugcagaat

SEQ ID NO: 38003 - DNA, 21 bp, Artificial Sequence
  Synthetic
tgcauggaaaaauccccacgt

SEQ ID NO: 38004 - DNA, 23 bp, Artificial Sequence
  Synthetic
tccttttatugccaccucaggac

SEQ ID NO: 38005 - DNA, 22 bp, Artificial Sequence
  Synthetic
actgtctggcuccgagaacuaa

SEQ ID NO: 38006 - DNA, 23 bp, Artificial Sequence
  Synthetic
caagauaccccaatgctguagga

SEQ ID NO: 38007 - DNA, 21 bp, Artificial Sequence
  Synthetic
gaggagtgccugctggatuac

SEQ ID NO: 38008 - DNA, 22 bp, Artificial Sequence
  Synthetic
gaataugggccccagaaacaug

SEQ ID NO: 38009 - DNA, 23 bp, Artificial Sequence
  Synthetic
aaaagauggctgtugaccaggat

SEQ ID NO: 38010 - DNA, 26 bp, Artificial Sequence
  Synthetic
agtttcagaaacaucagccacuaact

SEQ ID NO: 38011 - DNA, 22 bp, Artificial Sequence
  Synthetic
cttcacuagctgagcatucggt

SEQ ID NO: 38012 - DNA, 30 bp, Artificial Sequence
  Synthetic
gggtagauaaccaagaactaaauaggaact

SEQ ID NO: 38013 - DNA, 25 bp, Artificial Sequence
  Synthetic
tggcagttttugctttcttttccut

SEQ ID NO: 38014 - DNA, 28 bp, Artificial Sequence
  Synthetic
gagacaugcagaaacacattaaaaguga

SEQ ID NO: 38015 - DNA, 29 bp, Artificial Sequence
  Synthetic
aaggctcgggaaucacaataattgtatua

SEQ ID NO: 38016 - DNA, 26 bp, Artificial Sequence
  Synthetic
gggaatgattucttgctcttauagct

SEQ ID NO: 38017 - DNA, 26 bp, Artificial Sequence
  Synthetic
cctcacagattutaatggctccaaug

SEQ ID NO: 38018 - DNA, 26 bp, Artificial Sequence
  Synthetic
ttgctgugacccaaaatattatugct

SEQ ID NO: 38019 - DNA, 29 bp, Artificial Sequence
  Synthetic
cctgaatcaccacuttgtaatacaaauga

SEQ ID NO: 38020 - DNA, 26 bp, Artificial Sequence
  Synthetic
tgutcacttccttaugaagacagcac

SEQ ID NO: 38021 - DNA, 23 bp, Artificial Sequence
  Synthetic
gttucccaaagaucacaccacua

SEQ ID NO: 38022 - DNA, 22 bp, Artificial Sequence
  Synthetic
ccautgtccacaauccccaact

SEQ ID NO: 38023 - DNA, 29 bp, Artificial Sequence
  Synthetic
gcacagaguaagtacaaagaauacaacct

SEQ ID NO: 38024 - DNA, 23 bp, Artificial Sequence
  Synthetic
agtggctttccutgtgttaccuc

SEQ ID NO: 38025 - DNA, 29 bp, Artificial Sequence
  Synthetic
gccatttcatgggcuaatcttcaatttua

SEQ ID NO: 38026 - DNA, 26 bp, Artificial Sequence
  Synthetic
ctuggcccucaaagaagaaactatua

SEQ ID NO: 38027 - DNA, 21 bp, Artificial Sequence
  Synthetic
cutaagcaagtucgcgagcag

SEQ ID NO: 38028 - DNA, 24 bp, Artificial Sequence
  Synthetic
cagggugcttatctttucccagat

SEQ ID NO: 38029 - DNA, 25 bp, Artificial Sequence
  Synthetic
tagccccuttatcatagatuccact

SEQ ID NO: 38030 - DNA, 25 bp, Artificial Sequence
  Synthetic
tcgacagattcuccaaacctgatuc

SEQ ID NO: 38031 - DNA, 28 bp, Artificial Sequence
  Synthetic
ctttttaaaggcaucaggactttctugt

SEQ ID NO: 38032 - DNA, 29 bp, Artificial Sequence
  Synthetic
ctgtgaaaatcuacaggctgatuacaaga

SEQ ID NO: 38033 - DNA, 28 bp, Artificial Sequence
  Synthetic
aggtcgaaaaataaucaaaggctgagua

SEQ ID NO: 38034 - DNA, 23 bp, Artificial Sequence
  Synthetic
ctatggugcactcatggaugagg

SEQ ID NO: 38035 - DNA, 26 bp, Artificial Sequence
  Synthetic
tctgtcatgctuctatggaaaaccug

SEQ ID NO: 38036 - DNA, 22 bp, Artificial Sequence
  Synthetic
atgggagggugagtaagaaguc

SEQ ID NO: 38037 - DNA, 24 bp, Artificial Sequence
  Synthetic
agtctgagaacuccatcagcucat

SEQ ID NO: 38038 - DNA, 21 bp, Artificial Sequence
  Synthetic
gattucccaacgctgguacct

SEQ ID NO: 38039 - DNA, 23 bp, Artificial Sequence
  Synthetic
aggatggttcugcagatggttuc

SEQ ID NO: 38040 - DNA, 23 bp, Artificial Sequence
  Synthetic
atatttcccugcctcgtgcatua

SEQ ID NO: 38041 - DNA, 22 bp, Artificial Sequence
  Synthetic
tcttgtagcugtcctccuggaa

SEQ ID NO: 38042 - DNA, 22 bp, Artificial Sequence
  Synthetic
ttggcaggaugatggaugaaca

SEQ ID NO: 38043 - DNA, 24 bp, Artificial Sequence
  Synthetic
gaacaaatgugagctcgcacuaac

SEQ ID NO: 38044 - DNA, 22 bp, Artificial Sequence
  Synthetic
gtgtgttttcugtgcacggaug

SEQ ID NO: 38045 - DNA, 28 bp, Artificial Sequence
  Synthetic
cctgccaatagaugtgaaactgacauaa

SEQ ID NO: 38046 - DNA, 25 bp, Artificial Sequence
  Synthetic
ctgtttctugctttgcttucaagga

SEQ ID NO: 38047 - DNA, 21 bp, Artificial Sequence
  Synthetic
cacugctgtcaugaagcagga

SEQ ID NO: 38048 - DNA, 22 bp, Artificial Sequence
  Synthetic
gccaacttuactggccuaacac

SEQ ID NO: 38049 - DNA, 24 bp, Artificial Sequence
  Synthetic
gagtggaaaccutgaagaaacuca

SEQ ID NO: 38050 - DNA, 23 bp, Artificial Sequence
  Synthetic
gaaccaattuagagccttugcca

SEQ ID NO: 38051 - DNA, 28 bp, Artificial Sequence
  Synthetic
gaattcaagggcautctacattguacac

SEQ ID NO: 38052 - DNA, 22 bp, Artificial Sequence
  Synthetic
cattgagcugctacggaagauc

SEQ ID NO: 38053 - DNA, 27 bp, Artificial Sequence
  Synthetic
tttgagcaaaguttttatgtgcaucca

SEQ ID NO: 38054 - DNA, 23 bp, Artificial Sequence
  Synthetic
gaugagagggtacuggaacaagc

SEQ ID NO: 38055 - DNA, 23 bp, Artificial Sequence
  Synthetic
tcctctucggaacctttctcuga

SEQ ID NO: 38056 - DNA, 25 bp, Artificial Sequence
  Synthetic
cttcagtttcccugatactgtggut

SEQ ID NO: 38057 - DNA, 23 bp, Artificial Sequence
  Synthetic
gctactgaaggauctccgtccuc

SEQ ID NO: 38058 - DNA, 29 bp, Artificial Sequence
  Synthetic
cattttatgctcutttgcatcttgaugga

SEQ ID NO: 38059 - DNA, 22 bp, Artificial Sequence
  Synthetic
acatcuggcgcctatttacugg

SEQ ID NO: 38060 - DNA, 22 bp, Artificial Sequence
  Synthetic
ccagcccauatagcagtacugt

SEQ ID NO: 38061 - DNA, 29 bp, Artificial Sequence
  Synthetic
caactttttctugtccattttcugagacc

SEQ ID NO: 38062 - DNA, 24 bp, Artificial Sequence
  Synthetic
gcctaatgtcucaacaccagtguc

SEQ ID NO: 38063 - DNA, 20 bp, Artificial Sequence
  Synthetic
aggcaagcuccccaactuac

SEQ ID NO: 38064 - DNA, 21 bp, Artificial Sequence
  Synthetic
cagacacacggauccctgtua

SEQ ID NO: 38065 - DNA, 27 bp, Artificial Sequence
  Synthetic
attccttccaacuctaaactcugcaat

SEQ ID NO: 38066 - DNA, 29 bp, Artificial Sequence
  Synthetic
gaaacgacatagaugtcgaaaccctaaua

SEQ ID NO: 38067 - DNA, 27 bp, Artificial Sequence
  Synthetic
gcagacaggautcttttcccctauaga

SEQ ID NO: 38068 - DNA, 22 bp, Artificial Sequence
  Synthetic
atttccauttggaauggcaggt

SEQ ID NO: 38069 - DNA, 23 bp, Artificial Sequence
  Synthetic
acttttgggccutcttcctctuc

SEQ ID NO: 38070 - DNA, 21 bp, Artificial Sequence
  Synthetic
ctgtttgcuggaatggaccug

SEQ ID NO: 38071 - DNA, 20 bp, Artificial Sequence
  Synthetic
aguagcagcugacagagggt

SEQ ID NO: 38072 - DNA, 22 bp, Artificial Sequence
  Synthetic
aaaagcacagaugctgttucgg

SEQ ID NO: 38073 - DNA, 22 bp, Artificial Sequence
  Synthetic
gcattctgaagucctgccaaug

SEQ ID NO: 38074 - DNA, 24 bp, Artificial Sequence
  Synthetic
gaagagcuagactcacttgauggg

SEQ ID NO: 38075 - DNA, 25 bp, Artificial Sequence
  Synthetic
accaagataccutttgacacaccug

SEQ ID NO: 38076 - DNA, 27 bp, Artificial Sequence
  Synthetic
gcatttacttcugacatctcgatucct

SEQ ID NO: 38077 - DNA, 20 bp, Artificial Sequence
  Synthetic
gcgctctaugtggagagugg

SEQ ID NO: 38078 - DNA, 24 bp, Artificial Sequence
  Synthetic
cagaaatucagcaaaaccaugcca

SEQ ID NO: 38079 - DNA, 23 bp, Artificial Sequence
  Synthetic
gcatcattugggaaagucaagca

SEQ ID NO: 38080 - DNA, 28 bp, Artificial Sequence
  Synthetic
ccaattguacaaacaguataccagatut

SEQ ID NO: 38081 - DNA, 27 bp, Artificial Sequence
  Synthetic
cagtttactcagugctttcatggatut

SEQ ID NO: 38082 - DNA, 25 bp, Artificial Sequence
  Synthetic
ttactcagaacguctgatgttuccc

SEQ ID NO: 38083 - DNA, 26 bp, Artificial Sequence
  Synthetic
ttgatgagtucagaacagtgctguaa

SEQ ID NO: 38084 - DNA, 22 bp, Artificial Sequence
  Synthetic
gaacgaccuattgggctucact

SEQ ID NO: 38085 - DNA, 29 bp, Artificial Sequence
  Synthetic
gtgcaaagcagutaattgatctaaacugt

SEQ ID NO: 38086 - DNA, 25 bp, Artificial Sequence
  Synthetic
atctcatauccgacataggcatuct

SEQ ID NO: 38087 - DNA, 29 bp, Artificial Sequence
  Synthetic
cgcttaccctatuttccaattgtaaacut

SEQ ID NO: 38088 - DNA, 24 bp, Artificial Sequence
  Synthetic
aatctgttaccugggccaaauacc

SEQ ID NO: 38089 - DNA, 29 bp, Artificial Sequence
  Synthetic
aatgtttatcuccagggtttttcttccut

SEQ ID NO: 38090 - DNA, 28 bp, Artificial Sequence
  Synthetic
atgtaagtattgacugtacaccctcuct

SEQ ID NO: 38091 - DNA, 29 bp, Artificial Sequence
  Synthetic
gacactgtagccuttacgaatgtacuaaa

SEQ ID NO: 38092 - DNA, 26 bp, Artificial Sequence
  Synthetic
catggaagaaaggutaagtgagtuca

SEQ ID NO: 38093 - DNA, 24 bp, Artificial Sequence
  Synthetic
ccucttctcagaaauccagaccac

SEQ ID NO: 38094 - DNA, 23 bp, Artificial Sequence
  Synthetic
cagatgagacugcctgcagtaut

SEQ ID NO: 38095 - DNA, 29 bp, Artificial Sequence
  Synthetic
ggttttgttttcuagattcaagatuggca

SEQ ID NO: 38096 - DNA, 24 bp, Artificial Sequence
  Synthetic
acactcttgcuccacgttgtaaut

SEQ ID NO: 38097 - DNA, 27 bp, Artificial Sequence
  Synthetic
cagtgtaagagcuttatgtttccccut

SEQ ID NO: 38098 - DNA, 24 bp, Artificial Sequence
  Synthetic
tcactcccttutgcacacatgaua

SEQ ID NO: 38099 - DNA, 31 bp, Artificial Sequence
  Synthetic
caggactatuagacagtgatttttcauacct

SEQ ID NO: 38100 - DNA, 20 bp, Artificial Sequence
  Synthetic
ggcggguaggcacttcaaua

SEQ ID NO: 38101 - DNA, 28 bp, Artificial Sequence
  Synthetic
ccccctatauagacaaattaggcaucct

SEQ ID NO: 38102 - DNA, 26 bp, Artificial Sequence
  Synthetic
cctaaaaggauaaaatcctgggcuga

SEQ ID NO: 38103 - DNA, 28 bp, Artificial Sequence
  Synthetic
cctaggaacatcutcttaccgtttctut

SEQ ID NO: 38104 - DNA, 22 bp, Artificial Sequence
  Synthetic
aagaaagguccccaacgatcug

SEQ ID NO: 38105 - DNA, 31 bp, Artificial Sequence
  Synthetic
caccatagagtccautcaggatttttaaaut

SEQ ID NO: 38106 - DNA, 23 bp, Artificial Sequence
  Synthetic
cacacatuccaaacacaccagua

SEQ ID NO: 38107 - DNA, 31 bp, Artificial Sequence
  Synthetic
ctgcctagtcuggatttttctcttaaguaaa

SEQ ID NO: 38108 - DNA, 25 bp, Artificial Sequence
  Synthetic
gagtaatauaaacggccacccctut

SEQ ID NO: 38109 - DNA, 27 bp, Artificial Sequence
  Synthetic
tcaaguttcttatttgucaaggcaagc

SEQ ID NO: 38110 - DNA, 28 bp, Artificial Sequence
  Synthetic
attatttacaacautacaacctgugggt

SEQ ID NO: 38111 - DNA, 23 bp, Artificial Sequence
  Synthetic
ctttgagccutccatcctucaca

SEQ ID NO: 38112 - DNA, 25 bp, Artificial Sequence
  Synthetic
tacuctttugggaaagaaggaagga

SEQ ID NO: 38113 - DNA, 22 bp, Artificial Sequence
  Synthetic
ccagagagugcctaucaacgaa

SEQ ID NO: 38114 - DNA, 25 bp, Artificial Sequence
  Synthetic
ttcttggatuactgctgtucacagt

SEQ ID NO: 38115 - DNA, 27 bp, Artificial Sequence
  Synthetic
ttggcttttgucctcttctcttctuag

SEQ ID NO: 38116 - DNA, 23 bp, Artificial Sequence
  Synthetic
tgtgtcctttuccctctccacua

SEQ ID NO: 38117 - DNA, 26 bp, Artificial Sequence
  Synthetic
tttttctcaggguccagaattauggg

SEQ ID NO: 38118 - DNA, 27 bp, Artificial Sequence
  Synthetic
ccatatttctgtugatcagctctguct

SEQ ID NO: 38119 - DNA, 21 bp, Artificial Sequence
  Synthetic
agtguccaggcacagaguagt

SEQ ID NO: 38120 - DNA, 22 bp, Artificial Sequence
  Synthetic
accaaagcaaauccgtctucca

SEQ ID NO: 38121 - DNA, 25 bp, Artificial Sequence
  Synthetic
tgaacaaaagagggcgucttctuag

SEQ ID NO: 38122 - DNA, 26 bp, Artificial Sequence
  Synthetic
catatggttuctgtaatcaugaggct

SEQ ID NO: 38123 - DNA, 21 bp, Artificial Sequence
  Synthetic
gtattgctcugacccctccuc

SEQ ID NO: 38124 - DNA, 22 bp, Artificial Sequence
  Synthetic
cccagatcaguttactgtggug

SEQ ID NO: 38125 - DNA, 22 bp, Artificial Sequence
  Synthetic
tgggcugaaacaactttccuga

SEQ ID NO: 38126 - DNA, 25 bp, Artificial Sequence
  Synthetic
gttttuaagccaagaagtcugcagt

SEQ ID NO: 38127 - DNA, 22 bp, Artificial Sequence
  Synthetic
ctaaagcggaaugaggaugcct

SEQ ID NO: 38128 - DNA, 25 bp, Artificial Sequence
  Synthetic
gagtagtctatutagggccacucct

SEQ ID NO: 38129 - DNA, 25 bp, Artificial Sequence
  Synthetic
ccaagctctugacttttgctttugg

SEQ ID NO: 38130 - DNA, 23 bp, Artificial Sequence
  Synthetic
cctcucccatctgcuaaggagaa

SEQ ID NO: 38131 - DNA, 27 bp, Artificial Sequence
  Synthetic
gatgattttgcuctttctttgctucct

SEQ ID NO: 38132 - DNA, 28 bp, Artificial Sequence
  Synthetic
gttgttctaagccuttaagttttguggt

SEQ ID NO: 38133 - DNA, 24 bp, Artificial Sequence
  Synthetic
gctcaaggataucagcagctttuc

SEQ ID NO: 38134 - DNA, 25 bp, Artificial Sequence
  Synthetic
cagaatcacagucccagtagattuc

SEQ ID NO: 38135 - DNA, 29 bp, Artificial Sequence
  Synthetic
ggagggttgautgatggactauagaaaat

SEQ ID NO: 38136 - DNA, 21 bp, Artificial Sequence
  Synthetic
agcactcugcctaactcccua

SEQ ID NO: 38137 - DNA, 27 bp, Artificial Sequence
  Synthetic
cctatcatctcugtgtttctcctucag

SEQ ID NO: 38138 - DNA, 27 bp, Artificial Sequence
  Synthetic
ctgaaaatttgacutactgtgccaucc

SEQ ID NO: 38139 - DNA, 28 bp, Artificial Sequence
  Synthetic
tgaggagcagguttctatatgagagtut

SEQ ID NO: 38140 - DNA, 24 bp, Artificial Sequence
  Synthetic
tcaggagguggtgaataaaugaac

SEQ ID NO: 38141 - DNA, 27 bp, Artificial Sequence
  Synthetic
ctaactggatgccutattcttggtgua

SEQ ID NO: 38142 - DNA, 23 bp, Artificial Sequence
  Synthetic
tgtcuaccccaaattcuccaggt

SEQ ID NO: 38143 - DNA, 22 bp, Artificial Sequence
  Synthetic
tctgcccgucttcctgtagtua

SEQ ID NO: 38144 - DNA, 26 bp, Artificial Sequence
  Synthetic
agattcaccuccaatcagttuggaag

SEQ ID NO: 38145 - DNA, 26 bp, Artificial Sequence
  Synthetic
tcacgttggaaugtgctttttcttut

SEQ ID NO: 38146 - DNA, 27 bp, Artificial Sequence
  Synthetic
ggaggauggagagaattatgcaaauca

SEQ ID NO: 38147 - DNA, 30 bp, Artificial Sequence; identical to SEQ ID NO: 25913
  Synthetic

SEQ ID NO: 38148 - DNA, 19 bp, Artificial Sequence
  Synthetic
gcagcagagcucaggguag

SEQ ID NO: 38149 - DNA, 17 bp, Artificial Sequence
  Synthetic
cgacgacutcgcucgga

SEQ ID NO: 38150 - DNA, 22 bp, Artificial Sequence
  Synthetic
gcatatcuttgagggugggaca

SEQ ID NO: 38151 - DNA, 28 bp, Artificial Sequence
  Synthetic
tgtcttggtagagacugtgatatgtcut

SEQ ID NO: 38152 - DNA, 22 bp, Artificial Sequence
  Synthetic
gggctggutctccaaaucagaa

SEQ ID NO: 38153 - DNA, 26 bp, Artificial Sequence
  Synthetic
caatagaagcugaatttggtgtgcug

SEQ ID NO: 38154 - DNA, 26 bp, Artificial Sequence
  Synthetic
cagaatccttaucactgtcactguca

SEQ ID NO: 38155 - DNA, 23 bp, Artificial Sequence
  Synthetic
ctttucagacagccgatcaucag

SEQ ID NO: 38156 - DNA, 25 bp, Artificial Sequence
  Synthetic
tgccgtgttutgtattttcgttucc

SEQ ID NO: 38157 - DNA, 29 bp, Artificial Sequence
  Synthetic
ccagagctcatuattctagacagtctuca

SEQ ID NO: 38158 - DNA, 23 bp, Artificial Sequence
  Synthetic
cgatctctatutctgctccguga

SEQ ID NO: 38159 - DNA, 28 bp, Artificial Sequence
  Synthetic
gaaagcatcaugggaagaaaagaaugaa

SEQ ID NO: 38160 - DNA, 25 bp, Artificial Sequence
  Synthetic
ttcaggtttcugggagatgacaaug

SEQ ID NO: 38161 - DNA, 30 bp, Artificial Sequence; identical to SEQ ID NO: 25927
  Synthetic

SEQ ID NO: 38162 - DNA, 21 bp, Artificial Sequence
  Synthetic
tgtatcugagacgtggcucct

SEQ ID NO: 38163 - DNA, 23 bp, Artificial Sequence
  Synthetic
aaggcagccautctgattctuca

SEQ ID NO: 38164 - DNA, 27 bp, Artificial Sequence
  Synthetic
tcttaaaucagacacaaatgccugact

SEQ ID NO: 38165 - DNA, 29 bp, Artificial Sequence
  Synthetic
gtgctcgagtuagaaatattgaagauggt

SEQ ID NO: 38166 - DNA, 28 bp, Artificial Sequence
  Synthetic
gaggaatttcaacauctctaggtctugt

SEQ ID NO: 38167 - DNA, 27 bp, Artificial Sequence
  Synthetic
cagaagatgacutcaaggagtatgucc

SEQ ID NO: 38168 - DNA, 28 bp, Artificial Sequence
  Synthetic
gcagcgatcuaagtaagacacattauca

SEQ ID NO: 38169 - DNA, 31 bp, Artificial Sequence; identical to SEQ ID NO: 25935
  Synthetic

SEQ ID NO: 38170 - DNA, 17 bp, Artificial Sequence
  Synthetic
ggauccgcgaaggcgua

SEQ ID NO: 38171 - DNA, 21 bp, Artificial Sequence
  Synthetic
gaaggcgggugttgtgtttug

SEQ ID NO: 38172 - DNA, 20 bp, Artificial Sequence
  Synthetic
cagcccagucagtcagucac

SEQ ID NO: 38173 - DNA, 19 bp, Artificial Sequence
  Synthetic
agutaccgttugcccggaa

SEQ ID NO: 38174 - DNA, 24 bp, Artificial Sequence
  Synthetic
agagagctcugaggactgatctug

SEQ ID NO: 38175 - DNA, 20 bp, Artificial Sequence
  Synthetic
tgcagggcuctacaggctua

SEQ ID NO: 38176 - DNA, 21 bp, Artificial Sequence
  Synthetic
caggtaaccuggctccaacug

SEQ ID NO: 38177 - DNA, 27 bp, Artificial Sequence
  Synthetic
caactctgguttgaaagttguaagagg

SEQ ID NO: 38178 - DNA, 25 bp, Artificial Sequence
  Synthetic
aguaacatttctgttuccacagggt

SEQ ID NO: 38179 - DNA, 25 bp, Artificial Sequence
  Synthetic
cattaatccugttcccatguccaca

SEQ ID NO: 38180 - DNA, 22 bp, Artificial Sequence
  Synthetic
gcctatttgcugaccacacucc

SEQ ID NO: 38181 - DNA, 23 bp, Artificial Sequence
  Synthetic
aggatcctacutgggagacugac

SEQ ID NO: 38182 - DNA, 26 bp, Artificial Sequence
  Synthetic
gataactguaaaagggctctctcucc

SEQ ID NO: 38183 - DNA, 22 bp, Artificial Sequence
  Synthetic
gccagactgutctgagtccuga

SEQ ID NO: 38184 - DNA, 24 bp, Artificial Sequence
  Synthetic
cttcctgaggutcattaccaccug

SEQ ID NO: 38185 - DNA, 28 bp, Artificial Sequence
  Synthetic
aaggttcacacucctctgatatuagagt

SEQ ID NO: 38186 - DNA, 23 bp, Artificial Sequence
  Synthetic
cagctcaagcucttcaaaacgug

SEQ ID NO: 38187 - DNA, 22 bp, Artificial Sequence
  Synthetic
cctattgugggtggugaacact

SEQ ID NO: 38188 - DNA, 25 bp, Artificial Sequence
  Synthetic
atcttcatgugaccccttagttugg

SEQ ID NO: 38189 - DNA, 26 bp, Artificial Sequence
  Synthetic
tctctaggccucagtttcccttttua

SEQ ID NO: 38190 - DNA, 21 bp, Artificial Sequence
  Synthetic
tgggcugggacacatuaaagg

SEQ ID NO: 38191 - DNA, 25 bp, Artificial Sequence
  Synthetic
aaattgattcctcutcacccctgut

SEQ ID NO: 38192 - DNA, 22 bp, Artificial Sequence
  Synthetic
cttttcuggcatctucccacag

SEQ ID NO: 38193 - DNA, 23 bp, Artificial Sequence
  Synthetic
tcatgccttucaagacactgcut

SEQ ID NO: 38194 - DNA, 23 bp, Artificial Sequence
  Synthetic
tcattcaucccccaagucacaag

SEQ ID NO: 38195 - DNA, 21 bp, Artificial Sequence
  Synthetic
cctagccucaccccttcatug

SEQ ID NO: 38196 - DNA, 21 bp, Artificial Sequence
  Synthetic
ccacatctucacctggcagut

SEQ ID NO: 38197 - DNA, 22 bp, Artificial Sequence
  Synthetic
ccgtgtccucctatcccttuag

SEQ ID NO: 38198 - DNA, 24 bp, Artificial Sequence
  Synthetic
agtctggaggaccacutaaaggua

SEQ ID NO: 38199 - DNA, 23 bp, Artificial Sequence
  Synthetic
gcttctggutgtccttcttuccc

SEQ ID NO: 38200 - DNA, 20 bp, Artificial Sequence
  Synthetic
caagacggucagcacucaac

SEQ ID NO: 38201 - DNA, 23 bp, Artificial Sequence
  Synthetic
gatggaggaugaggtgctactuc

SEQ ID NO: 38202 - DNA, 23 bp, Artificial Sequence
  Synthetic
ccctgccccgaguaattataucg

SEQ ID NO: 38203 - DNA, 20 bp, Artificial Sequence
  Synthetic
tgacaaccccuccctcaugt

SEQ ID NO: 38204 - DNA, 18 bp, Artificial Sequence
  Synthetic
cccacagagguggtcugg

SEQ ID NO: 38205 - DNA, 19 bp, Artificial Sequence
  Synthetic
cgtcccauctgtccuggaa

SEQ ID NO: 38206 - DNA, 23 bp, Artificial Sequence
  Synthetic
ccatgtctgtucctggaggtcua

SEQ ID NO: 38207 - DNA, 25 bp, Artificial Sequence
  Synthetic
ggccagtcacuatatccacattguc

SEQ ID NO: 38208 - DNA, 22 bp, Artificial Sequence
  Synthetic
ggctgggccauatgatatcuga

SEQ ID NO: 38209 - DNA, 25 bp, Artificial Sequence
  Synthetic
gactgcttttccutctcactctgut

SEQ ID NO: 38210 - DNA, 21 bp, Artificial Sequence
  Synthetic
cguatgcttcaaugcacccat

SEQ ID NO: 38211 - DNA, 23 bp, Artificial Sequence
  Synthetic
gcacccucagtgatttctauccc

SEQ ID NO: 38212 - DNA, 23 bp, Artificial Sequence
  Synthetic
cacagttgccaucattgtcuacc

SEQ ID NO: 38213 - DNA, 28 bp, Artificial Sequence
  Synthetic
ctcatcagcatuatttccttgtgttugt

SEQ ID NO: 38214 - DNA, 28 bp, Artificial Sequence
  Synthetic
gcttccacacacauctgtaggatuaaat

SEQ ID NO: 38215 - DNA, 29 bp, Artificial Sequence
  Synthetic
tcctatagcagugtctaatttgtcaugaa

SEQ ID NO: 38216 - DNA, 30 bp, Artificial Sequence; identical to SEQ ID NO: 25982
  Synthetic

SEQ ID NO: 38217 - DNA, 27 bp, Artificial Sequence
  Synthetic
ccacttaacatguatggcagaagcaua

SEQ ID NO: 38218 - DNA, 28 bp, Artificial Sequence
  Synthetic
actcacgtatguataaagcctagucagt

SEQ ID NO: 38219 - DNA, 25 bp, Artificial Sequence
  Synthetic
tgaccagttuatacagttggtugcc

SEQ ID NO: 38220 - DNA, 24 bp, Artificial Sequence
  Synthetic
gatgagcaagauaggaaggcagut

SEQ ID NO: 38221 - DNA, 30 bp, Artificial Sequence; identical to SEQ ID NO: 25987
  Synthetic

SEQ ID NO: 38222 - DNA, 26 bp, Artificial Sequence
  Synthetic
tctgacaaaaacagccautagacuga

SEQ ID NO: 38223 - DNA, 28 bp, Artificial Sequence
  Synthetic
tctatcagacaugccataacaaaacugg

SEQ ID NO: 38224 - DNA, 22 bp, Artificial Sequence
  Synthetic
ggcatcaaaccugtctccauga

SEQ ID NO: 38225 - DNA, 29 bp, Artificial Sequence
  Synthetic
gttcttatatctttauttctccccggcut

SEQ ID NO: 38226 - DNA, 28 bp, Artificial Sequence
  Synthetic
caagtaccacaacaucaagtucaaagaa

SEQ ID NO: 38227 - DNA, 30 bp, Artificial Sequence; identical to SEQ ID NO: 25993
  Synthetic

SEQ ID NO: 38228 - DNA, 25 bp, Artificial Sequence
  Synthetic
ctctgcagauaaccataggttucca

SEQ ID NO: 38229 - DNA, 22 bp, Artificial Sequence
  Synthetic
cctacttucgagctactgucca

SEQ ID NO: 38230 - DNA, 19 bp, Artificial Sequence
  Synthetic
tggtgccacucaagctucc

SEQ ID NO: 38231 - DNA, 21 bp, Artificial Sequence
  Synthetic
ctccaacacauccauggcaga

SEQ ID NO: 38232 - DNA, 21 bp, Artificial Sequence
  Synthetic
catctgcautgggatcugcac

SEQ ID NO: 38233 - DNA, 21 bp, Artificial Sequence
  Synthetic
ccagugagcaatgugagcaac

SEQ ID NO: 38234 - DNA, 21 bp, Artificial Sequence
  Synthetic
gaactcgtuccagcacucgat

SEQ ID NO: 38235 - DNA, 23 bp, Artificial Sequence
  Synthetic
ccatcatguacggcaagttcucc

SEQ ID NO: 38236 - DNA, 19 bp, Artificial Sequence
  Synthetic
gccagguccttgugaacca

SEQ ID NO: 38237 - DNA, 21 bp, Artificial Sequence
  Synthetic
ccccugagcatgatctucagc

SEQ ID NO: 38238 - DNA, 24 bp, Artificial Sequence
  Synthetic
gctttgtcctucagcgttttgaug

SEQ ID NO: 38239 - DNA, 21 bp, Artificial Sequence
  Synthetic
cggtgacagugatgttucacg

SEQ ID NO: 38240 - DNA, 21 bp, Artificial Sequence
  Synthetic
ccutctgcttatuccggcaca

SEQ ID NO: 38241 - DNA, 29 bp, Artificial Sequence
  Synthetic
ggttgguagagaacttagaguagaaaagg

SEQ ID NO: 38242 - DNA, 17 bp, Artificial Sequence
  Synthetic
gggtuccggcaguaggc

SEQ ID NO: 38243 - DNA, 24 bp, Artificial Sequence
  Synthetic
gtgtaggcagaauggttttgtugt

SEQ ID NO: 38244 - DNA, 19 bp, Artificial Sequence
  Synthetic
gggcgauggtgtactccug

SEQ ID NO: 38245 - DNA, 17 bp, Artificial Sequence
  Synthetic
cccgcuaacgcgaguct

SEQ ID NO: 38246 - DNA, 22 bp, Artificial Sequence
  Synthetic
aaagacatgagcuggcaggaut

SEQ ID NO: 38247 - DNA, 31 bp, Artificial Sequence; identical to SEQ ID NO: 26013
  Synthetic

SEQ ID NO: 38248 - DNA, 22 bp, Artificial Sequence
  Synthetic
ggattcgcagucgtgaaccaua

SEQ ID NO: 38249 - DNA, 22 bp, Artificial Sequence
  Synthetic
tcttttgugaccgctctcctug

SEQ ID NO: 38250 - DNA, 18 bp, Artificial Sequence
  Synthetic
caagcgagccgugagcua

SEQ ID NO: 38251 - DNA, 19 bp, Artificial Sequence
  Synthetic
cgaagctcugagggctucc

SEQ ID NO: 38252 - DNA, 22 bp, Artificial Sequence
  Synthetic
aggagaacctugtcctcctcut

SEQ ID NO: 38253 - DNA, 19 bp, Artificial Sequence
  Synthetic
actgaccacggccugttug

SEQ ID NO: 38254 - DNA, 20 bp, Artificial Sequence
  Synthetic
gaagccgucacagtggugat

SEQ ID NO: 38255 - DNA, 22 bp, Artificial Sequence
  Synthetic
gcgcagagacgcutttgaaaut

SEQ ID NO: 38256 - DNA, 24 bp, Artificial Sequence
  Synthetic
cgtctgggaacuatactccgaguc

SEQ ID NO: 38257 - DNA, 20 bp, Artificial Sequence
  Synthetic
agtguggccagcagguaaat

SEQ ID NO: 38258 - DNA, 22 bp, Artificial Sequence
  Synthetic
ccggcccaaucacaatgattuc

SEQ ID NO: 38259 - DNA, 25 bp, Artificial Sequence
  Synthetic
gatcttgugaacatcctcatugcac

SEQ ID NO: 38260 - DNA, 21 bp, Artificial Sequence
  Synthetic
cagaagcgaucaggaugacca

SEQ ID NO: 38261 - DNA, 23 bp, Artificial Sequence
  Synthetic
tgatcugaaccgaggacacctua

SEQ ID NO: 38262 - DNA, 21 bp, Artificial Sequence
  Synthetic
cccaggcucgtatagttgcug

SEQ ID NO: 38263 - DNA, 27 bp, Artificial Sequence
  Synthetic
agtcagtaagcuttcatgcaaagtuct

SEQ ID NO: 38264 - DNA, 19 bp, Artificial Sequence
  Synthetic
tgacccaagccgucaggua

SEQ ID NO: 38265 - DNA, 21 bp, Artificial Sequence
  Synthetic
tgtaatgctgugcgaagcuca

SEQ ID NO: 38266 - DNA, 23 bp, Artificial Sequence
  Synthetic
acaaaggaaccugttgaagcuga

SEQ ID NO: 38267 - DNA, 28 bp, Artificial Sequence
  Synthetic
aacaugtatatagucacccagaaagcag

SEQ ID NO: 38268 - DNA, 26 bp, Artificial Sequence
  Synthetic
aagtagaagcaauctgatgaacucca

SEQ ID NO: 38269 - DNA, 19 bp, Artificial Sequence
  Synthetic
tgctcucccagttcuccga

SEQ ID NO: 38270 - DNA, 20 bp, Artificial Sequence
  Synthetic
tgtagtacacgugcgtgugg

SEQ ID NO: 38271 - DNA, 22 bp, Artificial Sequence
  Synthetic
tgcaacatgtutcccctcctut

SEQ ID NO: 38272 - DNA, 22 bp, Artificial Sequence
  Synthetic
ggaucaccacagccttcaucac

SEQ ID NO: 38273 - DNA, 20 bp, Artificial Sequence
  Synthetic
catgtccagugcagctcuca

SEQ ID NO: 38274 - DNA, 22 bp, Artificial Sequence
  Synthetic
cauttgucaacggacagcagat

SEQ ID NO: 38275 - DNA, 20 bp, Artificial Sequence
  Synthetic
tgttctgugcccccattgut

SEQ ID NO: 38276 - DNA, 20 bp, Artificial Sequence
  Synthetic
gccgatucgaaggtgggtut

SEQ ID NO: 38277 - DNA, 22 bp, Artificial Sequence
  Synthetic
actgatgatgugccttccctug

SEQ ID NO: 38278 - DNA, 22 bp, Artificial Sequence
  Synthetic
gtgttttgcuctccaccctuct

SEQ ID NO: 38279 - DNA, 25 bp, Artificial Sequence
  Synthetic
gaaatgctgaauaaggctgaggtug

SEQ ID NO: 38280 - DNA, 27 bp, Artificial Sequence
  Synthetic
tgutcaaaactgaaauggaacaaacaa

SEQ ID NO: 38281 - DNA, 27 bp, Artificial Sequence
  Synthetic
catggcctcutctttttaacttugaca

SEQ ID NO: 38282 - DNA, 20 bp, Artificial Sequence
  Synthetic
cgccttaccugctgctcaut

SEQ ID NO: 38283 - DNA, 24 bp, Artificial Sequence
  Synthetic
agaccccuaaagaagaaggtgcua

SEQ ID NO: 38284 - DNA, 19 bp, Artificial Sequence
  Synthetic
tcuaucaaccgcgaggagg

SEQ ID NO: 38285 - DNA, 20 bp, Artificial Sequence
  Synthetic
tcgcggugggatuaaaagca

SEQ ID NO: 38286 - DNA, 23 bp, Artificial Sequence
  Synthetic
aagugggaggagagagtcugaaa

SEQ ID NO: 38287 - DNA, 17 bp, Artificial Sequence
  Synthetic
catggccucggctggua

SEQ ID NO: 38288 - DNA, 28 bp, Artificial Sequence
  Synthetic
ctttttcttctccuccgttttcttctuc

SEQ ID NO: 38289 - DNA, 23 bp, Artificial Sequence
  Synthetic
gagggccauggaactgcttaaua

SEQ ID NO: 38290 - DNA, 31 bp, Artificial Sequence; identical to SEQ ID NO: 26056
  Synthetic

SEQ ID NO: 38291 - DNA, 24 bp, Artificial Sequence
  Synthetic
gaucaacagaagaacccaguggaa

SEQ ID NO: 38292 - DNA, 28 bp, Artificial Sequence
  Synthetic
tccaatctctccutatactgctgatcut

SEQ ID NO: 38293 - DNA, 29 bp, Artificial Sequence
  Synthetic
tttgctgatacaguctattttctccucag

SEQ ID NO: 38294 - DNA, 28 bp, Artificial Sequence
  Synthetic
tgtactgcctautcactattgtttgugg

SEQ ID NO: 38295 - DNA, 28 bp, Artificial Sequence
  Synthetic
gctactcaggaggcutaaaaatatcugt

SEQ ID NO: 38296 - DNA, 21 bp, Artificial Sequence
  Synthetic
ggcggaucaccaagcaatcua

SEQ ID NO: 38297 - DNA, 28 bp, Artificial Sequence
  Synthetic
caaactatttuccattctgcatcuccag

SEQ ID NO: 38298 - DNA, 24 bp, Artificial Sequence
  Synthetic
tcaugaaccucagaagacaagaga

SEQ ID NO: 38299 - DNA, 24 bp, Artificial Sequence
  Synthetic
gtcttcttccugttcccttgucag

SEQ ID NO: 38300 - DNA, 27 bp, Artificial Sequence
  Synthetic
aatgattgtactuacctgccagagtuc

SEQ ID NO: 38301 - DNA, 22 bp, Artificial Sequence
  Synthetic
cctgaugcaggagcacatguat

SEQ ID NO: 38302 - DNA, 23 bp, Artificial Sequence
  Synthetic
tttgaagccaaggauggtgtuat

SEQ ID NO: 38303 - DNA, 26 bp, Artificial Sequence
  Synthetic
gtctttgtgugaatctttttccugca

SEQ ID NO: 38304 - DNA, 24 bp, Artificial Sequence
  Synthetic
ttaaatctguggtgtggcaaugac

SEQ ID NO: 38305 - DNA, 29 bp, Artificial Sequence
  Synthetic
cattctggtgtucttcacttattaccuca

SEQ ID NO: 38306 - DNA, 33 bp, Artificial Sequence; identical to SEQ ID NO: 26072
  Synthetic

SEQ ID NO: 38307 - DNA, 26 bp, Artificial Sequence
  Synthetic
ggtaggtgtutcttggaaatguggaa

SEQ ID NO: 38308 - DNA, 32 bp, Artificial Sequence; identical to SEQ ID NO: 26074
  Synthetic

SEQ ID NO: 38309 - DNA, 28 bp, Artificial Sequence
  Synthetic
gttaggtaaaatggugtatcctggcuat

SEQ ID NO: 38310 - DNA, 29 bp, Artificial Sequence
  Synthetic
tcaaaaagucatcaagacuccaaaagaca

SEQ ID NO: 38311 - DNA, 26 bp, Artificial Sequence
  Synthetic
ctccgagtaauctagctagcttucac

SEQ ID NO: 38312 - DNA, 22 bp, Artificial Sequence
  Synthetic
caaagcccacgcuctttcuact

SEQ ID NO: 38313 - DNA, 28 bp, Artificial Sequence
  Synthetic
tttgtgaactagauctgtgaatctugca

SEQ ID NO: 38314 - DNA, 28 bp, Artificial Sequence
  Synthetic
tcaaccttgaucaatagaagucaaaagt

SEQ ID NO: 38315 - DNA, 24 bp, Artificial Sequence
  Synthetic
ggtctgtcatucaccatttgacug

SEQ ID NO: 38316 - DNA, 21 bp, Artificial Sequence
  Synthetic
atttaggacugcatgcuggct

SEQ ID NO: 38317 - DNA, 29 bp, Artificial Sequence
  Synthetic
accatccccttaguattaggtgaaatcut

SEQ ID NO: 38318 - DNA, 24 bp, Artificial Sequence
  Synthetic
tuactggcatcuagaacagcaagg

SEQ ID NO: 38319 - DNA, 29 bp, Artificial Sequence
  Synthetic
tccctaggtctaaucctcttctttcttut

SEQ ID NO: 38320 - DNA, 20 bp, Artificial Sequence
  Synthetic
gtcagucgtccagugccaat

SEQ ID NO: 38321 - DNA, 25 bp, Artificial Sequence
  Synthetic
gccttctttucattttccctugcag

SEQ ID NO: 38322 - DNA, 29 bp, Artificial Sequence
  Synthetic
aaattccctctauagctatggaaagucct

SEQ ID NO: 38323 - DNA, 28 bp, Artificial Sequence
  Synthetic
tcgatattgtaacacuctgagtttgcut

SEQ ID NO: 38324 - DNA, 30 bp, Artificial Sequence; identical to SEQ ID NO: 26090
  Synthetic

SEQ ID NO: 38325 - DNA, 25 bp, Artificial Sequence
  Synthetic
ctgaggcttguttgattctgggaua

SEQ ID NO: 38326 - DNA, 24 bp, Artificial Sequence
  Synthetic
tgacauggctattagugcacaagg

SEQ ID NO: 38327 - DNA, 29 bp, Artificial Sequence
  Synthetic
aggtacttaggaauggcaaatttgtuaca

SEQ ID NO: 38328 - DNA, 22 bp, Artificial Sequence
  Synthetic
ccctcacuggagtcttccacut

SEQ ID NO: 38329 - DNA, 29 bp, Artificial Sequence
  Synthetic
ggttaatttgctugtgtttactttgguga

SEQ ID NO: 38330 - DNA, 21 bp, Artificial Sequence
  Synthetic
actgaggatuccctggaccut

SEQ ID NO: 38331 - DNA, 28 bp, Artificial Sequence
  Synthetic
tcttcacccccugaatcatttcattuaa

SEQ ID NO: 38332 - DNA, 19 bp, Artificial Sequence
  Synthetic
ctgctcaguctctccugct

SEQ ID NO: 38333 - DNA, 17 bp, Artificial Sequence
  Synthetic
gccaggacccugaccuc

SEQ ID NO: 38334 - DNA, 22 bp, Artificial Sequence
  Synthetic
cctactgtgaccucagccacua

SEQ ID NO: 38335 - DNA, 21 bp, Artificial Sequence
  Synthetic
gccagggaguaaaccuggaag

SEQ ID NO: 38336 - DNA, 21 bp, Artificial Sequence
  Synthetic
ccggtttugggtatggguact

SEQ ID NO: 38337 - DNA, 19 bp, Artificial Sequence
  Synthetic
gtggcccuacctacccaug

SEQ ID NO: 38338 - DNA, 19 bp, Artificial Sequence
  Synthetic
caggtgggutagcacguga

SEQ ID NO: 38339 - DNA, 22 bp, Artificial Sequence
  Synthetic
gttggcttaguctccccatcug

SEQ ID NO: 38340 - DNA, 21 bp, Artificial Sequence
  Synthetic
gggaggaaccagaugtccaug

SEQ ID NO: 38341 - DNA, 17 bp, Artificial Sequence
  Synthetic
ctggccugcctctgcua

SEQ ID NO: 38342 - DNA, 20 bp, Artificial Sequence
  Synthetic
gccacaaugctggcatugag

SEQ ID NO: 38343 - DNA, 20 bp, Artificial Sequence
  Synthetic
gtggcacagacugtguccat

SEQ ID NO: 38344 - DNA, 17 bp, Artificial Sequence
  Synthetic
ccauacccggccgagug

SEQ ID NO: 38345 - DNA, 17 bp, Artificial Sequence
  Synthetic
aggtgcgcgugtctcug

SEQ ID NO: 38346 - DNA, 20 bp, Artificial Sequence
  Synthetic
gggtuggagggaacacacuc

SEQ ID NO: 38347 - DNA, 22 bp, Artificial Sequence
  Synthetic
tctgactggacugtgtgtguct

SEQ ID NO: 38348 - DNA, 17 bp, Artificial Sequence
  Synthetic
gggcgugagcucaggat

SEQ ID NO: 38349 - DNA, 17 bp, Artificial Sequence
  Synthetic
gcccugccacuggacac

SEQ ID NO: 38350 - DNA, 23 bp, Artificial Sequence
  Synthetic
tcagccactcugcttacaatguc

SEQ ID NO: 38351 - DNA, 23 bp, Artificial Sequence
  Synthetic
gtggaugaacagcaccttgttuc

SEQ ID NO: 38352 - DNA, 21 bp, Artificial Sequence
  Synthetic
catcatgucctagcccugacc

SEQ ID NO: 38353 - DNA, 27 bp, Artificial Sequence
  Synthetic
gtgttcgctttutccccttttaatuca

SEQ ID NO: 38354 - DNA, 19 bp, Artificial Sequence
  Synthetic
ctgtucagaccacccucgt

SEQ ID NO: 38355 - DNA, 24 bp, Artificial Sequence
  Synthetic
actcctgatuggctttgtcttucc

SEQ ID NO: 38356 - DNA, 21 bp, Artificial Sequence
  Synthetic
tgtctcagggucactcaggut

SEQ ID NO: 38357 - DNA, 17 bp, Artificial Sequence
  Synthetic
ccaggucgctcccucac

SEQ ID NO: 38358 - DNA, 23 bp, Artificial Sequence
  Synthetic
ctgtccttgccuacttcttccut

SEQ ID NO: 38359 - DNA, 21 bp, Artificial Sequence
  Synthetic
aggagguagcggtcctcauac

SEQ ID NO: 38360 - DNA, 20 bp, Artificial Sequence
  Synthetic
ctccugacagccctctgtuc

SEQ ID NO: 38361 - DNA, 21 bp, Artificial Sequence
  Synthetic
gatgctagugctccctgcuaa

SEQ ID NO: 38362 - DNA, 21 bp, Artificial Sequence
  Synthetic
cacctgugctgtctcttucct

SEQ ID NO: 38363 - DNA, 19 bp, Artificial Sequence
  Synthetic
aggaccaaggaugggugga

SEQ ID NO: 38364 - DNA, 21 bp, Artificial Sequence
  Synthetic
ggtguccagggactggtaugt

SEQ ID NO: 38365 - DNA, 20 bp, Artificial Sequence
  Synthetic
ccttcgagucccaacaggug

SEQ ID NO: 38366 - DNA, 20 bp, Artificial Sequence
  Synthetic
ggtgggtgacuctgagccut

SEQ ID NO: 38367 - DNA, 20 bp, Artificial Sequence
  Synthetic
cagggatcuctgggttugct

SEQ ID NO: 38368 - DNA, 22 bp, Artificial Sequence
  Synthetic
gcctccctaguggtatcctgut

SEQ ID NO: 38369 - DNA, 24 bp, Artificial Sequence
  Synthetic
ctcctcattguagagagacagugg

SEQ ID NO: 38370 - DNA, 22 bp, Artificial Sequence
  Synthetic
gctgagcugacaagcttcuact

SEQ ID NO: 38371 - DNA, 21 bp, Artificial Sequence
  Synthetic
cctttacaccuggaggctcug

SEQ ID NO: 38372 - DNA, 21 bp, Artificial Sequence
  Synthetic
gggaaggucaagaggcattuc

SEQ ID NO: 38373 - DNA, 27 bp, Artificial Sequence
  Synthetic
aatgagactcaucatgaacacagcuaa

SEQ ID NO: 38374 - DNA, 23 bp, Artificial Sequence
  Synthetic
caagtcttugcccagttctguct

SEQ ID NO: 38375 - DNA, 19 bp, Artificial Sequence
  Synthetic
cattcagcagucgguggga

SEQ ID NO: 38376 - DNA, 20 bp, Artificial Sequence
  Synthetic
ggtcttgguctcaccgtugt

SEQ ID NO: 38377 - DNA, 25 bp, Artificial Sequence
  Synthetic
cagtgtgagugagtgtcagtguaat

SEQ ID NO: 38378 - DNA, 21 bp, Artificial Sequence
  Synthetic
cctgcagcugtcctcugaaag

SEQ ID NO: 38379 - DNA, 24 bp, Artificial Sequence
  Synthetic
gcutgataccucccaaaaacggat

SEQ ID NO: 38380 - DNA, 23 bp, Artificial Sequence
  Synthetic
ggagacatacugtctgggtcuga

SEQ ID NO: 38381 - DNA, 28 bp, Artificial Sequence
  Synthetic
tcggatttttcacuttgctcatgtttut

SEQ ID NO: 38382 - DNA, 21 bp, Artificial Sequence
  Synthetic
agcugaacaagucaaggacac

SEQ ID NO: 38383 - DNA, 26 bp, Artificial Sequence
  Synthetic
gaacaagctagauacaatcagcucca

SEQ ID NO: 38384 - DNA, 22 bp, Artificial Sequence
  Synthetic
caaaaagcaagcuccacctguc

SEQ ID NO: 38385 - DNA, 22 bp, Artificial Sequence
  Synthetic
ccctcccuctgctttacaauca

SEQ ID NO: 38386 - DNA, 26 bp, Artificial Sequence
  Synthetic
gtgggagtgugaagaatgattctugt

SEQ ID NO: 38387 - DNA, 25 bp, Artificial Sequence
  Synthetic
acugaggagctgtuaaagaaagcaa

SEQ ID NO: 38388 - DNA, 23 bp, Artificial Sequence
  Synthetic
ggactgggagugaagatacuggt

SEQ ID NO: 38389 - DNA, 22 bp, Artificial Sequence
  Synthetic
agacagtcucccaggttcucag

SEQ ID NO: 38390 - DNA, 23 bp, Artificial Sequence
  Synthetic
cctgtgagcaauggcacaaaauc

SEQ ID NO: 38391 - DNA, 28 bp, Artificial Sequence
  Synthetic
tgacttcagttguctttgtttctctuca

SEQ ID NO: 38392 - DNA, 22 bp, Artificial Sequence
  Synthetic
gcttctcaaagugaggctugca

SEQ ID NO: 38393 - DNA, 27 bp, Artificial Sequence
  Synthetic
gtgttcatatatgutctgcccttguct

SEQ ID NO: 38394 - DNA, 27 bp, Artificial Sequence
  Synthetic
tttcccaaccacauactaaatcugacc

SEQ ID NO: 38395 - DNA, 26 bp, Artificial Sequence
  Synthetic
cccctgtgttcutctcttccatttua

SEQ ID NO: 38396 - DNA, 27 bp, Artificial Sequence
  Synthetic
gctgagatttggugagacacagaauag

SEQ ID NO: 38397 - DNA, 29 bp, Artificial Sequence
  Synthetic
gcactgagtugacactctgaagtattuaa

SEQ ID NO: 38398 - DNA, 30 bp, Artificial Sequence; identical to SEQ ID NO: 26164
  Synthetic

SEQ ID NO: 38399 - DNA, 25 bp, Artificial Sequence
  Synthetic
ctcttctcaacgggutccttttcua

SEQ ID NO: 38400 - DNA, 30 bp, Artificial Sequence; identical to SEQ ID NO: 26166
  Synthetic

SEQ ID NO: 38401 - DNA, 27 bp, Artificial Sequence
  Synthetic
gactgccctugttcttttacatttuca

SEQ ID NO: 38402 - DNA, 24 bp, Artificial Sequence
  Synthetic
tgtatcagcaggautctaguggct

SEQ ID NO: 38403 - DNA, 20 bp, Artificial Sequence
  Synthetic
gcctucgagcgagagaaugg

SEQ ID NO: 38404 - DNA, 17 bp, Artificial Sequence
  Synthetic
ccagtguccgtcgcguc

SEQ ID NO: 38405 - DNA, 20 bp, Artificial Sequence
  Synthetic
ggcagaacucaccttugcct

SEQ ID NO: 38406 - DNA, 20 bp, Artificial Sequence
  Synthetic
cagcatctcuacggcacgua

SEQ ID NO: 38407 - DNA, 21 bp, Artificial Sequence
  Synthetic
ccatgccaagcutcagtguca

SEQ ID NO: 38408 - DNA, 21 bp, Artificial Sequence
  Synthetic
cuctgctucccagagacaagg

SEQ ID NO: 38409 - DNA, 26 bp, Artificial Sequence
  Synthetic
tgaagaataaaccagauggcttgugt

SEQ ID NO: 38410 - DNA, 19 bp, Artificial Sequence
  Synthetic
ggtggtgauggtgccctuc

SEQ ID NO: 38411 - DNA, 18 bp, Artificial Sequence
  Synthetic
acacggtugggtggcuac

SEQ ID NO: 38412 - DNA, 21 bp, Artificial Sequence
  Synthetic
cagacgtgguacctgcaucag

SEQ ID NO: 38413 - DNA, 21 bp, Artificial Sequence
  Synthetic
atgaagagugagcaccucaut

SEQ ID NO: 38414 - DNA, 23 bp, Artificial Sequence
  Synthetic
ggtcaaugactcagactuccagg

SEQ ID NO: 38415 - DNA, 23 bp, Artificial Sequence
  Synthetic
ccuttcaatctuccccagacagg

SEQ ID NO: 38416 - DNA, 23 bp, Artificial Sequence
  Synthetic
ccugtttgtgaaugacaccaagg

SEQ ID NO: 38417 - DNA, 22 bp, Artificial Sequence
  Synthetic
tgcagctguactgcttttcuca

SEQ ID NO: 38418 - DNA, 20 bp, Artificial Sequence
  Synthetic
gcaggauctgccuaggaggt

SEQ ID NO: 38419 - DNA, 22 bp, Artificial Sequence
  Synthetic
atgccctgautaaaccctgcut

SEQ ID NO: 38420 - DNA, 19 bp, Artificial Sequence
  Synthetic
cagagcauacgcagccugt

SEQ ID NO: 38421 - DNA, 20 bp, Artificial Sequence
  Synthetic
cctccggaaggucatcucag

SEQ ID NO: 38422 - DNA, 20 bp, Artificial Sequence
  Synthetic
ttcctccccugtcatccuca

SEQ ID NO: 38423 - DNA, 17 bp, Artificial Sequence
  Synthetic
cctgtgccuggcaggua

SEQ ID NO: 38424 - DNA, 20 bp, Artificial Sequence
  Synthetic
ctccuggaagacccaagcug

SEQ ID NO: 38425 - DNA, 21 bp, Artificial Sequence
  Synthetic
aatgagatgaggucgcccaug

SEQ ID NO: 38426 - DNA, 22 bp, Artificial Sequence
  Synthetic
catggccugacgactcgtgcua

SEQ ID NO: 38427 - DNA, 21 bp, Artificial Sequence
  Synthetic
catggugcacctgggauccct

SEQ ID NO: 38428 - DNA, 22 bp, Artificial Sequence
  Synthetic
cactggtccuttcactctcugc

SEQ ID NO: 38429 - DNA, 21 bp, Artificial Sequence
  Synthetic
agggaaugcacacagatgucc

SEQ ID NO: 38430 - DNA, 26 bp, Artificial Sequence
  Synthetic
ctgagttguatctagttguggcacat

SEQ ID NO: 38431 - DNA, 29 bp, Artificial Sequence
  Synthetic
aaatgcatgggaaautctaccatagagut

SEQ ID NO: 38432 - DNA, 26 bp, Artificial Sequence
  Synthetic
gttcttcagugcagaacaaatgauct

SEQ ID NO: 38433 - DNA, 29 bp, Artificial Sequence
  Synthetic
gagtccattaccuttcacaaagaaatgut

SEQ ID NO: 38434 - DNA, 20 bp, Artificial Sequence
  Synthetic
gcaccccaaggcuggaauaa

SEQ ID NO: 38435 - DNA, 21 bp, Artificial Sequence
  Synthetic
cctcttctucgctgtccucag

SEQ ID NO: 38436 - DNA, 17 bp, Artificial Sequence
  Synthetic
gaagugcggccagctug

SEQ ID NO: 38437 - DNA, 17 bp, Artificial Sequence
  Synthetic
ctctccucggctcugct

SEQ ID NO: 38438 - DNA, 21 bp, Artificial Sequence
  Synthetic
gagggtttgugacaggccuat

SEQ ID NO: 38439 - DNA, 22 bp, Artificial Sequence
  Synthetic
gagagggcuccaaaagtcacuc

SEQ ID NO: 38440 - DNA, 19 bp, Artificial Sequence
  Synthetic
tgcaugcgacacttggugt

SEQ ID NO: 38441 - DNA, 24 bp, Artificial Sequence
  Synthetic
ccctcttctaugggttccttguct

SEQ ID NO: 38442 - DNA, 18 bp, Artificial Sequence
  Synthetic
ccugggaggaagggcuca

SEQ ID NO: 38443 - DNA, 24 bp, Artificial Sequence
  Synthetic
acagagcuggaaaaagacaagguc

SEQ ID NO: 38444 - DNA, 22 bp, Artificial Sequence
  Synthetic
gccccttugcatgaagcaauac

SEQ ID NO: 38445 - DNA, 23 bp, Artificial Sequence
  Synthetic
cggagaagguaatggacgugaac

SEQ ID NO: 38446 - DNA, 23 bp, Artificial Sequence
  Synthetic
gggatctgutcactcagtugaga

SEQ ID NO: 38447 - DNA, 22 bp, Artificial Sequence
  Synthetic
catgagaugggcatggagaugt

SEQ ID NO: 38448 - DNA, 21 bp, Artificial Sequence
  Synthetic
cactcccuctttcctgtugca

SEQ ID NO: 38449 - DNA, 24 bp, Artificial Sequence
  Synthetic
gttaagacgcuttccagacugaca

SEQ ID NO: 38450 - DNA, 22 bp, Artificial Sequence
  Synthetic
cuaggacacagaucaggctcua

SEQ ID NO: 38451 - DNA, 30 bp, Artificial Sequence; identical to SEQ ID NO: 26217
  Synthetic

SEQ ID NO: 38452 - DNA, 23 bp, Artificial Sequence
  Synthetic
accatgtgccautcatcctucat

SEQ ID NO: 38453 - DNA, 20 bp, Artificial Sequence
  Synthetic
gcagccucactggtttccug

SEQ ID NO: 38454 - DNA, 22 bp, Artificial Sequence
  Synthetic
gcccacttcucatctcctgtuc

SEQ ID NO: 38455 - DNA, 22 bp, Artificial Sequence
  Synthetic
acactactcutgggcgauagct

SEQ ID NO: 38456 - DNA, 22 bp, Artificial Sequence
  Synthetic
agccagagaccauccttttcug

SEQ ID NO: 38457 - DNA, 23 bp, Artificial Sequence
  Synthetic
cctcgtggcuttttcctttgtug

SEQ ID NO: 38458 - DNA, 31 bp, Artificial Sequence; identical to SEQ ID NO: 26224
  Synthetic

SEQ ID NO: 38459 - DNA, 28 bp, Artificial Sequence
  Synthetic
cctccatataccaaugacaaaactguga

SEQ ID NO: 38460 - DNA, 28 bp, Artificial Sequence
  Synthetic
tgatgttcttacugtcaatcatggacuc

SEQ ID NO: 38461 - DNA, 26 bp, Artificial Sequence
  Synthetic
cacatgaggagaaugtacctcugaac

SEQ ID NO: 38462 - DNA, 27 bp, Artificial Sequence
  Synthetic
gccgttgatatuactgtggatacuagg

SEQ ID NO: 38463 - DNA, 28 bp, Artificial Sequence
  Synthetic
gttttggattucacaggcaatgtaauca

SEQ ID NO: 38464 - DNA, 21 bp, Artificial Sequence
  Synthetic
gtacctgauagccccauggac

SEQ ID NO: 38465 - DNA, 29 bp, Artificial Sequence
  Synthetic
aagaaccuaagauggaagaagaagaacac

SEQ ID NO: 38466 - DNA, 25 bp, Artificial Sequence
  Synthetic
gactctgtggautccgattcttcug

SEQ ID NO: 38467 - DNA, 23 bp, Artificial Sequence
  Synthetic
gaaacucactcuggaccaagagg

SEQ ID NO: 38468 - DNA, 24 bp, Artificial Sequence
  Synthetic
gggaatattcuggctctctuccat

SEQ ID NO: 38469 - DNA, 27 bp, Artificial Sequence
  Synthetic
gctgacactucaattgcatttucacaa

SEQ ID NO: 38470 - DNA, 23 bp, Artificial Sequence
  Synthetic
cctcaccauattcctcctgucca

SEQ ID NO: 38471 - DNA, 22 bp, Artificial Sequence
  Synthetic
tcgautgaauggcggaagaaaa

SEQ ID NO: 38472 - DNA, 30 bp, Artificial Sequence; identical to SEQ ID NO: 26238
  Synthetic

SEQ ID NO: 38473 - DNA, 27 bp, Artificial Sequence
  Synthetic
gtgccctucagaagtaacaaataugga

SEQ ID NO: 38474 - DNA, 23 bp, Artificial Sequence
  Synthetic
ctgaggaugccttttggttcuct

SEQ ID NO: 38475 - DNA, 23 bp, Artificial Sequence
  Synthetic
caccaccuccttctattcctugc

SEQ ID NO: 38476 - DNA, 25 bp, Artificial Sequence
  Synthetic
gacgtugaaacggaaaguggaaaaa

SEQ ID NO: 38477 - DNA, 24 bp, Artificial Sequence
  Synthetic
aattttgcccauccaccaaacauc

SEQ ID NO: 38478 - DNA, 30 bp, Artificial Sequence; identical to SEQ ID NO: 26244
  Synthetic

SEQ ID NO: 38479 - DNA, 27 bp, Artificial Sequence
  Synthetic
gtacaaacaaaagagguagcagcaauc

SEQ ID NO: 38480 - DNA, 24 bp, Artificial Sequence
  Synthetic
agcctctgaaucttttctctuggg

SEQ ID NO: 38481 - DNA, 25 bp, Artificial Sequence
  Synthetic
gtagacggaucactuaagagcaaca

SEQ ID NO: 38482 - DNA, 30 bp, Artificial Sequence; identical to SEQ ID NO: 26248
  Synthetic

SEQ ID NO: 38483 - DNA, 28 bp, Artificial Sequence
  Synthetic
cttgctttaguaggttagtgttgttugg

SEQ ID NO: 38484 - DNA, 24 bp, Artificial Sequence
  Synthetic
gcaccaucaatatttuacaacgca

SEQ ID NO: 38485 - DNA, 28 bp, Artificial Sequence
  Synthetic
accagcatuaaaaagagaggagaaaguc

SEQ ID NO: 38486 - DNA, 28 bp, Artificial Sequence
  Synthetic
aagtacttatagccucaagtcagaauca

SEQ ID NO: 38487 - DNA, 28 bp, Artificial Sequence
  Synthetic
ttccctagaagautacaccaaatgugac

SEQ ID NO: 38488 - DNA, 30 bp, Artificial Sequence; identical to SEQ ID NO: 26254
  Synthetic

SEQ ID NO: 38489 - DNA, 21 bp, Artificial Sequence
  Synthetic
ctttcagguctccgtggucaa

SEQ ID NO: 38490 - DNA, 28 bp, Artificial Sequence
  Synthetic
cttgaaacttgaaguaggatctccucat

SEQ ID NO: 38491 - DNA, 31 bp, Artificial Sequence; identical to SEQ ID NO: 26257
  Synthetic

SEQ ID NO: 38492 - DNA, 31 bp, Artificial Sequence; identical to SEQ ID NO: 26258
  Synthetic

SEQ ID NO: 38493 - DNA, 26 bp, Artificial Sequence
  Synthetic
tgtgaatggaccuctggattaugaga

SEQ ID NO: 38494 - DNA, 28 bp, Artificial Sequence
  Synthetic
ctaagtttacuggttgatggugagaaca

SEQ ID NO: 38495 - DNA, 29 bp, Artificial Sequence
  Synthetic
aatacatcatcutctctaaaccugcagac

SEQ ID NO: 38496 - DNA, 26 bp, Artificial Sequence
  Synthetic
aaaaatgtgcugtcatctgtuaagcc

SEQ ID NO: 38497 - DNA, 26 bp, Artificial Sequence
  Synthetic
ctgccaguatttttgaaguggaagaa

SEQ ID NO: 38498 - DNA, 31 bp, Artificial Sequence; identical to SEQ ID NO: 26264
  Synthetic

SEQ ID NO: 38499 - DNA, 28 bp, Artificial Sequence
  Synthetic
cctaacctggtutcaactgaagtacuaa

SEQ ID NO: 38500 - DNA, 23 bp, Artificial Sequence
  Synthetic
ttcttggtcuggaaatgccucat

SEQ ID NO: 38501 - DNA, 31 bp, Artificial Sequence; identical to SEQ ID NO: 26267
  Synthetic

SEQ ID NO: 38502 - DNA, 23 bp, Artificial Sequence
  Synthetic
ccagcuggcaaattctctucaac

SEQ ID NO: 38503 - DNA, 27 bp, Artificial Sequence
  Synthetic
acagagaagucagggactactaugaac

SEQ ID NO: 38504 - DNA, 30 bp, Artificial Sequence; identical to SEQ ID NO: 26270
  Synthetic

SEQ ID NO: 38505 - DNA, 28 bp, Artificial Sequence
  Synthetic
agtgttugatccttatcugccaagaaat

SEQ ID NO: 38506 - DNA, 21 bp, Artificial Sequence
  Synthetic
cctucacagggagcatacuca

SEQ ID NO: 38507 - DNA, 31 bp, Artificial Sequence; identical to SEQ ID NO: 26273
  Synthetic

SEQ ID NO: 38508 - DNA, 30 bp, Artificial Sequence; identical to SEQ ID NO: 26274
  Synthetic

SEQ ID NO: 38509 - DNA, 28 bp, Artificial Sequence
  Synthetic
cgtaaccatctucttttcctctcttuct

SEQ ID NO: 38510 - DNA, 21 bp, Artificial Sequence
  Synthetic
gcgatggtgauaagccctgut

SEQ ID NO: 38511 - DNA, 24 bp, Artificial Sequence
  Synthetic
gacatgguggtgaaaagtugagac

SEQ ID NO: 38512 - DNA, 21 bp, Artificial Sequence
  Synthetic
agggaaggtuggcgtgttauc

SEQ ID NO: 38513 - DNA, 30 bp, Artificial Sequence; identical to SEQ ID NO: 26279
  Synthetic

SEQ ID NO: 38514 - DNA, 30 bp, Artificial Sequence; identical to SEQ ID NO: 26280
  Synthetic

SEQ ID NO: 38515 - DNA, 27 bp, Artificial Sequence
  Synthetic
gtgcggttgugatcatttacattuaca

SEQ ID NO: 38516 - DNA, 22 bp, Artificial Sequence
  Synthetic
agactgtccgaaauggttgcuc

SEQ ID NO: 38517 - DNA, 26 bp, Artificial Sequence
  Synthetic
gtgaaacuccaaaaagauagcacgac

SEQ ID NO: 38518 - DNA, 24 bp, Artificial Sequence
  Synthetic
tttactggcuccaggagacuaagt

SEQ ID NO: 38519 - DNA, 23 bp, Artificial Sequence
  Synthetic
gctttgttccucagctgaugaag

SEQ ID NO: 38520 - DNA, 31 bp, Artificial Sequence; identical to SEQ ID NO: 26286
  Synthetic

SEQ ID NO: 38521 - DNA, 25 bp, Artificial Sequence
  Synthetic
tccaatgtttctuccttgtgtccut

SEQ ID NO: 38522 - DNA, 23 bp, Artificial Sequence
  Synthetic
gcacagagcuctccaagagtauc

SEQ ID NO: 38523 - DNA, 29 bp, Artificial Sequence
  Synthetic
cccctaatgttgacuggaaatatagtgut

SEQ ID NO: 38524 - DNA, 27 bp, Artificial Sequence
  Synthetic
aggtatttacauaccggatcatcugga

SEQ ID NO: 38525 - DNA, 26 bp, Artificial Sequence
  Synthetic
atttctggtgugcagttgataaaaug

SEQ ID NO: 38526 - DNA, 29 bp, Artificial Sequence
  Synthetic
cttcatggtagauaatagtgcccacttut

SEQ ID NO: 38527 - DNA, 27 bp, Artificial Sequence
  Synthetic
gaaaaatgtacugaatgaacgagugct

SEQ ID NO: 38528 - DNA, 31 bp, Artificial Sequence; identical to SEQ ID NO: 26294
  Synthetic

SEQ ID NO: 38529 - DNA, 20 bp, Artificial Sequence
  Synthetic
gccgcgguttaagagcauga

SEQ ID NO: 38530 - DNA, 22 bp, Artificial Sequence
  Synthetic
caggaagctuctcaccctctuc

SEQ ID NO: 38531 - DNA, 22 bp, Artificial Sequence
  Synthetic
gucccagagcacaaagaugaac

SEQ ID NO: 38532 - DNA, 20 bp, Artificial Sequence
  Synthetic
tctgctctcucccttggcua

SEQ ID NO: 38533 - DNA, 21 bp, Artificial Sequence
  Synthetic
ctguccccaggagagaatugg

SEQ ID NO: 38534 - DNA, 22 bp, Artificial Sequence
  Synthetic
tcacaggattuctggaccccua

SEQ ID NO: 38535 - DNA, 24 bp, Artificial Sequence
  Synthetic
ggtctctgauaccctcaaggguaa

SEQ ID NO: 38536 - DNA, 22 bp, Artificial Sequence
  Synthetic
cccaattcutcgccatugacag

SEQ ID NO: 38537 - DNA, 23 bp, Artificial Sequence
  Synthetic
ctgggtcaaugtcccatuggaat

SEQ ID NO: 38538 - DNA, 24 bp, Artificial Sequence
  Synthetic
caaactcaaguccctcctctctuc

SEQ ID NO: 38539 - DNA, 21 bp, Artificial Sequence
  Synthetic
tcagagccugagatgccuact

SEQ ID NO: 38540 - DNA, 22 bp, Artificial Sequence
  Synthetic
gggtgactgauctctgtccaua

SEQ ID NO: 38541 - DNA, 22 bp, Artificial Sequence
  Synthetic
ccaccuggatgaagaguggaag

SEQ ID NO: 38542 - DNA, 22 bp, Artificial Sequence
  Synthetic
ccttcctgacuggcttcttcug

SEQ ID NO: 38543 - DNA, 22 bp, Artificial Sequence
  Synthetic
ccactccaaaaugccagugagt

SEQ ID NO: 38544 - DNA, 25 bp, Artificial Sequence
  Synthetic
ctatgccaaggugaagatcactcuc

SEQ ID NO: 38545 - DNA, 21 bp, Artificial Sequence
  Synthetic
ccttccctgautgctgagguc

SEQ ID NO: 38546 - DNA, 22 bp, Artificial Sequence
  Synthetic
gcctggcaguaatgacttctug

SEQ ID NO: 38547 - DNA, 26 bp, Artificial Sequence
  Synthetic
gaaaagttcccagauctcatgaguct

SEQ ID NO: 38548 - DNA, 21 bp, Artificial Sequence
  Synthetic
ccgggucaggatcaatgtgut

SEQ ID NO: 38549 - DNA, 27 bp, Artificial Sequence
  Synthetic
gtacagggagaaggcuaagataaaugg

SEQ ID NO: 38550 - DNA, 24 bp, Artificial Sequence
  Synthetic
ctcaagtctgcutacagagggauc

SEQ ID NO: 38551 - DNA, 23 bp, Artificial Sequence
  Synthetic
agcactcaccaucccttacacua

SEQ ID NO: 38552 - DNA, 20 bp, Artificial Sequence
  Synthetic
cccacctutttcccccugaa

SEQ ID NO: 38553 - DNA, 20 bp, Artificial Sequence
  Synthetic
gtggaggaccaggguactug

SEQ ID NO: 38554 - DNA, 18 bp, Artificial Sequence
  Synthetic
aagatugcccgugggcat

SEQ ID NO: 38555 - DNA, 19 bp, Artificial Sequence
  Synthetic
ctgctcugccaccaccuac

SEQ ID NO: 38556 - DNA, 19 bp, Artificial Sequence
  Synthetic
gcacccuggtguacagcat

SEQ ID NO: 38557 - DNA, 18 bp, Artificial Sequence
  Synthetic
cccgcagccuaaggtgug

SEQ ID NO: 38558 - DNA, 22 bp, Artificial Sequence
  Synthetic
gagaagcauccatcccagtguc

SEQ ID NO: 38559 - DNA, 18 bp, Artificial Sequence
  Synthetic
cagcuggtacuccgcgat

SEQ ID NO: 38560 - DNA, 23 bp, Artificial Sequence
  Synthetic
attcattcccuacttggtcuggt

SEQ ID NO: 38561 - DNA, 19 bp, Artificial Sequence
  Synthetic
tcgttguccgtgcagtuca

SEQ ID NO: 38562 - DNA, 19 bp, Artificial Sequence
  Synthetic
ccagcucaggagcagaguc

SEQ ID NO: 38563 - DNA, 18 bp, Artificial Sequence
  Synthetic
gtgcgggacuggtgcaua

SEQ ID NO: 38564 - DNA, 24 bp, Artificial Sequence
  Synthetic
actgtccuggatgtgaaugacaac

SEQ ID NO: 38565 - DNA, 19 bp, Artificial Sequence
  Synthetic
ctctggugccacugagcat

SEQ ID NO: 38566 - DNA, 18 bp, Artificial Sequence
  Synthetic
gggtcugtcccuccacac

SEQ ID NO: 38567 - DNA, 18 bp, Artificial Sequence
  Synthetic
ccgtccugaggucagcac

SEQ ID NO: 38568 - DNA, 22 bp, Artificial Sequence
  Synthetic
ccccacucagttctatcuggga

SEQ ID NO: 38569 - DNA, 24 bp, Artificial Sequence
  Synthetic
cgacacatucatcatgtagcuggt

SEQ ID NO: 38570 - DNA, 22 bp, Artificial Sequence
  Synthetic
ggcactggguactgagattgug

SEQ ID NO: 38571 - DNA, 28 bp, Artificial Sequence
  Synthetic
gacattttaugacaaagaggagagugct

SEQ ID NO: 38572 - DNA, 22 bp, Artificial Sequence
  Synthetic
ctgtaggtcuctgaccacgtuc

SEQ ID NO: 38573 - DNA, 21 bp, Artificial Sequence
  Synthetic
ggtggatccuggctgttucac

SEQ ID NO: 38574 - DNA, 21 bp, Artificial Sequence
  Synthetic
gctttagcccugactccagut

SEQ ID NO: 38575 - DNA, 22 bp, Artificial Sequence
  Synthetic
cccccgtaugtccagctataug

SEQ ID NO: 38576 - DNA, 19 bp, Artificial Sequence
  Synthetic
ccgcaucagcggtgagauc

SEQ ID NO: 38577 - DNA, 25 bp, Artificial Sequence
  Synthetic
ggaattccatuctcacccatctugt

SEQ ID NO: 38578 - DNA, 20 bp, Artificial Sequence
  Synthetic
ccaacggcacagucaccuat

SEQ ID NO: 38579 - DNA, 21 bp, Artificial Sequence
  Synthetic
agactgcauctttgctccauc

SEQ ID NO: 38580 - DNA, 26 bp, Artificial Sequence
  Synthetic
gaggcagaatuatcaggtccattuca

SEQ ID NO: 38581 - DNA, 23 bp, Artificial Sequence
  Synthetic
cagtgactucaaatggtcccuca

SEQ ID NO: 38582 - DNA, 21 bp, Artificial Sequence
  Synthetic
gagugaggcttgcuagaggaa

SEQ ID NO: 38583 - DNA, 22 bp, Artificial Sequence
  Synthetic
ggttguagaaggcgatggtcuc

SEQ ID NO: 38584 - DNA, 19 bp, Artificial Sequence
  Synthetic
cgaacctccucctcggtug

SEQ ID NO: 38585 - DNA, 19 bp, Artificial Sequence
  Synthetic
agggctgtuctcgctgaug

SEQ ID NO: 38586 - DNA, 25 bp, Artificial Sequence
  Synthetic
aaguagaaaguagggaaaaggtcuc

SEQ ID NO: 38587 - DNA, 20 bp, Artificial Sequence
  Synthetic
tctctctccaugcgcctcua

SEQ ID NO: 38588 - DNA, 18 bp, Artificial Sequence
  Synthetic
gggctgggutggtctugt

SEQ ID NO: 38589 - DNA, 20 bp, Artificial Sequence
  Synthetic
ccagaaucaggctgggagug

SEQ ID NO: 38590 - DNA, 24 bp, Artificial Sequence
  Synthetic
ctcatcaccaucctggaugacaat

SEQ ID NO: 38591 - DNA, 20 bp, Artificial Sequence
  Synthetic
gcaaacuccgtguccaacct

SEQ ID NO: 38592 - DNA, 21 bp, Artificial Sequence
  Synthetic
tgttggtaaugccaccaucga

SEQ ID NO: 38593 - DNA, 22 bp, Artificial Sequence
  Synthetic
tggtcaauggccgtgatatugg

SEQ ID NO: 38594 - DNA, 22 bp, Artificial Sequence
  Synthetic
ccugggaagggcagatttuagg

SEQ ID NO: 38595 - DNA, 23 bp, Artificial Sequence
  Synthetic
caatgagagaugtcugcagggaa

SEQ ID NO: 38596 - DNA, 22 bp, Artificial Sequence
  Synthetic
gccctttgggaucacctacuac

SEQ ID NO: 38597 - DNA, 26 bp, Artificial Sequence
  Synthetic
cctcctcugacagatttctaaccuac

SEQ ID NO: 38598 - DNA, 20 bp, Artificial Sequence
  Synthetic
ggactgaccutggcctacuc

SEQ ID NO: 38599 - DNA, 23 bp, Artificial Sequence
  Synthetic
gtccttcccacutccaaatucca

SEQ ID NO: 38600 - DNA, 21 bp, Artificial Sequence
  Synthetic
cctttggccutgacctccauc

SEQ ID NO: 38601 - DNA, 21 bp, Artificial Sequence
  Synthetic
tguccaaggaaggccacauac

SEQ ID NO: 38602 - DNA, 21 bp, Artificial Sequence
  Synthetic
cgagaagutcagtcugaccgt

SEQ ID NO: 38603 - DNA, 23 bp, Artificial Sequence
  Synthetic
gccacagcuggaagaaggaaaua

SEQ ID NO: 38604 - DNA, 25 bp, Artificial Sequence
  Synthetic
agttcttcatcaucgacccaaucag

SEQ ID NO: 38605 - DNA, 21 bp, Artificial Sequence
  Synthetic
agttccccuagggacttucca

SEQ ID NO: 38606 - DNA, 20 bp, Artificial Sequence
  Synthetic
ggccccaugtgatgacaucc

SEQ ID NO: 38607 - DNA, 23 bp, Artificial Sequence
  Synthetic
gtaatcagggcacuagctctguc

SEQ ID NO: 38608 - DNA, 20 bp, Artificial Sequence
  Synthetic
ttcatcgucaaggccuccag

SEQ ID NO: 38609 - DNA, 19 bp, Artificial Sequence
  Synthetic
gcagguggtgtaaguggca

SEQ ID NO: 38610 - DNA, 21 bp, Artificial Sequence
  Synthetic
gcactgagtcuctgagccgua

SEQ ID NO: 38611 - DNA, 26 bp, Artificial Sequence
  Synthetic
gggatctcgutaatgacgatctugac

SEQ ID NO: 38612 - DNA, 21 bp, Artificial Sequence
  Synthetic
cctaaaagaggccugcccauc

SEQ ID NO: 38613 - DNA, 21 bp, Artificial Sequence
  Synthetic
acaggcugacaguccaaacac

SEQ ID NO: 38614 - DNA, 23 bp, Artificial Sequence
  Synthetic
aaggagcagcuacggaatcttut

SEQ ID NO: 38615 - DNA, 20 bp, Artificial Sequence
  Synthetic
aggacgatgaucgccatcug

SEQ ID NO: 38616 - DNA, 18 bp, Artificial Sequence
  Synthetic
gcaccccaucctcccuca

SEQ ID NO: 38617 - DNA, 18 bp, Artificial Sequence
  Synthetic
ctgggagacugcagcuct

SEQ ID NO: 38618 - DNA, 21 bp, Artificial Sequence
  Synthetic
gctccagcuaacatccccuct

SEQ ID NO: 38619 - DNA, 23 bp, Artificial Sequence
  Synthetic
tctctaccacccugtgttctcug

SEQ ID NO: 38620 - DNA, 21 bp, Artificial Sequence
  Synthetic
gcggcucaaaaagctcttugc

SEQ ID NO: 38621 - DNA, 25 bp, Artificial Sequence
  Synthetic
agagcuccagagacauagagaagga

SEQ ID NO: 38622 - DNA, 17 bp, Artificial Sequence
  Synthetic
cuggccaccgaccucaa

SEQ ID NO: 38623 - DNA, 22 bp, Artificial Sequence
  Synthetic
cacaaggctuccctgtctaguc

SEQ ID NO: 38624 - DNA, 19 bp, Artificial Sequence
  Synthetic
ggccguaggcagccuaaat

SEQ ID NO: 38625 - DNA, 18 bp, Artificial Sequence
  Synthetic
cucggauacgcggcagat

SEQ ID NO: 38626 - DNA, 23 bp, Artificial Sequence
  Synthetic
aaatgguaaggaagggcacauca

SEQ ID NO: 38627 - DNA, 28 bp, Artificial Sequence
  Synthetic
gtcttgtacatuttggctagttttuccc

SEQ ID NO: 38628 - DNA, 28 bp, Artificial Sequence
  Synthetic
ccagagtggugggtaatgattttaaugt

SEQ ID NO: 38629 - DNA, 30 bp, Artificial Sequence; identical to SEQ ID NO: 26395
  Synthetic

SEQ ID NO: 38630 - DNA, 30 bp, Artificial Sequence; identical to SEQ ID NO: 26396
  Synthetic

SEQ ID NO: 38631 - DNA, 25 bp, Artificial Sequence
  Synthetic
agtcccaggaaacugcaaatacaut

SEQ ID NO: 38632 - DNA, 20 bp, Artificial Sequence
  Synthetic
cgtguggacatguggcagat

SEQ ID NO: 38633 - DNA, 20 bp, Artificial Sequence
  Synthetic
gcttcuggcaaguggaggac

SEQ ID NO: 38634 - DNA, 20 bp, Artificial Sequence
  Synthetic
ctctctgguctgggccacua

SEQ ID NO: 38635 - DNA, 20 bp, Artificial Sequence
  Synthetic
gggagguctttggcattugg

SEQ ID NO: 38636 - DNA, 29 bp, Artificial Sequence
  Synthetic
tgaacaatgccucagctatacattuacat

SEQ ID NO: 38637 - DNA, 25 bp, Artificial Sequence
  Synthetic
ggcctaactautcaaacagggauga

SEQ ID NO: 38638 - DNA, 23 bp, Artificial Sequence
  Synthetic
actgggaugaaatcagacuccga

SEQ ID NO: 38639 - DNA, 26 bp, Artificial Sequence
  Synthetic
tcctaactctuaagaagggctgcaua

SEQ ID NO: 38640 - DNA, 28 bp, Artificial Sequence
  Synthetic
actcttcutttaggattcuccaaaagcc

SEQ ID NO: 38641 - DNA, 27 bp, Artificial Sequence
  Synthetic
tcaattctagguagcctggttactgua

SEQ ID NO: 38642 - DNA, 29 bp, Artificial Sequence
  Synthetic
tttctgagggaaggauaatggtauagaga

SEQ ID NO: 38643 - DNA, 28 bp, Artificial Sequence
  Synthetic
ggaataaatgcutcatcctgtuccaaat

SEQ ID NO: 38644 - DNA, 24 bp, Artificial Sequence
  Synthetic
tgggtacaccaugctttttgauga

SEQ ID NO: 38645 - DNA, 26 bp, Artificial Sequence
  Synthetic
catacttctccauatcggccttuacc

SEQ ID NO: 38646 - DNA, 26 bp, Artificial Sequence
  Synthetic
aatgagcattactuctccctagccua

SEQ ID NO: 38647 - DNA, 26 bp, Artificial Sequence
  Synthetic
gcagctgaauaagccaattuaagcag

SEQ ID NO: 38648 - DNA, 23 bp, Artificial Sequence
  Synthetic
tcaacttggaccutggctttcut

SEQ ID NO: 38649 - DNA, 24 bp, Artificial Sequence
  Synthetic
cagaaacuactcaaacucccacct

SEQ ID NO: 38650 - DNA, 24 bp, Artificial Sequence
  Synthetic
agtccccugaagaagtgattcgua

SEQ ID NO: 38651 - DNA, 27 bp, Artificial Sequence
  Synthetic
ctagagtttcucctccgatggttuaac

SEQ ID NO: 38652 - DNA, 17 bp, Artificial Sequence
  Synthetic
gcaggcccucctcgtua

SEQ ID NO: 38653 - DNA, 17 bp, Artificial Sequence
  Synthetic
cgaugggcgcguagagc

SEQ ID NO: 38654 - DNA, 17 bp, Artificial Sequence
  Synthetic
cuagacccgcgcgtcuc

SEQ ID NO: 38655 - DNA, 20 bp, Artificial Sequence
  Synthetic
ctcucaggaagcacctucgt

SEQ ID NO: 38656 - DNA, 18 bp, Artificial Sequence
  Synthetic
ccacuccccaggtgcauc

SEQ ID NO: 38657 - DNA, 19 bp, Artificial Sequence
  Synthetic
catgacauccagccaugcc

SEQ ID NO: 38658 - DNA, 18 bp, Artificial Sequence
  Synthetic
ggctguggcgaucacgaa

SEQ ID NO: 38659 - DNA, 21 bp, Artificial Sequence
  Synthetic
gcatcugagcaaggtggaugg

SEQ ID NO: 38660 - DNA, 22 bp, Artificial Sequence
  Synthetic
acactgtgtgutttctggccua

SEQ ID NO: 38661 - DNA, 22 bp, Artificial Sequence
  Synthetic
tgcctggaaguttccgactuac

SEQ ID NO: 38662 - DNA, 19 bp, Artificial Sequence
  Synthetic
gaccgguaaccacgtccug

SEQ ID NO: 38663 - DNA, 28 bp, Artificial Sequence
  Synthetic
acaataacagugaccaaaatgacaguga

SEQ ID NO: 38664 - DNA, 21 bp, Artificial Sequence
  Synthetic
cgatguccaggaaccgcuaat

SEQ ID NO: 38665 - DNA, 22 bp, Artificial Sequence
  Synthetic
catagccgucgacagagaagug

SEQ ID NO: 38666 - DNA, 19 bp, Artificial Sequence
  Synthetic
ggaggccuaacgtgctguc

SEQ ID NO: 38667 - DNA, 20 bp, Artificial Sequence
  Synthetic
gactcctugagctccagucc

SEQ ID NO: 38668 - DNA, 21 bp, Artificial Sequence
  Synthetic
gaggagaagugatgcgtguct

SEQ ID NO: 38669 - DNA, 17 bp, Artificial Sequence
  Synthetic
gcaccgcugatcaugca

SEQ ID NO: 38670 - DNA, 20 bp, Artificial Sequence
  Synthetic
cagcactuggccctgattug

SEQ ID NO: 38671 - DNA, 19 bp, Artificial Sequence
  Synthetic
cctgcaggagcutcacgut

SEQ ID NO: 38672 - DNA, 22 bp, Artificial Sequence
  Synthetic
actcaucaccgacatgctucac

SEQ ID NO: 38673 - DNA, 20 bp, Artificial Sequence
  Synthetic
cctccucaggacccctcauc

SEQ ID NO: 38674 - DNA, 23 bp, Artificial Sequence
  Synthetic
tttaaatgcacugaccucccaca

SEQ ID NO: 38675 - DNA, 22 bp, Artificial Sequence
  Synthetic
cctggcccacaaguatcacuaa

SEQ ID NO: 38676 - DNA, 25 bp, Artificial Sequence
  Synthetic
tgtaccctgtuacttatcccctucc

SEQ ID NO: 38677 - DNA, 22 bp, Artificial Sequence
  Synthetic
ctaaggugaaggctcauggcaa

SEQ ID NO: 38678 - DNA, 24 bp, Artificial Sequence
  Synthetic
acatgcccaguttctattggtcuc

SEQ ID NO: 38679 - DNA, 23 bp, Artificial Sequence
  Synthetic
cauaaaagucagggcagagccat

SEQ ID NO: 38680 - DNA, 18 bp, Artificial Sequence
  Synthetic
gucugcacggacgaagga

SEQ ID NO: 38681 - DNA, 17 bp, Artificial Sequence
  Synthetic
cccugcccagcaucgag

SEQ ID NO: 38682 - DNA, 21 bp, Artificial Sequence
  Synthetic
cctagcaucccacuaaaccct

SEQ ID NO: 38683 - DNA, 18 bp, Artificial Sequence
  Synthetic
catcuccccgggctgtut

SEQ ID NO: 38684 - DNA, 17 bp, Artificial Sequence
  Synthetic
cggatggugccgcugaa

SEQ ID NO: 38685 - DNA, 19 bp, Artificial Sequence
  Synthetic
ctcacugggacccaugcag

SEQ ID NO: 38686 - DNA, 18 bp, Artificial Sequence
  Synthetic
cgcctgucctgcagcaut

SEQ ID NO: 38687 - DNA, 20 bp, Artificial Sequence
  Synthetic
ggauactagctguggcccat

SEQ ID NO: 38688 - DNA, 18 bp, Artificial Sequence
  Synthetic
gggagtgcuggtgtcuga

SEQ ID NO: 38689 - DNA, 20 bp, Artificial Sequence
  Synthetic
ctgtggcuctaaccccugag

SEQ ID NO: 38690 - DNA, 21 bp, Artificial Sequence
  Synthetic
cccctgtuccactcctaccut

SEQ ID NO: 38691 - DNA, 25 bp, Artificial Sequence
  Synthetic
ctcttaactgutccactctgtuccc

SEQ ID NO: 38692 - DNA, 22 bp, Artificial Sequence
  Synthetic
tggatgaaguagcacacgaugg

SEQ ID NO: 38693 - DNA, 26 bp, Artificial Sequence
  Synthetic
agcactcuaaacacagtcaauaccaa

SEQ ID NO: 38694 - DNA, 25 bp, Artificial Sequence
  Synthetic
ctaaggcucagagaacagtgactug

SEQ ID NO: 38695 - DNA, 20 bp, Artificial Sequence
  Synthetic
cacgtcugtcactguggagt

SEQ ID NO: 38696 - DNA, 19 bp, Artificial Sequence
  Synthetic
cacucccaacctcugccat

SEQ ID NO: 38697 - DNA, 17 bp, Artificial Sequence
  Synthetic
cgagccugcgccaagua

SEQ ID NO: 38698 - DNA, 21 bp, Artificial Sequence
  Synthetic
tctctguggctgaucagacct

SEQ ID NO: 38699 - DNA, 28 bp, Artificial Sequence
  Synthetic
ccaccaaccatauatcctgaagacatug

SEQ ID NO: 38700 - DNA, 19 bp, Artificial Sequence
  Synthetic
ctgcccccuatagccugac

SEQ ID NO: 38701 - DNA, 23 bp, Artificial Sequence
  Synthetic
tccctacccuctactctctucct

SEQ ID NO: 38702 - DNA, 21 bp, Artificial Sequence
  Synthetic
ccccucagaggctgctacuaa

SEQ ID NO: 38703 - DNA, 20 bp, Artificial Sequence
  Synthetic
ccaactcugaccaggcugac

SEQ ID NO: 38704 - DNA, 19 bp, Artificial Sequence
  Synthetic
cacccuggagggagtugac

SEQ ID NO: 38705 - DNA, 23 bp, Artificial Sequence
  Synthetic
gagagctcaguatgcctttccuc

SEQ ID NO: 38706 - DNA, 24 bp, Artificial Sequence
  Synthetic
tgaggaggauggtuaaaaggagat

SEQ ID NO: 38707 - DNA, 22 bp, Artificial Sequence
  Synthetic
gggtaatggutgttcagacucc

SEQ ID NO: 38708 - DNA, 19 bp, Artificial Sequence
  Synthetic
cctctgggagutggtgcug

SEQ ID NO: 38709 - DNA, 20 bp, Artificial Sequence
  Synthetic
agtgggucctcaccuccaaa

SEQ ID NO: 38710 - DNA, 18 bp, Artificial Sequence
  Synthetic
agcctugaggcugacaca

SEQ ID NO: 38711 - DNA, 20 bp, Artificial Sequence
  Synthetic
tcacttgugcctctguccac

SEQ ID NO: 38712 - DNA, 19 bp, Artificial Sequence
  Synthetic
tccutgcatguacgcagca

SEQ ID NO: 38713 - DNA, 23 bp, Artificial Sequence
  Synthetic
agtattccaaugagcggcugaag

SEQ ID NO: 38714 - DNA, 20 bp, Artificial Sequence
  Synthetic
acacacaccuttgggcacuc

SEQ ID NO: 38715 - DNA, 20 bp, Artificial Sequence
  Synthetic
agggcaaccaucaggucaaa

SEQ ID NO: 38716 - DNA, 32 bp, Artificial Sequence; identical to SEQ ID NO: 26482
  Synthetic

SEQ ID NO: 38717 - DNA, 26 bp, Artificial Sequence
  Synthetic
catttctgcaagcaucctactatgug

SEQ ID NO: 38718 - DNA, 27 bp, Artificial Sequence
  Synthetic
tctcagaaacaacugaaaaccatcuag

SEQ ID NO: 38719 - DNA, 21 bp, Artificial Sequence
  Synthetic
actgtgcauctttgggaucgt

SEQ ID NO: 38720 - DNA, 23 bp, Artificial Sequence
  Synthetic
ctctcugtgacccuaaaccagaa

SEQ ID NO: 38721 - DNA, 21 bp, Artificial Sequence
  Synthetic
ccttcgugaatctgctgucca

SEQ ID NO: 38722 - DNA, 17 bp, Artificial Sequence
  Synthetic
ggccagagccuctgcut

SEQ ID NO: 38723 - DNA, 25 bp, Artificial Sequence
  Synthetic
atcaccaagaccaucaagtttguca

SEQ ID NO: 38724 - DNA, 21 bp, Artificial Sequence
  Synthetic
ctccctccuacacctcaccua

SEQ ID NO: 38725 - DNA, 23 bp, Artificial Sequence
  Synthetic
tcctgtcugtttctctcucccat

SEQ ID NO: 38726 - DNA, 18 bp, Artificial Sequence
  Synthetic
gcctccucctcccuccct

SEQ ID NO: 38727 - DNA, 20 bp, Artificial Sequence
  Synthetic
tcaacaacggcugctttgug

SEQ ID NO: 38728 - DNA, 17 bp, Artificial Sequence
  Synthetic
aagaguggcccgagcug

SEQ ID NO: 38729 - DNA, 25 bp, Artificial Sequence
  Synthetic
ggacctucttctgaaguccaaaagg

SEQ ID NO: 38730 - DNA, 18 bp, Artificial Sequence
  Synthetic
agcagauggccacugcaa

SEQ ID NO: 38731 - DNA, 24 bp, Artificial Sequence
  Synthetic
gttttgtgttucttgctctgcuct

SEQ ID NO: 38732 - DNA, 23 bp, Artificial Sequence
  Synthetic
tgaggcaucctattgugagacct

SEQ ID NO: 38733 - DNA, 21 bp, Artificial Sequence
  Synthetic
gttggccaaucagcctcauct

SEQ ID NO: 38734 - DNA, 22 bp, Artificial Sequence
  Synthetic
cccaggagugaccttgagagua

SEQ ID NO: 38735 - DNA, 25 bp, Artificial Sequence
  Synthetic
ctcaaagctucccactgtcttttuc

SEQ ID NO: 38736 - DNA, 25 bp, Artificial Sequence
  Synthetic
aggtacucccagagagaaagaagug

SEQ ID NO: 38737 - DNA, 29 bp, Artificial Sequence
  Synthetic
ctattggtaacauccaatgtggaacttut

SEQ ID NO: 38738 - DNA, 22 bp, Artificial Sequence
  Synthetic
ggacaugggaaacagcagtuct

SEQ ID NO: 38739 - DNA, 22 bp, Artificial Sequence
  Synthetic
gaagaagcacugagcaaccauc

SEQ ID NO: 38740 - DNA, 20 bp, Artificial Sequence
  Synthetic
ctgcacccauggagaggaug

SEQ ID NO: 38741 - DNA, 19 bp, Artificial Sequence
  Synthetic
acaccacugaccuggacga

SEQ ID NO: 38742 - DNA, 22 bp, Artificial Sequence
  Synthetic
agcaggaggguctatguggaaa

SEQ ID NO: 38743 - DNA, 23 bp, Artificial Sequence
  Synthetic
ttcaaatgugccctttgtccuct

SEQ ID NO: 38744 - DNA, 26 bp, Artificial Sequence
  Synthetic
tcacaccauttagtgttgauaggaca

SEQ ID NO: 38745 - DNA, 26 bp, Artificial Sequence
  Synthetic
gctgaactgtguctcatcattttgut

SEQ ID NO: 38746 - DNA, 23 bp, Artificial Sequence
  Synthetic
gggccagcauttctgactagtuc

SEQ ID NO: 38747 - DNA, 23 bp, Artificial Sequence
  Synthetic
gttcugactccaguaacaggcat

SEQ ID NO: 38748 - DNA, 17 bp, Artificial Sequence
  Synthetic
ggctggcugcacucact

SEQ ID NO: 38749 - DNA, 20 bp, Artificial Sequence
  Synthetic
gggcctcutttctcccauga

SEQ ID NO: 38750 - DNA, 20 bp, Artificial Sequence
  Synthetic
guggagaugacaagggccaa

SEQ ID NO: 38751 - DNA, 19 bp, Artificial Sequence
  Synthetic
ctgtccugcagaugagcga

SEQ ID NO: 38752 - DNA, 21 bp, Artificial Sequence
  Synthetic
gcaaggttucctcggaagugg

SEQ ID NO: 38753 - DNA, 28 bp, Artificial Sequence
  Synthetic
cgtgattctgcutctatctctcttucag

SEQ ID NO: 38754 - DNA, 20 bp, Artificial Sequence
  Synthetic
cctcccaccgucatggagua

SEQ ID NO: 38755 - DNA, 21 bp, Artificial Sequence
  Synthetic
ctgcctcuctctgtggucaag

SEQ ID NO: 38756 - DNA, 18 bp, Artificial Sequence
  Synthetic
cgcccagggugatctcuc

SEQ ID NO: 38757 - DNA, 19 bp, Artificial Sequence
  Synthetic
gcatucccggcatcuccac

SEQ ID NO: 38758 - DNA, 17 bp, Artificial Sequence
  Synthetic
ggtguccacccccuacc

SEQ ID NO: 38759 - DNA, 18 bp, Artificial Sequence
  Synthetic
cggctcuttccagcucct

SEQ ID NO: 38760 - DNA, 28 bp, Artificial Sequence
  Synthetic
tgtaaatcatagugtgagatacagcugc

SEQ ID NO: 38761 - DNA, 26 bp, Artificial Sequence
  Synthetic
acaacccagugaagagttctaccaua

SEQ ID NO: 38762 - DNA, 28 bp, Artificial Sequence
  Synthetic
caagatggccutcatggatuagaaaaag

SEQ ID NO: 38763 - DNA, 26 bp, Artificial Sequence
  Synthetic
aatttctcautctgtgguacaaccca

SEQ ID NO: 38764 - DNA, 20 bp, Artificial Sequence
  Synthetic
gctguggaacacccagguaa

SEQ ID NO: 38765 - DNA, 28 bp, Artificial Sequence
  Synthetic
agcttctgccgutaactaggttaauaaa

SEQ ID NO: 38766 - DNA, 20 bp, Artificial Sequence
  Synthetic
ggacggaucacaaggucagg

SEQ ID NO: 38767 - DNA, 21 bp, Artificial Sequence
  Synthetic
tgtgatcacugctcagugcaa

SEQ ID NO: 38768 - DNA, 24 bp, Artificial Sequence
  Synthetic
tgctttaaacauttgtctgugcgt

SEQ ID NO: 38769 - DNA, 24 bp, Artificial Sequence
  Synthetic
ggtttgaaaagcugttggcctauc

SEQ ID NO: 38770 - DNA, 28 bp, Artificial Sequence
  Synthetic
gctgctttttctutaaacggtacacaua

SEQ ID NO: 38771 - DNA, 22 bp, Artificial Sequence
  Synthetic
ctggcatguagtgtcacggaut

SEQ ID NO: 38772 - DNA, 24 bp, Artificial Sequence
  Synthetic
cagatgcuaagaccaggtactuca

SEQ ID NO: 38773 - DNA, 24 bp, Artificial Sequence
  Synthetic
aacgtttgcacuatgacctucaga

SEQ ID NO: 38774 - DNA, 22 bp, Artificial Sequence
  Synthetic
gcagcaaagacutccgaatucc

SEQ ID NO: 38775 - DNA, 21 bp, Artificial Sequence
  Synthetic
cgcttgccucagaacaactuc

SEQ ID NO: 38776 - DNA, 24 bp, Artificial Sequence
  Synthetic
catcagagagucctcctggagaut

SEQ ID NO: 38777 - DNA, 20 bp, Artificial Sequence
  Synthetic
gggaugcagctcgtuaccac

SEQ ID NO: 38778 - DNA, 18 bp, Artificial Sequence
  Synthetic
cuccagagccgugcgaat

SEQ ID NO: 38779 - DNA, 19 bp, Artificial Sequence
  Synthetic
gagagucgccgtcuccaag

SEQ ID NO: 38780 - DNA, 31 bp, Artificial Sequence; identical to SEQ ID NO: 26546
  Synthetic

SEQ ID NO: 38781 - DNA, 28 bp, Artificial Sequence
  Synthetic
ccatgtctgttuctcaaagggaatauct

SEQ ID NO: 38782 - DNA, 21 bp, Artificial Sequence
  Synthetic
cctgagccacucctcactuct

SEQ ID NO: 38783 - DNA, 26 bp, Artificial Sequence
  Synthetic
ctctgactacugtcatttctctugcc

SEQ ID NO: 38784 - DNA, 24 bp, Artificial Sequence
  Synthetic
agtactctguacaagcacctcugt

SEQ ID NO: 38785 - DNA, 30 bp, Artificial Sequence; identical to SEQ ID NO: 26551
  Synthetic

SEQ ID NO: 38786 - DNA, 21 bp, Artificial Sequence
  Synthetic
tcagctgaagucgcattugag

SEQ ID NO: 38787 - DNA, 26 bp, Artificial Sequence
  Synthetic
gctcttggaguttaagacuacaccag

SEQ ID NO: 38788 - DNA, 24 bp, Artificial Sequence
  Synthetic
acacagacuaagagacaguggaga

SEQ ID NO: 38789 - DNA, 24 bp, Artificial Sequence
  Synthetic
gcgacuccagaagttguaagcaaa

SEQ ID NO: 38790 - DNA, 25 bp, Artificial Sequence
  Synthetic
gggaaguggacagaaaaccacatua

SEQ ID NO: 38791 - DNA, 29 bp, Artificial Sequence
  Synthetic
gctctctacaguaagttctcataccatug

SEQ ID NO: 38792 - DNA, 17 bp, Artificial Sequence
  Synthetic
cgtcgcgaguccctgug

SEQ ID NO: 38793 - DNA, 29 bp, Artificial Sequence
  Synthetic
ccgaggattaacucctattttcttgcuaa

SEQ ID NO: 38794 - DNA, 24 bp, Artificial Sequence
  Synthetic
acttgaaagcagutcacacacugt

SEQ ID NO: 38795 - DNA, 24 bp, Artificial Sequence
  Synthetic
tgtctctttgutgcaagtgtcuct

SEQ ID NO: 38796 - DNA, 29 bp, Artificial Sequence
  Synthetic
aacaacaaagagaaucatgaaaucaaccc

SEQ ID NO: 38797 - DNA, 25 bp, Artificial Sequence
  Synthetic
gcctttaaugagatcccctttucca

SEQ ID NO: 38798 - DNA, 22 bp, Artificial Sequence
  Synthetic
agggccaaagaguccatcagua

SEQ ID NO: 38799 - DNA, 24 bp, Artificial Sequence
  Synthetic
actgagcctutttcccttcttugt

SEQ ID NO: 38800 - DNA, 27 bp, Artificial Sequence
  Synthetic
agttctaagcaccuttgaaatggtuca

SEQ ID NO: 38801 - DNA, 27 bp, Artificial Sequence
  Synthetic
ccattgctttugaagaaacagttgugt

SEQ ID NO: 38802 - DNA, 21 bp, Artificial Sequence
  Synthetic
gggagaaggacuccactuggt

SEQ ID NO: 38803 - DNA, 21 bp, Artificial Sequence
  Synthetic
cgctgacacugtgcttctcuc

SEQ ID NO: 38804 - DNA, 20 bp, Artificial Sequence
  Synthetic
agugaacuggccggaaaagt

SEQ ID NO: 38805 - DNA, 19 bp, Artificial Sequence
  Synthetic
cttcggctuacgggtcgut

SEQ ID NO: 38806 - DNA, 17 bp, Artificial Sequence
  Synthetic
gcugctguaggcaccca

SEQ ID NO: 38807 - DNA, 17 bp, Artificial Sequence
  Synthetic
gtccgcucccccactuc

SEQ ID NO: 38808 - DNA, 18 bp, Artificial Sequence
  Synthetic
cgctctucccatcuccca

SEQ ID NO: 38809 - DNA, 18 bp, Artificial Sequence
  Synthetic
ccgctuccgcatgtucag

SEQ ID NO: 38810 - DNA, 20 bp, Artificial Sequence
  Synthetic
ccagcgccuaaagttcccua

SEQ ID NO: 38811 - DNA, 22 bp, Artificial Sequence
  Synthetic
gtaccaagucctgucaccaaca

SEQ ID NO: 38812 - DNA, 17 bp, Artificial Sequence
  Synthetic
cccagacccugggcuca

SEQ ID NO: 38813 - DNA, 18 bp, Artificial Sequence
  Synthetic
tgacccccugctcacugt

SEQ ID NO: 38814 - DNA, 22 bp, Artificial Sequence
  Synthetic
tgtcctccaugttctcaaugcg

SEQ ID NO: 38815 - DNA, 24 bp, Artificial Sequence
  Synthetic
caggttcagggutaagctttucct

SEQ ID NO: 38816 - DNA, 19 bp, Artificial Sequence
  Synthetic
gtcaauggcgggtcttgug

SEQ ID NO: 38817 - DNA, 23 bp, Artificial Sequence
  Synthetic
cacacaucgatactggugaagga

SEQ ID NO: 38818 - DNA, 21 bp, Artificial Sequence
  Synthetic
tcaatggcaaggugagcaugt

SEQ ID NO: 38819 - DNA, 20 bp, Artificial Sequence
  Synthetic
gctcagaccccuctcugacc

SEQ ID NO: 38820 - DNA, 19 bp, Artificial Sequence
  Synthetic
cgtagacgcgcauctcgua

SEQ ID NO: 38821 - DNA, 21 bp, Artificial Sequence
  Synthetic
aaacagauccgagggaaggug

SEQ ID NO: 38822 - DNA, 21 bp, Artificial Sequence
  Synthetic
cgtgatguttgtcgaguggct

SEQ ID NO: 38823 - DNA, 21 bp, Artificial Sequence
  Synthetic
ggaagaugagggcgtcuacac

SEQ ID NO: 38824 - DNA, 19 bp, Artificial Sequence
  Synthetic
tcggcaccacguagguaga

SEQ ID NO: 38825 - DNA, 20 bp, Artificial Sequence
  Synthetic
gtcagctccuctgctcccua

SEQ ID NO: 38826 - DNA, 24 bp, Artificial Sequence
  Synthetic
ttttgatcctugctcttccctcug

SEQ ID NO: 38827 - DNA, 18 bp, Artificial Sequence
  Synthetic
ctccaggguagggugggt

SEQ ID NO: 38828 - DNA, 17 bp, Artificial Sequence
  Synthetic
catccaccugcccugca

SEQ ID NO: 38829 - DNA, 18 bp, Artificial Sequence
  Synthetic
acacccucccgagcucaa

SEQ ID NO: 38830 - DNA, 24 bp, Artificial Sequence
  Synthetic
gttgatgatcagguggtgtctcug

SEQ ID NO: 38831 - DNA, 25 bp, Artificial Sequence
  Synthetic
gcaagtcaaauggtgagtuccagaa

SEQ ID NO: 38832 - DNA, 19 bp, Artificial Sequence
  Synthetic
catctccuccccaggtucc

SEQ ID NO: 38833 - DNA, 18 bp, Artificial Sequence
  Synthetic
ggtguccgcagcttucct

SEQ ID NO: 38834 - DNA, 24 bp, Artificial Sequence
  Synthetic
cattcttgagccauttgaccucag

SEQ ID NO: 38835 - DNA, 19 bp, Artificial Sequence
  Synthetic
ccacagccacaguagctug

SEQ ID NO: 38836 - DNA, 20 bp, Artificial Sequence
  Synthetic
ggctccuggcagaatuaggg

SEQ ID NO: 38837 - DNA, 21 bp, Artificial Sequence
  Synthetic
aggaaguaaaggcccaugggt

SEQ ID NO: 38838 - DNA, 19 bp, Artificial Sequence
  Synthetic
gaacugccacccaggacuc

SEQ ID NO: 38839 - DNA, 21 bp, Artificial Sequence
  Synthetic
ggctagtguccctttcuccct

SEQ ID NO: 38840 - DNA, 21 bp, Artificial Sequence
  Synthetic
acgaggcaucctccttagugt

SEQ ID NO: 38841 - DNA, 19 bp, Artificial Sequence
  Synthetic
cguccctccaugcacacag

SEQ ID NO: 38842 - DNA, 18 bp, Artificial Sequence
  Synthetic
cccctucccaccccaaug

SEQ ID NO: 38843 - DNA, 30 bp, Artificial Sequence; identical to SEQ ID NO: 26609
  Synthetic

SEQ ID NO: 38844 - DNA, 20 bp, Artificial Sequence
  Synthetic
caaaccucagggaaggcuga

SEQ ID NO: 38845 - DNA, 18 bp, Artificial Sequence
  Synthetic
cgggcaggagugaaggug

SEQ ID NO: 38846 - DNA, 20 bp, Artificial Sequence
  Synthetic
tcctcgucaacccccucaag

SEQ ID NO: 38847 - DNA, 25 bp, Artificial Sequence
  Synthetic
cccauatatagugggaaggacagga

SEQ ID NO: 38848 - DNA, 21 bp, Artificial Sequence
  Synthetic
ccuagagugccccgaagagat

SEQ ID NO: 38849 - DNA, 20 bp, Artificial Sequence
  Synthetic
cacgtugtgaggtuccacga

SEQ ID NO: 38850 - DNA, 21 bp, Artificial Sequence
  Synthetic
ctcatgacgugagtaggcuca

SEQ ID NO: 38851 - DNA, 20 bp, Artificial Sequence
  Synthetic
ctggcctaugctcacctucc

SEQ ID NO: 38852 - DNA, 22 bp, Artificial Sequence
  Synthetic
gggatggaaucaggctgtauca

SEQ ID NO: 38853 - DNA, 19 bp, Artificial Sequence
  Synthetic
ggtgguggcagaggaguag

SEQ ID NO: 38854 - DNA, 20 bp, Artificial Sequence
  Synthetic
ctcauggcccggtactucag

SEQ ID NO: 38855 - DNA, 20 bp, Artificial Sequence
  Synthetic
cctgccccuacctgctgtua

SEQ ID NO: 38856 - DNA, 23 bp, Artificial Sequence
  Synthetic
gtcatcattgutgtgggcauagc

SEQ ID NO: 38857 - DNA, 23 bp, Artificial Sequence
  Synthetic
tgcgagttucacaagaccatcuc

SEQ ID NO: 38858 - DNA, 18 bp, Artificial Sequence
  Synthetic
cagccugacccucgaacg

SEQ ID NO: 38859 - DNA, 22 bp, Artificial Sequence
  Synthetic
tguaccaguccaaccagacaga

SEQ ID NO: 38860 - DNA, 21 bp, Artificial Sequence
  Synthetic
ccaatcggugtccctctcuac

SEQ ID NO: 38861 - DNA, 18 bp, Artificial Sequence
  Synthetic
cagcccugccagcttuac

SEQ ID NO: 38862 - DNA, 17 bp, Artificial Sequence
  Synthetic
cctccugcccaggctuc

SEQ ID NO: 38863 - DNA, 17 bp, Artificial Sequence
  Synthetic
cugcgcaggaugagcac

SEQ ID NO: 38864 - DNA, 22 bp, Artificial Sequence
  Synthetic
caaaggagtgcugaggttccua

SEQ ID NO: 38865 - DNA, 22 bp, Artificial Sequence
  Synthetic
cautgacaggtuggcaaaccac

SEQ ID NO: 38866 - DNA, 21 bp, Artificial Sequence
  Synthetic
gcccuggtaccuggagaagag

SEQ ID NO: 38867 - DNA, 24 bp, Artificial Sequence
  Synthetic
ttctagccucagttucccaaaagg

SEQ ID NO: 38868 - DNA, 20 bp, Artificial Sequence
  Synthetic
catgagcuggacctcgtugt

SEQ ID NO: 38869 - DNA, 22 bp, Artificial Sequence
  Synthetic
gagacctucctttccugacact

SEQ ID NO: 38870 - DNA, 23 bp, Artificial Sequence
  Synthetic
gagagggagagautccuccaagt

SEQ ID NO: 38871 - DNA, 24 bp, Artificial Sequence
  Synthetic
ctcgggcttautccagtacatguc

SEQ ID NO: 38872 - DNA, 21 bp, Artificial Sequence
  Synthetic
aagtaaggccaggugttgguc

SEQ ID NO: 38873 - DNA, 25 bp, Artificial Sequence
  Synthetic
ccacagtagttuggtccttgagtut

SEQ ID NO: 38874 - DNA, 20 bp, Artificial Sequence
  Synthetic
tgtggacgccutcaagtcug

SEQ ID NO: 38875 - DNA, 27 bp, Artificial Sequence
  Synthetic
ccagaactcacaguctttaagctttug

SEQ ID NO: 38876 - DNA, 24 bp, Artificial Sequence
  Synthetic
agatccccgaaaaucaccucaaag

SEQ ID NO: 38877 - DNA, 23 bp, Artificial Sequence
  Synthetic
cccuaggaaattguggaggaagg

SEQ ID NO: 38878 - DNA, 21 bp, Artificial Sequence
  Synthetic
gggaccaggugaaggaagaug

SEQ ID NO: 38879 - DNA, 18 bp, Artificial Sequence
  Synthetic
cctgccacccuttccugt

SEQ ID NO: 38880 - DNA, 24 bp, Artificial Sequence
  Synthetic
ctcactagggaugaagcacatucc

SEQ ID NO: 38881 - DNA, 30 bp, Artificial Sequence; identical to SEQ ID NO: 26647
  Synthetic

SEQ ID NO: 38882 - DNA, 19 bp, Artificial Sequence
  Synthetic
cccacagggcutctcccua

SEQ ID NO: 38883 - DNA, 22 bp, Artificial Sequence
  Synthetic
cctgctgcccuacttctacauc

SEQ ID NO: 38884 - DNA, 18 bp, Artificial Sequence
  Synthetic
cccaucggcggatgtgua

SEQ ID NO: 38885 - DNA, 17 bp, Artificial Sequence
  Synthetic
accgctugacccctucc

SEQ ID NO: 38886 - DNA, 19 bp, Artificial Sequence
  Synthetic
gguaccacccgaagtgguc

SEQ ID NO: 38887 - DNA, 20 bp, Artificial Sequence
  Synthetic
gcatctgcguggagtgugat

SEQ ID NO: 38888 - DNA, 21 bp, Artificial Sequence
  Synthetic
gacaggtugatgaggguccag

SEQ ID NO: 38889 - DNA, 21 bp, Artificial Sequence
  Synthetic
ctgggcuctcgctaaguaagg

SEQ ID NO: 38890 - DNA, 20 bp, Artificial Sequence
  Synthetic
agacggcauagccaaggaug

SEQ ID NO: 38891 - DNA, 22 bp, Artificial Sequence
  Synthetic
ggaaagcgccutcatttcugaa

SEQ ID NO: 38892 - DNA, 19 bp, Artificial Sequence
  Synthetic
ccaccugctgtgucccaac

SEQ ID NO: 38893 - DNA, 23 bp, Artificial Sequence
  Synthetic
cccccttcaucgtctactactuc

SEQ ID NO: 38894 - DNA, 24 bp, Artificial Sequence
  Synthetic
gtccttcattccuttgggtccaua

SEQ ID NO: 38895 - DNA, 25 bp, Artificial Sequence
  Synthetic
gtaagcaaggutctctttctugcag

SEQ ID NO: 38896 - DNA, 22 bp, Artificial Sequence
  Synthetic
ctgagactcuctctcgcccaua

SEQ ID NO: 38897 - DNA, 24 bp, Artificial Sequence
  Synthetic
ctttcgatcauctccctgcaucaa

SEQ ID NO: 38898 - DNA, 23 bp, Artificial Sequence
  Synthetic
agagcccaagagcuttcuagagt

SEQ ID NO: 38899 - DNA, 24 bp, Artificial Sequence
  Synthetic
catctccccaaucttcttgtuggt

SEQ ID NO: 38900 - DNA, 20 bp, Artificial Sequence
  Synthetic
cctgggcugagttccagtug

SEQ ID NO: 38901 - DNA, 20 bp, Artificial Sequence
  Synthetic
ccctcggaacuctggtccua

SEQ ID NO: 38902 - DNA, 20 bp, Artificial Sequence
  Synthetic
gcactgugcccacatttuca

SEQ ID NO: 38903 - DNA, 21 bp, Artificial Sequence
  Synthetic
ccctacaaucctagggugggt

SEQ ID NO: 38904 - DNA, 23 bp, Artificial Sequence
  Synthetic
caugttcacugacaccgagaact

SEQ ID NO: 38905 - DNA, 23 bp, Artificial Sequence
  Synthetic
gtgcuaggacagaaactgagcug

SEQ ID NO: 38906 - DNA, 17 bp, Artificial Sequence
  Synthetic
gcaggcuggcaggugag

SEQ ID NO: 38907 - DNA, 22 bp, Artificial Sequence
  Synthetic
caucaagagcccaactucccaa

SEQ ID NO: 38908 - DNA, 21 bp, Artificial Sequence
  Synthetic
gggccugaacaacaccctuac

SEQ ID NO: 38909 - DNA, 22 bp, Artificial Sequence
  Synthetic
ttgtcagugaactcgatgugca

SEQ ID NO: 38910 - DNA, 17 bp, Artificial Sequence
  Synthetic
aggagagggugggcuca

SEQ ID NO: 38911 - DNA, 23 bp, Artificial Sequence
  Synthetic
gggtctcauagtagacgaugcct

SEQ ID NO: 38912 - DNA, 21 bp, Artificial Sequence
  Synthetic
gagaggugactgctgttugct

SEQ ID NO: 38913 - DNA, 21 bp, Artificial Sequence
  Synthetic
ctcagcugaagctgtuggaca

SEQ ID NO: 38914 - DNA, 21 bp, Artificial Sequence
  Synthetic
gcctttgtcugggttggucaa

SEQ ID NO: 38915 - DNA, 22 bp, Artificial Sequence
  Synthetic
ctctacgaagcugtagcggaug

SEQ ID NO: 38916 - DNA, 22 bp, Artificial Sequence
  Synthetic
gctgtccatucccttgtgtucc

SEQ ID NO: 38917 - DNA, 23 bp, Artificial Sequence
  Synthetic
cagcccacaucatgggaattuac

SEQ ID NO: 38918 - DNA, 21 bp, Artificial Sequence
  Synthetic
ctgaucccaaacccacctgua

SEQ ID NO: 38919 - DNA, 20 bp, Artificial Sequence
  Synthetic
cagcaaggcugggtucaaag

SEQ ID NO: 38920 - DNA, 20 bp, Artificial Sequence
  Synthetic
agcgcaucatccagtuccag

SEQ ID NO: 38921 - DNA, 20 bp, Artificial Sequence
  Synthetic
ctgagggugatgcauggaca

SEQ ID NO: 38922 - DNA, 23 bp, Artificial Sequence
  Synthetic
gtgtcttctgugtcaccccaaut

SEQ ID NO: 38923 - DNA, 24 bp, Artificial Sequence
  Synthetic
cttgtccaccaugtctgagtgaut

SEQ ID NO: 38924 - DNA, 22 bp, Artificial Sequence
  Synthetic
agggcataccucttgtctccut

SEQ ID NO: 38925 - DNA, 22 bp, Artificial Sequence
  Synthetic
ggtagagcaguggctgttugag

SEQ ID NO: 38926 - DNA, 22 bp, Artificial Sequence
  Synthetic
gccaggtcautttgacagctut

SEQ ID NO: 38927 - DNA, 27 bp, Artificial Sequence
  Synthetic
ctcataaaucttggtcaucacagggat

SEQ ID NO: 38928 - DNA, 19 bp, Artificial Sequence
  Synthetic
ccccgcaaagucttgcugt

SEQ ID NO: 38929 - DNA, 18 bp, Artificial Sequence
  Synthetic
ccuaggccaccuaaggca

SEQ ID NO: 38930 - DNA, 18 bp, Artificial Sequence
  Synthetic
ccagcacuccggtcagug

SEQ ID NO: 38931 - DNA, 22 bp, Artificial Sequence
  Synthetic
tccaagggaugcctgtttuagg

SEQ ID NO: 38932 - DNA, 18 bp, Artificial Sequence
  Synthetic
cctcagcggguactcugg

SEQ ID NO: 38933 - DNA, 20 bp, Artificial Sequence
  Synthetic
catutacacacgugcgcaca

SEQ ID NO: 38934 - DNA, 22 bp, Artificial Sequence
  Synthetic
autcatggaugggaccaccaag

SEQ ID NO: 38935 - DNA, 20 bp, Artificial Sequence
  Synthetic
tgaauagccccggcaaguag

SEQ ID NO: 38936 - DNA, 19 bp, Artificial Sequence
  Synthetic
tctcccagugcgagcagua

SEQ ID NO: 38937 - DNA, 21 bp, Artificial Sequence
  Synthetic
cggaagatuccctcccacuca

SEQ ID NO: 38938 - DNA, 25 bp, Artificial Sequence
  Synthetic
gcagctgattuttagagcaaacuca

SEQ ID NO: 38939 - DNA, 20 bp, Artificial Sequence
  Synthetic
gcuacagagcaagggacugg

SEQ ID NO: 38940 - DNA, 21 bp, Artificial Sequence
  Synthetic
gggcatgacugactcaacugg

SEQ ID NO: 38941 - DNA, 22 bp, Artificial Sequence
  Synthetic
gtattcgucccccttgatggug

SEQ ID NO: 38942 - DNA, 25 bp, Artificial Sequence
  Synthetic
gcagacatgagugataacaccucag

SEQ ID NO: 38943 - DNA, 21 bp, Artificial Sequence
  Synthetic
gtcctctcautgatgccgtug

SEQ ID NO: 38944 - DNA, 20 bp, Artificial Sequence
  Synthetic
gccacagguagagagcugac

SEQ ID NO: 38945 - DNA, 19 bp, Artificial Sequence
  Synthetic
cctgtggcucccatcctuc

SEQ ID NO: 38946 - DNA, 21 bp, Artificial Sequence
  Synthetic
tctatucggcacaagccctuc

SEQ ID NO: 38947 - DNA, 19 bp, Artificial Sequence
  Synthetic
gtgaggtcugcccctcauc

SEQ ID NO: 38948 - DNA, 21 bp, Artificial Sequence
  Synthetic
ctttucccacccagcaacauc

SEQ ID NO: 38949 - DNA, 22 bp, Artificial Sequence
  Synthetic
aactgctatguggtcctcaucc

SEQ ID NO: 38950 - DNA, 21 bp, Artificial Sequence
  Synthetic
gggctcaguataggaggcaua

SEQ ID NO: 38951 - DNA, 23 bp, Artificial Sequence
  Synthetic
gaatcccuctgaggactugagga

SEQ ID NO: 38952 - DNA, 20 bp, Artificial Sequence
  Synthetic
agacaggccutaggugggaa

SEQ ID NO: 38953 - DNA, 20 bp, Artificial Sequence
  Synthetic
gccucagatgaucccaggac

SEQ ID NO: 38954 - DNA, 21 bp, Artificial Sequence
  Synthetic
tgtgaccugctctgtctcuga

SEQ ID NO: 38955 - DNA, 17 bp, Artificial Sequence
  Synthetic
gaugcccaccccaugct

SEQ ID NO: 38956 - DNA, 22 bp, Artificial Sequence
  Synthetic
ggctucattcctguccccaaat

SEQ ID NO: 38957 - DNA, 22 bp, Artificial Sequence
  Synthetic
guctgtggtucaggcagagaag

SEQ ID NO: 38958 - DNA, 21 bp, Artificial Sequence
  Synthetic
attcctgggagcugtgctaug

SEQ ID NO: 38959 - DNA, 20 bp, Artificial Sequence
  Synthetic
ctccccgugactgttcacut

SEQ ID NO: 38960 - DNA, 19 bp, Artificial Sequence
  Synthetic
gutccaatucccgcccaga

SEQ ID NO: 38961 - DNA, 20 bp, Artificial Sequence
  Synthetic
gcautgccgtuaccagacat

SEQ ID NO: 38962 - DNA, 23 bp, Artificial Sequence
  Synthetic
aagutcctttctuccaagccagt

SEQ ID NO: 38963 - DNA, 27 bp, Artificial Sequence
  Synthetic
atcataactgttcugacaaacctccuc

SEQ ID NO: 38964 - DNA, 23 bp, Artificial Sequence
  Synthetic
ggattatgugcctctguccccat

SEQ ID NO: 38965 - DNA, 25 bp, Artificial Sequence
  Synthetic
gaauccctucagggaaggaaagaag

SEQ ID NO: 38966 - DNA, 22 bp, Artificial Sequence
  Synthetic
ctaggcuccaccactgaaguag

SEQ ID NO: 38967 - DNA, 23 bp, Artificial Sequence
  Synthetic
gccccttacutgcaagactctua

SEQ ID NO: 38968 - DNA, 23 bp, Artificial Sequence
  Synthetic
gaaaggaacagugactgccuagt

SEQ ID NO: 38969 - DNA, 23 bp, Artificial Sequence
  Synthetic
gtcactctuccaaaaggauccgt

SEQ ID NO: 38970 - DNA, 24 bp, Artificial Sequence
  Synthetic
tacccaggcuttctagatgauagg

SEQ ID NO: 38971 - DNA, 23 bp, Artificial Sequence
  Synthetic
gggaaggcauatgtcaccatgug

SEQ ID NO: 38972 - DNA, 23 bp, Artificial Sequence
  Synthetic
cccacagtugccttttcagugat

SEQ ID NO: 38973 - DNA, 23 bp, Artificial Sequence
  Synthetic
agaaatgccacagucctccttuc

SEQ ID NO: 38974 - DNA, 23 bp, Artificial Sequence
  Synthetic
cttgttcucaccaaaucccacct

SEQ ID NO: 38975 - DNA, 20 bp, Artificial Sequence
  Synthetic
tgugccccacaaaccagtua

SEQ ID NO: 38976 - DNA, 23 bp, Artificial Sequence
  Synthetic
gcttggguacctcagtuccaaac

SEQ ID NO: 38977 - DNA, 22 bp, Artificial Sequence
  Synthetic
caagaacacucactgccucaga

SEQ ID NO: 38978 - DNA, 22 bp, Artificial Sequence
  Synthetic
ctcagatgccuatgggctucat

SEQ ID NO: 38979 - DNA, 28 bp, Artificial Sequence
  Synthetic
guaaaaacacagugggcaagagaaaaat

SEQ ID NO: 38980 - DNA, 25 bp, Artificial Sequence
  Synthetic
aagtaacagagugttttcacgugga

SEQ ID NO: 38981 - DNA, 27 bp, Artificial Sequence
  Synthetic
gggaccagucagtctcattataaucct

SEQ ID NO: 38982 - DNA, 22 bp, Artificial Sequence
  Synthetic
gtggcuaagagggtcagtugaa

SEQ ID NO: 38983 - DNA, 27 bp, Artificial Sequence
  Synthetic
gattcggaaagagguatctgaacucac

SEQ ID NO: 38984 - DNA, 21 bp, Artificial Sequence
  Synthetic
ggtgaguacagggtcctctug

SEQ ID NO: 38985 - DNA, 24 bp, Artificial Sequence
  Synthetic
ggactggaaagugacaatgtccua

SEQ ID NO: 38986 - DNA, 22 bp, Artificial Sequence
  Synthetic
gggtggtcaugatggatcucct

SEQ ID NO: 38987 - DNA, 28 bp, Artificial Sequence
  Synthetic
aagttctggaaccugaaaaacuaagagt

SEQ ID NO: 38988 - DNA, 22 bp, Artificial Sequence
  Synthetic
cttgagagcgagauggtgagug

SEQ ID NO: 38989 - DNA, 22 bp, Artificial Sequence
  Synthetic
ctcacccacaccuttcagtgua

SEQ ID NO: 38990 - DNA, 21 bp, Artificial Sequence
  Synthetic
tgtgagctucaccaacgaguc

SEQ ID NO: 38991 - DNA, 22 bp, Artificial Sequence
  Synthetic
gtcaccctccuactgggactua

SEQ ID NO: 38992 - DNA, 21 bp, Artificial Sequence
  Synthetic
attgacccugatgtgcagugt

SEQ ID NO: 38993 - DNA, 23 bp, Artificial Sequence
  Synthetic
cttcccaacaaauggctctucaa

SEQ ID NO: 38994 - DNA, 21 bp, Artificial Sequence
  Synthetic
tgacuaaccagccctagctut

SEQ ID NO: 38995 - DNA, 24 bp, Artificial Sequence
  Synthetic
cuaacatagacaaugccaaacgca

SEQ ID NO: 38996 - DNA, 29 bp, Artificial Sequence
  Synthetic
catttaagguaaaagctaacagtcugcat

SEQ ID NO: 38997 - DNA, 30 bp, Artificial Sequence; identical to SEQ ID NO: 26763
  Synthetic

SEQ ID NO: 38998 - DNA, 26 bp, Artificial Sequence
  Synthetic
gttgccaccutgttaccttuaaaaga

SEQ ID NO: 38999 - DNA, 32 bp, Artificial Sequence; identical to SEQ ID NO: 26765
  Synthetic

SEQ ID NO: 39000 - DNA, 29 bp, Artificial Sequence
  Synthetic
aattccataactucttgctaagtccugag

SEQ ID NO: 39001 - DNA, 29 bp, Artificial Sequence
  Synthetic
ttgtggacaggutttgaaagatatttgug

SEQ ID NO: 39002 - DNA, 21 bp, Artificial Sequence
  Synthetic
cctccccagucctcatguact

SEQ ID NO: 39003 - DNA, 32 bp, Artificial Sequence; identical to SEQ ID NO: 26769
  Synthetic

SEQ ID NO: 39004 - DNA, 23 bp, Artificial Sequence
  Synthetic
gctgtatcgucaaggcactctug

SEQ ID NO: 39005 - DNA, 28 bp, Artificial Sequence
  Synthetic
tgagtttgtatuaaaaggtactggugga

SEQ ID NO: 39006 - DNA, 26 bp, Artificial Sequence
  Synthetic
cagccgagaauactttgtcatttucc

SEQ ID NO: 39007 - DNA, 24 bp, Artificial Sequence
  Synthetic
cttgacutgacccugggaagaaat

SEQ ID NO: 39008 - DNA, 21 bp, Artificial Sequence
  Synthetic
gtcaugaccgcacatucacaa

SEQ ID NO: 39009 - DNA, 30 bp, Artificial Sequence; identical to SEQ ID NO: 26775
  Synthetic

SEQ ID NO: 39010 - DNA, 22 bp, Artificial Sequence
  Synthetic
catctttgugaacgggagguga

SEQ ID NO: 39011 - DNA, 23 bp, Artificial Sequence
  Synthetic
gaaagatgcugcatgttggugac

SEQ ID NO: 39012 - DNA, 27 bp, Artificial Sequence
  Synthetic
aaaagtaggaaaucaggcccaatacuc

SEQ ID NO: 39013 - DNA, 23 bp, Artificial Sequence
  Synthetic
tggattccttutgtgtgtgguca

SEQ ID NO: 39014 - DNA, 26 bp, Artificial Sequence
  Synthetic
cgactgccaaaacauccaatacttut

SEQ ID NO: 39015 - DNA, 30 bp, Artificial Sequence; identical to SEQ ID NO: 26781
  Synthetic

SEQ ID NO: 39016 - DNA, 20 bp, Artificial Sequence
  Synthetic
ggcaggguacaggtagcaut

SEQ ID NO: 39017 - DNA, 29 bp, Artificial Sequence
  Synthetic
gttttcatggtaacuctgtgcttttcuag

SEQ ID NO: 39018 - DNA, 24 bp, Artificial Sequence
  Synthetic
aucaatcatttgcuccaggaaact

SEQ ID NO: 39019 - DNA, 23 bp, Artificial Sequence
  Synthetic
caacaaatuggaggtggcugaac

SEQ ID NO: 39020 - DNA, 27 bp, Artificial Sequence
  Synthetic
agtgtgcaaagucaccataauagaagt

SEQ ID NO: 39021 - DNA, 24 bp, Artificial Sequence
  Synthetic
ctgaatctgugcctgtttgtcuag

SEQ ID NO: 39022 - DNA, 20 bp, Artificial Sequence
  Synthetic
gctguggaaggagctcugat

SEQ ID NO: 39023 - DNA, 20 bp, Artificial Sequence
  Synthetic
cagcauggctctgtuagcga

SEQ ID NO: 39024 - DNA, 20 bp, Artificial Sequence
  Synthetic
aatcgctgugcgtgtaguga

SEQ ID NO: 39025 - DNA, 31 bp, Artificial Sequence; identical to SEQ ID NO: 26791
  Synthetic

SEQ ID NO: 39026 - DNA, 19 bp, Artificial Sequence
  Synthetic
gcgggauaggaggagguga

SEQ ID NO: 39027 - DNA, 18 bp, Artificial Sequence
  Synthetic
cuccgaggccaagcugaa

SEQ ID NO: 39028 - DNA, 27 bp, Artificial Sequence
  Synthetic
gaacaccgagautttattttgcaguct

SEQ ID NO: 39029 - DNA, 20 bp, Artificial Sequence
  Synthetic
ggccgguctgcttcttguaa

SEQ ID NO: 39030 - DNA, 21 bp, Artificial Sequence
  Synthetic
cacaggcagcucttctctcug

SEQ ID NO: 39031 - DNA, 23 bp, Artificial Sequence
  Synthetic
cagaacaucacctaccacugcaa

SEQ ID NO: 39032 - DNA, 23 bp, Artificial Sequence
  Synthetic
tgcuaaaagctuccagggagaaa

SEQ ID NO: 39033 - DNA, 22 bp, Artificial Sequence
  Synthetic
gagacttgcguctaccccaauc

SEQ ID NO: 39034 - DNA, 20 bp, Artificial Sequence
  Synthetic
catctccucccttgctgcua

SEQ ID NO: 39035 - DNA, 19 bp, Artificial Sequence
  Synthetic
ggccugagacagcaugacg

SEQ ID NO: 39036 - DNA, 24 bp, Artificial Sequence
  Synthetic
ccuaaaagaggcccugagcaaaaa

SEQ ID NO: 39037 - DNA, 22 bp, Artificial Sequence
  Synthetic
tcctcacgaccuctctctctug

SEQ ID NO: 39038 - DNA, 20 bp, Artificial Sequence
  Synthetic
gctcaagugggctctgtgug

SEQ ID NO: 39039 - DNA, 24 bp, Artificial Sequence
  Synthetic
gactcaatcggugtctgtcttgut

SEQ ID NO: 39040 - DNA, 23 bp, Artificial Sequence
  Synthetic
cttaguccagagacugcggaaac

SEQ ID NO: 39041 - DNA, 23 bp, Artificial Sequence
  Synthetic
attcttcuctgagccugagacct

SEQ ID NO: 39042 - DNA, 20 bp, Artificial Sequence
  Synthetic
tgggactugtccttgcugac

SEQ ID NO: 39043 - DNA, 24 bp, Artificial Sequence
  Synthetic
cactcatcauccttgtctctgucc

SEQ ID NO: 39044 - DNA, 19 bp, Artificial Sequence
  Synthetic
gggcctggugagggactua

SEQ ID NO: 39045 - DNA, 24 bp, Artificial Sequence
  Synthetic
acttcccgcautttctccttcuag

SEQ ID NO: 39046 - DNA, 17 bp, Artificial Sequence
  Synthetic
cgccaugggagcctcug

SEQ ID NO: 39047 - DNA, 18 bp, Artificial Sequence
  Synthetic
cgucttcctugggccact

SEQ ID NO: 39048 - DNA, 22 bp, Artificial Sequence
  Synthetic
catccattuccctcccugacaa

SEQ ID NO: 39049 - DNA, 20 bp, Artificial Sequence
  Synthetic
catgcccccutctcucacag

SEQ ID NO: 39050 - DNA, 19 bp, Artificial Sequence
  Synthetic
ccgccttuggcaggagaua

SEQ ID NO: 39051 - DNA, 18 bp, Artificial Sequence
  Synthetic
cgcaccaaggutggctug

SEQ ID NO: 39052 - DNA, 22 bp, Artificial Sequence
  Synthetic
ccauaagggaauggaagcgauc

SEQ ID NO: 39053 - DNA, 24 bp, Artificial Sequence
  Synthetic
tgtccacuacagactccctctuac

SEQ ID NO: 39054 - DNA, 22 bp, Artificial Sequence
  Synthetic
cttgccucctaggcaucagaaa

SEQ ID NO: 39055 - DNA, 23 bp, Artificial Sequence
  Synthetic
ctttgggtcugccctatactgug

SEQ ID NO: 39056 - DNA, 20 bp, Artificial Sequence
  Synthetic
ggaggcugggcaggtactua

SEQ ID NO: 39057 - DNA, 20 bp, Artificial Sequence
  Synthetic
cuggaaactcugggccagaa

SEQ ID NO: 39058 - DNA, 23 bp, Artificial Sequence
  Synthetic
ccctggtuaaactctacucagga

SEQ ID NO: 39059 - DNA, 26 bp, Artificial Sequence
  Synthetic
tctgagaatggugttctgtcttucag

SEQ ID NO: 39060 - DNA, 22 bp, Artificial Sequence
  Synthetic
gcaacagcagcuctgctactua

SEQ ID NO: 39061 - DNA, 22 bp, Artificial Sequence
  Synthetic
atcgctgaggucacatggtauc

SEQ ID NO: 39062 - DNA, 21 bp, Artificial Sequence
  Synthetic
ggatggagccuccacatucac

SEQ ID NO: 39063 - DNA, 26 bp, Artificial Sequence
  Synthetic
tgaaggctcacuctgtttctctttut

SEQ ID NO: 39064 - DNA, 22 bp, Artificial Sequence
  Synthetic
gggtttgacuccagagatguca

SEQ ID NO: 39065 - DNA, 21 bp, Artificial Sequence
  Synthetic
gacuttgcuaccccaggagag

SEQ ID NO: 39066 - DNA, 24 bp, Artificial Sequence
  Synthetic
ccacaactgucagagcaaaguaca

SEQ ID NO: 39067 - DNA, 26 bp, Artificial Sequence
  Synthetic
cttcatttcatccuccctgtctctuc

SEQ ID NO: 39068 - DNA, 21 bp, Artificial Sequence
  Synthetic
tgctgtggutgcacccaauac

SEQ ID NO: 39069 - DNA, 23 bp, Artificial Sequence
  Synthetic
catggtcacutccttcttgcuca

SEQ ID NO: 39070 - DNA, 26 bp, Artificial Sequence
  Synthetic
acaacacagaauatgaacttugcaca

SEQ ID NO: 39071 - DNA, 22 bp, Artificial Sequence
  Synthetic
cttttggcgucttcccuaggag

SEQ ID NO: 39072 - DNA, 22 bp, Artificial Sequence
  Synthetic
ttcugggaaacccaagtuggaa

SEQ ID NO: 39073 - DNA, 22 bp, Artificial Sequence
  Synthetic
acaccuccactttggatugcag

SEQ ID NO: 39074 - DNA, 23 bp, Artificial Sequence
  Synthetic
cagctccucatttgtctacucgt

SEQ ID NO: 39075 - DNA, 27 bp, Artificial Sequence
  Synthetic
ggcttccaaaacuacaatgtcaaagut

SEQ ID NO: 39076 - DNA, 23 bp, Artificial Sequence
  Synthetic
aatgaggauaccaggtcaauccc

SEQ ID NO: 39077 - DNA, 27 bp, Artificial Sequence
  Synthetic
tgtagtaaaccccucattttctgtucc

SEQ ID NO: 39078 - DNA, 23 bp, Artificial Sequence
  Synthetic
caggtaagugcaagcagcaatut

SEQ ID NO: 39079 - DNA, 28 bp, Artificial Sequence
  Synthetic
attgatgccuttttctctttaugccaag

SEQ ID NO: 39080 - DNA, 25 bp, Artificial Sequence
  Synthetic
tgaagaacauggtaagaugacagca

SEQ ID NO: 39081 - DNA, 25 bp, Artificial Sequence
  Synthetic
gctctcctcuaacttaccatccugt

SEQ ID NO: 39082 - DNA, 27 bp, Artificial Sequence
  Synthetic
acagactggatuaacatagcattgcut

SEQ ID NO: 39083 - DNA, 31 bp, Artificial Sequence; identical to SEQ ID NO: 26849
  Synthetic

SEQ ID NO: 39084 - DNA, 22 bp, Artificial Sequence
  Synthetic
ctgaggcaguctttcacgtcut

SEQ ID NO: 39085 - DNA, 25 bp, Artificial Sequence
  Synthetic
actgcaacctcuctctttttctcuc

SEQ ID NO: 39086 - DNA, 17 bp, Artificial Sequence
  Synthetic
cuggcccugacaccgaa

SEQ ID NO: 39087 - DNA, 17 bp, Artificial Sequence
  Synthetic
gcttcccccucctgcuc

SEQ ID NO: 39088 - DNA, 22 bp, Artificial Sequence
  Synthetic
cttgcagcaggutcttagcuct

SEQ ID NO: 39089 - DNA, 19 bp, Artificial Sequence
  Synthetic
ggaggtctugccggaggua

SEQ ID NO: 39090 - DNA, 27 bp, Artificial Sequence
  Synthetic
ggaaaaguttggatcuagaaacagcag

SEQ ID NO: 39091 - DNA, 27 bp, Artificial Sequence
  Synthetic
tgggagctgtuaacccttaattcaaut

SEQ ID NO: 39092 - DNA, 20 bp, Artificial Sequence
  Synthetic
gtaaguggcgatcuccacgt

SEQ ID NO: 39093 - DNA, 23 bp, Artificial Sequence
  Synthetic
accccactcucctcctttctauc

SEQ ID NO: 39094 - DNA, 23 bp, Artificial Sequence
  Synthetic
cctcacucaggagacagtcauca

SEQ ID NO: 39095 - DNA, 23 bp, Artificial Sequence
  Synthetic
aaccagaugaccgactccaaauc

SEQ ID NO: 39096 - DNA, 21 bp, Artificial Sequence
  Synthetic
gatgautggcacugcacacac

SEQ ID NO: 39097 - DNA, 23 bp, Artificial Sequence
  Synthetic
ctgacaaacacutcccatcccut

SEQ ID NO: 39098 - DNA, 21 bp, Artificial Sequence
  Synthetic
ctgcctccugaggttgtugat

SEQ ID NO: 39099 - DNA, 23 bp, Artificial Sequence
  Synthetic
cttuagagggauggaaagaggug

SEQ ID NO: 39100 - DNA, 22 bp, Artificial Sequence
  Synthetic
tcaggagacuctggtugacagt

SEQ ID NO: 39101 - DNA, 20 bp, Artificial Sequence
  Synthetic
gcactagtgguggcagctuc

SEQ ID NO: 39102 - DNA, 21 bp, Artificial Sequence
  Synthetic
cauagccacccacuccacaag

SEQ ID NO: 39103 - DNA, 21 bp, Artificial Sequence
  Synthetic
cucttgcuccaccaggaacaa

SEQ ID NO: 39104 - DNA, 28 bp, Artificial Sequence
  Synthetic
ccatggauaaataaacacuaggaacgca

SEQ ID NO: 39105 - DNA, 21 bp, Artificial Sequence
  Synthetic
cucaccaugcaagaagacuca

SEQ ID NO: 39106 - DNA, 26 bp, Artificial Sequence
  Synthetic
caaggacaaggccautaagaaatucg

SEQ ID NO: 39107 - DNA, 23 bp, Artificial Sequence
  Synthetic
ccugagaggcuccaaagaacaga

SEQ ID NO: 39108 - DNA, 27 bp, Artificial Sequence
  Synthetic
tgaagctacatuactgtgtgagttgug

SEQ ID NO: 39109 - DNA, 26 bp, Artificial Sequence
  Synthetic
accctccaggaugaaatttuaaccat

SEQ ID NO: 39110 - DNA, 24 bp, Artificial Sequence
  Synthetic
gctcaacacacaagutttcagugg

SEQ ID NO: 39111 - DNA, 28 bp, Artificial Sequence
  Synthetic
agctagtcccaaucgaatcagagtauag

SEQ ID NO: 39112 - DNA, 33 bp, Artificial Sequence; identical to SEQ ID NO: 26878
  Synthetic

SEQ ID NO: 39113 - DNA, 27 bp, Artificial Sequence
  Synthetic
agggcttaucgagacaaattgaagtut

SEQ ID NO: 39114 - DNA, 25 bp, Artificial Sequence
  Synthetic
ggaacatggautcatagaaguccct

SEQ ID NO: 39115 - DNA, 27 bp, Artificial Sequence
  Synthetic
ggaatccacauccttgttttgtuaggt

SEQ ID NO: 39116 - DNA, 26 bp, Artificial Sequence
  Synthetic
aaaagccagaccuttgtgattacuct

SEQ ID NO: 39117 - DNA, 29 bp, Artificial Sequence
  Synthetic
tcagctctgatgugatatctgatctacut

SEQ ID NO: 39118 - DNA, 23 bp, Artificial Sequence
  Synthetic
actgcgccugaccagaatuaaat

SEQ ID NO: 39119 - DNA, 29 bp, Artificial Sequence
  Synthetic
cagccactgaauatatctcaagtcttuga

SEQ ID NO: 39120 - DNA, 28 bp, Artificial Sequence
  Synthetic
gcacatttcaaguagccttagttcugaa

SEQ ID NO: 39121 - DNA, 27 bp, Artificial Sequence
  Synthetic
acatttgcagatuccctcagatatgua

SEQ ID NO: 39122 - DNA, 23 bp, Artificial Sequence
  Synthetic
gcatgagaaagaaugaggcugga

SEQ ID NO: 39123 - DNA, 27 bp, Artificial Sequence
  Synthetic
cuggaaagccagaugacaaaagaaaag

SEQ ID NO: 39124 - DNA, 27 bp, Artificial Sequence
  Synthetic
catgaccattcacutttacactcacug

SEQ ID NO: 39125 - DNA, 23 bp, Artificial Sequence
  Synthetic
aagtcagcctugctgagatcaut

SEQ ID NO: 39126 - DNA, 23 bp, Artificial Sequence
  Synthetic
ctgggctcuccttgttgagtuaa

SEQ ID NO: 39127 - DNA, 29 bp, Artificial Sequence
  Synthetic
ctcacgttucaaaatacaaacgaugaaga

SEQ ID NO: 39128 - DNA, 28 bp, Artificial Sequence
  Synthetic
gttggcaauagaagcatgtcgaattaut

SEQ ID NO: 39129 - DNA, 26 bp, Artificial Sequence
  Synthetic
gaaaacagaggaaaaaugcccagtua

SEQ ID NO: 39130 - DNA, 24 bp, Artificial Sequence
  Synthetic
caggaattcgcacauccctgatua

SEQ ID NO: 39131 - DNA, 28 bp, Artificial Sequence
  Synthetic
gtaattacagcaagaauccctcttctuc

SEQ ID NO: 39132 - DNA, 25 bp, Artificial Sequence
  Synthetic
atcccaaucgcaggctgaattatua

SEQ ID NO: 39133 - DNA, 31 bp, Artificial Sequence; identical to SEQ ID NO: 26899
  Synthetic

SEQ ID NO: 39134 - DNA, 26 bp, Artificial Sequence
  Synthetic
atccttcccaaacaugacatcaucat

SEQ ID NO: 39135 - DNA, 27 bp, Artificial Sequence
  Synthetic
caaacagctcucattcactctctttut

SEQ ID NO: 39136 - DNA, 26 bp, Artificial Sequence
  Synthetic
ggtgacaaugaaaatatuccgaaccc

SEQ ID NO: 39137 - DNA, 27 bp, Artificial Sequence
  Synthetic
ggauaaagaggaggagguatgactuaa

SEQ ID NO: 39138 - DNA, 22 bp, Artificial Sequence
  Synthetic
gagaatgugccaggctaatugc

SEQ ID NO: 39139 - DNA, 24 bp, Artificial Sequence
  Synthetic
ccagcctcaugatgtggaaaauga

SEQ ID NO: 39140 - DNA, 30 bp, Artificial Sequence; identical to SEQ ID NO: 26906
  Synthetic

SEQ ID NO: 39141 - DNA, 28 bp, Artificial Sequence
  Synthetic
cctgccatcuctttatccttctttucat

SEQ ID NO: 39142 - DNA, 23 bp, Artificial Sequence
  Synthetic
aaacacaaaaucctgtguaccca

SEQ ID NO: 39143 - DNA, 28 bp, Artificial Sequence
  Synthetic
gggaggtataguagcccatatgtatgua

SEQ ID NO: 39144 - DNA, 26 bp, Artificial Sequence
  Synthetic
taactcagaaagaucccutaaacugt

SEQ ID NO: 39145 - DNA, 26 bp, Artificial Sequence
  Synthetic
agtctttgaugcgaagaaaacgttuc

SEQ ID NO: 39146 - DNA, 23 bp, Artificial Sequence
  Synthetic
caggcagguataggtctgtcuct

SEQ ID NO: 39147 - DNA, 17 bp, Artificial Sequence
  Synthetic
cgccggagcugcaauga

SEQ ID NO: 39148 - DNA, 22 bp, Artificial Sequence
  Synthetic
cacagcugacagaccacatuct

SEQ ID NO: 39149 - DNA, 23 bp, Artificial Sequence
  Synthetic
ccaagaagcccacutatccccua

SEQ ID NO: 39150 - DNA, 21 bp, Artificial Sequence
  Synthetic
agagctaguggctcaccttug

SEQ ID NO: 39151 - DNA, 28 bp, Artificial Sequence
  Synthetic
gggaatactgaucctgatttaacaguga

SEQ ID NO: 39152 - DNA, 26 bp, Artificial Sequence
  Synthetic
ggagtaggaaaguttcaaagaccuga

SEQ ID NO: 39153 - DNA, 28 bp, Artificial Sequence
  Synthetic
ccaatuacaggaauagaacaggttcuat

SEQ ID NO: 39154 - DNA, 22 bp, Artificial Sequence
  Synthetic
ggaaaagauggcgctcattgug

SEQ ID NO: 39155 - DNA, 29 bp, Artificial Sequence
  Synthetic
gtgatgagcttugagttttctttcttcut

SEQ ID NO: 39156 - DNA, 27 bp, Artificial Sequence
  Synthetic
gttatcttcauggaagccacagtacut

SEQ ID NO: 39157 - DNA, 28 bp, Artificial Sequence
  Synthetic
agacacctatttugtgcctgtattcuag

SEQ ID NO: 39158 - DNA, 25 bp, Artificial Sequence
  Synthetic
agtgaacaaguacattgcuccaagt

SEQ ID NO: 39159 - DNA, 22 bp, Artificial Sequence
  Synthetic
gtactcaggacgutgccttcuc

SEQ ID NO: 39160 - DNA, 26 bp, Artificial Sequence
  Synthetic
aagatcttgaugatgtttgucagagc

SEQ ID NO: 39161 - DNA, 24 bp, Artificial Sequence
  Synthetic
ttcctgttcuggttctgcatctut

SEQ ID NO: 39162 - DNA, 21 bp, Artificial Sequence
  Synthetic
ccagcagtcutcggatctcut

SEQ ID NO: 39163 - DNA, 24 bp, Artificial Sequence
  Synthetic
ctaaaaagucagagaccucacucc

SEQ ID NO: 39164 - DNA, 20 bp, Artificial Sequence
  Synthetic
cagggucagggacagaaucc

SEQ ID NO: 39165 - DNA, 20 bp, Artificial Sequence
  Synthetic
ccgagtcugagggactcuga

SEQ ID NO: 39166 - DNA, 21 bp, Artificial Sequence
  Synthetic
gctgctacutcccacagauga

SEQ ID NO: 39167 - DNA, 22 bp, Artificial Sequence
  Synthetic
tgttgagccccauaatgucacg

SEQ ID NO: 39168 - DNA, 22 bp, Artificial Sequence
  Synthetic
cccatgtgugtctgtcacugaa

SEQ ID NO: 39169 - DNA, 20 bp, Artificial Sequence
  Synthetic
cctcatggcagutccctcug

SEQ ID NO: 39170 - DNA, 22 bp, Artificial Sequence
  Synthetic
gccccaggugacacaaagagua

SEQ ID NO: 39171 - DNA, 30 bp, Artificial Sequence; identical to SEQ ID NO: 26937
  Synthetic

SEQ ID NO: 39172 - DNA, 24 bp, Artificial Sequence
  Synthetic
aagtggcugcaaagaattuggaag

SEQ ID NO: 39173 - DNA, 28 bp, Artificial Sequence
  Synthetic
cccactcaccagauactgatgtttatut

SEQ ID NO: 39174 - DNA, 18 bp, Artificial Sequence
  Synthetic
cgtctuccacgcccugag

SEQ ID NO: 39175 - DNA, 17 bp, Artificial Sequence
  Synthetic
gccagcugtggguggag

SEQ ID NO: 39176 - DNA, 24 bp, Artificial Sequence
  Synthetic
gguagaagcaguagaagggaggag

SEQ ID NO: 39177 - DNA, 23 bp, Artificial Sequence
  Synthetic
agcuagcacgaggatagttuaca

SEQ ID NO: 39178 - DNA, 22 bp, Artificial Sequence
  Synthetic
aatgggctguagtgcacttuga

SEQ ID NO: 39179 - DNA, 23 bp, Artificial Sequence
  Synthetic
cccagugaaaggaacacagtuga

SEQ ID NO: 39180 - DNA, 25 bp, Artificial Sequence
  Synthetic
ggatggatcguaaagacagtctgut

SEQ ID NO: 39181 - DNA, 23 bp, Artificial Sequence
  Synthetic
aattctttccugtcgcttugcag

SEQ ID NO: 39182 - DNA, 30 bp, Artificial Sequence; identical to SEQ ID NO: 26948
  Synthetic

SEQ ID NO: 39183 - DNA, 27 bp, Artificial Sequence
  Synthetic
gaaaatgcacaccucaaaaggctaaut

SEQ ID NO: 39184 - DNA, 22 bp, Artificial Sequence
  Synthetic
agagttaggccutaccagccut

SEQ ID NO: 39185 - DNA, 22 bp, Artificial Sequence
  Synthetic
cagcatcaucagagtgccauga

SEQ ID NO: 39186 - DNA, 24 bp, Artificial Sequence
  Synthetic
gttactcaatucatgcagcaugca

SEQ ID NO: 39187 - DNA, 23 bp, Artificial Sequence
  Synthetic
ttctcatgccuagctctcuagca

SEQ ID NO: 39188 - DNA, 26 bp, Artificial Sequence
  Synthetic
actaaaacaaaautcagauggcaggt

SEQ ID NO: 39189 - DNA, 28 bp, Artificial Sequence
  Synthetic
gtccatgtagattucactggcctttaua

SEQ ID NO: 39190 - DNA, 21 bp, Artificial Sequence
  Synthetic
gctggaaguctgaacccctug

SEQ ID NO: 39191 - DNA, 28 bp, Artificial Sequence
  Synthetic
gatcaaagacaaaautgaaccaagugct

SEQ ID NO: 39192 - DNA, 28 bp, Artificial Sequence
  Synthetic
atgtttctgactguatacataacgcaut

SEQ ID NO: 39193 - DNA, 33 bp, Artificial Sequence; identical to SEQ ID NO: 26959
  Synthetic

SEQ ID NO: 39194 - DNA, 29 bp, Artificial Sequence
  Synthetic
cctctaacatucaatttcacagcugagat

SEQ ID NO: 39195 - DNA, 25 bp, Artificial Sequence
  Synthetic
gcttctccccaagcuggtattatuc

SEQ ID NO: 39196 - DNA, 22 bp, Artificial Sequence
  Synthetic
agagttgtagcucagccctcut

SEQ ID NO: 39197 - DNA, 24 bp, Artificial Sequence
  Synthetic
gaaatcacagaguttctgcuggga

SEQ ID NO: 39198 - DNA, 29 bp, Artificial Sequence
  Synthetic
gacaaacaaaaacaugaacaaattguggt

SEQ ID NO: 39199 - DNA, 21 bp, Artificial Sequence
  Synthetic
ctaccagucaggtcccaacuc

SEQ ID NO: 39200 - DNA, 25 bp, Artificial Sequence
  Synthetic
acaagtctggucaaaatactugcct

SEQ ID NO: 39201 - DNA, 28 bp, Artificial Sequence
  Synthetic
ctcctggacaaagaaauagagaagucat

SEQ ID NO: 39202 - DNA, 24 bp, Artificial Sequence
  Synthetic
acacagaccutgagttgtgtaucc

SEQ ID NO: 39203 - DNA, 22 bp, Artificial Sequence
  Synthetic
tcaagtgcccaguacaaagcuc

SEQ ID NO: 39204 - DNA, 28 bp, Artificial Sequence
  Synthetic
aagctgatgaaaaucaaagacaaaugca

SEQ ID NO: 39205 - DNA, 28 bp, Artificial Sequence
  Synthetic
tgaaugaaagggaauaactacttugaca

SEQ ID NO: 39206 - DNA, 29 bp, Artificial Sequence
  Synthetic
gtaagatcactgugaaaatctttgctuga

SEQ ID NO: 39207 - DNA, 28 bp, Artificial Sequence
  Synthetic
ccgaaacgugaagaaataatggagagua

SEQ ID NO: 39208 - DNA, 30 bp, Artificial Sequence; identical to SEQ ID NO: 26974
  Synthetic

SEQ ID NO: 39209 - DNA, 26 bp, Artificial Sequence
  Synthetic
gtgaccggguagtatactgtttctut

SEQ ID NO: 39210 - DNA, 24 bp, Artificial Sequence
  Synthetic
ggcatttgguctgtggtuagagat

SEQ ID NO: 39211 - DNA, 32 bp, Artificial Sequence; identical to SEQ ID NO: 26977
  Synthetic

SEQ ID NO: 39212 - DNA, 17 bp, Artificial Sequence
  Synthetic
ccauacaccggcucgca

SEQ ID NO: 39213 - DNA, 17 bp, Artificial Sequence
  Synthetic
ggcggcuccttggtcuc

SEQ ID NO: 39214 - DNA, 17 bp, Artificial Sequence
  Synthetic
gggcagcugcacaguct

SEQ ID NO: 39215 - DNA, 17 bp, Artificial Sequence
  Synthetic
cucctcaccuccgcgat

SEQ ID NO: 39216 - DNA, 25 bp, Artificial Sequence
  Synthetic
tcaacacutaggtaaaauccgacgt

SEQ ID NO: 39217 - DNA, 25 bp, Artificial Sequence
  Synthetic
ctcccctccauacaggtcataguaa

SEQ ID NO: 39218 - DNA, 25 bp, Artificial Sequence
  Synthetic
aattgtgttuaggagagctgacugt

SEQ ID NO: 39219 - DNA, 31 bp, Artificial Sequence; identical to SEQ ID NO: 26985
  Synthetic

SEQ ID NO: 39220 - DNA, 23 bp, Artificial Sequence
  Synthetic
gcagtgaacaugagagtgctuga

SEQ ID NO: 39221 - DNA, 25 bp, Artificial Sequence
  Synthetic
ggagaaagctugagctttccaauct

SEQ ID NO: 39222 - DNA, 28 bp, Artificial Sequence
  Synthetic
ttccttaaagaaguaatgctgauccagg

SEQ ID NO: 39223 - DNA, 26 bp, Artificial Sequence
  Synthetic
caagagugactattacugagcggaat

SEQ ID NO: 39224 - DNA, 30 bp, Artificial Sequence; identical to SEQ ID NO: 26990
  Synthetic

SEQ ID NO: 39225 - DNA, 23 bp, Artificial Sequence
  Synthetic
tcacucgggagttttctuggaac

SEQ ID NO: 39226 - DNA, 28 bp, Artificial Sequence
  Synthetic
tttaggctttuatttcagagtucacaga

SEQ ID NO: 39227 - DNA, 27 bp, Artificial Sequence
  Synthetic
cagttcccaaaguctctagaauacgac

SEQ ID NO: 39228 - DNA, 21 bp, Artificial Sequence
  Synthetic
ggcaauaccacttucggacct

SEQ ID NO: 39229 - DNA, 26 bp, Artificial Sequence
  Synthetic
gttaaagagcuaggagtgggtaggua

SEQ ID NO: 39230 - DNA, 31 bp, Artificial Sequence; identical to SEQ ID NO: 26996
  Synthetic

SEQ ID NO: 39231 - DNA, 22 bp, Artificial Sequence
  Synthetic
agagaatgagaauccgcaugcc

SEQ ID NO: 39232 - DNA, 24 bp, Artificial Sequence
  Synthetic
tcatgtaagcutaaacagcguggt

SEQ ID NO: 39233 - DNA, 30 bp, Artificial Sequence; identical to SEQ ID NO: 26999
  Synthetic

SEQ ID NO: 39234 - DNA, 22 bp, Artificial Sequence
  Synthetic
tgtgaagcaggccucacttuag

SEQ ID NO: 39235 - DNA, 21 bp, Artificial Sequence
  Synthetic
ctgggagagggaaugtuccag

SEQ ID NO: 39236 - DNA, 20 bp, Artificial Sequence
  Synthetic
cagcugctguaggaaggcat

SEQ ID NO: 39237 - DNA, 25 bp, Artificial Sequence
  Synthetic
catccctauaagaagccctacaugg

SEQ ID NO: 39238 - DNA, 23 bp, Artificial Sequence
  Synthetic
aatgaatactccucacccccuca

SEQ ID NO: 39239 - DNA, 23 bp, Artificial Sequence
  Synthetic
accagtgugagaatggtgttucc

SEQ ID NO: 39240 - DNA, 23 bp, Artificial Sequence
  Synthetic
tgctggctuacctgggtaattug

SEQ ID NO: 39241 - DNA, 27 bp, Artificial Sequence
  Synthetic
cttgttctctcutcctctttcctucag

SEQ ID NO: 39242 - DNA, 22 bp, Artificial Sequence
  Synthetic
cgtgagugcagaacgctgtaut

SEQ ID NO: 39243 - DNA, 25 bp, Artificial Sequence
  Synthetic
gcagggutttatcuggagacaaagg

SEQ ID NO: 39244 - DNA, 30 bp, Artificial Sequence; identical to SEQ ID NO: 27010
  Synthetic

SEQ ID NO: 39245 - DNA, 21 bp, Artificial Sequence
  Synthetic
ccctccguccctctctctuag

SEQ ID NO: 39246 - DNA, 19 bp, Artificial Sequence
  Synthetic
gaagcgcgagguctcctua

SEQ ID NO: 39247 - DNA, 20 bp, Artificial Sequence
  Synthetic
cccctgcutcttgtccucag

SEQ ID NO: 39248 - DNA, 19 bp, Artificial Sequence
  Synthetic
gcagagcuccattguggca

SEQ ID NO: 39249 - DNA, 32 bp, Artificial Sequence; identical to SEQ ID NO: 27015
  Synthetic

SEQ ID NO: 39250 - DNA, 22 bp, Artificial Sequence
  Synthetic
ctgtgaagacagucttcuccgt

SEQ ID NO: 39251 - DNA, 24 bp, Artificial Sequence
  Synthetic
gaggagaucaaaacccagaagguc

SEQ ID NO: 39252 - DNA, 20 bp, Artificial Sequence
  Synthetic
cguggacacgaagaucagct

SEQ ID NO: 39253 - DNA, 22 bp, Artificial Sequence
  Synthetic
agcattggaaagauctggcuca

SEQ ID NO: 39254 - DNA, 17 bp, Artificial Sequence
  Synthetic
gctccuaggcgggucct

SEQ ID NO: 39255 - DNA, 19 bp, Artificial Sequence
  Synthetic
cccagucuccgagggaaga

SEQ ID NO: 39256 - DNA, 26 bp, Artificial Sequence
  Synthetic
gacgcagcuacattttacctugaaat

SEQ ID NO: 39257 - DNA, 21 bp, Artificial Sequence
  Synthetic
gctgcttaacguggcagagut

SEQ ID NO: 39258 - DNA, 24 bp, Artificial Sequence
  Synthetic
ggtgguacccattguaaaggaagt

SEQ ID NO: 39259 - DNA, 22 bp, Artificial Sequence
  Synthetic
ccatgcatguggcctacuacag

SEQ ID NO: 39260 - DNA, 21 bp, Artificial Sequence
  Synthetic
cgaagtccucttgctcgucac

SEQ ID NO: 39261 - DNA, 22 bp, Artificial Sequence
  Synthetic
tcccaaggccucttccacuaat

SEQ ID NO: 39262 - DNA, 23 bp, Artificial Sequence
  Synthetic
gcatgaagagggcguacaagtua

SEQ ID NO: 39263 - DNA, 30 bp, Artificial Sequence; identical to SEQ ID NO: 27029
  Synthetic

SEQ ID NO: 39264 - DNA, 26 bp, Artificial Sequence
  Synthetic
tacacgttucagaagacatccuaaag

SEQ ID NO: 39265 - DNA, 23 bp, Artificial Sequence
  Synthetic
tccatccucaggcgtagaagtua

SEQ ID NO: 39266 - DNA, 21 bp, Artificial Sequence
  Synthetic
aggaugaaccgggaggaatug

SEQ ID NO: 39267 - DNA, 21 bp, Artificial Sequence
  Synthetic
agcaaggcuccgtcucaaaaa

SEQ ID NO: 39268 - DNA, 19 bp, Artificial Sequence
  Synthetic
cagaugcaccgacugcaag

SEQ ID NO: 39269 - DNA, 22 bp, Artificial Sequence
  Synthetic
ttcccagtgucttagccctgua

SEQ ID NO: 39270 - DNA, 30 bp, Artificial Sequence; identical to SEQ ID NO: 27036
  Synthetic

SEQ ID NO: 39271 - DNA, 22 bp, Artificial Sequence
  Synthetic
gcatgcauagaccaatgggtut

SEQ ID NO: 39272 - DNA, 25 bp, Artificial Sequence
  Synthetic
gagacaagagggagguattctuact

SEQ ID NO: 39273 - DNA, 21 bp, Artificial Sequence
  Synthetic
cagctgaugatggcaacucac

SEQ ID NO: 39274 - DNA, 17 bp, Artificial Sequence
  Synthetic
ccctcccugccauggac

SEQ ID NO: 39275 - DNA, 21 bp, Artificial Sequence
  Synthetic
gggacccaaaugtggtacuca

SEQ ID NO: 39276 - DNA, 30 bp, Artificial Sequence; identical to SEQ ID NO: 27042
  Synthetic

SEQ ID NO: 39277 - DNA, 24 bp, Artificial Sequence
  Synthetic
tgcatttuggaggagctctactuc

SEQ ID NO: 39278 - DNA, 30 bp, Artificial Sequence; identical to SEQ ID NO: 27044
  Synthetic

SEQ ID NO: 39279 - DNA, 23 bp, Artificial Sequence
  Synthetic
ccccttccugtaccatcttucct

SEQ ID NO: 39280 - DNA, 22 bp, Artificial Sequence
  Synthetic
tccacccucctctacccuaaga

SEQ ID NO: 39281 - DNA, 24 bp, Artificial Sequence
  Synthetic
ctggtggaugtgcagtucaaaaag

SEQ ID NO: 39282 - DNA, 23 bp, Artificial Sequence
  Synthetic
acctcccaguatgtgauggagac

SEQ ID NO: 39283 - DNA, 24 bp, Artificial Sequence
  Synthetic
gaaattctgcautggtgctuagga

SEQ ID NO: 39284 - DNA, 24 bp, Artificial Sequence
  Synthetic
cccttttccucaatccaugaccaa

SEQ ID NO: 39285 - DNA, 25 bp, Artificial Sequence
  Synthetic
gaatcgagccuggtctctaaaguag

SEQ ID NO: 39286 - DNA, 25 bp, Artificial Sequence
  Synthetic
gggaaggaaguagataaggtgcuga

SEQ ID NO: 39287 - DNA, 22 bp, Artificial Sequence
  Synthetic
ctggttucaggaagctcucagg

SEQ ID NO: 39288 - DNA, 28 bp, Artificial Sequence
  Synthetic
gagagaaatgaaguctaacactagtucc

SEQ ID NO: 39289 - DNA, 26 bp, Artificial Sequence
  Synthetic
ccccaugaggaggttttctctuagat

SEQ ID NO: 39290 - DNA, 30 bp, Artificial Sequence; identical to SEQ ID NO: 27056
  Synthetic

SEQ ID NO: 39291 - DNA, 26 bp, Artificial Sequence
  Synthetic
cctcttccucgtgctgattttuaaag

SEQ ID NO: 39292 - DNA, 21 bp, Artificial Sequence
  Synthetic
gtgaccagacaguggatugga

SEQ ID NO: 39293 - DNA, 29 bp, Artificial Sequence
  Synthetic
cgtatgcaatgatuactccagtgtactua

SEQ ID NO: 39294 - DNA, 22 bp, Artificial Sequence
  Synthetic
cttcuacccagaggcagaagug

SEQ ID NO: 39295 - DNA, 23 bp, Artificial Sequence
  Synthetic
atcagacttccucaccccaguaa

SEQ ID NO: 39296 - DNA, 28 bp, Artificial Sequence
  Synthetic
aagcattaagaguatcaacagtgcugaa

SEQ ID NO: 39297 - DNA, 23 bp, Artificial Sequence
  Synthetic
tgactcacugtctagctctugct

SEQ ID NO: 39298 - DNA, 24 bp, Artificial Sequence
  Synthetic
gctgctgtccuccatgctattuac

SEQ ID NO: 39299 - DNA, 30 bp, Artificial Sequence; identical to SEQ ID NO: 27065
  Synthetic

SEQ ID NO: 39300 - DNA, 17 bp, Artificial Sequence
  Synthetic
agtcugagcggcgaugg

SEQ ID NO: 39301 - DNA, 17 bp, Artificial Sequence
  Synthetic
cuccagcagcagcucct

SEQ ID NO: 39302 - DNA, 22 bp, Artificial Sequence
  Synthetic
tggtgguggaagtgcaacauat

SEQ ID NO: 39303 - DNA, 31 bp, Artificial Sequence; identical to SEQ ID NO: 27069
  Synthetic

SEQ ID NO: 39304 - DNA, 22 bp, Artificial Sequence
  Synthetic
gctcactttcauggctgtggut

SEQ ID NO: 39305 - DNA, 27 bp, Artificial Sequence
  Synthetic
tgttaacaccaaauaacttactgcuca

SEQ ID NO: 39306 - DNA, 25 bp, Artificial Sequence
  Synthetic
gtgtataaactcuccaggttgccut

SEQ ID NO: 39307 - DNA, 21 bp, Artificial Sequence
  Synthetic
ggagcagcccauctatccuga

SEQ ID NO: 39308 - DNA, 25 bp, Artificial Sequence
  Synthetic
cgacatcatgguattccccttacua

SEQ ID NO: 39309 - DNA, 18 bp, Artificial Sequence
  Synthetic
tgggcctucccctacucc

SEQ ID NO: 39310 - DNA, 24 bp, Artificial Sequence
  Synthetic
aatgtggaagugactagugaagcc

SEQ ID NO: 39311 - DNA, 23 bp, Artificial Sequence
  Synthetic
catagcccauctccagctcatuc

SEQ ID NO: 39312 - DNA, 24 bp, Artificial Sequence
  Synthetic
ggccagagaagaaacutccacauc

SEQ ID NO: 39313 - DNA, 18 bp, Artificial Sequence
  Synthetic
cgagcagaucgcccucaa

SEQ ID NO: 39314 - DNA, 23 bp, Artificial Sequence
  Synthetic
aaggccttguttctgtcttuagg

SEQ ID NO: 39315 - DNA, 30 bp, Artificial Sequence; identical to SEQ ID NO: 27081
  Synthetic

SEQ ID NO: 39316 - DNA, 21 bp, Artificial Sequence
  Synthetic
gctggtcucaatcagctccug

SEQ ID NO: 39317 - DNA, 21 bp, Artificial Sequence
  Synthetic
ctcacacccacuctcctgaug

SEQ ID NO: 39318 - DNA, 19 bp, Artificial Sequence
  Synthetic
gtguctctgcauccaggga

SEQ ID NO: 39319 - DNA, 18 bp, Artificial Sequence
  Synthetic
ctctcaacccugcccugt

SEQ ID NO: 39320 - DNA, 21 bp, Artificial Sequence
  Synthetic
actcatctcuggcctctugga

SEQ ID NO: 39321 - DNA, 20 bp, Artificial Sequence
  Synthetic
ggctgaagagugagcctugt

SEQ ID NO: 39322 - DNA, 22 bp, Artificial Sequence
  Synthetic
ctctacguccaccatcaagucc

SEQ ID NO: 39323 - DNA, 22 bp, Artificial Sequence
  Synthetic
cagtgtugcccagtagagucac

SEQ ID NO: 39324 - DNA, 21 bp, Artificial Sequence
  Synthetic
tgtctcctccucgtactgcuc

SEQ ID NO: 39325 - DNA, 22 bp, Artificial Sequence
  Synthetic
gctgggctuggttgaagtacua

SEQ ID NO: 39326 - DNA, 23 bp, Artificial Sequence
  Synthetic
ggccattucacaagtcatgucct

SEQ ID NO: 39327 - DNA, 22 bp, Artificial Sequence
  Synthetic
ccttcctgucttgcttccugaa

SEQ ID NO: 39328 - DNA, 17 bp, Artificial Sequence
  Synthetic
cguggcctccuccaggt

SEQ ID NO: 39329 - DNA, 20 bp, Artificial Sequence
  Synthetic
cuttgtgtcugacccaggca

SEQ ID NO: 39330 - DNA, 22 bp, Artificial Sequence
  Synthetic
gcctcagtuacctcagggcuat

SEQ ID NO: 39331 - DNA, 22 bp, Artificial Sequence
  Synthetic
gaaggaaggcuacctgtcacuc

SEQ ID NO: 39332 - DNA, 23 bp, Artificial Sequence
  Synthetic
cattggtgtugcctgcaaaauct

SEQ ID NO: 39333 - DNA, 21 bp, Artificial Sequence
  Synthetic
caucgctaagcugaccaagga

SEQ ID NO: 39334 - DNA, 23 bp, Artificial Sequence
  Synthetic
aggaccaggauaacacuctaguc

SEQ ID NO: 39335 - DNA, 23 bp, Artificial Sequence
  Synthetic
tggaggaugaggaggagaugaac

SEQ ID NO: 39336 - DNA, 21 bp, Artificial Sequence
  Synthetic
cctggttgugagatgggcuat

SEQ ID NO: 39337 - DNA, 22 bp, Artificial Sequence
  Synthetic
ccaccaugaaggaagagtucgg

SEQ ID NO: 39338 - DNA, 20 bp, Artificial Sequence
  Synthetic
ttgacatugcggatcugcct

SEQ ID NO: 39339 - DNA, 21 bp, Artificial Sequence
  Synthetic
gcctgttgcauctacccctug

SEQ ID NO: 39340 - DNA, 22 bp, Artificial Sequence
  Synthetic
ctcccccugttctatgagcuct

SEQ ID NO: 39341 - DNA, 23 bp, Artificial Sequence
  Synthetic
actttacccuaaggctgacccut

SEQ ID NO: 39342 - DNA, 24 bp, Artificial Sequence
  Synthetic
tttcctcaucaaactcaagcauca

SEQ ID NO: 39343 - DNA, 29 bp, Artificial Sequence
  Synthetic
tgttgattatttcucctctcgctgttuag

SEQ ID NO: 39344 - DNA, 22 bp, Artificial Sequence
  Synthetic
ccaggaugttgtaguccacagt

SEQ ID NO: 39345 - DNA, 24 bp, Artificial Sequence
  Synthetic
tgattctctcuttgcctctucacc

SEQ ID NO: 39346 - DNA, 23 bp, Artificial Sequence
  Synthetic
ctcagcaaauggctgttgaaugt

SEQ ID NO: 39347 - DNA, 22 bp, Artificial Sequence
  Synthetic
gcagcaggugtactactccauc

SEQ ID NO: 39348 - DNA, 18 bp, Artificial Sequence
  Synthetic
gtcagcaccucaggccut

SEQ ID NO: 39349 - DNA, 22 bp, Artificial Sequence
  Synthetic
ctctttgtcuctcgctctgucc

SEQ ID NO: 39350 - DNA, 18 bp, Artificial Sequence
  Synthetic
tgcaugcaggagtcgtug

SEQ ID NO: 39351 - DNA, 25 bp, Artificial Sequence
  Synthetic
ctctactcuctttccttccucacct

SEQ ID NO: 39352 - DNA, 26 bp, Artificial Sequence
  Synthetic
aagccagauacagtacaatcaacugg

SEQ ID NO: 39353 - DNA, 24 bp, Artificial Sequence
  Synthetic
catgcagttcugctcctttcauag

SEQ ID NO: 39354 - DNA, 20 bp, Artificial Sequence
  Synthetic
tgcaaucccagcctuaaacc

SEQ ID NO: 39355 - DNA, 19 bp, Artificial Sequence
  Synthetic
cagatccucagcccugacc

SEQ ID NO: 39356 - DNA, 21 bp, Artificial Sequence
  Synthetic
cctggctuatttaggccucca

SEQ ID NO: 39357 - DNA, 18 bp, Artificial Sequence
  Synthetic
cttaugcgcccccuccag

SEQ ID NO: 39358 - DNA, 24 bp, Artificial Sequence
  Synthetic
tggcttugacaaactcttcctugt

SEQ ID NO: 39359 - DNA, 22 bp, Artificial Sequence
  Synthetic
gggctcccucaggagtaacaua

SEQ ID NO: 39360 - DNA, 20 bp, Artificial Sequence
  Synthetic
agggtgcuctgtctggguat

SEQ ID NO: 39361 - DNA, 19 bp, Artificial Sequence
  Synthetic
tcaccucatgcucccacct

SEQ ID NO: 39362 - DNA, 22 bp, Artificial Sequence
  Synthetic
cattctccucagctggttguca

SEQ ID NO: 39363 - DNA, 19 bp, Artificial Sequence
  Synthetic
cgagcagaucgcccucaag

SEQ ID NO: 39364 - DNA, 21 bp, Artificial Sequence
  Synthetic
cggagagacacuggtcuggat

SEQ ID NO: 39365 - DNA, 23 bp, Artificial Sequence
  Synthetic
gatgctcaaugcttttcctgcuc

SEQ ID NO: 39366 - DNA, 22 bp, Artificial Sequence
  Synthetic
acccgcucactagtctcaauca

SEQ ID NO: 39367 - DNA, 21 bp, Artificial Sequence
  Synthetic
ctcatgcccacuctcctgauc

SEQ ID NO: 39368 - DNA, 18 bp, Artificial Sequence
  Synthetic
gcgtguctctgcguccag

SEQ ID NO: 39369 - DNA, 17 bp, Artificial Sequence
  Synthetic
ccctgugccctgacugt

SEQ ID NO: 39370 - DNA, 17 bp, Artificial Sequence
  Synthetic
ccuccccagcctctugg

SEQ ID NO: 39371 - DNA, 20 bp, Artificial Sequence
  Synthetic
ggctgaagagugagcctugt

SEQ ID NO: 39372 - DNA, 22 bp, Artificial Sequence
  Synthetic
ctacgtccaccaucaagtccuc

SEQ ID NO: 39373 - DNA, 22 bp, Artificial Sequence
  Synthetic
gtttcctcutgtccccauccac

SEQ ID NO: 39374 - DNA, 23 bp, Artificial Sequence
  Synthetic
gtctcatactuggtcctccacug

SEQ ID NO: 39375 - DNA, 25 bp, Artificial Sequence
  Synthetic
gggttgcttuatggagaaagcugaa

SEQ ID NO: 39376 - DNA, 20 bp, Artificial Sequence
  Synthetic
gagacugtggugggaaccat

SEQ ID NO: 39377 - DNA, 28 bp, Artificial Sequence
  Synthetic
catcatataactcuccttcccttcucag

SEQ ID NO: 39378 - DNA, 17 bp, Artificial Sequence
  Synthetic
cguggcctccuccaggt

SEQ ID NO: 39379 - DNA, 18 bp, Artificial Sequence
  Synthetic
tcugaccaggcacgcauc

SEQ ID NO: 39380 - DNA, 23 bp, Artificial Sequence
  Synthetic
ccugtaatgctgugaacaggaca

SEQ ID NO: 39381 - DNA, 22 bp, Artificial Sequence
  Synthetic
ccttaccucaccatccctccut

SEQ ID NO: 39382 - DNA, 23 bp, Artificial Sequence
  Synthetic
gggcacagauagacatggcauat

SEQ ID NO: 39383 - DNA, 22 bp, Artificial Sequence
  Synthetic
gatcatugccaagcugaccaag

SEQ ID NO: 39384 - DNA, 25 bp, Artificial Sequence
  Synthetic
agtatggtcugagagtcctgaugag

SEQ ID NO: 39385 - DNA, 24 bp, Artificial Sequence
  Synthetic
caaggugaaggagaugaacgagag

SEQ ID NO: 39386 - DNA, 21 bp, Artificial Sequence
  Synthetic
ggguggaagagccaacaguag

SEQ ID NO: 39387 - DNA, 25 bp, Artificial Sequence
  Synthetic
gcugaagagugcagaaagagagaag

SEQ ID NO: 39388 - DNA, 22 bp, Artificial Sequence
  Synthetic
cgggaaaccucctcttgagauc

SEQ ID NO: 39389 - DNA, 22 bp, Artificial Sequence
  Synthetic
cccaccatcuctttccctcgua

SEQ ID NO: 39390 - DNA, 22 bp, Artificial Sequence
  Synthetic
ctcccccugttctatgagcuct

SEQ ID NO: 39391 - DNA, 25 bp, Artificial Sequence
  Synthetic
acagactccucctacttccttctug

SEQ ID NO: 39392 - DNA, 17 bp, Artificial Sequence
  Synthetic
gggctgugtcccacuca

SEQ ID NO: 39393 - DNA, 25 bp, Artificial Sequence
  Synthetic
caaaugccagcaaggatguaaagag

SEQ ID NO: 39394 - DNA, 24 bp, Artificial Sequence
  Synthetic
ccaatgatgtugtagtccacgaug

SEQ ID NO: 39395 - DNA, 22 bp, Artificial Sequence
  Synthetic
cactcagtgaugctctctccug

SEQ ID NO: 39396 - DNA, 22 bp, Artificial Sequence
  Synthetic
gggagcgagugagtgattgtuc

SEQ ID NO: 39397 - DNA, 23 bp, Artificial Sequence
  Synthetic
aatatgggtcuctcctccaccut

SEQ ID NO: 39398 - DNA, 21 bp, Artificial Sequence
  Synthetic
gagaugactgcugagcagaca

SEQ ID NO: 39399 - DNA, 27 bp, Artificial Sequence
  Synthetic
cttcactucagaggagaaaaacuccat

SEQ ID NO: 39400 - DNA, 22 bp, Artificial Sequence
  Synthetic
gcgtctuagctctgctttugga

SEQ ID NO: 39401 - DNA, 22 bp, Artificial Sequence
  Synthetic
gtgtcccacccuaaccatgtut

SEQ ID NO: 39402 - DNA, 24 bp, Artificial Sequence
  Synthetic
agagagagaggucaagaccagaug

SEQ ID NO: 39403 - DNA, 22 bp, Artificial Sequence
  Synthetic
agauatgagcctucccccaact

SEQ ID NO: 39404 - DNA, 21 bp, Artificial Sequence
  Synthetic
caggugagagctcttcuccct

SEQ ID NO: 39405 - DNA, 22 bp, Artificial Sequence
  Synthetic
ccaauaagcccctgtctucaca

SEQ ID NO: 39406 - DNA, 23 bp, Artificial Sequence
  Synthetic
cctatcccagutccctucaggaa

SEQ ID NO: 39407 - DNA, 25 bp, Artificial Sequence
  Synthetic
gcaagtcacugctccttttctaucc

SEQ ID NO: 39408 - DNA, 23 bp, Artificial Sequence
  Synthetic
cgatcctugaggttguagagcac

SEQ ID NO: 39409 - DNA, 23 bp, Artificial Sequence
  Synthetic
ctcttgagcacuattgccctguc

SEQ ID NO: 39410 - DNA, 23 bp, Artificial Sequence
  Synthetic
aaactccugtttgtcaucaggca

SEQ ID NO: 39411 - DNA, 21 bp, Artificial Sequence
  Synthetic
aagggaagaaugggcagaugg

SEQ ID NO: 39412 - DNA, 20 bp, Artificial Sequence
  Synthetic
ctgcuccaggaatccctucg

SEQ ID NO: 39413 - DNA, 20 bp, Artificial Sequence
  Synthetic
ccttctgcugcagggcaaua

SEQ ID NO: 39414 - DNA, 17 bp, Artificial Sequence
  Synthetic
ccuagggucgcccgagt

SEQ ID NO: 39415 - DNA, 22 bp, Artificial Sequence
  Synthetic
ggagaccagcuactgctucaag

SEQ ID NO: 39416 - DNA, 19 bp, Artificial Sequence
  Synthetic
cgagaacuggtggctcucc

SEQ ID NO: 39417 - DNA, 18 bp, Artificial Sequence
  Synthetic
tcgatgcugccgtcgtut

SEQ ID NO: 39418 - DNA, 17 bp, Artificial Sequence
  Synthetic
cccagcaggcugtgcuc

SEQ ID NO: 39419 - DNA, 18 bp, Artificial Sequence
  Synthetic
gucccaaggugaccagca

SEQ ID NO: 39420 - DNA, 28 bp, Artificial Sequence
  Synthetic
tttttaacgtatcutagtgtgagcucgt

SEQ ID NO: 39421 - DNA, 23 bp, Artificial Sequence
  Synthetic
gcatggcccuttggagacuaaag

SEQ ID NO: 39422 - DNA, 23 bp, Artificial Sequence
  Synthetic
gggactccutgctaaccauagga

SEQ ID NO: 39423 - DNA, 30 bp, Artificial Sequence; identical to SEQ ID NO: 27189
  Synthetic

SEQ ID NO: 39424 - DNA, 21 bp, Artificial Sequence
  Synthetic
ggtggtuaatgtgtccucggt

SEQ ID NO: 39425 - DNA, 21 bp, Artificial Sequence
  Synthetic
ccaagttgcugtggacctcua

SEQ ID NO: 39426 - DNA, 23 bp, Artificial Sequence
  Synthetic
ctcttcuccccctttgucaagac

SEQ ID NO: 39427 - DNA, 22 bp, Artificial Sequence
  Synthetic
atcaggcacaaacucagctuct

SEQ ID NO: 39428 - DNA, 23 bp, Artificial Sequence
  Synthetic
cttctaggaauccggtgggagua

SEQ ID NO: 39429 - DNA, 20 bp, Artificial Sequence
  Synthetic
aggtguccacaactcaugcc

SEQ ID NO: 39430 - DNA, 24 bp, Artificial Sequence
  Synthetic
gttgttaaucccaggtcuaaccgt

SEQ ID NO: 39431 - DNA, 24 bp, Artificial Sequence
  Synthetic
gccatatttcaaugtcagctccuc

SEQ ID NO: 39432 - DNA, 24 bp, Artificial Sequence
  Synthetic
ggtaatgtggutggtgatcuccat

SEQ ID NO: 39433 - DNA, 24 bp, Artificial Sequence
  Synthetic
caaagatctgugtctcatgcucac

SEQ ID NO: 39434 - DNA, 30 bp, Artificial Sequence; identical to SEQ ID NO: 27200
  Synthetic

SEQ ID NO: 39435 - DNA, 23 bp, Artificial Sequence
  Synthetic
catucccaccacaccaaaatucc

SEQ ID NO: 39436 - DNA, 26 bp, Artificial Sequence
  Synthetic
cctaccacccauttacaagttuagcc

SEQ ID NO: 39437 - DNA, 27 bp, Artificial Sequence
  Synthetic
tgcttcagtuccgataaattcuacact

SEQ ID NO: 39438 - DNA, 26 bp, Artificial Sequence
  Synthetic
gagctgtaactuccactttctctuga

SEQ ID NO: 39439 - DNA, 28 bp, Artificial Sequence
  Synthetic
actttgcaacauagagaaatgcacauac

SEQ ID NO: 39440 - DNA, 24 bp, Artificial Sequence
  Synthetic
tgtgaatgtgugtctttcccauct

SEQ ID NO: 39441 - DNA, 30 bp, Artificial Sequence; identical to SEQ ID NO: 27207
  Synthetic

SEQ ID NO: 39442 - DNA, 22 bp, Artificial Sequence
  Synthetic
ccgaagacagcacugttaccug

SEQ ID NO: 39443 - DNA, 21 bp, Artificial Sequence
  Synthetic
ccaagtcucccctcttcaugg

SEQ ID NO: 39444 - DNA, 22 bp, Artificial Sequence
  Synthetic
cctacagauaccagggugcaac

SEQ ID NO: 39445 - DNA, 25 bp, Artificial Sequence
  Synthetic
gccttgaauttcttttcugcacgac

SEQ ID NO: 39446 - DNA, 23 bp, Artificial Sequence
  Synthetic
acagcttctuacagtgctggaug

SEQ ID NO: 39447 - DNA, 24 bp, Artificial Sequence
  Synthetic
gctacactcutccaaacctucact

SEQ ID NO: 39448 - DNA, 27 bp, Artificial Sequence
  Synthetic
aaggcttctgaguggtacaacttttua

SEQ ID NO: 39449 - DNA, 21 bp, Artificial Sequence
  Synthetic
caaggcugacactcacgauga

SEQ ID NO: 39450 - DNA, 22 bp, Artificial Sequence
  Synthetic
gggtgatcutgttgaaggtugg

SEQ ID NO: 39451 - DNA, 24 bp, Artificial Sequence
  Synthetic
ctgatcacugggagtcatcatgug

SEQ ID NO: 39452 - DNA, 22 bp, Artificial Sequence
  Synthetic
tgagttggccuacaggtatugt

SEQ ID NO: 39453 - DNA, 30 bp, Artificial Sequence; identical to SEQ ID NO: 27219
  Synthetic

SEQ ID NO: 39454 - DNA, 21 bp, Artificial Sequence
  Synthetic
gcttcagaaucacagcucggt

SEQ ID NO: 39455 - DNA, 20 bp, Artificial Sequence
  Synthetic
acagaugcgctaaugacggt

SEQ ID NO: 39456 - DNA, 28 bp, Artificial Sequence
  Synthetic
cgcaattttccuattatcggagugaaag

SEQ ID NO: 39457 - DNA, 20 bp, Artificial Sequence
  Synthetic
gagugagaggactccuccgt

SEQ ID NO: 39458 - DNA, 20 bp, Artificial Sequence
  Synthetic
gcaggagugctcacgatcug

SEQ ID NO: 39459 - DNA, 27 bp, Artificial Sequence
  Synthetic
gccctcttaacuacactctcatuacct

SEQ ID NO: 39460 - DNA, 25 bp, Artificial Sequence
  Synthetic
cacagcauccaagaggtaaagtuct

SEQ ID NO: 39461 - DNA, 27 bp, Artificial Sequence
  Synthetic
ggctttcttcaugatcttgtacatguc

SEQ ID NO: 39462 - DNA, 21 bp, Artificial Sequence
  Synthetic
cccctgugttgttcccuacat

SEQ ID NO: 39463 - DNA, 26 bp, Artificial Sequence
  Synthetic
gtcagttctgauaatcggaggtguac

SEQ ID NO: 39464 - DNA, 25 bp, Artificial Sequence
  Synthetic
agacagaagautcccttuccagaga

SEQ ID NO: 39465 - DNA, 21 bp, Artificial Sequence
  Synthetic
tctcauggctcagtucccaac

SEQ ID NO: 39466 - DNA, 20 bp, Artificial Sequence
  Synthetic
cctgctcccauatggctcuc

SEQ ID NO: 39467 - DNA, 20 bp, Artificial Sequence
  Synthetic
cccaucaagagcatcuccca

SEQ ID NO: 39468 - DNA, 20 bp, Artificial Sequence
  Synthetic
gagtugggaagggaccctug

SEQ ID NO: 39469 - DNA, 25 bp, Artificial Sequence
  Synthetic
catgttgatguaggttttgctccug

SEQ ID NO: 39470 - DNA, 21 bp, Artificial Sequence
  Synthetic
gcttgcttcuggtgacacuga

SEQ ID NO: 39471 - DNA, 20 bp, Artificial Sequence
  Synthetic
cattctccccugcaccauct

SEQ ID NO: 39472 - DNA, 23 bp, Artificial Sequence
  Synthetic
tgtgcctgtucagactgtaaucc

SEQ ID NO: 39473 - DNA, 20 bp, Artificial Sequence
  Synthetic
gcauaggaagcccctguagc

SEQ ID NO: 39474 - DNA, 22 bp, Artificial Sequence
  Synthetic
acacagccagguggaatttgut

SEQ ID NO: 39475 - DNA, 23 bp, Artificial Sequence
  Synthetic
cccatttgguttgagcaacucac

SEQ ID NO: 39476 - DNA, 22 bp, Artificial Sequence
  Synthetic
ctccuagaccctcccuccaaat

SEQ ID NO: 39477 - DNA, 23 bp, Artificial Sequence
  Synthetic
tgactcccacgcutcattttcuc

SEQ ID NO: 39478 - DNA, 22 bp, Artificial Sequence
  Synthetic
ctccacguccacctctaacaug

SEQ ID NO: 39479 - DNA, 25 bp, Artificial Sequence
  Synthetic
agattatcaggugagatgcctgtug

SEQ ID NO: 39480 - DNA, 21 bp, Artificial Sequence
  Synthetic
ctttcctcutgccccguaaga

SEQ ID NO: 39481 - DNA, 26 bp, Artificial Sequence
  Synthetic
gtgaaactgaaaucctgagtgaucct

SEQ ID NO: 39482 - DNA, 24 bp, Artificial Sequence
  Synthetic
agtattggcugtcttgaggaaugc

SEQ ID NO: 39483 - DNA, 24 bp, Artificial Sequence
  Synthetic
gcttcagcauctgcatcttctuct

SEQ ID NO: 39484 - DNA, 17 bp, Artificial Sequence
  Synthetic
cgacgcccgugtgtugt

SEQ ID NO: 39485 - DNA, 18 bp, Artificial Sequence
  Synthetic
gctgtccuccgccttgug

SEQ ID NO: 39486 - DNA, 21 bp, Artificial Sequence
  Synthetic
ccctgtccutctggttctgug

SEQ ID NO: 39487 - DNA, 25 bp, Artificial Sequence
  Synthetic
gcatcttugagagcctcagagtaut

SEQ ID NO: 39488 - DNA, 17 bp, Artificial Sequence
  Synthetic
gcgactuccggacugct

SEQ ID NO: 39489 - DNA, 19 bp, Artificial Sequence
  Synthetic
caggcuccggatcttccug

SEQ ID NO: 39490 - DNA, 22 bp, Artificial Sequence
  Synthetic
agccattucctgaagcuaccac

SEQ ID NO: 39491 - DNA, 22 bp, Artificial Sequence
  Synthetic
agatggctgaugaggcattcuc

SEQ ID NO: 39492 - DNA, 21 bp, Artificial Sequence
  Synthetic
gggcctgaugggatctgauct

SEQ ID NO: 39493 - DNA, 24 bp, Artificial Sequence
  Synthetic
tcatgctgttuagtcactgctcug

SEQ ID NO: 39494 - DNA, 24 bp, Artificial Sequence
  Synthetic
ccatccctcucctttttctcucct

SEQ ID NO: 39495 - DNA, 24 bp, Artificial Sequence
  Synthetic
cagctctuaaaagatgccttuccc

SEQ ID NO: 39496 - DNA, 27 bp, Artificial Sequence
  Synthetic
tataggtgatgugcttcattttcaucc

SEQ ID NO: 39497 - DNA, 22 bp, Artificial Sequence
  Synthetic
tgccaggutggtatucaaccat

SEQ ID NO: 39498 - DNA, 23 bp, Artificial Sequence
  Synthetic
tcccaccuttttatctucacgca

SEQ ID NO: 39499 - DNA, 28 bp, Artificial Sequence
  Synthetic
gtttatttgacacugaaacgaagagcut

SEQ ID NO: 39500 - DNA, 22 bp, Artificial Sequence
  Synthetic
actaaagcuggccctgaaugag

SEQ ID NO: 39501 - DNA, 31 bp, Artificial Sequence; identical to SEQ ID NO: 27267
  Synthetic

SEQ ID NO: 39502 - DNA, 29 bp, Artificial Sequence
  Synthetic
ctggatcagacuttactggagtuaaacaa

SEQ ID NO: 39503 - DNA, 18 bp, Artificial Sequence
  Synthetic
accaggaucgcccugaca

SEQ ID NO: 39504 - DNA, 22 bp, Artificial Sequence
  Synthetic
aggutcatggacugaggcaaag

SEQ ID NO: 39505 - DNA, 22 bp, Artificial Sequence
  Synthetic
cctaccuccaggagaagccaua

SEQ ID NO: 39506 - DNA, 22 bp, Artificial Sequence
  Synthetic
cgggaagcacuatggcatcuat

SEQ ID NO: 39507 - DNA, 21 bp, Artificial Sequence
  Synthetic
ggctuggacattttugcccaa

SEQ ID NO: 39508 - DNA, 20 bp, Artificial Sequence
  Synthetic
gaugaaccaggacggugagg

SEQ ID NO: 39509 - DNA, 21 bp, Artificial Sequence
  Synthetic
ggactcagugttggacuccat

SEQ ID NO: 39510 - DNA, 21 bp, Artificial Sequence
  Synthetic
cgagaagcaggcgcuaagauc

SEQ ID NO: 39511 - DNA, 22 bp, Artificial Sequence
  Synthetic
cacttgacggccaugaagagua

SEQ ID NO: 39512 - DNA, 22 bp, Artificial Sequence
  Synthetic
aagctgtgugtctgccauaaca

SEQ ID NO: 39513 - DNA, 23 bp, Artificial Sequence
  Synthetic
ccggaaccgagagauagttucct

SEQ ID NO: 39514 - DNA, 21 bp, Artificial Sequence
  Synthetic
gccagcctuataacagccgua

SEQ ID NO: 39515 - DNA, 24 bp, Artificial Sequence
  Synthetic
gttagaggucagggacagaugagt

SEQ ID NO: 39516 - DNA, 21 bp, Artificial Sequence
  Synthetic
gactagtgcucagaagcuggt

SEQ ID NO: 39517 - DNA, 27 bp, Artificial Sequence
  Synthetic
gaacataucacaaaggagcttcuccat

SEQ ID NO: 39518 - DNA, 28 bp, Artificial Sequence
  Synthetic
aatgccacatuactctttattgaaugcg

SEQ ID NO: 39519 - DNA, 23 bp, Artificial Sequence
  Synthetic
ttctgugagcaggagttugaaca

SEQ ID NO: 39520 - DNA, 31 bp, Artificial Sequence; identical to SEQ ID NO: 27286
  Synthetic

SEQ ID NO: 39521 - DNA, 23 bp, Artificial Sequence
  Synthetic
tggagcaacaagutgacatcuga

SEQ ID NO: 39522 - DNA, 22 bp, Artificial Sequence
  Synthetic
gaagggtacuagtccagaggug

SEQ ID NO: 39523 - DNA, 24 bp, Artificial Sequence
  Synthetic
ctgttgttgcutgttttcccucag

SEQ ID NO: 39524 - DNA, 25 bp, Artificial Sequence
  Synthetic
gaccagtuccagctccttcatauag

SEQ ID NO: 39525 - DNA, 23 bp, Artificial Sequence
  Synthetic
gcacataccugttgtcccatgut

SEQ ID NO: 39526 - DNA, 21 bp, Artificial Sequence
  Synthetic
gcctgacucggtauggaaagg

SEQ ID NO: 39527 - DNA, 24 bp, Artificial Sequence
  Synthetic
gcattaggcuttcaggatgtugaa

SEQ ID NO: 39528 - DNA, 23 bp, Artificial Sequence
  Synthetic
tgggaagacagagcugacttcua

SEQ ID NO: 39529 - DNA, 21 bp, Artificial Sequence
  Synthetic
cttacgtguaggactgugcgt

SEQ ID NO: 39530 - DNA, 22 bp, Artificial Sequence
  Synthetic
actggcuggttaggaugagaga

SEQ ID NO: 39531 - DNA, 25 bp, Artificial Sequence
  Synthetic
tcacagtgugcactttaaccuacag

SEQ ID NO: 39532 - DNA, 27 bp, Artificial Sequence
  Synthetic
ccaggatccuaaggcaaaacaagatut

SEQ ID NO: 39533 - DNA, 28 bp, Artificial Sequence
  Synthetic
tttactctgccuctctacatcttccuag

SEQ ID NO: 39534 - DNA, 22 bp, Artificial Sequence
  Synthetic
ggccatccagagutacagctuc

SEQ ID NO: 39535 - DNA, 23 bp, Artificial Sequence
  Synthetic
accaagctuaccctgtcttccua

SEQ ID NO: 39536 - DNA, 27 bp, Artificial Sequence
  Synthetic
ctgacatcgtacuggaattgaaagtug

SEQ ID NO: 39537 - DNA, 19 bp, Artificial Sequence
  Synthetic
ccugaccagggtcucacgt

SEQ ID NO: 39538 - DNA, 20 bp, Artificial Sequence
  Synthetic
ccacaccgaugttggcauct

SEQ ID NO: 39539 - DNA, 19 bp, Artificial Sequence
  Synthetic
gaagccagccuggaccaua

SEQ ID NO: 39540 - DNA, 28 bp, Artificial Sequence
  Synthetic
ctcagatccuatgtgtaaugaggaacaa

SEQ ID NO: 39541 - DNA, 26 bp, Artificial Sequence
  Synthetic
gtgagagtagautgggtctcttucag

SEQ ID NO: 39542 - DNA, 21 bp, Artificial Sequence
  Synthetic
acctcgtcauggatgctgaug

SEQ ID NO: 39543 - DNA, 22 bp, Artificial Sequence
  Synthetic
ggccagagugaagcttctctug

SEQ ID NO: 39544 - DNA, 22 bp, Artificial Sequence
  Synthetic
caaagcauccaagctcttcugg

SEQ ID NO: 39545 - DNA, 24 bp, Artificial Sequence
  Synthetic
cgtggaatgauggtgataacacug

SEQ ID NO: 39546 - DNA, 23 bp, Artificial Sequence
  Synthetic
catuagtaagcgcucagcaaagg

SEQ ID NO: 39547 - DNA, 22 bp, Artificial Sequence
  Synthetic
gcagaatgtucctgagctgcut

SEQ ID NO: 39548 - DNA, 23 bp, Artificial Sequence
  Synthetic
ccucagagcccagtttcuacaga

SEQ ID NO: 39549 - DNA, 23 bp, Artificial Sequence
  Synthetic
cctgcuaagacccatttcctucc

SEQ ID NO: 39550 - DNA, 20 bp, Artificial Sequence
  Synthetic
ggaaaggcaucccaggacuc

SEQ ID NO: 39551 - DNA, 21 bp, Artificial Sequence
  Synthetic
ctgcttccuttgctctgucca

SEQ ID NO: 39552 - DNA, 22 bp, Artificial Sequence
  Synthetic
gaactctggcugggaagaacua

SEQ ID NO: 39553 - DNA, 22 bp, Artificial Sequence
  Synthetic
ctactttgguccttggacugct

SEQ ID NO: 39554 - DNA, 22 bp, Artificial Sequence
  Synthetic
acccaaacuctttccacuagcc

SEQ ID NO: 39555 - DNA, 21 bp, Artificial Sequence
  Synthetic
gcacttaccugggatggctuc

SEQ ID NO: 39556 - DNA, 22 bp, Artificial Sequence
  Synthetic
tcctgagaauggagcaagggua

SEQ ID NO: 39557 - DNA, 24 bp, Artificial Sequence
  Synthetic
cttctcctgcucctgattgtctuc

SEQ ID NO: 39558 - DNA, 22 bp, Artificial Sequence
  Synthetic
ctaaggcuaagccgaaggcuag

SEQ ID NO: 39559 - DNA, 21 bp, Artificial Sequence
  Synthetic
caaccagaacugggagcgtua

SEQ ID NO: 39560 - DNA, 20 bp, Artificial Sequence
  Synthetic
agcgccaccugattacagug

SEQ ID NO: 39561 - DNA, 20 bp, Artificial Sequence
  Synthetic
gtggtgguaatgggauggct

SEQ ID NO: 39562 - DNA, 17 bp, Artificial Sequence
  Synthetic
caccggcagugtgcuct

SEQ ID NO: 39563 - DNA, 22 bp, Artificial Sequence
  Synthetic
ccttttctccucctcctccuca

SEQ ID NO: 39564 - DNA, 21 bp, Artificial Sequence
  Synthetic
cactaactgcucctgccaguc

SEQ ID NO: 39565 - DNA, 26 bp, Artificial Sequence
  Synthetic
tggttgttguggagtggaagttuaat

SEQ ID NO: 39566 - DNA, 19 bp, Artificial Sequence
  Synthetic
cagaccuccacgucgaaca

SEQ ID NO: 39567 - DNA, 20 bp, Artificial Sequence
  Synthetic
acaaccuggaccagcactuc

SEQ ID NO: 39568 - DNA, 18 bp, Artificial Sequence
  Synthetic
gcatcucccctcctugcc

SEQ ID NO: 39569 - DNA, 17 bp, Artificial Sequence
  Synthetic
tgggtcuccagcuccgt

SEQ ID NO: 39570 - DNA, 17 bp, Artificial Sequence
  Synthetic
gggccggcacucttcug

SEQ ID NO: 39571 - DNA, 17 bp, Artificial Sequence
  Synthetic
ttgaggguggcctgugg

SEQ ID NO: 39572 - DNA, 18 bp, Artificial Sequence
  Synthetic
guggacgacaugcccaac

SEQ ID NO: 39573 - DNA, 18 bp, Artificial Sequence
  Synthetic
gcuacaccucccgcaacc

SEQ ID NO: 39574 - DNA, 21 bp, Artificial Sequence
  Synthetic
tggacaagtucctggcttcug

SEQ ID NO: 39575 - DNA, 21 bp, Artificial Sequence
  Synthetic
ctccattgutggcacatuccg

SEQ ID NO: 39576 - DNA, 22 bp, Artificial Sequence
  Synthetic
ctggaaaaugcagtgggaguct

SEQ ID NO: 39577 - DNA, 29 bp, Artificial Sequence
  Synthetic
ctctctagtagcucaactggataaaccua

SEQ ID NO: 39578 - DNA, 25 bp, Artificial Sequence
  Synthetic
gctgatcctguggcttttgtcttua

SEQ ID NO: 39579 - DNA, 21 bp, Artificial Sequence
  Synthetic
cgucaaggucagagaaaccuc

SEQ ID NO: 39580 - DNA, 22 bp, Artificial Sequence
  Synthetic
ccatgcgugttattgacgucat

SEQ ID NO: 39581 - DNA, 20 bp, Artificial Sequence
  Synthetic
cucccagaaaccagggugaa

SEQ ID NO: 39582 - DNA, 20 bp, Artificial Sequence
  Synthetic
cccugacacgcattgtguct

SEQ ID NO: 39583 - DNA, 22 bp, Artificial Sequence
  Synthetic
aggactctcuaagccagtgugt

SEQ ID NO: 39584 - DNA, 19 bp, Artificial Sequence
  Synthetic
ctcaggcgugctactcucg

SEQ ID NO: 39585 - DNA, 26 bp, Artificial Sequence
  Synthetic
ctatacttcttgaugagcctggugat

SEQ ID NO: 39586 - DNA, 19 bp, Artificial Sequence
  Synthetic
ccatgcggugggtgtguag

SEQ ID NO: 39587 - DNA, 19 bp, Artificial Sequence
  Synthetic
gagacccguggaactcgut

SEQ ID NO: 39588 - DNA, 21 bp, Artificial Sequence
  Synthetic
caacaccggcucttctttuga

SEQ ID NO: 39589 - DNA, 20 bp, Artificial Sequence
  Synthetic
ctcaucgggcatccugagac

SEQ ID NO: 39590 - DNA, 18 bp, Artificial Sequence
  Synthetic
cgagatguggccctcgut

SEQ ID NO: 39591 - DNA, 18 bp, Artificial Sequence
  Synthetic
cggguacaacggctcuca

SEQ ID NO: 39592 - DNA, 17 bp, Artificial Sequence
  Synthetic
ggtgagcugcgtccuct

SEQ ID NO: 39593 - DNA, 20 bp, Artificial Sequence
  Synthetic
gctuccaggaaccacaccug

SEQ ID NO: 39594 - DNA, 22 bp, Artificial Sequence
  Synthetic
ctcagctgcutctcttgctuct

SEQ ID NO: 39595 - DNA, 18 bp, Artificial Sequence
  Synthetic
caacgugggacggauggt

SEQ ID NO: 39596 - DNA, 22 bp, Artificial Sequence
  Synthetic
ggagaggttucatgcctggaut

SEQ ID NO: 39597 - DNA, 21 bp, Artificial Sequence
  Synthetic
tgtcctgcuctgacctccuac

SEQ ID NO: 39598 - DNA, 24 bp, Artificial Sequence
  Synthetic
agatgccugacatcatcaucaagg

SEQ ID NO: 39599 - DNA, 20 bp, Artificial Sequence
  Synthetic
ggtuccccaaggagtccuga

SEQ ID NO: 39600 - DNA, 18 bp, Artificial Sequence
  Synthetic
cctgagcgccucggttut

SEQ ID NO: 39601 - DNA, 21 bp, Artificial Sequence
  Synthetic
cuaccgagagauacagcctuc

SEQ ID NO: 39602 - DNA, 19 bp, Artificial Sequence
  Synthetic
cccctccacuggcttgtuc

SEQ ID NO: 39603 - DNA, 17 bp, Artificial Sequence
  Synthetic
cccgacagucccgcuac

SEQ ID NO: 39604 - DNA, 23 bp, Artificial Sequence
  Synthetic
gatagccugaaaaaccuccacct

SEQ ID NO: 39605 - DNA, 22 bp, Artificial Sequence
  Synthetic
cuagaagacagggagcgugaaa

SEQ ID NO: 39606 - DNA, 19 bp, Artificial Sequence
  Synthetic
ctaaguccaccctgugcgt

SEQ ID NO: 39607 - DNA, 20 bp, Artificial Sequence
  Synthetic
cttccugaacacugggacca

SEQ ID NO: 39608 - DNA, 20 bp, Artificial Sequence
  Synthetic
cgaaaccugagaaggccuca

SEQ ID NO: 39609 - DNA, 24 bp, Artificial Sequence
  Synthetic
caaataucccaagagggucaaguc

SEQ ID NO: 39610 - DNA, 20 bp, Artificial Sequence
  Synthetic
gagctgtcuaacgcccucat

SEQ ID NO: 39611 - DNA, 18 bp, Artificial Sequence
  Synthetic
ggagccacautgccguca

SEQ ID NO: 39612 - DNA, 20 bp, Artificial Sequence
  Synthetic
ggtcaggagaaggcuggtuc

SEQ ID NO: 39613 - DNA, 19 bp, Artificial Sequence
  Synthetic
ggctcugagccacacucac

SEQ ID NO: 39614 - DNA, 21 bp, Artificial Sequence
  Synthetic
tctgtggaccuctcctuccag

SEQ ID NO: 39615 - DNA, 18 bp, Artificial Sequence
  Synthetic
agcacttuccccguccag

SEQ ID NO: 39616 - DNA, 22 bp, Artificial Sequence
  Synthetic
cgaggtuacaccatcuccgact

SEQ ID NO: 39617 - DNA, 19 bp, Artificial Sequence
  Synthetic
caagugaggcaccaggtuc

SEQ ID NO: 39618 - DNA, 18 bp, Artificial Sequence
  Synthetic
cctaagcuccctguggca

SEQ ID NO: 39619 - DNA, 18 bp, Artificial Sequence
  Synthetic
gccctguccaggcaccua

SEQ ID NO: 39620 - DNA, 21 bp, Artificial Sequence
  Synthetic
gctcatcgagcugaaggacug

SEQ ID NO: 39621 - DNA, 20 bp, Artificial Sequence
  Synthetic
ggtagcaggacuggauggga

SEQ ID NO: 39622 - DNA, 20 bp, Artificial Sequence
  Synthetic
ccugggcaacgactttgugt

SEQ ID NO: 39623 - DNA, 19 bp, Artificial Sequence
  Synthetic
cctcgugaccgaagcucag

SEQ ID NO: 39624 - DNA, 19 bp, Artificial Sequence
  Synthetic
ggcgugaccaccaagtcuc

SEQ ID NO: 39625 - DNA, 21 bp, Artificial Sequence
  Synthetic
tgagctcacuatcagguggca

SEQ ID NO: 39626 - DNA, 20 bp, Artificial Sequence
  Synthetic
ctcccagacutacugcccaa

SEQ ID NO: 39627 - DNA, 18 bp, Artificial Sequence
  Synthetic
ccggccucacacaaacuc

SEQ ID NO: 39628 - DNA, 20 bp, Artificial Sequence
  Synthetic
ggagttgcgguccaggaauc

SEQ ID NO: 39629 - DNA, 19 bp, Artificial Sequence
  Synthetic
cauccacgucgaagaggca

SEQ ID NO: 39630 - DNA, 28 bp, Artificial Sequence
  Synthetic
tgtacttgtgtuacccttagagtttugg

SEQ ID NO: 39631 - DNA, 28 bp, Artificial Sequence
  Synthetic
accagatgtaatuagcaacccatcatut

SEQ ID NO: 39632 - DNA, 22 bp, Artificial Sequence
  Synthetic
ctgaagacccugggtttgcuat

SEQ ID NO: 39633 - DNA, 23 bp, Artificial Sequence
  Synthetic
gtgacgccuctttgtuaaaagca

SEQ ID NO: 39634 - DNA, 24 bp, Artificial Sequence
  Synthetic
gataatccuacctttguggccagt

SEQ ID NO: 39635 - DNA, 29 bp, Artificial Sequence
  Synthetic
caagttuggaacacaggcaatatauacaa

SEQ ID NO: 39636 - DNA, 22 bp, Artificial Sequence
  Synthetic
gggagcctucatctgtactucg

SEQ ID NO: 39637 - DNA, 20 bp, Artificial Sequence
  Synthetic
aatgccctaugctggctugt

SEQ ID NO: 39638 - DNA, 17 bp, Artificial Sequence
  Synthetic
cgtugcccaggcuggag

SEQ ID NO: 39639 - DNA, 23 bp, Artificial Sequence
  Synthetic
aatggaaucaaggccagugaaua

SEQ ID NO: 39640 - DNA, 24 bp, Artificial Sequence
  Synthetic
gcatugggcagaaaagaaauggat

SEQ ID NO: 39641 - DNA, 27 bp, Artificial Sequence
  Synthetic
gaatatactuaaccgggctccttctug

SEQ ID NO: 39642 - DNA, 18 bp, Artificial Sequence
  Synthetic
ctgcggtuggcgttgaug

SEQ ID NO: 39643 - DNA, 22 bp, Artificial Sequence
  Synthetic
cgagcaguacaaggagcaggua

SEQ ID NO: 39644 - DNA, 23 bp, Artificial Sequence
  Synthetic
ggtggactugaacttggactuga

SEQ ID NO: 39645 - DNA, 20 bp, Artificial Sequence
  Synthetic
ggtctcagugcgctctctug

SEQ ID NO: 39646 - DNA, 25 bp, Artificial Sequence
  Synthetic
ccctcttccuccattcagtttccua

SEQ ID NO: 39647 - DNA, 22 bp, Artificial Sequence
  Synthetic
gagttgtcaggguggactctug

SEQ ID NO: 39648 - DNA, 20 bp, Artificial Sequence
  Synthetic
catgccccaagcucctagug

SEQ ID NO: 39649 - DNA, 22 bp, Artificial Sequence
  Synthetic
ggcagcacacauctctatucct

SEQ ID NO: 39650 - DNA, 23 bp, Artificial Sequence
  Synthetic
gcttggagauccctttcgaacug

SEQ ID NO: 39651 - DNA, 26 bp, Artificial Sequence
  Synthetic
ttcatgaagtugagcctcatagaaug

SEQ ID NO: 39652 - DNA, 23 bp, Artificial Sequence
  Synthetic
cggctttgagcautttgttgguc

SEQ ID NO: 39653 - DNA, 22 bp, Artificial Sequence
  Synthetic
agaagtcaccuctgggtctugt

SEQ ID NO: 39654 - DNA, 23 bp, Artificial Sequence
  Synthetic
gctgaagccugttcttggtctut

SEQ ID NO: 39655 - DNA, 20 bp, Artificial Sequence
  Synthetic
cctcucaccctacccuggac

SEQ ID NO: 39656 - DNA, 22 bp, Artificial Sequence
  Synthetic
ctccugcaaaagggaugcaaag

SEQ ID NO: 39657 - DNA, 21 bp, Artificial Sequence
  Synthetic
ccagtctctuggcaccctuag

SEQ ID NO: 39658 - DNA, 19 bp, Artificial Sequence
  Synthetic
ccatcgcugcactuggact

SEQ ID NO: 39659 - DNA, 21 bp, Artificial Sequence
  Synthetic
tgttatcccucccctctgcut

SEQ ID NO: 39660 - DNA, 22 bp, Artificial Sequence
  Synthetic
ggatagcaggauggtgggatug

SEQ ID NO: 39661 - DNA, 25 bp, Artificial Sequence
  Synthetic
agaagaacaaugcccugaagaagat

SEQ ID NO: 39662 - DNA, 18 bp, Artificial Sequence
  Synthetic
cagcaaaugcccctugcc

SEQ ID NO: 39663 - DNA, 23 bp, Artificial Sequence
  Synthetic
tcctgaagagcaccutggtttut

SEQ ID NO: 39664 - DNA, 21 bp, Artificial Sequence
  Synthetic
gtgctcggautataggcguga

SEQ ID NO: 39665 - DNA, 26 bp, Artificial Sequence
  Synthetic
gtuactcttttcccuccacaacaaag

SEQ ID NO: 39666 - DNA, 24 bp, Artificial Sequence
  Synthetic
ctccatctcaugcagtatctccuc

SEQ ID NO: 39667 - DNA, 22 bp, Artificial Sequence
  Synthetic
gtacctguatggatgcauggct

SEQ ID NO: 39668 - DNA, 23 bp, Artificial Sequence
  Synthetic
caaatgtgaaggcuccagaguga

SEQ ID NO: 39669 - DNA, 19 bp, Artificial Sequence
  Synthetic
agggtguggcttcaugacc

SEQ ID NO: 39670 - DNA, 22 bp, Artificial Sequence
  Synthetic
gccagtgaugacatggguaaga

SEQ ID NO: 39671 - DNA, 24 bp, Artificial Sequence
  Synthetic
ggtgacttcugctctgtgttucaa

SEQ ID NO: 39672 - DNA, 18 bp, Artificial Sequence
  Synthetic
ggacagcccuggcttcug

SEQ ID NO: 39673 - DNA, 20 bp, Artificial Sequence
  Synthetic
gauggccaagaugacggaga

SEQ ID NO: 39674 - DNA, 24 bp, Artificial Sequence
  Synthetic
tgttcaatuctccagcucaaagca

SEQ ID NO: 39675 - DNA, 27 bp, Artificial Sequence
  Synthetic
gccttggtttcuaagtttctagttucc

SEQ ID NO: 39676 - DNA, 21 bp, Artificial Sequence
  Synthetic
ctccacgaaagacutguccgt

SEQ ID NO: 39677 - DNA, 22 bp, Artificial Sequence
  Synthetic
ggatgcccaugcgttgtgtaua

SEQ ID NO: 39678 - DNA, 21 bp, Artificial Sequence
  Synthetic
gatgaagtuccactcgaugcc

SEQ ID NO: 39679 - DNA, 24 bp, Artificial Sequence
  Synthetic
ggctccttgucttctgacttcaua

SEQ ID NO: 39680 - DNA, 21 bp, Artificial Sequence
  Synthetic
tttgtucacgcgggtgaguat

SEQ ID NO: 39681 - DNA, 23 bp, Artificial Sequence
  Synthetic
gcacccggucaagaauaaaaauc

SEQ ID NO: 39682 - DNA, 21 bp, Artificial Sequence
  Synthetic
ccaaccccaaagucattgguc

SEQ ID NO: 39683 - DNA, 23 bp, Artificial Sequence
  Synthetic
agtggcttuaggctccaaaacuc

SEQ ID NO: 39684 - DNA, 26 bp, Artificial Sequence
  Synthetic
caggatcugagactgttttaauagcc

SEQ ID NO: 39685 - DNA, 23 bp, Artificial Sequence
  Synthetic
gaatcccuaactcccuccaaacc

SEQ ID NO: 39686 - DNA, 24 bp, Artificial Sequence
  Synthetic
caggagaugacaccaaagctttuc

SEQ ID NO: 39687 - DNA, 30 bp, Artificial Sequence; identical to SEQ ID NO: 27453
  Synthetic

SEQ ID NO: 39688 - DNA, 24 bp, Artificial Sequence
  Synthetic
cctgagttcutgcaatgatgtuct

SEQ ID NO: 39689 - DNA, 26 bp, Artificial Sequence
  Synthetic
catagatgatgtucccgtgtcttuca

SEQ ID NO: 39690 - DNA, 22 bp, Artificial Sequence
  Synthetic
aaacuccacattccuggcaaga

SEQ ID NO: 39691 - DNA, 21 bp, Artificial Sequence
  Synthetic
ctgcccauctacucggagaag

SEQ ID NO: 39692 - DNA, 26 bp, Artificial Sequence
  Synthetic
tcccaacacatutctaatgcctacut

SEQ ID NO: 39693 - DNA, 22 bp, Artificial Sequence
  Synthetic
tggagaauggcaagaaggucac

SEQ ID NO: 39694 - DNA, 21 bp, Artificial Sequence
  Synthetic
ccacugggctgttgaugaagt

SEQ ID NO: 39695 - DNA, 21 bp, Artificial Sequence
  Synthetic
tctgcagaccgagutccuaga

SEQ ID NO: 39696 - DNA, 20 bp, Artificial Sequence
  Synthetic
ccttacuccgccttctccuc

SEQ ID NO: 39697 - DNA, 18 bp, Artificial Sequence
  Synthetic
cuccaccgagctcuccac

SEQ ID NO: 39698 - DNA, 25 bp, Artificial Sequence
  Synthetic
cctaaaacuaaatgtguggcccact

SEQ ID NO: 39699 - DNA, 22 bp, Artificial Sequence
  Synthetic
cgctaugacaggaaagaugggt

SEQ ID NO: 39700 - DNA, 30 bp, Artificial Sequence; identical to SEQ ID NO: 27466
  Synthetic

SEQ ID NO: 39701 - DNA, 17 bp, Artificial Sequence
  Synthetic
guggcgcacgggttuac

SEQ ID NO: 39702 - DNA, 19 bp, Artificial Sequence
  Synthetic
cacttuaccccagcugcgt

SEQ ID NO: 39703 - DNA, 26 bp, Artificial Sequence
  Synthetic
agagggacttgucacttctttgttuc

SEQ ID NO: 39704 - DNA, 21 bp, Artificial Sequence
  Synthetic
gugagggcacuaaaaggtgua

SEQ ID NO: 39705 - DNA, 21 bp, Artificial Sequence
  Synthetic
ttggccgguatgtatgtcugg

SEQ ID NO: 39706 - DNA, 22 bp, Artificial Sequence
  Synthetic
gcacagagggugacatttcugg

SEQ ID NO: 39707 - DNA, 21 bp, Artificial Sequence
  Synthetic
gaagacccucatcaccaucgg

SEQ ID NO: 39708 - DNA, 20 bp, Artificial Sequence
  Synthetic
ggagtcuctgtgcugcgaat

SEQ ID NO: 39709 - DNA, 20 bp, Artificial Sequence
  Synthetic
gtgttcaugcgctgtgtucc

SEQ ID NO: 39710 - DNA, 20 bp, Artificial Sequence
  Synthetic
acacgaagaugccagtgucg

SEQ ID NO: 39711 - DNA, 22 bp, Artificial Sequence
  Synthetic
caccctggagucatccgtttua

SEQ ID NO: 39712 - DNA, 17 bp, Artificial Sequence
  Synthetic
tcagugcccuggaggct

SEQ ID NO: 39713 - DNA, 22 bp, Artificial Sequence
  Synthetic
ccactggcugctgatggatuac

SEQ ID NO: 39714 - DNA, 24 bp, Artificial Sequence
  Synthetic
tctcctgcuctctcatctuacaca

SEQ ID NO: 39715 - DNA, 22 bp, Artificial Sequence
  Synthetic
ggtcaccaaugtcaucccacag

SEQ ID NO: 39716 - DNA, 22 bp, Artificial Sequence
  Synthetic
gctcctugaagagctucaccag

SEQ ID NO: 39717 - DNA, 21 bp, Artificial Sequence
  Synthetic
tgucagaaggugggacacaga

SEQ ID NO: 39718 - DNA, 26 bp, Artificial Sequence
  Synthetic
aaaguccaagagaagcauaaaaggua

SEQ ID NO: 39719 - DNA, 24 bp, Artificial Sequence
  Synthetic
tctctctcugactttctcctcucc

SEQ ID NO: 39720 - DNA, 22 bp, Artificial Sequence
  Synthetic
ctcctttucagcctcctctuca

SEQ ID NO: 39721 - DNA, 23 bp, Artificial Sequence
  Synthetic
gatcuaacaggagctgcugagac

SEQ ID NO: 39722 - DNA, 22 bp, Artificial Sequence
  Synthetic
gtucccagacaggugagcaaat

SEQ ID NO: 39723 - DNA, 24 bp, Artificial Sequence
  Synthetic
aatagaggcaggagguagacucag

SEQ ID NO: 39724 - DNA, 19 bp, Artificial Sequence
  Synthetic
tgutctggtcugggaggct

SEQ ID NO: 39725 - DNA, 19 bp, Artificial Sequence
  Synthetic
gggagcuggaggtctcuga

SEQ ID NO: 39726 - DNA, 22 bp, Artificial Sequence
  Synthetic
cccacauacagucagacccaag

SEQ ID NO: 39727 - DNA, 22 bp, Artificial Sequence
  Synthetic
ggtcaaggucacgtgcuagaag

SEQ ID NO: 39728 - DNA, 17 bp, Artificial Sequence
  Synthetic
ggcgcugcatugagggt

SEQ ID NO: 39729 - DNA, 19 bp, Artificial Sequence
  Synthetic
tgcttuccccgctgctuag

SEQ ID NO: 39730 - DNA, 24 bp, Artificial Sequence
  Synthetic
catatactcaacuccctgcctcuc

SEQ ID NO: 39731 - DNA, 17 bp, Artificial Sequence
  Synthetic
cccgaggugggctgtua

SEQ ID NO: 39732 - DNA, 18 bp, Artificial Sequence
  Synthetic
ccuccagccccagcagua

SEQ ID NO: 39733 - DNA, 20 bp, Artificial Sequence
  Synthetic
tcgagggccucattgagcua

SEQ ID NO: 39734 - DNA, 17 bp, Artificial Sequence
  Synthetic
cagcctcgugggctcug

SEQ ID NO: 39735 - DNA, 26 bp, Artificial Sequence
  Synthetic
tcacctaggacutacatgatcctgut

SEQ ID NO: 39736 - DNA, 21 bp, Artificial Sequence
  Synthetic
gattcggutctggtuccacct

SEQ ID NO: 39737 - DNA, 26 bp, Artificial Sequence
  Synthetic
tgtacaactcauaagagtggcccaua

SEQ ID NO: 39738 - DNA, 19 bp, Artificial Sequence
  Synthetic
ggtgcagcagagcuggaut

SEQ ID NO: 39739 - DNA, 17 bp, Artificial Sequence
  Synthetic
gcgccuagccgtgtcug

SEQ ID NO: 39740 - DNA, 26 bp, Artificial Sequence
  Synthetic
gaaatatgtgugggttcttcugacac

SEQ ID NO: 39741 - DNA, 23 bp, Artificial Sequence
  Synthetic
ggtgatuacgccatctacctuac

SEQ ID NO: 39742 - DNA, 21 bp, Artificial Sequence
  Synthetic
gccctgggaguaggagctuaa

SEQ ID NO: 39743 - DNA, 27 bp, Artificial Sequence
  Synthetic
ctccaggtttucgattttctgtatucc

SEQ ID NO: 39744 - DNA, 25 bp, Artificial Sequence
  Synthetic
tttgacttctgcugaccttacctuc

SEQ ID NO: 39745 - DNA, 28 bp, Artificial Sequence
  Synthetic
ggtgctttttcgutgtttttgttttugt

SEQ ID NO: 39746 - DNA, 26 bp, Artificial Sequence
  Synthetic
cccggttaucagacagattcctaaut

SEQ ID NO: 39747 - DNA, 28 bp, Artificial Sequence
  Synthetic
aatgtgatcagaaggcutttctcttcut

SEQ ID NO: 39748 - DNA, 26 bp, Artificial Sequence
  Synthetic
gaagaagaucacagacagcatugaag

SEQ ID NO: 39749 - DNA, 25 bp, Artificial Sequence
  Synthetic
ttgcctaatcucaaaggaactcugg

SEQ ID NO: 39750 - DNA, 25 bp, Artificial Sequence
  Synthetic
gaaacaaggcagaagauggagcuat

SEQ ID NO: 39751 - DNA, 20 bp, Artificial Sequence
  Synthetic
tgacgacaguagcaggguct

SEQ ID NO: 39752 - DNA, 22 bp, Artificial Sequence
  Synthetic
gauggagaucaagagccagagg

SEQ ID NO: 39753 - DNA, 20 bp, Artificial Sequence
  Synthetic
tgtgtgttuctccgcucaca

SEQ ID NO: 39754 - DNA, 26 bp, Artificial Sequence
  Synthetic
tgauggaacgagaauggaagattuag

SEQ ID NO: 39755 - DNA, 33 bp, Artificial Sequence; identical to SEQ ID NO: 27521
  Synthetic

SEQ ID NO: 39756 - DNA, 27 bp, Artificial Sequence
  Synthetic
agaatatgtgcuttccgaagatugagg

SEQ ID NO: 39757 - DNA, 24 bp, Artificial Sequence
  Synthetic
tggtgtctugttttcggattucca

SEQ ID NO: 39758 - DNA, 20 bp, Artificial Sequence
  Synthetic
acaggucacccttcctucca

SEQ ID NO: 39759 - DNA, 23 bp, Artificial Sequence
  Synthetic
gggaaaacuatgatgcttucggt

SEQ ID NO: 39760 - DNA, 22 bp, Artificial Sequence
  Synthetic
gggatcuggaaccgagtuacat

SEQ ID NO: 39761 - DNA, 18 bp, Artificial Sequence
  Synthetic
gccctgguacgtgtugcc

SEQ ID NO: 39762 - DNA, 19 bp, Artificial Sequence
  Synthetic
cgaguggacgcacggatuc

SEQ ID NO: 39763 - DNA, 20 bp, Artificial Sequence
  Synthetic
ggaggacgcagcucaactuc

SEQ ID NO: 39764 - DNA, 18 bp, Artificial Sequence
  Synthetic
ggcagagcgucccgtaug

SEQ ID NO: 39765 - DNA, 21 bp, Artificial Sequence
  Synthetic
aaacagccccutcttctugct

SEQ ID NO: 39766 - DNA, 17 bp, Artificial Sequence
  Synthetic
gagcaccgucagcucca

SEQ ID NO: 39767 - DNA, 17 bp, Artificial Sequence
  Synthetic
cggttgcuggcccacuc

SEQ ID NO: 39768 - DNA, 23 bp, Artificial Sequence
  Synthetic
gcaaguacaagcagaacatccuc

SEQ ID NO: 39769 - DNA, 22 bp, Artificial Sequence
  Synthetic
ctgaacagacugggcucacaaa

SEQ ID NO: 39770 - DNA, 17 bp, Artificial Sequence
  Synthetic
cggccucgctguggaat

SEQ ID NO: 39771 - DNA, 18 bp, Artificial Sequence
  Synthetic
tcaggucggagggagugg

SEQ ID NO: 39772 - DNA, 19 bp, Artificial Sequence
  Synthetic
acaaggucgcccacttcuc

SEQ ID NO: 39773 - DNA, 17 bp, Artificial Sequence
  Synthetic
gaaccucgggugcggaa

SEQ ID NO: 39774 - DNA, 21 bp, Artificial Sequence
  Synthetic
gaagcugagcaacuaccggat

SEQ ID NO: 39775 - DNA, 23 bp, Artificial Sequence
  Synthetic
gcctgaagtuctccttgttcugg

SEQ ID NO: 39776 - DNA, 21 bp, Artificial Sequence
  Synthetic
gcgttgggacutgaccttcuc

SEQ ID NO: 39777 - DNA, 21 bp, Artificial Sequence
  Synthetic
gcuggaaacccucaggaaaca

SEQ ID NO: 39778 - DNA, 23 bp, Artificial Sequence
  Synthetic
catcggagucgccattctgttua

SEQ ID NO: 39779 - DNA, 22 bp, Artificial Sequence
  Synthetic
aggcaaacugtgagtgauaccc

SEQ ID NO: 39780 - DNA, 26 bp, Artificial Sequence
  Synthetic
acgatttttaguctgcattgcttugg

SEQ ID NO: 39781 - DNA, 29 bp, Artificial Sequence
  Synthetic
gctcagctgctuctttaaacagatacaua

SEQ ID NO: 39782 - DNA, 25 bp, Artificial Sequence
  Synthetic
gtgtctgttgcucatgtgtttgtut

SEQ ID NO: 39783 - DNA, 21 bp, Artificial Sequence
  Synthetic
cagcatctcguggacaaaguc

SEQ ID NO: 39784 - DNA, 20 bp, Artificial Sequence
  Synthetic
gtagggtugctcgtctgucc

SEQ ID NO: 39785 - DNA, 29 bp, Artificial Sequence
  Synthetic
gttcaagcaucaacaaatacauccaacat

SEQ ID NO: 39786 - DNA, 17 bp, Artificial Sequence
  Synthetic
ctggcaucgtgctgcug

SEQ ID NO: 39787 - DNA, 19 bp, Artificial Sequence
  Synthetic
cctctgcucacaccuccct

SEQ ID NO: 39788 - DNA, 18 bp, Artificial Sequence
  Synthetic
ctgugggaagacgcugct

SEQ ID NO: 39789 - DNA, 19 bp, Artificial Sequence
  Synthetic
acccgtguccctttcaguc

SEQ ID NO: 39790 - DNA, 21 bp, Artificial Sequence
  Synthetic
gtgcggagccucttuaaggaa

SEQ ID NO: 39791 - DNA, 24 bp, Artificial Sequence
  Synthetic
caacctgtuctgaaagacaucgga

SEQ ID NO: 39792 - DNA, 19 bp, Artificial Sequence
  Synthetic
agggtcatucgctctgcug

SEQ ID NO: 39793 - DNA, 22 bp, Artificial Sequence
  Synthetic
ggctctgcauaaagggactugt

SEQ ID NO: 39794 - DNA, 23 bp, Artificial Sequence
  Synthetic
ctgtggcaguaactaggctugag

SEQ ID NO: 39795 - DNA, 19 bp, Artificial Sequence
  Synthetic
gctgcgggutgagaacgua

SEQ ID NO: 39796 - DNA, 21 bp, Artificial Sequence
  Synthetic
ccaactcauaccccggcatuc

SEQ ID NO: 39797 - DNA, 20 bp, Artificial Sequence
  Synthetic
ccccagucagcuacagacac

SEQ ID NO: 39798 - DNA, 18 bp, Artificial Sequence
  Synthetic
ggtggtgcugcctcagug

SEQ ID NO: 39799 - DNA, 19 bp, Artificial Sequence
  Synthetic
caggtgccaucccaaacug

SEQ ID NO: 39800 - DNA, 21 bp, Artificial Sequence
  Synthetic
tgacacagtuccctccacuca

SEQ ID NO: 39801 - DNA, 24 bp, Artificial Sequence
  Synthetic
gccutggaaatactucacgagagg

SEQ ID NO: 39802 - DNA, 22 bp, Artificial Sequence
  Synthetic
cccaugggccgaagaaaaugat

SEQ ID NO: 39803 - DNA, 22 bp, Artificial Sequence
  Synthetic
ctcagcugaaaagcaacucagg

SEQ ID NO: 39804 - DNA, 19 bp, Artificial Sequence
  Synthetic
ttccuctgctcugggacca

SEQ ID NO: 39805 - DNA, 21 bp, Artificial Sequence
  Synthetic
cccaggagccucatctctuct

SEQ ID NO: 39806 - DNA, 22 bp, Artificial Sequence
  Synthetic
aggcagcugtcaattctcaugt

SEQ ID NO: 39807 - DNA, 24 bp, Artificial Sequence
  Synthetic
cctgtgagttugcctgttttcuct

SEQ ID NO: 39808 - DNA, 23 bp, Artificial Sequence
  Synthetic
aggtgaaacugtgcttgtauccc

SEQ ID NO: 39809 - DNA, 22 bp, Artificial Sequence
  Synthetic
gctccacagaugagcagtaucc

SEQ ID NO: 39810 - DNA, 22 bp, Artificial Sequence
  Synthetic
ctcaaggagggcucgttctuaa

SEQ ID NO: 39811 - DNA, 21 bp, Artificial Sequence
  Synthetic
ttggtctccugcggttuacag

SEQ ID NO: 39812 - DNA, 27 bp, Artificial Sequence
  Synthetic
gattgaaaccaagcutgcgagaaaaua

SEQ ID NO: 39813 - DNA, 20 bp, Artificial Sequence
  Synthetic
tgcaaugaccccgttctcuc

SEQ ID NO: 39814 - DNA, 21 bp, Artificial Sequence
  Synthetic
ctgtggaguctcccactcauc

SEQ ID NO: 39815 - DNA, 24 bp, Artificial Sequence
  Synthetic
ttcactctacuagttgtgggucct

SEQ ID NO: 39816 - DNA, 20 bp, Artificial Sequence
  Synthetic
acugacagaucggacggaca

SEQ ID NO: 39817 - DNA, 23 bp, Artificial Sequence
  Synthetic
ccaccaauacagccccttcttuc

SEQ ID NO: 39818 - DNA, 24 bp, Artificial Sequence
  Synthetic
ccgcgccuggcaataaatatctua

SEQ ID NO: 39819 - DNA, 28 bp, Artificial Sequence
  Synthetic
ggcgatacugaggaggattttattguat

SEQ ID NO: 39820 - DNA, 21 bp, Artificial Sequence
  Synthetic
ggccaggguagctctttucaa

SEQ ID NO: 39821 - DNA, 26 bp, Artificial Sequence
  Synthetic
tttataaacctgucggtggattgugt

SEQ ID NO: 39822 - DNA, 23 bp, Artificial Sequence
  Synthetic
ggutctgtgtguccagagagaga

SEQ ID NO: 39823 - DNA, 22 bp, Artificial Sequence
  Synthetic
ggtctgttuccacctgagcaut

SEQ ID NO: 39824 - DNA, 23 bp, Artificial Sequence
  Synthetic
gctgcacaaaguatctcgugact

SEQ ID NO: 39825 - DNA, 28 bp, Artificial Sequence
  Synthetic
cggaatgcacuaaattcagttttaugaa

SEQ ID NO: 39826 - DNA, 21 bp, Artificial Sequence
  Synthetic
aatccctcgucctacagguca

SEQ ID NO: 39827 - DNA, 24 bp, Artificial Sequence
  Synthetic
cctggaaaautccagctuggaaga

SEQ ID NO: 39828 - DNA, 20 bp, Artificial Sequence
  Synthetic
agacgagcucatgaguccct

SEQ ID NO: 39829 - DNA, 23 bp, Artificial Sequence
  Synthetic
cgctcatgagaacugtgtctcug

SEQ ID NO: 39830 - DNA, 22 bp, Artificial Sequence
  Synthetic
gcacacaugagacacagcauga

SEQ ID NO: 39831 - DNA, 26 bp, Artificial Sequence
  Synthetic
atctggtttcutccttcttcucacag

SEQ ID NO: 39832 - DNA, 30 bp, Artificial Sequence; identical to SEQ ID NO: 27598
  Synthetic

SEQ ID NO: 39833 - DNA, 24 bp, Artificial Sequence
  Synthetic
tgtgaccagutgtguagaaagcaa

SEQ ID NO: 39834 - DNA, 23 bp, Artificial Sequence
  Synthetic
catcagagcagaguctgcacaua

SEQ ID NO: 39835 - DNA, 26 bp, Artificial Sequence
  Synthetic
ttctttttccttucctccctgtaugg

SEQ ID NO: 39836 - DNA, 26 bp, Artificial Sequence
  Synthetic
tcuatagaaacctucagggaagacac

SEQ ID NO: 39837 - DNA, 22 bp, Artificial Sequence
  Synthetic
tgcgctcugctatctatccuca

SEQ ID NO: 39838 - DNA, 22 bp, Artificial Sequence
  Synthetic
ggccttcugggaagatcaggua

SEQ ID NO: 39839 - DNA, 27 bp, Artificial Sequence
  Synthetic
gctgtgactaugtcatggttctuaact

SEQ ID NO: 39840 - DNA, 23 bp, Artificial Sequence
  Synthetic
gcaggcagcaugacaagtacuag

SEQ ID NO: 39841 - DNA, 28 bp, Artificial Sequence
  Synthetic
tgatctctgacutgaagtttttgtcugt

SEQ ID NO: 39842 - DNA, 21 bp, Artificial Sequence
  Synthetic
gggacaaacautggugcagga

SEQ ID NO: 39843 - DNA, 29 bp, Artificial Sequence
  Synthetic
tgtctgccaaatuaaagagccaagataut

SEQ ID NO: 39844 - DNA, 26 bp, Artificial Sequence
  Synthetic
cagaggagaaauacctcaaauggaaa

SEQ ID NO: 39845 - DNA, 30 bp, Artificial Sequence; identical to SEQ ID NO: 27611
  Synthetic

SEQ ID NO: 39846 - DNA, 25 bp, Artificial Sequence
  Synthetic
ctugagaguagaaggcattaucaca

SEQ ID NO: 39847 - DNA, 24 bp, Artificial Sequence
  Synthetic
gggatttagtugagccttacguct

SEQ ID NO: 39848 - DNA, 23 bp, Artificial Sequence
  Synthetic
agatcaacagaacautgccugga

SEQ ID NO: 39849 - DNA, 29 bp, Artificial Sequence
  Synthetic
ggttgggaaaauaggacatagctttagua

SEQ ID NO: 39850 - DNA, 28 bp, Artificial Sequence
  Synthetic
tgaactagaatgautagcataggccuca

SEQ ID NO: 39851 - DNA, 23 bp, Artificial Sequence
  Synthetic
cctcccaaaguactgggatuaca

SEQ ID NO: 39852 - DNA, 17 bp, Artificial Sequence
  Synthetic
gccatgccugggcugac

SEQ ID NO: 39853 - DNA, 20 bp, Artificial Sequence
  Synthetic
cttctcugggatcccugcac

SEQ ID NO: 39854 - DNA, 20 bp, Artificial Sequence
  Synthetic
ggugagcttgguggagaacg

SEQ ID NO: 39855 - DNA, 21 bp, Artificial Sequence
  Synthetic
ctgcaggugatcacgtcaaug

SEQ ID NO: 39856 - DNA, 19 bp, Artificial Sequence
  Synthetic
tggccagugtcgtctucag

SEQ ID NO: 39857 - DNA, 20 bp, Artificial Sequence
  Synthetic
caggatggugagggugacag

SEQ ID NO: 39858 - DNA, 24 bp, Artificial Sequence
  Synthetic
cctcatcatcugcaatgccaucat

SEQ ID NO: 39859 - DNA, 27 bp, Artificial Sequence
  Synthetic
catttaguccatcctcttugacaaacg

SEQ ID NO: 39860 - DNA, 20 bp, Artificial Sequence
  Synthetic
ctccaggcaggacutcucac

SEQ ID NO: 39861 - DNA, 20 bp, Artificial Sequence
  Synthetic
cttcacaucccagcugacga

SEQ ID NO: 39862 - DNA, 23 bp, Artificial Sequence
  Synthetic
ctccugcaaaaggaggtgaaauc

SEQ ID NO: 39863 - DNA, 22 bp, Artificial Sequence
  Synthetic
ctggtcacugagtcaggcatut

SEQ ID NO: 39864 - DNA, 20 bp, Artificial Sequence
  Synthetic
acaaaccagccccugaacuc

SEQ ID NO: 39865 - DNA, 17 bp, Artificial Sequence
  Synthetic
cugcggaucgggaggac

SEQ ID NO: 39866 - DNA, 22 bp, Artificial Sequence
  Synthetic
tccctactgcuatccccacauc

SEQ ID NO: 39867 - DNA, 21 bp, Artificial Sequence
  Synthetic
ctgtacacugacggccuacaa

SEQ ID NO: 39868 - DNA, 21 bp, Artificial Sequence
  Synthetic
ccccaccauacttccucccaa

SEQ ID NO: 39869 - DNA, 28 bp, Artificial Sequence
  Synthetic
attcagctctguactcctctttaccuat

SEQ ID NO: 39870 - DNA, 26 bp, Artificial Sequence
  Synthetic
gtctgagtttuaggcacaaaaugagt

SEQ ID NO: 39871 - DNA, 23 bp, Artificial Sequence
  Synthetic
tgacactcccugcctgttttuag

SEQ ID NO: 39872 - DNA, 22 bp, Artificial Sequence
  Synthetic
gaggtgaugatctcaucgccat

SEQ ID NO: 39873 - DNA, 26 bp, Artificial Sequence
  Synthetic
gggauccttgtaatauaacccacacc

SEQ ID NO: 39874 - DNA, 23 bp, Artificial Sequence
  Synthetic
aagatcagauccttgagcugcac

SEQ ID NO: 39875 - DNA, 24 bp, Artificial Sequence
  Synthetic
accccactcutccaaatctttucc

SEQ ID NO: 39876 - DNA, 23 bp, Artificial Sequence
  Synthetic
gatgagaaacagccugaagguct

SEQ ID NO: 39877 - DNA, 27 bp, Artificial Sequence
  Synthetic
ttgatctgggaggguagagactaaaut

SEQ ID NO: 39878 - DNA, 21 bp, Artificial Sequence
  Synthetic
gccttctucccagcatgtgua

SEQ ID NO: 39879 - DNA, 27 bp, Artificial Sequence
  Synthetic
actgagccutatttgtcttcucagaac

SEQ ID NO: 39880 - DNA, 22 bp, Artificial Sequence
  Synthetic
gcctggccugaaaatacauggt

SEQ ID NO: 39881 - DNA, 26 bp, Artificial Sequence
  Synthetic
ccacccagaaauactggattgacauc

SEQ ID NO: 39882 - DNA, 24 bp, Artificial Sequence
  Synthetic
ggcagacaggacaautccuaaagt

SEQ ID NO: 39883 - DNA, 28 bp, Artificial Sequence
  Synthetic
catataagaugaactcttcctgugcaga

SEQ ID NO: 39884 - DNA, 19 bp, Artificial Sequence
  Synthetic
cctcucccctcgatuccag

SEQ ID NO: 39885 - DNA, 28 bp, Artificial Sequence
  Synthetic
ctcttgatctcuaatgtcacattgucgt

SEQ ID NO: 39886 - DNA, 22 bp, Artificial Sequence
  Synthetic
ggttgtgacagguccctcuaag

SEQ ID NO: 39887 - DNA, 19 bp, Artificial Sequence
  Synthetic
tgcctgccutgccatcuag

SEQ ID NO: 39888 - DNA, 21 bp, Artificial Sequence
  Synthetic
cctgaacuccacacggtucaa

SEQ ID NO: 39889 - DNA, 22 bp, Artificial Sequence
  Synthetic
cttguaccgctacauacagcca

SEQ ID NO: 39890 - DNA, 23 bp, Artificial Sequence
  Synthetic
ggcctgagcaauagggttuagaa

SEQ ID NO: 39891 - DNA, 25 bp, Artificial Sequence
  Synthetic
ccagacacgtaucaagattggacuc

SEQ ID NO: 39892 - DNA, 23 bp, Artificial Sequence
  Synthetic
ggugtgaaaugagcagaggacag

SEQ ID NO: 39893 - DNA, 28 bp, Artificial Sequence
  Synthetic
gacatgttaaccutgactttgtggttua

SEQ ID NO: 39894 - DNA, 22 bp, Artificial Sequence
  Synthetic
cgaagccacacaugtugaacag

SEQ ID NO: 39895 - DNA, 26 bp, Artificial Sequence
  Synthetic
tttgaagggaagutcctuccaagaaa

SEQ ID NO: 39896 - DNA, 21 bp, Artificial Sequence
  Synthetic
agtacccugcaaggcuaggaa

SEQ ID NO: 39897 - DNA, 26 bp, Artificial Sequence
  Synthetic
agtattatggccuggtgatggattug

SEQ ID NO: 39898 - DNA, 23 bp, Artificial Sequence
  Synthetic
gacaagcacuccacacacaatuc

SEQ ID NO: 39899 - DNA, 28 bp, Artificial Sequence
  Synthetic
ccgctttgagaagaugtatgagaagauc

SEQ ID NO: 39900 - DNA, 26 bp, Artificial Sequence
  Synthetic
catcaagagaguaaaccaatcaugct

SEQ ID NO: 39901 - DNA, 22 bp, Artificial Sequence
  Synthetic
gatgcttaccuggaccaguacc

SEQ ID NO: 39902 - DNA, 22 bp, Artificial Sequence
  Synthetic
gguagaaccaaaggcaacugct

SEQ ID NO: 39903 - DNA, 22 bp, Artificial Sequence
  Synthetic
cacccttcccautgcttttguc

SEQ ID NO: 39904 - DNA, 25 bp, Artificial Sequence
  Synthetic
cagaacaaggutcagtcacaacuct

SEQ ID NO: 39905 - DNA, 22 bp, Artificial Sequence
  Synthetic
ccactguggacaagactgttug

SEQ ID NO: 39906 - DNA, 21 bp, Artificial Sequence
  Synthetic
ggagccagauagcccccuaat

SEQ ID NO: 39907 - DNA, 24 bp, Artificial Sequence
  Synthetic
gcatgatatuctggacatgaugcc

SEQ ID NO: 39908 - DNA, 22 bp, Artificial Sequence
  Synthetic
gggcagguactttugaagcaat

SEQ ID NO: 39909 - DNA, 29 bp, Artificial Sequence
  Synthetic
gtattcttaacttcugcttgggatcguag

SEQ ID NO: 39910 - DNA, 23 bp, Artificial Sequence
  Synthetic
cccatcagaccuggagctuaaac

SEQ ID NO: 39911 - DNA, 23 bp, Artificial Sequence
  Synthetic
cgggaagttcugcgtttgacuaa

SEQ ID NO: 39912 - DNA, 23 bp, Artificial Sequence
  Synthetic
gagcaauggacccaactgatgua

SEQ ID NO: 39913 - DNA, 23 bp, Artificial Sequence
  Synthetic
gcaaaaaccucaactaccugcac

SEQ ID NO: 39914 - DNA, 23 bp, Artificial Sequence
  Synthetic
gaggtgggaacauggagaguaag

SEQ ID NO: 39915 - DNA, 24 bp, Artificial Sequence
  Synthetic
ccaaactctggugggcttatttut

SEQ ID NO: 39916 - DNA, 22 bp, Artificial Sequence
  Synthetic
gcaatgccautggctgtatugt

SEQ ID NO: 39917 - DNA, 27 bp, Artificial Sequence
  Synthetic
ctcatcttaaguctgtgcctagtucag

SEQ ID NO: 39918 - DNA, 22 bp, Artificial Sequence
  Synthetic
ccaaccuaaacagcagcctuct

SEQ ID NO: 39919 - DNA, 28 bp, Artificial Sequence
  Synthetic
gtctgcttattctugatgttgtacccua

SEQ ID NO: 39920 - DNA, 22 bp, Artificial Sequence
  Synthetic
aaggccutcaaaucaaacaggt

SEQ ID NO: 39921 - DNA, 25 bp, Artificial Sequence
  Synthetic
tttgtctagcugcttacttgaggug

SEQ ID NO: 39922 - DNA, 21 bp, Artificial Sequence
  Synthetic
cctccaguggctcaacatcua

SEQ ID NO: 39923 - DNA, 25 bp, Artificial Sequence
  Synthetic
tgggtagaaauggttgtgtgatguc

SEQ ID NO: 39924 - DNA, 22 bp, Artificial Sequence
  Synthetic
ccaccaagaugagctgucaaag

SEQ ID NO: 39925 - DNA, 24 bp, Artificial Sequence
  Synthetic
ggaagatcautcgagaccauggag

SEQ ID NO: 39926 - DNA, 17 bp, Artificial Sequence
  Synthetic
gccgcuccacactcucg

SEQ ID NO: 39927 - DNA, 20 bp, Artificial Sequence
  Synthetic
cctttctgcugcgcttctug

SEQ ID NO: 39928 - DNA, 31 bp, Artificial Sequence; identical to SEQ ID NO: 27694
  Synthetic

SEQ ID NO: 39929 - DNA, 23 bp, Artificial Sequence
  Synthetic
agaagagaccucccaaagctgua

SEQ ID NO: 39930 - DNA, 28 bp, Artificial Sequence
  Synthetic
ctttgtctugaggatcatagtuaagcca

SEQ ID NO: 39931 - DNA, 32 bp, Artificial Sequence; identical to SEQ ID NO: 27697
  Synthetic

SEQ ID NO: 39932 - DNA, 24 bp, Artificial Sequence
  Synthetic
aatttacgtcagguggacctctug

SEQ ID NO: 39933 - DNA, 23 bp, Artificial Sequence
  Synthetic
gcctcccgutaagtctgctttua

SEQ ID NO: 39934 - DNA, 27 bp, Artificial Sequence
  Synthetic
catggtaaaaucccatggtcaatugat

SEQ ID NO: 39935 - DNA, 28 bp, Artificial Sequence
  Synthetic
gctgatgccttutcaactaaacttacut

SEQ ID NO: 39936 - DNA, 22 bp, Artificial Sequence
  Synthetic
ggccaaaucaagatggcacuct

SEQ ID NO: 39937 - DNA, 30 bp, Artificial Sequence; identical to SEQ ID NO: 27703
  Synthetic

SEQ ID NO: 39938 - DNA, 28 bp, Artificial Sequence
  Synthetic
tgtttttaaggugggtcatgataacugg

SEQ ID NO: 39939 - DNA, 28 bp, Artificial Sequence
  Synthetic
cactccaaaauctaatgtucagagacct

SEQ ID NO: 39940 - DNA, 27 bp, Artificial Sequence
  Synthetic
cagcgtagaucaaacagtaaaagtgug

SEQ ID NO: 39941 - DNA, 29 bp, Artificial Sequence
  Synthetic
agtatacaatttggautcaccatgcauga

SEQ ID NO: 39942 - DNA, 21 bp, Artificial Sequence
  Synthetic
gacccagugcctcatgtcaut

SEQ ID NO: 39943 - DNA, 24 bp, Artificial Sequence
  Synthetic
ctgaaatcugaacagacugagcca

SEQ ID NO: 39944 - DNA, 23 bp, Artificial Sequence
  Synthetic
gcatcggatugaacctcagtcut

SEQ ID NO: 39945 - DNA, 20 bp, Artificial Sequence
  Synthetic
tcugaaggagacucccacgt

SEQ ID NO: 39946 - DNA, 17 bp, Artificial Sequence
  Synthetic
ccccugccctgtctugt

SEQ ID NO: 39947 - DNA, 21 bp, Artificial Sequence
  Synthetic
ccatgugggcagagatguagg

SEQ ID NO: 39948 - DNA, 23 bp, Artificial Sequence
  Synthetic
tcaaauaccccaacggagugaac

SEQ ID NO: 39949 - DNA, 21 bp, Artificial Sequence
  Synthetic
ctctgccgugtcttctgucaa

SEQ ID NO: 39950 - DNA, 22 bp, Artificial Sequence
  Synthetic
tcgcatttgucaccatgaucgt

SEQ ID NO: 39951 - DNA, 20 bp, Artificial Sequence
  Synthetic
gccatguagctctcaccuct

SEQ ID NO: 39952 - DNA, 23 bp, Artificial Sequence
  Synthetic
ccaaccuaacaccagcttctguc

SEQ ID NO: 39953 - DNA, 23 bp, Artificial Sequence
  Synthetic
ggtgctagtucagctggtcauac

SEQ ID NO: 39954 - DNA, 18 bp, Artificial Sequence
  Synthetic
ggagaccacuctgcucct

SEQ ID NO: 39955 - DNA, 18 bp, Artificial Sequence
  Synthetic
cttcggcugcaagctugg

SEQ ID NO: 39956 - DNA, 23 bp, Artificial Sequence
  Synthetic
gagcctatgugaaccctttccuc

SEQ ID NO: 39957 - DNA, 19 bp, Artificial Sequence
  Synthetic
cgccgtguatccagcctua

SEQ ID NO: 39958 - DNA, 21 bp, Artificial Sequence
  Synthetic
gtcaguaaagaggcagcugca

SEQ ID NO: 39959 - DNA, 18 bp, Artificial Sequence
  Synthetic
cccaccccggugtttucc

SEQ ID NO: 39960 - DNA, 24 bp, Artificial Sequence
  Synthetic
tggctttttcaguatcagctccuc

SEQ ID NO: 39961 - DNA, 20 bp, Artificial Sequence
  Synthetic
gggcttcguactaaccucgt

SEQ ID NO: 39962 - DNA, 17 bp, Artificial Sequence
  Synthetic
gtccgcugggacacgut

SEQ ID NO: 39963 - DNA, 20 bp, Artificial Sequence
  Synthetic
guaccaggagaagucgtgut

SEQ ID NO: 39964 - DNA, 18 bp, Artificial Sequence
  Synthetic
cuggagggagagccagug

SEQ ID NO: 39965 - DNA, 21 bp, Artificial Sequence
  Synthetic
gaagccgcucttctacgucat

SEQ ID NO: 39966 - DNA, 23 bp, Artificial Sequence
  Synthetic
cgtcuagaagcgggtttttcuga

SEQ ID NO: 39967 - DNA, 20 bp, Artificial Sequence
  Synthetic
cgctagaucccagctuccag

SEQ ID NO: 39968 - DNA, 20 bp, Artificial Sequence
  Synthetic
ggtcugcaccctcucagagt

SEQ ID NO: 39969 - DNA, 19 bp, Artificial Sequence
  Synthetic
ttccaucccccacccctua

SEQ ID NO: 39970 - DNA, 22 bp, Artificial Sequence
  Synthetic
ccagaagugggatttttggcut

SEQ ID NO: 39971 - DNA, 23 bp, Artificial Sequence
  Synthetic
gccaatgacccutccttctugac

SEQ ID NO: 39972 - DNA, 17 bp, Artificial Sequence
  Synthetic
gccagagcugggucaga

SEQ ID NO: 39973 - DNA, 22 bp, Artificial Sequence
  Synthetic
guccctcttgucacacacagac

SEQ ID NO: 39974 - DNA, 21 bp, Artificial Sequence
  Synthetic
ggaagtcccutccctgaacut

SEQ ID NO: 39975 - DNA, 22 bp, Artificial Sequence
  Synthetic
ggcaaattucagggctctggut

SEQ ID NO: 39976 - DNA, 17 bp, Artificial Sequence
  Synthetic
gggccaggguggttucc

SEQ ID NO: 39977 - DNA, 21 bp, Artificial Sequence
  Synthetic
aagccccgagucattcctuac

SEQ ID NO: 39978 - DNA, 21 bp, Artificial Sequence
  Synthetic
gccagugacaaccccagatuc

SEQ ID NO: 39979 - DNA, 20 bp, Artificial Sequence
  Synthetic
gctctccuagggttgccuca

SEQ ID NO: 39980 - DNA, 20 bp, Artificial Sequence
  Synthetic
ccacgcccugaataucccat

SEQ ID NO: 39981 - DNA, 21 bp, Artificial Sequence
  Synthetic
cccccaacccaaautcacuca

SEQ ID NO: 39982 - DNA, 22 bp, Artificial Sequence
  Synthetic
gctucaaacacagcagaggugt

SEQ ID NO: 39983 - DNA, 26 bp, Artificial Sequence
  Synthetic
agtgagacttcugtttgggttaccua

SEQ ID NO: 39984 - DNA, 22 bp, Artificial Sequence
  Synthetic
gccaagtcugacaaagccctut

SEQ ID NO: 39985 - DNA, 20 bp, Artificial Sequence
  Synthetic
cugagcacccaaacuggact

SEQ ID NO: 39986 - DNA, 21 bp, Artificial Sequence
  Synthetic
cacatcucagcacgggcauat

SEQ ID NO: 39987 - DNA, 21 bp, Artificial Sequence
  Synthetic
cagcagucaggactcactguc

SEQ ID NO: 39988 - DNA, 20 bp, Artificial Sequence
  Synthetic
caggguggtgtauggcaact

SEQ ID NO: 39989 - DNA, 18 bp, Artificial Sequence
  Synthetic
cggctgcaguccctgaug

SEQ ID NO: 39990 - DNA, 23 bp, Artificial Sequence
  Synthetic
ccctttcctcuccttgagacuaa

SEQ ID NO: 39991 - DNA, 17 bp, Artificial Sequence
  Synthetic
ctgcggcucaggcatuc

SEQ ID NO: 39992 - DNA, 18 bp, Artificial Sequence
  Synthetic
gctgccaagcucagguga

SEQ ID NO: 39993 - DNA, 17 bp, Artificial Sequence
  Synthetic
gcccuggccgggaguat

SEQ ID NO: 39994 - DNA, 18 bp, Artificial Sequence
  Synthetic
gcaccagggcugcactua

SEQ ID NO: 39995 - DNA, 17 bp, Artificial Sequence
  Synthetic
gctggccugaccuccac

SEQ ID NO: 39996 - DNA, 23 bp, Artificial Sequence
  Synthetic
ggcttccuttggaaaucccaagt

SEQ ID NO: 39997 - DNA, 21 bp, Artificial Sequence
  Synthetic
cgggcttuggaagttctccua

SEQ ID NO: 39998 - DNA, 22 bp, Artificial Sequence
  Synthetic
gttctcuggcagctctagugac

SEQ ID NO: 39999 - DNA, 25 bp, Artificial Sequence
  Synthetic
aatgatagagcccauggatguagga

SEQ ID NO: 40000 - DNA, 22 bp, Artificial Sequence
  Synthetic
tctacctggucaacgtcatugc

SEQ ID NO: 40001 - DNA, 22 bp, Artificial Sequence
  Synthetic
tgaugctttggatuggcaggaa

SEQ ID NO: 40002 - DNA, 25 bp, Artificial Sequence
  Synthetic
tgacaaagtaccugagacctcacua

SEQ ID NO: 40003 - DNA, 25 bp, Artificial Sequence
  Synthetic
ggttggaggaggagauctttctuac

SEQ ID NO: 40004 - DNA, 20 bp, Artificial Sequence
  Synthetic
actggctguctttgcgttug

SEQ ID NO: 40005 - DNA, 19 bp, Artificial Sequence
  Synthetic
tccacccccgutggacaua

SEQ ID NO: 40006 - DNA, 20 bp, Artificial Sequence
  Synthetic
cccuccagacccctttccut

SEQ ID NO: 40007 - DNA, 28 bp, Artificial Sequence
  Synthetic
cccaaagaguaaatcagatgatacugca

SEQ ID NO: 40008 - DNA, 26 bp, Artificial Sequence
  Synthetic
caagaagtggagaaugtcagtcugag

SEQ ID NO: 40009 - DNA, 25 bp, Artificial Sequence
  Synthetic
cttcaaagcautggucagggaaaag

SEQ ID NO: 40010 - DNA, 22 bp, Artificial Sequence
  Synthetic
caaatgccccaautgcagguaa

SEQ ID NO: 40011 - DNA, 24 bp, Artificial Sequence
  Synthetic
cacctttcctugcctctttccuag

SEQ ID NO: 40012 - DNA, 21 bp, Artificial Sequence
  Synthetic
cagtgtgcaggguggcaagug

SEQ ID NO: 40013 - DNA, 26 bp, Artificial Sequence
  Synthetic
gcctcatctugggcctgtgttatcuc

SEQ ID NO: 40014 - DNA, 21 bp, Artificial Sequence
  Synthetic
gggccagaccuaagagcaauc

SEQ ID NO: 40015 - DNA, 22 bp, Artificial Sequence
  Synthetic
catggccauctacaagcaguca

SEQ ID NO: 40016 - DNA, 20 bp, Artificial Sequence
  Synthetic
acaucttgtugagggcaggg

SEQ ID NO: 40017 - DNA, 20 bp, Artificial Sequence
  Synthetic
tccugaggtguagacgccaa

SEQ ID NO: 40018 - DNA, 22 bp, Artificial Sequence
  Synthetic
cugggaagggauagaagaugac

SEQ ID NO: 40019 - DNA, 24 bp, Artificial Sequence
  Synthetic
tgactgctctuttcacccatcuac

SEQ ID NO: 40020 - DNA, 24 bp, Artificial Sequence
  Synthetic
aaagtcagucccatggaatttucg

SEQ ID NO: 40021 - DNA, 23 bp, Artificial Sequence
  Synthetic
ctggatccccacutttcctctug

SEQ ID NO: 40022 - DNA, 17 bp, Artificial Sequence
  Synthetic
ctgctucgcgcatucgg

SEQ ID NO: 40023 - DNA, 17 bp, Artificial Sequence
  Synthetic
ctccucgcacccugcaa

SEQ ID NO: 40024 - DNA, 19 bp, Artificial Sequence
  Synthetic
ggtcttccugccctucgac

SEQ ID NO: 40025 - DNA, 17 bp, Artificial Sequence
  Synthetic
cucccgggaccgtcuac

SEQ ID NO: 40026 - DNA, 17 bp, Artificial Sequence
  Synthetic
agcccccautcgtgcug

SEQ ID NO: 40027 - DNA, 21 bp, Artificial Sequence
  Synthetic
tccatggcgautgtctcagug

SEQ ID NO: 40028 - DNA, 23 bp, Artificial Sequence
  Synthetic
ctggtctctuctgacggaactug

SEQ ID NO: 40029 - DNA, 27 bp, Artificial Sequence
  Synthetic
ccaaattuacggaaagaagacaacugg

SEQ ID NO: 40030 - DNA, 23 bp, Artificial Sequence
  Synthetic
ctccccaucgtgggatttuaaga

SEQ ID NO: 40031 - DNA, 22 bp, Artificial Sequence
  Synthetic
ctgagaccuacctctguaccca

SEQ ID NO: 40032 - DNA, 22 bp, Artificial Sequence
  Synthetic
accucctcgcucagagagaaat

SEQ ID NO: 40033 - DNA, 24 bp, Artificial Sequence
  Synthetic
cccttggaaugggtaggguaagag

SEQ ID NO: 40034 - DNA, 20 bp, Artificial Sequence
  Synthetic
tggtgagggugggagtctut

SEQ ID NO: 40035 - DNA, 21 bp, Artificial Sequence
  Synthetic
actgcggcacacuacttctug

SEQ ID NO: 40036 - DNA, 19 bp, Artificial Sequence
  Synthetic
ggucagaggcagccttugt

SEQ ID NO: 40037 - DNA, 17 bp, Artificial Sequence
  Synthetic
ccacucccagccccuga

SEQ ID NO: 40038 - DNA, 19 bp, Artificial Sequence
  Synthetic
tcactgccugccatcccua

SEQ ID NO: 40039 - DNA, 23 bp, Artificial Sequence
  Synthetic
gtgtagagaucgttgagcagguc

SEQ ID NO: 40040 - DNA, 20 bp, Artificial Sequence
  Synthetic
acaagaggcaaucgctucgt

SEQ ID NO: 40041 - DNA, 20 bp, Artificial Sequence
  Synthetic
gggaaccucaggcatauggc

SEQ ID NO: 40042 - DNA, 23 bp, Artificial Sequence
  Synthetic
gtggagauaatgggugcgaagat

SEQ ID NO: 40043 - DNA, 20 bp, Artificial Sequence
  Synthetic
gtcttguccccgtcacacuc

SEQ ID NO: 40044 - DNA, 18 bp, Artificial Sequence
  Synthetic
tcaccccaguccgccuaa

SEQ ID NO: 40045 - DNA, 17 bp, Artificial Sequence
  Synthetic
ccacgucatcgcugcct

SEQ ID NO: 40046 - DNA, 20 bp, Artificial Sequence
  Synthetic
ggaaguggcccgtctgaauc

SEQ ID NO: 40047 - DNA, 23 bp, Artificial Sequence
  Synthetic
ctgctgguagttctgttgttugc

SEQ ID NO: 40048 - DNA, 24 bp, Artificial Sequence
  Synthetic
gcucgccaaggactattauaaccc

SEQ ID NO: 40049 - DNA, 20 bp, Artificial Sequence
  Synthetic
aggctctccucaccagcaua

SEQ ID NO: 40050 - DNA, 23 bp, Artificial Sequence
  Synthetic
ggtggccaaguatgaugagaact

SEQ ID NO: 40051 - DNA, 23 bp, Artificial Sequence
  Synthetic
ggaatgcugaggaaagtggguac

SEQ ID NO: 40052 - DNA, 18 bp, Artificial Sequence
  Synthetic
caugacaggccgcugact

SEQ ID NO: 40053 - DNA, 21 bp, Artificial Sequence
  Synthetic
cccgtagugctgatactuggc

SEQ ID NO: 40054 - DNA, 21 bp, Artificial Sequence
  Synthetic
cutcctacagtuccacaccgt

SEQ ID NO: 40055 - DNA, 21 bp, Artificial Sequence
  Synthetic
caggttcucagggagcttguc

SEQ ID NO: 40056 - DNA, 20 bp, Artificial Sequence
  Synthetic
gcauaaaagccagcacugca

SEQ ID NO: 40057 - DNA, 20 bp, Artificial Sequence
  Synthetic
ggcctucgagttgctgtuga

SEQ ID NO: 40058 - DNA, 19 bp, Artificial Sequence
  Synthetic
agagccuacacggcaguct

SEQ ID NO: 40059 - DNA, 20 bp, Artificial Sequence
  Synthetic
guggttcuccagcgagaagg

SEQ ID NO: 40060 - DNA, 20 bp, Artificial Sequence
  Synthetic
gcaaugccaaggactucagc

SEQ ID NO: 40061 - DNA, 20 bp, Artificial Sequence
  Synthetic
ggutgtguccgggaaacagt

SEQ ID NO: 40062 - DNA, 18 bp, Artificial Sequence
  Synthetic
gctuaccaagggccugga

SEQ ID NO: 40063 - DNA, 19 bp, Artificial Sequence
  Synthetic
cacctgccucctcctucac

SEQ ID NO: 40064 - DNA, 21 bp, Artificial Sequence
  Synthetic
cctggaagcugaggaggagua

SEQ ID NO: 40065 - DNA, 20 bp, Artificial Sequence
  Synthetic
ctctggaccuttgacucggt

SEQ ID NO: 40066 - DNA, 22 bp, Artificial Sequence
  Synthetic
caucgcaaagaaagaguctgug

SEQ ID NO: 40067 - DNA, 24 bp, Artificial Sequence
  Synthetic
gtgagagaacgaguacacatccug

SEQ ID NO: 40068 - DNA, 18 bp, Artificial Sequence
  Synthetic
cccgaugggcuccaagac

SEQ ID NO: 40069 - DNA, 20 bp, Artificial Sequence
  Synthetic
ggctgcuggagacctugaat

SEQ ID NO: 40070 - DNA, 22 bp, Artificial Sequence
  Synthetic
tcaaaaggaagucggcctucat

SEQ ID NO: 40071 - DNA, 18 bp, Artificial Sequence
  Synthetic
attgccctuggtgggcut

SEQ ID NO: 40072 - DNA, 22 bp, Artificial Sequence
  Synthetic
ccatcgugcagaagatcaccuc

SEQ ID NO: 40073 - DNA, 21 bp, Artificial Sequence
  Synthetic
cauaacggaucagccccagaa

SEQ ID NO: 40074 - DNA, 21 bp, Artificial Sequence
  Synthetic
caaaaccgaggccutcacauc

SEQ ID NO: 40075 - DNA, 21 bp, Artificial Sequence
  Synthetic
tctttggctucttgcctccuc

SEQ ID NO: 40076 - DNA, 22 bp, Artificial Sequence
  Synthetic
acaccaccucttcaccctguaa

SEQ ID NO: 40077 - DNA, 21 bp, Artificial Sequence
  Synthetic
cagtgcauatggtggugaacg

SEQ ID NO: 40078 - DNA, 21 bp, Artificial Sequence
  Synthetic
cctcgttcuccttggaugcag

SEQ ID NO: 40079 - DNA, 21 bp, Artificial Sequence
  Synthetic
cttgaagtuggccgggtttug

SEQ ID NO: 40080 - DNA, 20 bp, Artificial Sequence
  Synthetic
tgccgctugagagaacacuc

SEQ ID NO: 40081 - DNA, 21 bp, Artificial Sequence
  Synthetic
actcatgttugcgaccctugt

SEQ ID NO: 40082 - DNA, 20 bp, Artificial Sequence
  Synthetic
ggccuaccagcctguaaagc

SEQ ID NO: 40083 - DNA, 20 bp, Artificial Sequence
  Synthetic
gctccaaugccctcctgtuc

SEQ ID NO: 40084 - DNA, 18 bp, Artificial Sequence
  Synthetic
agtccgaggucgtcggua

SEQ ID NO: 40085 - DNA, 21 bp, Artificial Sequence
  Synthetic
gatcaaggaucggctcuggac

SEQ ID NO: 40086 - DNA, 23 bp, Artificial Sequence
  Synthetic
cccacucctaacaaugaccagag

SEQ ID NO: 40087 - DNA, 21 bp, Artificial Sequence
  Synthetic
gtcctucgcaccaagaacuga

SEQ ID NO: 40088 - DNA, 18 bp, Artificial Sequence
  Synthetic
cggagccccuagccaaug

SEQ ID NO: 40089 - DNA, 25 bp, Artificial Sequence
  Synthetic
cccaccatguatctaatgatccugt

SEQ ID NO: 40090 - DNA, 20 bp, Artificial Sequence
  Synthetic
gucttcacguccagcaggat

SEQ ID NO: 40091 - DNA, 20 bp, Artificial Sequence
  Synthetic
acggccacacucactaaucg

SEQ ID NO: 40092 - DNA, 22 bp, Artificial Sequence
  Synthetic
gaaugccatucacaccagaagg

SEQ ID NO: 40093 - DNA, 21 bp, Artificial Sequence
  Synthetic
gtcaaugtggagauggacgct

SEQ ID NO: 40094 - DNA, 25 bp, Artificial Sequence
  Synthetic
cctccctgcauttcttttaagcuga

SEQ ID NO: 40095 - DNA, 20 bp, Artificial Sequence
  Synthetic
gtggaagccgacaucaaugg

SEQ ID NO: 40096 - DNA, 21 bp, Artificial Sequence
  Synthetic
ggatgttcuggcccaccatut

SEQ ID NO: 40097 - DNA, 25 bp, Artificial Sequence
  Synthetic
atgaagcaagagcutaatguaggct

SEQ ID NO: 40098 - DNA, 18 bp, Artificial Sequence
  Synthetic
ccaggcggucatugaggt

SEQ ID NO: 40099 - DNA, 20 bp, Artificial Sequence
  Synthetic
gtctcatccucccgcttcuc

SEQ ID NO: 40100 - DNA, 20 bp, Artificial Sequence
  Synthetic
cccttcauggagcuggagga

SEQ ID NO: 40101 - DNA, 20 bp, Artificial Sequence
  Synthetic
gggaauggaaagugccagac

SEQ ID NO: 40102 - DNA, 24 bp, Artificial Sequence
  Synthetic
ccactttguaagctcattctuggg

SEQ ID NO: 40103 - DNA, 27 bp, Artificial Sequence
  Synthetic
tgaattgacacuaatctctgcttgugt

SEQ ID NO: 40104 - DNA, 22 bp, Artificial Sequence
  Synthetic
gcatccauagggacugacaggt

SEQ ID NO: 40105 - DNA, 26 bp, Artificial Sequence
  Synthetic
gcctgggttaaguatgcagattacug

SEQ ID NO: 40106 - DNA, 22 bp, Artificial Sequence
  Synthetic
gucttacaaaaugaagcggccc

SEQ ID NO: 40107 - DNA, 24 bp, Artificial Sequence
  Synthetic
ttatcctgaugggttgtgttuggt

SEQ ID NO: 40108 - DNA, 23 bp, Artificial Sequence
  Synthetic
agacucagcaucagcaaaaacct

SEQ ID NO: 40109 - DNA, 32 bp, Artificial Sequence; identical to SEQ ID NO: 27875
  Synthetic

SEQ ID NO: 40110 - DNA, 31 bp, Artificial Sequence; identical to SEQ ID NO: 27876
  Synthetic

SEQ ID NO: 40111 - DNA, 24 bp, Artificial Sequence
  Synthetic
ctctgcatugaaagttccccaaut

SEQ ID NO: 40112 - DNA, 31 bp, Artificial Sequence; identical to SEQ ID NO: 27878
  Synthetic

SEQ ID NO: 40113 - DNA, 25 bp, Artificial Sequence
  Synthetic
ccatcucaagaggagctcatuaagg

SEQ ID NO: 40114 - DNA, 29 bp, Artificial Sequence
  Synthetic
gtcagataccacagcauctttacatugat

SEQ ID NO: 40115 - DNA, 30 bp, Artificial Sequence; identical to SEQ ID NO: 27881
  Synthetic

SEQ ID NO: 40116 - DNA, 27 bp, Artificial Sequence
  Synthetic
agatatcagtguttggccaacaauaca

SEQ ID NO: 40117 - DNA, 27 bp, Artificial Sequence
  Synthetic
tcttggtgccauttatcgttttugaag

SEQ ID NO: 40118 - DNA, 26 bp, Artificial Sequence
  Synthetic
gcaaacacaaaaaccuggttccaaua

SEQ ID NO: 40119 - DNA, 29 bp, Artificial Sequence
  Synthetic
aattggaagacutgactgcaaauacaaac

SEQ ID NO: 40120 - DNA, 25 bp, Artificial Sequence
  Synthetic
tccuctgtgttctuagacagacact

SEQ ID NO: 40121 - DNA, 22 bp, Artificial Sequence
  Synthetic
cctagcccuttcacccauacac

SEQ ID NO: 40122 - DNA, 24 bp, Artificial Sequence
  Synthetic
caucaggtgtcucagaacaaacct

SEQ ID NO: 40123 - DNA, 22 bp, Artificial Sequence
  Synthetic
cagagggccaaaautgaaugct

SEQ ID NO: 40124 - DNA, 30 bp, Artificial Sequence; identical to SEQ ID NO: 27890
  Synthetic

SEQ ID NO: 40125 - DNA, 28 bp, Artificial Sequence
  Synthetic
aacgaaactggacucattactccaaaua

SEQ ID NO: 40126 - DNA, 25 bp, Artificial Sequence
  Synthetic
gcctgcagugatattaactgtcugt

SEQ ID NO: 40127 - DNA, 28 bp, Artificial Sequence
  Synthetic
gctcagtattugcagaatacatucaagg

SEQ ID NO: 40128 - DNA, 22 bp, Artificial Sequence
  Synthetic
gggttutcaaatgcugcacact

SEQ ID NO: 40129 - DNA, 22 bp, Artificial Sequence
  Synthetic
gcugaagaccccaaagatcuca

SEQ ID NO: 40130 - DNA, 26 bp, Artificial Sequence
  Synthetic
tttgttaacutcagctcugggaaagt

SEQ ID NO: 40131 - DNA, 30 bp, Artificial Sequence; identical to SEQ ID NO: 27897
  Synthetic

SEQ ID NO: 40132 - DNA, 28 bp, Artificial Sequence
  Synthetic
cttatactgctgcutataggttcagcut

SEQ ID NO: 40133 - DNA, 29 bp, Artificial Sequence
  Synthetic
aagactccugaaatgataaaucagggaac

SEQ ID NO: 40134 - DNA, 25 bp, Artificial Sequence
  Synthetic
gtggctcaguaacaaatgctccuat

SEQ ID NO: 40135 - DNA, 31 bp, Artificial Sequence; identical to SEQ ID NO: 27901
  Synthetic

SEQ ID NO: 40136 - DNA, 28 bp, Artificial Sequence
  Synthetic
ttcatcacttcuggaaaaccactcatua

SEQ ID NO: 40137 - DNA, 22 bp, Artificial Sequence
  Synthetic
ccaacauaacagatgggcugga

SEQ ID NO: 40138 - DNA, 23 bp, Artificial Sequence
  Synthetic
gctccacaugcaagttugaaaca

SEQ ID NO: 40139 - DNA, 27 bp, Artificial Sequence
  Synthetic
ccacctccaaggugtatgaagtatgua

SEQ ID NO: 40140 - DNA, 28 bp, Artificial Sequence
  Synthetic
aggaaaauaccagcttcauagacaaagg

SEQ ID NO: 40141 - DNA, 32 bp, Artificial Sequence; identical to SEQ ID NO: 27907
  Synthetic

SEQ ID NO: 40142 - DNA, 19 bp, Artificial Sequence
  Synthetic
gcutctagccugggccaca

SEQ ID NO: 40143 - DNA, 28 bp, Artificial Sequence
  Synthetic
ctatcatccaaaguatgggcuacagaaa

SEQ ID NO: 40144 - DNA, 27 bp, Artificial Sequence
  Synthetic
taaaaggtcttaucaccacgtcauaga

SEQ ID NO: 40145 - DNA, 30 bp, Artificial Sequence; identical to SEQ ID NO: 27911
  Synthetic

SEQ ID NO: 40146 - DNA, 27 bp, Artificial Sequence
  Synthetic
aagttaggtgtutcctgggttaugaag

SEQ ID NO: 40147 - DNA, 32 bp, Artificial Sequence; identical to SEQ ID NO: 27913
  Synthetic

SEQ ID NO: 40148 - DNA, 17 bp, Artificial Sequence
  Synthetic
gtcgcggcuccgctaua

SEQ ID NO: 40149 - DNA, 17 bp, Artificial Sequence
  Synthetic
cgggagcucaccugcac

SEQ ID NO: 40150 - DNA, 21 bp, Artificial Sequence
  Synthetic
actcucagcccaccttctcuc

SEQ ID NO: 40151 - DNA, 20 bp, Artificial Sequence
  Synthetic
ttggacaguccacgttugct

SEQ ID NO: 40152 - DNA, 21 bp, Artificial Sequence
  Synthetic
ggcaggagacaaugtcccauc

SEQ ID NO: 40153 - DNA, 23 bp, Artificial Sequence
  Synthetic
cutatatggcaagucggaccagt

SEQ ID NO: 40154 - DNA, 21 bp, Artificial Sequence
  Synthetic
gggtaguccaggcccttcaua

SEQ ID NO: 40155 - DNA, 28 bp, Artificial Sequence
  Synthetic
tctctgaatccuaagaagaagctcucag

SEQ ID NO: 40156 - DNA, 20 bp, Artificial Sequence
  Synthetic
ccttcucccaccctcacuga

SEQ ID NO: 40157 - DNA, 22 bp, Artificial Sequence
  Synthetic
acaguccagacgaccttcucat

SEQ ID NO: 40158 - DNA, 19 bp, Artificial Sequence
  Synthetic
ctgcugagccccatcacut

SEQ ID NO: 40159 - DNA, 20 bp, Artificial Sequence
  Synthetic
gtgagccaucaucgcaggaa

SEQ ID NO: 40160 - DNA, 17 bp, Artificial Sequence
  Synthetic
ccccgcgccutccuaag

SEQ ID NO: 40161 - DNA, 21 bp, Artificial Sequence
  Synthetic
tgctcgtcggucatcttcaug

SEQ ID NO: 40162 - DNA, 19 bp, Artificial Sequence
  Synthetic
caagttccccgugtgcauc

SEQ ID NO: 40163 - DNA, 18 bp, Artificial Sequence
  Synthetic
gtactgguccgcgagcut

SEQ ID NO: 40164 - DNA, 20 bp, Artificial Sequence
  Synthetic
gaccugacagttuggcggat

SEQ ID NO: 40165 - DNA, 20 bp, Artificial Sequence
  Synthetic
cccgttctucaccgactucc

SEQ ID NO: 40166 - DNA, 28 bp, Artificial Sequence
  Synthetic
ttttctcgtgcutgttcttttattgucc

SEQ ID NO: 40167 - DNA, 23 bp, Artificial Sequence
  Synthetic
aactcgttgacaucgaaggtcuc

SEQ ID NO: 40168 - DNA, 18 bp, Artificial Sequence
  Synthetic
gcuacggcaucagcagca

SEQ ID NO: 40169 - DNA, 17 bp, Artificial Sequence
  Synthetic
ctcagcguggucagcgt

SEQ ID NO: 40170 - DNA, 20 bp, Artificial Sequence
  Synthetic
tccagcucctacuacagcca

SEQ ID NO: 40171 - DNA, 18 bp, Artificial Sequence
  Synthetic
gccatctucgccctucgt

SEQ ID NO: 40172 - DNA, 21 bp, Artificial Sequence
  Synthetic
gtggaggccucatgtgucaat

SEQ ID NO: 40173 - DNA, 24 bp, Artificial Sequence
  Synthetic
gtttaggugagacaccgtgagauc

SEQ ID NO: 40174 - DNA, 19 bp, Artificial Sequence
  Synthetic
ccagugaccccctgtccut

SEQ ID NO: 40175 - DNA, 23 bp, Artificial Sequence
  Synthetic
ccataaauagccaggcugagcat

SEQ ID NO: 40176 - DNA, 22 bp, Artificial Sequence
  Synthetic
tggacctguacatcctcaugga

SEQ ID NO: 40177 - DNA, 18 bp, Artificial Sequence
  Synthetic
ggtgcagcugtccugagt

SEQ ID NO: 40178 - DNA, 20 bp, Artificial Sequence
  Synthetic
gacactcuctctcccuccca

SEQ ID NO: 40179 - DNA, 17 bp, Artificial Sequence
  Synthetic
gcuggcagcaccctucc

SEQ ID NO: 40180 - DNA, 22 bp, Artificial Sequence
  Synthetic
ccttccacuatgaggctgaugg

SEQ ID NO: 40181 - DNA, 24 bp, Artificial Sequence
  Synthetic
agtagttggugacagcaaagaugg

SEQ ID NO: 40182 - DNA, 22 bp, Artificial Sequence
  Synthetic
ccacagagcacugatcaaccuc

SEQ ID NO: 40183 - DNA, 25 bp, Artificial Sequence
  Synthetic
tgttttaaacgautccactcggugt

SEQ ID NO: 40184 - DNA, 23 bp, Artificial Sequence
  Synthetic
gaagggcaacauccatcugaaac

SEQ ID NO: 40185 - DNA, 22 bp, Artificial Sequence
  Synthetic
gcacaggagucctgcttcatuc

SEQ ID NO: 40186 - DNA, 22 bp, Artificial Sequence
  Synthetic
ggaatgaccagutcctcctuca

SEQ ID NO: 40187 - DNA, 23 bp, Artificial Sequence
  Synthetic
cactggaagutgtcatacucgca

SEQ ID NO: 40188 - DNA, 23 bp, Artificial Sequence
  Synthetic
cctggacuacaggcacagatgua

SEQ ID NO: 40189 - DNA, 23 bp, Artificial Sequence
  Synthetic
ccatagggutctctcuggagagg

SEQ ID NO: 40190 - DNA, 19 bp, Artificial Sequence
  Synthetic
cccaacacagugcctguct

SEQ ID NO: 40191 - DNA, 19 bp, Artificial Sequence
  Synthetic
ccuaggctcucagcaaccc

SEQ ID NO: 40192 - DNA, 19 bp, Artificial Sequence
  Synthetic
cccctcutgaccatuggca

SEQ ID NO: 40193 - DNA, 23 bp, Artificial Sequence
  Synthetic
gcucagagaaagagcagucagag

SEQ ID NO: 40194 - DNA, 17 bp, Artificial Sequence
  Synthetic
cucaagggccgugacgt

SEQ ID NO: 40195 - DNA, 22 bp, Artificial Sequence
  Synthetic
cagagaagaggcaugctgugat

SEQ ID NO: 40196 - DNA, 17 bp, Artificial Sequence
  Synthetic
ccuaggcccagccucac

SEQ ID NO: 40197 - DNA, 19 bp, Artificial Sequence
  Synthetic
cctgaaguggaggccugat

SEQ ID NO: 40198 - DNA, 19 bp, Artificial Sequence
  Synthetic
ctgaaccutccacccucga

SEQ ID NO: 40199 - DNA, 22 bp, Artificial Sequence
  Synthetic
ggtctgcagugagggtgtagua

SEQ ID NO: 40200 - DNA, 19 bp, Artificial Sequence
  Synthetic
acctcugaccaccuccgaa

SEQ ID NO: 40201 - DNA, 26 bp, Artificial Sequence
  Synthetic
tccttgatgauggtgatgttuaccag

SEQ ID NO: 40202 - DNA, 21 bp, Artificial Sequence
  Synthetic
cccagcacacuctgacaaaug

SEQ ID NO: 40203 - DNA, 17 bp, Artificial Sequence
  Synthetic
cacccucgaccctgugg

SEQ ID NO: 40204 - DNA, 21 bp, Artificial Sequence
  Synthetic
tggaaagagcugcaggugaag

SEQ ID NO: 40205 - DNA, 22 bp, Artificial Sequence
  Synthetic
gtcttccctcucctcctgctua

SEQ ID NO: 40206 - DNA, 23 bp, Artificial Sequence
  Synthetic
tctgugcaaagaggacaguaagg

SEQ ID NO: 40207 - DNA, 23 bp, Artificial Sequence
  Synthetic
caatacggguacaggttggugag

SEQ ID NO: 40208 - DNA, 22 bp, Artificial Sequence
  Synthetic
cactgacagcacucttcctgua

SEQ ID NO: 40209 - DNA, 23 bp, Artificial Sequence
  Synthetic
gcaggaaagaaggauctggtuct

SEQ ID NO: 40210 - DNA, 20 bp, Artificial Sequence
  Synthetic
gcccatguccagtgaguggt

SEQ ID NO: 40211 - DNA, 25 bp, Artificial Sequence
  Synthetic
gtacataaggaagcugtcgtagucc

SEQ ID NO: 40212 - DNA, 17 bp, Artificial Sequence
  Synthetic
ggctgcggcuggaagut

SEQ ID NO: 40213 - DNA, 17 bp, Artificial Sequence
  Synthetic
gcgggugagcctgucac

SEQ ID NO: 40214 - DNA, 19 bp, Artificial Sequence
  Synthetic
gaugaccacgaccagugct

SEQ ID NO: 40215 - DNA, 20 bp, Artificial Sequence
  Synthetic
ggttggcugaggtcacucac

SEQ ID NO: 40216 - DNA, 21 bp, Artificial Sequence
  Synthetic
tgactcccacugagacccuag

SEQ ID NO: 40217 - DNA, 22 bp, Artificial Sequence
  Synthetic
cagctggtacuccacactguag

SEQ ID NO: 40218 - DNA, 22 bp, Artificial Sequence
  Synthetic
actaggtcucgatggcagctua

SEQ ID NO: 40219 - DNA, 21 bp, Artificial Sequence
  Synthetic
cggaacacguaggagtggtug

SEQ ID NO: 40220 - DNA, 22 bp, Artificial Sequence
  Synthetic
acaggctgaugctcttcctcua

SEQ ID NO: 40221 - DNA, 22 bp, Artificial Sequence
  Synthetic
ccatctcacaggucaccaggua

SEQ ID NO: 40222 - DNA, 20 bp, Artificial Sequence
  Synthetic
gcagacgcugaaggcatcut

SEQ ID NO: 40223 - DNA, 21 bp, Artificial Sequence
  Synthetic
gggugaaggaaaggacaggug

SEQ ID NO: 40224 - DNA, 22 bp, Artificial Sequence
  Synthetic
caagccaggucatctaaugcct

SEQ ID NO: 40225 - DNA, 22 bp, Artificial Sequence
  Synthetic
tgcggucaagttuggaagaact

SEQ ID NO: 40226 - DNA, 21 bp, Artificial Sequence
  Synthetic
ccucctaatccauccccagca

SEQ ID NO: 40227 - DNA, 21 bp, Artificial Sequence
  Synthetic
atagcccggucagtttcucac

SEQ ID NO: 40228 - DNA, 23 bp, Artificial Sequence
  Synthetic
gagagucagaaacaugggaaggt

SEQ ID NO: 40229 - DNA, 20 bp, Artificial Sequence
  Synthetic
ggacttgccugttgctucct

SEQ ID NO: 40230 - DNA, 30 bp, Artificial Sequence; identical to SEQ ID NO: 27996
  Synthetic

SEQ ID NO: 40231 - DNA, 23 bp, Artificial Sequence
  Synthetic
cggaataacugcccauagggaat

SEQ ID NO: 40232 - DNA, 21 bp, Artificial Sequence
  Synthetic
cggaagcugcaatugaagagg

SEQ ID NO: 40233 - DNA, 19 bp, Artificial Sequence
  Synthetic
agccuccccgctaacacua

SEQ ID NO: 40234 - DNA, 22 bp, Artificial Sequence
  Synthetic
tcagtggcaautaagccctgut

SEQ ID NO: 40235 - DNA, 18 bp, Artificial Sequence
  Synthetic
tgtgcagguggctcaucg

SEQ ID NO: 40236 - DNA, 23 bp, Artificial Sequence
  Synthetic
gcaggaggguaaccagaaaggua

SEQ ID NO: 40237 - DNA, 21 bp, Artificial Sequence
  Synthetic
guagccacaaccuggaccaaa

SEQ ID NO: 40238 - DNA, 20 bp, Artificial Sequence
  Synthetic
cacctgguacaccugcagaa

SEQ ID NO: 40239 - DNA, 21 bp, Artificial Sequence
  Synthetic
ctggccauggtacauggagac

SEQ ID NO: 40240 - DNA, 21 bp, Artificial Sequence
  Synthetic
gggctgctuctcatcctgtut

SEQ ID NO: 40241 - DNA, 20 bp, Artificial Sequence
  Synthetic
gagggucgaacacugagagc

SEQ ID NO: 40242 - DNA, 20 bp, Artificial Sequence
  Synthetic
gccttagugagctcccucgt

SEQ ID NO: 40243 - DNA, 29 bp, Artificial Sequence
  Synthetic
cttttcttcctccutcatgatggattuct

SEQ ID NO: 40244 - DNA, 24 bp, Artificial Sequence
  Synthetic
gcagagccagutcaataccuacag

SEQ ID NO: 40245 - DNA, 26 bp, Artificial Sequence
  Synthetic
gagtaucatttgttccuggagacaag

SEQ ID NO: 40246 - DNA, 19 bp, Artificial Sequence
  Synthetic
gaagacggaugctgccauc

SEQ ID NO: 40247 - DNA, 19 bp, Artificial Sequence
  Synthetic
ggacggcutgccctcauat

SEQ ID NO: 40248 - DNA, 22 bp, Artificial Sequence
  Synthetic
agucaacgagctcaucaccaac

SEQ ID NO: 40249 - DNA, 23 bp, Artificial Sequence
  Synthetic
cttccaggagutcatgtcugacc

SEQ ID NO: 40250 - DNA, 19 bp, Artificial Sequence
  Synthetic
ctgaucgacgagcacgaug

SEQ ID NO: 40251 - DNA, 20 bp, Artificial Sequence
  Synthetic
gagctcguctcagcaucact

SEQ ID NO: 40252 - DNA, 24 bp, Artificial Sequence
  Synthetic
gatgaataaaaaccggugcagcuc

SEQ ID NO: 40253 - DNA, 23 bp, Artificial Sequence
  Synthetic
gggtgtggaaautacatccuggt

SEQ ID NO: 40254 - DNA, 24 bp, Artificial Sequence
  Synthetic
tttcttacacugcctctccuacct

SEQ ID NO: 40255 - DNA, 18 bp, Artificial Sequence
  Synthetic
ccttggtguggccagguc

SEQ ID NO: 40256 - DNA, 22 bp, Artificial Sequence
  Synthetic
ccagcatggucctgtgattcuc

SEQ ID NO: 40257 - DNA, 21 bp, Artificial Sequence
  Synthetic
gacctccugggacacgttuac

SEQ ID NO: 40258 - DNA, 20 bp, Artificial Sequence
  Synthetic
tccaagcaguccctagugct

SEQ ID NO: 40259 - DNA, 24 bp, Artificial Sequence
  Synthetic
aacacaattccggauctcttccug

SEQ ID NO: 40260 - DNA, 31 bp, Artificial Sequence; identical to SEQ ID NO: 28026
  Synthetic

SEQ ID NO: 40261 - DNA, 21 bp, Artificial Sequence
  Synthetic
ggccagccucagacacaaaua

SEQ ID NO: 40262 - DNA, 30 bp, Artificial Sequence; identical to SEQ ID NO: 28028
  Synthetic

SEQ ID NO: 40263 - DNA, 22 bp, Artificial Sequence
  Synthetic
ggagggttcuttggcaactuac

SEQ ID NO: 40264 - DNA, 23 bp, Artificial Sequence
  Synthetic
ggtggtcagucatgtgtgtcauc

SEQ ID NO: 40265 - DNA, 21 bp, Artificial Sequence
  Synthetic
aggtccacuggaggagaaguc

SEQ ID NO: 40266 - DNA, 20 bp, Artificial Sequence
  Synthetic
gccgguaccgagaggaacua

SEQ ID NO: 40267 - DNA, 18 bp, Artificial Sequence
  Synthetic
cacccuccacuccagcag

SEQ ID NO: 40268 - DNA, 19 bp, Artificial Sequence
  Synthetic
ggcctcucagtcccgtgua

SEQ ID NO: 40269 - DNA, 18 bp, Artificial Sequence
  Synthetic
gggtccuccaggauccct

SEQ ID NO: 40270 - DNA, 21 bp, Artificial Sequence
  Synthetic
actcagcugaaagcccugaac

SEQ ID NO: 40271 - DNA, 18 bp, Artificial Sequence
  Synthetic
ccacacguccgtgctuct

SEQ ID NO: 40272 - DNA, 22 bp, Artificial Sequence
  Synthetic
ccttttcucccgactgttgcua

SEQ ID NO: 40273 - DNA, 20 bp, Artificial Sequence
  Synthetic
actgtucacacggcctctuc

SEQ ID NO: 40274 - DNA, 26 bp, Artificial Sequence
  Synthetic
cttaaactgtuacgcttggcaagaug

SEQ ID NO: 40275 - DNA, 31 bp, Artificial Sequence; identical to SEQ ID NO: 28041
  Synthetic

SEQ ID NO: 40276 - DNA, 25 bp, Artificial Sequence
  Synthetic
attgcgguaacttttcctttugcat

SEQ ID NO: 40277 - DNA, 20 bp, Artificial Sequence
  Synthetic
gccagatguccctctcguct

SEQ ID NO: 40278 - DNA, 17 bp, Artificial Sequence
  Synthetic
gaucctgugcgcagggt

SEQ ID NO: 40279 - DNA, 18 bp, Artificial Sequence
  Synthetic
tctgccggccuctttucc

SEQ ID NO: 40280 - DNA, 17 bp, Artificial Sequence
  Synthetic
ccugcagcaccgaguct

SEQ ID NO: 40281 - DNA, 19 bp, Artificial Sequence
  Synthetic
tcctccucctcctccaugc

SEQ ID NO: 40282 - DNA, 28 bp, Artificial Sequence
  Synthetic
tgtacacactgacuactatgccaaguat

SEQ ID NO: 40283 - DNA, 19 bp, Artificial Sequence
  Synthetic
cccgcgucttctctaucgg

SEQ ID NO: 40284 - DNA, 19 bp, Artificial Sequence
  Synthetic
cacgtggucaacccugact

SEQ ID NO: 40285 - DNA, 21 bp, Artificial Sequence
  Synthetic
gtgcaugaaccaacagctguc

SEQ ID NO: 40286 - DNA, 19 bp, Artificial Sequence
  Synthetic
gatgccggutctucccaag

SEQ ID NO: 40287 - DNA, 22 bp, Artificial Sequence
  Synthetic
gcaagctugaagagccctcaut

SEQ ID NO: 40288 - DNA, 19 bp, Artificial Sequence
  Synthetic
ggtgaagagcugccugacg

SEQ ID NO: 40289 - DNA, 19 bp, Artificial Sequence
  Synthetic
aggugcacagcucagcaat

SEQ ID NO: 40290 - DNA, 21 bp, Artificial Sequence
  Synthetic
cgttugccacaagcatcucac

SEQ ID NO: 40291 - DNA, 19 bp, Artificial Sequence
  Synthetic
gtcggucaggcttcagucc

SEQ ID NO: 40292 - DNA, 17 bp, Artificial Sequence
  Synthetic
gtcgggugtcgccugag

SEQ ID NO: 40293 - DNA, 18 bp, Artificial Sequence
  Synthetic
tcttccaucccgcggtug

SEQ ID NO: 40294 - DNA, 24 bp, Artificial Sequence
  Synthetic
cccaaatugcaagacagagtugct

SEQ ID NO: 40295 - DNA, 21 bp, Artificial Sequence
  Synthetic
cacatccacutcctgcugaac

SEQ ID NO: 40296 - DNA, 21 bp, Artificial Sequence
  Synthetic
gcgcaggaacuttggtaguca

SEQ ID NO: 40297 - DNA, 23 bp, Artificial Sequence
  Synthetic
ctgcaggaucatgtccttgauct

SEQ ID NO: 40298 - DNA, 21 bp, Artificial Sequence
  Synthetic
cagctgaugctctttccuggt

SEQ ID NO: 40299 - DNA, 24 bp, Artificial Sequence
  Synthetic
gtaatgauaaggaccccacccauc

SEQ ID NO: 40300 - DNA, 20 bp, Artificial Sequence
  Synthetic
tgtctgccacuccctgguat

SEQ ID NO: 40301 - DNA, 23 bp, Artificial Sequence
  Synthetic
ggccgaaagutcttgtactccuc

SEQ ID NO: 40302 - DNA, 25 bp, Artificial Sequence
  Synthetic
ggtaaaagaacaguaaacccuggct

SEQ ID NO: 40303 - DNA, 22 bp, Artificial Sequence
  Synthetic
gtggaagaugcgattgatucgg

SEQ ID NO: 40304 - DNA, 21 bp, Artificial Sequence
  Synthetic
ggagagaacgutccccagaug

SEQ ID NO: 40305 - DNA, 22 bp, Artificial Sequence
  Synthetic
gtgactctccucgtggaactug

SEQ ID NO: 40306 - DNA, 21 bp, Artificial Sequence
  Synthetic
cactgtcccugggtgtcttuc

SEQ ID NO: 40307 - DNA, 25 bp, Artificial Sequence
  Synthetic
gcggagaugagaacaaaacctgtua

SEQ ID NO: 40308 - DNA, 22 bp, Artificial Sequence
  Synthetic
ttggccttguactcacagugac

SEQ ID NO: 40309 - DNA, 24 bp, Artificial Sequence
  Synthetic
tccttggatcugagagtgaggaut

SEQ ID NO: 40310 - DNA, 18 bp, Artificial Sequence
  Synthetic
ctaagcugcgcgcttucc

SEQ ID NO: 40311 - DNA, 21 bp, Artificial Sequence
  Synthetic
agtgacugagttcugcccaga

SEQ ID NO: 40312 - DNA, 18 bp, Artificial Sequence
  Synthetic
gacccauggcagggucaa

SEQ ID NO: 40313 - DNA, 19 bp, Artificial Sequence
  Synthetic
ctgcttccuctcccaggug

SEQ ID NO: 40314 - DNA, 21 bp, Artificial Sequence
  Synthetic
gggtgauacacaagccugacc

SEQ ID NO: 40315 - DNA, 21 bp, Artificial Sequence
  Synthetic
ggtgctgaugtcaccgaugat

SEQ ID NO: 40316 - DNA, 24 bp, Artificial Sequence
  Synthetic
ggctcctacuccatctgtatcugt

SEQ ID NO: 40317 - DNA, 20 bp, Artificial Sequence
  Synthetic
ggucactgtuggcaaacacg

SEQ ID NO: 40318 - DNA, 21 bp, Artificial Sequence
  Synthetic
ccccuccccacctgtcttuat

SEQ ID NO: 40319 - DNA, 19 bp, Artificial Sequence
  Synthetic
ccccagaccacugaagcuc

SEQ ID NO: 40320 - DNA, 24 bp, Artificial Sequence
  Synthetic
ccagaagcaugaaacactgtucaa

SEQ ID NO: 40321 - DNA, 24 bp, Artificial Sequence
  Synthetic
gagctgctgucgggaaaaatuaac

SEQ ID NO: 40322 - DNA, 26 bp, Artificial Sequence
  Synthetic
gatgtaggaagagutaatcacgugct

SEQ ID NO: 40323 - DNA, 28 bp, Artificial Sequence
  Synthetic
ctgagcutcatgtattuccaaaggaaaa

SEQ ID NO: 40324 - DNA, 26 bp, Artificial Sequence
  Synthetic
gcaccaatgutctcaaattcugagag

SEQ ID NO: 40325 - DNA, 23 bp, Artificial Sequence
  Synthetic
ggtgtguggcctctttgtaugat

SEQ ID NO: 40326 - DNA, 21 bp, Artificial Sequence
  Synthetic
ccatgcagcaautgtccagua

SEQ ID NO: 40327 - DNA, 27 bp, Artificial Sequence
  Synthetic
gcatagaguacgactggaactuaacat

SEQ ID NO: 40328 - DNA, 27 bp, Artificial Sequence
  Synthetic
catccctggcucagttaagtatttuat

SEQ ID NO: 40329 - DNA, 29 bp, Artificial Sequence
  Synthetic
ggaaagaaatugagagcagctaatcttut

SEQ ID NO: 40330 - DNA, 26 bp, Artificial Sequence
  Synthetic
gattttccatucaggttcttctgguc

SEQ ID NO: 40331 - DNA, 28 bp, Artificial Sequence
  Synthetic
cgtcattcctgauccttcatgagtauat

SEQ ID NO: 40332 - DNA, 18 bp, Artificial Sequence
  Synthetic
cutacaccuccgccacca

SEQ ID NO: 40333 - DNA, 24 bp, Artificial Sequence
  Synthetic
agttgtgacgggagutgtagttuc

SEQ ID NO: 40334 - DNA, 19 bp, Artificial Sequence
  Synthetic
ggcctguggtctgcaguat

SEQ ID NO: 40335 - DNA, 19 bp, Artificial Sequence
  Synthetic
cctcuccctccugcacaga

SEQ ID NO: 40336 - DNA, 23 bp, Artificial Sequence
  Synthetic
gggatctgugcttattctgtucc

SEQ ID NO: 40337 - DNA, 25 bp, Artificial Sequence
  Synthetic
gatactagggtugtagagggagguc

SEQ ID NO: 40338 - DNA, 20 bp, Artificial Sequence
  Synthetic
ccattccauccccacccaua

SEQ ID NO: 40339 - DNA, 22 bp, Artificial Sequence
  Synthetic
gcaaacccauggtgagaagaug

SEQ ID NO: 40340 - DNA, 21 bp, Artificial Sequence
  Synthetic
agcctcccautgaccaactuc

SEQ ID NO: 40341 - DNA, 24 bp, Artificial Sequence
  Synthetic
cctaatccuactcataggguccca

SEQ ID NO: 40342 - DNA, 19 bp, Artificial Sequence
  Synthetic
tctgacuccccttggcuct

SEQ ID NO: 40343 - DNA, 17 bp, Artificial Sequence
  Synthetic
gggcutcaggugaggga

SEQ ID NO: 40344 - DNA, 20 bp, Artificial Sequence
  Synthetic
cagaccuctgtcuccccact

SEQ ID NO: 40345 - DNA, 24 bp, Artificial Sequence
  Synthetic
tgaaagaggccaagugtatggaug

SEQ ID NO: 40346 - DNA, 18 bp, Artificial Sequence
  Synthetic
ggagccuggacagctuca

SEQ ID NO: 40347 - DNA, 17 bp, Artificial Sequence
  Synthetic
ccucgccacgtccucac

SEQ ID NO: 40348 - DNA, 21 bp, Artificial Sequence
  Synthetic
ccccagauccccagtcctaut

SEQ ID NO: 40349 - DNA, 21 bp, Artificial Sequence
  Synthetic
cccagaaugagaggugaagcg

SEQ ID NO: 40350 - DNA, 21 bp, Artificial Sequence
  Synthetic
ctggtgccuacacacccttua

SEQ ID NO: 40351 - DNA, 23 bp, Artificial Sequence
  Synthetic
gagggtugagaggttctgagtuc

SEQ ID NO: 40352 - DNA, 23 bp, Artificial Sequence
  Synthetic
gactccattuctgacagcucagg

SEQ ID NO: 40353 - DNA, 27 bp, Artificial Sequence
  Synthetic
tgtatggtcagagacutagaaatgcug

SEQ ID NO: 40354 - DNA, 20 bp, Artificial Sequence
  Synthetic
ccccugaagacgtgaucagc

SEQ ID NO: 40355 - DNA, 20 bp, Artificial Sequence
  Synthetic
ggaagcugtctcaggucagt

SEQ ID NO: 40356 - DNA, 21 bp, Artificial Sequence
  Synthetic
gctatgcuccatgccaugagg

SEQ ID NO: 40357 - DNA, 21 bp, Artificial Sequence
  Synthetic
cucgccagaaaaccttugcag

SEQ ID NO: 40358 - DNA, 20 bp, Artificial Sequence
  Synthetic
catggagtugaccctgggut

SEQ ID NO: 40359 - DNA, 24 bp, Artificial Sequence
  Synthetic
ctctctctcaguctctacctccug

SEQ ID NO: 40360 - DNA, 22 bp, Artificial Sequence
  Synthetic
tcagcagucagggatcccauat

SEQ ID NO: 40361 - DNA, 21 bp, Artificial Sequence
  Synthetic
acacgttgugcccattttcug

SEQ ID NO: 40362 - DNA, 19 bp, Artificial Sequence
  Synthetic
ctaccgccugctggaugaa

SEQ ID NO: 40363 - DNA, 21 bp, Artificial Sequence
  Synthetic
gggcugagtcaggucagagat

SEQ ID NO: 40364 - DNA, 24 bp, Artificial Sequence
  Synthetic
cgggcagagaaaucctatacagug

SEQ ID NO: 40365 - DNA, 22 bp, Artificial Sequence
  Synthetic
agaguagacaagctgugggaga

SEQ ID NO: 40366 - DNA, 21 bp, Artificial Sequence
  Synthetic
cgttggcugtatgaucgacct

SEQ ID NO: 40367 - DNA, 22 bp, Artificial Sequence
  Synthetic
ggaggtagggaugggagagtug

SEQ ID NO: 40368 - DNA, 23 bp, Artificial Sequence
  Synthetic
tctgaggttcuttgccatctgug

SEQ ID NO: 40369 - DNA, 27 bp, Artificial Sequence
  Synthetic
aaagagaaacucaaagaagagcacugt

SEQ ID NO: 40370 - DNA, 22 bp, Artificial Sequence
  Synthetic
cctggtggagaugcttttccug

SEQ ID NO: 40371 - DNA, 21 bp, Artificial Sequence
  Synthetic
cagtccctuctttgccgtuct

SEQ ID NO: 40372 - DNA, 21 bp, Artificial Sequence
  Synthetic
ggcatgaauattgcgguggga

SEQ ID NO: 40373 - DNA, 24 bp, Artificial Sequence
  Synthetic
aaaattgagggutactgguccaca

SEQ ID NO: 40374 - DNA, 20 bp, Artificial Sequence
  Synthetic
gcagtgaccgcutctgtcuc

SEQ ID NO: 40375 - DNA, 21 bp, Artificial Sequence
  Synthetic
ctaaattgcugtggccuggac

SEQ ID NO: 40376 - DNA, 20 bp, Artificial Sequence
  Synthetic
gggcaauccaagaggtcucc

SEQ ID NO: 40377 - DNA, 19 bp, Artificial Sequence
  Synthetic
ccaccugcaggaagtggut

SEQ ID NO: 40378 - DNA, 20 bp, Artificial Sequence
  Synthetic
tggaggaagagaugguggct

SEQ ID NO: 40379 - DNA, 18 bp, Artificial Sequence
  Synthetic
gtgcagcagcugagctug

SEQ ID NO: 40380 - DNA, 20 bp, Artificial Sequence
  Synthetic
catcacgcucttccctccug

SEQ ID NO: 40381 - DNA, 20 bp, Artificial Sequence
  Synthetic
cagcatccucagtgcctugt

SEQ ID NO: 40382 - DNA, 23 bp, Artificial Sequence
  Synthetic
acagugaagaaccgagacttugt

SEQ ID NO: 40383 - DNA, 24 bp, Artificial Sequence
  Synthetic
cctcatcttccutttcctgtgcug

SEQ ID NO: 40384 - DNA, 25 bp, Artificial Sequence
  Synthetic
gaagttucaaggaagtcctgauggt

SEQ ID NO: 40385 - DNA, 23 bp, Artificial Sequence
  Synthetic
gcttttaugaggaggccauagcg

SEQ ID NO: 40386 - DNA, 24 bp, Artificial Sequence
  Synthetic
tctctgatcucagagttcctgcut

SEQ ID NO: 40387 - DNA, 24 bp, Artificial Sequence
  Synthetic
gtctcgagagaaagutagcauggg

SEQ ID NO: 40388 - DNA, 23 bp, Artificial Sequence
  Synthetic
cctcaugagcctgtuggagaaag

SEQ ID NO: 40389 - DNA, 22 bp, Artificial Sequence
  Synthetic
atctgtcctcaugccctcttug

SEQ ID NO: 40390 - DNA, 21 bp, Artificial Sequence
  Synthetic
gtacaccatcucaccgtccuc

SEQ ID NO: 40391 - DNA, 27 bp, Artificial Sequence
  Synthetic
agggaatgttatugtatcctgagggua

SEQ ID NO: 40392 - DNA, 17 bp, Artificial Sequence
  Synthetic
ctgaccacccugccugt

SEQ ID NO: 40393 - DNA, 18 bp, Artificial Sequence
  Synthetic
gtgccaggagugggtuct

SEQ ID NO: 40394 - DNA, 21 bp, Artificial Sequence
  Synthetic
atgggtcuggtctctgacuga

SEQ ID NO: 40395 - DNA, 23 bp, Artificial Sequence
  Synthetic
gtgaccagugactccatactucc

SEQ ID NO: 40396 - DNA, 20 bp, Artificial Sequence
  Synthetic
aggagaacgccaaugtggug

SEQ ID NO: 40397 - DNA, 20 bp, Artificial Sequence
  Synthetic
cgggtugccctatugaggag

SEQ ID NO: 40398 - DNA, 20 bp, Artificial Sequence
  Synthetic
gcagagcagucactgagugg

SEQ ID NO: 40399 - DNA, 21 bp, Artificial Sequence
  Synthetic
gcatcactccutcgccaagut

SEQ ID NO: 40400 - DNA, 23 bp, Artificial Sequence
  Synthetic
ccaaagatgucagcatcctucgt

SEQ ID NO: 40401 - DNA, 20 bp, Artificial Sequence
  Synthetic
ctgctcuaccgtgacccauc

SEQ ID NO: 40402 - DNA, 17 bp, Artificial Sequence
  Synthetic
gtgugcgccgctcttug

SEQ ID NO: 40403 - DNA, 17 bp, Artificial Sequence
  Synthetic
ccugccccacccugaag

SEQ ID NO: 40404 - DNA, 22 bp, Artificial Sequence
  Synthetic
atttgtgtguccccctcttgut

SEQ ID NO: 40405 - DNA, 22 bp, Artificial Sequence
  Synthetic
cctccacauaggccatttuggg

SEQ ID NO: 40406 - DNA, 24 bp, Artificial Sequence
  Synthetic
cugggagauagagaggaagattuc

SEQ ID NO: 40407 - DNA, 24 bp, Artificial Sequence
  Synthetic
tgaggguttcttggauaggaggac

SEQ ID NO: 40408 - DNA, 22 bp, Artificial Sequence
  Synthetic
ctagccacauggtcagggttut

SEQ ID NO: 40409 - DNA, 23 bp, Artificial Sequence
  Synthetic
gccttctcuatcgtccatuccca

SEQ ID NO: 40410 - DNA, 20 bp, Artificial Sequence
  Synthetic
cctcccatcutccccttguc

SEQ ID NO: 40411 - DNA, 21 bp, Artificial Sequence
  Synthetic
ggctagautcagaggaugcca

SEQ ID NO: 40412 - DNA, 20 bp, Artificial Sequence
  Synthetic
ccagagcccugatttcuggt

SEQ ID NO: 40413 - DNA, 19 bp, Artificial Sequence
  Synthetic
ctttgccgggugtgttcug

SEQ ID NO: 40414 - DNA, 22 bp, Artificial Sequence
  Synthetic
cagcauccttcccaucagaaca

SEQ ID NO: 40415 - DNA, 23 bp, Artificial Sequence
  Synthetic
gggagauaaagggtccaaugagg

SEQ ID NO: 40416 - DNA, 23 bp, Artificial Sequence
  Synthetic
tctctgtcccugtctcctcuaat

SEQ ID NO: 40417 - DNA, 22 bp, Artificial Sequence
  Synthetic
ctgggagcuatttctucagggt

SEQ ID NO: 40418 - DNA, 23 bp, Artificial Sequence
  Synthetic
gtctcctagacuctccgatucca

SEQ ID NO: 40419 - DNA, 20 bp, Artificial Sequence
  Synthetic
gcagugccacagtggtguag

SEQ ID NO: 40420 - DNA, 22 bp, Artificial Sequence
  Synthetic
cactgcaugggcctattugaga

SEQ ID NO: 40421 - DNA, 20 bp, Artificial Sequence
  Synthetic
cgatggcuccctctcctuac

SEQ ID NO: 40422 - DNA, 21 bp, Artificial Sequence
  Synthetic
ggtgauggcttgacatuccct

SEQ ID NO: 40423 - DNA, 19 bp, Artificial Sequence
  Synthetic
gggcagcgugatctcgaug

SEQ ID NO: 40424 - DNA, 21 bp, Artificial Sequence
  Synthetic
cacctcugaccacctcaacuc

SEQ ID NO: 40425 - DNA, 21 bp, Artificial Sequence
  Synthetic
cccttucagaccatcugccaa

SEQ ID NO: 40426 - DNA, 19 bp, Artificial Sequence
  Synthetic
tgtucgcacagcccatugt

SEQ ID NO: 40427 - DNA, 20 bp, Artificial Sequence
  Synthetic
ggatacagggcguagagguc

SEQ ID NO: 40428 - DNA, 21 bp, Artificial Sequence
  Synthetic
ccccauctcctccuccaagat

SEQ ID NO: 40429 - DNA, 18 bp, Artificial Sequence
  Synthetic
cggctccuctggttgugg

SEQ ID NO: 40430 - DNA, 19 bp, Artificial Sequence
  Synthetic
gctgaggcaugggatuggg

SEQ ID NO: 40431 - DNA, 20 bp, Artificial Sequence
  Synthetic
tgggcgcacacauatucagg

SEQ ID NO: 40432 - DNA, 21 bp, Artificial Sequence
  Synthetic
gccuggaaggaaagggttgug

SEQ ID NO: 40433 - DNA, 22 bp, Artificial Sequence
  Synthetic
tgcutcttttgctugcagagga

SEQ ID NO: 40434 - DNA, 19 bp, Artificial Sequence
  Synthetic
gctggcagauggctctgua

SEQ ID NO: 40435 - DNA, 20 bp, Artificial Sequence
  Synthetic
ccacccacaucctugaagcc

SEQ ID NO: 40436 - DNA, 17 bp, Artificial Sequence
  Synthetic
gcaugggaggucgggaa

SEQ ID NO: 40437 - DNA, 18 bp, Artificial Sequence
  Synthetic
cccagcccuatccagcuc

SEQ ID NO: 40438 - DNA, 22 bp, Artificial Sequence
  Synthetic
acccugcccagaagctcttaua

SEQ ID NO: 40439 - DNA, 22 bp, Artificial Sequence
  Synthetic
ctttttguggacaagcacugca

SEQ ID NO: 40440 - DNA, 22 bp, Artificial Sequence
  Synthetic
gggcagaagugagaatgugagg

SEQ ID NO: 40441 - DNA, 22 bp, Artificial Sequence
  Synthetic
aagagtccagugcacatgugag

SEQ ID NO: 40442 - DNA, 23 bp, Artificial Sequence
  Synthetic
gguaacagagguaaagggactuc

SEQ ID NO: 40443 - DNA, 23 bp, Artificial Sequence
  Synthetic
agaagagguccactcgaaccuac

SEQ ID NO: 40444 - DNA, 22 bp, Artificial Sequence
  Synthetic
ctgtcccugactgtcattgugt

SEQ ID NO: 40445 - DNA, 20 bp, Artificial Sequence
  Synthetic
cccagatccucagccccuag

SEQ ID NO: 40446 - DNA, 23 bp, Artificial Sequence
  Synthetic
actgttcauctccccuagcacat

SEQ ID NO: 40447 - DNA, 20 bp, Artificial Sequence
  Synthetic
ccaagucacaccugaaccgt

SEQ ID NO: 40448 - DNA, 23 bp, Artificial Sequence
  Synthetic
gcaaggaugtcatugaagagcag

SEQ ID NO: 40449 - DNA, 21 bp, Artificial Sequence
  Synthetic
ggaauccccgagaagggauca

SEQ ID NO: 40450 - DNA, 17 bp, Artificial Sequence
  Synthetic
ggcgcacagucgccuat

SEQ ID NO: 40451 - DNA, 20 bp, Artificial Sequence
  Synthetic
ggagcacucgggugacaaac

SEQ ID NO: 40452 - DNA, 20 bp, Artificial Sequence
  Synthetic
cucctgggcuggaaagagag

SEQ ID NO: 40453 - DNA, 26 bp, Artificial Sequence
  Synthetic
ttgagttucaggaacatgucgaagaa

SEQ ID NO: 40454 - DNA, 22 bp, Artificial Sequence
  Synthetic
agagaatugaggctcuccaggt

SEQ ID NO: 40455 - DNA, 19 bp, Artificial Sequence
  Synthetic
cacatgcuccgacaggtug

SEQ ID NO: 40456 - DNA, 17 bp, Artificial Sequence
  Synthetic
cgcggugaccccttgua

SEQ ID NO: 40457 - DNA, 18 bp, Artificial Sequence
  Synthetic
ctcgggcuccgagatcug

SEQ ID NO: 40458 - DNA, 17 bp, Artificial Sequence
  Synthetic
ctgcgaggccucagcua

SEQ ID NO: 40459 - DNA, 17 bp, Artificial Sequence
  Synthetic
gagctcggucaccguca

SEQ ID NO: 40460 - DNA, 27 bp, Artificial Sequence
  Synthetic
gggaaauaagagagaaaggagaugaga

SEQ ID NO: 40461 - DNA, 21 bp, Artificial Sequence
  Synthetic
cuactcuaggagggaggcagt

SEQ ID NO: 40462 - DNA, 22 bp, Artificial Sequence
  Synthetic
ctgatctgugagcgctttcuct

SEQ ID NO: 40463 - DNA, 25 bp, Artificial Sequence
  Synthetic
ggaggaacccugaaattctgauagg

SEQ ID NO: 40464 - DNA, 24 bp, Artificial Sequence
  Synthetic
cgatgaggaugagaacatggtgua

SEQ ID NO: 40465 - DNA, 19 bp, Artificial Sequence
  Synthetic
ccagccaauaagccctugc

SEQ ID NO: 40466 - DNA, 24 bp, Artificial Sequence
  Synthetic
gaaaaacaguggagttucagccaa

SEQ ID NO: 40467 - DNA, 18 bp, Artificial Sequence
  Synthetic
gcctgtgauggcctggug

SEQ ID NO: 40468 - DNA, 22 bp, Artificial Sequence
  Synthetic
ggtgactggaguctgacacuca

SEQ ID NO: 40469 - DNA, 20 bp, Artificial Sequence
  Synthetic
gacgtugggaaccctccuaa

SEQ ID NO: 40470 - DNA, 27 bp, Artificial Sequence
  Synthetic
ggacacuacaacaacttcttcttugct

SEQ ID NO: 40471 - DNA, 22 bp, Artificial Sequence
  Synthetic
cttatccctucaccacccacug

SEQ ID NO: 40472 - DNA, 22 bp, Artificial Sequence
  Synthetic
catgtctucagccctgcctauc

SEQ ID NO: 40473 - DNA, 23 bp, Artificial Sequence
  Synthetic
ctgtagagcucgtattcgucacc

SEQ ID NO: 40474 - DNA, 21 bp, Artificial Sequence
  Synthetic
gtctgaaccaggucagagguc

SEQ ID NO: 40475 - DNA, 22 bp, Artificial Sequence
  Synthetic
ctgtgaguggcaagagacauca

SEQ ID NO: 40476 - DNA, 29 bp, Artificial Sequence
  Synthetic
gcaacatagcaagacutcctctctacuat

SEQ ID NO: 40477 - DNA, 22 bp, Artificial Sequence
  Synthetic
cccactgucctcccatuaacac

SEQ ID NO: 40478 - DNA, 21 bp, Artificial Sequence
  Synthetic
ccagcuggtgattgttuccgt

SEQ ID NO: 40479 - DNA, 23 bp, Artificial Sequence
  Synthetic
ccactccuccaaaattucagcag

SEQ ID NO: 40480 - DNA, 21 bp, Artificial Sequence
  Synthetic
ggtggtctccuctgctctcut

SEQ ID NO: 40481 - DNA, 20 bp, Artificial Sequence
  Synthetic
ggttgatgauctggcctugc

SEQ ID NO: 40482 - DNA, 21 bp, Artificial Sequence
  Synthetic
tctcctctcuggtcccaacug

SEQ ID NO: 40483 - DNA, 21 bp, Artificial Sequence
  Synthetic
ccttuggcccaaacacaggua

SEQ ID NO: 40484 - DNA, 20 bp, Artificial Sequence
  Synthetic
gtactgcccacucggcuaac

SEQ ID NO: 40485 - DNA, 20 bp, Artificial Sequence
  Synthetic
caagguacagggcatgcauc

SEQ ID NO: 40486 - DNA, 19 bp, Artificial Sequence
  Synthetic
ttcgcugccacactugagt

SEQ ID NO: 40487 - DNA, 20 bp, Artificial Sequence
  Synthetic
gcaggaagguggcaggatug

SEQ ID NO: 40488 - DNA, 23 bp, Artificial Sequence
  Synthetic
ccactccuccttccctagtucat

SEQ ID NO: 40489 - DNA, 28 bp, Artificial Sequence
  Synthetic
cctgtttatcccaguaattgacctcauc

SEQ ID NO: 40490 - DNA, 17 bp, Artificial Sequence
  Synthetic
gcccacugccccatguc

SEQ ID NO: 40491 - DNA, 18 bp, Artificial Sequence
  Synthetic
gtgggcugagcaggtcuc

SEQ ID NO: 40492 - DNA, 20 bp, Artificial Sequence
  Synthetic
gcuggagcgaaaggatuggg

SEQ ID NO: 40493 - DNA, 21 bp, Artificial Sequence
  Synthetic
ccacccgutttgaaccucagt

SEQ ID NO: 40494 - DNA, 27 bp, Artificial Sequence
  Synthetic
acagtgagaautagctgttuacacaca

SEQ ID NO: 40495 - DNA, 22 bp, Artificial Sequence
  Synthetic
gtttctctgacgucccccauag

SEQ ID NO: 40496 - DNA, 21 bp, Artificial Sequence
  Synthetic
cttctugagaagcctggcuca

SEQ ID NO: 40497 - DNA, 24 bp, Artificial Sequence
  Synthetic
tgacgaaguatgggcttuggaaat

SEQ ID NO: 40498 - DNA, 19 bp, Artificial Sequence
  Synthetic
ccggcuacaaggaccctuc

SEQ ID NO: 40499 - DNA, 17 bp, Artificial Sequence
  Synthetic
gcgctcccugaacccua

SEQ ID NO: 40500 - DNA, 19 bp, Artificial Sequence
  Synthetic
ccgcaaaugcgcagcuaag

SEQ ID NO: 40501 - DNA, 21 bp, Artificial Sequence
  Synthetic
acctgtcccutctctcuccag

SEQ ID NO: 40502 - DNA, 22 bp, Artificial Sequence
  Synthetic
cttccctccuccaggtgtcuat

SEQ ID NO: 40503 - DNA, 20 bp, Artificial Sequence
  Synthetic
cggacucaccgtcctuacct

SEQ ID NO: 40504 - DNA, 18 bp, Artificial Sequence
  Synthetic
tggttguccgtgcggaug

SEQ ID NO: 40505 - DNA, 21 bp, Artificial Sequence
  Synthetic
gautcctagccuggaaccagt

SEQ ID NO: 40506 - DNA, 24 bp, Artificial Sequence
  Synthetic
caagactgatccugcaactccaut

SEQ ID NO: 40507 - DNA, 21 bp, Artificial Sequence
  Synthetic
ctcacatcugtgtgtctugcg

SEQ ID NO: 40508 - DNA, 22 bp, Artificial Sequence
  Synthetic
caccaagucgaagttgcatgug

SEQ ID NO: 40509 - DNA, 21 bp, Artificial Sequence
  Synthetic
agacttcatucagcggtugct

SEQ ID NO: 40510 - DNA, 22 bp, Artificial Sequence
  Synthetic
ggcgtcugcccatagaacatut

SEQ ID NO: 40511 - DNA, 21 bp, Artificial Sequence
  Synthetic
gctctgcuccttttgguccag

SEQ ID NO: 40512 - DNA, 22 bp, Artificial Sequence
  Synthetic
ccagggaacaagcutgctaucc

SEQ ID NO: 40513 - DNA, 21 bp, Artificial Sequence
  Synthetic
cuaccaaccacccaugacgaa

SEQ ID NO: 40514 - DNA, 18 bp, Artificial Sequence
  Synthetic
tcaccucgcccctctuca

SEQ ID NO: 40515 - DNA, 17 bp, Artificial Sequence
  Synthetic
gugcagaagcgggugga

SEQ ID NO: 40516 - DNA, 22 bp, Artificial Sequence
  Synthetic
tcagaatcucgaagtcguccct

SEQ ID NO: 40517 - DNA, 25 bp, Artificial Sequence
  Synthetic
agaacctuacacggtgtttatgugg

SEQ ID NO: 40518 - DNA, 17 bp, Artificial Sequence
  Synthetic
cccgaggguaggcacuc

SEQ ID NO: 40519 - DNA, 17 bp, Artificial Sequence
  Synthetic
gccatggugctgccugt

SEQ ID NO: 40520 - DNA, 22 bp, Artificial Sequence
  Synthetic
atggcaaccaggauggaatuct

SEQ ID NO: 40521 - DNA, 20 bp, Artificial Sequence
  Synthetic
ctcacgggcauagacgtcug

SEQ ID NO: 40522 - DNA, 20 bp, Artificial Sequence
  Synthetic
acccccauctccgctctuat

SEQ ID NO: 40523 - DNA, 23 bp, Artificial Sequence
  Synthetic
gtaggaauctgagaugcccagag

SEQ ID NO: 40524 - DNA, 20 bp, Artificial Sequence
  Synthetic
cagagucccctttgccugag

SEQ ID NO: 40525 - DNA, 21 bp, Artificial Sequence
  Synthetic
gcaccaugggagaaagguagg

SEQ ID NO: 40526 - DNA, 25 bp, Artificial Sequence
  Synthetic
gtgcctggaaguttcagatcttgua

SEQ ID NO: 40527 - DNA, 19 bp, Artificial Sequence
  Synthetic
cugtgagctgucccaggag

SEQ ID NO: 40528 - DNA, 23 bp, Artificial Sequence
  Synthetic
gaggagacacagcuggatcttuc

SEQ ID NO: 40529 - DNA, 22 bp, Artificial Sequence
  Synthetic
gacagtcagaauccagcacuct

SEQ ID NO: 40530 - DNA, 25 bp, Artificial Sequence
  Synthetic
gggtagggauttagatacucacacc

SEQ ID NO: 40531 - DNA, 18 bp, Artificial Sequence
  Synthetic
gcgugagggacgucacac

SEQ ID NO: 40532 - DNA, 23 bp, Artificial Sequence
  Synthetic
cagtgtcccuaagaagagaccug

SEQ ID NO: 40533 - DNA, 20 bp, Artificial Sequence
  Synthetic
cctcccucgaagcggacaua

SEQ ID NO: 40534 - DNA, 18 bp, Artificial Sequence
  Synthetic
cttccuccctcccuccca

SEQ ID NO: 40535 - DNA, 18 bp, Artificial Sequence
  Synthetic
catgacgcagugggcuca

SEQ ID NO: 40536 - DNA, 17 bp, Artificial Sequence
  Synthetic
agcagcugcaggaccuc

SEQ ID NO: 40537 - DNA, 19 bp, Artificial Sequence
  Synthetic
gcttcucccctccaugacc

SEQ ID NO: 40538 - DNA, 17 bp, Artificial Sequence
  Synthetic
gggccuggtcgcugaac

SEQ ID NO: 40539 - DNA, 18 bp, Artificial Sequence
  Synthetic
cctggguctggcccauac

SEQ ID NO: 40540 - DNA, 24 bp, Artificial Sequence
  Synthetic
cttctcctcaccuaacccatcauc

SEQ ID NO: 40541 - DNA, 21 bp, Artificial Sequence
  Synthetic
cttggacacacgcagucatuc

SEQ ID NO: 40542 - DNA, 18 bp, Artificial Sequence
  Synthetic
gcugtgagaugcggcact

SEQ ID NO: 40543 - DNA, 22 bp, Artificial Sequence
  Synthetic
cccagagcutaaaccgaaugga

SEQ ID NO: 40544 - DNA, 23 bp, Artificial Sequence
  Synthetic
gggcttcucttctctgtcuacca

SEQ ID NO: 40545 - DNA, 23 bp, Artificial Sequence
  Synthetic
cagcugaaccagaucaaaaaccc

SEQ ID NO: 40546 - DNA, 28 bp, Artificial Sequence
  Synthetic
tctactatcaucacacaaactaguccca

SEQ ID NO: 40547 - DNA, 28 bp, Artificial Sequence
  Synthetic
ctctcaagtcugacaattgttttuccag

SEQ ID NO: 40548 - DNA, 25 bp, Artificial Sequence
  Synthetic
ctagggagaaguagatcctagcuca

SEQ ID NO: 40549 - DNA, 24 bp, Artificial Sequence
  Synthetic
caaagtgcaccuctgactcctaut

SEQ ID NO: 40550 - DNA, 24 bp, Artificial Sequence
  Synthetic
agaaaaacagaagcuggcagctua

SEQ ID NO: 40551 - DNA, 22 bp, Artificial Sequence
  Synthetic
aataaactgcucacccgtcucc

SEQ ID NO: 40552 - DNA, 24 bp, Artificial Sequence
  Synthetic
aagggaatgguggctttgttttua

SEQ ID NO: 40553 - DNA, 25 bp, Artificial Sequence
  Synthetic
accaaggtgguctttgctttctuag

SEQ ID NO: 40554 - DNA, 23 bp, Artificial Sequence
  Synthetic
ctgcttcuggtttccatugcaag

SEQ ID NO: 40555 - DNA, 26 bp, Artificial Sequence
  Synthetic
tggtcgtgtcugctcttcttttauag

SEQ ID NO: 40556 - DNA, 24 bp, Artificial Sequence
  Synthetic
gacacatgcacutaaaagcauccc

SEQ ID NO: 40557 - DNA, 22 bp, Artificial Sequence
  Synthetic
gtaagtgguagttggcctugga

SEQ ID NO: 40558 - DNA, 21 bp, Artificial Sequence
  Synthetic
gttgaagugggatcccuccaa

SEQ ID NO: 40559 - DNA, 25 bp, Artificial Sequence
  Synthetic
gcttcacaaguccttcagttcttut

SEQ ID NO: 40560 - DNA, 19 bp, Artificial Sequence
  Synthetic
gtcuggagacagccagguc

SEQ ID NO: 40561 - DNA, 25 bp, Artificial Sequence
  Synthetic
ccccttttcgcugttcctgatatut

SEQ ID NO: 40562 - DNA, 27 bp, Artificial Sequence
  Synthetic
auttttaaatcucacagggacagagct

SEQ ID NO: 40563 - DNA, 24 bp, Artificial Sequence
  Synthetic
cctgagcugagaaggctttucaat

SEQ ID NO: 40564 - DNA, 21 bp, Artificial Sequence
  Synthetic
ccacacgcucgtcttctguaa

SEQ ID NO: 40565 - DNA, 23 bp, Artificial Sequence
  Synthetic
cccctccutttcttgtugaccag

SEQ ID NO: 40566 - DNA, 29 bp, Artificial Sequence
  Synthetic
agctgaguacagaaaaatuagacaaaggg

SEQ ID NO: 40567 - DNA, 27 bp, Artificial Sequence
  Synthetic
ctcttagtgacuccaggatcttttugg

SEQ ID NO: 40568 - DNA, 29 bp, Artificial Sequence
  Synthetic
aaaagaggcauagtcacaataaagucagt

SEQ ID NO: 40569 - DNA, 22 bp, Artificial Sequence
  Synthetic
tgacacgcccutctctgtttut

SEQ ID NO: 40570 - DNA, 26 bp, Artificial Sequence
  Synthetic
gccaaagccauagtagtagtcaucac

SEQ ID NO: 40571 - DNA, 30 bp, Artificial Sequence; identical to SEQ ID NO: 28337
  Synthetic

SEQ ID NO: 40572 - DNA, 21 bp, Artificial Sequence
  Synthetic
cctcctucccgagtagucact

SEQ ID NO: 40573 - DNA, 24 bp, Artificial Sequence
  Synthetic
cgacgagtgugacacatactucaa

SEQ ID NO: 40574 - DNA, 20 bp, Artificial Sequence
  Synthetic
ggagaagggcucctacctug

SEQ ID NO: 40575 - DNA, 25 bp, Artificial Sequence
  Synthetic
ctccaaucggcggagtatatuagag

SEQ ID NO: 40576 - DNA, 22 bp, Artificial Sequence
  Synthetic
gaaatuggacagccugacacac

SEQ ID NO: 40577 - DNA, 21 bp, Artificial Sequence
  Synthetic
agaacucccacugaggaacct

SEQ ID NO: 40578 - DNA, 19 bp, Artificial Sequence
  Synthetic
gauggtacccuggcccaac

SEQ ID NO: 40579 - DNA, 18 bp, Artificial Sequence
  Synthetic
cctgaggcuccctgcuca

SEQ ID NO: 40580 - DNA, 22 bp, Artificial Sequence
  Synthetic
gggttggautagctcugcagat

SEQ ID NO: 40581 - DNA, 24 bp, Artificial Sequence
  Synthetic
tgttctttccutcttctgcctugg

SEQ ID NO: 40582 - DNA, 22 bp, Artificial Sequence
  Synthetic
ggattgagtuccaggctgtucc

SEQ ID NO: 40583 - DNA, 25 bp, Artificial Sequence
  Synthetic
agttcagaccuccgaatagguagac

SEQ ID NO: 40584 - DNA, 22 bp, Artificial Sequence
  Synthetic
cccctcacutacagcctctuct

SEQ ID NO: 40585 - DNA, 19 bp, Artificial Sequence
  Synthetic
ggtgcccacuccaaggauc

SEQ ID NO: 40586 - DNA, 22 bp, Artificial Sequence
  Synthetic
ggagtagtgagugcccgaagua

SEQ ID NO: 40587 - DNA, 22 bp, Artificial Sequence
  Synthetic
cagauctgccugacaaacacca

SEQ ID NO: 40588 - DNA, 18 bp, Artificial Sequence
  Synthetic
gggagggugagctgguca

SEQ ID NO: 40589 - DNA, 19 bp, Artificial Sequence
  Synthetic
tgtccccugccaacucaga

SEQ ID NO: 40590 - DNA, 23 bp, Artificial Sequence
  Synthetic
ctgtcaccugaggtggtgaatua

SEQ ID NO: 40591 - DNA, 21 bp, Artificial Sequence
  Synthetic
gugggaccacctuaccaagac

SEQ ID NO: 40592 - DNA, 25 bp, Artificial Sequence
  Synthetic
ccctaaacaacgutctatcuggcaa

SEQ ID NO: 40593 - DNA, 21 bp, Artificial Sequence
  Synthetic
gccagcacucagacacacuaa

SEQ ID NO: 40594 - DNA, 21 bp, Artificial Sequence
  Synthetic
ttgactgggacuccctctcut

SEQ ID NO: 40595 - DNA, 20 bp, Artificial Sequence
  Synthetic
tgccttttcuggccttcugg

SEQ ID NO: 40596 - DNA, 18 bp, Artificial Sequence
  Synthetic
gggccttuagcccaaguc

SEQ ID NO: 40597 - DNA, 18 bp, Artificial Sequence
  Synthetic
gtcgtguggctgcaggua

SEQ ID NO: 40598 - DNA, 22 bp, Artificial Sequence
  Synthetic
cagtggaaagccucgtacucaa

SEQ ID NO: 40599 - DNA, 22 bp, Artificial Sequence
  Synthetic
aatgagatuaaggcccgctcug

SEQ ID NO: 40600 - DNA, 20 bp, Artificial Sequence
  Synthetic
cagcugggccgagttctuaa

SEQ ID NO: 40601 - DNA, 17 bp, Artificial Sequence
  Synthetic
gagcugcggatctugcg

SEQ ID NO: 40602 - DNA, 21 bp, Artificial Sequence
  Synthetic
gcttugaaagcccctccatuc

SEQ ID NO: 40603 - DNA, 20 bp, Artificial Sequence
  Synthetic
caucacaccccacgaguaca

SEQ ID NO: 40604 - DNA, 20 bp, Artificial Sequence
  Synthetic
cgggaagcugtcctttuggg

SEQ ID NO: 40605 - DNA, 18 bp, Artificial Sequence
  Synthetic
gggccaccaaugccaaug

SEQ ID NO: 40606 - DNA, 20 bp, Artificial Sequence
  Synthetic
cctctgcuttggccaaucct

SEQ ID NO: 40607 - DNA, 24 bp, Artificial Sequence
  Synthetic
cgctgttctcuttggtgtcatuca

SEQ ID NO: 40608 - DNA, 27 bp, Artificial Sequence
  Synthetic
tctagagatttcacugtgtctgcatug

SEQ ID NO: 40609 - DNA, 21 bp, Artificial Sequence
  Synthetic
ggccaccuccgttgtgaauaa

SEQ ID NO: 40610 - DNA, 24 bp, Artificial Sequence
  Synthetic
gccaggattuccttgggaaagaut

SEQ ID NO: 40611 - DNA, 26 bp, Artificial Sequence
  Synthetic
atccataugcagattgattctuggct

SEQ ID NO: 40612 - DNA, 20 bp, Artificial Sequence
  Synthetic
gtccgcucgtggatcugaag

SEQ ID NO: 40613 - DNA, 19 bp, Artificial Sequence
  Synthetic
ccgccgaccuatgucaagg

SEQ ID NO: 40614 - DNA, 22 bp, Artificial Sequence
  Synthetic
tgcttcaagucatactcuccgt

SEQ ID NO: 40615 - DNA, 25 bp, Artificial Sequence
  Synthetic
gatatccuggaaaccacatcctucc

SEQ ID NO: 40616 - DNA, 21 bp, Artificial Sequence
  Synthetic
tctccacggaaccgutttcuc

SEQ ID NO: 40617 - DNA, 24 bp, Artificial Sequence
  Synthetic
cgctatcugccatgatgatgucat

SEQ ID NO: 40618 - DNA, 24 bp, Artificial Sequence
  Synthetic
catgtgcauccgaatatgttgcug

SEQ ID NO: 40619 - DNA, 22 bp, Artificial Sequence
  Synthetic
tcttaagcugtcagagcuccct

SEQ ID NO: 40620 - DNA, 19 bp, Artificial Sequence
  Synthetic
cuccctuggaagccaccag

SEQ ID NO: 40621 - DNA, 28 bp, Artificial Sequence
  Synthetic
ccatagaugaaccgagtctttcttuaga

SEQ ID NO: 40622 - DNA, 19 bp, Artificial Sequence
  Synthetic
gttgcccutggtggugaag

SEQ ID NO: 40623 - DNA, 18 bp, Artificial Sequence
  Synthetic
ccactguggcgcuagaca

SEQ ID NO: 40624 - DNA, 18 bp, Artificial Sequence
  Synthetic
agggatgutggcgugagg

SEQ ID NO: 40625 - DNA, 18 bp, Artificial Sequence
  Synthetic
gcagauccagcucaccga

SEQ ID NO: 40626 - DNA, 24 bp, Artificial Sequence
  Synthetic
gtcacattagugttggccacttug

SEQ ID NO: 40627 - DNA, 19 bp, Artificial Sequence
  Synthetic
caccagucccggcaguaag

SEQ ID NO: 40628 - DNA, 25 bp, Artificial Sequence
  Synthetic
gaactcagagaugctgaagaacucc

SEQ ID NO: 40629 - DNA, 26 bp, Artificial Sequence
  Synthetic
catcttttactugggcagagtcctua

SEQ ID NO: 40630 - DNA, 21 bp, Artificial Sequence
  Synthetic
gtcctccuccgagttgatgug

SEQ ID NO: 40631 - DNA, 23 bp, Artificial Sequence
  Synthetic
tcagggcucatgataaaucgcaa

SEQ ID NO: 40632 - DNA, 17 bp, Artificial Sequence
  Synthetic
cgugcgaggcgatuggt

SEQ ID NO: 40633 - DNA, 23 bp, Artificial Sequence
  Synthetic
gaaattgatgaugccctgcacug

SEQ ID NO: 40634 - DNA, 24 bp, Artificial Sequence
  Synthetic
ggctgctttutacttcactgugag

SEQ ID NO: 40635 - DNA, 22 bp, Artificial Sequence
  Synthetic
gaacaaguatgggucaccagca

SEQ ID NO: 40636 - DNA, 27 bp, Artificial Sequence
  Synthetic
gccctaatccauctgatgcttttucat

SEQ ID NO: 40637 - DNA, 29 bp, Artificial Sequence
  Synthetic
gcgactaacaaucaaagtgaaaagauaca

SEQ ID NO: 40638 - DNA, 23 bp, Artificial Sequence
  Synthetic
cgtttggctugtggtgtaatugg

SEQ ID NO: 40639 - DNA, 29 bp, Artificial Sequence
  Synthetic
cagtttctcacuacaggtacttuaaagca

SEQ ID NO: 40640 - DNA, 21 bp, Artificial Sequence
  Synthetic
cccuccaagccaaagttgaug

SEQ ID NO: 40641 - DNA, 24 bp, Artificial Sequence
  Synthetic
ttttcctgccagucctctacaaug

SEQ ID NO: 40642 - DNA, 23 bp, Artificial Sequence
  Synthetic
gagaaagguaccaagcuaacauc

SEQ ID NO: 40643 - DNA, 26 bp, Artificial Sequence
  Synthetic
cttcagcacaaaauattgcuccaaca

SEQ ID NO: 40644 - DNA, 26 bp, Artificial Sequence
  Synthetic
ggaaccacugacagtctaucacaaaa

SEQ ID NO: 40645 - DNA, 21 bp, Artificial Sequence
  Synthetic
cttccugagacgaagcctucc

SEQ ID NO: 40646 - DNA, 22 bp, Artificial Sequence
  Synthetic
catcggacucgatgtagacgut

SEQ ID NO: 40647 - DNA, 20 bp, Artificial Sequence
  Synthetic
gccctttcugaccaagcugt

SEQ ID NO: 40648 - DNA, 19 bp, Artificial Sequence
  Synthetic
gagcggccuttgctcttug

SEQ ID NO: 40649 - DNA, 17 bp, Artificial Sequence
  Synthetic
ccucagaagccggcgua

SEQ ID NO: 40650 - DNA, 21 bp, Artificial Sequence
  Synthetic
ggagcuccaccctctagucat

SEQ ID NO: 40651 - DNA, 22 bp, Artificial Sequence
  Synthetic
catagcgcuccaggttgtaguc

SEQ ID NO: 40652 - DNA, 20 bp, Artificial Sequence
  Synthetic
ccacccuaccccuggagaaa

SEQ ID NO: 40653 - DNA, 20 bp, Artificial Sequence
  Synthetic
tctgaggccutcctctuggt

SEQ ID NO: 40654 - DNA, 17 bp, Artificial Sequence
  Synthetic
cccagcucccccatuca

SEQ ID NO: 40655 - DNA, 18 bp, Artificial Sequence
  Synthetic
tctgaccccugaccccut

SEQ ID NO: 40656 - DNA, 17 bp, Artificial Sequence
  Synthetic
ggaccagccggcaucuc

SEQ ID NO: 40657 - DNA, 21 bp, Artificial Sequence
  Synthetic
cagggaaggucaggtgctuac

SEQ ID NO: 40658 - DNA, 24 bp, Artificial Sequence
  Synthetic
aagtgaggtctuctcaggctctua

SEQ ID NO: 40659 - DNA, 21 bp, Artificial Sequence
  Synthetic
gtgccaaguggtcaagatcug

SEQ ID NO: 40660 - DNA, 18 bp, Artificial Sequence
  Synthetic
gaggtcautgccgugcag

SEQ ID NO: 40661 - DNA, 20 bp, Artificial Sequence
  Synthetic
ccggaacuguacaccaacca

SEQ ID NO: 40662 - DNA, 23 bp, Artificial Sequence
  Synthetic
tgtctgtuggagaccagauggat

SEQ ID NO: 40663 - DNA, 22 bp, Artificial Sequence
  Synthetic
cgtccucattcttcuggcacag

SEQ ID NO: 40664 - DNA, 19 bp, Artificial Sequence
  Synthetic
gatctgucacccgctguct

SEQ ID NO: 40665 - DNA, 18 bp, Artificial Sequence
  Synthetic
cguggccatguggacagg

SEQ ID NO: 40666 - DNA, 19 bp, Artificial Sequence
  Synthetic
cggcauggacacgactcut

SEQ ID NO: 40667 - DNA, 20 bp, Artificial Sequence
  Synthetic
tgaattcauccgccccguag

SEQ ID NO: 40668 - DNA, 17 bp, Artificial Sequence
  Synthetic
gcuggcagcccctcauc

SEQ ID NO: 40669 - DNA, 19 bp, Artificial Sequence
  Synthetic
agaugtgcucccccaacac

SEQ ID NO: 40670 - DNA, 23 bp, Artificial Sequence
  Synthetic
acttagagggaaggutggauggt

SEQ ID NO: 40671 - DNA, 21 bp, Artificial Sequence
  Synthetic
aggtgtccutctcagcacuct

SEQ ID NO: 40672 - DNA, 24 bp, Artificial Sequence
  Synthetic
gctgtaaacagcuctgtgtttcug

SEQ ID NO: 40673 - DNA, 24 bp, Artificial Sequence
  Synthetic
ctcccgagutcaagtgattcucat

SEQ ID NO: 40674 - DNA, 25 bp, Artificial Sequence
  Synthetic
cttttcagtucagtggcatucacat

SEQ ID NO: 40675 - DNA, 29 bp, Artificial Sequence
  Synthetic
ggagaagtcauagagacagaaaguagagt

SEQ ID NO: 40676 - DNA, 17 bp, Artificial Sequence
  Synthetic
gctuccccagccuccag

SEQ ID NO: 40677 - DNA, 22 bp, Artificial Sequence
  Synthetic
cagaggucgaagaatcgctcut

SEQ ID NO: 40678 - DNA, 19 bp, Artificial Sequence
  Synthetic
cguggaccttcuggaggag

SEQ ID NO: 40679 - DNA, 19 bp, Artificial Sequence
  Synthetic
ccttgugggcaatcuggga

SEQ ID NO: 40680 - DNA, 26 bp, Artificial Sequence
  Synthetic
gaaatgaaccaaucattgagcacuga

SEQ ID NO: 40681 - DNA, 20 bp, Artificial Sequence
  Synthetic
tcctcagccuccgauaagca

SEQ ID NO: 40682 - DNA, 20 bp, Artificial Sequence
  Synthetic
gtcagggaagcugatuccca

SEQ ID NO: 40683 - DNA, 21 bp, Artificial Sequence
  Synthetic
gggagagtcuccacctctuac

SEQ ID NO: 40684 - DNA, 18 bp, Artificial Sequence
  Synthetic
gctccgcauccgtgacug

SEQ ID NO: 40685 - DNA, 18 bp, Artificial Sequence
  Synthetic
cctgctggucctgcttug

SEQ ID NO: 40686 - DNA, 19 bp, Artificial Sequence
  Synthetic
gggcuaaagggcucagagt

SEQ ID NO: 40687 - DNA, 19 bp, Artificial Sequence
  Synthetic
cgagctuccacctcgacug

SEQ ID NO: 40688 - DNA, 21 bp, Artificial Sequence
  Synthetic
gcacaggaggaagugccaaua

SEQ ID NO: 40689 - DNA, 21 bp, Artificial Sequence
  Synthetic
tcctgggcaagutctcucaga

SEQ ID NO: 40690 - DNA, 25 bp, Artificial Sequence
  Synthetic
tttagaatctcaaucgcctgctcuc

SEQ ID NO: 40691 - DNA, 29 bp, Artificial Sequence
  Synthetic
agctttctttuagaccacatatctgcuat

SEQ ID NO: 40692 - DNA, 22 bp, Artificial Sequence
  Synthetic
cgctcuccacccatctcactua

SEQ ID NO: 40693 - DNA, 25 bp, Artificial Sequence
  Synthetic
gtctacuacacaaggagcucagaga

SEQ ID NO: 40694 - DNA, 22 bp, Artificial Sequence
  Synthetic
gctgtcggacugaaactgtgut

SEQ ID NO: 40695 - DNA, 32 bp, Artificial Sequence; identical to SEQ ID NO: 28461
  Synthetic

SEQ ID NO: 40696 - DNA, 24 bp, Artificial Sequence
  Synthetic
gccctgtgautcaatgactgttut

SEQ ID NO: 40697 - DNA, 21 bp, Artificial Sequence
  Synthetic
gccaaggaaguccccaaguag

SEQ ID NO: 40698 - DNA, 20 bp, Artificial Sequence
  Synthetic
cagaggcugagcaggaaaug

SEQ ID NO: 40699 - DNA, 17 bp, Artificial Sequence
  Synthetic
agcctccucgccaguct

SEQ ID NO: 40700 - DNA, 23 bp, Artificial Sequence
  Synthetic
gcttgtaugacccaagctccuaa

SEQ ID NO: 40701 - DNA, 24 bp, Artificial Sequence
  Synthetic
ccccaatcacucagtctagtucac

SEQ ID NO: 40702 - DNA, 25 bp, Artificial Sequence
  Synthetic
tggcattgttgauatcacaggguat

SEQ ID NO: 40703 - DNA, 22 bp, Artificial Sequence
  Synthetic
gcacgggutagtaucacagagg

SEQ ID NO: 40704 - DNA, 24 bp, Artificial Sequence
  Synthetic
ctctcagctucttctctgcttuct

SEQ ID NO: 40705 - DNA, 26 bp, Artificial Sequence
  Synthetic
ctccctatggauggctctcttgauat

SEQ ID NO: 40706 - DNA, 20 bp, Artificial Sequence
  Synthetic
ccagugaggagccaucacat

SEQ ID NO: 40707 - DNA, 18 bp, Artificial Sequence
  Synthetic
ccccagaggugcugcaag

SEQ ID NO: 40708 - DNA, 19 bp, Artificial Sequence
  Synthetic
gggtuaccctgggugaaga

SEQ ID NO: 40709 - DNA, 20 bp, Artificial Sequence
  Synthetic
aggtatgugcagtgctuggg

SEQ ID NO: 40710 - DNA, 18 bp, Artificial Sequence
  Synthetic
ttcgccaucaaggtuggg

SEQ ID NO: 40711 - DNA, 19 bp, Artificial Sequence
  Synthetic
ctgtggcuccatggcucat

SEQ ID NO: 40712 - DNA, 20 bp, Artificial Sequence
  Synthetic
gggtugggccaagatcacut

SEQ ID NO: 40713 - DNA, 19 bp, Artificial Sequence
  Synthetic
ggtccccaucccactgtug

SEQ ID NO: 40714 - DNA, 17 bp, Artificial Sequence
  Synthetic
tugggaggugggagggt

SEQ ID NO: 40715 - DNA, 21 bp, Artificial Sequence
  Synthetic
cgaggctaccucacaggaaug

SEQ ID NO: 40716 - DNA, 21 bp, Artificial Sequence
  Synthetic
tccatugggaggaaagggaug

SEQ ID NO: 40717 - DNA, 18 bp, Artificial Sequence
  Synthetic
ccgacgaccucggctaug

SEQ ID NO: 40718 - DNA, 20 bp, Artificial Sequence
  Synthetic
gggctcutccattcucacac

SEQ ID NO: 40719 - DNA, 22 bp, Artificial Sequence
  Synthetic
cccaacccauggagacctauga

SEQ ID NO: 40720 - DNA, 22 bp, Artificial Sequence
  Synthetic
cccgggacaaagaaucctcuaa

SEQ ID NO: 40721 - DNA, 21 bp, Artificial Sequence
  Synthetic
actgaugccccaugaaaaccc

SEQ ID NO: 40722 - DNA, 25 bp, Artificial Sequence
  Synthetic
gtgagaccutgtctcugaagcaaat

SEQ ID NO: 40723 - DNA, 25 bp, Artificial Sequence
  Synthetic
cctgctgccautttctttcuaacag

SEQ ID NO: 40724 - DNA, 24 bp, Artificial Sequence
  Synthetic
agaatuccaggacaacatgtguca

SEQ ID NO: 40725 - DNA, 27 bp, Artificial Sequence
  Synthetic
agaatgacttuggttttcctctcucag

SEQ ID NO: 40726 - DNA, 23 bp, Artificial Sequence
  Synthetic
tgtctgcaacacugcaaaauact

SEQ ID NO: 40727 - DNA, 23 bp, Artificial Sequence
  Synthetic
gacattttgaugcaggctctucc

SEQ ID NO: 40728 - DNA, 18 bp, Artificial Sequence
  Synthetic
gtggacucaccgcacucc

SEQ ID NO: 40729 - DNA, 26 bp, Artificial Sequence
  Synthetic
atttttccaaaguaagaagucagcut

SEQ ID NO: 40730 - DNA, 17 bp, Artificial Sequence
  Synthetic
cggcuggaagcucagca

SEQ ID NO: 40731 - DNA, 18 bp, Artificial Sequence
  Synthetic
accgagccuggctcuact

SEQ ID NO: 40732 - DNA, 20 bp, Artificial Sequence
  Synthetic
catcaggcacacutgcugac

SEQ ID NO: 40733 - DNA, 22 bp, Artificial Sequence
  Synthetic
gcuccagaaaggaauccttcut

SEQ ID NO: 40734 - DNA, 23 bp, Artificial Sequence
  Synthetic
gtcatccacucatcgatgucaca

SEQ ID NO: 40735 - DNA, 22 bp, Artificial Sequence
  Synthetic
gctttutgcagacaugcacagg

SEQ ID NO: 40736 - DNA, 23 bp, Artificial Sequence
  Synthetic
aagaauaccagcccacatacugc

SEQ ID NO: 40737 - DNA, 24 bp, Artificial Sequence
  Synthetic
tgttatttcagucacctggtgcut

SEQ ID NO: 40738 - DNA, 31 bp, Artificial Sequence; identical to SEQ ID NO: 28504
  Synthetic

SEQ ID NO: 40739 - DNA, 27 bp, Artificial Sequence
  Synthetic
gtgatgctgtuggatttctctttcaut

SEQ ID NO: 40740 - DNA, 29 bp, Artificial Sequence
  Synthetic
tttgtacaatugcatagacgtguaaaacc

SEQ ID NO: 40741 - DNA, 28 bp, Artificial Sequence
  Synthetic
catgacagaugaagaaggagcagaauaa

SEQ ID NO: 40742 - DNA, 22 bp, Artificial Sequence
  Synthetic
gcgugcacacacacaattctua

SEQ ID NO: 40743 - DNA, 25 bp, Artificial Sequence
  Synthetic
ttccctttctgauatctctgccuct

SEQ ID NO: 40744 - DNA, 24 bp, Artificial Sequence
  Synthetic
ccaagatgagucaaacactuacgg

SEQ ID NO: 40745 - DNA, 25 bp, Artificial Sequence
  Synthetic
tcctctcctuctacctctcuacaga

SEQ ID NO: 40746 - DNA, 27 bp, Artificial Sequence
  Synthetic
gaattgatgctugttgcacctauaaaa

SEQ ID NO: 40747 - DNA, 21 bp, Artificial Sequence
  Synthetic
caagcuactgcgucaacacaa

SEQ ID NO: 40748 - DNA, 30 bp, Artificial Sequence; identical to SEQ ID NO: 28514
  Synthetic

SEQ ID NO: 40749 - DNA, 22 bp, Artificial Sequence
  Synthetic
cctgcccagaucttgattucct

SEQ ID NO: 40750 - DNA, 28 bp, Artificial Sequence
  Synthetic
tgctaattcctauatcctgtgctaucct

SEQ ID NO: 40751 - DNA, 31 bp, Artificial Sequence; identical to SEQ ID NO: 28517
  Synthetic

SEQ ID NO: 40752 - DNA, 23 bp, Artificial Sequence
  Synthetic
agaaattgucaagtgacguggga

SEQ ID NO: 40753 - DNA, 22 bp, Artificial Sequence
  Synthetic
gccagugcagactgtctuagag

SEQ ID NO: 40754 - DNA, 24 bp, Artificial Sequence
  Synthetic
caggtgaacuaactctcacgucag

SEQ ID NO: 40755 - DNA, 27 bp, Artificial Sequence
  Synthetic
gtgttcttugggaatttgatucgaaga

SEQ ID NO: 40756 - DNA, 23 bp, Artificial Sequence
  Synthetic
gttacattuggcctgatgctugg

SEQ ID NO: 40757 - DNA, 26 bp, Artificial Sequence
  Synthetic
gaactgatauacacctccttugccat

SEQ ID NO: 40758 - DNA, 22 bp, Artificial Sequence
  Synthetic
caaaggaugcaactucacccaa

SEQ ID NO: 40759 - DNA, 25 bp, Artificial Sequence
  Synthetic
ggaattgagtuggatgtcaggtuct

SEQ ID NO: 40760 - DNA, 23 bp, Artificial Sequence
  Synthetic
agggccctgutgtaatgctaaut

SEQ ID NO: 40761 - DNA, 23 bp, Artificial Sequence
  Synthetic
ctatttaugaccgccuggagcaa

SEQ ID NO: 40762 - DNA, 29 bp, Artificial Sequence
  Synthetic
ctgtttctccccuctctaagtaaaaaugt

SEQ ID NO: 40763 - DNA, 27 bp, Artificial Sequence
  Synthetic
tgggttgtcugttatttctgauggaat

SEQ ID NO: 40764 - DNA, 20 bp, Artificial Sequence
  Synthetic
gttttgaccgccucagctug

SEQ ID NO: 40765 - DNA, 21 bp, Artificial Sequence
  Synthetic
gtgctttcagcugtgagctug

SEQ ID NO: 40766 - DNA, 31 bp, Artificial Sequence; identical to SEQ ID NO: 28532
  Synthetic

SEQ ID NO: 40767 - DNA, 28 bp, Artificial Sequence
  Synthetic
gtcttggagacucaaagtatcttaucag

SEQ ID NO: 40768 - DNA, 21 bp, Artificial Sequence
  Synthetic
gggcccugaagcaaagaagua

SEQ ID NO: 40769 - DNA, 29 bp, Artificial Sequence
  Synthetic
gcagagaaaaauagatgagaccctugaaa

SEQ ID NO: 40770 - DNA, 21 bp, Artificial Sequence
  Synthetic
ctccgucaccactgatcctuc

SEQ ID NO: 40771 - DNA, 29 bp, Artificial Sequence
  Synthetic
gccaaataagcacutcttttcatctcaut

SEQ ID NO: 40772 - DNA, 24 bp, Artificial Sequence
  Synthetic
ggcctttttgcuccacatctttuc

SEQ ID NO: 40773 - DNA, 25 bp, Artificial Sequence
  Synthetic
catattcttctucctgctgtccugt

SEQ ID NO: 40774 - DNA, 23 bp, Artificial Sequence
  Synthetic
actattttgutttgtcccuggct

SEQ ID NO: 40775 - DNA, 21 bp, Artificial Sequence
  Synthetic
acaggaugctacccguaagga

SEQ ID NO: 40776 - DNA, 26 bp, Artificial Sequence
  Synthetic
caguttagctggatuggaaaaacaaa

SEQ ID NO: 40777 - DNA, 29 bp, Artificial Sequence
  Synthetic
cagatgataucagaaaaguccacatgaua

SEQ ID NO: 40778 - DNA, 30 bp, Artificial Sequence; identical to SEQ ID NO: 28544
  Synthetic

SEQ ID NO: 40779 - DNA, 24 bp, Artificial Sequence
  Synthetic
cggaggcaacagutgaatgaaaug

SEQ ID NO: 40780 - DNA, 29 bp, Artificial Sequence
  Synthetic
ttttattgaaactugtcatgcatctugct

SEQ ID NO: 40781 - DNA, 27 bp, Artificial Sequence
  Synthetic
gctgaagaacccugatactaagggaua

SEQ ID NO: 40782 - DNA, 22 bp, Artificial Sequence
  Synthetic
aagccagucggtaagttctguc

SEQ ID NO: 40783 - DNA, 29 bp, Artificial Sequence
  Synthetic
gaaattggctctutagcttgtgtttcuaa

SEQ ID NO: 40784 - DNA, 28 bp, Artificial Sequence
  Synthetic
tgattataaataguccacgtcaauggca

SEQ ID NO: 40785 - DNA, 26 bp, Artificial Sequence
  Synthetic
atctgcactauatgggttctttuccc

SEQ ID NO: 40786 - DNA, 26 bp, Artificial Sequence
  Synthetic
cuaataggagauaaccacagcagcag

SEQ ID NO: 40787 - DNA, 29 bp, Artificial Sequence
  Synthetic
tggcttatgcctugagaattatttaccut

SEQ ID NO: 40788 - DNA, 26 bp, Artificial Sequence
  Synthetic
aauaacctaaugggcagaaaaccaat

SEQ ID NO: 40789 - DNA, 29 bp, Artificial Sequence
  Synthetic
agataacattgcuagtatcccactugaac

SEQ ID NO: 40790 - DNA, 24 bp, Artificial Sequence
  Synthetic
gcctttcacccugcttataatcuc

SEQ ID NO: 40791 - DNA, 28 bp, Artificial Sequence
  Synthetic
aaacagaugccagtattcuacaggaaaa

SEQ ID NO: 40792 - DNA, 30 bp, Artificial Sequence; identical to SEQ ID NO: 28558
  Synthetic

SEQ ID NO: 40793 - DNA, 21 bp, Artificial Sequence
  Synthetic
tgcttttaccugcaggcgaut

SEQ ID NO: 40794 - DNA, 22 bp, Artificial Sequence
  Synthetic
actttgcaaugctgctgtctuc

SEQ ID NO: 40795 - DNA, 23 bp, Artificial Sequence
  Synthetic
caccatttgcuacctttgggaut

SEQ ID NO: 40796 - DNA, 23 bp, Artificial Sequence
  Synthetic
gaggtcaggagcautgagaagut

SEQ ID NO: 40797 - DNA, 28 bp, Artificial Sequence
  Synthetic
ggaggtttcacugttaggaagcuaaaaa

SEQ ID NO: 40798 - DNA, 22 bp, Artificial Sequence
  Synthetic
cttgctgagcuggatctgagut

SEQ ID NO: 40799 - DNA, 26 bp, Artificial Sequence
  Synthetic
gacaacagccuttgaaatttugagag

SEQ ID NO: 40800 - DNA, 27 bp, Artificial Sequence
  Synthetic
aatatgtgctcugaaaattcagtugga

SEQ ID NO: 40801 - DNA, 30 bp, Artificial Sequence; identical to SEQ ID NO: 28567
  Synthetic

SEQ ID NO: 40802 - DNA, 25 bp, Artificial Sequence
  Synthetic
tttccacctuggagtagatctucct

SEQ ID NO: 40803 - DNA, 26 bp, Artificial Sequence
  Synthetic
caagtcctauctcttgctcauggaat

SEQ ID NO: 40804 - DNA, 27 bp, Artificial Sequence
  Synthetic
tcaaacacagaautgttactggucact

SEQ ID NO: 40805 - DNA, 27 bp, Artificial Sequence
  Synthetic
gttggtggaagauaaactcagtctuct

SEQ ID NO: 40806 - DNA, 31 bp, Artificial Sequence; identical to SEQ ID NO: 28572
  Synthetic

SEQ ID NO: 40807 - DNA, 27 bp, Artificial Sequence
  Synthetic
gtaagaugcgaaaggaaatgaatguct

SEQ ID NO: 40808 - DNA, 27 bp, Artificial Sequence
  Synthetic
tgcccgtugctttacaatttauaagga

SEQ ID NO: 40809 - DNA, 31 bp, Artificial Sequence; identical to SEQ ID NO: 28575
  Synthetic

SEQ ID NO: 40810 - DNA, 27 bp, Artificial Sequence
  Synthetic
ccaatcttgccaauaatcaagttgucc

SEQ ID NO: 40811 - DNA, 27 bp, Artificial Sequence
  Synthetic
ctgactaauaatgctatccucccaaca

SEQ ID NO: 40812 - DNA, 25 bp, Artificial Sequence
  Synthetic
caatataagcugccaactgcttguc

SEQ ID NO: 40813 - DNA, 27 bp, Artificial Sequence
  Synthetic
ttgttcagcaggautacagaaaagcua

SEQ ID NO: 40814 - DNA, 28 bp, Artificial Sequence
  Synthetic
agcaaacaaaactauaggatcagggauc

SEQ ID NO: 40815 - DNA, 28 bp, Artificial Sequence
  Synthetic
tgaccctattcuaagcaaaccaaatcuc

SEQ ID NO: 40816 - DNA, 22 bp, Artificial Sequence
  Synthetic
ccatgacuccgccatctgtuag

SEQ ID NO: 40817 - DNA, 26 bp, Artificial Sequence
  Synthetic
tcagaagatacugagcatttgcugat

SEQ ID NO: 40818 - DNA, 26 bp, Artificial Sequence
  Synthetic
catgttctuaaccactatgccucaca

SEQ ID NO: 40819 - DNA, 31 bp, Artificial Sequence; identical to SEQ ID NO: 28585
  Synthetic

SEQ ID NO: 40820 - DNA, 26 bp, Artificial Sequence
  Synthetic
aggaaagagcagacugtatacaacut

SEQ ID NO: 40821 - DNA, 31 bp, Artificial Sequence; identical to SEQ ID NO: 28587
  Synthetic

SEQ ID NO: 40822 - DNA, 25 bp, Artificial Sequence
  Synthetic
aggaacaaagccutaaccaaaagua

SEQ ID NO: 40823 - DNA, 22 bp, Artificial Sequence
  Synthetic
gccagagttugcttcgagacut

SEQ ID NO: 40824 - DNA, 22 bp, Artificial Sequence
  Synthetic
caaaauccaccccagctguaaa

SEQ ID NO: 40825 - DNA, 23 bp, Artificial Sequence
  Synthetic
tgccttauaacgggtctcgttuc

SEQ ID NO: 40826 - DNA, 23 bp, Artificial Sequence
  Synthetic
ctuttgacaatgcucaaccagct

SEQ ID NO: 40827 - DNA, 25 bp, Artificial Sequence
  Synthetic
aggcttuacaaagttctcugcaaga

SEQ ID NO: 40828 - DNA, 26 bp, Artificial Sequence
  Synthetic
ggtatggagaguttggtttctgacug

SEQ ID NO: 40829 - DNA, 28 bp, Artificial Sequence
  Synthetic
agtttgctgacaauttaggaaaacaugg

SEQ ID NO: 40830 - DNA, 21 bp, Artificial Sequence
  Synthetic
ggaacatggguccttgtccut

SEQ ID NO: 40831 - DNA, 30 bp, Artificial Sequence; identical to SEQ ID NO: 28597
  Synthetic

SEQ ID NO: 40832 - DNA, 22 bp, Artificial Sequence
  Synthetic
gcagtagtugtcatctgcucca

SEQ ID NO: 40833 - DNA, 27 bp, Artificial Sequence
  Synthetic
agatcatttcttucagtctgtgggtuc

SEQ ID NO: 40834 - DNA, 27 bp, Artificial Sequence
  Synthetic
guagaatcacagauaacaaagcacgga

SEQ ID NO: 40835 - DNA, 25 bp, Artificial Sequence
  Synthetic
tttgctgtctuaggttggatgtuga

SEQ ID NO: 40836 - DNA, 22 bp, Artificial Sequence
  Synthetic
ggtggaagutcctctugagcat

SEQ ID NO: 40837 - DNA, 26 bp, Artificial Sequence
  Synthetic
tgaagtctttcuagcaatgtcugacc

SEQ ID NO: 40838 - DNA, 23 bp, Artificial Sequence
  Synthetic
gcaaagttauccagccatgctuc

SEQ ID NO: 40839 - DNA, 25 bp, Artificial Sequence
  Synthetic
caacccaggcutattctgtgatcut

SEQ ID NO: 40840 - DNA, 28 bp, Artificial Sequence
  Synthetic
tttaaagccagtugtgtgaatcttgtuc

SEQ ID NO: 40841 - DNA, 28 bp, Artificial Sequence
  Synthetic
catgtgugagaaactagctguaaaagac

SEQ ID NO: 40842 - DNA, 28 bp, Artificial Sequence
  Synthetic
tttctaguagaaagcacgcaacauaaga

SEQ ID NO: 40843 - DNA, 27 bp, Artificial Sequence
  Synthetic
tgctttcaaagaggucataataggcut

SEQ ID NO: 40844 - DNA, 23 bp, Artificial Sequence
  Synthetic
cctgaggcautcccatctugaat

SEQ ID NO: 40845 - DNA, 30 bp, Artificial Sequence; identical to SEQ ID NO: 28611
  Synthetic

SEQ ID NO: 40846 - DNA, 22 bp, Artificial Sequence
  Synthetic
gcaaugtgtccucagcagaaag

SEQ ID NO: 40847 - DNA, 29 bp, Artificial Sequence
  Synthetic
gcaaagacautaattgtguaacacccaat

SEQ ID NO: 40848 - DNA, 30 bp, Artificial Sequence; identical to SEQ ID NO: 28614
  Synthetic

SEQ ID NO: 40849 - DNA, 25 bp, Artificial Sequence
  Synthetic
ctcttccaagutttgccucaacaag

SEQ ID NO: 40850 - DNA, 25 bp, Artificial Sequence
  Synthetic
agcagtgguagtccagaaattuacc

SEQ ID NO: 40851 - DNA, 30 bp, Artificial Sequence; identical to SEQ ID NO: 28617
  Synthetic

SEQ ID NO: 40852 - DNA, 23 bp, Artificial Sequence
  Synthetic
agctggtggugaagttgatuaca

SEQ ID NO: 40853 - DNA, 29 bp, Artificial Sequence
  Synthetic
cttgctcaaggaaugcattttcttaugaa

SEQ ID NO: 40854 - DNA, 25 bp, Artificial Sequence
  Synthetic
tttactcaccagaugagaccucaga

SEQ ID NO: 40855 - DNA, 25 bp, Artificial Sequence
  Synthetic
aaacaggugcaaaaagattgtgugt

SEQ ID NO: 40856 - DNA, 23 bp, Artificial Sequence
  Synthetic
cuctacttctucccaccaaagca

SEQ ID NO: 40857 - DNA, 22 bp, Artificial Sequence
  Synthetic
ggatcactcacuttcccccuac

SEQ ID NO: 40858 - DNA, 17 bp, Artificial Sequence
  Synthetic
cacccugccctgcagua

SEQ ID NO: 40859 - DNA, 28 bp, Artificial Sequence
  Synthetic
tgcattgttuaacaggatcctcagatua

SEQ ID NO: 40860 - DNA, 27 bp, Artificial Sequence
  Synthetic
caatgaatcaccauagtacatggguct

SEQ ID NO: 40861 - DNA, 28 bp, Artificial Sequence
  Synthetic
tcagatctgctgauagccatagcataua

SEQ ID NO: 40862 - DNA, 26 bp, Artificial Sequence
  Synthetic
guatttgcctttatugcaagggaagt

SEQ ID NO: 40863 - DNA, 23 bp, Artificial Sequence
  Synthetic
gttgcuagaggcagacaaauccc

SEQ ID NO: 40864 - DNA, 30 bp, Artificial Sequence; identical to SEQ ID NO: 28630
  Synthetic

SEQ ID NO: 40865 - DNA, 22 bp, Artificial Sequence
  Synthetic
gtgaggtaaucagccaggauct

SEQ ID NO: 40866 - DNA, 22 bp, Artificial Sequence
  Synthetic
gcgaattuacgcctggattuca

SEQ ID NO: 40867 - DNA, 28 bp, Artificial Sequence
  Synthetic
attgcatcugaggatgattuaagagagg

SEQ ID NO: 40868 - DNA, 24 bp, Artificial Sequence
  Synthetic
ttgcctttuactgtcccaugaagt

SEQ ID NO: 40869 - DNA, 26 bp, Artificial Sequence
  Synthetic
aaccttcagagaggcaucaatttgua

SEQ ID NO: 40870 - DNA, 22 bp, Artificial Sequence
  Synthetic
aaccctgcaaagcugaaaccua

SEQ ID NO: 40871 - DNA, 31 bp, Artificial Sequence; identical to SEQ ID NO: 28637
  Synthetic

SEQ ID NO: 40872 - DNA, 17 bp, Artificial Sequence
  Synthetic
gccuggcgggcaaacua

SEQ ID NO: 40873 - DNA, 22 bp, Artificial Sequence
  Synthetic
ccguctctuggagaagaagcag

SEQ ID NO: 40874 - DNA, 24 bp, Artificial Sequence
  Synthetic
atttcagcacuaagaactgugcct

SEQ ID NO: 40875 - DNA, 29 bp, Artificial Sequence
  Synthetic
agatgttacagttcucacagtcttgaaug

SEQ ID NO: 40876 - DNA, 22 bp, Artificial Sequence
  Synthetic
gcagcgtguttttccggaatug

SEQ ID NO: 40877 - DNA, 25 bp, Artificial Sequence
  Synthetic
ctgcatcttugaactggaaagcuaa

SEQ ID NO: 40878 - DNA, 24 bp, Artificial Sequence
  Synthetic
gatgctgtggutcaggactatgut

SEQ ID NO: 40879 - DNA, 31 bp, Artificial Sequence; identical to SEQ ID NO: 28645
  Synthetic

SEQ ID NO: 40880 - DNA, 26 bp, Artificial Sequence
  Synthetic
tcagacaaaggaagugtccaugaaag

SEQ ID NO: 40881 - DNA, 28 bp, Artificial Sequence
  Synthetic
aggcaatguaaaacaaatgtuaaaggca

SEQ ID NO: 40882 - DNA, 26 bp, Artificial Sequence
  Synthetic
cctgttattgccutggagtttaaugg

SEQ ID NO: 40883 - DNA, 30 bp, Artificial Sequence; identical to SEQ ID NO: 28649
  Synthetic

SEQ ID NO: 40884 - DNA, 23 bp, Artificial Sequence
  Synthetic
gggcaaaaggguaattcucaagt

SEQ ID NO: 40885 - DNA, 24 bp, Artificial Sequence
  Synthetic
gttacacccuaaagccugaaacct

SEQ ID NO: 40886 - DNA, 22 bp, Artificial Sequence
  Synthetic
gaauctcacugacgaggcagag

SEQ ID NO: 40887 - DNA, 25 bp, Artificial Sequence
  Synthetic
gcagacatcaugagtactccttugg

SEQ ID NO: 40888 - DNA, 23 bp, Artificial Sequence
  Synthetic
actccuaaagacccugcaaaacc

SEQ ID NO: 40889 - DNA, 30 bp, Artificial Sequence; identical to SEQ ID NO: 28655
  Synthetic

SEQ ID NO: 40890 - DNA, 26 bp, Artificial Sequence
  Synthetic
ggttgaatcctutagccctacttuct

SEQ ID NO: 40891 - DNA, 25 bp, Artificial Sequence
  Synthetic
gaccacataugcacacatatcucca

SEQ ID NO: 40892 - DNA, 23 bp, Artificial Sequence
  Synthetic
ggucctggagcugaacaacaaat

SEQ ID NO: 40893 - DNA, 25 bp, Artificial Sequence
  Synthetic
ctggatatcugcagtacccagatug

SEQ ID NO: 40894 - DNA, 20 bp, Artificial Sequence
  Synthetic
gatctctguacggcccctuc

SEQ ID NO: 40895 - DNA, 24 bp, Artificial Sequence
  Synthetic
gttccugacacagacagacuacac

SEQ ID NO: 40896 - DNA, 18 bp, Artificial Sequence
  Synthetic
cuacgggcugggcaagat

SEQ ID NO: 40897 - DNA, 19 bp, Artificial Sequence
  Synthetic
ccatucccagccgtcagug

SEQ ID NO: 40898 - DNA, 21 bp, Artificial Sequence
  Synthetic
tcccacccugaggtacactut

SEQ ID NO: 40899 - DNA, 22 bp, Artificial Sequence
  Synthetic
tgttaatggcacuctgggaucg

SEQ ID NO: 40900 - DNA, 28 bp, Artificial Sequence
  Synthetic
aatagagaccucactatttgcaatgucc

SEQ ID NO: 40901 - DNA, 25 bp, Artificial Sequence
  Synthetic
agtacacctggugttaggagtuact

SEQ ID NO: 40902 - DNA, 20 bp, Artificial Sequence
  Synthetic
gctgtggutccacgauaggg

SEQ ID NO: 40903 - DNA, 23 bp, Artificial Sequence
  Synthetic
gcagattcugttctctacuggca

SEQ ID NO: 40904 - DNA, 27 bp, Artificial Sequence
  Synthetic
gggagtcuaagaagaattugaggaaga

SEQ ID NO: 40905 - DNA, 29 bp, Artificial Sequence
  Synthetic
gcttgttgacugagcagatataacaugag

SEQ ID NO: 40906 - DNA, 23 bp, Artificial Sequence
  Synthetic
gggtaaccauggtgaatgagtug

SEQ ID NO: 40907 - DNA, 24 bp, Artificial Sequence
  Synthetic
gtaccaggcuagtggtcagacaua

SEQ ID NO: 40908 - DNA, 26 bp, Artificial Sequence
  Synthetic
atgtagatcuaagagccagaaugcac

SEQ ID NO: 40909 - DNA, 25 bp, Artificial Sequence
  Synthetic
tccttctatuccccttttcgctuac

SEQ ID NO: 40910 - DNA, 23 bp, Artificial Sequence
  Synthetic
ggcctacacautgaggagugaag

SEQ ID NO: 40911 - DNA, 25 bp, Artificial Sequence
  Synthetic
cagaggtaacuagagagtgguaggg

SEQ ID NO: 40912 - DNA, 26 bp, Artificial Sequence
  Synthetic
acttagtactgcugttctgtgaacug

SEQ ID NO: 40913 - DNA, 27 bp, Artificial Sequence
  Synthetic
gaagaaacgauctagugcaaggaaaag

SEQ ID NO: 40914 - DNA, 23 bp, Artificial Sequence
  Synthetic
ccttggaucttcccattaugcct

SEQ ID NO: 40915 - DNA, 23 bp, Artificial Sequence
  Synthetic
tcccttcaaucttctcctugggt

SEQ ID NO: 40916 - DNA, 21 bp, Artificial Sequence
  Synthetic
agatcggugctggagtcugat

SEQ ID NO: 40917 - DNA, 23 bp, Artificial Sequence
  Synthetic
ctgttuaaggagccucaaaccca

SEQ ID NO: 40918 - DNA, 21 bp, Artificial Sequence
  Synthetic
actggtcccuttcaactgucc

SEQ ID NO: 40919 - DNA, 25 bp, Artificial Sequence
  Synthetic
cuagcagggagaagauagggaagaa

SEQ ID NO: 40920 - DNA, 22 bp, Artificial Sequence
  Synthetic
ttgcatttcucacccccgttua

SEQ ID NO: 40921 - DNA, 25 bp, Artificial Sequence
  Synthetic
tcagttatuccgaagctctgctuac

SEQ ID NO: 40922 - DNA, 24 bp, Artificial Sequence
  Synthetic
gcaggcctucttcaacactacuat

SEQ ID NO: 40923 - DNA, 21 bp, Artificial Sequence
  Synthetic
caaagctguagcggtuagcag

SEQ ID NO: 40924 - DNA, 23 bp, Artificial Sequence
  Synthetic
aggtttttccugagggcattugt

SEQ ID NO: 40925 - DNA, 20 bp, Artificial Sequence
  Synthetic
gtcacugccccacuagcaaa

SEQ ID NO: 40926 - DNA, 25 bp, Artificial Sequence
  Synthetic
gcacacacauaaacccacauacagt

SEQ ID NO: 40927 - DNA, 23 bp, Artificial Sequence
  Synthetic
ctggttcagaucagggtcactua

SEQ ID NO: 40928 - DNA, 20 bp, Artificial Sequence
  Synthetic
cctatcucccacccgugaac

SEQ ID NO: 40929 - DNA, 22 bp, Artificial Sequence
  Synthetic
gtgggaggaaggugaaacugac

SEQ ID NO: 40930 - DNA, 23 bp, Artificial Sequence
  Synthetic
cctcatgcagcucatttgctauc

SEQ ID NO: 40931 - DNA, 29 bp, Artificial Sequence
  Synthetic
tccttttctcaaggutcctattgtttcuc

SEQ ID NO: 40932 - DNA, 24 bp, Artificial Sequence
  Synthetic
ctcctaccauctgctttcctucac

SEQ ID NO: 40933 - DNA, 25 bp, Artificial Sequence
  Synthetic
tgggtccuaacatgtttctauccga

SEQ ID NO: 40934 - DNA, 30 bp, Artificial Sequence; identical to SEQ ID NO: 28700
  Synthetic

SEQ ID NO: 40935 - DNA, 23 bp, Artificial Sequence
  Synthetic
agtaacccctuaggtgcatccut

SEQ ID NO: 40936 - DNA, 26 bp, Artificial Sequence
  Synthetic
ctcagattggaacuaagctttccuga

SEQ ID NO: 40937 - DNA, 22 bp, Artificial Sequence
  Synthetic
cttggguatgaaacugcaggga

SEQ ID NO: 40938 - DNA, 26 bp, Artificial Sequence
  Synthetic
tgtatctctgaacucttgtcccauct

SEQ ID NO: 40939 - DNA, 20 bp, Artificial Sequence
  Synthetic
gggcagacaauggaacaugc

SEQ ID NO: 40940 - DNA, 21 bp, Artificial Sequence
  Synthetic
gtttggaacaguccgagugga

SEQ ID NO: 40941 - DNA, 22 bp, Artificial Sequence
  Synthetic
gctcuggagcctttttcucagg

SEQ ID NO: 40942 - DNA, 22 bp, Artificial Sequence
  Synthetic
ctacaacccacucaccctctuc

SEQ ID NO: 40943 - DNA, 22 bp, Artificial Sequence
  Synthetic
gtaggtcccuccagcattccua

SEQ ID NO: 40944 - DNA, 24 bp, Artificial Sequence
  Synthetic
tcatgggttuagaaccctcctcut

SEQ ID NO: 40945 - DNA, 23 bp, Artificial Sequence
  Synthetic
gtgaagaucccaagtgtctccuc

SEQ ID NO: 40946 - DNA, 21 bp, Artificial Sequence
  Synthetic
aagctgctcugcatactcucg

SEQ ID NO: 40947 - DNA, 20 bp, Artificial Sequence
  Synthetic
caggtggcggguaggatcua

SEQ ID NO: 40948 - DNA, 22 bp, Artificial Sequence
  Synthetic
cctgcuaacgtttcttucaggt

SEQ ID NO: 40949 - DNA, 21 bp, Artificial Sequence
  Synthetic
gtaggauggctgtugaacgga

SEQ ID NO: 40950 - DNA, 22 bp, Artificial Sequence
  Synthetic
cagcccttuagttctgaggcut

SEQ ID NO: 40951 - DNA, 20 bp, Artificial Sequence
  Synthetic
ggctgtaguccagcagcuac

SEQ ID NO: 40952 - DNA, 22 bp, Artificial Sequence
  Synthetic
attccatccccutccctcgaua

SEQ ID NO: 40953 - DNA, 25 bp, Artificial Sequence
  Synthetic
ggautgggaatuaagaggaaagggt

SEQ ID NO: 40954 - DNA, 23 bp, Artificial Sequence
  Synthetic
cctttccccuctgttttgagcut

SEQ ID NO: 40955 - DNA, 20 bp, Artificial Sequence
  Synthetic
cctccagcggaaucttcguc

SEQ ID NO: 40956 - DNA, 23 bp, Artificial Sequence
  Synthetic
gtgggagucgtaggtttagtugt

SEQ ID NO: 40957 - DNA, 26 bp, Artificial Sequence
  Synthetic
gtacatacauagtaggtggcuagcct

SEQ ID NO: 40958 - DNA, 22 bp, Artificial Sequence
  Synthetic
tgaguggcaaggaagctuaagg

SEQ ID NO: 40959 - DNA, 27 bp, Artificial Sequence
  Synthetic
ctcctcagacaaaaguagacaatcuct

SEQ ID NO: 40960 - DNA, 23 bp, Artificial Sequence
  Synthetic
ttccuctttggccucagagaaag

SEQ ID NO: 40961 - DNA, 24 bp, Artificial Sequence
  Synthetic
gcaatcugagcattcuccacagaa

SEQ ID NO: 40962 - DNA, 24 bp, Artificial Sequence
  Synthetic
ctgauacaggaagagcagauccag

SEQ ID NO: 40963 - DNA, 26 bp, Artificial Sequence
  Synthetic
tgttcctctcauaggccttaatcuca

SEQ ID NO: 40964 - DNA, 27 bp, Artificial Sequence
  Synthetic
tccaaatttucccaatcaacuggagat

SEQ ID NO: 40965 - DNA, 26 bp, Artificial Sequence
  Synthetic
ctttcttacauaccagtgttgcucac

SEQ ID NO: 40966 - DNA, 25 bp, Artificial Sequence
  Synthetic
tgatgaaaacutcctgatggugaca

SEQ ID NO: 40967 - DNA, 25 bp, Artificial Sequence
  Synthetic
gagcccacttauggtgactaagaut

SEQ ID NO: 40968 - DNA, 25 bp, Artificial Sequence
  Synthetic
caaaccttgguactccattttuccc

SEQ ID NO: 40969 - DNA, 28 bp, Artificial Sequence
  Synthetic
ccgttgacatuaacagcaagtttucaaa

SEQ ID NO: 40970 - DNA, 22 bp, Artificial Sequence
  Synthetic
gggcutggtgttuagaagaaca

SEQ ID NO: 40971 - DNA, 27 bp, Artificial Sequence
  Synthetic
gutctcctctaucacagaaaagacact

SEQ ID NO: 40972 - DNA, 22 bp, Artificial Sequence
  Synthetic
ggaatuacggcagcccttctut

SEQ ID NO: 40973 - DNA, 30 bp, Artificial Sequence; identical to SEQ ID NO: 28739
  Synthetic

SEQ ID NO: 40974 - DNA, 24 bp, Artificial Sequence
  Synthetic
ttcaggtgguggagagatgtttut

SEQ ID NO: 40975 - DNA, 28 bp, Artificial Sequence
  Synthetic
tggaagcauaagcagaattatgtauggg

SEQ ID NO: 40976 - DNA, 26 bp, Artificial Sequence
  Synthetic
ttaagauggagagcaataagctuggt

SEQ ID NO: 40977 - DNA, 27 bp, Artificial Sequence
  Synthetic
gaatgatcaagaaaucagtttcuggca

SEQ ID NO: 40978 - DNA, 29 bp, Artificial Sequence
  Synthetic
tgccaaataaaauacacttggtttgtugg

SEQ ID NO: 40979 - DNA, 27 bp, Artificial Sequence
  Synthetic
aggcagacaaauaactagucacaacag

SEQ ID NO: 40980 - DNA, 22 bp, Artificial Sequence
  Synthetic
cccactgcccugagaatcttut

SEQ ID NO: 40981 - DNA, 30 bp, Artificial Sequence; identical to SEQ ID NO: 28747
  Synthetic

SEQ ID NO: 40982 - DNA, 27 bp, Artificial Sequence
  Synthetic
ttaaggtagcagaaugacttagaugcc

SEQ ID NO: 40983 - DNA, 28 bp, Artificial Sequence
  Synthetic
actctaaatttuccacttccacacucac

SEQ ID NO: 40984 - DNA, 23 bp, Artificial Sequence
  Synthetic
ggatcaaggutttctgtggcuga

SEQ ID NO: 40985 - DNA, 29 bp, Artificial Sequence
  Synthetic
gtcaaacttttaggugacctcctcttuat

SEQ ID NO: 40986 - DNA, 25 bp, Artificial Sequence
  Synthetic
gctcagcugaagatagtgacttuga

SEQ ID NO: 40987 - DNA, 23 bp, Artificial Sequence
  Synthetic
tgcagttacguaggctcctttut

SEQ ID NO: 40988 - DNA, 21 bp, Artificial Sequence
  Synthetic
tgatgacacagcutccgugac

SEQ ID NO: 40989 - DNA, 24 bp, Artificial Sequence
  Synthetic
agagcaagacuctgtccucaaaga

SEQ ID NO: 40990 - DNA, 28 bp, Artificial Sequence
  Synthetic
ctgcatatacugagggatgactttatut

SEQ ID NO: 40991 - DNA, 23 bp, Artificial Sequence
  Synthetic
gaaggtggcgcauttgtttgaua

SEQ ID NO: 40992 - DNA, 23 bp, Artificial Sequence
  Synthetic
tcccccugggaactagaaauagg

SEQ ID NO: 40993 - DNA, 24 bp, Artificial Sequence
  Synthetic
agaaggaagcaaugcacatacuca

SEQ ID NO: 40994 - DNA, 24 bp, Artificial Sequence
  Synthetic
agtgttgauagccaggtagauagg

SEQ ID NO: 40995 - DNA, 26 bp, Artificial Sequence
  Synthetic
attggccgagugatgattttgtagua

SEQ ID NO: 40996 - DNA, 28 bp, Artificial Sequence
  Synthetic
tgcattaaaaggauaaagaagtgtuggc

SEQ ID NO: 40997 - DNA, 26 bp, Artificial Sequence
  Synthetic
ttccactgccuttctctcattcuaac

SEQ ID NO: 40998 - DNA, 27 bp, Artificial Sequence
  Synthetic
gaatatttguaacccaacaaagguggt

SEQ ID NO: 40999 - DNA, 28 bp, Artificial Sequence
  Synthetic
cacacacagucacttgatuacaaaaagg

SEQ ID NO: 41000 - DNA, 27 bp, Artificial Sequence
  Synthetic
ttttctagguctaggataaugggacac

SEQ ID NO: 41001 - DNA, 24 bp, Artificial Sequence
  Synthetic
aggacctccauctttaccaccuac

SEQ ID NO: 41002 - DNA, 24 bp, Artificial Sequence
  Synthetic
gtactgcuaaagaagcagcttugg

SEQ ID NO: 41003 - DNA, 28 bp, Artificial Sequence
  Synthetic
agagaagaauggtatctcaguaaacgga

SEQ ID NO: 41004 - DNA, 28 bp, Artificial Sequence
  Synthetic
cttatgtggtcagutgataggacttuga

SEQ ID NO: 41005 - DNA, 22 bp, Artificial Sequence
  Synthetic
agaagcaatggutgaggccuac

SEQ ID NO: 41006 - DNA, 23 bp, Artificial Sequence
  Synthetic
gctucaggagaacacaaggaugg

SEQ ID NO: 41007 - DNA, 21 bp, Artificial Sequence
  Synthetic
gttgggccccucaacatcaua

SEQ ID NO: 41008 - DNA, 22 bp, Artificial Sequence
  Synthetic
catcggtggguatgaggtauca

SEQ ID NO: 41009 - DNA, 22 bp, Artificial Sequence
  Synthetic
cccaaaggaagccucattcauc

SEQ ID NO: 41010 - DNA, 27 bp, Artificial Sequence
  Synthetic
agaaguagaaccaagaagcttatuggc

SEQ ID NO: 41011 - DNA, 26 bp, Artificial Sequence
  Synthetic
aacatttgctgcutactcattgcaut

SEQ ID NO: 41012 - DNA, 21 bp, Artificial Sequence
  Synthetic
ctgtagagacguaggcctugg

SEQ ID NO: 41013 - DNA, 22 bp, Artificial Sequence
  Synthetic
ggaagacuaggacccctgcuat

SEQ ID NO: 41014 - DNA, 30 bp, Artificial Sequence; identical to SEQ ID NO: 28780
  Synthetic

SEQ ID NO: 41015 - DNA, 23 bp, Artificial Sequence
  Synthetic
tcactggtcuctgtttgcacuac

SEQ ID NO: 41016 - DNA, 23 bp, Artificial Sequence
  Synthetic
atctcccucaggtagtucaggag

SEQ ID NO: 41017 - DNA, 23 bp, Artificial Sequence
  Synthetic
ccccagccccuttattgctatua

SEQ ID NO: 41018 - DNA, 25 bp, Artificial Sequence
  Synthetic
attcatcttcagacauggagcctuc

SEQ ID NO: 41019 - DNA, 28 bp, Artificial Sequence
  Synthetic
ccaaagaaucacaccaagactttatugt

SEQ ID NO: 41020 - DNA, 24 bp, Artificial Sequence
  Synthetic
cctcttatcaccutgtcctgcaut

SEQ ID NO: 41021 - DNA, 27 bp, Artificial Sequence
  Synthetic
gttactgacuaagcatccacttctuca

SEQ ID NO: 41022 - DNA, 21 bp, Artificial Sequence
  Synthetic
cagaacaggcccucagtucaa

SEQ ID NO: 41023 - DNA, 24 bp, Artificial Sequence
  Synthetic
ctccaauctgcttaugaccaggag

SEQ ID NO: 41024 - DNA, 22 bp, Artificial Sequence
  Synthetic
gaggatgcugatcacgggaaut

SEQ ID NO: 41025 - DNA, 23 bp, Artificial Sequence
  Synthetic
caaatgauctacagcugcggaag

SEQ ID NO: 41026 - DNA, 22 bp, Artificial Sequence
  Synthetic
actgccaagucccagggtaaut

SEQ ID NO: 41027 - DNA, 23 bp, Artificial Sequence
  Synthetic
atcactggcutcttgtttugcag

SEQ ID NO: 41028 - DNA, 28 bp, Artificial Sequence
  Synthetic
ctcgtttctctcutccttctttccttut

SEQ ID NO: 41029 - DNA, 23 bp, Artificial Sequence
  Synthetic
aagtcugtgttttcaucgaccca

SEQ ID NO: 41030 - DNA, 22 bp, Artificial Sequence
  Synthetic
gttgcacagcaucaccagtcua

SEQ ID NO: 41031 - DNA, 30 bp, Artificial Sequence; identical to SEQ ID NO: 28797
  Synthetic

SEQ ID NO: 41032 - DNA, 21 bp, Artificial Sequence
  Synthetic
agagtttgugcacggucaaga

SEQ ID NO: 41033 - DNA, 28 bp, Artificial Sequence
  Synthetic
ggtccucaggaactttcattaucaacag

SEQ ID NO: 41034 - DNA, 22 bp, Artificial Sequence
  Synthetic
gcutcctttucacagggaggag

SEQ ID NO: 41035 - DNA, 23 bp, Artificial Sequence
  Synthetic
ctaagcaaccacacuttctuggt

SEQ ID NO: 41036 - DNA, 23 bp, Artificial Sequence
  Synthetic
gggtcctgautgatggcaatuac

SEQ ID NO: 41037 - DNA, 29 bp, Artificial Sequence
  Synthetic
agaatgtttcctccuctcttgtttgaaut

SEQ ID NO: 41038 - DNA, 25 bp, Artificial Sequence
  Synthetic
gtccagcaacaucaacaattctcuc

SEQ ID NO: 41039 - DNA, 28 bp, Artificial Sequence
  Synthetic
cctcctttaaacugttttcatcucacaa

SEQ ID NO: 41040 - DNA, 31 bp, Artificial Sequence; identical to SEQ ID NO: 28806
  Synthetic

SEQ ID NO: 41041 - DNA, 22 bp, Artificial Sequence
  Synthetic
gacattgaugcccagaccttug

SEQ ID NO: 41042 - DNA, 22 bp, Artificial Sequence
  Synthetic
ggccaugagggctgtttcuaaa

SEQ ID NO: 41043 - DNA, 24 bp, Artificial Sequence
  Synthetic
gcaggttatgaguacctctgcaut

SEQ ID NO: 41044 - DNA, 24 bp, Artificial Sequence
  Synthetic
gggaagggaguacccaatatcuga

SEQ ID NO: 41045 - DNA, 21 bp, Artificial Sequence
  Synthetic
tgacaaugcagcugaggaacc

SEQ ID NO: 41046 - DNA, 18 bp, Artificial Sequence
  Synthetic
guggatcaguggcccaga

SEQ ID NO: 41047 - DNA, 23 bp, Artificial Sequence
  Synthetic
actcgcttggugattccatguaa

SEQ ID NO: 41048 - DNA, 27 bp, Artificial Sequence
  Synthetic
cttaatgtgcugttgagttagaaugga

SEQ ID NO: 41049 - DNA, 24 bp, Artificial Sequence
  Synthetic
tccttttctctugctttgggcuag

SEQ ID NO: 41050 - DNA, 25 bp, Artificial Sequence
  Synthetic
tcatgcauagatgtttuccacacca

SEQ ID NO: 41051 - DNA, 27 bp, Artificial Sequence
  Synthetic
caatcagtgttuctgctttctccauag

SEQ ID NO: 41052 - DNA, 27 bp, Artificial Sequence
  Synthetic
agtttgatggctuctgtgatatcagug

SEQ ID NO: 41053 - DNA, 24 bp, Artificial Sequence
  Synthetic
cccaactgguctgtcaacguaaaa

SEQ ID NO: 41054 - DNA, 27 bp, Artificial Sequence
  Synthetic
tcaaagcaaccgaagaaugtaaccaua

SEQ ID NO: 41055 - DNA, 25 bp, Artificial Sequence
  Synthetic
atctctgtcugacaacatcaaccug

SEQ ID NO: 41056 - DNA, 22 bp, Artificial Sequence
  Synthetic
cattacucagtgccugcaaggt

SEQ ID NO: 41057 - DNA, 25 bp, Artificial Sequence
  Synthetic
ccctttttgttuttgcctctctuca

SEQ ID NO: 41058 - DNA, 27 bp, Artificial Sequence
  Synthetic
acattaaaacuggcatctgtttccuca

SEQ ID NO: 41059 - DNA, 25 bp, Artificial Sequence
  Synthetic
gaaaacacucccccttcatagucat

SEQ ID NO: 41060 - DNA, 21 bp, Artificial Sequence
  Synthetic
gggtcagautctcagcuccca

SEQ ID NO: 41061 - DNA, 17 bp, Artificial Sequence
  Synthetic
ctcuccggcggauacgg

SEQ ID NO: 41062 - DNA, 22 bp, Artificial Sequence
  Synthetic
tccgaaggagacccutgacuag

SEQ ID NO: 41063 - DNA, 21 bp, Artificial Sequence
  Synthetic
tggcutcaguaggaggacagt

SEQ ID NO: 41064 - DNA, 29 bp, Artificial Sequence
  Synthetic
tgactgagagaagcagutatttagtuagg

SEQ ID NO: 41065 - DNA, 28 bp, Artificial Sequence
  Synthetic
cccaaaaggugtcttaaatgtagugagt

SEQ ID NO: 41066 - DNA, 20 bp, Artificial Sequence
  Synthetic
gagagcgccgcuttgaaauc

SEQ ID NO: 41067 - DNA, 22 bp, Artificial Sequence
  Synthetic
aggtautttgccaauggccact

SEQ ID NO: 41068 - DNA, 23 bp, Artificial Sequence
  Synthetic
tcaaagcccugttaccctggaua

SEQ ID NO: 41069 - DNA, 28 bp, Artificial Sequence
  Synthetic
ggcaaatatgtttucacatgggactuac

SEQ ID NO: 41070 - DNA, 27 bp, Artificial Sequence
  Synthetic
agctctttguaccaaatacccaatcug

SEQ ID NO: 41071 - DNA, 27 bp, Artificial Sequence
  Synthetic
atgtcttaaataucaacaggccacugt

SEQ ID NO: 41072 - DNA, 22 bp, Artificial Sequence
  Synthetic
ggacaggagguagccagagaua

SEQ ID NO: 41073 - DNA, 30 bp, Artificial Sequence; identical to SEQ ID NO: 28839
  Synthetic

SEQ ID NO: 41074 - DNA, 25 bp, Artificial Sequence
  Synthetic
tggtgagtuactttggaaaugagct

SEQ ID NO: 41075 - DNA, 25 bp, Artificial Sequence
  Synthetic
agatgggaautgacaaugcaaaagg

SEQ ID NO: 41076 - DNA, 31 bp, Artificial Sequence; identical to SEQ ID NO: 28842
  Synthetic

SEQ ID NO: 41077 - DNA, 28 bp, Artificial Sequence
  Synthetic
cctcccataacuctaacaatctcatcuc

SEQ ID NO: 41078 - DNA, 25 bp, Artificial Sequence
  Synthetic
tgtaacaagagagccuaacccugat

SEQ ID NO: 41079 - DNA, 30 bp, Artificial Sequence; identical to SEQ ID NO: 28845
  Synthetic

SEQ ID NO: 41080 - DNA, 24 bp, Artificial Sequence
  Synthetic
tctccaagggagaugagcuagaag

SEQ ID NO: 41081 - DNA, 28 bp, Artificial Sequence
  Synthetic
gcagtagauagggagaucatgtatttut

SEQ ID NO: 41082 - DNA, 28 bp, Artificial Sequence
  Synthetic
ttttagaggacacutttctgttggtuct

SEQ ID NO: 41083 - DNA, 28 bp, Artificial Sequence
  Synthetic
tcttcaatcttatcutctcccgagtuca

SEQ ID NO: 41084 - DNA, 26 bp, Artificial Sequence
  Synthetic
ccaaagtctttatuctgagaccccut

SEQ ID NO: 41085 - DNA, 27 bp, Artificial Sequence
  Synthetic
ttgtagggaagguctactctcactuac

SEQ ID NO: 41086 - DNA, 23 bp, Artificial Sequence
  Synthetic
tggagctccuttcccttgactua

SEQ ID NO: 41087 - DNA, 22 bp, Artificial Sequence
  Synthetic
cacauccccaggtcaguagaac

SEQ ID NO: 41088 - DNA, 23 bp, Artificial Sequence
  Synthetic
gccctgaggutttgcttaggtua

SEQ ID NO: 41089 - DNA, 31 bp, Artificial Sequence; identical to SEQ ID NO: 28855
  Synthetic

SEQ ID NO: 41090 - DNA, 27 bp, Artificial Sequence
  Synthetic
gctaccacuaaaatgtatcttccucca

SEQ ID NO: 41091 - DNA, 21 bp, Artificial Sequence
  Synthetic
gcttcttcutcctggugcact

SEQ ID NO: 41092 - DNA, 28 bp, Artificial Sequence
  Synthetic
ccatttttagautacatttgggucagca

SEQ ID NO: 41093 - DNA, 26 bp, Artificial Sequence
  Synthetic
atgcattccuggttgttttcttucag

SEQ ID NO: 41094 - DNA, 27 bp, Artificial Sequence
  Synthetic
tggtgcaautaatggagauagaagaca

SEQ ID NO: 41095 - DNA, 23 bp, Artificial Sequence
  Synthetic
ctatagtgctutgcctggcuaca

SEQ ID NO: 41096 - DNA, 28 bp, Artificial Sequence
  Synthetic
aagtttcactctaguggtttttgaccut

SEQ ID NO: 41097 - DNA, 29 bp, Artificial Sequence
  Synthetic
cgccaatatagauctgcttattatccuga

SEQ ID NO: 41098 - DNA, 22 bp, Artificial Sequence
  Synthetic
cucaccccaauaaggcccaaat

SEQ ID NO: 41099 - DNA, 27 bp, Artificial Sequence
  Synthetic
tggagatugacaagtacuggagagaat

SEQ ID NO: 41100 - DNA, 26 bp, Artificial Sequence
  Synthetic
aacttcaggugatcagttgtgtugat

SEQ ID NO: 41101 - DNA, 22 bp, Artificial Sequence
  Synthetic
gacagcctguttccagtcauct

SEQ ID NO: 41102 - DNA, 24 bp, Artificial Sequence
  Synthetic
caaactcaaaagcutgtggaguca

SEQ ID NO: 41103 - DNA, 28 bp, Artificial Sequence
  Synthetic
gtctcaaattcatuttcacactggatut

SEQ ID NO: 41104 - DNA, 17 bp, Artificial Sequence
  Synthetic
ctagcgcgcucagggua

SEQ ID NO: 41105 - DNA, 17 bp, Artificial Sequence
  Synthetic
ggtggcgaugctgcuca

SEQ ID NO: 41106 - DNA, 23 bp, Artificial Sequence
  Synthetic
ccgtttgctcucagttgccauat

SEQ ID NO: 41107 - DNA, 31 bp, Artificial Sequence; identical to SEQ ID NO: 28873
  Synthetic

SEQ ID NO: 41108 - DNA, 24 bp, Artificial Sequence
  Synthetic
gtgccattugttgtgtatctuggt

SEQ ID NO: 41109 - DNA, 31 bp, Artificial Sequence; identical to SEQ ID NO: 28875
  Synthetic

SEQ ID NO: 41110 - DNA, 31 bp, Artificial Sequence; identical to SEQ ID NO: 28876
  Synthetic

SEQ ID NO: 41111 - DNA, 24 bp, Artificial Sequence
  Synthetic
tcattcaacacuaacgtgcctugt

SEQ ID NO: 41112 - DNA, 29 bp, Artificial Sequence
  Synthetic
actataataguagactgttcctucacgct

SEQ ID NO: 41113 - DNA, 28 bp, Artificial Sequence
  Synthetic
gttcatcacauaccagacaatagcauct

SEQ ID NO: 41114 - DNA, 25 bp, Artificial Sequence
  Synthetic
acttcttgauaaccgtcagtgctut

SEQ ID NO: 41115 - DNA, 31 bp, Artificial Sequence; identical to SEQ ID NO: 28881
  Synthetic

SEQ ID NO: 41116 - DNA, 33 bp, Artificial Sequence; identical to SEQ ID NO: 28882
  Synthetic

SEQ ID NO: 41117 - DNA, 28 bp, Artificial Sequence
  Synthetic
aactggacaaccaaugagattcttcuac

SEQ ID NO: 41118 - DNA, 27 bp, Artificial Sequence
  Synthetic
actccctacugactcacgtattttuct

SEQ ID NO: 41119 - DNA, 29 bp, Artificial Sequence
  Synthetic
caatgctcctauagaagctatccaacauc

SEQ ID NO: 41120 - DNA, 25 bp, Artificial Sequence
  Synthetic
gaaggcacatugctgaattgtatug

SEQ ID NO: 41121 - DNA, 27 bp, Artificial Sequence
  Synthetic
tgagttgaatguattttcatcccucat

SEQ ID NO: 41122 - DNA, 26 bp, Artificial Sequence
  Synthetic
atttgatgcugaactgtattgcuaca

SEQ ID NO: 41123 - DNA, 25 bp, Artificial Sequence
  Synthetic
gacgcatacuggcaactggatauaa

SEQ ID NO: 41124 - DNA, 26 bp, Artificial Sequence
  Synthetic
agtgtaactcaaguctctggttcuct

SEQ ID NO: 41125 - DNA, 19 bp, Artificial Sequence
  Synthetic
gagctcuaatgcggugcca

SEQ ID NO: 41126 - DNA, 19 bp, Artificial Sequence
  Synthetic
gggagatcugcccaagcug

SEQ ID NO: 41127 - DNA, 17 bp, Artificial Sequence
  Synthetic
ctgccguggcccuagaa

SEQ ID NO: 41128 - DNA, 24 bp, Artificial Sequence
  Synthetic
aaccatccucgttgaacugaacat

SEQ ID NO: 41129 - DNA, 19 bp, Artificial Sequence
  Synthetic
ctcggcagugctctcacuc

SEQ ID NO: 41130 - DNA, 17 bp, Artificial Sequence
  Synthetic
gcgaggugctcctcuct

SEQ ID NO: 41131 - DNA, 18 bp, Artificial Sequence
  Synthetic
gctggtguctcacccuca

SEQ ID NO: 41132 - DNA, 18 bp, Artificial Sequence
  Synthetic
ggcccccuttcacgctua

SEQ ID NO: 41133 - DNA, 19 bp, Artificial Sequence
  Synthetic
ccacacuctcctcgtuccc

SEQ ID NO: 41134 - DNA, 18 bp, Artificial Sequence
  Synthetic
ccccuccacctccctucc

SEQ ID NO: 41135 - DNA, 18 bp, Artificial Sequence
  Synthetic
cctgccacucggttcugt

SEQ ID NO: 41136 - DNA, 22 bp, Artificial Sequence
  Synthetic
ccaggtgguaggagctauaggg

SEQ ID NO: 41137 - DNA, 22 bp, Artificial Sequence
  Synthetic
ttgagaggaggguccccatuaa

SEQ ID NO: 41138 - DNA, 21 bp, Artificial Sequence
  Synthetic
caatgcugagaggtguggaca

SEQ ID NO: 41139 - DNA, 19 bp, Artificial Sequence
  Synthetic
ccaacacguccacctucgt

SEQ ID NO: 41140 - DNA, 22 bp, Artificial Sequence
  Synthetic
catcagccccutcctttgcaua

SEQ ID NO: 41141 - DNA, 30 bp, Artificial Sequence; identical to SEQ ID NO: 28907
  Synthetic

SEQ ID NO: 41142 - DNA, 26 bp, Artificial Sequence
  Synthetic
tgtttatggcaguaaccctaaaggug

SEQ ID NO: 41143 - DNA, 25 bp, Artificial Sequence
  Synthetic
tcactccattgucggttcatttcut

SEQ ID NO: 41144 - DNA, 19 bp, Artificial Sequence
  Synthetic
ccttctggaguggaggcut

SEQ ID NO: 41145 - DNA, 17 bp, Artificial Sequence
  Synthetic
gctccuccgcagguact

SEQ ID NO: 41146 - DNA, 22 bp, Artificial Sequence
  Synthetic
agtcactcugttgtccuccaga

SEQ ID NO: 41147 - DNA, 21 bp, Artificial Sequence
  Synthetic
acgaacgctucttcccctaug

SEQ ID NO: 41148 - DNA, 20 bp, Artificial Sequence
  Synthetic
ggacacgacacucaccacua

SEQ ID NO: 41149 - DNA, 20 bp, Artificial Sequence
  Synthetic
ctgtctccugaggctgtucc

SEQ ID NO: 41150 - DNA, 20 bp, Artificial Sequence
  Synthetic
cctcacccucctcttccuct

SEQ ID NO: 41151 - DNA, 18 bp, Artificial Sequence
  Synthetic
gctcuccccttccuccca

SEQ ID NO: 41152 - DNA, 18 bp, Artificial Sequence
  Synthetic
gcagcgguactcgccauc

SEQ ID NO: 41153 - DNA, 22 bp, Artificial Sequence
  Synthetic
ggtgattggccutgtccttuct

SEQ ID NO: 41154 - DNA, 20 bp, Artificial Sequence
  Synthetic
agagagugcagagcctcuga

SEQ ID NO: 41155 - DNA, 20 bp, Artificial Sequence
  Synthetic
gtcatgactucggcctccut

SEQ ID NO: 41156 - DNA, 21 bp, Artificial Sequence
  Synthetic
cccacaaucccacacgaacuc

SEQ ID NO: 41157 - DNA, 19 bp, Artificial Sequence
  Synthetic
cutcaccaucacgggcaac

SEQ ID NO: 41158 - DNA, 21 bp, Artificial Sequence
  Synthetic
gggcttcugggcttagaagut

SEQ ID NO: 41159 - DNA, 21 bp, Artificial Sequence
  Synthetic
gctctcuccaccctgtctuca

SEQ ID NO: 41160 - DNA, 19 bp, Artificial Sequence
  Synthetic
tgcaatccgcuccgtguaa

SEQ ID NO: 41161 - DNA, 20 bp, Artificial Sequence
  Synthetic
cagaggaggcucacuggaga

SEQ ID NO: 41162 - DNA, 17 bp, Artificial Sequence
  Synthetic
gggctcagguggaggug

SEQ ID NO: 41163 - DNA, 19 bp, Artificial Sequence
  Synthetic
tccacccucggugagaaga

SEQ ID NO: 41164 - DNA, 20 bp, Artificial Sequence
  Synthetic
gtctccugcacagaucggat

SEQ ID NO: 41165 - DNA, 22 bp, Artificial Sequence
  Synthetic
cacccaggucatggtgaucaaa

SEQ ID NO: 41166 - DNA, 21 bp, Artificial Sequence
  Synthetic
cccaggacutttcuccaggac

SEQ ID NO: 41167 - DNA, 25 bp, Artificial Sequence
  Synthetic
atccctggacccuaatgatttugac

SEQ ID NO: 41168 - DNA, 22 bp, Artificial Sequence
  Synthetic
cctgcccugtagagauaggagt

SEQ ID NO: 41169 - DNA, 22 bp, Artificial Sequence
  Synthetic
cagagacaucagaagggucagg

SEQ ID NO: 41170 - DNA, 29 bp, Artificial Sequence
  Synthetic
cttgccctcttuctcttctttcttatcut

SEQ ID NO: 41171 - DNA, 26 bp, Artificial Sequence
  Synthetic
ctggcatgtuctctgtgatactuaca

SEQ ID NO: 41172 - DNA, 17 bp, Artificial Sequence
  Synthetic
gcggucccacucacagt

SEQ ID NO: 41173 - DNA, 17 bp, Artificial Sequence
  Synthetic
cgctcccucctcucgga

SEQ ID NO: 41174 - DNA, 18 bp, Artificial Sequence
  Synthetic
ggtgggugggtccuagca

SEQ ID NO: 41175 - DNA, 17 bp, Artificial Sequence
  Synthetic
cgggccccgauaccauc

SEQ ID NO: 41176 - DNA, 27 bp, Artificial Sequence
  Synthetic
ccttgttttcugtttaaaaggcauaca

SEQ ID NO: 41177 - DNA, 28 bp, Artificial Sequence
  Synthetic
catctgatgcacgautttaaccacauac

SEQ ID NO: 41178 - DNA, 25 bp, Artificial Sequence
  Synthetic
tcagatttgutgtttcacuggagca

SEQ ID NO: 41179 - DNA, 20 bp, Artificial Sequence
  Synthetic
ggcucgttctaugcacacga

SEQ ID NO: 41180 - DNA, 22 bp, Artificial Sequence
  Synthetic
ctgtgcaaaaugggagtgacug

SEQ ID NO: 41181 - DNA, 24 bp, Artificial Sequence
  Synthetic
gtcctcccuacaattgcagactua

SEQ ID NO: 41182 - DNA, 26 bp, Artificial Sequence
  Synthetic
ggataactgcauttctcaaccaguga

SEQ ID NO: 41183 - DNA, 25 bp, Artificial Sequence
  Synthetic
aaacttcuagccccgtaacacauac

SEQ ID NO: 41184 - DNA, 22 bp, Artificial Sequence
  Synthetic
cccttacactuggtgccatcuc

SEQ ID NO: 41185 - DNA, 29 bp, Artificial Sequence
  Synthetic
atacacctagtaugtaaccacaaacatut

SEQ ID NO: 41186 - DNA, 24 bp, Artificial Sequence
  Synthetic
accagggaggaaccutgttctaut

SEQ ID NO: 41187 - DNA, 21 bp, Artificial Sequence
  Synthetic
tctgaaacaucctgcccucac

SEQ ID NO: 41188 - DNA, 25 bp, Artificial Sequence
  Synthetic
actcactgaaccuttcttgtccaut

SEQ ID NO: 41189 - DNA, 22 bp, Artificial Sequence
  Synthetic
ggaaccugaacgtgttuccaca

SEQ ID NO: 41190 - DNA, 27 bp, Artificial Sequence
  Synthetic
agcaaaagagguagaattggtttcuga

SEQ ID NO: 41191 - DNA, 25 bp, Artificial Sequence
  Synthetic
ccacccauatcctuaaaacaggaca

SEQ ID NO: 41192 - DNA, 26 bp, Artificial Sequence
  Synthetic
gattuagcacaaagguagaaggcaag

SEQ ID NO: 41193 - DNA, 22 bp, Artificial Sequence
  Synthetic
tgtggugaactctcuagaccca

SEQ ID NO: 41194 - DNA, 24 bp, Artificial Sequence
  Synthetic
ctttcttuccaaggagaccagcut

SEQ ID NO: 41195 - DNA, 24 bp, Artificial Sequence
  Synthetic
ctagtccaacuctattgcccucag

SEQ ID NO: 41196 - DNA, 21 bp, Artificial Sequence
  Synthetic
agtcacccuacccatggtuga

SEQ ID NO: 41197 - DNA, 30 bp, Artificial Sequence; identical to SEQ ID NO: 28963
  Synthetic

SEQ ID NO: 41198 - DNA, 27 bp, Artificial Sequence
  Synthetic
aattaagtttguggaagctaagagugt

SEQ ID NO: 41199 - DNA, 29 bp, Artificial Sequence
  Synthetic
cctctacatctcucagtttatcatcaugt

SEQ ID NO: 41200 - DNA, 27 bp, Artificial Sequence
  Synthetic
ttcatagaaucctttgagctugcaaga

SEQ ID NO: 41201 - DNA, 29 bp, Artificial Sequence
  Synthetic
actaacccagcugaatttaatctctgtut

SEQ ID NO: 41202 - DNA, 22 bp, Artificial Sequence
  Synthetic
gctgagtagguagggaaccuct

SEQ ID NO: 41203 - DNA, 28 bp, Artificial Sequence
  Synthetic
gcataaaccaatguatctcatgctcaut

SEQ ID NO: 41204 - DNA, 24 bp, Artificial Sequence
  Synthetic
acagtgaacacaugtccacugaaa

SEQ ID NO: 41205 - DNA, 26 bp, Artificial Sequence
  Synthetic
ggtggaguggagagaaagaaactuat

SEQ ID NO: 41206 - DNA, 23 bp, Artificial Sequence
  Synthetic
gagccctgcaguttctttccaua

SEQ ID NO: 41207 - DNA, 24 bp, Artificial Sequence
  Synthetic
aggattgatgucttccctcccuag

SEQ ID NO: 41208 - DNA, 24 bp, Artificial Sequence
  Synthetic
tgccatatgaugttgcacttucca

SEQ ID NO: 41209 - DNA, 31 bp, Artificial Sequence; identical to SEQ ID NO: 28975
  Synthetic

SEQ ID NO: 41210 - DNA, 27 bp, Artificial Sequence
  Synthetic
gtcccaaatgutcatttagttcuccac

SEQ ID NO: 41211 - DNA, 24 bp, Artificial Sequence
  Synthetic
gatgtgaggcauttctacccacut

SEQ ID NO: 41212 - DNA, 31 bp, Artificial Sequence; identical to SEQ ID NO: 28978
  Synthetic

SEQ ID NO: 41213 - DNA, 27 bp, Artificial Sequence
  Synthetic
gaaagcaatcaugcaatagcagcaaua

SEQ ID NO: 41214 - DNA, 23 bp, Artificial Sequence
  Synthetic
ccaatagctuggagggagtctut

SEQ ID NO: 41215 - DNA, 26 bp, Artificial Sequence
  Synthetic
ggcaaagutgaattgctuccaaaagt

SEQ ID NO: 41216 - DNA, 31 bp, Artificial Sequence; identical to SEQ ID NO: 28982
  Synthetic

SEQ ID NO: 41217 - DNA, 22 bp, Artificial Sequence
  Synthetic
gagtcauagcatcccucaagca

SEQ ID NO: 41218 - DNA, 28 bp, Artificial Sequence
  Synthetic
tcaaatgtttcatguttttggaccacug

SEQ ID NO: 41219 - DNA, 24 bp, Artificial Sequence
  Synthetic
agaaaactuggaaggctugggaaa

SEQ ID NO: 41220 - DNA, 28 bp, Artificial Sequence
  Synthetic
cattttgccuagtgctcaguaagaaaag

SEQ ID NO: 41221 - DNA, 27 bp, Artificial Sequence
  Synthetic
gacgtaggacucaaagagatggtttut

SEQ ID NO: 41222 - DNA, 27 bp, Artificial Sequence
  Synthetic
agagttcagagagutctttccaugagt

SEQ ID NO: 41223 - DNA, 27 bp, Artificial Sequence
  Synthetic
tgattcaugacagaatgcttauggaca

SEQ ID NO: 41224 - DNA, 25 bp, Artificial Sequence
  Synthetic
gggccatcaaugtgagtctttcuat

SEQ ID NO: 41225 - DNA, 30 bp, Artificial Sequence; identical to SEQ ID NO: 28991
  Synthetic

SEQ ID NO: 41226 - DNA, 28 bp, Artificial Sequence
  Synthetic
actatcataaugaactggcatactuggg

SEQ ID NO: 41227 - DNA, 22 bp, Artificial Sequence
  Synthetic
gggacatgguatttaccccuga

SEQ ID NO: 41228 - DNA, 22 bp, Artificial Sequence
  Synthetic
cccatgtggaguaggactcugt

SEQ ID NO: 41229 - DNA, 29 bp, Artificial Sequence
  Synthetic
agtaaaaacaaugccatugaaccaagaag

SEQ ID NO: 41230 - DNA, 27 bp, Artificial Sequence
  Synthetic
atgctataaaugacagcatgtgagcua

SEQ ID NO: 41231 - DNA, 26 bp, Artificial Sequence
  Synthetic
ggtctaugaagacacautcacccuat

SEQ ID NO: 41232 - DNA, 22 bp, Artificial Sequence
  Synthetic
ccactggacutaagtgctgcut

SEQ ID NO: 41233 - DNA, 27 bp, Artificial Sequence
  Synthetic
aacatcagtagcauttctttaccccut

SEQ ID NO: 41234 - DNA, 26 bp, Artificial Sequence
  Synthetic
gattcuttgtagcagaugaggagagg

SEQ ID NO: 41235 - DNA, 27 bp, Artificial Sequence
  Synthetic
gctatttatggtuttgcttgtggguag

SEQ ID NO: 41236 - DNA, 24 bp, Artificial Sequence
  Synthetic
acaaaggacggacaucagtgatuc

SEQ ID NO: 41237 - DNA, 30 bp, Artificial Sequence; identical to SEQ ID NO: 29003
  Synthetic

SEQ ID NO: 41238 - DNA, 27 bp, Artificial Sequence
  Synthetic
ccataaagtaaaggucccaagatucct

SEQ ID NO: 41239 - DNA, 30 bp, Artificial Sequence; identical to SEQ ID NO: 29005
  Synthetic

SEQ ID NO: 41240 - DNA, 28 bp, Artificial Sequence
  Synthetic
aatgtacccaagutttaggatgcttcut

SEQ ID NO: 41241 - DNA, 25 bp, Artificial Sequence
  Synthetic
acattgtttgguttgtctgacucca

SEQ ID NO: 41242 - DNA, 24 bp, Artificial Sequence
  Synthetic
cagtagaaacugtccaagguccat

SEQ ID NO: 41243 - DNA, 29 bp, Artificial Sequence
  Synthetic
gccataggtgucttattcctacttuacag

SEQ ID NO: 41244 - DNA, 31 bp, Artificial Sequence; identical to SEQ ID NO: 29010
  Synthetic

SEQ ID NO: 41245 - DNA, 26 bp, Artificial Sequence
  Synthetic
gatgaagaactguctcctcctaguga

SEQ ID NO: 41246 - DNA, 27 bp, Artificial Sequence
  Synthetic
ctgaattcaagucttttaccaggucca

SEQ ID NO: 41247 - DNA, 29 bp, Artificial Sequence
  Synthetic
tgagtguacagtggatauagaaaggacaa

SEQ ID NO: 41248 - DNA, 31 bp, Artificial Sequence; identical to SEQ ID NO: 29014
  Synthetic

SEQ ID NO: 41249 - DNA, 24 bp, Artificial Sequence
  Synthetic
gtgtccaccaaaaugaacgactut

SEQ ID NO: 41250 - DNA, 21 bp, Artificial Sequence
  Synthetic
cagguggagagctctattugc

SEQ ID NO: 41251 - DNA, 25 bp, Artificial Sequence
  Synthetic
cccactgauaaaaaggaagcaaucc

SEQ ID NO: 41252 - DNA, 26 bp, Artificial Sequence
  Synthetic
agucctttaaactuagggacagagga

SEQ ID NO: 41253 - DNA, 27 bp, Artificial Sequence
  Synthetic
gaacatctcacagcauttccatcttut

SEQ ID NO: 41254 - DNA, 21 bp, Artificial Sequence
  Synthetic
caagcaatgtuccagggccua

SEQ ID NO: 41255 - DNA, 22 bp, Artificial Sequence
  Synthetic
gcaagttctccugtctccctut

SEQ ID NO: 41256 - DNA, 23 bp, Artificial Sequence
  Synthetic
cccatgucagaaaagcgcatcua

SEQ ID NO: 41257 - DNA, 25 bp, Artificial Sequence
  Synthetic
gctaatggctcuttttccctttgut

SEQ ID NO: 41258 - DNA, 22 bp, Artificial Sequence
  Synthetic
caggaaaugggcaagauggaac

SEQ ID NO: 41259 - DNA, 23 bp, Artificial Sequence
  Synthetic
gcuaagaacaaggctttcuggga

SEQ ID NO: 41260 - DNA, 25 bp, Artificial Sequence
  Synthetic
ccacatatccautttctcaguggga

SEQ ID NO: 41261 - DNA, 26 bp, Artificial Sequence
  Synthetic
ccttctcuaccccttttcttucacag

SEQ ID NO: 41262 - DNA, 21 bp, Artificial Sequence
  Synthetic
caagaaggcutggagggagug

SEQ ID NO: 41263 - DNA, 25 bp, Artificial Sequence
  Synthetic
cgtgatccctutcttcttgtcttug

SEQ ID NO: 41264 - DNA, 24 bp, Artificial Sequence
  Synthetic
acacaaatccutctcaagctcucg

SEQ ID NO: 41265 - DNA, 24 bp, Artificial Sequence
  Synthetic
ctggcacauagcttttctcaucat

SEQ ID NO: 41266 - DNA, 22 bp, Artificial Sequence
  Synthetic
ccctttgutgctctuggagcat

SEQ ID NO: 41267 - DNA, 25 bp, Artificial Sequence
  Synthetic
cccctaattcugtgttttgtgtuca

SEQ ID NO: 41268 - DNA, 24 bp, Artificial Sequence
  Synthetic
gggataagcuacttttgcuaccac

SEQ ID NO: 41269 - DNA, 29 bp, Artificial Sequence
  Synthetic
gtggagtttagagutgatgttttccatut

SEQ ID NO: 41270 - DNA, 27 bp, Artificial Sequence
  Synthetic
tgcccaaatgutttagacagatuacca

SEQ ID NO: 41271 - DNA, 24 bp, Artificial Sequence
  Synthetic
ctcccactaautgtcctccaucac

SEQ ID NO: 41272 - DNA, 28 bp, Artificial Sequence
  Synthetic
aataaaagtagagaaacaugagccccut

SEQ ID NO: 41273 - DNA, 26 bp, Artificial Sequence
  Synthetic
gaccttttagcuttgtgcatctugag

SEQ ID NO: 41274 - DNA, 20 bp, Artificial Sequence
  Synthetic
caagttgggauacgccucca

SEQ ID NO: 41275 - DNA, 28 bp, Artificial Sequence
  Synthetic
gattgttctttgutgtctgtcttuccag

SEQ ID NO: 41276 - DNA, 22 bp, Artificial Sequence
  Synthetic
ggaatuccagcacttugagagg

SEQ ID NO: 41277 - DNA, 24 bp, Artificial Sequence
  Synthetic
ggacaagaccutttgtttccctug

SEQ ID NO: 41278 - DNA, 21 bp, Artificial Sequence
  Synthetic
atcctuaccccagagcucgat

SEQ ID NO: 41279 - DNA, 28 bp, Artificial Sequence
  Synthetic
tttcctctgccutgcgttttaatttuag

SEQ ID NO: 41280 - DNA, 17 bp, Artificial Sequence
  Synthetic
ccuggcacaggacugca

SEQ ID NO: 41281 - DNA, 19 bp, Artificial Sequence
  Synthetic
cutggguggagccacaact

SEQ ID NO: 41282 - DNA, 26 bp, Artificial Sequence
  Synthetic
tctcaatgaaaugctttggcagttut

SEQ ID NO: 41283 - DNA, 26 bp, Artificial Sequence
  Synthetic
gatguaagagaagagaguaccttugt

SEQ ID NO: 41284 - DNA, 25 bp, Artificial Sequence
  Synthetic
gtgtggcaataucacattccttguc

SEQ ID NO: 41285 - DNA, 25 bp, Artificial Sequence
  Synthetic
cacgtuccccagttgtaatuaccat

SEQ ID NO: 41286 - DNA, 27 bp, Artificial Sequence
  Synthetic
ttctccttttgugttttgtctctcugt

SEQ ID NO: 41287 - DNA, 23 bp, Artificial Sequence
  Synthetic
ggtgagaaaugaaaagccuggag

SEQ ID NO: 41288 - DNA, 29 bp, Artificial Sequence
  Synthetic
gaaaaggacugaactctaaattcuggact

SEQ ID NO: 41289 - DNA, 27 bp, Artificial Sequence
  Synthetic
cgtagcagugatcatgguaaaagaaga

SEQ ID NO: 41290 - DNA, 23 bp, Artificial Sequence
  Synthetic
ccctgcttcuggatcgtttacut

SEQ ID NO: 41291 - DNA, 31 bp, Artificial Sequence; identical to SEQ ID NO: 29057
  Synthetic

SEQ ID NO: 41292 - DNA, 27 bp, Artificial Sequence
  Synthetic
ttcttgtgtctucactgtctccattut

SEQ ID NO: 41293 - DNA, 26 bp, Artificial Sequence
  Synthetic
agttcagaugaagaacttgucacagg

SEQ ID NO: 41294 - DNA, 28 bp, Artificial Sequence
  Synthetic
cagcctcatcuggagatattgttaugac

SEQ ID NO: 41295 - DNA, 27 bp, Artificial Sequence
  Synthetic
gagtaatgttacucgctatgactugga

SEQ ID NO: 41296 - DNA, 23 bp, Artificial Sequence
  Synthetic
tcagctgaaauatccctguagcg

SEQ ID NO: 41297 - DNA, 26 bp, Artificial Sequence
  Synthetic
agtactgttugaagggttaggcatut

SEQ ID NO: 41298 - DNA, 28 bp, Artificial Sequence
  Synthetic
acaaaagaaccatuatacgaaggcctua

SEQ ID NO: 41299 - DNA, 31 bp, Artificial Sequence; identical to SEQ ID NO: 29065
  Synthetic

SEQ ID NO: 41300 - DNA, 17 bp, Artificial Sequence
  Synthetic
aacucccacggccctuc

SEQ ID NO: 41301 - DNA, 17 bp, Artificial Sequence
  Synthetic
tcccgctucggagggua

SEQ ID NO: 41302 - DNA, 17 bp, Artificial Sequence
  Synthetic
ctgcugccgcctcctua

SEQ ID NO: 41303 - DNA, 25 bp, Artificial Sequence
  Synthetic
ggaagaucgtatccuccaggaagag

SEQ ID NO: 41304 - DNA, 20 bp, Artificial Sequence
  Synthetic
gcaguggaaccgatccucag

SEQ ID NO: 41305 - DNA, 20 bp, Artificial Sequence
  Synthetic
gggatgagcgutccaaccut

SEQ ID NO: 41306 - DNA, 22 bp, Artificial Sequence
  Synthetic
ccttgtagccugtccagtctut

SEQ ID NO: 41307 - DNA, 21 bp, Artificial Sequence
  Synthetic
gtcccucaagaggtcuagcca

SEQ ID NO: 41308 - DNA, 25 bp, Artificial Sequence
  Synthetic
cctacctcucggttatcttttcucc

SEQ ID NO: 41309 - DNA, 22 bp, Artificial Sequence
  Synthetic
ccagaaccaaagcutcaucacc

SEQ ID NO: 41310 - DNA, 23 bp, Artificial Sequence
  Synthetic
ggtaaaggaccugcctgttctuc

SEQ ID NO: 41311 - DNA, 28 bp, Artificial Sequence
  Synthetic
tctcatgggauaagaaagttagggacuc

SEQ ID NO: 41312 - DNA, 21 bp, Artificial Sequence
  Synthetic
ctaggcacuggatggaggtug

SEQ ID NO: 41313 - DNA, 28 bp, Artificial Sequence
  Synthetic
gggctaaauataggtactugaaaagcct

SEQ ID NO: 41314 - DNA, 23 bp, Artificial Sequence
  Synthetic
aatgaagtccaugccaccatuct

SEQ ID NO: 41315 - DNA, 28 bp, Artificial Sequence
  Synthetic
gcttaatucagcaagactgtugaaaaca

SEQ ID NO: 41316 - DNA, 20 bp, Artificial Sequence
  Synthetic
aatgacutggtgguggcaga

SEQ ID NO: 41317 - DNA, 23 bp, Artificial Sequence
  Synthetic
tgccaaagtcutgtgacctguag

SEQ ID NO: 41318 - DNA, 24 bp, Artificial Sequence
  Synthetic
tttcagtgtucaccacccacaaua

SEQ ID NO: 41319 - DNA, 23 bp, Artificial Sequence
  Synthetic
gactcugaagaggctagaucgga

SEQ ID NO: 41320 - DNA, 23 bp, Artificial Sequence
  Synthetic
gccgacgucatgcaagtauacat

SEQ ID NO: 41321 - DNA, 23 bp, Artificial Sequence
  Synthetic
acttcttgactutgggagtgguc

SEQ ID NO: 41322 - DNA, 21 bp, Artificial Sequence
  Synthetic
ctcaccaacucaggucccaat

SEQ ID NO: 41323 - DNA, 23 bp, Artificial Sequence
  Synthetic
catctctgcuacccaagatgucc

SEQ ID NO: 41324 - DNA, 27 bp, Artificial Sequence
  Synthetic
aattgcagtcutgctgtattucaaagg

SEQ ID NO: 41325 - DNA, 28 bp, Artificial Sequence
  Synthetic
tgttagcuaagagagaacattcucagga

SEQ ID NO: 41326 - DNA, 23 bp, Artificial Sequence
  Synthetic
ttgctagtatgugcttggtcugg

SEQ ID NO: 41327 - DNA, 28 bp, Artificial Sequence
  Synthetic
aggaagtatggcucccaaagattauaga

SEQ ID NO: 41328 - DNA, 24 bp, Artificial Sequence
  Synthetic
acataatgcutgtggttuccccaa

SEQ ID NO: 41329 - DNA, 23 bp, Artificial Sequence
  Synthetic
ctctatagcccuctccaagcuca

SEQ ID NO: 41330 - DNA, 21 bp, Artificial Sequence
  Synthetic
gatgatgcuactgcagcugga

SEQ ID NO: 41331 - DNA, 20 bp, Artificial Sequence
  Synthetic
tgtgggacuctgtcctucgt

SEQ ID NO: 41332 - DNA, 23 bp, Artificial Sequence
  Synthetic
ctcccatcuccctgcaataacut

SEQ ID NO: 41333 - DNA, 24 bp, Artificial Sequence
  Synthetic
gtaagaccaacautgttgcuccag

SEQ ID NO: 41334 - DNA, 21 bp, Artificial Sequence
  Synthetic
cagggaucttgaggcugcaaa

SEQ ID NO: 41335 - DNA, 21 bp, Artificial Sequence
  Synthetic
ctaagtccgcutctggtcucc

SEQ ID NO: 41336 - DNA, 21 bp, Artificial Sequence
  Synthetic
gggaaaggugactcuggaaga

SEQ ID NO: 41337 - DNA, 23 bp, Artificial Sequence
  Synthetic
acuacacaacacguaggatcuac

SEQ ID NO: 41338 - DNA, 20 bp, Artificial Sequence
  Synthetic
tgctggcgaaugacgtctut

SEQ ID NO: 41339 - DNA, 29 bp, Artificial Sequence
  Synthetic
gattttggcttcuctcagaaactcattut

SEQ ID NO: 41340 - DNA, 25 bp, Artificial Sequence
  Synthetic
tcagtgttcagcugtctttggaaut

SEQ ID NO: 41341 - DNA, 21 bp, Artificial Sequence
  Synthetic
ctgautgttcctguggaagcc

SEQ ID NO: 41342 - DNA, 23 bp, Artificial Sequence
  Synthetic
ctaaggcagagutguaaccacct

SEQ ID NO: 41343 - DNA, 22 bp, Artificial Sequence
  Synthetic
acactttgcauctccctgtgug

SEQ ID NO: 41344 - DNA, 23 bp, Artificial Sequence
  Synthetic
ctcaggcaugcatcacaagtuag

SEQ ID NO: 41345 - DNA, 29 bp, Artificial Sequence
  Synthetic
gaacttgttgttutctcttttagggugaa

SEQ ID NO: 41346 - DNA, 28 bp, Artificial Sequence
  Synthetic
ttgtgtatgttuctagtcttacctucca

SEQ ID NO: 41347 - DNA, 28 bp, Artificial Sequence
  Synthetic
tcctgugaaggagaatatctcucaagat

SEQ ID NO: 41348 - DNA, 28 bp, Artificial Sequence
  Synthetic
aaagctctgtuaggatgattaaacagug

SEQ ID NO: 41349 - DNA, 26 bp, Artificial Sequence
  Synthetic
cccacttccaaauccttgtaatgugt

SEQ ID NO: 41350 - DNA, 22 bp, Artificial Sequence
  Synthetic
tcccaatcauacagccagcaug

SEQ ID NO: 41351 - DNA, 24 bp, Artificial Sequence
  Synthetic
tttacgugggctatactugccaat

SEQ ID NO: 41352 - DNA, 31 bp, Artificial Sequence; identical to SEQ ID NO: 29118
  Synthetic

SEQ ID NO: 41353 - DNA, 28 bp, Artificial Sequence
  Synthetic
acttagagtctugctttcagaattugct

SEQ ID NO: 41354 - DNA, 23 bp, Artificial Sequence
  Synthetic
ggtgcagcacacaugataaugag

SEQ ID NO: 41355 - DNA, 25 bp, Artificial Sequence
  Synthetic
gcctgaagccugatatcatgatugt

SEQ ID NO: 41356 - DNA, 22 bp, Artificial Sequence
  Synthetic
ggaatttgaagcugggcccaua

SEQ ID NO: 41357 - DNA, 24 bp, Artificial Sequence
  Synthetic
tgtttggcatuaaaaccgaaccug

SEQ ID NO: 41358 - DNA, 28 bp, Artificial Sequence
  Synthetic
gctttcctctucctctttgtaatttucc

SEQ ID NO: 41359 - DNA, 22 bp, Artificial Sequence
  Synthetic
aaccacacuaggguacagagct

SEQ ID NO: 41360 - DNA, 18 bp, Artificial Sequence
  Synthetic
gcagggcagcuctctgug

SEQ ID NO: 41361 - DNA, 19 bp, Artificial Sequence
  Synthetic
cacuctgcagguggacgag

SEQ ID NO: 41362 - DNA, 20 bp, Artificial Sequence
  Synthetic
gggcgttcugtgtgtcauca

SEQ ID NO: 41363 - DNA, 21 bp, Artificial Sequence
  Synthetic
ctaccugcccaacttcuaccc

SEQ ID NO: 41364 - DNA, 17 bp, Artificial Sequence
  Synthetic
gctugggccccacguag

SEQ ID NO: 41365 - DNA, 19 bp, Artificial Sequence
  Synthetic
cctgggugtatgcccucat

SEQ ID NO: 41366 - DNA, 23 bp, Artificial Sequence
  Synthetic
taggaccagaugtctgagucgat

SEQ ID NO: 41367 - DNA, 21 bp, Artificial Sequence
  Synthetic
ggaguacctauccagccacca

SEQ ID NO: 41368 - DNA, 17 bp, Artificial Sequence
  Synthetic
tcgccgugcgaacagua

SEQ ID NO: 41369 - DNA, 22 bp, Artificial Sequence
  Synthetic
tctacaaaggucacctgtucgg

SEQ ID NO: 41370 - DNA, 22 bp, Artificial Sequence
  Synthetic
gggaaacaaccccugaggatua

SEQ ID NO: 41371 - DNA, 24 bp, Artificial Sequence
  Synthetic
cttgcctttucttcttggttugca

SEQ ID NO: 41372 - DNA, 21 bp, Artificial Sequence
  Synthetic
gccctcaucacaaggtucact

SEQ ID NO: 41373 - DNA, 21 bp, Artificial Sequence
  Synthetic
gcacagactuccctgagctug

SEQ ID NO: 41374 - DNA, 22 bp, Artificial Sequence
  Synthetic
cacattucaagggcccuacact

SEQ ID NO: 41375 - DNA, 18 bp, Artificial Sequence
  Synthetic
gcuggagagcgacctgug

SEQ ID NO: 41376 - DNA, 22 bp, Artificial Sequence
  Synthetic
gatggctgugtgcatgcttauc

SEQ ID NO: 41377 - DNA, 29 bp, Artificial Sequence
  Synthetic
ctctaacagacuttgtgtgtttctuacca

SEQ ID NO: 41378 - DNA, 25 bp, Artificial Sequence
  Synthetic
agtttcaaauagcaactggaccuct

SEQ ID NO: 41379 - DNA, 23 bp, Artificial Sequence
  Synthetic
ggaucatcauccggaagacagaa

SEQ ID NO: 41380 - DNA, 22 bp, Artificial Sequence
  Synthetic
auttggaggacauggagagcac

SEQ ID NO: 41381 - DNA, 29 bp, Artificial Sequence
  Synthetic
ggctccugaaaggaaaacttgtttaauac

SEQ ID NO: 41382 - DNA, 20 bp, Artificial Sequence
  Synthetic
gaaguccgggacacugagag

SEQ ID NO: 41383 - DNA, 18 bp, Artificial Sequence
  Synthetic
cctcgaaguggacccgut

SEQ ID NO: 41384 - DNA, 19 bp, Artificial Sequence
  Synthetic
cucacaccggacguggaaa

SEQ ID NO: 41385 - DNA, 20 bp, Artificial Sequence
  Synthetic
ttcucacaacccucggaacc

SEQ ID NO: 41386 - DNA, 21 bp, Artificial Sequence
  Synthetic
cctggttcugcagagtcacut

SEQ ID NO: 41387 - DNA, 20 bp, Artificial Sequence
  Synthetic
cacagcggguctgattccuc

SEQ ID NO: 41388 - DNA, 21 bp, Artificial Sequence
  Synthetic
gggaggcaccuaagtaucgaa

SEQ ID NO: 41389 - DNA, 23 bp, Artificial Sequence
  Synthetic
tgttcccgttucctcttgatcuc

SEQ ID NO: 41390 - DNA, 22 bp, Artificial Sequence
  Synthetic
ggagaatgcaaggutcccacut

SEQ ID NO: 41391 - DNA, 23 bp, Artificial Sequence
  Synthetic
cctcatcggaaucaagctcagug

SEQ ID NO: 41392 - DNA, 26 bp, Artificial Sequence
  Synthetic
ccacaaagccccutataatacacuca

SEQ ID NO: 41393 - DNA, 27 bp, Artificial Sequence
  Synthetic
aggcaattgaaaaaguaaggaccauct

SEQ ID NO: 41394 - DNA, 22 bp, Artificial Sequence
  Synthetic
gctgtugctgagttuggagaac

SEQ ID NO: 41395 - DNA, 26 bp, Artificial Sequence
  Synthetic
tcattaatcccagcgcuttctacauc

SEQ ID NO: 41396 - DNA, 17 bp, Artificial Sequence
  Synthetic
cuggaagcgcccucagt

SEQ ID NO: 41397 - DNA, 27 bp, Artificial Sequence
  Synthetic
ggctgcgagtuataatgtgttacaauc

SEQ ID NO: 41398 - DNA, 25 bp, Artificial Sequence
  Synthetic
agtaagtgcuggatattcggguagt

SEQ ID NO: 41399 - DNA, 21 bp, Artificial Sequence
  Synthetic
ccttgtgccucttctgtucca

SEQ ID NO: 41400 - DNA, 24 bp, Artificial Sequence
  Synthetic
agcaaaagaugagagtgtccacut

SEQ ID NO: 41401 - DNA, 18 bp, Artificial Sequence
  Synthetic
cuccgcacggaguacgac

SEQ ID NO: 41402 - DNA, 23 bp, Artificial Sequence
  Synthetic
acaggcugaaagagttctcucac

SEQ ID NO: 41403 - DNA, 25 bp, Artificial Sequence
  Synthetic
gcatgttggugacctctgaatttut

SEQ ID NO: 41404 - DNA, 25 bp, Artificial Sequence
  Synthetic
atctttacugggtcagacugaggaa

SEQ ID NO: 41405 - DNA, 24 bp, Artificial Sequence
  Synthetic
caccatcctcugtttttgctguag

SEQ ID NO: 41406 - DNA, 26 bp, Artificial Sequence
  Synthetic
gacuaaaacaaccaaaccaaacucca

SEQ ID NO: 41407 - DNA, 23 bp, Artificial Sequence
  Synthetic
gcatttcgcautctgttgugacc

SEQ ID NO: 41408 - DNA, 25 bp, Artificial Sequence
  Synthetic
gaaaggaagaagacuacagggcaua

SEQ ID NO: 41409 - DNA, 27 bp, Artificial Sequence
  Synthetic
gtgacctgccuactaattcccataaut

SEQ ID NO: 41410 - DNA, 20 bp, Artificial Sequence
  Synthetic
gcggtccaugtaaccaugac

SEQ ID NO: 41411 - DNA, 28 bp, Artificial Sequence
  Synthetic
tcttttcatggtcucgtctcctaattuc

SEQ ID NO: 41412 - DNA, 26 bp, Artificial Sequence
  Synthetic
tgttccugagaaattttugccaacaa

SEQ ID NO: 41413 - DNA, 29 bp, Artificial Sequence
  Synthetic
acagtgagaaattuttgtctctgctttuc

SEQ ID NO: 41414 - DNA, 20 bp, Artificial Sequence
  Synthetic
cgcutctgtggucaggacat

SEQ ID NO: 41415 - DNA, 28 bp, Artificial Sequence
  Synthetic
catgagtttgcagugattttgctatuct

SEQ ID NO: 41416 - DNA, 20 bp, Artificial Sequence
  Synthetic
ccacgttgguctcgaggtuc

SEQ ID NO: 41417 - DNA, 20 bp, Artificial Sequence
  Synthetic
actcctcccutctgctucgt

SEQ ID NO: 41418 - DNA, 17 bp, Artificial Sequence
  Synthetic
ggacgcugggctuggat

SEQ ID NO: 41419 - DNA, 24 bp, Artificial Sequence
  Synthetic
ccutttguaaagauggaggaggag

SEQ ID NO: 41420 - DNA, 25 bp, Artificial Sequence
  Synthetic
ggactcacaatuacaagcctgttuc

SEQ ID NO: 41421 - DNA, 18 bp, Artificial Sequence
  Synthetic
gggagcgccugttuaccc

SEQ ID NO: 41422 - DNA, 22 bp, Artificial Sequence
  Synthetic
ctgcagucactcagtcuagcag

SEQ ID NO: 41423 - DNA, 23 bp, Artificial Sequence
  Synthetic
aaactccaccugcctagtttgut

SEQ ID NO: 41424 - DNA, 22 bp, Artificial Sequence
  Synthetic
aaatgcacaccguctcugagaa

SEQ ID NO: 41425 - DNA, 31 bp, Artificial Sequence; identical to SEQ ID NO: 29191
  Synthetic

SEQ ID NO: 41426 - DNA, 22 bp, Artificial Sequence
  Synthetic
caccgucccaguagaaaaccaa

SEQ ID NO: 41427 - DNA, 26 bp, Artificial Sequence
  Synthetic
atcggcttcuggttcttcttttcuag

SEQ ID NO: 41428 - DNA, 29 bp, Artificial Sequence
  Synthetic
agaaaacacagtaaauaggaggagacuct

SEQ ID NO: 41429 - DNA, 28 bp, Artificial Sequence
  Synthetic
ccagtgacuagaagttttccttccuaaa

SEQ ID NO: 41430 - DNA, 28 bp, Artificial Sequence
  Synthetic
caattatgcacagutcctttaacttuca

SEQ ID NO: 41431 - DNA, 26 bp, Artificial Sequence
  Synthetic
tcaactgcugcttattgtctcuacag

SEQ ID NO: 41432 - DNA, 21 bp, Artificial Sequence
  Synthetic
ggctgagagagcuttctcgug

SEQ ID NO: 41433 - DNA, 27 bp, Artificial Sequence
  Synthetic
aagtataggaacuaaggcagcuacact

SEQ ID NO: 41434 - DNA, 30 bp, Artificial Sequence; identical to SEQ ID NO: 29200
  Synthetic

SEQ ID NO: 41435 - DNA, 27 bp, Artificial Sequence
  Synthetic
ccccaaatgatugtgttctgttttgut

SEQ ID NO: 41436 - DNA, 22 bp, Artificial Sequence
  Synthetic
gcuggacaaggacaacuacaca

SEQ ID NO: 41437 - DNA, 26 bp, Artificial Sequence
  Synthetic
accattccauacacacctgttctuag

SEQ ID NO: 41438 - DNA, 26 bp, Artificial Sequence
  Synthetic
aggacaaaacaucttcgttcagauca

SEQ ID NO: 41439 - DNA, 29 bp, Artificial Sequence
  Synthetic
catggagctcaguttttgtgaatatctut

SEQ ID NO: 41440 - DNA, 26 bp, Artificial Sequence
  Synthetic
agaattatgctuggtacttggcugaa

SEQ ID NO: 41441 - DNA, 31 bp, Artificial Sequence; identical to SEQ ID NO: 29207
  Synthetic

SEQ ID NO: 41442 - DNA, 23 bp, Artificial Sequence
  Synthetic
gcatgggugaaagctagcuagat

SEQ ID NO: 41443 - DNA, 31 bp, Artificial Sequence; identical to SEQ ID NO: 29209
  Synthetic

SEQ ID NO: 41444 - DNA, 30 bp, Artificial Sequence; identical to SEQ ID NO: 29210
  Synthetic

SEQ ID NO: 41445 - DNA, 26 bp, Artificial Sequence
  Synthetic
gtctgtttacacucccttctccttut

SEQ ID NO: 41446 - DNA, 26 bp, Artificial Sequence
  Synthetic
ctcttcatccauctcagaagaagcug

SEQ ID NO: 41447 - DNA, 27 bp, Artificial Sequence
  Synthetic
aggaacgtcucagtggtttttaagtut

SEQ ID NO: 41448 - DNA, 24 bp, Artificial Sequence
  Synthetic
gaaacacuagacctauggcaacac

SEQ ID NO: 41449 - DNA, 27 bp, Artificial Sequence
  Synthetic
cttagcacacccucaaaagagtaauga

SEQ ID NO: 41450 - DNA, 27 bp, Artificial Sequence
  Synthetic
caaataaagatuccccactgtuccagt

SEQ ID NO: 41451 - DNA, 21 bp, Artificial Sequence
  Synthetic
gctggcatuacctcgcctaug

SEQ ID NO: 41452 - DNA, 25 bp, Artificial Sequence
  Synthetic
agggactaaguagaagggaugaagg

SEQ ID NO: 41453 - DNA, 28 bp, Artificial Sequence
  Synthetic
cataactgaaagccaaugacagatctut

SEQ ID NO: 41454 - DNA, 28 bp, Artificial Sequence
  Synthetic
tctgtatcatcugtatccatgtguacca

SEQ ID NO: 41455 - DNA, 24 bp, Artificial Sequence
  Synthetic
tgtatgtgtguttgactccacucc

SEQ ID NO: 41456 - DNA, 25 bp, Artificial Sequence
  Synthetic
gttcattacuggcatctaaguggac

SEQ ID NO: 41457 - DNA, 28 bp, Artificial Sequence
  Synthetic
gcttattagttgucttgccaattgtuct

SEQ ID NO: 41458 - DNA, 25 bp, Artificial Sequence
  Synthetic
gaaattcaagcagccuaaagcugat

SEQ ID NO: 41459 - DNA, 29 bp, Artificial Sequence
  Synthetic
agatgctagtgtutgaatctctctttuca

SEQ ID NO: 41460 - DNA, 26 bp, Artificial Sequence
  Synthetic
agaagagaaaucaagggtcauaccca

SEQ ID NO: 41461 - DNA, 23 bp, Artificial Sequence
  Synthetic
gaccctggagutcagggatatuc

SEQ ID NO: 41462 - DNA, 20 bp, Artificial Sequence
  Synthetic
caaggtgtuccaagccagug

SEQ ID NO: 41463 - DNA, 19 bp, Artificial Sequence
  Synthetic
caccagcagcauggcauag

SEQ ID NO: 41464 - DNA, 22 bp, Artificial Sequence
  Synthetic
tcaatcccucagaggctucact

SEQ ID NO: 41465 - DNA, 19 bp, Artificial Sequence
  Synthetic
cagaguggcagtgctgaug

SEQ ID NO: 41466 - DNA, 20 bp, Artificial Sequence
  Synthetic
gccatgucccttccugcaaa

SEQ ID NO: 41467 - DNA, 22 bp, Artificial Sequence
  Synthetic
cagcttccucctccacttcuac

SEQ ID NO: 41468 - DNA, 19 bp, Artificial Sequence
  Synthetic
gtgacaggcaugccaggua

SEQ ID NO: 41469 - DNA, 21 bp, Artificial Sequence
  Synthetic
cgccagatugaccaagtcucc

SEQ ID NO: 41470 - DNA, 20 bp, Artificial Sequence
  Synthetic
caaccaggcuggtcctgaua

SEQ ID NO: 41471 - DNA, 20 bp, Artificial Sequence
  Synthetic
ctgatggugcccctctctuc

SEQ ID NO: 41472 - DNA, 20 bp, Artificial Sequence
  Synthetic
aagcucacacagaggtgcut

SEQ ID NO: 41473 - DNA, 24 bp, Artificial Sequence
  Synthetic
gaaaaacatucgtggctucaagct

SEQ ID NO: 41474 - DNA, 21 bp, Artificial Sequence
  Synthetic
cagaggtugggagtttgggut

SEQ ID NO: 41475 - DNA, 21 bp, Artificial Sequence
  Synthetic
tgtccgctucagtgttccauc

SEQ ID NO: 41476 - DNA, 22 bp, Artificial Sequence
  Synthetic
tgagcaguatcaugagcccaga

SEQ ID NO: 41477 - DNA, 20 bp, Artificial Sequence
  Synthetic
ctgagccuccacatgtcucc

SEQ ID NO: 41478 - DNA, 20 bp, Artificial Sequence
  Synthetic
ccttggagcutcctcugagc

SEQ ID NO: 41479 - DNA, 22 bp, Artificial Sequence
  Synthetic
ggcctcttuccggatgtttcuc

SEQ ID NO: 41480 - DNA, 24 bp, Artificial Sequence
  Synthetic
ggactgagugttgtttctttucca

SEQ ID NO: 41481 - DNA, 25 bp, Artificial Sequence
  Synthetic
gtcccgaggcuatgaaattgaugaa

SEQ ID NO: 41482 - DNA, 24 bp, Artificial Sequence
  Synthetic
taacacttagggugcaggatuagg

SEQ ID NO: 41483 - DNA, 24 bp, Artificial Sequence
  Synthetic
tccttacccacugggattgtttug

SEQ ID NO: 41484 - DNA, 20 bp, Artificial Sequence
  Synthetic
ccccaaacccgaugacaucc

SEQ ID NO: 41485 - DNA, 27 bp, Artificial Sequence
  Synthetic
tcagcaagatcaucgcagagaatatut

SEQ ID NO: 41486 - DNA, 17 bp, Artificial Sequence
  Synthetic
gcctacccucccggcua

SEQ ID NO: 41487 - DNA, 17 bp, Artificial Sequence
  Synthetic
cggguccgggcaugaag

SEQ ID NO: 41488 - DNA, 23 bp, Artificial Sequence
  Synthetic
aacatuggccagaaggaagacut

SEQ ID NO: 41489 - DNA, 19 bp, Artificial Sequence
  Synthetic
accacugccctccacauca

SEQ ID NO: 41490 - DNA, 18 bp, Artificial Sequence
  Synthetic
cauccaguccagcgcact

SEQ ID NO: 41491 - DNA, 17 bp, Artificial Sequence
  Synthetic
ccctccgccuccatcuc

SEQ ID NO: 41492 - DNA, 21 bp, Artificial Sequence
  Synthetic
ggctcugaccccttgtccuat

SEQ ID NO: 41493 - DNA, 18 bp, Artificial Sequence
  Synthetic
gggagacucggccauacc

SEQ ID NO: 41494 - DNA, 20 bp, Artificial Sequence
  Synthetic
cccagcugaccctgtcttuc

SEQ ID NO: 41495 - DNA, 20 bp, Artificial Sequence
  Synthetic
gagcugcuaccaccaaaggt

SEQ ID NO: 41496 - DNA, 19 bp, Artificial Sequence
  Synthetic
gccctctcutcccacccua

SEQ ID NO: 41497 - DNA, 18 bp, Artificial Sequence
  Synthetic
cagggcugcagacacuca

SEQ ID NO: 41498 - DNA, 21 bp, Artificial Sequence
  Synthetic
ccctgccuggaaaaatggcua

SEQ ID NO: 41499 - DNA, 20 bp, Artificial Sequence
  Synthetic
cccttgugaggcggtuagag

SEQ ID NO: 41500 - DNA, 21 bp, Artificial Sequence
  Synthetic
ctcaagggccaggugtacauc

SEQ ID NO: 41501 - DNA, 23 bp, Artificial Sequence
  Synthetic
tccagtcaaaagauaggctcugt

SEQ ID NO: 41502 - DNA, 26 bp, Artificial Sequence
  Synthetic
acccagtgtgugttgttattgtuaat

SEQ ID NO: 41503 - DNA, 21 bp, Artificial Sequence
  Synthetic
ccccagcucctcattguacac

SEQ ID NO: 41504 - DNA, 28 bp, Artificial Sequence
  Synthetic
caagttaacacugattgaccatcatucc

SEQ ID NO: 41505 - DNA, 24 bp, Artificial Sequence
  Synthetic
ccagtagcctutctgagagccuaa

SEQ ID NO: 41506 - DNA, 21 bp, Artificial Sequence
  Synthetic
agacgctuctcccatagucgt

SEQ ID NO: 41507 - DNA, 22 bp, Artificial Sequence
  Synthetic
atgguagggcacaaugaagagg

SEQ ID NO: 41508 - DNA, 24 bp, Artificial Sequence
  Synthetic
gcttagucccaaggtcatgaauca

SEQ ID NO: 41509 - DNA, 29 bp, Artificial Sequence
  Synthetic
ctatattctggcuggtctgtatcttucag

SEQ ID NO: 41510 - DNA, 23 bp, Artificial Sequence
  Synthetic
ccaggugagattccagtuccaaa

SEQ ID NO: 41511 - DNA, 31 bp, Artificial Sequence; identical to SEQ ID NO: 29277
  Synthetic

SEQ ID NO: 41512 - DNA, 25 bp, Artificial Sequence
  Synthetic
acctgtcugaaggaagaatgtuagc

SEQ ID NO: 41513 - DNA, 25 bp, Artificial Sequence
  Synthetic
tcaaacttcatguccacgtctctut

SEQ ID NO: 41514 - DNA, 20 bp, Artificial Sequence
  Synthetic
accatagtgucacgctgcuc

SEQ ID NO: 41515 - DNA, 27 bp, Artificial Sequence
  Synthetic
tgactatucagatgaaatgtucgcagt

SEQ ID NO: 41516 - DNA, 23 bp, Artificial Sequence
  Synthetic
gggctggatutggagctaaagua

SEQ ID NO: 41517 - DNA, 31 bp, Artificial Sequence; identical to SEQ ID NO: 29283
  Synthetic

SEQ ID NO: 41518 - DNA, 24 bp, Artificial Sequence
  Synthetic
caccatcttccuctgtgtttccut

SEQ ID NO: 41519 - DNA, 23 bp, Artificial Sequence
  Synthetic
gggaaugccagacttcttuggag

SEQ ID NO: 41520 - DNA, 21 bp, Artificial Sequence
  Synthetic
tgtaaaggcucagggtucacg

SEQ ID NO: 41521 - DNA, 24 bp, Artificial Sequence
  Synthetic
tggaataccgacugccatttctut

SEQ ID NO: 41522 - DNA, 25 bp, Artificial Sequence
  Synthetic
atcccagaattuccttgtttccaut

SEQ ID NO: 41523 - DNA, 28 bp, Artificial Sequence
  Synthetic
atgtgcaacattuttcgtcttgtgauat

SEQ ID NO: 41524 - DNA, 25 bp, Artificial Sequence
  Synthetic
tagatctaaaagagagcucctccug

SEQ ID NO: 41525 - DNA, 28 bp, Artificial Sequence
  Synthetic
tgccactgctgaugtactttattaacut

SEQ ID NO: 41526 - DNA, 28 bp, Artificial Sequence
  Synthetic
aatgtttuccagagacaaagtugcaaaa

SEQ ID NO: 41527 - DNA, 25 bp, Artificial Sequence
  Synthetic
ccacagaagccucatatgaagaugg

SEQ ID NO: 41528 - DNA, 27 bp, Artificial Sequence
  Synthetic
cccaaatataccucaacagggatuacc

SEQ ID NO: 41529 - DNA, 29 bp, Artificial Sequence
  Synthetic
gttccacaaacatucagccctttataaut

SEQ ID NO: 41530 - DNA, 25 bp, Artificial Sequence
  Synthetic
cccaacaggtauatgaggagatcug

SEQ ID NO: 41531 - DNA, 25 bp, Artificial Sequence
  Synthetic
agacgtttccugtttgacctttuct

SEQ ID NO: 41532 - DNA, 24 bp, Artificial Sequence
  Synthetic
gaataagcucaggacaagtugcac

SEQ ID NO: 41533 - DNA, 28 bp, Artificial Sequence
  Synthetic
gtatcatccatugcccttttcttgatut

SEQ ID NO: 41534 - DNA, 21 bp, Artificial Sequence
  Synthetic
ctccccgacauttgcttgtug

SEQ ID NO: 41535 - DNA, 24 bp, Artificial Sequence
  Synthetic
cattgcatugaacacgtgcatuag

SEQ ID NO: 41536 - DNA, 23 bp, Artificial Sequence
  Synthetic
ccttattcucaccatcccucact

SEQ ID NO: 41537 - DNA, 20 bp, Artificial Sequence
  Synthetic
cagutgttctcaugcagccg

SEQ ID NO: 41538 - DNA, 21 bp, Artificial Sequence
  Synthetic
ccccacagaccugacttcuct

SEQ ID NO: 41539 - DNA, 19 bp, Artificial Sequence
  Synthetic
ggttcucccgaaugcggaa

SEQ ID NO: 41540 - DNA, 18 bp, Artificial Sequence
  Synthetic
cccctguctgcttggugc

SEQ ID NO: 41541 - DNA, 19 bp, Artificial Sequence
  Synthetic
gagtcgucctcgtcguaca

SEQ ID NO: 41542 - DNA, 20 bp, Artificial Sequence
  Synthetic
tgggacgugcagcattcuaa

SEQ ID NO: 41543 - DNA, 19 bp, Artificial Sequence
  Synthetic
cttgtguaccgccucacca

SEQ ID NO: 41544 - DNA, 22 bp, Artificial Sequence
  Synthetic
gggaagaggugtgctacacaug

SEQ ID NO: 41545 - DNA, 22 bp, Artificial Sequence
  Synthetic
acacgutgaaguggagcaagag

SEQ ID NO: 41546 - DNA, 20 bp, Artificial Sequence
  Synthetic
ctggctaaggugttccccug

SEQ ID NO: 41547 - DNA, 23 bp, Artificial Sequence
  Synthetic
atgtagtgaagutcggcacacut

SEQ ID NO: 41548 - DNA, 19 bp, Artificial Sequence
  Synthetic
gctggtgcugttccctguc

SEQ ID NO: 41549 - DNA, 18 bp, Artificial Sequence
  Synthetic
ggcgttuccagggctuac

SEQ ID NO: 41550 - DNA, 19 bp, Artificial Sequence
  Synthetic
gctgagugggctacgtcug

SEQ ID NO: 41551 - DNA, 22 bp, Artificial Sequence
  Synthetic
ctcagaugtgctgtugagacct

SEQ ID NO: 41552 - DNA, 20 bp, Artificial Sequence
  Synthetic
caagccacccauctccucag

SEQ ID NO: 41553 - DNA, 18 bp, Artificial Sequence
  Synthetic
tggccuctgtcuccccag

SEQ ID NO: 41554 - DNA, 18 bp, Artificial Sequence
  Synthetic
caaggcgaugcaggucca

SEQ ID NO: 41555 - DNA, 17 bp, Artificial Sequence
  Synthetic
ccctgcagcuggcctua

SEQ ID NO: 41556 - DNA, 23 bp, Artificial Sequence
  Synthetic
ctcatcgtggaguacgccaaaua

SEQ ID NO: 41557 - DNA, 19 bp, Artificial Sequence
  Synthetic
gugcagagccataugcacg

SEQ ID NO: 41558 - DNA, 24 bp, Artificial Sequence
  Synthetic
ggttactgaaagcucagggauagg

SEQ ID NO: 41559 - DNA, 27 bp, Artificial Sequence
  Synthetic
tgtataagggugtttctgtaaccucca

SEQ ID NO: 41560 - DNA, 21 bp, Artificial Sequence
  Synthetic
ctggcccugcttggatcauat

SEQ ID NO: 41561 - DNA, 23 bp, Artificial Sequence
  Synthetic
ctttcagcutgtgggaatuggac

SEQ ID NO: 41562 - DNA, 24 bp, Artificial Sequence
  Synthetic
tccctuccacatggatugaaaaca

SEQ ID NO: 41563 - DNA, 32 bp, Artificial Sequence; identical to SEQ ID NO: 29329
  Synthetic

SEQ ID NO: 41564 - DNA, 29 bp, Artificial Sequence
  Synthetic
ggcaaaattaauggacacgtttgatagut

SEQ ID NO: 41565 - DNA, 23 bp, Artificial Sequence
  Synthetic
gtctgcuaggagggaaaaucacc

SEQ ID NO: 41566 - DNA, 19 bp, Artificial Sequence
  Synthetic
gaagcgcuccgggtagaut

SEQ ID NO: 41567 - DNA, 20 bp, Artificial Sequence
  Synthetic
cgacuggagaaagcaagcug

SEQ ID NO: 41568 - DNA, 17 bp, Artificial Sequence
  Synthetic
caccccutccggcucac

SEQ ID NO: 41569 - DNA, 17 bp, Artificial Sequence
  Synthetic
cggtgcugtcccuggat

SEQ ID NO: 41570 - DNA, 27 bp, Artificial Sequence
  Synthetic
cagaacaauacagatacuagggaccaa

SEQ ID NO: 41571 - DNA, 22 bp, Artificial Sequence
  Synthetic
ctcttccugaactgctccucag

SEQ ID NO: 41572 - DNA, 22 bp, Artificial Sequence
  Synthetic
gctgtcaggaugggactgttug

SEQ ID NO: 41573 - DNA, 23 bp, Artificial Sequence
  Synthetic
gutatgagcuaggagcaccaagg

SEQ ID NO: 41574 - DNA, 28 bp, Artificial Sequence
  Synthetic
ccattttgccugatcaagttacaauaaa

SEQ ID NO: 41575 - DNA, 22 bp, Artificial Sequence
  Synthetic
gguaggaggagaagaguccaua

SEQ ID NO: 41576 - DNA, 21 bp, Artificial Sequence
  Synthetic
ccaagcutacctgugaaggct

SEQ ID NO: 41577 - DNA, 26 bp, Artificial Sequence
  Synthetic
tcgttggaagccautttgactatcut

SEQ ID NO: 41578 - DNA, 18 bp, Artificial Sequence
  Synthetic
gacaggugctagggcugt

SEQ ID NO: 41579 - DNA, 17 bp, Artificial Sequence
  Synthetic
gccaccuggacggctua

SEQ ID NO: 41580 - DNA, 18 bp, Artificial Sequence
  Synthetic
cctcaggaggutgccuct

SEQ ID NO: 41581 - DNA, 24 bp, Artificial Sequence
  Synthetic
ctcaaaggagacutcggttaucct

SEQ ID NO: 41582 - DNA, 30 bp, Artificial Sequence; identical to SEQ ID NO: 29348
  Synthetic

SEQ ID NO: 41583 - DNA, 22 bp, Artificial Sequence
  Synthetic
tccctccaggaugcttcuagac

SEQ ID NO: 41584 - DNA, 22 bp, Artificial Sequence
  Synthetic
cctcugaccaccagatgcttug

SEQ ID NO: 41585 - DNA, 21 bp, Artificial Sequence
  Synthetic
tcaagugcagtgttgugaggt

SEQ ID NO: 41586 - DNA, 21 bp, Artificial Sequence
  Synthetic
gcatuccagaacaagcagcuc

SEQ ID NO: 41587 - DNA, 24 bp, Artificial Sequence
  Synthetic
agaagtctcuttgcagctgugaaa

SEQ ID NO: 41588 - DNA, 22 bp, Artificial Sequence
  Synthetic
gcctacugagagcaagccatug

SEQ ID NO: 41589 - DNA, 21 bp, Artificial Sequence
  Synthetic
cctaacacuccggctctgugt

SEQ ID NO: 41590 - DNA, 30 bp, Artificial Sequence; identical to SEQ ID NO: 29356
  Synthetic

SEQ ID NO: 41591 - DNA, 23 bp, Artificial Sequence
  Synthetic
ggcugaaaagcacagtugaacag

SEQ ID NO: 41592 - DNA, 27 bp, Artificial Sequence
  Synthetic
agtagaaaauggcccctttgataaugt

SEQ ID NO: 41593 - DNA, 23 bp, Artificial Sequence
  Synthetic
gtcagagaaaccguctucaccat

SEQ ID NO: 41594 - DNA, 24 bp, Artificial Sequence
  Synthetic
tcctcccttucaagtgtcacttug

SEQ ID NO: 41595 - DNA, 24 bp, Artificial Sequence
  Synthetic
gtagtagcgaaagucagtcuggag

SEQ ID NO: 41596 - DNA, 25 bp, Artificial Sequence
  Synthetic
ctggtccacuttcttcttcttcuga

SEQ ID NO: 41597 - DNA, 21 bp, Artificial Sequence
  Synthetic
aggagagtuccaccccugaat

SEQ ID NO: 41598 - DNA, 26 bp, Artificial Sequence
  Synthetic
tgattctacagugctttctgttgcut

SEQ ID NO: 41599 - DNA, 23 bp, Artificial Sequence
  Synthetic
gcagcugagcctacauacacaac

SEQ ID NO: 41600 - DNA, 23 bp, Artificial Sequence
  Synthetic
gctgaaatgtuctacagccgcua

SEQ ID NO: 41601 - DNA, 21 bp, Artificial Sequence
  Synthetic
gccgucgattgtuaccaccag

SEQ ID NO: 41602 - DNA, 27 bp, Artificial Sequence
  Synthetic
aaaatctgaagaugtacccatgcucat

SEQ ID NO: 41603 - DNA, 28 bp, Artificial Sequence
  Synthetic
tgttttgagaatcauggaattctaggug

SEQ ID NO: 41604 - DNA, 26 bp, Artificial Sequence
  Synthetic
tccccttgtttugttcagatgtgaut

SEQ ID NO: 41605 - DNA, 24 bp, Artificial Sequence
  Synthetic
acagtgtguaaaacagacccucag

SEQ ID NO: 41606 - DNA, 23 bp, Artificial Sequence
  Synthetic
gaaatgaagcugaaggaggugga

SEQ ID NO: 41607 - DNA, 29 bp, Artificial Sequence
  Synthetic
ctcctgacatttcucctttttctctttut

SEQ ID NO: 41608 - DNA, 23 bp, Artificial Sequence
  Synthetic
ggcagaaggagagaugtttggug

SEQ ID NO: 41609 - DNA, 24 bp, Artificial Sequence
  Synthetic
ttgccaactguttcaagaactgug

SEQ ID NO: 41610 - DNA, 27 bp, Artificial Sequence
  Synthetic
aatttgcctctucagttgtaagcaaug

SEQ ID NO: 41611 - DNA, 24 bp, Artificial Sequence
  Synthetic
caagccaagaguaagtctcugagg

SEQ ID NO: 41612 - DNA, 29 bp, Artificial Sequence
  Synthetic
aaatgtgaattttcutgcagacttcagut

SEQ ID NO: 41613 - DNA, 28 bp, Artificial Sequence
  Synthetic
gtgtcacaactugtttccttacattuca

SEQ ID NO: 41614 - DNA, 24 bp, Artificial Sequence
  Synthetic
acccaactacutctcagagtucct

SEQ ID NO: 41615 - DNA, 30 bp, Artificial Sequence; identical to SEQ ID NO: 29381
  Synthetic

SEQ ID NO: 41616 - DNA, 22 bp, Artificial Sequence
  Synthetic
aaggcccctuctgtgtatccua

SEQ ID NO: 41617 - DNA, 31 bp, Artificial Sequence; identical to SEQ ID NO: 29383
  Synthetic

SEQ ID NO: 41618 - DNA, 23 bp, Artificial Sequence
  Synthetic
gggtcaatugcatagacagucaa

SEQ ID NO: 41619 - DNA, 28 bp, Artificial Sequence
  Synthetic
ggactgtcatguttgtactttgttugat

SEQ ID NO: 41620 - DNA, 25 bp, Artificial Sequence
  Synthetic
ctgaaaacacugacctatggcuagt

SEQ ID NO: 41621 - DNA, 31 bp, Artificial Sequence; identical to SEQ ID NO: 29387
  Synthetic

SEQ ID NO: 41622 - DNA, 23 bp, Artificial Sequence
  Synthetic
tgcaaacuacaggcttacagcut

SEQ ID NO: 41623 - DNA, 22 bp, Artificial Sequence
  Synthetic
tgcatcgtutcttgtccuccag

SEQ ID NO: 41624 - DNA, 25 bp, Artificial Sequence
  Synthetic
gactcgaaguacatagcttgtccug

SEQ ID NO: 41625 - DNA, 27 bp, Artificial Sequence
  Synthetic
agtgtttttgaaaucacagtgccttut

SEQ ID NO: 41626 - DNA, 28 bp, Artificial Sequence
  Synthetic
acatttcgugtatttcaaaaucggacag

SEQ ID NO: 41627 - DNA, 26 bp, Artificial Sequence
  Synthetic
tgtgctgtuacgctgttcttactuat

SEQ ID NO: 41628 - DNA, 30 bp, Artificial Sequence; identical to SEQ ID NO: 29394
  Synthetic

SEQ ID NO: 41629 - DNA, 28 bp, Artificial Sequence
  Synthetic
tcattgcactgugttttaacttgguaac

SEQ ID NO: 41630 - DNA, 22 bp, Artificial Sequence
  Synthetic
gcaggcaaccagaagucatcuc

SEQ ID NO: 41631 - DNA, 31 bp, Artificial Sequence; identical to SEQ ID NO: 29397
  Synthetic

SEQ ID NO: 41632 - DNA, 31 bp, Artificial Sequence; identical to SEQ ID NO: 29398
  Synthetic

SEQ ID NO: 41633 - DNA, 26 bp, Artificial Sequence
  Synthetic
tcaccaattcaacauacactgtccut

SEQ ID NO: 41634 - DNA, 22 bp, Artificial Sequence
  Synthetic
ccauctgtugccacaacaacaa

SEQ ID NO: 41635 - DNA, 27 bp, Artificial Sequence
  Synthetic
catttacaguagcccgtcaaaactuac

SEQ ID NO: 41636 - DNA, 24 bp, Artificial Sequence
  Synthetic
ggcttcttctuccaccacagauaa

SEQ ID NO: 41637 - DNA, 31 bp, Artificial Sequence; identical to SEQ ID NO: 29403
  Synthetic

SEQ ID NO: 41638 - DNA, 22 bp, Artificial Sequence
  Synthetic
acaaacagcugaaagcctcuga

SEQ ID NO: 41639 - DNA, 23 bp, Artificial Sequence
  Synthetic
tgagtgggcgccauatcaatuac

SEQ ID NO: 41640 - DNA, 24 bp, Artificial Sequence
  Synthetic
gataaaagaatacutgccgcgcut

SEQ ID NO: 41641 - DNA, 29 bp, Artificial Sequence
  Synthetic
gctcagggagacutcatcatcaauaaaac

SEQ ID NO: 41642 - DNA, 29 bp, Artificial Sequence
  Synthetic
ttcttcatgagcauatcgtataaugcaca

SEQ ID NO: 41643 - DNA, 28 bp, Artificial Sequence
  Synthetic
cgtcaatatucaagtgatggaugcaaat

SEQ ID NO: 41644 - DNA, 30 bp, Artificial Sequence; identical to SEQ ID NO: 29410
  Synthetic

SEQ ID NO: 41645 - DNA, 23 bp, Artificial Sequence
  Synthetic
aaagacccagagcutcaccttut

SEQ ID NO: 41646 - DNA, 28 bp, Artificial Sequence
  Synthetic
ctcttctctagcutatgtagccatauct

SEQ ID NO: 41647 - DNA, 28 bp, Artificial Sequence
  Synthetic
agttatcaaggcuatatcctggaatcug

SEQ ID NO: 41648 - DNA, 26 bp, Artificial Sequence
  Synthetic
cataaaactgccuacagtagcgtcua

SEQ ID NO: 41649 - DNA, 23 bp, Artificial Sequence
  Synthetic
ccauatgcatccuaggacagcag

SEQ ID NO: 41650 - DNA, 29 bp, Artificial Sequence
  Synthetic
tccttggaatugagagaatttgttacugt

SEQ ID NO: 41651 - DNA, 28 bp, Artificial Sequence
  Synthetic
gcggctgaaugaaactctcttaatttut

SEQ ID NO: 41652 - DNA, 20 bp, Artificial Sequence
  Synthetic
cggcaaucacgagtgttugg

SEQ ID NO: 41653 - DNA, 26 bp, Artificial Sequence
  Synthetic
ctcctggctatugtgcctaatttcua

SEQ ID NO: 41654 - DNA, 29 bp, Artificial Sequence
  Synthetic
tcttatcttcatagutgagcctcttccut

SEQ ID NO: 41655 - DNA, 28 bp, Artificial Sequence
  Synthetic
gcatgucatctctaactuccaagaggat

SEQ ID NO: 41656 - DNA, 31 bp, Artificial Sequence; identical to SEQ ID NO: 29422
  Synthetic

SEQ ID NO: 41657 - DNA, 25 bp, Artificial Sequence
  Synthetic
accgatgaacauacactccattgug

SEQ ID NO: 41658 - DNA, 29 bp, Artificial Sequence
  Synthetic
tcactaacatctcuatccagaactctucc

SEQ ID NO: 41659 - DNA, 25 bp, Artificial Sequence
  Synthetic
caggtacaautctgguggacaacat

SEQ ID NO: 41660 - DNA, 21 bp, Artificial Sequence
  Synthetic
ctggctcgcuctaaaggucaa

SEQ ID NO: 41661 - DNA, 31 bp, Artificial Sequence; identical to SEQ ID NO: 29427
  Synthetic

SEQ ID NO: 41662 - DNA, 23 bp, Artificial Sequence
  Synthetic
cctcacccugtgtcaccttauag

SEQ ID NO: 41663 - DNA, 23 bp, Artificial Sequence
  Synthetic
ccttcacttgugggaagggatug

SEQ ID NO: 41664 - DNA, 18 bp, Artificial Sequence
  Synthetic
accucagcaccgccuaac

SEQ ID NO: 41665 - DNA, 20 bp, Artificial Sequence
  Synthetic
ctctggccucttccacccua

SEQ ID NO: 41666 - DNA, 21 bp, Artificial Sequence
  Synthetic
ggctcacccutgtacttgcut

SEQ ID NO: 41667 - DNA, 21 bp, Artificial Sequence
  Synthetic
cggatcacugtgacgauaccg

SEQ ID NO: 41668 - DNA, 22 bp, Artificial Sequence
  Synthetic
cactcaaccuaaggctgtgugt

SEQ ID NO: 41669 - DNA, 22 bp, Artificial Sequence
  Synthetic
ccctcugagaagggacttcuga

SEQ ID NO: 41670 - DNA, 22 bp, Artificial Sequence
  Synthetic
ctggtcacaccugaatgctuct

SEQ ID NO: 41671 - DNA, 20 bp, Artificial Sequence
  Synthetic
gaggttggcauccgaguagg

SEQ ID NO: 41672 - DNA, 23 bp, Artificial Sequence
  Synthetic
gagttcaacagcuccgaguacag

SEQ ID NO: 41673 - DNA, 30 bp, Artificial Sequence; identical to SEQ ID NO: 29439
  Synthetic

SEQ ID NO: 41674 - DNA, 23 bp, Artificial Sequence
  Synthetic
gcaaaggcauggagaggactuac

SEQ ID NO: 41675 - DNA, 23 bp, Artificial Sequence
  Synthetic
ggccggtugtcattttcatugat

SEQ ID NO: 41676 - DNA, 22 bp, Artificial Sequence
  Synthetic
acccagagggautttguccaag

SEQ ID NO: 41677 - DNA, 22 bp, Artificial Sequence
  Synthetic
ggcagaaaaccagugtccucag

SEQ ID NO: 41678 - DNA, 25 bp, Artificial Sequence
  Synthetic
cccaucaacaagcctgtttuaaacc

SEQ ID NO: 41679 - DNA, 20 bp, Artificial Sequence
  Synthetic
gcacgttgucgttgacaucc

SEQ ID NO: 41680 - DNA, 20 bp, Artificial Sequence
  Synthetic
gtgaacagggccaguctucc

SEQ ID NO: 41681 - DNA, 20 bp, Artificial Sequence
  Synthetic
gagttcugccccacaccuac

SEQ ID NO: 41682 - DNA, 20 bp, Artificial Sequence
  Synthetic
ctcctgcaaccugtctgugt

SEQ ID NO: 41683 - DNA, 21 bp, Artificial Sequence
  Synthetic
cccacaauttgtgugcagagc

SEQ ID NO: 41684 - DNA, 20 bp, Artificial Sequence
  Synthetic
acccactuctctctcuggca

SEQ ID NO: 41685 - DNA, 19 bp, Artificial Sequence
  Synthetic
ggguccagagguacaagca

SEQ ID NO: 41686 - DNA, 19 bp, Artificial Sequence
  Synthetic
ccuccccaggaccaacguc

SEQ ID NO: 41687 - DNA, 22 bp, Artificial Sequence
  Synthetic
ctgtagaacutgttggguggct

SEQ ID NO: 41688 - DNA, 22 bp, Artificial Sequence
  Synthetic
tctctugcacccatctuaccct

SEQ ID NO: 41689 - DNA, 28 bp, Artificial Sequence
  Synthetic
tggtaggaaugagatgatagagacucac

SEQ ID NO: 41690 - DNA, 21 bp, Artificial Sequence
  Synthetic
acutcctcaucaacagcagca

SEQ ID NO: 41691 - DNA, 19 bp, Artificial Sequence
  Synthetic
gacatgggcucccctcuac

SEQ ID NO: 41692 - DNA, 23 bp, Artificial Sequence
  Synthetic
gtgtacaaugtgtctgtguccga

SEQ ID NO: 41693 - DNA, 21 bp, Artificial Sequence
  Synthetic
acctagtcuggctgtccauct

SEQ ID NO: 41694 - DNA, 21 bp, Artificial Sequence
  Synthetic
ggagtgugcaaagucacagga

SEQ ID NO: 41695 - DNA, 24 bp, Artificial Sequence
  Synthetic
tcatagctgcuctgcagaaagaug

SEQ ID NO: 41696 - DNA, 28 bp, Artificial Sequence
  Synthetic
ggaaggaaaggaacuctaaaaacctcut

SEQ ID NO: 41697 - DNA, 21 bp, Artificial Sequence
  Synthetic
cttuggcagccuagagaagct

SEQ ID NO: 41698 - DNA, 17 bp, Artificial Sequence
  Synthetic
ggctucccagccuccac

SEQ ID NO: 41699 - DNA, 18 bp, Artificial Sequence
  Synthetic
aatgggauccccggctuc

SEQ ID NO: 41700 - DNA, 25 bp, Artificial Sequence
  Synthetic
gaautacctggacuacgagaccaag

SEQ ID NO: 41701 - DNA, 23 bp, Artificial Sequence
  Synthetic
gttgaggttgucgatggaguagg

SEQ ID NO: 41702 - DNA, 21 bp, Artificial Sequence
  Synthetic
cagggtuaacaagggugcgat

SEQ ID NO: 41703 - DNA, 23 bp, Artificial Sequence
  Synthetic
aggacatgggutaggaagtguca

SEQ ID NO: 41704 - DNA, 19 bp, Artificial Sequence
  Synthetic
cttgaccuggccacctcuc

SEQ ID NO: 41705 - DNA, 20 bp, Artificial Sequence
  Synthetic
ccagtgguctctcaguccaa

SEQ ID NO: 41706 - DNA, 21 bp, Artificial Sequence
  Synthetic
cagaatgacugctctccugct

SEQ ID NO: 41707 - DNA, 21 bp, Artificial Sequence
  Synthetic
caccagguggtagaagctcug

SEQ ID NO: 41708 - DNA, 22 bp, Artificial Sequence
  Synthetic
aaggacgugacccactctttuc

SEQ ID NO: 41709 - DNA, 20 bp, Artificial Sequence
  Synthetic
aggtgtugacgatgtugcct

SEQ ID NO: 41710 - DNA, 22 bp, Artificial Sequence
  Synthetic
ctaccaccccuagatccaucct

SEQ ID NO: 41711 - DNA, 21 bp, Artificial Sequence
  Synthetic
gctttctgggucccatcctuc

SEQ ID NO: 41712 - DNA, 19 bp, Artificial Sequence
  Synthetic
ctacctucccccgggacua

SEQ ID NO: 41713 - DNA, 22 bp, Artificial Sequence
  Synthetic
tcccttcttaucctccccugag

SEQ ID NO: 41714 - DNA, 23 bp, Artificial Sequence
  Synthetic
gagtttgtgauctctcctgugga

SEQ ID NO: 41715 - DNA, 22 bp, Artificial Sequence
  Synthetic
cctctctuggcacaaggguaac

SEQ ID NO: 41716 - DNA, 21 bp, Artificial Sequence
  Synthetic
gaaccugcccatgaacaucac

SEQ ID NO: 41717 - DNA, 24 bp, Artificial Sequence
  Synthetic
gtccuctttttcacuggaaaccct

SEQ ID NO: 41718 - DNA, 18 bp, Artificial Sequence
  Synthetic
gccuacaacgugccccat

SEQ ID NO: 41719 - DNA, 22 bp, Artificial Sequence
  Synthetic
ttaggcauaagggaggtccuca

SEQ ID NO: 41720 - DNA, 22 bp, Artificial Sequence
  Synthetic
gcacccctuttctgtgtgttuc

SEQ ID NO: 41721 - DNA, 19 bp, Artificial Sequence
  Synthetic
ctaaaggugggccggtugt

SEQ ID NO: 41722 - DNA, 23 bp, Artificial Sequence
  Synthetic
agauctttcuggaagaggccact

SEQ ID NO: 41723 - DNA, 21 bp, Artificial Sequence
  Synthetic
tgtaggacucctgctcctcuc

SEQ ID NO: 41724 - DNA, 20 bp, Artificial Sequence
  Synthetic
ctgagccaggcacugtcaut

SEQ ID NO: 41725 - DNA, 18 bp, Artificial Sequence
  Synthetic
gggugcaggcccttguac

SEQ ID NO: 41726 - DNA, 21 bp, Artificial Sequence
  Synthetic
gcttggcugaggcuaaggaag

SEQ ID NO: 41727 - DNA, 19 bp, Artificial Sequence
  Synthetic
cctccaggauccgcuccat

SEQ ID NO: 41728 - DNA, 19 bp, Artificial Sequence
  Synthetic
agtgggagccuctgtguct

SEQ ID NO: 41729 - DNA, 17 bp, Artificial Sequence
  Synthetic
cuggacccagcctgugg

SEQ ID NO: 41730 - DNA, 28 bp, Artificial Sequence
  Synthetic
cttttgaatgautgaaggaccuaaagcc

SEQ ID NO: 41731 - DNA, 21 bp, Artificial Sequence
  Synthetic
ctttgctugttgccuccacaa

SEQ ID NO: 41732 - DNA, 24 bp, Artificial Sequence
  Synthetic
ggaaggatgtcucaaccagagcua

SEQ ID NO: 41733 - DNA, 22 bp, Artificial Sequence
  Synthetic
tgtcattgacgucgatgaccuc

SEQ ID NO: 41734 - DNA, 23 bp, Artificial Sequence
  Synthetic
ctcaggaccuaggagctgagaut

SEQ ID NO: 41735 - DNA, 20 bp, Artificial Sequence
  Synthetic
gctgagcaguctggaugagg

SEQ ID NO: 41736 - DNA, 23 bp, Artificial Sequence
  Synthetic
gtcttttccuctgactgtgcuct

SEQ ID NO: 41737 - DNA, 27 bp, Artificial Sequence
  Synthetic
cagtgtatauaggagagtgtgtgctug

SEQ ID NO: 41738 - DNA, 20 bp, Artificial Sequence
  Synthetic
gggcuagagaugacccacat

SEQ ID NO: 41739 - DNA, 19 bp, Artificial Sequence
  Synthetic
aggtguccagctgcgatug

SEQ ID NO: 41740 - DNA, 21 bp, Artificial Sequence
  Synthetic
cacttacaccaccugcctcut

SEQ ID NO: 41741 - DNA, 20 bp, Artificial Sequence
  Synthetic
tggcuagaggccactcaugt

SEQ ID NO: 41742 - DNA, 22 bp, Artificial Sequence
  Synthetic
cauctacatccugagggacgac

SEQ ID NO: 41743 - DNA, 20 bp, Artificial Sequence
  Synthetic
ctttgcacaaugccctguct

SEQ ID NO: 41744 - DNA, 22 bp, Artificial Sequence
  Synthetic
gggtugttgaacttuggaggct

SEQ ID NO: 41745 - DNA, 21 bp, Artificial Sequence
  Synthetic
cacguccaggacgttgtagut

SEQ ID NO: 41746 - DNA, 18 bp, Artificial Sequence
  Synthetic
ggccugagacgtcagcut

SEQ ID NO: 41747 - DNA, 19 bp, Artificial Sequence
  Synthetic
gcccagugaagggccugag

SEQ ID NO: 41748 - DNA, 20 bp, Artificial Sequence
  Synthetic
ctggaagggcaccugtcuac

SEQ ID NO: 41749 - DNA, 19 bp, Artificial Sequence
  Synthetic
gcccctugtgatgccugac

SEQ ID NO: 41750 - DNA, 21 bp, Artificial Sequence
  Synthetic
tcagatgtccgugtaccccut

SEQ ID NO: 41751 - DNA, 20 bp, Artificial Sequence
  Synthetic
ctttttgcaccauccgcugt

SEQ ID NO: 41752 - DNA, 17 bp, Artificial Sequence
  Synthetic
ggcauggcccugagcat

SEQ ID NO: 41753 - DNA, 19 bp, Artificial Sequence
  Synthetic
ggcccttcuggtcttccuc

SEQ ID NO: 41754 - DNA, 21 bp, Artificial Sequence
  Synthetic
ccctggagaucacagagcugt

SEQ ID NO: 41755 - DNA, 24 bp, Artificial Sequence
  Synthetic
tgaaggtagaggucagatgcugaa

SEQ ID NO: 41756 - DNA, 22 bp, Artificial Sequence
  Synthetic
tggctacaaautggacugcaac

SEQ ID NO: 41757 - DNA, 25 bp, Artificial Sequence
  Synthetic
caaagattgatgugcccttcctuac

SEQ ID NO: 41758 - DNA, 24 bp, Artificial Sequence
  Synthetic
cgacagtgccuaagacagaaatuc

SEQ ID NO: 41759 - DNA, 28 bp, Artificial Sequence
  Synthetic
gctgatcaacaaaugaaaagacaccuac

SEQ ID NO: 41760 - DNA, 27 bp, Artificial Sequence
  Synthetic
tgcacttaaaugcagattatttuggag

SEQ ID NO: 41761 - DNA, 27 bp, Artificial Sequence
  Synthetic
caccaaggaguctagtgatctacauga

SEQ ID NO: 41762 - DNA, 24 bp, Artificial Sequence
  Synthetic
gactattctcuccttcccgcttut

SEQ ID NO: 41763 - DNA, 23 bp, Artificial Sequence
  Synthetic
caccugtaaatactugccacagc

SEQ ID NO: 41764 - DNA, 19 bp, Artificial Sequence
  Synthetic
ccctguggacggtgactug

SEQ ID NO: 41765 - DNA, 22 bp, Artificial Sequence
  Synthetic
caucctcagaaaugcagcaagg

SEQ ID NO: 41766 - DNA, 25 bp, Artificial Sequence
  Synthetic
gtcttucaggagtcguaagaaagca

SEQ ID NO: 41767 - DNA, 26 bp, Artificial Sequence
  Synthetic
acctugaacacgagaaatgaugaaca

SEQ ID NO: 41768 - DNA, 27 bp, Artificial Sequence
  Synthetic
tgaaaattgucacgaaacaatgagcut

SEQ ID NO: 41769 - DNA, 20 bp, Artificial Sequence
  Synthetic
cagtgcccugagcaauagca

SEQ ID NO: 41770 - DNA, 26 bp, Artificial Sequence
  Synthetic
ctgtacctgtucacattcagacucaa

SEQ ID NO: 41771 - DNA, 22 bp, Artificial Sequence
  Synthetic
ctcccttcuttgtctcaugggt

SEQ ID NO: 41772 - DNA, 25 bp, Artificial Sequence
  Synthetic
gctacctagaautgaacacgucaga

SEQ ID NO: 41773 - DNA, 29 bp, Artificial Sequence
  Synthetic
cagcggtugacatctaatattugacaaaa

SEQ ID NO: 41774 - DNA, 21 bp, Artificial Sequence
  Synthetic
gcagacgucgttacaatcgug

SEQ ID NO: 41775 - DNA, 24 bp, Artificial Sequence
  Synthetic
ccattattgtuccctgatcugcaa

SEQ ID NO: 41776 - DNA, 21 bp, Artificial Sequence
  Synthetic
attcagatgguccggcaagut

SEQ ID NO: 41777 - DNA, 28 bp, Artificial Sequence
  Synthetic
cctcactagccutgtcaaaaatgaaaut

SEQ ID NO: 41778 - DNA, 22 bp, Artificial Sequence
  Synthetic
aaatgugctacacuggacacca

SEQ ID NO: 41779 - DNA, 21 bp, Artificial Sequence
  Synthetic
ggcaaagaaccacucaccugt

SEQ ID NO: 41780 - DNA, 27 bp, Artificial Sequence
  Synthetic
tggtatatcttguccagcaaccattut

SEQ ID NO: 41781 - DNA, 25 bp, Artificial Sequence
  Synthetic
ggcatttacgaaucacttctucagg

SEQ ID NO: 41782 - DNA, 29 bp, Artificial Sequence
  Synthetic
caagatggttgaaucccaagatguaaaaa

SEQ ID NO: 41783 - DNA, 28 bp, Artificial Sequence
  Synthetic
agttcccagcutgtatcctaauaagagt

SEQ ID NO: 41784 - DNA, 20 bp, Artificial Sequence
  Synthetic
gccaagaagugccccttcuc

SEQ ID NO: 41785 - DNA, 17 bp, Artificial Sequence
  Synthetic
cggcgcgugctguagat

SEQ ID NO: 41786 - DNA, 21 bp, Artificial Sequence
  Synthetic
tctggagugtaggauggcact

SEQ ID NO: 41787 - DNA, 22 bp, Artificial Sequence
  Synthetic
ccttcctcugcctatctgucca

SEQ ID NO: 41788 - DNA, 20 bp, Artificial Sequence
  Synthetic
cagggtcugaagccacucaa

SEQ ID NO: 41789 - DNA, 18 bp, Artificial Sequence
  Synthetic
gaaaccugggcgugacct

SEQ ID NO: 41790 - DNA, 19 bp, Artificial Sequence
  Synthetic
cucagcccuacaccatcuc

SEQ ID NO: 41791 - DNA, 19 bp, Artificial Sequence
  Synthetic
gtcctagtgugggctgcuc

SEQ ID NO: 41792 - DNA, 17 bp, Artificial Sequence
  Synthetic
ccgtggcugaccacugt

SEQ ID NO: 41793 - DNA, 18 bp, Artificial Sequence
  Synthetic
tggguctgcucacaggga

SEQ ID NO: 41794 - DNA, 22 bp, Artificial Sequence
  Synthetic
gggagctguagcttccauaagg

SEQ ID NO: 41795 - DNA, 18 bp, Artificial Sequence
  Synthetic
tggcaggugggctacuca

SEQ ID NO: 41796 - DNA, 22 bp, Artificial Sequence
  Synthetic
agatgctcacagucccccauat

SEQ ID NO: 41797 - DNA, 22 bp, Artificial Sequence
  Synthetic
aagggagaaacucactggctug

SEQ ID NO: 41798 - DNA, 19 bp, Artificial Sequence
  Synthetic
caggguggccacucacaat

SEQ ID NO: 41799 - DNA, 21 bp, Artificial Sequence
  Synthetic
cuccactaugggcaggagaga

SEQ ID NO: 41800 - DNA, 21 bp, Artificial Sequence
  Synthetic
ccaggtgugaactggtgtcug

SEQ ID NO: 41801 - DNA, 22 bp, Artificial Sequence
  Synthetic
caatggcccautctgacaucat

SEQ ID NO: 41802 - DNA, 18 bp, Artificial Sequence
  Synthetic
tcccutctcuggccccaa

SEQ ID NO: 41803 - DNA, 18 bp, Artificial Sequence
  Synthetic
gcagggcugggtgatgug

SEQ ID NO: 41804 - DNA, 17 bp, Artificial Sequence
  Synthetic
cugaccgugcccaggag

SEQ ID NO: 41805 - DNA, 17 bp, Artificial Sequence
  Synthetic
tgcugagcccccaagug

SEQ ID NO: 41806 - DNA, 31 bp, Artificial Sequence; identical to SEQ ID NO: 29572
  Synthetic

SEQ ID NO: 41807 - DNA, 21 bp, Artificial Sequence
  Synthetic
agtccaagcuaggccctttug

SEQ ID NO: 41808 - DNA, 21 bp, Artificial Sequence
  Synthetic
cuaaaggcacugagcacttuc

SEQ ID NO: 41809 - DNA, 22 bp, Artificial Sequence
  Synthetic
ggcactgacuctctctgccuat

SEQ ID NO: 41810 - DNA, 21 bp, Artificial Sequence
  Synthetic
ccaccagacutagggcctcua

SEQ ID NO: 41811 - DNA, 23 bp, Artificial Sequence
  Synthetic
agttcgauaagccagagaagcug

SEQ ID NO: 41812 - DNA, 18 bp, Artificial Sequence
  Synthetic
tguccctcugcaccccat

SEQ ID NO: 41813 - DNA, 17 bp, Artificial Sequence
  Synthetic
gctgtugcccccactug

SEQ ID NO: 41814 - DNA, 23 bp, Artificial Sequence
  Synthetic
ccatcctuacagggtcctugagt

SEQ ID NO: 41815 - DNA, 19 bp, Artificial Sequence
  Synthetic
gggctttcugtgccactuc

SEQ ID NO: 41816 - DNA, 20 bp, Artificial Sequence
  Synthetic
tcatctgguggctgtgggua

SEQ ID NO: 41817 - DNA, 20 bp, Artificial Sequence
  Synthetic
cggtgccugcttctctctut

SEQ ID NO: 41818 - DNA, 22 bp, Artificial Sequence
  Synthetic
cacactccuccttggactctuc

SEQ ID NO: 41819 - DNA, 22 bp, Artificial Sequence
  Synthetic
tggtggcugaggacagaacuaa

SEQ ID NO: 41820 - DNA, 21 bp, Artificial Sequence
  Synthetic
cctaucagaggccaggguaga

SEQ ID NO: 41821 - DNA, 23 bp, Artificial Sequence
  Synthetic
gagctatguggaccaacactgut

SEQ ID NO: 41822 - DNA, 24 bp, Artificial Sequence
  Synthetic
gtacaccaaacugcacatugcaaa

SEQ ID NO: 41823 - DNA, 23 bp, Artificial Sequence
  Synthetic
cctatgtcacaccugtgttccuc

SEQ ID NO: 41824 - DNA, 20 bp, Artificial Sequence
  Synthetic
ggtccgaggugtctcuggaa

SEQ ID NO: 41825 - DNA, 25 bp, Artificial Sequence
  Synthetic
caaatgaguaactcttcctcuggct

SEQ ID NO: 41826 - DNA, 21 bp, Artificial Sequence
  Synthetic
cagtctctuggccacctucag

SEQ ID NO: 41827 - DNA, 23 bp, Artificial Sequence
  Synthetic
ccaaatcacuctctgcctgugaa

SEQ ID NO: 41828 - DNA, 21 bp, Artificial Sequence
  Synthetic
cugugagaagaucagcaacga

SEQ ID NO: 41829 - DNA, 21 bp, Artificial Sequence
  Synthetic
cugattcacccucagagggat

SEQ ID NO: 41830 - DNA, 23 bp, Artificial Sequence
  Synthetic
ttctagcagaaccuttgcaucca

SEQ ID NO: 41831 - DNA, 21 bp, Artificial Sequence
  Synthetic
cgtttgtugctgccttuccag

SEQ ID NO: 41832 - DNA, 20 bp, Artificial Sequence
  Synthetic
cccaagggaacutgcacuca

SEQ ID NO: 41833 - DNA, 23 bp, Artificial Sequence
  Synthetic
gtgttccucctctttggugacag

SEQ ID NO: 41834 - DNA, 20 bp, Artificial Sequence
  Synthetic
agacagtucctccccuccac

SEQ ID NO: 41835 - DNA, 23 bp, Artificial Sequence
  Synthetic
tcugagaacaagccccugagaat

SEQ ID NO: 41836 - DNA, 21 bp, Artificial Sequence
  Synthetic
cctaccccutccctttgtuga

SEQ ID NO: 41837 - DNA, 22 bp, Artificial Sequence
  Synthetic
tgttggtcugtcccatttgugt

SEQ ID NO: 41838 - DNA, 25 bp, Artificial Sequence
  Synthetic
ctctatgttatucagtgggacaugg

SEQ ID NO: 41839 - DNA, 19 bp, Artificial Sequence
  Synthetic
cggugggacacgcctaaug

SEQ ID NO: 41840 - DNA, 22 bp, Artificial Sequence
  Synthetic
gutttgggcctuagaggaccat

SEQ ID NO: 41841 - DNA, 18 bp, Artificial Sequence
  Synthetic
cctctccccucccctcug

SEQ ID NO: 41842 - DNA, 21 bp, Artificial Sequence
  Synthetic
ccuacccccaagagauggaga

SEQ ID NO: 41843 - DNA, 21 bp, Artificial Sequence
  Synthetic
gtcacgcucctcccacuaaac

SEQ ID NO: 41844 - DNA, 21 bp, Artificial Sequence
  Synthetic
gaagatgttcucccaggcgua

SEQ ID NO: 41845 - DNA, 20 bp, Artificial Sequence
  Synthetic
cagaagccuctcccctcuga

SEQ ID NO: 41846 - DNA, 22 bp, Artificial Sequence
  Synthetic
cttccccucagcccatctagua

SEQ ID NO: 41847 - DNA, 27 bp, Artificial Sequence
  Synthetic
gaatgtgaaacacuctgctctcattuc

SEQ ID NO: 41848 - DNA, 24 bp, Artificial Sequence
  Synthetic
caagtacctguattgctcctcuca

SEQ ID NO: 41849 - DNA, 23 bp, Artificial Sequence
  Synthetic
attttgcuggcaatgacagucac

SEQ ID NO: 41850 - DNA, 21 bp, Artificial Sequence
  Synthetic
gaagacgucgttctcctuccc

SEQ ID NO: 41851 - DNA, 21 bp, Artificial Sequence
  Synthetic
gaattagcccucaggcacuct

SEQ ID NO: 41852 - DNA, 20 bp, Artificial Sequence
  Synthetic
catccaccaguaggtgccut

SEQ ID NO: 41853 - DNA, 22 bp, Artificial Sequence
  Synthetic
ggtagggaguggtgagaagtug

SEQ ID NO: 41854 - DNA, 20 bp, Artificial Sequence
  Synthetic
gauggcgtgguccaagaact

SEQ ID NO: 41855 - DNA, 21 bp, Artificial Sequence
  Synthetic
cacatgaugcacacacgtcuc

SEQ ID NO: 41856 - DNA, 23 bp, Artificial Sequence
  Synthetic
cactttccugagtccucagacag

SEQ ID NO: 41857 - DNA, 20 bp, Artificial Sequence
  Synthetic
accctcutcctccuccaagt

SEQ ID NO: 41858 - DNA, 24 bp, Artificial Sequence
  Synthetic
ggtgatgaagaguaggaagacgug

SEQ ID NO: 41859 - DNA, 17 bp, Artificial Sequence
  Synthetic
atgccccuggccttcug

SEQ ID NO: 41860 - DNA, 20 bp, Artificial Sequence
  Synthetic
ccgaggcuttgtgtucacga

SEQ ID NO: 41861 - DNA, 20 bp, Artificial Sequence
  Synthetic
agagtggguactccccctug

SEQ ID NO: 41862 - DNA, 22 bp, Artificial Sequence
  Synthetic
ctggagaaagguggctgagaut

SEQ ID NO: 41863 - DNA, 21 bp, Artificial Sequence
  Synthetic
tgcaccauccaactgagtgug

SEQ ID NO: 41864 - DNA, 21 bp, Artificial Sequence
  Synthetic
cactccaaguggtcacctgut

SEQ ID NO: 41865 - DNA, 24 bp, Artificial Sequence
  Synthetic
tccctaaggccugttttcctcuaa

SEQ ID NO: 41866 - DNA, 21 bp, Artificial Sequence
  Synthetic
gcccagaaugcaccactauca

SEQ ID NO: 41867 - DNA, 22 bp, Artificial Sequence
  Synthetic
ttggatuccgaccattcauccc

SEQ ID NO: 41868 - DNA, 23 bp, Artificial Sequence
  Synthetic
tggtcugctcctcuagagacaac

SEQ ID NO: 41869 - DNA, 26 bp, Artificial Sequence
  Synthetic
tgggtccctgutaaactaactcctua

SEQ ID NO: 41870 - DNA, 20 bp, Artificial Sequence
  Synthetic
cagtccuccactggatugcc

SEQ ID NO: 41871 - DNA, 22 bp, Artificial Sequence
  Synthetic
cttcccttauctggccatguga

SEQ ID NO: 41872 - DNA, 27 bp, Artificial Sequence
  Synthetic
ggatagtagaacaugtccaaagggaug

SEQ ID NO: 41873 - DNA, 28 bp, Artificial Sequence
  Synthetic
ctctaagcagagugacaatuacagaact

SEQ ID NO: 41874 - DNA, 20 bp, Artificial Sequence
  Synthetic
attgtgucccagggttgcut

SEQ ID NO: 41875 - DNA, 30 bp, Artificial Sequence; identical to SEQ ID NO: 29641
  Synthetic

SEQ ID NO: 41876 - DNA, 19 bp, Artificial Sequence
  Synthetic
ctgaagcugggtgtcugca

SEQ ID NO: 41877 - DNA, 23 bp, Artificial Sequence
  Synthetic
ttcaccagctucctcctctttuc

SEQ ID NO: 41878 - DNA, 22 bp, Artificial Sequence
  Synthetic
gcacacugatgttcaugcacag

SEQ ID NO: 41879 - DNA, 29 bp, Artificial Sequence
  Synthetic
ccaacttttcuccaaatcaagaatucaca

SEQ ID NO: 41880 - DNA, 21 bp, Artificial Sequence
  Synthetic
ggagtgtguggcagagaucaa

SEQ ID NO: 41881 - DNA, 20 bp, Artificial Sequence
  Synthetic
ctggactgcugtggtctguc

SEQ ID NO: 41882 - DNA, 21 bp, Artificial Sequence
  Synthetic
gggaucacagtcugacccaat

SEQ ID NO: 41883 - DNA, 22 bp, Artificial Sequence
  Synthetic
ctgaaucccgagcacacattuc

SEQ ID NO: 41884 - DNA, 21 bp, Artificial Sequence
  Synthetic
gggugcatctcuagagcaagc

SEQ ID NO: 41885 - DNA, 23 bp, Artificial Sequence
  Synthetic
gttcctcaaacguctctcgcuaa

SEQ ID NO: 41886 - DNA, 19 bp, Artificial Sequence
  Synthetic
ctcccccggacuctgttug

SEQ ID NO: 41887 - DNA, 20 bp, Artificial Sequence
  Synthetic
catcaccgaccuctcctgug

SEQ ID NO: 41888 - DNA, 23 bp, Artificial Sequence
  Synthetic
gagcucctctgtcucagaacaac

SEQ ID NO: 41889 - DNA, 27 bp, Artificial Sequence
  Synthetic
gagctgtgattcugctattggatttuc

SEQ ID NO: 41890 - DNA, 21 bp, Artificial Sequence
  Synthetic
ggaattcucgggccactttuc

SEQ ID NO: 41891 - DNA, 19 bp, Artificial Sequence
  Synthetic
acgacucagcacctucgac

SEQ ID NO: 41892 - DNA, 28 bp, Artificial Sequence
  Synthetic
gctgcaaatauagggaagtaagtucaca

SEQ ID NO: 41893 - DNA, 27 bp, Artificial Sequence
  Synthetic
gcaatttcttttuccttgtggtcugat

SEQ ID NO: 41894 - DNA, 27 bp, Artificial Sequence
  Synthetic
ccagcuaacctggatauggacaaaaat

SEQ ID NO: 41895 - DNA, 26 bp, Artificial Sequence
  Synthetic
gtgtgtaggaaccuagttgtgtuagt

SEQ ID NO: 41896 - DNA, 18 bp, Artificial Sequence
  Synthetic
gtggccccaaggutguga

SEQ ID NO: 41897 - DNA, 19 bp, Artificial Sequence
  Synthetic
gccaggcuggtcucaaaca

SEQ ID NO: 41898 - DNA, 23 bp, Artificial Sequence
  Synthetic
gctgagucagaattgcttgaucc

SEQ ID NO: 41899 - DNA, 28 bp, Artificial Sequence
  Synthetic
accacatagtatguccctttaaagcaut

SEQ ID NO: 41900 - DNA, 24 bp, Artificial Sequence
  Synthetic
ctaggtuaacaaggccaaacucca

SEQ ID NO: 41901 - DNA, 28 bp, Artificial Sequence
  Synthetic
gaaggcccauttgtaagaatgtugaaaa

SEQ ID NO: 41902 - DNA, 31 bp, Artificial Sequence; identical to SEQ ID NO: 29668
  Synthetic

SEQ ID NO: 41903 - DNA, 23 bp, Artificial Sequence
  Synthetic
tgtaaagcgcaggauggagatut

SEQ ID NO: 41904 - DNA, 22 bp, Artificial Sequence
  Synthetic
tcagtuccaacccaaatgccut

SEQ ID NO: 41905 - DNA, 21 bp, Artificial Sequence
  Synthetic
caagtgctaguccactggcut

SEQ ID NO: 41906 - DNA, 20 bp, Artificial Sequence
  Synthetic
gccaccgcuatcacctucag

SEQ ID NO: 41907 - DNA, 25 bp, Artificial Sequence
  Synthetic
cutcaatggctauagagagaaccca

SEQ ID NO: 41908 - DNA, 20 bp, Artificial Sequence
  Synthetic
ggaaagagutgcugcaccag

SEQ ID NO: 41909 - DNA, 19 bp, Artificial Sequence
  Synthetic
cacatccaucggcgcttug

SEQ ID NO: 41910 - DNA, 27 bp, Artificial Sequence
  Synthetic
gatatcgugccttctgtauacaaaggt

SEQ ID NO: 41911 - DNA, 28 bp, Artificial Sequence
  Synthetic
gtctcaatacuggccaagattacaguaa

SEQ ID NO: 41912 - DNA, 25 bp, Artificial Sequence
  Synthetic
cttctagugaagagagatcgccuct

SEQ ID NO: 41913 - DNA, 21 bp, Artificial Sequence
  Synthetic
aggtttgccuctctccucaca

SEQ ID NO: 41914 - DNA, 26 bp, Artificial Sequence
  Synthetic
cggagcaaacagguttaaagacatug

SEQ ID NO: 41915 - DNA, 22 bp, Artificial Sequence
  Synthetic
gctaacctgucccacctgatut

SEQ ID NO: 41916 - DNA, 24 bp, Artificial Sequence
  Synthetic
gctctttguactgaagatguggca

SEQ ID NO: 41917 - DNA, 24 bp, Artificial Sequence
  Synthetic
ccaacggagaagautcagaugagg

SEQ ID NO: 41918 - DNA, 21 bp, Artificial Sequence
  Synthetic
tggatggcugcttgggtttua

SEQ ID NO: 41919 - DNA, 28 bp, Artificial Sequence
  Synthetic
gacactaccattuggtttgattttggut

SEQ ID NO: 41920 - DNA, 22 bp, Artificial Sequence
  Synthetic
actcccgcutatactgggcuat

SEQ ID NO: 41921 - DNA, 30 bp, Artificial Sequence; identical to SEQ ID NO: 29687
  Synthetic

SEQ ID NO: 41922 - DNA, 25 bp, Artificial Sequence
  Synthetic
cagtaagaaaugaagagagggcgut

SEQ ID NO: 41923 - DNA, 22 bp, Artificial Sequence
  Synthetic
cctctcctcuccctttccucag

SEQ ID NO: 41924 - DNA, 25 bp, Artificial Sequence
  Synthetic
ggcctgtgagucaactaaaaguagg

SEQ ID NO: 41925 - DNA, 17 bp, Artificial Sequence
  Synthetic
tccagcuggcgcttuga

SEQ ID NO: 41926 - DNA, 30 bp, Artificial Sequence; identical to SEQ ID NO: 29692
  Synthetic

SEQ ID NO: 41927 - DNA, 25 bp, Artificial Sequence
  Synthetic
aggctagaccutctctgtccattua

SEQ ID NO: 41928 - DNA, 22 bp, Artificial Sequence
  Synthetic
cttgaaccaugttugcccaaga

SEQ ID NO: 41929 - DNA, 24 bp, Artificial Sequence
  Synthetic
cttaaagccucccttcctctuact

SEQ ID NO: 41930 - DNA, 23 bp, Artificial Sequence
  Synthetic
agagagatucttcccauccacca

SEQ ID NO: 41931 - DNA, 25 bp, Artificial Sequence
  Synthetic
actccccaccucttcttcttttcua

SEQ ID NO: 41932 - DNA, 17 bp, Artificial Sequence
  Synthetic
caaguccgccggcucat

SEQ ID NO: 41933 - DNA, 22 bp, Artificial Sequence
  Synthetic
cagctgtctucggttctctcug

SEQ ID NO: 41934 - DNA, 18 bp, Artificial Sequence
  Synthetic
cgcuccccggcctactua

SEQ ID NO: 41935 - DNA, 18 bp, Artificial Sequence
  Synthetic
tgagcgccutcactgucc

SEQ ID NO: 41936 - DNA, 17 bp, Artificial Sequence
  Synthetic
ttcaggucccgcacguc

SEQ ID NO: 41937 - DNA, 17 bp, Artificial Sequence
  Synthetic
ggctuccacgtgtgucc

SEQ ID NO: 41938 - DNA, 22 bp, Artificial Sequence
  Synthetic
cccctacagccucccattuact

SEQ ID NO: 41939 - DNA, 23 bp, Artificial Sequence
  Synthetic
cagaugggcaatagctuccagaa

SEQ ID NO: 41940 - DNA, 21 bp, Artificial Sequence
  Synthetic
agagtcaacacuccctgctug

SEQ ID NO: 41941 - DNA, 24 bp, Artificial Sequence
  Synthetic
ccgaguagaaacacagatgtguct

SEQ ID NO: 41942 - DNA, 20 bp, Artificial Sequence
  Synthetic
agccccuggttggaagaaug

SEQ ID NO: 41943 - DNA, 18 bp, Artificial Sequence
  Synthetic
gagatgccuccccuccct

SEQ ID NO: 41944 - DNA, 18 bp, Artificial Sequence
  Synthetic
gtgagcugtgggtugggt

SEQ ID NO: 41945 - DNA, 22 bp, Artificial Sequence
  Synthetic
cattcaggcacutaccagguga

SEQ ID NO: 41946 - DNA, 23 bp, Artificial Sequence
  Synthetic
cctgagacaucagtccacuggat

SEQ ID NO: 41947 - DNA, 25 bp, Artificial Sequence
  Synthetic
cttagcuacccactctauacccaca

SEQ ID NO: 41948 - DNA, 20 bp, Artificial Sequence
  Synthetic
caggcccugccatattgugt

SEQ ID NO: 41949 - DNA, 26 bp, Artificial Sequence
  Synthetic
aatccuggagattcctaucagaggag

SEQ ID NO: 41950 - DNA, 21 bp, Artificial Sequence
  Synthetic
atgtgagugtctagcauggct

SEQ ID NO: 41951 - DNA, 24 bp, Artificial Sequence
  Synthetic
ctgattcaggagcugagtcaugaa

SEQ ID NO: 41952 - DNA, 21 bp, Artificial Sequence
  Synthetic
ccttcccucggatctgttugg

SEQ ID NO: 41953 - DNA, 21 bp, Artificial Sequence
  Synthetic
ggacgagcaacgutacucaag

SEQ ID NO: 41954 - DNA, 22 bp, Artificial Sequence
  Synthetic
ccttgactgugaggttgaccug

SEQ ID NO: 41955 - DNA, 22 bp, Artificial Sequence
  Synthetic
tctgacutggatcucaccccaa

SEQ ID NO: 41956 - DNA, 23 bp, Artificial Sequence
  Synthetic
ctggtuccacacacccatctuat

SEQ ID NO: 41957 - DNA, 26 bp, Artificial Sequence
  Synthetic
ctctgaactacautgtgtcttcugca

SEQ ID NO: 41958 - DNA, 18 bp, Artificial Sequence
  Synthetic
gacccacccuacccugga

SEQ ID NO: 41959 - DNA, 17 bp, Artificial Sequence
  Synthetic
gggtgtguggcccagug

SEQ ID NO: 41960 - DNA, 21 bp, Artificial Sequence
  Synthetic
gtccaagcccuaaagccucat

SEQ ID NO: 41961 - DNA, 25 bp, Artificial Sequence
  Synthetic
cttcaaauaccggtucaagaaggac

SEQ ID NO: 41962 - DNA, 19 bp, Artificial Sequence
  Synthetic
gcaagtgcugtggcctcut

SEQ ID NO: 41963 - DNA, 19 bp, Artificial Sequence
  Synthetic
agccaacccucatgcucac

SEQ ID NO: 41964 - DNA, 20 bp, Artificial Sequence
  Synthetic
gccacaccgagucagagaua

SEQ ID NO: 41965 - DNA, 20 bp, Artificial Sequence
  Synthetic
tggaacuggctgaccaugac

SEQ ID NO: 41966 - DNA, 19 bp, Artificial Sequence
  Synthetic
cctctccuctcccctcuga

SEQ ID NO: 41967 - DNA, 18 bp, Artificial Sequence
  Synthetic
ccuagacugcgggacaca

SEQ ID NO: 41968 - DNA, 20 bp, Artificial Sequence
  Synthetic
cagtgttgugctcaggguca

SEQ ID NO: 41969 - DNA, 23 bp, Artificial Sequence
  Synthetic
ctaatcccttuccagtcccucac

SEQ ID NO: 41970 - DNA, 19 bp, Artificial Sequence
  Synthetic
ccccagucgagacccugaa

SEQ ID NO: 41971 - DNA, 24 bp, Artificial Sequence
  Synthetic
ggcaagtcugtgaatacucagagg

SEQ ID NO: 41972 - DNA, 19 bp, Artificial Sequence
  Synthetic
tgccttcuagggctcucca

SEQ ID NO: 41973 - DNA, 17 bp, Artificial Sequence
  Synthetic
ctgtcgccccugcctut

SEQ ID NO: 41974 - DNA, 20 bp, Artificial Sequence
  Synthetic
ttttgagaccugcccuggac

SEQ ID NO: 41975 - DNA, 20 bp, Artificial Sequence
  Synthetic
cacgacucccatctgauccc

SEQ ID NO: 41976 - DNA, 19 bp, Artificial Sequence
  Synthetic
cttgttgcuggcgctgaug

SEQ ID NO: 41977 - DNA, 25 bp, Artificial Sequence
  Synthetic
tgctagcacaguatttacugagagg

SEQ ID NO: 41978 - DNA, 19 bp, Artificial Sequence
  Synthetic
aaggcctuggctatgguga

SEQ ID NO: 41979 - DNA, 18 bp, Artificial Sequence
  Synthetic
aguggacagggcccttug

SEQ ID NO: 41980 - DNA, 20 bp, Artificial Sequence
  Synthetic
cagtagagcuccgtctccuc

SEQ ID NO: 41981 - DNA, 21 bp, Artificial Sequence
  Synthetic
gagcctaccugcactgactut

SEQ ID NO: 41982 - DNA, 21 bp, Artificial Sequence
  Synthetic
gaaagagccggcuaaccuact

SEQ ID NO: 41983 - DNA, 20 bp, Artificial Sequence
  Synthetic
ctgattccaucccccaccug

SEQ ID NO: 41984 - DNA, 23 bp, Artificial Sequence
  Synthetic
ccaugggctgattuggaagaagg

SEQ ID NO: 41985 - DNA, 23 bp, Artificial Sequence
  Synthetic
tgucaacaactauggcaaaggct

SEQ ID NO: 41986 - DNA, 24 bp, Artificial Sequence
  Synthetic
ctaaaaggagggcugaatgaggua

SEQ ID NO: 41987 - DNA, 20 bp, Artificial Sequence
  Synthetic
cuggagagctucgagaaggc

SEQ ID NO: 41988 - DNA, 21 bp, Artificial Sequence
  Synthetic
ccaaggcaggucttgcaguag

SEQ ID NO: 41989 - DNA, 20 bp, Artificial Sequence
  Synthetic
gtccaaggcucagaguccag

SEQ ID NO: 41990 - DNA, 21 bp, Artificial Sequence
  Synthetic
cctttguccacacctgcaaug

SEQ ID NO: 41991 - DNA, 20 bp, Artificial Sequence
  Synthetic
tgattccugccccatgagug

SEQ ID NO: 41992 - DNA, 17 bp, Artificial Sequence
  Synthetic
ccatcucctcgcugcgt

SEQ ID NO: 41993 - DNA, 19 bp, Artificial Sequence
  Synthetic
gcagctccucgtgatccuc

SEQ ID NO: 41994 - DNA, 18 bp, Artificial Sequence
  Synthetic
cucatccgcuacgccaac

SEQ ID NO: 41995 - DNA, 20 bp, Artificial Sequence
  Synthetic
ggactttggcuccacccauc

SEQ ID NO: 41996 - DNA, 22 bp, Artificial Sequence
  Synthetic
cctaccacacaacaugttcugg

SEQ ID NO: 41997 - DNA, 23 bp, Artificial Sequence
  Synthetic
cccaaggcutctctttguaggaa

SEQ ID NO: 41998 - DNA, 23 bp, Artificial Sequence
  Synthetic
ctgatttcagggutcccaccuag

SEQ ID NO: 41999 - DNA, 23 bp, Artificial Sequence
  Synthetic
aagaagaacugcaggaacgugaa

SEQ ID NO: 42000 - DNA, 22 bp, Artificial Sequence
  Synthetic
tgtggaaauagcagcagcugag

SEQ ID NO: 42001 - DNA, 22 bp, Artificial Sequence
  Synthetic
gggaagguccatggtatggtut

SEQ ID NO: 42002 - DNA, 22 bp, Artificial Sequence
  Synthetic
cctgttggcugtggatgagaug

SEQ ID NO: 42003 - DNA, 26 bp, Artificial Sequence
  Synthetic
agtgctatuctaagttccuaggcaga

SEQ ID NO: 42004 - DNA, 21 bp, Artificial Sequence
  Synthetic
ctgcagucccatgaucaccat

SEQ ID NO: 42005 - DNA, 23 bp, Artificial Sequence
  Synthetic
gtagtagccuggcctctgauaca

SEQ ID NO: 42006 - DNA, 23 bp, Artificial Sequence
  Synthetic
gucacaggcauagacaccaaaga

SEQ ID NO: 42007 - DNA, 24 bp, Artificial Sequence
  Synthetic
tggttggtgautgttccaaaggut

SEQ ID NO: 42008 - DNA, 21 bp, Artificial Sequence
  Synthetic
cttcccttgcuctgagccuac

SEQ ID NO: 42009 - DNA, 21 bp, Artificial Sequence
  Synthetic
cagcautctggucagcacaac

SEQ ID NO: 42010 - DNA, 22 bp, Artificial Sequence
  Synthetic
tctcaacctutgccctccuact

SEQ ID NO: 42011 - DNA, 22 bp, Artificial Sequence
  Synthetic
gatcagtgucctgctggtguac

SEQ ID NO: 42012 - DNA, 20 bp, Artificial Sequence
  Synthetic
cagtgcuggacacucggaat

SEQ ID NO: 42013 - DNA, 22 bp, Artificial Sequence
  Synthetic
cctgctgccuggaatcttcuaa

SEQ ID NO: 42014 - DNA, 21 bp, Artificial Sequence
  Synthetic
cagcaggauggccatguagat

SEQ ID NO: 42015 - DNA, 19 bp, Artificial Sequence
  Synthetic
gcccaaggucatcgagugc

SEQ ID NO: 42016 - DNA, 23 bp, Artificial Sequence
  Synthetic
cgcttcugcaaggagaaagctua

SEQ ID NO: 42017 - DNA, 25 bp, Artificial Sequence
  Synthetic
ctggtaccugaagaccattgacauc

SEQ ID NO: 42018 - DNA, 25 bp, Artificial Sequence
  Synthetic
attaaggtcaugggaatacgctcug

SEQ ID NO: 42019 - DNA, 26 bp, Artificial Sequence
  Synthetic
tttgacttcaagcugttcttcaaugg

SEQ ID NO: 42020 - DNA, 23 bp, Artificial Sequence
  Synthetic
gggtgaaguttgcactttcuaca

SEQ ID NO: 42021 - DNA, 23 bp, Artificial Sequence
  Synthetic
ccaccatcaucttcgacaacugg

SEQ ID NO: 42022 - DNA, 22 bp, Artificial Sequence
  Synthetic
ccccugagagaaagggaugaga

SEQ ID NO: 42023 - DNA, 21 bp, Artificial Sequence
  Synthetic
caggctgcutgtgtgttucag

SEQ ID NO: 42024 - DNA, 23 bp, Artificial Sequence
  Synthetic
ctgtactggucacaagccaugat

SEQ ID NO: 42025 - DNA, 22 bp, Artificial Sequence
  Synthetic
tcucccauacagagcctctuag

SEQ ID NO: 42026 - DNA, 23 bp, Artificial Sequence
  Synthetic
ccagaagcaugacatggtctcuc

SEQ ID NO: 42027 - DNA, 21 bp, Artificial Sequence
  Synthetic
gtgtcccacggguaagcauat

SEQ ID NO: 42028 - DNA, 17 bp, Artificial Sequence
  Synthetic
ccugaagugcgcagcct

SEQ ID NO: 42029 - DNA, 17 bp, Artificial Sequence
  Synthetic
ggcggcacucacguaga

SEQ ID NO: 42030 - DNA, 20 bp, Artificial Sequence
  Synthetic
cagagcacauccgccaguat

SEQ ID NO: 42031 - DNA, 21 bp, Artificial Sequence
  Synthetic
tggagcuctaggtccuaagcc

SEQ ID NO: 42032 - DNA, 21 bp, Artificial Sequence
  Synthetic
gctttgccagugacacccuac

SEQ ID NO: 42033 - DNA, 21 bp, Artificial Sequence
  Synthetic
tgggtctautcctgcauccct

SEQ ID NO: 42034 - DNA, 20 bp, Artificial Sequence
  Synthetic
gggtacacugacgtcctcut

SEQ ID NO: 42035 - DNA, 22 bp, Artificial Sequence
  Synthetic
ctcaccctcauactgcaggtug

SEQ ID NO: 42036 - DNA, 22 bp, Artificial Sequence
  Synthetic
agtggcagccuagtcctctuag

SEQ ID NO: 42037 - DNA, 23 bp, Artificial Sequence
  Synthetic
cctucagagggauagaagtcaug

SEQ ID NO: 42038 - DNA, 19 bp, Artificial Sequence
  Synthetic
gtgccaguggctgaucact

SEQ ID NO: 42039 - DNA, 23 bp, Artificial Sequence
  Synthetic
ggaaggaaautcccaugagcaga

SEQ ID NO: 42040 - DNA, 25 bp, Artificial Sequence
  Synthetic
aatatgaccuggagagcattgacug

SEQ ID NO: 42041 - DNA, 28 bp, Artificial Sequence
  Synthetic
tcattagtccuattttgcagaugaggaa

SEQ ID NO: 42042 - DNA, 22 bp, Artificial Sequence
  Synthetic
acaagcucaacgccaacuacat

SEQ ID NO: 42043 - DNA, 24 bp, Artificial Sequence
  Synthetic
ggatatcttautcctgggcuggag

SEQ ID NO: 42044 - DNA, 17 bp, Artificial Sequence
  Synthetic
gcacagccccucccauc

SEQ ID NO: 42045 - DNA, 18 bp, Artificial Sequence
  Synthetic
ctccacgucacccuagcc

SEQ ID NO: 42046 - DNA, 24 bp, Artificial Sequence
  Synthetic
ggaatgauggagaccatccgaauc

SEQ ID NO: 42047 - DNA, 22 bp, Artificial Sequence
  Synthetic
cgcccauggtcctgauaagaaa

SEQ ID NO: 42048 - DNA, 21 bp, Artificial Sequence
  Synthetic
ggtggtccuagaggagaccut

SEQ ID NO: 42049 - DNA, 22 bp, Artificial Sequence
  Synthetic
acaccacacguacacctgtaug

SEQ ID NO: 42050 - DNA, 20 bp, Artificial Sequence
  Synthetic
ggtcaguctggaaugggaca

SEQ ID NO: 42051 - DNA, 19 bp, Artificial Sequence
  Synthetic
gcctugcgcaccagauagg

SEQ ID NO: 42052 - DNA, 22 bp, Artificial Sequence
  Synthetic
ggaatcccugcaacaacagcua

SEQ ID NO: 42053 - DNA, 21 bp, Artificial Sequence
  Synthetic
gccagcaaguggacaccuaag

SEQ ID NO: 42054 - DNA, 21 bp, Artificial Sequence
  Synthetic
ctccuggagcagauggaaagg

SEQ ID NO: 42055 - DNA, 20 bp, Artificial Sequence
  Synthetic
aggaucaacacaagcggugt

SEQ ID NO: 42056 - DNA, 29 bp, Artificial Sequence
  Synthetic
gacctctctgaguataaatttgccaagut

SEQ ID NO: 42057 - DNA, 20 bp, Artificial Sequence
  Synthetic
caccacccucatcacuacgg

SEQ ID NO: 42058 - DNA, 23 bp, Artificial Sequence
  Synthetic
ccatgagugatggcagugagaag

SEQ ID NO: 42059 - DNA, 26 bp, Artificial Sequence
  Synthetic
tataggaucctttttcugcagaggag

SEQ ID NO: 42060 - DNA, 22 bp, Artificial Sequence
  Synthetic
gggaacaccccuaacttuacct

SEQ ID NO: 42061 - DNA, 23 bp, Artificial Sequence
  Synthetic
acucagccaucaaaagacttuca

SEQ ID NO: 42062 - DNA, 18 bp, Artificial Sequence
  Synthetic
gggtgautcccccuccct

SEQ ID NO: 42063 - DNA, 20 bp, Artificial Sequence
  Synthetic
cctagcuccccttcccacuc

SEQ ID NO: 42064 - DNA, 19 bp, Artificial Sequence
  Synthetic
actuccaggccaccaaguc

SEQ ID NO: 42065 - DNA, 23 bp, Artificial Sequence
  Synthetic
accttgucaaacagggcaatgua

SEQ ID NO: 42066 - DNA, 23 bp, Artificial Sequence
  Synthetic
tccgttttcugtctgaacugacc

SEQ ID NO: 42067 - DNA, 23 bp, Artificial Sequence
  Synthetic
gtgaagaccucttugcggaagaa

SEQ ID NO: 42068 - DNA, 18 bp, Artificial Sequence
  Synthetic
ctgggccaaugcaugacc

SEQ ID NO: 42069 - DNA, 22 bp, Artificial Sequence
  Synthetic
ggactcctcucagcccttcuac

SEQ ID NO: 42070 - DNA, 20 bp, Artificial Sequence
  Synthetic
ctctcagugccttggtcucg

SEQ ID NO: 42071 - DNA, 22 bp, Artificial Sequence
  Synthetic
ctctgtcugtctgcatcuccat

SEQ ID NO: 42072 - DNA, 20 bp, Artificial Sequence
  Synthetic
ctgttcuccgtgttggucct

SEQ ID NO: 42073 - DNA, 19 bp, Artificial Sequence
  Synthetic
cagugccaggcagtccaua

SEQ ID NO: 42074 - DNA, 22 bp, Artificial Sequence
  Synthetic
ctcatcaucctggaccaugaca

SEQ ID NO: 42075 - DNA, 23 bp, Artificial Sequence
  Synthetic
cctattguacagctgugggaagt

SEQ ID NO: 42076 - DNA, 18 bp, Artificial Sequence
  Synthetic
ttgctgacgguccctgug

SEQ ID NO: 42077 - DNA, 18 bp, Artificial Sequence
  Synthetic
gcccaguggcacggauat

SEQ ID NO: 42078 - DNA, 19 bp, Artificial Sequence
  Synthetic
aggtccugtgacucccgat

SEQ ID NO: 42079 - DNA, 21 bp, Artificial Sequence
  Synthetic
gtaccucagggctttcuggag

SEQ ID NO: 42080 - DNA, 20 bp, Artificial Sequence
  Synthetic
gggttgtcugcctccaagug

SEQ ID NO: 42081 - DNA, 20 bp, Artificial Sequence
  Synthetic
gggcacugcagaccuagaag

SEQ ID NO: 42082 - DNA, 23 bp, Artificial Sequence
  Synthetic
ccaaggactuctgccagaacauc

SEQ ID NO: 42083 - DNA, 21 bp, Artificial Sequence
  Synthetic
cccagtucctctctctuccgt

SEQ ID NO: 42084 - DNA, 19 bp, Artificial Sequence
  Synthetic
ggacgugagcactcctcug

SEQ ID NO: 42085 - DNA, 21 bp, Artificial Sequence
  Synthetic
ggccaaaguacagcaacgcua

SEQ ID NO: 42086 - DNA, 20 bp, Artificial Sequence
  Synthetic
ggactcugagctctgagcug

SEQ ID NO: 42087 - DNA, 21 bp, Artificial Sequence
  Synthetic
ctctgagaagcccauggtgua

SEQ ID NO: 42088 - DNA, 19 bp, Artificial Sequence
  Synthetic
gccttctgugagggcaugt

SEQ ID NO: 42089 - DNA, 19 bp, Artificial Sequence
  Synthetic
cacuaggcccagcaggaug

SEQ ID NO: 42090 - DNA, 21 bp, Artificial Sequence
  Synthetic
cucacagccaugagcaaacag

SEQ ID NO: 42091 - DNA, 20 bp, Artificial Sequence
  Synthetic
catcccagagagaugccuca

SEQ ID NO: 42092 - DNA, 18 bp, Artificial Sequence
  Synthetic
cacgtguccccggtacuc

SEQ ID NO: 42093 - DNA, 21 bp, Artificial Sequence
  Synthetic
ccgttcugaccaauagacgac

SEQ ID NO: 42094 - DNA, 23 bp, Artificial Sequence
  Synthetic
ggaaatuccagtccctucaggat

SEQ ID NO: 42095 - DNA, 25 bp, Artificial Sequence
  Synthetic
cttccactccuttccagaaaacuca

SEQ ID NO: 42096 - DNA, 24 bp, Artificial Sequence
  Synthetic
actgcacuctctaagguaacaaca

SEQ ID NO: 42097 - DNA, 27 bp, Artificial Sequence
  Synthetic
gcaccacactcucctatctttactuac

SEQ ID NO: 42098 - DNA, 28 bp, Artificial Sequence
  Synthetic
gaggtgatcugaacttaaatctctuccc

SEQ ID NO: 42099 - DNA, 22 bp, Artificial Sequence
  Synthetic
acactaggcagucactgtucct

SEQ ID NO: 42100 - DNA, 22 bp, Artificial Sequence
  Synthetic
cgacacugtggtcctuagcaac

SEQ ID NO: 42101 - DNA, 24 bp, Artificial Sequence
  Synthetic
guaaggcagaaaggagaugcagat

SEQ ID NO: 42102 - DNA, 21 bp, Artificial Sequence
  Synthetic
aggcctgaugtcctaggaugt

SEQ ID NO: 42103 - DNA, 23 bp, Artificial Sequence
  Synthetic
agaaatcttcccugccaccttuc

SEQ ID NO: 42104 - DNA, 22 bp, Artificial Sequence
  Synthetic
ctgtgcaucccaggtttcuagg

SEQ ID NO: 42105 - DNA, 25 bp, Artificial Sequence
  Synthetic
tgggatttggugagaacaagagaut

SEQ ID NO: 42106 - DNA, 20 bp, Artificial Sequence
  Synthetic
ggcagcutaacgaugcccat

SEQ ID NO: 42107 - DNA, 23 bp, Artificial Sequence
  Synthetic
tcuaaagagaugaagcccccaca

SEQ ID NO: 42108 - DNA, 20 bp, Artificial Sequence
  Synthetic
ctucggcaggagggatugag

SEQ ID NO: 42109 - DNA, 18 bp, Artificial Sequence
  Synthetic
cagccccuccaccucaga

SEQ ID NO: 42110 - DNA, 23 bp, Artificial Sequence
  Synthetic
tcccaagccuatgggttcattuc

SEQ ID NO: 42111 - DNA, 23 bp, Artificial Sequence
  Synthetic
cctggctacauggaaaacgauct

SEQ ID NO: 42112 - DNA, 24 bp, Artificial Sequence
  Synthetic
ctggagatgcugtggatgtaacuc

SEQ ID NO: 42113 - DNA, 31 bp, Artificial Sequence; identical to SEQ ID NO: 29879
  Synthetic

SEQ ID NO: 42114 - DNA, 21 bp, Artificial Sequence
  Synthetic
gggagggugatggcagacuaa

SEQ ID NO: 42115 - DNA, 25 bp, Artificial Sequence
  Synthetic
caagautcttgcctuccaaaaccag

SEQ ID NO: 42116 - DNA, 24 bp, Artificial Sequence
  Synthetic
gttggtggtggutagtgggtatut

SEQ ID NO: 42117 - DNA, 21 bp, Artificial Sequence
  Synthetic
ggtgtctgcucctgcactauc

SEQ ID NO: 42118 - DNA, 22 bp, Artificial Sequence
  Synthetic
cacctctcaguccatctcucac

SEQ ID NO: 42119 - DNA, 27 bp, Artificial Sequence
  Synthetic
cagaaatgagacuatggagtcacucac

SEQ ID NO: 42120 - DNA, 23 bp, Artificial Sequence
  Synthetic
gcatttcaaagcutggctuggat

SEQ ID NO: 42121 - DNA, 22 bp, Artificial Sequence
  Synthetic
cagtctcguagggttucacagg

SEQ ID NO: 42122 - DNA, 26 bp, Artificial Sequence
  Synthetic
gggatgggaauagagacattcatcua

SEQ ID NO: 42123 - DNA, 22 bp, Artificial Sequence
  Synthetic
ccccacucaggtugaaaaggac

SEQ ID NO: 42124 - DNA, 22 bp, Artificial Sequence
  Synthetic
ccatccgttcugcatccctauc

SEQ ID NO: 42125 - DNA, 29 bp, Artificial Sequence
  Synthetic
cagggagaaaaagcucattcattcattuc

SEQ ID NO: 42126 - DNA, 21 bp, Artificial Sequence
  Synthetic
gtgccatgucggagaacauct

SEQ ID NO: 42127 - DNA, 23 bp, Artificial Sequence
  Synthetic
ggagagggaaucacauccaaagc

SEQ ID NO: 42128 - DNA, 33 bp, Artificial Sequence; identical to SEQ ID NO: 29894
  Synthetic

SEQ ID NO: 42129 - DNA, 22 bp, Artificial Sequence
  Synthetic
cctgtacacaugaagccaucgt

SEQ ID NO: 42130 - DNA, 31 bp, Artificial Sequence; identical to SEQ ID NO: 29896
  Synthetic

SEQ ID NO: 42131 - DNA, 28 bp, Artificial Sequence
  Synthetic
ccutctagaacaguagacacaaaacagg

SEQ ID NO: 42132 - DNA, 23 bp, Artificial Sequence
  Synthetic
tgcatggcautagcaaagacuca

SEQ ID NO: 42133 - DNA, 22 bp, Artificial Sequence
  Synthetic
gaguacagtgcaaugagggacc

SEQ ID NO: 42134 - DNA, 28 bp, Artificial Sequence
  Synthetic
gtacucatgaaaatggucagagaaacct

SEQ ID NO: 42135 - DNA, 22 bp, Artificial Sequence
  Synthetic
aacttgtgguagttggagcugg

SEQ ID NO: 42136 - DNA, 19 bp, Artificial Sequence
  Synthetic
ccggtauctactgguggca

SEQ ID NO: 42137 - DNA, 24 bp, Artificial Sequence
  Synthetic
gcctaccacucccttaaagacuga

SEQ ID NO: 42138 - DNA, 23 bp, Artificial Sequence
  Synthetic
cgatttctucccagggtcaaguc

SEQ ID NO: 42139 - DNA, 29 bp, Artificial Sequence
  Synthetic
cctgatctcagaaugtccttttctttuca

SEQ ID NO: 42140 - DNA, 21 bp, Artificial Sequence
  Synthetic
tgtttagaaggucgcgugcat

SEQ ID NO: 42141 - DNA, 29 bp, Artificial Sequence
  Synthetic
ttgggatcttgggautaagaaacaatcut

SEQ ID NO: 42142 - DNA, 24 bp, Artificial Sequence
  Synthetic
gatggctguctttttcacactugg

SEQ ID NO: 42143 - DNA, 28 bp, Artificial Sequence
  Synthetic
tcttcatcaaccuctggtaatcuacaga

SEQ ID NO: 42144 - DNA, 27 bp, Artificial Sequence
  Synthetic
tgccgatatauaccaagtactuagaca

SEQ ID NO: 42145 - DNA, 25 bp, Artificial Sequence
  Synthetic
ccggaauatccagacugacaacaac

SEQ ID NO: 42146 - DNA, 29 bp, Artificial Sequence
  Synthetic
cugaagcatcttaguaagacaaaacagga

SEQ ID NO: 42147 - DNA, 28 bp, Artificial Sequence
  Synthetic
gttggatacacagccuagacttacttut

SEQ ID NO: 42148 - DNA, 19 bp, Artificial Sequence
  Synthetic
cugggatuacaggcgcaga

SEQ ID NO: 42149 - DNA, 27 bp, Artificial Sequence
  Synthetic
cctatgcttccuctttcctttguacag

SEQ ID NO: 42150 - DNA, 20 bp, Artificial Sequence
  Synthetic
cagccgagguaccccattua

SEQ ID NO: 42151 - DNA, 26 bp, Artificial Sequence
  Synthetic
gtattacatugaatgccttgaugcca

SEQ ID NO: 42152 - DNA, 22 bp, Artificial Sequence
  Synthetic
ggcaaugactgaacugcagagt

SEQ ID NO: 42153 - DNA, 20 bp, Artificial Sequence
  Synthetic
cagaacagggcutccagguc

SEQ ID NO: 42154 - DNA, 21 bp, Artificial Sequence
  Synthetic
tgccgtcagguagttctccut

SEQ ID NO: 42155 - DNA, 21 bp, Artificial Sequence
  Synthetic
cctagugccaccgagataugc

SEQ ID NO: 42156 - DNA, 29 bp, Artificial Sequence
  Synthetic
atggtagtaatcugatcactagggtuaca

SEQ ID NO: 42157 - DNA, 25 bp, Artificial Sequence
  Synthetic
ttgcttgatugcaggaaatctucac

SEQ ID NO: 42158 - DNA, 18 bp, Artificial Sequence
  Synthetic
gggctccacucaccgtug

SEQ ID NO: 42159 - DNA, 19 bp, Artificial Sequence
  Synthetic
ccccagcugagtacggcua

SEQ ID NO: 42160 - DNA, 23 bp, Artificial Sequence
  Synthetic
cggattgtgtugtttctgggtuc

SEQ ID NO: 42161 - DNA, 22 bp, Artificial Sequence
  Synthetic
aactggguagcaaggcatcuac

SEQ ID NO: 42162 - DNA, 22 bp, Artificial Sequence
  Synthetic
gtccagauaggcaatgctgtuc

SEQ ID NO: 42163 - DNA, 23 bp, Artificial Sequence
  Synthetic
ccttgaaccaugaactctuggca

SEQ ID NO: 42164 - DNA, 23 bp, Artificial Sequence
  Synthetic
gttcttctugggaacgtttgcug

SEQ ID NO: 42165 - DNA, 24 bp, Artificial Sequence
  Synthetic
gtctctcaagcutttgtgtctgug

SEQ ID NO: 42166 - DNA, 22 bp, Artificial Sequence
  Synthetic
ttgttgagggacutgagtgugg

SEQ ID NO: 42167 - DNA, 23 bp, Artificial Sequence
  Synthetic
acaatcctggcugatctctcugt

SEQ ID NO: 42168 - DNA, 21 bp, Artificial Sequence
  Synthetic
cccctccaucttccaacucca

SEQ ID NO: 42169 - DNA, 20 bp, Artificial Sequence
  Synthetic
gggcugggacataaagcugt

SEQ ID NO: 42170 - DNA, 21 bp, Artificial Sequence
  Synthetic
ctcagugcaggacactuggat

SEQ ID NO: 42171 - DNA, 21 bp, Artificial Sequence
  Synthetic
cgcagtcuctggacuaaggag

SEQ ID NO: 42172 - DNA, 21 bp, Artificial Sequence
  Synthetic
gagacttgutccaaccugcca

SEQ ID NO: 42173 - DNA, 25 bp, Artificial Sequence
  Synthetic
gtgcattctugtttcactttgucca

SEQ ID NO: 42174 - DNA, 21 bp, Artificial Sequence
  Synthetic
gctgagggagguagaagccut

SEQ ID NO: 42175 - DNA, 23 bp, Artificial Sequence
  Synthetic
ccactgtcagutctcatctccug

SEQ ID NO: 42176 - DNA, 22 bp, Artificial Sequence
  Synthetic
ctcaugccaggagcatcactua

SEQ ID NO: 42177 - DNA, 22 bp, Artificial Sequence
  Synthetic
tttccauaccaggctcugagac

SEQ ID NO: 42178 - DNA, 23 bp, Artificial Sequence
  Synthetic
gcccttcctugagggaacaatuc

SEQ ID NO: 42179 - DNA, 24 bp, Artificial Sequence
  Synthetic
acctgcttccuccttcccattaua

SEQ ID NO: 42180 - DNA, 18 bp, Artificial Sequence
  Synthetic
catgagggccugcacuga

SEQ ID NO: 42181 - DNA, 21 bp, Artificial Sequence
  Synthetic
caccttctuaccccagctcut

SEQ ID NO: 42182 - DNA, 21 bp, Artificial Sequence
  Synthetic
ggatcctaaugcccagcaguc

SEQ ID NO: 42183 - DNA, 19 bp, Artificial Sequence
  Synthetic
actgggcuttcccuagcac

SEQ ID NO: 42184 - DNA, 24 bp, Artificial Sequence
  Synthetic
acttctgttcutcattcctccuga

SEQ ID NO: 42185 - DNA, 24 bp, Artificial Sequence
  Synthetic
ggttgatcacutcttggtgtcuct

SEQ ID NO: 42186 - DNA, 19 bp, Artificial Sequence
  Synthetic
cccuccaccgatagugcct

SEQ ID NO: 42187 - DNA, 23 bp, Artificial Sequence
  Synthetic
ggctcagcucaccttttctttuc

SEQ ID NO: 42188 - DNA, 17 bp, Artificial Sequence
  Synthetic
gaggccgutcccctguc

SEQ ID NO: 42189 - DNA, 19 bp, Artificial Sequence
  Synthetic
cccaaaccauccgccucat

SEQ ID NO: 42190 - DNA, 22 bp, Artificial Sequence
  Synthetic
cctcccuaacccaaactccauc

SEQ ID NO: 42191 - DNA, 22 bp, Artificial Sequence
  Synthetic
ccaccctcutctctctccugaa

SEQ ID NO: 42192 - DNA, 21 bp, Artificial Sequence
  Synthetic
cccuacaaggguacacaggga

SEQ ID NO: 42193 - DNA, 21 bp, Artificial Sequence
  Synthetic
ggttggtgggutagtgggaug

SEQ ID NO: 42194 - DNA, 21 bp, Artificial Sequence
  Synthetic
ccugtgcctcauagaacagca

SEQ ID NO: 42195 - DNA, 21 bp, Artificial Sequence
  Synthetic
cauccgagggcatctugaaca

SEQ ID NO: 42196 - DNA, 21 bp, Artificial Sequence
  Synthetic
ccugtgggcaugagaagaagg

SEQ ID NO: 42197 - DNA, 29 bp, Artificial Sequence
  Synthetic
ggttcattctutgctgcttattugacaat

SEQ ID NO: 42198 - DNA, 21 bp, Artificial Sequence
  Synthetic
gagcaaugagcaagggtuacg

SEQ ID NO: 42199 - DNA, 23 bp, Artificial Sequence
  Synthetic
gaactggcautcacctctctuct

SEQ ID NO: 42200 - DNA, 21 bp, Artificial Sequence
  Synthetic
gggttgtutcgagggucaaga

SEQ ID NO: 42201 - DNA, 22 bp, Artificial Sequence
  Synthetic
caactcatgcutaggctgucct

SEQ ID NO: 42202 - DNA, 21 bp, Artificial Sequence
  Synthetic
gctagtuccactgagcuccac

SEQ ID NO: 42203 - DNA, 28 bp, Artificial Sequence
  Synthetic
cccagaagtcugattgaacattttcuct

SEQ ID NO: 42204 - DNA, 25 bp, Artificial Sequence
  Synthetic
atctcagaagugacctcatugaact

SEQ ID NO: 42205 - DNA, 25 bp, Artificial Sequence
  Synthetic
tgggatatctcuctctctccctuca

SEQ ID NO: 42206 - DNA, 21 bp, Artificial Sequence
  Synthetic
gctgcggucctagtggtcuat

SEQ ID NO: 42207 - DNA, 29 bp, Artificial Sequence
  Synthetic
tgttttagcagttuatagggattgaccug

SEQ ID NO: 42208 - DNA, 27 bp, Artificial Sequence
  Synthetic
ctaagcaautatctguaaagcagaggt

SEQ ID NO: 42209 - DNA, 25 bp, Artificial Sequence
  Synthetic
ctcctaacgtugttgggtttcttug

SEQ ID NO: 42210 - DNA, 22 bp, Artificial Sequence
  Synthetic
tggctgcuctttaagaggugac

SEQ ID NO: 42211 - DNA, 27 bp, Artificial Sequence
  Synthetic
gtcatcttaccaugttcttcacctuca

SEQ ID NO: 42212 - DNA, 23 bp, Artificial Sequence
  Synthetic
gccccacaggauggtaagtuaga

SEQ ID NO: 42213 - DNA, 24 bp, Artificial Sequence
  Synthetic
cttagtgggcutactcggctuaat

SEQ ID NO: 42214 - DNA, 21 bp, Artificial Sequence
  Synthetic
agcatctaugggagcgtgtut

SEQ ID NO: 42215 - DNA, 23 bp, Artificial Sequence
  Synthetic
cctctgcgacgacauaatctgug

SEQ ID NO: 42216 - DNA, 17 bp, Artificial Sequence
  Synthetic
cuccagagcuggagcgg

SEQ ID NO: 42217 - DNA, 18 bp, Artificial Sequence
  Synthetic
ccgcggugagccatgaut

SEQ ID NO: 42218 - DNA, 18 bp, Artificial Sequence
  Synthetic
gggcuctccugggaacca

SEQ ID NO: 42219 - DNA, 19 bp, Artificial Sequence
  Synthetic
tccucccggaagagctuca

SEQ ID NO: 42220 - DNA, 22 bp, Artificial Sequence
  Synthetic
gctggagtaguagcttccacug

SEQ ID NO: 42221 - DNA, 21 bp, Artificial Sequence
  Synthetic
gcuccaacaccagcagaucaa

SEQ ID NO: 42222 - DNA, 27 bp, Artificial Sequence
  Synthetic
agtcactgatcucatgtatgtgtgtug

SEQ ID NO: 42223 - DNA, 21 bp, Artificial Sequence
  Synthetic
gagctcaugaacaccaagcug

SEQ ID NO: 42224 - DNA, 25 bp, Artificial Sequence
  Synthetic
gtttcttttagaacucaggccccut

SEQ ID NO: 42225 - DNA, 24 bp, Artificial Sequence
  Synthetic
cagaatcttucctctttccuggct

SEQ ID NO: 42226 - DNA, 28 bp, Artificial Sequence
  Synthetic
tgtcagttccautcaaatctttcacuca

SEQ ID NO: 42227 - DNA, 22 bp, Artificial Sequence
  Synthetic
agtgccaaucatccctgttucc

SEQ ID NO: 42228 - DNA, 23 bp, Artificial Sequence
  Synthetic
cccaaaggaaggcauggtaguag

SEQ ID NO: 42229 - DNA, 20 bp, Artificial Sequence
  Synthetic
gagccgttgutcgagcagua

SEQ ID NO: 42230 - DNA, 27 bp, Artificial Sequence
  Synthetic
gccaaaacatcutccttctttctcuct

SEQ ID NO: 42231 - DNA, 22 bp, Artificial Sequence
  Synthetic
ctccuggaggtauccaagaggt

SEQ ID NO: 42232 - DNA, 21 bp, Artificial Sequence
  Synthetic
gcaccaccuccaaagccauag

SEQ ID NO: 42233 - DNA, 17 bp, Artificial Sequence
  Synthetic
ggctucggcagggucag

SEQ ID NO: 42234 - DNA, 20 bp, Artificial Sequence
  Synthetic
cacacutgacuggcgagaca

SEQ ID NO: 42235 - DNA, 22 bp, Artificial Sequence
  Synthetic
tgcccagcccacutaatcatuc

SEQ ID NO: 42236 - DNA, 21 bp, Artificial Sequence
  Synthetic
gagttgcgccgutttccuaac

SEQ ID NO: 42237 - DNA, 23 bp, Artificial Sequence
  Synthetic
ggcctccacuatgtttcgaauga

SEQ ID NO: 42238 - DNA, 26 bp, Artificial Sequence
  Synthetic
attgacgtaaacaugtaaggtgcuct

SEQ ID NO: 42239 - DNA, 27 bp, Artificial Sequence
  Synthetic
gattcctgacuactttgctgtgaatug

SEQ ID NO: 42240 - DNA, 24 bp, Artificial Sequence
  Synthetic
acatcagtttgugagaggatggug

SEQ ID NO: 42241 - DNA, 28 bp, Artificial Sequence
  Synthetic
tggcacagauacacttaacatgcaauat

SEQ ID NO: 42242 - DNA, 29 bp, Artificial Sequence
  Synthetic
gctgaggtagauggttttcaaaugaagat

SEQ ID NO: 42243 - DNA, 27 bp, Artificial Sequence
  Synthetic
tggaaatgatuaaggtcatatggcuct

SEQ ID NO: 42244 - DNA, 26 bp, Artificial Sequence
  Synthetic
catatgcaugtatacacucacccaca

SEQ ID NO: 42245 - DNA, 22 bp, Artificial Sequence
  Synthetic
gctcagacagugaaggctgtuc

SEQ ID NO: 42246 - DNA, 28 bp, Artificial Sequence
  Synthetic
ggtctgttccauacagaaataagcuact

SEQ ID NO: 42247 - DNA, 26 bp, Artificial Sequence
  Synthetic
atuatgggagaagaagaaaucgctut

SEQ ID NO: 42248 - DNA, 30 bp, Artificial Sequence; identical to SEQ ID NO: 30014
  Synthetic

SEQ ID NO: 42249 - DNA, 27 bp, Artificial Sequence
  Synthetic
cagtcattactuacaatgcgcauaaca

SEQ ID NO: 42250 - DNA, 28 bp, Artificial Sequence
  Synthetic
gacaccagatugatctgtatcaactuca

SEQ ID NO: 42251 - DNA, 28 bp, Artificial Sequence
  Synthetic
catctctgcaaaugttagatacgguaca

SEQ ID NO: 42252 - DNA, 30 bp, Artificial Sequence; identical to SEQ ID NO: 30018
  Synthetic

SEQ ID NO: 42253 - DNA, 28 bp, Artificial Sequence
  Synthetic
gtaacaaaguacacttgtgcacuaaaca

SEQ ID NO: 42254 - DNA, 28 bp, Artificial Sequence
  Synthetic
actgttctcttttuctttccctgtgaut

SEQ ID NO: 42255 - DNA, 24 bp, Artificial Sequence
  Synthetic
gattgcagaggutgacttttccug

SEQ ID NO: 42256 - DNA, 25 bp, Artificial Sequence
  Synthetic
tttagcatgcugtgagttcaucaga

SEQ ID NO: 42257 - DNA, 26 bp, Artificial Sequence
  Synthetic
gcttcccgaaguttaagagacaugat

SEQ ID NO: 42258 - DNA, 26 bp, Artificial Sequence
  Synthetic
cctccactgutatctgcatttugaac

SEQ ID NO: 42259 - DNA, 25 bp, Artificial Sequence
  Synthetic
ttgaaggtgccuatagtgacaaucc

SEQ ID NO: 42260 - DNA, 27 bp, Artificial Sequence
  Synthetic
aaaagccatucaaaactctctcuacct

SEQ ID NO: 42261 - DNA, 28 bp, Artificial Sequence
  Synthetic
gtggaggaauaaacagtgtctcttacug

SEQ ID NO: 42262 - DNA, 30 bp, Artificial Sequence; identical to SEQ ID NO: 30028
  Synthetic

SEQ ID NO: 42263 - DNA, 22 bp, Artificial Sequence
  Synthetic
cccaggutcctggatuaaggat

SEQ ID NO: 42264 - DNA, 25 bp, Artificial Sequence
  Synthetic
atgtctggccugatatttgacuaca

SEQ ID NO: 42265 - DNA, 27 bp, Artificial Sequence
  Synthetic
ggctgtcccagaaguttatttaccuaa

SEQ ID NO: 42266 - DNA, 28 bp, Artificial Sequence
  Synthetic
ggaatgaaattauggaaatccctguacc

SEQ ID NO: 42267 - DNA, 21 bp, Artificial Sequence
  Synthetic
ctaucgagaggcaugcaccat

SEQ ID NO: 42268 - DNA, 22 bp, Artificial Sequence
  Synthetic
ggctguaaaagcttctgugcat

SEQ ID NO: 42269 - DNA, 29 bp, Artificial Sequence
  Synthetic
tcagtcttttcatgugtaatcctcttgut

SEQ ID NO: 42270 - DNA, 21 bp, Artificial Sequence
  Synthetic
acataccaaguagccccucca

SEQ ID NO: 42271 - DNA, 29 bp, Artificial Sequence
  Synthetic
gctgctttaatagcuctcagaatgtttuc

SEQ ID NO: 42272 - DNA, 25 bp, Artificial Sequence
  Synthetic
caacatugaaaatgtcacuggcaga

SEQ ID NO: 42273 - DNA, 27 bp, Artificial Sequence
  Synthetic
agtatgacaagcutctcattgctgaut

SEQ ID NO: 42274 - DNA, 23 bp, Artificial Sequence
  Synthetic
atgctcataugtgagatgugcca

SEQ ID NO: 42275 - DNA, 23 bp, Artificial Sequence
  Synthetic
ggaggatttgutggtttgcccua

SEQ ID NO: 42276 - DNA, 17 bp, Artificial Sequence
  Synthetic
ggcagugcagggucgag

SEQ ID NO: 42277 - DNA, 21 bp, Artificial Sequence
  Synthetic
gtgatgctgutcaagctccug

SEQ ID NO: 42278 - DNA, 28 bp, Artificial Sequence
  Synthetic
tgctcttgagtaugtactcatatccugt

SEQ ID NO: 42279 - DNA, 26 bp, Artificial Sequence
  Synthetic
gcagtgcccuccagaaaataaaguaa

SEQ ID NO: 42280 - DNA, 22 bp, Artificial Sequence
  Synthetic
ctauggcgatgguagggaaaga

SEQ ID NO: 42281 - DNA, 23 bp, Artificial Sequence
  Synthetic
cttcactcaagccugtggtttug

SEQ ID NO: 42282 - DNA, 28 bp, Artificial Sequence
  Synthetic
gaaagcacaauaatggttttctguaccc

SEQ ID NO: 42283 - DNA, 25 bp, Artificial Sequence
  Synthetic
gctctcagautgactttccatucca

SEQ ID NO: 42284 - DNA, 22 bp, Artificial Sequence
  Synthetic
cctgggcucaactcattugaga

SEQ ID NO: 42285 - DNA, 22 bp, Artificial Sequence
  Synthetic
gagtcuggcttggctuaaacct

SEQ ID NO: 42286 - DNA, 25 bp, Artificial Sequence
  Synthetic
tttcatacttgccuccacatactug

SEQ ID NO: 42287 - DNA, 30 bp, Artificial Sequence; identical to SEQ ID NO: 30053
  Synthetic

SEQ ID NO: 42288 - DNA, 24 bp, Artificial Sequence
  Synthetic
tcatgctgguattttccatccuca

SEQ ID NO: 42289 - DNA, 26 bp, Artificial Sequence
  Synthetic
gccttgaaaaaucaggtgtctcttut

SEQ ID NO: 42290 - DNA, 28 bp, Artificial Sequence
  Synthetic
tgctgttattttaugaagacagtgugga

SEQ ID NO: 42291 - DNA, 23 bp, Artificial Sequence
  Synthetic
atttggauaaacgtagccugcct

SEQ ID NO: 42292 - DNA, 27 bp, Artificial Sequence
  Synthetic
agaaaagaacauggaagtttgcuacga

SEQ ID NO: 42293 - DNA, 29 bp, Artificial Sequence
  Synthetic
ggaatgaattgcuaaactgtggaaaaugt

SEQ ID NO: 42294 - DNA, 19 bp, Artificial Sequence
  Synthetic
gtttuccaggaccgcagug

SEQ ID NO: 42295 - DNA, 18 bp, Artificial Sequence
  Synthetic
ccucctgcgucaggacaa

SEQ ID NO: 42296 - DNA, 23 bp, Artificial Sequence
  Synthetic
ccaagctcccacuttctgtgaut

SEQ ID NO: 42297 - DNA, 26 bp, Artificial Sequence
  Synthetic
caaaccattctguttgcttctctcuc

SEQ ID NO: 42298 - DNA, 20 bp, Artificial Sequence
  Synthetic
cccatctccgucctcctcuc

SEQ ID NO: 42299 - DNA, 23 bp, Artificial Sequence
  Synthetic
ggcaatguccctttctccttuca

SEQ ID NO: 42300 - DNA, 21 bp, Artificial Sequence
  Synthetic
ggatcccagauggtgacccua

SEQ ID NO: 42301 - DNA, 28 bp, Artificial Sequence
  Synthetic
acatagatcttgacugtcactttctguc

SEQ ID NO: 42302 - DNA, 23 bp, Artificial Sequence
  Synthetic
tgcgtgagagcutcacattcaut

SEQ ID NO: 42303 - DNA, 29 bp, Artificial Sequence
  Synthetic
cagaatcttaattugggtggctaaacaut

SEQ ID NO: 42304 - DNA, 19 bp, Artificial Sequence
  Synthetic
aggtgtucgagttgcccut

SEQ ID NO: 42305 - DNA, 18 bp, Artificial Sequence
  Synthetic
tcaggucccgucaagcag

SEQ ID NO: 42306 - DNA, 22 bp, Artificial Sequence
  Synthetic
tgcctctacucggtccaaguat

SEQ ID NO: 42307 - DNA, 24 bp, Artificial Sequence
  Synthetic
cuttttacaguacaagcccaccac

SEQ ID NO: 42308 - DNA, 20 bp, Artificial Sequence
  Synthetic
gtgcgagcagaaugcttugg

SEQ ID NO: 42309 - DNA, 24 bp, Artificial Sequence
  Synthetic
ccaaugatgctaaugacgacacag

SEQ ID NO: 42310 - DNA, 22 bp, Artificial Sequence
  Synthetic
ggagagccuctagctgctuact

SEQ ID NO: 42311 - DNA, 23 bp, Artificial Sequence
  Synthetic
acagaauagttucccagcagcac

SEQ ID NO: 42312 - DNA, 28 bp, Artificial Sequence
  Synthetic
tcagatactaggauaaagaagccacucc

SEQ ID NO: 42313 - DNA, 28 bp, Artificial Sequence
  Synthetic
gtgtacatgcucctttttctttcactut

SEQ ID NO: 42314 - DNA, 23 bp, Artificial Sequence
  Synthetic
gaagagucacacacacuggaaga

SEQ ID NO: 42315 - DNA, 31 bp, Artificial Sequence; identical to SEQ ID NO: 30081
  Synthetic

SEQ ID NO: 42316 - DNA, 23 bp, Artificial Sequence
  Synthetic
catattgcguggagtaagcuggt

SEQ ID NO: 42317 - DNA, 23 bp, Artificial Sequence
  Synthetic
cagggucaaatcatucagagcct

SEQ ID NO: 42318 - DNA, 26 bp, Artificial Sequence
  Synthetic
gcttggtgucagatacaaacaatugg

SEQ ID NO: 42319 - DNA, 26 bp, Artificial Sequence
  Synthetic
attgttgtttttguagccaaagccut

SEQ ID NO: 42320 - DNA, 24 bp, Artificial Sequence
  Synthetic
aagtccagauggattctucacagt

SEQ ID NO: 42321 - DNA, 27 bp, Artificial Sequence
  Synthetic
aauacttaguaacacggaguacaagag

SEQ ID NO: 42322 - DNA, 28 bp, Artificial Sequence
  Synthetic
ctgctgctatuttcaatgaaagaaucct

SEQ ID NO: 42323 - DNA, 23 bp, Artificial Sequence
  Synthetic
gtagctugtgctcauggcaaaaa

SEQ ID NO: 42324 - DNA, 28 bp, Artificial Sequence
  Synthetic
tgggcatgaaautagacatacttctucc

SEQ ID NO: 42325 - DNA, 28 bp, Artificial Sequence
  Synthetic
attgttttcuagctaaagatuccaggct

SEQ ID NO: 42326 - DNA, 21 bp, Artificial Sequence
  Synthetic
gcatggcaacagcutcagtug

SEQ ID NO: 42327 - DNA, 29 bp, Artificial Sequence
  Synthetic
cctgaagcctcutttaggaagtaacatut

SEQ ID NO: 42328 - DNA, 22 bp, Artificial Sequence
  Synthetic
ctaggccacuggatauggaacc

SEQ ID NO: 42329 - DNA, 25 bp, Artificial Sequence
  Synthetic
tgtgtgtgaaugggtgtattuagca

SEQ ID NO: 42330 - DNA, 21 bp, Artificial Sequence
  Synthetic
gcuggagaaccaugagcagag

SEQ ID NO: 42331 - DNA, 28 bp, Artificial Sequence
  Synthetic
tccttcatatcatutgttctgtcaggug

SEQ ID NO: 42332 - DNA, 23 bp, Artificial Sequence
  Synthetic
gtgaattctguctcccactuccc

SEQ ID NO: 42333 - DNA, 24 bp, Artificial Sequence
  Synthetic
tttgtaacaagcautcccttcugt

SEQ ID NO: 42334 - DNA, 22 bp, Artificial Sequence
  Synthetic
tcatcatttuccagggccacuc

SEQ ID NO: 42335 - DNA, 28 bp, Artificial Sequence
  Synthetic
acataaactguggctttaaaggacucat

SEQ ID NO: 42336 - DNA, 26 bp, Artificial Sequence
  Synthetic
caggatgtcatacugaccagagtcua

SEQ ID NO: 42337 - DNA, 27 bp, Artificial Sequence
  Synthetic
acttucaaccaaaaccattcttugcag

SEQ ID NO: 42338 - DNA, 29 bp, Artificial Sequence
  Synthetic
cacaacaaaguctgaacattugaacaaaa

SEQ ID NO: 42339 - DNA, 27 bp, Artificial Sequence
  Synthetic
ggtaccttgaugagctaaagaatucct

SEQ ID NO: 42340 - DNA, 29 bp, Artificial Sequence
  Synthetic
catggaautactttattcuacccccaagg

SEQ ID NO: 42341 - DNA, 28 bp, Artificial Sequence
  Synthetic
ccaagcatttuagatgaggaagatucag

SEQ ID NO: 42342 - DNA, 17 bp, Artificial Sequence
  Synthetic
cgggctugcggacatug

SEQ ID NO: 42343 - DNA, 18 bp, Artificial Sequence
  Synthetic
cgttccggcguctcctug

SEQ ID NO: 42344 - DNA, 17 bp, Artificial Sequence
  Synthetic
gccgtugccgttgcuac

SEQ ID NO: 42345 - DNA, 17 bp, Artificial Sequence
  Synthetic
ccgagtcucgccgctuc

SEQ ID NO: 42346 - DNA, 24 bp, Artificial Sequence
  Synthetic
gtcttagcugtgttgttguggaaa

SEQ ID NO: 42347 - DNA, 28 bp, Artificial Sequence
  Synthetic
aggatcctctcutttcattccaactuac

SEQ ID NO: 42348 - DNA, 26 bp, Artificial Sequence
  Synthetic
cacatcaagatucagaacactgguga

SEQ ID NO: 42349 - DNA, 29 bp, Artificial Sequence
  Synthetic
gcagactttguggtcactaaaatgtuact

SEQ ID NO: 42350 - DNA, 29 bp, Artificial Sequence
  Synthetic
ctctcugggaaagaaguagagaaattaut

SEQ ID NO: 42351 - DNA, 25 bp, Artificial Sequence
  Synthetic
catctugccagacccattttucaac

SEQ ID NO: 42352 - DNA, 31 bp, Artificial Sequence; identical to SEQ ID NO: 30118
  Synthetic

SEQ ID NO: 42353 - DNA, 25 bp, Artificial Sequence
  Synthetic
caagagcaacutctcctccacuaaa

SEQ ID NO: 42354 - DNA, 24 bp, Artificial Sequence
  Synthetic
aatgaacaaaacutggacuaggct

SEQ ID NO: 42355 - DNA, 28 bp, Artificial Sequence
  Synthetic
agaaaacactgugaaaagcaaagctuac

SEQ ID NO: 42356 - DNA, 22 bp, Artificial Sequence
  Synthetic
tgaatgactuttggcggauggt

SEQ ID NO: 42357 - DNA, 33 bp, Artificial Sequence; identical to SEQ ID NO: 30123
  Synthetic

SEQ ID NO: 42358 - DNA, 27 bp, Artificial Sequence
  Synthetic
ctcttcctcuccattggattuaggaaa

SEQ ID NO: 42359 - DNA, 23 bp, Artificial Sequence
  Synthetic
atgatgctcucctgcttatggug

SEQ ID NO: 42360 - DNA, 30 bp, Artificial Sequence; identical to SEQ ID NO: 30126
  Synthetic

SEQ ID NO: 42361 - DNA, 28 bp, Artificial Sequence
  Synthetic
cgtgagcacttuccttccataaacuaaa

SEQ ID NO: 42362 - DNA, 26 bp, Artificial Sequence
  Synthetic
ccccttaaaauaaccattgtcccuca

SEQ ID NO: 42363 - DNA, 31 bp, Artificial Sequence; identical to SEQ ID NO: 21019
  Synthetic

SEQ ID NO: 42364 - DNA, 30 bp, Artificial Sequence; identical to SEQ ID NO: 30130
  Synthetic

SEQ ID NO: 42365 - DNA, 20 bp, Artificial Sequence
  Synthetic
gccagaguggagcgacaaua

SEQ ID NO: 42366 - DNA, 17 bp, Artificial Sequence
  Synthetic
gccacggagguctggug

SEQ ID NO: 42367 - DNA, 18 bp, Artificial Sequence
  Synthetic
cugcaacacguggccaag

SEQ ID NO: 42368 - DNA, 25 bp, Artificial Sequence
  Synthetic
gaatcttcttcacugggtgatguct

SEQ ID NO: 42369 - DNA, 27 bp, Artificial Sequence
  Synthetic
ctcaggacttautcttcagtacttugg

SEQ ID NO: 42370 - DNA, 19 bp, Artificial Sequence
  Synthetic
gggcagugggtatgggtug

SEQ ID NO: 42371 - DNA, 24 bp, Artificial Sequence
  Synthetic
actgataggcgutatctcccauct

SEQ ID NO: 42372 - DNA, 22 bp, Artificial Sequence
  Synthetic
gccatucagaggagcaaagtuc

SEQ ID NO: 42373 - DNA, 29 bp, Artificial Sequence
  Synthetic
cggatgaaaauaatggatttggcucaaaa

SEQ ID NO: 42374 - DNA, 19 bp, Artificial Sequence
  Synthetic
ggaauccaggccacgguac

SEQ ID NO: 42375 - DNA, 20 bp, Artificial Sequence
  Synthetic
tgagccaggccuctaguaca

SEQ ID NO: 42376 - DNA, 23 bp, Artificial Sequence
  Synthetic
cttcttctctuccaagccaccut

SEQ ID NO: 42377 - DNA, 21 bp, Artificial Sequence
  Synthetic
cactacugccagggcttgtua

SEQ ID NO: 42378 - DNA, 22 bp, Artificial Sequence
  Synthetic
caactgggcaaugcgtuaaact

SEQ ID NO: 42379 - DNA, 22 bp, Artificial Sequence
  Synthetic
caacactguggactgctttgug

SEQ ID NO: 42380 - DNA, 23 bp, Artificial Sequence
  Synthetic
ggaagaagaugctgcttgtguag

SEQ ID NO: 42381 - DNA, 21 bp, Artificial Sequence
  Synthetic
catctcccacauccggctaug

SEQ ID NO: 42382 - DNA, 26 bp, Artificial Sequence
  Synthetic
cauaatgcgaaaaaugaagaggacgg

SEQ ID NO: 42383 - DNA, 25 bp, Artificial Sequence
  Synthetic
tgtcctagctagugattcctgtgut

SEQ ID NO: 42384 - DNA, 25 bp, Artificial Sequence
  Synthetic
ctcttgutttcagagauggaccaca

SEQ ID NO: 42385 - DNA, 24 bp, Artificial Sequence
  Synthetic
gcaatcacagguttcccaagcuaa

SEQ ID NO: 42386 - DNA, 21 bp, Artificial Sequence
  Synthetic
acttucagcagcagguagcac

SEQ ID NO: 42387 - DNA, 29 bp, Artificial Sequence
  Synthetic
ctttgaagcagccuttatgtatgtgttut

SEQ ID NO: 42388 - DNA, 21 bp, Artificial Sequence
  Synthetic
gaacttgcgaguggtttcgug

SEQ ID NO: 42389 - DNA, 23 bp, Artificial Sequence
  Synthetic
ttttccgagucatgatcctcgug

SEQ ID NO: 42390 - DNA, 27 bp, Artificial Sequence
  Synthetic
actaatataugcaaactgcucacagca

SEQ ID NO: 42391 - DNA, 28 bp, Artificial Sequence
  Synthetic
ctgagtgtuaggaaggaaaagaaguaca

SEQ ID NO: 42392 - DNA, 20 bp, Artificial Sequence
  Synthetic
cctggtugcaggtcccuaac

SEQ ID NO: 42393 - DNA, 28 bp, Artificial Sequence
  Synthetic
agcgtggacgacaguaattaaaaguaat

SEQ ID NO: 42394 - DNA, 29 bp, Artificial Sequence
  Synthetic
gatagatttatgcuctctggacaagaugt

SEQ ID NO: 42395 - DNA, 23 bp, Artificial Sequence
  Synthetic
cgaagucgaaagaaactgtccuc

SEQ ID NO: 42396 - DNA, 19 bp, Artificial Sequence
  Synthetic
ggagaagccacgugctcua

SEQ ID NO: 42397 - DNA, 18 bp, Artificial Sequence
  Synthetic
cgacgcaguggaaaugcc

SEQ ID NO: 42398 - DNA, 22 bp, Artificial Sequence
  Synthetic
cagcccttcaugttccagttuc

SEQ ID NO: 42399 - DNA, 29 bp, Artificial Sequence
  Synthetic
acaacatgggauaaatgagaagaacucac

SEQ ID NO: 42400 - DNA, 25 bp, Artificial Sequence
  Synthetic
tttcagcagugtcataagtauggct

SEQ ID NO: 42401 - DNA, 22 bp, Artificial Sequence
  Synthetic
gcatggagugccacactctuac

SEQ ID NO: 42402 - DNA, 23 bp, Artificial Sequence
  Synthetic
gaccatucccagaggtacttucc

SEQ ID NO: 42403 - DNA, 29 bp, Artificial Sequence
  Synthetic
ccctgaagttgaaaugtagatggtatcut

SEQ ID NO: 42404 - DNA, 22 bp, Artificial Sequence
  Synthetic
gggtatccauctgagagctugc

SEQ ID NO: 42405 - DNA, 23 bp, Artificial Sequence
  Synthetic
atgccacattugagagagctcut

SEQ ID NO: 42406 - DNA, 28 bp, Artificial Sequence
  Synthetic
caccaacatacutcagaagcauaaacag

SEQ ID NO: 42407 - DNA, 28 bp, Artificial Sequence
  Synthetic
ctgcagaguggactagtttgttuaaaga

SEQ ID NO: 42408 - DNA, 26 bp, Artificial Sequence
  Synthetic
ctttggtttuaggccactgagauaga

SEQ ID NO: 42409 - DNA, 25 bp, Artificial Sequence
  Synthetic
aggagaacaaaggacuaagactugc

SEQ ID NO: 42410 - DNA, 21 bp, Artificial Sequence
  Synthetic
ctgctgcaucagggugagaat

SEQ ID NO: 42411 - DNA, 28 bp, Artificial Sequence
  Synthetic
ttgaaggtagtguaagaaaagcgaauct

SEQ ID NO: 42412 - DNA, 23 bp, Artificial Sequence
  Synthetic
ccatctgtatuccccctgcttuc

SEQ ID NO: 42413 - DNA, 22 bp, Artificial Sequence
  Synthetic
agatgccucggcacatctttut

SEQ ID NO: 42414 - DNA, 22 bp, Artificial Sequence
  Synthetic
tcatuccagccaguaacaaccc

SEQ ID NO: 42415 - DNA, 27 bp, Artificial Sequence
  Synthetic
tgaagatgtaauaacctcgaacuccca

SEQ ID NO: 42416 - DNA, 25 bp, Artificial Sequence
  Synthetic
ggattggaaguttccctacauaccc

SEQ ID NO: 42417 - DNA, 25 bp, Artificial Sequence
  Synthetic
ccataggatuggcagagatctgcua

SEQ ID NO: 42418 - DNA, 21 bp, Artificial Sequence
  Synthetic
cattgaagcuggccagtaucg

SEQ ID NO: 42419 - DNA, 27 bp, Artificial Sequence
  Synthetic
cccacaatttagugcttcagagtttut

SEQ ID NO: 42420 - DNA, 26 bp, Artificial Sequence
  Synthetic
gagtggaagutctcagagacuaacag

SEQ ID NO: 42421 - DNA, 23 bp, Artificial Sequence
  Synthetic
gccucccaaagtgcuaggaaaaa

SEQ ID NO: 42422 - DNA, 28 bp, Artificial Sequence
  Synthetic
ctagagagtaccguaatgggttaatugg

SEQ ID NO: 42423 - DNA, 30 bp, Artificial Sequence; identical to SEQ ID NO: 30189
  Synthetic

SEQ ID NO: 42424 - DNA, 22 bp, Artificial Sequence
  Synthetic
gggctcacacugcaacagtaua

SEQ ID NO: 42425 - DNA, 26 bp, Artificial Sequence
  Synthetic
atcaguacaaaaccaaacucaaacut

SEQ ID NO: 42426 - DNA, 25 bp, Artificial Sequence
  Synthetic
cattcatttagcauccccaguacct

SEQ ID NO: 42427 - DNA, 30 bp, Artificial Sequence; identical to SEQ ID NO: 30193
  Synthetic

SEQ ID NO: 42428 - DNA, 22 bp, Artificial Sequence
  Synthetic
gcaggcagcutgactaaugagt

SEQ ID NO: 42429 - DNA, 17 bp, Artificial Sequence
  Synthetic
ggccgtucccgtagucc

SEQ ID NO: 42430 - DNA, 23 bp, Artificial Sequence
  Synthetic
cctccatacccuccccacttaua

SEQ ID NO: 42431 - DNA, 24 bp, Artificial Sequence
  Synthetic
gtatctaaccccacautccccauc

SEQ ID NO: 42432 - DNA, 21 bp, Artificial Sequence
  Synthetic
tuggtgtatgauggcccagac

SEQ ID NO: 42433 - DNA, 24 bp, Artificial Sequence
  Synthetic
cacagtatgguaacacggtugact

SEQ ID NO: 42434 - DNA, 25 bp, Artificial Sequence
  Synthetic
tauaactgcattguagcccaaaacg

SEQ ID NO: 42435 - DNA, 26 bp, Artificial Sequence
  Synthetic
ctagaacagcaauggacataggctua

SEQ ID NO: 42436 - DNA, 26 bp, Artificial Sequence
  Synthetic
gggcttgtacugaactatctagugat

SEQ ID NO: 42437 - DNA, 30 bp, Artificial Sequence; identical to SEQ ID NO: 30203
  Synthetic

SEQ ID NO: 42438 - DNA, 21 bp, Artificial Sequence
  Synthetic
cctacugccctgauccaggat

SEQ ID NO: 42439 - DNA, 23 bp, Artificial Sequence
  Synthetic
ggatttguccccacacacttcuc

SEQ ID NO: 42440 - DNA, 28 bp, Artificial Sequence
  Synthetic
attggttctcacaaauagtaggtgtgut

SEQ ID NO: 42441 - DNA, 24 bp, Artificial Sequence
  Synthetic
aaaatgauggaggagggaaaggug

SEQ ID NO: 42442 - DNA, 20 bp, Artificial Sequence
  Synthetic
agcttcugcagctgcttcut

SEQ ID NO: 42443 - DNA, 21 bp, Artificial Sequence
  Synthetic
ccatgttccutgccacctcuc

SEQ ID NO: 42444 - DNA, 23 bp, Artificial Sequence
  Synthetic
cttttctagaugtcctgggcuct

SEQ ID NO: 42445 - DNA, 21 bp, Artificial Sequence
  Synthetic
gaaggagaacaucgccaucgt

SEQ ID NO: 42446 - DNA, 17 bp, Artificial Sequence
  Synthetic
ggaggccaguccccuga

SEQ ID NO: 42447 - DNA, 18 bp, Artificial Sequence
  Synthetic
ggtggacucgcugcagac

SEQ ID NO: 42448 - DNA, 20 bp, Artificial Sequence
  Synthetic
gugagggagaagugggagac

SEQ ID NO: 42449 - DNA, 24 bp, Artificial Sequence
  Synthetic
gggaacauaggctttgagcttuct

SEQ ID NO: 42450 - DNA, 21 bp, Artificial Sequence
  Synthetic
cctccaaggaggutgccttug

SEQ ID NO: 42451 - DNA, 22 bp, Artificial Sequence
  Synthetic
gcaccggcuacagaatgagaua

SEQ ID NO: 42452 - DNA, 20 bp, Artificial Sequence
  Synthetic
gccccutcctctcugagagt

SEQ ID NO: 42453 - DNA, 18 bp, Artificial Sequence
  Synthetic
gcatgacugcgaccugct

SEQ ID NO: 42454 - DNA, 21 bp, Artificial Sequence
  Synthetic
gctccattuctggcacugaga

SEQ ID NO: 42455 - DNA, 20 bp, Artificial Sequence
  Synthetic
cacaagccccucattucacc

SEQ ID NO: 42456 - DNA, 25 bp, Artificial Sequence
  Synthetic
agaatgagaaugacaagggagaugg

SEQ ID NO: 42457 - DNA, 17 bp, Artificial Sequence
  Synthetic
aaccugcagcgggugaa

SEQ ID NO: 42458 - DNA, 19 bp, Artificial Sequence
  Synthetic
cucccgagacaggtcugag

SEQ ID NO: 42459 - DNA, 24 bp, Artificial Sequence
  Synthetic
ggaacctaagtucctggtagctut

SEQ ID NO: 42460 - DNA, 21 bp, Artificial Sequence
  Synthetic
caggccagacaccuccatuag

SEQ ID NO: 42461 - DNA, 27 bp, Artificial Sequence
  Synthetic
ctttgcttautttcttcccuccaacag

SEQ ID NO: 42462 - DNA, 23 bp, Artificial Sequence
  Synthetic
gggcctctugtagagctttctuc

SEQ ID NO: 42463 - DNA, 23 bp, Artificial Sequence
  Synthetic
ccagactagagugttgtccuggt

SEQ ID NO: 42464 - DNA, 21 bp, Artificial Sequence
  Synthetic
ttcttgagcuctgagcacucg

SEQ ID NO: 42465 - DNA, 25 bp, Artificial Sequence
  Synthetic
ccctagguctcctctcttuaaccat

SEQ ID NO: 42466 - DNA, 22 bp, Artificial Sequence
  Synthetic
ggacttcuccagcgtctcttug

SEQ ID NO: 42467 - DNA, 23 bp, Artificial Sequence
  Synthetic
tcucttttatagugccccaccct

SEQ ID NO: 42468 - DNA, 22 bp, Artificial Sequence
  Synthetic
tcctctcugctccacucaacat

SEQ ID NO: 42469 - DNA, 22 bp, Artificial Sequence
  Synthetic
catgggtgacuctggacactuc

SEQ ID NO: 42470 - DNA, 24 bp, Artificial Sequence
  Synthetic
gtcagcctuagggtaaagtggaug

SEQ ID NO: 42471 - DNA, 22 bp, Artificial Sequence
  Synthetic
cctaacuccccaccttcatcug

SEQ ID NO: 42472 - DNA, 22 bp, Artificial Sequence
  Synthetic
ctggcccuttgtgtctucagaa

SEQ ID NO: 42473 - DNA, 21 bp, Artificial Sequence
  Synthetic
cttctcccugatccacuacgc

SEQ ID NO: 42474 - DNA, 19 bp, Artificial Sequence
  Synthetic
gcauaggtggugaggccaa

SEQ ID NO: 42475 - DNA, 17 bp, Artificial Sequence
  Synthetic
ctcccaccccucaugcc

SEQ ID NO: 42476 - DNA, 24 bp, Artificial Sequence
  Synthetic
acatcttctcauacactgcctugg

SEQ ID NO: 42477 - DNA, 24 bp, Artificial Sequence
  Synthetic
agtgctcactuatcctttcccuct

SEQ ID NO: 42478 - DNA, 19 bp, Artificial Sequence
  Synthetic
cactcacaucgguggccat

SEQ ID NO: 42479 - DNA, 22 bp, Artificial Sequence
  Synthetic
ctcccttucccaactctaccug

SEQ ID NO: 42480 - DNA, 24 bp, Artificial Sequence
  Synthetic
aaaacaggagauggcaggaaugat

SEQ ID NO: 42481 - DNA, 23 bp, Artificial Sequence
  Synthetic
caggatttcacuctgtcctuccc

SEQ ID NO: 42482 - DNA, 18 bp, Artificial Sequence
  Synthetic
ggtaacucgggucagcct

SEQ ID NO: 42483 - DNA, 25 bp, Artificial Sequence
  Synthetic
cctgagttttgautggtctctgugg

SEQ ID NO: 42484 - DNA, 17 bp, Artificial Sequence
  Synthetic
tgggugggtgtcuggga

SEQ ID NO: 42485 - DNA, 19 bp, Artificial Sequence
  Synthetic
gccttguctcctgcuccag

SEQ ID NO: 42486 - DNA, 23 bp, Artificial Sequence
  Synthetic
cctctgcaucttcttucccagac

SEQ ID NO: 42487 - DNA, 21 bp, Artificial Sequence
  Synthetic
gcccttugacattcgcacuga

SEQ ID NO: 42488 - DNA, 22 bp, Artificial Sequence
  Synthetic
ctcagggcagugaagaagaguc

SEQ ID NO: 42489 - DNA, 27 bp, Artificial Sequence
  Synthetic
gactgattggacuttgtttccttucaa

SEQ ID NO: 42490 - DNA, 19 bp, Artificial Sequence
  Synthetic
gggacgagcuctcctaugc

SEQ ID NO: 42491 - DNA, 25 bp, Artificial Sequence
  Synthetic
ccttctatgacugtgccatctucac

SEQ ID NO: 42492 - DNA, 20 bp, Artificial Sequence
  Synthetic
cttctgcagcugcttctugc

SEQ ID NO: 42493 - DNA, 22 bp, Artificial Sequence
  Synthetic
tgugaggactugaccagaccat

SEQ ID NO: 42494 - DNA, 23 bp, Artificial Sequence
  Synthetic
gagcaggaaaagcautgagcauc

SEQ ID NO: 42495 - DNA, 18 bp, Artificial Sequence
  Synthetic
gagcuggaggagtugcgt

SEQ ID NO: 42496 - DNA, 19 bp, Artificial Sequence
  Synthetic
cagtccccuctgggugagt

SEQ ID NO: 42497 - DNA, 18 bp, Artificial Sequence
  Synthetic
ggactcgcugcagaccuc

SEQ ID NO: 42498 - DNA, 20 bp, Artificial Sequence
  Synthetic
gaccaaaagccuggagcuca

SEQ ID NO: 42499 - DNA, 22 bp, Artificial Sequence
  Synthetic
cctcaaccgagutaccgtgtuc

SEQ ID NO: 42500 - DNA, 20 bp, Artificial Sequence
  Synthetic
gctctggccuctcacugaac

SEQ ID NO: 42501 - DNA, 22 bp, Artificial Sequence
  Synthetic
gcaccggcuacagaatgagauc

SEQ ID NO: 42502 - DNA, 20 bp, Artificial Sequence
  Synthetic
tagctaagcaucgcctgugt

SEQ ID NO: 42503 - DNA, 20 bp, Artificial Sequence
  Synthetic
tccttuccaaggccaacucg

SEQ ID NO: 42504 - DNA, 23 bp, Artificial Sequence
  Synthetic
gctgggaagggaagugattugat

SEQ ID NO: 42505 - DNA, 24 bp, Artificial Sequence
  Synthetic
agtgctgatcuagaatggtgctuc

SEQ ID NO: 42506 - DNA, 21 bp, Artificial Sequence
  Synthetic
gggaagugggaaaaugaacca

SEQ ID NO: 42507 - DNA, 17 bp, Artificial Sequence
  Synthetic
agcugggcgagcagauc

SEQ ID NO: 42508 - DNA, 19 bp, Artificial Sequence
  Synthetic
cucccgagacaggtcugag

SEQ ID NO: 42509 - DNA, 22 bp, Artificial Sequence
  Synthetic
aactgacutgctgtuccagaga

SEQ ID NO: 42510 - DNA, 23 bp, Artificial Sequence
  Synthetic
gggtctgcutgtactgttauggg

SEQ ID NO: 42511 - DNA, 21 bp, Artificial Sequence
  Synthetic
cctggcuccttctctcuacca

SEQ ID NO: 42512 - DNA, 23 bp, Artificial Sequence
  Synthetic
gcctctugcagagctttcttcuc

SEQ ID NO: 42513 - DNA, 20 bp, Artificial Sequence
  Synthetic
agcagcauggacctugacat

SEQ ID NO: 42514 - DNA, 24 bp, Artificial Sequence
  Synthetic
ctcagcattcauctcctcctcauc

SEQ ID NO: 42515 - DNA, 26 bp, Artificial Sequence
  Synthetic
gagttacccucctatttgagtgaugt

SEQ ID NO: 42516 - DNA, 22 bp, Artificial Sequence
  Synthetic
gtgtgaacucctccttcaugga

SEQ ID NO: 42517 - DNA, 22 bp, Artificial Sequence
  Synthetic
caaggttucaggacctcaggua

SEQ ID NO: 42518 - DNA, 24 bp, Artificial Sequence
  Synthetic
caggaaaagcaucagaggagucaa

SEQ ID NO: 42519 - DNA, 22 bp, Artificial Sequence
  Synthetic
catgggtgacuctggacactuc

SEQ ID NO: 42520 - DNA, 22 bp, Artificial Sequence
  Synthetic
gtggtgguaggtagggagaugt

SEQ ID NO: 42521 - DNA, 26 bp, Artificial Sequence
  Synthetic
tttctcuattgcattttuggccacag

SEQ ID NO: 42522 - DNA, 22 bp, Artificial Sequence
  Synthetic
cagaatcccugctcctctguac

SEQ ID NO: 42523 - DNA, 23 bp, Artificial Sequence
  Synthetic
cccacttcuccctgatccacuat

SEQ ID NO: 42524 - DNA, 24 bp, Artificial Sequence
  Synthetic
gagaautcaggtgguaaggccaaa

SEQ ID NO: 42525 - DNA, 17 bp, Artificial Sequence
  Synthetic
gcucccacccctcaugc

SEQ ID NO: 42526 - DNA, 26 bp, Artificial Sequence
  Synthetic
gttgggaagagugaacttgaaaacuc

SEQ ID NO: 42527 - DNA, 23 bp, Artificial Sequence
  Synthetic
ttgctactugccttttcctucca

SEQ ID NO: 42528 - DNA, 21 bp, Artificial Sequence
  Synthetic
gatggcgccugtcagcttaua

SEQ ID NO: 42529 - DNA, 27 bp, Artificial Sequence
  Synthetic
cagggatuaaggagacaagttttcuct

SEQ ID NO: 42530 - DNA, 21 bp, Artificial Sequence
  Synthetic
ccaggtugccatggagauagt

SEQ ID NO: 42531 - DNA, 29 bp, Artificial Sequence
  Synthetic
ccctaacttttctutctctccttcttcuc

SEQ ID NO: 42532 - DNA, 23 bp, Artificial Sequence
  Synthetic
gggaaggcucatatcugagacca

SEQ ID NO: 42533 - DNA, 20 bp, Artificial Sequence
  Synthetic
gucctguaccgcagaaaggg

SEQ ID NO: 42534 - DNA, 21 bp, Artificial Sequence
  Synthetic
ggctgggaucagggagatuct

SEQ ID NO: 42535 - DNA, 17 bp, Artificial Sequence
  Synthetic
acugggauaggccggga

SEQ ID NO: 42536 - DNA, 25 bp, Artificial Sequence
  Synthetic
ccuagacacaaauagaagacacuct

SEQ ID NO: 42537 - DNA, 23 bp, Artificial Sequence
  Synthetic
gttcgacaaaaucgaggacaugg

SEQ ID NO: 42538 - DNA, 21 bp, Artificial Sequence
  Synthetic
ctctctguccacccaggtgua

SEQ ID NO: 42539 - DNA, 25 bp, Artificial Sequence
  Synthetic
tttgaccucaagaaggatgtctucg

SEQ ID NO: 42540 - DNA, 26 bp, Artificial Sequence
  Synthetic
tggagagaagaggagautaagctuga

SEQ ID NO: 42541 - DNA, 19 bp, Artificial Sequence
  Synthetic
ccagtcuggtggactuggg

SEQ ID NO: 42542 - DNA, 24 bp, Artificial Sequence
  Synthetic
gggagagaauagtttgagctccug

SEQ ID NO: 42543 - DNA, 28 bp, Artificial Sequence
  Synthetic
ccatatggtgtugtcctctatttctuag

SEQ ID NO: 42544 - DNA, 19 bp, Artificial Sequence
  Synthetic
ggacaccccucgacttcuc

SEQ ID NO: 42545 - DNA, 22 bp, Artificial Sequence
  Synthetic
tccgtgagcuctacaagaucct

SEQ ID NO: 42546 - DNA, 19 bp, Artificial Sequence
  Synthetic
cttgcucctgcguaaagcc

SEQ ID NO: 42547 - DNA, 18 bp, Artificial Sequence
  Synthetic
cccctacucctccgccut

SEQ ID NO: 42548 - DNA, 22 bp, Artificial Sequence
  Synthetic
gcagcuacagaagtuggaacga

SEQ ID NO: 42549 - DNA, 24 bp, Artificial Sequence
  Synthetic
tctcttcttucagcagcugagaac

SEQ ID NO: 42550 - DNA, 27 bp, Artificial Sequence
  Synthetic
agcctaggataugaacatactgctcut

SEQ ID NO: 42551 - DNA, 21 bp, Artificial Sequence
  Synthetic
acctacccaucaggaccucac

SEQ ID NO: 42552 - DNA, 24 bp, Artificial Sequence
  Synthetic
gtgagctaacacugaagtcctcut

SEQ ID NO: 42553 - DNA, 22 bp, Artificial Sequence
  Synthetic
gaatctugccaatgtggugagc

SEQ ID NO: 42554 - DNA, 24 bp, Artificial Sequence
  Synthetic
ccctgatctaautgtgccctctut

SEQ ID NO: 42555 - DNA, 22 bp, Artificial Sequence
  Synthetic
cacacaccugaagtactugcca

SEQ ID NO: 42556 - DNA, 26 bp, Artificial Sequence
  Synthetic
ggaccataaagauttccagactgcua

SEQ ID NO: 42557 - DNA, 22 bp, Artificial Sequence
  Synthetic
tggattgggccugataaagcug

SEQ ID NO: 42558 - DNA, 30 bp, Artificial Sequence; identical to SEQ ID NO: 30324
  Synthetic

SEQ ID NO: 42559 - DNA, 22 bp, Artificial Sequence
  Synthetic
agtgaauccagtcuggcaaagg

SEQ ID NO: 42560 - DNA, 24 bp, Artificial Sequence
  Synthetic
guggagcaagaugaggaagaagat

SEQ ID NO: 42561 - DNA, 31 bp, Artificial Sequence; identical to SEQ ID NO: 30327
  Synthetic

SEQ ID NO: 42562 - DNA, 25 bp, Artificial Sequence
  Synthetic
gtacttttuaagggttgugggacct

SEQ ID NO: 42563 - DNA, 29 bp, Artificial Sequence
  Synthetic
agcacaaagguagttaattcugaaagaca

SEQ ID NO: 42564 - DNA, 26 bp, Artificial Sequence
  Synthetic
ctacattactgtugcactcctgauct

SEQ ID NO: 42565 - DNA, 28 bp, Artificial Sequence
  Synthetic
gtgacaaacaaatuatcagtcttgggut

SEQ ID NO: 42566 - DNA, 23 bp, Artificial Sequence
  Synthetic
tgtgtggagaaaugatggctugt

SEQ ID NO: 42567 - DNA, 30 bp, Artificial Sequence; identical to SEQ ID NO: 30333
  Synthetic

SEQ ID NO: 42568 - DNA, 29 bp, Artificial Sequence
  Synthetic
gaattgtgaaaucatagcaaagagugacc

SEQ ID NO: 42569 - DNA, 28 bp, Artificial Sequence
  Synthetic
ttgacattaagagcuctgacacattcut

SEQ ID NO: 42570 - DNA, 29 bp, Artificial Sequence
  Synthetic
ccttttatggaccaautagcattccauca

SEQ ID NO: 42571 - DNA, 24 bp, Artificial Sequence
  Synthetic
tctauaggcacctcctuccaaagt

SEQ ID NO: 42572 - DNA, 22 bp, Artificial Sequence
  Synthetic
tgggtgggautcaccactttuc

SEQ ID NO: 42573 - DNA, 24 bp, Artificial Sequence
  Synthetic
ttacaacgtguctctgcttctcuc

SEQ ID NO: 42574 - DNA, 21 bp, Artificial Sequence
  Synthetic
ttcttggucaccctcaggtug

SEQ ID NO: 42575 - DNA, 28 bp, Artificial Sequence
  Synthetic
ctatgatgaagcguttaggcatgttuaa

SEQ ID NO: 42576 - DNA, 21 bp, Artificial Sequence
  Synthetic
caggctggutgagcaacctua

SEQ ID NO: 42577 - DNA, 27 bp, Artificial Sequence
  Synthetic
gctagtggauaagtttttggaggaugt

SEQ ID NO: 42578 - DNA, 22 bp, Artificial Sequence
  Synthetic
gaaattcaggcccuccaggaut

SEQ ID NO: 42579 - DNA, 23 bp, Artificial Sequence
  Synthetic
catcccaccaugatcaggaucac

SEQ ID NO: 42580 - DNA, 29 bp, Artificial Sequence
  Synthetic
gtgtgtctttccutcaagatgtaaatguc

SEQ ID NO: 42581 - DNA, 23 bp, Artificial Sequence
  Synthetic
caacatagugagacccccacaua

SEQ ID NO: 42582 - DNA, 24 bp, Artificial Sequence
  Synthetic
agctttttctuccaaagccactug

SEQ ID NO: 42583 - DNA, 24 bp, Artificial Sequence
  Synthetic
tgtgaagttgcucgaatgtctuct

SEQ ID NO: 42584 - DNA, 31 bp, Artificial Sequence; identical to SEQ ID NO: 30350
  Synthetic

SEQ ID NO: 42585 - DNA, 23 bp, Artificial Sequence
  Synthetic
cacaccttguaatcacccctuga

SEQ ID NO: 42586 - DNA, 24 bp, Artificial Sequence
  Synthetic
tgtggaggaaggauacauttccua

SEQ ID NO: 42587 - DNA, 27 bp, Artificial Sequence
  Synthetic
cacctcacatuctaaagtgttgctuac

SEQ ID NO: 42588 - DNA, 23 bp, Artificial Sequence
  Synthetic
ttgagatcagggaugctccuagt

SEQ ID NO: 42589 - DNA, 23 bp, Artificial Sequence
  Synthetic
aaaagctctaugctgccctucat

SEQ ID NO: 42590 - DNA, 28 bp, Artificial Sequence
  Synthetic
aaatgaactagtaugaactttgccucca

SEQ ID NO: 42591 - DNA, 24 bp, Artificial Sequence
  Synthetic
gacutcatgaggtuaacccaggag

SEQ ID NO: 42592 - DNA, 24 bp, Artificial Sequence
  Synthetic
agcagctgcaacuctttgtattuc

SEQ ID NO: 42593 - DNA, 22 bp, Artificial Sequence
  Synthetic
ccttacccutctgggtctucct

SEQ ID NO: 42594 - DNA, 21 bp, Artificial Sequence
  Synthetic
ctgtgaatgcgugcttcctut

SEQ ID NO: 42595 - DNA, 20 bp, Artificial Sequence
  Synthetic
gagccaaucaggacugcaca

SEQ ID NO: 42596 - DNA, 22 bp, Artificial Sequence
  Synthetic
aggactucttcctguacaacgc

SEQ ID NO: 42597 - DNA, 23 bp, Artificial Sequence
  Synthetic
ggccatgugagctttuagaaaca

SEQ ID NO: 42598 - DNA, 24 bp, Artificial Sequence
  Synthetic
aagcuaaagaccaggauacaggga

SEQ ID NO: 42599 - DNA, 28 bp, Artificial Sequence
  Synthetic
cacatacauatgcatgaguacacacact

SEQ ID NO: 42600 - DNA, 22 bp, Artificial Sequence
  Synthetic
tgacccctgugaaccagtttuc

SEQ ID NO: 42601 - DNA, 31 bp, Artificial Sequence; identical to SEQ ID NO: 30367
  Synthetic

SEQ ID NO: 42602 - DNA, 24 bp, Artificial Sequence
  Synthetic
aaacgugagttgcucaaaccaaat

SEQ ID NO: 42603 - DNA, 20 bp, Artificial Sequence
  Synthetic
caccctguatgttgcctugg

SEQ ID NO: 42604 - DNA, 25 bp, Artificial Sequence
  Synthetic
gggttgattuggagattcagtgugt

SEQ ID NO: 42605 - DNA, 21 bp, Artificial Sequence
  Synthetic
gtagcctagucccctcccaut

SEQ ID NO: 42606 - DNA, 24 bp, Artificial Sequence
  Synthetic
aagutacagtaguagaggcggagt

SEQ ID NO: 42607 - DNA, 26 bp, Artificial Sequence
  Synthetic
tccacctugagttttaatgtguaggg

SEQ ID NO: 42608 - DNA, 20 bp, Artificial Sequence
  Synthetic
gcagcucaccatgtaugcct

SEQ ID NO: 42609 - DNA, 25 bp, Artificial Sequence
  Synthetic
cattgcttuactaaagggucaggct

SEQ ID NO: 42610 - DNA, 18 bp, Artificial Sequence
  Synthetic
ccaccauggacgccauca

SEQ ID NO: 42611 - DNA, 17 bp, Artificial Sequence
  Synthetic
gtgccaggcucgagucc

SEQ ID NO: 42612 - DNA, 19 bp, Artificial Sequence
  Synthetic
ccagcucgaggaggacauc

SEQ ID NO: 42613 - DNA, 27 bp, Artificial Sequence
  Synthetic
gagaaagagaaagagutagccatucgt

SEQ ID NO: 42614 - DNA, 21 bp, Artificial Sequence
  Synthetic
gcaccgaagaugaacuggaca

SEQ ID NO: 42615 - DNA, 25 bp, Artificial Sequence
  Synthetic
ggtaaacttccutcattgctcucca

SEQ ID NO: 42616 - DNA, 17 bp, Artificial Sequence
  Synthetic
gggaguagctcgcugga

SEQ ID NO: 42617 - DNA, 17 bp, Artificial Sequence
  Synthetic
gggaggaugcgcctcug

SEQ ID NO: 42618 - DNA, 25 bp, Artificial Sequence
  Synthetic
cttgggttttcutgcttgtcttuct

SEQ ID NO: 42619 - DNA, 25 bp, Artificial Sequence
  Synthetic
gaatcaagacugtacattgcuccct

SEQ ID NO: 42620 - DNA, 23 bp, Artificial Sequence
  Synthetic
gggtgtcutatgtatgaaugcgt

SEQ ID NO: 42621 - DNA, 23 bp, Artificial Sequence
  Synthetic
ccuaaaaaccauacgagccauca

SEQ ID NO: 42622 - DNA, 23 bp, Artificial Sequence
  Synthetic
ccttaacauctgttggcugagct

SEQ ID NO: 42623 - DNA, 27 bp, Artificial Sequence
  Synthetic
tggcttcauccacaactctcatatuac

SEQ ID NO: 42624 - DNA, 22 bp, Artificial Sequence
  Synthetic
cctcacucaccctccatttcut

SEQ ID NO: 42625 - DNA, 25 bp, Artificial Sequence
  Synthetic
gaaggcatgguggtgagtttatuac

SEQ ID NO: 42626 - DNA, 28 bp, Artificial Sequence
  Synthetic
tgaggtctctutgtgttctctatuaact

SEQ ID NO: 42627 - DNA, 24 bp, Artificial Sequence
  Synthetic
gcctagaatucagcccaagtttut

SEQ ID NO: 42628 - DNA, 24 bp, Artificial Sequence
  Synthetic
tgtgattgatguttgcctgccuaa

SEQ ID NO: 42629 - DNA, 23 bp, Artificial Sequence
  Synthetic
gcagcuaaggaggttttcacaug

SEQ ID NO: 42630 - DNA, 18 bp, Artificial Sequence
  Synthetic
gcugccccgggagaaauc

SEQ ID NO: 42631 - DNA, 20 bp, Artificial Sequence
  Synthetic
gctgttgguctggtcuccat

SEQ ID NO: 42632 - DNA, 20 bp, Artificial Sequence
  Synthetic
ccugaggacugggaaaggga

SEQ ID NO: 42633 - DNA, 20 bp, Artificial Sequence
  Synthetic
acgcucctctugaagaagcc

SEQ ID NO: 42634 - DNA, 21 bp, Artificial Sequence
  Synthetic
ggctugggcaaaaatguccaa

SEQ ID NO: 42635 - DNA, 21 bp, Artificial Sequence
  Synthetic
ctgcccattucttgtcaccuc

SEQ ID NO: 42636 - DNA, 18 bp, Artificial Sequence
  Synthetic
cagguccaccuggacagc

SEQ ID NO: 42637 - DNA, 19 bp, Artificial Sequence
  Synthetic
tcagctgcuctcccacuca

SEQ ID NO: 42638 - DNA, 22 bp, Artificial Sequence
  Synthetic
gagttccccucctctccauact

SEQ ID NO: 42639 - DNA, 19 bp, Artificial Sequence
  Synthetic
ccctgtcuggttgacucga

SEQ ID NO: 42640 - DNA, 18 bp, Artificial Sequence
  Synthetic
cauggagacgcgtgucct

SEQ ID NO: 42641 - DNA, 22 bp, Artificial Sequence
  Synthetic
ctacacacauctgcacacaugg

SEQ ID NO: 42642 - DNA, 19 bp, Artificial Sequence
  Synthetic
cccaagugatgcugagcca

SEQ ID NO: 42643 - DNA, 17 bp, Artificial Sequence
  Synthetic
acugtgccugggacacc

SEQ ID NO: 42644 - DNA, 23 bp, Artificial Sequence
  Synthetic
gcaagaccauagggaatacucca

SEQ ID NO: 42645 - DNA, 27 bp, Artificial Sequence
  Synthetic
gggctattatgaauaaagctgctauga

SEQ ID NO: 42646 - DNA, 22 bp, Artificial Sequence
  Synthetic
cactaccautcaccuacagcca

SEQ ID NO: 42647 - DNA, 24 bp, Artificial Sequence
  Synthetic
gagagactgutgactggtgugaaa

SEQ ID NO: 42648 - DNA, 25 bp, Artificial Sequence
  Synthetic
caaacgttcauaggcaaatgucagg

SEQ ID NO: 42649 - DNA, 22 bp, Artificial Sequence
  Synthetic
agggtgccuagacaagagguag

SEQ ID NO: 42650 - DNA, 21 bp, Artificial Sequence
  Synthetic
cagccucctttggtuagcaag

SEQ ID NO: 42651 - DNA, 22 bp, Artificial Sequence
  Synthetic
tggcgagaggauattccaguga

SEQ ID NO: 42652 - DNA, 23 bp, Artificial Sequence
  Synthetic
tccaaaccaggaggaucagtcuc

SEQ ID NO: 42653 - DNA, 25 bp, Artificial Sequence
  Synthetic
cttactagacacucctctcctcucc

SEQ ID NO: 42654 - DNA, 22 bp, Artificial Sequence
  Synthetic
cccctcgggugctaacttcuat

SEQ ID NO: 42655 - DNA, 27 bp, Artificial Sequence
  Synthetic
cctatgagttcaugagcacattctuct

SEQ ID NO: 42656 - DNA, 23 bp, Artificial Sequence
  Synthetic
gaagcttcacuctgagcauaaca

SEQ ID NO: 42657 - DNA, 22 bp, Artificial Sequence
  Synthetic
aagtgtgaaccugaagggtguc

SEQ ID NO: 42658 - DNA, 22 bp, Artificial Sequence
  Synthetic
cgttgcuccatcacccuagaac

SEQ ID NO: 42659 - DNA, 27 bp, Artificial Sequence
  Synthetic
gcttccttugaaactgacatgtucaat

SEQ ID NO: 42660 - DNA, 24 bp, Artificial Sequence
  Synthetic
accttcccacaucatcctttcuct

SEQ ID NO: 42661 - DNA, 31 bp, Artificial Sequence; identical to SEQ ID NO: 30427
  Synthetic

SEQ ID NO: 42662 - DNA, 18 bp, Artificial Sequence
  Synthetic
cgggacaaguccgacuca

SEQ ID NO: 42663 - DNA, 20 bp, Artificial Sequence
  Synthetic
gaccagcgcuacgtccttua

SEQ ID NO: 42664 - DNA, 20 bp, Artificial Sequence
  Synthetic
ccaaagccuggagcttguca

SEQ ID NO: 42665 - DNA, 17 bp, Artificial Sequence
  Synthetic
ggcacaauccgcugcac

SEQ ID NO: 42666 - DNA, 22 bp, Artificial Sequence
  Synthetic
cuccacgggagcaaauacagag

SEQ ID NO: 42667 - DNA, 26 bp, Artificial Sequence
  Synthetic
cactctcctttugaccttagcatuaa

SEQ ID NO: 42668 - DNA, 27 bp, Artificial Sequence
  Synthetic
ggatgaaaagucaaaactgaccaguct

SEQ ID NO: 42669 - DNA, 26 bp, Artificial Sequence
  Synthetic
gctgtttgaagaguttgccatagaug

SEQ ID NO: 42670 - DNA, 21 bp, Artificial Sequence
  Synthetic
ccatgcuccaaagguagcaag

SEQ ID NO: 42671 - DNA, 23 bp, Artificial Sequence
  Synthetic
aaagacaaagtcugccctctgut

SEQ ID NO: 42672 - DNA, 26 bp, Artificial Sequence
  Synthetic
ggcaggagauagaacagatggtagua

SEQ ID NO: 42673 - DNA, 21 bp, Artificial Sequence
  Synthetic
tcaacuacggccgcatctaug

SEQ ID NO: 42674 - DNA, 23 bp, Artificial Sequence
  Synthetic
gcccaatgtucatcagaactguc

SEQ ID NO: 42675 - DNA, 22 bp, Artificial Sequence
  Synthetic
tgggtauctcactctucccaca

SEQ ID NO: 42676 - DNA, 22 bp, Artificial Sequence
  Synthetic
gggaaggaaaugggtctuagca

SEQ ID NO: 42677 - DNA, 23 bp, Artificial Sequence
  Synthetic
gatagattcugcttcccauggct

SEQ ID NO: 42678 - DNA, 22 bp, Artificial Sequence
  Synthetic
agtctcaggugtgtcactcuga

SEQ ID NO: 42679 - DNA, 22 bp, Artificial Sequence
  Synthetic
cagggccugatataggtgtgug

SEQ ID NO: 42680 - DNA, 20 bp, Artificial Sequence
  Synthetic
ctccccaaagcucaggtuca

SEQ ID NO: 42681 - DNA, 22 bp, Artificial Sequence
  Synthetic
cagagtgggcauctggtaauca

SEQ ID NO: 42682 - DNA, 21 bp, Artificial Sequence
  Synthetic
tgacgcuctgagtagugcaga

SEQ ID NO: 42683 - DNA, 25 bp, Artificial Sequence
  Synthetic
gacattgugagagagagaacctucc

SEQ ID NO: 42684 - DNA, 21 bp, Artificial Sequence
  Synthetic
cctucccagagauaaccccua

SEQ ID NO: 42685 - DNA, 20 bp, Artificial Sequence
  Synthetic
ccctaguggactggctcugt

SEQ ID NO: 42686 - DNA, 25 bp, Artificial Sequence
  Synthetic
atccatcaacgacutcttcatcucc

SEQ ID NO: 42687 - DNA, 22 bp, Artificial Sequence
  Synthetic
cttgcuaaaccagcucagggat

SEQ ID NO: 42688 - DNA, 17 bp, Artificial Sequence
  Synthetic
tgugccacagcccaugt

SEQ ID NO: 42689 - DNA, 19 bp, Artificial Sequence
  Synthetic
gtccctugctctggtuccc

SEQ ID NO: 42690 - DNA, 22 bp, Artificial Sequence
  Synthetic
caggaaaggaguacctccccua

SEQ ID NO: 42691 - DNA, 20 bp, Artificial Sequence
  Synthetic
cctggagguccctactggug

SEQ ID NO: 42692 - DNA, 19 bp, Artificial Sequence
  Synthetic
cagcccguaacaggaccuc

SEQ ID NO: 42693 - DNA, 17 bp, Artificial Sequence
  Synthetic
ccgtacccguggccauc

SEQ ID NO: 42694 - DNA, 19 bp, Artificial Sequence
  Synthetic
gtagggcaggcuctgctuc

SEQ ID NO: 42695 - DNA, 20 bp, Artificial Sequence
  Synthetic
ggcugcacgagcaaatctuc

SEQ ID NO: 42696 - DNA, 17 bp, Artificial Sequence
  Synthetic
ggccaccutccuccaga

SEQ ID NO: 42697 - DNA, 21 bp, Artificial Sequence
  Synthetic
caggcatggucaaacccatut

SEQ ID NO: 42698 - DNA, 20 bp, Artificial Sequence
  Synthetic
caccccucactctgcttcuc

SEQ ID NO: 42699 - DNA, 18 bp, Artificial Sequence
  Synthetic
gguccacccgaagctugt

SEQ ID NO: 42700 - DNA, 18 bp, Artificial Sequence
  Synthetic
agaggaucacgcgggtug

SEQ ID NO: 42701 - DNA, 21 bp, Artificial Sequence
  Synthetic
guatttggaggucagcacggt

SEQ ID NO: 42702 - DNA, 22 bp, Artificial Sequence
  Synthetic
gtgttgctcagaugtccccaut

SEQ ID NO: 42703 - DNA, 23 bp, Artificial Sequence
  Synthetic
aaagacacagguagctcacucac

SEQ ID NO: 42704 - DNA, 21 bp, Artificial Sequence
  Synthetic
agggttctuggagagcacauc

SEQ ID NO: 42705 - DNA, 18 bp, Artificial Sequence
  Synthetic
ctgacgucacccauccca

SEQ ID NO: 42706 - DNA, 23 bp, Artificial Sequence
  Synthetic
ggaggtgagugggagatguagat

SEQ ID NO: 42707 - DNA, 31 bp, Artificial Sequence; identical to SEQ ID NO: 30473
  Synthetic

SEQ ID NO: 42708 - DNA, 19 bp, Artificial Sequence
  Synthetic
cctgggtgucctctccugt

SEQ ID NO: 42709 - DNA, 24 bp, Artificial Sequence
  Synthetic
aacctuccagagcagttucagaaa

SEQ ID NO: 42710 - DNA, 18 bp, Artificial Sequence
  Synthetic
agggcccugctcacatuc

SEQ ID NO: 42711 - DNA, 17 bp, Artificial Sequence
  Synthetic
tgccagcucacugcaca

SEQ ID NO: 42712 - DNA, 23 bp, Artificial Sequence
  Synthetic
tgtcctatgagaucgtcctgucc

SEQ ID NO: 42713 - DNA, 22 bp, Artificial Sequence
  Synthetic
cccaagguaccatcttcugagt

SEQ ID NO: 42714 - DNA, 21 bp, Artificial Sequence
  Synthetic
cgtccaugacctgtugaccac

SEQ ID NO: 42715 - DNA, 21 bp, Artificial Sequence
  Synthetic
ctcagaaagcugcactucacc

SEQ ID NO: 42716 - DNA, 17 bp, Artificial Sequence
  Synthetic
gcagacgggcuggtgug

SEQ ID NO: 42717 - DNA, 21 bp, Artificial Sequence
  Synthetic
ccacggagaaauagcccugag

SEQ ID NO: 42718 - DNA, 23 bp, Artificial Sequence
  Synthetic
gtaagtccuggccttctctucaa

SEQ ID NO: 42719 - DNA, 21 bp, Artificial Sequence
  Synthetic
gacuccaacacaacgcagaug

SEQ ID NO: 42720 - DNA, 22 bp, Artificial Sequence
  Synthetic
ctctggcttucaccatcctcut

SEQ ID NO: 42721 - DNA, 23 bp, Artificial Sequence
  Synthetic
acatcccucagacaugcaaacag

SEQ ID NO: 42722 - DNA, 18 bp, Artificial Sequence
  Synthetic
gaaggcccugtccugacg

SEQ ID NO: 42723 - DNA, 20 bp, Artificial Sequence
  Synthetic
cagaggcucgcagtctttug

SEQ ID NO: 42724 - DNA, 20 bp, Artificial Sequence
  Synthetic
ctgaggtgucctgtctccug

SEQ ID NO: 42725 - DNA, 20 bp, Artificial Sequence
  Synthetic
gctgagatgugcgtgagcut

SEQ ID NO: 42726 - DNA, 21 bp, Artificial Sequence
  Synthetic
cctgaccacccuctccatuac

SEQ ID NO: 42727 - DNA, 18 bp, Artificial Sequence
  Synthetic
tttcugccgcaaggccua

SEQ ID NO: 42728 - DNA, 18 bp, Artificial Sequence
  Synthetic
ccatugccaccccucact

SEQ ID NO: 42729 - DNA, 19 bp, Artificial Sequence
  Synthetic
ccacagccccaugtcctuc

SEQ ID NO: 42730 - DNA, 21 bp, Artificial Sequence
  Synthetic
ctttggcccutggtgauaggt

SEQ ID NO: 42731 - DNA, 22 bp, Artificial Sequence
  Synthetic
atcatguccagacaggttuccg

SEQ ID NO: 42732 - DNA, 22 bp, Artificial Sequence
  Synthetic
gtttcacgcuccctgtcttcua

SEQ ID NO: 42733 - DNA, 21 bp, Artificial Sequence
  Synthetic
gaggaaaggaaggugcaguca

SEQ ID NO: 42734 - DNA, 20 bp, Artificial Sequence
  Synthetic
gaggctgguggttttgcauc

SEQ ID NO: 42735 - DNA, 21 bp, Artificial Sequence
  Synthetic
gucttctccugcacaggaacc

SEQ ID NO: 42736 - DNA, 19 bp, Artificial Sequence
  Synthetic
guactggccucaggccaaa

SEQ ID NO: 42737 - DNA, 22 bp, Artificial Sequence
  Synthetic
caccgacagugacttguacagg

SEQ ID NO: 42738 - DNA, 21 bp, Artificial Sequence
  Synthetic
tctctgcucgacctgtgtgua

SEQ ID NO: 42739 - DNA, 21 bp, Artificial Sequence
  Synthetic
cagcacctaugaggcagagug

SEQ ID NO: 42740 - DNA, 21 bp, Artificial Sequence
  Synthetic
ggttctctutgggatggucct

SEQ ID NO: 42741 - DNA, 20 bp, Artificial Sequence
  Synthetic
agaggagcuggacttgcuca

SEQ ID NO: 42742 - DNA, 19 bp, Artificial Sequence
  Synthetic
gaggtuaaggcccggucac

SEQ ID NO: 42743 - DNA, 23 bp, Artificial Sequence
  Synthetic
tttaaggcguccctctctacuct

SEQ ID NO: 42744 - DNA, 19 bp, Artificial Sequence
  Synthetic
gatggccaggcuctgtgut

SEQ ID NO: 42745 - DNA, 18 bp, Artificial Sequence
  Synthetic
acacagcuccagcggaug

SEQ ID NO: 42746 - DNA, 17 bp, Artificial Sequence
  Synthetic
gtgaugccacccugcct

SEQ ID NO: 42747 - DNA, 18 bp, Artificial Sequence
  Synthetic
ccucaccacacacgucca

SEQ ID NO: 42748 - DNA, 21 bp, Artificial Sequence
  Synthetic
ccagagccccuggagtaauca

SEQ ID NO: 42749 - DNA, 23 bp, Artificial Sequence
  Synthetic
accggagucattgtagacaaugg

SEQ ID NO: 42750 - DNA, 19 bp, Artificial Sequence
  Synthetic
caguagccgagaucagcct

SEQ ID NO: 42751 - DNA, 17 bp, Artificial Sequence
  Synthetic
ctctuggcgccacacug

SEQ ID NO: 42752 - DNA, 19 bp, Artificial Sequence
  Synthetic
ccugcacgcaaatgugagt

SEQ ID NO: 42753 - DNA, 21 bp, Artificial Sequence
  Synthetic
gagggagccccauattcccua

SEQ ID NO: 42754 - DNA, 19 bp, Artificial Sequence
  Synthetic
tcctcgguggaggactuca

SEQ ID NO: 42755 - DNA, 21 bp, Artificial Sequence
  Synthetic
gtgtaccacutctgugggcat

SEQ ID NO: 42756 - DNA, 23 bp, Artificial Sequence
  Synthetic
cttgtaaggugcggcuagaaact

SEQ ID NO: 42757 - DNA, 20 bp, Artificial Sequence
  Synthetic
cctacccugggtggtcgaua

SEQ ID NO: 42758 - DNA, 27 bp, Artificial Sequence
  Synthetic
tcaaggaguaaaaacacaggtttugat

SEQ ID NO: 42759 - DNA, 28 bp, Artificial Sequence
  Synthetic
tcttcctagaggcautcattgtgaaaug

SEQ ID NO: 42760 - DNA, 27 bp, Artificial Sequence
  Synthetic
tttaggctguttatctatgtugcccaa

SEQ ID NO: 42761 - DNA, 28 bp, Artificial Sequence
  Synthetic
cagccatucaccaaagatattucagaaa

SEQ ID NO: 42762 - DNA, 28 bp, Artificial Sequence
  Synthetic
tttttcagtgacauatcattagccccut

SEQ ID NO: 42763 - DNA, 26 bp, Artificial Sequence
  Synthetic
aggtgcacaaacacutctctactuac

SEQ ID NO: 42764 - DNA, 24 bp, Artificial Sequence
  Synthetic
gatctgtgaacugctgttctccua

SEQ ID NO: 42765 - DNA, 24 bp, Artificial Sequence
  Synthetic
gggccattcutgacaagagtttuc

SEQ ID NO: 42766 - DNA, 24 bp, Artificial Sequence
  Synthetic
ggtgcaaaacugtagaaagtugct

SEQ ID NO: 42767 - DNA, 27 bp, Artificial Sequence
  Synthetic
tcccaaccaugaagatttctttgcuaa

SEQ ID NO: 42768 - DNA, 21 bp, Artificial Sequence
  Synthetic
tgcttttcuctggccugagag

SEQ ID NO: 42769 - DNA, 20 bp, Artificial Sequence
  Synthetic
cagggucaagcagcucaaga

SEQ ID NO: 42770 - DNA, 24 bp, Artificial Sequence
  Synthetic
ggaagaggtuccctgacttcacua

SEQ ID NO: 42771 - DNA, 20 bp, Artificial Sequence
  Synthetic
ggagcaagcuccacgagaug

SEQ ID NO: 42772 - DNA, 17 bp, Artificial Sequence
  Synthetic
ggcccucacctgctgug

SEQ ID NO: 42773 - DNA, 19 bp, Artificial Sequence
  Synthetic
cccugaggcatgacuccaa

SEQ ID NO: 42774 - DNA, 21 bp, Artificial Sequence
  Synthetic
catctgaggcuctccuagcaa

SEQ ID NO: 42775 - DNA, 23 bp, Artificial Sequence
  Synthetic
cttgtcctcccugttgactcaug

SEQ ID NO: 42776 - DNA, 23 bp, Artificial Sequence
  Synthetic
cgaagttuccacaccaaccauga

SEQ ID NO: 42777 - DNA, 19 bp, Artificial Sequence
  Synthetic
caacaugcaggcgcucaag

SEQ ID NO: 42778 - DNA, 21 bp, Artificial Sequence
  Synthetic
cctcgcauggactggtgaaua

SEQ ID NO: 42779 - DNA, 23 bp, Artificial Sequence
  Synthetic
cctuggaagucaaagaggaacuc

SEQ ID NO: 42780 - DNA, 19 bp, Artificial Sequence
  Synthetic
gagccacgcgucatacuct

SEQ ID NO: 42781 - DNA, 22 bp, Artificial Sequence
  Synthetic
cggccgcutatgataaacugga

SEQ ID NO: 42782 - DNA, 23 bp, Artificial Sequence
  Synthetic
agagaagtugagaggacccauga

SEQ ID NO: 42783 - DNA, 22 bp, Artificial Sequence
  Synthetic
acctcttugcatccctttugca

SEQ ID NO: 42784 - DNA, 19 bp, Artificial Sequence
  Synthetic
ctccuccccacagaacugg

SEQ ID NO: 42785 - DNA, 26 bp, Artificial Sequence
  Synthetic
aggtggaacauaagaagaagaagcug

SEQ ID NO: 42786 - DNA, 25 bp, Artificial Sequence
  Synthetic
ctgctgatgucactcttatgtguca

SEQ ID NO: 42787 - DNA, 22 bp, Artificial Sequence
  Synthetic
actgccatucactgtgttccuc

SEQ ID NO: 42788 - DNA, 21 bp, Artificial Sequence
  Synthetic
ctcctggagguctgagatgug

SEQ ID NO: 42789 - DNA, 25 bp, Artificial Sequence
  Synthetic
cauaactgtctggucccagaaaagt

SEQ ID NO: 42790 - DNA, 28 bp, Artificial Sequence
  Synthetic
caacagagcaagaccucatctcuaaaaa

SEQ ID NO: 42791 - DNA, 23 bp, Artificial Sequence
  Synthetic
ggaacgaaaacucctugaggaga

SEQ ID NO: 42792 - DNA, 23 bp, Artificial Sequence
  Synthetic
ctgtggtgagggucaagtgatut

SEQ ID NO: 42793 - DNA, 22 bp, Artificial Sequence
  Synthetic
gtatgcagaggcugaggagaug

SEQ ID NO: 42794 - DNA, 21 bp, Artificial Sequence
  Synthetic
cccagccaugcatccauacag

SEQ ID NO: 42795 - DNA, 21 bp, Artificial Sequence
  Synthetic
aatgatgggcuaaccgtgugt

SEQ ID NO: 42796 - DNA, 25 bp, Artificial Sequence
  Synthetic
tgtgattcgcguttgaggtatuagg

SEQ ID NO: 42797 - DNA, 24 bp, Artificial Sequence
  Synthetic
ctcttccttuccttcctttugcag

SEQ ID NO: 42798 - DNA, 20 bp, Artificial Sequence
  Synthetic
gggtaccuccagcatccaut

SEQ ID NO: 42799 - DNA, 20 bp, Artificial Sequence
  Synthetic
gggatccacugccctcttug

SEQ ID NO: 42800 - DNA, 20 bp, Artificial Sequence
  Synthetic
cgtagcguggtcatcagcut

SEQ ID NO: 42801 - DNA, 22 bp, Artificial Sequence
  Synthetic
gctgagccuctggcctattuag

SEQ ID NO: 42802 - DNA, 21 bp, Artificial Sequence
  Synthetic
tgccactcucagactgtcuct

SEQ ID NO: 42803 - DNA, 20 bp, Artificial Sequence
  Synthetic
gaaugctggtuccccaaagc

SEQ ID NO: 42804 - DNA, 21 bp, Artificial Sequence
  Synthetic
acacacgtguacaaggtguga

SEQ ID NO: 42805 - DNA, 24 bp, Artificial Sequence
  Synthetic
gctctucaaccacaccatgtucat

SEQ ID NO: 42806 - DNA, 23 bp, Artificial Sequence
  Synthetic
gccatctacaugcctttcuccaa

SEQ ID NO: 42807 - DNA, 22 bp, Artificial Sequence
  Synthetic
gcaacataugagcgcctttucc

SEQ ID NO: 42808 - DNA, 24 bp, Artificial Sequence
  Synthetic
gggtgcatggauggataagtgaua

SEQ ID NO: 42809 - DNA, 26 bp, Artificial Sequence
  Synthetic
tcacgatgttucttttctccauccag

SEQ ID NO: 42810 - DNA, 25 bp, Artificial Sequence
  Synthetic
tcttaacaggutccactggtaucca

SEQ ID NO: 42811 - DNA, 24 bp, Artificial Sequence
  Synthetic
tgacctgtctucctctccttcuag

SEQ ID NO: 42812 - DNA, 23 bp, Artificial Sequence
  Synthetic
ctggaaagauagaggtggctcut

SEQ ID NO: 42813 - DNA, 23 bp, Artificial Sequence
  Synthetic
cctgaactgugttttcctgtugg

SEQ ID NO: 42814 - DNA, 22 bp, Artificial Sequence
  Synthetic
ggugcaagaggatcaugcagat

SEQ ID NO: 42815 - DNA, 25 bp, Artificial Sequence
  Synthetic
catatattcuccagcccctgatguc

SEQ ID NO: 42816 - DNA, 25 bp, Artificial Sequence
  Synthetic
ctgcactcauggatcttttcttuca

SEQ ID NO: 42817 - DNA, 28 bp, Artificial Sequence
  Synthetic
cccttagcucagagctcattttaatuca

SEQ ID NO: 42818 - DNA, 21 bp, Artificial Sequence
  Synthetic
gcccutgtacatgucgacgat

SEQ ID NO: 42819 - DNA, 30 bp, Artificial Sequence; identical to SEQ ID NO: 30585
  Synthetic

SEQ ID NO: 42820 - DNA, 24 bp, Artificial Sequence
  Synthetic
ttctggaugtcatcttucccaacc

SEQ ID NO: 42821 - DNA, 26 bp, Artificial Sequence
  Synthetic
tgagaagtucctctttguggacaaaa

SEQ ID NO: 42822 - DNA, 17 bp, Artificial Sequence
  Synthetic
ggacggucagagcugca

SEQ ID NO: 42823 - DNA, 21 bp, Artificial Sequence
  Synthetic
ggugaagaugccggaggaaag

SEQ ID NO: 42824 - DNA, 17 bp, Artificial Sequence
  Synthetic
cggccccucctcctcuc

SEQ ID NO: 42825 - DNA, 20 bp, Artificial Sequence
  Synthetic
agagtcugtgccucacgagt

SEQ ID NO: 42826 - DNA, 20 bp, Artificial Sequence
  Synthetic
agcaagttugccgcctttug

SEQ ID NO: 42827 - DNA, 20 bp, Artificial Sequence
  Synthetic
ggcugcagaagcgagtctut

SEQ ID NO: 42828 - DNA, 25 bp, Artificial Sequence
  Synthetic
aggtccttcutatccaggaugaaga

SEQ ID NO: 42829 - DNA, 22 bp, Artificial Sequence
  Synthetic
tgtcctccacacaugggaaaug

SEQ ID NO: 42830 - DNA, 22 bp, Artificial Sequence
  Synthetic
cctccagcucagttcctugaaa

SEQ ID NO: 42831 - DNA, 27 bp, Artificial Sequence
  Synthetic
ctctaaaaagtucctttcccttccuca

SEQ ID NO: 42832 - DNA, 19 bp, Artificial Sequence
  Synthetic
ccagggcgugaccatctua

SEQ ID NO: 42833 - DNA, 22 bp, Artificial Sequence
  Synthetic
cttcctugacctcccauaaccc

SEQ ID NO: 42834 - DNA, 26 bp, Artificial Sequence
  Synthetic
agctggaagacaauttcaaagagugt

SEQ ID NO: 42835 - DNA, 24 bp, Artificial Sequence
  Synthetic
tttgcacaacaugcatctaucaga

SEQ ID NO: 42836 - DNA, 23 bp, Artificial Sequence
  Synthetic
gtgttgtgtguttgtgagtguca

SEQ ID NO: 42837 - DNA, 20 bp, Artificial Sequence
  Synthetic
gggagcagcaugctaccuat

SEQ ID NO: 42838 - DNA, 23 bp, Artificial Sequence
  Synthetic
cagaaaccacauctcaugaacgc

SEQ ID NO: 42839 - DNA, 27 bp, Artificial Sequence
  Synthetic
ttcaccatcaucattccctttcttuca

SEQ ID NO: 42840 - DNA, 24 bp, Artificial Sequence
  Synthetic
caggaagtagaugaggtcgcauag

SEQ ID NO: 42841 - DNA, 22 bp, Artificial Sequence
  Synthetic
gatccaactggugaagagccut

SEQ ID NO: 42842 - DNA, 22 bp, Artificial Sequence
  Synthetic
gccatgagtugacagggaacut

SEQ ID NO: 42843 - DNA, 23 bp, Artificial Sequence
  Synthetic
caaauagcgccatcaucaacgac

SEQ ID NO: 42844 - DNA, 24 bp, Artificial Sequence
  Synthetic
ttgcgguagaaggttcuaaaagca

SEQ ID NO: 42845 - DNA, 23 bp, Artificial Sequence
  Synthetic
cttccacauctgtgtcttugcag

SEQ ID NO: 42846 - DNA, 21 bp, Artificial Sequence
  Synthetic
cucagacattctugcgcaacc

SEQ ID NO: 42847 - DNA, 26 bp, Artificial Sequence
  Synthetic
ttcactttattcuctgcagaagcugt

SEQ ID NO: 42848 - DNA, 23 bp, Artificial Sequence
  Synthetic
aaaacuccccctguaagcaaagt

SEQ ID NO: 42849 - DNA, 24 bp, Artificial Sequence
  Synthetic
ccctaacccaguccttttatccuc

SEQ ID NO: 42850 - DNA, 29 bp, Artificial Sequence
  Synthetic
actaatcttttagggucttctcagacucc

SEQ ID NO: 42851 - DNA, 24 bp, Artificial Sequence
  Synthetic
ccataaatggcucttcctgtgtuc

SEQ ID NO: 42852 - DNA, 22 bp, Artificial Sequence
  Synthetic
catgtgtccauctgagctcucc

SEQ ID NO: 42853 - DNA, 25 bp, Artificial Sequence
  Synthetic
cttaccttccccautcattcacuca

SEQ ID NO: 42854 - DNA, 22 bp, Artificial Sequence
  Synthetic
ccatccucctcctuacccaagt

SEQ ID NO: 42855 - DNA, 23 bp, Artificial Sequence
  Synthetic
cctcagttuacccatgaccctuc

SEQ ID NO: 42856 - DNA, 18 bp, Artificial Sequence
  Synthetic
ggcccagutgatcccuga

SEQ ID NO: 42857 - DNA, 19 bp, Artificial Sequence
  Synthetic
cgcacagagcutgctaugg

SEQ ID NO: 42858 - DNA, 21 bp, Artificial Sequence
  Synthetic
cacccugaggtgguaacagac

SEQ ID NO: 42859 - DNA, 25 bp, Artificial Sequence
  Synthetic
ctgccttuctgtattttcugaccct

SEQ ID NO: 42860 - DNA, 20 bp, Artificial Sequence
  Synthetic
ccctagcugggagggtagut

SEQ ID NO: 42861 - DNA, 30 bp, Artificial Sequence; identical to SEQ ID NO: 30627
  Synthetic

SEQ ID NO: 42862 - DNA, 24 bp, Artificial Sequence
  Synthetic
ccttttctgcugtagaaaguccct

SEQ ID NO: 42863 - DNA, 21 bp, Artificial Sequence
  Synthetic
guggaaccagagucagagaug

SEQ ID NO: 42864 - DNA, 19 bp, Artificial Sequence
  Synthetic
gttcggtgucgccgaagua

SEQ ID NO: 42865 - DNA, 17 bp, Artificial Sequence
  Synthetic
guggucacccgcagact

SEQ ID NO: 42866 - DNA, 30 bp, Artificial Sequence; identical to SEQ ID NO: 30632
  Synthetic

SEQ ID NO: 42867 - DNA, 25 bp, Artificial Sequence
  Synthetic
acccattaucaccactctgtttcug

SEQ ID NO: 42868 - DNA, 26 bp, Artificial Sequence
  Synthetic
acagaatgacuaaaagttcccugcaa

SEQ ID NO: 42869 - DNA, 25 bp, Artificial Sequence
  Synthetic
agcacttcctcucttaggtcctuac

SEQ ID NO: 42870 - DNA, 20 bp, Artificial Sequence
  Synthetic
guctctggcugcagagcaat

SEQ ID NO: 42871 - DNA, 24 bp, Artificial Sequence
  Synthetic
aggugatggacatauggcaaacag

SEQ ID NO: 42872 - DNA, 28 bp, Artificial Sequence
  Synthetic
cgcatctttcaguaatcattttggtuct

SEQ ID NO: 42873 - DNA, 23 bp, Artificial Sequence
  Synthetic
tcgtacagugactgtccttcugt

SEQ ID NO: 42874 - DNA, 25 bp, Artificial Sequence
  Synthetic
tcagacagtguatgtttggagtuca

SEQ ID NO: 42875 - DNA, 20 bp, Artificial Sequence
  Synthetic
cugcttgatcauggccaagg

SEQ ID NO: 42876 - DNA, 21 bp, Artificial Sequence
  Synthetic
ccaggacacucccacatucac

SEQ ID NO: 42877 - DNA, 24 bp, Artificial Sequence
  Synthetic
tggccucaaagctttcctuaacaa

SEQ ID NO: 42878 - DNA, 22 bp, Artificial Sequence
  Synthetic
aagagaggauggagguccagag

SEQ ID NO: 42879 - DNA, 20 bp, Artificial Sequence
  Synthetic
cttcacaggcggugacagua

SEQ ID NO: 42880 - DNA, 20 bp, Artificial Sequence
  Synthetic
tgccugccgtgtgtuaaact

SEQ ID NO: 42881 - DNA, 26 bp, Artificial Sequence
  Synthetic
ctcctttgtcuccagtctaatggtut

SEQ ID NO: 42882 - DNA, 20 bp, Artificial Sequence
  Synthetic
tcagaacgutgacagugcgt

SEQ ID NO: 42883 - DNA, 26 bp, Artificial Sequence
  Synthetic
gcctgtgggaaaauggtttctaauga

SEQ ID NO: 42884 - DNA, 26 bp, Artificial Sequence
  Synthetic
gtgccctucacagacatcttuaaaaa

SEQ ID NO: 42885 - DNA, 17 bp, Artificial Sequence
  Synthetic
cggccccacgcuctuac

SEQ ID NO: 42886 - DNA, 21 bp, Artificial Sequence
  Synthetic
aggaataaucgcccccgatug

SEQ ID NO: 42887 - DNA, 17 bp, Artificial Sequence
  Synthetic
cugcccccacuggacat

SEQ ID NO: 42888 - DNA, 18 bp, Artificial Sequence
  Synthetic
gcgaauacaccggcucgt

SEQ ID NO: 42889 - DNA, 22 bp, Artificial Sequence
  Synthetic
ctccaggucccttcgtattugg

SEQ ID NO: 42890 - DNA, 19 bp, Artificial Sequence
  Synthetic
ctgctucaaccctguccgt

SEQ ID NO: 42891 - DNA, 20 bp, Artificial Sequence
  Synthetic
gggagttgauggacgtccuc

SEQ ID NO: 42892 - DNA, 22 bp, Artificial Sequence
  Synthetic
cagtgacuccgagatccucaag

SEQ ID NO: 42893 - DNA, 21 bp, Artificial Sequence
  Synthetic
ctgatgguggagtggatgucg

SEQ ID NO: 42894 - DNA, 18 bp, Artificial Sequence
  Synthetic
ctcggacgggcucaagua

SEQ ID NO: 42895 - DNA, 20 bp, Artificial Sequence
  Synthetic
ccaccttcucgcggatctug

SEQ ID NO: 42896 - DNA, 19 bp, Artificial Sequence
  Synthetic
ccucaacccagaccccugt

SEQ ID NO: 42897 - DNA, 20 bp, Artificial Sequence
  Synthetic
cccacgaugccagtaucagg

SEQ ID NO: 42898 - DNA, 19 bp, Artificial Sequence
  Synthetic
gacatcgaggugctgucca

SEQ ID NO: 42899 - DNA, 18 bp, Artificial Sequence
  Synthetic
cucctcguccaccgacac

SEQ ID NO: 42900 - DNA, 18 bp, Artificial Sequence
  Synthetic
ggcctgcucgtggaugac

SEQ ID NO: 42901 - DNA, 23 bp, Artificial Sequence
  Synthetic
catccucagcaagggtttcauct

SEQ ID NO: 42902 - DNA, 19 bp, Artificial Sequence
  Synthetic
gcagagacugcgguccaag

SEQ ID NO: 42903 - DNA, 22 bp, Artificial Sequence
  Synthetic
ccattctccucgtcggactcua

SEQ ID NO: 42904 - DNA, 22 bp, Artificial Sequence
  Synthetic
gggtctgcuagcttggugaaaa

SEQ ID NO: 42905 - DNA, 28 bp, Artificial Sequence
  Synthetic
gcgacatctcaucagatgaaaaagtuaa

SEQ ID NO: 42906 - DNA, 19 bp, Artificial Sequence
  Synthetic
ggcttucaggccaacaugg

SEQ ID NO: 42907 - DNA, 17 bp, Artificial Sequence
  Synthetic
cagagcucggccuccag

SEQ ID NO: 42908 - DNA, 30 bp, Artificial Sequence; identical to SEQ ID NO: 30674
  Synthetic

SEQ ID NO: 42909 - DNA, 28 bp, Artificial Sequence
  Synthetic
gctactgacugaagaacatcagaugaat

SEQ ID NO: 42910 - DNA, 20 bp, Artificial Sequence
  Synthetic
gaggcagcauttccuggaac

SEQ ID NO: 42911 - DNA, 19 bp, Artificial Sequence
  Synthetic
ccacagccucactcucaca

SEQ ID NO: 42912 - DNA, 22 bp, Artificial Sequence
  Synthetic
ccagcaguggttctgattugga

SEQ ID NO: 42913 - DNA, 29 bp, Artificial Sequence
  Synthetic
gttcagagagcuctgatttacagaactua

SEQ ID NO: 42914 - DNA, 24 bp, Artificial Sequence
  Synthetic
acggaauccccaagtagttagugt

SEQ ID NO: 42915 - DNA, 21 bp, Artificial Sequence
  Synthetic
aatgaccuccacgaactcugg

SEQ ID NO: 42916 - DNA, 26 bp, Artificial Sequence
  Synthetic
gttgtccttggugtagaactttguct

SEQ ID NO: 42917 - DNA, 24 bp, Artificial Sequence
  Synthetic
gatctcatcgaugtagacgaugca

SEQ ID NO: 42918 - DNA, 22 bp, Artificial Sequence
  Synthetic
caaggtcttcgucctgtgaguc

SEQ ID NO: 42919 - DNA, 24 bp, Artificial Sequence
  Synthetic
cuatcttcagugcaaaaggcaacc

SEQ ID NO: 42920 - DNA, 21 bp, Artificial Sequence
  Synthetic
tctgttgtgucaggaccccua

SEQ ID NO: 42921 - DNA, 19 bp, Artificial Sequence
  Synthetic
gctgggaucctggctcuga

SEQ ID NO: 42922 - DNA, 23 bp, Artificial Sequence
  Synthetic
tcctctuaagccctgauagcaga

SEQ ID NO: 42923 - DNA, 21 bp, Artificial Sequence
  Synthetic
ggtucaagccctgcuaaggag

SEQ ID NO: 42924 - DNA, 21 bp, Artificial Sequence
  Synthetic
cctgggtcaucttgacctugt

SEQ ID NO: 42925 - DNA, 21 bp, Artificial Sequence
  Synthetic
ggaaaagcgcuctgaaaccuc

SEQ ID NO: 42926 - DNA, 22 bp, Artificial Sequence
  Synthetic
catcgccuactccatggugaag

SEQ ID NO: 42927 - DNA, 20 bp, Artificial Sequence
  Synthetic
acccutgtgtgguagaccca

SEQ ID NO: 42928 - DNA, 22 bp, Artificial Sequence
  Synthetic
caccuccccaggacauagagat

SEQ ID NO: 42929 - DNA, 22 bp, Artificial Sequence
  Synthetic
caagtcctguttctccctcugg

SEQ ID NO: 42930 - DNA, 18 bp, Artificial Sequence
  Synthetic
gccgactuggcccaagua

SEQ ID NO: 42931 - DNA, 21 bp, Artificial Sequence
  Synthetic
cucacaaacacaggacuccgt

SEQ ID NO: 42932 - DNA, 23 bp, Artificial Sequence
  Synthetic
caagagcuccatgttatgctugt

SEQ ID NO: 42933 - DNA, 20 bp, Artificial Sequence
  Synthetic
ctgaggaccugctcctcuct

SEQ ID NO: 42934 - DNA, 22 bp, Artificial Sequence
  Synthetic
ccggaacautcttuggcagaag

SEQ ID NO: 42935 - DNA, 23 bp, Artificial Sequence
  Synthetic
ctgtggacaugtacttgaagcug

SEQ ID NO: 42936 - DNA, 21 bp, Artificial Sequence
  Synthetic
cacagacaacccutcccauct

SEQ ID NO: 42937 - DNA, 20 bp, Artificial Sequence
  Synthetic
agccactucttggtgtugca

SEQ ID NO: 42938 - DNA, 21 bp, Artificial Sequence
  Synthetic
agaggacaccutggctgguaa

SEQ ID NO: 42939 - DNA, 29 bp, Artificial Sequence
  Synthetic
gaggaatgtgucagccttatttagaauga

SEQ ID NO: 42940 - DNA, 23 bp, Artificial Sequence
  Synthetic
cagggtgttuaggagatgaccut

SEQ ID NO: 42941 - DNA, 20 bp, Artificial Sequence
  Synthetic
atctgtgtgcuggtgctcuc

SEQ ID NO: 42942 - DNA, 23 bp, Artificial Sequence
  Synthetic
cccacaacuagtagagugaagga

SEQ ID NO: 42943 - DNA, 22 bp, Artificial Sequence
  Synthetic
cctgcctugaactctttugcag

SEQ ID NO: 42944 - DNA, 19 bp, Artificial Sequence
  Synthetic
cctgcccagguggtaguag

SEQ ID NO: 42945 - DNA, 22 bp, Artificial Sequence
  Synthetic
tgtgccagcauactgctcttut

SEQ ID NO: 42946 - DNA, 24 bp, Artificial Sequence
  Synthetic
cccuccagagaaccctaauacagt

SEQ ID NO: 42947 - DNA, 28 bp, Artificial Sequence
  Synthetic
agaattgatagcagugtttgctgttcua

SEQ ID NO: 42948 - DNA, 19 bp, Artificial Sequence
  Synthetic
gaacggucacctacgugct

SEQ ID NO: 42949 - DNA, 20 bp, Artificial Sequence
  Synthetic
gcaccutccttcugcagact

SEQ ID NO: 42950 - DNA, 20 bp, Artificial Sequence
  Synthetic
ggtccgaaagcugcguaaac

SEQ ID NO: 42951 - DNA, 29 bp, Artificial Sequence
  Synthetic
ttttcagattttguacagcagcaattuct

SEQ ID NO: 42952 - DNA, 23 bp, Artificial Sequence
  Synthetic
tggtatgtcugcatgtctgtcuc

SEQ ID NO: 42953 - DNA, 19 bp, Artificial Sequence
  Synthetic
gatgtgggucctccugcac

SEQ ID NO: 42954 - DNA, 23 bp, Artificial Sequence
  Synthetic
ggaatttuccagggcacugaaga

SEQ ID NO: 42955 - DNA, 26 bp, Artificial Sequence
  Synthetic
tgaatggctaguactgatggttucac

SEQ ID NO: 42956 - DNA, 25 bp, Artificial Sequence
  Synthetic
gtctaatgccuctgcctaauggaaa

SEQ ID NO: 42957 - DNA, 24 bp, Artificial Sequence
  Synthetic
ccctaacuagtttcttcctucgca

SEQ ID NO: 42958 - DNA, 22 bp, Artificial Sequence
  Synthetic
ggtguagcacaacagacacuca

SEQ ID NO: 42959 - DNA, 30 bp, Artificial Sequence; identical to SEQ ID NO: 15103
  Synthetic

SEQ ID NO: 42960 - DNA, 24 bp, Artificial Sequence
  Synthetic
tgagagacugacaaggaaagucct

SEQ ID NO: 42961 - DNA, 21 bp, Artificial Sequence
  Synthetic
ggtcaccguctgtgggaatug

SEQ ID NO: 42962 - DNA, 22 bp, Artificial Sequence
  Synthetic
ctgggaaggcugaaaaacucaa

SEQ ID NO: 42963 - DNA, 25 bp, Artificial Sequence
  Synthetic
gttctcattcugtgtcttcccugaa

SEQ ID NO: 42964 - DNA, 22 bp, Artificial Sequence
  Synthetic
accagaaaucatggatguggca

SEQ ID NO: 42965 - DNA, 22 bp, Artificial Sequence
  Synthetic
tcutctcuccacacaggacact

SEQ ID NO: 42966 - DNA, 22 bp, Artificial Sequence
  Synthetic
cccuacacacactctugaccag

SEQ ID NO: 42967 - DNA, 24 bp, Artificial Sequence
  Synthetic
tgaagggagcggaugcttttatut

SEQ ID NO: 42968 - DNA, 20 bp, Artificial Sequence
  Synthetic
ggcatcuccagtcagcgtua

SEQ ID NO: 42969 - DNA, 20 bp, Artificial Sequence
  Synthetic
ctctttcugctgcatuggca

SEQ ID NO: 42970 - DNA, 22 bp, Artificial Sequence
  Synthetic
tgctgaagcuctggaagtgtut

SEQ ID NO: 42971 - DNA, 25 bp, Artificial Sequence
  Synthetic
gtgtgctgacauctgttttctgtuc

SEQ ID NO: 42972 - DNA, 26 bp, Artificial Sequence
  Synthetic
aaacagcacguttcaauagagagaca

SEQ ID NO: 42973 - DNA, 29 bp, Artificial Sequence
  Synthetic
agaccatgatguccataaataacttuggt

SEQ ID NO: 42974 - DNA, 27 bp, Artificial Sequence
  Synthetic
actagacugcaaaaacagtaacacuga

SEQ ID NO: 42975 - DNA, 29 bp, Artificial Sequence
  Synthetic
aggaaaatgcautcataaaggacucagaa

SEQ ID NO: 42976 - DNA, 22 bp, Artificial Sequence
  Synthetic
ggcaggttucctcatcttugct

SEQ ID NO: 42977 - DNA, 30 bp, Artificial Sequence; identical to SEQ ID NO: 30743
  Synthetic

SEQ ID NO: 42978 - DNA, 21 bp, Artificial Sequence
  Synthetic
gcctcgggugttttctuagga

SEQ ID NO: 42979 - DNA, 21 bp, Artificial Sequence
  Synthetic
tcgaaccgacutctctccgua

SEQ ID NO: 42980 - DNA, 21 bp, Artificial Sequence
  Synthetic
ttccuggacaggactauggct

SEQ ID NO: 42981 - DNA, 19 bp, Artificial Sequence
  Synthetic
ggtuccggttctuggcgat

SEQ ID NO: 42982 - DNA, 19 bp, Artificial Sequence
  Synthetic
tgcagcagcuggacaaugt

SEQ ID NO: 42983 - DNA, 21 bp, Artificial Sequence
  Synthetic
guagtaggcgaugaagagcgt

SEQ ID NO: 42984 - DNA, 21 bp, Artificial Sequence
  Synthetic
accagggcuttggcctuaaag

SEQ ID NO: 42985 - DNA, 21 bp, Artificial Sequence
  Synthetic
gctguggaaggcgtagaugag

SEQ ID NO: 42986 - DNA, 20 bp, Artificial Sequence
  Synthetic
gacccugggcagttcctuac

SEQ ID NO: 42987 - DNA, 20 bp, Artificial Sequence
  Synthetic
cacaaccuccccatgtccuc

SEQ ID NO: 42988 - DNA, 20 bp, Artificial Sequence
  Synthetic
atctttgcugccagctcuca

SEQ ID NO: 42989 - DNA, 20 bp, Artificial Sequence
  Synthetic
tcagccccauaccacuaggg

SEQ ID NO: 42990 - DNA, 21 bp, Artificial Sequence
  Synthetic
gggaaacggucaggcauacag

SEQ ID NO: 42991 - DNA, 21 bp, Artificial Sequence
  Synthetic
caggagcccugttaacatugg

SEQ ID NO: 42992 - DNA, 24 bp, Artificial Sequence
  Synthetic
ctctcatagtgugaaggcagguag

SEQ ID NO: 42993 - DNA, 22 bp, Artificial Sequence
  Synthetic
gctcctugggaggaagtauggt

SEQ ID NO: 42994 - DNA, 21 bp, Artificial Sequence
  Synthetic
ccauccacagacaggaaucgc

SEQ ID NO: 42995 - DNA, 21 bp, Artificial Sequence
  Synthetic
ttggttccugacccctttguc

SEQ ID NO: 42996 - DNA, 22 bp, Artificial Sequence
  Synthetic
cccuaaaaacaggcagggagug

SEQ ID NO: 42997 - DNA, 21 bp, Artificial Sequence
  Synthetic
acagacucgcactgucaacaa

SEQ ID NO: 42998 - DNA, 22 bp, Artificial Sequence
  Synthetic
gcctggccutcttgagaaacut

SEQ ID NO: 42999 - DNA, 23 bp, Artificial Sequence
  Synthetic
acgaagaauggatcaaggucgag

SEQ ID NO: 43000 - DNA, 25 bp, Artificial Sequence
  Synthetic
cgatcttctctucccgaggttcaua

SEQ ID NO: 43001 - DNA, 28 bp, Artificial Sequence
  Synthetic
tttctcatcttggacutgatcttgtcut

SEQ ID NO: 43002 - DNA, 27 bp, Artificial Sequence
  Synthetic
guaaatattaccaaguccaccccaaga

SEQ ID NO: 43003 - DNA, 20 bp, Artificial Sequence
  Synthetic
ctaacgaaugccgtccucct

SEQ ID NO: 43004 - DNA, 23 bp, Artificial Sequence
  Synthetic
tggttggagaagagcucaccaua

SEQ ID NO: 43005 - DNA, 28 bp, Artificial Sequence
  Synthetic
acttttctugacccttttatccucacag

SEQ ID NO: 43006 - DNA, 24 bp, Artificial Sequence
  Synthetic
tcaatgtcgugggaatcatagucc

SEQ ID NO: 43007 - DNA, 25 bp, Artificial Sequence
  Synthetic
ggatggtttugggatttaagtggut

SEQ ID NO: 43008 - DNA, 26 bp, Artificial Sequence
  Synthetic
acttauaggagguaaagagcaggaua

SEQ ID NO: 43009 - DNA, 31 bp, Artificial Sequence; identical to SEQ ID NO: 30775
  Synthetic

SEQ ID NO: 43010 - DNA, 23 bp, Artificial Sequence
  Synthetic
gcaagaagcagcaacugtcttua

SEQ ID NO: 43011 - DNA, 24 bp, Artificial Sequence
  Synthetic
ggatatcaccucacctgcttcuct

SEQ ID NO: 43012 - DNA, 25 bp, Artificial Sequence
  Synthetic
ggatagccauggattttcctgacuc

SEQ ID NO: 43013 - DNA, 29 bp, Artificial Sequence
  Synthetic
gagatcacgtttugacttgaatctttcut

SEQ ID NO: 43014 - DNA, 23 bp, Artificial Sequence
  Synthetic
gaatcaaugaactcgctcuccca

SEQ ID NO: 43015 - DNA, 28 bp, Artificial Sequence
  Synthetic
aacgtatttcuaaaccctattgcucagg

SEQ ID NO: 43016 - DNA, 21 bp, Artificial Sequence
  Synthetic
ccgacttggcaucttggagut

SEQ ID NO: 43017 - DNA, 28 bp, Artificial Sequence
  Synthetic
cccctggctcauctgtaatttactttut

SEQ ID NO: 43018 - DNA, 22 bp, Artificial Sequence
  Synthetic
ccacucaagtcttuccacccaa

SEQ ID NO: 43019 - DNA, 22 bp, Artificial Sequence
  Synthetic
caguaaggacaaucccaaccug

SEQ ID NO: 43020 - DNA, 21 bp, Artificial Sequence
  Synthetic
cctctcugggcccttagctua

SEQ ID NO: 43021 - DNA, 22 bp, Artificial Sequence
  Synthetic
gcagtgtaccuggtctggtgua

SEQ ID NO: 43022 - DNA, 21 bp, Artificial Sequence
  Synthetic
ccggugcaatcccaauacaag

SEQ ID NO: 43023 - DNA, 29 bp, Artificial Sequence
  Synthetic
gagaacaaaagaggutaactcuggagaat

SEQ ID NO: 43024 - DNA, 22 bp, Artificial Sequence
  Synthetic
gcctgtugagcagagtcaaguc

SEQ ID NO: 43025 - DNA, 29 bp, Artificial Sequence
  Synthetic
tggttatggaagguaatgatagttccugt

SEQ ID NO: 43026 - DNA, 21 bp, Artificial Sequence
  Synthetic
gcttgucggcttcauaccaca

SEQ ID NO: 43027 - DNA, 23 bp, Artificial Sequence
  Synthetic
ggtagcagtugcctttggttcua

SEQ ID NO: 43028 - DNA, 23 bp, Artificial Sequence
  Synthetic
cctucccaguaggaacctatcua

SEQ ID NO: 43029 - DNA, 26 bp, Artificial Sequence
  Synthetic
aggctaatttcaugtccacctuacag

SEQ ID NO: 43030 - DNA, 21 bp, Artificial Sequence
  Synthetic
aggcggcccagautcttttua

SEQ ID NO: 43031 - DNA, 27 bp, Artificial Sequence
  Synthetic
gcttgattgtgcuttttggactttuag

SEQ ID NO: 43032 - DNA, 22 bp, Artificial Sequence
  Synthetic
cttgttctgcutgatccccuca

SEQ ID NO: 43033 - DNA, 25 bp, Artificial Sequence
  Synthetic
ggaatcttccutgtaatcccctugg

SEQ ID NO: 43034 - DNA, 30 bp, Artificial Sequence; identical to SEQ ID NO: 30800
  Synthetic

SEQ ID NO: 43035 - DNA, 23 bp, Artificial Sequence
  Synthetic
ctggtttaagcuccaggtcugat

SEQ ID NO: 43036 - DNA, 22 bp, Artificial Sequence
  Synthetic
cgatacugcacgtgactaucca

SEQ ID NO: 43037 - DNA, 22 bp, Artificial Sequence
  Synthetic
cggacagtugttttcctcuggt

SEQ ID NO: 43038 - DNA, 25 bp, Artificial Sequence
  Synthetic
gcttgaggtugaagttgtaguccag

SEQ ID NO: 43039 - DNA, 24 bp, Artificial Sequence
  Synthetic
tgactcttacuctccatgtuccca

SEQ ID NO: 43040 - DNA, 22 bp, Artificial Sequence
  Synthetic
aaaaggctacaugcccaccuag

SEQ ID NO: 43041 - DNA, 24 bp, Artificial Sequence
  Synthetic
tgaaggacacaccccuctauacag

SEQ ID NO: 43042 - DNA, 20 bp, Artificial Sequence
  Synthetic
ccctccaccugagcgttuag

SEQ ID NO: 43043 - DNA, 28 bp, Artificial Sequence
  Synthetic
ctttggctgacucttcctttcatttuag

SEQ ID NO: 43044 - DNA, 30 bp, Artificial Sequence; identical to SEQ ID NO: 30810
  Synthetic

SEQ ID NO: 43045 - DNA, 25 bp, Artificial Sequence
  Synthetic
gacttggtggaugacaactactuct

SEQ ID NO: 43046 - DNA, 24 bp, Artificial Sequence
  Synthetic
gtaagcagcuagacaaacccauac

SEQ ID NO: 43047 - DNA, 24 bp, Artificial Sequence
  Synthetic
ccttggactaugctgacaacaucc

SEQ ID NO: 43048 - DNA, 23 bp, Artificial Sequence
  Synthetic
ccacccaccauatttcagcctut

SEQ ID NO: 43049 - DNA, 25 bp, Artificial Sequence
  Synthetic
agccttctcuttttctaatgugcca

SEQ ID NO: 43050 - DNA, 22 bp, Artificial Sequence
  Synthetic
cggaacttccugttggtcaugt

SEQ ID NO: 43051 - DNA, 23 bp, Artificial Sequence
  Synthetic
ggcctttaaacugaggtgcctut

SEQ ID NO: 43052 - DNA, 28 bp, Artificial Sequence
  Synthetic
tctctttctcctuaggtggaatgaauct

SEQ ID NO: 43053 - DNA, 20 bp, Artificial Sequence
  Synthetic
cgutgtctcugggacagcac

SEQ ID NO: 43054 - DNA, 30 bp, Artificial Sequence; identical to SEQ ID NO: 30820
  Synthetic

SEQ ID NO: 43055 - DNA, 27 bp, Artificial Sequence
  Synthetic
acaaatgacaaaautgtgcgtaacugt

SEQ ID NO: 43056 - DNA, 30 bp, Artificial Sequence; identical to SEQ ID NO: 30822
  Synthetic

SEQ ID NO: 43057 - DNA, 25 bp, Artificial Sequence
  Synthetic
ccattctttugggtctcgtttcuga

SEQ ID NO: 43058 - DNA, 28 bp, Artificial Sequence
  Synthetic
gttggtgtuaaccaattttctgtucact

SEQ ID NO: 43059 - DNA, 27 bp, Artificial Sequence
  Synthetic
gttaaagcactaucctctacccctuac

SEQ ID NO: 43060 - DNA, 24 bp, Artificial Sequence
  Synthetic
tggtaccautctcttcaucccagt

SEQ ID NO: 43061 - DNA, 23 bp, Artificial Sequence
  Synthetic
ggtcatuggaacagctggctauc

SEQ ID NO: 43062 - DNA, 25 bp, Artificial Sequence
  Synthetic
tccataccuaacttcttgtguggga

SEQ ID NO: 43063 - DNA, 29 bp, Artificial Sequence
  Synthetic
cagtgaagaugcaaaagaaatgguaagat

SEQ ID NO: 43064 - DNA, 26 bp, Artificial Sequence
  Synthetic
ctcactatgtttgutgtccaggctua

SEQ ID NO: 43065 - DNA, 24 bp, Artificial Sequence
  Synthetic
caucagagtgcauccagaggaaaa

SEQ ID NO: 43066 - DNA, 22 bp, Artificial Sequence
  Synthetic
cctttatgagccauccatgcuc

SEQ ID NO: 43067 - DNA, 28 bp, Artificial Sequence
  Synthetic
ctctttacaaagutgacgtgtcattuct

SEQ ID NO: 43068 - DNA, 23 bp, Artificial Sequence
  Synthetic
gcttgagagtugaaggccagaug

SEQ ID NO: 43069 - DNA, 28 bp, Artificial Sequence
  Synthetic
ctacccatccgutaagattggttactua

SEQ ID NO: 43070 - DNA, 20 bp, Artificial Sequence
  Synthetic
cacgtgggaguctcctucag

SEQ ID NO: 43071 - DNA, 20 bp, Artificial Sequence
  Synthetic
gagagagccugcacauacgg

SEQ ID NO: 43072 - DNA, 21 bp, Artificial Sequence
  Synthetic
cctacatcaagguacggccut

SEQ ID NO: 43073 - DNA, 22 bp, Artificial Sequence
  Synthetic
tgaugatcagcgugaggacaac

SEQ ID NO: 43074 - DNA, 20 bp, Artificial Sequence
  Synthetic
cctctcuaagcccgcccuat

SEQ ID NO: 43075 - DNA, 27 bp, Artificial Sequence
  Synthetic
gatguaggagaaguagaagagaaacug

SEQ ID NO: 43076 - DNA, 17 bp, Artificial Sequence
  Synthetic
cgcccuccgtctgtcug

SEQ ID NO: 43077 - DNA, 17 bp, Artificial Sequence
  Synthetic
cuggaaggucccgggaa

SEQ ID NO: 43078 - DNA, 26 bp, Artificial Sequence
  Synthetic
ttcttcatccagcacutctgtttgua

SEQ ID NO: 43079 - DNA, 21 bp, Artificial Sequence
  Synthetic
aggctattgaauggcctcugg

SEQ ID NO: 43080 - DNA, 26 bp, Artificial Sequence
  Synthetic
atctcttttcuttaaggctucaggca

SEQ ID NO: 43081 - DNA, 21 bp, Artificial Sequence
  Synthetic
ggctgcutgatctcugggaat

SEQ ID NO: 43082 - DNA, 21 bp, Artificial Sequence
  Synthetic
gggaaatugaagtcggugcga

SEQ ID NO: 43083 - DNA, 22 bp, Artificial Sequence
  Synthetic
cagctgccuctttactgacugt

SEQ ID NO: 43084 - DNA, 18 bp, Artificial Sequence
  Synthetic
ggugggcctuaggagcct

SEQ ID NO: 43085 - DNA, 19 bp, Artificial Sequence
  Synthetic
gtcggugggcttattgcuc

SEQ ID NO: 43086 - DNA, 19 bp, Artificial Sequence
  Synthetic
gcagcuccaggagaaccug

SEQ ID NO: 43087 - DNA, 24 bp, Artificial Sequence
  Synthetic
cattgtcaugaattgcgtcaucgt

SEQ ID NO: 43088 - DNA, 18 bp, Artificial Sequence
  Synthetic
cccutcacacuggccaca

SEQ ID NO: 43089 - DNA, 19 bp, Artificial Sequence
  Synthetic
tcactggcuctcccuccag

SEQ ID NO: 43090 - DNA, 21 bp, Artificial Sequence
  Synthetic
acacagggcacgaugatgtua

SEQ ID NO: 43091 - DNA, 19 bp, Artificial Sequence
  Synthetic
ctcugacagccagcugacc

SEQ ID NO: 43092 - DNA, 20 bp, Artificial Sequence
  Synthetic
cctcggaguagctctuccca

SEQ ID NO: 43093 - DNA, 21 bp, Artificial Sequence
  Synthetic
tgtgcaaaaagcucggttucc

SEQ ID NO: 43094 - DNA, 22 bp, Artificial Sequence
  Synthetic
ctggacaagaccucacaccaut

SEQ ID NO: 43095 - DNA, 21 bp, Artificial Sequence
  Synthetic
agccaaaaaucccacttcugg

SEQ ID NO: 43096 - DNA, 24 bp, Artificial Sequence
  Synthetic
ctgtgtctaaguctccatctuggt

SEQ ID NO: 43097 - DNA, 24 bp, Artificial Sequence
  Synthetic
cagagcucagaataacccugagaa

SEQ ID NO: 43098 - DNA, 18 bp, Artificial Sequence
  Synthetic
ggcacugaacccccacuc

SEQ ID NO: 43099 - DNA, 18 bp, Artificial Sequence
  Synthetic
ggcugcggtgactuacct

SEQ ID NO: 43100 - DNA, 21 bp, Artificial Sequence
  Synthetic
cccaaccagagcccugaaaut

SEQ ID NO: 43101 - DNA, 25 bp, Artificial Sequence
  Synthetic
cagctctgatuatcccttccctuac

SEQ ID NO: 43102 - DNA, 23 bp, Artificial Sequence
  Synthetic
ggtgtttggagaugttaagcuca

SEQ ID NO: 43103 - DNA, 22 bp, Artificial Sequence
  Synthetic
gcatactgggaugtggcgauag

SEQ ID NO: 43104 - DNA, 24 bp, Artificial Sequence
  Synthetic
gggacttugaagctcaucagaact

SEQ ID NO: 43105 - DNA, 21 bp, Artificial Sequence
  Synthetic
ggagaaaugggaggcaggtug

SEQ ID NO: 43106 - DNA, 22 bp, Artificial Sequence
  Synthetic
tgacaaccugtugaacacacct

SEQ ID NO: 43107 - DNA, 21 bp, Artificial Sequence
  Synthetic
gcacccguactccaucaaaga

SEQ ID NO: 43108 - DNA, 21 bp, Artificial Sequence
  Synthetic
ccuagggagacugcagaacca

SEQ ID NO: 43109 - DNA, 21 bp, Artificial Sequence
  Synthetic
cugacccgacugggaagaaag

SEQ ID NO: 43110 - DNA, 20 bp, Artificial Sequence
  Synthetic
agtccagtutgggtgcucag

SEQ ID NO: 43111 - DNA, 21 bp, Artificial Sequence
  Synthetic
tctgcagaagaccgucctgua

SEQ ID NO: 43112 - DNA, 20 bp, Artificial Sequence
  Synthetic
gacagtgagucctgacugct

SEQ ID NO: 43113 - DNA, 25 bp, Artificial Sequence
  Synthetic
gaatgactggutagttgccauacac

SEQ ID NO: 43114 - DNA, 21 bp, Artificial Sequence
  Synthetic
cgcactguccccatctctuaa

SEQ ID NO: 43115 - DNA, 24 bp, Artificial Sequence
  Synthetic
cggaatggtguagagctcactuac

SEQ ID NO: 43116 - DNA, 20 bp, Artificial Sequence
  Synthetic
ccagccgguccagauttaut

SEQ ID NO: 43117 - DNA, 17 bp, Artificial Sequence
  Synthetic
gcagccccgagucucac

SEQ ID NO: 43118 - DNA, 20 bp, Artificial Sequence
  Synthetic
ccagcaacaggugcacatuc

SEQ ID NO: 43119 - DNA, 21 bp, Artificial Sequence
  Synthetic
gagaataagugcagcccuggt

SEQ ID NO: 43120 - DNA, 24 bp, Artificial Sequence
  Synthetic
ccctcatttcuctccaccctacut

SEQ ID NO: 43121 - DNA, 28 bp, Artificial Sequence
  Synthetic
cttactgggcuggatattcaaggaaaut

SEQ ID NO: 43122 - DNA, 21 bp, Artificial Sequence
  Synthetic
ggcctgauccctgatgagauc

SEQ ID NO: 43123 - DNA, 26 bp, Artificial Sequence
  Synthetic
gatgtcuaaggaaagggaggattugt

SEQ ID NO: 43124 - DNA, 22 bp, Artificial Sequence
  Synthetic
acuaaccaggacagctcucaca

SEQ ID NO: 43125 - DNA, 23 bp, Artificial Sequence
  Synthetic
agaagagtgaugaggatgcaugg

SEQ ID NO: 43126 - DNA, 24 bp, Artificial Sequence
  Synthetic
aatctgtcttugaatggccuggaa

SEQ ID NO: 43127 - DNA, 31 bp, Artificial Sequence; identical to SEQ ID NO: 30893
  Synthetic

SEQ ID NO: 43128 - DNA, 22 bp, Artificial Sequence
  Synthetic
cccaccaauacgcctcttcuac

SEQ ID NO: 43129 - DNA, 19 bp, Artificial Sequence
  Synthetic
gtggguaacgggcgtaguc

SEQ ID NO: 43130 - DNA, 23 bp, Artificial Sequence
  Synthetic
ccagagcucaggaagtttcctut

SEQ ID NO: 43131 - DNA, 21 bp, Artificial Sequence
  Synthetic
ggtctcaacccuccagtctuc

SEQ ID NO: 43132 - DNA, 17 bp, Artificial Sequence
  Synthetic
cccaucctccuccccac

SEQ ID NO: 43133 - DNA, 21 bp, Artificial Sequence
  Synthetic
gtucaagacagaagggccuga

SEQ ID NO: 43134 - DNA, 32 bp, Artificial Sequence; identical to SEQ ID NO: 30900
  Synthetic

SEQ ID NO: 43135 - DNA, 28 bp, Artificial Sequence
  Synthetic
guagctaactaactucagaacaccaact

SEQ ID NO: 43136 - DNA, 25 bp, Artificial Sequence
  Synthetic
aaagtgaatcugaggcataacugca

SEQ ID NO: 43137 - DNA, 26 bp, Artificial Sequence
  Synthetic
cttgcttctcutttcctatccugagt

SEQ ID NO: 43138 - DNA, 21 bp, Artificial Sequence
  Synthetic
accuggagggccacugacaac

SEQ ID NO: 43139 - DNA, 29 bp, Artificial Sequence
  Synthetic
gcctctgattccucactgattgctctuag

SEQ ID NO: 43140 - DNA, 22 bp, Artificial Sequence
  Synthetic
gcctcacaaccuccgtcatgug

SEQ ID NO: 43141 - DNA, 29 bp, Artificial Sequence
  Synthetic
tctgtctccttccucttcctacagtacuc

SEQ ID NO: 43142 - DNA, 21 bp, Artificial Sequence
  Synthetic
ctcauggaagccagccccuca

SEQ ID NO: 43143 - DNA, 21 bp, Artificial Sequence
  Synthetic
ctgcaccagcagcuccuacac

SEQ ID NO: 43144 - DNA, 23 bp, Artificial Sequence
  Synthetic
ccttgtcctuaccagaacgtugt

SEQ ID NO: 43145 - DNA, 26 bp, Artificial Sequence
  Synthetic
tttcagacctauggaaactgtgagug

SEQ ID NO: 43146 - DNA, 17 bp, Artificial Sequence
  Synthetic
ctcgtggguccggugaa

SEQ ID NO: 43147 - DNA, 17 bp, Artificial Sequence
  Synthetic
gccuccacccacagguc

SEQ ID NO: 43148 - DNA, 20 bp, Artificial Sequence
  Synthetic
ggtcacagguaggctcccut

SEQ ID NO: 43149 - DNA, 20 bp, Artificial Sequence
  Synthetic
gacaaggcguagtggaucgt

SEQ ID NO: 43150 - DNA, 21 bp, Artificial Sequence
  Synthetic
ctctgagccccuactctccut

SEQ ID NO: 43151 - DNA, 17 bp, Artificial Sequence
  Synthetic
gccgcguccgtgtcuag

SEQ ID NO: 43152 - DNA, 20 bp, Artificial Sequence
  Synthetic
ctggcaucgctcctcaguat

SEQ ID NO: 43153 - DNA, 23 bp, Artificial Sequence
  Synthetic
catttcuggcacaagctcactuc

SEQ ID NO: 43154 - DNA, 23 bp, Artificial Sequence
  Synthetic
gacctctugcattgacctcuacc

SEQ ID NO: 43155 - DNA, 24 bp, Artificial Sequence
  Synthetic
atgactacaugtcctccugagagt

SEQ ID NO: 43156 - DNA, 22 bp, Artificial Sequence
  Synthetic
tgggcagaaaaugcaagucaac

SEQ ID NO: 43157 - DNA, 23 bp, Artificial Sequence
  Synthetic
acttgaacauccagtccagctut

SEQ ID NO: 43158 - DNA, 21 bp, Artificial Sequence
  Synthetic
gctgccucttacccuacccat

SEQ ID NO: 43159 - DNA, 19 bp, Artificial Sequence
  Synthetic
gtggaucctcgtcugcaca

SEQ ID NO: 43160 - DNA, 24 bp, Artificial Sequence
  Synthetic
gtctttagctuggccatcatcaug

SEQ ID NO: 43161 - DNA, 22 bp, Artificial Sequence
  Synthetic
actgggcuttgcttuagaggaa

SEQ ID NO: 43162 - DNA, 21 bp, Artificial Sequence
  Synthetic
cccaggtcutcagcagcttua

SEQ ID NO: 43163 - DNA, 17 bp, Artificial Sequence
  Synthetic
cutcccacuggcaccca

SEQ ID NO: 43164 - DNA, 21 bp, Artificial Sequence
  Synthetic
agtgagcccautgaggttgug

SEQ ID NO: 43165 - DNA, 21 bp, Artificial Sequence
  Synthetic
ttgattgggcagguaggcuag

SEQ ID NO: 43166 - DNA, 22 bp, Artificial Sequence
  Synthetic
catgtcacuggacatccucagt

SEQ ID NO: 43167 - DNA, 23 bp, Artificial Sequence
  Synthetic
tgagtugcctcctcuacaggaaa

SEQ ID NO: 43168 - DNA, 18 bp, Artificial Sequence
  Synthetic
gccacagcutaccgcauc

SEQ ID NO: 43169 - DNA, 21 bp, Artificial Sequence
  Synthetic
cagaagggugagctgaggtut

SEQ ID NO: 43170 - DNA, 19 bp, Artificial Sequence
  Synthetic
ccccatuccccttcccuga

SEQ ID NO: 43171 - DNA, 18 bp, Artificial Sequence
  Synthetic
gcttgggugggacgtuct

SEQ ID NO: 43172 - DNA, 23 bp, Artificial Sequence
  Synthetic
ttcgagaaaggugtggttuccat

SEQ ID NO: 43173 - DNA, 21 bp, Artificial Sequence
  Synthetic
cctcauagctcggguaaggct

SEQ ID NO: 43174 - DNA, 18 bp, Artificial Sequence
  Synthetic
ggcttuccctggcuacgg

SEQ ID NO: 43175 - DNA, 22 bp, Artificial Sequence
  Synthetic
ggcactgcugtctttttcauca

SEQ ID NO: 43176 - DNA, 19 bp, Artificial Sequence
  Synthetic
cgacattgccucccctcug

SEQ ID NO: 43177 - DNA, 24 bp, Artificial Sequence
  Synthetic
actggtaggcaugaagattcugga

SEQ ID NO: 43178 - DNA, 25 bp, Artificial Sequence
  Synthetic
ggaaaccctccautaccaaaaccuc

SEQ ID NO: 43179 - DNA, 23 bp, Artificial Sequence
  Synthetic
gaaagttcuccaggtttggcauc

SEQ ID NO: 43180 - DNA, 20 bp, Artificial Sequence
  Synthetic
aacugcaagcccctucagaa

SEQ ID NO: 43181 - DNA, 18 bp, Artificial Sequence
  Synthetic
gagtagccgcuccctucg

SEQ ID NO: 43182 - DNA, 21 bp, Artificial Sequence
  Synthetic
agcutcctctacugcaaccag

SEQ ID NO: 43183 - DNA, 22 bp, Artificial Sequence
  Synthetic
cgaactuggagaagctgucgag

SEQ ID NO: 43184 - DNA, 19 bp, Artificial Sequence
  Synthetic
ccgacaaagcutgggcuga

SEQ ID NO: 43185 - DNA, 21 bp, Artificial Sequence
  Synthetic
ccacggaaggguctucaaaca

SEQ ID NO: 43186 - DNA, 21 bp, Artificial Sequence
  Synthetic
accccacuacagcagctttug

SEQ ID NO: 43187 - DNA, 21 bp, Artificial Sequence
  Synthetic
ctttgctgaugccatcugagg

SEQ ID NO: 43188 - DNA, 21 bp, Artificial Sequence
  Synthetic
gactucaagcaggaggaggug

SEQ ID NO: 43189 - DNA, 21 bp, Artificial Sequence
  Synthetic
aggagcucacauagggaggag

SEQ ID NO: 43190 - DNA, 18 bp, Artificial Sequence
  Synthetic
catcctgcugggcccuac

SEQ ID NO: 43191 - DNA, 19 bp, Artificial Sequence
  Synthetic
ggctccguaagctttugcc

SEQ ID NO: 43192 - DNA, 21 bp, Artificial Sequence
  Synthetic
cctcttgcuccctgaatccug

SEQ ID NO: 43193 - DNA, 18 bp, Artificial Sequence
  Synthetic
ccgctugcccgactugaa

SEQ ID NO: 43194 - DNA, 20 bp, Artificial Sequence
  Synthetic
tccucgacaacagccactug

SEQ ID NO: 43195 - DNA, 19 bp, Artificial Sequence
  Synthetic
caggttccgcutcttggug

SEQ ID NO: 43196 - DNA, 23 bp, Artificial Sequence
  Synthetic
ggaugtcttcucccaagaaagcc

SEQ ID NO: 43197 - DNA, 23 bp, Artificial Sequence
  Synthetic
cgctttacaugcgaacttctuga

SEQ ID NO: 43198 - DNA, 23 bp, Artificial Sequence
  Synthetic
gtggaagaaggccuggtaaaugt

SEQ ID NO: 43199 - DNA, 22 bp, Artificial Sequence
  Synthetic
ctttccggcucctcttctuagg

SEQ ID NO: 43200 - DNA, 21 bp, Artificial Sequence
  Synthetic
ccagugaggacaactctggug

SEQ ID NO: 43201 - DNA, 17 bp, Artificial Sequence
  Synthetic
ctgtcgucgtcgctugg

SEQ ID NO: 43202 - DNA, 18 bp, Artificial Sequence
  Synthetic
ttcgugcggguggagaag

SEQ ID NO: 43203 - DNA, 17 bp, Artificial Sequence
  Synthetic
gccuccagggagtgugg

SEQ ID NO: 43204 - DNA, 22 bp, Artificial Sequence
  Synthetic
gtacctctugccttgtttgcug

SEQ ID NO: 43205 - DNA, 19 bp, Artificial Sequence
  Synthetic
ctgcacacucgggacctut

SEQ ID NO: 43206 - DNA, 18 bp, Artificial Sequence
  Synthetic
gtgauggccgggaggaug

SEQ ID NO: 43207 - DNA, 17 bp, Artificial Sequence
  Synthetic
gctgggcuggcctctua

SEQ ID NO: 43208 - DNA, 20 bp, Artificial Sequence
  Synthetic
ccucctggcugcagacaaaa

SEQ ID NO: 43209 - DNA, 19 bp, Artificial Sequence
  Synthetic
ctcctcucccgctugacac

SEQ ID NO: 43210 - DNA, 19 bp, Artificial Sequence
  Synthetic
ttttgcagaggcugccgua

SEQ ID NO: 43211 - DNA, 18 bp, Artificial Sequence
  Synthetic
gcuccggaacgggtttuc

SEQ ID NO: 43212 - DNA, 22 bp, Artificial Sequence
  Synthetic
gggatctuccagtgggatcugt

SEQ ID NO: 43213 - DNA, 22 bp, Artificial Sequence
  Synthetic
cacctctgguaacgtcctctuc

SEQ ID NO: 43214 - DNA, 26 bp, Artificial Sequence
  Synthetic
ggcugtgaaaauagaaaaggacagga

SEQ ID NO: 43215 - DNA, 17 bp, Artificial Sequence
  Synthetic
ctccgcugcgagaugga

SEQ ID NO: 43216 - DNA, 21 bp, Artificial Sequence
  Synthetic
cacccttccuggcactatucc

SEQ ID NO: 43217 - DNA, 23 bp, Artificial Sequence
  Synthetic
ccttctggugtgaatggcatuct

SEQ ID NO: 43218 - DNA, 22 bp, Artificial Sequence
  Synthetic
ggtcacgcauctcgtucagaat

SEQ ID NO: 43219 - DNA, 23 bp, Artificial Sequence
  Synthetic
ggcagtautcaggccuaaggaac

SEQ ID NO: 43220 - DNA, 23 bp, Artificial Sequence
  Synthetic
ctcgtggtucttcttcagguagg

SEQ ID NO: 43221 - DNA, 24 bp, Artificial Sequence
  Synthetic
tgtgatcaggaugggtgtctcaua

SEQ ID NO: 43222 - DNA, 22 bp, Artificial Sequence
  Synthetic
gaaggagcuagctggaatggug

SEQ ID NO: 43223 - DNA, 21 bp, Artificial Sequence
  Synthetic
gtgagaaggugaccaugcaga

SEQ ID NO: 43224 - DNA, 18 bp, Artificial Sequence
  Synthetic
gcugaagccaccgccaua

SEQ ID NO: 43225 - DNA, 18 bp, Artificial Sequence
  Synthetic
gcaccaugaccaccugca

SEQ ID NO: 43226 - DNA, 23 bp, Artificial Sequence
  Synthetic
gcagattuccaagggagactuca

SEQ ID NO: 43227 - DNA, 19 bp, Artificial Sequence
  Synthetic
gaucccccacagccacuac

SEQ ID NO: 43228 - DNA, 22 bp, Artificial Sequence
  Synthetic
tgtgccaagaacugtgctacuc

SEQ ID NO: 43229 - DNA, 25 bp, Artificial Sequence
  Synthetic
acactttgaaugctctttcctucct

SEQ ID NO: 43230 - DNA, 21 bp, Artificial Sequence
  Synthetic
caatcugaggaacccccaucg

SEQ ID NO: 43231 - DNA, 25 bp, Artificial Sequence
  Synthetic
cctctctctucctctcttctuccag

SEQ ID NO: 43232 - DNA, 24 bp, Artificial Sequence
  Synthetic
ttgttaaggaaaguggtgcatuga

SEQ ID NO: 43233 - DNA, 33 bp, Artificial Sequence; identical to SEQ ID NO: 30999
  Synthetic

SEQ ID NO: 43234 - DNA, 22 bp, Artificial Sequence
  Synthetic
gcctcgccucatgtggtttuat

SEQ ID NO: 43235 - DNA, 29 bp, Artificial Sequence
  Synthetic
gtgctagagguaactcatgataauggaat

SEQ ID NO: 43236 - DNA, 22 bp, Artificial Sequence
  Synthetic
ctgggcagautctgcaacttuc

SEQ ID NO: 43237 - DNA, 30 bp, Artificial Sequence; identical to SEQ ID NO: 4777
  Synthetic

SEQ ID NO: 43238 - DNA, 22 bp, Artificial Sequence
  Synthetic
tgttgcucctccacaucaacaa

SEQ ID NO: 43239 - DNA, 22 bp, Artificial Sequence
  Synthetic
cacaattgguggcgatggttut

SEQ ID NO: 43240 - DNA, 29 bp, Artificial Sequence
  Synthetic
caaacacagctautaaaaagtcattccuc

SEQ ID NO: 43241 - DNA, 28 bp, Artificial Sequence
  Synthetic
ttcccttgatguctacaatttcacctut

SEQ ID NO: 43242 - DNA, 24 bp, Artificial Sequence
  Synthetic
caaagagaugatgucagcaaacct

SEQ ID NO: 43243 - DNA, 32 bp, Artificial Sequence; identical to SEQ ID NO: 31009
  Synthetic

SEQ ID NO: 43244 - DNA, 23 bp, Artificial Sequence
  Synthetic
ccaaucaagaaaggatccugggt

SEQ ID NO: 43245 - DNA, 19 bp, Artificial Sequence
  Synthetic
catagcaccgutgcuaccg

SEQ ID NO: 43246 - DNA, 22 bp, Artificial Sequence
  Synthetic
cttcgguaacccugagccaaat

SEQ ID NO: 43247 - DNA, 25 bp, Artificial Sequence
  Synthetic
cctatgggaaguagtcatgcatcuc

SEQ ID NO: 43248 - DNA, 25 bp, Artificial Sequence
  Synthetic
gttgcaaaaccccuaatcuaagcat

SEQ ID NO: 43249 - DNA, 27 bp, Artificial Sequence
  Synthetic
ggaaatgagaacautccaagtacagug

SEQ ID NO: 43250 - DNA, 28 bp, Artificial Sequence
  Synthetic
cgatatgggtttugtaaaagtccatgut

SEQ ID NO: 43251 - DNA, 29 bp, Artificial Sequence
  Synthetic
ggaaagaatgaguctaatatcaagccugt

SEQ ID NO: 43252 - DNA, 22 bp, Artificial Sequence
  Synthetic
gcaaatgacuggcgcttugaaa

SEQ ID NO: 43253 - DNA, 30 bp, Artificial Sequence; identical to SEQ ID NO: 31019
  Synthetic

SEQ ID NO: 43254 - DNA, 25 bp, Artificial Sequence
  Synthetic
tgcaaaacccuttctccactuaaca

SEQ ID NO: 43255 - DNA, 26 bp, Artificial Sequence
  Synthetic
agacaaguaaaagacaugacagcgat

SEQ ID NO: 43256 - DNA, 28 bp, Artificial Sequence
  Synthetic
tcactgcuagaacaactatcaattugca

SEQ ID NO: 43257 - DNA, 28 bp, Artificial Sequence
  Synthetic
ctcgaaaaagaauctgcttucaaaacga

SEQ ID NO: 43258 - DNA, 22 bp, Artificial Sequence
  Synthetic
accattctgcuccgtttggtua

SEQ ID NO: 43259 - DNA, 32 bp, Artificial Sequence; identical to SEQ ID NO: 9083
  Synthetic

SEQ ID NO: 43260 - DNA, 28 bp, Artificial Sequence
  Synthetic
tggccagtaaguctattttctcugaaga

SEQ ID NO: 43261 - DNA, 31 bp, Artificial Sequence; identical to SEQ ID NO: 6943
  Synthetic

SEQ ID NO: 43262 - DNA, 27 bp, Artificial Sequence
  Synthetic
ccgcctatcautacatgtttcctuact

SEQ ID NO: 43263 - DNA, 27 bp, Artificial Sequence
  Synthetic
gcatccagaaaaguatcagggtagtuc

SEQ ID NO: 43264 - DNA, 24 bp, Artificial Sequence
  Synthetic
ttgtaaaggucccaaatggtctuc

SEQ ID NO: 43265 - DNA, 29 bp, Artificial Sequence
  Synthetic
gtttcttatuaggactctgtctttuccct

SEQ ID NO: 43266 - DNA, 32 bp, Artificial Sequence; identical to SEQ ID NO: 31032
  Synthetic

SEQ ID NO: 43267 - DNA, 28 bp, Artificial Sequence
  Synthetic
tgcttgactgtuctttaccatactgtut

SEQ ID NO: 43268 - DNA, 23 bp, Artificial Sequence
  Synthetic
tctguagaagtctttuggcacgg

SEQ ID NO: 43269 - DNA, 28 bp, Artificial Sequence
  Synthetic
caacaaagagcauacatagggtttcuct

SEQ ID NO: 43270 - DNA, 28 bp, Artificial Sequence
  Synthetic
atttctacttttucctactgtggtugct

SEQ ID NO: 43271 - DNA, 30 bp, Artificial Sequence; identical to SEQ ID NO: 31037
  Synthetic

SEQ ID NO: 43272 - DNA, 27 bp, Artificial Sequence
  Synthetic
ggtcaattcugttcatttgcauaggag

SEQ ID NO: 43273 - DNA, 31 bp, Artificial Sequence; identical to SEQ ID NO: 31039
  Synthetic

SEQ ID NO: 43274 - DNA, 22 bp, Artificial Sequence
  Synthetic
tctgatccucctgtgtgtguga

SEQ ID NO: 43275 - DNA, 19 bp, Artificial Sequence
  Synthetic
tctccatutcggctugcgt

SEQ ID NO: 43276 - DNA, 22 bp, Artificial Sequence
  Synthetic
ccaucaacatcgucaccaccaa

SEQ ID NO: 43277 - DNA, 20 bp, Artificial Sequence
  Synthetic
gccccatccuctcagtccut

SEQ ID NO: 43278 - DNA, 21 bp, Artificial Sequence
  Synthetic
ccauaccaggccaaacagtug

SEQ ID NO: 43279 - DNA, 22 bp, Artificial Sequence
  Synthetic
gacctaugaagggcctggacua

SEQ ID NO: 43280 - DNA, 19 bp, Artificial Sequence
  Synthetic
cccccagaucgggagaaug

SEQ ID NO: 43281 - DNA, 21 bp, Artificial Sequence
  Synthetic
cccutcctttgugggaggaat

SEQ ID NO: 43282 - DNA, 21 bp, Artificial Sequence
  Synthetic
ctgaggcacuacttccgcuac

SEQ ID NO: 43283 - DNA, 22 bp, Artificial Sequence
  Synthetic
ctgtatccugagggacctcuga

SEQ ID NO: 43284 - DNA, 19 bp, Artificial Sequence
  Synthetic
gcgcacggugataaagucc

SEQ ID NO: 43285 - DNA, 27 bp, Artificial Sequence
  Synthetic
attttaatcaugcctaaagucccacct

SEQ ID NO: 43286 - DNA, 23 bp, Artificial Sequence
  Synthetic
cgtatgaatcucctggaccccut

SEQ ID NO: 43287 - DNA, 21 bp, Artificial Sequence
  Synthetic
cgctctccutcttcagaucgg

SEQ ID NO: 43288 - DNA, 19 bp, Artificial Sequence
  Synthetic
gucaacggcuccagcaaga

SEQ ID NO: 43289 - DNA, 19 bp, Artificial Sequence
  Synthetic
ggcaaaucagcccugacca

SEQ ID NO: 43290 - DNA, 21 bp, Artificial Sequence
  Synthetic
ccacccggautacaaguacca

SEQ ID NO: 43291 - DNA, 20 bp, Artificial Sequence
  Synthetic
cgggacggagauagcttguc

SEQ ID NO: 43292 - DNA, 21 bp, Artificial Sequence
  Synthetic
agcgacgucatctccaacauc

SEQ ID NO: 43293 - DNA, 19 bp, Artificial Sequence
  Synthetic
tgcutggacauccacacgt

SEQ ID NO: 43294 - DNA, 20 bp, Artificial Sequence
  Synthetic
caucaagacggagcagcuga

SEQ ID NO: 43295 - DNA, 23 bp, Artificial Sequence
  Synthetic
tgtaggugaaggtggaguagagg

SEQ ID NO: 43296 - DNA, 20 bp, Artificial Sequence
  Synthetic
acacagcucactcgacctug

SEQ ID NO: 43297 - DNA, 25 bp, Artificial Sequence
  Synthetic
ggataggtcaugtttgtgtctugga

SEQ ID NO: 43298 - DNA, 21 bp, Artificial Sequence
  Synthetic
gtgggaaagugcttgccttug

SEQ ID NO: 43299 - DNA, 26 bp, Artificial Sequence
  Synthetic
ccctagattcatutccaccagctaut

SEQ ID NO: 43300 - DNA, 20 bp, Artificial Sequence
  Synthetic
cctccggagugaccctcuag

SEQ ID NO: 43301 - DNA, 23 bp, Artificial Sequence
  Synthetic
catcggacauggagtuggagaag

SEQ ID NO: 43302 - DNA, 22 bp, Artificial Sequence
  Synthetic
gctcagctaucccctctctguc

SEQ ID NO: 43303 - DNA, 27 bp, Artificial Sequence
  Synthetic
attutaagttgtgggugaaagaggagt

SEQ ID NO: 43304 - DNA, 19 bp, Artificial Sequence
  Synthetic
ccuacacgacgccgtgaug

SEQ ID NO: 43305 - DNA, 20 bp, Artificial Sequence
  Synthetic
tcatcgtugcggctcaugat

SEQ ID NO: 43306 - DNA, 23 bp, Artificial Sequence
  Synthetic
tcatggagaugcttagccugaga

SEQ ID NO: 43307 - DNA, 23 bp, Artificial Sequence
  Synthetic
atttcuccaccgtgauccaagac

SEQ ID NO: 43308 - DNA, 17 bp, Artificial Sequence
  Synthetic
gggccutcaggcaucga

SEQ ID NO: 43309 - DNA, 19 bp, Artificial Sequence
  Synthetic
ctugaggccgucggagaag

SEQ ID NO: 43310 - DNA, 21 bp, Artificial Sequence
  Synthetic
cccaccauggtctctctcaut

SEQ ID NO: 43311 - DNA, 19 bp, Artificial Sequence
  Synthetic
ggugtacaaggugcaccca

SEQ ID NO: 43312 - DNA, 19 bp, Artificial Sequence
  Synthetic
ccgcuacgagggtcagtuc

SEQ ID NO: 43313 - DNA, 20 bp, Artificial Sequence
  Synthetic
ccaagtcuggctcucccaac

SEQ ID NO: 43314 - DNA, 21 bp, Artificial Sequence
  Synthetic
ccctcuccagagagaacccua

SEQ ID NO: 43315 - DNA, 22 bp, Artificial Sequence
  Synthetic
acctcgtaggucttagccucac

SEQ ID NO: 43316 - DNA, 17 bp, Artificial Sequence
  Synthetic
gggtgcccugctgacug

SEQ ID NO: 43317 - DNA, 17 bp, Artificial Sequence
  Synthetic
ccuccccaccgagcuct

SEQ ID NO: 43318 - DNA, 20 bp, Artificial Sequence
  Synthetic
ggtcccaccugaagaggtug

SEQ ID NO: 43319 - DNA, 22 bp, Artificial Sequence
  Synthetic
catgttgtuggtgacctuccag

SEQ ID NO: 43320 - DNA, 20 bp, Artificial Sequence
  Synthetic
cccctgaucctagcatggut

SEQ ID NO: 43321 - DNA, 21 bp, Artificial Sequence
  Synthetic
ggcctagtucctgggtcctua

SEQ ID NO: 43322 - DNA, 22 bp, Artificial Sequence
  Synthetic
gcctccactucagggctatcua

SEQ ID NO: 43323 - DNA, 23 bp, Artificial Sequence
  Synthetic
ctatgggauggagatggaguagg

SEQ ID NO: 43324 - DNA, 23 bp, Artificial Sequence
  Synthetic
tgaagctuacagagaagcaggug

SEQ ID NO: 43325 - DNA, 19 bp, Artificial Sequence
  Synthetic
gggtucggaggtggucaga

SEQ ID NO: 43326 - DNA, 22 bp, Artificial Sequence
  Synthetic
ctttatccggccugaggaugac

SEQ ID NO: 43327 - DNA, 22 bp, Artificial Sequence
  Synthetic
gccaggucgcaattccactuaa

SEQ ID NO: 43328 - DNA, 21 bp, Artificial Sequence
  Synthetic
tggtctcugcagtgtccauga

SEQ ID NO: 43329 - DNA, 21 bp, Artificial Sequence
  Synthetic
gggagucaacttctugcagct

SEQ ID NO: 43330 - DNA, 18 bp, Artificial Sequence
  Synthetic
ccccaaccugacccgtua

SEQ ID NO: 43331 - DNA, 19 bp, Artificial Sequence
  Synthetic
cacctgucgtgacccucag

SEQ ID NO: 43332 - DNA, 25 bp, Artificial Sequence
  Synthetic
gtaaagtacuggattcagggugact

SEQ ID NO: 43333 - DNA, 21 bp, Artificial Sequence
  Synthetic
ggacaaauggacagacauggc

SEQ ID NO: 43334 - DNA, 21 bp, Artificial Sequence
  Synthetic
tgaccctcugaagcactcuct

SEQ ID NO: 43335 - DNA, 17 bp, Artificial Sequence
  Synthetic
cccugcccaccacucac

SEQ ID NO: 43336 - DNA, 23 bp, Artificial Sequence
  Synthetic
atcatcccugacatccctaucgt

SEQ ID NO: 43337 - DNA, 22 bp, Artificial Sequence
  Synthetic
gacucactctguacccaagacc

SEQ ID NO: 43338 - DNA, 20 bp, Artificial Sequence
  Synthetic
gggugaccaggaatgugcag

SEQ ID NO: 43339 - DNA, 19 bp, Artificial Sequence
  Synthetic
ctcaggugggtgccauagg

SEQ ID NO: 43340 - DNA, 24 bp, Artificial Sequence
  Synthetic
cctgctcctcucactcttgtttug

SEQ ID NO: 43341 - DNA, 20 bp, Artificial Sequence
  Synthetic
ggatggccaccccugtacua

SEQ ID NO: 43342 - DNA, 22 bp, Artificial Sequence
  Synthetic
cccacatcuctcagagugagct

SEQ ID NO: 43343 - DNA, 21 bp, Artificial Sequence
  Synthetic
gttccugacacagctgaggua

SEQ ID NO: 43344 - DNA, 19 bp, Artificial Sequence
  Synthetic
tggtgguggaagaccucct

SEQ ID NO: 43345 - DNA, 22 bp, Artificial Sequence
  Synthetic
aguagaggaagagcaucagcct

SEQ ID NO: 43346 - DNA, 17 bp, Artificial Sequence
  Synthetic
cugagcccagacucgct

SEQ ID NO: 43347 - DNA, 20 bp, Artificial Sequence
  Synthetic
gagcagggaagaugcctuca

SEQ ID NO: 43348 - DNA, 20 bp, Artificial Sequence
  Synthetic
ccaccctcugactggccuat

SEQ ID NO: 43349 - DNA, 18 bp, Artificial Sequence
  Synthetic
gagagccgggauccccua

SEQ ID NO: 43350 - DNA, 21 bp, Artificial Sequence
  Synthetic
ctuagcacccacauggaccaa

SEQ ID NO: 43351 - DNA, 21 bp, Artificial Sequence
  Synthetic
aauaggttugggcccacagag

SEQ ID NO: 43352 - DNA, 21 bp, Artificial Sequence
  Synthetic
gcctcuactcccauagcccaa

SEQ ID NO: 43353 - DNA, 19 bp, Artificial Sequence
  Synthetic
gcccagacucctgcctuac

SEQ ID NO: 43354 - DNA, 18 bp, Artificial Sequence
  Synthetic
ctctgcgugcguggagat

SEQ ID NO: 43355 - DNA, 18 bp, Artificial Sequence
  Synthetic
ccuggcgacuccaagacc

SEQ ID NO: 43356 - DNA, 29 bp, Artificial Sequence
  Synthetic
aaaacctcacaaggucctttatacttugt

SEQ ID NO: 43357 - DNA, 22 bp, Artificial Sequence
  Synthetic
ccataggacacagccucctcut

SEQ ID NO: 43358 - DNA, 20 bp, Artificial Sequence
  Synthetic
ccuggagaggaggcauacga

SEQ ID NO: 43359 - DNA, 24 bp, Artificial Sequence
  Synthetic
aaaacagaagucagggctacucac

SEQ ID NO: 43360 - DNA, 21 bp, Artificial Sequence
  Synthetic
tcaatggtgucgctgtctcuc

SEQ ID NO: 43361 - DNA, 22 bp, Artificial Sequence
  Synthetic
aaaccugggaaggcttcctuac

SEQ ID NO: 43362 - DNA, 21 bp, Artificial Sequence
  Synthetic
acctccaagagcuggtgtgua

SEQ ID NO: 43363 - DNA, 20 bp, Artificial Sequence
  Synthetic
cggtcgugactcttcuccag

SEQ ID NO: 43364 - DNA, 25 bp, Artificial Sequence
  Synthetic
ccactcactcuctctctctttcucc

SEQ ID NO: 43365 - DNA, 29 bp, Artificial Sequence
  Synthetic
attaaacatgtgucgagtttgcagaauac

SEQ ID NO: 43366 - DNA, 20 bp, Artificial Sequence
  Synthetic
gaggctcuggtgttctuggg

SEQ ID NO: 43367 - DNA, 18 bp, Artificial Sequence
  Synthetic
cacatccucgctgccugt

SEQ ID NO: 43368 - DNA, 21 bp, Artificial Sequence
  Synthetic
acggcgagautgaggcctaua

SEQ ID NO: 43369 - DNA, 20 bp, Artificial Sequence
  Synthetic
ctgagggcaucctctgtguc

SEQ ID NO: 43370 - DNA, 19 bp, Artificial Sequence
  Synthetic
caccctguggctccttguc

SEQ ID NO: 43371 - DNA, 26 bp, Artificial Sequence
  Synthetic
tggttgaagtatutggtggtcttgut

SEQ ID NO: 43372 - DNA, 27 bp, Artificial Sequence
  Synthetic
gggcaatatucacaggtatttctttuc

SEQ ID NO: 43373 - DNA, 22 bp, Artificial Sequence
  Synthetic
gcttcctcucgatcaggaucgt

SEQ ID NO: 43374 - DNA, 27 bp, Artificial Sequence
  Synthetic
ccagccctaautttgctttttgaugaa

SEQ ID NO: 43375 - DNA, 22 bp, Artificial Sequence
  Synthetic
cctgtgtcaccutgaccatcuc

SEQ ID NO: 43376 - DNA, 24 bp, Artificial Sequence
  Synthetic
ggtctctcccugagtctctgttut

SEQ ID NO: 43377 - DNA, 21 bp, Artificial Sequence
  Synthetic
ttctctgucacccggttgtuc

SEQ ID NO: 43378 - DNA, 18 bp, Artificial Sequence
  Synthetic
cctcggugccgggauaga

SEQ ID NO: 43379 - DNA, 20 bp, Artificial Sequence
  Synthetic
gaccttcaugacccacgugt

SEQ ID NO: 43380 - DNA, 18 bp, Artificial Sequence
  Synthetic
cccctcugtcctgtcucc

SEQ ID NO: 43381 - DNA, 19 bp, Artificial Sequence
  Synthetic
cctttccgcugctcccuac

SEQ ID NO: 43382 - DNA, 25 bp, Artificial Sequence
  Synthetic
catttcctggaauctgagtttgugg

SEQ ID NO: 43383 - DNA, 20 bp, Artificial Sequence
  Synthetic
gatgagagccagucgctugt

SEQ ID NO: 43384 - DNA, 21 bp, Artificial Sequence
  Synthetic
cagatgaucgccaacaagcuc

SEQ ID NO: 43385 - DNA, 26 bp, Artificial Sequence
  Synthetic
ctggtttatuaaattgctgaguggct

SEQ ID NO: 43386 - DNA, 21 bp, Artificial Sequence
  Synthetic
gatggctuctcatcgtcugct

SEQ ID NO: 43387 - DNA, 26 bp, Artificial Sequence
  Synthetic
ccctagtaauaaaagctggtuggcaa

SEQ ID NO: 43388 - DNA, 22 bp, Artificial Sequence
  Synthetic
gggtgtatuactttgccaugcc

SEQ ID NO: 43389 - DNA, 24 bp, Artificial Sequence
  Synthetic
accctcgaagguctgtatacucac

SEQ ID NO: 43390 - DNA, 22 bp, Artificial Sequence
  Synthetic
tcgtcaccaaucccaaggaaug

SEQ ID NO: 43391 - DNA, 27 bp, Artificial Sequence
  Synthetic
caagttaaaguggaatgaaaagugcct

SEQ ID NO: 43392 - DNA, 17 bp, Artificial Sequence
  Synthetic
tgtccgcgauggaggug

SEQ ID NO: 43393 - DNA, 18 bp, Artificial Sequence
  Synthetic
ggaggcuacacgggacug

SEQ ID NO: 43394 - DNA, 26 bp, Artificial Sequence
  Synthetic
gggctcttttgauaaaccaagagaut

SEQ ID NO: 43395 - DNA, 22 bp, Artificial Sequence
  Synthetic
agcgatctcacucttccggaua

SEQ ID NO: 43396 - DNA, 28 bp, Artificial Sequence
  Synthetic
tgtttctcgaugaaatggagtttuacct

SEQ ID NO: 43397 - DNA, 21 bp, Artificial Sequence
  Synthetic
ccgtagatgcugactgcacuc

SEQ ID NO: 43398 - DNA, 25 bp, Artificial Sequence
  Synthetic
aaaacattcaaggcutcaccatgug

SEQ ID NO: 43399 - DNA, 24 bp, Artificial Sequence
  Synthetic
gaaatgaacagcgagguctttgug

SEQ ID NO: 43400 - DNA, 26 bp, Artificial Sequence
  Synthetic
tgatgaucgagaagatgtcuggaagt

SEQ ID NO: 43401 - DNA, 30 bp, Artificial Sequence; identical to SEQ ID NO: 31167
  Synthetic

SEQ ID NO: 43402 - DNA, 17 bp, Artificial Sequence
  Synthetic
ccugcacgggagcugaa

SEQ ID NO: 43403 - DNA, 25 bp, Artificial Sequence
  Synthetic
tggataagucaaagtccaggucagt

SEQ ID NO: 43404 - DNA, 19 bp, Artificial Sequence
  Synthetic
ccuctgauggcgaaagcga

SEQ ID NO: 43405 - DNA, 19 bp, Artificial Sequence
  Synthetic
cagctcaggcuccttgucc

SEQ ID NO: 43406 - DNA, 19 bp, Artificial Sequence
  Synthetic
ggugagtcccuggaccaga

SEQ ID NO: 43407 - DNA, 19 bp, Artificial Sequence
  Synthetic
ggcacgaucttgcggaugt

SEQ ID NO: 43408 - DNA, 17 bp, Artificial Sequence
  Synthetic
gcccugagcctccagug

SEQ ID NO: 43409 - DNA, 18 bp, Artificial Sequence
  Synthetic
ccugagcgggaagagcug

SEQ ID NO: 43410 - DNA, 21 bp, Artificial Sequence
  Synthetic
gctggacagcugttggtucat

SEQ ID NO: 43411 - DNA, 22 bp, Artificial Sequence
  Synthetic
tggagtcguagatccgaaccuc

SEQ ID NO: 43412 - DNA, 21 bp, Artificial Sequence
  Synthetic
agtcugattcggugcggaaaa

SEQ ID NO: 43413 - DNA, 21 bp, Artificial Sequence
  Synthetic
tgggctgucgctttcttcuag

SEQ ID NO: 43414 - DNA, 19 bp, Artificial Sequence
  Synthetic
gaaggagguctgtcgcuga

SEQ ID NO: 43415 - DNA, 18 bp, Artificial Sequence
  Synthetic
cucagaccccgcacucac

SEQ ID NO: 43416 - DNA, 21 bp, Artificial Sequence
  Synthetic
ggagcucaacgacctcatgug

SEQ ID NO: 43417 - DNA, 29 bp, Artificial Sequence
  Synthetic
ctgtcacttacaaaaguagacattccugt

SEQ ID NO: 43418 - DNA, 19 bp, Artificial Sequence
  Synthetic
gccugagaaccggaugagg

SEQ ID NO: 43419 - DNA, 19 bp, Artificial Sequence
  Synthetic
gaaggcgucctgcagttug

SEQ ID NO: 43420 - DNA, 27 bp, Artificial Sequence
  Synthetic
gctctttctcautttcagcatctcuct

SEQ ID NO: 43421 - DNA, 21 bp, Artificial Sequence
  Synthetic
accagaaacggucagtgaugg

SEQ ID NO: 43422 - DNA, 20 bp, Artificial Sequence
  Synthetic
gcctccagacaucgaguacc

SEQ ID NO: 43423 - DNA, 22 bp, Artificial Sequence
  Synthetic
ccagugactuggaaccaaggat

SEQ ID NO: 43424 - DNA, 19 bp, Artificial Sequence
  Synthetic
cacctagcuttgccccuga

SEQ ID NO: 43425 - DNA, 21 bp, Artificial Sequence
  Synthetic
cacactacgugcaaaccctug

SEQ ID NO: 43426 - DNA, 23 bp, Artificial Sequence
  Synthetic
gccctacguagcaaacuacagag

SEQ ID NO: 43427 - DNA, 22 bp, Artificial Sequence
  Synthetic
atgagtggacgagugatgagug

SEQ ID NO: 43428 - DNA, 21 bp, Artificial Sequence
  Synthetic
aggagatcagguggacacuct

SEQ ID NO: 43429 - DNA, 23 bp, Artificial Sequence
  Synthetic
gtaggagctugagaccttatugc

SEQ ID NO: 43430 - DNA, 25 bp, Artificial Sequence
  Synthetic
atgaaattgcugaccatgctttgut

SEQ ID NO: 43431 - DNA, 19 bp, Artificial Sequence
  Synthetic
ccugccgagggagcaauac

SEQ ID NO: 43432 - DNA, 22 bp, Artificial Sequence
  Synthetic
ctccgcattutctacctgtgug

SEQ ID NO: 43433 - DNA, 27 bp, Artificial Sequence
  Synthetic
cccaauaaagaagauaaaaggccagua

SEQ ID NO: 43434 - DNA, 21 bp, Artificial Sequence
  Synthetic
cattcgccucttccccttcut

SEQ ID NO: 43435 - DNA, 23 bp, Artificial Sequence
  Synthetic
cttagctgtcacutagcgtccuc

SEQ ID NO: 43436 - DNA, 21 bp, Artificial Sequence
  Synthetic
catcctgagutgtcacgugga

SEQ ID NO: 43437 - DNA, 22 bp, Artificial Sequence
  Synthetic
tgaatgaggccautggtctuca

SEQ ID NO: 43438 - DNA, 19 bp, Artificial Sequence
  Synthetic
cacagucaccccucagcac

SEQ ID NO: 43439 - DNA, 28 bp, Artificial Sequence
  Synthetic
tccttctcatttutagttctccacucac

SEQ ID NO: 43440 - DNA, 22 bp, Artificial Sequence
  Synthetic
catgtaccaugcccucaaggag

SEQ ID NO: 43441 - DNA, 20 bp, Artificial Sequence
  Synthetic
gggctgtgucctgtttccug

SEQ ID NO: 43442 - DNA, 17 bp, Artificial Sequence
  Synthetic
gcgcccccaaucccauc

SEQ ID NO: 43443 - DNA, 17 bp, Artificial Sequence
  Synthetic
gcagcugggcacguagt

SEQ ID NO: 43444 - DNA, 19 bp, Artificial Sequence
  Synthetic
agccatcccugctcgacua

SEQ ID NO: 43445 - DNA, 17 bp, Artificial Sequence
  Synthetic
gcuccagggccccttug

SEQ ID NO: 43446 - DNA, 28 bp, Artificial Sequence
  Synthetic
gaaattgatugaagtaatgttcgugcct

SEQ ID NO: 43447 - DNA, 21 bp, Artificial Sequence
  Synthetic
gacttcgugatccatcugcct

SEQ ID NO: 43448 - DNA, 23 bp, Artificial Sequence
  Synthetic
cctaggugacagaaugagaccct

SEQ ID NO: 43449 - DNA, 24 bp, Artificial Sequence
  Synthetic
accgactattugacgcagtaugac

SEQ ID NO: 43450 - DNA, 22 bp, Artificial Sequence
  Synthetic
ggcatcccuggcatcauacaaa

SEQ ID NO: 43451 - DNA, 31 bp, Artificial Sequence; identical to SEQ ID NO: 31217
  Synthetic

SEQ ID NO: 43452 - DNA, 21 bp, Artificial Sequence
  Synthetic
gggacgttuccttcttgagug

SEQ ID NO: 43453 - DNA, 28 bp, Artificial Sequence
  Synthetic
gatttaattgtuacgcttttcccccuaa

SEQ ID NO: 43454 - DNA, 27 bp, Artificial Sequence
  Synthetic
accttcactacautagcaaagtctuag

SEQ ID NO: 43455 - DNA, 28 bp, Artificial Sequence
  Synthetic
ctacattaaggtcuttcctgcagacaut

SEQ ID NO: 43456 - DNA, 23 bp, Artificial Sequence
  Synthetic
gggaataaaagcgutttggcugt

SEQ ID NO: 43457 - DNA, 25 bp, Artificial Sequence
  Synthetic
ctctaaccggugttatttcccctuc

SEQ ID NO: 43458 - DNA, 20 bp, Artificial Sequence
  Synthetic
cgtgtacucctcgcagtucc

SEQ ID NO: 43459 - DNA, 21 bp, Artificial Sequence
  Synthetic
ccccuaacccagagauacgca

SEQ ID NO: 43460 - DNA, 22 bp, Artificial Sequence
  Synthetic
gggtcttcugacccctcactua

SEQ ID NO: 43461 - DNA, 18 bp, Artificial Sequence
  Synthetic
caccgugcccuaaacgac

SEQ ID NO: 43462 - DNA, 22 bp, Artificial Sequence
  Synthetic
ctgacctcccuctacaacccua

SEQ ID NO: 43463 - DNA, 22 bp, Artificial Sequence
  Synthetic
agaccttcuaccccctgaaucc

SEQ ID NO: 43464 - DNA, 20 bp, Artificial Sequence
  Synthetic
cccctgcaaucgtctcugac

SEQ ID NO: 43465 - DNA, 24 bp, Artificial Sequence
  Synthetic
agggcaacatuaagggtctgttut

SEQ ID NO: 43466 - DNA, 26 bp, Artificial Sequence
  Synthetic
ccuatgagtaggatuagggaccagat

SEQ ID NO: 43467 - DNA, 22 bp, Artificial Sequence
  Synthetic
caagacctuttctgtccuccca

SEQ ID NO: 43468 - DNA, 19 bp, Artificial Sequence
  Synthetic
agaggaggcugacctgugt

SEQ ID NO: 43469 - DNA, 22 bp, Artificial Sequence
  Synthetic
cctgaguagctgggatuacacc

SEQ ID NO: 43470 - DNA, 19 bp, Artificial Sequence
  Synthetic
gtgacgtugcggcagtuag

SEQ ID NO: 43471 - DNA, 24 bp, Artificial Sequence
  Synthetic
ctcgaagtagaugatgaggtccug

SEQ ID NO: 43472 - DNA, 22 bp, Artificial Sequence
  Synthetic
tgggtcucctattgtgaugcct

SEQ ID NO: 43473 - DNA, 19 bp, Artificial Sequence
  Synthetic
tcaggacugggaccccuac

SEQ ID NO: 43474 - DNA, 20 bp, Artificial Sequence
  Synthetic
ggccgctucacctctcatuc

SEQ ID NO: 43475 - DNA, 21 bp, Artificial Sequence
  Synthetic
gaggccagcautcagagtuca

SEQ ID NO: 43476 - DNA, 19 bp, Artificial Sequence
  Synthetic
cuctctggctucccaccac

SEQ ID NO: 43477 - DNA, 18 bp, Artificial Sequence
  Synthetic
gggtguagccctcgguga

SEQ ID NO: 43478 - DNA, 22 bp, Artificial Sequence
  Synthetic
atctccacaggagccuccaaua

SEQ ID NO: 43479 - DNA, 21 bp, Artificial Sequence
  Synthetic
ttgaugcggaaggagauggac

SEQ ID NO: 43480 - DNA, 22 bp, Artificial Sequence
  Synthetic
ccattgaucccaggactgctuc

SEQ ID NO: 43481 - DNA, 25 bp, Artificial Sequence
  Synthetic
cgatactccutgatgggtucaagat

SEQ ID NO: 43482 - DNA, 22 bp, Artificial Sequence
  Synthetic
ggtcatgauggaggaggguaga

SEQ ID NO: 43483 - DNA, 19 bp, Artificial Sequence
  Synthetic
ccuggcaccgcaagtcuag

SEQ ID NO: 43484 - DNA, 18 bp, Artificial Sequence
  Synthetic
gtgaccugtcgccuccac

SEQ ID NO: 43485 - DNA, 20 bp, Artificial Sequence
  Synthetic
ccagccctuagcacagcauc

SEQ ID NO: 43486 - DNA, 19 bp, Artificial Sequence
  Synthetic
gacactgguggaccgtcug

SEQ ID NO: 43487 - DNA, 21 bp, Artificial Sequence
  Synthetic
ggctcgatgutgtagccguag

SEQ ID NO: 43488 - DNA, 22 bp, Artificial Sequence
  Synthetic
cccaaagccugtcttcuaccaa

SEQ ID NO: 43489 - DNA, 24 bp, Artificial Sequence
  Synthetic
tgactgctucaaactcgaaguacc

SEQ ID NO: 43490 - DNA, 26 bp, Artificial Sequence
  Synthetic
ctgtcttcatauatctctcccuccct

SEQ ID NO: 43491 - DNA, 26 bp, Artificial Sequence
  Synthetic
gggtgaagataauggtgttctctgug

SEQ ID NO: 43492 - DNA, 22 bp, Artificial Sequence
  Synthetic
ccaactctcccauccctaccuc

SEQ ID NO: 43493 - DNA, 21 bp, Artificial Sequence
  Synthetic
gttgauggcaaatggcucgaa

SEQ ID NO: 43494 - DNA, 21 bp, Artificial Sequence
  Synthetic
tgugaccaggtguaggaccaa

SEQ ID NO: 43495 - DNA, 20 bp, Artificial Sequence
  Synthetic
cggaagtgcuggtggaacug

SEQ ID NO: 43496 - DNA, 22 bp, Artificial Sequence
  Synthetic
cgaccctgacuacgaaaaccug

SEQ ID NO: 43497 - DNA, 18 bp, Artificial Sequence
  Synthetic
gcccccaauccccacuct

SEQ ID NO: 43498 - DNA, 21 bp, Artificial Sequence
  Synthetic
ctgaccacuagttccccucct

SEQ ID NO: 43499 - DNA, 17 bp, Artificial Sequence
  Synthetic
cctgcaccucccaccuc

SEQ ID NO: 43500 - DNA, 21 bp, Artificial Sequence
  Synthetic
gaccuacaaatuggccccaga

SEQ ID NO: 43501 - DNA, 21 bp, Artificial Sequence
  Synthetic
ccattagugcccccatcacug

SEQ ID NO: 43502 - DNA, 20 bp, Artificial Sequence
  Synthetic
ctgatgccagugtccuggag

SEQ ID NO: 43503 - DNA, 18 bp, Artificial Sequence
  Synthetic
ctgcccaccccugcauag

SEQ ID NO: 43504 - DNA, 19 bp, Artificial Sequence
  Synthetic
tctgugcagccacguagac

SEQ ID NO: 43505 - DNA, 23 bp, Artificial Sequence
  Synthetic
gtgaccatttuctgtgctcctuc

SEQ ID NO: 43506 - DNA, 17 bp, Artificial Sequence
  Synthetic
gcctcagcccugccauc

SEQ ID NO: 43507 - DNA, 25 bp, Artificial Sequence
  Synthetic
gcatgtatcuctggagtttugggaa

SEQ ID NO: 43508 - DNA, 24 bp, Artificial Sequence
  Synthetic
gugaagaggaagaugaggaggaga

SEQ ID NO: 43509 - DNA, 21 bp, Artificial Sequence
  Synthetic
cagcccaccugtaactucaca

SEQ ID NO: 43510 - DNA, 20 bp, Artificial Sequence
  Synthetic
agcgctatguggacaagcuc

SEQ ID NO: 43511 - DNA, 23 bp, Artificial Sequence
  Synthetic
tttagaggtugagggtccucagt

SEQ ID NO: 43512 - DNA, 28 bp, Artificial Sequence
  Synthetic
gcatgcacauatgcacaaataaaugagt

SEQ ID NO: 43513 - DNA, 26 bp, Artificial Sequence
  Synthetic
ggtttctctuccttcttctucaccag

SEQ ID NO: 43514 - DNA, 20 bp, Artificial Sequence
  Synthetic
gctccaagccutgcattguc

SEQ ID NO: 43515 - DNA, 20 bp, Artificial Sequence
  Synthetic
aggctcauggtgtctuccac

SEQ ID NO: 43516 - DNA, 18 bp, Artificial Sequence
  Synthetic
gctgucacagtgguggct

SEQ ID NO: 43517 - DNA, 17 bp, Artificial Sequence
  Synthetic
ccugagcuccccagcac

SEQ ID NO: 43518 - DNA, 22 bp, Artificial Sequence
  Synthetic
gagacaagcaggagugagaugt

SEQ ID NO: 43519 - DNA, 23 bp, Artificial Sequence
  Synthetic
tgagtttggaaucagcaggtguc

SEQ ID NO: 43520 - DNA, 21 bp, Artificial Sequence
  Synthetic
aggtctcugatggtggcucat

SEQ ID NO: 43521 - DNA, 19 bp, Artificial Sequence
  Synthetic
gatggccucttcgauggca

SEQ ID NO: 43522 - DNA, 18 bp, Artificial Sequence
  Synthetic
ccggcccccucctcaaua

SEQ ID NO: 43523 - DNA, 18 bp, Artificial Sequence
  Synthetic
cctggcucagggtcucac

SEQ ID NO: 43524 - DNA, 21 bp, Artificial Sequence
  Synthetic
ggauggaactuggcgaaggag

SEQ ID NO: 43525 - DNA, 22 bp, Artificial Sequence
  Synthetic
gcaagaagucctggttcucgat

SEQ ID NO: 43526 - DNA, 21 bp, Artificial Sequence
  Synthetic
cutggatccttuggccacagt

SEQ ID NO: 43527 - DNA, 21 bp, Artificial Sequence
  Synthetic
gcagcauagagtccaccauga

SEQ ID NO: 43528 - DNA, 24 bp, Artificial Sequence
  Synthetic
gggattctacaucttgtgcatugt

SEQ ID NO: 43529 - DNA, 20 bp, Artificial Sequence
  Synthetic
acaaaugagccccgcaguag

SEQ ID NO: 43530 - DNA, 19 bp, Artificial Sequence
  Synthetic
cctgctucacccggtttuc

SEQ ID NO: 43531 - DNA, 24 bp, Artificial Sequence
  Synthetic
tgaaatcttccuctctgtcuccca

SEQ ID NO: 43532 - DNA, 20 bp, Artificial Sequence
  Synthetic
cccccaggautctctgucct

SEQ ID NO: 43533 - DNA, 24 bp, Artificial Sequence
  Synthetic
ggtttcatttugaccctcaaugct

SEQ ID NO: 43534 - DNA, 21 bp, Artificial Sequence
  Synthetic
gagtcccugaaggccatgaut

SEQ ID NO: 43535 - DNA, 21 bp, Artificial Sequence
  Synthetic
gccaugccccttgttcuagac

SEQ ID NO: 43536 - DNA, 22 bp, Artificial Sequence
  Synthetic
ggctggcaucctctgaatcuag

SEQ ID NO: 43537 - DNA, 23 bp, Artificial Sequence
  Synthetic
caugaaggcaaucagcaaaacca

SEQ ID NO: 43538 - DNA, 23 bp, Artificial Sequence
  Synthetic
ggctgatccutctctccacauct

SEQ ID NO: 43539 - DNA, 22 bp, Artificial Sequence
  Synthetic
aacaggtgucctaggtgaguct

SEQ ID NO: 43540 - DNA, 21 bp, Artificial Sequence
  Synthetic
cacccctcautggacccttua

SEQ ID NO: 43541 - DNA, 24 bp, Artificial Sequence
  Synthetic
ggattacaaucctgtgaggucagg

SEQ ID NO: 43542 - DNA, 22 bp, Artificial Sequence
  Synthetic
actgtccuctgtcctctuagcc

SEQ ID NO: 43543 - DNA, 22 bp, Artificial Sequence
  Synthetic
gaacatcagcuctggaaucgga

SEQ ID NO: 43544 - DNA, 18 bp, Artificial Sequence
  Synthetic
cgugggccagaaccucac

SEQ ID NO: 43545 - DNA, 22 bp, Artificial Sequence
  Synthetic
atucaaacacucagggactcuc

SEQ ID NO: 43546 - DNA, 20 bp, Artificial Sequence
  Synthetic
gacacguggcagcuaaacac

SEQ ID NO: 43547 - DNA, 21 bp, Artificial Sequence
  Synthetic
ggagauttggacucccagcac

SEQ ID NO: 43548 - DNA, 21 bp, Artificial Sequence
  Synthetic
ctacacagagaugccgcaugt

SEQ ID NO: 43549 - DNA, 24 bp, Artificial Sequence
  Synthetic
gautctcaggatatuccccagcag

SEQ ID NO: 43550 - DNA, 22 bp, Artificial Sequence
  Synthetic
tgctaggtuggagatgctgtut

SEQ ID NO: 43551 - DNA, 22 bp, Artificial Sequence
  Synthetic
cccgatagtugggatgaagugg

SEQ ID NO: 43552 - DNA, 21 bp, Artificial Sequence
  Synthetic
ggacgagtuctctgtgctcug

SEQ ID NO: 43553 - DNA, 24 bp, Artificial Sequence
  Synthetic
gaagaagttuctagccagucagga

SEQ ID NO: 43554 - DNA, 19 bp, Artificial Sequence
  Synthetic
cctguccggtcugcaacac

SEQ ID NO: 43555 - DNA, 21 bp, Artificial Sequence
  Synthetic
ggccagguaggaagtccuaga

SEQ ID NO: 43556 - DNA, 21 bp, Artificial Sequence
  Synthetic
tgaagaagaugctgcccaucg

SEQ ID NO: 43557 - DNA, 22 bp, Artificial Sequence
  Synthetic
tggcattguggttgttcccuaa

SEQ ID NO: 43558 - DNA, 23 bp, Artificial Sequence
  Synthetic
acccautgagtccucccaaaaac

SEQ ID NO: 43559 - DNA, 21 bp, Artificial Sequence
  Synthetic
ggactcugcgcacgatttuct

SEQ ID NO: 43560 - DNA, 21 bp, Artificial Sequence
  Synthetic
gggatgtgacugtcctgcuat

SEQ ID NO: 43561 - DNA, 23 bp, Artificial Sequence
  Synthetic
cctccattcuccagactcuccag

SEQ ID NO: 43562 - DNA, 21 bp, Artificial Sequence
  Synthetic
gggactcuagaaaccctcucc

SEQ ID NO: 43563 - DNA, 20 bp, Artificial Sequence
  Synthetic
gcccuggcaagagtctucac

SEQ ID NO: 43564 - DNA, 22 bp, Artificial Sequence
  Synthetic
tgcagugcttguccacaaaaag

SEQ ID NO: 43565 - DNA, 24 bp, Artificial Sequence
  Synthetic
tgctgaatgaaugggagatgacug

SEQ ID NO: 43566 - DNA, 21 bp, Artificial Sequence
  Synthetic
ggaacacacugcctuccaact

SEQ ID NO: 43567 - DNA, 24 bp, Artificial Sequence
  Synthetic
cttgccttctuctgaagtccctut

SEQ ID NO: 43568 - DNA, 22 bp, Artificial Sequence
  Synthetic
aggcttcaucacatacccccua

SEQ ID NO: 43569 - DNA, 25 bp, Artificial Sequence
  Synthetic
ggaaucccaaaggaagatgtcucag

SEQ ID NO: 43570 - DNA, 19 bp, Artificial Sequence
  Synthetic
gtgtctuggcgcatcugac

SEQ ID NO: 43571 - DNA, 25 bp, Artificial Sequence
  Synthetic
ctaattcagucaacccttccguacc

SEQ ID NO: 43572 - DNA, 21 bp, Artificial Sequence
  Synthetic
gagacggtucaggtgtgacut

SEQ ID NO: 43573 - DNA, 23 bp, Artificial Sequence
  Synthetic
gacatggcuttggagaagtucct

SEQ ID NO: 43574 - DNA, 21 bp, Artificial Sequence
  Synthetic
catcgtgauccctgatcccut

SEQ ID NO: 43575 - DNA, 22 bp, Artificial Sequence
  Synthetic
cctgagcgagcutcatcaucat

SEQ ID NO: 43576 - DNA, 19 bp, Artificial Sequence
  Synthetic
gtttaggcccugctgggua

SEQ ID NO: 43577 - DNA, 23 bp, Artificial Sequence
  Synthetic
ctttactgtuccctcacccucac

SEQ ID NO: 43578 - DNA, 25 bp, Artificial Sequence
  Synthetic
catccaatguggagatgatccucaa

SEQ ID NO: 43579 - DNA, 21 bp, Artificial Sequence
  Synthetic
gcagagatguctcttgccuga

SEQ ID NO: 43580 - DNA, 18 bp, Artificial Sequence
  Synthetic
cgacaucggctucaacgt

SEQ ID NO: 43581 - DNA, 21 bp, Artificial Sequence
  Synthetic
ctcgaaguagatgcgcucgat

SEQ ID NO: 43582 - DNA, 23 bp, Artificial Sequence
  Synthetic
gacaccaucttcgagaugcagat

SEQ ID NO: 43583 - DNA, 17 bp, Artificial Sequence
  Synthetic
caggcugcggtagcuga

SEQ ID NO: 43584 - DNA, 17 bp, Artificial Sequence
  Synthetic
ggtggccgugaccgaug

SEQ ID NO: 43585 - DNA, 23 bp, Artificial Sequence
  Synthetic
tccaaucccccatcttuccaaaa

SEQ ID NO: 43586 - DNA, 21 bp, Artificial Sequence
  Synthetic
ctcctgaccuctctctgucct

SEQ ID NO: 43587 - DNA, 21 bp, Artificial Sequence
  Synthetic
gtgacctggcuggatcctuac

SEQ ID NO: 43588 - DNA, 23 bp, Artificial Sequence
  Synthetic
cacagaugaatctctguccccat

SEQ ID NO: 43589 - DNA, 23 bp, Artificial Sequence
  Synthetic
ctgtgctttccuccaggaaguag

SEQ ID NO: 43590 - DNA, 21 bp, Artificial Sequence
  Synthetic
cctttggccucctcccacuat

SEQ ID NO: 43591 - DNA, 19 bp, Artificial Sequence
  Synthetic
gccuggactggguggaaac

SEQ ID NO: 43592 - DNA, 22 bp, Artificial Sequence
  Synthetic
gtctacacagccugatgctcuc

SEQ ID NO: 43593 - DNA, 22 bp, Artificial Sequence
  Synthetic
cttgagtgucagactccaguca

SEQ ID NO: 43594 - DNA, 20 bp, Artificial Sequence
  Synthetic
gcacagcugactctcgagug

SEQ ID NO: 43595 - DNA, 20 bp, Artificial Sequence
  Synthetic
cauggcgatguccaggagat

SEQ ID NO: 43596 - DNA, 17 bp, Artificial Sequence
  Synthetic
gctgaccuggccccauc

SEQ ID NO: 43597 - DNA, 20 bp, Artificial Sequence
  Synthetic
ggaagggucccagagtgcua

SEQ ID NO: 43598 - DNA, 21 bp, Artificial Sequence
  Synthetic
ttcacatguacgtgggtgucc

SEQ ID NO: 43599 - DNA, 23 bp, Artificial Sequence
  Synthetic
ctgcattctuagccatggagcua

SEQ ID NO: 43600 - DNA, 22 bp, Artificial Sequence
  Synthetic
gcctccacuctgatgtctctug

SEQ ID NO: 43601 - DNA, 22 bp, Artificial Sequence
  Synthetic
aaagctaaguaccccactgcug

SEQ ID NO: 43602 - DNA, 28 bp, Artificial Sequence
  Synthetic
aacagagcaacacccugtctaaaaauat

SEQ ID NO: 43603 - DNA, 23 bp, Artificial Sequence
  Synthetic
ctaagctggucctcatactgcut

SEQ ID NO: 43604 - DNA, 20 bp, Artificial Sequence
  Synthetic
cagccccgaauctagccuac

SEQ ID NO: 43605 - DNA, 27 bp, Artificial Sequence
  Synthetic
gaagatagccuttacatccctaauccc

SEQ ID NO: 43606 - DNA, 24 bp, Artificial Sequence
  Synthetic
cgtcatctcuggaatccccatcua

SEQ ID NO: 43607 - DNA, 21 bp, Artificial Sequence
  Synthetic
gguggaggcacagauagacgt

SEQ ID NO: 43608 - DNA, 17 bp, Artificial Sequence
  Synthetic
ccggucccctcuacacc

SEQ ID NO: 43609 - DNA, 28 bp, Artificial Sequence
  Synthetic
tcctggaagaacacucagaaaaacuaaa

SEQ ID NO: 43610 - DNA, 25 bp, Artificial Sequence
  Synthetic
tcatgtgagugtgaatgagtgugag

SEQ ID NO: 43611 - DNA, 24 bp, Artificial Sequence
  Synthetic
attgtuccggcagaagaagaugat

SEQ ID NO: 43612 - DNA, 21 bp, Artificial Sequence
  Synthetic
ctgacctgccutctctgtguc

SEQ ID NO: 43613 - DNA, 20 bp, Artificial Sequence
  Synthetic
gaagatgcuacggtggcugt

SEQ ID NO: 43614 - DNA, 20 bp, Artificial Sequence
  Synthetic
tgacgacagutcagcguacc

SEQ ID NO: 43615 - DNA, 22 bp, Artificial Sequence
  Synthetic
tcggtgtuccacaaatcctucc

SEQ ID NO: 43616 - DNA, 24 bp, Artificial Sequence
  Synthetic
acccactggaucacttcgauaagt

SEQ ID NO: 43617 - DNA, 18 bp, Artificial Sequence
  Synthetic
gcaacugctgcagaugct

SEQ ID NO: 43618 - DNA, 22 bp, Artificial Sequence
  Synthetic
gggcacagcauagttgtgtuga

SEQ ID NO: 43619 - DNA, 23 bp, Artificial Sequence
  Synthetic
ctcuccagucaaagacctaagut

SEQ ID NO: 43620 - DNA, 21 bp, Artificial Sequence
  Synthetic
ggutggctccaugaccaagat

SEQ ID NO: 43621 - DNA, 23 bp, Artificial Sequence
  Synthetic
tcaaggcuactccatcaaugcag

SEQ ID NO: 43622 - DNA, 20 bp, Artificial Sequence
  Synthetic
tgutacaaagugccccagca

SEQ ID NO: 43623 - DNA, 19 bp, Artificial Sequence
  Synthetic
aaggcggagautgcaguga

SEQ ID NO: 43624 - DNA, 20 bp, Artificial Sequence
  Synthetic
cccggagucgaagacagtuc

SEQ ID NO: 43625 - DNA, 19 bp, Artificial Sequence
  Synthetic
gtgttgaccucgccctcuc

SEQ ID NO: 43626 - DNA, 22 bp, Artificial Sequence
  Synthetic
agggugagccctatatcuggac

SEQ ID NO: 43627 - DNA, 24 bp, Artificial Sequence
  Synthetic
ctatgcctcuttcttctcctucca

SEQ ID NO: 43628 - DNA, 18 bp, Artificial Sequence
  Synthetic
gggagguaaggacgguga

SEQ ID NO: 43629 - DNA, 18 bp, Artificial Sequence
  Synthetic
ccuggaggaggaggugct

SEQ ID NO: 43630 - DNA, 24 bp, Artificial Sequence
  Synthetic
cctcacctttuctctcccaatugt

SEQ ID NO: 43631 - DNA, 24 bp, Artificial Sequence
  Synthetic
ccagagaaucagcattctgtcucc

SEQ ID NO: 43632 - DNA, 23 bp, Artificial Sequence
  Synthetic
gtgatucaggacccuagaaggua

SEQ ID NO: 43633 - DNA, 23 bp, Artificial Sequence
  Synthetic
ctttacaccggauttcgaaggug

SEQ ID NO: 43634 - DNA, 19 bp, Artificial Sequence
  Synthetic
gcagagagaggugctccug

SEQ ID NO: 43635 - DNA, 21 bp, Artificial Sequence
  Synthetic
cgctgggugtattcgcctaug

SEQ ID NO: 43636 - DNA, 23 bp, Artificial Sequence
  Synthetic
ctctttucccctccaaauccagt

SEQ ID NO: 43637 - DNA, 25 bp, Artificial Sequence
  Synthetic
ggttcatttaucccacccttctcut

SEQ ID NO: 43638 - DNA, 21 bp, Artificial Sequence
  Synthetic
cacccccaaucctagagctuc

SEQ ID NO: 43639 - DNA, 17 bp, Artificial Sequence
  Synthetic
ggtgcccugcaggtguc

SEQ ID NO: 43640 - DNA, 25 bp, Artificial Sequence
  Synthetic
gttctaaggcucggtcattcaucaa

SEQ ID NO: 43641 - DNA, 22 bp, Artificial Sequence
  Synthetic
catcgtggugaggctuaaggag

SEQ ID NO: 43642 - DNA, 22 bp, Artificial Sequence
  Synthetic
tctcagctucaccctaggacug

SEQ ID NO: 43643 - DNA, 22 bp, Artificial Sequence
  Synthetic
tgtccttcugcagactccgtua

SEQ ID NO: 43644 - DNA, 21 bp, Artificial Sequence
  Synthetic
cgtcaccccauggtgaguaac

SEQ ID NO: 43645 - DNA, 23 bp, Artificial Sequence
  Synthetic
gugccaagagaaaugactguact

SEQ ID NO: 43646 - DNA, 22 bp, Artificial Sequence
  Synthetic
cactgttugccaagacccagua

SEQ ID NO: 43647 - DNA, 23 bp, Artificial Sequence
  Synthetic
cctcctcccaucactctttgtuc

SEQ ID NO: 43648 - DNA, 21 bp, Artificial Sequence
  Synthetic
caagacccuccacagatgugt

SEQ ID NO: 43649 - DNA, 20 bp, Artificial Sequence
  Synthetic
gggcgtaggucatggcauag

SEQ ID NO: 43650 - DNA, 22 bp, Artificial Sequence
  Synthetic
tccctaucaggccagagctaug

SEQ ID NO: 43651 - DNA, 22 bp, Artificial Sequence
  Synthetic
cgatggagagagauggagacug

SEQ ID NO: 43652 - DNA, 22 bp, Artificial Sequence
  Synthetic
caagttttuagggaacgcugct

SEQ ID NO: 43653 - DNA, 22 bp, Artificial Sequence
  Synthetic
catagctuggcgatggtctuga

SEQ ID NO: 43654 - DNA, 23 bp, Artificial Sequence
  Synthetic
gggtgauacaggcttcttttuga

SEQ ID NO: 43655 - DNA, 24 bp, Artificial Sequence
  Synthetic
cugagaaggagatauacccagcca

SEQ ID NO: 43656 - DNA, 21 bp, Artificial Sequence
  Synthetic
gacaacctccugtcccgttua

SEQ ID NO: 43657 - DNA, 20 bp, Artificial Sequence
  Synthetic
ccatcgtcuccagacccuga

SEQ ID NO: 43658 - DNA, 18 bp, Artificial Sequence
  Synthetic
ctgucggaggaggagcug

SEQ ID NO: 43659 - DNA, 21 bp, Artificial Sequence
  Synthetic
caaggucacagtgucagcaga

SEQ ID NO: 43660 - DNA, 23 bp, Artificial Sequence
  Synthetic
gttgctttgcugttacctctguc

SEQ ID NO: 43661 - DNA, 20 bp, Artificial Sequence
  Synthetic
cctcaccuttccctccucac

SEQ ID NO: 43662 - DNA, 17 bp, Artificial Sequence
  Synthetic
gggtccgguaggcaugg

SEQ ID NO: 43663 - DNA, 17 bp, Artificial Sequence
  Synthetic
ggcgctcugggagtcug

SEQ ID NO: 43664 - DNA, 18 bp, Artificial Sequence
  Synthetic
gatcgcagccuccctguc

SEQ ID NO: 43665 - DNA, 21 bp, Artificial Sequence
  Synthetic
ctcatccuggccttctucaca

SEQ ID NO: 43666 - DNA, 21 bp, Artificial Sequence
  Synthetic
agaguggccttatguccacct

SEQ ID NO: 43667 - DNA, 22 bp, Artificial Sequence
  Synthetic
aagacctgcuctagcccauact

SEQ ID NO: 43668 - DNA, 22 bp, Artificial Sequence
  Synthetic
cgcggtcugctatacgatguac

SEQ ID NO: 43669 - DNA, 24 bp, Artificial Sequence
  Synthetic
guagaagaggacgacauggacaaa

SEQ ID NO: 43670 - DNA, 22 bp, Artificial Sequence
  Synthetic
gttggccccaugtttctcaaug

SEQ ID NO: 43671 - DNA, 25 bp, Artificial Sequence
  Synthetic
gttaattggtttugtgcctgcctua

SEQ ID NO: 43672 - DNA, 20 bp, Artificial Sequence
  Synthetic
cgaacugccttgccaucgaa

SEQ ID NO: 43673 - DNA, 27 bp, Artificial Sequence
  Synthetic
caatcttacacgugtgtgggttttuaa

SEQ ID NO: 43674 - DNA, 23 bp, Artificial Sequence
  Synthetic
gatgtucgcacagttatccuggt

SEQ ID NO: 43675 - DNA, 24 bp, Artificial Sequence
  Synthetic
ctaagctgccagcutctgttttuc

SEQ ID NO: 43676 - DNA, 28 bp, Artificial Sequence
  Synthetic
gtggcttattugtgaaaagtcaaauggt

SEQ ID NO: 43677 - DNA, 26 bp, Artificial Sequence
  Synthetic
ccctaaactugaactccatttcucct

SEQ ID NO: 43678 - DNA, 23 bp, Artificial Sequence
  Synthetic
acacacacacacgauagtggaug

SEQ ID NO: 43679 - DNA, 29 bp, Artificial Sequence
  Synthetic
ttgggtattaggaaaauaagtggtggtut

SEQ ID NO: 43680 - DNA, 26 bp, Artificial Sequence
  Synthetic
gaaccagguccagagaaauatcauaa

SEQ ID NO: 43681 - DNA, 21 bp, Artificial Sequence
  Synthetic
ggtggcaccugctatgaugag

SEQ ID NO: 43682 - DNA, 21 bp, Artificial Sequence
  Synthetic
ggaagggucccagagauagca

SEQ ID NO: 43683 - DNA, 25 bp, Artificial Sequence
  Synthetic
ccgattgtcucccctttgattcuag

SEQ ID NO: 43684 - DNA, 22 bp, Artificial Sequence
  Synthetic
attcccggaugagggagtctua

SEQ ID NO: 43685 - DNA, 27 bp, Artificial Sequence
  Synthetic
tgatctgaucccaagcctatcttcuag

SEQ ID NO: 43686 - DNA, 21 bp, Artificial Sequence
  Synthetic
cttggccauctgaggtttugc

SEQ ID NO: 43687 - DNA, 24 bp, Artificial Sequence
  Synthetic
tctctctccccutctcctcttcua

SEQ ID NO: 43688 - DNA, 21 bp, Artificial Sequence
  Synthetic
gcaagtcggcuacccaagtut

SEQ ID NO: 43689 - DNA, 24 bp, Artificial Sequence
  Synthetic
atttctcatgcucatccccatcuc

SEQ ID NO: 43690 - DNA, 22 bp, Artificial Sequence
  Synthetic
tcacacuggacaagcctaggua

SEQ ID NO: 43691 - DNA, 21 bp, Artificial Sequence
  Synthetic
gactgccaucctggttttugc

SEQ ID NO: 43692 - DNA, 21 bp, Artificial Sequence
  Synthetic
accctggguctcatcccuaag

SEQ ID NO: 43693 - DNA, 27 bp, Artificial Sequence
  Synthetic
tctcttaacgtucaaaaggctaaccug

SEQ ID NO: 43694 - DNA, 25 bp, Artificial Sequence
  Synthetic
gggtgauaaatggacacuaaaagca

SEQ ID NO: 43695 - DNA, 21 bp, Artificial Sequence
  Synthetic
agtatcagauccgcgugacct

SEQ ID NO: 43696 - DNA, 28 bp, Artificial Sequence
  Synthetic
aaatgctaagtacuaaggagacagaucc

SEQ ID NO: 43697 - DNA, 28 bp, Artificial Sequence
  Synthetic
gaccctgtttcugaattgctaaattgut

SEQ ID NO: 43698 - DNA, 23 bp, Artificial Sequence
  Synthetic
acugatactcctugaggcacact

SEQ ID NO: 43699 - DNA, 28 bp, Artificial Sequence
  Synthetic
tctatacucgaagaaaacagctttcucc

SEQ ID NO: 43700 - DNA, 18 bp, Artificial Sequence
  Synthetic
ctccuaccttggcucgca

SEQ ID NO: 43701 - DNA, 17 bp, Artificial Sequence
  Synthetic
gcuccaaucggcggagt

SEQ ID NO: 43702 - DNA, 22 bp, Artificial Sequence
  Synthetic
ggaaaggaggguggatccugat

SEQ ID NO: 43703 - DNA, 20 bp, Artificial Sequence
  Synthetic
ggcctuggctgctagtugag

SEQ ID NO: 43704 - DNA, 21 bp, Artificial Sequence
  Synthetic
ccugagaccagcgucaagaag

SEQ ID NO: 43705 - DNA, 22 bp, Artificial Sequence
  Synthetic
aatuaagcaggaccccuaggga

SEQ ID NO: 43706 - DNA, 22 bp, Artificial Sequence
  Synthetic
ggcatcagagcucaccttugaa

SEQ ID NO: 43707 - DNA, 19 bp, Artificial Sequence
  Synthetic
gccccaccucggatttcuc

SEQ ID NO: 43708 - DNA, 19 bp, Artificial Sequence
  Synthetic
cactgaccaugagggcugt

SEQ ID NO: 43709 - DNA, 23 bp, Artificial Sequence
  Synthetic
cggtgtacuctctgtccaugagt

SEQ ID NO: 43710 - DNA, 20 bp, Artificial Sequence
  Synthetic
ctgttcaagggugcggguat

SEQ ID NO: 43711 - DNA, 20 bp, Artificial Sequence
  Synthetic
ccactactucgggcacucac

SEQ ID NO: 43712 - DNA, 21 bp, Artificial Sequence
  Synthetic
ggacuaccatcugaccgaggt

SEQ ID NO: 43713 - DNA, 21 bp, Artificial Sequence
  Synthetic
ctggugacagcactgatcuca

SEQ ID NO: 43714 - DNA, 22 bp, Artificial Sequence
  Synthetic
gcaagacaagccuctgagtugg

SEQ ID NO: 43715 - DNA, 25 bp, Artificial Sequence
  Synthetic
gtctgtcttaucggagatttgguca

SEQ ID NO: 43716 - DNA, 22 bp, Artificial Sequence
  Synthetic
cctaccccuctgaaggtgacuc

SEQ ID NO: 43717 - DNA, 24 bp, Artificial Sequence
  Synthetic
ggcctcaaagguctcttcaucaaa

SEQ ID NO: 43718 - DNA, 19 bp, Artificial Sequence
  Synthetic
agguagagaggccagcuga

SEQ ID NO: 43719 - DNA, 19 bp, Artificial Sequence
  Synthetic
caccctgaauccagcggua

SEQ ID NO: 43720 - DNA, 22 bp, Artificial Sequence
  Synthetic
aaccgctucaagaagaucagca

SEQ ID NO: 43721 - DNA, 18 bp, Artificial Sequence
  Synthetic
gaagcggucactgcaugg

SEQ ID NO: 43722 - DNA, 22 bp, Artificial Sequence
  Synthetic
cttcctgaccccuctgtgatuc

SEQ ID NO: 43723 - DNA, 22 bp, Artificial Sequence
  Synthetic
agtcccaucagcatcctctuca

SEQ ID NO: 43724 - DNA, 24 bp, Artificial Sequence
  Synthetic
ctcatacacggucttatcgtccug

SEQ ID NO: 43725 - DNA, 23 bp, Artificial Sequence
  Synthetic
catcuggaagctctuccgaaact

SEQ ID NO: 43726 - DNA, 19 bp, Artificial Sequence
  Synthetic
cgtguccgagggcttctuc

SEQ ID NO: 43727 - DNA, 18 bp, Artificial Sequence
  Synthetic
cgcagccucgaagugact

SEQ ID NO: 43728 - DNA, 19 bp, Artificial Sequence
  Synthetic
gucctguacagcgagagca

SEQ ID NO: 43729 - DNA, 19 bp, Artificial Sequence
  Synthetic
cuacagcccggactgugac

SEQ ID NO: 43730 - DNA, 22 bp, Artificial Sequence
  Synthetic
gttcatcctucttgggctgugt

SEQ ID NO: 43731 - DNA, 23 bp, Artificial Sequence
  Synthetic
gaattcatcugcactgtgtuggg

SEQ ID NO: 43732 - DNA, 24 bp, Artificial Sequence
  Synthetic
caacttttugcaaagcagcauagc

SEQ ID NO: 43733 - DNA, 24 bp, Artificial Sequence
  Synthetic
gaaaacaagatugcggtcagcuaa

SEQ ID NO: 43734 - DNA, 22 bp, Artificial Sequence
  Synthetic
gagccauccatctuggagacag

SEQ ID NO: 43735 - DNA, 23 bp, Artificial Sequence
  Synthetic
guacggauggaaaaagagtcuca

SEQ ID NO: 43736 - DNA, 24 bp, Artificial Sequence
  Synthetic
ggaatggaaggauggaagaacuca

SEQ ID NO: 43737 - DNA, 22 bp, Artificial Sequence
  Synthetic
aagaacttcucgtctgcuagcg

SEQ ID NO: 43738 - DNA, 23 bp, Artificial Sequence
  Synthetic
cacaaatgugccaggaactucaa

SEQ ID NO: 43739 - DNA, 31 bp, Artificial Sequence; identical to SEQ ID NO: 31505
  Synthetic

SEQ ID NO: 43740 - DNA, 23 bp, Artificial Sequence
  Synthetic
gatgcttucggcttgactatugg

SEQ ID NO: 43741 - DNA, 22 bp, Artificial Sequence
  Synthetic
cttagaugccccagggaaagug

SEQ ID NO: 43742 - DNA, 24 bp, Artificial Sequence
  Synthetic
acttcctcuacatcgatgcttucg

SEQ ID NO: 43743 - DNA, 22 bp, Artificial Sequence
  Synthetic
agttcactaaugccgtgaugct

SEQ ID NO: 43744 - DNA, 20 bp, Artificial Sequence
  Synthetic
ggtgtgggugcgataaugca

SEQ ID NO: 43745 - DNA, 23 bp, Artificial Sequence
  Synthetic
gggugggaccaaactataatucc

SEQ ID NO: 43746 - DNA, 21 bp, Artificial Sequence
  Synthetic
agcccuacagaggtggtuaca

SEQ ID NO: 43747 - DNA, 20 bp, Artificial Sequence
  Synthetic
tgctctguctgtggtcaucg

SEQ ID NO: 43748 - DNA, 23 bp, Artificial Sequence
  Synthetic
cttcccctuccctttcttggaug

SEQ ID NO: 43749 - DNA, 22 bp, Artificial Sequence
  Synthetic
tgcctugaaacaagccaagcua

SEQ ID NO: 43750 - DNA, 20 bp, Artificial Sequence
  Synthetic
atgtucacctggaugcggat

SEQ ID NO: 43751 - DNA, 24 bp, Artificial Sequence
  Synthetic
ccccaggacauaagctattuagcc

SEQ ID NO: 43752 - DNA, 20 bp, Artificial Sequence
  Synthetic
gccattcuccctgugacagt

SEQ ID NO: 43753 - DNA, 21 bp, Artificial Sequence
  Synthetic
cgtctgugagaaatgctgugc

SEQ ID NO: 43754 - DNA, 18 bp, Artificial Sequence
  Synthetic
cgtacguccgggaagcuc

SEQ ID NO: 43755 - DNA, 20 bp, Artificial Sequence
  Synthetic
gcaaataacugcggctcucc

SEQ ID NO: 43756 - DNA, 19 bp, Artificial Sequence
  Synthetic
gggttuccgttgcagucct

SEQ ID NO: 43757 - DNA, 19 bp, Artificial Sequence
  Synthetic
cccgctccuagcaaaggug

SEQ ID NO: 43758 - DNA, 23 bp, Artificial Sequence
  Synthetic
agcactttcuccatgggaagtut

SEQ ID NO: 43759 - DNA, 29 bp, Artificial Sequence
  Synthetic
tcgccattatuacaagagttaagcatcut

SEQ ID NO: 43760 - DNA, 22 bp, Artificial Sequence
  Synthetic
tgggtattgtugggaggaggua

SEQ ID NO: 43761 - DNA, 24 bp, Artificial Sequence
  Synthetic
caagggaatguttattgggcgauc

SEQ ID NO: 43762 - DNA, 25 bp, Artificial Sequence
  Synthetic
cgttttcctaaccutgttcgccuat

SEQ ID NO: 43763 - DNA, 29 bp, Artificial Sequence
  Synthetic
gtacaggatgacauagtagaagttcucag

SEQ ID NO: 43764 - DNA, 22 bp, Artificial Sequence
  Synthetic
ccaatgaccccuaccaccagua

SEQ ID NO: 43765 - DNA, 23 bp, Artificial Sequence
  Synthetic
catctcttcaugtctggacguca

SEQ ID NO: 43766 - DNA, 29 bp, Artificial Sequence
  Synthetic
catttcaatcucagtgatttatgctugct

SEQ ID NO: 43767 - DNA, 28 bp, Artificial Sequence
  Synthetic
gtcacacacaaaugatgtttcaugagaa

SEQ ID NO: 43768 - DNA, 23 bp, Artificial Sequence
  Synthetic
ggatgtguccagtttuagccagt

SEQ ID NO: 43769 - DNA, 20 bp, Artificial Sequence
  Synthetic
agcacucgaacgacccatuc

SEQ ID NO: 43770 - DNA, 20 bp, Artificial Sequence
  Synthetic
ccaccctgcugaactgtcuc

SEQ ID NO: 43771 - DNA, 21 bp, Artificial Sequence
  Synthetic
acgtgtgggutttggccaaua

SEQ ID NO: 43772 - DNA, 17 bp, Artificial Sequence
  Synthetic
gcuacgccggcttcuga

SEQ ID NO: 43773 - DNA, 20 bp, Artificial Sequence
  Synthetic
gggactauccctggcucaca

SEQ ID NO: 43774 - DNA, 21 bp, Artificial Sequence
  Synthetic
cttctggagggugctgtucaa

SEQ ID NO: 43775 - DNA, 21 bp, Artificial Sequence
  Synthetic
cctcaaacaccacuccggtuc

SEQ ID NO: 43776 - DNA, 19 bp, Artificial Sequence
  Synthetic
cgtccccaaggcuttggua

SEQ ID NO: 43777 - DNA, 19 bp, Artificial Sequence
  Synthetic
aagacuggagacccuggct

SEQ ID NO: 43778 - DNA, 20 bp, Artificial Sequence
  Synthetic
ctgcctgcutctggcauaga

SEQ ID NO: 43779 - DNA, 17 bp, Artificial Sequence
  Synthetic
cccgccacagcgucuac

SEQ ID NO: 43780 - DNA, 18 bp, Artificial Sequence
  Synthetic
cattgcugacgccccuct

SEQ ID NO: 43781 - DNA, 20 bp, Artificial Sequence
  Synthetic
tccctgagugcccagguaaa

SEQ ID NO: 43782 - DNA, 17 bp, Artificial Sequence
  Synthetic
cctgccguggtgggtua

SEQ ID NO: 43783 - DNA, 23 bp, Artificial Sequence
  Synthetic
caggtaccacutcctccagaauc

SEQ ID NO: 43784 - DNA, 18 bp, Artificial Sequence
  Synthetic
cgcugaggucgggagaga

SEQ ID NO: 43785 - DNA, 21 bp, Artificial Sequence
  Synthetic
cctgaaatuctgcccugacca

SEQ ID NO: 43786 - DNA, 19 bp, Artificial Sequence
  Synthetic
tctgcaugggcgtctctug

SEQ ID NO: 43787 - DNA, 19 bp, Artificial Sequence
  Synthetic
gcttcccutcagggucagt

SEQ ID NO: 43788 - DNA, 18 bp, Artificial Sequence
  Synthetic
agggucccagcagucact

SEQ ID NO: 43789 - DNA, 19 bp, Artificial Sequence
  Synthetic
ccggcaggugcttguagac

SEQ ID NO: 43790 - DNA, 17 bp, Artificial Sequence
  Synthetic
cgcugttgccucccaca

SEQ ID NO: 43791 - DNA, 17 bp, Artificial Sequence
  Synthetic
ccgaccacgcucacuca

SEQ ID NO: 43792 - DNA, 22 bp, Artificial Sequence
  Synthetic
gttgggcugacctcttctctut

SEQ ID NO: 43793 - DNA, 21 bp, Artificial Sequence
  Synthetic
ctgagttuccacggcucaaga

SEQ ID NO: 43794 - DNA, 20 bp, Artificial Sequence
  Synthetic
gggacaugcagctctgauga

SEQ ID NO: 43795 - DNA, 25 bp, Artificial Sequence
  Synthetic
ggtttaattuccaggcacatgaugg

SEQ ID NO: 43796 - DNA, 21 bp, Artificial Sequence
  Synthetic
gtgcctguaatcccagcuaca

SEQ ID NO: 43797 - DNA, 22 bp, Artificial Sequence
  Synthetic
gtggtggcaauggttacaugag

SEQ ID NO: 43798 - DNA, 20 bp, Artificial Sequence
  Synthetic
cttggacccggacucgtuat

SEQ ID NO: 43799 - DNA, 19 bp, Artificial Sequence
  Synthetic
ggaaguccaggugcaccac

SEQ ID NO: 43800 - DNA, 27 bp, Artificial Sequence
  Synthetic
ggaaccacttcuaactgaaattggtut

SEQ ID NO: 43801 - DNA, 27 bp, Artificial Sequence
  Synthetic
gatctgatgagucagcaaagaagacut

SEQ ID NO: 43802 - DNA, 21 bp, Artificial Sequence
  Synthetic
gagcctuggcagaattucacg

SEQ ID NO: 43803 - DNA, 23 bp, Artificial Sequence
  Synthetic
tttacagaggucgcagagggaua

SEQ ID NO: 43804 - DNA, 20 bp, Artificial Sequence
  Synthetic
ggtgggacgutcactguagt

SEQ ID NO: 43805 - DNA, 20 bp, Artificial Sequence
  Synthetic
gctctgtcgcuctgcttcug

SEQ ID NO: 43806 - DNA, 18 bp, Artificial Sequence
  Synthetic
gtcccccaacucccctut

SEQ ID NO: 43807 - DNA, 18 bp, Artificial Sequence
  Synthetic
tcaugcgggaagcgaugg

SEQ ID NO: 43808 - DNA, 23 bp, Artificial Sequence
  Synthetic
tgtccttccccautggtttgtua

SEQ ID NO: 43809 - DNA, 24 bp, Artificial Sequence
  Synthetic
cagtttcaucgagttcuagcccaa

SEQ ID NO: 43810 - DNA, 22 bp, Artificial Sequence
  Synthetic
cacctcacutccacucacagag

SEQ ID NO: 43811 - DNA, 28 bp, Artificial Sequence
  Synthetic
ccaaatuaacgcucaggaaaaatacaut

SEQ ID NO: 43812 - DNA, 30 bp, Artificial Sequence; identical to SEQ ID NO: 31578
  Synthetic

SEQ ID NO: 43813 - DNA, 26 bp, Artificial Sequence
  Synthetic
agcccauaaaggaatguaaaccaaca

SEQ ID NO: 43814 - DNA, 23 bp, Artificial Sequence
  Synthetic
ggcgcttacaguagctgttctua

SEQ ID NO: 43815 - DNA, 23 bp, Artificial Sequence
  Synthetic
ccatctgcaguacacacatgucc

SEQ ID NO: 43816 - DNA, 26 bp, Artificial Sequence
  Synthetic
cagtaggcagugaagtaaatttgugg

SEQ ID NO: 43817 - DNA, 28 bp, Artificial Sequence
  Synthetic
acagtgacaucatcagtuaaaacaaggt

SEQ ID NO: 43818 - DNA, 22 bp, Artificial Sequence
  Synthetic
aacagcacaugatcccactuca

SEQ ID NO: 43819 - DNA, 20 bp, Artificial Sequence
  Synthetic
cgaatcgcugtggcctugat

SEQ ID NO: 43820 - DNA, 23 bp, Artificial Sequence
  Synthetic
ccctcttctgugaagctgacauc

SEQ ID NO: 43821 - DNA, 26 bp, Artificial Sequence
  Synthetic
aggaaagagaacaucaccaggacuaa

SEQ ID NO: 43822 - DNA, 22 bp, Artificial Sequence
  Synthetic
tgatgcatgauaccctctugcc

SEQ ID NO: 43823 - DNA, 28 bp, Artificial Sequence
  Synthetic
tccugatcagcaaaauacaagaaagaga

SEQ ID NO: 43824 - DNA, 21 bp, Artificial Sequence
  Synthetic
cuggtttagccucaagcccaa

SEQ ID NO: 43825 - DNA, 21 bp, Artificial Sequence
  Synthetic
cagggtgggugcctactttua

SEQ ID NO: 43826 - DNA, 23 bp, Artificial Sequence
  Synthetic
gtggccttcuttgaagagctcua

SEQ ID NO: 43827 - DNA, 26 bp, Artificial Sequence
  Synthetic
gagagaaatctcuacagggtcguagt

SEQ ID NO: 43828 - DNA, 21 bp, Artificial Sequence
  Synthetic
cttgagcagcugaagctgtut

SEQ ID NO: 43829 - DNA, 17 bp, Artificial Sequence
  Synthetic
ctcctcucgccctugcc

SEQ ID NO: 43830 - DNA, 20 bp, Artificial Sequence
  Synthetic
gccaaggauctgggaucagg

SEQ ID NO: 43831 - DNA, 21 bp, Artificial Sequence
  Synthetic
ccttgauggcgaactgaguga

SEQ ID NO: 43832 - DNA, 17 bp, Artificial Sequence
  Synthetic
gctgcccugctggcaua

SEQ ID NO: 43833 - DNA, 22 bp, Artificial Sequence
  Synthetic
cccagtgcuaactccagtctut

SEQ ID NO: 43834 - DNA, 17 bp, Artificial Sequence
  Synthetic
gccuccacggacaggut

SEQ ID NO: 43835 - DNA, 17 bp, Artificial Sequence
  Synthetic
cccutgatgcucccgca

SEQ ID NO: 43836 - DNA, 18 bp, Artificial Sequence
  Synthetic
caccccaaggugccacut

SEQ ID NO: 43837 - DNA, 21 bp, Artificial Sequence
  Synthetic
cuctctcuagggaaggccaca

SEQ ID NO: 43838 - DNA, 20 bp, Artificial Sequence
  Synthetic
ggtccaggutgggagtggua

SEQ ID NO: 43839 - DNA, 20 bp, Artificial Sequence
  Synthetic
cccuccctctctugggacag

SEQ ID NO: 43840 - DNA, 28 bp, Artificial Sequence
  Synthetic
aagaattgttgaguctgaggaatauggg

SEQ ID NO: 43841 - DNA, 27 bp, Artificial Sequence
  Synthetic
ctgaatactgagcautttctgaagcug

SEQ ID NO: 43842 - DNA, 21 bp, Artificial Sequence
  Synthetic
ccacccacutgagacacctuc

SEQ ID NO: 43843 - DNA, 23 bp, Artificial Sequence
  Synthetic
tgactgccaugtgtctttctguc

SEQ ID NO: 43844 - DNA, 20 bp, Artificial Sequence
  Synthetic
cttctggucacgcaugcaac

SEQ ID NO: 43845 - DNA, 28 bp, Artificial Sequence
  Synthetic
ccatacatagtuccttctgttctucaca

SEQ ID NO: 43846 - DNA, 25 bp, Artificial Sequence
  Synthetic
ttcccugcaagacaacacattauga

SEQ ID NO: 43847 - DNA, 21 bp, Artificial Sequence
  Synthetic
gctgttgtgcutgtccccuag

SEQ ID NO: 43848 - DNA, 25 bp, Artificial Sequence
  Synthetic
gtgagaaccugcatttcuaacagac

SEQ ID NO: 43849 - DNA, 24 bp, Artificial Sequence
  Synthetic
ttttgttgacagcguctcggauat

SEQ ID NO: 43850 - DNA, 17 bp, Artificial Sequence
  Synthetic
gcaccagucgggtcuca

SEQ ID NO: 43851 - DNA, 17 bp, Artificial Sequence
  Synthetic
ctgggccutcugcagct

SEQ ID NO: 43852 - DNA, 25 bp, Artificial Sequence
  Synthetic
aaattatcuacccagcactgcagut

SEQ ID NO: 43853 - DNA, 17 bp, Artificial Sequence
  Synthetic
gtccgcautgccauccg

SEQ ID NO: 43854 - DNA, 23 bp, Artificial Sequence
  Synthetic
cgagctgaagutggtttgggaua

SEQ ID NO: 43855 - DNA, 26 bp, Artificial Sequence
  Synthetic
atcaaagtgattucagggatccucac

SEQ ID NO: 43856 - DNA, 21 bp, Artificial Sequence
  Synthetic
acgctgguagagaggcctaut

SEQ ID NO: 43857 - DNA, 24 bp, Artificial Sequence
  Synthetic
ccatatcacaagccuctgggttuc

SEQ ID NO: 43858 - DNA, 24 bp, Artificial Sequence
  Synthetic
autcagctgagugggaaaaaggaa

SEQ ID NO: 43859 - DNA, 22 bp, Artificial Sequence
  Synthetic
gcctttgaccgugacttttcug

SEQ ID NO: 43860 - DNA, 27 bp, Artificial Sequence
  Synthetic
tgcaatgaatgucaatggttgaauagc

SEQ ID NO: 43861 - DNA, 21 bp, Artificial Sequence
  Synthetic
gaggccagggcucaactuaat

SEQ ID NO: 43862 - DNA, 25 bp, Artificial Sequence
  Synthetic
gcgggaaucaggagttguaaaacat

SEQ ID NO: 43863 - DNA, 28 bp, Artificial Sequence
  Synthetic
ctatctgcaccutttgtaaagtctguct

SEQ ID NO: 43864 - DNA, 22 bp, Artificial Sequence
  Synthetic
cctgaucccagcaaatcugagt

SEQ ID NO: 43865 - DNA, 31 bp, Artificial Sequence; identical to SEQ ID NO: 31631
  Synthetic

SEQ ID NO: 43866 - DNA, 22 bp, Artificial Sequence
  Synthetic
cgaaguttgacugccaaccact

SEQ ID NO: 43867 - DNA, 27 bp, Artificial Sequence
  Synthetic
gggtcaaaatttaugagtcctgagugt

SEQ ID NO: 43868 - DNA, 27 bp, Artificial Sequence
  Synthetic
ctgtttattgtggucttccaggattug

SEQ ID NO: 43869 - DNA, 27 bp, Artificial Sequence
  Synthetic
tttttgatgccaauaggaatcugcaag

SEQ ID NO: 43870 - DNA, 23 bp, Artificial Sequence
  Synthetic
ctcccctcttucctcactctcua

SEQ ID NO: 43871 - DNA, 24 bp, Artificial Sequence
  Synthetic
ccuaacccccaaagcaaaauaagg

SEQ ID NO: 43872 - DNA, 31 bp, Artificial Sequence; identical to SEQ ID NO: 31638
  Synthetic

SEQ ID NO: 43873 - DNA, 27 bp, Artificial Sequence
  Synthetic
tgtataacataacugtgtggtgggtut

SEQ ID NO: 43874 - DNA, 24 bp, Artificial Sequence
  Synthetic
actactcacguttccatgttgucc

SEQ ID NO: 43875 - DNA, 24 bp, Artificial Sequence
  Synthetic
cagaagacuggagtggtcatuagt

SEQ ID NO: 43876 - DNA, 21 bp, Artificial Sequence
  Synthetic
cagcaacuggcacaggagaua

SEQ ID NO: 43877 - DNA, 23 bp, Artificial Sequence
  Synthetic
ctagacuggatgagacuggaacc

SEQ ID NO: 43878 - DNA, 28 bp, Artificial Sequence
  Synthetic
acugaagagctaataugagaaaacgaag

SEQ ID NO: 43879 - DNA, 28 bp, Artificial Sequence
  Synthetic
gcatgautctatccaaatuccaagacag

SEQ ID NO: 43880 - DNA, 26 bp, Artificial Sequence
  Synthetic
aatctgctgucaaataagaacaguct

SEQ ID NO: 43881 - DNA, 29 bp, Artificial Sequence
  Synthetic
ggtcagtaattgutttctgctttgatuct

SEQ ID NO: 43882 - DNA, 23 bp, Artificial Sequence
  Synthetic
acgttgaccaaautgttgtgcuc

SEQ ID NO: 43883 - DNA, 28 bp, Artificial Sequence
  Synthetic
ggacacugaaaggaaggttttautctut

SEQ ID NO: 43884 - DNA, 26 bp, Artificial Sequence
  Synthetic
gtcacctgucatttaactuggaggaa

SEQ ID NO: 43885 - DNA, 30 bp, Artificial Sequence; identical to SEQ ID NO: 31651
  Synthetic

SEQ ID NO: 43886 - DNA, 22 bp, Artificial Sequence
  Synthetic
gccaggcuaatgtcgcatttua

SEQ ID NO: 43887 - DNA, 27 bp, Artificial Sequence
  Synthetic
gaatttgacctccutgcctttctttut

SEQ ID NO: 43888 - DNA, 27 bp, Artificial Sequence
  Synthetic
aaaggacaacaaugtttacaatgugct

SEQ ID NO: 43889 - DNA, 27 bp, Artificial Sequence
  Synthetic
ccaatttgcutttgactatugcacaca

SEQ ID NO: 43890 - DNA, 21 bp, Artificial Sequence
  Synthetic
cctcttgaagutcccggaguc

SEQ ID NO: 43891 - DNA, 28 bp, Artificial Sequence
  Synthetic
gcctaaaacctugtcatattgccaatut

SEQ ID NO: 43892 - DNA, 24 bp, Artificial Sequence
  Synthetic
ctatgtgcutaacatgugcaaggc

SEQ ID NO: 43893 - DNA, 22 bp, Artificial Sequence
  Synthetic
acatggtacgcugctgttctut

SEQ ID NO: 43894 - DNA, 29 bp, Artificial Sequence
  Synthetic
aggaccttgguaagagttatgauaagagg

SEQ ID NO: 43895 - DNA, 27 bp, Artificial Sequence
  Synthetic
tgtaagcaaagutggcatttuaaagca

SEQ ID NO: 43896 - DNA, 23 bp, Artificial Sequence
  Synthetic
ccttggagtcutctaggagccut

SEQ ID NO: 43897 - DNA, 25 bp, Artificial Sequence
  Synthetic
catctgaacauttggtccttugcag

SEQ ID NO: 43898 - DNA, 26 bp, Artificial Sequence
  Synthetic
ctccaagaggcautgatattctcugt

SEQ ID NO: 43899 - DNA, 29 bp, Artificial Sequence
  Synthetic
gctgtttacgaaguattttaagacacucc

SEQ ID NO: 43900 - DNA, 26 bp, Artificial Sequence
  Synthetic
tccagccattgugttgaatccttuaa

SEQ ID NO: 43901 - DNA, 28 bp, Artificial Sequence
  Synthetic
atgtgagataacguttggaagttacaut

SEQ ID NO: 43902 - DNA, 23 bp, Artificial Sequence
  Synthetic
taagaactggugggaaatgguct

SEQ ID NO: 43903 - DNA, 20 bp, Artificial Sequence
  Synthetic
gcagattucaaccgggctug

SEQ ID NO: 43904 - DNA, 23 bp, Artificial Sequence
  Synthetic
gccaaagagaaugggatccagua

SEQ ID NO: 43905 - DNA, 30 bp, Artificial Sequence; identical to SEQ ID NO: 31671
  Synthetic

SEQ ID NO: 43906 - DNA, 29 bp, Artificial Sequence
  Synthetic
ccaaatgagaaaautcagtgatatugcca

SEQ ID NO: 43907 - DNA, 28 bp, Artificial Sequence
  Synthetic
tgaagacctugaagagcagttaaaucat

SEQ ID NO: 43908 - DNA, 25 bp, Artificial Sequence
  Synthetic
gcaacattuaacacatgugacggaa

SEQ ID NO: 43909 - DNA, 24 bp, Artificial Sequence
  Synthetic
acgttgttgcauttgtctgttuca

SEQ ID NO: 43910 - DNA, 28 bp, Artificial Sequence
  Synthetic
ttttcttttagtugctgctctttuccag

SEQ ID NO: 43911 - DNA, 28 bp, Artificial Sequence
  Synthetic
gtgtcccagttugcattaacaaatagut

SEQ ID NO: 43912 - DNA, 21 bp, Artificial Sequence
  Synthetic
cgcagautcaggctucccaat

SEQ ID NO: 43913 - DNA, 30 bp, Artificial Sequence; identical to SEQ ID NO: 31679
  Synthetic

SEQ ID NO: 43914 - DNA, 29 bp, Artificial Sequence
  Synthetic
ccatggaggguactgaaataaattcuaca

SEQ ID NO: 43915 - DNA, 27 bp, Artificial Sequence
  Synthetic
aggtcggatugacattattcauagcaa

SEQ ID NO: 43916 - DNA, 27 bp, Artificial Sequence
  Synthetic
agtcaattgttcuggcactatgaauga

SEQ ID NO: 43917 - DNA, 26 bp, Artificial Sequence
  Synthetic
ctcacaagcccuattagaaguggaac

SEQ ID NO: 43918 - DNA, 23 bp, Artificial Sequence
  Synthetic
gttgcaaacacauacgtgggtut

SEQ ID NO: 43919 - DNA, 20 bp, Artificial Sequence
  Synthetic
gaatgcagugcguaggcaag

SEQ ID NO: 43920 - DNA, 21 bp, Artificial Sequence
  Synthetic
cctttcatcuctgggcucagg

SEQ ID NO: 43921 - DNA, 26 bp, Artificial Sequence
  Synthetic
gcagccagaagugcactatacataua

SEQ ID NO: 43922 - DNA, 23 bp, Artificial Sequence
  Synthetic
cctccagtggutcaagcaattut

SEQ ID NO: 43923 - DNA, 28 bp, Artificial Sequence
  Synthetic
gattagttuagcaauaggaggttgaaua

SEQ ID NO: 43924 - DNA, 28 bp, Artificial Sequence
  Synthetic
aggacaaagatgautgaagtaactggug

SEQ ID NO: 43925 - DNA, 28 bp, Artificial Sequence
  Synthetic
tgccatggtaugtctctgtacaatuaag

SEQ ID NO: 43926 - DNA, 27 bp, Artificial Sequence
  Synthetic
gaggtgacagcuatccagttactatuc

SEQ ID NO: 43927 - DNA, 24 bp, Artificial Sequence
  Synthetic
aaggtcaaugctctcctttucaca

SEQ ID NO: 43928 - DNA, 28 bp, Artificial Sequence
  Synthetic
aggcaactucagaatccaaattacuagg

SEQ ID NO: 43929 - DNA, 28 bp, Artificial Sequence
  Synthetic
cutttcagguaacagaaagaaagcaaca

SEQ ID NO: 43930 - DNA, 20 bp, Artificial Sequence
  Synthetic
ccugcgtattugccaccaga

SEQ ID NO: 43931 - DNA, 25 bp, Artificial Sequence
  Synthetic
agtgccttttuacactgtcctuaca

SEQ ID NO: 43932 - DNA, 29 bp, Artificial Sequence
  Synthetic
aagttagaaacacugcaacattttgtuga

SEQ ID NO: 43933 - DNA, 24 bp, Artificial Sequence
  Synthetic
acttaauccaggagtcccucacat

SEQ ID NO: 43934 - DNA, 28 bp, Artificial Sequence
  Synthetic
tgatagcttttcugtaatcctgcugaac

SEQ ID NO: 43935 - DNA, 29 bp, Artificial Sequence
  Synthetic
cgtgatattgugattgattttcaugcaga

SEQ ID NO: 43936 - DNA, 26 bp, Artificial Sequence
  Synthetic
gctcattttatcugagaggcctguat

SEQ ID NO: 43937 - DNA, 22 bp, Artificial Sequence
  Synthetic
gautcgcatatuggcacagacc

SEQ ID NO: 43938 - DNA, 29 bp, Artificial Sequence
  Synthetic
ggatttgtctuctatttggtactugacct

SEQ ID NO: 43939 - DNA, 26 bp, Artificial Sequence
  Synthetic
ttctttcttaggaaguttgggcaugt

SEQ ID NO: 43940 - DNA, 22 bp, Artificial Sequence
  Synthetic
gtggagcutgagctaugacact

SEQ ID NO: 43941 - DNA, 29 bp, Artificial Sequence
  Synthetic
aactgggatgtugtgagaaagaaattaua

SEQ ID NO: 43942 - DNA, 31 bp, Artificial Sequence; identical to SEQ ID NO: 31708
  Synthetic

SEQ ID NO: 43943 - DNA, 28 bp, Artificial Sequence
  Synthetic
tgtttgtttgtttugtggaaggtctaug

SEQ ID NO: 43944 - DNA, 29 bp, Artificial Sequence
  Synthetic
tgagtgttaagttcuttgagttctgtcuc

SEQ ID NO: 43945 - DNA, 27 bp, Artificial Sequence
  Synthetic
gccatcagucccaattttacatttuct

SEQ ID NO: 43946 - DNA, 25 bp, Artificial Sequence
  Synthetic
ctgaaggucaaatgcttatguacct

SEQ ID NO: 43947 - DNA, 22 bp, Artificial Sequence
  Synthetic
aaatugagggacgcuggaagaa

SEQ ID NO: 43948 - DNA, 24 bp, Artificial Sequence
  Synthetic
gtgaatgcttgauaagcgtgctut

SEQ ID NO: 43949 - DNA, 22 bp, Artificial Sequence
  Synthetic
cgctaucaggagaccatgagug

SEQ ID NO: 43950 - DNA, 23 bp, Artificial Sequence
  Synthetic
agtaccutctggattuccccaca

SEQ ID NO: 43951 - DNA, 26 bp, Artificial Sequence
  Synthetic
aattcaaagcauagcccugaaagaga

SEQ ID NO: 43952 - DNA, 28 bp, Artificial Sequence
  Synthetic
cctattgatuatgctccaaauggaagga

SEQ ID NO: 43953 - DNA, 30 bp, Artificial Sequence; identical to SEQ ID NO: 31719
  Synthetic

SEQ ID NO: 43954 - DNA, 28 bp, Artificial Sequence
  Synthetic
acaagtgctugtctgatataatucagct

SEQ ID NO: 43955 - DNA, 27 bp, Artificial Sequence
  Synthetic
tgaattactcauctttgctctcaugct

SEQ ID NO: 43956 - DNA, 22 bp, Artificial Sequence
  Synthetic
gcugaagugaaaacaccaccaa

SEQ ID NO: 43957 - DNA, 23 bp, Artificial Sequence
  Synthetic
aagggaacagaucctgguaaagc

SEQ ID NO: 43958 - DNA, 27 bp, Artificial Sequence
  Synthetic
aatctggttgctucttttgtagggtua

SEQ ID NO: 43959 - DNA, 25 bp, Artificial Sequence
  Synthetic
gaauaagtcagugacccagaagacg

SEQ ID NO: 43960 - DNA, 30 bp, Artificial Sequence; identical to SEQ ID NO: 31726
  Synthetic

SEQ ID NO: 43961 - DNA, 28 bp, Artificial Sequence
  Synthetic
aattctttaatgtcutgcagtgccttut

SEQ ID NO: 43962 - DNA, 26 bp, Artificial Sequence
  Synthetic
ctgacctuaagttgttctuccaaagc

SEQ ID NO: 43963 - DNA, 28 bp, Artificial Sequence
  Synthetic
gagagcaaatcauttcaacacacatgua

SEQ ID NO: 43964 - DNA, 27 bp, Artificial Sequence
  Synthetic
acaaactgagaaucgtaactuaaccat

SEQ ID NO: 43965 - DNA, 29 bp, Artificial Sequence
  Synthetic
tgaagtacaagagcagaugaatctccuaa

SEQ ID NO: 43966 - DNA, 25 bp, Artificial Sequence
  Synthetic
tgaggaaaaaggaugacttgccaut

SEQ ID NO: 43967 - DNA, 29 bp, Artificial Sequence
  Synthetic
cagctttagaagaaguattatcgtggcut

SEQ ID NO: 43968 - DNA, 25 bp, Artificial Sequence
  Synthetic
cttggaagcagutctctggtttgua

SEQ ID NO: 43969 - DNA, 24 bp, Artificial Sequence
  Synthetic
tggtttttcccccucctctctauc

SEQ ID NO: 43970 - DNA, 28 bp, Artificial Sequence
  Synthetic
ctgttgagaatagugcatttgatgaugt

SEQ ID NO: 43971 - DNA, 30 bp, Artificial Sequence; identical to SEQ ID NO: 31737
  Synthetic

SEQ ID NO: 43972 - DNA, 24 bp, Artificial Sequence
  Synthetic
aaagtaggacaugatcuggaacca

SEQ ID NO: 43973 - DNA, 30 bp, Artificial Sequence; identical to SEQ ID NO: 31739
  Synthetic

SEQ ID NO: 43974 - DNA, 24 bp, Artificial Sequence
  Synthetic
ccucacaacaaaagucccaattua

SEQ ID NO: 43975 - DNA, 23 bp, Artificial Sequence
  Synthetic
cagccuccgcagaatttgaaaug

SEQ ID NO: 43976 - DNA, 29 bp, Artificial Sequence
  Synthetic
caatctacctaautagtgagcttgucaca

SEQ ID NO: 43977 - DNA, 28 bp, Artificial Sequence
  Synthetic
cctacuggagcaataaagttugaagaac

SEQ ID NO: 43978 - DNA, 27 bp, Artificial Sequence
  Synthetic
tcatggccagcutctaattgtattugt

SEQ ID NO: 43979 - DNA, 24 bp, Artificial Sequence
  Synthetic
gggagctgutggaattcaaauaga

SEQ ID NO: 43980 - DNA, 31 bp, Artificial Sequence; identical to SEQ ID NO: 31746
  Synthetic

SEQ ID NO: 43981 - DNA, 28 bp, Artificial Sequence
  Synthetic
gaaagaggcctuactgcagaatatagut

SEQ ID NO: 43982 - DNA, 21 bp, Artificial Sequence
  Synthetic
ggccgtgaccutctcactcua

SEQ ID NO: 43983 - DNA, 23 bp, Artificial Sequence
  Synthetic
ttctttgggaaggcugccttuaa

SEQ ID NO: 43984 - DNA, 28 bp, Artificial Sequence
  Synthetic
attttgactttucagttgagatgaugcc

SEQ ID NO: 43985 - DNA, 28 bp, Artificial Sequence
  Synthetic
ttcugaaatcagcttuggagagaagaaa

SEQ ID NO: 43986 - DNA, 24 bp, Artificial Sequence
  Synthetic
gatttggacacccuggcuaaagaa

SEQ ID NO: 43987 - DNA, 26 bp, Artificial Sequence
  Synthetic
actgtttcacutaaagcaagucagga

SEQ ID NO: 43988 - DNA, 25 bp, Artificial Sequence
  Synthetic
ggaaggagacgcgauatugaaaaga

SEQ ID NO: 43989 - DNA, 28 bp, Artificial Sequence
  Synthetic
tgggacaguaaaaggcaataatagctut

SEQ ID NO: 43990 - DNA, 27 bp, Artificial Sequence
  Synthetic
ctgaagaaaacaaauatgacugccaca

SEQ ID NO: 43991 - DNA, 26 bp, Artificial Sequence
  Synthetic
tcctccattccutgtttcttgctuac

SEQ ID NO: 43992 - DNA, 22 bp, Artificial Sequence
  Synthetic
cctcagcuccagaagccuaaat

SEQ ID NO: 43993 - DNA, 26 bp, Artificial Sequence
  Synthetic
caaagttaagcacguattacagugca

SEQ ID NO: 43994 - DNA, 22 bp, Artificial Sequence
  Synthetic
tctaggaagugcctgagcuagt

SEQ ID NO: 43995 - DNA, 21 bp, Artificial Sequence
  Synthetic
ggcggcuacacgactttcaut

SEQ ID NO: 43996 - DNA, 22 bp, Artificial Sequence
  Synthetic
cgguagcaggacaacagttuct

SEQ ID NO: 43997 - DNA, 24 bp, Artificial Sequence
  Synthetic
gctaatgtgcacutgcaatctcug

SEQ ID NO: 43998 - DNA, 30 bp, Artificial Sequence; identical to SEQ ID NO: 31764
  Synthetic

SEQ ID NO: 43999 - DNA, 26 bp, Artificial Sequence
  Synthetic
ttgagctctucggtagtaggtauagg

SEQ ID NO: 44000 - DNA, 28 bp, Artificial Sequence
  Synthetic
gctgttgutgcattttauacagagaaat

SEQ ID NO: 44001 - DNA, 24 bp, Artificial Sequence
  Synthetic
gaaaaaccctutgagcatccucag

SEQ ID NO: 44002 - DNA, 25 bp, Artificial Sequence
  Synthetic
caaagaagatgcuggagattctuca

SEQ ID NO: 44003 - DNA, 28 bp, Artificial Sequence
  Synthetic
ttggtcccatugaatatctcgttuacaa

SEQ ID NO: 44004 - DNA, 26 bp, Artificial Sequence
  Synthetic
gctttggcattcugaagtacttggua

SEQ ID NO: 44005 - DNA, 30 bp, Artificial Sequence; identical to SEQ ID NO: 31771
  Synthetic

SEQ ID NO: 44006 - DNA, 23 bp, Artificial Sequence
  Synthetic
ggttcttcugtcagaggatuggg

SEQ ID NO: 44007 - DNA, 21 bp, Artificial Sequence
  Synthetic
cagccagacuacagugaacga

SEQ ID NO: 44008 - DNA, 22 bp, Artificial Sequence
  Synthetic
caggcagtuggcagttgauaga

SEQ ID NO: 44009 - DNA, 26 bp, Artificial Sequence
  Synthetic
gacaacugggagaagggtgauaaaaa

SEQ ID NO: 44010 - DNA, 20 bp, Artificial Sequence
  Synthetic
gtgttgggcucatggatugg

SEQ ID NO: 44011 - DNA, 24 bp, Artificial Sequence
  Synthetic
tttccctcaucctctttctccuca

SEQ ID NO: 44012 - DNA, 22 bp, Artificial Sequence
  Synthetic
tcttttctgcccaugtacccut

SEQ ID NO: 44013 - DNA, 26 bp, Artificial Sequence
  Synthetic
aaaaaggagauccacctcuaccaaac

SEQ ID NO: 44014 - DNA, 22 bp, Artificial Sequence
  Synthetic
gatccaacccaccucttctuca

SEQ ID NO: 44015 - DNA, 25 bp, Artificial Sequence
  Synthetic
tgccttcatttuctccccaatcuag

SEQ ID NO: 44016 - DNA, 17 bp, Artificial Sequence
  Synthetic
cgatggtucccggcgua

SEQ ID NO: 44017 - DNA, 21 bp, Artificial Sequence
  Synthetic
cguagctcaagaucccgaagg

SEQ ID NO: 44018 - DNA, 22 bp, Artificial Sequence
  Synthetic
aaacaacuaaacgccgcttucc

SEQ ID NO: 44019 - DNA, 22 bp, Artificial Sequence
  Synthetic
tcttccagccutttcctucagc

SEQ ID NO: 44020 - DNA, 23 bp, Artificial Sequence
  Synthetic
ggataacttcuggctggtgacug

SEQ ID NO: 44021 - DNA, 22 bp, Artificial Sequence
  Synthetic
gagctgacacccaugtagctua

SEQ ID NO: 44022 - DNA, 23 bp, Artificial Sequence
  Synthetic
gcacccagccaguagaaggauat

SEQ ID NO: 44023 - DNA, 23 bp, Artificial Sequence
  Synthetic
cggattgccaccuctacatcaug

SEQ ID NO: 44024 - DNA, 21 bp, Artificial Sequence
  Synthetic
gccccagtugtggttctctuc

SEQ ID NO: 44025 - DNA, 25 bp, Artificial Sequence
  Synthetic
ccagtaccaaaautccaagcctuac

SEQ ID NO: 44026 - DNA, 22 bp, Artificial Sequence
  Synthetic
gatggtgugagcagtcacucat

SEQ ID NO: 44027 - DNA, 24 bp, Artificial Sequence
  Synthetic
gctatctcucaatgcttcctuggg

SEQ ID NO: 44028 - DNA, 23 bp, Artificial Sequence
  Synthetic
ggctctggccutttatatgccut

SEQ ID NO: 44029 - DNA, 28 bp, Artificial Sequence
  Synthetic
ctatccccatccuttcctcaaacataut

SEQ ID NO: 44030 - DNA, 23 bp, Artificial Sequence
  Synthetic
ccctacctuactcctccttcuct

SEQ ID NO: 44031 - DNA, 27 bp, Artificial Sequence
  Synthetic
cttgttctcttauctctgccctcuaac

SEQ ID NO: 44032 - DNA, 29 bp, Artificial Sequence
  Synthetic
tgatcactcttatuattgccttaggtgug

SEQ ID NO: 44033 - DNA, 25 bp, Artificial Sequence
  Synthetic
tgtgggagaaaacaucatgucgaat

SEQ ID NO: 44034 - DNA, 23 bp, Artificial Sequence
  Synthetic
caatctggucttctctcuccact

SEQ ID NO: 44035 - DNA, 22 bp, Artificial Sequence
  Synthetic
gccacgcucaggattgaactua

SEQ ID NO: 44036 - DNA, 23 bp, Artificial Sequence
  Synthetic
cagatgucgagaaggaggugaag

SEQ ID NO: 44037 - DNA, 22 bp, Artificial Sequence
  Synthetic
cacatccucagaacagcuccaa

SEQ ID NO: 44038 - DNA, 22 bp, Artificial Sequence
  Synthetic
agtcatgucccaatgtcctguc

SEQ ID NO: 44039 - DNA, 24 bp, Artificial Sequence
  Synthetic
aatatguacagggaggtgcuaggt

SEQ ID NO: 44040 - DNA, 21 bp, Artificial Sequence
  Synthetic
tctcacucccactgccctuat

SEQ ID NO: 44041 - DNA, 23 bp, Artificial Sequence
  Synthetic
ctatatggcaugaactccugcct

SEQ ID NO: 44042 - DNA, 23 bp, Artificial Sequence
  Synthetic
ccagaggcutgaatctgttugga

SEQ ID NO: 44043 - DNA, 24 bp, Artificial Sequence
  Synthetic
ccccttacctuccacctctctuac

SEQ ID NO: 44044 - DNA, 25 bp, Artificial Sequence
  Synthetic
ctaggcaagagucttagugagaacc

SEQ ID NO: 44045 - DNA, 21 bp, Artificial Sequence
  Synthetic
ggttgtaguacctcccgggua

SEQ ID NO: 44046 - DNA, 22 bp, Artificial Sequence
  Synthetic
ctccacacugagtcatggtguc

SEQ ID NO: 44047 - DNA, 27 bp, Artificial Sequence
  Synthetic
tccagtgtgtautgaaatttgagguct

SEQ ID NO: 44048 - DNA, 22 bp, Artificial Sequence
  Synthetic
ctgcctccguggattctactut

SEQ ID NO: 44049 - DNA, 23 bp, Artificial Sequence
  Synthetic
cuatacacacttcuggcaccact

SEQ ID NO: 44050 - DNA, 30 bp, Artificial Sequence; identical to SEQ ID NO: 31816
  Synthetic

SEQ ID NO: 44051 - DNA, 22 bp, Artificial Sequence
  Synthetic
tcattguccagcagtcgatgug

SEQ ID NO: 44052 - DNA, 24 bp, Artificial Sequence
  Synthetic
gtgattcaatgutgcaggagauca

SEQ ID NO: 44053 - DNA, 21 bp, Artificial Sequence
  Synthetic
acacatggagcugaacgugag

SEQ ID NO: 44054 - DNA, 22 bp, Artificial Sequence
  Synthetic
ccctgtgucctctgtctgtuct

SEQ ID NO: 44055 - DNA, 23 bp, Artificial Sequence
  Synthetic
caatcttgguccactcccuaagc

SEQ ID NO: 44056 - DNA, 25 bp, Artificial Sequence
  Synthetic
ctgataaacatautggctgctgugg

SEQ ID NO: 44057 - DNA, 21 bp, Artificial Sequence
  Synthetic
ttttgcacuccgcattuccag

SEQ ID NO: 44058 - DNA, 29 bp, Artificial Sequence
  Synthetic
atcttcacctctutcttctttggtttuct

SEQ ID NO: 44059 - DNA, 23 bp, Artificial Sequence
  Synthetic
gattccaguaaccgcaaacctug

SEQ ID NO: 44060 - DNA, 25 bp, Artificial Sequence
  Synthetic
ctacaaatgctugcagtcttctgut

SEQ ID NO: 44061 - DNA, 20 bp, Artificial Sequence
  Synthetic
tgugtgguagagcagcaacc

SEQ ID NO: 44062 - DNA, 21 bp, Artificial Sequence
  Synthetic
cctgctccuaccctgcuagag

SEQ ID NO: 44063 - DNA, 22 bp, Artificial Sequence
  Synthetic
cgtcatgaagugagaggctgug

SEQ ID NO: 44064 - DNA, 23 bp, Artificial Sequence
  Synthetic
tgaggagcuatggatgucaagga

SEQ ID NO: 44065 - DNA, 22 bp, Artificial Sequence
  Synthetic
tgccgguacacagaggtctuat

SEQ ID NO: 44066 - DNA, 22 bp, Artificial Sequence
  Synthetic
cacutgggatctucacaaggac

SEQ ID NO: 44067 - DNA, 23 bp, Artificial Sequence
  Synthetic
agtctcacaaucccaggctctua

SEQ ID NO: 44068 - DNA, 25 bp, Artificial Sequence
  Synthetic
cacccttcuaccaatcctactctug

SEQ ID NO: 44069 - DNA, 25 bp, Artificial Sequence
  Synthetic
caaatgctcccutatacctcugcat

SEQ ID NO: 44070 - DNA, 29 bp, Artificial Sequence
  Synthetic
catgataagtaccaugactccaatgagug

SEQ ID NO: 44071 - DNA, 23 bp, Artificial Sequence
  Synthetic
ccagatgaaaucccagtgcctua

SEQ ID NO: 44072 - DNA, 23 bp, Artificial Sequence
  Synthetic
ggatugggaaaggaggtugaaga

SEQ ID NO: 44073 - DNA, 23 bp, Artificial Sequence
  Synthetic
ccgcccccuaaatttattccaug

SEQ ID NO: 44074 - DNA, 26 bp, Artificial Sequence
  Synthetic
agtaccaacatauttggacgctacug

SEQ ID NO: 44075 - DNA, 21 bp, Artificial Sequence
  Synthetic
caacagcucaatgccucacat

SEQ ID NO: 44076 - DNA, 22 bp, Artificial Sequence
  Synthetic
ccaucatgucagacacggacag

SEQ ID NO: 44077 - DNA, 21 bp, Artificial Sequence
  Synthetic
gcacctccutcctctgctuag

SEQ ID NO: 44078 - DNA, 24 bp, Artificial Sequence
  Synthetic
tgggaattauctgagggagugagg

SEQ ID NO: 44079 - DNA, 26 bp, Artificial Sequence
  Synthetic
gttcaagccaauacaccaaagaauca

SEQ ID NO: 44080 - DNA, 22 bp, Artificial Sequence
  Synthetic
tggcatugagccatgtgtauag

SEQ ID NO: 44081 - DNA, 24 bp, Artificial Sequence
  Synthetic
agtcagaggaacuactgaagucca

SEQ ID NO: 44082 - DNA, 23 bp, Artificial Sequence
  Synthetic
gctgctgtttucccatctgacut

SEQ ID NO: 44083 - DNA, 23 bp, Artificial Sequence
  Synthetic
gattctacugagcactccaccuc

SEQ ID NO: 44084 - DNA, 24 bp, Artificial Sequence
  Synthetic
tttctctaagutcccctccugact

SEQ ID NO: 44085 - DNA, 31 bp, Artificial Sequence; identical to SEQ ID NO: 31851
  Synthetic

SEQ ID NO: 44086 - DNA, 28 bp, Artificial Sequence
  Synthetic
ctttaatguggaatttggaguggaaacc

SEQ ID NO: 44087 - DNA, 23 bp, Artificial Sequence
  Synthetic
gatatcaucctcccaaugcagct

SEQ ID NO: 44088 - DNA, 30 bp, Artificial Sequence; identical to SEQ ID NO: 31854
  Synthetic

SEQ ID NO: 44089 - DNA, 28 bp, Artificial Sequence
  Synthetic
gtccatataccagaucctcattgucaat

SEQ ID NO: 44090 - DNA, 24 bp, Artificial Sequence
  Synthetic
aggaaaggugaatctucagggaga

SEQ ID NO: 44091 - DNA, 28 bp, Artificial Sequence
  Synthetic
cuttctttgttcttcuaaacaccaagcc

SEQ ID NO: 44092 - DNA, 21 bp, Artificial Sequence
  Synthetic
ggagaaccccauggctttgut

SEQ ID NO: 44093 - DNA, 21 bp, Artificial Sequence
  Synthetic
tggaacugccggagtttgaug

SEQ ID NO: 44094 - DNA, 27 bp, Artificial Sequence
  Synthetic
tgtttttggtgugtttgtctcagatug

SEQ ID NO: 44095 - DNA, 23 bp, Artificial Sequence
  Synthetic
agatcaccauctttgcctgugag

SEQ ID NO: 44096 - DNA, 27 bp, Artificial Sequence
  Synthetic
ctaaataactgggucttctgtgtucct

SEQ ID NO: 44097 - DNA, 31 bp, Artificial Sequence; identical to SEQ ID NO: 31863
  Synthetic

SEQ ID NO: 44098 - DNA, 31 bp, Artificial Sequence; identical to SEQ ID NO: 31864
  Synthetic

SEQ ID NO: 44099 - DNA, 21 bp, Artificial Sequence
  Synthetic
acaacccaaucccctcccuat

SEQ ID NO: 44100 - DNA, 26 bp, Artificial Sequence
  Synthetic
ttgctgtcaataaauatcagggccut

SEQ ID NO: 44101 - DNA, 24 bp, Artificial Sequence
  Synthetic
tggtgtcuaagaggaaggtgtuca

SEQ ID NO: 44102 - DNA, 23 bp, Artificial Sequence
  Synthetic
caagtgtctgcuagaggtgacug

SEQ ID NO: 44103 - DNA, 28 bp, Artificial Sequence
  Synthetic
gcatctaagtcautctgctacctuaact

SEQ ID NO: 44104 - DNA, 25 bp, Artificial Sequence
  Synthetic
tttgtgtgtggcuatttgtctcgua

SEQ ID NO: 44105 - DNA, 23 bp, Artificial Sequence
  Synthetic
cctctttguaacgctcttgaugc

SEQ ID NO: 44106 - DNA, 28 bp, Artificial Sequence
  Synthetic
gtatgcctttutaaggttgattucccaa

SEQ ID NO: 44107 - DNA, 28 bp, Artificial Sequence
  Synthetic
catgttctcaaugttctttcccattuct

SEQ ID NO: 44108 - DNA, 25 bp, Artificial Sequence
  Synthetic
gtggcatgtugaactttgatagcuc

SEQ ID NO: 44109 - DNA, 23 bp, Artificial Sequence
  Synthetic
cagtggcagaagagutaaggcua

SEQ ID NO: 44110 - DNA, 23 bp, Artificial Sequence
  Synthetic
tttttcttccuctgctgcucaca

SEQ ID NO: 44111 - DNA, 29 bp, Artificial Sequence
  Synthetic
cgttagctgtaaucacaccacattauact

SEQ ID NO: 44112 - DNA, 25 bp, Artificial Sequence
  Synthetic
gactaacaaattcugccccctcuat

SEQ ID NO: 44113 - DNA, 24 bp, Artificial Sequence
  Synthetic
cacttcctgccuggtatctctuac

SEQ ID NO: 44114 - DNA, 25 bp, Artificial Sequence
  Synthetic
tttttggtcugaggaagcattcuga

SEQ ID NO: 44115 - DNA, 29 bp, Artificial Sequence
  Synthetic
gccttgacauccctactatagatauccaa

SEQ ID NO: 44116 - DNA, 26 bp, Artificial Sequence
  Synthetic
cagtcaaugcaaaggttguaaaggac

SEQ ID NO: 44117 - DNA, 27 bp, Artificial Sequence
  Synthetic
tgcaatcacggaacauttgattctuac

SEQ ID NO: 44118 - DNA, 24 bp, Artificial Sequence
  Synthetic
cccggcaaautgtccttaacttut

SEQ ID NO: 44119 - DNA, 25 bp, Artificial Sequence
  Synthetic
agtattuggcacagagacagctuac

SEQ ID NO: 44120 - DNA, 23 bp, Artificial Sequence
  Synthetic
gaccatacguaaggtgagugagt

SEQ ID NO: 44121 - DNA, 31 bp, Artificial Sequence; identical to SEQ ID NO: 31887
  Synthetic

SEQ ID NO: 44122 - DNA, 32 bp, Artificial Sequence; identical to SEQ ID NO: 31888
  Synthetic

SEQ ID NO: 44123 - DNA, 24 bp, Artificial Sequence
  Synthetic
ccaggcttuctaattctgctucct

SEQ ID NO: 44124 - DNA, 28 bp, Artificial Sequence
  Synthetic
tccctttcctagauagaagctaagtugt

SEQ ID NO: 44125 - DNA, 31 bp, Artificial Sequence; identical to SEQ ID NO: 31891
  Synthetic

SEQ ID NO: 44126 - DNA, 26 bp, Artificial Sequence
  Synthetic
agatgtgugagagttactagttuggg

SEQ ID NO: 44127 - DNA, 28 bp, Artificial Sequence
  Synthetic
gacatcatgctutcttcattttccaugt

SEQ ID NO: 44128 - DNA, 23 bp, Artificial Sequence
  Synthetic
gatccttuggtggcacugagaat

SEQ ID NO: 44129 - DNA, 20 bp, Artificial Sequence
  Synthetic
tggaccuggcttaguacgct

SEQ ID NO: 44130 - DNA, 26 bp, Artificial Sequence
  Synthetic
caataatttctuggcctttgcucaga

SEQ ID NO: 44131 - DNA, 28 bp, Artificial Sequence
  Synthetic
tctagatgtcauggatgaagaatccuga

SEQ ID NO: 44132 - DNA, 22 bp, Artificial Sequence
  Synthetic
tgtgcagcuatcagtcttuggt

SEQ ID NO: 44133 - DNA, 22 bp, Artificial Sequence
  Synthetic
gtgagacugctgaacacatugc

SEQ ID NO: 44134 - DNA, 22 bp, Artificial Sequence
  Synthetic
tctctgtggaggutgcaaagug

SEQ ID NO: 44135 - DNA, 22 bp, Artificial Sequence
  Synthetic
gcaacaagucctgaatccctug

SEQ ID NO: 44136 - DNA, 30 bp, Artificial Sequence; identical to SEQ ID NO: 31902
  Synthetic

SEQ ID NO: 44137 - DNA, 24 bp, Artificial Sequence
  Synthetic
tcatcactgaguacatggccaaug

SEQ ID NO: 44138 - DNA, 28 bp, Artificial Sequence
  Synthetic
cctctcttacugtaagtcatcttuaagc

SEQ ID NO: 44139 - DNA, 23 bp, Artificial Sequence
  Synthetic
acgtggccaucaagatgaucaaa

SEQ ID NO: 44140 - DNA, 22 bp, Artificial Sequence
  Synthetic
gcagaacagugtaccucaagga

SEQ ID NO: 44141 - DNA, 24 bp, Artificial Sequence
  Synthetic
gcatgaccuctctctctgttucag

SEQ ID NO: 44142 - DNA, 21 bp, Artificial Sequence
  Synthetic
ggcacagcaucaaggagcuat

SEQ ID NO: 44143 - DNA, 26 bp, Artificial Sequence
  Synthetic
agacagcttcuttttcgttgttucag

SEQ ID NO: 44144 - DNA, 23 bp, Artificial Sequence
  Synthetic
gagagagagagutcctccuggaa

SEQ ID NO: 44145 - DNA, 24 bp, Artificial Sequence
  Synthetic
gtgggcataugaatctgtctccug

SEQ ID NO: 44146 - DNA, 30 bp, Artificial Sequence; identical to SEQ ID NO: 31912
  Synthetic

SEQ ID NO: 44147 - DNA, 27 bp, Artificial Sequence
  Synthetic
aaaccctcctaccutttctcctaacua

SEQ ID NO: 44148 - DNA, 21 bp, Artificial Sequence
  Synthetic
acagacccutgggagagugat

SEQ ID NO: 44149 - DNA, 26 bp, Artificial Sequence
  Synthetic
tgatctctctcutctttcctgcuaca

SEQ ID NO: 44150 - DNA, 21 bp, Artificial Sequence
  Synthetic
cccaccaccccutctaatugt

SEQ ID NO: 44151 - DNA, 28 bp, Artificial Sequence
  Synthetic
agcaatgcaucaaccaataaccatttut

SEQ ID NO: 44152 - DNA, 22 bp, Artificial Sequence
  Synthetic
ccccucctccuaccaacgaaaa

SEQ ID NO: 44153 - DNA, 25 bp, Artificial Sequence
  Synthetic
ctaaactucaagaagcgcctgttuc

SEQ ID NO: 44154 - DNA, 27 bp, Artificial Sequence
  Synthetic
gccttgagcutttaaagtgaauggaga

SEQ ID NO: 44155 - DNA, 23 bp, Artificial Sequence
  Synthetic
tgtaatccugcctgcttcaucac

SEQ ID NO: 44156 - DNA, 26 bp, Artificial Sequence
  Synthetic
gauagtaacaucaagagcaagggaaa

SEQ ID NO: 44157 - DNA, 25 bp, Artificial Sequence
  Synthetic
caaagctcuccttcaggauaaggac

SEQ ID NO: 44158 - DNA, 23 bp, Artificial Sequence
  Synthetic
tcctcccaggaacuttacctgua

SEQ ID NO: 44159 - DNA, 26 bp, Artificial Sequence
  Synthetic
tcttggacuggacatctttuaaccag

SEQ ID NO: 44160 - DNA, 25 bp, Artificial Sequence
  Synthetic
tttgaaggagaccutggtttcctut

SEQ ID NO: 44161 - DNA, 23 bp, Artificial Sequence
  Synthetic
ccccagcuggaaattcatttcut

SEQ ID NO: 44162 - DNA, 22 bp, Artificial Sequence
  Synthetic
agcagatcuactccccagucag

SEQ ID NO: 44163 - DNA, 26 bp, Artificial Sequence
  Synthetic
tgtgcttctacaauggtgactcttut

SEQ ID NO: 44164 - DNA, 21 bp, Artificial Sequence
  Synthetic
gggagccauccaacagtcauc

SEQ ID NO: 44165 - DNA, 28 bp, Artificial Sequence
  Synthetic
gcctaataaaugggaggtacctaagugt

SEQ ID NO: 44166 - DNA, 20 bp, Artificial Sequence
  Synthetic
cgcagcccagaugtagtuct

SEQ ID NO: 44167 - DNA, 21 bp, Artificial Sequence
  Synthetic
gagggugattggtuagcggaa

SEQ ID NO: 44168 - DNA, 25 bp, Artificial Sequence
  Synthetic
cttggatttguactctggactcuga

SEQ ID NO: 44169 - DNA, 25 bp, Artificial Sequence
  Synthetic
aaacuaaagcagacatuccagagct

SEQ ID NO: 44170 - DNA, 24 bp, Artificial Sequence
  Synthetic
gtcctccauaaatgaagucagcgt

SEQ ID NO: 44171 - DNA, 26 bp, Artificial Sequence
  Synthetic
tctactaagctguctgtgtcctttug

SEQ ID NO: 44172 - DNA, 21 bp, Artificial Sequence
  Synthetic
tggaggaagaguccgucaaca

SEQ ID NO: 44173 - DNA, 22 bp, Artificial Sequence
  Synthetic
cccactctuttgagcaagucct

SEQ ID NO: 44174 - DNA, 22 bp, Artificial Sequence
  Synthetic
gggctttcauattggcagaugt

SEQ ID NO: 44175 - DNA, 31 bp, Artificial Sequence; identical to SEQ ID NO: 31941
  Synthetic

SEQ ID NO: 44176 - DNA, 24 bp, Artificial Sequence
  Synthetic
gtgtaaatguaacgcactcccuga

SEQ ID NO: 44177 - DNA, 23 bp, Artificial Sequence
  Synthetic
acugtagcttcuaccgaaccaga

SEQ ID NO: 44178 - DNA, 24 bp, Artificial Sequence
  Synthetic
gggttgggaguaagagauagagag

SEQ ID NO: 44179 - DNA, 23 bp, Artificial Sequence
  Synthetic
actgttagtcaugtgggcatgug

SEQ ID NO: 44180 - DNA, 25 bp, Artificial Sequence
  Synthetic
gaagcagtcuttgcatttcaguaca

SEQ ID NO: 44181 - DNA, 26 bp, Artificial Sequence
  Synthetic
ccccagcttauttcttatgaatgucg

SEQ ID NO: 44182 - DNA, 20 bp, Artificial Sequence
  Synthetic
gcugttccucaaacgacacg

SEQ ID NO: 44183 - DNA, 19 bp, Artificial Sequence
  Synthetic
cccttctcuccggcggaua

SEQ ID NO: 44184 - DNA, 30 bp, Artificial Sequence; identical to SEQ ID NO: 31950
  Synthetic

SEQ ID NO: 44185 - DNA, 28 bp, Artificial Sequence
  Synthetic
aaagctagtaccutgaacacatcugaag

SEQ ID NO: 44186 - DNA, 24 bp, Artificial Sequence
  Synthetic
gatctggaccutcttctgtuaacc

SEQ ID NO: 44187 - DNA, 26 bp, Artificial Sequence
  Synthetic
ggaacttcaaacagugttcctcauca

SEQ ID NO: 44188 - DNA, 26 bp, Artificial Sequence
  Synthetic
ccctgcauataaggaatgtugaaaga

SEQ ID NO: 44189 - DNA, 28 bp, Artificial Sequence
  Synthetic
caacaaggaaaucaggaacuttttagua

SEQ ID NO: 44190 - DNA, 29 bp, Artificial Sequence
  Synthetic
tcagtgaataaaaugtaagtcccatguga

SEQ ID NO: 44191 - DNA, 24 bp, Artificial Sequence
  Synthetic
tgccaggauatgtttgaugagacc

SEQ ID NO: 44192 - DNA, 25 bp, Artificial Sequence
  Synthetic
tgaacauacctttgtauggaagcga

SEQ ID NO: 44193 - DNA, 26 bp, Artificial Sequence
  Synthetic
ccaaaaggaaautccagaagtgtuct

SEQ ID NO: 44194 - DNA, 25 bp, Artificial Sequence
  Synthetic
attaaccutttgtaacuccccggaa

SEQ ID NO: 44195 - DNA, 29 bp, Artificial Sequence
  Synthetic
caagcaactgaacuttacatgaacaugaa

SEQ ID NO: 44196 - DNA, 27 bp, Artificial Sequence
  Synthetic
ctgugagatttgtattucacaacacca

SEQ ID NO: 44197 - DNA, 25 bp, Artificial Sequence
  Synthetic
ggctacaggugagttaaccactuac

SEQ ID NO: 44198 - DNA, 31 bp, Artificial Sequence; identical to SEQ ID NO: 31964
  Synthetic

SEQ ID NO: 44199 - DNA, 25 bp, Artificial Sequence
  Synthetic
gatcaagcctuaaccttctctguga

SEQ ID NO: 44200 - DNA, 26 bp, Artificial Sequence
  Synthetic
accgaautcttuggagaggaacaaat

SEQ ID NO: 44201 - DNA, 29 bp, Artificial Sequence
  Synthetic
gctgaattactgauctgttctgagtcuaa

SEQ ID NO: 44202 - DNA, 24 bp, Artificial Sequence
  Synthetic
gatgcatgttugtgtctgtctgut

SEQ ID NO: 44203 - DNA, 27 bp, Artificial Sequence
  Synthetic
cagagacaatgguaaagggaaaacuca

SEQ ID NO: 44204 - DNA, 24 bp, Artificial Sequence
  Synthetic
tcagcaaagacuctgtaaccaucc

SEQ ID NO: 44205 - DNA, 27 bp, Artificial Sequence
  Synthetic
aggtttatgtctugggacagttctuac

SEQ ID NO: 44206 - DNA, 22 bp, Artificial Sequence
  Synthetic
gcttcctgcugctcttctgauc

SEQ ID NO: 44207 - DNA, 23 bp, Artificial Sequence
  Synthetic
gcttctuaagctttggucgcaaa

SEQ ID NO: 44208 - DNA, 26 bp, Artificial Sequence
  Synthetic
cagcagctguaagttcctcttactut

SEQ ID NO: 44209 - DNA, 22 bp, Artificial Sequence
  Synthetic
cgtgttgcaugaagcactctua

SEQ ID NO: 44210 - DNA, 21 bp, Artificial Sequence
  Synthetic
gctugggagcgaagaagacua

SEQ ID NO: 44211 - DNA, 29 bp, Artificial Sequence
  Synthetic
ctttggctuggcaatataagtcuaaaagt

SEQ ID NO: 44212 - DNA, 24 bp, Artificial Sequence
  Synthetic
gutccctttaucgaggaagaccac

SEQ ID NO: 44213 - DNA, 24 bp, Artificial Sequence
  Synthetic
aggacaacgagauaagcaccttuc

SEQ ID NO: 44214 - DNA, 23 bp, Artificial Sequence
  Synthetic
cctcctcctcuctctcggttaut

SEQ ID NO: 44215 - DNA, 28 bp, Artificial Sequence
  Synthetic
tgacaaacctttuctttaccttcaccut

SEQ ID NO: 44216 - DNA, 21 bp, Artificial Sequence
  Synthetic
ccagcaaagggugtcgtttuc

SEQ ID NO: 44217 - DNA, 27 bp, Artificial Sequence
  Synthetic
gcctttctgucatgctgauaaggaaat

SEQ ID NO: 44218 - DNA, 28 bp, Artificial Sequence
  Synthetic
gctggataagguttcttcatgttcuaca

SEQ ID NO: 44219 - DNA, 25 bp, Artificial Sequence
  Synthetic
gggaagaaatugaagtgccttucag

SEQ ID NO: 44220 - DNA, 25 bp, Artificial Sequence
  Synthetic
acaagttctucaagggacagaaugt

SEQ ID NO: 44221 - DNA, 26 bp, Artificial Sequence
  Synthetic
aggctctgaaucttggaattgaagug

SEQ ID NO: 44222 - DNA, 22 bp, Artificial Sequence
  Synthetic
cctgggttcautagctggguat

SEQ ID NO: 44223 - DNA, 23 bp, Artificial Sequence
  Synthetic
gutcaagaacaacuacccaagcc

SEQ ID NO: 44224 - DNA, 26 bp, Artificial Sequence
  Synthetic
gcagcacauctaaaataauccccaga

SEQ ID NO: 44225 - DNA, 28 bp, Artificial Sequence
  Synthetic
ctgcttactgaaacaugaaaaccttgut

SEQ ID NO: 44226 - DNA, 19 bp, Artificial Sequence
  Synthetic
ctgucccgggaaguccaag

SEQ ID NO: 44227 - DNA, 22 bp, Artificial Sequence
  Synthetic
ggtagcugcgaggaaactttug

SEQ ID NO: 44228 - DNA, 25 bp, Artificial Sequence
  Synthetic
ctagtggctugtattcctagtugct

SEQ ID NO: 44229 - DNA, 26 bp, Artificial Sequence
  Synthetic
caaatcttatgucagcaggtcctuac

SEQ ID NO: 44230 - DNA, 27 bp, Artificial Sequence
  Synthetic
ggtaaaatcacuctgaaagcatauggt

SEQ ID NO: 44231 - DNA, 28 bp, Artificial Sequence
  Synthetic
ccataggaatttuctcctctacttgucg

SEQ ID NO: 44232 - DNA, 28 bp, Artificial Sequence
  Synthetic
aggtaagtgaaucttctcccttaatuga

SEQ ID NO: 44233 - DNA, 24 bp, Artificial Sequence
  Synthetic
gctgaggagagcacuggaattuac

SEQ ID NO: 44234 - DNA, 25 bp, Artificial Sequence
  Synthetic
tccagagaugaggtcaagcaauact

SEQ ID NO: 44235 - DNA, 28 bp, Artificial Sequence
  Synthetic
caagagaaacgutaattgcagtacucac

SEQ ID NO: 44236 - DNA, 26 bp, Artificial Sequence
  Synthetic
gtcggtatgagugggaaacgaaauaa

SEQ ID NO: 44237 - DNA, 27 bp, Artificial Sequence
  Synthetic
catatguaagctaagtguccagcacat

SEQ ID NO: 44238 - DNA, 27 bp, Artificial Sequence
  Synthetic
gccgaactttucttcttagacatucat

SEQ ID NO: 44239 - DNA, 33 bp, Artificial Sequence; identical to SEQ ID NO: 32005
  Synthetic

SEQ ID NO: 44240 - DNA, 19 bp, Artificial Sequence
  Synthetic
tgacatccutggccaugct

SEQ ID NO: 44241 - DNA, 32 bp, Artificial Sequence; identical to SEQ ID NO: 32007
  Synthetic

SEQ ID NO: 44242 - DNA, 25 bp, Artificial Sequence
  Synthetic
agtttcagucccagtttttcaugct

SEQ ID NO: 44243 - DNA, 28 bp, Artificial Sequence
  Synthetic
gactacatacattutggcaagcctaaug

SEQ ID NO: 44244 - DNA, 31 bp, Artificial Sequence; identical to SEQ ID NO: 32010
  Synthetic

SEQ ID NO: 44245 - DNA, 27 bp, Artificial Sequence
  Synthetic
acattatcuaaggcaagcagtugacat

SEQ ID NO: 44246 - DNA, 22 bp, Artificial Sequence
  Synthetic
cccatgugcaaactcacttcug

SEQ ID NO: 44247 - DNA, 22 bp, Artificial Sequence
  Synthetic
tcctttcttcugattgccgugt

SEQ ID NO: 44248 - DNA, 21 bp, Artificial Sequence
  Synthetic
ctcctgtccuggactccacua

SEQ ID NO: 44249 - DNA, 20 bp, Artificial Sequence
  Synthetic
cgacagccuggccgattaug

SEQ ID NO: 44250 - DNA, 17 bp, Artificial Sequence
  Synthetic
gugaaggccagggugga

SEQ ID NO: 44251 - DNA, 20 bp, Artificial Sequence
  Synthetic
cgctgtugagacagagugct

SEQ ID NO: 44252 - DNA, 18 bp, Artificial Sequence
  Synthetic
caugcttcccuggcaggt

SEQ ID NO: 44253 - DNA, 17 bp, Artificial Sequence
  Synthetic
accctcuctcccuggca

SEQ ID NO: 44254 - DNA, 20 bp, Artificial Sequence
  Synthetic
ctccctgtuggcaggtcaut

SEQ ID NO: 44255 - DNA, 18 bp, Artificial Sequence
  Synthetic
gccaaccccugtctgucc

SEQ ID NO: 44256 - DNA, 20 bp, Artificial Sequence
  Synthetic
cagaaccgaguggcagguag

SEQ ID NO: 44257 - DNA, 21 bp, Artificial Sequence
  Synthetic
agtgtcatccucagtggctug

SEQ ID NO: 44258 - DNA, 21 bp, Artificial Sequence
  Synthetic
cctcaccaucctgtcgcttua

SEQ ID NO: 44259 - DNA, 25 bp, Artificial Sequence
  Synthetic
ctctatccaagucactggtggttuc

SEQ ID NO: 44260 - DNA, 23 bp, Artificial Sequence
  Synthetic
gcctggacuttgatctcauaggg

SEQ ID NO: 44261 - DNA, 23 bp, Artificial Sequence
  Synthetic
gccaaagaaugctggtgttctug

SEQ ID NO: 44262 - DNA, 21 bp, Artificial Sequence
  Synthetic
ctctcuaagccctccctucac

SEQ ID NO: 44263 - DNA, 20 bp, Artificial Sequence
  Synthetic
ctgtcgcccuatgtccacua

SEQ ID NO: 44264 - DNA, 21 bp, Artificial Sequence
  Synthetic
gcactgagcucaagcctctua

SEQ ID NO: 44265 - DNA, 21 bp, Artificial Sequence
  Synthetic
gtaagucctaggguggaagcc

SEQ ID NO: 44266 - DNA, 20 bp, Artificial Sequence
  Synthetic
ccccttucaccgtcactguc

SEQ ID NO: 44267 - DNA, 22 bp, Artificial Sequence
  Synthetic
gaggacaacagagugactuccc

SEQ ID NO: 44268 - DNA, 20 bp, Artificial Sequence
  Synthetic
agtagcguccggtgtcatug

SEQ ID NO: 44269 - DNA, 20 bp, Artificial Sequence
  Synthetic
ctggtaguggtgagtgucgt

SEQ ID NO: 44270 - DNA, 21 bp, Artificial Sequence
  Synthetic
gcagggacagacugggagtua

SEQ ID NO: 44271 - DNA, 17 bp, Artificial Sequence
  Synthetic
ccaccugctgcaugcac

SEQ ID NO: 44272 - DNA, 21 bp, Artificial Sequence
  Synthetic
ccatgacagugggcaucacag

SEQ ID NO: 44273 - DNA, 23 bp, Artificial Sequence
  Synthetic
gucaccuaccagaaccacaacaa

SEQ ID NO: 44274 - DNA, 18 bp, Artificial Sequence
  Synthetic
aucaccccagcccccuat

SEQ ID NO: 44275 - DNA, 19 bp, Artificial Sequence
  Synthetic
cacccacuttctccuggca

SEQ ID NO: 44276 - DNA, 19 bp, Artificial Sequence
  Synthetic
gaagtcaugaccccgucca

SEQ ID NO: 44277 - DNA, 19 bp, Artificial Sequence
  Synthetic
gagtgucagcccgtctguc

SEQ ID NO: 44278 - DNA, 22 bp, Artificial Sequence
  Synthetic
acctcugagcaaagttgctgut

SEQ ID NO: 44279 - DNA, 19 bp, Artificial Sequence
  Synthetic
cttgcaccugtcccuccag

SEQ ID NO: 44280 - DNA, 22 bp, Artificial Sequence
  Synthetic
ctgactgugcttgtcgguaaga

SEQ ID NO: 44281 - DNA, 22 bp, Artificial Sequence
  Synthetic
cgtgaccgagagagutagcuga

SEQ ID NO: 44282 - DNA, 22 bp, Artificial Sequence
  Synthetic
ctgagtctuagctggctcctug

SEQ ID NO: 44283 - DNA, 20 bp, Artificial Sequence
  Synthetic
caccacucagaguccccaaa

SEQ ID NO: 44284 - DNA, 24 bp, Artificial Sequence
  Synthetic
cttacaggtcutcagtccttuccc

SEQ ID NO: 44285 - DNA, 22 bp, Artificial Sequence
  Synthetic
gaaagccgugaaggagtctuct

SEQ ID NO: 44286 - DNA, 21 bp, Artificial Sequence
  Synthetic
cgtttctugggaatggccuga

SEQ ID NO: 44287 - DNA, 21 bp, Artificial Sequence
  Synthetic
agagggugtgcaggugaaaag

SEQ ID NO: 44288 - DNA, 21 bp, Artificial Sequence
  Synthetic
ccctcucccagttaccgugaa

SEQ ID NO: 44289 - DNA, 22 bp, Artificial Sequence
  Synthetic
tgtcuttctgtttguccccaca

SEQ ID NO: 44290 - DNA, 18 bp, Artificial Sequence
  Synthetic
tccccggucacggaugat

SEQ ID NO: 44291 - DNA, 27 bp, Artificial Sequence
  Synthetic
aacccctcaaguttaaaaaggugaaga

SEQ ID NO: 44292 - DNA, 24 bp, Artificial Sequence
  Synthetic
gauggccaaaucaggacatauact

SEQ ID NO: 44293 - DNA, 22 bp, Artificial Sequence
  Synthetic
aaaaaggtcgugcagctcaaug

SEQ ID NO: 44294 - DNA, 19 bp, Artificial Sequence
  Synthetic
gcaaaucgcatugcgcaga

SEQ ID NO: 44295 - DNA, 17 bp, Artificial Sequence
  Synthetic
ccutccgcauccgccat

SEQ ID NO: 44296 - DNA, 25 bp, Artificial Sequence
  Synthetic
aaaatccatttccuacctgcccuaa

SEQ ID NO: 44297 - DNA, 30 bp, Artificial Sequence; identical to SEQ ID NO: 32063
  Synthetic

SEQ ID NO: 44298 - DNA, 22 bp, Artificial Sequence
  Synthetic
gtttgtgggccacauagtggua

SEQ ID NO: 44299 - DNA, 24 bp, Artificial Sequence
  Synthetic
agaaagtaaguttgcacagugcct

SEQ ID NO: 44300 - DNA, 24 bp, Artificial Sequence
  Synthetic
atcccaaggugactggttgttuaa

SEQ ID NO: 44301 - DNA, 31 bp, Artificial Sequence; identical to SEQ ID NO: 32067
  Synthetic

SEQ ID NO: 44302 - DNA, 22 bp, Artificial Sequence
  Synthetic
ggaccagugactgcacatguac

SEQ ID NO: 44303 - DNA, 21 bp, Artificial Sequence
  Synthetic
ccacucacaggcctaaugact

SEQ ID NO: 44304 - DNA, 28 bp, Artificial Sequence
  Synthetic
ctgatgggcugagatacaaataaacuga

SEQ ID NO: 44305 - DNA, 30 bp, Artificial Sequence; identical to SEQ ID NO: 32071
  Synthetic

SEQ ID NO: 44306 - DNA, 27 bp, Artificial Sequence
  Synthetic
gggctcatcaautatcaattcttucac

SEQ ID NO: 44307 - DNA, 21 bp, Artificial Sequence
  Synthetic
acgcaacccaguaccactuac

SEQ ID NO: 44308 - DNA, 23 bp, Artificial Sequence
  Synthetic
tttgatgguggctttagactugc

SEQ ID NO: 44309 - DNA, 23 bp, Artificial Sequence
  Synthetic
acautccaaacugaggacagcat

SEQ ID NO: 44310 - DNA, 23 bp, Artificial Sequence
  Synthetic
gcttgcttgacugtggaccttua

SEQ ID NO: 44311 - DNA, 22 bp, Artificial Sequence
  Synthetic
agcttcaaguggccttcacuac

SEQ ID NO: 44312 - DNA, 28 bp, Artificial Sequence
  Synthetic
aagagttaagutaaattggaugcaccct

SEQ ID NO: 44313 - DNA, 20 bp, Artificial Sequence
  Synthetic
aggcacaggaccuctacuga

SEQ ID NO: 44314 - DNA, 22 bp, Artificial Sequence
  Synthetic
gaagguagcgagtcaguaacgg

SEQ ID NO: 44315 - DNA, 28 bp, Artificial Sequence
  Synthetic
gactacuggaaacaactagaagugagaa

SEQ ID NO: 44316 - DNA, 29 bp, Artificial Sequence
  Synthetic
ctgctctgagucagttaaacagtaaauct

SEQ ID NO: 44317 - DNA, 27 bp, Artificial Sequence
  Synthetic
gcatgtccttgugataaccttctttut

SEQ ID NO: 44318 - DNA, 22 bp, Artificial Sequence
  Synthetic
catgttcagauggagaggcugt

SEQ ID NO: 44319 - DNA, 17 bp, Artificial Sequence
  Synthetic
ctgccccutgcccugat

SEQ ID NO: 44320 - DNA, 24 bp, Artificial Sequence
  Synthetic
gccacttctucccatcaagacuat

SEQ ID NO: 44321 - DNA, 30 bp, Artificial Sequence; identical to SEQ ID NO: 32087
  Synthetic

SEQ ID NO: 44322 - DNA, 26 bp, Artificial Sequence
  Synthetic
agaagcatggagauggattcattauc

SEQ ID NO: 44323 - DNA, 23 bp, Artificial Sequence
  Synthetic
tgtgtuccacccgtttcattuca

SEQ ID NO: 44324 - DNA, 25 bp, Artificial Sequence
  Synthetic
tctgctttgaucactgattgtgtuc

SEQ ID NO: 44325 - DNA, 28 bp, Artificial Sequence
  Synthetic
gcagcaatgaaaacauccattctatuca

SEQ ID NO: 44326 - DNA, 30 bp, Artificial Sequence; identical to SEQ ID NO: 32092
  Synthetic

SEQ ID NO: 44327 - DNA, 26 bp, Artificial Sequence
  Synthetic
accaaaagcuggtacttcacugaaaa

SEQ ID NO: 44328 - DNA, 27 bp, Artificial Sequence
  Synthetic
aagcttcttatugcacgtaggauaaat

SEQ ID NO: 44329 - DNA, 30 bp, Artificial Sequence; identical to SEQ ID NO: 32095
  Synthetic

SEQ ID NO: 44330 - DNA, 29 bp, Artificial Sequence
  Synthetic
ccaaaagtgggaauacattatagucagca

SEQ ID NO: 44331 - DNA, 24 bp, Artificial Sequence
  Synthetic
gctcctttacucagcccttauacc

SEQ ID NO: 44332 - DNA, 25 bp, Artificial Sequence
  Synthetic
gagcagagcaaaggaauaaccaaug

SEQ ID NO: 44333 - DNA, 30 bp, Artificial Sequence; identical to SEQ ID NO: 32099
  Synthetic

SEQ ID NO: 44334 - DNA, 24 bp, Artificial Sequence
  Synthetic
ttcgggcttautttgtccctcaut

SEQ ID NO: 44335 - DNA, 23 bp, Artificial Sequence
  Synthetic
agaguagcaacagaaagctcugc

SEQ ID NO: 44336 - DNA, 28 bp, Artificial Sequence
  Synthetic
agggaatagguccttctgataaatguga

SEQ ID NO: 44337 - DNA, 27 bp, Artificial Sequence
  Synthetic
cagucatttctuacaaggagccaaaaa

SEQ ID NO: 44338 - DNA, 28 bp, Artificial Sequence
  Synthetic
cctttgcaatggguaatggagatctaut

SEQ ID NO: 44339 - DNA, 26 bp, Artificial Sequence
  Synthetic
ggataattguggatgacaccucaacc

SEQ ID NO: 44340 - DNA, 30 bp, Artificial Sequence; identical to SEQ ID NO: 32106
  Synthetic

SEQ ID NO: 44341 - DNA, 28 bp, Artificial Sequence
  Synthetic
gactggcacuaagaatttcaugaagaac

SEQ ID NO: 44342 - DNA, 26 bp, Artificial Sequence
  Synthetic
gtaagaaatagguttctgctgctugg

SEQ ID NO: 44343 - DNA, 25 bp, Artificial Sequence
  Synthetic
agaaucagcaaggtggauacaaagg

SEQ ID NO: 44344 - DNA, 27 bp, Artificial Sequence
  Synthetic
gatttagccucaaagctgtagcattut

SEQ ID NO: 44345 - DNA, 31 bp, Artificial Sequence; identical to SEQ ID NO: 32111
  Synthetic

SEQ ID NO: 44346 - DNA, 27 bp, Artificial Sequence
  Synthetic
accactctctgutgacgatacatttut

SEQ ID NO: 44347 - DNA, 29 bp, Artificial Sequence
  Synthetic
cagcaggtactgauaatacaagttcctua

SEQ ID NO: 44348 - DNA, 29 bp, Artificial Sequence
  Synthetic
tctcatttaatctuaattggaggccugac

SEQ ID NO: 44349 - DNA, 27 bp, Artificial Sequence
  Synthetic
ctcctctagtgauttgttgatgctcut

SEQ ID NO: 44350 - DNA, 23 bp, Artificial Sequence
  Synthetic
gggtgucttgaattcugggagaa

SEQ ID NO: 44351 - DNA, 29 bp, Artificial Sequence
  Synthetic
gagtaaccagagucttattcttcctcauc

SEQ ID NO: 44352 - DNA, 24 bp, Artificial Sequence
  Synthetic
agacagtttcucctgagaauggga

SEQ ID NO: 44353 - DNA, 26 bp, Artificial Sequence
  Synthetic
atctctttuccccattgttttugcag

SEQ ID NO: 44354 - DNA, 28 bp, Artificial Sequence
  Synthetic
tcttttacugacctatatugcaaaccat

SEQ ID NO: 44355 - DNA, 24 bp, Artificial Sequence
  Synthetic
gatctagctucaggactcatuggc

SEQ ID NO: 44356 - DNA, 22 bp, Artificial Sequence
  Synthetic
agcuggagaaaggaccaacaua

SEQ ID NO: 44357 - DNA, 26 bp, Artificial Sequence
  Synthetic
cagaccatauaacatctacccucacg

SEQ ID NO: 44358 - DNA, 23 bp, Artificial Sequence
  Synthetic
tccatuggagacaaggctgaaut

SEQ ID NO: 44359 - DNA, 25 bp, Artificial Sequence
  Synthetic
ctcgtgaagcuattcagcatgaauc

SEQ ID NO: 44360 - DNA, 25 bp, Artificial Sequence
  Synthetic
ctaacctuaaacatggctucaggat

SEQ ID NO: 44361 - DNA, 25 bp, Artificial Sequence
  Synthetic
ctttatccaaautcgctcagtugcc

SEQ ID NO: 44362 - DNA, 26 bp, Artificial Sequence
  Synthetic
ccttcagcaacacacuatattccugt

SEQ ID NO: 44363 - DNA, 26 bp, Artificial Sequence
  Synthetic
ctttccttacugctcaaacactctug

SEQ ID NO: 44364 - DNA, 22 bp, Artificial Sequence
  Synthetic
ccgagcugtttgtgaacugaag

SEQ ID NO: 44365 - DNA, 27 bp, Artificial Sequence
  Synthetic
actctatcttugccttctctctcauca

SEQ ID NO: 44366 - DNA, 23 bp, Artificial Sequence
  Synthetic
tcaggugaaggaacacaaaugct

SEQ ID NO: 44367 - DNA, 29 bp, Artificial Sequence
  Synthetic
gtgccttacctacucatatctttctcaug

SEQ ID NO: 44368 - DNA, 22 bp, Artificial Sequence
  Synthetic
guaacgccaccatuacaaagca

SEQ ID NO: 44369 - DNA, 23 bp, Artificial Sequence
  Synthetic
tggcggacauctcattctuacag

SEQ ID NO: 44370 - DNA, 24 bp, Artificial Sequence
  Synthetic
aagcagactuacatccccacaauc

SEQ ID NO: 44371 - DNA, 29 bp, Artificial Sequence
  Synthetic
ccagttgaacauttgtagcaataagucat

SEQ ID NO: 44372 - DNA, 20 bp, Artificial Sequence
  Synthetic
cccagucccctacaucgaca

SEQ ID NO: 44373 - DNA, 19 bp, Artificial Sequence
  Synthetic
ctcccagccguatgcugag

SEQ ID NO: 44374 - DNA, 22 bp, Artificial Sequence
  Synthetic
tctcugtggagcugggaaaaac

SEQ ID NO: 44375 - DNA, 20 bp, Artificial Sequence
  Synthetic
cagccctguggaacctguac

SEQ ID NO: 44376 - DNA, 24 bp, Artificial Sequence
  Synthetic
cgtcttctaacccucctcctctuc

SEQ ID NO: 44377 - DNA, 22 bp, Artificial Sequence
  Synthetic
aaccagugaaagggtgcugaat

SEQ ID NO: 44378 - DNA, 22 bp, Artificial Sequence
  Synthetic
ggaacgtctgugcctgtgaaut

SEQ ID NO: 44379 - DNA, 21 bp, Artificial Sequence
  Synthetic
gacaagagugaagggcacaug

SEQ ID NO: 44380 - DNA, 22 bp, Artificial Sequence
  Synthetic
tcctcccctucttctccctcua

SEQ ID NO: 44381 - DNA, 19 bp, Artificial Sequence
  Synthetic
agtggtaggugaccgugga

SEQ ID NO: 44382 - DNA, 24 bp, Artificial Sequence
  Synthetic
aggatgaggaggaugatgatguga

SEQ ID NO: 44383 - DNA, 22 bp, Artificial Sequence
  Synthetic
gcacactagaugccatccucag

SEQ ID NO: 44384 - DNA, 17 bp, Artificial Sequence
  Synthetic
cccgucgcgaagttucc

SEQ ID NO: 44385 - DNA, 19 bp, Artificial Sequence
  Synthetic
cccatucaggtcgtuccca

SEQ ID NO: 44386 - DNA, 23 bp, Artificial Sequence
  Synthetic
ggccagcccuggaaaaatattuc

SEQ ID NO: 44387 - DNA, 19 bp, Artificial Sequence
  Synthetic
ggaagcccugacccaccua

SEQ ID NO: 44388 - DNA, 21 bp, Artificial Sequence
  Synthetic
ggagctccugaagaagtuccg

SEQ ID NO: 44389 - DNA, 21 bp, Artificial Sequence
  Synthetic
acacccagautgcacgucaaa

SEQ ID NO: 44390 - DNA, 21 bp, Artificial Sequence
  Synthetic
ccccacacugggtgagatgua

SEQ ID NO: 44391 - DNA, 23 bp, Artificial Sequence
  Synthetic
cttcctaucacccctcugaggat

SEQ ID NO: 44392 - DNA, 19 bp, Artificial Sequence
  Synthetic
cutctctgugaccccacgt

SEQ ID NO: 44393 - DNA, 21 bp, Artificial Sequence
  Synthetic
aatcacccauctcgccatcuc

SEQ ID NO: 44394 - DNA, 20 bp, Artificial Sequence
  Synthetic
cagugacaggaggtgcuaca

SEQ ID NO: 44395 - DNA, 20 bp, Artificial Sequence
  Synthetic
agtactguggcccacaacuc

SEQ ID NO: 44396 - DNA, 20 bp, Artificial Sequence
  Synthetic
tcctactgaggugctcccut

SEQ ID NO: 44397 - DNA, 22 bp, Artificial Sequence
  Synthetic
gcagaagccagaugaaggtguc

SEQ ID NO: 44398 - DNA, 18 bp, Artificial Sequence
  Synthetic
gaggaggcugcactgtug

SEQ ID NO: 44399 - DNA, 17 bp, Artificial Sequence
  Synthetic
tgtgcaggugggtggug

SEQ ID NO: 44400 - DNA, 20 bp, Artificial Sequence
  Synthetic
agccaatggugaggacccua

SEQ ID NO: 44401 - DNA, 21 bp, Artificial Sequence
  Synthetic
ggcaagcaguttcccttcugt

SEQ ID NO: 44402 - DNA, 23 bp, Artificial Sequence
  Synthetic
ggccatccuagaattctgccuaa

SEQ ID NO: 44403 - DNA, 18 bp, Artificial Sequence
  Synthetic
cccgcaucctggctaugc

SEQ ID NO: 44404 - DNA, 21 bp, Artificial Sequence
  Synthetic
ggccactgaugctttctguct

SEQ ID NO: 44405 - DNA, 20 bp, Artificial Sequence
  Synthetic
ggcctggccaautagggauc

SEQ ID NO: 44406 - DNA, 24 bp, Artificial Sequence
  Synthetic
ccccatautcttgattcuccccaa

SEQ ID NO: 44407 - DNA, 28 bp, Artificial Sequence
  Synthetic
agccatgtguctcttatttttctugact

SEQ ID NO: 44408 - DNA, 21 bp, Artificial Sequence
  Synthetic
tccagactugggactguggaa

SEQ ID NO: 44409 - DNA, 20 bp, Artificial Sequence
  Synthetic
gtgggtgccucaaggactua

SEQ ID NO: 44410 - DNA, 21 bp, Artificial Sequence
  Synthetic
caaugggaagagcaccgugat

SEQ ID NO: 44411 - DNA, 21 bp, Artificial Sequence
  Synthetic
cgtgucacaacggaggactug

SEQ ID NO: 44412 - DNA, 20 bp, Artificial Sequence
  Synthetic
ctcacaagucccaggtcugt

SEQ ID NO: 44413 - DNA, 19 bp, Artificial Sequence
  Synthetic
gcugggagctugggagaag

SEQ ID NO: 44414 - DNA, 21 bp, Artificial Sequence
  Synthetic
ccaccuacactcactcuggac

SEQ ID NO: 44415 - DNA, 28 bp, Artificial Sequence
  Synthetic
gaaaaggaggacauctgttctcatcaut

SEQ ID NO: 44416 - DNA, 22 bp, Artificial Sequence
  Synthetic
ctggcagugaaaaccagaguct

SEQ ID NO: 44417 - DNA, 25 bp, Artificial Sequence
  Synthetic
acctatctgcagucttggactctua

SEQ ID NO: 44418 - DNA, 22 bp, Artificial Sequence
  Synthetic
tgagaggaaggaugtgccauct

SEQ ID NO: 44419 - DNA, 21 bp, Artificial Sequence
  Synthetic
acctgttgcuccatgacucac

SEQ ID NO: 44420 - DNA, 21 bp, Artificial Sequence
  Synthetic
tgguagagccctgtcuccaag

SEQ ID NO: 44421 - DNA, 23 bp, Artificial Sequence
  Synthetic
acacagctugtcacagttuaggt

SEQ ID NO: 44422 - DNA, 21 bp, Artificial Sequence
  Synthetic
agactcaauacgtcccccuca

SEQ ID NO: 44423 - DNA, 20 bp, Artificial Sequence
  Synthetic
cttcccgagcagaacugguc

SEQ ID NO: 44424 - DNA, 21 bp, Artificial Sequence
  Synthetic
gggctctauggcctcctcuac

SEQ ID NO: 44425 - DNA, 22 bp, Artificial Sequence
  Synthetic
ctgacccugcctaaaggaaguc

SEQ ID NO: 44426 - DNA, 21 bp, Artificial Sequence
  Synthetic
tgtcaagcguccttaggaugg

SEQ ID NO: 44427 - DNA, 20 bp, Artificial Sequence
  Synthetic
ggagcccacauggcactuag

SEQ ID NO: 44428 - DNA, 17 bp, Artificial Sequence
  Synthetic
ctgctgcugcgctucac

SEQ ID NO: 44429 - DNA, 17 bp, Artificial Sequence
  Synthetic
gaacugccgcugcaacc

SEQ ID NO: 44430 - DNA, 24 bp, Artificial Sequence
  Synthetic
cacggtgcautcttttctcaucac

SEQ ID NO: 44431 - DNA, 22 bp, Artificial Sequence
  Synthetic
ctctttgucacctccaggtuct

SEQ ID NO: 44432 - DNA, 21 bp, Artificial Sequence
  Synthetic
tuacaggcagggctuacaagg

SEQ ID NO: 44433 - DNA, 24 bp, Artificial Sequence
  Synthetic
gaagttgcuctcaaagaaguccca

SEQ ID NO: 44434 - DNA, 21 bp, Artificial Sequence
  Synthetic
ctggtcgacuaccctgatgug

SEQ ID NO: 44435 - DNA, 23 bp, Artificial Sequence
  Synthetic
gttcuccaaaaccccctgaucaa

SEQ ID NO: 44436 - DNA, 24 bp, Artificial Sequence
  Synthetic
ggaggagaaauggtcactttgcut

SEQ ID NO: 44437 - DNA, 21 bp, Artificial Sequence
  Synthetic
catgacacacucgggacucac

SEQ ID NO: 44438 - DNA, 22 bp, Artificial Sequence
  Synthetic
ccatcgccuatgaaatctucgg

SEQ ID NO: 44439 - DNA, 23 bp, Artificial Sequence
  Synthetic
gagaacagagguttcuacccaca

SEQ ID NO: 44440 - DNA, 25 bp, Artificial Sequence
  Synthetic
gggtgaacauattctagcccugaag

SEQ ID NO: 44441 - DNA, 20 bp, Artificial Sequence
  Synthetic
ctccaugcagggacaucaca

SEQ ID NO: 44442 - DNA, 20 bp, Artificial Sequence
  Synthetic
acccacgucgattgcatcuc

SEQ ID NO: 44443 - DNA, 20 bp, Artificial Sequence
  Synthetic
cacctgtguccccaagcaua

SEQ ID NO: 44444 - DNA, 20 bp, Artificial Sequence
  Synthetic
aagcaggcugatuggagagg

SEQ ID NO: 44445 - DNA, 28 bp, Artificial Sequence
  Synthetic
ctggatactggauatacagaccugaact

SEQ ID NO: 44446 - DNA, 21 bp, Artificial Sequence
  Synthetic
ggacaccccgauctgtggaua

SEQ ID NO: 44447 - DNA, 20 bp, Artificial Sequence
  Synthetic
catgagcuggtaggcgaugt

SEQ ID NO: 44448 - DNA, 21 bp, Artificial Sequence
  Synthetic
cagaagtgauggctcctguct

SEQ ID NO: 44449 - DNA, 19 bp, Artificial Sequence
  Synthetic
ccaucacaggccacctcug

SEQ ID NO: 44450 - DNA, 19 bp, Artificial Sequence
  Synthetic
ggucacagcctcucagcat

SEQ ID NO: 44451 - DNA, 18 bp, Artificial Sequence
  Synthetic
ccagggccgugttuccag

SEQ ID NO: 44452 - DNA, 21 bp, Artificial Sequence
  Synthetic
cctccucggaagacactcuga

SEQ ID NO: 44453 - DNA, 21 bp, Artificial Sequence
  Synthetic
ccagguggguagacaggagac

SEQ ID NO: 44454 - DNA, 20 bp, Artificial Sequence
  Synthetic
ggctcucagcaggtgttucc

SEQ ID NO: 44455 - DNA, 18 bp, Artificial Sequence
  Synthetic
aggctgcauacgccauca

SEQ ID NO: 44456 - DNA, 19 bp, Artificial Sequence
  Synthetic
tttgccaaaugcgcctcuc

SEQ ID NO: 44457 - DNA, 22 bp, Artificial Sequence
  Synthetic
ggauggcgacggauaaaggaaa

SEQ ID NO: 44458 - DNA, 22 bp, Artificial Sequence
  Synthetic
catggagauggtgttcugggaa

SEQ ID NO: 44459 - DNA, 27 bp, Artificial Sequence
  Synthetic
gtgctgatcaauatcactccatuaggg

SEQ ID NO: 44460 - DNA, 29 bp, Artificial Sequence
  Synthetic
ctttgaagatcugtctgtaatgtgugagt

SEQ ID NO: 44461 - DNA, 28 bp, Artificial Sequence
  Synthetic
accacttcactugagataaatcagctut

SEQ ID NO: 44462 - DNA, 30 bp, Artificial Sequence; identical to SEQ ID NO: 32228
  Synthetic

SEQ ID NO: 44463 - DNA, 23 bp, Artificial Sequence
  Synthetic
agtcaaagtccutctgctcaucc

SEQ ID NO: 44464 - DNA, 21 bp, Artificial Sequence
  Synthetic
agctcatcutcgtcacaugcc

SEQ ID NO: 44465 - DNA, 23 bp, Artificial Sequence
  Synthetic
agcagguagaggaagaggaacuc

SEQ ID NO: 44466 - DNA, 19 bp, Artificial Sequence
  Synthetic
gccgtcugcatcgtacuca

SEQ ID NO: 44467 - DNA, 20 bp, Artificial Sequence
  Synthetic
ggtcaggutgggtgcugaag

SEQ ID NO: 44468 - DNA, 21 bp, Artificial Sequence
  Synthetic
gagtgaccccacuctgagtuc

SEQ ID NO: 44469 - DNA, 24 bp, Artificial Sequence
  Synthetic
ttgcaggcagcguagatagtuaat

SEQ ID NO: 44470 - DNA, 23 bp, Artificial Sequence
  Synthetic
gtaagagaggugagaagtgcucc

SEQ ID NO: 44471 - DNA, 24 bp, Artificial Sequence
  Synthetic
tgggtatcuccagaacctctaguc

SEQ ID NO: 44472 - DNA, 21 bp, Artificial Sequence
  Synthetic
catcttccuccccacaacugt

SEQ ID NO: 44473 - DNA, 22 bp, Artificial Sequence
  Synthetic
agggcttaccuttccctaccut

SEQ ID NO: 44474 - DNA, 27 bp, Artificial Sequence
  Synthetic
agctctattgugaactatacgggttuc

SEQ ID NO: 44475 - DNA, 30 bp, Artificial Sequence; identical to SEQ ID NO: 32241
  Synthetic

SEQ ID NO: 44476 - DNA, 22 bp, Artificial Sequence
  Synthetic
cggccagcagcccuatttuaat

SEQ ID NO: 44477 - DNA, 25 bp, Artificial Sequence
  Synthetic
gatggtaaugaccttaggtgtugct

SEQ ID NO: 44478 - DNA, 24 bp, Artificial Sequence
  Synthetic
cacaaggaacuactgctggaauca

SEQ ID NO: 44479 - DNA, 27 bp, Artificial Sequence
  Synthetic
gagtggatattugtcatctaccacugt

SEQ ID NO: 44480 - DNA, 28 bp, Artificial Sequence
  Synthetic
gataggugacaatcttgaatuggaggag

SEQ ID NO: 44481 - DNA, 26 bp, Artificial Sequence
  Synthetic
cacttgcuaaggatcctaaatugcag

SEQ ID NO: 44482 - DNA, 28 bp, Artificial Sequence
  Synthetic
aaacacaaggcaaagcautttaacagua

SEQ ID NO: 44483 - DNA, 27 bp, Artificial Sequence
  Synthetic
tttccatcattgugttttgttggcuag

SEQ ID NO: 44484 - DNA, 17 bp, Artificial Sequence
  Synthetic
ggcggguccagatgcug

SEQ ID NO: 44485 - DNA, 17 bp, Artificial Sequence
  Synthetic
tgcgcaggutgcgauct

SEQ ID NO: 44486 - DNA, 17 bp, Artificial Sequence
  Synthetic
agctaguggcgcucacg

SEQ ID NO: 44487 - DNA, 17 bp, Artificial Sequence
  Synthetic
ccgcuccagcacgtugt

SEQ ID NO: 44488 - DNA, 22 bp, Artificial Sequence
  Synthetic
ggagacugaggaccagaacuca

SEQ ID NO: 44489 - DNA, 24 bp, Artificial Sequence
  Synthetic
cucattaccgaugacacagaaggg

SEQ ID NO: 44490 - DNA, 20 bp, Artificial Sequence
  Synthetic
gtaggcuggctgtgatcucg

SEQ ID NO: 44491 - DNA, 20 bp, Artificial Sequence
  Synthetic
ctatgcgcguagaccacuga

SEQ ID NO: 44492 - DNA, 18 bp, Artificial Sequence
  Synthetic
ctutcccgtguggaagcc

SEQ ID NO: 44493 - DNA, 20 bp, Artificial Sequence
  Synthetic
ccuacaaagacccucacgca

SEQ ID NO: 44494 - DNA, 20 bp, Artificial Sequence
  Synthetic
gacaccctugcagcctctua

SEQ ID NO: 44495 - DNA, 21 bp, Artificial Sequence
  Synthetic
cttctucccgggcatcttgua

SEQ ID NO: 44496 - DNA, 21 bp, Artificial Sequence
  Synthetic
gcaggaccuggcaagatcuga

SEQ ID NO: 44497 - DNA, 17 bp, Artificial Sequence
  Synthetic
ggtgcuccgtcggguac

SEQ ID NO: 44498 - DNA, 21 bp, Artificial Sequence
  Synthetic
gctctggcuaacttggctcuc

SEQ ID NO: 44499 - DNA, 21 bp, Artificial Sequence
  Synthetic
gctccagcucttttgcaccut

SEQ ID NO: 44500 - DNA, 25 bp, Artificial Sequence
  Synthetic
cctattggacacuctactggtggut

SEQ ID NO: 44501 - DNA, 20 bp, Artificial Sequence
  Synthetic
gcctcaggccucagtctuac

SEQ ID NO: 44502 - DNA, 23 bp, Artificial Sequence
  Synthetic
ggaaatucaaggagacacugcga

SEQ ID NO: 44503 - DNA, 22 bp, Artificial Sequence
  Synthetic
ggttggccucagacttcatuca

SEQ ID NO: 44504 - DNA, 17 bp, Artificial Sequence
  Synthetic
ccacuccaccggcuagg

SEQ ID NO: 44505 - DNA, 18 bp, Artificial Sequence
  Synthetic
gucgaacagcggcactug

SEQ ID NO: 44506 - DNA, 19 bp, Artificial Sequence
  Synthetic
tcggucagcaccaacaugg

SEQ ID NO: 44507 - DNA, 19 bp, Artificial Sequence
  Synthetic
catcucacgctccugaggt

SEQ ID NO: 44508 - DNA, 22 bp, Artificial Sequence
  Synthetic
ctugagacttcatuccccagca

SEQ ID NO: 44509 - DNA, 23 bp, Artificial Sequence
  Synthetic
cagtugcaacgaagccaatcaua

SEQ ID NO: 44510 - DNA, 21 bp, Artificial Sequence
  Synthetic
ccucaagcccttctugcagag

SEQ ID NO: 44511 - DNA, 20 bp, Artificial Sequence
  Synthetic
tgaagtggcucctagcccua

SEQ ID NO: 44512 - DNA, 21 bp, Artificial Sequence
  Synthetic
acaggccuagcttgcaaugat

SEQ ID NO: 44513 - DNA, 24 bp, Artificial Sequence
  Synthetic
cgatacggucagctcttgtaggua

SEQ ID NO: 44514 - DNA, 22 bp, Artificial Sequence
  Synthetic
agaaggccuacttctccacucc

SEQ ID NO: 44515 - DNA, 23 bp, Artificial Sequence
  Synthetic
ccaccauaaatcaggguccacat

SEQ ID NO: 44516 - DNA, 23 bp, Artificial Sequence
  Synthetic
aggaattgcutgctcaacucagt

SEQ ID NO: 44517 - DNA, 24 bp, Artificial Sequence
  Synthetic
ggctgaaguggagattaacauccc

SEQ ID NO: 44518 - DNA, 26 bp, Artificial Sequence
  Synthetic
caaccttacucctttccuaacgaact

SEQ ID NO: 44519 - DNA, 30 bp, Artificial Sequence; identical to SEQ ID NO: 32285
  Synthetic

SEQ ID NO: 44520 - DNA, 28 bp, Artificial Sequence
  Synthetic
gagcacatgctuaggaaaactcttaauc

SEQ ID NO: 44521 - DNA, 27 bp, Artificial Sequence
  Synthetic
actgaggtttcugttatcttctcucct

SEQ ID NO: 44522 - DNA, 28 bp, Artificial Sequence
  Synthetic
gttttagatgtgautcagattgagugca

SEQ ID NO: 44523 - DNA, 26 bp, Artificial Sequence
  Synthetic
ctttcaaccucttccatcacaucaac

SEQ ID NO: 44524 - DNA, 29 bp, Artificial Sequence
  Synthetic
acacatcttctucagaatcacaaactuga

SEQ ID NO: 44525 - DNA, 24 bp, Artificial Sequence
  Synthetic
caagcccauttgtgtttcugaaca

SEQ ID NO: 44526 - DNA, 30 bp, Artificial Sequence; identical to SEQ ID NO: 32292
  Synthetic

SEQ ID NO: 44527 - DNA, 26 bp, Artificial Sequence
  Synthetic
ctcaacuggaggacattcacttuact

SEQ ID NO: 44528 - DNA, 26 bp, Artificial Sequence
  Synthetic
tcagtccaguaattttcaagccauga

SEQ ID NO: 44529 - DNA, 27 bp, Artificial Sequence
  Synthetic
tcttccctatguttcaatgtcctucag

SEQ ID NO: 44530 - DNA, 23 bp, Artificial Sequence
  Synthetic
cacugagagaugccaaggaauag

SEQ ID NO: 44531 - DNA, 28 bp, Artificial Sequence
  Synthetic
cttcttccttatucttccaccattucag

SEQ ID NO: 44532 - DNA, 21 bp, Artificial Sequence
  Synthetic
cagaagugcatgggacugaca

SEQ ID NO: 44533 - DNA, 21 bp, Artificial Sequence
  Synthetic
ctagcagctutggcctccaua

SEQ ID NO: 44534 - DNA, 25 bp, Artificial Sequence
  Synthetic
aagtcagttucggtttccttcugaa

SEQ ID NO: 44535 - DNA, 23 bp, Artificial Sequence
  Synthetic
gagtccatgugatctcctuccac

SEQ ID NO: 44536 - DNA, 22 bp, Artificial Sequence
  Synthetic
gggaatgttaugcctccctcut

SEQ ID NO: 44537 - DNA, 22 bp, Artificial Sequence
  Synthetic
ggagaggcacuacaacatgcuc

SEQ ID NO: 44538 - DNA, 22 bp, Artificial Sequence
  Synthetic
gcaggacucttccaagtgucaa

SEQ ID NO: 44539 - DNA, 21 bp, Artificial Sequence
  Synthetic
ggaatccuctcctgcucacct

SEQ ID NO: 44540 - DNA, 21 bp, Artificial Sequence
  Synthetic
aagagacccagcacutggtut

SEQ ID NO: 44541 - DNA, 26 bp, Artificial Sequence
  Synthetic
ctccaaatggcauttctttctctucc

SEQ ID NO: 44542 - DNA, 22 bp, Artificial Sequence
  Synthetic
gggtctgaugatcaccctucct

SEQ ID NO: 44543 - DNA, 24 bp, Artificial Sequence
  Synthetic
aggctagctcugtgttttctccua

SEQ ID NO: 44544 - DNA, 24 bp, Artificial Sequence
  Synthetic
ctaaccagcaccuccaaactcaua

SEQ ID NO: 44545 - DNA, 21 bp, Artificial Sequence
  Synthetic
ggtcccauggaaaggacagug

SEQ ID NO: 44546 - DNA, 20 bp, Artificial Sequence
  Synthetic
cggtaacccucccagcttug

SEQ ID NO: 44547 - DNA, 24 bp, Artificial Sequence
  Synthetic
cgtttccaacagucctacttcuct

SEQ ID NO: 44548 - DNA, 25 bp, Artificial Sequence
  Synthetic
ttatgcucacccggttattcucaaa

SEQ ID NO: 44549 - DNA, 26 bp, Artificial Sequence
  Synthetic
cactctgagutgtctcattucacaca

SEQ ID NO: 44550 - DNA, 21 bp, Artificial Sequence
  Synthetic
cctcttgguctggtcctucag

SEQ ID NO: 44551 - DNA, 22 bp, Artificial Sequence
  Synthetic
tgaacaaauccaagcaccucca

SEQ ID NO: 44552 - DNA, 24 bp, Artificial Sequence
  Synthetic
ggtatgtgaagugtgaggcactua

SEQ ID NO: 44553 - DNA, 21 bp, Artificial Sequence
  Synthetic
caaggagcagcucucagagat

SEQ ID NO: 44554 - DNA, 23 bp, Artificial Sequence
  Synthetic
gggtttgguagctggaagacaut

SEQ ID NO: 44555 - DNA, 28 bp, Artificial Sequence
  Synthetic
gaggcctcuaaagaaatacctgattucc

SEQ ID NO: 44556 - DNA, 28 bp, Artificial Sequence
  Synthetic
gcaagtcaaaaaucctactcaaatcucc

SEQ ID NO: 44557 - DNA, 23 bp, Artificial Sequence
  Synthetic
tggtctgaggauttcctgttucc

SEQ ID NO: 44558 - DNA, 27 bp, Artificial Sequence
  Synthetic
tuaatatcttcuacagggagccaggat

SEQ ID NO: 44559 - DNA, 27 bp, Artificial Sequence
  Synthetic
gaagacaacaagcaguttcacaaacua

SEQ ID NO: 44560 - DNA, 21 bp, Artificial Sequence
  Synthetic
ggatggugaagggttgaccug

SEQ ID NO: 44561 - DNA, 28 bp, Artificial Sequence
  Synthetic
agcaactttgaggcugattatggaauat

SEQ ID NO: 44562 - DNA, 20 bp, Artificial Sequence
  Synthetic
gcccttcuaagcagcatgug

SEQ ID NO: 44563 - DNA, 26 bp, Artificial Sequence
  Synthetic
tttattccacguctattcucccacag

SEQ ID NO: 44564 - DNA, 17 bp, Artificial Sequence
  Synthetic
gcccuctgggugagcag

SEQ ID NO: 44565 - DNA, 28 bp, Artificial Sequence
  Synthetic
cattagagauccagaccttataggcaut

SEQ ID NO: 44566 - DNA, 23 bp, Artificial Sequence
  Synthetic
actugacagaaaccagcuggaat

SEQ ID NO: 44567 - DNA, 28 bp, Artificial Sequence
  Synthetic
ggtcaagaacutatcttccttctuccaa

SEQ ID NO: 44568 - DNA, 22 bp, Artificial Sequence
  Synthetic
ctgcagaaguacccagtgtuct

SEQ ID NO: 44569 - DNA, 23 bp, Artificial Sequence
  Synthetic
tcagtcatcccauccatctgtug

SEQ ID NO: 44570 - DNA, 20 bp, Artificial Sequence
  Synthetic
tcatctugcgcaccaaggut

SEQ ID NO: 44571 - DNA, 23 bp, Artificial Sequence
  Synthetic
gtacacccuttaccaacaaugcc

SEQ ID NO: 44572 - DNA, 20 bp, Artificial Sequence
  Synthetic
ggagccauggatttgccauc

SEQ ID NO: 44573 - DNA, 21 bp, Artificial Sequence
  Synthetic
agccactgcutttctcgtugt

SEQ ID NO: 44574 - DNA, 22 bp, Artificial Sequence
  Synthetic
gaaagaguagacagccgcugat

SEQ ID NO: 44575 - DNA, 24 bp, Artificial Sequence
  Synthetic
gtctgaacaucaccttcuacgaga

SEQ ID NO: 44576 - DNA, 25 bp, Artificial Sequence
  Synthetic
agagagtcagtutcctaggcttcut

SEQ ID NO: 44577 - DNA, 21 bp, Artificial Sequence
  Synthetic
actggctuctgattggugcag

SEQ ID NO: 44578 - DNA, 23 bp, Artificial Sequence
  Synthetic
ccagtaggatutgctggtggaut

SEQ ID NO: 44579 - DNA, 22 bp, Artificial Sequence
  Synthetic
cttgatgcugctgtctauggct

SEQ ID NO: 44580 - DNA, 23 bp, Artificial Sequence
  Synthetic
ccctuccaaggaaacgtgttgua

SEQ ID NO: 44581 - DNA, 23 bp, Artificial Sequence
  Synthetic
gttcttgttggcuttctccacug

SEQ ID NO: 44582 - DNA, 22 bp, Artificial Sequence
  Synthetic
agctagatgucacgctctccut

SEQ ID NO: 44583 - DNA, 24 bp, Artificial Sequence
  Synthetic
caatgcagtgauttggtgtaccug

SEQ ID NO: 44584 - DNA, 19 bp, Artificial Sequence
  Synthetic
ggaggaggaucgcgaacut

SEQ ID NO: 44585 - DNA, 23 bp, Artificial Sequence
  Synthetic
ctttgtcccuctgtgtcttcuca

SEQ ID NO: 44586 - DNA, 20 bp, Artificial Sequence
  Synthetic
agagctgguccagggauaca

SEQ ID NO: 44587 - DNA, 24 bp, Artificial Sequence
  Synthetic
tcctcctcacacuctctcaactut

SEQ ID NO: 44588 - DNA, 21 bp, Artificial Sequence
  Synthetic
gagggtgcgaucagtgatgut

SEQ ID NO: 44589 - DNA, 27 bp, Artificial Sequence
  Synthetic
gcagtgacugtatttcttctucccaag

SEQ ID NO: 44590 - DNA, 24 bp, Artificial Sequence
  Synthetic
cccccttacuctgatcatgtucat

SEQ ID NO: 44591 - DNA, 25 bp, Artificial Sequence
  Synthetic
ctgttcgtgtcuctgtcttgatcuc

SEQ ID NO: 44592 - DNA, 22 bp, Artificial Sequence
  Synthetic
cuaaggccacucagcaagacaa

SEQ ID NO: 44593 - DNA, 25 bp, Artificial Sequence
  Synthetic
ctctcctucaactggtaugaagaca

SEQ ID NO: 44594 - DNA, 25 bp, Artificial Sequence
  Synthetic
caggctacucacctcttgaattcut

SEQ ID NO: 44595 - DNA, 27 bp, Artificial Sequence
  Synthetic
tgttttactgucaattacagctuccca

SEQ ID NO: 44596 - DNA, 21 bp, Artificial Sequence
  Synthetic
gccuggagctttugcaaggat

SEQ ID NO: 44597 - DNA, 26 bp, Artificial Sequence
  Synthetic
cctacagtggauagaagacactcugt

SEQ ID NO: 44598 - DNA, 20 bp, Artificial Sequence
  Synthetic
ctttctcaggcugggtgcut

SEQ ID NO: 44599 - DNA, 28 bp, Artificial Sequence
  Synthetic
ttcaacacccugttctttctcttatuca

SEQ ID NO: 44600 - DNA, 21 bp, Artificial Sequence
  Synthetic
ccggagggugtccatgaatug

SEQ ID NO: 44601 - DNA, 24 bp, Artificial Sequence
  Synthetic
ctgggugacagagcgagauaaaaa

SEQ ID NO: 44602 - DNA, 22 bp, Artificial Sequence
  Synthetic
cacucccacccuaagatcttuc

SEQ ID NO: 44603 - DNA, 26 bp, Artificial Sequence
  Synthetic
agcaccacugaactttctctctttut

SEQ ID NO: 44604 - DNA, 23 bp, Artificial Sequence
  Synthetic
guccagttctuccagagcaaaag

SEQ ID NO: 44605 - DNA, 29 bp, Artificial Sequence
  Synthetic
ccccaacuaagggcttatgtgtaatuaaa

SEQ ID NO: 44606 - DNA, 32 bp, Artificial Sequence; identical to SEQ ID NO: 32372
  Synthetic

SEQ ID NO: 44607 - DNA, 26 bp, Artificial Sequence
  Synthetic
ccaacaaggacagutgauacaaaaca

SEQ ID NO: 44608 - DNA, 27 bp, Artificial Sequence
  Synthetic
aaaagctctatctuccctagtgtggua

SEQ ID NO: 44609 - DNA, 22 bp, Artificial Sequence
  Synthetic
gagtacagugccaugagagacc

SEQ ID NO: 44610 - DNA, 27 bp, Artificial Sequence
  Synthetic
cagaatatggguaaagatgauccgaca

SEQ ID NO: 44611 - DNA, 24 bp, Artificial Sequence
  Synthetic
accctgautactggttuccaacag

SEQ ID NO: 44612 - DNA, 22 bp, Artificial Sequence
  Synthetic
ctgucaaagagggagutggaug

SEQ ID NO: 44613 - DNA, 22 bp, Artificial Sequence
  Synthetic
ccctuccccacacagttcaaug

SEQ ID NO: 44614 - DNA, 26 bp, Artificial Sequence
  Synthetic
ggagggauacagcttttctttcauct

SEQ ID NO: 44615 - DNA, 26 bp, Artificial Sequence
  Synthetic
tttgcttccaguccctaatcacuaac

SEQ ID NO: 44616 - DNA, 24 bp, Artificial Sequence
  Synthetic
tgtgtgtttguctgcctgtctuaa

SEQ ID NO: 44617 - DNA, 22 bp, Artificial Sequence
  Synthetic
gctttcctugccttctcaaugg

SEQ ID NO: 44618 - DNA, 25 bp, Artificial Sequence
  Synthetic
gcttgccutaatgttccauacagga

SEQ ID NO: 44619 - DNA, 22 bp, Artificial Sequence
  Synthetic
gutccctctucacagcacgaat

SEQ ID NO: 44620 - DNA, 27 bp, Artificial Sequence
  Synthetic
acacattctgutttctatgacuccaat

SEQ ID NO: 44621 - DNA, 23 bp, Artificial Sequence
  Synthetic
gtcccaccacucaattucaggaa

SEQ ID NO: 44622 - DNA, 26 bp, Artificial Sequence
  Synthetic
tctcttagaaucatctcuacccgcat

SEQ ID NO: 44623 - DNA, 25 bp, Artificial Sequence
  Synthetic
ctgctcuagagacttgatucaggaa

SEQ ID NO: 44624 - DNA, 28 bp, Artificial Sequence
  Synthetic
gcacagaaggaacuacaagaaaaaguca

SEQ ID NO: 44625 - DNA, 28 bp, Artificial Sequence
  Synthetic
aggattaaagacauaaacttgccacuct

SEQ ID NO: 44626 - DNA, 22 bp, Artificial Sequence
  Synthetic
agccctgccuctgatctucaat

SEQ ID NO: 44627 - DNA, 20 bp, Artificial Sequence
  Synthetic
ggcccaguatggacaccuac

SEQ ID NO: 44628 - DNA, 26 bp, Artificial Sequence
  Synthetic
ggttctttcuaccccatcatctucca

SEQ ID NO: 44629 - DNA, 22 bp, Artificial Sequence
  Synthetic
ccccctuaatcccctcuaaccc

SEQ ID NO: 44630 - DNA, 33 bp, Artificial Sequence; identical to SEQ ID NO: 32396
  Synthetic

SEQ ID NO: 44631 - DNA, 21 bp, Artificial Sequence
  Synthetic
agtgtucagccccatgcttut

SEQ ID NO: 44632 - DNA, 20 bp, Artificial Sequence
  Synthetic
acgtcgcugtaagcucacac

SEQ ID NO: 44633 - DNA, 24 bp, Artificial Sequence
  Synthetic
caatctcaccuggctactccatuc

SEQ ID NO: 44634 - DNA, 20 bp, Artificial Sequence
  Synthetic
tctucagcccactucccaga

SEQ ID NO: 44635 - DNA, 25 bp, Artificial Sequence
  Synthetic
tgggtgacttcutagatgagggtut

SEQ ID NO: 44636 - DNA, 25 bp, Artificial Sequence
  Synthetic
ggtgatgtcuacaatgatgggacug

SEQ ID NO: 44637 - DNA, 24 bp, Artificial Sequence
  Synthetic
atgtgaccctuacctacactcuct

SEQ ID NO: 44638 - DNA, 21 bp, Artificial Sequence
  Synthetic
cacactctgcucccagaacut

SEQ ID NO: 44639 - DNA, 22 bp, Artificial Sequence
  Synthetic
gtccaggaucagttgctctucc

SEQ ID NO: 44640 - DNA, 20 bp, Artificial Sequence
  Synthetic
cctaggucacgggcaaugaa

SEQ ID NO: 44641 - DNA, 18 bp, Artificial Sequence
  Synthetic
cacccagcuggtctgguc

SEQ ID NO: 44642 - DNA, 21 bp, Artificial Sequence
  Synthetic
tgagtgaccccutcccatuca

SEQ ID NO: 44643 - DNA, 20 bp, Artificial Sequence
  Synthetic
ggaggcuaatggcugaaccg

SEQ ID NO: 44644 - DNA, 29 bp, Artificial Sequence
  Synthetic
aaaaacgaaaagtutcaatggctctaugt

SEQ ID NO: 44645 - DNA, 25 bp, Artificial Sequence
  Synthetic
gatacccttatuccctgtggatguc

SEQ ID NO: 44646 - DNA, 20 bp, Artificial Sequence
  Synthetic
ccatacucagctccauccgt

SEQ ID NO: 44647 - DNA, 23 bp, Artificial Sequence
  Synthetic
cctagcagaugtgtccattcucc

SEQ ID NO: 44648 - DNA, 21 bp, Artificial Sequence
  Synthetic
tgctgatugggagctctcuct

SEQ ID NO: 44649 - DNA, 23 bp, Artificial Sequence
  Synthetic
gctcctagucatcacaugaccca

SEQ ID NO: 44650 - DNA, 22 bp, Artificial Sequence
  Synthetic
ccaccaagucctcatcactcuc

SEQ ID NO: 44651 - DNA, 24 bp, Artificial Sequence
  Synthetic
cactctttauccctggactccuca

SEQ ID NO: 44652 - DNA, 22 bp, Artificial Sequence
  Synthetic
ggtccagcaauttgagucaggt

SEQ ID NO: 44653 - DNA, 24 bp, Artificial Sequence
  Synthetic
gtagatgugagaagggatgctugg

SEQ ID NO: 44654 - DNA, 22 bp, Artificial Sequence
  Synthetic
tccaccccaucagttctctcut

SEQ ID NO: 44655 - DNA, 23 bp, Artificial Sequence
  Synthetic
aattagcaaggucaccaggacuc

SEQ ID NO: 44656 - DNA, 17 bp, Artificial Sequence
  Synthetic
cccctgacucccccugt

SEQ ID NO: 44657 - DNA, 17 bp, Artificial Sequence
  Synthetic
catgguccagcccugct

SEQ ID NO: 44658 - DNA, 22 bp, Artificial Sequence
  Synthetic
gatctgccuccctcctccttua

SEQ ID NO: 44659 - DNA, 24 bp, Artificial Sequence
  Synthetic
gatgtcccggaacuctttacucac

SEQ ID NO: 44660 - DNA, 21 bp, Artificial Sequence
  Synthetic
ggctcccugacaatctccauc

SEQ ID NO: 44661 - DNA, 20 bp, Artificial Sequence
  Synthetic
catccaggacuggcacucac

SEQ ID NO: 44662 - DNA, 23 bp, Artificial Sequence
  Synthetic
tctcctgtcuccatccttcacut

SEQ ID NO: 44663 - DNA, 24 bp, Artificial Sequence
  Synthetic
attgtagacaguggaagaggctuc

SEQ ID NO: 44664 - DNA, 25 bp, Artificial Sequence
  Synthetic
tgagaatggctuttcataccctgug

SEQ ID NO: 44665 - DNA, 23 bp, Artificial Sequence
  Synthetic
ctccugaaagcacuaaggcaaag

SEQ ID NO: 44666 - DNA, 23 bp, Artificial Sequence
  Synthetic
cgtuaagcagagaguaacaccuc

SEQ ID NO: 44667 - DNA, 21 bp, Artificial Sequence
  Synthetic
gtgctgcugtcatcctaguca

SEQ ID NO: 44668 - DNA, 24 bp, Artificial Sequence
  Synthetic
tcagagaggaaaacgugttgtgut

SEQ ID NO: 44669 - DNA, 27 bp, Artificial Sequence
  Synthetic
gatggatctucacgtctgtccuaaaaa

SEQ ID NO: 44670 - DNA, 24 bp, Artificial Sequence
  Synthetic
cacctagguctagcagtatugcat

SEQ ID NO: 44671 - DNA, 27 bp, Artificial Sequence
  Synthetic
caguttgaaaaataucaggagcagcac

SEQ ID NO: 44672 - DNA, 30 bp, Artificial Sequence; identical to SEQ ID NO: 32438
  Synthetic

SEQ ID NO: 44673 - DNA, 25 bp, Artificial Sequence
  Synthetic
tgctcacctcutacttgtcctauct

SEQ ID NO: 44674 - DNA, 29 bp, Artificial Sequence
  Synthetic
atcatgattgcuatcaacttcacuaagaa

SEQ ID NO: 44675 - DNA, 22 bp, Artificial Sequence
  Synthetic
aaggagutggcugaggaagaac

SEQ ID NO: 44676 - DNA, 20 bp, Artificial Sequence
  Synthetic
acattccccuctggcccaua

SEQ ID NO: 44677 - DNA, 25 bp, Artificial Sequence
  Synthetic
cacaccatguctcttgtctcugaag

SEQ ID NO: 44678 - DNA, 18 bp, Artificial Sequence
  Synthetic
gggtggcgaucacttguc

SEQ ID NO: 44679 - DNA, 25 bp, Artificial Sequence
  Synthetic
gggagtcucgcaaggataagaaaua

SEQ ID NO: 44680 - DNA, 20 bp, Artificial Sequence
  Synthetic
gggcttgacugttcccaucc

SEQ ID NO: 44681 - DNA, 25 bp, Artificial Sequence
  Synthetic
caaacgtacagcaguctctcttcut

SEQ ID NO: 44682 - DNA, 22 bp, Artificial Sequence
  Synthetic
cctctucccccaacctaucagt

SEQ ID NO: 44683 - DNA, 22 bp, Artificial Sequence
  Synthetic
ctacagtgacaauggcacgtuc

SEQ ID NO: 44684 - DNA, 22 bp, Artificial Sequence
  Synthetic
gttauccaaccccaggatuccc

SEQ ID NO: 44685 - DNA, 23 bp, Artificial Sequence
  Synthetic
atctgatuccccactttgtgcut

SEQ ID NO: 44686 - DNA, 28 bp, Artificial Sequence
  Synthetic
ttcagcaatgttgutactggaaatgtuc

SEQ ID NO: 44687 - DNA, 28 bp, Artificial Sequence
  Synthetic
cctgtctatuacaacaacatgctacuca

SEQ ID NO: 44688 - DNA, 29 bp, Artificial Sequence
  Synthetic
gcatttacaaaucagtcttttccaacuct

SEQ ID NO: 44689 - DNA, 28 bp, Artificial Sequence
  Synthetic
gacttcttcagcautatgacaagagcua

SEQ ID NO: 44690 - DNA, 31 bp, Artificial Sequence; identical to SEQ ID NO: 32456
  Synthetic

SEQ ID NO: 44691 - DNA, 23 bp, Artificial Sequence
  Synthetic
gtcagttatguggctagcagcut

SEQ ID NO: 44692 - DNA, 22 bp, Artificial Sequence
  Synthetic
ggtgcucaccagaatauccact

SEQ ID NO: 44693 - DNA, 28 bp, Artificial Sequence
  Synthetic
gtaaattgttcutgaggaaggtuccaaa

SEQ ID NO: 44694 - DNA, 30 bp, Artificial Sequence; identical to SEQ ID NO: 32460
  Synthetic

SEQ ID NO: 44695 - DNA, 22 bp, Artificial Sequence
  Synthetic
ccctcaaauatggtcccaucct

SEQ ID NO: 44696 - DNA, 28 bp, Artificial Sequence
  Synthetic
aggagtattucctcctctactugagaag

SEQ ID NO: 44697 - DNA, 26 bp, Artificial Sequence
  Synthetic
tccaaagttatugtcactggcatuca

SEQ ID NO: 44698 - DNA, 25 bp, Artificial Sequence
  Synthetic
ctcacugatataaagtugcgagcca

SEQ ID NO: 44699 - DNA, 24 bp, Artificial Sequence
  Synthetic
gccaaaauaaacttccauggccaa

SEQ ID NO: 44700 - DNA, 21 bp, Artificial Sequence
  Synthetic
tcgtugaaacccaugcagaca

SEQ ID NO: 44701 - DNA, 30 bp, Artificial Sequence; identical to SEQ ID NO: 32467
  Synthetic

SEQ ID NO: 44702 - DNA, 23 bp, Artificial Sequence
  Synthetic
ctctcugagacagacagggauca

SEQ ID NO: 44703 - DNA, 26 bp, Artificial Sequence
  Synthetic
gccagaaauaaaccaggaaaaaugcc

SEQ ID NO: 44704 - DNA, 24 bp, Artificial Sequence
  Synthetic
tgutcttgtucagacacagccaat

SEQ ID NO: 44705 - DNA, 23 bp, Artificial Sequence
  Synthetic
aaataccuccatgtuggcaggag

SEQ ID NO: 44706 - DNA, 25 bp, Artificial Sequence
  Synthetic
aggatggaatugatggttactccug

SEQ ID NO: 44707 - DNA, 26 bp, Artificial Sequence
  Synthetic
gctaactacaccauctgtgatucaga

SEQ ID NO: 44708 - DNA, 22 bp, Artificial Sequence
  Synthetic
tgttggucccagccttgttuaa

SEQ ID NO: 44709 - DNA, 20 bp, Artificial Sequence
  Synthetic
cuaagccaaucacccaacgc

SEQ ID NO: 44710 - DNA, 29 bp, Artificial Sequence
  Synthetic
ttactttccagauatagctgtaacugcac

SEQ ID NO: 44711 - DNA, 26 bp, Artificial Sequence
  Synthetic
attggtggaagguattttgtcacuca

SEQ ID NO: 44712 - DNA, 22 bp, Artificial Sequence
  Synthetic
gcaataguaacccctgccaguc

SEQ ID NO: 44713 - DNA, 28 bp, Artificial Sequence
  Synthetic
agaaagtcaagtcauatcccatctccut

SEQ ID NO: 44714 - DNA, 25 bp, Artificial Sequence
  Synthetic
aatgaatgttcutcaaaccctugcc

SEQ ID NO: 44715 - DNA, 26 bp, Artificial Sequence
  Synthetic
aagtgagggaugcatgttccattaut

SEQ ID NO: 44716 - DNA, 22 bp, Artificial Sequence
  Synthetic
ggtcaaaaguggctcagugaca

SEQ ID NO: 44717 - DNA, 23 bp, Artificial Sequence
  Synthetic
ctggtgtugtgggaaaugaacag

SEQ ID NO: 44718 - DNA, 20 bp, Artificial Sequence
  Synthetic
gcaucgcgaaagctccuact

SEQ ID NO: 44719 - DNA, 23 bp, Artificial Sequence
  Synthetic
atgaugagccagaugagatgtuc

SEQ ID NO: 44720 - DNA, 29 bp, Artificial Sequence
  Synthetic
ttttctcctccucctctattttgacatug

SEQ ID NO: 44721 - DNA, 27 bp, Artificial Sequence
  Synthetic
ccagacacggauatattgataagugct

SEQ ID NO: 44722 - DNA, 28 bp, Artificial Sequence
  Synthetic
ctgtatcagtcutcacaaaaccuaggat

SEQ ID NO: 44723 - DNA, 31 bp, Artificial Sequence; identical to SEQ ID NO: 32489
  Synthetic

SEQ ID NO: 44724 - DNA, 25 bp, Artificial Sequence
  Synthetic
aaacagatatguggtttcaccguca

SEQ ID NO: 44725 - DNA, 22 bp, Artificial Sequence
  Synthetic
tgaatccacaccacugaaccuc

SEQ ID NO: 44726 - DNA, 29 bp, Artificial Sequence
  Synthetic
tcaccttctctcautaggtattgcaaaug

SEQ ID NO: 44727 - DNA, 23 bp, Artificial Sequence
  Synthetic
gctgttgccacuttgcaatugaa

SEQ ID NO: 44728 - DNA, 24 bp, Artificial Sequence
  Synthetic
gcaaauggaaguggacaacgaaac

SEQ ID NO: 44729 - DNA, 30 bp, Artificial Sequence; identical to SEQ ID NO: 32495
  Synthetic

SEQ ID NO: 44730 - DNA, 21 bp, Artificial Sequence
  Synthetic
cccugtttgcauggaggaaac

SEQ ID NO: 44731 - DNA, 28 bp, Artificial Sequence
  Synthetic
ttgtctatauccacttcacagtucacac

SEQ ID NO: 44732 - DNA, 28 bp, Artificial Sequence
  Synthetic
cttgaatgagaugaacaagaugaacagc

SEQ ID NO: 44733 - DNA, 25 bp, Artificial Sequence
  Synthetic
tcttccagaaggcuctaatgugact

SEQ ID NO: 44734 - DNA, 23 bp, Artificial Sequence
  Synthetic
cttgctctggutggtcttcatuc

SEQ ID NO: 44735 - DNA, 21 bp, Artificial Sequence
  Synthetic
acaauggccagcaagaggauc

SEQ ID NO: 44736 - DNA, 21 bp, Artificial Sequence
  Synthetic
ccctgcaauggagagacugat

SEQ ID NO: 44737 - DNA, 19 bp, Artificial Sequence
  Synthetic
acaauggtgucgagcggaa

SEQ ID NO: 44738 - DNA, 21 bp, Artificial Sequence
  Synthetic
ggattccuccccaguggagaa

SEQ ID NO: 44739 - DNA, 22 bp, Artificial Sequence
  Synthetic
cctaaaguacagccuggaccac

SEQ ID NO: 44740 - DNA, 23 bp, Artificial Sequence
  Synthetic
cacttgcagguggcataguagag

SEQ ID NO: 44741 - DNA, 21 bp, Artificial Sequence
  Synthetic
cctcctgcugctgttccatut

SEQ ID NO: 44742 - DNA, 22 bp, Artificial Sequence
  Synthetic
cattgagcuaactccgcctuct

SEQ ID NO: 44743 - DNA, 23 bp, Artificial Sequence
  Synthetic
ccagatcuccctcttuccacaaa

SEQ ID NO: 44744 - DNA, 23 bp, Artificial Sequence
  Synthetic
tgtaccactcuccaccatgguaa

SEQ ID NO: 44745 - DNA, 19 bp, Artificial Sequence
  Synthetic
gctccccaacguggactug

SEQ ID NO: 44746 - DNA, 22 bp, Artificial Sequence
  Synthetic
gctgaugcactgaacaugggaa

SEQ ID NO: 44747 - DNA, 20 bp, Artificial Sequence
  Synthetic
atuagggcagucgaggaauc

SEQ ID NO: 44748 - DNA, 20 bp, Artificial Sequence
  Synthetic
tcctgtcugcctcctccuac

SEQ ID NO: 44749 - DNA, 22 bp, Artificial Sequence
  Synthetic
agatggctugcaccccaatauc

SEQ ID NO: 44750 - DNA, 20 bp, Artificial Sequence
  Synthetic
gtcccugagctgguccaaaa

SEQ ID NO: 44751 - DNA, 17 bp, Artificial Sequence
  Synthetic
ccacccccuctcccucc

SEQ ID NO: 44752 - DNA, 23 bp, Artificial Sequence
  Synthetic
gaagcttcugtcaagactcucca

SEQ ID NO: 44753 - DNA, 23 bp, Artificial Sequence
  Synthetic
agtgtaagcucctctcccttcuc

SEQ ID NO: 44754 - DNA, 19 bp, Artificial Sequence
  Synthetic
ctgcugagaactgcucgga

SEQ ID NO: 44755 - DNA, 21 bp, Artificial Sequence
  Synthetic
cacccttgcutccagaccuat

SEQ ID NO: 44756 - DNA, 18 bp, Artificial Sequence
  Synthetic
gcctgaugccttgucgca

SEQ ID NO: 44757 - DNA, 23 bp, Artificial Sequence
  Synthetic
tgtagaaagagccucaggucaga

SEQ ID NO: 44758 - DNA, 20 bp, Artificial Sequence
  Synthetic
cggaccacccucacttcgua

SEQ ID NO: 44759 - DNA, 18 bp, Artificial Sequence
  Synthetic
ggacaugccgtgugacga

SEQ ID NO: 44760 - DNA, 20 bp, Artificial Sequence
  Synthetic
gggcauaccccctctgtcua

SEQ ID NO: 44761 - DNA, 20 bp, Artificial Sequence
  Synthetic
ggagagcgcugtgacctaug

SEQ ID NO: 44762 - DNA, 21 bp, Artificial Sequence
  Synthetic
agccaagutttcatgcuccct

SEQ ID NO: 44763 - DNA, 20 bp, Artificial Sequence
  Synthetic
aagaactgugagcggtguca

SEQ ID NO: 44764 - DNA, 19 bp, Artificial Sequence
  Synthetic
cacucgacccagacccuac

SEQ ID NO: 44765 - DNA, 26 bp, Artificial Sequence
  Synthetic
gcccttcttugttgattactccugat

SEQ ID NO: 44766 - DNA, 19 bp, Artificial Sequence
  Synthetic
agcauggccgugacagaag

SEQ ID NO: 44767 - DNA, 28 bp, Artificial Sequence
  Synthetic
catatgaaggagacuctatgtgcctcua

SEQ ID NO: 44768 - DNA, 23 bp, Artificial Sequence
  Synthetic
gaacagtgggacaucagggatut

SEQ ID NO: 44769 - DNA, 20 bp, Artificial Sequence
  Synthetic
gatugagcgctccucagact

SEQ ID NO: 44770 - DNA, 22 bp, Artificial Sequence
  Synthetic
gagagacaaggacacugtgcuc

SEQ ID NO: 44771 - DNA, 23 bp, Artificial Sequence
  Synthetic
tggacagtcuctggatgacagut

SEQ ID NO: 44772 - DNA, 20 bp, Artificial Sequence
  Synthetic
ttccuccagtccugggaagt

SEQ ID NO: 44773 - DNA, 21 bp, Artificial Sequence
  Synthetic
tggactgcuccatcacacauc

SEQ ID NO: 44774 - DNA, 22 bp, Artificial Sequence
  Synthetic
gaccuttccuaggacacagcaa

SEQ ID NO: 44775 - DNA, 22 bp, Artificial Sequence
  Synthetic
tcacaugccactugagacaagg

SEQ ID NO: 44776 - DNA, 20 bp, Artificial Sequence
  Synthetic
gcucaaccccggatcugaac

SEQ ID NO: 44777 - DNA, 25 bp, Artificial Sequence
  Synthetic
gtatgttaccugtctttaccugcct

SEQ ID NO: 44778 - DNA, 31 bp, Artificial Sequence; identical to SEQ ID NO: 32544
  Synthetic

SEQ ID NO: 44779 - DNA, 23 bp, Artificial Sequence
  Synthetic
tgacuaaggaacgcaccacatuc

SEQ ID NO: 44780 - DNA, 21 bp, Artificial Sequence
  Synthetic
ggcagcatucggtgaaguaca

SEQ ID NO: 44781 - DNA, 24 bp, Artificial Sequence
  Synthetic
ccagcucatggacatucaagacaa

SEQ ID NO: 44782 - DNA, 24 bp, Artificial Sequence
  Synthetic
tccttgtuaccatggctaugacac

SEQ ID NO: 44783 - DNA, 22 bp, Artificial Sequence
  Synthetic
tggccatttutctgtcccugat

SEQ ID NO: 44784 - DNA, 29 bp, Artificial Sequence
  Synthetic
aacatatgtgtgtutcttgaggaagauga

SEQ ID NO: 44785 - DNA, 28 bp, Artificial Sequence
  Synthetic
ccctatttguaggtgttgaaugaacaag

SEQ ID NO: 44786 - DNA, 19 bp, Artificial Sequence
  Synthetic
ccctccgucggtuaacacg

SEQ ID NO: 44787 - DNA, 23 bp, Artificial Sequence
  Synthetic
cctgcactccutcaaagaggtua

SEQ ID NO: 44788 - DNA, 20 bp, Artificial Sequence
  Synthetic
gatccacucggaagccguac

SEQ ID NO: 44789 - DNA, 27 bp, Artificial Sequence
  Synthetic
gtcttgactcuacgtatccattcucat

SEQ ID NO: 44790 - DNA, 22 bp, Artificial Sequence
  Synthetic
gtgcaggccuctactccaauag

SEQ ID NO: 44791 - DNA, 25 bp, Artificial Sequence
  Synthetic
tttgtaggaggugggatcttggaua

SEQ ID NO: 44792 - DNA, 22 bp, Artificial Sequence
  Synthetic
actgatgtugaccactgctugg

SEQ ID NO: 44793 - DNA, 28 bp, Artificial Sequence
  Synthetic
cttgcttttgacagucttgttgattuct

SEQ ID NO: 44794 - DNA, 26 bp, Artificial Sequence
  Synthetic
agcttccgtuatagattaggacugga

SEQ ID NO: 44795 - DNA, 25 bp, Artificial Sequence
  Synthetic
aagtgacuggacattcauacagacc

SEQ ID NO: 44796 - DNA, 23 bp, Artificial Sequence
  Synthetic
ccaagggcucaggcaauagaaag

SEQ ID NO: 44797 - DNA, 30 bp, Artificial Sequence; identical to SEQ ID NO: 32563
  Synthetic

SEQ ID NO: 44798 - DNA, 22 bp, Artificial Sequence
  Synthetic
gactcaaaauaccccctuggct

SEQ ID NO: 44799 - DNA, 22 bp, Artificial Sequence
  Synthetic
ccuggaaaccuccaagaaaccc

SEQ ID NO: 44800 - DNA, 20 bp, Artificial Sequence
  Synthetic
cctccatucgtgcaggcuac

SEQ ID NO: 44801 - DNA, 23 bp, Artificial Sequence
  Synthetic
agaagtcagcccuccagatctut

SEQ ID NO: 44802 - DNA, 28 bp, Artificial Sequence
  Synthetic
aaagtcacaggaucaaagcuaaaaggat

SEQ ID NO: 44803 - DNA, 23 bp, Artificial Sequence
  Synthetic
aattcagcugggcatacctguag

SEQ ID NO: 44804 - DNA, 21 bp, Artificial Sequence
  Synthetic
ccccaagcutttcccucgaag

SEQ ID NO: 44805 - DNA, 22 bp, Artificial Sequence
  Synthetic
ctctctacacacugacccugga

SEQ ID NO: 44806 - DNA, 24 bp, Artificial Sequence
  Synthetic
ggcatgucagggctcatctattua

SEQ ID NO: 44807 - DNA, 25 bp, Artificial Sequence
  Synthetic
gcaggagaaautttaagccctugga

SEQ ID NO: 44808 - DNA, 28 bp, Artificial Sequence
  Synthetic
gcatgtctgtuacttttctaaaggguct

SEQ ID NO: 44809 - DNA, 22 bp, Artificial Sequence
  Synthetic
acacaaacuctggaagcuccac

SEQ ID NO: 44810 - DNA, 21 bp, Artificial Sequence
  Synthetic
gtgttggagcaguacgcatuc

SEQ ID NO: 44811 - DNA, 25 bp, Artificial Sequence
  Synthetic
tttcaaggaagutgtggagtuagca

SEQ ID NO: 44812 - DNA, 28 bp, Artificial Sequence
  Synthetic
tcaccattttgacaugcttgtatcctua

SEQ ID NO: 44813 - DNA, 31 bp, Artificial Sequence; identical to SEQ ID NO: 32579
  Synthetic

SEQ ID NO: 44814 - DNA, 27 bp, Artificial Sequence
  Synthetic
atttcttctggtgutgacataggtgut

SEQ ID NO: 44815 - DNA, 30 bp, Artificial Sequence; identical to SEQ ID NO: 32581
  Synthetic

SEQ ID NO: 44816 - DNA, 26 bp, Artificial Sequence
  Synthetic
ggaaaagcaaguttccattacgacuc

SEQ ID NO: 44817 - DNA, 25 bp, Artificial Sequence
  Synthetic
gggatggugtgacttttgauacact

SEQ ID NO: 44818 - DNA, 26 bp, Artificial Sequence
  Synthetic
gugacctcatataucaaacacacacc

SEQ ID NO: 44819 - DNA, 22 bp, Artificial Sequence
  Synthetic
agagtaccagaucaggcaggut

SEQ ID NO: 44820 - DNA, 22 bp, Artificial Sequence
  Synthetic
ctgaaccccutttcccagagut

SEQ ID NO: 44821 - DNA, 28 bp, Artificial Sequence
  Synthetic
tcaaatgcagtcauttttctgcttctut

SEQ ID NO: 44822 - DNA, 28 bp, Artificial Sequence
  Synthetic
ttcaagattgtctautttggtccacgua

SEQ ID NO: 44823 - DNA, 27 bp, Artificial Sequence
  Synthetic
tttttctcttuccagatgtgaaccuca

SEQ ID NO: 44824 - DNA, 27 bp, Artificial Sequence
  Synthetic
aacacatttctucaattgatgcctucc

SEQ ID NO: 44825 - DNA, 28 bp, Artificial Sequence
  Synthetic
cacaaaagccuaccctatgtatgtcuaa

SEQ ID NO: 44826 - DNA, 23 bp, Artificial Sequence
  Synthetic
tggcaccgggucattcttttuaa

SEQ ID NO: 44827 - DNA, 27 bp, Artificial Sequence
  Synthetic
actttatagcagccucagttttctucc

SEQ ID NO: 44828 - DNA, 23 bp, Artificial Sequence
  Synthetic
cacagcaaauctggtttccugag

SEQ ID NO: 44829 - DNA, 23 bp, Artificial Sequence
  Synthetic
aatcagttgggauctgcaagaug

SEQ ID NO: 44830 - DNA, 30 bp, Artificial Sequence; identical to SEQ ID NO: 32596
  Synthetic

SEQ ID NO: 44831 - DNA, 28 bp, Artificial Sequence
  Synthetic
gtatccatgcgcuaaaactcaaaagtua

SEQ ID NO: 44832 - DNA, 27 bp, Artificial Sequence
  Synthetic
cattaaatgagautgtcatggcugaga

SEQ ID NO: 44833 - DNA, 24 bp, Artificial Sequence
  Synthetic
cccaaautaccactguggaagaca

SEQ ID NO: 44834 - DNA, 22 bp, Artificial Sequence
  Synthetic
cacttgaagacauagccuggca

SEQ ID NO: 44835 - DNA, 25 bp, Artificial Sequence
  Synthetic
gtgtcatcuggacatctcctucaaa

SEQ ID NO: 44836 - DNA, 30 bp, Artificial Sequence; identical to SEQ ID NO: 32602
  Synthetic

SEQ ID NO: 44837 - DNA, 28 bp, Artificial Sequence
  Synthetic
aagccaaacacagaguattggatcttua

SEQ ID NO: 44838 - DNA, 31 bp, Artificial Sequence; identical to SEQ ID NO: 32604
  Synthetic

SEQ ID NO: 44839 - DNA, 22 bp, Artificial Sequence
  Synthetic
tgtgacaacgutagctggtcut

SEQ ID NO: 44840 - DNA, 27 bp, Artificial Sequence
  Synthetic
actttgaacuattcaacaugcccagaa

SEQ ID NO: 44841 - DNA, 27 bp, Artificial Sequence
  Synthetic
gatgttcctgcutgtcttttgcttuag

SEQ ID NO: 44842 - DNA, 25 bp, Artificial Sequence
  Synthetic
acttagtggaaucacagacaauggg

SEQ ID NO: 44843 - DNA, 21 bp, Artificial Sequence
  Synthetic
gcctgacccucacatcactut

SEQ ID NO: 44844 - DNA, 24 bp, Artificial Sequence
  Synthetic
tcaacacagagucaatccagggua

SEQ ID NO: 44845 - DNA, 27 bp, Artificial Sequence
  Synthetic
gctcttagcccauggacaaaataugaa

SEQ ID NO: 44846 - DNA, 25 bp, Artificial Sequence
  Synthetic
gggtugccaagatataaucacagat

SEQ ID NO: 44847 - DNA, 25 bp, Artificial Sequence
  Synthetic
ctggaaaugtcactaatugcacagt

SEQ ID NO: 44848 - DNA, 27 bp, Artificial Sequence
  Synthetic
cctatgtagaagacauttggctgtgua

SEQ ID NO: 44849 - DNA, 29 bp, Artificial Sequence
  Synthetic
tttcccatacaggutattttccaatccut

SEQ ID NO: 44850 - DNA, 28 bp, Artificial Sequence
  Synthetic
agatagccaacauttgcatagactuacc

SEQ ID NO: 44851 - DNA, 23 bp, Artificial Sequence
  Synthetic
gucatguacaguggagaagagac

SEQ ID NO: 44852 - DNA, 30 bp, Artificial Sequence; identical to SEQ ID NO: 32618
  Synthetic

SEQ ID NO: 44853 - DNA, 24 bp, Artificial Sequence
  Synthetic
actcacagguggaaaatcgaacuc

SEQ ID NO: 44854 - DNA, 21 bp, Artificial Sequence
  Synthetic
tgagucaccgccacttactuc

SEQ ID NO: 44855 - DNA, 23 bp, Artificial Sequence
  Synthetic
ctatcgtgctuacggatttgcuc

SEQ ID NO: 44856 - DNA, 25 bp, Artificial Sequence
  Synthetic
attaagcaccacauataagcugcca

SEQ ID NO: 44857 - DNA, 21 bp, Artificial Sequence
  Synthetic
cugacgaggacauacccgaag

SEQ ID NO: 44858 - DNA, 23 bp, Artificial Sequence
  Synthetic
gggagaagaaguggaaggaaugg

SEQ ID NO: 44859 - DNA, 29 bp, Artificial Sequence
  Synthetic
gtgggattcuggaacgctatgtattauat

SEQ ID NO: 44860 - DNA, 25 bp, Artificial Sequence
  Synthetic
ccagcatgugagagagacaacatut

SEQ ID NO: 44861 - DNA, 29 bp, Artificial Sequence
  Synthetic
gctgagtaaattcutgtttctccctaucc

SEQ ID NO: 44862 - DNA, 24 bp, Artificial Sequence
  Synthetic
gcctcccauccatgtauaaacagt

SEQ ID NO: 44863 - DNA, 27 bp, Artificial Sequence
  Synthetic
tccatgatttatuggtttgggtcugaa

SEQ ID NO: 44864 - DNA, 29 bp, Artificial Sequence
  Synthetic
tgcaaacaaaaaggaagutaataggguct

SEQ ID NO: 44865 - DNA, 28 bp, Artificial Sequence
  Synthetic
ctgttgtcagaggugtaattgagaagua

SEQ ID NO: 44866 - DNA, 24 bp, Artificial Sequence
  Synthetic
gtgtgtgugcacatatgcattuga

SEQ ID NO: 44867 - DNA, 28 bp, Artificial Sequence
  Synthetic
gccagccccucattaatctatatgagua

SEQ ID NO: 44868 - DNA, 23 bp, Artificial Sequence
  Synthetic
atccagautgactcugacagcac

SEQ ID NO: 44869 - DNA, 25 bp, Artificial Sequence
  Synthetic
ctgcagaggacaaaaaugattggua

SEQ ID NO: 44870 - DNA, 21 bp, Artificial Sequence
  Synthetic
actccgaugcatgcttcauca

SEQ ID NO: 44871 - DNA, 30 bp, Artificial Sequence; identical to SEQ ID NO: 32637
  Synthetic

SEQ ID NO: 44872 - DNA, 30 bp, Artificial Sequence; identical to SEQ ID NO: 32638
  Synthetic

SEQ ID NO: 44873 - DNA, 28 bp, Artificial Sequence
  Synthetic
tcctagagttucttagcaccctuacaat

SEQ ID NO: 44874 - DNA, 21 bp, Artificial Sequence
  Synthetic
cctcccagcugttauacacgt

SEQ ID NO: 44875 - DNA, 28 bp, Artificial Sequence
  Synthetic
gcctatttcuttgactttaauggcacat

SEQ ID NO: 44876 - DNA, 27 bp, Artificial Sequence
  Synthetic
acagaaaagtauggcaacaccaacaua

SEQ ID NO: 44877 - DNA, 30 bp, Artificial Sequence; identical to SEQ ID NO: 32643
  Synthetic

SEQ ID NO: 44878 - DNA, 23 bp, Artificial Sequence
  Synthetic
tttacctcaguaccaggcaccua

SEQ ID NO: 44879 - DNA, 25 bp, Artificial Sequence
  Synthetic
tttgctgaucacacttgtctuacca

SEQ ID NO: 44880 - DNA, 27 bp, Artificial Sequence
  Synthetic
cttcgtgtcucctaaataaagcaaugt

SEQ ID NO: 44881 - DNA, 29 bp, Artificial Sequence
  Synthetic
cctatatatcagcuggaaaggagagaguc

SEQ ID NO: 44882 - DNA, 29 bp, Artificial Sequence
  Synthetic
tcatatccatuaaaacttgcttaccugct

SEQ ID NO: 44883 - DNA, 23 bp, Artificial Sequence
  Synthetic
aagctgtugcacactgctaaauc

SEQ ID NO: 44884 - DNA, 22 bp, Artificial Sequence
  Synthetic
tgtccaaaugaagcccuaagcc

SEQ ID NO: 44885 - DNA, 23 bp, Artificial Sequence
  Synthetic
tcaauatctccugggagaagcca

SEQ ID NO: 44886 - DNA, 28 bp, Artificial Sequence
  Synthetic
aatttgaggaaacauttgcatucagagg

SEQ ID NO: 44887 - DNA, 28 bp, Artificial Sequence
  Synthetic
gtagaatcggccaaugaaaatgcatuaa

SEQ ID NO: 44888 - DNA, 22 bp, Artificial Sequence
  Synthetic
gggaatcucagccttggatuct

SEQ ID NO: 44889 - DNA, 23 bp, Artificial Sequence
  Synthetic
cagctaccauctggaatctggut

SEQ ID NO: 44890 - DNA, 28 bp, Artificial Sequence
  Synthetic
acagagtcugagccaataggaatgauat

SEQ ID NO: 44891 - DNA, 29 bp, Artificial Sequence
  Synthetic
ttcaccaacttgugaaatgtaactttgut

SEQ ID NO: 44892 - DNA, 27 bp, Artificial Sequence
  Synthetic
ccatccctgaguaaactgtaaguaagc

SEQ ID NO: 44893 - DNA, 28 bp, Artificial Sequence
  Synthetic
tgctggatatctuacttcagtttgctut

SEQ ID NO: 44894 - DNA, 21 bp, Artificial Sequence
  Synthetic
cacugggaacacaagcaucac

SEQ ID NO: 44895 - DNA, 30 bp, Artificial Sequence; identical to SEQ ID NO: 32661
  Synthetic

SEQ ID NO: 44896 - DNA, 22 bp, Artificial Sequence
  Synthetic
acacacugaccagtcaggcuat

SEQ ID NO: 44897 - DNA, 29 bp, Artificial Sequence
  Synthetic
cttggtagagtatuctgtttttctgtgua

SEQ ID NO: 44898 - DNA, 23 bp, Artificial Sequence
  Synthetic
ggtcaaatugtacctgugaggct

SEQ ID NO: 44899 - DNA, 22 bp, Artificial Sequence
  Synthetic
catcugcaagcccaatgtugaa

SEQ ID NO: 44900 - DNA, 25 bp, Artificial Sequence
  Synthetic
cactgaagtccuttggcttctttut

SEQ ID NO: 44901 - DNA, 27 bp, Artificial Sequence
  Synthetic
gaatgaaatcautttcccatccucacc

SEQ ID NO: 44902 - DNA, 22 bp, Artificial Sequence
  Synthetic
agccatcaggauccaactctug

SEQ ID NO: 44903 - DNA, 31 bp, Artificial Sequence; identical to SEQ ID NO: 32669
  Synthetic

SEQ ID NO: 44904 - DNA, 25 bp, Artificial Sequence
  Synthetic
tgcautgtagauagaagcacacagg

SEQ ID NO: 44905 - DNA, 28 bp, Artificial Sequence
  Synthetic
tcaattguaaaccttgtcaaugcaacag

SEQ ID NO: 44906 - DNA, 26 bp, Artificial Sequence
  Synthetic
aatgtaaagctugaaatctggctugc

SEQ ID NO: 44907 - DNA, 24 bp, Artificial Sequence
  Synthetic
gagttcguaaaagccacgcaaaua

SEQ ID NO: 44908 - DNA, 21 bp, Artificial Sequence
  Synthetic
gaagtcuccaccagccuagag

SEQ ID NO: 44909 - DNA, 24 bp, Artificial Sequence
  Synthetic
aggaattgtggugcttttggaaug

SEQ ID NO: 44910 - DNA, 24 bp, Artificial Sequence
  Synthetic
gacatgaagtutgtgggcattugt

SEQ ID NO: 44911 - DNA, 27 bp, Artificial Sequence
  Synthetic
gataatagagtgucacggttgaaucct

SEQ ID NO: 44912 - DNA, 27 bp, Artificial Sequence
  Synthetic
agtgaattcagcauttatccttucggt

SEQ ID NO: 44913 - DNA, 29 bp, Artificial Sequence
  Synthetic
ggtattgcttgguaaacagagacttctua

SEQ ID NO: 44914 - DNA, 26 bp, Artificial Sequence
  Synthetic
atttctucacaagaattcuccccagt

SEQ ID NO: 44915 - DNA, 24 bp, Artificial Sequence
  Synthetic
tctcttttccggutgcttccuaag

SEQ ID NO: 44916 - DNA, 22 bp, Artificial Sequence
  Synthetic
ctatgggcgutaggaugcagat

SEQ ID NO: 44917 - DNA, 22 bp, Artificial Sequence
  Synthetic
gaaaguttccatcgugccaacc

SEQ ID NO: 44918 - DNA, 24 bp, Artificial Sequence
  Synthetic
ccaatgaaagaacugggcaatuca

SEQ ID NO: 44919 - DNA, 25 bp, Artificial Sequence
  Synthetic
gataccagcagcuactcatgtctuc

SEQ ID NO: 44920 - DNA, 22 bp, Artificial Sequence
  Synthetic
ctcugacagugaggaagaagug

SEQ ID NO: 44921 - DNA, 23 bp, Artificial Sequence
  Synthetic
gcatcagggaaugaatgtcuggt

SEQ ID NO: 44922 - DNA, 22 bp, Artificial Sequence
  Synthetic
agagcugaccctcaaauacgga

SEQ ID NO: 44923 - DNA, 22 bp, Artificial Sequence
  Synthetic
cagguacagugaccaacacagg

SEQ ID NO: 44924 - DNA, 20 bp, Artificial Sequence
  Synthetic
tcctcaacuccgtgcugaac

SEQ ID NO: 44925 - DNA, 24 bp, Artificial Sequence
  Synthetic
gtgtttttcuaaaggcggctgtut

SEQ ID NO: 44926 - DNA, 21 bp, Artificial Sequence
  Synthetic
ggttgggacugaatggtggua

SEQ ID NO: 44927 - DNA, 23 bp, Artificial Sequence
  Synthetic
gcactgaucatgatgagguaggc

SEQ ID NO: 44928 - DNA, 24 bp, Artificial Sequence
  Synthetic
tgacaaggaugtctctgtctucct

SEQ ID NO: 44929 - DNA, 21 bp, Artificial Sequence
  Synthetic
cccagucaactcugaaagcca

SEQ ID NO: 44930 - DNA, 21 bp, Artificial Sequence
  Synthetic
agctttgtuccctgguaacac

SEQ ID NO: 44931 - DNA, 21 bp, Artificial Sequence
  Synthetic
cgtgtgaacaugggcacctua

SEQ ID NO: 44932 - DNA, 21 bp, Artificial Sequence
  Synthetic
gtccucgaacaagctcctgug

SEQ ID NO: 44933 - DNA, 21 bp, Artificial Sequence
  Synthetic
aaagaugagcccgaacgugat

SEQ ID NO: 44934 - DNA, 17 bp, Artificial Sequence
  Synthetic
gtggacggcucggtgut

SEQ ID NO: 44935 - DNA, 22 bp, Artificial Sequence
  Synthetic
gcctgaagaaucccacacucac

SEQ ID NO: 44936 - DNA, 21 bp, Artificial Sequence
  Synthetic
cccccaccuattctuccaagg

SEQ ID NO: 44937 - DNA, 24 bp, Artificial Sequence
  Synthetic
gcttgcugaacaaatctacugggt

SEQ ID NO: 44938 - DNA, 24 bp, Artificial Sequence
  Synthetic
ggatgctaccutttcagctgtcua

SEQ ID NO: 44939 - DNA, 22 bp, Artificial Sequence
  Synthetic
gcccagaggucttcattcucag

SEQ ID NO: 44940 - DNA, 24 bp, Artificial Sequence
  Synthetic
caaauttatgcagttugcaagcca

SEQ ID NO: 44941 - DNA, 25 bp, Artificial Sequence
  Synthetic
tcttcagauacggcagcaaaaucat

SEQ ID NO: 44942 - DNA, 27 bp, Artificial Sequence
  Synthetic
ccattactatuctgttggaccuccaaa

SEQ ID NO: 44943 - DNA, 25 bp, Artificial Sequence
  Synthetic
gttgctgctuggaaactttactuga

SEQ ID NO: 44944 - DNA, 25 bp, Artificial Sequence
  Synthetic
cautgggaaagauggagaaaagcaa

SEQ ID NO: 44945 - DNA, 23 bp, Artificial Sequence
  Synthetic
aaaugtaaccaggucaccagacc

SEQ ID NO: 44946 - DNA, 20 bp, Artificial Sequence
  Synthetic
gaccttuccgagccctctut

SEQ ID NO: 44947 - DNA, 20 bp, Artificial Sequence
  Synthetic
tctaggtgcuctccagggut

SEQ ID NO: 44948 - DNA, 17 bp, Artificial Sequence
  Synthetic
cccagccaugctgugct

SEQ ID NO: 44949 - DNA, 18 bp, Artificial Sequence
  Synthetic
gctucagacccgccagug

SEQ ID NO: 44950 - DNA, 22 bp, Artificial Sequence
  Synthetic
cgaaggugaaccagacacaguc

SEQ ID NO: 44951 - DNA, 25 bp, Artificial Sequence
  Synthetic
gtatactccacaaucctaccugcac

SEQ ID NO: 44952 - DNA, 20 bp, Artificial Sequence
  Synthetic
gguggagggaugccagaaac

SEQ ID NO: 44953 - DNA, 17 bp, Artificial Sequence
  Synthetic
ggccaacgugggcuacc

SEQ ID NO: 44954 - DNA, 23 bp, Artificial Sequence
  Synthetic
ctcattagggcccuctcctctua

SEQ ID NO: 44955 - DNA, 23 bp, Artificial Sequence
  Synthetic
gcacttcgcuttcttttgauccc

SEQ ID NO: 44956 - DNA, 22 bp, Artificial Sequence
  Synthetic
tggtgagatgguccctgagaut

SEQ ID NO: 44957 - DNA, 21 bp, Artificial Sequence
  Synthetic
gctgttucccttgtggauccg

SEQ ID NO: 44958 - DNA, 21 bp, Artificial Sequence
  Synthetic
agggaucagcaggcactgaua

SEQ ID NO: 44959 - DNA, 21 bp, Artificial Sequence
  Synthetic
cgtgtgcacugacacctaugt

SEQ ID NO: 44960 - DNA, 26 bp, Artificial Sequence
  Synthetic
tgcaccacacuttatttaacgcttug

SEQ ID NO: 44961 - DNA, 22 bp, Artificial Sequence
  Synthetic
gacagugaggaccccaaaugag

SEQ ID NO: 44962 - DNA, 24 bp, Artificial Sequence
  Synthetic
aaggaaaguaaaaccctgtgcuca

SEQ ID NO: 44963 - DNA, 18 bp, Artificial Sequence
  Synthetic
cctccugcagaccuccca

SEQ ID NO: 44964 - DNA, 20 bp, Artificial Sequence
  Synthetic
cagagtccccauggagctug

SEQ ID NO: 44965 - DNA, 20 bp, Artificial Sequence
  Synthetic
tgggatacuggcaggaugct

SEQ ID NO: 44966 - DNA, 22 bp, Artificial Sequence
  Synthetic
tgcagttccuttcctgtgtuca

SEQ ID NO: 44967 - DNA, 30 bp, Artificial Sequence; identical to SEQ ID NO: 32733
  Synthetic

SEQ ID NO: 44968 - DNA, 18 bp, Artificial Sequence
  Synthetic
ggtgggcucaggtuggaa

SEQ ID NO: 44969 - DNA, 17 bp, Artificial Sequence
  Synthetic
ggcuccagccggctuac

SEQ ID NO: 44970 - DNA, 23 bp, Artificial Sequence
  Synthetic
cctctggtcuactctctgctcuc

SEQ ID NO: 44971 - DNA, 20 bp, Artificial Sequence
  Synthetic
ctcaccgucaaagacugcac

SEQ ID NO: 44972 - DNA, 20 bp, Artificial Sequence
  Synthetic
gcactctuagcaccccaucc

SEQ ID NO: 44973 - DNA, 23 bp, Artificial Sequence
  Synthetic
gctttgggcaagutttcacucac

SEQ ID NO: 44974 - DNA, 20 bp, Artificial Sequence
  Synthetic
gctgugagaaccuggcacat

SEQ ID NO: 44975 - DNA, 21 bp, Artificial Sequence
  Synthetic
gatttggcucaggtgaugggt

SEQ ID NO: 44976 - DNA, 19 bp, Artificial Sequence
  Synthetic
gaccaccacccuctgtuca

SEQ ID NO: 44977 - DNA, 29 bp, Artificial Sequence
  Synthetic
ggaaaaatacgaucatgactugggaaaaa

SEQ ID NO: 44978 - DNA, 20 bp, Artificial Sequence
  Synthetic
ttgcugaaaccgtgaguacc

SEQ ID NO: 44979 - DNA, 22 bp, Artificial Sequence
  Synthetic
ccttggguagcttgatctugcc

SEQ ID NO: 44980 - DNA, 21 bp, Artificial Sequence
  Synthetic
ctccaggagguggtagaugga

SEQ ID NO: 44981 - DNA, 22 bp, Artificial Sequence
  Synthetic
ccaaatgtcuagaccccaccug

SEQ ID NO: 44982 - DNA, 19 bp, Artificial Sequence
  Synthetic
gggaacugccaagcaauga

SEQ ID NO: 44983 - DNA, 18 bp, Artificial Sequence
  Synthetic
gugaccacaggccucact

SEQ ID NO: 44984 - DNA, 22 bp, Artificial Sequence
  Synthetic
gggatctaacuctctgggcuag

SEQ ID NO: 44985 - DNA, 23 bp, Artificial Sequence
  Synthetic
acacaccctuatcaccccauaga

SEQ ID NO: 44986 - DNA, 22 bp, Artificial Sequence
  Synthetic
cacauggctcuggagaagacat

SEQ ID NO: 44987 - DNA, 21 bp, Artificial Sequence
  Synthetic
cgccaaagauctcgatcucgt

SEQ ID NO: 44988 - DNA, 23 bp, Artificial Sequence
  Synthetic
ctgggtaagggaugctgattcut

SEQ ID NO: 44989 - DNA, 24 bp, Artificial Sequence
  Synthetic
gatctggatauagaccagccucac

SEQ ID NO: 44990 - DNA, 18 bp, Artificial Sequence
  Synthetic
cgcctagugcgcctugat

SEQ ID NO: 44991 - DNA, 21 bp, Artificial Sequence
  Synthetic
ctggctucaccttccctcuac

SEQ ID NO: 44992 - DNA, 24 bp, Artificial Sequence
  Synthetic
cactctcctcautctgtgtgctua

SEQ ID NO: 44993 - DNA, 21 bp, Artificial Sequence
  Synthetic
ggtgcagaugtcaaagtuggg

SEQ ID NO: 44994 - DNA, 19 bp, Artificial Sequence
  Synthetic
ggatucaggccagtgcgut

SEQ ID NO: 44995 - DNA, 22 bp, Artificial Sequence
  Synthetic
ccatcatcuccccttccccuac

SEQ ID NO: 44996 - DNA, 21 bp, Artificial Sequence
  Synthetic
gtcagagagcgcuacctctug

SEQ ID NO: 44997 - DNA, 29 bp, Artificial Sequence
  Synthetic
ggagcccacaaauaagtaaacagtacaua

SEQ ID NO: 44998 - DNA, 25 bp, Artificial Sequence
  Synthetic
cttgtttccttucctttgctgtugt

SEQ ID NO: 44999 - DNA, 24 bp, Artificial Sequence
  Synthetic
gttagggacgucttcgaggattua

SEQ ID NO: 45000 - DNA, 20 bp, Artificial Sequence
  Synthetic
caggagtgcutggtccguat

SEQ ID NO: 45001 - DNA, 24 bp, Artificial Sequence
  Synthetic
ctactaugaactcccugaggcaga

SEQ ID NO: 45002 - DNA, 23 bp, Artificial Sequence
  Synthetic
ggtagtttcgagcucttgtccug

SEQ ID NO: 45003 - DNA, 22 bp, Artificial Sequence
  Synthetic
gtctcaccgaucttttcgucct

SEQ ID NO: 45004 - DNA, 24 bp, Artificial Sequence
  Synthetic
gagtgtcctugaagcatctcauct

SEQ ID NO: 45005 - DNA, 20 bp, Artificial Sequence
  Synthetic
cgagagcccaccauggttug

SEQ ID NO: 45006 - DNA, 20 bp, Artificial Sequence
  Synthetic
ctgttcugtgcccucagcat

SEQ ID NO: 45007 - DNA, 18 bp, Artificial Sequence
  Synthetic
cctgtggcugggcaaguc

SEQ ID NO: 45008 - DNA, 29 bp, Artificial Sequence
  Synthetic
actgtgttggaaaucttaatgagaacuat

SEQ ID NO: 45009 - DNA, 21 bp, Artificial Sequence
  Synthetic
gggaaucggaaggacacugac

SEQ ID NO: 45010 - DNA, 24 bp, Artificial Sequence
  Synthetic
ttggccaaaaacuacctctctgut

SEQ ID NO: 45011 - DNA, 22 bp, Artificial Sequence
  Synthetic
gggcuggaggaagtagactuac

SEQ ID NO: 45012 - DNA, 20 bp, Artificial Sequence
  Synthetic
cagttgaccuccgggatcuc

SEQ ID NO: 45013 - DNA, 21 bp, Artificial Sequence
  Synthetic
cucccccatuagacccagagt

SEQ ID NO: 45014 - DNA, 19 bp, Artificial Sequence
  Synthetic
ctggugaagccctucagct

SEQ ID NO: 45015 - DNA, 23 bp, Artificial Sequence
  Synthetic
gggagaaggaaaugatggaagug

SEQ ID NO: 45016 - DNA, 24 bp, Artificial Sequence
  Synthetic
acccaaaaguaaatgccucaggac

SEQ ID NO: 45017 - DNA, 25 bp, Artificial Sequence
  Synthetic
atcttgatttcugcctgctcttuct

SEQ ID NO: 45018 - DNA, 21 bp, Artificial Sequence
  Synthetic
cccttguaccaagcaccuagc

SEQ ID NO: 45019 - DNA, 23 bp, Artificial Sequence
  Synthetic
tgttgggcacagcauaatagugt

SEQ ID NO: 45020 - DNA, 20 bp, Artificial Sequence
  Synthetic
acctgacccuctaggcugac

SEQ ID NO: 45021 - DNA, 22 bp, Artificial Sequence
  Synthetic
cgtggaugtccttuccagcaat

SEQ ID NO: 45022 - DNA, 24 bp, Artificial Sequence
  Synthetic
gttggagcugagatgttuagagca

SEQ ID NO: 45023 - DNA, 28 bp, Artificial Sequence
  Synthetic
caccagctatttutcttccactttguag

SEQ ID NO: 45024 - DNA, 22 bp, Artificial Sequence
  Synthetic
gctccugacccgtguaaaaagg

SEQ ID NO: 45025 - DNA, 21 bp, Artificial Sequence
  Synthetic
cacttgucagagctgguggag

SEQ ID NO: 45026 - DNA, 22 bp, Artificial Sequence
  Synthetic
ccucaagaagaugcccagcaaa

SEQ ID NO: 45027 - DNA, 21 bp, Artificial Sequence
  Synthetic
gcugagatcgucaccaagacc

SEQ ID NO: 45028 - DNA, 27 bp, Artificial Sequence
  Synthetic
attaaagaatccautctgaggcuacgg

SEQ ID NO: 45029 - DNA, 22 bp, Artificial Sequence
  Synthetic
cgtgttgagguggcttttccut

SEQ ID NO: 45030 - DNA, 20 bp, Artificial Sequence
  Synthetic
cccttgctaugctcccctuc

SEQ ID NO: 45031 - DNA, 21 bp, Artificial Sequence
  Synthetic
actacuctgagcugagccagt

SEQ ID NO: 45032 - DNA, 22 bp, Artificial Sequence
  Synthetic
agacaaugacaggcttctuggg

SEQ ID NO: 45033 - DNA, 24 bp, Artificial Sequence
  Synthetic
gggtgtcacauagatcctgaguga

SEQ ID NO: 45034 - DNA, 20 bp, Artificial Sequence
  Synthetic
gagtgccacaaugcgaaugg

SEQ ID NO: 45035 - DNA, 22 bp, Artificial Sequence
  Synthetic
tgaggtcattutgaggctgtug

SEQ ID NO: 45036 - DNA, 24 bp, Artificial Sequence
  Synthetic
ggaaagtatgucccacttcucagg

SEQ ID NO: 45037 - DNA, 23 bp, Artificial Sequence
  Synthetic
tttggcatcucaggttttccuca

SEQ ID NO: 45038 - DNA, 24 bp, Artificial Sequence
  Synthetic
ccagaggagggauggaaacactua

SEQ ID NO: 45039 - DNA, 29 bp, Artificial Sequence
  Synthetic
cttatatcctucctgtttcttttcuggca

SEQ ID NO: 45040 - DNA, 23 bp, Artificial Sequence
  Synthetic
aatgtaatgaggugctcgtccug

SEQ ID NO: 45041 - DNA, 24 bp, Artificial Sequence
  Synthetic
cactcagtcuacgttgacucacat

SEQ ID NO: 45042 - DNA, 24 bp, Artificial Sequence
  Synthetic
ggccuaggaacaggaagacuacat

SEQ ID NO: 45043 - DNA, 22 bp, Artificial Sequence
  Synthetic
gctttgccuccttcctggauag

SEQ ID NO: 45044 - DNA, 22 bp, Artificial Sequence
  Synthetic
acagcacacagggautgaacug

SEQ ID NO: 45045 - DNA, 23 bp, Artificial Sequence
  Synthetic
gactgttcagugattggtcucct

SEQ ID NO: 45046 - DNA, 20 bp, Artificial Sequence
  Synthetic
gccccaucatgctgcauagg

SEQ ID NO: 45047 - DNA, 25 bp, Artificial Sequence
  Synthetic
gcactggatugagtctaccttcuct

SEQ ID NO: 45048 - DNA, 23 bp, Artificial Sequence
  Synthetic
gggatctcccutgaggtcaucat

SEQ ID NO: 45049 - DNA, 24 bp, Artificial Sequence
  Synthetic
caattcaugggagcctgtcattug

SEQ ID NO: 45050 - DNA, 23 bp, Artificial Sequence
  Synthetic
caggtaguactgtagcuccccat

SEQ ID NO: 45051 - DNA, 28 bp, Artificial Sequence
  Synthetic
gcagatcagagguctagttctgtaaugt

SEQ ID NO: 45052 - DNA, 23 bp, Artificial Sequence
  Synthetic
agcaaacauggcacaaactugac

SEQ ID NO: 45053 - DNA, 22 bp, Artificial Sequence
  Synthetic
cctcatccccggutctttgtuc

SEQ ID NO: 45054 - DNA, 29 bp, Artificial Sequence
  Synthetic
caatcttccccaautattggtgaaucaaa

SEQ ID NO: 45055 - DNA, 28 bp, Artificial Sequence
  Synthetic
gcctcatttgtcuaactgttgaactuct

SEQ ID NO: 45056 - DNA, 22 bp, Artificial Sequence
  Synthetic
gtcaacacguagaaagguggct

SEQ ID NO: 45057 - DNA, 26 bp, Artificial Sequence
  Synthetic
ggtaatttctgucctccaattccgua

SEQ ID NO: 45058 - DNA, 22 bp, Artificial Sequence
  Synthetic
ccaguatcctcugcaggaaagt

SEQ ID NO: 45059 - DNA, 22 bp, Artificial Sequence
  Synthetic
gtgaauaggcgttctcauccct

SEQ ID NO: 45060 - DNA, 27 bp, Artificial Sequence
  Synthetic
tgaaacaaggcuacattttggtcaaug

SEQ ID NO: 45061 - DNA, 24 bp, Artificial Sequence
  Synthetic
cactttauggccaataaacgcugt

SEQ ID NO: 45062 - DNA, 22 bp, Artificial Sequence
  Synthetic
gccgagcaagugagtttuccat

SEQ ID NO: 45063 - DNA, 30 bp, Artificial Sequence; identical to SEQ ID NO: 32829
  Synthetic

SEQ ID NO: 45064 - DNA, 24 bp, Artificial Sequence
  Synthetic
aaaagaaacaagcacutaggcugt

SEQ ID NO: 45065 - DNA, 24 bp, Artificial Sequence
  Synthetic
ttaatggtggugttacctgctcuc

SEQ ID NO: 45066 - DNA, 24 bp, Artificial Sequence
  Synthetic
aaaaugcatcaataucccgagggt

SEQ ID NO: 45067 - DNA, 25 bp, Artificial Sequence
  Synthetic
gtgggctauggattgtcaaguagaa

SEQ ID NO: 45068 - DNA, 27 bp, Artificial Sequence
  Synthetic
ctagagagcutgtttacacuagaaggg

SEQ ID NO: 45069 - DNA, 28 bp, Artificial Sequence
  Synthetic
gccctctttttcuaatccttcattgtut

SEQ ID NO: 45070 - DNA, 21 bp, Artificial Sequence
  Synthetic
ccaggtucactagcacauggt

SEQ ID NO: 45071 - DNA, 29 bp, Artificial Sequence
  Synthetic
cgttctcaatatuggttggttgtttctug

SEQ ID NO: 45072 - DNA, 21 bp, Artificial Sequence
  Synthetic
acctcatagguctcccgaguc

SEQ ID NO: 45073 - DNA, 27 bp, Artificial Sequence
  Synthetic
gttctgccautcaatatcacatugcat

SEQ ID NO: 45074 - DNA, 22 bp, Artificial Sequence
  Synthetic
cgttgagccutgtctcccauac

SEQ ID NO: 45075 - DNA, 22 bp, Artificial Sequence
  Synthetic
cctgctcaugtcaaagctucaa

SEQ ID NO: 45076 - DNA, 17 bp, Artificial Sequence
  Synthetic
gcttggcuccgccacuc

SEQ ID NO: 45077 - DNA, 18 bp, Artificial Sequence
  Synthetic
gggcgcacucacctcuac

SEQ ID NO: 45078 - DNA, 22 bp, Artificial Sequence
  Synthetic
agtgctctcucttcttggccua

SEQ ID NO: 45079 - DNA, 21 bp, Artificial Sequence
  Synthetic
ggataacagcggugtgtgguc

SEQ ID NO: 45080 - DNA, 21 bp, Artificial Sequence
  Synthetic
tgtcgaaucaaagccccuacc

SEQ ID NO: 45081 - DNA, 22 bp, Artificial Sequence
  Synthetic
gtaatugcatgatgugccccaa

SEQ ID NO: 45082 - DNA, 28 bp, Artificial Sequence
  Synthetic
ctatcacagcauatgacaaagaagtuga

SEQ ID NO: 45083 - DNA, 22 bp, Artificial Sequence
  Synthetic
ggactctgguctgtggactuac

SEQ ID NO: 45084 - DNA, 26 bp, Artificial Sequence
  Synthetic
cauagaattgtagugaacagcagcct

SEQ ID NO: 45085 - DNA, 20 bp, Artificial Sequence
  Synthetic
gagcctagccutgctgctua

SEQ ID NO: 45086 - DNA, 24 bp, Artificial Sequence
  Synthetic
cctgacatucccaccaccttacua

SEQ ID NO: 45087 - DNA, 25 bp, Artificial Sequence
  Synthetic
ttcattcaugcaggaaacaccaaug

SEQ ID NO: 45088 - DNA, 22 bp, Artificial Sequence
  Synthetic
tctgtgtgugctttgtggtuct

SEQ ID NO: 45089 - DNA, 26 bp, Artificial Sequence
  Synthetic
tcgtgctcttcuagggtttagactua

SEQ ID NO: 45090 - DNA, 24 bp, Artificial Sequence
  Synthetic
tcaaacccaugactggtctatugg

SEQ ID NO: 45091 - DNA, 26 bp, Artificial Sequence
  Synthetic
gcaaacattttuagctgggagactua

SEQ ID NO: 45092 - DNA, 28 bp, Artificial Sequence
  Synthetic
attatcaagugaaagaaaacacgcugac

SEQ ID NO: 45093 - DNA, 28 bp, Artificial Sequence
  Synthetic
aaactgctacctucttatcccacattut

SEQ ID NO: 45094 - DNA, 24 bp, Artificial Sequence
  Synthetic
ttcctgaccugggtttuagagaac

SEQ ID NO: 45095 - DNA, 23 bp, Artificial Sequence
  Synthetic
actcctgcauttctcggaaguac

SEQ ID NO: 45096 - DNA, 23 bp, Artificial Sequence
  Synthetic
ggcagaaacugcttgcaagttut

SEQ ID NO: 45097 - DNA, 21 bp, Artificial Sequence
  Synthetic
ccaaacccutccaggauagcc

SEQ ID NO: 45098 - DNA, 22 bp, Artificial Sequence
  Synthetic
gctttguggaaaggcttgcauc

SEQ ID NO: 45099 - DNA, 23 bp, Artificial Sequence
  Synthetic
caugcagagtauggaagggagac

SEQ ID NO: 45100 - DNA, 28 bp, Artificial Sequence
  Synthetic
caagcagacgutatttacgtcaauacac

SEQ ID NO: 45101 - DNA, 24 bp, Artificial Sequence
  Synthetic
agtcagatcutcccattccucact

SEQ ID NO: 45102 - DNA, 24 bp, Artificial Sequence
  Synthetic
cgatgaacutttgtttgcugacga

SEQ ID NO: 45103 - DNA, 28 bp, Artificial Sequence
  Synthetic
gacagcttactuaacaacattcatcugg

SEQ ID NO: 45104 - DNA, 23 bp, Artificial Sequence
  Synthetic
gctaagcucagctcattttcugc

SEQ ID NO: 45105 - DNA, 23 bp, Artificial Sequence
  Synthetic
aaaccacctuagggagactcugt

SEQ ID NO: 45106 - DNA, 21 bp, Artificial Sequence
  Synthetic
cctcgauggcactttucacct

SEQ ID NO: 45107 - DNA, 29 bp, Artificial Sequence
  Synthetic
ggacaataattcucatgcatggatttcut

SEQ ID NO: 45108 - DNA, 24 bp, Artificial Sequence
  Synthetic
tgtgttgaugacgatgacagugat

SEQ ID NO: 45109 - DNA, 25 bp, Artificial Sequence
  Synthetic
ccagatggguagttgtgggatttut

SEQ ID NO: 45110 - DNA, 25 bp, Artificial Sequence
  Synthetic
gatgacgtugacgatgaaguagagg

SEQ ID NO: 45111 - DNA, 25 bp, Artificial Sequence
  Synthetic
ttccaaaccucacttcctttcucag

SEQ ID NO: 45112 - DNA, 23 bp, Artificial Sequence
  Synthetic
gctgcagutctgttcaucaaagg

SEQ ID NO: 45113 - DNA, 27 bp, Artificial Sequence
  Synthetic
gccattttccucttttatcccaatugt

SEQ ID NO: 45114 - DNA, 29 bp, Artificial Sequence
  Synthetic
ccagatcttttcugaaggaatgtgaatut

SEQ ID NO: 45115 - DNA, 26 bp, Artificial Sequence
  Synthetic
gtcaatactgaautcccatgcacauc

SEQ ID NO: 45116 - DNA, 29 bp, Artificial Sequence
  Synthetic
ttggtatatatcccugttacccatatuga

SEQ ID NO: 45117 - DNA, 26 bp, Artificial Sequence
  Synthetic
ctctctcccccauaaaaatgatccut

SEQ ID NO: 45118 - DNA, 22 bp, Artificial Sequence
  Synthetic
cctccagcacuttagccucaaa

SEQ ID NO: 45119 - DNA, 23 bp, Artificial Sequence
  Synthetic
acaauagctctagugagccgact

SEQ ID NO: 45120 - DNA, 29 bp, Artificial Sequence
  Synthetic
agtcagatccaaautcattccctaaacuc

SEQ ID NO: 45121 - DNA, 22 bp, Artificial Sequence
  Synthetic
gtgagccuaccccagaaguaac

SEQ ID NO: 45122 - DNA, 27 bp, Artificial Sequence
  Synthetic
ctaaagacuacaccatgttactuggct

SEQ ID NO: 45123 - DNA, 27 bp, Artificial Sequence
  Synthetic
catgacugagatgaaattugcaagcat

SEQ ID NO: 45124 - DNA, 26 bp, Artificial Sequence
  Synthetic
aaggcttctuagagttttctgtgcut

SEQ ID NO: 45125 - DNA, 26 bp, Artificial Sequence
  Synthetic
cgacaguggaaagtacacaatuaagg

SEQ ID NO: 45126 - DNA, 28 bp, Artificial Sequence
  Synthetic
agaaatgttgaagutcttcagatgugga

SEQ ID NO: 45127 - DNA, 28 bp, Artificial Sequence
  Synthetic
cttcatcucacagcctagatcucaaaat

SEQ ID NO: 45128 - DNA, 23 bp, Artificial Sequence
  Synthetic
ccttcatctcugtgactggctug

SEQ ID NO: 45129 - DNA, 28 bp, Artificial Sequence
  Synthetic
tcagaactcatgcugagattaaagcaut

SEQ ID NO: 45130 - DNA, 23 bp, Artificial Sequence
  Synthetic
gaagcttccuctttgagggcuaa

SEQ ID NO: 45131 - DNA, 30 bp, Artificial Sequence; identical to SEQ ID NO: 32897
  Synthetic

SEQ ID NO: 45132 - DNA, 30 bp, Artificial Sequence; identical to SEQ ID NO: 32898
  Synthetic

SEQ ID NO: 45133 - DNA, 25 bp, Artificial Sequence
  Synthetic
aaccaaaagcucctgaaccaattuc

SEQ ID NO: 45134 - DNA, 29 bp, Artificial Sequence
  Synthetic
gccccataaatugtaagttggtttuagac

SEQ ID NO: 45135 - DNA, 24 bp, Artificial Sequence
  Synthetic
cctgtgtggutgaaagcagtguat

SEQ ID NO: 45136 - DNA, 24 bp, Artificial Sequence
  Synthetic
gggtgagaaggutctggagattuc

SEQ ID NO: 45137 - DNA, 23 bp, Artificial Sequence
  Synthetic
gagatctctucagtccaggctuc

SEQ ID NO: 45138 - DNA, 20 bp, Artificial Sequence
  Synthetic
cctcguagacggtcauggac

SEQ ID NO: 45139 - DNA, 24 bp, Artificial Sequence
  Synthetic
atctgagauggaagcttcgtctuc

SEQ ID NO: 45140 - DNA, 22 bp, Artificial Sequence
  Synthetic
cgttgcatagucagaagctucg

SEQ ID NO: 45141 - DNA, 22 bp, Artificial Sequence
  Synthetic
ccatguggccaaaatacacgut

SEQ ID NO: 45142 - DNA, 28 bp, Artificial Sequence
  Synthetic
ctttcatggacucataccuggaaaagat

SEQ ID NO: 45143 - DNA, 23 bp, Artificial Sequence
  Synthetic
cgctccctguctccaacttauat

SEQ ID NO: 45144 - DNA, 24 bp, Artificial Sequence
  Synthetic
ctttgacaugaagtcaagtucgct

SEQ ID NO: 45145 - DNA, 28 bp, Artificial Sequence
  Synthetic
ggaggaaauaagaaaagacutcagguat

SEQ ID NO: 45146 - DNA, 29 bp, Artificial Sequence
  Synthetic
ctctcttcctcugttcttttcattgcuaa

SEQ ID NO: 45147 - DNA, 24 bp, Artificial Sequence
  Synthetic
ggcgtatucctaaactgucccaag

SEQ ID NO: 45148 - DNA, 23 bp, Artificial Sequence
  Synthetic
gggtcgttuctgtacaactcugt

SEQ ID NO: 45149 - DNA, 30 bp, Artificial Sequence; identical to SEQ ID NO: 32915
  Synthetic

SEQ ID NO: 45150 - DNA, 26 bp, Artificial Sequence
  Synthetic
agaatttcagccautctgagggttut

SEQ ID NO: 45151 - DNA, 24 bp, Artificial Sequence
  Synthetic
ggcttggautattatgctcugcac

SEQ ID NO: 45152 - DNA, 23 bp, Artificial Sequence
  Synthetic
gccagtaaccutttgaacauggg

SEQ ID NO: 45153 - DNA, 24 bp, Artificial Sequence
  Synthetic
aggtcagaaaaucaaaccagguga

SEQ ID NO: 45154 - DNA, 23 bp, Artificial Sequence
  Synthetic
tcattgtgtcugttctgcgctua

SEQ ID NO: 45155 - DNA, 27 bp, Artificial Sequence
  Synthetic
gagaacagugagaaatacgaaaucacc

SEQ ID NO: 45156 - DNA, 26 bp, Artificial Sequence
  Synthetic
caatggaugccactttaacttuagca

SEQ ID NO: 45157 - DNA, 22 bp, Artificial Sequence
  Synthetic
gaaatctcgcaugacagcaucg

SEQ ID NO: 45158 - DNA, 21 bp, Artificial Sequence
  Synthetic
agccaggaaugggttgauacc

SEQ ID NO: 45159 - DNA, 30 bp, Artificial Sequence; identical to SEQ ID NO: 32925
  Synthetic

SEQ ID NO: 45160 - DNA, 30 bp, Artificial Sequence; identical to SEQ ID NO: 32926
  Synthetic

SEQ ID NO: 45161 - DNA, 27 bp, Artificial Sequence
  Synthetic
ctcaaagaagacauacatggccaaaut

SEQ ID NO: 45162 - DNA, 25 bp, Artificial Sequence
  Synthetic
gatgctttagucatggagactuccc

SEQ ID NO: 45163 - DNA, 22 bp, Artificial Sequence
  Synthetic
gaaagatggcuccgtguaggac

SEQ ID NO: 45164 - DNA, 21 bp, Artificial Sequence
  Synthetic
ggucaggaacaucagccacat

SEQ ID NO: 45165 - DNA, 23 bp, Artificial Sequence
  Synthetic
ccuggcagaaaggauaagatcuc

SEQ ID NO: 45166 - DNA, 25 bp, Artificial Sequence
  Synthetic
ctccacccccaagutaataacucat

SEQ ID NO: 45167 - DNA, 29 bp, Artificial Sequence
  Synthetic
ggcaaagaaatcautgcagatggatuaaa

SEQ ID NO: 45168 - DNA, 23 bp, Artificial Sequence
  Synthetic
ttcctcttuaaagtgtggugcct

SEQ ID NO: 45169 - DNA, 29 bp, Artificial Sequence
  Synthetic
cgtgagaagaaguagaauaaatggattuc

SEQ ID NO: 45170 - DNA, 28 bp, Artificial Sequence
  Synthetic
tgcaaagauggaactttaccauaggaag

SEQ ID NO: 45171 - DNA, 22 bp, Artificial Sequence
  Synthetic
ggtgtctucagccatctcagug

SEQ ID NO: 45172 - DNA, 27 bp, Artificial Sequence
  Synthetic
gggaaaatacaautgtggtggtttuca

SEQ ID NO: 45173 - DNA, 25 bp, Artificial Sequence
  Synthetic
cgtaagactcaugctgggaaauaca

SEQ ID NO: 45174 - DNA, 21 bp, Artificial Sequence
  Synthetic
ccauggaaccaagtcauggca

SEQ ID NO: 45175 - DNA, 26 bp, Artificial Sequence
  Synthetic
ccaatgaggutggagaaguagaaacc

SEQ ID NO: 45176 - DNA, 23 bp, Artificial Sequence
  Synthetic
ttccggcttugtatgagctctut

SEQ ID NO: 45177 - DNA, 31 bp, Artificial Sequence; identical to SEQ ID NO: 32943
  Synthetic

SEQ ID NO: 45178 - DNA, 27 bp, Artificial Sequence
  Synthetic
gtgaattgcttguccttaatacgtucc

SEQ ID NO: 45179 - DNA, 28 bp, Artificial Sequence
  Synthetic
ccagtaaagcugactcccttttcatuat

SEQ ID NO: 45180 - DNA, 23 bp, Artificial Sequence
  Synthetic
ttgtggtggugatctgagtctug

SEQ ID NO: 45181 - DNA, 28 bp, Artificial Sequence
  Synthetic
gggactgtattcuaatacatgtgtgcut

SEQ ID NO: 45182 - DNA, 26 bp, Artificial Sequence
  Synthetic
tgctgaaacacggaaauggtattcua

SEQ ID NO: 45183 - DNA, 23 bp, Artificial Sequence
  Synthetic
agaagggccacuggaatatgaug

SEQ ID NO: 45184 - DNA, 25 bp, Artificial Sequence
  Synthetic
cagtgtgtguttcagatgtugcaat

SEQ ID NO: 45185 - DNA, 22 bp, Artificial Sequence
  Synthetic
cttagtcccccuaccccaaaug

SEQ ID NO: 45186 - DNA, 23 bp, Artificial Sequence
  Synthetic
ctctcgaatcutggttggagugg

SEQ ID NO: 45187 - DNA, 29 bp, Artificial Sequence
  Synthetic
caactttgcagcaacuttaaccagtauat

SEQ ID NO: 45188 - DNA, 20 bp, Artificial Sequence
  Synthetic
ggagcgguaccgtgtcatug

SEQ ID NO: 45189 - DNA, 23 bp, Artificial Sequence
  Synthetic
tcgtgttaaccuctgtcttgcug

SEQ ID NO: 45190 - DNA, 22 bp, Artificial Sequence
  Synthetic
gatgagcgucacgttgttcuac

SEQ ID NO: 45191 - DNA, 30 bp, Artificial Sequence; identical to SEQ ID NO: 32957
  Synthetic

SEQ ID NO: 45192 - DNA, 26 bp, Artificial Sequence
  Synthetic
gtggtttcacggauggttaattuagc

SEQ ID NO: 45193 - DNA, 26 bp, Artificial Sequence
  Synthetic
aatgcctgattuctttcccatagugt

SEQ ID NO: 45194 - DNA, 25 bp, Artificial Sequence
  Synthetic
gtgctctaggacugtgggtttuaag

SEQ ID NO: 45195 - DNA, 23 bp, Artificial Sequence
  Synthetic
gcatuggagaaccttgugaaaca

SEQ ID NO: 45196 - DNA, 27 bp, Artificial Sequence
  Synthetic
tctcaacgaugtaattgttgacuggag

SEQ ID NO: 45197 - DNA, 27 bp, Artificial Sequence
  Synthetic
tgatcacctctcuagaaaggaactaug

SEQ ID NO: 45198 - DNA, 22 bp, Artificial Sequence
  Synthetic
tgagtagctcucagtggtguca

SEQ ID NO: 45199 - DNA, 26 bp, Artificial Sequence
  Synthetic
tttcttctcacaccugtccatgaaut

SEQ ID NO: 45200 - DNA, 23 bp, Artificial Sequence
  Synthetic
gcaattgatucgctgtatucgct

SEQ ID NO: 45201 - DNA, 28 bp, Artificial Sequence
  Synthetic
ggtactgacatugtaggatatgttcugg

SEQ ID NO: 45202 - DNA, 30 bp, Artificial Sequence; identical to SEQ ID NO: 32968
  Synthetic

SEQ ID NO: 45203 - DNA, 24 bp, Artificial Sequence
  Synthetic
atggagggtugtgattaccagtuc

SEQ ID NO: 45204 - DNA, 26 bp, Artificial Sequence
  Synthetic
tgatttcatugccaccatcagatuca

SEQ ID NO: 45205 - DNA, 23 bp, Artificial Sequence
  Synthetic
gaagggagaaggguagucttauc

SEQ ID NO: 45206 - DNA, 23 bp, Artificial Sequence
  Synthetic
gttcttgaugagcctgguaacga

SEQ ID NO: 45207 - DNA, 24 bp, Artificial Sequence
  Synthetic
ggcttgtcautacacctgttucag

SEQ ID NO: 45208 - DNA, 21 bp, Artificial Sequence
  Synthetic
cagttgcucgtttgccaguat

SEQ ID NO: 45209 - DNA, 29 bp, Artificial Sequence
  Synthetic
ttcattcatatcugttttgcctacugaca

SEQ ID NO: 45210 - DNA, 25 bp, Artificial Sequence
  Synthetic
gctaacacacggaacucataagugt

SEQ ID NO: 45211 - DNA, 28 bp, Artificial Sequence
  Synthetic
agatcaacagtaucactgatttggtcug

SEQ ID NO: 45212 - DNA, 28 bp, Artificial Sequence
  Synthetic
agttctgaactgauattccagtcctuct

SEQ ID NO: 45213 - DNA, 19 bp, Artificial Sequence
  Synthetic
gcgctccuaccagaccuga

SEQ ID NO: 45214 - DNA, 22 bp, Artificial Sequence
  Synthetic
ctggaatugacaagcugccaag

SEQ ID NO: 45215 - DNA, 25 bp, Artificial Sequence
  Synthetic
ccctggaaaauacagctggtgtuaa

SEQ ID NO: 45216 - DNA, 22 bp, Artificial Sequence
  Synthetic
caggacgaccacugattgguac

SEQ ID NO: 45217 - DNA, 26 bp, Artificial Sequence
  Synthetic
gtagagcgtcutgttgagaaaacuga

SEQ ID NO: 45218 - DNA, 23 bp, Artificial Sequence
  Synthetic
tggtcaggtutaagccaagcuaa

SEQ ID NO: 45219 - DNA, 24 bp, Artificial Sequence
  Synthetic
ggcaggttaucagtgaaaaaugca

SEQ ID NO: 45220 - DNA, 22 bp, Artificial Sequence
  Synthetic
gcctggagugtctagcacttuc

SEQ ID NO: 45221 - DNA, 24 bp, Artificial Sequence
  Synthetic
gcaaaccagacuctaacctuagcc

SEQ ID NO: 45222 - DNA, 26 bp, Artificial Sequence
  Synthetic
acaacatgaguctgtttgaagttugc

SEQ ID NO: 45223 - DNA, 22 bp, Artificial Sequence
  Synthetic
acutaggagacuggcacaaggt

SEQ ID NO: 45224 - DNA, 22 bp, Artificial Sequence
  Synthetic
ggttgacgggcuctctacatut

SEQ ID NO: 45225 - DNA, 29 bp, Artificial Sequence
  Synthetic
ggcagtgaaatucaacagtatatcctuga

SEQ ID NO: 45226 - DNA, 26 bp, Artificial Sequence
  Synthetic
acataguaccgcttaguaaaaacgca

SEQ ID NO: 45227 - DNA, 27 bp, Artificial Sequence
  Synthetic
cuacatcatugaaaaaugggaaaccag

SEQ ID NO: 45228 - DNA, 28 bp, Artificial Sequence
  Synthetic
ctagagttagtutctttttccttgucca

SEQ ID NO: 45229 - DNA, 25 bp, Artificial Sequence
  Synthetic
ttggauccaccagcctatttgtuag

SEQ ID NO: 45230 - DNA, 26 bp, Artificial Sequence
  Synthetic
tggtcttcctugtaccaaagcttuaa

SEQ ID NO: 45231 - DNA, 27 bp, Artificial Sequence
  Synthetic
ccttgtgatauggcactacugaaaaat

SEQ ID NO: 45232 - DNA, 23 bp, Artificial Sequence
  Synthetic
tgacgtcaguaaagttgcatcuc

SEQ ID NO: 45233 - DNA, 28 bp, Artificial Sequence
  Synthetic
gacctggttacaaaugtaatgatgcaut

SEQ ID NO: 45234 - DNA, 27 bp, Artificial Sequence
  Synthetic
tcagcatauacacggaattggtaaucc

SEQ ID NO: 45235 - DNA, 24 bp, Artificial Sequence
  Synthetic
cccccaggaaagucagutatauac

SEQ ID NO: 45236 - DNA, 22 bp, Artificial Sequence
  Synthetic
gtcgttcuggcaacactugaac

SEQ ID NO: 45237 - DNA, 27 bp, Artificial Sequence
  Synthetic
gataatgcagtgugtagaattgcaguc

SEQ ID NO: 45238 - DNA, 23 bp, Artificial Sequence
  Synthetic
ctgatggauggtttgggtttucc

SEQ ID NO: 45239 - DNA, 22 bp, Artificial Sequence
  Synthetic
agtcagucctggagtucagagt

SEQ ID NO: 45240 - DNA, 22 bp, Artificial Sequence
  Synthetic
gtccagcugaggatgacagaug

SEQ ID NO: 45241 - DNA, 23 bp, Artificial Sequence
  Synthetic
ccaagagaacauggtctgtcgug

SEQ ID NO: 45242 - DNA, 22 bp, Artificial Sequence
  Synthetic
agctggtgugtcaagcacttua

SEQ ID NO: 45243 - DNA, 28 bp, Artificial Sequence
  Synthetic
ctgtcacauggagaaaagaugagaagaa

SEQ ID NO: 45244 - DNA, 28 bp, Artificial Sequence
  Synthetic
aaaaagagtgatutcctggaagtaugct

SEQ ID NO: 45245 - DNA, 26 bp, Artificial Sequence
  Synthetic
caacctgaaaccuggagtcaatuact

SEQ ID NO: 45246 - DNA, 24 bp, Artificial Sequence
  Synthetic
ccatcauagacaggcttacuccag

SEQ ID NO: 45247 - DNA, 22 bp, Artificial Sequence
  Synthetic
gcagcatctucacctgtgtcut

SEQ ID NO: 45248 - DNA, 24 bp, Artificial Sequence
  Synthetic
tttttgtctggugtcacggauagt

SEQ ID NO: 45249 - DNA, 28 bp, Artificial Sequence
  Synthetic
ttgtaccttgtttucccttcctttcuaa

SEQ ID NO: 45250 - DNA, 27 bp, Artificial Sequence
  Synthetic
aattttggtggtugtaatgatgcacuc

SEQ ID NO: 45251 - DNA, 27 bp, Artificial Sequence
  Synthetic
acatcgtgttttgucctttcactgaua

SEQ ID NO: 45252 - DNA, 23 bp, Artificial Sequence
  Synthetic
agcccatggcautccttagttut

SEQ ID NO: 45253 - DNA, 23 bp, Artificial Sequence
  Synthetic
caggtacauctgtgaagcucaga

SEQ ID NO: 45254 - DNA, 25 bp, Artificial Sequence
  Synthetic
aaccaggaaaagguatgcggaaaua

SEQ ID NO: 45255 - DNA, 27 bp, Artificial Sequence
  Synthetic
agcttcaccaaugttactgaaacucaa

SEQ ID NO: 45256 - DNA, 23 bp, Artificial Sequence
  Synthetic
gagaagcagautagcggcactua

SEQ ID NO: 45257 - DNA, 30 bp, Artificial Sequence; identical to SEQ ID NO: 33023
  Synthetic

SEQ ID NO: 45258 - DNA, 26 bp, Artificial Sequence
  Synthetic
actgtttcugtctttcattuccaggt

SEQ ID NO: 45259 - DNA, 28 bp, Artificial Sequence
  Synthetic
ccaacttttcaaagauccaggttttcut

SEQ ID NO: 45260 - DNA, 23 bp, Artificial Sequence
  Synthetic
ttttctgcctugatgcggaatug

SEQ ID NO: 45261 - DNA, 30 bp, Artificial Sequence; identical to SEQ ID NO: 33027
  Synthetic

SEQ ID NO: 45262 - DNA, 27 bp, Artificial Sequence
  Synthetic
caggttctcagcaguaatttcggtaut

SEQ ID NO: 45263 - DNA, 31 bp, Artificial Sequence; identical to SEQ ID NO: 33029
  Synthetic

SEQ ID NO: 45264 - DNA, 22 bp, Artificial Sequence
  Synthetic
gccacugcacattuaacccagt

SEQ ID NO: 45265 - DNA, 28 bp, Artificial Sequence
  Synthetic
gaagagtgcacauttaaaagtgctguaa

SEQ ID NO: 45266 - DNA, 21 bp, Artificial Sequence
  Synthetic
ggagaggcggutacagttgut

SEQ ID NO: 45267 - DNA, 24 bp, Artificial Sequence
  Synthetic
aatgttttgagugctgcttcacug

SEQ ID NO: 45268 - DNA, 23 bp, Artificial Sequence
  Synthetic
ggcttacuccacaagacatuggg

SEQ ID NO: 45269 - DNA, 27 bp, Artificial Sequence
  Synthetic
acaacaggagcugaatatgtttucaga

SEQ ID NO: 45270 - DNA, 21 bp, Artificial Sequence
  Synthetic
cggctuaacccaggcaauagt

SEQ ID NO: 45271 - DNA, 28 bp, Artificial Sequence
  Synthetic
gacttcgggaaggaugtgaatatgaaua

SEQ ID NO: 45272 - DNA, 26 bp, Artificial Sequence
  Synthetic
ttgaccagcaaagugtcatagatuct

SEQ ID NO: 45273 - DNA, 27 bp, Artificial Sequence
  Synthetic
gcatggacaataugtgaaggagagtua

SEQ ID NO: 45274 - DNA, 23 bp, Artificial Sequence
  Synthetic
tggtggaccaggcutatcaagua

SEQ ID NO: 45275 - DNA, 22 bp, Artificial Sequence
  Synthetic
cgacctcugccagtaattucct

SEQ ID NO: 45276 - DNA, 22 bp, Artificial Sequence
  Synthetic
cagtggatucagatggcucact

SEQ ID NO: 45277 - DNA, 27 bp, Artificial Sequence
  Synthetic
agtgtcacutaaatggtcuaaaccaca

SEQ ID NO: 45278 - DNA, 28 bp, Artificial Sequence
  Synthetic
acacgatactcauacatcagtcctucat

SEQ ID NO: 45279 - DNA, 23 bp, Artificial Sequence
  Synthetic
cctggtacucctaaagttgugca

SEQ ID NO: 45280 - DNA, 23 bp, Artificial Sequence
  Synthetic
gatgttctugcaactgcttguga

SEQ ID NO: 45281 - DNA, 31 bp, Artificial Sequence; identical to SEQ ID NO: 33047
  Synthetic

SEQ ID NO: 45282 - DNA, 28 bp, Artificial Sequence
  Synthetic
tctagttgtcuctttaagagtcugacca

SEQ ID NO: 45283 - DNA, 23 bp, Artificial Sequence
  Synthetic
gtcttcaggguagctgcagtuaa

SEQ ID NO: 45284 - DNA, 26 bp, Artificial Sequence
  Synthetic
acttttcactcccuttagtctgcaut

SEQ ID NO: 45285 - DNA, 22 bp, Artificial Sequence
  Synthetic
ctacttccgagucttggctucc

SEQ ID NO: 45286 - DNA, 22 bp, Artificial Sequence
  Synthetic
aataaguggtggtucccaggac

SEQ ID NO: 45287 - DNA, 27 bp, Artificial Sequence
  Synthetic
cagctcattuacaatgttggtgatuga

SEQ ID NO: 45288 - DNA, 23 bp, Artificial Sequence
  Synthetic
cagaacgaccaccuttcugagat

SEQ ID NO: 45289 - DNA, 26 bp, Artificial Sequence
  Synthetic
caacaggatuacaaggaaagcagtuc

SEQ ID NO: 45290 - DNA, 24 bp, Artificial Sequence
  Synthetic
ggagacagaagauctggaagtguc

SEQ ID NO: 45291 - DNA, 24 bp, Artificial Sequence
  Synthetic
gauggaccaagugcaacaagaaaa

SEQ ID NO: 45292 - DNA, 22 bp, Artificial Sequence
  Synthetic
gaggaccuggtggcttauaagg

SEQ ID NO: 45293 - DNA, 21 bp, Artificial Sequence
  Synthetic
gactctctuggacccaggtut

SEQ ID NO: 45294 - DNA, 22 bp, Artificial Sequence
  Synthetic
cctggcctgucaagtaccttua

SEQ ID NO: 45295 - DNA, 29 bp, Artificial Sequence
  Synthetic
ctgatgttgtutggtcaaaagauggaaaa

SEQ ID NO: 45296 - DNA, 24 bp, Artificial Sequence
  Synthetic
ggcaccacuactatcagatggtuc

SEQ ID NO: 45297 - DNA, 23 bp, Artificial Sequence
  Synthetic
actgaaauggaagaaaccugcct

SEQ ID NO: 45298 - DNA, 26 bp, Artificial Sequence
  Synthetic
ccaaugccaacaatatttucagcaga

SEQ ID NO: 45299 - DNA, 24 bp, Artificial Sequence
  Synthetic
gtgaatgauggaggcaccaaaaut

SEQ ID NO: 45300 - DNA, 23 bp, Artificial Sequence
  Synthetic
gggcacttttuccatacctgtut

SEQ ID NO: 45301 - DNA, 26 bp, Artificial Sequence
  Synthetic
tgcagacttugtagtcatatctuggg

SEQ ID NO: 45302 - DNA, 30 bp, Artificial Sequence; identical to SEQ ID NO: 33068
  Synthetic

SEQ ID NO: 45303 - DNA, 28 bp, Artificial Sequence
  Synthetic
acacatataguatccaagcuggagaaga

SEQ ID NO: 45304 - DNA, 29 bp, Artificial Sequence
  Synthetic
attataagcctugacacggaactgataut

SEQ ID NO: 45305 - DNA, 22 bp, Artificial Sequence
  Synthetic
ctuccccaucaggaaaggtuac

SEQ ID NO: 45306 - DNA, 28 bp, Artificial Sequence
  Synthetic
aacttgttttgcugcatttactacucac

SEQ ID NO: 45307 - DNA, 24 bp, Artificial Sequence
  Synthetic
ggaaaacagcaguggatcaaaguc

SEQ ID NO: 45308 - DNA, 24 bp, Artificial Sequence
  Synthetic
gttggacgaccuttgaatggaaug

SEQ ID NO: 45309 - DNA, 30 bp, Artificial Sequence; identical to SEQ ID NO: 33075
  Synthetic

SEQ ID NO: 45310 - DNA, 21 bp, Artificial Sequence
  Synthetic
gttuaccccaggcaagtguga

SEQ ID NO: 45311 - DNA, 23 bp, Artificial Sequence
  Synthetic
gccgcatuacagatttgcgtcua

SEQ ID NO: 45312 - DNA, 28 bp, Artificial Sequence
  Synthetic
gcaatatttgtgacutccaagcttttug

SEQ ID NO: 45313 - DNA, 21 bp, Artificial Sequence
  Synthetic
gagaaaccagucgactugcct

SEQ ID NO: 45314 - DNA, 28 bp, Artificial Sequence
  Synthetic
tggaggtcctgguctatctaatacttut

SEQ ID NO: 45315 - DNA, 30 bp, Artificial Sequence; identical to SEQ ID NO: 33081
  Synthetic

SEQ ID NO: 45316 - DNA, 26 bp, Artificial Sequence
  Synthetic
ttggatccautgaaattctugggagt

SEQ ID NO: 45317 - DNA, 25 bp, Artificial Sequence
  Synthetic
gtagagaaacgugatttgcctgaug

SEQ ID NO: 45318 - DNA, 22 bp, Artificial Sequence
  Synthetic
tcacagggauctctggcuacat

SEQ ID NO: 45319 - DNA, 27 bp, Artificial Sequence
  Synthetic
gutaccaccuggagagaaaagaaagaa

SEQ ID NO: 45320 - DNA, 23 bp, Artificial Sequence
  Synthetic
ggcctggtuctttgtagggauat

SEQ ID NO: 45321 - DNA, 22 bp, Artificial Sequence
  Synthetic
caaccaccacaguatgggaugt

SEQ ID NO: 45322 - DNA, 29 bp, Artificial Sequence
  Synthetic
ccttttggaggaucaggtttatcuagagt

SEQ ID NO: 45323 - DNA, 20 bp, Artificial Sequence
  Synthetic
cuggacgtccuaagccaacc

SEQ ID NO: 45324 - DNA, 27 bp, Artificial Sequence
  Synthetic
aggatcacttcuccccttttcattuac

SEQ ID NO: 45325 - DNA, 23 bp, Artificial Sequence
  Synthetic
gtcaccagaaacagugtctcuct

SEQ ID NO: 45326 - DNA, 24 bp, Artificial Sequence
  Synthetic
ttggagcugatcgatttuccaaga

SEQ ID NO: 45327 - DNA, 26 bp, Artificial Sequence
  Synthetic
tttgttactgugagagttcuggacac

SEQ ID NO: 45328 - DNA, 23 bp, Artificial Sequence
  Synthetic
ctcggattucaccatccacctut

SEQ ID NO: 45329 - DNA, 30 bp, Artificial Sequence; identical to SEQ ID NO: 33095
  Synthetic

SEQ ID NO: 45330 - DNA, 27 bp, Artificial Sequence
  Synthetic
caccaacacucacatcacattttucaa

SEQ ID NO: 45331 - DNA, 24 bp, Artificial Sequence
  Synthetic
gttcagagttuctgctgagaaugc

SEQ ID NO: 45332 - DNA, 23 bp, Artificial Sequence
  Synthetic
cagatgctgguctttcccauaca

SEQ ID NO: 45333 - DNA, 23 bp, Artificial Sequence
  Synthetic
tctcagcugcaaggttacuaagc

SEQ ID NO: 45334 - DNA, 25 bp, Artificial Sequence
  Synthetic
tgtgcattttuctgctgtaacucct

SEQ ID NO: 45335 - DNA, 27 bp, Artificial Sequence
  Synthetic
cacagcucgattagaaauaaagagcac

SEQ ID NO: 45336 - DNA, 23 bp, Artificial Sequence
  Synthetic
tcgtggtggauctacctcatcuc

SEQ ID NO: 45337 - DNA, 27 bp, Artificial Sequence
  Synthetic
tggaagcaagaucactggttatatugt

SEQ ID NO: 45338 - DNA, 22 bp, Artificial Sequence
  Synthetic
ggtcacgagccacauaacatuc

SEQ ID NO: 45339 - DNA, 23 bp, Artificial Sequence
  Synthetic
gccaatcagugatggaggaagua

SEQ ID NO: 45340 - DNA, 25 bp, Artificial Sequence
  Synthetic
tcccatatcugttttcagcugcaat

SEQ ID NO: 45341 - DNA, 26 bp, Artificial Sequence
  Synthetic
ccagttaaaauggatgaagugacagc

SEQ ID NO: 45342 - DNA, 24 bp, Artificial Sequence
  Synthetic
aggcgtcctutattgtcagtagug

SEQ ID NO: 45343 - DNA, 20 bp, Artificial Sequence
  Synthetic
actgagtgugccagtgaucg

SEQ ID NO: 45344 - DNA, 24 bp, Artificial Sequence
  Synthetic
ttggtctgcauctccacaatguag

SEQ ID NO: 45345 - DNA, 28 bp, Artificial Sequence
  Synthetic
cttcaagaaggcugtagctactattuca

SEQ ID NO: 45346 - DNA, 22 bp, Artificial Sequence
  Synthetic
gtcccaugtgagtgugacagat

SEQ ID NO: 45347 - DNA, 24 bp, Artificial Sequence
  Synthetic
agcatcgaauccacaagctctuac

SEQ ID NO: 45348 - DNA, 23 bp, Artificial Sequence
  Synthetic
agutcaatttcuggaggcagcat

SEQ ID NO: 45349 - DNA, 26 bp, Artificial Sequence
  Synthetic
atcactgggtauatggttgagatugc

SEQ ID NO: 45350 - DNA, 24 bp, Artificial Sequence
  Synthetic
agccttgtaaaauggactgguagg

SEQ ID NO: 45351 - DNA, 25 bp, Artificial Sequence
  Synthetic
gattctgatgguggaagtgaaauca

SEQ ID NO: 45352 - DNA, 28 bp, Artificial Sequence
  Synthetic
ccactccatatutatttacagccaugac

SEQ ID NO: 45353 - DNA, 28 bp, Artificial Sequence
  Synthetic
actgaagtgacaucagaaaagtgtguac

SEQ ID NO: 45354 - DNA, 22 bp, Artificial Sequence
  Synthetic
agtcgcugtaagggtauaggca

SEQ ID NO: 45355 - DNA, 29 bp, Artificial Sequence
  Synthetic
cggttatatuaaaagcaggtgaagcatuc

SEQ ID NO: 45356 - DNA, 24 bp, Artificial Sequence
  Synthetic
cgatcacacggaautcataugcag

SEQ ID NO: 45357 - DNA, 26 bp, Artificial Sequence
  Synthetic
cacctggaaaaccaguacctcuaaat

SEQ ID NO: 45358 - DNA, 27 bp, Artificial Sequence
  Synthetic
cacttgatttgaaaaugttgcctggua

SEQ ID NO: 45359 - DNA, 22 bp, Artificial Sequence
  Synthetic
catcagcaugcatagtugccaa

SEQ ID NO: 45360 - DNA, 21 bp, Artificial Sequence
  Synthetic
cagtctgccgcauttccacua

SEQ ID NO: 45361 - DNA, 27 bp, Artificial Sequence
  Synthetic
cctatccatuaacagcaaggaacatug

SEQ ID NO: 45362 - DNA, 22 bp, Artificial Sequence
  Synthetic
cgaccgagcacuggaattucaa

SEQ ID NO: 45363 - DNA, 25 bp, Artificial Sequence
  Synthetic
cgtgaaagggutagaatgtgttgug

SEQ ID NO: 45364 - DNA, 22 bp, Artificial Sequence
  Synthetic
atgttaaggcugtctgguggag

SEQ ID NO: 45365 - DNA, 26 bp, Artificial Sequence
  Synthetic
aatcttatuccacagccaccacuaag

SEQ ID NO: 45366 - DNA, 20 bp, Artificial Sequence
  Synthetic
gcgtguccaagactcugacg

SEQ ID NO: 45367 - DNA, 28 bp, Artificial Sequence
  Synthetic
tggaccaaagauaacatcaaccugaaaa

SEQ ID NO: 45368 - DNA, 21 bp, Artificial Sequence
  Synthetic
gccatcucccgttctacgaut

SEQ ID NO: 45369 - DNA, 23 bp, Artificial Sequence
  Synthetic
ggtggactugaaatcactggcua

SEQ ID NO: 45370 - DNA, 30 bp, Artificial Sequence; identical to SEQ ID NO: 33136
  Synthetic

SEQ ID NO: 45371 - DNA, 22 bp, Artificial Sequence
  Synthetic
cgaattccgugtcagugcagaa

SEQ ID NO: 45372 - DNA, 24 bp, Artificial Sequence
  Synthetic
catcgcaggcutttcttttctcuc

SEQ ID NO: 45373 - DNA, 29 bp, Artificial Sequence
  Synthetic
agggaattgacauggaaacatttauagca

SEQ ID NO: 45374 - DNA, 24 bp, Artificial Sequence
  Synthetic
ccacatgccugcaagactgaauat

SEQ ID NO: 45375 - DNA, 23 bp, Artificial Sequence
  Synthetic
cgaaggtggaacaugtgaaggua

SEQ ID NO: 45376 - DNA, 30 bp, Artificial Sequence; identical to SEQ ID NO: 33142
  Synthetic

SEQ ID NO: 45377 - DNA, 28 bp, Artificial Sequence
  Synthetic
agcctccttccutttctgattaaaaugt

SEQ ID NO: 45378 - DNA, 25 bp, Artificial Sequence
  Synthetic
caaggucagttacaguaaaggcaca

SEQ ID NO: 45379 - DNA, 27 bp, Artificial Sequence
  Synthetic
ctggtatttgttugactggttttgcut

SEQ ID NO: 45380 - DNA, 21 bp, Artificial Sequence
  Synthetic
cttgcccacaccugctaaaut

SEQ ID NO: 45381 - DNA, 27 bp, Artificial Sequence
  Synthetic
cttgatacatcccugggtcttttguag

SEQ ID NO: 45382 - DNA, 30 bp, Artificial Sequence; identical to SEQ ID NO: 33148
  Synthetic

SEQ ID NO: 45383 - DNA, 28 bp, Artificial Sequence
  Synthetic
gaaaaccaccttuagagtaaccagacut

SEQ ID NO: 45384 - DNA, 23 bp, Artificial Sequence
  Synthetic
ggcttctgcugtgacttcaucaa

SEQ ID NO: 45385 - DNA, 26 bp, Artificial Sequence
  Synthetic
gaagatcctcuagcaactgacacuag

SEQ ID NO: 45386 - DNA, 24 bp, Artificial Sequence
  Synthetic
agataagcuagtgagugggacaca

SEQ ID NO: 45387 - DNA, 29 bp, Artificial Sequence
  Synthetic
caacgagttaugaaatccttaagccuaca

SEQ ID NO: 45388 - DNA, 27 bp, Artificial Sequence
  Synthetic
gcaaaggagaaaugataagtguaagcc

SEQ ID NO: 45389 - DNA, 28 bp, Artificial Sequence
  Synthetic
tccaaaacaagcutcagagtagctaaut

SEQ ID NO: 45390 - DNA, 28 bp, Artificial Sequence
  Synthetic
tgaaatagactuaccaagcacttucaca

SEQ ID NO: 45391 - DNA, 28 bp, Artificial Sequence
  Synthetic
ccacctccaaagautacttggtcuaaac

SEQ ID NO: 45392 - DNA, 23 bp, Artificial Sequence
  Synthetic
gccttatgtacuccccctgguaa

SEQ ID NO: 45393 - DNA, 20 bp, Artificial Sequence
  Synthetic
gctgacuccgataacugggt

SEQ ID NO: 45394 - DNA, 24 bp, Artificial Sequence
  Synthetic
ttcatgaaaacutccttccugggt

SEQ ID NO: 45395 - DNA, 28 bp, Artificial Sequence
  Synthetic
gaacatuaaaagcaacaggtctucaaga

SEQ ID NO: 45396 - DNA, 23 bp, Artificial Sequence
  Synthetic
cttccagcugactgtcatgugat

SEQ ID NO: 45397 - DNA, 27 bp, Artificial Sequence
  Synthetic
caaaaacccatauggtaggaacattuc

SEQ ID NO: 45398 - DNA, 21 bp, Artificial Sequence
  Synthetic
gcagagactugagcccagtug

SEQ ID NO: 45399 - DNA, 26 bp, Artificial Sequence
  Synthetic
aggtctccagaccuctactctauact

SEQ ID NO: 45400 - DNA, 27 bp, Artificial Sequence
  Synthetic
gcagtaatggtauagtctcctgagucc

SEQ ID NO: 45401 - DNA, 26 bp, Artificial Sequence
  Synthetic
tgcttggatgcuactgtttttgguaa

SEQ ID NO: 45402 - DNA, 27 bp, Artificial Sequence
  Synthetic
tgaccatcatgaaugctgttacatcut

SEQ ID NO: 45403 - DNA, 22 bp, Artificial Sequence
  Synthetic
ggtgataaaugggtacggugca

SEQ ID NO: 45404 - DNA, 27 bp, Artificial Sequence
  Synthetic
cttagacuccgagatttaaatgugcct

SEQ ID NO: 45405 - DNA, 24 bp, Artificial Sequence
  Synthetic
tgatactcttguccggtcaacuga

SEQ ID NO: 45406 - DNA, 28 bp, Artificial Sequence
  Synthetic
gaagacaaggaagaugtcagtttcuaca

SEQ ID NO: 45407 - DNA, 23 bp, Artificial Sequence
  Synthetic
cggctcuagcttcagucacaaaa

SEQ ID NO: 45408 - DNA, 29 bp, Artificial Sequence
  Synthetic
tttctgagcttcauatttagatggccaut

SEQ ID NO: 45409 - DNA, 22 bp, Artificial Sequence
  Synthetic
atgaagutgtcacauccagcca

SEQ ID NO: 45410 - DNA, 27 bp, Artificial Sequence
  Synthetic
aatttctagagcuagattccucaggga

SEQ ID NO: 45411 - DNA, 27 bp, Artificial Sequence
  Synthetic
tggccuaaaggaaggaaagaaauacaa

SEQ ID NO: 45412 - DNA, 23 bp, Artificial Sequence
  Synthetic
gccatcgautttagcaccuccat

SEQ ID NO: 45413 - DNA, 30 bp, Artificial Sequence; identical to SEQ ID NO: 33179
  Synthetic

SEQ ID NO: 45414 - DNA, 28 bp, Artificial Sequence
  Synthetic
catggaagctugttttcttaacttcugg

SEQ ID NO: 45415 - DNA, 28 bp, Artificial Sequence
  Synthetic
gatgctgaggagacaugtatatctgaut

SEQ ID NO: 45416 - DNA, 22 bp, Artificial Sequence
  Synthetic
ggccatagugtcaaccagauca

SEQ ID NO: 45417 - DNA, 31 bp, Artificial Sequence; identical to SEQ ID NO: 33183
  Synthetic

SEQ ID NO: 45418 - DNA, 23 bp, Artificial Sequence
  Synthetic
attacaccguttccagcctucat

SEQ ID NO: 45419 - DNA, 23 bp, Artificial Sequence
  Synthetic
tttacttucagagccacctgguc

SEQ ID NO: 45420 - DNA, 23 bp, Artificial Sequence
  Synthetic
tcautttctgcctugacacggaa

SEQ ID NO: 45421 - DNA, 26 bp, Artificial Sequence
  Synthetic
gtaagcaaagaagagaugactguggt

SEQ ID NO: 45422 - DNA, 23 bp, Artificial Sequence
  Synthetic
ggaggcccugtgcctattttaut

SEQ ID NO: 45423 - DNA, 25 bp, Artificial Sequence
  Synthetic
ttgttgatgtguccagtgataggug

SEQ ID NO: 45424 - DNA, 23 bp, Artificial Sequence
  Synthetic
ccatcactucgctttgcttuagt

SEQ ID NO: 45425 - DNA, 31 bp, Artificial Sequence; identical to SEQ ID NO: 33191
  Synthetic

SEQ ID NO: 45426 - DNA, 28 bp, Artificial Sequence
  Synthetic
ccatgtagtgaguttctttaatgctucc

SEQ ID NO: 45427 - DNA, 29 bp, Artificial Sequence
  Synthetic
aaacaaaaactcccautctggctatuaac

SEQ ID NO: 45428 - DNA, 23 bp, Artificial Sequence
  Synthetic
cctttctggtutggtttgcgaua

SEQ ID NO: 45429 - DNA, 27 bp, Artificial Sequence
  Synthetic
tgatcatggcaaguatatcatcucagc

SEQ ID NO: 45430 - DNA, 23 bp, Artificial Sequence
  Synthetic
gactcgagcuagaatgcggauag

SEQ ID NO: 45431 - DNA, 23 bp, Artificial Sequence
  Synthetic
attaggcaaugtgccttuagggt

SEQ ID NO: 45432 - DNA, 23 bp, Artificial Sequence
  Synthetic
agctgtttctcugctcttgtcut

SEQ ID NO: 45433 - DNA, 24 bp, Artificial Sequence
  Synthetic
ggtcaacaaaacaccuatcgcuga

SEQ ID NO: 45434 - DNA, 25 bp, Artificial Sequence
  Synthetic
ggagacggaggacuaaatttaugct

SEQ ID NO: 45435 - DNA, 31 bp, Artificial Sequence; identical to SEQ ID NO: 33201
  Synthetic

SEQ ID NO: 45436 - DNA, 25 bp, Artificial Sequence
  Synthetic
gcccaggaacaucaagaacaguaag

SEQ ID NO: 45437 - DNA, 25 bp, Artificial Sequence
  Synthetic
ctgctattauaagaggtgtgccugt

SEQ ID NO: 45438 - DNA, 27 bp, Artificial Sequence
  Synthetic
gaggcacugaaaagtaaacaugaaaaa

SEQ ID NO: 45439 - DNA, 25 bp, Artificial Sequence
  Synthetic
aaagctgaaaacautgtgggtctug

SEQ ID NO: 45440 - DNA, 30 bp, Artificial Sequence; identical to SEQ ID NO: 33206
  Synthetic

SEQ ID NO: 45441 - DNA, 24 bp, Artificial Sequence
  Synthetic
tcacttcgcuaagcatctgaauga

SEQ ID NO: 45442 - DNA, 25 bp, Artificial Sequence
  Synthetic
agacagttttugaaccagctggaut

SEQ ID NO: 45443 - DNA, 26 bp, Artificial Sequence
  Synthetic
aagacttagugccatcaucaaaggag

SEQ ID NO: 45444 - DNA, 31 bp, Artificial Sequence; identical to SEQ ID NO: 33210
  Synthetic

SEQ ID NO: 45445 - DNA, 25 bp, Artificial Sequence
  Synthetic
ccctgagtcaugtcctgaaacuaaa

SEQ ID NO: 45446 - DNA, 26 bp, Artificial Sequence
  Synthetic
ccaattggatcuttagcaaagacugg

SEQ ID NO: 45447 - DNA, 28 bp, Artificial Sequence
  Synthetic
cacaaacuacatccuggaaaagagagaa

SEQ ID NO: 45448 - DNA, 23 bp, Artificial Sequence
  Synthetic
aggaaccccugtaacaaatgtug

SEQ ID NO: 45449 - DNA, 28 bp, Artificial Sequence
  Synthetic
cggatacatgcugaaaatctgtauggaa

SEQ ID NO: 45450 - DNA, 27 bp, Artificial Sequence
  Synthetic
gtctttacccacutccttcttcucaat

SEQ ID NO: 45451 - DNA, 28 bp, Artificial Sequence
  Synthetic
ggcaataacatttugtgccatgatttut

SEQ ID NO: 45452 - DNA, 25 bp, Artificial Sequence
  Synthetic
gttcuccacaaccauacagtattug

SEQ ID NO: 45453 - DNA, 20 bp, Artificial Sequence
  Synthetic
cctcacuggccgttacucag

SEQ ID NO: 45454 - DNA, 30 bp, Artificial Sequence; identical to SEQ ID NO: 33220
  Synthetic

SEQ ID NO: 45455 - DNA, 28 bp, Artificial Sequence
  Synthetic
ggactgagaagutccacaaagtuacaaa

SEQ ID NO: 45456 - DNA, 28 bp, Artificial Sequence
  Synthetic
cttaggaggatuccaagtcaaagtuaca

SEQ ID NO: 45457 - DNA, 31 bp, Artificial Sequence; identical to SEQ ID NO: 33223
  Synthetic

SEQ ID NO: 45458 - DNA, 21 bp, Artificial Sequence
  Synthetic
gcggtcagautcacgctttuc

SEQ ID NO: 45459 - DNA, 30 bp, Artificial Sequence; identical to SEQ ID NO: 33225
  Synthetic

SEQ ID NO: 45460 - DNA, 21 bp, Artificial Sequence
  Synthetic
ggtggcutcttgagguaaggt

SEQ ID NO: 45461 - DNA, 31 bp, Artificial Sequence; identical to SEQ ID NO: 33227
  Synthetic

SEQ ID NO: 45462 - DNA, 26 bp, Artificial Sequence
  Synthetic
cagcaatgttgacugctctaactcua

SEQ ID NO: 45463 - DNA, 26 bp, Artificial Sequence
  Synthetic
tggtgatgctutaggaagccatuaaa

SEQ ID NO: 45464 - DNA, 22 bp, Artificial Sequence
  Synthetic
gcugcaaagagccagtauacgt

SEQ ID NO: 45465 - DNA, 27 bp, Artificial Sequence
  Synthetic
ggtcttattgaaggutccgactaucaa

SEQ ID NO: 45466 - DNA, 23 bp, Artificial Sequence
  Synthetic
agagccuccatcatattcuggct

SEQ ID NO: 45467 - DNA, 28 bp, Artificial Sequence
  Synthetic
agaaacctcutctgtaaguaggagaaca

SEQ ID NO: 45468 - DNA, 24 bp, Artificial Sequence
  Synthetic
cttaggttcacuggagacauggac

SEQ ID NO: 45469 - DNA, 28 bp, Artificial Sequence
  Synthetic
catctgagtgauaaagggttccttctut

SEQ ID NO: 45470 - DNA, 28 bp, Artificial Sequence
  Synthetic
aagtatcatcuaccaccagtttgtugac

SEQ ID NO: 45471 - DNA, 28 bp, Artificial Sequence
  Synthetic
tgctttttgctccuaatgacaactttut

SEQ ID NO: 45472 - DNA, 28 bp, Artificial Sequence
  Synthetic
actaggtctucaacagtaaattgcagut

SEQ ID NO: 45473 - DNA, 26 bp, Artificial Sequence
  Synthetic
tttttacagatccucctgatccucct

SEQ ID NO: 45474 - DNA, 26 bp, Artificial Sequence
  Synthetic
caggcttttccaucaatagtcctcut

SEQ ID NO: 45475 - DNA, 30 bp, Artificial Sequence; identical to SEQ ID NO: 33241
  Synthetic

SEQ ID NO: 45476 - DNA, 27 bp, Artificial Sequence
  Synthetic
ctccagctguacaaagaaaataguagt

SEQ ID NO: 45477 - DNA, 29 bp, Artificial Sequence
  Synthetic
gcaatgaagguaggaaaataaccattcuc

SEQ ID NO: 45478 - DNA, 26 bp, Artificial Sequence
  Synthetic
tactagtaccutgaatatcaguggca

SEQ ID NO: 45479 - DNA, 28 bp, Artificial Sequence
  Synthetic
agcccaaucaaaggatacattguagaaa

SEQ ID NO: 45480 - DNA, 21 bp, Artificial Sequence
  Synthetic
guccccagaaauggaagcaua

SEQ ID NO: 45481 - DNA, 23 bp, Artificial Sequence
  Synthetic
ggaagtcctuattggtcacgugt

SEQ ID NO: 45482 - DNA, 28 bp, Artificial Sequence
  Synthetic
ggcgataaggaucttgaatgactactut

SEQ ID NO: 45483 - DNA, 28 bp, Artificial Sequence
  Synthetic
agtcatcccucccaaaataagttgaaut

SEQ ID NO: 45484 - DNA, 23 bp, Artificial Sequence
  Synthetic
tcctacttgcaucacgtttguca

SEQ ID NO: 45485 - DNA, 31 bp, Artificial Sequence; identical to SEQ ID NO: 33251
  Synthetic

SEQ ID NO: 45486 - DNA, 21 bp, Artificial Sequence
  Synthetic
ggaccgctutgggaatgcuaa

SEQ ID NO: 45487 - DNA, 25 bp, Artificial Sequence
  Synthetic
acuatcaaagtuaaggcaggagagc

SEQ ID NO: 45488 - DNA, 27 bp, Artificial Sequence
  Synthetic
caacttatgggauaaaggcacactgua

SEQ ID NO: 45489 - DNA, 27 bp, Artificial Sequence
  Synthetic
ctttgaaagagtuaacaagcgactcug

SEQ ID NO: 45490 - DNA, 24 bp, Artificial Sequence
  Synthetic
attttgagacugttgggagttuga

SEQ ID NO: 45491 - DNA, 27 bp, Artificial Sequence
  Synthetic
gagggacaagaauataagttccgtgut

SEQ ID NO: 45492 - DNA, 28 bp, Artificial Sequence
  Synthetic
gataaagcctgutatttcacttccucca

SEQ ID NO: 45493 - DNA, 28 bp, Artificial Sequence
  Synthetic
cacaggatttucccaagtgatactauct

SEQ ID NO: 45494 - DNA, 30 bp, Artificial Sequence; identical to SEQ ID NO: 33260
  Synthetic

SEQ ID NO: 45495 - DNA, 27 bp, Artificial Sequence
  Synthetic
ctaatgcaugactgttctcttucaaca

SEQ ID NO: 45496 - DNA, 20 bp, Artificial Sequence
  Synthetic
atugacagcacucacccgaa

SEQ ID NO: 45497 - DNA, 24 bp, Artificial Sequence
  Synthetic
caagagtcacugacacaagctcua

SEQ ID NO: 45498 - DNA, 27 bp, Artificial Sequence
  Synthetic
gacataggugagtccttctaauaagcc

SEQ ID NO: 45499 - DNA, 21 bp, Artificial Sequence
  Synthetic
gaccacctgaugcaccagaua

SEQ ID NO: 45500 - DNA, 27 bp, Artificial Sequence
  Synthetic
tgcaatgtcuaagtgttgaagugacaa

SEQ ID NO: 45501 - DNA, 28 bp, Artificial Sequence
  Synthetic
ccttcccacacaaauttttgattacugt

SEQ ID NO: 45502 - DNA, 23 bp, Artificial Sequence
  Synthetic
gaggcaggacaaauggttctuct

SEQ ID NO: 45503 - DNA, 25 bp, Artificial Sequence
  Synthetic
aggtgatgaaauagcacttgaugca

SEQ ID NO: 45504 - DNA, 22 bp, Artificial Sequence
  Synthetic
gggaaaguggcaactccaugaa

SEQ ID NO: 45505 - DNA, 25 bp, Artificial Sequence
  Synthetic
gaagaaagguggaagagatgcaaug

SEQ ID NO: 45506 - DNA, 22 bp, Artificial Sequence
  Synthetic
gccatagugcatccatguccaa

SEQ ID NO: 45507 - DNA, 21 bp, Artificial Sequence
  Synthetic
cautatgtccuggagcgcaga

SEQ ID NO: 45508 - DNA, 26 bp, Artificial Sequence
  Synthetic
tcctctacatgugaagaatgtcuggt

SEQ ID NO: 45509 - DNA, 29 bp, Artificial Sequence
  Synthetic
ggcaaagaagtuaaagcaagtgatagaut

SEQ ID NO: 45510 - DNA, 27 bp, Artificial Sequence
  Synthetic
cagagtatgucaaaatgcaatgcauga

SEQ ID NO: 45511 - DNA, 28 bp, Artificial Sequence
  Synthetic
ttgttccugacaaagaatatgtccugag

SEQ ID NO: 45512 - DNA, 26 bp, Artificial Sequence
  Synthetic
actggacacauttcaacatggtaucc

SEQ ID NO: 45513 - DNA, 28 bp, Artificial Sequence
  Synthetic
gaagatccaacaaguaagtagtgcugat

SEQ ID NO: 45514 - DNA, 27 bp, Artificial Sequence
  Synthetic
aaaaacacagutaagaattugcagcca

SEQ ID NO: 45515 - DNA, 29 bp, Artificial Sequence
  Synthetic
cctttcctctggutttcctaatcattgut

SEQ ID NO: 45516 - DNA, 21 bp, Artificial Sequence
  Synthetic
ccactgttugccagcctttuc

SEQ ID NO: 45517 - DNA, 22 bp, Artificial Sequence
  Synthetic
gcctgcactutcagactgacua

SEQ ID NO: 45518 - DNA, 24 bp, Artificial Sequence
  Synthetic
agccttatucacagctctaacucg

SEQ ID NO: 45519 - DNA, 22 bp, Artificial Sequence
  Synthetic
ccagaacaugatggaggugcaa

SEQ ID NO: 45520 - DNA, 30 bp, Artificial Sequence; identical to SEQ ID NO: 33286
  Synthetic

SEQ ID NO: 45521 - DNA, 28 bp, Artificial Sequence
  Synthetic
atgatgatacacaugcactttgttccua

SEQ ID NO: 45522 - DNA, 22 bp, Artificial Sequence
  Synthetic
ccatcaucatctggcucacacc

SEQ ID NO: 45523 - DNA, 28 bp, Artificial Sequence
  Synthetic
aaggatgcttatgucaaacttgcattut

SEQ ID NO: 45524 - DNA, 25 bp, Artificial Sequence
  Synthetic
gggattaattuggtggcctugaagt

SEQ ID NO: 45525 - DNA, 25 bp, Artificial Sequence
  Synthetic
ttctgcatcugtaatgccauacaca

SEQ ID NO: 45526 - DNA, 30 bp, Artificial Sequence; identical to SEQ ID NO: 33292
  Synthetic

SEQ ID NO: 45527 - DNA, 27 bp, Artificial Sequence
  Synthetic
cctctgacctuaaatctgcttgaacut

SEQ ID NO: 45528 - DNA, 24 bp, Artificial Sequence
  Synthetic
ccaacaaagcccautttagugact

SEQ ID NO: 45529 - DNA, 26 bp, Artificial Sequence
  Synthetic
catgggauccacctaaaaatgauggt

SEQ ID NO: 45530 - DNA, 22 bp, Artificial Sequence
  Synthetic
gcctugccccataactucaact

SEQ ID NO: 45531 - DNA, 31 bp, Artificial Sequence; identical to SEQ ID NO: 33297
  Synthetic

SEQ ID NO: 45532 - DNA, 25 bp, Artificial Sequence
  Synthetic
ttcccctactcucatttttggcaut

SEQ ID NO: 45533 - DNA, 23 bp, Artificial Sequence
  Synthetic
cagtgactcgugagtgcatttut

SEQ ID NO: 45534 - DNA, 24 bp, Artificial Sequence
  Synthetic
gagaaatgacaagutcggcauagg

SEQ ID NO: 45535 - DNA, 30 bp, Artificial Sequence; identical to SEQ ID NO: 33301
  Synthetic

SEQ ID NO: 45536 - DNA, 27 bp, Artificial Sequence
  Synthetic
cacatacagtuatgtccatgauccaca

SEQ ID NO: 45537 - DNA, 27 bp, Artificial Sequence
  Synthetic
ctgaaagauggaggaagcccaatatua

SEQ ID NO: 45538 - DNA, 28 bp, Artificial Sequence
  Synthetic
ggcctaatatcuggatttcatgcaguaa

SEQ ID NO: 45539 - DNA, 23 bp, Artificial Sequence
  Synthetic
ggatacugccatgactgugagag

SEQ ID NO: 45540 - DNA, 28 bp, Artificial Sequence
  Synthetic
ccacagaagaagaaaauatgagttuggg

SEQ ID NO: 45541 - DNA, 25 bp, Artificial Sequence
  Synthetic
gttgagtacctautccgtgtgagug

SEQ ID NO: 45542 - DNA, 29 bp, Artificial Sequence
  Synthetic
tctttctcttaaugtcacgtcttucaaca

SEQ ID NO: 45543 - DNA, 28 bp, Artificial Sequence
  Synthetic
cacaattuaaaagcaagauagcacacua

SEQ ID NO: 45544 - DNA, 26 bp, Artificial Sequence
  Synthetic
cctttgtctccuttcttggcttcuaa

SEQ ID NO: 45545 - DNA, 28 bp, Artificial Sequence
  Synthetic
agcgttcacatgutatctttctcacuag

SEQ ID NO: 45546 - DNA, 27 bp, Artificial Sequence
  Synthetic
ccttcactcaucatctggtgtttauca

SEQ ID NO: 45547 - DNA, 29 bp, Artificial Sequence
  Synthetic
ttctttccagaaautcctgttgagaucat

SEQ ID NO: 45548 - DNA, 27 bp, Artificial Sequence
  Synthetic
aggagacattggautatcagttagcut

SEQ ID NO: 45549 - DNA, 24 bp, Artificial Sequence
  Synthetic
cacttggaagaucagacagucact

SEQ ID NO: 45550 - DNA, 22 bp, Artificial Sequence
  Synthetic
catcugggaagccacagtctut

SEQ ID NO: 45551 - DNA, 27 bp, Artificial Sequence
  Synthetic
tuttctccttuacaacagaggaagacc

SEQ ID NO: 45552 - DNA, 27 bp, Artificial Sequence
  Synthetic
ctgcactttuaacattttcacctcugt

SEQ ID NO: 45553 - DNA, 28 bp, Artificial Sequence
  Synthetic
caaagccaaauggttcagaaaugaagaa

SEQ ID NO: 45554 - DNA, 29 bp, Artificial Sequence
  Synthetic
catctttcacaacuaggaccctcttttua

SEQ ID NO: 45555 - DNA, 28 bp, Artificial Sequence
  Synthetic
caaagccucaaaaccttgaaatactuga

SEQ ID NO: 45556 - DNA, 26 bp, Artificial Sequence
  Synthetic
ttcctgtttcaaugatctcctcaucc

SEQ ID NO: 45557 - DNA, 28 bp, Artificial Sequence
  Synthetic
ccagcttaacucaatgtggtttttgtut

SEQ ID NO: 45558 - DNA, 30 bp, Artificial Sequence; identical to SEQ ID NO: 33324
  Synthetic

SEQ ID NO: 45559 - DNA, 24 bp, Artificial Sequence
  Synthetic
cttaaggacaccugtgugaaggaa

SEQ ID NO: 45560 - DNA, 28 bp, Artificial Sequence
  Synthetic
aagtgttgtgtugttttgttgttguagt

SEQ ID NO: 45561 - DNA, 27 bp, Artificial Sequence
  Synthetic
aagaagtatgaaautgttgctgauggc

SEQ ID NO: 45562 - DNA, 24 bp, Artificial Sequence
  Synthetic
attgttcaugagcctctgcctuat

SEQ ID NO: 45563 - DNA, 30 bp, Artificial Sequence; identical to SEQ ID NO: 33329
  Synthetic

SEQ ID NO: 45564 - DNA, 30 bp, Artificial Sequence; identical to SEQ ID NO: 33330
  Synthetic

SEQ ID NO: 45565 - DNA, 22 bp, Artificial Sequence
  Synthetic
atgctggcccutcacttttcua

SEQ ID NO: 45566 - DNA, 26 bp, Artificial Sequence
  Synthetic
gctttctttaggautagcatgcgtut

SEQ ID NO: 45567 - DNA, 29 bp, Artificial Sequence
  Synthetic
aaagcttttcacutatactttactugcag

SEQ ID NO: 45568 - DNA, 27 bp, Artificial Sequence
  Synthetic
gaatgtgatcgaaugagttttccctuc

SEQ ID NO: 45569 - DNA, 24 bp, Artificial Sequence
  Synthetic
ttcctcaccccuctcaaagatgua

SEQ ID NO: 45570 - DNA, 29 bp, Artificial Sequence
  Synthetic
tcctttataagcucaaatctgtcaucacc

SEQ ID NO: 45571 - DNA, 25 bp, Artificial Sequence
  Synthetic
cttcatccacugtccacttcttuca

SEQ ID NO: 45572 - DNA, 23 bp, Artificial Sequence
  Synthetic
accaagcaaccccuctcctauat

SEQ ID NO: 45573 - DNA, 30 bp, Artificial Sequence; identical to SEQ ID NO: 33339
  Synthetic

SEQ ID NO: 45574 - DNA, 24 bp, Artificial Sequence
  Synthetic
gcctttatcttuaaggtccgccut

SEQ ID NO: 45575 - DNA, 26 bp, Artificial Sequence
  Synthetic
gcuaaatgtctttuacagaggccgat

SEQ ID NO: 45576 - DNA, 30 bp, Artificial Sequence; identical to SEQ ID NO: 33342
  Synthetic

SEQ ID NO: 45577 - DNA, 27 bp, Artificial Sequence
  Synthetic
tctgaggcattauctatgcttgcatut

SEQ ID NO: 45578 - DNA, 31 bp, Artificial Sequence; identical to SEQ ID NO: 33344
  Synthetic

SEQ ID NO: 45579 - DNA, 27 bp, Artificial Sequence
  Synthetic
tcaactttattucacttccctgugcat

SEQ ID NO: 45580 - DNA, 23 bp, Artificial Sequence
  Synthetic
attgcatuaagggcctgguagag

SEQ ID NO: 45581 - DNA, 30 bp, Artificial Sequence; identical to SEQ ID NO: 33347
  Synthetic

SEQ ID NO: 45582 - DNA, 25 bp, Artificial Sequence
  Synthetic
tcagtttccatugtccaggaatguc

SEQ ID NO: 45583 - DNA, 24 bp, Artificial Sequence
  Synthetic
caaagcatcgutgggttgtcuaaa

SEQ ID NO: 45584 - DNA, 29 bp, Artificial Sequence
  Synthetic
agcaatatcttcuggcatagcattctuaa

SEQ ID NO: 45585 - DNA, 25 bp, Artificial Sequence
  Synthetic
gaagtcattagagautggctgguga

SEQ ID NO: 45586 - DNA, 22 bp, Artificial Sequence
  Synthetic
aatcttgccauccttccuccag

SEQ ID NO: 45587 - DNA, 27 bp, Artificial Sequence
  Synthetic
agtagcaactugcattgtagtttuaca

SEQ ID NO: 45588 - DNA, 23 bp, Artificial Sequence
  Synthetic
gtgtatucaccagcaucggaaag

SEQ ID NO: 45589 - DNA, 31 bp, Artificial Sequence; identical to SEQ ID NO: 33355
  Synthetic

SEQ ID NO: 45590 - DNA, 26 bp, Artificial Sequence
  Synthetic
ttcccctugaatatgaacttuggaaa

SEQ ID NO: 45591 - DNA, 28 bp, Artificial Sequence
  Synthetic
ctcaccctccauggtttactatuaaaca

SEQ ID NO: 45592 - DNA, 29 bp, Artificial Sequence
  Synthetic
tgtgtgtgaauacagaaagaatatgcugt

SEQ ID NO: 45593 - DNA, 28 bp, Artificial Sequence
  Synthetic
tccaagatacgugggcttaattttagut

SEQ ID NO: 45594 - DNA, 27 bp, Artificial Sequence
  Synthetic
tgtaccttttgtuggttcaggaatcut

SEQ ID NO: 45595 - DNA, 33 bp, Artificial Sequence; identical to SEQ ID NO: 33361
  Synthetic

SEQ ID NO: 45596 - DNA, 24 bp, Artificial Sequence
  Synthetic
acttaacgcugacagaatggtuga

SEQ ID NO: 45597 - DNA, 30 bp, Artificial Sequence; identical to SEQ ID NO: 33363
  Synthetic

SEQ ID NO: 45598 - DNA, 27 bp, Artificial Sequence
  Synthetic
ctggatagaaguttgaagcaggcuaat

SEQ ID NO: 45599 - DNA, 32 bp, Artificial Sequence; identical to SEQ ID NO: 33365
  Synthetic

SEQ ID NO: 45600 - DNA, 20 bp, Artificial Sequence
  Synthetic
tgtaccugctggagguggaa

SEQ ID NO: 45601 - DNA, 30 bp, Artificial Sequence; identical to SEQ ID NO: 33367
  Synthetic

SEQ ID NO: 45602 - DNA, 26 bp, Artificial Sequence
  Synthetic
aggtgacttautagacaagggugagt

SEQ ID NO: 45603 - DNA, 29 bp, Artificial Sequence
  Synthetic
gtgatgaatgttuactggtgattgttuct

SEQ ID NO: 45604 - DNA, 29 bp, Artificial Sequence
  Synthetic
tgaaaugtgaaaatcaugaagcagaacag

SEQ ID NO: 45605 - DNA, 28 bp, Artificial Sequence
  Synthetic
gcttttgtcttguttctcaatcttcgut

SEQ ID NO: 45606 - DNA, 19 bp, Artificial Sequence
  Synthetic
gggaggacuttccggttug

SEQ ID NO: 45607 - DNA, 20 bp, Artificial Sequence
  Synthetic
agugccacccacaaaaggua

SEQ ID NO: 45608 - DNA, 28 bp, Artificial Sequence
  Synthetic
gatcatcugaagcctaaaatcagugaca

SEQ ID NO: 45609 - DNA, 29 bp, Artificial Sequence
  Synthetic
ttgagtttaagcgucagaagatctatcuc

SEQ ID NO: 45610 - DNA, 22 bp, Artificial Sequence
  Synthetic
catagccaucttgtggcatuga

SEQ ID NO: 45611 - DNA, 29 bp, Artificial Sequence
  Synthetic
gtgccuaagaaaattgtgguagaagaaaa

SEQ ID NO: 45612 - DNA, 25 bp, Artificial Sequence
  Synthetic
gacatcaaguggaatgcaaactugt

SEQ ID NO: 45613 - DNA, 28 bp, Artificial Sequence
  Synthetic
agtgctccaaaauacttcaagagtucat

SEQ ID NO: 45614 - DNA, 25 bp, Artificial Sequence
  Synthetic
cttccactucttcagccucaaaaac

SEQ ID NO: 45615 - DNA, 26 bp, Artificial Sequence
  Synthetic
agaaatuccggaagaagaagagtucc

SEQ ID NO: 45616 - DNA, 28 bp, Artificial Sequence
  Synthetic
caucaaaaacaaucaagacacagagaca

SEQ ID NO: 45617 - DNA, 29 bp, Artificial Sequence
  Synthetic
ttgaacattcucagctaacuaaaacacct

SEQ ID NO: 45618 - DNA, 25 bp, Artificial Sequence
  Synthetic
tcctctatgcuaggtggttcttcug

SEQ ID NO: 45619 - DNA, 21 bp, Artificial Sequence
  Synthetic
acaagcgtutcgaaggcugag

SEQ ID NO: 45620 - DNA, 24 bp, Artificial Sequence
  Synthetic
actggagaugaacaaaaggauggg

SEQ ID NO: 45621 - DNA, 26 bp, Artificial Sequence
  Synthetic
aggaagttccucccgaagaagaauat

SEQ ID NO: 45622 - DNA, 26 bp, Artificial Sequence
  Synthetic
agaacttccucttcctcagguagaac

SEQ ID NO: 45623 - DNA, 28 bp, Artificial Sequence
  Synthetic
cctttcataagcutcttcattgttguga

SEQ ID NO: 45624 - DNA, 24 bp, Artificial Sequence
  Synthetic
tgcaacatugcaagttcatguacc

SEQ ID NO: 45625 - DNA, 21 bp, Artificial Sequence
  Synthetic
ggccttacautgccagcctua

SEQ ID NO: 45626 - DNA, 23 bp, Artificial Sequence
  Synthetic
gugacacauacacaaggtttuga

SEQ ID NO: 45627 - DNA, 29 bp, Artificial Sequence
  Synthetic
ttctttcctgcaaaauttccaacattcut

SEQ ID NO: 45628 - DNA, 26 bp, Artificial Sequence
  Synthetic
ttcccacaaaagaaguttucacacac

SEQ ID NO: 45629 - DNA, 25 bp, Artificial Sequence
  Synthetic
tgggtggccutttactgacaauaaa

SEQ ID NO: 45630 - DNA, 24 bp, Artificial Sequence
  Synthetic
acucagcaaaaauacagaccauca

SEQ ID NO: 45631 - DNA, 28 bp, Artificial Sequence
  Synthetic
ctagcctugagaaacctgtttcaattut

SEQ ID NO: 45632 - DNA, 25 bp, Artificial Sequence
  Synthetic
tgagtgtgcacauatttagtguggt

SEQ ID NO: 45633 - DNA, 28 bp, Artificial Sequence
  Synthetic
gcttatacccuagaagaagaagctgtut

SEQ ID NO: 45634 - DNA, 29 bp, Artificial Sequence
  Synthetic
agtataggagucagattgggaacuagaag

SEQ ID NO: 45635 - DNA, 28 bp, Artificial Sequence
  Synthetic
acacacatttucagaatcttgcaatuca

SEQ ID NO: 45636 - DNA, 23 bp, Artificial Sequence
  Synthetic
cagcccccauaaccagtgtatut

SEQ ID NO: 45637 - DNA, 30 bp, Artificial Sequence; identical to SEQ ID NO: 33403
  Synthetic

SEQ ID NO: 45638 - DNA, 27 bp, Artificial Sequence
  Synthetic
ggcacacttatuttctggttaatgtut

SEQ ID NO: 45639 - DNA, 29 bp, Artificial Sequence
  Synthetic
acctaatcttuctaaagttccugaagcac

SEQ ID NO: 45640 - DNA, 29 bp, Artificial Sequence
  Synthetic
ggtctguagacaatttgugaaagaaaaca

SEQ ID NO: 45641 - DNA, 28 bp, Artificial Sequence
  Synthetic
cagcaggctgaauttaaatgaaacctua

SEQ ID NO: 45642 - DNA, 28 bp, Artificial Sequence
  Synthetic
cagaccagauggaaaaagcaagaattua

SEQ ID NO: 45643 - DNA, 24 bp, Artificial Sequence
  Synthetic
actgggctucaatgagatcacaut

SEQ ID NO: 45644 - DNA, 26 bp, Artificial Sequence
  Synthetic
gacatgcaautaaagaggctugaagg

SEQ ID NO: 45645 - DNA, 24 bp, Artificial Sequence
  Synthetic
tccacccguctgctttctuaaaaa

SEQ ID NO: 45646 - DNA, 28 bp, Artificial Sequence
  Synthetic
agacaaaggcagcauagtacataugaag

SEQ ID NO: 45647 - DNA, 30 bp, Artificial Sequence; identical to SEQ ID NO: 33413
  Synthetic

SEQ ID NO: 45648 - DNA, 28 bp, Artificial Sequence
  Synthetic
tcgtttcagatutgtgagttactuagca

SEQ ID NO: 45649 - DNA, 29 bp, Artificial Sequence
  Synthetic
gtacctgaagttucaaagaagattgtucc

SEQ ID NO: 45650 - DNA, 22 bp, Artificial Sequence
  Synthetic
gtgcctatuggattgaacugct

SEQ ID NO: 45651 - DNA, 29 bp, Artificial Sequence
  Synthetic
agcatcccttcutattcctgtgttttuat

SEQ ID NO: 45652 - DNA, 22 bp, Artificial Sequence
  Synthetic
tccccttcgucatagccttcut

SEQ ID NO: 45653 - DNA, 26 bp, Artificial Sequence
  Synthetic
cacaaggagaagagagucttcatuga

SEQ ID NO: 45654 - DNA, 29 bp, Artificial Sequence
  Synthetic
agaatagtuagcagaagtgcaaatcucag

SEQ ID NO: 45655 - DNA, 28 bp, Artificial Sequence
  Synthetic
caaacaactaacaaugatgtggaggaut

SEQ ID NO: 45656 - DNA, 22 bp, Artificial Sequence
  Synthetic
tcutgaccacuagagggccaat

SEQ ID NO: 45657 - DNA, 21 bp, Artificial Sequence
  Synthetic
tcctgtggtugctcctccuat

SEQ ID NO: 45658 - DNA, 20 bp, Artificial Sequence
  Synthetic
tgcagtttggucgctgguat

SEQ ID NO: 45659 - DNA, 29 bp, Artificial Sequence
  Synthetic
ctctatgcttatuacatgtcccttuccag

SEQ ID NO: 45660 - DNA, 26 bp, Artificial Sequence
  Synthetic
agaatggtatagguaggctacgtgut

SEQ ID NO: 45661 - DNA, 30 bp, Artificial Sequence; identical to SEQ ID NO: 33427
  Synthetic

SEQ ID NO: 45662 - DNA, 21 bp, Artificial Sequence
  Synthetic
cggccatcautcctgaagtug

SEQ ID NO: 45663 - DNA, 30 bp, Artificial Sequence; identical to SEQ ID NO: 33429
  Synthetic

SEQ ID NO: 45664 - DNA, 22 bp, Artificial Sequence
  Synthetic
ctggtcttcugctcgaacauct

SEQ ID NO: 45665 - DNA, 26 bp, Artificial Sequence
  Synthetic
aaaatgcgtgutgtatcacaugaaca

SEQ ID NO: 45666 - DNA, 28 bp, Artificial Sequence
  Synthetic
cggtcaccaucaatgcttatttcaaaut

SEQ ID NO: 45667 - DNA, 31 bp, Artificial Sequence; identical to SEQ ID NO: 33433
  Synthetic

SEQ ID NO: 45668 - DNA, 28 bp, Artificial Sequence
  Synthetic
tgacgtcatauaactataggattcuggt

SEQ ID NO: 45669 - DNA, 23 bp, Artificial Sequence
  Synthetic
cactgactuccgaggtcttctuc

SEQ ID NO: 45670 - DNA, 21 bp, Artificial Sequence
  Synthetic
gtggaugcggaacccactuat

SEQ ID NO: 45671 - DNA, 27 bp, Artificial Sequence
  Synthetic
acaaaaactgautctgggttauaccga

SEQ ID NO: 45672 - DNA, 24 bp, Artificial Sequence
  Synthetic
agtgcacttacuttctacgacuct

SEQ ID NO: 45673 - DNA, 28 bp, Artificial Sequence
  Synthetic
caacctccuaaggcttatttuacaaagg

SEQ ID NO: 45674 - DNA, 22 bp, Artificial Sequence
  Synthetic
actagcaaagcugaagcugcat

SEQ ID NO: 45675 - DNA, 30 bp, Artificial Sequence; identical to SEQ ID NO: 33441
  Synthetic

SEQ ID NO: 45676 - DNA, 23 bp, Artificial Sequence
  Synthetic
gcatcatuggacactttgcaugt

SEQ ID NO: 45677 - DNA, 23 bp, Artificial Sequence
  Synthetic
ctttcaaactugagggacgtgug

SEQ ID NO: 45678 - DNA, 24 bp, Artificial Sequence
  Synthetic
tcauaaaaacgacacctucaggct

SEQ ID NO: 45679 - DNA, 22 bp, Artificial Sequence
  Synthetic
gaaguggcggaaaguaccagat

SEQ ID NO: 45680 - DNA, 24 bp, Artificial Sequence
  Synthetic
tctggaccaugtcagtttacugaa

SEQ ID NO: 45681 - DNA, 29 bp, Artificial Sequence
  Synthetic
catttttagacaauacagccacacucaat

SEQ ID NO: 45682 - DNA, 24 bp, Artificial Sequence
  Synthetic
aggccuccccagacattttaaauc

SEQ ID NO: 45683 - DNA, 24 bp, Artificial Sequence
  Synthetic
acccacuacgacttacaaaaugca

SEQ ID NO: 45684 - DNA, 23 bp, Artificial Sequence
  Synthetic
ggttcugcagccaagagagauaa

SEQ ID NO: 45685 - DNA, 25 bp, Artificial Sequence
  Synthetic
tgcaggacaauacaactgctacaut

SEQ ID NO: 45686 - DNA, 25 bp, Artificial Sequence
  Synthetic
ccatttttcutccagguaaccgaaa

SEQ ID NO: 45687 - DNA, 29 bp, Artificial Sequence
  Synthetic
tgtcagactgcucttctagatttauacga

SEQ ID NO: 45688 - DNA, 22 bp, Artificial Sequence
  Synthetic
ctccaaagacacgutgcatcug

SEQ ID NO: 45689 - DNA, 31 bp, Artificial Sequence; identical to SEQ ID NO: 33455
  Synthetic

SEQ ID NO: 45690 - DNA, 24 bp, Artificial Sequence
  Synthetic
auttccttcauggaaccaggagac

SEQ ID NO: 45691 - DNA, 28 bp, Artificial Sequence
  Synthetic
tccatcaaaaagacagutctctctucaa

SEQ ID NO: 45692 - DNA, 30 bp, Artificial Sequence; identical to SEQ ID NO: 33458
  Synthetic

SEQ ID NO: 45693 - DNA, 28 bp, Artificial Sequence
  Synthetic
cacactcaccaggauctgtattttctut

SEQ ID NO: 45694 - DNA, 30 bp, Artificial Sequence; identical to SEQ ID NO: 33460
  Synthetic

SEQ ID NO: 45695 - DNA, 24 bp, Artificial Sequence
  Synthetic
ccaggcttucctcctttttcauca

SEQ ID NO: 45696 - DNA, 25 bp, Artificial Sequence
  Synthetic
aggatguggatactggtuaggaagt

SEQ ID NO: 45697 - DNA, 29 bp, Artificial Sequence
  Synthetic
acttacagaatacauccgtattttcctut

SEQ ID NO: 45698 - DNA, 24 bp, Artificial Sequence
  Synthetic
accgagucaacgaatgacattcug

SEQ ID NO: 45699 - DNA, 26 bp, Artificial Sequence
  Synthetic
ctgtgtttttccucttggttccauag

SEQ ID NO: 45700 - DNA, 25 bp, Artificial Sequence
  Synthetic
gagaactgucagagtggcagtatut

SEQ ID NO: 45701 - DNA, 27 bp, Artificial Sequence
  Synthetic
caccatgttggucttcattctttucag

SEQ ID NO: 45702 - DNA, 31 bp, Artificial Sequence; identical to SEQ ID NO: 33468
  Synthetic

SEQ ID NO: 45703 - DNA, 26 bp, Artificial Sequence
  Synthetic
gtggatgcctuctcacctgtaaauaa

SEQ ID NO: 45704 - DNA, 27 bp, Artificial Sequence
  Synthetic
aggaagcaacgutatttttgaatugca

SEQ ID NO: 45705 - DNA, 26 bp, Artificial Sequence
  Synthetic
gctgactaccaucctttgtaccauag

SEQ ID NO: 45706 - DNA, 28 bp, Artificial Sequence
  Synthetic
gctctcaagaauttccagtatgguagat

SEQ ID NO: 45707 - DNA, 30 bp, Artificial Sequence; identical to SEQ ID NO: 33473
  Synthetic

SEQ ID NO: 45708 - DNA, 22 bp, Artificial Sequence
  Synthetic
tctaatggcugcaccucaaaca

SEQ ID NO: 45709 - DNA, 23 bp, Artificial Sequence
  Synthetic
cccttccgccutgcaatatcuag

SEQ ID NO: 45710 - DNA, 26 bp, Artificial Sequence
  Synthetic
ctccaacaagcucagattcaaaguac

SEQ ID NO: 45711 - DNA, 23 bp, Artificial Sequence
  Synthetic
gcaaaactacccutccccacaua

SEQ ID NO: 45712 - DNA, 28 bp, Artificial Sequence
  Synthetic
atgaatgtaatgugatgtttgctgtcug

SEQ ID NO: 45713 - DNA, 29 bp, Artificial Sequence
  Synthetic
cactcttgagttugaaaggttactttgut

SEQ ID NO: 45714 - DNA, 28 bp, Artificial Sequence
  Synthetic
gaaatcctggtautttcactctctcuga

SEQ ID NO: 45715 - DNA, 25 bp, Artificial Sequence
  Synthetic
gtgtggccaugattctcacatttut

SEQ ID NO: 45716 - DNA, 28 bp, Artificial Sequence
  Synthetic
tcattagtagcuttgcagtgatatuccc

SEQ ID NO: 45717 - DNA, 23 bp, Artificial Sequence
  Synthetic
gccttctccaguaggagctctua

SEQ ID NO: 45718 - DNA, 24 bp, Artificial Sequence
  Synthetic
cuaagagcccaaaucagaggagaa

SEQ ID NO: 45719 - DNA, 30 bp, Artificial Sequence; identical to SEQ ID NO: 33485
  Synthetic

SEQ ID NO: 45720 - DNA, 31 bp, Artificial Sequence; identical to SEQ ID NO: 33486
  Synthetic

SEQ ID NO: 45721 - DNA, 28 bp, Artificial Sequence
  Synthetic
ctggaggaaacuatacaatcacatgugt

SEQ ID NO: 45722 - DNA, 25 bp, Artificial Sequence
  Synthetic
ccacagttugcaaagaaaaagagug

SEQ ID NO: 45723 - DNA, 21 bp, Artificial Sequence
  Synthetic
cccatccaagugtgctgguat

SEQ ID NO: 45724 - DNA, 31 bp, Artificial Sequence; identical to SEQ ID NO: 33490
  Synthetic

SEQ ID NO: 45725 - DNA, 26 bp, Artificial Sequence
  Synthetic
aacatcaaugacagtggagaguacac

SEQ ID NO: 45726 - DNA, 26 bp, Artificial Sequence
  Synthetic
ggccgtaattuggtatctcctttgua

SEQ ID NO: 45727 - DNA, 31 bp, Artificial Sequence; identical to SEQ ID NO: 33493
  Synthetic

SEQ ID NO: 45728 - DNA, 23 bp, Artificial Sequence
  Synthetic
acatcccttccugcctcatttuc

SEQ ID NO: 45729 - DNA, 26 bp, Artificial Sequence
  Synthetic
acctacacuggaacacttccaattuc

SEQ ID NO: 45730 - DNA, 29 bp, Artificial Sequence
  Synthetic
cagtuaaacacaagaaaaauacaaggaug

SEQ ID NO: 45731 - DNA, 24 bp, Artificial Sequence
  Synthetic
ggagaccggugcaacatctattut

SEQ ID NO: 45732 - DNA, 25 bp, Artificial Sequence
  Synthetic
tgtcaacatagaugtgcaccugaag

SEQ ID NO: 45733 - DNA, 30 bp, Artificial Sequence; identical to SEQ ID NO: 33499
  Synthetic

SEQ ID NO: 45734 - DNA, 28 bp, Artificial Sequence
  Synthetic
ttgtaaaaggaauttgcauaagcaacca

SEQ ID NO: 45735 - DNA, 22 bp, Artificial Sequence
  Synthetic
caaggauggaaagctgtugacc

SEQ ID NO: 45736 - DNA, 22 bp, Artificial Sequence
  Synthetic
cagcattuggcaccagtttcua

SEQ ID NO: 45737 - DNA, 25 bp, Artificial Sequence
  Synthetic
guccagtggctuaaagagaaggaag

SEQ ID NO: 45738 - DNA, 21 bp, Artificial Sequence
  Synthetic
gtccagatcaugcgagaguga

SEQ ID NO: 45739 - DNA, 30 bp, Artificial Sequence; identical to SEQ ID NO: 33505
  Synthetic

SEQ ID NO: 45740 - DNA, 27 bp, Artificial Sequence
  Synthetic
gggagaagguggttttcatttaaugag

SEQ ID NO: 45741 - DNA, 28 bp, Artificial Sequence
  Synthetic
gccagtgataaguacagaatgacttuca

SEQ ID NO: 45742 - DNA, 30 bp, Artificial Sequence; identical to SEQ ID NO: 33508
  Synthetic

SEQ ID NO: 45743 - DNA, 28 bp, Artificial Sequence
  Synthetic
ggaacttgtcucaggtcctaaatgttuc

SEQ ID NO: 45744 - DNA, 30 bp, Artificial Sequence; identical to SEQ ID NO: 33510
  Synthetic

SEQ ID NO: 45745 - DNA, 22 bp, Artificial Sequence
  Synthetic
cagacttgugtgccaugagaga

SEQ ID NO: 45746 - DNA, 24 bp, Artificial Sequence
  Synthetic
caaugcaaacagcaaaacacaucc

SEQ ID NO: 45747 - DNA, 22 bp, Artificial Sequence
  Synthetic
gacagcggucagtacacttuca

SEQ ID NO: 45748 - DNA, 24 bp, Artificial Sequence
  Synthetic
gccatttcacuttgagttctggug

SEQ ID NO: 45749 - DNA, 27 bp, Artificial Sequence
  Synthetic
gtctauagcgacagtttcatuagcaga

SEQ ID NO: 45750 - DNA, 28 bp, Artificial Sequence
  Synthetic
tgtccattauccacacttctgattugaa

SEQ ID NO: 45751 - DNA, 30 bp, Artificial Sequence; identical to SEQ ID NO: 33517
  Synthetic

SEQ ID NO: 45752 - DNA, 24 bp, Artificial Sequence
  Synthetic
tgctgcttcgaauttccctgtuat

SEQ ID NO: 45753 - DNA, 30 bp, Artificial Sequence; identical to SEQ ID NO: 33519
  Synthetic

SEQ ID NO: 45754 - DNA, 24 bp, Artificial Sequence
  Synthetic
ccatcaaugaaggaaatgccaugt

SEQ ID NO: 45755 - DNA, 25 bp, Artificial Sequence
  Synthetic
gttttgcccagugacctgttttuaa

SEQ ID NO: 45756 - DNA, 23 bp, Artificial Sequence
  Synthetic
gaggtgtcauccttccaaacuga

SEQ ID NO: 45757 - DNA, 23 bp, Artificial Sequence
  Synthetic
tctttcaccucagaaccccctua

SEQ ID NO: 45758 - DNA, 29 bp, Artificial Sequence
  Synthetic
ggcagtattgucatgaaaagagaattugt

SEQ ID NO: 45759 - DNA, 25 bp, Artificial Sequence
  Synthetic
ctccttcatucaccaaaaagcugaa

SEQ ID NO: 45760 - DNA, 23 bp, Artificial Sequence
  Synthetic
gggtcagttcutggccatcttua

SEQ ID NO: 45761 - DNA, 25 bp, Artificial Sequence
  Synthetic
ggtaaugcacaacccacatctaucc

SEQ ID NO: 45762 - DNA, 24 bp, Artificial Sequence
  Synthetic
tcttcagtgauttcatcgctguct

SEQ ID NO: 45763 - DNA, 28 bp, Artificial Sequence
  Synthetic
ctggcttttcugaagagtcaattcttut

SEQ ID NO: 45764 - DNA, 24 bp, Artificial Sequence
  Synthetic
ggctaaccagaugatcctgaauga

SEQ ID NO: 45765 - DNA, 22 bp, Artificial Sequence
  Synthetic
cccctccucccttaaugcaaat

SEQ ID NO: 45766 - DNA, 27 bp, Artificial Sequence
  Synthetic
cagtagacuccacaaaagacattcugt

SEQ ID NO: 45767 - DNA, 31 bp, Artificial Sequence; identical to SEQ ID NO: 33533
  Synthetic

SEQ ID NO: 45768 - DNA, 27 bp, Artificial Sequence
  Synthetic
agcttctttgguaatatagcagctucc

SEQ ID NO: 45769 - DNA, 28 bp, Artificial Sequence
  Synthetic
tcccttagaucaaccctcttaactctut

SEQ ID NO: 45770 - DNA, 22 bp, Artificial Sequence
  Synthetic
gtgcctuccacaaatgctaucc

SEQ ID NO: 45771 - DNA, 21 bp, Artificial Sequence
  Synthetic
cucccttcttgugcaacacac

SEQ ID NO: 45772 - DNA, 28 bp, Artificial Sequence
  Synthetic
agctgggcaacautgtttttaaaactua

SEQ ID NO: 45773 - DNA, 25 bp, Artificial Sequence
  Synthetic
cctaacaagcauttagggtgcuaac

SEQ ID NO: 45774 - DNA, 24 bp, Artificial Sequence
  Synthetic
gcaacaccatuggaaaagctcaut

SEQ ID NO: 45775 - DNA, 30 bp, Artificial Sequence; identical to SEQ ID NO: 33541
  Synthetic

SEQ ID NO: 45776 - DNA, 22 bp, Artificial Sequence
  Synthetic
gccacactugccgacttcatua

SEQ ID NO: 45777 - DNA, 22 bp, Artificial Sequence
  Synthetic
cttcagugtgaagtcucaggca

SEQ ID NO: 45778 - DNA, 25 bp, Artificial Sequence
  Synthetic
ctacaaaagcaugaaagcattgugt

SEQ ID NO: 45779 - DNA, 28 bp, Artificial Sequence
  Synthetic
gtaaaagtugaagacagtgggagtuact

SEQ ID NO: 45780 - DNA, 26 bp, Artificial Sequence
  Synthetic
agtttttctacugaggattcctugca

SEQ ID NO: 45781 - DNA, 27 bp, Artificial Sequence
  Synthetic
ccccagggaaagautataagatctgut

SEQ ID NO: 45782 - DNA, 29 bp, Artificial Sequence
  Synthetic
ggctctaattcttuaatgaaatgtggcut

SEQ ID NO: 45783 - DNA, 26 bp, Artificial Sequence
  Synthetic
gggactcctgugatagaaaccattug

SEQ ID NO: 45784 - DNA, 25 bp, Artificial Sequence
  Synthetic
ccagttgguaatacaagcattuccc

SEQ ID NO: 45785 - DNA, 27 bp, Artificial Sequence
  Synthetic
tcgatctucaaagtatatcuccagcct

SEQ ID NO: 45786 - DNA, 23 bp, Artificial Sequence
  Synthetic
tctggaaguggcagataagugaa

SEQ ID NO: 45787 - DNA, 27 bp, Artificial Sequence
  Synthetic
tcgacaaagtaaauaccgaagaccauc

SEQ ID NO: 45788 - DNA, 26 bp, Artificial Sequence
  Synthetic
ttcctcagaaacagugtccacuaaag

SEQ ID NO: 45789 - DNA, 26 bp, Artificial Sequence
  Synthetic
ggttaaatatttggaugccacaccug

SEQ ID NO: 45790 - DNA, 22 bp, Artificial Sequence
  Synthetic
acttgtttuggctccttgcuga

SEQ ID NO: 45791 - DNA, 22 bp, Artificial Sequence
  Synthetic
ggtcgaggcugtaaacaucacc

SEQ ID NO: 45792 - DNA, 24 bp, Artificial Sequence
  Synthetic
ccttagaaagaagguccctuccct

SEQ ID NO: 45793 - DNA, 22 bp, Artificial Sequence
  Synthetic
acuggaaaaugcagggcaagat

SEQ ID NO: 45794 - DNA, 21 bp, Artificial Sequence
  Synthetic
gtcccucagctaagctcugac

SEQ ID NO: 45795 - DNA, 29 bp, Artificial Sequence
  Synthetic
aactttattagcugaacctgaagggaaut

SEQ ID NO: 45796 - DNA, 24 bp, Artificial Sequence
  Synthetic
ctttggagaaggutttcugggact

SEQ ID NO: 45797 - DNA, 28 bp, Artificial Sequence
  Synthetic
agaaaaccagcaacuatcttaugagcat

SEQ ID NO: 45798 - DNA, 22 bp, Artificial Sequence
  Synthetic
tggaaaatccucaggagccuct

SEQ ID NO: 45799 - DNA, 28 bp, Artificial Sequence
  Synthetic
ctttgcaccagugtttattacactauca

SEQ ID NO: 45800 - DNA, 21 bp, Artificial Sequence
  Synthetic
ccucccagctttuccagagat

SEQ ID NO: 45801 - DNA, 29 bp, Artificial Sequence
  Synthetic
ctattaacccctuctgctgactacaaaut

SEQ ID NO: 45802 - DNA, 24 bp, Artificial Sequence
  Synthetic
gtgccttccutttcggaaucaaat

SEQ ID NO: 45803 - DNA, 26 bp, Artificial Sequence
  Synthetic
gccatcaacuggtgtctaattcttug

SEQ ID NO: 45804 - DNA, 28 bp, Artificial Sequence
  Synthetic
attttaagtuaaggtgagtgcugcaaag

SEQ ID NO: 45805 - DNA, 30 bp, Artificial Sequence; identical to SEQ ID NO: 33571
  Synthetic

SEQ ID NO: 45806 - DNA, 24 bp, Artificial Sequence
  Synthetic
ccttccaccaccugaaatucaaaa

SEQ ID NO: 45807 - DNA, 22 bp, Artificial Sequence
  Synthetic
agtgcaacauacaggugcagag

SEQ ID NO: 45808 - DNA, 26 bp, Artificial Sequence
  Synthetic
gggatccctaugactgaacattugaa

SEQ ID NO: 45809 - DNA, 27 bp, Artificial Sequence
  Synthetic
gttcccgaattuactcctgaccauaaa

SEQ ID NO: 45810 - DNA, 26 bp, Artificial Sequence
  Synthetic
gacaatttctugaggagaaggtgtuc

SEQ ID NO: 45811 - DNA, 28 bp, Artificial Sequence
  Synthetic
agagtacatgtgucatgctgtaaacauc

SEQ ID NO: 45812 - DNA, 26 bp, Artificial Sequence
  Synthetic
auttcgataccattucacaccaggaa

SEQ ID NO: 45813 - DNA, 27 bp, Artificial Sequence
  Synthetic
caaatgagcatutctacacaccuacag

SEQ ID NO: 45814 - DNA, 24 bp, Artificial Sequence
  Synthetic
gggtgtggaauatcgctcuagagt

SEQ ID NO: 45815 - DNA, 27 bp, Artificial Sequence
  Synthetic
gttgctgaaagauattcaacacctucc

SEQ ID NO: 45816 - DNA, 28 bp, Artificial Sequence
  Synthetic
gggacttuggagattcaaaatatucaac

SEQ ID NO: 45817 - DNA, 29 bp, Artificial Sequence
  Synthetic
tggaagaagtaacuttcaacactgtguat

SEQ ID NO: 45818 - DNA, 24 bp, Artificial Sequence
  Synthetic
acgcttuccagcagcaagtaaaua

SEQ ID NO: 45819 - DNA, 31 bp, Artificial Sequence; identical to SEQ ID NO: 33585
  Synthetic

SEQ ID NO: 45820 - DNA, 25 bp, Artificial Sequence
  Synthetic
gtggcatctguatattcctgtgucc

SEQ ID NO: 45821 - DNA, 22 bp, Artificial Sequence
  Synthetic
gtgccctacutccaacctcauc

SEQ ID NO: 45822 - DNA, 29 bp, Artificial Sequence
  Synthetic
ctgtacatgucggacttctttttcuaaag

SEQ ID NO: 45823 - DNA, 27 bp, Artificial Sequence
  Synthetic
aaacuagggaacaguaggaaatacaut

SEQ ID NO: 45824 - DNA, 29 bp, Artificial Sequence
  Synthetic
ctggttgaccacuatctaattctuggaat

SEQ ID NO: 45825 - DNA, 26 bp, Artificial Sequence
  Synthetic
agctgctttccuctcaaactcauaaa

SEQ ID NO: 45826 - DNA, 30 bp, Artificial Sequence; identical to SEQ ID NO: 33592
  Synthetic

SEQ ID NO: 45827 - DNA, 27 bp, Artificial Sequence
  Synthetic
gccattgtataugaagaatccctuggt

SEQ ID NO: 45828 - DNA, 25 bp, Artificial Sequence
  Synthetic
cactttgggcacautcttgtacaut

SEQ ID NO: 45829 - DNA, 27 bp, Artificial Sequence
  Synthetic
ttcaagaaccauaaaaaucagcaagcc

SEQ ID NO: 45830 - DNA, 28 bp, Artificial Sequence
  Synthetic
gtctcaaggcttugaaaatagtccctua

SEQ ID NO: 45831 - DNA, 27 bp, Artificial Sequence
  Synthetic
ggcagttgaaagugtttcagatcuaac

SEQ ID NO: 45832 - DNA, 25 bp, Artificial Sequence
  Synthetic
tggttctgcuttaaaaggacuccat

SEQ ID NO: 45833 - DNA, 25 bp, Artificial Sequence
  Synthetic
gaacctaaagcaaugcctcaagauc

SEQ ID NO: 45834 - DNA, 28 bp, Artificial Sequence
  Synthetic
ggaactggugggttagttttuaacaaat

SEQ ID NO: 45835 - DNA, 29 bp, Artificial Sequence
  Synthetic
tggaacaguaaaaacaaccagtatgctua

SEQ ID NO: 45836 - DNA, 23 bp, Artificial Sequence
  Synthetic
gtgggatuggcatgtcattgtua

SEQ ID NO: 45837 - DNA, 28 bp, Artificial Sequence
  Synthetic
tctctgcttcuacacgaattgatgaaut

SEQ ID NO: 45838 - DNA, 28 bp, Artificial Sequence
  Synthetic
tgtggtgtaatagcutgagacacattut

SEQ ID NO: 45839 - DNA, 27 bp, Artificial Sequence
  Synthetic
tccagacugaaataagaaugagccaag

SEQ ID NO: 45840 - DNA, 31 bp, Artificial Sequence; identical to SEQ ID NO: 33606
  Synthetic

SEQ ID NO: 45841 - DNA, 22 bp, Artificial Sequence
  Synthetic
ccuggacaaggagaucaaagug

SEQ ID NO: 45842 - DNA, 28 bp, Artificial Sequence
  Synthetic
cattcccttttgutccacatcttgttut

SEQ ID NO: 45843 - DNA, 30 bp, Artificial Sequence; identical to SEQ ID NO: 33609
  Synthetic

SEQ ID NO: 45844 - DNA, 28 bp, Artificial Sequence
  Synthetic
gaatctctgtctuggacccttttaauct

SEQ ID NO: 45845 - DNA, 28 bp, Artificial Sequence
  Synthetic
agccttctttuacccagaaacttacaut

SEQ ID NO: 45846 - DNA, 22 bp, Artificial Sequence
  Synthetic
aagctgcauaaagcgaugagga

SEQ ID NO: 45847 - DNA, 24 bp, Artificial Sequence
  Synthetic
cacgaaggugcaaagauagaggaa

SEQ ID NO: 45848 - DNA, 23 bp, Artificial Sequence
  Synthetic
ccgtggacuctttagcacatucc

SEQ ID NO: 45849 - DNA, 23 bp, Artificial Sequence
  Synthetic
agtggcagautcctcttucacaa

SEQ ID NO: 45850 - DNA, 26 bp, Artificial Sequence
  Synthetic
cacaguatgcaauaaaacaaacagca

SEQ ID NO: 45851 - DNA, 27 bp, Artificial Sequence
  Synthetic
gcttatagtugatgcttacucagagca

SEQ ID NO: 45852 - DNA, 24 bp, Artificial Sequence
  Synthetic
ccattggauttctggctugggaat

SEQ ID NO: 45853 - DNA, 30 bp, Artificial Sequence; identical to SEQ ID NO: 33619
  Synthetic

SEQ ID NO: 45854 - DNA, 23 bp, Artificial Sequence
  Synthetic
cttggccuacagcattacuagca

SEQ ID NO: 45855 - DNA, 28 bp, Artificial Sequence
  Synthetic
tgaagtatctcutttcttttgtgucgca

SEQ ID NO: 45856 - DNA, 25 bp, Artificial Sequence
  Synthetic
ggaaaggacaaaagccugcttctua

SEQ ID NO: 45857 - DNA, 27 bp, Artificial Sequence
  Synthetic
ttcaagtgcaaauttcttcatgauggg

SEQ ID NO: 45858 - DNA, 27 bp, Artificial Sequence
  Synthetic
ggaggattauttctgatggauccacaa

SEQ ID NO: 45859 - DNA, 29 bp, Artificial Sequence
  Synthetic
acgacacaaauatgtaguggaaagaagaa

SEQ ID NO: 45860 - DNA, 27 bp, Artificial Sequence
  Synthetic
ggatggtggutagaaaatguaaaaggg

SEQ ID NO: 45861 - DNA, 24 bp, Artificial Sequence
  Synthetic
cgtgtcaacugcaaaactcttugt

SEQ ID NO: 45862 - DNA, 25 bp, Artificial Sequence
  Synthetic
gtttaccguatggtgatucagagga

SEQ ID NO: 45863 - DNA, 26 bp, Artificial Sequence
  Synthetic
tttctacatgcuattttccagcucgt

SEQ ID NO: 45864 - DNA, 30 bp, Artificial Sequence; identical to SEQ ID NO: 33630
  Synthetic

SEQ ID NO: 45865 - DNA, 26 bp, Artificial Sequence
  Synthetic
ttacgtaaagtcuccttgggtgttut

SEQ ID NO: 45866 - DNA, 23 bp, Artificial Sequence
  Synthetic
ttggtcatugccacagacaaaug

SEQ ID NO: 45867 - DNA, 24 bp, Artificial Sequence
  Synthetic
caaaactgccucttttgagtguga

SEQ ID NO: 45868 - DNA, 23 bp, Artificial Sequence
  Synthetic
gggttcatuaaggaaagggcugt

SEQ ID NO: 45869 - DNA, 25 bp, Artificial Sequence
  Synthetic
acaaacacagacuggtcucagaaag

SEQ ID NO: 45870 - DNA, 26 bp, Artificial Sequence
  Synthetic
ggagcaatucagtgatagggtuaact

SEQ ID NO: 45871 - DNA, 22 bp, Artificial Sequence
  Synthetic
ggagttgtgcuggaatccaaug

SEQ ID NO: 45872 - DNA, 28 bp, Artificial Sequence
  Synthetic
tttatggtauccaaaatggccataucgt

SEQ ID NO: 45873 - DNA, 25 bp, Artificial Sequence
  Synthetic
atggccauaaaaggagacutaucat

SEQ ID NO: 45874 - DNA, 29 bp, Artificial Sequence
  Synthetic
ggttaataaauataccaaccugccacagt

SEQ ID NO: 45875 - DNA, 28 bp, Artificial Sequence
  Synthetic
ggaattgatgucctgtggaatttuaagg

SEQ ID NO: 45876 - DNA, 28 bp, Artificial Sequence
  Synthetic
tctcttggtuattgttacacugggaaag

SEQ ID NO: 45877 - DNA, 25 bp, Artificial Sequence
  Synthetic
gtacaggccautgtgaaaggtacua

SEQ ID NO: 45878 - DNA, 27 bp, Artificial Sequence
  Synthetic
acacacacaagaugaatgaattttgut

SEQ ID NO: 45879 - DNA, 27 bp, Artificial Sequence
  Synthetic
gacatgacuaaggaagatgcuggaaat

SEQ ID NO: 45880 - DNA, 22 bp, Artificial Sequence
  Synthetic
cgtctttcauccagacgcctuc

SEQ ID NO: 45881 - DNA, 27 bp, Artificial Sequence
  Synthetic
ctgcagtgagcaucattatggtttaut

SEQ ID NO: 45882 - DNA, 23 bp, Artificial Sequence
  Synthetic
acgtccacgacgagaugtaatug

SEQ ID NO: 45883 - DNA, 29 bp, Artificial Sequence
  Synthetic
ctaagtctagaugcatacctcuccaaaaa

SEQ ID NO: 45884 - DNA, 25 bp, Artificial Sequence
  Synthetic
tcaauggtcagtauggagaggaagt

SEQ ID NO: 45885 - DNA, 26 bp, Artificial Sequence
  Synthetic
ctttttcccccaccuttttcttguag

SEQ ID NO: 45886 - DNA, 20 bp, Artificial Sequence
  Synthetic
tcttcgggccaguaccagua

SEQ ID NO: 45887 - DNA, 28 bp, Artificial Sequence
  Synthetic
aaggcaaaaucacgattccaactttuaa

SEQ ID NO: 45888 - DNA, 25 bp, Artificial Sequence
  Synthetic
ggtaatggctucataatagcccuct

SEQ ID NO: 45889 - DNA, 22 bp, Artificial Sequence
  Synthetic
aaggccugagtttcacguacat

SEQ ID NO: 45890 - DNA, 22 bp, Artificial Sequence
  Synthetic
tccacgatguccaggtaaugga

SEQ ID NO: 45891 - DNA, 24 bp, Artificial Sequence
  Synthetic
aggtgcacutacaggtguaacaac

SEQ ID NO: 45892 - DNA, 26 bp, Artificial Sequence
  Synthetic
ccatatttgtuagtggctcugcaagt

SEQ ID NO: 45893 - DNA, 24 bp, Artificial Sequence
  Synthetic
tccttaagacutaagcgcttuggg

SEQ ID NO: 45894 - DNA, 22 bp, Artificial Sequence
  Synthetic
tctatatgucccccgtgggaug

SEQ ID NO: 45895 - DNA, 27 bp, Artificial Sequence
  Synthetic
attgattattcccucccccaactttut

SEQ ID NO: 45896 - DNA, 24 bp, Artificial Sequence
  Synthetic
tcaaccatacaaugtcagggtugg

SEQ ID NO: 45897 - DNA, 26 bp, Artificial Sequence
  Synthetic
caggtatttcagccutactccctcua

SEQ ID NO: 45898 - DNA, 28 bp, Artificial Sequence
  Synthetic
ggcagggacaauaattagtgattgagua

SEQ ID NO: 45899 - DNA, 29 bp, Artificial Sequence
  Synthetic
tgcucatgaatcauaaaaacacaaaaaca

SEQ ID NO: 45900 - DNA, 28 bp, Artificial Sequence
  Synthetic
gaaacaggtttuaacacaaagactggut

SEQ ID NO: 45901 - DNA, 24 bp, Artificial Sequence
  Synthetic
gcctcacgaaaguattgtgtguct

SEQ ID NO: 45902 - DNA, 23 bp, Artificial Sequence
  Synthetic
ggaatgtaagucggagcuccaag

SEQ ID NO: 45903 - DNA, 22 bp, Artificial Sequence
  Synthetic
caagcgcaucaaacauggagaa

SEQ ID NO: 45904 - DNA, 27 bp, Artificial Sequence
  Synthetic
ccaatttguatctttactguggcaagg

SEQ ID NO: 45905 - DNA, 25 bp, Artificial Sequence
  Synthetic
atggagaagaaaagauggcagtuga

SEQ ID NO: 45906 - DNA, 21 bp, Artificial Sequence
  Synthetic
tcuaaccccgagctcaucact

SEQ ID NO: 45907 - DNA, 29 bp, Artificial Sequence
  Synthetic
cacctggatttguatactctgagtaugaa

SEQ ID NO: 45908 - DNA, 23 bp, Artificial Sequence
  Synthetic
gcacauagaaactggagtugcac

SEQ ID NO: 45909 - DNA, 28 bp, Artificial Sequence
  Synthetic
cccacagaagagutgttgataactgaut

SEQ ID NO: 45910 - DNA, 23 bp, Artificial Sequence
  Synthetic
ccagtttcuggaccactggttut

SEQ ID NO: 45911 - DNA, 23 bp, Artificial Sequence
  Synthetic
ccagtautggcaaatugcaaccc

SEQ ID NO: 45912 - DNA, 23 bp, Artificial Sequence
  Synthetic
aagtgatggcaugtgcatuagga

SEQ ID NO: 45913 - DNA, 22 bp, Artificial Sequence
  Synthetic
gacagugacatgguacagggaa

SEQ ID NO: 45914 - DNA, 25 bp, Artificial Sequence
  Synthetic
gagaaactgauctttgcaaacgugt

SEQ ID NO: 45915 - DNA, 29 bp, Artificial Sequence
  Synthetic
tgcatgagcuaagagtttatgagattucc

SEQ ID NO: 45916 - DNA, 22 bp, Artificial Sequence
  Synthetic
aacgccagcutcactcttguaa

SEQ ID NO: 45917 - DNA, 30 bp, Artificial Sequence; identical to SEQ ID NO: 33683
  Synthetic

SEQ ID NO: 45918 - DNA, 24 bp, Artificial Sequence
  Synthetic
tgaggctugctttaccaugaacaa

SEQ ID NO: 45919 - DNA, 27 bp, Artificial Sequence
  Synthetic
cactttggaguacggatauaaggaacg

SEQ ID NO: 45920 - DNA, 23 bp, Artificial Sequence
  Synthetic
gggauttcacactuggaacaaca

SEQ ID NO: 45921 - DNA, 31 bp, Artificial Sequence; identical to SEQ ID NO: 33687
  Synthetic

SEQ ID NO: 45922 - DNA, 22 bp, Artificial Sequence
  Synthetic
agtgacuttcacatuggcagga

SEQ ID NO: 45923 - DNA, 29 bp, Artificial Sequence
  Synthetic
gtcttcccatugcttttgtatctttugaa

SEQ ID NO: 45924 - DNA, 31 bp, Artificial Sequence; identical to SEQ ID NO: 33690
  Synthetic

SEQ ID NO: 45925 - DNA, 28 bp, Artificial Sequence
  Synthetic
accatattattucattgggcaucaggaa

SEQ ID NO: 45926 - DNA, 23 bp, Artificial Sequence
  Synthetic
ctcagtggauggtggttgagtua

SEQ ID NO: 45927 - DNA, 22 bp, Artificial Sequence
  Synthetic
gttgttgcugccgttgataugg

SEQ ID NO: 45928 - DNA, 31 bp, Artificial Sequence; identical to SEQ ID NO: 33694
  Synthetic

SEQ ID NO: 45929 - DNA, 23 bp, Artificial Sequence
  Synthetic
gaggcugagaugagagagacaac

SEQ ID NO: 45930 - DNA, 24 bp, Artificial Sequence
  Synthetic
ggacaagggaauctttctcgttuc

SEQ ID NO: 45931 - DNA, 22 bp, Artificial Sequence
  Synthetic
aagucaagauccccaacaccac

SEQ ID NO: 45932 - DNA, 26 bp, Artificial Sequence
  Synthetic
aagatuaaaacaaagcccacgtugag

SEQ ID NO: 45933 - DNA, 24 bp, Artificial Sequence
  Synthetic
acattcauctttccctucccacag

SEQ ID NO: 45934 - DNA, 24 bp, Artificial Sequence
  Synthetic
gtagaggucgccttcttgugaaat

SEQ ID NO: 45935 - DNA, 27 bp, Artificial Sequence
  Synthetic
tctcactcttgacuttgttctcttguc

SEQ ID NO: 45936 - DNA, 22 bp, Artificial Sequence
  Synthetic
agatccatuggtggcttucagg

SEQ ID NO: 45937 - DNA, 27 bp, Artificial Sequence
  Synthetic
tgcccattcaaacauaaaggtgaatug

SEQ ID NO: 45938 - DNA, 24 bp, Artificial Sequence
  Synthetic
gtgccatgtucctcaagagaauct

SEQ ID NO: 45939 - DNA, 29 bp, Artificial Sequence
  Synthetic
gaagcatggaagaaaugattccaaaguaa

SEQ ID NO: 45940 - DNA, 22 bp, Artificial Sequence
  Synthetic
accaactgccugctttgauagt

SEQ ID NO: 45941 - DNA, 30 bp, Artificial Sequence; identical to SEQ ID NO: 33707
  Synthetic

SEQ ID NO: 45942 - DNA, 24 bp, Artificial Sequence
  Synthetic
ccttcttaugaggcaggatucgat

SEQ ID NO: 45943 - DNA, 27 bp, Artificial Sequence
  Synthetic
gaagtatggcucttataatugcccgaa

SEQ ID NO: 45944 - DNA, 28 bp, Artificial Sequence
  Synthetic
acagtctaaagguaatgaaagtgatugg

SEQ ID NO: 45945 - DNA, 31 bp, Artificial Sequence; identical to SEQ ID NO: 33711
  Synthetic

SEQ ID NO: 45946 - DNA, 28 bp, Artificial Sequence
  Synthetic
aaatgatatttcacagucttctgcccua

SEQ ID NO: 45947 - DNA, 27 bp, Artificial Sequence
  Synthetic
aaaaatatcgauggatgtccccuaacc

SEQ ID NO: 45948 - DNA, 25 bp, Artificial Sequence
  Synthetic
agagggagaagggucagtttaauga

SEQ ID NO: 45949 - DNA, 29 bp, Artificial Sequence
  Synthetic
tgccttctttgcutgatttgtattttuct

SEQ ID NO: 45950 - DNA, 30 bp, Artificial Sequence; identical to SEQ ID NO: 33716
  Synthetic

SEQ ID NO: 45951 - DNA, 26 bp, Artificial Sequence
  Synthetic
gtcactttgtguatgtgtgtgtgtut

SEQ ID NO: 45952 - DNA, 22 bp, Artificial Sequence
  Synthetic
cctgcaagcutcaacagaggut

SEQ ID NO: 45953 - DNA, 27 bp, Artificial Sequence
  Synthetic
acagacttgugtgtcatttuaaaggga

SEQ ID NO: 45954 - DNA, 29 bp, Artificial Sequence
  Synthetic
ttttgttccttuttcaagcagaugaagag

SEQ ID NO: 45955 - DNA, 28 bp, Artificial Sequence
  Synthetic
tgttcctctctaugaaacacaatggtut

SEQ ID NO: 45956 - DNA, 19 bp, Artificial Sequence
  Synthetic
cagcaccacgucacaacug

SEQ ID NO: 45957 - DNA, 17 bp, Artificial Sequence
  Synthetic
gccaugcccuggaggag

SEQ ID NO: 45958 - DNA, 31 bp, Artificial Sequence; identical to SEQ ID NO: 33724
  Synthetic

SEQ ID NO: 45959 - DNA, 25 bp, Artificial Sequence
  Synthetic
agaagaggaagaccuggagcaauaa

SEQ ID NO: 45960 - DNA, 30 bp, Artificial Sequence; identical to SEQ ID NO: 33726
  Synthetic

SEQ ID NO: 45961 - DNA, 22 bp, Artificial Sequence
  Synthetic
tgacugtgaattgucccagcat

SEQ ID NO: 45962 - DNA, 26 bp, Artificial Sequence
  Synthetic
tttatctccctuccaggagaaatugc

SEQ ID NO: 45963 - DNA, 26 bp, Artificial Sequence
  Synthetic
actagaccauatgaagagctuggaca

SEQ ID NO: 45964 - DNA, 31 bp, Artificial Sequence; identical to SEQ ID NO: 33730
  Synthetic

SEQ ID NO: 45965 - DNA, 22 bp, Artificial Sequence
  Synthetic
cuccaagcactguacaccaaag

SEQ ID NO: 45966 - DNA, 32 bp, Artificial Sequence; identical to SEQ ID NO: 33732
  Synthetic

SEQ ID NO: 45967 - DNA, 21 bp, Artificial Sequence
  Synthetic
cgugcaagauggaggaagcaa

SEQ ID NO: 45968 - DNA, 29 bp, Artificial Sequence
  Synthetic
gggattgacauatgttttagaugagaaga

SEQ ID NO: 45969 - DNA, 27 bp, Artificial Sequence
  Synthetic
gcttttgagagaacucattacccugac

SEQ ID NO: 45970 - DNA, 22 bp, Artificial Sequence
  Synthetic
cacaggtuaaacccccucacat

SEQ ID NO: 45971 - DNA, 23 bp, Artificial Sequence
  Synthetic
agcutttatgcccucaggaaagg

SEQ ID NO: 45972 - DNA, 26 bp, Artificial Sequence
  Synthetic
gcacaatucacagttctagaauccca

SEQ ID NO: 45973 - DNA, 17 bp, Artificial Sequence
  Synthetic
gagggcaucggcuagct

SEQ ID NO: 45974 - DNA, 21 bp, Artificial Sequence
  Synthetic
gctgtgttuggccttcttcuc

SEQ ID NO: 45975 - DNA, 20 bp, Artificial Sequence
  Synthetic
acagcccugcttgtcucaac

SEQ ID NO: 45976 - DNA, 20 bp, Artificial Sequence
  Synthetic
atuggagagucccagatguc

SEQ ID NO: 45977 - DNA, 20 bp, Artificial Sequence
  Synthetic
gcgtcuccaagatcctgugc

SEQ ID NO: 45978 - DNA, 18 bp, Artificial Sequence
  Synthetic
cgctgaggcccuccctua

SEQ ID NO: 45979 - DNA, 18 bp, Artificial Sequence
  Synthetic
gtucccgagggtcauccg

SEQ ID NO: 45980 - DNA, 30 bp, Artificial Sequence; identical to SEQ ID NO: 33746
  Synthetic

SEQ ID NO: 45981 - DNA, 22 bp, Artificial Sequence
  Synthetic
cggtttcuggactcttcctuga

SEQ ID NO: 45982 - DNA, 27 bp, Artificial Sequence
  Synthetic
caaaaaggaaguaggaaaugctcttua

SEQ ID NO: 45983 - DNA, 22 bp, Artificial Sequence
  Synthetic
tgatgacagcugtgctaacguc

SEQ ID NO: 45984 - DNA, 23 bp, Artificial Sequence
  Synthetic
tgaaggctcccuttggtacatug

SEQ ID NO: 45985 - DNA, 22 bp, Artificial Sequence
  Synthetic
caccttgtguccaacctcucag

SEQ ID NO: 45986 - DNA, 24 bp, Artificial Sequence
  Synthetic
ttagagtcattugcttccccaucc

SEQ ID NO: 45987 - DNA, 29 bp, Artificial Sequence
  Synthetic
tctgtccuccaagaataaatcucaagaga

SEQ ID NO: 45988 - DNA, 23 bp, Artificial Sequence
  Synthetic
gctccacttcuccttcaaggaut

SEQ ID NO: 45989 - DNA, 27 bp, Artificial Sequence
  Synthetic
gatccaagaaugggctttttctuacag

SEQ ID NO: 45990 - DNA, 17 bp, Artificial Sequence
  Synthetic
ggguggagctuccagca

SEQ ID NO: 45991 - DNA, 28 bp, Artificial Sequence
  Synthetic
gcttgaagattgtuaacctatgaggcut

SEQ ID NO: 45992 - DNA, 24 bp, Artificial Sequence
  Synthetic
cctcagtguaagacagctcugaat

SEQ ID NO: 45993 - DNA, 22 bp, Artificial Sequence
  Synthetic
ttctccauggtgttucccaagg

SEQ ID NO: 45994 - DNA, 27 bp, Artificial Sequence
  Synthetic
agaataaaattcaacccuccacagcut

SEQ ID NO: 45995 - DNA, 29 bp, Artificial Sequence
  Synthetic
acaagattgggagaucaatgtttguaact

SEQ ID NO: 45996 - DNA, 21 bp, Artificial Sequence
  Synthetic
agcccccuctctagaagaucc

SEQ ID NO: 45997 - DNA, 25 bp, Artificial Sequence
  Synthetic
tgcttgctgutcctgagatcuaaaa

SEQ ID NO: 45998 - DNA, 27 bp, Artificial Sequence
  Synthetic
gacaataaaagucaagatgctgggaut

SEQ ID NO: 45999 - DNA, 22 bp, Artificial Sequence
  Synthetic
gagtcagugagcctggaacauc

SEQ ID NO: 46000 - DNA, 23 bp, Artificial Sequence
  Synthetic
gggatuaacgtgcatatuccaca

SEQ ID NO: 46001 - DNA, 28 bp, Artificial Sequence
  Synthetic
tggtgacatugttcagtcaaatuaacct

SEQ ID NO: 46002 - DNA, 17 bp, Artificial Sequence
  Synthetic
gctgggcugccauggaa

SEQ ID NO: 46003 - DNA, 23 bp, Artificial Sequence
  Synthetic
gcccagccuttgcttctatttut

SEQ ID NO: 46004 - DNA, 21 bp, Artificial Sequence
  Synthetic
gctcaucccaacctcatgguc

SEQ ID NO: 46005 - DNA, 21 bp, Artificial Sequence
  Synthetic
gctccttgutgtagccctuct

SEQ ID NO: 46006 - DNA, 24 bp, Artificial Sequence
  Synthetic
agagagagagagagugggtgaaug

SEQ ID NO: 46007 - DNA, 19 bp, Artificial Sequence
  Synthetic
ccctcggccutccaaagug

SEQ ID NO: 46008 - DNA, 21 bp, Artificial Sequence
  Synthetic
tcaccctgccucctttcctua

SEQ ID NO: 46009 - DNA, 19 bp, Artificial Sequence
  Synthetic
guggcagccaguacacgaa

SEQ ID NO: 46010 - DNA, 21 bp, Artificial Sequence
  Synthetic
gagtgtcacuctctgcccaut

SEQ ID NO: 46011 - DNA, 20 bp, Artificial Sequence
  Synthetic
tgugtgtgtcugagggacct

SEQ ID NO: 46012 - DNA, 19 bp, Artificial Sequence
  Synthetic
ccgcaagccccucttcuac

SEQ ID NO: 46013 - DNA, 19 bp, Artificial Sequence
  Synthetic
ggcucccaggaggaaguga

SEQ ID NO: 46014 - DNA, 20 bp, Artificial Sequence
  Synthetic
gctccaagcugagtgttugc

SEQ ID NO: 46015 - DNA, 24 bp, Artificial Sequence
  Synthetic
ccaggattacaguggtgagcttut

SEQ ID NO: 46016 - DNA, 20 bp, Artificial Sequence
  Synthetic
gccgaggaguacttccugct

SEQ ID NO: 46017 - DNA, 17 bp, Artificial Sequence
  Synthetic
gggccagagugggtgug

SEQ ID NO: 46018 - DNA, 18 bp, Artificial Sequence
  Synthetic
tctcugccccuacccaca

SEQ ID NO: 46019 - DNA, 18 bp, Artificial Sequence
  Synthetic
tcucctggcuccccaaca

SEQ ID NO: 46020 - DNA, 22 bp, Artificial Sequence
  Synthetic
ccuatttagcuggcagggacat

SEQ ID NO: 46021 - DNA, 21 bp, Artificial Sequence
  Synthetic
aggtcaatcuccttgcagugg

SEQ ID NO: 46022 - DNA, 19 bp, Artificial Sequence
  Synthetic
tcugacacaugcacgcaca

SEQ ID NO: 46023 - DNA, 23 bp, Artificial Sequence
  Synthetic
cagtactuggagacagugaaggt

SEQ ID NO: 46024 - DNA, 21 bp, Artificial Sequence
  Synthetic
gcatctccutctgccacauct

SEQ ID NO: 46025 - DNA, 20 bp, Artificial Sequence
  Synthetic
cccaccuggctttagaccuc

SEQ ID NO: 46026 - DNA, 19 bp, Artificial Sequence
  Synthetic
cgtuacaacggccuacggt

SEQ ID NO: 46027 - DNA, 17 bp, Artificial Sequence
  Synthetic
ccagttcuccgcccucc

SEQ ID NO: 46028 - DNA, 22 bp, Artificial Sequence
  Synthetic
gtcatcttcugcaatcgcaguc

SEQ ID NO: 46029 - DNA, 20 bp, Artificial Sequence
  Synthetic
gcttcagaccgugctaucgt

SEQ ID NO: 46030 - DNA, 22 bp, Artificial Sequence
  Synthetic
ccctagtcugccactgaggaut

SEQ ID NO: 46031 - DNA, 25 bp, Artificial Sequence
  Synthetic
acagaaatctucaatctcccauccg

SEQ ID NO: 46032 - DNA, 19 bp, Artificial Sequence
  Synthetic
accagcacugcaaauggct

SEQ ID NO: 46033 - DNA, 19 bp, Artificial Sequence
  Synthetic
cgaggcugcctgtcttcua

SEQ ID NO: 46034 - DNA, 26 bp, Artificial Sequence
  Synthetic
cccaccttauattgccatcttuacga

SEQ ID NO: 46035 - DNA, 25 bp, Artificial Sequence
  Synthetic
agctcagctgutttctttccctuag

SEQ ID NO: 46036 - DNA, 27 bp, Artificial Sequence
  Synthetic
acgctttaagtutgcacataaatcucc

SEQ ID NO: 46037 - DNA, 26 bp, Artificial Sequence
  Synthetic
aaaccagaguccttaacaagcatuga

SEQ ID NO: 46038 - DNA, 26 bp, Artificial Sequence
  Synthetic
gaatcgcttaauggactagaaggcut

SEQ ID NO: 46039 - DNA, 23 bp, Artificial Sequence
  Synthetic
atguccaggagaccaagttucag

SEQ ID NO: 46040 - DNA, 21 bp, Artificial Sequence
  Synthetic
cggcacaguccactaactcua

SEQ ID NO: 46041 - DNA, 24 bp, Artificial Sequence
  Synthetic
gcactgacugccaactaatttugc

SEQ ID NO: 46042 - DNA, 30 bp, Artificial Sequence; identical to SEQ ID NO: 33808
  Synthetic

SEQ ID NO: 46043 - DNA, 28 bp, Artificial Sequence
  Synthetic
tgtggcttctguttgtcttgtctatuaa

SEQ ID NO: 46044 - DNA, 27 bp, Artificial Sequence
  Synthetic
accccattaautgactgacatuaccac

SEQ ID NO: 46045 - DNA, 28 bp, Artificial Sequence
  Synthetic
ccaatcatggaautttctttctccucct

SEQ ID NO: 46046 - DNA, 27 bp, Artificial Sequence
  Synthetic
tcctcatcccuatcttccttggauaaa

SEQ ID NO: 46047 - DNA, 30 bp, Artificial Sequence; identical to SEQ ID NO: 33813
  Synthetic

SEQ ID NO: 46048 - DNA, 31 bp, Artificial Sequence; identical to SEQ ID NO: 33814
  Synthetic

SEQ ID NO: 46049 - DNA, 22 bp, Artificial Sequence
  Synthetic
gttggtccuaaaggtggtccut

SEQ ID NO: 46050 - DNA, 22 bp, Artificial Sequence
  Synthetic
gctgauagccaaactgcugaac

SEQ ID NO: 46051 - DNA, 32 bp, Artificial Sequence; identical to SEQ ID NO: 33817
  Synthetic

SEQ ID NO: 46052 - DNA, 18 bp, Artificial Sequence
  Synthetic
ccagcuggagcgtttucg

SEQ ID NO: 46053 - DNA, 18 bp, Artificial Sequence
  Synthetic
cccuccccaaguccaact

SEQ ID NO: 46054 - DNA, 21 bp, Artificial Sequence
  Synthetic
ctgaccaucacgaggcugaat

SEQ ID NO: 46055 - DNA, 25 bp, Artificial Sequence
  Synthetic
tgtatgagagaaacucaggtuccga

SEQ ID NO: 46056 - DNA, 24 bp, Artificial Sequence
  Synthetic
tgggatuacaggcaaaaaccucat

SEQ ID NO: 46057 - DNA, 20 bp, Artificial Sequence
  Synthetic
ggtagcggucaacaagggut

SEQ ID NO: 46058 - DNA, 23 bp, Artificial Sequence
  Synthetic
cctcagagacuacaaggugaagc

SEQ ID NO: 46059 - DNA, 25 bp, Artificial Sequence
  Synthetic
ggtgactttugggattttccatguc

SEQ ID NO: 46060 - DNA, 22 bp, Artificial Sequence
  Synthetic
gaaggatgcucaggaaguccac

SEQ ID NO: 46061 - DNA, 22 bp, Artificial Sequence
  Synthetic
tgtgugaagcccaucaaagacc

SEQ ID NO: 46062 - DNA, 29 bp, Artificial Sequence
  Synthetic
ggcaacttcaguacttcctatatcttucc

SEQ ID NO: 46063 - DNA, 22 bp, Artificial Sequence
  Synthetic
agtgcaaggcugtcaacaugat

SEQ ID NO: 46064 - DNA, 18 bp, Artificial Sequence
  Synthetic
acatcuggcccgcacauc

SEQ ID NO: 46065 - DNA, 17 bp, Artificial Sequence
  Synthetic
ggcgauacgcguccaca

SEQ ID NO: 46066 - DNA, 28 bp, Artificial Sequence
  Synthetic
tcaaaacagttucactttcctgtcauct

SEQ ID NO: 46067 - DNA, 29 bp, Artificial Sequence
  Synthetic
agtgagggagcaugactaaaaauagaaaa

SEQ ID NO: 46068 - DNA, 25 bp, Artificial Sequence
  Synthetic
cagtcaagttuccacaactgtguaa

SEQ ID NO: 46069 - DNA, 29 bp, Artificial Sequence
  Synthetic
acactgactgtgugtactatgagaauaca

SEQ ID NO: 46070 - DNA, 21 bp, Artificial Sequence
  Synthetic
caagctccccuaccatgacut

SEQ ID NO: 46071 - DNA, 27 bp, Artificial Sequence
  Synthetic
ccacaccctuaagagaagaaaacucac

SEQ ID NO: 46072 - DNA, 23 bp, Artificial Sequence
  Synthetic
ctgggagtugccatatctgucat

SEQ ID NO: 46073 - DNA, 21 bp, Artificial Sequence
  Synthetic
gutgatgttgtuggcacacgt

SEQ ID NO: 46074 - DNA, 24 bp, Artificial Sequence
  Synthetic
cagaacactucagagcagttugag

SEQ ID NO: 46075 - DNA, 22 bp, Artificial Sequence
  Synthetic
gtactcctguaggttgccctug

SEQ ID NO: 46076 - DNA, 24 bp, Artificial Sequence
  Synthetic
gacctcaagagcuccaatatccuc

SEQ ID NO: 46077 - DNA, 25 bp, Artificial Sequence
  Synthetic
ggagatatggaucaagagguagggt

SEQ ID NO: 46078 - DNA, 24 bp, Artificial Sequence
  Synthetic
catctcaccaugctcatttcctut

SEQ ID NO: 46079 - DNA, 27 bp, Artificial Sequence
  Synthetic
tgacctttguaaacactcactcctuac

SEQ ID NO: 46080 - DNA, 21 bp, Artificial Sequence
  Synthetic
gacggcuccctaaacacuacc

SEQ ID NO: 46081 - DNA, 26 bp, Artificial Sequence
  Synthetic
tgacaatgucaaaggcatagaaugct

SEQ ID NO: 46082 - DNA, 24 bp, Artificial Sequence
  Synthetic
catctagacgtutccttggctcut

SEQ ID NO: 46083 - DNA, 21 bp, Artificial Sequence
  Synthetic
cccgttaagucgtagccctua

SEQ ID NO: 46084 - DNA, 32 bp, Artificial Sequence; identical to SEQ ID NO: 33850
  Synthetic

SEQ ID NO: 46085 - DNA, 24 bp, Artificial Sequence
  Synthetic
cagacaaugtcaucacaggaggat

SEQ ID NO: 46086 - DNA, 32 bp, Artificial Sequence; identical to SEQ ID NO: 33852
  Synthetic

SEQ ID NO: 46087 - DNA, 21 bp, Artificial Sequence
  Synthetic
ctgtgggugtttcctgugagt

SEQ ID NO: 46088 - DNA, 22 bp, Artificial Sequence
  Synthetic
gctttttcuccccctcccacua

SEQ ID NO: 46089 - DNA, 19 bp, Artificial Sequence
  Synthetic
ggaugagaagcgcccugac

SEQ ID NO: 46090 - DNA, 23 bp, Artificial Sequence
  Synthetic
ccaccagauggttcgtacagaut

SEQ ID NO: 46091 - DNA, 23 bp, Artificial Sequence
  Synthetic
ctgattttuggcagccactucag

SEQ ID NO: 46092 - DNA, 26 bp, Artificial Sequence
  Synthetic
atgatctgcacutccttttcttcaut

SEQ ID NO: 46093 - DNA, 21 bp, Artificial Sequence
  Synthetic
gcagtugaggccctatgcauc

SEQ ID NO: 46094 - DNA, 28 bp, Artificial Sequence
  Synthetic
gttgtatctcaagcaugaattcagctut

SEQ ID NO: 46095 - DNA, 28 bp, Artificial Sequence
  Synthetic
gagctactatttucagaaacgatcagut

SEQ ID NO: 46096 - DNA, 29 bp, Artificial Sequence
  Synthetic
ctatgacagcatuatttcttgttccctug

SEQ ID NO: 46097 - DNA, 28 bp, Artificial Sequence
  Synthetic
aaatgcttagtauctgcttgatcacuga

SEQ ID NO: 46098 - DNA, 22 bp, Artificial Sequence
  Synthetic
gacaccagugtatgttgggaug

SEQ ID NO: 46099 - DNA, 26 bp, Artificial Sequence
  Synthetic
ctgcaggatatutccatcttctguga

SEQ ID NO: 46100 - DNA, 21 bp, Artificial Sequence
  Synthetic
caggtctauctgaggccucca

SEQ ID NO: 46101 - DNA, 19 bp, Artificial Sequence
  Synthetic
ccgtgaguccatcgtguga

SEQ ID NO: 46102 - DNA, 20 bp, Artificial Sequence
  Synthetic
acctggaggutatcgcuggt

SEQ ID NO: 46103 - DNA, 22 bp, Artificial Sequence
  Synthetic
tctttgaagcaugcctcctucc

SEQ ID NO: 46104 - DNA, 22 bp, Artificial Sequence
  Synthetic
gacccutttggugaaggcaaag

SEQ ID NO: 46105 - DNA, 29 bp, Artificial Sequence
  Synthetic
tcgatatgtuctatgagatcugggagaaa

SEQ ID NO: 46106 - DNA, 26 bp, Artificial Sequence
  Synthetic
gatgaggaaggagaugatgatguagg

SEQ ID NO: 46107 - DNA, 21 bp, Artificial Sequence
  Synthetic
tggcaucgacgacatgtucaa

SEQ ID NO: 46108 - DNA, 21 bp, Artificial Sequence
  Synthetic
tctccguccagctgacttgua

SEQ ID NO: 46109 - DNA, 25 bp, Artificial Sequence
  Synthetic
gtcctgagaaaaucaacatctuggc

SEQ ID NO: 46110 - DNA, 20 bp, Artificial Sequence
  Synthetic
gactgugaagcggctcugat

SEQ ID NO: 46111 - DNA, 21 bp, Artificial Sequence
  Synthetic
gttggugccttctcttugcac

SEQ ID NO: 46112 - DNA, 23 bp, Artificial Sequence
  Synthetic
ggctttcagaugcagacacugat

SEQ ID NO: 46113 - DNA, 29 bp, Artificial Sequence
  Synthetic
agcgaggtacagaautaaatgattgtcut

SEQ ID NO: 46114 - DNA, 24 bp, Artificial Sequence
  Synthetic
gctcttgttgtucacgatggtgua

SEQ ID NO: 46115 - DNA, 22 bp, Artificial Sequence
  Synthetic
gaactgagccacutctctgucc

SEQ ID NO: 46116 - DNA, 17 bp, Artificial Sequence
  Synthetic
cutcgggugcccacact

SEQ ID NO: 46117 - DNA, 19 bp, Artificial Sequence
  Synthetic
ttgtcuggccttgtcugca

SEQ ID NO: 46118 - DNA, 22 bp, Artificial Sequence
  Synthetic
tgaatgtcucgaaccagctgug

SEQ ID NO: 46119 - DNA, 27 bp, Artificial Sequence
  Synthetic
ctttctcucagtcatctctucaaccat

SEQ ID NO: 46120 - DNA, 22 bp, Artificial Sequence
  Synthetic
tcagggacaaaggcaugcatua

SEQ ID NO: 46121 - DNA, 21 bp, Artificial Sequence
  Synthetic
ggtgtgtggacucagctcaua

SEQ ID NO: 46122 - DNA, 25 bp, Artificial Sequence
  Synthetic
ctgttctccucatcttcttctuggt

SEQ ID NO: 46123 - DNA, 19 bp, Artificial Sequence
  Synthetic
gcatugccaccccctacuc

SEQ ID NO: 46124 - DNA, 24 bp, Artificial Sequence
  Synthetic
gaggttgttcauctctctgtccuc

SEQ ID NO: 46125 - DNA, 24 bp, Artificial Sequence
  Synthetic
cctcagttuccccatcauagaact

SEQ ID NO: 46126 - DNA, 20 bp, Artificial Sequence
  Synthetic
gcauaatgacugccccgaca

SEQ ID NO: 46127 - DNA, 23 bp, Artificial Sequence
  Synthetic
ccatcatcgugttcatcttugct

SEQ ID NO: 46128 - DNA, 24 bp, Artificial Sequence
  Synthetic
cagatcaaaguagggaugaccaag

SEQ ID NO: 46129 - DNA, 23 bp, Artificial Sequence
  Synthetic
tggaacatcutcgacagcaucat

SEQ ID NO: 46130 - DNA, 22 bp, Artificial Sequence
  Synthetic
gcaggaucccttcttcctuacc

SEQ ID NO: 46131 - DNA, 24 bp, Artificial Sequence
  Synthetic
ctcaccatcacuatgtgcatcgua

SEQ ID NO: 46132 - DNA, 24 bp, Artificial Sequence
  Synthetic
gctgggauaaagatgaggguacct

SEQ ID NO: 46133 - DNA, 22 bp, Artificial Sequence
  Synthetic
cgcaaatcucctgattgcacuc

SEQ ID NO: 46134 - DNA, 23 bp, Artificial Sequence
  Synthetic
ccagtaaugagaccaccccatug

SEQ ID NO: 46135 - DNA, 23 bp, Artificial Sequence
  Synthetic
cctgggttcugaagcagatttug

SEQ ID NO: 46136 - DNA, 22 bp, Artificial Sequence
  Synthetic
gctagaaccacagcugggatua

SEQ ID NO: 46137 - DNA, 22 bp, Artificial Sequence
  Synthetic
cgtccgttccuccactctttuc

SEQ ID NO: 46138 - DNA, 22 bp, Artificial Sequence
  Synthetic
caggtucaccagguagaaggac

SEQ ID NO: 46139 - DNA, 22 bp, Artificial Sequence
  Synthetic
gctattugaaccccuggcacaa

SEQ ID NO: 46140 - DNA, 29 bp, Artificial Sequence
  Synthetic
ggtcagggcauaaatagaaaatacaguca

SEQ ID NO: 46141 - DNA, 26 bp, Artificial Sequence
  Synthetic
tcaccagcaugatgtttctctuacag

SEQ ID NO: 46142 - DNA, 20 bp, Artificial Sequence
  Synthetic
cgttgagcgcugtgaagtug

SEQ ID NO: 46143 - DNA, 19 bp, Artificial Sequence
  Synthetic
gtgaccccgugcttgtuct

SEQ ID NO: 46144 - DNA, 22 bp, Artificial Sequence
  Synthetic
accaauaggagacacacaguca

SEQ ID NO: 46145 - DNA, 25 bp, Artificial Sequence
  Synthetic
ccaataactguggtttgattcugca

SEQ ID NO: 46146 - DNA, 20 bp, Artificial Sequence
  Synthetic
caggagccauggcauggaat

SEQ ID NO: 46147 - DNA, 20 bp, Artificial Sequence
  Synthetic
gctgcucagctttcctugac

SEQ ID NO: 46148 - DNA, 19 bp, Artificial Sequence
  Synthetic
tggaggugggtggtaguca

SEQ ID NO: 46149 - DNA, 18 bp, Artificial Sequence
  Synthetic
ccaucgagaagcgcaugg

SEQ ID NO: 46150 - DNA, 20 bp, Artificial Sequence
  Synthetic
ggcagcaggaugtcaaguga

SEQ ID NO: 46151 - DNA, 20 bp, Artificial Sequence
  Synthetic
cttccccaugttgcacucct

SEQ ID NO: 46152 - DNA, 23 bp, Artificial Sequence
  Synthetic
ctccattucaccaatgggucaca

SEQ ID NO: 46153 - DNA, 24 bp, Artificial Sequence
  Synthetic
cuccagcacattuccaagaacaag

SEQ ID NO: 46154 - DNA, 23 bp, Artificial Sequence
  Synthetic
tctccccgguactaacactaugg

SEQ ID NO: 46155 - DNA, 19 bp, Artificial Sequence
  Synthetic
ggagtguctgtggcucact

SEQ ID NO: 46156 - DNA, 22 bp, Artificial Sequence
  Synthetic
ccactctgggauccactcacut

SEQ ID NO: 46157 - DNA, 23 bp, Artificial Sequence
  Synthetic
ctctgtactuacagcccccaaug

SEQ ID NO: 46158 - DNA, 18 bp, Artificial Sequence
  Synthetic
guggcaggagccacaaug

SEQ ID NO: 46159 - DNA, 19 bp, Artificial Sequence
  Synthetic
aggtacugcccaggacuga

SEQ ID NO: 46160 - DNA, 18 bp, Artificial Sequence
  Synthetic
gauccaggcaggcucagt

SEQ ID NO: 46161 - DNA, 19 bp, Artificial Sequence
  Synthetic
gtaccaucgggctgugaca

SEQ ID NO: 46162 - DNA, 23 bp, Artificial Sequence
  Synthetic
gtgggaaucagagagggtugaaa

SEQ ID NO: 46163 - DNA, 27 bp, Artificial Sequence
  Synthetic
ggatgatgaguactctgaatacuccga

SEQ ID NO: 46164 - DNA, 20 bp, Artificial Sequence
  Synthetic
ccugcattcauggacaccca

SEQ ID NO: 46165 - DNA, 20 bp, Artificial Sequence
  Synthetic
gctgcccauggtgactucag

SEQ ID NO: 46166 - DNA, 22 bp, Artificial Sequence
  Synthetic
cttcttgacugcttgccctgua

SEQ ID NO: 46167 - DNA, 24 bp, Artificial Sequence
  Synthetic
ctttatggtcccugtggtcttcug

SEQ ID NO: 46168 - DNA, 22 bp, Artificial Sequence
  Synthetic
tcugaccucagggacaacagaa

SEQ ID NO: 46169 - DNA, 21 bp, Artificial Sequence
  Synthetic
ccaacctgccugactctgauc

SEQ ID NO: 46170 - DNA, 28 bp, Artificial Sequence
  Synthetic
ggagatauaggacagagtcagtaaucag

SEQ ID NO: 46171 - DNA, 23 bp, Artificial Sequence
  Synthetic
ctctcatgcutcttctgtuccca

SEQ ID NO: 46172 - DNA, 18 bp, Artificial Sequence
  Synthetic
cccccucattcugagcgt

SEQ ID NO: 46173 - DNA, 24 bp, Artificial Sequence
  Synthetic
gauggagagaagggagauaaggua

SEQ ID NO: 46174 - DNA, 25 bp, Artificial Sequence
  Synthetic
gggtcactauaaggtcaaaagcuac

SEQ ID NO: 46175 - DNA, 20 bp, Artificial Sequence
  Synthetic
gcauctgaguggccacacat

SEQ ID NO: 46176 - DNA, 21 bp, Artificial Sequence
  Synthetic
ccctcacagaugctguggaac

SEQ ID NO: 46177 - DNA, 23 bp, Artificial Sequence
  Synthetic
ccgugacttctuacccaaaccaa

SEQ ID NO: 46178 - DNA, 21 bp, Artificial Sequence
  Synthetic
caggcaggaaucagaggaguc

SEQ ID NO: 46179 - DNA, 29 bp, Artificial Sequence
  Synthetic
gggtgagtggaucttgtatgatatuagaa

SEQ ID NO: 46180 - DNA, 22 bp, Artificial Sequence
  Synthetic
ggactgaagucacagcactguc

SEQ ID NO: 46181 - DNA, 22 bp, Artificial Sequence
  Synthetic
gtcttacuccacagccgaacuc

SEQ ID NO: 46182 - DNA, 20 bp, Artificial Sequence
  Synthetic
ggtcaugggaggtcagugga

SEQ ID NO: 46183 - DNA, 21 bp, Artificial Sequence
  Synthetic
ctcgugaggacttaggauggg

SEQ ID NO: 46184 - DNA, 22 bp, Artificial Sequence
  Synthetic
ggattcaccaugcccctacaug

SEQ ID NO: 46185 - DNA, 22 bp, Artificial Sequence
  Synthetic
cattgaccatuccctcccttug

SEQ ID NO: 46186 - DNA, 23 bp, Artificial Sequence
  Synthetic
ggucacccttugaggaaaagagg

SEQ ID NO: 46187 - DNA, 24 bp, Artificial Sequence
  Synthetic
ctgaactctgugctcatgttccua

SEQ ID NO: 46188 - DNA, 22 bp, Artificial Sequence
  Synthetic
gagccttctcugctcagtaguc

SEQ ID NO: 46189 - DNA, 23 bp, Artificial Sequence
  Synthetic
gcauatttaagctcuggccccat

SEQ ID NO: 46190 - DNA, 22 bp, Artificial Sequence
  Synthetic
gagaggtcagugggattcctug

SEQ ID NO: 46191 - DNA, 22 bp, Artificial Sequence
  Synthetic
acccacaagccugttuccaaat

SEQ ID NO: 46192 - DNA, 20 bp, Artificial Sequence
  Synthetic
tgctgccccacucctcauat

SEQ ID NO: 46193 - DNA, 21 bp, Artificial Sequence
  Synthetic
ctgacagagcucttccctcuc

SEQ ID NO: 46194 - DNA, 23 bp, Artificial Sequence
  Synthetic
ggatgucagggtgacaauggaca

SEQ ID NO: 46195 - DNA, 24 bp, Artificial Sequence
  Synthetic
cacaggutagggtcauagggagat

SEQ ID NO: 46196 - DNA, 18 bp, Artificial Sequence
  Synthetic
gaggtuggcgcacacuac

SEQ ID NO: 46197 - DNA, 23 bp, Artificial Sequence
  Synthetic
gccttctcugtgttaatcccuga

SEQ ID NO: 46198 - DNA, 22 bp, Artificial Sequence
  Synthetic
accaaggaaacugaggcaguac

SEQ ID NO: 46199 - DNA, 25 bp, Artificial Sequence
  Synthetic
guatggaaatugacccccaaggaaa

SEQ ID NO: 46200 - DNA, 21 bp, Artificial Sequence
  Synthetic
gcataugcacaccacctcuag

SEQ ID NO: 46201 - DNA, 24 bp, Artificial Sequence
  Synthetic
gctaaggtcagugtgtggaaucag

SEQ ID NO: 46202 - DNA, 22 bp, Artificial Sequence
  Synthetic
gggttauggcacacacuaccat

SEQ ID NO: 46203 - DNA, 23 bp, Artificial Sequence
  Synthetic
ccaccccatuttcttgtttccug

SEQ ID NO: 46204 - DNA, 22 bp, Artificial Sequence
  Synthetic
ctgaaatgcaaauagcggguga

SEQ ID NO: 46205 - DNA, 21 bp, Artificial Sequence
  Synthetic
gagccuggaaagcctggtaut

SEQ ID NO: 46206 - DNA, 18 bp, Artificial Sequence
  Synthetic
cagccccuatgcctgugg

SEQ ID NO: 46207 - DNA, 20 bp, Artificial Sequence
  Synthetic
gggtgugaaggtgcttucct

SEQ ID NO: 46208 - DNA, 24 bp, Artificial Sequence
  Synthetic
gagagaugaagacaaactgcuagg

SEQ ID NO: 46209 - DNA, 20 bp, Artificial Sequence
  Synthetic
ccaaggtgagugcggatgut

SEQ ID NO: 46210 - DNA, 22 bp, Artificial Sequence
  Synthetic
ggagggutgcccatugaaacat

SEQ ID NO: 46211 - DNA, 23 bp, Artificial Sequence
  Synthetic
ccactctttuctgaggtcucagg

SEQ ID NO: 46212 - DNA, 24 bp, Artificial Sequence
  Synthetic
gcctgaatcucctttctctcccua

SEQ ID NO: 46213 - DNA, 22 bp, Artificial Sequence
  Synthetic
gccagacaccagugaatgttug

SEQ ID NO: 46214 - DNA, 22 bp, Artificial Sequence
  Synthetic
ctgtgggaacagaucactggut

SEQ ID NO: 46215 - DNA, 29 bp, Artificial Sequence
  Synthetic
cagaggcccuataaatctuaacaaagact

SEQ ID NO: 46216 - DNA, 22 bp, Artificial Sequence
  Synthetic
ggtctagggucctcatgugaag

SEQ ID NO: 46217 - DNA, 26 bp, Artificial Sequence
  Synthetic
gcctctuaccactctatttuccacag

SEQ ID NO: 46218 - DNA, 22 bp, Artificial Sequence
  Synthetic
ctggagggaauagggucagaua

SEQ ID NO: 46219 - DNA, 23 bp, Artificial Sequence
  Synthetic
ggaaagggugagtgtgattgguc

SEQ ID NO: 46220 - DNA, 21 bp, Artificial Sequence
  Synthetic
cttgcugaggaacagcctuga

SEQ ID NO: 46221 - DNA, 22 bp, Artificial Sequence
  Synthetic
ccccttgtugagccattctuct

SEQ ID NO: 46222 - DNA, 21 bp, Artificial Sequence
  Synthetic
ctccagaccccutgtgugaag

SEQ ID NO: 46223 - DNA, 23 bp, Artificial Sequence
  Synthetic
aaggcuaccaacattcccaugag

SEQ ID NO: 46224 - DNA, 23 bp, Artificial Sequence
  Synthetic
cctcagcctutcctatcacctuc

SEQ ID NO: 46225 - DNA, 24 bp, Artificial Sequence
  Synthetic
tccctgagugagttagatccugac

SEQ ID NO: 46226 - DNA, 21 bp, Artificial Sequence
  Synthetic
ggtuccaagaacccccaugat

SEQ ID NO: 46227 - DNA, 22 bp, Artificial Sequence
  Synthetic
cttgagaacugcttgctucgag

SEQ ID NO: 46228 - DNA, 21 bp, Artificial Sequence
  Synthetic
caggactuagtcaggguccca

SEQ ID NO: 46229 - DNA, 24 bp, Artificial Sequence
  Synthetic
ggtgaaggttgucttcctgactuc

SEQ ID NO: 46230 - DNA, 23 bp, Artificial Sequence
  Synthetic
ccaagtcccauagataggcccua

SEQ ID NO: 46231 - DNA, 26 bp, Artificial Sequence
  Synthetic
acctccatuccaatgaagacttugat

SEQ ID NO: 46232 - DNA, 22 bp, Artificial Sequence
  Synthetic
gagucaccuaggagcccaaaat

SEQ ID NO: 46233 - DNA, 22 bp, Artificial Sequence
  Synthetic
caggagugggacttttgtgugt

SEQ ID NO: 46234 - DNA, 22 bp, Artificial Sequence
  Synthetic
gucaagggcaagaagucagaac

SEQ ID NO: 46235 - DNA, 23 bp, Artificial Sequence
  Synthetic
ctggagagaagguaagugcaacc

SEQ ID NO: 46236 - DNA, 23 bp, Artificial Sequence
  Synthetic
ctggagggaacucttatctccut

SEQ ID NO: 46237 - DNA, 26 bp, Artificial Sequence
  Synthetic
caaatctcugaacccccaaattcauc

SEQ ID NO: 46238 - DNA, 21 bp, Artificial Sequence
  Synthetic
accccagaacugggacaucat

SEQ ID NO: 46239 - DNA, 18 bp, Artificial Sequence
  Synthetic
gggtgtggguctctccug

SEQ ID NO: 46240 - DNA, 22 bp, Artificial Sequence
  Synthetic
gaacagcaggucagggaaugaa

SEQ ID NO: 46241 - DNA, 24 bp, Artificial Sequence
  Synthetic
cctcatcacucctggtatcttugg

SEQ ID NO: 46242 - DNA, 24 bp, Artificial Sequence
  Synthetic
gagacaaaguataaggugcaaccc

SEQ ID NO: 46243 - DNA, 22 bp, Artificial Sequence
  Synthetic
cccactgcuctctgtcctuaca

SEQ ID NO: 46244 - DNA, 23 bp, Artificial Sequence
  Synthetic
gaagaacccugggaagacactua

SEQ ID NO: 46245 - DNA, 22 bp, Artificial Sequence
  Synthetic
ctaaaggugagcaagccttguc

SEQ ID NO: 46246 - DNA, 22 bp, Artificial Sequence
  Synthetic
tcccgatgautctaactcugct

SEQ ID NO: 46247 - DNA, 25 bp, Artificial Sequence
  Synthetic
cccacctaacugctatcttcttuca

SEQ ID NO: 46248 - DNA, 23 bp, Artificial Sequence
  Synthetic
ggaaagacaugtcagatgugggt

SEQ ID NO: 46249 - DNA, 25 bp, Artificial Sequence
  Synthetic
gggactggguggtagaatauaaggg

SEQ ID NO: 46250 - DNA, 24 bp, Artificial Sequence
  Synthetic
aagaaggtcuggacagagtccaua

SEQ ID NO: 46251 - DNA, 22 bp, Artificial Sequence
  Synthetic
ccaggcttcuggtaaggaguag

SEQ ID NO: 46252 - DNA, 20 bp, Artificial Sequence
  Synthetic
caccaagcucccagtggaua

SEQ ID NO: 46253 - DNA, 21 bp, Artificial Sequence
  Synthetic
caggctcugtgtttcctucca

SEQ ID NO: 46254 - DNA, 22 bp, Artificial Sequence
  Synthetic
ccttcccacuacgcccactaua

SEQ ID NO: 46255 - DNA, 27 bp, Artificial Sequence
  Synthetic
ctttttaatcaagutctgtctccugca

SEQ ID NO: 46256 - DNA, 19 bp, Artificial Sequence
  Synthetic
ccaaggugaggcaggctua

SEQ ID NO: 46257 - DNA, 23 bp, Artificial Sequence
  Synthetic
tgtcactaucccacatgctctug

SEQ ID NO: 46258 - DNA, 24 bp, Artificial Sequence
  Synthetic
actaccaatccuggtcctttcucc

SEQ ID NO: 46259 - DNA, 22 bp, Artificial Sequence
  Synthetic
acucccaggaaauacagacuct

SEQ ID NO: 46260 - DNA, 20 bp, Artificial Sequence
  Synthetic
gtgatccguagaacgucgct

SEQ ID NO: 46261 - DNA, 24 bp, Artificial Sequence
  Synthetic
acactaaccucacactgacttuca

SEQ ID NO: 46262 - DNA, 20 bp, Artificial Sequence
  Synthetic
ccaccuggacccccaauaaa

SEQ ID NO: 46263 - DNA, 20 bp, Artificial Sequence
  Synthetic
ttccagcagacuccccatug

SEQ ID NO: 46264 - DNA, 21 bp, Artificial Sequence
  Synthetic
gcacccauaccctcattgguc

SEQ ID NO: 46265 - DNA, 27 bp, Artificial Sequence
  Synthetic
acttctgacttcugtctgtaactccua

SEQ ID NO: 46266 - DNA, 21 bp, Artificial Sequence
  Synthetic
aggtacacucagaccccucag

SEQ ID NO: 46267 - DNA, 22 bp, Artificial Sequence
  Synthetic
tctatgcugtgctcuccaacag

SEQ ID NO: 46268 - DNA, 22 bp, Artificial Sequence
  Synthetic
caagccugcaagauaacagggt

SEQ ID NO: 46269 - DNA, 19 bp, Artificial Sequence
  Synthetic
gaggccacugacaucccat

SEQ ID NO: 46270 - DNA, 22 bp, Artificial Sequence
  Synthetic
gccttgcagacucaggactcua

SEQ ID NO: 46271 - DNA, 21 bp, Artificial Sequence
  Synthetic
tgaatcccuggtgggactcuc

SEQ ID NO: 46272 - DNA, 24 bp, Artificial Sequence
  Synthetic
cagggcaagaggucactttatcut

SEQ ID NO: 46273 - DNA, 25 bp, Artificial Sequence
  Synthetic
caatcctugagagtacaguggacag

SEQ ID NO: 46274 - DNA, 21 bp, Artificial Sequence
  Synthetic
gtctaggucaggguacaccgt

SEQ ID NO: 46275 - DNA, 21 bp, Artificial Sequence
  Synthetic
gtcctgaugggtcgtcactuc

SEQ ID NO: 46276 - DNA, 21 bp, Artificial Sequence
  Synthetic
ggttccccuggacacttcaut

SEQ ID NO: 46277 - DNA, 23 bp, Artificial Sequence
  Synthetic
ccatccgugagcttagcuacaag

SEQ ID NO: 46278 - DNA, 19 bp, Artificial Sequence
  Synthetic
gggttuccagggtctccuc

SEQ ID NO: 46279 - DNA, 24 bp, Artificial Sequence
  Synthetic
gttcttactggauggctcctcauc

SEQ ID NO: 46280 - DNA, 19 bp, Artificial Sequence
  Synthetic
ggaugaaggccgaguggag

SEQ ID NO: 46281 - DNA, 21 bp, Artificial Sequence
  Synthetic
gctgacggcutttactgccua

SEQ ID NO: 46282 - DNA, 22 bp, Artificial Sequence
  Synthetic
gcaaaacuccuggaagggacag

SEQ ID NO: 46283 - DNA, 23 bp, Artificial Sequence
  Synthetic
aagaatguggcgatgggttaugt

SEQ ID NO: 46284 - DNA, 22 bp, Artificial Sequence
  Synthetic
ccugggaagagauaagggttuc

SEQ ID NO: 46285 - DNA, 26 bp, Artificial Sequence
  Synthetic
gcttatgtcucatgtgtcattcucca

SEQ ID NO: 46286 - DNA, 25 bp, Artificial Sequence
  Synthetic
acaggtgtagugtgttcatcaaugt

SEQ ID NO: 46287 - DNA, 22 bp, Artificial Sequence
  Synthetic
tgccctcuggtgtttcauacag

SEQ ID NO: 46288 - DNA, 21 bp, Artificial Sequence
  Synthetic
aagcagucaaugaagccagga

SEQ ID NO: 46289 - DNA, 28 bp, Artificial Sequence
  Synthetic
cagatgctcttgugtttctgtctttuag

SEQ ID NO: 46290 - DNA, 20 bp, Artificial Sequence
  Synthetic
cccatttgcuggctcaugac

SEQ ID NO: 46291 - DNA, 23 bp, Artificial Sequence
  Synthetic
gcctgaggcuttcaatctctucc

SEQ ID NO: 46292 - DNA, 18 bp, Artificial Sequence
  Synthetic
gtgcaggugcgagucagt

SEQ ID NO: 46293 - DNA, 18 bp, Artificial Sequence
  Synthetic
ggcccuggtggcacuaag

SEQ ID NO: 46294 - DNA, 22 bp, Artificial Sequence
  Synthetic
cagagccagauagcagacctug

SEQ ID NO: 46295 - DNA, 22 bp, Artificial Sequence
  Synthetic
gagttcaugaagggtguggagt

SEQ ID NO: 46296 - DNA, 19 bp, Artificial Sequence
  Synthetic
gcauggaggcaggagauca

SEQ ID NO: 46297 - DNA, 18 bp, Artificial Sequence
  Synthetic
ccacagcccuacccugag

SEQ ID NO: 46298 - DNA, 22 bp, Artificial Sequence
  Synthetic
ggctcggauaggctaaatugct

SEQ ID NO: 46299 - DNA, 20 bp, Artificial Sequence
  Synthetic
gggcaaggugatgaggaugc

SEQ ID NO: 46300 - DNA, 20 bp, Artificial Sequence
  Synthetic
accaagccuctggtctcugg

SEQ ID NO: 46301 - DNA, 22 bp, Artificial Sequence
  Synthetic
tcagcagcagcuataccugagt

SEQ ID NO: 46302 - DNA, 21 bp, Artificial Sequence
  Synthetic
cctttucccggagctctucaa

SEQ ID NO: 46303 - DNA, 22 bp, Artificial Sequence
  Synthetic
tggtaaugagcaaagccgtcuc

SEQ ID NO: 46304 - DNA, 26 bp, Artificial Sequence
  Synthetic
atgcagaaagucaacttauggaagga

SEQ ID NO: 46305 - DNA, 28 bp, Artificial Sequence
  Synthetic
ccatcacttttccauggattatcactug

SEQ ID NO: 46306 - DNA, 24 bp, Artificial Sequence
  Synthetic
tggttctgtaauaggcctcaccut

SEQ ID NO: 46307 - DNA, 25 bp, Artificial Sequence
  Synthetic
catacaattucaggcaaggccauac

SEQ ID NO: 46308 - DNA, 24 bp, Artificial Sequence
  Synthetic
ccugaagaagaaggaggttuaugt

SEQ ID NO: 46309 - DNA, 28 bp, Artificial Sequence
  Synthetic
ctgaggatacutaaaggtacugaaaggt

SEQ ID NO: 46310 - DNA, 29 bp, Artificial Sequence
  Synthetic
cttccaacaauaggattcagcauagagaa

SEQ ID NO: 46311 - DNA, 24 bp, Artificial Sequence
  Synthetic
gggtaggaagaaugaccagguaga

SEQ ID NO: 46312 - DNA, 24 bp, Artificial Sequence
  Synthetic
cttaggtuaggaaatgcccaugga

SEQ ID NO: 46313 - DNA, 28 bp, Artificial Sequence
  Synthetic
agatacagacugaaagacacacacauac

SEQ ID NO: 46314 - DNA, 25 bp, Artificial Sequence
  Synthetic
tgtaaaagtgtcucagttgctgugt

SEQ ID NO: 46315 - DNA, 27 bp, Artificial Sequence
  Synthetic
gcttataugccaccatgtttgaucact

SEQ ID NO: 46316 - DNA, 22 bp, Artificial Sequence
  Synthetic
tgggccacauagcaagatccua

SEQ ID NO: 46317 - DNA, 29 bp, Artificial Sequence
  Synthetic
tgctgaggttuccaactattatctttuca

SEQ ID NO: 46318 - DNA, 28 bp, Artificial Sequence
  Synthetic
cttgcatttatggacuctgaccttttua

SEQ ID NO: 46319 - DNA, 28 bp, Artificial Sequence
  Synthetic
gggatgagatggcutataactgacttut

SEQ ID NO: 46320 - DNA, 25 bp, Artificial Sequence
  Synthetic
caaccaucaaucagaaaaaggaggg

SEQ ID NO: 46321 - DNA, 26 bp, Artificial Sequence
  Synthetic
agcaagacaagugaagtcaactgtua

SEQ ID NO: 46322 - DNA, 29 bp, Artificial Sequence
  Synthetic
ttcttctaacaacautctgacacctuacc

SEQ ID NO: 46323 - DNA, 21 bp, Artificial Sequence
  Synthetic
tgcuacaactguggcaaacca

SEQ ID NO: 46324 - DNA, 21 bp, Artificial Sequence
  Synthetic
gcatgtgcucacctcuccaag

SEQ ID NO: 46325 - DNA, 24 bp, Artificial Sequence
  Synthetic
ctggtctgacuagccgaattctut

SEQ ID NO: 46326 - DNA, 18 bp, Artificial Sequence
  Synthetic
cctcugccacggcttcuc

SEQ ID NO: 46327 - DNA, 28 bp, Artificial Sequence
  Synthetic
aaaagaactttcaguggtttaatgcugt

SEQ ID NO: 46328 - DNA, 22 bp, Artificial Sequence
  Synthetic
cttctacgugcccttcuccaat

SEQ ID NO: 46329 - DNA, 20 bp, Artificial Sequence
  Synthetic
cggctaggutgagcaggaug

SEQ ID NO: 46330 - DNA, 23 bp, Artificial Sequence
  Synthetic
cctagctacccuctccctgtcua

SEQ ID NO: 46331 - DNA, 21 bp, Artificial Sequence
  Synthetic
cccatgauggcatggttcucc

SEQ ID NO: 46332 - DNA, 21 bp, Artificial Sequence
  Synthetic
ctgtucccaagtcccucacag

SEQ ID NO: 46333 - DNA, 28 bp, Artificial Sequence
  Synthetic
tgcccauagcagaaaaagatgataauca

SEQ ID NO: 46334 - DNA, 19 bp, Artificial Sequence
  Synthetic
ctggaggagccauggtcug

SEQ ID NO: 46335 - DNA, 22 bp, Artificial Sequence
  Synthetic
gaagaugggaccgaagtuggag

SEQ ID NO: 46336 - DNA, 20 bp, Artificial Sequence
  Synthetic
gggcgaaccucactaacgug

SEQ ID NO: 46337 - DNA, 23 bp, Artificial Sequence
  Synthetic
acagagtccuaggcaggtctuag

SEQ ID NO: 46338 - DNA, 27 bp, Artificial Sequence
  Synthetic
aaatcttcctctuttaactagctgcug

SEQ ID NO: 46339 - DNA, 24 bp, Artificial Sequence
  Synthetic
cctggttguactgtagcttgtugt

SEQ ID NO: 46340 - DNA, 22 bp, Artificial Sequence
  Synthetic
cgggttucacatttctcctucc

SEQ ID NO: 46341 - DNA, 24 bp, Artificial Sequence
  Synthetic
tcaaaaacaaaugtccccggauct

SEQ ID NO: 46342 - DNA, 26 bp, Artificial Sequence
  Synthetic
tcctaactcugaacacagcttttuga

SEQ ID NO: 46343 - DNA, 27 bp, Artificial Sequence
  Synthetic
gttttgtttgaaagaucggtggaacut

SEQ ID NO: 46344 - DNA, 23 bp, Artificial Sequence
  Synthetic
tctgaacagcutcaagagggtuc

SEQ ID NO: 46345 - DNA, 21 bp, Artificial Sequence
  Synthetic
acctctuggccttctcucaca

SEQ ID NO: 46346 - DNA, 23 bp, Artificial Sequence
  Synthetic
gcacaggaggacauaaacugagg

SEQ ID NO: 46347 - DNA, 17 bp, Artificial Sequence
  Synthetic
cgcgccucgatctcuga

SEQ ID NO: 46348 - DNA, 17 bp, Artificial Sequence
  Synthetic
gtgcagauggtgugcgt

SEQ ID NO: 46349 - DNA, 17 bp, Artificial Sequence
  Synthetic
gccgcugtggucaaggg

SEQ ID NO: 46350 - DNA, 20 bp, Artificial Sequence
  Synthetic
gccacgagutgtugaggaag

SEQ ID NO: 46351 - DNA, 19 bp, Artificial Sequence
  Synthetic
cggccugcgaagacatgut

SEQ ID NO: 46352 - DNA, 20 bp, Artificial Sequence
  Synthetic
aacgggaacutcgcgaugat

SEQ ID NO: 46353 - DNA, 17 bp, Artificial Sequence
  Synthetic
cugcuggccccagagac

SEQ ID NO: 46354 - DNA, 18 bp, Artificial Sequence
  Synthetic
guccgctuacggccaagt

SEQ ID NO: 46355 - DNA, 18 bp, Artificial Sequence
  Synthetic
ccggagccccuctctgut

SEQ ID NO: 46356 - DNA, 24 bp, Artificial Sequence
  Synthetic
ggaaacttgtguggcttggtttua

SEQ ID NO: 46357 - DNA, 25 bp, Artificial Sequence
  Synthetic
ttttcttgccaautttaagcucgca

SEQ ID NO: 46358 - DNA, 30 bp, Artificial Sequence; identical to SEQ ID NO: 34124
  Synthetic

SEQ ID NO: 46359 - DNA, 27 bp, Artificial Sequence
  Synthetic
cgtccattttgcuaaaaaccatacuca

SEQ ID NO: 46360 - DNA, 18 bp, Artificial Sequence
  Synthetic
tguccgcccctcuaacga

SEQ ID NO: 46361 - DNA, 17 bp, Artificial Sequence
  Synthetic
gcugctccguccccaag

SEQ ID NO: 46362 - DNA, 21 bp, Artificial Sequence
  Synthetic
ccactgtcugggtcaaggaug

SEQ ID NO: 46363 - DNA, 21 bp, Artificial Sequence
  Synthetic
actcggcucctttctguagct

SEQ ID NO: 46364 - DNA, 17 bp, Artificial Sequence
  Synthetic
cctctgcucccacucgg

SEQ ID NO: 46365 - DNA, 17 bp, Artificial Sequence
  Synthetic
cgcccaccutgaugcct

SEQ ID NO: 46366 - DNA, 20 bp, Artificial Sequence
  Synthetic
gtggagccuggtcauggaaa

SEQ ID NO: 46367 - DNA, 18 bp, Artificial Sequence
  Synthetic
ggcagaugacgcucaggg

SEQ ID NO: 46368 - DNA, 21 bp, Artificial Sequence
  Synthetic
actgcaaggugtacagugacg

SEQ ID NO: 46369 - DNA, 22 bp, Artificial Sequence
  Synthetic
ctagacccaaauccucacgcaa

SEQ ID NO: 46370 - DNA, 18 bp, Artificial Sequence
  Synthetic
ctcgccuatcgctcugct

SEQ ID NO: 46371 - DNA, 17 bp, Artificial Sequence
  Synthetic
gcgucccccagacagug

SEQ ID NO: 46372 - DNA, 22 bp, Artificial Sequence
  Synthetic
gtatgcaggcaucctcagcuac

SEQ ID NO: 46373 - DNA, 26 bp, Artificial Sequence
  Synthetic
agctcagaaccuggtatctacttuct

SEQ ID NO: 46374 - DNA, 18 bp, Artificial Sequence
  Synthetic
gctgagagugggcgagut

SEQ ID NO: 46375 - DNA, 17 bp, Artificial Sequence
  Synthetic
ccagcccugctcugcac

SEQ ID NO: 46376 - DNA, 17 bp, Artificial Sequence
  Synthetic
cggtaggugcgguagcg

SEQ ID NO: 46377 - DNA, 20 bp, Artificial Sequence
  Synthetic
cttgaaggugagctgcucct

SEQ ID NO: 46378 - DNA, 20 bp, Artificial Sequence
  Synthetic
ggagagguggagaggctuca

SEQ ID NO: 46379 - DNA, 19 bp, Artificial Sequence
  Synthetic
cgtccuactggcaugaccc

SEQ ID NO: 46380 - DNA, 20 bp, Artificial Sequence
  Synthetic
ggtgtctgucctgggaguct

SEQ ID NO: 46381 - DNA, 18 bp, Artificial Sequence
  Synthetic
gccagggaugccacucac

SEQ ID NO: 46382 - DNA, 19 bp, Artificial Sequence
  Synthetic
ctgcccgcagguacaugat

SEQ ID NO: 46383 - DNA, 19 bp, Artificial Sequence
  Synthetic
cccacaccucagcactcug

SEQ ID NO: 46384 - DNA, 18 bp, Artificial Sequence
  Synthetic
gggacgacuccgtgttug

SEQ ID NO: 46385 - DNA, 23 bp, Artificial Sequence
  Synthetic
cacacagaccaaagcuctgtgua

SEQ ID NO: 46386 - DNA, 26 bp, Artificial Sequence
  Synthetic
atctgtcagcagauctcaagaaacug

SEQ ID NO: 46387 - DNA, 23 bp, Artificial Sequence
  Synthetic
gggagccatutcctatctcatug

SEQ ID NO: 46388 - DNA, 30 bp, Artificial Sequence; identical to SEQ ID NO: 34154
  Synthetic

SEQ ID NO: 46389 - DNA, 26 bp, Artificial Sequence
  Synthetic
caccctttaatcugttgttgctctut

SEQ ID NO: 46390 - DNA, 24 bp, Artificial Sequence
  Synthetic
cactcaugaacaagcaccaaacug

SEQ ID NO: 46391 - DNA, 28 bp, Artificial Sequence
  Synthetic
ccccgaaagttcucattcaaagtgtaut

SEQ ID NO: 46392 - DNA, 23 bp, Artificial Sequence
  Synthetic
aggcctttuaagagcaccttucc

SEQ ID NO: 46393 - DNA, 31 bp, Artificial Sequence; identical to SEQ ID NO: 34159
  Synthetic

SEQ ID NO: 46394 - DNA, 27 bp, Artificial Sequence
  Synthetic
gaggccauaactcttgtagaaucaact

SEQ ID NO: 46395 - DNA, 30 bp, Artificial Sequence; identical to SEQ ID NO: 34161
  Synthetic

SEQ ID NO: 46396 - DNA, 24 bp, Artificial Sequence
  Synthetic
agggagaaauggcataaagcacut

SEQ ID NO: 46397 - DNA, 22 bp, Artificial Sequence
  Synthetic
tcacgccucctaaagttccuct

SEQ ID NO: 46398 - DNA, 28 bp, Artificial Sequence
  Synthetic
ggaaatggtcaaugtagttgagaaaguc

SEQ ID NO: 46399 - DNA, 27 bp, Artificial Sequence
  Synthetic
aaataattaccugcagctcatctccuc

SEQ ID NO: 46400 - DNA, 24 bp, Artificial Sequence
  Synthetic
gaccguaagaattaacuggcaggt

SEQ ID NO: 46401 - DNA, 22 bp, Artificial Sequence
  Synthetic
tttctgttgcutccgtcgttug

SEQ ID NO: 46402 - DNA, 21 bp, Artificial Sequence
  Synthetic
caguccgggaacagatuccac

SEQ ID NO: 46403 - DNA, 28 bp, Artificial Sequence
  Synthetic
acaaagaagauaagagcaccauacaaua

SEQ ID NO: 46404 - DNA, 28 bp, Artificial Sequence
  Synthetic
gaagauaaagggaggaacaguttttaug

SEQ ID NO: 46405 - DNA, 22 bp, Artificial Sequence
  Synthetic
gcttgtuggagaccaccttcug

SEQ ID NO: 46406 - DNA, 21 bp, Artificial Sequence
  Synthetic
ctggucaatcaccuggacgag

SEQ ID NO: 46407 - DNA, 22 bp, Artificial Sequence
  Synthetic
cccctgggagucacacatcaua

SEQ ID NO: 46408 - DNA, 22 bp, Artificial Sequence
  Synthetic
tcttcctatggauggctggcua

SEQ ID NO: 46409 - DNA, 24 bp, Artificial Sequence
  Synthetic
ctgaactgccugagaagatucaga

SEQ ID NO: 46410 - DNA, 28 bp, Artificial Sequence
  Synthetic
cctttcttuaaaaacaagcagccacuaa

SEQ ID NO: 46411 - DNA, 27 bp, Artificial Sequence
  Synthetic
ctagctcttgucgaagatttgagtuct

SEQ ID NO: 46412 - DNA, 33 bp, Artificial Sequence; identical to SEQ ID NO: 34178
  Synthetic

SEQ ID NO: 46413 - DNA, 25 bp, Artificial Sequence
  Synthetic
cgagagaagcugtacttggatcuac

SEQ ID NO: 46414 - DNA, 22 bp, Artificial Sequence
  Synthetic
cttauggaagucgggaaggauc

SEQ ID NO: 46415 - DNA, 26 bp, Artificial Sequence
  Synthetic
aacaauaaactggaguacacaaggca

SEQ ID NO: 46416 - DNA, 32 bp, Artificial Sequence; identical to SEQ ID NO: 34182
  Synthetic

SEQ ID NO: 46417 - DNA, 30 bp, Artificial Sequence; identical to SEQ ID NO: 34183
  Synthetic

SEQ ID NO: 46418 - DNA, 26 bp, Artificial Sequence
  Synthetic
gaaagcctacaccauttttgcatgua

SEQ ID NO: 46419 - DNA, 29 bp, Artificial Sequence
  Synthetic
agaaccatctugcttcatacttttcugat

SEQ ID NO: 46420 - DNA, 30 bp, Artificial Sequence; identical to SEQ ID NO: 34186
  Synthetic

SEQ ID NO: 46421 - DNA, 24 bp, Artificial Sequence
  Synthetic
gggagcuagacatagcuagcaaag

SEQ ID NO: 46422 - DNA, 22 bp, Artificial Sequence
  Synthetic
tgcagcacuccacaacatcaut

SEQ ID NO: 46423 - DNA, 30 bp, Artificial Sequence; identical to SEQ ID NO: 34189
  Synthetic

SEQ ID NO: 46424 - DNA, 26 bp, Artificial Sequence
  Synthetic
gattttattttucagtgccagcucct

SEQ ID NO: 46425 - DNA, 31 bp, Artificial Sequence; identical to SEQ ID NO: 34191
  Synthetic

SEQ ID NO: 46426 - DNA, 28 bp, Artificial Sequence
  Synthetic
cagaattatugcaagtggactgugaaat

SEQ ID NO: 46427 - DNA, 32 bp, Artificial Sequence; identical to SEQ ID NO: 34193
  Synthetic

SEQ ID NO: 46428 - DNA, 27 bp, Artificial Sequence
  Synthetic
tgattaatttgcaggutattgcgagug

SEQ ID NO: 46429 - DNA, 29 bp, Artificial Sequence
  Synthetic
caggtaagaaautaggaaatctcauggct

SEQ ID NO: 46430 - DNA, 22 bp, Artificial Sequence
  Synthetic
gctgtagauggtgcactugcat

SEQ ID NO: 46431 - DNA, 32 bp, Artificial Sequence; identical to SEQ ID NO: 34197
  Synthetic

SEQ ID NO: 46432 - DNA, 26 bp, Artificial Sequence
  Synthetic
tctcagcaagaaauccuaaagaccag

SEQ ID NO: 46433 - DNA, 28 bp, Artificial Sequence
  Synthetic
cttctagggctutttgtttcctaacaug

SEQ ID NO: 46434 - DNA, 28 bp, Artificial Sequence
  Synthetic
ccaatcgacaugatgataataggucaga

SEQ ID NO: 46435 - DNA, 23 bp, Artificial Sequence
  Synthetic
ctgcaaaccucgcttugaagaag

SEQ ID NO: 46436 - DNA, 21 bp, Artificial Sequence
  Synthetic
gaagaagctcugctgcccaua

SEQ ID NO: 46437 - DNA, 31 bp, Artificial Sequence; identical to SEQ ID NO: 34203
  Synthetic

SEQ ID NO: 46438 - DNA, 22 bp, Artificial Sequence
  Synthetic
ctggaaggcaaagucctucaca

SEQ ID NO: 46439 - DNA, 24 bp, Artificial Sequence
  Synthetic
cgatttgttuctgaaccatuggct

SEQ ID NO: 46440 - DNA, 33 bp, Artificial Sequence; identical to SEQ ID NO: 34206
  Synthetic

SEQ ID NO: 46441 - DNA, 23 bp, Artificial Sequence
  Synthetic
gcctctuggcattagaugaaggt

SEQ ID NO: 46442 - DNA, 32 bp, Artificial Sequence; identical to SEQ ID NO: 34208
  Synthetic

SEQ ID NO: 46443 - DNA, 23 bp, Artificial Sequence
  Synthetic
gatttggttcuagggtgctguga

SEQ ID NO: 46444 - DNA, 22 bp, Artificial Sequence
  Synthetic
acuatgtucaggagaccccact

SEQ ID NO: 46445 - DNA, 23 bp, Artificial Sequence
  Synthetic
gcttggttugagctgttugagga

SEQ ID NO: 46446 - DNA, 25 bp, Artificial Sequence
  Synthetic
cacggaaagtacuccagatggatut

SEQ ID NO: 46447 - DNA, 32 bp, Artificial Sequence; identical to SEQ ID NO: 34213
  Synthetic

SEQ ID NO: 46448 - DNA, 21 bp, Artificial Sequence
  Synthetic
attaccuccacctguggcaag

SEQ ID NO: 46449 - DNA, 23 bp, Artificial Sequence
  Synthetic
tctaactcctuctccagcagcua

SEQ ID NO: 46450 - DNA, 29 bp, Artificial Sequence
  Synthetic
gatgacaauaaaguagaggaaggtgauat

SEQ ID NO: 46451 - DNA, 30 bp, Artificial Sequence; identical to SEQ ID NO: 34217
  Synthetic

SEQ ID NO: 46452 - DNA, 25 bp, Artificial Sequence
  Synthetic
caaggtctucaatgataagcuccca

SEQ ID NO: 46453 - DNA, 27 bp, Artificial Sequence
  Synthetic
cctctgatuccttattttctttugcct

SEQ ID NO: 46454 - DNA, 26 bp, Artificial Sequence
  Synthetic
agtcauccaaagacauaccagacaga

SEQ ID NO: 46455 - DNA, 24 bp, Artificial Sequence
  Synthetic
tgatttaggagcauagcctgaugc

SEQ ID NO: 46456 - DNA, 28 bp, Artificial Sequence
  Synthetic
ccttcaagacucaagggtgataaugaaa

SEQ ID NO: 46457 - DNA, 27 bp, Artificial Sequence
  Synthetic
ttactatggaatutgcaccttccugaa

SEQ ID NO: 46458 - DNA, 28 bp, Artificial Sequence
  Synthetic
acctgaucaagaagaaaaacccttuaca

SEQ ID NO: 46459 - DNA, 24 bp, Artificial Sequence
  Synthetic
cctcgagagautgaaggcatgtut

SEQ ID NO: 46460 - DNA, 22 bp, Artificial Sequence
  Synthetic
gccuccaaaagccctagugaag

SEQ ID NO: 46461 - DNA, 23 bp, Artificial Sequence
  Synthetic
gttucggucaggagactgtauag

SEQ ID NO: 46462 - DNA, 22 bp, Artificial Sequence
  Synthetic
cagguagacagaugagccaaca

SEQ ID NO: 46463 - DNA, 30 bp, Artificial Sequence; identical to SEQ ID NO: 34229
  Synthetic

SEQ ID NO: 46464 - DNA, 25 bp, Artificial Sequence
  Synthetic
gcacaaacuccagttttaagtccut

SEQ ID NO: 46465 - DNA, 24 bp, Artificial Sequence
  Synthetic
gtttccaggtucctgacctatuga

SEQ ID NO: 46466 - DNA, 28 bp, Artificial Sequence
  Synthetic
aaacatgugaactctattucaggaacca

SEQ ID NO: 46467 - DNA, 26 bp, Artificial Sequence
  Synthetic
ctcacccaaacaucctctgtttuaga

SEQ ID NO: 46468 - DNA, 30 bp, Artificial Sequence; identical to SEQ ID NO: 5832
  Synthetic

SEQ ID NO: 46469 - DNA, 23 bp, Artificial Sequence
  Synthetic
tttgcttgagcugctagaacuga

SEQ ID NO: 46470 - DNA, 19 bp, Artificial Sequence
  Synthetic
cagcucggccatcucagat

SEQ ID NO: 46471 - DNA, 33 bp, Artificial Sequence; identical to SEQ ID NO: 34237
  Synthetic

SEQ ID NO: 46472 - DNA, 27 bp, Artificial Sequence
  Synthetic
cctgtctauacaagtcatgagttuggg

SEQ ID NO: 46473 - DNA, 23 bp, Artificial Sequence
  Synthetic
agcttatuccaagctgagtugct

SEQ ID NO: 46474 - DNA, 27 bp, Artificial Sequence
  Synthetic
gccaataccaauagaattgttagguga

SEQ ID NO: 46475 - DNA, 27 bp, Artificial Sequence
  Synthetic
ttaaatcccauaggcaatagctuggaa

SEQ ID NO: 46476 - DNA, 23 bp, Artificial Sequence
  Synthetic
gcagagcccucagcaaatacuac

SEQ ID NO: 46477 - DNA, 27 bp, Artificial Sequence
  Synthetic
cagaaatgucccagaactuaaagcaat

SEQ ID NO: 46478 - DNA, 30 bp, Artificial Sequence; identical to SEQ ID NO: 34244
  Synthetic

SEQ ID NO: 46479 - DNA, 23 bp, Artificial Sequence
  Synthetic
tctgactccucttctggcttcut

SEQ ID NO: 46480 - DNA, 21 bp, Artificial Sequence
  Synthetic
agagcaagcugccctttctut

SEQ ID NO: 46481 - DNA, 21 bp, Artificial Sequence
  Synthetic
tgctctctgagucctcctcug

SEQ ID NO: 46482 - DNA, 21 bp, Artificial Sequence
  Synthetic
cttctgtacguggtgtccugt

SEQ ID NO: 46483 - DNA, 17 bp, Artificial Sequence
  Synthetic
gctgcuctgcgagucct

SEQ ID NO: 46484 - DNA, 22 bp, Artificial Sequence
  Synthetic
tcccctcaucctgtttcucact

SEQ ID NO: 46485 - DNA, 21 bp, Artificial Sequence
  Synthetic
gcttcttgagucctcctccug

SEQ ID NO: 46486 - DNA, 24 bp, Artificial Sequence
  Synthetic
ctcactcacautctccttcuggac

SEQ ID NO: 46487 - DNA, 23 bp, Artificial Sequence
  Synthetic
tctgatgacucctcactacugct

SEQ ID NO: 46488 - DNA, 23 bp, Artificial Sequence
  Synthetic
tcacacugggactctgtcuacaa

SEQ ID NO: 46489 - DNA, 20 bp, Artificial Sequence
  Synthetic
tgctctccgagutgtccaug

SEQ ID NO: 46490 - DNA, 23 bp, Artificial Sequence
  Synthetic
gaaccttcuccagcctttcttug

SEQ ID NO: 46491 - DNA, 23 bp, Artificial Sequence
  Synthetic
gaagaatcctcugctggtctcug

SEQ ID NO: 46492 - DNA, 22 bp, Artificial Sequence
  Synthetic
actccuggagacacctctctuc

SEQ ID NO: 46493 - DNA, 23 bp, Artificial Sequence
  Synthetic
tcctcactgcuctcagagtctuc

SEQ ID NO: 46494 - DNA, 25 bp, Artificial Sequence
  Synthetic
ccctccttaautcccttttcuccac

SEQ ID NO: 46495 - DNA, 22 bp, Artificial Sequence
  Synthetic
agtgactggucctcctctcuac

SEQ ID NO: 46496 - DNA, 23 bp, Artificial Sequence
  Synthetic
ccctacatgggaugtaacaccut

SEQ ID NO: 46497 - DNA, 21 bp, Artificial Sequence
  Synthetic
ctgtctucccaggaggtgtug

SEQ ID NO: 46498 - DNA, 24 bp, Artificial Sequence
  Synthetic
gttgaagcaguttccccaaatuct

SEQ ID NO: 46499 - DNA, 22 bp, Artificial Sequence
  Synthetic
gcagtggagcacaugaagguat

SEQ ID NO: 46500 - DNA, 21 bp, Artificial Sequence
  Synthetic
gtggacccuttgccttguaaa

SEQ ID NO: 46501 - DNA, 18 bp, Artificial Sequence
  Synthetic
gggcttgugcgggtguag

SEQ ID NO: 46502 - DNA, 20 bp, Artificial Sequence
  Synthetic
ccccatcucgctccattuca

SEQ ID NO: 46503 - DNA, 26 bp, Artificial Sequence
  Synthetic
cacatgtggguaagtatggaaguagg

SEQ ID NO: 46504 - DNA, 22 bp, Artificial Sequence
  Synthetic
gaccaggtcutacttgcccuaa

SEQ ID NO: 46505 - DNA, 21 bp, Artificial Sequence
  Synthetic
tgaagaactgucgctgctguc

SEQ ID NO: 46506 - DNA, 22 bp, Artificial Sequence
  Synthetic
gggcuaccaacaggatactgug

SEQ ID NO: 46507 - DNA, 21 bp, Artificial Sequence
  Synthetic
cctgagggaucggguagacag

SEQ ID NO: 46508 - DNA, 23 bp, Artificial Sequence
  Synthetic
tgaccccacautctctctccaua

SEQ ID NO: 46509 - DNA, 24 bp, Artificial Sequence
  Synthetic
cttctttcuttcctgtuccagcag

SEQ ID NO: 46510 - DNA, 24 bp, Artificial Sequence
  Synthetic
ctctgttuccccagaaaagaccuc

SEQ ID NO: 46511 - DNA, 23 bp, Artificial Sequence
  Synthetic
tgctttgauctccacctucaacc

SEQ ID NO: 46512 - DNA, 24 bp, Artificial Sequence
  Synthetic
ggaattcacuagtccucaggaggt

SEQ ID NO: 46513 - DNA, 24 bp, Artificial Sequence
  Synthetic
accctgaatgcucaggaatgatug

SEQ ID NO: 46514 - DNA, 27 bp, Artificial Sequence
  Synthetic
ttttctcttctcucagcggtttaaugt

SEQ ID NO: 46515 - DNA, 29 bp, Artificial Sequence
  Synthetic
aguattaaaatcaugaggagcaggacaaa

SEQ ID NO: 46516 - DNA, 26 bp, Artificial Sequence
  Synthetic
acagcctgaggugttttgaaatttug

SEQ ID NO: 46517 - DNA, 24 bp, Artificial Sequence
  Synthetic
aataatgccuccttctcucagcag

SEQ ID NO: 46518 - DNA, 28 bp, Artificial Sequence
  Synthetic
actaatggtgtttuctctctctctcuct

SEQ ID NO: 46519 - DNA, 31 bp, Artificial Sequence; identical to SEQ ID NO: 34285
  Synthetic

SEQ ID NO: 46520 - DNA, 27 bp, Artificial Sequence
  Synthetic
ggatctttatugacgatcttgggtgut

SEQ ID NO: 46521 - DNA, 23 bp, Artificial Sequence
  Synthetic
gtcaaccagtuatgggaagggut

SEQ ID NO: 46522 - DNA, 28 bp, Artificial Sequence
  Synthetic
gaattgaacatucacttgctgtttcuga

SEQ ID NO: 46523 - DNA, 24 bp, Artificial Sequence
  Synthetic
ctgccugagacaggaataatcucc

SEQ ID NO: 46524 - DNA, 27 bp, Artificial Sequence
  Synthetic
ctcagattaatugctgtgctttuggat

SEQ ID NO: 46525 - DNA, 23 bp, Artificial Sequence
  Synthetic
gcattttgggaugttccacugac

SEQ ID NO: 46526 - DNA, 21 bp, Artificial Sequence
  Synthetic
autcaagagcucagacgccaa

SEQ ID NO: 46527 - DNA, 27 bp, Artificial Sequence
  Synthetic
gttctggguccatttcagaatcuacat

SEQ ID NO: 46528 - DNA, 21 bp, Artificial Sequence
  Synthetic
gagtagacacggugcagucaa

SEQ ID NO: 46529 - DNA, 31 bp, Artificial Sequence; identical to SEQ ID NO: 34295
  Synthetic

SEQ ID NO: 46530 - DNA, 28 bp, Artificial Sequence
  Synthetic
ttgattcttattgaugccccatgtttug

SEQ ID NO: 46531 - DNA, 30 bp, Artificial Sequence; identical to SEQ ID NO: 34297
  Synthetic

SEQ ID NO: 46532 - DNA, 22 bp, Artificial Sequence
  Synthetic
gctggaaaagcaaucgtcaugt

SEQ ID NO: 46533 - DNA, 30 bp, Artificial Sequence; identical to SEQ ID NO: 34299
  Synthetic

SEQ ID NO: 46534 - DNA, 25 bp, Artificial Sequence
  Synthetic
gcagaacaguatgatgtucccaagg

SEQ ID NO: 46535 - DNA, 27 bp, Artificial Sequence
  Synthetic
agaatgttcagaaucaaaagccaguga

SEQ ID NO: 46536 - DNA, 23 bp, Artificial Sequence
  Synthetic
gattccagagaaccutggccuaa

SEQ ID NO: 46537 - DNA, 25 bp, Artificial Sequence
  Synthetic
gcaagcccaauaaagagtcaccaut

SEQ ID NO: 46538 - DNA, 28 bp, Artificial Sequence
  Synthetic
cgaagtgatuccattagtatctguacca

SEQ ID NO: 46539 - DNA, 27 bp, Artificial Sequence
  Synthetic
actaatgagaggcutctgttttgctut

SEQ ID NO: 46540 - DNA, 25 bp, Artificial Sequence
  Synthetic
tgctctctcuccaaaattcaaccug

SEQ ID NO: 46541 - DNA, 24 bp, Artificial Sequence
  Synthetic
ggagagccuttggtaucagaagag

SEQ ID NO: 46542 - DNA, 27 bp, Artificial Sequence
  Synthetic
ctcttacagatccutaggtgaggaugt

SEQ ID NO: 46543 - DNA, 21 bp, Artificial Sequence
  Synthetic
caggacuccgguaagagacca

SEQ ID NO: 46544 - DNA, 23 bp, Artificial Sequence
  Synthetic
attatctggcgagutgtctgcut

SEQ ID NO: 46545 - DNA, 21 bp, Artificial Sequence
  Synthetic
cagttttcutttgcgcucggt

SEQ ID NO: 46546 - DNA, 27 bp, Artificial Sequence
  Synthetic
gaagatggtgaccauttttctgatgug

SEQ ID NO: 46547 - DNA, 21 bp, Artificial Sequence
  Synthetic
tgttcatgcgcutacgaggut

SEQ ID NO: 46548 - DNA, 24 bp, Artificial Sequence
  Synthetic
caagcatactugaggaaccacuga

SEQ ID NO: 46549 - DNA, 29 bp, Artificial Sequence
  Synthetic
gacaatgtttaucagcactttctccaaut

SEQ ID NO: 46550 - DNA, 25 bp, Artificial Sequence
  Synthetic
attacaacaatuttggcctguggac

SEQ ID NO: 46551 - DNA, 21 bp, Artificial Sequence
  Synthetic
aaaacggagccucccttucaa

SEQ ID NO: 46552 - DNA, 28 bp, Artificial Sequence
  Synthetic
tgtgcccagtutctaaatcatctaaugt

SEQ ID NO: 46553 - DNA, 32 bp, Artificial Sequence; identical to SEQ ID NO: 34319
  Synthetic

SEQ ID NO: 46554 - DNA, 30 bp, Artificial Sequence; identical to SEQ ID NO: 34320
  Synthetic

SEQ ID NO: 46555 - DNA, 28 bp, Artificial Sequence
  Synthetic
gaaggtgaaaagaucaggaactgaguaa

SEQ ID NO: 46556 - DNA, 26 bp, Artificial Sequence
  Synthetic
ctttaacccacugacactggtttuac

SEQ ID NO: 46557 - DNA, 28 bp, Artificial Sequence
  Synthetic
gaggaagaccgutcgatatctacttuac

SEQ ID NO: 46558 - DNA, 21 bp, Artificial Sequence
  Synthetic
gccttcuacccttgtguggaa

SEQ ID NO: 46559 - DNA, 28 bp, Artificial Sequence
  Synthetic
gaggttttacaautagactgguccacat

SEQ ID NO: 46560 - DNA, 22 bp, Artificial Sequence
  Synthetic
gctgggucaaagatcctugcat

SEQ ID NO: 46561 - DNA, 31 bp, Artificial Sequence; identical to SEQ ID NO: 34327
  Synthetic

SEQ ID NO: 46562 - DNA, 26 bp, Artificial Sequence
  Synthetic
cagacagacatugctaatccttacut

SEQ ID NO: 46563 - DNA, 28 bp, Artificial Sequence
  Synthetic
ctcccacatcaugtctcatcttaucaat

SEQ ID NO: 46564 - DNA, 31 bp, Artificial Sequence; identical to SEQ ID NO: 34330
  Synthetic

SEQ ID NO: 46565 - DNA, 25 bp, Artificial Sequence
  Synthetic
gagccagctautccatttctctuct

SEQ ID NO: 46566 - DNA, 23 bp, Artificial Sequence
  Synthetic
ctgtgggauagactctgaaugca

SEQ ID NO: 46567 - DNA, 25 bp, Artificial Sequence
  Synthetic
aagcaacugcaaagaggagaaagua

SEQ ID NO: 46568 - DNA, 22 bp, Artificial Sequence
  Synthetic
gcagaggtcucaggaagtcuga

SEQ ID NO: 46569 - DNA, 25 bp, Artificial Sequence
  Synthetic
tcagctgcagaaucctgaaatgaut

SEQ ID NO: 46570 - DNA, 25 bp, Artificial Sequence
  Synthetic
gaatgaggcucagagagggtagtua

SEQ ID NO: 46571 - DNA, 26 bp, Artificial Sequence
  Synthetic
tccccacaacuaaaacactcatctuc

SEQ ID NO: 46572 - DNA, 22 bp, Artificial Sequence
  Synthetic
tcatccacaccutcggactgua

SEQ ID NO: 46573 - DNA, 25 bp, Artificial Sequence
  Synthetic
ggaaatgaaaagcaucccttcucga

SEQ ID NO: 46574 - DNA, 22 bp, Artificial Sequence
  Synthetic
agagcaaucaacaggaauggct

SEQ ID NO: 46575 - DNA, 23 bp, Artificial Sequence
  Synthetic
ggaaaccaaggautgggattugg

SEQ ID NO: 46576 - DNA, 22 bp, Artificial Sequence
  Synthetic
caaccacuggaaagacctcugg

SEQ ID NO: 46577 - DNA, 21 bp, Artificial Sequence
  Synthetic
tttctcaggaggugggaguct

SEQ ID NO: 46578 - DNA, 21 bp, Artificial Sequence
  Synthetic
gcttcaccucatcaggucaca

SEQ ID NO: 46579 - DNA, 22 bp, Artificial Sequence
  Synthetic
gcaggaggcugagaaagaaguc

SEQ ID NO: 46580 - DNA, 20 bp, Artificial Sequence
  Synthetic
ccagcaacuacctgcactug

SEQ ID NO: 46581 - DNA, 22 bp, Artificial Sequence
  Synthetic
cagtgtctguccagccactaug

SEQ ID NO: 46582 - DNA, 22 bp, Artificial Sequence
  Synthetic
cttccagucacaagtgugcaga

SEQ ID NO: 46583 - DNA, 20 bp, Artificial Sequence
  Synthetic
acaaccauaagcccccacug

SEQ ID NO: 46584 - DNA, 17 bp, Artificial Sequence
  Synthetic
cgaccucgcgagcctuc

SEQ ID NO: 46585 - DNA, 17 bp, Artificial Sequence
  Synthetic
gacucggcgcggaucat

SEQ ID NO: 46586 - DNA, 22 bp, Artificial Sequence
  Synthetic
agtggttttgucccgttttugc

SEQ ID NO: 46587 - DNA, 23 bp, Artificial Sequence
  Synthetic
cgaugggaauagggaaagctuac

SEQ ID NO: 46588 - DNA, 22 bp, Artificial Sequence
  Synthetic
ttgcccagaacgggutttcaua

SEQ ID NO: 46589 - DNA, 24 bp, Artificial Sequence
  Synthetic
tggtgacatguttggtgaacucat

SEQ ID NO: 46590 - DNA, 23 bp, Artificial Sequence
  Synthetic
gcgtaagugaaacaggugcaaag

SEQ ID NO: 46591 - DNA, 30 bp, Artificial Sequence; identical to SEQ ID NO: 34357
  Synthetic

SEQ ID NO: 46592 - DNA, 20 bp, Artificial Sequence
  Synthetic
ctgccttugaacctcctgug

SEQ ID NO: 46593 - DNA, 22 bp, Artificial Sequence
  Synthetic
aacaggcucaagacaagcauct

SEQ ID NO: 46594 - DNA, 28 bp, Artificial Sequence
  Synthetic
ctcaataagcugaaacaagaaagugacc

SEQ ID NO: 46595 - DNA, 25 bp, Artificial Sequence
  Synthetic
tggcacggcuttaagtcatauaaga

SEQ ID NO: 46596 - DNA, 23 bp, Artificial Sequence
  Synthetic
cgcagtggagutggattctucag

SEQ ID NO: 46597 - DNA, 31 bp, Artificial Sequence; identical to SEQ ID NO: 34363
  Synthetic

SEQ ID NO: 46598 - DNA, 28 bp, Artificial Sequence
  Synthetic
gtagctacattaaugcaggttgaaaauc

SEQ ID NO: 46599 - DNA, 25 bp, Artificial Sequence
  Synthetic
ggtttattgcutctgtagtcugggt

SEQ ID NO: 46600 - DNA, 29 bp, Artificial Sequence
  Synthetic
acacauacttatgaauaaagccaaaccct

SEQ ID NO: 46601 - DNA, 24 bp, Artificial Sequence
  Synthetic
gctttgggaacutggatgactuac

SEQ ID NO: 46602 - DNA, 22 bp, Artificial Sequence
  Synthetic
cccatctagugggtggcattut

SEQ ID NO: 46603 - DNA, 30 bp, Artificial Sequence; identical to SEQ ID NO: 34369
  Synthetic

SEQ ID NO: 46604 - DNA, 22 bp, Artificial Sequence
  Synthetic
aggcctagcaccutgataccua

SEQ ID NO: 46605 - DNA, 23 bp, Artificial Sequence
  Synthetic
cgaatcttcugcagctccaucag

SEQ ID NO: 46606 - DNA, 31 bp, Artificial Sequence; identical to SEQ ID NO: 34372
  Synthetic

SEQ ID NO: 46607 - DNA, 25 bp, Artificial Sequence
  Synthetic
cctctgaagtuggcaagcatatcut

SEQ ID NO: 46608 - DNA, 30 bp, Artificial Sequence; identical to SEQ ID NO: 34374
  Synthetic

SEQ ID NO: 46609 - DNA, 25 bp, Artificial Sequence
  Synthetic
ggccactgtuataagctttcaagut

SEQ ID NO: 46610 - DNA, 27 bp, Artificial Sequence
  Synthetic
actaugaagacagaacuacagaaagcc

SEQ ID NO: 46611 - DNA, 28 bp, Artificial Sequence
  Synthetic
caagtgacautatcttgugaacaaccaa

SEQ ID NO: 46612 - DNA, 23 bp, Artificial Sequence
  Synthetic
actatcaggcuttctgcaagugg

SEQ ID NO: 46613 - DNA, 28 bp, Artificial Sequence
  Synthetic
ccagaggaaaacaugaatuacacccaat

SEQ ID NO: 46614 - DNA, 27 bp, Artificial Sequence
  Synthetic
gaaatatcuggcaaacgagacaaauca

SEQ ID NO: 46615 - DNA, 29 bp, Artificial Sequence
  Synthetic
gctatcctcaggaagugtatacgcttuac

SEQ ID NO: 46616 - DNA, 24 bp, Artificial Sequence
  Synthetic
ctttccutccttttcuccaaggct

SEQ ID NO: 46617 - DNA, 27 bp, Artificial Sequence
  Synthetic
ccaggatgtguccaaatccatgttaua

SEQ ID NO: 46618 - DNA, 24 bp, Artificial Sequence
  Synthetic
gcagaaauaccaggcagagtgtuc

SEQ ID NO: 46619 - DNA, 31 bp, Artificial Sequence; identical to SEQ ID NO: 34385
  Synthetic

SEQ ID NO: 46620 - DNA, 25 bp, Artificial Sequence
  Synthetic
ggagaaggaguacgagatugaaagg

SEQ ID NO: 46621 - DNA, 30 bp, Artificial Sequence; identical to SEQ ID NO: 34387
  Synthetic

SEQ ID NO: 46622 - DNA, 26 bp, Artificial Sequence
  Synthetic
gcuctgagataaugcagaagaagcag

SEQ ID NO: 46623 - DNA, 23 bp, Artificial Sequence
  Synthetic
ctcctccugaaactcagcttuga

SEQ ID NO: 46624 - DNA, 24 bp, Artificial Sequence
  Synthetic
tttgagaccgagaucaacaucacc

SEQ ID NO: 46625 - DNA, 21 bp, Artificial Sequence
  Synthetic
agtggccutttgctgtuggat

SEQ ID NO: 46626 - DNA, 30 bp, Artificial Sequence; identical to SEQ ID NO: 34392
  Synthetic

SEQ ID NO: 46627 - DNA, 23 bp, Artificial Sequence
  Synthetic
cagttcttgcucctgaacctuca

SEQ ID NO: 46628 - DNA, 20 bp, Artificial Sequence
  Synthetic
gaggagcugaatcggcugaa

SEQ ID NO: 46629 - DNA, 23 bp, Artificial Sequence
  Synthetic
gaggtcatccucactcctctuct

SEQ ID NO: 46630 - DNA, 24 bp, Artificial Sequence
  Synthetic
tcacttgaggaaugagcattucca

SEQ ID NO: 46631 - DNA, 22 bp, Artificial Sequence
  Synthetic
ggctcctuagttccaagauggt

SEQ ID NO: 46632 - DNA, 27 bp, Artificial Sequence
  Synthetic
catttcttucttcttcaatuccaggca

SEQ ID NO: 46633 - DNA, 25 bp, Artificial Sequence
  Synthetic
gaatttgctguttctcacacuccag

SEQ ID NO: 46634 - DNA, 25 bp, Artificial Sequence
  Synthetic
gtctuaggagtgagaucgaaagact

SEQ ID NO: 46635 - DNA, 21 bp, Artificial Sequence
  Synthetic
cccaucaaacaccagctugga

SEQ ID NO: 46636 - DNA, 25 bp, Artificial Sequence
  Synthetic
gaagaagtcaguggaagaagtugct

SEQ ID NO: 46637 - DNA, 21 bp, Artificial Sequence
  Synthetic
tcagcttcucattccgauggg

SEQ ID NO: 46638 - DNA, 28 bp, Artificial Sequence
  Synthetic
agtatctgttucagaagccaucaagaaa

SEQ ID NO: 46639 - DNA, 24 bp, Artificial Sequence
  Synthetic
ttttggugactggauccacaaagt

SEQ ID NO: 46640 - DNA, 23 bp, Artificial Sequence
  Synthetic
tgaccgtcacugagctaguagat

SEQ ID NO: 46641 - DNA, 21 bp, Artificial Sequence
  Synthetic
actccagagcaguaccagguc

SEQ ID NO: 46642 - DNA, 25 bp, Artificial Sequence
  Synthetic
agctgtcacugggtataatgaucct

SEQ ID NO: 46643 - DNA, 30 bp, Artificial Sequence; identical to SEQ ID NO: 34409
  Synthetic

SEQ ID NO: 46644 - DNA, 22 bp, Artificial Sequence
  Synthetic
gatgaggaaauagggcuctguc

SEQ ID NO: 46645 - DNA, 28 bp, Artificial Sequence
  Synthetic
gatggttatttcutcccattcacatucc

SEQ ID NO: 46646 - DNA, 22 bp, Artificial Sequence
  Synthetic
ctcagccucactcaatttgcug

SEQ ID NO: 46647 - DNA, 24 bp, Artificial Sequence
  Synthetic
aggttttcugtgtcaaagauggct

SEQ ID NO: 46648 - DNA, 21 bp, Artificial Sequence
  Synthetic
gtcactucaggacgcagtcuc

SEQ ID NO: 46649 - DNA, 20 bp, Artificial Sequence
  Synthetic
acutccgggucaacaagacc

SEQ ID NO: 46650 - DNA, 22 bp, Artificial Sequence
  Synthetic
ccagcagcuatgccaaaaucct

SEQ ID NO: 46651 - DNA, 22 bp, Artificial Sequence
  Synthetic
cggagccgaagacaugttguaa

SEQ ID NO: 46652 - DNA, 20 bp, Artificial Sequence
  Synthetic
ccgctcacugacagacacuc

SEQ ID NO: 46653 - DNA, 22 bp, Artificial Sequence
  Synthetic
gccggtctaaugtaggcaagua

SEQ ID NO: 46654 - DNA, 23 bp, Artificial Sequence
  Synthetic
caggcaaucccattttctcugga

SEQ ID NO: 46655 - DNA, 22 bp, Artificial Sequence
  Synthetic
cgcttacccucaagaaccugaa

SEQ ID NO: 46656 - DNA, 23 bp, Artificial Sequence
  Synthetic
acccttaaucctgcctcauagaa

SEQ ID NO: 46657 - DNA, 26 bp, Artificial Sequence
  Synthetic
gtagagaggatugaagacagccauag

SEQ ID NO: 46658 - DNA, 21 bp, Artificial Sequence
  Synthetic
caccttcttuagctccccgut

SEQ ID NO: 46659 - DNA, 19 bp, Artificial Sequence
  Synthetic
ctcacacgutcgucaccac

SEQ ID NO: 46660 - DNA, 21 bp, Artificial Sequence
  Synthetic
gtaggtgatugcttgctgcug

SEQ ID NO: 46661 - DNA, 22 bp, Artificial Sequence
  Synthetic
cccutctacccucaacgacaaa

SEQ ID NO: 46662 - DNA, 18 bp, Artificial Sequence
  Synthetic
gtgccuggactcguacgg

SEQ ID NO: 46663 - DNA, 20 bp, Artificial Sequence
  Synthetic
cgucatgcaauacgccgact

SEQ ID NO: 46664 - DNA, 19 bp, Artificial Sequence
  Synthetic
cggugttcugcggagaact

SEQ ID NO: 46665 - DNA, 19 bp, Artificial Sequence
  Synthetic
gccaacaugggcagtcuga

SEQ ID NO: 46666 - DNA, 22 bp, Artificial Sequence
  Synthetic
gctggcauaggttccactguat

SEQ ID NO: 46667 - DNA, 28 bp, Artificial Sequence
  Synthetic
gcttggttuacaacagggaataggttua

SEQ ID NO: 46668 - DNA, 17 bp, Artificial Sequence
  Synthetic
ccacccgguggttgucg

SEQ ID NO: 46669 - DNA, 25 bp, Artificial Sequence
  Synthetic
ctaaaaucagagccauccagacagt

SEQ ID NO: 46670 - DNA, 25 bp, Artificial Sequence
  Synthetic
gcctatactucaccatggagactuc

SEQ ID NO: 46671 - DNA, 28 bp, Artificial Sequence
  Synthetic
aacaagtgattugatgatgtgttuacct

SEQ ID NO: 46672 - DNA, 25 bp, Artificial Sequence
  Synthetic
gtgaagtgaugcccgatgacattua

SEQ ID NO: 46673 - DNA, 29 bp, Artificial Sequence
  Synthetic
ggcattttcattcugacttggtatttugt

SEQ ID NO: 46674 - DNA, 27 bp, Artificial Sequence
  Synthetic
tgaatgagtgaaugtgtgaatggauga

SEQ ID NO: 46675 - DNA, 26 bp, Artificial Sequence
  Synthetic
agtcctcaactucttccgtttctaug

SEQ ID NO: 46676 - DNA, 27 bp, Artificial Sequence
  Synthetic
ttctgctguaggagagagagaacuaaa

SEQ ID NO: 46677 - DNA, 22 bp, Artificial Sequence
  Synthetic
cugcaaaagcaucaggaggaga

SEQ ID NO: 46678 - DNA, 22 bp, Artificial Sequence
  Synthetic
ctccccucctactacacauggt

SEQ ID NO: 46679 - DNA, 23 bp, Artificial Sequence
  Synthetic
cagccacatcuggcttgaaatuc

SEQ ID NO: 46680 - DNA, 23 bp, Artificial Sequence
  Synthetic
gcttccugagatcatttggucct

SEQ ID NO: 46681 - DNA, 21 bp, Artificial Sequence
  Synthetic
ggttctgcugctctccaaucc

SEQ ID NO: 46682 - DNA, 21 bp, Artificial Sequence
  Synthetic
gtcttccuggcaaggguaaac

SEQ ID NO: 46683 - DNA, 23 bp, Artificial Sequence
  Synthetic
gctgcttatccutcagccactuc

SEQ ID NO: 46684 - DNA, 23 bp, Artificial Sequence
  Synthetic
gcagtgagaugaggatctgcuct

SEQ ID NO: 46685 - DNA, 23 bp, Artificial Sequence
  Synthetic
agacttcccccutgttcctacuc

SEQ ID NO: 46686 - DNA, 22 bp, Artificial Sequence
  Synthetic
acgtcttagcugaacgtgagug

SEQ ID NO: 46687 - DNA, 18 bp, Artificial Sequence
  Synthetic
gaucaccggcaugcagga

SEQ ID NO: 46688 - DNA, 24 bp, Artificial Sequence
  Synthetic
gaauggacaggaucagacagagac

SEQ ID NO: 46689 - DNA, 23 bp, Artificial Sequence
  Synthetic
catcctgcucacactttctucct

SEQ ID NO: 46690 - DNA, 19 bp, Artificial Sequence
  Synthetic
ggguaggagacgtccuggt

SEQ ID NO: 46691 - DNA, 20 bp, Artificial Sequence
  Synthetic
gctgtccuggtgccguagat

SEQ ID NO: 46692 - DNA, 21 bp, Artificial Sequence
  Synthetic
ggagatgttugtgcacccuga

SEQ ID NO: 46693 - DNA, 22 bp, Artificial Sequence
  Synthetic
atgcaggaagaugaggccauac

SEQ ID NO: 46694 - DNA, 22 bp, Artificial Sequence
  Synthetic
gcaagagacaaggutggtguga

SEQ ID NO: 46695 - DNA, 27 bp, Artificial Sequence
  Synthetic
tccatgaccugatttattccttgucag

SEQ ID NO: 46696 - DNA, 22 bp, Artificial Sequence
  Synthetic
tgcttgtuaggctggtagtucc

SEQ ID NO: 46697 - DNA, 21 bp, Artificial Sequence
  Synthetic
aaccagccacuacccttccua

SEQ ID NO: 46698 - DNA, 19 bp, Artificial Sequence
  Synthetic
cacttgggucccacaggut

SEQ ID NO: 46699 - DNA, 24 bp, Artificial Sequence
  Synthetic
cccacctcucccttaagagaauga

SEQ ID NO: 46700 - DNA, 19 bp, Artificial Sequence
  Synthetic
gaggagcauccccacacug

SEQ ID NO: 46701 - DNA, 24 bp, Artificial Sequence
  Synthetic
aggacacatuccttgtgtgtgtut

SEQ ID NO: 46702 - DNA, 19 bp, Artificial Sequence
  Synthetic
cccatcccaccugccatug

SEQ ID NO: 46703 - DNA, 23 bp, Artificial Sequence
  Synthetic
ttggcuggaggataaacacucag

SEQ ID NO: 46704 - DNA, 20 bp, Artificial Sequence
  Synthetic
ccggcutcccaauacccaag

SEQ ID NO: 46705 - DNA, 24 bp, Artificial Sequence
  Synthetic
tgtgacccugactcttattcucca

SEQ ID NO: 46706 - DNA, 21 bp, Artificial Sequence
  Synthetic
tgcagaggagutccagcucaa

SEQ ID NO: 46707 - DNA, 28 bp, Artificial Sequence
  Synthetic
gaaggagaggagguttttgactctaauc

SEQ ID NO: 46708 - DNA, 21 bp, Artificial Sequence
  Synthetic
ttggccccugagacgatacua

SEQ ID NO: 46709 - DNA, 25 bp, Artificial Sequence
  Synthetic
ctcatctguggtgtatctgttuccc

SEQ ID NO: 46710 - DNA, 21 bp, Artificial Sequence
  Synthetic
ggcaaaacaucaccccaucct

SEQ ID NO: 46711 - DNA, 23 bp, Artificial Sequence
  Synthetic
cctgtgtccutgtctctgcttuc

SEQ ID NO: 46712 - DNA, 25 bp, Artificial Sequence
  Synthetic
gguaagagaagagagucagagacac

SEQ ID NO: 46713 - DNA, 28 bp, Artificial Sequence
  Synthetic
ttctctaatatctugtctgccttcucct

SEQ ID NO: 46714 - DNA, 23 bp, Artificial Sequence
  Synthetic
caccccacaggaaacutgtcaua

SEQ ID NO: 46715 - DNA, 23 bp, Artificial Sequence
  Synthetic
ggtctgaccauctgctttcucag

SEQ ID NO: 46716 - DNA, 21 bp, Artificial Sequence
  Synthetic
actcaggaugcttggtgctug

SEQ ID NO: 46717 - DNA, 24 bp, Artificial Sequence
  Synthetic
gtttaattugggagcatggctgug

SEQ ID NO: 46718 - DNA, 22 bp, Artificial Sequence
  Synthetic
ggcagacagacuaatgcuaggg

SEQ ID NO: 46719 - DNA, 22 bp, Artificial Sequence
  Synthetic
gatccttccucctgggaatcug

SEQ ID NO: 46720 - DNA, 22 bp, Artificial Sequence
  Synthetic
caggtgaacuctcagcuggaaa

SEQ ID NO: 46721 - DNA, 20 bp, Artificial Sequence
  Synthetic
gaagctgagutcccccacuc

SEQ ID NO: 46722 - DNA, 20 bp, Artificial Sequence
  Synthetic
aagagctgcuttccagcugt

SEQ ID NO: 46723 - DNA, 24 bp, Artificial Sequence
  Synthetic
tgacaactccucttccctctguag

SEQ ID NO: 46724 - DNA, 23 bp, Artificial Sequence
  Synthetic
agagagaacautacccaggguga

SEQ ID NO: 46725 - DNA, 29 bp, Artificial Sequence
  Synthetic
ctgaaccctaccuttcataacttcucaat

SEQ ID NO: 46726 - DNA, 21 bp, Artificial Sequence
  Synthetic
tcaactgacuggctgactuca

SEQ ID NO: 46727 - DNA, 21 bp, Artificial Sequence
  Synthetic
ctgtccutccctcucacacag

SEQ ID NO: 46728 - DNA, 23 bp, Artificial Sequence
  Synthetic
gaaggcagugaagagaggagaug

SEQ ID NO: 46729 - DNA, 23 bp, Artificial Sequence
  Synthetic
tcttaggagcutggtcctuccaa

SEQ ID NO: 46730 - DNA, 27 bp, Artificial Sequence
  Synthetic
agagccauatgaataaugagacaaggg

SEQ ID NO: 46731 - DNA, 23 bp, Artificial Sequence
  Synthetic
gggccacuggtcacattttcuat

SEQ ID NO: 46732 - DNA, 26 bp, Artificial Sequence
  Synthetic
acagacaaaaucccagcagacattua

SEQ ID NO: 46733 - DNA, 24 bp, Artificial Sequence
  Synthetic
ccttgttgcucatgctttgaaucc

SEQ ID NO: 46734 - DNA, 22 bp, Artificial Sequence
  Synthetic
ggtgggauctcctatccaucac

SEQ ID NO: 46735 - DNA, 20 bp, Artificial Sequence
  Synthetic
tggagguctgaccgucacac

SEQ ID NO: 46736 - DNA, 24 bp, Artificial Sequence
  Synthetic
agacggcaugaatggataaaacug

SEQ ID NO: 46737 - DNA, 25 bp, Artificial Sequence
  Synthetic
ggtaagtguagtggcaaatguaggg

SEQ ID NO: 46738 - DNA, 22 bp, Artificial Sequence
  Synthetic
ctcccttcccuacctatccuca

SEQ ID NO: 46739 - DNA, 19 bp, Artificial Sequence
  Synthetic
acagggucgtgtccucact

SEQ ID NO: 46740 - DNA, 22 bp, Artificial Sequence
  Synthetic
ccugggagaauaagggaagugt

SEQ ID NO: 46741 - DNA, 21 bp, Artificial Sequence
  Synthetic
ccctcccuatgcctccuaacc

SEQ ID NO: 46742 - DNA, 25 bp, Artificial Sequence
  Synthetic
caaaagaagccccuttccagaacua

SEQ ID NO: 46743 - DNA, 23 bp, Artificial Sequence
  Synthetic
gaagggtgaauttggagagugct

SEQ ID NO: 46744 - DNA, 23 bp, Artificial Sequence
  Synthetic
tcctccauatctttccugcccat

SEQ ID NO: 46745 - DNA, 24 bp, Artificial Sequence
  Synthetic
tcttttgcatuctcttcccacucc

SEQ ID NO: 46746 - DNA, 23 bp, Artificial Sequence
  Synthetic
gaaggctcagaugagcacauaga

SEQ ID NO: 46747 - DNA, 24 bp, Artificial Sequence
  Synthetic
ggcaguggaaauaggagaagcaag

SEQ ID NO: 46748 - DNA, 26 bp, Artificial Sequence
  Synthetic
gaucgaaaccaauaagaagcaatuct

SEQ ID NO: 46749 - DNA, 22 bp, Artificial Sequence
  Synthetic
gggcccuacgattacacctaug

SEQ ID NO: 46750 - DNA, 21 bp, Artificial Sequence
  Synthetic
atcaagacgucatgggcugag

SEQ ID NO: 46751 - DNA, 23 bp, Artificial Sequence
  Synthetic
actcttctccutctctcctuggg

SEQ ID NO: 46752 - DNA, 22 bp, Artificial Sequence
  Synthetic
ggacacagtuccaggaagacug

SEQ ID NO: 46753 - DNA, 22 bp, Artificial Sequence
  Synthetic
cccaggcauctctcctcctuag

SEQ ID NO: 46754 - DNA, 22 bp, Artificial Sequence
  Synthetic
ggttcctgautttgtggccugt

SEQ ID NO: 46755 - DNA, 24 bp, Artificial Sequence
  Synthetic
cgctccatcuctctcatgtcttug

SEQ ID NO: 46756 - DNA, 26 bp, Artificial Sequence
  Synthetic
gtctcaaggguttcacagttuagagt

SEQ ID NO: 46757 - DNA, 22 bp, Artificial Sequence
  Synthetic
cgcutcctgtaugaagaccaga

SEQ ID NO: 46758 - DNA, 19 bp, Artificial Sequence
  Synthetic
gccuaccccaccatgucac

SEQ ID NO: 46759 - DNA, 24 bp, Artificial Sequence
  Synthetic
tcctgataaucatggactcuccca

SEQ ID NO: 46760 - DNA, 18 bp, Artificial Sequence
  Synthetic
cucttaccugcccagcct

SEQ ID NO: 46761 - DNA, 17 bp, Artificial Sequence
  Synthetic
ccgcagccuctgaccuc

SEQ ID NO: 46762 - DNA, 25 bp, Artificial Sequence
  Synthetic
gacccacccauactatatgacaucc

SEQ ID NO: 46763 - DNA, 26 bp, Artificial Sequence
  Synthetic
cagtgagttgucttcccttgttcuat

SEQ ID NO: 46764 - DNA, 22 bp, Artificial Sequence
  Synthetic
gctgaagggauttgtgugggaa

SEQ ID NO: 46765 - DNA, 28 bp, Artificial Sequence
  Synthetic
gccttaacaguagttttctgcctuacag

SEQ ID NO: 46766 - DNA, 26 bp, Artificial Sequence
  Synthetic
gaccctaaactuaaattccaccguca

SEQ ID NO: 46767 - DNA, 20 bp, Artificial Sequence
  Synthetic
tgugaagaagcugggcaagg

SEQ ID NO: 46768 - DNA, 21 bp, Artificial Sequence
  Synthetic
ggaggctcuccttaccctcua

SEQ ID NO: 46769 - DNA, 23 bp, Artificial Sequence
  Synthetic
cacacuacagtuacgaccaccag

SEQ ID NO: 46770 - DNA, 23 bp, Artificial Sequence
  Synthetic
tgagcctcagugtccccaataua

SEQ ID NO: 46771 - DNA, 25 bp, Artificial Sequence
  Synthetic
caggtgtttcaugaagaagaccauc

SEQ ID NO: 46772 - DNA, 27 bp, Artificial Sequence
  Synthetic
ggaagaggaugatgtugaagagaacac

SEQ ID NO: 46773 - DNA, 29 bp, Artificial Sequence
  Synthetic
cgatgtgatgaauaattctgagagccaut

SEQ ID NO: 46774 - DNA, 24 bp, Artificial Sequence
  Synthetic
ggtcaaactugactttcaguagcg

SEQ ID NO: 46775 - DNA, 19 bp, Artificial Sequence
  Synthetic
ccugccaccactacugcat

SEQ ID NO: 46776 - DNA, 22 bp, Artificial Sequence
  Synthetic
gctcacgtcucttatgctggut

SEQ ID NO: 46777 - DNA, 19 bp, Artificial Sequence
  Synthetic
ccccttucaattgcugcga

SEQ ID NO: 46778 - DNA, 20 bp, Artificial Sequence
  Synthetic
gctcctcucctgtctccuca

SEQ ID NO: 46779 - DNA, 23 bp, Artificial Sequence
  Synthetic
actgtgctugggaaaagauaccc

SEQ ID NO: 46780 - DNA, 22 bp, Artificial Sequence
  Synthetic
cctcacctccugcctgtctuat

SEQ ID NO: 46781 - DNA, 24 bp, Artificial Sequence
  Synthetic
gctcccautctatagcaugaaggg

SEQ ID NO: 46782 - DNA, 30 bp, Artificial Sequence; identical to SEQ ID NO: 34548
  Synthetic

SEQ ID NO: 46783 - DNA, 26 bp, Artificial Sequence
  Synthetic
attcaguacacccggaaactatucag

SEQ ID NO: 46784 - DNA, 23 bp, Artificial Sequence
  Synthetic
catagcagcagcagcugatttug

SEQ ID NO: 46785 - DNA, 25 bp, Artificial Sequence
  Synthetic
agttgatgaauggagtguccagaag

SEQ ID NO: 46786 - DNA, 22 bp, Artificial Sequence
  Synthetic
tcatctccacccuccaagctua

SEQ ID NO: 46787 - DNA, 26 bp, Artificial Sequence
  Synthetic
tggtcccacutacaacugaacaaaaa

SEQ ID NO: 46788 - DNA, 29 bp, Artificial Sequence
  Synthetic
agtagcuattcccactauaagggagaaag

SEQ ID NO: 46789 - DNA, 28 bp, Artificial Sequence
  Synthetic
aggcagaaacucaagatggttatgtuag

SEQ ID NO: 46790 - DNA, 24 bp, Artificial Sequence
  Synthetic
tgctatgaatucctaatggcugca

SEQ ID NO: 46791 - DNA, 25 bp, Artificial Sequence
  Synthetic
ctccctcctccuattcccatttcua

SEQ ID NO: 46792 - DNA, 23 bp, Artificial Sequence
  Synthetic
ccatcugaaggctggacuaggat

SEQ ID NO: 46793 - DNA, 29 bp, Artificial Sequence
  Synthetic
tttcactgguaataatggattguggaaaa

SEQ ID NO: 46794 - DNA, 26 bp, Artificial Sequence
  Synthetic
tcagaacattctcuagtaccccaguc

SEQ ID NO: 46795 - DNA, 21 bp, Artificial Sequence
  Synthetic
gttggtcaacguaggcctcuc

SEQ ID NO: 46796 - DNA, 27 bp, Artificial Sequence
  Synthetic
tggttttggccaauctgtaagaagtua

SEQ ID NO: 46797 - DNA, 27 bp, Artificial Sequence
  Synthetic
tcagcttcctuattgctgaatgaauct

SEQ ID NO: 46798 - DNA, 26 bp, Artificial Sequence
  Synthetic
caaaacttgaggaguttgatccauga

SEQ ID NO: 46799 - DNA, 22 bp, Artificial Sequence
  Synthetic
ttcttgauagcgctgaugccat

SEQ ID NO: 46800 - DNA, 25 bp, Artificial Sequence
  Synthetic
tctttgatctguaccatcctcucca

SEQ ID NO: 46801 - DNA, 27 bp, Artificial Sequence
  Synthetic
gagcaggcttugaagatttcagaauag

SEQ ID NO: 46802 - DNA, 22 bp, Artificial Sequence
  Synthetic
cctcuaccacaggcattgcaut

SEQ ID NO: 46803 - DNA, 26 bp, Artificial Sequence
  Synthetic
gagttgcttuttgactgtctucacag

SEQ ID NO: 46804 - DNA, 22 bp, Artificial Sequence
  Synthetic
gtcctctcugctgttatugggt

SEQ ID NO: 46805 - DNA, 29 bp, Artificial Sequence
  Synthetic
cgatatttgtggcuggtggtttataugat

SEQ ID NO: 46806 - DNA, 21 bp, Artificial Sequence
  Synthetic
cugaggtgaauacaggccaca

SEQ ID NO: 46807 - DNA, 25 bp, Artificial Sequence
  Synthetic
ctgcuccacaaaattccgucaaaaa

SEQ ID NO: 46808 - DNA, 25 bp, Artificial Sequence
  Synthetic
catggcaccauagtcaaagttctug

SEQ ID NO: 46809 - DNA, 20 bp, Artificial Sequence
  Synthetic
catcaaccuccauggcaacg

SEQ ID NO: 46810 - DNA, 22 bp, Artificial Sequence
  Synthetic
ccagctgugccaaacacaauat

SEQ ID NO: 46811 - DNA, 29 bp, Artificial Sequence
  Synthetic
gaaagtacctgaugacatgcatttgttua

SEQ ID NO: 46812 - DNA, 23 bp, Artificial Sequence
  Synthetic
acaaacagtcuccccctacauga

SEQ ID NO: 46813 - DNA, 29 bp, Artificial Sequence
  Synthetic
ccagctagtgatutttgaaacaggtttut

SEQ ID NO: 46814 - DNA, 30 bp, Artificial Sequence; identical to SEQ ID NO: 34580
  Synthetic

SEQ ID NO: 46815 - DNA, 27 bp, Artificial Sequence
  Synthetic
tggctttcattccuctgaaggatttut

SEQ ID NO: 46816 - DNA, 21 bp, Artificial Sequence
  Synthetic
caacatgcucgcaatcctugt

SEQ ID NO: 46817 - DNA, 31 bp, Artificial Sequence; identical to SEQ ID NO: 34583
  Synthetic

SEQ ID NO: 46818 - DNA, 23 bp, Artificial Sequence
  Synthetic
cttcttcaacaccutgccatgut

SEQ ID NO: 46819 - DNA, 24 bp, Artificial Sequence
  Synthetic
ttcttugggaggtgaaaauaccac

SEQ ID NO: 46820 - DNA, 24 bp, Artificial Sequence
  Synthetic
tgtctggaatugaagggtgatugg

SEQ ID NO: 46821 - DNA, 24 bp, Artificial Sequence
  Synthetic
cgagtgggtcugtcttttccatut

SEQ ID NO: 46822 - DNA, 21 bp, Artificial Sequence
  Synthetic
aacgagauaacctgctccuct

SEQ ID NO: 46823 - DNA, 29 bp, Artificial Sequence
  Synthetic
aacaaccactgucaattatgtacgtgaua

SEQ ID NO: 46824 - DNA, 22 bp, Artificial Sequence
  Synthetic
cutctataagccucgacagcca

SEQ ID NO: 46825 - DNA, 23 bp, Artificial Sequence
  Synthetic
tggaaacccuttcagcttctugt

SEQ ID NO: 46826 - DNA, 27 bp, Artificial Sequence
  Synthetic
tgggccttattuatcatctgttctguc

SEQ ID NO: 46827 - DNA, 29 bp, Artificial Sequence
  Synthetic
atgtgtccagtuttcttattttgcttuca

SEQ ID NO: 46828 - DNA, 24 bp, Artificial Sequence
  Synthetic
tgctgugagaaaacaagugacagt

SEQ ID NO: 46829 - DNA, 30 bp, Artificial Sequence; identical to SEQ ID NO: 34595
  Synthetic

SEQ ID NO: 46830 - DNA, 25 bp, Artificial Sequence
  Synthetic
acacccctgautgagaaagaactut

SEQ ID NO: 46831 - DNA, 27 bp, Artificial Sequence
  Synthetic
gatcccctggauttgttgaaacatuag

SEQ ID NO: 46832 - DNA, 24 bp, Artificial Sequence
  Synthetic
tgtgtccuacacaagaaugcagaa

SEQ ID NO: 46833 - DNA, 28 bp, Artificial Sequence
  Synthetic
tcaacagaatcucaggagccatatcuaa

SEQ ID NO: 46834 - DNA, 22 bp, Artificial Sequence
  Synthetic
cagatgcttauggaaggctugc

SEQ ID NO: 46835 - DNA, 26 bp, Artificial Sequence
  Synthetic
ggagatttgtcuggaagcatgttcua

SEQ ID NO: 46836 - DNA, 26 bp, Artificial Sequence
  Synthetic
tgaaagaccccaauacaaatguccag

SEQ ID NO: 46837 - DNA, 22 bp, Artificial Sequence
  Synthetic
gttaaaggugccaaaccgaugg

SEQ ID NO: 46838 - DNA, 24 bp, Artificial Sequence
  Synthetic
ggcucagcaactatagucaaggac

SEQ ID NO: 46839 - DNA, 23 bp, Artificial Sequence
  Synthetic
cctactcaacucccttcttuccc

SEQ ID NO: 46840 - DNA, 26 bp, Artificial Sequence
  Synthetic
ctggaacttauccagaaagttuccct

SEQ ID NO: 46841 - DNA, 22 bp, Artificial Sequence
  Synthetic
gacaacgucacagtggagaaug

SEQ ID NO: 46842 - DNA, 24 bp, Artificial Sequence
  Synthetic
tatcgctgccauttggactaaaut

SEQ ID NO: 46843 - DNA, 20 bp, Artificial Sequence
  Synthetic
ggagtgugagacgcccaauc

SEQ ID NO: 46844 - DNA, 21 bp, Artificial Sequence
  Synthetic
ccagccuacactctctgaugg

SEQ ID NO: 46845 - DNA, 24 bp, Artificial Sequence
  Synthetic
catttgcgaggaaagutcccaaug

SEQ ID NO: 46846 - DNA, 28 bp, Artificial Sequence
  Synthetic
agtagtcaguacagcattaaucacaaaa

SEQ ID NO: 46847 - DNA, 25 bp, Artificial Sequence
  Synthetic
ggattttcuccagggaatgtcucag

SEQ ID NO: 46848 - DNA, 25 bp, Artificial Sequence
  Synthetic
gtgtgctgtcutatttgcttgacut

SEQ ID NO: 46849 - DNA, 25 bp, Artificial Sequence
  Synthetic
aggagcugcaaacattgacatttut

SEQ ID NO: 46850 - DNA, 27 bp, Artificial Sequence
  Synthetic
actcctatgtgauaccaaagtccauct

SEQ ID NO: 46851 - DNA, 30 bp, Artificial Sequence; identical to SEQ ID NO: 34617
  Synthetic

SEQ ID NO: 46852 - DNA, 24 bp, Artificial Sequence
  Synthetic
acacaacguggcttgcatuaaaaa

SEQ ID NO: 46853 - DNA, 21 bp, Artificial Sequence
  Synthetic
agtcctggucaatgggcuaac

SEQ ID NO: 46854 - DNA, 26 bp, Artificial Sequence
  Synthetic
ccuccttctagagtuaagaagcaacc

SEQ ID NO: 46855 - DNA, 20 bp, Artificial Sequence
  Synthetic
caacgugagcctgtcuggat

SEQ ID NO: 46856 - DNA, 21 bp, Artificial Sequence
  Synthetic
tttctcctugcatggcaguga

SEQ ID NO: 46857 - DNA, 25 bp, Artificial Sequence
  Synthetic
cctgtgacautgtgaactuaacgga

SEQ ID NO: 46858 - DNA, 23 bp, Artificial Sequence
  Synthetic
ctctctgaccucactggcaaaut

SEQ ID NO: 46859 - DNA, 31 bp, Artificial Sequence; identical to SEQ ID NO: 34625
  Synthetic

SEQ ID NO: 46860 - DNA, 21 bp, Artificial Sequence
  Synthetic
gacgtggacutccacauccaa

SEQ ID NO: 46861 - DNA, 28 bp, Artificial Sequence
  Synthetic
gtgacugtgaatttaauccaaaaagaca

SEQ ID NO: 46862 - DNA, 31 bp, Artificial Sequence; identical to SEQ ID NO: 34628
  Synthetic

SEQ ID NO: 46863 - DNA, 27 bp, Artificial Sequence
  Synthetic
gagttctcttcccutaagtcagtccua

SEQ ID NO: 46864 - DNA, 22 bp, Artificial Sequence
  Synthetic
ctgtgagacccuccccagatua

SEQ ID NO: 46865 - DNA, 30 bp, Artificial Sequence; identical to SEQ ID NO: 34631
  Synthetic

SEQ ID NO: 46866 - DNA, 24 bp, Artificial Sequence
  Synthetic
tggcctcuaacaaaatcacugcaa

SEQ ID NO: 46867 - DNA, 31 bp, Artificial Sequence; identical to SEQ ID NO: 34633
  Synthetic

SEQ ID NO: 46868 - DNA, 22 bp, Artificial Sequence
  Synthetic
gcagcaaauccatgccacuaga

SEQ ID NO: 46869 - DNA, 23 bp, Artificial Sequence
  Synthetic
ccgatgactucacatccagguac

SEQ ID NO: 46870 - DNA, 22 bp, Artificial Sequence
  Synthetic
tgttccctugggaatgtgagug

SEQ ID NO: 46871 - DNA, 22 bp, Artificial Sequence
  Synthetic
ctttguttctgacgugccacag

SEQ ID NO: 46872 - DNA, 23 bp, Artificial Sequence
  Synthetic
cagtaaccccuagcaggaaagut

SEQ ID NO: 46873 - DNA, 23 bp, Artificial Sequence
  Synthetic
ccagtgcuggttcatcagaucaa

SEQ ID NO: 46874 - DNA, 23 bp, Artificial Sequence
  Synthetic
ggtaactguccccaaaacaguga

SEQ ID NO: 46875 - DNA, 28 bp, Artificial Sequence
  Synthetic
aactgaaggactuatttggtgtccauag

SEQ ID NO: 46876 - DNA, 28 bp, Artificial Sequence
  Synthetic
gatgaaaaagacaaucagaaugaagcca

SEQ ID NO: 46877 - DNA, 28 bp, Artificial Sequence
  Synthetic
gggtggtcttuatgctcatgatauaaat

SEQ ID NO: 46878 - DNA, 21 bp, Artificial Sequence
  Synthetic
gctccaugggacuggaaagag

SEQ ID NO: 46879 - DNA, 22 bp, Artificial Sequence
  Synthetic
tggagccaugtactaccuggaa

SEQ ID NO: 46880 - DNA, 24 bp, Artificial Sequence
  Synthetic
guatgggacuggcaacagagaaaa

SEQ ID NO: 46881 - DNA, 31 bp, Artificial Sequence; identical to SEQ ID NO: 34647
  Synthetic

SEQ ID NO: 46882 - DNA, 21 bp, Artificial Sequence
  Synthetic
ctcgccagcccaucatgatua

SEQ ID NO: 46883 - DNA, 31 bp, Artificial Sequence; identical to SEQ ID NO: 34649
  Synthetic

SEQ ID NO: 46884 - DNA, 27 bp, Artificial Sequence
  Synthetic
gttaatggucatcaagaaauggccaaa

SEQ ID NO: 46885 - DNA, 30 bp, Artificial Sequence; identical to SEQ ID NO: 34651
  Synthetic

SEQ ID NO: 46886 - DNA, 25 bp, Artificial Sequence
  Synthetic
tcctcaugagaaccaatctugcaat

SEQ ID NO: 46887 - DNA, 31 bp, Artificial Sequence; identical to SEQ ID NO: 34653
  Synthetic

SEQ ID NO: 46888 - DNA, 28 bp, Artificial Sequence
  Synthetic
cacttacctatcaaugtactcagcauca

SEQ ID NO: 46889 - DNA, 31 bp, Artificial Sequence; identical to SEQ ID NO: 34655
  Synthetic

SEQ ID NO: 46890 - DNA, 21 bp, Artificial Sequence
  Synthetic
cagacacgcuggctcattuac

SEQ ID NO: 46891 - DNA, 27 bp, Artificial Sequence
  Synthetic
cataaggattuccactttctgtccuca

SEQ ID NO: 46892 - DNA, 28 bp, Artificial Sequence
  Synthetic
ccugtcctuagaaaaggaagaaaaucaa

SEQ ID NO: 46893 - DNA, 25 bp, Artificial Sequence
  Synthetic
ggtagtggttugaatctgacctuca

SEQ ID NO: 46894 - DNA, 26 bp, Artificial Sequence
  Synthetic
tcaatactcaucagagagaucagcca

SEQ ID NO: 46895 - DNA, 27 bp, Artificial Sequence
  Synthetic
ctcatctcctuaatttcccaggttuca

SEQ ID NO: 46896 - DNA, 24 bp, Artificial Sequence
  Synthetic
gcccctttcauccagaacatttut

SEQ ID NO: 46897 - DNA, 20 bp, Artificial Sequence
  Synthetic
caagggcucagacgacucag

SEQ ID NO: 46898 - DNA, 21 bp, Artificial Sequence
  Synthetic
caggaccacgagugtgatucc

SEQ ID NO: 46899 - DNA, 26 bp, Artificial Sequence
  Synthetic
gtcttcctccugaaaaacgtcaaauc

SEQ ID NO: 46900 - DNA, 27 bp, Artificial Sequence
  Synthetic
gcttcttcaaaugctcttgacatguat

SEQ ID NO: 46901 - DNA, 30 bp, Artificial Sequence; identical to SEQ ID NO: 34667
  Synthetic

SEQ ID NO: 46902 - DNA, 28 bp, Artificial Sequence
  Synthetic
agtgguggagaaagtagaataucgagat

SEQ ID NO: 46903 - DNA, 23 bp, Artificial Sequence
  Synthetic
ggattgggugggtatcaguaagc

SEQ ID NO: 46904 - DNA, 25 bp, Artificial Sequence
  Synthetic
gatgtagcugaagagagggacaaug

SEQ ID NO: 46905 - DNA, 30 bp, Artificial Sequence; identical to SEQ ID NO: 34671
  Synthetic

SEQ ID NO: 46906 - DNA, 21 bp, Artificial Sequence
  Synthetic
ggaacccacgucagtcctcua

SEQ ID NO: 46907 - DNA, 25 bp, Artificial Sequence
  Synthetic
agattgagaagugcaaagctccuac

SEQ ID NO: 46908 - DNA, 30 bp, Artificial Sequence; identical to SEQ ID NO: 34674
  Synthetic

SEQ ID NO: 46909 - DNA, 27 bp, Artificial Sequence
  Synthetic
aaatggctttguaagtggtcagauact

SEQ ID NO: 46910 - DNA, 23 bp, Artificial Sequence
  Synthetic
gaauaccccaguggaccagaaat

SEQ ID NO: 46911 - DNA, 28 bp, Artificial Sequence
  Synthetic
cagtgtcacauaaaaccaggctaattut

SEQ ID NO: 46912 - DNA, 17 bp, Artificial Sequence
  Synthetic
ggaggtgucctcgcuca

SEQ ID NO: 46913 - DNA, 20 bp, Artificial Sequence
  Synthetic
gcctcctccucgttctccuc

SEQ ID NO: 46914 - DNA, 22 bp, Artificial Sequence
  Synthetic
ggtucacggaggagaaauggag

SEQ ID NO: 46915 - DNA, 22 bp, Artificial Sequence
  Synthetic
tgtctccccugggtagtttugt

SEQ ID NO: 46916 - DNA, 28 bp, Artificial Sequence
  Synthetic
ccaagagaugcaaaccataaacttgtut

SEQ ID NO: 46917 - DNA, 28 bp, Artificial Sequence
  Synthetic
tcaaatgtcauggagataagugaaagct

SEQ ID NO: 46918 - DNA, 31 bp, Artificial Sequence; identical to SEQ ID NO: 34684
  Synthetic

SEQ ID NO: 46919 - DNA, 22 bp, Artificial Sequence
  Synthetic
ctggccuggctctctacttuaa

SEQ ID NO: 46920 - DNA, 29 bp, Artificial Sequence
  Synthetic
gttattgaatggucacatcaaauccaaga

SEQ ID NO: 46921 - DNA, 28 bp, Artificial Sequence
  Synthetic
cagctcaggacacuttgctaatttaaut

SEQ ID NO: 46922 - DNA, 24 bp, Artificial Sequence
  Synthetic
ccatgttgtttuacgtggctcuct

SEQ ID NO: 46923 - DNA, 30 bp, Artificial Sequence; identical to SEQ ID NO: 34689
  Synthetic

SEQ ID NO: 46924 - DNA, 27 bp, Artificial Sequence
  Synthetic
tgattcttugaaacagagacggtuaca

SEQ ID NO: 46925 - DNA, 28 bp, Artificial Sequence
  Synthetic
cttcccataaaguagcttgccaatttut

SEQ ID NO: 46926 - DNA, 25 bp, Artificial Sequence
  Synthetic
tgctcaatgtaguggaaaggtctut

SEQ ID NO: 46927 - DNA, 31 bp, Artificial Sequence; identical to SEQ ID NO: 34693
  Synthetic

SEQ ID NO: 46928 - DNA, 23 bp, Artificial Sequence
  Synthetic
gcgagugagagagagcuaaagua

SEQ ID NO: 46929 - DNA, 25 bp, Artificial Sequence
  Synthetic
aataattgucccaagccttctguca

SEQ ID NO: 46930 - DNA, 26 bp, Artificial Sequence
  Synthetic
actcatagtgcutaatgttgcctuca

SEQ ID NO: 46931 - DNA, 25 bp, Artificial Sequence
  Synthetic
gtgtccaaccutatccaccactuac

SEQ ID NO: 46932 - DNA, 32 bp, Artificial Sequence; identical to SEQ ID NO: 34698
  Synthetic

SEQ ID NO: 46933 - DNA, 28 bp, Artificial Sequence
  Synthetic
gaccatttauggcactgaattuaaccaa

SEQ ID NO: 46934 - DNA, 29 bp, Artificial Sequence
  Synthetic
gctaacatattuggcactttttgtttugg

SEQ ID NO: 46935 - DNA, 19 bp, Artificial Sequence
  Synthetic
gccatgucagccacgtugt

SEQ ID NO: 46936 - DNA, 21 bp, Artificial Sequence
  Synthetic
ggtgauccagcagaccaugag

SEQ ID NO: 46937 - DNA, 29 bp, Artificial Sequence
  Synthetic
agatttttgctctuctctgaactcaauga

SEQ ID NO: 46938 - DNA, 27 bp, Artificial Sequence
  Synthetic
tccctctctggauacctggaaaattua

SEQ ID NO: 46939 - DNA, 27 bp, Artificial Sequence
  Synthetic
cctctctgtcuagggaaggttuaaaca

SEQ ID NO: 46940 - DNA, 26 bp, Artificial Sequence
  Synthetic
actctcccttugaagaattacctugg

SEQ ID NO: 46941 - DNA, 25 bp, Artificial Sequence
  Synthetic
gtctccagggugtttctgaaatcua

SEQ ID NO: 46942 - DNA, 28 bp, Artificial Sequence
  Synthetic
gcaaggaaaacccutagcatttaatgua

SEQ ID NO: 46943 - DNA, 23 bp, Artificial Sequence
  Synthetic
aaaggcttcaugtccacctugaa

SEQ ID NO: 46944 - DNA, 32 bp, Artificial Sequence; identical to SEQ ID NO: 34710
  Synthetic

SEQ ID NO: 46945 - DNA, 24 bp, Artificial Sequence
  Synthetic
tgcaccaugatgtcaacuaaacca

SEQ ID NO: 46946 - DNA, 26 bp, Artificial Sequence
  Synthetic
tgaagtaattucgcatttgtgcctut

SEQ ID NO: 46947 - DNA, 28 bp, Artificial Sequence
  Synthetic
acaaaaacttgguaactagcttacguca

SEQ ID NO: 46948 - DNA, 27 bp, Artificial Sequence
  Synthetic
gttcagagagagautcagacactaugc

SEQ ID NO: 46949 - DNA, 27 bp, Artificial Sequence
  Synthetic
gcaaaacaaagacaaaaugtggcagua

SEQ ID NO: 46950 - DNA, 26 bp, Artificial Sequence
  Synthetic
gaagaagaaaugttgcagaugcaaga

SEQ ID NO: 46951 - DNA, 30 bp, Artificial Sequence; identical to SEQ ID NO: 34717
  Synthetic

SEQ ID NO: 46952 - DNA, 28 bp, Artificial Sequence
  Synthetic
ccaggagtugggaaatatatgucaaagg

SEQ ID NO: 46953 - DNA, 22 bp, Artificial Sequence
  Synthetic
gtaactctgugatggcccucag

SEQ ID NO: 46954 - DNA, 26 bp, Artificial Sequence
  Synthetic
aggcaaaaggaaccgutcatataugt

SEQ ID NO: 46955 - DNA, 28 bp, Artificial Sequence
  Synthetic
aaaattagccaaguagaaaugacccagt

SEQ ID NO: 46956 - DNA, 26 bp, Artificial Sequence
  Synthetic
cagagtagatauagtgcctcccucat

SEQ ID NO: 46957 - DNA, 31 bp, Artificial Sequence; identical to SEQ ID NO: 34723
  Synthetic

SEQ ID NO: 46958 - DNA, 21 bp, Artificial Sequence
  Synthetic
tctaatauccacggccccgua

SEQ ID NO: 46959 - DNA, 29 bp, Artificial Sequence
  Synthetic
ggttgcaccuccataacacagtatuaaat

SEQ ID NO: 46960 - DNA, 28 bp, Artificial Sequence
  Synthetic
cataacgttucatgacttcatauggcat

SEQ ID NO: 46961 - DNA, 22 bp, Artificial Sequence
  Synthetic
ctgtacatuccaactgcccugt

SEQ ID NO: 46962 - DNA, 22 bp, Artificial Sequence
  Synthetic
ccttagagccaguaggaggaug

SEQ ID NO: 46963 - DNA, 27 bp, Artificial Sequence
  Synthetic
aatcaaaaatccacagutccctaggut

SEQ ID NO: 46964 - DNA, 31 bp, Artificial Sequence; identical to SEQ ID NO: 34730
  Synthetic

SEQ ID NO: 46965 - DNA, 20 bp, Artificial Sequence
  Synthetic
agtttugccaccacgtcuct

SEQ ID NO: 46966 - DNA, 21 bp, Artificial Sequence
  Synthetic
ccagtgtccugcgtatgauga

SEQ ID NO: 46967 - DNA, 29 bp, Artificial Sequence
  Synthetic
ctatctggacggaaacuttgaattgtuac

SEQ ID NO: 46968 - DNA, 27 bp, Artificial Sequence
  Synthetic
gcgtaaaaaccccutctgttaaatuct

SEQ ID NO: 46969 - DNA, 20 bp, Artificial Sequence
  Synthetic
gatagccugcatgccacuca

SEQ ID NO: 46970 - DNA, 28 bp, Artificial Sequence
  Synthetic
tcagcaatttguacttatcaccttguca

SEQ ID NO: 46971 - DNA, 28 bp, Artificial Sequence
  Synthetic
caagaaaacguaacaaatgatcccucac

SEQ ID NO: 46972 - DNA, 26 bp, Artificial Sequence
  Synthetic
ggtgtttgtuagaccttgtatuggct

SEQ ID NO: 46973 - DNA, 23 bp, Artificial Sequence
  Synthetic
catctgtucaaagtgcagctucc

SEQ ID NO: 46974 - DNA, 23 bp, Artificial Sequence
  Synthetic
ggcutgggtguaaggaaagaaga

SEQ ID NO: 46975 - DNA, 27 bp, Artificial Sequence
  Synthetic
gacaacaaatgtuctttccatagcugt

SEQ ID NO: 46976 - DNA, 23 bp, Artificial Sequence
  Synthetic
gaaacagaagccgguttggaaug

SEQ ID NO: 46977 - DNA, 24 bp, Artificial Sequence
  Synthetic
gcttgtacugaaaaacggcttuct

SEQ ID NO: 46978 - DNA, 24 bp, Artificial Sequence
  Synthetic
acacagcctgugatacttctggua

SEQ ID NO: 46979 - DNA, 26 bp, Artificial Sequence
  Synthetic
cgctcctuaagtgatgtatcucaaac

SEQ ID NO: 46980 - DNA, 24 bp, Artificial Sequence
  Synthetic
tctgctttucaagcctagtgtuca

SEQ ID NO: 46981 - DNA, 25 bp, Artificial Sequence
  Synthetic
tuaaatggcguaaccgaagacaaac

SEQ ID NO: 46982 - DNA, 24 bp, Artificial Sequence
  Synthetic
cttgctgacucctgaaaatguacc

SEQ ID NO: 46983 - DNA, 22 bp, Artificial Sequence
  Synthetic
gttttaaccuccccaugaccct

SEQ ID NO: 46984 - DNA, 23 bp, Artificial Sequence
  Synthetic
gtgguggcagaaagagaugaaag

SEQ ID NO: 46985 - DNA, 30 bp, Artificial Sequence; identical to SEQ ID NO: 34751
  Synthetic

SEQ ID NO: 46986 - DNA, 30 bp, Artificial Sequence; identical to SEQ ID NO: 34752
  Synthetic

SEQ ID NO: 46987 - DNA, 28 bp, Artificial Sequence
  Synthetic
ccttgatgatttutgatcccttgttuct

SEQ ID NO: 46988 - DNA, 28 bp, Artificial Sequence
  Synthetic
ggtcataactatggucctggaggaaaua

SEQ ID NO: 46989 - DNA, 29 bp, Artificial Sequence
  Synthetic
gatttugggagagagtaaacuacagagac

SEQ ID NO: 46990 - DNA, 22 bp, Artificial Sequence
  Synthetic
cctggauacagggaggagugaa

SEQ ID NO: 46991 - DNA, 26 bp, Artificial Sequence
  Synthetic
tgctgttggaaauggaagcuaaagat

SEQ ID NO: 46992 - DNA, 28 bp, Artificial Sequence
  Synthetic
gcctctgaautaaaggtatttuccccat

SEQ ID NO: 46993 - DNA, 25 bp, Artificial Sequence
  Synthetic
tgacctctgacautcatacgctuac

SEQ ID NO: 46994 - DNA, 23 bp, Artificial Sequence
  Synthetic
ccctcattuattgccacttugct

SEQ ID NO: 46995 - DNA, 27 bp, Artificial Sequence
  Synthetic
gaaaagcatcgugactagttaacucac

SEQ ID NO: 46996 - DNA, 21 bp, Artificial Sequence
  Synthetic
caacgccgcaucagcatttua

SEQ ID NO: 46997 - DNA, 29 bp, Artificial Sequence
  Synthetic
ggaagatcttucaagaaatgtgttggtut

SEQ ID NO: 46998 - DNA, 29 bp, Artificial Sequence
  Synthetic
gcgatgaagatguggacaagataattuct

SEQ ID NO: 46999 - DNA, 28 bp, Artificial Sequence
  Synthetic
gcaatagcaggutttaactaacaugcaa

SEQ ID NO: 47000 - DNA, 29 bp, Artificial Sequence
  Synthetic
ttgagaggattucacatgaactgtaaugt

SEQ ID NO: 47001 - DNA, 28 bp, Artificial Sequence
  Synthetic
gcttcttctucaacaggttctuaaacag

SEQ ID NO: 47002 - DNA, 23 bp, Artificial Sequence
  Synthetic
atttgttgugaacaaggccagug

SEQ ID NO: 47003 - DNA, 26 bp, Artificial Sequence
  Synthetic
gctccgcacuctaaatgttggaatua

SEQ ID NO: 47004 - DNA, 22 bp, Artificial Sequence
  Synthetic
tccagactuccgctaatccugt

SEQ ID NO: 47005 - DNA, 22 bp, Artificial Sequence
  Synthetic
aggautttcatctugccaggct

SEQ ID NO: 47006 - DNA, 30 bp, Artificial Sequence; identical to SEQ ID NO: 34772
  Synthetic

SEQ ID NO: 47007 - DNA, 25 bp, Artificial Sequence
  Synthetic
ccctttguggagaacatctguaaac

SEQ ID NO: 47008 - DNA, 27 bp, Artificial Sequence
  Synthetic
ggtttgtccauttaccttacaguaaca

SEQ ID NO: 47009 - DNA, 23 bp, Artificial Sequence
  Synthetic
ttctugacaccggactttcucag

SEQ ID NO: 47010 - DNA, 21 bp, Artificial Sequence
  Synthetic
tggaaggacguaaacctugcc

SEQ ID NO: 47011 - DNA, 25 bp, Artificial Sequence
  Synthetic
aagaacatcuccacagagtgtctuc

SEQ ID NO: 47012 - DNA, 25 bp, Artificial Sequence
  Synthetic
acctagggtuactttctcatgacut

SEQ ID NO: 47013 - DNA, 21 bp, Artificial Sequence
  Synthetic
gttatuccaggcggcaatugt

SEQ ID NO: 47014 - DNA, 28 bp, Artificial Sequence
  Synthetic
ccactgaatttuaaggtttttgaaugcc

SEQ ID NO: 47015 - DNA, 25 bp, Artificial Sequence
  Synthetic
gctgctgcugaaaatcattuagcaa

SEQ ID NO: 47016 - DNA, 31 bp, Artificial Sequence; identical to SEQ ID NO: 34782
  Synthetic

SEQ ID NO: 47017 - DNA, 25 bp, Artificial Sequence
  Synthetic
actaagtgtuggtggtgacguaaac

SEQ ID NO: 47018 - DNA, 22 bp, Artificial Sequence
  Synthetic
agggaagcuttctggaugacac

SEQ ID NO: 47019 - DNA, 28 bp, Artificial Sequence
  Synthetic
gtcctcttagaggaautaccaagtcuga

SEQ ID NO: 47020 - DNA, 29 bp, Artificial Sequence
  Synthetic
ggtgatugaagccaaagaaaaugaaagaa

SEQ ID NO: 47021 - DNA, 28 bp, Artificial Sequence
  Synthetic
ccaatgtuccagaaacaaattgaacucc

SEQ ID NO: 47022 - DNA, 21 bp, Artificial Sequence
  Synthetic
catgcagggacgcauctcuat

SEQ ID NO: 47023 - DNA, 21 bp, Artificial Sequence
  Synthetic
agaggcatcugcctttggtuc

SEQ ID NO: 47024 - DNA, 28 bp, Artificial Sequence
  Synthetic
agatagacccucttgaattggattucct

SEQ ID NO: 47025 - DNA, 29 bp, Artificial Sequence
  Synthetic
tttacatttcaacacuggagagagcuaat

SEQ ID NO: 47026 - DNA, 31 bp, Artificial Sequence; identical to SEQ ID NO: 34792
  Synthetic

SEQ ID NO: 47027 - DNA, 27 bp, Artificial Sequence
  Synthetic
cagatcctccuaactcttcagacuaca

SEQ ID NO: 47028 - DNA, 22 bp, Artificial Sequence
  Synthetic
gugcgaagtatguggagaggac

SEQ ID NO: 47029 - DNA, 29 bp, Artificial Sequence
  Synthetic
aaaagaaactaagaucactgtgaacugaa

SEQ ID NO: 47030 - DNA, 25 bp, Artificial Sequence
  Synthetic
agtaataugcctcacctucacagga

SEQ ID NO: 47031 - DNA, 22 bp, Artificial Sequence
  Synthetic
tcatctggugtaggugcagact

SEQ ID NO: 47032 - DNA, 23 bp, Artificial Sequence
  Synthetic
gacccttgcucttggaaaccaua

SEQ ID NO: 47033 - DNA, 22 bp, Artificial Sequence
  Synthetic
aaaaggauagcttcggcuccag

SEQ ID NO: 47034 - DNA, 20 bp, Artificial Sequence
  Synthetic
cgtgctacuggttggcuact

SEQ ID NO: 47035 - DNA, 29 bp, Artificial Sequence
  Synthetic
ttcaugaattcttctaaauacacccgaca

SEQ ID NO: 47036 - DNA, 23 bp, Artificial Sequence
  Synthetic
cctccacccaaaugctgaaauag

SEQ ID NO: 47037 - DNA, 30 bp, Artificial Sequence; identical to SEQ ID NO: 34803
  Synthetic

SEQ ID NO: 47038 - DNA, 26 bp, Artificial Sequence
  Synthetic
gcttccaagaaugtgagaggaugaat

SEQ ID NO: 47039 - DNA, 22 bp, Artificial Sequence
  Synthetic
gataatgccaautccccctugc

SEQ ID NO: 47040 - DNA, 24 bp, Artificial Sequence
  Synthetic
aacagcaaguttttcttccuccct

SEQ ID NO: 47041 - DNA, 22 bp, Artificial Sequence
  Synthetic
gtaaacaaagcagggcutcugg

SEQ ID NO: 47042 - DNA, 28 bp, Artificial Sequence
  Synthetic
aaccagaatgtugaatgtttattgcauc

SEQ ID NO: 47043 - DNA, 24 bp, Artificial Sequence
  Synthetic
ctgtttggtutcttgtctguccac

SEQ ID NO: 47044 - DNA, 19 bp, Artificial Sequence
  Synthetic
gctggaguggctctgctuc

SEQ ID NO: 47045 - DNA, 18 bp, Artificial Sequence
  Synthetic
acagucgtgugccaccac

SEQ ID NO: 47046 - DNA, 17 bp, Artificial Sequence
  Synthetic
ggcgugaaccgagcuga

SEQ ID NO: 47047 - DNA, 17 bp, Artificial Sequence
  Synthetic
gtcguccgtcacuccca

SEQ ID NO: 47048 - DNA, 23 bp, Artificial Sequence
  Synthetic
gtattgccaagcuaggctaguga

SEQ ID NO: 47049 - DNA, 31 bp, Artificial Sequence; identical to SEQ ID NO: 34815
  Synthetic

SEQ ID NO: 47050 - DNA, 25 bp, Artificial Sequence
  Synthetic
gggctatuaggatacatuccacagt

SEQ ID NO: 47051 - DNA, 28 bp, Artificial Sequence
  Synthetic
aatcaacacacatuttcttcacaggtuc

SEQ ID NO: 47052 - DNA, 28 bp, Artificial Sequence
  Synthetic
actcaactaattutcctgaagtcaugct

SEQ ID NO: 47053 - DNA, 31 bp, Artificial Sequence; identical to SEQ ID NO: 34819
  Synthetic

SEQ ID NO: 47054 - DNA, 23 bp, Artificial Sequence
  Synthetic
ctccttatgaggutctctcccut

SEQ ID NO: 47055 - DNA, 28 bp, Artificial Sequence
  Synthetic
cctgacttuagcaaggatatcaaccaua

SEQ ID NO: 47056 - DNA, 22 bp, Artificial Sequence
  Synthetic
ctgaagttcutgaagcgtugcc

SEQ ID NO: 47057 - DNA, 29 bp, Artificial Sequence
  Synthetic
agugattucaaagacaauaacaaaaacca

SEQ ID NO: 47058 - DNA, 24 bp, Artificial Sequence
  Synthetic
catgcgtgttutgggacaatguag

SEQ ID NO: 47059 - DNA, 30 bp, Artificial Sequence; identical to SEQ ID NO: 34825
  Synthetic

SEQ ID NO: 47060 - DNA, 23 bp, Artificial Sequence
  Synthetic
gtggaagccaauggcctaatcua

SEQ ID NO: 47061 - DNA, 28 bp, Artificial Sequence
  Synthetic
gtcttttgacatcucctacagagctuat

SEQ ID NO: 47062 - DNA, 30 bp, Artificial Sequence; identical to SEQ ID NO: 34828
  Synthetic

SEQ ID NO: 47063 - DNA, 27 bp, Artificial Sequence
  Synthetic
caacccatttguctgtttcggtatuat

SEQ ID NO: 47064 - DNA, 26 bp, Artificial Sequence
  Synthetic
gcaaatgaagagacccutgaaacaug

SEQ ID NO: 47065 - DNA, 21 bp, Artificial Sequence
  Synthetic
tcttggttttguggccagcua

SEQ ID NO: 47066 - DNA, 25 bp, Artificial Sequence
  Synthetic
tttgcaaatuggttgtgacugagat

SEQ ID NO: 47067 - DNA, 27 bp, Artificial Sequence
  Synthetic
agaactctcaauctgccaacatctuac

SEQ ID NO: 47068 - DNA, 29 bp, Artificial Sequence
  Synthetic
tttttaaaccctaugcagacacatugaac

SEQ ID NO: 47069 - DNA, 23 bp, Artificial Sequence
  Synthetic
acagttccatugctgctggauac

SEQ ID NO: 47070 - DNA, 27 bp, Artificial Sequence
  Synthetic
agagaguaggtttctatcucaggcaaa

SEQ ID NO: 47071 - DNA, 23 bp, Artificial Sequence
  Synthetic
auctttagctgugagaccagcac

SEQ ID NO: 47072 - DNA, 30 bp, Artificial Sequence; identical to SEQ ID NO: 34838
  Synthetic

SEQ ID NO: 47073 - DNA, 22 bp, Artificial Sequence
  Synthetic
agacgacaauggtgagcaaucc

SEQ ID NO: 47074 - DNA, 30 bp, Artificial Sequence; identical to SEQ ID NO: 34840
  Synthetic

SEQ ID NO: 47075 - DNA, 25 bp, Artificial Sequence
  Synthetic
agtacuaagaggaacaccacacuca

SEQ ID NO: 47076 - DNA, 29 bp, Artificial Sequence
  Synthetic
cttaatgtactucctgaaatacucagcga

SEQ ID NO: 47077 - DNA, 28 bp, Artificial Sequence
  Synthetic
ctgagatggataucataaggctgttgut

SEQ ID NO: 47078 - DNA, 30 bp, Artificial Sequence; identical to SEQ ID NO: 34844
  Synthetic

SEQ ID NO: 47079 - DNA, 28 bp, Artificial Sequence
  Synthetic
ggcaggaagcauataagaaccaaatcut

SEQ ID NO: 47080 - DNA, 21 bp, Artificial Sequence
  Synthetic
acaccagaaugatgggctcut

SEQ ID NO: 47081 - DNA, 27 bp, Artificial Sequence
  Synthetic
cagcaaatgtcucacaaaggtactuac

SEQ ID NO: 47082 - DNA, 23 bp, Artificial Sequence
  Synthetic
gccttuccagataacagtugcca

SEQ ID NO: 47083 - DNA, 28 bp, Artificial Sequence
  Synthetic
ctgctctcaucagggaaaggaaataaut

SEQ ID NO: 47084 - DNA, 27 bp, Artificial Sequence
  Synthetic
gcttttgagccugatgaggatatugaa

SEQ ID NO: 47085 - DNA, 31 bp, Artificial Sequence; identical to SEQ ID NO: 34851
  Synthetic

SEQ ID NO: 47086 - DNA, 27 bp, Artificial Sequence
  Synthetic
tcctaggaacuaacaaaacattgtguc

SEQ ID NO: 47087 - DNA, 25 bp, Artificial Sequence
  Synthetic
aaccttgacccucttgagattucac

SEQ ID NO: 47088 - DNA, 28 bp, Artificial Sequence
  Synthetic
tgggttgaugctattctatttcuaccct

SEQ ID NO: 47089 - DNA, 28 bp, Artificial Sequence
  Synthetic
atgttccctgacagutcttaatcagaua

SEQ ID NO: 47090 - DNA, 22 bp, Artificial Sequence
  Synthetic
gctatgcguacacttgcaucct

SEQ ID NO: 47091 - DNA, 27 bp, Artificial Sequence
  Synthetic
cgtctgaataautctagccatttugcc

SEQ ID NO: 47092 - DNA, 22 bp, Artificial Sequence
  Synthetic
tggagaacccguagtgcaaauc

SEQ ID NO: 47093 - DNA, 21 bp, Artificial Sequence
  Synthetic
gtccacacacccacucttgut

SEQ ID NO: 47094 - DNA, 22 bp, Artificial Sequence
  Synthetic
atggaccuaggaggaagguagg

SEQ ID NO: 47095 - DNA, 23 bp, Artificial Sequence
  Synthetic
ccaggacaaaggauccatucaga

SEQ ID NO: 47096 - DNA, 20 bp, Artificial Sequence
  Synthetic
ctgaagggutgtgggcugat

SEQ ID NO: 47097 - DNA, 23 bp, Artificial Sequence
  Synthetic
cactaatcccutgcccactguag

SEQ ID NO: 47098 - DNA, 22 bp, Artificial Sequence
  Synthetic
gccuggcagagagagtactuga

SEQ ID NO: 47099 - DNA, 23 bp, Artificial Sequence
  Synthetic
gcatcccaucctcacattgtucc

SEQ ID NO: 47100 - DNA, 22 bp, Artificial Sequence
  Synthetic
aggtgaaccugggtcctcauaa

SEQ ID NO: 47101 - DNA, 23 bp, Artificial Sequence
  Synthetic
agaagaaccgagacuaccctcug

SEQ ID NO: 47102 - DNA, 22 bp, Artificial Sequence
  Synthetic
agtctggtugctgggauaacct

SEQ ID NO: 47103 - DNA, 21 bp, Artificial Sequence
  Synthetic
ccaaccugcaggcaaatgtuc

SEQ ID NO: 47104 - DNA, 24 bp, Artificial Sequence
  Synthetic
tctcagcaagaaagucgatgtcuc

SEQ ID NO: 47105 - DNA, 22 bp, Artificial Sequence
  Synthetic
cctggctttcutccagccttut

SEQ ID NO: 47106 - DNA, 21 bp, Artificial Sequence
  Synthetic
ccaccatggucagttcctgug

SEQ ID NO: 47107 - DNA, 25 bp, Artificial Sequence
  Synthetic
tgataaactcttuacgtgggctgug

SEQ ID NO: 47108 - DNA, 17 bp, Artificial Sequence
  Synthetic
tggaugcgcgcaccuag

SEQ ID NO: 47109 - DNA, 17 bp, Artificial Sequence
  Synthetic
cggcgucagcaguagca

SEQ ID NO: 47110 - DNA, 29 bp, Artificial Sequence
  Synthetic
ctgaagatagttcuaggaggaaacagcua

SEQ ID NO: 47111 - DNA, 28 bp, Artificial Sequence
  Synthetic
acaggtcguaaaaaccttccctaaaauc

SEQ ID NO: 47112 - DNA, 17 bp, Artificial Sequence
  Synthetic
agtgaguggccccucca

SEQ ID NO: 47113 - DNA, 18 bp, Artificial Sequence
  Synthetic
cccagucgacucccggat

SEQ ID NO: 47114 - DNA, 22 bp, Artificial Sequence
  Synthetic
gaatatggagcaaucccgguca

SEQ ID NO: 47115 - DNA, 23 bp, Artificial Sequence
  Synthetic
ccctctccccutagagcacttua

SEQ ID NO: 47116 - DNA, 27 bp, Artificial Sequence
  Synthetic
tctctctctctcuctctctgtctcuac

SEQ ID NO: 47117 - DNA, 18 bp, Artificial Sequence
  Synthetic
gagccaucagcaguccca

SEQ ID NO: 47118 - DNA, 21 bp, Artificial Sequence
  Synthetic
gctcagccaugttctgccuaa

SEQ ID NO: 47119 - DNA, 21 bp, Artificial Sequence
  Synthetic
gagtctgguggcaagttcuca

SEQ ID NO: 47120 - DNA, 22 bp, Artificial Sequence
  Synthetic
cacagugcctggaguaaggaat

SEQ ID NO: 47121 - DNA, 24 bp, Artificial Sequence
  Synthetic
agctcatttcacugtctcaaccut

SEQ ID NO: 47122 - DNA, 20 bp, Artificial Sequence
  Synthetic
cccccaaccacacutctgug

SEQ ID NO: 47123 - DNA, 24 bp, Artificial Sequence
  Synthetic
caccccatucccagcttttctaut

SEQ ID NO: 47124 - DNA, 26 bp, Artificial Sequence
  Synthetic
ctgcagtagtuatgtccaagagauga

SEQ ID NO: 47125 - DNA, 28 bp, Artificial Sequence
  Synthetic
actctuggagaaaucagaaagtaaaugg

SEQ ID NO: 47126 - DNA, 21 bp, Artificial Sequence
  Synthetic
ctggagaauccacccuttcug

SEQ ID NO: 47127 - DNA, 23 bp, Artificial Sequence
  Synthetic
gatggaggttuagggtgttgcua

SEQ ID NO: 47128 - DNA, 27 bp, Artificial Sequence
  Synthetic
tttgttcttaaugcccaaggagagaut

SEQ ID NO: 47129 - DNA, 23 bp, Artificial Sequence
  Synthetic
cagggaagugggaatgtttcuca

SEQ ID NO: 47130 - DNA, 22 bp, Artificial Sequence
  Synthetic
acagctgugatttgctucgaat

SEQ ID NO: 47131 - DNA, 27 bp, Artificial Sequence
  Synthetic
cagatctgaacuaattccgtctagugc

SEQ ID NO: 47132 - DNA, 21 bp, Artificial Sequence
  Synthetic
gcctctccugttccttcucag

SEQ ID NO: 47133 - DNA, 18 bp, Artificial Sequence
  Synthetic
gcgcctucccgtcguaag

SEQ ID NO: 47134 - DNA, 22 bp, Artificial Sequence
  Synthetic
gctcccaggcugagacttctua

SEQ ID NO: 47135 - DNA, 23 bp, Artificial Sequence
  Synthetic
aggucctagugaccagagagaac

SEQ ID NO: 47136 - DNA, 22 bp, Artificial Sequence
  Synthetic
cagggagggauggctattgtut

SEQ ID NO: 47137 - DNA, 23 bp, Artificial Sequence
  Synthetic
tgauagaacaauccaccccaggt

SEQ ID NO: 47138 - DNA, 22 bp, Artificial Sequence
  Synthetic
tgcacaaggugagtctttugct

SEQ ID NO: 47139 - DNA, 25 bp, Artificial Sequence
  Synthetic
ctcaaatgggacacaucgtgatuac

SEQ ID NO: 47140 - DNA, 20 bp, Artificial Sequence
  Synthetic
agctuccggaacacgactuc

SEQ ID NO: 47141 - DNA, 19 bp, Artificial Sequence
  Synthetic
ggactcuccaccagcucca

SEQ ID NO: 47142 - DNA, 21 bp, Artificial Sequence
  Synthetic
agaaggacaggugtgagctug

SEQ ID NO: 47143 - DNA, 24 bp, Artificial Sequence
  Synthetic
gggacatuacaggaggccaaauag

SEQ ID NO: 47144 - DNA, 19 bp, Artificial Sequence
  Synthetic
ggaggcutggguagcacac

SEQ ID NO: 47145 - DNA, 21 bp, Artificial Sequence
  Synthetic
ttgagccucactgtccatguc

SEQ ID NO: 47146 - DNA, 17 bp, Artificial Sequence
  Synthetic
ctcacgccccacuccuc

SEQ ID NO: 47147 - DNA, 18 bp, Artificial Sequence
  Synthetic
accccuggcctcuggaaa

SEQ ID NO: 47148 - DNA, 22 bp, Artificial Sequence
  Synthetic
gcgacaaacacucacctctgua

SEQ ID NO: 47149 - DNA, 28 bp, Artificial Sequence
  Synthetic
tctaactgttctutctctattgccaugc

SEQ ID NO: 47150 - DNA, 19 bp, Artificial Sequence
  Synthetic
gctggcccutggtgacaua

SEQ ID NO: 47151 - DNA, 19 bp, Artificial Sequence
  Synthetic
gcuggaagcaggtgtugct

SEQ ID NO: 47152 - DNA, 18 bp, Artificial Sequence
  Synthetic
ctgagccacugggtcugt

SEQ ID NO: 47153 - DNA, 17 bp, Artificial Sequence
  Synthetic
tgcugtggcugcaggag

SEQ ID NO: 47154 - DNA, 18 bp, Artificial Sequence
  Synthetic
ctggtccccuggctccua

SEQ ID NO: 47155 - DNA, 21 bp, Artificial Sequence
  Synthetic
ccaccatcutcctcccugaca

SEQ ID NO: 47156 - DNA, 19 bp, Artificial Sequence
  Synthetic
acgauacccaaccggugac

SEQ ID NO: 47157 - DNA, 22 bp, Artificial Sequence
  Synthetic
gtctacacucaccaccaaccuc

SEQ ID NO: 47158 - DNA, 17 bp, Artificial Sequence
  Synthetic
ccccagccccuctccua

SEQ ID NO: 47159 - DNA, 20 bp, Artificial Sequence
  Synthetic
gttctcuccgtggucagcag

SEQ ID NO: 47160 - DNA, 20 bp, Artificial Sequence
  Synthetic
aaaccacugagcaggtgcut

SEQ ID NO: 47161 - DNA, 18 bp, Artificial Sequence
  Synthetic
cucagcaagugcggaggt

SEQ ID NO: 47162 - DNA, 22 bp, Artificial Sequence
  Synthetic
gtggtccacucataaagccuac

SEQ ID NO: 47163 - DNA, 21 bp, Artificial Sequence
  Synthetic
ctttuccaggcacugcagaac

SEQ ID NO: 47164 - DNA, 21 bp, Artificial Sequence
  Synthetic
cattcaaacugctccgagugc

SEQ ID NO: 47165 - DNA, 22 bp, Artificial Sequence
  Synthetic
atccuacccacccacuaaaggt

SEQ ID NO: 47166 - DNA, 23 bp, Artificial Sequence
  Synthetic
cgtugccaagagtaugaacaagg

SEQ ID NO: 47167 - DNA, 24 bp, Artificial Sequence
  Synthetic
ggttgtttggcutaaactctggug

SEQ ID NO: 47168 - DNA, 24 bp, Artificial Sequence
  Synthetic
gctgcctuctcttttcaucacagt

SEQ ID NO: 47169 - DNA, 21 bp, Artificial Sequence
  Synthetic
cttgccacccuacctagtguc

SEQ ID NO: 47170 - DNA, 21 bp, Artificial Sequence
  Synthetic
ccacagggucactctugagat

SEQ ID NO: 47171 - DNA, 17 bp, Artificial Sequence
  Synthetic
gcttcccccuggctucc

SEQ ID NO: 47172 - DNA, 20 bp, Artificial Sequence
  Synthetic
gtctcacgaugccgttcuct

SEQ ID NO: 47173 - DNA, 22 bp, Artificial Sequence
  Synthetic
tgtaaggtgcutgggacatgug

SEQ ID NO: 47174 - DNA, 18 bp, Artificial Sequence
  Synthetic
cgtgtggguggcagucag

SEQ ID NO: 47175 - DNA, 19 bp, Artificial Sequence
  Synthetic
cttcctcucgcccaucaca

SEQ ID NO: 47176 - DNA, 20 bp, Artificial Sequence
  Synthetic
ccgacatcucctcgggctua

SEQ ID NO: 47177 - DNA, 21 bp, Artificial Sequence
  Synthetic
ctctaacacccugtggctcuc

SEQ ID NO: 47178 - DNA, 22 bp, Artificial Sequence
  Synthetic
ccactcctugcttctcagauga

SEQ ID NO: 47179 - DNA, 21 bp, Artificial Sequence
  Synthetic
cagtgcauacaccgagaccug

SEQ ID NO: 47180 - DNA, 23 bp, Artificial Sequence
  Synthetic
acgccaccacaagaugataaguc

SEQ ID NO: 47181 - DNA, 22 bp, Artificial Sequence
  Synthetic
ggctggaauactgcuacaaccc

SEQ ID NO: 47182 - DNA, 22 bp, Artificial Sequence
  Synthetic
ggactgauaccccagcucagat

SEQ ID NO: 47183 - DNA, 30 bp, Artificial Sequence; identical to SEQ ID NO: 34949
  Synthetic

SEQ ID NO: 47184 - DNA, 23 bp, Artificial Sequence
  Synthetic
agaauagcaagcaaggaaugcct

SEQ ID NO: 47185 - DNA, 20 bp, Artificial Sequence
  Synthetic
gctctagggugaccccacuc

SEQ ID NO: 47186 - DNA, 23 bp, Artificial Sequence
  Synthetic
ggctgtggaagucactcttctug

SEQ ID NO: 47187 - DNA, 21 bp, Artificial Sequence
  Synthetic
ctaacacccugttcgcacuga

SEQ ID NO: 47188 - DNA, 25 bp, Artificial Sequence
  Synthetic
tggcatttgtutttccaactctucg

SEQ ID NO: 47189 - DNA, 19 bp, Artificial Sequence
  Synthetic
tgggtggugctggtctgua

SEQ ID NO: 47190 - DNA, 23 bp, Artificial Sequence
  Synthetic
atccctacugagatggagtgugt

SEQ ID NO: 47191 - DNA, 21 bp, Artificial Sequence
  Synthetic
gcacaucgaggtgaaugggag

SEQ ID NO: 47192 - DNA, 22 bp, Artificial Sequence
  Synthetic
cctggctctucccactaaacuc

SEQ ID NO: 47193 - DNA, 24 bp, Artificial Sequence
  Synthetic
tctggacccucaatgtatccctut

SEQ ID NO: 47194 - DNA, 23 bp, Artificial Sequence
  Synthetic
cctcutaaacccaaugcccagac

SEQ ID NO: 47195 - DNA, 22 bp, Artificial Sequence
  Synthetic
aactgcacuagccttggugaaa

SEQ ID NO: 47196 - DNA, 21 bp, Artificial Sequence
  Synthetic
gttgatgctcugcacatcguc

SEQ ID NO: 47197 - DNA, 23 bp, Artificial Sequence
  Synthetic
agcgtaatuccctttgtctcucc

SEQ ID NO: 47198 - DNA, 19 bp, Artificial Sequence
  Synthetic
cctagcggugcagagtgug

SEQ ID NO: 47199 - DNA, 21 bp, Artificial Sequence
  Synthetic
ctttccccucccctaccuaga

SEQ ID NO: 47200 - DNA, 26 bp, Artificial Sequence
  Synthetic
gatacccctuctactggttttuccat

SEQ ID NO: 47201 - DNA, 24 bp, Artificial Sequence
  Synthetic
agttauccagcagagcaucaaagg

SEQ ID NO: 47202 - DNA, 22 bp, Artificial Sequence
  Synthetic
gcgagtccuacctatgtuccca

SEQ ID NO: 47203 - DNA, 21 bp, Artificial Sequence
  Synthetic
gacccucctgcucagaagaac

SEQ ID NO: 47204 - DNA, 23 bp, Artificial Sequence
  Synthetic
caagccuaggaggttgttgatut

SEQ ID NO: 47205 - DNA, 28 bp, Artificial Sequence
  Synthetic
atctaguaggaagcaaguattttuggat

SEQ ID NO: 47206 - DNA, 24 bp, Artificial Sequence
  Synthetic
tgctgcctcutcctttggatatut

SEQ ID NO: 47207 - DNA, 29 bp, Artificial Sequence
  Synthetic
gccaagtactttucaggaacaaaagaaua

SEQ ID NO: 47208 - DNA, 25 bp, Artificial Sequence
  Synthetic
ggcactaugacagttgagaugaaag

SEQ ID NO: 47209 - DNA, 26 bp, Artificial Sequence
  Synthetic
gagaatgaacaugctgcaagcttuaa

SEQ ID NO: 47210 - DNA, 23 bp, Artificial Sequence
  Synthetic
gctagtugggagaatgctacugt

SEQ ID NO: 47211 - DNA, 29 bp, Artificial Sequence
  Synthetic
ccctttcttcacuatatgaaaactgucca

SEQ ID NO: 47212 - DNA, 30 bp, Artificial Sequence; identical to SEQ ID NO: 34978
  Synthetic

SEQ ID NO: 47213 - DNA, 27 bp, Artificial Sequence
  Synthetic
tgataccagtuttgttgtccaauacca

SEQ ID NO: 47214 - DNA, 27 bp, Artificial Sequence
  Synthetic
caaaaatatttcugaggctccagctuc

SEQ ID NO: 47215 - DNA, 22 bp, Artificial Sequence
  Synthetic
gttgcaagcugtccatctugat

SEQ ID NO: 47216 - DNA, 28 bp, Artificial Sequence
  Synthetic
ggaagaccuccagaaaagtgatactgua

SEQ ID NO: 47217 - DNA, 30 bp, Artificial Sequence; identical to SEQ ID NO: 34983
  Synthetic

SEQ ID NO: 47218 - DNA, 31 bp, Artificial Sequence; identical to SEQ ID NO: 34984
  Synthetic

SEQ ID NO: 47219 - DNA, 27 bp, Artificial Sequence
  Synthetic
gctacaattuaccacactcgtttcaut

SEQ ID NO: 47220 - DNA, 28 bp, Artificial Sequence
  Synthetic
ccggttugacaggagataatutatguaa

SEQ ID NO: 47221 - DNA, 31 bp, Artificial Sequence; identical to SEQ ID NO: 34987
  Synthetic

SEQ ID NO: 47222 - DNA, 23 bp, Artificial Sequence
  Synthetic
ctcttaccagucctgatgctuca

SEQ ID NO: 47223 - DNA, 27 bp, Artificial Sequence
  Synthetic
agcatcaactugacagaagctatucat

SEQ ID NO: 47224 - DNA, 22 bp, Artificial Sequence
  Synthetic
caagccactutggactcaguga

SEQ ID NO: 47225 - DNA, 26 bp, Artificial Sequence
  Synthetic
gccttattuacagtgcacatcucaca

SEQ ID NO: 47226 - DNA, 28 bp, Artificial Sequence
  Synthetic
gatactgtgtttuctgataaggcttgug

SEQ ID NO: 47227 - DNA, 30 bp, Artificial Sequence; identical to SEQ ID NO: 34993
  Synthetic

SEQ ID NO: 47228 - DNA, 31 bp, Artificial Sequence; identical to SEQ ID NO: 34994
  Synthetic

SEQ ID NO: 47229 - DNA, 27 bp, Artificial Sequence
  Synthetic
tttctttcacttgaugtcatgctgtug

SEQ ID NO: 47230 - DNA, 28 bp, Artificial Sequence
  Synthetic
caacaccaccauctttagatttttgcua

SEQ ID NO: 47231 - DNA, 26 bp, Artificial Sequence
  Synthetic
actggatgtttuatatggctgcucac

SEQ ID NO: 47232 - DNA, 22 bp, Artificial Sequence
  Synthetic
cgcaaatcucaggtttgtccut

SEQ ID NO: 47233 - DNA, 29 bp, Artificial Sequence
  Synthetic
gcactaacatcacacutatcttgtcttuc

SEQ ID NO: 47234 - DNA, 26 bp, Artificial Sequence
  Synthetic
tcacagacauagaggaaggagtacug

SEQ ID NO: 47235 - DNA, 23 bp, Artificial Sequence
  Synthetic
cagttccucgagttcugaagagg

SEQ ID NO: 47236 - DNA, 25 bp, Artificial Sequence
  Synthetic
tgaaacctgugccaaggaaagaaua

SEQ ID NO: 47237 - DNA, 29 bp, Artificial Sequence
  Synthetic
ccacaaagagcauacagtttauccaaaga

SEQ ID NO: 47238 - DNA, 30 bp, Artificial Sequence; identical to SEQ ID NO: 35004
  Synthetic

SEQ ID NO: 47239 - DNA, 26 bp, Artificial Sequence
  Synthetic
attaccutcttcctcuaaccccaaga

SEQ ID NO: 47240 - DNA, 28 bp, Artificial Sequence
  Synthetic
gggtaatguggattcaaauacacaagac

SEQ ID NO: 47241 - DNA, 26 bp, Artificial Sequence
  Synthetic
tttaaggagguctcaactuggcaaat

SEQ ID NO: 47242 - DNA, 28 bp, Artificial Sequence
  Synthetic
tcutgaaagcaguagagaacaagaagat

SEQ ID NO: 47243 - DNA, 26 bp, Artificial Sequence
  Synthetic
tgaaagucaaactggttauccaaggg

SEQ ID NO: 47244 - DNA, 22 bp, Artificial Sequence
  Synthetic
caccucagtgaagugaagcaca

SEQ ID NO: 47245 - DNA, 26 bp, Artificial Sequence
  Synthetic
gcatttgcugacccataggattuact

SEQ ID NO: 47246 - DNA, 27 bp, Artificial Sequence
  Synthetic
aaacaaagcugacacattttgaucact

SEQ ID NO: 47247 - DNA, 20 bp, Artificial Sequence
  Synthetic
cacaaaggautgcccaugcc

SEQ ID NO: 47248 - DNA, 22 bp, Artificial Sequence
  Synthetic
gcagcagaugggcagctataug

SEQ ID NO: 47249 - DNA, 20 bp, Artificial Sequence
  Synthetic
cgagugacgcaaggaaggug

SEQ ID NO: 47250 - DNA, 21 bp, Artificial Sequence
  Synthetic
gtuaggccgcaaaccctuaac

SEQ ID NO: 47251 - DNA, 23 bp, Artificial Sequence
  Synthetic
ccttgaccacugtttgaugggaa

SEQ ID NO: 47252 - DNA, 23 bp, Artificial Sequence
  Synthetic
catgtcacccaugaaagcaauga

SEQ ID NO: 47253 - DNA, 24 bp, Artificial Sequence
  Synthetic
gcctataaauggacgagactgcug

SEQ ID NO: 47254 - DNA, 22 bp, Artificial Sequence
  Synthetic
cgacugataccuggccaacaac

SEQ ID NO: 47255 - DNA, 21 bp, Artificial Sequence
  Synthetic
gtaggctcugtgtcccctuac

SEQ ID NO: 47256 - DNA, 23 bp, Artificial Sequence
  Synthetic
ccggatatgacucaggttagugg

SEQ ID NO: 47257 - DNA, 23 bp, Artificial Sequence
  Synthetic
ttttcttctugggacccauccag

SEQ ID NO: 47258 - DNA, 22 bp, Artificial Sequence
  Synthetic
cgaaagccccuaagatucccaa

SEQ ID NO: 47259 - DNA, 22 bp, Artificial Sequence
  Synthetic
cacccctcauttcataggcugt

SEQ ID NO: 47260 - DNA, 26 bp, Artificial Sequence
  Synthetic
gctcggccacauttttctttttaauc

SEQ ID NO: 47261 - DNA, 28 bp, Artificial Sequence
  Synthetic
ccataaatcccacagauctggtacuaac

SEQ ID NO: 47262 - DNA, 27 bp, Artificial Sequence
  Synthetic
tttcagtcctautttgtgctcataugg

SEQ ID NO: 47263 - DNA, 30 bp, Artificial Sequence; identical to SEQ ID NO: 35029
  Synthetic

SEQ ID NO: 47264 - DNA, 29 bp, Artificial Sequence
  Synthetic
tgtatgtggtcaaaugaatccaattcuga

SEQ ID NO: 47265 - DNA, 26 bp, Artificial Sequence
  Synthetic
gctcccuggacattagtttcucaaac

SEQ ID NO: 47266 - DNA, 25 bp, Artificial Sequence
  Synthetic
gacagcagtgugtcatatccauact

SEQ ID NO: 47267 - DNA, 21 bp, Artificial Sequence
  Synthetic
aggttcggaautcccttuccc

SEQ ID NO: 47268 - DNA, 26 bp, Artificial Sequence
  Synthetic
tcagagttgutcttatagggucgagt

SEQ ID NO: 47269 - DNA, 24 bp, Artificial Sequence
  Synthetic
tgcaatcaccaauatggtcacuga

SEQ ID NO: 47270 - DNA, 27 bp, Artificial Sequence
  Synthetic
acttgcaagcaaaucatgacactagua

SEQ ID NO: 47271 - DNA, 29 bp, Artificial Sequence
  Synthetic
cttctgaatgttugttagctcaactucaa

SEQ ID NO: 47272 - DNA, 26 bp, Artificial Sequence
  Synthetic
cagtattcacgutatgctgtccaauc

SEQ ID NO: 47273 - DNA, 24 bp, Artificial Sequence
  Synthetic
gtagtctuccagtatguccaagca

SEQ ID NO: 47274 - DNA, 25 bp, Artificial Sequence
  Synthetic
aaaaggagcaaguatgttgtcgcua

SEQ ID NO: 47275 - DNA, 27 bp, Artificial Sequence
  Synthetic
guacacaggaggaaaauaaacctauca

SEQ ID NO: 47276 - DNA, 24 bp, Artificial Sequence
  Synthetic
ataccaucacattggaaugagggt

SEQ ID NO: 47277 - DNA, 28 bp, Artificial Sequence
  Synthetic
tgtcgaacattuccctttcataggaaut

SEQ ID NO: 47278 - DNA, 28 bp, Artificial Sequence
  Synthetic
actctctttgagaaaaaugcagcattug

SEQ ID NO: 47279 - DNA, 27 bp, Artificial Sequence
  Synthetic
cttcacagaatutagacccttcaucct

SEQ ID NO: 47280 - DNA, 28 bp, Artificial Sequence
  Synthetic
ataaacaaaagcugctttacattcugct

SEQ ID NO: 47281 - DNA, 25 bp, Artificial Sequence
  Synthetic
gtgttcgaaugggacttcttacuca

SEQ ID NO: 47282 - DNA, 23 bp, Artificial Sequence
  Synthetic
gctcuacagtgcagugaaggaag

SEQ ID NO: 47283 - DNA, 28 bp, Artificial Sequence
  Synthetic
ccagttgggaautctaactactgtuaca

SEQ ID NO: 47284 - DNA, 23 bp, Artificial Sequence
  Synthetic
gccaactcacugagcaagatgua

SEQ ID NO: 47285 - DNA, 22 bp, Artificial Sequence
  Synthetic
caaacagcauggtggagaccua

SEQ ID NO: 47286 - DNA, 24 bp, Artificial Sequence
  Synthetic
gattctaggttugtcagctccugt

SEQ ID NO: 47287 - DNA, 25 bp, Artificial Sequence
  Synthetic
aaaagggaatuaagctctccagguc

SEQ ID NO: 47288 - DNA, 21 bp, Artificial Sequence
  Synthetic
ggagagagggcaugtgagcua

SEQ ID NO: 47289 - DNA, 30 bp, Artificial Sequence; identical to SEQ ID NO: 35055
  Synthetic

SEQ ID NO: 47290 - DNA, 25 bp, Artificial Sequence
  Synthetic
aaagtagcacugggcagattatuac

SEQ ID NO: 47291 - DNA, 31 bp, Artificial Sequence; identical to SEQ ID NO: 35057
  Synthetic

SEQ ID NO: 47292 - DNA, 30 bp, Artificial Sequence; identical to SEQ ID NO: 35058
  Synthetic

SEQ ID NO: 47293 - DNA, 22 bp, Artificial Sequence
  Synthetic
cagacgtguagtcagggtugaa

SEQ ID NO: 47294 - DNA, 27 bp, Artificial Sequence
  Synthetic
tcttttcctgaaguatgatgcaagcua

SEQ ID NO: 47295 - DNA, 31 bp, Artificial Sequence; identical to SEQ ID NO: 35061
  Synthetic

SEQ ID NO: 47296 - DNA, 27 bp, Artificial Sequence
  Synthetic
aaagtgtacaatguagaatgccctuga

SEQ ID NO: 47297 - DNA, 21 bp, Artificial Sequence
  Synthetic
gcagagctuaagcctctcucc

SEQ ID NO: 47298 - DNA, 26 bp, Artificial Sequence
  Synthetic
cctcaatgacccugagttatcctuct

SEQ ID NO: 47299 - DNA, 22 bp, Artificial Sequence
  Synthetic
gttttcaggcucctccacttug

SEQ ID NO: 47300 - DNA, 24 bp, Artificial Sequence
  Synthetic
gcagacacugggtccaaatctaut

SEQ ID NO: 47301 - DNA, 24 bp, Artificial Sequence
  Synthetic
agtactcgugaaaaagagcaggug

SEQ ID NO: 47302 - DNA, 26 bp, Artificial Sequence
  Synthetic
gagatgaaacccgagauggattcuac

SEQ ID NO: 47303 - DNA, 27 bp, Artificial Sequence
  Synthetic
tcaagcuagaaagatttcctcuaccct

SEQ ID NO: 47304 - DNA, 23 bp, Artificial Sequence
  Synthetic
aagcagtgtugaaaggcaaaugg

SEQ ID NO: 47305 - DNA, 25 bp, Artificial Sequence
  Synthetic
cucccttttaagcugcagaaacaag

SEQ ID NO: 47306 - DNA, 21 bp, Artificial Sequence
  Synthetic
ccagctucgagagtcucaggt

SEQ ID NO: 47307 - DNA, 27 bp, Artificial Sequence
  Synthetic
agttccatttgagucttaaaggcauca

SEQ ID NO: 47308 - DNA, 29 bp, Artificial Sequence
  Synthetic
atccattctaggauagcgttttctugaaa

SEQ ID NO: 47309 - DNA, 25 bp, Artificial Sequence
  Synthetic
agcctagtcccaucttcaagatuga

SEQ ID NO: 47310 - DNA, 26 bp, Artificial Sequence
  Synthetic
atgatctgacagutctctttggcaut

SEQ ID NO: 47311 - DNA, 31 bp, Artificial Sequence; identical to SEQ ID NO: 35077
  Synthetic

SEQ ID NO: 47312 - DNA, 29 bp, Artificial Sequence
  Synthetic
gggaagactgugtttttaatcatttguca

SEQ ID NO: 47313 - DNA, 28 bp, Artificial Sequence
  Synthetic
ggccaacagaaaauaagaaagacuaagg

SEQ ID NO: 47314 - DNA, 21 bp, Artificial Sequence
  Synthetic
atgttugaccgccttcucact

SEQ ID NO: 47315 - DNA, 22 bp, Artificial Sequence
  Synthetic
tctggagatuctgaaggcucgt

SEQ ID NO: 47316 - DNA, 19 bp, Artificial Sequence
  Synthetic
ttgggcgggcugttgaaua

SEQ ID NO: 47317 - DNA, 21 bp, Artificial Sequence
  Synthetic
gatccatucgcagagucagca

SEQ ID NO: 47318 - DNA, 23 bp, Artificial Sequence
  Synthetic
acccatccaugtttctaccucca

SEQ ID NO: 47319 - DNA, 22 bp, Artificial Sequence
  Synthetic
ctgcagtctuatccaggctcuc

SEQ ID NO: 47320 - DNA, 32 bp, Artificial Sequence; identical to SEQ ID NO: 35086
  Synthetic

SEQ ID NO: 47321 - DNA, 22 bp, Artificial Sequence
  Synthetic
gtggcacagaaguacacaguct

SEQ ID NO: 47322 - DNA, 21 bp, Artificial Sequence
  Synthetic
cctatggtgugaggcatggug

SEQ ID NO: 47323 - DNA, 28 bp, Artificial Sequence
  Synthetic
ttggcttugaatacatgaauagggaact

SEQ ID NO: 47324 - DNA, 28 bp, Artificial Sequence
  Synthetic
caaaagtccaaucacaaaatucacacac

SEQ ID NO: 47325 - DNA, 28 bp, Artificial Sequence
  Synthetic
agataucagccauccagtaaaaaucaaa

SEQ ID NO: 47326 - DNA, 20 bp, Artificial Sequence
  Synthetic
cgagcuaacagcccaggtut

SEQ ID NO: 47327 - DNA, 27 bp, Artificial Sequence
  Synthetic
ttttccuagagacctucagagaagaca

SEQ ID NO: 47328 - DNA, 28 bp, Artificial Sequence
  Synthetic
gacaatcctuccattgaagaaguaggaa

SEQ ID NO: 47329 - DNA, 27 bp, Artificial Sequence
  Synthetic
attattcacctugctccaaggatauct

SEQ ID NO: 47330 - DNA, 23 bp, Artificial Sequence
  Synthetic
ttgtgacaagaagucccacguag

SEQ ID NO: 47331 - DNA, 22 bp, Artificial Sequence
  Synthetic
ggtgttgcaacutgttccctug

SEQ ID NO: 47332 - DNA, 28 bp, Artificial Sequence
  Synthetic
tttgttgtattgaagutttggcaacuga

SEQ ID NO: 47333 - DNA, 28 bp, Artificial Sequence
  Synthetic
ggaagattttcauttggaaacctgtuct

SEQ ID NO: 47334 - DNA, 25 bp, Artificial Sequence
  Synthetic
gggtgcguagataataaacaaucca

SEQ ID NO: 47335 - DNA, 24 bp, Artificial Sequence
  Synthetic
gttctttcucttgcttgugcacag

SEQ ID NO: 47336 - DNA, 29 bp, Artificial Sequence
  Synthetic
ctctttagtacautcgtaaaggcuacagt

SEQ ID NO: 47337 - DNA, 23 bp, Artificial Sequence
  Synthetic
ctttgaccgugccttcttgttut

SEQ ID NO: 47338 - DNA, 24 bp, Artificial Sequence
  Synthetic
ccattuagaccaaaggtucccaag

SEQ ID NO: 47339 - DNA, 29 bp, Artificial Sequence
  Synthetic
atctctttaaggaugaattctgagccaut

SEQ ID NO: 47340 - DNA, 30 bp, Artificial Sequence; identical to SEQ ID NO: 35106
  Synthetic

SEQ ID NO: 47341 - DNA, 27 bp, Artificial Sequence
  Synthetic
tggcaggaagaaguatctcgtatcaua

SEQ ID NO: 47342 - DNA, 22 bp, Artificial Sequence
  Synthetic
ggcattcuagtccatgcugcaa

SEQ ID NO: 47343 - DNA, 30 bp, Artificial Sequence; identical to SEQ ID NO: 35109
  Synthetic

SEQ ID NO: 47344 - DNA, 21 bp, Artificial Sequence
  Synthetic
ccccagaauatggcaggugac

SEQ ID NO: 47345 - DNA, 24 bp, Artificial Sequence
  Synthetic
cauaaagctucagacccacgacat

SEQ ID NO: 47346 - DNA, 24 bp, Artificial Sequence
  Synthetic
aaacagcagutatcuggcaagagt

SEQ ID NO: 47347 - DNA, 25 bp, Artificial Sequence
  Synthetic
accttattttucttccagctugcct

SEQ ID NO: 47348 - DNA, 25 bp, Artificial Sequence
  Synthetic
ttcttgcatgauggatgtgaaacug

SEQ ID NO: 47349 - DNA, 29 bp, Artificial Sequence
  Synthetic
acattaaagaggaggutctgatcacaaug

SEQ ID NO: 47350 - DNA, 21 bp, Artificial Sequence
  Synthetic
tgggtgggucataaggtguga

SEQ ID NO: 47351 - DNA, 30 bp, Artificial Sequence; identical to SEQ ID NO: 35117
  Synthetic

SEQ ID NO: 47352 - DNA, 30 bp, Artificial Sequence; identical to SEQ ID NO: 35118
  Synthetic

SEQ ID NO: 47353 - DNA, 25 bp, Artificial Sequence
  Synthetic
cacttttcctguttctagcctguga

SEQ ID NO: 47354 - DNA, 24 bp, Artificial Sequence
  Synthetic
gctacttcauaaactaggccugca

SEQ ID NO: 47355 - DNA, 28 bp, Artificial Sequence
  Synthetic
tgccttgaagugagtaggaattuaacaa

SEQ ID NO: 47356 - DNA, 28 bp, Artificial Sequence
  Synthetic
actatctctcucatttttgcttgauggg

SEQ ID NO: 47357 - DNA, 23 bp, Artificial Sequence
  Synthetic
gcaaatgtugccaacagcttuct

SEQ ID NO: 47358 - DNA, 25 bp, Artificial Sequence
  Synthetic
gaccaaugaccatactgaugaagga

SEQ ID NO: 47359 - DNA, 29 bp, Artificial Sequence
  Synthetic
ctttgtttcccautgtgaatatgacucag

SEQ ID NO: 47360 - DNA, 32 bp, Artificial Sequence; identical to SEQ ID NO: 35126
  Synthetic

SEQ ID NO: 47361 - DNA, 25 bp, Artificial Sequence
  Synthetic
cctggcatccugccttatctttuaa

SEQ ID NO: 47362 - DNA, 28 bp, Artificial Sequence
  Synthetic
tccttaacctuacagagtttcatggtuc

SEQ ID NO: 47363 - DNA, 28 bp, Artificial Sequence
  Synthetic
agtttattcctgcugtgttcaggtuaaa

SEQ ID NO: 47364 - DNA, 23 bp, Artificial Sequence
  Synthetic
gttctcggcuagaaaguccaaca

SEQ ID NO: 47365 - DNA, 25 bp, Artificial Sequence
  Synthetic
gtgtacacaugtgcttcctuaaaca

SEQ ID NO: 47366 - DNA, 22 bp, Artificial Sequence
  Synthetic
tgcaucgttugagaacggaaca

SEQ ID NO: 47367 - DNA, 29 bp, Artificial Sequence
  Synthetic
gcgtggcattutaattactagaaagugat

SEQ ID NO: 47368 - DNA, 25 bp, Artificial Sequence
  Synthetic
ctcagtgaagautctgttgcagcua

SEQ ID NO: 47369 - DNA, 22 bp, Artificial Sequence
  Synthetic
ggagttugagcgggtgactuac

SEQ ID NO: 47370 - DNA, 22 bp, Artificial Sequence
  Synthetic
gcggcagaauttgagagatugt

SEQ ID NO: 47371 - DNA, 29 bp, Artificial Sequence
  Synthetic
gggtgacttgauggagtcattaatcttua

SEQ ID NO: 47372 - DNA, 18 bp, Artificial Sequence
  Synthetic
cctccctgugctctgcut

SEQ ID NO: 47373 - DNA, 20 bp, Artificial Sequence
  Synthetic
ctcccagucctccttuccag

SEQ ID NO: 47374 - DNA, 18 bp, Artificial Sequence
  Synthetic
caacgaguccacgtcguc

SEQ ID NO: 47375 - DNA, 19 bp, Artificial Sequence
  Synthetic
gcagtccucctcguccaca

SEQ ID NO: 47376 - DNA, 19 bp, Artificial Sequence
  Synthetic
acgagagugagcgggacua

SEQ ID NO: 47377 - DNA, 19 bp, Artificial Sequence
  Synthetic
ggccagguggacagaagug

SEQ ID NO: 47378 - DNA, 23 bp, Artificial Sequence
  Synthetic
cctcatccuccattcccatucac

SEQ ID NO: 47379 - DNA, 25 bp, Artificial Sequence
  Synthetic
gaaaggacacuagctcctagaucct

SEQ ID NO: 47380 - DNA, 23 bp, Artificial Sequence
  Synthetic
catttguggagcacttgauccct

SEQ ID NO: 47381 - DNA, 22 bp, Artificial Sequence
  Synthetic
ggtagaugagctccucagcaga

SEQ ID NO: 47382 - DNA, 21 bp, Artificial Sequence
  Synthetic
tggaagcuaagggtccgtcut

SEQ ID NO: 47383 - DNA, 18 bp, Artificial Sequence
  Synthetic
ggagcugttcccgugcag

SEQ ID NO: 47384 - DNA, 21 bp, Artificial Sequence
  Synthetic
ggtgggacugtgctttcugac

SEQ ID NO: 47385 - DNA, 26 bp, Artificial Sequence
  Synthetic
cacagtgagaaugaaattagggcuct

SEQ ID NO: 47386 - DNA, 20 bp, Artificial Sequence
  Synthetic
cagtgcugtgacuggacact

SEQ ID NO: 47387 - DNA, 22 bp, Artificial Sequence
  Synthetic
tggatcuaagccacaugacgac

SEQ ID NO: 47388 - DNA, 23 bp, Artificial Sequence
  Synthetic
cugatatgtggugaagccagact

SEQ ID NO: 47389 - DNA, 17 bp, Artificial Sequence
  Synthetic
agugctgggugcagacg

SEQ ID NO: 47390 - DNA, 19 bp, Artificial Sequence
  Synthetic
ccacccgcuttctgtcuct

SEQ ID NO: 47391 - DNA, 17 bp, Artificial Sequence
  Synthetic
ccugccccauccagagg

SEQ ID NO: 47392 - DNA, 23 bp, Artificial Sequence
  Synthetic
catctgctcuccctagacagcua

SEQ ID NO: 47393 - DNA, 22 bp, Artificial Sequence
  Synthetic
ggtcctggcugttgtaagacuc

SEQ ID NO: 47394 - DNA, 19 bp, Artificial Sequence
  Synthetic
tgtggacccccutgacuga

SEQ ID NO: 47395 - DNA, 19 bp, Artificial Sequence
  Synthetic
gacagugagcggcacugat

SEQ ID NO: 47396 - DNA, 23 bp, Artificial Sequence
  Synthetic
ccttaacuaacacgggctctcut

SEQ ID NO: 47397 - DNA, 20 bp, Artificial Sequence
  Synthetic
cctcagcuagccctccucat

SEQ ID NO: 47398 - DNA, 21 bp, Artificial Sequence
  Synthetic
ctacatcgcaguctcctucgt

SEQ ID NO: 47399 - DNA, 19 bp, Artificial Sequence
  Synthetic
agccccagccauaaaggug

SEQ ID NO: 47400 - DNA, 24 bp, Artificial Sequence
  Synthetic
ctctcgaugcaactctatcgucac

SEQ ID NO: 47401 - DNA, 28 bp, Artificial Sequence
  Synthetic
ccgcaaatcccacuagctaaatatcuaa

SEQ ID NO: 47402 - DNA, 22 bp, Artificial Sequence
  Synthetic
cactgaauagggctttggccut

SEQ ID NO: 47403 - DNA, 21 bp, Artificial Sequence
  Synthetic
caattggtggugtggccaauc

SEQ ID NO: 47404 - DNA, 23 bp, Artificial Sequence
  Synthetic
gttcctccucagcctctttctut

SEQ ID NO: 47405 - DNA, 22 bp, Artificial Sequence
  Synthetic
gccttccaguttggacctccua

SEQ ID NO: 47406 - DNA, 20 bp, Artificial Sequence
  Synthetic
cctgcuccaccgaggtctua

SEQ ID NO: 47407 - DNA, 22 bp, Artificial Sequence
  Synthetic
cautccccaaacugccaaacag

SEQ ID NO: 47408 - DNA, 22 bp, Artificial Sequence
  Synthetic
tctttagccaguggcttggtut

SEQ ID NO: 47409 - DNA, 25 bp, Artificial Sequence
  Synthetic
cagataccagaaucagaggacucac

SEQ ID NO: 47410 - DNA, 22 bp, Artificial Sequence
  Synthetic
cctcttgcucctctgcttaguc

SEQ ID NO: 47411 - DNA, 23 bp, Artificial Sequence
  Synthetic
gaatgcctccucctcatttcuca

SEQ ID NO: 47412 - DNA, 24 bp, Artificial Sequence
  Synthetic
ggacatgcutctcttaactuccct

SEQ ID NO: 47413 - DNA, 27 bp, Artificial Sequence
  Synthetic
aggaaagtccugatttctttagctugg

SEQ ID NO: 47414 - DNA, 23 bp, Artificial Sequence
  Synthetic
ccagtgcttcuccctcaactaug

SEQ ID NO: 47415 - DNA, 23 bp, Artificial Sequence
  Synthetic
ccttgaggugaggaactttgcut

SEQ ID NO: 47416 - DNA, 20 bp, Artificial Sequence
  Synthetic
cccttcagauggccctggua

SEQ ID NO: 47417 - DNA, 21 bp, Artificial Sequence
  Synthetic
ccaggucagacgctcauagac

SEQ ID NO: 47418 - DNA, 20 bp, Artificial Sequence
  Synthetic
agtggcaucttgcuccacac

SEQ ID NO: 47419 - DNA, 20 bp, Artificial Sequence
  Synthetic
acccuggagccctaacctut

SEQ ID NO: 47420 - DNA, 18 bp, Artificial Sequence
  Synthetic
ccugcagcccagcagaua

SEQ ID NO: 47421 - DNA, 20 bp, Artificial Sequence
  Synthetic
ggtaugagccagctctucca

SEQ ID NO: 47422 - DNA, 18 bp, Artificial Sequence
  Synthetic
cttctuccgccagucggt

SEQ ID NO: 47423 - DNA, 18 bp, Artificial Sequence
  Synthetic
gtcctccgcucggctuag

SEQ ID NO: 47424 - DNA, 22 bp, Artificial Sequence
  Synthetic
atgaagccaccaugcctacaut

SEQ ID NO: 47425 - DNA, 22 bp, Artificial Sequence
  Synthetic
ggcccacuaagatgggcattut

SEQ ID NO: 47426 - DNA, 23 bp, Artificial Sequence
  Synthetic
tgatgctggccucatatgttugt

SEQ ID NO: 47427 - DNA, 27 bp, Artificial Sequence
  Synthetic
acutacttcttcauaacgaggaacagc

SEQ ID NO: 47428 - DNA, 21 bp, Artificial Sequence
  Synthetic
gtcgaugtgtgguagccagag

SEQ ID NO: 47429 - DNA, 20 bp, Artificial Sequence
  Synthetic
gatggugcagcaggttccua

SEQ ID NO: 47430 - DNA, 24 bp, Artificial Sequence
  Synthetic
gagttcagatuagcccatggauca

SEQ ID NO: 47431 - DNA, 22 bp, Artificial Sequence
  Synthetic
gccguagaagggatugacaagc

SEQ ID NO: 47432 - DNA, 23 bp, Artificial Sequence
  Synthetic
ctcacuaacaaagcaggcttugg

SEQ ID NO: 47433 - DNA, 26 bp, Artificial Sequence
  Synthetic
gccaaccaucttgtctaactucagat

SEQ ID NO: 47434 - DNA, 20 bp, Artificial Sequence
  Synthetic
ctcctccuctgctcauggag

SEQ ID NO: 47435 - DNA, 22 bp, Artificial Sequence
  Synthetic
aggactgcagacugaactcuca

SEQ ID NO: 47436 - DNA, 22 bp, Artificial Sequence
  Synthetic
acgtctggagauaggaggcuat

SEQ ID NO: 47437 - DNA, 22 bp, Artificial Sequence
  Synthetic
ctagctaggugtcctgtuccac

SEQ ID NO: 47438 - DNA, 21 bp, Artificial Sequence
  Synthetic
ccatctccugaccctcctcuc

SEQ ID NO: 47439 - DNA, 17 bp, Artificial Sequence
  Synthetic
actgcucccccgacuca

SEQ ID NO: 47440 - DNA, 20 bp, Artificial Sequence
  Synthetic
cctugagccagggctguaag

SEQ ID NO: 47441 - DNA, 17 bp, Artificial Sequence
  Synthetic
cuccugcccaccagagg

SEQ ID NO: 47442 - DNA, 19 bp, Artificial Sequence
  Synthetic
ggtcaguccttccgacuct

SEQ ID NO: 47443 - DNA, 18 bp, Artificial Sequence
  Synthetic
gctccgagccaugcaucc

SEQ ID NO: 47444 - DNA, 21 bp, Artificial Sequence
  Synthetic
gcagatcttccucccctccuc

SEQ ID NO: 47445 - DNA, 23 bp, Artificial Sequence
  Synthetic
accaaatgugaagacgugggaat

SEQ ID NO: 47446 - DNA, 18 bp, Artificial Sequence
  Synthetic
cccagcaugaccccugaa

SEQ ID NO: 47447 - DNA, 19 bp, Artificial Sequence
  Synthetic
tgggtccuggaggtcucac

SEQ ID NO: 47448 - DNA, 20 bp, Artificial Sequence
  Synthetic
gcguccacgagcagaacuac

SEQ ID NO: 47449 - DNA, 21 bp, Artificial Sequence
  Synthetic
tgtgggaagutggcatctguc

SEQ ID NO: 47450 - DNA, 22 bp, Artificial Sequence
  Synthetic
ccctcagcugtgagtgtatuga

SEQ ID NO: 47451 - DNA, 24 bp, Artificial Sequence
  Synthetic
accctgtatguccttgtgacuact

SEQ ID NO: 47452 - DNA, 24 bp, Artificial Sequence
  Synthetic
gagggagutgaagaugacaaggaa

SEQ ID NO: 47453 - DNA, 30 bp, Artificial Sequence; identical to SEQ ID NO: 35219
  Synthetic

SEQ ID NO: 47454 - DNA, 31 bp, Artificial Sequence; identical to SEQ ID NO: 35220
  Synthetic

SEQ ID NO: 47455 - DNA, 25 bp, Artificial Sequence
  Synthetic
auccttucacagaauacacaacaga

SEQ ID NO: 47456 - DNA, 20 bp, Artificial Sequence
  Synthetic
gtatacguggtggcugcaga

SEQ ID NO: 47457 - DNA, 19 bp, Artificial Sequence
  Synthetic
cgugcaggaugaccagcag

SEQ ID NO: 47458 - DNA, 24 bp, Artificial Sequence
  Synthetic
agcctcatctucaagctcatcaut

SEQ ID NO: 47459 - DNA, 21 bp, Artificial Sequence
  Synthetic
tgagguagcagagcucacaga

SEQ ID NO: 47460 - DNA, 23 bp, Artificial Sequence
  Synthetic
auccagacccaggcaauaacaag

SEQ ID NO: 47461 - DNA, 27 bp, Artificial Sequence
  Synthetic
gccaaaacgaaagutgcataactuagt

SEQ ID NO: 47462 - DNA, 25 bp, Artificial Sequence
  Synthetic
aggacauagacttugaaacaagcga

SEQ ID NO: 47463 - DNA, 22 bp, Artificial Sequence
  Synthetic
catcacttttugtgtggccucc

SEQ ID NO: 47464 - DNA, 22 bp, Artificial Sequence
  Synthetic
gtctggagggcugagaaugaac

SEQ ID NO: 47465 - DNA, 22 bp, Artificial Sequence
  Synthetic
gatgttctaucagcgcauccac

SEQ ID NO: 47466 - DNA, 24 bp, Artificial Sequence
  Synthetic
ccatatgguaacagaagauggcaa

SEQ ID NO: 47467 - DNA, 24 bp, Artificial Sequence
  Synthetic
cccacatcauaccattcctuggat

SEQ ID NO: 47468 - DNA, 21 bp, Artificial Sequence
  Synthetic
guaaaggaaagggcuccagca

SEQ ID NO: 47469 - DNA, 26 bp, Artificial Sequence
  Synthetic
gctgtgtgtcauatctgagcttctut

SEQ ID NO: 47470 - DNA, 23 bp, Artificial Sequence
  Synthetic
ccaggacaguttggguaaacagt

SEQ ID NO: 47471 - DNA, 28 bp, Artificial Sequence
  Synthetic
cctgtagcttgaucacctcattctttut

SEQ ID NO: 47472 - DNA, 25 bp, Artificial Sequence
  Synthetic
ggctgatgucttgtgcaaatauagt

SEQ ID NO: 47473 - DNA, 26 bp, Artificial Sequence
  Synthetic
tcggagcuaaaactcccttttatucc

SEQ ID NO: 47474 - DNA, 25 bp, Artificial Sequence
  Synthetic
agaatcccauagcattgtagcctug

SEQ ID NO: 47475 - DNA, 26 bp, Artificial Sequence
  Synthetic
agaagatgucagtggttgtttucagt

SEQ ID NO: 47476 - DNA, 21 bp, Artificial Sequence
  Synthetic
cctcuacacccgcatttugca

SEQ ID NO: 47477 - DNA, 22 bp, Artificial Sequence
  Synthetic
ggucatgugacacagcgaagat

SEQ ID NO: 47478 - DNA, 17 bp, Artificial Sequence
  Synthetic
gtccgagccaugcguct

SEQ ID NO: 47479 - DNA, 17 bp, Artificial Sequence
  Synthetic
ccctgutcgctcugcac

SEQ ID NO: 47480 - DNA, 23 bp, Artificial Sequence
  Synthetic
taatgttctccuctcttggcuct

SEQ ID NO: 47481 - DNA, 19 bp, Artificial Sequence
  Synthetic
ccggacucccagcactuac

SEQ ID NO: 47482 - DNA, 20 bp, Artificial Sequence
  Synthetic
gagtacatcguccgggtcug

SEQ ID NO: 47483 - DNA, 21 bp, Artificial Sequence
  Synthetic
tcagagtcgggautgggagua

SEQ ID NO: 47484 - DNA, 18 bp, Artificial Sequence
  Synthetic
gcagatccugcgcauggt

SEQ ID NO: 47485 - DNA, 19 bp, Artificial Sequence
  Synthetic
agacagccccuctgaccuc

SEQ ID NO: 47486 - DNA, 20 bp, Artificial Sequence
  Synthetic
gtgaccagucctgcctguaa

SEQ ID NO: 47487 - DNA, 20 bp, Artificial Sequence
  Synthetic
tccccaggcaaaugtgugac

SEQ ID NO: 47488 - DNA, 19 bp, Artificial Sequence
  Synthetic
gggacugagaggccucact

SEQ ID NO: 47489 - DNA, 22 bp, Artificial Sequence
  Synthetic
cacttgtccucaaagggcatug

SEQ ID NO: 47490 - DNA, 21 bp, Artificial Sequence
  Synthetic
tcttgttugagcacgugcaac

SEQ ID NO: 47491 - DNA, 25 bp, Artificial Sequence
  Synthetic
gtcugagagaggaugaagacagaga

SEQ ID NO: 47492 - DNA, 21 bp, Artificial Sequence
  Synthetic
gcatcuggcaccuccaacaat

SEQ ID NO: 47493 - DNA, 18 bp, Artificial Sequence
  Synthetic
gccctcgaucggacucag

SEQ ID NO: 47494 - DNA, 23 bp, Artificial Sequence
  Synthetic
gggauagcaaagagauggagagg

SEQ ID NO: 47495 - DNA, 22 bp, Artificial Sequence
  Synthetic
gcctgctgaguactgctcaaug

SEQ ID NO: 47496 - DNA, 23 bp, Artificial Sequence
  Synthetic
cctctgatggutcccttacccut

SEQ ID NO: 47497 - DNA, 21 bp, Artificial Sequence
  Synthetic
gcttcttgguatggccagcuc

SEQ ID NO: 47498 - DNA, 19 bp, Artificial Sequence
  Synthetic
gcttctautcgcgcugcct

SEQ ID NO: 47499 - DNA, 21 bp, Artificial Sequence
  Synthetic
gcctcugagaagtcccucagt

SEQ ID NO: 47500 - DNA, 24 bp, Artificial Sequence
  Synthetic
tgtcuccaaggaggaaaugaacua

SEQ ID NO: 47501 - DNA, 22 bp, Artificial Sequence
  Synthetic
gtgtcctcgaucttctgctuca

SEQ ID NO: 47502 - DNA, 21 bp, Artificial Sequence
  Synthetic
aggcctgaaggutaaggtgug

SEQ ID NO: 47503 - DNA, 20 bp, Artificial Sequence
  Synthetic
tcagtcagcautcggaggug

SEQ ID NO: 47504 - DNA, 22 bp, Artificial Sequence
  Synthetic
cataacucccctcatgcugaca

SEQ ID NO: 47505 - DNA, 27 bp, Artificial Sequence
  Synthetic
agcctctattuacattttccctcucac

SEQ ID NO: 47506 - DNA, 23 bp, Artificial Sequence
  Synthetic
acccagaaaaccucatgactgug

SEQ ID NO: 47507 - DNA, 20 bp, Artificial Sequence
  Synthetic
cccaauagggccaatcgtug

SEQ ID NO: 47508 - DNA, 17 bp, Artificial Sequence
  Synthetic
gcatccccuggccctug

SEQ ID NO: 47509 - DNA, 24 bp, Artificial Sequence
  Synthetic
aaactcattugaaggcagauggga

SEQ ID NO: 47510 - DNA, 24 bp, Artificial Sequence
  Synthetic
ttgaacaguccatgaaaggugaca

SEQ ID NO: 47511 - DNA, 31 bp, Artificial Sequence; identical to SEQ ID NO: 35277
  Synthetic

SEQ ID NO: 47512 - DNA, 28 bp, Artificial Sequence
  Synthetic
tgtgagaaagaaaaaucaaucaagcaat

SEQ ID NO: 47513 - DNA, 27 bp, Artificial Sequence
  Synthetic
ttcctaagcatgugctctatttcguag

SEQ ID NO: 47514 - DNA, 25 bp, Artificial Sequence
  Synthetic
ggaggacaatucctgagagagauga

SEQ ID NO: 47515 - DNA, 30 bp, Artificial Sequence; identical to SEQ ID NO: 35281
  Synthetic

SEQ ID NO: 47516 - DNA, 28 bp, Artificial Sequence
  Synthetic
caatcagaaacccautgtcttcauaggt

SEQ ID NO: 47517 - DNA, 30 bp, Artificial Sequence; identical to SEQ ID NO: 35283
  Synthetic

SEQ ID NO: 47518 - DNA, 27 bp, Artificial Sequence
  Synthetic
gtgatcaggatuggtatcaaagguagg

SEQ ID NO: 47519 - DNA, 27 bp, Artificial Sequence
  Synthetic
ctcttccaaagccutttaaaaccacut

SEQ ID NO: 47520 - DNA, 30 bp, Artificial Sequence; identical to SEQ ID NO: 35286
  Synthetic

SEQ ID NO: 47521 - DNA, 28 bp, Artificial Sequence
  Synthetic
catggcttgaaaautactggacugaaaa

SEQ ID NO: 47522 - DNA, 21 bp, Artificial Sequence
  Synthetic
ccaagcuaggccctacttuga

SEQ ID NO: 47523 - DNA, 24 bp, Artificial Sequence
  Synthetic
aatgttctgtcuccccttcaucac

SEQ ID NO: 47524 - DNA, 25 bp, Artificial Sequence
  Synthetic
caggtcattaaucaatgccttcuct

SEQ ID NO: 47525 - DNA, 28 bp, Artificial Sequence
  Synthetic
ccaaagccataacuccttttaagggaut

SEQ ID NO: 47526 - DNA, 24 bp, Artificial Sequence
  Synthetic
cagatcugcttgaaaugagagcaa

SEQ ID NO: 47527 - DNA, 23 bp, Artificial Sequence
  Synthetic
gcagcgaatucagaaagagguct

SEQ ID NO: 47528 - DNA, 21 bp, Artificial Sequence
  Synthetic
gggctctcugtaggaggcaua

SEQ ID NO: 47529 - DNA, 26 bp, Artificial Sequence
  Synthetic
cctaatctcgcucttctcttaccuct

SEQ ID NO: 47530 - DNA, 21 bp, Artificial Sequence
  Synthetic
ggaggaggagaccuggaacug

SEQ ID NO: 47531 - DNA, 23 bp, Artificial Sequence
  Synthetic
ctuaggcccaaccacuaacagag

SEQ ID NO: 47532 - DNA, 20 bp, Artificial Sequence
  Synthetic
ccagcccugggaatctctug

SEQ ID NO: 47533 - DNA, 21 bp, Artificial Sequence
  Synthetic
ctgtcagcucatccuccacag

SEQ ID NO: 47534 - DNA, 24 bp, Artificial Sequence
  Synthetic
gtggccauaacaaaacautttuca

SEQ ID NO: 47535 - DNA, 28 bp, Artificial Sequence
  Synthetic
tccactcctugaaggatactcagtaaut

SEQ ID NO: 47536 - DNA, 27 bp, Artificial Sequence
  Synthetic
gtgacttgcatuatggcattatgtucc

SEQ ID NO: 47537 - DNA, 23 bp, Artificial Sequence
  Synthetic
tctcagttcucagtccggttuct

SEQ ID NO: 47538 - DNA, 24 bp, Artificial Sequence
  Synthetic
tgggtataagguccagttcuggat

SEQ ID NO: 47539 - DNA, 26 bp, Artificial Sequence
  Synthetic
tgaagtggacucaattcctgttgaug

SEQ ID NO: 47540 - DNA, 22 bp, Artificial Sequence
  Synthetic
ggaggaagaaaguggcacucat

SEQ ID NO: 47541 - DNA, 29 bp, Artificial Sequence
  Synthetic
gcagtgctattaccutcatcttggaatua

SEQ ID NO: 47542 - DNA, 22 bp, Artificial Sequence
  Synthetic
cccaggutttctgucaggagat

SEQ ID NO: 47543 - DNA, 22 bp, Artificial Sequence
  Synthetic
tgctctccucttctcttuccga

SEQ ID NO: 47544 - DNA, 21 bp, Artificial Sequence
  Synthetic
gggctcacuccactgauaaac

SEQ ID NO: 47545 - DNA, 23 bp, Artificial Sequence
  Synthetic
tccttctgcucttccctctucat

SEQ ID NO: 47546 - DNA, 21 bp, Artificial Sequence
  Synthetic
gctgtgguggcttacactgua

SEQ ID NO: 47547 - DNA, 21 bp, Artificial Sequence
  Synthetic
ctcagaugtcctcuccaccct

SEQ ID NO: 47548 - DNA, 29 bp, Artificial Sequence
  Synthetic
ggtcaagtacctuaatgttgtcttcagut

SEQ ID NO: 47549 - DNA, 26 bp, Artificial Sequence
  Synthetic
gggtatguaaacagactggagattug

SEQ ID NO: 47550 - DNA, 22 bp, Artificial Sequence
  Synthetic
gtgtcttgugacttccugagca

SEQ ID NO: 47551 - DNA, 28 bp, Artificial Sequence
  Synthetic
tgctgtacttguggtattcattgcatua

SEQ ID NO: 47552 - DNA, 27 bp, Artificial Sequence
  Synthetic
ctgccagttugaaatgttagtttguga

SEQ ID NO: 47553 - DNA, 23 bp, Artificial Sequence
  Synthetic
tgtuccagaagcagaaauggaca

SEQ ID NO: 47554 - DNA, 20 bp, Artificial Sequence
  Synthetic
caacgccugccatctugaac

SEQ ID NO: 47555 - DNA, 25 bp, Artificial Sequence
  Synthetic
ccagtcacatguctcactctgtcua

SEQ ID NO: 47556 - DNA, 23 bp, Artificial Sequence
  Synthetic
cagcuaaacaccgaccgacaaua

SEQ ID NO: 47557 - DNA, 21 bp, Artificial Sequence
  Synthetic
ccaggacuccaatgtctgcuc

SEQ ID NO: 47558 - DNA, 21 bp, Artificial Sequence
  Synthetic
ccagccccutagacttucgag

SEQ ID NO: 47559 - DNA, 27 bp, Artificial Sequence
  Synthetic
caacaaaacagagcutgggttagatut

SEQ ID NO: 47560 - DNA, 28 bp, Artificial Sequence
  Synthetic
gcatatgctctgugcttgaagttctuat

SEQ ID NO: 47561 - DNA, 23 bp, Artificial Sequence
  Synthetic
acagagcuggcatcagtctttut

SEQ ID NO: 47562 - DNA, 24 bp, Artificial Sequence
  Synthetic
aaatcttcugcaaatggucccaga

SEQ ID NO: 47563 - DNA, 21 bp, Artificial Sequence
  Synthetic
ctttggcacaggcutgtacut

SEQ ID NO: 47564 - DNA, 21 bp, Artificial Sequence
  Synthetic
gagacugagcagcagctgtua

SEQ ID NO: 47565 - DNA, 24 bp, Artificial Sequence
  Synthetic
cttaactctcccguccttcttgug

SEQ ID NO: 47566 - DNA, 21 bp, Artificial Sequence
  Synthetic
tgggctcuagagaagtgugct

SEQ ID NO: 47567 - DNA, 19 bp, Artificial Sequence
  Synthetic
cactgacgccugtgttcug

SEQ ID NO: 47568 - DNA, 20 bp, Artificial Sequence
  Synthetic
caggaaugcggtgatcuggt

SEQ ID NO: 47569 - DNA, 27 bp, Artificial Sequence
  Synthetic
gggccatgtaautaggcattatgttua

SEQ ID NO: 47570 - DNA, 21 bp, Artificial Sequence
  Synthetic
cguttacauagagggccacct

SEQ ID NO: 47571 - DNA, 25 bp, Artificial Sequence
  Synthetic
gtaaggtaggauagggagactccut

SEQ ID NO: 47572 - DNA, 23 bp, Artificial Sequence
  Synthetic
ctgatcaagguaccaagcgagua

SEQ ID NO: 47573 - DNA, 22 bp, Artificial Sequence
  Synthetic
gctctttttcugtgccctcucc

SEQ ID NO: 47574 - DNA, 21 bp, Artificial Sequence
  Synthetic
cagaaagcacagcaugauggt

SEQ ID NO: 47575 - DNA, 22 bp, Artificial Sequence
  Synthetic
gcacatggagugtgcguagaaa

SEQ ID NO: 47576 - DNA, 22 bp, Artificial Sequence
  Synthetic
gauggagaagctguccaggaac

SEQ ID NO: 47577 - DNA, 27 bp, Artificial Sequence
  Synthetic
gcactctactatuctgcttctctccut

SEQ ID NO: 47578 - DNA, 27 bp, Artificial Sequence
  Synthetic
tgatttatgaguccagtctcaauccct

SEQ ID NO: 47579 - DNA, 21 bp, Artificial Sequence
  Synthetic
ccggaguggtattcccugaca

SEQ ID NO: 47580 - DNA, 25 bp, Artificial Sequence
  Synthetic
gggatgtagggautcttgtttctuc

SEQ ID NO: 47581 - DNA, 25 bp, Artificial Sequence
  Synthetic
caacttcgacuggagggacatatut

SEQ ID NO: 47582 - DNA, 23 bp, Artificial Sequence
  Synthetic
gggcctgcutgttgtatttugat

SEQ ID NO: 47583 - DNA, 25 bp, Artificial Sequence
  Synthetic
guacttcttugacaacagcacacag

SEQ ID NO: 47584 - DNA, 20 bp, Artificial Sequence
  Synthetic
gggagguccaggguacacaa

SEQ ID NO: 47585 - DNA, 26 bp, Artificial Sequence
  Synthetic
tctgtaaaatcugtcccttgtcucct

SEQ ID NO: 47586 - DNA, 27 bp, Artificial Sequence
  Synthetic
caatcccuagaaaggccutatagtuat

SEQ ID NO: 47587 - DNA, 22 bp, Artificial Sequence
  Synthetic
ctgaagacttugccttgcccua

SEQ ID NO: 47588 - DNA, 28 bp, Artificial Sequence
  Synthetic
cctcttgaatucttggtgacataucaga

SEQ ID NO: 47589 - DNA, 30 bp, Artificial Sequence; identical to SEQ ID NO: 35355
  Synthetic

SEQ ID NO: 47590 - DNA, 23 bp, Artificial Sequence
  Synthetic
agagcttgaagaaguccacgtug

SEQ ID NO: 47591 - DNA, 21 bp, Artificial Sequence
  Synthetic
ccacagggcaguttctagugt

SEQ ID NO: 47592 - DNA, 21 bp, Artificial Sequence
  Synthetic
ccttcctgccuccgctaguat

SEQ ID NO: 47593 - DNA, 22 bp, Artificial Sequence
  Synthetic
gacagagcuacacatcttgucc

SEQ ID NO: 47594 - DNA, 22 bp, Artificial Sequence
  Synthetic
tgcatgguagggatcucaacac

SEQ ID NO: 47595 - DNA, 27 bp, Artificial Sequence
  Synthetic
ccgtcttgtccucattttctgtttuaa

SEQ ID NO: 47596 - DNA, 22 bp, Artificial Sequence
  Synthetic
ccccacactuccaacctgttua

SEQ ID NO: 47597 - DNA, 22 bp, Artificial Sequence
  Synthetic
gggcttcgugagacagauacag

SEQ ID NO: 47598 - DNA, 29 bp, Artificial Sequence
  Synthetic
tgtaattaugccaagaaaucatatgcuca

SEQ ID NO: 47599 - DNA, 29 bp, Artificial Sequence
  Synthetic
tgcaagagagcutataatttggattgugt

SEQ ID NO: 47600 - DNA, 21 bp, Artificial Sequence
  Synthetic
cgtaactcutggccagtucgt

SEQ ID NO: 47601 - DNA, 29 bp, Artificial Sequence
  Synthetic
ctgtacccagccuaatcttgtttttctua

SEQ ID NO: 47602 - DNA, 22 bp, Artificial Sequence
  Synthetic
ccttcgccugtcctcatgtaut

SEQ ID NO: 47603 - DNA, 32 bp, Artificial Sequence; identical to SEQ ID NO: 35369
  Synthetic

SEQ ID NO: 47604 - DNA, 31 bp, Artificial Sequence; identical to SEQ ID NO: 35370
  Synthetic

SEQ ID NO: 47605 - DNA, 27 bp, Artificial Sequence
  Synthetic
cttcactgtctuctctatccatggtut

SEQ ID NO: 47606 - DNA, 26 bp, Artificial Sequence
  Synthetic
gactgtguactcttaccttuccaacc

SEQ ID NO: 47607 - DNA, 28 bp, Artificial Sequence
  Synthetic
gtcctgagcucattagacagtaaatugt

SEQ ID NO: 47608 - DNA, 25 bp, Artificial Sequence
  Synthetic
tgaaugggagaaguaagaaggagaa

SEQ ID NO: 47609 - DNA, 27 bp, Artificial Sequence
  Synthetic
tgtgccaaagautattctgtucagagt

SEQ ID NO: 47610 - DNA, 23 bp, Artificial Sequence
  Synthetic
ggctgccacuttcatgaatgaug

SEQ ID NO: 47611 - DNA, 28 bp, Artificial Sequence
  Synthetic
aggtatttatugcttctcaaactucaga

SEQ ID NO: 47612 - DNA, 23 bp, Artificial Sequence
  Synthetic
gcaugcctactcugaaagccaat

SEQ ID NO: 47613 - DNA, 23 bp, Artificial Sequence
  Synthetic
ctaagccagauacctttguccgt

SEQ ID NO: 47614 - DNA, 28 bp, Artificial Sequence
  Synthetic
cctaagaaggagcuaaaggaaggagaua

SEQ ID NO: 47615 - DNA, 30 bp, Artificial Sequence; identical to SEQ ID NO: 35381
  Synthetic

SEQ ID NO: 47616 - DNA, 29 bp, Artificial Sequence
  Synthetic
ctttggtatacuaatatctctgccugaca

SEQ ID NO: 47617 - DNA, 22 bp, Artificial Sequence
  Synthetic
ccactgagaaaugcaccttugg

SEQ ID NO: 47618 - DNA, 21 bp, Artificial Sequence
  Synthetic
ccagcuggagaagtgactuca

SEQ ID NO: 47619 - DNA, 21 bp, Artificial Sequence
  Synthetic
gaggttuccacccaaucccat

SEQ ID NO: 47620 - DNA, 22 bp, Artificial Sequence
  Synthetic
aggcagcugctgatgcuaaaat

SEQ ID NO: 47621 - DNA, 25 bp, Artificial Sequence
  Synthetic
tctccctcaaguttttcagacucac

SEQ ID NO: 47622 - DNA, 33 bp, Artificial Sequence; identical to SEQ ID NO: 35388
  Synthetic

SEQ ID NO: 47623 - DNA, 28 bp, Artificial Sequence
  Synthetic
caggagttggcuaaagttttacaatgut

SEQ ID NO: 47624 - DNA, 22 bp, Artificial Sequence
  Synthetic
ctacagagaacauggctcguga

SEQ ID NO: 47625 - DNA, 19 bp, Artificial Sequence
  Synthetic
aggcaagggcutgcaguag

SEQ ID NO: 47626 - DNA, 21 bp, Artificial Sequence
  Synthetic
ctgctgugccctctttaguca

SEQ ID NO: 47627 - DNA, 19 bp, Artificial Sequence
  Synthetic
tcagcttcucctcccugct

SEQ ID NO: 47628 - DNA, 21 bp, Artificial Sequence
  Synthetic
tccctcguggtgtagagugat

SEQ ID NO: 47629 - DNA, 20 bp, Artificial Sequence
  Synthetic
tgggtgcguaactttgucga

SEQ ID NO: 47630 - DNA, 27 bp, Artificial Sequence
  Synthetic
gcttctgtcaguctttggtgaaacuag

SEQ ID NO: 47631 - DNA, 21 bp, Artificial Sequence
  Synthetic
caccatgcuctttgccucaga

SEQ ID NO: 47632 - DNA, 27 bp, Artificial Sequence
  Synthetic
catagttggguagagaaatcgctcuaa

SEQ ID NO: 47633 - DNA, 20 bp, Artificial Sequence
  Synthetic
ccccugaacaucagcgagac

SEQ ID NO: 47634 - DNA, 24 bp, Artificial Sequence
  Synthetic
ggacacagaucagcatggcuaaat

SEQ ID NO: 47635 - DNA, 21 bp, Artificial Sequence
  Synthetic
catcacccacutggcucaaga

SEQ ID NO: 47636 - DNA, 22 bp, Artificial Sequence
  Synthetic
agtttcucaacccccagacauc

SEQ ID NO: 47637 - DNA, 26 bp, Artificial Sequence
  Synthetic
gaatcggatauaacatcatccgggua

SEQ ID NO: 47638 - DNA, 22 bp, Artificial Sequence
  Synthetic
guatcaguacccagcgggaaac

SEQ ID NO: 47639 - DNA, 23 bp, Artificial Sequence
  Synthetic
cttcagccgcuatgagaguacac

SEQ ID NO: 47640 - DNA, 24 bp, Artificial Sequence
  Synthetic
actggaaggcuaccaaaggacuat

SEQ ID NO: 47641 - DNA, 21 bp, Artificial Sequence
  Synthetic
tgcccaggagaguagtugagg

SEQ ID NO: 47642 - DNA, 20 bp, Artificial Sequence
  Synthetic
actgcucacccagaaagugc

SEQ ID NO: 47643 - DNA, 21 bp, Artificial Sequence
  Synthetic
ttcctgctgucggacactuac

SEQ ID NO: 47644 - DNA, 23 bp, Artificial Sequence
  Synthetic
gctggutatttcacaucagagca

SEQ ID NO: 47645 - DNA, 23 bp, Artificial Sequence
  Synthetic
gctctctacccacuctaccccua

SEQ ID NO: 47646 - DNA, 24 bp, Artificial Sequence
  Synthetic
cctctatgtcccuttcccttccut

SEQ ID NO: 47647 - DNA, 25 bp, Artificial Sequence
  Synthetic
atgaagugggaaacctgatacucac

SEQ ID NO: 47648 - DNA, 21 bp, Artificial Sequence
  Synthetic
ctcagtcccuaagcccatcug

SEQ ID NO: 47649 - DNA, 25 bp, Artificial Sequence
  Synthetic
ctccctattggutctcctccagtua

SEQ ID NO: 47650 - DNA, 22 bp, Artificial Sequence
  Synthetic
gaccacagacaaugttcccuct

SEQ ID NO: 47651 - DNA, 24 bp, Artificial Sequence
  Synthetic
gtatgtgtagacugtgctcagugt

SEQ ID NO: 47652 - DNA, 22 bp, Artificial Sequence
  Synthetic
agttgggaagggauctguggat

SEQ ID NO: 47653 - DNA, 21 bp, Artificial Sequence
  Synthetic
ccacuggaaggccatttgaug

SEQ ID NO: 47654 - DNA, 22 bp, Artificial Sequence
  Synthetic
cctacctucttccctacugcac

SEQ ID NO: 47655 - DNA, 21 bp, Artificial Sequence
  Synthetic
cctggugagtggtccuacact

SEQ ID NO: 47656 - DNA, 26 bp, Artificial Sequence
  Synthetic
ttggcctcttautattggagtcaugg

SEQ ID NO: 47657 - DNA, 21 bp, Artificial Sequence
  Synthetic
gctguccacccaguaggagat

SEQ ID NO: 47658 - DNA, 23 bp, Artificial Sequence
  Synthetic
cactttgtcacugtcactgucct

SEQ ID NO: 47659 - DNA, 21 bp, Artificial Sequence
  Synthetic
cctgcattccutgggagacug

SEQ ID NO: 47660 - DNA, 23 bp, Artificial Sequence
  Synthetic
acagaaauggcctgugaaacaga

SEQ ID NO: 47661 - DNA, 24 bp, Artificial Sequence
  Synthetic
ggtgaacagugtctgatcatguga

SEQ ID NO: 47662 - DNA, 24 bp, Artificial Sequence
  Synthetic
gccacaatttucaccttaggugga

SEQ ID NO: 47663 - DNA, 28 bp, Artificial Sequence
  Synthetic
tgggcttttctcuatttcatgttccaut

SEQ ID NO: 47664 - DNA, 24 bp, Artificial Sequence
  Synthetic
ctcacatautttgcacaugacgct

SEQ ID NO: 47665 - DNA, 28 bp, Artificial Sequence
  Synthetic
aatcacattgtuctgattacccauccat

SEQ ID NO: 47666 - DNA, 26 bp, Artificial Sequence
  Synthetic
acagactugggatgatacucaaagca

SEQ ID NO: 47667 - DNA, 22 bp, Artificial Sequence
  Synthetic
aaactccuaaatgacgcuggct

SEQ ID NO: 47668 - DNA, 23 bp, Artificial Sequence
  Synthetic
ctctgagagcutttggaacugct

SEQ ID NO: 47669 - DNA, 21 bp, Artificial Sequence
  Synthetic
gccaggugcagtgtagtccua

SEQ ID NO: 47670 - DNA, 20 bp, Artificial Sequence
  Synthetic
cagaaugggtccucacacgt

SEQ ID NO: 47671 - DNA, 21 bp, Artificial Sequence
  Synthetic
autggtuacccgaggcagaag

SEQ ID NO: 47672 - DNA, 23 bp, Artificial Sequence
  Synthetic
atctcgaugaccatcaccttugg

SEQ ID NO: 47673 - DNA, 19 bp, Artificial Sequence
  Synthetic
cagtcgcucggtgacugat

SEQ ID NO: 47674 - DNA, 20 bp, Artificial Sequence
  Synthetic
ggaguagtcuccgcccagat

SEQ ID NO: 47675 - DNA, 22 bp, Artificial Sequence
  Synthetic
acttctttucccacccctccua

SEQ ID NO: 47676 - DNA, 23 bp, Artificial Sequence
  Synthetic
ggaggguttttgacgucacaagt

SEQ ID NO: 47677 - DNA, 24 bp, Artificial Sequence
  Synthetic
catgcttccccucattcctcauag

SEQ ID NO: 47678 - DNA, 22 bp, Artificial Sequence
  Synthetic
gattgcugagagacaccugagt

SEQ ID NO: 47679 - DNA, 24 bp, Artificial Sequence
  Synthetic
gggatttuaagcaggtuccaggaa

SEQ ID NO: 47680 - DNA, 27 bp, Artificial Sequence
  Synthetic
aagggatgacugtaattactuggaacc

SEQ ID NO: 47681 - DNA, 25 bp, Artificial Sequence
  Synthetic
ctgggaaacacaucatctcttugga

SEQ ID NO: 47682 - DNA, 30 bp, Artificial Sequence; identical to SEQ ID NO: 35448
  Synthetic

SEQ ID NO: 47683 - DNA, 22 bp, Artificial Sequence
  Synthetic
agcaucaaagacagccgatuct

SEQ ID NO: 47684 - DNA, 26 bp, Artificial Sequence
  Synthetic
tgactcaaacugccatgtatttcuca

SEQ ID NO: 47685 - DNA, 20 bp, Artificial Sequence
  Synthetic
acgagagucacccgaguacc

SEQ ID NO: 47686 - DNA, 19 bp, Artificial Sequence
  Synthetic
catgctgcucgtcacucga

SEQ ID NO: 47687 - DNA, 23 bp, Artificial Sequence
  Synthetic
cuaaaagccaguaggcataucac

SEQ ID NO: 47688 - DNA, 21 bp, Artificial Sequence
  Synthetic
cagagaccucggccattttug

SEQ ID NO: 47689 - DNA, 23 bp, Artificial Sequence
  Synthetic
aagccaatcacugctatggtuga

SEQ ID NO: 47690 - DNA, 22 bp, Artificial Sequence
  Synthetic
gggaaaatuacaggctggucct

SEQ ID NO: 47691 - DNA, 29 bp, Artificial Sequence
  Synthetic
cagttccaagcautcataaattctcacut

SEQ ID NO: 47692 - DNA, 23 bp, Artificial Sequence
  Synthetic
ggctgttuctcacagaucccaaa

SEQ ID NO: 47693 - DNA, 22 bp, Artificial Sequence
  Synthetic
aagcaaggcutctgaagtcucc

SEQ ID NO: 47694 - DNA, 28 bp, Artificial Sequence
  Synthetic
aagcacaaacugcattttgaatcuaagt

SEQ ID NO: 47695 - DNA, 30 bp, Artificial Sequence; identical to SEQ ID NO: 35461
  Synthetic

SEQ ID NO: 47696 - DNA, 20 bp, Artificial Sequence
  Synthetic
gtugaggcagcacaaagguc

SEQ ID NO: 47697 - DNA, 27 bp, Artificial Sequence
  Synthetic
catgttgtcacaguctttgtccaaaut

SEQ ID NO: 47698 - DNA, 22 bp, Artificial Sequence
  Synthetic
ccattggutcctguggcaagaa

SEQ ID NO: 47699 - DNA, 24 bp, Artificial Sequence
  Synthetic
ccutgatatccugggacacagaag

SEQ ID NO: 47700 - DNA, 24 bp, Artificial Sequence
  Synthetic
tttgacaagugctctgguaaacaa

SEQ ID NO: 47701 - DNA, 22 bp, Artificial Sequence
  Synthetic
gcatccugacaagtugcaccat

SEQ ID NO: 47702 - DNA, 21 bp, Artificial Sequence
  Synthetic
gccatgggucttgggttgaua

SEQ ID NO: 47703 - DNA, 23 bp, Artificial Sequence
  Synthetic
ccaacaaagaggcaucaagguct

SEQ ID NO: 47704 - DNA, 23 bp, Artificial Sequence
  Synthetic
gccagtauagcagtcaaccucct

SEQ ID NO: 47705 - DNA, 21 bp, Artificial Sequence
  Synthetic
agctccacacautccccatug

SEQ ID NO: 47706 - DNA, 28 bp, Artificial Sequence
  Synthetic
tcatgcactuctgcaagattauacaagt

SEQ ID NO: 47707 - DNA, 26 bp, Artificial Sequence
  Synthetic
caagttctcacaaguaccaccattut

SEQ ID NO: 47708 - DNA, 23 bp, Artificial Sequence
  Synthetic
gctgtacccaucagcaatgtcua

SEQ ID NO: 47709 - DNA, 25 bp, Artificial Sequence
  Synthetic
ctatgttacaaacugagccctuggt

SEQ ID NO: 47710 - DNA, 26 bp, Artificial Sequence
  Synthetic
aggtcaataatcagucaaaggtgcut

SEQ ID NO: 47711 - DNA, 29 bp, Artificial Sequence
  Synthetic
gcacatattgatugatcactttcaagugg

SEQ ID NO: 47712 - DNA, 27 bp, Artificial Sequence
  Synthetic
aattgattggaaucacattacccugga

SEQ ID NO: 47713 - DNA, 24 bp, Artificial Sequence
  Synthetic
ccatagcacucagctttctcucac

SEQ ID NO: 47714 - DNA, 26 bp, Artificial Sequence
  Synthetic
caggcttacutctagcttuggaaaac

SEQ ID NO: 47715 - DNA, 28 bp, Artificial Sequence
  Synthetic
tcgattttccacguagaagcagaaauaa

SEQ ID NO: 47716 - DNA, 26 bp, Artificial Sequence
  Synthetic
aatggtggattcutcaaaggctguat

SEQ ID NO: 47717 - DNA, 30 bp, Artificial Sequence; identical to SEQ ID NO: 35483
  Synthetic

SEQ ID NO: 47718 - DNA, 21 bp, Artificial Sequence
  Synthetic
ctcacaagugggaaagccugt

SEQ ID NO: 47719 - DNA, 29 bp, Artificial Sequence
  Synthetic
aactggctttguctatactctttttcugt

SEQ ID NO: 47720 - DNA, 25 bp, Artificial Sequence
  Synthetic
gcaugcagaaaaagaguctgaatut

SEQ ID NO: 47721 - DNA, 23 bp, Artificial Sequence
  Synthetic
caautgtgctggucacaaaaggt

SEQ ID NO: 47722 - DNA, 23 bp, Artificial Sequence
  Synthetic
cctgcaagggugtctaaguacaa

SEQ ID NO: 47723 - DNA, 30 bp, Artificial Sequence; identical to SEQ ID NO: 35489
  Synthetic

SEQ ID NO: 47724 - DNA, 22 bp, Artificial Sequence
  Synthetic
acatgtgagccuggatacacug

SEQ ID NO: 47725 - DNA, 26 bp, Artificial Sequence
  Synthetic
accaagcttcauatggactttaugct

SEQ ID NO: 47726 - DNA, 28 bp, Artificial Sequence
  Synthetic
actttttcttcccauttcacaaccaaug

SEQ ID NO: 47727 - DNA, 25 bp, Artificial Sequence
  Synthetic
gagacauaaaaggagaggctgctua

SEQ ID NO: 47728 - DNA, 22 bp, Artificial Sequence
  Synthetic
cagtgactgucgccttgtuact

SEQ ID NO: 47729 - DNA, 22 bp, Artificial Sequence
  Synthetic
cgaagggacacaaugctccuaa

SEQ ID NO: 47730 - DNA, 23 bp, Artificial Sequence
  Synthetic
gcttgaauagaggaguccccaca

SEQ ID NO: 47731 - DNA, 20 bp, Artificial Sequence
  Synthetic
gcagtaucccccgccttuag

SEQ ID NO: 47732 - DNA, 27 bp, Artificial Sequence
  Synthetic
gctcaggguaatcttactagcuacaca

SEQ ID NO: 47733 - DNA, 20 bp, Artificial Sequence
  Synthetic
tccgugaccacatcaauggg

SEQ ID NO: 47734 - DNA, 22 bp, Artificial Sequence
  Synthetic
tgaatgcccaauagtccaugcc

SEQ ID NO: 47735 - DNA, 28 bp, Artificial Sequence
  Synthetic
tgacaatgacacugagactattcuacct

SEQ ID NO: 47736 - DNA, 21 bp, Artificial Sequence
  Synthetic
ggaggaagccauaatgccuca

SEQ ID NO: 47737 - DNA, 25 bp, Artificial Sequence
  Synthetic
acacattgatucactgttcacucat

SEQ ID NO: 47738 - DNA, 20 bp, Artificial Sequence
  Synthetic
gcaatgtccugcttggtcug

SEQ ID NO: 47739 - DNA, 21 bp, Artificial Sequence
  Synthetic
aggttagugggctccuacagt

SEQ ID NO: 47740 - DNA, 23 bp, Artificial Sequence
  Synthetic
ggcactggautgaatctgugagg

SEQ ID NO: 47741 - DNA, 22 bp, Artificial Sequence
  Synthetic
ccacatgtaagcugggttggut

SEQ ID NO: 47742 - DNA, 20 bp, Artificial Sequence
  Synthetic
gacauagcucaccagggcat

SEQ ID NO: 47743 - DNA, 23 bp, Artificial Sequence
  Synthetic
tcatggagatguctggctgttuc

SEQ ID NO: 47744 - DNA, 23 bp, Artificial Sequence
  Synthetic
cgagaagcaugaggaauggagat

SEQ ID NO: 47745 - DNA, 20 bp, Artificial Sequence
  Synthetic
gutgtccctuccgagagacc

SEQ ID NO: 47746 - DNA, 26 bp, Artificial Sequence
  Synthetic
agcactgtgaaaaugcctttaaacug

SEQ ID NO: 47747 - DNA, 28 bp, Artificial Sequence
  Synthetic
ctagaugcaaagagtaagatugagcaga

SEQ ID NO: 47748 - DNA, 21 bp, Artificial Sequence
  Synthetic
ggcatugcggagtcuaccaaa

SEQ ID NO: 47749 - DNA, 23 bp, Artificial Sequence
  Synthetic
cctagcctgugactgtgattucc

SEQ ID NO: 47750 - DNA, 18 bp, Artificial Sequence
  Synthetic
cgucccccaggcttugag

SEQ ID NO: 47751 - DNA, 23 bp, Artificial Sequence
  Synthetic
aatctaggacacagucccugaca

SEQ ID NO: 47752 - DNA, 19 bp, Artificial Sequence
  Synthetic
attugggacccaccacgut

SEQ ID NO: 47753 - DNA, 21 bp, Artificial Sequence
  Synthetic
gccaugtcatcugcagggaag

SEQ ID NO: 47754 - DNA, 21 bp, Artificial Sequence
  Synthetic
gtaggugagtccagugaagcc

SEQ ID NO: 47755 - DNA, 21 bp, Artificial Sequence
  Synthetic
gctcctggaauctgctcugaa

SEQ ID NO: 47756 - DNA, 20 bp, Artificial Sequence
  Synthetic
cggtuccggaaatagugcag

SEQ ID NO: 47757 - DNA, 22 bp, Artificial Sequence
  Synthetic
caaaggtgugggtcagatguca

SEQ ID NO: 47758 - DNA, 25 bp, Artificial Sequence
  Synthetic
cttagatttagugcccttcctgcut

SEQ ID NO: 47759 - DNA, 22 bp, Artificial Sequence
  Synthetic
ctactatgctgugtcccagcuc

SEQ ID NO: 47760 - DNA, 21 bp, Artificial Sequence
  Synthetic
ggcaaguagggcaaguaucaa

SEQ ID NO: 47761 - DNA, 24 bp, Artificial Sequence
  Synthetic
cttctctttcccutccctctguag

SEQ ID NO: 47762 - DNA, 19 bp, Artificial Sequence
  Synthetic
acucgccaggtctuaccga

SEQ ID NO: 47763 - DNA, 21 bp, Artificial Sequence
  Synthetic
tgtggtaugccaggaggttug

SEQ ID NO: 47764 - DNA, 21 bp, Artificial Sequence
  Synthetic
cctgtggaggcugtacagtut

SEQ ID NO: 47765 - DNA, 23 bp, Artificial Sequence
  Synthetic
tgagtgtctgcuatctccctcuc

SEQ ID NO: 47766 - DNA, 22 bp, Artificial Sequence
  Synthetic
actgaagggacuacaggugaca

SEQ ID NO: 47767 - DNA, 22 bp, Artificial Sequence
  Synthetic
gcactgttguacccagttugct

SEQ ID NO: 47768 - DNA, 24 bp, Artificial Sequence
  Synthetic
ttggaaaatgcuggagctcuagac

SEQ ID NO: 47769 - DNA, 23 bp, Artificial Sequence
  Synthetic
actaggtctuggccctttcuaca

SEQ ID NO: 47770 - DNA, 22 bp, Artificial Sequence
  Synthetic
accaggcagguaaagacaggua

SEQ ID NO: 47771 - DNA, 20 bp, Artificial Sequence
  Synthetic
cagtgacgacagaugggugt

SEQ ID NO: 47772 - DNA, 22 bp, Artificial Sequence
  Synthetic
tgcattccagggutacgtctuc

SEQ ID NO: 47773 - DNA, 30 bp, Artificial Sequence; identical to SEQ ID NO: 35539
  Synthetic

SEQ ID NO: 47774 - DNA, 26 bp, Artificial Sequence
  Synthetic
acagtgagttguccatcaagacttuc

SEQ ID NO: 47775 - DNA, 27 bp, Artificial Sequence
  Synthetic
gaaatacucacagcaacttccttcuca

SEQ ID NO: 47776 - DNA, 27 bp, Artificial Sequence
  Synthetic
ggctctttguggatttttctttguagt

SEQ ID NO: 47777 - DNA, 28 bp, Artificial Sequence
  Synthetic
ccagagaugacaaaaatgctttcugaaa

SEQ ID NO: 47778 - DNA, 25 bp, Artificial Sequence
  Synthetic
tctgctggucagctttcagattuag

SEQ ID NO: 47779 - DNA, 21 bp, Artificial Sequence
  Synthetic
gaacggccaacugaaggagua

SEQ ID NO: 47780 - DNA, 26 bp, Artificial Sequence
  Synthetic
gtttttaaaaguggcttctccgagut

SEQ ID NO: 47781 - DNA, 23 bp, Artificial Sequence
  Synthetic
ccacatacaagcugagagtggug

SEQ ID NO: 47782 - DNA, 22 bp, Artificial Sequence
  Synthetic
catccttcugcctgacccatua

SEQ ID NO: 47783 - DNA, 24 bp, Artificial Sequence
  Synthetic
gccttcaagccutcactaacuact

SEQ ID NO: 47784 - DNA, 29 bp, Artificial Sequence
  Synthetic
tgatttttaaaagucaaccagtccuggat

SEQ ID NO: 47785 - DNA, 25 bp, Artificial Sequence
  Synthetic
ccacgttccaugtgatctcttcuac

SEQ ID NO: 47786 - DNA, 27 bp, Artificial Sequence
  Synthetic
tctttaagtgccutttcaaattgugca

SEQ ID NO: 47787 - DNA, 27 bp, Artificial Sequence
  Synthetic
aatagcaacucagcctagaaaauccaa

SEQ ID NO: 47788 - DNA, 24 bp, Artificial Sequence
  Synthetic
gttgcaucaaaggtgcaatcucag

SEQ ID NO: 47789 - DNA, 28 bp, Artificial Sequence
  Synthetic
cctggtgtttuaaagattcttcccauga

SEQ ID NO: 47790 - DNA, 27 bp, Artificial Sequence
  Synthetic
caaatagttcacggaugaagaggguat

SEQ ID NO: 47791 - DNA, 22 bp, Artificial Sequence
  Synthetic
cuacacagtaacugccagcaac

SEQ ID NO: 47792 - DNA, 27 bp, Artificial Sequence
  Synthetic
agttcataacttcugatctggccatut

SEQ ID NO: 47793 - DNA, 28 bp, Artificial Sequence
  Synthetic
gccttactctcaguataacttctcccut

SEQ ID NO: 47794 - DNA, 26 bp, Artificial Sequence
  Synthetic
catacattcattugagtggcacugac

SEQ ID NO: 47795 - DNA, 25 bp, Artificial Sequence
  Synthetic
aggcttcaaaggaaugaaatgcuct

SEQ ID NO: 47796 - DNA, 24 bp, Artificial Sequence
  Synthetic
aatgtccucaccacatuccaagag

SEQ ID NO: 47797 - DNA, 23 bp, Artificial Sequence
  Synthetic
cgctatgaagugattcgcagaug

SEQ ID NO: 47798 - DNA, 21 bp, Artificial Sequence
  Synthetic
ggcutcatctguccacagagg

SEQ ID NO: 47799 - DNA, 28 bp, Artificial Sequence
  Synthetic
ctacacaaagaaautgtatgcugcaagt

SEQ ID NO: 47800 - DNA, 27 bp, Artificial Sequence
  Synthetic
gggaagattcuaaggtttgaaucagag

SEQ ID NO: 47801 - DNA, 28 bp, Artificial Sequence
  Synthetic
ggttcagagaaugactttccagcaauat

SEQ ID NO: 47802 - DNA, 24 bp, Artificial Sequence
  Synthetic
cccaaggagcuggaaaatctugag

SEQ ID NO: 47803 - DNA, 21 bp, Artificial Sequence
  Synthetic
gcctgctuggtttccttucag

SEQ ID NO: 47804 - DNA, 31 bp, Artificial Sequence; identical to SEQ ID NO: 35570
  Synthetic

SEQ ID NO: 47805 - DNA, 24 bp, Artificial Sequence
  Synthetic
ggtcatcatcaauccacccttcug

SEQ ID NO: 47806 - DNA, 29 bp, Artificial Sequence
  Synthetic
tccuttaaaatgttuacacacacacacac

SEQ ID NO: 47807 - DNA, 28 bp, Artificial Sequence
  Synthetic
gcagtgctagugatgattacattgtuca

SEQ ID NO: 47808 - DNA, 29 bp, Artificial Sequence
  Synthetic
aacaatttaacaacuttcagtgggacaug

SEQ ID NO: 47809 - DNA, 27 bp, Artificial Sequence
  Synthetic
caatggcctcguttctcaatatcaaut

SEQ ID NO: 47810 - DNA, 28 bp, Artificial Sequence
  Synthetic
gttatgaaggaguttacagatuccacct

SEQ ID NO: 47811 - DNA, 29 bp, Artificial Sequence
  Synthetic
tgcactttatttcutgcttgctttttcua

SEQ ID NO: 47812 - DNA, 22 bp, Artificial Sequence
  Synthetic
cagtgtggaugagaccttuccc

SEQ ID NO: 47813 - DNA, 26 bp, Artificial Sequence
  Synthetic
attgctgcttaautcctacgtctuca

SEQ ID NO: 47814 - DNA, 27 bp, Artificial Sequence
  Synthetic
ggttagatgcauagggcaattaaaugt

SEQ ID NO: 47815 - DNA, 22 bp, Artificial Sequence
  Synthetic
gatgtgccucaaggagtgaguc

SEQ ID NO: 47816 - DNA, 26 bp, Artificial Sequence
  Synthetic
agtttaaggagagutgatgucagagt

SEQ ID NO: 47817 - DNA, 26 bp, Artificial Sequence
  Synthetic
gataagaggguctcacaatuccacag

SEQ ID NO: 47818 - DNA, 22 bp, Artificial Sequence
  Synthetic
cgccuccgagagcttttctauc

SEQ ID NO: 47819 - DNA, 25 bp, Artificial Sequence
  Synthetic
tccagtggagaguctaaagcacaua

SEQ ID NO: 47820 - DNA, 26 bp, Artificial Sequence
  Synthetic
tctagggcaaauttctcactctcuct

SEQ ID NO: 47821 - DNA, 20 bp, Artificial Sequence
  Synthetic
tgtggcagaaugccgtacuc

SEQ ID NO: 47822 - DNA, 26 bp, Artificial Sequence
  Synthetic
cccatagtttutgagtacaccuggaa

SEQ ID NO: 47823 - DNA, 27 bp, Artificial Sequence
  Synthetic
ttcaaacttucaggtttgttguaacgg

SEQ ID NO: 47824 - DNA, 22 bp, Artificial Sequence
  Synthetic
gctcatcacuctgatccugcac

SEQ ID NO: 47825 - DNA, 28 bp, Artificial Sequence
  Synthetic
tgccacttttuacttaagactgauagca

SEQ ID NO: 47826 - DNA, 25 bp, Artificial Sequence
  Synthetic
gtgggtgtuggtatatcactuggag

SEQ ID NO: 47827 - DNA, 27 bp, Artificial Sequence
  Synthetic
ggaaggtgggautcagactattgtuag

SEQ ID NO: 47828 - DNA, 23 bp, Artificial Sequence
  Synthetic
actcagugacaacaccattuggg

SEQ ID NO: 47829 - DNA, 28 bp, Artificial Sequence
  Synthetic
gcatttagctuaacatgtgcttttucag

SEQ ID NO: 47830 - DNA, 24 bp, Artificial Sequence
  Synthetic
tguggactccatugaagacagaga

SEQ ID NO: 47831 - DNA, 26 bp, Artificial Sequence
  Synthetic
ccatgtccugcatttattgtugacag

SEQ ID NO: 47832 - DNA, 22 bp, Artificial Sequence
  Synthetic
tgagattggcucctctctcugg

SEQ ID NO: 47833 - DNA, 28 bp, Artificial Sequence
  Synthetic
ggaaggaaaucctgtattttgugaagaa

SEQ ID NO: 47834 - DNA, 26 bp, Artificial Sequence
  Synthetic
ggaataaaagccuccttcattuccct

SEQ ID NO: 47835 - DNA, 22 bp, Artificial Sequence
  Synthetic
cccaccguacctcagaatgtug

SEQ ID NO: 47836 - DNA, 21 bp, Artificial Sequence
  Synthetic
actgcggaagucacattggut

SEQ ID NO: 47837 - DNA, 21 bp, Artificial Sequence
  Synthetic
ggcctcgugaacttcaatugc

SEQ ID NO: 47838 - DNA, 23 bp, Artificial Sequence
  Synthetic
agagtgctcaucagtacccgaua

SEQ ID NO: 47839 - DNA, 25 bp, Artificial Sequence
  Synthetic
cagagctgutctctgatacuccaac

SEQ ID NO: 47840 - DNA, 24 bp, Artificial Sequence
  Synthetic
gcagtgtaugggtgtaaatgcauc

SEQ ID NO: 47841 - DNA, 25 bp, Artificial Sequence
  Synthetic
ccaagaggtcugactttctggatut

SEQ ID NO: 47842 - DNA, 27 bp, Artificial Sequence
  Synthetic
tgtataacccagcugatagaauggaca

SEQ ID NO: 47843 - DNA, 28 bp, Artificial Sequence
  Synthetic
ctgctctaatucatctgtgttttucgac

SEQ ID NO: 47844 - DNA, 28 bp, Artificial Sequence
  Synthetic
aggcattgcaatugttataggatcagut

SEQ ID NO: 47845 - DNA, 30 bp, Artificial Sequence; identical to SEQ ID NO: 35611
  Synthetic

SEQ ID NO: 47846 - DNA, 22 bp, Artificial Sequence
  Synthetic
gaguccatuagggcgaaaaggt

SEQ ID NO: 47847 - DNA, 29 bp, Artificial Sequence
  Synthetic
tttactucacaguaaaaagagattcttug

SEQ ID NO: 47848 - DNA, 27 bp, Artificial Sequence
  Synthetic
ggactcugaaggaatgtaaacuccaag

SEQ ID NO: 47849 - DNA, 28 bp, Artificial Sequence
  Synthetic
cttgctttctuaagaccttctttgcuat

SEQ ID NO: 47850 - DNA, 23 bp, Artificial Sequence
  Synthetic
ggtgaataugagtgggcttuggg

SEQ ID NO: 47851 - DNA, 28 bp, Artificial Sequence
  Synthetic
ttcctcaatgtucatgaaaactttuggg

SEQ ID NO: 47852 - DNA, 30 bp, Artificial Sequence; identical to SEQ ID NO: 35618
  Synthetic

SEQ ID NO: 47853 - DNA, 28 bp, Artificial Sequence
  Synthetic
aaaaagtgucacaaatccaagtucaaat

SEQ ID NO: 47854 - DNA, 23 bp, Artificial Sequence
  Synthetic
tgcagatauggaacccctggaua

SEQ ID NO: 47855 - DNA, 30 bp, Artificial Sequence; identical to SEQ ID NO: 35621
  Synthetic

SEQ ID NO: 47856 - DNA, 27 bp, Artificial Sequence
  Synthetic
ttcatgacugaaatgtggaagucaaga

SEQ ID NO: 47857 - DNA, 23 bp, Artificial Sequence
  Synthetic
gtaaacacgcaacccuctttugt

SEQ ID NO: 47858 - DNA, 27 bp, Artificial Sequence
  Synthetic
ctgtcctcactauaggctttcagaaug

SEQ ID NO: 47859 - DNA, 28 bp, Artificial Sequence
  Synthetic
agaactgccattutccctattttctcut

SEQ ID NO: 47860 - DNA, 25 bp, Artificial Sequence
  Synthetic
tttagaggaccuccacattaccugt

SEQ ID NO: 47861 - DNA, 23 bp, Artificial Sequence
  Synthetic
cgttaactuggcatctgtgucca

SEQ ID NO: 47862 - DNA, 27 bp, Artificial Sequence
  Synthetic
autgctatctctugaaacacagaacca

SEQ ID NO: 47863 - DNA, 27 bp, Artificial Sequence
  Synthetic
ctttcataucagcaagtgtgaauggac

SEQ ID NO: 47864 - DNA, 28 bp, Artificial Sequence
  Synthetic
taaagaaaccccaautaagtgtaaugcc

SEQ ID NO: 47865 - DNA, 28 bp, Artificial Sequence
  Synthetic
tggtggaatgaacuttgagatttcctut

SEQ ID NO: 47866 - DNA, 27 bp, Artificial Sequence
  Synthetic
gaggucaagttaaucaaacaggagaga

SEQ ID NO: 47867 - DNA, 25 bp, Artificial Sequence
  Synthetic
tggcagagtuctgaagaacaaauca

SEQ ID NO: 47868 - DNA, 31 bp, Artificial Sequence; identical to SEQ ID NO: 35634
  Synthetic

SEQ ID NO: 47869 - DNA, 28 bp, Artificial Sequence
  Synthetic
aaggtgtatttcucatctcctcttcuct

SEQ ID NO: 47870 - DNA, 25 bp, Artificial Sequence
  Synthetic
caaaagccugatgcctaauagcaat

SEQ ID NO: 47871 - DNA, 33 bp, Artificial Sequence; identical to SEQ ID NO: 35637
  Synthetic

SEQ ID NO: 47872 - DNA, 28 bp, Artificial Sequence
  Synthetic
tttttcctttcctucacttacctgacut

SEQ ID NO: 47873 - DNA, 26 bp, Artificial Sequence
  Synthetic
acagacttcacuggtaagtgtgttug

SEQ ID NO: 47874 - DNA, 23 bp, Artificial Sequence
  Synthetic
tggtcaucagagctgguagagat

SEQ ID NO: 47875 - DNA, 29 bp, Artificial Sequence
  Synthetic
tgtcuagagacagaaaucaaattctugaa

SEQ ID NO: 47876 - DNA, 31 bp, Artificial Sequence; identical to SEQ ID NO: 35642
  Synthetic

SEQ ID NO: 47877 - DNA, 24 bp, Artificial Sequence
  Synthetic
ccctctguctgaattcauggaact

SEQ ID NO: 47878 - DNA, 29 bp, Artificial Sequence
  Synthetic
catattgatgtcauaccccacaactttuc

SEQ ID NO: 47879 - DNA, 25 bp, Artificial Sequence
  Synthetic
gggacgacautcattgttttgaugt

SEQ ID NO: 47880 - DNA, 24 bp, Artificial Sequence
  Synthetic
tggttgtcatugtttgaggaggut

SEQ ID NO: 47881 - DNA, 29 bp, Artificial Sequence
  Synthetic
gtctgatgagtuacgtaggttcactatut

SEQ ID NO: 47882 - DNA, 28 bp, Artificial Sequence
  Synthetic
gtacagaaaaaucgtacttggcaaaugg

SEQ ID NO: 47883 - DNA, 22 bp, Artificial Sequence
  Synthetic
gtcccagagggaaacutgacut

SEQ ID NO: 47884 - DNA, 26 bp, Artificial Sequence
  Synthetic
gaaaccacaacagcauttatccucaa

SEQ ID NO: 47885 - DNA, 22 bp, Artificial Sequence
  Synthetic
ctgattctccaaaugcccacug

SEQ ID NO: 47886 - DNA, 24 bp, Artificial Sequence
  Synthetic
agcctttctgaugggttctaaaug

SEQ ID NO: 47887 - DNA, 27 bp, Artificial Sequence
  Synthetic
gtaaacaattugtcactggcucaaagt

SEQ ID NO: 47888 - DNA, 24 bp, Artificial Sequence
  Synthetic
gaagttatugctttgcaacugcca

SEQ ID NO: 47889 - DNA, 26 bp, Artificial Sequence
  Synthetic
aactggtgcagutaatcacatctgua

SEQ ID NO: 47890 - DNA, 26 bp, Artificial Sequence
  Synthetic
aggaatgtcatugtgcactgaaaaug

SEQ ID NO: 47891 - DNA, 23 bp, Artificial Sequence
  Synthetic
aggtcttcgcugtaatcagtgug

SEQ ID NO: 47892 - DNA, 25 bp, Artificial Sequence
  Synthetic
cctccaaacauttattgcactguct

SEQ ID NO: 47893 - DNA, 24 bp, Artificial Sequence
  Synthetic
caaattctgcaaucctcactcugg

SEQ ID NO: 47894 - DNA, 27 bp, Artificial Sequence
  Synthetic
tccagatggtaauagagatgtgacugt

SEQ ID NO: 47895 - DNA, 27 bp, Artificial Sequence
  Synthetic
cagtgccagaauggattctacaatcua

SEQ ID NO: 47896 - DNA, 26 bp, Artificial Sequence
  Synthetic
acatccaaauaagtttcuggcagaca

SEQ ID NO: 47897 - DNA, 23 bp, Artificial Sequence
  Synthetic
tgcataaccuttccctgaugcag

SEQ ID NO: 47898 - DNA, 24 bp, Artificial Sequence
  Synthetic
ttgtaatggcagcutttggaaugg

SEQ ID NO: 47899 - DNA, 30 bp, Artificial Sequence; identical to SEQ ID NO: 35665
  Synthetic

SEQ ID NO: 47900 - DNA, 25 bp, Artificial Sequence
  Synthetic
agtacugcccatgaaaaugaaacct

SEQ ID NO: 47901 - DNA, 29 bp, Artificial Sequence
  Synthetic
tctcaacatttugatttctgtttugccaa

SEQ ID NO: 47902 - DNA, 26 bp, Artificial Sequence
  Synthetic
gaaagctgaagacagutgacagaauc

SEQ ID NO: 47903 - DNA, 28 bp, Artificial Sequence
  Synthetic
atcatucagttctttaguccacaaccaa

SEQ ID NO: 47904 - DNA, 23 bp, Artificial Sequence
  Synthetic
acaaaagagagaggaugggctuc

SEQ ID NO: 47905 - DNA, 24 bp, Artificial Sequence
  Synthetic
gtccttacaguctccctctugact

SEQ ID NO: 47906 - DNA, 26 bp, Artificial Sequence
  Synthetic
atactgctgcagautttgtgaguaga

SEQ ID NO: 47907 - DNA, 29 bp, Artificial Sequence
  Synthetic
ggtttgcaaccuccaataaaagtaaugac

SEQ ID NO: 47908 - DNA, 28 bp, Artificial Sequence
  Synthetic
aatgatcttcacuactactggtttuggg

SEQ ID NO: 47909 - DNA, 23 bp, Artificial Sequence
  Synthetic
ctgcaucacaccagacaagaaug

SEQ ID NO: 47910 - DNA, 22 bp, Artificial Sequence
  Synthetic
ctgggaguccacatactgctug

SEQ ID NO: 47911 - DNA, 27 bp, Artificial Sequence
  Synthetic
tgctttaucaggaggagaatgutttut

SEQ ID NO: 47912 - DNA, 20 bp, Artificial Sequence
  Synthetic
tgtgtccaaguctccagguc

SEQ ID NO: 47913 - DNA, 21 bp, Artificial Sequence
  Synthetic
cattagggacguccgctcauc

SEQ ID NO: 47914 - DNA, 22 bp, Artificial Sequence
  Synthetic
ctggtuccaaaaatccgugcat

SEQ ID NO: 47915 - DNA, 22 bp, Artificial Sequence
  Synthetic
aaacagcatgaucacgtgctuc

SEQ ID NO: 47916 - DNA, 22 bp, Artificial Sequence
  Synthetic
ccctagcagguccagaaucact

SEQ ID NO: 47917 - DNA, 23 bp, Artificial Sequence
  Synthetic
cgatgacgcugatcatgaugagg

SEQ ID NO: 47918 - DNA, 22 bp, Artificial Sequence
  Synthetic
gaagagcatucaggcttgggua

SEQ ID NO: 47919 - DNA, 21 bp, Artificial Sequence
  Synthetic
ggaccctgcugcttatctguc

SEQ ID NO: 47920 - DNA, 20 bp, Artificial Sequence
  Synthetic
atggtgugcatccacuggaa

SEQ ID NO: 47921 - DNA, 19 bp, Artificial Sequence
  Synthetic
gatttggcccuggacaucg

SEQ ID NO: 47922 - DNA, 21 bp, Artificial Sequence
  Synthetic
ccgcctgagaugtgaacctut

SEQ ID NO: 47923 - DNA, 22 bp, Artificial Sequence
  Synthetic
gaacucatgcctcucagggaag

SEQ ID NO: 47924 - DNA, 17 bp, Artificial Sequence
  Synthetic
gagcagcugggcctuct

SEQ ID NO: 47925 - DNA, 18 bp, Artificial Sequence
  Synthetic
gcauccccagccacucac

SEQ ID NO: 47926 - DNA, 22 bp, Artificial Sequence
  Synthetic
ctgcutgctgtgtucaagaagg

SEQ ID NO: 47927 - DNA, 24 bp, Artificial Sequence
  Synthetic
ccaatgaaaatuccctgcagctug

SEQ ID NO: 47928 - DNA, 27 bp, Artificial Sequence
  Synthetic
atttgtcauagcaccaggtatauagga

SEQ ID NO: 47929 - DNA, 23 bp, Artificial Sequence
  Synthetic
ctacttcctguctgctgtgaugg

SEQ ID NO: 47930 - DNA, 22 bp, Artificial Sequence
  Synthetic
gcctccgugtagatgatctucc

SEQ ID NO: 47931 - DNA, 26 bp, Artificial Sequence
  Synthetic
catccaatacagcccugaaactgtua

SEQ ID NO: 47932 - DNA, 25 bp, Artificial Sequence
  Synthetic
cggaugttaggttuaagaagaggct

SEQ ID NO: 47933 - DNA, 27 bp, Artificial Sequence
  Synthetic
gaacctgttcccutacagttctctuac

SEQ ID NO: 47934 - DNA, 23 bp, Artificial Sequence
  Synthetic
ccaugtagtugccagagcagaat

SEQ ID NO: 47935 - DNA, 30 bp, Artificial Sequence; identical to SEQ ID NO: 35701
  Synthetic

SEQ ID NO: 47936 - DNA, 25 bp, Artificial Sequence
  Synthetic
aagaaaagguaggaaaacgguggaa

SEQ ID NO: 47937 - DNA, 29 bp, Artificial Sequence
  Synthetic
gcaggcaaacaugaaagatatcaaagauc

SEQ ID NO: 47938 - DNA, 17 bp, Artificial Sequence
  Synthetic
cccagccuagcccacug

SEQ ID NO: 47939 - DNA, 22 bp, Artificial Sequence
  Synthetic
agaggaugaagacccucagcat

SEQ ID NO: 47940 - DNA, 18 bp, Artificial Sequence
  Synthetic
cctcucccaggcatuggt

SEQ ID NO: 47941 - DNA, 19 bp, Artificial Sequence
  Synthetic
cggtcctucttcgcacugg

SEQ ID NO: 47942 - DNA, 23 bp, Artificial Sequence
  Synthetic
tctcagaagcugagcctaacuca

SEQ ID NO: 47943 - DNA, 21 bp, Artificial Sequence
  Synthetic
ccctaacutgtcccugcagac

SEQ ID NO: 47944 - DNA, 21 bp, Artificial Sequence
  Synthetic
cagggtgccutaggctagtut

SEQ ID NO: 47945 - DNA, 22 bp, Artificial Sequence
  Synthetic
caatgcctuggaccttaaccug

SEQ ID NO: 47946 - DNA, 23 bp, Artificial Sequence
  Synthetic
gtgcagtaggutggtttcctuca

SEQ ID NO: 47947 - DNA, 23 bp, Artificial Sequence
  Synthetic
agctagugagacagtuacaggga

SEQ ID NO: 47948 - DNA, 24 bp, Artificial Sequence
  Synthetic
caaggaaacuaccttcacgtccuc

SEQ ID NO: 47949 - DNA, 21 bp, Artificial Sequence
  Synthetic
cttccccugaagcuggacaaa

SEQ ID NO: 47950 - DNA, 23 bp, Artificial Sequence
  Synthetic
catcaagccugtggtcaaggtua

SEQ ID NO: 47951 - DNA, 28 bp, Artificial Sequence
  Synthetic
ccatacgtaaacacucttgaatgaatug

SEQ ID NO: 47952 - DNA, 24 bp, Artificial Sequence
  Synthetic
aagtgtuggcagttattgttuggg

SEQ ID NO: 47953 - DNA, 29 bp, Artificial Sequence
  Synthetic
agtgagaacugactgctttcauagaaaat

SEQ ID NO: 47954 - DNA, 23 bp, Artificial Sequence
  Synthetic
gggtcttcugattctgggaucac

SEQ ID NO: 47955 - DNA, 24 bp, Artificial Sequence
  Synthetic
gaagacccagggaaaugtacucac

SEQ ID NO: 47956 - DNA, 23 bp, Artificial Sequence
  Synthetic
gggacagucagggtttuagagga

SEQ ID NO: 47957 - DNA, 20 bp, Artificial Sequence
  Synthetic
gaaaguccccucccgagaga

SEQ ID NO: 47958 - DNA, 21 bp, Artificial Sequence
  Synthetic
catccugccagtaucccagac

SEQ ID NO: 47959 - DNA, 26 bp, Artificial Sequence
  Synthetic
ccctaaagacuccaagacucagaact

SEQ ID NO: 47960 - DNA, 22 bp, Artificial Sequence
  Synthetic
ccatccacagccugttcatgua

SEQ ID NO: 47961 - DNA, 23 bp, Artificial Sequence
  Synthetic
cucaggcaaaucaaaaaccccat

SEQ ID NO: 47962 - DNA, 20 bp, Artificial Sequence
  Synthetic
gctccttgugacctgaccuc

SEQ ID NO: 47963 - DNA, 20 bp, Artificial Sequence
  Synthetic
caugacaccucaaggccagt

SEQ ID NO: 47964 - DNA, 22 bp, Artificial Sequence
  Synthetic
gggaacaagutcgacaugacct

SEQ ID NO: 47965 - DNA, 22 bp, Artificial Sequence
  Synthetic
gagtagactcuggcagcttucc

SEQ ID NO: 47966 - DNA, 17 bp, Artificial Sequence
  Synthetic
accctcugccctguggt

SEQ ID NO: 47967 - DNA, 20 bp, Artificial Sequence
  Synthetic
cagtugagccaggagaggug

SEQ ID NO: 47968 - DNA, 21 bp, Artificial Sequence
  Synthetic
ggaccaguacctguaccagct

SEQ ID NO: 47969 - DNA, 21 bp, Artificial Sequence
  Synthetic
ttgtcccugccagttctgaug

SEQ ID NO: 47970 - DNA, 22 bp, Artificial Sequence
  Synthetic
gactgtggguttctgtcctuct

SEQ ID NO: 47971 - DNA, 20 bp, Artificial Sequence
  Synthetic
caaggcagcuccaggtagug

SEQ ID NO: 47972 - DNA, 22 bp, Artificial Sequence
  Synthetic
accccaagutttctgacgucac

SEQ ID NO: 47973 - DNA, 21 bp, Artificial Sequence
  Synthetic
caaaaggagggugcaguccat

SEQ ID NO: 47974 - DNA, 23 bp, Artificial Sequence
  Synthetic
ctgtctgtcucctctcattgcut

SEQ ID NO: 47975 - DNA, 20 bp, Artificial Sequence
  Synthetic
cautcagtcguccccaccag

SEQ ID NO: 47976 - DNA, 21 bp, Artificial Sequence
  Synthetic
tctgagtcugccccttctcut

SEQ ID NO: 47977 - DNA, 20 bp, Artificial Sequence
  Synthetic
gacaagugcagccccacaua

SEQ ID NO: 47978 - DNA, 22 bp, Artificial Sequence
  Synthetic
ctcactcuggcacctctgttut

SEQ ID NO: 47979 - DNA, 24 bp, Artificial Sequence
  Synthetic
gatgtctccautcccagatcucag

SEQ ID NO: 47980 - DNA, 20 bp, Artificial Sequence
  Synthetic
ggaccagacgcucatctuct

SEQ ID NO: 47981 - DNA, 20 bp, Artificial Sequence
  Synthetic
agaccccaccuttgcacaug

SEQ ID NO: 47982 - DNA, 22 bp, Artificial Sequence
  Synthetic
atggactguctgatcacugaca

SEQ ID NO: 47983 - DNA, 26 bp, Artificial Sequence
  Synthetic
gcaatcagttugaagaaggaaagguc

SEQ ID NO: 47984 - DNA, 27 bp, Artificial Sequence
  Synthetic
cacttggcattuctttctgtcctauct

SEQ ID NO: 47985 - DNA, 17 bp, Artificial Sequence
  Synthetic
ggacggcucaccucgat

SEQ ID NO: 47986 - DNA, 21 bp, Artificial Sequence
  Synthetic
gcagtccugtgtcaucaggaa

SEQ ID NO: 47987 - DNA, 19 bp, Artificial Sequence
  Synthetic
aucccgcagggaatuggag

SEQ ID NO: 47988 - DNA, 22 bp, Artificial Sequence
  Synthetic
gtcttgtctuggtcccttggut

SEQ ID NO: 47989 - DNA, 20 bp, Artificial Sequence
  Synthetic
ctggaggaugcccatccuac

SEQ ID NO: 47990 - DNA, 23 bp, Artificial Sequence
  Synthetic
gggtttccaacuctgaagaaugc

SEQ ID NO: 47991 - DNA, 23 bp, Artificial Sequence
  Synthetic
gtcagacugaagagaggcctuac

SEQ ID NO: 47992 - DNA, 26 bp, Artificial Sequence
  Synthetic
cacagccaaaccauatcaacaaugat

SEQ ID NO: 47993 - DNA, 22 bp, Artificial Sequence
  Synthetic
gccaaatgcucggacaatguag

SEQ ID NO: 47994 - DNA, 22 bp, Artificial Sequence
  Synthetic
ggcactcaugaagccucaaaga

SEQ ID NO: 47995 - DNA, 23 bp, Artificial Sequence
  Synthetic
agacccaagaugccccaattuac

SEQ ID NO: 47996 - DNA, 26 bp, Artificial Sequence
  Synthetic
tctctatgactaugacctcctcucca

SEQ ID NO: 47997 - DNA, 23 bp, Artificial Sequence
  Synthetic
ggugtgttgucagagaagacagg

SEQ ID NO: 47998 - DNA, 20 bp, Artificial Sequence
  Synthetic
ctgggcagccccautatcuc

SEQ ID NO: 47999 - DNA, 20 bp, Artificial Sequence
  Synthetic
cccaagggucaaggtccuac

SEQ ID NO: 48000 - DNA, 28 bp, Artificial Sequence
  Synthetic
tctaggtggatuagagtgataccttucc

SEQ ID NO: 48001 - DNA, 19 bp, Artificial Sequence
  Synthetic
ttcccutcccugagccaga

SEQ ID NO: 48002 - DNA, 22 bp, Artificial Sequence
  Synthetic
aagggaacacugcctctctcua

SEQ ID NO: 48003 - DNA, 24 bp, Artificial Sequence
  Synthetic
tgggattcuagcaatagcgctuac

SEQ ID NO: 48004 - DNA, 22 bp, Artificial Sequence
  Synthetic
ccctaaccaagugctctctguc

SEQ ID NO: 48005 - DNA, 21 bp, Artificial Sequence
  Synthetic
ctcctggacugtggcctauac

SEQ ID NO: 48006 - DNA, 20 bp, Artificial Sequence
  Synthetic
gatcaccaugggtccctguc

SEQ ID NO: 48007 - DNA, 21 bp, Artificial Sequence
  Synthetic
acaatcaggccuaggagguct

SEQ ID NO: 48008 - DNA, 24 bp, Artificial Sequence
  Synthetic
atttatgcutgacccaugacacct

SEQ ID NO: 48009 - DNA, 26 bp, Artificial Sequence
  Synthetic
ctgagacagacagugattcagatuga

SEQ ID NO: 48010 - DNA, 25 bp, Artificial Sequence
  Synthetic
gaaagaguaggcagaaaucaagaug

SEQ ID NO: 48011 - DNA, 27 bp, Artificial Sequence
  Synthetic
gctgaaattctuggttttggatcacug

SEQ ID NO: 48012 - DNA, 23 bp, Artificial Sequence
  Synthetic
acuattatgctgugcccaacagg

SEQ ID NO: 48013 - DNA, 26 bp, Artificial Sequence
  Synthetic
ctttcctgacguctgaatactcacug

SEQ ID NO: 48014 - DNA, 21 bp, Artificial Sequence
  Synthetic
ccatcugggccagttccauag

SEQ ID NO: 48015 - DNA, 23 bp, Artificial Sequence
  Synthetic
ccttaguaaggtagagtgugggt

SEQ ID NO: 48016 - DNA, 22 bp, Artificial Sequence
  Synthetic
ccgaguttgttgtucccaggat

SEQ ID NO: 48017 - DNA, 27 bp, Artificial Sequence
  Synthetic
gcttctctcacauttcctttttctguc

SEQ ID NO: 48018 - DNA, 21 bp, Artificial Sequence
  Synthetic
atctcgtccucgatgctgaug

SEQ ID NO: 48019 - DNA, 21 bp, Artificial Sequence
  Synthetic
acacgtgaucctttggtggut

SEQ ID NO: 48020 - DNA, 23 bp, Artificial Sequence
  Synthetic
acagcatccugcttgttcucaat

SEQ ID NO: 48021 - DNA, 30 bp, Artificial Sequence; identical to SEQ ID NO: 35787
  Synthetic

SEQ ID NO: 48022 - DNA, 26 bp, Artificial Sequence
  Synthetic
tcattttaggaaggagguctgtgcua

SEQ ID NO: 48023 - DNA, 22 bp, Artificial Sequence
  Synthetic
catgaggcagugagcctactuc

SEQ ID NO: 48024 - DNA, 20 bp, Artificial Sequence
  Synthetic
gggcuaaccccaccctcaua

SEQ ID NO: 48025 - DNA, 21 bp, Artificial Sequence
  Synthetic
catgctaucaccaagcacucg

SEQ ID NO: 48026 - DNA, 22 bp, Artificial Sequence
  Synthetic
gacctgggucactcaggatcua

SEQ ID NO: 48027 - DNA, 23 bp, Artificial Sequence
  Synthetic
gctacatcucctcccagatugag

SEQ ID NO: 48028 - DNA, 22 bp, Artificial Sequence
  Synthetic
ccgtccucagacccaaacatua

SEQ ID NO: 48029 - DNA, 25 bp, Artificial Sequence
  Synthetic
gcaaagggaacautatcaucagcac

SEQ ID NO: 48030 - DNA, 27 bp, Artificial Sequence
  Synthetic
gaaatgcttctugggaaattcacauga

SEQ ID NO: 48031 - DNA, 24 bp, Artificial Sequence
  Synthetic
ctgcttcttuctgttggttuccag

SEQ ID NO: 48032 - DNA, 22 bp, Artificial Sequence
  Synthetic
cgggacaaagugcaagacatuc

SEQ ID NO: 48033 - DNA, 26 bp, Artificial Sequence
  Synthetic
agtattttctccucaaggccaaguac

SEQ ID NO: 48034 - DNA, 21 bp, Artificial Sequence
  Synthetic
gactgagcaccuccaauccag

SEQ ID NO: 48035 - DNA, 26 bp, Artificial Sequence
  Synthetic
gcctcagtacuctcatttccttguag

SEQ ID NO: 48036 - DNA, 21 bp, Artificial Sequence
  Synthetic
ctgaggcuttcccaucagacc

SEQ ID NO: 48037 - DNA, 22 bp, Artificial Sequence
  Synthetic
acagtgggaaugctgcttctut

SEQ ID NO: 48038 - DNA, 25 bp, Artificial Sequence
  Synthetic
ggaaaccacacaugaacccaaatuc

SEQ ID NO: 48039 - DNA, 22 bp, Artificial Sequence
  Synthetic
cccttgaccutttcctcctugt

SEQ ID NO: 48040 - DNA, 22 bp, Artificial Sequence
  Synthetic
ccaacaacutttgcugagacct

SEQ ID NO: 48041 - DNA, 22 bp, Artificial Sequence
  Synthetic
ccaaccctcuatggcatctcuc

SEQ ID NO: 48042 - DNA, 22 bp, Artificial Sequence
  Synthetic
gcaugaagcacaacaagcaguc

SEQ ID NO: 48043 - DNA, 25 bp, Artificial Sequence
  Synthetic
ggtgaaggcauactcatcacatcuc

SEQ ID NO: 48044 - DNA, 22 bp, Artificial Sequence
  Synthetic
ctttccagcauccctgcattuc

SEQ ID NO: 48045 - DNA, 26 bp, Artificial Sequence
  Synthetic
cctcattacctugttttgcctctgua

SEQ ID NO: 48046 - DNA, 22 bp, Artificial Sequence
  Synthetic
gctgccagguaggaaugagaga

SEQ ID NO: 48047 - DNA, 23 bp, Artificial Sequence
  Synthetic
tctcgtgacugtagcaaactgug

SEQ ID NO: 48048 - DNA, 24 bp, Artificial Sequence
  Synthetic
cttcuaaaacccaacccaguagca

SEQ ID NO: 48049 - DNA, 24 bp, Artificial Sequence
  Synthetic
cacccuacccaactatgaagaugt

SEQ ID NO: 48050 - DNA, 26 bp, Artificial Sequence
  Synthetic
gactctatatuctacgactgcuccca

SEQ ID NO: 48051 - DNA, 24 bp, Artificial Sequence
  Synthetic
cctgatguagttttccucccacag

SEQ ID NO: 48052 - DNA, 24 bp, Artificial Sequence
  Synthetic
caacggaaacuccacaccatatuc

SEQ ID NO: 48053 - DNA, 31 bp, Artificial Sequence; identical to SEQ ID NO: 35819
  Synthetic

SEQ ID NO: 48054 - DNA, 22 bp, Artificial Sequence
  Synthetic
ggaaggatccaucaggaagcug

SEQ ID NO: 48055 - DNA, 24 bp, Artificial Sequence
  Synthetic
tgatggauggaaaactcactugct

SEQ ID NO: 48056 - DNA, 21 bp, Artificial Sequence
  Synthetic
cugcaatcttcuagccaccgt

SEQ ID NO: 48057 - DNA, 25 bp, Artificial Sequence
  Synthetic
cctttgttccutttgttgtggguag

SEQ ID NO: 48058 - DNA, 23 bp, Artificial Sequence
  Synthetic
ccaaagccauctgccacttcaua

SEQ ID NO: 48059 - DNA, 26 bp, Artificial Sequence
  Synthetic
gatgagtuccaagaagaaggattugc

SEQ ID NO: 48060 - DNA, 27 bp, Artificial Sequence
  Synthetic
ctcaataaatguaacaggaccuaggca

SEQ ID NO: 48061 - DNA, 22 bp, Artificial Sequence
  Synthetic
tccagatcauggttgagtuggg

SEQ ID NO: 48062 - DNA, 28 bp, Artificial Sequence
  Synthetic
gaatgatgcuagaagatgcatgttuagg

SEQ ID NO: 48063 - DNA, 25 bp, Artificial Sequence
  Synthetic
ctgggucaaacagatgauaccagat

SEQ ID NO: 48064 - DNA, 29 bp, Artificial Sequence
  Synthetic
aaaaagatactuagcacttcgaagatucc

SEQ ID NO: 48065 - DNA, 28 bp, Artificial Sequence
  Synthetic
gcatcatcuacaagcccaaaacuaaaga

SEQ ID NO: 48066 - DNA, 23 bp, Artificial Sequence
  Synthetic
actgatctuacaccaagcatucc

SEQ ID NO: 48067 - DNA, 20 bp, Artificial Sequence
  Synthetic
gagaggtgcugtcccttgut

SEQ ID NO: 48068 - DNA, 21 bp, Artificial Sequence
  Synthetic
actcctgagccuggaatccut

SEQ ID NO: 48069 - DNA, 22 bp, Artificial Sequence
  Synthetic
cgtttctttuccttccccagug

SEQ ID NO: 48070 - DNA, 19 bp, Artificial Sequence
  Synthetic
gttcgggacguccatcugt

SEQ ID NO: 48071 - DNA, 17 bp, Artificial Sequence
  Synthetic
gaggccccugcttccuc

SEQ ID NO: 48072 - DNA, 22 bp, Artificial Sequence
  Synthetic
ctatucccgggacctttuccag

SEQ ID NO: 48073 - DNA, 24 bp, Artificial Sequence
  Synthetic
caacugtgtgttugaaggcaagag

SEQ ID NO: 48074 - DNA, 23 bp, Artificial Sequence
  Synthetic
cttgguggaaagaugggaaggaa

SEQ ID NO: 48075 - DNA, 27 bp, Artificial Sequence
  Synthetic
ggctacagaaugatactctgtcucaat

SEQ ID NO: 48076 - DNA, 31 bp, Artificial Sequence; identical to SEQ ID NO: 35842
  Synthetic

SEQ ID NO: 48077 - DNA, 19 bp, Artificial Sequence
  Synthetic
gcccacagcucggactuac

SEQ ID NO: 48078 - DNA, 28 bp, Artificial Sequence
  Synthetic
ggtattaatgcauttgtttggtagcugt

SEQ ID NO: 48079 - DNA, 23 bp, Artificial Sequence
  Synthetic
tccctctucaccctggaacttua

SEQ ID NO: 48080 - DNA, 22 bp, Artificial Sequence
  Synthetic
tgcaagcccuggctaatuacag

SEQ ID NO: 48081 - DNA, 24 bp, Artificial Sequence
  Synthetic
gcaaagttucaactctcagucagg

SEQ ID NO: 48082 - DNA, 23 bp, Artificial Sequence
  Synthetic
gcccagaccucagtgttttcaut

SEQ ID NO: 48083 - DNA, 23 bp, Artificial Sequence
  Synthetic
cccttacugggtatagctcucac

SEQ ID NO: 48084 - DNA, 22 bp, Artificial Sequence
  Synthetic
gccccaguagccctgttttuat

SEQ ID NO: 48085 - DNA, 30 bp, Artificial Sequence; identical to SEQ ID NO: 35851
  Synthetic

SEQ ID NO: 48086 - DNA, 24 bp, Artificial Sequence
  Synthetic
ctcucataccacaugaaaccagca

SEQ ID NO: 48087 - DNA, 27 bp, Artificial Sequence
  Synthetic
cctagaagaaugggattcatcacugat

SEQ ID NO: 48088 - DNA, 24 bp, Artificial Sequence
  Synthetic
gggcttttcuggtcacaguaacaa

SEQ ID NO: 48089 - DNA, 24 bp, Artificial Sequence
  Synthetic
cacataagcccugagaagtgtuca

SEQ ID NO: 48090 - DNA, 20 bp, Artificial Sequence
  Synthetic
ctgacgcugctgaagacgua

SEQ ID NO: 48091 - DNA, 25 bp, Artificial Sequence
  Synthetic
cccctgaaucaaagctgtgtacaua

SEQ ID NO: 48092 - DNA, 23 bp, Artificial Sequence
  Synthetic
caaaggcauggatugcacaaaga

SEQ ID NO: 48093 - DNA, 20 bp, Artificial Sequence
  Synthetic
cucagagctcuccagcaact

SEQ ID NO: 48094 - DNA, 24 bp, Artificial Sequence
  Synthetic
catgaaggacgguacatccugaat

SEQ ID NO: 48095 - DNA, 22 bp, Artificial Sequence
  Synthetic
ggacttcugagccttcugagga

SEQ ID NO: 48096 - DNA, 26 bp, Artificial Sequence
  Synthetic
cagcagaacuaaagggagaagcaaua

SEQ ID NO: 48097 - DNA, 29 bp, Artificial Sequence
  Synthetic
gactcattgaatuaaatcagcaaggauga

SEQ ID NO: 48098 - DNA, 23 bp, Artificial Sequence
  Synthetic
ctgttgtaugccacctacttgut

SEQ ID NO: 48099 - DNA, 22 bp, Artificial Sequence
  Synthetic
cactcucccctgaucaaacacc

SEQ ID NO: 48100 - DNA, 29 bp, Artificial Sequence
  Synthetic
ctaaatagccccaaguattagcuagaaac

SEQ ID NO: 48101 - DNA, 23 bp, Artificial Sequence
  Synthetic
tgttcgtcatugcctccatcauc

SEQ ID NO: 48102 - DNA, 24 bp, Artificial Sequence
  Synthetic
tctgcctgtutgttagcacaugat

SEQ ID NO: 48103 - DNA, 21 bp, Artificial Sequence
  Synthetic
cacctaccacutcgtcaugca

SEQ ID NO: 48104 - DNA, 27 bp, Artificial Sequence
  Synthetic
tctaactggtacugagagcctatgaut

SEQ ID NO: 48105 - DNA, 23 bp, Artificial Sequence
  Synthetic
tgagatcatcgucacccacttuc

SEQ ID NO: 48106 - DNA, 20 bp, Artificial Sequence
  Synthetic
cagtggugagaagcatuccg

SEQ ID NO: 48107 - DNA, 23 bp, Artificial Sequence
  Synthetic
agatgactauggcggtgugaaaa

SEQ ID NO: 48108 - DNA, 21 bp, Artificial Sequence
  Synthetic
cgacgtgcucacactgttuca

SEQ ID NO: 48109 - DNA, 26 bp, Artificial Sequence
  Synthetic
cactaggtcttuctccttttctgugg

SEQ ID NO: 48110 - DNA, 18 bp, Artificial Sequence
  Synthetic
gcccccagugctcttguc

SEQ ID NO: 48111 - DNA, 22 bp, Artificial Sequence
  Synthetic
gttggtgtcauctgctgtcuca

SEQ ID NO: 48112 - DNA, 26 bp, Artificial Sequence
  Synthetic
acagttcagaaagautagtccgtgug

SEQ ID NO: 48113 - DNA, 27 bp, Artificial Sequence
  Synthetic
gaaacaagauggtggactttauaccct

SEQ ID NO: 48114 - DNA, 24 bp, Artificial Sequence
  Synthetic
auttttctuccaccacaggaccat

SEQ ID NO: 48115 - DNA, 30 bp, Artificial Sequence; identical to SEQ ID NO: 35881
  Synthetic

SEQ ID NO: 48116 - DNA, 20 bp, Artificial Sequence
  Synthetic
aggacaugcttugggcagac

SEQ ID NO: 48117 - DNA, 23 bp, Artificial Sequence
  Synthetic
actgtgtauctgctatgcuccac

SEQ ID NO: 48118 - DNA, 21 bp, Artificial Sequence
  Synthetic
acuggccacggaaattttugg

SEQ ID NO: 48119 - DNA, 28 bp, Artificial Sequence
  Synthetic
tccacatcugaagaacttcaacattuct

SEQ ID NO: 48120 - DNA, 30 bp, Artificial Sequence; identical to SEQ ID NO: 35886
  Synthetic

SEQ ID NO: 48121 - DNA, 23 bp, Artificial Sequence
  Synthetic
gcgaucagaccctaaccaucaag

SEQ ID NO: 48122 - DNA, 27 bp, Artificial Sequence
  Synthetic
ccttcgtttaugctcatctgaguagaa

SEQ ID NO: 48123 - DNA, 28 bp, Artificial Sequence
  Synthetic
gatgucagaggcaaaatcucaagaaaag

SEQ ID NO: 48124 - DNA, 25 bp, Artificial Sequence
  Synthetic
gtggguaaaaacaaaagccaaccua

SEQ ID NO: 48125 - DNA, 26 bp, Artificial Sequence
  Synthetic
caaatcauttgcattcuacaggccat

SEQ ID NO: 48126 - DNA, 27 bp, Artificial Sequence
  Synthetic
tgtatccugcaacccagtaacaatuac

SEQ ID NO: 48127 - DNA, 24 bp, Artificial Sequence
  Synthetic
tgagatttcuggtgaagguggaac

SEQ ID NO: 48128 - DNA, 22 bp, Artificial Sequence
  Synthetic
caggtgaccucttttgccctua

SEQ ID NO: 48129 - DNA, 25 bp, Artificial Sequence
  Synthetic
aagcagutaagtcuccaaaacgagt

SEQ ID NO: 48130 - DNA, 21 bp, Artificial Sequence
  Synthetic
ccacgctguaattgcccucat

SEQ ID NO: 48131 - DNA, 25 bp, Artificial Sequence
  Synthetic
tttggcagcaagaautcuaacaaag

SEQ ID NO: 48132 - DNA, 25 bp, Artificial Sequence
  Synthetic
catctgtgatutcacttcccugaca

SEQ ID NO: 48133 - DNA, 21 bp, Artificial Sequence
  Synthetic
ctgtgugcaccaacuacaagg

SEQ ID NO: 48134 - DNA, 31 bp, Artificial Sequence; identical to SEQ ID NO: 35900
  Synthetic

SEQ ID NO: 48135 - DNA, 27 bp, Artificial Sequence
  Synthetic
agatttgagagguctgcaagattugat

SEQ ID NO: 48136 - DNA, 23 bp, Artificial Sequence
  Synthetic
cagacacuggcctcattaacuca

SEQ ID NO: 48137 - DNA, 25 bp, Artificial Sequence
  Synthetic
cacccagcauctctcagaauacaaa

SEQ ID NO: 48138 - DNA, 24 bp, Artificial Sequence
  Synthetic
cttcgttgggaugtgataggtuga

SEQ ID NO: 48139 - DNA, 27 bp, Artificial Sequence
  Synthetic
gaattactccuccccattgatgacuac

SEQ ID NO: 48140 - DNA, 25 bp, Artificial Sequence
  Synthetic
gctggtcucactatctcaagaucat

SEQ ID NO: 48141 - DNA, 25 bp, Artificial Sequence
  Synthetic
cagtatgaaaugcctgggaaactug

SEQ ID NO: 48142 - DNA, 22 bp, Artificial Sequence
  Synthetic
atccggagutttctctccucct

SEQ ID NO: 48143 - DNA, 25 bp, Artificial Sequence
  Synthetic
gcgacacguacaaaaacaaatugac

SEQ ID NO: 48144 - DNA, 22 bp, Artificial Sequence
  Synthetic
cttcaggcaaagugtcccugat

SEQ ID NO: 48145 - DNA, 27 bp, Artificial Sequence
  Synthetic
ccacctccaacagauagtacctuaaga

SEQ ID NO: 48146 - DNA, 29 bp, Artificial Sequence
  Synthetic
ctgactcaaatgugtacttcttgtcatug

SEQ ID NO: 48147 - DNA, 25 bp, Artificial Sequence
  Synthetic
actgccguagaaccaugaagaaaat

SEQ ID NO: 48148 - DNA, 21 bp, Artificial Sequence
  Synthetic
gatggccacuccatcttcgua

SEQ ID NO: 48149 - DNA, 23 bp, Artificial Sequence
  Synthetic
cgatcucagaagggagtgagugt

SEQ ID NO: 48150 - DNA, 24 bp, Artificial Sequence
  Synthetic
ctatcttcugcttcaaccaugggt

SEQ ID NO: 48151 - DNA, 27 bp, Artificial Sequence
  Synthetic
ggaacactgguatatgtgctatugagt

SEQ ID NO: 48152 - DNA, 23 bp, Artificial Sequence
  Synthetic
ctgacgggcutgaccaaattcua

SEQ ID NO: 48153 - DNA, 26 bp, Artificial Sequence
  Synthetic
aggacttgacauatttgagcgcatua

SEQ ID NO: 48154 - DNA, 26 bp, Artificial Sequence
  Synthetic
cctgatcaguccctttgacttuaaca

SEQ ID NO: 48155 - DNA, 30 bp, Artificial Sequence; identical to SEQ ID NO: 35921
  Synthetic

SEQ ID NO: 48156 - DNA, 27 bp, Artificial Sequence
  Synthetic
aagttgatcacgguataacgtgttuct

SEQ ID NO: 48157 - DNA, 27 bp, Artificial Sequence
  Synthetic
gaattgaucagaagacagttgaacugg

SEQ ID NO: 48158 - DNA, 26 bp, Artificial Sequence
  Synthetic
acttggtaguggccattattgucaat

SEQ ID NO: 48159 - DNA, 29 bp, Artificial Sequence
  Synthetic
cacttaaacacauactgttagatgtugct

SEQ ID NO: 48160 - DNA, 31 bp, Artificial Sequence; identical to SEQ ID NO: 35926
  Synthetic

SEQ ID NO: 48161 - DNA, 25 bp, Artificial Sequence
  Synthetic
actcccaaatcugatgtcccaatuc

SEQ ID NO: 48162 - DNA, 28 bp, Artificial Sequence
  Synthetic
agtttctcgaauttcttctgttgucaca

SEQ ID NO: 48163 - DNA, 30 bp, Artificial Sequence; identical to SEQ ID NO: 35929
  Synthetic

SEQ ID NO: 48164 - DNA, 26 bp, Artificial Sequence
  Synthetic
gtgaggttcacaautctacaggtugt

SEQ ID NO: 48165 - DNA, 25 bp, Artificial Sequence
  Synthetic
ccacaautgtatttucccccaacag

SEQ ID NO: 48166 - DNA, 24 bp, Artificial Sequence
  Synthetic
caaaaacattgcugagctggacut

SEQ ID NO: 48167 - DNA, 26 bp, Artificial Sequence
  Synthetic
gttatgtacatuggtcgtccaguacc

SEQ ID NO: 48168 - DNA, 23 bp, Artificial Sequence
  Synthetic
gctugcaggagaagcttacuact

SEQ ID NO: 48169 - DNA, 29 bp, Artificial Sequence
  Synthetic
ttcctgacatuaaatggtacagattuggt

SEQ ID NO: 48170 - DNA, 28 bp, Artificial Sequence
  Synthetic
gggaattagccutaacttgtttagttug

SEQ ID NO: 48171 - DNA, 24 bp, Artificial Sequence
  Synthetic
cagtgccuggaagaagagcaauaa

SEQ ID NO: 48172 - DNA, 24 bp, Artificial Sequence
  Synthetic
gaccaaacauggcttgcttcttua

SEQ ID NO: 48173 - DNA, 22 bp, Artificial Sequence
  Synthetic
ctgacaagugggucagacacaa

SEQ ID NO: 48174 - DNA, 28 bp, Artificial Sequence
  Synthetic
cagtcccaaguattataagccaaugact

SEQ ID NO: 48175 - DNA, 25 bp, Artificial Sequence
  Synthetic
gtggtaaaaggccucaaagagaaug

SEQ ID NO: 48176 - DNA, 20 bp, Artificial Sequence
  Synthetic
cacagagcggacutggaugt

SEQ ID NO: 48177 - DNA, 25 bp, Artificial Sequence
  Synthetic
ccaggatattaguaagcgtgccaug

SEQ ID NO: 48178 - DNA, 28 bp, Artificial Sequence
  Synthetic
gggactaagaaauaagtctatggcaaut

SEQ ID NO: 48179 - DNA, 26 bp, Artificial Sequence
  Synthetic
tcaacatgaauggaccaagtguaaca

SEQ ID NO: 48180 - DNA, 31 bp, Artificial Sequence; identical to SEQ ID NO: 35946
  Synthetic

SEQ ID NO: 48181 - DNA, 26 bp, Artificial Sequence
  Synthetic
ggtccgtguaaataaagtacctguga

SEQ ID NO: 48182 - DNA, 20 bp, Artificial Sequence
  Synthetic
tggaagggccugtggactua

SEQ ID NO: 48183 - DNA, 22 bp, Artificial Sequence
  Synthetic
tgctccacugagtggttatgug

SEQ ID NO: 48184 - DNA, 28 bp, Artificial Sequence
  Synthetic
acttcaaatcaaaautgggtgacugaac

SEQ ID NO: 48185 - DNA, 28 bp, Artificial Sequence
  Synthetic
tgtcacagttgaaacucacactaaagua

SEQ ID NO: 48186 - DNA, 26 bp, Artificial Sequence
  Synthetic
gctatttggtacauacctctgagguc

SEQ ID NO: 48187 - DNA, 25 bp, Artificial Sequence
  Synthetic
cagagagauggatgaaggttgucac

SEQ ID NO: 48188 - DNA, 22 bp, Artificial Sequence
  Synthetic
ctgagaccaguactgcaucaga

SEQ ID NO: 48189 - DNA, 22 bp, Artificial Sequence
  Synthetic
attcccacgautgatgguggag

SEQ ID NO: 48190 - DNA, 27 bp, Artificial Sequence
  Synthetic
agaggtgatcaaucataggtcaagcua

SEQ ID NO: 48191 - DNA, 20 bp, Artificial Sequence
  Synthetic
ctugcaagccgggcaatuat

SEQ ID NO: 48192 - DNA, 30 bp, Artificial Sequence; identical to SEQ ID NO: 35958
  Synthetic

SEQ ID NO: 48193 - DNA, 21 bp, Artificial Sequence
  Synthetic
gccgtgaacgugaagggtaug

SEQ ID NO: 48194 - DNA, 25 bp, Artificial Sequence
  Synthetic
tgatcagtgtccutctcttgcatut

SEQ ID NO: 48195 - DNA, 31 bp, Artificial Sequence; identical to SEQ ID NO: 35961
  Synthetic

SEQ ID NO: 48196 - DNA, 22 bp, Artificial Sequence
  Synthetic
actgtuaccagctgcatucact

SEQ ID NO: 48197 - DNA, 27 bp, Artificial Sequence
  Synthetic
gcataucatcattcaguggacaaaacc

SEQ ID NO: 48198 - DNA, 23 bp, Artificial Sequence
  Synthetic
tgataagacugcccttctcccut

SEQ ID NO: 48199 - DNA, 23 bp, Artificial Sequence
  Synthetic
cgaatgcccaacccuatcctaug

SEQ ID NO: 48200 - DNA, 24 bp, Artificial Sequence
  Synthetic
tgcccacacuggaaaatgctauat

SEQ ID NO: 48201 - DNA, 26 bp, Artificial Sequence
  Synthetic
tctctgugaaaaagtctcttugcagt

SEQ ID NO: 48202 - DNA, 22 bp, Artificial Sequence
  Synthetic
gagcugtcaguaggcaaaacag

SEQ ID NO: 48203 - DNA, 22 bp, Artificial Sequence
  Synthetic
gtgacugctctcagugaaggag

SEQ ID NO: 48204 - DNA, 22 bp, Artificial Sequence
  Synthetic
caaccttgcugcctccatcaua

SEQ ID NO: 48205 - DNA, 28 bp, Artificial Sequence
  Synthetic
gttggtatguatcacaattuaagggcat

SEQ ID NO: 48206 - DNA, 30 bp, Artificial Sequence; identical to SEQ ID NO: 35972
  Synthetic

SEQ ID NO: 48207 - DNA, 21 bp, Artificial Sequence
  Synthetic
agcgtgaaucggguacaacag

SEQ ID NO: 48208 - DNA, 23 bp, Artificial Sequence
  Synthetic
ccacaactgugacgctaaatgut

SEQ ID NO: 48209 - DNA, 23 bp, Artificial Sequence
  Synthetic
caggaagcccauttaccatugac

SEQ ID NO: 48210 - DNA, 24 bp, Artificial Sequence
  Synthetic
ttggcctucacacggaattcauat

SEQ ID NO: 48211 - DNA, 23 bp, Artificial Sequence
  Synthetic
atactagcaaaucctccgcaguc

SEQ ID NO: 48212 - DNA, 25 bp, Artificial Sequence
  Synthetic
tcattgaccutgaagatcugacgag

SEQ ID NO: 48213 - DNA, 26 bp, Artificial Sequence
  Synthetic
ggtagtaagucaatcacatucaccgt

SEQ ID NO: 48214 - DNA, 24 bp, Artificial Sequence
  Synthetic
ctgutgtatggataucagcccgaa

SEQ ID NO: 48215 - DNA, 29 bp, Artificial Sequence
  Synthetic
ggttaacagcucctgagttagacauagat

SEQ ID NO: 48216 - DNA, 23 bp, Artificial Sequence
  Synthetic
ttttcacacaugcctctgcatuc

SEQ ID NO: 48217 - DNA, 24 bp, Artificial Sequence
  Synthetic
gcaagtggcauctcaagactcaut

SEQ ID NO: 48218 - DNA, 28 bp, Artificial Sequence
  Synthetic
ccatcttgtgcutttcttttctcttcut

SEQ ID NO: 48219 - DNA, 27 bp, Artificial Sequence
  Synthetic
caagcaaatgcauctaattgattuggg

SEQ ID NO: 48220 - DNA, 22 bp, Artificial Sequence
  Synthetic
caattagugcccaggcaaguct

SEQ ID NO: 48221 - DNA, 29 bp, Artificial Sequence
  Synthetic
agacatgccuagttgtattttaauggaca

SEQ ID NO: 48222 - DNA, 21 bp, Artificial Sequence
  Synthetic
cgatggucccgagtagcauct

SEQ ID NO: 48223 - DNA, 28 bp, Artificial Sequence
  Synthetic
attattaaguccggagagagcctuagaa

SEQ ID NO: 48224 - DNA, 28 bp, Artificial Sequence
  Synthetic
aaatgtgaatgcucttagtctcatugga

SEQ ID NO: 48225 - DNA, 20 bp, Artificial Sequence
  Synthetic
caaggaaaugaacgcugggt

SEQ ID NO: 48226 - DNA, 28 bp, Artificial Sequence
  Synthetic
augtaagaaggtgaugcagagaagaaaa

SEQ ID NO: 48227 - DNA, 22 bp, Artificial Sequence
  Synthetic
ccactggacuggtagaagguct

SEQ ID NO: 48228 - DNA, 24 bp, Artificial Sequence
  Synthetic
tgacatgccaucagaagtcacaut

SEQ ID NO: 48229 - DNA, 26 bp, Artificial Sequence
  Synthetic
ttcacaaactaacuggaagatggugt

SEQ ID NO: 48230 - DNA, 23 bp, Artificial Sequence
  Synthetic
ccaagggugatgactgtaauggg

SEQ ID NO: 48231 - DNA, 28 bp, Artificial Sequence
  Synthetic
cacaatgtgcaccutgaattaccttaua

SEQ ID NO: 48232 - DNA, 26 bp, Artificial Sequence
  Synthetic
tcagtccuttctcattttuggcaaac

SEQ ID NO: 48233 - DNA, 29 bp, Artificial Sequence
  Synthetic
tgatctcucaatgaaagacucaacaaaga

SEQ ID NO: 48234 - DNA, 25 bp, Artificial Sequence
  Synthetic
aggatgtgcuagaacatttgtguga

SEQ ID NO: 48235 - DNA, 26 bp, Artificial Sequence
  Synthetic
gaacctaagtcutcaactgtgagugt

SEQ ID NO: 48236 - DNA, 22 bp, Artificial Sequence
  Synthetic
gtatcuggcatcacugccaaga

SEQ ID NO: 48237 - DNA, 28 bp, Artificial Sequence
  Synthetic
agcatactuccaggaaatcactctttut

SEQ ID NO: 48238 - DNA, 23 bp, Artificial Sequence
  Synthetic
guttacagcagauacccggaagt

SEQ ID NO: 48239 - DNA, 23 bp, Artificial Sequence
  Synthetic
caaccaagtcauccatcacccut

SEQ ID NO: 48240 - DNA, 22 bp, Artificial Sequence
  Synthetic
caggtgaagaugctgcagguat

SEQ ID NO: 48241 - DNA, 31 bp, Artificial Sequence; identical to SEQ ID NO: 36007
  Synthetic

SEQ ID NO: 48242 - DNA, 23 bp, Artificial Sequence
  Synthetic
aagcataugcacaggttagcgua

SEQ ID NO: 48243 - DNA, 26 bp, Artificial Sequence
  Synthetic
ggtctatggugtctgaacattuggaa

SEQ ID NO: 48244 - DNA, 26 bp, Artificial Sequence
  Synthetic
ggacaaaacacgaugttagtactuct

SEQ ID NO: 48245 - DNA, 28 bp, Artificial Sequence
  Synthetic
atcgccttaataguggatgctatgaaut

SEQ ID NO: 48246 - DNA, 23 bp, Artificial Sequence
  Synthetic
cactcaataguaggcgcaggtut

SEQ ID NO: 48247 - DNA, 29 bp, Artificial Sequence
  Synthetic
ccttactttaaggutggtgcaactattut

SEQ ID NO: 48248 - DNA, 24 bp, Artificial Sequence
  Synthetic
ctgagucaagccagagatgaugaa

SEQ ID NO: 48249 - DNA, 28 bp, Artificial Sequence
  Synthetic
cgctaatcugcttctcttatuaccacag

SEQ ID NO: 48250 - DNA, 24 bp, Artificial Sequence
  Synthetic
gttttccaacuccagcagcattut

SEQ ID NO: 48251 - DNA, 21 bp, Artificial Sequence
  Synthetic
gcagtgcagucgtaggctauc

SEQ ID NO: 48252 - DNA, 25 bp, Artificial Sequence
  Synthetic
aggugttgcuacaaaagagagaaat

SEQ ID NO: 48253 - DNA, 27 bp, Artificial Sequence
  Synthetic
atgaaacugaccacaggagaagaauac

SEQ ID NO: 48254 - DNA, 26 bp, Artificial Sequence
  Synthetic
ccatttgagagucacactttctucag

SEQ ID NO: 48255 - DNA, 24 bp, Artificial Sequence
  Synthetic
cccctuaaggcaaccatgagatut

SEQ ID NO: 48256 - DNA, 29 bp, Artificial Sequence
  Synthetic
cacaaaattagacauacctagttgcucct

SEQ ID NO: 48257 - DNA, 28 bp, Artificial Sequence
  Synthetic
gutgaagcacuagaaaaaggacagaaaa

SEQ ID NO: 48258 - DNA, 30 bp, Artificial Sequence; identical to SEQ ID NO: 36024
  Synthetic

SEQ ID NO: 48259 - DNA, 22 bp, Artificial Sequence
  Synthetic
gcaagaaagcaugggtctcugt

SEQ ID NO: 48260 - DNA, 28 bp, Artificial Sequence
  Synthetic
gggtatcuaaaactttgacaacuaaggt

SEQ ID NO: 48261 - DNA, 21 bp, Artificial Sequence
  Synthetic
ccttuccgaggaagaccagua

SEQ ID NO: 48262 - DNA, 30 bp, Artificial Sequence; identical to SEQ ID NO: 36028
  Synthetic

SEQ ID NO: 48263 - DNA, 25 bp, Artificial Sequence
  Synthetic
tgtggacucaggcaagacaactaua

SEQ ID NO: 48264 - DNA, 24 bp, Artificial Sequence
  Synthetic
gcagcautttctgcauaaacacga

SEQ ID NO: 48265 - DNA, 28 bp, Artificial Sequence
  Synthetic
cgtctttggaaautacttctgugaccaa

SEQ ID NO: 48266 - DNA, 28 bp, Artificial Sequence
  Synthetic
acttggttacttuacaggatgtcatcug

SEQ ID NO: 48267 - DNA, 22 bp, Artificial Sequence
  Synthetic
tctguggccgttaatugcaaag

SEQ ID NO: 48268 - DNA, 31 bp, Artificial Sequence; identical to SEQ ID NO: 36034
  Synthetic

SEQ ID NO: 48269 - DNA, 22 bp, Artificial Sequence
  Synthetic
aaggaatgcugctgactcagut

SEQ ID NO: 48270 - DNA, 26 bp, Artificial Sequence
  Synthetic
ctgtgatcttagcuccaccatcauaa

SEQ ID NO: 48271 - DNA, 22 bp, Artificial Sequence
  Synthetic
caaatgaaaguctccggcctug

SEQ ID NO: 48272 - DNA, 23 bp, Artificial Sequence
  Synthetic
caagcatgguagattttguggca

SEQ ID NO: 48273 - DNA, 25 bp, Artificial Sequence
  Synthetic
cacctctacaacauggcacatagut

SEQ ID NO: 48274 - DNA, 22 bp, Artificial Sequence
  Synthetic
gtccuggtctgucaaggacaat

SEQ ID NO: 48275 - DNA, 26 bp, Artificial Sequence
  Synthetic
caagcuactgtgaacuggagaaaaga

SEQ ID NO: 48276 - DNA, 26 bp, Artificial Sequence
  Synthetic
ttgtcttggaucacttcttcccttut

SEQ ID NO: 48277 - DNA, 27 bp, Artificial Sequence
  Synthetic
cagcaaaattacuggttatgtggtuga

SEQ ID NO: 48278 - DNA, 25 bp, Artificial Sequence
  Synthetic
ctggcaaaccaaucccatattcaut

SEQ ID NO: 48279 - DNA, 25 bp, Artificial Sequence
  Synthetic
aagtgaagaaagacucagtgacgut

SEQ ID NO: 48280 - DNA, 27 bp, Artificial Sequence
  Synthetic
cgaccactgucaaatctggtaacatua

SEQ ID NO: 48281 - DNA, 25 bp, Artificial Sequence
  Synthetic
ccaccagaaauagaactcgatgcug

SEQ ID NO: 48282 - DNA, 26 bp, Artificial Sequence
  Synthetic
gtgttttcttuaagcttggtcacugt

SEQ ID NO: 48283 - DNA, 22 bp, Artificial Sequence
  Synthetic
cccaagcaauccaaaagugacg

SEQ ID NO: 48284 - DNA, 21 bp, Artificial Sequence
  Synthetic
tgagccgcagauccgttaaug

SEQ ID NO: 48285 - DNA, 20 bp, Artificial Sequence
  Synthetic
ggcctgtuacggcctguaat

SEQ ID NO: 48286 - DNA, 23 bp, Artificial Sequence
  Synthetic
gttaagggccugtacctcagtug

SEQ ID NO: 48287 - DNA, 27 bp, Artificial Sequence
  Synthetic
gtggtacaaaguctatacccatcacug

SEQ ID NO: 48288 - DNA, 27 bp, Artificial Sequence
  Synthetic
cattctagcagcugtttcttcaagtuc

SEQ ID NO: 48289 - DNA, 26 bp, Artificial Sequence
  Synthetic
caagaaatgcagcuggaaacttuagt

SEQ ID NO: 48290 - DNA, 26 bp, Artificial Sequence
  Synthetic
acctgttatttugctaccaccaucat

SEQ ID NO: 48291 - DNA, 25 bp, Artificial Sequence
  Synthetic
gggccttgaguatgagttcaaagut

SEQ ID NO: 48292 - DNA, 27 bp, Artificial Sequence
  Synthetic
ttctttctgutcaagatgguagccaat

SEQ ID NO: 48293 - DNA, 28 bp, Artificial Sequence
  Synthetic
cggagtaccaguttagaatttttgcuga

SEQ ID NO: 48294 - DNA, 22 bp, Artificial Sequence
  Synthetic
ccaccagtauaggctggaggut

SEQ ID NO: 48295 - DNA, 27 bp, Artificial Sequence
  Synthetic
gctacctcaacugttttgcacatuaaa

SEQ ID NO: 48296 - DNA, 31 bp, Artificial Sequence; identical to SEQ ID NO: 36062
  Synthetic

SEQ ID NO: 48297 - DNA, 26 bp, Artificial Sequence
  Synthetic
tgttactgguttgagttcuggacaag

SEQ ID NO: 48298 - DNA, 21 bp, Artificial Sequence
  Synthetic
gtcugggacacatcagugagt

SEQ ID NO: 48299 - DNA, 26 bp, Artificial Sequence
  Synthetic
agtcaaucagaaaagcguatgcuaat

SEQ ID NO: 48300 - DNA, 28 bp, Artificial Sequence
  Synthetic
gtcaagaacuttcacagtuacaaaagca

SEQ ID NO: 48301 - DNA, 22 bp, Artificial Sequence
  Synthetic
ctggtggauctgccagaatuca

SEQ ID NO: 48302 - DNA, 21 bp, Artificial Sequence
  Synthetic
gttgagggcacagacucguat

SEQ ID NO: 48303 - DNA, 30 bp, Artificial Sequence; identical to SEQ ID NO: 36069
  Synthetic

SEQ ID NO: 48304 - DNA, 28 bp, Artificial Sequence
  Synthetic
catgatcttctgutaatcctgtcacuct

SEQ ID NO: 48305 - DNA, 25 bp, Artificial Sequence
  Synthetic
aaaaatccattugtgcttccuggac

SEQ ID NO: 48306 - DNA, 24 bp, Artificial Sequence
  Synthetic
caacttcugaagcaacaacagucc

SEQ ID NO: 48307 - DNA, 28 bp, Artificial Sequence
  Synthetic
caggttctaagucattcccagtaaaugt

SEQ ID NO: 48308 - DNA, 30 bp, Artificial Sequence; identical to SEQ ID NO: 36074
  Synthetic

SEQ ID NO: 48309 - DNA, 25 bp, Artificial Sequence
  Synthetic
caataacugccaaggatgaggtuga

SEQ ID NO: 48310 - DNA, 21 bp, Artificial Sequence
  Synthetic
agcuagctttcauccaacgac

SEQ ID NO: 48311 - DNA, 25 bp, Artificial Sequence
  Synthetic
aaagcaagcaagaautctgaaugct

SEQ ID NO: 48312 - DNA, 27 bp, Artificial Sequence
  Synthetic
tgttgacctttguccacaaaatacugt

SEQ ID NO: 48313 - DNA, 27 bp, Artificial Sequence
  Synthetic
cttagagtctgauccaattgtagcuca

SEQ ID NO: 48314 - DNA, 27 bp, Artificial Sequence
  Synthetic
gtagttcuagcaacaguagcagaaaca

SEQ ID NO: 48315 - DNA, 26 bp, Artificial Sequence
  Synthetic
agaagacagcauccatcgaaattgua

SEQ ID NO: 48316 - DNA, 26 bp, Artificial Sequence
  Synthetic
gggagaccauctttagtccagguaat

SEQ ID NO: 48317 - DNA, 29 bp, Artificial Sequence
  Synthetic
gggaagaatatcuttttagagttgtugct

SEQ ID NO: 48318 - DNA, 26 bp, Artificial Sequence
  Synthetic
catcatgttcaggutttgtccaacuc

SEQ ID NO: 48319 - DNA, 28 bp, Artificial Sequence
  Synthetic
tgctgttguaactaactgccauaagaat

SEQ ID NO: 48320 - DNA, 25 bp, Artificial Sequence
  Synthetic
actttcaggtuaacaggtggactug

SEQ ID NO: 48321 - DNA, 25 bp, Artificial Sequence
  Synthetic
cgtccuacaccagaagttaaauggg

SEQ ID NO: 48322 - DNA, 25 bp, Artificial Sequence
  Synthetic
actataatagguccagggacgucag

SEQ ID NO: 48323 - DNA, 27 bp, Artificial Sequence
  Synthetic
gtggctgtgaaautcaaggatacatug

SEQ ID NO: 48324 - DNA, 22 bp, Artificial Sequence
  Synthetic
gcttggutcactaaguccagca

SEQ ID NO: 48325 - DNA, 25 bp, Artificial Sequence
  Synthetic
cagtgaccaaggacucaatgatugt

SEQ ID NO: 48326 - DNA, 29 bp, Artificial Sequence
  Synthetic
acggaaagtauattcattgcctucaagaa

SEQ ID NO: 48327 - DNA, 25 bp, Artificial Sequence
  Synthetic
cacctgaaggaccugttgttatcuc

SEQ ID NO: 48328 - DNA, 20 bp, Artificial Sequence
  Synthetic
tgagactgguggcaaagucg

SEQ ID NO: 48329 - DNA, 24 bp, Artificial Sequence
  Synthetic
aaagcacaggagcaauaacagcua

SEQ ID NO: 48330 - DNA, 25 bp, Artificial Sequence
  Synthetic
gccctcagguaattctttcttcuca

SEQ ID NO: 48331 - DNA, 24 bp, Artificial Sequence
  Synthetic
attggcaagccgaguaaagtauca

SEQ ID NO: 48332 - DNA, 26 bp, Artificial Sequence
  Synthetic
cttgcgttcuagatgatagccaauga

SEQ ID NO: 48333 - DNA, 30 bp, Artificial Sequence; identical to SEQ ID NO: 36099
  Synthetic

SEQ ID NO: 48334 - DNA, 26 bp, Artificial Sequence
  Synthetic
ggcccuaggaaagaguaatactauca

SEQ ID NO: 48335 - DNA, 31 bp, Artificial Sequence; identical to SEQ ID NO: 36101
  Synthetic

SEQ ID NO: 48336 - DNA, 24 bp, Artificial Sequence
  Synthetic
ctggtggaaugacaagatcttugg

SEQ ID NO: 48337 - DNA, 21 bp, Artificial Sequence
  Synthetic
atggaggcagccgaautcuag

SEQ ID NO: 48338 - DNA, 25 bp, Artificial Sequence
  Synthetic
ccauattcattttcugcgagaaccc

SEQ ID NO: 48339 - DNA, 29 bp, Artificial Sequence
  Synthetic
gatctgaagguaaaagaggtcacuaagac

SEQ ID NO: 48340 - DNA, 27 bp, Artificial Sequence
  Synthetic
gtttacauttccaacaauaagcagggt

SEQ ID NO: 48341 - DNA, 23 bp, Artificial Sequence
  Synthetic
gaacuccaaaggcugaagacaga

SEQ ID NO: 48342 - DNA, 24 bp, Artificial Sequence
  Synthetic
aatctgccatucatcttcctcugg

SEQ ID NO: 48343 - DNA, 22 bp, Artificial Sequence
  Synthetic
tgcuggaattagugcaccaagt

SEQ ID NO: 48344 - DNA, 25 bp, Artificial Sequence
  Synthetic
tcacgccgtuccacaatataatuga

SEQ ID NO: 48345 - DNA, 29 bp, Artificial Sequence
  Synthetic
tcttgaaaggcaaugaatacatatuccgt

SEQ ID NO: 48346 - DNA, 22 bp, Artificial Sequence
  Synthetic
tccaguggagggaaccatgaua

SEQ ID NO: 48347 - DNA, 28 bp, Artificial Sequence
  Synthetic
acaaagatucaacaagaagggatagugg

SEQ ID NO: 48348 - DNA, 23 bp, Artificial Sequence
  Synthetic
cctgaaacaucagcttccaguct

SEQ ID NO: 48349 - DNA, 24 bp, Artificial Sequence
  Synthetic
cagtcagtggccuaacagaagaug

SEQ ID NO: 48350 - DNA, 26 bp, Artificial Sequence
  Synthetic
ggcttagcccauttaagtgttacugt

SEQ ID NO: 48351 - DNA, 23 bp, Artificial Sequence
  Synthetic
gcagactgugagcaaagcttuag

SEQ ID NO: 48352 - DNA, 26 bp, Artificial Sequence
  Synthetic
gaggtccaggaaccutaaatggauag

SEQ ID NO: 48353 - DNA, 26 bp, Artificial Sequence
  Synthetic
tggtggtguaccaataagcaactaug

SEQ ID NO: 48354 - DNA, 24 bp, Artificial Sequence
  Synthetic
tgatgacaucaccaacctctccua

SEQ ID NO: 48355 - DNA, 24 bp, Artificial Sequence
  Synthetic
ccaaagcuggtgacaacaucaaag

SEQ ID NO: 48356 - DNA, 30 bp, Artificial Sequence; identical to SEQ ID NO: 36122
  Synthetic

SEQ ID NO: 48357 - DNA, 23 bp, Artificial Sequence
  Synthetic
cguaaaagcctcugaagcaccat

SEQ ID NO: 48358 - DNA, 28 bp, Artificial Sequence
  Synthetic
cggtaactttauatgtgcatttauggca

SEQ ID NO: 48359 - DNA, 24 bp, Artificial Sequence
  Synthetic
tgggaagaaaaguggctttgugaa

SEQ ID NO: 48360 - DNA, 23 bp, Artificial Sequence
  Synthetic
cgtattttcaaugttggcucggt

SEQ ID NO: 48361 - DNA, 21 bp, Artificial Sequence
  Synthetic
cagcggtgautccagatgtug

SEQ ID NO: 48362 - DNA, 24 bp, Artificial Sequence
  Synthetic
cctacuttttgatgcuccacgaca

SEQ ID NO: 48363 - DNA, 28 bp, Artificial Sequence
  Synthetic
cgttcattccagagugccaatatttuat

SEQ ID NO: 48364 - DNA, 22 bp, Artificial Sequence
  Synthetic
gtggaccaatucctgctctgut

SEQ ID NO: 48365 - DNA, 30 bp, Artificial Sequence; identical to SEQ ID NO: 36131
  Synthetic

SEQ ID NO: 48366 - DNA, 31 bp, Artificial Sequence; identical to SEQ ID NO: 36132
  Synthetic

SEQ ID NO: 48367 - DNA, 25 bp, Artificial Sequence
  Synthetic
cttttgtggacaguggtttcugaag

SEQ ID NO: 48368 - DNA, 22 bp, Artificial Sequence
  Synthetic
gaccagguacatcaaggacugt

SEQ ID NO: 48369 - DNA, 23 bp, Artificial Sequence
  Synthetic
ccaaaaucaagttgguccaaggc

SEQ ID NO: 48370 - DNA, 30 bp, Artificial Sequence; identical to SEQ ID NO: 36136
  Synthetic

SEQ ID NO: 48371 - DNA, 24 bp, Artificial Sequence
  Synthetic
gccaaccaugttaatgucccagaa

SEQ ID NO: 48372 - DNA, 27 bp, Artificial Sequence
  Synthetic
tccaggaggauctaaaacauaaaagca

SEQ ID NO: 48373 - DNA, 30 bp, Artificial Sequence; identical to SEQ ID NO: 36139
  Synthetic

SEQ ID NO: 48374 - DNA, 27 bp, Artificial Sequence
  Synthetic
actgttcucagggaaatatttgugagg

SEQ ID NO: 48375 - DNA, 24 bp, Artificial Sequence
  Synthetic
acggtttugaggaggcttcttaut

SEQ ID NO: 48376 - DNA, 26 bp, Artificial Sequence
  Synthetic
ctgaaggtatatuccatgccctcaug

SEQ ID NO: 48377 - DNA, 23 bp, Artificial Sequence
  Synthetic
catccccacuggaccaaucaaat

SEQ ID NO: 48378 - DNA, 22 bp, Artificial Sequence
  Synthetic
cgcagaugactcaacacugact

SEQ ID NO: 48379 - DNA, 30 bp, Artificial Sequence; identical to SEQ ID NO: 36145
  Synthetic

SEQ ID NO: 48380 - DNA, 27 bp, Artificial Sequence
  Synthetic
ccttcagtcaaaucttttgcagaguac

SEQ ID NO: 48381 - DNA, 28 bp, Artificial Sequence
  Synthetic
gcttacacttatcauttctcctttgcut

SEQ ID NO: 48382 - DNA, 25 bp, Artificial Sequence
  Synthetic
aagaagtaggautttccctccucca

SEQ ID NO: 48383 - DNA, 19 bp, Artificial Sequence
  Synthetic
agauactccugggccacct

SEQ ID NO: 48384 - DNA, 28 bp, Artificial Sequence
  Synthetic
gtccaatcctguctcttagattgacaut

SEQ ID NO: 48385 - DNA, 21 bp, Artificial Sequence
  Synthetic
aaggccaguccctggaaauac

SEQ ID NO: 48386 - DNA, 24 bp, Artificial Sequence
  Synthetic
agattctgtgguaagttgcaccuc

SEQ ID NO: 48387 - DNA, 27 bp, Artificial Sequence
  Synthetic
catuaaacacucaggaaggaagtttuc

SEQ ID NO: 48388 - DNA, 23 bp, Artificial Sequence
  Synthetic
cacggaacucatattcgguacct

SEQ ID NO: 48389 - DNA, 29 bp, Artificial Sequence
  Synthetic
atcctcctgutattagcaacauaaccaaa

SEQ ID NO: 48390 - DNA, 25 bp, Artificial Sequence
  Synthetic
aatgaaaaaccaucgggaaaugtuc

SEQ ID NO: 48391 - DNA, 24 bp, Artificial Sequence
  Synthetic
ttgutgacaaacgugaaacaagca

SEQ ID NO: 48392 - DNA, 29 bp, Artificial Sequence
  Synthetic
gtcttctcccacautattctgtaaaucct

SEQ ID NO: 48393 - DNA, 21 bp, Artificial Sequence
  Synthetic
gcuattcagcgugaaccggaa

SEQ ID NO: 48394 - DNA, 21 bp, Artificial Sequence
  Synthetic
caagaaacugttggcaucggt

SEQ ID NO: 48395 - DNA, 28 bp, Artificial Sequence
  Synthetic
agaagcagcataugaatttcccactaut

SEQ ID NO: 48396 - DNA, 22 bp, Artificial Sequence
  Synthetic
ggaatctggugaggtgcaguat

SEQ ID NO: 48397 - DNA, 31 bp, Artificial Sequence; identical to SEQ ID NO: 36163
  Synthetic

SEQ ID NO: 48398 - DNA, 23 bp, Artificial Sequence
  Synthetic
cuacaaggccaguacaaggauat

SEQ ID NO: 48399 - DNA, 26 bp, Artificial Sequence
  Synthetic
gacatcttccutgtcttcatcuccag

SEQ ID NO: 48400 - DNA, 21 bp, Artificial Sequence
  Synthetic
cuttccaacccugcaggaagt

SEQ ID NO: 48401 - DNA, 29 bp, Artificial Sequence
  Synthetic
tcttacatttcttucctcttggttcaugt

SEQ ID NO: 48402 - DNA, 22 bp, Artificial Sequence
  Synthetic
gagctgtcugctttatgcacug

SEQ ID NO: 48403 - DNA, 24 bp, Artificial Sequence
  Synthetic
ccaccagaagaaacutauccacct

SEQ ID NO: 48404 - DNA, 24 bp, Artificial Sequence
  Synthetic
gcatttcuggccgctactcuaaat

SEQ ID NO: 48405 - DNA, 20 bp, Artificial Sequence
  Synthetic
ctggttaccucccctacgug

SEQ ID NO: 48406 - DNA, 30 bp, Artificial Sequence; identical to SEQ ID NO: 36172
  Synthetic

SEQ ID NO: 48407 - DNA, 21 bp, Artificial Sequence
  Synthetic
aagacatggucgaccgtuacc

SEQ ID NO: 48408 - DNA, 22 bp, Artificial Sequence
  Synthetic
acatgtctccucagcatcccua

SEQ ID NO: 48409 - DNA, 28 bp, Artificial Sequence
  Synthetic
tugataatgtggucagaaaaggacaagt

SEQ ID NO: 48410 - DNA, 26 bp, Artificial Sequence
  Synthetic
gaatgaaucacatgcuaagggaagga

SEQ ID NO: 48411 - DNA, 24 bp, Artificial Sequence
  Synthetic
caaaaatagcagaugcgtctccug

SEQ ID NO: 48412 - DNA, 29 bp, Artificial Sequence
  Synthetic
cgaatacttcugtgcttgagatuaagagt

SEQ ID NO: 48413 - DNA, 25 bp, Artificial Sequence
  Synthetic
tctccucccagaccatgaataucag

SEQ ID NO: 48414 - DNA, 26 bp, Artificial Sequence
  Synthetic
caccatcatautcaggtggatuccaa

SEQ ID NO: 48415 - DNA, 29 bp, Artificial Sequence
  Synthetic
atgaatatatttucagagtccgugcagaa

SEQ ID NO: 48416 - DNA, 21 bp, Artificial Sequence
  Synthetic
ggtggaucccagcaaacagua

SEQ ID NO: 48417 - DNA, 28 bp, Artificial Sequence
  Synthetic
ccgtgctgatucatctaaattttctcut

SEQ ID NO: 48418 - DNA, 25 bp, Artificial Sequence
  Synthetic
ctttgacagtuaggaccccactuaa

SEQ ID NO: 48419 - DNA, 25 bp, Artificial Sequence
  Synthetic
cgatgacugggaaagagtgcauaaa

SEQ ID NO: 48420 - DNA, 22 bp, Artificial Sequence
  Synthetic
gctcaccuggtctgtcaauagg

SEQ ID NO: 48421 - DNA, 31 bp, Artificial Sequence; identical to SEQ ID NO: 36187
  Synthetic

SEQ ID NO: 48422 - DNA, 22 bp, Artificial Sequence
  Synthetic
ggcatgtccacugctgttctua

SEQ ID NO: 48423 - DNA, 25 bp, Artificial Sequence
  Synthetic
gttattaccgugagaguaggccaaa

SEQ ID NO: 48424 - DNA, 28 bp, Artificial Sequence
  Synthetic
gtactcattuccttcaattaguccaggt

SEQ ID NO: 48425 - DNA, 28 bp, Artificial Sequence
  Synthetic
cctggaccaccuattaatcctaaacuga

SEQ ID NO: 48426 - DNA, 23 bp, Artificial Sequence
  Synthetic
gtccagucactctgaactucagg

SEQ ID NO: 48427 - DNA, 23 bp, Artificial Sequence
  Synthetic
tgactccacaccuactgttgcua

SEQ ID NO: 48428 - DNA, 26 bp, Artificial Sequence
  Synthetic
ccacgtgtcttuccttgtatcttgut

SEQ ID NO: 48429 - DNA, 24 bp, Artificial Sequence
  Synthetic
ggtagcaaaacaguagccguacat

SEQ ID NO: 48430 - DNA, 22 bp, Artificial Sequence
  Synthetic
ggttgtccacuttgcaguagga

SEQ ID NO: 48431 - DNA, 30 bp, Artificial Sequence; identical to SEQ ID NO: 36197
  Synthetic

SEQ ID NO: 48432 - DNA, 23 bp, Artificial Sequence
  Synthetic
cctgggtgccutcttcttgauat

SEQ ID NO: 48433 - DNA, 29 bp, Artificial Sequence
  Synthetic
cgtaagttgcuttctctgaauacaaaact

SEQ ID NO: 48434 - DNA, 20 bp, Artificial Sequence
  Synthetic
ggaagagguactggtugcct

SEQ ID NO: 48435 - DNA, 25 bp, Artificial Sequence
  Synthetic
cuttttagataaaccugggccacct

SEQ ID NO: 48436 - DNA, 24 bp, Artificial Sequence
  Synthetic
tccaagttacutttgggaauggca

SEQ ID NO: 48437 - DNA, 29 bp, Artificial Sequence
  Synthetic
gtttgcaaggaaaauagatgtctgatugt

SEQ ID NO: 48438 - DNA, 23 bp, Artificial Sequence
  Synthetic
tcccgaagaccggugactttaua

SEQ ID NO: 48439 - DNA, 23 bp, Artificial Sequence
  Synthetic
ttagctaaaccaaguccaccugt

SEQ ID NO: 48440 - DNA, 30 bp, Artificial Sequence; identical to SEQ ID NO: 36206
  Synthetic

SEQ ID NO: 48441 - DNA, 22 bp, Artificial Sequence
  Synthetic
tgatgcaccugatcagccaaut

SEQ ID NO: 48442 - DNA, 26 bp, Artificial Sequence
  Synthetic
tgaatcagauaccagaggaucactua

SEQ ID NO: 48443 - DNA, 31 bp, Artificial Sequence; identical to SEQ ID NO: 36209
  Synthetic

SEQ ID NO: 48444 - DNA, 26 bp, Artificial Sequence
  Synthetic
tggcacaaaaugttattgccattuct

SEQ ID NO: 48445 - DNA, 24 bp, Artificial Sequence
  Synthetic
agatcaaggccaaacgutcagaut

SEQ ID NO: 48446 - DNA, 24 bp, Artificial Sequence
  Synthetic
tgaaccaggaaaccutaggcttug

SEQ ID NO: 48447 - DNA, 30 bp, Artificial Sequence; identical to SEQ ID NO: 36213
  Synthetic

SEQ ID NO: 48448 - DNA, 27 bp, Artificial Sequence
  Synthetic
cagtgtattttcugctaagcaagtugt

SEQ ID NO: 48449 - DNA, 31 bp, Artificial Sequence; identical to SEQ ID NO: 36215
  Synthetic

SEQ ID NO: 48450 - DNA, 22 bp, Artificial Sequence
  Synthetic
ggctctcugataacaagugcct

SEQ ID NO: 48451 - DNA, 27 bp, Artificial Sequence
  Synthetic
ggctctccaaucaccaattatgtcaut

SEQ ID NO: 48452 - DNA, 28 bp, Artificial Sequence
  Synthetic
gaatgttgguttaaaaagtugcacagac

SEQ ID NO: 48453 - DNA, 25 bp, Artificial Sequence
  Synthetic
cgtcaccuggaacatgaaugaaaga

SEQ ID NO: 48454 - DNA, 24 bp, Artificial Sequence
  Synthetic
tcaggtgaaacuggaagcaatuga

SEQ ID NO: 48455 - DNA, 30 bp, Artificial Sequence; identical to SEQ ID NO: 36221
  Synthetic

SEQ ID NO: 48456 - DNA, 26 bp, Artificial Sequence
  Synthetic
attcatagtgcauttccttagugcca

SEQ ID NO: 48457 - DNA, 25 bp, Artificial Sequence
  Synthetic
actaacgtauactggctcttugcag

SEQ ID NO: 48458 - DNA, 24 bp, Artificial Sequence
  Synthetic
agcautgattgcatauacccggaa

SEQ ID NO: 48459 - DNA, 23 bp, Artificial Sequence
  Synthetic
ctccatgacugtcaacugggaag

SEQ ID NO: 48460 - DNA, 27 bp, Artificial Sequence
  Synthetic
tggctttgtaugtgaaaatgttcucct

SEQ ID NO: 48461 - DNA, 26 bp, Artificial Sequence
  Synthetic
aaagagaagcuaacaggaagacaugg

SEQ ID NO: 48462 - DNA, 29 bp, Artificial Sequence
  Synthetic
caagtaatttuaaccaaaccatgcaguct

SEQ ID NO: 48463 - DNA, 25 bp, Artificial Sequence
  Synthetic
agaaccugttctctaugacacccat

SEQ ID NO: 48464 - DNA, 28 bp, Artificial Sequence
  Synthetic
gaactatuattgaacaccuaggaaggca

SEQ ID NO: 48465 - DNA, 23 bp, Artificial Sequence
  Synthetic
gtgcaauaagcgtgatguggaag

SEQ ID NO: 48466 - DNA, 23 bp, Artificial Sequence
  Synthetic
gcttacataucggatctcuggca

SEQ ID NO: 48467 - DNA, 28 bp, Artificial Sequence
  Synthetic
agacaggaucaaaggctatgttatugag

SEQ ID NO: 48468 - DNA, 30 bp, Artificial Sequence; identical to SEQ ID NO: 36234
  Synthetic

SEQ ID NO: 48469 - DNA, 21 bp, Artificial Sequence
  Synthetic
gtacagcuggagactgcugaa

SEQ ID NO: 48470 - DNA, 28 bp, Artificial Sequence
  Synthetic
tccatcctatuagaaaaggagacaguca

SEQ ID NO: 48471 - DNA, 22 bp, Artificial Sequence
  Synthetic
gattccugctgtcaucaaggga

SEQ ID NO: 48472 - DNA, 25 bp, Artificial Sequence
  Synthetic
cagtcagtaguaccttcttctugca

SEQ ID NO: 48473 - DNA, 25 bp, Artificial Sequence
  Synthetic
cagcacttcaucagcttcaaaauct

SEQ ID NO: 48474 - DNA, 22 bp, Artificial Sequence
  Synthetic
tttggttattggugctcggcua

SEQ ID NO: 48475 - DNA, 27 bp, Artificial Sequence
  Synthetic
ggaatcagtgaugagtgcaaaucagat

SEQ ID NO: 48476 - DNA, 31 bp, Artificial Sequence; identical to SEQ ID NO: 36242
  Synthetic

SEQ ID NO: 48477 - DNA, 27 bp, Artificial Sequence
  Synthetic
tggcagtgaaaucacccattatgtuat

SEQ ID NO: 48478 - DNA, 23 bp, Artificial Sequence
  Synthetic
cggtcuggaaaggaaucaacaga

SEQ ID NO: 48479 - DNA, 22 bp, Artificial Sequence
  Synthetic
ccgaagugaggcaaaaacugag

SEQ ID NO: 48480 - DNA, 22 bp, Artificial Sequence
  Synthetic
cattggaaggccugtcacauct

SEQ ID NO: 48481 - DNA, 30 bp, Artificial Sequence; identical to SEQ ID NO: 36247
  Synthetic

SEQ ID NO: 48482 - DNA, 28 bp, Artificial Sequence
  Synthetic
caagatttucaaccagaaaagatguggt

SEQ ID NO: 48483 - DNA, 24 bp, Artificial Sequence
  Synthetic
tcattttcactugcctctggcuaa

SEQ ID NO: 48484 - DNA, 23 bp, Artificial Sequence
  Synthetic
cagccaaacutgttctuggcaat

SEQ ID NO: 48485 - DNA, 27 bp, Artificial Sequence
  Synthetic
acttaactggtcugatccagaagauga

SEQ ID NO: 48486 - DNA, 28 bp, Artificial Sequence
  Synthetic
gatagtatcactugggaaaatcctguga

SEQ ID NO: 48487 - DNA, 25 bp, Artificial Sequence
  Synthetic
cgtgttgtaauagacaacgtuggaa

SEQ ID NO: 48488 - DNA, 25 bp, Artificial Sequence
  Synthetic
tctgtugaaagagaacagtcaugca

SEQ ID NO: 48489 - DNA, 23 bp, Artificial Sequence
  Synthetic
ccgagagggugctgatuacaaac

SEQ ID NO: 48490 - DNA, 26 bp, Artificial Sequence
  Synthetic
gggttcccatuctagttcaatagtug

SEQ ID NO: 48491 - DNA, 30 bp, Artificial Sequence; identical to SEQ ID NO: 36257
  Synthetic

SEQ ID NO: 48492 - DNA, 27 bp, Artificial Sequence
  Synthetic
ccaaaguacatgguaaaaaggcaaact

SEQ ID NO: 48493 - DNA, 24 bp, Artificial Sequence
  Synthetic
caaaacccgacucagaatggatug

SEQ ID NO: 48494 - DNA, 30 bp, Artificial Sequence; identical to SEQ ID NO: 36260
  Synthetic

SEQ ID NO: 48495 - DNA, 24 bp, Artificial Sequence
  Synthetic
gagaaggaagggugaagtucaaga

SEQ ID NO: 48496 - DNA, 26 bp, Artificial Sequence
  Synthetic
gttgggtaaggugatccagaaauact

SEQ ID NO: 48497 - DNA, 24 bp, Artificial Sequence
  Synthetic
gagttgccacuttcccatttugaa

SEQ ID NO: 48498 - DNA, 22 bp, Artificial Sequence
  Synthetic
gtcaggattgguaccaggtgut

SEQ ID NO: 48499 - DNA, 30 bp, Artificial Sequence; identical to SEQ ID NO: 36265
  Synthetic

SEQ ID NO: 48500 - DNA, 27 bp, Artificial Sequence
  Synthetic
tggtatatatgttcucctcccagctuc

SEQ ID NO: 48501 - DNA, 28 bp, Artificial Sequence
  Synthetic
ccccactuagagacaagtgcattatuaa

SEQ ID NO: 48502 - DNA, 28 bp, Artificial Sequence
  Synthetic
tgcagagatgtgaucattcttcattgut

SEQ ID NO: 48503 - DNA, 29 bp, Artificial Sequence
  Synthetic
tgcattgcatttugacatactctgtttut

SEQ ID NO: 48504 - DNA, 24 bp, Artificial Sequence
  Synthetic
ccaatagcautgactgctcucact

SEQ ID NO: 48505 - DNA, 29 bp, Artificial Sequence
  Synthetic
cagagaaaaatgguggaagtcctatcaua

SEQ ID NO: 48506 - DNA, 22 bp, Artificial Sequence
  Synthetic
gugagggaggaccugagaaaag

SEQ ID NO: 48507 - DNA, 24 bp, Artificial Sequence
  Synthetic
gaaggaacagagguccagttucag

SEQ ID NO: 48508 - DNA, 28 bp, Artificial Sequence
  Synthetic
tgtcacaaagatuaagtgcaagagcaua

SEQ ID NO: 48509 - DNA, 24 bp, Artificial Sequence
  Synthetic
attguggaaaagagagacgucagg

SEQ ID NO: 48510 - DNA, 23 bp, Artificial Sequence
  Synthetic
tctcauatcgtagcucacaggca

SEQ ID NO: 48511 - DNA, 27 bp, Artificial Sequence
  Synthetic
ctcatggaaggauaggaauactcatuc

SEQ ID NO: 48512 - DNA, 30 bp, Artificial Sequence; identical to SEQ ID NO: 36278
  Synthetic

SEQ ID NO: 48513 - DNA, 28 bp, Artificial Sequence
  Synthetic
tcatatgaactccuttttgacaaaccua

SEQ ID NO: 48514 - DNA, 25 bp, Artificial Sequence
  Synthetic
actgctgtcutaacatcttgauggg

SEQ ID NO: 48515 - DNA, 24 bp, Artificial Sequence
  Synthetic
ctaaagacgcagugactcucacat

SEQ ID NO: 48516 - DNA, 29 bp, Artificial Sequence
  Synthetic
aaatatgacaccaaaaugcaagttugaca

SEQ ID NO: 48517 - DNA, 23 bp, Artificial Sequence
  Synthetic
ctcatccaccgucaaggauacaa

SEQ ID NO: 48518 - DNA, 29 bp, Artificial Sequence
  Synthetic
tccccttttaaaaugagaaccttcctuac

SEQ ID NO: 48519 - DNA, 27 bp, Artificial Sequence
  Synthetic
cttggacaaaggcugatatgattcuga

SEQ ID NO: 48520 - DNA, 24 bp, Artificial Sequence
  Synthetic
agcagatttaaggucagaggccua

SEQ ID NO: 48521 - DNA, 29 bp, Artificial Sequence
  Synthetic
tcgacatcacaguaaaacatcctattcug

SEQ ID NO: 48522 - DNA, 29 bp, Artificial Sequence
  Synthetic
tcaactatataucctttgatgcgugaacc

SEQ ID NO: 48523 - DNA, 24 bp, Artificial Sequence
  Synthetic
tggcaatgugaagagaactgcaua

SEQ ID NO: 48524 - DNA, 28 bp, Artificial Sequence
  Synthetic
ccacatttgtuacgagcacaaacttuaa

SEQ ID NO: 48525 - DNA, 26 bp, Artificial Sequence
  Synthetic
ccctggtcauggtaaaaatctttugg

SEQ ID NO: 48526 - DNA, 22 bp, Artificial Sequence
  Synthetic
aaatgcacucacgagtcacugt

SEQ ID NO: 48527 - DNA, 24 bp, Artificial Sequence
  Synthetic
gggtgaaaaugaagaccttgtcug

SEQ ID NO: 48528 - DNA, 22 bp, Artificial Sequence
  Synthetic
cctgtugccccaaagtagcuat

SEQ ID NO: 48529 - DNA, 29 bp, Artificial Sequence
  Synthetic
tggatcatggacauaactgtatgtgttut

SEQ ID NO: 48530 - DNA, 26 bp, Artificial Sequence
  Synthetic
tcttcgcaucgctcaattatauagcc

SEQ ID NO: 48531 - DNA, 27 bp, Artificial Sequence
  Synthetic
actaacgtaaatgguatgctccaacuc

SEQ ID NO: 48532 - DNA, 22 bp, Artificial Sequence
  Synthetic
acagtugcagacaggtctucag

SEQ ID NO: 48533 - DNA, 30 bp, Artificial Sequence; identical to SEQ ID NO: 36299
  Synthetic

SEQ ID NO: 48534 - DNA, 22 bp, Artificial Sequence
  Synthetic
ccagtgccaacuctgtttctug

SEQ ID NO: 48535 - DNA, 26 bp, Artificial Sequence
  Synthetic
ggtggaagcaaaaucataggtuacgt

SEQ ID NO: 48536 - DNA, 25 bp, Artificial Sequence
  Synthetic
tgctgtctugcttttaaattgugct

SEQ ID NO: 48537 - DNA, 26 bp, Artificial Sequence
  Synthetic
cggctgaacaaacutctttcagaaut

SEQ ID NO: 48538 - DNA, 31 bp, Artificial Sequence; identical to SEQ ID NO: 36304
  Synthetic

SEQ ID NO: 48539 - DNA, 28 bp, Artificial Sequence
  Synthetic
tccaatggcuaagaaataacatggtugt

SEQ ID NO: 48540 - DNA, 32 bp, Artificial Sequence; identical to SEQ ID NO: 36306
  Synthetic

SEQ ID NO: 48541 - DNA, 27 bp, Artificial Sequence
  Synthetic
tgcaagctaacugataatccaatguct

SEQ ID NO: 48542 - DNA, 22 bp, Artificial Sequence
  Synthetic
agaagacagcgucatcgaacuc

SEQ ID NO: 48543 - DNA, 30 bp, Artificial Sequence; identical to SEQ ID NO: 36309
  Synthetic

SEQ ID NO: 48544 - DNA, 26 bp, Artificial Sequence
  Synthetic
aggtctucctctgttguaaaggagaa

SEQ ID NO: 48545 - DNA, 28 bp, Artificial Sequence
  Synthetic
gccaactataatgugtctttgaccaauc

SEQ ID NO: 48546 - DNA, 27 bp, Artificial Sequence
  Synthetic
acccuaaaagcaagaacaaactuacca

SEQ ID NO: 48547 - DNA, 31 bp, Artificial Sequence; identical to SEQ ID NO: 36313
  Synthetic

SEQ ID NO: 48548 - DNA, 31 bp, Artificial Sequence; identical to SEQ ID NO: 36314
  Synthetic

SEQ ID NO: 48549 - DNA, 25 bp, Artificial Sequence
  Synthetic
gcgcagaagugatttggtauaaagg

SEQ ID NO: 48550 - DNA, 27 bp, Artificial Sequence
  Synthetic
caaaaaccacautgagttaagcuggaa

SEQ ID NO: 48551 - DNA, 29 bp, Artificial Sequence
  Synthetic
ttcttgtcaucaacaaatgtctacuggat

SEQ ID NO: 48552 - DNA, 28 bp, Artificial Sequence
  Synthetic
tgacagtacaagaugacaggtauacagt

SEQ ID NO: 48553 - DNA, 30 bp, Artificial Sequence; identical to SEQ ID NO: 36319
  Synthetic

SEQ ID NO: 48554 - DNA, 29 bp, Artificial Sequence
  Synthetic
cagtcatgtauaacaagttttcugaccct

SEQ ID NO: 48555 - DNA, 28 bp, Artificial Sequence
  Synthetic
gagtaccttggcuaatgagtatgatuct

SEQ ID NO: 48556 - DNA, 23 bp, Artificial Sequence
  Synthetic
aagtgaagguggaagaacuccag

SEQ ID NO: 48557 - DNA, 23 bp, Artificial Sequence
  Synthetic
aaagctgttucttccctcucgaa

SEQ ID NO: 48558 - DNA, 22 bp, Artificial Sequence
  Synthetic
cuagaaaagugaagggccagca

SEQ ID NO: 48559 - DNA, 24 bp, Artificial Sequence
  Synthetic
gctgttatuaaggcagauggcaag

SEQ ID NO: 48560 - DNA, 29 bp, Artificial Sequence
  Synthetic
aaauttaaaaagcactuaccaagcacagt

SEQ ID NO: 48561 - DNA, 21 bp, Artificial Sequence
  Synthetic
ttcaagaaugaccagcgccua

SEQ ID NO: 48562 - DNA, 29 bp, Artificial Sequence
  Synthetic
actatttacctucaatgatcagttugcca

SEQ ID NO: 48563 - DNA, 25 bp, Artificial Sequence
  Synthetic
gcuaaaaggaacccaggaaaucaca

SEQ ID NO: 48564 - DNA, 22 bp, Artificial Sequence
  Synthetic
gggtgtaucaggaagtctugca

SEQ ID NO: 48565 - DNA, 24 bp, Artificial Sequence
  Synthetic
ccttcuaaccctcacuccaaacag

SEQ ID NO: 48566 - DNA, 29 bp, Artificial Sequence
  Synthetic
ttttattagucgagctgaaatgauacagt

SEQ ID NO: 48567 - DNA, 23 bp, Artificial Sequence
  Synthetic
tgcgccgcaucttaaaaaucaaa

SEQ ID NO: 48568 - DNA, 22 bp, Artificial Sequence
  Synthetic
ccccacucccatgatucagaaa

SEQ ID NO: 48569 - DNA, 23 bp, Artificial Sequence
  Synthetic
tcauctcttcugagggcaagact

SEQ ID NO: 48570 - DNA, 25 bp, Artificial Sequence
  Synthetic
tgggatgucacagatctcatuagct

SEQ ID NO: 48571 - DNA, 27 bp, Artificial Sequence
  Synthetic
agaggcaaaugttatatgguccaaagg

SEQ ID NO: 48572 - DNA, 29 bp, Artificial Sequence
  Synthetic
aaaatcagacatuaagaatgaggctttuc

SEQ ID NO: 48573 - DNA, 22 bp, Artificial Sequence
  Synthetic
gcacaaagucaaacuggaccaa

SEQ ID NO: 48574 - DNA, 29 bp, Artificial Sequence
  Synthetic
ctccattattatuaaagcaacccgaauct

SEQ ID NO: 48575 - DNA, 24 bp, Artificial Sequence
  Synthetic
tttgaugcagaaatcucagaggca

SEQ ID NO: 48576 - DNA, 25 bp, Artificial Sequence
  Synthetic
ccaacgatgcuttgcttttatgugt

SEQ ID NO: 48577 - DNA, 29 bp, Artificial Sequence
  Synthetic
gagagatggaaaucatctgtaccucaaaa

SEQ ID NO: 48578 - DNA, 27 bp, Artificial Sequence
  Synthetic
gaacgaaatcucccaggaaagtacuaa

SEQ ID NO: 48579 - DNA, 24 bp, Artificial Sequence
  Synthetic
gagttaaacaaagagcgugacgug

SEQ ID NO: 48580 - DNA, 26 bp, Artificial Sequence
  Synthetic
caatgcaagtugctactaaggttugt

SEQ ID NO: 48581 - DNA, 26 bp, Artificial Sequence
  Synthetic
gaaagctgcacaucattgatgtucaa

SEQ ID NO: 48582 - DNA, 23 bp, Artificial Sequence
  Synthetic
cugaagagucaacgaactcugat

SEQ ID NO: 48583 - DNA, 29 bp, Artificial Sequence
  Synthetic
tcctaaggagaugccaaatcaacttttua

SEQ ID NO: 48584 - DNA, 27 bp, Artificial Sequence
  Synthetic
gcagcauaaacagggcttgaatttuaa

SEQ ID NO: 48585 - DNA, 28 bp, Artificial Sequence
  Synthetic
cactaatgcaauggacttctctcuacag

SEQ ID NO: 48586 - DNA, 28 bp, Artificial Sequence
  Synthetic
ttaaggtcatgugttcaaatcttgaugt

SEQ ID NO: 48587 - DNA, 25 bp, Artificial Sequence
  Synthetic
caaaacctgutgaagaggtugaagt

SEQ ID NO: 48588 - DNA, 27 bp, Artificial Sequence
  Synthetic
acaaattgtcacugagattcctaccug

SEQ ID NO: 48589 - DNA, 29 bp, Artificial Sequence
  Synthetic
ttgcatttgtcaagcutattcaacatcut

SEQ ID NO: 48590 - DNA, 23 bp, Artificial Sequence
  Synthetic
cagaacautcgauggaggcagaa

SEQ ID NO: 48591 - DNA, 29 bp, Artificial Sequence
  Synthetic
ggagtagaaagutaatcacttgctucaga

SEQ ID NO: 48592 - DNA, 27 bp, Artificial Sequence
  Synthetic
caacacaacacacaauaagaagagugt

SEQ ID NO: 48593 - DNA, 31 bp, Artificial Sequence; identical to SEQ ID NO: 36359
  Synthetic

SEQ ID NO: 48594 - DNA, 31 bp, Artificial Sequence; identical to SEQ ID NO: 36360
  Synthetic

SEQ ID NO: 48595 - DNA, 28 bp, Artificial Sequence
  Synthetic
gcaaaatgtgaagucgatgtggtauaaa

SEQ ID NO: 48596 - DNA, 28 bp, Artificial Sequence
  Synthetic
caatcaccaguaaacattcatcacatut

SEQ ID NO: 48597 - DNA, 31 bp, Artificial Sequence; identical to SEQ ID NO: 36363
  Synthetic

SEQ ID NO: 48598 - DNA, 24 bp, Artificial Sequence
  Synthetic
aaaagcucagagcacccagaatua

SEQ ID NO: 48599 - DNA, 25 bp, Artificial Sequence
  Synthetic
tgagctcatguctttaaagtgtucg

SEQ ID NO: 48600 - DNA, 27 bp, Artificial Sequence
  Synthetic
caaacaataucaaacacagcaccauga

SEQ ID NO: 48601 - DNA, 26 bp, Artificial Sequence
  Synthetic
gatcaaacucttctgctcuggaaagt

SEQ ID NO: 48602 - DNA, 22 bp, Artificial Sequence
  Synthetic
gagaucggcggacacttctaug

SEQ ID NO: 48603 - DNA, 31 bp, Artificial Sequence; identical to SEQ ID NO: 36369
  Synthetic

SEQ ID NO: 48604 - DNA, 26 bp, Artificial Sequence
  Synthetic
gaaaagccagtuacctttagttggug

SEQ ID NO: 48605 - DNA, 24 bp, Artificial Sequence
  Synthetic
attgttgctgugttctgttctgug

SEQ ID NO: 48606 - DNA, 26 bp, Artificial Sequence
  Synthetic
gggtttctaaucttccaaacugaaca

SEQ ID NO: 48607 - DNA, 30 bp, Artificial Sequence; identical to SEQ ID NO: 36373
  Synthetic

SEQ ID NO: 48608 - DNA, 25 bp, Artificial Sequence
  Synthetic
tgcatgcaacaauacacgaaaaucc

SEQ ID NO: 48609 - DNA, 24 bp, Artificial Sequence
  Synthetic
ctatgaaagcutgctcucgacagt

SEQ ID NO: 48610 - DNA, 29 bp, Artificial Sequence
  Synthetic
cgatataagaaaagcauactggtgaauct

SEQ ID NO: 48611 - DNA, 24 bp, Artificial Sequence
  Synthetic
gagccugaagaagagcctattuca

SEQ ID NO: 48612 - DNA, 28 bp, Artificial Sequence
  Synthetic
cttttauaggagaaggaaggaaauggca

SEQ ID NO: 48613 - DNA, 25 bp, Artificial Sequence
  Synthetic
tgttaacacautggtctttcugggt

SEQ ID NO: 48614 - DNA, 26 bp, Artificial Sequence
  Synthetic
caggtacaaautcttcttccucaggt

SEQ ID NO: 48615 - DNA, 28 bp, Artificial Sequence
  Synthetic
aagaagaaautgttccugaagaggaagt

SEQ ID NO: 48616 - DNA, 24 bp, Artificial Sequence
  Synthetic
cuaaagagttgcaucccaaagagt

SEQ ID NO: 48617 - DNA, 21 bp, Artificial Sequence
  Synthetic
gaagugcccaagaaacctgug

SEQ ID NO: 48618 - DNA, 24 bp, Artificial Sequence
  Synthetic
gaaagatcugctatggcucaccaa

SEQ ID NO: 48619 - DNA, 30 bp, Artificial Sequence; identical to SEQ ID NO: 36385
  Synthetic

SEQ ID NO: 48620 - DNA, 22 bp, Artificial Sequence
  Synthetic
ccttugcaggaggcatcatcua

SEQ ID NO: 48621 - DNA, 31 bp, Artificial Sequence; identical to SEQ ID NO: 36387
  Synthetic

SEQ ID NO: 48622 - DNA, 27 bp, Artificial Sequence
  Synthetic
agaaaagaucacaaucgaggaaggaaa

SEQ ID NO: 48623 - DNA, 28 bp, Artificial Sequence
  Synthetic
gttcttgtccugattcttacattucagt

SEQ ID NO: 48624 - DNA, 26 bp, Artificial Sequence
  Synthetic
acagacauggaggaaacaaagatcuc

SEQ ID NO: 48625 - DNA, 32 bp, Artificial Sequence; identical to SEQ ID NO: 36391
  Synthetic

SEQ ID NO: 48626 - DNA, 27 bp, Artificial Sequence
  Synthetic
cctcatattcttcutcccgttgtacug

SEQ ID NO: 48627 - DNA, 31 bp, Artificial Sequence; identical to SEQ ID NO: 36393
  Synthetic

SEQ ID NO: 48628 - DNA, 26 bp, Artificial Sequence
  Synthetic
agtcagtataccuttagctggtggut

SEQ ID NO: 48629 - DNA, 26 bp, Artificial Sequence
  Synthetic
gctactactttauggctgccttttug

SEQ ID NO: 48630 - DNA, 26 bp, Artificial Sequence
  Synthetic
acccaccaacauataaacagtaugac

SEQ ID NO: 48631 - DNA, 30 bp, Artificial Sequence; identical to SEQ ID NO: 36397
  Synthetic

SEQ ID NO: 48632 - DNA, 28 bp, Artificial Sequence
  Synthetic
cataagacagutatgcaaatgugaaggt

SEQ ID NO: 48633 - DNA, 31 bp, Artificial Sequence; identical to SEQ ID NO: 36399
  Synthetic

SEQ ID NO: 48634 - DNA, 25 bp, Artificial Sequence
  Synthetic
cttugaggaaauacacacaaacuca

SEQ ID NO: 48635 - DNA, 28 bp, Artificial Sequence
  Synthetic
ctcttccccaaautctagaaagugagaa

SEQ ID NO: 48636 - DNA, 23 bp, Artificial Sequence
  Synthetic
agaaatacacccacagugcacuc

SEQ ID NO: 48637 - DNA, 27 bp, Artificial Sequence
  Synthetic
tgctcatttauttggccttttugacaa

SEQ ID NO: 48638 - DNA, 22 bp, Artificial Sequence
  Synthetic
gctttacgucgaaagccacugt

SEQ ID NO: 48639 - DNA, 28 bp, Artificial Sequence
  Synthetic
gcatgtgccuatgttctttcauaaaagt

SEQ ID NO: 48640 - DNA, 26 bp, Artificial Sequence
  Synthetic
acaacaagagggauaaaaatcugcct

SEQ ID NO: 48641 - DNA, 29 bp, Artificial Sequence
  Synthetic
ccatgtgtttgauctgatgtcttgtacua

SEQ ID NO: 48642 - DNA, 22 bp, Artificial Sequence
  Synthetic
cttgtgtacaugggtgcuagga

SEQ ID NO: 48643 - DNA, 31 bp, Artificial Sequence; identical to SEQ ID NO: 36409
  Synthetic

SEQ ID NO: 48644 - DNA, 28 bp, Artificial Sequence
  Synthetic
atttcacataaacugcaaatcaggtuca

SEQ ID NO: 48645 - DNA, 27 bp, Artificial Sequence
  Synthetic
aagaagggcaagaauactaugaaaggg

SEQ ID NO: 48646 - DNA, 27 bp, Artificial Sequence
  Synthetic
agttcgtcauaaggttctucgaaagat

SEQ ID NO: 48647 - DNA, 29 bp, Artificial Sequence
  Synthetic
tttagtgaagcagutggatggatagaaut

SEQ ID NO: 48648 - DNA, 22 bp, Artificial Sequence
  Synthetic
cttccttcacccuccactgtut

SEQ ID NO: 48649 - DNA, 30 bp, Artificial Sequence; identical to SEQ ID NO: 36415
  Synthetic

SEQ ID NO: 48650 - DNA, 24 bp, Artificial Sequence
  Synthetic
acgttttgguggtggtttctttuc

SEQ ID NO: 48651 - DNA, 29 bp, Artificial Sequence
  Synthetic
tgaagtactgaaagaaaugcatgagacut

SEQ ID NO: 48652 - DNA, 32 bp, Artificial Sequence; identical to SEQ ID NO: 36418
  Synthetic

SEQ ID NO: 48653 - DNA, 25 bp, Artificial Sequence
  Synthetic
acgtagccuacctataccattcuga

SEQ ID NO: 48654 - DNA, 25 bp, Artificial Sequence
  Synthetic
gatagaatgagagcaugagcgcaua

SEQ ID NO: 48655 - DNA, 25 bp, Artificial Sequence
  Synthetic
cagaacugacagagagccagaaaua

SEQ ID NO: 48656 - DNA, 24 bp, Artificial Sequence
  Synthetic
cactttggtgugtgtctacaggua

SEQ ID NO: 48657 - DNA, 27 bp, Artificial Sequence
  Synthetic
acacaaagtccauaaattgaccatugc

SEQ ID NO: 48658 - DNA, 23 bp, Artificial Sequence
  Synthetic
acgcagatgugctcaacaguaat

SEQ ID NO: 48659 - DNA, 26 bp, Artificial Sequence
  Synthetic
aactgaaaaacuggaacccagtgaua

SEQ ID NO: 48660 - DNA, 26 bp, Artificial Sequence
  Synthetic
ctttttacctcugtctgtgacaguct

SEQ ID NO: 48661 - DNA, 28 bp, Artificial Sequence
  Synthetic
gctgaatatagucatgcgtcctcuaaat

SEQ ID NO: 48662 - DNA, 24 bp, Artificial Sequence
  Synthetic
tttgcttgagcagutcaaatgcut

SEQ ID NO: 48663 - DNA, 29 bp, Artificial Sequence
  Synthetic
agtagaagacaggugttttatccttacut

SEQ ID NO: 48664 - DNA, 22 bp, Artificial Sequence
  Synthetic
caugttcgttaaaugccacgca

SEQ ID NO: 48665 - DNA, 28 bp, Artificial Sequence
  Synthetic
tttcattattccutagaaaccacugcga

SEQ ID NO: 48666 - DNA, 22 bp, Artificial Sequence
  Synthetic
tgctggctugagctgcataaua

SEQ ID NO: 48667 - DNA, 24 bp, Artificial Sequence
  Synthetic
cagggaaauaaagcctucagacag

SEQ ID NO: 48668 - DNA, 30 bp, Artificial Sequence; identical to SEQ ID NO: 36434
  Synthetic

SEQ ID NO: 48669 - DNA, 21 bp, Artificial Sequence
  Synthetic
catgaacgacgcuggtttgua

SEQ ID NO: 48670 - DNA, 27 bp, Artificial Sequence
  Synthetic
ttttgtaucaggcaacagutataggut

SEQ ID NO: 48671 - DNA, 30 bp, Artificial Sequence; identical to SEQ ID NO: 36437
  Synthetic

SEQ ID NO: 48672 - DNA, 23 bp, Artificial Sequence
  Synthetic
gggcgctgutttccagataacua

SEQ ID NO: 48673 - DNA, 29 bp, Artificial Sequence
  Synthetic
ctgaaaccttgtcuttctgctctactaut

SEQ ID NO: 48674 - DNA, 25 bp, Artificial Sequence
  Synthetic
caaggcuccggtcagtttuaaaaat

SEQ ID NO: 48675 - DNA, 26 bp, Artificial Sequence
  Synthetic
tctgttccuacagagcaaaaactucc

SEQ ID NO: 48676 - DNA, 29 bp, Artificial Sequence
  Synthetic
tgaaaaccagtguagcaacattattccua

SEQ ID NO: 48677 - DNA, 24 bp, Artificial Sequence
  Synthetic
gcatgtctccutcatgactgatug

SEQ ID NO: 48678 - DNA, 26 bp, Artificial Sequence
  Synthetic
caggaatctttuccagaggcatttuc

SEQ ID NO: 48679 - DNA, 22 bp, Artificial Sequence
  Synthetic
acattcacuggaactccuccca

SEQ ID NO: 48680 - DNA, 29 bp, Artificial Sequence
  Synthetic
tcgtataaatcuagaagagcagtcugaca

SEQ ID NO: 48681 - DNA, 23 bp, Artificial Sequence
  Synthetic
agcagtgaacuagtaccagguga

SEQ ID NO: 48682 - DNA, 29 bp, Artificial Sequence
  Synthetic
tttactgttttguaaactgacctcucaca

SEQ ID NO: 48683 - DNA, 23 bp, Artificial Sequence
  Synthetic
tctatgggucacctccaatcuct

SEQ ID NO: 48684 - DNA, 26 bp, Artificial Sequence
  Synthetic
tgaugaaggaaaaguccaagaaauca

SEQ ID NO: 48685 - DNA, 29 bp, Artificial Sequence
  Synthetic
ctgaactcaguactaagtggttuaaggat

SEQ ID NO: 48686 - DNA, 22 bp, Artificial Sequence
  Synthetic
tggtgagtgugtgccttgtauc

SEQ ID NO: 48687 - DNA, 26 bp, Artificial Sequence
  Synthetic
ggtguggttcaaagauaagggagaaa

SEQ ID NO: 48688 - DNA, 27 bp, Artificial Sequence
  Synthetic
gggcaacagaguattacaatuagaagg

SEQ ID NO: 48689 - DNA, 28 bp, Artificial Sequence
  Synthetic
ggcaagaaguacaagataatgtcugaga

SEQ ID NO: 48690 - DNA, 27 bp, Artificial Sequence
  Synthetic
gaggacaatuaaagaggaggctaaugt

SEQ ID NO: 48691 - DNA, 30 bp, Artificial Sequence; identical to SEQ ID NO: 36457
  Synthetic

SEQ ID NO: 48692 - DNA, 22 bp, Artificial Sequence
  Synthetic
agcacacccacccucctataut

SEQ ID NO: 48693 - DNA, 26 bp, Artificial Sequence
  Synthetic
ggcaactacaagaugactttgguaga

SEQ ID NO: 48694 - DNA, 24 bp, Artificial Sequence
  Synthetic
gcagtgaagcugctttacaaugaa

SEQ ID NO: 48695 - DNA, 23 bp, Artificial Sequence
  Synthetic
aagtgtctuggtacaaggauggg

SEQ ID NO: 48696 - DNA, 28 bp, Artificial Sequence
  Synthetic
gaaaatgaatctgutcacacacacuagg

SEQ ID NO: 48697 - DNA, 26 bp, Artificial Sequence
  Synthetic
gctacgatcagcucctgcatauaaaa

SEQ ID NO: 48698 - DNA, 22 bp, Artificial Sequence
  Synthetic
agcaagtcagucatgccatgua

SEQ ID NO: 48699 - DNA, 31 bp, Artificial Sequence; identical to SEQ ID NO: 36465
  Synthetic

SEQ ID NO: 48700 - DNA, 27 bp, Artificial Sequence
  Synthetic
ggttctauaaggagaaaacatgugggt

SEQ ID NO: 48701 - DNA, 26 bp, Artificial Sequence
  Synthetic
ggaagatttugtcacagaacuggagt

SEQ ID NO: 48702 - DNA, 24 bp, Artificial Sequence
  Synthetic
cacgtccacaugaaagaggtgtua

SEQ ID NO: 48703 - DNA, 22 bp, Artificial Sequence
  Synthetic
tccagctttucggaaaacguct

SEQ ID NO: 48704 - DNA, 21 bp, Artificial Sequence
  Synthetic
ccctccacccccuggaaauat

SEQ ID NO: 48705 - DNA, 28 bp, Artificial Sequence
  Synthetic
tggttcaaagauggaagagaattgtcug

SEQ ID NO: 48706 - DNA, 21 bp, Artificial Sequence
  Synthetic
tctctggcugtgctttgcuac

SEQ ID NO: 48707 - DNA, 25 bp, Artificial Sequence
  Synthetic
tggctgaaagauagaggtgaaguca

SEQ ID NO: 48708 - DNA, 25 bp, Artificial Sequence
  Synthetic
aaaaaugtgagaatcauggccacac

SEQ ID NO: 48709 - DNA, 25 bp, Artificial Sequence
  Synthetic
ccttaatctugaagcctccgatguc

SEQ ID NO: 48710 - DNA, 26 bp, Artificial Sequence
  Synthetic
acattggagaaucacatcagaaccut

SEQ ID NO: 48711 - DNA, 28 bp, Artificial Sequence
  Synthetic
tcatatgaucacaccagtcactctucaa

SEQ ID NO: 48712 - DNA, 26 bp, Artificial Sequence
  Synthetic
tgatcgtaagcaaugccacagaatua

SEQ ID NO: 48713 - DNA, 28 bp, Artificial Sequence
  Synthetic
ccttactgacugttttgtttggttuact

SEQ ID NO: 48714 - DNA, 27 bp, Artificial Sequence
  Synthetic
agaattctcaaaugaggagtgttuccc

SEQ ID NO: 48715 - DNA, 24 bp, Artificial Sequence
  Synthetic
cattgccttucttctcatccucca

SEQ ID NO: 48716 - DNA, 29 bp, Artificial Sequence
  Synthetic
tcatcgtctctuaaaagtactccatcuct

SEQ ID NO: 48717 - DNA, 28 bp, Artificial Sequence
  Synthetic
gaacttctcauttcatctccuaacacct

SEQ ID NO: 48718 - DNA, 29 bp, Artificial Sequence
  Synthetic
cagttcctatacuattttctgcttugcat

SEQ ID NO: 48719 - DNA, 24 bp, Artificial Sequence
  Synthetic
ctgggacaccagaaautacagugt

SEQ ID NO: 48720 - DNA, 22 bp, Artificial Sequence
  Synthetic
gaaaggcucacagtuagcaact

SEQ ID NO: 48721 - DNA, 21 bp, Artificial Sequence
  Synthetic
gggcagtatucctgcgagaut

SEQ ID NO: 48722 - DNA, 28 bp, Artificial Sequence
  Synthetic
gttaaaaccaucctttttccaagugaca

SEQ ID NO: 48723 - DNA, 28 bp, Artificial Sequence
  Synthetic
ccttgtgttttucttgtgtttaacugct

SEQ ID NO: 48724 - DNA, 22 bp, Artificial Sequence
  Synthetic
ccagttcugccacagtgtctuc

SEQ ID NO: 48725 - DNA, 31 bp, Artificial Sequence; identical to SEQ ID NO: 36491
  Synthetic

SEQ ID NO: 48726 - DNA, 24 bp, Artificial Sequence
  Synthetic
agaattcaacugcaatgugcagac

SEQ ID NO: 48727 - DNA, 25 bp, Artificial Sequence
  Synthetic
tgagtctcutacctttccucacaca

SEQ ID NO: 48728 - DNA, 25 bp, Artificial Sequence
  Synthetic
agctaaatttgugtttttggcugct

SEQ ID NO: 48729 - DNA, 28 bp, Artificial Sequence
  Synthetic
agactttgacagauggatatcacgttut

SEQ ID NO: 48730 - DNA, 31 bp, Artificial Sequence; identical to SEQ ID NO: 36496
  Synthetic

SEQ ID NO: 48731 - DNA, 28 bp, Artificial Sequence
  Synthetic
acaatttccatccaucttttcctgtuca

SEQ ID NO: 48732 - DNA, 28 bp, Artificial Sequence
  Synthetic
acattgagaatgugaatacttgtgugga

SEQ ID NO: 48733 - DNA, 28 bp, Artificial Sequence
  Synthetic
agtagcccaatucatgagaaattctugt

SEQ ID NO: 48734 - DNA, 21 bp, Artificial Sequence
  Synthetic
gtatgacggccacugagucaa

SEQ ID NO: 48735 - DNA, 29 bp, Artificial Sequence
  Synthetic
tgatactctcctcuttcctgactcttuag

SEQ ID NO: 48736 - DNA, 20 bp, Artificial Sequence
  Synthetic
gucgaccctuccaagccaat

SEQ ID NO: 48737 - DNA, 31 bp, Artificial Sequence; identical to SEQ ID NO: 36503
  Synthetic

SEQ ID NO: 48738 - DNA, 29 bp, Artificial Sequence
  Synthetic
tccagautattaactuccagagacacaga

SEQ ID NO: 48739 - DNA, 23 bp, Artificial Sequence
  Synthetic
gttttgcugtttgcatuggacag

SEQ ID NO: 48740 - DNA, 23 bp, Artificial Sequence
  Synthetic
gcttccgaagucatttuccacct

SEQ ID NO: 48741 - DNA, 23 bp, Artificial Sequence
  Synthetic
catgacctuggaatgtgttgugg

SEQ ID NO: 48742 - DNA, 27 bp, Artificial Sequence
  Synthetic
ctgctaatgaaacugtcgctauagact

SEQ ID NO: 48743 - DNA, 29 bp, Artificial Sequence
  Synthetic
tgtctatatttcatutgtggacagtgugg

SEQ ID NO: 48744 - DNA, 31 bp, Artificial Sequence; identical to SEQ ID NO: 36510
  Synthetic

SEQ ID NO: 48745 - DNA, 24 bp, Artificial Sequence
  Synthetic
cgtttgaagucacttggcugaaga

SEQ ID NO: 48746 - DNA, 23 bp, Artificial Sequence
  Synthetic
cucaagggaagaucccaaactua

SEQ ID NO: 48747 - DNA, 26 bp, Artificial Sequence
  Synthetic
gggaatgaaauaacagccatucagaa

SEQ ID NO: 48748 - DNA, 29 bp, Artificial Sequence
  Synthetic
caagaaaatcuagacaagcaagaaaguga

SEQ ID NO: 48749 - DNA, 25 bp, Artificial Sequence
  Synthetic
aacaaagagutacacucaggagcag

SEQ ID NO: 48750 - DNA, 31 bp, Artificial Sequence; identical to SEQ ID NO: 36516
  Synthetic

SEQ ID NO: 48751 - DNA, 22 bp, Artificial Sequence
  Synthetic
cccataagcauccagtggtuca

SEQ ID NO: 48752 - DNA, 24 bp, Artificial Sequence
  Synthetic
cccaaucctctctguagaagaaca

SEQ ID NO: 48753 - DNA, 27 bp, Artificial Sequence
  Synthetic
gactaaggagatuacagccaaatggut

SEQ ID NO: 48754 - DNA, 21 bp, Artificial Sequence
  Synthetic
ccaaggcaaacgutcugaacc

SEQ ID NO: 48755 - DNA, 24 bp, Artificial Sequence
  Synthetic
gccaattacggugacttggcuaaa

SEQ ID NO: 48756 - DNA, 22 bp, Artificial Sequence
  Synthetic
cttcagaaaagccagucccuca

SEQ ID NO: 48757 - DNA, 28 bp, Artificial Sequence
  Synthetic
ctgcgaagtgguagaaagtataagacut

SEQ ID NO: 48758 - DNA, 22 bp, Artificial Sequence
  Synthetic
ggccauaacttuggcaacacaa

SEQ ID NO: 48759 - DNA, 29 bp, Artificial Sequence
  Synthetic
tgauagagaaatuaaggagagcagcaaac

SEQ ID NO: 48760 - DNA, 26 bp, Artificial Sequence
  Synthetic
acaaggtuagcacaaagatgucaaga

SEQ ID NO: 48761 - DNA, 22 bp, Artificial Sequence
  Synthetic
caacaaagagcuggtttcuggt

SEQ ID NO: 48762 - DNA, 24 bp, Artificial Sequence
  Synthetic
gataaaaugcaaagtcuccagcca

SEQ ID NO: 48763 - DNA, 28 bp, Artificial Sequence
  Synthetic
aaagaaatagcugcttctgacagauaca

SEQ ID NO: 48764 - DNA, 26 bp, Artificial Sequence
  Synthetic
gttgggttucaaatgcatatguagca

SEQ ID NO: 48765 - DNA, 23 bp, Artificial Sequence
  Synthetic
gtacaaagaugggagaccctugg

SEQ ID NO: 48766 - DNA, 29 bp, Artificial Sequence
  Synthetic
gcaatttgagguttaaatgttccuacaca

SEQ ID NO: 48767 - DNA, 27 bp, Artificial Sequence
  Synthetic
ggtcaucagagaagacggaaaaaucaa

SEQ ID NO: 48768 - DNA, 28 bp, Artificial Sequence
  Synthetic
gataggauaagagaagaaaguaccagut

SEQ ID NO: 48769 - DNA, 27 bp, Artificial Sequence
  Synthetic
tgttggtgaataugaatgtgttgtugc

SEQ ID NO: 48770 - DNA, 26 bp, Artificial Sequence
  Synthetic
gaaccagcuaatttcaaatgguccag

SEQ ID NO: 48771 - DNA, 25 bp, Artificial Sequence
  Synthetic
ggtttgtttacugagtttccaucca

SEQ ID NO: 48772 - DNA, 22 bp, Artificial Sequence
  Synthetic
ggatcacaggugagccttucag

SEQ ID NO: 48773 - DNA, 24 bp, Artificial Sequence
  Synthetic
ttatgtgtgtugggtctctttgut

SEQ ID NO: 48774 - DNA, 30 bp, Artificial Sequence; identical to SEQ ID NO: 36540
  Synthetic

SEQ ID NO: 48775 - DNA, 25 bp, Artificial Sequence
  Synthetic
gccaagcagagutgatcatcatuga

SEQ ID NO: 48776 - DNA, 22 bp, Artificial Sequence
  Synthetic
agagtgcagcaccauctttcug

SEQ ID NO: 48777 - DNA, 29 bp, Artificial Sequence
  Synthetic
gacttaactcaucttttctctgtctugga

SEQ ID NO: 48778 - DNA, 22 bp, Artificial Sequence
  Synthetic
cacctgggutctcaggattuca

SEQ ID NO: 48779 - DNA, 26 bp, Artificial Sequence
  Synthetic
ttaatggactcuacttcccttugcag

SEQ ID NO: 48780 - DNA, 23 bp, Artificial Sequence
  Synthetic
ggcctcacagacauactctccut

SEQ ID NO: 48781 - DNA, 23 bp, Artificial Sequence
  Synthetic
ggatggccccaugatacauacac

SEQ ID NO: 48782 - DNA, 22 bp, Artificial Sequence
  Synthetic
gctgaagcaaccccuttaguga

SEQ ID NO: 48783 - DNA, 24 bp, Artificial Sequence
  Synthetic
cctaacagcugagggtccuagaat

SEQ ID NO: 48784 - DNA, 22 bp, Artificial Sequence
  Synthetic
acatgatgtguctgggctctug

SEQ ID NO: 48785 - DNA, 25 bp, Artificial Sequence
  Synthetic
ggcaataaagaaagugcaggaggua

SEQ ID NO: 48786 - DNA, 22 bp, Artificial Sequence
  Synthetic
cutcctcaattcugaccgcaga

SEQ ID NO: 48787 - DNA, 21 bp, Artificial Sequence
  Synthetic
cacaaagugcgctcatctuga

SEQ ID NO: 48788 - DNA, 26 bp, Artificial Sequence
  Synthetic
tggaggttcuattgaagactguggat

SEQ ID NO: 48789 - DNA, 24 bp, Artificial Sequence
  Synthetic
ccaacctacagcugcagattguac

SEQ ID NO: 48790 - DNA, 26 bp, Artificial Sequence
  Synthetic
ctgctcaatucattggcttuagcaat

SEQ ID NO: 48791 - DNA, 21 bp, Artificial Sequence
  Synthetic
cugcaaagcaaaguccacacc

SEQ ID NO: 48792 - DNA, 25 bp, Artificial Sequence
  Synthetic
gttccagagccautagggttaugaa

SEQ ID NO: 48793 - DNA, 23 bp, Artificial Sequence
  Synthetic
gaaacagaaucagcaguggcaaa

SEQ ID NO: 48794 - DNA, 25 bp, Artificial Sequence
  Synthetic
gctatgaucatcaccgucaaaaaca

SEQ ID NO: 48795 - DNA, 27 bp, Artificial Sequence
  Synthetic
gtctgaatcuccagtttacccaacuaa

SEQ ID NO: 48796 - DNA, 24 bp, Artificial Sequence
  Synthetic
gggtcuccaaggtaatgaatucaa

SEQ ID NO: 48797 - DNA, 25 bp, Artificial Sequence
  Synthetic
caaacaaaucaggaatggcugagag

SEQ ID NO: 48798 - DNA, 22 bp, Artificial Sequence
  Synthetic
gccacttucctcaacagugaac

SEQ ID NO: 48799 - DNA, 28 bp, Artificial Sequence
  Synthetic
tcttaaagagcaacuacacagacagtut

SEQ ID NO: 48800 - DNA, 26 bp, Artificial Sequence
  Synthetic
agatagcctcucctacacaatucaca

SEQ ID NO: 48801 - DNA, 31 bp, Artificial Sequence; identical to SEQ ID NO: 36567
  Synthetic

SEQ ID NO: 48802 - DNA, 30 bp, Artificial Sequence; identical to SEQ ID NO: 36568
  Synthetic

SEQ ID NO: 48803 - DNA, 25 bp, Artificial Sequence
  Synthetic
gattuggaacacaccacatcaucaa

SEQ ID NO: 48804 - DNA, 23 bp, Artificial Sequence
  Synthetic
gcaaagctctutgcttccccuat

SEQ ID NO: 48805 - DNA, 26 bp, Artificial Sequence
  Synthetic
cattgttgaagutgaaggtctuccag

SEQ ID NO: 48806 - DNA, 28 bp, Artificial Sequence
  Synthetic
catatttcataagcugaacccctctcut

SEQ ID NO: 48807 - DNA, 23 bp, Artificial Sequence
  Synthetic
actcuggagagatacuccacacc

SEQ ID NO: 48808 - DNA, 27 bp, Artificial Sequence
  Synthetic
ggagtatctttcucctacctcacctuc

SEQ ID NO: 48809 - DNA, 27 bp, Artificial Sequence
  Synthetic
gatcagttttauaccccaccatcauct

SEQ ID NO: 48810 - DNA, 31 bp, Artificial Sequence; identical to SEQ ID NO: 36576
  Synthetic

SEQ ID NO: 48811 - DNA, 25 bp, Artificial Sequence
  Synthetic
agaatcugagacctcccuaacacaa

SEQ ID NO: 48812 - DNA, 25 bp, Artificial Sequence
  Synthetic
acatttttcttcuccagaggcauga

SEQ ID NO: 48813 - DNA, 22 bp, Artificial Sequence
  Synthetic
gcattuccaaagcaggatggug

SEQ ID NO: 48814 - DNA, 28 bp, Artificial Sequence
  Synthetic
aggacaacttttcucagaaagatcagut

SEQ ID NO: 48815 - DNA, 28 bp, Artificial Sequence
  Synthetic
gagctttcaaauagaactatgguggaga

SEQ ID NO: 48816 - DNA, 27 bp, Artificial Sequence
  Synthetic
tgtaacgttucagggctaggaatttut

SEQ ID NO: 48817 - DNA, 28 bp, Artificial Sequence
  Synthetic
cacactcaaauaaaacacacagatguga

SEQ ID NO: 48818 - DNA, 24 bp, Artificial Sequence
  Synthetic
ttccctttctugtgcgtcaaatuc

SEQ ID NO: 48819 - DNA, 29 bp, Artificial Sequence
  Synthetic
ctcaaaagaagatugatgacaaagcctut

SEQ ID NO: 48820 - DNA, 24 bp, Artificial Sequence
  Synthetic
ctttttccccggguagtgtatcuc

SEQ ID NO: 48821 - DNA, 29 bp, Artificial Sequence
  Synthetic
ttggaaaacutggtagaucagaaaaggaa

SEQ ID NO: 48822 - DNA, 26 bp, Artificial Sequence
  Synthetic
gacattgtatgaautcagccctgaug

SEQ ID NO: 48823 - DNA, 31 bp, Artificial Sequence; identical to SEQ ID NO: 36589
  Synthetic

SEQ ID NO: 48824 - DNA, 25 bp, Artificial Sequence
  Synthetic
ttctctataagugacaggcuccact

SEQ ID NO: 48825 - DNA, 25 bp, Artificial Sequence
  Synthetic
cagccagtugtaacatggttucaaa

SEQ ID NO: 48826 - DNA, 30 bp, Artificial Sequence; identical to SEQ ID NO: 36592
  Synthetic

SEQ ID NO: 48827 - DNA, 24 bp, Artificial Sequence
  Synthetic
gtcaagagggucaaacaaauctuc

SEQ ID NO: 48828 - DNA, 29 bp, Artificial Sequence
  Synthetic
gacatcatgttttugttttgctttcacut

SEQ ID NO: 48829 - DNA, 28 bp, Artificial Sequence
  Synthetic
gatatcctcaaccuatagtgacgtggua

SEQ ID NO: 48830 - DNA, 27 bp, Artificial Sequence
  Synthetic
atgttttcttccutctgttcggtttug

SEQ ID NO: 48831 - DNA, 27 bp, Artificial Sequence
  Synthetic
agaaggaggaaguatatgagactccug

SEQ ID NO: 48832 - DNA, 25 bp, Artificial Sequence
  Synthetic
ggtagactttccuttaccagtgcut

SEQ ID NO: 48833 - DNA, 29 bp, Artificial Sequence
  Synthetic
ctctagagaggacaugaaaatcagatcua

SEQ ID NO: 48834 - DNA, 22 bp, Artificial Sequence
  Synthetic
cctccctuaaacgttgcaacut

SEQ ID NO: 48835 - DNA, 25 bp, Artificial Sequence
  Synthetic
ggtttactggcuctcccttuaacaa

SEQ ID NO: 48836 - DNA, 29 bp, Artificial Sequence
  Synthetic
tccgttctgcucttttcagaaattcuaaa

SEQ ID NO: 48837 - DNA, 27 bp, Artificial Sequence
  Synthetic
atttacaccatcacucttccagctuag

SEQ ID NO: 48838 - DNA, 28 bp, Artificial Sequence
  Synthetic
aaccggttcacccuctaaaacatattua

SEQ ID NO: 48839 - DNA, 25 bp, Artificial Sequence
  Synthetic
gggaauctgaacatucagaaaggga

SEQ ID NO: 48840 - DNA, 26 bp, Artificial Sequence
  Synthetic
ttttgtgattguttcagtctcucgga

SEQ ID NO: 48841 - DNA, 27 bp, Artificial Sequence
  Synthetic
aattgcagaaagcacugagctatcuaa

SEQ ID NO: 48842 - DNA, 27 bp, Artificial Sequence
  Synthetic
ccttttgagatautttgctctccucct

SEQ ID NO: 48843 - DNA, 29 bp, Artificial Sequence
  Synthetic
gggcaagugacaaaguttagatcttaaua

SEQ ID NO: 48844 - DNA, 24 bp, Artificial Sequence
  Synthetic
actattggcugctttgcaagagua

SEQ ID NO: 48845 - DNA, 22 bp, Artificial Sequence
  Synthetic
gatttcaugcgagggtttcugg

SEQ ID NO: 48846 - DNA, 29 bp, Artificial Sequence
  Synthetic
ggaacaacaatgauttacatgaactctug

SEQ ID NO: 48847 - DNA, 27 bp, Artificial Sequence
  Synthetic
agaagatgaaggaacutacacgttugt

SEQ ID NO: 48848 - DNA, 29 bp, Artificial Sequence
  Synthetic
tttgtaagtatuggcaatgacacctttug

SEQ ID NO: 48849 - DNA, 28 bp, Artificial Sequence
  Synthetic
tgtgaggtctcuatggtgacttaaucat

SEQ ID NO: 48850 - DNA, 28 bp, Artificial Sequence
  Synthetic
cttcaatuagcaaaagugtgtattctug

SEQ ID NO: 48851 - DNA, 27 bp, Artificial Sequence
  Synthetic
atgggctattugtcaacatttacucct

SEQ ID NO: 48852 - DNA, 25 bp, Artificial Sequence
  Synthetic
gtctcagagauaaacattcggugga

SEQ ID NO: 48853 - DNA, 28 bp, Artificial Sequence
  Synthetic
gagcttcaagttuttgttgttgttgtug

SEQ ID NO: 48854 - DNA, 22 bp, Artificial Sequence
  Synthetic
gatgcgaacauctctgcctuct

SEQ ID NO: 48855 - DNA, 28 bp, Artificial Sequence
  Synthetic
ggtaaactcgaauttccatttcauccat

SEQ ID NO: 48856 - DNA, 28 bp, Artificial Sequence
  Synthetic
tgaaaccataccutccacataaagtgug

SEQ ID NO: 48857 - DNA, 28 bp, Artificial Sequence
  Synthetic
cagtgaactaugaaggcatctctuacaa

SEQ ID NO: 48858 - DNA, 22 bp, Artificial Sequence
  Synthetic
agtggucagcaaagtguaggat

SEQ ID NO: 48859 - DNA, 22 bp, Artificial Sequence
  Synthetic
acagaggacucggcagaauaca

SEQ ID NO: 48860 - DNA, 21 bp, Artificial Sequence
  Synthetic
gggacautgaagugggacacc

SEQ ID NO: 48861 - DNA, 28 bp, Artificial Sequence
  Synthetic
tgaaccccatguatctatttgtttggut

SEQ ID NO: 48862 - DNA, 22 bp, Artificial Sequence
  Synthetic
cagcatcagcutgtggacttuc

SEQ ID NO: 48863 - DNA, 28 bp, Artificial Sequence
  Synthetic
tcactgaattgcuccaattttcctctua

SEQ ID NO: 48864 - DNA, 30 bp, Artificial Sequence; identical to SEQ ID NO: 36630
  Synthetic

SEQ ID NO: 48865 - DNA, 28 bp, Artificial Sequence
  Synthetic
ggacttcttttccutgatgatgtcauct

SEQ ID NO: 48866 - DNA, 23 bp, Artificial Sequence
  Synthetic
tgtcauctaatttgguggcagca

SEQ ID NO: 48867 - DNA, 29 bp, Artificial Sequence
  Synthetic
actcatactguacatctcttgtuccaaag

SEQ ID NO: 48868 - DNA, 26 bp, Artificial Sequence
  Synthetic
tttagaactgggcutgatttcctugt

SEQ ID NO: 48869 - DNA, 29 bp, Artificial Sequence
  Synthetic
tttcccagtguaacaataaccaagagaut

SEQ ID NO: 48870 - DNA, 24 bp, Artificial Sequence
  Synthetic
ttcggttaatgacuagtcgctgut

SEQ ID NO: 48871 - DNA, 29 bp, Artificial Sequence
  Synthetic
attcatcttgtgugtgtatgatttugcag

SEQ ID NO: 48872 - DNA, 22 bp, Artificial Sequence
  Synthetic
gggctggaauggtgaaagagua

SEQ ID NO: 48873 - DNA, 28 bp, Artificial Sequence
  Synthetic
tgaagttaaagtcuccttggaaagtgug

SEQ ID NO: 48874 - DNA, 21 bp, Artificial Sequence
  Synthetic
gcugacaggaaugggaggact

SEQ ID NO: 48875 - DNA, 29 bp, Artificial Sequence
  Synthetic
tgtggagcttaaauccaatggcaaataua

SEQ ID NO: 48876 - DNA, 27 bp, Artificial Sequence
  Synthetic
ctaattttaccacaugctaagggugac

SEQ ID NO: 48877 - DNA, 24 bp, Artificial Sequence
  Synthetic
ggatgcactcugacagaaaggtuc

SEQ ID NO: 48878 - DNA, 27 bp, Artificial Sequence
  Synthetic
aatacaaagacagguccaucaaaggaa

SEQ ID NO: 48879 - DNA, 21 bp, Artificial Sequence
  Synthetic
attgaacgguctgaccggauc

SEQ ID NO: 48880 - DNA, 28 bp, Artificial Sequence
  Synthetic
actaggactuagttcaatcttgucaggt

SEQ ID NO: 48881 - DNA, 24 bp, Artificial Sequence
  Synthetic
caguaaatucaagcgcagaacaga

SEQ ID NO: 48882 - DNA, 25 bp, Artificial Sequence
  Synthetic
cttcaaactgaagcuttcctggtuc

SEQ ID NO: 48883 - DNA, 25 bp, Artificial Sequence
  Synthetic
aggttcagagtucgctatgatggua

SEQ ID NO: 48884 - DNA, 26 bp, Artificial Sequence
  Synthetic
ctggcttttgcutttctttctgauct

SEQ ID NO: 48885 - DNA, 30 bp, Artificial Sequence; identical to SEQ ID NO: 36651
  Synthetic

SEQ ID NO: 48886 - DNA, 23 bp, Artificial Sequence
  Synthetic
gtgttagccugcattcaaagugg

SEQ ID NO: 48887 - DNA, 24 bp, Artificial Sequence
  Synthetic
gccugagccagagagaaagtuaat

SEQ ID NO: 48888 - DNA, 28 bp, Artificial Sequence
  Synthetic
atcaatatagtgguatagcttcccuggt

SEQ ID NO: 48889 - DNA, 26 bp, Artificial Sequence
  Synthetic
acttgaaaugaaagtcagagcuacgg

SEQ ID NO: 48890 - DNA, 28 bp, Artificial Sequence
  Synthetic
gctgaaataccugtttataacccaagug

SEQ ID NO: 48891 - DNA, 31 bp, Artificial Sequence; identical to SEQ ID NO: 36657
  Synthetic

SEQ ID NO: 48892 - DNA, 29 bp, Artificial Sequence
  Synthetic
gattcatgagcaaaaacutatcacgctua

SEQ ID NO: 48893 - DNA, 28 bp, Artificial Sequence
  Synthetic
acagatgagucacaacttgagagacuat

SEQ ID NO: 48894 - DNA, 27 bp, Artificial Sequence
  Synthetic
ttagcccucgattttcttctuacacaa

SEQ ID NO: 48895 - DNA, 23 bp, Artificial Sequence
  Synthetic
gaaattgtatguggagcctgcug

SEQ ID NO: 48896 - DNA, 29 bp, Artificial Sequence
  Synthetic
ccatcttgtagaaaguccatttggtauct

SEQ ID NO: 48897 - DNA, 26 bp, Artificial Sequence
  Synthetic
aacatttatcauagctcctugccaca

SEQ ID NO: 48898 - DNA, 29 bp, Artificial Sequence
  Synthetic
ctgattcaacagcutcagattcagaaaug

SEQ ID NO: 48899 - DNA, 27 bp, Artificial Sequence
  Synthetic
aacagtctagcucagatacatctccut

SEQ ID NO: 48900 - DNA, 28 bp, Artificial Sequence
  Synthetic
actacagtatctutggccattttctucc

SEQ ID NO: 48901 - DNA, 26 bp, Artificial Sequence
  Synthetic
tuactgatgaagucccagcaagaaat

SEQ ID NO: 48902 - DNA, 25 bp, Artificial Sequence
  Synthetic
gggtgaguaaattctactcuaggct

SEQ ID NO: 48903 - DNA, 22 bp, Artificial Sequence
  Synthetic
ctgccgcgccutactttatuac

SEQ ID NO: 48904 - DNA, 22 bp, Artificial Sequence
  Synthetic
ccctcatatuagcttccgggut

SEQ ID NO: 48905 - DNA, 27 bp, Artificial Sequence
  Synthetic
gggtcactaaacauctcatctcaauga

SEQ ID NO: 48906 - DNA, 27 bp, Artificial Sequence
  Synthetic
gtcaatggaactutcgatttggtaguc

SEQ ID NO: 48907 - DNA, 28 bp, Artificial Sequence
  Synthetic
gcagttgaaaugcataagttcaaacuct

SEQ ID NO: 48908 - DNA, 21 bp, Artificial Sequence
  Synthetic
gcaagacuccactggctacut

SEQ ID NO: 48909 - DNA, 21 bp, Artificial Sequence
  Synthetic
ccttcgcugacacaccagaua

SEQ ID NO: 48910 - DNA, 24 bp, Artificial Sequence
  Synthetic
cagagatgctcugtttcacaggut

SEQ ID NO: 48911 - DNA, 28 bp, Artificial Sequence
  Synthetic
ggtatcacugagtttcatttcaaugcag

SEQ ID NO: 48912 - DNA, 20 bp, Artificial Sequence
  Synthetic
ctaccttugcggcggaaaug

SEQ ID NO: 48913 - DNA, 31 bp, Artificial Sequence; identical to SEQ ID NO: 36679
  Synthetic

SEQ ID NO: 48914 - DNA, 25 bp, Artificial Sequence
  Synthetic
tcaccttcucctgagttattugcac

SEQ ID NO: 48915 - DNA, 28 bp, Artificial Sequence
  Synthetic
cctcctttctttutgacttacgtttcut

SEQ ID NO: 48916 - DNA, 27 bp, Artificial Sequence
  Synthetic
aagacttctccauttaagggtttugac

SEQ ID NO: 48917 - DNA, 30 bp, Artificial Sequence; identical to SEQ ID NO: 36683
  Synthetic

SEQ ID NO: 48918 - DNA, 27 bp, Artificial Sequence
  Synthetic
tgattatctgtgutgacccctguaaga

SEQ ID NO: 48919 - DNA, 29 bp, Artificial Sequence
  Synthetic
gtgttttctucctttctctaugaaaagca

SEQ ID NO: 48920 - DNA, 24 bp, Artificial Sequence
  Synthetic
ctgatcactggutctctcactcug

SEQ ID NO: 48921 - DNA, 24 bp, Artificial Sequence
  Synthetic
gtattttgcuctaggtggcucagt

SEQ ID NO: 48922 - DNA, 24 bp, Artificial Sequence
  Synthetic
ctgatctgaguagaggttgucagc

SEQ ID NO: 48923 - DNA, 24 bp, Artificial Sequence
  Synthetic
tcttgacctcugccttttggttut

SEQ ID NO: 48924 - DNA, 21 bp, Artificial Sequence
  Synthetic
gtgcttuggcagcaauagacg

SEQ ID NO: 48925 - DNA, 26 bp, Artificial Sequence
  Synthetic
ctcaacgtgggcuttgttttaatcut

SEQ ID NO: 48926 - DNA, 23 bp, Artificial Sequence
  Synthetic
ctuggccccattuagacacaaac

SEQ ID NO: 48927 - DNA, 22 bp, Artificial Sequence
  Synthetic
ccagagcucccttgattuccaa

SEQ ID NO: 48928 - DNA, 22 bp, Artificial Sequence
  Synthetic
gcatctaccuctgcccauagct

SEQ ID NO: 48929 - DNA, 26 bp, Artificial Sequence
  Synthetic
actaaagccaacaguggacgatatuc

SEQ ID NO: 48930 - DNA, 22 bp, Artificial Sequence
  Synthetic
tcaagtccugcagcaacgtuaa

SEQ ID NO: 48931 - DNA, 26 bp, Artificial Sequence
  Synthetic
ccttagcugggacaccctaatttaut

SEQ ID NO: 48932 - DNA, 24 bp, Artificial Sequence
  Synthetic
aggtttaaagcauggccacattuc

SEQ ID NO: 48933 - DNA, 25 bp, Artificial Sequence
  Synthetic
tttgtatttggcautggcattgugt

SEQ ID NO: 48934 - DNA, 26 bp, Artificial Sequence
  Synthetic
tgatgcaacutccattaagucaccat

SEQ ID NO: 48935 - DNA, 28 bp, Artificial Sequence
  Synthetic
gcgttagtagcuagagataaaccaagua

SEQ ID NO: 48936 - DNA, 25 bp, Artificial Sequence
  Synthetic
ccaacagttaautggatacccugga

SEQ ID NO: 48937 - DNA, 28 bp, Artificial Sequence
  Synthetic
gtgagggaaaauaaccaatcacttucat

SEQ ID NO: 48938 - DNA, 29 bp, Artificial Sequence
  Synthetic
cattgagttttuacctacctttctugcac

SEQ ID NO: 48939 - DNA, 26 bp, Artificial Sequence
  Synthetic
ggcactggcaaaacutaagtaaguct

SEQ ID NO: 48940 - DNA, 25 bp, Artificial Sequence
  Synthetic
gaacctgccutttcttaaagtcuga

SEQ ID NO: 48941 - DNA, 26 bp, Artificial Sequence
  Synthetic
gtgcatgttutaaaattgcttuggca

SEQ ID NO: 48942 - DNA, 26 bp, Artificial Sequence
  Synthetic
ttacacatcaguccaacacttuagca

SEQ ID NO: 48943 - DNA, 29 bp, Artificial Sequence
  Synthetic
aatttaggtaugttattcacagugggcat

SEQ ID NO: 48944 - DNA, 27 bp, Artificial Sequence
  Synthetic
ttacaagtagttucccaagtttgcaut

SEQ ID NO: 48945 - DNA, 28 bp, Artificial Sequence
  Synthetic
gctacccaggtutattatgagaaggtug

SEQ ID NO: 48946 - DNA, 28 bp, Artificial Sequence
  Synthetic
ggctgattaaaattucccatgaggagua

SEQ ID NO: 48947 - DNA, 30 bp, Artificial Sequence; identical to SEQ ID NO: 36713
  Synthetic

SEQ ID NO: 48948 - DNA, 20 bp, Artificial Sequence
  Synthetic
agcaaaagcucgtgggtgua

SEQ ID NO: 48949 - DNA, 20 bp, Artificial Sequence
  Synthetic
aucttcgagaucgggaggga

SEQ ID NO: 48950 - DNA, 17 bp, Artificial Sequence
  Synthetic
gcacucacccggtucct

SEQ ID NO: 48951 - DNA, 17 bp, Artificial Sequence
  Synthetic
gccagggugctggacug

SEQ ID NO: 48952 - DNA, 28 bp, Artificial Sequence
  Synthetic
ccattgcctuaaaatgttgcatttguct

SEQ ID NO: 48953 - DNA, 21 bp, Artificial Sequence
  Synthetic
gtttctggtcutcgcagccua

SEQ ID NO: 48954 - DNA, 26 bp, Artificial Sequence
  Synthetic
cacgtcucaacaattaauaaccgcaa

SEQ ID NO: 48955 - DNA, 27 bp, Artificial Sequence
  Synthetic
ggacaaaguaagccttggacttttuag

SEQ ID NO: 48956 - DNA, 23 bp, Artificial Sequence
  Synthetic
gtaggacugagatgtuggcagac

SEQ ID NO: 48957 - DNA, 25 bp, Artificial Sequence
  Synthetic
attttaacctcutcccaatcuggct

SEQ ID NO: 48958 - DNA, 22 bp, Artificial Sequence
  Synthetic
gctgtctgggutggaaggaauc

SEQ ID NO: 48959 - DNA, 22 bp, Artificial Sequence
  Synthetic
ggtggcugatgaactttugcac

SEQ ID NO: 48960 - DNA, 24 bp, Artificial Sequence
  Synthetic
ggttgaaagccaucagttgatugg

SEQ ID NO: 48961 - DNA, 28 bp, Artificial Sequence
  Synthetic
tttcagtaagaagccuctaatctgttut

SEQ ID NO: 48962 - DNA, 25 bp, Artificial Sequence
  Synthetic
gggccagtucctccctagtauaaat

SEQ ID NO: 48963 - DNA, 33 bp, Artificial Sequence; identical to SEQ ID NO: 36729
  Synthetic

SEQ ID NO: 48964 - DNA, 25 bp, Artificial Sequence
  Synthetic
cuctctcctttaaugcgaggaaact

SEQ ID NO: 48965 - DNA, 22 bp, Artificial Sequence
  Synthetic
tcttaaccacuttcagccccug

SEQ ID NO: 48966 - DNA, 20 bp, Artificial Sequence
  Synthetic
ctgccgucagatcaccaaug

SEQ ID NO: 48967 - DNA, 25 bp, Artificial Sequence
  Synthetic
agtaaatucgggaaaggugaagagg

SEQ ID NO: 48968 - DNA, 22 bp, Artificial Sequence
  Synthetic
gggagaggutaatgggccuagt

SEQ ID NO: 48969 - DNA, 21 bp, Artificial Sequence
  Synthetic
tgcccgccugttctctuaaag

SEQ ID NO: 48970 - DNA, 22 bp, Artificial Sequence
  Synthetic
gtatggagccaguctcctggua

SEQ ID NO: 48971 - DNA, 24 bp, Artificial Sequence
  Synthetic
gcttctcuttttcacctucccaca

SEQ ID NO: 48972 - DNA, 18 bp, Artificial Sequence
  Synthetic
caucatccugggcacagc

SEQ ID NO: 48973 - DNA, 18 bp, Artificial Sequence
  Synthetic
tttcccgggutccagcuc

SEQ ID NO: 48974 - DNA, 26 bp, Artificial Sequence
  Synthetic
ggatgcutcagtcttuacagaacagg

SEQ ID NO: 48975 - DNA, 26 bp, Artificial Sequence
  Synthetic
agtgatttgauggctgtaatcctuca

SEQ ID NO: 48976 - DNA, 21 bp, Artificial Sequence
  Synthetic
ccagaucagcccccaaattuc

SEQ ID NO: 48977 - DNA, 28 bp, Artificial Sequence
  Synthetic
ctgtttctaagcugcatttcacttucaa

SEQ ID NO: 48978 - DNA, 20 bp, Artificial Sequence
  Synthetic
gccctttccauctggaggug

SEQ ID NO: 48979 - DNA, 19 bp, Artificial Sequence
  Synthetic
ctagcggugcccacgtuat

SEQ ID NO: 48980 - DNA, 30 bp, Artificial Sequence; identical to SEQ ID NO: 36746
  Synthetic

SEQ ID NO: 48981 - DNA, 25 bp, Artificial Sequence
  Synthetic
tggguacagacattcacuaggaagt

SEQ ID NO: 48982 - DNA, 25 bp, Artificial Sequence
  Synthetic
cctgatcaatuacacacacggguat

SEQ ID NO: 48983 - DNA, 30 bp, Artificial Sequence; identical to SEQ ID NO: 36749
  Synthetic

SEQ ID NO: 48984 - DNA, 29 bp, Artificial Sequence
  Synthetic
ttcaaatagcagatuccatcattagccut

SEQ ID NO: 48985 - DNA, 26 bp, Artificial Sequence
  Synthetic
gggagcucactaaactatucacaagt

SEQ ID NO: 48986 - DNA, 22 bp, Artificial Sequence
  Synthetic
ggcagattccaucatcagccut

SEQ ID NO: 48987 - DNA, 29 bp, Artificial Sequence
  Synthetic
gctcacugaagacccuaatttaaactaut

SEQ ID NO: 48988 - DNA, 21 bp, Artificial Sequence
  Synthetic
gtggtcacauagtggtgcuct

SEQ ID NO: 48989 - DNA, 27 bp, Artificial Sequence
  Synthetic
ctggatctgagcuctgaaatgactuat

SEQ ID NO: 48990 - DNA, 21 bp, Artificial Sequence
  Synthetic
cccaccauagcctcttggtug

SEQ ID NO: 48991 - DNA, 29 bp, Artificial Sequence
  Synthetic
agtccctgcaauctgtaataatttcctut

SEQ ID NO: 48992 - DNA, 22 bp, Artificial Sequence
  Synthetic
tcaggatctcaucgctttgcug

SEQ ID NO: 48993 - DNA, 22 bp, Artificial Sequence
  Synthetic
agggtactgaugtgtgtcccut

SEQ ID NO: 48994 - DNA, 25 bp, Artificial Sequence
  Synthetic
gcttctgtaaaucgtcaccagatug

SEQ ID NO: 48995 - DNA, 28 bp, Artificial Sequence
  Synthetic
ccatttttauaggaatctcuggaagcct

SEQ ID NO: 48996 - DNA, 21 bp, Artificial Sequence
  Synthetic
cctcatuccacagccctguag

SEQ ID NO: 48997 - DNA, 21 bp, Artificial Sequence
  Synthetic
gggaguggagtgagugaggag

SEQ ID NO: 48998 - DNA, 21 bp, Artificial Sequence
  Synthetic
tgauccggcacctgttucaag

SEQ ID NO: 48999 - DNA, 22 bp, Artificial Sequence
  Synthetic
ctaucctggtacuggaaagcca

SEQ ID NO: 49000 - DNA, 20 bp, Artificial Sequence
  Synthetic
gcactggugacatgccttug

SEQ ID NO: 49001 - DNA, 20 bp, Artificial Sequence
  Synthetic
actcacgacuggcagagtug

SEQ ID NO: 49002 - DNA, 21 bp, Artificial Sequence
  Synthetic
cgtgcttguctaccacuacgg

SEQ ID NO: 49003 - DNA, 21 bp, Artificial Sequence
  Synthetic
gggtgctucagtcaccttcut

SEQ ID NO: 49004 - DNA, 21 bp, Artificial Sequence
  Synthetic
cctggccugaccctaagaugt

SEQ ID NO: 49005 - DNA, 21 bp, Artificial Sequence
  Synthetic
gggcaccaggaugttgaugat

SEQ ID NO: 49006 - DNA, 22 bp, Artificial Sequence
  Synthetic
cccaaggucacagctaagtcug

SEQ ID NO: 49007 - DNA, 20 bp, Artificial Sequence
  Synthetic
gggcaaacacucagctugga

SEQ ID NO: 49008 - DNA, 20 bp, Artificial Sequence
  Synthetic
cctttcttguggcccctuga

SEQ ID NO: 49009 - DNA, 21 bp, Artificial Sequence
  Synthetic
tctcgaacaugaggtcacugc

SEQ ID NO: 49010 - DNA, 22 bp, Artificial Sequence
  Synthetic
tggtcttggutttcagcccauc

SEQ ID NO: 49011 - DNA, 21 bp, Artificial Sequence
  Synthetic
ggcaatccugtggtccctuac

SEQ ID NO: 49012 - DNA, 21 bp, Artificial Sequence
  Synthetic
gcaggacaagcgcutcatcua

SEQ ID NO: 49013 - DNA, 21 bp, Artificial Sequence
  Synthetic
gatgtccacccucagaccauc

SEQ ID NO: 49014 - DNA, 22 bp, Artificial Sequence
  Synthetic
aggcccagaucgtcaaggauat

SEQ ID NO: 49015 - DNA, 22 bp, Artificial Sequence
  Synthetic
ggaaacugtgtcugcagcagat

SEQ ID NO: 49016 - DNA, 21 bp, Artificial Sequence
  Synthetic
cgtguggaaggtgagcuacac

SEQ ID NO: 49017 - DNA, 26 bp, Artificial Sequence
  Synthetic
tggatctcgaucaggtagctctuaat

SEQ ID NO: 49018 - DNA, 17 bp, Artificial Sequence
  Synthetic
aagguggtgcugcggaa

SEQ ID NO: 49019 - DNA, 20 bp, Artificial Sequence
  Synthetic
cgaagggccautgtgctuct

SEQ ID NO: 49020 - DNA, 17 bp, Artificial Sequence
  Synthetic
gtgguctggaucgcgga

SEQ ID NO: 49021 - DNA, 18 bp, Artificial Sequence
  Synthetic
cggccuccatctccucct

SEQ ID NO: 49022 - DNA, 22 bp, Artificial Sequence
  Synthetic
cggtguggctcttuaacaacct

SEQ ID NO: 49023 - DNA, 28 bp, Artificial Sequence
  Synthetic
cctgtactuaccacaacaaccttatcut

SEQ ID NO: 49024 - DNA, 19 bp, Artificial Sequence
  Synthetic
ggagcgcautgcacaucaa

SEQ ID NO: 49025 - DNA, 25 bp, Artificial Sequence
  Synthetic
gatgttugcccctaaacaucacaat

SEQ ID NO: 49026 - DNA, 23 bp, Artificial Sequence
  Synthetic
cctgaagacaggugcaaagucaa

SEQ ID NO: 49027 - DNA, 24 bp, Artificial Sequence
  Synthetic
cagggtacaucctgtgtcttugag

SEQ ID NO: 49028 - DNA, 20 bp, Artificial Sequence
  Synthetic
ccacgagtugggtccttucg

SEQ ID NO: 49029 - DNA, 28 bp, Artificial Sequence
  Synthetic
ggtgataaaugcacttttgtcatauggt

SEQ ID NO: 49030 - DNA, 22 bp, Artificial Sequence
  Synthetic
caccgagagccacutgtgauag

SEQ ID NO: 49031 - DNA, 31 bp, Artificial Sequence; identical to SEQ ID NO: 36797
  Synthetic

SEQ ID NO: 49032 - DNA, 24 bp, Artificial Sequence
  Synthetic
ggcaatgucaattagcuggaacat

SEQ ID NO: 49033 - DNA, 22 bp, Artificial Sequence
  Synthetic
gtagacctcccugagcacttuc

SEQ ID NO: 49034 - DNA, 21 bp, Artificial Sequence
  Synthetic
acaccaaagcccugcagtuag

SEQ ID NO: 49035 - DNA, 32 bp, Artificial Sequence; identical to SEQ ID NO: 36801
  Synthetic

SEQ ID NO: 49036 - DNA, 27 bp, Artificial Sequence
  Synthetic
cacacaaggauaagccaacagaagaua

SEQ ID NO: 49037 - DNA, 24 bp, Artificial Sequence
  Synthetic
cctcccucagagaaaauctttugt

SEQ ID NO: 49038 - DNA, 22 bp, Artificial Sequence
  Synthetic
ggagggaaugcgaagaaacuct

SEQ ID NO: 49039 - DNA, 25 bp, Artificial Sequence
  Synthetic
cctaaaaaccaguctttccctgcut

SEQ ID NO: 49040 - DNA, 23 bp, Artificial Sequence
  Synthetic
cccucaacaugccagaaagagaa

SEQ ID NO: 49041 - DNA, 33 bp, Artificial Sequence; identical to SEQ ID NO: 36807
  Synthetic

SEQ ID NO: 49042 - DNA, 32 bp, Artificial Sequence; identical to SEQ ID NO: 36808
  Synthetic

SEQ ID NO: 49043 - DNA, 24 bp, Artificial Sequence
  Synthetic
tccagctgcauctctcctacaaua

SEQ ID NO: 49044 - DNA, 20 bp, Artificial Sequence
  Synthetic
agaactgcgcuctcttcucg

SEQ ID NO: 49045 - DNA, 20 bp, Artificial Sequence
  Synthetic
cccctccguacctgctctua

SEQ ID NO: 49046 - DNA, 30 bp, Artificial Sequence; identical to SEQ ID NO: 36812
  Synthetic

SEQ ID NO: 49047 - DNA, 22 bp, Artificial Sequence
  Synthetic
tcauacacggcagccacauaat

SEQ ID NO: 49048 - DNA, 23 bp, Artificial Sequence
  Synthetic
cggttcttccugccatctgauaa

SEQ ID NO: 49049 - DNA, 24 bp, Artificial Sequence
  Synthetic
acugaggaaaaagguaggaaucac

SEQ ID NO: 49050 - DNA, 26 bp, Artificial Sequence
  Synthetic
acaaatgtcgugttcagcaataaugg

SEQ ID NO: 49051 - DNA, 21 bp, Artificial Sequence
  Synthetic
aggcagutggguacacaacat

SEQ ID NO: 49052 - DNA, 23 bp, Artificial Sequence
  Synthetic
ctctggaguccttttgguaccat

SEQ ID NO: 49053 - DNA, 21 bp, Artificial Sequence
  Synthetic
ggagcatucacgttccactug

SEQ ID NO: 49054 - DNA, 24 bp, Artificial Sequence
  Synthetic
accttauccaaagagctgtaugcc

SEQ ID NO: 49055 - DNA, 24 bp, Artificial Sequence
  Synthetic
gtcatcccugaggucagaaacaaa

SEQ ID NO: 49056 - DNA, 21 bp, Artificial Sequence
  Synthetic
gcgcttgtaugagagggacua

SEQ ID NO: 49057 - DNA, 28 bp, Artificial Sequence
  Synthetic
aatgtctcgaugattgaggttuaagagg

SEQ ID NO: 49058 - DNA, 17 bp, Artificial Sequence
  Synthetic
tcuggcccgcacatcug

SEQ ID NO: 49059 - DNA, 17 bp, Artificial Sequence
  Synthetic
tgaacgugcggugggat

SEQ ID NO: 49060 - DNA, 31 bp, Artificial Sequence; identical to SEQ ID NO: 36826
  Synthetic

SEQ ID NO: 49061 - DNA, 27 bp, Artificial Sequence
  Synthetic
caggtggaaaauctcacaucacaaaat

SEQ ID NO: 49062 - DNA, 24 bp, Artificial Sequence
  Synthetic
cctttctgtcuggaggccatatua

SEQ ID NO: 49063 - DNA, 24 bp, Artificial Sequence
  Synthetic
ggagaagcagcaucttccagaaua

SEQ ID NO: 49064 - DNA, 23 bp, Artificial Sequence
  Synthetic
catgaacccacutcctgacagua

SEQ ID NO: 49065 - DNA, 23 bp, Artificial Sequence
  Synthetic
cgcggtagcaguagaagatgaug

SEQ ID NO: 49066 - DNA, 21 bp, Artificial Sequence
  Synthetic
ggaagaugaccgctcugacat

SEQ ID NO: 49067 - DNA, 23 bp, Artificial Sequence
  Synthetic
ggaaagatctugactgccacugt

SEQ ID NO: 49068 - DNA, 23 bp, Artificial Sequence
  Synthetic
ggaaacaauactggctgaucacc

SEQ ID NO: 49069 - DNA, 22 bp, Artificial Sequence
  Synthetic
agcaggtuaggtcgttctucac

SEQ ID NO: 49070 - DNA, 28 bp, Artificial Sequence
  Synthetic
ttgtgaaaauaaaaaggcagctggaaut

SEQ ID NO: 49071 - DNA, 22 bp, Artificial Sequence
  Synthetic
aatgatgctgguccacaccuac

SEQ ID NO: 49072 - DNA, 22 bp, Artificial Sequence
  Synthetic
atggtgcccuttggatctctut

SEQ ID NO: 49073 - DNA, 21 bp, Artificial Sequence
  Synthetic
ccugcccuagaagagctatut

SEQ ID NO: 49074 - DNA, 17 bp, Artificial Sequence
  Synthetic
gggcuggatggcguaag

SEQ ID NO: 49075 - DNA, 19 bp, Artificial Sequence
  Synthetic
cggtucaccactgtcucgt

SEQ ID NO: 49076 - DNA, 32 bp, Artificial Sequence; identical to SEQ ID NO: 36842
  Synthetic

SEQ ID NO: 49077 - DNA, 24 bp, Artificial Sequence
  Synthetic
gcacaaacaucctgctacttugag

SEQ ID NO: 49078 - DNA, 26 bp, Artificial Sequence
  Synthetic
ccccttgggautagtatctatctcuc

SEQ ID NO: 49079 - DNA, 26 bp, Artificial Sequence
  Synthetic
agcttcaacaauttactctcccaugt

SEQ ID NO: 49080 - DNA, 21 bp, Artificial Sequence
  Synthetic
ctcaccccucaggacagttut

SEQ ID NO: 49081 - DNA, 25 bp, Artificial Sequence
  Synthetic
ggttgaggaguttggtgctacatua

SEQ ID NO: 49082 - DNA, 28 bp, Artificial Sequence
  Synthetic
ttaatacagacttugctaccaggactug

SEQ ID NO: 49083 - DNA, 20 bp, Artificial Sequence
  Synthetic
tttgcucagaggcugcagaa

SEQ ID NO: 49084 - DNA, 25 bp, Artificial Sequence
  Synthetic
gcaagatgaggagaugcttgaacuc

SEQ ID NO: 49085 - DNA, 24 bp, Artificial Sequence
  Synthetic
acagaataaaggagguaggctgua

SEQ ID NO: 49086 - DNA, 27 bp, Artificial Sequence
  Synthetic
gggttgguaggattctattactuacct

SEQ ID NO: 49087 - DNA, 26 bp, Artificial Sequence
  Synthetic
gcttgttcacacacucagctgattua

SEQ ID NO: 49088 - DNA, 25 bp, Artificial Sequence
  Synthetic
gttaaagcttgcuccttcatgtuct

SEQ ID NO: 49089 - DNA, 27 bp, Artificial Sequence
  Synthetic
acagaagtauaagaatggctgucacac

SEQ ID NO: 49090 - DNA, 26 bp, Artificial Sequence
  Synthetic
ggtattgaatttcuttggaccaggug

SEQ ID NO: 49091 - DNA, 27 bp, Artificial Sequence
  Synthetic
aaagattgtaugaggtcctgtccuagt

SEQ ID NO: 49092 - DNA, 25 bp, Artificial Sequence
  Synthetic
tcacacattcugcctcctaaacaut

SEQ ID NO: 49093 - DNA, 28 bp, Artificial Sequence
  Synthetic
cagaaggcaaguataagtcttaagugct

SEQ ID NO: 49094 - DNA, 24 bp, Artificial Sequence
  Synthetic
gaaaaaggcugcttttcagtgugt

SEQ ID NO: 49095 - DNA, 24 bp, Artificial Sequence
  Synthetic
caccctcctaugacagtgtcacua

SEQ ID NO: 49096 - DNA, 20 bp, Artificial Sequence
  Synthetic
gauaaccauggccgacacct

SEQ ID NO: 49097 - DNA, 22 bp, Artificial Sequence
  Synthetic
cgcatccatugcatggacatuc

SEQ ID NO: 49098 - DNA, 27 bp, Artificial Sequence
  Synthetic
gacaggaccgaauactcaataaacuga

SEQ ID NO: 49099 - DNA, 21 bp, Artificial Sequence
  Synthetic
gtgggcaucctcttctucacc

SEQ ID NO: 49100 - DNA, 20 bp, Artificial Sequence
  Synthetic
ctgtuggcgaaggtcuggaa

SEQ ID NO: 49101 - DNA, 20 bp, Artificial Sequence
  Synthetic
gcatccucagactgauccga

SEQ ID NO: 49102 - DNA, 23 bp, Artificial Sequence
  Synthetic
ccacaaagagcaggutgatctug

SEQ ID NO: 49103 - DNA, 25 bp, Artificial Sequence
  Synthetic
actttccattugcctctccttucag

SEQ ID NO: 49104 - DNA, 17 bp, Artificial Sequence
  Synthetic
ccctcaauccccuggca

SEQ ID NO: 49105 - DNA, 23 bp, Artificial Sequence
  Synthetic
tctccctgtgugatttctcccut

SEQ ID NO: 49106 - DNA, 21 bp, Artificial Sequence
  Synthetic
gaagucccttctcuccaggac

SEQ ID NO: 49107 - DNA, 22 bp, Artificial Sequence
  Synthetic
agagggagacutgccttugaac

SEQ ID NO: 49108 - DNA, 20 bp, Artificial Sequence
  Synthetic
gaaggcagccaccuctctua

SEQ ID NO: 49109 - DNA, 23 bp, Artificial Sequence
  Synthetic
atcctccccauttctacttugcc

SEQ ID NO: 49110 - DNA, 23 bp, Artificial Sequence
  Synthetic
ccagtttcugacctgacttucca

SEQ ID NO: 49111 - DNA, 21 bp, Artificial Sequence
  Synthetic
caagaccugctaccacaucgt

SEQ ID NO: 49112 - DNA, 20 bp, Artificial Sequence
  Synthetic
tctggguggaactgaggcua

SEQ ID NO: 49113 - DNA, 21 bp, Artificial Sequence
  Synthetic
ctacucagcccacacucacac

SEQ ID NO: 49114 - DNA, 21 bp, Artificial Sequence
  Synthetic
gggaagcugcttugagagagg

SEQ ID NO: 49115 - DNA, 20 bp, Artificial Sequence
  Synthetic
ggccgagucagacacagaug

SEQ ID NO: 49116 - DNA, 19 bp, Artificial Sequence
  Synthetic
gcaccttcuccgtctcugg

SEQ ID NO: 49117 - DNA, 19 bp, Artificial Sequence
  Synthetic
caaccucacagccccugat

SEQ ID NO: 49118 - DNA, 28 bp, Artificial Sequence
  Synthetic
ggtagatggatugatagaagggtaagua

SEQ ID NO: 49119 - DNA, 22 bp, Artificial Sequence
  Synthetic
tctguggagagtggaucgagac

SEQ ID NO: 49120 - DNA, 21 bp, Artificial Sequence
  Synthetic
gttctugccaaagagcugcat

SEQ ID NO: 49121 - DNA, 20 bp, Artificial Sequence
  Synthetic
ccagagcccutcacaagguc

SEQ ID NO: 49122 - DNA, 22 bp, Artificial Sequence
  Synthetic
gctccaugaggctaaggaugac

SEQ ID NO: 49123 - DNA, 20 bp, Artificial Sequence
  Synthetic
ggccagggaguctttccauc

SEQ ID NO: 49124 - DNA, 21 bp, Artificial Sequence
  Synthetic
cgccaugaagagtgtgtugag

SEQ ID NO: 49125 - DNA, 27 bp, Artificial Sequence
  Synthetic
acagaatcaaacuaactcattggcugt

SEQ ID NO: 49126 - DNA, 23 bp, Artificial Sequence
  Synthetic
cgtgtatutttggactuggcact

SEQ ID NO: 49127 - DNA, 24 bp, Artificial Sequence
  Synthetic
caaaaagaacagcacugtggacug

SEQ ID NO: 49128 - DNA, 23 bp, Artificial Sequence
  Synthetic
cgctgtgcugttttcatcatcug

SEQ ID NO: 49129 - DNA, 21 bp, Artificial Sequence
  Synthetic
aagagcacaugtcatggucgt

SEQ ID NO: 49130 - DNA, 22 bp, Artificial Sequence
  Synthetic
cctacagtcaggugagggctua

SEQ ID NO: 49131 - DNA, 26 bp, Artificial Sequence
  Synthetic
tcttcttcatgcutgtcatcttccug

SEQ ID NO: 49132 - DNA, 20 bp, Artificial Sequence
  Synthetic
acttgugtagccuggaccct

SEQ ID NO: 49133 - DNA, 22 bp, Artificial Sequence
  Synthetic
aacaaagtcuctgtgtguggct

SEQ ID NO: 49134 - DNA, 22 bp, Artificial Sequence
  Synthetic
ggtctgctgguctcacaaaguc

SEQ ID NO: 49135 - DNA, 22 bp, Artificial Sequence
  Synthetic
cagctcttcaugggcaaccuaa

SEQ ID NO: 49136 - DNA, 21 bp, Artificial Sequence
  Synthetic
ggcatatcccuctagcctugg

SEQ ID NO: 49137 - DNA, 26 bp, Artificial Sequence
  Synthetic
gttgtcattgtcucgtgtgtgaatut

SEQ ID NO: 49138 - DNA, 23 bp, Artificial Sequence
  Synthetic
aggcauagcacagcauagcaaat

SEQ ID NO: 49139 - DNA, 21 bp, Artificial Sequence
  Synthetic
gctcaggccucccuaagaaac

SEQ ID NO: 49140 - DNA, 24 bp, Artificial Sequence
  Synthetic
ggtacucagcaggtattaacugca

SEQ ID NO: 49141 - DNA, 22 bp, Artificial Sequence
  Synthetic
agggcctaaugctactgtcugt

SEQ ID NO: 49142 - DNA, 20 bp, Artificial Sequence
  Synthetic
gctctccugcaaggtggtug

SEQ ID NO: 49143 - DNA, 22 bp, Artificial Sequence
  Synthetic
tctctguccctgggcauagaat

SEQ ID NO: 49144 - DNA, 18 bp, Artificial Sequence
  Synthetic
agcacuccccucccagaa

SEQ ID NO: 49145 - DNA, 23 bp, Artificial Sequence
  Synthetic
ccatcuagagggattcagugggt

SEQ ID NO: 49146 - DNA, 21 bp, Artificial Sequence
  Synthetic
gtcctcataggugcctgtguc

SEQ ID NO: 49147 - DNA, 24 bp, Artificial Sequence
  Synthetic
ggatagcucctcattaucaggcat

SEQ ID NO: 49148 - DNA, 18 bp, Artificial Sequence
  Synthetic
gtcagccuaccccacucc

SEQ ID NO: 49149 - DNA, 20 bp, Artificial Sequence
  Synthetic
ggtguggccccacctttuaa

SEQ ID NO: 49150 - DNA, 22 bp, Artificial Sequence
  Synthetic
cttcttgggcuctggcttttug

SEQ ID NO: 49151 - DNA, 23 bp, Artificial Sequence
  Synthetic
aatagccccuaagcctagccaua

SEQ ID NO: 49152 - DNA, 22 bp, Artificial Sequence
  Synthetic
actgaaauaacggacgugcaca

SEQ ID NO: 49153 - DNA, 20 bp, Artificial Sequence
  Synthetic
agatggcugacgaccgttuc

SEQ ID NO: 49154 - DNA, 23 bp, Artificial Sequence
  Synthetic
accauagacaaaagggugacagg

SEQ ID NO: 49155 - DNA, 22 bp, Artificial Sequence
  Synthetic
ctgaccttucaaccctctcuga

SEQ ID NO: 49156 - DNA, 24 bp, Artificial Sequence
  Synthetic
catcactaucccaaggagctucag

SEQ ID NO: 49157 - DNA, 22 bp, Artificial Sequence
  Synthetic
tgtgcacacaguggaaaucagt

SEQ ID NO: 49158 - DNA, 20 bp, Artificial Sequence
  Synthetic
ccugagaggaccccagtuga

SEQ ID NO: 49159 - DNA, 23 bp, Artificial Sequence
  Synthetic
tgtctctccaucttcccatccut

SEQ ID NO: 49160 - DNA, 18 bp, Artificial Sequence
  Synthetic
tgctgggugagggaggua

SEQ ID NO: 49161 - DNA, 20 bp, Artificial Sequence
  Synthetic
cctgaggucagaggucacag

SEQ ID NO: 49162 - DNA, 22 bp, Artificial Sequence
  Synthetic
ggcaggcuggaagatggttaug

SEQ ID NO: 49163 - DNA, 29 bp, Artificial Sequence
  Synthetic
cctctgattacugactctgtcctatauct

SEQ ID NO: 49164 - DNA, 21 bp, Artificial Sequence
  Synthetic
ccactguccacagaccctgua

SEQ ID NO: 49165 - DNA, 23 bp, Artificial Sequence
  Synthetic
cacaaaggagagauggtgagugt

SEQ ID NO: 49166 - DNA, 22 bp, Artificial Sequence
  Synthetic
cccagugccctaatatcugacc

SEQ ID NO: 49167 - DNA, 24 bp, Artificial Sequence
  Synthetic
gattctcttuggtccctcacugac

SEQ ID NO: 49168 - DNA, 23 bp, Artificial Sequence
  Synthetic
cactuaagaggauccccaggaua

SEQ ID NO: 49169 - DNA, 22 bp, Artificial Sequence
  Synthetic
cctgatcuggtcctgacugaat

SEQ ID NO: 49170 - DNA, 23 bp, Artificial Sequence
  Synthetic
tctgggaguttgagctcucagat

SEQ ID NO: 49171 - DNA, 21 bp, Artificial Sequence
  Synthetic
tcccgacucctctgattccug

SEQ ID NO: 49172 - DNA, 19 bp, Artificial Sequence
  Synthetic
gccccgcaccugaattcua

SEQ ID NO: 49173 - DNA, 22 bp, Artificial Sequence
  Synthetic
ctttgtctgguccccactgtut

SEQ ID NO: 49174 - DNA, 22 bp, Artificial Sequence
  Synthetic
caccctggauggtgacatuagg

SEQ ID NO: 49175 - DNA, 21 bp, Artificial Sequence
  Synthetic
ccactgatucccctcacugat

SEQ ID NO: 49176 - DNA, 21 bp, Artificial Sequence
  Synthetic
ccccaucctaagtccucacga

SEQ ID NO: 49177 - DNA, 21 bp, Artificial Sequence
  Synthetic
gggttcccaagucactctcug

SEQ ID NO: 49178 - DNA, 22 bp, Artificial Sequence
  Synthetic
cctcccaggacuctcaucagaa

SEQ ID NO: 49179 - DNA, 23 bp, Artificial Sequence
  Synthetic
tccgatgccucttttccucaaag

SEQ ID NO: 49180 - DNA, 20 bp, Artificial Sequence
  Synthetic
cccaagaguggccccttaug

SEQ ID NO: 49181 - DNA, 22 bp, Artificial Sequence
  Synthetic
gccugactacugagcagagaag

SEQ ID NO: 49182 - DNA, 24 bp, Artificial Sequence
  Synthetic
gtcatgagggugggtaaactaugg

SEQ ID NO: 49183 - DNA, 21 bp, Artificial Sequence
  Synthetic
caaggaaucccactgaccuct

SEQ ID NO: 49184 - DNA, 22 bp, Artificial Sequence
  Synthetic
catggcattuggaaacaggcut

SEQ ID NO: 49185 - DNA, 22 bp, Artificial Sequence
  Synthetic
gggcctgaaauatgaggagugg

SEQ ID NO: 49186 - DNA, 21 bp, Artificial Sequence
  Synthetic
ccugagagggaagagctcugt

SEQ ID NO: 49187 - DNA, 23 bp, Artificial Sequence
  Synthetic
gttctctcatgucgtcctgtguc

SEQ ID NO: 49188 - DNA, 23 bp, Artificial Sequence
  Synthetic
cccuggaggaagagaaagtucag

SEQ ID NO: 49189 - DNA, 24 bp, Artificial Sequence
  Synthetic
gtcatctccugcaatgaggaugag

SEQ ID NO: 49190 - DNA, 20 bp, Artificial Sequence
  Synthetic
cagagaaggccuggctcauc

SEQ ID NO: 49191 - DNA, 22 bp, Artificial Sequence
  Synthetic
gtgaccaguactgcctcagtut

SEQ ID NO: 49192 - DNA, 25 bp, Artificial Sequence
  Synthetic
caatacatgugagagccaccttcut

SEQ ID NO: 49193 - DNA, 23 bp, Artificial Sequence
  Synthetic
cacactagagguggtgtgcauat

SEQ ID NO: 49194 - DNA, 23 bp, Artificial Sequence
  Synthetic
gggatgagaugtcaagtcagucc

SEQ ID NO: 49195 - DNA, 26 bp, Artificial Sequence
  Synthetic
cctataacccuctgtgatccugagat

SEQ ID NO: 49196 - DNA, 20 bp, Artificial Sequence
  Synthetic
catcuctgcccugcaggaaa

SEQ ID NO: 49197 - DNA, 18 bp, Artificial Sequence
  Synthetic
cuggccaggagagugagg

SEQ ID NO: 49198 - DNA, 22 bp, Artificial Sequence
  Synthetic
cugcaggaguggaagagagaat

SEQ ID NO: 49199 - DNA, 20 bp, Artificial Sequence
  Synthetic
gacctctugctgtcccucag

SEQ ID NO: 49200 - DNA, 22 bp, Artificial Sequence
  Synthetic
acagaacctauggagcctcaug

SEQ ID NO: 49201 - DNA, 26 bp, Artificial Sequence
  Synthetic
gttcctagcaguttgtcttcatcuct

SEQ ID NO: 49202 - DNA, 21 bp, Artificial Sequence
  Synthetic
cacggucacccugaaaacaag

SEQ ID NO: 49203 - DNA, 22 bp, Artificial Sequence
  Synthetic
gccatgaugtttcaaugggcaa

SEQ ID NO: 49204 - DNA, 23 bp, Artificial Sequence
  Synthetic
acccugagaccucagaaaagagt

SEQ ID NO: 49205 - DNA, 21 bp, Artificial Sequence
  Synthetic
gaaggtaaagucccccaccug

SEQ ID NO: 49206 - DNA, 21 bp, Artificial Sequence
  Synthetic
gtctacacgugtgcctcaugt

SEQ ID NO: 49207 - DNA, 23 bp, Artificial Sequence
  Synthetic
acatccaaccagugatctgtucc

SEQ ID NO: 49208 - DNA, 23 bp, Artificial Sequence
  Synthetic
actctctcggaugctgtgacuat

SEQ ID NO: 49209 - DNA, 23 bp, Artificial Sequence
  Synthetic
ccttaggcucacagggacuagag

SEQ ID NO: 49210 - DNA, 22 bp, Artificial Sequence
  Synthetic
ccggtcacccugtggaaaauag

SEQ ID NO: 49211 - DNA, 26 bp, Artificial Sequence
  Synthetic
ccatcttacccucacctcttatcuga

SEQ ID NO: 49212 - DNA, 21 bp, Artificial Sequence
  Synthetic
cgaaacccutcaatgcccuga

SEQ ID NO: 49213 - DNA, 22 bp, Artificial Sequence
  Synthetic
ctcagcaagcutatctcugcca

SEQ ID NO: 49214 - DNA, 21 bp, Artificial Sequence
  Synthetic
gggaagugggagttaguggaa

SEQ ID NO: 49215 - DNA, 20 bp, Artificial Sequence
  Synthetic
gggaccugagggctcctaut

SEQ ID NO: 49216 - DNA, 23 bp, Artificial Sequence
  Synthetic
gagggtttagcautacagggtug

SEQ ID NO: 49217 - DNA, 26 bp, Artificial Sequence
  Synthetic
caaaatatugggagggtctgtcucag

SEQ ID NO: 49218 - DNA, 21 bp, Artificial Sequence
  Synthetic
gcagggaguggatggaugaac

SEQ ID NO: 49219 - DNA, 20 bp, Artificial Sequence
  Synthetic
tcatggcggguaagggagua

SEQ ID NO: 49220 - DNA, 22 bp, Artificial Sequence
  Synthetic
ctcgaagcaagcagutcucaag

SEQ ID NO: 49221 - DNA, 22 bp, Artificial Sequence
  Synthetic
ccgggugaatcaatgugggaat

SEQ ID NO: 49222 - DNA, 23 bp, Artificial Sequence
  Synthetic
gccctguggatggaaggauaaga

SEQ ID NO: 49223 - DNA, 22 bp, Artificial Sequence
  Synthetic
agggcctauctatgggactugg

SEQ ID NO: 49224 - DNA, 22 bp, Artificial Sequence
  Synthetic
ctgtggaaucacagcccagaua

SEQ ID NO: 49225 - DNA, 22 bp, Artificial Sequence
  Synthetic
gattttgggcucctaggugact

SEQ ID NO: 49226 - DNA, 22 bp, Artificial Sequence
  Synthetic
ggccccugaatguagagaaagt

SEQ ID NO: 49227 - DNA, 23 bp, Artificial Sequence
  Synthetic
tctagcccugtctgtccataucc

SEQ ID NO: 49228 - DNA, 25 bp, Artificial Sequence
  Synthetic
aaaagaagaggucagagctgagtug

SEQ ID NO: 49229 - DNA, 21 bp, Artificial Sequence
  Synthetic
gagttugggaccccttgtcug

SEQ ID NO: 49230 - DNA, 23 bp, Artificial Sequence
  Synthetic
ggagcaguggttgatgatugagg

SEQ ID NO: 49231 - DNA, 24 bp, Artificial Sequence
  Synthetic
ctgacttgaugatgtcccagtuct

SEQ ID NO: 49232 - DNA, 25 bp, Artificial Sequence
  Synthetic
aataugagccaagaactaugaagcc

SEQ ID NO: 49233 - DNA, 22 bp, Artificial Sequence
  Synthetic
attcccctgutcattcccugac

SEQ ID NO: 49234 - DNA, 21 bp, Artificial Sequence
  Synthetic
ggucacaagggccagaguaac

SEQ ID NO: 49235 - DNA, 26 bp, Artificial Sequence
  Synthetic
caccttatacttugtctcctccauca

SEQ ID NO: 49236 - DNA, 18 bp, Artificial Sequence
  Synthetic
ctgcacaggguctggugt

SEQ ID NO: 49237 - DNA, 20 bp, Artificial Sequence
  Synthetic
cagtgcccacgutgacatuc

SEQ ID NO: 49238 - DNA, 20 bp, Artificial Sequence
  Synthetic
ggagagcccugcaaauggag

SEQ ID NO: 49239 - DNA, 21 bp, Artificial Sequence
  Synthetic
cccttcctgucctgacctcut

SEQ ID NO: 49240 - DNA, 22 bp, Artificial Sequence
  Synthetic
ggcccuaggaagggtaaucagt

SEQ ID NO: 49241 - DNA, 22 bp, Artificial Sequence
  Synthetic
ccctcaucgagaggugaacaga

SEQ ID NO: 49242 - DNA, 25 bp, Artificial Sequence
  Synthetic
gaacccucagaccccutatattcua

SEQ ID NO: 49243 - DNA, 25 bp, Artificial Sequence
  Synthetic
cttaatgtggugatgttgggaaugg

SEQ ID NO: 49244 - DNA, 22 bp, Artificial Sequence
  Synthetic
ttccccaucagcctactcctua

SEQ ID NO: 49245 - DNA, 24 bp, Artificial Sequence
  Synthetic
gttctgacaugtccttcctuccag

SEQ ID NO: 49246 - DNA, 22 bp, Artificial Sequence
  Synthetic
gccucagggagaggtagaauct

SEQ ID NO: 49247 - DNA, 25 bp, Artificial Sequence
  Synthetic
tcagtaacttgutccccttccuaca

SEQ ID NO: 49248 - DNA, 27 bp, Artificial Sequence
  Synthetic
acttgatuaaaaagctgtcuccacaga

SEQ ID NO: 49249 - DNA, 25 bp, Artificial Sequence
  Synthetic
cctcgatcttucattcctcctucag

SEQ ID NO: 49250 - DNA, 22 bp, Artificial Sequence
  Synthetic
cccaatgguccctaacttccuc

SEQ ID NO: 49251 - DNA, 23 bp, Artificial Sequence
  Synthetic
ccctgattccugagctttctcuc

SEQ ID NO: 49252 - DNA, 21 bp, Artificial Sequence
  Synthetic
actcgcacugagtagcugact

SEQ ID NO: 49253 - DNA, 21 bp, Artificial Sequence
  Synthetic
gtgaaggtauggctcccugac

SEQ ID NO: 49254 - DNA, 20 bp, Artificial Sequence
  Synthetic
gctaatgcggugtggcuagt

SEQ ID NO: 49255 - DNA, 21 bp, Artificial Sequence
  Synthetic
cagagttugctagcccuggag

SEQ ID NO: 49256 - DNA, 21 bp, Artificial Sequence
  Synthetic
gggtcugaaagagcaauggag

SEQ ID NO: 49257 - DNA, 21 bp, Artificial Sequence
  Synthetic
catgccagcauttccctcuga

SEQ ID NO: 49258 - DNA, 21 bp, Artificial Sequence
  Synthetic
cacaagccucctgcagtacuc

SEQ ID NO: 49259 - DNA, 24 bp, Artificial Sequence
  Synthetic
ccacctacccugacttctctctua

SEQ ID NO: 49260 - DNA, 18 bp, Artificial Sequence
  Synthetic
cgacaccucccccacuca

SEQ ID NO: 49261 - DNA, 23 bp, Artificial Sequence
  Synthetic
ggtctgacccugttatctugcag

SEQ ID NO: 49262 - DNA, 21 bp, Artificial Sequence
  Synthetic
tgaagaaagugcccagcctuc

SEQ ID NO: 49263 - DNA, 22 bp, Artificial Sequence
  Synthetic
ctgtagagucctgagtcugcaa

SEQ ID NO: 49264 - DNA, 20 bp, Artificial Sequence
  Synthetic
ggtcagaggcuggcagaaut

SEQ ID NO: 49265 - DNA, 24 bp, Artificial Sequence
  Synthetic
ctgggcaagauaaagtgacctcut

SEQ ID NO: 49266 - DNA, 21 bp, Artificial Sequence
  Synthetic
ggacctugtagccagucacag

SEQ ID NO: 49267 - DNA, 24 bp, Artificial Sequence
  Synthetic
tgattccatccuatgtgctccuga

SEQ ID NO: 49268 - DNA, 20 bp, Artificial Sequence
  Synthetic
tcactcctgcucggtcctua

SEQ ID NO: 49269 - DNA, 23 bp, Artificial Sequence
  Synthetic
gatgaccccaaaugaagtgucca

SEQ ID NO: 49270 - DNA, 22 bp, Artificial Sequence
  Synthetic
tggtcagccacauggagaatug

SEQ ID NO: 49271 - DNA, 22 bp, Artificial Sequence
  Synthetic
gatacccguaaccctcacccua

SEQ ID NO: 49272 - DNA, 19 bp, Artificial Sequence
  Synthetic
ggaccucgcggaaatugct

SEQ ID NO: 49273 - DNA, 20 bp, Artificial Sequence
  Synthetic
accatcccaagucccaguga

SEQ ID NO: 49274 - DNA, 23 bp, Artificial Sequence
  Synthetic
tcagtgggaucatggacugaaac

SEQ ID NO: 49275 - DNA, 19 bp, Artificial Sequence
  Synthetic
gggccacaccaccuatucc

SEQ ID NO: 49276 - DNA, 21 bp, Artificial Sequence
  Synthetic
tgtcccuggacgactgtacuc

SEQ ID NO: 49277 - DNA, 20 bp, Artificial Sequence
  Synthetic
ggtgctgaugcgtggctuat

SEQ ID NO: 49278 - DNA, 20 bp, Artificial Sequence
  Synthetic
cctgaccuccaggacccuat

SEQ ID NO: 49279 - DNA, 21 bp, Artificial Sequence
  Synthetic
gcctctgccugtatgggaaug

SEQ ID NO: 49280 - DNA, 21 bp, Artificial Sequence
  Synthetic
ccccacaccacutctugacac

SEQ ID NO: 49281 - DNA, 21 bp, Artificial Sequence
  Synthetic
ggatgcugggacctggauact

SEQ ID NO: 49282 - DNA, 27 bp, Artificial Sequence
  Synthetic
acaaggauactgctctaugaacaagga

SEQ ID NO: 49283 - DNA, 22 bp, Artificial Sequence
  Synthetic
aaaacgctccacuttggtccua

SEQ ID NO: 49284 - DNA, 23 bp, Artificial Sequence
  Synthetic
ggaccacuguaaacagggaggaa

SEQ ID NO: 49285 - DNA, 19 bp, Artificial Sequence
  Synthetic
gcaguaccgggacagucac

SEQ ID NO: 49286 - DNA, 19 bp, Artificial Sequence
  Synthetic
ccacccuccaagaucagca

SEQ ID NO: 49287 - DNA, 17 bp, Artificial Sequence
  Synthetic
cgccgtcugcactcgut

SEQ ID NO: 49288 - DNA, 20 bp, Artificial Sequence
  Synthetic
ccaggacucagctggagtug

SEQ ID NO: 49289 - DNA, 22 bp, Artificial Sequence
  Synthetic
ccgcatcgacuatgatgguaag

SEQ ID NO: 49290 - DNA, 22 bp, Artificial Sequence
  Synthetic
aatctgagacugccctcctgua

SEQ ID NO: 49291 - DNA, 20 bp, Artificial Sequence
  Synthetic
ctacccuggcctctguaacg

SEQ ID NO: 49292 - DNA, 22 bp, Artificial Sequence
  Synthetic
tccacctcaucgatcatcucct

SEQ ID NO: 49293 - DNA, 20 bp, Artificial Sequence
  Synthetic
ctgctgagcccugactacug

SEQ ID NO: 49294 - DNA, 19 bp, Artificial Sequence
  Synthetic
gctacuaaccccgcacuct

SEQ ID NO: 49295 - DNA, 20 bp, Artificial Sequence
  Synthetic
gcuggaggatacuacacgca

SEQ ID NO: 49296 - DNA, 21 bp, Artificial Sequence
  Synthetic
tgccggtttucccaacttcua

SEQ ID NO: 49297 - DNA, 20 bp, Artificial Sequence
  Synthetic
aaccggcgutgaggagauac

SEQ ID NO: 49298 - DNA, 27 bp, Artificial Sequence
  Synthetic
gctcttcuaaattgtgtgucccaaaat

SEQ ID NO: 49299 - DNA, 33 bp, Artificial Sequence; identical to SEQ ID NO: 37065
  Synthetic

SEQ ID NO: 49300 - DNA, 24 bp, Artificial Sequence
  Synthetic
ccataactuaaggtgccttugggt

SEQ ID NO: 49301 - DNA, 26 bp, Artificial Sequence
  Synthetic
cacuattatcuagcccaaggcacaaa

SEQ ID NO: 49302 - DNA, 29 bp, Artificial Sequence
  Synthetic
cttgaggaaaacucatctctggtaatugt

SEQ ID NO: 49303 - DNA, 28 bp, Artificial Sequence
  Synthetic
gggataaagtggautacctggatgatut

SEQ ID NO: 49304 - DNA, 28 bp, Artificial Sequence
  Synthetic
ggcacatgtugaatattgcataugaagg

SEQ ID NO: 49305 - DNA, 28 bp, Artificial Sequence
  Synthetic
aaccatctagutaagcaacatucacaga

SEQ ID NO: 49306 - DNA, 27 bp, Artificial Sequence
  Synthetic
caaaatgaccuaaaaagctggaagugt

SEQ ID NO: 49307 - DNA, 28 bp, Artificial Sequence
  Synthetic
gccagggtttauctttgatgttctcuaa

SEQ ID NO: 49308 - DNA, 28 bp, Artificial Sequence
  Synthetic
tcaatttcaatgcutaaccagtttugct

SEQ ID NO: 49309 - DNA, 28 bp, Artificial Sequence
  Synthetic
gctgaagacacacaguattttgtaaugt

SEQ ID NO: 49310 - DNA, 25 bp, Artificial Sequence
  Synthetic
tcagatcagauccagactgugaaga

SEQ ID NO: 49311 - DNA, 28 bp, Artificial Sequence
  Synthetic
ccaaattagcauacctgaagtcctaugt

SEQ ID NO: 49312 - DNA, 27 bp, Artificial Sequence
  Synthetic
cagttataagccauctcatcccaucat

SEQ ID NO: 49313 - DNA, 19 bp, Artificial Sequence
  Synthetic
caaagcgcacuagtuggca

SEQ ID NO: 49314 - DNA, 21 bp, Artificial Sequence
  Synthetic
aattgtgcautcccgugcaag

SEQ ID NO: 49315 - DNA, 24 bp, Artificial Sequence
  Synthetic
tctgaggcccautgtgaaaactut

SEQ ID NO: 49316 - DNA, 18 bp, Artificial Sequence
  Synthetic
gcatggucgcagucacga

SEQ ID NO: 49317 - DNA, 28 bp, Artificial Sequence
  Synthetic
aaaggttttatagucttggcctgttuct

SEQ ID NO: 49318 - DNA, 29 bp, Artificial Sequence
  Synthetic
gaccagtcttgauactaacaaatacugaa

SEQ ID NO: 49319 - DNA, 17 bp, Artificial Sequence
  Synthetic
ggccguggtcguggaat

SEQ ID NO: 49320 - DNA, 24 bp, Artificial Sequence
  Synthetic
gggaggtcacuttataagggtcug

SEQ ID NO: 49321 - DNA, 24 bp, Artificial Sequence
  Synthetic
caggtagtacugtgggtacucgaa

SEQ ID NO: 49322 - DNA, 18 bp, Artificial Sequence
  Synthetic
gcgcacgccuctcaacua

SEQ ID NO: 49323 - DNA, 19 bp, Artificial Sequence
  Synthetic
tctcccagaccccuccaug

SEQ ID NO: 49324 - DNA, 22 bp, Artificial Sequence
  Synthetic
tgtaagcccaugagcaactucc

SEQ ID NO: 49325 - DNA, 23 bp, Artificial Sequence
  Synthetic
gaaccagacacuactgggttuga

SEQ ID NO: 49326 - DNA, 21 bp, Artificial Sequence
  Synthetic
ttcgtgguccacttcaccauc

SEQ ID NO: 49327 - DNA, 19 bp, Artificial Sequence
  Synthetic
gtccagaccauggctccuc

SEQ ID NO: 49328 - DNA, 24 bp, Artificial Sequence
  Synthetic
gcautctacatctucacccaccag

SEQ ID NO: 49329 - DNA, 21 bp, Artificial Sequence
  Synthetic
ggaagtagcutgtcctuggca

SEQ ID NO: 49330 - DNA, 19 bp, Artificial Sequence
  Synthetic
cuaccgtguccaagacgga

SEQ ID NO: 49331 - DNA, 18 bp, Artificial Sequence
  Synthetic
tcucaggctgucccaggt

SEQ ID NO: 49332 - DNA, 28 bp, Artificial Sequence
  Synthetic
cacaacaaaagtgcuctagttctctcua

SEQ ID NO: 49333 - DNA, 27 bp, Artificial Sequence
  Synthetic
ttttgtttttcaaaccucctgcttcuc

SEQ ID NO: 49334 - DNA, 20 bp, Artificial Sequence
  Synthetic
cctccaggacutgcaucgaa

SEQ ID NO: 49335 - DNA, 26 bp, Artificial Sequence
  Synthetic
agatttgcgtuagagtttttgtuggg

SEQ ID NO: 49336 - DNA, 20 bp, Artificial Sequence
  Synthetic
cggtugcccggtgaatttut

SEQ ID NO: 49337 - DNA, 21 bp, Artificial Sequence
  Synthetic
cggcctguactcggttuacac

SEQ ID NO: 49338 - DNA, 19 bp, Artificial Sequence
  Synthetic
cgcgtcuagccatggacug

SEQ ID NO: 49339 - DNA, 23 bp, Artificial Sequence
  Synthetic
ctttctacugggctcgtctctut

SEQ ID NO: 49340 - DNA, 18 bp, Artificial Sequence
  Synthetic
ctgcaucctcgcauccgt

SEQ ID NO: 49341 - DNA, 18 bp, Artificial Sequence
  Synthetic
gcctgcagutcgcttgug

SEQ ID NO: 49342 - DNA, 17 bp, Artificial Sequence
  Synthetic
gtguacggcccguacga

SEQ ID NO: 49343 - DNA, 19 bp, Artificial Sequence
  Synthetic
ccccaaguacctgcaguct

SEQ ID NO: 49344 - DNA, 19 bp, Artificial Sequence
  Synthetic
gccggtagutgcccttcuc

SEQ ID NO: 49345 - DNA, 20 bp, Artificial Sequence
  Synthetic
ctgtccggcauctaccagua

SEQ ID NO: 49346 - DNA, 18 bp, Artificial Sequence
  Synthetic
ggctccutgactgugcga

SEQ ID NO: 49347 - DNA, 22 bp, Artificial Sequence
  Synthetic
ccgcagtcuccagaagttugag

SEQ ID NO: 49348 - DNA, 19 bp, Artificial Sequence
  Synthetic
ggagtggagcucagccuct

SEQ ID NO: 49349 - DNA, 18 bp, Artificial Sequence
  Synthetic
ggucgtgctucgggaaac

SEQ ID NO: 49350 - DNA, 31 bp, Artificial Sequence; identical to SEQ ID NO: 37116
  Synthetic

SEQ ID NO: 49351 - DNA, 28 bp, Artificial Sequence
  Synthetic
cccaaaaccuaccagtgtcataaactua

SEQ ID NO: 49352 - DNA, 28 bp, Artificial Sequence
  Synthetic
tggtagccttucagagatttatccguat

SEQ ID NO: 49353 - DNA, 31 bp, Artificial Sequence; identical to SEQ ID NO: 37119
  Synthetic

SEQ ID NO: 49354 - DNA, 21 bp, Artificial Sequence
  Synthetic
cctcatggutgcccatctucc

SEQ ID NO: 49355 - DNA, 19 bp, Artificial Sequence
  Synthetic
gtcctcgugggaggcatuc

SEQ ID NO: 49356 - DNA, 19 bp, Artificial Sequence
  Synthetic
cattggtugcggccatcuc

SEQ ID NO: 49357 - DNA, 19 bp, Artificial Sequence
  Synthetic
gggccutagtcccucagct

SEQ ID NO: 49358 - DNA, 21 bp, Artificial Sequence
  Synthetic
gcattggaggcaucaaggugg

SEQ ID NO: 49359 - DNA, 20 bp, Artificial Sequence
  Synthetic
aacutgttcuccacgacgca

SEQ ID NO: 49360 - DNA, 17 bp, Artificial Sequence
  Synthetic
gccccugagcgtcauct

SEQ ID NO: 49361 - DNA, 20 bp, Artificial Sequence
  Synthetic
attcaccuccacgtgctuga

SEQ ID NO: 49362 - DNA, 19 bp, Artificial Sequence
  Synthetic
ctgagccggguctcttguc

SEQ ID NO: 49363 - DNA, 21 bp, Artificial Sequence
  Synthetic
ggcaugggacagagtcgtuac

SEQ ID NO: 49364 - DNA, 22 bp, Artificial Sequence
  Synthetic
ggccucaacgcccatgtcttug

SEQ ID NO: 49365 - DNA, 21 bp, Artificial Sequence
  Synthetic
gcgggagaucttgugcacggt

SEQ ID NO: 49366 - DNA, 18 bp, Artificial Sequence
  Synthetic
tgtaccuccacgcccugt

SEQ ID NO: 49367 - DNA, 17 bp, Artificial Sequence
  Synthetic
gcccucagcaccacuga

SEQ ID NO: 49368 - DNA, 22 bp, Artificial Sequence
  Synthetic
ccgtgaagaugctgaaagguga

SEQ ID NO: 49369 - DNA, 17 bp, Artificial Sequence
  Synthetic
gccgcuaccgcaccuac

SEQ ID NO: 49370 - DNA, 21 bp, Artificial Sequence
  Synthetic
ctactcctucgacaccugcaa

SEQ ID NO: 49371 - DNA, 20 bp, Artificial Sequence
  Synthetic
gctgaagccuctccaccuct

SEQ ID NO: 49372 - DNA, 18 bp, Artificial Sequence
  Synthetic
tcaugccaguaggacgcc

SEQ ID NO: 49373 - DNA, 17 bp, Artificial Sequence
  Synthetic
tccuggctcugcccagt

SEQ ID NO: 49374 - DNA, 21 bp, Artificial Sequence
  Synthetic
ccttcaggcugttcccgaaua

SEQ ID NO: 49375 - DNA, 18 bp, Artificial Sequence
  Synthetic
gcacucacgtcgguggac

SEQ ID NO: 49376 - DNA, 18 bp, Artificial Sequence
  Synthetic
agagguggctgugcgaag

SEQ ID NO: 49377 - DNA, 17 bp, Artificial Sequence
  Synthetic
cccutcacguccgcgag

SEQ ID NO: 49378 - DNA, 26 bp, Artificial Sequence
  Synthetic
accatgtatucacttcagugaaaggg

SEQ ID NO: 49379 - DNA, 24 bp, Artificial Sequence
  Synthetic
caagactacgaaccugaagccuaa

SEQ ID NO: 49380 - DNA, 28 bp, Artificial Sequence
  Synthetic
gagagcaaatgatuctcactaagcacua

SEQ ID NO: 49381 - DNA, 30 bp, Artificial Sequence; identical to SEQ ID NO: 37147
  Synthetic

SEQ ID NO: 49382 - DNA, 23 bp, Artificial Sequence
  Synthetic
ggaaucttgaatacugggccaca

SEQ ID NO: 49383 - DNA, 25 bp, Artificial Sequence
  Synthetic
cagcaattuaaggctagctugagac

SEQ ID NO: 49384 - DNA, 26 bp, Artificial Sequence
  Synthetic
tatcgaactggcuaacatgttttuct

SEQ ID NO: 49385 - DNA, 29 bp, Artificial Sequence
  Synthetic
acttgagtgaaagaugaagtggtaacauc

SEQ ID NO: 49386 - DNA, 24 bp, Artificial Sequence
  Synthetic
ctgctgucagatggctuaaagaga

SEQ ID NO: 49387 - DNA, 23 bp, Artificial Sequence
  Synthetic
gctaactcctutttcctgctgug

SEQ ID NO: 49388 - DNA, 31 bp, Artificial Sequence; identical to SEQ ID NO: 37154
  Synthetic

SEQ ID NO: 49389 - DNA, 23 bp, Artificial Sequence
  Synthetic
ccccagaccuctgcaatugaaaa

SEQ ID NO: 49390 - DNA, 24 bp, Artificial Sequence
  Synthetic
gcatacaucaggccatctccuact

SEQ ID NO: 49391 - DNA, 30 bp, Artificial Sequence; identical to SEQ ID NO: 37157
  Synthetic

SEQ ID NO: 49392 - DNA, 31 bp, Artificial Sequence; identical to SEQ ID NO: 37158
  Synthetic

SEQ ID NO: 49393 - DNA, 28 bp, Artificial Sequence
  Synthetic
gaaagatacagaaugcaagcaagctuac

SEQ ID NO: 49394 - DNA, 27 bp, Artificial Sequence
  Synthetic
tgaaagattuccaggacctaatgctug

SEQ ID NO: 49395 - DNA, 26 bp, Artificial Sequence
  Synthetic
cccaaugagaaccttttgtuccagaa

SEQ ID NO: 49396 - DNA, 18 bp, Artificial Sequence
  Synthetic
cccggcgagcutaactug

SEQ ID NO: 49397 - DNA, 21 bp, Artificial Sequence
  Synthetic
ctcgguggaaagagctggtut

SEQ ID NO: 49398 - DNA, 19 bp, Artificial Sequence
  Synthetic
gcccugacagacgacaugg

SEQ ID NO: 49399 - DNA, 22 bp, Artificial Sequence
  Synthetic
tgagcagugcctttttcuggag

SEQ ID NO: 49400 - DNA, 27 bp, Artificial Sequence
  Synthetic
gtttagccaccuttcctaatttuccaa

SEQ ID NO: 49401 - DNA, 24 bp, Artificial Sequence
  Synthetic
acagaauacacacactgacauggg

SEQ ID NO: 49402 - DNA, 22 bp, Artificial Sequence
  Synthetic
caagtugaggcactgaagaugg

SEQ ID NO: 49403 - DNA, 31 bp, Artificial Sequence; identical to SEQ ID NO: 37169
  Synthetic

SEQ ID NO: 49404 - DNA, 32 bp, Artificial Sequence; identical to SEQ ID NO: 37170
  Synthetic

SEQ ID NO: 49405 - DNA, 23 bp, Artificial Sequence
  Synthetic
cactcuccagaacggcttgauac

SEQ ID NO: 49406 - DNA, 27 bp, Artificial Sequence
  Synthetic
tgatgtaagtatugctcttctgcaguc

SEQ ID NO: 49407 - DNA, 31 bp, Artificial Sequence; identical to SEQ ID NO: 37173
  Synthetic

SEQ ID NO: 49408 - DNA, 28 bp, Artificial Sequence
  Synthetic
gagcttttaaguggtagccatagtauga

SEQ ID NO: 49409 - DNA, 33 bp, Artificial Sequence; identical to SEQ ID NO: 37175
  Synthetic

SEQ ID NO: 49410 - DNA, 30 bp, Artificial Sequence; identical to SEQ ID NO: 37176
  Synthetic

SEQ ID NO: 49411 - DNA, 27 bp, Artificial Sequence
  Synthetic
gtgaccaggguttgtaatcttctgtua

SEQ ID NO: 49412 - DNA, 27 bp, Artificial Sequence
  Synthetic
ctcatgauaaggatgatatgucgcgaa

SEQ ID NO: 49413 - DNA, 22 bp, Artificial Sequence
  Synthetic
tcttgtcaucaggctgtgagug

SEQ ID NO: 49414 - DNA, 28 bp, Artificial Sequence
  Synthetic
agggttatattagugatccctgcataut

SEQ ID NO: 49415 - DNA, 31 bp, Artificial Sequence; identical to SEQ ID NO: 37181
  Synthetic

SEQ ID NO: 49416 - DNA, 26 bp, Artificial Sequence
  Synthetic
agttaccaactuggtaccagtttgut

SEQ ID NO: 49417 - DNA, 30 bp, Artificial Sequence; identical to SEQ ID NO: 37183
  Synthetic

SEQ ID NO: 49418 - DNA, 28 bp, Artificial Sequence
  Synthetic
agcttggctucaagttgtctttttaaug

SEQ ID NO: 49419 - DNA, 23 bp, Artificial Sequence
  Synthetic
agattgcacaacugccctcuaag

SEQ ID NO: 49420 - DNA, 33 bp, Artificial Sequence; identical to SEQ ID NO: 37186
  Synthetic

SEQ ID NO: 49421 - DNA, 25 bp, Artificial Sequence
  Synthetic
cgguaagtaagagugccaaccaaaa

SEQ ID NO: 49422 - DNA, 26 bp, Artificial Sequence
  Synthetic
tgttactgcauacacattgtgaccut

SEQ ID NO: 49423 - DNA, 22 bp, Artificial Sequence
  Synthetic
cccccatgucccataatgctuc

SEQ ID NO: 49424 - DNA, 21 bp, Artificial Sequence
  Synthetic
ggctcaagcutgccatctcut

SEQ ID NO: 49425 - DNA, 29 bp, Artificial Sequence
  Synthetic
ggacagtcatgtugccagtattaaaatug

SEQ ID NO: 49426 - DNA, 24 bp, Artificial Sequence
  Synthetic
auccagcaacagaaaauccaggaa

SEQ ID NO: 49427 - DNA, 32 bp, Artificial Sequence; identical to SEQ ID NO: 37193
  Synthetic

SEQ ID NO: 49428 - DNA, 26 bp, Artificial Sequence
  Synthetic
tcaaatgaaacccucgattgaaucct

SEQ ID NO: 49429 - DNA, 23 bp, Artificial Sequence
  Synthetic
tgggtctugcccatctttcatuc

SEQ ID NO: 49430 - DNA, 22 bp, Artificial Sequence
  Synthetic
gtttctccauacaggucacggg

SEQ ID NO: 49431 - DNA, 28 bp, Artificial Sequence
  Synthetic
tgatccacaugacgtttctcttcatuat

SEQ ID NO: 49432 - DNA, 23 bp, Artificial Sequence
  Synthetic
tcaagcagugagaatacguccac

SEQ ID NO: 49433 - DNA, 30 bp, Artificial Sequence; identical to SEQ ID NO: 37199
  Synthetic

SEQ ID NO: 49434 - DNA, 22 bp, Artificial Sequence
  Synthetic
aagatcctgugagcgaagtucc

SEQ ID NO: 49435 - DNA, 28 bp, Artificial Sequence
  Synthetic
gaactgacagaaguacatctgcuaaaca

SEQ ID NO: 49436 - DNA, 23 bp, Artificial Sequence
  Synthetic
cagaaguaaaacaccuccaccac

SEQ ID NO: 49437 - DNA, 21 bp, Artificial Sequence
  Synthetic
gcacucaggctggaugaacaa

SEQ ID NO: 49438 - DNA, 30 bp, Artificial Sequence; identical to SEQ ID NO: 37204
  Synthetic

SEQ ID NO: 49439 - DNA, 22 bp, Artificial Sequence
  Synthetic
tttguacacaggcagctgacut

SEQ ID NO: 49440 - DNA, 24 bp, Artificial Sequence
  Synthetic
caatcgaaucccctccaaaugagt

SEQ ID NO: 49441 - DNA, 28 bp, Artificial Sequence
  Synthetic
catagcagaautaatgcattcugcaaga

SEQ ID NO: 49442 - DNA, 28 bp, Artificial Sequence
  Synthetic
aagaaaccaactucaccagtaaaaccua

SEQ ID NO: 49443 - DNA, 32 bp, Artificial Sequence; identical to SEQ ID NO: 37209
  Synthetic

SEQ ID NO: 49444 - DNA, 26 bp, Artificial Sequence
  Synthetic
ttccagggaaaaggcugaatuaagaa

SEQ ID NO: 49445 - DNA, 21 bp, Artificial Sequence
  Synthetic
cttttcaucagttgcugcccc

SEQ ID NO: 49446 - DNA, 24 bp, Artificial Sequence
  Synthetic
cagggagaaccaaguaaaccucaa

SEQ ID NO: 49447 - DNA, 25 bp, Artificial Sequence
  Synthetic
ccacccatattuctgggactatgut

SEQ ID NO: 49448 - DNA, 31 bp, Artificial Sequence; identical to SEQ ID NO: 37214
  Synthetic

SEQ ID NO: 49449 - DNA, 29 bp, Artificial Sequence
  Synthetic
ggttttagaattcgugggcctttatuact

SEQ ID NO: 49450 - DNA, 22 bp, Artificial Sequence
  Synthetic
aaaugaaacagcccctucaagc

SEQ ID NO: 49451 - DNA, 21 bp, Artificial Sequence
  Synthetic
gagaagtgguggctgttugac

SEQ ID NO: 49452 - DNA, 23 bp, Artificial Sequence
  Synthetic
tgcccagcaaccautaaguagac

SEQ ID NO: 49453 - DNA, 28 bp, Artificial Sequence
  Synthetic
ggataaacctgtutgtttggtaaggtuc

SEQ ID NO: 49454 - DNA, 30 bp, Artificial Sequence; identical to SEQ ID NO: 37220
  Synthetic

SEQ ID NO: 49455 - DNA, 26 bp, Artificial Sequence
  Synthetic
tgtggauagagacataucaggaaggg

SEQ ID NO: 49456 - DNA, 28 bp, Artificial Sequence
  Synthetic
cattctgaaaguccttctagactuccaa

SEQ ID NO: 49457 - DNA, 28 bp, Artificial Sequence
  Synthetic
gcggatacttggutttctttactttgut

SEQ ID NO: 49458 - DNA, 27 bp, Artificial Sequence
  Synthetic
ctaatttatcaaauggcacctgctgut

SEQ ID NO: 49459 - DNA, 21 bp, Artificial Sequence
  Synthetic
gcatgggaacacugccatuac

SEQ ID NO: 49460 - DNA, 25 bp, Artificial Sequence
  Synthetic
agttctataguggaacguaccccat

SEQ ID NO: 49461 - DNA, 27 bp, Artificial Sequence
  Synthetic
ctttgtgttgtuattcactggagtugg

SEQ ID NO: 49462 - DNA, 26 bp, Artificial Sequence
  Synthetic
gggtcttacctugtgacatctgttua

SEQ ID NO: 49463 - DNA, 22 bp, Artificial Sequence
  Synthetic
ctaaccaucaagagtgccuccc

SEQ ID NO: 49464 - DNA, 23 bp, Artificial Sequence
  Synthetic
gttgttctgucacccagttggua

SEQ ID NO: 49465 - DNA, 27 bp, Artificial Sequence
  Synthetic
tcaatattccauagcctgtucccaaag

SEQ ID NO: 49466 - DNA, 22 bp, Artificial Sequence
  Synthetic
aagtggccugtgctcttagtuc

SEQ ID NO: 49467 - DNA, 23 bp, Artificial Sequence
  Synthetic
cctccucagtttcugagaccaac

SEQ ID NO: 49468 - DNA, 23 bp, Artificial Sequence
  Synthetic
ctttgatgagcagcuggtttgug

SEQ ID NO: 49469 - DNA, 22 bp, Artificial Sequence
  Synthetic
tcctagggaugggtggcaatua

SEQ ID NO: 49470 - DNA, 21 bp, Artificial Sequence
  Synthetic
atgugacaccccaggucaaag

SEQ ID NO: 49471 - DNA, 20 bp, Artificial Sequence
  Synthetic
cagaggugctcauggcagag

SEQ ID NO: 49472 - DNA, 19 bp, Artificial Sequence
  Synthetic
guagccucccagaccaagg

SEQ ID NO: 49473 - DNA, 22 bp, Artificial Sequence
  Synthetic
cagagugggagaacaagtccug

SEQ ID NO: 49474 - DNA, 17 bp, Artificial Sequence
  Synthetic
ggccugcagtugccaag

SEQ ID NO: 49475 - DNA, 20 bp, Artificial Sequence
  Synthetic
tguggagacaggagcuggat

SEQ ID NO: 49476 - DNA, 20 bp, Artificial Sequence
  Synthetic
cuaggaaaacagggccugca

SEQ ID NO: 49477 - DNA, 28 bp, Artificial Sequence
  Synthetic
tctaggtucagagaggaaaagucaaaac

SEQ ID NO: 49478 - DNA, 17 bp, Artificial Sequence
  Synthetic
ccugcaacccccucagc

SEQ ID NO: 49479 - DNA, 24 bp, Artificial Sequence
  Synthetic
agattgtagacagagucccagugt

SEQ ID NO: 49480 - DNA, 21 bp, Artificial Sequence
  Synthetic
gtccaggucaaggcugaaaag

SEQ ID NO: 49481 - DNA, 20 bp, Artificial Sequence
  Synthetic
aaaacccaugctctgccuga

SEQ ID NO: 49482 - DNA, 21 bp, Artificial Sequence
  Synthetic
gacttcuccagcaggctcauc

SEQ ID NO: 49483 - DNA, 21 bp, Artificial Sequence
  Synthetic
aggaguccaaaggaccacgua

SEQ ID NO: 49484 - DNA, 22 bp, Artificial Sequence
  Synthetic
ccaggugaaagcugaaaagcag

SEQ ID NO: 49485 - DNA, 21 bp, Artificial Sequence
  Synthetic
caacacuagcccccagucaag

SEQ ID NO: 49486 - DNA, 25 bp, Artificial Sequence
  Synthetic
ctccaatacuattatcccccugcaa

SEQ ID NO: 49487 - DNA, 19 bp, Artificial Sequence
  Synthetic
tccattcccucccccucac

SEQ ID NO: 49488 - DNA, 20 bp, Artificial Sequence
  Synthetic
accagaucagagctgcctug

SEQ ID NO: 49489 - DNA, 22 bp, Artificial Sequence
  Synthetic
ccgttcugaggagtgagtgtug

SEQ ID NO: 49490 - DNA, 25 bp, Artificial Sequence
  Synthetic
tctgttuaggaucaggagtcttcut

SEQ ID NO: 49491 - DNA, 21 bp, Artificial Sequence
  Synthetic
cagggtucacacagaagctug

SEQ ID NO: 49492 - DNA, 23 bp, Artificial Sequence
  Synthetic
tgtcgacccuaatcgtaguccag

SEQ ID NO: 49493 - DNA, 20 bp, Artificial Sequence
  Synthetic
ctcccaccacugcauaaggg

SEQ ID NO: 49494 - DNA, 21 bp, Artificial Sequence
  Synthetic
gcaucccaaggacttgugagt

SEQ ID NO: 49495 - DNA, 18 bp, Artificial Sequence
  Synthetic
gcacctuctacgcuccgt

SEQ ID NO: 49496 - DNA, 23 bp, Artificial Sequence
  Synthetic
ctgagagcucagatgacagugag

SEQ ID NO: 49497 - DNA, 24 bp, Artificial Sequence
  Synthetic
tgagtctgagauatggagcugagg

SEQ ID NO: 49498 - DNA, 21 bp, Artificial Sequence
  Synthetic
gcctcttucacaatgggctuc

SEQ ID NO: 49499 - DNA, 23 bp, Artificial Sequence
  Synthetic
ccctccugcagaccttaactuac

SEQ ID NO: 49500 - DNA, 21 bp, Artificial Sequence
  Synthetic
tcagtggugaaggtccugact

SEQ ID NO: 49501 - DNA, 20 bp, Artificial Sequence
  Synthetic
gctttccccutggaagucgt

SEQ ID NO: 49502 - DNA, 20 bp, Artificial Sequence
  Synthetic
cctgtgcaccucccaacaut

SEQ ID NO: 49503 - DNA, 22 bp, Artificial Sequence
  Synthetic
ggtctgttutctggccugagac

SEQ ID NO: 49504 - DNA, 24 bp, Artificial Sequence
  Synthetic
cattttguaagaatggcatugcct

SEQ ID NO: 49505 - DNA, 20 bp, Artificial Sequence
  Synthetic
gcttcgcucccgggaatuac

SEQ ID NO: 49506 - DNA, 22 bp, Artificial Sequence
  Synthetic
gcggaaacgaugcctgtattuc

SEQ ID NO: 49507 - DNA, 24 bp, Artificial Sequence
  Synthetic
tccacattccutcatcatctugcc

SEQ ID NO: 49508 - DNA, 22 bp, Artificial Sequence
  Synthetic
gctaaagccauttcagccccut

SEQ ID NO: 49509 - DNA, 27 bp, Artificial Sequence
  Synthetic
gcactgttaagutctcccttttctuac

SEQ ID NO: 49510 - DNA, 23 bp, Artificial Sequence
  Synthetic
taatggatucgctgcattuagct

SEQ ID NO: 49511 - DNA, 28 bp, Artificial Sequence
  Synthetic
tcaatgcaaaccaaagucagaagttuac

SEQ ID NO: 49512 - DNA, 26 bp, Artificial Sequence
  Synthetic
gaaggacagaagutcaaagagcuaca

SEQ ID NO: 49513 - DNA, 30 bp, Artificial Sequence; identical to SEQ ID NO: 37279
  Synthetic

SEQ ID NO: 49514 - DNA, 17 bp, Artificial Sequence
  Synthetic
ctgcgtcugcgccaaug

SEQ ID NO: 49515 - DNA, 21 bp, Artificial Sequence
  Synthetic
acgcacacacacguacacaua

SEQ ID NO: 49516 - DNA, 25 bp, Artificial Sequence
  Synthetic
tgggtgtacuatgcagttaucgact

SEQ ID NO: 49517 - DNA, 23 bp, Artificial Sequence
  Synthetic
aggacucaaggaagugcaaacaa

SEQ ID NO: 49518 - DNA, 26 bp, Artificial Sequence
  Synthetic
gaattttacttgugtggacgaugcag

SEQ ID NO: 49519 - DNA, 22 bp, Artificial Sequence
  Synthetic
agctaauggcaagaauggcgat

SEQ ID NO: 49520 - DNA, 28 bp, Artificial Sequence
  Synthetic
cccttttcacuaggagacacaaacatua

SEQ ID NO: 49521 - DNA, 23 bp, Artificial Sequence
  Synthetic
aagtttccctutaagtggccugt

SEQ ID NO: 49522 - DNA, 21 bp, Artificial Sequence
  Synthetic
cttcttuggcggcaatgaugt

SEQ ID NO: 49523 - DNA, 25 bp, Artificial Sequence
  Synthetic
tcttcgaattgaugtctgcctucaa

SEQ ID NO: 49524 - DNA, 26 bp, Artificial Sequence
  Synthetic
agcttctgattucatctccctttucc

SEQ ID NO: 49525 - DNA, 27 bp, Artificial Sequence
  Synthetic
caggaatacautttcggttcttugacc

SEQ ID NO: 49526 - DNA, 25 bp, Artificial Sequence
  Synthetic
cctgttgctuaatggctgttugaaa

SEQ ID NO: 49527 - DNA, 30 bp, Artificial Sequence; identical to SEQ ID NO: 37293
  Synthetic

SEQ ID NO: 49528 - DNA, 28 bp, Artificial Sequence
  Synthetic
cactgcaaagaaagaauttgagactuca

SEQ ID NO: 49529 - DNA, 24 bp, Artificial Sequence
  Synthetic
ggtcacugcttccatcaucagaag

SEQ ID NO: 49530 - DNA, 21 bp, Artificial Sequence
  Synthetic
gctgccacaaacacuagggua

SEQ ID NO: 49531 - DNA, 26 bp, Artificial Sequence
  Synthetic
gagttctcacuggatatgcttgauga

SEQ ID NO: 49532 - DNA, 23 bp, Artificial Sequence
  Synthetic
gaggagtgcaguttgaaatgcug

SEQ ID NO: 49533 - DNA, 23 bp, Artificial Sequence
  Synthetic
ggctttgaugttccagagucact

SEQ ID NO: 49534 - DNA, 22 bp, Artificial Sequence
  Synthetic
gcggttgaugactgcucaaaac

SEQ ID NO: 49535 - DNA, 21 bp, Artificial Sequence
  Synthetic
tgtcggacaguaagccaggua

SEQ ID NO: 49536 - DNA, 25 bp, Artificial Sequence
  Synthetic
cacagtgaaccguaaagcctuaaag

SEQ ID NO: 49537 - DNA, 28 bp, Artificial Sequence
  Synthetic
cagattgcttaaccutgctatcgaaaug

SEQ ID NO: 49538 - DNA, 22 bp, Artificial Sequence
  Synthetic
cgttuaaaccaaaggcgcacua

SEQ ID NO: 49539 - DNA, 23 bp, Artificial Sequence
  Synthetic
gcagtcagcaugattttgctcug

SEQ ID NO: 49540 - DNA, 26 bp, Artificial Sequence
  Synthetic
ggtctcauaaaaacagtgggtttucc

SEQ ID NO: 49541 - DNA, 25 bp, Artificial Sequence
  Synthetic
ggaccagugaaagtttgctgaaaut

SEQ ID NO: 49542 - DNA, 24 bp, Artificial Sequence
  Synthetic
attucaaccaaagaagagccucca

SEQ ID NO: 49543 - DNA, 23 bp, Artificial Sequence
  Synthetic
cugctcaaatacugagaccccaa

SEQ ID NO: 49544 - DNA, 23 bp, Artificial Sequence
  Synthetic
tcaatatccauggcagcugacaa

SEQ ID NO: 49545 - DNA, 28 bp, Artificial Sequence
  Synthetic
gcacttcaaacutactactgcatuacgt

SEQ ID NO: 49546 - DNA, 24 bp, Artificial Sequence
  Synthetic
gggtcaaauggaagagacaucaat

SEQ ID NO: 49547 - DNA, 25 bp, Artificial Sequence
  Synthetic
cacaagugggcaaacatttctcuac

SEQ ID NO: 49548 - DNA, 30 bp, Artificial Sequence; identical to SEQ ID NO: 37314
  Synthetic

SEQ ID NO: 49549 - DNA, 26 bp, Artificial Sequence
  Synthetic
ctggacacacucttcatgguaaaact

SEQ ID NO: 49550 - DNA, 31 bp, Artificial Sequence; identical to SEQ ID NO: 37316
  Synthetic

SEQ ID NO: 49551 - DNA, 27 bp, Artificial Sequence
  Synthetic
ggtaaagtgatuagggcagatgauact

SEQ ID NO: 49552 - DNA, 24 bp, Artificial Sequence
  Synthetic
cttgcagtcutgtgatctgaaugc

SEQ ID NO: 49553 - DNA, 27 bp, Artificial Sequence
  Synthetic
gagatgagtgcuattcttcaggctuac

SEQ ID NO: 49554 - DNA, 21 bp, Artificial Sequence
  Synthetic
cctcgagcugttcctuccaac

SEQ ID NO: 49555 - DNA, 25 bp, Artificial Sequence
  Synthetic
gtcugtgtttgccugagaaacaaaa

SEQ ID NO: 49556 - DNA, 25 bp, Artificial Sequence
  Synthetic
gtttgccttttucaggacgtgaaut

SEQ ID NO: 49557 - DNA, 20 bp, Artificial Sequence
  Synthetic
tcatagagcagcaugcggut

SEQ ID NO: 49558 - DNA, 26 bp, Artificial Sequence
  Synthetic
tgtatacattuggataccagtgucct

SEQ ID NO: 49559 - DNA, 27 bp, Artificial Sequence
  Synthetic
cagtgaaaacagcauttcccattacut

SEQ ID NO: 49560 - DNA, 24 bp, Artificial Sequence
  Synthetic
ctgttctctugggagttggtaucc

SEQ ID NO: 49561 - DNA, 22 bp, Artificial Sequence
  Synthetic
agcagaaguctagaaggguggt

SEQ ID NO: 49562 - DNA, 22 bp, Artificial Sequence
  Synthetic
gggugaaaucacaaaggagcga

SEQ ID NO: 49563 - DNA, 24 bp, Artificial Sequence
  Synthetic
gaacgaguagcggtacaaauggat

SEQ ID NO: 49564 - DNA, 22 bp, Artificial Sequence
  Synthetic
ccagcuccttttguaagcagca

SEQ ID NO: 49565 - DNA, 25 bp, Artificial Sequence
  Synthetic
tttatctgacatuttgggtgccuga

SEQ ID NO: 49566 - DNA, 25 bp, Artificial Sequence
  Synthetic
cccagccuttagataaggucagaga

SEQ ID NO: 49567 - DNA, 23 bp, Artificial Sequence
  Synthetic
ggatttauccagccttgggucag

SEQ ID NO: 49568 - DNA, 21 bp, Artificial Sequence
  Synthetic
gacaaaccccaugcctcttug

SEQ ID NO: 49569 - DNA, 22 bp, Artificial Sequence
  Synthetic
ggcatcttcucatcagcctgug

SEQ ID NO: 49570 - DNA, 24 bp, Artificial Sequence
  Synthetic
gcaagcugttaaatcacucaccca

SEQ ID NO: 49571 - DNA, 25 bp, Artificial Sequence
  Synthetic
gagacctaaaagautgcccactcut

SEQ ID NO: 49572 - DNA, 21 bp, Artificial Sequence
  Synthetic
cccugggaaaagcctcaucac

SEQ ID NO: 49573 - DNA, 30 bp, Artificial Sequence; identical to SEQ ID NO: 37339
  Synthetic

SEQ ID NO: 49574 - DNA, 19 bp, Artificial Sequence
  Synthetic
cccgcggaucaacactcug

SEQ ID NO: 49575 - DNA, 17 bp, Artificial Sequence
  Synthetic
ggacgguccctcccugt

SEQ ID NO: 49576 - DNA, 29 bp, Artificial Sequence
  Synthetic
aaggttttcttccuggtagtatgtgttut

SEQ ID NO: 49577 - DNA, 23 bp, Artificial Sequence
  Synthetic
cgatccatgcuctgtggacaaua

SEQ ID NO: 49578 - DNA, 22 bp, Artificial Sequence
  Synthetic
gaggctacacutgtcagagugg

SEQ ID NO: 49579 - DNA, 26 bp, Artificial Sequence
  Synthetic
tgaggtcuagaagactctttgucaca

SEQ ID NO: 49580 - DNA, 24 bp, Artificial Sequence
  Synthetic
ctgaggccaguatcugaagaaaag

SEQ ID NO: 49581 - DNA, 29 bp, Artificial Sequence
  Synthetic
tcgatgcactugagaaataaatcagctua

SEQ ID NO: 49582 - DNA, 25 bp, Artificial Sequence
  Synthetic
gggtgauggaagtttaatgaugact

SEQ ID NO: 49583 - DNA, 25 bp, Artificial Sequence
  Synthetic
gcctaccucaattttgtcugaagct

SEQ ID NO: 49584 - DNA, 24 bp, Artificial Sequence
  Synthetic
aaactgctuactagctttcaugca

SEQ ID NO: 49585 - DNA, 25 bp, Artificial Sequence
  Synthetic
gatgaacatcaaugcacttggugat

SEQ ID NO: 49586 - DNA, 30 bp, Artificial Sequence; identical to SEQ ID NO: 37352
  Synthetic

SEQ ID NO: 49587 - DNA, 22 bp, Artificial Sequence
  Synthetic
ggttctggguctgagacgauac

SEQ ID NO: 49588 - DNA, 23 bp, Artificial Sequence
  Synthetic
gattgtacagcugaagcctcgua

SEQ ID NO: 49589 - DNA, 31 bp, Artificial Sequence; identical to SEQ ID NO: 37355
  Synthetic

SEQ ID NO: 49590 - DNA, 22 bp, Artificial Sequence
  Synthetic
agcctggcuctagcatgtttuc

SEQ ID NO: 49591 - DNA, 22 bp, Artificial Sequence
  Synthetic
cctaagtggcccugaggacaua

SEQ ID NO: 49592 - DNA, 21 bp, Artificial Sequence
  Synthetic
agacgauagccgacctugagt

SEQ ID NO: 49593 - DNA, 27 bp, Artificial Sequence
  Synthetic
tgauacaaagagaaagatgucccaagc

SEQ ID NO: 49594 - DNA, 28 bp, Artificial Sequence
  Synthetic
agaaaaugacaaguaagaaacatggaug

SEQ ID NO: 49595 - DNA, 25 bp, Artificial Sequence
  Synthetic
ccaggcaaaauactagcagauacct

SEQ ID NO: 49596 - DNA, 22 bp, Artificial Sequence
  Synthetic
gctgaggttcucaaccagctua

SEQ ID NO: 49597 - DNA, 27 bp, Artificial Sequence
  Synthetic
aaaugaagauccagaaaaagaagctug

SEQ ID NO: 49598 - DNA, 22 bp, Artificial Sequence
  Synthetic
ccgcccaatutggtgacttgua

SEQ ID NO: 49599 - DNA, 23 bp, Artificial Sequence
  Synthetic
gaagtctgagaguggatctgcug

SEQ ID NO: 49600 - DNA, 30 bp, Artificial Sequence; identical to SEQ ID NO: 37366
  Synthetic

SEQ ID NO: 49601 - DNA, 21 bp, Artificial Sequence
  Synthetic
gcggcguttagcatcauagag

SEQ ID NO: 49602 - DNA, 29 bp, Artificial Sequence
  Synthetic
agggtacaaauaacagtggtaaaagagug

SEQ ID NO: 49603 - DNA, 26 bp, Artificial Sequence
  Synthetic
cttaattgaatuggcgcaaagtucag

SEQ ID NO: 49604 - DNA, 28 bp, Artificial Sequence
  Synthetic
tgatttaaaactguggaactgtagcugt

SEQ ID NO: 49605 - DNA, 27 bp, Artificial Sequence
  Synthetic
gggcaggtttuaagagatatgtgauga

SEQ ID NO: 49606 - DNA, 26 bp, Artificial Sequence
  Synthetic
gggaaaagtacugcttctttctugga

SEQ ID NO: 49607 - DNA, 21 bp, Artificial Sequence
  Synthetic
gcaagctucgctttgaacugg

SEQ ID NO: 49608 - DNA, 25 bp, Artificial Sequence
  Synthetic
cacccgacugacttatgagatugaa

SEQ ID NO: 49609 - DNA, 23 bp, Artificial Sequence
  Synthetic
tcttcctgcaguagaacccucaa

SEQ ID NO: 49610 - DNA, 28 bp, Artificial Sequence
  Synthetic
ggagatatccaugcaaaaagaggaugat

SEQ ID NO: 49611 - DNA, 25 bp, Artificial Sequence
  Synthetic
cctgcttcagutctatctccagaug

SEQ ID NO: 49612 - DNA, 28 bp, Artificial Sequence
  Synthetic
tcaggacaaaaauaaggagaucgagaga

SEQ ID NO: 49613 - DNA, 23 bp, Artificial Sequence
  Synthetic
gtatcctctuccttctgcauggt

SEQ ID NO: 49614 - DNA, 22 bp, Artificial Sequence
  Synthetic
tcucaggaggguggaagaagac

SEQ ID NO: 49615 - DNA, 30 bp, Artificial Sequence; identical to SEQ ID NO: 37381
  Synthetic

SEQ ID NO: 49616 - DNA, 24 bp, Artificial Sequence
  Synthetic
gugcgacggagacaauaaacaaac

SEQ ID NO: 49617 - DNA, 22 bp, Artificial Sequence
  Synthetic
cctctugcaggagtcttcugac

SEQ ID NO: 49618 - DNA, 22 bp, Artificial Sequence
  Synthetic
ctggagcaggcauccattgtua

SEQ ID NO: 49619 - DNA, 27 bp, Artificial Sequence
  Synthetic
cttctgcttttaucttctatcgcctuc

SEQ ID NO: 49620 - DNA, 24 bp, Artificial Sequence
  Synthetic
gaagcggacagugataaaaaugca

SEQ ID NO: 49621 - DNA, 28 bp, Artificial Sequence
  Synthetic
agtgaagctgugatcaagtatttgugaa

SEQ ID NO: 49622 - DNA, 26 bp, Artificial Sequence
  Synthetic
tgcaaaaucaactcuagaggcagaaa

SEQ ID NO: 49623 - DNA, 27 bp, Artificial Sequence
  Synthetic
tcttcaattctcutgatctctgctugg

SEQ ID NO: 49624 - DNA, 20 bp, Artificial Sequence
  Synthetic
tgtgaguggaccgtugacac

SEQ ID NO: 49625 - DNA, 23 bp, Artificial Sequence
  Synthetic
cgaaggaauggctggattucaga

SEQ ID NO: 49626 - DNA, 26 bp, Artificial Sequence
  Synthetic
ggcagctacagguggtataattgauc

SEQ ID NO: 49627 - DNA, 28 bp, Artificial Sequence
  Synthetic
gcattccggttuctctatcaatcaaaut

SEQ ID NO: 49628 - DNA, 26 bp, Artificial Sequence
  Synthetic
gaatgauccccgagatagucagaaaa

SEQ ID NO: 49629 - DNA, 24 bp, Artificial Sequence
  Synthetic
agtggacgguctcaatauaccaga

SEQ ID NO: 49630 - DNA, 23 bp, Artificial Sequence
  Synthetic
ggccatgaaaautggcttagucc

SEQ ID NO: 49631 - DNA, 28 bp, Artificial Sequence
  Synthetic
ggaacaaagagaugatgtttcctgttuc

SEQ ID NO: 49632 - DNA, 22 bp, Artificial Sequence
  Synthetic
atugauccaaaggagagccauc

SEQ ID NO: 49633 - DNA, 28 bp, Artificial Sequence
  Synthetic
tguttcttcttttcttucagaggcagaa

SEQ ID NO: 49634 - DNA, 23 bp, Artificial Sequence
  Synthetic
acctucaaagaactgtgugagca

SEQ ID NO: 49635 - DNA, 26 bp, Artificial Sequence
  Synthetic
gacaccattttucaaggagatcaugt

SEQ ID NO: 49636 - DNA, 21 bp, Artificial Sequence
  Synthetic
tggaagaaucgagccccatug

SEQ ID NO: 49637 - DNA, 23 bp, Artificial Sequence
  Synthetic
catgucttggtcaaucacaccct

SEQ ID NO: 49638 - DNA, 22 bp, Artificial Sequence
  Synthetic
tcctggagutccagtaccucac

SEQ ID NO: 49639 - DNA, 28 bp, Artificial Sequence
  Synthetic
gagcgatttauggcatccttataggaua

SEQ ID NO: 49640 - DNA, 28 bp, Artificial Sequence
  Synthetic
catttagcagtagutctattgggcacua

SEQ ID NO: 49641 - DNA, 29 bp, Artificial Sequence
  Synthetic
augagctaagaagauaaaaagccagaaca

SEQ ID NO: 49642 - DNA, 31 bp, Artificial Sequence; identical to SEQ ID NO: 37408
  Synthetic

SEQ ID NO: 49643 - DNA, 24 bp, Artificial Sequence
  Synthetic
cgcaaacuggagaagucagaagac

SEQ ID NO: 49644 - DNA, 22 bp, Artificial Sequence
  Synthetic
gcccttttuaacagagccgtuc

SEQ ID NO: 49645 - DNA, 25 bp, Artificial Sequence
  Synthetic
atttgttccctuccttcttcctcuc

SEQ ID NO: 49646 - DNA, 19 bp, Artificial Sequence
  Synthetic
gacggcgaacugtaucacg

SEQ ID NO: 49647 - DNA, 23 bp, Artificial Sequence
  Synthetic
tgaaaggcuccatcatccagtug

SEQ ID NO: 49648 - DNA, 21 bp, Artificial Sequence
  Synthetic
aagttcucgctctugggaagg

SEQ ID NO: 49649 - DNA, 20 bp, Artificial Sequence
  Synthetic
ccctgtcaucggctaccuga

SEQ ID NO: 49650 - DNA, 21 bp, Artificial Sequence
  Synthetic
cutccctaaaugcaggccact

SEQ ID NO: 49651 - DNA, 19 bp, Artificial Sequence
  Synthetic
cggcaagucggttccucac

SEQ ID NO: 49652 - DNA, 21 bp, Artificial Sequence
  Synthetic
gctgctcucagctttctuggt

SEQ ID NO: 49653 - DNA, 23 bp, Artificial Sequence
  Synthetic
agaaccaguacgtccacattucc

SEQ ID NO: 49654 - DNA, 17 bp, Artificial Sequence
  Synthetic
cttgtgucccggcguct

SEQ ID NO: 49655 - DNA, 20 bp, Artificial Sequence
  Synthetic
cagttcatugggtccuccca

SEQ ID NO: 49656 - DNA, 21 bp, Artificial Sequence
  Synthetic
ccctguggacaatgctttgug

SEQ ID NO: 49657 - DNA, 20 bp, Artificial Sequence
  Synthetic
gaatgccugccucccaagaa

SEQ ID NO: 49658 - DNA, 26 bp, Artificial Sequence
  Synthetic
agccactacacauattgttcttggut

SEQ ID NO: 49659 - DNA, 28 bp, Artificial Sequence
  Synthetic
acutctctgugaaaggaagaaagaauac

SEQ ID NO: 49660 - DNA, 26 bp, Artificial Sequence
  Synthetic
gaaagatucaaaggatcacucaccct

SEQ ID NO: 49661 - DNA, 32 bp, Artificial Sequence; identical to SEQ ID NO: 37427
  Synthetic

SEQ ID NO: 49662 - DNA, 25 bp, Artificial Sequence
  Synthetic
attttccaggucaggactttaucct

SEQ ID NO: 49663 - DNA, 23 bp, Artificial Sequence
  Synthetic
tttggatttccuctcctgcacuc

SEQ ID NO: 49664 - DNA, 23 bp, Artificial Sequence
  Synthetic
gguagagggagagaaacaauguc

SEQ ID NO: 49665 - DNA, 24 bp, Artificial Sequence
  Synthetic
aggaggaggagagaguagaguaua

SEQ ID NO: 49666 - DNA, 18 bp, Artificial Sequence
  Synthetic
ggagccauccccgttucc

SEQ ID NO: 49667 - DNA, 25 bp, Artificial Sequence
  Synthetic
caagugcaaagaaaaagcuagttuc

SEQ ID NO: 49668 - DNA, 22 bp, Artificial Sequence
  Synthetic
cgaactccaugggtttccagua

SEQ ID NO: 49669 - DNA, 24 bp, Artificial Sequence
  Synthetic
gaaaagctcugacaaccucaggaa

SEQ ID NO: 49670 - DNA, 22 bp, Artificial Sequence
  Synthetic
ccttgaatuctgcccugacaca

SEQ ID NO: 49671 - DNA, 24 bp, Artificial Sequence
  Synthetic
tccactcugccactagagtauagg

SEQ ID NO: 49672 - DNA, 22 bp, Artificial Sequence
  Synthetic
acuacccccagaacaucaccat

SEQ ID NO: 49673 - DNA, 23 bp, Artificial Sequence
  Synthetic
cctggctcucatcagtcacauac

SEQ ID NO: 49674 - DNA, 26 bp, Artificial Sequence
  Synthetic
ctaaattgagaugggtgaaugaggaa

SEQ ID NO: 49675 - DNA, 24 bp, Artificial Sequence
  Synthetic
ctagtuttgtctcctucccacagt

SEQ ID NO: 49676 - DNA, 18 bp, Artificial Sequence
  Synthetic
gagccccagaugccacuc

SEQ ID NO: 49677 - DNA, 21 bp, Artificial Sequence
  Synthetic
gcctgtcugcttcatgggaua

SEQ ID NO: 49678 - DNA, 21 bp, Artificial Sequence
  Synthetic
cctccagccugagtcugagat

SEQ ID NO: 49679 - DNA, 19 bp, Artificial Sequence
  Synthetic
gtgtgguccagctcaccut

SEQ ID NO: 49680 - DNA, 24 bp, Artificial Sequence
  Synthetic
gucaccaaaauccagaaaccacua

SEQ ID NO: 49681 - DNA, 19 bp, Artificial Sequence
  Synthetic
ccuctcccucacccaacag

SEQ ID NO: 49682 - DNA, 22 bp, Artificial Sequence
  Synthetic
tcgagugagccaaagatcucct

SEQ ID NO: 49683 - DNA, 23 bp, Artificial Sequence
  Synthetic
cctcacaccaaccutgtctctug

SEQ ID NO: 49684 - DNA, 22 bp, Artificial Sequence
  Synthetic
gggagtcuatttgtccuggaga

SEQ ID NO: 49685 - DNA, 20 bp, Artificial Sequence
  Synthetic
cctgtggacutgggacctug

SEQ ID NO: 49686 - DNA, 21 bp, Artificial Sequence
  Synthetic
tgagtcccaacuccaacucca

SEQ ID NO: 49687 - DNA, 21 bp, Artificial Sequence
  Synthetic
cattctctugactgccugcac

SEQ ID NO: 49688 - DNA, 18 bp, Artificial Sequence
  Synthetic
cuccccaacagccuccac

SEQ ID NO: 49689 - DNA, 18 bp, Artificial Sequence
  Synthetic
gggatgcucctccugacc

SEQ ID NO: 49690 - DNA, 20 bp, Artificial Sequence
  Synthetic
catcuggagacggaggcauc

SEQ ID NO: 49691 - DNA, 25 bp, Artificial Sequence
  Synthetic
tgtaugtgtgtgtcuaggacaggaa

SEQ ID NO: 49692 - DNA, 22 bp, Artificial Sequence
  Synthetic
gggtaaagaggaugaggctugg

SEQ ID NO: 49693 - DNA, 25 bp, Artificial Sequence
  Synthetic
ggtattgacagutttggaggtgaug

SEQ ID NO: 49694 - DNA, 23 bp, Artificial Sequence
  Synthetic
acccatatucccaggtctgucat

SEQ ID NO: 49695 - DNA, 21 bp, Artificial Sequence
  Synthetic
ttcaagattcccugggccauc

SEQ ID NO: 49696 - DNA, 25 bp, Artificial Sequence
  Synthetic
ccacatctcautctcttttgtcucc

SEQ ID NO: 49697 - DNA, 23 bp, Artificial Sequence
  Synthetic
cacctccaucctaagcaaugaca

SEQ ID NO: 49698 - DNA, 18 bp, Artificial Sequence
  Synthetic
gccagggagutggcagug

SEQ ID NO: 49699 - DNA, 24 bp, Artificial Sequence
  Synthetic
ctgggcccaugttttgtatactug

SEQ ID NO: 49700 - DNA, 17 bp, Artificial Sequence
  Synthetic
ccctgcucccacuccca

SEQ ID NO: 49701 - DNA, 25 bp, Artificial Sequence
  Synthetic
gtctctgacuctcttctctuaccca

SEQ ID NO: 49702 - DNA, 23 bp, Artificial Sequence
  Synthetic
gtcagccauctcatcuggaaaga

SEQ ID NO: 49703 - DNA, 21 bp, Artificial Sequence
  Synthetic
gccatgacuccttcctccugt

SEQ ID NO: 49704 - DNA, 21 bp, Artificial Sequence
  Synthetic
agccccuggtggtaucagaat

SEQ ID NO: 49705 - DNA, 26 bp, Artificial Sequence
  Synthetic
atcttccccaaaugtctggttcauag

SEQ ID NO: 49706 - DNA, 23 bp, Artificial Sequence
  Synthetic
ccctcaaatcuccaactaccugt

SEQ ID NO: 49707 - DNA, 25 bp, Artificial Sequence
  Synthetic
caggaactctcuctgcttttgtcua

SEQ ID NO: 49708 - DNA, 21 bp, Artificial Sequence
  Synthetic
cctgagaauggguagccagga

SEQ ID NO: 49709 - DNA, 21 bp, Artificial Sequence
  Synthetic
gtaagtugaccccgagctcug

SEQ ID NO: 49710 - DNA, 21 bp, Artificial Sequence
  Synthetic
gggaactcagcutccttccug

SEQ ID NO: 49711 - DNA, 23 bp, Artificial Sequence
  Synthetic
cttcccacuccttgactctgtut

SEQ ID NO: 49712 - DNA, 23 bp, Artificial Sequence
  Synthetic
ccuauagagggaagaggagtugt

SEQ ID NO: 49713 - DNA, 23 bp, Artificial Sequence
  Synthetic
ctcacccugggtaatgttctcuc

SEQ ID NO: 49714 - DNA, 23 bp, Artificial Sequence
  Synthetic
cctgcatcugtgctttcuggaat

SEQ ID NO: 49715 - DNA, 23 bp, Artificial Sequence
  Synthetic
cctcctctcacucctaactgcut

SEQ ID NO: 49716 - DNA, 23 bp, Artificial Sequence
  Synthetic
ggaguctggagacucaggagaat

SEQ ID NO: 49717 - DNA, 24 bp, Artificial Sequence
  Synthetic
gccctctcaccuctatctttcuca

SEQ ID NO: 49718 - DNA, 22 bp, Artificial Sequence
  Synthetic
gttggaaggaucaagcuccuaa

SEQ ID NO: 49719 - DNA, 23 bp, Artificial Sequence
  Synthetic
gaggccccuttataaatgccuct

SEQ ID NO: 49720 - DNA, 21 bp, Artificial Sequence
  Synthetic
cctttcagugcaagggucact

SEQ ID NO: 49721 - DNA, 22 bp, Artificial Sequence
  Synthetic
tgctgggautttgtctgtgucc

SEQ ID NO: 49722 - DNA, 27 bp, Artificial Sequence
  Synthetic
ctgaaacccttaauttcctgtatccut

SEQ ID NO: 49723 - DNA, 22 bp, Artificial Sequence
  Synthetic
gtgcctggucacctgtttcuag

SEQ ID NO: 49724 - DNA, 22 bp, Artificial Sequence
  Synthetic
gaaggcagcuagaaagguggag

SEQ ID NO: 49725 - DNA, 28 bp, Artificial Sequence
  Synthetic
actaaagggacacagutttatccatuca

SEQ ID NO: 49726 - DNA, 23 bp, Artificial Sequence
  Synthetic
ggtaaagctgcugtgccttcuag

SEQ ID NO: 49727 - DNA, 26 bp, Artificial Sequence
  Synthetic
cagtgaaagtaauggatgggcuaagt

SEQ ID NO: 49728 - DNA, 23 bp, Artificial Sequence
  Synthetic
ggaagccuggagaactaggucat

SEQ ID NO: 49729 - DNA, 24 bp, Artificial Sequence
  Synthetic
cttgttctgacacutcccttgtuc

SEQ ID NO: 49730 - DNA, 22 bp, Artificial Sequence
  Synthetic
gagacugagctggugaacagat

SEQ ID NO: 49731 - DNA, 23 bp, Artificial Sequence
  Synthetic
ggtguggatagttcuggaaaggg

SEQ ID NO: 49732 - DNA, 18 bp, Artificial Sequence
  Synthetic
cctgccgcacacucacuc

SEQ ID NO: 49733 - DNA, 22 bp, Artificial Sequence
  Synthetic
ggaccttcuctccttgaccuca

SEQ ID NO: 49734 - DNA, 24 bp, Artificial Sequence
  Synthetic
acaagccaccuaacaggaaatuac

SEQ ID NO: 49735 - DNA, 24 bp, Artificial Sequence
  Synthetic
tgacccctacucttttgttccuca

SEQ ID NO: 49736 - DNA, 24 bp, Artificial Sequence
  Synthetic
ggutaaaaaucagaggcgacagga

SEQ ID NO: 49737 - DNA, 22 bp, Artificial Sequence
  Synthetic
ggctacatgugtgtctcctuca

SEQ ID NO: 49738 - DNA, 24 bp, Artificial Sequence
  Synthetic
cctcacgauaatcatccccauagc

SEQ ID NO: 49739 - DNA, 22 bp, Artificial Sequence
  Synthetic
cagccctaacauccccatcuac

SEQ ID NO: 49740 - DNA, 24 bp, Artificial Sequence
  Synthetic
gaaggtgtccuaggagatgatugc

SEQ ID NO: 49741 - DNA, 22 bp, Artificial Sequence
  Synthetic
tcaccccacaccutccaatuac

SEQ ID NO: 49742 - DNA, 31 bp, Artificial Sequence; identical to SEQ ID NO: 37508
  Synthetic

SEQ ID NO: 49743 - DNA, 22 bp, Artificial Sequence
  Synthetic
cagcagcaaccaucaagactuc

SEQ ID NO: 49744 - DNA, 22 bp, Artificial Sequence
  Synthetic
cagaagtcaaucctgcctcuga

SEQ ID NO: 49745 - DNA, 25 bp, Artificial Sequence
  Synthetic
ttcacttgaaccucttccaccatut

SEQ ID NO: 49746 - DNA, 20 bp, Artificial Sequence
  Synthetic
cctcggaagacuggcugaga

SEQ ID NO: 49747 - DNA, 24 bp, Artificial Sequence
  Synthetic
actctgtgtguatctctctcggut

SEQ ID NO: 49748 - DNA, 22 bp, Artificial Sequence
  Synthetic
ccaggcaucaggactcctctua

SEQ ID NO: 49749 - DNA, 23 bp, Artificial Sequence
  Synthetic
tcatagtctgcuccctgtctuct

SEQ ID NO: 49750 - DNA, 21 bp, Artificial Sequence
  Synthetic
gcctgtacugccccattuaca

SEQ ID NO: 49751 - DNA, 26 bp, Artificial Sequence
  Synthetic
gctgatgtgaugtgctttctctuaca

SEQ ID NO: 49752 - DNA, 22 bp, Artificial Sequence
  Synthetic
ccagcugtgagaauccagacat

SEQ ID NO: 49753 - DNA, 29 bp, Artificial Sequence
  Synthetic
gtgttcacagtguggtttgatttacauag

SEQ ID NO: 49754 - DNA, 22 bp, Artificial Sequence
  Synthetic
gggaggaagauccatcccauct

SEQ ID NO: 49755 - DNA, 23 bp, Artificial Sequence
  Synthetic
ttgacaatcguctccttctugca

SEQ ID NO: 49756 - DNA, 18 bp, Artificial Sequence
  Synthetic
tcggctuccacctggtug

SEQ ID NO: 49757 - DNA, 20 bp, Artificial Sequence
  Synthetic
gcgattcucccagatugcct

SEQ ID NO: 49758 - DNA, 19 bp, Artificial Sequence
  Synthetic
acaggtugagctccuccgt

SEQ ID NO: 49759 - DNA, 22 bp, Artificial Sequence
  Synthetic
cccatcuccagctgtctgttuc

SEQ ID NO: 49760 - DNA, 22 bp, Artificial Sequence
  Synthetic
tgaactcgauctgcagcatguc

SEQ ID NO: 49761 - DNA, 21 bp, Artificial Sequence
  Synthetic
tgaagccguacctggctauct

SEQ ID NO: 49762 - DNA, 23 bp, Artificial Sequence
  Synthetic
cccuatcaatgagtugggcacaa

SEQ ID NO: 49763 - DNA, 21 bp, Artificial Sequence
  Synthetic
gactacactuggcaagcaugg

SEQ ID NO: 49764 - DNA, 20 bp, Artificial Sequence
  Synthetic
tggaaccuagcgtccagcua

SEQ ID NO: 49765 - DNA, 19 bp, Artificial Sequence
  Synthetic
catagcgguagtcgcgcut

SEQ ID NO: 49766 - DNA, 23 bp, Artificial Sequence
  Synthetic
gggtgatgugaatattgtuggca

SEQ ID NO: 49767 - DNA, 22 bp, Artificial Sequence
  Synthetic
ctctctttuaggccctccucct

SEQ ID NO: 49768 - DNA, 21 bp, Artificial Sequence
  Synthetic
gggtttugggctaaccaucat

SEQ ID NO: 49769 - DNA, 24 bp, Artificial Sequence
  Synthetic
tggcctccagguaatggactatua

SEQ ID NO: 49770 - DNA, 22 bp, Artificial Sequence
  Synthetic
tggcgagaagaacauggactug

SEQ ID NO: 49771 - DNA, 22 bp, Artificial Sequence
  Synthetic
gtgggccuttcagaatcuggaa

SEQ ID NO: 49772 - DNA, 22 bp, Artificial Sequence
  Synthetic
aacttcccugatcacagtugct

SEQ ID NO: 49773 - DNA, 23 bp, Artificial Sequence
  Synthetic
caagagcagutgctcagauacca

SEQ ID NO: 49774 - DNA, 22 bp, Artificial Sequence
  Synthetic
gacaatguggcggctaacttuc

SEQ ID NO: 49775 - DNA, 30 bp, Artificial Sequence; identical to SEQ ID NO: 37541
  Synthetic

SEQ ID NO: 49776 - DNA, 26 bp, Artificial Sequence
  Synthetic
acttctgctuttgcttctttuaagcc

SEQ ID NO: 49777 - DNA, 20 bp, Artificial Sequence
  Synthetic
aucttctttuccccgccaca

SEQ ID NO: 49778 - DNA, 24 bp, Artificial Sequence
  Synthetic
cagttugacccagagaucaagact

SEQ ID NO: 49779 - DNA, 25 bp, Artificial Sequence
  Synthetic
tcctttattguccaaatgtcugcct

SEQ ID NO: 49780 - DNA, 27 bp, Artificial Sequence
  Synthetic
cacactctaaaagauaggctgaaugct

SEQ ID NO: 49781 - DNA, 29 bp, Artificial Sequence
  Synthetic
ttgatatatatucggccctatgcacttuc

SEQ ID NO: 49782 - DNA, 29 bp, Artificial Sequence
  Synthetic
tcagtgtaaguagattgacattugcaaca

SEQ ID NO: 49783 - DNA, 23 bp, Artificial Sequence
  Synthetic
catcgagucatcactgcucaaca

SEQ ID NO: 49784 - DNA, 26 bp, Artificial Sequence
  Synthetic
gccctatgugagttcatttccaucat

SEQ ID NO: 49785 - DNA, 31 bp, Artificial Sequence; identical to SEQ ID NO: 37551
  Synthetic

SEQ ID NO: 49786 - DNA, 27 bp, Artificial Sequence
  Synthetic
catgaugttgaaatagtuggcaccaat

SEQ ID NO: 49787 - DNA, 22 bp, Artificial Sequence
  Synthetic
aggcaaaucaccaaagtcugct

SEQ ID NO: 49788 - DNA, 28 bp, Artificial Sequence
  Synthetic
aactggatauaacttctgaatugcccaa

SEQ ID NO: 49789 - DNA, 29 bp, Artificial Sequence
  Synthetic
tgatggcaagagugatggattacaaauaa

SEQ ID NO: 49790 - DNA, 29 bp, Artificial Sequence
  Synthetic
cctcattaatcttucaaagttcagctucc

SEQ ID NO: 49791 - DNA, 23 bp, Artificial Sequence
  Synthetic
tttggaugcaatguggaaagcat

SEQ ID NO: 49792 - DNA, 26 bp, Artificial Sequence
  Synthetic
gtttaggguttgaagaatugccaagt

SEQ ID NO: 49793 - DNA, 27 bp, Artificial Sequence
  Synthetic
caaatgcagagaacaguggaattaugc

SEQ ID NO: 49794 - DNA, 24 bp, Artificial Sequence
  Synthetic
tgcatggaugtatgaaauggcact

SEQ ID NO: 49795 - DNA, 25 bp, Artificial Sequence
  Synthetic
ccaagaggaggucgaattggtatuc

SEQ ID NO: 49796 - DNA, 25 bp, Artificial Sequence
  Synthetic
tgaattccuaagcacaatcugcact

SEQ ID NO: 49797 - DNA, 23 bp, Artificial Sequence
  Synthetic
agaatctctggcutcttggctut

SEQ ID NO: 49798 - DNA, 22 bp, Artificial Sequence
  Synthetic
agtctcuctgatccugccacaa

SEQ ID NO: 49799 - DNA, 28 bp, Artificial Sequence
  Synthetic
gccagtcauggagtacttttaaaugaca

SEQ ID NO: 49800 - DNA, 27 bp, Artificial Sequence
  Synthetic
gaaaattctcacagutgggatttcugg

SEQ ID NO: 49801 - DNA, 28 bp, Artificial Sequence
  Synthetic
ccgaaatatacaaautcagcctgacgua

SEQ ID NO: 49802 - DNA, 25 bp, Artificial Sequence
  Synthetic
ggtcttccuagctcattcactuacc

SEQ ID NO: 49803 - DNA, 25 bp, Artificial Sequence
  Synthetic
ccaatgccautgttatgctgtuaca

SEQ ID NO: 49804 - DNA, 28 bp, Artificial Sequence
  Synthetic
guatttctctaucagacacaagcacaca

SEQ ID NO: 49805 - DNA, 28 bp, Artificial Sequence
  Synthetic
atccctuagaaaaggaacaaaagctuct

SEQ ID NO: 49806 - DNA, 28 bp, Artificial Sequence
  Synthetic
ttccaaactcuttactgtgttguacaat

SEQ ID NO: 49807 - DNA, 26 bp, Artificial Sequence
  Synthetic
cctgaatcagcuttaaaatgguccct

SEQ ID NO: 49808 - DNA, 26 bp, Artificial Sequence
  Synthetic
acctgcctguttattaacagtaugac

SEQ ID NO: 49809 - DNA, 25 bp, Artificial Sequence
  Synthetic
atgcaagttguggcttttggtatut

SEQ ID NO: 49810 - DNA, 22 bp, Artificial Sequence
  Synthetic
ggttcugacctggtgauggaag

SEQ ID NO: 49811 - DNA, 29 bp, Artificial Sequence
  Synthetic
ggttccttactaaaugagcactattgugt

SEQ ID NO: 49812 - DNA, 21 bp, Artificial Sequence
  Synthetic
agccacgagggutagacaaug

SEQ ID NO: 49813 - DNA, 31 bp, Artificial Sequence; identical to SEQ ID NO: 37579
  Synthetic

SEQ ID NO: 49814 - DNA, 23 bp, Artificial Sequence
  Synthetic
cgaccaaagcutgaatugaccaa

SEQ ID NO: 49815 - DNA, 30 bp, Artificial Sequence; identical to SEQ ID NO: 37581
  Synthetic

SEQ ID NO: 49816 - DNA, 24 bp, Artificial Sequence
  Synthetic
ggcccagcacaugtaattttgtug

SEQ ID NO: 49817 - DNA, 29 bp, Artificial Sequence
  Synthetic
gacctttgctguaacatgctgtatttuat

SEQ ID NO: 49818 - DNA, 30 bp, Artificial Sequence; identical to SEQ ID NO: 37584
  Synthetic

SEQ ID NO: 49819 - DNA, 28 bp, Artificial Sequence
  Synthetic
tctttcttuccagcaaccttatcauaca

SEQ ID NO: 49820 - DNA, 27 bp, Artificial Sequence
  Synthetic
aaacttaagagaccuaacatttugcca

SEQ ID NO: 49821 - DNA, 27 bp, Artificial Sequence
  Synthetic
agcatctctugttttcctaagugacat

SEQ ID NO: 49822 - DNA, 27 bp, Artificial Sequence
  Synthetic
ccctcaaaucccacatatcatctauca

SEQ ID NO: 49823 - DNA, 22 bp, Artificial Sequence
  Synthetic
ggagtgcaguttcaagtctugg

SEQ ID NO: 49824 - DNA, 27 bp, Artificial Sequence
  Synthetic
gcucattagacttuccaacaaaacact

SEQ ID NO: 49825 - DNA, 29 bp, Artificial Sequence
  Synthetic
gatgtcctcagtuctatcatcctctttut

SEQ ID NO: 49826 - DNA, 25 bp, Artificial Sequence
  Synthetic
acagtttccacagugacaatctcut

SEQ ID NO: 49827 - DNA, 22 bp, Artificial Sequence
  Synthetic
acttttccucgggctgcttuag

SEQ ID NO: 49828 - DNA, 22 bp, Artificial Sequence
  Synthetic
cagccaggaacutgactccaua

SEQ ID NO: 49829 - DNA, 28 bp, Artificial Sequence
  Synthetic
gactgacaatttuccctttgtccatuag

SEQ ID NO: 49830 - DNA, 27 bp, Artificial Sequence
  Synthetic
cagtaagttgaggaugcttgtgtuagt

SEQ ID NO: 49831 - DNA, 22 bp, Artificial Sequence
  Synthetic
ccaacccagcuctctgtttucc

SEQ ID NO: 49832 - DNA, 26 bp, Artificial Sequence
  Synthetic
ctcagtaatcutgacggtaatuggct

SEQ ID NO: 49833 - DNA, 28 bp, Artificial Sequence
  Synthetic
catutcattaagattgaugacaccccat

SEQ ID NO: 49834 - DNA, 22 bp, Artificial Sequence
  Synthetic
ccaaugatcuggcacaaagagg

SEQ ID NO: 49835 - DNA, 26 bp, Artificial Sequence
  Synthetic
tggttctttccuaatggtgactgtut

SEQ ID NO: 49836 - DNA, 22 bp, Artificial Sequence
  Synthetic
ctgtagcatuagccaggacucg

SEQ ID NO: 49837 - DNA, 25 bp, Artificial Sequence
  Synthetic
agaatgggtagugaggaagcaaaug

SEQ ID NO: 49838 - DNA, 22 bp, Artificial Sequence
  Synthetic
ccacacagggugacattccuat

SEQ ID NO: 49839 - DNA, 22 bp, Artificial Sequence
  Synthetic
ctgttgcccuggaaauagaggt

SEQ ID NO: 49840 - DNA, 22 bp, Artificial Sequence
  Synthetic
ggcttccaccaugtaagcugaa

SEQ ID NO: 49841 - DNA, 27 bp, Artificial Sequence
  Synthetic
gatgatcaactuccttgcaatguaact

SEQ ID NO: 49842 - DNA, 20 bp, Artificial Sequence
  Synthetic
caattccccugacacucgct

SEQ ID NO: 49843 - DNA, 23 bp, Artificial Sequence
  Synthetic
gtgggaccauacttactgugagg

SEQ ID NO: 49844 - DNA, 22 bp, Artificial Sequence
  Synthetic
ccagactgugaagagggaugga

SEQ ID NO: 49845 - DNA, 25 bp, Artificial Sequence
  Synthetic
ggaaaggctucaccttcatgtauga

SEQ ID NO: 49846 - DNA, 21 bp, Artificial Sequence
  Synthetic
agggttucacaccagatgcuc

SEQ ID NO: 49847 - DNA, 24 bp, Artificial Sequence
  Synthetic
ccctaccutccacttaatugacct

SEQ ID NO: 49848 - DNA, 24 bp, Artificial Sequence
  Synthetic
cctagctgaaugctagaccaucaa

SEQ ID NO: 49849 - DNA, 23 bp, Artificial Sequence
  Synthetic
cgaggcugatgaactauacggat

SEQ ID NO: 49850 - DNA, 24 bp, Artificial Sequence
  Synthetic
tttcagaggacautgattgcccut

SEQ ID NO: 49851 - DNA, 25 bp, Artificial Sequence
  Synthetic
gactattcugcagttctucccagag

SEQ ID NO: 49852 - DNA, 27 bp, Artificial Sequence
  Synthetic
gttatattaacaguggtcacucaccca

SEQ ID NO: 49853 - DNA, 28 bp, Artificial Sequence
  Synthetic
ggtgatcccatutgaatatgctgtttut

SEQ ID NO: 49854 - DNA, 25 bp, Artificial Sequence
  Synthetic
gacagactacautggtctggttuga

SEQ ID NO: 49855 - DNA, 28 bp, Artificial Sequence
  Synthetic
aggaacatttgaugatagtgagagguct

SEQ ID NO: 49856 - DNA, 27 bp, Artificial Sequence
  Synthetic
catgttacaaaucagtgaggagugagt

SEQ ID NO: 49857 - DNA, 30 bp, Artificial Sequence; identical to SEQ ID NO: 37623
  Synthetic

SEQ ID NO: 49858 - DNA, 23 bp, Artificial Sequence
  Synthetic
acagtgaagucactggcatugag

SEQ ID NO: 49859 - DNA, 26 bp, Artificial Sequence
  Synthetic
tccttgaggaugaaactctguaaggt

SEQ ID NO: 49860 - DNA, 22 bp, Artificial Sequence
  Synthetic
ctcaaggucaacaagcautcut

SEQ ID NO: 49861 - DNA, 30 bp, Artificial Sequence; identical to SEQ ID NO: 37627
  Synthetic

SEQ ID NO: 49862 - DNA, 20 bp, Artificial Sequence
  Synthetic
cauagaacaggcccgtcucc

SEQ ID NO: 49863 - DNA, 22 bp, Artificial Sequence
  Synthetic
ggtugggaacaagggctcuaac

SEQ ID NO: 49864 - DNA, 25 bp, Artificial Sequence
  Synthetic
agagagcaauaccaataccuaccca

SEQ ID NO: 49865 - DNA, 29 bp, Artificial Sequence
  Synthetic
gcctttctatttuatctgaactgcaucca

SEQ ID NO: 49866 - DNA, 22 bp, Artificial Sequence
  Synthetic
cauaaagaccauccccagtuct

SEQ ID NO: 49867 - DNA, 29 bp, Artificial Sequence
  Synthetic
ccatcatttagtcutgtctgtcttgacut

SEQ ID NO: 49868 - DNA, 21 bp, Artificial Sequence
  Synthetic
gggctatcccaugatgctcug

SEQ ID NO: 49869 - DNA, 27 bp, Artificial Sequence
  Synthetic
cacttagtgtutgagaaagagaugcct

SEQ ID NO: 49870 - DNA, 25 bp, Artificial Sequence
  Synthetic
cctaggtuagcaaaggtgctttuga

SEQ ID NO: 49871 - DNA, 29 bp, Artificial Sequence
  Synthetic
cctgtaatgtttaugcgatctacatguct

SEQ ID NO: 49872 - DNA, 22 bp, Artificial Sequence
  Synthetic
catcccucatgccauacagaca

SEQ ID NO: 49873 - DNA, 30 bp, Artificial Sequence; identical to SEQ ID NO: 37639
  Synthetic

SEQ ID NO: 49874 - DNA, 29 bp, Artificial Sequence
  Synthetic
agaaagtaagcaagaugagagagauaggt

SEQ ID NO: 49875 - DNA, 22 bp, Artificial Sequence
  Synthetic
cccagaagacucgtgcagatuc

SEQ ID NO: 49876 - DNA, 27 bp, Artificial Sequence
  Synthetic
gagaaagagagagaaugtgtgtgtgut

SEQ ID NO: 49877 - DNA, 30 bp, Artificial Sequence; identical to SEQ ID NO: 37643
  Synthetic

SEQ ID NO: 49878 - DNA, 24 bp, Artificial Sequence
  Synthetic
tcccactcauaaaaaccacucacc

SEQ ID NO: 49879 - DNA, 29 bp, Artificial Sequence
  Synthetic
acatgctcactugtggtactattttcuaa

SEQ ID NO: 49880 - DNA, 24 bp, Artificial Sequence
  Synthetic
agcaaaaatcccucatcctgtcug

SEQ ID NO: 49881 - DNA, 27 bp, Artificial Sequence
  Synthetic
gcctgagatttcuttcccttgtgtuag

SEQ ID NO: 49882 - DNA, 30 bp, Artificial Sequence; identical to SEQ ID NO: 37648
  Synthetic

SEQ ID NO: 49883 - DNA, 27 bp, Artificial Sequence
  Synthetic
tgctccaaucaaaactgaaaatgctut

SEQ ID NO: 49884 - DNA, 22 bp, Artificial Sequence
  Synthetic
gcggugagtttttcugagagga

SEQ ID NO: 49885 - DNA, 26 bp, Artificial Sequence
  Synthetic
tcttggttttcuttttcttgctucgg

SEQ ID NO: 49886 - DNA, 20 bp, Artificial Sequence
  Synthetic
tcuagagccaagacgccuct

SEQ ID NO: 49887 - DNA, 22 bp, Artificial Sequence
  Synthetic
aggataaggugtcccagctuca

SEQ ID NO: 49888 - DNA, 24 bp, Artificial Sequence
  Synthetic
acaacgcuaaacagaaagagcuga

SEQ ID NO: 49889 - DNA, 27 bp, Artificial Sequence
  Synthetic
cctcttgcttugccaaacatttatcut

SEQ ID NO: 49890 - DNA, 27 bp, Artificial Sequence
  Synthetic
caagatgtgaagauggcacatttuagt

SEQ ID NO: 49891 - DNA, 22 bp, Artificial Sequence
  Synthetic
ccacagccautcgtcccaaaua

SEQ ID NO: 49892 - DNA, 22 bp, Artificial Sequence
  Synthetic
gcatattucttgcccucaagca

SEQ ID NO: 49893 - DNA, 27 bp, Artificial Sequence
  Synthetic
cctcatcttcaugagcttcactttcuc

SEQ ID NO: 49894 - DNA, 24 bp, Artificial Sequence
  Synthetic
caggaagaccaugggtgaagtuac

SEQ ID NO: 49895 - DNA, 28 bp, Artificial Sequence
  Synthetic
cttcctctucaccaaactgataaaaucc

SEQ ID NO: 49896 - DNA, 27 bp, Artificial Sequence
  Synthetic
ggtccccatuagactactaaatctugc

SEQ ID NO: 49897 - DNA, 28 bp, Artificial Sequence
  Synthetic
tgtttgtgtgtcugtgtgtgataauagt

SEQ ID NO: 49898 - DNA, 28 bp, Artificial Sequence
  Synthetic
acagaagggtcaguttttctgagaaaut

SEQ ID NO: 49899 - DNA, 27 bp, Artificial Sequence
  Synthetic
tccacactaggaucatccatttctgua

SEQ ID NO: 49900 - DNA, 28 bp, Artificial Sequence
  Synthetic
tgaggaagaugaagatgaggaagaugat

SEQ ID NO: 49901 - DNA, 29 bp, Artificial Sequence
  Synthetic
gcttgatttucaagattgagatttugcag

SEQ ID NO: 49902 - DNA, 19 bp, Artificial Sequence
  Synthetic
cgaccctucgcctaaccuc

SEQ ID NO: 49903 - DNA, 24 bp, Artificial Sequence
  Synthetic
ggttgtccucgctttccaaauact

SEQ ID NO: 49904 - DNA, 27 bp, Artificial Sequence
  Synthetic
gtttcttctgcuagcaatacagcuaca

SEQ ID NO: 49905 - DNA, 29 bp, Artificial Sequence
  Synthetic
gaaaagtcattuactccaatgcttucagt

SEQ ID NO: 49906 - DNA, 25 bp, Artificial Sequence
  Synthetic
tggacagtttugttgccaatttugt

SEQ ID NO: 49907 - DNA, 28 bp, Artificial Sequence
  Synthetic
agttcttctagacautttgccccuaaaa

SEQ ID NO: 49908 - DNA, 33 bp, Artificial Sequence; identical to SEQ ID NO: 37674
  Synthetic

SEQ ID NO: 49909 - DNA, 28 bp, Artificial Sequence
  Synthetic
acgctgcacugaatctctttctataaut

SEQ ID NO: 49910 - DNA, 24 bp, Artificial Sequence
  Synthetic
tttaacttagcutcaggcaccugt

SEQ ID NO: 49911 - DNA, 22 bp, Artificial Sequence
  Synthetic
ggguaaataucaaggccgagca

SEQ ID NO: 49912 - DNA, 22 bp, Artificial Sequence
  Synthetic
ggaatucccacagacacgcaua

SEQ ID NO: 49913 - DNA, 27 bp, Artificial Sequence
  Synthetic
cctaccucacagcaacaattcttatug

SEQ ID NO: 49914 - DNA, 29 bp, Artificial Sequence
  Synthetic
gtggctgttaacaucttaaagacttucaa

SEQ ID NO: 49915 - DNA, 22 bp, Artificial Sequence
  Synthetic
gcttttugcacccacctucaac

SEQ ID NO: 49916 - DNA, 28 bp, Artificial Sequence
  Synthetic
cgagatgagugaagaacttatggaacuc

SEQ ID NO: 49917 - DNA, 27 bp, Artificial Sequence
  Synthetic
gatggtccctatuatcactgtgaccua

SEQ ID NO: 49918 - DNA, 27 bp, Artificial Sequence
  Synthetic
ggcatttaaguccaaaactctggaaut

SEQ ID NO: 49919 - DNA, 27 bp, Artificial Sequence
  Synthetic
attcaccccttucatttaacagccuat

SEQ ID NO: 49920 - DNA, 23 bp, Artificial Sequence
  Synthetic
ttgcutacagggtuggaaaccat

SEQ ID NO: 49921 - DNA, 28 bp, Artificial Sequence
  Synthetic
ttgccatgaccuaagcttaactactuac

SEQ ID NO: 49922 - DNA, 29 bp, Artificial Sequence
  Synthetic
caatcctgaucacgctttagtttaucaaa

SEQ ID NO: 49923 - DNA, 26 bp, Artificial Sequence
  Synthetic
cctaccttugggtcaaaatugacaca

SEQ ID NO: 49924 - DNA, 21 bp, Artificial Sequence
  Synthetic
gctatugacgagcagcugaca

SEQ ID NO: 49925 - DNA, 20 bp, Artificial Sequence
  Synthetic
gtgctctcucctgggaggua

SEQ ID NO: 49926 - DNA, 30 bp, Artificial Sequence; identical to SEQ ID NO: 37692
  Synthetic

SEQ ID NO: 49927 - DNA, 27 bp, Artificial Sequence
  Synthetic
accacaatgucgtcaatgaattcuaca

SEQ ID NO: 49928 - DNA, 24 bp, Artificial Sequence
  Synthetic
tgatcttgtugcctcctgagatug

SEQ ID NO: 49929 - DNA, 28 bp, Artificial Sequence
  Synthetic
ccatacucagccacaatttgttttugaa

SEQ ID NO: 49930 - DNA, 26 bp, Artificial Sequence
  Synthetic
agtggtgaatgucatcaacaaaguct

SEQ ID NO: 49931 - DNA, 30 bp, Artificial Sequence; identical to SEQ ID NO: 37697
  Synthetic

SEQ ID NO: 49932 - DNA, 29 bp, Artificial Sequence
  Synthetic
ttgaggacttuagagtgtttgatagtugg

SEQ ID NO: 49933 - DNA, 28 bp, Artificial Sequence
  Synthetic
catgaaactggcaacautaatacgctua

SEQ ID NO: 49934 - DNA, 23 bp, Artificial Sequence
  Synthetic
acagatuccggactucagagaga

SEQ ID NO: 49935 - DNA, 31 bp, Artificial Sequence; identical to SEQ ID NO: 37701
  Synthetic

SEQ ID NO: 49936 - DNA, 31 bp, Artificial Sequence; identical to SEQ ID NO: 37702
  Synthetic

SEQ ID NO: 49937 - DNA, 26 bp, Artificial Sequence
  Synthetic
cgctgtgtauggattttctgcatuaa

SEQ ID NO: 49938 - DNA, 30 bp, Artificial Sequence; identical to SEQ ID NO: 37704
  Synthetic

SEQ ID NO: 49939 - DNA, 26 bp, Artificial Sequence
  Synthetic
gagccactucaaaaagacgaguagat

SEQ ID NO: 49940 - DNA, 30 bp, Artificial Sequence; identical to SEQ ID NO: 37706
  Synthetic

SEQ ID NO: 49941 - DNA, 28 bp, Artificial Sequence
  Synthetic
gtggtgcugagaaagataaattgttgua

SEQ ID NO: 49942 - DNA, 23 bp, Artificial Sequence
  Synthetic
cacagutaaggacaugacagcct

SEQ ID NO: 49943 - DNA, 25 bp, Artificial Sequence
  Synthetic
cacttcauctcagatgaugcaaacc

SEQ ID NO: 49944 - DNA, 22 bp, Artificial Sequence
  Synthetic
gaaatcagucagaccugggcaa

SEQ ID NO: 49945 - DNA, 29 bp, Artificial Sequence
  Synthetic
tgtaaacatacaucaaaacatcacauggt

SEQ ID NO: 49946 - DNA, 24 bp, Artificial Sequence
  Synthetic
gagcaagugttaagcuggcaaaat

SEQ ID NO: 49947 - DNA, 24 bp, Artificial Sequence
  Synthetic
gcatacagccugtcttugacaaac

SEQ ID NO: 49948 - DNA, 27 bp, Artificial Sequence
  Synthetic
ccgaagutttaatgacugaagggacaa

SEQ ID NO: 49949 - DNA, 31 bp, Artificial Sequence; identical to SEQ ID NO: 37715
  Synthetic

SEQ ID NO: 49950 - DNA, 25 bp, Artificial Sequence
  Synthetic
gaagacaaucaggatgtttcugcac

SEQ ID NO: 49951 - DNA, 27 bp, Artificial Sequence
  Synthetic
ttgcttgttgaacucaaccttcuaaga

SEQ ID NO: 49952 - DNA, 21 bp, Artificial Sequence
  Synthetic
ccauagtggccuacgaggaaa

SEQ ID NO: 49953 - DNA, 31 bp, Artificial Sequence; identical to SEQ ID NO: 37719
  Synthetic

SEQ ID NO: 49954 - DNA, 25 bp, Artificial Sequence
  Synthetic
ctggagauagacagaagaucaugac

SEQ ID NO: 49955 - DNA, 27 bp, Artificial Sequence
  Synthetic
aaacaacgacttucttggaactacuct

SEQ ID NO: 49956 - DNA, 28 bp, Artificial Sequence
  Synthetic
gactgtgatguttgtgttttctatugct

SEQ ID NO: 49957 - DNA, 30 bp, Artificial Sequence; identical to SEQ ID NO: 37723
  Synthetic

SEQ ID NO: 49958 - DNA, 23 bp, Artificial Sequence
  Synthetic
gcattttgcaguggtttgcatut

SEQ ID NO: 49959 - DNA, 25 bp, Artificial Sequence
  Synthetic
gctaagccacaaagcauaacactug

SEQ ID NO: 49960 - DNA, 31 bp, Artificial Sequence; identical to SEQ ID NO: 37726
  Synthetic

SEQ ID NO: 49961 - DNA, 28 bp, Artificial Sequence
  Synthetic
gccagctacucactcaacaaaatcauat

SEQ ID NO: 49962 - DNA, 22 bp, Artificial Sequence
  Synthetic
tgacgacaucccagtgtttcug

SEQ ID NO: 49963 - DNA, 29 bp, Artificial Sequence
  Synthetic
caattagccacaautatttccacugacaa

SEQ ID NO: 49964 - DNA, 31 bp, Artificial Sequence; identical to SEQ ID NO: 37730
  Synthetic

SEQ ID NO: 49965 - DNA, 26 bp, Artificial Sequence
  Synthetic
tgttgtcacagcuttagggttuaagt

SEQ ID NO: 49966 - DNA, 26 bp, Artificial Sequence
  Synthetic
aggtctcttcucatccattcuacgag

SEQ ID NO: 49967 - DNA, 29 bp, Artificial Sequence
  Synthetic
gaatcgaactctuaatacactcaggaugt

SEQ ID NO: 49968 - DNA, 22 bp, Artificial Sequence
  Synthetic
tcactccctucatgaggctuct

SEQ ID NO: 49969 - DNA, 25 bp, Artificial Sequence
  Synthetic
ctgtgcaacaacaugaatgtgctua

SEQ ID NO: 49970 - DNA, 28 bp, Artificial Sequence
  Synthetic
atgtactctcutaaggataaaguggagt

SEQ ID NO: 49971 - DNA, 27 bp, Artificial Sequence
  Synthetic
tcataaacttcutttgggctgucagaa

SEQ ID NO: 49972 - DNA, 28 bp, Artificial Sequence
  Synthetic
aggtttctaccccuatgatattgtuact

SEQ ID NO: 49973 - DNA, 21 bp, Artificial Sequence
  Synthetic
cctgcgacggaaauttcacug

SEQ ID NO: 49974 - DNA, 24 bp, Artificial Sequence
  Synthetic
acgcactcuctctctctttcugat

SEQ ID NO: 49975 - DNA, 24 bp, Artificial Sequence
  Synthetic
caaagactgttuttcccactccug

SEQ ID NO: 49976 - DNA, 24 bp, Artificial Sequence
  Synthetic
guggatgaaaucgacagaagaagt

SEQ ID NO: 49977 - DNA, 31 bp, Artificial Sequence; identical to SEQ ID NO: 37743
  Synthetic

SEQ ID NO: 49978 - DNA, 24 bp, Artificial Sequence
  Synthetic
taaggagguaatctgcgaugaaga

SEQ ID NO: 49979 - DNA, 26 bp, Artificial Sequence
  Synthetic
tttgagagcaguattcaacacccuac

SEQ ID NO: 49980 - DNA, 24 bp, Artificial Sequence
  Synthetic
gcacuaaacaccatctauggccaa

SEQ ID NO: 49981 - DNA, 25 bp, Artificial Sequence
  Synthetic
ggcataacauagagcagtcaaggua

SEQ ID NO: 49982 - DNA, 21 bp, Artificial Sequence
  Synthetic
gtgtgggtcugcaagctttuc

SEQ ID NO: 49983 - DNA, 25 bp, Artificial Sequence
  Synthetic
tgtaatgtggguccttccctctauc

SEQ ID NO: 49984 - DNA, 20 bp, Artificial Sequence
  Synthetic
gccataaugggcgcttccut

SEQ ID NO: 49985 - DNA, 21 bp, Artificial Sequence
  Synthetic
gaagggucagaagaacugcct

SEQ ID NO: 49986 - DNA, 28 bp, Artificial Sequence
  Synthetic
gctgaactttgucttgtaaaacattuca

SEQ ID NO: 49987 - DNA, 28 bp, Artificial Sequence
  Synthetic
ccagagcaugaacttcattatgaatucc

SEQ ID NO: 49988 - DNA, 20 bp, Artificial Sequence
  Synthetic
tcattcaucacccgcctgut

SEQ ID NO: 49989 - DNA, 18 bp, Artificial Sequence
  Synthetic
caggcugacacggcauac

SEQ ID NO: 49990 - DNA, 26 bp, Artificial Sequence
  Synthetic
ccaccccaaagagutttcuagaacaa

SEQ ID NO: 49991 - DNA, 30 bp, Artificial Sequence; identical to SEQ ID NO: 37757
  Synthetic

SEQ ID NO: 49992 - DNA, 27 bp, Artificial Sequence
  Synthetic
catctgagtcaaccuccatttttctut

SEQ ID NO: 49993 - DNA, 30 bp, Artificial Sequence; identical to SEQ ID NO: 37759
  Synthetic

SEQ ID NO: 49994 - DNA, 27 bp, Artificial Sequence
  Synthetic
ttttgtaatgtgagucctaaaagcuga

SEQ ID NO: 49995 - DNA, 27 bp, Artificial Sequence
  Synthetic
accacttttagacagutctctggaaug

SEQ ID NO: 49996 - DNA, 26 bp, Artificial Sequence
  Synthetic
tgtaaagcauccatcctatcugggat

SEQ ID NO: 49997 - DNA, 27 bp, Artificial Sequence
  Synthetic
ccttttcaatgucatagtttgcacuca

SEQ ID NO: 49998 - DNA, 24 bp, Artificial Sequence
  Synthetic
cggcutcattugaaaaagcaacag

SEQ ID NO: 49999 - DNA, 24 bp, Artificial Sequence
  Synthetic
aaaatccccacaagcugatcugaa

SEQ ID NO: 50000 - DNA, 28 bp, Artificial Sequence
  Synthetic
aatccattaagucctttgaagcucaaga

SEQ ID NO: 50001 - DNA, 25 bp, Artificial Sequence
  Synthetic
gctgacaagguaaggaactgaacut

SEQ ID NO: 50002 - DNA, 25 bp, Artificial Sequence
  Synthetic
gatatccatgutgacggatgaugct

SEQ ID NO: 50003 - DNA, 26 bp, Artificial Sequence
  Synthetic
agccagtctcutcaaacttcacauac

SEQ ID NO: 50004 - DNA, 26 bp, Artificial Sequence
  Synthetic
tggccaagguccattataagaauaca

SEQ ID NO: 50005 - DNA, 26 bp, Artificial Sequence
  Synthetic
tgaggattugccaattttgtgugaag

SEQ ID NO: 50006 - DNA, 26 bp, Artificial Sequence
  Synthetic
gtacttaaccaccauttcccacacut

SEQ ID NO: 50007 - DNA, 24 bp, Artificial Sequence
  Synthetic
gcctccaatcuctctaccagttug

SEQ ID NO: 50008 - DNA, 29 bp, Artificial Sequence
  Synthetic
ctcataatttttcauttcaggtacgucct

SEQ ID NO: 50009 - DNA, 21 bp, Artificial Sequence
  Synthetic
cttgctgccacuggtctguaa

SEQ ID NO: 50010 - DNA, 24 bp, Artificial Sequence
  Synthetic
aaccttaaactgutgccctgtgua

SEQ ID NO: 50011 - DNA, 22 bp, Artificial Sequence
  Synthetic
catgggtgaugctctccaucag

SEQ ID NO: 50012 - DNA, 22 bp, Artificial Sequence
  Synthetic
ttctgcctacucagtcatguct

SEQ ID NO: 50013 - DNA, 24 bp, Artificial Sequence
  Synthetic
gtgtgtucaactgtgaaucgaagc

SEQ ID NO: 50014 - DNA, 27 bp, Artificial Sequence
  Synthetic
actgtaaagtaucgttcacaccatucc

SEQ ID NO: 50015 - DNA, 31 bp, Artificial Sequence; identical to SEQ ID NO: 37781
  Synthetic

SEQ ID NO: 50016 - DNA, 22 bp, Artificial Sequence
  Synthetic
tacttctatcgugtgcctgugt

SEQ ID NO: 50017 - DNA, 29 bp, Artificial Sequence
  Synthetic
cttcgaatgcttuaactaagtccaatcug

SEQ ID NO: 50018 - DNA, 22 bp, Artificial Sequence
  Synthetic
acagaatuccaggctcctcuca

SEQ ID NO: 50019 - DNA, 28 bp, Artificial Sequence
  Synthetic
agtgtcttcccugaaacttaatacucac

SEQ ID NO: 50020 - DNA, 26 bp, Artificial Sequence
  Synthetic
agattacagggutttcatgagtgcug

SEQ ID NO: 50021 - DNA, 22 bp, Artificial Sequence
  Synthetic
gacttcatugtctgccuagcct

SEQ ID NO: 50022 - DNA, 25 bp, Artificial Sequence
  Synthetic
gagcaggagtutaaaagcatcctut

SEQ ID NO: 50023 - DNA, 23 bp, Artificial Sequence
  Synthetic
gcccaaagacugacagctttgua

SEQ ID NO: 50024 - DNA, 25 bp, Artificial Sequence
  Synthetic
ttgaggaagugaaaatggatgccua

SEQ ID NO: 50025 - DNA, 24 bp, Artificial Sequence
  Synthetic
tgttggatgucactgtcaggaaut

SEQ ID NO: 50026 - DNA, 28 bp, Artificial Sequence
  Synthetic
caccaugacgaaaactgaaauagaaagg

SEQ ID NO: 50027 - DNA, 31 bp, Artificial Sequence; identical to SEQ ID NO: 37793
  Synthetic

SEQ ID NO: 50028 - DNA, 25 bp, Artificial Sequence
  Synthetic
attggaagauattcactgtguggct

SEQ ID NO: 50029 - DNA, 26 bp, Artificial Sequence
  Synthetic
cautattcagaacacuaacccagcac

SEQ ID NO: 50030 - DNA, 22 bp, Artificial Sequence
  Synthetic
cgggaaccutacaugcaacact

SEQ ID NO: 50031 - DNA, 20 bp, Artificial Sequence
  Synthetic
ggttccccacutacccctug

SEQ ID NO: 50032 - DNA, 24 bp, Artificial Sequence
  Synthetic
ctatgccggucatcttugcaaaag

SEQ ID NO: 50033 - DNA, 23 bp, Artificial Sequence
  Synthetic
gccagtgtuaccttacgcttcua

SEQ ID NO: 50034 - DNA, 17 bp, Artificial Sequence
  Synthetic
cgcccggccutgtctut

SEQ ID NO: 50035 - DNA, 22 bp, Artificial Sequence
  Synthetic
tcttcttgcugctcttcuccac

SEQ ID NO: 50036 - DNA, 22 bp, Artificial Sequence
  Synthetic
accccatcuaataagggccuca

SEQ ID NO: 50037 - DNA, 28 bp, Artificial Sequence
  Synthetic
cccacgttcuattctttgttatauccca

SEQ ID NO: 50038 - DNA, 21 bp, Artificial Sequence
  Synthetic
ccgtggutcctcagucaaact

SEQ ID NO: 50039 - DNA, 31 bp, Artificial Sequence; identical to SEQ ID NO: 37805
  Synthetic

SEQ ID NO: 50040 - DNA, 26 bp, Artificial Sequence
  Synthetic
tggatguagcaaaccaauatcagaut

SEQ ID NO: 50041 - DNA, 29 bp, Artificial Sequence
  Synthetic
gttaaatgcggauacttaaaatcagccut

SEQ ID NO: 50042 - DNA, 28 bp, Artificial Sequence
  Synthetic
gaattgaaagcaacugcagatgacttua

SEQ ID NO: 50043 - DNA, 28 bp, Artificial Sequence
  Synthetic
gtgtccaaacaugagtttuaagaaacca

SEQ ID NO: 50044 - DNA, 22 bp, Artificial Sequence
  Synthetic
atgaacctaaucgccagccaut

SEQ ID NO: 50045 - DNA, 27 bp, Artificial Sequence
  Synthetic
gagaaactggcuacatgatcaggtuat

SEQ ID NO: 50046 - DNA, 30 bp, Artificial Sequence; identical to SEQ ID NO: 37812
  Synthetic

SEQ ID NO: 50047 - DNA, 24 bp, Artificial Sequence
  Synthetic
gctgagagccucccaaaatgtaua

SEQ ID NO: 50048 - DNA, 28 bp, Artificial Sequence
  Synthetic
aagatctacagucagttcttuccaaacc

SEQ ID NO: 50049 - DNA, 25 bp, Artificial Sequence
  Synthetic
guttcctaaactuccaccacaaaca

SEQ ID NO: 50050 - DNA, 28 bp, Artificial Sequence
  Synthetic
tcutttacttcctguaaacaagcacact

SEQ ID NO: 50051 - DNA, 28 bp, Artificial Sequence
  Synthetic
gaaagtggaacagugaattaacaucaca

SEQ ID NO: 50052 - DNA, 25 bp, Artificial Sequence
  Synthetic
ggtcgatuaggacacattcucgaat

SEQ ID NO: 50053 - DNA, 25 bp, Artificial Sequence
  Synthetic
tctctgatgaguctgaagtccacuc

SEQ ID NO: 50054 - DNA, 18 bp, Artificial Sequence
  Synthetic
ctcctcgcugtcctcugg

SEQ ID NO: 50055 - DNA, 19 bp, Artificial Sequence
  Synthetic
ctccgcutctctcuacgca

SEQ ID NO: 50056 - DNA, 27 bp, Artificial Sequence
  Synthetic
tgaatgtaatcacuttgcatgtgctut

SEQ ID NO: 50057 - DNA, 28 bp, Artificial Sequence
  Synthetic
caccaaccuaatagaggtataaugcact

SEQ ID NO: 50058 - DNA, 24 bp, Artificial Sequence
  Synthetic
aatggtgggauctgttgttcugag

SEQ ID NO: 50059 - DNA, 28 bp, Artificial Sequence
  Synthetic
ttcautacctgtataatuccaaccagca

SEQ ID NO: 50060 - DNA, 21 bp, Artificial Sequence
  Synthetic
ttggcagaucctttggtuggt

SEQ ID NO: 50061 - DNA, 22 bp, Artificial Sequence
  Synthetic
ggcccagacucagagaaugaat

SEQ ID NO: 50062 - DNA, 24 bp, Artificial Sequence
  Synthetic
accaatctugctgatttcacugct

SEQ ID NO: 50063 - DNA, 28 bp, Artificial Sequence
  Synthetic
ttgtttgucaaccaaataatgcugaact

SEQ ID NO: 50064 - DNA, 22 bp, Artificial Sequence
  Synthetic
tggtggucaaatctucacagca

SEQ ID NO: 50065 - DNA, 26 bp, Artificial Sequence
  Synthetic
ccuataaaaccagtucagcaaaaggg

SEQ ID NO: 50066 - DNA, 22 bp, Artificial Sequence
  Synthetic
gtctgugaacaggctgtcucat

SEQ ID NO: 50067 - DNA, 25 bp, Artificial Sequence
  Synthetic
ggtaugcagagaaguagggttauac

SEQ ID NO: 50068 - DNA, 28 bp, Artificial Sequence
  Synthetic
aggtagttatcacaugatggtaccugat

SEQ ID NO: 50069 - DNA, 27 bp, Artificial Sequence
  Synthetic
aggaaatctgggutttacgttacucac

SEQ ID NO: 50070 - DNA, 29 bp, Artificial Sequence
  Synthetic
tgaggctugaaattatttaaucccagaca

SEQ ID NO: 50071 - DNA, 28 bp, Artificial Sequence
  Synthetic
ggaccccaguaaatacttgtagaaugaa

SEQ ID NO: 50072 - DNA, 22 bp, Artificial Sequence
  Synthetic
taccaaggaacagugtguaggt

SEQ ID NO: 50073 - DNA, 26 bp, Artificial Sequence
  Synthetic
gttgggatatcaagutcctccagauc

SEQ ID NO: 50074 - DNA, 28 bp, Artificial Sequence
  Synthetic
tgaaagtaataaugtttctccugagcaa

SEQ ID NO: 50075 - DNA, 30 bp, Artificial Sequence; identical to SEQ ID NO: 37841
  Synthetic

SEQ ID NO: 50076 - DNA, 28 bp, Artificial Sequence
  Synthetic
gacggtccatgaugctatactctatcua

SEQ ID NO: 50077 - DNA, 30 bp, Artificial Sequence; identical to SEQ ID NO: 37843
  Synthetic

SEQ ID NO: 50078 - DNA, 28 bp, Artificial Sequence
  Synthetic
aatgcagactuaaggagaattcagtugt

SEQ ID NO: 50079 - DNA, 30 bp, Artificial Sequence; identical to SEQ ID NO: 37845
  Synthetic

SEQ ID NO: 50080 - DNA, 19 bp, Artificial Sequence
  Synthetic
cgggagcagucctgacuct

SEQ ID NO: 50081 - DNA, 22 bp, Artificial Sequence
  Synthetic
acagtuacgaaaagcggctgua

SEQ ID NO: 50082 - DNA, 22 bp, Artificial Sequence
  Synthetic
aacctcagcutgaccucagaac

SEQ ID NO: 50083 - DNA, 22 bp, Artificial Sequence
  Synthetic
ctgatctgcuccacctacctuc

SEQ ID NO: 50084 - DNA, 21 bp, Artificial Sequence
  Synthetic
cuatgagguagggcacgaact

SEQ ID NO: 50085 - DNA, 24 bp, Artificial Sequence
  Synthetic
ggtatcccguttttgccctuaaga

SEQ ID NO: 50086 - DNA, 20 bp, Artificial Sequence
  Synthetic
cccaauccccagcacatuct

SEQ ID NO: 50087 - DNA, 21 bp, Artificial Sequence
  Synthetic
gactcttcuctgccttgugca

SEQ ID NO: 50088 - DNA, 22 bp, Artificial Sequence
  Synthetic
ccaggagccauaccatcaccua

SEQ ID NO: 50089 - DNA, 22 bp, Artificial Sequence
  Synthetic
gctcttccgucctttcucacag

SEQ ID NO: 50090 - DNA, 22 bp, Artificial Sequence
  Synthetic
ctgcttcugggaatcctuggag

SEQ ID NO: 50091 - DNA, 25 bp, Artificial Sequence
  Synthetic
ccactttcatcutcaccctccuaaa

SEQ ID NO: 50092 - DNA, 20 bp, Artificial Sequence
  Synthetic
cagcgtgagggucctctcua

SEQ ID NO: 50093 - DNA, 20 bp, Artificial Sequence
  Synthetic
gcatggctuctctggcaucc

SEQ ID NO: 50094 - DNA, 20 bp, Artificial Sequence
  Synthetic
cagggagugtagcagugcag

SEQ ID NO: 50095 - DNA, 24 bp, Artificial Sequence
  Synthetic
gaccacactucccttctacaucag

SEQ ID NO: 50096 - DNA, 23 bp, Artificial Sequence
  Synthetic
aaagtctcuccatctctccaugc

SEQ ID NO: 50097 - DNA, 26 bp, Artificial Sequence
  Synthetic
tccccactaauaacactcacttcuct

SEQ ID NO: 50098 - DNA, 21 bp, Artificial Sequence
  Synthetic
cgtctucggagagacctugag

SEQ ID NO: 50099 - DNA, 22 bp, Artificial Sequence
  Synthetic
gacttggctuacccctcctuag

SEQ ID NO: 50100 - DNA, 17 bp, Artificial Sequence
  Synthetic
ctcgtgucccgggtgut

SEQ ID NO: 50101 - DNA, 17 bp, Artificial Sequence
  Synthetic
cctccucgggacucgac

SEQ ID NO: 50102 - DNA, 25 bp, Artificial Sequence
  Synthetic
tctataaauagctggaggugggcat

SEQ ID NO: 50103 - DNA, 26 bp, Artificial Sequence
  Synthetic
gttcaaagggcauatactggtacugg

SEQ ID NO: 50104 - DNA, 23 bp, Artificial Sequence
  Synthetic
tgtctgcuggcctctgtctatua

SEQ ID NO: 50105 - DNA, 27 bp, Artificial Sequence
  Synthetic
atttctttattccucagtccccaucac

SEQ ID NO: 50106 - DNA, 21 bp, Artificial Sequence
  Synthetic
acgggatctutctggtgctuc

SEQ ID NO: 50107 - DNA, 21 bp, Artificial Sequence
  Synthetic
acacccugcttaacatucgct

SEQ ID NO: 50108 - DNA, 25 bp, Artificial Sequence
  Synthetic
ggacattcatcucccttttcaccut

SEQ ID NO: 50109 - DNA, 21 bp, Artificial Sequence
  Synthetic
ccagctcuggcttcagtcaug

SEQ ID NO: 50110 - DNA, 23 bp, Artificial Sequence
  Synthetic
cctctctuccacctgtttctcug

SEQ ID NO: 50111 - DNA, 29 bp, Artificial Sequence
  Synthetic
gcacttgtggauactgattaaaactgtut

SEQ ID NO: 50112 - DNA, 22 bp, Artificial Sequence
  Synthetic
tgaaaacugcccacctctgtut

SEQ ID NO: 50113 - DNA, 23 bp, Artificial Sequence
  Synthetic
caatcuacagcctcacuccacac

SEQ ID NO: 50114 - DNA, 24 bp, Artificial Sequence
  Synthetic
gactacgguggacuaaaggaaact

SEQ ID NO: 50115 - DNA, 24 bp, Artificial Sequence
  Synthetic
gtgctgtttccuctttaccatgug

SEQ ID NO: 50116 - DNA, 23 bp, Artificial Sequence
  Synthetic
tgcagaaaggaggauagugggaa

SEQ ID NO: 50117 - DNA, 25 bp, Artificial Sequence
  Synthetic
ctagatugcaactctcagucagacc

SEQ ID NO: 50118 - DNA, 25 bp, Artificial Sequence
  Synthetic
tcatgtctctcautccgtgttatuc

SEQ ID NO: 50119 - DNA, 23 bp, Artificial Sequence
  Synthetic
gatgtgagcaauctgacccgtua

SEQ ID NO: 50120 - DNA, 22 bp, Artificial Sequence
  Synthetic
caccatgcttuctccctccaua

SEQ ID NO: 50121 - DNA, 24 bp, Artificial Sequence
  Synthetic
actagctcuggagtcgacttctuc

SEQ ID NO: 50122 - DNA, 18 bp, Artificial Sequence
  Synthetic
gauggcgcggaagttguc

SEQ ID NO: 50123 - DNA, 22 bp, Artificial Sequence
  Synthetic
cgcttttcccuttgctccugat

SEQ ID NO: 50124 - DNA, 23 bp, Artificial Sequence
  Synthetic
cagctcttuggaggcaaatgtua

SEQ ID NO: 50125 - DNA, 24 bp, Artificial Sequence
  Synthetic
gtatccccaaacacauctcctcuc

SEQ ID NO: 50126 - DNA, 24 bp, Artificial Sequence
  Synthetic
ggtgaaaggaggcuctgtgattut

SEQ ID NO: 50127 - DNA, 22 bp, Artificial Sequence
  Synthetic
ccugagcagucagcaaaagact

SEQ ID NO: 50128 - DNA, 27 bp, Artificial Sequence
  Synthetic
ttcctttcattguacctgttctttuct

SEQ ID NO: 50129 - DNA, 20 bp, Artificial Sequence
  Synthetic
ccccgguactctttcgagut

SEQ ID NO: 50130 - DNA, 20 bp, Artificial Sequence
  Synthetic
gcaagguagagggcgagtug

SEQ ID NO: 50131 - DNA, 21 bp, Artificial Sequence
  Synthetic
cccacacaagutcacccucag

SEQ ID NO: 50132 - DNA, 20 bp, Artificial Sequence
  Synthetic
cgaucccagacaccuagcat

SEQ ID NO: 50133 - DNA, 27 bp, Artificial Sequence
  Synthetic
ctggccagaguattccttttaaguagg

SEQ ID NO: 50134 - DNA, 17 bp, Artificial Sequence
  Synthetic
tgccugcggccttgaut

SEQ ID NO: 50135 - DNA, 19 bp, Artificial Sequence
  Synthetic
gcagctgcuacctggaugc

SEQ ID NO: 50136 - DNA, 20 bp, Artificial Sequence
  Synthetic
tgggacuggacgagcttcua

SEQ ID NO: 50137 - DNA, 20 bp, Artificial Sequence
  Synthetic
ctgagcgcuctttcctccuc

SEQ ID NO: 50138 - DNA, 21 bp, Artificial Sequence
  Synthetic
gcagacaggcaugggaguaga

SEQ ID NO: 50139 - DNA, 19 bp, Artificial Sequence
  Synthetic
catgacccccuacccugac

SEQ ID NO: 50140 - DNA, 18 bp, Artificial Sequence
  Synthetic
cagctcccuctccccugt

SEQ ID NO: 50141 - DNA, 19 bp, Artificial Sequence
  Synthetic
ccuccttccttucccacca

SEQ ID NO: 50142 - DNA, 19 bp, Artificial Sequence
  Synthetic
cuggaagagguggaagcca

SEQ ID NO: 50143 - DNA, 19 bp, Artificial Sequence
  Synthetic
cuctgcaggaugaccgcat

SEQ ID NO: 50144 - DNA, 22 bp, Artificial Sequence
  Synthetic
tgctaaaguccccggagactuc

SEQ ID NO: 50145 - DNA, 21 bp, Artificial Sequence
  Synthetic
gggtgguggatgggttuaaca

SEQ ID NO: 50146 - DNA, 21 bp, Artificial Sequence
  Synthetic
ggacaaucagacgggaagcug

SEQ ID NO: 50147 - DNA, 26 bp, Artificial Sequence
  Synthetic
ctgtgatuaccttgatttcuggacct

SEQ ID NO: 50148 - DNA, 21 bp, Artificial Sequence
  Synthetic
ccttagguctaggagcuggca

SEQ ID NO: 50149 - DNA, 17 bp, Artificial Sequence
  Synthetic
ccugacagccggcucag

SEQ ID NO: 50150 - DNA, 18 bp, Artificial Sequence
  Synthetic
cccucccagaggcgauct

SEQ ID NO: 50151 - DNA, 19 bp, Artificial Sequence
  Synthetic
gctctcccugcaaaacugg

SEQ ID NO: 50152 - DNA, 18 bp, Artificial Sequence
  Synthetic
cgatgtgucccgcaccuc

SEQ ID NO: 50153 - DNA, 22 bp, Artificial Sequence
  Synthetic
ccaagcugaagaagacauggct

SEQ ID NO: 50154 - DNA, 19 bp, Artificial Sequence
  Synthetic
ctccuggcactucccacaa

SEQ ID NO: 50155 - DNA, 19 bp, Artificial Sequence
  Synthetic
cagacacugtgcccuggac

SEQ ID NO: 50156 - DNA, 21 bp, Artificial Sequence
  Synthetic
catccctcuggtgcagugaag

SEQ ID NO: 50157 - DNA, 22 bp, Artificial Sequence
  Synthetic
cttgtcagutctgcccauccat

SEQ ID NO: 50158 - DNA, 21 bp, Artificial Sequence
  Synthetic
gccagtcacauggatgctcug

SEQ ID NO: 50159 - DNA, 20 bp, Artificial Sequence
  Synthetic
ccctgaugcctgagcauagt

SEQ ID NO: 50160 - DNA, 21 bp, Artificial Sequence
  Synthetic
cacaagugggagcatgtccut

SEQ ID NO: 50161 - DNA, 19 bp, Artificial Sequence
  Synthetic
ggagaguacgcccagctuc

SEQ ID NO: 50162 - DNA, 18 bp, Artificial Sequence
  Synthetic
tcucaccagcagguggag

SEQ ID NO: 50163 - DNA, 19 bp, Artificial Sequence
  Synthetic
tgccaauggcggacucaaa

SEQ ID NO: 50164 - DNA, 17 bp, Artificial Sequence
  Synthetic
ccctgcucagggaggug

SEQ ID NO: 50165 - DNA, 21 bp, Artificial Sequence
  Synthetic
cgtcccugaccttacagucct

SEQ ID NO: 50166 - DNA, 22 bp, Artificial Sequence
  Synthetic
agaaagaggacucctcagucca

SEQ ID NO: 50167 - DNA, 19 bp, Artificial Sequence
  Synthetic
tcccctgugctgcttucag

SEQ ID NO: 50168 - DNA, 26 bp, Artificial Sequence
  Synthetic
agtctgctatcutcatcacattgucc

SEQ ID NO: 50169 - DNA, 24 bp, Artificial Sequence
  Synthetic
gttctaugagacaagtcggcuagt

SEQ ID NO: 50170 - DNA, 19 bp, Artificial Sequence
  Synthetic
ctcctcugggttgtggcug

SEQ ID NO: 50171 - DNA, 23 bp, Artificial Sequence
  Synthetic
tuctttgaggugaagccaaacct

SEQ ID NO: 50172 - DNA, 21 bp, Artificial Sequence
  Synthetic
ctgttugcttggaaugggaca

SEQ ID NO: 50173 - DNA, 24 bp, Artificial Sequence
  Synthetic
ccaacttaugccactctctgttuc

SEQ ID NO: 50174 - DNA, 27 bp, Artificial Sequence
  Synthetic
ccaaagctauaaattagggacaaugga

SEQ ID NO: 50175 - DNA, 27 bp, Artificial Sequence
  Synthetic
catcgtctacaagaugaagagtgguac

SEQ ID NO: 50176 - DNA, 24 bp, Artificial Sequence
  Synthetic
gcaggacaucgagaggagaagtua

SEQ ID NO: 50177 - DNA, 26 bp, Artificial Sequence
  Synthetic
cattttgcttccgutgtctcttcuag

SEQ ID NO: 50178 - DNA, 24 bp, Artificial Sequence
  Synthetic
agtgacgttgcuctcaaagctuat

SEQ ID NO: 50179 - DNA, 22 bp, Artificial Sequence
  Synthetic
ccgaatgggaucattccucacg

SEQ ID NO: 50180 - DNA, 21 bp, Artificial Sequence
  Synthetic
caggttgtcugggccaatcut

SEQ ID NO: 50181 - DNA, 22 bp, Artificial Sequence
  Synthetic
cctctttagccauggcaagguc

SEQ ID NO: 50182 - DNA, 22 bp, Artificial Sequence
  Synthetic
cuaactttcgcaugcacacaca

SEQ ID NO: 50183 - DNA, 21 bp, Artificial Sequence
  Synthetic
cctgtctcucttggcttuccc

SEQ ID NO: 50184 - DNA, 18 bp, Artificial Sequence
  Synthetic
gcagggcutggcuaccaa

SEQ ID NO: 50185 - DNA, 17 bp, Artificial Sequence
  Synthetic
ctgcagcutcgctgucg

SEQ ID NO: 50186 - DNA, 23 bp, Artificial Sequence
  Synthetic
ccacatcaccugcaaccatauca

SEQ ID NO: 50187 - DNA, 23 bp, Artificial Sequence
  Synthetic
acctctaacugcagaacugggat

SEQ ID NO: 50188 - DNA, 24 bp, Artificial Sequence
  Synthetic
gaatatcctggaugtctgcagcua

SEQ ID NO: 50189 - DNA, 26 bp, Artificial Sequence
  Synthetic
gaccttcagaagacguaggatgaaug

SEQ ID NO: 50190 - DNA, 22 bp, Artificial Sequence
  Synthetic
gtcaacccucgctccttuaagt

SEQ ID NO: 50191 - DNA, 21 bp, Artificial Sequence
  Synthetic
ctttguccaggtcuacaggct

SEQ ID NO: 50192 - DNA, 22 bp, Artificial Sequence
  Synthetic
gcctagtggucttcaggaaugg

SEQ ID NO: 50193 - DNA, 28 bp, Artificial Sequence
  Synthetic
attcataucccacacgaatccaatuagt

SEQ ID NO: 50194 - DNA, 28 bp, Artificial Sequence
  Synthetic
ggagccattuaaaccaggaaattaugac

SEQ ID NO: 50195 - DNA, 21 bp, Artificial Sequence
  Synthetic
catggatttugccgtcctuga

SEQ ID NO: 50196 - DNA, 28 bp, Artificial Sequence
  Synthetic
ggtcccagattuattctgtttcttcuga

SEQ ID NO: 50197 - DNA, 30 bp, Artificial Sequence; identical to SEQ ID NO: 37963
  Synthetic

SEQ ID NO: 50198 - DNA, 26 bp, Artificial Sequence
  Synthetic
gaagaacagaaagucgatcatcuggt

SEQ ID NO: 50199 - DNA, 24 bp, Artificial Sequence
  Synthetic
gttccctggaugatatctgtgucc

SEQ ID NO: 50200 - DNA, 30 bp, Artificial Sequence; identical to SEQ ID NO: 37966
  Synthetic

SEQ ID NO: 50201 - DNA, 28 bp, Artificial Sequence
  Synthetic
cttgacttaagcagacugttttccttut

SEQ ID NO: 50202 - DNA, 26 bp, Artificial Sequence
  Synthetic
tgtggaggaagaugtagttgattgug

SEQ ID NO: 50203 - DNA, 23 bp, Artificial Sequence
  Synthetic
cagtgacaguagaggatgctuct

SEQ ID NO: 50204 - DNA, 24 bp, Artificial Sequence
  Synthetic
gacagcaagcaauaaatuccaggt

SEQ ID NO: 50205 - DNA, 29 bp, Artificial Sequence
  Synthetic
cgtggaatugagattactttuggaacaaa

SEQ ID NO: 50206 - DNA, 29 bp, Artificial Sequence
  Synthetic
guatttaacatcctugagcaaaaacccaa

SEQ ID NO: 50207 - DNA, 22 bp, Artificial Sequence
  Synthetic
agaatttgcccuggttguagca

SEQ ID NO: 50208 - DNA, 29 bp, Artificial Sequence
  Synthetic
agcctataaaaucagctccagtatguaga

SEQ ID NO: 50209 - DNA, 28 bp, Artificial Sequence
  Synthetic
accagtgtcatuggcaataaaagactua

SEQ ID NO: 50210 - DNA, 31 bp, Artificial Sequence; identical to SEQ ID NO: 37976
  Synthetic

SEQ ID NO: 50211 - DNA, 23 bp, Artificial Sequence
  Synthetic
caggaacugaagcttgcaatugg

SEQ ID NO: 50212 - DNA, 25 bp, Artificial Sequence
  Synthetic
cttggugctaaaccuaaagggaagt

SEQ ID NO: 50213 - DNA, 30 bp, Artificial Sequence; identical to SEQ ID NO: 37979
  Synthetic

SEQ ID NO: 50214 - DNA, 23 bp, Artificial Sequence
  Synthetic
ttttggaagugacttgctcucca

SEQ ID NO: 50215 - DNA, 27 bp, Artificial Sequence
  Synthetic
ccctcatagguatggttctcctttuga

SEQ ID NO: 50216 - DNA, 28 bp, Artificial Sequence
  Synthetic
ctgaagagtuagaaagaggtgaugacat

SEQ ID NO: 50217 - DNA, 31 bp, Artificial Sequence; identical to SEQ ID NO: 37983
  Synthetic

SEQ ID NO: 50218 - DNA, 25 bp, Artificial Sequence
  Synthetic
ggagagcaagccacugaagaatuaa

SEQ ID NO: 50219 - DNA, 31 bp, Artificial Sequence; identical to SEQ ID NO: 37985
  Synthetic

SEQ ID NO: 50220 - DNA, 21 bp, Artificial Sequence
  Synthetic
actatcggccugacagugaca

SEQ ID NO: 50221 - DNA, 29 bp, Artificial Sequence
  Synthetic
cctggaacacugaaattccacagaatuat

SEQ ID NO: 50222 - DNA, 25 bp, Artificial Sequence
  Synthetic
atctatgtugcaggaatuccaggag

SEQ ID NO: 50223 - DNA, 24 bp, Artificial Sequence
  Synthetic
cagaagccauttgcctttgucaat

SEQ ID NO: 50224 - DNA, 21 bp, Artificial Sequence
  Synthetic
gcccaacgauggatgaacuct

SEQ ID NO: 50225 - DNA, 26 bp, Artificial Sequence
  Synthetic
cccttctccuctgtatgatgattugc

SEQ ID NO: 50226 - DNA, 23 bp, Artificial Sequence
  Synthetic
atggtacacutcaggaagcugac

SEQ ID NO: 50227 - DNA, 27 bp, Artificial Sequence
  Synthetic
gctttattgtuctcttcccugaacaca

SEQ ID NO: 50228 - DNA, 29 bp, Artificial Sequence
  Synthetic
cacatttgacutgatggguaaaagaagaa

SEQ ID NO: 50229 - DNA, 24 bp, Artificial Sequence
  Synthetic
gatttcatttguctgaccgcugag

SEQ ID NO: 50230 - DNA, 24 bp, Artificial Sequence
  Synthetic
cttggtcaagcutgcctctuagat

SEQ ID NO: 50231 - DNA, 31 bp, Artificial Sequence; identical to SEQ ID NO: 37997
  Synthetic

SEQ ID NO: 50232 - DNA, 19 bp, Artificial Sequence
  Synthetic
caccccaaacuccctucca

SEQ ID NO: 50233 - DNA, 23 bp, Artificial Sequence
  Synthetic
ctcatcatucctggatcugccat

SEQ ID NO: 50234 - DNA, 24 bp, Artificial Sequence
  Synthetic
agaatgtggtuacccggaaaaucc

SEQ ID NO: 50235 - DNA, 30 bp, Artificial Sequence; identical to SEQ ID NO: 38001
  Synthetic

SEQ ID NO: 50236 - DNA, 21 bp, Artificial Sequence
  Synthetic
gtctacccuggcaugcagaat

SEQ ID NO: 50237 - DNA, 21 bp, Artificial Sequence
  Synthetic
tgcauggaaaaauccccacgt

SEQ ID NO: 50238 - DNA, 23 bp, Artificial Sequence
  Synthetic
tccttttatugccaccucaggac

SEQ ID NO: 50239 - DNA, 22 bp, Artificial Sequence
  Synthetic
actgtctggcuccgagaacuaa

SEQ ID NO: 50240 - DNA, 23 bp, Artificial Sequence
  Synthetic
caagauaccccaatgctguagga

SEQ ID NO: 50241 - DNA, 21 bp, Artificial Sequence
  Synthetic
gaggagtgccugctggatuac

SEQ ID NO: 50242 - DNA, 22 bp, Artificial Sequence
  Synthetic
gaataugggccccagaaacaug

SEQ ID NO: 50243 - DNA, 23 bp, Artificial Sequence
  Synthetic
aaaagauggctgtugaccaggat

SEQ ID NO: 50244 - DNA, 26 bp, Artificial Sequence
  Synthetic
agtttcagaaacaucagccacuaact

SEQ ID NO: 50245 - DNA, 22 bp, Artificial Sequence
  Synthetic
cttcacuagctgagcatucggt

SEQ ID NO: 50246 - DNA, 30 bp, Artificial Sequence; identical to SEQ ID NO: 38012
  Synthetic

SEQ ID NO: 50247 - DNA, 25 bp, Artificial Sequence
  Synthetic
tggcagttttugctttcttttccut

SEQ ID NO: 50248 - DNA, 28 bp, Artificial Sequence
  Synthetic
gagacaugcagaaacacattaaaaguga

SEQ ID NO: 50249 - DNA, 29 bp, Artificial Sequence
  Synthetic
aaggctcgggaaucacaataattgtatua

SEQ ID NO: 50250 - DNA, 26 bp, Artificial Sequence
  Synthetic
gggaatgattucttgctcttauagct

SEQ ID NO: 50251 - DNA, 26 bp, Artificial Sequence
  Synthetic
cctcacagattutaatggctccaaug

SEQ ID NO: 50252 - DNA, 26 bp, Artificial Sequence
  Synthetic
ttgctgugacccaaaatattatugct

SEQ ID NO: 50253 - DNA, 29 bp, Artificial Sequence
  Synthetic
cctgaatcaccacuttgtaatacaaauga

SEQ ID NO: 50254 - DNA, 26 bp, Artificial Sequence
  Synthetic
tgutcacttccttaugaagacagcac

SEQ ID NO: 50255 - DNA, 23 bp, Artificial Sequence
  Synthetic
gttucccaaagaucacaccacua

SEQ ID NO: 50256 - DNA, 22 bp, Artificial Sequence
  Synthetic
ccautgtccacaauccccaact

SEQ ID NO: 50257 - DNA, 29 bp, Artificial Sequence
  Synthetic
gcacagaguaagtacaaagaauacaacct

SEQ ID NO: 50258 - DNA, 23 bp, Artificial Sequence
  Synthetic
agtggctttccutgtgttaccuc

SEQ ID NO: 50259 - DNA, 29 bp, Artificial Sequence
  Synthetic
gccatttcatgggcuaatcttcaatttua

SEQ ID NO: 50260 - DNA, 26 bp, Artificial Sequence
  Synthetic
ctuggcccucaaagaagaaactatua

SEQ ID NO: 50261 - DNA, 21 bp, Artificial Sequence
  Synthetic
cutaagcaagtucgcgagcag

SEQ ID NO: 50262 - DNA, 24 bp, Artificial Sequence
  Synthetic
cagggugcttatctttucccagat

SEQ ID NO: 50263 - DNA, 25 bp, Artificial Sequence
  Synthetic
tagccccuttatcatagatuccact

SEQ ID NO: 50264 - DNA, 25 bp, Artificial Sequence
  Synthetic
tcgacagattcuccaaacctgatuc

SEQ ID NO: 50265 - DNA, 28 bp, Artificial Sequence
  Synthetic
ctttttaaaggcaucaggactttctugt

SEQ ID NO: 50266 - DNA, 29 bp, Artificial Sequence
  Synthetic
ctgtgaaaatcuacaggctgatuacaaga

SEQ ID NO: 50267 - DNA, 28 bp, Artificial Sequence
  Synthetic
aggtcgaaaaataaucaaaggctgagua

SEQ ID NO: 50268 - DNA, 23 bp, Artificial Sequence
  Synthetic
ctatggugcactcatggaugagg

SEQ ID NO: 50269 - DNA, 26 bp, Artificial Sequence
  Synthetic
tctgtcatgctuctatggaaaaccug

SEQ ID NO: 50270 - DNA, 22 bp, Artificial Sequence
  Synthetic
atgggagggugagtaagaaguc

SEQ ID NO: 50271 - DNA, 24 bp, Artificial Sequence
  Synthetic
agtctgagaacuccatcagcucat

SEQ ID NO: 50272 - DNA, 21 bp, Artificial Sequence
  Synthetic
gattucccaacgctgguacct

SEQ ID NO: 50273 - DNA, 23 bp, Artificial Sequence
  Synthetic
aggatggttcugcagatggttuc

SEQ ID NO: 50274 - DNA, 23 bp, Artificial Sequence
  Synthetic
atatttcccugcctcgtgcatua

SEQ ID NO: 50275 - DNA, 22 bp, Artificial Sequence
  Synthetic
tcttgtagcugtcctccuggaa

SEQ ID NO: 50276 - DNA, 22 bp, Artificial Sequence
  Synthetic
ttggcaggaugatggaugaaca

SEQ ID NO: 50277 - DNA, 24 bp, Artificial Sequence
  Synthetic
gaacaaatgugagctcgcacuaac

SEQ ID NO: 50278 - DNA, 22 bp, Artificial Sequence
  Synthetic
gtgtgttttcugtgcacggaug

SEQ ID NO: 50279 - DNA, 28 bp, Artificial Sequence
  Synthetic
cctgccaatagaugtgaaactgacauaa

SEQ ID NO: 50280 - DNA, 25 bp, Artificial Sequence
  Synthetic
ctgtttctugctttgcttucaagga

SEQ ID NO: 50281 - DNA, 21 bp, Artificial Sequence
  Synthetic
cacugctgtcaugaagcagga

SEQ ID NO: 50282 - DNA, 22 bp, Artificial Sequence
  Synthetic
gccaacttuactggccuaacac

SEQ ID NO: 50283 - DNA, 24 bp, Artificial Sequence
  Synthetic
gagtggaaaccutgaagaaacuca

SEQ ID NO: 50284 - DNA, 23 bp, Artificial Sequence
  Synthetic
gaaccaattuagagccttugcca

SEQ ID NO: 50285 - DNA, 28 bp, Artificial Sequence
  Synthetic
gaattcaagggcautctacattguacac

SEQ ID NO: 50286 - DNA, 22 bp, Artificial Sequence
  Synthetic
cattgagcugctacggaagauc

SEQ ID NO: 50287 - DNA, 27 bp, Artificial Sequence
  Synthetic
tttgagcaaaguttttatgtgcaucca

SEQ ID NO: 50288 - DNA, 23 bp, Artificial Sequence
  Synthetic
gaugagagggtacuggaacaagc

SEQ ID NO: 50289 - DNA, 23 bp, Artificial Sequence
  Synthetic
tcctctucggaacctttctcuga

SEQ ID NO: 50290 - DNA, 25 bp, Artificial Sequence
  Synthetic
cttcagtttcccugatactgtggut

SEQ ID NO: 50291 - DNA, 23 bp, Artificial Sequence
  Synthetic
gctactgaaggauctccgtccuc

SEQ ID NO: 50292 - DNA, 29 bp, Artificial Sequence
  Synthetic
cattttatgctcutttgcatcttgaugga

SEQ ID NO: 50293 - DNA, 22 bp, Artificial Sequence
  Synthetic
acatcuggcgcctatttacugg

SEQ ID NO: 50294 - DNA, 22 bp, Artificial Sequence
  Synthetic
ccagcccauatagcagtacugt

SEQ ID NO: 50295 - DNA, 29 bp, Artificial Sequence
  Synthetic
caactttttctugtccattttcugagacc

SEQ ID NO: 50296 - DNA, 24 bp, Artificial Sequence
  Synthetic
gcctaatgtcucaacaccagtguc

SEQ ID NO: 50297 - DNA, 20 bp, Artificial Sequence
  Synthetic
aggcaagcuccccaactuac

SEQ ID NO: 50298 - DNA, 21 bp, Artificial Sequence
  Synthetic
cagacacacggauccctgtua

SEQ ID NO: 50299 - DNA, 27 bp, Artificial Sequence
  Synthetic
attccttccaacuctaaactcugcaat

SEQ ID NO: 50300 - DNA, 29 bp, Artificial Sequence
  Synthetic
gaaacgacatagaugtcgaaaccctaaua

SEQ ID NO: 50301 - DNA, 27 bp, Artificial Sequence
  Synthetic
gcagacaggautcttttcccctauaga

SEQ ID NO: 50302 - DNA, 22 bp, Artificial Sequence
  Synthetic
atttccauttggaauggcaggt

SEQ ID NO: 50303 - DNA, 23 bp, Artificial Sequence
  Synthetic
acttttgggccutcttcctctuc

SEQ ID NO: 50304 - DNA, 21 bp, Artificial Sequence
  Synthetic
ctgtttgcuggaatggaccug

SEQ ID NO: 50305 - DNA, 20 bp, Artificial Sequence
  Synthetic
aguagcagcugacagagggt

SEQ ID NO: 50306 - DNA, 22 bp, Artificial Sequence
  Synthetic
aaaagcacagaugctgttucgg

SEQ ID NO: 50307 - DNA, 22 bp, Artificial Sequence
  Synthetic
gcattctgaagucctgccaaug

SEQ ID NO: 50308 - DNA, 24 bp, Artificial Sequence
  Synthetic
gaagagcuagactcacttgauggg

SEQ ID NO: 50309 - DNA, 25 bp, Artificial Sequence
  Synthetic
accaagataccutttgacacaccug

SEQ ID NO: 50310 - DNA, 27 bp, Artificial Sequence
  Synthetic
gcatttacttcugacatctcgatucct

SEQ ID NO: 50311 - DNA, 20 bp, Artificial Sequence
  Synthetic
gcgctctaugtggagagugg

SEQ ID NO: 50312 - DNA, 24 bp, Artificial Sequence
  Synthetic
cagaaatucagcaaaaccaugcca

SEQ ID NO: 50313 - DNA, 23 bp, Artificial Sequence
  Synthetic
gcatcattugggaaagucaagca

SEQ ID NO: 50314 - DNA, 28 bp, Artificial Sequence
  Synthetic
ccaattguacaaacaguataccagatut

SEQ ID NO: 50315 - DNA, 27 bp, Artificial Sequence
  Synthetic
cagtttactcagugctttcatggatut

SEQ ID NO: 50316 - DNA, 25 bp, Artificial Sequence
  Synthetic
ttactcagaacguctgatgttuccc

SEQ ID NO: 50317 - DNA, 26 bp, Artificial Sequence
  Synthetic
ttgatgagtucagaacagtgctguaa

SEQ ID NO: 50318 - DNA, 22 bp, Artificial Sequence
  Synthetic
gaacgaccuattgggctucact

SEQ ID NO: 50319 - DNA, 29 bp, Artificial Sequence
  Synthetic
gtgcaaagcagutaattgatctaaacugt

SEQ ID NO: 50320 - DNA, 25 bp, Artificial Sequence
  Synthetic
atctcatauccgacataggcatuct

SEQ ID NO: 50321 - DNA, 29 bp, Artificial Sequence
  Synthetic
cgcttaccctatuttccaattgtaaacut

SEQ ID NO: 50322 - DNA, 24 bp, Artificial Sequence
  Synthetic
aatctgttaccugggccaaauacc

SEQ ID NO: 50323 - DNA, 29 bp, Artificial Sequence
  Synthetic
aatgtttatcuccagggtttttcttccut

SEQ ID NO: 50324 - DNA, 28 bp, Artificial Sequence
  Synthetic
atgtaagtattgacugtacaccctcuct

SEQ ID NO: 50325 - DNA, 29 bp, Artificial Sequence
  Synthetic
gacactgtagccuttacgaatgtacuaaa

SEQ ID NO: 50326 - DNA, 26 bp, Artificial Sequence
  Synthetic
catggaagaaaggutaagtgagtuca

SEQ ID NO: 50327 - DNA, 24 bp, Artificial Sequence
  Synthetic
ccucttctcagaaauccagaccac

SEQ ID NO: 50328 - DNA, 23 bp, Artificial Sequence
  Synthetic
cagatgagacugcctgcagtaut

SEQ ID NO: 50329 - DNA, 29 bp, Artificial Sequence
  Synthetic
ggttttgttttcuagattcaagatuggca

SEQ ID NO: 50330 - DNA, 24 bp, Artificial Sequence
  Synthetic
acactcttgcuccacgttgtaaut

SEQ ID NO: 50331 - DNA, 27 bp, Artificial Sequence
  Synthetic
cagtgtaagagcuttatgtttccccut

SEQ ID NO: 50332 - DNA, 24 bp, Artificial Sequence
  Synthetic
tcactcccttutgcacacatgaua

SEQ ID NO: 50333 - DNA, 31 bp, Artificial Sequence; identical to SEQ ID NO: 38099
  Synthetic

SEQ ID NO: 50334 - DNA, 20 bp, Artificial Sequence
  Synthetic
ggcggguaggcacttcaaua

SEQ ID NO: 50335 - DNA, 28 bp, Artificial Sequence
  Synthetic
ccccctatauagacaaattaggcaucct

SEQ ID NO: 50336 - DNA, 26 bp, Artificial Sequence
  Synthetic
cctaaaaggauaaaatcctgggcuga

SEQ ID NO: 50337 - DNA, 28 bp, Artificial Sequence
  Synthetic
cctaggaacatcutcttaccgtttctut

SEQ ID NO: 50338 - DNA, 22 bp, Artificial Sequence
  Synthetic
aagaaagguccccaacgatcug

SEQ ID NO: 50339 - DNA, 31 bp, Artificial Sequence; identical to SEQ ID NO: 38105
  Synthetic

SEQ ID NO: 50340 - DNA, 23 bp, Artificial Sequence
  Synthetic
cacacatuccaaacacaccagua

SEQ ID NO: 50341 - DNA, 31 bp, Artificial Sequence; identical to SEQ ID NO: 38107
  Synthetic

SEQ ID NO: 50342 - DNA, 25 bp, Artificial Sequence
  Synthetic
gagtaatauaaacggccacccctut

SEQ ID NO: 50343 - DNA, 27 bp, Artificial Sequence
  Synthetic
tcaaguttcttatttgucaaggcaagc

SEQ ID NO: 50344 - DNA, 28 bp, Artificial Sequence
  Synthetic
attatttacaacautacaacctgugggt

SEQ ID NO: 50345 - DNA, 23 bp, Artificial Sequence
  Synthetic
ctttgagccutccatcctucaca

SEQ ID NO: 50346 - DNA, 25 bp, Artificial Sequence
  Synthetic
tacuctttugggaaagaaggaagga

SEQ ID NO: 50347 - DNA, 22 bp, Artificial Sequence
  Synthetic
ccagagagugcctaucaacgaa

SEQ ID NO: 50348 - DNA, 25 bp, Artificial Sequence
  Synthetic
ttcttggatuactgctgtucacagt

SEQ ID NO: 50349 - DNA, 27 bp, Artificial Sequence
  Synthetic
ttggcttttgucctcttctcttctuag

SEQ ID NO: 50350 - DNA, 23 bp, Artificial Sequence
  Synthetic
tgtgtcctttuccctctccacua

SEQ ID NO: 50351 - DNA, 26 bp, Artificial Sequence
  Synthetic
tttttctcaggguccagaattauggg

SEQ ID NO: 50352 - DNA, 27 bp, Artificial Sequence
  Synthetic
ccatatttctgtugatcagctctguct

SEQ ID NO: 50353 - DNA, 21 bp, Artificial Sequence
  Synthetic
agtguccaggcacagaguagt

SEQ ID NO: 50354 - DNA, 26 bp, Artificial Sequence
  Synthetic
acttttaauagcttggacugcacaca

SEQ ID NO: 50355 - DNA, 21 bp, Artificial Sequence
  Synthetic
catgctgggaccugttcacut

SEQ ID NO: 50356 - DNA, 22 bp, Artificial Sequence
  Synthetic
gagtuagaagcccccaaaguga

SEQ ID NO: 50357 - DNA, 25 bp, Artificial Sequence
  Synthetic
tgtgatcaccuaatagccagcgaua

SEQ ID NO: 50358 - DNA, 23 bp, Artificial Sequence
  Synthetic
cctgagggugctgttauagaagg

SEQ ID NO: 50359 - DNA, 25 bp, Artificial Sequence
  Synthetic
atgataguggcaaaggagagagtug

SEQ ID NO: 50360 - DNA, 23 bp, Artificial Sequence
  Synthetic
gggactccuctattcttggcuca

SEQ ID NO: 50361 - DNA, 21 bp, Artificial Sequence
  Synthetic
ggctggaaucccgcttacuaa

SEQ ID NO: 50362 - DNA, 25 bp, Artificial Sequence
  Synthetic
aaaaatgtggucctgagtctuagca

SEQ ID NO: 50363 - DNA, 25 bp, Artificial Sequence
  Synthetic
ggacagtuaagagaaggctgcttut

SEQ ID NO: 50364 - DNA, 28 bp, Artificial Sequence
  Synthetic
cagagcagaagaaaggugaatgaagaua

SEQ ID NO: 50365 - DNA, 22 bp, Artificial Sequence
  Synthetic
agtgagaagugtcttgggtugg

SEQ ID NO: 50366 - DNA, 24 bp, Artificial Sequence
  Synthetic
cttggcgguagtgatttttgcaut

SEQ ID NO: 50367 - DNA, 27 bp, Artificial Sequence
  Synthetic
caactttatcgcuttttcctgccatua

SEQ ID NO: 50368 - DNA, 23 bp, Artificial Sequence
  Synthetic
tccccctucccaaactcttcaua

SEQ ID NO: 50369 - DNA, 28 bp, Artificial Sequence
  Synthetic
aggtgaaatctgautaaaacaagcacug

SEQ ID NO: 50370 - DNA, 25 bp, Artificial Sequence
  Synthetic
aatgtctcauggagaagcagugaaa

SEQ ID NO: 50371 - DNA, 23 bp, Artificial Sequence
  Synthetic
tcagtcaggaugcaaactctugg

SEQ ID NO: 50372 - DNA, 28 bp, Artificial Sequence
  Synthetic
tttcaatacuccagaatgaagugaaggt

SEQ ID NO: 50373 - DNA, 28 bp, Artificial Sequence
  Synthetic
ccatgccatcguctgtattaagtctuat

SEQ ID NO: 50374 - DNA, 20 bp, Artificial Sequence
  Synthetic
ggttctccucgcctactgug

SEQ ID NO: 50375 - DNA, 22 bp, Artificial Sequence
  Synthetic
caacccaucccagctgagtaut

SEQ ID NO: 50376 - DNA, 25 bp, Artificial Sequence
  Synthetic
caccagaatutaaacaacgcugaca

SEQ ID NO: 50377 - DNA, 22 bp, Artificial Sequence
  Synthetic
gauacaagagctuccggagacc

SEQ ID NO: 50378 - DNA, 23 bp, Artificial Sequence
  Synthetic
ctgcctguggctttgtagttcua

SEQ ID NO: 50379 - DNA, 23 bp, Artificial Sequence
  Synthetic
gatttgcaucccagugaaagcac

SEQ ID NO: 50380 - DNA, 28 bp, Artificial Sequence
  Synthetic
tgttttaaggagacuatgaggtgtguct

SEQ ID NO: 50381 - DNA, 24 bp, Artificial Sequence
  Synthetic
gttactttctucctgcctttgucc

SEQ ID NO: 50382 - DNA, 28 bp, Artificial Sequence
  Synthetic
gtaatcacaguaaaacacaatgcugagg

SEQ ID NO: 50383 - DNA, 27 bp, Artificial Sequence
  Synthetic
cccgcaaacuaactaggataaatcuct

SEQ ID NO: 50384 - DNA, 33 bp, Artificial Sequence
  Synthetic
acaataataatccucaaaaacaaagaaacaugg

SEQ ID NO: 50385 - DNA, 23 bp, Artificial Sequence
  Synthetic
tgtgactgguggtgtgtattcug

SEQ ID NO: 50386 - DNA, 23 bp, Artificial Sequence
  Synthetic
ggccagaggaaautattgcucca

SEQ ID NO: 50387 - DNA, 24 bp, Artificial Sequence
  Synthetic
gggtttgagcagutctgagaaugt

SEQ ID NO: 50388 - DNA, 23 bp, Artificial Sequence
  Synthetic
ccaactcaauggccctcctttua

SEQ ID NO: 50389 - DNA, 23 bp, Artificial Sequence
  Synthetic
tgcagugcaaaaatgcaguaagg

SEQ ID NO: 50390 - DNA, 20 bp, Artificial Sequence
  Synthetic
gcatcccaggauaacgcugt

SEQ ID NO: 50391 - DNA, 26 bp, Artificial Sequence
  Synthetic
cttatctgctaugtggcatactugga

SEQ ID NO: 50392 - DNA, 26 bp, Artificial Sequence
  Synthetic
gcttactaggaccugtaagagtcugt

SEQ ID NO: 50393 - DNA, 28 bp, Artificial Sequence
  Synthetic
tgatgatgugcaagaaaggtagguaaaa

SEQ ID NO: 50394 - DNA, 26 bp, Artificial Sequence
  Synthetic
cccagggaaggaauaagtacattuga

SEQ ID NO: 50395 - DNA, 22 bp, Artificial Sequence
  Synthetic
caggcatutgaccttcuagcca

SEQ ID NO: 50396 - DNA, 27 bp, Artificial Sequence
  Synthetic
aaatttgcaccuggtgttattttuggt

SEQ ID NO: 50397 - DNA, 27 bp, Artificial Sequence
  Synthetic
gcccccattauaacattggagagaaua

SEQ ID NO: 50398 - DNA, 22 bp, Artificial Sequence
  Synthetic
caccagttugagcacagagaut

SEQ ID NO: 50399 - DNA, 22 bp, Artificial Sequence
  Synthetic
gugagaagagccucaaggacag

SEQ ID NO: 50400 - DNA, 20 bp, Artificial Sequence
  Synthetic
ggccagaggacuctgcagua

SEQ ID NO: 50401 - DNA, 24 bp, Artificial Sequence
  Synthetic
tgttcttcuccatcccattucacc

SEQ ID NO: 50402 - DNA, 28 bp, Artificial Sequence
  Synthetic
gataggacccutgttttcaaaaagtugt

SEQ ID NO: 50403 - DNA, 21 bp, Artificial Sequence
  Synthetic
attagcugcaggcagcaguaa

SEQ ID NO: 50404 - DNA, 20 bp, Artificial Sequence
  Synthetic
ggaccugcgaaaucccaaaa

SEQ ID NO: 50405 - DNA, 21 bp, Artificial Sequence
  Synthetic
accccgucgtatcuagcagag

SEQ ID NO: 50406 - DNA, 22 bp, Artificial Sequence
  Synthetic
acctttggaugttgttcuggct

SEQ ID NO: 50407 - DNA, 26 bp, Artificial Sequence
  Synthetic
tccgtagtaaaugagagcaagttugt

SEQ ID NO: 50408 - DNA, 24 bp, Artificial Sequence
  Synthetic
tcagtttttctautggcccacgut

SEQ ID NO: 50409 - DNA, 28 bp, Artificial Sequence
  Synthetic
cttccatagatcucatagccatccttut

SEQ ID NO: 50410 - DNA, 22 bp, Artificial Sequence
  Synthetic
ggagggaguagaguggaagaca

SEQ ID NO: 50411 - DNA, 24 bp, Artificial Sequence
  Synthetic
ccttccatuaaacccagcaccuac

SEQ ID NO: 50412 - DNA, 20 bp, Artificial Sequence
  Synthetic
ctgcaauggaggauccagca

SEQ ID NO: 50413 - DNA, 23 bp, Artificial Sequence
  Synthetic
gctgatgtgtutggtgagctgua

SEQ ID NO: 50414 - DNA, 21 bp, Artificial Sequence
  Synthetic
gcacaggcggcutagaagaut

SEQ ID NO: 50415 - DNA, 26 bp, Artificial Sequence
  Synthetic
ggctaactagtugcgtttacaactut

SEQ ID NO: 50416 - DNA, 20 bp, Artificial Sequence
  Synthetic
tctctaccagcugtgcucgt

SEQ ID NO: 50417 - DNA, 23 bp, Artificial Sequence
  Synthetic
ccttctgtcucaccttcttucgt

SEQ ID NO: 50418 - DNA, 32 bp, Artificial Sequence
  Synthetic
ggcaacttatatguatttttgtatttcatgug

SEQ ID NO: 50419 - DNA, 34 bp, Artificial Sequence
  Synthetic
tgccttaatttatttaccuatcctgtagattaut

SEQ ID NO: 50420 - DNA, 27 bp, Artificial Sequence
  Synthetic
cataaatatgugagtcaatuccccaag

SEQ ID NO: 50421 - DNA, 31 bp, Artificial Sequence
  Synthetic
agacagactaauaggaggtagatagacugga

SEQ ID NO: 50422 - DNA, 30 bp, Artificial Sequence
  Synthetic
tgatagaacacutgtcatagttuagaacga

SEQ ID NO: 50423 - DNA, 30 bp, Artificial Sequence
  Synthetic
tgcaccaaatatuggtaattaaatgttuac

SEQ ID NO: 50424 - DNA, 29 bp, Artificial Sequence
  Synthetic
gtctcagtttucctacctgtaaaaugaag

SEQ ID NO: 50425 - DNA, 23 bp, Artificial Sequence
  Synthetic
gacagcatutcctgtgucagacc

SEQ ID NO: 50426 - DNA, 23 bp, Artificial Sequence
  Synthetic
tttgggggcauctcttatacuca

SEQ ID NO: 50427 - DNA, 21 bp, Artificial Sequence
  Synthetic
ccactgcaguccaatcugggt

SEQ ID NO: 50428 - DNA, 18 bp, Artificial Sequence
  Synthetic
cacagggcutccgagugc

SEQ ID NO: 50429 - DNA, 23 bp, Artificial Sequence
  Synthetic
aattcaaaggguatctgggcuct

SEQ ID NO: 50430 - DNA, 24 bp, Artificial Sequence
  Synthetic
actctgacccauctaacgcctauc

SEQ ID NO: 50431 - DNA, 24 bp, Artificial Sequence
  Synthetic
agttggtcaaauctcctcctucaa

SEQ ID NO: 50432 - DNA, 23 bp, Artificial Sequence
  Synthetic
cagatcccaagcucttcctctuc

SEQ ID NO: 50433 - DNA, 28 bp, Artificial Sequence
  Synthetic
tgtgtgcatctguaagcatgtatctauc

SEQ ID NO: 50434 - DNA, 22 bp, Artificial Sequence
  Synthetic
gagccaguggattuggaaacag

SEQ ID NO: 50435 - DNA, 23 bp, Artificial Sequence
  Synthetic
aggtggcccauaatcatgagtua

SEQ ID NO: 50436 - DNA, 24 bp, Artificial Sequence
  Synthetic
gcctgggcaacagaauaagatuct

SEQ ID NO: 50437 - DNA, 28 bp, Artificial Sequence
  Synthetic
ccattacccgaauaaaaatcttctcuct

SEQ ID NO: 50438 - DNA, 23 bp, Artificial Sequence
  Synthetic
agatgtgaaagcccuagtggaug

SEQ ID NO: 50439 - DNA, 31 bp, Artificial Sequence
  Synthetic
gataggacagaugataaatacataggaugga

SEQ ID NO: 50440 - DNA, 22 bp, Artificial Sequence
  Synthetic
acuggcacagaacaggcactua

SEQ ID NO: 50441 - DNA, 23 bp, Artificial Sequence
  Synthetic
tggtcttacucctgttccctucc

SEQ ID NO: 50442 - DNA, 21 bp, Artificial Sequence
  Synthetic
ttcatgccacugcactucact

SEQ ID NO: 50443 - DNA, 24 bp, Artificial Sequence
  Synthetic
ttctctggtgugtggagatgtcut

SEQ ID NO: 50444 - DNA, 23 bp, Artificial Sequence
  Synthetic
caagggtgautttcctcttuggt

SEQ ID NO: 50445 - DNA, 24 bp, Artificial Sequence
  Synthetic
aagtgatuccaatcauagccacag

SEQ ID NO: 50446 - DNA, 32 bp, Artificial Sequence
  Synthetic
taaccaaaataaaautaggcatattuacaagc

SEQ ID NO: 50447 - DNA, 26 bp, Artificial Sequence
  Synthetic
gctgctgagugatttgtctgtaatug

SEQ ID NO: 50448 - DNA, 28 bp, Artificial Sequence
  Synthetic
caactucagctatgagguaatttttcuc

SEQ ID NO: 50449 - DNA, 24 bp, Artificial Sequence
  Synthetic
aucagagctuaaactgggaagcug

SEQ ID NO: 50450 - DNA, 28 bp, Artificial Sequence
  Synthetic
caactucagctatgagguaatttttcuc

SEQ ID NO: 50451 - DNA, 24 bp, Artificial Sequence
  Synthetic
aucagagctuaaactgggaagcug

SEQ ID NO: 50452 - DNA, 23 bp, Artificial Sequence
  Synthetic
ttttgccagugcctuaacaacag

SEQ ID NO: 50453 - DNA, 28 bp, Artificial Sequence
  Synthetic
ttgatacaagtccuactgtactcacuga

SEQ ID NO: 50454 - DNA, 29 bp, Artificial Sequence
  Synthetic
gaacaagauagagccaaagtacauacact

SEQ ID NO: 50455 - DNA, 21 bp, Artificial Sequence
  Synthetic
gcacgctcugtcactgctuaa

SEQ ID NO: 50456 - DNA, 22 bp, Artificial Sequence
  Synthetic
cctgcaagcutcaacagaggut

SEQ ID NO: 50457 - DNA, 27 bp, Artificial Sequence
  Synthetic
acagacttgugtgtcatttuaaaggga

SEQ ID NO: 50458 - DNA, 21 bp, Artificial Sequence
  Synthetic
cctggaccuccagtgagtcut

SEQ ID NO: 50459 - DNA, 25 bp, Artificial Sequence
  Synthetic
cctttcauaccagggaatccaggua

SEQ ID NO: 50460 - DNA, 19 bp, Artificial Sequence
  Synthetic
caggagccgccugatctuc

SEQ ID NO: 50461 - DNA, 25 bp, Artificial Sequence
  Synthetic
actccctaugaaccaagttcuacca

SEQ ID NO: 50462 - DNA, 25 bp, Artificial Sequence
  Synthetic
gttcgtgtcaagauacccgtgtaut

SEQ ID NO: 50463 - DNA, 28 bp, Artificial Sequence
  Synthetic
ccauatctctatttcuagggaccccaag

SEQ ID NO: 50464 - DNA, 28 bp, Artificial Sequence
  Synthetic
acaaatatgtcaauatgaccagcaucca

SEQ ID NO: 50465 - DNA, 26 bp, Artificial Sequence
  Synthetic
cutcaactgcataucagcaacaaact

SEQ ID NO: 50466 - DNA, 31 bp, Artificial Sequence
  Synthetic
attatatctcaaauctgtcaggauccaaaat

SEQ ID NO: 50467 - DNA, 27 bp, Artificial Sequence
  Synthetic
ccagaaacctuatgttgcacttatuca

SEQ ID NO: 50468 - DNA, 21 bp, Artificial Sequence
  Synthetic
gaguggauggcaaacacacaa

SEQ ID NO: 50469 - DNA, 20 bp, Artificial Sequence
  Synthetic
agcuggagcctcuaggacaa

SEQ ID NO: 50470 - DNA, 20 bp, Artificial Sequence
  Synthetic
gaggctcuggctgggaauag

SEQ ID NO: 50471 - DNA, 23 bp, Artificial Sequence
  Synthetic
cagaaatgttcutagccgcgaug

SEQ ID NO: 50472 - DNA, 23 bp, Artificial Sequence
  Synthetic
ggagaugatggaauaccgacacc

SEQ ID NO: 50473 - DNA, 23 bp, Artificial Sequence
  Synthetic
gcatccaacuggaatccactugt

SEQ ID NO: 50474 - DNA, 23 bp, Artificial Sequence
  Synthetic
gggccagtucctccctagtauaa

SEQ ID NO: 50475 - DNA, 26 bp, Artificial Sequence
  Synthetic
tgttttgttcutctgtgctttuagcc

SEQ ID NO: 50476 - DNA, 28 bp, Artificial Sequence
  Synthetic
tcacaaaccucagaaataactcatugga

SEQ ID NO: 50477 - DNA, 21 bp, Artificial Sequence
  Synthetic
caagatccugtgcagguacca

SEQ ID NO: 50478 - DNA, 20 bp, Artificial Sequence
  Synthetic
tgauccggcacctgttucaa

SEQ ID NO: 50479 - DNA, 24 bp, Artificial Sequence
  Synthetic
ctatcctgguactggaaagccauc

SEQ ID NO: 50480 - DNA, 24 bp, Artificial Sequence
  Synthetic
agagattgtgcuggagaacaagut

SEQ ID NO: 50481 - DNA, 21 bp, Artificial Sequence
  Synthetic
cacgaagccguagtgguagac

SEQ ID NO: 50482 - DNA, 26 bp, Artificial Sequence
  Synthetic
cattaagagcuacctgatcgagaucc

SEQ ID NO: 50483 - DNA, 20 bp, Artificial Sequence
  Synthetic
gcagccccugtgaagaaguc

SEQ ID NO: 50484 - DNA, 25 bp, Artificial Sequence
  Synthetic
gtcctcugcctctttcctuaaaaag

SEQ ID NO: 50485 - DNA, 28 bp, Artificial Sequence
  Synthetic
ttctactcaugcccctcaaacttattut

SEQ ID NO: 50486 - DNA, 27 bp, Artificial Sequence
  Synthetic
aacgaggttttucttactgaacccuaa

SEQ ID NO: 50487 - DNA, 23 bp, Artificial Sequence
  Synthetic
gtgtggcttcugtttgtcttguc

SEQ ID NO: 50488 - DNA, 20 bp, Artificial Sequence
  Synthetic
ctcttcuaccgacccctgug

SEQ ID NO: 50489 - DNA, 23 bp, Artificial Sequence
  Synthetic
agggagugcagagtccaaaatug

SEQ ID NO: 50490 - DNA, 27 bp, Artificial Sequence
  Synthetic
cttcaaaagcccuagauaacaccaagt

SEQ ID NO: 50491 - DNA, 23 bp, Artificial Sequence
  Synthetic
caatgtgtuccacagtccactuc

SEQ ID NO: 50492 - DNA, 20 bp, Artificial Sequence
  Synthetic
ctaccugggcacgaggttua

SEQ ID NO: 50493 - DNA, 21 bp, Artificial Sequence
  Synthetic
gactccaauggctgcaucaac

SEQ ID NO: 50494 - DNA, 20 bp, Artificial Sequence
  Synthetic
atctgatccgugctgcacut

SEQ ID NO: 50495 - DNA, 28 bp, Artificial Sequence
  Synthetic
acctgaataaugacagtccagttttuca

SEQ ID NO: 50496 - DNA, 25 bp, Artificial Sequence
  Synthetic
gactaaaacacagcauccagaguga

SEQ ID NO: 50497 - DNA, 24 bp, Artificial Sequence
  Synthetic
caggtaatgaauttgggcatccug

SEQ ID NO: 50498 - DNA, 27 bp, Artificial Sequence
  Synthetic
ttcttccaaccaccaucttatgttuga

SEQ ID NO: 50499 - DNA, 32 bp, Artificial Sequence
  Synthetic
ttcttgaacattaugattcttgagauagagcc

SEQ ID NO: 50500 - DNA, 28 bp, Artificial Sequence
  Synthetic
caagaccautttcatgttaauccccaag

SEQ ID NO: 50501 - DNA, 21 bp, Artificial Sequence
  Synthetic
catgaatgtucaccccacgut

SEQ ID NO: 50502 - DNA, 21 bp, Artificial Sequence
  Synthetic
gagcagtucttgctttuggct

SEQ ID NO: 50503 - DNA, 22 bp, Artificial Sequence
  Synthetic
ggaatccgugcttgtgaugagt

SEQ ID NO: 50504 - DNA, 19 bp, Artificial Sequence
  Synthetic
ccuggaggagccatgguct

SEQ ID NO: 50505 - DNA, 21 bp, Artificial Sequence
  Synthetic
gaagaugggaccgaagtugga

SEQ ID NO: 50506 - DNA, 24 bp, Artificial Sequence
  Synthetic
gcatacaattutactgcaccugct

SEQ ID NO: 50507 - DNA, 28 bp, Artificial Sequence
  Synthetic
agaaggcacauagtaaaaacagtgauga

SEQ ID NO: 50508 - DNA, 18 bp, Artificial Sequence
  Synthetic
gcaccuggtgcatgugga

SEQ ID NO: 50509 - DNA, 21 bp, Artificial Sequence
  Synthetic
ggtctcugaagctcucacagt

SEQ ID NO: 50510 - DNA, 23 bp, Artificial Sequence
  Synthetic
cctctgaguccttggatguccat

SEQ ID NO: 50511 - DNA, 23 bp, Artificial Sequence
  Synthetic
aagtccttccacucaaacaccug

SEQ ID NO: 50512 - DNA, 17 bp, Artificial Sequence
  Synthetic
aggucaucgcgcagcat

SEQ ID NO: 50513 - DNA, 17 bp, Artificial Sequence
  Synthetic
cgggcgggugttgtuga

SEQ ID NO: 50514 - DNA, 18 bp, Artificial Sequence
  Synthetic
tccuggacucagccccat

SEQ ID NO: 50515 - DNA, 19 bp, Artificial Sequence
  Synthetic
cagccccugcttccuacac

SEQ ID NO: 50516 - DNA, 20 bp, Artificial Sequence
  Synthetic
gtcggctcutggtggagtut

SEQ ID NO: 50517 - DNA, 19 bp, Artificial Sequence
  Synthetic
ggagatgccucggacgaug

SEQ ID NO: 50518 - DNA, 28 bp, Artificial Sequence
  Synthetic
gagccaagtagcugtcataattcatuct

SEQ ID NO: 50519 - DNA, 25 bp, Artificial Sequence
  Synthetic
gcatttggttugtgacattctugga

SEQ ID NO: 50520 - DNA, 24 bp, Artificial Sequence
  Synthetic
aacaaugcaatactuggcaacaca

SEQ ID NO: 50521 - DNA, 27 bp, Artificial Sequence
  Synthetic
cgtactgagtugcaaaatgagtgacua

SEQ ID NO: 50522 - DNA, 24 bp, Artificial Sequence
  Synthetic
tcatagagtugccaaatgctuggt

SEQ ID NO: 50523 - DNA, 27 bp, Artificial Sequence
  Synthetic
ctaacagcaggutctcatagaagauga

SEQ ID NO: 50524 - DNA, 23 bp, Artificial Sequence
  Synthetic
gggcgauatcaacttugcagaga

SEQ ID NO: 50525 - DNA, 29 bp, Artificial Sequence
  Synthetic
ggacauaaagtgugagagaaaagagaaga

SEQ ID NO: 50526 - DNA, 22 bp, Artificial Sequence
  Synthetic
gacaagcacuttgtccctcugt

SEQ ID NO: 50527 - DNA, 23 bp, Artificial Sequence
  Synthetic
gcggtgtttucagctcatgacua

SEQ ID NO: 50528 - DNA, 21 bp, Artificial Sequence
  Synthetic
ccatacctugcccaactgguc

SEQ ID NO: 50529 - DNA, 24 bp, Artificial Sequence
  Synthetic
accaccctutaatctgttgtugct

SEQ ID NO: 50530 - DNA, 33 bp, Artificial Sequence
  Synthetic
tggataactggttauaatctgcttctaatctuc

SEQ ID NO: 50531 - DNA, 22 bp, Artificial Sequence
  Synthetic
agtgccacagcuagaggaguaa

SEQ ID NO: 50532 - DNA, 28 bp, Artificial Sequence
  Synthetic
gaagcaaagugtgtttattcaauccagt

SEQ ID NO: 50533 - DNA, 28 bp, Artificial Sequence
  Synthetic
ccatctctttutacctcttgaucaggat

SEQ ID NO: 50534 - DNA, 23 bp, Artificial Sequence
  Synthetic
atttagcugaagaccgtcaugct

SEQ ID NO: 50535 - DNA, 22 bp, Artificial Sequence
  Synthetic
catcatcaccagucggactcug

SEQ ID NO: 50536 - DNA, 24 bp, Artificial Sequence
  Synthetic
gctctcagauctagacacctcugt

SEQ ID NO: 50537 - DNA, 21 bp, Artificial Sequence
  Synthetic
cttgtggccccutcttcugat

SEQ ID NO: 50538 - DNA, 24 bp, Artificial Sequence
  Synthetic
acagcacaguattgctaugcagaa

SEQ ID NO: 50539 - DNA, 27 bp, Artificial Sequence
  Synthetic
gccttgagucatatcattagguacaca

SEQ ID NO: 50540 - DNA, 24 bp, Artificial Sequence
  Synthetic
agggagaaauggcataaagcacut

SEQ ID NO: 50541 - DNA, 27 bp, Artificial Sequence
  Synthetic
gcctgatgtaugcattcatatctctug

SEQ ID NO: 50542 - DNA, 27 bp, Artificial Sequence
  Synthetic
gcatcatguacaagctcagtttctaug

SEQ ID NO: 50543 - DNA, 29 bp, Artificial Sequence
  Synthetic
acaaaactaccuaatttccgtttacugct

SEQ ID NO: 50544 - DNA, 25 bp, Artificial Sequence
  Synthetic
gctttcgaatuccctatcacaguca

SEQ ID NO: 50545 - DNA, 25 bp, Artificial Sequence
  Synthetic
cttggcaggugaaaaagaaagaugg

SEQ ID NO: 50546 - DNA, 22 bp, Artificial Sequence
  Synthetic
ctctccccauggacctgaguat

SEQ ID NO: 50547 - DNA, 26 bp, Artificial Sequence
  Synthetic
gtatgtggaaaugtagctggtcttug

SEQ ID NO: 50548 - DNA, 25 bp, Artificial Sequence
  Synthetic
ctttcaaagagccagugaactuacc

SEQ ID NO: 50549 - DNA, 28 bp, Artificial Sequence
  Synthetic
atctaagtgtgcuttgttaccttgtuct

SEQ ID NO: 50550 - DNA, 22 bp, Artificial Sequence
  Synthetic
ggcgtgcugctcatttcttcua

SEQ ID NO: 50551 - DNA, 28 bp, Artificial Sequence
  Synthetic
gggaacatacguaactgagaatcttuaa

SEQ ID NO: 50552 - DNA, 22 bp, Artificial Sequence
  Synthetic
cttcaucaggcaggaagagugg

SEQ ID NO: 50553 - DNA, 26 bp, Artificial Sequence
  Synthetic
ctctttgaaagcucaggatcagacut

SEQ ID NO: 50554 - DNA, 27 bp, Artificial Sequence
  Synthetic
ggcaaugttacucaggagacaaagaaa

SEQ ID NO: 50555 - DNA, 27 bp, Artificial Sequence
  Synthetic
ggtttaagggaacutcttgatttgucc

SEQ ID NO: 50556 - DNA, 28 bp, Artificial Sequence
  Synthetic
gggaagaugaaatccaacaatuacaaaa

SEQ ID NO: 50557 - DNA, 27 bp, Artificial Sequence
  Synthetic
catgctaccucccaattttctuaaacc

SEQ ID NO: 50558 - DNA, 24 bp, Artificial Sequence
  Synthetic
agcccctaatutagatgatggcua

SEQ ID NO: 50559 - DNA, 23 bp, Artificial Sequence
  Synthetic
gctgaaaccuccccttcttctuc

SEQ ID NO: 50560 - DNA, 28 bp, Artificial Sequence
  Synthetic
gattaatttgcaggutattgcgagtgut

SEQ ID NO: 50561 - DNA, 28 bp, Artificial Sequence
  Synthetic
aggtaccuttttaacttcuaaagcacat

SEQ ID NO: 50562 - DNA, 28 bp, Artificial Sequence
  Synthetic
gtcatcagcugaagatgaaataggaugt

SEQ ID NO: 50563 - DNA, 27 bp, Artificial Sequence
  Synthetic
tgaagataaacuagaaccctgcaguct

SEQ ID NO: 50564 - DNA, 20 bp, Artificial Sequence
  Synthetic
ccagcccagacugctucaaa

SEQ ID NO: 50565 - DNA, 29 bp, Artificial Sequence
  Synthetic
gggattcgatugttagatcactuagagat

SEQ ID NO: 50566 - DNA, 26 bp, Artificial Sequence
  Synthetic
aagaaaatuggaggaatctgctucat

SEQ ID NO: 50567 - DNA, 28 bp, Artificial Sequence
  Synthetic
ctttgctggtcutccatcattatacuct

SEQ ID NO: 50568 - DNA, 18 bp, Artificial Sequence
  Synthetic
agacagggccugcagtug

SEQ ID NO: 50569 - DNA, 20 bp, Artificial Sequence
  Synthetic
tguggagacaggagcuggat

SEQ ID NO: 50570 - DNA, 21 bp, Artificial Sequence
  Synthetic
gtccaggucaaggcugaaaag

SEQ ID NO: 50571 - DNA, 20 bp, Artificial Sequence
  Synthetic
aaaacccaugctctgccuga

SEQ ID NO: 50572 - DNA, 22 bp, Artificial Sequence
  Synthetic
guagagaggaggaccagucact

SEQ ID NO: 50573 - DNA, 20 bp, Artificial Sequence
  Synthetic
ccacagauggcacagaugct

SEQ ID NO: 50574 - DNA, 22 bp, Artificial Sequence
  Synthetic
gccagucacagaggaugagagt

SEQ ID NO: 50575 - DNA, 28 bp, Artificial Sequence
  Synthetic
ccgtccacttcauttctttgcttattut

SEQ ID NO: 50576 - DNA, 22 bp, Artificial Sequence
  Synthetic
cgttuaaaccaaaggcgcacua

SEQ ID NO: 50577 - DNA, 21 bp, Artificial Sequence
  Synthetic
cgtggcccagcugaatcuaag

SEQ ID NO: 50578 - DNA, 22 bp, Artificial Sequence
  Synthetic
ccgagtgatuggctgaacauct

SEQ ID NO: 50579 - DNA, 20 bp, Artificial Sequence
  Synthetic
tcccgggaucgtgttcuaca

SEQ ID NO: 50580 - DNA, 27 bp, Artificial Sequence
  Synthetic
tgtatacatttggauaccagtgtccut

SEQ ID NO: 50581 - DNA, 27 bp, Artificial Sequence
  Synthetic
gtaacagugaaaacagcatttcccaut

SEQ ID NO: 50582 - DNA, 26 bp, Artificial Sequence
  Synthetic
catcaaggagaaggaguacgagatug

SEQ ID NO: 50583 - DNA, 27 bp, Artificial Sequence
  Synthetic
ttttggaatcaucctctttttgcaugg

SEQ ID NO: 50584 - DNA, 21 bp, Artificial Sequence
  Synthetic
cttcgaugaccgucagcagat

SEQ ID NO: 50585 - DNA, 23 bp, Artificial Sequence
  Synthetic
aaggcgacauctttuggcaaaaa

SEQ ID NO: 50586 - DNA, 25 bp, Artificial Sequence
  Synthetic
tgaccccaacacugaagaaaatcut

SEQ ID NO: 50587 - DNA, 24 bp, Artificial Sequence
  Synthetic
ggcctccugaacagacatttctut

SEQ ID NO: 50588 - DNA, 17 bp, Artificial Sequence
  Synthetic
cccguccctgtcctugt

SEQ ID NO: 50589 - DNA, 21 bp, Artificial Sequence
  Synthetic
ctctctcuccctccttcucca

SEQ ID NO: 50590 - DNA, 24 bp, Artificial Sequence
  Synthetic
cacattttcuagggctgtctucca

SEQ ID NO: 50591 - DNA, 20 bp, Artificial Sequence
  Synthetic
tcaccgugcaguacaaggac

SEQ ID NO: 50592 - DNA, 20 bp, Artificial Sequence
  Synthetic
tggtuaccccgagacuccaa

SEQ ID NO: 50593 - DNA, 19 bp, Artificial Sequence
  Synthetic
gctucgactcctucaccgt

SEQ ID NO: 50594 - DNA, 22 bp, Artificial Sequence
  Synthetic
ggtcaagaggucaagcauggat

SEQ ID NO: 50595 - DNA, 25 bp, Artificial Sequence
  Synthetic
accgtctcttucttgttcctcatut

SEQ ID NO: 50596 - DNA, 27 bp, Artificial Sequence
  Synthetic
tctgatatuccccacatctcattcuct

SEQ ID NO: 50597 - DNA, 26 bp, Artificial Sequence
  Synthetic
gcaatgacaccuatttctgttccuct

SEQ ID NO: 50598 - DNA, 21 bp, Artificial Sequence
  Synthetic
ggcaaaacaucaccccaucct

SEQ ID NO: 50599 - DNA, 23 bp, Artificial Sequence
  Synthetic
cctgtgtccutgtctctgcttuc

SEQ ID NO: 50600 - DNA, 23 bp, Artificial Sequence
  Synthetic
gtcagccauctcatcuggaaaga

SEQ ID NO: 50601 - DNA, 21 bp, Artificial Sequence
  Synthetic
gccatgacuccttcctccugt

SEQ ID NO: 50602 - DNA, 22 bp, Artificial Sequence
  Synthetic
ccugtgacctagugaagccaac

SEQ ID NO: 50603 - DNA, 21 bp, Artificial Sequence
  Synthetic
tgacccugagcctctttguct

SEQ ID NO: 50604 - DNA, 25 bp, Artificial Sequence
  Synthetic
tggcaccaauagattcatucagcaa

SEQ ID NO: 50605 - DNA, 23 bp, Artificial Sequence
  Synthetic
cttacccaucaggcaaaucacca

SEQ ID NO: 50606 - DNA, 26 bp, Artificial Sequence
  Synthetic
cccagtccucaatcaatttcttcuca

SEQ ID NO: 50607 - DNA, 28 bp, Artificial Sequence
  Synthetic
gccttcaatgtcugactaaagtactuct

SEQ ID NO: 50608 - DNA, 23 bp, Artificial Sequence
  Synthetic
aatggccacacagutgaugagat

SEQ ID NO: 50609 - DNA, 29 bp, Artificial Sequence
  Synthetic
atgtgtccagtuttcttattttgcttuca

SEQ ID NO: 50610 - DNA, 28 bp, Artificial Sequence
  Synthetic
attcagatattgugcattagaccagcut

SEQ ID NO: 50611 - DNA, 26 bp, Artificial Sequence
  Synthetic
cagccaatuaccgtcaagattacuga

SEQ ID NO: 50612 - DNA, 24 bp, Artificial Sequence
  Synthetic
gaatgacagaguggagtaccagut

SEQ ID NO: 50613 - DNA, 24 bp, Artificial Sequence
  Synthetic
cctgcaguttaatgaaatguggca

SEQ ID NO: 50614 - DNA, 24 bp, Artificial Sequence
  Synthetic
gacugaagacatugagaccaacca

SEQ ID NO: 50615 - DNA, 29 bp, Artificial Sequence
  Synthetic
gaagcagagaatugagtggtatcatgtua

SEQ ID NO: 50616 - DNA, 24 bp, Artificial Sequence
  Synthetic
tttcaaatgatugcgacaccauct

SEQ ID NO: 50617 - DNA, 25 bp, Artificial Sequence
  Synthetic
gcaagaacaatuccacctgtacuga

SEQ ID NO: 50618 - DNA, 26 bp, Artificial Sequence
  Synthetic
cagcttcatgutgacactcatttuct

SEQ ID NO: 50619 - DNA, 27 bp, Artificial Sequence
  Synthetic
ttcgttgctauagatttgtgcaaaugg

SEQ ID NO: 50620 - DNA, 23 bp, Artificial Sequence
  Synthetic
tcaattcaggcugtgtactugct

SEQ ID NO: 50621 - DNA, 26 bp, Artificial Sequence
  Synthetic
gctgaaagttuaaagatgcggaagut

SEQ ID NO: 50622 - DNA, 28 bp, Artificial Sequence
  Synthetic
cataaccttuaaagaaggcagugaggat

SEQ ID NO: 50623 - DNA, 26 bp, Artificial Sequence
  Synthetic
ttaatttttagggugcctctggugaa

SEQ ID NO: 50624 - DNA, 23 bp, Artificial Sequence
  Synthetic
agtgagggugtgaaggactauga

SEQ ID NO: 50625 - DNA, 28 bp, Artificial Sequence
  Synthetic
actcctgtttcagucatttttcttcuct

SEQ ID NO: 50626 - DNA, 28 bp, Artificial Sequence
  Synthetic
cacagtaccaaaugcttttcttttcuct

SEQ ID NO: 50627 - DNA, 24 bp, Artificial Sequence
  Synthetic
cctccugagggaaagaacaatguc

SEQ ID NO: 50628 - DNA, 25 bp, Artificial Sequence
  Synthetic
caagatgccaggutttgtttctuct

SEQ ID NO: 50629 - DNA, 25 bp, Artificial Sequence
  Synthetic
acaacgcagguaactctccaaauaa

SEQ ID NO: 50630 - DNA, 29 bp, Artificial Sequence
  Synthetic
ggtcctgtttuacttcacaagatauggaa

SEQ ID NO: 50631 - DNA, 21 bp, Artificial Sequence
  Synthetic
ctggccuggctctctacttua

SEQ ID NO: 50632 - DNA, 28 bp, Artificial Sequence
  Synthetic
cccttggttaaautcagtgccataaaug

SEQ ID NO: 50633 - DNA, 25 bp, Artificial Sequence
  Synthetic
acagttacagucctcacaactcuga

SEQ ID NO: 50634 - DNA, 23 bp, Artificial Sequence
  Synthetic
accaccaagaucctttcaagcuc

SEQ ID NO: 50635 - DNA, 24 bp, Artificial Sequence
  Synthetic
gatctgcaaugctgtcgaaaagut

SEQ ID NO: 50636 - DNA, 21 bp, Artificial Sequence
  Synthetic
ggttgtcaguccccaagctut

SEQ ID NO: 50637 - DNA, 24 bp, Artificial Sequence
  Synthetic
ggttgtutttcctatcuggacgga

SEQ ID NO: 50638 - DNA, 21 bp, Artificial Sequence
  Synthetic
ggtggaagccaauggccuaat

SEQ ID NO: 50639 - DNA, 27 bp, Artificial Sequence
  Synthetic
gtcttttgacatcucctacagagctua

SEQ ID NO: 50640 - DNA, 23 bp, Artificial Sequence
  Synthetic
tgaggcaugtaagttgcauggat

SEQ ID NO: 50641 - DNA, 26 bp, Artificial Sequence
  Synthetic
ccatgctgtttauacctgttccctut

SEQ ID NO: 50642 - DNA, 24 bp, Artificial Sequence
  Synthetic
gcagagcaaugcaacctttatuca

SEQ ID NO: 50643 - DNA, 31 bp, Artificial Sequence
  Synthetic
gactatctatttugaagaactgacaggtugt

SEQ ID NO: 50644 - DNA, 23 bp, Artificial Sequence
  Synthetic
aggctgcagugttctgtcttuag

SEQ ID NO: 50645 - DNA, 23 bp, Artificial Sequence
  Synthetic
cttattccaaacugggcucggat

SEQ ID NO: 50646 - DNA, 20 bp, Artificial Sequence
  Synthetic
catgcugcctccuaggaagt

SEQ ID NO: 50647 - DNA, 21 bp, Artificial Sequence
  Synthetic
caccatacugctccacacugt

SEQ ID NO: 50648 - DNA, 22 bp, Artificial Sequence
  Synthetic
gaugactggtcugggaagaact

SEQ ID NO: 50649 - DNA, 19 bp, Artificial Sequence
  Synthetic
gggaucttgggugcccaac

SEQ ID NO: 50650 - DNA, 28 bp, Artificial Sequence
  Synthetic
ttgcctctuatatttcaggtugaacagt

SEQ ID NO: 50651 - DNA, 23 bp, Artificial Sequence
  Synthetic
gcccaaataaaaugccacaccut

SEQ ID NO: 50652 - DNA, 26 bp, Artificial Sequence
  Synthetic
gauttgattgatuacagcacgggaaa

SEQ ID NO: 50653 - DNA, 28 bp, Artificial Sequence
  Synthetic
gcatatttctcuagtctggtaagcauca

SEQ ID NO: 50654 - DNA, 22 bp, Artificial Sequence
  Synthetic
gcctcuagcacaataugcacca

SEQ ID NO: 50655 - DNA, 24 bp, Artificial Sequence
  Synthetic
acatattucagtgcguccaacaca

SEQ ID NO: 50656 - DNA, 27 bp, Artificial Sequence
  Synthetic
gcctggccccaautcattcttataaut

SEQ ID NO: 50657 - DNA, 20 bp, Artificial Sequence
  Synthetic
tggaaccccucucagcagat

SEQ ID NO: 50658 - DNA, 28 bp, Artificial Sequence
  Synthetic
aaactatggaaucaaaccacaacaaugg

SEQ ID NO: 50659 - DNA, 27 bp, Artificial Sequence
  Synthetic
acataagaggcautacaagcttucagt

SEQ ID NO: 50660 - DNA, 24 bp, Artificial Sequence
  Synthetic
gacutctttctacugcagcagaca

SEQ ID NO: 50661 - DNA, 28 bp, Artificial Sequence
  Synthetic
tcaatcaagtgcutaaaaacagtgctuc

SEQ ID NO: 50662 - DNA, 28 bp, Artificial Sequence
  Synthetic
gaatgtatatagucctcaaacuggccat

SEQ ID NO: 50663 - DNA, 22 bp, Artificial Sequence
  Synthetic
ggcugaccaaaggcagtatugt

SEQ ID NO: 50664 - DNA, 25 bp, Artificial Sequence
  Synthetic
aguatttttgtgctauaggcaggct

SEQ ID NO: 50665 - DNA, 24 bp, Artificial Sequence
  Synthetic
gccaagtaccucactatgaaucca

SEQ ID NO: 50666 - DNA, 20 bp, Artificial Sequence
  Synthetic
ctttgcaaguggcactccuc

SEQ ID NO: 50667 - DNA, 27 bp, Artificial Sequence
  Synthetic
gcatagagcagucctggttttacuaaa

SEQ ID NO: 50668 - DNA, 26 bp, Artificial Sequence
  Synthetic
ggccatgtgcutttcaaactaatugt

SEQ ID NO: 50669 - DNA, 26 bp, Artificial Sequence
  Synthetic
gacaggaguaccaagaagugagaaat

SEQ ID NO: 50670 - DNA, 22 bp, Artificial Sequence
  Synthetic
cgatctgugagccgagtcttua

SEQ ID NO: 50671 - DNA, 28 bp, Artificial Sequence
  Synthetic
tcatctttctucacgtgtgaattcucaa

SEQ ID NO: 50672 - DNA, 19 bp, Artificial Sequence
  Synthetic
gtgaaguagagcgccguca

SEQ ID NO: 50673 - DNA, 22 bp, Artificial Sequence
  Synthetic
gttcttgctcaugtgcacctut

SEQ ID NO: 50674 - DNA, 21 bp, Artificial Sequence
  Synthetic
tgcccctuggtgctgaattua

SEQ ID NO: 50675 - DNA, 23 bp, Artificial Sequence
  Synthetic
cgaatatcagcuctgcctgtugt

SEQ ID NO: 50676 - DNA, 21 bp, Artificial Sequence
  Synthetic
ttgctatugtgcccucaccat

SEQ ID NO: 50677 - DNA, 20 bp, Artificial Sequence
  Synthetic
accgacacacuatgcuccct

SEQ ID NO: 50678 - DNA, 19 bp, Artificial Sequence
  Synthetic
gtccagcgutaaccgctuc

SEQ ID NO: 50679 - DNA, 25 bp, Artificial Sequence
  Synthetic
gcggutauggacaccaagaagaaaa

SEQ ID NO: 50680 - DNA, 22 bp, Artificial Sequence
  Synthetic
ggtugaccagaaauccccaagt

SEQ ID NO: 50681 - DNA, 28 bp, Artificial Sequence
  Synthetic
tgtagttgaaaaugctttgtcctctcuc

SEQ ID NO: 50682 - DNA, 18 bp, Artificial Sequence
  Synthetic
caggguccagcagcucac

SEQ ID NO: 50683 - DNA, 20 bp, Artificial Sequence
  Synthetic
gaaagtccaugccccaucct

SEQ ID NO: 50684 - DNA, 18 bp, Artificial Sequence
  Synthetic
gctcccuctcccctgugt

SEQ ID NO: 50685 - DNA, 19 bp, Artificial Sequence
  Synthetic
tggccuccttccttuccca

SEQ ID NO: 50686 - DNA, 32 bp, Artificial Sequence
  Synthetic
ggtcaatgtgttuctgaatttaaaattacugt

SEQ ID NO: 50687 - DNA, 25 bp, Artificial Sequence
  Synthetic
ccttcaattccuacacctgccttut

SEQ ID NO: 50688 - DNA, 21 bp, Artificial Sequence
  Synthetic
gacatctccucgggctuacag

SEQ ID NO: 50689 - DNA, 20 bp, Artificial Sequence
  Synthetic
gaggcggagaagcucuaaca

SEQ ID NO: 50690 - DNA, 21 bp, Artificial Sequence
  Synthetic
gagaggccutgggactgauac

SEQ ID NO: 50691 - DNA, 26 bp, Artificial Sequence
  Synthetic
ccaagtaaatgaguctcaacgtgtuc

SEQ ID NO: 50692 - DNA, 26 bp, Artificial Sequence
  Synthetic
tttgtacccagugacttaaaaggugt

SEQ ID NO: 50693 - DNA, 26 bp, Artificial Sequence
  Synthetic
cctcacagattutaatggctccaaug

SEQ ID NO: 50694 - DNA, 21 bp, Artificial Sequence
  Synthetic
gttgcucagcagccttaaugg

SEQ ID NO: 50695 - DNA, 21 bp, Artificial Sequence
  Synthetic
ccctgctutgccttaaaucgt

SEQ ID NO: 50696 - DNA, 22 bp, Artificial Sequence
  Synthetic
gcctccttgutcacactgaugt

SEQ ID NO: 50697 - DNA, 28 bp, Artificial Sequence
  Synthetic
gaggaaaacaaaccuatcagaaucaggt

SEQ ID NO: 50698 - DNA, 24 bp, Artificial Sequence
  Synthetic
attctaggtttgucagctcctgug

SEQ ID NO: 50699 - DNA, 21 bp, Artificial Sequence
  Synthetic
ctctccagguccaccctcuaa

SEQ ID NO: 50700 - DNA, 29 bp, Artificial Sequence
  Synthetic
ttcctcttagcautgttgaattcuacaca

SEQ ID NO: 50701 - DNA, 23 bp, Artificial Sequence
  Synthetic
acuccatccguagccaagaagat

SEQ ID NO: 50702 - DNA, 20 bp, Artificial Sequence
  Synthetic
acaacgtccuccccgttaug

SEQ ID NO: 50703 - DNA, 28 bp, Artificial Sequence
  Synthetic
ccaactttgatgtutctattcccctcut

SEQ ID NO: 50704 - DNA, 20 bp, Artificial Sequence
  Synthetic
cctcgauggccgctagaaug

SEQ ID NO: 50705 - DNA, 24 bp, Artificial Sequence
  Synthetic
ccutgggatcaatuggaaaacgag

SEQ ID NO: 50706 - DNA, 24 bp, Artificial Sequence
  Synthetic
gtaagaagatgtucctagggccut

SEQ ID NO: 50707 - DNA, 27 bp, Artificial Sequence
  Synthetic
ggaatccaatcugcaagtatgtcagut

SEQ ID NO: 50708 - DNA, 22 bp, Artificial Sequence
  Synthetic
caattgcctugatggctcagut

SEQ ID NO: 50709 - DNA, 26 bp, Artificial Sequence
  Synthetic
caatagaagcugaatttggtgtgcug

SEQ ID NO: 50710 - DNA, 29 bp, Artificial Sequence
  Synthetic
tgttcacctatautactccatcactucca

SEQ ID NO: 50711 - DNA, 28 bp, Artificial Sequence
  Synthetic
tggttctttgtugcatttgtgttuaact

SEQ ID NO: 50712 - DNA, 21 bp, Artificial Sequence
  Synthetic
tgggagagcaggcutagacut

SEQ ID NO: 50713 - DNA, 22 bp, Artificial Sequence
  Synthetic
cacagcutgagcuggaagaaga

SEQ ID NO: 50714 - DNA, 21 bp, Artificial Sequence
  Synthetic
atgaccctcucaaccctcugt

SEQ ID NO: 50715 - DNA, 22 bp, Artificial Sequence
  Synthetic
gggauaugacccagaaggaggt

SEQ ID NO: 50716 - DNA, 23 bp, Artificial Sequence
  Synthetic
cctaatccccuagagtggtguct

SEQ ID NO: 50717 - DNA, 28 bp, Artificial Sequence
  Synthetic
cacaatgtcacauttcggaagtcttuaa

SEQ ID NO: 50718 - DNA, 25 bp, Artificial Sequence
  Synthetic
aaatggtcacugtggtaagaucagg

SEQ ID NO: 50719 - DNA, 24 bp, Artificial Sequence
  Synthetic
ccctggtgcuttacgcagaauaaa

SEQ ID NO: 50720 - DNA, 22 bp, Artificial Sequence
  Synthetic
agatggctgugtgcatgctuat

SEQ ID NO: 50721 - DNA, 27 bp, Artificial Sequence
  Synthetic
agctctaacagacuttgtgtgtttcut

SEQ ID NO: 50722 - DNA, 24 bp, Artificial Sequence
  Synthetic
tgggtcacucattagtgcctauca

SEQ ID NO: 50723 - DNA, 25 bp, Artificial Sequence
  Synthetic
cctctccaaacutctccaaaucgac

SEQ ID NO: 50724 - DNA, 28 bp, Artificial Sequence
  Synthetic
ttggtaaagaagaauggaacttgctgua

SEQ ID NO: 50725 - DNA, 27 bp, Artificial Sequence
  Synthetic
gcaagtttaagcugagtttcagcaaug

SEQ ID NO: 50726 - DNA, 27 bp, Artificial Sequence
  Synthetic
atcaaatctuactgacagctuacacat

SEQ ID NO: 50727 - DNA, 28 bp, Artificial Sequence
  Synthetic
gtcacttccagaaauttggactctuact

SEQ ID NO: 50728 - DNA, 27 bp, Artificial Sequence
  Synthetic
ccucatttcacattuaaagcagcacat

SEQ ID NO: 50729 - DNA, 26 bp, Artificial Sequence
  Synthetic
gatgaccauagaccacaagttaccug

SEQ ID NO: 50730 - DNA, 23 bp, Artificial Sequence
  Synthetic
ctgtctaacuggagcaggaacuc

SEQ ID NO: 50731 - DNA, 24 bp, Artificial Sequence
  Synthetic
agacaggtccaugtctttcttucc

SEQ ID NO: 50732 - DNA, 21 bp, Artificial Sequence
  Synthetic
agacgctuctcccatagucgt

SEQ ID NO: 50733 - DNA, 21 bp, Artificial Sequence
  Synthetic
gggtgcucagattccatggua

SEQ ID NO: 50734 - DNA, 26 bp, Artificial Sequence
  Synthetic
ctgcttcugctttttcttctucaagt

SEQ ID NO: 50735 - DNA, 27 bp, Artificial Sequence
  Synthetic
ttcctatattcuggctggtctgtauct

SEQ ID NO: 50736 - DNA, 21 bp, Artificial Sequence
  Synthetic
gcaccucctucaaggacagaa

SEQ ID NO: 50737 - DNA, 28 bp, Artificial Sequence
  Synthetic
aggaagtgatcuaactttgctgcaaaua

SEQ ID NO: 50738 - DNA, 21 bp, Artificial Sequence
  Synthetic
gcucaggacaagtugcacagt

SEQ ID NO: 50739 - DNA, 27 bp, Artificial Sequence
  Synthetic
aagtatcatccautgcccttttctuga

SEQ ID NO: 50740 - DNA, 23 bp, Artificial Sequence
  Synthetic
cttccctttcuggctctttcucc

SEQ ID NO: 50741 - DNA, 26 bp, Artificial Sequence
  Synthetic
tgggagcaccaagauatacatugaga

SEQ ID NO: 50742 - DNA, 21 bp, Artificial Sequence
  Synthetic
cttccctcucaagggcaacuc

SEQ ID NO: 50743 - DNA, 21 bp, Artificial Sequence
  Synthetic
tgacccacccutgggatctua

SEQ ID NO: 50744 - DNA, 21 bp, Artificial Sequence
  Synthetic
gctccaggaaagcucatcuct

SEQ ID NO: 50745 - DNA, 23 bp, Artificial Sequence
  Synthetic
caaagccaugaaaaggttgguca

SEQ ID NO: 50746 - DNA, 24 bp, Artificial Sequence
  Synthetic
ctatttttccuctcctguccacct

SEQ ID NO: 50747 - DNA, 25 bp, Artificial Sequence
  Synthetic
ggacaatgggagcutggaagtuaat

SEQ ID NO: 50748 - DNA, 28 bp, Artificial Sequence
  Synthetic
aaaaattggucacagttttgtcatuggt

SEQ ID NO: 50749 - DNA, 26 bp, Artificial Sequence
  Synthetic
ggagtccaugattgacaguaagaaca

SEQ ID NO: 50750 - DNA, 23 bp, Artificial Sequence
  Synthetic
atgtgctgucatctgtuaagcca

SEQ ID NO: 50751 - DNA, 27 bp, Artificial Sequence
  Synthetic
tgccaguatttttgaaguggaagaaga

SEQ ID NO: 50752 - DNA, 28 bp, Artificial Sequence
  Synthetic
atgcacatgtaaauaacagctttgagug

SEQ ID NO: 50753 - DNA, 28 bp, Artificial Sequence
  Synthetic
cgtcaatatucaagtgatggaugcaaat

SEQ ID NO: 50754 - DNA, 19 bp, Artificial Sequence
  Synthetic
cacgtcuctgctugaccga

SEQ ID NO: 50755 - DNA, 23 bp, Artificial Sequence
  Synthetic
gctcattcucacaaagccucaca

SEQ ID NO: 50756 - DNA, 20 bp, Artificial Sequence
  Synthetic
ccaugaccgagacucaggac

SEQ ID NO: 50757 - DNA, 22 bp, Artificial Sequence
  Synthetic
tcacacaauggugaggccaaat

SEQ ID NO: 50758 - DNA, 18 bp, Artificial Sequence
  Synthetic
aaagccacccucccccua

SEQ ID NO: 50759 - DNA, 20 bp, Artificial Sequence
  Synthetic
caaccccaguccctgtcauc

SEQ ID NO: 50760 - DNA, 21 bp, Artificial Sequence
  Synthetic
cacttacaccaccugcctcut

SEQ ID NO: 50761 - DNA, 20 bp, Artificial Sequence
  Synthetic
tggcuagaggccactcaugt

SEQ ID NO: 50762 - DNA, 17 bp, Artificial Sequence
  Synthetic
ccacugcccgggctuac

SEQ ID NO: 50763 - DNA, 18 bp, Artificial Sequence
  Synthetic
ggccaagcugacgtcuca

SEQ ID NO: 50764 - DNA, 24 bp, Artificial Sequence
  Synthetic
tgtgttaccgugtttgctagtugt

SEQ ID NO: 50765 - DNA, 26 bp, Artificial Sequence
  Synthetic
gctccaacauggacaatcctuaaaaa

SEQ ID NO: 50766 - DNA, 24 bp, Artificial Sequence
  Synthetic
aaaccaaggcauagaggaagctut

SEQ ID NO: 50767 - DNA, 27 bp, Artificial Sequence
  Synthetic
gggattttgcutatttctccacuaaga

SEQ ID NO: 50768 - DNA, 23 bp, Artificial Sequence
  Synthetic
caggaagagagaugcacagaugt

SEQ ID NO: 50769 - DNA, 18 bp, Artificial Sequence
  Synthetic
ctgaccagugccctcucc

SEQ ID NO: 50770 - DNA, 21 bp, Artificial Sequence
  Synthetic
ccutgaagcagaucagccact

SEQ ID NO: 50771 - DNA, 22 bp, Artificial Sequence
  Synthetic
cacatcggtuccgagtctgaut

SEQ ID NO: 50772 - DNA, 23 bp, Artificial Sequence
  Synthetic
ctggaagauctacauccggaagg

SEQ ID NO: 50773 - DNA, 21 bp, Artificial Sequence
  Synthetic
caagccaaaugcatggugaga

SEQ ID NO: 50774 - DNA, 20 bp, Artificial Sequence
  Synthetic
cccacagacgacagugcauc

SEQ ID NO: 50775 - DNA, 23 bp, Artificial Sequence
  Synthetic
gcccagaguaacugacacagaaa

SEQ ID NO: 50776 - DNA, 19 bp, Artificial Sequence
  Synthetic
cgtcgacccugagctctuc

SEQ ID NO: 50777 - DNA, 22 bp, Artificial Sequence
  Synthetic
gctcttctcuctgggcctttua

SEQ ID NO: 50778 - DNA, 18 bp, Artificial Sequence
  Synthetic
cctgctcuggcctcacuc

SEQ ID NO: 50779 - DNA, 18 bp, Artificial Sequence
  Synthetic
ggtgcuccctgcctcuct

SEQ ID NO: 50780 - DNA, 27 bp, Artificial Sequence
  Synthetic
acactgaaaagaugcccagagaaauaa

SEQ ID NO: 50781 - DNA, 28 bp, Artificial Sequence
  Synthetic
gaaauagaacatccttuacccaagagca

SEQ ID NO: 50782 - DNA, 20 bp, Artificial Sequence
  Synthetic
gtctgcccgutcaacaucct

SEQ ID NO: 50783 - DNA, 28 bp, Artificial Sequence
  Synthetic
gacactaccattuggtttgattttggut

SEQ ID NO: 50784 - DNA, 17 bp, Artificial Sequence
  Synthetic
cgtcgcgaguccctgug

SEQ ID NO: 50785 - DNA, 26 bp, Artificial Sequence
  Synthetic
ttttcttgcuaacagagccccataut

SEQ ID NO: 50786 - DNA, 26 bp, Artificial Sequence
  Synthetic
agagaatcaugaaatcaacccuagcc

SEQ ID NO: 50787 - DNA, 28 bp, Artificial Sequence
  Synthetic
tgagatcccctuttccagtatcatttuc

SEQ ID NO: 50788 - DNA, 23 bp, Artificial Sequence
  Synthetic
gtcctgaaacaccacuggttgua

SEQ ID NO: 50789 - DNA, 26 bp, Artificial Sequence
  Synthetic
ccagagggaaacucaatugcaaaaac

SEQ ID NO: 50790 - DNA, 21 bp, Artificial Sequence
  Synthetic
cttgtgcctuctagggctcuc

SEQ ID NO: 50791 - DNA, 21 bp, Artificial Sequence
  Synthetic
gcctgtggucaagtggtucaa

SEQ ID NO: 50792 - DNA, 21 bp, Artificial Sequence
  Synthetic
ggagcaucctgattucagggt

SEQ ID NO: 50793 - DNA, 23 bp, Artificial Sequence
  Synthetic
tucagccagccaacauagaagaa

SEQ ID NO: 50794 - DNA, 22 bp, Artificial Sequence
  Synthetic
ggataugccagagauccccgaa

SEQ ID NO: 50795 - DNA, 21 bp, Artificial Sequence
  Synthetic
gcagtgauggaacccuaggaa

SEQ ID NO: 50796 - DNA, 23 bp, Artificial Sequence
  Synthetic
caggauccatgucccagacaaat

SEQ ID NO: 50797 - DNA, 20 bp, Artificial Sequence
  Synthetic
gacatcugggccaagacucc

SEQ ID NO: 50798 - DNA, 20 bp, Artificial Sequence
  Synthetic
gggtacacugacgtcctcut

SEQ ID NO: 50799 - DNA, 21 bp, Artificial Sequence
  Synthetic
gatctcccagutctcggtguc

SEQ ID NO: 50800 - DNA, 19 bp, Artificial Sequence
  Synthetic
ccagcgcaucatccagtuc

SEQ ID NO: 50801 - DNA, 20 bp, Artificial Sequence
  Synthetic
agggtgaugcatggacacuc

SEQ ID NO: 50802 - DNA, 28 bp, Artificial Sequence
  Synthetic
tgtttaacaugagggtgttttguacaga

SEQ ID NO: 50803 - DNA, 23 bp, Artificial Sequence
  Synthetic
gctgaaatuggcagctttaucca

SEQ ID NO: 50804 - DNA, 27 bp, Artificial Sequence
  Synthetic
cagctgaugtagtaatcuaagcaaggt

SEQ ID NO: 50805 - DNA, 24 bp, Artificial Sequence
  Synthetic
ggcttgtgtugaggctgatacaut

SEQ ID NO: 50806 - DNA, 26 bp, Artificial Sequence
  Synthetic
agcaagcagcugaaacaaataatgut

SEQ ID NO: 50807 - DNA, 28 bp, Artificial Sequence
  Synthetic
aaacaggaagaacaggauagaaagacug

SEQ ID NO: 50808 - DNA, 22 bp, Artificial Sequence
  Synthetic
aaaccctttugaaggccuggat

SEQ ID NO: 50809 - DNA, 28 bp, Artificial Sequence
  Synthetic
gtgcagtaucacagcactctttagauaa

SEQ ID NO: 50810 - DNA, 30 bp, Artificial Sequence
  Synthetic
ctttgacttatcucacagcaaagaaguaga

SEQ ID NO: 50811 - DNA, 28 bp, Artificial Sequence
  Synthetic
caagtttucagaaaagaagccaugacat

SEQ ID NO: 50812 - DNA, 21 bp, Artificial Sequence
  Synthetic
ttggatgaautagcccugcgt

SEQ ID NO: 50813 - DNA, 24 bp, Artificial Sequence
  Synthetic
acagggtagaauattgggcugagt

SEQ ID NO: 50814 - DNA, 27 bp, Artificial Sequence
  Synthetic
gttgaggcactutgtgatgcttataut

SEQ ID NO: 50815 - DNA, 22 bp, Artificial Sequence
  Synthetic
gggaatgcugaagccaucagat

SEQ ID NO: 50816 - DNA, 22 bp, Artificial Sequence
  Synthetic
agcagcagcuagaagaggauct

SEQ ID NO: 50817 - DNA, 21 bp, Artificial Sequence
  Synthetic
cggtcaaagutctgtgcugac

SEQ ID NO: 50818 - DNA, 20 bp, Artificial Sequence
  Synthetic
caccagatugggctgctcua

SEQ ID NO: 50819 - DNA, 25 bp, Artificial Sequence
  Synthetic
gaaaaucaccagccaguagaagaca

SEQ ID NO: 50820 - DNA, 21 bp, Artificial Sequence
  Synthetic
ccctcctuggcatctguagga

SEQ ID NO: 50821 - DNA, 26 bp, Artificial Sequence
  Synthetic
agcugatgaaguagaagacagcaaag

SEQ ID NO: 50822 - DNA, 22 bp, Artificial Sequence
  Synthetic
gtggagcugggaaaaactccua

SEQ ID NO: 50823 - DNA, 24 bp, Artificial Sequence
  Synthetic
ctgtggaaccugtacctttctuct

SEQ ID NO: 50824 - DNA, 19 bp, Artificial Sequence
  Synthetic
gctccacggucaccuacca

SEQ ID NO: 50825 - DNA, 19 bp, Artificial Sequence
  Synthetic
tcgttgauctgcccauccc

SEQ ID NO: 50826 - DNA, 21 bp, Artificial Sequence
  Synthetic
gcagacagagacagguccaut

SEQ ID NO: 50827 - DNA, 19 bp, Artificial Sequence
  Synthetic
ctgccggaacutctucagg

SEQ ID NO: 50828 - DNA, 21 bp, Artificial Sequence
  Synthetic
ggaatgagggcugaactuggg

SEQ ID NO: 50829 - DNA, 23 bp, Artificial Sequence
  Synthetic
cttcctaucacccctcugaggat

SEQ ID NO: 50830 - DNA, 18 bp, Artificial Sequence
  Synthetic
gcagcgaccucctacuga

SEQ ID NO: 50831 - DNA, 21 bp, Artificial Sequence
  Synthetic
ggcagaagccagaugaaggug

SEQ ID NO: 50832 - DNA, 17 bp, Artificial Sequence
  Synthetic
ctgctgcugcgctucac

SEQ ID NO: 50833 - DNA, 17 bp, Artificial Sequence
  Synthetic
gaacugccgcugcaacc

SEQ ID NO: 50834 - DNA, 28 bp, Artificial Sequence
  Synthetic
catgtaccccaagaauaaaactgatgug

SEQ ID NO: 50835 - DNA, 23 bp, Artificial Sequence
  Synthetic
cccuttcuacagaggacaacaga

SEQ ID NO: 50836 - DNA, 21 bp, Artificial Sequence
  Synthetic
gcagatcttccucccctccuc

SEQ ID NO: 50837 - DNA, 22 bp, Artificial Sequence
  Synthetic
gggtgtauccaccaaatgugaa

SEQ ID NO: 50838 - DNA, 22 bp, Artificial Sequence
  Synthetic
ccctcagcugtgagtgtatuga

SEQ ID NO: 50839 - DNA, 25 bp, Artificial Sequence
  Synthetic
caaaccctgtaugtccttgtgacua

SEQ ID NO: 50840 - DNA, 19 bp, Artificial Sequence
  Synthetic
cgccgtcugcatcgtacuc

SEQ ID NO: 50841 - DNA, 18 bp, Artificial Sequence
  Synthetic
aggtugggtgcugaagcc

SEQ ID NO: 50842 - DNA, 20 bp, Artificial Sequence
  Synthetic
ggcutgggcaugaaggaaac

SEQ ID NO: 50843 - DNA, 20 bp, Artificial Sequence
  Synthetic
ggccuttccttcugcaggac

SEQ ID NO: 50844 - DNA, 20 bp, Artificial Sequence
  Synthetic
gcggtcucagttcctgtguc

SEQ ID NO: 50845 - DNA, 24 bp, Artificial Sequence
  Synthetic
atgttgcuaaaggccatctctuct

SEQ ID NO: 50846 - DNA, 21 bp, Artificial Sequence
  Synthetic
tctttccacccutgccaugag

SEQ ID NO: 50847 - DNA, 26 bp, Artificial Sequence
  Synthetic
ggtagagtaacacuggcttctgatug

SEQ ID NO: 50848 - DNA, 23 bp, Artificial Sequence
  Synthetic
aagagctugaagaagtccacgut

SEQ ID NO: 50849 - DNA, 25 bp, Artificial Sequence
  Synthetic
cagtttctagugttgcctcttcucc

SEQ ID NO: 50850 - DNA, 24 bp, Artificial Sequence
  Synthetic
gaccaaucaggccaatuaaaccag

SEQ ID NO: 50851 - DNA, 26 bp, Artificial Sequence
  Synthetic
tccagttaggugatgagaaggagaut

SEQ ID NO: 50852 - DNA, 24 bp, Artificial Sequence
  Synthetic
tgtaccttugcaccttctttucct

SEQ ID NO: 50853 - DNA, 28 bp, Artificial Sequence
  Synthetic
tgtttttgagtutgtgttatcttugcca

SEQ ID NO: 50854 - DNA, 19 bp, Artificial Sequence
  Synthetic
cgcacacaucagucaccga

SEQ ID NO: 50855 - DNA, 24 bp, Artificial Sequence
  Synthetic
caaacguacagcagtctctctuct

SEQ ID NO: 50856 - DNA, 28 bp, Artificial Sequence
  Synthetic
tgtacacatgccutgttagtttctucat

SEQ ID NO: 50857 - DNA, 22 bp, Artificial Sequence
  Synthetic
ctgcutcaactgtugcagcaaa

SEQ ID NO: 50858 - DNA, 21 bp, Artificial Sequence
  Synthetic
gctgttgcuggcagttacugt

SEQ ID NO: 50859 - DNA, 26 bp, Artificial Sequence
  Synthetic
ccaaatggccagaucagaagttauga

SEQ ID NO: 50860 - DNA, 27 bp, Artificial Sequence
  Synthetic
tctgatcaattucccttctctctttuc

SEQ ID NO: 50861 - DNA, 23 bp, Artificial Sequence
  Synthetic
gaatgtgccugggtcgtttatuc

SEQ ID NO: 50862 - DNA, 21 bp, Artificial Sequence
  Synthetic
gtgcatgcutggactcugaag

SEQ ID NO: 50863 - DNA, 27 bp, Artificial Sequence
  Synthetic
tcacatcaagagugcttgctttctuaa

SEQ ID NO: 50864 - DNA, 27 bp, Artificial Sequence
  Synthetic
ctgtcctcactauaggctttcagaaug

SEQ ID NO: 50865 - DNA, 28 bp, Artificial Sequence
  Synthetic
agaactgccattutccctattttctcut

SEQ ID NO: 50866 - DNA, 22 bp, Artificial Sequence
  Synthetic
cactctgctcutttccctggua

SEQ ID NO: 50867 - DNA, 27 bp, Artificial Sequence
  Synthetic
ccctttatgcgauactaatccctuact

SEQ ID NO: 50868 - DNA, 25 bp, Artificial Sequence
  Synthetic
ccagctgttauacacgttgattugt

SEQ ID NO: 50869 - DNA, 28 bp, Artificial Sequence
  Synthetic
gcctatttcuttgactttaauggcacat

SEQ ID NO: 50870 - DNA, 21 bp, Artificial Sequence
  Synthetic
gcttcaggautcaaccgugac

SEQ ID NO: 50871 - DNA, 24 bp, Artificial Sequence
  Synthetic
gtccttacaguctccctctugact

SEQ ID NO: 50872 - DNA, 26 bp, Artificial Sequence
  Synthetic
gggacctaugaaagcttataccuaca

SEQ ID NO: 50873 - DNA, 22 bp, Artificial Sequence
  Synthetic
gcugcaucacaccagacaagaa

SEQ ID NO: 50874 - DNA, 24 bp, Artificial Sequence
  Synthetic
tttgatugacaggcatctctugga

SEQ ID NO: 50875 - DNA, 20 bp, Artificial Sequence
  Synthetic
cattagggacguccgcucat

SEQ ID NO: 50876 - DNA, 28 bp, Artificial Sequence
  Synthetic
gtgcattggttugtcactacttatucaa

SEQ ID NO: 50877 - DNA, 26 bp, Artificial Sequence
  Synthetic
gttgtccattaautcggaacgagaug

SEQ ID NO: 50878 - DNA, 27 bp, Artificial Sequence
  Synthetic
acacacaautttaccttcuaagaggct

SEQ ID NO: 50879 - DNA, 25 bp, Artificial Sequence
  Synthetic
actgggctatuagcaatgggacuat

SEQ ID NO: 50880 - DNA, 28 bp, Artificial Sequence
  Synthetic
cttttattcttcautgctgtcctucaca

SEQ ID NO: 50881 - DNA, 22 bp, Artificial Sequence
  Synthetic
gtctcauaggaacccucccaac

SEQ ID NO: 50882 - DNA, 26 bp, Artificial Sequence
  Synthetic
cttcatcagugcctttggttaaacut

SEQ ID NO: 50883 - DNA, 28 bp, Artificial Sequence
  Synthetic
caatttccagcuaagacttttcaaggua

SEQ ID NO: 50884 - DNA, 28 bp, Artificial Sequence
  Synthetic
tggcatttgacutaactacaagtucaca

SEQ ID NO: 50885 - DNA, 23 bp, Artificial Sequence
  Synthetic
ccaguaccacagatgttugcagt

SEQ ID NO: 50886 - DNA, 27 bp, Artificial Sequence
  Synthetic
ggaagtgggatautcctggacataaut

SEQ ID NO: 50887 - DNA, 28 bp, Artificial Sequence
  Synthetic
caacaaauccctagaaauagaaccacga

SEQ ID NO: 50888 - DNA, 21 bp, Artificial Sequence
  Synthetic
gtgccatgucggagaacauct

SEQ ID NO: 50889 - DNA, 22 bp, Artificial Sequence
  Synthetic
gggagagggaaucacauccaaa

SEQ ID NO: 50890 - DNA, 33 bp, Artificial Sequence
  Synthetic
atcatttgcatgtautgatacaaatacaaaugg

SEQ ID NO: 50891 - DNA, 26 bp, Artificial Sequence
  Synthetic
ttctcaatcgcutttcagctgauact

SEQ ID NO: 50892 - DNA, 26 bp, Artificial Sequence
  Synthetic
tggcttautattcctcauggagacac

SEQ ID NO: 50893 - DNA, 28 bp, Artificial Sequence
  Synthetic
gctccttgcaugatagtacaatgttuac

SEQ ID NO: 50894 - DNA, 28 bp, Artificial Sequence
  Synthetic
gtaataaaggccautacccaauacagga

SEQ ID NO: 50895 - DNA, 26 bp, Artificial Sequence
  Synthetic
tactcctucaactcaaaacuccagaa

SEQ ID NO: 50896 - DNA, 26 bp, Artificial Sequence
  Synthetic
gacataagaactucctgcaagagcua

SEQ ID NO: 50897 - DNA, 25 bp, Artificial Sequence
  Synthetic
tgtgcatguctgtgaaauagcagaa

SEQ ID NO: 50898 - DNA, 26 bp, Artificial Sequence
  Synthetic
ctgaagaagtugatagtcaggcugaa

SEQ ID NO: 50899 - DNA, 22 bp, Artificial Sequence
  Synthetic
ttaagaguccgggttugagcag

SEQ ID NO: 50900 - DNA, 26 bp, Artificial Sequence
  Synthetic
gcaactgacugaatttgtugagaaca

SEQ ID NO: 50901 - DNA, 28 bp, Artificial Sequence
  Synthetic
atttaaatgcuacttacaaggaaucgct

SEQ ID NO: 50902 - DNA, 23 bp, Artificial Sequence
  Synthetic
cttgtaaguggaggtggcaugaa

SEQ ID NO: 50903 - DNA, 28 bp, Artificial Sequence
  Synthetic
cctggaaaactucctttgatgaagaaug

SEQ ID NO: 50904 - DNA, 27 bp, Artificial Sequence
  Synthetic
cacctgaatgutttggagttaaugcag

SEQ ID NO: 50905 - DNA, 28 bp, Artificial Sequence
  Synthetic
aaatgcttcagtuttcaagtgtcttaug

SEQ ID NO: 50906 - DNA, 21 bp, Artificial Sequence
  Synthetic
gcccccautactgagugagga

SEQ ID NO: 50907 - DNA, 22 bp, Artificial Sequence
  Synthetic
ggccttttgccucttccttcua

SEQ ID NO: 50908 - DNA, 22 bp, Artificial Sequence
  Synthetic
gggaaggcggcutttacugaat

SEQ ID NO: 50909 - DNA, 23 bp, Artificial Sequence
  Synthetic
attcttcuctgagccugagacct

SEQ ID NO: 50910 - DNA, 20 bp, Artificial Sequence
  Synthetic
ggaacggacucagaggagug

SEQ ID NO: 50911 - DNA, 21 bp, Artificial Sequence
  Synthetic
caaacctccugagggctugag

SEQ ID NO: 50912 - DNA, 27 bp, Artificial Sequence
  Synthetic
acagactggatuaacatagcattgcut

SEQ ID NO: 50913 - DNA, 29 bp, Artificial Sequence
  Synthetic
tgtttgatctaaugagtgtttgagugaca

SEQ ID NO: 50914 - DNA, 28 bp, Artificial Sequence
  Synthetic
tcagtaaatgcugaggtagatggtttuc

SEQ ID NO: 50915 - DNA, 28 bp, Artificial Sequence
  Synthetic
tggctcttagaaaguttgatgcactuat

SEQ ID NO: 50916 - DNA, 27 bp, Artificial Sequence
  Synthetic
agcatgtcgaautattggattgucact

SEQ ID NO: 50917 - DNA, 27 bp, Artificial Sequence
  Synthetic
gaaaacagaggaaaaaugcccagtuaa

SEQ ID NO: 50918 - DNA, 28 bp, Artificial Sequence
  Synthetic
ggtgacttcagutaataccaaaccaaug

SEQ ID NO: 50919 - DNA, 28 bp, Artificial Sequence
  Synthetic
aaaagaactgaccauaagtcctgcauat

SEQ ID NO: 50920 - DNA, 28 bp, Artificial Sequence
  Synthetic
ctcttgagaggaaaucaaaatgctuacc

SEQ ID NO: 50921 - DNA, 22 bp, Artificial Sequence
  Synthetic
agcaaaccgucttggtuacagt

SEQ ID NO: 50922 - DNA, 25 bp, Artificial Sequence
  Synthetic
agtgaacaaguacattgcuccaagt

SEQ ID NO: 50923 - DNA, 22 bp, Artificial Sequence
  Synthetic
gtactcaggacgutgccttcuc

SEQ ID NO: 50924 - DNA, 21 bp, Artificial Sequence
  Synthetic
ccctgaugctgaactgaucgt

SEQ ID NO: 50925 - DNA, 21 bp, Artificial Sequence
  Synthetic
acaacagcgcauttccccuat

SEQ ID NO: 50926 - DNA, 24 bp, Artificial Sequence
  Synthetic
gctgaagugaaagctacucaccaa

SEQ ID NO: 50927 - DNA, 27 bp, Artificial Sequence
  Synthetic
tccacttcucacacttcagattucaac

SEQ ID NO: 50928 - DNA, 29 bp, Artificial Sequence
  Synthetic
atcctgactaaacaugatctaagcaaugt

SEQ ID NO: 50929 - DNA, 29 bp, Artificial Sequence
  Synthetic
ggaatctatgcaaauatgaggatggtuca

SEQ ID NO: 50930 - DNA, 20 bp, Artificial Sequence
  Synthetic
cctggaggaggugcaccaua

SEQ ID NO: 50931 - DNA, 22 bp, Artificial Sequence
  Synthetic
agugggtagguaaaagcaagcc

SEQ ID NO: 50932 - DNA, 22 bp, Artificial Sequence
  Synthetic
cgaccttgagugcagatgugaa

SEQ ID NO: 50933 - DNA, 24 bp, Artificial Sequence
  Synthetic
ccaaggactcuatcccctcaucag

SEQ ID NO: 50934 - DNA, 22 bp, Artificial Sequence
  Synthetic
cacactcaccuttcctctuggt

SEQ ID NO: 50935 - DNA, 21 bp, Artificial Sequence
  Synthetic
tcgagctcuctccacctcauc

SEQ ID NO: 50936 - DNA, 31 bp, Artificial Sequence
  Synthetic
gtcataatgtttttcutttcaggacatguga

SEQ ID NO: 50937 - DNA, 27 bp, Artificial Sequence
  Synthetic
agcctgctauaatcgatcaaacuaacc

SEQ ID NO: 50938 - DNA, 24 bp, Artificial Sequence
  Synthetic
ttgagggaaugtagagacaagugg

SEQ ID NO: 50939 - DNA, 25 bp, Artificial Sequence
  Synthetic
tctgaaggtugatcacttgcugaat

SEQ ID NO: 50940 - DNA, 22 bp, Artificial Sequence
  Synthetic
gagaagggucatggagggaaug

SEQ ID NO: 50941 - DNA, 26 bp, Artificial Sequence
  Synthetic
cggcattgtaaucgcaatgattgtut

SEQ ID NO: 50942 - DNA, 23 bp, Artificial Sequence
  Synthetic
aaagccgguaagtatgugggaaa

SEQ ID NO: 50943 - DNA, 28 bp, Artificial Sequence
  Synthetic
agggtaaaaacaccuagctatgatccua

SEQ ID NO: 50944 - DNA, 28 bp, Artificial Sequence
  Synthetic
acttgtctactcugctttcatcacuaga

SEQ ID NO: 50945 - DNA, 28 bp, Artificial Sequence
  Synthetic
ctgtttgatccaacacuctctttctcut

SEQ ID NO: 50946 - DNA, 18 bp, Artificial Sequence
  Synthetic
ggactggucgagggugac

SEQ ID NO: 50947 - DNA, 18 bp, Artificial Sequence
  Synthetic
tcgggccccutgtaguga

SEQ ID NO: 50948 - DNA, 23 bp, Artificial Sequence
  Synthetic
aaaacaggagauggcaggaauga

SEQ ID NO: 50949 - DNA, 22 bp, Artificial Sequence
  Synthetic
agttccctcacuctgtcccaut

SEQ ID NO: 50950 - DNA, 21 bp, Artificial Sequence
  Synthetic
cggagagacacuggtcuggat

SEQ ID NO: 50951 - DNA, 22 bp, Artificial Sequence
  Synthetic
gctcaatgcutttcctgctcug

SEQ ID NO: 50952 - DNA, 23 bp, Artificial Sequence
  Synthetic
agaggaagggaagugggaaaaug

SEQ ID NO: 50953 - DNA, 17 bp, Artificial Sequence
  Synthetic
aaccugcagcgggugaa

SEQ ID NO: 50954 - DNA, 20 bp, Artificial Sequence
  Synthetic
cgggaaaccucctctugaga

SEQ ID NO: 50955 - DNA, 21 bp, Artificial Sequence
  Synthetic
cuccctagtcauggccaacac

SEQ ID NO: 50956 - DNA, 21 bp, Artificial Sequence
  Synthetic
catcaccuggtcctcctucac

SEQ ID NO: 50957 - DNA, 21 bp, Artificial Sequence
  Synthetic
gagcactautgccctgucact

SEQ ID NO: 50958 - DNA, 24 bp, Artificial Sequence
  Synthetic
ggtgatcuccattaacacugacct

SEQ ID NO: 50959 - DNA, 24 bp, Artificial Sequence
  Synthetic
tggaaagcaaagauctgtgtcuca

SEQ ID NO: 50960 - DNA, 26 bp, Artificial Sequence
  Synthetic
gtttcagtctgauttctcctccacut

SEQ ID NO: 50961 - DNA, 29 bp, Artificial Sequence
  Synthetic
aaccaattatggauagaagtcaggtccua

SEQ ID NO: 50962 - DNA, 23 bp, Artificial Sequence
  Synthetic
gggacagcugagacuaaaaacat

SEQ ID NO: 50963 - DNA, 25 bp, Artificial Sequence
  Synthetic
gccaccaacagautattctucacag

SEQ ID NO: 50964 - DNA, 28 bp, Artificial Sequence
  Synthetic
gactgtucgagcgacatauaaaacaaaa

SEQ ID NO: 50965 - DNA, 21 bp, Artificial Sequence
  Synthetic
cuttcacttcucccaccacca

SEQ ID NO: 50966 - DNA, 27 bp, Artificial Sequence
  Synthetic
tctgatacacacuaactgttgcttugg

SEQ ID NO: 50967 - DNA, 22 bp, Artificial Sequence
  Synthetic
gtggcatcaaugtcctctucct

SEQ ID NO: 50968 - DNA, 27 bp, Artificial Sequence
  Synthetic
agatgtaggcuttcttcatucaccaaa

SEQ ID NO: 50969 - DNA, 28 bp, Artificial Sequence
  Synthetic
gccatctggtugctaattttagctgaua

SEQ ID NO: 50970 - DNA, 21 bp, Artificial Sequence
  Synthetic
aagtgacagcguttgcccuaa

SEQ ID NO: 50971 - DNA, 28 bp, Artificial Sequence
  Synthetic
cagatctccaacuttgtgaaatgguaga

SEQ ID NO: 50972 - DNA, 21 bp, Artificial Sequence
  Synthetic
gaggacgaugaccctgaugac

SEQ ID NO: 50973 - DNA, 22 bp, Artificial Sequence
  Synthetic
gtcctcccugggaaagtatgut

SEQ ID NO: 50974 - DNA, 21 bp, Artificial Sequence
  Synthetic
ttcctguacaacgccuccaag

SEQ ID NO: 50975 - DNA, 22 bp, Artificial Sequence
  Synthetic
tgggccaugtgagctttuagaa

SEQ ID NO: 50976 - DNA, 23 bp, Artificial Sequence
  Synthetic
cctcagctgugcaattcaaccua

SEQ ID NO: 50977 - DNA, 22 bp, Artificial Sequence
  Synthetic
ctgtgagauctgcccttuccag

SEQ ID NO: 50978 - DNA, 23 bp, Artificial Sequence
  Synthetic
ttagtccaaautgccacatguga

SEQ ID NO: 50979 - DNA, 26 bp, Artificial Sequence
  Synthetic
ctgaatgaagauacacgagtgtguga

SEQ ID NO: 50980 - DNA, 20 bp, Artificial Sequence
  Synthetic
gcggagaugagcttgagguc

SEQ ID NO: 50981 - DNA, 21 bp, Artificial Sequence
  Synthetic
ggcttccccugtaggcttuac

SEQ ID NO: 50982 - DNA, 18 bp, Artificial Sequence
  Synthetic
aggaagugcuccgggagt

SEQ ID NO: 50983 - DNA, 18 bp, Artificial Sequence
  Synthetic
cggcucccacaccaucag

SEQ ID NO: 50984 - DNA, 19 bp, Artificial Sequence
  Synthetic
gtggtgggugagggctaug

SEQ ID NO: 50985 - DNA, 17 bp, Artificial Sequence
  Synthetic
cctcaacuccggcguct

SEQ ID NO: 50986 - DNA, 19 bp, Artificial Sequence
  Synthetic
guggatugggacacgggaa

SEQ ID NO: 50987 - DNA, 24 bp, Artificial Sequence
  Synthetic
gagcaguacatgtccttucacaag

SEQ ID NO: 50988 - DNA, 17 bp, Artificial Sequence
  Synthetic
cggctcugcccaggtua

SEQ ID NO: 50989 - DNA, 18 bp, Artificial Sequence
  Synthetic
cgtgatccuctgcccuga

SEQ ID NO: 50990 - DNA, 21 bp, Artificial Sequence
  Synthetic
cttgtctgccucagggaucag

SEQ ID NO: 50991 - DNA, 20 bp, Artificial Sequence
  Synthetic
gcagtcctucagctcgauga

SEQ ID NO: 50992 - DNA, 20 bp, Artificial Sequence
  Synthetic
cacctggucgaagctaguga

SEQ ID NO: 50993 - DNA, 17 bp, Artificial Sequence
  Synthetic
ctgttcgccgugcacut

SEQ ID NO: 50994 - DNA, 21 bp, Artificial Sequence
  Synthetic
cgctaaaggcugctctcucaa

SEQ ID NO: 50995 - DNA, 20 bp, Artificial Sequence
  Synthetic
gctggagcgugtgactgaug

SEQ ID NO: 50996 - DNA, 27 bp, Artificial Sequence
  Synthetic
tttaggctguttatctatgtugcccaa

SEQ ID NO: 50997 - DNA, 28 bp, Artificial Sequence
  Synthetic
cagccatucaccaaagatattucagaaa

SEQ ID NO: 50998 - DNA, 27 bp, Artificial Sequence
  Synthetic
tccgatgauagttcgctaugaaaaagg

SEQ ID NO: 50999 - DNA, 25 bp, Artificial Sequence
  Synthetic
caacaaaatgcucaaagccgaaaug

SEQ ID NO: 51000 - DNA, 21 bp, Artificial Sequence
  Synthetic
ctcctgcugaagcctgttcut

SEQ ID NO: 51001 - DNA, 20 bp, Artificial Sequence
  Synthetic
cctcucaccctacccuggac

SEQ ID NO: 51002 - DNA, 21 bp, Artificial Sequence
  Synthetic
ctccagcauccattccuccac

SEQ ID NO: 51003 - DNA, 20 bp, Artificial Sequence
  Synthetic
agggatccacugccctctut

SEQ ID NO: 51004 - DNA, 22 bp, Artificial Sequence
  Synthetic
cccacauacagucagacccaag

SEQ ID NO: 51005 - DNA, 22 bp, Artificial Sequence
  Synthetic
cgtggcaggautttccctttut

SEQ ID NO: 51006 - DNA, 23 bp, Artificial Sequence
  Synthetic
ctgcccattucctgattctcuct

SEQ ID NO: 51007 - DNA, 24 bp, Artificial Sequence
  Synthetic
accatccattuctaccagaagcug

SEQ ID NO: 51008 - DNA, 21 bp, Artificial Sequence
  Synthetic
aggcggcccagautcttttua

SEQ ID NO: 51009 - DNA, 23 bp, Artificial Sequence
  Synthetic
ctggcttgautgtgcttttugga

SEQ ID NO: 51010 - DNA, 23 bp, Artificial Sequence
  Synthetic
gggcucagaacttguaacagaaa

SEQ ID NO: 51011 - DNA, 28 bp, Artificial Sequence
  Synthetic
gcaacctttugtatatgttctucagcaa

SEQ ID NO: 51012 - DNA, 21 bp, Artificial Sequence
  Synthetic
ggacgaggutaguacgaagcc

SEQ ID NO: 51013 - DNA, 21 bp, Artificial Sequence
  Synthetic
gaggaggaacggugatgucat

SEQ ID NO: 51014 - DNA, 22 bp, Artificial Sequence
  Synthetic
gtgaugaggccaagtcugacaa

SEQ ID NO: 51015 - DNA, 21 bp, Artificial Sequence
  Synthetic
agactggtuttgggagcugag

SEQ ID NO: 51016 - DNA, 20 bp, Artificial Sequence
  Synthetic
ggucaacgtcatugccccat

SEQ ID NO: 51017 - DNA, 23 bp, Artificial Sequence
  Synthetic
gctgaagcccaauctatgaugct

SEQ ID NO: 51018 - DNA, 23 bp, Artificial Sequence
  Synthetic
acuttcatcatctucaccagcgt

SEQ ID NO: 51019 - DNA, 27 bp, Artificial Sequence
  Synthetic
agtatcaccaaacuctcacttcaacug

SEQ ID NO: 51020 - DNA, 24 bp, Artificial Sequence
  Synthetic
tgagtcugccagcttattugaagt

SEQ ID NO: 51021 - DNA, 22 bp, Artificial Sequence
  Synthetic
ctgacctccutgtccaggttuc

SEQ ID NO: 51022 - DNA, 20 bp, Artificial Sequence
  Synthetic
tctcaggcacccagugtcua

SEQ ID NO: 51023 - DNA, 19 bp, Artificial Sequence
  Synthetic
gccccaaccauggaggaug

SEQ ID NO: 51024 - DNA, 20 bp, Artificial Sequence
  Synthetic
cccaggutggtuggaacagt

SEQ ID NO: 51025 - DNA, 23 bp, Artificial Sequence
  Synthetic
caggcaagaaacuccaggtguaa

SEQ ID NO: 51026 - DNA, 21 bp, Artificial Sequence
  Synthetic
cctggaagcugaggaggagua

SEQ ID NO: 51027 - DNA, 19 bp, Artificial Sequence
  Synthetic
gactcggugcccactguag

SEQ ID NO: 51028 - DNA, 25 bp, Artificial Sequence
  Synthetic
ccattcacaccaugcacatatgaut

SEQ ID NO: 51029 - DNA, 24 bp, Artificial Sequence
  Synthetic
gtttgcgcacuttcatctucaact

SEQ ID NO: 51030 - DNA, 20 bp, Artificial Sequence
  Synthetic
gggcgaccugtuccaaaagt

SEQ ID NO: 51031 - DNA, 22 bp, Artificial Sequence
  Synthetic
cagaagaccuggcugaaaggag

SEQ ID NO: 51032 - DNA, 27 bp, Artificial Sequence
  Synthetic
cagtcgcatgaugaagcatgtatauct

SEQ ID NO: 51033 - DNA, 21 bp, Artificial Sequence
  Synthetic
ccccugcucaacaagaacaac

SEQ ID NO: 51034 - DNA, 22 bp, Artificial Sequence
  Synthetic
tggtggcaguaactttucccaa

SEQ ID NO: 51035 - DNA, 27 bp, Artificial Sequence
  Synthetic
cttcagctucctctaagatucaagaga

SEQ ID NO: 51036 - DNA, 19 bp, Artificial Sequence
  Synthetic
gggatuaccggcauccaag

SEQ ID NO: 51037 - DNA, 22 bp, Artificial Sequence
  Synthetic
tggcagccuttctcaaaccaut

SEQ ID NO: 51038 - DNA, 20 bp, Artificial Sequence
  Synthetic
gggaaaccuctctcgcccua

SEQ ID NO: 51039 - DNA, 23 bp, Artificial Sequence
  Synthetic
ggttttgcucactgtctgtucct

SEQ ID NO: 51040 - DNA, 22 bp, Artificial Sequence
  Synthetic
acccugcacagagagaacacua

SEQ ID NO: 51041 - DNA, 22 bp, Artificial Sequence
  Synthetic
cctaacccugagttccccttug

SEQ ID NO: 51042 - DNA, 20 bp, Artificial Sequence
  Synthetic
ccuaaggaugggaggcacga

SEQ ID NO: 51043 - DNA, 23 bp, Artificial Sequence
  Synthetic
ccaagtcccacucatacctcuct

SEQ ID NO: 51044 - DNA, 18 bp, Artificial Sequence
  Synthetic
ccaggcaaugagggugga

SEQ ID NO: 51045 - DNA, 18 bp, Artificial Sequence
  Synthetic
cugaggcuggcacaggat

SEQ ID NO: 51046 - DNA, 17 bp, Artificial Sequence
  Synthetic
cgggagaugcggcugaa

SEQ ID NO: 51047 - DNA, 17 bp, Artificial Sequence
  Synthetic
ggccccuacaggcacug

SEQ ID NO: 51048 - DNA, 20 bp, Artificial Sequence
  Synthetic
ctgguggcaatgggugagat

SEQ ID NO: 51049 - DNA, 20 bp, Artificial Sequence
  Synthetic
gtgcgtccugtgttgttcug

SEQ ID NO: 51050 - DNA, 20 bp, Artificial Sequence
  Synthetic
cagcaguacctggacgtugt

SEQ ID NO: 51051 - DNA, 21 bp, Artificial Sequence
  Synthetic
ggtcatgttcuccaccaccug

SEQ ID NO: 51052 - DNA, 25 bp, Artificial Sequence
  Synthetic
atggcatagcuaattacaacgguga

SEQ ID NO: 51053 - DNA, 28 bp, Artificial Sequence
  Synthetic
ctttguatcgtgaaagtuagggagaagt

SEQ ID NO: 51054 - DNA, 23 bp, Artificial Sequence
  Synthetic
aagctgagcautaccagtucaca

SEQ ID NO: 51055 - DNA, 25 bp, Artificial Sequence
  Synthetic
ccttactctaacugttgcctacucc

SEQ ID NO: 51056 - DNA, 25 bp, Artificial Sequence
  Synthetic
gcttcucaacggacatagugaaact

SEQ ID NO: 51057 - DNA, 21 bp, Artificial Sequence
  Synthetic
ttgcaacaacuccagaugggt

SEQ ID NO: 51058 - DNA, 29 bp, Artificial Sequence
  Synthetic
caaagatacuggagaactgaatgtuacca

SEQ ID NO: 51059 - DNA, 28 bp, Artificial Sequence
  Synthetic
cgtaacctgtuagctgaaatcaugacat

SEQ ID NO: 51060 - DNA, 18 bp, Artificial Sequence
  Synthetic
gggtgcagucaggugaag

SEQ ID NO: 51061 - DNA, 18 bp, Artificial Sequence
  Synthetic
ttgaccacgugcaggugt

SEQ ID NO: 51062 - DNA, 17 bp, Artificial Sequence
  Synthetic
gactggcugggcctcut

SEQ ID NO: 51063 - DNA, 18 bp, Artificial Sequence
  Synthetic
cgcagaugcggaaggcua

SEQ ID NO: 51064 - DNA, 18 bp, Artificial Sequence
  Synthetic
ccccuttaccgucaccca

SEQ ID NO: 51065 - DNA, 19 bp, Artificial Sequence
  Synthetic
gggacaggcaugcttugac

SEQ ID NO: 51066 - DNA, 23 bp, Artificial Sequence
  Synthetic
gggatctgugcttattctgtucc

SEQ ID NO: 51067 - DNA, 24 bp, Artificial Sequence
  Synthetic
ggcagctcagauactagggttgua

SEQ ID NO: 51068 - DNA, 19 bp, Artificial Sequence
  Synthetic
agaggaggcugacctgugt

SEQ ID NO: 51069 - DNA, 21 bp, Artificial Sequence
  Synthetic
cacccaccutcttctugagca

SEQ ID NO: 51070 - DNA, 21 bp, Artificial Sequence
  Synthetic
caccacgcaguacagcaaaug

SEQ ID NO: 51071 - DNA, 23 bp, Artificial Sequence
  Synthetic
tccagagaugcagtccaucaaag

SEQ ID NO: 51072 - DNA, 20 bp, Artificial Sequence
  Synthetic
gactgaugcaggaggcucat

SEQ ID NO: 51073 - DNA, 18 bp, Artificial Sequence
  Synthetic
gtgcagcagcugagctug

SEQ ID NO: 51074 - DNA, 24 bp, Artificial Sequence
  Synthetic
ctcataaaagccutcagcaugacc

SEQ ID NO: 51075 - DNA, 22 bp, Artificial Sequence
  Synthetic
gagggucctcagtgaucagagt

SEQ ID NO: 51076 - DNA, 21 bp, Artificial Sequence
  Synthetic
ctucacccggtttucccagaa

SEQ ID NO: 51077 - DNA, 24 bp, Artificial Sequence
  Synthetic
tgaaatcttccuctctgtcuccca

SEQ ID NO: 51078 - DNA, 21 bp, Artificial Sequence
  Synthetic
tggcuggagagtcuggagaat

SEQ ID NO: 51079 - DNA, 21 bp, Artificial Sequence
  Synthetic
catgcggucctcaaaactgug

SEQ ID NO: 51080 - DNA, 21 bp, Artificial Sequence
  Synthetic
gggaggugtatgcugagacca

SEQ ID NO: 51081 - DNA, 25 bp, Artificial Sequence
  Synthetic
ggcttctcugaacctctttactgut

SEQ ID NO: 51082 - DNA, 20 bp, Artificial Sequence
  Synthetic
agggccggauctccttcuac

SEQ ID NO: 51083 - DNA, 28 bp, Artificial Sequence
  Synthetic
tcctggaagaacacucagaaaaacuaaa

SEQ ID NO: 51084 - DNA, 20 bp, Artificial Sequence
  Synthetic
cacacttgagugccccauca

SEQ ID NO: 51085 - DNA, 21 bp, Artificial Sequence
  Synthetic
gggagggaaggagaugauccc

SEQ ID NO: 51086 - DNA, 24 bp, Artificial Sequence
  Synthetic
gccttatcaccugatgttgcauct

SEQ ID NO: 51087 - DNA, 23 bp, Artificial Sequence
  Synthetic
gggtggtccugtttatcccagua

SEQ ID NO: 51088 - DNA, 19 bp, Artificial Sequence
  Synthetic
gccugcaaagtcugcaaga

SEQ ID NO: 51089 - DNA, 22 bp, Artificial Sequence
  Synthetic
cccaaagutgcaaaacauggct

SEQ ID NO: 51090 - DNA, 23 bp, Artificial Sequence
  Synthetic
gggtgauacaggcttcttttuga

SEQ ID NO: 51091 - DNA, 24 bp, Artificial Sequence
  Synthetic
agaaggagauauacccagccacaa

SEQ ID NO: 51092 - DNA, 21 bp, Artificial Sequence
  Synthetic
gaagagacgugagaggctgut

SEQ ID NO: 51093 - DNA, 22 bp, Artificial Sequence
  Synthetic
gctcctaacgccutctcttcug

SEQ ID NO: 51094 - DNA, 20 bp, Artificial Sequence
  Synthetic
cgaacugccttgccaucgaa

SEQ ID NO: 51095 - DNA, 27 bp, Artificial Sequence
  Synthetic
caatcttacacgugtgtgggttttuaa

SEQ ID NO: 51096 - DNA, 22 bp, Artificial Sequence
  Synthetic
cacacgauagtggatgagugct

SEQ ID NO: 51097 - DNA, 25 bp, Artificial Sequence
  Synthetic
ttttacttagggcuaagaccgctut

SEQ ID NO: 51098 - DNA, 20 bp, Artificial Sequence
  Synthetic
actggtccautcccggauga

SEQ ID NO: 51099 - DNA, 24 bp, Artificial Sequence
  Synthetic
tgtgatctgaucccaagcctauct

SEQ ID NO: 51100 - DNA, 25 bp, Artificial Sequence
  Synthetic
gggtgauaaatggacacuaaaagca

SEQ ID NO: 51101 - DNA, 24 bp, Artificial Sequence
  Synthetic
gcgtgaccugtgatgactacuact

SEQ ID NO: 51102 - DNA, 19 bp, Artificial Sequence
  Synthetic
ggcctccutcccgaguagt

SEQ ID NO: 51103 - DNA, 25 bp, Artificial Sequence
  Synthetic
cacatactucaaagtgtgccucaag

SEQ ID NO: 51104 - DNA, 21 bp, Artificial Sequence
  Synthetic
catgtcauggacacccctcut

SEQ ID NO: 51105 - DNA, 22 bp, Artificial Sequence
  Synthetic
cctgactcutctctccauccac

SEQ ID NO: 51106 - DNA, 22 bp, Artificial Sequence
  Synthetic
agagagagagggauagguccca

SEQ ID NO: 51107 - DNA, 19 bp, Artificial Sequence
  Synthetic
ggccaaggaugaggcuagt

SEQ ID NO: 51108 - DNA, 25 bp, Artificial Sequence
  Synthetic
cctcttcgagacauatgccatctuc

SEQ ID NO: 51109 - DNA, 21 bp, Artificial Sequence
  Synthetic
ggtgactgcugatgtctcucc

SEQ ID NO: 51110 - DNA, 24 bp, Artificial Sequence
  Synthetic
gcaagttcttugcttgacgttcug

SEQ ID NO: 51111 - DNA, 28 bp, Artificial Sequence
  Synthetic
ctagtgggaggucaaatattctucagat

SEQ ID NO: 51112 - DNA, 24 bp, Artificial Sequence
  Synthetic
tgcaaacttcauccctacttuggt

SEQ ID NO: 51113 - DNA, 21 bp, Artificial Sequence
  Synthetic
atgatuggagccagctctucc

SEQ ID NO: 51114 - DNA, 28 bp, Artificial Sequence
  Synthetic
ggtaaatcagcugttttctttgtucaga

SEQ ID NO: 51115 - DNA, 21 bp, Artificial Sequence
  Synthetic
caaguatgggucaccagcaca

SEQ ID NO: 51116 - DNA, 19 bp, Artificial Sequence
  Synthetic
gatctgucacccgctguct

SEQ ID NO: 51117 - DNA, 18 bp, Artificial Sequence
  Synthetic
guggccatguggacagga

SEQ ID NO: 51118 - DNA, 20 bp, Artificial Sequence
  Synthetic
gggtuaccctgggugaagaa

SEQ ID NO: 51119 - DNA, 20 bp, Artificial Sequence
  Synthetic
ccaggtatgugcagtgctug

SEQ ID NO: 51120 - DNA, 22 bp, Artificial Sequence
  Synthetic
gcagtgtugggaaggugagaac

SEQ ID NO: 51121 - DNA, 24 bp, Artificial Sequence
  Synthetic
ggacacagacacagucagtcttut

SEQ ID NO: 51122 - DNA, 20 bp, Artificial Sequence
  Synthetic
cggaugaagcgggagaugat

SEQ ID NO: 51123 - DNA, 23 bp, Artificial Sequence
  Synthetic
cacccgcaaacugctttaacuac

SEQ ID NO: 51124 - DNA, 23 bp, Artificial Sequence
  Synthetic
gccauccacacaaagacaacugt

SEQ ID NO: 51125 - DNA, 28 bp, Artificial Sequence
  Synthetic
ggctttttgtuattacttctcttuggct

SEQ ID NO: 51126 - DNA, 22 bp, Artificial Sequence
  Synthetic
tgcaggttuaaatggcggauga

SEQ ID NO: 51127 - DNA, 24 bp, Artificial Sequence
  Synthetic
ccauttttgataggugcaggacca

SEQ ID NO: 51128 - DNA, 21 bp, Artificial Sequence
  Synthetic
cgcagautcaggctucccaat

SEQ ID NO: 51129 - DNA, 28 bp, Artificial Sequence
  Synthetic
gcttcatttttgtuttgcctttttggua

SEQ ID NO: 51130 - DNA, 22 bp, Artificial Sequence
  Synthetic
ccucaccaccattcuccaacaa

SEQ ID NO: 51131 - DNA, 27 bp, Artificial Sequence
  Synthetic
ccggtgtugggataatttaguccaaaa

SEQ ID NO: 51132 - DNA, 22 bp, Artificial Sequence
  Synthetic
ggatggctucaatgctcactug

SEQ ID NO: 51133 - DNA, 26 bp, Artificial Sequence
  Synthetic
aggacattcauggacaattcactgut

SEQ ID NO: 51134 - DNA, 22 bp, Artificial Sequence
  Synthetic
gtaagagctguatcctgcguca

SEQ ID NO: 51135 - DNA, 28 bp, Artificial Sequence
  Synthetic
gtggcacaaaugatcctuaaagaaaaca

SEQ ID NO: 51136 - DNA, 28 bp, Artificial Sequence
  Synthetic
caatgaatcaccauagtacatgggtcut

SEQ ID NO: 51137 - DNA, 26 bp, Artificial Sequence
  Synthetic
tcagatctgcugatagccatagcaua

SEQ ID NO: 51138 - DNA, 23 bp, Artificial Sequence
  Synthetic
accauccaacacacacacagaut

SEQ ID NO: 51139 - DNA, 24 bp, Artificial Sequence
  Synthetic
ggtatcgugaactcgtgatgucag

SEQ ID NO: 51140 - DNA, 21 bp, Artificial Sequence
  Synthetic
gaauctcacugacgaggcaga

SEQ ID NO: 51141 - DNA, 26 bp, Artificial Sequence
  Synthetic
tcttttacttccugcccctaatugac

SEQ ID NO: 51142 - DNA, 24 bp, Artificial Sequence
  Synthetic
aggtttttccugagggcatttgua

SEQ ID NO: 51143 - DNA, 20 bp, Artificial Sequence
  Synthetic
gtcacugccccacuagcaaa

SEQ ID NO: 51144 - DNA, 23 bp, Artificial Sequence
  Synthetic
tgctttcctucacccttagcuac

SEQ ID NO: 51145 - DNA, 25 bp, Artificial Sequence
  Synthetic
gggatgggucctaacatgtttcuat

SEQ ID NO: 51146 - DNA, 22 bp, Artificial Sequence
  Synthetic
cggaggagacacutgggatcut

SEQ ID NO: 51147 - DNA, 23 bp, Artificial Sequence
  Synthetic
tcatcccccuagtctcacaaucc

SEQ ID NO: 51148 - DNA, 24 bp, Artificial Sequence
  Synthetic
gaatgcgacacucctttgtttcuc

SEQ ID NO: 51149 - DNA, 20 bp, Artificial Sequence
  Synthetic
tcagctcacggugcttctuc

SEQ ID NO: 51150 - DNA, 21 bp, Artificial Sequence
  Synthetic
cccactgcccugagaatctut

SEQ ID NO: 51151 - DNA, 26 bp, Artificial Sequence
  Synthetic
gtgttggttugtttggaatctucaca

SEQ ID NO: 51152 - DNA, 24 bp, Artificial Sequence
  Synthetic
gagtgaaaguggaagtgactcuga

SEQ ID NO: 51153 - DNA, 23 bp, Artificial Sequence
  Synthetic
caacatcauagctgggcacugat

SEQ ID NO: 51154 - DNA, 27 bp, Artificial Sequence
  Synthetic
ctttagagaatagguctgccattguga

SEQ ID NO: 51155 - DNA, 22 bp, Artificial Sequence
  Synthetic
gatgagcuggagggagagttug

SEQ ID NO: 51156 - DNA, 27 bp, Artificial Sequence
  Synthetic
tgaatgaccutgcattaucagaacagt

SEQ ID NO: 51157 - DNA, 25 bp, Artificial Sequence
  Synthetic
gcaagccttcaauattggtgactut

SEQ ID NO: 51158 - DNA, 27 bp, Artificial Sequence
  Synthetic
ttgctcagttaugtttcacgtacucat

SEQ ID NO: 51159 - DNA, 24 bp, Artificial Sequence
  Synthetic
ttgcttcacttuagcaaccttgug

SEQ ID NO: 51160 - DNA, 26 bp, Artificial Sequence
  Synthetic
ggttgcaaagugtgaattttcccaut

SEQ ID NO: 51161 - DNA, 25 bp, Artificial Sequence
  Synthetic
ctaatgcaacaagucctgaauccct

SEQ ID NO: 51162 - DNA, 27 bp, Artificial Sequence
  Synthetic
ctaaggccaaguccttgatatctugaa

SEQ ID NO: 51163 - DNA, 24 bp, Artificial Sequence
  Synthetic
acacaggugaacuccagaaagaag

SEQ ID NO: 51164 - DNA, 23 bp, Artificial Sequence
  Synthetic
tcaaggtatucccggatgcaaug

SEQ ID NO: 51165 - DNA, 28 bp, Artificial Sequence
  Synthetic
aagacctgaagacacuatatcccttcut

SEQ ID NO: 51166 - DNA, 23 bp, Artificial Sequence
  Synthetic
ggaaatgctgucccttagtgcua

SEQ ID NO: 51167 - DNA, 25 bp, Artificial Sequence
  Synthetic
ctgaggcauaatttaccuggaggac

SEQ ID NO: 51168 - DNA, 22 bp, Artificial Sequence
  Synthetic
gggctttcauattggcagaugt

SEQ ID NO: 51169 - DNA, 29 bp, Artificial Sequence
  Synthetic
ccagtgtcagtgugtattagtttggtuag

SEQ ID NO: 51170 - DNA, 24 bp, Artificial Sequence
  Synthetic
gcgtactgugaaattcatcugcca

SEQ ID NO: 51171 - DNA, 25 bp, Artificial Sequence
  Synthetic
agtggtggguagagcttgttttuaa

SEQ ID NO: 51172 - DNA, 23 bp, Artificial Sequence
  Synthetic
accaccgtcauactgactctcut

SEQ ID NO: 51173 - DNA, 20 bp, Artificial Sequence
  Synthetic
ctgatccagucccccugaac

SEQ ID NO: 51174 - DNA, 28 bp, Artificial Sequence
  Synthetic
gtctttattcugagacccctttgatuct

SEQ ID NO: 51175 - DNA, 26 bp, Artificial Sequence
  Synthetic
ccaaagttguagggaaggtctacuct

SEQ ID NO: 51176 - DNA, 24 bp, Artificial Sequence
  Synthetic
ctatgtggacutgtcctttccuct

SEQ ID NO: 51177 - DNA, 28 bp, Artificial Sequence
  Synthetic
acaagctgtaagutttctggtaaucaca

SEQ ID NO: 51178 - DNA, 23 bp, Artificial Sequence
  Synthetic
agccaacccacacaguataccua

SEQ ID NO: 51179 - DNA, 24 bp, Artificial Sequence
  Synthetic
ctgaagcattutcgattccgugac

SEQ ID NO: 51180 - DNA, 20 bp, Artificial Sequence
  Synthetic
cctgtuggcaggtcatucct

SEQ ID NO: 51181 - DNA, 21 bp, Artificial Sequence
  Synthetic
caactgtccutcaacctucgg

SEQ ID NO: 51182 - DNA, 21 bp, Artificial Sequence
  Synthetic
cccacaaucccacacgaacuc

SEQ ID NO: 51183 - DNA, 21 bp, Artificial Sequence
  Synthetic
cagaggtuccagggcatcuac

SEQ ID NO: 51184 - DNA, 21 bp, Artificial Sequence
  Synthetic
cagggagaaggugaggaggua

SEQ ID NO: 51185 - DNA, 18 bp, Artificial Sequence
  Synthetic
ccgccgggaaagaugguc

SEQ ID NO: 51186 - DNA, 21 bp, Artificial Sequence
  Synthetic
ccctcucccagttaccgugaa

SEQ ID NO: 51187 - DNA, 25 bp, Artificial Sequence
  Synthetic
gttccttgtguctttctgtttgucc

SEQ ID NO: 51188 - DNA, 17 bp, Artificial Sequence
  Synthetic
ggagcgccugacctcuc

SEQ ID NO: 51189 - DNA, 19 bp, Artificial Sequence
  Synthetic
gtcccgaaucctcgcctut

SEQ ID NO: 51190 - DNA, 25 bp, Artificial Sequence
  Synthetic
gagggutttgcttcuaggagaacaa

SEQ ID NO: 51191 - DNA, 23 bp, Artificial Sequence
  Synthetic
gaacaccttucccctcattcuct

SEQ ID NO: 51192 - DNA, 28 bp, Artificial Sequence
  Synthetic
cgaatttcugccataaatgctttuacca

SEQ ID NO: 51193 - DNA, 29 bp, Artificial Sequence
  Synthetic
tcagagaactuagagcatttcacaucaaa

SEQ ID NO: 51194 - DNA, 26 bp, Artificial Sequence
  Synthetic
ttuaaggagcaaagaatcugcagagt

SEQ ID NO: 51195 - DNA, 29 bp, Artificial Sequence
  Synthetic
ggatgccttattuccagctctattctuat

SEQ ID NO: 51196 - DNA, 21 bp, Artificial Sequence
  Synthetic
aaccggutgtugaaaggcaaa

SEQ ID NO: 51197 - DNA, 32 bp, Artificial Sequence
  Synthetic
cacagtttaggutttgagataaataugacaga

SEQ ID NO: 51198 - DNA, 21 bp, Artificial Sequence
  Synthetic
tgttctgcccgutgtgtctua

SEQ ID NO: 51199 - DNA, 21 bp, Artificial Sequence
  Synthetic
ctcacagccugaagaauccca

SEQ ID NO: 51200 - DNA, 27 bp, Artificial Sequence
  Synthetic
gtaggaaaacgguggaatcaaguaaag

SEQ ID NO: 51201 - DNA, 22 bp, Artificial Sequence
  Synthetic
gttcaacugcaggcaaacauga

SEQ ID NO: 51202 - DNA, 23 bp, Artificial Sequence
  Synthetic
gggatctaacuctctgggcuagt

SEQ ID NO: 51203 - DNA, 23 bp, Artificial Sequence
  Synthetic
acacccttaucaccccauagagg

SEQ ID NO: 51204 - DNA, 21 bp, Artificial Sequence
  Synthetic
gtcttgtcutggtccctuggt

SEQ ID NO: 51205 - DNA, 20 bp, Artificial Sequence
  Synthetic
tgtcgaugagcacgtctucc

SEQ ID NO: 51206 - DNA, 26 bp, Artificial Sequence
  Synthetic
tcattttaggaaggagguctgtgcua

SEQ ID NO: 51207 - DNA, 19 bp, Artificial Sequence
  Synthetic
gccuactucacccggagac

SEQ ID NO: 51208 - DNA, 22 bp, Artificial Sequence
  Synthetic
acagcacacagggautgaacug

SEQ ID NO: 51209 - DNA, 24 bp, Artificial Sequence
  Synthetic
cttggactgtucagtgattgguct

SEQ ID NO: 51210 - DNA, 22 bp, Artificial Sequence
  Synthetic
cacacagtgaugctagcgguaa

SEQ ID NO: 51211 - DNA, 26 bp, Artificial Sequence
  Synthetic
aggtgtuaaaaatcatgacugagcca

SEQ ID NO: 51212 - DNA, 28 bp, Artificial Sequence
  Synthetic
gaggaggattcugaattagtggtgaaut

SEQ ID NO: 51213 - DNA, 28 bp, Artificial Sequence
  Synthetic
cgacatcttuggcttttgttagaaauct

SEQ ID NO: 51214 - DNA, 30 bp, Artificial Sequence
  Synthetic
tggttttagttcuttaagtgcatttgucaa

SEQ ID NO: 51215 - DNA, 25 bp, Artificial Sequence
  Synthetic
ggattgtcagutctgcgatcatuca

SEQ ID NO: 51216 - DNA, 20 bp, Artificial Sequence
  Synthetic
cggtcaccagggutcatcut

SEQ ID NO: 51217 - DNA, 24 bp, Artificial Sequence
  Synthetic
tgaagucagaccaggagtcuaaca

SEQ ID NO: 51218 - DNA, 26 bp, Artificial Sequence
  Synthetic
gatgatgacgutgacgatgaaguaga

SEQ ID NO: 51219 - DNA, 21 bp, Artificial Sequence
  Synthetic
acctgccugggattuccaaac

SEQ ID NO: 51220 - DNA, 22 bp, Artificial Sequence
  Synthetic
gccaccaucctgggtgattuaa

SEQ ID NO: 51221 - DNA, 24 bp, Artificial Sequence
  Synthetic
cgcccagaccutgttctctauaac

SEQ ID NO: 51222 - DNA, 25 bp, Artificial Sequence
  Synthetic
ggaacaacttgauggtgctacttug

SEQ ID NO: 51223 - DNA, 24 bp, Artificial Sequence
  Synthetic
ccccuctttgugaggagaagaaag

SEQ ID NO: 51224 - DNA, 22 bp, Artificial Sequence
  Synthetic
ccttatttucagggcccuccag

SEQ ID NO: 51225 - DNA, 28 bp, Artificial Sequence
  Synthetic
ttttcttcugggattctgacauaaagca

SEQ ID NO: 51226 - DNA, 25 bp, Artificial Sequence
  Synthetic
aactgacutctttactucagggcat

SEQ ID NO: 51227 - DNA, 22 bp, Artificial Sequence
  Synthetic
cacacucaaggauaggccaaca

SEQ ID NO: 51228 - DNA, 25 bp, Artificial Sequence
  Synthetic
ccctacaagaccacuggaactttut

SEQ ID NO: 51229 - DNA, 23 bp, Artificial Sequence
  Synthetic
gtaacttactggutccccaggut

SEQ ID NO: 51230 - DNA, 28 bp, Artificial Sequence
  Synthetic
cctcttcatagagutcctggtttucaaa

SEQ ID NO: 51231 - DNA, 28 bp, Artificial Sequence
  Synthetic
tctcaaatgcagcutttatacaggtuga

SEQ ID NO: 51232 - DNA, 23 bp, Artificial Sequence
  Synthetic
ggatctcctgguggcaaggtaua

SEQ ID NO: 51233 - DNA, 23 bp, Artificial Sequence
  Synthetic
tgggaacucacactttctccuct

SEQ ID NO: 51234 - DNA, 24 bp, Artificial Sequence
  Synthetic
gtgacaaaggugaaacaggugaac

SEQ ID NO: 51235 - DNA, 28 bp, Artificial Sequence
  Synthetic
agccttcaaatccauttctcatctctuc

SEQ ID NO: 51236 - DNA, 24 bp, Artificial Sequence
  Synthetic
gcacacaagcaaauggaatgtuct

SEQ ID NO: 51237 - DNA, 28 bp, Artificial Sequence
  Synthetic
acaaaggagagugattgattttctucct

SEQ ID NO: 51238 - DNA, 21 bp, Artificial Sequence
  Synthetic
cctgtggugctataggugggt

SEQ ID NO: 51239 - DNA, 23 bp, Artificial Sequence
  Synthetic
cctcttcccaauctggctgttut

SEQ ID NO: 51240 - DNA, 22 bp, Artificial Sequence
  Synthetic
tgtagagaaggcauctgccgua

SEQ ID NO: 51241 - DNA, 20 bp, Artificial Sequence
  Synthetic
augggcagagaccacguaag

SEQ ID NO: 51242 - DNA, 17 bp, Artificial Sequence
  Synthetic
gctccagcgccugagut

SEQ ID NO: 51243 - DNA, 24 bp, Artificial Sequence
  Synthetic
ctgcctcaaaguagaggttgtgut

SEQ ID NO: 51244 - DNA, 26 bp, Artificial Sequence
  Synthetic
tggattcacuatcttaagaccucgct

SEQ ID NO: 51245 - DNA, 23 bp, Artificial Sequence
  Synthetic
cagagacccacucccagatttug

SEQ ID NO: 51246 - DNA, 25 bp, Artificial Sequence
  Synthetic
ccatgttgaugaggcttatctggut

SEQ ID NO: 51247 - DNA, 25 bp, Artificial Sequence
  Synthetic
tcaacatgtacautgccatcaucct

SEQ ID NO: 51248 - DNA, 24 bp, Artificial Sequence
  Synthetic
ttggccaagaugttgattttcuca

SEQ ID NO: 51249 - DNA, 22 bp, Artificial Sequence
  Synthetic
gagcacttuccatttgcctcuc

SEQ ID NO: 51250 - DNA, 27 bp, Artificial Sequence
  Synthetic
gggtaggtgaaauaaatgagtgaguag

SEQ ID NO: 51251 - DNA, 23 bp, Artificial Sequence
  Synthetic
cttgcttgutatggtcatuggca

SEQ ID NO: 51252 - DNA, 21 bp, Artificial Sequence
  Synthetic
ccaggcauatccctcuagcct

SEQ ID NO: 51253 - DNA, 23 bp, Artificial Sequence
  Synthetic
tctcgtgtgugaatttccctugt

SEQ ID NO: 51254 - DNA, 23 bp, Artificial Sequence
  Synthetic
gcatgaaggcutccttgaacuct

SEQ ID NO: 51255 - DNA, 21 bp, Artificial Sequence
  Synthetic
tttuaagccgggcatcugagt

SEQ ID NO: 51256 - DNA, 23 bp, Artificial Sequence
  Synthetic
gaagctggaauggcatgagtuag

SEQ ID NO: 51257 - DNA, 21 bp, Artificial Sequence
  Synthetic
gtcagcaagaugccctttgug

SEQ ID NO: 51258 - DNA, 21 bp, Artificial Sequence
  Synthetic
caggtggcutctccaagacug

SEQ ID NO: 51259 - DNA, 27 bp, Artificial Sequence
  Synthetic
tttgaataacagtucctgcaacttgug

SEQ ID NO: 51260 - DNA, 20 bp, Artificial Sequence
  Synthetic
aggaaacggccagugcaaua

SEQ ID NO: 51261 - DNA, 21 bp, Artificial Sequence
  Synthetic
gcaucaagtacaugcggcaga

SEQ ID NO: 51262 - DNA, 20 bp, Artificial Sequence
  Synthetic
gtacagaggccccutctucc

SEQ ID NO: 51263 - DNA, 23 bp, Artificial Sequence
  Synthetic
agcagaagcugcaagatgtucat

SEQ ID NO: 51264 - DNA, 26 bp, Artificial Sequence
  Synthetic
gtttgcttttgutcttcctcatguct

SEQ ID NO: 51265 - DNA, 28 bp, Artificial Sequence
  Synthetic
gccaagaucaacaaagcugaaaaagaaa

SEQ ID NO: 51266 - DNA, 28 bp, Artificial Sequence
  Synthetic
ttggctaagtuacatgaagcttctugat

SEQ ID NO: 51267 - DNA, 29 bp, Artificial Sequence
  Synthetic
ctgtaacaggautttcacatucaacaagt

SEQ ID NO: 51268 - DNA, 23 bp, Artificial Sequence
  Synthetic
cgcatgttuccaagtggaactuc

SEQ ID NO: 51269 - DNA, 19 bp, Artificial Sequence
  Synthetic
gggagcacugcgtcuacac

SEQ ID NO: 51270 - DNA, 19 bp, Artificial Sequence
  Synthetic
cttttgcuggtgcacgugt

SEQ ID NO: 51271 - DNA, 18 bp, Artificial Sequence
  Synthetic
actuggagcccacgtgut

SEQ ID NO: 51272 - DNA, 23 bp, Artificial Sequence
  Synthetic
ccttcaggcugttcccgaauaag

SEQ ID NO: 51273 - DNA, 19 bp, Artificial Sequence
  Synthetic
cggtggacgucacgguaag

SEQ ID NO: 51274 - DNA, 18 bp, Artificial Sequence
  Synthetic
acacgcuggccattguct

SEQ ID NO: 51275 - DNA, 19 bp, Artificial Sequence
  Synthetic
cccatctucctgcacggut

SEQ ID NO: 51276 - DNA, 26 bp, Artificial Sequence
  Synthetic
ccctagaaaauggctatccugaaact

SEQ ID NO: 51277 - DNA, 29 bp, Artificial Sequence
  Synthetic
tgctgtcatcatuttaatgcttctacuca

SEQ ID NO: 51278 - DNA, 28 bp, Artificial Sequence
  Synthetic
ccagagagataguattcccagtctucat

SEQ ID NO: 51279 - DNA, 31 bp, Artificial Sequence
  Synthetic
ttctagttauaagttggaaaucaaccagaaa

SEQ ID NO: 51280 - DNA, 28 bp, Artificial Sequence
  Synthetic
agatatgcacuagttcaaagagaaugcc

SEQ ID NO: 51281 - DNA, 24 bp, Artificial Sequence
  Synthetic
ggcaccaagtuctacctcatgtut

SEQ ID NO: 51282 - DNA, 27 bp, Artificial Sequence
  Synthetic
ttgatgtcttcuctctcttacagcuct

SEQ ID NO: 51283 - DNA, 28 bp, Artificial Sequence
  Synthetic
aactgagcauacgctaggaaaataauga

SEQ ID NO: 51284 - DNA, 28 bp, Artificial Sequence
  Synthetic
tgcaaaaggagaauacacuaaaccaagt

SEQ ID NO: 51285 - DNA, 25 bp, Artificial Sequence
  Synthetic
tttcagaaccucaggaagcatgaut

SEQ ID NO: 51286 - DNA, 22 bp, Artificial Sequence
  Synthetic
gaagggttutactccccugcat

SEQ ID NO: 51287 - DNA, 25 bp, Artificial Sequence
  Synthetic
gctcucacattccttucagagaagt

SEQ ID NO: 51288 - DNA, 21 bp, Artificial Sequence
  Synthetic
gctaugcgaggaugcagacac

SEQ ID NO: 51289 - DNA, 28 bp, Artificial Sequence
  Synthetic
gatgactaagugggaggtttaucagaaa

SEQ ID NO: 51290 - DNA, 23 bp, Artificial Sequence
  Synthetic
agactcaacugggctagugaact

SEQ ID NO: 51291 - DNA, 24 bp, Artificial Sequence
  Synthetic
tgtgctgtttcugtgtactctgug

SEQ ID NO: 51292 - DNA, 26 bp, Artificial Sequence
  Synthetic
caaaaccucagggagtcatuagaagt

SEQ ID NO: 51293 - DNA, 21 bp, Artificial Sequence
  Synthetic
tutccagagagucacggcaag

SEQ ID NO: 51294 - DNA, 22 bp, Artificial Sequence
  Synthetic
cggatgcucaacttaacuccca

SEQ ID NO: 51295 - DNA, 24 bp, Artificial Sequence
  Synthetic
gacctggugagtgtggaaaaauct

SEQ ID NO: 51296 - DNA, 24 bp, Artificial Sequence
  Synthetic
gatgaaagtaguagtgcccuggaa

SEQ ID NO: 51297 - DNA, 21 bp, Artificial Sequence
  Synthetic
acatgcguagcacagggaauc

SEQ ID NO: 51298 - DNA, 20 bp, Artificial Sequence
  Synthetic
tgggcccauctcaggatgua

SEQ ID NO: 51299 - DNA, 23 bp, Artificial Sequence
  Synthetic
gtgcagtgcauaactcctctuga

SEQ ID NO: 51300 - DNA, 28 bp, Artificial Sequence
  Synthetic
tctttaaagtagaaaugcttgccucaga

SEQ ID NO: 51301 - DNA, 26 bp, Artificial Sequence
  Synthetic
tgctttttcaaaaccuccaaatggug

SEQ ID NO: 51302 - DNA, 19 bp, Artificial Sequence
  Synthetic
cgtacttugcgccguacct

SEQ ID NO: 51303 - DNA, 25 bp, Artificial Sequence
  Synthetic
tctccagtaguaaagacaccaccuc

SEQ ID NO: 51304 - DNA, 20 bp, Artificial Sequence
  Synthetic
gccuacggagctaacaucct

SEQ ID NO: 51305 - DNA, 22 bp, Artificial Sequence
  Synthetic
ggtgccatauctgcagtagguc

SEQ ID NO: 51306 - DNA, 21 bp, Artificial Sequence
  Synthetic
gcttcguccctgugcaaaaga

SEQ ID NO: 51307 - DNA, 22 bp, Artificial Sequence
  Synthetic
gcaccaucatcaugagcgaaaa

SEQ ID NO: 51308 - DNA, 24 bp, Artificial Sequence
  Synthetic
gctagaaaaucacacagaggccua

SEQ ID NO: 51309 - DNA, 22 bp, Artificial Sequence
  Synthetic
agatccuggtgtccugacagaa

SEQ ID NO: 51310 - DNA, 28 bp, Artificial Sequence
  Synthetic
ggtaggaagcautttaatcttggtcauc

SEQ ID NO: 51311 - DNA, 27 bp, Artificial Sequence
  Synthetic
gcaaaccctaugctataatgctttuca

SEQ ID NO: 51312 - DNA, 22 bp, Artificial Sequence
  Synthetic
cctctgccutctgattggguaa

SEQ ID NO: 51313 - DNA, 26 bp, Artificial Sequence
  Synthetic
tcataatattucagggcattguggca

SEQ ID NO: 51314 - DNA, 21 bp, Artificial Sequence
  Synthetic
ctgtgcccuccatcaucaagt

SEQ ID NO: 51315 - DNA, 28 bp, Artificial Sequence
  Synthetic
gagaacagcaguttccatgtaacattut

SEQ ID NO: 51316 - DNA, 28 bp, Artificial Sequence
  Synthetic
cttttgaatuccaacactttacctguca

SEQ ID NO: 51317 - DNA, 22 bp, Artificial Sequence
  Synthetic
ggagtuccttcactuccagcag

SEQ ID NO: 51318 - DNA, 27 bp, Artificial Sequence
  Synthetic
gcagaagaaaaugaaatuaggcaagga

SEQ ID NO: 51319 - DNA, 26 bp, Artificial Sequence
  Synthetic
acaccagaaatcauatcctcttgcug

SEQ ID NO: 51320 - DNA, 22 bp, Artificial Sequence
  Synthetic
acaaccccagacutctgtggua

SEQ ID NO: 51321 - DNA, 28 bp, Artificial Sequence
  Synthetic
gcccagatgaugaagtggtaataaugag

SEQ ID NO: 51322 - DNA, 29 bp, Artificial Sequence
  Synthetic
ctaaatgttctacccauaagcagagagua

SEQ ID NO: 51323 - DNA, 27 bp, Artificial Sequence
  Synthetic
ctggtcttatuattgagtgagcuaggt

SEQ ID NO: 51324 - DNA, 25 bp, Artificial Sequence
  Synthetic
gcttagtgtgcuaattttggctuct

SEQ ID NO: 51325 - DNA, 27 bp, Artificial Sequence
  Synthetic
tgttcgcatagcugtttcataagagut

SEQ ID NO: 51326 - DNA, 24 bp, Artificial Sequence
  Synthetic
aaaataagaccccagcucatggut

SEQ ID NO: 51327 - DNA, 28 bp, Artificial Sequence
  Synthetic
cgcatgugaactctaaattuaaagcact

SEQ ID NO: 51328 - DNA, 25 bp, Artificial Sequence
  Synthetic
cagtgctttcuggatttaagcugaa

SEQ ID NO: 51329 - DNA, 18 bp, Artificial Sequence
  Synthetic
gggtcugtgcccauagca

SEQ ID NO: 51330 - DNA, 25 bp, Artificial Sequence
  Synthetic
aaaacagacgugactatgctctugt

SEQ ID NO: 51331 - DNA, 29 bp, Artificial Sequence
  Synthetic
cctgcacttugacagatggattaagaaua

SEQ ID NO: 51332 - DNA, 23 bp, Artificial Sequence
  Synthetic
tggctgcagcutcatatgaucag

SEQ ID NO: 51333 - DNA, 28 bp, Artificial Sequence
  Synthetic
cctcaagttuacaagagggaatacugaa

SEQ ID NO: 51334 - DNA, 28 bp, Artificial Sequence
  Synthetic
ctgtttcttacuaggaatcaacccucaa

SEQ ID NO: 51335 - DNA, 22 bp, Artificial Sequence
  Synthetic
ccgguaagtaagagugccaacc

SEQ ID NO: 51336 - DNA, 21 bp, Artificial Sequence
  Synthetic
cagauagcccuggacaaacca

SEQ ID NO: 51337 - DNA, 26 bp, Artificial Sequence
  Synthetic
ctttccguggcaaaatgtaauaaagt

SEQ ID NO: 51338 - DNA, 28 bp, Artificial Sequence
  Synthetic
ctcaagaaacagtuctctcagttctcut

SEQ ID NO: 51339 - DNA, 25 bp, Artificial Sequence
  Synthetic
ccacccatattuctgggactatgut

SEQ ID NO: 51340 - DNA, 21 bp, Artificial Sequence
  Synthetic
gtggaacguaccccatucagt

SEQ ID NO: 51341 - DNA, 23 bp, Artificial Sequence
  Synthetic
actttgggtuccactggattcug

SEQ ID NO: 51342 - DNA, 23 bp, Artificial Sequence
  Synthetic
caaggtgatuaaaccccctcuga

SEQ ID NO: 51343 - DNA, 20 bp, Artificial Sequence
  Synthetic
ctcccaccacugcauaaggg

SEQ ID NO: 51344 - DNA, 26 bp, Artificial Sequence
  Synthetic
agcttctgattucatctccctttucc

SEQ ID NO: 51345 - DNA, 23 bp, Artificial Sequence
  Synthetic
ctttgaccccutgggaacaucat

SEQ ID NO: 51346 - DNA, 26 bp, Artificial Sequence
  Synthetic
ggatatatctgauacgcaggcctcua

SEQ ID NO: 51347 - DNA, 26 bp, Artificial Sequence
  Synthetic
ggguttattcttctcucgagaacact

SEQ ID NO: 51348 - DNA, 25 bp, Artificial Sequence
  Synthetic
cttcatccaaatugcgagatgctut

SEQ ID NO: 51349 - DNA, 24 bp, Artificial Sequence
  Synthetic
cagtacagcaucaagagucacact

SEQ ID NO: 51350 - DNA, 23 bp, Artificial Sequence
  Synthetic
cctgctgctuttcatcgtgaaug

SEQ ID NO: 51351 - DNA, 28 bp, Artificial Sequence
  Synthetic
agaggatgguaaaagagatgagtgcuat

SEQ ID NO: 51352 - DNA, 24 bp, Artificial Sequence
  Synthetic
tccacccagagautttgaagugac

SEQ ID NO: 51353 - DNA, 27 bp, Artificial Sequence
  Synthetic
agagccagctautccatttctcttcua

SEQ ID NO: 51354 - DNA, 20 bp, Artificial Sequence
  Synthetic
cacagtctugctggtcugct

SEQ ID NO: 51355 - DNA, 25 bp, Artificial Sequence
  Synthetic
gcagcttgttugttcatgtgacaut

SEQ ID NO: 51356 - DNA, 21 bp, Artificial Sequence
  Synthetic
ggcgccuctctttgtcttugt

SEQ ID NO: 51357 - DNA, 28 bp, Artificial Sequence
  Synthetic
cgatcctucggtagatatttugaagact

SEQ ID NO: 51358 - DNA, 21 bp, Artificial Sequence
  Synthetic
gctttcaugcaggctcaccua

SEQ ID NO: 51359 - DNA, 25 bp, Artificial Sequence
  Synthetic
atcaatgcacutggtgatcugaaga

SEQ ID NO: 51360 - DNA, 20 bp, Artificial Sequence
  Synthetic
aggcgtaagcuggaggatuc

SEQ ID NO: 51361 - DNA, 22 bp, Artificial Sequence
  Synthetic
tcatagagcugcattgctguca

SEQ ID NO: 51362 - DNA, 23 bp, Artificial Sequence
  Synthetic
cccttttuaacagagccgttcut

SEQ ID NO: 51363 - DNA, 25 bp, Artificial Sequence
  Synthetic
atttgttccctuccttcttcctcuc

SEQ ID NO: 51364 - DNA, 23 bp, Artificial Sequence
  Synthetic
ctguaccaggaaggagucaaagg

SEQ ID NO: 51365 - DNA, 21 bp, Artificial Sequence
  Synthetic
ggccgcuaagaaatgcucact

SEQ ID NO: 51366 - DNA, 18 bp, Artificial Sequence
  Synthetic
ccugcucaggaggagcca

SEQ ID NO: 51367 - DNA, 17 bp, Artificial Sequence
  Synthetic
gtgggccccauctcugt

SEQ ID NO: 51368 - DNA, 21 bp, Artificial Sequence
  Synthetic
atccctguccttgtacugcac

SEQ ID NO: 51369 - DNA, 25 bp, Artificial Sequence
  Synthetic
agccctttaugcctctatctctuct

SEQ ID NO: 51370 - DNA, 22 bp, Artificial Sequence
  Synthetic
actgtcaauaccccatccccut

SEQ ID NO: 51371 - DNA, 26 bp, Artificial Sequence
  Synthetic
tgaccctgacucttattctccatcug

SEQ ID NO: 51372 - DNA, 25 bp, Artificial Sequence
  Synthetic
gggattgtgcuaacagaaaagauga

SEQ ID NO: 51373 - DNA, 22 bp, Artificial Sequence
  Synthetic
cgaatgaucgaatggtgagugg

SEQ ID NO: 51374 - DNA, 25 bp, Artificial Sequence
  Synthetic
tctataagccucgacagccagaaua

SEQ ID NO: 51375 - DNA, 27 bp, Artificial Sequence
  Synthetic
ggaaaaacagaagucacattcttgcut

SEQ ID NO: 51376 - DNA, 22 bp, Artificial Sequence
  Synthetic
ccaaactgugaagctcuggaac

SEQ ID NO: 51377 - DNA, 28 bp, Artificial Sequence
  Synthetic
agattccatctaccutcattctcccuaa

SEQ ID NO: 51378 - DNA, 26 bp, Artificial Sequence
  Synthetic
atcttcttccaugtcaactuagccaa

SEQ ID NO: 51379 - DNA, 22 bp, Artificial Sequence
  Synthetic
cctagacacagugctggcttua

SEQ ID NO: 51380 - DNA, 25 bp, Artificial Sequence
  Synthetic
tcctcaugagaaccaatctugcaat

SEQ ID NO: 51381 - DNA, 29 bp, Artificial Sequence
  Synthetic
tggtcattcttaccucagtttgtctttuc

SEQ ID NO: 51382 - DNA, 26 bp, Artificial Sequence
  Synthetic
gtctgtatttgugtccagagaacuca

SEQ ID NO: 51383 - DNA, 23 bp, Artificial Sequence
  Synthetic
agttccgtucaacttcgcuacaa

SEQ ID NO: 51384 - DNA, 24 bp, Artificial Sequence
  Synthetic
aaacaaacagccugccaatctuac

SEQ ID NO: 51385 - DNA, 25 bp, Artificial Sequence
  Synthetic
tcccagagttcuctttctctcctuc

SEQ ID NO: 51386 - DNA, 25 bp, Artificial Sequence
  Synthetic
tggccttccutccacaagaaauaaa

SEQ ID NO: 51387 - DNA, 28 bp, Artificial Sequence
  Synthetic
ccaacccccuaaatcattagtcttugat

SEQ ID NO: 51388 - DNA, 25 bp, Artificial Sequence
  Synthetic
ctgatatugcacactaggcugaagt

SEQ ID NO: 51389 - DNA, 21 bp, Artificial Sequence
  Synthetic
acaggctcagugcctgattut

SEQ ID NO: 51390 - DNA, 28 bp, Artificial Sequence
  Synthetic
gttgcacatgttuggcttaattctctua

SEQ ID NO: 51391 - DNA, 19 bp, Artificial Sequence
  Synthetic
gattgcucagccccucgat

SEQ ID NO: 51392 - DNA, 23 bp, Artificial Sequence
  Synthetic
cacctguttgtcagauccacaca

SEQ ID NO: 51393 - DNA, 28 bp, Artificial Sequence
  Synthetic
aaacttgccaugctacaattagtugaag

SEQ ID NO: 51394 - DNA, 20 bp, Artificial Sequence
  Synthetic
cccctgtuggccctgttauc

SEQ ID NO: 51395 - DNA, 28 bp, Artificial Sequence
  Synthetic
agcatgagttattutggatgttgcatut

SEQ ID NO: 51396 - DNA, 24 bp, Artificial Sequence
  Synthetic
aggacaccaagutcatgtaaugct

SEQ ID NO: 51397 - DNA, 29 bp, Artificial Sequence
  Synthetic
gtttgctagaauaacatttggtgtgctut

SEQ ID NO: 51398 - DNA, 28 bp, Artificial Sequence
  Synthetic
accataccagaugtcatcaacttattuc

SEQ ID NO: 51399 - DNA, 18 bp, Artificial Sequence
  Synthetic
ggagaaccuggtgugcct

SEQ ID NO: 51400 - DNA, 28 bp, Artificial Sequence
  Synthetic
acctagttggaaucctgaagtctacaut

SEQ ID NO: 51401 - DNA, 29 bp, Artificial Sequence
  Synthetic
ttcccattctauagggtttgatctgauct

SEQ ID NO: 51402 - DNA, 26 bp, Artificial Sequence
  Synthetic
gggttccagagautcagaatauaccc

SEQ ID NO: 51403 - DNA, 28 bp, Artificial Sequence
  Synthetic
gcttaactaaucacagaaatggcttugt

SEQ ID NO: 51404 - DNA, 26 bp, Artificial Sequence
  Synthetic
ctctcgaccacutaaaactucagact

SEQ ID NO: 51405 - DNA, 25 bp, Artificial Sequence
  Synthetic
agaggttguagcagaactucagaga

SEQ ID NO: 51406 - DNA, 27 bp, Artificial Sequence
  Synthetic
tgatgccagaugaagaaactccatuag

SEQ ID NO: 51407 - DNA, 28 bp, Artificial Sequence
  Synthetic
caatcacttaccuttcaagagacucaga

SEQ ID NO: 51408 - DNA, 27 bp, Artificial Sequence
  Synthetic
acaaaactuagagctgaattcaucgct

SEQ ID NO: 51409 - DNA, 26 bp, Artificial Sequence
  Synthetic
acattagcagcaaaguctttcactug

SEQ ID NO: 51410 - DNA, 24 bp, Artificial Sequence
  Synthetic
agacatgaaguctcacctcuccat

SEQ ID NO: 51411 - DNA, 21 bp, Artificial Sequence
  Synthetic
tgcctgcttugcctgatcaut

SEQ ID NO: 51412 - DNA, 21 bp, Artificial Sequence
  Synthetic
ccauagtggccuacgaggaaa

SEQ ID NO: 51413 - DNA, 28 bp, Artificial Sequence
  Synthetic
agcaagcttacaucttgaagttccttua

SEQ ID NO: 51414 - DNA, 27 bp, Artificial Sequence
  Synthetic
gttgaagtgaagggucttattagcugt

SEQ ID NO: 51415 - DNA, 28 bp, Artificial Sequence
  Synthetic
ccttcagcaacuaacaagattucacaga

SEQ ID NO: 51416 - DNA, 21 bp, Artificial Sequence
  Synthetic
caacgccgcaucagcatttua

SEQ ID NO: 51417 - DNA, 28 bp, Artificial Sequence
  Synthetic
ggaagatcttucaagaaatgtgttggut

SEQ ID NO: 51418 - DNA, 27 bp, Artificial Sequence
  Synthetic
gtcaatccattaagucctttgaagcuc

SEQ ID NO: 51419 - DNA, 26 bp, Artificial Sequence
  Synthetic
aatgtgatctutctacctgcugacaa

SEQ ID NO: 51420 - DNA, 26 bp, Artificial Sequence
  Synthetic
cctgtgtauagaaccaaacugagagg

SEQ ID NO: 51421 - DNA, 27 bp, Artificial Sequence
  Synthetic
agttagaauaatgtgcaugggaacagt

SEQ ID NO: 51422 - DNA, 25 bp, Artificial Sequence
  Synthetic
gggctatuaggatacatuccacagt

SEQ ID NO: 51423 - DNA, 28 bp, Artificial Sequence
  Synthetic
aacacacattttcutcacaggttcaauc

SEQ ID NO: 51424 - DNA, 20 bp, Artificial Sequence
  Synthetic
gtctgcagguacgatggcua

SEQ ID NO: 51425 - DNA, 20 bp, Artificial Sequence
  Synthetic
gcatggagagggcuctgtuc

SEQ ID NO: 51426 - DNA, 20 bp, Artificial Sequence
  Synthetic
agcacaagacaguccgacuc

SEQ ID NO: 51427 - DNA, 28 bp, Artificial Sequence
  Synthetic
gaguagcaaaucaaaagccacagaaaat

SEQ ID NO: 51428 - DNA, 27 bp, Artificial Sequence
  Synthetic
tgcagatugataagggtauggagagaa

SEQ ID NO: 51429 - DNA, 28 bp, Artificial Sequence
  Synthetic
tctctttgtctuctgcatttactucaca

SEQ ID NO: 51430 - DNA, 28 bp, Artificial Sequence
  Synthetic
gtgtcaatgaguatagcatttgcucaac

SEQ ID NO: 51431 - DNA, 28 bp, Artificial Sequence
  Synthetic
agtctgaaaaccaauttgatcctgugat

SEQ ID NO: 51432 - DNA, 29 bp, Artificial Sequence
  Synthetic
ccatgatttccaguttagtttgatgtugt

SEQ ID NO: 51433 - DNA, 22 bp, Artificial Sequence
  Synthetic
cagcaaaaccacuccucacaag

SEQ ID NO: 51434 - DNA, 23 bp, Artificial Sequence
  Synthetic
ggactgcautaccaactctuggg

SEQ ID NO: 51435 - DNA, 23 bp, Artificial Sequence
  Synthetic
ttcatactgcugagctccactug

SEQ ID NO: 51436 - DNA, 23 bp, Artificial Sequence
  Synthetic
aaggacagcgacuacaaggaauc

SEQ ID NO: 51437 - DNA, 28 bp, Artificial Sequence
  Synthetic
gctgcagtgcuttccttaaaaatatcua

SEQ ID NO: 51438 - DNA, 27 bp, Artificial Sequence
  Synthetic
ctagagagcagggugaatgttttctua

SEQ ID NO: 51439 - DNA, 25 bp, Artificial Sequence
  Synthetic
agcagcagguatttcttctgguaaa

SEQ ID NO: 51440 - DNA, 28 bp, Artificial Sequence
  Synthetic
ggcaattgtgaaauttgacatttgtuct

SEQ ID NO: 51441 - DNA, 28 bp, Artificial Sequence
  Synthetic
tgctattttgacutcaccttgatucagt

SEQ ID NO: 51442 - DNA, 24 bp, Artificial Sequence
  Synthetic
gggacagacaucttcagaaugaca

SEQ ID NO: 51443 - DNA, 20 bp, Artificial Sequence
  Synthetic
agcaccaccgauguccaaag

SEQ ID NO: 51444 - DNA, 26 bp, Artificial Sequence
  Synthetic
ttcgtgtgcuttttgttctttuggat

SEQ ID NO: 51445 - DNA, 21 bp, Artificial Sequence
  Synthetic
gagaacaagcucacaggugga

SEQ ID NO: 51446 - DNA, 28 bp, Artificial Sequence
  Synthetic
ggtgacttgttuactggaaacttttgut

SEQ ID NO: 51447 - DNA, 21 bp, Artificial Sequence
  Synthetic
ctttgugagccagcatuggac

SEQ ID NO: 51448 - DNA, 27 bp, Artificial Sequence
  Synthetic
ggtcccacuttttattctttugcagag

SEQ ID NO: 51449 - DNA, 27 bp, Artificial Sequence
  Synthetic
cacctattcaccagauttcgtagtcut

SEQ ID NO: 51450 - DNA, 22 bp, Artificial Sequence
  Synthetic
tcaaagaauggcaccagtguga

SEQ ID NO: 51451 - DNA, 29 bp, Artificial Sequence
  Synthetic
tgtccataguccttttaagcttguaacaa

SEQ ID NO: 51452 - DNA, 23 bp, Artificial Sequence
  Synthetic
atccagatcgauggtgtgtctug

SEQ ID NO: 51453 - DNA, 28 bp, Artificial Sequence
  Synthetic
cctatgagaaaacugcacuggagaaaaa

SEQ ID NO: 51454 - DNA, 22 bp, Artificial Sequence
  Synthetic
agcucaaaacacaccacaggut

SEQ ID NO: 51455 - DNA, 22 bp, Artificial Sequence
  Synthetic
caatgatgacaugtgccctcuc

SEQ ID NO: 51456 - DNA, 19 bp, Artificial Sequence
  Synthetic
gtccagugagtgcugcaga

SEQ ID NO: 51457 - DNA, 23 bp, Artificial Sequence
  Synthetic
cccagctcauttcactgtcucaa

SEQ ID NO: 51458 - DNA, 24 bp, Artificial Sequence
  Synthetic
acggtggacuaaaggaaactucag

SEQ ID NO: 51459 - DNA, 24 bp, Artificial Sequence
  Synthetic
gtgctgtttccuctttaccatgug

SEQ ID NO: 51460 - DNA, 22 bp, Artificial Sequence
  Synthetic
gcccaaggagagautggttcug

SEQ ID NO: 51461 - DNA, 26 bp, Artificial Sequence
  Synthetic
ttgattacagggaagugggaatgtut

SEQ ID NO: 51462 - DNA, 20 bp, Artificial Sequence
  Synthetic
gggcuaacccaccatgctut

SEQ ID NO: 51463 - DNA, 22 bp, Artificial Sequence
  Synthetic
gctctggagucgacttctucct

SEQ ID NO: 51464 - DNA, 21 bp, Artificial Sequence
  Synthetic
ggctcttcugaggttgcctua

SEQ ID NO: 51465 - DNA, 18 bp, Artificial Sequence
  Synthetic
caagcaccugctcagugg

SEQ ID NO: 51466 - DNA, 28 bp, Artificial Sequence
  Synthetic
tgaagtcaaataaugaagtcccaaguga

SEQ ID NO: 51467 - DNA, 26 bp, Artificial Sequence
  Synthetic
ggctttttguacttgtttgtccucaa

SEQ ID NO: 51468 - DNA, 29 bp, Artificial Sequence
  Synthetic
gggatgaaauagaaagtcaaugaggagaa

SEQ ID NO: 51469 - DNA, 21 bp, Artificial Sequence
  Synthetic
acctgagtcucctgctctugt

SEQ ID NO: 51470 - DNA, 21 bp, Artificial Sequence
  Synthetic
ggcaacctuccaccttcctut

SEQ ID NO: 51471 - DNA, 26 bp, Artificial Sequence
  Synthetic
accatgttuaaggatctcaatugcca

SEQ ID NO: 51472 - DNA, 21 bp, Artificial Sequence
  Synthetic
caggcagggagcaaugtuagt

SEQ ID NO: 51473 - DNA, 21 bp, Artificial Sequence
  Synthetic
cuatgcttgcguaaccagcag

SEQ ID NO: 51474 - DNA, 21 bp, Artificial Sequence
  Synthetic
ccatugtccacaauccccaac

SEQ ID NO: 51475 - DNA, 21 bp, Artificial Sequence
  Synthetic
gaccutcccaagucaccaaga

SEQ ID NO: 51476 - DNA, 26 bp, Artificial Sequence
  Synthetic
aacaaaagctgcuttacattctgcut

SEQ ID NO: 51477 - DNA, 27 bp, Artificial Sequence
  Synthetic
agataggtgtucgaatgggacttctua

SEQ ID NO: 51478 - DNA, 26 bp, Artificial Sequence
  Synthetic
ccagatgauggtaggtacattuagca

SEQ ID NO: 51479 - DNA, 20 bp, Artificial Sequence
  Synthetic
cggatctuccgtagcagcuc

SEQ ID NO: 51480 - DNA, 27 bp, Artificial Sequence
  Synthetic
aaaacaaatgagacaagaugcaccauc

SEQ ID NO: 51481 - DNA, 27 bp, Artificial Sequence
  Synthetic
agttcaagcacugtcacattaggtuac

SEQ ID NO: 51482 - DNA, 26 bp, Artificial Sequence
  Synthetic
gtaagagacaugtccagattccucac

SEQ ID NO: 51483 - DNA, 24 bp, Artificial Sequence
  Synthetic
gattgcttgtutggcttgtgtuct

SEQ ID NO: 51484 - DNA, 27 bp, Artificial Sequence
  Synthetic
tccctttugcacacatgataatuacca

SEQ ID NO: 51485 - DNA, 29 bp, Artificial Sequence
  Synthetic
tgttcattccaggacuattagacagugat

SEQ ID NO: 51486 - DNA, 26 bp, Artificial Sequence
  Synthetic
catccacaguagcaataaggguaagt

SEQ ID NO: 51487 - DNA, 24 bp, Artificial Sequence
  Synthetic
gctcagcgtgucacagtactatuc

SEQ ID NO: 51488 - DNA, 25 bp, Artificial Sequence
  Synthetic
gagtaatauaaacggccacccctut

SEQ ID NO: 51489 - DNA, 25 bp, Artificial Sequence
  Synthetic
gcaagcagataugctactgtcagug

SEQ ID NO: 51490 - DNA, 28 bp, Artificial Sequence
  Synthetic
gagtagctcatutctgtgtatcguaagg

SEQ ID NO: 51491 - DNA, 26 bp, Artificial Sequence
  Synthetic
gctgtgattauctgtgctaacuggat

SEQ ID NO: 51492 - DNA, 22 bp, Artificial Sequence
  Synthetic
tggtcaaaggcugccatgtuaa

SEQ ID NO: 51493 - DNA, 23 bp, Artificial Sequence
  Synthetic
gtccccuggttaaaacgugaact

SEQ ID NO: 51494 - DNA, 27 bp, Artificial Sequence
  Synthetic
acaaacccaaautcctaatccugaagt

SEQ ID NO: 51495 - DNA, 23 bp, Artificial Sequence
  Synthetic
aagaacatcucaggaagcacugg

SEQ ID NO: 51496 - DNA, 21 bp, Artificial Sequence
  Synthetic
gcaugaaagcagcgtcatuca

SEQ ID NO: 51497 - DNA, 19 bp, Artificial Sequence
  Synthetic
cgtcacuggtcgcgauaca

SEQ ID NO: 51498 - DNA, 24 bp, Artificial Sequence
  Synthetic
gtggccauttacaaccucaagaag

SEQ ID NO: 51499 - DNA, 21 bp, Artificial Sequence
  Synthetic
tgacctgauggtaccugccat

SEQ ID NO: 51500 - DNA, 19 bp, Artificial Sequence
  Synthetic
accacacuccggctccuat

SEQ ID NO: 51501 - DNA, 22 bp, Artificial Sequence
  Synthetic
cctagccccaggaucctactug

SEQ ID NO: 51502 - DNA, 20 bp, Artificial Sequence
  Synthetic
ggccatcugcattgggauct

SEQ ID NO: 51503 - DNA, 21 bp, Artificial Sequence
  Synthetic
ccagugagcaatgugagcaac

SEQ ID NO: 51504 - DNA, 28 bp, Artificial Sequence
  Synthetic
aaacacagtaaauaggaggagactcuct

SEQ ID NO: 51505 - DNA, 28 bp, Artificial Sequence
  Synthetic
ccagtgacuagaagttttccttccuaaa

SEQ ID NO: 51506 - DNA, 30 bp, Artificial Sequence
  Synthetic
attcacagaauctatctgtttaaugaaggt

SEQ ID NO: 51507 - DNA, 27 bp, Artificial Sequence
  Synthetic
gaatgcaugagaaagctgagaaucaat

SEQ ID NO: 51508 - DNA, 20 bp, Artificial Sequence
  Synthetic
gaccaccccaugaucgacat

SEQ ID NO: 51509 - DNA, 21 bp, Artificial Sequence
  Synthetic
cugaccaacagagacggugac

SEQ ID NO: 51510 - DNA, 21 bp, Artificial Sequence
  Synthetic
ggttcagggugcatagaugct

SEQ ID NO: 51511 - DNA, 21 bp, Artificial Sequence
  Synthetic
catcgtcaugcctgtgtcuca

SEQ ID NO: 51512 - DNA, 24 bp, Artificial Sequence
  Synthetic
cgggcaaauacaagcatagacuct

SEQ ID NO: 51513 - DNA, 20 bp, Artificial Sequence
  Synthetic
ccctacctuccaggcatugg

SEQ ID NO: 51514 - DNA, 20 bp, Artificial Sequence
  Synthetic
aggccggagaaguaacccut

SEQ ID NO: 51515 - DNA, 25 bp, Artificial Sequence
  Synthetic
gguttaaagugacaaccgcaaagac

SEQ ID NO: 51516 - DNA, 22 bp, Artificial Sequence
  Synthetic
ggucccaggguagagaacaaca

SEQ ID NO: 51517 - DNA, 21 bp, Artificial Sequence
  Synthetic
ctcttccugaactgctccuca

SEQ ID NO: 51518 - DNA, 21 bp, Artificial Sequence
  Synthetic
ggactcgcuggacatgatuga

SEQ ID NO: 51519 - DNA, 20 bp, Artificial Sequence
  Synthetic
cgcttgccuactcactcuct

SEQ ID NO: 51520 - DNA, 23 bp, Artificial Sequence
  Synthetic
accatgtgccautcatcctucat

SEQ ID NO: 51521 - DNA, 20 bp, Artificial Sequence
  Synthetic
gcagccucactggtttccug

SEQ ID NO: 51522 - DNA, 26 bp, Artificial Sequence
  Synthetic
ctcttcagggauatcttgagctucag

SEQ ID NO: 51523 - DNA, 27 bp, Artificial Sequence
  Synthetic
aauccacagagucagaaggagaaaaag

SEQ ID NO: 51524 - DNA, 23 bp, Artificial Sequence
  Synthetic
gctccaagttucaggcttttgut

SEQ ID NO: 51525 - DNA, 29 bp, Artificial Sequence
  Synthetic
ggtgtatctgaagaugcaagaatgttuac

SEQ ID NO: 51526 - DNA, 23 bp, Artificial Sequence
  Synthetic
aaaaaggtgaagcuctgggtcut

SEQ ID NO: 51527 - DNA, 28 bp, Artificial Sequence
  Synthetic
ccacgatataggucaccatctttugaat

SEQ ID NO: 51528 - DNA, 28 bp, Artificial Sequence
  Synthetic
attagcttggautatgacaaaguagcga

SEQ ID NO: 51529 - DNA, 28 bp, Artificial Sequence
  Synthetic
catgtcatctcuaacttccaagaggaut

SEQ ID NO: 51530 - DNA, 22 bp, Artificial Sequence
  Synthetic
aaatcctggcucgctcuaaagg

SEQ ID NO: 51531 - DNA, 26 bp, Artificial Sequence
  Synthetic
tcagatcagcuttgagtgaacttuga

SEQ ID NO: 51532 - DNA, 18 bp, Artificial Sequence
  Synthetic
gagcaggugccagacugt

SEQ ID NO: 51533 - DNA, 18 bp, Artificial Sequence
  Synthetic
caugcggaaggccatguc

SEQ ID NO: 51534 - DNA, 25 bp, Artificial Sequence
  Synthetic
caggtctttcucctcatacttugga

SEQ ID NO: 51535 - DNA, 24 bp, Artificial Sequence
  Synthetic
gttgttgucattgatguccacgat

SEQ ID NO: 51536 - DNA, 21 bp, Artificial Sequence
  Synthetic
gtatguggccttcctuggaca

SEQ ID NO: 51537 - DNA, 20 bp, Artificial Sequence
  Synthetic
ccaccacggucagacugaac

SEQ ID NO: 51538 - DNA, 21 bp, Artificial Sequence
  Synthetic
ggctgtccutctgggtguaac

SEQ ID NO: 51539 - DNA, 20 bp, Artificial Sequence
  Synthetic
ccctcctgcuctgcctctua

SEQ ID NO: 51540 - DNA, 19 bp, Artificial Sequence
  Synthetic
ggaggccuaacgtgctguc

SEQ ID NO: 51541 - DNA, 19 bp, Artificial Sequence
  Synthetic
agccctucacgcacatgua

SEQ ID NO: 51542 - DNA, 18 bp, Artificial Sequence
  Synthetic
agcagauggccacugcaa

SEQ ID NO: 51543 - DNA, 24 bp, Artificial Sequence
  Synthetic
tgttttgtgttucttgctctgcuc

SEQ ID NO: 51544 - DNA, 22 bp, Artificial Sequence
  Synthetic
ggagtgtguggcagagaucaaa

SEQ ID NO: 51545 - DNA, 20 bp, Artificial Sequence
  Synthetic
ctggactgcugtggtctguc

SEQ ID NO: 51546 - DNA, 23 bp, Artificial Sequence
  Synthetic
attcttcccauccaccaaaugct

SEQ ID NO: 51547 - DNA, 22 bp, Artificial Sequence
  Synthetic
agatccatgcaugctccatucc

SEQ ID NO: 51548 - DNA, 17 bp, Artificial Sequence
  Synthetic
gcacgucggagcccaut

SEQ ID NO: 51549 - DNA, 17 bp, Artificial Sequence
  Synthetic
cggctuccacgtgtguc

SEQ ID NO: 51550 - DNA, 21 bp, Artificial Sequence
  Synthetic
ggctcaccauggtcttctugt

SEQ ID NO: 51551 - DNA, 20 bp, Artificial Sequence
  Synthetic
tgacccaacugggtctguct

SEQ ID NO: 51552 - DNA, 19 bp, Artificial Sequence
  Synthetic
ccccagucgagacccugaa

SEQ ID NO: 51553 - DNA, 21 bp, Artificial Sequence
  Synthetic
ccccatctcuccacccttuga

SEQ ID NO: 51554 - DNA, 22 bp, Artificial Sequence
  Synthetic
ggtttccgauctcggtcaugat

SEQ ID NO: 51555 - DNA, 20 bp, Artificial Sequence
  Synthetic
tctgctucgctgacauccac

SEQ ID NO: 51556 - DNA, 21 bp, Artificial Sequence
  Synthetic
gtccacccacaugacuccaaa

SEQ ID NO: 51557 - DNA, 23 bp, Artificial Sequence
  Synthetic
tcttgttggtauactggcggaug

SEQ ID NO: 51558 - DNA, 27 bp, Artificial Sequence
  Synthetic
ttttacagacagugatgtgtgttcuga

SEQ ID NO: 51559 - DNA, 27 bp, Artificial Sequence
  Synthetic
ggcgcttaaatutctcaacttcttuct

SEQ ID NO: 51560 - DNA, 33 bp, Artificial Sequence
  Synthetic
tatttttagagtactauggaaatgatggtgaut

SEQ ID NO: 51561 - DNA, 25 bp, Artificial Sequence
  Synthetic
ggagacagcucacagttagguaaac

SEQ ID NO: 51562 - DNA, 27 bp, Artificial Sequence
  Synthetic
tgagcaaauacaagctgaaaacttugg

SEQ ID NO: 51563 - DNA, 27 bp, Artificial Sequence
  Synthetic
tgtaagtcagacauaatgcatgcugaa

SEQ ID NO: 51564 - DNA, 25 bp, Artificial Sequence
  Synthetic
gcttaattattcugaagggccguga

SEQ ID NO: 51565 - DNA, 28 bp, Artificial Sequence
  Synthetic
cccaaccaaauggcatcttttatatgut

SEQ ID NO: 51566 - DNA, 19 bp, Artificial Sequence
  Synthetic
ccuccagcgacagggtuac

SEQ ID NO: 51567 - DNA, 21 bp, Artificial Sequence
  Synthetic
gcggtgcugattggaguagac

SEQ ID NO: 51568 - DNA, 21 bp, Artificial Sequence
  Synthetic
ggaaaggaacagugacugcct

SEQ ID NO: 51569 - DNA, 25 bp, Artificial Sequence
  Synthetic
tccaaaaggauccgtcactcttcua

SEQ ID NO: 51570 - DNA, 23 bp, Artificial Sequence
  Synthetic
accaagcagcaguaagactucag

SEQ ID NO: 51571 - DNA, 24 bp, Artificial Sequence
  Synthetic
agaagaggaucaggttggugaaga

SEQ ID NO: 51572 - DNA, 22 bp, Artificial Sequence
  Synthetic
gcacctuacaggtccttgugaa

SEQ ID NO: 51573 - DNA, 20 bp, Artificial Sequence
  Synthetic
cgtgttagcuacaggcugct

SEQ ID NO: 51574 - DNA, 21 bp, Artificial Sequence
  Synthetic
gtgaacaccugcctctgucaa

SEQ ID NO: 51575 - DNA, 20 bp, Artificial Sequence
  Synthetic
tgguccaagagggtguccat

SEQ ID NO: 51576 - DNA, 23 bp, Artificial Sequence
  Synthetic
gttcctccucagcctctttctut

SEQ ID NO: 51577 - DNA, 22 bp, Artificial Sequence
  Synthetic
gaaatggaaaccuggtgcctuc

SEQ ID NO: 51578 - DNA, 22 bp, Artificial Sequence
  Synthetic
gcagagaggcucttgctcttua

SEQ ID NO: 51579 - DNA, 23 bp, Artificial Sequence
  Synthetic
cgccagauaccagaaucagagga

SEQ ID NO: 51580 - DNA, 22 bp, Artificial Sequence
  Synthetic
gatgtgccauctgctaggauct

SEQ ID NO: 51581 - DNA, 21 bp, Artificial Sequence
  Synthetic
caagaggaccugttgcuccat

SEQ ID NO: 51582 - DNA, 20 bp, Artificial Sequence
  Synthetic
gtatacguggtggcugcaga

SEQ ID NO: 51583 - DNA, 17 bp, Artificial Sequence
  Synthetic
gccacgugcaggaugac

SEQ ID NO: 51584 - DNA, 21 bp, Artificial Sequence
  Synthetic
ctgatcaccgccuggtacauc

SEQ ID NO: 51585 - DNA, 21 bp, Artificial Sequence
  Synthetic
gctcaacccugagucaggagt

SEQ ID NO: 51586 - DNA, 21 bp, Artificial Sequence
  Synthetic
gctctggcuaacttggctcuc

SEQ ID NO: 51587 - DNA, 24 bp, Artificial Sequence
  Synthetic
ggtcattgaagcuccagctcttut

SEQ ID NO: 51588 - DNA, 22 bp, Artificial Sequence
  Synthetic
gggaaatggagucgaagcugac

SEQ ID NO: 51589 - DNA, 27 bp, Artificial Sequence
  Synthetic
gccaatcatauatttcgcccuagaaca

SEQ ID NO: 51590 - DNA, 24 bp, Artificial Sequence
  Synthetic
gaaagaaugaccaagaggtcuggt

SEQ ID NO: 51591 - DNA, 21 bp, Artificial Sequence
  Synthetic
caaggagcagcucucagagat

SEQ ID NO: 51592 - DNA, 21 bp, Artificial Sequence
  Synthetic
ccagccccutagacttucgag

SEQ ID NO: 51593 - DNA, 27 bp, Artificial Sequence
  Synthetic
caacaaaacagagcutgggttagatut

SEQ ID NO: 51594 - DNA, 26 bp, Artificial Sequence
  Synthetic
gggaaaggaaccaaaguatucaagat

SEQ ID NO: 51595 - DNA, 22 bp, Artificial Sequence
  Synthetic
gagcaucgtctuggagaaggag

SEQ ID NO: 51596 - DNA, 25 bp, Artificial Sequence
  Synthetic
gggatgtagggautcttgtttctuc

SEQ ID NO: 51597 - DNA, 25 bp, Artificial Sequence
  Synthetic
caacttcgacuggagggacatatut

SEQ ID NO: 51598 - DNA, 25 bp, Artificial Sequence
  Synthetic
actgcagagguaatgtagtatuggt

SEQ ID NO: 51599 - DNA, 19 bp, Artificial Sequence
  Synthetic
aautggugagccgggacaa

SEQ ID NO: 51600 - DNA, 23 bp, Artificial Sequence
  Synthetic
tgcagagagaauacggtggtgua

SEQ ID NO: 51601 - DNA, 21 bp, Artificial Sequence
  Synthetic
acuagggcucaccaggagaac

SEQ ID NO: 51602 - DNA, 22 bp, Artificial Sequence
  Synthetic
ggcguccacacactctatgaut

SEQ ID NO: 51603 - DNA, 26 bp, Artificial Sequence
  Synthetic
ggautaccaggatauccaggaagaca

SEQ ID NO: 51604 - DNA, 22 bp, Artificial Sequence
  Synthetic
gcggacattguggtgagtacug

SEQ ID NO: 51605 - DNA, 22 bp, Artificial Sequence
  Synthetic
ggccggaucattcatgacctut

SEQ ID NO: 51606 - DNA, 22 bp, Artificial Sequence
  Synthetic
ggccucccaggaactaattcug

SEQ ID NO: 51607 - DNA, 26 bp, Artificial Sequence
  Synthetic
agaataagtcttcuccagctcctuct

SEQ ID NO: 51608 - DNA, 19 bp, Artificial Sequence
  Synthetic
gcctgaguggtcaguccca

SEQ ID NO: 51609 - DNA, 21 bp, Artificial Sequence
  Synthetic
gugacacuggaggcagaagag

SEQ ID NO: 51610 - DNA, 20 bp, Artificial Sequence
  Synthetic
atccccuccccatccctuaa

SEQ ID NO: 51611 - DNA, 23 bp, Artificial Sequence
  Synthetic
acacacaccaugtctcttgtcuc

SEQ ID NO: 51612 - DNA, 19 bp, Artificial Sequence
  Synthetic
cccttgccutggtcctgug

SEQ ID NO: 51613 - DNA, 19 bp, Artificial Sequence
  Synthetic
caccccagugttccaugct

SEQ ID NO: 51614 - DNA, 25 bp, Artificial Sequence
  Synthetic
ccaaaacacacacagcuacttcuac

SEQ ID NO: 51615 - DNA, 24 bp, Artificial Sequence
  Synthetic
ccctttgtaccugcactgacttut

SEQ ID NO: 51616 - DNA, 27 bp, Artificial Sequence
  Synthetic
ggctctttguggatttttctttguagt

SEQ ID NO: 51617 - DNA, 25 bp, Artificial Sequence
  Synthetic
gccagagaugacaaaaatgcttuct

SEQ ID NO: 51618 - DNA, 20 bp, Artificial Sequence
  Synthetic
acugacggcccaaagatcug

SEQ ID NO: 51619 - DNA, 28 bp, Artificial Sequence
  Synthetic
cctataggctucaaaggaatgaaaugct

SEQ ID NO: 51620 - DNA, 21 bp, Artificial Sequence
  Synthetic
ccccaagcutttcccucgaag

SEQ ID NO: 51621 - DNA, 21 bp, Artificial Sequence
  Synthetic
cctcagccuctguggacagat

SEQ ID NO: 51622 - DNA, 24 bp, Artificial Sequence
  Synthetic
aaggttugaatcagaguccaaggg

SEQ ID NO: 51623 - DNA, 28 bp, Artificial Sequence
  Synthetic
tcagagaatgacuttccagcaatatugt

SEQ ID NO: 51624 - DNA, 22 bp, Artificial Sequence
  Synthetic
gcatttucagcagcttcucact

SEQ ID NO: 51625 - DNA, 23 bp, Artificial Sequence
  Synthetic
gcactgtgauaagagggtcucac

SEQ ID NO: 51626 - DNA, 24 bp, Artificial Sequence
  Synthetic
ctccattacagcauttctggcuct

SEQ ID NO: 51627 - DNA, 28 bp, Artificial Sequence
  Synthetic
agcctcagtttucttccctttttctaut

SEQ ID NO: 51628 - DNA, 26 bp, Artificial Sequence
  Synthetic
ccttgtagcattuagctcttctccua

SEQ ID NO: 51629 - DNA, 21 bp, Artificial Sequence
  Synthetic
cgcaacccucttttgtcccut

SEQ ID NO: 51630 - DNA, 28 bp, Artificial Sequence
  Synthetic
aggctattacagaugtgattaacugcac

SEQ ID NO: 51631 - DNA, 27 bp, Artificial Sequence
  Synthetic
tgggaattagugccttggtagagtaut

SEQ ID NO: 51632 - DNA, 20 bp, Artificial Sequence
  Synthetic
ccagacatacugcggtgcut

SEQ ID NO: 51633 - DNA, 23 bp, Artificial Sequence
  Synthetic
tccagatcauacccagggtcaut

SEQ ID NO: 51634 - DNA, 27 bp, Artificial Sequence
  Synthetic
ttagcccatgtucattttctctcauca

SEQ ID NO: 51635 - DNA, 28 bp, Artificial Sequence
  Synthetic
gatttcatgucaacaagtggcttcaaua

SEQ ID NO: 51636 - DNA, 24 bp, Artificial Sequence
  Synthetic
ctccagagacucttgcaatcauca

SEQ ID NO: 51637 - DNA, 23 bp, Artificial Sequence
  Synthetic
ctctgaatcaccutctccaccuc

SEQ ID NO: 51638 - DNA, 25 bp, Artificial Sequence
  Synthetic
gttcagttggucaagtagagtugct

SEQ ID NO: 51639 - DNA, 25 bp, Artificial Sequence
  Synthetic
ccttggttugagcttgtcatcttut

SEQ ID NO: 51640 - DNA, 23 bp, Artificial Sequence
  Synthetic
gggtgtauggttgacaugaacga

SEQ ID NO: 51641 - DNA, 26 bp, Artificial Sequence
  Synthetic
gcttccttgugctgcaaactuaaaaa

SEQ ID NO: 51642 - DNA, 22 bp, Artificial Sequence
  Synthetic
gcccagguttaaggcaacucaa

SEQ ID NO: 51643 - DNA, 22 bp, Artificial Sequence
  Synthetic
acatcttcggugagtctugcag

SEQ ID NO: 51644 - DNA, 23 bp, Artificial Sequence
  Synthetic
ggaagtcatacugcccatgctut

SEQ ID NO: 51645 - DNA, 24 bp, Artificial Sequence
  Synthetic
gggtacaatgucttcttccagtuc

SEQ ID NO: 51646 - DNA, 27 bp, Artificial Sequence
  Synthetic
agtgagagauaaacagggacataucct

SEQ ID NO: 51647 - DNA, 24 bp, Artificial Sequence
  Synthetic
gagaatcatcuccacgttgtugga

SEQ ID NO: 51648 - DNA, 27 bp, Artificial Sequence
  Synthetic
agctgagtgtguatttcaaagttcugt

SEQ ID NO: 51649 - DNA, 28 bp, Artificial Sequence
  Synthetic
gcatccgugaatttggaatttugaaaaa

SEQ ID NO: 51650 - DNA, 26 bp, Artificial Sequence
  Synthetic
ctcaataattcgacucaccacagcua

SEQ ID NO: 51651 - DNA, 27 bp, Artificial Sequence
  Synthetic
tcaccctgaaugtgtcttctctauagt

SEQ ID NO: 51652 - DNA, 24 bp, Artificial Sequence
  Synthetic
ggaguaaaagaacaggaacugcct

SEQ ID NO: 51653 - DNA, 26 bp, Artificial Sequence
  Synthetic
tcacctuacacccaatagaaatugct

SEQ ID NO: 51654 - DNA, 21 bp, Artificial Sequence
  Synthetic
gccacctcucagtccatcuct

SEQ ID NO: 51655 - DNA, 25 bp, Artificial Sequence
  Synthetic
agccagaaaugagactatggaguca

SEQ ID NO: 51656 - DNA, 20 bp, Artificial Sequence
  Synthetic
gcgguacacaccagcctaug

SEQ ID NO: 51657 - DNA, 23 bp, Artificial Sequence
  Synthetic
ccattcucaggacccttcaguct

SEQ ID NO: 51658 - DNA, 21 bp, Artificial Sequence
  Synthetic
ccggagaaugacagactuggt

SEQ ID NO: 51659 - DNA, 29 bp, Artificial Sequence
  Synthetic
ttttccttctgcugattctcttctttuct

SEQ ID NO: 51660 - DNA, 26 bp, Artificial Sequence
  Synthetic
atgacatagcaauggaagccaacuaa

SEQ ID NO: 51661 - DNA, 27 bp, Artificial Sequence
  Synthetic
caccaagaauccatctcattctguagt

SEQ ID NO: 51662 - DNA, 24 bp, Artificial Sequence
  Synthetic
gggtttcatucacacgctgaacua

SEQ ID NO: 51663 - DNA, 26 bp, Artificial Sequence
  Synthetic
ggactccatcuatatggcttgcaaug

SEQ ID NO: 51664 - DNA, 22 bp, Artificial Sequence
  Synthetic
gaagtgaaagugtgttgcgcut

SEQ ID NO: 51665 - DNA, 24 bp, Artificial Sequence
  Synthetic
ggtttggaatcuggctgaatcugt

SEQ ID NO: 51666 - DNA, 20 bp, Artificial Sequence
  Synthetic
ctgccgucaggtagttcucc

SEQ ID NO: 51667 - DNA, 22 bp, Artificial Sequence
  Synthetic
gatatgctcgutccgagaucgt

SEQ ID NO: 51668 - DNA, 27 bp, Artificial Sequence
  Synthetic
atgagtggcaaugtcaggtgttauaat

SEQ ID NO: 51669 - DNA, 30 bp, Artificial Sequence
  Synthetic
ctaagaaactcaccuaatgtaagcctaugg

SEQ ID NO: 51670 - DNA, 22 bp, Artificial Sequence
  Synthetic
ccctggatguggccaacaauag

SEQ ID NO: 51671 - DNA, 29 bp, Artificial Sequence
  Synthetic
tcaaactggcaugaataaccacuaaaaga

SEQ ID NO: 51672 - DNA, 27 bp, Artificial Sequence
  Synthetic
gtgacacactatuggtagctgttctua

SEQ ID NO: 51673 - DNA, 29 bp, Artificial Sequence
  Synthetic
cttctggaauacaggaaaatttgttcuga

SEQ ID NO: 51674 - DNA, 26 bp, Artificial Sequence
  Synthetic
cggtctttagauatgagcagcaauga

SEQ ID NO: 51675 - DNA, 29 bp, Artificial Sequence
  Synthetic
ggcaataatcgtcutacctctttcagtut

SEQ ID NO: 51676 - DNA, 28 bp, Artificial Sequence
  Synthetic
ctggaggtagaauagtagagggttugaa

SEQ ID NO: 51677 - DNA, 33 bp, Artificial Sequence
  Synthetic
catctgtttaaggaautaagcatacaacuacaa

SEQ ID NO: 51678 - DNA, 26 bp, Artificial Sequence
  Synthetic
gtcugacgagacgcattttatuacct

SEQ ID NO: 51679 - DNA, 28 bp, Artificial Sequence
  Synthetic
gatttaccucagaagtgtatcctucagt

SEQ ID NO: 51680 - DNA, 28 bp, Artificial Sequence
  Synthetic
aatccacaaatucaacggaaagaaaugt

SEQ ID NO: 51681 - DNA, 30 bp, Artificial Sequence
  Synthetic
aaaataacttacagtuggcttgttcttguc

SEQ ID NO: 51682 - DNA, 23 bp, Artificial Sequence
  Synthetic
gtacacagggagucagtgggaua

SEQ ID NO: 51683 - DNA, 21 bp, Artificial Sequence
  Synthetic
ggttggtgggutagtgggaug

SEQ ID NO: 51684 - DNA, 23 bp, Artificial Sequence
  Synthetic
tgactccagagaugtcaguggaa

SEQ ID NO: 51685 - DNA, 21 bp, Artificial Sequence
  Synthetic
gacuttgcuaccccaggagag

SEQ ID NO: 51686 - DNA, 23 bp, Artificial Sequence
  Synthetic
gcccgacaggcauttaaauaggt

SEQ ID NO: 51687 - DNA, 28 bp, Artificial Sequence
  Synthetic
acagtaatgtagcutcacatacagctug

SEQ ID NO: 51688 - DNA, 25 bp, Artificial Sequence
  Synthetic
tggcaaaaagcccaaguaactauct

SEQ ID NO: 51689 - DNA, 24 bp, Artificial Sequence
  Synthetic
aaaagaaaagcccccauctcugat

SEQ ID NO: 51690 - DNA, 21 bp, Artificial Sequence
  Synthetic
gctgctacutcccacagauga

SEQ ID NO: 51691 - DNA, 26 bp, Artificial Sequence
  Synthetic
gatgtgaaatgcugctcaaggttuag

SEQ ID NO: 51692 - DNA, 21 bp, Artificial Sequence
  Synthetic
tgcgtgagagcutcacatuca

SEQ ID NO: 51693 - DNA, 28 bp, Artificial Sequence
  Synthetic
acagaatcttaauttgggtggcuaaaca

SEQ ID NO: 51694 - DNA, 28 bp, Artificial Sequence
  Synthetic
tgggcatgaaautagacatacttctucc

SEQ ID NO: 51695 - DNA, 27 bp, Artificial Sequence
  Synthetic
aactctccugcagggaauaaagaaaat

SEQ ID NO: 51696 - DNA, 27 bp, Artificial Sequence
  Synthetic
tgtgaaagaacaacaugaacccauagt

SEQ ID NO: 51697 - DNA, 21 bp, Artificial Sequence
  Synthetic
gctctccccuttgtcaucacc

SEQ ID NO: 51698 - DNA, 26 bp, Artificial Sequence
  Synthetic
tgaatgaacaaaacutggacuaggct

SEQ ID NO: 51699 - DNA, 26 bp, Artificial Sequence
  Synthetic
ggucagaaaacactgugaaaagcaaa

SEQ ID NO: 51700 - DNA, 22 bp, Artificial Sequence
  Synthetic
acaggccautttccatgtuggt

SEQ ID NO: 51701 - DNA, 24 bp, Artificial Sequence
  Synthetic
gagcatactcaucaggccagtaut

SEQ ID NO: 51702 - DNA, 30 bp, Artificial Sequence
  Synthetic
ctgaaagaauaagaagagtgagctauagca

SEQ ID NO: 51703 - DNA, 27 bp, Artificial Sequence
  Synthetic
agctccctagagutctgaatcctatut

SEQ ID NO: 51704 - DNA, 22 bp, Artificial Sequence
  Synthetic
ggtcagauccgactccatctuc

SEQ ID NO: 51705 - DNA, 28 bp, Artificial Sequence
  Synthetic
aaacgatcaataguctaaaagtgggcut

SEQ ID NO: 51706 - DNA, 19 bp, Artificial Sequence
  Synthetic
cccaggugagggagaagug

SEQ ID NO: 51707 - DNA, 20 bp, Artificial Sequence
  Synthetic
ttgagctttcuggccctcug

SEQ ID NO: 51708 - DNA, 22 bp, Artificial Sequence
  Synthetic
gctccagctugaccttagacut

SEQ ID NO: 51709 - DNA, 22 bp, Artificial Sequence
  Synthetic
ccatagatguctccaggcuggt

SEQ ID NO: 51710 - DNA, 20 bp, Artificial Sequence
  Synthetic
gcgtccguctcatactuggt

SEQ ID NO: 51711 - DNA, 21 bp, Artificial Sequence
  Synthetic
ggagaaagcugaacccaccuc

SEQ ID NO: 51712 - DNA, 25 bp, Artificial Sequence
  Synthetic
actcagggaaccuttgatagucagt

SEQ ID NO: 51713 - DNA, 28 bp, Artificial Sequence
  Synthetic
agaactcgtaugctaattgagucaaaca

SEQ ID NO: 51714 - DNA, 21 bp, Artificial Sequence
  Synthetic
ggagaauaccgagagcuggga

SEQ ID NO: 51715 - DNA, 22 bp, Artificial Sequence
  Synthetic
gcttgtatcugggcaggtcaua

SEQ ID NO: 51716 - DNA, 28 bp, Artificial Sequence
  Synthetic
aagatatttgugaaagtccaccatucct

SEQ ID NO: 51717 - DNA, 21 bp, Artificial Sequence
  Synthetic
tcagcuccaagactctcugct

SEQ ID NO: 51718 - DNA, 27 bp, Artificial Sequence
  Synthetic
agtgcacaaagutctgtttttcttucc

SEQ ID NO: 51719 - DNA, 23 bp, Artificial Sequence
  Synthetic
gcaaaggcaguttcagagacuga

SEQ ID NO: 51720 - DNA, 23 bp, Artificial Sequence
  Synthetic
ggtgatctugttgaaggtugggt

SEQ ID NO: 51721 - DNA, 22 bp, Artificial Sequence
  Synthetic
atccctgaucactgggagucat

SEQ ID NO: 51722 - DNA, 23 bp, Artificial Sequence
  Synthetic
cagaagcauacagggauagcact

SEQ ID NO: 51723 - DNA, 24 bp, Artificial Sequence
  Synthetic
cgagcatgguatcatcaccaacug

SEQ ID NO: 51724 - DNA, 21 bp, Artificial Sequence
  Synthetic
gggagucccgttgtcucaaag

SEQ ID NO: 51725 - DNA, 20 bp, Artificial Sequence
  Synthetic
actgggcacccugtatgtug

SEQ ID NO: 51726 - DNA, 27 bp, Artificial Sequence
  Synthetic
agacaaaggaaacacaautacctucca

SEQ ID NO: 51727 - DNA, 28 bp, Artificial Sequence
  Synthetic
ggcagaguaacaactaaagattccugaa

SEQ ID NO: 51728 - DNA, 25 bp, Artificial Sequence
  Synthetic
agtagcgaugaaaacaaaacucaga

SEQ ID NO: 51729 - DNA, 20 bp, Artificial Sequence
  Synthetic
gcaacccuggctaccatuca

SEQ ID NO: 51730 - DNA, 26 bp, Artificial Sequence
  Synthetic
ctccctgtgaagutatatgacagcut

SEQ ID NO: 51731 - DNA, 28 bp, Artificial Sequence
  Synthetic
tcagaactgcaaaguctggatattgtua

SEQ ID NO: 51732 - DNA, 27 bp, Artificial Sequence
  Synthetic
aattctttugcaggaaaagctgacaut

SEQ ID NO: 51733 - DNA, 25 bp, Artificial Sequence
  Synthetic
cgaatcaaguccttgcattaaugga

SEQ ID NO: 51734 - DNA, 23 bp, Artificial Sequence
  Synthetic
gggtgtcutatgtatgaaugcgt

SEQ ID NO: 51735 - DNA, 25 bp, Artificial Sequence
  Synthetic
atgtctgggtugcagttaaaccuaa

SEQ ID NO: 51736 - DNA, 24 bp, Artificial Sequence
  Synthetic
cagaaagcaagcacaauccacaut

SEQ ID NO: 51737 - DNA, 24 bp, Artificial Sequence
  Synthetic
gcagacctcguccttcttcataut

SEQ ID NO: 51738 - DNA, 21 bp, Artificial Sequence
  Synthetic
ccucagcaatucacagcggaa

SEQ ID NO: 51739 - DNA, 21 bp, Artificial Sequence
  Synthetic
gggaauacagggcccaatcug

SEQ ID NO: 51740 - DNA, 21 bp, Artificial Sequence
  Synthetic
gggctaggugagagtucaagt

SEQ ID NO: 51741 - DNA, 23 bp, Artificial Sequence
  Synthetic
cctttgcugagcgcttactaaug

SEQ ID NO: 51742 - DNA, 21 bp, Artificial Sequence
  Synthetic
gctctugggagtccacaucag

SEQ ID NO: 51743 - DNA, 22 bp, Artificial Sequence
  Synthetic
tgtggaattucagcagtgcugt

SEQ ID NO: 51744 - DNA, 21 bp, Artificial Sequence
  Synthetic
ggagagguttcatgccuggat

SEQ ID NO: 51745 - DNA, 19 bp, Artificial Sequence
  Synthetic
cccatcaagcucgcctguc

SEQ ID NO: 51746 - DNA, 23 bp, Artificial Sequence
  Synthetic
gacgatagccugaaaaaccucca

SEQ ID NO: 51747 - DNA, 21 bp, Artificial Sequence
  Synthetic
cuagaagacagggagcgugaa

SEQ ID NO: 51748 - DNA, 18 bp, Artificial Sequence
  Synthetic
caccctgugcgtgggaut

SEQ ID NO: 51749 - DNA, 19 bp, Artificial Sequence
  Synthetic
gggcctucctgaacacugg

SEQ ID NO: 51750 - DNA, 17 bp, Artificial Sequence
  Synthetic
cccagcucctgcacgua

SEQ ID NO: 51751 - DNA, 18 bp, Artificial Sequence
  Synthetic
gcgucuacgccaaggaca

SEQ ID NO: 51752 - DNA, 21 bp, Artificial Sequence
  Synthetic
ctgagaggugcacagtgtcut

SEQ ID NO: 51753 - DNA, 17 bp, Artificial Sequence
  Synthetic
gcagcaggugcuggaca

SEQ ID NO: 51754 - DNA, 19 bp, Artificial Sequence
  Synthetic
gggtgguaaatggcucgga

SEQ ID NO: 51755 - DNA, 17 bp, Artificial Sequence
  Synthetic
gccgacugcaccaugga

SEQ ID NO: 51756 - DNA, 19 bp, Artificial Sequence
  Synthetic
agcacggucaggagguact

SEQ ID NO: 51757 - DNA, 18 bp, Artificial Sequence
  Synthetic
cagcccucagtgctgcua

SEQ ID NO: 51758 - DNA, 20 bp, Artificial Sequence
  Synthetic
ccaggucccctggatgaugt

SEQ ID NO: 51759 - DNA, 25 bp, Artificial Sequence
  Synthetic
cccttcuagaggctttgacuaacca

SEQ ID NO: 51760 - DNA, 20 bp, Artificial Sequence
  Synthetic
aggccacacacguguacaag

SEQ ID NO: 51761 - DNA, 23 bp, Artificial Sequence
  Synthetic
tcaacuacaccaacgagaagcug

SEQ ID NO: 51762 - DNA, 22 bp, Artificial Sequence
  Synthetic
caccgagcugtaccucaaagat

SEQ ID NO: 51763 - DNA, 23 bp, Artificial Sequence
  Synthetic
gcccattgagaauaaccgggtuc

SEQ ID NO: 51764 - DNA, 21 bp, Artificial Sequence
  Synthetic
ggcaccaaaaggugtaccuga

SEQ ID NO: 51765 - DNA, 22 bp, Artificial Sequence
  Synthetic
cacttggccgguatgtatguct

SEQ ID NO: 51766 - DNA, 19 bp, Artificial Sequence
  Synthetic
ccaccaccacaccuaccuc

SEQ ID NO: 51767 - DNA, 25 bp, Artificial Sequence
  Synthetic
gctgatggucacagtttctgtttuc

SEQ ID NO: 51768 - DNA, 18 bp, Artificial Sequence
  Synthetic
cagctugggccccattuc

SEQ ID NO: 51769 - DNA, 22 bp, Artificial Sequence
  Synthetic
gtcctgtuagcgactcgaauct

SEQ ID NO: 51770 - DNA, 21 bp, Artificial Sequence
  Synthetic
agaaaaugaucgcaccgcaga

SEQ ID NO: 51771 - DNA, 23 bp, Artificial Sequence
  Synthetic
caaaccucagcugaaaagcaact

SEQ ID NO: 51772 - DNA, 21 bp, Artificial Sequence
  Synthetic
cgacgttgutcttggctguca

SEQ ID NO: 51773 - DNA, 23 bp, Artificial Sequence
  Synthetic
gatttcuaacctgcuggagacct

SEQ ID NO: 51774 - DNA, 27 bp, Artificial Sequence
  Synthetic
tggtaaaatcccauggtcaattgaugt

SEQ ID NO: 51775 - DNA, 26 bp, Artificial Sequence
  Synthetic
cgctgatgccutttcaactaaactua

SEQ ID NO: 51776 - DNA, 21 bp, Artificial Sequence
  Synthetic
gacccagugcctcatgtcaut

SEQ ID NO: 51777 - DNA, 24 bp, Artificial Sequence
  Synthetic
ctgaaatcugaacagacugagcca

SEQ ID NO: 51778 - DNA, 18 bp, Artificial Sequence
  Synthetic
agacagtggugggccuct

SEQ ID NO: 51779 - DNA, 18 bp, Artificial Sequence
  Synthetic
cccaccccggugtttucc

SEQ ID NO: 51780 - DNA, 20 bp, Artificial Sequence
  Synthetic
ccctugacacagcggaaguc

SEQ ID NO: 51781 - DNA, 22 bp, Artificial Sequence
  Synthetic
gagaggcaaauttcagggcuct

SEQ ID NO: 51782 - DNA, 20 bp, Artificial Sequence
  Synthetic
cccaccaauacgcctctuct

SEQ ID NO: 51783 - DNA, 18 bp, Artificial Sequence
  Synthetic
gtggguaacgggcguagt

SEQ ID NO: 51784 - DNA, 24 bp, Artificial Sequence
  Synthetic
cgcaaatttccutccactcggaua

SEQ ID NO: 51785 - DNA, 22 bp, Artificial Sequence
  Synthetic
ggccatcuacaagcagucacag

SEQ ID NO: 51786 - DNA, 18 bp, Artificial Sequence
  Synthetic
ctggaggugggaccugag

SEQ ID NO: 51787 - DNA, 19 bp, Artificial Sequence
  Synthetic
ccacccucaccuccgagaa

SEQ ID NO: 51788 - DNA, 24 bp, Artificial Sequence
  Synthetic
catcacagtgugacttgcattucc

SEQ ID NO: 51789 - DNA, 25 bp, Artificial Sequence
  Synthetic
acatttgtgaaaacacutgctgguc

SEQ ID NO: 51790 - DNA, 28 bp, Artificial Sequence
  Synthetic
tgtggaagagauccaaaacatcaugaaa

SEQ ID NO: 51791 - DNA, 21 bp, Artificial Sequence
  Synthetic
cgtagtatgugcgcctgagug

SEQ ID NO: 51792 - DNA, 22 bp, Artificial Sequence
  Synthetic
gcacatggugttctgtctcuct

SEQ ID NO: 51793 - DNA, 24 bp, Artificial Sequence
  Synthetic
catgtcatcagucacaatctuggg

SEQ ID NO: 51794 - DNA, 21 bp, Artificial Sequence
  Synthetic
gautcctcugaaccccaccat

SEQ ID NO: 51795 - DNA, 26 bp, Artificial Sequence
  Synthetic
ctaagtggaguagctttgtggttcut

SEQ ID NO: 51796 - DNA, 21 bp, Artificial Sequence
  Synthetic
gggcatagugtgagagauggg

SEQ ID NO: 51797 - DNA, 23 bp, Artificial Sequence
  Synthetic
cttcagatgcugagtgaggauga

SEQ ID NO: 51798 - DNA, 25 bp, Artificial Sequence
  Synthetic
cgctacaacuatacaacucccaagt

SEQ ID NO: 51799 - DNA, 22 bp, Artificial Sequence
  Synthetic
gatcccuccagttcacuggaaa

SEQ ID NO: 51800 - DNA, 24 bp, Artificial Sequence
  Synthetic
tgtgtctuccaataagcgttucca

SEQ ID NO: 51801 - DNA, 28 bp, Artificial Sequence
  Synthetic
ccctgactcaggauatctatctgatuct

SEQ ID NO: 51802 - DNA, 20 bp, Artificial Sequence
  Synthetic
gcagcggguccagaatctuc

SEQ ID NO: 51803 - DNA, 22 bp, Artificial Sequence
  Synthetic
tgctgatactuggcgaggttut

SEQ ID NO: 51804 - DNA, 19 bp, Artificial Sequence
  Synthetic
agtgcugcccaaagaccuc

SEQ ID NO: 51805 - DNA, 19 bp, Artificial Sequence
  Synthetic
acucagggccgugagagaa

SEQ ID NO: 51806 - DNA, 20 bp, Artificial Sequence
  Synthetic
catgauccttcggucacgca

SEQ ID NO: 51807 - DNA, 21 bp, Artificial Sequence
  Synthetic
gctgcuggagaccttgaaugt

SEQ ID NO: 51808 - DNA, 19 bp, Artificial Sequence
  Synthetic
tcccccacccuctucaaga

SEQ ID NO: 51809 - DNA, 20 bp, Artificial Sequence
  Synthetic
ctgggcgaggugatcttcug

SEQ ID NO: 51810 - DNA, 30 bp, Artificial Sequence
  Synthetic
tggagcaaaaguaatacgtaaauggaaagt

SEQ ID NO: 51811 - DNA, 27 bp, Artificial Sequence
  Synthetic
ggttgtaactuaccttttccaggcuat

SEQ ID NO: 51812 - DNA, 27 bp, Artificial Sequence
  Synthetic
gggtaggatgugatattccttctagug

SEQ ID NO: 51813 - DNA, 27 bp, Artificial Sequence
  Synthetic
agaaaaaguacagaagaagcugaccat

SEQ ID NO: 51814 - DNA, 24 bp, Artificial Sequence
  Synthetic
ggtttgttgttuttcctggcttug

SEQ ID NO: 51815 - DNA, 26 bp, Artificial Sequence
  Synthetic
ttcccaggacaguctaugaaaacaag

SEQ ID NO: 51816 - DNA, 21 bp, Artificial Sequence
  Synthetic
gggauggaggaggactcacut

SEQ ID NO: 51817 - DNA, 22 bp, Artificial Sequence
  Synthetic
cataccacucaggtctgaugcc

SEQ ID NO: 51818 - DNA, 18 bp, Artificial Sequence
  Synthetic
ctcaccagugccctcgut

SEQ ID NO: 51819 - DNA, 20 bp, Artificial Sequence
  Synthetic
cctcaccccuttccaccuct

SEQ ID NO: 51820 - DNA, 25 bp, Artificial Sequence
  Synthetic
cctgtggattucctctccaaagtut

SEQ ID NO: 51821 - DNA, 21 bp, Artificial Sequence
  Synthetic
ctgcacgtugggtgtgattuc

SEQ ID NO: 51822 - DNA, 19 bp, Artificial Sequence
  Synthetic
cagaggcaucaagccugga

SEQ ID NO: 51823 - DNA, 18 bp, Artificial Sequence
  Synthetic
ccatucaccgccctgcut

SEQ ID NO: 51824 - DNA, 19 bp, Artificial Sequence
  Synthetic
aggagugggacugaagcct

SEQ ID NO: 51825 - DNA, 22 bp, Artificial Sequence
  Synthetic
ccccttugccactttcuaacct

SEQ ID NO: 51826 - DNA, 21 bp, Artificial Sequence
  Synthetic
catcugaccaggagctccaut

SEQ ID NO: 51827 - DNA, 26 bp, Artificial Sequence
  Synthetic
aggttcttaccutctacctcttucct

SEQ ID NO: 51828 - DNA, 21 bp, Artificial Sequence
  Synthetic
cccaaatguggtggaguggaa

SEQ ID NO: 51829 - DNA, 25 bp, Artificial Sequence
  Synthetic
gtcttcctuacctcttccctucaat

SEQ ID NO: 51830 - DNA, 19 bp, Artificial Sequence
  Synthetic
acggcgagagucggagaua

SEQ ID NO: 51831 - DNA, 25 bp, Artificial Sequence
  Synthetic
ggagacatggutagtgctttaugct

SEQ ID NO: 51832 - DNA, 18 bp, Artificial Sequence
  Synthetic
cacccgcucacaguacga

SEQ ID NO: 51833 - DNA, 20 bp, Artificial Sequence
  Synthetic
caaggtcgagugagctgugt

SEQ ID NO: 51834 - DNA, 20 bp, Artificial Sequence
  Synthetic
ctgcuggagaagagucacga

SEQ ID NO: 51835 - DNA, 21 bp, Artificial Sequence
  Synthetic
tctagatgccuggccatggua

SEQ ID NO: 51836 - DNA, 24 bp, Artificial Sequence
  Synthetic
gctccttgtcuccaggaacaaaug

SEQ ID NO: 51837 - DNA, 26 bp, Artificial Sequence
  Synthetic
ctcaggatgagcuggttgaagtatut

SEQ ID NO: 51838 - DNA, 22 bp, Artificial Sequence
  Synthetic
ccacctcuacacactgtuccac

SEQ ID NO: 51839 - DNA, 21 bp, Artificial Sequence
  Synthetic
aggcccaaaugttgtcucact

SEQ ID NO: 51840 - DNA, 22 bp, Artificial Sequence
  Synthetic
gcccagaauccucaaagcaaca

SEQ ID NO: 51841 - DNA, 19 bp, Artificial Sequence
  Synthetic
tguccacacccccaccaua

SEQ ID NO: 51842 - DNA, 24 bp, Artificial Sequence
  Synthetic
ctccacattcuctgccttttcauc

SEQ ID NO: 51843 - DNA, 18 bp, Artificial Sequence
  Synthetic
cgatcccugtgccacuct

SEQ ID NO: 51844 - DNA, 20 bp, Artificial Sequence
  Synthetic
gctgagagcutcggctucaa

SEQ ID NO: 51845 - DNA, 18 bp, Artificial Sequence
  Synthetic
gctgcuctgccucacagg

SEQ ID NO: 51846 - DNA, 21 bp, Artificial Sequence
  Synthetic
tctctgagaggugcctuccaa

SEQ ID NO: 51847 - DNA, 24 bp, Artificial Sequence
  Synthetic
tctcgtgguctagttcatcaucct

SEQ ID NO: 51848 - DNA, 20 bp, Artificial Sequence
  Synthetic
gcacccguccagtgguaaac

SEQ ID NO: 51849 - DNA, 24 bp, Artificial Sequence
  Synthetic
gctccctttcucctgcagaaauaa

SEQ ID NO: 51850 - DNA, 28 bp, Artificial Sequence
  Synthetic
ttcccttttagacaaugaagcctcauag

SEQ ID NO: 51851 - DNA, 24 bp, Artificial Sequence
  Synthetic
tgccgcacuaaatgaggatgttua

SEQ ID NO: 51852 - DNA, 25 bp, Artificial Sequence
  Synthetic
gagttggactautcagtgctgcuat

SEQ ID NO: 51853 - DNA, 27 bp, Artificial Sequence
  Synthetic
ctaatcgacttgugaaaagctgcttua

SEQ ID NO: 51854 - DNA, 26 bp, Artificial Sequence
  Synthetic
acaatcagggutttagttgtccugaa

SEQ ID NO: 51855 - DNA, 25 bp, Artificial Sequence
  Synthetic
agcacaacagaguggctttuaaaga

SEQ ID NO: 51856 - DNA, 28 bp, Artificial Sequence
  Synthetic
cagttaccagatucccactgaaaatuct

SEQ ID NO: 51857 - DNA, 27 bp, Artificial Sequence
  Synthetic
cactgctaattaaacuctgggtcagut

SEQ ID NO: 51858 - DNA, 22 bp, Artificial Sequence
  Synthetic
ccatgccauttgtttccuccat

SEQ ID NO: 51859 - DNA, 26 bp, Artificial Sequence
  Synthetic
caaaacaacccucgaaggtctgtaua

SEQ ID NO: 51860 - DNA, 21 bp, Artificial Sequence
  Synthetic
gctuagccagagcaggactut

SEQ ID NO: 51861 - DNA, 28 bp, Artificial Sequence
  Synthetic
atagtctctugggttatcgagguagaat

SEQ ID NO: 51862 - DNA, 22 bp, Artificial Sequence
  Synthetic
gtaaacccuggcttgactugga

SEQ ID NO: 51863 - DNA, 21 bp, Artificial Sequence
  Synthetic
acctucaccagctcaaauggg

SEQ ID NO: 51864 - DNA, 20 bp, Artificial Sequence
  Synthetic
gaggccgugtatgggaugac

SEQ ID NO: 51865 - DNA, 21 bp, Artificial Sequence
  Synthetic
aaataagcccccucccugaga

SEQ ID NO: 51866 - DNA, 21 bp, Artificial Sequence
  Synthetic
aggagttgucaggagcaggua

SEQ ID NO: 51867 - DNA, 20 bp, Artificial Sequence
  Synthetic
gagcttgagcugctcctuga

SEQ ID NO: 51868 - DNA, 22 bp, Artificial Sequence
  Synthetic
caacagtuccccaaagccctua

SEQ ID NO: 51869 - DNA, 24 bp, Artificial Sequence
  Synthetic
gactgctucaaactcgaaguacca

SEQ ID NO: 51870 - DNA, 20 bp, Artificial Sequence
  Synthetic
gtctgacucaggcuccgaaa

SEQ ID NO: 51871 - DNA, 17 bp, Artificial Sequence
  Synthetic
caggaagccugguggga

SEQ ID NO: 51872 - DNA, 21 bp, Artificial Sequence
  Synthetic
gcctgaggucttcacugagga

SEQ ID NO: 51873 - DNA, 21 bp, Artificial Sequence
  Synthetic
gcagcccaccugtaactucac

SEQ ID NO: 51874 - DNA, 22 bp, Artificial Sequence
  Synthetic
cctccccuccatctctagaucc

SEQ ID NO: 51875 - DNA, 24 bp, Artificial Sequence
  Synthetic
ggtttcatttugaccctcaaugct

SEQ ID NO: 51876 - DNA, 19 bp, Artificial Sequence
  Synthetic
gcutgtcttgugagcgcat

SEQ ID NO: 51877 - DNA, 22 bp, Artificial Sequence
  Synthetic
tttcacccaccccaucttctuc

SEQ ID NO: 51878 - DNA, 21 bp, Artificial Sequence
  Synthetic
ctgagguccagcagguaacag

SEQ ID NO: 51879 - DNA, 25 bp, Artificial Sequence
  Synthetic
cttaacaagaagagguccacucgaa

SEQ ID NO: 51880 - DNA, 23 bp, Artificial Sequence
  Synthetic
ctgguggagggaagtguaaaact

SEQ ID NO: 51881 - DNA, 18 bp, Artificial Sequence
  Synthetic
ccccaaggccacucacuc

SEQ ID NO: 51882 - DNA, 28 bp, Artificial Sequence
  Synthetic
cggcggagttuatagataagttggaaut

SEQ ID NO: 51883 - DNA, 21 bp, Artificial Sequence
  Synthetic
gtggaggcacagauagacgug

SEQ ID NO: 51884 - DNA, 18 bp, Artificial Sequence
  Synthetic
gggagagcgguaccacut

SEQ ID NO: 51885 - DNA, 19 bp, Artificial Sequence
  Synthetic
tccuggacccucagacagg

SEQ ID NO: 51886 - DNA, 21 bp, Artificial Sequence
  Synthetic
gatgaccugagggtcctgtut

SEQ ID NO: 51887 - DNA, 22 bp, Artificial Sequence
  Synthetic
ggcagautgatctucagagcca

SEQ ID NO: 51888 - DNA, 20 bp, Artificial Sequence
  Synthetic
gggattaggcuggagcuaca

SEQ ID NO: 51889 - DNA, 18 bp, Artificial Sequence
  Synthetic
gtgctuggaggcgtucag

SEQ ID NO: 51890 - DNA, 20 bp, Artificial Sequence
  Synthetic
ggcatccggcugaagaagua

SEQ ID NO: 51891 - DNA, 21 bp, Artificial Sequence
  Synthetic
cccccttaugcttctccgtut

SEQ ID NO: 51892 - DNA, 26 bp, Artificial Sequence
  Synthetic
ttaaagttucggaagagctuccagat

SEQ ID NO: 51893 - DNA, 19 bp, Artificial Sequence
  Synthetic
ggagaaggaugggctgcug

SEQ ID NO: 51894 - DNA, 27 bp, Artificial Sequence
  Synthetic
tctagagatttcacugtgtctgcatug

SEQ ID NO: 51895 - DNA, 21 bp, Artificial Sequence
  Synthetic
ggccaccuccgttgtgaauaa

SEQ ID NO: 51896 - DNA, 21 bp, Artificial Sequence
  Synthetic
gatcctcauccagcaggtgut

SEQ ID NO: 51897 - DNA, 21 bp, Artificial Sequence
  Synthetic
acagggagacutcagtgcuca

SEQ ID NO: 51898 - DNA, 17 bp, Artificial Sequence
  Synthetic
ccccacugccctgugag

SEQ ID NO: 51899 - DNA, 18 bp, Artificial Sequence
  Synthetic
ctgcccugaccacctgut

SEQ ID NO: 51900 - DNA, 18 bp, Artificial Sequence
  Synthetic
cgggtucgggttcagcua

SEQ ID NO: 51901 - DNA, 17 bp, Artificial Sequence
  Synthetic
gccgaccacgcucacuc

SEQ ID NO: 51902 - DNA, 21 bp, Artificial Sequence
  Synthetic
gtaggtcgutcccttuccaca

SEQ ID NO: 51903 - DNA, 22 bp, Artificial Sequence
  Synthetic
cgggcaagcuttgtgactuaga

SEQ ID NO: 51904 - DNA, 26 bp, Artificial Sequence
  Synthetic
tttaacattcacugctgatccucact

SEQ ID NO: 51905 - DNA, 22 bp, Artificial Sequence
  Synthetic
tgttttggcagauttcggccua

SEQ ID NO: 51906 - DNA, 24 bp, Artificial Sequence
  Synthetic
agggtaaaucctgaagccuacagt

SEQ ID NO: 51907 - DNA, 24 bp, Artificial Sequence
  Synthetic
aaatgcactaucccatgguggaat

SEQ ID NO: 51908 - DNA, 23 bp, Artificial Sequence
  Synthetic
acaggtattguaggccaggcuaa

SEQ ID NO: 51909 - DNA, 24 bp, Artificial Sequence
  Synthetic
tgaatttgaccuccttgccttuct

SEQ ID NO: 51910 - DNA, 29 bp, Artificial Sequence
  Synthetic
ccatggaggguactgaaataaattcuaca

SEQ ID NO: 51911 - DNA, 20 bp, Artificial Sequence
  Synthetic
cgcctguggaaagggugaag

SEQ ID NO: 51912 - DNA, 24 bp, Artificial Sequence
  Synthetic
cutcaaagtcctuagcacagaggt

SEQ ID NO: 51913 - DNA, 25 bp, Artificial Sequence
  Synthetic
aggaggtttcacugttaggaagcua

SEQ ID NO: 51914 - DNA, 29 bp, Artificial Sequence
  Synthetic
ccttgagagcautatgttttgtctguaac

SEQ ID NO: 51915 - DNA, 28 bp, Artificial Sequence
  Synthetic
tcagaatgaagacaaugagggtactgua

SEQ ID NO: 51916 - DNA, 26 bp, Artificial Sequence
  Synthetic
actctcttgggutgttttcttuggat

SEQ ID NO: 51917 - DNA, 28 bp, Artificial Sequence
  Synthetic
ggcatgagtuattgtcatactuggagaa

SEQ ID NO: 51918 - DNA, 25 bp, Artificial Sequence
  Synthetic
agttttcuccaaacctccctucaag

SEQ ID NO: 51919 - DNA, 27 bp, Artificial Sequence
  Synthetic
aaattgagtgtauctgatccccaugag

SEQ ID NO: 51920 - DNA, 24 bp, Artificial Sequence
  Synthetic
gcagtagtugtcatctgcuccaat

SEQ ID NO: 51921 - DNA, 26 bp, Artificial Sequence
  Synthetic
tcatttctttcaguctgtgggtucag

SEQ ID NO: 51922 - DNA, 25 bp, Artificial Sequence
  Synthetic
aaaatccaaccaguctccctugaaa

SEQ ID NO: 51923 - DNA, 29 bp, Artificial Sequence
  Synthetic
gaagtacaagagcagaugaatctccuaaa

SEQ ID NO: 51924 - DNA, 21 bp, Artificial Sequence
  Synthetic
caggagcugatugggaagacc

SEQ ID NO: 51925 - DNA, 25 bp, Artificial Sequence
  Synthetic
acgguaagaccagctttttgtucat

SEQ ID NO: 51926 - DNA, 18 bp, Artificial Sequence
  Synthetic
cccuccacagagccacut

SEQ ID NO: 51927 - DNA, 19 bp, Artificial Sequence
  Synthetic
cagtgguccagaacgucca

SEQ ID NO: 51928 - DNA, 22 bp, Artificial Sequence
  Synthetic
tgctttccccaauctggtctuc

SEQ ID NO: 51929 - DNA, 20 bp, Artificial Sequence
  Synthetic
gattcugccacgcucaggat

SEQ ID NO: 51930 - DNA, 21 bp, Artificial Sequence
  Synthetic
gctacaacccacucacccuct

SEQ ID NO: 51931 - DNA, 21 bp, Artificial Sequence
  Synthetic
ggtcccuccagcattccuagt

SEQ ID NO: 51932 - DNA, 22 bp, Artificial Sequence
  Synthetic
gggcutggtgttuagaagaaca

SEQ ID NO: 51933 - DNA, 27 bp, Artificial Sequence
  Synthetic
gutctcctctaucacagaaaagacact

SEQ ID NO: 51934 - DNA, 27 bp, Artificial Sequence
  Synthetic
ttttggtgtguttgtctcagatugaac

SEQ ID NO: 51935 - DNA, 29 bp, Artificial Sequence
  Synthetic
gtccattttccucactatattcugcaaga

SEQ ID NO: 51936 - DNA, 23 bp, Artificial Sequence
  Synthetic
ggagcacaucgggaaagaugaaa

SEQ ID NO: 51937 - DNA, 24 bp, Artificial Sequence
  Synthetic
tggccgauctttactttuccagaa

SEQ ID NO: 51938 - DNA, 25 bp, Artificial Sequence
  Synthetic
gaaugttttctgaaguagcccagga

SEQ ID NO: 51939 - DNA, 22 bp, Artificial Sequence
  Synthetic
ggtactugggctgcttttugac

SEQ ID NO: 51940 - DNA, 23 bp, Artificial Sequence
  Synthetic
cagagtgacutgccctcaguaat

SEQ ID NO: 51941 - DNA, 27 bp, Artificial Sequence
  Synthetic
ctgacactccaaaguacttactgtcut

SEQ ID NO: 51942 - DNA, 24 bp, Artificial Sequence
  Synthetic
gaaguatcucccgaacagaaacga

SEQ ID NO: 51943 - DNA, 25 bp, Artificial Sequence
  Synthetic
ttggtgguacaggttttagttcugg

SEQ ID NO: 51944 - DNA, 27 bp, Artificial Sequence
  Synthetic
gatcttctggaugtagtggcaagtaut

SEQ ID NO: 51945 - DNA, 27 bp, Artificial Sequence
  Synthetic
acaggcttccaauatgttaggtctcua

SEQ ID NO: 51946 - DNA, 27 bp, Artificial Sequence
  Synthetic
ccataataacutaagctgaugcccagt

SEQ ID NO: 51947 - DNA, 28 bp, Artificial Sequence
  Synthetic
gctgctgtattcucgaggattactaaut

SEQ ID NO: 51948 - DNA, 21 bp, Artificial Sequence
  Synthetic
gggctccuaagcttgggatut

SEQ ID NO: 51949 - DNA, 28 bp, Artificial Sequence
  Synthetic
ggattctagccacuctaacactttacut

SEQ ID NO: 51950 - DNA, 28 bp, Artificial Sequence
  Synthetic
ctgtctguggagattatgaagtaucacc

SEQ ID NO: 51951 - DNA, 28 bp, Artificial Sequence
  Synthetic
tccatagcaagautttcattgactucct

SEQ ID NO: 51952 - DNA, 23 bp, Artificial Sequence
  Synthetic
tccaagccaggaauaaagctugt

SEQ ID NO: 51953 - DNA, 27 bp, Artificial Sequence
  Synthetic
cttctcugccaccttatgttauaccaa

SEQ ID NO: 51954 - DNA, 21 bp, Artificial Sequence
  Synthetic
catugcacagactcugaggga

SEQ ID NO: 51955 - DNA, 28 bp, Artificial Sequence
  Synthetic
agcagcaccatuaagtatctagacttug

SEQ ID NO: 51956 - DNA, 24 bp, Artificial Sequence
  Synthetic
tctccaagggagaugagcuagaag

SEQ ID NO: 51957 - DNA, 23 bp, Artificial Sequence
  Synthetic
ctaaccacagugagcaguagaca

SEQ ID NO: 51958 - DNA, 22 bp, Artificial Sequence
  Synthetic
cagtaccacautctggugagca

SEQ ID NO: 51959 - DNA, 21 bp, Artificial Sequence
  Synthetic
gcctgautcagcctuggacat

SEQ ID NO: 51960 - DNA, 21 bp, Artificial Sequence
  Synthetic
gagtttcuggcacccactuga

SEQ ID NO: 51961 - DNA, 19 bp, Artificial Sequence
  Synthetic
tctccuagctcccugcgaa

SEQ ID NO: 51962 - DNA, 20 bp, Artificial Sequence
  Synthetic
ggaggaccgggcautcuaag

SEQ ID NO: 51963 - DNA, 28 bp, Artificial Sequence
  Synthetic
cagagggaaactutgaaccatgagtaut

SEQ ID NO: 51964 - DNA, 25 bp, Artificial Sequence
  Synthetic
ggagggaacgaaugatggaugaaag

SEQ ID NO: 51965 - DNA, 20 bp, Artificial Sequence
  Synthetic
ctggttcugagctccgtcug

SEQ ID NO: 51966 - DNA, 23 bp, Artificial Sequence
  Synthetic
caacagatccugcagctctuagt

SEQ ID NO: 51967 - DNA, 27 bp, Artificial Sequence
  Synthetic
tgaactcttcccugaagaaactttguc

SEQ ID NO: 51968 - DNA, 21 bp, Artificial Sequence
  Synthetic
cgcaaggttuccagttgccua

SEQ ID NO: 51969 - DNA, 21 bp, Artificial Sequence
  Synthetic
ggtagactutgtgggcuccat

SEQ ID NO: 51970 - DNA, 21 bp, Artificial Sequence
  Synthetic
ccttctccutcttgccacugt

SEQ ID NO: 51971 - DNA, 18 bp, Artificial Sequence
  Synthetic
tgctctcacucgcaccug

SEQ ID NO: 51972 - DNA, 24 bp, Artificial Sequence
  Synthetic
gctcaagccucttactctcaaugg

SEQ ID NO: 51973 - DNA, 22 bp, Artificial Sequence
  Synthetic
tcttggtggugggtaagtccua

SEQ ID NO: 51974 - DNA, 22 bp, Artificial Sequence
  Synthetic
gttctugaggaagcctggagut

SEQ ID NO: 51975 - DNA, 23 bp, Artificial Sequence
  Synthetic
acctctacttugccaatgtgcuc

SEQ ID NO: 51976 - DNA, 24 bp, Artificial Sequence
  Synthetic
gagctgaatugaactggaggaugt

SEQ ID NO: 51977 - DNA, 21 bp, Artificial Sequence
  Synthetic
cccagatgccauctctctguc

SEQ ID NO: 51978 - DNA, 20 bp, Artificial Sequence
  Synthetic
cggagaacaagucggctgug

SEQ ID NO: 51979 - DNA, 21 bp, Artificial Sequence
  Synthetic
aatgaagtccgucagggctut

SEQ ID NO: 51980 - DNA, 21 bp, Artificial Sequence
  Synthetic
tgggccacauagtggtacuga

SEQ ID NO: 51981 - DNA, 24 bp, Artificial Sequence
  Synthetic
agaaagtaaguttgcacagugcct

SEQ ID NO: 51982 - DNA, 23 bp, Artificial Sequence
  Synthetic
tccagcgucagtattttgauggt

SEQ ID NO: 51983 - DNA, 22 bp, Artificial Sequence
  Synthetic
acautccaaacugaggacagca

SEQ ID NO: 51984 - DNA, 26 bp, Artificial Sequence
  Synthetic
tcacgctuccccaaatttcttauagg

SEQ ID NO: 51985 - DNA, 29 bp, Artificial Sequence
  Synthetic
actatgaaaacaaacugacaaacctcuct

SEQ ID NO: 51986 - DNA, 25 bp, Artificial Sequence
  Synthetic
gttattgttugggagggaagagcua

SEQ ID NO: 51987 - DNA, 28 bp, Artificial Sequence
  Synthetic
aagtgagaacugactgctttcauagaaa

SEQ ID NO: 51988 - DNA, 21 bp, Artificial Sequence
  Synthetic
gcaggctcuctagcatcucaa

SEQ ID NO: 51989 - DNA, 26 bp, Artificial Sequence
  Synthetic
acacttcaccuctgagcataucaaac

SEQ ID NO: 51990 - DNA, 20 bp, Artificial Sequence
  Synthetic
gggcuaaccccaccctcaua

SEQ ID NO: 51991 - DNA, 22 bp, Artificial Sequence
  Synthetic
accatgctaucaccaagcacuc

SEQ ID NO: 51992 - DNA, 20 bp, Artificial Sequence
  Synthetic
acctccaauccagcaccuct

SEQ ID NO: 51993 - DNA, 23 bp, Artificial Sequence
  Synthetic
gcagcctcaguactctcattucc

SEQ ID NO: 51994 - DNA, 26 bp, Artificial Sequence
  Synthetic
gtatcctcugcaggaaagttctacuc

SEQ ID NO: 51995 - DNA, 22 bp, Artificial Sequence
  Synthetic
gtgaauaggcgttctcauccct

SEQ ID NO: 51996 - DNA, 20 bp, Artificial Sequence
  Synthetic
ctgacgcugctgaagacgua

SEQ ID NO: 51997 - DNA, 21 bp, Artificial Sequence
  Synthetic
acccctgaaucaaagctgugt

SEQ ID NO: 51998 - DNA, 27 bp, Artificial Sequence
  Synthetic
tcaactcactugagtcagaatttuggt

SEQ ID NO: 51999 - DNA, 27 bp, Artificial Sequence
  Synthetic
ccacaatccauaacttctcatuaccct

SEQ ID NO: 52000 - DNA, 28 bp, Artificial Sequence
  Synthetic
ggaggatucacttaatctcuacaaagca

SEQ ID NO: 52001 - DNA, 23 bp, Artificial Sequence
  Synthetic
gatgagauaaggctgaggagugg

SEQ ID NO: 52002 - DNA, 24 bp, Artificial Sequence
  Synthetic
catgcataagugccaatccttuga

SEQ ID NO: 52003 - DNA, 29 bp, Artificial Sequence
  Synthetic
acctagtaacuttgctttgtgaugaacat

SEQ ID NO: 52004 - DNA, 19 bp, Artificial Sequence
  Synthetic
ggctcuccaggttcaccut

SEQ ID NO: 52005 - DNA, 28 bp, Artificial Sequence
  Synthetic
ggctgttttgaaagauctcatcagagua

SEQ ID NO: 52006 - DNA, 29 bp, Artificial Sequence
  Synthetic
gttctagtttuccttactgttcucagact

SEQ ID NO: 52007 - DNA, 27 bp, Artificial Sequence
  Synthetic
tctttctggtaacugtccttctgttut

SEQ ID NO: 52008 - DNA, 25 bp, Artificial Sequence
  Synthetic
aattccattcugagtgctcctgtut

SEQ ID NO: 52009 - DNA, 21 bp, Artificial Sequence
  Synthetic
autggttcacguggaccagag

SEQ ID NO: 52010 - DNA, 21 bp, Artificial Sequence
  Synthetic
ggcaaguacccaguacggaac

SEQ ID NO: 52011 - DNA, 23 bp, Artificial Sequence
  Synthetic
ggtactattcugccggttaucca

SEQ ID NO: 52012 - DNA, 21 bp, Artificial Sequence
  Synthetic
ggaatgggucagggagaggut

SEQ ID NO: 52013 - DNA, 25 bp, Artificial Sequence
  Synthetic
ggcatagagugagttctggaacaut

SEQ ID NO: 52014 - DNA, 20 bp, Artificial Sequence
  Synthetic
ggcaagugagtgacgcucaa

SEQ ID NO: 52015 - DNA, 20 bp, Artificial Sequence
  Synthetic
cgggccaaguactcacctuc

SEQ ID NO: 52016 - DNA, 30 bp, Artificial Sequence
  Synthetic
gaagctagaagauccttactagtcugaaga

SEQ ID NO: 52017 - DNA, 23 bp, Artificial Sequence
  Synthetic
agcttgcaugactgccttaugaa

SEQ ID NO: 52018 - DNA, 22 bp, Artificial Sequence
  Synthetic
ccugggaaagcacuggagaaat

SEQ ID NO: 52019 - DNA, 27 bp, Artificial Sequence
  Synthetic
gtaccgaaatgcutagtatctgctuga

SEQ ID NO: 52020 - DNA, 22 bp, Artificial Sequence
  Synthetic
cctaagtcugctacccgtcugt

SEQ ID NO: 52021 - DNA, 22 bp, Artificial Sequence
  Synthetic
ggaatcccuggacctttaccuc

SEQ ID NO: 52022 - DNA, 22 bp, Artificial Sequence
  Synthetic
cactcaggcacuggttttcuca

SEQ ID NO: 52023 - DNA, 21 bp, Artificial Sequence
  Synthetic
atcugtccaggugaaggcaag

SEQ ID NO: 52024 - DNA, 22 bp, Artificial Sequence
  Synthetic
cagacacttgauggcttggcua

SEQ ID NO: 52025 - DNA, 27 bp, Artificial Sequence
  Synthetic
tggtactttcutcaattgcacugacat

SEQ ID NO: 52026 - DNA, 28 bp, Artificial Sequence
  Synthetic
ggatcccagtguatccaatcataatuca

SEQ ID NO: 52027 - DNA, 26 bp, Artificial Sequence
  Synthetic
gtagcagtgcucctaaaccattaugt

SEQ ID NO: 52028 - DNA, 18 bp, Artificial Sequence
  Synthetic
gcgggcugcctgtcuaag

SEQ ID NO: 52029 - DNA, 17 bp, Artificial Sequence
  Synthetic
cgggccucggctactug

SEQ ID NO: 52030 - DNA, 24 bp, Artificial Sequence
  Synthetic
cttaggtuaggaaatgcccaugga

SEQ ID NO: 52031 - DNA, 27 bp, Artificial Sequence
  Synthetic
gaacagauacagacugaaagacacaca

SEQ ID NO: 52032 - DNA, 22 bp, Artificial Sequence
  Synthetic
gtggaggcagutcatgatgcua

SEQ ID NO: 52033 - DNA, 24 bp, Artificial Sequence
  Synthetic
cttttctctccuccccctttcaut

SEQ ID NO: 52034 - DNA, 22 bp, Artificial Sequence
  Synthetic
gttcuccaccagcagtgtguag

SEQ ID NO: 52035 - DNA, 22 bp, Artificial Sequence
  Synthetic
cagctgcauccttcaggaagua

SEQ ID NO: 52036 - DNA, 17 bp, Artificial Sequence
  Synthetic
gtcuccacgcgcctcut

SEQ ID NO: 52037 - DNA, 20 bp, Artificial Sequence
  Synthetic
agcccctttucctcctgcua

SEQ ID NO: 52038 - DNA, 20 bp, Artificial Sequence
  Synthetic
gctcccgcccuttggttaut

SEQ ID NO: 52039 - DNA, 27 bp, Artificial Sequence
  Synthetic
cagacctgacucatcaactcttttuct

SEQ ID NO: 52040 - DNA, 27 bp, Artificial Sequence
  Synthetic
ccactagataaaaugtgttgggtcgut

SEQ ID NO: 52041 - DNA, 22 bp, Artificial Sequence
  Synthetic
cttcactaguaggcagccctuc

SEQ ID NO: 52042 - DNA, 21 bp, Artificial Sequence
  Synthetic
tttcccugcagatgctguacc

SEQ ID NO: 52043 - DNA, 27 bp, Artificial Sequence
  Synthetic
gctgagcaaccuctatcatttuaagca

SEQ ID NO: 52044 - DNA, 18 bp, Artificial Sequence
  Synthetic
tgctcccacucgggucat

SEQ ID NO: 52045 - DNA, 17 bp, Artificial Sequence
  Synthetic
cctccaaugcggtgcuc

SEQ ID NO: 52046 - DNA, 23 bp, Artificial Sequence
  Synthetic
gugaggctaaaugaaagccaact

SEQ ID NO: 52047 - DNA, 28 bp, Artificial Sequence
  Synthetic
gctttgagtcuggaaagatggtatugat

SEQ ID NO: 52048 - DNA, 26 bp, Artificial Sequence
  Synthetic
ccaaaaatauaaagcatcgcgguaca

SEQ ID NO: 52049 - DNA, 25 bp, Artificial Sequence
  Synthetic
tgctctttcttcuctctgcctttuc

SEQ ID NO: 52050 - DNA, 24 bp, Artificial Sequence
  Synthetic
gcaacttataguggagctggcuat

SEQ ID NO: 52051 - DNA, 22 bp, Artificial Sequence
  Synthetic
ggagggatgcaugtcctcagua

SEQ ID NO: 52052 - DNA, 22 bp, Artificial Sequence
  Synthetic
cattattgccugcaatgugcca

SEQ ID NO: 52053 - DNA, 27 bp, Artificial Sequence
  Synthetic
aggaatgcttugtgactagcuaaaaca

SEQ ID NO: 52054 - DNA, 26 bp, Artificial Sequence
  Synthetic
tactaguaagaagaaagagtgcugga

SEQ ID NO: 52055 - DNA, 26 bp, Artificial Sequence
  Synthetic
acaatcaacguagatgggttttccut

SEQ ID NO: 52056 - DNA, 26 bp, Artificial Sequence
  Synthetic
tgattctuggagtgaaatucgggaag

SEQ ID NO: 52057 - DNA, 25 bp, Artificial Sequence
  Synthetic
ccacttcgggucatttcaaacaaut

SEQ ID NO: 52058 - DNA, 22 bp, Artificial Sequence
  Synthetic
gcaggaggugaaatgcaaaugt

SEQ ID NO: 52059 - DNA, 23 bp, Artificial Sequence
  Synthetic
cgggtucttgtatgaugggagag

SEQ ID NO: 52060 - DNA, 25 bp, Artificial Sequence
  Synthetic
cccaggtgcutcttcagaaagtaut

SEQ ID NO: 52061 - DNA, 29 bp, Artificial Sequence
  Synthetic
ccattcgatugcaaactatttagacttut

SEQ ID NO: 52062 - DNA, 21 bp, Artificial Sequence
  Synthetic
acagutgactgcuggaggaag

SEQ ID NO: 52063 - DNA, 28 bp, Artificial Sequence
  Synthetic
cacacaatggauctgtgaacttguagat

SEQ ID NO: 52064 - DNA, 25 bp, Artificial Sequence
  Synthetic
aggaatcuggtggacaguaacaaac

SEQ ID NO: 52065 - DNA, 20 bp, Artificial Sequence
  Synthetic
acacttguggcagcctctuc

SEQ ID NO: 52066 - DNA, 20 bp, Artificial Sequence
  Synthetic
ggacttgtugttgggcgtuc

SEQ ID NO: 52067 - DNA, 28 bp, Artificial Sequence
  Synthetic
tgagatctcttuaaggctctatgttcut

SEQ ID NO: 52068 - DNA, 25 bp, Artificial Sequence
  Synthetic
tctataaggugcgacatgttgcaut

SEQ ID NO: 52069 - DNA, 23 bp, Artificial Sequence
  Synthetic
catggacauggtgttcttugcag

SEQ ID NO: 52070 - DNA, 23 bp, Artificial Sequence
  Synthetic
cttcaccaaacucctcctcuacc

SEQ ID NO: 52071 - DNA, 28 bp, Artificial Sequence
  Synthetic
acggcataacaggaautactaacacaut

SEQ ID NO: 52072 - DNA, 26 bp, Artificial Sequence
  Synthetic
catattccacaauagggccctctauc

SEQ ID NO: 52073 - DNA, 25 bp, Artificial Sequence
  Synthetic
tttgttcagaauggtccaatggcua

SEQ ID NO: 52074 - DNA, 28 bp, Artificial Sequence
  Synthetic
cactaggcatcucaatttttctgacuct

SEQ ID NO: 52075 - DNA, 28 bp, Artificial Sequence
  Synthetic
tgtgatttttggaaaugttggttgtuca

SEQ ID NO: 52076 - DNA, 27 bp, Artificial Sequence
  Synthetic
tgaagctcatcaucaaatatggcauga

SEQ ID NO: 52077 - DNA, 28 bp, Artificial Sequence
  Synthetic
cactttauttacaacagcuccaagacag

SEQ ID NO: 52078 - DNA, 28 bp, Artificial Sequence
  Synthetic
ttcatgaacactutaatgtgttttccuc

SEQ ID NO: 52079 - DNA, 28 bp, Artificial Sequence
  Synthetic
acctagaccaaugatagcttttgttugt

SEQ ID NO: 52080 - DNA, 26 bp, Artificial Sequence
  Synthetic
attgcttctugctgatctugacaaag

SEQ ID NO: 52081 - DNA, 29 bp, Artificial Sequence
  Synthetic
tgtactgccaagutacttacatttucagt

SEQ ID NO: 52082 - DNA, 26 bp, Artificial Sequence
  Synthetic
agtcagtaatgcaugtggaacttugt

SEQ ID NO: 52083 - DNA, 23 bp, Artificial Sequence
  Synthetic
caagctugagccaggagacauaa

SEQ ID NO: 52084 - DNA, 28 bp, Artificial Sequence
  Synthetic
gcctaccaattauagtgaacgttacuct

SEQ ID NO: 52085 - DNA, 27 bp, Artificial Sequence
  Synthetic
gctttgtccagaugaactcttugagaa

SEQ ID NO: 52086 - DNA, 27 bp, Artificial Sequence
  Synthetic
ttgatgatgaugatgttgaccttucca

SEQ ID NO: 52087 - DNA, 26 bp, Artificial Sequence
  Synthetic
gggaaaagtggautgtttctgaagua

SEQ ID NO: 52088 - DNA, 24 bp, Artificial Sequence
  Synthetic
cactcacattcuccttctggacuc

SEQ ID NO: 52089 - DNA, 24 bp, Artificial Sequence
  Synthetic
gatgactccucactactgctcuct

SEQ ID NO: 52090 - DNA, 19 bp, Artificial Sequence
  Synthetic
ccagccagacagcaucuga

SEQ ID NO: 52091 - DNA, 19 bp, Artificial Sequence
  Synthetic
acttgaaggcugggtccug

SEQ ID NO: 52092 - DNA, 26 bp, Artificial Sequence
  Synthetic
ctttttgtagucaaagcgaugagact

SEQ ID NO: 52093 - DNA, 28 bp, Artificial Sequence
  Synthetic
tctttcagctccuactaccacttcatua

SEQ ID NO: 52094 - DNA, 17 bp, Artificial Sequence
  Synthetic
aggguccttggcugggt

SEQ ID NO: 52095 - DNA, 17 bp, Artificial Sequence
  Synthetic
ccctccucctgcaugct

SEQ ID NO: 52096 - DNA, 24 bp, Artificial Sequence
  Synthetic
aacaattttggccugtggactcua

SEQ ID NO: 52097 - DNA, 21 bp, Artificial Sequence
  Synthetic
aagutctgacugagccaaggg

SEQ ID NO: 52098 - DNA, 22 bp, Artificial Sequence
  Synthetic
gctgggucaaagatcctugcat

SEQ ID NO: 52099 - DNA, 28 bp, Artificial Sequence
  Synthetic
agaaatgattucttaccttcugagcaca

SEQ ID NO: 52100 - DNA, 21 bp, Artificial Sequence
  Synthetic
gggttgcutgcctuacagaaa

SEQ ID NO: 52101 - DNA, 21 bp, Artificial Sequence
  Synthetic
cgtggctutgggaactuggat

SEQ ID NO: 52102 - DNA, 28 bp, Artificial Sequence
  Synthetic
tcaggacaaaaauaaggagaucgagaga

SEQ ID NO: 52103 - DNA, 20 bp, Artificial Sequence
  Synthetic
ccgguagccactggtaucct

SEQ ID NO: 52104 - DNA, 21 bp, Artificial Sequence
  Synthetic
gtccctguccttgtacugcac

SEQ ID NO: 52105 - DNA, 21 bp, Artificial Sequence
  Synthetic
tcaccttctcugtcccctcut

SEQ ID NO: 52106 - DNA, 21 bp, Artificial Sequence
  Synthetic
cccctgtgcauccttgtacug

SEQ ID NO: 52107 - DNA, 20 bp, Artificial Sequence
  Synthetic
acctggcuggatctcctugt

SEQ ID NO: 52108 - DNA, 21 bp, Artificial Sequence
  Synthetic
gtccatcccugtccctguact

SEQ ID NO: 52109 - DNA, 23 bp, Artificial Sequence
  Synthetic
ttcctatgugggatttggctucc

SEQ ID NO: 52110 - DNA, 24 bp, Artificial Sequence
  Synthetic
gcagatuccctctctaguccagat

SEQ ID NO: 52111 - DNA, 22 bp, Artificial Sequence
  Synthetic
agcctaugaccagagaggacug

SEQ ID NO: 52112 - DNA, 20 bp, Artificial Sequence
  Synthetic
agccctcugagtccacguaa

SEQ ID NO: 52113 - DNA, 20 bp, Artificial Sequence
  Synthetic
ctgtcctggugccgtagaug

SEQ ID NO: 52114 - DNA, 20 bp, Artificial Sequence
  Synthetic
aggacacgguaaagctgcug

SEQ ID NO: 52115 - DNA, 23 bp, Artificial Sequence
  Synthetic
ccctcttatgagutcccccatut

SEQ ID NO: 52116 - DNA, 27 bp, Artificial Sequence
  Synthetic
tctttcctggucattttgtcatcauca

SEQ ID NO: 52117 - DNA, 26 bp, Artificial Sequence
  Synthetic
ctgtgttcacagugtggtttgattua

SEQ ID NO: 52118 - DNA, 22 bp, Artificial Sequence
  Synthetic
gggaggaagauccatcccauct

SEQ ID NO: 52119 - DNA, 23 bp, Artificial Sequence
  Synthetic
gctcttgacaaucgtctcctuct

SEQ ID NO: 52120 - DNA, 24 bp, Artificial Sequence
  Synthetic
acttatagcaugacaccaggccua

SEQ ID NO: 52121 - DNA, 27 bp, Artificial Sequence
  Synthetic
ttcaggtgcutgatgatatugagaagt

SEQ ID NO: 52122 - DNA, 23 bp, Artificial Sequence
  Synthetic
tctatttccugcttgugccacat

SEQ ID NO: 52123 - DNA, 29 bp, Artificial Sequence
  Synthetic
tctgggctcacutaatagagaaaatgtut

SEQ ID NO: 52124 - DNA, 27 bp, Artificial Sequence
  Synthetic
aggtttaatttacucaccttggugcaa

SEQ ID NO: 52125 - DNA, 23 bp, Artificial Sequence
  Synthetic
tggauaccataugcaggaagcag

SEQ ID NO: 52126 - DNA, 28 bp, Artificial Sequence
  Synthetic
ggatggttcuggaggaaaaatgtatgua

SEQ ID NO: 52127 - DNA, 27 bp, Artificial Sequence
  Synthetic
gagcagttatuccagttcttgcaaaut

SEQ ID NO: 52128 - DNA, 20 bp, Artificial Sequence
  Synthetic
catccacagugggtctcucc

SEQ ID NO: 52129 - DNA, 26 bp, Artificial Sequence
  Synthetic
tggtcccacutacaacugaacaaaaa

SEQ ID NO: 52130 - DNA, 24 bp, Artificial Sequence
  Synthetic
caaaaucucaagcagaagcaacct

SEQ ID NO: 52131 - DNA, 24 bp, Artificial Sequence
  Synthetic
cttacctggcuttcattcctcuga

SEQ ID NO: 52132 - DNA, 24 bp, Artificial Sequence
  Synthetic
ctatugaagaaccagucacagcct

SEQ ID NO: 52133 - DNA, 28 bp, Artificial Sequence
  Synthetic
gggttccttacuaaatgagcactatugt

SEQ ID NO: 52134 - DNA, 28 bp, Artificial Sequence
  Synthetic
catgtcttuaacctctaactuccaaggg

SEQ ID NO: 52135 - DNA, 26 bp, Artificial Sequence
  Synthetic
tctccacagaauttccgtctctauca

SEQ ID NO: 52136 - DNA, 24 bp, Artificial Sequence
  Synthetic
agtcutgcttgacauacagcagaa

SEQ ID NO: 52137 - DNA, 27 bp, Artificial Sequence
  Synthetic
tccacagattucagttgtgttcgtuat

SEQ ID NO: 52138 - DNA, 23 bp, Artificial Sequence
  Synthetic
gtagaccgtucttgttcgtcuga

SEQ ID NO: 52139 - DNA, 24 bp, Artificial Sequence
  Synthetic
ccagccaaaauggtgaaactgaug

SEQ ID NO: 52140 - DNA, 22 bp, Artificial Sequence
  Synthetic
ggttgtggaugccattctucca

SEQ ID NO: 52141 - DNA, 28 bp, Artificial Sequence
  Synthetic
tgtaaaatacagcuacccgaaaaugact

SEQ ID NO: 52142 - DNA, 27 bp, Artificial Sequence
  Synthetic
ttgtcaaagagaucagcataaucagca

SEQ ID NO: 52143 - DNA, 28 bp, Artificial Sequence
  Synthetic
tttggtgacguggatgatactttcuaat

SEQ ID NO: 52144 - DNA, 24 bp, Artificial Sequence
  Synthetic
caggagagaaaaaggugcaaagut

SEQ ID NO: 52145 - DNA, 23 bp, Artificial Sequence
  Synthetic
cgctcatagacugctctctctut

SEQ ID NO: 52146 - DNA, 21 bp, Artificial Sequence
  Synthetic
tcaattgggccucttggctut

SEQ ID NO: 52147 - DNA, 25 bp, Artificial Sequence
  Synthetic
gaaggagcaagutggcataaagaut

SEQ ID NO: 52148 - DNA, 17 bp, Artificial Sequence
  Synthetic
ccgcgacugucgaggat

SEQ ID NO: 52149 - DNA, 22 bp, Artificial Sequence
  Synthetic
aggtuccagagagucaggaagt

SEQ ID NO: 52150 - DNA, 24 bp, Artificial Sequence
  Synthetic
aacgcuaaacagaaagagcugaga

SEQ ID NO: 52151 - DNA, 27 bp, Artificial Sequence
  Synthetic
cctcttgcttugccaaacatttatcut

SEQ ID NO: 52152 - DNA, 27 bp, Artificial Sequence
  Synthetic
cttgagagaaatgucaaagaagtggug

SEQ ID NO: 52153 - DNA, 28 bp, Artificial Sequence
  Synthetic
aaaccaacuccagcttgttcaaaauaaa

SEQ ID NO: 52154 - DNA, 27 bp, Artificial Sequence
  Synthetic
gggaaatauggacagaagaaaaucaga

SEQ ID NO: 52155 - DNA, 28 bp, Artificial Sequence
  Synthetic
caaccgtcaaacaacuttacacatguat

SEQ ID NO: 52156 - DNA, 28 bp, Artificial Sequence
  Synthetic
actctcccttugaagaattaccttggua

SEQ ID NO: 52157 - DNA, 26 bp, Artificial Sequence
  Synthetic
actttgttgaugacattcaccacuct

SEQ ID NO: 52158 - DNA, 25 bp, Artificial Sequence
  Synthetic
agcttttcugtgttcctttucaggt

SEQ ID NO: 52159 - DNA, 28 bp, Artificial Sequence
  Synthetic
atcagaactagaacgutaaatggcguaa

SEQ ID NO: 52160 - DNA, 28 bp, Artificial Sequence
  Synthetic
acaaaatttgtgcutgatgggtataugg

SEQ ID NO: 52161 - DNA, 21 bp, Artificial Sequence
  Synthetic
cctgcgacggaaauttcacug

SEQ ID NO: 52162 - DNA, 25 bp, Artificial Sequence
  Synthetic
acaagaacttucgccttatcctuca

SEQ ID NO: 52163 - DNA, 27 bp, Artificial Sequence
  Synthetic
gtgttggtggugacgtaaacattttua

SEQ ID NO: 52164 - DNA, 23 bp, Artificial Sequence
  Synthetic
ctgttugagaaggacaagcucac

SEQ ID NO: 52165 - DNA, 21 bp, Artificial Sequence
  Synthetic
aaautcccctcaugccaccaa

SEQ ID NO: 52166 - DNA, 27 bp, Artificial Sequence
  Synthetic
gtatcgttcacaccautcctacttgut

SEQ ID NO: 52167 - DNA, 28 bp, Artificial Sequence
  Synthetic
gtaatttttcttuttctggacacucgga

SEQ ID NO: 52168 - DNA, 25 bp, Artificial Sequence
  Synthetic
cgaagtatguggagaggaccagaut

SEQ ID NO: 52169 - DNA, 26 bp, Artificial Sequence
  Synthetic
agaucactgtgaacugaaaagaaggg

SEQ ID NO: 52170 - DNA, 26 bp, Artificial Sequence
  Synthetic
cctgaagtcaugcttcatcttgaaug

SEQ ID NO: 52171 - DNA, 25 bp, Artificial Sequence
  Synthetic
ttgagaagatgugttactcgctuga

SEQ ID NO: 52172 - DNA, 26 bp, Artificial Sequence
  Synthetic
ccttaggtttaugatgctgcagucag

SEQ ID NO: 52173 - DNA, 28 bp, Artificial Sequence
  Synthetic
ctggctacaugatcaggttataaauggt

SEQ ID NO: 52174 - DNA, 25 bp, Artificial Sequence
  Synthetic
acttgttutacatgtgaucccacga

SEQ ID NO: 52175 - DNA, 28 bp, Artificial Sequence
  Synthetic
ggccactguatttaaacacauagaggat

SEQ ID NO: 52176 - DNA, 20 bp, Artificial Sequence
  Synthetic
aaccagutgtauggcagcga

SEQ ID NO: 52177 - DNA, 27 bp, Artificial Sequence
  Synthetic
tgtttcctgttutgcttttctgatugt

SEQ ID NO: 52178 - DNA, 20 bp, Artificial Sequence
  Synthetic
tcucccacagggaacgugat

SEQ ID NO: 52179 - DNA, 17 bp, Artificial Sequence
  Synthetic
cgctuccgcaccuccag

SEQ ID NO: 52180 - DNA, 21 bp, Artificial Sequence
  Synthetic
actccctgucctccagctuag

SEQ ID NO: 52181 - DNA, 22 bp, Artificial Sequence
  Synthetic
gaagctgggcugaaggacuaaa

SEQ ID NO: 52182 - DNA, 19 bp, Artificial Sequence
  Synthetic
tgggcaggacaccucctua

SEQ ID NO: 52183 - DNA, 20 bp, Artificial Sequence
  Synthetic
ctccgccuaactccctcauc

SEQ ID NO: 52184 - DNA, 28 bp, Artificial Sequence
  Synthetic
gcttgccttcucaaagtaaaagatgaut

SEQ ID NO: 52185 - DNA, 28 bp, Artificial Sequence
  Synthetic
ccatgagttcugttgtatcctttucaac

SEQ ID NO: 52186 - DNA, 29 bp, Artificial Sequence
  Synthetic
tgagtgaucaagaatgtgugaagagaaat

SEQ ID NO: 52187 - DNA, 26 bp, Artificial Sequence
  Synthetic
ttcttcatuagcggtttctactugct

SEQ ID NO: 52188 - DNA, 28 bp, Artificial Sequence
  Synthetic
attacaaagaugcaacugcaaagagaag

SEQ ID NO: 52189 - DNA, 25 bp, Artificial Sequence
  Synthetic
tctggctgaguttcaagtgugaaaa

SEQ ID NO: 52190 - DNA, 27 bp, Artificial Sequence
  Synthetic
gaagaaagcaugggatauaagggagaa

SEQ ID NO: 52191 - DNA, 29 bp, Artificial Sequence
  Synthetic
ctggccagtuaatttctgtagttguaaaa

SEQ ID NO: 52192 - DNA, 25 bp, Artificial Sequence
  Synthetic
caagtacttcutgtggctcatugac

SEQ ID NO: 52193 - DNA, 28 bp, Artificial Sequence
  Synthetic
gcagaaatgauaagcatgcactaatuct

SEQ ID NO: 52194 - DNA, 25 bp, Artificial Sequence
  Synthetic
tctcugcaaaacccatatuccaact

SEQ ID NO: 52195 - DNA, 21 bp, Artificial Sequence
  Synthetic
gcccaatuggaggcctuacat

SEQ ID NO: 52196 - DNA, 25 bp, Artificial Sequence
  Synthetic
cctacttgcacauagaaaggtcuga

SEQ ID NO: 52197 - DNA, 28 bp, Artificial Sequence
  Synthetic
aagttagcaauacgtaagacacctuacc

SEQ ID NO: 52198 - DNA, 28 bp, Artificial Sequence
  Synthetic
cagatatgctguttcattatttgcuggt

SEQ ID NO: 52199 - DNA, 24 bp, Artificial Sequence
  Synthetic
tccccatacuccacctttgtttuc

SEQ ID NO: 52200 - DNA, 28 bp, Artificial Sequence
  Synthetic
catctgcaauaaagacagaguccaaaac

SEQ ID NO: 52201 - DNA, 24 bp, Artificial Sequence
  Synthetic
tccagcaaatguctcacaaaggua

SEQ ID NO: 52202 - DNA, 23 bp, Artificial Sequence
  Synthetic
caattttggaugaccttcugcct

SEQ ID NO: 52203 - DNA, 28 bp, Artificial Sequence
  Synthetic
acaggactucaaccctcaatcaaauaaa

SEQ ID NO: 52204 - DNA, 22 bp, Artificial Sequence
  Synthetic
tcttgctgugcagcatcugaat

SEQ ID NO: 52205 - DNA, 27 bp, Artificial Sequence
  Synthetic
gggtcctgcacaguattttgtctttua

SEQ ID NO: 52206 - DNA, 19 bp, Artificial Sequence
  Synthetic
gggtcccucgccaauacag

SEQ ID NO: 52207 - DNA, 23 bp, Artificial Sequence
  Synthetic
cgaccucacgggctattuaaagg

SEQ ID NO: 52208 - DNA, 24 bp, Artificial Sequence
  Synthetic
gcaggagugctatttagcaucgag

SEQ ID NO: 52209 - DNA, 24 bp, Artificial Sequence
  Synthetic
caccccatucccagcttttctaut

SEQ ID NO: 52210 - DNA, 19 bp, Artificial Sequence
  Synthetic
tggaaccugccugaggaca

SEQ ID NO: 52211 - DNA, 19 bp, Artificial Sequence
  Synthetic
tcttccagcccuggacuct

SEQ ID NO: 52212 - DNA, 17 bp, Artificial Sequence
  Synthetic
gtccgagccgugtcugt

SEQ ID NO: 52213 - DNA, 18 bp, Artificial Sequence
  Synthetic
ccatggccucttcgccug

SEQ ID NO: 52214 - DNA, 20 bp, Artificial Sequence
  Synthetic
gccgtcgutgcagtagauga

SEQ ID NO: 52215 - DNA, 22 bp, Artificial Sequence
  Synthetic
gctgtgtgaguggagaatgugg

SEQ ID NO: 52216 - DNA, 28 bp, Artificial Sequence
  Synthetic
cgctaaaaacuacttacaaaaagcugga

SEQ ID NO: 52217 - DNA, 26 bp, Artificial Sequence
  Synthetic
ttttctcgaaagccucctaacaacut

SEQ ID NO: 52218 - DNA, 18 bp, Artificial Sequence
  Synthetic
cutgaccugcgagggaga

SEQ ID NO: 52219 - DNA, 17 bp, Artificial Sequence
  Synthetic
ccgcccuggagguagga

SEQ ID NO: 52220 - DNA, 26 bp, Artificial Sequence
  Synthetic
caccttttactuggacatgaagcaut

SEQ ID NO: 52221 - DNA, 22 bp, Artificial Sequence
  Synthetic
ctgagagaugggcaucagaagg

SEQ ID NO: 52222 - DNA, 21 bp, Artificial Sequence
  Synthetic
gctaaaguccccggagactuc

SEQ ID NO: 52223 - DNA, 28 bp, Artificial Sequence
  Synthetic
ggttuaacagaaggaaucaacacagaaa

SEQ ID NO: 52224 - DNA, 17 bp, Artificial Sequence
  Synthetic
agccgcguggacatuca

SEQ ID NO: 52225 - DNA, 20 bp, Artificial Sequence
  Synthetic
gctgcugttcatccuaccca

SEQ ID NO: 52226 - DNA, 22 bp, Artificial Sequence
  Synthetic
cacagggucactcttgagaugg

SEQ ID NO: 52227 - DNA, 21 bp, Artificial Sequence
  Synthetic
ccaaggacaugctcccactug

SEQ ID NO: 52228 - DNA, 28 bp, Artificial Sequence
  Synthetic
agttccaggttugtgcatttatgtauga

SEQ ID NO: 52229 - DNA, 29 bp, Artificial Sequence
  Synthetic
ccatgacagcaacautatctcttcttuct

SEQ ID NO: 52230 - DNA, 21 bp, Artificial Sequence
  Synthetic
tgaagattugcgccctuacga

SEQ ID NO: 52231 - DNA, 29 bp, Artificial Sequence
  Synthetic
tctttggacacaautcttcattagctuga

SEQ ID NO: 52232 - DNA, 25 bp, Artificial Sequence
  Synthetic
aaatccttttautgccaccucagga

SEQ ID NO: 52233 - DNA, 22 bp, Artificial Sequence
  Synthetic
gtctggcuccgagaacuaaagt

SEQ ID NO: 52234 - DNA, 22 bp, Artificial Sequence
  Synthetic
gcctggauaaagctgtgcuaca

SEQ ID NO: 52235 - DNA, 28 bp, Artificial Sequence
  Synthetic
aggtcgaaaaataaucaaaggctgagua

SEQ ID NO: 52236 - DNA, 25 bp, Artificial Sequence
  Synthetic
gctgtucccaaacaactagacatug

SEQ ID NO: 52237 - DNA, 23 bp, Artificial Sequence
  Synthetic
tccgggagaaggaaugtttctug

SEQ ID NO: 52238 - DNA, 24 bp, Artificial Sequence
  Synthetic
ccaaaaugaacaagcacgagcaut

SEQ ID NO: 52239 - DNA, 28 bp, Artificial Sequence
  Synthetic
tcaggaagtagtucatcatgtgctttua

SEQ ID NO: 52240 - DNA, 27 bp, Artificial Sequence
  Synthetic
attccaaacacaccaguatttcctcut

SEQ ID NO: 52241 - DNA, 28 bp, Artificial Sequence
  Synthetic
ctgcctagtcuggatttttctctuaagt

SEQ ID NO: 52242 - DNA, 23 bp, Artificial Sequence
  Synthetic
aagaccacagugttgcataaugt

SEQ ID NO: 52243 - DNA, 25 bp, Artificial Sequence
  Synthetic
ggcagatcaautttcggcttttuga

SEQ ID NO: 52244 - DNA, 22 bp, Artificial Sequence
  Synthetic
tcttttcacagggcucgcttua

SEQ ID NO: 52245 - DNA, 28 bp, Artificial Sequence
  Synthetic
caggattttgatuctccttgcctuaaaa

SEQ ID NO: 52246 - DNA, 26 bp, Artificial Sequence
  Synthetic
cttctccacaucatctaccaaucaca

SEQ ID NO: 52247 - DNA, 27 bp, Artificial Sequence
  Synthetic
gaaagagaucaggcaacagtgattcua

SEQ ID NO: 52248 - DNA, 23 bp, Artificial Sequence
  Synthetic
agctgtcugggtaaagatugcac

SEQ ID NO: 52249 - DNA, 23 bp, Artificial Sequence
  Synthetic
ggcagagcugtaggaacuaacac

SEQ ID NO: 52250 - DNA, 19 bp, Artificial Sequence
  Synthetic
ctgggctauggcactguga

SEQ ID NO: 52251 - DNA, 23 bp, Artificial Sequence
  Synthetic
gtagggacucagtgaagucagga

SEQ ID NO: 52252 - DNA, 19 bp, Artificial Sequence
  Synthetic
ggagcagcaugtggacuct

SEQ ID NO: 52253 - DNA, 17 bp, Artificial Sequence
  Synthetic
cccggcgcggauactua

SEQ ID NO: 52254 - DNA, 27 bp, Artificial Sequence
  Synthetic
cacaggcaagaauaattaactcagcuc

SEQ ID NO: 52255 - DNA, 23 bp, Artificial Sequence
  Synthetic
gaaacagagguaguccagcacat

SEQ ID NO: 52256 - DNA, 23 bp, Artificial Sequence
  Synthetic
taggaccagaugtctgagucgat

SEQ ID NO: 52257 - DNA, 21 bp, Artificial Sequence
  Synthetic
gaguacctauccagccaccac

SEQ ID NO: 52258 - DNA, 25 bp, Artificial Sequence
  Synthetic
acacaggacaaaauaacgugagcat

SEQ ID NO: 52259 - DNA, 21 bp, Artificial Sequence
  Synthetic
gaaaaagccautggccaccuc

SEQ ID NO: 52260 - DNA, 24 bp, Artificial Sequence
  Synthetic
acaaggacugggagtgaagauact

SEQ ID NO: 52261 - DNA, 20 bp, Artificial Sequence
  Synthetic
ccaggutcucagcggaagac

SEQ ID NO: 52262 - DNA, 19 bp, Artificial Sequence
  Synthetic
cgtccauacccgcuggaaa

SEQ ID NO: 52263 - DNA, 19 bp, Artificial Sequence
  Synthetic
gugcatuccacaggccaag

SEQ ID NO: 52264 - DNA, 20 bp, Artificial Sequence
  Synthetic
ctgggatttcugcccgagut

SEQ ID NO: 52265 - DNA, 20 bp, Artificial Sequence
  Synthetic
ggtcucaaaggccgagaugg

SEQ ID NO: 52266 - DNA, 23 bp, Artificial Sequence
  Synthetic
gacacgaaugaacctccttucct

SEQ ID NO: 52267 - DNA, 21 bp, Artificial Sequence
  Synthetic
ctttcugaggccaacctguct

SEQ ID NO: 52268 - DNA, 22 bp, Artificial Sequence
  Synthetic
gccacgttugacctgagatcut

SEQ ID NO: 52269 - DNA, 24 bp, Artificial Sequence
  Synthetic
ccugtcctttaaatucaccaccct

SEQ ID NO: 52270 - DNA, 24 bp, Artificial Sequence
  Synthetic
tccatggucaatgacctucgaaaa

SEQ ID NO: 52271 - DNA, 21 bp, Artificial Sequence
  Synthetic
gugagaaccccacagtuacct

SEQ ID NO: 52272 - DNA, 20 bp, Artificial Sequence
  Synthetic
ccgtacuagcggctcatgut

SEQ ID NO: 52273 - DNA, 21 bp, Artificial Sequence
  Synthetic
caaacaaccgcaaaucugcca

SEQ ID NO: 52274 - DNA, 21 bp, Artificial Sequence
  Synthetic
ggtctcagucaggttgcugat

SEQ ID NO: 52275 - DNA, 23 bp, Artificial Sequence
  Synthetic
tgggagutcaucacaaagaacca

SEQ ID NO: 52276 - DNA, 21 bp, Artificial Sequence
  Synthetic
cggcauggaagagatctucgg

SEQ ID NO: 52277 - DNA, 21 bp, Artificial Sequence
  Synthetic
ctgaacugtcctugccacact

SEQ ID NO: 52278 - DNA, 23 bp, Artificial Sequence
  Synthetic
agggacagtgutgttttgctcut

SEQ ID NO: 52279 - DNA, 26 bp, Artificial Sequence
  Synthetic
tcaaggtgaaacaucatgctgtuaga

SEQ ID NO: 52280 - DNA, 28 bp, Artificial Sequence
  Synthetic
gcatacacttcuatcccctttgatuaga

SEQ ID NO: 52281 - DNA, 27 bp, Artificial Sequence
  Synthetic
cgggagaggagaguttaaaaagctuaa

SEQ ID NO: 52282 - DNA, 28 bp, Artificial Sequence
  Synthetic
agctaggttagacutcatttcagcttut

SEQ ID NO: 52283 - DNA, 24 bp, Artificial Sequence
  Synthetic
cttgactggtuccacactaggtuc

SEQ ID NO: 52284 - DNA, 21 bp, Artificial Sequence
  Synthetic
gccttggcutggtcccuaaac

SEQ ID NO: 52285 - DNA, 20 bp, Artificial Sequence
  Synthetic
tcacugagacggcggaaaut

SEQ ID NO: 52286 - DNA, 28 bp, Artificial Sequence
  Synthetic
gtgaattttctugcagacttcagttugt

SEQ ID NO: 52287 - DNA, 28 bp, Artificial Sequence
  Synthetic
ctgtgtcacaacutgtttccttacatut

SEQ ID NO: 52288 - DNA, 28 bp, Artificial Sequence
  Synthetic
tcttgaagaatauccagcacagtcatut

SEQ ID NO: 52289 - DNA, 21 bp, Artificial Sequence
  Synthetic
guggaagaagaagccaaugcc

SEQ ID NO: 52290 - DNA, 29 bp, Artificial Sequence
  Synthetic
cacaccaaggaacauacctgtagattuaa

SEQ ID NO: 52291 - DNA, 28 bp, Artificial Sequence
  Synthetic
cgtaaccatctucttttcctctcttuct

SEQ ID NO: 52292 - DNA, 28 bp, Artificial Sequence
  Synthetic
catactcccugaaaatagttucggacat

SEQ ID NO: 52293 - DNA, 23 bp, Artificial Sequence
  Synthetic
tgattgccguccactcacttauc

SEQ ID NO: 52294 - DNA, 23 bp, Artificial Sequence
  Synthetic
caaactcaaguccctcctctcut

SEQ ID NO: 52295 - DNA, 21 bp, Artificial Sequence
  Synthetic
tcagagccugagatgccuact

SEQ ID NO: 52296 - DNA, 21 bp, Artificial Sequence
  Synthetic
ctcctgcaaccugtctgtgut

SEQ ID NO: 52297 - DNA, 22 bp, Artificial Sequence
  Synthetic
tggaccucccacaatttgtgug

SEQ ID NO: 52298 - DNA, 25 bp, Artificial Sequence
  Synthetic
ggaattcatuccctacttggtcugg

SEQ ID NO: 52299 - DNA, 19 bp, Artificial Sequence
  Synthetic
tcgttguccgtgcagtuca

SEQ ID NO: 52300 - DNA, 19 bp, Artificial Sequence
  Synthetic
gcctacaacgugccccaut

SEQ ID NO: 52301 - DNA, 21 bp, Artificial Sequence
  Synthetic
aggcauaagggaggtccucag

SEQ ID NO: 52302 - DNA, 23 bp, Artificial Sequence
  Synthetic
guaatgccaccaucgacagagag

SEQ ID NO: 52303 - DNA, 19 bp, Artificial Sequence
  Synthetic
cgtggtcaauggccgugat

SEQ ID NO: 52304 - DNA, 22 bp, Artificial Sequence
  Synthetic
gggtcaguttcccuaccagagt

SEQ ID NO: 52305 - DNA, 23 bp, Artificial Sequence
  Synthetic
acuataccttttugccagcacca

SEQ ID NO: 52306 - DNA, 17 bp, Artificial Sequence
  Synthetic
agcgccuctcccgtcua

SEQ ID NO: 52307 - DNA, 20 bp, Artificial Sequence
  Synthetic
cctcagcauctccctccuct

SEQ ID NO: 52308 - DNA, 25 bp, Artificial Sequence
  Synthetic
tgacagaugatagcttcucccagaa

SEQ ID NO: 52309 - DNA, 20 bp, Artificial Sequence
  Synthetic
gctggaccauaccggaugac

SEQ ID NO: 52310 - DNA, 24 bp, Artificial Sequence
  Synthetic
cacatagguaacgagtcagagcut

SEQ ID NO: 52311 - DNA, 22 bp, Artificial Sequence
  Synthetic
cagaugtggaucagcaaacagg

SEQ ID NO: 52312 - DNA, 23 bp, Artificial Sequence
  Synthetic
ccctcccauaagaccaggagaut

SEQ ID NO: 52313 - DNA, 21 bp, Artificial Sequence
  Synthetic
ctcctcauactcctgcaugct

SEQ ID NO: 52314 - DNA, 23 bp, Artificial Sequence
  Synthetic
aatgtgtctuccagcactgaugt

SEQ ID NO: 52315 - DNA, 25 bp, Artificial Sequence
  Synthetic
ttccaagatgucttcttccatgucc

SEQ ID NO: 52316 - DNA, 20 bp, Artificial Sequence
  Synthetic
tggcaaggugagcatgtuct

SEQ ID NO: 52317 - DNA, 21 bp, Artificial Sequence
  Synthetic
cagaccccuctctgacctcuc

SEQ ID NO: 52318 - DNA, 20 bp, Artificial Sequence
  Synthetic
ctctgcccguccttctugaa

SEQ ID NO: 52319 - DNA, 25 bp, Artificial Sequence
  Synthetic
gtttgagugtgaagtaucggaggag

SEQ ID NO: 52320 - DNA, 20 bp, Artificial Sequence
  Synthetic
ctgatggucagggtacgcut

SEQ ID NO: 52321 - DNA, 23 bp, Artificial Sequence
  Synthetic
agcaagtaagutcccctcuggat

SEQ ID NO: 52322 - DNA, 21 bp, Artificial Sequence
  Synthetic
gctgttctuctcgcctaugga

SEQ ID NO: 52323 - DNA, 22 bp, Artificial Sequence
  Synthetic
actttgttctcaucccccacug

SEQ ID NO: 52324 - DNA, 20 bp, Artificial Sequence
  Synthetic
ctcauggcccggtactucag

SEQ ID NO: 52325 - DNA, 25 bp, Artificial Sequence
  Synthetic
ccctacctgcugttagagaaaccua

SEQ ID NO: 52326 - DNA, 20 bp, Artificial Sequence
  Synthetic
gttgaacccauccuggaggt

SEQ ID NO: 52327 - DNA, 21 bp, Artificial Sequence
  Synthetic
agtaacagguccugggcagaa

SEQ ID NO: 52328 - DNA, 21 bp, Artificial Sequence
  Synthetic
ctgcagucccatgaucaccat

SEQ ID NO: 52329 - DNA, 20 bp, Artificial Sequence
  Synthetic
agactugaaggcguccacag

SEQ ID NO: 52330 - DNA, 19 bp, Artificial Sequence
  Synthetic
ccaucggcggatgtguagg

SEQ ID NO: 52331 - DNA, 21 bp, Artificial Sequence
  Synthetic
cctggtgggcuactacatcut

SEQ ID NO: 52332 - DNA, 20 bp, Artificial Sequence
  Synthetic
actcucagcctcuggacaca

SEQ ID NO: 52333 - DNA, 18 bp, Artificial Sequence
  Synthetic
cctgctugagcggtuccc

SEQ ID NO: 52334 - DNA, 17 bp, Artificial Sequence
  Synthetic
tgccccugctgccttut

SEQ ID NO: 52335 - DNA, 20 bp, Artificial Sequence
  Synthetic
cagaccuagaagccggugac

SEQ ID NO: 52336 - DNA, 22 bp, Artificial Sequence
  Synthetic
tgcagaccutgtgaggacuaga

SEQ ID NO: 52337 - DNA, 22 bp, Artificial Sequence
  Synthetic
caaguggtgcatuggacagaag

SEQ ID NO: 52338 - DNA, 29 bp, Artificial Sequence
  Synthetic
ttctcagacugacggattaaatuccaaat

SEQ ID NO: 52339 - DNA, 24 bp, Artificial Sequence
  Synthetic
agtgttggacutggttgtctctut

SEQ ID NO: 52340 - DNA, 28 bp, Artificial Sequence
  Synthetic
aggatttcguaatattgccgucaaagaa

SEQ ID NO: 52341 - DNA, 29 bp, Artificial Sequence
  Synthetic
ttctgatagttugaaaggaatagtugcat

SEQ ID NO: 52342 - DNA, 26 bp, Artificial Sequence
  Synthetic
gcttttggtctuctaagtgaagctut

SEQ ID NO: 52343 - DNA, 28 bp, Artificial Sequence
  Synthetic
gcagctacuacccagctaaaattaucat

SEQ ID NO: 52344 - DNA, 23 bp, Artificial Sequence
  Synthetic
ctggcttttucctgcgattgtua

SEQ ID NO: 52345 - DNA, 28 bp, Artificial Sequence
  Synthetic
cctggccttaauttccacatttguaaaa

SEQ ID NO: 52346 - DNA, 24 bp, Artificial Sequence
  Synthetic
tgctttuaaaggagcttccuggag

SEQ ID NO: 52347 - DNA, 27 bp, Artificial Sequence
  Synthetic
tttacaaacatctuggtcacgacgaua

SEQ ID NO: 52348 - DNA, 26 bp, Artificial Sequence
  Synthetic
gcttcagcaaacagcutttgaaaaug

SEQ ID NO: 52349 - DNA, 28 bp, Artificial Sequence
  Synthetic
cagttgtttuagagcagctttatacugt

SEQ ID NO: 52350 - DNA, 28 bp, Artificial Sequence
  Synthetic
acgtttagaagacuttatggcatcucat

SEQ ID NO: 52351 - DNA, 21 bp, Artificial Sequence
  Synthetic
gtatgtgugttgctggugagg

SEQ ID NO: 52352 - DNA, 21 bp, Artificial Sequence
  Synthetic
tgctcagugttgguggacaag

SEQ ID NO: 52353 - DNA, 28 bp, Artificial Sequence
  Synthetic
ccctacttaaaguatgttggcaggtuaa

SEQ ID NO: 52354 - DNA, 19 bp, Artificial Sequence
  Synthetic
gaccacggcutccucgaat

SEQ ID NO: 52355 - DNA, 20 bp, Artificial Sequence
  Synthetic
ggtccagccutaccttggug

SEQ ID NO: 52356 - DNA, 23 bp, Artificial Sequence
  Synthetic
gttccctccuacactgttcccua

SEQ ID NO: 52357 - DNA, 20 bp, Artificial Sequence
  Synthetic
ccucacagcuccaggaagga

SEQ ID NO: 52358 - DNA, 20 bp, Artificial Sequence
  Synthetic
gctccuggcatctccugaag

SEQ ID NO: 52359 - DNA, 21 bp, Artificial Sequence
  Synthetic
ccttccccaggaaugctgaug

SEQ ID NO: 52360 - DNA, 22 bp, Artificial Sequence
  Synthetic
ctccttcucctcctctcucagg

SEQ ID NO: 52361 - DNA, 22 bp, Artificial Sequence
  Synthetic
cagtacuggcccttgaatguca

SEQ ID NO: 52362 - DNA, 18 bp, Artificial Sequence
  Synthetic
gtucggcaaccacgucag

SEQ ID NO: 52363 - DNA, 17 bp, Artificial Sequence
  Synthetic
cccagggcggugttgut

SEQ ID NO: 52364 - DNA, 18 bp, Artificial Sequence
  Synthetic
cccaccgcgguagtacuc

SEQ ID NO: 52365 - DNA, 20 bp, Artificial Sequence
  Synthetic
tcgtgccgucatcagttcuc

SEQ ID NO: 52366 - DNA, 20 bp, Artificial Sequence
  Synthetic
caggctcucagcaggtgtut

SEQ ID NO: 52367 - DNA, 18 bp, Artificial Sequence
  Synthetic
ggctgcauacgccaucac

SEQ ID NO: 52368 - DNA, 17 bp, Artificial Sequence
  Synthetic
gtccgagccaugcguct

SEQ ID NO: 52369 - DNA, 17 bp, Artificial Sequence
  Synthetic
ccctgutcgctcugcac

SEQ ID NO: 52370 - DNA, 22 bp, Artificial Sequence
  Synthetic
gagagggtgcugggaaagaauc

SEQ ID NO: 52371 - DNA, 23 bp, Artificial Sequence
  Synthetic
gagtactgcucaatgacgtccut

SEQ ID NO: 52372 - DNA, 25 bp, Artificial Sequence
  Synthetic
gtttgtgagagacucaggagauacc

SEQ ID NO: 52373 - DNA, 21 bp, Artificial Sequence
  Synthetic
aaacaucacccagctgtucca

SEQ ID NO: 52374 - DNA, 22 bp, Artificial Sequence
  Synthetic
ccagtgtuctctttgcucccat

SEQ ID NO: 52375 - DNA, 23 bp, Artificial Sequence
  Synthetic
tgtcagtcaucccatccatcugt

SEQ ID NO: 52376 - DNA, 21 bp, Artificial Sequence
  Synthetic
cacaggaggucagacaggaug

SEQ ID NO: 52377 - DNA, 28 bp, Artificial Sequence
  Synthetic
agctgccttaaaauaacctgaagactut

SEQ ID NO: 52378 - DNA, 22 bp, Artificial Sequence
  Synthetic
ctggcacagcuagggttuacat

SEQ ID NO: 52379 - DNA, 28 bp, Artificial Sequence
  Synthetic
acagagttattgauggtgctacaatguc

SEQ ID NO: 52380 - DNA, 24 bp, Artificial Sequence
  Synthetic
cagttttcauccacagaagcgtua

SEQ ID NO: 52381 - DNA, 27 bp, Artificial Sequence
  Synthetic
ttctctctctcccuccttttataccuc

SEQ ID NO: 52382 - DNA, 28 bp, Artificial Sequence
  Synthetic
accaccagaugtgaaattacaguaaact

SEQ ID NO: 52383 - DNA, 31 bp, Artificial Sequence
  Synthetic
catctaatgcatucaacaatgatgtcaauga

SEQ ID NO: 52384 - DNA, 30 bp, Artificial Sequence
  Synthetic
gcttctaataaacaautggaatcactugct

SEQ ID NO: 52385 - DNA, 24 bp, Artificial Sequence
  Synthetic
ggtccucaaggtatcucagggaaa

SEQ ID NO: 52386 - DNA, 21 bp, Artificial Sequence
  Synthetic
cacttacaguctccccacgut

SEQ ID NO: 52387 - DNA, 31 bp, Artificial Sequence
  Synthetic
caacagaagagcaaaguaaaatagctaaugg

SEQ ID NO: 52388 - DNA, 26 bp, Artificial Sequence
  Synthetic
ttacttttucaccaggaggaccaaut

SEQ ID NO: 52389 - DNA, 24 bp, Artificial Sequence
  Synthetic
agcagcttgugtaaaactccucat

SEQ ID NO: 52390 - DNA, 24 bp, Artificial Sequence
  Synthetic
cataccatgtucccttttggucct

SEQ ID NO: 52391 - DNA, 28 bp, Artificial Sequence
  Synthetic
gtataggtcttguctcttcttcgttucc

SEQ ID NO: 52392 - DNA, 26 bp, Artificial Sequence
  Synthetic
aaagtaagtugcttacagctucacct

SEQ ID NO: 52393 - DNA, 28 bp, Artificial Sequence
  Synthetic
ggtgatgatggaaugagggtatgtuaat

SEQ ID NO: 52394 - DNA, 28 bp, Artificial Sequence
  Synthetic
aaagaacttacacugataccacatgugt

SEQ ID NO: 52395 - DNA, 18 bp, Artificial Sequence
  Synthetic
gggtcugccaggugacaa

SEQ ID NO: 52396 - DNA, 22 bp, Artificial Sequence
  Synthetic
caccagcucctctgaacaaaug

SEQ ID NO: 52397 - DNA, 27 bp, Artificial Sequence
  Synthetic
gggttatatttcccuggtagagatgut

SEQ ID NO: 52398 - DNA, 20 bp, Artificial Sequence
  Synthetic
gactccgagcaguctctguc

SEQ ID NO: 52399 - DNA, 20 bp, Artificial Sequence
  Synthetic
guagaccgccaagcgaucat

SEQ ID NO: 52400 - DNA, 25 bp, Artificial Sequence
  Synthetic
aactgagaauggcttttcauaccct

SEQ ID NO: 52401 - DNA, 21 bp, Artificial Sequence
  Synthetic
gagggctccugaaagcacuaa

SEQ ID NO: 52402 - DNA, 21 bp, Artificial Sequence
  Synthetic
cctcaggucccaatggttcug

SEQ ID NO: 52403 - DNA, 25 bp, Artificial Sequence
  Synthetic
agcaactatcugagtcccttcauct

SEQ ID NO: 52404 - DNA, 22 bp, Artificial Sequence
  Synthetic
cagagaccucggccattttuga

SEQ ID NO: 52405 - DNA, 23 bp, Artificial Sequence
  Synthetic
tggacaaagccaaucactgcuat

SEQ ID NO: 52406 - DNA, 25 bp, Artificial Sequence
  Synthetic
gtgttaaugaccacagactcuccac

SEQ ID NO: 52407 - DNA, 22 bp, Artificial Sequence
  Synthetic
gttttgaagugtgcagctguca

SEQ ID NO: 52408 - DNA, 20 bp, Artificial Sequence
  Synthetic
tcacttcucggctcggtgua

SEQ ID NO: 52409 - DNA, 28 bp, Artificial Sequence
  Synthetic
tggaaggaaaucctgtattttgugaaga

SEQ ID NO: 52410 - DNA, 26 bp, Artificial Sequence
  Synthetic
caactgccaaautcctaatugcacaa

SEQ ID NO: 52411 - DNA, 21 bp, Artificial Sequence
  Synthetic
acacagcutgcccatuacagt

SEQ ID NO: 52412 - DNA, 23 bp, Artificial Sequence
  Synthetic
ggaccccuggttttgtcttguaa

SEQ ID NO: 52413 - DNA, 29 bp, Artificial Sequence
  Synthetic
gataggaaagcagutagcaatgattctuc

SEQ ID NO: 52414 - DNA, 21 bp, Artificial Sequence
  Synthetic
caccagcacugaaccagagut

SEQ ID NO: 52415 - DNA, 22 bp, Artificial Sequence
  Synthetic
gtcacaggccagugtttctgua

SEQ ID NO: 52416 - DNA, 23 bp, Artificial Sequence
  Synthetic
tgcttgtuacacatttgctuccc

SEQ ID NO: 52417 - DNA, 28 bp, Artificial Sequence
  Synthetic
tttcaaaaatccaauctgactcctguct

SEQ ID NO: 52418 - DNA, 26 bp, Artificial Sequence
  Synthetic
ccaaaucagcaacgttaagttugcat

SEQ ID NO: 52419 - DNA, 23 bp, Artificial Sequence
  Synthetic
ggccctctaautgaagtggagut

SEQ ID NO: 52420 - DNA, 27 bp, Artificial Sequence
  Synthetic
gagaattcaaattucttcctccaccug

SEQ ID NO: 52421 - DNA, 22 bp, Artificial Sequence
  Synthetic
agtgatugccattcgaguggat

SEQ ID NO: 52422 - DNA, 25 bp, Artificial Sequence
  Synthetic
ctcagtgagaauctttccuggacaa

SEQ ID NO: 52423 - DNA, 28 bp, Artificial Sequence
  Synthetic
ggaaaaggaatagcuaggttcaccaaua

SEQ ID NO: 52424 - DNA, 20 bp, Artificial Sequence
  Synthetic
tucacucacacccgaaacca

SEQ ID NO: 52425 - DNA, 26 bp, Artificial Sequence
  Synthetic
gtaacccagatguggctattactgut

SEQ ID NO: 52426 - DNA, 24 bp, Artificial Sequence
  Synthetic
accttctagaugcttcttccugct

SEQ ID NO: 52427 - DNA, 23 bp, Artificial Sequence
  Synthetic
aatttccgugccacttcctttuc

SEQ ID NO: 52428 - DNA, 27 bp, Artificial Sequence
  Synthetic
tgctactttccuccttttgctaaagut

SEQ ID NO: 52429 - DNA, 25 bp, Artificial Sequence
  Synthetic
cttggttctttugttttggcaacug

SEQ ID NO: 52430 - DNA, 33 bp, Artificial Sequence
  Synthetic
tttaatctactacugaaaagacaaaugagacat

SEQ ID NO: 52431 - DNA, 25 bp, Artificial Sequence
  Synthetic
accugtttacagacuagaccacaca

SEQ ID NO: 52432 - DNA, 26 bp, Artificial Sequence
  Synthetic
cactcctattaacucacactcctugt

SEQ ID NO: 52433 - DNA, 21 bp, Artificial Sequence
  Synthetic
ggatgggaagcugctgtugag

SEQ ID NO: 52434 - DNA, 23 bp, Artificial Sequence
  Synthetic
cactagaaaacccugtgcaccut

SEQ ID NO: 52435 - DNA, 26 bp, Artificial Sequence
  Synthetic
aaaaaugggacagaaaagagacuggt

SEQ ID NO: 52436 - DNA, 26 bp, Artificial Sequence
  Synthetic
tgcttttgattuctgcaggatuaggt

SEQ ID NO: 52437 - DNA, 26 bp, Artificial Sequence
  Synthetic
tcttctctttgagugacagctgttut

SEQ ID NO: 52438 - DNA, 22 bp, Artificial Sequence
  Synthetic
ttttctgagccuctgccaacut

SEQ ID NO: 52439 - DNA, 29 bp, Artificial Sequence
  Synthetic
ccattcatcttcucttttccatgtgttut

SEQ ID NO: 52440 - DNA, 26 bp, Artificial Sequence
  Synthetic
gttgttaccacaaaaugaaaggcuca

SEQ ID NO: 52441 - DNA, 26 bp, Artificial Sequence
  Synthetic
ctttggcacagaguttcttattucct

SEQ ID NO: 52442 - DNA, 28 bp, Artificial Sequence
  Synthetic
gtctactgttcuagaaggcaaaucacat

SEQ ID NO: 52443 - DNA, 28 bp, Artificial Sequence
  Synthetic
ggaaaatttggugtagtggaaacuagga

SEQ ID NO: 52444 - DNA, 21 bp, Artificial Sequence
  Synthetic
agattccucagcagcgagaug

SEQ ID NO: 52445 - DNA, 28 bp, Artificial Sequence
  Synthetic
tcttcatcaaccuctggtaatcuacaga

SEQ ID NO: 52446 - DNA, 22 bp, Artificial Sequence
  Synthetic
tgttttggcuggaagcctgtua

SEQ ID NO: 52447 - DNA, 28 bp, Artificial Sequence
  Synthetic
cataaggagautatttagugcccagcat

SEQ ID NO: 52448 - DNA, 28 bp, Artificial Sequence
  Synthetic
ctagaaaaatuccagattgcttugccaa

SEQ ID NO: 52449 - DNA, 28 bp, Artificial Sequence
  Synthetic
cagtaggagguttacacuagaagcaaaa

SEQ ID NO: 52450 - DNA, 28 bp, Artificial Sequence
  Synthetic
tgtgaattcagtuccaaggtatttgugt

SEQ ID NO: 52451 - DNA, 26 bp, Artificial Sequence
  Synthetic
agtatttttccggutgtagcccaaua

SEQ ID NO: 52452 - DNA, 21 bp, Artificial Sequence
  Synthetic
gcaatgctgutcttgcagugg

SEQ ID NO: 52453 - DNA, 24 bp, Artificial Sequence
  Synthetic
aggtcctugaaccatgaactctug

SEQ ID NO: 52454 - DNA, 22 bp, Artificial Sequence
  Synthetic
cttgaaatcctugaggccccua

SEQ ID NO: 52455 - DNA, 28 bp, Artificial Sequence
  Synthetic
tgtgtagtaaaccccucattttctgtuc

SEQ ID NO: 52456 - DNA, 26 bp, Artificial Sequence
  Synthetic
catatgcaugtatacacucacccaca

SEQ ID NO: 52457 - DNA, 24 bp, Artificial Sequence
  Synthetic
tccccataccutcccaattugaac

SEQ ID NO: 52458 - DNA, 22 bp, Artificial Sequence
  Synthetic
ccattccacutaccaggtuggg

SEQ ID NO: 52459 - DNA, 28 bp, Artificial Sequence
  Synthetic
agtcattactuacaatgcgcauaacaga

SEQ ID NO: 52460 - DNA, 26 bp, Artificial Sequence
  Synthetic
ggagtaggaaaguttcaaagaccuga

SEQ ID NO: 52461 - DNA, 25 bp, Artificial Sequence
  Synthetic
caagtactaggutggttctgtggut

SEQ ID NO: 52462 - DNA, 25 bp, Artificial Sequence
  Synthetic
agaacauggaagtttgcuacgacat

SEQ ID NO: 52463 - DNA, 28 bp, Artificial Sequence
  Synthetic
caggaatgaautgctaaactguggaaaa

SEQ ID NO: 52464 - DNA, 22 bp, Artificial Sequence
  Synthetic
agaaaggaaagcaggugtuggt

SEQ ID NO: 52465 - DNA, 21 bp, Artificial Sequence
  Synthetic
catguaagccctgtgtuccgt

SEQ ID NO: 52466 - DNA, 21 bp, Artificial Sequence
  Synthetic
ccccgaacuggattctguact

SEQ ID NO: 52467 - DNA, 29 bp, Artificial Sequence
  Synthetic
ggtaccttgaugagctaaagaattccuaa

SEQ ID NO: 52468 - DNA, 22 bp, Artificial Sequence
  Synthetic
tgaaactctuaggctgcagcut

SEQ ID NO: 52469 - DNA, 25 bp, Artificial Sequence
  Synthetic
ctttcctgagacugcgtttauagca

SEQ ID NO: 52470 - DNA, 29 bp, Artificial Sequence
  Synthetic
tcttggacttguaacatctaatggactuc

SEQ ID NO: 52471 - DNA, 24 bp, Artificial Sequence
  Synthetic
tggctagautcttctugggcaaaa

SEQ ID NO: 52472 - DNA, 22 bp, Artificial Sequence
  Synthetic
gattctguccgtctcagcugaa

SEQ ID NO: 52473 - DNA, 25 bp, Artificial Sequence
  Synthetic
cctgtcagacugctttctttauggt

SEQ ID NO: 52474 - DNA, 21 bp, Artificial Sequence
  Synthetic
ctgggtcucctttgtcaccut

SEQ ID NO: 52475 - DNA, 23 bp, Artificial Sequence
  Synthetic
tgtggaucacaaggctttgtuct

SEQ ID NO: 52476 - DNA, 21 bp, Artificial Sequence
  Synthetic
agcucaggagagtcucggaaa

SEQ ID NO: 52477 - DNA, 21 bp, Artificial Sequence
  Synthetic
gucggagagaaaggugaaccc

SEQ ID NO: 52478 - DNA, 24 bp, Artificial Sequence
  Synthetic
gatctgagttugtgggttactugt

SEQ ID NO: 52479 - DNA, 20 bp, Artificial Sequence
  Synthetic
caccaggcutaccagggaug

SEQ ID NO: 52480 - DNA, 25 bp, Artificial Sequence
  Synthetic
gtgtataaactcuccaggttgccut

SEQ ID NO: 52481 - DNA, 24 bp, Artificial Sequence
  Synthetic
gcccatctaucctgacctguagac

SEQ ID NO: 52482 - DNA, 18 bp, Artificial Sequence
  Synthetic
ccgccgcaucttcuggaa

SEQ ID NO: 52483 - DNA, 20 bp, Artificial Sequence
  Synthetic
cuttgtgtcugacccaggca

SEQ ID NO: 52484 - DNA, 20 bp, Artificial Sequence
  Synthetic
agcauacccaaggcaacugt

SEQ ID NO: 52485 - DNA, 24 bp, Artificial Sequence
  Synthetic
actgcagcuggaagaaaagctuaa

SEQ ID NO: 52486 - DNA, 20 bp, Artificial Sequence
  Synthetic
ccagtcccuggttgugagat

SEQ ID NO: 52487 - DNA, 22 bp, Artificial Sequence
  Synthetic
ccaccaugaaggaagagtucgg

SEQ ID NO: 52488 - DNA, 21 bp, Artificial Sequence
  Synthetic
acgactacguagccctagcut

SEQ ID NO: 52489 - DNA, 25 bp, Artificial Sequence
  Synthetic
cctgttgatuatttctcctcucgct

SEQ ID NO: 52490 - DNA, 21 bp, Artificial Sequence
  Synthetic
tgttcacuccagctggctcua

SEQ ID NO: 52491 - DNA, 22 bp, Artificial Sequence
  Synthetic
ggtgcutttcaaccucaaggag

SEQ ID NO: 52492 - DNA, 20 bp, Artificial Sequence
  Synthetic
cctccaaggaggauggcuct

SEQ ID NO: 52493 - DNA, 20 bp, Artificial Sequence
  Synthetic
tccucgcuggagaagaccaa

SEQ ID NO: 52494 - DNA, 25 bp, Artificial Sequence
  Synthetic
atcagttccugtaatgctgugaaca

SEQ ID NO: 52495 - DNA, 22 bp, Artificial Sequence
  Synthetic
cttacctcaccauccctcctuc

SEQ ID NO: 52496 - DNA, 22 bp, Artificial Sequence
  Synthetic
ggagcgagugagtgattgtuct

SEQ ID NO: 52497 - DNA, 23 bp, Artificial Sequence
  Synthetic
caatatggguctctccuccacct

SEQ ID NO: 52498 - DNA, 21 bp, Artificial Sequence
  Synthetic
agctgcaagguctggaacaut

SEQ ID NO: 52499 - DNA, 23 bp, Artificial Sequence
  Synthetic
actttatgctgguactcacgcut

SEQ ID NO: 52500 - DNA, 25 bp, Artificial Sequence
  Synthetic
ggauatgttattgucggcaccaaag

SEQ ID NO: 52501 - DNA, 28 bp, Artificial Sequence
  Synthetic
actatcaccutcaatgacatucacagaa

SEQ ID NO: 52502 - DNA, 20 bp, Artificial Sequence
  Synthetic
ccutcucggaggaggcagat

SEQ ID NO: 52503 - DNA, 23 bp, Artificial Sequence
  Synthetic
tcacacagucagaacucagagga

SEQ ID NO: 52504 - DNA, 24 bp, Artificial Sequence
  Synthetic
gaactaggguagtcacctguacct

SEQ ID NO: 52505 - DNA, 28 bp, Artificial Sequence
  Synthetic
gtgaactgggugataatctgaagaugaa

SEQ ID NO: 52506 - DNA, 28 bp, Artificial Sequence
  Synthetic
attcgatcaaguatctgttgtgatucgt

SEQ ID NO: 52507 - DNA, 28 bp, Artificial Sequence
  Synthetic
gagagctaaguggcatatgtacattgua

SEQ ID NO: 52508 - DNA, 26 bp, Artificial Sequence
  Synthetic
ctctgcuaggacaggtaatttugagt

SEQ ID NO: 52509 - DNA, 21 bp, Artificial Sequence
  Synthetic
aacagttcaguggaggaugcc

SEQ ID NO: 52510 - DNA, 27 bp, Artificial Sequence
  Synthetic
agacttgtaaucaaccaattgtuccca

SEQ ID NO: 52511 - DNA, 25 bp, Artificial Sequence
  Synthetic
tgttttggacacautcctggttuct

SEQ ID NO: 52512 - DNA, 26 bp, Artificial Sequence
  Synthetic
aggtacagacaaaacutccaggagua

SEQ ID NO: 52513 - DNA, 26 bp, Artificial Sequence
  Synthetic
gcaaagtagauacaggcaaagttugg

SEQ ID NO: 52514 - DNA, 21 bp, Artificial Sequence
  Synthetic
ccaguccagggaagcatucac

SEQ ID NO: 52515 - DNA, 26 bp, Artificial Sequence
  Synthetic
cctatcttccccautttcaagggtua

SEQ ID NO: 52516 - DNA, 25 bp, Artificial Sequence
  Synthetic
ccctggtugttaatacacucaccac

SEQ ID NO: 52517 - DNA, 28 bp, Artificial Sequence
  Synthetic
aatggctaaugacatattgtaguggaaa

SEQ ID NO: 52518 - DNA, 21 bp, Artificial Sequence
  Synthetic
cccgtgtgutgtgtgtgtcua

SEQ ID NO: 52519 - DNA, 18 bp, Artificial Sequence
  Synthetic
gctgtccuccgccttgug

SEQ ID NO: 52520 - DNA, 21 bp, Artificial Sequence
  Synthetic
ccactttgauagcggtgucca

SEQ ID NO: 52521 - DNA, 19 bp, Artificial Sequence
  Synthetic
gtcacggacaccugcauga

SEQ ID NO: 52522 - DNA, 23 bp, Artificial Sequence
  Synthetic
ggacacagggcaccutauaaact

SEQ ID NO: 52523 - DNA, 23 bp, Artificial Sequence
  Synthetic
tguaaaacccctuccaacccaac

SEQ ID NO: 52524 - DNA, 19 bp, Artificial Sequence
  Synthetic
ccagguagcgaacctcguc

SEQ ID NO: 52525 - DNA, 24 bp, Artificial Sequence
  Synthetic
gcttctacccuggagttaatuggt

SEQ ID NO: 52526 - DNA, 19 bp, Artificial Sequence
  Synthetic
gtagggcaggcuctgctuc

SEQ ID NO: 52527 - DNA, 20 bp, Artificial Sequence
  Synthetic
ggcugcacgagcaaatctuc

SEQ ID NO: 52528 - DNA, 19 bp, Artificial Sequence
  Synthetic
atguccgaacgaggtggug

SEQ ID NO: 52529 - DNA, 22 bp, Artificial Sequence
  Synthetic
cccaagguaccatcttcugagt

SEQ ID NO: 52530 - DNA, 17 bp, Artificial Sequence
  Synthetic
agcuggcuggaggaggt

SEQ ID NO: 52531 - DNA, 17 bp, Artificial Sequence
  Synthetic
gcagccggacugacuga

SEQ ID NO: 52532 - DNA, 19 bp, Artificial Sequence
  Synthetic
gtgacaggugccaggacuc

SEQ ID NO: 52533 - DNA, 20 bp, Artificial Sequence
  Synthetic
ggccatccuggtaggugact

SEQ ID NO: 52534 - DNA, 18 bp, Artificial Sequence
  Synthetic
cuctguccgccacaccat

SEQ ID NO: 52535 - DNA, 18 bp, Artificial Sequence
  Synthetic
accggguatgggctcuga

SEQ ID NO: 52536 - DNA, 28 bp, Artificial Sequence
  Synthetic
accaaagaaauggatgacttccuacaaa

SEQ ID NO: 52537 - DNA, 27 bp, Artificial Sequence
  Synthetic
gcctatgatacutggcaacaataucct

SEQ ID NO: 52538 - DNA, 21 bp, Artificial Sequence
  Synthetic
gctacccuccagacucaaggt

SEQ ID NO: 52539 - DNA, 24 bp, Artificial Sequence
  Synthetic
cttattgacccugacctgtctucc

SEQ ID NO: 52540 - DNA, 21 bp, Artificial Sequence
  Synthetic
agcagtuccacttacgugcat

SEQ ID NO: 52541 - DNA, 24 bp, Artificial Sequence
  Synthetic
agcatggagaagcuttagaauggg

SEQ ID NO: 52542 - DNA, 18 bp, Artificial Sequence
  Synthetic
gggacacaccugcuggaa

SEQ ID NO: 52543 - DNA, 18 bp, Artificial Sequence
  Synthetic
cuccaccgagctcuccac

SEQ ID NO: 52544 - DNA, 22 bp, Artificial Sequence
  Synthetic
ggccttcuccctgacacataut

SEQ ID NO: 52545 - DNA, 21 bp, Artificial Sequence
  Synthetic
acaggaaagauggguggcaag

SEQ ID NO: 52546 - DNA, 26 bp, Artificial Sequence
  Synthetic
cagccgttctugagatttccttatuc

SEQ ID NO: 52547 - DNA, 21 bp, Artificial Sequence
  Synthetic
ctggctgcugatggatuacct

SEQ ID NO: 52548 - DNA, 22 bp, Artificial Sequence
  Synthetic
ggcacauaagaacctgguagcc

SEQ ID NO: 52549 - DNA, 25 bp, Artificial Sequence
  Synthetic
gtggutccagcttaugaagaagaga

SEQ ID NO: 52550 - DNA, 26 bp, Artificial Sequence
  Synthetic
acgatttttaguctgcattgcttugg

SEQ ID NO: 52551 - DNA, 26 bp, Artificial Sequence
  Synthetic
tgctcagctgcutctttaaacagaua

SEQ ID NO: 52552 - DNA, 22 bp, Artificial Sequence
  Synthetic
gttgttgcccutgtctgtgtuc

SEQ ID NO: 52553 - DNA, 24 bp, Artificial Sequence
  Synthetic
tggcgagaagaccautatcaucac

SEQ ID NO: 52554 - DNA, 21 bp, Artificial Sequence
  Synthetic
ctacaugcccacctagtugga

SEQ ID NO: 52555 - DNA, 24 bp, Artificial Sequence
  Synthetic
tgaaggacacaccccuctauacag

SEQ ID NO: 52556 - DNA, 21 bp, Artificial Sequence
  Synthetic
cactccgaacuggccaucaat

SEQ ID NO: 52557 - DNA, 22 bp, Artificial Sequence
  Synthetic
ggtatagaaacccugcgagucc

SEQ ID NO: 52558 - DNA, 23 bp, Artificial Sequence
  Synthetic
agtggtggcugtagcctctaaua

SEQ ID NO: 52559 - DNA, 23 bp, Artificial Sequence
  Synthetic
ctccaucaaagaacacctcugct

SEQ ID NO: 52560 - DNA, 20 bp, Artificial Sequence
  Synthetic
ccagacggaaaccguagcug

SEQ ID NO: 52561 - DNA, 24 bp, Artificial Sequence
  Synthetic
cccggacgauattgaacaatggut

SEQ ID NO: 52562 - DNA, 20 bp, Artificial Sequence
  Synthetic
cctaaacuggccccacauga

SEQ ID NO: 52563 - DNA, 24 bp, Artificial Sequence
  Synthetic
ctcccatatcucagaggcccauat

SEQ ID NO: 52564 - DNA, 22 bp, Artificial Sequence
  Synthetic
cccacctacuctaccactcuct

SEQ ID NO: 52565 - DNA, 22 bp, Artificial Sequence
  Synthetic
cagtaaggcugtcagtggtuga

SEQ ID NO: 52566 - DNA, 21 bp, Artificial Sequence
  Synthetic
cagcacaaggutgtgtgtuga

SEQ ID NO: 52567 - DNA, 24 bp, Artificial Sequence
  Synthetic
ccaccacguatttgcttccuaact

SEQ ID NO: 52568 - DNA, 17 bp, Artificial Sequence
  Synthetic
gcggcguctacctggug

SEQ ID NO: 52569 - DNA, 20 bp, Artificial Sequence
  Synthetic
cccgagacugcagacacaut

SEQ ID NO: 52570 - DNA, 24 bp, Artificial Sequence
  Synthetic
tggacagtcuacgaaaagctctug

SEQ ID NO: 52571 - DNA, 27 bp, Artificial Sequence
  Synthetic
ggactgaacaaguaggaaaaugacaga

SEQ ID NO: 52572 - DNA, 23 bp, Artificial Sequence
  Synthetic
gcagatacaccugtcagcaaaut

SEQ ID NO: 52573 - DNA, 24 bp, Artificial Sequence
  Synthetic
gagaacacttuacctgtcctuggg

SEQ ID NO: 52574 - DNA, 23 bp, Artificial Sequence
  Synthetic
ggtgtgugtgtggctucaaaaac

SEQ ID NO: 52575 - DNA, 27 bp, Artificial Sequence
  Synthetic
agacattttacaucatcatctgcugct

SEQ ID NO: 52576 - DNA, 23 bp, Artificial Sequence
  Synthetic
gttttctgccccaugcaataguc

SEQ ID NO: 52577 - DNA, 21 bp, Artificial Sequence
  Synthetic
tgaguggcagcagacauacac

SEQ ID NO: 52578 - DNA, 21 bp, Artificial Sequence
  Synthetic
cccagutcctccugagaacaa

SEQ ID NO: 52579 - DNA, 19 bp, Artificial Sequence
  Synthetic
ggcucaaagcacggcuaag

SEQ ID NO: 52580 - DNA, 26 bp, Artificial Sequence
  Synthetic
guatgttaaguccacagaaccacaga

SEQ ID NO: 52581 - DNA, 20 bp, Artificial Sequence
  Synthetic
cagcauccaacccacccuac

SEQ ID NO: 52582 - DNA, 21 bp, Artificial Sequence
  Synthetic
gccttctugaggttgccaguc

SEQ ID NO: 52583 - DNA, 21 bp, Artificial Sequence
  Synthetic
aggactagaggutcccgcaua

SEQ ID NO: 52584 - DNA, 21 bp, Artificial Sequence
  Synthetic
tgtcaggcggaagutccatug

SEQ ID NO: 52585 - DNA, 22 bp, Artificial Sequence
  Synthetic
gccaagagcucatgctttccut

SEQ ID NO: 52586 - DNA, 20 bp, Artificial Sequence
  Synthetic
gctuaggcaaggccacaaug

SEQ ID NO: 52587 - DNA, 25 bp, Artificial Sequence
  Synthetic
cctatctctggccugactctttcut

SEQ ID NO: 52588 - DNA, 21 bp, Artificial Sequence
  Synthetic
tctggacuctgaggucccaaa

SEQ ID NO: 52589 - DNA, 25 bp, Artificial Sequence
  Synthetic
cctcactcugacttctcttgttugt

SEQ ID NO: 52590 - DNA, 20 bp, Artificial Sequence
  Synthetic
agagtgcaacgcutacccut

SEQ ID NO: 52591 - DNA, 20 bp, Artificial Sequence
  Synthetic
gctcuaacgcgcgtctctuc

SEQ ID NO: 52592 - DNA, 21 bp, Artificial Sequence
  Synthetic
actcucagcccaccttctcuc

SEQ ID NO: 52593 - DNA, 23 bp, Artificial Sequence
  Synthetic
ggacagtccacguttgcttctua

SEQ ID NO: 52594 - DNA, 21 bp, Artificial Sequence
  Synthetic
ccauaccaggccaaacagtug

SEQ ID NO: 52595 - DNA, 22 bp, Artificial Sequence
  Synthetic
gacctaugaagggcctggacua

SEQ ID NO: 52596 - DNA, 21 bp, Artificial Sequence
  Synthetic
cggaggaagucggugaagaac

SEQ ID NO: 52597 - DNA, 20 bp, Artificial Sequence
  Synthetic
cgggacggagauagcttguc

SEQ ID NO: 52598 - DNA, 22 bp, Artificial Sequence
  Synthetic
gggccagutaaucagacacaca

SEQ ID NO: 52599 - DNA, 22 bp, Artificial Sequence
  Synthetic
cggaagaggcuacgttcttcuc

SEQ ID NO: 52600 - DNA, 26 bp, Artificial Sequence
  Synthetic
atgctgagaaggguataaatgcagut

SEQ ID NO: 52601 - DNA, 21 bp, Artificial Sequence
  Synthetic
ttcaattgcagcutccgctug

SEQ ID NO: 52602 - DNA, 22 bp, Artificial Sequence
  Synthetic
gggtggcgucaacttgtaucaa

SEQ ID NO: 52603 - DNA, 20 bp, Artificial Sequence
  Synthetic
ggccaaguactgagccucaa

SEQ ID NO: 52604 - DNA, 21 bp, Artificial Sequence
  Synthetic
gauggtcaaggugacacagga

SEQ ID NO: 52605 - DNA, 20 bp, Artificial Sequence
  Synthetic
gctttuaaggctgcgugcaa

SEQ ID NO: 52606 - DNA, 20 bp, Artificial Sequence
  Synthetic
tcttccctguccgccaagua

SEQ ID NO: 52607 - DNA, 27 bp, Artificial Sequence
  Synthetic
gctgctcacatutctttgtgtttctuc

SEQ ID NO: 52608 - DNA, 20 bp, Artificial Sequence
  Synthetic
tccaagcaguccctagugct

SEQ ID NO: 52609 - DNA, 25 bp, Artificial Sequence
  Synthetic
gacaaacacaatuccggatctctuc

SEQ ID NO: 52610 - DNA, 19 bp, Artificial Sequence
  Synthetic
cgacgguactgccucaagt

SEQ ID NO: 52611 - DNA, 20 bp, Artificial Sequence
  Synthetic
cagtcctugaaggccagcut

SEQ ID NO: 52612 - DNA, 21 bp, Artificial Sequence
  Synthetic
guagcacucaaagccagcaac

SEQ ID NO: 52613 - DNA, 26 bp, Artificial Sequence
  Synthetic
tgactagcaaguatgactccaugaca

SEQ ID NO: 52614 - DNA, 23 bp, Artificial Sequence
  Synthetic
gatatacugccctgtgcucagaa

SEQ ID NO: 52615 - DNA, 25 bp, Artificial Sequence
  Synthetic
gacttauagccagtaatgucaccga

SEQ ID NO: 52616 - DNA, 22 bp, Artificial Sequence
  Synthetic
catgcagguactgactgaugga

SEQ ID NO: 52617 - DNA, 21 bp, Artificial Sequence
  Synthetic
acctccuggcaccctcttaut

SEQ ID NO: 52618 - DNA, 26 bp, Artificial Sequence
  Synthetic
gagaaaaaccacagauaagcgcauac

SEQ ID NO: 52619 - DNA, 26 bp, Artificial Sequence
  Synthetic
ggtataaccttugtttccctctgucc

SEQ ID NO: 52620 - DNA, 21 bp, Artificial Sequence
  Synthetic
ccacaaacucccugagcagaa

SEQ ID NO: 52621 - DNA, 25 bp, Artificial Sequence
  Synthetic
aaaaggcattauccgcttgatgtug

SEQ ID NO: 52622 - DNA, 21 bp, Artificial Sequence
  Synthetic
gctgtgctcauggctgatcut

SEQ ID NO: 52623 - DNA, 28 bp, Artificial Sequence
  Synthetic
tcccaacaugacacttaacatattucca

SEQ ID NO: 52624 - DNA, 28 bp, Artificial Sequence
  Synthetic
gaaugaattagcagtucaaaaccagcat

SEQ ID NO: 52625 - DNA, 22 bp, Artificial Sequence
  Synthetic
gcgtgaucaccacaacatcauc

SEQ ID NO: 52626 - DNA, 17 bp, Artificial Sequence
  Synthetic
cagagggcuccgtucca

SEQ ID NO: 52627 - DNA, 18 bp, Artificial Sequence
  Synthetic
gaugagaggcaggcgcut

SEQ ID NO: 52628 - DNA, 28 bp, Artificial Sequence
  Synthetic
cttgaaagagctguagatgttagaggut

SEQ ID NO: 52629 - DNA, 28 bp, Artificial Sequence
  Synthetic
ctttacagtguatgtgccatttugaaca

SEQ ID NO: 52630 - DNA, 22 bp, Artificial Sequence
  Synthetic
tgattgcttucaggtgcagcua

SEQ ID NO: 52631 - DNA, 21 bp, Artificial Sequence
  Synthetic
acacacgucactgctccuaga

SEQ ID NO: 52632 - DNA, 20 bp, Artificial Sequence
  Synthetic
ggcacugacctggacttuga

SEQ ID NO: 52633 - DNA, 17 bp, Artificial Sequence
  Synthetic
ggcagccutcggctuct

SEQ ID NO: 52634 - DNA, 23 bp, Artificial Sequence
  Synthetic
cctccagacaucgaguaccagat

SEQ ID NO: 52635 - DNA, 22 bp, Artificial Sequence
  Synthetic
tgactuggaaccaaggatgcug

SEQ ID NO: 52636 - DNA, 24 bp, Artificial Sequence
  Synthetic
cctgattuacccacaacccuaact

SEQ ID NO: 52637 - DNA, 26 bp, Artificial Sequence
  Synthetic
gggtttccaggutagctcgattttua

SEQ ID NO: 52638 - DNA, 27 bp, Artificial Sequence
  Synthetic
aaagacugaggaaatcaugaaggaagg

SEQ ID NO: 52639 - DNA, 28 bp, Artificial Sequence
  Synthetic
caagtaggccautttacaaacaagctua

SEQ ID NO: 52640 - DNA, 23 bp, Artificial Sequence
  Synthetic
ggtcatgauggaggaggguagag

SEQ ID NO: 52641 - DNA, 18 bp, Artificial Sequence
  Synthetic
ccuggcaccgcaagtcua

SEQ ID NO: 52642 - DNA, 19 bp, Artificial Sequence
  Synthetic
gctggcugccaucgaagag

SEQ ID NO: 52643 - DNA, 20 bp, Artificial Sequence
  Synthetic
ggtgcacccggutttctuca

SEQ ID NO: 52644 - DNA, 20 bp, Artificial Sequence
  Synthetic
gagcagagcagucacugagt

SEQ ID NO: 52645 - DNA, 21 bp, Artificial Sequence
  Synthetic
cactcctucgccaagtuccat

SEQ ID NO: 52646 - DNA, 21 bp, Artificial Sequence
  Synthetic
cacugcaggaaccactucagt

SEQ ID NO: 52647 - DNA, 21 bp, Artificial Sequence
  Synthetic
cttgtaaccgcguagccatuc

SEQ ID NO: 52648 - DNA, 22 bp, Artificial Sequence
  Synthetic
cagcauccttcccaucagaaca

SEQ ID NO: 52649 - DNA, 23 bp, Artificial Sequence
  Synthetic
gggagauaaagggtccaaugagg

SEQ ID NO: 52650 - DNA, 22 bp, Artificial Sequence
  Synthetic
actgtccuctgtcctctuagcc

SEQ ID NO: 52651 - DNA, 21 bp, Artificial Sequence
  Synthetic
tcagcuctggaaucggagagt

SEQ ID NO: 52652 - DNA, 20 bp, Artificial Sequence
  Synthetic
ccagttggucctgcactuca

SEQ ID NO: 52653 - DNA, 28 bp, Artificial Sequence
  Synthetic
gcctgaccagcaaagugatattuaaaga

SEQ ID NO: 52654 - DNA, 19 bp, Artificial Sequence
  Synthetic
gtgtctuggcgcatcugac

SEQ ID NO: 52655 - DNA, 23 bp, Artificial Sequence
  Synthetic
gggcggaaacuaattcagucaac

SEQ ID NO: 52656 - DNA, 21 bp, Artificial Sequence
  Synthetic
ccaggaatccaucagcgacut

SEQ ID NO: 52657 - DNA, 22 bp, Artificial Sequence
  Synthetic
gaagggaucagggatcacgaug

SEQ ID NO: 52658 - DNA, 22 bp, Artificial Sequence
  Synthetic
agagaatugaggctcuccaggt

SEQ ID NO: 52659 - DNA, 25 bp, Artificial Sequence
  Synthetic
cgcagttgaucatttcgttctcauc

SEQ ID NO: 52660 - DNA, 18 bp, Artificial Sequence
  Synthetic
ccgcaucgagcgcatcua

SEQ ID NO: 52661 - DNA, 24 bp, Artificial Sequence
  Synthetic
gctggacgaaaugtguacaaaagg

SEQ ID NO: 52662 - DNA, 21 bp, Artificial Sequence
  Synthetic
tggcagacccacagaugaauc

SEQ ID NO: 52663 - DNA, 22 bp, Artificial Sequence
  Synthetic
gtgctttccuccaggaaguagt

SEQ ID NO: 52664 - DNA, 17 bp, Artificial Sequence
  Synthetic
ctgaccuggccccaucc

SEQ ID NO: 52665 - DNA, 19 bp, Artificial Sequence
  Synthetic
gggcucaccgtcatcaugt

SEQ ID NO: 52666 - DNA, 21 bp, Artificial Sequence
  Synthetic
cctggagguaggtagcuggag

SEQ ID NO: 52667 - DNA, 21 bp, Artificial Sequence
  Synthetic
tgacccccugaatcccguaat

SEQ ID NO: 52668 - DNA, 22 bp, Artificial Sequence
  Synthetic
gcacagcauagttgtgtugagg

SEQ ID NO: 52669 - DNA, 23 bp, Artificial Sequence
  Synthetic
actcuccagccaaagaccuaagt

SEQ ID NO: 52670 - DNA, 18 bp, Artificial Sequence
  Synthetic
guccccaagacccuccac

SEQ ID NO: 52671 - DNA, 19 bp, Artificial Sequence
  Synthetic
gggcgtaggucatggcaua

SEQ ID NO: 52672 - DNA, 20 bp, Artificial Sequence
  Synthetic
gtttcagcutcgccaucagg

SEQ ID NO: 52673 - DNA, 21 bp, Artificial Sequence
  Synthetic
cgacaacgcugaacucacagt

SEQ ID NO: 52674 - DNA, 24 bp, Artificial Sequence
  Synthetic
gggtctctugtcacttacaucgaa

SEQ ID NO: 52675 - DNA, 17 bp, Artificial Sequence
  Synthetic
gggagguggcucaggga

SEQ ID NO: 52676 - DNA, 19 bp, Artificial Sequence
  Synthetic
tgagaugcggcactcgaut

SEQ ID NO: 52677 - DNA, 25 bp, Artificial Sequence
  Synthetic
cagagctuaaaccgaatggaguaca

SEQ ID NO: 52678 - DNA, 28 bp, Artificial Sequence
  Synthetic
tacagaaaaatuagacaaagggctcuca

SEQ ID NO: 52679 - DNA, 26 bp, Artificial Sequence
  Synthetic
gtctcttagtgacuccaggatcttut

SEQ ID NO: 52680 - DNA, 24 bp, Artificial Sequence
  Synthetic
aagaggcutatuaccagagggaca

SEQ ID NO: 52681 - DNA, 23 bp, Artificial Sequence
  Synthetic
cctacgaugcagagctctcttut

SEQ ID NO: 52682 - DNA, 17 bp, Artificial Sequence
  Synthetic
acguccuccgccagact

SEQ ID NO: 52683 - DNA, 18 bp, Artificial Sequence
  Synthetic
ggcucggaggcgaagaug

SEQ ID NO: 52684 - DNA, 20 bp, Artificial Sequence
  Synthetic
ccaggatauctgggctucgg

SEQ ID NO: 52685 - DNA, 22 bp, Artificial Sequence
  Synthetic
cttagaugccccagggaaagug

SEQ ID NO: 52686 - DNA, 26 bp, Artificial Sequence
  Synthetic
cacaagcauaagaagcctttuggaaa

SEQ ID NO: 52687 - DNA, 21 bp, Artificial Sequence
  Synthetic
agagtctguggaagagguggt

SEQ ID NO: 52688 - DNA, 19 bp, Artificial Sequence
  Synthetic
gctcaccuaagcagcggua

SEQ ID NO: 52689 - DNA, 25 bp, Artificial Sequence
  Synthetic
cccctgccucaagtaacaattgaut

SEQ ID NO: 52690 - DNA, 24 bp, Artificial Sequence
  Synthetic
ccacccuctagtcatgauggagat

SEQ ID NO: 52691 - DNA, 22 bp, Artificial Sequence
  Synthetic
catagcgcuccaggttgtaguc

SEQ ID NO: 52692 - DNA, 19 bp, Artificial Sequence
  Synthetic
gggtgggacgutcactgua

SEQ ID NO: 52693 - DNA, 20 bp, Artificial Sequence
  Synthetic
tgtggatgugtcgctctguc

SEQ ID NO: 52694 - DNA, 28 bp, Artificial Sequence
  Synthetic
tgagggaatttggutcatgcttatctut

SEQ ID NO: 52695 - DNA, 23 bp, Artificial Sequence
  Synthetic
agaggcgagagaguttcugaaga

SEQ ID NO: 52696 - DNA, 26 bp, Artificial Sequence
  Synthetic
tgaacctaccagaugtatttgggtug

SEQ ID NO: 52697 - DNA, 27 bp, Artificial Sequence
  Synthetic
agagccctttcutgtgaatatgtcaut

SEQ ID NO: 52698 - DNA, 21 bp, Artificial Sequence
  Synthetic
gggcaaagacuggagtuagca

SEQ ID NO: 52699 - DNA, 18 bp, Artificial Sequence
  Synthetic
gccaaccugtccguggag

SEQ ID NO: 52700 - DNA, 22 bp, Artificial Sequence
  Synthetic
ggctcaugtattcccugcaaga

SEQ ID NO: 52701 - DNA, 20 bp, Artificial Sequence
  Synthetic
gttgtgcutgtccccuagca

SEQ ID NO: 52702 - DNA, 18 bp, Artificial Sequence
  Synthetic
cccugctuacccaaagcc

SEQ ID NO: 52703 - DNA, 28 bp, Artificial Sequence
  Synthetic
tgcttgttgaguattgagatatgtguga

SEQ ID NO: 52704 - DNA, 28 bp, Artificial Sequence
  Synthetic
gcaaagccaaaaucacaaattcgaauag

SEQ ID NO: 52705 - DNA, 28 bp, Artificial Sequence
  Synthetic
tgcattgctugacagtttgtgaauaaag

SEQ ID NO: 52706 - DNA, 28 bp, Artificial Sequence
  Synthetic
ttctctgttatcaugtggacttttcugg

SEQ ID NO: 52707 - DNA, 25 bp, Artificial Sequence
  Synthetic
ctgaggatucagaagctgttuacga

SEQ ID NO: 52708 - DNA, 22 bp, Artificial Sequence
  Synthetic
tgtcctaagaccugctcagcut

SEQ ID NO: 52709 - DNA, 28 bp, Artificial Sequence
  Synthetic
gtctcctccagacuagcatttactacua

SEQ ID NO: 52710 - DNA, 21 bp, Artificial Sequence
  Synthetic
tcgguaagttctguccaagcc

SEQ ID NO: 52711 - DNA, 27 bp, Artificial Sequence
  Synthetic
tgaaattggctcuttagcttgtgttuc

SEQ ID NO: 52712 - DNA, 25 bp, Artificial Sequence
  Synthetic
gcaaaaagttcccuaccttaacguc

SEQ ID NO: 52713 - DNA, 25 bp, Artificial Sequence
  Synthetic
gcttgaagaccutgaagagcagtua

SEQ ID NO: 52714 - DNA, 27 bp, Artificial Sequence
  Synthetic
gttgugagaaaaacacttuagcaagga

SEQ ID NO: 52715 - DNA, 27 bp, Artificial Sequence
  Synthetic
ctagtatcccacutgaaccuggaaaag

SEQ ID NO: 52716 - DNA, 28 bp, Artificial Sequence
  Synthetic
acatgtgccaatutttgttctcaatcut

SEQ ID NO: 52717 - DNA, 24 bp, Artificial Sequence
  Synthetic
ctgcatuggaaacaaagagtgugg

SEQ ID NO: 52718 - DNA, 27 bp, Artificial Sequence
  Synthetic
tcttctttttcugaaagccatgcacua

SEQ ID NO: 52719 - DNA, 28 bp, Artificial Sequence
  Synthetic
atgtgtgagaaacuagctguaaaagaca

SEQ ID NO: 52720 - DNA, 25 bp, Artificial Sequence
  Synthetic
agaaatctcuccttgtgctugcaat

SEQ ID NO: 52721 - DNA, 28 bp, Artificial Sequence
  Synthetic
gcaaagacautaattgtguaacacccaa

SEQ ID NO: 52722 - DNA, 27 bp, Artificial Sequence
  Synthetic
ctgacauttggctttuaggaaacaagt

SEQ ID NO: 52723 - DNA, 27 bp, Artificial Sequence
  Synthetic
caatcacttcatucctactttgtgcuc

SEQ ID NO: 52724 - DNA, 28 bp, Artificial Sequence
  Synthetic
agaccctaacauataaaagcagttcuga

SEQ ID NO: 52725 - DNA, 23 bp, Artificial Sequence
  Synthetic
ggatcaaagucagccaucagcaa

SEQ ID NO: 52726 - DNA, 21 bp, Artificial Sequence
  Synthetic
acacccctcucagatccctug

SEQ ID NO: 52727 - DNA, 27 bp, Artificial Sequence
  Synthetic
ctggtcctcaaugaagtcgtagauaag

SEQ ID NO: 52728 - DNA, 21 bp, Artificial Sequence
  Synthetic
agatcggugctggagtcugat

SEQ ID NO: 52729 - DNA, 25 bp, Artificial Sequence
  Synthetic
ggagatctguttaaggagccucaaa

SEQ ID NO: 52730 - DNA, 22 bp, Artificial Sequence
  Synthetic
agcccaucccccatattccuaa

SEQ ID NO: 52731 - DNA, 22 bp, Artificial Sequence
  Synthetic
gtccagcagucgatgtggauag

SEQ ID NO: 52732 - DNA, 23 bp, Artificial Sequence
  Synthetic
actgtgtacatuggcttgtccut

SEQ ID NO: 52733 - DNA, 22 bp, Artificial Sequence
  Synthetic
agaacgagccugttctgtugac

SEQ ID NO: 52734 - DNA, 28 bp, Artificial Sequence
  Synthetic
gatacctcaaggaautctcctaaacugg

SEQ ID NO: 52735 - DNA, 23 bp, Artificial Sequence
  Synthetic
acaagttaaacuggcagcacuct

SEQ ID NO: 52736 - DNA, 20 bp, Artificial Sequence
  Synthetic
cctgguccagcaacaucaac

SEQ ID NO: 52737 - DNA, 28 bp, Artificial Sequence
  Synthetic
cctcctttaaacugttttcatcucacaa

SEQ ID NO: 52738 - DNA, 21 bp, Artificial Sequence
  Synthetic
gtgcaagctucctgagaggua

SEQ ID NO: 52739 - DNA, 21 bp, Artificial Sequence
  Synthetic
tccuggagaacacccauagca

SEQ ID NO: 52740 - DNA, 22 bp, Artificial Sequence
  Synthetic
gccctgauggcttctttcttug

SEQ ID NO: 52741 - DNA, 24 bp, Artificial Sequence
  Synthetic
acttctaaccuactctgcctgcua

SEQ ID NO: 52742 - DNA, 22 bp, Artificial Sequence
  Synthetic
ttgaaagcaccaauagcccugt

SEQ ID NO: 52743 - DNA, 28 bp, Artificial Sequence
  Synthetic
ccagagcucaagataucaagaaaaggaa

SEQ ID NO: 52744 - DNA, 24 bp, Artificial Sequence
  Synthetic
gtactcaugcccaagttagcuagg

SEQ ID NO: 52745 - DNA, 28 bp, Artificial Sequence
  Synthetic
cttgggcttccutataattgttgtctut

SEQ ID NO: 52746 - DNA, 28 bp, Artificial Sequence
  Synthetic
caatcaggtugcagattctaaaatugct

SEQ ID NO: 52747 - DNA, 25 bp, Artificial Sequence
  Synthetic
tgttctcaautgtcctttcuccaca

SEQ ID NO: 52748 - DNA, 20 bp, Artificial Sequence
  Synthetic
gctuccgaaggagaccctug

SEQ ID NO: 52749 - DNA, 22 bp, Artificial Sequence
  Synthetic
ctctgtgggaaucaggtggtua

SEQ ID NO: 52750 - DNA, 28 bp, Artificial Sequence
  Synthetic
ttttagaggacacutttctgttggtuct

SEQ ID NO: 52751 - DNA, 27 bp, Artificial Sequence
  Synthetic
caggugaaggacgagaatatctucaat

SEQ ID NO: 52752 - DNA, 22 bp, Artificial Sequence
  Synthetic
ggcuggaggaggtauacaggat

SEQ ID NO: 52753 - DNA, 20 bp, Artificial Sequence
  Synthetic
ccatctcgguggtgtgctuc

SEQ ID NO: 52754 - DNA, 21 bp, Artificial Sequence
  Synthetic
catcaggaaaccuggccuacc

SEQ ID NO: 52755 - DNA, 28 bp, Artificial Sequence
  Synthetic
gccctacaauaacatactccatucagaa

SEQ ID NO: 52756 - DNA, 21 bp, Artificial Sequence
  Synthetic
ctgtgcaaauccctcccucaa

SEQ ID NO: 52757 - DNA, 27 bp, Artificial Sequence
  Synthetic
caagccatacagutgttggaaaagaug

SEQ ID NO: 52758 - DNA, 23 bp, Artificial Sequence
  Synthetic
acacttacccugctcttttggug

SEQ ID NO: 52759 - DNA, 28 bp, Artificial Sequence
  Synthetic
ccattcttatggacuaaaaggtgctcut

SEQ ID NO: 52760 - DNA, 22 bp, Artificial Sequence
  Synthetic
caatgcugagaggtguggacat

SEQ ID NO: 52761 - DNA, 19 bp, Artificial Sequence
  Synthetic
ccaacacguccacctucgt

SEQ ID NO: 52762 - DNA, 21 bp, Artificial Sequence
  Synthetic
agaggtcuggacttccagcut

SEQ ID NO: 52763 - DNA, 23 bp, Artificial Sequence
  Synthetic
agatgcaacucagatcacucagg

SEQ ID NO: 52764 - DNA, 21 bp, Artificial Sequence
  Synthetic
ccatgacagugggcaucacag

SEQ ID NO: 52765 - DNA, 21 bp, Artificial Sequence
  Synthetic
cgaggaggaugatggcgagua

SEQ ID NO: 52766 - DNA, 26 bp, Artificial Sequence
  Synthetic
ctgctaggatutagcacaaagguaga

SEQ ID NO: 52767 - DNA, 23 bp, Artificial Sequence
  Synthetic
actctcuagacccaccgttacug

SEQ ID NO: 52768 - DNA, 26 bp, Artificial Sequence
  Synthetic
ccacattgctacucactattgctgua

SEQ ID NO: 52769 - DNA, 28 bp, Artificial Sequence
  Synthetic
gcataaaccaatguatctcatgctcaut

SEQ ID NO: 52770 - DNA, 29 bp, Artificial Sequence
  Synthetic
ttctctacaattugcttggtttgattucc

SEQ ID NO: 52771 - DNA, 27 bp, Artificial Sequence
  Synthetic
tgactggcacuaagaatttcaugaaga

SEQ ID NO: 52772 - DNA, 25 bp, Artificial Sequence
  Synthetic
ggtccatgagcucttttcccttuaa

SEQ ID NO: 52773 - DNA, 24 bp, Artificial Sequence
  Synthetic
tggcaaaaagucatctcccctuac

SEQ ID NO: 52774 - DNA, 26 bp, Artificial Sequence
  Synthetic
accttaaacauggcttcaggattugt

SEQ ID NO: 52775 - DNA, 26 bp, Artificial Sequence
  Synthetic
ctctccttccuttatccaaatucgct

SEQ ID NO: 52776 - DNA, 24 bp, Artificial Sequence
  Synthetic
ccaccatuacaaagcacacacauc

SEQ ID NO: 52777 - DNA, 22 bp, Artificial Sequence
  Synthetic
cctttggcggacauctcatuct

SEQ ID NO: 52778 - DNA, 20 bp, Artificial Sequence
  Synthetic
gctgccccaggcuttgauaa

SEQ ID NO: 52779 - DNA, 27 bp, Artificial Sequence
  Synthetic
gtgccccataautaaatctttctgugt

SEQ ID NO: 52780 - DNA, 26 bp, Artificial Sequence
  Synthetic
tgaaattggauattgcagcagucaga

SEQ ID NO: 52781 - DNA, 31 bp, Artificial Sequence
  Synthetic
gctcctttataagcutcttcagtatatguca

SEQ ID NO: 52782 - DNA, 24 bp, Artificial Sequence
  Synthetic
gggaggacutttctctuggcaaat

SEQ ID NO: 52783 - DNA, 20 bp, Artificial Sequence
  Synthetic
gcauaucaccagcccggaaa

SEQ ID NO: 52784 - DNA, 21 bp, Artificial Sequence
  Synthetic
ggtgcaguaggttggttucct

SEQ ID NO: 52785 - DNA, 22 bp, Artificial Sequence
  Synthetic
agacagtuacagggagggtcug

SEQ ID NO: 52786 - DNA, 22 bp, Artificial Sequence
  Synthetic
tttatguggcgaagcuggaact

SEQ ID NO: 52787 - DNA, 21 bp, Artificial Sequence
  Synthetic
aagacctucaggcagaagugg

SEQ ID NO: 52788 - DNA, 22 bp, Artificial Sequence
  Synthetic
tggttccucagaacaucaagcc

SEQ ID NO: 52789 - DNA, 20 bp, Artificial Sequence
  Synthetic
gagatgtuggccagctggua

SEQ ID NO: 52790 - DNA, 27 bp, Artificial Sequence
  Synthetic
tccttgaagcauctcatctatgtctug

SEQ ID NO: 52791 - DNA, 20 bp, Artificial Sequence
  Synthetic
cgagagcccaccauggttug

SEQ ID NO: 52792 - DNA, 27 bp, Artificial Sequence
  Synthetic
catgtatgtcuagttggatgatuggct

SEQ ID NO: 52793 - DNA, 25 bp, Artificial Sequence
  Synthetic
tggtcaggucaggctaacttuagaa

SEQ ID NO: 52794 - DNA, 20 bp, Artificial Sequence
  Synthetic
cacacaggccgaguttgtug

SEQ ID NO: 52795 - DNA, 28 bp, Artificial Sequence
  Synthetic
tggttttagcttcuctcacatttcctut

SEQ ID NO: 52796 - DNA, 29 bp, Artificial Sequence
  Synthetic
tguacctaatatauaccaggacaccacaa

SEQ ID NO: 52797 - DNA, 26 bp, Artificial Sequence
  Synthetic
gaacacataccugaaggaagcgatua

SEQ ID NO: 52798 - DNA, 21 bp, Artificial Sequence
  Synthetic
gcttctuggaccccagcttut

SEQ ID NO: 52799 - DNA, 30 bp, Artificial Sequence
  Synthetic
tgtagacaatgautctggttttaacuacat

SEQ ID NO: 52800 - DNA, 20 bp, Artificial Sequence
  Synthetic
gtgcaatuggcactgucact

SEQ ID NO: 52801 - DNA, 28 bp, Artificial Sequence
  Synthetic
ggagauaagacaagcagaagatcugaat

SEQ ID NO: 52802 - DNA, 27 bp, Artificial Sequence
  Synthetic
ggagagcaatuccagatcaagaattug

SEQ ID NO: 52803 - DNA, 27 bp, Artificial Sequence
  Synthetic
atgcctgactgauttgtatctggtuag

SEQ ID NO: 52804 - DNA, 20 bp, Artificial Sequence
  Synthetic
agcaaaagcucgtgggtgua

SEQ ID NO: 52805 - DNA, 20 bp, Artificial Sequence
  Synthetic
aucttcgagaucgggaggga

SEQ ID NO: 52806 - DNA, 24 bp, Artificial Sequence
  Synthetic
cctccuggtattccugggagaaat

SEQ ID NO: 52807 - DNA, 26 bp, Artificial Sequence
  Synthetic
accgtaautgttataccugaggacca

SEQ ID NO: 52808 - DNA, 28 bp, Artificial Sequence
  Synthetic
tgttactggugatgatttgttagucgaa

SEQ ID NO: 52809 - DNA, 27 bp, Artificial Sequence
  Synthetic
tcaagaaauaaccagatctgtugcagt

SEQ ID NO: 52810 - DNA, 21 bp, Artificial Sequence
  Synthetic
ggacttagagguggagcuggt

SEQ ID NO: 52811 - DNA, 22 bp, Artificial Sequence
  Synthetic
cctcctcttuctccaggcatuc

SEQ ID NO: 52812 - DNA, 27 bp, Artificial Sequence
  Synthetic
agagaaaagcauagcattcaagccaua

SEQ ID NO: 52813 - DNA, 23 bp, Artificial Sequence
  Synthetic
aagggutaccttatcuccaggct

SEQ ID NO: 52814 - DNA, 25 bp, Artificial Sequence
  Synthetic
aagtgaaatggcucttacacgtuct

SEQ ID NO: 52815 - DNA, 27 bp, Artificial Sequence
  Synthetic
cacaggtguaaaacatgctgtcattut

SEQ ID NO: 52816 - DNA, 28 bp, Artificial Sequence
  Synthetic
aagcctgcucaagaaatcatttcattut

SEQ ID NO: 52817 - DNA, 28 bp, Artificial Sequence
  Synthetic
ttggtatggucacttaatgttggtucat

SEQ ID NO: 52818 - DNA, 28 bp, Artificial Sequence
  Synthetic
cccatacattctuattcactttcccuga

SEQ ID NO: 52819 - DNA, 28 bp, Artificial Sequence
  Synthetic
catagactcaccucacaaatatctgugt

SEQ ID NO: 52820 - DNA, 24 bp, Artificial Sequence
  Synthetic
ttctcttgagutgctgaatgcuga

SEQ ID NO: 52821 - DNA, 24 bp, Artificial Sequence
  Synthetic
ggagccattcuctgtgacaagaua

SEQ ID NO: 52822 - DNA, 28 bp, Artificial Sequence
  Synthetic
gctgtggataaauctgccgaatcataut

SEQ ID NO: 52823 - DNA, 29 bp, Artificial Sequence
  Synthetic
gatatgtatgtttugatgttggcttguga

SEQ ID NO: 52824 - DNA, 21 bp, Artificial Sequence
  Synthetic
tcgtttccacugccagcttua

SEQ ID NO: 52825 - DNA, 21 bp, Artificial Sequence
  Synthetic
caagcgagaaggacaugguca

SEQ ID NO: 52826 - DNA, 20 bp, Artificial Sequence
  Synthetic
cutccuggaagcaccaaagg

SEQ ID NO: 52827 - DNA, 25 bp, Artificial Sequence
  Synthetic
tggatataattuccgagcgaagcug

SEQ ID NO: 52828 - DNA, 19 bp, Artificial Sequence
  Synthetic
ctgcggcacaguccacuaa

SEQ ID NO: 52829 - DNA, 24 bp, Artificial Sequence
  Synthetic
tgattgcacugactgccaacuaat

SEQ ID NO: 52830 - DNA, 22 bp, Artificial Sequence
  Synthetic
caacaagcacagucatgcugag

SEQ ID NO: 52831 - DNA, 20 bp, Artificial Sequence
  Synthetic
cgtaaggcgccaaugatgug

SEQ ID NO: 52832 - DNA, 21 bp, Artificial Sequence
  Synthetic
aactcatggugcccttuggat

SEQ ID NO: 52833 - DNA, 21 bp, Artificial Sequence
  Synthetic
tgttuagggagccgtctucag

SEQ ID NO: 52834 - DNA, 20 bp, Artificial Sequence
  Synthetic
ctcccgcccaagugagttua

SEQ ID NO: 52835 - DNA, 25 bp, Artificial Sequence
  Synthetic
tcttcaaagacccacaucttgacug

SEQ ID NO: 52836 - DNA, 23 bp, Artificial Sequence
  Synthetic
aatgccucaaccgtggacaauat

SEQ ID NO: 52837 - DNA, 30 bp, Artificial Sequence
  Synthetic
tcttgaaaggtuccaaaataatgtgaugga

SEQ ID NO: 52838 - DNA, 22 bp, Artificial Sequence
  Synthetic
gctccacugctgagtaggauca

SEQ ID NO: 52839 - DNA, 23 bp, Artificial Sequence
  Synthetic
gccattagaugtgggcatucaca

SEQ ID NO: 52840 - DNA, 23 bp, Artificial Sequence
  Synthetic
cauggcatggaauggaaaggaag

SEQ ID NO: 52841 - DNA, 20 bp, Artificial Sequence
  Synthetic
tgctgcucagctttcctuga

SEQ ID NO: 52842 - DNA, 21 bp, Artificial Sequence
  Synthetic
gtcctcataggugcctgtguc

SEQ ID NO: 52843 - DNA, 25 bp, Artificial Sequence
  Synthetic
ggtgtagacugttgtagaactgugt

SEQ ID NO: 52844 - DNA, 23 bp, Artificial Sequence
  Synthetic
aggagucttctgguaacagcact

SEQ ID NO: 52845 - DNA, 21 bp, Artificial Sequence
  Synthetic
ggccgatgcuatgggaagaug

SEQ ID NO: 52846 - DNA, 26 bp, Artificial Sequence
  Synthetic
ctccaguaagaaaaactccttcugct

SEQ ID NO: 52847 - DNA, 28 bp, Artificial Sequence
  Synthetic
acattggagaaaaugaaggtggtatuga

SEQ ID NO: 52848 - DNA, 29 bp, Artificial Sequence
  Synthetic
aatcctatcatcuccttagtgacagatut

SEQ ID NO: 52849 - DNA, 28 bp, Artificial Sequence
  Synthetic
gggataaagtggautacctggatgatut

SEQ ID NO: 52850 - DNA, 25 bp, Artificial Sequence
  Synthetic
caatgctuaaccagttttgcucaga

SEQ ID NO: 52851 - DNA, 25 bp, Artificial Sequence
  Synthetic
aggcugaagacacacagtatttugt

SEQ ID NO: 52852 - DNA, 28 bp, Artificial Sequence
  Synthetic
gaaagtggctugaacaacacaaatauga

SEQ ID NO: 52853 - DNA, 25 bp, Artificial Sequence
  Synthetic
cctgctcaaaaauctcctgatcuct

SEQ ID NO: 52854 - DNA, 24 bp, Artificial Sequence
  Synthetic
gcacatttgtutcaagccacugat

SEQ ID NO: 52855 - DNA, 20 bp, Artificial Sequence
  Synthetic
gacucagccaacaagacgug

SEQ ID NO: 52856 - DNA, 19 bp, Artificial Sequence
  Synthetic
gccagugtcttugcagagg

SEQ ID NO: 52857 - DNA, 20 bp, Artificial Sequence
  Synthetic
agctctgcccuttgccaaut

SEQ ID NO: 52858 - DNA, 22 bp, Artificial Sequence
  Synthetic
ttttggcaaucggtgacccuaa

SEQ ID NO: 52859 - DNA, 20 bp, Artificial Sequence
  Synthetic
gggagccaagaugttgugag

SEQ ID NO: 52860 - DNA, 26 bp, Artificial Sequence
  Synthetic
tcatcttgttgugcatacttcuggag

SEQ ID NO: 52861 - DNA, 28 bp, Artificial Sequence
  Synthetic
tgtaatctccccutttctctctctctut

SEQ ID NO: 52862 - DNA, 18 bp, Artificial Sequence
  Synthetic
ggutccggtuggcacaca

SEQ ID NO: 52863 - DNA, 17 bp, Artificial Sequence
  Synthetic
gctgacugccgguggag

SEQ ID NO: 52864 - DNA, 19 bp, Artificial Sequence
  Synthetic
gcctcauggttgcccauct

SEQ ID NO: 52865 - DNA, 19 bp, Artificial Sequence
  Synthetic
gggaggcautcagcaccug

SEQ ID NO: 52866 - DNA, 17 bp, Artificial Sequence
  Synthetic
gccccugagcgtcauct

SEQ ID NO: 52867 - DNA, 20 bp, Artificial Sequence
  Synthetic
tgcttgagccacuggatgug

SEQ ID NO: 52868 - DNA, 21 bp, Artificial Sequence
  Synthetic
caugagcuccaacacaccact

SEQ ID NO: 52869 - DNA, 20 bp, Artificial Sequence
  Synthetic
cctctgacuggtggctgtut

SEQ ID NO: 52870 - DNA, 26 bp, Artificial Sequence
  Synthetic
ggtgtctgagauggagatgaugaaga

SEQ ID NO: 52871 - DNA, 21 bp, Artificial Sequence
  Synthetic
gcagaaacucccgcaggtuac

SEQ ID NO: 52872 - DNA, 20 bp, Artificial Sequence
  Synthetic
ggagagguggagaggctuca

SEQ ID NO: 52873 - DNA, 19 bp, Artificial Sequence
  Synthetic
gcgtccuactggcaugacc

SEQ ID NO: 52874 - DNA, 27 bp, Artificial Sequence
  Synthetic
gatctagattucccacttaatguggca

SEQ ID NO: 52875 - DNA, 21 bp, Artificial Sequence
  Synthetic
gaaaccacccacagcuttgut

SEQ ID NO: 52876 - DNA, 20 bp, Artificial Sequence
  Synthetic
tcccacucccacaugacaga

SEQ ID NO: 52877 - DNA, 26 bp, Artificial Sequence
  Synthetic
catgtatacuaacactgtgctugcct

SEQ ID NO: 52878 - DNA, 22 bp, Artificial Sequence
  Synthetic
acaatcugatgctgtugcaggt

SEQ ID NO: 52879 - DNA, 23 bp, Artificial Sequence
  Synthetic
gacttggcaugtgtgttcugaag

SEQ ID NO: 52880 - DNA, 28 bp, Artificial Sequence
  Synthetic
gtgatgguaaaaacagaaaugaaacgga

SEQ ID NO: 52881 - DNA, 22 bp, Artificial Sequence
  Synthetic
aattcctcaccugcgttgacut

SEQ ID NO: 52882 - DNA, 22 bp, Artificial Sequence
  Synthetic
gccauattugaagcccaccaaa

SEQ ID NO: 52883 - DNA, 25 bp, Artificial Sequence
  Synthetic
actatagggcugaaggtagcttugt

SEQ ID NO: 52884 - DNA, 25 bp, Artificial Sequence
  Synthetic
agagtatgtugactgtatgctugcc

SEQ ID NO: 52885 - DNA, 22 bp, Artificial Sequence
  Synthetic
agccgauaacaagtgacacugt

SEQ ID NO: 52886 - DNA, 28 bp, Artificial Sequence
  Synthetic
cagaatcuacagaaacatctgtccugaa

SEQ ID NO: 52887 - DNA, 25 bp, Artificial Sequence
  Synthetic
ccttcaccagcuccttcacttuaat

SEQ ID NO: 52888 - DNA, 25 bp, Artificial Sequence
  Synthetic
caaagaaaagugaggagcaaacugg

SEQ ID NO: 52889 - DNA, 24 bp, Artificial Sequence
  Synthetic
cctagaguggcctctttcugaaaa

SEQ ID NO: 52890 - DNA, 29 bp, Artificial Sequence
  Synthetic
ctcaagactcauccattactacucaaaca

SEQ ID NO: 52891 - DNA, 28 bp, Artificial Sequence
  Synthetic
ggatgtgatgguaacagaatacactuca

SEQ ID NO: 52892 - DNA, 29 bp, Artificial Sequence
  Synthetic
gtgacccaaatugctatgacttaaagaug

SEQ ID NO: 52893 - DNA, 25 bp, Artificial Sequence
  Synthetic
ctacgaattuaaccaagcggactut

SEQ ID NO: 52894 - DNA, 23 bp, Artificial Sequence
  Synthetic
gcctaacuccttgagtgttucca

SEQ ID NO: 52895 - DNA, 28 bp, Artificial Sequence
  Synthetic
cgggaaagaagaugactgtttttatuga

SEQ ID NO: 52896 - DNA, 24 bp, Artificial Sequence
  Synthetic
ggctcgaaaaugatcttgcagtut

SEQ ID NO: 52897 - DNA, 25 bp, Artificial Sequence
  Synthetic
acttatgtgtacaugcactgcauga

SEQ ID NO: 52898 - DNA, 24 bp, Artificial Sequence
  Synthetic
tgtatctgccugtgtatccctcut

SEQ ID NO: 52899 - DNA, 20 bp, Artificial Sequence
  Synthetic
ggaagaccaccugcauccac

SEQ ID NO: 52900 - DNA, 23 bp, Artificial Sequence
  Synthetic
cgttgcccugtgaagcatatuac

SEQ ID NO: 52901 - DNA, 28 bp, Artificial Sequence
  Synthetic
ggcatttccaguttatctgcatatugat

SEQ ID NO: 52902 - DNA, 21 bp, Artificial Sequence
  Synthetic
ggtaaatugggccccgagaut

SEQ ID NO: 52903 - DNA, 27 bp, Artificial Sequence
  Synthetic
ccatttgcugaatgtgttugacaacat

SEQ ID NO: 52904 - DNA, 23 bp, Artificial Sequence
  Synthetic
attccagagcuagccaagaaugg

SEQ ID NO: 52905 - DNA, 19 bp, Artificial Sequence
  Synthetic
agagtgcauggcccagaug

SEQ ID NO: 52906 - DNA, 21 bp, Artificial Sequence
  Synthetic
gaccttggccaucctgttgua

SEQ ID NO: 52907 - DNA, 26 bp, Artificial Sequence
  Synthetic
gggctgacautgatatgattucaaag

SEQ ID NO: 52908 - DNA, 21 bp, Artificial Sequence
  Synthetic
gatatgccccaugtccccaut

SEQ ID NO: 52909 - DNA, 26 bp, Artificial Sequence
  Synthetic
gggcagtttcagutgctatttctgua

SEQ ID NO: 52910 - DNA, 25 bp, Artificial Sequence
  Synthetic
ttcatattgtuggccataccagugt

SEQ ID NO: 52911 - DNA, 21 bp, Artificial Sequence
  Synthetic
gggtcatcacugccaaggtua

SEQ ID NO: 52912 - DNA, 28 bp, Artificial Sequence
  Synthetic
tcactgaattucctagaccctauggaat

SEQ ID NO: 52913 - DNA, 24 bp, Artificial Sequence
  Synthetic
tcctatgauccccagagcttctuc

SEQ ID NO: 52914 - DNA, 26 bp, Artificial Sequence
  Synthetic
tcaggaactgcucttaggaaaacauc

SEQ ID NO: 52915 - DNA, 28 bp, Artificial Sequence
  Synthetic
actctcagaagucaacaatgagtttuct

SEQ ID NO: 52916 - DNA, 20 bp, Artificial Sequence
  Synthetic
ccatgcgacaguctggaugt

SEQ ID NO: 52917 - DNA, 23 bp, Artificial Sequence
  Synthetic
cttgtcaucaggctgtgagugaa

SEQ ID NO: 52918 - DNA, 28 bp, Artificial Sequence
  Synthetic
aggaagcttagauagttctcgttcugaa

SEQ ID NO: 52919 - DNA, 23 bp, Artificial Sequence
  Synthetic
cccagaactuctgtcttccugag

SEQ ID NO: 52920 - DNA, 23 bp, Artificial Sequence
  Synthetic
ctgcccagcaaccautaaguaga

SEQ ID NO: 52921 - DNA, 23 bp, Artificial Sequence
  Synthetic
cctgaggacutagtugaagcagt

SEQ ID NO: 52922 - DNA, 21 bp, Artificial Sequence
  Synthetic
tccttuggactccuggagaca

SEQ ID NO: 52923 - DNA, 23 bp, Artificial Sequence
  Synthetic
tcctcactgcuctcagagtctuc

SEQ ID NO: 52924 - DNA, 26 bp, Artificial Sequence
  Synthetic
cctgtcataaacutgaccaggttgua

SEQ ID NO: 52925 - DNA, 23 bp, Artificial Sequence
  Synthetic
gcttctgcautgatttccacucc

SEQ ID NO: 52926 - DNA, 21 bp, Artificial Sequence
  Synthetic
agatgcugcgaaaaucaggct

SEQ ID NO: 52927 - DNA, 23 bp, Artificial Sequence
  Synthetic
tgccaacaaugtccactauggat

SEQ ID NO: 52928 - DNA, 25 bp, Artificial Sequence
  Synthetic
agcaaaacagaagccuctcatuagt

SEQ ID NO: 52929 - DNA, 24 bp, Artificial Sequence
  Synthetic
gccccacccuttattaacgagtuc

SEQ ID NO: 52930 - DNA, 24 bp, Artificial Sequence
  Synthetic
ccttttguaagcagcaucgagaag

SEQ ID NO: 52931 - DNA, 22 bp, Artificial Sequence
  Synthetic
tctgacatttugggtgccugag

SEQ ID NO: 52932 - DNA, 20 bp, Artificial Sequence
  Synthetic
gcataugccgagagctgtug

SEQ ID NO: 52933 - DNA, 21 bp, Artificial Sequence
  Synthetic
cctgcagaagcucttccugag

SEQ ID NO: 52934 - DNA, 22 bp, Artificial Sequence
  Synthetic
agcctgtgaugagtgttgctut

SEQ ID NO: 52935 - DNA, 26 bp, Artificial Sequence
  Synthetic
ggtaatgtaacucaaggtcggctauc

SEQ ID NO: 52936 - DNA, 21 bp, Artificial Sequence
  Synthetic
ggtcttgtugacccggaagug

SEQ ID NO: 52937 - DNA, 27 bp, Artificial Sequence
  Synthetic
atggagcgattuatggcatccttauag

SEQ ID NO: 52938 - DNA, 26 bp, Artificial Sequence
  Synthetic
tgctttgtguaaacctattccctgut

SEQ ID NO: 52939 - DNA, 18 bp, Artificial Sequence
  Synthetic
agcaacgaaugccugcct

SEQ ID NO: 52940 - DNA, 21 bp, Artificial Sequence
  Synthetic
gccgaccauccttatcctugt

SEQ ID NO: 52941 - DNA, 21 bp, Artificial Sequence
  Synthetic
cactctccaugcacctcacug

SEQ ID NO: 52942 - DNA, 23 bp, Artificial Sequence
  Synthetic
acucaccagtuaaaccaacagca

SEQ ID NO: 52943 - DNA, 21 bp, Artificial Sequence
  Synthetic
gagggccaguttgaccattuc

SEQ ID NO: 52944 - DNA, 27 bp, Artificial Sequence
  Synthetic
gtactggactaugaaggagtcaaacug

SEQ ID NO: 52945 - DNA, 24 bp, Artificial Sequence
  Synthetic
tctttacuaacagcccccuaccat

SEQ ID NO: 52946 - DNA, 26 bp, Artificial Sequence
  Synthetic
aggatattgauctgagcagaguccaa

SEQ ID NO: 52947 - DNA, 20 bp, Artificial Sequence
  Synthetic
gcctacutccaacugcgcat

SEQ ID NO: 52948 - DNA, 20 bp, Artificial Sequence
  Synthetic
tcaggatgcutggtgctugt

SEQ ID NO: 52949 - DNA, 24 bp, Artificial Sequence
  Synthetic
tctgtttaatutgggagcauggct

SEQ ID NO: 52950 - DNA, 24 bp, Artificial Sequence
  Synthetic
ctgtctccucacgataatcauccc

SEQ ID NO: 52951 - DNA, 20 bp, Artificial Sequence
  Synthetic
aagcctccuctcagcccuaa

SEQ ID NO: 52952 - DNA, 21 bp, Artificial Sequence
  Synthetic
cgcactcaugccaggaaugat

SEQ ID NO: 52953 - DNA, 21 bp, Artificial Sequence
  Synthetic
gcactaatguggcaagcctuc

SEQ ID NO: 52954 - DNA, 20 bp, Artificial Sequence
  Synthetic
tgcttcccugtgagctcuct

SEQ ID NO: 52955 - DNA, 26 bp, Artificial Sequence
  Synthetic
gctcaaacccccautatgaagagtut

SEQ ID NO: 52956 - DNA, 18 bp, Artificial Sequence
  Synthetic
gcccagcgugatctgugt

SEQ ID NO: 52957 - DNA, 20 bp, Artificial Sequence
  Synthetic
ccaagcggguctcttcctug

SEQ ID NO: 52958 - DNA, 27 bp, Artificial Sequence
  Synthetic
ttgctttctuccacagtacuaaaacca

SEQ ID NO: 52959 - DNA, 25 bp, Artificial Sequence
  Synthetic
gcuaaaaagcagcugaaaggcaaaa

SEQ ID NO: 52960 - DNA, 22 bp, Artificial Sequence
  Synthetic
gaggccacugatttggttcuga

SEQ ID NO: 52961 - DNA, 25 bp, Artificial Sequence
  Synthetic
ctgcuccacaaaattccgucaaaaa

SEQ ID NO: 52962 - DNA, 28 bp, Artificial Sequence
  Synthetic
acttaagagaccuaacattttgccauca

SEQ ID NO: 52963 - DNA, 29 bp, Artificial Sequence
  Synthetic
agcatctcttgtuttcctaagtgacauaa

SEQ ID NO: 52964 - DNA, 21 bp, Artificial Sequence
  Synthetic
cagccaggaacutgacuccat

SEQ ID NO: 52965 - DNA, 22 bp, Artificial Sequence
  Synthetic
tcccagggacugacaatttucc

SEQ ID NO: 52966 - DNA, 21 bp, Artificial Sequence
  Synthetic
ccttgcauggcagtgacuact

SEQ ID NO: 52967 - DNA, 22 bp, Artificial Sequence
  Synthetic
caatcggtccugtgacattgug

SEQ ID NO: 52968 - DNA, 29 bp, Artificial Sequence
  Synthetic
gtactcagcaucaaaatcaaaagttucca

SEQ ID NO: 52969 - DNA, 26 bp, Artificial Sequence
  Synthetic
atgacctgcttugccatattgaguat

SEQ ID NO: 52970 - DNA, 26 bp, Artificial Sequence
  Synthetic
tctaccatatucaaagcccccuagat

SEQ ID NO: 52971 - DNA, 26 bp, Artificial Sequence
  Synthetic
tctgtgcctaugagctataacaaugg

SEQ ID NO: 52972 - DNA, 21 bp, Artificial Sequence
  Synthetic
gtctagaaugcagccccugaa

SEQ ID NO: 52973 - DNA, 28 bp, Artificial Sequence
  Synthetic
tctuttccacataatcugacaacaacct

SEQ ID NO: 52974 - DNA, 23 bp, Artificial Sequence
  Synthetic
gggtttuccgagtacatgatuga

SEQ ID NO: 52975 - DNA, 28 bp, Artificial Sequence
  Synthetic
tgcttctggcuttgttttattgugaaat

SEQ ID NO: 52976 - DNA, 27 bp, Artificial Sequence
  Synthetic
cttccatguagacaaggattugaaagg

SEQ ID NO: 52977 - DNA, 24 bp, Artificial Sequence
  Synthetic
tggtttcatgtuttgccttgtcug

SEQ ID NO: 52978 - DNA, 24 bp, Artificial Sequence
  Synthetic
gcagtcaucaatgtcctgtucaca

SEQ ID NO: 52979 - DNA, 31 bp, Artificial Sequence
  Synthetic
cctgtactaaggutaaaggaatgtuaagagt

SEQ ID NO: 52980 - DNA, 28 bp, Artificial Sequence
  Synthetic
ccccttaaatgugtactagttgtuccat

SEQ ID NO: 52981 - DNA, 26 bp, Artificial Sequence
  Synthetic
tgactattgctuagggaaccacagua

SEQ ID NO: 52982 - DNA, 27 bp, Artificial Sequence
  Synthetic
ccagaaagaaauaggcatcaauaaccc

SEQ ID NO: 52983 - DNA, 28 bp, Artificial Sequence
  Synthetic
aacttattttguggcagatgttgucaaa

SEQ ID NO: 52984 - DNA, 28 bp, Artificial Sequence
  Synthetic
tcagtaatattuggtgaagatgtugcct

SEQ ID NO: 52985 - DNA, 25 bp, Artificial Sequence
  Synthetic
gtggcgtuggaaatgaaaaggaaut

SEQ ID NO: 52986 - DNA, 21 bp, Artificial Sequence
  Synthetic
catgccccguctttctttcug

SEQ ID NO: 52987 - DNA, 24 bp, Artificial Sequence
  Synthetic
acataccttgautcctgggcaaug

SEQ ID NO: 52988 - DNA, 27 bp, Artificial Sequence
  Synthetic
cacagagttacacutcatcctgaucaa

SEQ ID NO: 52989 - DNA, 26 bp, Artificial Sequence
  Synthetic
cttcagagautggtgucaaaagagga

SEQ ID NO: 52990 - DNA, 17 bp, Artificial Sequence
  Synthetic
tcucgggugaggagcca

SEQ ID NO: 52991 - DNA, 17 bp, Artificial Sequence
  Synthetic
gcguctugggcgaaact

SEQ ID NO: 52992 - DNA, 28 bp, Artificial Sequence
  Synthetic
tcttcaaaccccautagcatgaatuact

SEQ ID NO: 52993 - DNA, 28 bp, Artificial Sequence
  Synthetic
agtgaacttcguaagaaaacttcauggt

SEQ ID NO: 52994 - DNA, 28 bp, Artificial Sequence
  Synthetic
ctgaagcacctutaaatcctcctatuga

SEQ ID NO: 52995 - DNA, 20 bp, Artificial Sequence
  Synthetic
cgacacaguttgcgauccca

SEQ ID NO: 52996 - DNA, 27 bp, Artificial Sequence
  Synthetic
gctctatagtttaugtcttggctggut

SEQ ID NO: 52997 - DNA, 25 bp, Artificial Sequence
  Synthetic
tctctgatgaguctgaagtccacuc

SEQ ID NO: 52998 - DNA, 28 bp, Artificial Sequence
  Synthetic
acutcaaaatacuggagcaaagacaagt

SEQ ID NO: 52999 - DNA, 28 bp, Artificial Sequence
  Synthetic
tggcagcttaaauagaaaccagactuaa

SEQ ID NO: 53000 - DNA, 20 bp, Artificial Sequence
  Synthetic
gacactaugagtgccgugct

SEQ ID NO: 53001 - DNA, 21 bp, Artificial Sequence
  Synthetic
gcagcagtutctgtccttucc

SEQ ID NO: 53002 - DNA, 29 bp, Artificial Sequence
  Synthetic
actctacataguggagaaataaccaguca

SEQ ID NO: 53003 - DNA, 25 bp, Artificial Sequence
  Synthetic
aaaucatgatcaaatugcgcacagt

SEQ ID NO: 53004 - DNA, 28 bp, Artificial Sequence
  Synthetic
ccctaggaauaaaagacatacacgugaa

SEQ ID NO: 53005 - DNA, 27 bp, Artificial Sequence
  Synthetic
aatttgtaggctutcctgttctcauca

SEQ ID NO: 53006 - DNA, 26 bp, Artificial Sequence
  Synthetic
acaaacucttggtactucaaacacga

SEQ ID NO: 53007 - DNA, 28 bp, Artificial Sequence
  Synthetic
ttcccaatctccuttttcatgttctcut

SEQ ID NO: 53008 - DNA, 30 bp, Artificial Sequence
  Synthetic
tgctttatgggauaaggaatagaattgcut

SEQ ID NO: 53009 - DNA, 28 bp, Artificial Sequence
  Synthetic
ctgtctcatatcutccaactgttctuca

SEQ ID NO: 53010 - DNA, 28 bp, Artificial Sequence
  Synthetic
ccaagaagaaagagaautactguccaga

SEQ ID NO: 53011 - DNA, 28 bp, Artificial Sequence
  Synthetic
ccacctuaagcctttgaagaauacaaat

SEQ ID NO: 53012 - DNA, 22 bp, Artificial Sequence
  Synthetic
gaccgaaaacacuttggagcug

SEQ ID NO: 53013 - DNA, 28 bp, Artificial Sequence
  Synthetic
acagcctcaacuttggttttagatcaua

SEQ ID NO: 53014 - DNA, 23 bp, Artificial Sequence
  Synthetic
tgcatgttugagccacttccuat

SEQ ID NO: 53015 - DNA, 29 bp, Artificial Sequence
  Synthetic
gcatgtagttctugcatcttctcaattut

SEQ ID NO: 53016 - DNA, 28 bp, Artificial Sequence
  Synthetic
ggtactacagaugcagttggtttacuaa

SEQ ID NO: 53017 - DNA, 32 bp, Artificial Sequence
  Synthetic
catagtggctccuattaaaatcttaacctuca

SEQ ID NO: 53018 - DNA, 24 bp, Artificial Sequence
  Synthetic
ggagagttguctctttctcauccc

SEQ ID NO: 53019 - DNA, 25 bp, Artificial Sequence
  Synthetic
aagcugagaacatgcuaaagaacca

SEQ ID NO: 53020 - DNA, 22 bp, Artificial Sequence
  Synthetic
gcttugagcaaacagtggcuaa

SEQ ID NO: 53021 - DNA, 22 bp, Artificial Sequence
  Synthetic
gcttaggccuggtcgacuagat

SEQ ID NO: 53022 - DNA, 23 bp, Artificial Sequence
  Synthetic
cacutgttgacucacacggagat

SEQ ID NO: 53023 - DNA, 25 bp, Artificial Sequence
  Synthetic
caacctgcauaaacctagagaccug

SEQ ID NO: 53024 - DNA, 23 bp, Artificial Sequence
  Synthetic
ctcctgtgaguaaaagagcucca

SEQ ID NO: 53025 - DNA, 24 bp, Artificial Sequence
  Synthetic
ctgggaaggcaaaautcagcatut

SEQ ID NO: 53026 - DNA, 27 bp, Artificial Sequence
  Synthetic
cctctgatatuaccaaaggaagcaugg

SEQ ID NO: 53027 - DNA, 28 bp, Artificial Sequence
  Synthetic
tttggtcaggcutacactttatuaggaa

SEQ ID NO: 53028 - DNA, 27 bp, Artificial Sequence
  Synthetic
gatgatgagucaactggaatctcugac

SEQ ID NO: 53029 - DNA, 22 bp, Artificial Sequence
  Synthetic
ggcuggaaacugacaccaaact

SEQ ID NO: 53030 - DNA, 23 bp, Artificial Sequence
  Synthetic
cccccattugagagtccaagtut

SEQ ID NO: 53031 - DNA, 25 bp, Artificial Sequence
  Synthetic
caagctatagaaguggtctggaguc

SEQ ID NO: 53032 - DNA, 23 bp, Artificial Sequence
  Synthetic
caggutggaaacugaacaaagca

SEQ ID NO: 53033 - DNA, 27 bp, Artificial Sequence
  Synthetic
ggatgaaacugaacaaaaauggaagca

SEQ ID NO: 53034 - DNA, 24 bp, Artificial Sequence
  Synthetic
aactattctguttcatccguggca

SEQ ID NO: 53035 - DNA, 26 bp, Artificial Sequence
  Synthetic
ctgaggguaagaaagttgtggtgaut

SEQ ID NO: 53036 - DNA, 21 bp, Artificial Sequence
  Synthetic
gactcaagggugaacctggug

SEQ ID NO: 53037 - DNA, 21 bp, Artificial Sequence
  Synthetic
ccagaccaccugccaagaaut

SEQ ID NO: 53038 - DNA, 21 bp, Artificial Sequence
  Synthetic
agggttcgtuactgagcacug

SEQ ID NO: 53039 - DNA, 28 bp, Artificial Sequence
  Synthetic
catcaatctgggutgcattttaaucact

SEQ ID NO: 53040 - DNA, 28 bp, Artificial Sequence
  Synthetic
aagctgtttttauacatgagttcuccca

SEQ ID NO: 53041 - DNA, 28 bp, Artificial Sequence
  Synthetic
gtcttgtcctugactttaactacctuct

SEQ ID NO: 53042 - DNA, 23 bp, Artificial Sequence
  Synthetic
gttaaagggcagagutccctcut

SEQ ID NO: 53043 - DNA, 28 bp, Artificial Sequence
  Synthetic
aagccaaacugaaggctatactgaaaua

SEQ ID NO: 53044 - DNA, 26 bp, Artificial Sequence
  Synthetic
ggagaaactaacutgatgggatgugg

SEQ ID NO: 53045 - DNA, 27 bp, Artificial Sequence
  Synthetic
agttgcagttgcutctaaaaatcatut

SEQ ID NO: 53046 - DNA, 21 bp, Artificial Sequence
  Synthetic
cggctcagcutctttcgugaa

SEQ ID NO: 53047 - DNA, 26 bp, Artificial Sequence
  Synthetic
ctcagaacaacagaucccaccatuaa

SEQ ID NO: 53048 - DNA, 22 bp, Artificial Sequence
  Synthetic
gaagugtgtctgugaacaggct

SEQ ID NO: 53049 - DNA, 27 bp, Artificial Sequence
  Synthetic
gaaattaugcaatcggtaugcagagaa

SEQ ID NO: 53050 - DNA, 29 bp, Artificial Sequence
  Synthetic
gaattaauagaaacagagcugacggaaga

SEQ ID NO: 53051 - DNA, 24 bp, Artificial Sequence
  Synthetic
ttccctgctaugaagccatcttut

SEQ ID NO: 53052 - DNA, 23 bp, Artificial Sequence
  Synthetic
attacagtguccgaagttcgcut

SEQ ID NO: 53053 - DNA, 28 bp, Artificial Sequence
  Synthetic
ccctgtaaccaagutcaaatatcaucac

SEQ ID NO: 53054 - DNA, 27 bp, Artificial Sequence
  Synthetic
ctaatcaaaggaaucatccuccggaaa

SEQ ID NO: 53055 - DNA, 28 bp, Artificial Sequence
  Synthetic
tcgcacattttugcaaagttcatuagaa

SEQ ID NO: 53056 - DNA, 27 bp, Artificial Sequence
  Synthetic
gagggtaaaautaagcacaguggaaga

SEQ ID NO: 53057 - DNA, 28 bp, Artificial Sequence
  Synthetic
ggtagtgtgaagggutcatatgcauaat

SEQ ID NO: 53058 - DNA, 26 bp, Artificial Sequence
  Synthetic
tcagtaaguaactttggcugccaaat

SEQ ID NO: 53059 - DNA, 24 bp, Artificial Sequence
  Synthetic
cggctacucccacgtaaatguaaa

SEQ ID NO: 53060 - DNA, 25 bp, Artificial Sequence
  Synthetic
aacatcttcctugaggctgaatugt

SEQ ID NO: 53061 - DNA, 24 bp, Artificial Sequence
  Synthetic
cccatcagcucttgtttttgcaut

SEQ ID NO: 53062 - DNA, 25 bp, Artificial Sequence
  Synthetic
tutttagtctuccacaaggcagaca

SEQ ID NO: 53063 - DNA, 28 bp, Artificial Sequence
  Synthetic
ctgtacctgtttcuactccagatttcut

SEQ ID NO: 53064 - DNA, 23 bp, Artificial Sequence
  Synthetic
gaggctcugtgattttcgugact

SEQ ID NO: 53065 - DNA, 22 bp, Artificial Sequence
  Synthetic
acaggtcagugcatgttcctug

SEQ ID NO: 53066 - DNA, 20 bp, Artificial Sequence
  Synthetic
acctccucgttggcatugac

SEQ ID NO: 53067 - DNA, 19 bp, Artificial Sequence
  Synthetic
cgtgtgggacuggctcauc

SEQ ID NO: 53068 - DNA, 18 bp, Artificial Sequence
  Synthetic
tgccacguggttguccat

SEQ ID NO: 53069 - DNA, 17 bp, Artificial Sequence
  Synthetic
acgaccacgugcctcuc

SEQ ID NO: 53070 - DNA, 19 bp, Artificial Sequence
  Synthetic
gctcctacuccagccccua

SEQ ID NO: 53071 - DNA, 18 bp, Artificial Sequence
  Synthetic
cccucgacagggcucaag

SEQ ID NO: 53072 - DNA, 20 bp, Artificial Sequence
  Synthetic
aatcagacgggaagcugguc

SEQ ID NO: 53073 - DNA, 23 bp, Artificial Sequence
  Synthetic
tgatttctggaccugcagcttut

SEQ ID NO: 53074 - DNA, 22 bp, Artificial Sequence
  Synthetic
aggtccagguactcctgtgaug

SEQ ID NO: 53075 - DNA, 21 bp, Artificial Sequence
  Synthetic
cttcaagcagcugguggaaga

SEQ ID NO: 53076 - DNA, 21 bp, Artificial Sequence
  Synthetic
gccccguctctccaataucag

SEQ ID NO: 53077 - DNA, 25 bp, Artificial Sequence
  Synthetic
ggatcaguactccagugagaagaca

SEQ ID NO: 53078 - DNA, 26 bp, Artificial Sequence
  Synthetic
agtttcagaaacaucagccacuaact

SEQ ID NO: 53079 - DNA, 22 bp, Artificial Sequence
  Synthetic
gctgagcatucggtccacuaac

SEQ ID NO: 53080 - DNA, 29 bp, Artificial Sequence
  Synthetic
gaagttgagcuaacaaacatucagaagaa

SEQ ID NO: 53081 - DNA, 25 bp, Artificial Sequence
  Synthetic
ttctggtgctucaatcgtcactuaa

SEQ ID NO: 53082 - DNA, 24 bp, Artificial Sequence
  Synthetic
tgtttttaacucttgcacccugga

SEQ ID NO: 53083 - DNA, 21 bp, Artificial Sequence
  Synthetic
tgctcagugagttggcgttua

SEQ ID NO: 53084 - DNA, 23 bp, Artificial Sequence
  Synthetic
gctcactgcaacuctgttctgut

SEQ ID NO: 53085 - DNA, 28 bp, Artificial Sequence
  Synthetic
ctctcttgaggccuttgataaatcuaca

SEQ ID NO: 53086 - DNA, 28 bp, Artificial Sequence
  Synthetic
ctgctgugaactattaaauccagaggaa

SEQ ID NO: 53087 - DNA, 24 bp, Artificial Sequence
  Synthetic
ccacattatuccacaagcctggua

SEQ ID NO: 53088 - DNA, 22 bp, Artificial Sequence
  Synthetic
gggcagcaauaatctgctgaug

SEQ ID NO: 53089 - DNA, 23 bp, Artificial Sequence
  Synthetic
tcacattcacgaaguccccttut

SEQ ID NO: 53090 - DNA, 23 bp, Artificial Sequence
  Synthetic
cagaguttcatggtucccagaga

SEQ ID NO: 53091 - DNA, 28 bp, Artificial Sequence
  Synthetic
gtttattcctgcugtgttcaggtuaaaa

SEQ ID NO: 53092 - DNA, 21 bp, Artificial Sequence
  Synthetic
gcaatttccugccgaatgcug

SEQ ID NO: 53093 - DNA, 27 bp, Artificial Sequence
  Synthetic
aagggauacgaacttttctuccaaact

SEQ ID NO: 53094 - DNA, 22 bp, Artificial Sequence
  Synthetic
ccctttgutgctctuggagcat

SEQ ID NO: 53095 - DNA, 23 bp, Artificial Sequence
  Synthetic
gcccctaatuctgtgttttgugt

SEQ ID NO: 53096 - DNA, 24 bp, Artificial Sequence
  Synthetic
caaggagucaggaaggagagttut

SEQ ID NO: 53097 - DNA, 23 bp, Artificial Sequence
  Synthetic
cttuacggaactcguggagagag

SEQ ID NO: 53098 - DNA, 23 bp, Artificial Sequence
  Synthetic
cggtggagutgttgttcttcugt

SEQ ID NO: 53099 - DNA, 24 bp, Artificial Sequence
  Synthetic
acaaagctgaaugcccactatgua

SEQ ID NO: 53100 - DNA, 21 bp, Artificial Sequence
  Synthetic
ggccuaagcuggagaacagat

SEQ ID NO: 53101 - DNA, 27 bp, Artificial Sequence
  Synthetic
gaatagucagatcactuacaagagcca

SEQ ID NO: 53102 - DNA, 22 bp, Artificial Sequence
  Synthetic
cccaccatucctccctcatgua

SEQ ID NO: 53103 - DNA, 22 bp, Artificial Sequence
  Synthetic
autcaagcgaugggacagagac

SEQ ID NO: 53104 - DNA, 21 bp, Artificial Sequence
  Synthetic
ccgacacccccauacacatut

SEQ ID NO: 53105 - DNA, 19 bp, Artificial Sequence
  Synthetic
ccgccaggaguacaccauc

SEQ ID NO: 53106 - DNA, 27 bp, Artificial Sequence
  Synthetic
agaaatctggutactggcatcuagaac

SEQ ID NO: 53107 - DNA, 29 bp, Artificial Sequence
  Synthetic
tccctaggtctaaucctcttctttcttut

SEQ ID NO: 53108 - DNA, 21 bp, Artificial Sequence
  Synthetic
acacagacucctgauccagca

SEQ ID NO: 53109 - DNA, 28 bp, Artificial Sequence
  Synthetic
gactgggttaatutgcttgtgtttacut

SEQ ID NO: 53110 - DNA, 18 bp, Artificial Sequence
  Synthetic
cccgaugctgtggtuggt

SEQ ID NO: 53111 - DNA, 20 bp, Artificial Sequence
  Synthetic
ccagugaagcctcugaggga

SEQ ID NO: 53112 - DNA, 20 bp, Artificial Sequence
  Synthetic
ggttagcacgugactgucca

SEQ ID NO: 53113 - DNA, 21 bp, Artificial Sequence
  Synthetic
agacaagctuggccattggut

SEQ ID NO: 53114 - DNA, 22 bp, Artificial Sequence
  Synthetic
gtgagcucaggauacaggaagg

SEQ ID NO: 53115 - DNA, 22 bp, Artificial Sequence
  Synthetic
ctgccacuggacacaggauaag

SEQ ID NO: 53116 - DNA, 24 bp, Artificial Sequence
  Synthetic
gtagaattcctcucggtcatgcug

SEQ ID NO: 53117 - DNA, 27 bp, Artificial Sequence
  Synthetic
cctgtgtuggaagacagctaaaaugat

SEQ ID NO: 53118 - DNA, 27 bp, Artificial Sequence
  Synthetic
tggatatcccagaauttccttgttucc

SEQ ID NO: 53119 - DNA, 26 bp, Artificial Sequence
  Synthetic
atgtgcaacauttttcgtcttgugat

SEQ ID NO: 53120 - DNA, 27 bp, Artificial Sequence
  Synthetic
caaccacauactaaatcugacccaaag

SEQ ID NO: 53121 - DNA, 22 bp, Artificial Sequence
  Synthetic
cccctgugttcttctctuccat

SEQ ID NO: 53122 - DNA, 27 bp, Artificial Sequence
  Synthetic
cccaaatataccucaacagggatuacc

SEQ ID NO: 53123 - DNA, 29 bp, Artificial Sequence
  Synthetic
gttccacaaacatucagccctttataaut

SEQ ID NO: 53124 - DNA, 22 bp, Artificial Sequence
  Synthetic
cagggcccaacagguataugag

SEQ ID NO: 53125 - DNA, 24 bp, Artificial Sequence
  Synthetic
acagacgttucctgtttgacctut

SEQ ID NO: 53126 - DNA, 21 bp, Artificial Sequence
  Synthetic
cccuacuacgaagaccccgaa

SEQ ID NO: 53127 - DNA, 22 bp, Artificial Sequence
  Synthetic
caacccuctacccugacacaac

SEQ ID NO: 53128 - DNA, 21 bp, Artificial Sequence
  Synthetic
ggcctgauggatctgggauct

SEQ ID NO: 53129 - DNA, 23 bp, Artificial Sequence
  Synthetic
cggatcgttucctcagtgaacuc

SEQ ID NO: 53130 - DNA, 20 bp, Artificial Sequence
  Synthetic
catagcgggugggatgacut

SEQ ID NO: 53131 - DNA, 26 bp, Artificial Sequence
  Synthetic
ggatcaagagcutgttgagttugaga

SEQ ID NO: 53132 - DNA, 20 bp, Artificial Sequence
  Synthetic
ctuaaccaccggccatcugt

SEQ ID NO: 53133 - DNA, 19 bp, Artificial Sequence
  Synthetic
gaggucacgaggttgcuct

SEQ ID NO: 53134 - DNA, 25 bp, Artificial Sequence
  Synthetic
ccccagagaaaggagucaataaugt

SEQ ID NO: 53135 - DNA, 29 bp, Artificial Sequence
  Synthetic
tctgatctctguaactggattatgctgua

SEQ ID NO: 53136 - DNA, 20 bp, Artificial Sequence
  Synthetic
cagcgcagccgucataaauc

SEQ ID NO: 53137 - DNA, 23 bp, Artificial Sequence
  Synthetic
gcagtguagaccccaaagactut

SEQ ID NO: 53138 - DNA, 27 bp, Artificial Sequence
  Synthetic
gagagagattucaactgttctgtucct

SEQ ID NO: 53139 - DNA, 27 bp, Artificial Sequence
  Synthetic
ggaaagttccaaauagaccagagauca

SEQ ID NO: 53140 - DNA, 22 bp, Artificial Sequence
  Synthetic
aaggcccctuctgtgtatccua

SEQ ID NO: 53141 - DNA, 29 bp, Artificial Sequence
  Synthetic
gctctttctctgcuagcatcattaattut

SEQ ID NO: 53142 - DNA, 22 bp, Artificial Sequence
  Synthetic
tctguttactggcuccaggaga

SEQ ID NO: 53143 - DNA, 27 bp, Artificial Sequence
  Synthetic
agctgaugaagggaaauagaaaaagca

SEQ ID NO: 53144 - DNA, 21 bp, Artificial Sequence
  Synthetic
ctgaccucattcactguggca

SEQ ID NO: 53145 - DNA, 20 bp, Artificial Sequence
  Synthetic
acatugcagccaccgaugaa

SEQ ID NO: 53146 - DNA, 22 bp, Artificial Sequence
  Synthetic
gcacccctuttctgtgtgttuc

SEQ ID NO: 53147 - DNA, 19 bp, Artificial Sequence
  Synthetic
ctaaaggugggccggtugt

SEQ ID NO: 53148 - DNA, 22 bp, Artificial Sequence
  Synthetic
ccugggaagggcagatttuagg

SEQ ID NO: 53149 - DNA, 23 bp, Artificial Sequence
  Synthetic
caatgagagaugtcugcagggaa

SEQ ID NO: 53150 - DNA, 27 bp, Artificial Sequence
  Synthetic
aagaaagagaugacattctacgtuccc

SEQ ID NO: 53151 - DNA, 28 bp, Artificial Sequence
  Synthetic
ggaagagcaucataagtgcattuaacct

SEQ ID NO: 53152 - DNA, 22 bp, Artificial Sequence
  Synthetic
gtgatcugggaaaaccccuagt

SEQ ID NO: 53153 - DNA, 22 bp, Artificial Sequence
  Synthetic
tcacagacugcatgaggttcug

SEQ ID NO: 53154 - DNA, 21 bp, Artificial Sequence
  Synthetic
cacctttagcccugccttcuc

SEQ ID NO: 53155 - DNA, 22 bp, Artificial Sequence
  Synthetic
ggtacatcugagccatcuccct

SEQ ID NO: 53156 - DNA, 21 bp, Artificial Sequence
  Synthetic
ctggcagaugtgtgctttgug

SEQ ID NO: 53157 - DNA, 23 bp, Artificial Sequence
  Synthetic
gagacatgggucagaggaaaugg

SEQ ID NO: 53158 - DNA, 23 bp, Artificial Sequence
  Synthetic
gccagauaaacagtguggacagg

SEQ ID NO: 53159 - DNA, 21 bp, Artificial Sequence
  Synthetic
ctttgctgggugacctcugat

SEQ ID NO: 53160 - DNA, 23 bp, Artificial Sequence
  Synthetic
cttcacctuagggttgcccauaa

SEQ ID NO: 53161 - DNA, 25 bp, Artificial Sequence
  Synthetic
ctctgcctautggtctatttuccca

SEQ ID NO: 53162 - DNA, 21 bp, Artificial Sequence
  Synthetic
cctctgagcucctctgtcuca

SEQ ID NO: 53163 - DNA, 26 bp, Artificial Sequence
  Synthetic
ggagctgtgatuctgctattggatut

SEQ ID NO: 53164 - DNA, 22 bp, Artificial Sequence
  Synthetic
atccugtgacatcugcaacact

SEQ ID NO: 53165 - DNA, 25 bp, Artificial Sequence
  Synthetic
gcaaggagctuggtactaagatgua

SEQ ID NO: 53166 - DNA, 25 bp, Artificial Sequence
  Synthetic
gtgttttcccuccatggatgatgua

SEQ ID NO: 53167 - DNA, 27 bp, Artificial Sequence
  Synthetic
tgatggacaagutttcttcttuggaca

SEQ ID NO: 53168 - DNA, 17 bp, Artificial Sequence
  Synthetic
gugctuggccgaggaca

SEQ ID NO: 53169 - DNA, 20 bp, Artificial Sequence
  Synthetic
gcaagcagggagugtugact

SEQ ID NO: 53170 - DNA, 23 bp, Artificial Sequence
  Synthetic
cctgagacaucagtccacuggat

SEQ ID NO: 53171 - DNA, 26 bp, Artificial Sequence
  Synthetic
cctcacttagcuacccactctauacc

SEQ ID NO: 53172 - DNA, 24 bp, Artificial Sequence
  Synthetic
ggaaagugagcagaaccaagacuc

SEQ ID NO: 53173 - DNA, 21 bp, Artificial Sequence
  Synthetic
gtcagccaagcuccactucat

SEQ ID NO: 53174 - DNA, 24 bp, Artificial Sequence
  Synthetic
agagtccuaagcaacaacagugac

SEQ ID NO: 53175 - DNA, 23 bp, Artificial Sequence
  Synthetic
aaggacccagaaugggaagacua

SEQ ID NO: 53176 - DNA, 18 bp, Artificial Sequence
  Synthetic
gcucgcagcagaaagcug

SEQ ID NO: 53177 - DNA, 18 bp, Artificial Sequence
  Synthetic
ccacggcaggutctcgua

SEQ ID NO: 53178 - DNA, 22 bp, Artificial Sequence
  Synthetic
ctgggaugatctttctguggga

SEQ ID NO: 53179 - DNA, 20 bp, Artificial Sequence
  Synthetic
ctggccacaccugatgtuga

SEQ ID NO: 53180 - DNA, 21 bp, Artificial Sequence
  Synthetic
tcataccagguctccgtucca

SEQ ID NO: 53181 - DNA, 21 bp, Artificial Sequence
  Synthetic
ggtcattugagctgcagguga

SEQ ID NO: 53182 - DNA, 22 bp, Artificial Sequence
  Synthetic
gtttccatggcuagggaggaut

SEQ ID NO: 53183 - DNA, 20 bp, Artificial Sequence
  Synthetic
gctagucaggcagctcauca

SEQ ID NO: 53184 - DNA, 26 bp, Artificial Sequence
  Synthetic
acaagttcaucaagcagatctuccag

SEQ ID NO: 53185 - DNA, 24 bp, Artificial Sequence
  Synthetic
acagcaaagcuccatacccatuat

SEQ ID NO: 53186 - DNA, 20 bp, Artificial Sequence
  Synthetic
ccttauccggcaggtcucac

SEQ ID NO: 53187 - DNA, 21 bp, Artificial Sequence
  Synthetic
tggcauggaggacugaaggat

SEQ ID NO: 53188 - DNA, 22 bp, Artificial Sequence
  Synthetic
ggctucattcctguccccaaat

SEQ ID NO: 53189 - DNA, 22 bp, Artificial Sequence
  Synthetic
guctgtggtucaggcagagaag

SEQ ID NO: 53190 - DNA, 24 bp, Artificial Sequence
  Synthetic
ttcacaggcutaaccaatacgugt

SEQ ID NO: 53191 - DNA, 27 bp, Artificial Sequence
  Synthetic
aacaggtagaaauagcccatgtcatut

SEQ ID NO: 53192 - DNA, 24 bp, Artificial Sequence
  Synthetic
ctagaagtugccaaggtagcucag

SEQ ID NO: 53193 - DNA, 28 bp, Artificial Sequence
  Synthetic
acccttattgagacaaugccaacatuaa

SEQ ID NO: 53194 - DNA, 22 bp, Artificial Sequence
  Synthetic
ggccaggtuctgaagttcctut

SEQ ID NO: 53195 - DNA, 22 bp, Artificial Sequence
  Synthetic
tgttcugacaaacctccuccac

SEQ ID NO: 53196 - DNA, 21 bp, Artificial Sequence
  Synthetic
gcatctcuggacttacgcgut

SEQ ID NO: 53197 - DNA, 27 bp, Artificial Sequence
  Synthetic
gctggatttgcauattctgaaccucat

SEQ ID NO: 53198 - DNA, 20 bp, Artificial Sequence
  Synthetic
aaaggccagagucagcaguc

SEQ ID NO: 53199 - DNA, 22 bp, Artificial Sequence
  Synthetic
tgttccttcccugtccatcugt

SEQ ID NO: 53200 - DNA, 23 bp, Artificial Sequence
  Synthetic
tttggtucaaggaaggtctugct

SEQ ID NO: 53201 - DNA, 24 bp, Artificial Sequence
  Synthetic
cagtgaagagcaugttgaggaugt

SEQ ID NO: 53202 - DNA, 20 bp, Artificial Sequence
  Synthetic
gggtcaugcgtctggugaag

SEQ ID NO: 53203 - DNA, 22 bp, Artificial Sequence
  Synthetic
tccttgtgucagctgtgttcug

SEQ ID NO: 53204 - DNA, 20 bp, Artificial Sequence
  Synthetic
gagaccguggctctctgaug

SEQ ID NO: 53205 - DNA, 20 bp, Artificial Sequence
  Synthetic
cctcccaugaaccccgtuat

SEQ ID NO: 53206 - DNA, 24 bp, Artificial Sequence
  Synthetic
gggaaccuagaacaagccaaugag

SEQ ID NO: 53207 - DNA, 20 bp, Artificial Sequence
  Synthetic
cgcatuctaagggugccaca

SEQ ID NO: 53208 - DNA, 20 bp, Artificial Sequence
  Synthetic
gactggacacugctggacuc

SEQ ID NO: 53209 - DNA, 20 bp, Artificial Sequence
  Synthetic
gcccuggatcuaagccacat

SEQ ID NO: 53210 - DNA, 21 bp, Artificial Sequence
  Synthetic
aaggccacugatgctttcugt

SEQ ID NO: 53211 - DNA, 23 bp, Artificial Sequence
  Synthetic
gaagaaagguccaagagggucag

SEQ ID NO: 53212 - DNA, 21 bp, Artificial Sequence
  Synthetic
cacgtggugacccatttucaa

SEQ ID NO: 53213 - DNA, 23 bp, Artificial Sequence
  Synthetic
ccuccuagccaggaagaaagaaa

SEQ ID NO: 53214 - DNA, 23 bp, Artificial Sequence
  Synthetic
ccagtgcttcuccctcaactaug

SEQ ID NO: 53215 - DNA, 22 bp, Artificial Sequence
  Synthetic
gcccttgaggugaggaacttug

SEQ ID NO: 53216 - DNA, 22 bp, Artificial Sequence
  Synthetic
atgaagccaccaugcctacaut

SEQ ID NO: 53217 - DNA, 23 bp, Artificial Sequence
  Synthetic
cccactaagaugggcatttugag

SEQ ID NO: 53218 - DNA, 21 bp, Artificial Sequence
  Synthetic
catctggtucaacagggcauc

SEQ ID NO: 53219 - DNA, 24 bp, Artificial Sequence
  Synthetic
tgtgugcggagctaaauaaagaca

SEQ ID NO: 53220 - DNA, 25 bp, Artificial Sequence
  Synthetic
tgtctgtaatgugtgagtcttgucc

SEQ ID NO: 53221 - DNA, 28 bp, Artificial Sequence
  Synthetic
attccaccactucacttgagataaauca

SEQ ID NO: 53222 - DNA, 22 bp, Artificial Sequence
  Synthetic
cctgggagaaucccatagcaut

SEQ ID NO: 53223 - DNA, 24 bp, Artificial Sequence
  Synthetic
cctctcacttcuctctggcttcut

SEQ ID NO: 53224 - DNA, 28 bp, Artificial Sequence
  Synthetic
ctgaaaataatgutctcctctctuggct

SEQ ID NO: 53225 - DNA, 18 bp, Artificial Sequence
  Synthetic
ccggacucccagcactua

SEQ ID NO: 53226 - DNA, 20 bp, Artificial Sequence
  Synthetic
ggtaggcuggctgtgatcuc

SEQ ID NO: 53227 - DNA, 20 bp, Artificial Sequence
  Synthetic
accttgcuatgcgcguagac

SEQ ID NO: 53228 - DNA, 25 bp, Artificial Sequence
  Synthetic
gttttctggagaagugtaggcttuc

SEQ ID NO: 53229 - DNA, 27 bp, Artificial Sequence
  Synthetic
gccaaccaagaacugttuaaaaagcaa

SEQ ID NO: 53230 - DNA, 24 bp, Artificial Sequence
  Synthetic
cccccttacuctgatcatgtucat

SEQ ID NO: 53231 - DNA, 24 bp, Artificial Sequence
  Synthetic
tctctgtctugatctctgtcuggt

SEQ ID NO: 53232 - DNA, 21 bp, Artificial Sequence
  Synthetic
ccctgcauggtagggatcuca

SEQ ID NO: 53233 - DNA, 25 bp, Artificial Sequence
  Synthetic
cccgtcttgucctcattttctgtut

SEQ ID NO: 53234 - DNA, 22 bp, Artificial Sequence
  Synthetic
tcagggaacaaaugccaaguga

SEQ ID NO: 53235 - DNA, 26 bp, Artificial Sequence
  Synthetic
ctctatattugacatcgccacugaac

SEQ ID NO: 53236 - DNA, 29 bp, Artificial Sequence
  Synthetic
tttgcaactacuagatgacatgtgaauca

SEQ ID NO: 53237 - DNA, 20 bp, Artificial Sequence
  Synthetic
cuacacugcagggaccacaa

SEQ ID NO: 53238 - DNA, 32 bp, Artificial Sequence
  Synthetic
aatgagtaaagactuaggtagtacaaacatut

SEQ ID NO: 53239 - DNA, 25 bp, Artificial Sequence
  Synthetic
tcaaaggugacatgggtcuaaaagg

SEQ ID NO: 53240 - DNA, 27 bp, Artificial Sequence
  Synthetic
ttaccttttcaccuttagatccctuga

SEQ ID NO: 53241 - DNA, 24 bp, Artificial Sequence
  Synthetic
gtccacaaggucctattggauacc

SEQ ID NO: 53242 - DNA, 26 bp, Artificial Sequence
  Synthetic
tgtctggtaacuttccattgtuccat

SEQ ID NO: 53243 - DNA, 30 bp, Artificial Sequence
  Synthetic
ttaacccaacuagataaatactcactuggc

SEQ ID NO: 53244 - DNA, 28 bp, Artificial Sequence
  Synthetic
ctgacataccttguttggaatctagcut

SEQ ID NO: 53245 - DNA, 27 bp, Artificial Sequence
  Synthetic
ggaaatctcttguttgaacatgtgugt

SEQ ID NO: 53246 - DNA, 21 bp, Artificial Sequence
  Synthetic
cucactcaucccagacacagg

SEQ ID NO: 53247 - DNA, 21 bp, Artificial Sequence
  Synthetic
tctctcccugatgcagctgua

SEQ ID NO: 53248 - DNA, 20 bp, Artificial Sequence
  Synthetic
ctccctggugacagtctgug

SEQ ID NO: 53249 - DNA, 24 bp, Artificial Sequence
  Synthetic
ctctctattgcuatccccacacut

SEQ ID NO: 53250 - DNA, 24 bp, Artificial Sequence
  Synthetic
ctgtaatggttugttccggacauc

SEQ ID NO: 53251 - DNA, 28 bp, Artificial Sequence
  Synthetic
atagatgcagucacaataatgtgctaut

SEQ ID NO: 53252 - DNA, 25 bp, Artificial Sequence
  Synthetic
gtgcaagctutcagctgataugaat

SEQ ID NO: 53253 - DNA, 27 bp, Artificial Sequence
  Synthetic
gcatttctuccgaacactaagattugt

SEQ ID NO: 53254 - DNA, 24 bp, Artificial Sequence
  Synthetic
tguggactccatugaagacagaga

SEQ ID NO: 53255 - DNA, 27 bp, Artificial Sequence
  Synthetic
cattcaccatgucctgcatttattgut

SEQ ID NO: 53256 - DNA, 28 bp, Artificial Sequence
  Synthetic
ccgatattcatattutgtccatgggcua

SEQ ID NO: 53257 - DNA, 21 bp, Artificial Sequence
  Synthetic
cccaaguccagagctgttcuc

SEQ ID NO: 53258 - DNA, 23 bp, Artificial Sequence
  Synthetic
gggagaagaaguggaaggaaugg

SEQ ID NO: 53259 - DNA, 27 bp, Artificial Sequence
  Synthetic
gtgggattcuggaacgctatgtatuat

SEQ ID NO: 53260 - DNA, 25 bp, Artificial Sequence
  Synthetic
accccaautaagtgtaaugccaaca

SEQ ID NO: 53261 - DNA, 28 bp, Artificial Sequence
  Synthetic
tggtggaatgaacuttgagatttcctut

SEQ ID NO: 53262 - DNA, 22 bp, Artificial Sequence
  Synthetic
gatccttcuccacgccatugat

SEQ ID NO: 53263 - DNA, 28 bp, Artificial Sequence
  Synthetic
ccagcugaacaaaguaaagaagaaagaa

SEQ ID NO: 53264 - DNA, 21 bp, Artificial Sequence
  Synthetic
ccucaaauacggagcgaagca

SEQ ID NO: 53265 - DNA, 20 bp, Artificial Sequence
  Synthetic
gctgcagguacagugaccaa

SEQ ID NO: 53266 - DNA, 26 bp, Artificial Sequence
  Synthetic
gttgtgacuggagaatgagaattugg

SEQ ID NO: 53267 - DNA, 22 bp, Artificial Sequence
  Synthetic
ctcatttctcucctgggcagut

SEQ ID NO: 53268 - DNA, 27 bp, Artificial Sequence
  Synthetic
tgactgttcattguccgacatatgtut

SEQ ID NO: 53269 - DNA, 23 bp, Artificial Sequence
  Synthetic
ggaatggctguccccatcttaug

SEQ ID NO: 53270 - DNA, 26 bp, Artificial Sequence
  Synthetic
gggaggaucagctgaaagtaattuct

SEQ ID NO: 53271 - DNA, 24 bp, Artificial Sequence
  Synthetic
gtcaggtgacautgtctgtcugaa

SEQ ID NO: 53272 - DNA, 26 bp, Artificial Sequence
  Synthetic
cactttcuaccacacagttgaatucc

SEQ ID NO: 53273 - DNA, 28 bp, Artificial Sequence
  Synthetic
gaaggcaggtuggaaaatagaaaaagut

SEQ ID NO: 53274 - DNA, 20 bp, Artificial Sequence
  Synthetic
ctgtcacacgucctguggag

SEQ ID NO: 53275 - DNA, 21 bp, Artificial Sequence
  Synthetic
ccaagcgucccaatcagaaug

SEQ ID NO: 53276 - DNA, 21 bp, Artificial Sequence
  Synthetic
gtacattguccccaugacgga

SEQ ID NO: 53277 - DNA, 25 bp, Artificial Sequence
  Synthetic
tctgtcagcauctgtatggtttugg

SEQ ID NO: 53278 - DNA, 28 bp, Artificial Sequence
  Synthetic
cctccttcttccuctttcttgttttuca

SEQ ID NO: 53279 - DNA, 28 bp, Artificial Sequence
  Synthetic
cgcatatacacutaatttcgtcucagga

SEQ ID NO: 53280 - DNA, 26 bp, Artificial Sequence
  Synthetic
ttccggctcauatatcagctgtttut

SEQ ID NO: 53281 - DNA, 23 bp, Artificial Sequence
  Synthetic
ccaagtgauggccatgcttguat

SEQ ID NO: 53282 - DNA, 29 bp, Artificial Sequence
  Synthetic
tcagcaaaagauacuaagaagggaagaga

SEQ ID NO: 53283 - DNA, 28 bp, Artificial Sequence
  Synthetic
gcttcattttcutcctttcctgaucaga

SEQ ID NO: 53284 - DNA, 21 bp, Artificial Sequence
  Synthetic
gggtggcuggtaatgttugat

SEQ ID NO: 53285 - DNA, 27 bp, Artificial Sequence
  Synthetic
ggctcttgtuattactggctugaaaac

SEQ ID NO: 53286 - DNA, 21 bp, Artificial Sequence
  Synthetic
cccaacgauacccgactucag

SEQ ID NO: 53287 - DNA, 21 bp, Artificial Sequence
  Synthetic
ccttcgtugaccacgucaaat

SEQ ID NO: 53288 - DNA, 23 bp, Artificial Sequence
  Synthetic
tcacgttuaccatgttcugagca

SEQ ID NO: 53289 - DNA, 26 bp, Artificial Sequence
  Synthetic
aagaagcugagtcatgaauggagaag

SEQ ID NO: 53290 - DNA, 28 bp, Artificial Sequence
  Synthetic
ggtgtcctugaagaactagaatgttuca

SEQ ID NO: 53291 - DNA, 25 bp, Artificial Sequence
  Synthetic
cctgggaacacautttcugcaaaag

SEQ ID NO: 53292 - DNA, 26 bp, Artificial Sequence
  Synthetic
acaaaactgaagcuaccgctattcut

SEQ ID NO: 53293 - DNA, 28 bp, Artificial Sequence
  Synthetic
ggcttccuactatgtaaccauagagact

SEQ ID NO: 53294 - DNA, 23 bp, Artificial Sequence
  Synthetic
tgttcauccaccagtatgtugct

SEQ ID NO: 53295 - DNA, 29 bp, Artificial Sequence
  Synthetic
ggtcaccugaaatgaaaatguagaaaagg

SEQ ID NO: 53296 - DNA, 26 bp, Artificial Sequence
  Synthetic
ctcttgaatuaccttgtcatcuggct

SEQ ID NO: 53297 - DNA, 28 bp, Artificial Sequence
  Synthetic
gttggatacacagccuagacttacttut

SEQ ID NO: 53298 - DNA, 24 bp, Artificial Sequence
  Synthetic
gggtcuacaaaccattcacaguct

SEQ ID NO: 53299 - DNA, 25 bp, Artificial Sequence
  Synthetic
aagtttcuggacttcatcatuggct

SEQ ID NO: 53300 - DNA, 20 bp, Artificial Sequence
  Synthetic
catctccucccttgctgcua

SEQ ID NO: 53301 - DNA, 17 bp, Artificial Sequence
  Synthetic
agcaugacgccgaggug

SEQ ID NO: 53302 - DNA, 22 bp, Artificial Sequence
  Synthetic
ctggtcuggacatgatggtuct

SEQ ID NO: 53303 - DNA, 21 bp, Artificial Sequence
  Synthetic
cccttctcucacagggugaac

SEQ ID NO: 53304 - DNA, 22 bp, Artificial Sequence
  Synthetic
cgccttuggcaggagauaagaa

SEQ ID NO: 53305 - DNA, 21 bp, Artificial Sequence
  Synthetic
ccctcaccuctacctgctcuc

SEQ ID NO: 53306 - DNA, 20 bp, Artificial Sequence
  Synthetic
ggcuaccacgaagaccccua

SEQ ID NO: 53307 - DNA, 24 bp, Artificial Sequence
  Synthetic
ggttgatcacutcttggtgtcuct

SEQ ID NO: 53308 - DNA, 27 bp, Artificial Sequence
  Synthetic
gcacatttcaaguagccttagttcuga

SEQ ID NO: 53309 - DNA, 27 bp, Artificial Sequence
  Synthetic
caaaaatacugggaggcaacuaaaaga

SEQ ID NO: 53310 - DNA, 28 bp, Artificial Sequence
  Synthetic
ctttggagtgacugtaaaaatcatcugg

SEQ ID NO: 53311 - DNA, 27 bp, Artificial Sequence
  Synthetic
ccaaacagctcucattcactctcttut

SEQ ID NO: 53312 - DNA, 22 bp, Artificial Sequence
  Synthetic
gcacatgcuttcatactugcct

SEQ ID NO: 53313 - DNA, 28 bp, Artificial Sequence
  Synthetic
catgcttgctaugagtacaatcacatut

SEQ ID NO: 53314 - DNA, 22 bp, Artificial Sequence
  Synthetic
gaaaggtcccugctgggaauat

SEQ ID NO: 53315 - DNA, 28 bp, Artificial Sequence
  Synthetic
cctctcactctuttaatcgatgctttut

SEQ ID NO: 53316 - DNA, 27 bp, Artificial Sequence
  Synthetic
agatgtcatttgtutggactagctgut

SEQ ID NO: 53317 - DNA, 29 bp, Artificial Sequence
  Synthetic
gcatguaaacaagagaaagacgauaagga

SEQ ID NO: 53318 - DNA, 28 bp, Artificial Sequence
  Synthetic
agttatacaacaaaccugctgctcuaaa

SEQ ID NO: 53319 - DNA, 23 bp, Artificial Sequence
  Synthetic
ctcacagccaaugaggaactuga

SEQ ID NO: 53320 - DNA, 18 bp, Artificial Sequence
  Synthetic
gggctucagcgacauggt

SEQ ID NO: 53321 - DNA, 17 bp, Artificial Sequence
  Synthetic
ggcggcuccttggtcuc

SEQ ID NO: 53322 - DNA, 24 bp, Artificial Sequence
  Synthetic
gtgttgttguggaaagtagtgcug

SEQ ID NO: 53323 - DNA, 26 bp, Artificial Sequence
  Synthetic
ctcaggatccuctcttttcatuccaa

SEQ ID NO: 53324 - DNA, 22 bp, Artificial Sequence
  Synthetic
acacacttucagcagcagguag

SEQ ID NO: 53325 - DNA, 28 bp, Artificial Sequence
  Synthetic
ctttgaagcagccuttatgtatgtgtut

SEQ ID NO: 53326 - DNA, 29 bp, Artificial Sequence
  Synthetic
tcacagtagtgtuatgtgcaaactatuga

SEQ ID NO: 53327 - DNA, 28 bp, Artificial Sequence
  Synthetic
tctctctctgacaugatctggtatctut

SEQ ID NO: 53328 - DNA, 28 bp, Artificial Sequence
  Synthetic
gaaaagagtgguagaaaagaggtttcug

SEQ ID NO: 53329 - DNA, 26 bp, Artificial Sequence
  Synthetic
acaaagtgtattuagccggagauagg

SEQ ID NO: 53330 - DNA, 28 bp, Artificial Sequence
  Synthetic
tttgatttcttagautccccaaguccaa

SEQ ID NO: 53331 - DNA, 28 bp, Artificial Sequence
  Synthetic
catgcccauggacaaatgtaaagtuaat

SEQ ID NO: 53332 - DNA, 22 bp, Artificial Sequence
  Synthetic
gaatttcccaaguggcaucgag

SEQ ID NO: 53333 - DNA, 26 bp, Artificial Sequence
  Synthetic
cagcatucagagcaagaaaatgtuca

SEQ ID NO: 53334 - DNA, 23 bp, Artificial Sequence
  Synthetic
ctcaucccccatgctucagaaaa

SEQ ID NO: 53335 - DNA, 24 bp, Artificial Sequence
  Synthetic
gctcctguacagcttactcucaat

SEQ ID NO: 53336 - DNA, 22 bp, Artificial Sequence
  Synthetic
acttcatgcugcatcacgagut

SEQ ID NO: 53337 - DNA, 24 bp, Artificial Sequence
  Synthetic
cttcttctcacaucagggttcugt

SEQ ID NO: 53338 - DNA, 19 bp, Artificial Sequence
  Synthetic
gcucucacagacccaggga

SEQ ID NO: 53339 - DNA, 28 bp, Artificial Sequence
  Synthetic
gtttaatctgctutctgcaagacaauct

SEQ ID NO: 53340 - DNA, 25 bp, Artificial Sequence
  Synthetic
gggctcguattttatggacugaaca

SEQ ID NO: 53341 - DNA, 24 bp, Artificial Sequence
  Synthetic
ccaggacaagcucaagtucaagaa

SEQ ID NO: 53342 - DNA, 21 bp, Artificial Sequence
  Synthetic
atcagcaaaggcuctgggtut

SEQ ID NO: 53343 - DNA, 22 bp, Artificial Sequence
  Synthetic
agccaugaaagtgagctuccag

SEQ ID NO: 53344 - DNA, 28 bp, Artificial Sequence
  Synthetic
tccttttaactcgaautggagagggaua

SEQ ID NO: 53345 - DNA, 25 bp, Artificial Sequence
  Synthetic
cctctccaugaaaaaccagtcaaug

SEQ ID NO: 53346 - DNA, 21 bp, Artificial Sequence
  Synthetic
aggagaaaggacggcutccua

SEQ ID NO: 53347 - DNA, 19 bp, Artificial Sequence
  Synthetic
ggagugguacgcgcacaat

SEQ ID NO: 53348 - DNA, 26 bp, Artificial Sequence
  Synthetic
tgtgaaatcauagcaaagagugacca

SEQ ID NO: 53349 - DNA, 28 bp, Artificial Sequence
  Synthetic
agttttgacautaagagctcugacacat

SEQ ID NO: 53350 - DNA, 20 bp, Artificial Sequence
  Synthetic
ctcaccgcagucctugaact

SEQ ID NO: 53351 - DNA, 21 bp, Artificial Sequence
  Synthetic
cccgacagguttgtcttguga

SEQ ID NO: 53352 - DNA, 21 bp, Artificial Sequence
  Synthetic
gcaaaaacauggacguggcat

SEQ ID NO: 53353 - DNA, 22 bp, Artificial Sequence
  Synthetic
gcggtaattucctgtgcttcut

SEQ ID NO: 53354 - DNA, 17 bp, Artificial Sequence
  Synthetic
gaggaagccugcgctug

SEQ ID NO: 53355 - DNA, 23 bp, Artificial Sequence
  Synthetic
cctatugtacggacucccaaggt

SEQ ID NO: 53356 - DNA, 25 bp, Artificial Sequence
  Synthetic
gacaattucacgttcagcuacagaa

SEQ ID NO: 53357 - DNA, 22 bp, Artificial Sequence
  Synthetic
catgaagaucctcacugagcgt

SEQ ID NO: 53358 - DNA, 25 bp, Artificial Sequence
  Synthetic
ctagtaugaactttgccuccaagca

SEQ ID NO: 53359 - DNA, 24 bp, Artificial Sequence
  Synthetic
gacutcatgaggtuaacccaggag

SEQ ID NO: 53360 - DNA, 21 bp, Artificial Sequence
  Synthetic
cacgtccaccuctaacauggt

SEQ ID NO: 53361 - DNA, 25 bp, Artificial Sequence
  Synthetic
agattatcaggugagatgcctgtug

SEQ ID NO: 53362 - DNA, 21 bp, Artificial Sequence
  Synthetic
tgcauggcccagagagaaaug

SEQ ID NO: 53363 - DNA, 27 bp, Artificial Sequence
  Synthetic
gaaagcaacugaagggtgtcataaaut

SEQ ID NO: 53364 - DNA, 28 bp, Artificial Sequence
  Synthetic
tggagaaactaaaacucacctgtactug

SEQ ID NO: 53365 - DNA, 24 bp, Artificial Sequence
  Synthetic
atcaccaacccuccaatcctttut

SEQ ID NO: 53366 - DNA, 25 bp, Artificial Sequence
  Synthetic
aatggaatgttuggtgctgtttuca

SEQ ID NO: 53367 - DNA, 22 bp, Artificial Sequence
  Synthetic
actccacuactcactgtucggt

SEQ ID NO: 53368 - DNA, 25 bp, Artificial Sequence
  Synthetic
actcaggaguatttctcaugggaca

SEQ ID NO: 53369 - DNA, 26 bp, Artificial Sequence
  Synthetic
ggctctattuaacctcccttgatucc

SEQ ID NO: 53370 - DNA, 28 bp, Artificial Sequence
  Synthetic
tcatggaaaatuaggcttcctttugaga

SEQ ID NO: 53371 - DNA, 24 bp, Artificial Sequence
  Synthetic
gtgtaatgcgggcuttcatgtuac

SEQ ID NO: 53372 - DNA, 21 bp, Artificial Sequence
  Synthetic
cccgtttgucagagctgtgua

SEQ ID NO: 53373 - DNA, 22 bp, Artificial Sequence
  Synthetic
cccagtgugaagtatggagcug

SEQ ID NO: 53374 - DNA, 22 bp, Artificial Sequence
  Synthetic
cattctaaggcuccccaugcaa

SEQ ID NO: 53375 - DNA, 23 bp, Artificial Sequence
  Synthetic
tggccatcucttcctcttctuct

SEQ ID NO: 53376 - DNA, 20 bp, Artificial Sequence
  Synthetic
ggtaaaucccagggcgauct

SEQ ID NO: 53377 - DNA, 17 bp, Artificial Sequence
  Synthetic
cgccugaagugggagca

SEQ ID NO: 53378 - DNA, 21 bp, Artificial Sequence
  Synthetic
catgtcgtccaucctgcctut

SEQ ID NO: 53379 - DNA, 23 bp, Artificial Sequence
  Synthetic
gagtttctugaccaggctctuga

SEQ ID NO: 53380 - DNA, 25 bp, Artificial Sequence
  Synthetic
gggttccacuatgtagaaatcctuc

SEQ ID NO: 53381 - DNA, 27 bp, Artificial Sequence
  Synthetic
tgtccttacugccatttgacctttuat

SEQ ID NO: 53382 - DNA, 22 bp, Artificial Sequence
  Synthetic
cuaatgcagcucgaggaggaag

SEQ ID NO: 53383 - DNA, 20 bp, Artificial Sequence
  Synthetic
cttttcggtuccgggtctug

SEQ ID NO: 53384 - DNA, 20 bp, Artificial Sequence
  Synthetic
gcacccacgaucatgcugag

SEQ ID NO: 53385 - DNA, 22 bp, Artificial Sequence
  Synthetic
cagggcctuttcttgctaguga

SEQ ID NO: 53386 - DNA, 19 bp, Artificial Sequence
  Synthetic
aaguagccccagccaugac

SEQ ID NO: 53387 - DNA, 21 bp, Artificial Sequence
  Synthetic
aactgcccutaccatcgugac

SEQ ID NO: 53388 - DNA, 20 bp, Artificial Sequence
  Synthetic
gggucccaagcactatgcuc

SEQ ID NO: 53389 - DNA, 17 bp, Artificial Sequence
  Synthetic
ggttcccgcaugcgtut

SEQ ID NO: 53390 - DNA, 23 bp, Artificial Sequence
  Synthetic
ctagtcuggaaaatgcaguggga

SEQ ID NO: 53391 - DNA, 27 bp, Artificial Sequence
  Synthetic
cctctctctaguagctcaactggauaa

SEQ ID NO: 53392 - DNA, 21 bp, Artificial Sequence
  Synthetic
gggaggtgagugggagatgua

SEQ ID NO: 53393 - DNA, 29 bp, Artificial Sequence
  Synthetic
ggaccattaucagaacaggatctcaatuc

SEQ ID NO: 53394 - DNA, 20 bp, Artificial Sequence
  Synthetic
ccctgaccacccuctccaut

SEQ ID NO: 53395 - DNA, 18 bp, Artificial Sequence
  Synthetic
tttcugccgcaaggccua

SEQ ID NO: 53396 - DNA, 20 bp, Artificial Sequence
  Synthetic
ggaacctacgugcagccaut

SEQ ID NO: 53397 - DNA, 17 bp, Artificial Sequence
  Synthetic
tgtggaccuggccacug

SEQ ID NO: 53398 - DNA, 24 bp, Artificial Sequence
  Synthetic
cctgctggaucaggtcttcatcua

SEQ ID NO: 53399 - DNA, 22 bp, Artificial Sequence
  Synthetic
cgtccattgugggtagcaauct

SEQ ID NO: 53400 - DNA, 18 bp, Artificial Sequence
  Synthetic
gcggaaggugacagcuga

SEQ ID NO: 53401 - DNA, 18 bp, Artificial Sequence
  Synthetic
cggatgcuggcacctuct

SEQ ID NO: 53402 - DNA, 20 bp, Artificial Sequence
  Synthetic
taggagacgutggtgccauc

SEQ ID NO: 53403 - DNA, 24 bp, Artificial Sequence
  Synthetic
gggtcctaccauctcttacaccut

SEQ ID NO: 53404 - DNA, 18 bp, Artificial Sequence
  Synthetic
gcggcutgcatugacgac

SEQ ID NO: 53405 - DNA, 22 bp, Artificial Sequence
  Synthetic
gctuacaacagcacaggugact

SEQ ID NO: 53406 - DNA, 22 bp, Artificial Sequence
  Synthetic
acgcagaugctggtgaaguaat

SEQ ID NO: 53407 - DNA, 19 bp, Artificial Sequence
  Synthetic
ggcccacuacctctucgac

SEQ ID NO: 53408 - DNA, 20 bp, Artificial Sequence
  Synthetic
cactguggagaccugcagac

SEQ ID NO: 53409 - DNA, 20 bp, Artificial Sequence
  Synthetic
tgccttcugctctgctucat

SEQ ID NO: 53410 - DNA, 21 bp, Artificial Sequence
  Synthetic
tgcttttcuctggccugagag

SEQ ID NO: 53411 - DNA, 20 bp, Artificial Sequence
  Synthetic
cagggucaagcagcucaaga

SEQ ID NO: 53412 - DNA, 27 bp, Artificial Sequence
  Synthetic
tggtttacctuccagttctgaaaucat

SEQ ID NO: 53413 - DNA, 24 bp, Artificial Sequence
  Synthetic
tuctcttuccccaaaaaggaacga

SEQ ID NO: 53414 - DNA, 23 bp, Artificial Sequence
  Synthetic
cccaggcutaauccaaaagcaac

SEQ ID NO: 53415 - DNA, 24 bp, Artificial Sequence
  Synthetic
gcgtctttgcuttctctgtgauga

SEQ ID NO: 53416 - DNA, 22 bp, Artificial Sequence
  Synthetic
gggagtcucacctgtacacgua

SEQ ID NO: 53417 - DNA, 21 bp, Artificial Sequence
  Synthetic
tgaatgcucaccgtcctgtuc

SEQ ID NO: 53418 - DNA, 21 bp, Artificial Sequence
  Synthetic
cucccacccacacauacagac

SEQ ID NO: 53419 - DNA, 26 bp, Artificial Sequence
  Synthetic
gctgactgccuttctgtattttcuga

SEQ ID NO: 53420 - DNA, 21 bp, Artificial Sequence
  Synthetic
acccactguctgaaccugagt

SEQ ID NO: 53421 - DNA, 21 bp, Artificial Sequence
  Synthetic
ccagaaccgaauccugaggag

SEQ ID NO: 53422 - DNA, 21 bp, Artificial Sequence
  Synthetic
gcggcucctagtucagaagga

SEQ ID NO: 53423 - DNA, 22 bp, Artificial Sequence
  Synthetic
caaaatgtcagcucggttcgug

SEQ ID NO: 53424 - DNA, 21 bp, Artificial Sequence
  Synthetic
cccaguccagcacctttuact

SEQ ID NO: 53425 - DNA, 21 bp, Artificial Sequence
  Synthetic
gccccacauacacatcagcuc

SEQ ID NO: 53426 - DNA, 22 bp, Artificial Sequence
  Synthetic
ttagcauggccuacacaacaca

SEQ ID NO: 53427 - DNA, 27 bp, Artificial Sequence
  Synthetic
ctgagcctuatttgtcttcucagaact

SEQ ID NO: 53428 - DNA, 21 bp, Artificial Sequence
  Synthetic
tcccttagggccugagcaaua

SEQ ID NO: 53429 - DNA, 26 bp, Artificial Sequence
  Synthetic
acacgtatcaagautggactcaacuc

SEQ ID NO: 53430 - DNA, 24 bp, Artificial Sequence
  Synthetic
gtcaaggutaacatguccgaggaa

SEQ ID NO: 53431 - DNA, 20 bp, Artificial Sequence
  Synthetic
ctaagugccgcaccagcuat

SEQ ID NO: 53432 - DNA, 22 bp, Artificial Sequence
  Synthetic
guggaaagcatucccaaaacga

SEQ ID NO: 53433 - DNA, 24 bp, Artificial Sequence
  Synthetic
ctacaactucaacctcaagccugt

SEQ ID NO: 53434 - DNA, 22 bp, Artificial Sequence
  Synthetic
caaccuaaacagcagccttcuc

SEQ ID NO: 53435 - DNA, 27 bp, Artificial Sequence
  Synthetic
agtctgcttautcttgatgttguaccc

SEQ ID NO: 53436 - DNA, 24 bp, Artificial Sequence
  Synthetic
agctagacaaacccauaccaccua

SEQ ID NO: 53437 - DNA, 24 bp, Artificial Sequence
  Synthetic
ccttggactaugctgacaacaucc

SEQ ID NO: 53438 - DNA, 28 bp, Artificial Sequence
  Synthetic
aattaactggaaauaacaagggagcuga

SEQ ID NO: 53439 - DNA, 20 bp, Artificial Sequence
  Synthetic
cttaucgagggccggguaac

SEQ ID NO: 53440 - DNA, 23 bp, Artificial Sequence
  Synthetic
gggctaaaagutctggaggctut

SEQ ID NO: 53441 - DNA, 26 bp, Artificial Sequence
  Synthetic
agccattugaacgaagataatcugct

SEQ ID NO: 53442 - DNA, 20 bp, Artificial Sequence
  Synthetic
ctcaggagcugccaaccuaa

SEQ ID NO: 53443 - DNA, 18 bp, Artificial Sequence
  Synthetic
tggguacactggguccct

SEQ ID NO: 53444 - DNA, 20 bp, Artificial Sequence
  Synthetic
cgttgauggagaccgugcat

SEQ ID NO: 53445 - DNA, 23 bp, Artificial Sequence
  Synthetic
gaagccgcucttctacgtcatua

SEQ ID NO: 53446 - DNA, 21 bp, Artificial Sequence
  Synthetic
gggccugatccctgaugagat

SEQ ID NO: 53447 - DNA, 22 bp, Artificial Sequence
  Synthetic
agagctcctucagcttccaaug

SEQ ID NO: 53448 - DNA, 22 bp, Artificial Sequence
  Synthetic
gagtctagccaucccagagcua

SEQ ID NO: 53449 - DNA, 21 bp, Artificial Sequence
  Synthetic
ggcaggaagutcgagatucgg

SEQ ID NO: 53450 - DNA, 23 bp, Artificial Sequence
  Synthetic
cgcgagaacagcugatgagaaua

SEQ ID NO: 53451 - DNA, 22 bp, Artificial Sequence
  Synthetic
atctgaaccaugctctgctcug

SEQ ID NO: 53452 - DNA, 23 bp, Artificial Sequence
  Synthetic
gcaccatugcttctcctugaaat

SEQ ID NO: 53453 - DNA, 24 bp, Artificial Sequence
  Synthetic
cctcaggcaugttcatgtcaucaa

SEQ ID NO: 53454 - DNA, 25 bp, Artificial Sequence
  Synthetic
tttctaggactcuggctacaagcua

SEQ ID NO: 53455 - DNA, 24 bp, Artificial Sequence
  Synthetic
tgagagaugagagcttggctttut

SEQ ID NO: 53456 - DNA, 22 bp, Artificial Sequence
  Synthetic
ccagggauggaatcgctcauac

SEQ ID NO: 53457 - DNA, 26 bp, Artificial Sequence
  Synthetic
ccctctgatucacccctcaaaatuaa

SEQ ID NO: 53458 - DNA, 21 bp, Artificial Sequence
  Synthetic
caaaaccgaggccutcacauc

SEQ ID NO: 53459 - DNA, 21 bp, Artificial Sequence
  Synthetic
tccaccagagutgtccucact

SEQ ID NO: 53460 - DNA, 28 bp, Artificial Sequence
  Synthetic
gtcatggaagaaaugttggauaaagcat

SEQ ID NO: 53461 - DNA, 26 bp, Artificial Sequence
  Synthetic
gagtctgtgucagacaaatctaugga

SEQ ID NO: 53462 - DNA, 29 bp, Artificial Sequence
  Synthetic
catactcaguagacaacataaagccucat

SEQ ID NO: 53463 - DNA, 26 bp, Artificial Sequence
  Synthetic
gaagtcccagcutggtagaaaauact

SEQ ID NO: 53464 - DNA, 28 bp, Artificial Sequence
  Synthetic
ggagttatatutcctttcctugcagagt

SEQ ID NO: 53465 - DNA, 28 bp, Artificial Sequence
  Synthetic
cacaatttcugtgtttgtuaaccagagt

SEQ ID NO: 53466 - DNA, 28 bp, Artificial Sequence
  Synthetic
agtgtctgaaucaaatgttctctuggat

SEQ ID NO: 53467 - DNA, 28 bp, Artificial Sequence
  Synthetic
ggcctccuaaaagtagactggaauaaaa

SEQ ID NO: 53468 - DNA, 21 bp, Artificial Sequence
  Synthetic
ccacaccagggcaucuagact

SEQ ID NO: 53469 - DNA, 23 bp, Artificial Sequence
  Synthetic
cccctccatguttctctctccut

SEQ ID NO: 53470 - DNA, 22 bp, Artificial Sequence
  Synthetic
gggtgaaacuggttgatccugt

SEQ ID NO: 53471 - DNA, 20 bp, Artificial Sequence
  Synthetic
agcctagguccctcctuacc

SEQ ID NO: 53472 - DNA, 23 bp, Artificial Sequence
  Synthetic
gguccaccagaauccagagaaag

SEQ ID NO: 53473 - DNA, 22 bp, Artificial Sequence
  Synthetic
tcccaagutcctcacauagggt

SEQ ID NO: 53474 - DNA, 23 bp, Artificial Sequence
  Synthetic
aggatccagacucttcagucact

SEQ ID NO: 53475 - DNA, 23 bp, Artificial Sequence
  Synthetic
agccatccuaaaggaagtgctut

SEQ ID NO: 53476 - DNA, 25 bp, Artificial Sequence
  Synthetic
agctctccagutagcagtatucact

SEQ ID NO: 53477 - DNA, 28 bp, Artificial Sequence
  Synthetic
gagtaggatttacutcacatcgtgtuca

SEQ ID NO: 53478 - DNA, 27 bp, Artificial Sequence
  Synthetic
gttttcatttuagaaagcggcctctua

SEQ ID NO: 53479 - DNA, 27 bp, Artificial Sequence
  Synthetic
cagctagtgucttgaatttaaguccca

SEQ ID NO: 53480 - DNA, 17 bp, Artificial Sequence
  Synthetic
tgtccgcgauggaggug

SEQ ID NO: 53481 - DNA, 19 bp, Artificial Sequence
  Synthetic
aggcuacacgggacugaga

SEQ ID NO: 53482 - DNA, 20 bp, Artificial Sequence
  Synthetic
gctgaaagcccugaaccugt

SEQ ID NO: 53483 - DNA, 18 bp, Artificial Sequence
  Synthetic
ccacacguccgtgctuct

SEQ ID NO: 53484 - DNA, 20 bp, Artificial Sequence
  Synthetic
cgtgugaccgaaacgtguct

SEQ ID NO: 53485 - DNA, 24 bp, Artificial Sequence
  Synthetic
gaaatgaacagcgagguctttgug

SEQ ID NO: 53486 - DNA, 20 bp, Artificial Sequence
  Synthetic
gctacatuggcgtggugaac

SEQ ID NO: 53487 - DNA, 20 bp, Artificial Sequence
  Synthetic
gcacacuacgugcaaaccct

SEQ ID NO: 53488 - DNA, 21 bp, Artificial Sequence
  Synthetic
ccccacacaugacacaaccut

SEQ ID NO: 53489 - DNA, 20 bp, Artificial Sequence
  Synthetic
ttcagctugacgacctgcut

SEQ ID NO: 53490 - DNA, 20 bp, Artificial Sequence
  Synthetic
ccacagcaccaauggccuat

SEQ ID NO: 53491 - DNA, 24 bp, Artificial Sequence
  Synthetic
gagguagagaugaaagaggccaag

SEQ ID NO: 53492 - DNA, 21 bp, Artificial Sequence
  Synthetic
agaggagagcaaugggacuga

SEQ ID NO: 53493 - DNA, 25 bp, Artificial Sequence
  Synthetic
ggtgtagacatutaggcggtctaug

SEQ ID NO: 53494 - DNA, 22 bp, Artificial Sequence
  Synthetic
agaaugagaaggaugccaccac

SEQ ID NO: 53495 - DNA, 27 bp, Artificial Sequence
  Synthetic
gggttcatuggagacatgatagaauct

SEQ ID NO: 53496 - DNA, 23 bp, Artificial Sequence
  Synthetic
acccautgagtccucccaaaaac

SEQ ID NO: 53497 - DNA, 20 bp, Artificial Sequence
  Synthetic
gtaguagagcacggcugaca

SEQ ID NO: 53498 - DNA, 25 bp, Artificial Sequence
  Synthetic
tgtctcaaggguttgaagatgugac

SEQ ID NO: 53499 - DNA, 24 bp, Artificial Sequence
  Synthetic
gcttgctgugagaataaggcacut

SEQ ID NO: 53500 - DNA, 21 bp, Artificial Sequence
  Synthetic
agagaccagcugcatcucaac

SEQ ID NO: 53501 - DNA, 21 bp, Artificial Sequence
  Synthetic
ggccccuttttcctgauacca

SEQ ID NO: 53502 - DNA, 24 bp, Artificial Sequence
  Synthetic
gacacatgcacutaaaagcauccc

SEQ ID NO: 53503 - DNA, 22 bp, Artificial Sequence
  Synthetic
gaaaggaaagaccugccacuca

SEQ ID NO: 53504 - DNA, 19 bp, Artificial Sequence
  Synthetic
gtgcccuccgttacctgut

SEQ ID NO: 53505 - DNA, 18 bp, Artificial Sequence
  Synthetic
gaggcgcuactgcuccag

SEQ ID NO: 53506 - DNA, 22 bp, Artificial Sequence
  Synthetic
catggagtucatcagggtcugg

SEQ ID NO: 53507 - DNA, 21 bp, Artificial Sequence
  Synthetic
aggcacugcatgtcaactuca

SEQ ID NO: 53508 - DNA, 22 bp, Artificial Sequence
  Synthetic
agcctcuccattccttcucaca

SEQ ID NO: 53509 - DNA, 20 bp, Artificial Sequence
  Synthetic
ctgggagguctctccauggt

SEQ ID NO: 53510 - DNA, 22 bp, Artificial Sequence
  Synthetic
tcatcacggcutgtgccaauaa

SEQ ID NO: 53511 - DNA, 19 bp, Artificial Sequence
  Synthetic
ccaagcaacauggcugcac

SEQ ID NO: 53512 - DNA, 21 bp, Artificial Sequence
  Synthetic
gtctgtgcugtgaccugaagt

SEQ ID NO: 53513 - DNA, 23 bp, Artificial Sequence
  Synthetic
cagcattuccaggagaaagugga

SEQ ID NO: 53514 - DNA, 27 bp, Artificial Sequence
  Synthetic
gtucaagaaacacaaaaccaugcaaag

SEQ ID NO: 53515 - DNA, 28 bp, Artificial Sequence
  Synthetic
ccatcattcccaugtttctctttttgut

SEQ ID NO: 53516 - DNA, 22 bp, Artificial Sequence
  Synthetic
cccaccuttgactuagagggaa

SEQ ID NO: 53517 - DNA, 23 bp, Artificial Sequence
  Synthetic
ctctctcaucagagctgcatguc

SEQ ID NO: 53518 - DNA, 21 bp, Artificial Sequence
  Synthetic
gagatgatggcugctgagtug

SEQ ID NO: 53519 - DNA, 24 bp, Artificial Sequence
  Synthetic
cagggaccuggtaatacugaagga

SEQ ID NO: 53520 - DNA, 25 bp, Artificial Sequence
  Synthetic
tccacagatucagagcattctucac

SEQ ID NO: 53521 - DNA, 27 bp, Artificial Sequence
  Synthetic
ggaacagaatucaactgaggtgtucaa

SEQ ID NO: 53522 - DNA, 26 bp, Artificial Sequence
  Synthetic
aacagaaaacautgctgguaggaaga

SEQ ID NO: 53523 - DNA, 25 bp, Artificial Sequence
  Synthetic
gtatuagggcagggatcattuggaa

SEQ ID NO: 53524 - DNA, 21 bp, Artificial Sequence
  Synthetic
gcctgaucccagcaaatcuga

SEQ ID NO: 53525 - DNA, 28 bp, Artificial Sequence
  Synthetic
ggtgttaaaaatguaatcatggccctut

SEQ ID NO: 53526 - DNA, 28 bp, Artificial Sequence
  Synthetic
ttcaatcaatatutgcctggcauacaac

SEQ ID NO: 53527 - DNA, 28 bp, Artificial Sequence
  Synthetic
tgtataacataacugtgtggtgggttut

SEQ ID NO: 53528 - DNA, 25 bp, Artificial Sequence
  Synthetic
caatgatuggacactcttugcagat

SEQ ID NO: 53529 - DNA, 23 bp, Artificial Sequence
  Synthetic
catcctttugccctccttctcuc

SEQ ID NO: 53530 - DNA, 27 bp, Artificial Sequence
  Synthetic
tctgctgtcaaauaagaacagtctguc

SEQ ID NO: 53531 - DNA, 28 bp, Artificial Sequence
  Synthetic
gggtcagtaatugttttctgctttgaut

SEQ ID NO: 53532 - DNA, 27 bp, Artificial Sequence
  Synthetic
cttgtccaaauaccgaaatacaucagg

SEQ ID NO: 53533 - DNA, 21 bp, Artificial Sequence
  Synthetic
acaggaugctacccguaagga

SEQ ID NO: 53534 - DNA, 27 bp, Artificial Sequence
  Synthetic
caacacacaauacaaggaaatgcauca

SEQ ID NO: 53535 - DNA, 28 bp, Artificial Sequence
  Synthetic
cctgaaatgcutggatgacatugaaaaa

SEQ ID NO: 53536 - DNA, 23 bp, Artificial Sequence
  Synthetic
caagcatttcuccaactgtugct

SEQ ID NO: 53537 - DNA, 28 bp, Artificial Sequence
  Synthetic
tctgcccuagacagtttttattcacuct

SEQ ID NO: 53538 - DNA, 26 bp, Artificial Sequence
  Synthetic
cacctttttguaagacagattucgca

SEQ ID NO: 53539 - DNA, 25 bp, Artificial Sequence
  Synthetic
gaacautcgaccugagaaagacaga

SEQ ID NO: 53540 - DNA, 26 bp, Artificial Sequence
  Synthetic
gtggagctugagctatgacactatut

SEQ ID NO: 53541 - DNA, 28 bp, Artificial Sequence
  Synthetic
cattctaacugggatgttgugagaaaga

SEQ ID NO: 53542 - DNA, 31 bp, Artificial Sequence
  Synthetic
cttaccttagaaaatugtgcatttacccaut

SEQ ID NO: 53543 - DNA, 28 bp, Artificial Sequence
  Synthetic
ccagcatcacucatgtttaattccatut

SEQ ID NO: 53544 - DNA, 25 bp, Artificial Sequence
  Synthetic
gaacatcguggaaagactgaatugg

SEQ ID NO: 53545 - DNA, 29 bp, Artificial Sequence
  Synthetic
agtgttggcatacuttgaactttctctua

SEQ ID NO: 53546 - DNA, 28 bp, Artificial Sequence
  Synthetic
ggaattccattttuctcagccattaaut

SEQ ID NO: 53547 - DNA, 27 bp, Artificial Sequence
  Synthetic
gaaactucagaacccaaagtcatugag

SEQ ID NO: 53548 - DNA, 22 bp, Artificial Sequence
  Synthetic
aaacaacuaaacgccgcttucc

SEQ ID NO: 53549 - DNA, 27 bp, Artificial Sequence
  Synthetic
cttagattctuccagccttttcctuca

SEQ ID NO: 53550 - DNA, 21 bp, Artificial Sequence
  Synthetic
ccacucacgcaacuagccaaa

SEQ ID NO: 53551 - DNA, 26 bp, Artificial Sequence
  Synthetic
acctcttccutcttactgaaaauggg

SEQ ID NO: 53552 - DNA, 24 bp, Artificial Sequence
  Synthetic
catcaccaaguacttaugggagca

SEQ ID NO: 53553 - DNA, 25 bp, Artificial Sequence
  Synthetic
agtacaagutcaagcucaacccaat

SEQ ID NO: 53554 - DNA, 21 bp, Artificial Sequence
  Synthetic
gcaaggaagcutaaggcggut

SEQ ID NO: 53555 - DNA, 27 bp, Artificial Sequence
  Synthetic
ctcctcagacaaaaguagacaatcuct

SEQ ID NO: 53556 - DNA, 23 bp, Artificial Sequence
  Synthetic
gtggtatgataugctgggtgucc

SEQ ID NO: 53557 - DNA, 27 bp, Artificial Sequence
  Synthetic
ggacctgaguacattgattcctttcut

SEQ ID NO: 53558 - DNA, 21 bp, Artificial Sequence
  Synthetic
tagtgagccccaauctgacut

SEQ ID NO: 53559 - DNA, 24 bp, Artificial Sequence
  Synthetic
tgcaagatcaccauctccatctuc

SEQ ID NO: 53560 - DNA, 24 bp, Artificial Sequence
  Synthetic
gacggtctttucttgtgagtcugt

SEQ ID NO: 53561 - DNA, 28 bp, Artificial Sequence
  Synthetic
gguacacacaauaaaaaggacagcaaat

SEQ ID NO: 53562 - DNA, 24 bp, Artificial Sequence
  Synthetic
gtcattgcaautgaatgcaugaca

SEQ ID NO: 53563 - DNA, 25 bp, Artificial Sequence
  Synthetic
ctatgtccttugtgaggtctgugaa

SEQ ID NO: 53564 - DNA, 25 bp, Artificial Sequence
  Synthetic
gatatggtucccaaggactagugac

SEQ ID NO: 53565 - DNA, 28 bp, Artificial Sequence
  Synthetic
tgagtgctacaaaaugcacatttacuct

SEQ ID NO: 53566 - DNA, 22 bp, Artificial Sequence
  Synthetic
cacttgaguagcttgcttugcc

SEQ ID NO: 53567 - DNA, 25 bp, Artificial Sequence
  Synthetic
gcaattgcuacaaatggcctaucac

SEQ ID NO: 53568 - DNA, 22 bp, Artificial Sequence
  Synthetic
accttcuggagttccuggacaa

SEQ ID NO: 53569 - DNA, 28 bp, Artificial Sequence
  Synthetic
ctcaagtatgugcctaaaactataugcc

SEQ ID NO: 53570 - DNA, 24 bp, Artificial Sequence
  Synthetic
gtgaautcagtgtcucgagaacct

SEQ ID NO: 53571 - DNA, 24 bp, Artificial Sequence
  Synthetic
ccaccaacagcaugttttactugt

SEQ ID NO: 53572 - DNA, 22 bp, Artificial Sequence
  Synthetic
cattacucagtgccugcaaggt

SEQ ID NO: 53573 - DNA, 25 bp, Artificial Sequence
  Synthetic
ccctttttgttuttgcctctctuca

SEQ ID NO: 53574 - DNA, 27 bp, Artificial Sequence
  Synthetic
agacatgaagtutccatgctagtuagg

SEQ ID NO: 53575 - DNA, 28 bp, Artificial Sequence
  Synthetic
tttaccaaggcagcauctacttatucaa

SEQ ID NO: 53576 - DNA, 24 bp, Artificial Sequence
  Synthetic
tggcagaaucaattcauggaagca

SEQ ID NO: 53577 - DNA, 28 bp, Artificial Sequence
  Synthetic
cctggtattcacaugaaggtcattucaa

SEQ ID NO: 53578 - DNA, 21 bp, Artificial Sequence
  Synthetic
gcctgctuctcagaagugaca

SEQ ID NO: 53579 - DNA, 28 bp, Artificial Sequence
  Synthetic
ccaaaatggttucagcttcagtagaaut

SEQ ID NO: 53580 - DNA, 21 bp, Artificial Sequence
  Synthetic
gccgtcctuccaggaacauag

SEQ ID NO: 53581 - DNA, 28 bp, Artificial Sequence
  Synthetic
cctctggtttutacaacaggaaaugaaa

SEQ ID NO: 53582 - DNA, 26 bp, Artificial Sequence
  Synthetic
gatggcttcugcatcaacttcuaaat

SEQ ID NO: 53583 - DNA, 27 bp, Artificial Sequence
  Synthetic
ccagcccaaaaugacctaatatucaaa

SEQ ID NO: 53584 - DNA, 26 bp, Artificial Sequence
  Synthetic
catatgtccttucaatggccccatua

SEQ ID NO: 53585 - DNA, 28 bp, Artificial Sequence
  Synthetic
acagtcaaucttgcaaaguagaagagaa

SEQ ID NO: 53586 - DNA, 20 bp, Artificial Sequence
  Synthetic
gcggatcaugtcgtcguaca

SEQ ID NO: 53587 - DNA, 19 bp, Artificial Sequence
  Synthetic
cctgagcgucctctagcuc

SEQ ID NO: 53588 - DNA, 21 bp, Artificial Sequence
  Synthetic
aggtgatcuacccggacucag

SEQ ID NO: 53589 - DNA, 28 bp, Artificial Sequence
  Synthetic
cactttagactcuggatgttgagguaat

SEQ ID NO: 53590 - DNA, 20 bp, Artificial Sequence
  Synthetic
gcgtguaggagctctggtug

SEQ ID NO: 53591 - DNA, 23 bp, Artificial Sequence
  Synthetic
cttgttcaaagccutgggaggua

SEQ ID NO: 53592 - DNA, 19 bp, Artificial Sequence
  Synthetic
cagaaccgaguggcaggua

SEQ ID NO: 53593 - DNA, 21 bp, Artificial Sequence
  Synthetic
agtgtcatccucagtggctug

SEQ ID NO: 53594 - DNA, 24 bp, Artificial Sequence
  Synthetic
ccuggaaattuggaagcagaggaa

SEQ ID NO: 53595 - DNA, 20 bp, Artificial Sequence
  Synthetic
tcaagctgucgccctatguc

SEQ ID NO: 53596 - DNA, 21 bp, Artificial Sequence
  Synthetic
gggcttcugggcttagaagut

SEQ ID NO: 53597 - DNA, 21 bp, Artificial Sequence
  Synthetic
caccctgucttcagtgaugga

SEQ ID NO: 53598 - DNA, 24 bp, Artificial Sequence
  Synthetic
gacaacuacgcagatcttucggat

SEQ ID NO: 53599 - DNA, 23 bp, Artificial Sequence
  Synthetic
cgtaaagccuacgagttgaucct

SEQ ID NO: 53600 - DNA, 26 bp, Artificial Sequence
  Synthetic
agcttaccttuactttgccattcuga

SEQ ID NO: 53601 - DNA, 24 bp, Artificial Sequence
  Synthetic
ggctactaguccaactctatugcc

SEQ ID NO: 53602 - DNA, 25 bp, Artificial Sequence
  Synthetic
cuccttgaauacaaaggacggacat

SEQ ID NO: 53603 - DNA, 28 bp, Artificial Sequence
  Synthetic
acagttttcttgtugatcctagtcgtut

SEQ ID NO: 53604 - DNA, 27 bp, Artificial Sequence
  Synthetic
tgtaaacagaaaccuggtggtcaatut

SEQ ID NO: 53605 - DNA, 28 bp, Artificial Sequence
  Synthetic
acaattaaaugttgttgguaagcacagg

SEQ ID NO: 53606 - DNA, 27 bp, Artificial Sequence
  Synthetic
tgagctgatttagutgagacttacgug

SEQ ID NO: 53607 - DNA, 24 bp, Artificial Sequence
  Synthetic
aacttctuggcaagtcggtuaaga

SEQ ID NO: 53608 - DNA, 28 bp, Artificial Sequence
  Synthetic
ccuttttaatacttuccccaagaagcca

SEQ ID NO: 53609 - DNA, 22 bp, Artificial Sequence
  Synthetic
tgaccacaggcutgatgtucac

SEQ ID NO: 53610 - DNA, 22 bp, Artificial Sequence
  Synthetic
gctgggaguatagcaucaccat

SEQ ID NO: 53611 - DNA, 20 bp, Artificial Sequence
  Synthetic
aggtctgcauctgtgccuac

SEQ ID NO: 53612 - DNA, 20 bp, Artificial Sequence
  Synthetic
gggaccagacgcucatctuc

SEQ ID NO: 53613 - DNA, 22 bp, Artificial Sequence
  Synthetic
ggagtuaggagagcacccauct

SEQ ID NO: 53614 - DNA, 25 bp, Artificial Sequence
  Synthetic
catttcagcugcaaagattccagua

SEQ ID NO: 53615 - DNA, 21 bp, Artificial Sequence
  Synthetic
cugataugggagccagggaag

SEQ ID NO: 53616 - DNA, 22 bp, Artificial Sequence
  Synthetic
aaccacagccaggaucaagtut

SEQ ID NO: 53617 - DNA, 22 bp, Artificial Sequence
  Synthetic
tcagatttgcucatgcctguca

SEQ ID NO: 53618 - DNA, 25 bp, Artificial Sequence
  Synthetic
gacacacaugcaattatctggcuaa

SEQ ID NO: 53619 - DNA, 22 bp, Artificial Sequence
  Synthetic
cctgcagcugatacagctcauc

SEQ ID NO: 53620 - DNA, 24 bp, Artificial Sequence
  Synthetic
ccttcttaugaggcaggatucgat

SEQ ID NO: 53621 - DNA, 27 bp, Artificial Sequence
  Synthetic
gaagtatggcucttataatugcccgaa

SEQ ID NO: 53622 - DNA, 25 bp, Artificial Sequence
  Synthetic
agagggagaagggucagtttaauga

SEQ ID NO: 53623 - DNA, 29 bp, Artificial Sequence
  Synthetic
agttttgccttcuttgcttgatttgtaut

SEQ ID NO: 53624 - DNA, 26 bp, Artificial Sequence
  Synthetic
gcccttugaggattagtaaauaccga

SEQ ID NO: 53625 - DNA, 26 bp, Artificial Sequence
  Synthetic
agagaagucagaaggttggagaugaa

SEQ ID NO: 53626 - DNA, 20 bp, Artificial Sequence
  Synthetic
agtggcgacugaatgugcat

SEQ ID NO: 53627 - DNA, 28 bp, Artificial Sequence
  Synthetic
ggtgttgatttugaaatccattggtuca

SEQ ID NO: 53628 - DNA, 27 bp, Artificial Sequence
  Synthetic
attacctgagacccuctgttcatauca

SEQ ID NO: 53629 - DNA, 24 bp, Artificial Sequence
  Synthetic
cugcaacauggaaacaggagaaac

SEQ ID NO: 53630 - DNA, 26 bp, Artificial Sequence
  Synthetic
agacaccutttaaaacugaagccagt

SEQ ID NO: 53631 - DNA, 28 bp, Artificial Sequence
  Synthetic
cctaaactcaaagcucttgttccatuaa

SEQ ID NO: 53632 - DNA, 22 bp, Artificial Sequence
  Synthetic
agccctctcucctgctgaatua

SEQ ID NO: 53633 - DNA, 28 bp, Artificial Sequence
  Synthetic
ggttcttaugcctttgaggatugaaaaa

SEQ ID NO: 53634 - DNA, 23 bp, Artificial Sequence
  Synthetic
gaaactacttacugccggtccug

SEQ ID NO: 53635 - DNA, 28 bp, Artificial Sequence
  Synthetic
atggtcatcaatugacaacatccattug

SEQ ID NO: 53636 - DNA, 21 bp, Artificial Sequence
  Synthetic
ggctatgucaccaccaaugga

SEQ ID NO: 53637 - DNA, 28 bp, Artificial Sequence
  Synthetic
cttacacattggugaaatcacattucct

SEQ ID NO: 53638 - DNA, 28 bp, Artificial Sequence
  Synthetic
aactataatatucaccaactgccagtut

SEQ ID NO: 53639 - DNA, 28 bp, Artificial Sequence
  Synthetic
ctttagttggccaugttagaggaagaut

SEQ ID NO: 53640 - DNA, 22 bp, Artificial Sequence
  Synthetic
tgtgtagcaautcctgctcugt

SEQ ID NO: 53641 - DNA, 28 bp, Artificial Sequence
  Synthetic
ttgtgtgatcuacggcaaaaaggttaua

SEQ ID NO: 53642 - DNA, 21 bp, Artificial Sequence
  Synthetic
gggctagugacaaggaugaga

SEQ ID NO: 53643 - DNA, 19 bp, Artificial Sequence
  Synthetic
tgggcaaucgggctctcua

SEQ ID NO: 53644 - DNA, 20 bp, Artificial Sequence
  Synthetic
gagctgcuggacttcucact

SEQ ID NO: 53645 - DNA, 19 bp, Artificial Sequence
  Synthetic
gaagcgcaccutctcgaug

SEQ ID NO: 53646 - DNA, 26 bp, Artificial Sequence
  Synthetic
ggagggttctuaactcttaggaggut

SEQ ID NO: 53647 - DNA, 23 bp, Artificial Sequence
  Synthetic
cctttttctuccccagacuccag

SEQ ID NO: 53648 - DNA, 23 bp, Artificial Sequence
  Synthetic
ccagagaaaucgcctggaagtua

SEQ ID NO: 53649 - DNA, 18 bp, Artificial Sequence
  Synthetic
caaccgccgugcaagaug

SEQ ID NO: 53650 - DNA, 19 bp, Artificial Sequence
  Synthetic
aggttguccggagccuagt

SEQ ID NO: 53651 - DNA, 28 bp, Artificial Sequence
  Synthetic
caaaagctgagaugaaacagtgtaagut

SEQ ID NO: 53652 - DNA, 22 bp, Artificial Sequence
  Synthetic
gccaucttuacgaaccaaccca

SEQ ID NO: 53653 - DNA, 25 bp, Artificial Sequence
  Synthetic
ccccattagcucagctgttttctut

SEQ ID NO: 53654 - DNA, 21 bp, Artificial Sequence
  Synthetic
ggtgctgaccaugtggacaut

SEQ ID NO: 53655 - DNA, 27 bp, Artificial Sequence
  Synthetic
tgccaatcauggaattttctttcucct

SEQ ID NO: 53656 - DNA, 25 bp, Artificial Sequence
  Synthetic
tctagaauccagacctgtcagucaa

SEQ ID NO: 53657 - DNA, 26 bp, Artificial Sequence
  Synthetic
caccaaagtaccuactatgtgtgugg

SEQ ID NO: 53658 - DNA, 21 bp, Artificial Sequence
  Synthetic
ctgaccaucacgaggcugaat

SEQ ID NO: 53659 - DNA, 22 bp, Artificial Sequence
  Synthetic
gagaaacucaggtuccgaggag

SEQ ID NO: 53660 - DNA, 19 bp, Artificial Sequence
  Synthetic
cuccacgtgugccaacaac

SEQ ID NO: 53661 - DNA, 24 bp, Artificial Sequence
  Synthetic
aaagatcttgacugccactgtcuc

SEQ ID NO: 53662 - DNA, 24 bp, Artificial Sequence
  Synthetic
ccccaccagutcattcacagaauc

SEQ ID NO: 53663 - DNA, 28 bp, Artificial Sequence
  Synthetic
gcagatgaaagugtgaggaaatgaaaut

SEQ ID NO: 53664 - DNA, 22 bp, Artificial Sequence
  Synthetic
cacctcgatuggaaacgggaua

SEQ ID NO: 53665 - DNA, 23 bp, Artificial Sequence
  Synthetic
gagaaggccgutctccattacut

SEQ ID NO: 53666 - DNA, 22 bp, Artificial Sequence
  Synthetic
gcctgggacucatggaaaugat

SEQ ID NO: 53667 - DNA, 22 bp, Artificial Sequence
  Synthetic
caggaguctcaagugaggaagg

SEQ ID NO: 53668 - DNA, 24 bp, Artificial Sequence
  Synthetic
cagcaaagaugaacacgatgaugg

SEQ ID NO: 53669 - DNA, 22 bp, Artificial Sequence
  Synthetic
ttucaggcaggagcuagagaga

SEQ ID NO: 53670 - DNA, 23 bp, Artificial Sequence
  Synthetic
ccacccucaaaagatccttcugt

SEQ ID NO: 53671 - DNA, 24 bp, Artificial Sequence
  Synthetic
caccatcacuatgtgcatcguact

SEQ ID NO: 53672 - DNA, 22 bp, Artificial Sequence
  Synthetic
caggtucaccagguagaaggac

SEQ ID NO: 53673 - DNA, 22 bp, Artificial Sequence
  Synthetic
tctaccctccuccctaggcuat

SEQ ID NO: 53674 - DNA, 19 bp, Artificial Sequence
  Synthetic
gactgucccggtacugcac

SEQ ID NO: 53675 - DNA, 22 bp, Artificial Sequence
  Synthetic
gccttgtgucgtccacttagut

SEQ ID NO: 53676 - DNA, 24 bp, Artificial Sequence
  Synthetic
ttcatgaacuccaggaactctgug

SEQ ID NO: 53677 - DNA, 22 bp, Artificial Sequence
  Synthetic
catcgaccuggatgagcugaag

SEQ ID NO: 53678 - DNA, 28 bp, Artificial Sequence
  Synthetic
tttagcttatcaaaugctgagtagccut

SEQ ID NO: 53679 - DNA, 26 bp, Artificial Sequence
  Synthetic
ctcggctaauaacacatcaaatcgut

SEQ ID NO: 53680 - DNA, 25 bp, Artificial Sequence
  Synthetic
tcagagtgautgctttgatguggat

SEQ ID NO: 53681 - DNA, 23 bp, Artificial Sequence
  Synthetic
ccagatagcugactccacatugt

SEQ ID NO: 53682 - DNA, 21 bp, Artificial Sequence
  Synthetic
cutccagggatucaggcaaga

SEQ ID NO: 53683 - DNA, 24 bp, Artificial Sequence
  Synthetic
cctgtttcautccagatgcuccag

SEQ ID NO: 53684 - DNA, 19 bp, Artificial Sequence
  Synthetic
catucagggtcucggcact

SEQ ID NO: 53685 - DNA, 20 bp, Artificial Sequence
  Synthetic
cccccagcaggucgatttuc

SEQ ID NO: 53686 - DNA, 20 bp, Artificial Sequence
  Synthetic
ccgtccacuggtcgauacct

SEQ ID NO: 53687 - DNA, 22 bp, Artificial Sequence
  Synthetic
accaagtuaccccattgccauc

SEQ ID NO: 53688 - DNA, 20 bp, Artificial Sequence
  Synthetic
ccatggcagutctccaugct

SEQ ID NO: 53689 - DNA, 24 bp, Artificial Sequence
  Synthetic
gaagacgaaguatccaugcagaga

SEQ ID NO: 53690 - DNA, 23 bp, Artificial Sequence
  Synthetic
aggagatcuagagctcugacgac

SEQ ID NO: 53691 - DNA, 28 bp, Artificial Sequence
  Synthetic
atactttcaacagguaatacagcaccut

SEQ ID NO: 53692 - DNA, 28 bp, Artificial Sequence
  Synthetic
actgtttcattucacgaagtttgatguc

SEQ ID NO: 53693 - DNA, 27 bp, Artificial Sequence
  Synthetic
acatttttgaagucccaaatcctccut

SEQ ID NO: 53694 - DNA, 28 bp, Artificial Sequence
  Synthetic
gtttacgaucagccacagaaattcttut

SEQ ID NO: 53695 - DNA, 27 bp, Artificial Sequence
  Synthetic
cctaggaautagcaaggauaaagcagg

SEQ ID NO: 53696 - DNA, 27 bp, Artificial Sequence
  Synthetic
actatgagaugttccatgacuacacga

SEQ ID NO: 53697 - DNA, 26 bp, Artificial Sequence
  Synthetic
ttacagttgucaaagctgaaggauga

SEQ ID NO: 53698 - DNA, 29 bp, Artificial Sequence
  Synthetic
cttagatgtttgcuctgagtaactttugg

SEQ ID NO: 53699 - DNA, 22 bp, Artificial Sequence
  Synthetic
cgggcguaaacaccttcaatut

SEQ ID NO: 53700 - DNA, 22 bp, Artificial Sequence
  Synthetic
gactacauctcccuccacagga

SEQ ID NO: 53701 - DNA, 17 bp, Artificial Sequence
  Synthetic
gggtguccgcgaactug

SEQ ID NO: 53702 - DNA, 20 bp, Artificial Sequence
  Synthetic
caacgcccaugtcttugcag

SEQ ID NO: 53703 - DNA, 24 bp, Artificial Sequence
  Synthetic
actttctgtuacctgtcgctugag

SEQ ID NO: 53704 - DNA, 20 bp, Artificial Sequence
  Synthetic
cgccttucgagcagtacucc

SEQ ID NO: 53705 - DNA, 21 bp, Artificial Sequence
  Synthetic
gctagggaccccucacatugt

SEQ ID NO: 53706 - DNA, 21 bp, Artificial Sequence
  Synthetic
ctccctgcucttccattuggt

SEQ ID NO: 53707 - DNA, 23 bp, Artificial Sequence
  Synthetic
tgaagtaguagacgcagcgttug

SEQ ID NO: 53708 - DNA, 19 bp, Artificial Sequence
  Synthetic
ccgaaggaugagcgauccc

SEQ ID NO: 53709 - DNA, 23 bp, Artificial Sequence
  Synthetic
gacagguggaaggacttgagtut

SEQ ID NO: 53710 - DNA, 26 bp, Artificial Sequence
  Synthetic
tcccttttgccautcatgagattuct

SEQ ID NO: 53711 - DNA, 26 bp, Artificial Sequence
  Synthetic
tcaaaacttucccattagugcaagga

SEQ ID NO: 53712 - DNA, 25 bp, Artificial Sequence
  Synthetic
ggcagguacagatacttcaaucact

SEQ ID NO: 53713 - DNA, 27 bp, Artificial Sequence
  Synthetic
agtgtgtgcugtctttttgattttuct

SEQ ID NO: 53714 - DNA, 24 bp, Artificial Sequence
  Synthetic
gggtucctagagatuccaagaaga

SEQ ID NO: 53715 - DNA, 25 bp, Artificial Sequence
  Synthetic
catatgttguagaagcagcuggaca

SEQ ID NO: 53716 - DNA, 20 bp, Artificial Sequence
  Synthetic
ctgttgagtguggcctccua

SEQ ID NO: 53717 - DNA, 28 bp, Artificial Sequence
  Synthetic
gaacatgacaggugtcatagaagatuga

SEQ ID NO: 53718 - DNA, 20 bp, Artificial Sequence
  Synthetic
ccctucagaagcgaguggaa

SEQ ID NO: 53719 - DNA, 25 bp, Artificial Sequence
  Synthetic
tutcagttttugcggaagaggaaag

SEQ ID NO: 53720 - DNA, 23 bp, Artificial Sequence
  Synthetic
tgtgcagaggaggaugatucaga

SEQ ID NO: 53721 - DNA, 25 bp, Artificial Sequence
  Synthetic
cctgtatgutttggttcauccacat

SEQ ID NO: 53722 - DNA, 27 bp, Artificial Sequence
  Synthetic
agacactccaaaugagttcttcacaut

SEQ ID NO: 53723 - DNA, 28 bp, Artificial Sequence
  Synthetic
gctgtgcuatattaatgcuacgaaggat

SEQ ID NO: 53724 - DNA, 27 bp, Artificial Sequence
  Synthetic
agtaaaatggtcuggttcttcccttut

SEQ ID NO: 53725 - DNA, 26 bp, Artificial Sequence
  Synthetic
gctctaacacacuttcctgaaugaga

SEQ ID NO: 53726 - DNA, 27 bp, Artificial Sequence
  Synthetic
agtgcacagauatagaattcagctugg

SEQ ID NO: 53727 - DNA, 22 bp, Artificial Sequence
  Synthetic
cacatgcaaccutgctcttugt

SEQ ID NO: 53728 - DNA, 25 bp, Artificial Sequence
  Synthetic
gacattaaagcaaugcagaauggga

SEQ ID NO: 53729 - DNA, 28 bp, Artificial Sequence
  Synthetic
gttggatggcuttagactctacatuacc

SEQ ID NO: 53730 - DNA, 22 bp, Artificial Sequence
  Synthetic
gcctucaagcatcccugaaaga

SEQ ID NO: 53731 - DNA, 19 bp, Artificial Sequence
  Synthetic
tgagucggguccgacagaa

SEQ ID NO: 53732 - DNA, 27 bp, Artificial Sequence
  Synthetic
gcttcatgtcuccccttaaaataugct

SEQ ID NO: 53733 - DNA, 23 bp, Artificial Sequence
  Synthetic
agatggaaaugtcctctgcucac

SEQ ID NO: 53734 - DNA, 28 bp, Artificial Sequence
  Synthetic
acgtctatcaaugtattgagtagcucca

SEQ ID NO: 53735 - DNA, 28 bp, Artificial Sequence
  Synthetic
tcacagctgtugatcacattgtattuct

SEQ ID NO: 53736 - DNA, 21 bp, Artificial Sequence
  Synthetic
actggccaugtatuccagcag

SEQ ID NO: 53737 - DNA, 22 bp, Artificial Sequence
  Synthetic
cgtcttgguccagtgatgtcua

SEQ ID NO: 53738 - DNA, 26 bp, Artificial Sequence
  Synthetic
gacaaacattugctgagcacauacaa

SEQ ID NO: 53739 - DNA, 28 bp, Artificial Sequence
  Synthetic
cttagcacaautatcaacuccaccaaaa

SEQ ID NO: 53740 - DNA, 29 bp, Artificial Sequence
  Synthetic
agttcattttcucccatttcaacaucaga

SEQ ID NO: 53741 - DNA, 22 bp, Artificial Sequence
  Synthetic
ggagcagugaactgttguccaa

SEQ ID NO: 53742 - DNA, 22 bp, Artificial Sequence
  Synthetic
gtacugtgcttgtugaccacct

SEQ ID NO: 53743 - DNA, 20 bp, Artificial Sequence
  Synthetic
agacguttgctgucggacat

SEQ ID NO: 53744 - DNA, 25 bp, Artificial Sequence
  Synthetic
actttcucagaattccaugcacagt

SEQ ID NO: 53745 - DNA, 27 bp, Artificial Sequence
  Synthetic
accagcauattcaccauacaagacaat

SEQ ID NO: 53746 - DNA, 24 bp, Artificial Sequence
  Synthetic
cuagggtucgaagaccagaaacat

SEQ ID NO: 53747 - DNA, 25 bp, Artificial Sequence
  Synthetic
aggtcutgatttttgtuccccagaa

SEQ ID NO: 53748 - DNA, 27 bp, Artificial Sequence
  Synthetic
atttgccttugaacagatgtggtagua

SEQ ID NO: 53749 - DNA, 28 bp, Artificial Sequence
  Synthetic
catctgtgaaucagagtacatcctcaut

SEQ ID NO: 53750 - DNA, 25 bp, Artificial Sequence
  Synthetic
aaatgtcaaugtttgctuggcagat

SEQ ID NO: 53751 - DNA, 26 bp, Artificial Sequence
  Synthetic
gctctttacccutgctagaatacugg

SEQ ID NO: 53752 - DNA, 26 bp, Artificial Sequence
  Synthetic
aacatgttucaggctaaagcauaaca

SEQ ID NO: 53753 - DNA, 27 bp, Artificial Sequence
  Synthetic
ggttatcaggagucaaaagaacacuca

SEQ ID NO: 53754 - DNA, 23 bp, Artificial Sequence
  Synthetic
ggcgucaagggatuaaaagcaat

SEQ ID NO: 53755 - DNA, 26 bp, Artificial Sequence
  Synthetic
gcaatttgtggucgatctttgtacut

SEQ ID NO: 53756 - DNA, 27 bp, Artificial Sequence
  Synthetic
cutacaaacagataugaccagaaggca

SEQ ID NO: 53757 - DNA, 28 bp, Artificial Sequence
  Synthetic
gctcttcgcugttttatcactuagaaac

SEQ ID NO: 53758 - DNA, 22 bp, Artificial Sequence
  Synthetic
cggcagaaugaaggucaaggag

SEQ ID NO: 53759 - DNA, 27 bp, Artificial Sequence
  Synthetic
acattggtacugaatgcttcuggaaat

SEQ ID NO: 53760 - DNA, 28 bp, Artificial Sequence
  Synthetic
ccgcaaaaggaacauggagaaaaauaaa

SEQ ID NO: 53761 - DNA, 26 bp, Artificial Sequence
  Synthetic
gtattacctgugggagatctuccaga

SEQ ID NO: 53762 - DNA, 22 bp, Artificial Sequence
  Synthetic
ctccccatcugtgccattguaa

SEQ ID NO: 53763 - DNA, 20 bp, Artificial Sequence
  Synthetic
gggacttcugaggtgtggug

SEQ ID NO: 53764 - DNA, 18 bp, Artificial Sequence
  Synthetic
cgccguaacccggauagg

SEQ ID NO: 53765 - DNA, 18 bp, Artificial Sequence
  Synthetic
cggcgcuacaagugcaag

SEQ ID NO: 53766 - DNA, 24 bp, Artificial Sequence
  Synthetic
ttaggtgaggaugtcagtgacuct

SEQ ID NO: 53767 - DNA, 23 bp, Artificial Sequence
  Synthetic
caggtttugagcagtcaucaacc

SEQ ID NO: 53768 - DNA, 25 bp, Artificial Sequence
  Synthetic
gaatgaggcucagagagggtagtua

SEQ ID NO: 53769 - DNA, 26 bp, Artificial Sequence
  Synthetic
tccccacaacuaaaacactcatctuc

SEQ ID NO: 53770 - DNA, 27 bp, Artificial Sequence
  Synthetic
cttcacagacuaattatgtcacuggca

SEQ ID NO: 53771 - DNA, 24 bp, Artificial Sequence
  Synthetic
tgggccacugttataagcttucaa

SEQ ID NO: 53772 - DNA, 22 bp, Artificial Sequence
  Synthetic
caggttaugggaccuggagaaa

SEQ ID NO: 53773 - DNA, 28 bp, Artificial Sequence
  Synthetic
acccaattaatcucaaaacagctaugga

SEQ ID NO: 53774 - DNA, 25 bp, Artificial Sequence
  Synthetic
aactgtggaacugtagctgttagug

SEQ ID NO: 53775 - DNA, 27 bp, Artificial Sequence
  Synthetic
gggcaggtttuaagagatatgtgauga

SEQ ID NO: 53776 - DNA, 22 bp, Artificial Sequence
  Synthetic
tccctaaaugcaggccacttut

SEQ ID NO: 53777 - DNA, 20 bp, Artificial Sequence
  Synthetic
gttccucacccgtacgaguc

SEQ ID NO: 53778 - DNA, 22 bp, Artificial Sequence
  Synthetic
ctccccucctactacacauggt

SEQ ID NO: 53779 - DNA, 25 bp, Artificial Sequence
  Synthetic
gccacatcuggcttgaaattcuact

SEQ ID NO: 53780 - DNA, 22 bp, Artificial Sequence
  Synthetic
acatcaccaugaagtggcugaa

SEQ ID NO: 53781 - DNA, 21 bp, Artificial Sequence
  Synthetic
gctcctggcuctcatcaguca

SEQ ID NO: 53782 - DNA, 19 bp, Artificial Sequence
  Synthetic
gttcagugcacgcaacugt

SEQ ID NO: 53783 - DNA, 19 bp, Artificial Sequence
  Synthetic
ccagaaacuccagguggga

SEQ ID NO: 53784 - DNA, 22 bp, Artificial Sequence
  Synthetic
ccatggcucctgtucacagaat

SEQ ID NO: 53785 - DNA, 21 bp, Artificial Sequence
  Synthetic
gtgtgtgtguagagggctucc

SEQ ID NO: 53786 - DNA, 21 bp, Artificial Sequence
  Synthetic
ggagatgttugtgcacccuga

SEQ ID NO: 53787 - DNA, 22 bp, Artificial Sequence
  Synthetic
atgcaggaagaugaggccauac

SEQ ID NO: 53788 - DNA, 24 bp, Artificial Sequence
  Synthetic
cacatttagagcauggagcugagt

SEQ ID NO: 53789 - DNA, 21 bp, Artificial Sequence
  Synthetic
ctgcucacacccatcttgugt

SEQ ID NO: 53790 - DNA, 21 bp, Artificial Sequence
  Synthetic
gggaatcugggaagcgtugat

SEQ ID NO: 53791 - DNA, 26 bp, Artificial Sequence
  Synthetic
cgcctctgatutttaacctttgacuc

SEQ ID NO: 53792 - DNA, 22 bp, Artificial Sequence
  Synthetic
gggtctcaaggguttcacagut

SEQ ID NO: 53793 - DNA, 23 bp, Artificial Sequence
  Synthetic
gcutcctgtaugaagaccagact

SEQ ID NO: 53794 - DNA, 20 bp, Artificial Sequence
  Synthetic
accctcuaggctcccaaguc

SEQ ID NO: 53795 - DNA, 22 bp, Artificial Sequence
  Synthetic
aggagtucacagccttgttucc

SEQ ID NO: 53796 - DNA, 23 bp, Artificial Sequence
  Synthetic
ccacgtttctuggagtgcacuat

SEQ ID NO: 53797 - DNA, 21 bp, Artificial Sequence
  Synthetic
ccgaggaaucugagagcgaga

SEQ ID NO: 53798 - DNA, 23 bp, Artificial Sequence
  Synthetic
ggccaaaaucccaaggaagagut

SEQ ID NO: 53799 - DNA, 20 bp, Artificial Sequence
  Synthetic
acaagaugcggagtcgtugg

SEQ ID NO: 53800 - DNA, 20 bp, Artificial Sequence
  Synthetic
gctacagcuttggccatucc

SEQ ID NO: 53801 - DNA, 33 bp, Artificial Sequence
  Synthetic
acacacaaattctaautaatgactttgatgtut

SEQ ID NO: 53802 - DNA, 26 bp, Artificial Sequence
  Synthetic
gtttaggguttgaagaatugccaagt

SEQ ID NO: 53803 - DNA, 25 bp, Artificial Sequence
  Synthetic
ggaattaugcacccaauaacagcag

SEQ ID NO: 53804 - DNA, 23 bp, Artificial Sequence
  Synthetic
acaaacagtcuccccctacauga

SEQ ID NO: 53805 - DNA, 25 bp, Artificial Sequence
  Synthetic
ggtccccagcuagtgattttugaaa

SEQ ID NO: 53806 - DNA, 19 bp, Artificial Sequence
  Synthetic
gcacttaggguggcccaut

SEQ ID NO: 53807 - DNA, 28 bp, Artificial Sequence
  Synthetic
gttccatgacagaauttaccagaaaugt

SEQ ID NO: 53808 - DNA, 26 bp, Artificial Sequence
  Synthetic
gggaatgtgagugagaatatgugagt

SEQ ID NO: 53809 - DNA, 28 bp, Artificial Sequence
  Synthetic
aacccagacgutaatactttgtttcuga

SEQ ID NO: 53810 - DNA, 29 bp, Artificial Sequence
  Synthetic
gagtaagccagucaaatagaugagaaaga

SEQ ID NO: 53811 - DNA, 27 bp, Artificial Sequence
  Synthetic
tttaattcgcttuaggcattccatgug

SEQ ID NO: 53812 - DNA, 26 bp, Artificial Sequence
  Synthetic
acagctgtttcutgtttgtgctagua

SEQ ID NO: 53813 - DNA, 23 bp, Artificial Sequence
  Synthetic
tgtcattccaaugtgactgucca

SEQ ID NO: 53814 - DNA, 20 bp, Artificial Sequence
  Synthetic
cagccccuggaatgcttcua

SEQ ID NO: 53815 - DNA, 23 bp, Artificial Sequence
  Synthetic
agcagccacacuaggtttcttut

SEQ ID NO: 53816 - DNA, 28 bp, Artificial Sequence
  Synthetic
tgctttuaccacacaacttttucaaact

SEQ ID NO: 53817 - DNA, 28 bp, Artificial Sequence
  Synthetic
ggagaattacctguttaactcccatcut

SEQ ID NO: 53818 - DNA, 28 bp, Artificial Sequence
  Synthetic
cataaatccaggugtgcataaacatguc

SEQ ID NO: 53819 - DNA, 28 bp, Artificial Sequence
  Synthetic
gctttgtaatttugttgaacaggauggt

SEQ ID NO: 53820 - DNA, 26 bp, Artificial Sequence
  Synthetic
aagttagauagtccccuacccacaat

SEQ ID NO: 53821 - DNA, 26 bp, Artificial Sequence
  Synthetic
cagaaacaacucaacatgcttagcut

SEQ ID NO: 53822 - DNA, 26 bp, Artificial Sequence
  Synthetic
aaagtcactctugtttacccttgugt

SEQ ID NO: 53823 - DNA, 27 bp, Artificial Sequence
  Synthetic
atggtttcatgcauaaactgcctttut

SEQ ID NO: 53824 - DNA, 22 bp, Artificial Sequence
  Synthetic
gcactactugcctgatcaucca

SEQ ID NO: 53825 - DNA, 28 bp, Artificial Sequence
  Synthetic
tctgtctgtctutctttctctttgtucc

SEQ ID NO: 53826 - DNA, 27 bp, Artificial Sequence
  Synthetic
ctggaatgaaatucatctgccatgtut

SEQ ID NO: 53827 - DNA, 19 bp, Artificial Sequence
  Synthetic
cttggccgugtaggaccug

SEQ ID NO: 53828 - DNA, 27 bp, Artificial Sequence
  Synthetic
gcacctactuggagatggtaagatuct

SEQ ID NO: 53829 - DNA, 29 bp, Artificial Sequence
  Synthetic
aagaagtcagaaaagucaaagaaaaaugc

SEQ ID NO: 53830 - DNA, 24 bp, Artificial Sequence
  Synthetic
gacaacattuaagtgtggccaugt

SEQ ID NO: 53831 - DNA, 24 bp, Artificial Sequence
  Synthetic
cgattaataugcgtgtctguggga

SEQ ID NO: 53832 - DNA, 25 bp, Artificial Sequence
  Synthetic
cttgaacttccguagaatgctgcua

SEQ ID NO: 53833 - DNA, 27 bp, Artificial Sequence
  Synthetic
tctgtcaaatuccagagttttggacut

SEQ ID NO: 53834 - DNA, 24 bp, Artificial Sequence
  Synthetic
gggttttcttugctcagtacatug

SEQ ID NO: 53835 - DNA, 22 bp, Artificial Sequence
  Synthetic
gctgtcagcugctcgtcaauag

SEQ ID NO: 53836 - DNA, 26 bp, Artificial Sequence
  Synthetic
actgtgttataucttgggagcuaggt

SEQ ID NO: 53837 - DNA, 24 bp, Artificial Sequence
  Synthetic
gaccaaggauactgaccccaauag

SEQ ID NO: 53838 - DNA, 27 bp, Artificial Sequence
  Synthetic
cttggcatgauggtctatgtatucaac

SEQ ID NO: 53839 - DNA, 27 bp, Artificial Sequence
  Synthetic
aagtgaggcacucagaattuaacagaa

SEQ ID NO: 53840 - DNA, 21 bp, Artificial Sequence
  Synthetic
ctcccagacagutctcgtuca

SEQ ID NO: 53841 - DNA, 26 bp, Artificial Sequence
  Synthetic
gtgtcaccuacaaagactgttttucc

SEQ ID NO: 53842 - DNA, 28 bp, Artificial Sequence
  Synthetic
taaacaccatctauggccaaatcttuag

SEQ ID NO: 53843 - DNA, 26 bp, Artificial Sequence
  Synthetic
caagaggcauaacatagagcagucaa

SEQ ID NO: 53844 - DNA, 28 bp, Artificial Sequence
  Synthetic
agtctgtttaacaaautcctcacctgut

SEQ ID NO: 53845 - DNA, 25 bp, Artificial Sequence
  Synthetic
ttctggaacacutcagtctgaaugg

SEQ ID NO: 53846 - DNA, 23 bp, Artificial Sequence
  Synthetic
gggaagagguttgtccattuacc

SEQ ID NO: 53847 - DNA, 26 bp, Artificial Sequence
  Synthetic
gactttctcagcugttgcttttucaa

SEQ ID NO: 53848 - DNA, 28 bp, Artificial Sequence
  Synthetic
gtaatcatuttagaaaagcucgagcaca

SEQ ID NO: 53849 - DNA, 25 bp, Artificial Sequence
  Synthetic
gggcctcgtugatttttctttcaut

SEQ ID NO: 53850 - DNA, 23 bp, Artificial Sequence
  Synthetic
gaagccacagagautacagggut

SEQ ID NO: 53851 - DNA, 26 bp, Artificial Sequence
  Synthetic
gtgagatgacuctgacttcattguct

SEQ ID NO: 53852 - DNA, 25 bp, Artificial Sequence
  Synthetic
tttgctuccaagaatgugagaggat

SEQ ID NO: 53853 - DNA, 25 bp, Artificial Sequence
  Synthetic
tgtcataactcaaugcaaactgcug

SEQ ID NO: 53854 - DNA, 28 bp, Artificial Sequence
  Synthetic
ccagtttaagtgutagttcttggtgugt

SEQ ID NO: 53855 - DNA, 28 bp, Artificial Sequence
  Synthetic
gcttgtctucaaactgttgttaauccaa

SEQ ID NO: 53856 - DNA, 25 bp, Artificial Sequence
  Synthetic
tgttggcauggttataaaccucagt

SEQ ID NO: 53857 - DNA, 28 bp, Artificial Sequence
  Synthetic
ggtcgaagtaaugccaatgtcttttcua

SEQ ID NO: 53858 - DNA, 25 bp, Artificial Sequence
  Synthetic
ttgtctgcccagutagaatgatcug

SEQ ID NO: 53859 - DNA, 19 bp, Artificial Sequence
  Synthetic
ccaaaggugccggtcguag

SEQ ID NO: 53860 - DNA, 21 bp, Artificial Sequence
  Synthetic
gcagggcugaugaggaaaact

SEQ ID NO: 53861 - DNA, 21 bp, Artificial Sequence
  Synthetic
tccucaaggtugggacaacac

SEQ ID NO: 53862 - DNA, 18 bp, Artificial Sequence
  Synthetic
ggctctcuaggccgugga

SEQ ID NO: 53863 - DNA, 17 bp, Artificial Sequence
  Synthetic
ccucccaccccgtgcua

SEQ ID NO: 53864 - DNA, 25 bp, Artificial Sequence
  Synthetic
ccagcucactgctaattuacaacaa

SEQ ID NO: 53865 - DNA, 33 bp, Artificial Sequence
  Synthetic
gcattagtaatactuacttgctgaaattgaauc

SEQ ID NO: 53866 - DNA, 21 bp, Artificial Sequence
  Synthetic
gggacagucgaagaactucag

SEQ ID NO: 53867 - DNA, 24 bp, Artificial Sequence
  Synthetic
catttctcccutatgccgtgttut

SEQ ID NO: 53868 - DNA, 28 bp, Artificial Sequence
  Synthetic
cagtcatgtgauactcaagtaagctcut

SEQ ID NO: 53869 - DNA, 28 bp, Artificial Sequence
  Synthetic
agatggtaagtgauccaaaatcaacugt

SEQ ID NO: 53870 - DNA, 25 bp, Artificial Sequence
  Synthetic
cagagaacaatguaccctggaagut

SEQ ID NO: 53871 - DNA, 32 bp, Artificial Sequence
  Synthetic
aaggcattatccucatatttattatgctuact

SEQ ID NO: 53872 - DNA, 27 bp, Artificial Sequence
  Synthetic
tctttgttuagcttgaacaugcgaaag

SEQ ID NO: 53873 - DNA, 27 bp, Artificial Sequence
  Synthetic
tctacccttagtugtcaatggcaaaut

SEQ ID NO: 53874 - DNA, 28 bp, Artificial Sequence
  Synthetic
gggtcagatataucagcattaacctuga

SEQ ID NO: 53875 - DNA, 29 bp, Artificial Sequence
  Synthetic
tctgtagttcuagcagcttcttttcttut

SEQ ID NO: 53876 - DNA, 28 bp, Artificial Sequence
  Synthetic
ctgtcattcagacaacuactgagctaut

SEQ ID NO: 53877 - DNA, 28 bp, Artificial Sequence
  Synthetic
ctcttcttgaaguttttcagcctttuct

SEQ ID NO: 53878 - DNA, 25 bp, Artificial Sequence
  Synthetic
gggtcagggaauttatctuacacac

SEQ ID NO: 53879 - DNA, 28 bp, Artificial Sequence
  Synthetic
tctctcttcagaaaugatcccaccauat

SEQ ID NO: 53880 - DNA, 25 bp, Artificial Sequence
  Synthetic
gtcgaaactuagagcttcagguact

SEQ ID NO: 53881 - DNA, 24 bp, Artificial Sequence
  Synthetic
cgactgtgttuttcctctagcugt

SEQ ID NO: 53882 - DNA, 27 bp, Artificial Sequence
  Synthetic
ggcattgttcaautcttcaagtccaut

SEQ ID NO: 53883 - DNA, 24 bp, Artificial Sequence
  Synthetic
gcccagcttuactgtgacataugg

SEQ ID NO: 53884 - DNA, 20 bp, Artificial Sequence
  Synthetic
gcaggagguttcggcuaagt

SEQ ID NO: 53885 - DNA, 21 bp, Artificial Sequence
  Synthetic
tcucccccaaacaagcugaag

SEQ ID NO: 53886 - DNA, 27 bp, Artificial Sequence
  Synthetic
ctccccttttguaaaaaccaagatucc

SEQ ID NO: 53887 - DNA, 28 bp, Artificial Sequence
  Synthetic
gcctatgatguttgtgctatcuaccaat

SEQ ID NO: 53888 - DNA, 21 bp, Artificial Sequence
  Synthetic
gggttgggugaagtgtttugg

SEQ ID NO: 53889 - DNA, 28 bp, Artificial Sequence
  Synthetic
cccctttcuaggaagtaagtgauagaca

SEQ ID NO: 53890 - DNA, 23 bp, Artificial Sequence
  Synthetic
gccatggatguctctcactguaa

SEQ ID NO: 53891 - DNA, 28 bp, Artificial Sequence
  Synthetic
cttcagagtagcaucaacttcatagucc

SEQ ID NO: 53892 - DNA, 26 bp, Artificial Sequence
  Synthetic
tgactucctggtcatuagagcaaaag

SEQ ID NO: 53893 - DNA, 27 bp, Artificial Sequence
  Synthetic
caagcatugagaaaaacggtgaattut

SEQ ID NO: 53894 - DNA, 18 bp, Artificial Sequence
  Synthetic
gctgcagcuacatggugt

SEQ ID NO: 53895 - DNA, 19 bp, Artificial Sequence
  Synthetic
cccgcuccgcttctctcua

SEQ ID NO: 53896 - DNA, 23 bp, Artificial Sequence
  Synthetic
tcttgctgauttcactgcuggat

SEQ ID NO: 53897 - DNA, 28 bp, Artificial Sequence
  Synthetic
ttgtttgucaaccaaataatgcugaact

SEQ ID NO: 53898 - DNA, 24 bp, Artificial Sequence
  Synthetic
acgtttgcccaaaautgttctgut

SEQ ID NO: 53899 - DNA, 26 bp, Artificial Sequence
  Synthetic
aaaggaactgucagctaatgtgauga

SEQ ID NO: 53900 - DNA, 22 bp, Artificial Sequence
  Synthetic
ttgctgcuaacagcagagcuaa

SEQ ID NO: 53901 - DNA, 28 bp, Artificial Sequence
  Synthetic
ctcagacuaacaccaggtggtttauaat

SEQ ID NO: 53902 - DNA, 24 bp, Artificial Sequence
  Synthetic
gggaatuggaagcaaatgacauca

SEQ ID NO: 53903 - DNA, 20 bp, Artificial Sequence
  Synthetic
tctttccgaagcucggtugg

SEQ ID NO: 53904 - DNA, 27 bp, Artificial Sequence
  Synthetic
aaaataaaaccacaauggtggcaugaa

SEQ ID NO: 53905 - DNA, 28 bp, Artificial Sequence
  Synthetic
ctgccagaaaaautacuaagcaccaaat

SEQ ID NO: 53906 - DNA, 28 bp, Artificial Sequence
  Synthetic
gaagaactcuaaaacaagcatttgcuga

SEQ ID NO: 53907 - DNA, 26 bp, Artificial Sequence
  Synthetic
gttgcaattugcaggaactaucacat

SEQ ID NO: 53908 - DNA, 21 bp, Artificial Sequence
  Synthetic
gctcagccaugttctgccuaa

SEQ ID NO: 53909 - DNA, 22 bp, Artificial Sequence
  Synthetic
ggagagaugagguggcagaaga

SEQ ID NO: 53910 - DNA, 23 bp, Artificial Sequence
  Synthetic
aactttggcautgagccagttut

SEQ ID NO: 53911 - DNA, 20 bp, Artificial Sequence
  Synthetic
gggcgcuaaggtgaggaaug

SEQ ID NO: 53912 - DNA, 28 bp, Artificial Sequence
  Synthetic
acgatacgtccuatgtaattgagaguga

SEQ ID NO: 53913 - DNA, 33 bp, Artificial Sequence
  Synthetic
tgttacataattaguagcaatttcattgtggua

SEQ ID NO: 53914 - DNA, 27 bp, Artificial Sequence
  Synthetic
ccagggactuaagttaacgaacaaaut

SEQ ID NO: 53915 - DNA, 29 bp, Artificial Sequence
  Synthetic
ccagctctaccaauctcctgataatauga

SEQ ID NO: 53916 - DNA, 23 bp, Artificial Sequence
  Synthetic
ttcgaaaacugtatctucgggca

SEQ ID NO: 53917 - DNA, 23 bp, Artificial Sequence
  Synthetic
ctggccgaautttatgctttgut

SEQ ID NO: 53918 - DNA, 26 bp, Artificial Sequence
  Synthetic
caataaaatggatgutcccccagcua

SEQ ID NO: 53919 - DNA, 28 bp, Artificial Sequence
  Synthetic
gacagtggaagcuatggtcatattauca

SEQ ID NO: 53920 - DNA, 25 bp, Artificial Sequence
  Synthetic
acagtctauggccatcacatacuct

SEQ ID NO: 53921 - DNA, 26 bp, Artificial Sequence
  Synthetic
gaggaaatugatcccaagucagaact

SEQ ID NO: 53922 - DNA, 20 bp, Artificial Sequence
  Synthetic
gcgaggccaaaguctgcuat

SEQ ID NO: 53923 - DNA, 26 bp, Artificial Sequence
  Synthetic
agttctatgagacaagucggctagut

SEQ ID NO: 53924 - DNA, 24 bp, Artificial Sequence
  Synthetic
gccagaaaauaaggcccaaagcua

SEQ ID NO: 53925 - DNA, 27 bp, Artificial Sequence
  Synthetic
gtctacaagaugaagagtgguaccaag

SEQ ID NO: 53926 - DNA, 24 bp, Artificial Sequence
  Synthetic
cctcccctgutcccattactcuaa

SEQ ID NO: 53927 - DNA, 22 bp, Artificial Sequence
  Synthetic
ggacauccccagaaaagaugga

SEQ ID NO: 53928 - DNA, 21 bp, Artificial Sequence
  Synthetic
cccatgucacccaugaaagca

SEQ ID NO: 53929 - DNA, 21 bp, Artificial Sequence
  Synthetic
gtgccgaggacaugcctauaa

SEQ ID NO: 53930 - DNA, 23 bp, Artificial Sequence
  Synthetic
cccuaagatucccaaagagccaa

SEQ ID NO: 53931 - DNA, 22 bp, Artificial Sequence
  Synthetic
cctcccaccccucatttcauag

SEQ ID NO: 53932 - DNA, 28 bp, Artificial Sequence
  Synthetic
atttatttaaatcuggtccagcctguga

SEQ ID NO: 53933 - DNA, 28 bp, Artificial Sequence
  Synthetic
agaccacaccacuatgctatttucaaat

SEQ ID NO: 53934 - DNA, 21 bp, Artificial Sequence
  Synthetic
cccttucctcctguccacaat

SEQ ID NO: 53935 - DNA, 22 bp, Artificial Sequence
  Synthetic
cagtcttauccaggctctccuc

SEQ ID NO: 53936 - DNA, 29 bp, Artificial Sequence
  Synthetic
gacataacttcucattgaatgctcucaga

SEQ ID NO: 53937 - DNA, 27 bp, Artificial Sequence
  Synthetic
ggtttccttcuaaagtgttttggcuat

SEQ ID NO: 53938 - DNA, 28 bp, Artificial Sequence
  Synthetic
gcccaaattccuaaagatgaatgcatug

SEQ ID NO: 53939 - DNA, 24 bp, Artificial Sequence
  Synthetic
ccacuggcagcaaagttcttatut

SEQ ID NO: 53940 - DNA, 21 bp, Artificial Sequence
  Synthetic
gggcttcuctgtcaactuccc

SEQ ID NO: 53941 - DNA, 28 bp, Artificial Sequence
  Synthetic
gcttcattaggcuctactctccttttua

SEQ ID NO: 53942 - DNA, 20 bp, Artificial Sequence
  Synthetic
cctgcacaccugcacauact

SEQ ID NO: 53943 - DNA, 24 bp, Artificial Sequence
  Synthetic
cccaatcaucccgtcatttcacua

SEQ ID NO: 53944 - DNA, 20 bp, Artificial Sequence
  Synthetic
tcaggtcgugggtctgagut

SEQ ID NO: 53945 - DNA, 22 bp, Artificial Sequence
  Synthetic
catcaacauggaggacagguct

SEQ ID NO: 53946 - DNA, 24 bp, Artificial Sequence
  Synthetic
cgatctctatutctgctccgugat

SEQ ID NO: 53947 - DNA, 29 bp, Artificial Sequence
  Synthetic
tcauagaaagcatcaugggaagaaaagaa

SEQ ID NO: 53948 - DNA, 23 bp, Artificial Sequence
  Synthetic
atgaagtccaugccaccattcut

SEQ ID NO: 53949 - DNA, 28 bp, Artificial Sequence
  Synthetic
gcttaatucagcaagactgtugaaaaca

SEQ ID NO: 53950 - DNA, 20 bp, Artificial Sequence
  Synthetic
agcaugggcaaccaactgua

SEQ ID NO: 53951 - DNA, 28 bp, Artificial Sequence
  Synthetic
gctatacttgccaaugaaaatggttuct

SEQ ID NO: 53952 - DNA, 26 bp, Artificial Sequence
  Synthetic
tctgacaaaaacagccautagacuga

SEQ ID NO: 53953 - DNA, 24 bp, Artificial Sequence
  Synthetic
catgccauaacaaaactggcucat

SEQ ID NO: 53954 - DNA, 27 bp, Artificial Sequence
  Synthetic
gaagcatttgguaatcatgtttugggt

SEQ ID NO: 53955 - DNA, 22 bp, Artificial Sequence
  Synthetic
gcttgtcugcaaggtctucaaa

SEQ ID NO: 53956 - DNA, 23 bp, Artificial Sequence
  Synthetic
ccttctttgaggcugtgcttcut

SEQ ID NO: 53957 - DNA, 23 bp, Artificial Sequence
  Synthetic
tggagatctgugaagttgtgugg

SEQ ID NO: 53958 - DNA, 20 bp, Artificial Sequence
  Synthetic
gcutgttugcagagagccat

SEQ ID NO: 53959 - DNA, 20 bp, Artificial Sequence
  Synthetic
agcccaauctgctggauacc

SEQ ID NO: 53960 - DNA, 22 bp, Artificial Sequence
  Synthetic
ccgaactcuggagtttccugat

SEQ ID NO: 53961 - DNA, 24 bp, Artificial Sequence
  Synthetic
cagagaautcccuaaaaccagcca

SEQ ID NO: 53962 - DNA, 17 bp, Artificial Sequence
  Synthetic
cgcuccgagccgactut

SEQ ID NO: 53963 - DNA, 18 bp, Artificial Sequence
  Synthetic
gcgctcucgctacctgug

SEQ ID NO: 53964 - DNA, 23 bp, Artificial Sequence
  Synthetic
cagttgcuatgctgtucagcaaa

SEQ ID NO: 53965 - DNA, 20 bp, Artificial Sequence
  Synthetic
cttuaaaccgcaccgugcat

SEQ ID NO: 53966 - DNA, 28 bp, Artificial Sequence
  Synthetic
acttctaatccacuaggtgcaaaatcug

SEQ ID NO: 53967 - DNA, 28 bp, Artificial Sequence
  Synthetic
aaggcaagaacaucgggagaatattuat

SEQ ID NO: 53968 - DNA, 28 bp, Artificial Sequence
  Synthetic
gccgttgatatuactgtggatacuagga

SEQ ID NO: 53969 - DNA, 28 bp, Artificial Sequence
  Synthetic
gttttggattucacaggcaatgtaauca

SEQ ID NO: 53970 - DNA, 28 bp, Artificial Sequence
  Synthetic
ccauatttgttacttcugaagggcacat

SEQ ID NO: 53971 - DNA, 24 bp, Artificial Sequence
  Synthetic
cctgccgagaaaautaagtccuct

SEQ ID NO: 53972 - DNA, 19 bp, Artificial Sequence
  Synthetic
cgggtaaugcggccugaat

SEQ ID NO: 53973 - DNA, 28 bp, Artificial Sequence
  Synthetic
accccattatuaaaaggtggcttatuga

SEQ ID NO: 53974 - DNA, 22 bp, Artificial Sequence
  Synthetic
ggtgctgtucaggaaaagcaut

SEQ ID NO: 53975 - DNA, 24 bp, Artificial Sequence
  Synthetic
cgcggttuaagagcatgatcttug

SEQ ID NO: 53976 - DNA, 20 bp, Artificial Sequence
  Synthetic
tctgctctcucccttggcua

SEQ ID NO: 53977 - DNA, 21 bp, Artificial Sequence
  Synthetic
ctguccccaggagagaatugg

SEQ ID NO: 53978 - DNA, 20 bp, Artificial Sequence
  Synthetic
cagcctguacgagaacguca

SEQ ID NO: 53979 - DNA, 22 bp, Artificial Sequence
  Synthetic
cccctucctgaagaguccaaaa

SEQ ID NO: 53980 - DNA, 21 bp, Artificial Sequence
  Synthetic
cacccatctuaccctgtccut

SEQ ID NO: 53981 - DNA, 25 bp, Artificial Sequence
  Synthetic
ggctgguaggaatgagatgauagag

SEQ ID NO: 53982 - DNA, 21 bp, Artificial Sequence
  Synthetic
tgcacaacauctgtcgctcut

SEQ ID NO: 53983 - DNA, 19 bp, Artificial Sequence
  Synthetic
gggctgtuctcgctgaugg

SEQ ID NO: 53984 - DNA, 23 bp, Artificial Sequence
  Synthetic
ggccaagaagcugggttcttuaa

SEQ ID NO: 53985 - DNA, 20 bp, Artificial Sequence
  Synthetic
ggccccucacgaatgatcug

SEQ ID NO: 53986 - DNA, 20 bp, Artificial Sequence
  Synthetic
ccacaucgcaccacagaaug

SEQ ID NO: 53987 - DNA, 23 bp, Artificial Sequence
  Synthetic
gcgagaagaucttgccgauaagg

SEQ ID NO: 53988 - DNA, 22 bp, Artificial Sequence
  Synthetic
cccagcugaaagtgaggatguc

SEQ ID NO: 53989 - DNA, 26 bp, Artificial Sequence
  Synthetic
cctgctcaatuctctgcatatcugaa

SEQ ID NO: 53990 - DNA, 27 bp, Artificial Sequence
  Synthetic
ttcgctacaugactaatggcuacaaat

SEQ ID NO: 53991 - DNA, 27 bp, Artificial Sequence
  Synthetic
caattaagcaaagautgatgtgcccut

SEQ ID NO: 53992 - DNA, 28 bp, Artificial Sequence
  Synthetic
acaattgcaaagaacaaaauggtcauct

SEQ ID NO: 53993 - DNA, 27 bp, Artificial Sequence
  Synthetic
ccaaggagtcuagtgatctacaugact

SEQ ID NO: 53994 - DNA, 21 bp, Artificial Sequence
  Synthetic
ctcucccccttatcucccaca

SEQ ID NO: 53995 - DNA, 23 bp, Artificial Sequence
  Synthetic
tgacttaucacgcccaattguct

SEQ ID NO: 53996 - DNA, 24 bp, Artificial Sequence
  Synthetic
caagagugtggcuacagaagagag

SEQ ID NO: 53997 - DNA, 28 bp, Artificial Sequence
  Synthetic
tggtcaaatactcutcgatcatcaggua

SEQ ID NO: 53998 - DNA, 21 bp, Artificial Sequence
  Synthetic
gaggccaugaagagcagugaa

SEQ ID NO: 53999 - DNA, 27 bp, Artificial Sequence
  Synthetic
gcttcuggttatagaguggaagacaag

SEQ ID NO: 54000 - DNA, 25 bp, Artificial Sequence
  Synthetic
ggtacccaagugttgatauccacat

SEQ ID NO: 54001 - DNA, 28 bp, Artificial Sequence
  Synthetic
ttcacaaacagucaaacaucaacagaag

SEQ ID NO: 54002 - DNA, 19 bp, Artificial Sequence
  Synthetic
ctccaccugtcccauccac

SEQ ID NO: 54003 - DNA, 20 bp, Artificial Sequence
  Synthetic
ggaccaggcggugtucaaat

SEQ ID NO: 54004 - DNA, 21 bp, Artificial Sequence
  Synthetic
cctatgcccuctcctctccug

SEQ ID NO: 54005 - DNA, 19 bp, Artificial Sequence
  Synthetic
aggcacccccauctgagua

SEQ ID NO: 54006 - DNA, 21 bp, Artificial Sequence
  Synthetic
cttcuccagcacctttgucca

SEQ ID NO: 54007 - DNA, 22 bp, Artificial Sequence
  Synthetic
gctgcttttgutcccacgttuc

SEQ ID NO: 54008 - DNA, 22 bp, Artificial Sequence
  Synthetic
caaaggagtgcugaggttccua

SEQ ID NO: 54009 - DNA, 19 bp, Artificial Sequence
  Synthetic
cccggautcgaccuccaag

SEQ ID NO: 54010 - DNA, 23 bp, Artificial Sequence
  Synthetic
gggtgaaguttgcactttcuaca

SEQ ID NO: 54011 - DNA, 20 bp, Artificial Sequence
  Synthetic
ggttcucgcccaccatcauc

SEQ ID NO: 54012 - DNA, 20 bp, Artificial Sequence
  Synthetic
ggtggtcutggcaagtugga

SEQ ID NO: 54013 - DNA, 20 bp, Artificial Sequence
  Synthetic
gtcagctgcutgctgatcug

SEQ ID NO: 54014 - DNA, 21 bp, Artificial Sequence
  Synthetic
cactttgggutttggcacgua

SEQ ID NO: 54015 - DNA, 20 bp, Artificial Sequence
  Synthetic
gtacacacccguccagtuga

SEQ ID NO: 54016 - DNA, 29 bp, Artificial Sequence
  Synthetic
ccaagaucaaagtacactguaaaaagcaa

SEQ ID NO: 54017 - DNA, 27 bp, Artificial Sequence
  Synthetic
cugcatcatatttcucaaggaaccaat

SEQ ID NO: 54018 - DNA, 29 bp, Artificial Sequence
  Synthetic
ttttcagtggaggutaacattcaucaaga

SEQ ID NO: 54019 - DNA, 27 bp, Artificial Sequence
  Synthetic
gtccagtctttguggctaaaatgttut

SEQ ID NO: 54020 - DNA, 24 bp, Artificial Sequence
  Synthetic
gaagcacaaguattcugggcaaaa

SEQ ID NO: 54021 - DNA, 33 bp, Artificial Sequence
  Synthetic
ttaaataacagtaaaacacuaatccagccaaua

SEQ ID NO: 54022 - DNA, 24 bp, Artificial Sequence
  Synthetic
tgaagtctucatggatgttugcca

SEQ ID NO: 54023 - DNA, 24 bp, Artificial Sequence
  Synthetic
aagtagctacacugcgcgtauaag

SEQ ID NO: 54024 - DNA, 24 bp, Artificial Sequence
  Synthetic
gggacaagautcttgatacugcac

SEQ ID NO: 54025 - DNA, 24 bp, Artificial Sequence
  Synthetic
gggcaccacacuctcctatcttua

SEQ ID NO: 54026 - DNA, 21 bp, Artificial Sequence
  Synthetic
aggcctgaugtcctaggaugt

SEQ ID NO: 54027 - DNA, 23 bp, Artificial Sequence
  Synthetic
agaaatcttcccugccaccttuc

SEQ ID NO: 54028 - DNA, 24 bp, Artificial Sequence
  Synthetic
tcctaggaacgaguggaatatcuc

SEQ ID NO: 54029 - DNA, 26 bp, Artificial Sequence
  Synthetic
cgcaacacuggtaagauaaagggaaa

SEQ ID NO: 54030 - DNA, 21 bp, Artificial Sequence
  Synthetic
ctgccuctttgctguaaccca

SEQ ID NO: 54031 - DNA, 24 bp, Artificial Sequence
  Synthetic
gcgttguggagaggacauagaaac

SEQ ID NO: 54032 - DNA, 20 bp, Artificial Sequence
  Synthetic
ttgactgcutcgtcgtgugt

SEQ ID NO: 54033 - DNA, 21 bp, Artificial Sequence
  Synthetic
ccttgcccuctggaagaacut

SEQ ID NO: 54034 - DNA, 28 bp, Artificial Sequence
  Synthetic
ttgttttgtccttucttgttggttctuc

SEQ ID NO: 54035 - DNA, 20 bp, Artificial Sequence
  Synthetic
gtuagggacagacgccaugt

SEQ ID NO: 54036 - DNA, 20 bp, Artificial Sequence
  Synthetic
acgccatgugcgtcttcuaa

SEQ ID NO: 54037 - DNA, 22 bp, Artificial Sequence
  Synthetic
accagtgaaagggugctgaaug

SEQ ID NO: 54038 - DNA, 22 bp, Artificial Sequence
  Synthetic
gcctaaacatucacctcgguca

SEQ ID NO: 54039 - DNA, 18 bp, Artificial Sequence
  Synthetic
tccccgcaucctggcuat

SEQ ID NO: 54040 - DNA, 20 bp, Artificial Sequence
  Synthetic
cctgcuccaccgaggtctua

SEQ ID NO: 54041 - DNA, 22 bp, Artificial Sequence
  Synthetic
cautccccaaacugccaaacag

SEQ ID NO: 54042 - DNA, 24 bp, Artificial Sequence
  Synthetic
tctgatgcuggcctcatatgttug

SEQ ID NO: 54043 - DNA, 23 bp, Artificial Sequence
  Synthetic
tucttcauaacgaggaacagcgt

SEQ ID NO: 54044 - DNA, 24 bp, Artificial Sequence
  Synthetic
ggagccaucgcctatgaaatctuc

SEQ ID NO: 54045 - DNA, 23 bp, Artificial Sequence
  Synthetic
gagaacagagguttcuacccaca

SEQ ID NO: 54046 - DNA, 21 bp, Artificial Sequence
  Synthetic
cccgauctgtggauaaagcca

SEQ ID NO: 54047 - DNA, 22 bp, Artificial Sequence
  Synthetic
ctcacgtcaaugtccctgaugt

SEQ ID NO: 54048 - DNA, 20 bp, Artificial Sequence
  Synthetic
ggacugagaggcctcacuga

SEQ ID NO: 54049 - DNA, 22 bp, Artificial Sequence
  Synthetic
cacttgtccucaaagggcatug

SEQ ID NO: 54050 - DNA, 22 bp, Artificial Sequence
  Synthetic
aatggcaacaucatgccaacug

SEQ ID NO: 54051 - DNA, 22 bp, Artificial Sequence
  Synthetic
cccaatccugaccccttttcut

SEQ ID NO: 54052 - DNA, 22 bp, Artificial Sequence
  Synthetic
gccauagacagcagcaucaagg

SEQ ID NO: 54053 - DNA, 24 bp, Artificial Sequence
  Synthetic
cattggauaaaaggcactgctcut

SEQ ID NO: 54054 - DNA, 28 bp, Artificial Sequence
  Synthetic
gctatttcatcaugggatagttggcuaa

SEQ ID NO: 54055 - DNA, 23 bp, Artificial Sequence
  Synthetic
tgttgttgaaacucctgcagugt

SEQ ID NO: 54056 - DNA, 23 bp, Artificial Sequence
  Synthetic
agaaatcatuggcagctuccaga

SEQ ID NO: 54057 - DNA, 27 bp, Artificial Sequence
  Synthetic
ggctctactguaagtacttttccctut

SEQ ID NO: 54058 - DNA, 27 bp, Artificial Sequence
  Synthetic
ttcagagttctuacatcagctccatug

SEQ ID NO: 54059 - DNA, 28 bp, Artificial Sequence
  Synthetic
atgaaggatgacutataaccctgatgug

SEQ ID NO: 54060 - DNA, 28 bp, Artificial Sequence
  Synthetic
gcatgaaaacauaccctattgucaccaa

SEQ ID NO: 54061 - DNA, 28 bp, Artificial Sequence
  Synthetic
gtgctctuccaggagaatattacugaat

SEQ ID NO: 54062 - DNA, 28 bp, Artificial Sequence
  Synthetic
tgtttctgtaataucagtttctgcuggt

SEQ ID NO: 54063 - DNA, 21 bp, Artificial Sequence
  Synthetic
gacggcagggautctgatcut

SEQ ID NO: 54064 - DNA, 23 bp, Artificial Sequence
  Synthetic
cauaaggaaccacaggaugacga

SEQ ID NO: 54065 - DNA, 28 bp, Artificial Sequence
  Synthetic
gccactaacacaautgcctgatatttut

SEQ ID NO: 54066 - DNA, 26 bp, Artificial Sequence
  Synthetic
ttgaaaagtctuctgggaaagtucca

SEQ ID NO: 54067 - DNA, 25 bp, Artificial Sequence
  Synthetic
agaaaccttaauggaggaccccuat

SEQ ID NO: 54068 - DNA, 22 bp, Artificial Sequence
  Synthetic
caccttgugctgtctgtauggt

SEQ ID NO: 54069 - DNA, 22 bp, Artificial Sequence
  Synthetic
ctggaggacuggattgaggaug

SEQ ID NO: 54070 - DNA, 28 bp, Artificial Sequence
  Synthetic
tcagaagtaataacauccctgctaguca

SEQ ID NO: 54071 - DNA, 22 bp, Artificial Sequence
  Synthetic
ggagctgguggagtttgugaag

SEQ ID NO: 54072 - DNA, 27 bp, Artificial Sequence
  Synthetic
acctactaaaaguctaccaccagctua

SEQ ID NO: 54073 - DNA, 22 bp, Artificial Sequence
  Synthetic
caggaatgucccaagccttuga

SEQ ID NO: 54074 - DNA, 22 bp, Artificial Sequence
  Synthetic
cgtccctccutccccatactua

SEQ ID NO: 54075 - DNA, 21 bp, Artificial Sequence
  Synthetic
cagaagctccuggtactcguc

SEQ ID NO: 54076 - DNA, 21 bp, Artificial Sequence
  Synthetic
ctcagtcccuaagcccatcug

SEQ ID NO: 54077 - DNA, 25 bp, Artificial Sequence
  Synthetic
ctccctattggutctcctccagtua

SEQ ID NO: 54078 - DNA, 22 bp, Artificial Sequence
  Synthetic
ggaagtugggaagggatctgug

SEQ ID NO: 54079 - DNA, 21 bp, Artificial Sequence
  Synthetic
ccacuggaaggccatttgaug

SEQ ID NO: 54080 - DNA, 25 bp, Artificial Sequence
  Synthetic
cagactugggatgatacucaaagca

SEQ ID NO: 54081 - DNA, 23 bp, Artificial Sequence
  Synthetic
actcctaaaugacgctggcttut

SEQ ID NO: 54082 - DNA, 23 bp, Artificial Sequence
  Synthetic
ctcatcactcugatcctgcacua

SEQ ID NO: 54083 - DNA, 28 bp, Artificial Sequence
  Synthetic
tgccacttttuacttaagactgauagca

SEQ ID NO: 54084 - DNA, 25 bp, Artificial Sequence
  Synthetic
aataagggaggcucatttcttugct

SEQ ID NO: 54085 - DNA, 26 bp, Artificial Sequence
  Synthetic
gcatcgttaagcuatgaagtgaguga

SEQ ID NO: 54086 - DNA, 21 bp, Artificial Sequence
  Synthetic
agctgtgcugtgtacaguagg

SEQ ID NO: 54087 - DNA, 28 bp, Artificial Sequence
  Synthetic
tgagataggacuatagtggaggagugaa

SEQ ID NO: 54088 - DNA, 25 bp, Artificial Sequence
  Synthetic
ggaaatggguctacagagatgtugt

SEQ ID NO: 54089 - DNA, 28 bp, Artificial Sequence
  Synthetic
cttctggugaaaggcctaacataucaat

SEQ ID NO: 54090 - DNA, 22 bp, Artificial Sequence
  Synthetic
tgaaatcuggcttgctcugaca

SEQ ID NO: 54091 - DNA, 22 bp, Artificial Sequence
  Synthetic
ccccatcucttcaagagtucgt

SEQ ID NO: 54092 - DNA, 22 bp, Artificial Sequence
  Synthetic
actgacugcaaacacgtgtgua

SEQ ID NO: 54093 - DNA, 25 bp, Artificial Sequence
  Synthetic
tctgatgggaugagtgatuacagaa

SEQ ID NO: 54094 - DNA, 21 bp, Artificial Sequence
  Synthetic
agatgatgcugctgactgcuc

SEQ ID NO: 54095 - DNA, 28 bp, Artificial Sequence
  Synthetic
tgacacctgugaaagaaattgttccuat

SEQ ID NO: 54096 - DNA, 20 bp, Artificial Sequence
  Synthetic
cgaaggcutccacagucgat

SEQ ID NO: 54097 - DNA, 28 bp, Artificial Sequence
  Synthetic
caaccaagaagcugttttuacaagagaa

SEQ ID NO: 54098 - DNA, 22 bp, Artificial Sequence
  Synthetic
tctctttcaccuccccauccaa

SEQ ID NO: 54099 - DNA, 21 bp, Artificial Sequence
  Synthetic
ctcatgtcuccagcagugacc

SEQ ID NO: 54100 - DNA, 26 bp, Artificial Sequence
  Synthetic
cacaucaatcgataugcaagaaagga

SEQ ID NO: 54101 - DNA, 25 bp, Artificial Sequence
  Synthetic
actcaaacuggaaaacatugggact

SEQ ID NO: 54102 - DNA, 23 bp, Artificial Sequence
  Synthetic
ggaaaatgcaaaugtcgtgguga

SEQ ID NO: 54103 - DNA, 27 bp, Artificial Sequence
  Synthetic
atcactcgugagggtgtgtatatuaga

SEQ ID NO: 54104 - DNA, 21 bp, Artificial Sequence
  Synthetic
gugctgccucagaagaagaac

SEQ ID NO: 54105 - DNA, 24 bp, Artificial Sequence
  Synthetic
gccatacgugtcttggtuagcaaa

SEQ ID NO: 54106 - DNA, 28 bp, Artificial Sequence
  Synthetic
aagtgaaggcaguctatttuagagcaaa

SEQ ID NO: 54107 - DNA, 22 bp, Artificial Sequence
  Synthetic
agaaatacgacgaguccggtug

SEQ ID NO: 54108 - DNA, 26 bp, Artificial Sequence
  Synthetic
cagagttgtcaugatgaggaagauga

SEQ ID NO: 54109 - DNA, 26 bp, Artificial Sequence
  Synthetic
ttcagcaaatgtuaggactcaggtut

SEQ ID NO: 54110 - DNA, 26 bp, Artificial Sequence
  Synthetic
ccgtgcgatauaggtaacagaatuga

SEQ ID NO: 54111 - DNA, 26 bp, Artificial Sequence
  Synthetic
gttttggtttutagaggtgatugggt

SEQ ID NO: 54112 - DNA, 30 bp, Artificial Sequence
  Synthetic
acatttctgaaaaggaucttagctcaauct

SEQ ID NO: 54113 - DNA, 27 bp, Artificial Sequence
  Synthetic
cccaattttgtucggacatttctuaca

SEQ ID NO: 54114 - DNA, 28 bp, Artificial Sequence
  Synthetic
actgttttaccttautggtccaaggaut

SEQ ID NO: 54115 - DNA, 23 bp, Artificial Sequence
  Synthetic
tgtgctttttgugttggttgcut

SEQ ID NO: 54116 - DNA, 26 bp, Artificial Sequence
  Synthetic
tacucatgaaaatggucagagaaacc

SEQ ID NO: 54117 - DNA, 26 bp, Artificial Sequence
  Synthetic
gccttgacgauacagctaatucagaa

SEQ ID NO: 54118 - DNA, 23 bp, Artificial Sequence
  Synthetic
cgaaatgacautggacccucagt

SEQ ID NO: 54119 - DNA, 29 bp, Artificial Sequence
  Synthetic
catcagcatattuaggcaacccttttaut

SEQ ID NO: 54120 - DNA, 28 bp, Artificial Sequence
  Synthetic
gaactaagatccuttcccaatgaaaugg

SEQ ID NO: 54121 - DNA, 26 bp, Artificial Sequence
  Synthetic
tgtccatcaaagucacagagaguaga

SEQ ID NO: 54122 - DNA, 24 bp, Artificial Sequence
  Synthetic
gaatgtatuggcgacaaggcatut

SEQ ID NO: 54123 - DNA, 26 bp, Artificial Sequence
  Synthetic
tcatactgucgcaaagctttaaggua

SEQ ID NO: 54124 - DNA, 28 bp, Artificial Sequence
  Synthetic
tgctgataguagaatattgtgctuagcc

SEQ ID NO: 54125 - DNA, 28 bp, Artificial Sequence
  Synthetic
gtctctttttcccaucttcggtatugat

SEQ ID NO: 54126 - DNA, 22 bp, Artificial Sequence
  Synthetic
gggagcuacttcucagaaggga

SEQ ID NO: 54127 - DNA, 23 bp, Artificial Sequence
  Synthetic
ctctcttctcauccgcctacuct

SEQ ID NO: 54128 - DNA, 25 bp, Artificial Sequence
  Synthetic
tttcttatgucatccaacuggccaa

SEQ ID NO: 54129 - DNA, 26 bp, Artificial Sequence
  Synthetic
ggatgttgaguccactacggtttuaa

SEQ ID NO: 54130 - DNA, 33 bp, Artificial Sequence
  Synthetic
tatgatttttaggatuacttgaatcaacaguca

SEQ ID NO: 54131 - DNA, 26 bp, Artificial Sequence
  Synthetic
aggaaauagcagacagacagtaugga

SEQ ID NO: 54132 - DNA, 21 bp, Artificial Sequence
  Synthetic
gctgaacgugagaaggaugga

SEQ ID NO: 54133 - DNA, 23 bp, Artificial Sequence
  Synthetic
cctctcaautctttcctgucgct

SEQ ID NO: 54134 - DNA, 25 bp, Artificial Sequence
  Synthetic
gttactcaatucatgcagcaugcaa

SEQ ID NO: 54135 - DNA, 26 bp, Artificial Sequence
  Synthetic
tctcatgccuagctctctagcaauat

SEQ ID NO: 54136 - DNA, 33 bp, Artificial Sequence
  Synthetic
attataaacucacataggagtuaaacaaagaca

SEQ ID NO: 54137 - DNA, 20 bp, Artificial Sequence
  Synthetic
cccctctgcucatggttcuc

SEQ ID NO: 54138 - DNA, 20 bp, Artificial Sequence
  Synthetic
ctgctguaggaaggcaugct

SEQ ID NO: 54139 - DNA, 25 bp, Artificial Sequence
  Synthetic
catccctauaagaagccctacaugg

SEQ ID NO: 54140 - DNA, 28 bp, Artificial Sequence
  Synthetic
gttcccagggaggutatatucaaaagaa

SEQ ID NO: 54141 - DNA, 26 bp, Artificial Sequence
  Synthetic
tccagaatucgtttccttttauggca

SEQ ID NO: 54142 - DNA, 28 bp, Artificial Sequence
  Synthetic
catgtatggcauatgcaaagugaagaat

SEQ ID NO: 54143 - DNA, 33 bp, Artificial Sequence
  Synthetic
agatcaaatgaatuacctatgttatgttaugga

SEQ ID NO: 54144 - DNA, 26 bp, Artificial Sequence
  Synthetic
tctataacucggtcttcaugcagaga

SEQ ID NO: 54145 - DNA, 25 bp, Artificial Sequence
  Synthetic
ggaatgugaggtattggugacaagg

SEQ ID NO: 54146 - DNA, 26 bp, Artificial Sequence
  Synthetic
gctaaatggcaauggattcaacgtut

SEQ ID NO: 54147 - DNA, 24 bp, Artificial Sequence
  Synthetic
tgcaacttugcatcacgaaaugac

SEQ ID NO: 54148 - DNA, 23 bp, Artificial Sequence
  Synthetic
cccctttgaugatgtcguaagga

SEQ ID NO: 54149 - DNA, 24 bp, Artificial Sequence
  Synthetic
tgtgcagatuggacatgttttgug

SEQ ID NO: 54150 - DNA, 28 bp, Artificial Sequence
  Synthetic
tcaaaacagtaauaaggctttcaccuga

SEQ ID NO: 54151 - DNA, 27 bp, Artificial Sequence
  Synthetic
ccctcgcttugaaagtgttcttctaut

SEQ ID NO: 54152 - DNA, 21 bp, Artificial Sequence
  Synthetic
cttgatgtugcgtggcttcug

SEQ ID NO: 54153 - DNA, 23 bp, Artificial Sequence
  Synthetic
cagattccutttcctgucagggt

SEQ ID NO: 54154 - DNA, 26 bp, Artificial Sequence
  Synthetic
ttgaacatcttcucatacactgccut

SEQ ID NO: 54155 - DNA, 24 bp, Artificial Sequence
  Synthetic
tgctcacttaucctttccctcuca

SEQ ID NO: 54156 - DNA, 20 bp, Artificial Sequence
  Synthetic
gaccaaaagccuggagcuca

SEQ ID NO: 54157 - DNA, 22 bp, Artificial Sequence
  Synthetic
cctcaaccgagutaccgtgtuc

SEQ ID NO: 54158 - DNA, 24 bp, Artificial Sequence
  Synthetic
tctccaggaucttgtagagcucac

SEQ ID NO: 54159 - DNA, 18 bp, Artificial Sequence
  Synthetic
tcgatgcugccgtcgtut

SEQ ID NO: 54160 - DNA, 24 bp, Artificial Sequence
  Synthetic
tgutgaacagtctuaaggcagcat

SEQ ID NO: 54161 - DNA, 19 bp, Artificial Sequence
  Synthetic
cctttgagcutccggguct

SEQ ID NO: 54162 - DNA, 21 bp, Artificial Sequence
  Synthetic
gttaccuggagcccacauaca

SEQ ID NO: 54163 - DNA, 21 bp, Artificial Sequence
  Synthetic
ccaagtcucccctcttcaugg

SEQ ID NO: 54164 - DNA, 25 bp, Artificial Sequence
  Synthetic
gcaccttttcutcttcaaacagugg

SEQ ID NO: 54165 - DNA, 28 bp, Artificial Sequence
  Synthetic
tcagatgccauaactcatttctcttugt

SEQ ID NO: 54166 - DNA, 21 bp, Artificial Sequence
  Synthetic
gcccugcagaagcaaccttua

SEQ ID NO: 54167 - DNA, 28 bp, Artificial Sequence
  Synthetic
tttccccauagatgatcttaguagccat

SEQ ID NO: 54168 - DNA, 20 bp, Artificial Sequence
  Synthetic
gggccgaaaucagtgtccua

SEQ ID NO: 54169 - DNA, 24 bp, Artificial Sequence
  Synthetic
aagcctcaccauaacttatgctut

SEQ ID NO: 54170 - DNA, 26 bp, Artificial Sequence
  Synthetic
tcctttcctugaaggtagctgtauct

SEQ ID NO: 54171 - DNA, 22 bp, Artificial Sequence
  Synthetic
ggaaaatugcggctgatgaugg

SEQ ID NO: 54172 - DNA, 27 bp, Artificial Sequence
  Synthetic
agcattcttuccaggtctttctaaguc

SEQ ID NO: 54173 - DNA, 27 bp, Artificial Sequence
  Synthetic
ttgctgggautatgacatcttuggaat

SEQ ID NO: 54174 - DNA, 22 bp, Artificial Sequence
  Synthetic
agcgtttttgugcagacaaucc

SEQ ID NO: 54175 - DNA, 22 bp, Artificial Sequence
  Synthetic
acagggacagugatgcatgaut

SEQ ID NO: 54176 - DNA, 21 bp, Artificial Sequence
  Synthetic
ctgaagcuaccaccctcacut

SEQ ID NO: 54177 - DNA, 23 bp, Artificial Sequence
  Synthetic
caaaagatggcugatgaggcaut

SEQ ID NO: 54178 - DNA, 21 bp, Artificial Sequence
  Synthetic
ggcaaaaauguccaagcccat

SEQ ID NO: 54179 - DNA, 19 bp, Artificial Sequence
  Synthetic
cgctgcccauttcttguca

SEQ ID NO: 54180 - DNA, 20 bp, Artificial Sequence
  Synthetic
ggtactccuccagcaccuca

SEQ ID NO: 54181 - DNA, 21 bp, Artificial Sequence
  Synthetic
tgcctcaucctgagtccugat

SEQ ID NO: 54182 - DNA, 20 bp, Artificial Sequence
  Synthetic
tgtcccuctggucaggagaa

SEQ ID NO: 54183 - DNA, 20 bp, Artificial Sequence
  Synthetic
ctcacccugctgtaggcauc

SEQ ID NO: 54184 - DNA, 20 bp, Artificial Sequence
  Synthetic
tctgtggaccuctcctucca

SEQ ID NO: 54185 - DNA, 18 bp, Artificial Sequence
  Synthetic
agcacttuccccguccag

SEQ ID NO: 54186 - DNA, 23 bp, Artificial Sequence
  Synthetic
ctcaggttccucagacagguagt

SEQ ID NO: 54187 - DNA, 21 bp, Artificial Sequence
  Synthetic
gaggctccuatggccttucag

SEQ ID NO: 54188 - DNA, 17 bp, Artificial Sequence
  Synthetic
cccugggccacgatcuc

SEQ ID NO: 54189 - DNA, 17 bp, Artificial Sequence
  Synthetic
tgcacugaccucacgca

SEQ ID NO: 54190 - DNA, 20 bp, Artificial Sequence
  Synthetic
gggtgauggccaaagaccua

SEQ ID NO: 54191 - DNA, 17 bp, Artificial Sequence
  Synthetic
caagggcagccucucca

SEQ ID NO: 54192 - DNA, 21 bp, Artificial Sequence
  Synthetic
tcgaagguccacgtgatgtug

SEQ ID NO: 54193 - DNA, 19 bp, Artificial Sequence
  Synthetic
gcugccaaccacacctaug

SEQ ID NO: 54194 - DNA, 21 bp, Artificial Sequence
  Synthetic
ggcagggcagacautcucaaa

SEQ ID NO: 54195 - DNA, 19 bp, Artificial Sequence
  Synthetic
cgtguccaggcacaaccuc

SEQ ID NO: 54196 - DNA, 24 bp, Artificial Sequence
  Synthetic
actttccttaugaggccaggagua

SEQ ID NO: 54197 - DNA, 22 bp, Artificial Sequence
  Synthetic
tggagaauggcaagaaggucac

SEQ ID NO: 54198 - DNA, 26 bp, Artificial Sequence
  Synthetic
gggttactcagugtcatcttgaucag

SEQ ID NO: 54199 - DNA, 28 bp, Artificial Sequence
  Synthetic
caagattgaggcgcucagaaatttatut

SEQ ID NO: 54200 - DNA, 22 bp, Artificial Sequence
  Synthetic
cctcttagucccacacctucct

SEQ ID NO: 54201 - DNA, 21 bp, Artificial Sequence
  Synthetic
gttgaaggacagugctuccga

SEQ ID NO: 54202 - DNA, 24 bp, Artificial Sequence
  Synthetic
cctggccttcutgagaaacttcua

SEQ ID NO: 54203 - DNA, 22 bp, Artificial Sequence
  Synthetic
gtgcagcucaaggatctgauct

SEQ ID NO: 54204 - DNA, 22 bp, Artificial Sequence
  Synthetic
caagagaagcaggugaggugat

SEQ ID NO: 54205 - DNA, 25 bp, Artificial Sequence
  Synthetic
acactcttuaagggcacttactucc

SEQ ID NO: 54206 - DNA, 25 bp, Artificial Sequence
  Synthetic
gggaaaatctgcuccctctacauac

SEQ ID NO: 54207 - DNA, 28 bp, Artificial Sequence
  Synthetic
tcatatgagaucacgttttgactugaat

SEQ ID NO: 54208 - DNA, 22 bp, Artificial Sequence
  Synthetic
gguagaaccaaaggcaacugct

SEQ ID NO: 54209 - DNA, 23 bp, Artificial Sequence
  Synthetic
cattcaccctucccattgcttut

SEQ ID NO: 54210 - DNA, 28 bp, Artificial Sequence
  Synthetic
agcccaagaaauagaatactaggucaga

SEQ ID NO: 54211 - DNA, 21 bp, Artificial Sequence
  Synthetic
atgcgtggcautaccccttua

SEQ ID NO: 54212 - DNA, 21 bp, Artificial Sequence
  Synthetic
gcttcguggcctacagtguat

SEQ ID NO: 54213 - DNA, 21 bp, Artificial Sequence
  Synthetic
gctgaagaagacgucgtugct

SEQ ID NO: 54214 - DNA, 21 bp, Artificial Sequence
  Synthetic
gucgttgtcuacggcaaaagt

SEQ ID NO: 54215 - DNA, 22 bp, Artificial Sequence
  Synthetic
gagguacagaugggaacagagg

SEQ ID NO: 54216 - DNA, 20 bp, Artificial Sequence
  Synthetic
gacagtgagucctgacugct

SEQ ID NO: 54217 - DNA, 26 bp, Artificial Sequence
  Synthetic
agaatgactggutagttgccauacac

SEQ ID NO: 54218 - DNA, 20 bp, Artificial Sequence
  Synthetic
agcaagagcucuaccgcaac

SEQ ID NO: 54219 - DNA, 22 bp, Artificial Sequence
  Synthetic
gctugagggaaggcacauaact

SEQ ID NO: 54220 - DNA, 24 bp, Artificial Sequence
  Synthetic
gggcaatgatucagttcagagtug

SEQ ID NO: 54221 - DNA, 25 bp, Artificial Sequence
  Synthetic
cttctgtccugaaactcttgctuga

SEQ ID NO: 54222 - DNA, 21 bp, Artificial Sequence
  Synthetic
ggagaggacugaggtgctcua

SEQ ID NO: 54223 - DNA, 23 bp, Artificial Sequence
  Synthetic
agccugtcttucaggaacacaat

SEQ ID NO: 54224 - DNA, 23 bp, Artificial Sequence
  Synthetic
ttgtccaguctttgaccaaugct

SEQ ID NO: 54225 - DNA, 27 bp, Artificial Sequence
  Synthetic
catcaactctaaautagccacaagcug

SEQ ID NO: 54226 - DNA, 27 bp, Artificial Sequence
  Synthetic
atgtatgtgtauccatgggtcuagaca

SEQ ID NO: 54227 - DNA, 23 bp, Artificial Sequence
  Synthetic
cctagaccttuctgcagatgcuc

SEQ ID NO: 54228 - DNA, 25 bp, Artificial Sequence
  Synthetic
gtttccauggcaaacaacagaacua

SEQ ID NO: 54229 - DNA, 20 bp, Artificial Sequence
  Synthetic
ctgcctcgguggtacttguc

SEQ ID NO: 54230 - DNA, 18 bp, Artificial Sequence
  Synthetic
gaucccgcagagccugaa

SEQ ID NO: 54231 - DNA, 17 bp, Artificial Sequence
  Synthetic
gctugggcgcatcucca

SEQ ID NO: 54232 - DNA, 22 bp, Artificial Sequence
  Synthetic
cctactacccugaacacugcct

SEQ ID NO: 54233 - DNA, 19 bp, Artificial Sequence
  Synthetic
tgcacacucgggaccttug

SEQ ID NO: 54234 - DNA, 28 bp, Artificial Sequence
  Synthetic
caaccaaaggacacaaugagattagaug

SEQ ID NO: 54235 - DNA, 26 bp, Artificial Sequence
  Synthetic
agcugagagaaaauaaaaccccagag

SEQ ID NO: 54236 - DNA, 25 bp, Artificial Sequence
  Synthetic
tgttgccctugggtttttacauagt

SEQ ID NO: 54237 - DNA, 23 bp, Artificial Sequence
  Synthetic
tgctttacguttggtgcttucag

SEQ ID NO: 54238 - DNA, 28 bp, Artificial Sequence
  Synthetic
gctggttcttcaucagttagatagcaut

SEQ ID NO: 54239 - DNA, 30 bp, Artificial Sequence
  Synthetic
caaaaccataaaaccuttggaagtguaagt

SEQ ID NO: 54240 - DNA, 21 bp, Artificial Sequence
  Synthetic
aacagguggcttgggaucaat

SEQ ID NO: 54241 - DNA, 26 bp, Artificial Sequence
  Synthetic
acatgggacucaaagtttuagcacaa

SEQ ID NO: 54242 - DNA, 28 bp, Artificial Sequence
  Synthetic
ctgttatcattgugccaagatccaaaut

SEQ ID NO: 54243 - DNA, 29 bp, Artificial Sequence
  Synthetic
catcaaccatccutctccagatacattua

SEQ ID NO: 54244 - DNA, 17 bp, Artificial Sequence
  Synthetic
cagagccuctccucgca

SEQ ID NO: 54245 - DNA, 21 bp, Artificial Sequence
  Synthetic
cccatguggcagauggacaaa

SEQ ID NO: 54246 - DNA, 20 bp, Artificial Sequence
  Synthetic
agggtguaactgtccucggt

SEQ ID NO: 54247 - DNA, 21 bp, Artificial Sequence
  Synthetic
gccuaccccattccucacaag

SEQ ID NO: 54248 - DNA, 25 bp, Artificial Sequence
  Synthetic
agtgccatagguttgttagagcuac

SEQ ID NO: 54249 - DNA, 21 bp, Artificial Sequence
  Synthetic
tcttgccgugaaagggaacut

SEQ ID NO: 54250 - DNA, 22 bp, Artificial Sequence
  Synthetic
cagtttgggutgcttgtctgut

SEQ ID NO: 54251 - DNA, 28 bp, Artificial Sequence
  Synthetic
cagugattgaauacaaaaccaccaagac

SEQ ID NO: 54252 - DNA, 23 bp, Artificial Sequence
  Synthetic
gaccaacauaacctgctcccaut

SEQ ID NO: 54253 - DNA, 22 bp, Artificial Sequence
  Synthetic
gccagtgcucagtggactuaac

SEQ ID NO: 54254 - DNA, 19 bp, Artificial Sequence
  Synthetic
tgctctcugggtgctcuca

SEQ ID NO: 54255 - DNA, 19 bp, Artificial Sequence
  Synthetic
tgatccuggtccagcuggt

SEQ ID NO: 54256 - DNA, 20 bp, Artificial Sequence
  Synthetic
actctgggcagagucaccua

SEQ ID NO: 54257 - DNA, 23 bp, Artificial Sequence
  Synthetic
tcagagaugagggtgctaaguct

SEQ ID NO: 54258 - DNA, 19 bp, Artificial Sequence
  Synthetic
tgaggaccagccugacuct

SEQ ID NO: 54259 - DNA, 20 bp, Artificial Sequence
  Synthetic
ccacccuaccagacugagca

SEQ ID NO: 54260 - DNA, 24 bp, Artificial Sequence
  Synthetic
gtcctaagatguccacagcaaguc

SEQ ID NO: 54261 - DNA, 20 bp, Artificial Sequence
  Synthetic
tggcugttggaguggacaac

SEQ ID NO: 54262 - DNA, 23 bp, Artificial Sequence
  Synthetic
cgaagggtauggctggtaaaugt

SEQ ID NO: 54263 - DNA, 25 bp, Artificial Sequence
  Synthetic
tcattttcttcucgctggtctucat

SEQ ID NO: 54264 - DNA, 18 bp, Artificial Sequence
  Synthetic
cctgcgcuggacacagua

SEQ ID NO: 54265 - DNA, 17 bp, Artificial Sequence
  Synthetic
ctgctccuccgctccuc

SEQ ID NO: 54266 - DNA, 20 bp, Artificial Sequence
  Synthetic
cuggccacacccacuaaact

SEQ ID NO: 54267 - DNA, 29 bp, Artificial Sequence
  Synthetic
agcaaggagtcaugcaacgtaatttauat

SEQ ID NO: 54268 - DNA, 21 bp, Artificial Sequence
  Synthetic
cccctucacctccgtcuagaa

SEQ ID NO: 54269 - DNA, 22 bp, Artificial Sequence
  Synthetic
gagttgugacgggagttguagt

SEQ ID NO: 54270 - DNA, 22 bp, Artificial Sequence
  Synthetic
gctcguggcagagatgattuac

SEQ ID NO: 54271 - DNA, 21 bp, Artificial Sequence
  Synthetic
ttcctctcuggcaagtgugac

SEQ ID NO: 54272 - DNA, 26 bp, Artificial Sequence
  Synthetic
ccuatgagtaggatuagggaccagat

SEQ ID NO: 54273 - DNA, 22 bp, Artificial Sequence
  Synthetic
caagacctuttctgtccuccca

SEQ ID NO: 54274 - DNA, 21 bp, Artificial Sequence
  Synthetic
tgugaccaggtguaggaccaa

SEQ ID NO: 54275 - DNA, 19 bp, Artificial Sequence
  Synthetic
agtgcuggtggaacuggac

SEQ ID NO: 54276 - DNA, 24 bp, Artificial Sequence
  Synthetic
gggattctacaucttgtgcatugt

SEQ ID NO: 54277 - DNA, 20 bp, Artificial Sequence
  Synthetic
gatgcuaaagagcgctugcc

SEQ ID NO: 54278 - DNA, 18 bp, Artificial Sequence
  Synthetic
gaggtgtcgucggcagut

SEQ ID NO: 54279 - DNA, 20 bp, Artificial Sequence
  Synthetic
tucttcagtguggccacgat

SEQ ID NO: 54280 - DNA, 17 bp, Artificial Sequence
  Synthetic
gccugacgcccacctut

SEQ ID NO: 54281 - DNA, 18 bp, Artificial Sequence
  Synthetic
aaacccagguccccucct

SEQ ID NO: 54282 - DNA, 21 bp, Artificial Sequence
  Synthetic
caggtgauggaggccttugag

SEQ ID NO: 54283 - DNA, 23 bp, Artificial Sequence
  Synthetic
ctgagcagguctcacttaucgaa

SEQ ID NO: 54284 - DNA, 21 bp, Artificial Sequence
  Synthetic
cttctugagaagcctggcuca

SEQ ID NO: 54285 - DNA, 24 bp, Artificial Sequence
  Synthetic
tgacgaaguatgggcttuggaaat

SEQ ID NO: 54286 - DNA, 19 bp, Artificial Sequence
  Synthetic
ccaaggccaggaucuccaa

SEQ ID NO: 54287 - DNA, 18 bp, Artificial Sequence
  Synthetic
gggagguacctggagugg

SEQ ID NO: 54288 - DNA, 22 bp, Artificial Sequence
  Synthetic
aaacttggccauctgaggttut

SEQ ID NO: 54289 - DNA, 28 bp, Artificial Sequence
  Synthetic
tctcctcttcuaggatttggttaauggt

SEQ ID NO: 54290 - DNA, 18 bp, Artificial Sequence
  Synthetic
ggtctcuggcccaaguca

SEQ ID NO: 54291 - DNA, 22 bp, Artificial Sequence
  Synthetic
gctgctttugaaagtccacucc

SEQ ID NO: 54292 - DNA, 23 bp, Artificial Sequence
  Synthetic
ccctcttuggccttcatctcuac

SEQ ID NO: 54293 - DNA, 22 bp, Artificial Sequence
  Synthetic
tgggtttaatcugccaagggut

SEQ ID NO: 54294 - DNA, 22 bp, Artificial Sequence
  Synthetic
cgtgaggtccutgggattaguc

SEQ ID NO: 54295 - DNA, 23 bp, Artificial Sequence
  Synthetic
cactctctguacctgaccccaua

SEQ ID NO: 54296 - DNA, 20 bp, Artificial Sequence
  Synthetic
cctaccaguctgugcagcaa

SEQ ID NO: 54297 - DNA, 22 bp, Artificial Sequence
  Synthetic
ccttatguggaacccccaccua

SEQ ID NO: 54298 - DNA, 25 bp, Artificial Sequence
  Synthetic
gatgccccaaaautttccatgtuct

SEQ ID NO: 54299 - DNA, 23 bp, Artificial Sequence
  Synthetic
tgcuattggtucagcaagagagg

SEQ ID NO: 54300 - DNA, 22 bp, Artificial Sequence
  Synthetic
tcacttugcaggcacauaccaa

SEQ ID NO: 54301 - DNA, 22 bp, Artificial Sequence
  Synthetic
ggaugcaaatccuggaagacca

SEQ ID NO: 54302 - DNA, 27 bp, Artificial Sequence
  Synthetic
acgtagacatgugagataccagtuact

SEQ ID NO: 54303 - DNA, 27 bp, Artificial Sequence
  Synthetic
gtcctgtuacaaagacgtttggauaac

SEQ ID NO: 54304 - DNA, 26 bp, Artificial Sequence
  Synthetic
ctccagtggtucaagcaatttttgua

SEQ ID NO: 54305 - DNA, 28 bp, Artificial Sequence
  Synthetic
tgattagttuagcaacaggaggtugaat

SEQ ID NO: 54306 - DNA, 29 bp, Artificial Sequence
  Synthetic
ggacaaagatgatugaagtaactggtgua

SEQ ID NO: 54307 - DNA, 24 bp, Artificial Sequence
  Synthetic
ggatcattcaggcugacacactut

SEQ ID NO: 54308 - DNA, 25 bp, Artificial Sequence
  Synthetic
agtataggccacuttgttgctctug

SEQ ID NO: 54309 - DNA, 33 bp, Artificial Sequence
  Synthetic
agatcatctacttugtttacatgtttgaaucat

SEQ ID NO: 54310 - DNA, 23 bp, Artificial Sequence
  Synthetic
gtaccutctggattuccccacaa

SEQ ID NO: 54311 - DNA, 26 bp, Artificial Sequence
  Synthetic
aattcaaagcauagcccugaaagaga

SEQ ID NO: 54312 - DNA, 21 bp, Artificial Sequence
  Synthetic
gcagttgcgugatctccacua

SEQ ID NO: 54313 - DNA, 29 bp, Artificial Sequence
  Synthetic
gagcaaatcattucaacacacatguaaga

SEQ ID NO: 54314 - DNA, 28 bp, Artificial Sequence
  Synthetic
catagcttgttaugaggatcatgugaca

SEQ ID NO: 54315 - DNA, 20 bp, Artificial Sequence
  Synthetic
accuagaggaacgggccaut

SEQ ID NO: 54316 - DNA, 21 bp, Artificial Sequence
  Synthetic
ctctcctcaucttgccagugt

SEQ ID NO: 54317 - DNA, 28 bp, Artificial Sequence
  Synthetic
acagagatccuatcagatgacctuacag

SEQ ID NO: 54318 - DNA, 28 bp, Artificial Sequence
  Synthetic
gagaaagacgcuttcatgcatauaagag

SEQ ID NO: 54319 - DNA, 26 bp, Artificial Sequence
  Synthetic
ttcaactguagaaagcctuggagaaa

SEQ ID NO: 54320 - DNA, 27 bp, Artificial Sequence
  Synthetic
tgacttttcagutgagatgaugccaat

SEQ ID NO: 54321 - DNA, 28 bp, Artificial Sequence
  Synthetic
ttcugaaatcagcttuggagagaagaaa

SEQ ID NO: 54322 - DNA, 22 bp, Artificial Sequence
  Synthetic
cgcctggauttcatctcctuca

SEQ ID NO: 54323 - DNA, 28 bp, Artificial Sequence
  Synthetic
ctgggtaattgcauctgaggatgattua

SEQ ID NO: 54324 - DNA, 20 bp, Artificial Sequence
  Synthetic
cctaagcccuctgtgcugat

SEQ ID NO: 54325 - DNA, 23 bp, Artificial Sequence
  Synthetic
gtgactgcugggattgtttugag

SEQ ID NO: 54326 - DNA, 21 bp, Artificial Sequence
  Synthetic
ctccctucccatcatgauccc

SEQ ID NO: 54327 - DNA, 24 bp, Artificial Sequence
  Synthetic
aggagauccacctcuaccaaacat

SEQ ID NO: 54328 - DNA, 22 bp, Artificial Sequence
  Synthetic
gtgtgagcagucactcatcuca

SEQ ID NO: 54329 - DNA, 25 bp, Artificial Sequence
  Synthetic
cttctcaggcuatctctcaatgcut

SEQ ID NO: 54330 - DNA, 20 bp, Artificial Sequence
  Synthetic
ctgccuccgtggattcuact

SEQ ID NO: 54331 - DNA, 23 bp, Artificial Sequence
  Synthetic
cctauacacacttcuggcaccac

SEQ ID NO: 54332 - DNA, 27 bp, Artificial Sequence
  Synthetic
caaatgcttgcagucttctgttttcua

SEQ ID NO: 54333 - DNA, 20 bp, Artificial Sequence
  Synthetic
tgugtgguagagcagcaacc

SEQ ID NO: 54334 - DNA, 27 bp, Artificial Sequence
  Synthetic
gtgacacgaggaaugaatgaaauaacc

SEQ ID NO: 54335 - DNA, 21 bp, Artificial Sequence
  Synthetic
gtaggauggctgtugaacgga

SEQ ID NO: 54336 - DNA, 26 bp, Artificial Sequence
  Synthetic
tttactgccauacatctcctttccug

SEQ ID NO: 54337 - DNA, 22 bp, Artificial Sequence
  Synthetic
tctgagcugactggttccucat

SEQ ID NO: 54338 - DNA, 21 bp, Artificial Sequence
  Synthetic
ctgcaaauggagggctgacua

SEQ ID NO: 54339 - DNA, 27 bp, Artificial Sequence
  Synthetic
gatgttgttcaucaaaaagggcaaaut

SEQ ID NO: 54340 - DNA, 28 bp, Artificial Sequence
  Synthetic
gcagaagtaagguataatcctgctgtua

SEQ ID NO: 54341 - DNA, 27 bp, Artificial Sequence
  Synthetic
cttacaacaagtuccaaaacaccauct

SEQ ID NO: 54342 - DNA, 26 bp, Artificial Sequence
  Synthetic
ctcagcagtauaaagtcctcatuggt

SEQ ID NO: 54343 - DNA, 27 bp, Artificial Sequence
  Synthetic
ccctcatagtucagaggtctcucaaaa

SEQ ID NO: 54344 - DNA, 26 bp, Artificial Sequence
  Synthetic
tggaatgaaacautaccatcugccaa

SEQ ID NO: 54345 - DNA, 24 bp, Artificial Sequence
  Synthetic
ggtgactcttutcctccctcucat

SEQ ID NO: 54346 - DNA, 22 bp, Artificial Sequence
  Synthetic
gccttacguccaaccctcaaua

SEQ ID NO: 54347 - DNA, 21 bp, Artificial Sequence
  Synthetic
gtcuggcagcaaaccttgaut

SEQ ID NO: 54348 - DNA, 23 bp, Artificial Sequence
  Synthetic
gguagccagcagacaagtaucat

SEQ ID NO: 54349 - DNA, 23 bp, Artificial Sequence
  Synthetic
gtccgcttuggtttcttttgucc

SEQ ID NO: 54350 - DNA, 29 bp, Artificial Sequence
  Synthetic
agtgttatcctgcutatttgatgcttcut

SEQ ID NO: 54351 - DNA, 25 bp, Artificial Sequence
  Synthetic
gatcaagcctuaaccttctctguga

SEQ ID NO: 54352 - DNA, 20 bp, Artificial Sequence
  Synthetic
ggctctuccgaaagccugaa

SEQ ID NO: 54353 - DNA, 27 bp, Artificial Sequence
  Synthetic
gcattgggattugaaggtctttgauat

SEQ ID NO: 54354 - DNA, 27 bp, Artificial Sequence
  Synthetic
ctgtccccaautttagtgttctcuact

SEQ ID NO: 54355 - DNA, 28 bp, Artificial Sequence
  Synthetic
tgctaagttccucaaaggtaatgugaaa

SEQ ID NO: 54356 - DNA, 25 bp, Artificial Sequence
  Synthetic
gtcagcacuaatcagttaccugcaa

SEQ ID NO: 54357 - DNA, 24 bp, Artificial Sequence
  Synthetic
ctgatgcatucctggttgtttuct

SEQ ID NO: 54358 - DNA, 22 bp, Artificial Sequence
  Synthetic
aagagaacccagacucuggaca

SEQ ID NO: 54359 - DNA, 20 bp, Artificial Sequence
  Synthetic
cccgccugtacgactucaac

SEQ ID NO: 54360 - DNA, 25 bp, Artificial Sequence
  Synthetic
tttgagactugttgttggcuaggaa

SEQ ID NO: 54361 - DNA, 26 bp, Artificial Sequence
  Synthetic
aaaagttcggcgutatgatatgcauc

SEQ ID NO: 54362 - DNA, 19 bp, Artificial Sequence
  Synthetic
ggccauaggguacgggaag

SEQ ID NO: 54363 - DNA, 23 bp, Artificial Sequence
  Synthetic
ccttacctcugcgggatguagaa

SEQ ID NO: 54364 - DNA, 21 bp, Artificial Sequence
  Synthetic
gaagtagcguccggtgtcaut

SEQ ID NO: 54365 - DNA, 21 bp, Artificial Sequence
  Synthetic
tgagtgtcucgtcctgguagt

SEQ ID NO: 54366 - DNA, 20 bp, Artificial Sequence
  Synthetic
gtctccugcacagaucggat

SEQ ID NO: 54367 - DNA, 22 bp, Artificial Sequence
  Synthetic
acccaggucatggtgaucaaac

SEQ ID NO: 54368 - DNA, 21 bp, Artificial Sequence
  Synthetic
gggcaaacagutctgtcucct

SEQ ID NO: 54369 - DNA, 19 bp, Artificial Sequence
  Synthetic
gacgaagucgggugaaggt

SEQ ID NO: 54370 - DNA, 27 bp, Artificial Sequence
  Synthetic
ttcatagaaucctttgagctugcaaga

SEQ ID NO: 54371 - DNA, 28 bp, Artificial Sequence
  Synthetic
ggactaacccagcugaatttaatctcug

SEQ ID NO: 54372 - DNA, 26 bp, Artificial Sequence
  Synthetic
cttgcctcugatcttcctcauaagaa

SEQ ID NO: 54373 - DNA, 27 bp, Artificial Sequence
  Synthetic
gggatgtaaacccuaaggacctuaaga

SEQ ID NO: 54374 - DNA, 27 bp, Artificial Sequence
  Synthetic
tttattgctgctautgcatgattgcut

SEQ ID NO: 54375 - DNA, 25 bp, Artificial Sequence
  Synthetic
ctggaaaagutccctttcugagagt

SEQ ID NO: 54376 - DNA, 29 bp, Artificial Sequence
  Synthetic
agtagtataaatttgugcaaggtctgugt

SEQ ID NO: 54377 - DNA, 26 bp, Artificial Sequence
  Synthetic
gatgaagaactguctcctcctaguga

SEQ ID NO: 54378 - DNA, 20 bp, Artificial Sequence
  Synthetic
ccgaucagacccuacaggac

SEQ ID NO: 54379 - DNA, 26 bp, Artificial Sequence
  Synthetic
gcttctccagutgaacatttguagca

SEQ ID NO: 54380 - DNA, 22 bp, Artificial Sequence
  Synthetic
cagagtcaggcuctgcaaauct

SEQ ID NO: 54381 - DNA, 23 bp, Artificial Sequence
  Synthetic
tgccaagucagcugaagagaaaa

SEQ ID NO: 54382 - DNA, 28 bp, Artificial Sequence
  Synthetic
tgcacagtttggauattactttcgtgua

SEQ ID NO: 54383 - DNA, 20 bp, Artificial Sequence
  Synthetic
cgactugcaaacctgtuggt

SEQ ID NO: 54384 - DNA, 24 bp, Artificial Sequence
  Synthetic
acaggctaugtagaaccaaugcag

SEQ ID NO: 54385 - DNA, 23 bp, Artificial Sequence
  Synthetic
tttctccaaaauggctggtcgua

SEQ ID NO: 54386 - DNA, 28 bp, Artificial Sequence
  Synthetic
gcctttatatgcuatgtcagtguaaacc

SEQ ID NO: 54387 - DNA, 22 bp, Artificial Sequence
  Synthetic
gacucacauggcacaaaacacc

SEQ ID NO: 54388 - DNA, 21 bp, Artificial Sequence
  Synthetic
ccccauggagcttgaucaact

SEQ ID NO: 54389 - DNA, 21 bp, Artificial Sequence
  Synthetic
ccgagcugaagtctgggauac

SEQ ID NO: 54390 - DNA, 22 bp, Artificial Sequence
  Synthetic
acagugaacagaagguggagga

SEQ ID NO: 54391 - DNA, 19 bp, Artificial Sequence
  Synthetic
ctcggccaugacaccucaa

SEQ ID NO: 54392 - DNA, 21 bp, Artificial Sequence
  Synthetic
ggactgtggguttctgtccut

SEQ ID NO: 54393 - DNA, 20 bp, Artificial Sequence
  Synthetic
caaggcagcuccaggtagug

SEQ ID NO: 54394 - DNA, 21 bp, Artificial Sequence
  Synthetic
cagaggcaaggcacucaugaa

SEQ ID NO: 54395 - DNA, 21 bp, Artificial Sequence
  Synthetic
gggttatccugtctggcucct

SEQ ID NO: 54396 - DNA, 21 bp, Artificial Sequence
  Synthetic
ccttggaccagcuggatgaug

SEQ ID NO: 54397 - DNA, 28 bp, Artificial Sequence
  Synthetic
ggaggaacaguaagcatgtattttcuga

SEQ ID NO: 54398 - DNA, 21 bp, Artificial Sequence
  Synthetic
gaagagcugagtgccacaaug

SEQ ID NO: 54399 - DNA, 24 bp, Artificial Sequence
  Synthetic
gaaccaaacacaugagagctccua

SEQ ID NO: 54400 - DNA, 25 bp, Artificial Sequence
  Synthetic
gaaacaagcacutaggctgugaaaa

SEQ ID NO: 54401 - DNA, 24 bp, Artificial Sequence
  Synthetic
ttaatggtggugttacctgctcuc

SEQ ID NO: 54402 - DNA, 25 bp, Artificial Sequence
  Synthetic
gaagaagcacuaacacccagaagua

SEQ ID NO: 54403 - DNA, 22 bp, Artificial Sequence
  Synthetic
tccagatcauggttgagtuggg

SEQ ID NO: 54404 - DNA, 27 bp, Artificial Sequence
  Synthetic
tggatttccttauctccaccataguct

SEQ ID NO: 54405 - DNA, 26 bp, Artificial Sequence
  Synthetic
tcaatattggtuggttgtttctugcc

SEQ ID NO: 54406 - DNA, 22 bp, Artificial Sequence
  Synthetic
cggtcaaugagagaacggucag

SEQ ID NO: 54407 - DNA, 24 bp, Artificial Sequence
  Synthetic
cgcttcugcacagcgttatacuat

SEQ ID NO: 54408 - DNA, 27 bp, Artificial Sequence
  Synthetic
cagtgttttcatutcctctcttccuct

SEQ ID NO: 54409 - DNA, 26 bp, Artificial Sequence
  Synthetic
catcctatcagcccutactgggtaua

SEQ ID NO: 54410 - DNA, 27 bp, Artificial Sequence
  Synthetic
tcaactgaactuccaggatgaacttut

SEQ ID NO: 54411 - DNA, 26 bp, Artificial Sequence
  Synthetic
tggaatgtccaacuttgcctatgtua

SEQ ID NO: 54412 - DNA, 26 bp, Artificial Sequence
  Synthetic
acagaatccacugctgcatacauaat

SEQ ID NO: 54413 - DNA, 29 bp, Artificial Sequence
  Synthetic
tggacatgttgaauacagcaaaactuact

SEQ ID NO: 54414 - DNA, 27 bp, Artificial Sequence
  Synthetic
acctctgguaagtattaggcgtuaaga

SEQ ID NO: 54415 - DNA, 24 bp, Artificial Sequence
  Synthetic
gggtggugaattcctttcuagaga

SEQ ID NO: 54416 - DNA, 25 bp, Artificial Sequence
  Synthetic
aacagctguagtccaattagugcaa

SEQ ID NO: 54417 - DNA, 28 bp, Artificial Sequence
  Synthetic
tcagaggcuttatgtcatuacaaacact

SEQ ID NO: 54418 - DNA, 25 bp, Artificial Sequence
  Synthetic
agaagtttatuggctactcugcaca

SEQ ID NO: 54419 - DNA, 28 bp, Artificial Sequence
  Synthetic
ctgggctaugggacatgtatgtauaaat

SEQ ID NO: 54420 - DNA, 27 bp, Artificial Sequence
  Synthetic
tggcttacttuacacaaaacaaacugg

SEQ ID NO: 54421 - DNA, 27 bp, Artificial Sequence
  Synthetic
aggttgctguctaacatactuggaaaa

SEQ ID NO: 54422 - DNA, 27 bp, Artificial Sequence
  Synthetic
gaatgugcccagcataatattuaagca

SEQ ID NO: 54423 - DNA, 20 bp, Artificial Sequence
  Synthetic
tgugggagaucgaggaccag

SEQ ID NO: 54424 - DNA, 27 bp, Artificial Sequence
  Synthetic
ttgtctcacuaagttgactuacagcag

SEQ ID NO: 54425 - DNA, 24 bp, Artificial Sequence
  Synthetic
ctaaaggctucagtcttcctguga

SEQ ID NO: 54426 - DNA, 26 bp, Artificial Sequence
  Synthetic
caagagtgaugtggtaaguagagaca

SEQ ID NO: 54427 - DNA, 27 bp, Artificial Sequence
  Synthetic
gctggacatcugtatactagcacatut

SEQ ID NO: 54428 - DNA, 18 bp, Artificial Sequence
  Synthetic
gacucagcacucgaccca

SEQ ID NO: 54429 - DNA, 17 bp, Artificial Sequence
  Synthetic
gctccgguggccttguc

SEQ ID NO: 54430 - DNA, 22 bp, Artificial Sequence
  Synthetic
ggtcttggtuttcagcccauct

SEQ ID NO: 54431 - DNA, 22 bp, Artificial Sequence
  Synthetic
tgtacatggcaaucctgtgguc

SEQ ID NO: 54432 - DNA, 21 bp, Artificial Sequence
  Synthetic
ctcggatcucctcctguggat

SEQ ID NO: 54433 - DNA, 21 bp, Artificial Sequence
  Synthetic
tctcgcaaaccugacactcuc

SEQ ID NO: 54434 - DNA, 17 bp, Artificial Sequence
  Synthetic
ctgcgcucggtgaacuc

SEQ ID NO: 54435 - DNA, 18 bp, Artificial Sequence
  Synthetic
gggctucagaccgtgcua

SEQ ID NO: 54436 - DNA, 21 bp, Artificial Sequence
  Synthetic
cctggtccccugggtttcuaa

SEQ ID NO: 54437 - DNA, 23 bp, Artificial Sequence
  Synthetic
ccctgacccucctattuggagag

SEQ ID NO: 54438 - DNA, 21 bp, Artificial Sequence
  Synthetic
gctgccuggcagttggauaat

SEQ ID NO: 54439 - DNA, 23 bp, Artificial Sequence
  Synthetic
ctcatgcaggauttctggttguc

SEQ ID NO: 54440 - DNA, 28 bp, Artificial Sequence
  Synthetic
aggagaaagaaugacgagaacauaacac

SEQ ID NO: 54441 - DNA, 25 bp, Artificial Sequence
  Synthetic
gucccacaccctuaagagaagaaaa

SEQ ID NO: 54442 - DNA, 21 bp, Artificial Sequence
  Synthetic
agggaccucaagagcuccaat

SEQ ID NO: 54443 - DNA, 26 bp, Artificial Sequence
  Synthetic
agatatggaucaagaggtagggugag

SEQ ID NO: 54444 - DNA, 26 bp, Artificial Sequence
  Synthetic
tgtctttccugaggtgatttcaugac

SEQ ID NO: 54445 - DNA, 22 bp, Artificial Sequence
  Synthetic
tggttgaggaguttggtgcuac

SEQ ID NO: 54446 - DNA, 21 bp, Artificial Sequence
  Synthetic
acagcuctguagaaccagcac

SEQ ID NO: 54447 - DNA, 26 bp, Artificial Sequence
  Synthetic
tcttccaccatutccacatcagaauc

SEQ ID NO: 54448 - DNA, 23 bp, Artificial Sequence
  Synthetic
caggctgttcucctcatcttcut

SEQ ID NO: 54449 - DNA, 19 bp, Artificial Sequence
  Synthetic
gcatugccaccccctacuc

SEQ ID NO: 54450 - DNA, 22 bp, Artificial Sequence
  Synthetic
acaacacccaaaacuacccugt

SEQ ID NO: 54451 - DNA, 22 bp, Artificial Sequence
  Synthetic
ctccccaaguctgacucagaag

SEQ ID NO: 54452 - DNA, 23 bp, Artificial Sequence
  Synthetic
guttctaaugggcaaaggcacag

SEQ ID NO: 54453 - DNA, 24 bp, Artificial Sequence
  Synthetic
tctgcctgtaugggaatgacatug

SEQ ID NO: 54454 - DNA, 28 bp, Artificial Sequence
  Synthetic
tgtgtttaacucacacttacccaugaaa

SEQ ID NO: 54455 - DNA, 22 bp, Artificial Sequence
  Synthetic
gggataagucgctggcatttug

SEQ ID NO: 54456 - DNA, 27 bp, Artificial Sequence
  Synthetic
tgaagcaacacaguatucacagaaaca

SEQ ID NO: 54457 - DNA, 28 bp, Artificial Sequence
  Synthetic
gtttgatcattaugaaccgacgttctut

SEQ ID NO: 54458 - DNA, 28 bp, Artificial Sequence
  Synthetic
atttcgaaugagtaaaaacgaugcacat

SEQ ID NO: 54459 - DNA, 27 bp, Artificial Sequence
  Synthetic
agcgaactgaagaaaucaaggttcaua

SEQ ID NO: 54460 - DNA, 27 bp, Artificial Sequence
  Synthetic
cctcctccuttagcatatctuccaaat

SEQ ID NO: 54461 - DNA, 28 bp, Artificial Sequence
  Synthetic
tatgaaatgctttutaggcacgtttuct

SEQ ID NO: 54462 - DNA, 27 bp, Artificial Sequence
  Synthetic
cctcaucagaactcatcttuagcaact

SEQ ID NO: 54463 - DNA, 25 bp, Artificial Sequence
  Synthetic
ggtttggcauaggaaaagctacugt

SEQ ID NO: 54464 - DNA, 18 bp, Artificial Sequence
  Synthetic
gggccuggagaucgagat

SEQ ID NO: 54465 - DNA, 17 bp, Artificial Sequence
  Synthetic
gggcgccacuctacguc

SEQ ID NO: 54466 - DNA, 25 bp, Artificial Sequence
  Synthetic
agggctuaacactttccattugagt

SEQ ID NO: 54467 - DNA, 28 bp, Artificial Sequence
  Synthetic
cacctccacatutgatgttctgtataug

SEQ ID NO: 54468 - DNA, 26 bp, Artificial Sequence
  Synthetic
ctgtctgttctcugggttatatgcut

SEQ ID NO: 54469 - DNA, 29 bp, Artificial Sequence
  Synthetic
acataaatgttaccutagtggcagaaucc

SEQ ID NO: 54470 - DNA, 24 bp, Artificial Sequence
  Synthetic
ccgutacatattgcugccaagaag

SEQ ID NO: 54471 - DNA, 28 bp, Artificial Sequence
  Synthetic
ccaaaacacucttgattgaugcaagaaa

SEQ ID NO: 54472 - DNA, 21 bp, Artificial Sequence
  Synthetic
caguatcgccugggagaacag

SEQ ID NO: 54473 - DNA, 20 bp, Artificial Sequence
  Synthetic
ccutcatcagcucccgaaca

SEQ ID NO: 54474 - DNA, 23 bp, Artificial Sequence
  Synthetic
aagtgttctugcttcagcaguct

SEQ ID NO: 54475 - DNA, 24 bp, Artificial Sequence
  Synthetic
acagaauacacacactgacauggg

SEQ ID NO: 54476 - DNA, 25 bp, Artificial Sequence
  Synthetic
gtctctguccaaggcatcattauct

SEQ ID NO: 54477 - DNA, 28 bp, Artificial Sequence
  Synthetic
aggtcctttgugagttatagatcccaua

SEQ ID NO: 54478 - DNA, 28 bp, Artificial Sequence
  Synthetic
acaaactcagacautggtcactaaugat

SEQ ID NO: 54479 - DNA, 22 bp, Artificial Sequence
  Synthetic
ttgcccttcugtgtgatgucaa

SEQ ID NO: 54480 - DNA, 26 bp, Artificial Sequence
  Synthetic
aaagagcactuttggctttgatucaa

SEQ ID NO: 54481 - DNA, 22 bp, Artificial Sequence
  Synthetic
accgctccautcatctttugct

SEQ ID NO: 54482 - DNA, 26 bp, Artificial Sequence
  Synthetic
tctgtaaaaagtuccctgcagtcauc

SEQ ID NO: 54483 - DNA, 23 bp, Artificial Sequence
  Synthetic
gttgggtgaucgttcctttcauc

SEQ ID NO: 54484 - DNA, 28 bp, Artificial Sequence
  Synthetic
gtgaactgagaautcaaaaggaatgugg

SEQ ID NO: 54485 - DNA, 28 bp, Artificial Sequence
  Synthetic
acacattttaacatugcttgcttggaut

SEQ ID NO: 54486 - DNA, 26 bp, Artificial Sequence
  Synthetic
aacaagcccaguctagaatttcucaa

SEQ ID NO: 54487 - DNA, 25 bp, Artificial Sequence
  Synthetic
caggaagttuttcacgctcuacaaa

SEQ ID NO: 54488 - DNA, 24 bp, Artificial Sequence
  Synthetic
gaggaataccuccacagcacuaat

SEQ ID NO: 54489 - DNA, 28 bp, Artificial Sequence
  Synthetic
catctgacuggccaaaattaagttttuc

SEQ ID NO: 54490 - DNA, 24 bp, Artificial Sequence
  Synthetic
acaagaccctutcattaccccauc

SEQ ID NO: 54491 - DNA, 27 bp, Artificial Sequence
  Synthetic
aggcagtcaaugagcttgtaaataugt

SEQ ID NO: 54492 - DNA, 26 bp, Artificial Sequence
  Synthetic
gattggaatcuggcagagtgtuaaga

SEQ ID NO: 54493 - DNA, 25 bp, Artificial Sequence
  Synthetic
gtatgtttcucaaaccaccugcaac

SEQ ID NO: 54494 - DNA, 21 bp, Artificial Sequence
  Synthetic
aucaaggccugaaaccccaaa

SEQ ID NO: 54495 - DNA, 22 bp, Artificial Sequence
  Synthetic
tccctcctautgtcatgccugt

SEQ ID NO: 54496 - DNA, 26 bp, Artificial Sequence
  Synthetic
tgaagtccgaagaggautcctcauat

SEQ ID NO: 54497 - DNA, 27 bp, Artificial Sequence
  Synthetic
gaaguaatcatuagacaagcagagcca

SEQ ID NO: 54498 - DNA, 28 bp, Artificial Sequence
  Synthetic
cctcgattgaaucctattctgaagauga

SEQ ID NO: 54499 - DNA, 23 bp, Artificial Sequence
  Synthetic
ggtcttgcccauctttcattcug

SEQ ID NO: 54500 - DNA, 22 bp, Artificial Sequence
  Synthetic
gctttgaugagcagctggttug

SEQ ID NO: 54501 - DNA, 21 bp, Artificial Sequence
  Synthetic
agagggcaacucctagggaug

SEQ ID NO: 54502 - DNA, 22 bp, Artificial Sequence
  Synthetic
agctgaacauctgtttgccuct

SEQ ID NO: 54503 - DNA, 22 bp, Artificial Sequence
  Synthetic
ggaatgatugggaagcguacct

SEQ ID NO: 54504 - DNA, 22 bp, Artificial Sequence
  Synthetic
gcggaaacgaugcctgtattuc

SEQ ID NO: 54505 - DNA, 28 bp, Artificial Sequence
  Synthetic
ggaagaaagcuaaacaaacctagauggt

SEQ ID NO: 54506 - DNA, 27 bp, Artificial Sequence
  Synthetic
caatgattuagaccctggatttaugcc

SEQ ID NO: 54507 - DNA, 25 bp, Artificial Sequence
  Synthetic
actgcugacacacacactaattuct

SEQ ID NO: 54508 - DNA, 21 bp, Artificial Sequence
  Synthetic
ggucccaaccacuggaaagac

SEQ ID NO: 54509 - DNA, 23 bp, Artificial Sequence
  Synthetic
gtttgtcaguaggcctgtcugaa

SEQ ID NO: 54510 - DNA, 20 bp, Artificial Sequence
  Synthetic
cugtacgacuggagcgacaa

SEQ ID NO: 54511 - DNA, 21 bp, Artificial Sequence
  Synthetic
gaccaaucatuccccgagacc

SEQ ID NO: 54512 - DNA, 23 bp, Artificial Sequence
  Synthetic
gacaagcaagaaacauggaugct

SEQ ID NO: 54513 - DNA, 27 bp, Artificial Sequence
  Synthetic
ggtaaccaggcaaaauactagcagaua

SEQ ID NO: 54514 - DNA, 23 bp, Artificial Sequence
  Synthetic
cucacagtgtauccagggacaat

SEQ ID NO: 54515 - DNA, 22 bp, Artificial Sequence
  Synthetic
ccagaaggcuctctctttccug

SEQ ID NO: 54516 - DNA, 21 bp, Artificial Sequence
  Synthetic
gcggagaacuggaaatgugga

SEQ ID NO: 54517 - DNA, 19 bp, Artificial Sequence
  Synthetic
gccaacaugggcagtcuga

SEQ ID NO: 54518 - DNA, 21 bp, Artificial Sequence
  Synthetic
ggcaggaccaccutgaatuct

SEQ ID NO: 54519 - DNA, 25 bp, Artificial Sequence
  Synthetic
cagaagtgtgtutccaccataccut

SEQ ID NO: 54520 - DNA, 17 bp, Artificial Sequence
  Synthetic
cgagcgccugggaucag

SEQ ID NO: 54521 - DNA, 19 bp, Artificial Sequence
  Synthetic
tgctcaucgcctcgcatut

SEQ ID NO: 54522 - DNA, 21 bp, Artificial Sequence
  Synthetic
cctgtacuggaccaggaagug

SEQ ID NO: 54523 - DNA, 19 bp, Artificial Sequence
  Synthetic
cgtgtcugtccagcuccaa

SEQ ID NO: 54524 - DNA, 19 bp, Artificial Sequence
  Synthetic
acucacctgucaccccgat

SEQ ID NO: 54525 - DNA, 20 bp, Artificial Sequence
  Synthetic
ggtucccgagggacagttug

SEQ ID NO: 54526 - DNA, 17 bp, Artificial Sequence
  Synthetic
gcagcuccgcguaccac

SEQ ID NO: 54527 - DNA, 19 bp, Artificial Sequence
  Synthetic
ggtgacgacugtggcauga

SEQ ID NO: 54528 - DNA, 25 bp, Artificial Sequence
  Synthetic
tgggaattcugagaacataggugga

SEQ ID NO: 54529 - DNA, 26 bp, Artificial Sequence
  Synthetic
ccatcccctgaucagtctacttcuat

SEQ ID NO: 54530 - DNA, 22 bp, Artificial Sequence
  Synthetic
aagggaagugucagaacaagca

SEQ ID NO: 54531 - DNA, 24 bp, Artificial Sequence
  Synthetic
catatctgtucaccagctcaguct

SEQ ID NO: 54532 - DNA, 24 bp, Artificial Sequence
  Synthetic
aagccccaaauctccttgtuagac

SEQ ID NO: 54533 - DNA, 17 bp, Artificial Sequence
  Synthetic
ccggcguttcggctuct

SEQ ID NO: 54534 - DNA, 21 bp, Artificial Sequence
  Synthetic
cacagtgucagtgcctaugga

SEQ ID NO: 54535 - DNA, 22 bp, Artificial Sequence
  Synthetic
ggcctcagucaagaactuccag

SEQ ID NO: 54536 - DNA, 20 bp, Artificial Sequence
  Synthetic
cgtctgguggtcgtaacugt

SEQ ID NO: 54537 - DNA, 22 bp, Artificial Sequence
  Synthetic
cccatcuccagctgtctgttuc

SEQ ID NO: 54538 - DNA, 28 bp, Artificial Sequence
  Synthetic
ccttcttaagtttutcaatctgcctgut

SEQ ID NO: 54539 - DNA, 28 bp, Artificial Sequence
  Synthetic
ctttgggaaatuaccaggttctgaagua

SEQ ID NO: 54540 - DNA, 28 bp, Artificial Sequence
  Synthetic
ccatttctacatgugctctttcttcuca

SEQ ID NO: 54541 - DNA, 24 bp, Artificial Sequence
  Synthetic
tctgggtcaaacuggcactttaut

SEQ ID NO: 54542 - DNA, 22 bp, Artificial Sequence
  Synthetic
gtctcuctgatccugccacaac

SEQ ID NO: 54543 - DNA, 27 bp, Artificial Sequence
  Synthetic
tgccagtcauggagtacttttaaauga

SEQ ID NO: 54544 - DNA, 26 bp, Artificial Sequence
  Synthetic
tgctcagagucacaataactggatut

SEQ ID NO: 54545 - DNA, 28 bp, Artificial Sequence
  Synthetic
ttctcttccctuaagtcagtcctactut

SEQ ID NO: 54546 - DNA, 21 bp, Artificial Sequence
  Synthetic
tgagacccuccccagatuacc

SEQ ID NO: 54547 - DNA, 27 bp, Artificial Sequence
  Synthetic
cagtgaacaaaacgagutgcaaagtua

SEQ ID NO: 54548 - DNA, 21 bp, Artificial Sequence
  Synthetic
ggccagtggugtccattcaua

SEQ ID NO: 54549 - DNA, 22 bp, Artificial Sequence
  Synthetic
aagggctaucggctagaucagt

SEQ ID NO: 54550 - DNA, 21 bp, Artificial Sequence
  Synthetic
gctatcccaugatgctcugct

SEQ ID NO: 54551 - DNA, 24 bp, Artificial Sequence
  Synthetic
gatgcctggaagcugcatagtaut

SEQ ID NO: 54552 - DNA, 24 bp, Artificial Sequence
  Synthetic
gtaaccugggcagaattgucaaaa

SEQ ID NO: 54553 - DNA, 28 bp, Artificial Sequence
  Synthetic
actgttgcuggacttagaaagtuaaagt

SEQ ID NO: 54554 - DNA, 25 bp, Artificial Sequence
  Synthetic
aagggctaactuatgttgccatgua

SEQ ID NO: 54555 - DNA, 26 bp, Artificial Sequence
  Synthetic
aaaactgugagaaagcaatugaccac

SEQ ID NO: 54556 - DNA, 24 bp, Artificial Sequence
  Synthetic
cuagaaaattcuccacagggccaa

SEQ ID NO: 54557 - DNA, 24 bp, Artificial Sequence
  Synthetic
ttcagtgtugcagtgacaguaact

SEQ ID NO: 54558 - DNA, 21 bp, Artificial Sequence
  Synthetic
gtgaucaaaacagggcgacug

SEQ ID NO: 54559 - DNA, 22 bp, Artificial Sequence
  Synthetic
ttggcaugtggaatugcacaag

SEQ ID NO: 54560 - DNA, 17 bp, Artificial Sequence
  Synthetic
tgccgguctggctctuc

SEQ ID NO: 54561 - DNA, 18 bp, Artificial Sequence
  Synthetic
tccgtccucctgctcuct

SEQ ID NO: 54562 - DNA, 29 bp, Artificial Sequence
  Synthetic
gttctgcaactuagtatttgaatgtucct

SEQ ID NO: 54563 - DNA, 27 bp, Artificial Sequence
  Synthetic
caccacaatgucgtcaatgaattcuac

SEQ ID NO: 54564 - DNA, 22 bp, Artificial Sequence
  Synthetic
ggagacagautccggactucag

SEQ ID NO: 54565 - DNA, 26 bp, Artificial Sequence
  Synthetic
gagggtgatcguttcttttagaggut

SEQ ID NO: 54566 - DNA, 25 bp, Artificial Sequence
  Synthetic
cagctgaguttgctcttcuaaaacc

SEQ ID NO: 54567 - DNA, 27 bp, Artificial Sequence
  Synthetic
ttcttgcatcugcaacatttcttctuc

SEQ ID NO: 54568 - DNA, 28 bp, Artificial Sequence
  Synthetic
tcagaaattctugagaaaccccuagaga

SEQ ID NO: 54569 - DNA, 27 bp, Artificial Sequence
  Synthetic
tgggagagaguaaactacagagactug

SEQ ID NO: 54570 - DNA, 25 bp, Artificial Sequence
  Synthetic
aatggctgugaatccagaauacact

SEQ ID NO: 54571 - DNA, 21 bp, Artificial Sequence
  Synthetic
ccctctaucagcaaaguggca

SEQ ID NO: 54572 - DNA, 26 bp, Artificial Sequence
  Synthetic
tcugtgtaatctaguggaagggaact

SEQ ID NO: 54573 - DNA, 22 bp, Artificial Sequence
  Synthetic
agaugacaucaccaaaggccaa

SEQ ID NO: 54574 - DNA, 18 bp, Artificial Sequence
  Synthetic
cgccaggaggauggacut

SEQ ID NO: 54575 - DNA, 18 bp, Artificial Sequence
  Synthetic
gcagcucaagcaccugga

SEQ ID NO: 54576 - DNA, 20 bp, Artificial Sequence
  Synthetic
gatcgacccugagcaucaca

SEQ ID NO: 54577 - DNA, 24 bp, Artificial Sequence
  Synthetic
ggatatcttucttgggtgucagca

SEQ ID NO: 54578 - DNA, 22 bp, Artificial Sequence
  Synthetic
cagtggugatgtcugcacagat

SEQ ID NO: 54579 - DNA, 21 bp, Artificial Sequence
  Synthetic
tggaagtgacgugaggcttuc

SEQ ID NO: 54580 - DNA, 21 bp, Artificial Sequence
  Synthetic
agauggcccaacacacagaug

SEQ ID NO: 54581 - DNA, 24 bp, Artificial Sequence
  Synthetic
gggtcctttagutctggcaaguaa

SEQ ID NO: 54582 - DNA, 28 bp, Artificial Sequence
  Synthetic
gaaaagaaaacccutgaagacatgtuga

SEQ ID NO: 54583 - DNA, 29 bp, Artificial Sequence
  Synthetic
gtgttcctttgcutttcaatctcttcaut

SEQ ID NO: 54584 - DNA, 28 bp, Artificial Sequence
  Synthetic
agaatgattuaaggctacagauggaagc

SEQ ID NO: 54585 - DNA, 26 bp, Artificial Sequence
  Synthetic
tccttgatcutttcctctugagcaaa

SEQ ID NO: 54586 - DNA, 23 bp, Artificial Sequence
  Synthetic
tcataaguagaaccagggccugt

SEQ ID NO: 54587 - DNA, 24 bp, Artificial Sequence
  Synthetic
acagcttctcucttccagcuaaag

SEQ ID NO: 54588 - DNA, 26 bp, Artificial Sequence
  Synthetic
tgttccuaggatgacauggagaaact

SEQ ID NO: 54589 - DNA, 28 bp, Artificial Sequence
  Synthetic
ttggtcaatttcuacctctttttccugt

SEQ ID NO: 54590 - DNA, 24 bp, Artificial Sequence
  Synthetic
acgtggcuatagatcatcugagca

SEQ ID NO: 54591 - DNA, 26 bp, Artificial Sequence
  Synthetic
gggtaagttcuaagtcctttgcacua

SEQ ID NO: 54592 - DNA, 28 bp, Artificial Sequence
  Synthetic
gctgtactuccaaaacagaatctgtuac

SEQ ID NO: 54593 - DNA, 28 bp, Artificial Sequence
  Synthetic
tttactuaaggaggacgaatccaugaac

SEQ ID NO: 54594 - DNA, 25 bp, Artificial Sequence
  Synthetic
actgatatcugccctcagttgauct

SEQ ID NO: 54595 - DNA, 28 bp, Artificial Sequence
  Synthetic
cctcttcctuccatctttcattacuaca

SEQ ID NO: 54596 - DNA, 21 bp, Artificial Sequence
  Synthetic
gtccagcaaugaggucaaggt

SEQ ID NO: 54597 - DNA, 28 bp, Artificial Sequence
  Synthetic
tcaatatcgagcutttctagtgcttuca

SEQ ID NO: 54598 - DNA, 25 bp, Artificial Sequence
  Synthetic
tgccaggttuatttcactcttucca

SEQ ID NO: 54599 - DNA, 26 bp, Artificial Sequence
  Synthetic
ggcttuaaggagaaagcactacuact

SEQ ID NO: 54600 - DNA, 24 bp, Artificial Sequence
  Synthetic
tctaagagaugcgggaatgaucca

SEQ ID NO: 54601 - DNA, 23 bp, Artificial Sequence
  Synthetic
gcggcgagaguccattgtaaaua

SEQ ID NO: 54602 - DNA, 19 bp, Artificial Sequence
  Synthetic
caagguccagtuggccgaa

SEQ ID NO: 54603 - DNA, 28 bp, Artificial Sequence
  Synthetic
actcatcaacaaauagatgccactugaa

SEQ ID NO: 54604 - DNA, 28 bp, Artificial Sequence
  Synthetic
acgaattaagcaguatttgtggugaagt

SEQ ID NO: 54605 - DNA, 26 bp, Artificial Sequence
  Synthetic
tttatgtgcgagauggctacagttua

SEQ ID NO: 54606 - DNA, 24 bp, Artificial Sequence
  Synthetic
cattcttauagccacgggtucaga

SEQ ID NO: 54607 - DNA, 29 bp, Artificial Sequence
  Synthetic
tcccaaagctgaaugaccatcaaaataua

SEQ ID NO: 54608 - DNA, 27 bp, Artificial Sequence
  Synthetic
catgctatcagaautcacaagguacca

SEQ ID NO: 54609 - DNA, 29 bp, Artificial Sequence
  Synthetic
tcctagttttgtuagccatcagttuacag

SEQ ID NO: 54610 - DNA, 21 bp, Artificial Sequence
  Synthetic
gagactugtttgctgugccaa

SEQ ID NO: 54611 - DNA, 20 bp, Artificial Sequence
  Synthetic
cgcuaccacacacagaugct

SEQ ID NO: 54612 - DNA, 22 bp, Artificial Sequence
  Synthetic
ccagcacccaccugaaacaaua

SEQ ID NO: 54613 - DNA, 21 bp, Artificial Sequence
  Synthetic
caaaaccgtgutcccgttcuc

SEQ ID NO: 54614 - DNA, 20 bp, Artificial Sequence
  Synthetic
tggaucttccgtuccaccac

SEQ ID NO: 54615 - DNA, 21 bp, Artificial Sequence
  Synthetic
gggccaugagcgaauacacat

SEQ ID NO: 54616 - DNA, 25 bp, Artificial Sequence
  Synthetic
tgaagatgaccuccccttctuagaa

SEQ ID NO: 54617 - DNA, 28 bp, Artificial Sequence
  Synthetic
cacacctcaccugtaaaactcagtauat

SEQ ID NO: 54618 - DNA, 27 bp, Artificial Sequence
  Synthetic
gatcattgctatuccatggatgacuca

SEQ ID NO: 54619 - DNA, 28 bp, Artificial Sequence
  Synthetic
actgcaaaccuctgaagaaaagtguaat

SEQ ID NO: 54620 - DNA, 21 bp, Artificial Sequence
  Synthetic
acagtggtcuccttcccagua

SEQ ID NO: 54621 - DNA, 22 bp, Artificial Sequence
  Synthetic
gtagcaacguggagttcatgug

SEQ ID NO: 54622 - DNA, 24 bp, Artificial Sequence
  Synthetic
caaccagaacaccgutcaaagaug

SEQ ID NO: 54623 - DNA, 26 bp, Artificial Sequence
  Synthetic
caaautcctugaaagcaaagcaagaa

SEQ ID NO: 54624 - DNA, 22 bp, Artificial Sequence
  Synthetic
aatgcttccaugagcactgcua

SEQ ID NO: 54625 - DNA, 23 bp, Artificial Sequence
  Synthetic
tutggucagcaaaacaacagcaa

SEQ ID NO: 54626 - DNA, 22 bp, Artificial Sequence
  Synthetic
gcgcctccaaugaaggatcuac

SEQ ID NO: 54627 - DNA, 29 bp, Artificial Sequence
  Synthetic
ggccaacagaaaauaagaaagacuaagga

SEQ ID NO: 54628 - DNA, 19 bp, Artificial Sequence
  Synthetic
gaauggaccugacgagcct

SEQ ID NO: 54629 - DNA, 22 bp, Artificial Sequence
  Synthetic
gtttccaguagcagcugacaga

SEQ ID NO: 54630 - DNA, 21 bp, Artificial Sequence
  Synthetic
ggccagguccagatcgaaauc

SEQ ID NO: 54631 - DNA, 17 bp, Artificial Sequence
  Synthetic
gcagcucaacgcgcuac

SEQ ID NO: 54632 - DNA, 21 bp, Artificial Sequence
  Synthetic
tgtgggcacagacaugactut

SEQ ID NO: 54633 - DNA, 29 bp, Artificial Sequence
  Synthetic
ttgtgttttgctuggattattgtgcatua

SEQ ID NO: 54634 - DNA, 28 bp, Artificial Sequence
  Synthetic
cutaaaatgtttuacaagcacacacaca

SEQ ID NO: 54635 - DNA, 21 bp, Artificial Sequence
  Synthetic
aggugcaaacatcucaagcca

SEQ ID NO: 54636 - DNA, 27 bp, Artificial Sequence
  Synthetic
gttattacactctugctccacgttgua

SEQ ID NO: 54637 - DNA, 27 bp, Artificial Sequence
  Synthetic
actccagtguaagagctttatgttucc

SEQ ID NO: 54638 - DNA, 21 bp, Artificial Sequence
  Synthetic
accugtgggtuaaaggccaaa

SEQ ID NO: 54639 - DNA, 22 bp, Artificial Sequence
  Synthetic
ttgagccutccatcctucacac

SEQ ID NO: 54640 - DNA, 21 bp, Artificial Sequence
  Synthetic
ggcacctggutggctagaaua

SEQ ID NO: 54641 - DNA, 27 bp, Artificial Sequence
  Synthetic
gatggaccugtgatcatatcugaaact

SEQ ID NO: 54642 - DNA, 28 bp, Artificial Sequence
  Synthetic
ggtttttgaaccugttgagttttucagt

SEQ ID NO: 54643 - DNA, 20 bp, Artificial Sequence
  Synthetic
ccaatgcauccctgcuggat

SEQ ID NO: 54644 - DNA, 24 bp, Artificial Sequence
  Synthetic
accagaactguaagattgctccug

SEQ ID NO: 54645 - DNA, 26 bp, Artificial Sequence
  Synthetic
cacgtctcagauacaaggaguacaaa

SEQ ID NO: 54646 - DNA, 23 bp, Artificial Sequence
  Synthetic
cautctagctccugaaccaacct

SEQ ID NO: 54647 - DNA, 21 bp, Artificial Sequence
  Synthetic
gcatctcccugtgtggguaga

SEQ ID NO: 54648 - DNA, 25 bp, Artificial Sequence
  Synthetic
aaaaccaaagcuttcctcttccuct

SEQ ID NO: 54649 - DNA, 22 bp, Artificial Sequence
  Synthetic
tgcttcgggauggaaacctaug

SEQ ID NO: 54650 - DNA, 24 bp, Artificial Sequence
  Synthetic
gctttgtcctucagcgttttgaug

SEQ ID NO: 54651 - DNA, 20 bp, Artificial Sequence
  Synthetic
gctgcggugacagtgatgut

SEQ ID NO: 54652 - DNA, 23 bp, Artificial Sequence
  Synthetic
acatautgctgcaaucaggacca

SEQ ID NO: 54653 - DNA, 28 bp, Artificial Sequence
  Synthetic
ggcaggatctuggttactcttataaguc

SEQ ID NO: 54654 - DNA, 27 bp, Artificial Sequence
  Synthetic
agatgtggaugagatagagaaagcugt

SEQ ID NO: 54655 - DNA, 26 bp, Artificial Sequence
  Synthetic
ctcatttctucaactgatgggucaga

SEQ ID NO: 54656 - DNA, 25 bp, Artificial Sequence
  Synthetic
gttaaatctguggtgtggcaaugac

SEQ ID NO: 54657 - DNA, 28 bp, Artificial Sequence
  Synthetic
cctttctcattcuggtgttcttcactua

SEQ ID NO: 54658 - DNA, 23 bp, Artificial Sequence
  Synthetic
ccatcucagaagaagctgcaguc

SEQ ID NO: 54659 - DNA, 27 bp, Artificial Sequence
  Synthetic
ggaacgtctcaguggtttttaagttut

SEQ ID NO: 54660 - DNA, 27 bp, Artificial Sequence
  Synthetic
gatgaaggaaaucccatacctgtcuac

SEQ ID NO: 54661 - DNA, 27 bp, Artificial Sequence
  Synthetic
atccataacugaaagccaaugacagat

SEQ ID NO: 54662 - DNA, 24 bp, Artificial Sequence
  Synthetic
ggctattagugcacaaggaaaugg

SEQ ID NO: 54663 - DNA, 29 bp, Artificial Sequence
  Synthetic
aggtacttaggaauggcaaatttgtuaca

SEQ ID NO: 54664 - DNA, 22 bp, Artificial Sequence
  Synthetic
gatccagaggutgggagttugg

SEQ ID NO: 54665 - DNA, 20 bp, Artificial Sequence
  Synthetic
tgtccgcutcagtgtuccat

SEQ ID NO: 54666 - DNA, 22 bp, Artificial Sequence
  Synthetic
ctggagaugcaggaagacacug

SEQ ID NO: 54667 - DNA, 23 bp, Artificial Sequence
  Synthetic
aaatctgacuggactgtgtgugt

SEQ ID NO: 54668 - DNA, 21 bp, Artificial Sequence
  Synthetic
tgtctggguctgaaacgctut

SEQ ID NO: 54669 - DNA, 28 bp, Artificial Sequence
  Synthetic
tcggatttttcacuttgctcatgtttut

SEQ ID NO: 54670 - DNA, 20 bp, Artificial Sequence
  Synthetic
cctggtugcactctgactug

SEQ ID NO: 54671 - DNA, 22 bp, Artificial Sequence
  Synthetic
ccacctccgacugataagggua

SEQ ID NO: 54672 - DNA, 22 bp, Artificial Sequence
  Synthetic
caggttccucctatcctgcuct

SEQ ID NO: 54673 - DNA, 22 bp, Artificial Sequence
  Synthetic
caaacaugcccacaagcugaaa

SEQ ID NO: 54674 - DNA, 28 bp, Artificial Sequence
  Synthetic
tgtttttggtcuttgacattttcugcaa

SEQ ID NO: 54675 - DNA, 28 bp, Artificial Sequence
  Synthetic
tggcgaacaaaacuatttgaggtaguat

SEQ ID NO: 54676 - DNA, 21 bp, Artificial Sequence
  Synthetic
ccagaacaagcagcuccugac

SEQ ID NO: 54677 - DNA, 23 bp, Artificial Sequence
  Synthetic
aagaagtctcuttgcagctguga

SEQ ID NO: 54678 - DNA, 25 bp, Artificial Sequence
  Synthetic
gacgtugaaacggaaaguggaaaaa

SEQ ID NO: 54679 - DNA, 24 bp, Artificial Sequence
  Synthetic
aattttgcccauccaccaaacauc

SEQ ID NO: 54680 - DNA, 24 bp, Artificial Sequence
  Synthetic
tutccactagaguaggaggcacat

SEQ ID NO: 54681 - DNA, 29 bp, Artificial Sequence
  Synthetic
gaatttgaaaaucagaaaccactgtguct

SEQ ID NO: 54682 - DNA, 21 bp, Artificial Sequence
  Synthetic
ccgggucaggatcaatgtgut

SEQ ID NO: 54683 - DNA, 25 bp, Artificial Sequence
  Synthetic
gctaagataaauggcaggagugcag

SEQ ID NO: 54684 - DNA, 21 bp, Artificial Sequence
  Synthetic
ccacacccuacaataccccut

SEQ ID NO: 54685 - DNA, 22 bp, Artificial Sequence
  Synthetic
gtctgtgtcucctttggtgugt

SEQ ID NO: 54686 - DNA, 21 bp, Artificial Sequence
  Synthetic
gagauccaucaaggccaggat

SEQ ID NO: 54687 - DNA, 27 bp, Artificial Sequence
  Synthetic
caagctttccugaatggtttucaaagt

SEQ ID NO: 54688 - DNA, 25 bp, Artificial Sequence
  Synthetic
ggctttggtuactaaaccagcugaa

SEQ ID NO: 54689 - DNA, 22 bp, Artificial Sequence
  Synthetic
attaacagcagcucaggtucgt

SEQ ID NO: 54690 - DNA, 23 bp, Artificial Sequence
  Synthetic
tcattcagtgugccaaggacauc

SEQ ID NO: 54691 - DNA, 27 bp, Artificial Sequence
  Synthetic
acctagtttttcuctcctgcttttcuc

SEQ ID NO: 54692 - DNA, 20 bp, Artificial Sequence
  Synthetic
guaacagcccacgtttugcc

SEQ ID NO: 54693 - DNA, 27 bp, Artificial Sequence
  Synthetic
agcagagttauacattgtcaagcauca

SEQ ID NO: 54694 - DNA, 24 bp, Artificial Sequence
  Synthetic
gagaacacagggautatgcaucct

SEQ ID NO: 54695 - DNA, 26 bp, Artificial Sequence
  Synthetic
gatgctgacucataatgtgtugaacc

SEQ ID NO: 54696 - DNA, 20 bp, Artificial Sequence
  Synthetic
gcugtggcgaucacgaaaag

SEQ ID NO: 54697 - DNA, 21 bp, Artificial Sequence
  Synthetic
ttgcatcugagcaagguggat

SEQ ID NO: 54698 - DNA, 17 bp, Artificial Sequence
  Synthetic
gctccagucccauccgt

SEQ ID NO: 54699 - DNA, 18 bp, Artificial Sequence
  Synthetic
accccagcuguccaagga

SEQ ID NO: 54700 - DNA, 24 bp, Artificial Sequence
  Synthetic
cctgcccagaautttacucacaca

SEQ ID NO: 54701 - DNA, 29 bp, Artificial Sequence
  Synthetic
agctctctacaguaagttctcataccaut

SEQ ID NO: 54702 - DNA, 21 bp, Artificial Sequence
  Synthetic
gggagaaggacuccactuggt

SEQ ID NO: 54703 - DNA, 21 bp, Artificial Sequence
  Synthetic
cgctgacacugtgcttctcuc

SEQ ID NO: 54704 - DNA, 18 bp, Artificial Sequence
  Synthetic
gcuccccggcctactuac

SEQ ID NO: 54705 - DNA, 18 bp, Artificial Sequence
  Synthetic
tgagcgccutcactgucc

SEQ ID NO: 54706 - DNA, 24 bp, Artificial Sequence
  Synthetic
acaccugaagaagcucaaaaggaa

SEQ ID NO: 54707 - DNA, 21 bp, Artificial Sequence
  Synthetic
ggcagagaugtcgaaggtugg

SEQ ID NO: 54708 - DNA, 25 bp, Artificial Sequence
  Synthetic
gcaatgaggaggucagttuggaaaa

SEQ ID NO: 54709 - DNA, 20 bp, Artificial Sequence
  Synthetic
gtcaugcacacggactucac

SEQ ID NO: 54710 - DNA, 22 bp, Artificial Sequence
  Synthetic
tgagtcaggautgcacuggaga

SEQ ID NO: 54711 - DNA, 28 bp, Artificial Sequence
  Synthetic
gtgtgctacaucatacattctuccagaa

SEQ ID NO: 54712 - DNA, 20 bp, Artificial Sequence
  Synthetic
ctgaagctcuaccacgccut

SEQ ID NO: 54713 - DNA, 25 bp, Artificial Sequence
  Synthetic
aaatgaccuggagagaatucaagca

SEQ ID NO: 54714 - DNA, 20 bp, Artificial Sequence
  Synthetic
ggctgttcgugtggattgug

SEQ ID NO: 54715 - DNA, 25 bp, Artificial Sequence
  Synthetic
gcaagggagagacgugatatttcut

SEQ ID NO: 54716 - DNA, 22 bp, Artificial Sequence
  Synthetic
ggaagcuccugaagaagagaca

SEQ ID NO: 54717 - DNA, 22 bp, Artificial Sequence
  Synthetic
gtagacgaugcctgcaaaaugg

SEQ ID NO: 54718 - DNA, 21 bp, Artificial Sequence
  Synthetic
gcagguggtccuagaggagac

SEQ ID NO: 54719 - DNA, 23 bp, Artificial Sequence
  Synthetic
aaacaccacacguacacctguat

SEQ ID NO: 54720 - DNA, 21 bp, Artificial Sequence
  Synthetic
gccaugagcctgtcaaucact

SEQ ID NO: 54721 - DNA, 20 bp, Artificial Sequence
  Synthetic
aggaucaacacaagcggugt

SEQ ID NO: 54722 - DNA, 23 bp, Artificial Sequence
  Synthetic
gttcgggttcuccctctacatug

SEQ ID NO: 54723 - DNA, 21 bp, Artificial Sequence
  Synthetic
ggagucaggcagagccaatua

SEQ ID NO: 54724 - DNA, 28 bp, Artificial Sequence
  Synthetic
gagctgattguagcaacatactacucaa

SEQ ID NO: 54725 - DNA, 26 bp, Artificial Sequence
  Synthetic
agacagauacagacagagtgcttuct

SEQ ID NO: 54726 - DNA, 25 bp, Artificial Sequence
  Synthetic
ttgtggtggagutattgatgacgut

SEQ ID NO: 54727 - DNA, 28 bp, Artificial Sequence
  Synthetic
agacattgaaggugtcaaccaauaaact

SEQ ID NO: 54728 - DNA, 30 bp, Artificial Sequence; identical to SEQ ID NO: 6366
  Synthetic

SEQ ID NO: 54729 - DNA, 28 bp, Artificial Sequence
  Synthetic
gggttttacacacacauaactcctucat

SEQ ID NO: 54730 - DNA, 22 bp, Artificial Sequence
  Synthetic
caacacgguccattttgccaut

SEQ ID NO: 54731 - DNA, 22 bp, Artificial Sequence
  Synthetic
acatttccautgtgcugaggga

SEQ ID NO: 54732 - DNA, 23 bp, Artificial Sequence
  Synthetic
cttgttcucaccaaaucccacct

SEQ ID NO: 54733 - DNA, 23 bp, Artificial Sequence
  Synthetic
acaaaccagutaatgggcaucgt

SEQ ID NO: 54734 - DNA, 21 bp, Artificial Sequence
  Synthetic
caaugcgaccatcuccacagt

SEQ ID NO: 54735 - DNA, 17 bp, Artificial Sequence
  Synthetic
ggucccaggagcaugcc

SEQ ID NO: 54736 - DNA, 21 bp, Artificial Sequence
  Synthetic
cctgcttgugctgtttgucat

SEQ ID NO: 54737 - DNA, 22 bp, Artificial Sequence
  Synthetic
ctctgctggucatgttggtgua

SEQ ID NO: 54738 - DNA, 23 bp, Artificial Sequence
  Synthetic
actaaatctuggcgttcagacuc

SEQ ID NO: 54739 - DNA, 27 bp, Artificial Sequence
  Synthetic
gcagagaauguggacaggaaaagaaat

SEQ ID NO: 54740 - DNA, 21 bp, Artificial Sequence
  Synthetic
gctcatugccctctccttugg

SEQ ID NO: 54741 - DNA, 21 bp, Artificial Sequence
  Synthetic
ctgacccugccuaaaggaagt

SEQ ID NO: 54742 - DNA, 20 bp, Artificial Sequence
  Synthetic
acccacgucgattgcatcuc

SEQ ID NO: 54743 - DNA, 22 bp, Artificial Sequence
  Synthetic
acctttttaugcctccaccugt

SEQ ID NO: 54744 - DNA, 22 bp, Artificial Sequence
  Synthetic
cccagcautcagtgttttucgg

SEQ ID NO: 54745 - DNA, 27 bp, Artificial Sequence
  Synthetic
tctctgcgcuttattttcaugaggaat

SEQ ID NO: 54746 - DNA, 22 bp, Artificial Sequence
  Synthetic
ctctagccaagcuccaccttuc

SEQ ID NO: 54747 - DNA, 19 bp, Artificial Sequence
  Synthetic
ggtccagcutgtgcucgat

SEQ ID NO: 54748 - DNA, 21 bp, Artificial Sequence
  Synthetic
cgaagccgggcauaaagguaa

SEQ ID NO: 54749 - DNA, 27 bp, Artificial Sequence
  Synthetic
tccactcctugaaggatactcaguaat

SEQ ID NO: 54750 - DNA, 29 bp, Artificial Sequence
  Synthetic
tctcattcatgguagttaagcaagucaaa

SEQ ID NO: 54751 - DNA, 23 bp, Artificial Sequence
  Synthetic
tggtctgaggauttcctgttucc

SEQ ID NO: 54752 - DNA, 21 bp, Artificial Sequence
  Synthetic
acccacagaggagaaugguga

SEQ ID NO: 54753 - DNA, 28 bp, Artificial Sequence
  Synthetic
ccacagtcatgtutattccacgtctaut

SEQ ID NO: 54754 - DNA, 23 bp, Artificial Sequence
  Synthetic
caggaggctutagctggaactua

SEQ ID NO: 54755 - DNA, 23 bp, Artificial Sequence
  Synthetic
caatctgggauctgctccugaag

SEQ ID NO: 54756 - DNA, 22 bp, Artificial Sequence
  Synthetic
ccccacaaaggcaucggtatut

SEQ ID NO: 54757 - DNA, 28 bp, Artificial Sequence
  Synthetic
aatgactttggugatcagaaucagaagt

SEQ ID NO: 54758 - DNA, 21 bp, Artificial Sequence
  Synthetic
catcauaccaggctgcugact

SEQ ID NO: 54759 - DNA, 28 bp, Artificial Sequence
  Synthetic
gtctgcagugatttaattctttguagca

SEQ ID NO: 54760 - DNA, 32 bp, Artificial Sequence
  Synthetic
acctatcagtuaggattactttcctcuaagac

SEQ ID NO: 54761 - DNA, 18 bp, Artificial Sequence
  Synthetic
gcugcaggccaagaugga

SEQ ID NO: 54762 - DNA, 23 bp, Artificial Sequence
  Synthetic
gttgaccaggauctccatctuca

SEQ ID NO: 54763 - DNA, 28 bp, Artificial Sequence
  Synthetic
gagagtgagagguaccacaatcttttua

SEQ ID NO: 54764 - DNA, 24 bp, Artificial Sequence
  Synthetic
cagaaaaccuggtgagaaguaggt

SEQ ID NO: 54765 - DNA, 23 bp, Artificial Sequence
  Synthetic
tcttctcuagggaggtgatggug

SEQ ID NO: 54766 - DNA, 27 bp, Artificial Sequence
  Synthetic
ttgaattctttcucatagcatcugcct

SEQ ID NO: 54767 - DNA, 28 bp, Artificial Sequence
  Synthetic
gcattagtttgggutcatcttttgtuct

SEQ ID NO: 54768 - DNA, 27 bp, Artificial Sequence
  Synthetic
acttcttcauccaaaatccttgtucca

SEQ ID NO: 54769 - DNA, 28 bp, Artificial Sequence
  Synthetic
accactgttuctttgaagctuacaaaag

SEQ ID NO: 54770 - DNA, 24 bp, Artificial Sequence
  Synthetic
ccaagaaaccauatgctcacctug

SEQ ID NO: 54771 - DNA, 23 bp, Artificial Sequence
  Synthetic
tttggattgtguccgttgagcua

SEQ ID NO: 54772 - DNA, 18 bp, Artificial Sequence
  Synthetic
gcccucaccggttuagca

SEQ ID NO: 54773 - DNA, 25 bp, Artificial Sequence
  Synthetic
gggtgacttcutagatgagggttuc

SEQ ID NO: 54774 - DNA, 22 bp, Artificial Sequence
  Synthetic
caagcagaugcaaaccaaccua

SEQ ID NO: 54775 - DNA, 19 bp, Artificial Sequence
  Synthetic
ccgagccugagcagctauc

SEQ ID NO: 54776 - DNA, 24 bp, Artificial Sequence
  Synthetic
agtgtcctuttctcctcuccagat

SEQ ID NO: 54777 - DNA, 20 bp, Artificial Sequence
  Synthetic
gctccgaugttggccaucag

SEQ ID NO: 54778 - DNA, 25 bp, Artificial Sequence
  Synthetic
tgatcttcatucaggtggtcaaugg

SEQ ID NO: 54779 - DNA, 23 bp, Artificial Sequence
  Synthetic
aatctggccaguttactctgcut

SEQ ID NO: 54780 - DNA, 20 bp, Artificial Sequence
  Synthetic
ccgtgtccacugcaccauac

SEQ ID NO: 54781 - DNA, 22 bp, Artificial Sequence
  Synthetic
atggctgtgugcttctatcucc

SEQ ID NO: 54782 - DNA, 25 bp, Artificial Sequence
  Synthetic
gtaaaccggutgttactaccucact

SEQ ID NO: 54783 - DNA, 27 bp, Artificial Sequence
  Synthetic
tcatggacatucaagacaagaaaguct

SEQ ID NO: 54784 - DNA, 26 bp, Artificial Sequence
  Synthetic
tcaatttttgtugagagggaggtgut

SEQ ID NO: 54785 - DNA, 27 bp, Artificial Sequence
  Synthetic
ccgtttgttcugaattctactggagut

SEQ ID NO: 54786 - DNA, 28 bp, Artificial Sequence
  Synthetic
aaagaaccagaaauacaattgagccuct

SEQ ID NO: 54787 - DNA, 28 bp, Artificial Sequence
  Synthetic
aaggcagcttgauaactgatcctauaac

SEQ ID NO: 54788 - DNA, 22 bp, Artificial Sequence
  Synthetic
cttttgtucgaaagctggccut

SEQ ID NO: 54789 - DNA, 26 bp, Artificial Sequence
  Synthetic
gaccatgcgaguatattgctgtguat

SEQ ID NO: 54790 - DNA, 23 bp, Artificial Sequence
  Synthetic
cctgtgaaaacgccaugggaaua

SEQ ID NO: 54791 - DNA, 26 bp, Artificial Sequence
  Synthetic
gggacgacatucattgttttgatgut

SEQ ID NO: 54792 - DNA, 21 bp, Artificial Sequence
  Synthetic
ggtaacacuctgaccagcugt

SEQ ID NO: 54793 - DNA, 21 bp, Artificial Sequence
  Synthetic
ccagucaagggaggcucaaag

SEQ ID NO: 54794 - DNA, 21 bp, Artificial Sequence
  Synthetic
cagatgcuggctgcttcttuc

SEQ ID NO: 54795 - DNA, 23 bp, Artificial Sequence
  Synthetic
ggctagtgcugatgtgctcatut

SEQ ID NO: 54796 - DNA, 21 bp, Artificial Sequence
  Synthetic
cgacagagccgucctgttuac

SEQ ID NO: 54797 - DNA, 21 bp, Artificial Sequence
  Synthetic
atggacagaacugcaggucac

SEQ ID NO: 54798 - DNA, 26 bp, Artificial Sequence
  Synthetic
gtctctgatttguagttaccagcuga

SEQ ID NO: 54799 - DNA, 28 bp, Artificial Sequence
  Synthetic
agtaagtcucagaccaaatgctaatucc

SEQ ID NO: 54800 - DNA, 25 bp, Artificial Sequence
  Synthetic
tguatagttgattcaugccgggaag

SEQ ID NO: 54801 - DNA, 24 bp, Artificial Sequence
  Synthetic
ttgggaugttgaguacggaaaaca

SEQ ID NO: 54802 - DNA, 30 bp, Artificial Sequence
  Synthetic
cctgtaaattctgugaaaatcaagctctut

SEQ ID NO: 54803 - DNA, 25 bp, Artificial Sequence
  Synthetic
accttgtccautgaccatttgucat

SEQ ID NO: 54804 - DNA, 25 bp, Artificial Sequence
  Synthetic
gaaguacgagatataauccgcagca

SEQ ID NO: 54805 - DNA, 27 bp, Artificial Sequence
  Synthetic
aaaggcttugcaagtaggataaugact

SEQ ID NO: 54806 - DNA, 26 bp, Artificial Sequence
  Synthetic
cttaggtgaaacuggaccaatgguag

SEQ ID NO: 54807 - DNA, 26 bp, Artificial Sequence
  Synthetic
tgctctctctucagtactgtgguaaa

SEQ ID NO: 54808 - DNA, 25 bp, Artificial Sequence
  Synthetic
ggttatggttugacacatggucaca

SEQ ID NO: 54809 - DNA, 28 bp, Artificial Sequence
  Synthetic
agaugtaatgacaaacugaaacgaagga

SEQ ID NO: 54810 - DNA, 28 bp, Artificial Sequence
  Synthetic
tgatgutacttaatggtugaagccaaca

SEQ ID NO: 54811 - DNA, 26 bp, Artificial Sequence
  Synthetic
cuaagtctgtaggauagagccgaagt

SEQ ID NO: 54812 - DNA, 22 bp, Artificial Sequence
  Synthetic
gggaggtuggagatgtaguggt

SEQ ID NO: 54813 - DNA, 18 bp, Artificial Sequence
  Synthetic
gacagucccccagccaut

SEQ ID NO: 54814 - DNA, 27 bp, Artificial Sequence
  Synthetic
attgatagtcaccgugttggtacttut

SEQ ID NO: 54815 - DNA, 29 bp, Artificial Sequence
  Synthetic
cccatgtaatucaattctgtgttaaugcc

SEQ ID NO: 54816 - DNA, 21 bp, Artificial Sequence
  Synthetic
gctggagaugctgtggatgua

SEQ ID NO: 54817 - DNA, 28 bp, Artificial Sequence
  Synthetic
ggaagggtauagaattctgtcccauaga

SEQ ID NO: 54818 - DNA, 21 bp, Artificial Sequence
  Synthetic
ctggcaaggcaaaauagcugt

SEQ ID NO: 54819 - DNA, 26 bp, Artificial Sequence
  Synthetic
caccagcacuaagtgatatccaucat

SEQ ID NO: 54820 - DNA, 28 bp, Artificial Sequence
  Synthetic
agacatctgcttuctgccaaaattaaug

SEQ ID NO: 54821 - DNA, 28 bp, Artificial Sequence
  Synthetic
ccaatgcaacagacuttaaagaagtugt

SEQ ID NO: 54822 - DNA, 21 bp, Artificial Sequence
  Synthetic
gcgatttctucccagggucaa

SEQ ID NO: 54823 - DNA, 26 bp, Artificial Sequence
  Synthetic
tccctgatcucagaatgtcctttuct

SEQ ID NO: 54824 - DNA, 19 bp, Artificial Sequence
  Synthetic
gcgggauaggaggagguga

SEQ ID NO: 54825 - DNA, 18 bp, Artificial Sequence
  Synthetic
cuccgaggccaagcugaa

SEQ ID NO: 54826 - DNA, 28 bp, Artificial Sequence
  Synthetic
ttctagaaaguaacagtctgttcaacuc

SEQ ID NO: 54827 - DNA, 26 bp, Artificial Sequence
  Synthetic
gctgctaggaccaguttgtgaatauc

SEQ ID NO: 54828 - DNA, 30 bp, Artificial Sequence
  Synthetic
actgtttattcatttugcctgtaattgcut

SEQ ID NO: 54829 - DNA, 22 bp, Artificial Sequence
  Synthetic
aatgaugcaccagcagctuaga

SEQ ID NO: 54830 - DNA, 27 bp, Artificial Sequence
  Synthetic
gtttctaaacctcugttgcaagtgtut

SEQ ID NO: 54831 - DNA, 26 bp, Artificial Sequence
  Synthetic
caaagacaaaagugaggccttgaaua

SEQ ID NO: 54832 - DNA, 28 bp, Artificial Sequence
  Synthetic
ccagaatagttcuctaaacatggtcugt

SEQ ID NO: 54833 - DNA, 25 bp, Artificial Sequence
  Synthetic
tgaggtcauagacagcaagguacaa

SEQ ID NO: 54834 - DNA, 28 bp, Artificial Sequence
  Synthetic
ctacaggaguccttcttcatttucaaga

SEQ ID NO: 54835 - DNA, 24 bp, Artificial Sequence
  Synthetic
ccccgugccacaaaaauaaaagac

SEQ ID NO: 54836 - DNA, 25 bp, Artificial Sequence
  Synthetic
cttuaagggacaaagugagcacaga

SEQ ID NO: 54837 - DNA, 23 bp, Artificial Sequence
  Synthetic
gggauacagtgugaaaagcagca

SEQ ID NO: 54838 - DNA, 22 bp, Artificial Sequence
  Synthetic
atgcataatgguggtggtguca

SEQ ID NO: 54839 - DNA, 22 bp, Artificial Sequence
  Synthetic
gttcttcugaaggcagagggut

SEQ ID NO: 54840 - DNA, 21 bp, Artificial Sequence
  Synthetic
ggtauggcaaaggacugcaca

SEQ ID NO: 54841 - DNA, 24 bp, Artificial Sequence
  Synthetic
gctcagcucaccttttctttucca

SEQ ID NO: 54842 - DNA, 19 bp, Artificial Sequence
  Synthetic
gggctacuggcgtttcauc

SEQ ID NO: 54843 - DNA, 24 bp, Artificial Sequence
  Synthetic
gaggaagcugggatatctctcuct

SEQ ID NO: 54844 - DNA, 22 bp, Artificial Sequence
  Synthetic
gcagugtttcuccaagagccat

SEQ ID NO: 54845 - DNA, 26 bp, Artificial Sequence
  Synthetic
tgctgtcatcutaccatgttctucac

SEQ ID NO: 54846 - DNA, 28 bp, Artificial Sequence
  Synthetic
gaatatttgagtaaagugagttgccgut

SEQ ID NO: 54847 - DNA, 21 bp, Artificial Sequence
  Synthetic
ggctctcacutccccacaauc

SEQ ID NO: 54848 - DNA, 22 bp, Artificial Sequence
  Synthetic
agcaaggcugactuggacaaat

SEQ ID NO: 54849 - DNA, 27 bp, Artificial Sequence
  Synthetic
ttcccgaagttuaagagacatgatgut

SEQ ID NO: 54850 - DNA, 26 bp, Artificial Sequence
  Synthetic
cagttuaacacatcctuaccagagca

SEQ ID NO: 54851 - DNA, 19 bp, Artificial Sequence
  Synthetic
gacauggcctgugccaaac

SEQ ID NO: 54852 - DNA, 28 bp, Artificial Sequence
  Synthetic
agtactgucaaaaacaacaacugagaca

SEQ ID NO: 54853 - DNA, 21 bp, Artificial Sequence
  Synthetic
ccagccaacaucacccugaag

SEQ ID NO: 54854 - DNA, 26 bp, Artificial Sequence
  Synthetic
tcttcatgatgtutccttcgtaggug

SEQ ID NO: 54855 - DNA, 23 bp, Artificial Sequence
  Synthetic
aggccuagcaagagaaugagaat

SEQ ID NO: 54856 - DNA, 24 bp, Artificial Sequence
  Synthetic
tcttcttctcaugtctccgguagg

SEQ ID NO: 54857 - DNA, 27 bp, Artificial Sequence
  Synthetic
catttttcgcatuatgatcctcgtugt

SEQ ID NO: 54858 - DNA, 22 bp, Artificial Sequence
  Synthetic
ccgggaaaaaguggtcauagca

SEQ ID NO: 54859 - DNA, 23 bp, Artificial Sequence
  Synthetic
gaaggtgtggaucacagtcauct

SEQ ID NO: 54860 - DNA, 27 bp, Artificial Sequence
  Synthetic
tggatatactcuaccctgcgatttuct

SEQ ID NO: 54861 - DNA, 22 bp, Artificial Sequence
  Synthetic
tggttcttugagcaacauggga

SEQ ID NO: 54862 - DNA, 28 bp, Artificial Sequence
  Synthetic
aacttgaggutgctaactaugaaacact

SEQ ID NO: 54863 - DNA, 23 bp, Artificial Sequence
  Synthetic
ccttcagcacutctttugagcac

SEQ ID NO: 54864 - DNA, 22 bp, Artificial Sequence
  Synthetic
gagcaaagaguacccgtgguaa

SEQ ID NO: 54865 - DNA, 28 bp, Artificial Sequence
  Synthetic
ggagcgtgttugtaattagggaaacuaa

SEQ ID NO: 54866 - DNA, 24 bp, Artificial Sequence
  Synthetic
gccagagaagaaacutccacauct

SEQ ID NO: 54867 - DNA, 18 bp, Artificial Sequence
  Synthetic
cgagcagaucgcccucaa

SEQ ID NO: 54868 - DNA, 20 bp, Artificial Sequence
  Synthetic
gagagugggtgugagcagaa

SEQ ID NO: 54869 - DNA, 20 bp, Artificial Sequence
  Synthetic
gcaagucaagagccuccaga

SEQ ID NO: 54870 - DNA, 20 bp, Artificial Sequence
  Synthetic
gggttcucagactccuggct

SEQ ID NO: 54871 - DNA, 25 bp, Artificial Sequence
  Synthetic
ccttctatgacugtgccatctucac

SEQ ID NO: 54872 - DNA, 21 bp, Artificial Sequence
  Synthetic
cgctgctucagcttgaactuc

SEQ ID NO: 54873 - DNA, 28 bp, Artificial Sequence
  Synthetic
ggatctcactuacccatcatacttctut

SEQ ID NO: 54874 - DNA, 24 bp, Artificial Sequence
  Synthetic
gagaggucaagaccagatggtcua

SEQ ID NO: 54875 - DNA, 24 bp, Artificial Sequence
  Synthetic
ctcatcaccacuctcttccatcuc

SEQ ID NO: 54876 - DNA, 21 bp, Artificial Sequence
  Synthetic
ggctgggaucagggagatuct

SEQ ID NO: 54877 - DNA, 22 bp, Artificial Sequence
  Synthetic
tcctgaagggaacugggauagg

SEQ ID NO: 54878 - DNA, 26 bp, Artificial Sequence
  Synthetic
atgctgtaacucagacttcctgttut

SEQ ID NO: 54879 - DNA, 22 bp, Artificial Sequence
  Synthetic
guggaccatatcugggaaggac

SEQ ID NO: 54880 - DNA, 26 bp, Artificial Sequence
  Synthetic
tggttgagcaaccutaccttuaaaga

SEQ ID NO: 54881 - DNA, 27 bp, Artificial Sequence
  Synthetic
gctagtggauaagtttttggaggaugt

SEQ ID NO: 54882 - DNA, 24 bp, Artificial Sequence
  Synthetic
catacgatcagcaauaccagggua

SEQ ID NO: 54883 - DNA, 23 bp, Artificial Sequence
  Synthetic
ccttgaccugaatgcactgugat

SEQ ID NO: 54884 - DNA, 21 bp, Artificial Sequence
  Synthetic
acaaaaugggtcucgccaaga

SEQ ID NO: 54885 - DNA, 28 bp, Artificial Sequence
  Synthetic
gggaaaacaugactgtacugaaaaacaa

SEQ ID NO: 54886 - DNA, 22 bp, Artificial Sequence
  Synthetic
ccuaatctcaucaagcccagca

SEQ ID NO: 54887 - DNA, 24 bp, Artificial Sequence
  Synthetic
cgaggaagaguaacgtgtgttuct

SEQ ID NO: 54888 - DNA, 33 bp, Artificial Sequence
  Synthetic
aaaaatgttaactugaacaatgcaagaaaaaua

SEQ ID NO: 54889 - DNA, 24 bp, Artificial Sequence
  Synthetic
gctttcctccuggacctcaaatuc

SEQ ID NO: 54890 - DNA, 21 bp, Artificial Sequence
  Synthetic
ctggaagaugagctggtguca

SEQ ID NO: 54891 - DNA, 28 bp, Artificial Sequence
  Synthetic
gaaaaggtaaactuccttcattgctcuc

SEQ ID NO: 54892 - DNA, 21 bp, Artificial Sequence
  Synthetic
ccacagcccugtttctgtgut

SEQ ID NO: 54893 - DNA, 21 bp, Artificial Sequence
  Synthetic
ctgatguaggcagcacccaua

SEQ ID NO: 54894 - DNA, 21 bp, Artificial Sequence
  Synthetic
aagcaggcgcuaagaucacaa

SEQ ID NO: 54895 - DNA, 22 bp, Artificial Sequence
  Synthetic
ggtagguacctgaucccggaag

SEQ ID NO: 54896 - DNA, 24 bp, Artificial Sequence
  Synthetic
ctcagaagcuggtcgtaaaacuga

SEQ ID NO: 54897 - DNA, 23 bp, Artificial Sequence
  Synthetic
tccacccccacuagttttugaac

SEQ ID NO: 54898 - DNA, 22 bp, Artificial Sequence
  Synthetic
gatctctccaucctgacccugt

SEQ ID NO: 54899 - DNA, 22 bp, Artificial Sequence
  Synthetic
gctgcagagcuctccttgaaut

SEQ ID NO: 54900 - DNA, 19 bp, Artificial Sequence
  Synthetic
ccugcacgcaaatgugagt

SEQ ID NO: 54901 - DNA, 20 bp, Artificial Sequence
  Synthetic
gcugagggagccccatatuc

SEQ ID NO: 54902 - DNA, 19 bp, Artificial Sequence
  Synthetic
cucccagccgaggaaugag

SEQ ID NO: 54903 - DNA, 21 bp, Artificial Sequence
  Synthetic
cctctcacagguctgtctcug

SEQ ID NO: 54904 - DNA, 24 bp, Artificial Sequence
  Synthetic
tgacttcactaugactcctgcugt

SEQ ID NO: 54905 - DNA, 20 bp, Artificial Sequence
  Synthetic
ggagcaagcuccacgagaug

SEQ ID NO: 54906 - DNA, 21 bp, Artificial Sequence
  Synthetic
gggauacauggacacacagca

SEQ ID NO: 54907 - DNA, 22 bp, Artificial Sequence
  Synthetic
ttttgcagugcggcuaaagaag

SEQ ID NO: 54908 - DNA, 24 bp, Artificial Sequence
  Synthetic
caautctccagcucaaagcagaac

SEQ ID NO: 54909 - DNA, 27 bp, Artificial Sequence
  Synthetic
gccttggtttcuaagtttctagttucc

SEQ ID NO: 54910 - DNA, 26 bp, Artificial Sequence
  Synthetic
aagcccaagagaagcauaaaagguaa

SEQ ID NO: 54911 - DNA, 26 bp, Artificial Sequence
  Synthetic
gtggaagatacugatgctgatagcug

SEQ ID NO: 54912 - DNA, 20 bp, Artificial Sequence
  Synthetic
ggcagcauttccuggaacga

SEQ ID NO: 54913 - DNA, 20 bp, Artificial Sequence
  Synthetic
cucatucacaggagcccaca

SEQ ID NO: 54914 - DNA, 26 bp, Artificial Sequence
  Synthetic
ctgtcgcaucagcttgtatttgtauc

SEQ ID NO: 54915 - DNA, 25 bp, Artificial Sequence
  Synthetic
tgccttccagguaaggttaggtaut

SEQ ID NO: 54916 - DNA, 22 bp, Artificial Sequence
  Synthetic
gtcagatcacutgcctgcauct

SEQ ID NO: 54917 - DNA, 28 bp, Artificial Sequence
  Synthetic
tcgtcttcccaucaagagtuaaaaacat

SEQ ID NO: 54918 - DNA, 21 bp, Artificial Sequence
  Synthetic
tcactccaaucagaccgggua

SEQ ID NO: 54919 - DNA, 21 bp, Artificial Sequence
  Synthetic
gatccagccaaucacctggut

SEQ ID NO: 54920 - DNA, 27 bp, Artificial Sequence
  Synthetic
tgtttggagaugttaagcucaaaagga

SEQ ID NO: 54921 - DNA, 22 bp, Artificial Sequence
  Synthetic
catactgggaugtggcgauagg

SEQ ID NO: 54922 - DNA, 23 bp, Artificial Sequence
  Synthetic
gggacttugaagctcaucagaac

SEQ ID NO: 54923 - DNA, 25 bp, Artificial Sequence
  Synthetic
aaagcttgctuccattgagggtaua

SEQ ID NO: 54924 - DNA, 26 bp, Artificial Sequence
  Synthetic
gcatctgtaucaggcaaagtcauaga

SEQ ID NO: 54925 - DNA, 29 bp, Artificial Sequence
  Synthetic
gtagctaactaacutcagaacaccaacut

SEQ ID NO: 54926 - DNA, 26 bp, Artificial Sequence
  Synthetic
tgtcatttggugagtaactgcatuca

SEQ ID NO: 54927 - DNA, 22 bp, Artificial Sequence
  Synthetic
cgctcacagutgatgagaaugg

SEQ ID NO: 54928 - DNA, 20 bp, Artificial Sequence
  Synthetic
aacugcaagcccctucagaa

SEQ ID NO: 54929 - DNA, 21 bp, Artificial Sequence
  Synthetic
ctggctttuatgctgctcugg

SEQ ID NO: 54930 - DNA, 21 bp, Artificial Sequence
  Synthetic
ctctccugacgacatguccac

SEQ ID NO: 54931 - DNA, 20 bp, Artificial Sequence
  Synthetic
gctucagcccaagctttguc

SEQ ID NO: 54932 - DNA, 21 bp, Artificial Sequence
  Synthetic
gaccccacuacagcagcttut

SEQ ID NO: 54933 - DNA, 20 bp, Artificial Sequence
  Synthetic
cctcatgggugtccccttug

SEQ ID NO: 54934 - DNA, 27 bp, Artificial Sequence
  Synthetic
gtataggtatctguggttgatgcagut

SEQ ID NO: 54935 - DNA, 26 bp, Artificial Sequence
  Synthetic
cagtactgactutggtatgtgtgtuc

SEQ ID NO: 54936 - DNA, 24 bp, Artificial Sequence
  Synthetic
gaaaaaccuacagaccuggagaca

SEQ ID NO: 54937 - DNA, 22 bp, Artificial Sequence
  Synthetic
ggcgtttcagcuaaacccaaut

SEQ ID NO: 54938 - DNA, 23 bp, Artificial Sequence
  Synthetic
gtgtgtatgtgugtgctgaggua

SEQ ID NO: 54939 - DNA, 24 bp, Artificial Sequence
  Synthetic
cacttcaaagcuaacatgtugcca

SEQ ID NO: 54940 - DNA, 23 bp, Artificial Sequence
  Synthetic
ctgccattguctcaccgtaugaa

SEQ ID NO: 54941 - DNA, 28 bp, Artificial Sequence
  Synthetic
taaaacaaaagcacauaacugaaaacca

SEQ ID NO: 54942 - DNA, 28 bp, Artificial Sequence
  Synthetic
tgggtgtatcuggtgttgaaaattcuaa

SEQ ID NO: 54943 - DNA, 24 bp, Artificial Sequence
  Synthetic
tcactauccccatgacugggaaat

SEQ ID NO: 54944 - DNA, 33 bp, Artificial Sequence
  Synthetic
tattttctgtctttacutgttcctttattcuct

SEQ ID NO: 54945 - DNA, 24 bp, Artificial Sequence
  Synthetic
gcagctgacutgactttgctaaug

SEQ ID NO: 54946 - DNA, 25 bp, Artificial Sequence
  Synthetic
tgagagatatuccaacgtgcaagug

SEQ ID NO: 54947 - DNA, 28 bp, Artificial Sequence
  Synthetic
tccacagaactuataaaaacctttgugt

SEQ ID NO: 54948 - DNA, 22 bp, Artificial Sequence
  Synthetic
gccaccgtuttccttttagcut

SEQ ID NO: 54949 - DNA, 28 bp, Artificial Sequence
  Synthetic
ttgcctccautagttggaaaatugaaac

SEQ ID NO: 54950 - DNA, 27 bp, Artificial Sequence
  Synthetic
tattagagcttuctttgagtccucagt

SEQ ID NO: 54951 - DNA, 26 bp, Artificial Sequence
  Synthetic
gttgtgatcccugattccatttctug

SEQ ID NO: 54952 - DNA, 21 bp, Artificial Sequence
  Synthetic
ccacacucagctgatucacca

SEQ ID NO: 54953 - DNA, 24 bp, Artificial Sequence
  Synthetic
ctccccutggacatatucgagaag

SEQ ID NO: 54954 - DNA, 18 bp, Artificial Sequence
  Synthetic
cgccaccacugcgtauct

SEQ ID NO: 54955 - DNA, 17 bp, Artificial Sequence
  Synthetic
cccgaaggutggcgugt

SEQ ID NO: 54956 - DNA, 20 bp, Artificial Sequence
  Synthetic
gtccgtacuccacccaaguc

SEQ ID NO: 54957 - DNA, 18 bp, Artificial Sequence
  Synthetic
gcccuaccctuccaggca

SEQ ID NO: 54958 - DNA, 24 bp, Artificial Sequence
  Synthetic
caatccagtacuctcctgtgguag

SEQ ID NO: 54959 - DNA, 20 bp, Artificial Sequence
  Synthetic
ctgccgugacctcaagaugt

SEQ ID NO: 54960 - DNA, 28 bp, Artificial Sequence
  Synthetic
gtccatgaaatagaugaagacagtccut

SEQ ID NO: 54961 - DNA, 27 bp, Artificial Sequence
  Synthetic
cctggaataguccactttgtagtagug

SEQ ID NO: 54962 - DNA, 18 bp, Artificial Sequence
  Synthetic
gggcagcuacggcaucag

SEQ ID NO: 54963 - DNA, 17 bp, Artificial Sequence
  Synthetic
ctcagcguggucagcgt

SEQ ID NO: 54964 - DNA, 20 bp, Artificial Sequence
  Synthetic
cgtctuccacctgagctuca

SEQ ID NO: 54965 - DNA, 22 bp, Artificial Sequence
  Synthetic
ggaacucgaagacgaagtccuc

SEQ ID NO: 54966 - DNA, 22 bp, Artificial Sequence
  Synthetic
tcattggtguttcccacauggt

SEQ ID NO: 54967 - DNA, 20 bp, Artificial Sequence
  Synthetic
cggagatugttgcggtugat

SEQ ID NO: 54968 - DNA, 25 bp, Artificial Sequence
  Synthetic
catttttgatgguctctgcctcuct

SEQ ID NO: 54969 - DNA, 28 bp, Artificial Sequence
  Synthetic
cagtggcataagguacttaccattcuat

SEQ ID NO: 54970 - DNA, 26 bp, Artificial Sequence
  Synthetic
tgatatcaaugacaacgaaccagugt

SEQ ID NO: 54971 - DNA, 29 bp, Artificial Sequence
  Synthetic
actgctttcttaucatttgttctguaggt

SEQ ID NO: 54972 - DNA, 25 bp, Artificial Sequence
  Synthetic
tttttctaacuggcctcaguggaaa

SEQ ID NO: 54973 - DNA, 22 bp, Artificial Sequence
  Synthetic
ttccttggccauacctccuact

SEQ ID NO: 54974 - DNA, 22 bp, Artificial Sequence
  Synthetic
gtctagaggguggtggactuca

SEQ ID NO: 54975 - DNA, 20 bp, Artificial Sequence
  Synthetic
gttacccccucagggtcuct

SEQ ID NO: 54976 - DNA, 19 bp, Artificial Sequence
  Synthetic
gccccgaggutcggatcua

SEQ ID NO: 54977 - DNA, 21 bp, Artificial Sequence
  Synthetic
gcaagctugaagagcccucat

SEQ ID NO: 54978 - DNA, 20 bp, Artificial Sequence
  Synthetic
gaggtctgucgctgactcut

SEQ ID NO: 54979 - DNA, 18 bp, Artificial Sequence
  Synthetic
cucagaccccgcacucac

SEQ ID NO: 54980 - DNA, 17 bp, Artificial Sequence
  Synthetic
gggccaggucgtugagg

SEQ ID NO: 54981 - DNA, 18 bp, Artificial Sequence
  Synthetic
tggccgauggagcugaag

SEQ ID NO: 54982 - DNA, 21 bp, Artificial Sequence
  Synthetic
tgggcccccucatatctcaut

SEQ ID NO: 54983 - DNA, 19 bp, Artificial Sequence
  Synthetic
aggccaguacctggtccut

SEQ ID NO: 54984 - DNA, 23 bp, Artificial Sequence
  Synthetic
acctgggcuttgttgtcttuagt

SEQ ID NO: 54985 - DNA, 28 bp, Artificial Sequence
  Synthetic
gatttaattgtuacgcttttcccccuaa

SEQ ID NO: 54986 - DNA, 18 bp, Artificial Sequence
  Synthetic
tcccauggagcccuacca

SEQ ID NO: 54987 - DNA, 18 bp, Artificial Sequence
  Synthetic
tcctgcacugcgctguag

SEQ ID NO: 54988 - DNA, 21 bp, Artificial Sequence
  Synthetic
ccugactaccaucagcacgac

SEQ ID NO: 54989 - DNA, 21 bp, Artificial Sequence
  Synthetic
tcccgcuccagaaagttccua

SEQ ID NO: 54990 - DNA, 17 bp, Artificial Sequence
  Synthetic
gcctcagcccugccauc

SEQ ID NO: 54991 - DNA, 23 bp, Artificial Sequence
  Synthetic
ggagtttugggaatgugggagaa

SEQ ID NO: 54992 - DNA, 23 bp, Artificial Sequence
  Synthetic
tcatgagccugttggagaaagug

SEQ ID NO: 54993 - DNA, 22 bp, Artificial Sequence
  Synthetic
ccctctcacucctgcctatcua

SEQ ID NO: 54994 - DNA, 22 bp, Artificial Sequence
  Synthetic
cgagacaagcaggagugagaug

SEQ ID NO: 54995 - DNA, 20 bp, Artificial Sequence
  Synthetic
ggcccgauttcctccctuag

SEQ ID NO: 54996 - DNA, 20 bp, Artificial Sequence
  Synthetic
acagtcgcucaagacaggug

SEQ ID NO: 54997 - DNA, 22 bp, Artificial Sequence
  Synthetic
cggtacacgguatgcagcauag

SEQ ID NO: 54998 - DNA, 19 bp, Artificial Sequence
  Synthetic
gugcccgcuacacagagat

SEQ ID NO: 54999 - DNA, 28 bp, Artificial Sequence
  Synthetic
gttgttgacgaugattctcaggatatuc

SEQ ID NO: 55000 - DNA, 21 bp, Artificial Sequence
  Synthetic
ggaggtgacuggagtcugaca

SEQ ID NO: 55001 - DNA, 20 bp, Artificial Sequence
  Synthetic
gacgtugggaaccctccuaa

SEQ ID NO: 55002 - DNA, 20 bp, Artificial Sequence
  Synthetic
gcggugaggatgatctugcc

SEQ ID NO: 55003 - DNA, 21 bp, Artificial Sequence
  Synthetic
gctgcacaguctccacttcuc

SEQ ID NO: 55004 - DNA, 21 bp, Artificial Sequence
  Synthetic
tctccaggucctcaggactuc

SEQ ID NO: 55005 - DNA, 22 bp, Artificial Sequence
  Synthetic
gcgtcauaacccctggaaugat

SEQ ID NO: 55006 - DNA, 21 bp, Artificial Sequence
  Synthetic
gacaacctccugtcccgttua

SEQ ID NO: 55007 - DNA, 21 bp, Artificial Sequence
  Synthetic
ccttgaccgugcggatguaat

SEQ ID NO: 55008 - DNA, 20 bp, Artificial Sequence
  Synthetic
cuggauggacagcggaagaa

SEQ ID NO: 55009 - DNA, 20 bp, Artificial Sequence
  Synthetic
gggagtcugacctcuccgaa

SEQ ID NO: 55010 - DNA, 22 bp, Artificial Sequence
  Synthetic
ggactagaaaccucgcatccut

SEQ ID NO: 55011 - DNA, 22 bp, Artificial Sequence
  Synthetic
gcctgguctttatccugaagcc

SEQ ID NO: 55012 - DNA, 22 bp, Artificial Sequence
  Synthetic
gttggccccaugtttctcaaug

SEQ ID NO: 55013 - DNA, 25 bp, Artificial Sequence
  Synthetic
tcttaactgtggcutggatctgtug

SEQ ID NO: 55014 - DNA, 19 bp, Artificial Sequence
  Synthetic
ggaccagcaagucggcuac

SEQ ID NO: 55015 - DNA, 24 bp, Artificial Sequence
  Synthetic
atttctcatgcucatccccatcuc

SEQ ID NO: 55016 - DNA, 20 bp, Artificial Sequence
  Synthetic
gucctguacagcgagagcat

SEQ ID NO: 55017 - DNA, 19 bp, Artificial Sequence
  Synthetic
cuacagcccggactgugac

SEQ ID NO: 55018 - DNA, 23 bp, Artificial Sequence
  Synthetic
actagattuggccgcattgaugt

SEQ ID NO: 55019 - DNA, 26 bp, Artificial Sequence
  Synthetic
acaaatuaagaacacgacctcauggt

SEQ ID NO: 55020 - DNA, 23 bp, Artificial Sequence
  Synthetic
catgtgcauccgaatatgtugct

SEQ ID NO: 55021 - DNA, 22 bp, Artificial Sequence
  Synthetic
ctgtcagagcuccctcaagaug

SEQ ID NO: 55022 - DNA, 23 bp, Artificial Sequence
  Synthetic
agccaaagutgatgcugagaact

SEQ ID NO: 55023 - DNA, 26 bp, Artificial Sequence
  Synthetic
gtggccttcgautcttctagatucaa

SEQ ID NO: 55024 - DNA, 21 bp, Artificial Sequence
  Synthetic
ttggcagaauttcacgugcag

SEQ ID NO: 55025 - DNA, 23 bp, Artificial Sequence
  Synthetic
tttacagaggucgcagagggaua

SEQ ID NO: 55026 - DNA, 20 bp, Artificial Sequence
  Synthetic
ccacgguccctcgatttcug

SEQ ID NO: 55027 - DNA, 21 bp, Artificial Sequence
  Synthetic
caggaaugaaccccttgccut

SEQ ID NO: 55028 - DNA, 25 bp, Artificial Sequence
  Synthetic
gcccagcaacutactcatcttuact

SEQ ID NO: 55029 - DNA, 28 bp, Artificial Sequence
  Synthetic
gtaaauacagagcttguagggaaaggaa

SEQ ID NO: 55030 - DNA, 23 bp, Artificial Sequence
  Synthetic
aaagggtcutaccaagatuggca

SEQ ID NO: 55031 - DNA, 22 bp, Artificial Sequence
  Synthetic
agggcatauccagctcctcuac

SEQ ID NO: 55032 - DNA, 21 bp, Artificial Sequence
  Synthetic
ggtcacagcugcgtctaacug

SEQ ID NO: 55033 - DNA, 21 bp, Artificial Sequence
  Synthetic
agugataccacugcagaccct

SEQ ID NO: 55034 - DNA, 18 bp, Artificial Sequence
  Synthetic
gggccuctcgtccucact

SEQ ID NO: 55035 - DNA, 17 bp, Artificial Sequence
  Synthetic
cctcgguccgcatccug

SEQ ID NO: 55036 - DNA, 28 bp, Artificial Sequence
  Synthetic
gttcagccaaguagaatttgacatctuc

SEQ ID NO: 55037 - DNA, 32 bp, Artificial Sequence
  Synthetic
agtgattggttgacugattagataatttugct

SEQ ID NO: 55038 - DNA, 23 bp, Artificial Sequence
  Synthetic
gggatttugagggatgaggucaa

SEQ ID NO: 55039 - DNA, 27 bp, Artificial Sequence
  Synthetic
ttaacaugggcaccaaaaagaattugt

SEQ ID NO: 55040 - DNA, 28 bp, Artificial Sequence
  Synthetic
tctcccctcuctaagtaaaaatguaccc

SEQ ID NO: 55041 - DNA, 27 bp, Artificial Sequence
  Synthetic
tgggttgtcugttatttctgauggaat

SEQ ID NO: 55042 - DNA, 27 bp, Artificial Sequence
  Synthetic
aaaggacaacaaugtttacaatgugct

SEQ ID NO: 55043 - DNA, 23 bp, Artificial Sequence
  Synthetic
ggagaaatugcgcctcugaaaga

SEQ ID NO: 55044 - DNA, 24 bp, Artificial Sequence
  Synthetic
ggaggtgacagcuatccagtuact

SEQ ID NO: 55045 - DNA, 27 bp, Artificial Sequence
  Synthetic
attacttgaaggucaatgctctcctut

SEQ ID NO: 55046 - DNA, 24 bp, Artificial Sequence
  Synthetic
cccttttctucctacctaccucca

SEQ ID NO: 55047 - DNA, 21 bp, Artificial Sequence
  Synthetic
tgacaagcagutggcagctua

SEQ ID NO: 55048 - DNA, 21 bp, Artificial Sequence
  Synthetic
tctgcactguttcagctgcut

SEQ ID NO: 55049 - DNA, 25 bp, Artificial Sequence
  Synthetic
ccagtaatgccutataacgggtcuc

SEQ ID NO: 55050 - DNA, 20 bp, Artificial Sequence
  Synthetic
gccaaagcccucacucaaac

SEQ ID NO: 55051 - DNA, 23 bp, Artificial Sequence
  Synthetic
tgctggtcagugaacactcttut

SEQ ID NO: 55052 - DNA, 24 bp, Artificial Sequence
  Synthetic
gcggctcautgttattctugacaa

SEQ ID NO: 55053 - DNA, 26 bp, Artificial Sequence
  Synthetic
ctctaacagaugctaagaaugcacca

SEQ ID NO: 55054 - DNA, 23 bp, Artificial Sequence
  Synthetic
aacacgtaaugagtgcccgtuat

SEQ ID NO: 55055 - DNA, 25 bp, Artificial Sequence
  Synthetic
gccagtccagucaaaacgactttua

SEQ ID NO: 55056 - DNA, 26 bp, Artificial Sequence
  Synthetic
agtcaaaaagtggucttatccccauc

SEQ ID NO: 55057 - DNA, 27 bp, Artificial Sequence
  Synthetic
accacacaaagaacutatcctccatuc

SEQ ID NO: 55058 - DNA, 21 bp, Artificial Sequence
  Synthetic
acgagaaccagcgacucttug

SEQ ID NO: 55059 - DNA, 23 bp, Artificial Sequence
  Synthetic
ggagaugauggagagggaaagga

SEQ ID NO: 55060 - DNA, 20 bp, Artificial Sequence
  Synthetic
acaggcagutgaagtucgct

SEQ ID NO: 55061 - DNA, 26 bp, Artificial Sequence
  Synthetic
ccaaagtatgaaguacccgtccaaug

SEQ ID NO: 55062 - DNA, 23 bp, Artificial Sequence
  Synthetic
ctttcctctcuccactcccauct

SEQ ID NO: 55063 - DNA, 21 bp, Artificial Sequence
  Synthetic
caccctcauctccccaactuc

SEQ ID NO: 55064 - DNA, 20 bp, Artificial Sequence
  Synthetic
cccgcauaccatctgcugac

SEQ ID NO: 55065 - DNA, 20 bp, Artificial Sequence
  Synthetic
tcgcuaccccttacctucca

SEQ ID NO: 55066 - DNA, 25 bp, Artificial Sequence
  Synthetic
gctcagcugaagatagtgacttuga

SEQ ID NO: 55067 - DNA, 23 bp, Artificial Sequence
  Synthetic
tgcagttacguaggctcctttut

SEQ ID NO: 55068 - DNA, 23 bp, Artificial Sequence
  Synthetic
gagtccaagutaaagcugaggca

SEQ ID NO: 55069 - DNA, 24 bp, Artificial Sequence
  Synthetic
ggcttaggaccuccatcttuacca

SEQ ID NO: 55070 - DNA, 22 bp, Artificial Sequence
  Synthetic
cagtgccuggaggtatggatug

SEQ ID NO: 55071 - DNA, 29 bp, Artificial Sequence
  Synthetic
cacttagatgaatuctttccttcctccut

SEQ ID NO: 55072 - DNA, 25 bp, Artificial Sequence
  Synthetic
cctggccatuaacatgaagtttgut

SEQ ID NO: 55073 - DNA, 22 bp, Artificial Sequence
  Synthetic
ccataccaagaggguggcaaug

SEQ ID NO: 55074 - DNA, 28 bp, Artificial Sequence
  Synthetic
aacaaacaatttcugcacaactgatuct

SEQ ID NO: 55075 - DNA, 23 bp, Artificial Sequence
  Synthetic
tgttguaaccaccatgactugct

SEQ ID NO: 55076 - DNA, 22 bp, Artificial Sequence
  Synthetic
gactccagguattccatggcut

SEQ ID NO: 55077 - DNA, 25 bp, Artificial Sequence
  Synthetic
ggagaagactagutccttgccttuc

SEQ ID NO: 55078 - DNA, 22 bp, Artificial Sequence
  Synthetic
caccgtttutgagctggugaat

SEQ ID NO: 55079 - DNA, 25 bp, Artificial Sequence
  Synthetic
ctgaatcctaacugctgaagtcugt

SEQ ID NO: 55080 - DNA, 26 bp, Artificial Sequence
  Synthetic
ttcaggagaacaaggcutttcttcut

SEQ ID NO: 55081 - DNA, 25 bp, Artificial Sequence
  Synthetic
gaacaaggccauaaatgcaatcuca

SEQ ID NO: 55082 - DNA, 26 bp, Artificial Sequence
  Synthetic
ggaaattggaaaacugggtguaacct

SEQ ID NO: 55083 - DNA, 26 bp, Artificial Sequence
  Synthetic
tcacugtgggtaauaaaaaggcaagt

SEQ ID NO: 55084 - DNA, 28 bp, Artificial Sequence
  Synthetic
ccttataagcaagcutgtaactcgguat

SEQ ID NO: 55085 - DNA, 23 bp, Artificial Sequence
  Synthetic
gttgcctutaggtcctuccagag

SEQ ID NO: 55086 - DNA, 27 bp, Artificial Sequence
  Synthetic
cccatggaaaucctaaaggauagaagg

SEQ ID NO: 55087 - DNA, 28 bp, Artificial Sequence
  Synthetic
cacaggaccaucatatacaatcagtgut

SEQ ID NO: 55088 - DNA, 24 bp, Artificial Sequence
  Synthetic
gttgcacaattuggtcaaggcuat

SEQ ID NO: 55089 - DNA, 28 bp, Artificial Sequence
  Synthetic
tttcagtgtcuggagcatttcagauaaa

SEQ ID NO: 55090 - DNA, 27 bp, Artificial Sequence
  Synthetic
accuttgtauggaagcgaaaagaaaga

SEQ ID NO: 55091 - DNA, 25 bp, Artificial Sequence
  Synthetic
gccaaaaggaaautccagaagtgut

SEQ ID NO: 55092 - DNA, 26 bp, Artificial Sequence
  Synthetic
agtgtcgauacattcgtgatatugct

SEQ ID NO: 55093 - DNA, 23 bp, Artificial Sequence
  Synthetic
tgacaaugcaaaaggtggtgtug

SEQ ID NO: 55094 - DNA, 21 bp, Artificial Sequence
  Synthetic
ctggccaugggtgaccttaut

SEQ ID NO: 55095 - DNA, 27 bp, Artificial Sequence
  Synthetic
tctcagtcauaaagcagacctgttuac

SEQ ID NO: 55096 - DNA, 22 bp, Artificial Sequence
  Synthetic
ccagaauttctcacugggaggt

SEQ ID NO: 55097 - DNA, 26 bp, Artificial Sequence
  Synthetic
aattattcagaaugctgcggtttucc

SEQ ID NO: 55098 - DNA, 23 bp, Artificial Sequence
  Synthetic
agtactgugggaacaucacagat

SEQ ID NO: 55099 - DNA, 23 bp, Artificial Sequence
  Synthetic
acctcttuggccgattcagaaut

SEQ ID NO: 55100 - DNA, 26 bp, Artificial Sequence
  Synthetic
caccagggaauttcaaaatgctuacc

SEQ ID NO: 55101 - DNA, 28 bp, Artificial Sequence
  Synthetic
cattatctctgtaugccttggcaattua

SEQ ID NO: 55102 - DNA, 26 bp, Artificial Sequence
  Synthetic
gcacattgcugaattgtattgucaca

SEQ ID NO: 55103 - DNA, 27 bp, Artificial Sequence
  Synthetic
tgagttgaatguattttcatcccucat

SEQ ID NO: 55104 - DNA, 28 bp, Artificial Sequence
  Synthetic
atcaatcgagutttatatccagtugcca

SEQ ID NO: 55105 - DNA, 28 bp, Artificial Sequence
  Synthetic
gcagttgacautgctatctttuaacagt

SEQ ID NO: 55106 - DNA, 18 bp, Artificial Sequence
  Synthetic
ggccaaagcuggcaugaa

SEQ ID NO: 55107 - DNA, 18 bp, Artificial Sequence
  Synthetic
tcctugcggacgaugcag

SEQ ID NO: 55108 - DNA, 29 bp, Artificial Sequence
  Synthetic
cttgccctcttuctcttctttcttatcut

SEQ ID NO: 55109 - DNA, 26 bp, Artificial Sequence
  Synthetic
ctggcatgtuctctgtgatactuaca

SEQ ID NO: 55110 - DNA, 20 bp, Artificial Sequence
  Synthetic
acaaggtcaaacugccgcut

SEQ ID NO: 55111 - DNA, 23 bp, Artificial Sequence
  Synthetic
caaagggtgucctccctacaaut

SEQ ID NO: 55112 - DNA, 28 bp, Artificial Sequence
  Synthetic
tgtcatcatcuggtaaagtcaaatguca

SEQ ID NO: 55113 - DNA, 26 bp, Artificial Sequence
  Synthetic
actattttatugctgcaguggagagg

SEQ ID NO: 55114 - DNA, 22 bp, Artificial Sequence
  Synthetic
tgtggccugaagtgtgtcatut

SEQ ID NO: 55115 - DNA, 26 bp, Artificial Sequence
  Synthetic
catagagaagacugacccttggttug

SEQ ID NO: 55116 - DNA, 23 bp, Artificial Sequence
  Synthetic
gctgctttacucactgtgcauga

SEQ ID NO: 55117 - DNA, 27 bp, Artificial Sequence
  Synthetic
aacatcagtagcauttctttaccccut

SEQ ID NO: 55118 - DNA, 21 bp, Artificial Sequence
  Synthetic
cctggaccaguacctguacca

SEQ ID NO: 55119 - DNA, 21 bp, Artificial Sequence
  Synthetic
cttgtcccugccagttcugat

SEQ ID NO: 55120 - DNA, 21 bp, Artificial Sequence
  Synthetic
gagggaggguttccaactcug

SEQ ID NO: 55121 - DNA, 22 bp, Artificial Sequence
  Synthetic
accgacugtcagacugaagaga

SEQ ID NO: 55122 - DNA, 19 bp, Artificial Sequence
  Synthetic
ccagtgggaucaccauggg

SEQ ID NO: 55123 - DNA, 19 bp, Artificial Sequence
  Synthetic
acccuggcaggacaaucag

SEQ ID NO: 55124 - DNA, 24 bp, Artificial Sequence
  Synthetic
actgaggaaaugaccctgcaaaut

SEQ ID NO: 55125 - DNA, 21 bp, Artificial Sequence
  Synthetic
gcagcgggaagacuatttgug

SEQ ID NO: 55126 - DNA, 26 bp, Artificial Sequence
  Synthetic
gtcuggatgggatugaagaaaggaaa

SEQ ID NO: 55127 - DNA, 24 bp, Artificial Sequence
  Synthetic
gagcagtgcutatatccttccugt

SEQ ID NO: 55128 - DNA, 22 bp, Artificial Sequence
  Synthetic
ctgccagguaggaaugagagaa

SEQ ID NO: 55129 - DNA, 22 bp, Artificial Sequence
  Synthetic
tcgtgactguagcaaactgugg

SEQ ID NO: 55130 - DNA, 20 bp, Artificial Sequence
  Synthetic
atcaggaagcugacagcgut

SEQ ID NO: 55131 - DNA, 25 bp, Artificial Sequence
  Synthetic
ccttgatggauggaaaactcactug

SEQ ID NO: 55132 - DNA, 26 bp, Artificial Sequence
  Synthetic
acatcaacaautaggaaauccagcca

SEQ ID NO: 55133 - DNA, 28 bp, Artificial Sequence
  Synthetic
tgaagcttaagutgtgcatgatugaaac

SEQ ID NO: 55134 - DNA, 22 bp, Artificial Sequence
  Synthetic
acagguttaaagcauggccaca

SEQ ID NO: 55135 - DNA, 27 bp, Artificial Sequence
  Synthetic
gcattggcattgugtaccatacttaut

SEQ ID NO: 55136 - DNA, 23 bp, Artificial Sequence
  Synthetic
cgagtgucattgcttugaagcat

SEQ ID NO: 55137 - DNA, 28 bp, Artificial Sequence
  Synthetic
gctggaatggcugaattatagcagaaua

SEQ ID NO: 55138 - DNA, 33 bp, Artificial Sequence
  Synthetic
ctaggctctataaacutttccataatattcugt

SEQ ID NO: 55139 - DNA, 21 bp, Artificial Sequence
  Synthetic
gggtccaggagcuccatttuc

SEQ ID NO: 55140 - DNA, 21 bp, Artificial Sequence
  Synthetic
caagaagctugctcccccaua

SEQ ID NO: 55141 - DNA, 21 bp, Artificial Sequence
  Synthetic
gagaccgtuagctcctggtut

SEQ ID NO: 55142 - DNA, 23 bp, Artificial Sequence
  Synthetic
aactcaccatuggtccaggttut

SEQ ID NO: 55143 - DNA, 28 bp, Artificial Sequence
  Synthetic
ctgagtgagggutattgtcagttaacut

SEQ ID NO: 55144 - DNA, 21 bp, Artificial Sequence
  Synthetic
accagccaaaagcagucaugt

SEQ ID NO: 55145 - DNA, 25 bp, Artificial Sequence
  Synthetic
tttgcaacgttuctcctcatttgut

SEQ ID NO: 55146 - DNA, 19 bp, Artificial Sequence
  Synthetic
gcttaccucgctcgcucag

SEQ ID NO: 55147 - DNA, 21 bp, Artificial Sequence
  Synthetic
cctgcttguctcaaccatgug

SEQ ID NO: 55148 - DNA, 20 bp, Artificial Sequence
  Synthetic
gcctggccugacccuaagat

SEQ ID NO: 55149 - DNA, 23 bp, Artificial Sequence
  Synthetic
ttgaccaugaaggagaugagcac

SEQ ID NO: 55150 - DNA, 21 bp, Artificial Sequence
  Synthetic
gaugggcagaaggactuagcc

SEQ ID NO: 55151 - DNA, 25 bp, Artificial Sequence
  Synthetic
tcttcatggagutgctccttagtuc

SEQ ID NO: 55152 - DNA, 23 bp, Artificial Sequence
  Synthetic
ctctggaguccttttgguaccat

SEQ ID NO: 55153 - DNA, 21 bp, Artificial Sequence
  Synthetic
agcattcacgutccactuggt

SEQ ID NO: 55154 - DNA, 28 bp, Artificial Sequence
  Synthetic
ttcactactaguaaactgcagtccttug

SEQ ID NO: 55155 - DNA, 26 bp, Artificial Sequence
  Synthetic
acagacaatgtcaucacaggaggaua

SEQ ID NO: 55156 - DNA, 27 bp, Artificial Sequence
  Synthetic
catgtttcagggautacttctcccaut

SEQ ID NO: 55157 - DNA, 28 bp, Artificial Sequence
  Synthetic
ggagagctacuattttcagaaacgauca

SEQ ID NO: 55158 - DNA, 21 bp, Artificial Sequence
  Synthetic
ccagccucccacttgacauaa

SEQ ID NO: 55159 - DNA, 20 bp, Artificial Sequence
  Synthetic
gacgctctuccgagtcaucc

SEQ ID NO: 55160 - DNA, 24 bp, Artificial Sequence
  Synthetic
gagctggtgcuctacgtatcttut

SEQ ID NO: 55161 - DNA, 22 bp, Artificial Sequence
  Synthetic
tctccctgugtgatttcuccct

SEQ ID NO: 55162 - DNA, 23 bp, Artificial Sequence
  Synthetic
actcacacuggctcttgttgtuc

SEQ ID NO: 55163 - DNA, 22 bp, Artificial Sequence
  Synthetic
gaactgagccacutctctgucc

SEQ ID NO: 55164 - DNA, 23 bp, Artificial Sequence
  Synthetic
gcaatgggttuctccttcctgut

SEQ ID NO: 55165 - DNA, 23 bp, Artificial Sequence
  Synthetic
agtaugccgacaagatgtucaca

SEQ ID NO: 55166 - DNA, 19 bp, Artificial Sequence
  Synthetic
ccctcugcagactggtcut

SEQ ID NO: 55167 - DNA, 18 bp, Artificial Sequence
  Synthetic
gugcatcucaggccgact

SEQ ID NO: 55168 - DNA, 23 bp, Artificial Sequence
  Synthetic
agagatcuggcagcttttuggag

SEQ ID NO: 55169 - DNA, 23 bp, Artificial Sequence
  Synthetic
aagcaggaugagaagauggcaaa

SEQ ID NO: 55170 - DNA, 20 bp, Artificial Sequence
  Synthetic
ccagcgtuggacaccacaua

SEQ ID NO: 55171 - DNA, 21 bp, Artificial Sequence
  Synthetic
gaagccaaaacgcuccactut

SEQ ID NO: 55172 - DNA, 28 bp, Artificial Sequence
  Synthetic
tgttaacccuaaaaggttacacgatgut

SEQ ID NO: 55173 - DNA, 24 bp, Artificial Sequence
  Synthetic
gcttactaugccagctttggtuac

SEQ ID NO: 55174 - DNA, 21 bp, Artificial Sequence
  Synthetic
gcacaaaaucctggcccucaa

SEQ ID NO: 55175 - DNA, 20 bp, Artificial Sequence
  Synthetic
agtgggcaagcugtgatcug

SEQ ID NO: 55176 - DNA, 21 bp, Artificial Sequence
  Synthetic
cggtacguggtggtgtguaag

SEQ ID NO: 55177 - DNA, 21 bp, Artificial Sequence
  Synthetic
tggaaccagacacuacugggt

SEQ ID NO: 55178 - DNA, 27 bp, Artificial Sequence
  Synthetic
ctgcttcaagguttcaaaatccagtut

SEQ ID NO: 55179 - DNA, 27 bp, Artificial Sequence
  Synthetic
tgctgtttaagaaagcucaggagtuac

SEQ ID NO: 55180 - DNA, 21 bp, Artificial Sequence
  Synthetic
gcctatcgcuctgctctcuct

SEQ ID NO: 55181 - DNA, 22 bp, Artificial Sequence
  Synthetic
acgcagagugaugagaaaaccc

SEQ ID NO: 55182 - DNA, 24 bp, Artificial Sequence
  Synthetic
caacaacgutttcccctucaagat

SEQ ID NO: 55183 - DNA, 21 bp, Artificial Sequence
  Synthetic
cccagccacaccutctcttug

SEQ ID NO: 55184 - DNA, 20 bp, Artificial Sequence
  Synthetic
gtttcucagggagccgucag

SEQ ID NO: 55185 - DNA, 22 bp, Artificial Sequence
  Synthetic
cctatgccucatcagggagaut

SEQ ID NO: 55186 - DNA, 24 bp, Artificial Sequence
  Synthetic
ccagtagaaugcattttgccaugt

SEQ ID NO: 55187 - DNA, 27 bp, Artificial Sequence
  Synthetic
agcauttattccaatugggcaaaaact

SEQ ID NO: 55188 - DNA, 28 bp, Artificial Sequence
  Synthetic
gcatttctgtgacuacactgaagaugaa

SEQ ID NO: 55189 - DNA, 28 bp, Artificial Sequence
  Synthetic
cacccctaggucataagaaagaaaugaa

SEQ ID NO: 55190 - DNA, 23 bp, Artificial Sequence
  Synthetic
cagcuggaggaaaggagaaagut

SEQ ID NO: 55191 - DNA, 27 bp, Artificial Sequence
  Synthetic
gcggaattgtuggtatttgtcattguc

SEQ ID NO: 55192 - DNA, 27 bp, Artificial Sequence
  Synthetic
cgaactggcuaacatgtttttcttuct

SEQ ID NO: 55193 - DNA, 28 bp, Artificial Sequence
  Synthetic
gagtacttgagugaaagatgaagtggua

SEQ ID NO: 55194 - DNA, 20 bp, Artificial Sequence
  Synthetic
agtcggaguttgctgtugct

SEQ ID NO: 55195 - DNA, 28 bp, Artificial Sequence
  Synthetic
cctttgautcaggtatttuagccaacat

SEQ ID NO: 55196 - DNA, 26 bp, Artificial Sequence
  Synthetic
ggaggacaagcuttaaggtctaauga

SEQ ID NO: 55197 - DNA, 33 bp, Artificial Sequence
  Synthetic
tgtttctcactatgauttatatttctgtgctua

SEQ ID NO: 55198 - DNA, 28 bp, Artificial Sequence
  Synthetic
cagcatggcuaagttgauaagagagaat

SEQ ID NO: 55199 - DNA, 26 bp, Artificial Sequence
  Synthetic
cttgtaucgcttctgtauccagaact

SEQ ID NO: 55200 - DNA, 28 bp, Artificial Sequence
  Synthetic
gactttttgtgcucctttttacatguca

SEQ ID NO: 55201 - DNA, 28 bp, Artificial Sequence
  Synthetic
atctggctcatuttagcagctacauaat

SEQ ID NO: 55202 - DNA, 22 bp, Artificial Sequence
  Synthetic
ggtcugtgtcagucacaaacct

SEQ ID NO: 55203 - DNA, 23 bp, Artificial Sequence
  Synthetic
gctgcacugacaggcttgtaaua

SEQ ID NO: 55204 - DNA, 21 bp, Artificial Sequence
  Synthetic
gatggcttuggaagggucagt

SEQ ID NO: 55205 - DNA, 27 bp, Artificial Sequence
  Synthetic
ggactgcaaaaagcauttgtgaaacua

SEQ ID NO: 55206 - DNA, 29 bp, Artificial Sequence
  Synthetic
cgatacugaagaagaagaaaggttaugga

SEQ ID NO: 55207 - DNA, 26 bp, Artificial Sequence
  Synthetic
aatgtacacagcutttggcatgtuag

SEQ ID NO: 55208 - DNA, 29 bp, Artificial Sequence
  Synthetic
agcagcttacctuagatactgaaaacaut

SEQ ID NO: 55209 - DNA, 25 bp, Artificial Sequence
  Synthetic
gttccttaaacucctcttgctggut

SEQ ID NO: 55210 - DNA, 23 bp, Artificial Sequence
  Synthetic
gccaaattaugcatcgagcugaa

SEQ ID NO: 55211 - DNA, 27 bp, Artificial Sequence
  Synthetic
gcaagcatcatcauagtccacagtauc

SEQ ID NO: 55212 - DNA, 23 bp, Artificial Sequence
  Synthetic
cagatgaaagcaguggctgguat

SEQ ID NO: 55213 - DNA, 27 bp, Artificial Sequence
  Synthetic
ctgtgtcaucaaagaggttgaguaaag

SEQ ID NO: 55214 - DNA, 28 bp, Artificial Sequence
  Synthetic
ccagaaaatucagctcctttaaucgaat

SEQ ID NO: 55215 - DNA, 27 bp, Artificial Sequence
  Synthetic
tctctcactgcutatgtaacctuacct

SEQ ID NO: 55216 - DNA, 26 bp, Artificial Sequence
  Synthetic
gattgtcttttucctcttgcccttut

SEQ ID NO: 55217 - DNA, 28 bp, Artificial Sequence
  Synthetic
ccattccagcauatcgtcttagtguaat

SEQ ID NO: 55218 - DNA, 28 bp, Artificial Sequence
  Synthetic
ctttacaagtaauaaaggcccacgaaut

SEQ ID NO: 55219 - DNA, 22 bp, Artificial Sequence
  Synthetic
tcattgucctgccucgagagat

SEQ ID NO: 55220 - DNA, 20 bp, Artificial Sequence
  Synthetic
cgggagcuacttccccugat

SEQ ID NO: 55221 - DNA, 21 bp, Artificial Sequence
  Synthetic
gccgctgauctccacatctug

SEQ ID NO: 55222 - DNA, 21 bp, Artificial Sequence
  Synthetic
agagcaagcugccctttctut

SEQ ID NO: 55223 - DNA, 20 bp, Artificial Sequence
  Synthetic
gcgtctccucctcactguca

SEQ ID NO: 55224 - DNA, 20 bp, Artificial Sequence
  Synthetic
ggcagagagacgcutgguaa

SEQ ID NO: 55225 - DNA, 25 bp, Artificial Sequence
  Synthetic
gcctgacttuctacaaatgcugagt

SEQ ID NO: 55226 - DNA, 23 bp, Artificial Sequence
  Synthetic
agaagaaattguctgctgcccut

SEQ ID NO: 55227 - DNA, 27 bp, Artificial Sequence
  Synthetic
cagtggaatguaacaagatggagaauc

SEQ ID NO: 55228 - DNA, 27 bp, Artificial Sequence
  Synthetic
gattcttattgaugccccatgtttugt

SEQ ID NO: 55229 - DNA, 28 bp, Artificial Sequence
  Synthetic
gcaactgccuttaacatgtataaucact

SEQ ID NO: 55230 - DNA, 22 bp, Artificial Sequence
  Synthetic
ttacagtgggutcagacgaugt

SEQ ID NO: 55231 - DNA, 24 bp, Artificial Sequence
  Synthetic
tgguaaaacttuccacacaagggt

SEQ ID NO: 55232 - DNA, 24 bp, Artificial Sequence
  Synthetic
ttgatgcaacugcagtgatacuca

SEQ ID NO: 55233 - DNA, 23 bp, Artificial Sequence
  Synthetic
tgcttctguagtctgggtuacga

SEQ ID NO: 55234 - DNA, 27 bp, Artificial Sequence
  Synthetic
aagtactgcttcuttcttggaatguga

SEQ ID NO: 55235 - DNA, 21 bp, Artificial Sequence
  Synthetic
gcaagctucgctttgaacugg

SEQ ID NO: 55236 - DNA, 25 bp, Artificial Sequence
  Synthetic
cttaugacgaggttggugagagaat

SEQ ID NO: 55237 - DNA, 20 bp, Artificial Sequence
  Synthetic
tgtaggctucctccacuggt

SEQ ID NO: 55238 - DNA, 20 bp, Artificial Sequence
  Synthetic
cagtggtgucagcgatgaug

SEQ ID NO: 55239 - DNA, 24 bp, Artificial Sequence
  Synthetic
cccgctctauaccttctgtaaugg

SEQ ID NO: 55240 - DNA, 24 bp, Artificial Sequence
  Synthetic
gctgcagaggautgaggcttaaut

SEQ ID NO: 55241 - DNA, 18 bp, Artificial Sequence
  Synthetic
gcucuacgggagcacagt

SEQ ID NO: 55242 - DNA, 21 bp, Artificial Sequence
  Synthetic
cagtggucaaccucacaggaa

SEQ ID NO: 55243 - DNA, 18 bp, Artificial Sequence
  Synthetic
gcatgggcccugtgtcug

SEQ ID NO: 55244 - DNA, 21 bp, Artificial Sequence
  Synthetic
cctgagaauggguagccagga

SEQ ID NO: 55245 - DNA, 22 bp, Artificial Sequence
  Synthetic
tgctttccagcugagagtucac

SEQ ID NO: 55246 - DNA, 22 bp, Artificial Sequence
  Synthetic
cuccctgtuaaccccaaaccaa

SEQ ID NO: 55247 - DNA, 22 bp, Artificial Sequence
  Synthetic
acctggaccutctctcctugac

SEQ ID NO: 55248 - DNA, 23 bp, Artificial Sequence
  Synthetic
gatgggaauagggagaugagggt

SEQ ID NO: 55249 - DNA, 22 bp, Artificial Sequence
  Synthetic
cagcagcaaccaucaagactuc

SEQ ID NO: 55250 - DNA, 21 bp, Artificial Sequence
  Synthetic
tgagcugcagggagaaaucag

SEQ ID NO: 55251 - DNA, 19 bp, Artificial Sequence
  Synthetic
cgaaccccgggaguttgug

SEQ ID NO: 55252 - DNA, 18 bp, Artificial Sequence
  Synthetic
cccucaagcccctcccut

SEQ ID NO: 55253 - DNA, 21 bp, Artificial Sequence
  Synthetic
tccttccucgacctcctctug

SEQ ID NO: 55254 - DNA, 23 bp, Artificial Sequence
  Synthetic
cgctatgaucgggttctcttcug

SEQ ID NO: 55255 - DNA, 19 bp, Artificial Sequence
  Synthetic
ccccttucaattgcugcga

SEQ ID NO: 55256 - DNA, 20 bp, Artificial Sequence
  Synthetic
ggccguccaagggagtuaag

SEQ ID NO: 55257 - DNA, 26 bp, Artificial Sequence
  Synthetic
actttctgacugtttagactccucgt

SEQ ID NO: 55258 - DNA, 23 bp, Artificial Sequence
  Synthetic
gctgtgaaguggaaggaaaaugt

SEQ ID NO: 55259 - DNA, 25 bp, Artificial Sequence
  Synthetic
gcagccacaautggtattttuggat

SEQ ID NO: 55260 - DNA, 25 bp, Artificial Sequence
  Synthetic
ggatgaaatcatuccagtgctccut

SEQ ID NO: 55261 - DNA, 25 bp, Artificial Sequence
  Synthetic
cctactgtgacutgcactagtcaut

SEQ ID NO: 55262 - DNA, 23 bp, Artificial Sequence
  Synthetic
gcaactttacuggtgcacucact

SEQ ID NO: 55263 - DNA, 23 bp, Artificial Sequence
  Synthetic
tgtggacagaagcaaugttcuga

SEQ ID NO: 55264 - DNA, 21 bp, Artificial Sequence
  Synthetic
tcatagcucccaccagaguga

SEQ ID NO: 55265 - DNA, 29 bp, Artificial Sequence
  Synthetic
ctttaggttcuctggactttatttugcat

SEQ ID NO: 55266 - DNA, 21 bp, Artificial Sequence
  Synthetic
gcccaaugatcuggcacaaag

SEQ ID NO: 55267 - DNA, 26 bp, Artificial Sequence
  Synthetic
tggttctttccuaatggtgactgtut

SEQ ID NO: 55268 - DNA, 23 bp, Artificial Sequence
  Synthetic
tccagaagugaaaggagcuacca

SEQ ID NO: 55269 - DNA, 19 bp, Artificial Sequence
  Synthetic
acaccgutcttcagugcgt

SEQ ID NO: 55270 - DNA, 21 bp, Artificial Sequence
  Synthetic
ggcaggtcugctggtcaauat

SEQ ID NO: 55271 - DNA, 23 bp, Artificial Sequence
  Synthetic
gaccccacuacctgtcagtttut

SEQ ID NO: 55272 - DNA, 22 bp, Artificial Sequence
  Synthetic
ggcttguggaggagagagaaut

SEQ ID NO: 55273 - DNA, 23 bp, Artificial Sequence
  Synthetic
tttttcagcuggcagttcgatug

SEQ ID NO: 55274 - DNA, 21 bp, Artificial Sequence
  Synthetic
cggacagcaccucgtucaaat

SEQ ID NO: 55275 - DNA, 26 bp, Artificial Sequence
  Synthetic
catctggugggagacttctucaaaaa

SEQ ID NO: 55276 - DNA, 25 bp, Artificial Sequence
  Synthetic
ctcatcctgtcuggtcttcctatuc

SEQ ID NO: 55277 - DNA, 25 bp, Artificial Sequence
  Synthetic
tctatgcagccugagatttcttucc

SEQ ID NO: 55278 - DNA, 26 bp, Artificial Sequence
  Synthetic
cattctactgaccugccaaaaguagt

SEQ ID NO: 55279 - DNA, 27 bp, Artificial Sequence
  Synthetic
tgctccaaucaaaactgaaaatgctut

SEQ ID NO: 55280 - DNA, 22 bp, Artificial Sequence
  Synthetic
gtttgccagcugaaactucagg

SEQ ID NO: 55281 - DNA, 25 bp, Artificial Sequence
  Synthetic
tcagcaaaacguaaccctcacttua

SEQ ID NO: 55282 - DNA, 27 bp, Artificial Sequence
  Synthetic
gagtgaaguagaacgtaggaatgugaa

SEQ ID NO: 55283 - DNA, 28 bp, Artificial Sequence
  Synthetic
tccaaggcagugaaaaactatcacatua

SEQ ID NO: 55284 - DNA, 28 bp, Artificial Sequence
  Synthetic
ggtcccatagtuatgccatattgtctua

SEQ ID NO: 55285 - DNA, 28 bp, Artificial Sequence
  Synthetic
cttggaagaauccattaccctaucaagt

SEQ ID NO: 55286 - DNA, 24 bp, Artificial Sequence
  Synthetic
accaugaccagagcaaaattcuga

SEQ ID NO: 55287 - DNA, 23 bp, Artificial Sequence
  Synthetic
gugcaaaauaccacaacggaaga

SEQ ID NO: 55288 - DNA, 22 bp, Artificial Sequence
  Synthetic
aaagugagaaaagcaccccuca

SEQ ID NO: 55289 - DNA, 21 bp, Artificial Sequence
  Synthetic
cgaagugccacctatgcuagt

SEQ ID NO: 55290 - DNA, 23 bp, Artificial Sequence
  Synthetic
agctttgcuacagtgagcttcut

SEQ ID NO: 55291 - DNA, 27 bp, Artificial Sequence
  Synthetic
aggttttaacagtugggatcaatgcua

SEQ ID NO: 55292 - DNA, 26 bp, Artificial Sequence
  Synthetic
agacaatatggcugagttcttucgac

SEQ ID NO: 55293 - DNA, 28 bp, Artificial Sequence
  Synthetic
tgctagtgaagaagutgttggttuaaca

SEQ ID NO: 55294 - DNA, 21 bp, Artificial Sequence
  Synthetic
gcggtcctuacctaggtcucc

SEQ ID NO: 55295 - DNA, 23 bp, Artificial Sequence
  Synthetic
gccaggtacaucgacttcctcua

SEQ ID NO: 55296 - DNA, 28 bp, Artificial Sequence
  Synthetic
ggtggctgtuaacatcttaaagacttuc

SEQ ID NO: 55297 - DNA, 21 bp, Artificial Sequence
  Synthetic
gcttttugcacccacctucaa

SEQ ID NO: 55298 - DNA, 21 bp, Artificial Sequence
  Synthetic
cacggccccguattgtactut

SEQ ID NO: 55299 - DNA, 29 bp, Artificial Sequence
  Synthetic
ggttgcaccuccataacacagtatuaaat

SEQ ID NO: 55300 - DNA, 27 bp, Artificial Sequence
  Synthetic
agatgaagcttutcaagatggtaaugg

SEQ ID NO: 55301 - DNA, 27 bp, Artificial Sequence
  Synthetic
acatatgttcggutcagtgttcucaaa

SEQ ID NO: 55302 - DNA, 23 bp, Artificial Sequence
  Synthetic
gctgtccacuctctagggcttua

SEQ ID NO: 55303 - DNA, 23 bp, Artificial Sequence
  Synthetic
gtgcagtuaactatggcugggaa

SEQ ID NO: 55304 - DNA, 27 bp, Artificial Sequence
  Synthetic
agtcaaacaguaggataaatgcagcut

SEQ ID NO: 55305 - DNA, 28 bp, Artificial Sequence
  Synthetic
agtgttcatucaccacttttagacagut

SEQ ID NO: 55306 - DNA, 25 bp, Artificial Sequence
  Synthetic
cctacctagautatgcaggcuacca

SEQ ID NO: 55307 - DNA, 24 bp, Artificial Sequence
  Synthetic
aaggaaggaaagacccuctaccut

SEQ ID NO: 55308 - DNA, 25 bp, Artificial Sequence
  Synthetic
cttcaaaagaaautctgcgcuggaa

SEQ ID NO: 55309 - DNA, 26 bp, Artificial Sequence
  Synthetic
gtatctttcttucctggaccaugagg

SEQ ID NO: 55310 - DNA, 25 bp, Artificial Sequence
  Synthetic
tgaagtaccaugtttacugcaccat

SEQ ID NO: 55311 - DNA, 26 bp, Artificial Sequence
  Synthetic
cctaaccaaaccutaaccttctcuga

SEQ ID NO: 55312 - DNA, 26 bp, Artificial Sequence
  Synthetic
gccatcagcautattcttgttuccat

SEQ ID NO: 55313 - DNA, 24 bp, Artificial Sequence
  Synthetic
ctgggtgtguggaagtttcatgua

SEQ ID NO: 55314 - DNA, 28 bp, Artificial Sequence
  Synthetic
gaagaccttgtugaagaattgagcttut

SEQ ID NO: 55315 - DNA, 27 bp, Artificial Sequence
  Synthetic
tgcagaaacaauctcagctttcaaauc

SEQ ID NO: 55316 - DNA, 28 bp, Artificial Sequence
  Synthetic
ccaaggagaagutgaagaacaaacatut

SEQ ID NO: 55317 - DNA, 30 bp, Artificial Sequence
  Synthetic
aggacaaaguctattacatugaaacaacca

SEQ ID NO: 55318 - DNA, 21 bp, Artificial Sequence
  Synthetic
ctctgtgagaugtgcgucagt

SEQ ID NO: 55319 - DNA, 28 bp, Artificial Sequence
  Synthetic
gtgagtatacaaaaugacccaggttcut

SEQ ID NO: 55320 - DNA, 21 bp, Artificial Sequence
  Synthetic
cctcugcagcttggguagaac

SEQ ID NO: 55321 - DNA, 22 bp, Artificial Sequence
  Synthetic
ggagaaaucaccactggtccuc

SEQ ID NO: 55322 - DNA, 23 bp, Artificial Sequence
  Synthetic
ggaccgaaccauctttgtgcaua

SEQ ID NO: 55323 - DNA, 32 bp, Artificial Sequence
  Synthetic
tgtgcaatttatgautactccaatagacugat

SEQ ID NO: 55324 - DNA, 23 bp, Artificial Sequence
  Synthetic
tcctaacugagacctuacaccgt

SEQ ID NO: 55325 - DNA, 26 bp, Artificial Sequence
  Synthetic
agaatcctctucgatgccattcatut

SEQ ID NO: 55326 - DNA, 28 bp, Artificial Sequence
  Synthetic
ctgtcaaggtugtaaatagactttugct

SEQ ID NO: 55327 - DNA, 23 bp, Artificial Sequence
  Synthetic
caagctucccaggaaactgtuct

SEQ ID NO: 55328 - DNA, 20 bp, Artificial Sequence
  Synthetic
gtctgtttguggcggaucct

SEQ ID NO: 55329 - DNA, 19 bp, Artificial Sequence
  Synthetic
gaggugcgagccttcugaa

SEQ ID NO: 55330 - DNA, 19 bp, Artificial Sequence
  Synthetic
aaggaccgggugtcaccua

SEQ ID NO: 55331 - DNA, 17 bp, Artificial Sequence
  Synthetic
ggugcaggugaggcagt

SEQ ID NO: 55332 - DNA, 27 bp, Artificial Sequence
  Synthetic
tgcttaccccuccatgtttcaatttua

SEQ ID NO: 55333 - DNA, 24 bp, Artificial Sequence
  Synthetic
ccgccucattttctaatugcgaat

SEQ ID NO: 55334 - DNA, 24 bp, Artificial Sequence
  Synthetic
gttgaatuccaaaccggcatcuat

SEQ ID NO: 55335 - DNA, 28 bp, Artificial Sequence
  Synthetic
gttttgtttcucctctttttctucaggt

SEQ ID NO: 55336 - DNA, 21 bp, Artificial Sequence
  Synthetic
gaggagaugcgtcccaucaag

SEQ ID NO: 55337 - DNA, 20 bp, Artificial Sequence
  Synthetic
tcttccuagcgcagagggua

SEQ ID NO: 55338 - DNA, 22 bp, Artificial Sequence
  Synthetic
agacaggcaugggaguagagac

SEQ ID NO: 55339 - DNA, 20 bp, Artificial Sequence
  Synthetic
agtctgccacutccggagua

SEQ ID NO: 55340 - DNA, 21 bp, Artificial Sequence
  Synthetic
tcccatctcuccatccctcug

SEQ ID NO: 55341 - DNA, 23 bp, Artificial Sequence
  Synthetic
agtcagcugaagcgtaacactut

SEQ ID NO: 55342 - DNA, 28 bp, Artificial Sequence
  Synthetic
gttaaaaagctucacagtttgtcctugt

SEQ ID NO: 55343 - DNA, 28 bp, Artificial Sequence
  Synthetic
ccccagtagtugaatcttcaaaggauaa

SEQ ID NO: 55344 - DNA, 25 bp, Artificial Sequence
  Synthetic
tgtaatgugtacatggugccagaat

SEQ ID NO: 55345 - DNA, 28 bp, Artificial Sequence
  Synthetic
acataaattacucacaacttccucagca

SEQ ID NO: 55346 - DNA, 22 bp, Artificial Sequence
  Synthetic
agccgaacagaaugaugagcaa

SEQ ID NO: 55347 - DNA, 20 bp, Artificial Sequence
  Synthetic
cacaaaggautgcccaugcc

SEQ ID NO: 55348 - DNA, 25 bp, Artificial Sequence
  Synthetic
cctctgttttcaugcctgattccua

SEQ ID NO: 55349 - DNA, 25 bp, Artificial Sequence
  Synthetic
ccaagaaaugaagcaagcugaagag

SEQ ID NO: 55350 - DNA, 23 bp, Artificial Sequence
  Synthetic
gttgtctttcagugaagccgaug

SEQ ID NO: 55351 - DNA, 24 bp, Artificial Sequence
  Synthetic
agaccaagccauacagttgagaug

SEQ ID NO: 55352 - DNA, 23 bp, Artificial Sequence
  Synthetic
cctccagtcauctcatctgcuca

SEQ ID NO: 55353 - DNA, 21 bp, Artificial Sequence
  Synthetic
gccgaccucaacaccttucag

SEQ ID NO: 55354 - DNA, 22 bp, Artificial Sequence
  Synthetic
cctugccaaaagcugccaaaat

SEQ ID NO: 55355 - DNA, 21 bp, Artificial Sequence
  Synthetic
caacgacaccauccaccaaug

SEQ ID NO: 55356 - DNA, 26 bp, Artificial Sequence
  Synthetic
taattatcccugcaccaatcauacac

SEQ ID NO: 55357 - DNA, 24 bp, Artificial Sequence
  Synthetic
aaucaaagugacccagaagaagca

SEQ ID NO: 55358 - DNA, 21 bp, Artificial Sequence
  Synthetic
gggagaggcaucaaatcaguc

SEQ ID NO: 55359 - DNA, 27 bp, Artificial Sequence
  Synthetic
gaacatctcacagcauttccatcttut

SEQ ID NO: 55360 - DNA, 22 bp, Artificial Sequence
  Synthetic
caaucacctttucccccacagt

SEQ ID NO: 55361 - DNA, 26 bp, Artificial Sequence
  Synthetic
tctgtttccttcucttgtatcccuct

SEQ ID NO: 55362 - DNA, 22 bp, Artificial Sequence
  Synthetic
gggctttcugtatgcttgucca

SEQ ID NO: 55363 - DNA, 24 bp, Artificial Sequence
  Synthetic
tctccgaaacuggaagagguacaa

SEQ ID NO: 55364 - DNA, 21 bp, Artificial Sequence
  Synthetic
gctgagctccuctgctgagua

SEQ ID NO: 55365 - DNA, 22 bp, Artificial Sequence
  Synthetic
caggtcuaagcggccttcuaag

SEQ ID NO: 55366 - DNA, 23 bp, Artificial Sequence
  Synthetic
ctcggttatcutttctcccguca

SEQ ID NO: 55367 - DNA, 22 bp, Artificial Sequence
  Synthetic
cccagaaccaaagcutcaucac

SEQ ID NO: 55368 - DNA, 22 bp, Artificial Sequence
  Synthetic
ggctgggccauatgatatcuga

SEQ ID NO: 55369 - DNA, 24 bp, Artificial Sequence
  Synthetic
gtgactgcttutccttctcacuct

SEQ ID NO: 55370 - DNA, 23 bp, Artificial Sequence
  Synthetic
gttctcaauagccagcccucaaa

SEQ ID NO: 55371 - DNA, 25 bp, Artificial Sequence
  Synthetic
tcacaatttcccutcctttctugct

SEQ ID NO: 55372 - DNA, 22 bp, Artificial Sequence
  Synthetic
gccatcaguccctgggtaacua

SEQ ID NO: 55373 - DNA, 28 bp, Artificial Sequence
  Synthetic
gcatcagctattugtgaactagatcugt

SEQ ID NO: 55374 - DNA, 22 bp, Artificial Sequence
  Synthetic
cctactgtgaccucagccacua

SEQ ID NO: 55375 - DNA, 24 bp, Artificial Sequence
  Synthetic
ccacatactgcuctctctttcucc

SEQ ID NO: 55376 - DNA, 21 bp, Artificial Sequence
  Synthetic
gggagaugcccagctacgaua

SEQ ID NO: 55377 - DNA, 24 bp, Artificial Sequence
  Synthetic
gcagggagggaaugagaaaatguc

SEQ ID NO: 55378 - DNA, 21 bp, Artificial Sequence
  Synthetic
cccttcctgugttctcgaguc

SEQ ID NO: 55379 - DNA, 26 bp, Artificial Sequence
  Synthetic
aatttccttgaaaacaugcagcagut

SEQ ID NO: 55380 - DNA, 22 bp, Artificial Sequence
  Synthetic
ctctcagaauggtgguggagaa

SEQ ID NO: 55381 - DNA, 21 bp, Artificial Sequence
  Synthetic
ccaagaaaguggctgaacguc

SEQ ID NO: 55382 - DNA, 20 bp, Artificial Sequence
  Synthetic
tggaaaugcuccccggaaat

SEQ ID NO: 55383 - DNA, 21 bp, Artificial Sequence
  Synthetic
ctugggagctaguaggcaagg

SEQ ID NO: 55384 - DNA, 28 bp, Artificial Sequence
  Synthetic
cgattcctctttuatcagctaatccuct

SEQ ID NO: 55385 - DNA, 23 bp, Artificial Sequence
  Synthetic
ccaagcugacacttcaatugcat

SEQ ID NO: 55386 - DNA, 30 bp, Artificial Sequence
  Synthetic
tcaagtattatacuagtgagatcgacauga

SEQ ID NO: 55387 - DNA, 26 bp, Artificial Sequence
  Synthetic
ctggccaggaauatggacaagatuat

SEQ ID NO: 55388 - DNA, 25 bp, Artificial Sequence
  Synthetic
ctttttgaaggaacucggagatugg

SEQ ID NO: 55389 - DNA, 28 bp, Artificial Sequence
  Synthetic
cttatagcguaaagacaatgaccaggua

SEQ ID NO: 55390 - DNA, 21 bp, Artificial Sequence
  Synthetic
cctgtccagugctttcccuaa

SEQ ID NO: 55391 - DNA, 28 bp, Artificial Sequence
  Synthetic
tttgacagccutaaaagctgtttucaat

SEQ ID NO: 55392 - DNA, 28 bp, Artificial Sequence
  Synthetic
acttacatctuctatgtccttguccaga

SEQ ID NO: 55393 - DNA, 28 bp, Artificial Sequence
  Synthetic
cggtctacacautgaaatactggaugaa

SEQ ID NO: 55394 - DNA, 24 bp, Artificial Sequence
  Synthetic
cccttgtacutgctttgctcucat

SEQ ID NO: 55395 - DNA, 20 bp, Artificial Sequence
  Synthetic
cgttgaccgugagctgguag

SEQ ID NO: 55396 - DNA, 19 bp, Artificial Sequence
  Synthetic
cccaggaccaacgucugag

SEQ ID NO: 55397 - DNA, 24 bp, Artificial Sequence
  Synthetic
ctgttgaggcugtagaacttgtug

SEQ ID NO: 55398 - DNA, 23 bp, Artificial Sequence
  Synthetic
tgcttaaaacacugcacucccaa

SEQ ID NO: 55399 - DNA, 22 bp, Artificial Sequence
  Synthetic
aacactucgccaatggagucat

SEQ ID NO: 55400 - DNA, 21 bp, Artificial Sequence
  Synthetic
tgagaaugauaacgcgcccat

SEQ ID NO: 55401 - DNA, 22 bp, Artificial Sequence
  Synthetic
ccttgtctugatcctgccauca

SEQ ID NO: 55402 - DNA, 21 bp, Artificial Sequence
  Synthetic
cgggacugggagttcttcauc

SEQ ID NO: 55403 - DNA, 21 bp, Artificial Sequence
  Synthetic
agttccccuagggacttucca

SEQ ID NO: 55404 - DNA, 20 bp, Artificial Sequence
  Synthetic
cctcugcaccaaaggcaauc

SEQ ID NO: 55405 - DNA, 22 bp, Artificial Sequence
  Synthetic
cctggccauatagtgccttuca

SEQ ID NO: 55406 - DNA, 21 bp, Artificial Sequence
  Synthetic
ctgcggcucaaaaagctctut

SEQ ID NO: 55407 - DNA, 21 bp, Artificial Sequence
  Synthetic
ccacccautgctgtcttuggt

SEQ ID NO: 55408 - DNA, 20 bp, Artificial Sequence
  Synthetic
aaauccacaccccugcacaa

SEQ ID NO: 55409 - DNA, 19 bp, Artificial Sequence
  Synthetic
agccaaggutguccccaag

SEQ ID NO: 55410 - DNA, 33 bp, Artificial Sequence
  Synthetic
tatattgtgaaggcauattatgtgagtaaucct

SEQ ID NO: 55411 - DNA, 25 bp, Artificial Sequence
  Synthetic
cagtggttugaacagtctctttucc

SEQ ID NO: 55412 - DNA, 21 bp, Artificial Sequence
  Synthetic
gcaggccaucagacagatcut

SEQ ID NO: 55413 - DNA, 23 bp, Artificial Sequence
  Synthetic
cccactacugctctguaaggaca

SEQ ID NO: 55414 - DNA, 21 bp, Artificial Sequence
  Synthetic
cagtgccugcatctaccuaca

SEQ ID NO: 55415 - DNA, 21 bp, Artificial Sequence
  Synthetic
gggtgcagggutatagtuggg

SEQ ID NO: 55416 - DNA, 26 bp, Artificial Sequence
  Synthetic
ggtcttcacuctgcttttcattucag

SEQ ID NO: 55417 - DNA, 22 bp, Artificial Sequence
  Synthetic
cctccugcctcttcucagaaag

SEQ ID NO: 55418 - DNA, 18 bp, Artificial Sequence
  Synthetic
gggccuggccaagaagug

SEQ ID NO: 55419 - DNA, 19 bp, Artificial Sequence
  Synthetic
cgcgugctgtagauggaga

SEQ ID NO: 55420 - DNA, 21 bp, Artificial Sequence
  Synthetic
cactccaaguggtcacctgut

SEQ ID NO: 55421 - DNA, 23 bp, Artificial Sequence
  Synthetic
tccctaaggccugttttcctcua

SEQ ID NO: 55422 - DNA, 21 bp, Artificial Sequence
  Synthetic
ccatggaccugaccagguact

SEQ ID NO: 55423 - DNA, 25 bp, Artificial Sequence
  Synthetic
gccaagaccuattggtaacauccaa

SEQ ID NO: 55424 - DNA, 23 bp, Artificial Sequence
  Synthetic
cacagugggtcattcugaagaca

SEQ ID NO: 55425 - DNA, 23 bp, Artificial Sequence
  Synthetic
tcaaatgtgcccuttgtcctcuc

SEQ ID NO: 55426 - DNA, 23 bp, Artificial Sequence
  Synthetic
gatggagtuagccttccaaguga

SEQ ID NO: 55427 - DNA, 28 bp, Artificial Sequence
  Synthetic
agctgaactgtguctcatcattttgtua

SEQ ID NO: 55428 - DNA, 23 bp, Artificial Sequence
  Synthetic
gggaugagagaaccagguaaact

SEQ ID NO: 55429 - DNA, 24 bp, Artificial Sequence
  Synthetic
aaacatgccaauctgcatttgugt

SEQ ID NO: 55430 - DNA, 21 bp, Artificial Sequence
  Synthetic
gcaaggttucctcggaagugg

SEQ ID NO: 55431 - DNA, 25 bp, Artificial Sequence
  Synthetic
tccgtgattcugcttctatctcuct

SEQ ID NO: 55432 - DNA, 20 bp, Artificial Sequence
  Synthetic
gcagagcgcugtaggtgtut

SEQ ID NO: 55433 - DNA, 24 bp, Artificial Sequence
  Synthetic
tgtcuaccaaccaatuccacaacc

SEQ ID NO: 55434 - DNA, 20 bp, Artificial Sequence
  Synthetic
cuggacaagcatcuccggaa

SEQ ID NO: 55435 - DNA, 25 bp, Artificial Sequence
  Synthetic
gatcgccatacuggtttcatctuca

SEQ ID NO: 55436 - DNA, 21 bp, Artificial Sequence
  Synthetic
ctgttggugacaggactuggt

SEQ ID NO: 55437 - DNA, 22 bp, Artificial Sequence
  Synthetic
gccagagcucatcatuggcaat

SEQ ID NO: 55438 - DNA, 20 bp, Artificial Sequence
  Synthetic
tcggcaccacguagguagaa

SEQ ID NO: 55439 - DNA, 20 bp, Artificial Sequence
  Synthetic
gtcagctccuctgctcccua

SEQ ID NO: 55440 - DNA, 23 bp, Artificial Sequence
  Synthetic
acataatgtcugcagagccctut

SEQ ID NO: 55441 - DNA, 22 bp, Artificial Sequence
  Synthetic
gggattcuggacttcagcucac

SEQ ID NO: 55442 - DNA, 22 bp, Artificial Sequence
  Synthetic
cagcaaaggcutttgagaccug

SEQ ID NO: 55443 - DNA, 20 bp, Artificial Sequence
  Synthetic
caccacgacucccatcugat

SEQ ID NO: 55444 - DNA, 22 bp, Artificial Sequence
  Synthetic
tgagactctcuctcgcccauag

SEQ ID NO: 55445 - DNA, 22 bp, Artificial Sequence
  Synthetic
cctttcgaucatctcccugcat

SEQ ID NO: 55446 - DNA, 21 bp, Artificial Sequence
  Synthetic
ctttgccagugacacccuact

SEQ ID NO: 55447 - DNA, 21 bp, Artificial Sequence
  Synthetic
tgggtctautcctgcauccct

SEQ ID NO: 55448 - DNA, 22 bp, Artificial Sequence
  Synthetic
ctttcugagcctttgtcugggt

SEQ ID NO: 55449 - DNA, 20 bp, Artificial Sequence
  Synthetic
cggatucggatggtcuccat

SEQ ID NO: 55450 - DNA, 22 bp, Artificial Sequence
  Synthetic
gccaggtcautttgacagctut

SEQ ID NO: 55451 - DNA, 22 bp, Artificial Sequence
  Synthetic
cagggatctuctcactgccauc

SEQ ID NO: 55452 - DNA, 22 bp, Artificial Sequence
  Synthetic
agctggugcatttgactcugaa

SEQ ID NO: 55453 - DNA, 22 bp, Artificial Sequence
  Synthetic
aacccactcaugttgtcctguc

SEQ ID NO: 55454 - DNA, 19 bp, Artificial Sequence
  Synthetic
ctacgccccguactgugag

SEQ ID NO: 55455 - DNA, 24 bp, Artificial Sequence
  Synthetic
ccacagaaucucaaagcagggaat

SEQ ID NO: 55456 - DNA, 21 bp, Artificial Sequence
  Synthetic
gaatcagugagaagccugggt

SEQ ID NO: 55457 - DNA, 24 bp, Artificial Sequence
  Synthetic
caggatcatcucagagccataguc

SEQ ID NO: 55458 - DNA, 20 bp, Artificial Sequence
  Synthetic
ctgttcuccgtgttggucct

SEQ ID NO: 55459 - DNA, 26 bp, Artificial Sequence
  Synthetic
gggccacaacauacttagatctctuc

SEQ ID NO: 55460 - DNA, 23 bp, Artificial Sequence
  Synthetic
gcaucaaugagaggaccaagcag

SEQ ID NO: 55461 - DNA, 24 bp, Artificial Sequence
  Synthetic
tgtgtgucccataagaucccaaga

SEQ ID NO: 55462 - DNA, 23 bp, Artificial Sequence
  Synthetic
gaggcatatgugcagatccugaa

SEQ ID NO: 55463 - DNA, 21 bp, Artificial Sequence
  Synthetic
tgtgugaggaaggactgcauc

SEQ ID NO: 55464 - DNA, 21 bp, Artificial Sequence
  Synthetic
gccttaggugggaaggucaga

SEQ ID NO: 55465 - DNA, 20 bp, Artificial Sequence
  Synthetic
gccucagatgaucccaggac

SEQ ID NO: 55466 - DNA, 29 bp, Artificial Sequence
  Synthetic
ctgcaaattuatatccatcauccgaaagg

SEQ ID NO: 55467 - DNA, 28 bp, Artificial Sequence
  Synthetic
accagagaaauccagaggaaagtcauat

SEQ ID NO: 55468 - DNA, 25 bp, Artificial Sequence
  Synthetic
actatatatggcugttgtgccctuc

SEQ ID NO: 55469 - DNA, 25 bp, Artificial Sequence
  Synthetic
ggtcugagcagtagtuacacacaaa

SEQ ID NO: 55470 - DNA, 22 bp, Artificial Sequence
  Synthetic
ccagctgtcutcgacacttcuc

SEQ ID NO: 55471 - DNA, 27 bp, Artificial Sequence
  Synthetic
atcctgtaaagugcttttagtgggaut

SEQ ID NO: 55472 - DNA, 28 bp, Artificial Sequence
  Synthetic
ttaaattggtugtgttttctugaaggca

SEQ ID NO: 55473 - DNA, 26 bp, Artificial Sequence
  Synthetic
cctacttccuctttggctctttucag

SEQ ID NO: 55474 - DNA, 20 bp, Artificial Sequence
  Synthetic
acgctcuacccactgcagua

SEQ ID NO: 55475 - DNA, 28 bp, Artificial Sequence
  Synthetic
gctacctctgguttagtcagaaatucat

SEQ ID NO: 55476 - DNA, 27 bp, Artificial Sequence
  Synthetic
ggacttggugatagacatguacagaat

SEQ ID NO: 55477 - DNA, 28 bp, Artificial Sequence
  Synthetic
gcaaacaacatuccatgatgaccaaaua

SEQ ID NO: 55478 - DNA, 24 bp, Artificial Sequence
  Synthetic
ctcaaggaaacaugaagtgugcat

SEQ ID NO: 55479 - DNA, 27 bp, Artificial Sequence
  Synthetic
cctctgctguaaatacaaagcttucaa

SEQ ID NO: 55480 - DNA, 22 bp, Artificial Sequence
  Synthetic
ggttttggguttgctgttgguc

SEQ ID NO: 55481 - DNA, 21 bp, Artificial Sequence
  Synthetic
gcagcagcaaaggauacagut

SEQ ID NO: 55482 - DNA, 21 bp, Artificial Sequence
  Synthetic
gtcgcuaacacacatgcucct

SEQ ID NO: 55483 - DNA, 22 bp, Artificial Sequence
  Synthetic
agaaagcgacagaggaugcaut

SEQ ID NO: 55484 - DNA, 23 bp, Artificial Sequence
  Synthetic
gtacaagaacugtgagcuggaca

SEQ ID NO: 55485 - DNA, 26 bp, Artificial Sequence
  Synthetic
ttgaggaauagagagacgatcucagt

SEQ ID NO: 55486 - DNA, 23 bp, Artificial Sequence
  Synthetic
aagacaccguggatguaaaacca

SEQ ID NO: 55487 - DNA, 17 bp, Artificial Sequence
  Synthetic
aggagcugcaggcugac

SEQ ID NO: 55488 - DNA, 22 bp, Artificial Sequence
  Synthetic
ccctcatccuccattcccatuc

SEQ ID NO: 55489 - DNA, 23 bp, Artificial Sequence
  Synthetic
gacactagcucctagatccucct

SEQ ID NO: 55490 - DNA, 21 bp, Artificial Sequence
  Synthetic
actatguccacacuggagcct

SEQ ID NO: 55491 - DNA, 22 bp, Artificial Sequence
  Synthetic
gcacctcguagtcagcaaugat

SEQ ID NO: 55492 - DNA, 21 bp, Artificial Sequence
  Synthetic
ggaggugagcaggagaggaut

SEQ ID NO: 55493 - DNA, 22 bp, Artificial Sequence
  Synthetic
cagtaaucagaagggccagcuc

SEQ ID NO: 55494 - DNA, 23 bp, Artificial Sequence
  Synthetic
gctgacugaagttgaacttuccc

SEQ ID NO: 55495 - DNA, 28 bp, Artificial Sequence
  Synthetic
gccaaaagacaugactgttcctatacua

SEQ ID NO: 55496 - DNA, 27 bp, Artificial Sequence
  Synthetic
cgactagtgauggtaacagaagcttua

SEQ ID NO: 55497 - DNA, 30 bp, Artificial Sequence
  Synthetic
tgactgtttccauaaaagtgtctcattuct

SEQ ID NO: 55498 - DNA, 26 bp, Artificial Sequence
  Synthetic
ccatctatgutccagagtcucaggat

SEQ ID NO: 55499 - DNA, 17 bp, Artificial Sequence
  Synthetic
gggaagcugguccacct

SEQ ID NO: 55500 - DNA, 25 bp, Artificial Sequence
  Synthetic
aaactaatgaucatggcagaugcct

SEQ ID NO: 55501 - DNA, 28 bp, Artificial Sequence
  Synthetic
gtttctgaaaccauctctcttgatgcua

SEQ ID NO: 55502 - DNA, 27 bp, Artificial Sequence
  Synthetic
cataccgguaacatcaacataguacca

SEQ ID NO: 55503 - DNA, 20 bp, Artificial Sequence
  Synthetic
gguggaaagggcaaaugcaa

SEQ ID NO: 55504 - DNA, 28 bp, Artificial Sequence
  Synthetic
ccctctggagaautgtgaaaatctagug

SEQ ID NO: 55505 - DNA, 26 bp, Artificial Sequence
  Synthetic
agggaagcauggcaagtgataaauag

SEQ ID NO: 55506 - DNA, 23 bp, Artificial Sequence
  Synthetic
ctgcctatutcacctccucagat

SEQ ID NO: 55507 - DNA, 26 bp, Artificial Sequence
  Synthetic
ggttactcaacuctcttgaatccugt

SEQ ID NO: 55508 - DNA, 22 bp, Artificial Sequence
  Synthetic
gaccacagacaaugttcccuct

SEQ ID NO: 55509 - DNA, 24 bp, Artificial Sequence
  Synthetic
gtatgtgtagacugtgctcagugt

SEQ ID NO: 55510 - DNA, 24 bp, Artificial Sequence
  Synthetic
gtgaaggagaugtcatcugagacc

SEQ ID NO: 55511 - DNA, 22 bp, Artificial Sequence
  Synthetic
tgcatctgautccccacttugt

SEQ ID NO: 55512 - DNA, 21 bp, Artificial Sequence
  Synthetic
ctcgucactcgattuggaacc

SEQ ID NO: 55513 - DNA, 24 bp, Artificial Sequence
  Synthetic
tgaacuaaaagccagcaggcauat

SEQ ID NO: 55514 - DNA, 21 bp, Artificial Sequence
  Synthetic
gaaggaaaccugtgggcugaa

SEQ ID NO: 55515 - DNA, 24 bp, Artificial Sequence
  Synthetic
gctctttgtccutcccactttuct

SEQ ID NO: 55516 - DNA, 22 bp, Artificial Sequence
  Synthetic
ctccgtcggutaacacgtacuc

SEQ ID NO: 55517 - DNA, 23 bp, Artificial Sequence
  Synthetic
cctgcactccutcaaagaggtua

SEQ ID NO: 55518 - DNA, 24 bp, Artificial Sequence
  Synthetic
caactttcagugggacatgcatut

SEQ ID NO: 55519 - DNA, 26 bp, Artificial Sequence
  Synthetic
caatggccucgtttctcaataucaat

SEQ ID NO: 55520 - DNA, 23 bp, Artificial Sequence
  Synthetic
gggtgaguggtaacatagguagg

SEQ ID NO: 55521 - DNA, 25 bp, Artificial Sequence
  Synthetic
ctgacccucacatcacttuaaccaa

SEQ ID NO: 55522 - DNA, 19 bp, Artificial Sequence
  Synthetic
ccgucgggcagtagctuat

SEQ ID NO: 55523 - DNA, 25 bp, Artificial Sequence
  Synthetic
tggactctuaacacactcagtccut

SEQ ID NO: 55524 - DNA, 22 bp, Artificial Sequence
  Synthetic
tgccguaggtagaagttuccct

SEQ ID NO: 55525 - DNA, 20 bp, Artificial Sequence
  Synthetic
gggcagugtgagugcaaaaa

SEQ ID NO: 55526 - DNA, 21 bp, Artificial Sequence
  Synthetic
cagccaucaggatccaacuct

SEQ ID NO: 55527 - DNA, 28 bp, Artificial Sequence
  Synthetic
ccctgtcttguacctaatgagcaaatua

SEQ ID NO: 55528 - DNA, 24 bp, Artificial Sequence
  Synthetic
cttggaaagcugaagacagtugac

SEQ ID NO: 55529 - DNA, 28 bp, Artificial Sequence
  Synthetic
atcatucagttctttaguccacaaccaa

SEQ ID NO: 55530 - DNA, 26 bp, Artificial Sequence
  Synthetic
gcatgaaguagcctaaugaagagcat

SEQ ID NO: 55531 - DNA, 21 bp, Artificial Sequence
  Synthetic
ggaccctgcugcttatctguc

SEQ ID NO: 55532 - DNA, 21 bp, Artificial Sequence
  Synthetic
gttatccgacuggtccucgaa

SEQ ID NO: 55533 - DNA, 24 bp, Artificial Sequence
  Synthetic
aggttgtccguggagaaguaaaag

SEQ ID NO: 55534 - DNA, 28 bp, Artificial Sequence
  Synthetic
acggtgacucagtatgctatauacaaca

SEQ ID NO: 55535 - DNA, 28 bp, Artificial Sequence
  Synthetic
atcagccaattatutttgacttgtgcut

SEQ ID NO: 55536 - DNA, 22 bp, Artificial Sequence
  Synthetic
tcttctttugcagcggctcuaa

SEQ ID NO: 55537 - DNA, 28 bp, Artificial Sequence
  Synthetic
acgaagcaaagaaaaauaggagtgauct

SEQ ID NO: 55538 - DNA, 20 bp, Artificial Sequence
  Synthetic
tgtggaccgcauttgggaut

SEQ ID NO: 55539 - DNA, 26 bp, Artificial Sequence
  Synthetic
ctgagaaccaaaagacutctgaguga

SEQ ID NO: 55540 - DNA, 24 bp, Artificial Sequence
  Synthetic
gtgtcattcuacctcagguggaac

SEQ ID NO: 55541 - DNA, 24 bp, Artificial Sequence
  Synthetic
aagtaattccgaccutggcagaut

SEQ ID NO: 55542 - DNA, 25 bp, Artificial Sequence
  Synthetic
agagccugaagaagcagaugaaaaa

SEQ ID NO: 55543 - DNA, 21 bp, Artificial Sequence
  Synthetic
gtctggcaugttggcuaacag

SEQ ID NO: 55544 - DNA, 25 bp, Artificial Sequence
  Synthetic
ccttctcgacautgctatgggatuc

SEQ ID NO: 55545 - DNA, 22 bp, Artificial Sequence
  Synthetic
guttagaacaggugcagaccct

SEQ ID NO: 55546 - DNA, 20 bp, Artificial Sequence
  Synthetic
cctgtgcttuccgatggcut

SEQ ID NO: 55547 - DNA, 21 bp, Artificial Sequence
  Synthetic
aaacccuctcaccugggagat

SEQ ID NO: 55548 - DNA, 20 bp, Artificial Sequence
  Synthetic
gcttcactgugctgctctuc

SEQ ID NO: 55549 - DNA, 21 bp, Artificial Sequence
  Synthetic
tgcaugcagccctctugaaat

SEQ ID NO: 55550 - DNA, 19 bp, Artificial Sequence
  Synthetic
gguggcaatuccccaaacc

SEQ ID NO: 55551 - DNA, 17 bp, Artificial Sequence
  Synthetic
tccucctcugggagcgt

SEQ ID NO: 55552 - DNA, 20 bp, Artificial Sequence
  Synthetic
ggtcctctugggcatggtug

SEQ ID NO: 55553 - DNA, 23 bp, Artificial Sequence
  Synthetic
agtgggacuggaaagtgacaaug

SEQ ID NO: 55554 - DNA, 27 bp, Artificial Sequence
  Synthetic
tcttactgggacaacauacaactccua

SEQ ID NO: 55555 - DNA, 23 bp, Artificial Sequence
  Synthetic
tctcccaaagguacaaagctguc

SEQ ID NO: 55556 - DNA, 26 bp, Artificial Sequence
  Synthetic
caaacacacacuctctctcattcuct

SEQ ID NO: 55557 - DNA, 23 bp, Artificial Sequence
  Synthetic
cggagaattgugtgtgcattcut

SEQ ID NO: 55558 - DNA, 20 bp, Artificial Sequence
  Synthetic
cggccagccautcctactuc

SEQ ID NO: 55559 - DNA, 22 bp, Artificial Sequence
  Synthetic
gccacatagutcagccaaguct

SEQ ID NO: 55560 - DNA, 21 bp, Artificial Sequence
  Synthetic
ggttggucacttctgugcaaa

SEQ ID NO: 55561 - DNA, 28 bp, Artificial Sequence
  Synthetic
agggaaggttgucatgtgtacaaauaaa

SEQ ID NO: 55562 - DNA, 27 bp, Artificial Sequence
  Synthetic
acaaaagggtcaucaaaacttcaaucc

SEQ ID NO: 55563 - DNA, 27 bp, Artificial Sequence
  Synthetic
gctccaaaugaacacttatacagcaut

SEQ ID NO: 55564 - DNA, 23 bp, Artificial Sequence
  Synthetic
agagucacacacacuggaagaga

SEQ ID NO: 55565 - DNA, 27 bp, Artificial Sequence
  Synthetic
gctctatttgcagugttaatgtgctut

SEQ ID NO: 55566 - DNA, 21 bp, Artificial Sequence
  Synthetic
cccctcacgutcactggaaut

SEQ ID NO: 55567 - DNA, 29 bp, Artificial Sequence
  Synthetic
gactcattttgcutttcttttcctcaugt

SEQ ID NO: 55568 - DNA, 21 bp, Artificial Sequence
  Synthetic
tcctaugaaccctctguccgt

SEQ ID NO: 55569 - DNA, 24 bp, Artificial Sequence
  Synthetic
agcagcatttauacgagtcgtgut

SEQ ID NO: 55570 - DNA, 25 bp, Artificial Sequence
  Synthetic
actttttgggagaaggutccactut

SEQ ID NO: 55571 - DNA, 28 bp, Artificial Sequence
  Synthetic
ccaaaacgaaguacattcttctcaugga

SEQ ID NO: 55572 - DNA, 26 bp, Artificial Sequence
  Synthetic
tctctcuacacaacaaaccatcucac

SEQ ID NO: 55573 - DNA, 20 bp, Artificial Sequence
  Synthetic
gggaaggaaugcccacuact

SEQ ID NO: 55574 - DNA, 20 bp, Artificial Sequence
  Synthetic
cctgagcgccaucagttuga

SEQ ID NO: 55575 - DNA, 21 bp, Artificial Sequence
  Synthetic
ccagaggugtacacagtgucc

SEQ ID NO: 55576 - DNA, 21 bp, Artificial Sequence
  Synthetic
tcuatgguggcgagccaaaag

SEQ ID NO: 55577 - DNA, 25 bp, Artificial Sequence
  Synthetic
ggatcgatctcuttcctggtgttug

SEQ ID NO: 55578 - DNA, 23 bp, Artificial Sequence
  Synthetic
ctggccagaaaagacuccttuaa

SEQ ID NO: 55579 - DNA, 25 bp, Artificial Sequence
  Synthetic
caaatgtgtggcuttcttctctucc

SEQ ID NO: 55580 - DNA, 21 bp, Artificial Sequence
  Synthetic
ctgaagacacugccccttgut

SEQ ID NO: 55581 - DNA, 23 bp, Artificial Sequence
  Synthetic
aacgtggcautttaccctcauct

SEQ ID NO: 55582 - DNA, 24 bp, Artificial Sequence
  Synthetic
ccaggaatuccctgcaaugaagaa

SEQ ID NO: 55583 - DNA, 24 bp, Artificial Sequence
  Synthetic
gctcttcacugacacgctttuact

SEQ ID NO: 55584 - DNA, 20 bp, Artificial Sequence
  Synthetic
gccttuggcctctcacugaa

SEQ ID NO: 55585 - DNA, 22 bp, Artificial Sequence
  Synthetic
gcaccggcuacagaatgagaua

SEQ ID NO: 55586 - DNA, 22 bp, Artificial Sequence
  Synthetic
cctctgtcucctcctcgtacug

SEQ ID NO: 55587 - DNA, 21 bp, Artificial Sequence
  Synthetic
tcaaacagugaggugccacat

SEQ ID NO: 55588 - DNA, 20 bp, Artificial Sequence
  Synthetic
gucaaaggcactcugggaca

SEQ ID NO: 55589 - DNA, 22 bp, Artificial Sequence
  Synthetic
tggtcaccaacaaucccuacga

SEQ ID NO: 55590 - DNA, 21 bp, Artificial Sequence
  Synthetic
gctcugggcacagauagacat

SEQ ID NO: 55591 - DNA, 22 bp, Artificial Sequence
  Synthetic
gatcatugccaagcugaccaag

SEQ ID NO: 55592 - DNA, 22 bp, Artificial Sequence
  Synthetic
ggagatgtccuaggaggtccug

SEQ ID NO: 55593 - DNA, 23 bp, Artificial Sequence
  Synthetic
ttcctgcatcuctttctggcaut

SEQ ID NO: 55594 - DNA, 21 bp, Artificial Sequence
  Synthetic
ccacagcaacauccucagagt

SEQ ID NO: 55595 - DNA, 24 bp, Artificial Sequence
  Synthetic
ggctgcagaagutctcatttgcua

SEQ ID NO: 55596 - DNA, 21 bp, Artificial Sequence
  Synthetic
ctgcaugagaagggtguccaa

SEQ ID NO: 55597 - DNA, 23 bp, Artificial Sequence
  Synthetic
gtcttacagcgucaatgucacct

SEQ ID NO: 55598 - DNA, 26 bp, Artificial Sequence
  Synthetic
tttctagggcaaugtgtcagtatucc

SEQ ID NO: 55599 - DNA, 31 bp, Artificial Sequence
  Synthetic
tggtttctttgatucttaatccttgatucca

SEQ ID NO: 55600 - DNA, 21 bp, Artificial Sequence
  Synthetic
cttcttggucaccctcaggut

SEQ ID NO: 55601 - DNA, 23 bp, Artificial Sequence
  Synthetic
aggcaugtttaacauccagcact

SEQ ID NO: 55602 - DNA, 21 bp, Artificial Sequence
  Synthetic
ggaggtgugcgtttacuggaa

SEQ ID NO: 55603 - DNA, 26 bp, Artificial Sequence
  Synthetic
gtgggactacuttcattttccuccat

SEQ ID NO: 55604 - DNA, 21 bp, Artificial Sequence
  Synthetic
ttcgagtgguaatggcctgug

SEQ ID NO: 55605 - DNA, 26 bp, Artificial Sequence
  Synthetic
acctctgtcatucaacgtttctgaut

SEQ ID NO: 55606 - DNA, 24 bp, Artificial Sequence
  Synthetic
gttctuacaggcaaaggaaugcag

SEQ ID NO: 55607 - DNA, 24 bp, Artificial Sequence
  Synthetic
cacagtcacgcugtatttcttuga

SEQ ID NO: 55608 - DNA, 28 bp, Artificial Sequence
  Synthetic
gtgtaatctaugcagtccttgauaagca

SEQ ID NO: 55609 - DNA, 26 bp, Artificial Sequence
  Synthetic
tgtgctgagccuttttctaaaucact

SEQ ID NO: 55610 - DNA, 23 bp, Artificial Sequence
  Synthetic
ccccaacugcaaagcataagaut

SEQ ID NO: 55611 - DNA, 20 bp, Artificial Sequence
  Synthetic
tggatgaaugccaggccauc

SEQ ID NO: 55612 - DNA, 25 bp, Artificial Sequence
  Synthetic
ctacagtguacttacgttguccaca

SEQ ID NO: 55613 - DNA, 28 bp, Artificial Sequence
  Synthetic
gagctgttgcaauctatgcatttaagut

SEQ ID NO: 55614 - DNA, 28 bp, Artificial Sequence
  Synthetic
gtgcttcatttucatcctctagtttucc

SEQ ID NO: 55615 - DNA, 25 bp, Artificial Sequence
  Synthetic
ttgttttgccaggutggtatucaac

SEQ ID NO: 55616 - DNA, 21 bp, Artificial Sequence
  Synthetic
ctgtcctgcutgaggtctcut

SEQ ID NO: 55617 - DNA, 24 bp, Artificial Sequence
  Synthetic
gcctagaatucagcccaagtttut

SEQ ID NO: 55618 - DNA, 25 bp, Artificial Sequence
  Synthetic
attccauccccgaaaacactaacut

SEQ ID NO: 55619 - DNA, 20 bp, Artificial Sequence
  Synthetic
caacagggaugcggttcuga

SEQ ID NO: 55620 - DNA, 21 bp, Artificial Sequence
  Synthetic
ggacacccaaugacccaguag

SEQ ID NO: 55621 - DNA, 23 bp, Artificial Sequence
  Synthetic
attccugttgacatuggagagca

SEQ ID NO: 55622 - DNA, 22 bp, Artificial Sequence
  Synthetic
ccaacctucccacatcatccut

SEQ ID NO: 55623 - DNA, 27 bp, Artificial Sequence
  Synthetic
cagatacccugaccataaatgaugacc

SEQ ID NO: 55624 - DNA, 23 bp, Artificial Sequence
  Synthetic
ccccttaagaccuagggaacuct

SEQ ID NO: 55625 - DNA, 24 bp, Artificial Sequence
  Synthetic
ttcactacttuggtccttggacug

SEQ ID NO: 55626 - DNA, 25 bp, Artificial Sequence
  Synthetic
ggttccttctucaccttcttagcut

SEQ ID NO: 55627 - DNA, 21 bp, Artificial Sequence
  Synthetic
gctgctcucaggagagaggua

SEQ ID NO: 55628 - DNA, 23 bp, Artificial Sequence
  Synthetic
gctcggucaaaggaaacattgug

SEQ ID NO: 55629 - DNA, 26 bp, Artificial Sequence
  Synthetic
agtttaatgtcuccatggtgaaccug

SEQ ID NO: 55630 - DNA, 19 bp, Artificial Sequence
  Synthetic
ccccugacacgcattgugt

SEQ ID NO: 55631 - DNA, 22 bp, Artificial Sequence
  Synthetic
aggactctcuaagccagtgugt

SEQ ID NO: 55632 - DNA, 19 bp, Artificial Sequence
  Synthetic
guactggccucaggccaaa

SEQ ID NO: 55633 - DNA, 18 bp, Artificial Sequence
  Synthetic
gtcccggugctcctugaa

SEQ ID NO: 55634 - DNA, 19 bp, Artificial Sequence
  Synthetic
aaagcaguagugccccaca

SEQ ID NO: 55635 - DNA, 19 bp, Artificial Sequence
  Synthetic
ggcgaucacagcgcaacua

SEQ ID NO: 55636 - DNA, 22 bp, Artificial Sequence
  Synthetic
ctttcctcuctgcactcuggat

SEQ ID NO: 55637 - DNA, 17 bp, Artificial Sequence
  Synthetic
cugacgcctcuggcaca

SEQ ID NO: 55638 - DNA, 18 bp, Artificial Sequence
  Synthetic
ggagcaggutgugggaga

SEQ ID NO: 55639 - DNA, 26 bp, Artificial Sequence
  Synthetic
ttcatttgggucttccaucagaaagt

SEQ ID NO: 55640 - DNA, 22 bp, Artificial Sequence
  Synthetic
ggagcctucatctgtactucgt

SEQ ID NO: 55641 - DNA, 20 bp, Artificial Sequence
  Synthetic
aatgccctaugctggctugt

SEQ ID NO: 55642 - DNA, 27 bp, Artificial Sequence
  Synthetic
atgtcactcutatgtgtcaucaccaaa

SEQ ID NO: 55643 - DNA, 22 bp, Artificial Sequence
  Synthetic
actgccatucactgtgttccuc

SEQ ID NO: 55644 - DNA, 22 bp, Artificial Sequence
  Synthetic
tgtgaaggcuccagagugaaga

SEQ ID NO: 55645 - DNA, 19 bp, Artificial Sequence
  Synthetic
agggtguggcttcaugacc

SEQ ID NO: 55646 - DNA, 22 bp, Artificial Sequence
  Synthetic
ggcttctcucatggaccucaac

SEQ ID NO: 55647 - DNA, 26 bp, Artificial Sequence
  Synthetic
ggacagagaaagugaaggagaaacuc

SEQ ID NO: 55648 - DNA, 20 bp, Artificial Sequence
  Synthetic
tcctccgugatgctgugaac

SEQ ID NO: 55649 - DNA, 26 bp, Artificial Sequence
  Synthetic
gtagguactttccaauaaccacacca

SEQ ID NO: 55650 - DNA, 20 bp, Artificial Sequence
  Synthetic
ccagctccutgcactttgut

SEQ ID NO: 55651 - DNA, 20 bp, Artificial Sequence
  Synthetic
cccutcugggagaggaggac

SEQ ID NO: 55652 - DNA, 22 bp, Artificial Sequence
  Synthetic
ggaaagaggccaaacugcugaa

SEQ ID NO: 55653 - DNA, 23 bp, Artificial Sequence
  Synthetic
aaatatgagcuacagcuggcgaa

SEQ ID NO: 55654 - DNA, 20 bp, Artificial Sequence
  Synthetic
tggcctagcugagtccacut

SEQ ID NO: 55655 - DNA, 19 bp, Artificial Sequence
  Synthetic
tgagcgaugctgacacucc

SEQ ID NO: 55656 - DNA, 21 bp, Artificial Sequence
  Synthetic
gtacagtacccuctccccuca

SEQ ID NO: 55657 - DNA, 21 bp, Artificial Sequence
  Synthetic
tccagatcutccgagcucact

SEQ ID NO: 55658 - DNA, 23 bp, Artificial Sequence
  Synthetic
actgggagaugtagacaggtuca

SEQ ID NO: 55659 - DNA, 28 bp, Artificial Sequence
  Synthetic
tcgtcatttctgauagccttctctttut

SEQ ID NO: 55660 - DNA, 24 bp, Artificial Sequence
  Synthetic
gaatttacgucaggtggacctcut

SEQ ID NO: 55661 - DNA, 25 bp, Artificial Sequence
  Synthetic
cctcccgtuaagtctgctttuaaca

SEQ ID NO: 55662 - DNA, 26 bp, Artificial Sequence
  Synthetic
ccataccuaacttcttgtgugggaaa

SEQ ID NO: 55663 - DNA, 29 bp, Artificial Sequence
  Synthetic
cagtgaagaugcaaaagaaatgguaagat

SEQ ID NO: 55664 - DNA, 22 bp, Artificial Sequence
  Synthetic
aagatttggcgacuggttctut

SEQ ID NO: 55665 - DNA, 28 bp, Artificial Sequence
  Synthetic
ggtgttgtgaaggucaaaaataatguca

SEQ ID NO: 55666 - DNA, 22 bp, Artificial Sequence
  Synthetic
tgcutcacgtttugccaaacat

SEQ ID NO: 55667 - DNA, 24 bp, Artificial Sequence
  Synthetic
gatatcagctcucagaacccctug

SEQ ID NO: 55668 - DNA, 20 bp, Artificial Sequence
  Synthetic
gtcagcgutggtctcaucct

SEQ ID NO: 55669 - DNA, 21 bp, Artificial Sequence
  Synthetic
gccagagcutgtccattgguc

SEQ ID NO: 55670 - DNA, 27 bp, Artificial Sequence
  Synthetic
tccagcaaaugcatgaagaattucaag

SEQ ID NO: 55671 - DNA, 28 bp, Artificial Sequence
  Synthetic
atgcaagtaaauacctagacccuacaga

SEQ ID NO: 55672 - DNA, 24 bp, Artificial Sequence
  Synthetic
gtggacaaagcugcaaaagagaug

SEQ ID NO: 55673 - DNA, 23 bp, Artificial Sequence
  Synthetic
caccuccuccaagaagaaagcaa

SEQ ID NO: 55674 - DNA, 23 bp, Artificial Sequence
  Synthetic
cattcaugttccccuaaccacct

SEQ ID NO: 55675 - DNA, 21 bp, Artificial Sequence
  Synthetic
tccaggaagccauccacttug

SEQ ID NO: 55676 - DNA, 22 bp, Artificial Sequence
  Synthetic
cuggtagttacaugggccgaaa

SEQ ID NO: 55677 - DNA, 26 bp, Artificial Sequence
  Synthetic
ctaatataatuacagctcgggcugct

SEQ ID NO: 55678 - DNA, 26 bp, Artificial Sequence
  Synthetic
cctagacauaggaggaatccatcuga

SEQ ID NO: 55679 - DNA, 21 bp, Artificial Sequence
  Synthetic
aggattagccagcutggtgug

SEQ ID NO: 55680 - DNA, 21 bp, Artificial Sequence
  Synthetic
tccccuggaggagggatacua

SEQ ID NO: 55681 - DNA, 23 bp, Artificial Sequence
  Synthetic
ggaagagctuttctgaggttugg

SEQ ID NO: 55682 - DNA, 23 bp, Artificial Sequence
  Synthetic
ggtggccaaguatgaugagaact

SEQ ID NO: 55683 - DNA, 21 bp, Artificial Sequence
  Synthetic
gcaatgtcgutctgcagctuc

SEQ ID NO: 55684 - DNA, 20 bp, Artificial Sequence
  Synthetic
gggccuatggactgugaagt

SEQ ID NO: 55685 - DNA, 20 bp, Artificial Sequence
  Synthetic
gatcaaggaucggctcugga

SEQ ID NO: 55686 - DNA, 26 bp, Artificial Sequence
  Synthetic
tggctcagaatucaccttctacatut

SEQ ID NO: 55687 - DNA, 26 bp, Artificial Sequence
  Synthetic
aaccttttugaaaaccaagagugcat

SEQ ID NO: 55688 - DNA, 27 bp, Artificial Sequence
  Synthetic
agataatcatacugaaggcagctcuga

SEQ ID NO: 55689 - DNA, 22 bp, Artificial Sequence
  Synthetic
tgtgcaguaaagaauggccagt

SEQ ID NO: 55690 - DNA, 21 bp, Artificial Sequence
  Synthetic
accaucagagagcctugagga

SEQ ID NO: 55691 - DNA, 28 bp, Artificial Sequence
  Synthetic
catcagcagcuagatccttctttgauaa

SEQ ID NO: 55692 - DNA, 25 bp, Artificial Sequence
  Synthetic
cttcggaaautgaagaaatcugcct

SEQ ID NO: 55693 - DNA, 22 bp, Artificial Sequence
  Synthetic
agggacatcutttggccgaauc

SEQ ID NO: 55694 - DNA, 22 bp, Artificial Sequence
  Synthetic
gtcttttcuccaggcctgatuc

SEQ ID NO: 55695 - DNA, 28 bp, Artificial Sequence
  Synthetic
aucatcattatgctugcaaaaacgaact

SEQ ID NO: 55696 - DNA, 24 bp, Artificial Sequence
  Synthetic
ctgccuggaattgaugaagaaacc

SEQ ID NO: 55697 - DNA, 28 bp, Artificial Sequence
  Synthetic
tggtgtcttatautgttgctcaaaguca

SEQ ID NO: 55698 - DNA, 19 bp, Artificial Sequence
  Synthetic
ccaggaaggcugucagagg

SEQ ID NO: 55699 - DNA, 21 bp, Artificial Sequence
  Synthetic
ccctgatcacugcccctttut

SEQ ID NO: 55700 - DNA, 21 bp, Artificial Sequence
  Synthetic
gtccaggucgctggtattcug

SEQ ID NO: 55701 - DNA, 21 bp, Artificial Sequence
  Synthetic
cctcagctcugtggaagggua

SEQ ID NO: 55702 - DNA, 25 bp, Artificial Sequence
  Synthetic
ccagacccaacuaaacaaacaugga

SEQ ID NO: 55703 - DNA, 23 bp, Artificial Sequence
  Synthetic
tgtaaactugaccagcugcagag

SEQ ID NO: 55704 - DNA, 19 bp, Artificial Sequence
  Synthetic
cggagcugcagagatcuga

SEQ ID NO: 55705 - DNA, 20 bp, Artificial Sequence
  Synthetic
tctgacagccccucctaucc

SEQ ID NO: 55706 - DNA, 22 bp, Artificial Sequence
  Synthetic
ctgctgaggaggcuatgtgtua

SEQ ID NO: 55707 - DNA, 27 bp, Artificial Sequence
  Synthetic
actggaaatcucaagcttatccatguc

SEQ ID NO: 55708 - DNA, 20 bp, Artificial Sequence
  Synthetic
ccttcucccaccctcacuga

SEQ ID NO: 55709 - DNA, 24 bp, Artificial Sequence
  Synthetic
cctgttctcugtgaagctgaaugg

SEQ ID NO: 55710 - DNA, 22 bp, Artificial Sequence
  Synthetic
gttgatagcuctgctccauggg

SEQ ID NO: 55711 - DNA, 20 bp, Artificial Sequence
  Synthetic
ctgcgccaaugaugaaagca

SEQ ID NO: 55712 - DNA, 28 bp, Artificial Sequence
  Synthetic
tggcttcctaauttatttctctgugcat

SEQ ID NO: 55713 - DNA, 29 bp, Artificial Sequence
  Synthetic
cttttcttcctccutcatgatggattuct

SEQ ID NO: 55714 - DNA, 25 bp, Artificial Sequence
  Synthetic
gttctgcaccaggaugtaattucca

SEQ ID NO: 55715 - DNA, 22 bp, Artificial Sequence
  Synthetic
ggttcagctugtcctgcatcut

SEQ ID NO: 55716 - DNA, 21 bp, Artificial Sequence
  Synthetic
cgggtcucaccctttcuacct

SEQ ID NO: 55717 - DNA, 22 bp, Artificial Sequence
  Synthetic
gcatcagcccauaggactcaut

SEQ ID NO: 55718 - DNA, 24 bp, Artificial Sequence
  Synthetic
tgagccaggaacaacaugacaaut

SEQ ID NO: 55719 - DNA, 26 bp, Artificial Sequence
  Synthetic
caatatcacugaccagttctgcaaug

SEQ ID NO: 55720 - DNA, 23 bp, Artificial Sequence
  Synthetic
gtgcctguccattgtccttatug

SEQ ID NO: 55721 - DNA, 25 bp, Artificial Sequence
  Synthetic
tcttgtctcctutttcctttgggut

SEQ ID NO: 55722 - DNA, 21 bp, Artificial Sequence
  Synthetic
ggacatagucttgggcaugct

SEQ ID NO: 55723 - DNA, 27 bp, Artificial Sequence
  Synthetic
tgaaacagaccaaucatgtgcatttut

SEQ ID NO: 55724 - DNA, 26 bp, Artificial Sequence
  Synthetic
gactuacaaaagagcaatgctaugcc

SEQ ID NO: 55725 - DNA, 24 bp, Artificial Sequence
  Synthetic
actgtgugactgcatuaccgaaaa

SEQ ID NO: 55726 - DNA, 27 bp, Artificial Sequence
  Synthetic
cctttctgattucatatcttcccuggt

SEQ ID NO: 55727 - DNA, 28 bp, Artificial Sequence
  Synthetic
ggaggatggutcagtctauacaacaaat

SEQ ID NO: 55728 - DNA, 25 bp, Artificial Sequence
  Synthetic
gagatggcaauggagaagtuacaga

SEQ ID NO: 55729 - DNA, 27 bp, Artificial Sequence
  Synthetic
agctgcaaaacaugaacacatgattut

SEQ ID NO: 55730 - DNA, 21 bp, Artificial Sequence
  Synthetic
cttccugacccaatggctuct

SEQ ID NO: 55731 - DNA, 27 bp, Artificial Sequence
  Synthetic
cattagcauaaggctgatcuaccaagg

SEQ ID NO: 55732 - DNA, 21 bp, Artificial Sequence
  Synthetic
ggccccatucccagtcaatua

SEQ ID NO: 55733 - DNA, 23 bp, Artificial Sequence
  Synthetic
cacaauggaagtgucaagagcag

SEQ ID NO: 55734 - DNA, 20 bp, Artificial Sequence
  Synthetic
aggucgcccaaatugcaaga

SEQ ID NO: 55735 - DNA, 21 bp, Artificial Sequence
  Synthetic
cacatccacutcctgcugaac

SEQ ID NO: 55736 - DNA, 21 bp, Artificial Sequence
  Synthetic
catcctgagutgtcacgugga

SEQ ID NO: 55737 - DNA, 22 bp, Artificial Sequence
  Synthetic
tgtgaaugaggccattggtcut

SEQ ID NO: 55738 - DNA, 27 bp, Artificial Sequence
  Synthetic
gtaaagtuaaaaccaaatgaccugcca

SEQ ID NO: 55739 - DNA, 20 bp, Artificial Sequence
  Synthetic
cgctgcccaugtcatugaga

SEQ ID NO: 55740 - DNA, 21 bp, Artificial Sequence
  Synthetic
ccttgtcagugtctccuccga

SEQ ID NO: 55741 - DNA, 22 bp, Artificial Sequence
  Synthetic
ggaaaugatcaagucgggcaat

SEQ ID NO: 55742 - DNA, 20 bp, Artificial Sequence
  Synthetic
ggccgctucacctctcatuc

SEQ ID NO: 55743 - DNA, 21 bp, Artificial Sequence
  Synthetic
gaggccagcautcagagtuca

SEQ ID NO: 55744 - DNA, 20 bp, Artificial Sequence
  Synthetic
gtccatcuccttccgcauca

SEQ ID NO: 55745 - DNA, 22 bp, Artificial Sequence
  Synthetic
aagctgtcucaggtcagtccua

SEQ ID NO: 55746 - DNA, 17 bp, Artificial Sequence
  Synthetic
gugaccccgcacacuct

SEQ ID NO: 55747 - DNA, 17 bp, Artificial Sequence
  Synthetic
ccugagcuccccagcac

SEQ ID NO: 55748 - DNA, 20 bp, Artificial Sequence
  Synthetic
acctcccaucttcccctugt

SEQ ID NO: 55749 - DNA, 21 bp, Artificial Sequence
  Synthetic
ggctagautcagaggaugcca

SEQ ID NO: 55750 - DNA, 19 bp, Artificial Sequence
  Synthetic
agtgtucgcacagcccaut

SEQ ID NO: 55751 - DNA, 20 bp, Artificial Sequence
  Synthetic
ggatacagggcguagagguc

SEQ ID NO: 55752 - DNA, 18 bp, Artificial Sequence
  Synthetic
tccaagggcuccuccaca

SEQ ID NO: 55753 - DNA, 20 bp, Artificial Sequence
  Synthetic
gtcagcagggcuggaacuaa

SEQ ID NO: 55754 - DNA, 22 bp, Artificial Sequence
  Synthetic
gctcctugaagcagtagacugt

SEQ ID NO: 55755 - DNA, 20 bp, Artificial Sequence
  Synthetic
gctcuaccggctacucgaga

SEQ ID NO: 55756 - DNA, 20 bp, Artificial Sequence
  Synthetic
caggcaugctcatcccugat

SEQ ID NO: 55757 - DNA, 27 bp, Artificial Sequence
  Synthetic
cgatccggtucacagaaaaataaacug

SEQ ID NO: 55758 - DNA, 21 bp, Artificial Sequence
  Synthetic
ggcttccccutccctttctug

SEQ ID NO: 55759 - DNA, 20 bp, Artificial Sequence
  Synthetic
ctggcacccutcactcugaa

SEQ ID NO: 55760 - DNA, 28 bp, Artificial Sequence
  Synthetic
caggatgaaccagagutaataggtcaut

SEQ ID NO: 55761 - DNA, 28 bp, Artificial Sequence
  Synthetic
tgagtaaaactaautggttgtccugcat

SEQ ID NO: 55762 - DNA, 21 bp, Artificial Sequence
  Synthetic
gcatgtuggagactugggcaa

SEQ ID NO: 55763 - DNA, 28 bp, Artificial Sequence
  Synthetic
cgcgactaacaaucaaagtgaaaagaua

SEQ ID NO: 55764 - DNA, 21 bp, Artificial Sequence
  Synthetic
gcccagctuttgcctcagaua

SEQ ID NO: 55765 - DNA, 22 bp, Artificial Sequence
  Synthetic
gaggtcgaagaaucgctctuca

SEQ ID NO: 55766 - DNA, 23 bp, Artificial Sequence
  Synthetic
gggtagagcugtggattcattut

SEQ ID NO: 55767 - DNA, 24 bp, Artificial Sequence
  Synthetic
gacggacatttutcctccctctut

SEQ ID NO: 55768 - DNA, 27 bp, Artificial Sequence
  Synthetic
gaggactgtguggagtgattattucaa

SEQ ID NO: 55769 - DNA, 20 bp, Artificial Sequence
  Synthetic
cagcttauacaccccgcuca

SEQ ID NO: 55770 - DNA, 28 bp, Artificial Sequence
  Synthetic
ttgacctaccauaataaaccatgtgguc

SEQ ID NO: 55771 - DNA, 25 bp, Artificial Sequence
  Synthetic
ttctctttaccugctgccatttuct

SEQ ID NO: 55772 - DNA, 25 bp, Artificial Sequence
  Synthetic
tgatatgccutgagctttucgaagt

SEQ ID NO: 55773 - DNA, 24 bp, Artificial Sequence
  Synthetic
gaccaacugccacaataccaacua

SEQ ID NO: 55774 - DNA, 24 bp, Artificial Sequence
  Synthetic
cccagcctaugatgagttcttugt

SEQ ID NO: 55775 - DNA, 27 bp, Artificial Sequence
  Synthetic
tgaaattcutcttcgttauggacagca

SEQ ID NO: 55776 - DNA, 28 bp, Artificial Sequence
  Synthetic
ttgctcacutgaagtcaguagaaaaaga

SEQ ID NO: 55777 - DNA, 24 bp, Artificial Sequence
  Synthetic
gctatgcagacagutggtguacat

SEQ ID NO: 55778 - DNA, 25 bp, Artificial Sequence
  Synthetic
gagagagaatcugcaaatggagcua

SEQ ID NO: 55779 - DNA, 28 bp, Artificial Sequence
  Synthetic
cagatcttgatutccttagagagugagg

SEQ ID NO: 55780 - DNA, 23 bp, Artificial Sequence
  Synthetic
ctcttgaagtucccggagtctut

SEQ ID NO: 55781 - DNA, 24 bp, Artificial Sequence
  Synthetic
gcctaaaaccutgtcatatugcca

SEQ ID NO: 55782 - DNA, 27 bp, Artificial Sequence
  Synthetic
tgtaaaguaggacatgatcuggaacca

SEQ ID NO: 55783 - DNA, 28 bp, Artificial Sequence
  Synthetic
acaatcaactcguaattatccacaggut

SEQ ID NO: 55784 - DNA, 25 bp, Artificial Sequence
  Synthetic
ccacaugaaagatguacagggacat

SEQ ID NO: 55785 - DNA, 21 bp, Artificial Sequence
  Synthetic
gggcaaagcugtcaugagaca

SEQ ID NO: 55786 - DNA, 22 bp, Artificial Sequence
  Synthetic
tguggagaggagaugggaaagt

SEQ ID NO: 55787 - DNA, 22 bp, Artificial Sequence
  Synthetic
caacttccttucctcccctgug

SEQ ID NO: 55788 - DNA, 23 bp, Artificial Sequence
  Synthetic
gctgttccaagugcaattcaugt

SEQ ID NO: 55789 - DNA, 26 bp, Artificial Sequence
  Synthetic
cttctgaccaucatttctcttuccct

SEQ ID NO: 55790 - DNA, 24 bp, Artificial Sequence
  Synthetic
cattgaggagugaagaagcaggua

SEQ ID NO: 55791 - DNA, 25 bp, Artificial Sequence
  Synthetic
cagaggtaacuagagagtgguaggg

SEQ ID NO: 55792 - DNA, 28 bp, Artificial Sequence
  Synthetic
ttcacctctttcutctttggttttcuct

SEQ ID NO: 55793 - DNA, 23 bp, Artificial Sequence
  Synthetic
gattccaguaaccgcaaacctug

SEQ ID NO: 55794 - DNA, 26 bp, Artificial Sequence
  Synthetic
ggtugaagaaggagaaaagtucgact

SEQ ID NO: 55795 - DNA, 26 bp, Artificial Sequence
  Synthetic
tgaagctatcguttcagctacttugg

SEQ ID NO: 55796 - DNA, 26 bp, Artificial Sequence
  Synthetic
tgacccuaaactacagacuccaaaga

SEQ ID NO: 55797 - DNA, 20 bp, Artificial Sequence
  Synthetic
agtcagugacgccguaacag

SEQ ID NO: 55798 - DNA, 25 bp, Artificial Sequence
  Synthetic
gctggtacttcuacattcaggctua

SEQ ID NO: 55799 - DNA, 28 bp, Artificial Sequence
  Synthetic
gctctctcauacattgcaacuagaagaa

SEQ ID NO: 55800 - DNA, 25 bp, Artificial Sequence
  Synthetic
gtggaacttguacaacgtggagaua

SEQ ID NO: 55801 - DNA, 28 bp, Artificial Sequence
  Synthetic
gcttctacaaaaagugcttcatcttuca

SEQ ID NO: 55802 - DNA, 20 bp, Artificial Sequence
  Synthetic
ttcgctugctaatgggugga

SEQ ID NO: 55803 - DNA, 28 bp, Artificial Sequence
  Synthetic
attggtagccgautacattttctcaaut

SEQ ID NO: 55804 - DNA, 23 bp, Artificial Sequence
  Synthetic
ctgaagttgauggcacacaagut

SEQ ID NO: 55805 - DNA, 25 bp, Artificial Sequence
  Synthetic
tgcagaaaaaucatgctcttgugac

SEQ ID NO: 55806 - DNA, 21 bp, Artificial Sequence
  Synthetic
cagaacaggcccucagtucaa

SEQ ID NO: 55807 - DNA, 23 bp, Artificial Sequence
  Synthetic
cttaugaccaggagccacucaag

SEQ ID NO: 55808 - DNA, 25 bp, Artificial Sequence
  Synthetic
tcacccattttuatctcgtgctcuc

SEQ ID NO: 55809 - DNA, 27 bp, Artificial Sequence
  Synthetic
aaaccctcctaccutttctcctaacua

SEQ ID NO: 55810 - DNA, 27 bp, Artificial Sequence
  Synthetic
acugatagtaacaucaagagcaaggga

SEQ ID NO: 55811 - DNA, 20 bp, Artificial Sequence
  Synthetic
ccgacacaucagcccucaag

SEQ ID NO: 55812 - DNA, 22 bp, Artificial Sequence
  Synthetic
caactgtucccgttgagacuct

SEQ ID NO: 55813 - DNA, 21 bp, Artificial Sequence
  Synthetic
gggctagagcacuggacaaug

SEQ ID NO: 55814 - DNA, 28 bp, Artificial Sequence
  Synthetic
aaatgcttcttccutgggtgtataagut

SEQ ID NO: 55815 - DNA, 28 bp, Artificial Sequence
  Synthetic
actacttactcugattccttttggucct

SEQ ID NO: 55816 - DNA, 28 bp, Artificial Sequence
  Synthetic
agatcatttttcuggttttgctggttut

SEQ ID NO: 55817 - DNA, 28 bp, Artificial Sequence
  Synthetic
ttgagggattgtugtaatcttctggtut

SEQ ID NO: 55818 - DNA, 25 bp, Artificial Sequence
  Synthetic
attcttatgcccucaatcacctucc

SEQ ID NO: 55819 - DNA, 28 bp, Artificial Sequence
  Synthetic
gctatcttgucccagaggagtttaauat

SEQ ID NO: 55820 - DNA, 24 bp, Artificial Sequence
  Synthetic
ggcctgttccutcactagattuga

SEQ ID NO: 55821 - DNA, 22 bp, Artificial Sequence
  Synthetic
cgaugaagggagcugaacgaaa

SEQ ID NO: 55822 - DNA, 29 bp, Artificial Sequence
  Synthetic
tgttaccctggauatgttggatgtuagat

SEQ ID NO: 55823 - DNA, 28 bp, Artificial Sequence
  Synthetic
tctccuacaaggcaaatatgtttucaca

SEQ ID NO: 55824 - DNA, 27 bp, Artificial Sequence
  Synthetic
ttgttttcacaggutgttttgaauggt

SEQ ID NO: 55825 - DNA, 28 bp, Artificial Sequence
  Synthetic
gctagtggtgcugcagattattattcut

SEQ ID NO: 55826 - DNA, 27 bp, Artificial Sequence
  Synthetic
agggagatcagcuttagttcttcagua

SEQ ID NO: 55827 - DNA, 29 bp, Artificial Sequence
  Synthetic
accccagcuaataattccagtuaagaaac

SEQ ID NO: 55828 - DNA, 28 bp, Artificial Sequence
  Synthetic
acatgactttctutgaagactgaacugt

SEQ ID NO: 55829 - DNA, 21 bp, Artificial Sequence
  Synthetic
agaggaggcacugagaaccut

SEQ ID NO: 55830 - DNA, 19 bp, Artificial Sequence
  Synthetic
cctctguggcccacctcua

SEQ ID NO: 55831 - DNA, 18 bp, Artificial Sequence
  Synthetic
ctcctcugccaccagcuc

SEQ ID NO: 55832 - DNA, 20 bp, Artificial Sequence
  Synthetic
ccatgcgccugtcatctugt

SEQ ID NO: 55833 - DNA, 23 bp, Artificial Sequence
  Synthetic
tgctcatccuctgcttcaucaag

SEQ ID NO: 55834 - DNA, 22 bp, Artificial Sequence
  Synthetic
gctgctttucctggtctttgug

SEQ ID NO: 55835 - DNA, 22 bp, Artificial Sequence
  Synthetic
ccaggactuccccaaagaccua

SEQ ID NO: 55836 - DNA, 26 bp, Artificial Sequence
  Synthetic
ctaaaatccattucctacctgcccua

SEQ ID NO: 55837 - DNA, 27 bp, Artificial Sequence
  Synthetic
aaacacattactacucacggctacauc

SEQ ID NO: 55838 - DNA, 24 bp, Artificial Sequence
  Synthetic
aggactgaagaggcugaagacaua

SEQ ID NO: 55839 - DNA, 22 bp, Artificial Sequence
  Synthetic
aagcacaucatgcattgucacc

SEQ ID NO: 55840 - DNA, 26 bp, Artificial Sequence
  Synthetic
ggattccacucccacagatatacuct

SEQ ID NO: 55841 - DNA, 26 bp, Artificial Sequence
  Synthetic
accaaaagcuggtacttcacugaaaa

SEQ ID NO: 55842 - DNA, 26 bp, Artificial Sequence
  Synthetic
aaactagauccctgtaccucaaggaa

SEQ ID NO: 55843 - DNA, 24 bp, Artificial Sequence
  Synthetic
ggtctaugaagacacacucaccct

SEQ ID NO: 55844 - DNA, 24 bp, Artificial Sequence
  Synthetic
aaacacactaaugtgcaggguact

SEQ ID NO: 55845 - DNA, 28 bp, Artificial Sequence
  Synthetic
cgaaggttucaaagaagctgttcaauat

SEQ ID NO: 55846 - DNA, 28 bp, Artificial Sequence
  Synthetic
aaaacaccagaaautattgttggcagut

SEQ ID NO: 55847 - DNA, 28 bp, Artificial Sequence
  Synthetic
ctgtccacaaaggugctacaattagaua

SEQ ID NO: 55848 - DNA, 19 bp, Artificial Sequence
  Synthetic
tacaaccgccuccgtguag

SEQ ID NO: 55849 - DNA, 26 bp, Artificial Sequence
  Synthetic
catccaatacagcccugaaactgtua

SEQ ID NO: 55850 - DNA, 26 bp, Artificial Sequence
  Synthetic
gcctttuctctttttctuccagggat

SEQ ID NO: 55851 - DNA, 23 bp, Artificial Sequence
  Synthetic
cacaatccuacctgcacctucaa

SEQ ID NO: 55852 - DNA, 20 bp, Artificial Sequence
  Synthetic
ggcactctuagcaccccauc

SEQ ID NO: 55853 - DNA, 21 bp, Artificial Sequence
  Synthetic
tgcagcttugggcaagtttuc

SEQ ID NO: 55854 - DNA, 20 bp, Artificial Sequence
  Synthetic
gagcagcagagacucugacc

SEQ ID NO: 55855 - DNA, 21 bp, Artificial Sequence
  Synthetic
gtgccuccagagaccaaaugt

SEQ ID NO: 55856 - DNA, 20 bp, Artificial Sequence
  Synthetic
caggctatutgggccaugga

SEQ ID NO: 55857 - DNA, 28 bp, Artificial Sequence
  Synthetic
gguattccagataauacaacgcaggaaa

SEQ ID NO: 55858 - DNA, 21 bp, Artificial Sequence
  Synthetic
ctcugacaagtgguccgacaa

SEQ ID NO: 55859 - DNA, 21 bp, Artificial Sequence
  Synthetic
gagaacaagcaggaugctgug

SEQ ID NO: 55860 - DNA, 25 bp, Artificial Sequence
  Synthetic
ccacctcaagutatgggaaaagcua

SEQ ID NO: 55861 - DNA, 23 bp, Artificial Sequence
  Synthetic
atgcuggacaagaacaatcuggt

SEQ ID NO: 55862 - DNA, 20 bp, Artificial Sequence
  Synthetic
cttggcagggucaacacgua

SEQ ID NO: 55863 - DNA, 28 bp, Artificial Sequence
  Synthetic
gctagaggtaattuctgtcctccaatuc

SEQ ID NO: 55864 - DNA, 28 bp, Artificial Sequence
  Synthetic
tgtccagatgugtgtgttaatgaatuct

SEQ ID NO: 55865 - DNA, 21 bp, Artificial Sequence
  Synthetic
ggaatagcggguaaggctugg

SEQ ID NO: 55866 - DNA, 21 bp, Artificial Sequence
  Synthetic
ccgcaggacutcctcacttua

SEQ ID NO: 55867 - DNA, 28 bp, Artificial Sequence
  Synthetic
agagaataaatcaauaagcccacagcuc

SEQ ID NO: 55868 - DNA, 24 bp, Artificial Sequence
  Synthetic
tcctgaccugggtttuagagaaca

SEQ ID NO: 55869 - DNA, 20 bp, Artificial Sequence
  Synthetic
ccactccugcatttcucgga

SEQ ID NO: 55870 - DNA, 21 bp, Artificial Sequence
  Synthetic
cgccccaccutttcagtatug

SEQ ID NO: 55871 - DNA, 24 bp, Artificial Sequence
  Synthetic
ggagugcaggaggcaattauagag

SEQ ID NO: 55872 - DNA, 24 bp, Artificial Sequence
  Synthetic
ggacacttuggaaggattugcaga

SEQ ID NO: 55873 - DNA, 26 bp, Artificial Sequence
  Synthetic
tggatccucctcttctcauagcaaaa

SEQ ID NO: 55874 - DNA, 27 bp, Artificial Sequence
  Synthetic
ttcgttctcttucctgttctttctugt

SEQ ID NO: 55875 - DNA, 23 bp, Artificial Sequence
  Synthetic
tggtcatggucattggaaaccug

SEQ ID NO: 55876 - DNA, 25 bp, Artificial Sequence
  Synthetic
tcttctgatgcugtcctctgatuct

SEQ ID NO: 55877 - DNA, 24 bp, Artificial Sequence
  Synthetic
ggcctcucagagagttcttcugaa

SEQ ID NO: 55878 - DNA, 27 bp, Artificial Sequence
  Synthetic
gaacutagttcctaaauagccccaagt

SEQ ID NO: 55879 - DNA, 23 bp, Artificial Sequence
  Synthetic
tgttcgtcatugcctccatcauc

SEQ ID NO: 55880 - DNA, 25 bp, Artificial Sequence
  Synthetic
ggctgagtgaguagttgtttgctua

SEQ ID NO: 55881 - DNA, 27 bp, Artificial Sequence
  Synthetic
catttaacagcuctgatgatgugcaag

SEQ ID NO: 55882 - DNA, 27 bp, Artificial Sequence
  Synthetic
cataggagccuaaaagggaaugaaagt

SEQ ID NO: 55883 - DNA, 21 bp, Artificial Sequence
  Synthetic
gccttgagguccttgaccaut

SEQ ID NO: 55884 - DNA, 29 bp, Artificial Sequence
  Synthetic
tgaaatccttuggactgaaatacttguct

SEQ ID NO: 55885 - DNA, 25 bp, Artificial Sequence
  Synthetic
catttgtggugctagcattuaggaa

SEQ ID NO: 55886 - DNA, 27 bp, Artificial Sequence
  Synthetic
acaautatttgtaggguaacccaggac

SEQ ID NO: 55887 - DNA, 21 bp, Artificial Sequence
  Synthetic
gcgatccctuctctcctggut

SEQ ID NO: 55888 - DNA, 26 bp, Artificial Sequence
  Synthetic
gattacagcuttgaaguagagcaggt

SEQ ID NO: 55889 - DNA, 22 bp, Artificial Sequence
  Synthetic
acagcctugcgtgttcgataut

SEQ ID NO: 55890 - DNA, 25 bp, Artificial Sequence
  Synthetic
tccttaacgaagugcacatgtauga

SEQ ID NO: 55891 - DNA, 23 bp, Artificial Sequence
  Synthetic
cttgttagggugatcguggagac

SEQ ID NO: 55892 - DNA, 26 bp, Artificial Sequence
  Synthetic
tgctcaauctcacacuaaagaacacc

SEQ ID NO: 55893 - DNA, 28 bp, Artificial Sequence
  Synthetic
ttggacagtaaccauctaaaatctgcut

SEQ ID NO: 55894 - DNA, 25 bp, Artificial Sequence
  Synthetic
aaaacatgaccugtacgtgacauca

SEQ ID NO: 55895 - DNA, 28 bp, Artificial Sequence
  Synthetic
agtgggttctaautttaactggcttgut

SEQ ID NO: 55896 - DNA, 24 bp, Artificial Sequence
  Synthetic
gcatatgcucacaaatcccattuc

SEQ ID NO: 55897 - DNA, 27 bp, Artificial Sequence
  Synthetic
gaaaauaacccagaauaaggacaccca

SEQ ID NO: 55898 - DNA, 21 bp, Artificial Sequence
  Synthetic
gggaaagagcacucaggugaa

SEQ ID NO: 55899 - DNA, 28 bp, Artificial Sequence
  Synthetic
gaatagaagugggaacaagatccugaaa

SEQ ID NO: 55900 - DNA, 22 bp, Artificial Sequence
  Synthetic
ggctaccugcacttcttacugg

SEQ ID NO: 55901 - DNA, 20 bp, Artificial Sequence
  Synthetic
agggatgaaggucgggauca

SEQ ID NO: 55902 - DNA, 21 bp, Artificial Sequence
  Synthetic
cgctgauagccaaactgcuga

SEQ ID NO: 55903 - DNA, 28 bp, Artificial Sequence
  Synthetic
gtgttcttgggutgaatacttttgtuct

SEQ ID NO: 55904 - DNA, 28 bp, Artificial Sequence
  Synthetic
gggcaacttcaguacttcctatatctut

SEQ ID NO: 55905 - DNA, 21 bp, Artificial Sequence
  Synthetic
gcaaggcugtcaacatgaugg

SEQ ID NO: 55906 - DNA, 20 bp, Artificial Sequence
  Synthetic
gctgaaggcacutccgtuga

SEQ ID NO: 55907 - DNA, 21 bp, Artificial Sequence
  Synthetic
cccgttaagucgtagccctua

SEQ ID NO: 55908 - DNA, 27 bp, Artificial Sequence
  Synthetic
ctagcttcttucttagtactgcuccat

SEQ ID NO: 55909 - DNA, 25 bp, Artificial Sequence
  Synthetic
cagaaguagaagacgaggucagact

SEQ ID NO: 55910 - DNA, 21 bp, Artificial Sequence
  Synthetic
tggtggcuctagtgacacugt

SEQ ID NO: 55911 - DNA, 21 bp, Artificial Sequence
  Synthetic
ctgcaacgcucttugaagcat

SEQ ID NO: 55912 - DNA, 21 bp, Artificial Sequence
  Synthetic
ttttggactuggcactgguga

SEQ ID NO: 55913 - DNA, 21 bp, Artificial Sequence
  Synthetic
gcccuccauggcaaaaagaac

SEQ ID NO: 55914 - DNA, 22 bp, Artificial Sequence
  Synthetic
ccacttctugacacaccuccac

SEQ ID NO: 55915 - DNA, 21 bp, Artificial Sequence
  Synthetic
ggatgcugggacctggauact

SEQ ID NO: 55916 - DNA, 17 bp, Artificial Sequence
  Synthetic
ggctcaccgucctcguc

SEQ ID NO: 55917 - DNA, 20 bp, Artificial Sequence
  Synthetic
tgctgagcccugactacugt

SEQ ID NO: 55918 - DNA, 17 bp, Artificial Sequence
  Synthetic
caggccuctgcccaguc

SEQ ID NO: 55919 - DNA, 22 bp, Artificial Sequence
  Synthetic
acccagcaaacgauagcatcuc

SEQ ID NO: 55920 - DNA, 27 bp, Artificial Sequence
  Synthetic
gtagcaaaugttacauaagcccaaaca

SEQ ID NO: 55921 - DNA, 22 bp, Artificial Sequence
  Synthetic
ccagactcugaaaactgccuca

SEQ ID NO: 55922 - DNA, 20 bp, Artificial Sequence
  Synthetic
ccagccgugaacaatgucca

SEQ ID NO: 55923 - DNA, 28 bp, Artificial Sequence
  Synthetic
aagacaccaugaagctgaatatctgtut

SEQ ID NO: 55924 - DNA, 28 bp, Artificial Sequence
  Synthetic
tgaatgtttcugtcatcaagaucaacct

SEQ ID NO: 55925 - DNA, 22 bp, Artificial Sequence
  Synthetic
tccauccaagcaagagcuacac

SEQ ID NO: 55926 - DNA, 29 bp, Artificial Sequence
  Synthetic
aatcacagttattacutaccaaggcctut

SEQ ID NO: 55927 - DNA, 26 bp, Artificial Sequence
  Synthetic
aaagaagccacggaguctaagaatut

SEQ ID NO: 55928 - DNA, 22 bp, Artificial Sequence
  Synthetic
agtggcacaggutcgtttuaca

SEQ ID NO: 55929 - DNA, 20 bp, Artificial Sequence
  Synthetic
ttcatttugcccccucggaa

SEQ ID NO: 55930 - DNA, 17 bp, Artificial Sequence
  Synthetic
gctcugggccgaagugt

SEQ ID NO: 55931 - DNA, 18 bp, Artificial Sequence
  Synthetic
cuggaaccccggctuacc

SEQ ID NO: 55932 - DNA, 20 bp, Artificial Sequence
  Synthetic
ccccgtguctgacagugaaa

SEQ ID NO: 55933 - DNA, 20 bp, Artificial Sequence
  Synthetic
ccaccaccugtccaccuact

SEQ ID NO: 55934 - DNA, 18 bp, Artificial Sequence
  Synthetic
guggagggccaggucaag

SEQ ID NO: 55935 - DNA, 18 bp, Artificial Sequence
  Synthetic
cggtaacccgugtcgcua

SEQ ID NO: 55936 - DNA, 18 bp, Artificial Sequence
  Synthetic
accccuguacccccacaa

SEQ ID NO: 55937 - DNA, 19 bp, Artificial Sequence
  Synthetic
tctaggccccucctgugac

SEQ ID NO: 55938 - DNA, 18 bp, Artificial Sequence
  Synthetic
gtaccaggugcccaccuc

SEQ ID NO: 55939 - DNA, 17 bp, Artificial Sequence
  Synthetic
gtcuggccgcctgaguc

SEQ ID NO: 55940 - DNA, 22 bp, Artificial Sequence
  Synthetic
agaactccaucagtgcctccua

SEQ ID NO: 55941 - DNA, 23 bp, Artificial Sequence
  Synthetic
agtacctttugcaacatgguggt

SEQ ID NO: 55942 - DNA, 25 bp, Artificial Sequence
  Synthetic
ggaactcccuctttatggtugcaat

SEQ ID NO: 55943 - DNA, 27 bp, Artificial Sequence
  Synthetic
agatttctuaggaccccatcttacuca

SEQ ID NO: 55944 - DNA, 24 bp, Artificial Sequence
  Synthetic
attgtggccugtcactauggaaat

SEQ ID NO: 55945 - DNA, 28 bp, Artificial Sequence
  Synthetic
gctgaacctttutgcttataggaatuga

SEQ ID NO: 55946 - DNA, 28 bp, Artificial Sequence
  Synthetic
tccaagaagcauttgttgactacttuga

SEQ ID NO: 55947 - DNA, 24 bp, Artificial Sequence
  Synthetic
tgcaaaaguaacggattccuggat

SEQ ID NO: 55948 - DNA, 26 bp, Artificial Sequence
  Synthetic
attcgaattgaaaaucccaactcuct

SEQ ID NO: 55949 - DNA, 27 bp, Artificial Sequence
  Synthetic
aagacatgtccaacuttagcccaauat

SEQ ID NO: 55950 - DNA, 28 bp, Artificial Sequence
  Synthetic
aagaagaatacautgatgagcauggaca

SEQ ID NO: 55951 - DNA, 24 bp, Artificial Sequence
  Synthetic
ctcttctttcuctgtgcctucaga

SEQ ID NO: 55952 - DNA, 23 bp, Artificial Sequence
  Synthetic
tgtcctctucccttctctcuacc

SEQ ID NO: 55953 - DNA, 22 bp, Artificial Sequence
  Synthetic
ttgaaggcgaagutgagagcut

SEQ ID NO: 55954 - DNA, 22 bp, Artificial Sequence
  Synthetic
gttggatgccuaggatggtguc

SEQ ID NO: 55955 - DNA, 27 bp, Artificial Sequence
  Synthetic
tgcatacccucatagaagcattttugt

SEQ ID NO: 55956 - DNA, 22 bp, Artificial Sequence
  Synthetic
gcttgcatcugctactgctcua

SEQ ID NO: 55957 - DNA, 27 bp, Artificial Sequence
  Synthetic
gcatctcgtuaccctttgttaatugat

SEQ ID NO: 55958 - DNA, 28 bp, Artificial Sequence
  Synthetic
aaaataaaagtgautcctttgcctugct

SEQ ID NO: 55959 - DNA, 28 bp, Artificial Sequence
  Synthetic
ttacaaggttcuttccctctcaugaaaa

SEQ ID NO: 55960 - DNA, 28 bp, Artificial Sequence
  Synthetic
ttgctattacggutctcaaatcuaaggg

SEQ ID NO: 55961 - DNA, 28 bp, Artificial Sequence
  Synthetic
tgaagcaagugattaatgaaugggacaa

SEQ ID NO: 55962 - DNA, 27 bp, Artificial Sequence
  Synthetic
aaaatgttttccauctcactccgguat

SEQ ID NO: 55963 - DNA, 29 bp, Artificial Sequence
  Synthetic
gtttgacttttcguactgattcgagttut

SEQ ID NO: 55964 - DNA, 21 bp, Artificial Sequence
  Synthetic
acauaccccagcaactaugcc

SEQ ID NO: 55965 - DNA, 27 bp, Artificial Sequence
  Synthetic
ggatgctcutctgaaagtuacaaggaa

SEQ ID NO: 55966 - DNA, 25 bp, Artificial Sequence
  Synthetic
gcgtcggugaaaagtttcgaattut

SEQ ID NO: 55967 - DNA, 28 bp, Artificial Sequence
  Synthetic
aggcttacaatuccatcctaatttugct

SEQ ID NO: 55968 - DNA, 28 bp, Artificial Sequence
  Synthetic
gactctacatcaugcacttaccttuaca

SEQ ID NO: 55969 - DNA, 33 bp, Artificial Sequence
  Synthetic
aactttattttaatgcagauggaatggttaguc

SEQ ID NO: 55970 - DNA, 21 bp, Artificial Sequence
  Synthetic
cctccaaagugatgugaggga

SEQ ID NO: 55971 - DNA, 24 bp, Artificial Sequence
  Synthetic
caatugaaaagcccggatgugaag

SEQ ID NO: 55972 - DNA, 28 bp, Artificial Sequence
  Synthetic
gcatatgaaccaaaacuaacaccugaag

SEQ ID NO: 55973 - DNA, 29 bp, Artificial Sequence
  Synthetic
tattgaggctgugaatctcttaaaagtug

SEQ ID NO: 55974 - DNA, 25 bp, Artificial Sequence
  Synthetic
agatttttccccuctcccauaggat

SEQ ID NO: 55975 - DNA, 24 bp, Artificial Sequence
  Synthetic
acttacagtcuctatctgccugct

SEQ ID NO: 55976 - DNA, 22 bp, Artificial Sequence
  Synthetic
gatgctgtucccaggtactgut

SEQ ID NO: 55977 - DNA, 23 bp, Artificial Sequence
  Synthetic
gagaacugagggtgguacagaag

SEQ ID NO: 55978 - DNA, 32 bp, Artificial Sequence
  Synthetic
attttagactgctuaaagcaattgttgtauaa

SEQ ID NO: 55979 - DNA, 23 bp, Artificial Sequence
  Synthetic
cutccauaagaacggagggacat

SEQ ID NO: 55980 - DNA, 23 bp, Artificial Sequence
  Synthetic
gucttcttcugcacccaacaaaa

SEQ ID NO: 55981 - DNA, 29 bp, Artificial Sequence
  Synthetic
ggagcttatcatugaagaccttggaatua

SEQ ID NO: 55982 - DNA, 22 bp, Artificial Sequence
  Synthetic
gagaaaagcucatctggcucct

SEQ ID NO: 55983 - DNA, 27 bp, Artificial Sequence
  Synthetic
ttaaatcccauaggcaatagctuggaa

SEQ ID NO: 55984 - DNA, 19 bp, Artificial Sequence
  Synthetic
gaugacucagggagcagca

SEQ ID NO: 55985 - DNA, 20 bp, Artificial Sequence
  Synthetic
gccctauacccccgttcuga

SEQ ID NO: 55986 - DNA, 22 bp, Artificial Sequence
  Synthetic
gctaccaacaggauactgugct

SEQ ID NO: 55987 - DNA, 20 bp, Artificial Sequence
  Synthetic
cctgagggaucggguagaca

SEQ ID NO: 55988 - DNA, 23 bp, Artificial Sequence
  Synthetic
gccuctgttuccccagaaaagac

SEQ ID NO: 55989 - DNA, 21 bp, Artificial Sequence
  Synthetic
atccccttcugaagctccuct

SEQ ID NO: 55990 - DNA, 17 bp, Artificial Sequence
  Synthetic
agccgcuctcccgatug

SEQ ID NO: 55991 - DNA, 19 bp, Artificial Sequence
  Synthetic
tccgagtuctggtcgguga

SEQ ID NO: 55992 - DNA, 27 bp, Artificial Sequence
  Synthetic
cttcctggtaguatgtgttttcctuca

SEQ ID NO: 55993 - DNA, 20 bp, Artificial Sequence
  Synthetic
ccgatccaugctctguggac

SEQ ID NO: 55994 - DNA, 28 bp, Artificial Sequence
  Synthetic
aggagagcguaagatataagcaatcuct

SEQ ID NO: 55995 - DNA, 27 bp, Artificial Sequence
  Synthetic
gctcctgaaccutcagtttgtttatug

SEQ ID NO: 55996 - DNA, 22 bp, Artificial Sequence
  Synthetic
ctggagcaggcauccattgtua

SEQ ID NO: 55997 - DNA, 24 bp, Artificial Sequence
  Synthetic
cttctatcgccutctggaaaugct

SEQ ID NO: 55998 - DNA, 22 bp, Artificial Sequence
  Synthetic
cgacacaccugctgtaactcua

SEQ ID NO: 55999 - DNA, 27 bp, Artificial Sequence
  Synthetic
ccttctctaatucctcaggaggtuaag

SEQ ID NO: 56000 - DNA, 20 bp, Artificial Sequence
  Synthetic
ttggccaacuggatgaugga

SEQ ID NO: 56001 - DNA, 18 bp, Artificial Sequence
  Synthetic
cccccaguttgcugcagt

SEQ ID NO: 56002 - DNA, 25 bp, Artificial Sequence
  Synthetic
gcccguagagcagaaacttgtatut

SEQ ID NO: 56003 - DNA, 20 bp, Artificial Sequence
  Synthetic
gaggagaccuccagctcuct

SEQ ID NO: 56004 - DNA, 20 bp, Artificial Sequence
  Synthetic
cccatccccautcctguact

SEQ ID NO: 56005 - DNA, 20 bp, Artificial Sequence
  Synthetic
agaacccagggaccucacuc

SEQ ID NO: 56006 - DNA, 19 bp, Artificial Sequence
  Synthetic
gctctgcagugcacacuca

SEQ ID NO: 56007 - DNA, 19 bp, Artificial Sequence
  Synthetic
ccgctucgactcctucacc

SEQ ID NO: 56008 - DNA, 22 bp, Artificial Sequence
  Synthetic
ggacuggacagagacauggaaa

SEQ ID NO: 56009 - DNA, 21 bp, Artificial Sequence
  Synthetic
ggaauccgaccacagauacct

SEQ ID NO: 56010 - DNA, 19 bp, Artificial Sequence
  Synthetic
cagggaccugcagggaaug

SEQ ID NO: 56011 - DNA, 23 bp, Artificial Sequence
  Synthetic
agttcgacucttttgtgguccag

SEQ ID NO: 56012 - DNA, 21 bp, Artificial Sequence
  Synthetic
ccgtcccugtccttgtacuga

SEQ ID NO: 56013 - DNA, 26 bp, Artificial Sequence
  Synthetic
caaccatgutctttgtctucccaaat

SEQ ID NO: 56014 - DNA, 19 bp, Artificial Sequence
  Synthetic
cggatgcugcagtccucac

SEQ ID NO: 56015 - DNA, 17 bp, Artificial Sequence
  Synthetic
gcggccagugccuagat

SEQ ID NO: 56016 - DNA, 21 bp, Artificial Sequence
  Synthetic
ggatctcuagacggacccuca

SEQ ID NO: 56017 - DNA, 21 bp, Artificial Sequence
  Synthetic
gaagccccucttctcagctut

SEQ ID NO: 56018 - DNA, 20 bp, Artificial Sequence
  Synthetic
cctggutccgaauggacagg

SEQ ID NO: 56019 - DNA, 23 bp, Artificial Sequence
  Synthetic
ctccatccugctcacactttcut

SEQ ID NO: 56020 - DNA, 20 bp, Artificial Sequence
  Synthetic
cacttgggucccacaggtut

SEQ ID NO: 56021 - DNA, 26 bp, Artificial Sequence
  Synthetic
cccttaagagaaugacttcccatcuc

SEQ ID NO: 56022 - DNA, 20 bp, Artificial Sequence
  Synthetic
ggaacgccugtccccauaag

SEQ ID NO: 56023 - DNA, 21 bp, Artificial Sequence
  Synthetic
ctcatgugctcttcctuccca

SEQ ID NO: 56024 - DNA, 23 bp, Artificial Sequence
  Synthetic
gaaacagagucaaggagugggaa

SEQ ID NO: 56025 - DNA, 24 bp, Artificial Sequence
  Synthetic
gcatttgggtutctctgacaacuc

SEQ ID NO: 56026 - DNA, 23 bp, Artificial Sequence
  Synthetic
gtgctttcuggaatcagggauca

SEQ ID NO: 56027 - DNA, 23 bp, Artificial Sequence
  Synthetic
ctcactccuaactgcttcctguc

SEQ ID NO: 56028 - DNA, 24 bp, Artificial Sequence
  Synthetic
ccacaaggaagaggaugatgtuga

SEQ ID NO: 56029 - DNA, 20 bp, Artificial Sequence
  Synthetic
ccgaaagaggagcgauguga

SEQ ID NO: 56030 - DNA, 23 bp, Artificial Sequence
  Synthetic
ggaggcuttcttctctugggaaa

SEQ ID NO: 56031 - DNA, 22 bp, Artificial Sequence
  Synthetic
agagacugggaacuggaaggag

SEQ ID NO: 56032 - DNA, 21 bp, Artificial Sequence
  Synthetic
tgttgtatccuccccagccut

SEQ ID NO: 56033 - DNA, 26 bp, Artificial Sequence
  Synthetic
gaggtgaaaauaccactagcatccua

SEQ ID NO: 56034 - DNA, 21 bp, Artificial Sequence
  Synthetic
taaccuggcagagaatggugt

SEQ ID NO: 56035 - DNA, 27 bp, Artificial Sequence
  Synthetic
gcagatgggauttgctaatatgtcugt

SEQ ID NO: 56036 - DNA, 21 bp, Artificial Sequence
  Synthetic
acaauacctucccacccaacc

SEQ ID NO: 56037 - DNA, 22 bp, Artificial Sequence
  Synthetic
tgtggguacaacacaugcagaa

SEQ ID NO: 56038 - DNA, 25 bp, Artificial Sequence
  Synthetic
acattgcagagugcattactagugg

SEQ ID NO: 56039 - DNA, 26 bp, Artificial Sequence
  Synthetic
tctgtcttaauggagggatctgtgut

SEQ ID NO: 56040 - DNA, 28 bp, Artificial Sequence
  Synthetic
ccaaagaatuacacagaggaaagaugag

SEQ ID NO: 56041 - DNA, 27 bp, Artificial Sequence
  Synthetic
tgaatatccaugttcatgtgaugcaga

SEQ ID NO: 56042 - DNA, 23 bp, Artificial Sequence
  Synthetic
tggaaacagacaugtggtugaca

SEQ ID NO: 56043 - DNA, 30 bp, Artificial Sequence
  Synthetic
tgcatcatcgtauaacatggtttcauaact

SEQ ID NO: 56044 - DNA, 28 bp, Artificial Sequence
  Synthetic
atcttccccagaacutatcagatuaggt

SEQ ID NO: 56045 - DNA, 26 bp, Artificial Sequence
  Synthetic
agctcatacaggutcaatcatgugat

SEQ ID NO: 56046 - DNA, 23 bp, Artificial Sequence
  Synthetic
cagcagctuctccccaatatuct

SEQ ID NO: 56047 - DNA, 23 bp, Artificial Sequence
  Synthetic
agcaggtgaugatgtttctgguc

SEQ ID NO: 56048 - DNA, 21 bp, Artificial Sequence
  Synthetic
gccccacaggcuauaccaaaa

SEQ ID NO: 56049 - DNA, 22 bp, Artificial Sequence
  Synthetic
ggguagcttatgaugggagcat

SEQ ID NO: 56050 - DNA, 22 bp, Artificial Sequence
  Synthetic
gagattcagugcagcgtttgut

SEQ ID NO: 56051 - DNA, 29 bp, Artificial Sequence
  Synthetic
cagctcaggacacuttgctaatttaatut

SEQ ID NO: 56052 - DNA, 23 bp, Artificial Sequence
  Synthetic
cagggtuggaaaccattcugact

SEQ ID NO: 56053 - DNA, 28 bp, Artificial Sequence
  Synthetic
aataacttgccaugacctaagctuaact

SEQ ID NO: 56054 - DNA, 26 bp, Artificial Sequence
  Synthetic
gcaaaugaagaaatucccgaacaacc

SEQ ID NO: 56055 - DNA, 22 bp, Artificial Sequence
  Synthetic
aaaggcttcaugtccacctuga

SEQ ID NO: 56056 - DNA, 26 bp, Artificial Sequence
  Synthetic
acctccctatugatagaatgccauct

SEQ ID NO: 56057 - DNA, 26 bp, Artificial Sequence
  Synthetic
tcgtcagtcacuattttgggcataut

SEQ ID NO: 56058 - DNA, 26 bp, Artificial Sequence
  Synthetic
aggtctcttcucatccattcuacgag

SEQ ID NO: 56059 - DNA, 28 bp, Artificial Sequence
  Synthetic
acatcgacaagugaatcgaactctuaat

SEQ ID NO: 56060 - DNA, 22 bp, Artificial Sequence
  Synthetic
gtgtttucagccagugcacaaa

SEQ ID NO: 56061 - DNA, 20 bp, Artificial Sequence
  Synthetic
cttttggaugccgtucacca

SEQ ID NO: 56062 - DNA, 23 bp, Artificial Sequence
  Synthetic
gcccaagaaccuaaaacacccua

SEQ ID NO: 56063 - DNA, 27 bp, Artificial Sequence
  Synthetic
gggtgtccataaucttcctttgtttut

SEQ ID NO: 56064 - DNA, 28 bp, Artificial Sequence
  Synthetic
tgactgtatcttugcattgtcctttuca

SEQ ID NO: 56065 - DNA, 27 bp, Artificial Sequence
  Synthetic
ctgagagccucccaaaatgtatacuac

SEQ ID NO: 56066 - DNA, 21 bp, Artificial Sequence
  Synthetic
gccugaugccccagaagaaaa

SEQ ID NO: 56067 - DNA, 22 bp, Artificial Sequence
  Synthetic
tttgttguaggtgcugggaagt

SEQ ID NO: 56068 - DNA, 21 bp, Artificial Sequence
  Synthetic
ggaggcaucgcaggtaacauc

SEQ ID NO: 56069 - DNA, 21 bp, Artificial Sequence
  Synthetic
gctagggtcuccgaggtcuat

SEQ ID NO: 56070 - DNA, 25 bp, Artificial Sequence
  Synthetic
gagattactctcucaccccttcuct

SEQ ID NO: 56071 - DNA, 23 bp, Artificial Sequence
  Synthetic
ccccagaaugtgacagctuaagt

SEQ ID NO: 56072 - DNA, 22 bp, Artificial Sequence
  Synthetic
gggagggaauctaaccaguaca

SEQ ID NO: 56073 - DNA, 22 bp, Artificial Sequence
  Synthetic
gtctacagugcctggucagaag

SEQ ID NO: 56074 - DNA, 22 bp, Artificial Sequence
  Synthetic
cccctaccccugaagatctugt

SEQ ID NO: 56075 - DNA, 21 bp, Artificial Sequence
  Synthetic
gctgaggacuacguagcagag

SEQ ID NO: 56076 - DNA, 27 bp, Artificial Sequence
  Synthetic
tgagtcaaaagauagaaaccaugcagt

SEQ ID NO: 56077 - DNA, 28 bp, Artificial Sequence
  Synthetic
acccttttcttuttcttcttgtcugagt

SEQ ID NO: 56078 - DNA, 28 bp, Artificial Sequence
  Synthetic
ttctgtacacagugattgtgctattuca

SEQ ID NO: 56079 - DNA, 28 bp, Artificial Sequence
  Synthetic
gcctcatagttutgttcagtttcttuca

SEQ ID NO: 56080 - DNA, 29 bp, Artificial Sequence
  Synthetic
cagtagguttatagagcuggaacaagaaa

SEQ ID NO: 56081 - DNA, 28 bp, Artificial Sequence
  Synthetic
agtatacuagcaaagaacattccacuga

SEQ ID NO: 56082 - DNA, 26 bp, Artificial Sequence
  Synthetic
gcctcaacttaucagtagaagctgut

SEQ ID NO: 56083 - DNA, 24 bp, Artificial Sequence
  Synthetic
cccactggagcuctcttgatttut

SEQ ID NO: 56084 - DNA, 33 bp, Artificial Sequence
  Synthetic
tctcaatcctgatcautacataattatagcaut

SEQ ID NO: 56085 - DNA, 23 bp, Artificial Sequence
  Synthetic
aacaatguttcgaccuggacaga

SEQ ID NO: 56086 - DNA, 23 bp, Artificial Sequence
  Synthetic
ccctgtaagccutctactccauc

SEQ ID NO: 56087 - DNA, 27 bp, Artificial Sequence
  Synthetic
tgccaactaugaagcctgattcaaaua

SEQ ID NO: 56088 - DNA, 25 bp, Artificial Sequence
  Synthetic
cacttcacaaugcaaggtgtuacaa

SEQ ID NO: 56089 - DNA, 26 bp, Artificial Sequence
  Synthetic
tttttctgttgagucccaatttgcug

SEQ ID NO: 56090 - DNA, 25 bp, Artificial Sequence
  Synthetic
acttgagctuctctttacctugacc

SEQ ID NO: 56091 - DNA, 26 bp, Artificial Sequence
  Synthetic
gctggagaaacuggaaugagaaaaac

SEQ ID NO: 56092 - DNA, 26 bp, Artificial Sequence
  Synthetic
ggttactacuggattgacccuaacca

SEQ ID NO: 56093 - DNA, 23 bp, Artificial Sequence
  Synthetic
gaaggagaggugtttgtgggaut

SEQ ID NO: 56094 - DNA, 21 bp, Artificial Sequence
  Synthetic
cccccaacgugatcaggatuc

SEQ ID NO: 56095 - DNA, 25 bp, Artificial Sequence
  Synthetic
gggaacauacaactgatgagaaugt

SEQ ID NO: 56096 - DNA, 28 bp, Artificial Sequence
  Synthetic
cactccuccaaaatcaatguagaaccat

SEQ ID NO: 56097 - DNA, 22 bp, Artificial Sequence
  Synthetic
ggaccaaaagcuctguggaagg

SEQ ID NO: 56098 - DNA, 27 bp, Artificial Sequence
  Synthetic
ccggccauacccttttaacttttuaag

SEQ ID NO: 56099 - DNA, 28 bp, Artificial Sequence
  Synthetic
cctgtcttttctcutttcagaggatgut

SEQ ID NO: 56100 - DNA, 20 bp, Artificial Sequence
  Synthetic
ctcagcuggatctgctcuct

SEQ ID NO: 56101 - DNA, 28 bp, Artificial Sequence
  Synthetic
gggcaacauggtatttaaguacaaaaat

SEQ ID NO: 56102 - DNA, 23 bp, Artificial Sequence
  Synthetic
ccaaggaacagugtgtaggtcut

SEQ ID NO: 56103 - DNA, 29 bp, Artificial Sequence
  Synthetic
gaatctctatttccutggttgggatauca

SEQ ID NO: 56104 - DNA, 28 bp, Artificial Sequence
  Synthetic
tcctaggaacuaacaaaacattgtguct

SEQ ID NO: 56105 - DNA, 26 bp, Artificial Sequence
  Synthetic
agtatagcaucatggaccgucaaaaa

SEQ ID NO: 56106 - DNA, 25 bp, Artificial Sequence
  Synthetic
gtgaaaacauagcccgaatagctug

SEQ ID NO: 56107 - DNA, 26 bp, Artificial Sequence
  Synthetic
caatcuctgtgctguacaaaacacat

SEQ ID NO: 56108 - DNA, 21 bp, Artificial Sequence
  Synthetic
ggtgcagaugtgacagcagut

SEQ ID NO: 56109 - DNA, 29 bp, Artificial Sequence
  Synthetic
ttttgctuaaagagacagggatgauacat

SEQ ID NO: 56110 - DNA, 27 bp, Artificial Sequence
  Synthetic
ttgtcatcttcutcattgctgtuacct

SEQ ID NO: 56111 - DNA, 29 bp, Artificial Sequence
  Synthetic
acaatggaaatucaaagaaatcacttgut

SEQ ID NO: 56112 - DNA, 22 bp, Artificial Sequence
  Synthetic
gctcccaggcugagacttctua

SEQ ID NO: 56113 - DNA, 23 bp, Artificial Sequence
  Synthetic
caggucctagugaccagagagaa

SEQ ID NO: 56114 - DNA, 21 bp, Artificial Sequence
  Synthetic
cccuctccctcuaccagacaa

SEQ ID NO: 56115 - DNA, 20 bp, Artificial Sequence
  Synthetic
gtaccaggagcucccucgat

SEQ ID NO: 56116 - DNA, 19 bp, Artificial Sequence
  Synthetic
tgcaagtgucgctgctcut

SEQ ID NO: 56117 - DNA, 17 bp, Artificial Sequence
  Synthetic
ggagagcccguccagug

SEQ ID NO: 56118 - DNA, 22 bp, Artificial Sequence
  Synthetic
gggacttttguaggctgctcua

SEQ ID NO: 56119 - DNA, 21 bp, Artificial Sequence
  Synthetic
gtgctggacaugtacccugag

SEQ ID NO: 56120 - DNA, 19 bp, Artificial Sequence
  Synthetic
gcacccaggacguagugaa

SEQ ID NO: 56121 - DNA, 17 bp, Artificial Sequence
  Synthetic
cgcucccgagaaagcug

SEQ ID NO: 56122 - DNA, 26 bp, Artificial Sequence
  Synthetic
ggtggagaaaugatggtttaaaugct

SEQ ID NO: 56123 - DNA, 27 bp, Artificial Sequence
  Synthetic
tgttaattttcacgugtcctgctttuc

SEQ ID NO: 56124 - DNA, 29 bp, Artificial Sequence
  Synthetic
gacagtactaccuctcagttttcttucag

SEQ ID NO: 56125 - DNA, 28 bp, Artificial Sequence
  Synthetic
cacatcttttatuctgcacattcaucca

SEQ ID NO: 56126 - DNA, 24 bp, Artificial Sequence
  Synthetic
gaaggctatcugtgggttgtatut

SEQ ID NO: 56127 - DNA, 24 bp, Artificial Sequence
  Synthetic
aattgcuacagcggatagactugt

SEQ ID NO: 56128 - DNA, 27 bp, Artificial Sequence
  Synthetic
gagattttggaugatactgugcaaagg

SEQ ID NO: 56129 - DNA, 24 bp, Artificial Sequence
  Synthetic
caggacugctcagacatucaagaa

SEQ ID NO: 56130 - DNA, 24 bp, Artificial Sequence
  Synthetic
tttacaggtaucacgctcatugct

SEQ ID NO: 56131 - DNA, 25 bp, Artificial Sequence
  Synthetic
tgtaatttcgggacaucagactugg

SEQ ID NO: 56132 - DNA, 21 bp, Artificial Sequence
  Synthetic
ccttcaggauctgcagccaut

SEQ ID NO: 56133 - DNA, 29 bp, Artificial Sequence
  Synthetic
ccaaaactagguggaatttgaaatatgut

SEQ ID NO: 56134 - DNA, 23 bp, Artificial Sequence
  Synthetic
gattaccugtgtggttugccaaa

SEQ ID NO: 56135 - DNA, 28 bp, Artificial Sequence
  Synthetic
gatgccagtucttcaataaacagugaac

SEQ ID NO: 56136 - DNA, 27 bp, Artificial Sequence
  Synthetic
acgtattttggcuttgaaatggaacug

SEQ ID NO: 56137 - DNA, 27 bp, Artificial Sequence
  Synthetic
cgagagtugagagaaacacattttugg

SEQ ID NO: 56138 - DNA, 20 bp, Artificial Sequence
  Synthetic
ctgcctaucagcgcagcuat

SEQ ID NO: 56139 - DNA, 24 bp, Artificial Sequence
  Synthetic
agctgaguggaaacctugaagaaa

SEQ ID NO: 56140 - DNA, 25 bp, Artificial Sequence
  Synthetic
gatgatcugacagttctcttuggca

SEQ ID NO: 56141 - DNA, 26 bp, Artificial Sequence
  Synthetic
tctgtttcgguttctgaaaugaggaa

SEQ ID NO: 56142 - DNA, 27 bp, Artificial Sequence
  Synthetic
accaatcaccuattttcagacaugcaa

SEQ ID NO: 56143 - DNA, 27 bp, Artificial Sequence
  Synthetic
gacactctcuttcatgtaaccugaagt

SEQ ID NO: 56144 - DNA, 27 bp, Artificial Sequence
  Synthetic
tcatttgtgatggugggaagatcuaag

SEQ ID NO: 56145 - DNA, 27 bp, Artificial Sequence
  Synthetic
accttgcuccaaggatatcttttctut

SEQ ID NO: 56146 - DNA, 27 bp, Artificial Sequence
  Synthetic
gaaaagatcucatatccgacauaggca

SEQ ID NO: 56147 - DNA, 27 bp, Artificial Sequence
  Synthetic
agcgcttacccuattttccaattguaa

SEQ ID NO: 56148 - DNA, 22 bp, Artificial Sequence
  Synthetic
ggtaaggaagugaagggtccug

SEQ ID NO: 56149 - DNA, 26 bp, Artificial Sequence
  Synthetic
caatcacaggcauggttgagaatuag

SEQ ID NO: 56150 - DNA, 26 bp, Artificial Sequence
  Synthetic
gtacattcguaaaggctacagtguca

SEQ ID NO: 56151 - DNA, 22 bp, Artificial Sequence
  Synthetic
tctttgaccgugccttcttgut

SEQ ID NO: 56152 - DNA, 21 bp, Artificial Sequence
  Synthetic
cagatgagacugcctgcagua

SEQ ID NO: 56153 - DNA, 28 bp, Artificial Sequence
  Synthetic
gttttcuagattcaagatuggcaaagca

SEQ ID NO: 56154 - DNA, 25 bp, Artificial Sequence
  Synthetic
tuccatcttcatugagaagcacagt

SEQ ID NO: 56155 - DNA, 28 bp, Artificial Sequence
  Synthetic
ctggcatccugccttatctttuaaaaat

SEQ ID NO: 56156 - DNA, 23 bp, Artificial Sequence
  Synthetic
atgttcccucatctgctuccaag

SEQ ID NO: 56157 - DNA, 25 bp, Artificial Sequence
  Synthetic
ctaaccgtgauccctttcttctugt

SEQ ID NO: 56158 - DNA, 21 bp, Artificial Sequence
  Synthetic
ccacacatucccagtccugag

SEQ ID NO: 56159 - DNA, 24 bp, Artificial Sequence
  Synthetic
ctttcctcugccttgcgtttuaat

SEQ ID NO: 56160 - DNA, 28 bp, Artificial Sequence
  Synthetic
cttttgtgttttguctctctgtctgaug

SEQ ID NO: 56161 - DNA, 20 bp, Artificial Sequence
  Synthetic
ggacugaccgggugagaaat

SEQ ID NO: 56162 - DNA, 21 bp, Artificial Sequence
  Synthetic
cgtcccatugttccgaatcuc

SEQ ID NO: 56163 - DNA, 17 bp, Artificial Sequence
  Synthetic
gguacgcctucgcggat

SEQ ID NO: 56164 - DNA, 26 bp, Artificial Sequence
  Synthetic
cttacctacucccaaaattcugcagt

SEQ ID NO: 56165 - DNA, 27 bp, Artificial Sequence
  Synthetic
ccagtaagacggaacutgttgtttuct

SEQ ID NO: 56166 - DNA, 25 bp, Artificial Sequence
  Synthetic
cagtggctcutgaagatcgauagat

SEQ ID NO: 56167 - DNA, 27 bp, Artificial Sequence
  Synthetic
ccacttaacatguatggcagaagcaua

SEQ ID NO: 56168 - DNA, 29 bp, Artificial Sequence
  Synthetic
actgttgcaaugaagaataagaaaaugct

SEQ ID NO: 56169 - DNA, 22 bp, Artificial Sequence
  Synthetic
gccccgaucatgtttggcatua

SEQ ID NO: 56170 - DNA, 22 bp, Artificial Sequence
  Synthetic
ggattcgcagucgtgaaccaua

SEQ ID NO: 56171 - DNA, 22 bp, Artificial Sequence
  Synthetic
ctcttttgugaccgctctccut

SEQ ID NO: 56172 - DNA, 26 bp, Artificial Sequence
  Synthetic
ggcattatatugcagtgtgtgacuca

SEQ ID NO: 56173 - DNA, 29 bp, Artificial Sequence
  Synthetic
gcaagttttatcautccttccacaguaac

SEQ ID NO: 56174 - DNA, 25 bp, Artificial Sequence
  Synthetic
actgtctcagaguattctgcccuaa

SEQ ID NO: 56175 - DNA, 22 bp, Artificial Sequence
  Synthetic
tctgacaugtggcaacuggaag

SEQ ID NO: 56176 - DNA, 23 bp, Artificial Sequence
  Synthetic
atgcttgguacttggctgaauga

SEQ ID NO: 56177 - DNA, 28 bp, Artificial Sequence
  Synthetic
agtggcttgttgugataattaaggctua

SEQ ID NO: 56178 - DNA, 25 bp, Artificial Sequence
  Synthetic
cacacuttgtctggaucaaggacat

SEQ ID NO: 56179 - DNA, 22 bp, Artificial Sequence
  Synthetic
gcacacagugatcacacaguga

SEQ ID NO: 56180 - DNA, 22 bp, Artificial Sequence
  Synthetic
agcaguatcaugagcccagaga

SEQ ID NO: 56181 - DNA, 22 bp, Artificial Sequence
  Synthetic
caagacccagauccttgagugg

SEQ ID NO: 56182 - DNA, 21 bp, Artificial Sequence
  Synthetic
ctcaccaccugctgttctcut

SEQ ID NO: 56183 - DNA, 21 bp, Artificial Sequence
  Synthetic
cagcctccauggacatctcug

SEQ ID NO: 56184 - DNA, 17 bp, Artificial Sequence
  Synthetic
agaagugcggccagcut

SEQ ID NO: 56185 - DNA, 17 bp, Artificial Sequence
  Synthetic
ccagcccagcccutcut

SEQ ID NO: 56186 - DNA, 18 bp, Artificial Sequence
  Synthetic
ggctcaggccuccctuct

SEQ ID NO: 56187 - DNA, 21 bp, Artificial Sequence
  Synthetic
cataggcagacugtgcuggaa

SEQ ID NO: 56188 - DNA, 23 bp, Artificial Sequence
  Synthetic
augccttctactuacaggagggt

SEQ ID NO: 56189 - DNA, 28 bp, Artificial Sequence
  Synthetic
cctaacctggtutcaactgaagtacuaa

SEQ ID NO: 56190 - DNA, 24 bp, Artificial Sequence
  Synthetic
atctttaaaguaggctugccacat

SEQ ID NO: 56191 - DNA, 21 bp, Artificial Sequence
  Synthetic
agctgggacuaccatcctuca

SEQ ID NO: 56192 - DNA, 23 bp, Artificial Sequence
  Synthetic
gagttcaacagcuccgaguacag

SEQ ID NO: 56193 - DNA, 22 bp, Artificial Sequence
  Synthetic
ggtgccgcaaugtttgtttcua

SEQ ID NO: 56194 - DNA, 21 bp, Artificial Sequence
  Synthetic
aaggaagucacccctugcaaa

SEQ ID NO: 56195 - DNA, 23 bp, Artificial Sequence
  Synthetic
cggttgucattcacauccaggac

SEQ ID NO: 56196 - DNA, 22 bp, Artificial Sequence
  Synthetic
cagcttccuctccactgugaat

SEQ ID NO: 56197 - DNA, 19 bp, Artificial Sequence
  Synthetic
tcaggagcccautgcugac

SEQ ID NO: 56198 - DNA, 20 bp, Artificial Sequence
  Synthetic
gcagccccacucagttcuat

SEQ ID NO: 56199 - DNA, 23 bp, Artificial Sequence
  Synthetic
tcgtaguccaggtaatucacggt

SEQ ID NO: 56200 - DNA, 22 bp, Artificial Sequence
  Synthetic
ctccaucgacaaccucaaccaa

SEQ ID NO: 56201 - DNA, 28 bp, Artificial Sequence
  Synthetic
gccatcucaaggacattttaugacaaag

SEQ ID NO: 56202 - DNA, 21 bp, Artificial Sequence
  Synthetic
gggctagagaugacccacaua

SEQ ID NO: 56203 - DNA, 19 bp, Artificial Sequence
  Synthetic
aggtguccagctgcgatug

SEQ ID NO: 56204 - DNA, 26 bp, Artificial Sequence
  Synthetic
gtaggaagaguttgagcugaagaaga

SEQ ID NO: 56205 - DNA, 24 bp, Artificial Sequence
  Synthetic
tgaagcauccaacagagattuggt

SEQ ID NO: 56206 - DNA, 23 bp, Artificial Sequence
  Synthetic
ccagaacaagaucaagtcugcca

SEQ ID NO: 56207 - DNA, 25 bp, Artificial Sequence
  Synthetic
tgtccttatctucctgcacagttut

SEQ ID NO: 56208 - DNA, 20 bp, Artificial Sequence
  Synthetic
ccatguaaccgccacctgut

SEQ ID NO: 56209 - DNA, 22 bp, Artificial Sequence
  Synthetic
cctgggaauacatgctgauggg

SEQ ID NO: 56210 - DNA, 21 bp, Artificial Sequence
  Synthetic
catagtggugccccctgauag

SEQ ID NO: 56211 - DNA, 25 bp, Artificial Sequence
  Synthetic
ctgggtttuactctccactuaagga

SEQ ID NO: 56212 - DNA, 18 bp, Artificial Sequence
  Synthetic
cacccacucgcccaugat

SEQ ID NO: 56213 - DNA, 17 bp, Artificial Sequence
  Synthetic
gcgggucgttccacgua

SEQ ID NO: 56214 - DNA, 19 bp, Artificial Sequence
  Synthetic
agacccaccagccugtgua

SEQ ID NO: 56215 - DNA, 21 bp, Artificial Sequence
  Synthetic
ccataaccaguctgcugacga

SEQ ID NO: 56216 - DNA, 20 bp, Artificial Sequence
  Synthetic
gtctgccucatctucagcgt

SEQ ID NO: 56217 - DNA, 21 bp, Artificial Sequence
  Synthetic
cugtaucagggcaggaccaat

SEQ ID NO: 56218 - DNA, 21 bp, Artificial Sequence
  Synthetic
gcttcccacugtggttcttug

SEQ ID NO: 56219 - DNA, 22 bp, Artificial Sequence
  Synthetic
cttcccttauctggccatguga

SEQ ID NO: 56220 - DNA, 20 bp, Artificial Sequence
  Synthetic
caccttcccucggatctgut

SEQ ID NO: 56221 - DNA, 19 bp, Artificial Sequence
  Synthetic
ggctgatgugggtccaucc

SEQ ID NO: 56222 - DNA, 20 bp, Artificial Sequence
  Synthetic
ctcgucaacccccucaagaa

SEQ ID NO: 56223 - DNA, 24 bp, Artificial Sequence
  Synthetic
ggtccccauatatagugggaagga

SEQ ID NO: 56224 - DNA, 23 bp, Artificial Sequence
  Synthetic
gtcttgcaguaggagatggtcut

SEQ ID NO: 56225 - DNA, 20 bp, Artificial Sequence
  Synthetic
gctgtgguccagaucgacac

SEQ ID NO: 56226 - DNA, 21 bp, Artificial Sequence
  Synthetic
ggugatcctgguaccccagaa

SEQ ID NO: 56227 - DNA, 22 bp, Artificial Sequence
  Synthetic
gagtaacccuaagcugccagag

SEQ ID NO: 56228 - DNA, 21 bp, Artificial Sequence
  Synthetic
agggccuctgatcccuacaaa

SEQ ID NO: 56229 - DNA, 25 bp, Artificial Sequence
  Synthetic
gaugatgtaguagcagagcaggaag

SEQ ID NO: 56230 - DNA, 20 bp, Artificial Sequence
  Synthetic
cctcaccugcagcgtguaaa

SEQ ID NO: 56231 - DNA, 20 bp, Artificial Sequence
  Synthetic
gtgattuccccgagguccat

SEQ ID NO: 56232 - DNA, 25 bp, Artificial Sequence
  Synthetic
attcctttggguccatacaatucca

SEQ ID NO: 56233 - DNA, 28 bp, Artificial Sequence
  Synthetic
gggataatguaagcaaggttctcttuct

SEQ ID NO: 56234 - DNA, 24 bp, Artificial Sequence
  Synthetic
agggaccuatggccaaaugaaaaa

SEQ ID NO: 56235 - DNA, 24 bp, Artificial Sequence
  Synthetic
cctgtcagcutctggatttctugt

SEQ ID NO: 56236 - DNA, 28 bp, Artificial Sequence
  Synthetic
ttcaacatctttccaugtctccagatut

SEQ ID NO: 56237 - DNA, 27 bp, Artificial Sequence
  Synthetic
tggcttcuggataaacttctugaagag

SEQ ID NO: 56238 - DNA, 23 bp, Artificial Sequence
  Synthetic
agctatccaggauatgccaccut

SEQ ID NO: 56239 - DNA, 22 bp, Artificial Sequence
  Synthetic
guaacaguagcagccaaggaca

SEQ ID NO: 56240 - DNA, 25 bp, Artificial Sequence
  Synthetic
caggcaucuaacaaaggagaggaaa

SEQ ID NO: 56241 - DNA, 27 bp, Artificial Sequence
  Synthetic
gaatggcccautttgaataaggaucag

SEQ ID NO: 56242 - DNA, 27 bp, Artificial Sequence
  Synthetic
acagactgcttuccaaagattcttgua

SEQ ID NO: 56243 - DNA, 28 bp, Artificial Sequence
  Synthetic
gccatacctgtuttcccaataagtttuc

SEQ ID NO: 56244 - DNA, 27 bp, Artificial Sequence
  Synthetic
ctcttgcttacaugaactctatgucgt

SEQ ID NO: 56245 - DNA, 26 bp, Artificial Sequence
  Synthetic
tgtgagttguccatttcctttuccat

SEQ ID NO: 56246 - DNA, 22 bp, Artificial Sequence
  Synthetic
cacccggccuaaagttgtagut

SEQ ID NO: 56247 - DNA, 28 bp, Artificial Sequence
  Synthetic
gctaagcgaaautctgctttaaaugact

SEQ ID NO: 56248 - DNA, 23 bp, Artificial Sequence
  Synthetic
cagtucacacacacacaaaccut

SEQ ID NO: 56249 - DNA, 20 bp, Artificial Sequence
  Synthetic
gatcucaggcccgatgucat

SEQ ID NO: 56250 - DNA, 17 bp, Artificial Sequence
  Synthetic
ccctgagccuccctgug

SEQ ID NO: 56251 - DNA, 20 bp, Artificial Sequence
  Synthetic
agaacaggguccccatucct

SEQ ID NO: 56252 - DNA, 20 bp, Artificial Sequence
  Synthetic
gatgggtguctccacaguga

SEQ ID NO: 56253 - DNA, 19 bp, Artificial Sequence
  Synthetic
agacctgaacugggctugg

SEQ ID NO: 56254 - DNA, 21 bp, Artificial Sequence
  Synthetic
cggccagcagcccuatttuaa

SEQ ID NO: 56255 - DNA, 25 bp, Artificial Sequence
  Synthetic
gatggtaaugaccttaggtgtugct

SEQ ID NO: 56256 - DNA, 21 bp, Artificial Sequence
  Synthetic
cugccacccagaaaaccucat

SEQ ID NO: 56257 - DNA, 23 bp, Artificial Sequence
  Synthetic
gagggagaacuaggcttctcuga

SEQ ID NO: 56258 - DNA, 24 bp, Artificial Sequence
  Synthetic
gttatgccuccctcttauggcaat

SEQ ID NO: 56259 - DNA, 22 bp, Artificial Sequence
  Synthetic
ggagaggcacuacaacatgcuc

SEQ ID NO: 56260 - DNA, 23 bp, Artificial Sequence
  Synthetic
ggaggaagaaaguggcactcauc

SEQ ID NO: 56261 - DNA, 29 bp, Artificial Sequence
  Synthetic
gcagtgctattaccutcatcttggaatua

SEQ ID NO: 56262 - DNA, 21 bp, Artificial Sequence
  Synthetic
gctccttgugatcccctgtuc

SEQ ID NO: 56263 - DNA, 20 bp, Artificial Sequence
  Synthetic
tgagctauccaagcccgtuc

SEQ ID NO: 56264 - DNA, 20 bp, Artificial Sequence
  Synthetic
gaagggcccggcuagaaaua

SEQ ID NO: 56265 - DNA, 29 bp, Artificial Sequence
  Synthetic
ccttcattcaaguatagtcatccacauca

SEQ ID NO: 56266 - DNA, 21 bp, Artificial Sequence
  Synthetic
ggaggaccagguggaccuaag

SEQ ID NO: 56267 - DNA, 28 bp, Artificial Sequence
  Synthetic
caccatggaaaaaugtttaagccatuca

SEQ ID NO: 56268 - DNA, 28 bp, Artificial Sequence
  Synthetic
gggagcacatuagtgatgagaaaauact

SEQ ID NO: 56269 - DNA, 18 bp, Artificial Sequence
  Synthetic
agggtccucctggagcug

SEQ ID NO: 56270 - DNA, 22 bp, Artificial Sequence
  Synthetic
cttttctccagacuggcctuct

SEQ ID NO: 56271 - DNA, 28 bp, Artificial Sequence
  Synthetic
gatgcaaaagugttcaatgttttugaaa

SEQ ID NO: 56272 - DNA, 27 bp, Artificial Sequence
  Synthetic
aaaagctctatctuccctagtgtggua

SEQ ID NO: 56273 - DNA, 22 bp, Artificial Sequence
  Synthetic
aguacagtgccaugagagacca

SEQ ID NO: 56274 - DNA, 20 bp, Artificial Sequence
  Synthetic
agacagcaugccctttggut

SEQ ID NO: 56275 - DNA, 22 bp, Artificial Sequence
  Synthetic
gaaggaccgaguggtaagtcut

SEQ ID NO: 56276 - DNA, 29 bp, Artificial Sequence
  Synthetic
ttctgtcagtctutggtgaaactaguaag

SEQ ID NO: 56277 - DNA, 21 bp, Artificial Sequence
  Synthetic
caccatgcuctttgccucaga

SEQ ID NO: 56278 - DNA, 27 bp, Artificial Sequence
  Synthetic
cgaaaagtttcaauggctctatgucat

SEQ ID NO: 56279 - DNA, 25 bp, Artificial Sequence
  Synthetic
tgatacccttautccctgtggaugt

SEQ ID NO: 56280 - DNA, 22 bp, Artificial Sequence
  Synthetic
ggtccagcaauttgagucaggt

SEQ ID NO: 56281 - DNA, 25 bp, Artificial Sequence
  Synthetic
gaaagtcgugggtagatgugagaag

SEQ ID NO: 56282 - DNA, 23 bp, Artificial Sequence
  Synthetic
ctccttccucttcccacttucag

SEQ ID NO: 56283 - DNA, 23 bp, Artificial Sequence
  Synthetic
ccaaaagtctuccagagccttug

SEQ ID NO: 56284 - DNA, 24 bp, Artificial Sequence
  Synthetic
gcataagauccagcaccatcucaa

SEQ ID NO: 56285 - DNA, 28 bp, Artificial Sequence
  Synthetic
cattgttcacutaattctttuccaccca

SEQ ID NO: 56286 - DNA, 22 bp, Artificial Sequence
  Synthetic
gactcccagcuaaaactgccut

SEQ ID NO: 56287 - DNA, 22 bp, Artificial Sequence
  Synthetic
gacgucaaaaacccuccagaca

SEQ ID NO: 56288 - DNA, 22 bp, Artificial Sequence
  Synthetic
attactuggaaccagcccugac

SEQ ID NO: 56289 - DNA, 25 bp, Artificial Sequence
  Synthetic
gaagtcugggaaacacatcatcuct

SEQ ID NO: 56290 - DNA, 28 bp, Artificial Sequence
  Synthetic
cactgatataaagutgcgagccatttuc

SEQ ID NO: 56291 - DNA, 24 bp, Artificial Sequence
  Synthetic
gccaaaauaaacttccauggccaa

SEQ ID NO: 56292 - DNA, 23 bp, Artificial Sequence
  Synthetic
ccggccaauattgtctctugact

SEQ ID NO: 56293 - DNA, 20 bp, Artificial Sequence
  Synthetic
ggtgggctutgcctcttcuc

SEQ ID NO: 56294 - DNA, 21 bp, Artificial Sequence
  Synthetic
tgatgtugaccactgctuggg

SEQ ID NO: 56295 - DNA, 28 bp, Artificial Sequence
  Synthetic
cttgcttttgacagucttgttgattuct

SEQ ID NO: 56296 - DNA, 23 bp, Artificial Sequence
  Synthetic
gggtctgtaugaatgtccaguca

SEQ ID NO: 56297 - DNA, 25 bp, Artificial Sequence
  Synthetic
ggcctggtgutttaaagattctucc

SEQ ID NO: 56298 - DNA, 25 bp, Artificial Sequence
  Synthetic
acattgtacuccacaggaattucgg

SEQ ID NO: 56299 - DNA, 25 bp, Artificial Sequence
  Synthetic
acaaacatttgtugcccattctgut

SEQ ID NO: 56300 - DNA, 22 bp, Artificial Sequence
  Synthetic
tggataagugggaccugaccat

SEQ ID NO: 56301 - DNA, 22 bp, Artificial Sequence
  Synthetic
gcaggtugggaaaggtctcauc

SEQ ID NO: 56302 - DNA, 24 bp, Artificial Sequence
  Synthetic
cagaaaaguauggcaacaccaaca

SEQ ID NO: 56303 - DNA, 28 bp, Artificial Sequence
  Synthetic
gcaaacaatauagtgatggaaaauggca

SEQ ID NO: 56304 - DNA, 27 bp, Artificial Sequence
  Synthetic
aaactgttgagguaagaagcaaucaga

SEQ ID NO: 56305 - DNA, 22 bp, Artificial Sequence
  Synthetic
tcagttggtugtgtgaccagug

SEQ ID NO: 56306 - DNA, 17 bp, Artificial Sequence
  Synthetic
cccggcgugcaguacaa

SEQ ID NO: 56307 - DNA, 18 bp, Artificial Sequence
  Synthetic
tccacaaagcgcccucuc

SEQ ID NO: 56308 - DNA, 21 bp, Artificial Sequence
  Synthetic
tccctuagagggcactucact

SEQ ID NO: 56309 - DNA, 28 bp, Artificial Sequence
  Synthetic
agcttgtcgaugttgttcttatagtuga

SEQ ID NO: 56310 - DNA, 29 bp, Artificial Sequence
  Synthetic
acattctttccuactaacgttccttugag

SEQ ID NO: 56311 - DNA, 26 bp, Artificial Sequence
  Synthetic
tgaccacagggagaugaaatcaaaug

SEQ ID NO: 56312 - DNA, 22 bp, Artificial Sequence
  Synthetic
gaaggccugctccaaaugaaac

SEQ ID NO: 56313 - DNA, 28 bp, Artificial Sequence
  Synthetic
ggaaugcaaagaaauaaacacacacaca

SEQ ID NO: 56314 - DNA, 25 bp, Artificial Sequence
  Synthetic
gggtacaggauatggacttgaaaug

SEQ ID NO: 56315 - DNA, 19 bp, Artificial Sequence
  Synthetic
cccccaaugccgtcauact

SEQ ID NO: 56316 - DNA, 23 bp, Artificial Sequence
  Synthetic
agatgttgcuctgagcttuaccc

SEQ ID NO: 56317 - DNA, 27 bp, Artificial Sequence
  Synthetic
aatagcatcucaggaatcaaagacgut

SEQ ID NO: 56318 - DNA, 28 bp, Artificial Sequence
  Synthetic
catctaatgagtttucagccaagggaua

SEQ ID NO: 56319 - DNA, 22 bp, Artificial Sequence
  Synthetic
ctctcctucaactgggtuccac

SEQ ID NO: 56320 - DNA, 24 bp, Artificial Sequence
  Synthetic
ccaaacacaaauggccttctacuc

SEQ ID NO: 56321 - DNA, 28 bp, Artificial Sequence
  Synthetic
acagcccttagaaaguctatacacagua

SEQ ID NO: 56322 - DNA, 26 bp, Artificial Sequence
  Synthetic
gaacautagctttgtuccaacagaca

SEQ ID NO: 56323 - DNA, 28 bp, Artificial Sequence
  Synthetic
agcgtcaagcaugatgtatcuaagaaat

SEQ ID NO: 56324 - DNA, 28 bp, Artificial Sequence
  Synthetic
ccttacaattctcugggattcacatuct

SEQ ID NO: 56325 - DNA, 23 bp, Artificial Sequence
  Synthetic
gttttcagccaucatttcugcca

SEQ ID NO: 56326 - DNA, 28 bp, Artificial Sequence
  Synthetic
tcacttggaagaccutaaaacauaagca

SEQ ID NO: 56327 - DNA, 24 bp, Artificial Sequence
  Synthetic
cttcatatcucaaagcacugcaca

SEQ ID NO: 56328 - DNA, 27 bp, Artificial Sequence
  Synthetic
ctttaaggagtagcugagaaaccacut

SEQ ID NO: 56329 - DNA, 28 bp, Artificial Sequence
  Synthetic
ctacaaacaguaggcgtgatctaucaat

SEQ ID NO: 56330 - DNA, 28 bp, Artificial Sequence
  Synthetic
tgggaaagaugttattgaugaacaagga

SEQ ID NO: 56331 - DNA, 27 bp, Artificial Sequence
  Synthetic
gctacagauagcagccatgtttaaaug

SEQ ID NO: 56332 - DNA, 22 bp, Artificial Sequence
  Synthetic
aagcctgutgattcagugacct

SEQ ID NO: 56333 - DNA, 28 bp, Artificial Sequence
  Synthetic
gcagtagtagauacgttcatcgugaaat

SEQ ID NO: 56334 - DNA, 27 bp, Artificial Sequence
  Synthetic
cgtttacttuctgaagcagtuaacaca

SEQ ID NO: 56335 - DNA, 23 bp, Artificial Sequence
  Synthetic
gaaacgtgcugcaacaguagaac

SEQ ID NO: 56336 - DNA, 19 bp, Artificial Sequence
  Synthetic
cccaauggcgccctctuac

SEQ ID NO: 56337 - DNA, 28 bp, Artificial Sequence
  Synthetic
cgaacccautaggaacatugaaacaaat

SEQ ID NO: 56338 - DNA, 21 bp, Artificial Sequence
  Synthetic
ccacacaccgaacugtugaga

SEQ ID NO: 56339 - DNA, 21 bp, Artificial Sequence
  Synthetic
ggcgccuagcttatuccacag

SEQ ID NO: 56340 - DNA, 25 bp, Artificial Sequence
  Synthetic
cccattgtgccutcatagttctcug

SEQ ID NO: 56341 - DNA, 28 bp, Artificial Sequence
  Synthetic
ccggtgatuaaccacaacttcttactut

SEQ ID NO: 56342 - DNA, 28 bp, Artificial Sequence
  Synthetic
gttgatgatgttatugcctagtcagcua

SEQ ID NO: 56343 - DNA, 27 bp, Artificial Sequence
  Synthetic
atgaagtttattttugcccctctcuct

SEQ ID NO: 56344 - DNA, 26 bp, Artificial Sequence
  Synthetic
tcttctaaacucttacccagucagca

SEQ ID NO: 56345 - DNA, 27 bp, Artificial Sequence
  Synthetic
cgtccatcttucctccattttacugat

SEQ ID NO: 56346 - DNA, 22 bp, Artificial Sequence
  Synthetic
ctgtccattcugctgagacugt

SEQ ID NO: 56347 - DNA, 28 bp, Artificial Sequence
  Synthetic
gttggtggtggutttattgttaactcut

SEQ ID NO: 56348 - DNA, 23 bp, Artificial Sequence
  Synthetic
cgaccttcauaagtggcagtugt

SEQ ID NO: 56349 - DNA, 21 bp, Artificial Sequence
  Synthetic
gggcaaactuctcgtcatcug

SEQ ID NO: 56350 - DNA, 28 bp, Artificial Sequence
  Synthetic
cctgggatucagaaatgtggatuaaaag

SEQ ID NO: 56351 - DNA, 21 bp, Artificial Sequence
  Synthetic
cagtcaccagcuaatgcccua

SEQ ID NO: 56352 - DNA, 28 bp, Artificial Sequence
  Synthetic
agattttacaaagggaauggactgugaa

SEQ ID NO: 56353 - DNA, 28 bp, Artificial Sequence
  Synthetic
gcatctcgguaaaattctcctacacuaa

SEQ ID NO: 56354 - DNA, 21 bp, Artificial Sequence
  Synthetic
acgcaaagccugcatgaguaa

SEQ ID NO: 56355 - DNA, 28 bp, Artificial Sequence
  Synthetic
tgacatttcuaggcagttgagaaucaat

SEQ ID NO: 56356 - DNA, 25 bp, Artificial Sequence
  Synthetic
aggattggtuagaaagggagggaut

SEQ ID NO: 56357 - DNA, 23 bp, Artificial Sequence
  Synthetic
aggtcagccaaaaucaagucagg

SEQ ID NO: 56358 - DNA, 28 bp, Artificial Sequence
  Synthetic
ggagaagaaguggctgtgaagattttua

SEQ ID NO: 56359 - DNA, 27 bp, Artificial Sequence
  Synthetic
cacaaaacuttctacuccacaacgaaa

SEQ ID NO: 56360 - DNA, 28 bp, Artificial Sequence
  Synthetic
catcaatctuccacatgaagugcaaaat

SEQ ID NO: 56361 - DNA, 28 bp, Artificial Sequence
  Synthetic
acattccttcauacacacgagctattuc

SEQ ID NO: 56362 - DNA, 21 bp, Artificial Sequence
  Synthetic
gctgagggagguagaagccut

SEQ ID NO: 56363 - DNA, 22 bp, Artificial Sequence
  Synthetic
ggccactgucagttctcatcuc

SEQ ID NO: 56364 - DNA, 20 bp, Artificial Sequence
  Synthetic
agggagguagguagcaccac

SEQ ID NO: 56365 - DNA, 27 bp, Artificial Sequence
  Synthetic
agtgtctatgttcugagaatggtgtuc

SEQ ID NO: 56366 - DNA, 28 bp, Artificial Sequence
  Synthetic
acattttgcttuttgctcacaaucagat

SEQ ID NO: 56367 - DNA, 24 bp, Artificial Sequence
  Synthetic
gacactgaccutgtgcatcattut

SEQ ID NO: 56368 - DNA, 20 bp, Artificial Sequence
  Synthetic
ccggctuccacacatcctua

SEQ ID NO: 56369 - DNA, 23 bp, Artificial Sequence
  Synthetic
tctgtcaagtugactgcaaccuc

SEQ ID NO: 56370 - DNA, 17 bp, Artificial Sequence
  Synthetic
ggcagugcagggucgag

SEQ ID NO: 56371 - DNA, 21 bp, Artificial Sequence
  Synthetic
ctgtucaagctccugcagaga

SEQ ID NO: 56372 - DNA, 22 bp, Artificial Sequence
  Synthetic
ctauggcgatgguagggaaaga

SEQ ID NO: 56373 - DNA, 21 bp, Artificial Sequence
  Synthetic
actcaagccugtggtttuggt

SEQ ID NO: 56374 - DNA, 25 bp, Artificial Sequence
  Synthetic
gtctgtcactgugaaaagagggaut

SEQ ID NO: 56375 - DNA, 20 bp, Artificial Sequence
  Synthetic
gcagttcccuctgctcctug

SEQ ID NO: 56376 - DNA, 22 bp, Artificial Sequence
  Synthetic
gagaugcagctggaauaggcat

SEQ ID NO: 56377 - DNA, 28 bp, Artificial Sequence
  Synthetic
cctgaagcctcutttaggaagtaacaut

SEQ ID NO: 56378 - DNA, 25 bp, Artificial Sequence
  Synthetic
aggtcagaauctttgtgtugggaaa

SEQ ID NO: 56379 - DNA, 23 bp, Artificial Sequence
  Synthetic
gtgttcatgautgcagtgtcugg

SEQ ID NO: 56380 - DNA, 28 bp, Artificial Sequence
  Synthetic
cctttagcaaacutctgaaugacaacat

SEQ ID NO: 56381 - DNA, 25 bp, Artificial Sequence
  Synthetic
ccttaaccucacactatccctcucc

SEQ ID NO: 56382 - DNA, 22 bp, Artificial Sequence
  Synthetic
tgccactgucaattgtgccuaa

SEQ ID NO: 56383 - DNA, 27 bp, Artificial Sequence
  Synthetic
tcuggagaggaagatuaagaggacaag

SEQ ID NO: 56384 - DNA, 21 bp, Artificial Sequence
  Synthetic
gctcuggcagctctgauacag

SEQ ID NO: 56385 - DNA, 24 bp, Artificial Sequence
  Synthetic
ccccctcacaccucttattcttut

SEQ ID NO: 56386 - DNA, 21 bp, Artificial Sequence
  Synthetic
actcctctcugctccacucaa

SEQ ID NO: 56387 - DNA, 21 bp, Artificial Sequence
  Synthetic
ggtgactcuggacactuccct

SEQ ID NO: 56388 - DNA, 21 bp, Artificial Sequence
  Synthetic
ttcttgccacggucacctaug

SEQ ID NO: 56389 - DNA, 23 bp, Artificial Sequence
  Synthetic
atgaaccatgucaggcaaaucct

SEQ ID NO: 56390 - DNA, 22 bp, Artificial Sequence
  Synthetic
cgggacaaaaucttggcttuga

SEQ ID NO: 56391 - DNA, 24 bp, Artificial Sequence
  Synthetic
gtaacatagcccucctgtctcuga

SEQ ID NO: 56392 - DNA, 21 bp, Artificial Sequence
  Synthetic
gcctcggutcccttcacuaaa

SEQ ID NO: 56393 - DNA, 20 bp, Artificial Sequence
  Synthetic
caagagccuccagagctugt

SEQ ID NO: 56394 - DNA, 21 bp, Artificial Sequence
  Synthetic
gcttctuggcagtgagcucag

SEQ ID NO: 56395 - DNA, 25 bp, Artificial Sequence
  Synthetic
tctacctgcaagaaugaggacctua

SEQ ID NO: 56396 - DNA, 24 bp, Artificial Sequence
  Synthetic
gccaatgaugttgtaguccacgat

SEQ ID NO: 56397 - DNA, 22 bp, Artificial Sequence
  Synthetic
cagtgatgcuctctcctgctuc

SEQ ID NO: 56398 - DNA, 27 bp, Artificial Sequence
  Synthetic
gcaccttaaagucctcatatcaaucct

SEQ ID NO: 56399 - DNA, 29 bp, Artificial Sequence
  Synthetic
caccaaatgauccaacagaaataatucca

SEQ ID NO: 56400 - DNA, 24 bp, Artificial Sequence
  Synthetic
tttattctgtggcauggaggacug

SEQ ID NO: 56401 - DNA, 25 bp, Artificial Sequence
  Synthetic
ccacgaaugctctagaaaugagagt

SEQ ID NO: 56402 - DNA, 29 bp, Artificial Sequence
  Synthetic
gcaggctccugattattaacgtattcuaa

SEQ ID NO: 56403 - DNA, 24 bp, Artificial Sequence
  Synthetic
catcttctucacccctcggaauag

SEQ ID NO: 56404 - DNA, 22 bp, Artificial Sequence
  Synthetic
tccattcacuggaaagguccac

SEQ ID NO: 56405 - DNA, 27 bp, Artificial Sequence
  Synthetic
ggcattcctgugacaaacaaattauca

SEQ ID NO: 56406 - DNA, 23 bp, Artificial Sequence
  Synthetic
tggtccugagaagaactccagut

SEQ ID NO: 56407 - DNA, 29 bp, Artificial Sequence
  Synthetic
gagtgaauggcaattgtttgtuagaaaag

SEQ ID NO: 56408 - DNA, 28 bp, Artificial Sequence
  Synthetic
ccacagaaauaaaaagagaaacggcaut

SEQ ID NO: 56409 - DNA, 23 bp, Artificial Sequence
  Synthetic
gtgaccagggaaguaatgaguct

SEQ ID NO: 56410 - DNA, 28 bp, Artificial Sequence
  Synthetic
cttacctggtcauttcctttttgttuca

SEQ ID NO: 56411 - DNA, 21 bp, Artificial Sequence
  Synthetic
aggatctgaccugaggcacut

SEQ ID NO: 56412 - DNA, 24 bp, Artificial Sequence
  Synthetic
gaacatcacagcauccaagaggua

SEQ ID NO: 56413 - DNA, 21 bp, Artificial Sequence
  Synthetic
tctgtggtgutcccaccttuc

SEQ ID NO: 56414 - DNA, 25 bp, Artificial Sequence
  Synthetic
ttcagactgtaaucctcccttccut

SEQ ID NO: 56415 - DNA, 19 bp, Artificial Sequence
  Synthetic
cgcauaggaagcccctgua

SEQ ID NO: 56416 - DNA, 21 bp, Artificial Sequence
  Synthetic
ccctgggcucagatctgcuat

SEQ ID NO: 56417 - DNA, 22 bp, Artificial Sequence
  Synthetic
tcuaagggcattugccagaaca

SEQ ID NO: 56418 - DNA, 23 bp, Artificial Sequence
  Synthetic
gcatactuacccaagcacauggt

SEQ ID NO: 56419 - DNA, 27 bp, Artificial Sequence
  Synthetic
tcgtaatgaaugtcaagaaauccccaa

SEQ ID NO: 56420 - DNA, 28 bp, Artificial Sequence
  Synthetic
tcaagtagctcaucagttagctctttuc

SEQ ID NO: 56421 - DNA, 23 bp, Artificial Sequence
  Synthetic
gtgctgtccugtcactcaugaat

SEQ ID NO: 56422 - DNA, 23 bp, Artificial Sequence
  Synthetic
gccacaagaaagcuctcttugga

SEQ ID NO: 56423 - DNA, 25 bp, Artificial Sequence
  Synthetic
catggcauctgaagacaugaagact

SEQ ID NO: 56424 - DNA, 24 bp, Artificial Sequence
  Synthetic
gccatcaaagcutcatggaaucct

SEQ ID NO: 56425 - DNA, 22 bp, Artificial Sequence
  Synthetic
gagactcattugctgccactug

SEQ ID NO: 56426 - DNA, 20 bp, Artificial Sequence
  Synthetic
ggagucaggccagactagug

SEQ ID NO: 56427 - DNA, 26 bp, Artificial Sequence
  Synthetic
ctgttcugcaaacaagggaatcatut

SEQ ID NO: 56428 - DNA, 21 bp, Artificial Sequence
  Synthetic
gaaggagtcuccaggcagaug

SEQ ID NO: 56429 - DNA, 23 bp, Artificial Sequence
  Synthetic
cccaccgtguttctaggattcug

SEQ ID NO: 56430 - DNA, 22 bp, Artificial Sequence
  Synthetic
ggcgtggagugaactctttcuc

SEQ ID NO: 56431 - DNA, 20 bp, Artificial Sequence
  Synthetic
gccttcaugcaggcaaacuc

SEQ ID NO: 56432 - DNA, 21 bp, Artificial Sequence
  Synthetic
cctgagcaaugtgagcccaua

SEQ ID NO: 56433 - DNA, 28 bp, Artificial Sequence
  Synthetic
cctatgagttcaugagcacattcttcut

SEQ ID NO: 56434 - DNA, 24 bp, Artificial Sequence
  Synthetic
tggttaggaugagagaccctgtuc

SEQ ID NO: 56435 - DNA, 23 bp, Artificial Sequence
  Synthetic
gggttcacagugtgcacttuaac

SEQ ID NO: 56436 - DNA, 28 bp, Artificial Sequence
  Synthetic
ctcctaaucacagttaaaccugaaggaa

SEQ ID NO: 56437 - DNA, 22 bp, Artificial Sequence
  Synthetic
gacatccucaggttcttugcca

SEQ ID NO: 56438 - DNA, 21 bp, Artificial Sequence
  Synthetic
gccttucccccaagaggttug

SEQ ID NO: 56439 - DNA, 20 bp, Artificial Sequence
  Synthetic
tccatccccguggacuacat

SEQ ID NO: 56440 - DNA, 22 bp, Artificial Sequence
  Synthetic
cgcaaggcaggaaagutaacuc

SEQ ID NO: 56441 - DNA, 27 bp, Artificial Sequence
  Synthetic
gtcaacaaattcuccctaaggatgtuc

SEQ ID NO: 56442 - DNA, 22 bp, Artificial Sequence
  Synthetic
cctctgtgggaauccagggtua

SEQ ID NO: 56443 - DNA, 24 bp, Artificial Sequence
  Synthetic
ccgtgcuctggaaaucaacaaaat

SEQ ID NO: 56444 - DNA, 20 bp, Artificial Sequence
  Synthetic
ccagcgccaccugatuacag

SEQ ID NO: 56445 - DNA, 22 bp, Artificial Sequence
  Synthetic
ctgagagcuggtggtggtaaug

SEQ ID NO: 56446 - DNA, 18 bp, Artificial Sequence
  Synthetic
agctctgugccctgtgug

SEQ ID NO: 56447 - DNA, 23 bp, Artificial Sequence
  Synthetic
cacctcauagaactgcctgtuga

SEQ ID NO: 56448 - DNA, 22 bp, Artificial Sequence
  Synthetic
cagaaccaugagcctgtgtgua

SEQ ID NO: 56449 - DNA, 18 bp, Artificial Sequence
  Synthetic
ctgguggacgcuagccat

SEQ ID NO: 56450 - DNA, 20 bp, Artificial Sequence
  Synthetic
ggcctcagcugcttctctug

SEQ ID NO: 56451 - DNA, 18 bp, Artificial Sequence
  Synthetic
caacgugggacggauggt

SEQ ID NO: 56452 - DNA, 19 bp, Artificial Sequence
  Synthetic
gatggccaggcuctgtgut

SEQ ID NO: 56453 - DNA, 18 bp, Artificial Sequence
  Synthetic
acacagcuccagcggaug

SEQ ID NO: 56454 - DNA, 20 bp, Artificial Sequence
  Synthetic
ggcaacgacuttgtguccat

SEQ ID NO: 56455 - DNA, 19 bp, Artificial Sequence
  Synthetic
ctcctcgugaccgaagcuc

SEQ ID NO: 56456 - DNA, 21 bp, Artificial Sequence
  Synthetic
aaaggcugcagagcatugaac

SEQ ID NO: 56457 - DNA, 20 bp, Artificial Sequence
  Synthetic
tttgcacucttccuggccaa

SEQ ID NO: 56458 - DNA, 20 bp, Artificial Sequence
  Synthetic
gguccgcacaaacctttgut

SEQ ID NO: 56459 - DNA, 19 bp, Artificial Sequence
  Synthetic
cttgccucccagguaccac

SEQ ID NO: 56460 - DNA, 19 bp, Artificial Sequence
  Synthetic
cacctgcugtgtggcttug

SEQ ID NO: 56461 - DNA, 20 bp, Artificial Sequence
  Synthetic
gcaataccccugaggcauga

SEQ ID NO: 56462 - DNA, 20 bp, Artificial Sequence
  Synthetic
catgccccaagcucctagug

SEQ ID NO: 56463 - DNA, 22 bp, Artificial Sequence
  Synthetic
ggcagcacacauctctatucct

SEQ ID NO: 56464 - DNA, 17 bp, Artificial Sequence
  Synthetic
gcugcccctgugacacc

SEQ ID NO: 56465 - DNA, 23 bp, Artificial Sequence
  Synthetic
gagaagaaccugcuacaggaaca

SEQ ID NO: 56466 - DNA, 20 bp, Artificial Sequence
  Synthetic
ctcugcacgcaaacactcug

SEQ ID NO: 56467 - DNA, 28 bp, Artificial Sequence
  Synthetic
aggttgctttcuccaataactagatgug

SEQ ID NO: 56468 - DNA, 20 bp, Artificial Sequence
  Synthetic
gccttcttucccagccctug

SEQ ID NO: 56469 - DNA, 24 bp, Artificial Sequence
  Synthetic
cagagggacutgtcacttcttugt

SEQ ID NO: 56470 - DNA, 29 bp, Artificial Sequence
  Synthetic
aatgtaaacaaaatucatggcatggauca

SEQ ID NO: 56471 - DNA, 28 bp, Artificial Sequence
  Synthetic
gcttattctgttuactggagggttuagt

SEQ ID NO: 56472 - DNA, 22 bp, Artificial Sequence
  Synthetic
catcgccuactccatggugaag

SEQ ID NO: 56473 - DNA, 20 bp, Artificial Sequence
  Synthetic
acccutgtgtgguagaccca

SEQ ID NO: 56474 - DNA, 21 bp, Artificial Sequence
  Synthetic
tcccgaggutcataccgtgua

SEQ ID NO: 56475 - DNA, 27 bp, Artificial Sequence
  Synthetic
tgtttctcatctuggacttgatctugt

SEQ ID NO: 56476 - DNA, 24 bp, Artificial Sequence
  Synthetic
agggtagauactcatgttgucggt

SEQ ID NO: 56477 - DNA, 26 bp, Artificial Sequence
  Synthetic
tttgggatttaaguggttctggtuct

SEQ ID NO: 56478 - DNA, 22 bp, Artificial Sequence
  Synthetic
gccccaacagcagutaagucaa

SEQ ID NO: 56479 - DNA, 24 bp, Artificial Sequence
  Synthetic
cctcagaugccaaatgactttcuc

SEQ ID NO: 56480 - DNA, 21 bp, Artificial Sequence
  Synthetic
cctacaucaagctcgcaguca

SEQ ID NO: 56481 - DNA, 22 bp, Artificial Sequence
  Synthetic
gctttccgucctgtttccucac

SEQ ID NO: 56482 - DNA, 24 bp, Artificial Sequence
  Synthetic
ccagaagugggatttttggctuaa

SEQ ID NO: 56483 - DNA, 23 bp, Artificial Sequence
  Synthetic
gccaatgacccutccttctugac

SEQ ID NO: 56484 - DNA, 24 bp, Artificial Sequence
  Synthetic
ctccctttccuctccttgagacua

SEQ ID NO: 56485 - DNA, 28 bp, Artificial Sequence
  Synthetic
caggaagcaggagaugaaaataaatcug

SEQ ID NO: 56486 - DNA, 21 bp, Artificial Sequence
  Synthetic
gggatgugatgagagguggat

SEQ ID NO: 56487 - DNA, 22 bp, Artificial Sequence
  Synthetic
tgtgtaacagutcctgcauggg

SEQ ID NO: 56488 - DNA, 23 bp, Artificial Sequence
  Synthetic
tcagtcccauggaattttcgcut

SEQ ID NO: 56489 - DNA, 23 bp, Artificial Sequence
  Synthetic
ctggatccccacutttcctctug

SEQ ID NO: 56490 - DNA, 26 bp, Artificial Sequence
  Synthetic
ctcagtttaaagugcaaatcgacucc

SEQ ID NO: 56491 - DNA, 25 bp, Artificial Sequence
  Synthetic
gctggaagaaagugaaaacaacugt

SEQ ID NO: 56492 - DNA, 22 bp, Artificial Sequence
  Synthetic
tggagggcagautguagggaat

SEQ ID NO: 56493 - DNA, 24 bp, Artificial Sequence
  Synthetic
cttcacagtaauggccacctttut

SEQ ID NO: 56494 - DNA, 25 bp, Artificial Sequence
  Synthetic
ggatggagaauggcttcaacatgua

SEQ ID NO: 56495 - DNA, 20 bp, Artificial Sequence
  Synthetic
cacaaggcucccaccaacut

SEQ ID NO: 56496 - DNA, 20 bp, Artificial Sequence
  Synthetic
ccgtcuggactgaccucaat

SEQ ID NO: 56497 - DNA, 22 bp, Artificial Sequence
  Synthetic
aggcuagcagagactttcucct

SEQ ID NO: 56498 - DNA, 22 bp, Artificial Sequence
  Synthetic
gcaaatgguggctgactgagut

SEQ ID NO: 56499 - DNA, 21 bp, Artificial Sequence
  Synthetic
gcagatcctugagggcaacug

SEQ ID NO: 56500 - DNA, 28 bp, Artificial Sequence
  Synthetic
ggatcttataaggcuctatctgcaugaa

SEQ ID NO: 56501 - DNA, 26 bp, Artificial Sequence
  Synthetic
ggcctttcuccattaaacagcuagat

SEQ ID NO: 56502 - DNA, 21 bp, Artificial Sequence
  Synthetic
ctgctcccacucaagccttua

SEQ ID NO: 56503 - DNA, 21 bp, Artificial Sequence
  Synthetic
gcgcagugtgatcuggaagac

SEQ ID NO: 56504 - DNA, 21 bp, Artificial Sequence
  Synthetic
gctgcctauctgtgctccaut

SEQ ID NO: 56505 - DNA, 23 bp, Artificial Sequence
  Synthetic
ccatgaatcauctcgggtctcug

SEQ ID NO: 56506 - DNA, 23 bp, Artificial Sequence
  Synthetic
gctaacagagcuaagcagaugcc

SEQ ID NO: 56507 - DNA, 26 bp, Artificial Sequence
  Synthetic
gtgatcttaauggagttcuccaggat

SEQ ID NO: 56508 - DNA, 22 bp, Artificial Sequence
  Synthetic
ggucaaggcacttcuggaagaa

SEQ ID NO: 56509 - DNA, 21 bp, Artificial Sequence
  Synthetic
ccctccaugcctuacaagacc

SEQ ID NO: 56510 - DNA, 21 bp, Artificial Sequence
  Synthetic
ccctgcaaugtgacaugacga

SEQ ID NO: 56511 - DNA, 22 bp, Artificial Sequence
  Synthetic
agaaagcugccctttggtucat

SEQ ID NO: 56512 - DNA, 24 bp, Artificial Sequence
  Synthetic
tctgctttctgutttcccttccuc

SEQ ID NO: 56513 - DNA, 23 bp, Artificial Sequence
  Synthetic
gtggcatcucaactcggatuact

SEQ ID NO: 56514 - DNA, 26 bp, Artificial Sequence
  Synthetic
aatccaaguaagccattcucaagagg

SEQ ID NO: 56515 - DNA, 25 bp, Artificial Sequence
  Synthetic
aaccaatgctcucaccttaaagugt

SEQ ID NO: 56516 - DNA, 26 bp, Artificial Sequence
  Synthetic
gtgcataaccucttgcccaactauaa

SEQ ID NO: 56517 - DNA, 25 bp, Artificial Sequence
  Synthetic
caaaatcagaugccatgtgcttuga

SEQ ID NO: 56518 - DNA, 24 bp, Artificial Sequence
  Synthetic
gcacagaatutgacacactugcag

SEQ ID NO: 56519 - DNA, 26 bp, Artificial Sequence
  Synthetic
cttttcttccccgcutactctaauca

SEQ ID NO: 56520 - DNA, 28 bp, Artificial Sequence
  Synthetic
aacttcatttgtgutttctcctagguca

SEQ ID NO: 56521 - DNA, 25 bp, Artificial Sequence
  Synthetic
gtgttgtuggcagggatacauaaac

SEQ ID NO: 56522 - DNA, 29 bp, Artificial Sequence
  Synthetic
tgtcatgattcaucttactagccucaaac

SEQ ID NO: 56523 - DNA, 26 bp, Artificial Sequence
  Synthetic
gagtaatcuaggaaccucaaggcaaa

SEQ ID NO: 56524 - DNA, 22 bp, Artificial Sequence
  Synthetic
caggccaucaagtgtgactuct

SEQ ID NO: 56525 - DNA, 21 bp, Artificial Sequence
  Synthetic
ccctttcuggctctggaagug

SEQ ID NO: 56526 - DNA, 18 bp, Artificial Sequence
  Synthetic
agcgcaaggcgcgauaua

SEQ ID NO: 56527 - DNA, 26 bp, Artificial Sequence
  Synthetic
ccacaaagaguctacatgtcuagggt

SEQ ID NO: 56528 - DNA, 23 bp, Artificial Sequence
  Synthetic
agtgagcaugaaggacaatguca

SEQ ID NO: 56529 - DNA, 21 bp, Artificial Sequence
  Synthetic
ggaagccuggaactuggagag

SEQ ID NO: 56530 - DNA, 19 bp, Artificial Sequence
  Synthetic
gcgagcccgaucugaagaa

SEQ ID NO: 56531 - DNA, 18 bp, Artificial Sequence
  Synthetic
gttcaugggccgctugac

SEQ ID NO: 56532 - DNA, 19 bp, Artificial Sequence
  Synthetic
ccaggccgagcugaacauc

SEQ ID NO: 56533 - DNA, 21 bp, Artificial Sequence
  Synthetic
ggcuttcagguggacaaggac

SEQ ID NO: 56534 - DNA, 23 bp, Artificial Sequence
  Synthetic
ggcaatcugaaaggacctccaut

SEQ ID NO: 56535 - DNA, 20 bp, Artificial Sequence
  Synthetic
cagacaccugcctggctaug

SEQ ID NO: 56536 - DNA, 21 bp, Artificial Sequence
  Synthetic
caugcccgctaaucccagaat

SEQ ID NO: 56537 - DNA, 22 bp, Artificial Sequence
  Synthetic
ggaagtucttcggguagaaggg

SEQ ID NO: 56538 - DNA, 21 bp, Artificial Sequence
  Synthetic
caatccugaccccagtgctut

SEQ ID NO: 56539 - DNA, 22 bp, Artificial Sequence
  Synthetic
ctgaacacugcctgctatccuc

SEQ ID NO: 56540 - DNA, 21 bp, Artificial Sequence
  Synthetic
catggcagagagaguggaguc

SEQ ID NO: 56541 - DNA, 22 bp, Artificial Sequence
  Synthetic
gcagugaacaggcgagauacaa

SEQ ID NO: 56542 - DNA, 28 bp, Artificial Sequence
  Synthetic
tcatcaattcagaugacacatcttucca

SEQ ID NO: 56543 - DNA, 21 bp, Artificial Sequence
  Synthetic
ggaagttgaugagccctugct

SEQ ID NO: 56544 - DNA, 19 bp, Artificial Sequence
  Synthetic
ccaacagccgcutcgatug

SEQ ID NO: 56545 - DNA, 22 bp, Artificial Sequence
  Synthetic
cgtguagcccattucagaggag

SEQ ID NO: 56546 - DNA, 21 bp, Artificial Sequence
  Synthetic
caccctcaccutgacaggtut

SEQ ID NO: 56547 - DNA, 22 bp, Artificial Sequence
  Synthetic
ctggaggccuctgctttcuaac

SEQ ID NO: 56548 - DNA, 23 bp, Artificial Sequence
  Synthetic
aaacaagcttutgcccatguacc

SEQ ID NO: 56549 - DNA, 28 bp, Artificial Sequence
  Synthetic
aactgcaccattutgagtgtgttaaaut

SEQ ID NO: 56550 - DNA, 21 bp, Artificial Sequence
  Synthetic
gctcttttugccctggaugac

SEQ ID NO: 56551 - DNA, 22 bp, Artificial Sequence
  Synthetic
gatgaggucacagcaccatgua

SEQ ID NO: 56552 - DNA, 26 bp, Artificial Sequence
  Synthetic
gtatatggtatagutttgggccgugt

SEQ ID NO: 56553 - DNA, 25 bp, Artificial Sequence
  Synthetic
catgccttgcucttgaaatttcuca

SEQ ID NO: 56554 - DNA, 23 bp, Artificial Sequence
  Synthetic
ccatcacuggcacagtccttauc

SEQ ID NO: 56555 - DNA, 23 bp, Artificial Sequence
  Synthetic
gguggtttgtcaaugacggagaa

SEQ ID NO: 56556 - DNA, 28 bp, Artificial Sequence
  Synthetic
ttttattgcagguaattccaguggagaa

SEQ ID NO: 56557 - DNA, 23 bp, Artificial Sequence
  Synthetic
tcgtgcctcuacaggatcauact

SEQ ID NO: 56558 - DNA, 18 bp, Artificial Sequence
  Synthetic
ggcugugccgacaggaag

SEQ ID NO: 56559 - DNA, 21 bp, Artificial Sequence
  Synthetic
cctcctcgauctccttgtuga

SEQ ID NO: 56560 - DNA, 20 bp, Artificial Sequence
  Synthetic
guggagaccatucgcaacct

SEQ ID NO: 56561 - DNA, 25 bp, Artificial Sequence
  Synthetic
cccagctaccuccttctcattttua

SEQ ID NO: 56562 - DNA, 21 bp, Artificial Sequence
  Synthetic
tgtagcucacaccctctccut

SEQ ID NO: 56563 - DNA, 21 bp, Artificial Sequence
  Synthetic
gctgggaagaggucactgtug

SEQ ID NO: 56564 - DNA, 22 bp, Artificial Sequence
  Synthetic
acccagaagcaugaaacacugt

SEQ ID NO: 56565 - DNA, 28 bp, Artificial Sequence
  Synthetic
aggcacgaacautacttcaatcaattuc

SEQ ID NO: 56566 - DNA, 25 bp, Artificial Sequence
  Synthetic
gcgattttccautcaggttcttcug

SEQ ID NO: 56567 - DNA, 28 bp, Artificial Sequence
  Synthetic
cgtcattcctgauccttcatgagtauat

SEQ ID NO: 56568 - DNA, 25 bp, Artificial Sequence
  Synthetic
ctaccttagguactggtctgacugt

SEQ ID NO: 56569 - DNA, 24 bp, Artificial Sequence
  Synthetic
gaggcaaagtutgcaagtcttcuc

SEQ ID NO: 56570 - DNA, 23 bp, Artificial Sequence
  Synthetic
gcccagaugaggacctacaaaut

SEQ ID NO: 56571 - DNA, 20 bp, Artificial Sequence
  Synthetic
cccattagugcccccaucac

SEQ ID NO: 56572 - DNA, 21 bp, Artificial Sequence
  Synthetic
gaggagctgutcaggatggug

SEQ ID NO: 56573 - DNA, 22 bp, Artificial Sequence
  Synthetic
cagcagucaggaaggacatgut

SEQ ID NO: 56574 - DNA, 21 bp, Artificial Sequence
  Synthetic
agaacggugaagcugaagagg

SEQ ID NO: 56575 - DNA, 23 bp, Artificial Sequence
  Synthetic
tgttagttuggcgggtgtatcug

SEQ ID NO: 56576 - DNA, 21 bp, Artificial Sequence
  Synthetic
cgaggacaccauctucgagat

SEQ ID NO: 56577 - DNA, 17 bp, Artificial Sequence
  Synthetic
gtagcugaggccucgca

SEQ ID NO: 56578 - DNA, 20 bp, Artificial Sequence
  Synthetic
cagagctauggcgccuacag

SEQ ID NO: 56579 - DNA, 22 bp, Artificial Sequence
  Synthetic
cgggauctaaacugcagggaag

SEQ ID NO: 56580 - DNA, 19 bp, Artificial Sequence
  Synthetic
ctgtcgggcutctcgtcua

SEQ ID NO: 56581 - DNA, 19 bp, Artificial Sequence
  Synthetic
agctccugagtgcuaccgt

SEQ ID NO: 56582 - DNA, 21 bp, Artificial Sequence
  Synthetic
gcatcctctutcctggcctua

SEQ ID NO: 56583 - DNA, 26 bp, Artificial Sequence
  Synthetic
cagattgcagauctgacucagaagat

SEQ ID NO: 56584 - DNA, 20 bp, Artificial Sequence
  Synthetic
gacucgcaaacccactucct

SEQ ID NO: 56585 - DNA, 20 bp, Artificial Sequence
  Synthetic
ccctcacugacccuccaaac

SEQ ID NO: 56586 - DNA, 20 bp, Artificial Sequence
  Synthetic
caccagugaggtagcuggac

SEQ ID NO: 56587 - DNA, 21 bp, Artificial Sequence
  Synthetic
ggctgucccaacttcctguat

SEQ ID NO: 56588 - DNA, 22 bp, Artificial Sequence
  Synthetic
gacacaagauctgcucgaggac

SEQ ID NO: 56589 - DNA, 25 bp, Artificial Sequence
  Synthetic
tguggtgtaccuaaagacagagaca

SEQ ID NO: 56590 - DNA, 28 bp, Artificial Sequence
  Synthetic
gcaatttttcttaugttccaggaacuca

SEQ ID NO: 56591 - DNA, 23 bp, Artificial Sequence
  Synthetic
gggcagaguccttagcttttuct

SEQ ID NO: 56592 - DNA, 24 bp, Artificial Sequence
  Synthetic
gatgggtagugaagcaatggttut

SEQ ID NO: 56593 - DNA, 28 bp, Artificial Sequence
  Synthetic
ttctccatgtucacccttaaaagatuga

SEQ ID NO: 56594 - DNA, 21 bp, Artificial Sequence
  Synthetic
ctccacgguggttttcgttuc

SEQ ID NO: 56595 - DNA, 27 bp, Artificial Sequence
  Synthetic
tgttacucaccaaagagatggtttugt

SEQ ID NO: 56596 - DNA, 21 bp, Artificial Sequence
  Synthetic
ccaccagacauccgagtcauc

SEQ ID NO: 56597 - DNA, 26 bp, Artificial Sequence
  Synthetic
ccactcactgtuttctccttacacut

SEQ ID NO: 56598 - DNA, 21 bp, Artificial Sequence
  Synthetic
catgaugcccagggugaagaa

SEQ ID NO: 56599 - DNA, 22 bp, Artificial Sequence
  Synthetic
guggaaccttaaugcccaggat

SEQ ID NO: 56600 - DNA, 19 bp, Artificial Sequence
  Synthetic
cgtccccaaggcuttggua

SEQ ID NO: 56601 - DNA, 19 bp, Artificial Sequence
  Synthetic
aagacuggagacccuggct

SEQ ID NO: 56602 - DNA, 17 bp, Artificial Sequence
  Synthetic
gguccggctccuggaga

SEQ ID NO: 56603 - DNA, 26 bp, Artificial Sequence
  Synthetic
ccaagctcaucatttccaactugaaa

SEQ ID NO: 56604 - DNA, 20 bp, Artificial Sequence
  Synthetic
ctcctgccaucgtcaacuca

SEQ ID NO: 56605 - DNA, 21 bp, Artificial Sequence
  Synthetic
agtgggccaacuggaucaaag

SEQ ID NO: 56606 - DNA, 20 bp, Artificial Sequence
  Synthetic
cggccatucctgtgagguag

SEQ ID NO: 56607 - DNA, 22 bp, Artificial Sequence
  Synthetic
cuctctcuagggaaggccacat

SEQ ID NO: 56608 - DNA, 26 bp, Artificial Sequence
  Synthetic
agcaaaacattgaugaacaaatgcut

SEQ ID NO: 56609 - DNA, 23 bp, Artificial Sequence
  Synthetic
aagacaaggcuatgatgctgcut

SEQ ID NO: 56610 - DNA, 21 bp, Artificial Sequence
  Synthetic
gagaagtugccttcctuccga

SEQ ID NO: 56611 - DNA, 22 bp, Artificial Sequence
  Synthetic
gtcaggcaggaguctcagatug

SEQ ID NO: 56612 - DNA, 21 bp, Artificial Sequence
  Synthetic
ccccaaaaucuaacgcagcac

SEQ ID NO: 56613 - DNA, 24 bp, Artificial Sequence
  Synthetic
ggcaugatggagugacaggaaaaa

SEQ ID NO: 56614 - DNA, 21 bp, Artificial Sequence
  Synthetic
agcaatgcucccttcggttua

SEQ ID NO: 56615 - DNA, 24 bp, Artificial Sequence
  Synthetic
cgagcataagautaagcagctguc

SEQ ID NO: 56616 - DNA, 21 bp, Artificial Sequence
  Synthetic
gggcuttagugacagggaagt

SEQ ID NO: 56617 - DNA, 21 bp, Artificial Sequence
  Synthetic
agtgaauggagccacccaauc

SEQ ID NO: 56618 - DNA, 20 bp, Artificial Sequence
  Synthetic
agcccttcutatcgctggug

SEQ ID NO: 56619 - DNA, 23 bp, Artificial Sequence
  Synthetic
agtaacccctuaggtgcatccut

SEQ ID NO: 56620 - DNA, 21 bp, Artificial Sequence
  Synthetic
gaggcggcccautttcttuag

SEQ ID NO: 56621 - DNA, 21 bp, Artificial Sequence
  Synthetic
gcacctccutcctctgctuag

SEQ ID NO: 56622 - DNA, 25 bp, Artificial Sequence
  Synthetic
tgtaggtuccttttcaguggacaca

SEQ ID NO: 56623 - DNA, 26 bp, Artificial Sequence
  Synthetic
gaaaaatggaguaccaaggtttguca

SEQ ID NO: 56624 - DNA, 23 bp, Artificial Sequence
  Synthetic
gactaacaaatuctgcccccuct

SEQ ID NO: 56625 - DNA, 23 bp, Artificial Sequence
  Synthetic
catagcactucctgcctggtauc

SEQ ID NO: 56626 - DNA, 25 bp, Artificial Sequence
  Synthetic
gtttaguagaggaaacagacgugct

SEQ ID NO: 56627 - DNA, 22 bp, Artificial Sequence
  Synthetic
tgcattgacuggagtguggaaa

SEQ ID NO: 56628 - DNA, 26 bp, Artificial Sequence
  Synthetic
tctatggtgaucacacctuagggaaa

SEQ ID NO: 56629 - DNA, 24 bp, Artificial Sequence
  Synthetic
cucacagtattuggcacagagaca

SEQ ID NO: 56630 - DNA, 27 bp, Artificial Sequence
  Synthetic
tgaggaaagatuatttgcatggcugaa

SEQ ID NO: 56631 - DNA, 28 bp, Artificial Sequence
  Synthetic
catacccucaacagaaatgguaacagaa

SEQ ID NO: 56632 - DNA, 29 bp, Artificial Sequence
  Synthetic
tggtactacugagagatgcttttcuagac

SEQ ID NO: 56633 - DNA, 28 bp, Artificial Sequence
  Synthetic
agcaggagcugttataatgattuaccat

SEQ ID NO: 56634 - DNA, 28 bp, Artificial Sequence
  Synthetic
acttccacatgutgaatagttttgucct

SEQ ID NO: 56635 - DNA, 27 bp, Artificial Sequence
  Synthetic
cactgcccacuttgattaaaacttcut

SEQ ID NO: 56636 - DNA, 31 bp, Artificial Sequence
  Synthetic
gtggttaaaatuaaacaactccgatcttuct

SEQ ID NO: 56637 - DNA, 22 bp, Artificial Sequence
  Synthetic
gcagctgcaugttcaagaagug

SEQ ID NO: 56638 - DNA, 21 bp, Artificial Sequence
  Synthetic
ctgcugcagaacagtguacct

SEQ ID NO: 56639 - DNA, 23 bp, Artificial Sequence
  Synthetic
caacagcaugacctctctctcug

SEQ ID NO: 56640 - DNA, 25 bp, Artificial Sequence
  Synthetic
tgtgttaggauctcttggttuccct

SEQ ID NO: 56641 - DNA, 27 bp, Artificial Sequence
  Synthetic
aggaagagucaaggaaucaaacaaagt

SEQ ID NO: 56642 - DNA, 25 bp, Artificial Sequence
  Synthetic
cccagttgtatucagtaccaaccua

SEQ ID NO: 56643 - DNA, 21 bp, Artificial Sequence
  Synthetic
ggatttccugccacacctugt

SEQ ID NO: 56644 - DNA, 27 bp, Artificial Sequence
  Synthetic
ttattacctaugaaaggctggcaagut

SEQ ID NO: 56645 - DNA, 22 bp, Artificial Sequence
  Synthetic
tgcagaacaugaaaggcauggt

SEQ ID NO: 56646 - DNA, 27 bp, Artificial Sequence
  Synthetic
agttcctctuactttcatctuccacct

SEQ ID NO: 56647 - DNA, 18 bp, Artificial Sequence
  Synthetic
aacaaacgccccgugtug

SEQ ID NO: 56648 - DNA, 28 bp, Artificial Sequence
  Synthetic
atgagaaattgugtgaggttgtugaaac

SEQ ID NO: 56649 - DNA, 25 bp, Artificial Sequence
  Synthetic
ctcaatgccaugctctaccaattut

SEQ ID NO: 56650 - DNA, 25 bp, Artificial Sequence
  Synthetic
aaaaagatcaccuctccacgagtuc

SEQ ID NO: 56651 - DNA, 27 bp, Artificial Sequence
  Synthetic
gcctcttaugcacagatgttttgttut

SEQ ID NO: 56652 - DNA, 20 bp, Artificial Sequence
  Synthetic
ggctguccccatcatcacug

SEQ ID NO: 56653 - DNA, 22 bp, Artificial Sequence
  Synthetic
cgagcucaacctcugaaagcat

SEQ ID NO: 56654 - DNA, 22 bp, Artificial Sequence
  Synthetic
cctcacatugggtcaccatugt

SEQ ID NO: 56655 - DNA, 19 bp, Artificial Sequence
  Synthetic
ctcaacgcagcucaaugcc

SEQ ID NO: 56656 - DNA, 21 bp, Artificial Sequence
  Synthetic
ctgagtctuagctggctccut

SEQ ID NO: 56657 - DNA, 21 bp, Artificial Sequence
  Synthetic
catcaccaccacucagagucc

SEQ ID NO: 56658 - DNA, 21 bp, Artificial Sequence
  Synthetic
ggaaguttggacugagggaca

SEQ ID NO: 56659 - DNA, 20 bp, Artificial Sequence
  Synthetic
cgutcccugaggcaaaagag

SEQ ID NO: 56660 - DNA, 23 bp, Artificial Sequence
  Synthetic
ctccataugcacatccugagcaa

SEQ ID NO: 56661 - DNA, 27 bp, Artificial Sequence
  Synthetic
cttgatcttggcuactataccatgguc

SEQ ID NO: 56662 - DNA, 22 bp, Artificial Sequence
  Synthetic
cuacccatggtugagggaagaa

SEQ ID NO: 56663 - DNA, 28 bp, Artificial Sequence
  Synthetic
tttccatgtattugtgctaatctcucca

SEQ ID NO: 56664 - DNA, 28 bp, Artificial Sequence
  Synthetic
ccaaggttagaauggctaaagaaaggut

SEQ ID NO: 56665 - DNA, 22 bp, Artificial Sequence
  Synthetic
gagtcauagcatcccucaagca

SEQ ID NO: 56666 - DNA, 26 bp, Artificial Sequence
  Synthetic
gagagttcttuccatgagtccttugt

SEQ ID NO: 56667 - DNA, 26 bp, Artificial Sequence
  Synthetic
cacctttgattcaugacagaatgcut

SEQ ID NO: 56668 - DNA, 22 bp, Artificial Sequence
  Synthetic
ctguccaaggtccaucaagagt

SEQ ID NO: 56669 - DNA, 28 bp, Artificial Sequence
  Synthetic
acttcatagccauaggtgtcttatucct

SEQ ID NO: 56670 - DNA, 27 bp, Artificial Sequence
  Synthetic
tttccctcccaaccaucaatattctuc

SEQ ID NO: 56671 - DNA, 29 bp, Artificial Sequence
  Synthetic
agctctaggtttuctgtcatctatguact

SEQ ID NO: 56672 - DNA, 17 bp, Artificial Sequence
  Synthetic
gtgtgcgccguccttut

SEQ ID NO: 56673 - DNA, 17 bp, Artificial Sequence
  Synthetic
cagcagcugcccuacga

SEQ ID NO: 56674 - DNA, 26 bp, Artificial Sequence
  Synthetic
gggtatguggattccauacagaggaa

SEQ ID NO: 56675 - DNA, 24 bp, Artificial Sequence
  Synthetic
ggcctggaauctcctctatcacua

SEQ ID NO: 56676 - DNA, 28 bp, Artificial Sequence
  Synthetic
catagatgaatugggaagaggaactuct

SEQ ID NO: 56677 - DNA, 24 bp, Artificial Sequence
  Synthetic
gtatctgatuggccaaggcaguaa

SEQ ID NO: 56678 - DNA, 20 bp, Artificial Sequence
  Synthetic
cgaaggcgacagcuctctug

SEQ ID NO: 56679 - DNA, 20 bp, Artificial Sequence
  Synthetic
acctcggaaagucaggctug

SEQ ID NO: 56680 - DNA, 23 bp, Artificial Sequence
  Synthetic
ccatccacagccugttcatguaa

SEQ ID NO: 56681 - DNA, 21 bp, Artificial Sequence
  Synthetic
ccccucuagccaaaacccaag

SEQ ID NO: 56682 - DNA, 20 bp, Artificial Sequence
  Synthetic
gctccucttagtgguggcat

SEQ ID NO: 56683 - DNA, 21 bp, Artificial Sequence
  Synthetic
ctggctucaccttccctcuac

SEQ ID NO: 56684 - DNA, 22 bp, Artificial Sequence
  Synthetic
tgtaccaagcaccuagccaaug

SEQ ID NO: 56685 - DNA, 23 bp, Artificial Sequence
  Synthetic
tgttgggcacagcauaatagugt

SEQ ID NO: 56686 - DNA, 21 bp, Artificial Sequence
  Synthetic
cctacctuggcattcuggaca

SEQ ID NO: 56687 - DNA, 22 bp, Artificial Sequence
  Synthetic
gcattcttggutcgctgtcuct

SEQ ID NO: 56688 - DNA, 25 bp, Artificial Sequence
  Synthetic
tttggcauagacttccucaaaagag

SEQ ID NO: 56689 - DNA, 22 bp, Artificial Sequence
  Synthetic
ccaccaccuctccaccttcaua

SEQ ID NO: 56690 - DNA, 29 bp, Artificial Sequence
  Synthetic
aagaattcagcauatacttcctugagcat

SEQ ID NO: 56691 - DNA, 26 bp, Artificial Sequence
  Synthetic
cttttcacuggagaatgtgtgcuaaa

SEQ ID NO: 56692 - DNA, 30 bp, Artificial Sequence
  Synthetic
acaactcataatttcuacatacccattgut

SEQ ID NO: 56693 - DNA, 24 bp, Artificial Sequence
  Synthetic
ttcggacacugagagcttuaagac

SEQ ID NO: 56694 - DNA, 21 bp, Artificial Sequence
  Synthetic
ctgtgcautttcccgtucacc

SEQ ID NO: 56695 - DNA, 26 bp, Artificial Sequence
  Synthetic
gaagcagcagaacaagucttttuagt

SEQ ID NO: 56696 - DNA, 28 bp, Artificial Sequence
  Synthetic
cttttccttcuctttcagccttuagact

SEQ ID NO: 56697 - DNA, 28 bp, Artificial Sequence
  Synthetic
ccaggcctgaauttgtagataaatguct

SEQ ID NO: 56698 - DNA, 28 bp, Artificial Sequence
  Synthetic
attccccatcutcataaatgcaguaact

SEQ ID NO: 56699 - DNA, 28 bp, Artificial Sequence
  Synthetic
tgtcgtctctttugttccttgattcuaa

SEQ ID NO: 56700 - DNA, 22 bp, Artificial Sequence
  Synthetic
gccaacagaaacugaccacuga

SEQ ID NO: 56701 - DNA, 27 bp, Artificial Sequence
  Synthetic
cattgcugaaagaaaaucaaaggaacc

SEQ ID NO: 56702 - DNA, 20 bp, Artificial Sequence
  Synthetic
cacgagutgtugaggaagcc

SEQ ID NO: 56703 - DNA, 23 bp, Artificial Sequence
  Synthetic
acatgtucgagaagggcaacuac

SEQ ID NO: 56704 - DNA, 18 bp, Artificial Sequence
  Synthetic
gcccagagggugugaggt

SEQ ID NO: 56705 - DNA, 17 bp, Artificial Sequence
  Synthetic
gcctgcagutcgctugt

SEQ ID NO: 56706 - DNA, 18 bp, Artificial Sequence
  Synthetic
ggacagcgugagcctcut

SEQ ID NO: 56707 - DNA, 17 bp, Artificial Sequence
  Synthetic
cugcuggccccagagac

SEQ ID NO: 56708 - DNA, 20 bp, Artificial Sequence
  Synthetic
ctuaaaggcgctgucaccct

SEQ ID NO: 56709 - DNA, 23 bp, Artificial Sequence
  Synthetic
tcgatgauggcattgcagaugat

SEQ ID NO: 56710 - DNA, 17 bp, Artificial Sequence
  Synthetic
gccttgucggaccugct

SEQ ID NO: 56711 - DNA, 19 bp, Artificial Sequence
  Synthetic
gcgcagugcgtagaagaug

SEQ ID NO: 56712 - DNA, 21 bp, Artificial Sequence
  Synthetic
aatgcccutacctgttuggct

SEQ ID NO: 56713 - DNA, 28 bp, Artificial Sequence
  Synthetic
tttctttctttucagcctatcacaugga

SEQ ID NO: 56714 - DNA, 26 bp, Artificial Sequence
  Synthetic
atccatgagcuccaaaaagaactgua

SEQ ID NO: 56715 - DNA, 21 bp, Artificial Sequence
  Synthetic
gccaacuacggcagaugaaag

SEQ ID NO: 56716 - DNA, 28 bp, Artificial Sequence
  Synthetic
tgagacaaacautgtaaaggauccacaa

SEQ ID NO: 56717 - DNA, 19 bp, Artificial Sequence
  Synthetic
gutgatctuggcgggacga

SEQ ID NO: 56718 - DNA, 21 bp, Artificial Sequence
  Synthetic
acacagttccaugcgtacgut

SEQ ID NO: 56719 - DNA, 22 bp, Artificial Sequence
  Synthetic
ctataacggcucaggcauggat

SEQ ID NO: 56720 - DNA, 24 bp, Artificial Sequence
  Synthetic
aggacaacuacacacttcggttut

SEQ ID NO: 56721 - DNA, 25 bp, Artificial Sequence
  Synthetic
gatgaccattccauacacacctgut

SEQ ID NO: 56722 - DNA, 28 bp, Artificial Sequence
  Synthetic
aagtcataacatgcuttcctaacaccut

SEQ ID NO: 56723 - DNA, 27 bp, Artificial Sequence
  Synthetic
gtctgtttacacucccttctcctttut

SEQ ID NO: 56724 - DNA, 22 bp, Artificial Sequence
  Synthetic
gattccccacugttccagucaa

SEQ ID NO: 56725 - DNA, 21 bp, Artificial Sequence
  Synthetic
gctggcatuacctcgcctaug

SEQ ID NO: 56726 - DNA, 21 bp, Artificial Sequence
  Synthetic
cugggcaaacaacacucacag

SEQ ID NO: 56727 - DNA, 23 bp, Artificial Sequence
  Synthetic
ctgattcuagaggcaggcttuca

SEQ ID NO: 56728 - DNA, 24 bp, Artificial Sequence
  Synthetic
cggctgctgugctttataagcuat

SEQ ID NO: 56729 - DNA, 25 bp, Artificial Sequence
  Synthetic
gcttttacugcacaaccagttacuc

SEQ ID NO: 56730 - DNA, 24 bp, Artificial Sequence
  Synthetic
agaaaagccaaaugccuagaaggt

SEQ ID NO: 56731 - DNA, 28 bp, Artificial Sequence
  Synthetic
agcacctctttugccttctttacuaaaa

SEQ ID NO: 56732 - DNA, 20 bp, Artificial Sequence
  Synthetic
gggaaggugcggatgactug

SEQ ID NO: 56733 - DNA, 21 bp, Artificial Sequence
  Synthetic
gcaccctcucaccccttcaua

SEQ ID NO: 56734 - DNA, 21 bp, Artificial Sequence
  Synthetic
ggcctcauctgtcagctucag

SEQ ID NO: 56735 - DNA, 21 bp, Artificial Sequence
  Synthetic
ggaattcggcuccggacuaag

SEQ ID NO: 56736 - DNA, 21 bp, Artificial Sequence
  Synthetic
ctcaaaugccccttcctguct

SEQ ID NO: 56737 - DNA, 23 bp, Artificial Sequence
  Synthetic
gggatcuaaaatgcctcucgaca

SEQ ID NO: 56738 - DNA, 21 bp, Artificial Sequence
  Synthetic
gctugcccagagcatggauag

SEQ ID NO: 56739 - DNA, 21 bp, Artificial Sequence
  Synthetic
accucuccccacaaacgaaag

SEQ ID NO: 56740 - DNA, 24 bp, Artificial Sequence
  Synthetic
ggatttgaccutctgtgcacugat

SEQ ID NO: 56741 - DNA, 28 bp, Artificial Sequence
  Synthetic
gttttatgcaaacacutgacatctguct

SEQ ID NO: 56742 - DNA, 21 bp, Artificial Sequence
  Synthetic
ggctcccaautagcccagaug

SEQ ID NO: 56743 - DNA, 24 bp, Artificial Sequence
  Synthetic
cccactagcutctcaaggguaaga

SEQ ID NO: 56744 - DNA, 19 bp, Artificial Sequence
  Synthetic
ctcccatgaucgcccacuc

SEQ ID NO: 56745 - DNA, 21 bp, Artificial Sequence
  Synthetic
gacgctutccagacugacaca

SEQ ID NO: 56746 - DNA, 31 bp, Artificial Sequence
  Synthetic
cattactaatctggutctggaagttacugaa

SEQ ID NO: 56747 - DNA, 27 bp, Artificial Sequence
  Synthetic
tggaccaaauggacagatagagtaugt

SEQ ID NO: 56748 - DNA, 21 bp, Artificial Sequence
  Synthetic
cuggacuacgagaccacacag

SEQ ID NO: 56749 - DNA, 28 bp, Artificial Sequence
  Synthetic
ctcatttctatcaugactgtcaccacua

SEQ ID NO: 56750 - DNA, 18 bp, Artificial Sequence
  Synthetic
gctcacggcccutgtcug

SEQ ID NO: 56751 - DNA, 19 bp, Artificial Sequence
  Synthetic
ccacaagggaggugugagt

SEQ ID NO: 56752 - DNA, 18 bp, Artificial Sequence
  Synthetic
ccuccccaccctcaugct

SEQ ID NO: 56753 - DNA, 18 bp, Artificial Sequence
  Synthetic
tgcaucacuggccaccac

SEQ ID NO: 56754 - DNA, 20 bp, Artificial Sequence
  Synthetic
cuacaucaccgagggcaaca

SEQ ID NO: 56755 - DNA, 20 bp, Artificial Sequence
  Synthetic
tcttgtucccctcacucgga

SEQ ID NO: 56756 - DNA, 21 bp, Artificial Sequence
  Synthetic
ctctcauccatcgucagccat

SEQ ID NO: 56757 - DNA, 23 bp, Artificial Sequence
  Synthetic
gttgatgucaaagaggccacuct

SEQ ID NO: 56758 - DNA, 25 bp, Artificial Sequence
  Synthetic
cctcaugaactggtacuacaggact

SEQ ID NO: 56759 - DNA, 22 bp, Artificial Sequence
  Synthetic
ttctcacctgugtccccacuat

SEQ ID NO: 56760 - DNA, 22 bp, Artificial Sequence
  Synthetic
gctcagtgugggtggtcttaug

SEQ ID NO: 56761 - DNA, 23 bp, Artificial Sequence
  Synthetic
ttcatcctttucctctggtggug

SEQ ID NO: 56762 - DNA, 21 bp, Artificial Sequence
  Synthetic
cccctgacauggaagacgaut

SEQ ID NO: 56763 - DNA, 20 bp, Artificial Sequence
  Synthetic
atggccggaugcatauggag

SEQ ID NO: 56764 - DNA, 19 bp, Artificial Sequence
  Synthetic
ggacugcaaaggccaaugt

SEQ ID NO: 56765 - DNA, 27 bp, Artificial Sequence
  Synthetic
tgaggtgtuaagacactatgctacaua

SEQ ID NO: 56766 - DNA, 20 bp, Artificial Sequence
  Synthetic
tctgcggucacugcaacaat

SEQ ID NO: 56767 - DNA, 20 bp, Artificial Sequence
  Synthetic
gaaggacccgaggcuttcuc

SEQ ID NO: 56768 - DNA, 22 bp, Artificial Sequence
  Synthetic
cgccttgaaaaugtggcactut

SEQ ID NO: 56769 - DNA, 20 bp, Artificial Sequence
  Synthetic
gggcaagugatcaccaucgg

SEQ ID NO: 56770 - DNA, 20 bp, Artificial Sequence
  Synthetic
gggtggccacucacaatcuc

SEQ ID NO: 56771 - DNA, 21 bp, Artificial Sequence
  Synthetic
ccacuaugggcaggagagaac

SEQ ID NO: 56772 - DNA, 22 bp, Artificial Sequence
  Synthetic
cattccutcaggcugggagaag

SEQ ID NO: 56773 - DNA, 21 bp, Artificial Sequence
  Synthetic
tgcaccauccaactgagtgug

SEQ ID NO: 56774 - DNA, 22 bp, Artificial Sequence
  Synthetic
cactccacccutgtatgccaut

SEQ ID NO: 56775 - DNA, 24 bp, Artificial Sequence
  Synthetic
gaaaugcuggagaaggaaaagcag

SEQ ID NO: 56776 - DNA, 20 bp, Artificial Sequence
  Synthetic
guggagaugacaagggccaa

SEQ ID NO: 56777 - DNA, 28 bp, Artificial Sequence
  Synthetic
cgcaaacacacuaatctttctccattuc

SEQ ID NO: 56778 - DNA, 18 bp, Artificial Sequence
  Synthetic
cctcccccggacuctgut

SEQ ID NO: 56779 - DNA, 19 bp, Artificial Sequence
  Synthetic
tcaccgaccuctcctgugt

SEQ ID NO: 56780 - DNA, 27 bp, Artificial Sequence
  Synthetic
agagagacgaaauagaagcuacgaaga

SEQ ID NO: 56781 - DNA, 19 bp, Artificial Sequence
  Synthetic
ggacggacgucucgagagt

SEQ ID NO: 56782 - DNA, 25 bp, Artificial Sequence
  Synthetic
ccatacaccugaatctgaaaggcut

SEQ ID NO: 56783 - DNA, 25 bp, Artificial Sequence
  Synthetic
attactgcaaugagcatguggagat

SEQ ID NO: 56784 - DNA, 22 bp, Artificial Sequence
  Synthetic
ggcagggcuttctaatcuccag

SEQ ID NO: 56785 - DNA, 22 bp, Artificial Sequence
  Synthetic
atggcttcccuccctctcttua

SEQ ID NO: 56786 - DNA, 19 bp, Artificial Sequence
  Synthetic
gtcaauggcgggtcttgug

SEQ ID NO: 56787 - DNA, 23 bp, Artificial Sequence
  Synthetic
catcgatacuggtgaaggaccug

SEQ ID NO: 56788 - DNA, 19 bp, Artificial Sequence
  Synthetic
cccugaccagtctcuccca

SEQ ID NO: 56789 - DNA, 21 bp, Artificial Sequence
  Synthetic
cgtctggacguccctatcuct

SEQ ID NO: 56790 - DNA, 19 bp, Artificial Sequence
  Synthetic
tggaggtutccagctugcc

SEQ ID NO: 56791 - DNA, 24 bp, Artificial Sequence
  Synthetic
tccaagucagagcagagaguaaca

SEQ ID NO: 56792 - DNA, 21 bp, Artificial Sequence
  Synthetic
gtcttcacgutcctgcagtuc

SEQ ID NO: 56793 - DNA, 23 bp, Artificial Sequence
  Synthetic
tgagaccutcctttccugacact

SEQ ID NO: 56794 - DNA, 21 bp, Artificial Sequence
  Synthetic
cctcctutatgggcuccacct

SEQ ID NO: 56795 - DNA, 28 bp, Artificial Sequence
  Synthetic
gcaacctgtaugcattaactagtgcuat

SEQ ID NO: 56796 - DNA, 21 bp, Artificial Sequence
  Synthetic
acaaggccuggaagctuaagg

SEQ ID NO: 56797 - DNA, 27 bp, Artificial Sequence
  Synthetic
cacagtcttuaagcttttgtcttuggt

SEQ ID NO: 56798 - DNA, 21 bp, Artificial Sequence
  Synthetic
gcttcuccacaagccattugt

SEQ ID NO: 56799 - DNA, 24 bp, Artificial Sequence
  Synthetic
cagtagaacacguggtagttccut

SEQ ID NO: 56800 - DNA, 22 bp, Artificial Sequence
  Synthetic
caaguaccacacagccaugagt

SEQ ID NO: 56801 - DNA, 21 bp, Artificial Sequence
  Synthetic
tutttcugcagaggagcccaa

SEQ ID NO: 56802 - DNA, 22 bp, Artificial Sequence
  Synthetic
ttctgtcugaactgaccgtugg

SEQ ID NO: 56803 - DNA, 20 bp, Artificial Sequence
  Synthetic
agggcgugaagacctcttug

SEQ ID NO: 56804 - DNA, 19 bp, Artificial Sequence
  Synthetic
tgagccgugtcatggtguc

SEQ ID NO: 56805 - DNA, 19 bp, Artificial Sequence
  Synthetic
aaggcagugugcagacgaa

SEQ ID NO: 56806 - DNA, 21 bp, Artificial Sequence
  Synthetic
gggctcaguataggaggcaua

SEQ ID NO: 56807 - DNA, 24 bp, Artificial Sequence
  Synthetic
ctgcaatttugacaaagaggcuga

SEQ ID NO: 56808 - DNA, 19 bp, Artificial Sequence
  Synthetic
ggcatgtgugggcaaguga

SEQ ID NO: 56809 - DNA, 19 bp, Artificial Sequence
  Synthetic
cacuaggcccagcaggaug

SEQ ID NO: 56810 - DNA, 22 bp, Artificial Sequence
  Synthetic
ttctaacgcugatgcagctuga

SEQ ID NO: 56811 - DNA, 28 bp, Artificial Sequence
  Synthetic
acggcaatautacgaaatccugaagaat

SEQ ID NO: 56812 - DNA, 27 bp, Artificial Sequence
  Synthetic
gtgcaggagaaaguatcactctgttua

SEQ ID NO: 56813 - DNA, 28 bp, Artificial Sequence
  Synthetic
aagaaaatcttaccutggtacagtugct

SEQ ID NO: 56814 - DNA, 29 bp, Artificial Sequence
  Synthetic
cttttcttagacaugctcaagttcttgug

SEQ ID NO: 56815 - DNA, 28 bp, Artificial Sequence
  Synthetic
agcaacatcagauaaaatccaagagcut

SEQ ID NO: 56816 - DNA, 28 bp, Artificial Sequence
  Synthetic
cggccttaaggutaattcttgaaguaca

SEQ ID NO: 56817 - DNA, 24 bp, Artificial Sequence
  Synthetic
tctauaggacccacttcucccaag

SEQ ID NO: 56818 - DNA, 27 bp, Artificial Sequence
  Synthetic
tgaaggagtuatgtgtgtguaaaaccc

SEQ ID NO: 56819 - DNA, 28 bp, Artificial Sequence
  Synthetic
actacactagtgauggctttaccaaauc

SEQ ID NO: 56820 - DNA, 23 bp, Artificial Sequence
  Synthetic
cctccaaggagcuttgtcttcua

SEQ ID NO: 56821 - DNA, 22 bp, Artificial Sequence
  Synthetic
tgugcaccatucaagaacacca

SEQ ID NO: 56822 - DNA, 21 bp, Artificial Sequence
  Synthetic
accgcautgtcaaugacacga

SEQ ID NO: 56823 - DNA, 27 bp, Artificial Sequence
  Synthetic
autgaacaatgatgucagcaacagaag

SEQ ID NO: 56824 - DNA, 21 bp, Artificial Sequence
  Synthetic
cctgccatcaucaccagctut

SEQ ID NO: 56825 - DNA, 22 bp, Artificial Sequence
  Synthetic
cttctgagtguctctcccagug

SEQ ID NO: 56826 - DNA, 23 bp, Artificial Sequence
  Synthetic
ctcttguaccccaugcaaaaaca

SEQ ID NO: 56827 - DNA, 26 bp, Artificial Sequence
  Synthetic
aattgctcagcugaagaatatgguca

SEQ ID NO: 56828 - DNA, 24 bp, Artificial Sequence
  Synthetic
gcttttgaaaaugagtgggaugct

SEQ ID NO: 56829 - DNA, 23 bp, Artificial Sequence
  Synthetic
cctgtctgccautgggatgatut

SEQ ID NO: 56830 - DNA, 27 bp, Artificial Sequence
  Synthetic
agttctttcautcttgtttccuccaca

SEQ ID NO: 56831 - DNA, 28 bp, Artificial Sequence
  Synthetic
gatgcagctgguattatttttcttccut

SEQ ID NO: 56832 - DNA, 20 bp, Artificial Sequence
  Synthetic
gcuccacggaggttaaugcc

SEQ ID NO: 56833 - DNA, 28 bp, Artificial Sequence
  Synthetic
tgcaaactguacacctggtctauaaaaa

SEQ ID NO: 56834 - DNA, 20 bp, Artificial Sequence
  Synthetic
ggtcgcccaaaagcuctgua

SEQ ID NO: 56835 - DNA, 29 bp, Artificial Sequence
  Synthetic
gctgaaaggcacacautaacatcaattut

SEQ ID NO: 56836 - DNA, 28 bp, Artificial Sequence
  Synthetic
tccagggaggauacagaatttcatcaua

SEQ ID NO: 56837 - DNA, 25 bp, Artificial Sequence
  Synthetic
cacatgactucctcctatcauagca

SEQ ID NO: 56838 - DNA, 23 bp, Artificial Sequence
  Synthetic
gttagcacugaattugccaacca

SEQ ID NO: 56839 - DNA, 24 bp, Artificial Sequence
  Synthetic
tccggtcaautacgggaaatucaa

SEQ ID NO: 56840 - DNA, 24 bp, Artificial Sequence
  Synthetic
gacaaggtgtugagctctgtttug

SEQ ID NO: 56841 - DNA, 27 bp, Artificial Sequence
  Synthetic
tctgctttctucatcaagtcaucaagt

SEQ ID NO: 56842 - DNA, 26 bp, Artificial Sequence
  Synthetic
ggctcaccatuccaatatctcagaut

SEQ ID NO: 56843 - DNA, 30 bp, Artificial Sequence
  Synthetic
acaaaaagaattaccuaggagaaactcugg

SEQ ID NO: 56844 - DNA, 28 bp, Artificial Sequence
  Synthetic
gatccagtcauacagagaaatccatgut

SEQ ID NO: 56845 - DNA, 22 bp, Artificial Sequence
  Synthetic
ccttggaggcuaactccaucac

SEQ ID NO: 56846 - DNA, 20 bp, Artificial Sequence
  Synthetic
gctcaagugggctctgtgug

SEQ ID NO: 56847 - DNA, 23 bp, Artificial Sequence
  Synthetic
ctgactcaaucggtgtctgtcut

SEQ ID NO: 56848 - DNA, 24 bp, Artificial Sequence
  Synthetic
ggauggacagagatacucacagga

SEQ ID NO: 56849 - DNA, 20 bp, Artificial Sequence
  Synthetic
ctgcctgcgutcaggacuaa

SEQ ID NO: 56850 - DNA, 21 bp, Artificial Sequence
  Synthetic
gugtatcagcucagcccacat

SEQ ID NO: 56851 - DNA, 28 bp, Artificial Sequence
  Synthetic
gcgtgtcattgacutttctttttctcut

SEQ ID NO: 56852 - DNA, 22 bp, Artificial Sequence
  Synthetic
cggtttcgauactctctuggca

SEQ ID NO: 56853 - DNA, 27 bp, Artificial Sequence
  Synthetic
tgtaactaataacccuggctctctgut

SEQ ID NO: 56854 - DNA, 29 bp, Artificial Sequence
  Synthetic
agaataagacaauacaacaccugcaaact

SEQ ID NO: 56855 - DNA, 22 bp, Artificial Sequence
  Synthetic
tttcacaaagugcgccattcug

SEQ ID NO: 56856 - DNA, 19 bp, Artificial Sequence
  Synthetic
caccugaagggtgcgucat

SEQ ID NO: 56857 - DNA, 25 bp, Artificial Sequence
  Synthetic
ctgtatgcguaaaagagctctcugt

SEQ ID NO: 56858 - DNA, 24 bp, Artificial Sequence
  Synthetic
gattttgutctttctgugcgcact

SEQ ID NO: 56859 - DNA, 24 bp, Artificial Sequence
  Synthetic
catctugccagacccattttucaa

SEQ ID NO: 56860 - DNA, 20 bp, Artificial Sequence
  Synthetic
ctgtactcgaucagccccut

SEQ ID NO: 56861 - DNA, 27 bp, Artificial Sequence
  Synthetic
aagagcaactuctcctccacuaaaaat

SEQ ID NO: 56862 - DNA, 25 bp, Artificial Sequence
  Synthetic
gaatcttcttcacugggtgatguct

SEQ ID NO: 56863 - DNA, 21 bp, Artificial Sequence
  Synthetic
tccactttuagctgcctggug

SEQ ID NO: 56864 - DNA, 23 bp, Artificial Sequence
  Synthetic
actggtatugggaccccaaatug

SEQ ID NO: 56865 - DNA, 21 bp, Artificial Sequence
  Synthetic
cagggcacugataggcgtuat

SEQ ID NO: 56866 - DNA, 21 bp, Artificial Sequence
  Synthetic
tgatcgucggcaggtacaaug

SEQ ID NO: 56867 - DNA, 26 bp, Artificial Sequence
  Synthetic
aggctgcctuaaaatactggcatuaa

SEQ ID NO: 56868 - DNA, 24 bp, Artificial Sequence
  Synthetic
ggaccaacugatcaccttgaauct

SEQ ID NO: 56869 - DNA, 28 bp, Artificial Sequence
  Synthetic
gcacttatgcutaaaatctattugcagt

SEQ ID NO: 56870 - DNA, 24 bp, Artificial Sequence
  Synthetic
ttttgtttttgcuctagcccccua

SEQ ID NO: 56871 - DNA, 28 bp, Artificial Sequence
  Synthetic
cccctctcattcuttactacttcccuaa

SEQ ID NO: 56872 - DNA, 22 bp, Artificial Sequence
  Synthetic
tuaagcagcgagaugcagagaa

SEQ ID NO: 56873 - DNA, 19 bp, Artificial Sequence
  Synthetic
cgctgtggaucggctacuc

SEQ ID NO: 56874 - DNA, 22 bp, Artificial Sequence
  Synthetic
cctggttcugctccttctaucc

SEQ ID NO: 56875 - DNA, 28 bp, Artificial Sequence
  Synthetic
agcttactgccauacaggatcataaaut

SEQ ID NO: 56876 - DNA, 22 bp, Artificial Sequence
  Synthetic
acgagctcuaggcctcuaagat

SEQ ID NO: 56877 - DNA, 20 bp, Artificial Sequence
  Synthetic
gagaacauggagcgaucgga

SEQ ID NO: 56878 - DNA, 21 bp, Artificial Sequence
  Synthetic
ccacgcuctcctttcaaucct

SEQ ID NO: 56879 - DNA, 29 bp, Artificial Sequence
  Synthetic
agtgtgagccagutaactctagtactuat

SEQ ID NO: 56880 - DNA, 26 bp, Artificial Sequence
  Synthetic
tcgattcuacagtggtttuaacagca

SEQ ID NO: 56881 - DNA, 21 bp, Artificial Sequence
  Synthetic
gcctgcaacuaccttccucaa

SEQ ID NO: 56882 - DNA, 20 bp, Artificial Sequence
  Synthetic
ccugagacacgaaggcguag

SEQ ID NO: 56883 - DNA, 21 bp, Artificial Sequence
  Synthetic
ctccttgguccttgctgacut

SEQ ID NO: 56884 - DNA, 23 bp, Artificial Sequence
  Synthetic
gcctctugcagagctttcttcuc

SEQ ID NO: 56885 - DNA, 20 bp, Artificial Sequence
  Synthetic
actgacctugacccaggcua

SEQ ID NO: 56886 - DNA, 24 bp, Artificial Sequence
  Synthetic
caggaaaagcaucagaggagucaa

SEQ ID NO: 56887 - DNA, 21 bp, Artificial Sequence
  Synthetic
ggtgactcuggacactuccct

SEQ ID NO: 56888 - DNA, 25 bp, Artificial Sequence
  Synthetic
cttggcacttugagatgattagcug

SEQ ID NO: 56889 - DNA, 24 bp, Artificial Sequence
  Synthetic
cctccgagagaaggauccgattua

SEQ ID NO: 56890 - DNA, 27 bp, Artificial Sequence
  Synthetic
ttcttgttaaaagucagagcaaccuct

SEQ ID NO: 56891 - DNA, 28 bp, Artificial Sequence
  Synthetic
cagtaaaggaaacacucagacaatctuc

SEQ ID NO: 56892 - DNA, 28 bp, Artificial Sequence
  Synthetic
gggatctttuggataaacattcugaact

SEQ ID NO: 56893 - DNA, 25 bp, Artificial Sequence
  Synthetic
gatttactgtuggttgctgatgugt

SEQ ID NO: 56894 - DNA, 28 bp, Artificial Sequence
  Synthetic
caaagcaaaagauaagaagagccaauga

SEQ ID NO: 56895 - DNA, 19 bp, Artificial Sequence
  Synthetic
gggaagagcacaucguggt

SEQ ID NO: 56896 - DNA, 23 bp, Artificial Sequence
  Synthetic
cgtcatccugactggaagguaga

SEQ ID NO: 56897 - DNA, 28 bp, Artificial Sequence
  Synthetic
cttcagagttcacuggaagtttttgtut

SEQ ID NO: 56898 - DNA, 26 bp, Artificial Sequence
  Synthetic
tctcaggatgucctatgaggattuca

SEQ ID NO: 56899 - DNA, 23 bp, Artificial Sequence
  Synthetic
cctggaacuttttcggctuagac

SEQ ID NO: 56900 - DNA, 25 bp, Artificial Sequence
  Synthetic
gggutaaataguacaacagggcagt

SEQ ID NO: 56901 - DNA, 23 bp, Artificial Sequence
  Synthetic
actcccacgcutcattttctcut

SEQ ID NO: 56902 - DNA, 21 bp, Artificial Sequence
  Synthetic
cacaggugaagctuccaggag

SEQ ID NO: 56903 - DNA, 24 bp, Artificial Sequence
  Synthetic
tttggcctttuccgagttatccut

SEQ ID NO: 56904 - DNA, 22 bp, Artificial Sequence
  Synthetic
tgacttccuttgctgaugcaca

SEQ ID NO: 56905 - DNA, 25 bp, Artificial Sequence
  Synthetic
ccactgtaaccgugtaaccacttut

SEQ ID NO: 56906 - DNA, 27 bp, Artificial Sequence
  Synthetic
aatactaggcutcccctttttaugcaa

SEQ ID NO: 56907 - DNA, 21 bp, Artificial Sequence
  Synthetic
actgtcatugatgggcgaugt

SEQ ID NO: 56908 - DNA, 21 bp, Artificial Sequence
  Synthetic
ggaguctuccacagggagagt

SEQ ID NO: 56909 - DNA, 22 bp, Artificial Sequence
  Synthetic
tgctttuagcgtccuacacgag

SEQ ID NO: 56910 - DNA, 22 bp, Artificial Sequence
  Synthetic
ccaagaaccugcctgtgttcuc

SEQ ID NO: 56911 - DNA, 21 bp, Artificial Sequence
  Synthetic
gccatcgcugaatcagaggua

SEQ ID NO: 56912 - DNA, 21 bp, Artificial Sequence
  Synthetic
ccucggtatcuccccaaacca

SEQ ID NO: 56913 - DNA, 21 bp, Artificial Sequence
  Synthetic
ggacuacatcauccgggaagg

SEQ ID NO: 56914 - DNA, 20 bp, Artificial Sequence
  Synthetic
cagggtuggaggacgtugag

SEQ ID NO: 56915 - DNA, 22 bp, Artificial Sequence
  Synthetic
tggaagaacaucucccccaagt

SEQ ID NO: 56916 - DNA, 18 bp, Artificial Sequence
  Synthetic
ggcguacagctgagcuga

SEQ ID NO: 56917 - DNA, 20 bp, Artificial Sequence
  Synthetic
gggcugcaagcagacagaut

SEQ ID NO: 56918 - DNA, 21 bp, Artificial Sequence
  Synthetic
ttttctugccgtggugcaaaa

SEQ ID NO: 56919 - DNA, 27 bp, Artificial Sequence
  Synthetic
tcccaaccaugaagatttctttgcuaa

SEQ ID NO: 56920 - DNA, 21 bp, Artificial Sequence
  Synthetic
ttcagagcccucttccuccat

SEQ ID NO: 56921 - DNA, 22 bp, Artificial Sequence
  Synthetic
actttcaaggguggctgagtug

SEQ ID NO: 56922 - DNA, 21 bp, Artificial Sequence
  Synthetic
ctcctgucggctcttctctuc

SEQ ID NO: 56923 - DNA, 24 bp, Artificial Sequence
  Synthetic
gtgttcatcucctccggguaaaat

SEQ ID NO: 56924 - DNA, 22 bp, Artificial Sequence
  Synthetic
gatagcctuccccacauggaaa

SEQ ID NO: 56925 - DNA, 19 bp, Artificial Sequence
  Synthetic
ctgaugaccacgcuacgca

SEQ ID NO: 56926 - DNA, 21 bp, Artificial Sequence
  Synthetic
tccctuaaccccggattcuga

SEQ ID NO: 56927 - DNA, 23 bp, Artificial Sequence
  Synthetic
ccagaatcccuaactcccuccaa

SEQ ID NO: 56928 - DNA, 24 bp, Artificial Sequence
  Synthetic
ttctggaugtcatcttucccaacc

SEQ ID NO: 56929 - DNA, 26 bp, Artificial Sequence
  Synthetic
tgagaagtucctctttguggacaaaa

SEQ ID NO: 56930 - DNA, 21 bp, Artificial Sequence
  Synthetic
cctccagcucagttcctugaa

SEQ ID NO: 56931 - DNA, 23 bp, Artificial Sequence
  Synthetic
aaagttcctutcccttccucacc

SEQ ID NO: 56932 - DNA, 18 bp, Artificial Sequence
  Synthetic
gccccgauacctguccga

SEQ ID NO: 56933 - DNA, 23 bp, Artificial Sequence
  Synthetic
gtgatgacccaugttcccttuct

SEQ ID NO: 56934 - DNA, 22 bp, Artificial Sequence
  Synthetic
ggcatcttcuccacagcttugt

SEQ ID NO: 56935 - DNA, 24 bp, Artificial Sequence
  Synthetic
cataaatggcucttcctgtgtucc

SEQ ID NO: 56936 - DNA, 24 bp, Artificial Sequence
  Synthetic
gcagatctgacuaagggtgtugac

SEQ ID NO: 56937 - DNA, 23 bp, Artificial Sequence
  Synthetic
agatatccugctctttgccucct

SEQ ID NO: 56938 - DNA, 20 bp, Artificial Sequence
  Synthetic
gaaaagccccucccagguag

SEQ ID NO: 56939 - DNA, 22 bp, Artificial Sequence
  Synthetic
caauaggcacccagaagctuga

SEQ ID NO: 56940 - DNA, 26 bp, Artificial Sequence
  Synthetic
acttggtgaaaugacttcttgucaca

SEQ ID NO: 56941 - DNA, 24 bp, Artificial Sequence
  Synthetic
cgccattctcuagccaatgctuaa

SEQ ID NO: 56942 - DNA, 22 bp, Artificial Sequence
  Synthetic
tgtggacgaugagtcagggtua

SEQ ID NO: 56943 - DNA, 19 bp, Artificial Sequence
  Synthetic
ccaccguccctcttgucac

SEQ ID NO: 56944 - DNA, 21 bp, Artificial Sequence
  Synthetic
gctcagcucccaaaaccaguc

SEQ ID NO: 56945 - DNA, 25 bp, Artificial Sequence
  Synthetic
acaaattataugcccgtgcugagat

SEQ ID NO: 56946 - DNA, 24 bp, Artificial Sequence
  Synthetic
gcaattgaggaauttctcgcugat

SEQ ID NO: 56947 - DNA, 19 bp, Artificial Sequence
  Synthetic
gggcagaacugacacucac

SEQ ID NO: 56948 - DNA, 22 bp, Artificial Sequence
  Synthetic
ctccttgcgggauttcaacauc

SEQ ID NO: 56949 - DNA, 27 bp, Artificial Sequence
  Synthetic
agagauagagaaatccugggaggaaaa

SEQ ID NO: 56950 - DNA, 21 bp, Artificial Sequence
  Synthetic
caatcccaagutccggcucat

SEQ ID NO: 56951 - DNA, 22 bp, Artificial Sequence
  Synthetic
ggagtacacugcaggctcuagt

SEQ ID NO: 56952 - DNA, 21 bp, Artificial Sequence
  Synthetic
cccaggaaacccuccatuacc

SEQ ID NO: 56953 - DNA, 23 bp, Artificial Sequence
  Synthetic
gaaagttcuccaggtttggcauc

SEQ ID NO: 56954 - DNA, 20 bp, Artificial Sequence
  Synthetic
aggaagccaucggugagaag

SEQ ID NO: 56955 - DNA, 20 bp, Artificial Sequence
  Synthetic
gggctgaaguccttggcaut

SEQ ID NO: 56956 - DNA, 20 bp, Artificial Sequence
  Synthetic
ggcuccccaggatgtguact

SEQ ID NO: 56957 - DNA, 18 bp, Artificial Sequence
  Synthetic
gccttgggugagggctuc

SEQ ID NO: 56958 - DNA, 20 bp, Artificial Sequence
  Synthetic
cugccgctugagagaacact

SEQ ID NO: 56959 - DNA, 21 bp, Artificial Sequence
  Synthetic
actcatgttugcgaccctugt

SEQ ID NO: 56960 - DNA, 27 bp, Artificial Sequence
  Synthetic
cctgtgtcaaacugtgtaaagcaagua

SEQ ID NO: 56961 - DNA, 28 bp, Artificial Sequence
  Synthetic
caagtccuatgaacttaucaacgaagag

SEQ ID NO: 56962 - DNA, 27 bp, Artificial Sequence
  Synthetic
cagtcatcauttgccttaattuagcaa

SEQ ID NO: 56963 - DNA, 25 bp, Artificial Sequence
  Synthetic
ccgagaaucaaacagaguaaccaga

SEQ ID NO: 56964 - DNA, 24 bp, Artificial Sequence
  Synthetic
catgactccauggctgtcaaauct

SEQ ID NO: 56965 - DNA, 22 bp, Artificial Sequence
  Synthetic
agcaaacucaataccugcccaa

SEQ ID NO: 56966 - DNA, 22 bp, Artificial Sequence
  Synthetic
tttggctggcuagagttgguag

SEQ ID NO: 56967 - DNA, 22 bp, Artificial Sequence
  Synthetic
cactcacaucgctcctctucag

SEQ ID NO: 56968 - DNA, 23 bp, Artificial Sequence
  Synthetic
ccaaatctgggacucctaaccut

SEQ ID NO: 56969 - DNA, 21 bp, Artificial Sequence
  Synthetic
ctcctcucacacaggatggug

SEQ ID NO: 56970 - DNA, 20 bp, Artificial Sequence
  Synthetic
ctgccacgugaaggacucat

SEQ ID NO: 56971 - DNA, 24 bp, Artificial Sequence
  Synthetic
gctcuagaaacacaagccagugaa

SEQ ID NO: 56972 - DNA, 19 bp, Artificial Sequence
  Synthetic
gggccacaucgatgauggg

SEQ ID NO: 56973 - DNA, 20 bp, Artificial Sequence
  Synthetic
tccatcacucccacgtggua

SEQ ID NO: 56974 - DNA, 20 bp, Artificial Sequence
  Synthetic
caatcgugggctgcatcauc

SEQ ID NO: 56975 - DNA, 21 bp, Artificial Sequence
  Synthetic
tgtgcucgaacatgagctucc

SEQ ID NO: 56976 - DNA, 19 bp, Artificial Sequence
  Synthetic
gucaacggcuccagcaaga

SEQ ID NO: 56977 - DNA, 19 bp, Artificial Sequence
  Synthetic
ggcaaaucagcccugacca

SEQ ID NO: 56978 - DNA, 23 bp, Artificial Sequence
  Synthetic
gcaggaggguaaccagaaaggua

SEQ ID NO: 56979 - DNA, 21 bp, Artificial Sequence
  Synthetic
guagccacaaccuggaccaaa

SEQ ID NO: 56980 - DNA, 24 bp, Artificial Sequence
  Synthetic
agtcutacccaaaaauggcaggaa

SEQ ID NO: 56981 - DNA, 22 bp, Artificial Sequence
  Synthetic
guagaagagaugcagggccaag

SEQ ID NO: 56982 - DNA, 21 bp, Artificial Sequence
  Synthetic
accaaaaccgucctggaacug

SEQ ID NO: 56983 - DNA, 21 bp, Artificial Sequence
  Synthetic
tgtgtgaguggcatgtuccat

SEQ ID NO: 56984 - DNA, 21 bp, Artificial Sequence
  Synthetic
gcccucgcagtataucacagg

SEQ ID NO: 56985 - DNA, 22 bp, Artificial Sequence
  Synthetic
agaaagggugagacccguagag

SEQ ID NO: 56986 - DNA, 21 bp, Artificial Sequence
  Synthetic
gctacacgcuggagtucaagg

SEQ ID NO: 56987 - DNA, 19 bp, Artificial Sequence
  Synthetic
cagagacguagcggtggut

SEQ ID NO: 56988 - DNA, 21 bp, Artificial Sequence
  Synthetic
gggtcaacguctcagccaauc

SEQ ID NO: 56989 - DNA, 22 bp, Artificial Sequence
  Synthetic
atgauggaggaggaagggaugt

SEQ ID NO: 56990 - DNA, 29 bp, Artificial Sequence
  Synthetic
acttgaaaagaaugcctcaggatagaaut

SEQ ID NO: 56991 - DNA, 23 bp, Artificial Sequence
  Synthetic
gggagccacucacggattaauat

SEQ ID NO: 56992 - DNA, 20 bp, Artificial Sequence
  Synthetic
tgccgttaaugcccatggut

SEQ ID NO: 56993 - DNA, 25 bp, Artificial Sequence
  Synthetic
ctctctugacacccaggattcttuc

SEQ ID NO: 56994 - DNA, 22 bp, Artificial Sequence
  Synthetic
acccacccugttggatcagtua

SEQ ID NO: 56995 - DNA, 28 bp, Artificial Sequence
  Synthetic
gcaatggauataaagcataugacccaga

SEQ ID NO: 56996 - DNA, 28 bp, Artificial Sequence
  Synthetic
tgtttatgttaccuctctgtctagcuga

SEQ ID NO: 56997 - DNA, 20 bp, Artificial Sequence
  Synthetic
atgcacacacgccugaagua

SEQ ID NO: 56998 - DNA, 28 bp, Artificial Sequence
  Synthetic
atcttgacttcagugttattgtcgcuaa

SEQ ID NO: 56999 - DNA, 24 bp, Artificial Sequence
  Synthetic
cctttgcttgauctatccatgcuc

SEQ ID NO: 57000 - DNA, 25 bp, Artificial Sequence
  Synthetic
gtaatucacccaaaacaagctuggt

SEQ ID NO: 57001 - DNA, 24 bp, Artificial Sequence
  Synthetic
ggcacatcagcaguaaaagtggua

SEQ ID NO: 57002 - DNA, 24 bp, Artificial Sequence
  Synthetic
gggcagtcuagtaggaagaaaugg

SEQ ID NO: 57003 - DNA, 22 bp, Artificial Sequence
  Synthetic
ctcuaccagaaagcaggctuct

SEQ ID NO: 57004 - DNA, 23 bp, Artificial Sequence
  Synthetic
tgtctgctggutacatgtggaut

SEQ ID NO: 57005 - DNA, 23 bp, Artificial Sequence
  Synthetic
ccgtgcccuggaagtatacauat

SEQ ID NO: 57006 - DNA, 27 bp, Artificial Sequence
  Synthetic
gggatcactaaagutcattccttcugt

SEQ ID NO: 57007 - DNA, 23 bp, Artificial Sequence
  Synthetic
tctttctttcuccaggguccaga

SEQ ID NO: 57008 - DNA, 20 bp, Artificial Sequence
  Synthetic
ggcatcccuggcatcauaca

SEQ ID NO: 57009 - DNA, 25 bp, Artificial Sequence
  Synthetic
cttacatgtcuttgaaggacuggga

SEQ ID NO: 57010 - DNA, 21 bp, Artificial Sequence
  Synthetic
cagaaaaugggcacaacgugt

SEQ ID NO: 57011 - DNA, 19 bp, Artificial Sequence
  Synthetic
ggtcaggaggcucgatgut

SEQ ID NO: 57012 - DNA, 17 bp, Artificial Sequence
  Synthetic
ggcttccugcccgtcug

SEQ ID NO: 57013 - DNA, 17 bp, Artificial Sequence
  Synthetic
actgggcgcugcatgut

SEQ ID NO: 57014 - DNA, 21 bp, Artificial Sequence
  Synthetic
aggguccagagctacucacat

SEQ ID NO: 57015 - DNA, 23 bp, Artificial Sequence
  Synthetic
ctttgccatuggctgtaaagguc

SEQ ID NO: 57016 - DNA, 20 bp, Artificial Sequence
  Synthetic
ctgtgggaggaaucggauca

SEQ ID NO: 57017 - DNA, 28 bp, Artificial Sequence
  Synthetic
tcttcaagatctguttcacatcctcauc

SEQ ID NO: 57018 - DNA, 21 bp, Artificial Sequence
  Synthetic
gauggaactuggcgaaggagt

SEQ ID NO: 57019 - DNA, 22 bp, Artificial Sequence
  Synthetic
gcagcaagaagucctggttcuc

SEQ ID NO: 57020 - DNA, 25 bp, Artificial Sequence
  Synthetic
tctcagaccuatgatccucgagaag

SEQ ID NO: 57021 - DNA, 17 bp, Artificial Sequence
  Synthetic
cttccguccccacgugt

SEQ ID NO: 57022 - DNA, 21 bp, Artificial Sequence
  Synthetic
tggacccuttatcucccccaa

SEQ ID NO: 57023 - DNA, 24 bp, Artificial Sequence
  Synthetic
cctccaugggcaaaggatuacaat

SEQ ID NO: 57024 - DNA, 21 bp, Artificial Sequence
  Synthetic
ggacgagtuctctgtgctcug

SEQ ID NO: 57025 - DNA, 23 bp, Artificial Sequence
  Synthetic
ccaggaggaagagucagaaggut

SEQ ID NO: 57026 - DNA, 21 bp, Artificial Sequence
  Synthetic
ccccgaatcuagcctacguga

SEQ ID NO: 57027 - DNA, 28 bp, Artificial Sequence
  Synthetic
ctgaagatagccuttacatccctaaucc

SEQ ID NO: 57028 - DNA, 21 bp, Artificial Sequence
  Synthetic
tctcctctcuggtcccaacug

SEQ ID NO: 57029 - DNA, 21 bp, Artificial Sequence
  Synthetic
ccttuggcccaaacacaggua

SEQ ID NO: 57030 - DNA, 21 bp, Artificial Sequence
  Synthetic
catcagccugtccctggttua

SEQ ID NO: 57031 - DNA, 21 bp, Artificial Sequence
  Synthetic
ttttcgatcuccacggucagg

SEQ ID NO: 57032 - DNA, 23 bp, Artificial Sequence
  Synthetic
agatctgggugtgagctccttua

SEQ ID NO: 57033 - DNA, 20 bp, Artificial Sequence
  Synthetic
gtggcccccaguttactgut

SEQ ID NO: 57034 - DNA, 22 bp, Artificial Sequence
  Synthetic
gaggagaaaugtcgactgcugt

SEQ ID NO: 57035 - DNA, 27 bp, Artificial Sequence
  Synthetic
cccctctcctcuaaactcttgctaaut

SEQ ID NO: 57036 - DNA, 23 bp, Artificial Sequence
  Synthetic
gaacutatugcagccaaagccat

SEQ ID NO: 57037 - DNA, 23 bp, Artificial Sequence
  Synthetic
agccaaaauggucagggaagaag

SEQ ID NO: 57038 - DNA, 20 bp, Artificial Sequence
  Synthetic
gagggcutctuccgcaagat

SEQ ID NO: 57039 - DNA, 23 bp, Artificial Sequence
  Synthetic
aggugaaagaaagctctcuggac

SEQ ID NO: 57040 - DNA, 20 bp, Artificial Sequence
  Synthetic
tccgggaagcugtcctttug

SEQ ID NO: 57041 - DNA, 18 bp, Artificial Sequence
  Synthetic
gggccaccaaugccaaug

SEQ ID NO: 57042 - DNA, 19 bp, Artificial Sequence
  Synthetic
cggtgtgggugcgataaug

SEQ ID NO: 57043 - DNA, 23 bp, Artificial Sequence
  Synthetic
actataatuccccaagggcuggt

SEQ ID NO: 57044 - DNA, 19 bp, Artificial Sequence
  Synthetic
acaugacgtucgggagcac

SEQ ID NO: 57045 - DNA, 20 bp, Artificial Sequence
  Synthetic
gccgacacuctgaagaccut

SEQ ID NO: 57046 - DNA, 22 bp, Artificial Sequence
  Synthetic
ggctgcutcctgtuccaaagat

SEQ ID NO: 57047 - DNA, 27 bp, Artificial Sequence
  Synthetic
tgttggaatgacuatgcagtcttuagg

SEQ ID NO: 57048 - DNA, 24 bp, Artificial Sequence
  Synthetic
gcctcaaaauacccctaaaaugcc

SEQ ID NO: 57049 - DNA, 22 bp, Artificial Sequence
  Synthetic
acgggaaguggttttccttuct

SEQ ID NO: 57050 - DNA, 21 bp, Artificial Sequence
  Synthetic
cgcugtggtgtuagacaggat

SEQ ID NO: 57051 - DNA, 22 bp, Artificial Sequence
  Synthetic
tgggtttuggccaatacguact

SEQ ID NO: 57052 - DNA, 17 bp, Artificial Sequence
  Synthetic
gcacucacccccacuga

SEQ ID NO: 57053 - DNA, 18 bp, Artificial Sequence
  Synthetic
tctgaccccugaccccut

SEQ ID NO: 57054 - DNA, 20 bp, Artificial Sequence
  Synthetic
tggatcgguggcaagaaguc

SEQ ID NO: 57055 - DNA, 22 bp, Artificial Sequence
  Synthetic
tccgatcuggagggcaatagua

SEQ ID NO: 57056 - DNA, 21 bp, Artificial Sequence
  Synthetic
tggcctgcucaggtctuagaa

SEQ ID NO: 57057 - DNA, 23 bp, Artificial Sequence
  Synthetic
gccaggagacucttttugaaggg

SEQ ID NO: 57058 - DNA, 21 bp, Artificial Sequence
  Synthetic
tcgtgtucaaaccacggagut

SEQ ID NO: 57059 - DNA, 23 bp, Artificial Sequence
  Synthetic
cccccacttuactggaagcauat

SEQ ID NO: 57060 - DNA, 28 bp, Artificial Sequence
  Synthetic
tctcttcatcacutagttcttcuagggt

SEQ ID NO: 57061 - DNA, 28 bp, Artificial Sequence
  Synthetic
gggatccttguagttcaatgtaattgua

SEQ ID NO: 57062 - DNA, 20 bp, Artificial Sequence
  Synthetic
caugccggagaaguggaagt

SEQ ID NO: 57063 - DNA, 24 bp, Artificial Sequence
  Synthetic
accagcaaccaugactatgctauc

SEQ ID NO: 57064 - DNA, 22 bp, Artificial Sequence
  Synthetic
cagtutcctccacugagaccac

SEQ ID NO: 57065 - DNA, 21 bp, Artificial Sequence
  Synthetic
gcaccccaaggagutgacauc

SEQ ID NO: 57066 - DNA, 27 bp, Artificial Sequence
  Synthetic
aggaaggtcaguaggataattcagcua

SEQ ID NO: 57067 - DNA, 29 bp, Artificial Sequence
  Synthetic
gtcctgttcacuataactaaaaccgtuga

SEQ ID NO: 57068 - DNA, 23 bp, Artificial Sequence
  Synthetic
cgtcaaacutaccggagugcaat

SEQ ID NO: 57069 - DNA, 27 bp, Artificial Sequence
  Synthetic
gtgttcttugggaatttgatucgaaga

SEQ ID NO: 57070 - DNA, 20 bp, Artificial Sequence
  Synthetic
ctccgucaccactgatccut

SEQ ID NO: 57071 - DNA, 29 bp, Artificial Sequence
  Synthetic
gccaaataagcacutcttttcatctcaut

SEQ ID NO: 57072 - DNA, 23 bp, Artificial Sequence
  Synthetic
ccttggagtcutctaggagccut

SEQ ID NO: 57073 - DNA, 27 bp, Artificial Sequence
  Synthetic
ttcactaggugcaccattctgatatut

SEQ ID NO: 57074 - DNA, 20 bp, Artificial Sequence
  Synthetic
gggaggaguggcgtttauct

SEQ ID NO: 57075 - DNA, 28 bp, Artificial Sequence
  Synthetic
gccattucacacagaattaagacuggaa

SEQ ID NO: 57076 - DNA, 21 bp, Artificial Sequence
  Synthetic
tgctcaaugggcaaacuacca

SEQ ID NO: 57077 - DNA, 25 bp, Artificial Sequence
  Synthetic
ctcaacttagugtcaccgactauga

SEQ ID NO: 57078 - DNA, 24 bp, Artificial Sequence
  Synthetic
acagaauaggccacaattguaccc

SEQ ID NO: 57079 - DNA, 28 bp, Artificial Sequence
  Synthetic
tgtggcaaaagaaautgaattcgaugaa

SEQ ID NO: 57080 - DNA, 27 bp, Artificial Sequence
  Synthetic
gggaaauactgtgaccuaaaacagacc

SEQ ID NO: 57081 - DNA, 27 bp, Artificial Sequence
  Synthetic
tgtctcctggauctcttgtggatatua

SEQ ID NO: 57082 - DNA, 24 bp, Artificial Sequence
  Synthetic
gcagcugaagtattagauccagca

SEQ ID NO: 57083 - DNA, 28 bp, Artificial Sequence
  Synthetic
ctgctatacacugacctgtctcauaaaa

SEQ ID NO: 57084 - DNA, 21 bp, Artificial Sequence
  Synthetic
cgacaguggacauccagaacc

SEQ ID NO: 57085 - DNA, 22 bp, Artificial Sequence
  Synthetic
tcagctguccacttgttcaugt

SEQ ID NO: 57086 - DNA, 19 bp, Artificial Sequence
  Synthetic
cgacgccgagaccucuaaa

SEQ ID NO: 57087 - DNA, 21 bp, Artificial Sequence
  Synthetic
gagctgcutgggcuagagaag

SEQ ID NO: 57088 - DNA, 20 bp, Artificial Sequence
  Synthetic
ggcaccagauctctguacgg

SEQ ID NO: 57089 - DNA, 23 bp, Artificial Sequence
  Synthetic
agacuacacccagggaaugaaga

SEQ ID NO: 57090 - DNA, 20 bp, Artificial Sequence
  Synthetic
cgcctcaugcagctcattug

SEQ ID NO: 57091 - DNA, 26 bp, Artificial Sequence
  Synthetic
ggttcctattgtutctccccagatug

SEQ ID NO: 57092 - DNA, 23 bp, Artificial Sequence
  Synthetic
gagcuatggatgucaaggacact

SEQ ID NO: 57093 - DNA, 22 bp, Artificial Sequence
  Synthetic
tgccgguacacagaggtctuat

SEQ ID NO: 57094 - DNA, 28 bp, Artificial Sequence
  Synthetic
catgataaguaccatgactccaaugagt

SEQ ID NO: 57095 - DNA, 21 bp, Artificial Sequence
  Synthetic
caggucccagatgaaauccca

SEQ ID NO: 57096 - DNA, 22 bp, Artificial Sequence
  Synthetic
gatttgggtgcutgggcctaua

SEQ ID NO: 57097 - DNA, 25 bp, Artificial Sequence
  Synthetic
tgagtcagaggaacuactgaagucc

SEQ ID NO: 57098 - DNA, 21 bp, Artificial Sequence
  Synthetic
ggagaaccccauggctttgut

SEQ ID NO: 57099 - DNA, 21 bp, Artificial Sequence
  Synthetic
ctttttcagaggugggcgaug

SEQ ID NO: 57100 - DNA, 28 bp, Artificial Sequence
  Synthetic
ctttttguagaaccatagttttguggca

SEQ ID NO: 57101 - DNA, 22 bp, Artificial Sequence
  Synthetic
tcacggaagcugtgtcatcauc

SEQ ID NO: 57102 - DNA, 28 bp, Artificial Sequence
  Synthetic
gtcagcaagucacttagatcauaaacga

SEQ ID NO: 57103 - DNA, 32 bp, Artificial Sequence
  Synthetic
agaaaaatcatggucataaatagctaaugggt

SEQ ID NO: 57104 - DNA, 24 bp, Artificial Sequence
  Synthetic
agtggcucactaaaucagagcaag

SEQ ID NO: 57105 - DNA, 28 bp, Artificial Sequence
  Synthetic
ttccagagcagaugtctttaauagcaaa

SEQ ID NO: 57106 - DNA, 20 bp, Artificial Sequence
  Synthetic
gctgcctucgtcgcttuagt

SEQ ID NO: 57107 - DNA, 28 bp, Artificial Sequence
  Synthetic
gggattggtaaaagucacagctaaauca

SEQ ID NO: 57108 - DNA, 25 bp, Artificial Sequence
  Synthetic
caaagcaaccgaagaauguaaccat

SEQ ID NO: 57109 - DNA, 20 bp, Artificial Sequence
  Synthetic
ctgaccugacgcgatctcug

SEQ ID NO: 57110 - DNA, 26 bp, Artificial Sequence
  Synthetic
aaauctgttacucaccacagcaaaga

SEQ ID NO: 57111 - DNA, 27 bp, Artificial Sequence
  Synthetic
ctgtacctttuccctttcttcttcucc

SEQ ID NO: 57112 - DNA, 25 bp, Artificial Sequence
  Synthetic
ttgtaggaaaaugagacgctgucaa

SEQ ID NO: 57113 - DNA, 22 bp, Artificial Sequence
  Synthetic
ccugtttgtttcucacccccaa

SEQ ID NO: 57114 - DNA, 22 bp, Artificial Sequence
  Synthetic
cggaccaguctttcaggttgua

SEQ ID NO: 57115 - DNA, 22 bp, Artificial Sequence
  Synthetic
gtgttgcagcugttgttguacc

SEQ ID NO: 57116 - DNA, 23 bp, Artificial Sequence
  Synthetic
ttttagguggctgcaaaatucgg

SEQ ID NO: 57117 - DNA, 27 bp, Artificial Sequence
  Synthetic
ccacucccgttgaaauagaagaaagaa

SEQ ID NO: 57118 - DNA, 26 bp, Artificial Sequence
  Synthetic
ggagguagccagagataattauggga

SEQ ID NO: 57119 - DNA, 28 bp, Artificial Sequence
  Synthetic
ggtgagccctauttagtcatacactuaa

SEQ ID NO: 57120 - DNA, 25 bp, Artificial Sequence
  Synthetic
catcctgaacucgggagaagauaag

SEQ ID NO: 57121 - DNA, 28 bp, Artificial Sequence
  Synthetic
tgtaaaagagguttatgtctugggacag

SEQ ID NO: 57122 - DNA, 26 bp, Artificial Sequence
  Synthetic
attcccagugaacagaaaguaaacga

SEQ ID NO: 57123 - DNA, 24 bp, Artificial Sequence
  Synthetic
cactgtctuacaagccaactctug

SEQ ID NO: 57124 - DNA, 26 bp, Artificial Sequence
  Synthetic
attccacataccuggttaatgtgcut

SEQ ID NO: 57125 - DNA, 28 bp, Artificial Sequence
  Synthetic
tgacaaacctttuctttaccttcaccut

SEQ ID NO: 57126 - DNA, 27 bp, Artificial Sequence
  Synthetic
agtttcactctaguggtttttgaccut

SEQ ID NO: 57127 - DNA, 24 bp, Artificial Sequence
  Synthetic
gattggcaagutatgtgcccatuc

SEQ ID NO: 57128 - DNA, 20 bp, Artificial Sequence
  Synthetic
ctccucggaggcactcatug

SEQ ID NO: 57129 - DNA, 25 bp, Artificial Sequence
  Synthetic
ccatgtucaagaacaacuacccaag

SEQ ID NO: 57130 - DNA, 28 bp, Artificial Sequence
  Synthetic
tgtatgtgtcaaugaggcagtagtuaag

SEQ ID NO: 57131 - DNA, 26 bp, Artificial Sequence
  Synthetic
ctttatgtattcgucgcgtaaggcua

SEQ ID NO: 57132 - DNA, 20 bp, Artificial Sequence
  Synthetic
cctgagtattugccgcccut

SEQ ID NO: 57133 - DNA, 22 bp, Artificial Sequence
  Synthetic
gggccccaacuttaagagcaua

SEQ ID NO: 57134 - DNA, 21 bp, Artificial Sequence
  Synthetic
cggtgacauagtacgcaugcc

SEQ ID NO: 57135 - DNA, 23 bp, Artificial Sequence
  Synthetic
tcctttctcccutctgctctcut

SEQ ID NO: 57136 - DNA, 23 bp, Artificial Sequence
  Synthetic
gccctguagagataggagtugct

SEQ ID NO: 57137 - DNA, 22 bp, Artificial Sequence
  Synthetic
cagagacaucagaagggucagg

SEQ ID NO: 57138 - DNA, 20 bp, Artificial Sequence
  Synthetic
gtctggccutctgtccacug

SEQ ID NO: 57139 - DNA, 24 bp, Artificial Sequence
  Synthetic
aagtccctguctatgttccacuct

SEQ ID NO: 57140 - DNA, 25 bp, Artificial Sequence
  Synthetic
agctactcaucccataaucccagag

SEQ ID NO: 57141 - DNA, 23 bp, Artificial Sequence
  Synthetic
tgaaacgccaucaacgggaaaua

SEQ ID NO: 57142 - DNA, 28 bp, Artificial Sequence
  Synthetic
ttttaaaagaucatgtccatuggagaca

SEQ ID NO: 57143 - DNA, 26 bp, Artificial Sequence
  Synthetic
gaatcaggaaucttgggaccttuact

SEQ ID NO: 57144 - DNA, 17 bp, Artificial Sequence
  Synthetic
aagggucgcccactguc

SEQ ID NO: 57145 - DNA, 22 bp, Artificial Sequence
  Synthetic
ggtccacauacccatcctctuc

SEQ ID NO: 57146 - DNA, 23 bp, Artificial Sequence
  Synthetic
gaggatgatgaugtgagccaugt

SEQ ID NO: 57147 - DNA, 22 bp, Artificial Sequence
  Synthetic
gcacactagaugccatccucag

SEQ ID NO: 57148 - DNA, 23 bp, Artificial Sequence
  Synthetic
tggaaggauaggaaaugggaagt

SEQ ID NO: 57149 - DNA, 21 bp, Artificial Sequence
  Synthetic
ccagctcugtggtgacaucaa

SEQ ID NO: 57150 - DNA, 23 bp, Artificial Sequence
  Synthetic
ttctagcuacagcttccctucct

SEQ ID NO: 57151 - DNA, 27 bp, Artificial Sequence
  Synthetic
agcatctucatttttgttuccacacaa

SEQ ID NO: 57152 - DNA, 19 bp, Artificial Sequence
  Synthetic
gccatcucctgacccucct

SEQ ID NO: 57153 - DNA, 18 bp, Artificial Sequence
  Synthetic
cgacucaccagcgtccut

SEQ ID NO: 57154 - DNA, 20 bp, Artificial Sequence
  Synthetic
tccagttcuggatgcccuga

SEQ ID NO: 57155 - DNA, 24 bp, Artificial Sequence
  Synthetic
gctgaagtggacucaattcctgut

SEQ ID NO: 57156 - DNA, 25 bp, Artificial Sequence
  Synthetic
ttatgcucacccggttattcucaaa

SEQ ID NO: 57157 - DNA, 26 bp, Artificial Sequence
  Synthetic
ccatcactcugagttgtctcattuca

SEQ ID NO: 57158 - DNA, 22 bp, Artificial Sequence
  Synthetic
gaaagaguagacagccgcugat

SEQ ID NO: 57159 - DNA, 24 bp, Artificial Sequence
  Synthetic
gtctgaacaucaccttcuacgaga

SEQ ID NO: 57160 - DNA, 28 bp, Artificial Sequence
  Synthetic
cuttttaaccttaggucaaaggcaaagt

SEQ ID NO: 57161 - DNA, 21 bp, Artificial Sequence
  Synthetic
gcagcctguagtggtgtcauc

SEQ ID NO: 57162 - DNA, 21 bp, Artificial Sequence
  Synthetic
caaggtcuccttcagucgcaa

SEQ ID NO: 57163 - DNA, 23 bp, Artificial Sequence
  Synthetic
tccatcugggctttgttcucaac

SEQ ID NO: 57164 - DNA, 25 bp, Artificial Sequence
  Synthetic
tuccttaatgagtugggaagggaaa

SEQ ID NO: 57165 - DNA, 28 bp, Artificial Sequence
  Synthetic
gatcttctctatauagggtgaaccugga

SEQ ID NO: 57166 - DNA, 27 bp, Artificial Sequence
  Synthetic
caaactaaugccagacaaauccaaaga

SEQ ID NO: 57167 - DNA, 29 bp, Artificial Sequence
  Synthetic
gcaccaggctcauaatttactgtgataua

SEQ ID NO: 57168 - DNA, 23 bp, Artificial Sequence
  Synthetic
ccttgagaccuctgacaccauct

SEQ ID NO: 57169 - DNA, 31 bp, Artificial Sequence
  Synthetic
acgtataagtgguaattcatctattucaggg

SEQ ID NO: 57170 - DNA, 28 bp, Artificial Sequence
  Synthetic
ggaatagatguatcttaccctgugacct

SEQ ID NO: 57171 - DNA, 23 bp, Artificial Sequence
  Synthetic
cacatcctgugtcagttcacuct

SEQ ID NO: 57172 - DNA, 28 bp, Artificial Sequence
  Synthetic
tggatcacatcuctaccagagttaauca

SEQ ID NO: 57173 - DNA, 21 bp, Artificial Sequence
  Synthetic
ctggccaagagutacgggaut

SEQ ID NO: 57174 - DNA, 21 bp, Artificial Sequence
  Synthetic
tccctcguggtgtagagugat

SEQ ID NO: 57175 - DNA, 23 bp, Artificial Sequence
  Synthetic
ccaattgggugcgtaactttguc

SEQ ID NO: 57176 - DNA, 26 bp, Artificial Sequence
  Synthetic
gtcctcatcacuctctctgtctuact

SEQ ID NO: 57177 - DNA, 23 bp, Artificial Sequence
  Synthetic
ccacactcttuatccctggacuc

SEQ ID NO: 57178 - DNA, 24 bp, Artificial Sequence
  Synthetic
gaautctggtgtttucaggcaaca

SEQ ID NO: 57179 - DNA, 26 bp, Artificial Sequence
  Synthetic
cccaagagaaguttttccaggaacua

SEQ ID NO: 57180 - DNA, 28 bp, Artificial Sequence
  Synthetic
acaaatcagtcutttccaactctuccaa

SEQ ID NO: 57181 - DNA, 28 bp, Artificial Sequence
  Synthetic
gacttcttcagcautatgacaagagcua

SEQ ID NO: 57182 - DNA, 21 bp, Artificial Sequence
  Synthetic
cagggaccugcagcagtatua

SEQ ID NO: 57183 - DNA, 22 bp, Artificial Sequence
  Synthetic
ttactggaccuccccattcuca

SEQ ID NO: 57184 - DNA, 21 bp, Artificial Sequence
  Synthetic
acuttggaagugccaccaagt

SEQ ID NO: 57185 - DNA, 26 bp, Artificial Sequence
  Synthetic
gaccttgattgauttctcgtgttuca

SEQ ID NO: 57186 - DNA, 28 bp, Artificial Sequence
  Synthetic
gtgtgtttctugaggaagatgaauaggt

SEQ ID NO: 57187 - DNA, 28 bp, Artificial Sequence
  Synthetic
ccctatttguaggtgttgaaugaacaag

SEQ ID NO: 57188 - DNA, 24 bp, Artificial Sequence
  Synthetic
acaatggtuccatccctccuaagt

SEQ ID NO: 57189 - DNA, 27 bp, Artificial Sequence
  Synthetic
gccttactcucagtataacttcuccct

SEQ ID NO: 57190 - DNA, 21 bp, Artificial Sequence
  Synthetic
cctgtcaguggtgtcagtgug

SEQ ID NO: 57191 - DNA, 28 bp, Artificial Sequence
  Synthetic
agtgcactatuacaataaattgctgcut

SEQ ID NO: 57192 - DNA, 24 bp, Artificial Sequence
  Synthetic
cagaaccaccaaaaacugtuagca

SEQ ID NO: 57193 - DNA, 25 bp, Artificial Sequence
  Synthetic
ggctctttcauatcagcaagtguga

SEQ ID NO: 57194 - DNA, 27 bp, Artificial Sequence
  Synthetic
gagaccuaaaggaaattttuggcacat

SEQ ID NO: 57195 - DNA, 21 bp, Artificial Sequence
  Synthetic
cccgcgaagutataccaucct

SEQ ID NO: 57196 - DNA, 26 bp, Artificial Sequence
  Synthetic
ccaaauaagtttcuggcagacagagt

SEQ ID NO: 57197 - DNA, 28 bp, Artificial Sequence
  Synthetic
gaagtcataatgcauaacctttcccuga

SEQ ID NO: 57198 - DNA, 25 bp, Artificial Sequence
  Synthetic
atgaaaccttatutgcgtggcttut

SEQ ID NO: 57199 - DNA, 28 bp, Artificial Sequence
  Synthetic
tctcaacatttugatttctgtttugcca

SEQ ID NO: 57200 - DNA, 21 bp, Artificial Sequence
  Synthetic
acagcgaggaagaagugtgug

SEQ ID NO: 57201 - DNA, 22 bp, Artificial Sequence
  Synthetic
ccgcaucagggaatgaatguct

SEQ ID NO: 57202 - DNA, 29 bp, Artificial Sequence
  Synthetic
atgctttagaatuggaagtagattguggt

SEQ ID NO: 57203 - DNA, 24 bp, Artificial Sequence
  Synthetic
gagagcaagcaugcactttuagat

SEQ ID NO: 57204 - DNA, 21 bp, Artificial Sequence
  Synthetic
acactgacaguccagaccuga

SEQ ID NO: 57205 - DNA, 25 bp, Artificial Sequence
  Synthetic
aaagagtgcaaguctcaatgcaaug

SEQ ID NO: 57206 - DNA, 23 bp, Artificial Sequence
  Synthetic
tgtutagatctgagugccccaag

SEQ ID NO: 57207 - DNA, 28 bp, Artificial Sequence
  Synthetic
tggagguatgagaaaugagaaaggaaag

SEQ ID NO: 57208 - DNA, 26 bp, Artificial Sequence
  Synthetic
ggacgguggtattttgaattugagac

SEQ ID NO: 57209 - DNA, 24 bp, Artificial Sequence
  Synthetic
guactgtgaagcuaccaagaggaa

SEQ ID NO: 57210 - DNA, 24 bp, Artificial Sequence
  Synthetic
gcagtcaauggagttttgcucaga

SEQ ID NO: 57211 - DNA, 22 bp, Artificial Sequence
  Synthetic
cccgcacauaccatauagcagt

SEQ ID NO: 57212 - DNA, 21 bp, Artificial Sequence
  Synthetic
gcggttttugcacaagcuaca

SEQ ID NO: 57213 - DNA, 26 bp, Artificial Sequence
  Synthetic
acccttgtgaccugaaagagatttuc

SEQ ID NO: 57214 - DNA, 27 bp, Artificial Sequence
  Synthetic
cgcttctctcautgactcattactuca

SEQ ID NO: 57215 - DNA, 28 bp, Artificial Sequence
  Synthetic
aagaagccggaauagaatttgttaucca

SEQ ID NO: 57216 - DNA, 23 bp, Artificial Sequence
  Synthetic
tgggatugggcaatttcactuca

SEQ ID NO: 57217 - DNA, 27 bp, Artificial Sequence
  Synthetic
aggcagtaatatutccagcatcttuca

SEQ ID NO: 57218 - DNA, 22 bp, Artificial Sequence
  Synthetic
gccctgaugatcatgcugacaa

SEQ ID NO: 57219 - DNA, 23 bp, Artificial Sequence
  Synthetic
caggttgugggttaaagtuccct

SEQ ID NO: 57220 - DNA, 27 bp, Artificial Sequence
  Synthetic
tggtctgtagaaauctgttgtgctuac

SEQ ID NO: 57221 - DNA, 24 bp, Artificial Sequence
  Synthetic
agcaacgaggaaaucugaagaaca

SEQ ID NO: 57222 - DNA, 21 bp, Artificial Sequence
  Synthetic
ccaagatcgugaagcccaaug

SEQ ID NO: 57223 - DNA, 23 bp, Artificial Sequence
  Synthetic
cuccagaagagccuaagaagcaa

SEQ ID NO: 57224 - DNA, 25 bp, Artificial Sequence
  Synthetic
agccttcucgaactttgaactuacc

SEQ ID NO: 57225 - DNA, 27 bp, Artificial Sequence
  Synthetic
gggtacacacauttctgaaactacuaa

SEQ ID NO: 57226 - DNA, 25 bp, Artificial Sequence
  Synthetic
ggctcgaatgaucggaatcaaauac

SEQ ID NO: 57227 - DNA, 22 bp, Artificial Sequence
  Synthetic
ggtgutcgtccaucaaacccaa

SEQ ID NO: 57228 - DNA, 26 bp, Artificial Sequence
  Synthetic
tcccatcggautcaagtttucaaaga

SEQ ID NO: 57229 - DNA, 33 bp, Artificial Sequence
  Synthetic
taagtttctaaactacutaataaaaggcaggut

SEQ ID NO: 57230 - DNA, 28 bp, Artificial Sequence
  Synthetic
gctaggaauacttacttcucaaaccaca

SEQ ID NO: 57231 - DNA, 26 bp, Artificial Sequence
  Synthetic
ctgtacagccaucagaattagtugga

SEQ ID NO: 57232 - DNA, 25 bp, Artificial Sequence
  Synthetic
tcaagtaaagugagttgucgagcaa

SEQ ID NO: 57233 - DNA, 28 bp, Artificial Sequence
  Synthetic
caagagacaauggaccaggtcataauat

SEQ ID NO: 57234 - DNA, 28 bp, Artificial Sequence
  Synthetic
tgtaaagataucaatgctgccauccaat

SEQ ID NO: 57235 - DNA, 24 bp, Artificial Sequence
  Synthetic
guaaatcaaatcaugggcagccaa

SEQ ID NO: 57236 - DNA, 23 bp, Artificial Sequence
  Synthetic
aaaggcaagaaggcaguagtuca

SEQ ID NO: 57237 - DNA, 26 bp, Artificial Sequence
  Synthetic
ttcctatttuccaaggaacgtgtuca

SEQ ID NO: 57238 - DNA, 23 bp, Artificial Sequence
  Synthetic
ctcaccuaccccaagttttcuga

SEQ ID NO: 57239 - DNA, 21 bp, Artificial Sequence
  Synthetic
caaaaggagggugcaguccat

SEQ ID NO: 57240 - DNA, 22 bp, Artificial Sequence
  Synthetic
ccccacuccaagctgcaaatua

SEQ ID NO: 57241 - DNA, 24 bp, Artificial Sequence
  Synthetic
tguagtacatcttcucagcaggga

SEQ ID NO: 57242 - DNA, 21 bp, Artificial Sequence
  Synthetic
gccagccuagcatcccttcua

SEQ ID NO: 57243 - DNA, 25 bp, Artificial Sequence
  Synthetic
ttugaagaaggaaaggucagagcaa

SEQ ID NO: 57244 - DNA, 18 bp, Artificial Sequence
  Synthetic
gaagcaacgcgutccgut

SEQ ID NO: 57245 - DNA, 23 bp, Artificial Sequence
  Synthetic
ctctttgcugcctgtgtcattug

SEQ ID NO: 57246 - DNA, 23 bp, Artificial Sequence
  Synthetic
ctcaccaauggtggtgtagtuga

SEQ ID NO: 57247 - DNA, 21 bp, Artificial Sequence
  Synthetic
acagtctttgcugggcatcut

SEQ ID NO: 57248 - DNA, 27 bp, Artificial Sequence
  Synthetic
attaaagaatccautctgaggcuacgg

SEQ ID NO: 57249 - DNA, 22 bp, Artificial Sequence
  Synthetic
tgttgagguggcttttcctuct

SEQ ID NO: 57250 - DNA, 24 bp, Artificial Sequence
  Synthetic
atctagggatuctggtgtccauca

SEQ ID NO: 57251 - DNA, 23 bp, Artificial Sequence
  Synthetic
gtgaaccugggcaaaaagaucac

SEQ ID NO: 57252 - DNA, 25 bp, Artificial Sequence
  Synthetic
agcttttgttguagaagagcccaut

SEQ ID NO: 57253 - DNA, 27 bp, Artificial Sequence
  Synthetic
gccgacagaaggauttctttgctauat

SEQ ID NO: 57254 - DNA, 25 bp, Artificial Sequence
  Synthetic
aggctactaucaggtggatgttcut

SEQ ID NO: 57255 - DNA, 24 bp, Artificial Sequence
  Synthetic
gcaactttuaagggatggacgaut

SEQ ID NO: 57256 - DNA, 26 bp, Artificial Sequence
  Synthetic
catgaggacaaugaagcttucaaacc

SEQ ID NO: 57257 - DNA, 25 bp, Artificial Sequence
  Synthetic
gagtaucacagaaagcagttugcat

SEQ ID NO: 57258 - DNA, 22 bp, Artificial Sequence
  Synthetic
agagagacugactgaugcagga

SEQ ID NO: 57259 - DNA, 20 bp, Artificial Sequence
  Synthetic
agtagguccccaccaaugct

SEQ ID NO: 57260 - DNA, 27 bp, Artificial Sequence
  Synthetic
ccctgttacccauattgatttcctcug

SEQ ID NO: 57261 - DNA, 28 bp, Artificial Sequence
  Synthetic
cctctctcccccauaaaaatgatcctua

SEQ ID NO: 57262 - DNA, 24 bp, Artificial Sequence
  Synthetic
gccacagaacuattctccccagua

SEQ ID NO: 57263 - DNA, 28 bp, Artificial Sequence
  Synthetic
agcaaccautcaagatttuacaaaccag

SEQ ID NO: 57264 - DNA, 26 bp, Artificial Sequence
  Synthetic
acctcattgtuacctaaaactggcut

SEQ ID NO: 57265 - DNA, 28 bp, Artificial Sequence
  Synthetic
gttgtaattgtgugatgttagcagcuat

SEQ ID NO: 57266 - DNA, 22 bp, Artificial Sequence
  Synthetic
caggtccucccttttctucaca

SEQ ID NO: 57267 - DNA, 26 bp, Artificial Sequence
  Synthetic
gacagtcagataugccgtgacattua

SEQ ID NO: 57268 - DNA, 23 bp, Artificial Sequence
  Synthetic
tgcatggaugaaatggcattugg

SEQ ID NO: 57269 - DNA, 27 bp, Artificial Sequence
  Synthetic
acgatcacccugtgaacaaattcauag

SEQ ID NO: 57270 - DNA, 28 bp, Artificial Sequence
  Synthetic
ctcatttcctatcugaagtgtctgtuga

SEQ ID NO: 57271 - DNA, 21 bp, Artificial Sequence
  Synthetic
cctcgaugtcctttgaugcca

SEQ ID NO: 57272 - DNA, 23 bp, Artificial Sequence
  Synthetic
aacaggcacuaatcctggttcuc

SEQ ID NO: 57273 - DNA, 28 bp, Artificial Sequence
  Synthetic
gtttacatggcauattctagggugacat

SEQ ID NO: 57274 - DNA, 22 bp, Artificial Sequence
  Synthetic
gctcaaagcugtgctuaaggag

SEQ ID NO: 57275 - DNA, 25 bp, Artificial Sequence
  Synthetic
ctctcccatcucatccttgtcacua

SEQ ID NO: 57276 - DNA, 20 bp, Artificial Sequence
  Synthetic
autgaccuggagcgcagaat

SEQ ID NO: 57277 - DNA, 22 bp, Artificial Sequence
  Synthetic
gatctcctguagggcatgacug

SEQ ID NO: 57278 - DNA, 21 bp, Artificial Sequence
  Synthetic
tgaggctccautctctggcua

SEQ ID NO: 57279 - DNA, 21 bp, Artificial Sequence
  Synthetic
tggtgucctgggauggaagaa

SEQ ID NO: 57280 - DNA, 22 bp, Artificial Sequence
  Synthetic
ggctgaaguggaatgcugaaga

SEQ ID NO: 57281 - DNA, 24 bp, Artificial Sequence
  Synthetic
ggacaagaaccauagtgagctcug

SEQ ID NO: 57282 - DNA, 22 bp, Artificial Sequence
  Synthetic
gcttctgugagttgaggctucc

SEQ ID NO: 57283 - DNA, 22 bp, Artificial Sequence
  Synthetic
acagacgguagcaccagtacut

SEQ ID NO: 57284 - DNA, 18 bp, Artificial Sequence
  Synthetic
gggcucggtctaugacga

SEQ ID NO: 57285 - DNA, 17 bp, Artificial Sequence
  Synthetic
cgggcccgacugucaag

SEQ ID NO: 57286 - DNA, 24 bp, Artificial Sequence
  Synthetic
gtgtcatcuggcctcaaatctuct

SEQ ID NO: 57287 - DNA, 22 bp, Artificial Sequence
  Synthetic
tcgtgcaggaagugaactucat

SEQ ID NO: 57288 - DNA, 21 bp, Artificial Sequence
  Synthetic
tgggcuttcagaugcagacac

SEQ ID NO: 57289 - DNA, 28 bp, Artificial Sequence
  Synthetic
gctcaagcgagguacagaattaaaugat

SEQ ID NO: 57290 - DNA, 19 bp, Artificial Sequence
  Synthetic
cacagtcuccacggccaua

SEQ ID NO: 57291 - DNA, 21 bp, Artificial Sequence
  Synthetic
cctcugagagctctgucacga

SEQ ID NO: 57292 - DNA, 22 bp, Artificial Sequence
  Synthetic
gcatcuccagcacgaagacaua

SEQ ID NO: 57293 - DNA, 22 bp, Artificial Sequence
  Synthetic
gcttcatguccaccttgtcugg

SEQ ID NO: 57294 - DNA, 23 bp, Artificial Sequence
  Synthetic
gacaaaggcaugcattaccucac

SEQ ID NO: 57295 - DNA, 21 bp, Artificial Sequence
  Synthetic
ggtgtgtggacucagctcaua

SEQ ID NO: 57296 - DNA, 23 bp, Artificial Sequence
  Synthetic
ggcgaugacaaagaagagtcugt

SEQ ID NO: 57297 - DNA, 20 bp, Artificial Sequence
  Synthetic
acauacgggcaugccaagat

SEQ ID NO: 57298 - DNA, 21 bp, Artificial Sequence
  Synthetic
gctgttccaacucggtaguca

SEQ ID NO: 57299 - DNA, 28 bp, Artificial Sequence
  Synthetic
aatgtaacatgugtgctaattctugcag

SEQ ID NO: 57300 - DNA, 18 bp, Artificial Sequence
  Synthetic
ggcccucagugggaacaa

SEQ ID NO: 57301 - DNA, 17 bp, Artificial Sequence
  Synthetic
ggcacguacaccugcga

SEQ ID NO: 57302 - DNA, 21 bp, Artificial Sequence
  Synthetic
caggaaaggugcttcuaccca

SEQ ID NO: 57303 - DNA, 19 bp, Artificial Sequence
  Synthetic
cctgagccutcctgtgcut

SEQ ID NO: 57304 - DNA, 21 bp, Artificial Sequence
  Synthetic
catcugcagaaggugaagcac

SEQ ID NO: 57305 - DNA, 24 bp, Artificial Sequence
  Synthetic
gaaggcagcautgaggtttaugaa

SEQ ID NO: 57306 - DNA, 26 bp, Artificial Sequence
  Synthetic
tttactgcaccugcttaaaaccttug

SEQ ID NO: 57307 - DNA, 28 bp, Artificial Sequence
  Synthetic
tcaagaaggcacauagtaaaaacaguga

SEQ ID NO: 57308 - DNA, 20 bp, Artificial Sequence
  Synthetic
gccucacatgtcugggagat

SEQ ID NO: 57309 - DNA, 22 bp, Artificial Sequence
  Synthetic
ggttctucaggtgcuagaccag

SEQ ID NO: 57310 - DNA, 20 bp, Artificial Sequence
  Synthetic
accacugccagcagaggaua

SEQ ID NO: 57311 - DNA, 18 bp, Artificial Sequence
  Synthetic
ctgggaggccgugctuag

SEQ ID NO: 57312 - DNA, 22 bp, Artificial Sequence
  Synthetic
cagcagctuccctaagaauggt

SEQ ID NO: 57313 - DNA, 28 bp, Artificial Sequence
  Synthetic
agatgttgtgtuaaggcttaaagauccc

SEQ ID NO: 57314 - DNA, 25 bp, Artificial Sequence
  Synthetic
acatatatcaggucatggcctccut

SEQ ID NO: 57315 - DNA, 29 bp, Artificial Sequence
  Synthetic
ccacagaaauttacctacatuggaagagt

SEQ ID NO: 57316 - DNA, 26 bp, Artificial Sequence
  Synthetic
gtaatagctaucacccttctuggcaa

SEQ ID NO: 57317 - DNA, 18 bp, Artificial Sequence
  Synthetic
cagctuccacccguggat

SEQ ID NO: 57318 - DNA, 22 bp, Artificial Sequence
  Synthetic
agggugagagaagaccttgugt

SEQ ID NO: 57319 - DNA, 22 bp, Artificial Sequence
  Synthetic
cattggagcucatcatgccgua

SEQ ID NO: 57320 - DNA, 25 bp, Artificial Sequence
  Synthetic
gctgtaaatcuccagcctuaccaaa

SEQ ID NO: 57321 - DNA, 19 bp, Artificial Sequence
  Synthetic
tgggaagcugcatcaucgg

SEQ ID NO: 57322 - DNA, 23 bp, Artificial Sequence
  Synthetic
ccttccatuttaccaggauggct

SEQ ID NO: 57323 - DNA, 21 bp, Artificial Sequence
  Synthetic
cggcagattuggtgtcgtcut

SEQ ID NO: 57324 - DNA, 29 bp, Artificial Sequence
  Synthetic
aaaatgtagcaaautactctgacctucct

SEQ ID NO: 57325 - DNA, 27 bp, Artificial Sequence
  Synthetic
gtagccagcttucaaacaaactcaaut

SEQ ID NO: 57326 - DNA, 24 bp, Artificial Sequence
  Synthetic
gatgtgtctgauaaggcaggtuct

SEQ ID NO: 57327 - DNA, 29 bp, Artificial Sequence
  Synthetic
acaataacccatucctcttcaactaaucc

SEQ ID NO: 57328 - DNA, 25 bp, Artificial Sequence
  Synthetic
cagagaggatugaggaaaccatguc

SEQ ID NO: 57329 - DNA, 25 bp, Artificial Sequence
  Synthetic
ggttagtaucggccccttttcttut

SEQ ID NO: 57330 - DNA, 25 bp, Artificial Sequence
  Synthetic
aacccauttctgttucaggaaggaa

SEQ ID NO: 57331 - DNA, 21 bp, Artificial Sequence
  Synthetic
ccaguagccccttcttucaca

SEQ ID NO: 57332 - DNA, 26 bp, Artificial Sequence
  Synthetic
gcagtcttacauaatgcaaggcaaut

SEQ ID NO: 57333 - DNA, 22 bp, Artificial Sequence
  Synthetic
gautgacauccagaggaaccga

SEQ ID NO: 57334 - DNA, 28 bp, Artificial Sequence
  Synthetic
cccactcatugattattggcatatucac

SEQ ID NO: 57335 - DNA, 28 bp, Artificial Sequence
  Synthetic
gggatatttucacagatgtttcagtuga

SEQ ID NO: 57336 - DNA, 27 bp, Artificial Sequence
  Synthetic
accttttcguggaacttgacagattua

SEQ ID NO: 57337 - DNA, 26 bp, Artificial Sequence
  Synthetic
ccagctttgtguggttataaaggtut

SEQ ID NO: 57338 - DNA, 22 bp, Artificial Sequence
  Synthetic
gcccauggaaggcaatgctaua

SEQ ID NO: 57339 - DNA, 25 bp, Artificial Sequence
  Synthetic
gaaauaagggaggagcaaatcucca

SEQ ID NO: 57340 - DNA, 26 bp, Artificial Sequence
  Synthetic
ttcagataaaacutccacauccagca

SEQ ID NO: 57341 - DNA, 27 bp, Artificial Sequence
  Synthetic
tgtgctcucaaaagctagauaaaccat

SEQ ID NO: 57342 - DNA, 24 bp, Artificial Sequence
  Synthetic
caacagaugttaggaacucagcct

SEQ ID NO: 57343 - DNA, 21 bp, Artificial Sequence
  Synthetic
attgtcccucactuggccaaa

SEQ ID NO: 57344 - DNA, 26 bp, Artificial Sequence
  Synthetic
tttctcaaugccagagagtugaaaga

SEQ ID NO: 57345 - DNA, 27 bp, Artificial Sequence
  Synthetic
agcttgtuaaagaagacacctggatut

SEQ ID NO: 57346 - DNA, 28 bp, Artificial Sequence
  Synthetic
ctggtatcagtgucaggaaaagaguaat

SEQ ID NO: 57347 - DNA, 32 bp, Artificial Sequence
  Synthetic
aaatttaaaacagucaacactaccttaaugcc

SEQ ID NO: 57348 - DNA, 22 bp, Artificial Sequence
  Synthetic
actggttugagcaactgctuca

SEQ ID NO: 57349 - DNA, 29 bp, Artificial Sequence
  Synthetic
ccacaaccaggcaacugaattaattauag

SEQ ID NO: 57350 - DNA, 27 bp, Artificial Sequence
  Synthetic
cttttaggtagugcaacattgtgugag

SEQ ID NO: 57351 - DNA, 28 bp, Artificial Sequence
  Synthetic
cctgcaggaccuagcagaataatttuaa

SEQ ID NO: 57352 - DNA, 27 bp, Artificial Sequence
  Synthetic
tttaatgtgttttccuccccttaggut

SEQ ID NO: 57353 - DNA, 27 bp, Artificial Sequence
  Synthetic
atgctctatcccuctcaaatagcuaca

SEQ ID NO: 57354 - DNA, 27 bp, Artificial Sequence
  Synthetic
tggatttcuccaaatacgttgttucca

SEQ ID NO: 57355 - DNA, 28 bp, Artificial Sequence
  Synthetic
actatactcctttucacctcttctguga

SEQ ID NO: 57356 - DNA, 22 bp, Artificial Sequence
  Synthetic
tgtcatcgcuatttgctgucca

SEQ ID NO: 57357 - DNA, 28 bp, Artificial Sequence
  Synthetic
gcttattagcacucgttagagcaattut

SEQ ID NO: 57358 - DNA, 27 bp, Artificial Sequence
  Synthetic
gggattaattguggctttctcttuacc

SEQ ID NO: 57359 - DNA, 24 bp, Artificial Sequence
  Synthetic
agcttattccaagcugagttgcut

SEQ ID NO: 57360 - DNA, 26 bp, Artificial Sequence
  Synthetic
cataccagatgugtctgtcactctug

SEQ ID NO: 57361 - DNA, 23 bp, Artificial Sequence
  Synthetic
cgtagtatttgcugagggctcug

SEQ ID NO: 57362 - DNA, 17 bp, Artificial Sequence
  Synthetic
gccugcaacccccucag

SEQ ID NO: 57363 - DNA, 23 bp, Artificial Sequence
  Synthetic
ttgtagacagagucccagtguga

SEQ ID NO: 57364 - DNA, 18 bp, Artificial Sequence
  Synthetic
gggtcucttggcucccaa

SEQ ID NO: 57365 - DNA, 18 bp, Artificial Sequence
  Synthetic
cugggagaagcggucact

SEQ ID NO: 57366 - DNA, 20 bp, Artificial Sequence
  Synthetic
gtaggccuctggctugaagg

SEQ ID NO: 57367 - DNA, 17 bp, Artificial Sequence
  Synthetic
ccuggcgctgugagact

SEQ ID NO: 57368 - DNA, 22 bp, Artificial Sequence
  Synthetic
tgtctagttcagugggcatgut

SEQ ID NO: 57369 - DNA, 22 bp, Artificial Sequence
  Synthetic
aaggatcuccaaaagccuccac

SEQ ID NO: 57370 - DNA, 26 bp, Artificial Sequence
  Synthetic
gaatgccguaagatggactttaaugt

SEQ ID NO: 57371 - DNA, 28 bp, Artificial Sequence
  Synthetic
cccacatcatguctcatcttatcaaugt

SEQ ID NO: 57372 - DNA, 20 bp, Artificial Sequence
  Synthetic
cagacgcaguggagtuggat

SEQ ID NO: 57373 - DNA, 28 bp, Artificial Sequence
  Synthetic
tctgcactcaaaaucaatgaagaggaut

SEQ ID NO: 57374 - DNA, 26 bp, Artificial Sequence
  Synthetic
tctaagaagautgtacagcugaagcc

SEQ ID NO: 57375 - DNA, 28 bp, Artificial Sequence
  Synthetic
acattgactguggtgattattgaacuct

SEQ ID NO: 57376 - DNA, 20 bp, Artificial Sequence
  Synthetic
cgcccaauttggtgactugt

SEQ ID NO: 57377 - DNA, 23 bp, Artificial Sequence
  Synthetic
gaagtctgagaguggatctgcug

SEQ ID NO: 57378 - DNA, 25 bp, Artificial Sequence
  Synthetic
ggucatagtugacccagaaaccaat

SEQ ID NO: 57379 - DNA, 28 bp, Artificial Sequence
  Synthetic
cttgaatatcatacugactgcctgtcut

SEQ ID NO: 57380 - DNA, 23 bp, Artificial Sequence
  Synthetic
gaccugccccaaaaccaaatuaa

SEQ ID NO: 57381 - DNA, 22 bp, Artificial Sequence
  Synthetic
agccgaagacaugttguaaggg

SEQ ID NO: 57382 - DNA, 20 bp, Artificial Sequence
  Synthetic
gaccggccutcaaugcaaat

SEQ ID NO: 57383 - DNA, 23 bp, Artificial Sequence
  Synthetic
ctctgagaauggcgaacugaagt

SEQ ID NO: 57384 - DNA, 24 bp, Artificial Sequence
  Synthetic
gtccccautcttaaacuggaccaa

SEQ ID NO: 57385 - DNA, 25 bp, Artificial Sequence
  Synthetic
tcctugcagcaagagaaaagatuct

SEQ ID NO: 57386 - DNA, 21 bp, Artificial Sequence
  Synthetic
ggutttgggcugaagggaagt

SEQ ID NO: 57387 - DNA, 24 bp, Artificial Sequence
  Synthetic
gacccugaccacaagtacagatuc

SEQ ID NO: 57388 - DNA, 19 bp, Artificial Sequence
  Synthetic
ccttccacugtgtgcucgt

SEQ ID NO: 57389 - DNA, 22 bp, Artificial Sequence
  Synthetic
tgaatgaugccagcccagtaug

SEQ ID NO: 57390 - DNA, 22 bp, Artificial Sequence
  Synthetic
tccatccttuccaccttccuca

SEQ ID NO: 57391 - DNA, 21 bp, Artificial Sequence
  Synthetic
cggagacuagcccctatguca

SEQ ID NO: 57392 - DNA, 22 bp, Artificial Sequence
  Synthetic
gtgagccaaagauctccuccag

SEQ ID NO: 57393 - DNA, 22 bp, Artificial Sequence
  Synthetic
cctcacaccaaccutgtctcut

SEQ ID NO: 57394 - DNA, 21 bp, Artificial Sequence
  Synthetic
ccgggaguaagggcttctcut

SEQ ID NO: 57395 - DNA, 26 bp, Artificial Sequence
  Synthetic
ttcctcatctguggtgtatctgttuc

SEQ ID NO: 57396 - DNA, 24 bp, Artificial Sequence
  Synthetic
ccctcaaatcuccaactacctgut

SEQ ID NO: 57397 - DNA, 22 bp, Artificial Sequence
  Synthetic
cctgagagcaggaacuctcuct

SEQ ID NO: 57398 - DNA, 21 bp, Artificial Sequence
  Synthetic
gcctcgauccatgccctttut

SEQ ID NO: 57399 - DNA, 19 bp, Artificial Sequence
  Synthetic
tgtcucagcacugggacct

SEQ ID NO: 57400 - DNA, 26 bp, Artificial Sequence
  Synthetic
gggctatttgacuacagttgtttuct

SEQ ID NO: 57401 - DNA, 19 bp, Artificial Sequence
  Synthetic
gacggtcuacgccaggtuc

SEQ ID NO: 57402 - DNA, 25 bp, Artificial Sequence
  Synthetic
cagatgtcugacagtgtgctctuag

SEQ ID NO: 57403 - DNA, 31 bp, Artificial Sequence
  Synthetic
acgttactatttuaggttgtctttcttcugg

SEQ ID NO: 57404 - DNA, 22 bp, Artificial Sequence
  Synthetic
ggttccaguccacagcatctuc

SEQ ID NO: 57405 - DNA, 28 bp, Artificial Sequence
  Synthetic
tgggattcttuggctaaataacaucaca

SEQ ID NO: 57406 - DNA, 21 bp, Artificial Sequence
  Synthetic
caagtcucccagaggtcagug

SEQ ID NO: 57407 - DNA, 24 bp, Artificial Sequence
  Synthetic
ccatcttgggugggatgtttguag

SEQ ID NO: 57408 - DNA, 21 bp, Artificial Sequence
  Synthetic
gcauaaagaccacccccagut

SEQ ID NO: 57409 - DNA, 26 bp, Artificial Sequence
  Synthetic
gcaccatcattuagtcttgtctguct

SEQ ID NO: 57410 - DNA, 26 bp, Artificial Sequence
  Synthetic
tgaaatacugagggcacaattagugt

SEQ ID NO: 57411 - DNA, 28 bp, Artificial Sequence
  Synthetic
ccaaaaacacataucataatggcctcut

SEQ ID NO: 57412 - DNA, 28 bp, Artificial Sequence
  Synthetic
aatagtattgguggagtggattgucaaa

SEQ ID NO: 57413 - DNA, 26 bp, Artificial Sequence
  Synthetic
cagactgugaagatcacatcaaugga

SEQ ID NO: 57414 - DNA, 24 bp, Artificial Sequence
  Synthetic
gcttcaacuaattgtagcauggca

SEQ ID NO: 57415 - DNA, 26 bp, Artificial Sequence
  Synthetic
ccaggattatggugactgtgaagaua

SEQ ID NO: 57416 - DNA, 28 bp, Artificial Sequence
  Synthetic
tgttactcaccgauagcttttguaaagg

SEQ ID NO: 57417 - DNA, 28 bp, Artificial Sequence
  Synthetic
cagagatatcaaaauggccaggaguaat

SEQ ID NO: 57418 - DNA, 28 bp, Artificial Sequence
  Synthetic
acagaagggtcaguttttctgagaaaut

SEQ ID NO: 57419 - DNA, 20 bp, Artificial Sequence
  Synthetic
cctgctccucctccacacua

SEQ ID NO: 57420 - DNA, 27 bp, Artificial Sequence
  Synthetic
tcatcataacccugtgctaatgttuga

SEQ ID NO: 57421 - DNA, 28 bp, Artificial Sequence
  Synthetic
ccgaccatgtugttcaagaaaaacuaaa

SEQ ID NO: 57422 - DNA, 28 bp, Artificial Sequence
  Synthetic
tggagtaaatgacutttctcaagtggut

SEQ ID NO: 57423 - DNA, 24 bp, Artificial Sequence
  Synthetic
ccttccccucctagctcttcttut

SEQ ID NO: 57424 - DNA, 30 bp, Artificial Sequence
  Synthetic
ttgccatgaacaaaucagaagtataucagt

SEQ ID NO: 57425 - DNA, 22 bp, Artificial Sequence
  Synthetic
gagccccacucatggttagaug

SEQ ID NO: 57426 - DNA, 27 bp, Artificial Sequence
  Synthetic
gcgtaaaaaccccutctgttaaatuct

SEQ ID NO: 57427 - DNA, 21 bp, Artificial Sequence
  Synthetic
caagagauagcctgcaugcca

SEQ ID NO: 57428 - DNA, 26 bp, Artificial Sequence
  Synthetic
gttaactuagacacccaaggtgguaa

SEQ ID NO: 57429 - DNA, 25 bp, Artificial Sequence
  Synthetic
gaaggtacautttcaggagucagca

SEQ ID NO: 57430 - DNA, 22 bp, Artificial Sequence
  Synthetic
gctgagagutagagcucggaag

SEQ ID NO: 57431 - DNA, 25 bp, Artificial Sequence
  Synthetic
cctactgaggautttcagagtgugt

SEQ ID NO: 57432 - DNA, 25 bp, Artificial Sequence
  Synthetic
agcaaaattactutcccctgacucc

SEQ ID NO: 57433 - DNA, 22 bp, Artificial Sequence
  Synthetic
gtttgtccuagcctcagucact

SEQ ID NO: 57434 - DNA, 20 bp, Artificial Sequence
  Synthetic
ggctccugatgacccucaag

SEQ ID NO: 57435 - DNA, 25 bp, Artificial Sequence
  Synthetic
agaacacucaauaccccaacaaagg

SEQ ID NO: 57436 - DNA, 23 bp, Artificial Sequence
  Synthetic
ggguaagagagtatcugcccaag

SEQ ID NO: 57437 - DNA, 17 bp, Artificial Sequence
  Synthetic
cctcccccuggctgcua

SEQ ID NO: 57438 - DNA, 28 bp, Artificial Sequence
  Synthetic
gtcttggttaaugatcagctcttcucaa

SEQ ID NO: 57439 - DNA, 25 bp, Artificial Sequence
  Synthetic
ctcattgactcaugaaactcaccug

SEQ ID NO: 57440 - DNA, 22 bp, Artificial Sequence
  Synthetic
acauggcacagauggaggaaat

SEQ ID NO: 57441 - DNA, 28 bp, Artificial Sequence
  Synthetic
gtctctguagagcacacttttcttcuaa

SEQ ID NO: 57442 - DNA, 26 bp, Artificial Sequence
  Synthetic
cacataagucccttagtacaguggaa

SEQ ID NO: 57443 - DNA, 22 bp, Artificial Sequence
  Synthetic
agctgtgttcucagcctctcua

SEQ ID NO: 57444 - DNA, 28 bp, Artificial Sequence
  Synthetic
gcagtgtactutttagtggacauaagca

SEQ ID NO: 57445 - DNA, 25 bp, Artificial Sequence
  Synthetic
ggcagatgacuggcttttacuagat

SEQ ID NO: 57446 - DNA, 29 bp, Artificial Sequence
  Synthetic
agagtgttaccauactcatacctcguaaa

SEQ ID NO: 57447 - DNA, 25 bp, Artificial Sequence
  Synthetic
tgccacaaugacaggaactattuct

SEQ ID NO: 57448 - DNA, 28 bp, Artificial Sequence
  Synthetic
tggttttcttuaccagtatctcccaauc

SEQ ID NO: 57449 - DNA, 23 bp, Artificial Sequence
  Synthetic
acacccccauccaaaacauacac

SEQ ID NO: 57450 - DNA, 22 bp, Artificial Sequence
  Synthetic
acctcctguaagtagccacugt

SEQ ID NO: 57451 - DNA, 24 bp, Artificial Sequence
  Synthetic
agcacatttuagctacgcagguat

SEQ ID NO: 57452 - DNA, 25 bp, Artificial Sequence
  Synthetic
aacaagcaggautcaacatugcaaa

SEQ ID NO: 57453 - DNA, 28 bp, Artificial Sequence
  Synthetic
tgtggttcttagaugaatgctatgugaa

SEQ ID NO: 57454 - DNA, 28 bp, Artificial Sequence
  Synthetic
gtttautctcacaatctucaagccaacc

SEQ ID NO: 57455 - DNA, 28 bp, Artificial Sequence
  Synthetic
gttaatggagucagaatactgucaagca

SEQ ID NO: 57456 - DNA, 25 bp, Artificial Sequence
  Synthetic
ttcaattttcucaatccggagucca

SEQ ID NO: 57457 - DNA, 28 bp, Artificial Sequence
  Synthetic
cctctatttcagagaugaactgtctuct

SEQ ID NO: 57458 - DNA, 21 bp, Artificial Sequence
  Synthetic
agcaccutctcucagacccaa

SEQ ID NO: 57459 - DNA, 21 bp, Artificial Sequence
  Synthetic
gggtcaguctggtcuggacat

SEQ ID NO: 57460 - DNA, 23 bp, Artificial Sequence
  Synthetic
gtggtctguccaaaaacttgcut

SEQ ID NO: 57461 - DNA, 28 bp, Artificial Sequence
  Synthetic
tgagggttctttuatttctgccatagut

SEQ ID NO: 57462 - DNA, 28 bp, Artificial Sequence
  Synthetic
tccaaatctgtauggagaccaaaucaag

SEQ ID NO: 57463 - DNA, 28 bp, Artificial Sequence
  Synthetic
tcagatagatugtcagcagaaucaacag

SEQ ID NO: 57464 - DNA, 33 bp, Artificial Sequence
  Synthetic
tgtagcacaatgagaguataaagtagatguaat

SEQ ID NO: 57465 - DNA, 23 bp, Artificial Sequence
  Synthetic
cctcccagaaggcugttacatuc

SEQ ID NO: 57466 - DNA, 28 bp, Artificial Sequence
  Synthetic
tgactacatggaacacauaccttcgaua

SEQ ID NO: 57467 - DNA, 33 bp, Artificial Sequence
  Synthetic
tgtatacatccccaaacuatcttaatttaacut

SEQ ID NO: 57468 - DNA, 28 bp, Artificial Sequence
  Synthetic
aatggccaactcucgaaagttatgatua

SEQ ID NO: 57469 - DNA, 27 bp, Artificial Sequence
  Synthetic
gtcuaacaaagcaagcagtgtucaaat

SEQ ID NO: 57470 - DNA, 21 bp, Artificial Sequence
  Synthetic
ggttgggcucagatctgugat

SEQ ID NO: 57471 - DNA, 28 bp, Artificial Sequence
  Synthetic
ttcccactgugctattaaguaacagaac

SEQ ID NO: 57472 - DNA, 26 bp, Artificial Sequence
  Synthetic
caaaaggacacagcagutaaatguga

SEQ ID NO: 57473 - DNA, 22 bp, Artificial Sequence
  Synthetic
tcgttcagcaguttctggaugg

SEQ ID NO: 57474 - DNA, 25 bp, Artificial Sequence
  Synthetic
cttaggcctcucattctgccttaut

SEQ ID NO: 57475 - DNA, 19 bp, Artificial Sequence
  Synthetic
caggcaagccgautgaugg

SEQ ID NO: 57476 - DNA, 21 bp, Artificial Sequence
  Synthetic
gagaacccacccuttctgcut

SEQ ID NO: 57477 - DNA, 21 bp, Artificial Sequence
  Synthetic
agggtgtugctagtgucagga

SEQ ID NO: 57478 - DNA, 20 bp, Artificial Sequence
  Synthetic
tccaagcucctccaagguga

SEQ ID NO: 57479 - DNA, 23 bp, Artificial Sequence
  Synthetic
gctaccgcaccautagcaagaut

SEQ ID NO: 57480 - DNA, 20 bp, Artificial Sequence
  Synthetic
ctgagccugcccuaaagcaa

SEQ ID NO: 57481 - DNA, 19 bp, Artificial Sequence
  Synthetic
gggctatgucctcccacuc

SEQ ID NO: 57482 - DNA, 27 bp, Artificial Sequence
  Synthetic
ctggcattgcuggttttaaattacugt

SEQ ID NO: 57483 - DNA, 28 bp, Artificial Sequence
  Synthetic
ttttagcaguagaagactcagaaagugg

SEQ ID NO: 57484 - DNA, 23 bp, Artificial Sequence
  Synthetic
cagcaggtgugtgtctttcaaug

SEQ ID NO: 57485 - DNA, 26 bp, Artificial Sequence
  Synthetic
ctgagggctccugatgtactcataua

SEQ ID NO: 57486 - DNA, 24 bp, Artificial Sequence
  Synthetic
gataatgctguccaggatgtuggt

SEQ ID NO: 57487 - DNA, 18 bp, Artificial Sequence
  Synthetic
ggcttcuaccgcggucaa

SEQ ID NO: 57488 - DNA, 21 bp, Artificial Sequence
  Synthetic
ggtgctccuaaggacauggaa

SEQ ID NO: 57489 - DNA, 26 bp, Artificial Sequence
  Synthetic
ggatacuggaaatagccucaaacact

SEQ ID NO: 57490 - DNA, 27 bp, Artificial Sequence
  Synthetic
cacactgagcauttactacctgaaugt

SEQ ID NO: 57491 - DNA, 23 bp, Artificial Sequence
  Synthetic
gccaautgtcaugagaggcagaa

SEQ ID NO: 57492 - DNA, 21 bp, Artificial Sequence
  Synthetic
ccagugccggatatgacucag

SEQ ID NO: 57493 - DNA, 28 bp, Artificial Sequence
  Synthetic
ccagtgagttccuatttagttcttggut

SEQ ID NO: 57494 - DNA, 25 bp, Artificial Sequence
  Synthetic
tctgtttctugctttgcttucaagg

SEQ ID NO: 57495 - DNA, 22 bp, Artificial Sequence
  Synthetic
ccctaccacgugaacaaugact

SEQ ID NO: 57496 - DNA, 23 bp, Artificial Sequence
  Synthetic
ccacccccaaauaactaccaugt

SEQ ID NO: 57497 - DNA, 22 bp, Artificial Sequence
  Synthetic
gcctggcaaaggcuctaaatug

SEQ ID NO: 57498 - DNA, 27 bp, Artificial Sequence
  Synthetic
gttttatcautgagctgtuaggaggga

SEQ ID NO: 57499 - DNA, 20 bp, Artificial Sequence
  Synthetic
cagugagaaggcggucaaac

SEQ ID NO: 57500 - DNA, 27 bp, Artificial Sequence
  Synthetic
gagttgtgtaugacttaccgattcugt

SEQ ID NO: 57501 - DNA, 29 bp, Artificial Sequence
  Synthetic
tcattaccatguatgccatttguagacaa

SEQ ID NO: 57502 - DNA, 27 bp, Artificial Sequence
  Synthetic
cgtctaaauccagttttgcaaatuggt

SEQ ID NO: 57503 - DNA, 28 bp, Artificial Sequence
  Synthetic
gctgtatgggutaggaattgtattucca

SEQ ID NO: 57504 - DNA, 26 bp, Artificial Sequence
  Synthetic
cctgtcccaucattgtctccttauac

SEQ ID NO: 57505 - DNA, 22 bp, Artificial Sequence
  Synthetic
tgataauggccccctgugaaac

SEQ ID NO: 57506 - DNA, 28 bp, Artificial Sequence
  Synthetic
gttgtacattuccttaactgacucaaca

SEQ ID NO: 57507 - DNA, 22 bp, Artificial Sequence
  Synthetic
gtccgagaaagcutggugagaa

SEQ ID NO: 57508 - DNA, 25 bp, Artificial Sequence
  Synthetic
gtgtggcaataucacattccttguc

SEQ ID NO: 57509 - DNA, 23 bp, Artificial Sequence
  Synthetic
tggagataaugcttcacgtuccc

SEQ ID NO: 57510 - DNA, 23 bp, Artificial Sequence
  Synthetic
atgtctgcugatactcugaggga

SEQ ID NO: 57511 - DNA, 26 bp, Artificial Sequence
  Synthetic
tcactccaaggagaugggtatagaug

SEQ ID NO: 57512 - DNA, 24 bp, Artificial Sequence
  Synthetic
tcagtgtucagctgtcttuggaat

SEQ ID NO: 57513 - DNA, 21 bp, Artificial Sequence
  Synthetic
ctgautgttcctguggaagcc

SEQ ID NO: 57514 - DNA, 19 bp, Artificial Sequence
  Synthetic
gggcutctauccccgaacc

SEQ ID NO: 57515 - DNA, 17 bp, Artificial Sequence
  Synthetic
gcagcccugctcucaga

SEQ ID NO: 57516 - DNA, 20 bp, Artificial Sequence
  Synthetic
ctgaagccgcaugaggauga

SEQ ID NO: 57517 - DNA, 20 bp, Artificial Sequence
  Synthetic
caccatgaucggcacgtcua

SEQ ID NO: 57518 - DNA, 28 bp, Artificial Sequence
  Synthetic
ccaactgccutattatgatcttguacct

SEQ ID NO: 57519 - DNA, 28 bp, Artificial Sequence
  Synthetic
gcagaagcaguttagaaaattgccuaat

SEQ ID NO: 57520 - DNA, 25 bp, Artificial Sequence
  Synthetic
cctgtcugaaggaagaatgtuagca

SEQ ID NO: 57521 - DNA, 25 bp, Artificial Sequence
  Synthetic
tcaaacttcatguccacgtctctut

SEQ ID NO: 57522 - DNA, 22 bp, Artificial Sequence
  Synthetic
agtgtaaaggcucagggtucac

SEQ ID NO: 57523 - DNA, 24 bp, Artificial Sequence
  Synthetic
ataccgacugccatttcttttgut

SEQ ID NO: 57524 - DNA, 22 bp, Artificial Sequence
  Synthetic
tctcaaagugaggctugcaagt

SEQ ID NO: 57525 - DNA, 27 bp, Artificial Sequence
  Synthetic
cagtgttcatataugttctgccctugt

SEQ ID NO: 57526 - DNA, 20 bp, Artificial Sequence
  Synthetic
ctccgtggcuaactctgcuc

SEQ ID NO: 57527 - DNA, 19 bp, Artificial Sequence
  Synthetic
agaagggugcggcactuac

SEQ ID NO: 57528 - DNA, 22 bp, Artificial Sequence
  Synthetic
ctcugaccacacttcucagcaa

SEQ ID NO: 57529 - DNA, 22 bp, Artificial Sequence
  Synthetic
ggagagtauggagggaugaggt

SEQ ID NO: 57530 - DNA, 21 bp, Artificial Sequence
  Synthetic
gcaataccgugctggccatua

SEQ ID NO: 57531 - DNA, 25 bp, Artificial Sequence
  Synthetic
cagaagttaucggcagaacatccut

SEQ ID NO: 57532 - DNA, 22 bp, Artificial Sequence
  Synthetic
acauctctttaugggcccagca

SEQ ID NO: 57533 - DNA, 23 bp, Artificial Sequence
  Synthetic
ccttggttaggaucgacccagua

SEQ ID NO: 57534 - DNA, 22 bp, Artificial Sequence
  Synthetic
ttctgctucccaagcugaagaa

SEQ ID NO: 57535 - DNA, 23 bp, Artificial Sequence
  Synthetic
tccacgtggucatgggaataauc

SEQ ID NO: 57536 - DNA, 21 bp, Artificial Sequence
  Synthetic
gccccatuttgcctgaucaag

SEQ ID NO: 57537 - DNA, 19 bp, Artificial Sequence
  Synthetic
ccagcgtgucctgggtaug

SEQ ID NO: 57538 - DNA, 25 bp, Artificial Sequence
  Synthetic
ccatccttttcugcatctctagcut

SEQ ID NO: 57539 - DNA, 22 bp, Artificial Sequence
  Synthetic
ggtttgggaggugaaaccuagt

SEQ ID NO: 57540 - DNA, 26 bp, Artificial Sequence
  Synthetic
ctagtatcguagctacttcccttucc

SEQ ID NO: 57541 - DNA, 28 bp, Artificial Sequence
  Synthetic
gcctacagacucataataccaccaatua

SEQ ID NO: 57542 - DNA, 19 bp, Artificial Sequence
  Synthetic
cccugcccccaccttttuc

SEQ ID NO: 57543 - DNA, 19 bp, Artificial Sequence
  Synthetic
ggtguggaggaccagggua

SEQ ID NO: 57544 - DNA, 21 bp, Artificial Sequence
  Synthetic
tgaaccugcccatgaacauca

SEQ ID NO: 57545 - DNA, 23 bp, Artificial Sequence
  Synthetic
ggtccuctttttcacuggaaacc

SEQ ID NO: 57546 - DNA, 21 bp, Artificial Sequence
  Synthetic
cccatccugctccttacctut

SEQ ID NO: 57547 - DNA, 22 bp, Artificial Sequence
  Synthetic
ctccatugggaccttcatccug

SEQ ID NO: 57548 - DNA, 27 bp, Artificial Sequence
  Synthetic
tcttgtaggtuggaaaagagactgtuc

SEQ ID NO: 57549 - DNA, 31 bp, Artificial Sequence
  Synthetic
aaatcagctacuttttcttccuaacaagagt

SEQ ID NO: 57550 - DNA, 25 bp, Artificial Sequence
  Synthetic
atcgtctggcuaatgttatgauggg

SEQ ID NO: 57551 - DNA, 26 bp, Artificial Sequence
  Synthetic
ccctcguctttcaataauaggaagca

SEQ ID NO: 57552 - DNA, 24 bp, Artificial Sequence
  Synthetic
aacttcctcaccuggtctcattuc

SEQ ID NO: 57553 - DNA, 19 bp, Artificial Sequence
  Synthetic
ctgaucccacggcctcauc

SEQ ID NO: 57554 - DNA, 19 bp, Artificial Sequence
  Synthetic
ggcccggcutcatcgtaut

SEQ ID NO: 57555 - DNA, 27 bp, Artificial Sequence
  Synthetic
actaacgacugcactaatgatgacaut

SEQ ID NO: 57556 - DNA, 21 bp, Artificial Sequence
  Synthetic
cgatguccaggaaccgcuaat

SEQ ID NO: 57557 - DNA, 19 bp, Artificial Sequence
  Synthetic
gggucgcacgtgatauggg

SEQ ID NO: 57558 - DNA, 20 bp, Artificial Sequence
  Synthetic
ccagcactuggccctgatut

SEQ ID NO: 57559 - DNA, 20 bp, Artificial Sequence
  Synthetic
cutcacgtucacacgcagac

SEQ ID NO: 57560 - DNA, 25 bp, Artificial Sequence
  Synthetic
gtaagaaaugaagagagggcgtuga

SEQ ID NO: 57561 - DNA, 21 bp, Artificial Sequence
  Synthetic
ctcccttucctcaggucacag

SEQ ID NO: 57562 - DNA, 24 bp, Artificial Sequence
  Synthetic
ggagagtcagacutgaaagcagut

SEQ ID NO: 57563 - DNA, 23 bp, Artificial Sequence
  Synthetic
agtgtctcugactggcaattgug

SEQ ID NO: 57564 - DNA, 26 bp, Artificial Sequence
  Synthetic
cagguataagttactguggaaaggca

SEQ ID NO: 57565 - DNA, 28 bp, Artificial Sequence
  Synthetic
ccattgctttugaagaaacagttgtgua

SEQ ID NO: 57566 - DNA, 19 bp, Artificial Sequence
  Synthetic
caggcaggcucaccgauag

SEQ ID NO: 57567 - DNA, 21 bp, Artificial Sequence
  Synthetic
cauccuggagcgcaagaagaa

SEQ ID NO: 57568 - DNA, 22 bp, Artificial Sequence
  Synthetic
gggcagaaaaaccugtcctgut

SEQ ID NO: 57569 - DNA, 22 bp, Artificial Sequence
  Synthetic
gaaggaagaugagggcgtcuac

SEQ ID NO: 57570 - DNA, 23 bp, Artificial Sequence
  Synthetic
cutgacctcugcaagagaaggaa

SEQ ID NO: 57571 - DNA, 20 bp, Artificial Sequence
  Synthetic
tgcaggguccacaaacugac

SEQ ID NO: 57572 - DNA, 21 bp, Artificial Sequence
  Synthetic
aggagggcugaatgagguagt

SEQ ID NO: 57573 - DNA, 20 bp, Artificial Sequence
  Synthetic
ccuggagagctucgagaagg

SEQ ID NO: 57574 - DNA, 19 bp, Artificial Sequence
  Synthetic
tggcagaacacgcuctuga

SEQ ID NO: 57575 - DNA, 21 bp, Artificial Sequence
  Synthetic
ccacctgcugccctacttcua

SEQ ID NO: 57576 - DNA, 21 bp, Artificial Sequence
  Synthetic
cagtgggauccagttgucgaa

SEQ ID NO: 57577 - DNA, 24 bp, Artificial Sequence
  Synthetic
cgccttcatutctgaatcctucat

SEQ ID NO: 57578 - DNA, 20 bp, Artificial Sequence
  Synthetic
cccagggacgagauctacug

SEQ ID NO: 57579 - DNA, 20 bp, Artificial Sequence
  Synthetic
ctttggagccccuggctaut

SEQ ID NO: 57580 - DNA, 21 bp, Artificial Sequence
  Synthetic
gacaccugugacagggacaag

SEQ ID NO: 57581 - DNA, 22 bp, Artificial Sequence
  Synthetic
cttggtggucccatccaugaat

SEQ ID NO: 57582 - DNA, 22 bp, Artificial Sequence
  Synthetic
agtccagaaggcutcaggguat

SEQ ID NO: 57583 - DNA, 24 bp, Artificial Sequence
  Synthetic
ggcatcaccugaagtagtcauagg

SEQ ID NO: 57584 - DNA, 22 bp, Artificial Sequence
  Synthetic
gtctttgccccuccaatagcut

SEQ ID NO: 57585 - DNA, 29 bp, Artificial Sequence
  Synthetic
tgctattttctaagucaccctctaacuga

SEQ ID NO: 57586 - DNA, 23 bp, Artificial Sequence
  Synthetic
atcagcagcugttacctgttuga

SEQ ID NO: 57587 - DNA, 25 bp, Artificial Sequence
  Synthetic
ccacagcaaacagaacugtttuaga

SEQ ID NO: 57588 - DNA, 23 bp, Artificial Sequence
  Synthetic
gcacagtcatuttggagatccug

SEQ ID NO: 57589 - DNA, 24 bp, Artificial Sequence
  Synthetic
tctttttcccucaggctttctgut

SEQ ID NO: 57590 - DNA, 23 bp, Artificial Sequence
  Synthetic
ggccutagcaaaugcaaacagag

SEQ ID NO: 57591 - DNA, 28 bp, Artificial Sequence
  Synthetic
ccttgaaccgatuttagatggcatctua

SEQ ID NO: 57592 - DNA, 22 bp, Artificial Sequence
  Synthetic
ccatccaaggcaucttcctuct

SEQ ID NO: 57593 - DNA, 20 bp, Artificial Sequence
  Synthetic
gctgtgcccaguatcccauc

SEQ ID NO: 57594 - DNA, 20 bp, Artificial Sequence
  Synthetic
ccctaggcuccaccacugaa

SEQ ID NO: 57595 - DNA, 22 bp, Artificial Sequence
  Synthetic
caagccccutactugcaagact

SEQ ID NO: 57596 - DNA, 26 bp, Artificial Sequence
  Synthetic
acttcatcatccucttcatctgugga

SEQ ID NO: 57597 - DNA, 21 bp, Artificial Sequence
  Synthetic
tgaaccucacccaugccaaag

SEQ ID NO: 57598 - DNA, 20 bp, Artificial Sequence
  Synthetic
cgtgucagccaagaccuaga

SEQ ID NO: 57599 - DNA, 20 bp, Artificial Sequence
  Synthetic
ctcccagggacuctggagut

SEQ ID NO: 57600 - DNA, 22 bp, Artificial Sequence
  Synthetic
aggaugacgaaaaucggcaact

SEQ ID NO: 57601 - DNA, 20 bp, Artificial Sequence
  Synthetic
tgcuttggaaaugccccact

SEQ ID NO: 57602 - DNA, 23 bp, Artificial Sequence
  Synthetic
gagggucagttgaataugggcat

SEQ ID NO: 57603 - DNA, 24 bp, Artificial Sequence
  Synthetic
gggatucggaaagaggtatcugaa

SEQ ID NO: 57604 - DNA, 25 bp, Artificial Sequence
  Synthetic
gggatgggaauagagacattcauct

SEQ ID NO: 57605 - DNA, 21 bp, Artificial Sequence
  Synthetic
gutgaaaaggacucccaagcc

SEQ ID NO: 57606 - DNA, 24 bp, Artificial Sequence
  Synthetic
accaaagagguataccaacuccgt

SEQ ID NO: 57607 - DNA, 28 bp, Artificial Sequence
  Synthetic
tcacaagggatucagtggaatattgaut

SEQ ID NO: 57608 - DNA, 26 bp, Artificial Sequence
  Synthetic
ccccacacacuctgatactattuacc

SEQ ID NO: 57609 - DNA, 20 bp, Artificial Sequence
  Synthetic
gggaaucaaggcaccuccac

SEQ ID NO: 57610 - DNA, 24 bp, Artificial Sequence
  Synthetic
cacttacgaguctgaaacaaugcc

SEQ ID NO: 57611 - DNA, 28 bp, Artificial Sequence
  Synthetic
agccttcggttuatgtctttttgtttut

SEQ ID NO: 57612 - DNA, 31 bp, Artificial Sequence
  Synthetic
gtcagctuattatattcaattuaaacccacc

SEQ ID NO: 57613 - DNA, 22 bp, Artificial Sequence
  Synthetic
gcaaugagggaccagtacauga

SEQ ID NO: 57614 - DNA, 25 bp, Artificial Sequence
  Synthetic
ctctagcauaacaatgagcccauca

SEQ ID NO: 57615 - DNA, 23 bp, Artificial Sequence
  Synthetic
caacaaatuggaggtggcugaac

SEQ ID NO: 57616 - DNA, 25 bp, Artificial Sequence
  Synthetic
agagatatugatgcccuaagccaga

SEQ ID NO: 57617 - DNA, 28 bp, Artificial Sequence
  Synthetic
ccagtgacacaaaaguagaatgttctut

SEQ ID NO: 57618 - DNA, 23 bp, Artificial Sequence
  Synthetic
caacaaggtugggtgttttguga

SEQ ID NO: 57619 - DNA, 28 bp, Artificial Sequence
  Synthetic
attagatactuacctctcccugaaagca

SEQ ID NO: 57620 - DNA, 28 bp, Artificial Sequence
  Synthetic
acaaaatgtcttautctgggagagugaa

SEQ ID NO: 57621 - DNA, 29 bp, Artificial Sequence
  Synthetic
aaattacacgtauaagtcgacgagtugaa

SEQ ID NO: 57622 - DNA, 21 bp, Artificial Sequence
  Synthetic
tttgggttugcaacggatugt

SEQ ID NO: 57623 - DNA, 23 bp, Artificial Sequence
  Synthetic
ctgaacagagccucctcctttut

SEQ ID NO: 57624 - DNA, 20 bp, Artificial Sequence
  Synthetic
ctcuttgtgaggugcagggt

SEQ ID NO: 57625 - DNA, 24 bp, Artificial Sequence
  Synthetic
ccaagaaagcugcatctucgaaaa

SEQ ID NO: 57626 - DNA, 22 bp, Artificial Sequence
  Synthetic
catctggcuttccaguggaaca

SEQ ID NO: 57627 - DNA, 22 bp, Artificial Sequence
  Synthetic
gcatctugccaaacagctuagg

SEQ ID NO: 57628 - DNA, 20 bp, Artificial Sequence
  Synthetic
guagggacagaggcgguact

SEQ ID NO: 57629 - DNA, 20 bp, Artificial Sequence
  Synthetic
cgtcctuagcacgtgtugct

SEQ ID NO: 57630 - DNA, 23 bp, Artificial Sequence
  Synthetic
gggaggcuaagtgaacaucaaat

SEQ ID NO: 57631 - DNA, 25 bp, Artificial Sequence
  Synthetic
gttgtttttguagccaaagcctuct

SEQ ID NO: 57632 - DNA, 24 bp, Artificial Sequence
  Synthetic
tctttggtcugaaccagaatucgg

SEQ ID NO: 57633 - DNA, 28 bp, Artificial Sequence
  Synthetic
tgtttcattggcutggtacctttuagaa

SEQ ID NO: 57634 - DNA, 33 bp, Artificial Sequence
  Synthetic
atcataaatuaagctgatgaaaaucaaagacaa

SEQ ID NO: 57635 - DNA, 24 bp, Artificial Sequence
  Synthetic
gggatcccaaugatatgttucgat

SEQ ID NO: 57636 - DNA, 21 bp, Artificial Sequence
  Synthetic
ccttggcauttggtctguggt

SEQ ID NO: 57637 - DNA, 28 bp, Artificial Sequence
  Synthetic
cagatagcctcucctttatttgaaugga

SEQ ID NO: 57638 - DNA, 27 bp, Artificial Sequence
  Synthetic
gctccaaagaguagacattgtttcugt

SEQ ID NO: 57639 - DNA, 20 bp, Artificial Sequence
  Synthetic
gcttctugcccaccagauga

SEQ ID NO: 57640 - DNA, 26 bp, Artificial Sequence
  Synthetic
ccccttaaaauaaccattgtcccuca

SEQ ID NO: 57641 - DNA, 28 bp, Artificial Sequence
  Synthetic
accatgaccagguaaaaagaatttccut

SEQ ID NO: 57642 - DNA, 28 bp, Artificial Sequence
  Synthetic
tgagttugaagaaacagaagaaccugat

SEQ ID NO: 57643 - DNA, 28 bp, Artificial Sequence
  Synthetic
gaaaatcctuaccaatactccauccaca

SEQ ID NO: 57644 - DNA, 20 bp, Artificial Sequence
  Synthetic
agcttcugcagctgcttcut

SEQ ID NO: 57645 - DNA, 21 bp, Artificial Sequence
  Synthetic
ccatgttccutgccacctcuc

SEQ ID NO: 57646 - DNA, 23 bp, Artificial Sequence
  Synthetic
acttctccagcguctctttgaug

SEQ ID NO: 57647 - DNA, 23 bp, Artificial Sequence
  Synthetic
tcucttttatagugccccaccct

SEQ ID NO: 57648 - DNA, 22 bp, Artificial Sequence
  Synthetic
ctcccccugttctatgagcuct

SEQ ID NO: 57649 - DNA, 22 bp, Artificial Sequence
  Synthetic
gctggcauccactttacccuaa

SEQ ID NO: 57650 - DNA, 25 bp, Artificial Sequence
  Synthetic
cccaaagccagauacagtacaauca

SEQ ID NO: 57651 - DNA, 21 bp, Artificial Sequence
  Synthetic
cccatgcagutctgctcctut

SEQ ID NO: 57652 - DNA, 24 bp, Artificial Sequence
  Synthetic
gggaagggaagugatttgaugcaa

SEQ ID NO: 57653 - DNA, 24 bp, Artificial Sequence
  Synthetic
agtgctgatcuagaatggtgctuc

SEQ ID NO: 57654 - DNA, 18 bp, Artificial Sequence
  Synthetic
ccgccgcaucttcuggaa

SEQ ID NO: 57655 - DNA, 18 bp, Artificial Sequence
  Synthetic
gucugaccaggcacgcat

SEQ ID NO: 57656 - DNA, 21 bp, Artificial Sequence
  Synthetic
aggguggaagagccaacagua

SEQ ID NO: 57657 - DNA, 20 bp, Artificial Sequence
  Synthetic
gaggagtucacacgccucaa

SEQ ID NO: 57658 - DNA, 21 bp, Artificial Sequence
  Synthetic
ccagcgtcutagctctgctut

SEQ ID NO: 57659 - DNA, 22 bp, Artificial Sequence
  Synthetic
gtgtcccacccuaaccatgtut

SEQ ID NO: 57660 - DNA, 21 bp, Artificial Sequence
  Synthetic
ctctctguccacccaggtgua

SEQ ID NO: 57661 - DNA, 21 bp, Artificial Sequence
  Synthetic
ctaccugcgcaagucagagaa

SEQ ID NO: 57662 - DNA, 27 bp, Artificial Sequence
  Synthetic
tgcacacatugaggagttgaaaauact

SEQ ID NO: 57663 - DNA, 21 bp, Artificial Sequence
  Synthetic
acagatgtcugtgggttgcug

SEQ ID NO: 57664 - DNA, 21 bp, Artificial Sequence
  Synthetic
ccactuaggaccccaagucca

SEQ ID NO: 57665 - DNA, 22 bp, Artificial Sequence
  Synthetic
ggaautctcaccuccccaaagt

SEQ ID NO: 57666 - DNA, 28 bp, Artificial Sequence
  Synthetic
agccaccagcaauaaatttttaatgugt

SEQ ID NO: 57667 - DNA, 24 bp, Artificial Sequence
  Synthetic
ggattgcagaacagcauggataug

SEQ ID NO: 57668 - DNA, 21 bp, Artificial Sequence
  Synthetic
gccccacagccucttguaaaa

SEQ ID NO: 57669 - DNA, 23 bp, Artificial Sequence
  Synthetic
caaacgaaacugatgccuccaat

SEQ ID NO: 57670 - DNA, 24 bp, Artificial Sequence
  Synthetic
acagaguttctugaaagccacagt

SEQ ID NO: 57671 - DNA, 27 bp, Artificial Sequence
  Synthetic
gctcttaaaattucctgacatccccut

SEQ ID NO: 57672 - DNA, 23 bp, Artificial Sequence
  Synthetic
ccaatgaggutcttgcatuccat

SEQ ID NO: 57673 - DNA, 27 bp, Artificial Sequence
  Synthetic
cagaaggaaauacagccagtagugaaa

SEQ ID NO: 57674 - DNA, 24 bp, Artificial Sequence
  Synthetic
tcatccuaccaggaccattuacca

SEQ ID NO: 57675 - DNA, 28 bp, Artificial Sequence
  Synthetic
cttaaagcacacacaacutgaattucct

SEQ ID NO: 57676 - DNA, 23 bp, Artificial Sequence
  Synthetic
cacagagcuctagtgccaaauga

SEQ ID NO: 57677 - DNA, 24 bp, Artificial Sequence
  Synthetic
cagacugcaagaataccaugggat

SEQ ID NO: 57678 - DNA, 21 bp, Artificial Sequence
  Synthetic
acaaacacaccuguacagcca

SEQ ID NO: 57679 - DNA, 26 bp, Artificial Sequence
  Synthetic
tcaatgagtgugacctgaauccaaat

SEQ ID NO: 57680 - DNA, 27 bp, Artificial Sequence
  Synthetic
aatcttgggtttucttgcttgtcttuc

SEQ ID NO: 57681 - DNA, 21 bp, Artificial Sequence
  Synthetic
tgtacattgcuccctggctuc

SEQ ID NO: 57682 - DNA, 21 bp, Artificial Sequence
  Synthetic
tccgacucacctgtgagguaa

SEQ ID NO: 57683 - DNA, 21 bp, Artificial Sequence
  Synthetic
aacutccaaaccuccgaccag

SEQ ID NO: 57684 - DNA, 21 bp, Artificial Sequence
  Synthetic
cuctugccccaaacaaagaca

SEQ ID NO: 57685 - DNA, 17 bp, Artificial Sequence
  Synthetic
cgcagacucuccgcaga

SEQ ID NO: 57686 - DNA, 22 bp, Artificial Sequence
  Synthetic
cggttccugaggaatuggaagt

SEQ ID NO: 57687 - DNA, 20 bp, Artificial Sequence
  Synthetic
ctttcggaccuggtggtcut

SEQ ID NO: 57688 - DNA, 19 bp, Artificial Sequence
  Synthetic
ggagcucaggctugcagag

SEQ ID NO: 57689 - DNA, 19 bp, Artificial Sequence
  Synthetic
acaggacggcgaucttgug

SEQ ID NO: 57690 - DNA, 19 bp, Artificial Sequence
  Synthetic
cggacuttguggcggaact

SEQ ID NO: 57691 - DNA, 19 bp, Artificial Sequence
  Synthetic
ccttgcguggagagctgua

SEQ ID NO: 57692 - DNA, 18 bp, Artificial Sequence
  Synthetic
gctggcuctgggucagga

SEQ ID NO: 57693 - DNA, 23 bp, Artificial Sequence
  Synthetic
gcauctaatgcctucgagaacct

SEQ ID NO: 57694 - DNA, 27 bp, Artificial Sequence
  Synthetic
tcattacctgttcutttgtctgagcut

SEQ ID NO: 57695 - DNA, 25 bp, Artificial Sequence
  Synthetic
gcactcacgaugtttcttttcucca

SEQ ID NO: 57696 - DNA, 20 bp, Artificial Sequence
  Synthetic
agcaagttugccgcctttug

SEQ ID NO: 57697 - DNA, 23 bp, Artificial Sequence
  Synthetic
cgtctgtgaugtcaatggaugct

SEQ ID NO: 57698 - DNA, 20 bp, Artificial Sequence
  Synthetic
gaggtgacgucagggucaat

SEQ ID NO: 57699 - DNA, 21 bp, Artificial Sequence
  Synthetic
gctcagcttugggtgatgtuc

SEQ ID NO: 57700 - DNA, 24 bp, Artificial Sequence
  Synthetic
tcctctuaagccctgauagcagaa

SEQ ID NO: 57701 - DNA, 21 bp, Artificial Sequence
  Synthetic
ggtucaagccctgcuaaggag

SEQ ID NO: 57702 - DNA, 22 bp, Artificial Sequence
  Synthetic
cagtggcuatgtccuggaaact

SEQ ID NO: 57703 - DNA, 21 bp, Artificial Sequence
  Synthetic
gggcatggcucacattctuaa

SEQ ID NO: 57704 - DNA, 24 bp, Artificial Sequence
  Synthetic
gaggaaugagaaccgcttttgtut

SEQ ID NO: 57705 - DNA, 22 bp, Artificial Sequence
  Synthetic
caccgttgutgtaggacuggag

SEQ ID NO: 57706 - DNA, 19 bp, Artificial Sequence
  Synthetic
acacagggcacgaugaugt

SEQ ID NO: 57707 - DNA, 18 bp, Artificial Sequence
  Synthetic
ctctucagcccgctguca

SEQ ID NO: 57708 - DNA, 22 bp, Artificial Sequence
  Synthetic
gcctctgtucccatctguacct

SEQ ID NO: 57709 - DNA, 23 bp, Artificial Sequence
  Synthetic
cgattggcagaacugttcgctua

SEQ ID NO: 57710 - DNA, 22 bp, Artificial Sequence
  Synthetic
gggaatgcugaccatcuccaat

SEQ ID NO: 57711 - DNA, 20 bp, Artificial Sequence
  Synthetic
agcgguaggacttgcatgug

SEQ ID NO: 57712 - DNA, 28 bp, Artificial Sequence
  Synthetic
gaagaaatggaaaauaaggtgtcagugg

SEQ ID NO: 57713 - DNA, 28 bp, Artificial Sequence
  Synthetic
tgactggttucacaggtgattagaaaug

SEQ ID NO: 57714 - DNA, 27 bp, Artificial Sequence
  Synthetic
gcaggtttaagaagaucattcccaucc

SEQ ID NO: 57715 - DNA, 24 bp, Artificial Sequence
  Synthetic
gctacagactucagtgtggttgut

SEQ ID NO: 57716 - DNA, 21 bp, Artificial Sequence
  Synthetic
acagtcccuccagucacaact

SEQ ID NO: 57717 - DNA, 22 bp, Artificial Sequence
  Synthetic
atctgccauggctttctctcug

SEQ ID NO: 57718 - DNA, 21 bp, Artificial Sequence
  Synthetic
gaaggcugctaaggucaccat

SEQ ID NO: 57719 - DNA, 28 bp, Artificial Sequence
  Synthetic
cacatcacagaacaccucataaaatcuc

SEQ ID NO: 57720 - DNA, 26 bp, Artificial Sequence
  Synthetic
ttctggcagagautttgtugaagaga

SEQ ID NO: 57721 - DNA, 22 bp, Artificial Sequence
  Synthetic
ccccaagaaugaaagtgcaugg

SEQ ID NO: 57722 - DNA, 20 bp, Artificial Sequence
  Synthetic
gaaggccucagatggcauca

SEQ ID NO: 57723 - DNA, 19 bp, Artificial Sequence
  Synthetic
cacctgccucctcctucac

SEQ ID NO: 57724 - DNA, 22 bp, Artificial Sequence
  Synthetic
tgcagcugaacttcggaatuct

SEQ ID NO: 57725 - DNA, 28 bp, Artificial Sequence
  Synthetic
tcatattacttcaguagtcccatgugga

SEQ ID NO: 57726 - DNA, 27 bp, Artificial Sequence
  Synthetic
agttgcaaatataugtcttccacccut

SEQ ID NO: 57727 - DNA, 20 bp, Artificial Sequence
  Synthetic
gcttcagugtcagggtucca

SEQ ID NO: 57728 - DNA, 22 bp, Artificial Sequence
  Synthetic
gctgcugaaagcctucacaaga

SEQ ID NO: 57729 - DNA, 20 bp, Artificial Sequence
  Synthetic
ccatgggugggctataggut

SEQ ID NO: 57730 - DNA, 28 bp, Artificial Sequence
  Synthetic
tcctgctctguatccaatgctattuaac

SEQ ID NO: 57731 - DNA, 30 bp, Artificial Sequence
  Synthetic
aggcttattucaaacaagtcactctatuca

SEQ ID NO: 57732 - DNA, 25 bp, Artificial Sequence
  Synthetic
tgaaccttttgaaugactgcaguga

SEQ ID NO: 57733 - DNA, 26 bp, Artificial Sequence
  Synthetic
ctcttacatgccagutctctaggtut

SEQ ID NO: 57734 - DNA, 28 bp, Artificial Sequence
  Synthetic
ctcctggatccuttattacgaattguga

SEQ ID NO: 57735 - DNA, 21 bp, Artificial Sequence
  Synthetic
ggagaaggugccttgctucat

SEQ ID NO: 57736 - DNA, 26 bp, Artificial Sequence
  Synthetic
tgctgtttacaaaucagctgacagua

SEQ ID NO: 57737 - DNA, 22 bp, Artificial Sequence
  Synthetic
gacccagguatgcaagaagugt

SEQ ID NO: 57738 - DNA, 26 bp, Artificial Sequence
  Synthetic
tgagccttuaaagaaagctactgugt

SEQ ID NO: 57739 - DNA, 28 bp, Artificial Sequence
  Synthetic
ccaaccaaugcaaagttaaagtuagagt

SEQ ID NO: 57740 - DNA, 24 bp, Artificial Sequence
  Synthetic
tcagacacaaaggcuccuaaaagg

SEQ ID NO: 57741 - DNA, 29 bp, Artificial Sequence
  Synthetic
catgtactcucccaccttattttcaauga

SEQ ID NO: 57742 - DNA, 25 bp, Artificial Sequence
  Synthetic
cagucttctacttcucacccaaaca

SEQ ID NO: 57743 - DNA, 28 bp, Artificial Sequence
  Synthetic
gcacgaaggugaattaaaaucaaaagga

SEQ ID NO: 57744 - DNA, 20 bp, Artificial Sequence
  Synthetic
ggccccuctaaggtggauct

SEQ ID NO: 57745 - DNA, 22 bp, Artificial Sequence
  Synthetic
aaagctcccucacttctgucac

SEQ ID NO: 57746 - DNA, 22 bp, Artificial Sequence
  Synthetic
ggctagcccauctccuaacact

SEQ ID NO: 57747 - DNA, 22 bp, Artificial Sequence
  Synthetic
caacctggaugccatcaaaguc

SEQ ID NO: 57748 - DNA, 20 bp, Artificial Sequence
  Synthetic
gctctggugcatcatugggt

SEQ ID NO: 57749 - DNA, 25 bp, Artificial Sequence
  Synthetic
ccctctgacugttcctatgttcuct

SEQ ID NO: 57750 - DNA, 19 bp, Artificial Sequence
  Synthetic
cgcggcuccgctauaaaac

SEQ ID NO: 57751 - DNA, 17 bp, Artificial Sequence
  Synthetic
gggagcucaccugcact

SEQ ID NO: 57752 - DNA, 21 bp, Artificial Sequence
  Synthetic
caaagcagaagcacuggaguc

SEQ ID NO: 57753 - DNA, 25 bp, Artificial Sequence
  Synthetic
ttctcacccacautgatgaacugaa

SEQ ID NO: 57754 - DNA, 21 bp, Artificial Sequence
  Synthetic
ccgaggguttgggagtauacc

SEQ ID NO: 57755 - DNA, 28 bp, Artificial Sequence
  Synthetic
gttaacgtagutctcatctttcuccact

SEQ ID NO: 57756 - DNA, 23 bp, Artificial Sequence
  Synthetic
ccccttccacuccttcttcauct

SEQ ID NO: 57757 - DNA, 21 bp, Artificial Sequence
  Synthetic
cttccctccuctctccagugt

SEQ ID NO: 57758 - DNA, 19 bp, Artificial Sequence
  Synthetic
atgttgacagcgucgccua

SEQ ID NO: 57759 - DNA, 18 bp, Artificial Sequence
  Synthetic
ccaccuggagcggugaac

SEQ ID NO: 57760 - DNA, 22 bp, Artificial Sequence
  Synthetic
gcatccugaggaagucacaacc

SEQ ID NO: 57761 - DNA, 24 bp, Artificial Sequence
  Synthetic
tgaggaggacugaaatacggguaa

SEQ ID NO: 57762 - DNA, 21 bp, Artificial Sequence
  Synthetic
gcctcugagagggagaccauc

SEQ ID NO: 57763 - DNA, 22 bp, Artificial Sequence
  Synthetic
ggcctccuacatggtctucaac

SEQ ID NO: 57764 - DNA, 17 bp, Artificial Sequence
  Synthetic
gcgugucaccggaggat

SEQ ID NO: 57765 - DNA, 18 bp, Artificial Sequence
  Synthetic
gguctctcugcgggcaac

SEQ ID NO: 57766 - DNA, 21 bp, Artificial Sequence
  Synthetic
gctacaagcuggagaaccuga

SEQ ID NO: 57767 - DNA, 17 bp, Artificial Sequence
  Synthetic
ggtgcgugggtgucgat

SEQ ID NO: 57768 - DNA, 22 bp, Artificial Sequence
  Synthetic
ccatcccatucatcacccguat

SEQ ID NO: 57769 - DNA, 20 bp, Artificial Sequence
  Synthetic
tctgcaggucgtaccatgug

SEQ ID NO: 57770 - DNA, 21 bp, Artificial Sequence
  Synthetic
ggccugcaccagaaugaagat

SEQ ID NO: 57771 - DNA, 28 bp, Artificial Sequence
  Synthetic
cctgtaactaatuggtgattgtgtcugt

SEQ ID NO: 57772 - DNA, 19 bp, Artificial Sequence
  Synthetic
gccugacgaacacgcagua

SEQ ID NO: 57773 - DNA, 23 bp, Artificial Sequence
  Synthetic
cttggctctuaacctccacctuc

SEQ ID NO: 57774 - DNA, 31 bp, Artificial Sequence
  Synthetic
aaaatagatttguaggccactuaggaaaact

SEQ ID NO: 57775 - DNA, 17 bp, Artificial Sequence
  Synthetic
ggcuggccaccaucaca

SEQ ID NO: 57776 - DNA, 27 bp, Artificial Sequence
  Synthetic
cgcattataagcgaautcatccttugt

SEQ ID NO: 57777 - DNA, 24 bp, Artificial Sequence
  Synthetic
cugggacgtcuaaacaaccaaaag

SEQ ID NO: 57778 - DNA, 30 bp, Artificial Sequence
  Synthetic
cattgtataugaagaacagagcattugcat

SEQ ID NO: 57779 - DNA, 29 bp, Artificial Sequence
  Synthetic
ttttaaaautgtaacagaugccaaaacca

SEQ ID NO: 57780 - DNA, 22 bp, Artificial Sequence
  Synthetic
ggcagtggaagutctggaguat

SEQ ID NO: 57781 - DNA, 29 bp, Artificial Sequence
  Synthetic
cagtctccaagtuaaagccaaaatgaaut

SEQ ID NO: 57782 - DNA, 17 bp, Artificial Sequence
  Synthetic
cgtacgcccugctgcut

SEQ ID NO: 57783 - DNA, 17 bp, Artificial Sequence
  Synthetic
gccccaggucggatcuc

SEQ ID NO: 57784 - DNA, 21 bp, Artificial Sequence
  Synthetic
ccaaacaguggcccttucagt

SEQ ID NO: 57785 - DNA, 28 bp, Artificial Sequence
  Synthetic
ttcaggacctcauttcataaactcctut

SEQ ID NO: 57786 - DNA, 18 bp, Artificial Sequence
  Synthetic
gcagccuctgacctcuga

SEQ ID NO: 57787 - DNA, 24 bp, Artificial Sequence
  Synthetic
aguaatgauaaggaccccacccat

SEQ ID NO: 57788 - DNA, 21 bp, Artificial Sequence
  Synthetic
gggtgauacacaagccugacc

SEQ ID NO: 57789 - DNA, 21 bp, Artificial Sequence
  Synthetic
ggtgctgaugtcaccgaugat

SEQ ID NO: 57790 - DNA, 27 bp, Artificial Sequence
  Synthetic
ctaaacttagtcuggcaggagtuaaca

SEQ ID NO: 57791 - DNA, 28 bp, Artificial Sequence
  Synthetic
tggaaagaaatugagagcagctaatcut

SEQ ID NO: 57792 - DNA, 17 bp, Artificial Sequence
  Synthetic
cgctgccugaggacgua

SEQ ID NO: 57793 - DNA, 18 bp, Artificial Sequence
  Synthetic
gggtgugcagtcgaggug

SEQ ID NO: 57794 - DNA, 20 bp, Artificial Sequence
  Synthetic
ggttgggucggtctgaugat

SEQ ID NO: 57795 - DNA, 18 bp, Artificial Sequence
  Synthetic
ccagcccauccgcctuac

SEQ ID NO: 57796 - DNA, 19 bp, Artificial Sequence
  Synthetic
ggtuccgcaggacgaugag

SEQ ID NO: 57797 - DNA, 22 bp, Artificial Sequence
  Synthetic
ctcccagaacccucttcttugg

SEQ ID NO: 57798 - DNA, 22 bp, Artificial Sequence
  Synthetic
ccagatgaagutgccagaguct

SEQ ID NO: 57799 - DNA, 23 bp, Artificial Sequence
  Synthetic
gctcacugccatatgcattucca

SEQ ID NO: 57800 - DNA, 21 bp, Artificial Sequence
  Synthetic
gctccaagccutgcattguct

SEQ ID NO: 57801 - DNA, 20 bp, Artificial Sequence
  Synthetic
aggctcauggtgtctuccac

SEQ ID NO: 57802 - DNA, 21 bp, Artificial Sequence
  Synthetic
gggttugggaggctctgtuac

SEQ ID NO: 57803 - DNA, 21 bp, Artificial Sequence
  Synthetic
aatcatggccutcagggacuc

SEQ ID NO: 57804 - DNA, 20 bp, Artificial Sequence
  Synthetic
gaaaatcgugcgcagagucc

SEQ ID NO: 57805 - DNA, 23 bp, Artificial Sequence
  Synthetic
gatccattcuaagcctcgcctua

SEQ ID NO: 57806 - DNA, 21 bp, Artificial Sequence
  Synthetic
tcgtgatcccugatccctuct

SEQ ID NO: 57807 - DNA, 21 bp, Artificial Sequence
  Synthetic
gcgagctucatcatcatgugg

SEQ ID NO: 57808 - DNA, 23 bp, Artificial Sequence
  Synthetic
cgatgaggaugagaacatggugt

SEQ ID NO: 57809 - DNA, 26 bp, Artificial Sequence
  Synthetic
ccaccttgagacaautatagccaaug

SEQ ID NO: 57810 - DNA, 18 bp, Artificial Sequence
  Synthetic
agcagccccuctgtucct

SEQ ID NO: 57811 - DNA, 18 bp, Artificial Sequence
  Synthetic
gctcucccagaggcucac

SEQ ID NO: 57812 - DNA, 18 bp, Artificial Sequence
  Synthetic
gccugagggagggagaug

SEQ ID NO: 57813 - DNA, 22 bp, Artificial Sequence
  Synthetic
actattgaaccugccccaggua

SEQ ID NO: 57814 - DNA, 18 bp, Artificial Sequence
  Synthetic
ccgacugagcctccucca

SEQ ID NO: 57815 - DNA, 19 bp, Artificial Sequence
  Synthetic
cccagcagugctccucaac

SEQ ID NO: 57816 - DNA, 20 bp, Artificial Sequence
  Synthetic
cagcctcagaguccccttug

SEQ ID NO: 57817 - DNA, 20 bp, Artificial Sequence
  Synthetic
ggcaccaugggagaaaggua

SEQ ID NO: 57818 - DNA, 17 bp, Artificial Sequence
  Synthetic
ggaggccugcgacaugg

SEQ ID NO: 57819 - DNA, 24 bp, Artificial Sequence
  Synthetic
cccccattcuacagaaaaggaugt

SEQ ID NO: 57820 - DNA, 19 bp, Artificial Sequence
  Synthetic
agcaggccaaccguaugag

SEQ ID NO: 57821 - DNA, 21 bp, Artificial Sequence
  Synthetic
gggcugaatggauggaaacga

SEQ ID NO: 57822 - DNA, 17 bp, Artificial Sequence
  Synthetic
tccagcguggcctucac

SEQ ID NO: 57823 - DNA, 17 bp, Artificial Sequence
  Synthetic
gctgggcuctcgtcuct

SEQ ID NO: 57824 - DNA, 21 bp, Artificial Sequence
  Synthetic
caguagaaggccgucaccaag

SEQ ID NO: 57825 - DNA, 25 bp, Artificial Sequence
  Synthetic
ttttgttccugcgatgatgctttut

SEQ ID NO: 57826 - DNA, 25 bp, Artificial Sequence
  Synthetic
acaggaaugtaagcuagggagaagt

SEQ ID NO: 57827 - DNA, 20 bp, Artificial Sequence
  Synthetic
cgagtgtcggucttccaguc

SEQ ID NO: 57828 - DNA, 25 bp, Artificial Sequence
  Synthetic
gtgaaaagucaaatggtgacugcaa

SEQ ID NO: 57829 - DNA, 27 bp, Artificial Sequence
  Synthetic
cagtccctaaacutgaactccattuct

SEQ ID NO: 57830 - DNA, 22 bp, Artificial Sequence
  Synthetic
gagtattgaccugggctuggat

SEQ ID NO: 57831 - DNA, 21 bp, Artificial Sequence
  Synthetic
cctggttuctcctggttuggt

SEQ ID NO: 57832 - DNA, 20 bp, Artificial Sequence
  Synthetic
cgcccaccuttgatgcugat

SEQ ID NO: 57833 - DNA, 18 bp, Artificial Sequence
  Synthetic
ggacgugctgaccgugag

SEQ ID NO: 57834 - DNA, 22 bp, Artificial Sequence
  Synthetic
agagagcgagcaagcutatugg

SEQ ID NO: 57835 - DNA, 23 bp, Artificial Sequence
  Synthetic
ccaacaacguggtgtauaagcag

SEQ ID NO: 57836 - DNA, 21 bp, Artificial Sequence
  Synthetic
gagaagutctucccacaccgt

SEQ ID NO: 57837 - DNA, 26 bp, Artificial Sequence
  Synthetic
ggttggatgauaaaggtctggcttut

SEQ ID NO: 57838 - DNA, 20 bp, Artificial Sequence
  Synthetic
ctggcgcugcaggtuaaaag

SEQ ID NO: 57839 - DNA, 26 bp, Artificial Sequence
  Synthetic
ctatctgccaugatgatgtcaucgaa

SEQ ID NO: 57840 - DNA, 26 bp, Artificial Sequence
  Synthetic
tgcctttggcuaaatagcttatgucc

SEQ ID NO: 57841 - DNA, 21 bp, Artificial Sequence
  Synthetic
acttcuccggagctgtacuga

SEQ ID NO: 57842 - DNA, 25 bp, Artificial Sequence
  Synthetic
gcaguaagtacaatugagagaggct

SEQ ID NO: 57843 - DNA, 27 bp, Artificial Sequence
  Synthetic
ttgatttgtctugtttgctttctgugt

SEQ ID NO: 57844 - DNA, 27 bp, Artificial Sequence
  Synthetic
gguatggtgaatcatuaggaaccaaga

SEQ ID NO: 57845 - DNA, 21 bp, Artificial Sequence
  Synthetic
cagggaccaaaaccugcatug

SEQ ID NO: 57846 - DNA, 20 bp, Artificial Sequence
  Synthetic
gtcccagcagucactgacuc

SEQ ID NO: 57847 - DNA, 20 bp, Artificial Sequence
  Synthetic
ttccccagguggacctctua

SEQ ID NO: 57848 - DNA, 25 bp, Artificial Sequence
  Synthetic
gaattgttatucaaaggacggcgut

SEQ ID NO: 57849 - DNA, 27 bp, Artificial Sequence
  Synthetic
gagagctggtaauttggtcattgttut

SEQ ID NO: 57850 - DNA, 19 bp, Artificial Sequence
  Synthetic
ccugggaccccgaagtcua

SEQ ID NO: 57851 - DNA, 21 bp, Artificial Sequence
  Synthetic
tcccaggaaggagauccagug

SEQ ID NO: 57852 - DNA, 21 bp, Artificial Sequence
  Synthetic
ggaaagcgcagaugauccact

SEQ ID NO: 57853 - DNA, 23 bp, Artificial Sequence
  Synthetic
agcgccugaactggatttacuac

SEQ ID NO: 57854 - DNA, 28 bp, Artificial Sequence
  Synthetic
tgtaccacaaucaacctuaaaggaaagt

SEQ ID NO: 57855 - DNA, 29 bp, Artificial Sequence
  Synthetic
tggtgatctgaugcttaaggatgtaatut

SEQ ID NO: 57856 - DNA, 23 bp, Artificial Sequence
  Synthetic
gctgcttacutacagaggtucca

SEQ ID NO: 57857 - DNA, 22 bp, Artificial Sequence
  Synthetic
agacagtugggtgaagtugcat

SEQ ID NO: 57858 - DNA, 24 bp, Artificial Sequence
  Synthetic
gagauaaccacagcagcagaugat

SEQ ID NO: 57859 - DNA, 29 bp, Artificial Sequence
  Synthetic
ttggcttatgccutgagaattattuacct

SEQ ID NO: 57860 - DNA, 26 bp, Artificial Sequence
  Synthetic
gggtttctttutctctgattcaucca

SEQ ID NO: 57861 - DNA, 28 bp, Artificial Sequence
  Synthetic
ctaaccaataaugccatggtatgtcuct

SEQ ID NO: 57862 - DNA, 22 bp, Artificial Sequence
  Synthetic
cctgaggcautcccatctugaa

SEQ ID NO: 57863 - DNA, 28 bp, Artificial Sequence
  Synthetic
accacaccgatutacctagagttcuaat

SEQ ID NO: 57864 - DNA, 30 bp, Artificial Sequence
  Synthetic
ttgtgtagaaaugacaagtctcagaugaaa

SEQ ID NO: 57865 - DNA, 28 bp, Artificial Sequence
  Synthetic
cgccagataucaattaggcauagagaaa

SEQ ID NO: 57866 - DNA, 28 bp, Artificial Sequence
  Synthetic
gatatcagtagttuctccaaggcttuct

SEQ ID NO: 57867 - DNA, 25 bp, Artificial Sequence
  Synthetic
cagttgccttucacttttctgtuga

SEQ ID NO: 57868 - DNA, 22 bp, Artificial Sequence
  Synthetic
caggcagtuggcagttgauaga

SEQ ID NO: 57869 - DNA, 23 bp, Artificial Sequence
  Synthetic
gctttaaccuatgtgctccugct

SEQ ID NO: 57870 - DNA, 27 bp, Artificial Sequence
  Synthetic
aatagaggtgtugttgatagactgugg

SEQ ID NO: 57871 - DNA, 25 bp, Artificial Sequence
  Synthetic
cagcctcaacuacactcagttcaut

SEQ ID NO: 57872 - DNA, 28 bp, Artificial Sequence
  Synthetic
gatgaacattugactcaactugagaagg

SEQ ID NO: 57873 - DNA, 26 bp, Artificial Sequence
  Synthetic
cggatttgttaacaugctcccaatut

SEQ ID NO: 57874 - DNA, 28 bp, Artificial Sequence
  Synthetic
cagattcttccaggautgtctgttauga

SEQ ID NO: 57875 - DNA, 27 bp, Artificial Sequence
  Synthetic
cttgcctgccaaautttgcttatttut

SEQ ID NO: 57876 - DNA, 28 bp, Artificial Sequence
  Synthetic
tcctctataaggaaaaucccctttugga

SEQ ID NO: 57877 - DNA, 22 bp, Artificial Sequence
  Synthetic
ccagaggcuaactcggagacut

SEQ ID NO: 57878 - DNA, 22 bp, Artificial Sequence
  Synthetic
ccagagcagacauaaacgtugg

SEQ ID NO: 57879 - DNA, 26 bp, Artificial Sequence
  Synthetic
catggcttaaucggtaataggcuaca

SEQ ID NO: 57880 - DNA, 24 bp, Artificial Sequence
  Synthetic
acgaatcaacaugcagaactcucc

SEQ ID NO: 57881 - DNA, 21 bp, Artificial Sequence
  Synthetic
gcaaggaugggtctcttuggt

SEQ ID NO: 57882 - DNA, 24 bp, Artificial Sequence
  Synthetic
ggagacctuggtttcctttgtugt

SEQ ID NO: 57883 - DNA, 23 bp, Artificial Sequence
  Synthetic
ccccagcuggaaattcatttcut

SEQ ID NO: 57884 - DNA, 24 bp, Artificial Sequence
  Synthetic
agggctgttuctaaacaagctuct

SEQ ID NO: 57885 - DNA, 24 bp, Artificial Sequence
  Synthetic
gcaggttatgaguacctctgcaut

SEQ ID NO: 57886 - DNA, 19 bp, Artificial Sequence
  Synthetic
gggttugcctggtgaucct

SEQ ID NO: 57887 - DNA, 28 bp, Artificial Sequence
  Synthetic
catttauaactcaagccugggagaagaa

SEQ ID NO: 57888 - DNA, 26 bp, Artificial Sequence
  Synthetic
gttagaatugcagttctgtgtuggaa

SEQ ID NO: 57889 - DNA, 25 bp, Artificial Sequence
  Synthetic
ggtttaccagaaagucctggaaguc

SEQ ID NO: 57890 - DNA, 21 bp, Artificial Sequence
  Synthetic
ccaccuccacccttttcagug

SEQ ID NO: 57891 - DNA, 23 bp, Artificial Sequence
  Synthetic
ctgcccagautgggtatttggua

SEQ ID NO: 57892 - DNA, 27 bp, Artificial Sequence
  Synthetic
cctgttguaaaaaccagaggaaguaga

SEQ ID NO: 57893 - DNA, 28 bp, Artificial Sequence
  Synthetic
agtcctacgtuaggtatatgttgcuagt

SEQ ID NO: 57894 - DNA, 26 bp, Artificial Sequence
  Synthetic
caacaggaggaggauatgaaagugat

SEQ ID NO: 57895 - DNA, 29 bp, Artificial Sequence
  Synthetic
tgccttgatatgutctaaccaatgaguag

SEQ ID NO: 57896 - DNA, 18 bp, Artificial Sequence
  Synthetic
ggccttcucgcccaagut

SEQ ID NO: 57897 - DNA, 17 bp, Artificial Sequence
  Synthetic
cacacgcutcccuccgt

SEQ ID NO: 57898 - DNA, 20 bp, Artificial Sequence
  Synthetic
agcgcugtcactucaagagg

SEQ ID NO: 57899 - DNA, 20 bp, Artificial Sequence
  Synthetic
tgagugagggagcgggaaua

SEQ ID NO: 57900 - DNA, 23 bp, Artificial Sequence
  Synthetic
ctccagguggtaggagctauagg

SEQ ID NO: 57901 - DNA, 20 bp, Artificial Sequence
  Synthetic
cgaggtcucctgttcgctug

SEQ ID NO: 57902 - DNA, 17 bp, Artificial Sequence
  Synthetic
gggctcagguggaggug

SEQ ID NO: 57903 - DNA, 19 bp, Artificial Sequence
  Synthetic
tccacccucggugagaaga

SEQ ID NO: 57904 - DNA, 21 bp, Artificial Sequence
  Synthetic
cgtttctugggaatggccuga

SEQ ID NO: 57905 - DNA, 21 bp, Artificial Sequence
  Synthetic
agagggugtgcaggugaaaag

SEQ ID NO: 57906 - DNA, 20 bp, Artificial Sequence
  Synthetic
gcacctucacccgactucgt

SEQ ID NO: 57907 - DNA, 28 bp, Artificial Sequence
  Synthetic
tggtgaagtagcuctcttcatagtaguc

SEQ ID NO: 57908 - DNA, 21 bp, Artificial Sequence
  Synthetic
ggcugctttucaggaccacat

SEQ ID NO: 57909 - DNA, 26 bp, Artificial Sequence
  Synthetic
ctcatcttuggagtacgttcttucca

SEQ ID NO: 57910 - DNA, 29 bp, Artificial Sequence
  Synthetic
ttggaattaaguttgtggaagcuaagagt

SEQ ID NO: 57911 - DNA, 27 bp, Artificial Sequence
  Synthetic
ccagcctctacauctctcagtttauca

SEQ ID NO: 57912 - DNA, 23 bp, Artificial Sequence
  Synthetic
gagccctgcaguttctttccaua

SEQ ID NO: 57913 - DNA, 24 bp, Artificial Sequence
  Synthetic
ataggattgaugtcttcccuccct

SEQ ID NO: 57914 - DNA, 24 bp, Artificial Sequence
  Synthetic
gggacauacactgagaaugaaacc

SEQ ID NO: 57915 - DNA, 28 bp, Artificial Sequence
  Synthetic
gacccgctatuactctagtttcgtuaat

SEQ ID NO: 57916 - DNA, 23 bp, Artificial Sequence
  Synthetic
ccuctttcaggugaaggaacaca

SEQ ID NO: 57917 - DNA, 26 bp, Artificial Sequence
  Synthetic
cactgtgcctuacctactcatatcut

SEQ ID NO: 57918 - DNA, 23 bp, Artificial Sequence
  Synthetic
ggaggagaaauggtcacttugct

SEQ ID NO: 57919 - DNA, 19 bp, Artificial Sequence
  Synthetic
gatggcgcaugacacacuc

SEQ ID NO: 57920 - DNA, 23 bp, Artificial Sequence
  Synthetic
aaaagtgugaggcctgaaggtua

SEQ ID NO: 57921 - DNA, 21 bp, Artificial Sequence
  Synthetic
gctcugcaagaagggctugag

SEQ ID NO: 57922 - DNA, 20 bp, Artificial Sequence
  Synthetic
tgagcucagcuaaacaccga

SEQ ID NO: 57923 - DNA, 20 bp, Artificial Sequence
  Synthetic
accccaggacuccaatguct

SEQ ID NO: 57924 - DNA, 20 bp, Artificial Sequence
  Synthetic
ctttctcaggcugggtgcut

SEQ ID NO: 57925 - DNA, 28 bp, Artificial Sequence
  Synthetic
ttcaacacccugttctttctcttatuca

SEQ ID NO: 57926 - DNA, 23 bp, Artificial Sequence
  Synthetic
ccacagggaaucctcattuagca

SEQ ID NO: 57927 - DNA, 28 bp, Artificial Sequence
  Synthetic
cacctactcacuaacttttctgttccut

SEQ ID NO: 57928 - DNA, 27 bp, Artificial Sequence
  Synthetic
tctacatacauctgggaagcuaaggat

SEQ ID NO: 57929 - DNA, 28 bp, Artificial Sequence
  Synthetic
gttattatttagggaccucctggctuac

SEQ ID NO: 57930 - DNA, 22 bp, Artificial Sequence
  Synthetic
tgcctgcagcutacacacatua

SEQ ID NO: 57931 - DNA, 27 bp, Artificial Sequence
  Synthetic
ggttggttuccatccagatttugaaaa

SEQ ID NO: 57932 - DNA, 28 bp, Artificial Sequence
  Synthetic
tggattttccugcatttgcaattactut

SEQ ID NO: 57933 - DNA, 22 bp, Artificial Sequence
  Synthetic
gtcattcuagggtcctgtuggt

SEQ ID NO: 57934 - DNA, 21 bp, Artificial Sequence
  Synthetic
acgtaatccugctggtccauc

SEQ ID NO: 57935 - DNA, 28 bp, Artificial Sequence
  Synthetic
ggcattccacccaauattctcatcatua

SEQ ID NO: 57936 - DNA, 21 bp, Artificial Sequence
  Synthetic
ggctctctacugagggcttut

SEQ ID NO: 57937 - DNA, 27 bp, Artificial Sequence
  Synthetic
ggatttcttcatugaaagaggcatgut

SEQ ID NO: 57938 - DNA, 27 bp, Artificial Sequence
  Synthetic
cttgatacagagucagtcatcttgugg

SEQ ID NO: 57939 - DNA, 27 bp, Artificial Sequence
  Synthetic
agcacgtaautcaacatgttugacaaa

SEQ ID NO: 57940 - DNA, 28 bp, Artificial Sequence
  Synthetic
ccatatcactgaaauacgaagacctuct

SEQ ID NO: 57941 - DNA, 27 bp, Artificial Sequence
  Synthetic
gctaactgaatcugtgtctgtttgtut

SEQ ID NO: 57942 - DNA, 22 bp, Artificial Sequence
  Synthetic
gttacttacutcccgucagcga

SEQ ID NO: 57943 - DNA, 27 bp, Artificial Sequence
  Synthetic
catggtatucagcaaattggtgtugag

SEQ ID NO: 57944 - DNA, 21 bp, Artificial Sequence
  Synthetic
tctcaggcaccuttggtgtuc

SEQ ID NO: 57945 - DNA, 27 bp, Artificial Sequence
  Synthetic
tggacaacacacugctattctagacua

SEQ ID NO: 57946 - DNA, 21 bp, Artificial Sequence
  Synthetic
acactctgcucccagaactug

SEQ ID NO: 57947 - DNA, 21 bp, Artificial Sequence
  Synthetic
caagguccaggatcagtugct

SEQ ID NO: 57948 - DNA, 23 bp, Artificial Sequence
  Synthetic
gcaauaccaagaaggagggugac

SEQ ID NO: 57949 - DNA, 27 bp, Artificial Sequence
  Synthetic
aggtagaagagugagtgtacatgtgut

SEQ ID NO: 57950 - DNA, 18 bp, Artificial Sequence
  Synthetic
cggacccauctcctcugg

SEQ ID NO: 57951 - DNA, 19 bp, Artificial Sequence
  Synthetic
cctcgucctaccccucgat

SEQ ID NO: 57952 - DNA, 23 bp, Artificial Sequence
  Synthetic
cctgaaaugaggactgccaugag

SEQ ID NO: 57953 - DNA, 24 bp, Artificial Sequence
  Synthetic
catccatcaggaaauggtcctuca

SEQ ID NO: 57954 - DNA, 20 bp, Artificial Sequence
  Synthetic
gactcuccgcccccattuaa

SEQ ID NO: 57955 - DNA, 20 bp, Artificial Sequence
  Synthetic
cctacggcaagucggaggua

SEQ ID NO: 57956 - DNA, 20 bp, Artificial Sequence
  Synthetic
ggaguagtcuccgcccagat

SEQ ID NO: 57957 - DNA, 22 bp, Artificial Sequence
  Synthetic
ttctttucccacccctccuagt

SEQ ID NO: 57958 - DNA, 20 bp, Artificial Sequence
  Synthetic
accaagggcucaggcaauag

SEQ ID NO: 57959 - DNA, 25 bp, Artificial Sequence
  Synthetic
cctccagugagaacaaatggtgaua

SEQ ID NO: 57960 - DNA, 28 bp, Artificial Sequence
  Synthetic
gtggttagatgcauagggcaattaaaug

SEQ ID NO: 57961 - DNA, 22 bp, Artificial Sequence
  Synthetic
aagcugugagagccagaacaaa

SEQ ID NO: 57962 - DNA, 27 bp, Artificial Sequence
  Synthetic
caaatttctcacuctctctgcttcuca

SEQ ID NO: 57963 - DNA, 21 bp, Artificial Sequence
  Synthetic
gaatgccguactccaccucag

SEQ ID NO: 57964 - DNA, 20 bp, Artificial Sequence
  Synthetic
tguatucggccaccacaaca

SEQ ID NO: 57965 - DNA, 28 bp, Artificial Sequence
  Synthetic
gtctcagatcutctatgcctuacaagaa

SEQ ID NO: 57966 - DNA, 28 bp, Artificial Sequence
  Synthetic
gcatatgatccuggaaaagttctguact

SEQ ID NO: 57967 - DNA, 27 bp, Artificial Sequence
  Synthetic
agtgtcacaaauccaagttcaaatgug

SEQ ID NO: 57968 - DNA, 27 bp, Artificial Sequence
  Synthetic
acaattcgctgauaactctagagguct

SEQ ID NO: 57969 - DNA, 21 bp, Artificial Sequence
  Synthetic
caagaggtucagccaccagua

SEQ ID NO: 57970 - DNA, 22 bp, Artificial Sequence
  Synthetic
cctaggtagaugcaggctucca

SEQ ID NO: 57971 - DNA, 26 bp, Artificial Sequence
  Synthetic
gccagtgcugaatttgtcaauacaag

SEQ ID NO: 57972 - DNA, 25 bp, Artificial Sequence
  Synthetic
agatactgcugcagattttgugagt

SEQ ID NO: 57973 - DNA, 28 bp, Artificial Sequence
  Synthetic
cagtaaatggttugcaacctccaauaaa

SEQ ID NO: 57974 - DNA, 21 bp, Artificial Sequence
  Synthetic
cccctagcagguccagaauca

SEQ ID NO: 57975 - DNA, 22 bp, Artificial Sequence
  Synthetic
gcaccaccaagaagauggucat

SEQ ID NO: 57976 - DNA, 19 bp, Artificial Sequence
  Synthetic
ccatcacgutcgggcucat

SEQ ID NO: 57977 - DNA, 24 bp, Artificial Sequence
  Synthetic
ccaatgaaaatuccctgcagctug

SEQ ID NO: 57978 - DNA, 27 bp, Artificial Sequence
  Synthetic
ccatagacagutccccatgttuaaagg

SEQ ID NO: 57979 - DNA, 25 bp, Artificial Sequence
  Synthetic
agctgtctucatcagaaccucaaag

SEQ ID NO: 57980 - DNA, 26 bp, Artificial Sequence
  Synthetic
aggtcccautggttattttuaagcga

SEQ ID NO: 57981 - DNA, 28 bp, Artificial Sequence
  Synthetic
caggaacuccaaccaaatattttcaugt

SEQ ID NO: 57982 - DNA, 28 bp, Artificial Sequence
  Synthetic
tcctacatttctaauacctggtcctugt

SEQ ID NO: 57983 - DNA, 28 bp, Artificial Sequence
  Synthetic
agcaggagacauttttgtttatgugaga

SEQ ID NO: 57984 - DNA, 25 bp, Artificial Sequence
  Synthetic
gaaccaaataauagctgccccuaca

SEQ ID NO: 57985 - DNA, 22 bp, Artificial Sequence
  Synthetic
ggaagautcugaaacgggcaca

SEQ ID NO: 57986 - DNA, 26 bp, Artificial Sequence
  Synthetic
gaagatttacutcgtcgatucccaga

SEQ ID NO: 57987 - DNA, 27 bp, Artificial Sequence
  Synthetic
ggacagcacatugccaagtatatatug

SEQ ID NO: 57988 - DNA, 21 bp, Artificial Sequence
  Synthetic
gtgccugagagatgagcuacc

SEQ ID NO: 57989 - DNA, 20 bp, Artificial Sequence
  Synthetic
gaggaugtcauccgcaggaa

SEQ ID NO: 57990 - DNA, 23 bp, Artificial Sequence
  Synthetic
gcctctctttutggctggaagut

SEQ ID NO: 57991 - DNA, 22 bp, Artificial Sequence
  Synthetic
cagcccugggaaaccaagauat

SEQ ID NO: 57992 - DNA, 20 bp, Artificial Sequence
  Synthetic
agagggaggccaacaucuac

SEQ ID NO: 57993 - DNA, 23 bp, Artificial Sequence
  Synthetic
agaatgaggagaguggcucagaa

SEQ ID NO: 57994 - DNA, 21 bp, Artificial Sequence
  Synthetic
cgtacutggcctugaggagaa

SEQ ID NO: 57995 - DNA, 24 bp, Artificial Sequence
  Synthetic
cattcctttuacccttgctccugt

SEQ ID NO: 57996 - DNA, 29 bp, Artificial Sequence
  Synthetic
ctaagcgtctuctaagatcttgguaacaa

SEQ ID NO: 57997 - DNA, 25 bp, Artificial Sequence
  Synthetic
tcaatgcagaaaucgtgcuaggaaa

SEQ ID NO: 57998 - DNA, 23 bp, Artificial Sequence
  Synthetic
tcacugccccaagagcaatatuc

SEQ ID NO: 57999 - DNA, 27 bp, Artificial Sequence
  Synthetic
ccaactatgaagaugtagccaccttuc

SEQ ID NO: 58000 - DNA, 25 bp, Artificial Sequence
  Synthetic
acaaggctacautttggtcaauggt

SEQ ID NO: 58001 - DNA, 22 bp, Artificial Sequence
  Synthetic
gggagccacuttatggccaaua

SEQ ID NO: 58002 - DNA, 22 bp, Artificial Sequence
  Synthetic
cccttctcugctctggtaggut

SEQ ID NO: 58003 - DNA, 28 bp, Artificial Sequence
  Synthetic
ggagactctguctaacattttcctcuct

SEQ ID NO: 58004 - DNA, 27 bp, Artificial Sequence
  Synthetic
gcagtcaacautatgaatgccttuaca

SEQ ID NO: 58005 - DNA, 21 bp, Artificial Sequence
  Synthetic
accagugtttccguggaacat

SEQ ID NO: 58006 - DNA, 29 bp, Artificial Sequence
  Synthetic
ggcttuacagaaacagttgttatucagaa

SEQ ID NO: 58007 - DNA, 18 bp, Artificial Sequence
  Synthetic
cgggauggtgctgtugga

SEQ ID NO: 58008 - DNA, 26 bp, Artificial Sequence
  Synthetic
aatgtcattctucactttgggacuca

SEQ ID NO: 58009 - DNA, 29 bp, Artificial Sequence
  Synthetic
tgtctaatacaaaaugacgccaaactcua

SEQ ID NO: 58010 - DNA, 21 bp, Artificial Sequence
  Synthetic
cacgctctucctgaggctuaa

SEQ ID NO: 58011 - DNA, 23 bp, Artificial Sequence
  Synthetic
cutttcactcucaggagaaccca

SEQ ID NO: 58012 - DNA, 22 bp, Artificial Sequence
  Synthetic
gcatccctaguaaagggccaut

SEQ ID NO: 58013 - DNA, 28 bp, Artificial Sequence
  Synthetic
cttttgagagaacucattacccugacat

SEQ ID NO: 58014 - DNA, 21 bp, Artificial Sequence
  Synthetic
gctcaucccaacctcatgguc

SEQ ID NO: 58015 - DNA, 22 bp, Artificial Sequence
  Synthetic
gctccttgtugtagcccttcuc

SEQ ID NO: 58016 - DNA, 21 bp, Artificial Sequence
  Synthetic
gacccctacucctacaacgug

SEQ ID NO: 58017 - DNA, 21 bp, Artificial Sequence
  Synthetic
ccttggacucttccccaguct

SEQ ID NO: 58018 - DNA, 21 bp, Artificial Sequence
  Synthetic
ctauaagcccaggagcacuca

SEQ ID NO: 58019 - DNA, 27 bp, Artificial Sequence
  Synthetic
ggctctttuggaactgtttauaagggt

SEQ ID NO: 58020 - DNA, 20 bp, Artificial Sequence
  Synthetic
ccttgtugaccgctaccgua

SEQ ID NO: 58021 - DNA, 20 bp, Artificial Sequence
  Synthetic
atccaggcagutggguacac

SEQ ID NO: 58022 - DNA, 23 bp, Artificial Sequence
  Synthetic
agcagaacacutcagagcagtut

SEQ ID NO: 58023 - DNA, 22 bp, Artificial Sequence
  Synthetic
gtactcctguaggttgccctug

SEQ ID NO: 58024 - DNA, 28 bp, Artificial Sequence
  Synthetic
cacaaagutagtttaugggaaggaacct

SEQ ID NO: 58025 - DNA, 28 bp, Artificial Sequence
  Synthetic
accattcatttugaaggctagggtttua

SEQ ID NO: 58026 - DNA, 23 bp, Artificial Sequence
  Synthetic
atugcagaaagagacaucgggaa

SEQ ID NO: 58027 - DNA, 20 bp, Artificial Sequence
  Synthetic
cttggcagutgaggcccuat

SEQ ID NO: 58028 - DNA, 20 bp, Artificial Sequence
  Synthetic
ccugcugacggaagaggaag

SEQ ID NO: 58029 - DNA, 25 bp, Artificial Sequence
  Synthetic
tgaagatccagauggaggagaagut

SEQ ID NO: 58030 - DNA, 20 bp, Artificial Sequence
  Synthetic
gtctgaggaugcggcctaut

SEQ ID NO: 58031 - DNA, 21 bp, Artificial Sequence
  Synthetic
ctccttggcuccttgccauat

SEQ ID NO: 58032 - DNA, 20 bp, Artificial Sequence
  Synthetic
catguggcacgaaagctucc

SEQ ID NO: 58033 - DNA, 23 bp, Artificial Sequence
  Synthetic
gaatgaggtuggtgccttctcut

SEQ ID NO: 58034 - DNA, 23 bp, Artificial Sequence
  Synthetic
ggaggaggugggcagatatcuaa

SEQ ID NO: 58035 - DNA, 21 bp, Artificial Sequence
  Synthetic
caggaugucaaggacccagag

SEQ ID NO: 58036 - DNA, 22 bp, Artificial Sequence
  Synthetic
ccactctgggauccactcacut

SEQ ID NO: 58037 - DNA, 25 bp, Artificial Sequence
  Synthetic
ctccacatcccuctctgtactuaca

SEQ ID NO: 58038 - DNA, 24 bp, Artificial Sequence
  Synthetic
ggcacacaaauatcacacctucca

SEQ ID NO: 58039 - DNA, 23 bp, Artificial Sequence
  Synthetic
cccagatgcucttgtgtttcugt

SEQ ID NO: 58040 - DNA, 24 bp, Artificial Sequence
  Synthetic
gtgagtttugcacactgttgguaa

SEQ ID NO: 58041 - DNA, 27 bp, Artificial Sequence
  Synthetic
tcagagaagcaggcutattcattucaa

SEQ ID NO: 58042 - DNA, 28 bp, Artificial Sequence
  Synthetic
acttgaagggtautttctagagcguaga

SEQ ID NO: 58043 - DNA, 26 bp, Artificial Sequence
  Synthetic
gccattaggcauttcttcccatagua

SEQ ID NO: 58044 - DNA, 21 bp, Artificial Sequence
  Synthetic
ggguagtacugccaaccagaa

SEQ ID NO: 58045 - DNA, 28 bp, Artificial Sequence
  Synthetic
tttgctctgtatcutctctatccgttug

SEQ ID NO: 58046 - DNA, 18 bp, Artificial Sequence
  Synthetic
ccctguccgcccctcuaa

SEQ ID NO: 58047 - DNA, 18 bp, Artificial Sequence
  Synthetic
cguccccaaggacuccga

SEQ ID NO: 58048 - DNA, 20 bp, Artificial Sequence
  Synthetic
gacgugcacaacctcgacua

SEQ ID NO: 58049 - DNA, 18 bp, Artificial Sequence
  Synthetic
gccugagctcugcaggac

SEQ ID NO: 58050 - DNA, 27 bp, Artificial Sequence
  Synthetic
aagaaagacaccuagatttggugaagg

SEQ ID NO: 58051 - DNA, 27 bp, Artificial Sequence
  Synthetic
tgcaacagctttuctaggtcctaatut

SEQ ID NO: 58052 - DNA, 21 bp, Artificial Sequence
  Synthetic
ccagcucucagggaacaagaa

SEQ ID NO: 58053 - DNA, 25 bp, Artificial Sequence
  Synthetic
ccctcaccauctttgtgcttattug

SEQ ID NO: 58054 - DNA, 25 bp, Artificial Sequence
  Synthetic
tgtgagacacucttcatcagccuaa

SEQ ID NO: 58055 - DNA, 29 bp, Artificial Sequence
  Synthetic
gtatttcttttgtaugtgtcgttgctgua

SEQ ID NO: 58056 - DNA, 29 bp, Artificial Sequence
  Synthetic
aaaaggauaaacaaaaaggcatgtgucat

SEQ ID NO: 58057 - DNA, 23 bp, Artificial Sequence
  Synthetic
gctgtgccaagucagattucact

SEQ ID NO: 58058 - DNA, 25 bp, Artificial Sequence
  Synthetic
tgaagttgaaaaaugcctgcacaut

SEQ ID NO: 58059 - DNA, 28 bp, Artificial Sequence
  Synthetic
acatcagggaaaauctgaatggaauacc

SEQ ID NO: 58060 - DNA, 29 bp, Artificial Sequence
  Synthetic
agtctgctgtauattctgatgtcaaaugg

SEQ ID NO: 58061 - DNA, 21 bp, Artificial Sequence
  Synthetic
tgctguaacaggtgctucaca

SEQ ID NO: 58062 - DNA, 21 bp, Artificial Sequence
  Synthetic
ccgccuggguaagacagaaat

SEQ ID NO: 58063 - DNA, 27 bp, Artificial Sequence
  Synthetic
ggtccatgttcucatgatgtcattcuc

SEQ ID NO: 58064 - DNA, 20 bp, Artificial Sequence
  Synthetic
cttcagggcagcuaacccua

SEQ ID NO: 58065 - DNA, 26 bp, Artificial Sequence
  Synthetic
caccctatgccugtaaatcctttuct

SEQ ID NO: 58066 - DNA, 24 bp, Artificial Sequence
  Synthetic
ttctggcugatagattgucgacag

SEQ ID NO: 58067 - DNA, 28 bp, Artificial Sequence
  Synthetic
ttgttgttcaagggucttatccacttua

SEQ ID NO: 58068 - DNA, 23 bp, Artificial Sequence
  Synthetic
cccagatgcugactgttcaguag

SEQ ID NO: 58069 - DNA, 23 bp, Artificial Sequence
  Synthetic
atgcutgatggaaguggagaagg

SEQ ID NO: 58070 - DNA, 22 bp, Artificial Sequence
  Synthetic
tgcctttagggutctcgguact

SEQ ID NO: 58071 - DNA, 25 bp, Artificial Sequence
  Synthetic
gccatccugaaaagtggaauaacca

SEQ ID NO: 58072 - DNA, 21 bp, Artificial Sequence
  Synthetic
caatccaaugcatcucgcaga

SEQ ID NO: 58073 - DNA, 27 bp, Artificial Sequence
  Synthetic
gttaacatgugctttgaatgtcuccat

SEQ ID NO: 58074 - DNA, 28 bp, Artificial Sequence
  Synthetic
aaatcactcaaguggatagagcttucat

SEQ ID NO: 58075 - DNA, 25 bp, Artificial Sequence
  Synthetic
cugaagaaaaacuggaagcagcaaa

SEQ ID NO: 58076 - DNA, 26 bp, Artificial Sequence
  Synthetic
agcagtaaagaauacccatgcugaaa

SEQ ID NO: 58077 - DNA, 25 bp, Artificial Sequence
  Synthetic
acactactucagaggtcaucaagga

SEQ ID NO: 58078 - DNA, 27 bp, Artificial Sequence
  Synthetic
ggtcttgggugaagatttucaaaaagg

SEQ ID NO: 58079 - DNA, 21 bp, Artificial Sequence
  Synthetic
cagcatcguggacatccagut

SEQ ID NO: 58080 - DNA, 27 bp, Artificial Sequence
  Synthetic
tcaaatttcaauacactgaccugagca

SEQ ID NO: 58081 - DNA, 23 bp, Artificial Sequence
  Synthetic
gagggugagacgattgaatugga

SEQ ID NO: 58082 - DNA, 23 bp, Artificial Sequence
  Synthetic
ggtaatcgcuctgagagcttuct

SEQ ID NO: 58083 - DNA, 23 bp, Artificial Sequence
  Synthetic
aaatgggugcagtaccttuccaa

SEQ ID NO: 58084 - DNA, 22 bp, Artificial Sequence
  Synthetic
gccagacccucttgacauacct

SEQ ID NO: 58085 - DNA, 28 bp, Artificial Sequence
  Synthetic
cctgaaagtacautcttgtgtgaguagt

SEQ ID NO: 58086 - DNA, 29 bp, Artificial Sequence
  Synthetic
aacatattagcaccautacacaattcuca

SEQ ID NO: 58087 - DNA, 22 bp, Artificial Sequence
  Synthetic
acaatugaagggcuggaagaca

SEQ ID NO: 58088 - DNA, 22 bp, Artificial Sequence
  Synthetic
cgacctucagcagtttcgacut

SEQ ID NO: 58089 - DNA, 21 bp, Artificial Sequence
  Synthetic
tgcaatggcucgtgttttucc

SEQ ID NO: 58090 - DNA, 22 bp, Artificial Sequence
  Synthetic
ggctcugagagcaggaaugaag

SEQ ID NO: 58091 - DNA, 28 bp, Artificial Sequence
  Synthetic
cttagtagttgtgutgcatttgaggaug

SEQ ID NO: 58092 - DNA, 27 bp, Artificial Sequence
  Synthetic
gaagttttgtagggutgattgaggtut

SEQ ID NO: 58093 - DNA, 25 bp, Artificial Sequence
  Synthetic
gagaaggcuctttgtagttguagca

SEQ ID NO: 58094 - DNA, 33 bp, Artificial Sequence
  Synthetic
cactttagggtuaagagtattatagttgtgtut

SEQ ID NO: 58095 - DNA, 22 bp, Artificial Sequence
  Synthetic
ggcatgguggactcaatttcug

SEQ ID NO: 58096 - DNA, 24 bp, Artificial Sequence
  Synthetic
cagcggatgcutgtcttacaacua

SEQ ID NO: 58097 - DNA, 28 bp, Artificial Sequence
  Synthetic
tccatgaggauctaatctguaaacagga

SEQ ID NO: 58098 - DNA, 24 bp, Artificial Sequence
  Synthetic
gcccccaaauacgtaaagctguat

SEQ ID NO: 58099 - DNA, 28 bp, Artificial Sequence
  Synthetic
gcttacagtcaugccatatttgatgaug

SEQ ID NO: 58100 - DNA, 24 bp, Artificial Sequence
  Synthetic
gaacatcuggaccctgaugaagaa

SEQ ID NO: 58101 - DNA, 23 bp, Artificial Sequence
  Synthetic
gcgaaatacgutgactcctccuc

SEQ ID NO: 58102 - DNA, 23 bp, Artificial Sequence
  Synthetic
ctggaguaaaactgcggucaaaa

SEQ ID NO: 58103 - DNA, 26 bp, Artificial Sequence
  Synthetic
aactggaguacacaaggcaatgttua

SEQ ID NO: 58104 - DNA, 29 bp, Artificial Sequence
  Synthetic
cgctcaactucagaatctcacuaaaagaa

SEQ ID NO: 58105 - DNA, 25 bp, Artificial Sequence
  Synthetic
ttcaggccuaaagttggguaaaaca

SEQ ID NO: 58106 - DNA, 23 bp, Artificial Sequence
  Synthetic
tgcgaaguacaaggatgccaaua

SEQ ID NO: 58107 - DNA, 27 bp, Artificial Sequence
  Synthetic
catcatgucgattggtgucaaaaacat

SEQ ID NO: 58108 - DNA, 21 bp, Artificial Sequence
  Synthetic
ggtggaaaagaggcugctuca

SEQ ID NO: 58109 - DNA, 24 bp, Artificial Sequence
  Synthetic
ccttcttuctttcctgtuccagca

SEQ ID NO: 58110 - DNA, 26 bp, Artificial Sequence
  Synthetic
gcaaaagaaaacugaatcagctucca

SEQ ID NO: 58111 - DNA, 27 bp, Artificial Sequence
  Synthetic
aggatcagattgcutaaccttgctauc

SEQ ID NO: 58112 - DNA, 25 bp, Artificial Sequence
  Synthetic
tgattctugaggaaaacagcgugat

SEQ ID NO: 58113 - DNA, 28 bp, Artificial Sequence
  Synthetic
actttcttgttucagcttattgagcuct

SEQ ID NO: 58114 - DNA, 21 bp, Artificial Sequence
  Synthetic
caaacaguagugcgacggaga

SEQ ID NO: 58115 - DNA, 22 bp, Artificial Sequence
  Synthetic
tcctctugcaggagtcttcuga

SEQ ID NO: 58116 - DNA, 24 bp, Artificial Sequence
  Synthetic
tgtagtagacccugtgaacagugt

SEQ ID NO: 58117 - DNA, 23 bp, Artificial Sequence
  Synthetic
gcttctcutctgtacugaaagca

SEQ ID NO: 58118 - DNA, 19 bp, Artificial Sequence
  Synthetic
ccgagaacucgaagcccut

SEQ ID NO: 58119 - DNA, 26 bp, Artificial Sequence
  Synthetic
ggagttgauttattggcuggaaagga

SEQ ID NO: 58120 - DNA, 26 bp, Artificial Sequence
  Synthetic
ggttttccuggacccaataaaucagt

SEQ ID NO: 58121 - DNA, 21 bp, Artificial Sequence
  Synthetic
cgcaaguacaagttcctgcuc

SEQ ID NO: 58122 - DNA, 20 bp, Artificial Sequence
  Synthetic
gtggtcucggcttcatccut

SEQ ID NO: 58123 - DNA, 17 bp, Artificial Sequence
  Synthetic
gggcagcaucgtccugt

SEQ ID NO: 58124 - DNA, 18 bp, Artificial Sequence
  Synthetic
cacccgucaccccaauga

SEQ ID NO: 58125 - DNA, 17 bp, Artificial Sequence
  Synthetic
gcctgtccuggacggut

SEQ ID NO: 58126 - DNA, 20 bp, Artificial Sequence
  Synthetic
cccgtcccugtccttguact

SEQ ID NO: 58127 - DNA, 24 bp, Artificial Sequence
  Synthetic
ctcactctcucttcctccttcuca

SEQ ID NO: 58128 - DNA, 18 bp, Artificial Sequence
  Synthetic
ggaggcacaggugtucca

SEQ ID NO: 58129 - DNA, 24 bp, Artificial Sequence
  Synthetic
gtttgactcctutgtggtccagua

SEQ ID NO: 58130 - DNA, 28 bp, Artificial Sequence
  Synthetic
ggaaaagaagaaagagcuaagaagugga

SEQ ID NO: 58131 - DNA, 23 bp, Artificial Sequence
  Synthetic
tccgagttutctgcaactucaca

SEQ ID NO: 58132 - DNA, 21 bp, Artificial Sequence
  Synthetic
gaaggcagcuagaaaggugga

SEQ ID NO: 58133 - DNA, 27 bp, Artificial Sequence
  Synthetic
atgagcacuaaagggacacagtttuat

SEQ ID NO: 58134 - DNA, 21 bp, Artificial Sequence
  Synthetic
gacaccgaaccuctgcactua

SEQ ID NO: 58135 - DNA, 23 bp, Artificial Sequence
  Synthetic
cctcactcuggctatccttccuc

SEQ ID NO: 58136 - DNA, 22 bp, Artificial Sequence
  Synthetic
gagacugagctggugaacagat

SEQ ID NO: 58137 - DNA, 22 bp, Artificial Sequence
  Synthetic
cttacggccaucctctcttcuc

SEQ ID NO: 58138 - DNA, 22 bp, Artificial Sequence
  Synthetic
ggttcctgautttgtggccugt

SEQ ID NO: 58139 - DNA, 22 bp, Artificial Sequence
  Synthetic
cgctccatcuctctcatgtcut

SEQ ID NO: 58140 - DNA, 22 bp, Artificial Sequence
  Synthetic
cccagatcuccagacaugcaac

SEQ ID NO: 58141 - DNA, 21 bp, Artificial Sequence
  Synthetic
gacaggctgauccctttgcua

SEQ ID NO: 58142 - DNA, 26 bp, Artificial Sequence
  Synthetic
ccttggtgcaaautcatcaattguca

SEQ ID NO: 58143 - DNA, 23 bp, Artificial Sequence
  Synthetic
guggataccataugcaggaagca

SEQ ID NO: 58144 - DNA, 26 bp, Artificial Sequence
  Synthetic
tgttacctgugaaaagttacctgcuc

SEQ ID NO: 58145 - DNA, 28 bp, Artificial Sequence
  Synthetic
ttgctaccauagggatatgtgtaaucct

SEQ ID NO: 58146 - DNA, 25 bp, Artificial Sequence
  Synthetic
ggagtttgatccaugaagcagacut

SEQ ID NO: 58147 - DNA, 22 bp, Artificial Sequence
  Synthetic
ttcttgauagcgctgaugccat

SEQ ID NO: 58148 - DNA, 24 bp, Artificial Sequence
  Synthetic
acgagataaccugctcctcttuca

SEQ ID NO: 58149 - DNA, 27 bp, Artificial Sequence
  Synthetic
acaaccactgucaattatgtacgugat

SEQ ID NO: 58150 - DNA, 22 bp, Artificial Sequence
  Synthetic
catagcctcugacgtggtacuc

SEQ ID NO: 58151 - DNA, 26 bp, Artificial Sequence
  Synthetic
gttauaacaaggccttuaccccagaa

SEQ ID NO: 58152 - DNA, 28 bp, Artificial Sequence
  Synthetic
gtggacagcaaaaugatttgaaattcug

SEQ ID NO: 58153 - DNA, 23 bp, Artificial Sequence
  Synthetic
cactggguggaaaggatcatuct

SEQ ID NO: 58154 - DNA, 28 bp, Artificial Sequence
  Synthetic
gatcaacgttugagaaagaaacaugaca

SEQ ID NO: 58155 - DNA, 28 bp, Artificial Sequence
  Synthetic
ttctttccatcuttcaatgggaatucct

SEQ ID NO: 58156 - DNA, 27 bp, Artificial Sequence
  Synthetic
gccaccgcauttaaaatgtacttugat

SEQ ID NO: 58157 - DNA, 28 bp, Artificial Sequence
  Synthetic
accatgtaaaaataauggcagttgcaut

SEQ ID NO: 58158 - DNA, 24 bp, Artificial Sequence
  Synthetic
agtcugcagccaaaaagtaacuga

SEQ ID NO: 58159 - DNA, 23 bp, Artificial Sequence
  Synthetic
gctggttuttgggtguaaacact

SEQ ID NO: 58160 - DNA, 21 bp, Artificial Sequence
  Synthetic
tuggttccacaugggcaagat

SEQ ID NO: 58161 - DNA, 27 bp, Artificial Sequence
  Synthetic
cttttagaacautttgctgagauggct

SEQ ID NO: 58162 - DNA, 23 bp, Artificial Sequence
  Synthetic
aaagtgcacugtggtacucacaa

SEQ ID NO: 58163 - DNA, 28 bp, Artificial Sequence
  Synthetic
tgtcatuggaaaccaaagctaauacaga

SEQ ID NO: 58164 - DNA, 28 bp, Artificial Sequence
  Synthetic
aaaatacaacagatugtgtttggccaut

SEQ ID NO: 58165 - DNA, 24 bp, Artificial Sequence
  Synthetic
ggguacaggaaacaagatgcaugt

SEQ ID NO: 58166 - DNA, 20 bp, Artificial Sequence
  Synthetic
tcuagagccaagacgccuct

SEQ ID NO: 58167 - DNA, 22 bp, Artificial Sequence
  Synthetic
aggataaggugtcccagctuca

SEQ ID NO: 58168 - DNA, 22 bp, Artificial Sequence
  Synthetic
gccaggugacgaagaaacagut

SEQ ID NO: 58169 - DNA, 20 bp, Artificial Sequence
  Synthetic
cccttucaagcacgttguca

SEQ ID NO: 58170 - DNA, 23 bp, Artificial Sequence
  Synthetic
acguaaccccacaactcaaauca

SEQ ID NO: 58171 - DNA, 28 bp, Artificial Sequence
  Synthetic
tgtgaccattcaauaaccacagatucaa

SEQ ID NO: 58172 - DNA, 28 bp, Artificial Sequence
  Synthetic
gaaggaaguaagctacctgtuaaacagt

SEQ ID NO: 58173 - DNA, 23 bp, Artificial Sequence
  Synthetic
ccaggtatucagcgagagcttut

SEQ ID NO: 58174 - DNA, 20 bp, Artificial Sequence
  Synthetic
cgccgtguttggtcgauaga

SEQ ID NO: 58175 - DNA, 22 bp, Artificial Sequence
  Synthetic
gcaugttattcaugacgcccat

SEQ ID NO: 58176 - DNA, 25 bp, Artificial Sequence
  Synthetic
atggatgctttcutccccgatttua

SEQ ID NO: 58177 - DNA, 29 bp, Artificial Sequence
  Synthetic
atttcttaaggugcgttttcttcaatgut

SEQ ID NO: 58178 - DNA, 28 bp, Artificial Sequence
  Synthetic
gctactgagcuacacttcttattaccuc

SEQ ID NO: 58179 - DNA, 28 bp, Artificial Sequence
  Synthetic
gaaaacagatagugacccatggtaugaa

SEQ ID NO: 58180 - DNA, 26 bp, Artificial Sequence
  Synthetic
gaggaaaagugaagcaatctgcaaua

SEQ ID NO: 58181 - DNA, 31 bp, Artificial Sequence
  Synthetic
tggataaattttctcuatttgctcaggagut

SEQ ID NO: 58182 - DNA, 21 bp, Artificial Sequence
  Synthetic
cctggtgacugggaaccttut

SEQ ID NO: 58183 - DNA, 21 bp, Artificial Sequence
  Synthetic
cagatggagguggcagtucag

SEQ ID NO: 58184 - DNA, 21 bp, Artificial Sequence
  Synthetic
ggctgagcugctgctaguaac

SEQ ID NO: 58185 - DNA, 27 bp, Artificial Sequence
  Synthetic
ctttcttcctauagagtccctgttucc

SEQ ID NO: 58186 - DNA, 23 bp, Artificial Sequence
  Synthetic
cuaccaacccaccaaccugaaat

SEQ ID NO: 58187 - DNA, 20 bp, Artificial Sequence
  Synthetic
cttcugagcaggagauggca

SEQ ID NO: 58188 - DNA, 22 bp, Artificial Sequence
  Synthetic
ctagucagccaaggtagcaugt

SEQ ID NO: 58189 - DNA, 27 bp, Artificial Sequence
  Synthetic
aggatctgttguttggcttgtaguaag

SEQ ID NO: 58190 - DNA, 27 bp, Artificial Sequence
  Synthetic
gactgtuggagaagaaaguaagcaaga

SEQ ID NO: 58191 - DNA, 27 bp, Artificial Sequence
  Synthetic
tgaaggtgaaaccutagtgtgaaaugt

SEQ ID NO: 58192 - DNA, 24 bp, Artificial Sequence
  Synthetic
tcauatcctcttugcagcaacagt

SEQ ID NO: 58193 - DNA, 26 bp, Artificial Sequence
  Synthetic
tctcttuccagcaactttgctuaagt

SEQ ID NO: 58194 - DNA, 29 bp, Artificial Sequence
  Synthetic
aaaccacattccuttattcttatgacuca

SEQ ID NO: 58195 - DNA, 30 bp, Artificial Sequence
  Synthetic
ccagttcttctcuaaactgttctaatugct

SEQ ID NO: 58196 - DNA, 21 bp, Artificial Sequence
  Synthetic
ctgaaaagcuggcctuggaac

SEQ ID NO: 58197 - DNA, 25 bp, Artificial Sequence
  Synthetic
ttccacacttucacgttctctctut

SEQ ID NO: 58198 - DNA, 28 bp, Artificial Sequence
  Synthetic
cttaatgacacautagcaagugaacaga

SEQ ID NO: 58199 - DNA, 28 bp, Artificial Sequence
  Synthetic
ttgacattttagauggaggaaagcctua

SEQ ID NO: 58200 - DNA, 24 bp, Artificial Sequence
  Synthetic
gcgtaatgucaattgagatuggct

SEQ ID NO: 58201 - DNA, 23 bp, Artificial Sequence
  Synthetic
cagaggcaaugatggcttcaaug

SEQ ID NO: 58202 - DNA, 24 bp, Artificial Sequence
  Synthetic
cagaaagtttucgaaaggctcuca

SEQ ID NO: 58203 - DNA, 20 bp, Artificial Sequence
  Synthetic
cccttugggcgattggugat

SEQ ID NO: 58204 - DNA, 22 bp, Artificial Sequence
  Synthetic
gggctggtuaggagagaaauca

SEQ ID NO: 58205 - DNA, 28 bp, Artificial Sequence
  Synthetic
cgagatcctuccagatgaatcaaaatuc

SEQ ID NO: 58206 - DNA, 27 bp, Artificial Sequence
  Synthetic
acttgtatugtagtcttcugcagcaaa

SEQ ID NO: 58207 - DNA, 28 bp, Artificial Sequence
  Synthetic
catctctgttucagtactaactcugcat

SEQ ID NO: 58208 - DNA, 28 bp, Artificial Sequence
  Synthetic
gctttggagaaaguagcttaactagcut

SEQ ID NO: 58209 - DNA, 28 bp, Artificial Sequence
  Synthetic
cagtcaaaggttgutcctctagacaaua

SEQ ID NO: 58210 - DNA, 20 bp, Artificial Sequence
  Synthetic
gctcaagaaugcaggcuggt

SEQ ID NO: 58211 - DNA, 28 bp, Artificial Sequence
  Synthetic
agcattgggtgutggaaatgattauaga

SEQ ID NO: 58212 - DNA, 26 bp, Artificial Sequence
  Synthetic
caatcgtgcucatgttgatattuggt

SEQ ID NO: 58213 - DNA, 26 bp, Artificial Sequence
  Synthetic
acttgttttacucaccctttctccug

SEQ ID NO: 58214 - DNA, 27 bp, Artificial Sequence
  Synthetic
gaatggtaaggaaucgagacattgcua

SEQ ID NO: 58215 - DNA, 26 bp, Artificial Sequence
  Synthetic
caaacaaaautctacucacacgagca

SEQ ID NO: 58216 - DNA, 24 bp, Artificial Sequence
  Synthetic
cctcctacuccttggtctatucct

SEQ ID NO: 58217 - DNA, 27 bp, Artificial Sequence
  Synthetic
ttggctagaguaaatgaagacacgtut

SEQ ID NO: 58218 - DNA, 28 bp, Artificial Sequence
  Synthetic
ctcttagtatctgaguccttctccacut

SEQ ID NO: 58219 - DNA, 23 bp, Artificial Sequence
  Synthetic
gttcttgcaguggtaggtgaugt

SEQ ID NO: 58220 - DNA, 27 bp, Artificial Sequence
  Synthetic
ggaaagacuagagaagactttgtccut

SEQ ID NO: 58221 - DNA, 22 bp, Artificial Sequence
  Synthetic
ctgctctcugattcctgugcat

SEQ ID NO: 58222 - DNA, 27 bp, Artificial Sequence
  Synthetic
agttaaaccactucattagggcaagut

SEQ ID NO: 58223 - DNA, 20 bp, Artificial Sequence
  Synthetic
ggagagucacagccaucgac

SEQ ID NO: 58224 - DNA, 21 bp, Artificial Sequence
  Synthetic
ggacctttuccagtggugagt

SEQ ID NO: 58225 - DNA, 26 bp, Artificial Sequence
  Synthetic
tgtataatuccaaccagcagagucag

SEQ ID NO: 58226 - DNA, 24 bp, Artificial Sequence
  Synthetic
ccagcaccagutcgtattatgugt

SEQ ID NO: 58227 - DNA, 29 bp, Artificial Sequence
  Synthetic
gatcagcagttucatttcttagaccuagt

SEQ ID NO: 58228 - DNA, 20 bp, Artificial Sequence
  Synthetic
gcctctccugttccttcuca

SEQ ID NO: 58229 - DNA, 18 bp, Artificial Sequence
  Synthetic
gtcguaaggcagcuccga

SEQ ID NO: 58230 - DNA, 22 bp, Artificial Sequence
  Synthetic
gtgugaagacagccgtguagat

SEQ ID NO: 58231 - DNA, 20 bp, Artificial Sequence
  Synthetic
gcagagaugtcatcgcucct

SEQ ID NO: 58232 - DNA, 20 bp, Artificial Sequence
  Synthetic
actgaagcucatgcgucgag

SEQ ID NO: 58233 - DNA, 23 bp, Artificial Sequence
  Synthetic
tgactgcauccattcgtctgtut

SEQ ID NO: 58234 - DNA, 19 bp, Artificial Sequence
  Synthetic
ggaggcutggguagcacac

SEQ ID NO: 58235 - DNA, 21 bp, Artificial Sequence
  Synthetic
ttgagccucactgtccatguc

SEQ ID NO: 58236 - DNA, 21 bp, Artificial Sequence
  Synthetic
gcctgctguttgcttggaaug

SEQ ID NO: 58237 - DNA, 24 bp, Artificial Sequence
  Synthetic
cccaacttaugccactctctgtut

SEQ ID NO: 58238 - DNA, 22 bp, Artificial Sequence
  Synthetic
cggcactgcaugcaatttctut

SEQ ID NO: 58239 - DNA, 20 bp, Artificial Sequence
  Synthetic
acggtgccugttctgcuaag

SEQ ID NO: 58240 - DNA, 20 bp, Artificial Sequence
  Synthetic
catgcagcaguctcguccat

SEQ ID NO: 58241 - DNA, 22 bp, Artificial Sequence
  Synthetic
gctgaaaagauggctgtugacc

SEQ ID NO: 58242 - DNA, 22 bp, Artificial Sequence
  Synthetic
acttgctgagguactggtggua

SEQ ID NO: 58243 - DNA, 26 bp, Artificial Sequence
  Synthetic
gctaactttgggcutttcttgcauat

SEQ ID NO: 58244 - DNA, 23 bp, Artificial Sequence
  Synthetic
cggttctugaagctggtaagugg

SEQ ID NO: 58245 - DNA, 28 bp, Artificial Sequence
  Synthetic
agauaagcagcagtatttugacagacaa

SEQ ID NO: 58246 - DNA, 25 bp, Artificial Sequence
  Synthetic
aagaaacuttcgagtaucggcaaga

SEQ ID NO: 58247 - DNA, 28 bp, Artificial Sequence
  Synthetic
gcaccatagaguccattcaggattttua

SEQ ID NO: 58248 - DNA, 28 bp, Artificial Sequence
  Synthetic
cactatctctcucatttttgcttgaugg

SEQ ID NO: 58249 - DNA, 23 bp, Artificial Sequence
  Synthetic
agcatgtcuacgtgcaaatgtug

SEQ ID NO: 58250 - DNA, 25 bp, Artificial Sequence
  Synthetic
taatcatgaggcuaagagcguacac

SEQ ID NO: 58251 - DNA, 21 bp, Artificial Sequence
  Synthetic
gtattgctcugacccctccuc

SEQ ID NO: 58252 - DNA, 24 bp, Artificial Sequence
  Synthetic
cattcatattugccccgtcuaggt

SEQ ID NO: 58253 - DNA, 26 bp, Artificial Sequence
  Synthetic
catgtccttctcuaccccttttctut

SEQ ID NO: 58254 - DNA, 25 bp, Artificial Sequence
  Synthetic
ggtataccuaccccactctgaugag

SEQ ID NO: 58255 - DNA, 26 bp, Artificial Sequence
  Synthetic
cacgattgttcuttgttgtctgtcut

SEQ ID NO: 58256 - DNA, 19 bp, Artificial Sequence
  Synthetic
ggcctcucacctguagcac

SEQ ID NO: 58257 - DNA, 24 bp, Artificial Sequence
  Synthetic
gcagtcagttuggacaagacctut

SEQ ID NO: 58258 - DNA, 29 bp, Artificial Sequence
  Synthetic
agaatggaaaatagaaucaaagggctgut

SEQ ID NO: 58259 - DNA, 22 bp, Artificial Sequence
  Synthetic
gacagtaccagcugatgcauct

SEQ ID NO: 58260 - DNA, 25 bp, Artificial Sequence
  Synthetic
gctgctactutattgccaatgugaa

SEQ ID NO: 58261 - DNA, 18 bp, Artificial Sequence
  Synthetic
ctgggccacuggagucaa

SEQ ID NO: 58262 - DNA, 21 bp, Artificial Sequence
  Synthetic
gctccagtgugctagccatua

SEQ ID NO: 58263 - DNA, 22 bp, Artificial Sequence
  Synthetic
ttgcagauggcctcatactugt

SEQ ID NO: 58264 - DNA, 25 bp, Artificial Sequence
  Synthetic
gatgagcaagauaggaaggcagtua

SEQ ID NO: 58265 - DNA, 21 bp, Artificial Sequence
  Synthetic
autgttgcacuacagcaccct

SEQ ID NO: 58266 - DNA, 23 bp, Artificial Sequence
  Synthetic
gcatgacuccctctgcagauaac

SEQ ID NO: 58267 - DNA, 28 bp, Artificial Sequence
  Synthetic
ggaauatgagaagaatucagagccacat

SEQ ID NO: 58268 - DNA, 27 bp, Artificial Sequence
  Synthetic
tgagcatggauccctttttgattacut

SEQ ID NO: 58269 - DNA, 24 bp, Artificial Sequence
  Synthetic
ccagccuccaccttctatttucat

SEQ ID NO: 58270 - DNA, 28 bp, Artificial Sequence
  Synthetic
aaaaccaatctatutgcttccacttucc

SEQ ID NO: 58271 - DNA, 24 bp, Artificial Sequence
  Synthetic
ttcatcggctuctggttcttctut

SEQ ID NO: 58272 - DNA, 21 bp, Artificial Sequence
  Synthetic
ccctcaatcccucagaggcut

SEQ ID NO: 58273 - DNA, 21 bp, Artificial Sequence
  Synthetic
acctttggugccttcctcauc

SEQ ID NO: 58274 - DNA, 21 bp, Artificial Sequence
  Synthetic
caggctggucctgatacctut

SEQ ID NO: 58275 - DNA, 20 bp, Artificial Sequence
  Synthetic
ctgatggugcccctctctuc

SEQ ID NO: 58276 - DNA, 22 bp, Artificial Sequence
  Synthetic
tcccagagugacccttgtctua

SEQ ID NO: 58277 - DNA, 21 bp, Artificial Sequence
  Synthetic
ctctgagccugactcacucac

SEQ ID NO: 58278 - DNA, 22 bp, Artificial Sequence
  Synthetic
agaaatgacaccugcgtucaga

SEQ ID NO: 58279 - DNA, 24 bp, Artificial Sequence
  Synthetic
agcaaggaagccautactuacagg

SEQ ID NO: 58280 - DNA, 21 bp, Artificial Sequence
  Synthetic
acauaggtcuccagggaccat

SEQ ID NO: 58281 - DNA, 21 bp, Artificial Sequence
  Synthetic
ctttctgggcutcaagggcua

SEQ ID NO: 58282 - DNA, 21 bp, Artificial Sequence
  Synthetic
tguggagaaacagcccttucc

SEQ ID NO: 58283 - DNA, 28 bp, Artificial Sequence
  Synthetic
ttcttgcaagutcaaaaatccttucgat

SEQ ID NO: 58284 - DNA, 22 bp, Artificial Sequence
  Synthetic
cctcugaccaccagatgcttug

SEQ ID NO: 58285 - DNA, 21 bp, Artificial Sequence
  Synthetic
tcaagugcagtgttgugaggt

SEQ ID NO: 58286 - DNA, 27 bp, Artificial Sequence
  Synthetic
gaagatgtacccaugctcataactgua

SEQ ID NO: 58287 - DNA, 27 bp, Artificial Sequence
  Synthetic
tgacctgaaacgugataagaattcgut

SEQ ID NO: 58288 - DNA, 21 bp, Artificial Sequence
  Synthetic
cttgccacugctgcagatcua

SEQ ID NO: 58289 - DNA, 28 bp, Artificial Sequence
  Synthetic
cacagagaacagautttgtagacccaut

SEQ ID NO: 58290 - DNA, 28 bp, Artificial Sequence
  Synthetic
cctaggtattucaggttctttgctuaca

SEQ ID NO: 58291 - DNA, 22 bp, Artificial Sequence
  Synthetic
cuatgcaatugacccccaaacc

SEQ ID NO: 58292 - DNA, 29 bp, Artificial Sequence
  Synthetic
gattgactcgugttattactctuccagaa

SEQ ID NO: 58293 - DNA, 28 bp, Artificial Sequence
  Synthetic
tcattgcactgugttttaacttgguaac

SEQ ID NO: 58294 - DNA, 23 bp, Artificial Sequence
  Synthetic
tccatggattugggttgaaacut

SEQ ID NO: 58295 - DNA, 27 bp, Artificial Sequence
  Synthetic
ccctgcagtcaautattacttttggut

SEQ ID NO: 58296 - DNA, 20 bp, Artificial Sequence
  Synthetic
ctgcagaccuaccaccccua

SEQ ID NO: 58297 - DNA, 20 bp, Artificial Sequence
  Synthetic
catcctucgccaaccuccaa

SEQ ID NO: 58298 - DNA, 23 bp, Artificial Sequence
  Synthetic
ctcatcaccaucctggaugacaa

SEQ ID NO: 58299 - DNA, 20 bp, Artificial Sequence
  Synthetic
gcaaacuccgtguccaacct

SEQ ID NO: 58300 - DNA, 21 bp, Artificial Sequence
  Synthetic
cccctgaccagcucctttcua

SEQ ID NO: 58301 - DNA, 22 bp, Artificial Sequence
  Synthetic
gtcccttccaugagtgatguga

SEQ ID NO: 58302 - DNA, 23 bp, Artificial Sequence
  Synthetic
gctccctugacctgttgtcttut

SEQ ID NO: 58303 - DNA, 19 bp, Artificial Sequence
  Synthetic
gucggcaggactugaagca

SEQ ID NO: 58304 - DNA, 27 bp, Artificial Sequence
  Synthetic
ttugaaggcaagaagacugacaaaaag

SEQ ID NO: 58305 - DNA, 27 bp, Artificial Sequence
  Synthetic
caatggctttcugttcaagttttucca

SEQ ID NO: 58306 - DNA, 21 bp, Artificial Sequence
  Synthetic
tgagggugcatctcuagagca

SEQ ID NO: 58307 - DNA, 25 bp, Artificial Sequence
  Synthetic
ctaaccacccucccatctatttucc

SEQ ID NO: 58308 - DNA, 21 bp, Artificial Sequence
  Synthetic
agaggcaaagcgauccaucaa

SEQ ID NO: 58309 - DNA, 23 bp, Artificial Sequence
  Synthetic
ggatcgagucaacatctgcctuc

SEQ ID NO: 58310 - DNA, 23 bp, Artificial Sequence
  Synthetic
gagggagcugatggatcttuacc

SEQ ID NO: 58311 - DNA, 21 bp, Artificial Sequence
  Synthetic
caatggagccauccctcucaa

SEQ ID NO: 58312 - DNA, 20 bp, Artificial Sequence
  Synthetic
gggaguggaatccccuggat

SEQ ID NO: 58313 - DNA, 26 bp, Artificial Sequence
  Synthetic
cagacatuaagcacagcaagataugg

SEQ ID NO: 58314 - DNA, 23 bp, Artificial Sequence
  Synthetic
ccgaacautctcatcugagacct

SEQ ID NO: 58315 - DNA, 19 bp, Artificial Sequence
  Synthetic
cacccucccgagctcaaug

SEQ ID NO: 58316 - DNA, 25 bp, Artificial Sequence
  Synthetic
cttctggaacucaccatttgactug

SEQ ID NO: 58317 - DNA, 21 bp, Artificial Sequence
  Synthetic
cacggagcuctttgugaaagg

SEQ ID NO: 58318 - DNA, 22 bp, Artificial Sequence
  Synthetic
cccagauccaggacacagaauc

SEQ ID NO: 58319 - DNA, 20 bp, Artificial Sequence
  Synthetic
ccugctgcctucacacacaa

SEQ ID NO: 58320 - DNA, 22 bp, Artificial Sequence
  Synthetic
ccuacctgcatuagagcaaccc

SEQ ID NO: 58321 - DNA, 27 bp, Artificial Sequence
  Synthetic
aaguaggttucaaacaggagaaggaaa

SEQ ID NO: 58322 - DNA, 21 bp, Artificial Sequence
  Synthetic
agccuacccttccuccacaat

SEQ ID NO: 58323 - DNA, 21 bp, Artificial Sequence
  Synthetic
ttctccagcagcautctgguc

SEQ ID NO: 58324 - DNA, 18 bp, Artificial Sequence
  Synthetic
ggagagcacgcugacgut

SEQ ID NO: 58325 - DNA, 21 bp, Artificial Sequence
  Synthetic
gtagatgagguggtcccggua

SEQ ID NO: 58326 - DNA, 21 bp, Artificial Sequence
  Synthetic
tccagggcauacctcttguct

SEQ ID NO: 58327 - DNA, 22 bp, Artificial Sequence
  Synthetic
gccgcgaacutggcaaattuat

SEQ ID NO: 58328 - DNA, 17 bp, Artificial Sequence
  Synthetic
cgaaggcaccguccuct

SEQ ID NO: 58329 - DNA, 28 bp, Artificial Sequence
  Synthetic
gtaacactagatucagcaattcctcuga

SEQ ID NO: 58330 - DNA, 28 bp, Artificial Sequence
  Synthetic
tgaagataccagauccttggagattuct

SEQ ID NO: 58331 - DNA, 28 bp, Artificial Sequence
  Synthetic
aggtgatcttttatuacttcccagccua

SEQ ID NO: 58332 - DNA, 28 bp, Artificial Sequence
  Synthetic
gaggtttctgaaaugtgtatagcttguc

SEQ ID NO: 58333 - DNA, 25 bp, Artificial Sequence
  Synthetic
cgcagauagggctacaggauaaaac

SEQ ID NO: 58334 - DNA, 28 bp, Artificial Sequence
  Synthetic
tcattttggaagutcactggtctaugaa

SEQ ID NO: 58335 - DNA, 28 bp, Artificial Sequence
  Synthetic
tcatcatgtatacutacagggctttugg

SEQ ID NO: 58336 - DNA, 27 bp, Artificial Sequence
  Synthetic
cactgctatttugtattcactgtugct

SEQ ID NO: 58337 - DNA, 24 bp, Artificial Sequence
  Synthetic
gggatagagcgaauacacagacuc

SEQ ID NO: 58338 - DNA, 27 bp, Artificial Sequence
  Synthetic
gtgaagttttgtuaaccacttgtgcua

SEQ ID NO: 58339 - DNA, 22 bp, Artificial Sequence
  Synthetic
tcatgaaaucctaggccuccca

SEQ ID NO: 58340 - DNA, 28 bp, Artificial Sequence
  Synthetic
acaggagaatauggaaatctggtgacua

SEQ ID NO: 58341 - DNA, 25 bp, Artificial Sequence
  Synthetic
cactaaaacuctaagggcuaagcca

SEQ ID NO: 58342 - DNA, 21 bp, Artificial Sequence
  Synthetic
accgccugcaatagctugaaa

SEQ ID NO: 58343 - DNA, 22 bp, Artificial Sequence
  Synthetic
gcattggcautcatgtuggcat

SEQ ID NO: 58344 - DNA, 23 bp, Artificial Sequence
  Synthetic
ctgacutctttctcugcccacat

SEQ ID NO: 58345 - DNA, 19 bp, Artificial Sequence
  Synthetic
gcauggcgaaggcaaagut

SEQ ID NO: 58346 - DNA, 21 bp, Artificial Sequence
  Synthetic
ggccttgguccagagcuaaag

SEQ ID NO: 58347 - DNA, 21 bp, Artificial Sequence
  Synthetic
cccttgautctgacacuggca

SEQ ID NO: 58348 - DNA, 20 bp, Artificial Sequence
  Synthetic
gggtcgaguccagugagaaa

SEQ ID NO: 58349 - DNA, 18 bp, Artificial Sequence
  Synthetic
ctgcccauctgcgaguca

SEQ ID NO: 58350 - DNA, 27 bp, Artificial Sequence
  Synthetic
gtcctatggcauttgggatauaagcat

SEQ ID NO: 58351 - DNA, 26 bp, Artificial Sequence
  Synthetic
ctaagctttugaagcattcggtcaut

SEQ ID NO: 58352 - DNA, 23 bp, Artificial Sequence
  Synthetic
gttcatucccaaacacacgaguc

SEQ ID NO: 58353 - DNA, 27 bp, Artificial Sequence
  Synthetic
gtacctttgcauaatcctggtgtttut

SEQ ID NO: 58354 - DNA, 20 bp, Artificial Sequence
  Synthetic
tgccagacacutcagugcat

SEQ ID NO: 58355 - DNA, 27 bp, Artificial Sequence
  Synthetic
ccagctttctcuaaagaactccttuct

SEQ ID NO: 58356 - DNA, 23 bp, Artificial Sequence
  Synthetic
gggtcacacugagatttcugaaa

SEQ ID NO: 58357 - DNA, 23 bp, Artificial Sequence
  Synthetic
gatggctguggagatcaatguca

SEQ ID NO: 58358 - DNA, 29 bp, Artificial Sequence
  Synthetic
catttaagguaaaagctaacagtcugcat

SEQ ID NO: 58359 - DNA, 30 bp, Artificial Sequence; identical to SEQ ID NO: 26763
  Synthetic

SEQ ID NO: 58360 - DNA, 27 bp, Artificial Sequence
  Synthetic
caaaggcagaauatatcctgactucct

SEQ ID NO: 58361 - DNA, 25 bp, Artificial Sequence
  Synthetic
ggagacuacccaaaagcaaatggut

SEQ ID NO: 58362 - DNA, 23 bp, Artificial Sequence
  Synthetic
cagctcauagggaagtgatgcuc

SEQ ID NO: 58363 - DNA, 22 bp, Artificial Sequence
  Synthetic
tgaaaacauggcccactgctua

SEQ ID NO: 58364 - DNA, 21 bp, Artificial Sequence
  Synthetic
gtagggcautagctggugact

SEQ ID NO: 58365 - DNA, 24 bp, Artificial Sequence
  Synthetic
aaccagaattttugccagcagaug

SEQ ID NO: 58366 - DNA, 30 bp, Artificial Sequence
  Synthetic
ttgtttcattccaaautggagatguagaga

SEQ ID NO: 58367 - DNA, 27 bp, Artificial Sequence
  Synthetic
tccactatucagtaagagtuccaccaa

SEQ ID NO: 58368 - DNA, 28 bp, Artificial Sequence
  Synthetic
cttgcctcctuctatgacaatccuaaaa

SEQ ID NO: 58369 - DNA, 28 bp, Artificial Sequence
  Synthetic
catgtttctaaaggutctgttccagcua

SEQ ID NO: 58370 - DNA, 29 bp, Artificial Sequence
  Synthetic
ctttgcaatguctggaccttttauaaaca

SEQ ID NO: 58371 - DNA, 26 bp, Artificial Sequence
  Synthetic
aggcctttctugaggattttcttuca

SEQ ID NO: 58372 - DNA, 28 bp, Artificial Sequence
  Synthetic
gtaaaggaagccutaaaaatgtcaugct

SEQ ID NO: 58373 - DNA, 24 bp, Artificial Sequence
  Synthetic
catcattcacaucattgccctgut

SEQ ID NO: 58374 - DNA, 21 bp, Artificial Sequence
  Synthetic
cccugtgggcaugagaagaag

SEQ ID NO: 58375 - DNA, 28 bp, Artificial Sequence
  Synthetic
ggttcattctutgctgcttattugacaa

SEQ ID NO: 58376 - DNA, 23 bp, Artificial Sequence
  Synthetic
ccagtcttgcucctcaagauacc

SEQ ID NO: 58377 - DNA, 25 bp, Artificial Sequence
  Synthetic
ggtgtcttcccacuataaccatcuc

SEQ ID NO: 58378 - DNA, 21 bp, Artificial Sequence
  Synthetic
gcgccgttutcctaacagtut

SEQ ID NO: 58379 - DNA, 23 bp, Artificial Sequence
  Synthetic
gcctccacuatgtttcgaaugac

SEQ ID NO: 58380 - DNA, 27 bp, Artificial Sequence
  Synthetic
aaaagaaggauaaagagatggcagguc

SEQ ID NO: 58381 - DNA, 27 bp, Artificial Sequence
  Synthetic
agtatgacaagcutctcattgctgaut

SEQ ID NO: 58382 - DNA, 26 bp, Artificial Sequence
  Synthetic
tcagttttaccucattgctttcugct

SEQ ID NO: 58383 - DNA, 27 bp, Artificial Sequence
  Synthetic
atttaagctggaggauttgttggttug

SEQ ID NO: 58384 - DNA, 24 bp, Artificial Sequence
  Synthetic
atcagctuccaacgaatucagact

SEQ ID NO: 58385 - DNA, 23 bp, Artificial Sequence
  Synthetic
ccuaaaaagccagagaccucact

SEQ ID NO: 58386 - DNA, 20 bp, Artificial Sequence
  Synthetic
tcagagauggccctgctgua

SEQ ID NO: 58387 - DNA, 21 bp, Artificial Sequence
  Synthetic
cuttcagucgggaggcaagat

SEQ ID NO: 58388 - DNA, 22 bp, Artificial Sequence
  Synthetic
ctcagctgcguctttcttcuct

SEQ ID NO: 58389 - DNA, 27 bp, Artificial Sequence
  Synthetic
accaagtgcuaaggattctttcatuga

SEQ ID NO: 58390 - DNA, 24 bp, Artificial Sequence
  Synthetic
gctttgctttucacagtgtttuct

SEQ ID NO: 58391 - DNA, 28 bp, Artificial Sequence
  Synthetic
gcaatgtaacuctttttgggcttugaat

SEQ ID NO: 58392 - DNA, 21 bp, Artificial Sequence
  Synthetic
catcuccccacacctccttug

SEQ ID NO: 58393 - DNA, 22 bp, Artificial Sequence
  Synthetic
agaagtcuccctgttctgucct

SEQ ID NO: 58394 - DNA, 26 bp, Artificial Sequence
  Synthetic
cacgaggatcaugactcggaaaauaa

SEQ ID NO: 58395 - DNA, 25 bp, Artificial Sequence
  Synthetic
ttccacuaataaaccttugcccact

SEQ ID NO: 58396 - DNA, 31 bp, Artificial Sequence
  Synthetic
tataatatgtgcutcttaccagucaaaaagt

SEQ ID NO: 58397 - DNA, 27 bp, Artificial Sequence
  Synthetic
ctctgcaugaagaccgagttauagaat

SEQ ID NO: 58398 - DNA, 28 bp, Artificial Sequence
  Synthetic
gctatttccttutgtgaattctguccca

SEQ ID NO: 58399 - DNA, 21 bp, Artificial Sequence
  Synthetic
ccuggauccaaaggagagcaa

SEQ ID NO: 58400 - DNA, 23 bp, Artificial Sequence
  Synthetic
ctccctgtgugttatggctcaut

SEQ ID NO: 58401 - DNA, 21 bp, Artificial Sequence
  Synthetic
gttcaccuggcttaccuggag

SEQ ID NO: 58402 - DNA, 24 bp, Artificial Sequence
  Synthetic
agcttctguggtgttttgatguct

SEQ ID NO: 58403 - DNA, 22 bp, Artificial Sequence
  Synthetic
acgctgacugttggtctttcuc

SEQ ID NO: 58404 - DNA, 23 bp, Artificial Sequence
  Synthetic
cgcctttcuattacactcuggct

SEQ ID NO: 58405 - DNA, 21 bp, Artificial Sequence
  Synthetic
gtgaccgaggauttcctggua

SEQ ID NO: 58406 - DNA, 23 bp, Artificial Sequence
  Synthetic
gtcctcgauctcattctguagcc

SEQ ID NO: 58407 - DNA, 26 bp, Artificial Sequence
  Synthetic
gctacacttcugaggtttcaaggaut

SEQ ID NO: 58408 - DNA, 24 bp, Artificial Sequence
  Synthetic
gggaaggcucatatcugagaccat

SEQ ID NO: 58409 - DNA, 20 bp, Artificial Sequence
  Synthetic
gucctguaccgcagaaaggg

SEQ ID NO: 58410 - DNA, 21 bp, Artificial Sequence
  Synthetic
cccagutccctucaggaagac

SEQ ID NO: 58411 - DNA, 24 bp, Artificial Sequence
  Synthetic
gcaagtcacugctccttttctauc

SEQ ID NO: 58412 - DNA, 21 bp, Artificial Sequence
  Synthetic
acttttacgcacugctgguga

SEQ ID NO: 58413 - DNA, 28 bp, Artificial Sequence
  Synthetic
ctggcttatttcucctcctattctccua

SEQ ID NO: 58414 - DNA, 33 bp, Artificial Sequence
  Synthetic
gaaaaatgtuccatttattactcuaacaagacc

SEQ ID NO: 58415 - DNA, 28 bp, Artificial Sequence
  Synthetic
gctcgcatugcagttttagttaattuga

SEQ ID NO: 58416 - DNA, 26 bp, Artificial Sequence
  Synthetic
tcagacaguttaacagaucgggaaac

SEQ ID NO: 58417 - DNA, 23 bp, Artificial Sequence
  Synthetic
gcctttgacacuggagaacugaa

SEQ ID NO: 58418 - DNA, 28 bp, Artificial Sequence
  Synthetic
ccattccactcugtgtagaattatcuca

SEQ ID NO: 58419 - DNA, 26 bp, Artificial Sequence
  Synthetic
aggcaaccagaggutaaagaaaugaa

SEQ ID NO: 58420 - DNA, 21 bp, Artificial Sequence
  Synthetic
cgtgtcucaagttcuccagca

SEQ ID NO: 58421 - DNA, 25 bp, Artificial Sequence
  Synthetic
tgattctgttucctaccctgtcuct

SEQ ID NO: 58422 - DNA, 23 bp, Artificial Sequence
  Synthetic
gattctctgccugcacatcttug

SEQ ID NO: 58423 - DNA, 20 bp, Artificial Sequence
  Synthetic
gggaatgugctgtgcctaug

SEQ ID NO: 58424 - DNA, 24 bp, Artificial Sequence
  Synthetic
cagagccacautcattgatgtcut

SEQ ID NO: 58425 - DNA, 22 bp, Artificial Sequence
  Synthetic
acatgccgcutcttatttugcc

SEQ ID NO: 58426 - DNA, 22 bp, Artificial Sequence
  Synthetic
gcactgcccaugactgcataua

SEQ ID NO: 58427 - DNA, 29 bp, Artificial Sequence
  Synthetic
gactatgcctgguaaatgagagtaagtut

SEQ ID NO: 58428 - DNA, 25 bp, Artificial Sequence
  Synthetic
caacacaaaauagcctaucgggagt

SEQ ID NO: 58429 - DNA, 28 bp, Artificial Sequence
  Synthetic
gcttatgtttgggugtttgttcttctua

SEQ ID NO: 58430 - DNA, 23 bp, Artificial Sequence
  Synthetic
cttcacagtucttcccatcucgt

SEQ ID NO: 58431 - DNA, 25 bp, Artificial Sequence
  Synthetic
ccaagatcaugagtttgcaaaugga

SEQ ID NO: 58432 - DNA, 21 bp, Artificial Sequence
  Synthetic
tgacttgtguaacccccugga

SEQ ID NO: 58433 - DNA, 21 bp, Artificial Sequence
  Synthetic
gccctccccuaccatactuga

SEQ ID NO: 58434 - DNA, 17 bp, Artificial Sequence
  Synthetic
gactggcgugtcgucct

SEQ ID NO: 58435 - DNA, 24 bp, Artificial Sequence
  Synthetic
tgttataaggcuggccatgaagug

SEQ ID NO: 58436 - DNA, 18 bp, Artificial Sequence
  Synthetic
ctatggtgguggcggcua

SEQ ID NO: 58437 - DNA, 17 bp, Artificial Sequence
  Synthetic
cgucccagguggacaca

SEQ ID NO: 58438 - DNA, 22 bp, Artificial Sequence
  Synthetic
ggcgttccuccagaaagaaauc

SEQ ID NO: 58439 - DNA, 21 bp, Artificial Sequence
  Synthetic
tgcaggtacucacgttggtuc

SEQ ID NO: 58440 - DNA, 18 bp, Artificial Sequence
  Synthetic
gagauggcgccttccuct

SEQ ID NO: 58441 - DNA, 17 bp, Artificial Sequence
  Synthetic
tcagcacggugcucaca

SEQ ID NO: 58442 - DNA, 21 bp, Artificial Sequence
  Synthetic
cagggutctuggagagcacat

SEQ ID NO: 58443 - DNA, 18 bp, Artificial Sequence
  Synthetic
ctgacgucacccauccca

SEQ ID NO: 58444 - DNA, 21 bp, Artificial Sequence
  Synthetic
ctgctcacautccgtctcuct

SEQ ID NO: 58445 - DNA, 21 bp, Artificial Sequence
  Synthetic
cagcucacugcacacagaaac

SEQ ID NO: 58446 - DNA, 20 bp, Artificial Sequence
  Synthetic
gagctgtcuaacgcccucat

SEQ ID NO: 58447 - DNA, 18 bp, Artificial Sequence
  Synthetic
ggagccacautgccguca

SEQ ID NO: 58448 - DNA, 19 bp, Artificial Sequence
  Synthetic
gaggtuaaggcccggucac

SEQ ID NO: 58449 - DNA, 23 bp, Artificial Sequence
  Synthetic
tttaaggcguccctctctacuct

SEQ ID NO: 58450 - DNA, 17 bp, Artificial Sequence
  Synthetic
ggaaaguggcggcccua

SEQ ID NO: 58451 - DNA, 21 bp, Artificial Sequence
  Synthetic
gtgtccagcguggttgtcuat

SEQ ID NO: 58452 - DNA, 21 bp, Artificial Sequence
  Synthetic
gtccaccccauacagcaugat

SEQ ID NO: 58453 - DNA, 18 bp, Artificial Sequence
  Synthetic
gcuccttgagugcgcaca

SEQ ID NO: 58454 - DNA, 18 bp, Artificial Sequence
  Synthetic
aacggagtuggcggagut

SEQ ID NO: 58455 - DNA, 21 bp, Artificial Sequence
  Synthetic
tcgauggcatuccagacacag

SEQ ID NO: 58456 - DNA, 17 bp, Artificial Sequence
  Synthetic
gcgtauctgggcucggt

SEQ ID NO: 58457 - DNA, 19 bp, Artificial Sequence
  Synthetic
ccgcaucacacagcgtcua

SEQ ID NO: 58458 - DNA, 18 bp, Artificial Sequence
  Synthetic
aggcatugagccggaugg

SEQ ID NO: 58459 - DNA, 19 bp, Artificial Sequence
  Synthetic
ctgtgaguggccucagcat

SEQ ID NO: 58460 - DNA, 23 bp, Artificial Sequence
  Synthetic
cgaagttuccacaccaaccauga

SEQ ID NO: 58461 - DNA, 19 bp, Artificial Sequence
  Synthetic
caacaugcaggcgcucaag

SEQ ID NO: 58462 - DNA, 19 bp, Artificial Sequence
  Synthetic
ctccuccccacagaacugg

SEQ ID NO: 58463 - DNA, 24 bp, Artificial Sequence
  Synthetic
caagcaggagguggaacauaagaa

SEQ ID NO: 58464 - DNA, 21 bp, Artificial Sequence
  Synthetic
actctagggccuaccccatut

SEQ ID NO: 58465 - DNA, 29 bp, Artificial Sequence
  Synthetic
cgctgacatttgutttatactgtgttgut

SEQ ID NO: 58466 - DNA, 23 bp, Artificial Sequence
  Synthetic
gctctacctcucaccatggacuc

SEQ ID NO: 58467 - DNA, 22 bp, Artificial Sequence
  Synthetic
gggctaaggacuctgtctccua

SEQ ID NO: 58468 - DNA, 20 bp, Artificial Sequence
  Synthetic
tcagcccagcaccutaggua

SEQ ID NO: 58469 - DNA, 21 bp, Artificial Sequence
  Synthetic
gaucgctgagaucgagaagca

SEQ ID NO: 58470 - DNA, 21 bp, Artificial Sequence
  Synthetic
ggtuggagaagagcucaccat

SEQ ID NO: 58471 - DNA, 28 bp, Artificial Sequence
  Synthetic
tctcgtcttaacutttcttgacccttut

SEQ ID NO: 58472 - DNA, 21 bp, Artificial Sequence
  Synthetic
gtccttgugggtgaactccuc

SEQ ID NO: 58473 - DNA, 22 bp, Artificial Sequence
  Synthetic
gctgtgaccaugtgttctcugt

SEQ ID NO: 58474 - DNA, 24 bp, Artificial Sequence
  Synthetic
ccacgcaucaagagaguaaaccaa

SEQ ID NO: 58475 - DNA, 22 bp, Artificial Sequence
  Synthetic
cttaccuggaccagtacctgug

SEQ ID NO: 58476 - DNA, 25 bp, Artificial Sequence
  Synthetic
gcccaacaugggcaaatatatacug

SEQ ID NO: 58477 - DNA, 24 bp, Artificial Sequence
  Synthetic
tttgactaagcuggtggtggauag

SEQ ID NO: 58478 - DNA, 22 bp, Artificial Sequence
  Synthetic
gggaaacagacugcaaaagugg

SEQ ID NO: 58479 - DNA, 21 bp, Artificial Sequence
  Synthetic
tccgccaugacaaaagggtut

SEQ ID NO: 58480 - DNA, 26 bp, Artificial Sequence
  Synthetic
ggtccaaaagacagugaagattccua

SEQ ID NO: 58481 - DNA, 27 bp, Artificial Sequence
  Synthetic
actgttttctgautgtctcacauccat

SEQ ID NO: 58482 - DNA, 24 bp, Artificial Sequence
  Synthetic
tcctaagccuaactgctugagagt

SEQ ID NO: 58483 - DNA, 25 bp, Artificial Sequence
  Synthetic
cctacccauccgttaagattggtua

SEQ ID NO: 58484 - DNA, 20 bp, Artificial Sequence
  Synthetic
gcagccacacgagutcugaa

SEQ ID NO: 58485 - DNA, 25 bp, Artificial Sequence
  Synthetic
tctggatuggaatcgtgagucaaat

SEQ ID NO: 58486 - DNA, 22 bp, Artificial Sequence
  Synthetic
agccggcccagauttatttuca

SEQ ID NO: 58487 - DNA, 22 bp, Artificial Sequence
  Synthetic
cgagtcucacctcgauacacca

SEQ ID NO: 58488 - DNA, 20 bp, Artificial Sequence
  Synthetic
gctctcugagcgaagucact

SEQ ID NO: 58489 - DNA, 21 bp, Artificial Sequence
  Synthetic
gagaataagugcagcccuggt

SEQ ID NO: 58490 - DNA, 22 bp, Artificial Sequence
  Synthetic
gtgtgatgauggtgaggauggg

SEQ ID NO: 58491 - DNA, 21 bp, Artificial Sequence
  Synthetic
cctcatctugggcctgtgtua

SEQ ID NO: 58492 - DNA, 21 bp, Artificial Sequence
  Synthetic
cctcacaaccuccgtcatgug

SEQ ID NO: 58493 - DNA, 26 bp, Artificial Sequence
  Synthetic
actttcaactctguctccttcctcut

SEQ ID NO: 58494 - DNA, 24 bp, Artificial Sequence
  Synthetic
agaacctggugatgtccaagtaug

SEQ ID NO: 58495 - DNA, 28 bp, Artificial Sequence
  Synthetic
ccctggatcagagaauagagagattcua

SEQ ID NO: 58496 - DNA, 28 bp, Artificial Sequence
  Synthetic
ccagggaacaagaaacucatctattuca

SEQ ID NO: 58497 - DNA, 22 bp, Artificial Sequence
  Synthetic
ccgtucaggcagaauagagact

SEQ ID NO: 58498 - DNA, 22 bp, Artificial Sequence
  Synthetic
gcttcucaagagaagggcaugt

SEQ ID NO: 58499 - DNA, 23 bp, Artificial Sequence
  Synthetic
ctccccaauaccattugcaaagt

SEQ ID NO: 58500 - DNA, 20 bp, Artificial Sequence
  Synthetic
catgtccguggagaaugcca

SEQ ID NO: 58501 - DNA, 22 bp, Artificial Sequence
  Synthetic
agtgggaacutctgtgcucaac

SEQ ID NO: 58502 - DNA, 21 bp, Artificial Sequence
  Synthetic
ctgggctcugggtctgatcua

SEQ ID NO: 58503 - DNA, 20 bp, Artificial Sequence
  Synthetic
tccccgcugactagtctugt

SEQ ID NO: 58504 - DNA, 23 bp, Artificial Sequence
  Synthetic
cgtctgagacutccaactgtcug

SEQ ID NO: 58505 - DNA, 20 bp, Artificial Sequence
  Synthetic
aaacuccgcugagcagaact

SEQ ID NO: 58506 - DNA, 21 bp, Artificial Sequence
  Synthetic
gcauaccccaagcuccaaagg

SEQ ID NO: 58507 - DNA, 24 bp, Artificial Sequence
  Synthetic
tgctgtgcaacucttataggagug

SEQ ID NO: 58508 - DNA, 21 bp, Artificial Sequence
  Synthetic
gctccaacuggagacucacct

SEQ ID NO: 58509 - DNA, 20 bp, Artificial Sequence
  Synthetic
gctccaaugccctcctgtuc

SEQ ID NO: 58510 - DNA, 24 bp, Artificial Sequence
  Synthetic
agggccagutactagagacaucag

SEQ ID NO: 58511 - DNA, 29 bp, Artificial Sequence
  Synthetic
ttgctaaauccagaaatacactctuccaa

SEQ ID NO: 58512 - DNA, 18 bp, Artificial Sequence
  Synthetic
gtcccuccccugaggaca

SEQ ID NO: 58513 - DNA, 19 bp, Artificial Sequence
  Synthetic
cgtcccagcugctcaaguc

SEQ ID NO: 58514 - DNA, 17 bp, Artificial Sequence
  Synthetic
gctccccucctgccuga

SEQ ID NO: 58515 - DNA, 17 bp, Artificial Sequence
  Synthetic
atcgacgucgcggtcut

SEQ ID NO: 58516 - DNA, 22 bp, Artificial Sequence
  Synthetic
gagtccgcuggagtcatctcua

SEQ ID NO: 58517 - DNA, 21 bp, Artificial Sequence
  Synthetic
gcctcaagguattgcuggaca

SEQ ID NO: 58518 - DNA, 25 bp, Artificial Sequence
  Synthetic
gttgatggcugtctgattagcuagg

SEQ ID NO: 58519 - DNA, 26 bp, Artificial Sequence
  Synthetic
agattctaaacctuccctcccttcut

SEQ ID NO: 58520 - DNA, 20 bp, Artificial Sequence
  Synthetic
gggacucccccagaagacua

SEQ ID NO: 58521 - DNA, 23 bp, Artificial Sequence
  Synthetic
actctcagcucatcctcttcucc

SEQ ID NO: 58522 - DNA, 22 bp, Artificial Sequence
  Synthetic
cacagagaaaggagugucagca

SEQ ID NO: 58523 - DNA, 22 bp, Artificial Sequence
  Synthetic
ccagggtggcutctgatatguc

SEQ ID NO: 58524 - DNA, 19 bp, Artificial Sequence
  Synthetic
ggaagccccgutaagucca

SEQ ID NO: 58525 - DNA, 26 bp, Artificial Sequence
  Synthetic
ctcatctgactuctcttggtttggut

SEQ ID NO: 58526 - DNA, 19 bp, Artificial Sequence
  Synthetic
gccacgugtggatguccaa

SEQ ID NO: 58527 - DNA, 20 bp, Artificial Sequence
  Synthetic
ctccgtctugatgtgcgtuc

SEQ ID NO: 58528 - DNA, 21 bp, Artificial Sequence
  Synthetic
catcuacgcccuccagagaaa

SEQ ID NO: 58529 - DNA, 20 bp, Artificial Sequence
  Synthetic
acatauggaggcucgggact

SEQ ID NO: 58530 - DNA, 22 bp, Artificial Sequence
  Synthetic
ctggaagaagacautgcccugt

SEQ ID NO: 58531 - DNA, 20 bp, Artificial Sequence
  Synthetic
tcacuggagggucgaacact

SEQ ID NO: 58532 - DNA, 21 bp, Artificial Sequence
  Synthetic
gcacgaucctgaucgagagga

SEQ ID NO: 58533 - DNA, 22 bp, Artificial Sequence
  Synthetic
ccttccaggagutcatgtcuga

SEQ ID NO: 58534 - DNA, 20 bp, Artificial Sequence
  Synthetic
tgccgcaagugtctagctuc

SEQ ID NO: 58535 - DNA, 28 bp, Artificial Sequence
  Synthetic
gcttgtaatcugctttttgatgucacat

SEQ ID NO: 58536 - DNA, 19 bp, Artificial Sequence
  Synthetic
ggcctcucagtcccgtgua

SEQ ID NO: 58537 - DNA, 17 bp, Artificial Sequence
  Synthetic
cccggcucagcacacuc

SEQ ID NO: 58538 - DNA, 17 bp, Artificial Sequence
  Synthetic
ccugcguccagcgagag

SEQ ID NO: 58539 - DNA, 22 bp, Artificial Sequence
  Synthetic
tcagcauggagacaaccaagug

SEQ ID NO: 58540 - DNA, 18 bp, Artificial Sequence
  Synthetic
gaccccagagcgugttug

SEQ ID NO: 58541 - DNA, 17 bp, Artificial Sequence
  Synthetic
cagcagcugggcacgua

SEQ ID NO: 58542 - DNA, 22 bp, Artificial Sequence
  Synthetic
tgctctccauggtcctgaatug

SEQ ID NO: 58543 - DNA, 25 bp, Artificial Sequence
  Synthetic
aagaggtgucagatccaauaggact

SEQ ID NO: 58544 - DNA, 21 bp, Artificial Sequence
  Synthetic
ctggtgccuacacacccttua

SEQ ID NO: 58545 - DNA, 23 bp, Artificial Sequence
  Synthetic
gggttgagaggutctgagttcug

SEQ ID NO: 58546 - DNA, 19 bp, Artificial Sequence
  Synthetic
gacugaggguggcagaact

SEQ ID NO: 58547 - DNA, 17 bp, Artificial Sequence
  Synthetic
cccugggccctcactug

SEQ ID NO: 58548 - DNA, 19 bp, Artificial Sequence
  Synthetic
gcucttugcgggcacagaa

SEQ ID NO: 58549 - DNA, 19 bp, Artificial Sequence
  Synthetic
caccugcagagcgacauga

SEQ ID NO: 58550 - DNA, 21 bp, Artificial Sequence
  Synthetic
cactgttcauctccccuagca

SEQ ID NO: 58551 - DNA, 20 bp, Artificial Sequence
  Synthetic
tcacaccugaaccgtcucac

SEQ ID NO: 58552 - DNA, 17 bp, Artificial Sequence
  Synthetic
ctgcgaggccucagcua

SEQ ID NO: 58553 - DNA, 17 bp, Artificial Sequence
  Synthetic
gagctcggucaccguca

SEQ ID NO: 58554 - DNA, 18 bp, Artificial Sequence
  Synthetic
gggcgccugagattguga

SEQ ID NO: 58555 - DNA, 18 bp, Artificial Sequence
  Synthetic
cucacgcaggucagcaac

SEQ ID NO: 58556 - DNA, 20 bp, Artificial Sequence
  Synthetic
ggagtcctuggtccccaaug

SEQ ID NO: 58557 - DNA, 21 bp, Artificial Sequence
  Synthetic
ctcctcuccatcgtcuccaga

SEQ ID NO: 58558 - DNA, 20 bp, Artificial Sequence
  Synthetic
gggaaagaggccugagaguc

SEQ ID NO: 58559 - DNA, 21 bp, Artificial Sequence
  Synthetic
gctgtcccagcauctgtctuc

SEQ ID NO: 58560 - DNA, 22 bp, Artificial Sequence
  Synthetic
ggacaaaaggagcaagucugga

SEQ ID NO: 58561 - DNA, 26 bp, Artificial Sequence
  Synthetic
tgatatttgcagcuggacatcgatua

SEQ ID NO: 58562 - DNA, 23 bp, Artificial Sequence
  Synthetic
ccaggtggacagauacagcgaua

SEQ ID NO: 58563 - DNA, 22 bp, Artificial Sequence
  Synthetic
acagtcatgcuaaaccgcugaa

SEQ ID NO: 58564 - DNA, 22 bp, Artificial Sequence
  Synthetic
gagguagagaagcaguggaaca

SEQ ID NO: 58565 - DNA, 21 bp, Artificial Sequence
  Synthetic
gccatccugtctgtgaauggg

SEQ ID NO: 58566 - DNA, 24 bp, Artificial Sequence
  Synthetic
ggacctguagataccatacuccca

SEQ ID NO: 58567 - DNA, 23 bp, Artificial Sequence
  Synthetic
ctgattctctccucctccctcut

SEQ ID NO: 58568 - DNA, 18 bp, Artificial Sequence
  Synthetic
acugcuaggccaggaggt

SEQ ID NO: 58569 - DNA, 19 bp, Artificial Sequence
  Synthetic
ctcaggcccauccctacuc

SEQ ID NO: 58570 - DNA, 21 bp, Artificial Sequence
  Synthetic
gccauccatctuggagacagt

SEQ ID NO: 58571 - DNA, 23 bp, Artificial Sequence
  Synthetic
cggacggaaaaagagucucagaa

SEQ ID NO: 58572 - DNA, 27 bp, Artificial Sequence
  Synthetic
tcctcaaacagauaactcacttccuca

SEQ ID NO: 58573 - DNA, 24 bp, Artificial Sequence
  Synthetic
gttgacctggagutgtcatcctut

SEQ ID NO: 58574 - DNA, 21 bp, Artificial Sequence
  Synthetic
ggcaagcucaggttucccaat

SEQ ID NO: 58575 - DNA, 24 bp, Artificial Sequence
  Synthetic
gagaatgaacaugcccattuccag

SEQ ID NO: 58576 - DNA, 26 bp, Artificial Sequence
  Synthetic
ccaagaaccaggaaaaucaatctgut

SEQ ID NO: 58577 - DNA, 21 bp, Artificial Sequence
  Synthetic
gatctcccgcuggtacttuga

SEQ ID NO: 58578 - DNA, 28 bp, Artificial Sequence
  Synthetic
tcaatggttgaauagcacatacctucat

SEQ ID NO: 58579 - DNA, 22 bp, Artificial Sequence
  Synthetic
gccagctcuccagttcaguaag

SEQ ID NO: 58580 - DNA, 24 bp, Artificial Sequence
  Synthetic
acatccacucacctgaacaatuga

SEQ ID NO: 58581 - DNA, 28 bp, Artificial Sequence
  Synthetic
gtgtcaacaguttttcccttaattucct

SEQ ID NO: 58582 - DNA, 25 bp, Artificial Sequence
  Synthetic
cctagccuagcaggaaaaatucact

SEQ ID NO: 58583 - DNA, 24 bp, Artificial Sequence
  Synthetic
gctctgatgcuaggcagctttaug

SEQ ID NO: 58584 - DNA, 20 bp, Artificial Sequence
  Synthetic
ccaagcgagcgaaugtgtug

SEQ ID NO: 58585 - DNA, 24 bp, Artificial Sequence
  Synthetic
gtgtctcctucaccacctcattut

SEQ ID NO: 58586 - DNA, 28 bp, Artificial Sequence
  Synthetic
caggatgatttaugcttctactgcauct

SEQ ID NO: 58587 - DNA, 18 bp, Artificial Sequence
  Synthetic
ccgucgaggaccgaguca

SEQ ID NO: 58588 - DNA, 27 bp, Artificial Sequence
  Synthetic
aacaaattttctcuctcacccagucat

SEQ ID NO: 58589 - DNA, 27 bp, Artificial Sequence
  Synthetic
ggaagttagaagauctgagctcugagt

SEQ ID NO: 58590 - DNA, 28 bp, Artificial Sequence
  Synthetic
caaaaacauaggaacaaagcctuaacca

SEQ ID NO: 58591 - DNA, 24 bp, Artificial Sequence
  Synthetic
aaagaaugaagcagagccagagut

SEQ ID NO: 58592 - DNA, 28 bp, Artificial Sequence
  Synthetic
aatcaactcgugtaattaccatucacca

SEQ ID NO: 58593 - DNA, 23 bp, Artificial Sequence
  Synthetic
ggctugaaagggcaaguagaagt

SEQ ID NO: 58594 - DNA, 24 bp, Artificial Sequence
  Synthetic
ggaguatttctgaucccaaaggca

SEQ ID NO: 58595 - DNA, 28 bp, Artificial Sequence
  Synthetic
gatgaaagtgtucctacaggttaucaca

SEQ ID NO: 58596 - DNA, 20 bp, Artificial Sequence
  Synthetic
gaacctgauggcccgtttut

SEQ ID NO: 58597 - DNA, 21 bp, Artificial Sequence
  Synthetic
ggcaggauggagaggaguaca

SEQ ID NO: 58598 - DNA, 22 bp, Artificial Sequence
  Synthetic
ccttcacucacctctgcttugt

SEQ ID NO: 58599 - DNA, 28 bp, Artificial Sequence
  Synthetic
cccataatauccaaatccauggcaaagt

SEQ ID NO: 58600 - DNA, 21 bp, Artificial Sequence
  Synthetic
gccgtgaccutctcactcuaa

SEQ ID NO: 58601 - DNA, 23 bp, Artificial Sequence
  Synthetic
ttctttgggaaggcugccttuaa

SEQ ID NO: 58602 - DNA, 18 bp, Artificial Sequence
  Synthetic
accacccccuccagcuac

SEQ ID NO: 58603 - DNA, 20 bp, Artificial Sequence
  Synthetic
gctgaattcccugccggaut

SEQ ID NO: 58604 - DNA, 20 bp, Artificial Sequence
  Synthetic
cctccacacugagtcauggt

SEQ ID NO: 58605 - DNA, 27 bp, Artificial Sequence
  Synthetic
tccagtgtgtautgaaatttgagguct

SEQ ID NO: 58606 - DNA, 28 bp, Artificial Sequence
  Synthetic
actttctgataaacauattggctgcugt

SEQ ID NO: 58607 - DNA, 23 bp, Artificial Sequence
  Synthetic
gccctacccucttccttcttcuc

SEQ ID NO: 58608 - DNA, 20 bp, Artificial Sequence
  Synthetic
gctggttuggaacaguccga

SEQ ID NO: 58609 - DNA, 20 bp, Artificial Sequence
  Synthetic
gcccccgguttgtcagttut

SEQ ID NO: 58610 - DNA, 26 bp, Artificial Sequence
  Synthetic
ctcacaggcaaagauggtgatctuat

SEQ ID NO: 58611 - DNA, 25 bp, Artificial Sequence
  Synthetic
gcagtttgtcucactacagctaugt

SEQ ID NO: 58612 - DNA, 23 bp, Artificial Sequence
  Synthetic
gggtgtggugaaggattctccua

SEQ ID NO: 58613 - DNA, 24 bp, Artificial Sequence
  Synthetic
actacattccaagucctccacuca

SEQ ID NO: 58614 - DNA, 21 bp, Artificial Sequence
  Synthetic
cccttgtutgcagacauaccc

SEQ ID NO: 58615 - DNA, 24 bp, Artificial Sequence
  Synthetic
gacctttgcaaucacggaacatut

SEQ ID NO: 58616 - DNA, 23 bp, Artificial Sequence
  Synthetic
tgtaacccaacaaagguggugaa

SEQ ID NO: 58617 - DNA, 27 bp, Artificial Sequence
  Synthetic
cacagucacttgatuacaaaaaggcat

SEQ ID NO: 58618 - DNA, 23 bp, Artificial Sequence
  Synthetic
ggaatggucaggtagaggauggt

SEQ ID NO: 58619 - DNA, 20 bp, Artificial Sequence
  Synthetic
tcctcgtccuctgacaggug

SEQ ID NO: 58620 - DNA, 28 bp, Artificial Sequence
  Synthetic
aagtggtaacucatgtttaatgguggaa

SEQ ID NO: 58621 - DNA, 28 bp, Artificial Sequence
  Synthetic
cctctgtgttttgugagactagactcua

SEQ ID NO: 58622 - DNA, 26 bp, Artificial Sequence
  Synthetic
agttcttttatttugtgctgccccua

SEQ ID NO: 58623 - DNA, 28 bp, Artificial Sequence
  Synthetic
cctgagaagcaauagatctagctgttut

SEQ ID NO: 58624 - DNA, 20 bp, Artificial Sequence
  Synthetic
cacutaggacuaccgccagt

SEQ ID NO: 58625 - DNA, 25 bp, Artificial Sequence
  Synthetic
aaggctccatguctgaagatgaaut

SEQ ID NO: 58626 - DNA, 24 bp, Artificial Sequence
  Synthetic
ctcaacttcuattcactgggucct

SEQ ID NO: 58627 - DNA, 27 bp, Artificial Sequence
  Synthetic
agcaatgcaucaaccaataaccattut

SEQ ID NO: 58628 - DNA, 20 bp, Artificial Sequence
  Synthetic
ggtaggcguccttgccaauc

SEQ ID NO: 58629 - DNA, 23 bp, Artificial Sequence
  Synthetic
ggaaatttaugctgtccggucac

SEQ ID NO: 58630 - DNA, 22 bp, Artificial Sequence
  Synthetic
gcccaguaggugaaaaaggcat

SEQ ID NO: 58631 - DNA, 28 bp, Artificial Sequence
  Synthetic
ggaagccatgaguagccaaaacataaua

SEQ ID NO: 58632 - DNA, 23 bp, Artificial Sequence
  Synthetic
tccttctctgcuggtgtgaguat

SEQ ID NO: 58633 - DNA, 27 bp, Artificial Sequence
  Synthetic
gccgaaacutcacatttucaaacacaa

SEQ ID NO: 58634 - DNA, 22 bp, Artificial Sequence
  Synthetic
gccctgaggutttgcttaggut

SEQ ID NO: 58635 - DNA, 28 bp, Artificial Sequence
  Synthetic
gtcugcttctagaataucagagaacagt

SEQ ID NO: 58636 - DNA, 23 bp, Artificial Sequence
  Synthetic
actcctgcuctgcaaacataucc

SEQ ID NO: 58637 - DNA, 22 bp, Artificial Sequence
  Synthetic
ctagcgguaggagcaacaucaa

SEQ ID NO: 58638 - DNA, 21 bp, Artificial Sequence
  Synthetic
cccagcacuttgcctgauaac

SEQ ID NO: 58639 - DNA, 23 bp, Artificial Sequence
  Synthetic
tggtccaatucctgtggacttuc

SEQ ID NO: 58640 - DNA, 17 bp, Artificial Sequence
  Synthetic
ccucgcggcctauggag

SEQ ID NO: 58641 - DNA, 19 bp, Artificial Sequence
  Synthetic
ccggttcaugccagcttug

SEQ ID NO: 58642 - DNA, 21 bp, Artificial Sequence
  Synthetic
accttcctgucggtgtatgug

SEQ ID NO: 58643 - DNA, 21 bp, Artificial Sequence
  Synthetic
ctgggagaaguagaggcggua

SEQ ID NO: 58644 - DNA, 23 bp, Artificial Sequence
  Synthetic
gcctggacuttgatctcauaggg

SEQ ID NO: 58645 - DNA, 21 bp, Artificial Sequence
  Synthetic
cttggccaaccaacucctcut

SEQ ID NO: 58646 - DNA, 25 bp, Artificial Sequence
  Synthetic
cagttaaucgggaagctttgucaga

SEQ ID NO: 58647 - DNA, 22 bp, Artificial Sequence
  Synthetic
tgtttcaucctccaugccaagg

SEQ ID NO: 58648 - DNA, 22 bp, Artificial Sequence
  Synthetic
gcggaagucatugccagaagaa

SEQ ID NO: 58649 - DNA, 28 bp, Artificial Sequence
  Synthetic
ccattcctuggaaaccttuaaaaacact

SEQ ID NO: 58650 - DNA, 23 bp, Artificial Sequence
  Synthetic
accagtgacugcacatgtacaut

SEQ ID NO: 58651 - DNA, 21 bp, Artificial Sequence
  Synthetic
acccacucacaggcctaauga

SEQ ID NO: 58652 - DNA, 22 bp, Artificial Sequence
  Synthetic
ctttgcagagcuttctgtugct

SEQ ID NO: 58653 - DNA, 22 bp, Artificial Sequence
  Synthetic
accagactugcccaaaacauct

SEQ ID NO: 58654 - DNA, 25 bp, Artificial Sequence
  Synthetic
gttttaggatgcutcttggcaacug

SEQ ID NO: 58655 - DNA, 26 bp, Artificial Sequence
  Synthetic
actctgacatugtttggtttgtcuga

SEQ ID NO: 58656 - DNA, 21 bp, Artificial Sequence
  Synthetic
gctatgacgugctgttugcat

SEQ ID NO: 58657 - DNA, 20 bp, Artificial Sequence
  Synthetic
gcagtagauggacccctcug

SEQ ID NO: 58658 - DNA, 20 bp, Artificial Sequence
  Synthetic
gctacaguccctggguggaa

SEQ ID NO: 58659 - DNA, 20 bp, Artificial Sequence
  Synthetic
gagaguactguggcccacaa

SEQ ID NO: 58660 - DNA, 18 bp, Artificial Sequence
  Synthetic
cccacccgcuttctguct

SEQ ID NO: 58661 - DNA, 17 bp, Artificial Sequence
  Synthetic
tccagagggcguccugt

SEQ ID NO: 58662 - DNA, 24 bp, Artificial Sequence
  Synthetic
cccagcctcutatgacctattcut

SEQ ID NO: 58663 - DNA, 21 bp, Artificial Sequence
  Synthetic
cgtugagcacctcctuagcag

SEQ ID NO: 58664 - DNA, 21 bp, Artificial Sequence
  Synthetic
gtcgactacccugatgtgcug

SEQ ID NO: 58665 - DNA, 22 bp, Artificial Sequence
  Synthetic
ctttcttcuccggaagggugat

SEQ ID NO: 58666 - DNA, 22 bp, Artificial Sequence
  Synthetic
gctatcctuaccccgccaagua

SEQ ID NO: 58667 - DNA, 22 bp, Artificial Sequence
  Synthetic
ctagctaggugtcctgtuccac

SEQ ID NO: 58668 - DNA, 17 bp, Artificial Sequence
  Synthetic
ggagctaguggcgcuca

SEQ ID NO: 58669 - DNA, 17 bp, Artificial Sequence
  Synthetic
ccgcuccagcacgtugt

SEQ ID NO: 58670 - DNA, 18 bp, Artificial Sequence
  Synthetic
gaagcugctgggcucagt

SEQ ID NO: 58671 - DNA, 18 bp, Artificial Sequence
  Synthetic
cccacccgcutagaccuc

SEQ ID NO: 58672 - DNA, 23 bp, Artificial Sequence
  Synthetic
tgacctgtguccatttctgctuc

SEQ ID NO: 58673 - DNA, 28 bp, Artificial Sequence
  Synthetic
agcaactttgaggcugattatggaauat

SEQ ID NO: 58674 - DNA, 26 bp, Artificial Sequence
  Synthetic
aaatgtcctacucaagccttgttuga

SEQ ID NO: 58675 - DNA, 28 bp, Artificial Sequence
  Synthetic
ccctgaagataccucattttggttatug

SEQ ID NO: 58676 - DNA, 28 bp, Artificial Sequence
  Synthetic
catattcgccuaaatctccatcuaccag

SEQ ID NO: 58677 - DNA, 28 bp, Artificial Sequence
  Synthetic
cttcatgttccucaattccttgcaatut

SEQ ID NO: 58678 - DNA, 20 bp, Artificial Sequence
  Synthetic
caguaggaccgacggcaauc

SEQ ID NO: 58679 - DNA, 23 bp, Artificial Sequence
  Synthetic
gggttgagutcacagttgugagt

SEQ ID NO: 58680 - DNA, 22 bp, Artificial Sequence
  Synthetic
caggttcuccagcttgtcctut

SEQ ID NO: 58681 - DNA, 22 bp, Artificial Sequence
  Synthetic
ctctgtgggccuctttgttuct

SEQ ID NO: 58682 - DNA, 22 bp, Artificial Sequence
  Synthetic
cctgctugaagttcttcucgga

SEQ ID NO: 58683 - DNA, 25 bp, Artificial Sequence
  Synthetic
cagcauattugggaacgagaaacaa

SEQ ID NO: 58684 - DNA, 22 bp, Artificial Sequence
  Synthetic
gaggaccagguggagcagtaua

SEQ ID NO: 58685 - DNA, 20 bp, Artificial Sequence
  Synthetic
catagcccagcguggguaag

SEQ ID NO: 58686 - DNA, 18 bp, Artificial Sequence
  Synthetic
gcugcuggcggaaaagga

SEQ ID NO: 58687 - DNA, 19 bp, Artificial Sequence
  Synthetic
ggguctagucaaggccagt

SEQ ID NO: 58688 - DNA, 22 bp, Artificial Sequence
  Synthetic
agauggaaggagaggccucaat

SEQ ID NO: 58689 - DNA, 20 bp, Artificial Sequence
  Synthetic
ggugggaaccggtaagucag

SEQ ID NO: 58690 - DNA, 18 bp, Artificial Sequence
  Synthetic
gggacaagcguggcugag

SEQ ID NO: 58691 - DNA, 18 bp, Artificial Sequence
  Synthetic
cagcugggcctucaggaa

SEQ ID NO: 58692 - DNA, 21 bp, Artificial Sequence
  Synthetic
cctgagaggucttgcccacua

SEQ ID NO: 58693 - DNA, 22 bp, Artificial Sequence
  Synthetic
tctcacatgcutcccctcatuc

SEQ ID NO: 58694 - DNA, 23 bp, Artificial Sequence
  Synthetic
ggctgttuctcacagaucccaaa

SEQ ID NO: 58695 - DNA, 20 bp, Artificial Sequence
  Synthetic
ctgaagtcucccgaccacuc

SEQ ID NO: 58696 - DNA, 22 bp, Artificial Sequence
  Synthetic
ccutcctcctcucagccagaat

SEQ ID NO: 58697 - DNA, 25 bp, Artificial Sequence
  Synthetic
gcaggaagaagagcauaagaaccug

SEQ ID NO: 58698 - DNA, 23 bp, Artificial Sequence
  Synthetic
agcaccacauataagctgccaut

SEQ ID NO: 58699 - DNA, 25 bp, Artificial Sequence
  Synthetic
ctcctttaatguctcctggacugag

SEQ ID NO: 58700 - DNA, 24 bp, Artificial Sequence
  Synthetic
gtgtgtgugcacatatgcattuga

SEQ ID NO: 58701 - DNA, 26 bp, Artificial Sequence
  Synthetic
tgccagccccucattaatctatauga

SEQ ID NO: 58702 - DNA, 21 bp, Artificial Sequence
  Synthetic
gcctcugagaatgctgguaga

SEQ ID NO: 58703 - DNA, 22 bp, Artificial Sequence
  Synthetic
gatcgcccagucaactcugaaa

SEQ ID NO: 58704 - DNA, 23 bp, Artificial Sequence
  Synthetic
gctgctgtcutgggttattcugg

SEQ ID NO: 58705 - DNA, 28 bp, Artificial Sequence
  Synthetic
tccatcaagagtuatttggttgcacuaa

SEQ ID NO: 58706 - DNA, 22 bp, Artificial Sequence
  Synthetic
gtaacttugcagccugggaaga

SEQ ID NO: 58707 - DNA, 24 bp, Artificial Sequence
  Synthetic
ggtcauccagaagagtguagggaa

SEQ ID NO: 58708 - DNA, 27 bp, Artificial Sequence
  Synthetic
tctaatcttacuaccactctccuccct

SEQ ID NO: 58709 - DNA, 22 bp, Artificial Sequence
  Synthetic
agcaaaccaggcaugtactugt

SEQ ID NO: 58710 - DNA, 22 bp, Artificial Sequence
  Synthetic
catgtttgugttgctccaucgg

SEQ ID NO: 58711 - DNA, 23 bp, Artificial Sequence
  Synthetic
ttctttgcccautctcacacuca

SEQ ID NO: 58712 - DNA, 25 bp, Artificial Sequence
  Synthetic
agtgaaaccucagctctugaaaact

SEQ ID NO: 58713 - DNA, 21 bp, Artificial Sequence
  Synthetic
ggccagtguggtgaactcauc

SEQ ID NO: 58714 - DNA, 27 bp, Artificial Sequence
  Synthetic
cccctgttatugtacagtttgtttugg

SEQ ID NO: 58715 - DNA, 28 bp, Artificial Sequence
  Synthetic
ccaguttgtcattuaagagagaggaagg

SEQ ID NO: 58716 - DNA, 27 bp, Artificial Sequence
  Synthetic
gttactggagatautccccaacacaua

SEQ ID NO: 58717 - DNA, 27 bp, Artificial Sequence
  Synthetic
caagatattaaaguggcaatgtgugct

SEQ ID NO: 58718 - DNA, 20 bp, Artificial Sequence
  Synthetic
cgggaaacagcutagugggt

SEQ ID NO: 58719 - DNA, 20 bp, Artificial Sequence
  Synthetic
ccgtgcgccguatagaaguc

SEQ ID NO: 58720 - DNA, 23 bp, Artificial Sequence
  Synthetic
gtcacttugttctgttugcaggt

SEQ ID NO: 58721 - DNA, 27 bp, Artificial Sequence
  Synthetic
aattattccaaccuccaatgacccaut

SEQ ID NO: 58722 - DNA, 27 bp, Artificial Sequence
  Synthetic
ccattactatuctgttggaccuccaaa

SEQ ID NO: 58723 - DNA, 26 bp, Artificial Sequence
  Synthetic
ggtaaaagatugttgctgctuggaaa

SEQ ID NO: 58724 - DNA, 22 bp, Artificial Sequence
  Synthetic
cctgcagtucctttcctgtgut

SEQ ID NO: 58725 - DNA, 28 bp, Artificial Sequence
  Synthetic
ctctcaaaacuagaagtgtaagcuggat

SEQ ID NO: 58726 - DNA, 21 bp, Artificial Sequence
  Synthetic
ctcaucaggcgcattccauct

SEQ ID NO: 58727 - DNA, 23 bp, Artificial Sequence
  Synthetic
ctcagtgattuggctcaggugat

SEQ ID NO: 58728 - DNA, 22 bp, Artificial Sequence
  Synthetic
ccctagtaaaggaugcccagut

SEQ ID NO: 58729 - DNA, 19 bp, Artificial Sequence
  Synthetic
ccaccacagugtcgucagg

SEQ ID NO: 58730 - DNA, 21 bp, Artificial Sequence
  Synthetic
ctgaggcuttcccaucagacc

SEQ ID NO: 58731 - DNA, 22 bp, Artificial Sequence
  Synthetic
acagtgggaaugctgcttctut

SEQ ID NO: 58732 - DNA, 24 bp, Artificial Sequence
  Synthetic
ttggtagctguagcctgtcatcua

SEQ ID NO: 58733 - DNA, 21 bp, Artificial Sequence
  Synthetic
cttcccucttcacccuggaac

SEQ ID NO: 58734 - DNA, 28 bp, Artificial Sequence
  Synthetic
ctttgtggttctucattcttctctccut

SEQ ID NO: 58735 - DNA, 27 bp, Artificial Sequence
  Synthetic
actaatcgtgcucttctagggttuaga

SEQ ID NO: 58736 - DNA, 28 bp, Artificial Sequence
  Synthetic
agtactttctucagtggcaacacuaaaa

SEQ ID NO: 58737 - DNA, 28 bp, Artificial Sequence
  Synthetic
ggattgctagcaccuattcttaacagua

SEQ ID NO: 58738 - DNA, 28 bp, Artificial Sequence
  Synthetic
gcaagtacatttutgaattcctcaguca

SEQ ID NO: 58739 - DNA, 23 bp, Artificial Sequence
  Synthetic
ccttgguggtacagattugcaca

SEQ ID NO: 58740 - DNA, 28 bp, Artificial Sequence
  Synthetic
tgagtttttaccuacctttctugcacat

SEQ ID NO: 58741 - DNA, 24 bp, Artificial Sequence
  Synthetic
ccccuaaccaacggagagatttug

SEQ ID NO: 58742 - DNA, 28 bp, Artificial Sequence
  Synthetic
ccatatgtcacaguggtcttcactuaaa

SEQ ID NO: 58743 - DNA, 28 bp, Artificial Sequence
  Synthetic
agacatattcuctgtgaaacugaaacgg

SEQ ID NO: 58744 - DNA, 25 bp, Artificial Sequence
  Synthetic
ccaaatatgugtctgtgacucagga

SEQ ID NO: 58745 - DNA, 28 bp, Artificial Sequence
  Synthetic
ctttcattcccutttaggctcctaugat

SEQ ID NO: 58746 - DNA, 21 bp, Artificial Sequence
  Synthetic
aggagcuaaaggcgaagaugg

SEQ ID NO: 58747 - DNA, 28 bp, Artificial Sequence
  Synthetic
tgacagtgaugctgcttttctttuagat

SEQ ID NO: 58748 - DNA, 29 bp, Artificial Sequence
  Synthetic
aaacactgtcacauaaagatgagcuaagt

SEQ ID NO: 58749 - DNA, 26 bp, Artificial Sequence
  Synthetic
ggaaggaagagugtagtggaaaauga

SEQ ID NO: 58750 - DNA, 22 bp, Artificial Sequence
  Synthetic
gaagatgagccaacuccagcut

SEQ ID NO: 58751 - DNA, 26 bp, Artificial Sequence
  Synthetic
gcacaatgcaggauccaaatatttug

SEQ ID NO: 58752 - DNA, 29 bp, Artificial Sequence
  Synthetic
gagataaaatatugaccgatgcagcuact

SEQ ID NO: 58753 - DNA, 28 bp, Artificial Sequence
  Synthetic
gtacagttttacccuggatagtttcuga

SEQ ID NO: 58754 - DNA, 26 bp, Artificial Sequence
  Synthetic
caccatuaggaccctgaauagaaaca

SEQ ID NO: 58755 - DNA, 20 bp, Artificial Sequence
  Synthetic
tgacggacagccuggaguaa

SEQ ID NO: 58756 - DNA, 18 bp, Artificial Sequence
  Synthetic
agctccagutggcccaut

SEQ ID NO: 58757 - DNA, 29 bp, Artificial Sequence
  Synthetic
gaccttgggaatuttgttctatgaccuat

SEQ ID NO: 58758 - DNA, 29 bp, Artificial Sequence
  Synthetic
tggaagatgaaauggaaaaccgaatuagt

SEQ ID NO: 58759 - DNA, 22 bp, Artificial Sequence
  Synthetic
tggutcacguagagaggaagca

SEQ ID NO: 58760 - DNA, 28 bp, Artificial Sequence
  Synthetic
tcaatttgucaaaaacatacctccucca

SEQ ID NO: 58761 - DNA, 25 bp, Artificial Sequence
  Synthetic
atgaaacttacauggctcctgucaa

SEQ ID NO: 58762 - DNA, 24 bp, Artificial Sequence
  Synthetic
catgttattacucttggcccucgt

SEQ ID NO: 58763 - DNA, 25 bp, Artificial Sequence
  Synthetic
acttaccacaucactcttgctgtut

SEQ ID NO: 58764 - DNA, 28 bp, Artificial Sequence
  Synthetic
gtttattttguccatgtgttccucaagt

SEQ ID NO: 58765 - DNA, 27 bp, Artificial Sequence
  Synthetic
tgtctgaattttgaucatacagcggua

SEQ ID NO: 58766 - DNA, 21 bp, Artificial Sequence
  Synthetic
caggcctttuccctcatgcua

SEQ ID NO: 58767 - DNA, 20 bp, Artificial Sequence
  Synthetic
gaggacugagctgtccacug

SEQ ID NO: 58768 - DNA, 21 bp, Artificial Sequence
  Synthetic
cctgtgguaccatccauggga

SEQ ID NO: 58769 - DNA, 21 bp, Artificial Sequence
  Synthetic
cgcaggtguaggactggauct

SEQ ID NO: 58770 - DNA, 25 bp, Artificial Sequence
  Synthetic
catgtgtggcutaatcttgcctcua

SEQ ID NO: 58771 - DNA, 23 bp, Artificial Sequence
  Synthetic
ccaacatcucagtcctactgucc

SEQ ID NO: 58772 - DNA, 19 bp, Artificial Sequence
  Synthetic
cgagtugggtccttucgca

SEQ ID NO: 58773 - DNA, 28 bp, Artificial Sequence
  Synthetic
ggtgataaaugcacttttgtcatauggt

SEQ ID NO: 58774 - DNA, 21 bp, Artificial Sequence
  Synthetic
agcagguaagaagccgaacuc

SEQ ID NO: 58775 - DNA, 18 bp, Artificial Sequence
  Synthetic
cccuccccaaguccaact

SEQ ID NO: 58776 - DNA, 25 bp, Artificial Sequence
  Synthetic
ttgtgatgtgagautttccaccugt

SEQ ID NO: 58777 - DNA, 28 bp, Artificial Sequence
  Synthetic
caggugtttacattuaggagacagagat

SEQ ID NO: 58778 - DNA, 26 bp, Artificial Sequence
  Synthetic
acatttatggttuctcacctgccaut

SEQ ID NO: 58779 - DNA, 26 bp, Artificial Sequence
  Synthetic
actcaacaatguattcagcaagucct

SEQ ID NO: 58780 - DNA, 28 bp, Artificial Sequence
  Synthetic
tacagtttuaacgcctaaagtaucacat

SEQ ID NO: 58781 - DNA, 28 bp, Artificial Sequence
  Synthetic
caaaacattccttutcttcgtcccaaut

SEQ ID NO: 58782 - DNA, 21 bp, Artificial Sequence
  Synthetic
tggctccatuccaaactccug

SEQ ID NO: 58783 - DNA, 27 bp, Artificial Sequence
  Synthetic
agaacacaucccacagtgcataaauaa

SEQ ID NO: 58784 - DNA, 18 bp, Artificial Sequence
  Synthetic
tggccacgcugaagtuct

SEQ ID NO: 58785 - DNA, 18 bp, Artificial Sequence
  Synthetic
cctacugcgaccccacuc

SEQ ID NO: 58786 - DNA, 23 bp, Artificial Sequence
  Synthetic
ccagtaaugagaccaccccatug

SEQ ID NO: 58787 - DNA, 23 bp, Artificial Sequence
  Synthetic
cctgggttcugaagcagatttug

SEQ ID NO: 58788 - DNA, 23 bp, Artificial Sequence
  Synthetic
gattaccautgctcugggaccat

SEQ ID NO: 58789 - DNA, 20 bp, Artificial Sequence
  Synthetic
aaacgtccgutcctccacuc

SEQ ID NO: 58790 - DNA, 20 bp, Artificial Sequence
  Synthetic
ccacactugctgtccctugt

SEQ ID NO: 58791 - DNA, 24 bp, Artificial Sequence
  Synthetic
gcatggaacaaaguctctgtgugt

SEQ ID NO: 58792 - DNA, 25 bp, Artificial Sequence
  Synthetic
ggtacucagcaggtattaacugcaa

SEQ ID NO: 58793 - DNA, 22 bp, Artificial Sequence
  Synthetic
gggcctaaugctactgtctguc

SEQ ID NO: 58794 - DNA, 28 bp, Artificial Sequence
  Synthetic
cttcacttgaggguatagtagtttgugg

SEQ ID NO: 58795 - DNA, 20 bp, Artificial Sequence
  Synthetic
ctgatgcguggcttatgcut

SEQ ID NO: 58796 - DNA, 22 bp, Artificial Sequence
  Synthetic
ccctgagaagcugtgttugact

SEQ ID NO: 58797 - DNA, 23 bp, Artificial Sequence
  Synthetic
ggcctgaggcuttcaatctctuc

SEQ ID NO: 58798 - DNA, 26 bp, Artificial Sequence
  Synthetic
gggaagaaatucccacatgagatuca

SEQ ID NO: 58799 - DNA, 21 bp, Artificial Sequence
  Synthetic
tgagtgtagcuggtgccttut

SEQ ID NO: 58800 - DNA, 21 bp, Artificial Sequence
  Synthetic
cctccgggauttcatctcugg

SEQ ID NO: 58801 - DNA, 23 bp, Artificial Sequence
  Synthetic
ctgaggugggattttgacugaga

SEQ ID NO: 58802 - DNA, 22 bp, Artificial Sequence
  Synthetic
ggtcttggaaguccccttctug

SEQ ID NO: 58803 - DNA, 23 bp, Artificial Sequence
  Synthetic
acaaagacccuaucggaagacga

SEQ ID NO: 58804 - DNA, 28 bp, Artificial Sequence
  Synthetic
ccactcuggaggaatattcaauagcaat

SEQ ID NO: 58805 - DNA, 30 bp, Artificial Sequence
  Synthetic
gaaaatactgagauccgtattatcctucaa

SEQ ID NO: 58806 - DNA, 20 bp, Artificial Sequence
  Synthetic
ccgtgacautctccgtucca

SEQ ID NO: 58807 - DNA, 30 bp, Artificial Sequence
  Synthetic
gcctagtccaaagucataagaaagtatuca

SEQ ID NO: 58808 - DNA, 28 bp, Artificial Sequence
  Synthetic
tcttaccttgcugtttcttcatgaaugt

SEQ ID NO: 58809 - DNA, 28 bp, Artificial Sequence
  Synthetic
gggtgtgatguaggttagaactuaaagt

SEQ ID NO: 58810 - DNA, 19 bp, Artificial Sequence
  Synthetic
gcagauccggcagctctuc

SEQ ID NO: 58811 - DNA, 18 bp, Artificial Sequence
  Synthetic
ccgucucgggaggaaggt

SEQ ID NO: 58812 - DNA, 18 bp, Artificial Sequence
  Synthetic
gcugatcuacgcgagcga

SEQ ID NO: 58813 - DNA, 17 bp, Artificial Sequence
  Synthetic
gcugcagagcccgtugt

SEQ ID NO: 58814 - DNA, 20 bp, Artificial Sequence
  Synthetic
agagcaaucctcgtcgucag

SEQ ID NO: 58815 - DNA, 20 bp, Artificial Sequence
  Synthetic
acgagaggcugctggaguaa

SEQ ID NO: 58816 - DNA, 17 bp, Artificial Sequence
  Synthetic
cgggtguccctcuggct

SEQ ID NO: 58817 - DNA, 23 bp, Artificial Sequence
  Synthetic
gtttaccutgagtccuccacaga

SEQ ID NO: 58818 - DNA, 17 bp, Artificial Sequence
  Synthetic
gccagugaccgcgaugg

SEQ ID NO: 58819 - DNA, 19 bp, Artificial Sequence
  Synthetic
atgcgcugcatctcgauct

SEQ ID NO: 58820 - DNA, 23 bp, Artificial Sequence
  Synthetic
ggaaucttgaatacugggccaca

SEQ ID NO: 58821 - DNA, 27 bp, Artificial Sequence
  Synthetic
ggctagctugagacttatgtctugaat

SEQ ID NO: 58822 - DNA, 28 bp, Artificial Sequence
  Synthetic
tttctctctgtttucactcaggtgtuag

SEQ ID NO: 58823 - DNA, 28 bp, Artificial Sequence
  Synthetic
actaaaggaagucaaattctgcctugat

SEQ ID NO: 58824 - DNA, 26 bp, Artificial Sequence
  Synthetic
ctgaggtcautaagcaagagtuggaa

SEQ ID NO: 58825 - DNA, 22 bp, Artificial Sequence
  Synthetic
ggctacccccucattcttuagg

SEQ ID NO: 58826 - DNA, 23 bp, Artificial Sequence
  Synthetic
ctgctcctguctcttcaggtcua

SEQ ID NO: 58827 - DNA, 25 bp, Artificial Sequence
  Synthetic
caaacaaugaggcaaagaggaugaa

SEQ ID NO: 58828 - DNA, 23 bp, Artificial Sequence
  Synthetic
gaaccagctguacaagtccagut

SEQ ID NO: 58829 - DNA, 23 bp, Artificial Sequence
  Synthetic
ctcatactcugcagatggaggug

SEQ ID NO: 58830 - DNA, 22 bp, Artificial Sequence
  Synthetic
gaggagaagcugtaccuccaga

SEQ ID NO: 58831 - DNA, 22 bp, Artificial Sequence
  Synthetic
ggcgagaaaguggagaggaaug

SEQ ID NO: 58832 - DNA, 23 bp, Artificial Sequence
  Synthetic
tctaacactugcagactgctgut

SEQ ID NO: 58833 - DNA, 25 bp, Artificial Sequence
  Synthetic
acagctgtggugttgaattttucag

SEQ ID NO: 58834 - DNA, 28 bp, Artificial Sequence
  Synthetic
ggtgataaaacccgaaugactgagtuat

SEQ ID NO: 58835 - DNA, 22 bp, Artificial Sequence
  Synthetic
tcacacucaccaacggttucaa

SEQ ID NO: 58836 - DNA, 24 bp, Artificial Sequence
  Synthetic
gcaacagaaaguttggatguggaa

SEQ ID NO: 58837 - DNA, 23 bp, Artificial Sequence
  Synthetic
caagaagtcugctgctagtccug

SEQ ID NO: 58838 - DNA, 21 bp, Artificial Sequence
  Synthetic
aggaugaagaaccccatgcug

SEQ ID NO: 58839 - DNA, 21 bp, Artificial Sequence
  Synthetic
caacacggutgtctccuaggt

SEQ ID NO: 58840 - DNA, 28 bp, Artificial Sequence
  Synthetic
tgaagtaaaaacacauagccagaaccut

SEQ ID NO: 58841 - DNA, 27 bp, Artificial Sequence
  Synthetic
tcctttgtcttcutctggaatgtcauc

SEQ ID NO: 58842 - DNA, 22 bp, Artificial Sequence
  Synthetic
caaactctuggctttgctcugt

SEQ ID NO: 58843 - DNA, 28 bp, Artificial Sequence
  Synthetic
agccagtggcuatgtttatttcaguaaa

SEQ ID NO: 58844 - DNA, 23 bp, Artificial Sequence
  Synthetic
catcaccugtctgtaaguggagt

SEQ ID NO: 58845 - DNA, 28 bp, Artificial Sequence
  Synthetic
tgagtgattcucatcagagctcuaacat

SEQ ID NO: 58846 - DNA, 23 bp, Artificial Sequence
  Synthetic
gtttgcgaauggcctctagtgua

SEQ ID NO: 58847 - DNA, 28 bp, Artificial Sequence
  Synthetic
agagaagaaggaaautttgacacctuga

SEQ ID NO: 58848 - DNA, 20 bp, Artificial Sequence
  Synthetic
ggccacacccuacacacuaa

SEQ ID NO: 58849 - DNA, 27 bp, Artificial Sequence
  Synthetic
gtctccgacaccucatgttttactauc

SEQ ID NO: 58850 - DNA, 26 bp, Artificial Sequence
  Synthetic
atgtgtttcucgcaaattcatcagug

SEQ ID NO: 58851 - DNA, 20 bp, Artificial Sequence
  Synthetic
ccatuccggaagagcugact

SEQ ID NO: 58852 - DNA, 21 bp, Artificial Sequence
  Synthetic
aaugaagggcgaccugaaaca

SEQ ID NO: 58853 - DNA, 23 bp, Artificial Sequence
  Synthetic
tctctgcttuaaggcttcagcuc

SEQ ID NO: 58854 - DNA, 22 bp, Artificial Sequence
  Synthetic
gggacucaagggaaagaccauc

SEQ ID NO: 58855 - DNA, 27 bp, Artificial Sequence
  Synthetic
gtcagggtgugctttattagtgtcuac

SEQ ID NO: 58856 - DNA, 30 bp, Artificial Sequence
  Synthetic
tgctttcttagtgutttccagtaagctuat

SEQ ID NO: 58857 - DNA, 26 bp, Artificial Sequence
  Synthetic
gcagugactaacttaauggcacacaa

SEQ ID NO: 58858 - DNA, 25 bp, Artificial Sequence
  Synthetic
acttcacutgcaagatuaccaacca

SEQ ID NO: 58859 - DNA, 28 bp, Artificial Sequence
  Synthetic
gctgttctgatguaactgcctagtttut

SEQ ID NO: 58860 - DNA, 28 bp, Artificial Sequence
  Synthetic
atgactttaugggacaataucacaggaa

SEQ ID NO: 58861 - DNA, 24 bp, Artificial Sequence
  Synthetic
gatgccactcutaaagccatcuct

SEQ ID NO: 58862 - DNA, 27 bp, Artificial Sequence
  Synthetic
tgctaatttcaucaagctcaagtcugt

SEQ ID NO: 58863 - DNA, 22 bp, Artificial Sequence
  Synthetic
ctcgaugcataattuggccagt

SEQ ID NO: 58864 - DNA, 23 bp, Artificial Sequence
  Synthetic
ttccaaggacaucatccccuagt

SEQ ID NO: 58865 - DNA, 28 bp, Artificial Sequence
  Synthetic
ttctaccttttuattggctccatuacca

SEQ ID NO: 58866 - DNA, 23 bp, Artificial Sequence
  Synthetic
ggaaccttcuccagcctttctut

SEQ ID NO: 58867 - DNA, 21 bp, Artificial Sequence
  Synthetic
gaatcctcugctggtctcugg

SEQ ID NO: 58868 - DNA, 22 bp, Artificial Sequence
  Synthetic
ccaggugaaagcugaaaagcag

SEQ ID NO: 58869 - DNA, 21 bp, Artificial Sequence
  Synthetic
caacacuagcccccagucaag

SEQ ID NO: 58870 - DNA, 20 bp, Artificial Sequence
  Synthetic
cagcacaggccgguaaatug

SEQ ID NO: 58871 - DNA, 22 bp, Artificial Sequence
  Synthetic
cctcctgttucttgccatcuga

SEQ ID NO: 58872 - DNA, 22 bp, Artificial Sequence
  Synthetic
gaccaggtcutacttgcccuaa

SEQ ID NO: 58873 - DNA, 21 bp, Artificial Sequence
  Synthetic
tgaagaactgucgctgctguc

SEQ ID NO: 58874 - DNA, 26 bp, Artificial Sequence
  Synthetic
acagcctgaggugttttgaaatttug

SEQ ID NO: 58875 - DNA, 25 bp, Artificial Sequence
  Synthetic
gagcaacaataaugcctccttcuct

SEQ ID NO: 58876 - DNA, 25 bp, Artificial Sequence
  Synthetic
gcaugataguaagacgaaggagcag

SEQ ID NO: 58877 - DNA, 20 bp, Artificial Sequence
  Synthetic
cccacuagggctaggatugg

SEQ ID NO: 58878 - DNA, 23 bp, Artificial Sequence
  Synthetic
gttgtaggtutttgtgcaguggt

SEQ ID NO: 58879 - DNA, 21 bp, Artificial Sequence
  Synthetic
ggacaccaggcucttcatgut

SEQ ID NO: 58880 - DNA, 27 bp, Artificial Sequence
  Synthetic
tcaaagaatcagugtactcaggtggua

SEQ ID NO: 58881 - DNA, 23 bp, Artificial Sequence
  Synthetic
gcgggaauattgagtctuccact

SEQ ID NO: 58882 - DNA, 27 bp, Artificial Sequence
  Synthetic
ttgacacagaaaaccuggagaaaauct

SEQ ID NO: 58883 - DNA, 22 bp, Artificial Sequence
  Synthetic
gcctaugaaggctttcugagca

SEQ ID NO: 58884 - DNA, 18 bp, Artificial Sequence
  Synthetic
agggucctggtguccaca

SEQ ID NO: 58885 - DNA, 17 bp, Artificial Sequence
  Synthetic
gcagggcaggguctgut

SEQ ID NO: 58886 - DNA, 20 bp, Artificial Sequence
  Synthetic
ccagccacaagcagutcugt

SEQ ID NO: 58887 - DNA, 18 bp, Artificial Sequence
  Synthetic
ggccctgugtctgccaut

SEQ ID NO: 58888 - DNA, 20 bp, Artificial Sequence
  Synthetic
ctggcagcacutcctcaugt

SEQ ID NO: 58889 - DNA, 20 bp, Artificial Sequence
  Synthetic
ggactaccgaugagccucct

SEQ ID NO: 58890 - DNA, 21 bp, Artificial Sequence
  Synthetic
agtgaccuggtactcctgucc

SEQ ID NO: 58891 - DNA, 23 bp, Artificial Sequence
  Synthetic
ggtcaagtuccacacaguaccat

SEQ ID NO: 58892 - DNA, 20 bp, Artificial Sequence
  Synthetic
caggcacagaacccucaucc

SEQ ID NO: 58893 - DNA, 21 bp, Artificial Sequence
  Synthetic
gcctcacugttgcccattuct

SEQ ID NO: 58894 - DNA, 19 bp, Artificial Sequence
  Synthetic
actggcugagagggaggut

SEQ ID NO: 58895 - DNA, 24 bp, Artificial Sequence
  Synthetic
tttgcctctcacuctgtgtgtauc

SEQ ID NO: 58896 - DNA, 21 bp, Artificial Sequence
  Synthetic
ccagccuccactgaatcctut

SEQ ID NO: 58897 - DNA, 22 bp, Artificial Sequence
  Synthetic
actatatcgugctgcagtucgg

SEQ ID NO: 58898 - DNA, 26 bp, Artificial Sequence
  Synthetic
acaagaagcugaaagggtttccauag

SEQ ID NO: 58899 - DNA, 28 bp, Artificial Sequence
  Synthetic
aatttagttgctauttgtgccattgugt

SEQ ID NO: 58900 - DNA, 27 bp, Artificial Sequence
  Synthetic
cctacacaagaaugcagaaatucaaca

SEQ ID NO: 58901 - DNA, 26 bp, Artificial Sequence
  Synthetic
gtcaacagaatcucaggagccatauc

SEQ ID NO: 58902 - DNA, 22 bp, Artificial Sequence
  Synthetic
gcatcacugcaaattgcuggag

SEQ ID NO: 58903 - DNA, 20 bp, Artificial Sequence
  Synthetic
caacgugagcctgtcuggat

SEQ ID NO: 58904 - DNA, 22 bp, Artificial Sequence
  Synthetic
agaauttcuccagggcagcaaa

SEQ ID NO: 58905 - DNA, 27 bp, Artificial Sequence
  Synthetic
cactgtgaaggaggauctatacactug

SEQ ID NO: 58906 - DNA, 25 bp, Artificial Sequence
  Synthetic
caaagactgcuactcacgtgtguat

SEQ ID NO: 58907 - DNA, 27 bp, Artificial Sequence
  Synthetic
gcctgcctttcuattttatctgaacug

SEQ ID NO: 58908 - DNA, 26 bp, Artificial Sequence
  Synthetic
aaagagagagaaugtgtgtgtgtugt

SEQ ID NO: 58909 - DNA, 28 bp, Artificial Sequence
  Synthetic
gggagtatugcacaattatctcttguct

SEQ ID NO: 58910 - DNA, 24 bp, Artificial Sequence
  Synthetic
tcccactcauaaaaaccacucacc

SEQ ID NO: 58911 - DNA, 27 bp, Artificial Sequence
  Synthetic
acatgctcactugtggtactatttuct

SEQ ID NO: 58912 - DNA, 26 bp, Artificial Sequence
  Synthetic
ctagaaugatagttctgucgccaagg

SEQ ID NO: 58913 - DNA, 25 bp, Artificial Sequence
  Synthetic
acutatccaactuggccagaaacag

SEQ ID NO: 58914 - DNA, 26 bp, Artificial Sequence
  Synthetic
caatattgtuagggatagccttugct

SEQ ID NO: 58915 - DNA, 28 bp, Artificial Sequence
  Synthetic
atgcugaaaaactgttugaggacaaaat

SEQ ID NO: 58916 - DNA, 24 bp, Artificial Sequence
  Synthetic
cagaaatatgutgctgcacauggg

SEQ ID NO: 58917 - DNA, 27 bp, Artificial Sequence
  Synthetic
atggctattccucatttctccacttut

SEQ ID NO: 58918 - DNA, 23 bp, Artificial Sequence
  Synthetic
gttaccugcaaatcccaatugcc

SEQ ID NO: 58919 - DNA, 20 bp, Artificial Sequence
  Synthetic
gcatuccagggugcacaaaa

SEQ ID NO: 58920 - DNA, 23 bp, Artificial Sequence
  Synthetic
gcautgtgtttcguagaaggcaa

SEQ ID NO: 58921 - DNA, 23 bp, Artificial Sequence
  Synthetic
gcctaugcctttagcugaaggaa

SEQ ID NO: 58922 - DNA, 26 bp, Artificial Sequence
  Synthetic
agaaaactcatcugcaggctataugg

SEQ ID NO: 58923 - DNA, 28 bp, Artificial Sequence
  Synthetic
tacttttgcctgaugagctttctaguat

SEQ ID NO: 58924 - DNA, 25 bp, Artificial Sequence
  Synthetic
tactagcaatuaatgccagauggct

SEQ ID NO: 58925 - DNA, 28 bp, Artificial Sequence
  Synthetic
gtggtttgccuaaggatgttatgauagt

SEQ ID NO: 58926 - DNA, 21 bp, Artificial Sequence
  Synthetic
aggtggcaagaugggaaagug

SEQ ID NO: 58927 - DNA, 27 bp, Artificial Sequence
  Synthetic
aaccttacctgacugtctactacctut

SEQ ID NO: 58928 - DNA, 27 bp, Artificial Sequence
  Synthetic
tcattctcagagucctgaagcatttut

SEQ ID NO: 58929 - DNA, 22 bp, Artificial Sequence
  Synthetic
agaactgcuaacctcccctuct

SEQ ID NO: 58930 - DNA, 19 bp, Artificial Sequence
  Synthetic
cgaccctucgcctaaccuc

SEQ ID NO: 58931 - DNA, 24 bp, Artificial Sequence
  Synthetic
ggttgtccucgctttccaaauact

SEQ ID NO: 58932 - DNA, 27 bp, Artificial Sequence
  Synthetic
aaatattttgcugctcaatgtagugga

SEQ ID NO: 58933 - DNA, 28 bp, Artificial Sequence
  Synthetic
cttgtccattuaaaattgctccttuggt

SEQ ID NO: 58934 - DNA, 28 bp, Artificial Sequence
  Synthetic
gaggactttagagugtttgatagtuggt

SEQ ID NO: 58935 - DNA, 28 bp, Artificial Sequence
  Synthetic
catgaaactggcaacautaatacgctua

SEQ ID NO: 58936 - DNA, 20 bp, Artificial Sequence
  Synthetic
ggccccugacattgagcuaa

SEQ ID NO: 58937 - DNA, 28 bp, Artificial Sequence
  Synthetic
acaagaaaacguaacaaatgatcccuca

SEQ ID NO: 58938 - DNA, 28 bp, Artificial Sequence
  Synthetic
ggtactcaugagagcattaagggattuc

SEQ ID NO: 58939 - DNA, 22 bp, Artificial Sequence
  Synthetic
gccaugaaaagcaaatgcucct

SEQ ID NO: 58940 - DNA, 23 bp, Artificial Sequence
  Synthetic
ggtgguggcagaaagagaugaaa

SEQ ID NO: 58941 - DNA, 28 bp, Artificial Sequence
  Synthetic
ctaatacaautgctatgtuccacacacc

SEQ ID NO: 58942 - DNA, 26 bp, Artificial Sequence
  Synthetic
cagtagaacagaugtcaagtggagut

SEQ ID NO: 58943 - DNA, 25 bp, Artificial Sequence
  Synthetic
ctcagatgagugtgttcaactguga

SEQ ID NO: 58944 - DNA, 23 bp, Artificial Sequence
  Synthetic
ctggaugcagcaaaccaatauca

SEQ ID NO: 58945 - DNA, 28 bp, Artificial Sequence
  Synthetic
gacaatgtcuttaaggttaaaugcggat

SEQ ID NO: 58946 - DNA, 28 bp, Artificial Sequence
  Synthetic
tgagaagagaaugttgaacaagucacat

SEQ ID NO: 58947 - DNA, 26 bp, Artificial Sequence
  Synthetic
cagttacuggaggattctaccucaga

SEQ ID NO: 58948 - DNA, 26 bp, Artificial Sequence
  Synthetic
cccucattcatcugcaggaaaagaaa

SEQ ID NO: 58949 - DNA, 21 bp, Artificial Sequence
  Synthetic
aacctccucctgggcttauca

SEQ ID NO: 58950 - DNA, 22 bp, Artificial Sequence
  Synthetic
ggaccauggagagggaagatut

SEQ ID NO: 58951 - DNA, 23 bp, Artificial Sequence
  Synthetic
gtcagtctguggttcggtttcut

SEQ ID NO: 58952 - DNA, 23 bp, Artificial Sequence
  Synthetic
agagacucccaaagctgctttut

SEQ ID NO: 58953 - DNA, 27 bp, Artificial Sequence
  Synthetic
caatattcaaaucatggtgtgcugaca

SEQ ID NO: 58954 - DNA, 33 bp, Artificial Sequence
  Synthetic
agtggtattttatgugacttttctatcataugt

SEQ ID NO: 58955 - DNA, 24 bp, Artificial Sequence
  Synthetic
cagtcatctgcugtggttgaaaut

SEQ ID NO: 58956 - DNA, 26 bp, Artificial Sequence
  Synthetic
gttgattuggaagcaccaatttcugt

SEQ ID NO: 58957 - DNA, 24 bp, Artificial Sequence
  Synthetic
gagctgggtuataatgccatcuct

SEQ ID NO: 58958 - DNA, 28 bp, Artificial Sequence
  Synthetic
ggacctcaaacaacaaugtattcagcua

SEQ ID NO: 58959 - DNA, 27 bp, Artificial Sequence
  Synthetic
tcaucttttacttugagaaggcaagca

SEQ ID NO: 58960 - DNA, 29 bp, Artificial Sequence
  Synthetic
tggatcaggutcgtgaatatauggaaaat

SEQ ID NO: 58961 - DNA, 25 bp, Artificial Sequence
  Synthetic
agaatggtgggcuctatccaauact

SEQ ID NO: 58962 - DNA, 27 bp, Artificial Sequence
  Synthetic
cttcttgtgagugcagatactttucaa

SEQ ID NO: 58963 - DNA, 28 bp, Artificial Sequence
  Synthetic
acagaaauggttacaatgucaacagaga

SEQ ID NO: 58964 - DNA, 32 bp, Artificial Sequence
  Synthetic
agtcttttgagcagutacctattttguagaaa

SEQ ID NO: 58965 - DNA, 27 bp, Artificial Sequence
  Synthetic
gcccaccagaagaaugataaaaugagt

SEQ ID NO: 58966 - DNA, 23 bp, Artificial Sequence
  Synthetic
ctggttttgatuggtcctggtug

SEQ ID NO: 58967 - DNA, 27 bp, Artificial Sequence
  Synthetic
ttatgtgcttccutgctttcaatgtut

SEQ ID NO: 58968 - DNA, 28 bp, Artificial Sequence
  Synthetic
gtcactctgtgcutagaggtatacuaga

SEQ ID NO: 58969 - DNA, 23 bp, Artificial Sequence
  Synthetic
cuaatgccttugaagccaggaag

SEQ ID NO: 58970 - DNA, 28 bp, Artificial Sequence
  Synthetic
tgtgtgtcuggcataatugaaaaacaat

SEQ ID NO: 58971 - DNA, 25 bp, Artificial Sequence
  Synthetic
actgtttgaccuggagttccattut

SEQ ID NO: 58972 - DNA, 21 bp, Artificial Sequence
  Synthetic
ctggugagagaggacgtgtug

SEQ ID NO: 58973 - DNA, 23 bp, Artificial Sequence
  Synthetic
aactccttucaaactccccagug

SEQ ID NO: 58974 - DNA, 22 bp, Artificial Sequence
  Synthetic
ctgccctuccttgatatugcac

SEQ ID NO: 58975 - DNA, 27 bp, Artificial Sequence
  Synthetic
agaagaaauggaaggattcagcttuca

SEQ ID NO: 58976 - DNA, 26 bp, Artificial Sequence
  Synthetic
acacattatttccauaccaccagcuc

SEQ ID NO: 58977 - DNA, 25 bp, Artificial Sequence
  Synthetic
agtgagaatgugaccagacugagat

SEQ ID NO: 58978 - DNA, 27 bp, Artificial Sequence
  Synthetic
ctgctgtttccuataagaataccugct

SEQ ID NO: 58979 - DNA, 28 bp, Artificial Sequence
  Synthetic
cccctctguagaactgttgatttgttua

SEQ ID NO: 58980 - DNA, 26 bp, Artificial Sequence
  Synthetic
acacctaagaugagtagcaguaagca

SEQ ID NO: 58981 - DNA, 21 bp, Artificial Sequence
  Synthetic
ctcauagagaccucccgaacc

SEQ ID NO: 58982 - DNA, 27 bp, Artificial Sequence
  Synthetic
accatggtguagcattactaaguaagg

SEQ ID NO: 58983 - DNA, 28 bp, Artificial Sequence
  Synthetic
cagtgacttgatutttgccagttatcut

SEQ ID NO: 58984 - DNA, 28 bp, Artificial Sequence
  Synthetic
gatacaatagtgucatctacaggtgcut

SEQ ID NO: 58985 - DNA, 26 bp, Artificial Sequence
  Synthetic
aggagguaauaagaggcagaaagaca

SEQ ID NO: 58986 - DNA, 21 bp, Artificial Sequence
  Synthetic
ccctcatccucactgctcuca

SEQ ID NO: 58987 - DNA, 22 bp, Artificial Sequence
  Synthetic
tctctgaggcccautctctgut

SEQ ID NO: 58988 - DNA, 20 bp, Artificial Sequence
  Synthetic
gaccagaaguggucggagaa

SEQ ID NO: 58989 - DNA, 19 bp, Artificial Sequence
  Synthetic
agctcccugtcctcuccat

SEQ ID NO: 58990 - DNA, 17 bp, Artificial Sequence
  Synthetic
gcgcauggcctcgaugt

SEQ ID NO: 58991 - DNA, 18 bp, Artificial Sequence
  Synthetic
auggacaaccacguggca

SEQ ID NO: 58992 - DNA, 17 bp, Artificial Sequence
  Synthetic
gcgtccucgccagtcua

SEQ ID NO: 58993 - DNA, 17 bp, Artificial Sequence
  Synthetic
ggtguaagcggcuccgt

SEQ ID NO: 58994 - DNA, 22 bp, Artificial Sequence
  Synthetic
ccaggtugagttttccauggag

SEQ ID NO: 58995 - DNA, 22 bp, Artificial Sequence
  Synthetic
tggtccctgguactctcatgut

SEQ ID NO: 58996 - DNA, 28 bp, Artificial Sequence
  Synthetic
ctcactttagcaugagtctatcagaugg

SEQ ID NO: 58997 - DNA, 27 bp, Artificial Sequence
  Synthetic
aguaacatttgctcucagaaacacaca

SEQ ID NO: 58998 - DNA, 26 bp, Artificial Sequence
  Synthetic
cctcttagguaaacagctccugaaag

SEQ ID NO: 58999 - DNA, 28 bp, Artificial Sequence
  Synthetic
aaatattttggtagaguttctgccacua

SEQ ID NO: 59000 - DNA, 33 bp, Artificial Sequence
  Synthetic
aaggtatcttgattutaagttgtaattcctuga

SEQ ID NO: 59001 - DNA, 28 bp, Artificial Sequence
  Synthetic
acctgaacagtautctggagttacguat

SEQ ID NO: 59002 - DNA, 28 bp, Artificial Sequence
  Synthetic
tgggcatcuatagaagatcuggaaaaag

SEQ ID NO: 59003 - DNA, 24 bp, Artificial Sequence
  Synthetic
caauatgcaagtugacagcaccaa

SEQ ID NO: 59004 - DNA, 24 bp, Artificial Sequence
  Synthetic
ttgcaaugggtttugaaagcaagt

SEQ ID NO: 59005 - DNA, 21 bp, Artificial Sequence
  Synthetic
cttcagtttuggcagcagcut

SEQ ID NO: 59006 - DNA, 23 bp, Artificial Sequence
  Synthetic
gcagctaucgacagattcuccaa

SEQ ID NO: 59007 - DNA, 28 bp, Artificial Sequence
  Synthetic
tttttaaaggcaucaggactttcttgug

SEQ ID NO: 59008 - DNA, 27 bp, Artificial Sequence
  Synthetic
cagcctttgautatttttcgaccucaa

SEQ ID NO: 59009 - DNA, 28 bp, Artificial Sequence
  Synthetic
ccccttttcguagaagatcctctattuc

SEQ ID NO: 59010 - DNA, 21 bp, Artificial Sequence
  Synthetic
cattcttucccacggacgcua

SEQ ID NO: 59011 - DNA, 21 bp, Artificial Sequence
  Synthetic
acccuguagcacaaacagcat

SEQ ID NO: 59012 - DNA, 22 bp, Artificial Sequence
  Synthetic
ctctcgaacuctgtaccgcaut

SEQ ID NO: 59013 - DNA, 25 bp, Artificial Sequence
  Synthetic
aggataacucagggtcatugaggat

SEQ ID NO: 59014 - DNA, 25 bp, Artificial Sequence
  Synthetic
acauttaccgtaaguacagcagcaa

SEQ ID NO: 59015 - DNA, 28 bp, Artificial Sequence
  Synthetic
cccaaagttttuacagcttatgacguat

SEQ ID NO: 59016 - DNA, 22 bp, Artificial Sequence
  Synthetic
cacaatctggcuctgctgauga

SEQ ID NO: 59017 - DNA, 22 bp, Artificial Sequence
  Synthetic
aatacgttugccagctggttug

SEQ ID NO: 59018 - DNA, 24 bp, Artificial Sequence
  Synthetic
cuctttagctaucccaggagaggt

SEQ ID NO: 59019 - DNA, 28 bp, Artificial Sequence
  Synthetic
ttcatttgctgttuactcctcttctcut

SEQ ID NO: 59020 - DNA, 21 bp, Artificial Sequence
  Synthetic
ggaaatgugcacgctggaauc

SEQ ID NO: 59021 - DNA, 23 bp, Artificial Sequence
  Synthetic
gttttattucggaggctugcagt

SEQ ID NO: 59022 - DNA, 22 bp, Artificial Sequence
  Synthetic
cccagctcugatctacccagua

SEQ ID NO: 59023 - DNA, 24 bp, Artificial Sequence
  Synthetic
gggaaccttuggtctaaatggcut

SEQ ID NO: 59024 - DNA, 27 bp, Artificial Sequence
  Synthetic
tccatatttctgtugatcagctctguc

SEQ ID NO: 59025 - DNA, 21 bp, Artificial Sequence
  Synthetic
agtguccaggcacagaguagt

SEQ ID NO: 59026 - DNA, 27 bp, Artificial Sequence
  Synthetic
ctgaaaatttgacutactgtgccaucc

SEQ ID NO: 59027 - DNA, 28 bp, Artificial Sequence
  Synthetic
tgaggagcagguttctatatgagagtut

SEQ ID NO: 59028 - DNA, 26 bp, Artificial Sequence
  Synthetic
cctgcttcuggatcgtttactttuca

SEQ ID NO: 59029 - DNA, 28 bp, Artificial Sequence
  Synthetic
gatctacaucattgtcatcucccagaaa

SEQ ID NO: 59030 - DNA, 22 bp, Artificial Sequence
  Synthetic
tcctgagcagcauccctttcua

SEQ ID NO: 59031 - DNA, 28 bp, Artificial Sequence
  Synthetic
ggttctccacauggtgaatgaacttuat

SEQ ID NO: 59032 - DNA, 20 bp, Artificial Sequence
  Synthetic
ctgggaugcgatgtgggtua

SEQ ID NO: 59033 - DNA, 22 bp, Artificial Sequence
  Synthetic
ggacaugaagaccttggtgugg

SEQ ID NO: 59034 - DNA, 23 bp, Artificial Sequence
  Synthetic
cgctggacuctttagcagagtut

SEQ ID NO: 59035 - DNA, 25 bp, Artificial Sequence
  Synthetic
ctctgcuggagggaaattcttcaut

SEQ ID NO: 59036 - DNA, 21 bp, Artificial Sequence
  Synthetic
gggaaacaaccccugaggaut

SEQ ID NO: 59037 - DNA, 23 bp, Artificial Sequence
  Synthetic
catcgctugccttttcttctugg

SEQ ID NO: 59038 - DNA, 24 bp, Artificial Sequence
  Synthetic
agccaggaaccugacctatttcua

SEQ ID NO: 59039 - DNA, 25 bp, Artificial Sequence
  Synthetic
cttgttgtcttcutcctgttcccut

SEQ ID NO: 59040 - DNA, 21 bp, Artificial Sequence
  Synthetic
cutccugcaaaccacagacct

SEQ ID NO: 59041 - DNA, 23 bp, Artificial Sequence
  Synthetic
ttcagcttccucctccacttcua

SEQ ID NO: 59042 - DNA, 22 bp, Artificial Sequence
  Synthetic
cccctagaaaugccacctctua

SEQ ID NO: 59043 - DNA, 22 bp, Artificial Sequence
  Synthetic
tgccatcctugaagtccatguc

SEQ ID NO: 59044 - DNA, 25 bp, Artificial Sequence
  Synthetic
gttctgtgccaacaauatgcaagut

SEQ ID NO: 59045 - DNA, 25 bp, Artificial Sequence
  Synthetic
cagtagccttuctgagagccuaaag

SEQ ID NO: 59046 - DNA, 21 bp, Artificial Sequence
  Synthetic
tggccagaugcctcttcatug

SEQ ID NO: 59047 - DNA, 25 bp, Artificial Sequence
  Synthetic
cagtgtgagugagtgtcagtguaat

SEQ ID NO: 59048 - DNA, 21 bp, Artificial Sequence
  Synthetic
cctgcagcugtcctcugaaag

SEQ ID NO: 59049 - DNA, 26 bp, Artificial Sequence
  Synthetic
cttgataccucccaaaaacggattut

SEQ ID NO: 59050 - DNA, 21 bp, Artificial Sequence
  Synthetic
cctgacuccagctgtctcugt

SEQ ID NO: 59051 - DNA, 21 bp, Artificial Sequence
  Synthetic
ctcgccauaggtgaggtcauc

SEQ ID NO: 59052 - DNA, 22 bp, Artificial Sequence
  Synthetic
gcaccagaauggatttgggtut

SEQ ID NO: 59053 - DNA, 23 bp, Artificial Sequence
  Synthetic
gaatacacugacaccuccaccag

SEQ ID NO: 59054 - DNA, 19 bp, Artificial Sequence
  Synthetic
gggctttgutgctgtgugt

SEQ ID NO: 59055 - DNA, 18 bp, Artificial Sequence
  Synthetic
cggagggccutgtcguag

SEQ ID NO: 59056 - DNA, 25 bp, Artificial Sequence
  Synthetic
ggtaacatuaacttccaagcuccca

SEQ ID NO: 59057 - DNA, 26 bp, Artificial Sequence
  Synthetic
ggcaggauaaacacagcttatgucaa

SEQ ID NO: 59058 - DNA, 22 bp, Artificial Sequence
  Synthetic
aggcagaaggagagaugttugg

SEQ ID NO: 59059 - DNA, 28 bp, Artificial Sequence
  Synthetic
actgtggaacucaaatcagaacctaaug

SEQ ID NO: 59060 - DNA, 23 bp, Artificial Sequence
  Synthetic
caggcaaccagaagucatctcua

SEQ ID NO: 59061 - DNA, 26 bp, Artificial Sequence
  Synthetic
gautatgaggcattuccagaccaaga

SEQ ID NO: 59062 - DNA, 24 bp, Artificial Sequence
  Synthetic
tgcttttucccacacacctctaut

SEQ ID NO: 59063 - DNA, 26 bp, Artificial Sequence
  Synthetic
actactatgaacutgttgttguggca

SEQ ID NO: 59064 - DNA, 25 bp, Artificial Sequence
  Synthetic
acagcugaaagcctctgatuagaag

SEQ ID NO: 59065 - DNA, 21 bp, Artificial Sequence
  Synthetic
tgagugggcgccatatcaaut

SEQ ID NO: 59066 - DNA, 21 bp, Artificial Sequence
  Synthetic
gggtttccugtggaccugaag

SEQ ID NO: 59067 - DNA, 26 bp, Artificial Sequence
  Synthetic
ctgaaaagtucccagatctcaugagt

SEQ ID NO: 59068 - DNA, 20 bp, Artificial Sequence
  Synthetic
aatggcacccuggtguacag

SEQ ID NO: 59069 - DNA, 23 bp, Artificial Sequence
  Synthetic
gggtccauacagtcaguaacaga

SEQ ID NO: 59070 - DNA, 18 bp, Artificial Sequence
  Synthetic
gccaccgugttcgucact

SEQ ID NO: 59071 - DNA, 19 bp, Artificial Sequence
  Synthetic
ctctggugccacugagcat

SEQ ID NO: 59072 - DNA, 24 bp, Artificial Sequence
  Synthetic
gccatcttcuccttcatcgucaag

SEQ ID NO: 59073 - DNA, 22 bp, Artificial Sequence
  Synthetic
cagtgtacucagccttggugaa

SEQ ID NO: 59074 - DNA, 28 bp, Artificial Sequence
  Synthetic
tcttctctgtcutacgttctatcauggt

SEQ ID NO: 59075 - DNA, 28 bp, Artificial Sequence
  Synthetic
tcgutgtattgaucagaaaagcagaact

SEQ ID NO: 59076 - DNA, 18 bp, Artificial Sequence
  Synthetic
cctgagugccctcucact

SEQ ID NO: 59077 - DNA, 19 bp, Artificial Sequence
  Synthetic
cacacaugccctccuccaa

SEQ ID NO: 59078 - DNA, 24 bp, Artificial Sequence
  Synthetic
caattacagucccactcccuacac

SEQ ID NO: 59079 - DNA, 23 bp, Artificial Sequence
  Synthetic
gagaagcuatcatctgucaccca

SEQ ID NO: 59080 - DNA, 23 bp, Artificial Sequence
  Synthetic
ccctctcucctttctgtccugag

SEQ ID NO: 59081 - DNA, 21 bp, Artificial Sequence
  Synthetic
cccacatgccaucgaagtgut

SEQ ID NO: 59082 - DNA, 21 bp, Artificial Sequence
  Synthetic
tgaaatctgcucatgcccugt

SEQ ID NO: 59083 - DNA, 21 bp, Artificial Sequence
  Synthetic
agcctcccgaaucctttgtug

SEQ ID NO: 59084 - DNA, 22 bp, Artificial Sequence
  Synthetic
ccagcctgugtttctccactut

SEQ ID NO: 59085 - DNA, 20 bp, Artificial Sequence
  Synthetic
cagttcggaaucgctgcauc

SEQ ID NO: 59086 - DNA, 17 bp, Artificial Sequence
  Synthetic
cgccggugagccuagac

SEQ ID NO: 59087 - DNA, 19 bp, Artificial Sequence
  Synthetic
caccagcucucaggaagca

SEQ ID NO: 59088 - DNA, 22 bp, Artificial Sequence
  Synthetic
ctgttcucagggtgtcctucag

SEQ ID NO: 59089 - DNA, 20 bp, Artificial Sequence
  Synthetic
acguactccgucccgaagaa

SEQ ID NO: 59090 - DNA, 20 bp, Artificial Sequence
  Synthetic
tgcacccauggagaggauga

SEQ ID NO: 59091 - DNA, 19 bp, Artificial Sequence
  Synthetic
acaccacugaccuggacga

SEQ ID NO: 59092 - DNA, 19 bp, Artificial Sequence
  Synthetic
cuctatuggcccccacaca

SEQ ID NO: 59093 - DNA, 23 bp, Artificial Sequence
  Synthetic
ttcaccagctucctcctctttuc

SEQ ID NO: 59094 - DNA, 21 bp, Artificial Sequence
  Synthetic
cctttcuccagggcctcaaut

SEQ ID NO: 59095 - DNA, 28 bp, Artificial Sequence
  Synthetic
aggctccaagtuaatccaaatttctcut

SEQ ID NO: 59096 - DNA, 24 bp, Artificial Sequence
  Synthetic
gcugacaaagaagaagguggagat

SEQ ID NO: 59097 - DNA, 25 bp, Artificial Sequence
  Synthetic
tttcacagtccugtacatcttgugg

SEQ ID NO: 59098 - DNA, 22 bp, Artificial Sequence
  Synthetic
ccgtcuggaagcctcucaaaat

SEQ ID NO: 59099 - DNA, 22 bp, Artificial Sequence
  Synthetic
gtggagugcatctauggaaggg

SEQ ID NO: 59100 - DNA, 21 bp, Artificial Sequence
  Synthetic
gaagacgcggaaguaguagcc

SEQ ID NO: 59101 - DNA, 25 bp, Artificial Sequence
  Synthetic
tgctgatctgaauccctccatagua

SEQ ID NO: 59102 - DNA, 25 bp, Artificial Sequence
  Synthetic
gcaggagcaaaaggaugggaaatua

SEQ ID NO: 59103 - DNA, 21 bp, Artificial Sequence
  Synthetic
cgctgaggucaaatggcucaa

SEQ ID NO: 59104 - DNA, 19 bp, Artificial Sequence
  Synthetic
cagugacgccgtacuggaa

SEQ ID NO: 59105 - DNA, 20 bp, Artificial Sequence
  Synthetic
gtggctacagcuccttgguc

SEQ ID NO: 59106 - DNA, 20 bp, Artificial Sequence
  Synthetic
tcagggaaggcugaucagga

SEQ ID NO: 59107 - DNA, 18 bp, Artificial Sequence
  Synthetic
gcggaggcagugacauca

SEQ ID NO: 59108 - DNA, 22 bp, Artificial Sequence
  Synthetic
aggaggagggaautcgcuaaga

SEQ ID NO: 59109 - DNA, 18 bp, Artificial Sequence
  Synthetic
gucccccaucccacaagg

SEQ ID NO: 59110 - DNA, 20 bp, Artificial Sequence
  Synthetic
cccgactcaucctgcaagua

SEQ ID NO: 59111 - DNA, 20 bp, Artificial Sequence
  Synthetic
ctctgcagacacugcccaut

SEQ ID NO: 59112 - DNA, 20 bp, Artificial Sequence
  Synthetic
tccauctacucgccagagca

SEQ ID NO: 59113 - DNA, 24 bp, Artificial Sequence
  Synthetic
acagttggagcuctaggtccuaag

SEQ ID NO: 59114 - DNA, 21 bp, Artificial Sequence
  Synthetic
gggccugaacaacaccctuac

SEQ ID NO: 59115 - DNA, 22 bp, Artificial Sequence
  Synthetic
gggagatgaugttcatgggcut

SEQ ID NO: 59116 - DNA, 22 bp, Artificial Sequence
  Synthetic
atgagacccaguttggcaucaa

SEQ ID NO: 59117 - DNA, 24 bp, Artificial Sequence
  Synthetic
ggatatcttautcctgggcuggag

SEQ ID NO: 59118 - DNA, 20 bp, Artificial Sequence
  Synthetic
agctgcgguactcaggaaug

SEQ ID NO: 59119 - DNA, 26 bp, Artificial Sequence
  Synthetic
tcctgataagaaaautgggaccctug

SEQ ID NO: 59120 - DNA, 21 bp, Artificial Sequence
  Synthetic
gcctcccagcaguactttgua

SEQ ID NO: 59121 - DNA, 23 bp, Artificial Sequence
  Synthetic
catcccttcuctaggactccuct

SEQ ID NO: 59122 - DNA, 18 bp, Artificial Sequence
  Synthetic
ggacgugagcactccuct

SEQ ID NO: 59123 - DNA, 20 bp, Artificial Sequence
  Synthetic
gctgugcacgaaggcaacua

SEQ ID NO: 59124 - DNA, 24 bp, Artificial Sequence
  Synthetic
ggcagaggtucctgtcagaatauc

SEQ ID NO: 59125 - DNA, 21 bp, Artificial Sequence
  Synthetic
tgguccccaaaagccaaacut

SEQ ID NO: 59126 - DNA, 28 bp, Artificial Sequence
  Synthetic
ctgttcctcaguttgtcactaaaatcuc

SEQ ID NO: 59127 - DNA, 31 bp, Artificial Sequence
  Synthetic
gcaaattaccutaatttccataguagggaca

SEQ ID NO: 59128 - DNA, 18 bp, Artificial Sequence
  Synthetic
gcagtggugccgtcctuc

SEQ ID NO: 59129 - DNA, 23 bp, Artificial Sequence
  Synthetic
gagatcuccacacggtagttgua

SEQ ID NO: 59130 - DNA, 21 bp, Artificial Sequence
  Synthetic
catgggaguctcctgcactuc

SEQ ID NO: 59131 - DNA, 23 bp, Artificial Sequence
  Synthetic
gagagggacagucaggaaugaaa

SEQ ID NO: 59132 - DNA, 17 bp, Artificial Sequence
  Synthetic
cgcctgugtgcctucct

SEQ ID NO: 59133 - DNA, 17 bp, Artificial Sequence
  Synthetic
gggccaggccucaaucc

SEQ ID NO: 59134 - DNA, 24 bp, Artificial Sequence
  Synthetic
gcatccctaucccaggactattug

SEQ ID NO: 59135 - DNA, 28 bp, Artificial Sequence
  Synthetic
cagggagaaaaagcucattcattcatut

SEQ ID NO: 59136 - DNA, 25 bp, Artificial Sequence
  Synthetic
tccataccuaccgtaagtgcauaca

SEQ ID NO: 59137 - DNA, 28 bp, Artificial Sequence
  Synthetic
tggtttaagaactugggagtaaccttut

SEQ ID NO: 59138 - DNA, 21 bp, Artificial Sequence
  Synthetic
gcauaagcugagaccgaagcc

SEQ ID NO: 59139 - DNA, 24 bp, Artificial Sequence
  Synthetic
gcaacuacacacaagaagcaucct

SEQ ID NO: 59140 - DNA, 26 bp, Artificial Sequence
  Synthetic
cacatccctagutttccatggtaucc

SEQ ID NO: 59141 - DNA, 24 bp, Artificial Sequence
  Synthetic
aaaatgattttgtuggaggccgut

SEQ ID NO: 59142 - DNA, 20 bp, Artificial Sequence
  Synthetic
gcaggctcutgactgtcugg

SEQ ID NO: 59143 - DNA, 19 bp, Artificial Sequence
  Synthetic
ccagcugagtacggcuaca

SEQ ID NO: 59144 - DNA, 24 bp, Artificial Sequence
  Synthetic
acctttttgacutttctccccgut

SEQ ID NO: 59145 - DNA, 28 bp, Artificial Sequence
  Synthetic
agggagaaugagttgaagugaaaacaat

SEQ ID NO: 59146 - DNA, 27 bp, Artificial Sequence
  Synthetic
ccagaagcauagcaatacguaagaact

SEQ ID NO: 59147 - DNA, 29 bp, Artificial Sequence
  Synthetic
ccattcatcaaattuagacagcacatcut

SEQ ID NO: 59148 - DNA, 21 bp, Artificial Sequence
  Synthetic
cttcuaggccacatggtugct

SEQ ID NO: 59149 - DNA, 22 bp, Artificial Sequence
  Synthetic
gccctuagggtgtttuggacaa

SEQ ID NO: 59150 - DNA, 22 bp, Artificial Sequence
  Synthetic
cgagaccugaaaccccacaaug

SEQ ID NO: 59151 - DNA, 28 bp, Artificial Sequence
  Synthetic
tcagtggttauccatcctgaagauagaa

SEQ ID NO: 59152 - DNA, 21 bp, Artificial Sequence
  Synthetic
caaggctgtuctgaggagcua

SEQ ID NO: 59153 - DNA, 28 bp, Artificial Sequence
  Synthetic
cccagaagtcugattgaacattttcuct

SEQ ID NO: 59154 - DNA, 28 bp, Artificial Sequence
  Synthetic
tgaaattauggaaatccctguaccacac

SEQ ID NO: 59155 - DNA, 22 bp, Artificial Sequence
  Synthetic
gattccatccuggctgaaccut

SEQ ID NO: 59156 - DNA, 21 bp, Artificial Sequence
  Synthetic
acataccaaguagccccucca

SEQ ID NO: 59157 - DNA, 25 bp, Artificial Sequence
  Synthetic
tgccagacaccauagttgagtatuc

SEQ ID NO: 59158 - DNA, 27 bp, Artificial Sequence
  Synthetic
gtgtatgccaugagtatttcttugcat

SEQ ID NO: 59159 - DNA, 23 bp, Artificial Sequence
  Synthetic
cccactcaccagauactgatgut

SEQ ID NO: 59160 - DNA, 23 bp, Artificial Sequence
  Synthetic
gataaagaagccacuccaugcag

SEQ ID NO: 59161 - DNA, 24 bp, Artificial Sequence
  Synthetic
tcggttgtguacatgctcctttut

SEQ ID NO: 59162 - DNA, 25 bp, Artificial Sequence
  Synthetic
catgcgttuaggcataguagagaca

SEQ ID NO: 59163 - DNA, 20 bp, Artificial Sequence
  Synthetic
ccaccttcucgctaccaguc

SEQ ID NO: 59164 - DNA, 24 bp, Artificial Sequence
  Synthetic
gccuctctgatuacacaaaccagt

SEQ ID NO: 59165 - DNA, 24 bp, Artificial Sequence
  Synthetic
agggcuccaaatgtgaaguacaag

SEQ ID NO: 59166 - DNA, 19 bp, Artificial Sequence
  Synthetic
ctccgugcacagagtggua

SEQ ID NO: 59167 - DNA, 18 bp, Artificial Sequence
  Synthetic
aaccauggcuccccacag

SEQ ID NO: 59168 - DNA, 30 bp, Artificial Sequence
  Synthetic
actgcattctautatgcatttaacuaaggt

SEQ ID NO: 59169 - DNA, 28 bp, Artificial Sequence
  Synthetic
aagaaactttuagcaccaatgcagaaut

SEQ ID NO: 59170 - DNA, 32 bp, Artificial Sequence
  Synthetic
agtagaatgttaccaagautatttttgaccua

SEQ ID NO: 59171 - DNA, 20 bp, Artificial Sequence
  Synthetic
gctatccgugcactcctgut

SEQ ID NO: 59172 - DNA, 25 bp, Artificial Sequence
  Synthetic
ctgtgtgcugagagatgtaaugaca

SEQ ID NO: 59173 - DNA, 30 bp, Artificial Sequence
  Synthetic
aagcaaatcaaucaaatataccatgugcaa

SEQ ID NO: 59174 - DNA, 28 bp, Artificial Sequence
  Synthetic
tcctcgacatugatttctgttttuacct

SEQ ID NO: 59175 - DNA, 28 bp, Artificial Sequence
  Synthetic
cgaactggaaagaugctgcttttaauat

SEQ ID NO: 59176 - DNA, 25 bp, Artificial Sequence
  Synthetic
tcttattcccacagugtatcggcua

SEQ ID NO: 59177 - DNA, 28 bp, Artificial Sequence
  Synthetic
cagutaacaagtaaguagggaggagaga

SEQ ID NO: 59178 - DNA, 22 bp, Artificial Sequence
  Synthetic
gauggtatguaacagcgaccgt

SEQ ID NO: 59179 - DNA, 27 bp, Artificial Sequence
  Synthetic
gctactggaaaacautcaaaactggut

SEQ ID NO: 59180 - DNA, 26 bp, Artificial Sequence
  Synthetic
cggttttcatatuggacagtgaggua

SEQ ID NO: 59181 - DNA, 22 bp, Artificial Sequence
  Synthetic
caatggtcugtctctgtgucgt

SEQ ID NO: 59182 - DNA, 23 bp, Artificial Sequence
  Synthetic
cttactctgggucctggtttucc

SEQ ID NO: 59183 - DNA, 29 bp, Artificial Sequence
  Synthetic
gtcagtactcaguttctgcctatcattut

SEQ ID NO: 59184 - DNA, 22 bp, Artificial Sequence
  Synthetic
ccaactcatcuctggcctctug

SEQ ID NO: 59185 - DNA, 22 bp, Artificial Sequence
  Synthetic
agtatgaggagucgcagtcuga

SEQ ID NO: 59186 - DNA, 24 bp, Artificial Sequence
  Synthetic
agcaggaaaagcautgagcatcua

SEQ ID NO: 59187 - DNA, 21 bp, Artificial Sequence
  Synthetic
ggagcaggagcugatugagac

SEQ ID NO: 59188 - DNA, 20 bp, Artificial Sequence
  Synthetic
cccctcugggtgagtaccut

SEQ ID NO: 59189 - DNA, 18 bp, Artificial Sequence
  Synthetic
ggactcgcugcagaccuc

SEQ ID NO: 59190 - DNA, 22 bp, Artificial Sequence
  Synthetic
gggctgcuattttgtctauggt

SEQ ID NO: 59191 - DNA, 23 bp, Artificial Sequence
  Synthetic
gcaucaactucaccaacgagaag

SEQ ID NO: 59192 - DNA, 28 bp, Artificial Sequence
  Synthetic
gtagggaatgaugaagtaagtgctuagg

SEQ ID NO: 59193 - DNA, 28 bp, Artificial Sequence
  Synthetic
ccccaaagttcugctatacatgttucaa

SEQ ID NO: 59194 - DNA, 29 bp, Artificial Sequence
  Synthetic
tgctgtgttatatuctgctttcgtaaugt

SEQ ID NO: 59195 - DNA, 28 bp, Artificial Sequence
  Synthetic
gcatcatccttaauctcatcccatgtug

SEQ ID NO: 59196 - DNA, 24 bp, Artificial Sequence
  Synthetic
ggugggagaagugaaaggaaaagt

SEQ ID NO: 59197 - DNA, 23 bp, Artificial Sequence
  Synthetic
gctttaccgagutttccuccgat

SEQ ID NO: 59198 - DNA, 27 bp, Artificial Sequence
  Synthetic
aaggcttctgaguggtacaacttttua

SEQ ID NO: 59199 - DNA, 21 bp, Artificial Sequence
  Synthetic
caaggcugacactcacgauga

SEQ ID NO: 59200 - DNA, 20 bp, Artificial Sequence
  Synthetic
gcacaccaagcacagucuga

SEQ ID NO: 59201 - DNA, 21 bp, Artificial Sequence
  Synthetic
ccaagctucgccttccttuct

SEQ ID NO: 59202 - DNA, 23 bp, Artificial Sequence
  Synthetic
ccacctttucatgcaccugagaa

SEQ ID NO: 59203 - DNA, 20 bp, Artificial Sequence
  Synthetic
ctcctctucacgcctgugac

SEQ ID NO: 59204 - DNA, 22 bp, Artificial Sequence
  Synthetic
acagucagagaaucaggcgaag

SEQ ID NO: 59205 - DNA, 23 bp, Artificial Sequence
  Synthetic
ttgccacuaaggccctactttut

SEQ ID NO: 59206 - DNA, 22 bp, Artificial Sequence
  Synthetic
tccatggtucctacgaagcuct

SEQ ID NO: 59207 - DNA, 24 bp, Artificial Sequence
  Synthetic
gtaaaaggctucctgacactugga

SEQ ID NO: 59208 - DNA, 25 bp, Artificial Sequence
  Synthetic
agactttgatgautgtcctgtgcut

SEQ ID NO: 59209 - DNA, 26 bp, Artificial Sequence
  Synthetic
actccagatataacugggacttccug

SEQ ID NO: 59210 - DNA, 28 bp, Artificial Sequence
  Synthetic
ccatcttggtaccuatattcatggcuat

SEQ ID NO: 59211 - DNA, 28 bp, Artificial Sequence
  Synthetic
cttgcttaagauatggacgaaugcaaag

SEQ ID NO: 59212 - DNA, 29 bp, Artificial Sequence
  Synthetic
aaattctgtctuctttgcttaccuacaca

SEQ ID NO: 59213 - DNA, 26 bp, Artificial Sequence
  Synthetic
aacaguggaaccaataucaacaacct

SEQ ID NO: 59214 - DNA, 23 bp, Artificial Sequence
  Synthetic
tctttaagagggcagucaacugt

SEQ ID NO: 59215 - DNA, 25 bp, Artificial Sequence
  Synthetic
ggtttttacaccuctccagatggua

SEQ ID NO: 59216 - DNA, 22 bp, Artificial Sequence
  Synthetic
cccttttctugctgctgtgtug

SEQ ID NO: 59217 - DNA, 21 bp, Artificial Sequence
  Synthetic
gtguaagcaggcagaguggat

SEQ ID NO: 59218 - DNA, 20 bp, Artificial Sequence
  Synthetic
tccuacagccacggatgcua

SEQ ID NO: 59219 - DNA, 24 bp, Artificial Sequence
  Synthetic
gaataagagcaugaccctgcauga

SEQ ID NO: 59220 - DNA, 24 bp, Artificial Sequence
  Synthetic
ctgcaggaaacuatctctcggtuc

SEQ ID NO: 59221 - DNA, 23 bp, Artificial Sequence
  Synthetic
aggatagaggccuacacacauct

SEQ ID NO: 59222 - DNA, 22 bp, Artificial Sequence
  Synthetic
gcuccgaccatuaaagcccaat

SEQ ID NO: 59223 - DNA, 25 bp, Artificial Sequence
  Synthetic
acacttactagacacucctctccuc

SEQ ID NO: 59224 - DNA, 22 bp, Artificial Sequence
  Synthetic
tgggaagacagagcugactuct

SEQ ID NO: 59225 - DNA, 22 bp, Artificial Sequence
  Synthetic
gtgactcgtguccttacgtgua

SEQ ID NO: 59226 - DNA, 20 bp, Artificial Sequence
  Synthetic
gtctgtccgutgctccauca

SEQ ID NO: 59227 - DNA, 25 bp, Artificial Sequence
  Synthetic
gcttccttugaaactgacatgtuca

SEQ ID NO: 59228 - DNA, 18 bp, Artificial Sequence
  Synthetic
ggcacucgggaaggtuct

SEQ ID NO: 59229 - DNA, 21 bp, Artificial Sequence
  Synthetic
gggagttguccctaggtcugg

SEQ ID NO: 59230 - DNA, 21 bp, Artificial Sequence
  Synthetic
ggtgctcguagtagtcgugga

SEQ ID NO: 59231 - DNA, 24 bp, Artificial Sequence
  Synthetic
tagaccucagatcucaaggaacca

SEQ ID NO: 59232 - DNA, 21 bp, Artificial Sequence
  Synthetic
ggtcctacaugctggaacuca

SEQ ID NO: 59233 - DNA, 22 bp, Artificial Sequence
  Synthetic
gttcctgguacccatgcuacag

SEQ ID NO: 59234 - DNA, 20 bp, Artificial Sequence
  Synthetic
ctgcccaugctccaaaggua

SEQ ID NO: 59235 - DNA, 21 bp, Artificial Sequence
  Synthetic
gtctgcccuctgtttctgguc

SEQ ID NO: 59236 - DNA, 28 bp, Artificial Sequence
  Synthetic
gtgttattgacgucatagagtgacuaga

SEQ ID NO: 59237 - DNA, 21 bp, Artificial Sequence
  Synthetic
gcacugacctctatguccaca

SEQ ID NO: 59238 - DNA, 21 bp, Artificial Sequence
  Synthetic
tgctgtctuaggactgcgtut

SEQ ID NO: 59239 - DNA, 17 bp, Artificial Sequence
  Synthetic
ggaacuggcugcgcaac

SEQ ID NO: 59240 - DNA, 19 bp, Artificial Sequence
  Synthetic
guttccctgcugccaggat

SEQ ID NO: 59241 - DNA, 19 bp, Artificial Sequence
  Synthetic
cuggccuaccgagagacac

SEQ ID NO: 59242 - DNA, 22 bp, Artificial Sequence
  Synthetic
gacatgatggcucgatacguct

SEQ ID NO: 59243 - DNA, 20 bp, Artificial Sequence
  Synthetic
cgcttgucgtcacagugaca

SEQ ID NO: 59244 - DNA, 20 bp, Artificial Sequence
  Synthetic
ctcccagacutacugcccaa

SEQ ID NO: 59245 - DNA, 21 bp, Artificial Sequence
  Synthetic
gccucacacaaactcggugaa

SEQ ID NO: 59246 - DNA, 19 bp, Artificial Sequence
  Synthetic
cutgttctuggcccgaagg

SEQ ID NO: 59247 - DNA, 21 bp, Artificial Sequence
  Synthetic
ccagttugaccgacucaacca

SEQ ID NO: 59248 - DNA, 19 bp, Artificial Sequence
  Synthetic
tcacccgugcatucgaagt

SEQ ID NO: 59249 - DNA, 20 bp, Artificial Sequence
  Synthetic
gggatacaccutcacgcuca

SEQ ID NO: 59250 - DNA, 24 bp, Artificial Sequence
  Synthetic
gttctcagccgugacgatgataut

SEQ ID NO: 59251 - DNA, 19 bp, Artificial Sequence
  Synthetic
ctcgucgtcaaugcaagcc

SEQ ID NO: 59252 - DNA, 21 bp, Artificial Sequence
  Synthetic
cctcggccauactcaccacua

SEQ ID NO: 59253 - DNA, 22 bp, Artificial Sequence
  Synthetic
ccaacgauaccctgttcucagt

SEQ ID NO: 59254 - DNA, 28 bp, Artificial Sequence
  Synthetic
aaacacaggtttugattctttgcatuct

SEQ ID NO: 59255 - DNA, 28 bp, Artificial Sequence
  Synthetic
atcttccuagaggcattcattgugaaat

SEQ ID NO: 59256 - DNA, 24 bp, Artificial Sequence
  Synthetic
gataatccuacctttguggccagt

SEQ ID NO: 59257 - DNA, 26 bp, Artificial Sequence
  Synthetic
tccaagttuggaacacaggcaataua

SEQ ID NO: 59258 - DNA, 23 bp, Artificial Sequence
  Synthetic
ggtggactugaacttggactuga

SEQ ID NO: 59259 - DNA, 20 bp, Artificial Sequence
  Synthetic
ggtctcagugcgctctctug

SEQ ID NO: 59260 - DNA, 22 bp, Artificial Sequence
  Synthetic
caaggttcugccactcucagac

SEQ ID NO: 59261 - DNA, 24 bp, Artificial Sequence
  Synthetic
aggacaagacugagttctccauca

SEQ ID NO: 59262 - DNA, 22 bp, Artificial Sequence
  Synthetic
caaacuccacattccuggcaag

SEQ ID NO: 59263 - DNA, 21 bp, Artificial Sequence
  Synthetic
ctgcccauctacucggagaag

SEQ ID NO: 59264 - DNA, 21 bp, Artificial Sequence
  Synthetic
agatccucaccgagtgctcut

SEQ ID NO: 59265 - DNA, 19 bp, Artificial Sequence
  Synthetic
cucgcaagacgucaaggga

SEQ ID NO: 59266 - DNA, 21 bp, Artificial Sequence
  Synthetic
ggcacctcucacaccaatgut

SEQ ID NO: 59267 - DNA, 22 bp, Artificial Sequence
  Synthetic
agacctgguacgagtacaccug

SEQ ID NO: 59268 - DNA, 20 bp, Artificial Sequence
  Synthetic
cagacacgaagaugccagug

SEQ ID NO: 59269 - DNA, 22 bp, Artificial Sequence
  Synthetic
caccctggagucatccgtttua

SEQ ID NO: 59270 - DNA, 22 bp, Artificial Sequence
  Synthetic
caggaaguagatgaggucgcat

SEQ ID NO: 59271 - DNA, 24 bp, Artificial Sequence
  Synthetic
ctacctgauccaactggugaagag

SEQ ID NO: 59272 - DNA, 22 bp, Artificial Sequence
  Synthetic
cccctguaagcaaaguggacaa

SEQ ID NO: 59273 - DNA, 24 bp, Artificial Sequence
  Synthetic
accctaacccaguccttttaucct

SEQ ID NO: 59274 - DNA, 29 bp, Artificial Sequence
  Synthetic
tttgctttggttauttaggagtacacugt

SEQ ID NO: 59275 - DNA, 24 bp, Artificial Sequence
  Synthetic
gcagctacugactgaagaacauca

SEQ ID NO: 59276 - DNA, 21 bp, Artificial Sequence
  Synthetic
cacagaccaugtcatcgucct

SEQ ID NO: 59277 - DNA, 21 bp, Artificial Sequence
  Synthetic
aggctucacaccaagaagugt

SEQ ID NO: 59278 - DNA, 21 bp, Artificial Sequence
  Synthetic
cgtgttcccaguctgccatut

SEQ ID NO: 59279 - DNA, 19 bp, Artificial Sequence
  Synthetic
gacactgtgugacgccgua

SEQ ID NO: 59280 - DNA, 21 bp, Artificial Sequence
  Synthetic
ccccaccauacttccucccaa

SEQ ID NO: 59281 - DNA, 26 bp, Artificial Sequence
  Synthetic
gattcagctcugtactcctcttuacc

SEQ ID NO: 59282 - DNA, 20 bp, Artificial Sequence
  Synthetic
ttgccaagccaucgctcuaa

SEQ ID NO: 59283 - DNA, 27 bp, Artificial Sequence
  Synthetic
tctgcccagguttctattgttgttuaa

SEQ ID NO: 59284 - DNA, 19 bp, Artificial Sequence
  Synthetic
cggagugaaccccgugaac

SEQ ID NO: 59285 - DNA, 24 bp, Artificial Sequence
  Synthetic
gaatgaacacacacccutccttuc

SEQ ID NO: 59286 - DNA, 21 bp, Artificial Sequence
  Synthetic
cccagccccugtggaaaauac

SEQ ID NO: 59287 - DNA, 22 bp, Artificial Sequence
  Synthetic
gcccccautactguggaagaat

SEQ ID NO: 59288 - DNA, 20 bp, Artificial Sequence
  Synthetic
cactggcugtctttgcgtut

SEQ ID NO: 59289 - DNA, 19 bp, Artificial Sequence
  Synthetic
ccttgtuccacccccgtug

SEQ ID NO: 59290 - DNA, 21 bp, Artificial Sequence
  Synthetic
caaatgccccaautgcaggua

SEQ ID NO: 59291 - DNA, 27 bp, Artificial Sequence
  Synthetic
acttttatcacctutccttgcctctut

SEQ ID NO: 59292 - DNA, 23 bp, Artificial Sequence
  Synthetic
ggtctcagacacuttgagctuct

SEQ ID NO: 59293 - DNA, 22 bp, Artificial Sequence
  Synthetic
ccctggacugcttctttctguc

SEQ ID NO: 59294 - DNA, 25 bp, Artificial Sequence
  Synthetic
gctgcctgagaaauggaacaacaua

SEQ ID NO: 59295 - DNA, 24 bp, Artificial Sequence
  Synthetic
acugcagtgtucacagaaagagag

SEQ ID NO: 59296 - DNA, 23 bp, Artificial Sequence
  Synthetic
tattcctgucctcacaucagcat

SEQ ID NO: 59297 - DNA, 21 bp, Artificial Sequence
  Synthetic
gcatctuggccatgttgucaa

SEQ ID NO: 59298 - DNA, 21 bp, Artificial Sequence
  Synthetic
gcccccaagaaugatgaccua

SEQ ID NO: 59299 - DNA, 22 bp, Artificial Sequence
  Synthetic
ccttgtaauccatctgcuccga

SEQ ID NO: 59300 - DNA, 25 bp, Artificial Sequence
  Synthetic
aggactattauaacccgcagcctua

SEQ ID NO: 59301 - DNA, 20 bp, Artificial Sequence
  Synthetic
ctgaaggcuctccucaccag

SEQ ID NO: 59302 - DNA, 20 bp, Artificial Sequence
  Synthetic
tccucgacaacagccactug

SEQ ID NO: 59303 - DNA, 19 bp, Artificial Sequence
  Synthetic
ccaggtuccgcttctuggt

SEQ ID NO: 59304 - DNA, 20 bp, Artificial Sequence
  Synthetic
tgaagcuggaagccatcgug

SEQ ID NO: 59305 - DNA, 22 bp, Artificial Sequence
  Synthetic
cauaacggaucagccccagaag

SEQ ID NO: 59306 - DNA, 19 bp, Artificial Sequence
  Synthetic
cucctgacuccccgagaca

SEQ ID NO: 59307 - DNA, 17 bp, Artificial Sequence
  Synthetic
ccgagugaggcgctucc

SEQ ID NO: 59308 - DNA, 22 bp, Artificial Sequence
  Synthetic
gttactgcagcucacaaaugct

SEQ ID NO: 59309 - DNA, 29 bp, Artificial Sequence
  Synthetic
tcaccattaccautccaaatattctucca

SEQ ID NO: 59310 - DNA, 28 bp, Artificial Sequence
  Synthetic
gatttgttgcaggutttggttttaaugg

SEQ ID NO: 59311 - DNA, 28 bp, Artificial Sequence
  Synthetic
tgtgtgttctuaaagcaggcatacuaat

SEQ ID NO: 59312 - DNA, 19 bp, Artificial Sequence
  Synthetic
tgauggccaggaactuggg

SEQ ID NO: 59313 - DNA, 21 bp, Artificial Sequence
  Synthetic
tctgggaccucagcgtacuaa

SEQ ID NO: 59314 - DNA, 21 bp, Artificial Sequence
  Synthetic
gagtggauacccgagtcguag

SEQ ID NO: 59315 - DNA, 23 bp, Artificial Sequence
  Synthetic
catggugatgatgugggaagaca

SEQ ID NO: 59316 - DNA, 20 bp, Artificial Sequence
  Synthetic
cauccccaggcctcuaagga

SEQ ID NO: 59317 - DNA, 21 bp, Artificial Sequence
  Synthetic
tgacccatautcccctgcuct

SEQ ID NO: 59318 - DNA, 21 bp, Artificial Sequence
  Synthetic
gaagaugcttgggugggaaac

SEQ ID NO: 59319 - DNA, 26 bp, Artificial Sequence
  Synthetic
catctctccaauctgactcctttuct

SEQ ID NO: 59320 - DNA, 21 bp, Artificial Sequence
  Synthetic
gcagcaaugggaaggagguag

SEQ ID NO: 59321 - DNA, 27 bp, Artificial Sequence
  Synthetic
tcccttaaaaagucccactcagaguaa

SEQ ID NO: 59322 - DNA, 20 bp, Artificial Sequence
  Synthetic
cctgauccagaacgccucat

SEQ ID NO: 59323 - DNA, 23 bp, Artificial Sequence
  Synthetic
cctaactgtucctgtgactuccc

SEQ ID NO: 59324 - DNA, 19 bp, Artificial Sequence
  Synthetic
tggacacacaaggccucuc

SEQ ID NO: 59325 - DNA, 20 bp, Artificial Sequence
  Synthetic
aaggguaagcgttgcacuct

SEQ ID NO: 59326 - DNA, 22 bp, Artificial Sequence
  Synthetic
agagccaagguttgctaaugct

SEQ ID NO: 59327 - DNA, 22 bp, Artificial Sequence
  Synthetic
atgacgugatctgugacgagac

SEQ ID NO: 59328 - DNA, 21 bp, Artificial Sequence
  Synthetic
gaaggtcguctggactgtgut

SEQ ID NO: 59329 - DNA, 22 bp, Artificial Sequence
  Synthetic
ggcttttctugcctgtctucag

SEQ ID NO: 59330 - DNA, 22 bp, Artificial Sequence
  Synthetic
gcuctctacccuccagaggaat

SEQ ID NO: 59331 - DNA, 25 bp, Artificial Sequence
  Synthetic
tctatttgtcugactagcctgcuct

SEQ ID NO: 59332 - DNA, 20 bp, Artificial Sequence
  Synthetic
cccutcaugcggaaccacaa

SEQ ID NO: 59333 - DNA, 20 bp, Artificial Sequence
  Synthetic
gggagagcugcacttcucag

SEQ ID NO: 59334 - DNA, 23 bp, Artificial Sequence
  Synthetic
ggatgatgacaucacgtgtccut

SEQ ID NO: 59335 - DNA, 23 bp, Artificial Sequence
  Synthetic
ccaggaagaugacctgtgtguag

SEQ ID NO: 59336 - DNA, 23 bp, Artificial Sequence
  Synthetic
ctgctccattugtgctctctcut

SEQ ID NO: 59337 - DNA, 20 bp, Artificial Sequence
  Synthetic
ctccaggugacacaugcaac

SEQ ID NO: 59338 - DNA, 28 bp, Artificial Sequence
  Synthetic
gatttgguaaaggagaaggtaccugaag

SEQ ID NO: 59339 - DNA, 20 bp, Artificial Sequence
  Synthetic
ccctguggagcaggtcagua

SEQ ID NO: 59340 - DNA, 26 bp, Artificial Sequence
  Synthetic
acagaggatctugtgatcagcattut

SEQ ID NO: 59341 - DNA, 24 bp, Artificial Sequence
  Synthetic
ccctgguaacactgaagtttgugt

SEQ ID NO: 59342 - DNA, 21 bp, Artificial Sequence
  Synthetic
actgaggtcucagagccauct

SEQ ID NO: 59343 - DNA, 18 bp, Artificial Sequence
  Synthetic
agctctuggctgctggug

SEQ ID NO: 59344 - DNA, 20 bp, Artificial Sequence
  Synthetic
gatcccgcuggucaacaaac

SEQ ID NO: 59345 - DNA, 18 bp, Artificial Sequence
  Synthetic
ccggcccacgaagutcuc

SEQ ID NO: 59346 - DNA, 20 bp, Artificial Sequence
  Synthetic
ggaggcugacctccctcuac

SEQ ID NO: 59347 - DNA, 22 bp, Artificial Sequence
  Synthetic
attcatguccccagggtaguct

SEQ ID NO: 59348 - DNA, 25 bp, Artificial Sequence
  Synthetic
agacugtaatgtccaugggagaact

SEQ ID NO: 59349 - DNA, 21 bp, Artificial Sequence
  Synthetic
agaaggagguagccttggugt

SEQ ID NO: 59350 - DNA, 20 bp, Artificial Sequence
  Synthetic
gagacggucatggaggucat

SEQ ID NO: 59351 - DNA, 20 bp, Artificial Sequence
  Synthetic
tcaaacauggagcgctggut

SEQ ID NO: 59352 - DNA, 24 bp, Artificial Sequence
  Synthetic
ggagctacugaaattccugcagat

SEQ ID NO: 59353 - DNA, 22 bp, Artificial Sequence
  Synthetic
ctggttccauctttgctccuca

SEQ ID NO: 59354 - DNA, 21 bp, Artificial Sequence
  Synthetic
cacctcugaccacctcaacuc

SEQ ID NO: 59355 - DNA, 23 bp, Artificial Sequence
  Synthetic
ctacactcugactccucccaact

SEQ ID NO: 59356 - DNA, 22 bp, Artificial Sequence
  Synthetic
aggcttcaucacatacccccua

SEQ ID NO: 59357 - DNA, 24 bp, Artificial Sequence
  Synthetic
ggaaucccaaaggaagatgtcuca

SEQ ID NO: 59358 - DNA, 20 bp, Artificial Sequence
  Synthetic
ggcctcgugcatgttcctua

SEQ ID NO: 59359 - DNA, 27 bp, Artificial Sequence
  Synthetic
cgttgtauacggcaaacacatcatuac

SEQ ID NO: 59360 - DNA, 22 bp, Artificial Sequence
  Synthetic
ggctgtcaguttctgggtgtua

SEQ ID NO: 59361 - DNA, 22 bp, Artificial Sequence
  Synthetic
gtttctctgacgucccccauag

SEQ ID NO: 59362 - DNA, 21 bp, Artificial Sequence
  Synthetic
ccacctguggtgggtagtuag

SEQ ID NO: 59363 - DNA, 28 bp, Artificial Sequence
  Synthetic
accaggattacgaaugaggcaatttaut

SEQ ID NO: 59364 - DNA, 20 bp, Artificial Sequence
  Synthetic
ccacacgcucgtcttctgua

SEQ ID NO: 59365 - DNA, 22 bp, Artificial Sequence
  Synthetic
tgtcaacccccuccttttctug

SEQ ID NO: 59366 - DNA, 21 bp, Artificial Sequence
  Synthetic
caccctggguctcatcccuaa

SEQ ID NO: 59367 - DNA, 22 bp, Artificial Sequence
  Synthetic
aaaaggctaaccuggaggtgug

SEQ ID NO: 59368 - DNA, 21 bp, Artificial Sequence
  Synthetic
ctgaacaggugagtguccaca

SEQ ID NO: 59369 - DNA, 24 bp, Artificial Sequence
  Synthetic
ctgtcctgutaggtgguaaaggat

SEQ ID NO: 59370 - DNA, 23 bp, Artificial Sequence
  Synthetic
ccctgctttcugcctctctauac

SEQ ID NO: 59371 - DNA, 26 bp, Artificial Sequence
  Synthetic
ccatacttggcuctattctgcttcuc

SEQ ID NO: 59372 - DNA, 22 bp, Artificial Sequence
  Synthetic
caggaugagaaaggcaagccua

SEQ ID NO: 59373 - DNA, 26 bp, Artificial Sequence
  Synthetic
ctcttgggaguttctcactacttucc

SEQ ID NO: 59374 - DNA, 28 bp, Artificial Sequence
  Synthetic
ctttgacttucagcacttagttcactut

SEQ ID NO: 59375 - DNA, 23 bp, Artificial Sequence
  Synthetic
cactacagagcaugggttcugag

SEQ ID NO: 59376 - DNA, 26 bp, Artificial Sequence
  Synthetic
aactcttttugggtctgattctucca

SEQ ID NO: 59377 - DNA, 25 bp, Artificial Sequence
  Synthetic
gcttttcaaacugaagggaagtugt

SEQ ID NO: 59378 - DNA, 28 bp, Artificial Sequence
  Synthetic
ctaaaggtcaccugtcatttaactugga

SEQ ID NO: 59379 - DNA, 28 bp, Artificial Sequence
  Synthetic
cgaatggtucaaaagcaaaaatcatgut

SEQ ID NO: 59380 - DNA, 26 bp, Artificial Sequence
  Synthetic
cgaagttcacuccacttgaagtucat

SEQ ID NO: 59381 - DNA, 28 bp, Artificial Sequence
  Synthetic
cgcttgtttcttutgtttggtaattcug

SEQ ID NO: 59382 - DNA, 24 bp, Artificial Sequence
  Synthetic
ctggcatuggattgtctcugaaac

SEQ ID NO: 59383 - DNA, 28 bp, Artificial Sequence
  Synthetic
agctaatcaaugaggaacttgagacaut

SEQ ID NO: 59384 - DNA, 27 bp, Artificial Sequence
  Synthetic
ctaacctgugctgtactctttucaagt

SEQ ID NO: 59385 - DNA, 29 bp, Artificial Sequence
  Synthetic
caggcttattctgugatctttcttgttut

SEQ ID NO: 59386 - DNA, 28 bp, Artificial Sequence
  Synthetic
agctgtgtgattutctccacaagaaaua

SEQ ID NO: 59387 - DNA, 26 bp, Artificial Sequence
  Synthetic
gtaacagtgtcugcttccataaucct

SEQ ID NO: 59388 - DNA, 27 bp, Artificial Sequence
  Synthetic
acctgtaatgtuggtaggttttcaugt

SEQ ID NO: 59389 - DNA, 26 bp, Artificial Sequence
  Synthetic
ccagggtguccaaatctgattgttua

SEQ ID NO: 59390 - DNA, 21 bp, Artificial Sequence
  Synthetic
ccctgggtugggaagactuat

SEQ ID NO: 59391 - DNA, 28 bp, Artificial Sequence
  Synthetic
gtgtcaggaaggguattacaacgtaaut

SEQ ID NO: 59392 - DNA, 21 bp, Artificial Sequence
  Synthetic
actccccagucatgucccaat

SEQ ID NO: 59393 - DNA, 24 bp, Artificial Sequence
  Synthetic
aatatguacagggaggtgcuaggt

SEQ ID NO: 59394 - DNA, 24 bp, Artificial Sequence
  Synthetic
ccttcatcccucactttctcctut

SEQ ID NO: 59395 - DNA, 21 bp, Artificial Sequence
  Synthetic
tgtgagcugcagggttctcua

SEQ ID NO: 59396 - DNA, 25 bp, Artificial Sequence
  Synthetic
ggaagaggcaaauattcctccgtua

SEQ ID NO: 59397 - DNA, 21 bp, Artificial Sequence
  Synthetic
agctgugtcaccaucaggaag

SEQ ID NO: 59398 - DNA, 22 bp, Artificial Sequence
  Synthetic
gttttgcagccacucttgauga

SEQ ID NO: 59399 - DNA, 22 bp, Artificial Sequence
  Synthetic
ggagaagaaacacuggcctcug

SEQ ID NO: 59400 - DNA, 21 bp, Artificial Sequence
  Synthetic
gautgatgtggugcgcacaat

SEQ ID NO: 59401 - DNA, 24 bp, Artificial Sequence
  Synthetic
ggattttcugcagcacuaaaacga

SEQ ID NO: 59402 - DNA, 22 bp, Artificial Sequence
  Synthetic
agctatgggcuttccagcatut

SEQ ID NO: 59403 - DNA, 26 bp, Artificial Sequence
  Synthetic
ggtatatgatggacucctttgctgug

SEQ ID NO: 59404 - DNA, 23 bp, Artificial Sequence
  Synthetic
aaagaucggcagaaaacgcuaga

SEQ ID NO: 59405 - DNA, 22 bp, Artificial Sequence
  Synthetic
tctcactgguctctgttugcac

SEQ ID NO: 59406 - DNA, 27 bp, Artificial Sequence
  Synthetic
tttccctcttuctcttccttauaggct

SEQ ID NO: 59407 - DNA, 28 bp, Artificial Sequence
  Synthetic
acttaagtactgagauagaagctctgut

SEQ ID NO: 59408 - DNA, 23 bp, Artificial Sequence
  Synthetic
gctcctagcuagctctagtgcut

SEQ ID NO: 59409 - DNA, 28 bp, Artificial Sequence
  Synthetic
catgggatactgugtaccaataccaaut

SEQ ID NO: 59410 - DNA, 19 bp, Artificial Sequence
  Synthetic
aggtcaaccuggttugcca

SEQ ID NO: 59411 - DNA, 28 bp, Artificial Sequence
  Synthetic
tagcutcaggtatuagaaacaagagcat

SEQ ID NO: 59412 - DNA, 27 bp, Artificial Sequence
  Synthetic
cactcttagguctgttatcuacagggt

SEQ ID NO: 59413 - DNA, 21 bp, Artificial Sequence
  Synthetic
gatccctggacugcctcttuc

SEQ ID NO: 59414 - DNA, 20 bp, Artificial Sequence
  Synthetic
gttttcagggugagccuggt

SEQ ID NO: 59415 - DNA, 28 bp, Artificial Sequence
  Synthetic
tuggagtagauaaggaaggaaagaagga

SEQ ID NO: 59416 - DNA, 21 bp, Artificial Sequence
  Synthetic
cctggutcctgctuggaagag

SEQ ID NO: 59417 - DNA, 27 bp, Artificial Sequence
  Synthetic
tgaaggaagctutggacctgaatuaaa

SEQ ID NO: 59418 - DNA, 27 bp, Artificial Sequence
  Synthetic
ccttaatgtgcugttgagttagaaugg

SEQ ID NO: 59419 - DNA, 24 bp, Artificial Sequence
  Synthetic
tcccttcctuttctcttgcttugg

SEQ ID NO: 59420 - DNA, 25 bp, Artificial Sequence
  Synthetic
ggaaaaaccaaagucaggcaacuaa

SEQ ID NO: 59421 - DNA, 27 bp, Artificial Sequence
  Synthetic
tggcagaagaaaaagutatgctggaua

SEQ ID NO: 59422 - DNA, 28 bp, Artificial Sequence
  Synthetic
gacttcaatgaaagcuacctggtauact

SEQ ID NO: 59423 - DNA, 24 bp, Artificial Sequence
  Synthetic
tccaacactacugggatgttctug

SEQ ID NO: 59424 - DNA, 22 bp, Artificial Sequence
  Synthetic
cttcctgcugctcttctgaucc

SEQ ID NO: 59425 - DNA, 28 bp, Artificial Sequence
  Synthetic
gtttgatcaagtacucatccagcttcut

SEQ ID NO: 59426 - DNA, 23 bp, Artificial Sequence
  Synthetic
cttccccaccutccaattttgut

SEQ ID NO: 59427 - DNA, 28 bp, Artificial Sequence
  Synthetic
tgtgaatggcaugtacagaatctaugac

SEQ ID NO: 59428 - DNA, 28 bp, Artificial Sequence
  Synthetic
gactgtttttccugatgtggactatgua

SEQ ID NO: 59429 - DNA, 28 bp, Artificial Sequence
  Synthetic
ctccagtttugacacaccatcagtauaa

SEQ ID NO: 59430 - DNA, 24 bp, Artificial Sequence
  Synthetic
agtggtcccaaguagtcactuaga

SEQ ID NO: 59431 - DNA, 22 bp, Artificial Sequence
  Synthetic
cactaagggutcgtccagtucc

SEQ ID NO: 59432 - DNA, 25 bp, Artificial Sequence
  Synthetic
gctctgtcaugtgtgatctgtauca

SEQ ID NO: 59433 - DNA, 18 bp, Artificial Sequence
  Synthetic
gtcgcgccucccatttut

SEQ ID NO: 59434 - DNA, 19 bp, Artificial Sequence
  Synthetic
tccaggagcucugccagat

SEQ ID NO: 59435 - DNA, 17 bp, Artificial Sequence
  Synthetic
tgcatgggugggtgcug

SEQ ID NO: 59436 - DNA, 24 bp, Artificial Sequence
  Synthetic
gaacctttctuctcgattgtgcug

SEQ ID NO: 59437 - DNA, 27 bp, Artificial Sequence
  Synthetic
ccaaaacaatgtuaccatcatggcuaa

SEQ ID NO: 59438 - DNA, 20 bp, Artificial Sequence
  Synthetic
ggacacgacacucaccacua

SEQ ID NO: 59439 - DNA, 20 bp, Artificial Sequence
  Synthetic
cctgtctccugaggctgtuc

SEQ ID NO: 59440 - DNA, 21 bp, Artificial Sequence
  Synthetic
cccttccucaccctcctctuc

SEQ ID NO: 59441 - DNA, 18 bp, Artificial Sequence
  Synthetic
cccguactggcugcacaa

SEQ ID NO: 59442 - DNA, 19 bp, Artificial Sequence
  Synthetic
cgcccccgagaauggtuac

SEQ ID NO: 59443 - DNA, 23 bp, Artificial Sequence
  Synthetic
tgttcactutccctggugagaga

SEQ ID NO: 59444 - DNA, 21 bp, Artificial Sequence
  Synthetic
cacagcggucatctctaccug

SEQ ID NO: 59445 - DNA, 21 bp, Artificial Sequence
  Synthetic
cacgcaacccaguaccactua

SEQ ID NO: 59446 - DNA, 28 bp, Artificial Sequence
  Synthetic
ggattcattauctgagattcuccaccag

SEQ ID NO: 59447 - DNA, 23 bp, Artificial Sequence
  Synthetic
ttactgtgtuccacccgttucat

SEQ ID NO: 59448 - DNA, 28 bp, Artificial Sequence
  Synthetic
cctttgcaatggguaatggagatctaut

SEQ ID NO: 59449 - DNA, 26 bp, Artificial Sequence
  Synthetic
ctcccacuagaagaaacagaactuga

SEQ ID NO: 59450 - DNA, 20 bp, Artificial Sequence
  Synthetic
ggtgggacugtgctttcuga

SEQ ID NO: 59451 - DNA, 25 bp, Artificial Sequence
  Synthetic
agtgagaatgaaautagggctcugg

SEQ ID NO: 59452 - DNA, 21 bp, Artificial Sequence
  Synthetic
agagtcuggcccttggttgua

SEQ ID NO: 59453 - DNA, 22 bp, Artificial Sequence
  Synthetic
tccacctauctgcagtctugga

SEQ ID NO: 59454 - DNA, 18 bp, Artificial Sequence
  Synthetic
cttctuccgccagucggt

SEQ ID NO: 59455 - DNA, 17 bp, Artificial Sequence
  Synthetic
ctccgcucggctuagga

SEQ ID NO: 59456 - DNA, 20 bp, Artificial Sequence
  Synthetic
cgcctaccagcucatgcaua

SEQ ID NO: 59457 - DNA, 21 bp, Artificial Sequence
  Synthetic
caaccgcaaaucccctaaugg

SEQ ID NO: 59458 - DNA, 21 bp, Artificial Sequence
  Synthetic
gtccacgagcagaacuacguc

SEQ ID NO: 59459 - DNA, 21 bp, Artificial Sequence
  Synthetic
gtgggaagutggcatctguca

SEQ ID NO: 59460 - DNA, 25 bp, Artificial Sequence
  Synthetic
gtcctgcatugtccatttccttuag

SEQ ID NO: 59461 - DNA, 30 bp, Artificial Sequence
  Synthetic
ctcaattttaatacucaggacaaacugcat

SEQ ID NO: 59462 - DNA, 19 bp, Artificial Sequence
  Synthetic
cccuccggaatcgucaagt

SEQ ID NO: 59463 - DNA, 22 bp, Artificial Sequence
  Synthetic
gaugtacuccaagccgaaaacc

SEQ ID NO: 59464 - DNA, 20 bp, Artificial Sequence
  Synthetic
gattggcccuattgggctug

SEQ ID NO: 59465 - DNA, 27 bp, Artificial Sequence
  Synthetic
ccaaagccaatuaagtcctagcaagua

SEQ ID NO: 59466 - DNA, 21 bp, Artificial Sequence
  Synthetic
ggaggaggagaccuggaacug

SEQ ID NO: 59467 - DNA, 23 bp, Artificial Sequence
  Synthetic
ctuaggcccaaccacuaacagag

SEQ ID NO: 59468 - DNA, 21 bp, Artificial Sequence
  Synthetic
ccaatttcuggaggcggtuca

SEQ ID NO: 59469 - DNA, 29 bp, Artificial Sequence
  Synthetic
tgatcctttcttugctgttagcttatuca

SEQ ID NO: 59470 - DNA, 26 bp, Artificial Sequence
  Synthetic
cctgtgaauaccggaggttttgauac

SEQ ID NO: 59471 - DNA, 28 bp, Artificial Sequence
  Synthetic
gctcaggaaaagauggcagaatactuaa

SEQ ID NO: 59472 - DNA, 22 bp, Artificial Sequence
  Synthetic
ctggaagaccacugtcacctut

SEQ ID NO: 59473 - DNA, 28 bp, Artificial Sequence
  Synthetic
acagagacacaaaugctccagattttua

SEQ ID NO: 59474 - DNA, 21 bp, Artificial Sequence
  Synthetic
gctgtcctcuaggacctggut

SEQ ID NO: 59475 - DNA, 28 bp, Artificial Sequence
  Synthetic
gggcattcagtcuactttttacttggut

SEQ ID NO: 59476 - DNA, 24 bp, Artificial Sequence
  Synthetic
ccattattucaaaggagcugcagt

SEQ ID NO: 59477 - DNA, 28 bp, Artificial Sequence
  Synthetic
gggtagagguattttccaatugagaaga

SEQ ID NO: 59478 - DNA, 27 bp, Artificial Sequence
  Synthetic
catgtaaggtgaucccaaatgtaugga

SEQ ID NO: 59479 - DNA, 23 bp, Artificial Sequence
  Synthetic
caucagcaaaagccaaacuaggg

SEQ ID NO: 59480 - DNA, 18 bp, Artificial Sequence
  Synthetic
aggaccugcaggagcuca

SEQ ID NO: 59481 - DNA, 17 bp, Artificial Sequence
  Synthetic
cgcgcuccttggcuact

SEQ ID NO: 59482 - DNA, 22 bp, Artificial Sequence
  Synthetic
tccctttcccutccttccucaa

SEQ ID NO: 59483 - DNA, 22 bp, Artificial Sequence
  Synthetic
ttgggatgaagugggaaaccug

SEQ ID NO: 59484 - DNA, 21 bp, Artificial Sequence
  Synthetic
acagacugggccaucagagaa

SEQ ID NO: 59485 - DNA, 23 bp, Artificial Sequence
  Synthetic
tctcctctggacuctttggagug

SEQ ID NO: 59486 - DNA, 21 bp, Artificial Sequence
  Synthetic
gaggaaacgacugacccacuc

SEQ ID NO: 59487 - DNA, 21 bp, Artificial Sequence
  Synthetic
tgctcccagacuaacctguct

SEQ ID NO: 59488 - DNA, 21 bp, Artificial Sequence
  Synthetic
gttctcagutcagctgucggt

SEQ ID NO: 59489 - DNA, 24 bp, Artificial Sequence
  Synthetic
tccatttguaggaggtgggatcut

SEQ ID NO: 59490 - DNA, 25 bp, Artificial Sequence
  Synthetic
tcagttcagtaucttatccccguga

SEQ ID NO: 59491 - DNA, 21 bp, Artificial Sequence
  Synthetic
agagacccgacgauccuacat

SEQ ID NO: 59492 - DNA, 20 bp, Artificial Sequence
  Synthetic
gagccutcauaccccgaagt

SEQ ID NO: 59493 - DNA, 22 bp, Artificial Sequence
  Synthetic
agaugcctctgaugggaaaagg

SEQ ID NO: 59494 - DNA, 25 bp, Artificial Sequence
  Synthetic
ctggtgtctucagcagtattttugt

SEQ ID NO: 59495 - DNA, 22 bp, Artificial Sequence
  Synthetic
ttgatctccagcuggcattuct

SEQ ID NO: 59496 - DNA, 27 bp, Artificial Sequence
  Synthetic
aacagacgaacaaaaccuctactuaca

SEQ ID NO: 59497 - DNA, 21 bp, Artificial Sequence
  Synthetic
cctgcagggutctctcugaac

SEQ ID NO: 59498 - DNA, 21 bp, Artificial Sequence
  Synthetic
catuaggtggaguggaagcca

SEQ ID NO: 59499 - DNA, 27 bp, Artificial Sequence
  Synthetic
atcaaaggaaauatgaccggguaacat

SEQ ID NO: 59500 - DNA, 28 bp, Artificial Sequence
  Synthetic
catgttgtacugaatgcacctatguaga

SEQ ID NO: 59501 - DNA, 29 bp, Artificial Sequence
  Synthetic
ccttgtgatttcutccatgtttgtcuaaa

SEQ ID NO: 59502 - DNA, 21 bp, Artificial Sequence
  Synthetic
cctagggugacagctcucaca

SEQ ID NO: 59503 - DNA, 23 bp, Artificial Sequence
  Synthetic
aggtgcugacatccttuccaaag

SEQ ID NO: 59504 - DNA, 22 bp, Artificial Sequence
  Synthetic
ccagatuacagcacaagccaut

SEQ ID NO: 59505 - DNA, 26 bp, Artificial Sequence
  Synthetic
agaaauaaacgacaaaagcugcaacc

SEQ ID NO: 59506 - DNA, 21 bp, Artificial Sequence
  Synthetic
tcccacuggacatccucaagt

SEQ ID NO: 59507 - DNA, 25 bp, Artificial Sequence
  Synthetic
ctcaatcaacugcaagatgtgctuc

SEQ ID NO: 59508 - DNA, 23 bp, Artificial Sequence
  Synthetic
ctagtaguccctttccucggaga

SEQ ID NO: 59509 - DNA, 21 bp, Artificial Sequence
  Synthetic
ctgcucctgaacucccagaaa

SEQ ID NO: 59510 - DNA, 28 bp, Artificial Sequence
  Synthetic
tgctttctaaccuttgcattatggauga

SEQ ID NO: 59511 - DNA, 29 bp, Artificial Sequence
  Synthetic
gcaacgatctaaugagtagggtatguaaa

SEQ ID NO: 59512 - DNA, 27 bp, Artificial Sequence
  Synthetic
ctcagggcaauttatacagcatttugt

SEQ ID NO: 59513 - DNA, 28 bp, Artificial Sequence
  Synthetic
cagacactggguccttcttaatattcut

SEQ ID NO: 59514 - DNA, 25 bp, Artificial Sequence
  Synthetic
gcttaagctttcucaggacaatgua

SEQ ID NO: 59515 - DNA, 29 bp, Artificial Sequence
  Synthetic
gttcccaaagcauataagctagucagaat

SEQ ID NO: 59516 - DNA, 26 bp, Artificial Sequence
  Synthetic
tctctgtaaaaacutgcaggttcugt

SEQ ID NO: 59517 - DNA, 28 bp, Artificial Sequence
  Synthetic
cctttgacatcuttgacttggtaucagt

SEQ ID NO: 59518 - DNA, 23 bp, Artificial Sequence
  Synthetic
tctttgttccauaggcagctgut

SEQ ID NO: 59519 - DNA, 23 bp, Artificial Sequence
  Synthetic
cattaccgcugggaugaaaagga

SEQ ID NO: 59520 - DNA, 28 bp, Artificial Sequence
  Synthetic
tttagattcccaucttcccattguaacc

SEQ ID NO: 59521 - DNA, 28 bp, Artificial Sequence
  Synthetic
ggctaaggcaaauatgattgaatugaca

SEQ ID NO: 59522 - DNA, 20 bp, Artificial Sequence
  Synthetic
tccggauggcccccttauat

SEQ ID NO: 59523 - DNA, 28 bp, Artificial Sequence
  Synthetic
tcttggactatugtacccctatuaaggt

SEQ ID NO: 59524 - DNA, 25 bp, Artificial Sequence
  Synthetic
gatggtggataugcttgtggaauct

SEQ ID NO: 59525 - DNA, 26 bp, Artificial Sequence
  Synthetic
gcacaagacaaaagaaautccgttuc

SEQ ID NO: 59526 - DNA, 28 bp, Artificial Sequence
  Synthetic
gatcaaacaagtautttctgctggcaua

SEQ ID NO: 59527 - DNA, 28 bp, Artificial Sequence
  Synthetic
aagaagctcaugaattgagtgaagauca

SEQ ID NO: 59528 - DNA, 29 bp, Artificial Sequence
  Synthetic
aaacacatguagaaacctacctcaaaugt

SEQ ID NO: 59529 - DNA, 27 bp, Artificial Sequence
  Synthetic
gctgtggtgagucgaattattgagaut

SEQ ID NO: 59530 - DNA, 21 bp, Artificial Sequence
  Synthetic
cagaagcagccuggguaaaac

SEQ ID NO: 59531 - DNA, 28 bp, Artificial Sequence
  Synthetic
ggcagcactttauttgcaggtataguaa

SEQ ID NO: 59532 - DNA, 25 bp, Artificial Sequence
  Synthetic
ttcatggcguagtaaggtttucact

SEQ ID NO: 59533 - DNA, 25 bp, Artificial Sequence
  Synthetic
ccactggtuaacaagtctttgucct

SEQ ID NO: 59534 - DNA, 23 bp, Artificial Sequence
  Synthetic
cacctattctuccaaggccauca

SEQ ID NO: 59535 - DNA, 27 bp, Artificial Sequence
  Synthetic
gaacaaatctacugggtggaagaucat

SEQ ID NO: 59536 - DNA, 22 bp, Artificial Sequence
  Synthetic
gggaucaccagaggatgttguc

SEQ ID NO: 59537 - DNA, 23 bp, Artificial Sequence
  Synthetic
tttttgtttguggtttggugcct

SEQ ID NO: 59538 - DNA, 20 bp, Artificial Sequence
  Synthetic
gagacaagcgugtggcauac

SEQ ID NO: 59539 - DNA, 24 bp, Artificial Sequence
  Synthetic
agaagagaugggagaaaggcctua

SEQ ID NO: 59540 - DNA, 21 bp, Artificial Sequence
  Synthetic
ctgcctcuggagaaggaccua

SEQ ID NO: 59541 - DNA, 23 bp, Artificial Sequence
  Synthetic
gguggtgtgttgucagagaagac

SEQ ID NO: 59542 - DNA, 20 bp, Artificial Sequence
  Synthetic
gtttcctugagcgtgctguc

SEQ ID NO: 59543 - DNA, 25 bp, Artificial Sequence
  Synthetic
aaagtgtcugccaggaattgaacua

SEQ ID NO: 59544 - DNA, 19 bp, Artificial Sequence
  Synthetic
tccauccguccggagagaa

SEQ ID NO: 59545 - DNA, 19 bp, Artificial Sequence
  Synthetic
caaacutguccagcagcca

SEQ ID NO: 59546 - DNA, 24 bp, Artificial Sequence
  Synthetic
gtgagttgcuctcataccacauga

SEQ ID NO: 59547 - DNA, 26 bp, Artificial Sequence
  Synthetic
accctagaagaaugggattcaucact

SEQ ID NO: 59548 - DNA, 21 bp, Artificial Sequence
  Synthetic
ggcagaaacugcttgcaagut

SEQ ID NO: 59549 - DNA, 21 bp, Artificial Sequence
  Synthetic
ccaaacccutccaggauagcc

SEQ ID NO: 59550 - DNA, 26 bp, Artificial Sequence
  Synthetic
tcctcacagauatatttccacuggct

SEQ ID NO: 59551 - DNA, 18 bp, Artificial Sequence
  Synthetic
gcctggugttggcuggat

SEQ ID NO: 59552 - DNA, 29 bp, Artificial Sequence
  Synthetic
tcttcactctcuagggtattcattaugct

SEQ ID NO: 59553 - DNA, 23 bp, Artificial Sequence
  Synthetic
gactgtgttcugtctgagtgugt

SEQ ID NO: 59554 - DNA, 26 bp, Artificial Sequence
  Synthetic
cutagaggacugaaaggagaaagcat

SEQ ID NO: 59555 - DNA, 29 bp, Artificial Sequence
  Synthetic
gccatgtagaaagguaaactgctgataut

SEQ ID NO: 59556 - DNA, 21 bp, Artificial Sequence
  Synthetic
gggtcgatcugcctgtttgut

SEQ ID NO: 59557 - DNA, 21 bp, Artificial Sequence
  Synthetic
acctaccacutcgtcaugcag

SEQ ID NO: 59558 - DNA, 26 bp, Artificial Sequence
  Synthetic
tcatcctcctccucctctggattaua

SEQ ID NO: 59559 - DNA, 27 bp, Artificial Sequence
  Synthetic
gcgttaguagctagagauaaaccaagt

SEQ ID NO: 59560 - DNA, 28 bp, Artificial Sequence
  Synthetic
agaaaatgtctcuctcttttggaugcaa

SEQ ID NO: 59561 - DNA, 21 bp, Artificial Sequence
  Synthetic
agggaacugagggcaaaacug

SEQ ID NO: 59562 - DNA, 25 bp, Artificial Sequence
  Synthetic
cccagaacaucacatatcacugcaa

SEQ ID NO: 59563 - DNA, 29 bp, Artificial Sequence
  Synthetic
gctgactgcuttatgacctatatugagaa

SEQ ID NO: 59564 - DNA, 26 bp, Artificial Sequence
  Synthetic
ccttatcuaccattcattgcugcaaa

SEQ ID NO: 59565 - DNA, 19 bp, Artificial Sequence
  Synthetic
acaggcauacgtggtcguc

SEQ ID NO: 59566 - DNA, 22 bp, Artificial Sequence
  Synthetic
cagctuggcccagttatucagt

SEQ ID NO: 59567 - DNA, 22 bp, Artificial Sequence
  Synthetic
gctccttccauagctccatguc

SEQ ID NO: 59568 - DNA, 20 bp, Artificial Sequence
  Synthetic
atcttguggcggatgtggut

SEQ ID NO: 59569 - DNA, 20 bp, Artificial Sequence
  Synthetic
gcgtcggugctgtaacauga

SEQ ID NO: 59570 - DNA, 26 bp, Artificial Sequence
  Synthetic
caagaaactucagaaatttgccucca

SEQ ID NO: 59571 - DNA, 24 bp, Artificial Sequence
  Synthetic
gcacaacutgcagaaugaaccaat

SEQ ID NO: 59572 - DNA, 22 bp, Artificial Sequence
  Synthetic
aagttgugtagccaugggacat

SEQ ID NO: 59573 - DNA, 24 bp, Artificial Sequence
  Synthetic
tgtcaauacccatcttcucacgga

SEQ ID NO: 59574 - DNA, 22 bp, Artificial Sequence
  Synthetic
tcuaaccttucaacaggcagca

SEQ ID NO: 59575 - DNA, 26 bp, Artificial Sequence
  Synthetic
gctaacattugccttgcttgaugaac

SEQ ID NO: 59576 - DNA, 22 bp, Artificial Sequence
  Synthetic
cctttcccuttggtgaggugac

SEQ ID NO: 59577 - DNA, 26 bp, Artificial Sequence
  Synthetic
ggattacuctgagaccuaggcaaaaa

SEQ ID NO: 59578 - DNA, 19 bp, Artificial Sequence
  Synthetic
aggcaccutctccgtcuct

SEQ ID NO: 59579 - DNA, 19 bp, Artificial Sequence
  Synthetic
acagccccugaugaggaca

SEQ ID NO: 59580 - DNA, 21 bp, Artificial Sequence
  Synthetic
tuggccaactuaccacaaggt

SEQ ID NO: 59581 - DNA, 22 bp, Artificial Sequence
  Synthetic
gctggcacaugatggacttcut

SEQ ID NO: 59582 - DNA, 21 bp, Artificial Sequence
  Synthetic
ccagtcuccccggtacuaaca

SEQ ID NO: 59583 - DNA, 21 bp, Artificial Sequence
  Synthetic
cctctccuggcagagtucaag

SEQ ID NO: 59584 - DNA, 21 bp, Artificial Sequence
  Synthetic
ctggtcucccacatgtgugat

SEQ ID NO: 59585 - DNA, 22 bp, Artificial Sequence
  Synthetic
tggaatgggutggtttccucag

SEQ ID NO: 59586 - DNA, 27 bp, Artificial Sequence
  Synthetic
ttgagattcgccuaaaacatgatguct

SEQ ID NO: 59587 - DNA, 21 bp, Artificial Sequence
  Synthetic
gcgcuaagaacacctccacug

SEQ ID NO: 59588 - DNA, 28 bp, Artificial Sequence
  Synthetic
cttccaacaauaggattcagcauagaga

SEQ ID NO: 59589 - DNA, 28 bp, Artificial Sequence
  Synthetic
aataaaccagccauagtggtuagaaaca

SEQ ID NO: 59590 - DNA, 26 bp, Artificial Sequence
  Synthetic
ctgcaaaaugacctaaaaagcuggaa

SEQ ID NO: 59591 - DNA, 28 bp, Artificial Sequence
  Synthetic
gccagggtttauctttgatgttctcuaa

SEQ ID NO: 59592 - DNA, 23 bp, Artificial Sequence
  Synthetic
ggaguagggaagcaaagacugaa

SEQ ID NO: 59593 - DNA, 20 bp, Artificial Sequence
  Synthetic
cctgctgucctgctcttguc

SEQ ID NO: 59594 - DNA, 20 bp, Artificial Sequence
  Synthetic
gtacuccactcccuccgaga

SEQ ID NO: 59595 - DNA, 23 bp, Artificial Sequence
  Synthetic
ggctttccugccaatttctccua

SEQ ID NO: 59596 - DNA, 21 bp, Artificial Sequence
  Synthetic
ggaagcugaggcactgaauct

SEQ ID NO: 59597 - DNA, 21 bp, Artificial Sequence
  Synthetic
ggcauctgagacucacaccaa

SEQ ID NO: 59598 - DNA, 21 bp, Artificial Sequence
  Synthetic
cggcatguggctagttcctuc

SEQ ID NO: 59599 - DNA, 25 bp, Artificial Sequence
  Synthetic
gtgggtgatgutgtgcttctttauc

SEQ ID NO: 59600 - DNA, 19 bp, Artificial Sequence
  Synthetic
acaggcuggatcaggguca

SEQ ID NO: 59601 - DNA, 26 bp, Artificial Sequence
  Synthetic
ctctgccaattuccttacagggauag

SEQ ID NO: 59602 - DNA, 19 bp, Artificial Sequence
  Synthetic
agaggcuaagccgctcauc

SEQ ID NO: 59603 - DNA, 19 bp, Artificial Sequence
  Synthetic
gccuccccagugaagaagt

SEQ ID NO: 59604 - DNA, 20 bp, Artificial Sequence
  Synthetic
auctcctggcugaagaacgg

SEQ ID NO: 59605 - DNA, 19 bp, Artificial Sequence
  Synthetic
cacgacgcaggugtagtug

SEQ ID NO: 59606 - DNA, 20 bp, Artificial Sequence
  Synthetic
gcacaagauctcccgctucc

SEQ ID NO: 59607 - DNA, 24 bp, Artificial Sequence
  Synthetic
aaagtacccuaggctctacauggt

SEQ ID NO: 59608 - DNA, 20 bp, Artificial Sequence
  Synthetic
gggaucgccccattttguat

SEQ ID NO: 59609 - DNA, 21 bp, Artificial Sequence
  Synthetic
cccttgauacgctccgactug

SEQ ID NO: 59610 - DNA, 22 bp, Artificial Sequence
  Synthetic
agatcagctucctgttcgacug

SEQ ID NO: 59611 - DNA, 24 bp, Artificial Sequence
  Synthetic
cctggaaaggutctggttcctuag

SEQ ID NO: 59612 - DNA, 25 bp, Artificial Sequence
  Synthetic
ttgtccacguaatgagcatguagag

SEQ ID NO: 59613 - DNA, 21 bp, Artificial Sequence
  Synthetic
ccccacaggaaggaautcugg

SEQ ID NO: 59614 - DNA, 21 bp, Artificial Sequence
  Synthetic
gcacgguttgauggcagagat

SEQ ID NO: 59615 - DNA, 27 bp, Artificial Sequence
  Synthetic
ccatagccttgcugatattacacacuc

SEQ ID NO: 59616 - DNA, 22 bp, Artificial Sequence
  Synthetic
gggttctguggaagacaauacc

SEQ ID NO: 59617 - DNA, 27 bp, Artificial Sequence
  Synthetic
gcagccaucaatttgttttaagucact

SEQ ID NO: 59618 - DNA, 29 bp, Artificial Sequence
  Synthetic
ctaggaaaatcatuaggcggtatgtaucc

SEQ ID NO: 59619 - DNA, 27 bp, Artificial Sequence
  Synthetic
gagctctatttugttcctctccaucaa

SEQ ID NO: 59620 - DNA, 25 bp, Artificial Sequence
  Synthetic
aagtaatggugattcttggcaucca

SEQ ID NO: 59621 - DNA, 27 bp, Artificial Sequence
  Synthetic
gcacaatcaaguctccatcagattuag

SEQ ID NO: 59622 - DNA, 17 bp, Artificial Sequence
  Synthetic
gggcugagagcgucgag

SEQ ID NO: 59623 - DNA, 18 bp, Artificial Sequence
  Synthetic
tcaccugcagcagcagut

SEQ ID NO: 59624 - DNA, 21 bp, Artificial Sequence
  Synthetic
gatgaacugcacagtggcaut

SEQ ID NO: 59625 - DNA, 26 bp, Artificial Sequence
  Synthetic
tgatacattttucacccaacugacca

SEQ ID NO: 59626 - DNA, 22 bp, Artificial Sequence
  Synthetic
ctgtcauggctctcaucaaggt

SEQ ID NO: 59627 - DNA, 25 bp, Artificial Sequence
  Synthetic
gccatcattgutgtgtttcaatgug

SEQ ID NO: 59628 - DNA, 23 bp, Artificial Sequence
  Synthetic
agctgccgaaggugaatgtttua

SEQ ID NO: 59629 - DNA, 26 bp, Artificial Sequence
  Synthetic
gcaataacaugagagcttgccattut

SEQ ID NO: 59630 - DNA, 25 bp, Artificial Sequence
  Synthetic
tggttttaaagcutgaggcccauaa

SEQ ID NO: 59631 - DNA, 29 bp, Artificial Sequence
  Synthetic
agtcccagattcuctatttccaaaaccua

SEQ ID NO: 59632 - DNA, 28 bp, Artificial Sequence
  Synthetic
agaatcactgucttcattactcugcaaa

SEQ ID NO: 59633 - DNA, 20 bp, Artificial Sequence
  Synthetic
ctgaacaaagccguggagug

SEQ ID NO: 59634 - DNA, 28 bp, Artificial Sequence
  Synthetic
tgaaatcatatcaaugtcagccccauag

SEQ ID NO: 59635 - DNA, 33 bp, Artificial Sequence
  Synthetic
tccatgtaaatatcucattcttttccatuagca

SEQ ID NO: 59636 - DNA, 27 bp, Artificial Sequence
  Synthetic
accattaccugtttcagtttaaucgca

SEQ ID NO: 59637 - DNA, 28 bp, Artificial Sequence
  Synthetic
tccagtttacaauccatggctgtttuat

SEQ ID NO: 59638 - DNA, 27 bp, Artificial Sequence
  Synthetic
agaaaaccatccugagacaccuaaaaa

SEQ ID NO: 59639 - DNA, 24 bp, Artificial Sequence
  Synthetic
gctctcgtuttgtttgcatucagt

SEQ ID NO: 59640 - DNA, 23 bp, Artificial Sequence
  Synthetic
gttcgaacaaaagccaugaagug

SEQ ID NO: 59641 - DNA, 27 bp, Artificial Sequence
  Synthetic
tcgaattatccaucaatcgtccaugaa

SEQ ID NO: 59642 - DNA, 25 bp, Artificial Sequence
  Synthetic
ccagtgtgugccatatttaatugct

SEQ ID NO: 59643 - DNA, 25 bp, Artificial Sequence
  Synthetic
tgugggcagagcatttaucaaagaa

SEQ ID NO: 59644 - DNA, 25 bp, Artificial Sequence
  Synthetic
caacacagacgagccuttcttatut

SEQ ID NO: 59645 - DNA, 27 bp, Artificial Sequence
  Synthetic
ccttcacttcugactgtgtactttgua

SEQ ID NO: 59646 - DNA, 25 bp, Artificial Sequence
  Synthetic
tgggcttacuaatgaccacuacagt

SEQ ID NO: 59647 - DNA, 28 bp, Artificial Sequence
  Synthetic
gaagcacaggtutttatcagtcattgut

SEQ ID NO: 59648 - DNA, 25 bp, Artificial Sequence
  Synthetic
ggaagtgugaaagcattgauggaat

SEQ ID NO: 59649 - DNA, 32 bp, Artificial Sequence
  Synthetic
actgaataauacacaggtaagaaatuaggaaa

SEQ ID NO: 59650 - DNA, 28 bp, Artificial Sequence
  Synthetic
tccttcaucacagaaacagtcatttuca

SEQ ID NO: 59651 - DNA, 24 bp, Artificial Sequence
  Synthetic
ttttgaggcugaccacttctacuc

SEQ ID NO: 59652 - DNA, 22 bp, Artificial Sequence
  Synthetic
agcacccuagaaccaaauccag

SEQ ID NO: 59653 - DNA, 26 bp, Artificial Sequence
  Synthetic
aatcgaacgacuctcaaaactaucaa

SEQ ID NO: 59654 - DNA, 20 bp, Artificial Sequence
  Synthetic
gctctccccucatcctgtut

SEQ ID NO: 59655 - DNA, 17 bp, Artificial Sequence
  Synthetic
ggctgccagugcctcuc

SEQ ID NO: 59656 - DNA, 26 bp, Artificial Sequence
  Synthetic
cuctgttttctgttuaggaccaggag

SEQ ID NO: 59657 - DNA, 25 bp, Artificial Sequence
  Synthetic
cctctggaguacaggaagauaaggt

SEQ ID NO: 59658 - DNA, 25 bp, Artificial Sequence
  Synthetic
gaaaattgcucttctcugcagacaa

SEQ ID NO: 59659 - DNA, 28 bp, Artificial Sequence
  Synthetic
cttctcctcuaaaatgtacacaguagca

SEQ ID NO: 59660 - DNA, 22 bp, Artificial Sequence
  Synthetic
cctgagggugctttgatcucaa

SEQ ID NO: 59661 - DNA, 23 bp, Artificial Sequence
  Synthetic
gactctgagcugtgttctauggg

SEQ ID NO: 59662 - DNA, 24 bp, Artificial Sequence
  Synthetic
gacagagcaaaaucatgctgacug

SEQ ID NO: 59663 - DNA, 28 bp, Artificial Sequence
  Synthetic
tcagaaggacaaugtttatcagcactut

SEQ ID NO: 59664 - DNA, 26 bp, Artificial Sequence
  Synthetic
catgttaatgtuagctggtgcttugt

SEQ ID NO: 59665 - DNA, 31 bp, Artificial Sequence; identical to SEQ ID NO: 34327
  Synthetic

SEQ ID NO: 59666 - DNA, 25 bp, Artificial Sequence
  Synthetic
ctgacttgtttuatgcggtgtacut

SEQ ID NO: 59667 - DNA, 20 bp, Artificial Sequence
  Synthetic
ggguggcactcauagagcag

SEQ ID NO: 59668 - DNA, 22 bp, Artificial Sequence
  Synthetic
agagcaaucaacaggaauggct

SEQ ID NO: 59669 - DNA, 23 bp, Artificial Sequence
  Synthetic
ggaaaccaaggautgggattugg

SEQ ID NO: 59670 - DNA, 21 bp, Artificial Sequence
  Synthetic
cagcucaccaugcagaaggaa

SEQ ID NO: 59671 - DNA, 21 bp, Artificial Sequence
  Synthetic
agtggccutttgctgtuggat

SEQ ID NO: 59672 - DNA, 20 bp, Artificial Sequence
  Synthetic
cccgaacuccatgggttucc

SEQ ID NO: 59673 - DNA, 26 bp, Artificial Sequence
  Synthetic
aaagatgaaaagcuctgacaaccuca

SEQ ID NO: 59674 - DNA, 18 bp, Artificial Sequence
  Synthetic
gggaucagccccuggagt

SEQ ID NO: 59675 - DNA, 19 bp, Artificial Sequence
  Synthetic
ggcggacagcutcaaaguc

SEQ ID NO: 59676 - DNA, 18 bp, Artificial Sequence
  Synthetic
gcuaccguccaggacagg

SEQ ID NO: 59677 - DNA, 20 bp, Artificial Sequence
  Synthetic
ctuaggcaaaggcagcaugt

SEQ ID NO: 59678 - DNA, 22 bp, Artificial Sequence
  Synthetic
ccacacaguctccatgaaucca

SEQ ID NO: 59679 - DNA, 18 bp, Artificial Sequence
  Synthetic
ctguacggccuccacgag

SEQ ID NO: 59680 - DNA, 20 bp, Artificial Sequence
  Synthetic
acagagggcagggugtuact

SEQ ID NO: 59681 - DNA, 22 bp, Artificial Sequence
  Synthetic
gcgagttugactccttcgugat

SEQ ID NO: 59682 - DNA, 23 bp, Artificial Sequence
  Synthetic
gaccatucaccttagcuccagac

SEQ ID NO: 59683 - DNA, 26 bp, Artificial Sequence
  Synthetic
gggtaatgttcuctctgcttcatucc

SEQ ID NO: 59684 - DNA, 22 bp, Artificial Sequence
  Synthetic
acaaugacaacuccccaaacca

SEQ ID NO: 59685 - DNA, 23 bp, Artificial Sequence
  Synthetic
tgctgatgugatgtgctttcuct

SEQ ID NO: 59686 - DNA, 21 bp, Artificial Sequence
  Synthetic
cctgtcucctcagguccagat

SEQ ID NO: 59687 - DNA, 26 bp, Artificial Sequence
  Synthetic
ttctactgtgcutgggaaaagauacc

SEQ ID NO: 59688 - DNA, 28 bp, Artificial Sequence
  Synthetic
ggtacaccttgtucttctccagttacua

SEQ ID NO: 59689 - DNA, 21 bp, Artificial Sequence
  Synthetic
tttgatcuggcgacacaucgt

SEQ ID NO: 59690 - DNA, 28 bp, Artificial Sequence
  Synthetic
agagaagcucacaaaaatttgtcttugg

SEQ ID NO: 59691 - DNA, 23 bp, Artificial Sequence
  Synthetic
aggaaggagaagucgaccaucat

SEQ ID NO: 59692 - DNA, 24 bp, Artificial Sequence
  Synthetic
gcacacaauacacacacatgcaut

SEQ ID NO: 59693 - DNA, 28 bp, Artificial Sequence
  Synthetic
aggaacaaaagcutctgattctcctuag

SEQ ID NO: 59694 - DNA, 27 bp, Artificial Sequence
  Synthetic
attaccagaacaagcauacccattuct

SEQ ID NO: 59695 - DNA, 21 bp, Artificial Sequence
  Synthetic
gccutguccacaaacaccagt

SEQ ID NO: 59696 - DNA, 20 bp, Artificial Sequence
  Synthetic
atgctcgccuccgttaagut

SEQ ID NO: 59697 - DNA, 28 bp, Artificial Sequence
  Synthetic
cacaggtgcuatgaattcttagtucaga

SEQ ID NO: 59698 - DNA, 21 bp, Artificial Sequence
  Synthetic
gtgagugaatgcugaccccat

SEQ ID NO: 59699 - DNA, 26 bp, Artificial Sequence
  Synthetic
gtcagaggcuattggattcttcucaa

SEQ ID NO: 59700 - DNA, 27 bp, Artificial Sequence
  Synthetic
gttatattaacaguggtcacucaccca

SEQ ID NO: 59701 - DNA, 27 bp, Artificial Sequence
  Synthetic
ggtgatcccatutgaatatgctgttut

SEQ ID NO: 59702 - DNA, 27 bp, Artificial Sequence
  Synthetic
agactacatuggtctggttugagaaaa

SEQ ID NO: 59703 - DNA, 28 bp, Artificial Sequence
  Synthetic
aggaacatttgaugatagtgagagguct

SEQ ID NO: 59704 - DNA, 26 bp, Artificial Sequence
  Synthetic
acacgtgtctaauatcacatggaaug

SEQ ID NO: 59705 - DNA, 19 bp, Artificial Sequence
  Synthetic
acatcucccgactgccuct

SEQ ID NO: 59706 - DNA, 27 bp, Artificial Sequence
  Synthetic
ctcatagtcttuaggattgtgggucaa

SEQ ID NO: 59707 - DNA, 25 bp, Artificial Sequence
  Synthetic
ggtagtggttugaatctgacctuca

SEQ ID NO: 59708 - DNA, 26 bp, Artificial Sequence
  Synthetic
gccatttacugtacattcaccuccat

SEQ ID NO: 59709 - DNA, 28 bp, Artificial Sequence
  Synthetic
ggcaatagaaaaugaacctgtaggttut

SEQ ID NO: 59710 - DNA, 23 bp, Artificial Sequence
  Synthetic
actcuctatgcatgucccaccat

SEQ ID NO: 59711 - DNA, 26 bp, Artificial Sequence
  Synthetic
acacgaagtguttttgcatttctuca

SEQ ID NO: 59712 - DNA, 23 bp, Artificial Sequence
  Synthetic
gtggaagugacgaaggaaugact

SEQ ID NO: 59713 - DNA, 23 bp, Artificial Sequence
  Synthetic
gcattccccaugtgtcttcucat

SEQ ID NO: 59714 - DNA, 29 bp, Artificial Sequence
  Synthetic
gtgaagggacaauggataaacaagtctua

SEQ ID NO: 59715 - DNA, 25 bp, Artificial Sequence
  Synthetic
tgcactaaugggagctcaaactauc

SEQ ID NO: 59716 - DNA, 27 bp, Artificial Sequence
  Synthetic
caaagtatgcuttctgtagcuaggaaa

SEQ ID NO: 59717 - DNA, 21 bp, Artificial Sequence
  Synthetic
ctggaautcctggugcaaagg

SEQ ID NO: 59718 - DNA, 26 bp, Artificial Sequence
  Synthetic
cacacauaaacaatacugcacacaca

SEQ ID NO: 59719 - DNA, 29 bp, Artificial Sequence
  Synthetic
gcttcctttaacauacatgactgatcuca

SEQ ID NO: 59720 - DNA, 25 bp, Artificial Sequence
  Synthetic
gctgctttatcuacctggaacugag

SEQ ID NO: 59721 - DNA, 28 bp, Artificial Sequence
  Synthetic
caatgtaccctautgaaaatgcatgcut

SEQ ID NO: 59722 - DNA, 28 bp, Artificial Sequence
  Synthetic
gcattcaacuagtttttgaggcuagaac

SEQ ID NO: 59723 - DNA, 28 bp, Artificial Sequence
  Synthetic
tttcagggaaaugacattctaucaccat

SEQ ID NO: 59724 - DNA, 24 bp, Artificial Sequence
  Synthetic
gctgatctguatcatcgtgaugct

SEQ ID NO: 59725 - DNA, 27 bp, Artificial Sequence
  Synthetic
tcatgtttacaagauccaacagaugaa

SEQ ID NO: 59726 - DNA, 26 bp, Artificial Sequence
  Synthetic
cgtaatccautctattccagucagca

SEQ ID NO: 59727 - DNA, 28 bp, Artificial Sequence
  Synthetic
ctgctcaacgagauttctgatttcttut

SEQ ID NO: 59728 - DNA, 30 bp, Artificial Sequence
  Synthetic
tgtaatgatttttcaguctttccagtguca

SEQ ID NO: 59729 - DNA, 26 bp, Artificial Sequence
  Synthetic
cccaagctutcttcttaccugaacaa

SEQ ID NO: 59730 - DNA, 29 bp, Artificial Sequence
  Synthetic
aactggaaaccagauataactttgagugt

SEQ ID NO: 59731 - DNA, 28 bp, Artificial Sequence
  Synthetic
aggaucttaaccatttugaggacaacag

SEQ ID NO: 59732 - DNA, 25 bp, Artificial Sequence
  Synthetic
acgcacataatutggtcttgacugt

SEQ ID NO: 59733 - DNA, 28 bp, Artificial Sequence
  Synthetic
caagcaaagtggucatttcaacatacut

SEQ ID NO: 59734 - DNA, 22 bp, Artificial Sequence
  Synthetic
ggucaggcaggagatcaugaac

SEQ ID NO: 59735 - DNA, 28 bp, Artificial Sequence
  Synthetic
gaatttcttcatutgcatgagcauccat

SEQ ID NO: 59736 - DNA, 25 bp, Artificial Sequence
  Synthetic
ttttaggtaacaugtcacctugcca

SEQ ID NO: 59737 - DNA, 28 bp, Artificial Sequence
  Synthetic
cccctagcauagaaaacctcataaucaa

SEQ ID NO: 59738 - DNA, 20 bp, Artificial Sequence
  Synthetic
gctcgtcutcaacgtgtugt

SEQ ID NO: 59739 - DNA, 27 bp, Artificial Sequence
  Synthetic
aattatcttguccacatcttcaucgct

SEQ ID NO: 59740 - DNA, 26 bp, Artificial Sequence
  Synthetic
gtacttaaccaccauttcccacacut

SEQ ID NO: 59741 - DNA, 24 bp, Artificial Sequence
  Synthetic
gcctccaatcuctctaccagttug

SEQ ID NO: 59742 - DNA, 21 bp, Artificial Sequence
  Synthetic
gacccutgctctuggaaacca

SEQ ID NO: 59743 - DNA, 27 bp, Artificial Sequence
  Synthetic
aaatggtgagguctccaggatuaaaag

SEQ ID NO: 59744 - DNA, 28 bp, Artificial Sequence
  Synthetic
cttcctguaaacaagcacacuaaaaact

SEQ ID NO: 59745 - DNA, 28 bp, Artificial Sequence
  Synthetic
aggaaagtggaacagugaattaacauca

SEQ ID NO: 59746 - DNA, 22 bp, Artificial Sequence
  Synthetic
catgtcaguggattggctcuct

SEQ ID NO: 59747 - DNA, 24 bp, Artificial Sequence
  Synthetic
agtaatgggaauggagaggcuagg

SEQ ID NO: 59748 - DNA, 21 bp, Artificial Sequence
  Synthetic
ttctactuggctccctuccct

SEQ ID NO: 59749 - DNA, 21 bp, Artificial Sequence
  Synthetic
catgtccccaggugtgacuaa

SEQ ID NO: 59750 - DNA, 25 bp, Artificial Sequence
  Synthetic
agaaacattggaaaugggtgaggut

SEQ ID NO: 59751 - DNA, 28 bp, Artificial Sequence
  Synthetic
tcaccatgttuctgtttcaattgtucag

SEQ ID NO: 59752 - DNA, 28 bp, Artificial Sequence
  Synthetic
tgugaagtaaaugcagaagacaaagaga

SEQ ID NO: 59753 - DNA, 28 bp, Artificial Sequence
  Synthetic
acaacttggcugggtgattaaatcauaa

SEQ ID NO: 59754 - DNA, 28 bp, Artificial Sequence
  Synthetic
catggatgcttcuagacaactaatgtug

SEQ ID NO: 59755 - DNA, 27 bp, Artificial Sequence
  Synthetic
acccttaccugggctaattgtctatua

SEQ ID NO: 59756 - DNA, 28 bp, Artificial Sequence
  Synthetic
tctcagccttucatgaacgtaaaattug

SEQ ID NO: 59757 - DNA, 28 bp, Artificial Sequence
  Synthetic
tctagagctutcacttgttttugaaggt

SEQ ID NO: 59758 - DNA, 28 bp, Artificial Sequence
  Synthetic
gagtgaatgtucctcagaagaagtuact

SEQ ID NO: 59759 - DNA, 23 bp, Artificial Sequence
  Synthetic
cagacactguatcactgcctuca

SEQ ID NO: 59760 - DNA, 25 bp, Artificial Sequence
  Synthetic
gaagtacacaugctcctaggcttut

SEQ ID NO: 59761 - DNA, 23 bp, Artificial Sequence
  Synthetic
aaaacutgtugaagggcaagcag

SEQ ID NO: 59762 - DNA, 33 bp, Artificial Sequence
  Synthetic
aaaagaaaattttaguatgtgtgttccatucat

SEQ ID NO: 59763 - DNA, 26 bp, Artificial Sequence
  Synthetic
ggcattccauagctgcttgatatuca

SEQ ID NO: 59764 - DNA, 23 bp, Artificial Sequence
  Synthetic
agcagtctcaaaugctggagaug

SEQ ID NO: 59765 - DNA, 22 bp, Artificial Sequence
  Synthetic
ttgtgcaagcucactctucagt

SEQ ID NO: 59766 - DNA, 30 bp, Artificial Sequence
  Synthetic
ttttatgctaaagutactttctguccaggt

SEQ ID NO: 59767 - DNA, 28 bp, Artificial Sequence
  Synthetic
tgtttgccaacaauccattatctttugt

SEQ ID NO: 59768 - DNA, 20 bp, Artificial Sequence
  Synthetic
ccacucgagagcagcatucc

SEQ ID NO: 59769 - DNA, 24 bp, Artificial Sequence
  Synthetic
gactctctaccuctggcagaugat

SEQ ID NO: 59770 - DNA, 21 bp, Artificial Sequence
  Synthetic
cccaccaaucttgucccaacc

SEQ ID NO: 59771 - DNA, 28 bp, Artificial Sequence
  Synthetic
tccagctaagaugatggcatatttugaa

SEQ ID NO: 59772 - DNA, 31 bp, Artificial Sequence
  Synthetic
ctaaagcaactagaaaucttacaaaacgugt

SEQ ID NO: 59773 - DNA, 28 bp, Artificial Sequence
  Synthetic
ccagatgaccugaggaagagactaaaua

SEQ ID NO: 59774 - DNA, 27 bp, Artificial Sequence
  Synthetic
aagtactgaaagcutgtaatgcctcut

SEQ ID NO: 59775 - DNA, 27 bp, Artificial Sequence
  Synthetic
ggagacccaucatttcactaaggtuat

SEQ ID NO: 59776 - DNA, 25 bp, Artificial Sequence
  Synthetic
caaattggttgugactgagatugga

SEQ ID NO: 59777 - DNA, 24 bp, Artificial Sequence
  Synthetic
ccagaacuctcaatcugccaacat

SEQ ID NO: 59778 - DNA, 26 bp, Artificial Sequence
  Synthetic
caatcatcacauggaaaaccatuccc

SEQ ID NO: 59779 - DNA, 27 bp, Artificial Sequence
  Synthetic
ggcaggaagcauataagaaccaaauct

SEQ ID NO: 59780 - DNA, 24 bp, Artificial Sequence
  Synthetic
aagcttccccucaacaattgcuat

SEQ ID NO: 59781 - DNA, 28 bp, Artificial Sequence
  Synthetic
gtcagaagaaaauttaggcaaccaucaa

SEQ ID NO: 59782 - DNA, 23 bp, Artificial Sequence
  Synthetic
agaugacacuccagagacaggat

SEQ ID NO: 59783 - DNA, 20 bp, Artificial Sequence
  Synthetic
tcactgtcuccttgggcuca

SEQ ID NO: 59784 - DNA, 23 bp, Artificial Sequence
  Synthetic
agaaucgcccatcagugaaaagt

SEQ ID NO: 59785 - DNA, 21 bp, Artificial Sequence
  Synthetic
catcgactgugcccatgtgua

SEQ ID NO: 59786 - DNA, 27 bp, Artificial Sequence
  Synthetic
ggtatagcacccaaaguaaagtaguga

SEQ ID NO: 59787 - DNA, 23 bp, Artificial Sequence
  Synthetic
agaaagatcccgucttccccuaa

SEQ ID NO: 59788 - DNA, 19 bp, Artificial Sequence
  Synthetic
cagccccagugactgcaua

SEQ ID NO: 59789 - DNA, 23 bp, Artificial Sequence
  Synthetic
gaagtucaagaccacacaugcac

SEQ ID NO: 59790 - DNA, 20 bp, Artificial Sequence
  Synthetic
cgatggcguaccagaugcag

SEQ ID NO: 59791 - DNA, 20 bp, Artificial Sequence
  Synthetic
ccutgccccaucaacggaat

SEQ ID NO: 59792 - DNA, 23 bp, Artificial Sequence
  Synthetic
gaaaaucaccaucagcacaccat

SEQ ID NO: 59793 - DNA, 29 bp, Artificial Sequence
  Synthetic
tccaggaatgcuaacaattacagattuca

SEQ ID NO: 59794 - DNA, 21 bp, Artificial Sequence
  Synthetic
tgcaggaaggutgtggagtug

SEQ ID NO: 59795 - DNA, 26 bp, Artificial Sequence
  Synthetic
tggcattutgctcctauaaacacgat

SEQ ID NO: 59796 - DNA, 22 bp, Artificial Sequence
  Synthetic
gttgaccttccuctccccatuc

SEQ ID NO: 59797 - DNA, 20 bp, Artificial Sequence
  Synthetic
gagaacggcaucgugagaca

SEQ ID NO: 59798 - DNA, 29 bp, Artificial Sequence
  Synthetic
agttcagtggaaagugattcattcaguat

SEQ ID NO: 59799 - DNA, 26 bp, Artificial Sequence
  Synthetic
catctgttcttugttcactctctuct

SEQ ID NO: 59800 - DNA, 21 bp, Artificial Sequence
  Synthetic
ccaaacggguctgaagcaugt

SEQ ID NO: 59801 - DNA, 28 bp, Artificial Sequence
  Synthetic
cacctgtaactugttgtgtcattttuct

SEQ ID NO: 59802 - DNA, 28 bp, Artificial Sequence
  Synthetic
gtcttgggtagaaucatcttgtctcaut

SEQ ID NO: 59803 - DNA, 31 bp, Artificial Sequence
  Synthetic
ggaagagaaagaaagacutttagaatgucca

SEQ ID NO: 59804 - DNA, 23 bp, Artificial Sequence
  Synthetic
acagaatcucagagcctcaucct

SEQ ID NO: 59805 - DNA, 28 bp, Artificial Sequence
  Synthetic
acttgtgagaggccuataaactggtaua

SEQ ID NO: 59806 - DNA, 21 bp, Artificial Sequence
  Synthetic
cacctcccuggcaattgcuat

SEQ ID NO: 59807 - DNA, 24 bp, Artificial Sequence
  Synthetic
tttcatcugagaagcaaggagugg

SEQ ID NO: 59808 - DNA, 22 bp, Artificial Sequence
  Synthetic
cggagaaguaggtggtgucact

SEQ ID NO: 59809 - DNA, 18 bp, Artificial Sequence
  Synthetic
gtgaccugctgcagctuc

SEQ ID NO: 59810 - DNA, 22 bp, Artificial Sequence
  Synthetic
ctgtuggcaaacagtccugaag

SEQ ID NO: 59811 - DNA, 25 bp, Artificial Sequence
  Synthetic
acccagattauctcactgaggtuga

SEQ ID NO: 59812 - DNA, 28 bp, Artificial Sequence
  Synthetic
tcttttacttttugtcctccagtugact

SEQ ID NO: 59813 - DNA, 24 bp, Artificial Sequence
  Synthetic
gaaatcaaacauctggcgcctaut

SEQ ID NO: 59814 - DNA, 27 bp, Artificial Sequence
  Synthetic
tugaagaagatauagagaccccaccaa

SEQ ID NO: 59815 - DNA, 28 bp, Artificial Sequence
  Synthetic
ggtacataactuggcatatcaacagugt

SEQ ID NO: 59816 - DNA, 19 bp, Artificial Sequence
  Synthetic
gggcgggcugttgaauaac

SEQ ID NO: 59817 - DNA, 25 bp, Artificial Sequence
  Synthetic
gcatctgtgcutttctcagagtcut

SEQ ID NO: 59818 - DNA, 28 bp, Artificial Sequence
  Synthetic
aaaatgcttggugttgatgtgaaaauct

SEQ ID NO: 59819 - DNA, 26 bp, Artificial Sequence
  Synthetic
tgtagtuaaaacagagccaaugagca

SEQ ID NO: 59820 - DNA, 22 bp, Artificial Sequence
  Synthetic
aacgcgttuaccattgcaaaug

SEQ ID NO: 59821 - DNA, 24 bp, Artificial Sequence
  Synthetic
acaaagacaagcugagggactaug

SEQ ID NO: 59822 - DNA, 27 bp, Artificial Sequence
  Synthetic
tttctcacauaggataccaactcucca

SEQ ID NO: 59823 - DNA, 21 bp, Artificial Sequence
  Synthetic
tgccctcugttggguaaaacc

SEQ ID NO: 59824 - DNA, 20 bp, Artificial Sequence
  Synthetic
cgaaaucagcagcagcacuc

SEQ ID NO: 59825 - DNA, 24 bp, Artificial Sequence
  Synthetic
ggccctatcauctctgtgtttcuc

SEQ ID NO: 59826 - DNA, 21 bp, Artificial Sequence
  Synthetic
tcgtttcccuccaggctttuc

SEQ ID NO: 59827 - DNA, 22 bp, Artificial Sequence
  Synthetic
aggactctguccagagctcaut

SEQ ID NO: 59828 - DNA, 28 bp, Artificial Sequence
  Synthetic
gaacactgttuaccttgtgattcuagga

SEQ ID NO: 59829 - DNA, 31 bp, Artificial Sequence
  Synthetic
ctctttgtcatttugattaagccatagtugt

SEQ ID NO: 59830 - DNA, 23 bp, Artificial Sequence
  Synthetic
cggttttcuaccaccttcucaca

SEQ ID NO: 59831 - DNA, 21 bp, Artificial Sequence
  Synthetic
gcacagugaagagcugcaaag

SEQ ID NO: 59832 - DNA, 23 bp, Artificial Sequence
  Synthetic
aggaaucccacactcugacagat

SEQ ID NO: 59833 - DNA, 23 bp, Artificial Sequence
  Synthetic
ctgcugaacatgtacucagggaa

SEQ ID NO: 59834 - DNA, 21 bp, Artificial Sequence
  Synthetic
gcagcacagutgccatcatug

SEQ ID NO: 59835 - DNA, 26 bp, Artificial Sequence
  Synthetic
cattatttcctugtgtttgtggugga

SEQ ID NO: 59836 - DNA, 25 bp, Artificial Sequence
  Synthetic
ggttacaggcacucgaatguagaag

SEQ ID NO: 59837 - DNA, 20 bp, Artificial Sequence
  Synthetic
aatctggtugaggccacgut

SEQ ID NO: 59838 - DNA, 28 bp, Artificial Sequence
  Synthetic
aggcagatatacacuagctcattttgug

SEQ ID NO: 59839 - DNA, 21 bp, Artificial Sequence
  Synthetic
cccagtccagucataacgcut

SEQ ID NO: 59840 - DNA, 27 bp, Artificial Sequence
  Synthetic
agagcaacaaacagugcatagaaatug

SEQ ID NO: 59841 - DNA, 28 bp, Artificial Sequence
  Synthetic
cccatctgucacacaagtaaaattguct

SEQ ID NO: 59842 - DNA, 26 bp, Artificial Sequence
  Synthetic
gaaatgtcugaaaggaggttcaucca

SEQ ID NO: 59843 - DNA, 26 bp, Artificial Sequence
  Synthetic
cccagaatacuaagcccattgcauag

SEQ ID NO: 59844 - DNA, 26 bp, Artificial Sequence
  Synthetic
aggacaaaacaucttcgttcagauca

SEQ ID NO: 59845 - DNA, 28 bp, Artificial Sequence
  Synthetic
ccatggagcucagtttttgtgaatauct

SEQ ID NO: 59846 - DNA, 21 bp, Artificial Sequence
  Synthetic
gcatgctggcugattctgtuc

SEQ ID NO: 59847 - DNA, 28 bp, Artificial Sequence
  Synthetic
accatcccctuagtattaggtgaaauct

SEQ ID NO: 59848 - DNA, 27 bp, Artificial Sequence
  Synthetic
ttccctctatagcuatggaaagtccuc

SEQ ID NO: 59849 - DNA, 28 bp, Artificial Sequence
  Synthetic
ttcgatattguaacactctgagttugct

SEQ ID NO: 59850 - DNA, 21 bp, Artificial Sequence
  Synthetic
ccaggatuacgtggttuccct

SEQ ID NO: 59851 - DNA, 22 bp, Artificial Sequence
  Synthetic
gaggaugggacaaaggcttuga

SEQ ID NO: 59852 - DNA, 23 bp, Artificial Sequence
  Synthetic
acagaaaagguccaaacggtugt

SEQ ID NO: 59853 - DNA, 21 bp, Artificial Sequence
  Synthetic
acgtuggaagagaacgugcat

SEQ ID NO: 59854 - DNA, 22 bp, Artificial Sequence
  Synthetic
tctgauggaagcacgtcatcug

SEQ ID NO: 59855 - DNA, 26 bp, Artificial Sequence
  Synthetic
ttaaggaaaagagugaaacccaccut

SEQ ID NO: 59856 - DNA, 23 bp, Artificial Sequence
  Synthetic
ttccuccaaagacaaggcaauga

SEQ ID NO: 59857 - DNA, 23 bp, Artificial Sequence
  Synthetic
ggaatatggugaggtggttggug

SEQ ID NO: 59858 - DNA, 25 bp, Artificial Sequence
  Synthetic
gcatacctucactctgaguacagaa

SEQ ID NO: 59859 - DNA, 27 bp, Artificial Sequence
  Synthetic
tcccccatgaauaaccaccaauaaaaa

SEQ ID NO: 59860 - DNA, 21 bp, Artificial Sequence
  Synthetic
agggaaggtuggcgtgttauc

SEQ ID NO: 59861 - DNA, 28 bp, Artificial Sequence
  Synthetic
tgcacccttucaaattgtaagatuacct

SEQ ID NO: 59862 - DNA, 29 bp, Artificial Sequence
  Synthetic
aaccacagcaautaacaaaagaacaauca

SEQ ID NO: 59863 - DNA, 28 bp, Artificial Sequence
  Synthetic
cttcatatgtgcggutgtgatcattuac

SEQ ID NO: 59864 - DNA, 28 bp, Artificial Sequence
  Synthetic
actgggcattguaaaatatggacttuga

SEQ ID NO: 59865 - DNA, 26 bp, Artificial Sequence
  Synthetic
agtgaaacuccaaaaagauagcacga

SEQ ID NO: 59866 - DNA, 23 bp, Artificial Sequence
  Synthetic
gaagcttcucaccctcttctcut

SEQ ID NO: 59867 - DNA, 19 bp, Artificial Sequence
  Synthetic
gaggcugcccatgggauag

SEQ ID NO: 59868 - DNA, 22 bp, Artificial Sequence
  Synthetic
gttggtggagcuggcagaatua

SEQ ID NO: 59869 - DNA, 21 bp, Artificial Sequence
  Synthetic
ggtcatcuccaccaggtugat

SEQ ID NO: 59870 - DNA, 19 bp, Artificial Sequence
  Synthetic
gtctgtguccgaggacgug

SEQ ID NO: 59871 - DNA, 22 bp, Artificial Sequence
  Synthetic
aacagtagagcccugacctcut

SEQ ID NO: 59872 - DNA, 20 bp, Artificial Sequence
  Synthetic
agccugagggtcaggucaat

SEQ ID NO: 59873 - DNA, 24 bp, Artificial Sequence
  Synthetic
ccatguagtaggtgaucccaaagg

SEQ ID NO: 59874 - DNA, 26 bp, Artificial Sequence
  Synthetic
gtucgaggaaccttguaaaacacaaa

SEQ ID NO: 59875 - DNA, 22 bp, Artificial Sequence
  Synthetic
aagattccguagctgctcctug

SEQ ID NO: 59876 - DNA, 21 bp, Artificial Sequence
  Synthetic
acaccccaagucagugaaagg

SEQ ID NO: 59877 - DNA, 22 bp, Artificial Sequence
  Synthetic
ttctccgguaggtcatccucat

SEQ ID NO: 59878 - DNA, 24 bp, Artificial Sequence
  Synthetic
gagtatgacaacautgccaagcug

SEQ ID NO: 59879 - DNA, 20 bp, Artificial Sequence
  Synthetic
aggtctcuaccaccctgugt

SEQ ID NO: 59880 - DNA, 20 bp, Artificial Sequence
  Synthetic
tgguggacgaagccatugat

SEQ ID NO: 59881 - DNA, 21 bp, Artificial Sequence
  Synthetic
tttcacagccucacggaacut

SEQ ID NO: 59882 - DNA, 25 bp, Artificial Sequence
  Synthetic
agaggaaacaaaugguaaggaaggg

SEQ ID NO: 59883 - DNA, 25 bp, Artificial Sequence
  Synthetic
tggctagttttucccgaatttcugt

SEQ ID NO: 59884 - DNA, 19 bp, Artificial Sequence
  Synthetic
cagaaggcguggucaggat

SEQ ID NO: 59885 - DNA, 20 bp, Artificial Sequence
  Synthetic
gggtaacgutctgctcgugt

SEQ ID NO: 59886 - DNA, 21 bp, Artificial Sequence
  Synthetic
acccaggagugacctugagag

SEQ ID NO: 59887 - DNA, 23 bp, Artificial Sequence
  Synthetic
ctcaaagctucccactgtcttut

SEQ ID NO: 59888 - DNA, 19 bp, Artificial Sequence
  Synthetic
catucaccgaagggcuggt

SEQ ID NO: 59889 - DNA, 27 bp, Artificial Sequence
  Synthetic
cgtgaaggcauctttaatgaucagact

SEQ ID NO: 59890 - DNA, 20 bp, Artificial Sequence
  Synthetic
agugaacuggccggaaaagt

SEQ ID NO: 59891 - DNA, 18 bp, Artificial Sequence
  Synthetic
cggctuacgggtcgtugg

SEQ ID NO: 59892 - DNA, 23 bp, Artificial Sequence
  Synthetic
caggacucacctcttttucagca

SEQ ID NO: 59893 - DNA, 22 bp, Artificial Sequence
  Synthetic
tcctgctccuaatcccttucca

SEQ ID NO: 59894 - DNA, 19 bp, Artificial Sequence
  Synthetic
aaggcctuggctatgguga

SEQ ID NO: 59895 - DNA, 18 bp, Artificial Sequence
  Synthetic
aguggacagggcccttug

SEQ ID NO: 59896 - DNA, 22 bp, Artificial Sequence
  Synthetic
ggtttgccaaccugtcaaugaa

SEQ ID NO: 59897 - DNA, 26 bp, Artificial Sequence
  Synthetic
gattgctgtuggaaaagattcugcaa

SEQ ID NO: 59898 - DNA, 18 bp, Artificial Sequence
  Synthetic
gcctcuggacactgcuca

SEQ ID NO: 59899 - DNA, 20 bp, Artificial Sequence
  Synthetic
gggtucaaaggcctgttugg

SEQ ID NO: 59900 - DNA, 21 bp, Artificial Sequence
  Synthetic
caggtctgcugtcctagucct

SEQ ID NO: 59901 - DNA, 21 bp, Artificial Sequence
  Synthetic
ccctgcgugcttgttgaagua

SEQ ID NO: 59902 - DNA, 21 bp, Artificial Sequence
  Synthetic
gcttatcugctgccgucaact

SEQ ID NO: 59903 - DNA, 25 bp, Artificial Sequence
  Synthetic
ggaatctgaaugccgatctagaugt

SEQ ID NO: 59904 - DNA, 28 bp, Artificial Sequence
  Synthetic
ttctttcagcauaccacttcataacugt

SEQ ID NO: 59905 - DNA, 25 bp, Artificial Sequence
  Synthetic
aattcgaaagtugacagccaaaguc

SEQ ID NO: 59906 - DNA, 24 bp, Artificial Sequence
  Synthetic
aattcagaaacucttgtccggugt

SEQ ID NO: 59907 - DNA, 27 bp, Artificial Sequence
  Synthetic
cctaccttggcuttctggaataatuct

SEQ ID NO: 59908 - DNA, 26 bp, Artificial Sequence
  Synthetic
tttaccacagcaaugtgtgttcttug

SEQ ID NO: 59909 - DNA, 28 bp, Artificial Sequence
  Synthetic
cattcguatccacagauagcaaaagaaa

SEQ ID NO: 59910 - DNA, 22 bp, Artificial Sequence
  Synthetic
accacagtucttttcccguagg

SEQ ID NO: 59911 - DNA, 24 bp, Artificial Sequence
  Synthetic
ccatctgcagcautccaaatacut

SEQ ID NO: 59912 - DNA, 30 bp, Artificial Sequence; identical to SEQ ID NO: 6362
  Synthetic

SEQ ID NO: 59913 - DNA, 27 bp, Artificial Sequence
  Synthetic
ccctgaacatgugtagaaagcagatut

SEQ ID NO: 59914 - DNA, 20 bp, Artificial Sequence
  Synthetic
atgtcuggcagauacgcaca

SEQ ID NO: 59915 - DNA, 24 bp, Artificial Sequence
  Synthetic
gaatctctcugtgtagcctuggaa

SEQ ID NO: 59916 - DNA, 25 bp, Artificial Sequence
  Synthetic
tgtttcactugtactttctguggca

SEQ ID NO: 59917 - DNA, 24 bp, Artificial Sequence
  Synthetic
aaaaagcagagacutgaggauggt

SEQ ID NO: 59918 - DNA, 24 bp, Artificial Sequence
  Synthetic
tgttgcaaacuactgctcttcugt

SEQ ID NO: 59919 - DNA, 22 bp, Artificial Sequence
  Synthetic
tccacccaugcuccagaaaaag

SEQ ID NO: 59920 - DNA, 19 bp, Artificial Sequence
  Synthetic
gcgccgcagucaagtcuaa

SEQ ID NO: 59921 - DNA, 22 bp, Artificial Sequence
  Synthetic
cugagtuaccaggaggaaacca

SEQ ID NO: 59922 - DNA, 22 bp, Artificial Sequence
  Synthetic
ccactcacacuggtgttcctut

SEQ ID NO: 59923 - DNA, 19 bp, Artificial Sequence
  Synthetic
tctcuggcaccccttgcua

SEQ ID NO: 59924 - DNA, 21 bp, Artificial Sequence
  Synthetic
tgggctauggagatgcucact

SEQ ID NO: 59925 - DNA, 21 bp, Artificial Sequence
  Synthetic
ctgtcccucctttctggucaa

SEQ ID NO: 59926 - DNA, 22 bp, Artificial Sequence
  Synthetic
cctgggtgauggcctaggauag

SEQ ID NO: 59927 - DNA, 22 bp, Artificial Sequence
  Synthetic
ctcacccacaccuttcagtgua

SEQ ID NO: 59928 - DNA, 24 bp, Artificial Sequence
  Synthetic
ccacttuacagaggtcaagcugat

SEQ ID NO: 59929 - DNA, 28 bp, Artificial Sequence
  Synthetic
gctcaggaaaauggagtatttgcttcut

SEQ ID NO: 59930 - DNA, 24 bp, Artificial Sequence
  Synthetic
actcttctgaautgggctcugaac

SEQ ID NO: 59931 - DNA, 25 bp, Artificial Sequence
  Synthetic
cacatttctgggaauatccgcttuc

SEQ ID NO: 59932 - DNA, 20 bp, Artificial Sequence
  Synthetic
ccugaacaggcauagcccat

SEQ ID NO: 59933 - DNA, 27 bp, Artificial Sequence
  Synthetic
aaatccttaggcuctctacgtcuaact

SEQ ID NO: 59934 - DNA, 28 bp, Artificial Sequence
  Synthetic
tgttggatcatautcgtccacaaaauga

SEQ ID NO: 59935 - DNA, 27 bp, Artificial Sequence
  Synthetic
aggtactgguggagtatttgatagugt

SEQ ID NO: 59936 - DNA, 19 bp, Artificial Sequence
  Synthetic
gcugacgggcagaacugaa

SEQ ID NO: 59937 - DNA, 23 bp, Artificial Sequence
  Synthetic
gtagccaaagaaacuctcccuga

SEQ ID NO: 59938 - DNA, 26 bp, Artificial Sequence
  Synthetic
cacatgagctucactacagggaatua

SEQ ID NO: 59939 - DNA, 27 bp, Artificial Sequence
  Synthetic
gatctaaggtctucagtccaatcacug

SEQ ID NO: 59940 - DNA, 26 bp, Artificial Sequence
  Synthetic
caaagcatuaacgtggcauagaaaga

SEQ ID NO: 59941 - DNA, 29 bp, Artificial Sequence
  Synthetic
ccatcttcatcuccaatcttctcatguaa

SEQ ID NO: 59942 - DNA, 21 bp, Artificial Sequence
  Synthetic
cautttaugacgcagcgagca

SEQ ID NO: 59943 - DNA, 27 bp, Artificial Sequence
  Synthetic
actgaagcaatugtttgcccaaaauaa

SEQ ID NO: 59944 - DNA, 30 bp, Artificial Sequence
  Synthetic
attcaattcagaauggttagggaagaauat

SEQ ID NO: 59945 - DNA, 26 bp, Artificial Sequence
  Synthetic
accaccactgutatgatgttggaauc

SEQ ID NO: 59946 - DNA, 24 bp, Artificial Sequence
  Synthetic
agacaggaacagaagguccttcua

SEQ ID NO: 59947 - DNA, 26 bp, Artificial Sequence
  Synthetic
cagctctaagugcattcttgttucac

SEQ ID NO: 59948 - DNA, 24 bp, Artificial Sequence
  Synthetic
agagacaccaagaagugaucaacc

SEQ ID NO: 59949 - DNA, 26 bp, Artificial Sequence
  Synthetic
gccttcactcucacacatctttctut

SEQ ID NO: 59950 - DNA, 21 bp, Artificial Sequence
  Synthetic
ggaccacaaggacuccactuc

SEQ ID NO: 59951 - DNA, 26 bp, Artificial Sequence
  Synthetic
tgaaggctcacuctgtttctctttut

SEQ ID NO: 59952 - DNA, 22 bp, Artificial Sequence
  Synthetic
tctttccuccccctttccagua

SEQ ID NO: 59953 - DNA, 24 bp, Artificial Sequence
  Synthetic
cctctcatggucacttccttctug

SEQ ID NO: 59954 - DNA, 33 bp, Artificial Sequence; identical to SEQ ID NO: 26878
  Synthetic

SEQ ID NO: 59955 - DNA, 27 bp, Artificial Sequence
  Synthetic
agggcttaucgagacaaattgaagtut

SEQ ID NO: 59956 - DNA, 27 bp, Artificial Sequence
  Synthetic
acatatctgagggaauctgcaaatgua

SEQ ID NO: 59957 - DNA, 27 bp, Artificial Sequence
  Synthetic
cttgtgcacuaaacataatgctgagut

SEQ ID NO: 59958 - DNA, 26 bp, Artificial Sequence
  Synthetic
gggatcatagaacugtacctggttuc

SEQ ID NO: 59959 - DNA, 21 bp, Artificial Sequence
  Synthetic
cgagctcuctgtgctttcugt

SEQ ID NO: 59960 - DNA, 24 bp, Artificial Sequence
  Synthetic
cccccgaagaaacauagacacaua

SEQ ID NO: 59961 - DNA, 23 bp, Artificial Sequence
  Synthetic
gtccctgagugtgtgtttccuac

SEQ ID NO: 59962 - DNA, 28 bp, Artificial Sequence
  Synthetic
gttacttacuacgtcatttuccaaagcc

SEQ ID NO: 59963 - DNA, 27 bp, Artificial Sequence
  Synthetic
tgtgagtgtaacugattgccagatuat

SEQ ID NO: 59964 - DNA, 24 bp, Artificial Sequence
  Synthetic
gtgacatucagcaggatgcaaaut

SEQ ID NO: 59965 - DNA, 21 bp, Artificial Sequence
  Synthetic
guggaccuacacaagcagcat

SEQ ID NO: 59966 - DNA, 22 bp, Artificial Sequence
  Synthetic
caaacaccccaautctgugcat

SEQ ID NO: 59967 - DNA, 22 bp, Artificial Sequence
  Synthetic
gcaagacagugctttccctcug

SEQ ID NO: 59968 - DNA, 21 bp, Artificial Sequence
  Synthetic
gcagaagccaugctugcaaat

SEQ ID NO: 59969 - DNA, 25 bp, Artificial Sequence
  Synthetic
atgaatgctgugttgctgtctttut

SEQ ID NO: 59970 - DNA, 21 bp, Artificial Sequence
  Synthetic
cttgguggcgaagtctcctut

SEQ ID NO: 59971 - DNA, 28 bp, Artificial Sequence
  Synthetic
tctctctgcaatutttcatgtctgcaua

SEQ ID NO: 59972 - DNA, 22 bp, Artificial Sequence
  Synthetic
gccaugtccaaatuaagagcga

SEQ ID NO: 59973 - DNA, 27 bp, Artificial Sequence
  Synthetic
tcgcatctgaacucatttctttcucat

SEQ ID NO: 59974 - DNA, 29 bp, Artificial Sequence
  Synthetic
aaggaaatggaaugaaaagagagaaguca

SEQ ID NO: 59975 - DNA, 23 bp, Artificial Sequence
  Synthetic
acacagtgcguatgaatgaugct

SEQ ID NO: 59976 - DNA, 22 bp, Artificial Sequence
  Synthetic
cccacgcauggaatcatcgaut

SEQ ID NO: 59977 - DNA, 28 bp, Artificial Sequence
  Synthetic
ggtgatcaatgacaauggcatttctaut

SEQ ID NO: 59978 - DNA, 17 bp, Artificial Sequence
  Synthetic
cggcgcagcucuccaat

SEQ ID NO: 59979 - DNA, 19 bp, Artificial Sequence
  Synthetic
tcctcaggcuccagtucct

SEQ ID NO: 59980 - DNA, 20 bp, Artificial Sequence
  Synthetic
gggcaugctaatguggaagt

SEQ ID NO: 59981 - DNA, 22 bp, Artificial Sequence
  Synthetic
atctccagcucattcacccauc

SEQ ID NO: 59982 - DNA, 21 bp, Artificial Sequence
  Synthetic
ggctctgcacucagtaggtut

SEQ ID NO: 59983 - DNA, 18 bp, Artificial Sequence
  Synthetic
gugccaacgacgaccuga

SEQ ID NO: 59984 - DNA, 20 bp, Artificial Sequence
  Synthetic
cccccaugtacctucagcaa

SEQ ID NO: 59985 - DNA, 17 bp, Artificial Sequence
  Synthetic
cagcggguggtggacuc

SEQ ID NO: 59986 - DNA, 20 bp, Artificial Sequence
  Synthetic
gtgccugcctatggagucat

SEQ ID NO: 59987 - DNA, 22 bp, Artificial Sequence
  Synthetic
cctcucaacgagactgttgugg

SEQ ID NO: 59988 - DNA, 23 bp, Artificial Sequence
  Synthetic
catatatcauccaggccgcguag

SEQ ID NO: 59989 - DNA, 22 bp, Artificial Sequence
  Synthetic
tggtcactcaucctcctgctua

SEQ ID NO: 59990 - DNA, 23 bp, Artificial Sequence
  Synthetic
gggtctgcutgtactgttauggg

SEQ ID NO: 59991 - DNA, 23 bp, Artificial Sequence
  Synthetic
ctccttctcuctaccagcuggaa

SEQ ID NO: 59992 - DNA, 17 bp, Artificial Sequence
  Synthetic
gcutcucacgcggcgat

SEQ ID NO: 59993 - DNA, 19 bp, Artificial Sequence
  Synthetic
gtggcugaaggcgcatuac

SEQ ID NO: 59994 - DNA, 20 bp, Artificial Sequence
  Synthetic
ccacttgcucctgcguaaag

SEQ ID NO: 59995 - DNA, 21 bp, Artificial Sequence
  Synthetic
gcaaagccuaaggaggaggut

SEQ ID NO: 59996 - DNA, 24 bp, Artificial Sequence
  Synthetic
tgtgaatgtgugtctttcccauct

SEQ ID NO: 59997 - DNA, 27 bp, Artificial Sequence
  Synthetic
agaagaaacauccatgggattcuaacc

SEQ ID NO: 59998 - DNA, 21 bp, Artificial Sequence
  Synthetic
ttgagctgugtgggaauccaa

SEQ ID NO: 59999 - DNA, 23 bp, Artificial Sequence
  Synthetic
aagagctaugaactgcctgaugg

SEQ ID NO: 60000 - DNA, 22 bp, Artificial Sequence
  Synthetic
cagtggugacaaaggaguagcc

SEQ ID NO: 60001 - DNA, 27 bp, Artificial Sequence
  Synthetic
gtcctcaggaauttaccttgttctugt

SEQ ID NO: 60002 - DNA, 21 bp, Artificial Sequence
  Synthetic
ctgcagagcaugagagctcut

SEQ ID NO: 60003 - DNA, 27 bp, Artificial Sequence
  Synthetic
atcttcaatactcucatggctcagtuc

SEQ ID NO: 60004 - DNA, 23 bp, Artificial Sequence
  Synthetic
gctcctcaucctcattcacauct

SEQ ID NO: 60005 - DNA, 21 bp, Artificial Sequence
  Synthetic
aggccctcucctatcacaguc

SEQ ID NO: 60006 - DNA, 22 bp, Artificial Sequence
  Synthetic
gggttctcuagaggctggtuct

SEQ ID NO: 60007 - DNA, 26 bp, Artificial Sequence
  Synthetic
ggactttucgcacagaagatcuaaac

SEQ ID NO: 60008 - DNA, 23 bp, Artificial Sequence
  Synthetic
ccccttgctuttcttgtcttcug

SEQ ID NO: 60009 - DNA, 21 bp, Artificial Sequence
  Synthetic
ctccctuccgaacatctgugt

SEQ ID NO: 60010 - DNA, 28 bp, Artificial Sequence
  Synthetic
gtattaatgcaauttcctcccugacaga

SEQ ID NO: 60011 - DNA, 33 bp, Artificial Sequence
  Synthetic
tcacattttattcugcaatgaatttcataugag

SEQ ID NO: 60012 - DNA, 20 bp, Artificial Sequence
  Synthetic
ccugaggacugggaaaggga

SEQ ID NO: 60013 - DNA, 22 bp, Artificial Sequence
  Synthetic
ccgtacgcucctctugaagaag

SEQ ID NO: 60014 - DNA, 21 bp, Artificial Sequence
  Synthetic
ctggcuccactaccatucacc

SEQ ID NO: 60015 - DNA, 26 bp, Artificial Sequence
  Synthetic
ggcttatctugccatttcttcatguc

SEQ ID NO: 60016 - DNA, 25 bp, Artificial Sequence
  Synthetic
gaaagaaggguactaguccagaggt

SEQ ID NO: 60017 - DNA, 24 bp, Artificial Sequence
  Synthetic
accagactgtugttgcttgtttuc

SEQ ID NO: 60018 - DNA, 27 bp, Artificial Sequence
  Synthetic
ggatgatctcatuctcctggtagtuga

SEQ ID NO: 60019 - DNA, 21 bp, Artificial Sequence
  Synthetic
aggtctgcaccugatctccut

SEQ ID NO: 60020 - DNA, 20 bp, Artificial Sequence
  Synthetic
ccccttcccugggtggaaua

SEQ ID NO: 60021 - DNA, 21 bp, Artificial Sequence
  Synthetic
gctgctgcugctactgttcuc

SEQ ID NO: 60022 - DNA, 21 bp, Artificial Sequence
  Synthetic
catgtgcaugctcatggtguc

SEQ ID NO: 60023 - DNA, 26 bp, Artificial Sequence
  Synthetic
agcatgaggatuctgtatttggtgut

SEQ ID NO: 60024 - DNA, 19 bp, Artificial Sequence
  Synthetic
ccaggcatcucccctccut

SEQ ID NO: 60025 - DNA, 17 bp, Artificial Sequence
  Synthetic
tgggtcuccagcuccgt

SEQ ID NO: 60026 - DNA, 25 bp, Artificial Sequence
  Synthetic
ttgaataactcuccacccgugaaag

SEQ ID NO: 60027 - DNA, 21 bp, Artificial Sequence
  Synthetic
cagacgaugaggtcaugcaag

SEQ ID NO: 60028 - DNA, 22 bp, Artificial Sequence
  Synthetic
gtctggcuggacuaaaggcaaa

SEQ ID NO: 60029 - DNA, 24 bp, Artificial Sequence
  Synthetic
gtacatgcttuttctgctggugac

SEQ ID NO: 60030 - DNA, 19 bp, Artificial Sequence
  Synthetic
ccacaggcuccacgaaguc

SEQ ID NO: 60031 - DNA, 20 bp, Artificial Sequence
  Synthetic
atggcaccaacguctccuac

SEQ ID NO: 60032 - DNA, 20 bp, Artificial Sequence
  Synthetic
agcgtaggugtgcaugacat

SEQ ID NO: 60033 - DNA, 18 bp, Artificial Sequence
  Synthetic
ccggtucactcacugcgt

SEQ ID NO: 60034 - DNA, 23 bp, Artificial Sequence
  Synthetic
cctctgcauacagctctgtcuct

SEQ ID NO: 60035 - DNA, 24 bp, Artificial Sequence
  Synthetic
agaatgagcutaaggagcuggaac

SEQ ID NO: 60036 - DNA, 19 bp, Artificial Sequence
  Synthetic
cccugaaccccgtccuagt

SEQ ID NO: 60037 - DNA, 21 bp, Artificial Sequence
  Synthetic
cttgctauggcccatgaccut

SEQ ID NO: 60038 - DNA, 21 bp, Artificial Sequence
  Synthetic
caggtucaaagcagggucagt

SEQ ID NO: 60039 - DNA, 21 bp, Artificial Sequence
  Synthetic
cccatgtcugtctgtctgucc

SEQ ID NO: 60040 - DNA, 23 bp, Artificial Sequence
  Synthetic
cacctcguggtagaactcttugg

SEQ ID NO: 60041 - DNA, 22 bp, Artificial Sequence
  Synthetic
agtagggauaaggugaggccat

SEQ ID NO: 60042 - DNA, 22 bp, Artificial Sequence
  Synthetic
ctctcauggatcttcugccaca

SEQ ID NO: 60043 - DNA, 27 bp, Artificial Sequence
  Synthetic
cgagtctctugatctctaatgucacat

SEQ ID NO: 60044 - DNA, 21 bp, Artificial Sequence
  Synthetic
cctccaguggctcaacatcua

SEQ ID NO: 60045 - DNA, 24 bp, Artificial Sequence
  Synthetic
gaaatggttgugtgatgtctugcc

SEQ ID NO: 60046 - DNA, 21 bp, Artificial Sequence
  Synthetic
agcagcgccautagcatcaua

SEQ ID NO: 60047 - DNA, 20 bp, Artificial Sequence
  Synthetic
gagagagccugcacauacgg

SEQ ID NO: 60048 - DNA, 20 bp, Artificial Sequence
  Synthetic
cugacgctcugaccaggaaa

SEQ ID NO: 60049 - DNA, 23 bp, Artificial Sequence
  Synthetic
cacccagcuctgattatccctuc

SEQ ID NO: 60050 - DNA, 21 bp, Artificial Sequence
  Synthetic
gggcaucaaggctucaaacac

SEQ ID NO: 60051 - DNA, 23 bp, Artificial Sequence
  Synthetic
tctgttugggttaccuagggact

SEQ ID NO: 60052 - DNA, 24 bp, Artificial Sequence
  Synthetic
ccctcatttcuctccaccctacut

SEQ ID NO: 60053 - DNA, 28 bp, Artificial Sequence
  Synthetic
ggatatucaaggaaattgucaaggcaga

SEQ ID NO: 60054 - DNA, 22 bp, Artificial Sequence
  Synthetic
ccagggttautttcacgccuca

SEQ ID NO: 60055 - DNA, 24 bp, Artificial Sequence
  Synthetic
ctggacttgguagctccattugat

SEQ ID NO: 60056 - DNA, 23 bp, Artificial Sequence
  Synthetic
tctccuccagggatttctaucgg

SEQ ID NO: 60057 - DNA, 26 bp, Artificial Sequence
  Synthetic
catgtttttgucagacttcagauggt

SEQ ID NO: 60058 - DNA, 20 bp, Artificial Sequence
  Synthetic
ctctucccgctaugaagcgt

SEQ ID NO: 60059 - DNA, 28 bp, Artificial Sequence
  Synthetic
aaggtaggaaaugaaagccgttauaagt

SEQ ID NO: 60060 - DNA, 21 bp, Artificial Sequence
  Synthetic
cagggtcutcatgagugcaga

SEQ ID NO: 60061 - DNA, 22 bp, Artificial Sequence
  Synthetic
agtttgcaucagctgactguga

SEQ ID NO: 60062 - DNA, 24 bp, Artificial Sequence
  Synthetic
caccatatgcacugttgtcaacuc

SEQ ID NO: 60063 - DNA, 20 bp, Artificial Sequence
  Synthetic
ggtacucagggcctuggaaa

SEQ ID NO: 60064 - DNA, 26 bp, Artificial Sequence
  Synthetic
gctatttgactuggtggatggtttug

SEQ ID NO: 60065 - DNA, 29 bp, Artificial Sequence
  Synthetic
caccttgaguaaaataaactgctucacat

SEQ ID NO: 60066 - DNA, 26 bp, Artificial Sequence
  Synthetic
tgtttttgtugctgtatgtagucggt

SEQ ID NO: 60067 - DNA, 26 bp, Artificial Sequence
  Synthetic
tgaaggtcaaauaggctgaagugaag

SEQ ID NO: 60068 - DNA, 22 bp, Artificial Sequence
  Synthetic
tggccucaaagguagcaaaagg

SEQ ID NO: 60069 - DNA, 27 bp, Artificial Sequence
  Synthetic
tgaatcgttuacaaaacacagacugga

SEQ ID NO: 60070 - DNA, 28 bp, Artificial Sequence
  Synthetic
agaagaagtaacuggctgttctctttut

SEQ ID NO: 60071 - DNA, 27 bp, Artificial Sequence
  Synthetic
gtgaagagcccaugttaagttgattut

SEQ ID NO: 60072 - DNA, 21 bp, Artificial Sequence
  Synthetic
gcttctaccugcagagctcut

SEQ ID NO: 60073 - DNA, 23 bp, Artificial Sequence
  Synthetic
agaacccagcagaagucattucc

SEQ ID NO: 60074 - DNA, 21 bp, Artificial Sequence
  Synthetic
ctttggcctugggtcattguc

SEQ ID NO: 60075 - DNA, 21 bp, Artificial Sequence
  Synthetic
ctgtacccugcactgcucaat

SEQ ID NO: 60076 - DNA, 21 bp, Artificial Sequence
  Synthetic
cctcccacaguacctcagguc

SEQ ID NO: 60077 - DNA, 19 bp, Artificial Sequence
  Synthetic
gctgauggcacccctaucc

SEQ ID NO: 60078 - DNA, 21 bp, Artificial Sequence
  Synthetic
gctggtcttuctctggcacut

SEQ ID NO: 60079 - DNA, 22 bp, Artificial Sequence
  Synthetic
cgagtctaccaugtcgatgcug

SEQ ID NO: 60080 - DNA, 22 bp, Artificial Sequence
  Synthetic
actctctgucccttgggactuc

SEQ ID NO: 60081 - DNA, 24 bp, Artificial Sequence
  Synthetic
gcccttcctugtcttcttcatcuc

SEQ ID NO: 60082 - DNA, 21 bp, Artificial Sequence
  Synthetic
gaacctcacauccagcctuct

SEQ ID NO: 60083 - DNA, 22 bp, Artificial Sequence
  Synthetic
cccagatguatgaatcgcugct

SEQ ID NO: 60084 - DNA, 20 bp, Artificial Sequence
  Synthetic
gcagacgccauaaagcugac

SEQ ID NO: 60085 - DNA, 22 bp, Artificial Sequence
  Synthetic
ggagactugggatgcttuggaa

SEQ ID NO: 60086 - DNA, 21 bp, Artificial Sequence
  Synthetic
ctactccuccaccgctaucac

SEQ ID NO: 60087 - DNA, 22 bp, Artificial Sequence
  Synthetic
agccatccutgttgaacgugaa

SEQ ID NO: 60088 - DNA, 20 bp, Artificial Sequence
  Synthetic
cgacggagggutctgguaca

SEQ ID NO: 60089 - DNA, 20 bp, Artificial Sequence
  Synthetic
cggccucagtacucccaaag

SEQ ID NO: 60090 - DNA, 23 bp, Artificial Sequence
  Synthetic
cgttgcagutcaagtccuaggat

SEQ ID NO: 60091 - DNA, 29 bp, Artificial Sequence
  Synthetic
cagacgaaaacaaaugtgaaagagtuaca

SEQ ID NO: 60092 - DNA, 23 bp, Artificial Sequence
  Synthetic
gatctacacgaugtgtgcaguca

SEQ ID NO: 60093 - DNA, 28 bp, Artificial Sequence
  Synthetic
cctccatttggcucatatgtagtaccua

SEQ ID NO: 60094 - DNA, 25 bp, Artificial Sequence
  Synthetic
caggccagagaugtgcatatuaaac

SEQ ID NO: 60095 - DNA, 28 bp, Artificial Sequence
  Synthetic
ggtctacagacaacutcaacttgtauca

SEQ ID NO: 60096 - DNA, 28 bp, Artificial Sequence
  Synthetic
ggtaagagauggaaactatagacuccca

SEQ ID NO: 60097 - DNA, 23 bp, Artificial Sequence
  Synthetic
aagagaagaugggctccaatucc

SEQ ID NO: 60098 - DNA, 28 bp, Artificial Sequence
  Synthetic
atgccagatacucttgtgatgaaaauca

SEQ ID NO: 60099 - DNA, 28 bp, Artificial Sequence
  Synthetic
ggatagagaguttaaagaugggcaacat

SEQ ID NO: 60100 - DNA, 28 bp, Artificial Sequence
  Synthetic
ctcaagttcagautcgtattttggaugt

SEQ ID NO: 60101 - DNA, 28 bp, Artificial Sequence
  Synthetic
gcgtaacttcuacgttgacttgatttuc

SEQ ID NO: 60102 - DNA, 27 bp, Artificial Sequence
  Synthetic
tctgtggattcugtcacatctgaaaut

SEQ ID NO: 60103 - DNA, 24 bp, Artificial Sequence
  Synthetic
cccggccgagautaggtttttaua

SEQ ID NO: 60104 - DNA, 20 bp, Artificial Sequence
  Synthetic
agcggtttgutccccttcuc

SEQ ID NO: 60105 - DNA, 23 bp, Artificial Sequence
  Synthetic
gcttccggaaaggaaugatgguc

SEQ ID NO: 60106 - DNA, 21 bp, Artificial Sequence
  Synthetic
ccctgttguttctcccucaga

SEQ ID NO: 60107 - DNA, 27 bp, Artificial Sequence
  Synthetic
gccttcaagggcaagutttaatgaaug

SEQ ID NO: 60108 - DNA, 20 bp, Artificial Sequence
  Synthetic
cuccugcaggcacagagaag

SEQ ID NO: 60109 - DNA, 20 bp, Artificial Sequence
  Synthetic
ccaggugcaugaaccaacag

SEQ ID NO: 60110 - DNA, 25 bp, Artificial Sequence
  Synthetic
ctcatttucagcatctctctuccct

SEQ ID NO: 60111 - DNA, 21 bp, Artificial Sequence
  Synthetic
cgaccagaaacggucagugat

SEQ ID NO: 60112 - DNA, 20 bp, Artificial Sequence
  Synthetic
gagcgaggutccctgcuaag

SEQ ID NO: 60113 - DNA, 23 bp, Artificial Sequence
  Synthetic
tcatccttguaccaggacaguga

SEQ ID NO: 60114 - DNA, 19 bp, Artificial Sequence
  Synthetic
ccagaaucggauccgggaa

SEQ ID NO: 60115 - DNA, 18 bp, Artificial Sequence
  Synthetic
ccggcaugaagcctuggt

SEQ ID NO: 60116 - DNA, 21 bp, Artificial Sequence
  Synthetic
acccccacagutcuacgaagt

SEQ ID NO: 60117 - DNA, 28 bp, Artificial Sequence
  Synthetic
gaaugtgaatacuaacaaaagcaccgat

SEQ ID NO: 60118 - DNA, 17 bp, Artificial Sequence
  Synthetic
ggaggcugctggcctua

SEQ ID NO: 60119 - DNA, 23 bp, Artificial Sequence
  Synthetic
cacaacttcugaagctgactugg

SEQ ID NO: 60120 - DNA, 17 bp, Artificial Sequence
  Synthetic
tcucuccagcccacgga

SEQ ID NO: 60121 - DNA, 20 bp, Artificial Sequence
  Synthetic
tgcagcugctcaatccucat

SEQ ID NO: 60122 - DNA, 21 bp, Artificial Sequence
  Synthetic
tcaggactguggctcaccuat

SEQ ID NO: 60123 - DNA, 19 bp, Artificial Sequence
  Synthetic
cctcaguaccctccugcac

SEQ ID NO: 60124 - DNA, 21 bp, Artificial Sequence
  Synthetic
ccaagagguctcccuggaagt

SEQ ID NO: 60125 - DNA, 19 bp, Artificial Sequence
  Synthetic
ccaccugcaggaagtggut

SEQ ID NO: 60126 - DNA, 22 bp, Artificial Sequence
  Synthetic
actctccgautccagagcugat

SEQ ID NO: 60127 - DNA, 20 bp, Artificial Sequence
  Synthetic
gcagugccacagtggtguag

SEQ ID NO: 60128 - DNA, 20 bp, Artificial Sequence
  Synthetic
ctgaccacucccctgctuac

SEQ ID NO: 60129 - DNA, 25 bp, Artificial Sequence
  Synthetic
agutaagggaugaacaaagcagacc

SEQ ID NO: 60130 - DNA, 19 bp, Artificial Sequence
  Synthetic
gccccagaagggagugtuc

SEQ ID NO: 60131 - DNA, 26 bp, Artificial Sequence
  Synthetic
gaagaactugaggatcatcuccacat

SEQ ID NO: 60132 - DNA, 20 bp, Artificial Sequence
  Synthetic
gcacctccugacctctcuct

SEQ ID NO: 60133 - DNA, 22 bp, Artificial Sequence
  Synthetic
gggagaagaaggutcaggugac

SEQ ID NO: 60134 - DNA, 22 bp, Artificial Sequence
  Synthetic
gcctccacuctgatgtctctug

SEQ ID NO: 60135 - DNA, 22 bp, Artificial Sequence
  Synthetic
aaagctaaguaccccactgcug

SEQ ID NO: 60136 - DNA, 21 bp, Artificial Sequence
  Synthetic
gagcacuacccactggaucac

SEQ ID NO: 60137 - DNA, 26 bp, Artificial Sequence
  Synthetic
gctgagtatttuagagggagcugact

SEQ ID NO: 60138 - DNA, 17 bp, Artificial Sequence
  Synthetic
cgctcggccucatggua

SEQ ID NO: 60139 - DNA, 17 bp, Artificial Sequence
  Synthetic
gctugagccgcttccug

SEQ ID NO: 60140 - DNA, 21 bp, Artificial Sequence
  Synthetic
gtttccautgcaaguccccaa

SEQ ID NO: 60141 - DNA, 20 bp, Artificial Sequence
  Synthetic
ggtggtcgugtctgctctuc

SEQ ID NO: 60142 - DNA, 19 bp, Artificial Sequence
  Synthetic
ggtgcgaugatccagucgt

SEQ ID NO: 60143 - DNA, 21 bp, Artificial Sequence
  Synthetic
ccaagaaacgggaccugtuct

SEQ ID NO: 60144 - DNA, 20 bp, Artificial Sequence
  Synthetic
gccaugccgaggtatacgug

SEQ ID NO: 60145 - DNA, 25 bp, Artificial Sequence
  Synthetic
agttgcctgauctttttgcttcuct

SEQ ID NO: 60146 - DNA, 26 bp, Artificial Sequence
  Synthetic
tttgctgtcuaaagaaagactcggut

SEQ ID NO: 60147 - DNA, 20 bp, Artificial Sequence
  Synthetic
acuggagagagaccctucgt

SEQ ID NO: 60148 - DNA, 18 bp, Artificial Sequence
  Synthetic
cctcgaggaucccgcgua

SEQ ID NO: 60149 - DNA, 18 bp, Artificial Sequence
  Synthetic
ccgatgcucgcaccaugt

SEQ ID NO: 60150 - DNA, 20 bp, Artificial Sequence
  Synthetic
ggtggttcuctctgtggcut

SEQ ID NO: 60151 - DNA, 28 bp, Artificial Sequence
  Synthetic
tccttcccugaaatgtgtttaatugact

SEQ ID NO: 60152 - DNA, 23 bp, Artificial Sequence
  Synthetic
gtgtcattaauccaccccucacc

SEQ ID NO: 60153 - DNA, 23 bp, Artificial Sequence
  Synthetic
gtcgtgcuatgtcgtugaaaacc

SEQ ID NO: 60154 - DNA, 23 bp, Artificial Sequence
  Synthetic
tgtctgtuggagaccagauggat

SEQ ID NO: 60155 - DNA, 21 bp, Artificial Sequence
  Synthetic
tccucattcttcuggcacagg

SEQ ID NO: 60156 - DNA, 17 bp, Artificial Sequence
  Synthetic
gagguggcactccugct

SEQ ID NO: 60157 - DNA, 17 bp, Artificial Sequence
  Synthetic
gcaccggcaugcaugga

SEQ ID NO: 60158 - DNA, 19 bp, Artificial Sequence
  Synthetic
cagcagggcutcccatgua

SEQ ID NO: 60159 - DNA, 24 bp, Artificial Sequence
  Synthetic
tggcctgttaautctggcatacuc

SEQ ID NO: 60160 - DNA, 21 bp, Artificial Sequence
  Synthetic
gagaggacuggctggagttug

SEQ ID NO: 60161 - DNA, 22 bp, Artificial Sequence
  Synthetic
tcttgtgccutgaaacucacct

SEQ ID NO: 60162 - DNA, 19 bp, Artificial Sequence
  Synthetic
ctaccccucagctccggua

SEQ ID NO: 60163 - DNA, 17 bp, Artificial Sequence
  Synthetic
aggugcgagcgcaaaug

SEQ ID NO: 60164 - DNA, 20 bp, Artificial Sequence
  Synthetic
gccaaggauctgggaucagg

SEQ ID NO: 60165 - DNA, 21 bp, Artificial Sequence
  Synthetic
ccttgauggcgaactgaguga

SEQ ID NO: 60166 - DNA, 24 bp, Artificial Sequence
  Synthetic
gccatgatgugatacagcaggaug

SEQ ID NO: 60167 - DNA, 25 bp, Artificial Sequence
  Synthetic
cctctgtgtacautttcctgaccut

SEQ ID NO: 60168 - DNA, 26 bp, Artificial Sequence
  Synthetic
agtgataatgtutggatgctguccat

SEQ ID NO: 60169 - DNA, 28 bp, Artificial Sequence
  Synthetic
gaggtaatacccaagguctgtagctaua

SEQ ID NO: 60170 - DNA, 21 bp, Artificial Sequence
  Synthetic
aaaaccaugcgggaaucagga

SEQ ID NO: 60171 - DNA, 27 bp, Artificial Sequence
  Synthetic
tctgcacctttugtaaagtctgtctut

SEQ ID NO: 60172 - DNA, 20 bp, Artificial Sequence
  Synthetic
tcattgacguggctcacgut

SEQ ID NO: 60173 - DNA, 22 bp, Artificial Sequence
  Synthetic
ggcacugcacccuaaagagaat

SEQ ID NO: 60174 - DNA, 26 bp, Artificial Sequence
  Synthetic
gtaatttccaucaccctucagaacct

SEQ ID NO: 60175 - DNA, 28 bp, Artificial Sequence
  Synthetic
ggcggcgutttcattatgatauaaagat

SEQ ID NO: 60176 - DNA, 26 bp, Artificial Sequence
  Synthetic
agttgtctccuctttgcaacaatuct

SEQ ID NO: 60177 - DNA, 26 bp, Artificial Sequence
  Synthetic
tguaaaagaaaggctaugagcacagt

SEQ ID NO: 60178 - DNA, 21 bp, Artificial Sequence
  Synthetic
gcgtccaccutgtctgcaaua

SEQ ID NO: 60179 - DNA, 28 bp, Artificial Sequence
  Synthetic
gcaggatuacagaaaagctaucaagagt

SEQ ID NO: 60180 - DNA, 25 bp, Artificial Sequence
  Synthetic
agcaaatcgccaucctttguaaaag

SEQ ID NO: 60181 - DNA, 21 bp, Artificial Sequence
  Synthetic
cagctggutgagcattgucaa

SEQ ID NO: 60182 - DNA, 21 bp, Artificial Sequence
  Synthetic
ggaacatggguccttgtccut

SEQ ID NO: 60183 - DNA, 28 bp, Artificial Sequence
  Synthetic
agggtattaagcuaaacttgccttacug

SEQ ID NO: 60184 - DNA, 22 bp, Artificial Sequence
  Synthetic
ccccgtgucttttacagcuagt

SEQ ID NO: 60185 - DNA, 24 bp, Artificial Sequence
  Synthetic
gatgctgtgcutgattgtctctuc

SEQ ID NO: 60186 - DNA, 28 bp, Artificial Sequence
  Synthetic
aaactatgttgucagtttctggtcugaa

SEQ ID NO: 60187 - DNA, 28 bp, Artificial Sequence
  Synthetic
ggaagtgtgctutgttaaattgagtgua

SEQ ID NO: 60188 - DNA, 28 bp, Artificial Sequence
  Synthetic
acattacaatacacutggtgactgugaa

SEQ ID NO: 60189 - DNA, 26 bp, Artificial Sequence
  Synthetic
ccagaaccacaugagtcagaatcauc

SEQ ID NO: 60190 - DNA, 28 bp, Artificial Sequence
  Synthetic
ggaggttatcuacattgtatccctcugt

SEQ ID NO: 60191 - DNA, 27 bp, Artificial Sequence
  Synthetic
tttattucagacacacatcaugagcct

SEQ ID NO: 60192 - DNA, 28 bp, Artificial Sequence
  Synthetic
gaaatgtgaugcccttaccaattuaact

SEQ ID NO: 60193 - DNA, 27 bp, Artificial Sequence
  Synthetic
ggccttatgtauacttttggagauggt

SEQ ID NO: 60194 - DNA, 22 bp, Artificial Sequence
  Synthetic
ggaaactcuaacttgcccucct

SEQ ID NO: 60195 - DNA, 21 bp, Artificial Sequence
  Synthetic
cacagggcagcaaguaacuca

SEQ ID NO: 60196 - DNA, 22 bp, Artificial Sequence
  Synthetic
ttgaagtattgcucccccagug

SEQ ID NO: 60197 - DNA, 24 bp, Artificial Sequence
  Synthetic
tcatagacacccacuttcccucat

SEQ ID NO: 60198 - DNA, 21 bp, Artificial Sequence
  Synthetic
ggtccuggagcugaacaacaa

SEQ ID NO: 60199 - DNA, 24 bp, Artificial Sequence
  Synthetic
gttcctcttccutccaaccttuct

SEQ ID NO: 60200 - DNA, 23 bp, Artificial Sequence
  Synthetic
gggtaaccauggtgaatgagtug

SEQ ID NO: 60201 - DNA, 22 bp, Artificial Sequence
  Synthetic
ctgagaguaccaggctaguggt

SEQ ID NO: 60202 - DNA, 21 bp, Artificial Sequence
  Synthetic
gagaggaggcautccatucca

SEQ ID NO: 60203 - DNA, 25 bp, Artificial Sequence
  Synthetic
ggautgggaatuaagaggaaagggt

SEQ ID NO: 60204 - DNA, 22 bp, Artificial Sequence
  Synthetic
tggtgtgggagucgtaggttua

SEQ ID NO: 60205 - DNA, 20 bp, Artificial Sequence
  Synthetic
agtaggtggcuagcctccuc

SEQ ID NO: 60206 - DNA, 21 bp, Artificial Sequence
  Synthetic
gagugcucggagaaagaggaa

SEQ ID NO: 60207 - DNA, 28 bp, Artificial Sequence
  Synthetic
ctcataggcctuaatctcaggtctcuat

SEQ ID NO: 60208 - DNA, 23 bp, Artificial Sequence
  Synthetic
ggcaggttttuatttaccgccut

SEQ ID NO: 60209 - DNA, 27 bp, Artificial Sequence
  Synthetic
aggcagacaaauaactagucacaacag

SEQ ID NO: 60210 - DNA, 21 bp, Artificial Sequence
  Synthetic
ccaggctguggtattagcugt

SEQ ID NO: 60211 - DNA, 28 bp, Artificial Sequence
  Synthetic
tgccccauaattggtacuacaaagaaaa

SEQ ID NO: 60212 - DNA, 26 bp, Artificial Sequence
  Synthetic
actgtactgaauggcgaagacaauaa

SEQ ID NO: 60213 - DNA, 30 bp, Artificial Sequence
  Synthetic
cttgcctcugagagatttttaatactauga

SEQ ID NO: 60214 - DNA, 22 bp, Artificial Sequence
  Synthetic
agcttcugtggagttugcagat

SEQ ID NO: 60215 - DNA, 27 bp, Artificial Sequence
  Synthetic
cataagcaaaacguacactgaactuga

SEQ ID NO: 60216 - DNA, 25 bp, Artificial Sequence
  Synthetic
aatctggcatguttcaaaatggcut

SEQ ID NO: 60217 - DNA, 28 bp, Artificial Sequence
  Synthetic
ctgcttcttttgutaattcctgtgtuca

SEQ ID NO: 60218 - DNA, 26 bp, Artificial Sequence
  Synthetic
gggtaaacuggagagaagaaaatgut

SEQ ID NO: 60219 - DNA, 23 bp, Artificial Sequence
  Synthetic
ggaacccaacuctcctttgucac

SEQ ID NO: 60220 - DNA, 25 bp, Artificial Sequence
  Synthetic
gttgtgaugatgagatguggaggaa

SEQ ID NO: 60221 - DNA, 21 bp, Artificial Sequence
  Synthetic
cagcccacuctttugagcaag

SEQ ID NO: 60222 - DNA, 24 bp, Artificial Sequence
  Synthetic
gggttgggaguaagagauagagag

SEQ ID NO: 60223 - DNA, 23 bp, Artificial Sequence
  Synthetic
actgttagtcaugtgggcatgug

SEQ ID NO: 60224 - DNA, 21 bp, Artificial Sequence
  Synthetic
gcaacatgaaugcccccaaug

SEQ ID NO: 60225 - DNA, 28 bp, Artificial Sequence
  Synthetic
caaaccaccttgutatcagcactattut

SEQ ID NO: 60226 - DNA, 22 bp, Artificial Sequence
  Synthetic
agaaaggacuggctgacgttut

SEQ ID NO: 60227 - DNA, 26 bp, Artificial Sequence
  Synthetic
cttcatggctucatttcttgcactua

SEQ ID NO: 60228 - DNA, 19 bp, Artificial Sequence
  Synthetic
ggcacctguggtcgagtug

SEQ ID NO: 60229 - DNA, 19 bp, Artificial Sequence
  Synthetic
cutcatgggtucccgacga

SEQ ID NO: 60230 - DNA, 25 bp, Artificial Sequence
  Synthetic
ctagtggctugtattcctagtugct

SEQ ID NO: 60231 - DNA, 27 bp, Artificial Sequence
  Synthetic
gttatgcaaatctuatgtcagcagguc

SEQ ID NO: 60232 - DNA, 25 bp, Artificial Sequence
  Synthetic
agtttcagucccagtttttcaugct

SEQ ID NO: 60233 - DNA, 28 bp, Artificial Sequence
  Synthetic
gactacatacattutggcaagcctaaug

SEQ ID NO: 60234 - DNA, 21 bp, Artificial Sequence
  Synthetic
tacggtggugtgctcuacaag

SEQ ID NO: 60235 - DNA, 21 bp, Artificial Sequence
  Synthetic
tcctgaggugctgactctuca

SEQ ID NO: 60236 - DNA, 21 bp, Artificial Sequence
  Synthetic
cgtgtaggagcuctggttgua

SEQ ID NO: 60237 - DNA, 25 bp, Artificial Sequence
  Synthetic
tgcaacttcaggutccatatctugt

SEQ ID NO: 60238 - DNA, 24 bp, Artificial Sequence
  Synthetic
ggcagtaacccuaaaggtgtagug

SEQ ID NO: 60239 - DNA, 25 bp, Artificial Sequence
  Synthetic
tcactccattgucggttcatttcut

SEQ ID NO: 60240 - DNA, 21 bp, Artificial Sequence
  Synthetic
cagcutattgcuggcaaagca

SEQ ID NO: 60241 - DNA, 23 bp, Artificial Sequence
  Synthetic
guccactucaaacccaaggaaga

SEQ ID NO: 60242 - DNA, 19 bp, Artificial Sequence
  Synthetic
ggtcgaggucgcagaccua

SEQ ID NO: 60243 - DNA, 20 bp, Artificial Sequence
  Synthetic
cacucactgguccagaagca

SEQ ID NO: 60244 - DNA, 22 bp, Artificial Sequence
  Synthetic
gctgtcccucattcccugagat

SEQ ID NO: 60245 - DNA, 20 bp, Artificial Sequence
  Synthetic
caggaggagggcaaaucugg

SEQ ID NO: 60246 - DNA, 24 bp, Artificial Sequence
  Synthetic
cttuaccaaaagcccgtgtuaagg

SEQ ID NO: 60247 - DNA, 23 bp, Artificial Sequence
  Synthetic
accuacctgtcugcgaagagaat

SEQ ID NO: 60248 - DNA, 21 bp, Artificial Sequence
  Synthetic
ccaactgggucccttctcuct

SEQ ID NO: 60249 - DNA, 20 bp, Artificial Sequence
  Synthetic
cctggagcccuaaccttugg

SEQ ID NO: 60250 - DNA, 24 bp, Artificial Sequence
  Synthetic
ggaaacaaguaaaggccucagact

SEQ ID NO: 60251 - DNA, 17 bp, Artificial Sequence
  Synthetic
gctccgagccaugcauc

SEQ ID NO: 60252 - DNA, 24 bp, Artificial Sequence
  Synthetic
gtccagaaaaggaugggatucaga

SEQ ID NO: 60253 - DNA, 28 bp, Artificial Sequence
  Synthetic
acagaattgcacauttcactgaaaacut

SEQ ID NO: 60254 - DNA, 21 bp, Artificial Sequence
  Synthetic
agctcatcutcgtcacaugcc

SEQ ID NO: 60255 - DNA, 23 bp, Artificial Sequence
  Synthetic
agcagguagaggaagaggaacuc

SEQ ID NO: 60256 - DNA, 25 bp, Artificial Sequence
  Synthetic
gctatgaaatcagucagcaacccut

SEQ ID NO: 60257 - DNA, 28 bp, Artificial Sequence
  Synthetic
ctcatgagttuccatcattgtgtttugt

SEQ ID NO: 60258 - DNA, 21 bp, Artificial Sequence
  Synthetic
gcatcuggcaccuccaacaat

SEQ ID NO: 60259 - DNA, 18 bp, Artificial Sequence
  Synthetic
gccctcgaucggacucag

SEQ ID NO: 60260 - DNA, 23 bp, Artificial Sequence
  Synthetic
caagagacccagcacutggttua

SEQ ID NO: 60261 - DNA, 28 bp, Artificial Sequence
  Synthetic
cttctccaaauggcatttctttctctuc

SEQ ID NO: 60262 - DNA, 21 bp, Artificial Sequence
  Synthetic
cctcttgguctggtcctucag

SEQ ID NO: 60263 - DNA, 22 bp, Artificial Sequence
  Synthetic
tgaacaaauccaagcaccucca

SEQ ID NO: 60264 - DNA, 26 bp, Artificial Sequence
  Synthetic
aattactaccaucaggctacucacct

SEQ ID NO: 60265 - DNA, 28 bp, Artificial Sequence
  Synthetic
agactgtgcctaugtgtgtatataccua

SEQ ID NO: 60266 - DNA, 24 bp, Artificial Sequence
  Synthetic
gauttccacaaatuggagaagcgt

SEQ ID NO: 60267 - DNA, 26 bp, Artificial Sequence
  Synthetic
ttgagctcugaacaagtgaaggttua

SEQ ID NO: 60268 - DNA, 28 bp, Artificial Sequence
  Synthetic
gaaaagatcutactcaccauaggaccag

SEQ ID NO: 60269 - DNA, 25 bp, Artificial Sequence
  Synthetic
tgtagatgtccuccatatgguggaa

SEQ ID NO: 60270 - DNA, 27 bp, Artificial Sequence
  Synthetic
gtttcatttgaugtacgaaagcugcat

SEQ ID NO: 60271 - DNA, 24 bp, Artificial Sequence
  Synthetic
tccutagggattucaaggcaagac

SEQ ID NO: 60272 - DNA, 32 bp, Artificial Sequence
  Synthetic
actggtgtacatttuctctatacttactcugt

SEQ ID NO: 60273 - DNA, 27 bp, Artificial Sequence
  Synthetic
cacaactaccaugcacatttcucaaaa

SEQ ID NO: 60274 - DNA, 25 bp, Artificial Sequence
  Synthetic
tcgtggcucataagcaatttuacca

SEQ ID NO: 60275 - DNA, 27 bp, Artificial Sequence
  Synthetic
tggtcttacagacauttaggctgttut

SEQ ID NO: 60276 - DNA, 24 bp, Artificial Sequence
  Synthetic
tttggugaccacaaggtattuggt

SEQ ID NO: 60277 - DNA, 19 bp, Artificial Sequence
  Synthetic
acaacucagugccccaaca

SEQ ID NO: 60278 - DNA, 21 bp, Artificial Sequence
  Synthetic
ccttcgccugtcctcatguat

SEQ ID NO: 60279 - DNA, 28 bp, Artificial Sequence
  Synthetic
gcattgcattcccugtggtttttaauaa

SEQ ID NO: 60280 - DNA, 21 bp, Artificial Sequence
  Synthetic
ccactgccutgactcacucac

SEQ ID NO: 60281 - DNA, 22 bp, Artificial Sequence
  Synthetic
gggcttgcutttcagtcatucc

SEQ ID NO: 60282 - DNA, 26 bp, Artificial Sequence
  Synthetic
tgactcaaacugccatgtatttcuca

SEQ ID NO: 60283 - DNA, 20 bp, Artificial Sequence
  Synthetic
acgagagucacccgaguacc

SEQ ID NO: 60284 - DNA, 20 bp, Artificial Sequence
  Synthetic
gctgacgggugcaaacaauc

SEQ ID NO: 60285 - DNA, 28 bp, Artificial Sequence
  Synthetic
tgcagccaaauggaaaagttttgtatua

SEQ ID NO: 60286 - DNA, 27 bp, Artificial Sequence
  Synthetic
tcugttcatatttauccaggagaccga

SEQ ID NO: 60287 - DNA, 27 bp, Artificial Sequence
  Synthetic
caacaccagaagaaauctatccuccat

SEQ ID NO: 60288 - DNA, 26 bp, Artificial Sequence
  Synthetic
gaaaagcaagtutccattacgacuca

SEQ ID NO: 60289 - DNA, 27 bp, Artificial Sequence
  Synthetic
gatggtgtgacutttgatacactgtut

SEQ ID NO: 60290 - DNA, 28 bp, Artificial Sequence
  Synthetic
agcctgatgccuaatagcaattattuca

SEQ ID NO: 60291 - DNA, 27 bp, Artificial Sequence
  Synthetic
atgtatgcatgcutgtatcaggaucat

SEQ ID NO: 60292 - DNA, 26 bp, Artificial Sequence
  Synthetic
aaaaggaatgucattgtgcacugaaa

SEQ ID NO: 60293 - DNA, 21 bp, Artificial Sequence
  Synthetic
gtgtgagccucacagguacaa

SEQ ID NO: 60294 - DNA, 27 bp, Artificial Sequence
  Synthetic
agtgaattcagcauttatccttucggt

SEQ ID NO: 60295 - DNA, 27 bp, Artificial Sequence
  Synthetic
aggtattgcttgguaaacagagactuc

SEQ ID NO: 60296 - DNA, 28 bp, Artificial Sequence
  Synthetic
acgcagguaataattcagtttucagaca

SEQ ID NO: 60297 - DNA, 25 bp, Artificial Sequence
  Synthetic
ccgtctctcuagtcatgaagucgat

SEQ ID NO: 60298 - DNA, 25 bp, Artificial Sequence
  Synthetic
ctttccttacaugtgattcccguct

SEQ ID NO: 60299 - DNA, 22 bp, Artificial Sequence
  Synthetic
gttgcutcagctgucacaaagg

SEQ ID NO: 60300 - DNA, 26 bp, Artificial Sequence
  Synthetic
tgtgattgagaccucaacgtaugaac

SEQ ID NO: 60301 - DNA, 26 bp, Artificial Sequence
  Synthetic
atttactuaccaagaccaacacugct

SEQ ID NO: 60302 - DNA, 24 bp, Artificial Sequence
  Synthetic
gtctaagggcuatccagacatugg

SEQ ID NO: 60303 - DNA, 26 bp, Artificial Sequence
  Synthetic
cttccttcaugaaagtgctgagauga

SEQ ID NO: 60304 - DNA, 27 bp, Artificial Sequence
  Synthetic
agaaagccattucattgaaaactgugt

SEQ ID NO: 60305 - DNA, 23 bp, Artificial Sequence
  Synthetic
atcccauagaccctgucaaggaa

SEQ ID NO: 60306 - DNA, 28 bp, Artificial Sequence
  Synthetic
tcattaacaaataugcagaacacuccca

SEQ ID NO: 60307 - DNA, 28 bp, Artificial Sequence
  Synthetic
ctgtcatggucagaaatattugaacagt

SEQ ID NO: 60308 - DNA, 26 bp, Artificial Sequence
  Synthetic
ttctagaauggaaagcctgtttuggt

SEQ ID NO: 60309 - DNA, 23 bp, Artificial Sequence
  Synthetic
cacugaguagaacccccaagaag

SEQ ID NO: 60310 - DNA, 27 bp, Artificial Sequence
  Synthetic
tttgccttuggagttcttagaaugact

SEQ ID NO: 60311 - DNA, 28 bp, Artificial Sequence
  Synthetic
cgtattgtttcaacauaccaacccttut

SEQ ID NO: 60312 - DNA, 28 bp, Artificial Sequence
  Synthetic
tcgtttttagccuttgctattagtccut

SEQ ID NO: 60313 - DNA, 23 bp, Artificial Sequence
  Synthetic
ggcttgtcacuttggcatttuca

SEQ ID NO: 60314 - DNA, 24 bp, Artificial Sequence
  Synthetic
ccaagtcttgucccattgaatgug

SEQ ID NO: 60315 - DNA, 28 bp, Artificial Sequence
  Synthetic
aactcccacagucttatctaaucagagt

SEQ ID NO: 60316 - DNA, 20 bp, Artificial Sequence
  Synthetic
tgtgggutgccuaggaggaa

SEQ ID NO: 60317 - DNA, 31 bp, Artificial Sequence
  Synthetic
tgtttgaaaaccccaacutaattcttauagt

SEQ ID NO: 60318 - DNA, 23 bp, Artificial Sequence
  Synthetic
tgaaggccucacttctaggaugt

SEQ ID NO: 60319 - DNA, 26 bp, Artificial Sequence
  Synthetic
tttcttgtttccuttcacaggcaaug

SEQ ID NO: 60320 - DNA, 25 bp, Artificial Sequence
  Synthetic
gcttttatgcagacutttcggguat

SEQ ID NO: 60321 - DNA, 26 bp, Artificial Sequence
  Synthetic
gcctcacugaattaatgtgtttuccc

SEQ ID NO: 60322 - DNA, 24 bp, Artificial Sequence
  Synthetic
aacaccaaggaaaaugagggacut

SEQ ID NO: 60323 - DNA, 27 bp, Artificial Sequence
  Synthetic
aactgtccaaagutggaatcatcugat

SEQ ID NO: 60324 - DNA, 27 bp, Artificial Sequence
  Synthetic
tccattatgtttguggcatatcctucc

SEQ ID NO: 60325 - DNA, 23 bp, Artificial Sequence
  Synthetic
gctaacccaaauccatcguaggt

SEQ ID NO: 60326 - DNA, 27 bp, Artificial Sequence
  Synthetic
ttggctaatguatttgaagtaauccga

SEQ ID NO: 60327 - DNA, 27 bp, Artificial Sequence
  Synthetic
tgaaucccaaaactttgaucacagaca

SEQ ID NO: 60328 - DNA, 24 bp, Artificial Sequence
  Synthetic
ggacatucacatgtgttucagcaa

SEQ ID NO: 60329 - DNA, 28 bp, Artificial Sequence
  Synthetic
accttcattccautactgggattttuca

SEQ ID NO: 60330 - DNA, 21 bp, Artificial Sequence
  Synthetic
ccaagcatgcugagggtctuc

SEQ ID NO: 60331 - DNA, 22 bp, Artificial Sequence
  Synthetic
tgtctctcagcuctaggtgcuc

SEQ ID NO: 60332 - DNA, 21 bp, Artificial Sequence
  Synthetic
ccaagcugaagcacaggtcuc

SEQ ID NO: 60333 - DNA, 21 bp, Artificial Sequence
  Synthetic
acutgtcccugcagacacaac

SEQ ID NO: 60334 - DNA, 24 bp, Artificial Sequence
  Synthetic
acagucagggtttuagaggagaga

SEQ ID NO: 60335 - DNA, 20 bp, Artificial Sequence
  Synthetic
gaaaguccccucccgagaga

SEQ ID NO: 60336 - DNA, 25 bp, Artificial Sequence
  Synthetic
gtggctgggaagutagaatgtttuc

SEQ ID NO: 60337 - DNA, 26 bp, Artificial Sequence
  Synthetic
gtctgtctttugcttgtgttctucaa

SEQ ID NO: 60338 - DNA, 22 bp, Artificial Sequence
  Synthetic
caaggttaucagacctggguca

SEQ ID NO: 60339 - DNA, 19 bp, Artificial Sequence
  Synthetic
ccagatugagcggcccaut

SEQ ID NO: 60340 - DNA, 28 bp, Artificial Sequence
  Synthetic
gcattcttaccacuttgctgtatucact

SEQ ID NO: 60341 - DNA, 25 bp, Artificial Sequence
  Synthetic
catttattcacaaucccagccucac

SEQ ID NO: 60342 - DNA, 23 bp, Artificial Sequence
  Synthetic
cactgcaatcuggaggttgttug

SEQ ID NO: 60343 - DNA, 24 bp, Artificial Sequence
  Synthetic
tctccctattuctctacccccuct

SEQ ID NO: 60344 - DNA, 18 bp, Artificial Sequence
  Synthetic
caccgugggagcguacag

SEQ ID NO: 60345 - DNA, 24 bp, Artificial Sequence
  Synthetic
tttgcttttagcuccgagtctuca

SEQ ID NO: 60346 - DNA, 23 bp, Artificial Sequence
  Synthetic
cactcactatccuctcccgagut

SEQ ID NO: 60347 - DNA, 26 bp, Artificial Sequence
  Synthetic
ggagatgcugagaaattgtcgaaauc

SEQ ID NO: 60348 - DNA, 21 bp, Artificial Sequence
  Synthetic
cctccagcacuttagccucaa

SEQ ID NO: 60349 - DNA, 19 bp, Artificial Sequence
  Synthetic
agtgagccgacucgcttuc

SEQ ID NO: 60350 - DNA, 28 bp, Artificial Sequence
  Synthetic
cttattagggaagucaaggagaaagugg

SEQ ID NO: 60351 - DNA, 25 bp, Artificial Sequence
  Synthetic
atgcttugaagaggagactgagtut

SEQ ID NO: 60352 - DNA, 26 bp, Artificial Sequence
  Synthetic
aacctagtggccugattcaaaaugat

SEQ ID NO: 60353 - DNA, 23 bp, Artificial Sequence
  Synthetic
ctaggtgaauggaatgctgugga

SEQ ID NO: 60354 - DNA, 26 bp, Artificial Sequence
  Synthetic
tccctacaaaucctgagagttacucc

SEQ ID NO: 60355 - DNA, 28 bp, Artificial Sequence
  Synthetic
gcaggactgucccatatgacatauagat

SEQ ID NO: 60356 - DNA, 28 bp, Artificial Sequence
  Synthetic
agaaagatattcuggcattgtgatguca

SEQ ID NO: 60357 - DNA, 28 bp, Artificial Sequence
  Synthetic
gctgtgtttcugaaaattggaagatugt

SEQ ID NO: 60358 - DNA, 21 bp, Artificial Sequence
  Synthetic
ggccaggcacutaagaccaua

SEQ ID NO: 60359 - DNA, 22 bp, Artificial Sequence
  Synthetic
ggaatucggcgttgaaatuggg

SEQ ID NO: 60360 - DNA, 22 bp, Artificial Sequence
  Synthetic
aggtcttugaagaccccuccat

SEQ ID NO: 60361 - DNA, 27 bp, Artificial Sequence
  Synthetic
ctttggcaggautaagctagggtauaa

SEQ ID NO: 60362 - DNA, 24 bp, Artificial Sequence
  Synthetic
ctattgcaguttctggcauagcaa

SEQ ID NO: 60363 - DNA, 28 bp, Artificial Sequence
  Synthetic
gaagcaagtucctgtggagtauaaagat

SEQ ID NO: 60364 - DNA, 24 bp, Artificial Sequence
  Synthetic
ccattuccaaagctcugagcagaa

SEQ ID NO: 60365 - DNA, 26 bp, Artificial Sequence
  Synthetic
agtactccctucccccagtattuaat

SEQ ID NO: 60366 - DNA, 22 bp, Artificial Sequence
  Synthetic
gcgctctauacggatgcttuca

SEQ ID NO: 60367 - DNA, 23 bp, Artificial Sequence
  Synthetic
acatatggaauccaggagcccut

SEQ ID NO: 60368 - DNA, 21 bp, Artificial Sequence
  Synthetic
catttggctcugtgcccttug

SEQ ID NO: 60369 - DNA, 22 bp, Artificial Sequence
  Synthetic
ggttggguggattgtgtgttug

SEQ ID NO: 60370 - DNA, 19 bp, Artificial Sequence
  Synthetic
cagaccgcguccttgagua

SEQ ID NO: 60371 - DNA, 20 bp, Artificial Sequence
  Synthetic
ggaccgucccagaggatuca

SEQ ID NO: 60372 - DNA, 20 bp, Artificial Sequence
  Synthetic
caccggugtggctcttuaac

SEQ ID NO: 60373 - DNA, 28 bp, Artificial Sequence
  Synthetic
cctgtactuaccacaacaaccttatcut

SEQ ID NO: 60374 - DNA, 22 bp, Artificial Sequence
  Synthetic
ggagaaugaaggaaggctggug

SEQ ID NO: 60375 - DNA, 24 bp, Artificial Sequence
  Synthetic
tucaaatccucagccagacaacat

SEQ ID NO: 60376 - DNA, 22 bp, Artificial Sequence
  Synthetic
catgaacccacutccugacagt

SEQ ID NO: 60377 - DNA, 25 bp, Artificial Sequence
  Synthetic
gcggtagcaguagaagatgatgaug

SEQ ID NO: 60378 - DNA, 20 bp, Artificial Sequence
  Synthetic
ctgcugagcccaccttcaua

SEQ ID NO: 60379 - DNA, 23 bp, Artificial Sequence
  Synthetic
ccatcuagagggattcagugggt

SEQ ID NO: 60380 - DNA, 22 bp, Artificial Sequence
  Synthetic
cctccaagaucagcaccctcua

SEQ ID NO: 60381 - DNA, 21 bp, Artificial Sequence
  Synthetic
cagaggccuggactacatcuc

SEQ ID NO: 60382 - DNA, 28 bp, Artificial Sequence
  Synthetic
gtttgtatacatutcggcatccaucaac

SEQ ID NO: 60383 - DNA, 27 bp, Artificial Sequence
  Synthetic
cacacctcttcuacgatgtttccuaac

SEQ ID NO: 60384 - DNA, 24 bp, Artificial Sequence
  Synthetic
agctgcaaagaagcutgtgattug

SEQ ID NO: 60385 - DNA, 28 bp, Artificial Sequence
  Synthetic
acgaccaaagcutctagattgtttguaa

SEQ ID NO: 60386 - DNA, 27 bp, Artificial Sequence
  Synthetic
actcaagactucctcctaaattuccct

SEQ ID NO: 60387 - DNA, 28 bp, Artificial Sequence
  Synthetic
gctgtataucccaccaaagcagaauaaa

SEQ ID NO: 60388 - DNA, 26 bp, Artificial Sequence
  Synthetic
agtataaaccaccaucagcacatcug

SEQ ID NO: 60389 - DNA, 29 bp, Artificial Sequence
  Synthetic
tcttcaaagguataagcagttuagccaaa

SEQ ID NO: 60390 - DNA, 22 bp, Artificial Sequence
  Synthetic
ggattctccugttagcagccut

SEQ ID NO: 60391 - DNA, 23 bp, Artificial Sequence
  Synthetic
cagaagactuccagctccaucac

SEQ ID NO: 60392 - DNA, 26 bp, Artificial Sequence
  Synthetic
cacccaaaauaaaacaacatccucca

SEQ ID NO: 60393 - DNA, 28 bp, Artificial Sequence
  Synthetic
agggaaattttggugtatacagcatuct

SEQ ID NO: 60394 - DNA, 22 bp, Artificial Sequence
  Synthetic
ggctccutctttgaugcagagg

SEQ ID NO: 60395 - DNA, 21 bp, Artificial Sequence
  Synthetic
cugatgccugaagggaagaca

SEQ ID NO: 60396 - DNA, 25 bp, Artificial Sequence
  Synthetic
gctactactagcacuagatggccua

SEQ ID NO: 60397 - DNA, 27 bp, Artificial Sequence
  Synthetic
ccttttgccaauaatgagagggtcuat

SEQ ID NO: 60398 - DNA, 25 bp, Artificial Sequence
  Synthetic
gcugaacatuacaaggaccaaacaa

SEQ ID NO: 60399 - DNA, 28 bp, Artificial Sequence
  Synthetic
aaggtgatgttugcaaaaccactuaaat

SEQ ID NO: 60400 - DNA, 20 bp, Artificial Sequence
  Synthetic
ctgtacgtgcuggtggagua

SEQ ID NO: 60401 - DNA, 20 bp, Artificial Sequence
  Synthetic
acaggacaccaggucctuga

SEQ ID NO: 60402 - DNA, 28 bp, Artificial Sequence
  Synthetic
ttttcttcttcaacugtatcccttuggt

SEQ ID NO: 60403 - DNA, 27 bp, Artificial Sequence
  Synthetic
acctgtcacaauactgagagtgattug

SEQ ID NO: 60404 - DNA, 24 bp, Artificial Sequence
  Synthetic
agctggtuaagaagatccuaggca

SEQ ID NO: 60405 - DNA, 25 bp, Artificial Sequence
  Synthetic
tcagaactctcuacgaacacaguca

SEQ ID NO: 60406 - DNA, 24 bp, Artificial Sequence
  Synthetic
aggacucagagacctctacugaga

SEQ ID NO: 60407 - DNA, 21 bp, Artificial Sequence
  Synthetic
tgtgggcugaacuaccaaagg

SEQ ID NO: 60408 - DNA, 25 bp, Artificial Sequence
  Synthetic
tgcatatctcutttgtctgtuggct

SEQ ID NO: 60409 - DNA, 28 bp, Artificial Sequence
  Synthetic
atgagatgaacaauatccattcggtuga

SEQ ID NO: 60410 - DNA, 20 bp, Artificial Sequence
  Synthetic
aattucccacagggtugcca

SEQ ID NO: 60411 - DNA, 20 bp, Artificial Sequence
  Synthetic
aaggaccgucugccagaaag

SEQ ID NO: 60412 - DNA, 25 bp, Artificial Sequence
  Synthetic
ccttttaagagcaccuttccgaugt

SEQ ID NO: 60413 - DNA, 28 bp, Artificial Sequence
  Synthetic
tttgctctttaucagaaagtccttcugt

SEQ ID NO: 60414 - DNA, 21 bp, Artificial Sequence
  Synthetic
ggccaacgugatccgttacut

SEQ ID NO: 60415 - DNA, 22 bp, Artificial Sequence
  Synthetic
ccaacctggucctagcaaaguc

SEQ ID NO: 60416 - DNA, 26 bp, Artificial Sequence
  Synthetic
ctgctaguaccaaaaagagacaguca

SEQ ID NO: 60417 - DNA, 21 bp, Artificial Sequence
  Synthetic
ggttttcaauggccgaccuca

SEQ ID NO: 60418 - DNA, 21 bp, Artificial Sequence
  Synthetic
gactttttaccugggcgaugg

SEQ ID NO: 60419 - DNA, 21 bp, Artificial Sequence
  Synthetic
agattgtugggtggcaugaca

SEQ ID NO: 60420 - DNA, 22 bp, Artificial Sequence
  Synthetic
agatcttgccutgagtctgugg

SEQ ID NO: 60421 - DNA, 22 bp, Artificial Sequence
  Synthetic
aatgacuggcggaaggaaauga

SEQ ID NO: 60422 - DNA, 21 bp, Artificial Sequence
  Synthetic
gccauagctttcguccaggaa

SEQ ID NO: 60423 - DNA, 28 bp, Artificial Sequence
  Synthetic
tgactttauggaaagaagtgttucgact

SEQ ID NO: 60424 - DNA, 19 bp, Artificial Sequence
  Synthetic
cutacctgtuggccagggt

SEQ ID NO: 60425 - DNA, 28 bp, Artificial Sequence
  Synthetic
cttcctatgatautgactgcagttugga

SEQ ID NO: 60426 - DNA, 24 bp, Artificial Sequence
  Synthetic
ccttgacuaagtgaaccauggcat

SEQ ID NO: 60427 - DNA, 28 bp, Artificial Sequence
  Synthetic
gcaggtattugcagaaacttaactgaut

SEQ ID NO: 60428 - DNA, 17 bp, Artificial Sequence
  Synthetic
ccccaugggttccguct

SEQ ID NO: 60429 - DNA, 17 bp, Artificial Sequence
  Synthetic
ggcggcugttcgtgtuc

SEQ ID NO: 60430 - DNA, 24 bp, Artificial Sequence
  Synthetic
agtgatgctcuccagcactttauc

SEQ ID NO: 60431 - DNA, 28 bp, Artificial Sequence
  Synthetic
gtgtactacgggacaugaatctttcuaa

SEQ ID NO: 60432 - DNA, 21 bp, Artificial Sequence
  Synthetic
caguggagagactuccagacc

SEQ ID NO: 60433 - DNA, 28 bp, Artificial Sequence
  Synthetic
tgagctagatacuctgcatgaatugaac

SEQ ID NO: 60434 - DNA, 25 bp, Artificial Sequence
  Synthetic
agagaucagaggactttgugacagt

SEQ ID NO: 60435 - DNA, 25 bp, Artificial Sequence
  Synthetic
ggctattttgcugtggcataaauct

SEQ ID NO: 60436 - DNA, 28 bp, Artificial Sequence
  Synthetic
ctagattgaccaggaugttgtcatuact

SEQ ID NO: 60437 - DNA, 28 bp, Artificial Sequence
  Synthetic
tcagattauggcaggaaattggatucat

SEQ ID NO: 60438 - DNA, 25 bp, Artificial Sequence
  Synthetic
aggcctatacuggacctattuaggg

SEQ ID NO: 60439 - DNA, 26 bp, Artificial Sequence
  Synthetic
accaatcttccagaautcacacctut

SEQ ID NO: 60440 - DNA, 25 bp, Artificial Sequence
  Synthetic
ttcaagctgtugaatggagcauact

SEQ ID NO: 60441 - DNA, 23 bp, Artificial Sequence
  Synthetic
cgaggccuggaaacttcttctuc

SEQ ID NO: 60442 - DNA, 28 bp, Artificial Sequence
  Synthetic
ggacacctataaacutttccacagcuac

SEQ ID NO: 60443 - DNA, 27 bp, Artificial Sequence
  Synthetic
tcctctgcttuattgtcatccaatuca

SEQ ID NO: 60444 - DNA, 27 bp, Artificial Sequence
  Synthetic
ccaacttcaccaguaaaacctauacca

SEQ ID NO: 60445 - DNA, 27 bp, Artificial Sequence
  Synthetic
atgaggtgaaucaaaagcaaaactucc

SEQ ID NO: 60446 - DNA, 20 bp, Artificial Sequence
  Synthetic
tcgaggucagccuaaaccca

SEQ ID NO: 60447 - DNA, 28 bp, Artificial Sequence
  Synthetic
gctcagtctctutgataggttcatttuc

SEQ ID NO: 60448 - DNA, 22 bp, Artificial Sequence
  Synthetic
gccctgccutctggaagtaauc

SEQ ID NO: 60449 - DNA, 19 bp, Artificial Sequence
  Synthetic
gcttcgcucccgggaatua

SEQ ID NO: 60450 - DNA, 19 bp, Artificial Sequence
  Synthetic
cccaccagcuccagaguct

SEQ ID NO: 60451 - DNA, 18 bp, Artificial Sequence
  Synthetic
gcaggcgcagguctauga

SEQ ID NO: 60452 - DNA, 17 bp, Artificial Sequence
  Synthetic
agccaccgacacgucuc

SEQ ID NO: 60453 - DNA, 20 bp, Artificial Sequence
  Synthetic
agtucaccccagagcaucac

SEQ ID NO: 60454 - DNA, 22 bp, Artificial Sequence
  Synthetic
ccatggcagcugacaatucaga

SEQ ID NO: 60455 - DNA, 28 bp, Artificial Sequence
  Synthetic
caaagcacttcaaacutactactgcaut

SEQ ID NO: 60456 - DNA, 28 bp, Artificial Sequence
  Synthetic
tcagctaaaucaaaagagctttcctuca

SEQ ID NO: 60457 - DNA, 28 bp, Artificial Sequence
  Synthetic
gccatctguaacaccattgatatttucc

SEQ ID NO: 60458 - DNA, 28 bp, Artificial Sequence
  Synthetic
aaaaatgctcauctcctaagctguaact

SEQ ID NO: 60459 - DNA, 27 bp, Artificial Sequence
  Synthetic
tctgatttgtcucgtttgccagataut

SEQ ID NO: 60460 - DNA, 25 bp, Artificial Sequence
  Synthetic
tgtcaaacaagcucactugaggaat

SEQ ID NO: 60461 - DNA, 21 bp, Artificial Sequence
  Synthetic
ttatcactguccgcttcgcut

SEQ ID NO: 60462 - DNA, 21 bp, Artificial Sequence
  Synthetic
cgagaacccutaatccugcct

SEQ ID NO: 60463 - DNA, 23 bp, Artificial Sequence
  Synthetic
cagagugcagagauaagcaacga

SEQ ID NO: 60464 - DNA, 22 bp, Artificial Sequence
  Synthetic
gggagaggugtttuggaccaac

SEQ ID NO: 60465 - DNA, 26 bp, Artificial Sequence
  Synthetic
gattgagaaagucccttcccagaaut

SEQ ID NO: 60466 - DNA, 22 bp, Artificial Sequence
  Synthetic
cccaggaagauctgtcagucct

SEQ ID NO: 60467 - DNA, 21 bp, Artificial Sequence
  Synthetic
gatgaaccugtacggctucca

SEQ ID NO: 60468 - DNA, 22 bp, Artificial Sequence
  Synthetic
gccatcutcctcacucacaaac

SEQ ID NO: 60469 - DNA, 20 bp, Artificial Sequence
  Synthetic
gccactucgactcctucacc

SEQ ID NO: 60470 - DNA, 20 bp, Artificial Sequence
  Synthetic
cctcacagugaccttgcuct

SEQ ID NO: 60471 - DNA, 20 bp, Artificial Sequence
  Synthetic
cctgactcgcugagccttuc

SEQ ID NO: 60472 - DNA, 20 bp, Artificial Sequence
  Synthetic
cccgtcccugtccttguact

SEQ ID NO: 60473 - DNA, 21 bp, Artificial Sequence
  Synthetic
gccatcctcuctgtgtcccut

SEQ ID NO: 60474 - DNA, 20 bp, Artificial Sequence
  Synthetic
ggcccguctttgtcctugaa

SEQ ID NO: 60475 - DNA, 25 bp, Artificial Sequence
  Synthetic
cagtcaaggagucgtttuggaaaaa

SEQ ID NO: 60476 - DNA, 17 bp, Artificial Sequence
  Synthetic
gcccgcgaccucuacag

SEQ ID NO: 60477 - DNA, 19 bp, Artificial Sequence
  Synthetic
gaggacggcgaaugcatut

SEQ ID NO: 60478 - DNA, 17 bp, Artificial Sequence
  Synthetic
gcccccuctgacugcaa

SEQ ID NO: 60479 - DNA, 17 bp, Artificial Sequence
  Synthetic
cutcucaggccccgact

SEQ ID NO: 60480 - DNA, 18 bp, Artificial Sequence
  Synthetic
cccaucccacctgccaut

SEQ ID NO: 60481 - DNA, 20 bp, Artificial Sequence
  Synthetic
gccaccccaautcctctcuc

SEQ ID NO: 60482 - DNA, 19 bp, Artificial Sequence
  Synthetic
agaagcgaggugggucaga

SEQ ID NO: 60483 - DNA, 20 bp, Artificial Sequence
  Synthetic
cgaaaguccccttccccuga

SEQ ID NO: 60484 - DNA, 24 bp, Artificial Sequence
  Synthetic
caucgatggaaaugaggaagaacc

SEQ ID NO: 60485 - DNA, 24 bp, Artificial Sequence
  Synthetic
tgctactcttcuccttctctccut

SEQ ID NO: 60486 - DNA, 20 bp, Artificial Sequence
  Synthetic
cggtcaucagcguggacaat

SEQ ID NO: 60487 - DNA, 22 bp, Artificial Sequence
  Synthetic
ctgtcctcuccctgtctacucc

SEQ ID NO: 60488 - DNA, 24 bp, Artificial Sequence
  Synthetic
tgtgccatautaggtcttcugggt

SEQ ID NO: 60489 - DNA, 28 bp, Artificial Sequence
  Synthetic
tcttatttctatugggtgtttccaugct

SEQ ID NO: 60490 - DNA, 25 bp, Artificial Sequence
  Synthetic
tgaattccuaagcacaatcugcact

SEQ ID NO: 60491 - DNA, 24 bp, Artificial Sequence
  Synthetic
agaatctctggcutcttggcttuc

SEQ ID NO: 60492 - DNA, 24 bp, Artificial Sequence
  Synthetic
gaatagagauaaggccacguagca

SEQ ID NO: 60493 - DNA, 23 bp, Artificial Sequence
  Synthetic
gatctaugaacggcucaaacacc

SEQ ID NO: 60494 - DNA, 21 bp, Artificial Sequence
  Synthetic
caatgaccaugcaugccacac

SEQ ID NO: 60495 - DNA, 27 bp, Artificial Sequence
  Synthetic
gagaaccccagaauaaacacgtaatuc

SEQ ID NO: 60496 - DNA, 25 bp, Artificial Sequence
  Synthetic
tgtttgctttuccttatccctuggt

SEQ ID NO: 60497 - DNA, 29 bp, Artificial Sequence
  Synthetic
ttgatacatgccugtcttgttaacactua

SEQ ID NO: 60498 - DNA, 29 bp, Artificial Sequence
  Synthetic
ctgacatggtacuaatgaaaactcacuga

SEQ ID NO: 60499 - DNA, 28 bp, Artificial Sequence
  Synthetic
gctcatttcttctutccttccttcctut

SEQ ID NO: 60500 - DNA, 27 bp, Artificial Sequence
  Synthetic
gaacttactgaauagcaccgttctuct

SEQ ID NO: 60501 - DNA, 23 bp, Artificial Sequence
  Synthetic
gucagcgagcattuaacaaaggg

SEQ ID NO: 60502 - DNA, 20 bp, Artificial Sequence
  Synthetic
cccccttuctcctgctucac

SEQ ID NO: 60503 - DNA, 26 bp, Artificial Sequence
  Synthetic
gctattttcugattgggacuaaccac

SEQ ID NO: 60504 - DNA, 27 bp, Artificial Sequence
  Synthetic
gtgatttaguaatggaaaugccacact

SEQ ID NO: 60505 - DNA, 28 bp, Artificial Sequence
  Synthetic
gggaaaaagaaugtgactgtgtguaaga

SEQ ID NO: 60506 - DNA, 26 bp, Artificial Sequence
  Synthetic
cttgaagttaagcaucctgactcugt

SEQ ID NO: 60507 - DNA, 27 bp, Artificial Sequence
  Synthetic
agctttctcaagaugcatacctaccua

SEQ ID NO: 60508 - DNA, 27 bp, Artificial Sequence
  Synthetic
tgcttcttcaaaugctcttgacatgua

SEQ ID NO: 60509 - DNA, 28 bp, Artificial Sequence
  Synthetic
caactcattctcautttgtagtgcauca

SEQ ID NO: 60510 - DNA, 29 bp, Artificial Sequence
  Synthetic
tccttctagatutctcagctgaauacact

SEQ ID NO: 60511 - DNA, 28 bp, Artificial Sequence
  Synthetic
gcaauaaacaccacttucaggaaacaat

SEQ ID NO: 60512 - DNA, 25 bp, Artificial Sequence
  Synthetic
gggaaagtacutgttgcttcuggat

SEQ ID NO: 60513 - DNA, 20 bp, Artificial Sequence
  Synthetic
cggatuccagcccagatcut

SEQ ID NO: 60514 - DNA, 23 bp, Artificial Sequence
  Synthetic
tgctucaacagcccctcattuat

SEQ ID NO: 60515 - DNA, 26 bp, Artificial Sequence
  Synthetic
tgtggaaaagcaucgtgactagtuaa

SEQ ID NO: 60516 - DNA, 28 bp, Artificial Sequence
  Synthetic
gtgcttttccuctttaattaggugacag

SEQ ID NO: 60517 - DNA, 26 bp, Artificial Sequence
  Synthetic
ctttgaggaaacucagggaccaauaa

SEQ ID NO: 60518 - DNA, 20 bp, Artificial Sequence
  Synthetic
gagcagacucacggctucat

SEQ ID NO: 60519 - DNA, 29 bp, Artificial Sequence
  Synthetic
cccacaagctgauctgaacattttagtua

SEQ ID NO: 60520 - DNA, 22 bp, Artificial Sequence
  Synthetic
gcaguggaggaagtggguagaa

SEQ ID NO: 60521 - DNA, 28 bp, Artificial Sequence
  Synthetic
cagatcctccuaactcttcagacuacat

SEQ ID NO: 60522 - DNA, 23 bp, Artificial Sequence
  Synthetic
caggatggttuctggatgctgua

SEQ ID NO: 60523 - DNA, 21 bp, Artificial Sequence
  Synthetic
gcatctugaaccgtccctcug

SEQ ID NO: 60524 - DNA, 22 bp, Artificial Sequence
  Synthetic
cctgaccacuccccaactttuc

SEQ ID NO: 60525 - DNA, 24 bp, Artificial Sequence
  Synthetic
tutttctattgugaccaccccagt

SEQ ID NO: 60526 - DNA, 20 bp, Artificial Sequence
  Synthetic
cctttcugaccagcggaguc

SEQ ID NO: 60527 - DNA, 26 bp, Artificial Sequence
  Synthetic
acacacacucactgattucagaacaa

SEQ ID NO: 60528 - DNA, 27 bp, Artificial Sequence
  Synthetic
cttttgtgattugggatgttccaugat

SEQ ID NO: 60529 - DNA, 28 bp, Artificial Sequence
  Synthetic
tggaatacatctcuctcatgttctcugt

SEQ ID NO: 60530 - DNA, 24 bp, Artificial Sequence
  Synthetic
ggaatctgaugccatgtctacuca

SEQ ID NO: 60531 - DNA, 28 bp, Artificial Sequence
  Synthetic
gagcaacattauaaccattttgccctut

SEQ ID NO: 60532 - DNA, 22 bp, Artificial Sequence
  Synthetic
gtggcuaccaaagcagaactug

SEQ ID NO: 60533 - DNA, 33 bp, Artificial Sequence
  Synthetic
catcaaatccacaaaauactttttatctagcut

SEQ ID NO: 60534 - DNA, 23 bp, Artificial Sequence
  Synthetic
gacctacugaaagagcugcagaa

SEQ ID NO: 60535 - DNA, 22 bp, Artificial Sequence
  Synthetic
ctgcagugttttcctgugaacc

SEQ ID NO: 60536 - DNA, 28 bp, Artificial Sequence
  Synthetic
cagtttgaaacagcagaugatgaagaut

SEQ ID NO: 60537 - DNA, 28 bp, Artificial Sequence
  Synthetic
gctgcaagttucaaattatccagttuct

SEQ ID NO: 60538 - DNA, 26 bp, Artificial Sequence
  Synthetic
atgtctaacatgcuagtttggccaua

SEQ ID NO: 60539 - DNA, 25 bp, Artificial Sequence
  Synthetic
cttgcaactguaggtccttcuagat

SEQ ID NO: 60540 - DNA, 23 bp, Artificial Sequence
  Synthetic
ggtgagcccguaagtagctcuat

SEQ ID NO: 60541 - DNA, 21 bp, Artificial Sequence
  Synthetic
gcagatccagcutccccatua

SEQ ID NO: 60542 - DNA, 29 bp, Artificial Sequence
  Synthetic
aaaagtgattaaaaugcaacccagatuga

SEQ ID NO: 60543 - DNA, 24 bp, Artificial Sequence
  Synthetic
cactgagggacuggtatucacaaa

SEQ ID NO: 60544 - DNA, 18 bp, Artificial Sequence
  Synthetic
ccattttgcuccgccugt

SEQ ID NO: 60545 - DNA, 18 bp, Artificial Sequence
  Synthetic
cgccgggacuagaaguga

SEQ ID NO: 60546 - DNA, 23 bp, Artificial Sequence
  Synthetic
gtcgtctguatggcagtuaagga

SEQ ID NO: 60547 - DNA, 25 bp, Artificial Sequence
  Synthetic
ttttccaggtuggctccataugaaa

SEQ ID NO: 60548 - DNA, 27 bp, Artificial Sequence
  Synthetic
tgaggauattgaagatcuggaggaact

SEQ ID NO: 60549 - DNA, 29 bp, Artificial Sequence
  Synthetic
gccaaagcuccaaatgtataatucagaaa

SEQ ID NO: 60550 - DNA, 27 bp, Artificial Sequence
  Synthetic
ttgatggtaaguacatgggtgtttcut

SEQ ID NO: 60551 - DNA, 29 bp, Artificial Sequence
  Synthetic
tctgcaacttuccatatttcttgaucact

SEQ ID NO: 60552 - DNA, 22 bp, Artificial Sequence
  Synthetic
cagctcttuggaggcaaatgut

SEQ ID NO: 60553 - DNA, 23 bp, Artificial Sequence
  Synthetic
ccctgtauccccaaacacatcuc

SEQ ID NO: 60554 - DNA, 20 bp, Artificial Sequence
  Synthetic
gcaagguagagggcgagtug

SEQ ID NO: 60555 - DNA, 21 bp, Artificial Sequence
  Synthetic
gcctcuccacggtctttauga

SEQ ID NO: 60556 - DNA, 20 bp, Artificial Sequence
  Synthetic
tggtggaagcggaugaacuc

SEQ ID NO: 60557 - DNA, 21 bp, Artificial Sequence
  Synthetic
gctgagacugagacacugacc

SEQ ID NO: 60558 - DNA, 24 bp, Artificial Sequence
  Synthetic
caaacacacaaaccugactcaucc

SEQ ID NO: 60559 - DNA, 26 bp, Artificial Sequence
  Synthetic
ggtctagaacguttgcgtttatctuc

SEQ ID NO: 60560 - DNA, 22 bp, Artificial Sequence
  Synthetic
aggcccugtttggaaugaagaa

SEQ ID NO: 60561 - DNA, 28 bp, Artificial Sequence
  Synthetic
caaacagcaaaugtgttactaacugcat

SEQ ID NO: 60562 - DNA, 20 bp, Artificial Sequence
  Synthetic
agcagcggaaaugtccugaa

SEQ ID NO: 60563 - DNA, 25 bp, Artificial Sequence
  Synthetic
agtaacaacugactcttugcacagt

SEQ ID NO: 60564 - DNA, 24 bp, Artificial Sequence
  Synthetic
ctgttgtccuaccagtctcttugt

SEQ ID NO: 60565 - DNA, 25 bp, Artificial Sequence
  Synthetic
ggattgaagaacutgcaguagcagt

SEQ ID NO: 60566 - DNA, 21 bp, Artificial Sequence
  Synthetic
gttacagcugacggtggaguc

SEQ ID NO: 60567 - DNA, 20 bp, Artificial Sequence
  Synthetic
accagtacucccccagctut

SEQ ID NO: 60568 - DNA, 21 bp, Artificial Sequence
  Synthetic
ccttaccuggttggaggucaa

SEQ ID NO: 60569 - DNA, 24 bp, Artificial Sequence
  Synthetic
gggctagacuagagagtatccauc

SEQ ID NO: 60570 - DNA, 20 bp, Artificial Sequence
  Synthetic
gcgggtcacugtacacctua

SEQ ID NO: 60571 - DNA, 22 bp, Artificial Sequence
  Synthetic
cctctttagccauggcaagguc

SEQ ID NO: 60572 - DNA, 23 bp, Artificial Sequence
  Synthetic
cacuccagaacactguggaagaa

SEQ ID NO: 60573 - DNA, 26 bp, Artificial Sequence
  Synthetic
tgccatttcaugggctaatctucaat

SEQ ID NO: 60574 - DNA, 26 bp, Artificial Sequence
  Synthetic
gtgguctcagaaaauggacaagaaaa

SEQ ID NO: 60575 - DNA, 23 bp, Artificial Sequence
  Synthetic
cattaaggagaugccttgugggt

SEQ ID NO: 60576 - DNA, 21 bp, Artificial Sequence
  Synthetic
ggcacggcuaaaagaagcaut

SEQ ID NO: 60577 - DNA, 22 bp, Artificial Sequence
  Synthetic
cccactgccuacttctactucc

SEQ ID NO: 60578 - DNA, 25 bp, Artificial Sequence
  Synthetic
cgttagcuaggaggtaaggtctugt

SEQ ID NO: 60579 - DNA, 22 bp, Artificial Sequence
  Synthetic
aagcagtugctggaagauggaa

SEQ ID NO: 60580 - DNA, 21 bp, Artificial Sequence
  Synthetic
gcacttgagcaugcactctut

SEQ ID NO: 60581 - DNA, 29 bp, Artificial Sequence
  Synthetic
atcttcgagcccuataactgtaatccaua

SEQ ID NO: 60582 - DNA, 23 bp, Artificial Sequence
  Synthetic
tgtgtcctttuccctctccacua

SEQ ID NO: 60583 - DNA, 27 bp, Artificial Sequence
  Synthetic
cagaattaugggaaagcaaactggaug

SEQ ID NO: 60584 - DNA, 21 bp, Artificial Sequence
  Synthetic
agtttactguggtgccugcat

SEQ ID NO: 60585 - DNA, 23 bp, Artificial Sequence
  Synthetic
cttgggcugaaacaactttccug

SEQ ID NO: 60586 - DNA, 20 bp, Artificial Sequence
  Synthetic
caggcatccucattccgcut

SEQ ID NO: 60587 - DNA, 28 bp, Artificial Sequence
  Synthetic
cccagaacctucccattagattaaacug

SEQ ID NO: 60588 - DNA, 28 bp, Artificial Sequence
  Synthetic
tcactgtcattauttaggtcgtcatugg

SEQ ID NO: 60589 - DNA, 26 bp, Artificial Sequence
  Synthetic
gagctggatatuaatgtagccacugt

SEQ ID NO: 60590 - DNA, 21 bp, Artificial Sequence
  Synthetic
ggctcugcagaatcactgugt

SEQ ID NO: 60591 - DNA, 24 bp, Artificial Sequence
  Synthetic
gggatttgacutttcttcctugcc

SEQ ID NO: 60592 - DNA, 21 bp, Artificial Sequence
  Synthetic
ggatggaggutgctcccagua

SEQ ID NO: 60593 - DNA, 21 bp, Artificial Sequence
  Synthetic
aggagcccagaaauggtgtug

SEQ ID NO: 60594 - DNA, 23 bp, Artificial Sequence
  Synthetic
acttgattccacucaggagcuct

SEQ ID NO: 60595 - DNA, 25 bp, Artificial Sequence
  Synthetic
ggccagtcacuatatccacattguc

SEQ ID NO: 60596 - DNA, 19 bp, Artificial Sequence
  Synthetic
gccagguccttgugaacca

SEQ ID NO: 60597 - DNA, 20 bp, Artificial Sequence
  Synthetic
agccccugagcatgatctuc

SEQ ID NO: 60598 - DNA, 21 bp, Artificial Sequence
  Synthetic
ggcattuggaggacauggaga

SEQ ID NO: 60599 - DNA, 28 bp, Artificial Sequence
  Synthetic
aggctccugaaaggaaaacttgttuaat

SEQ ID NO: 60600 - DNA, 27 bp, Artificial Sequence
  Synthetic
gcggtcttagaautgaggaagaatugt

SEQ ID NO: 60601 - DNA, 28 bp, Artificial Sequence
  Synthetic
tctaggtcccaautctactgcaaauagt

SEQ ID NO: 60602 - DNA, 22 bp, Artificial Sequence
  Synthetic
gcttaggaaugtgggcccuaga

SEQ ID NO: 60603 - DNA, 24 bp, Artificial Sequence
  Synthetic
tcatgguagctgagaagucacaga

SEQ ID NO: 60604 - DNA, 21 bp, Artificial Sequence
  Synthetic
gucattcagcucagcagcaga

SEQ ID NO: 60605 - DNA, 26 bp, Artificial Sequence
  Synthetic
tccacaaattactucctgacctccua

SEQ ID NO: 60606 - DNA, 25 bp, Artificial Sequence
  Synthetic
gtgggagtgugaagaatgattctug

SEQ ID NO: 60607 - DNA, 26 bp, Artificial Sequence
  Synthetic
aggagcugtuaaagaaagcaaaagga

SEQ ID NO: 60608 - DNA, 27 bp, Artificial Sequence
  Synthetic
tccagagacaaagutgcaaaacagaua

SEQ ID NO: 60609 - DNA, 27 bp, Artificial Sequence
  Synthetic
cagaagcctcauatgaagatggctaut

SEQ ID NO: 60610 - DNA, 24 bp, Artificial Sequence
  Synthetic
ctgagctgagutgagtgggattut

SEQ ID NO: 60611 - DNA, 19 bp, Artificial Sequence
  Synthetic
acagcgauggacctcccua

SEQ ID NO: 60612 - DNA, 28 bp, Artificial Sequence
  Synthetic
ctcgggtttcucttttcctattacauga

SEQ ID NO: 60613 - DNA, 32 bp, Artificial Sequence
  Synthetic
ccttagttttcttaguctgtcattaactcugt

SEQ ID NO: 60614 - DNA, 27 bp, Artificial Sequence
  Synthetic
ggttgatggugagaacacaaacuaaaa

SEQ ID NO: 60615 - DNA, 26 bp, Artificial Sequence
  Synthetic
catcatctuctctaaaccugcagacc

SEQ ID NO: 60616 - DNA, 22 bp, Artificial Sequence
  Synthetic
cctgcaccacaauggagtguat

SEQ ID NO: 60617 - DNA, 27 bp, Artificial Sequence
  Synthetic
gaaaaatgtacugaatgaacgagugct

SEQ ID NO: 60618 - DNA, 21 bp, Artificial Sequence
  Synthetic
ctggtcacaccugaatgctuc

SEQ ID NO: 60619 - DNA, 20 bp, Artificial Sequence
  Synthetic
tggaggtuggcatccgagua

SEQ ID NO: 60620 - DNA, 22 bp, Artificial Sequence
  Synthetic
ccttcctgacuggcttcttcug

SEQ ID NO: 60621 - DNA, 22 bp, Artificial Sequence
  Synthetic
ccactccaaaaugccagugagt

SEQ ID NO: 60622 - DNA, 22 bp, Artificial Sequence
  Synthetic
gttaacaagggugcgatgtugt

SEQ ID NO: 60623 - DNA, 23 bp, Artificial Sequence
  Synthetic
ggacatgggutaggaagtgucat

SEQ ID NO: 60624 - DNA, 21 bp, Artificial Sequence
  Synthetic
ccuttgagatcgucaccacca

SEQ ID NO: 60625 - DNA, 22 bp, Artificial Sequence
  Synthetic
acttagccaguggtctcucagt

SEQ ID NO: 60626 - DNA, 24 bp, Artificial Sequence
  Synthetic
gtcttttcctcugactgtgctcut

SEQ ID NO: 60627 - DNA, 20 bp, Artificial Sequence
  Synthetic
aggagagugtgtgctugcag

SEQ ID NO: 60628 - DNA, 24 bp, Artificial Sequence
  Synthetic
aggtatttgaugagagggcagcua

SEQ ID NO: 60629 - DNA, 27 bp, Artificial Sequence
  Synthetic
gaacactguatgaggaaugagcaaaac

SEQ ID NO: 60630 - DNA, 24 bp, Artificial Sequence
  Synthetic
ggagaaauggattgtacugaccct

SEQ ID NO: 60631 - DNA, 23 bp, Artificial Sequence
  Synthetic
ggattttgagcugggtgcttaug

SEQ ID NO: 60632 - DNA, 21 bp, Artificial Sequence
  Synthetic
gagatgcuggttcacaaugcc

SEQ ID NO: 60633 - DNA, 28 bp, Artificial Sequence
  Synthetic
tgggactcagaucattttccttctttut

SEQ ID NO: 60634 - DNA, 20 bp, Artificial Sequence
  Synthetic
caaccccautggcctguact

SEQ ID NO: 60635 - DNA, 22 bp, Artificial Sequence
  Synthetic
cacctguggagagctgtatguc

SEQ ID NO: 60636 - DNA, 28 bp, Artificial Sequence
  Synthetic
gctacaaacaauttctgtgacttucagt

SEQ ID NO: 60637 - DNA, 24 bp, Artificial Sequence
  Synthetic
gggaaacagguttagaauccacct

SEQ ID NO: 60638 - DNA, 18 bp, Artificial Sequence
  Synthetic
cucagccccacaccauct

SEQ ID NO: 60639 - DNA, 18 bp, Artificial Sequence
  Synthetic
cgtcctguccccaaccug

SEQ ID NO: 60640 - DNA, 28 bp, Artificial Sequence
  Synthetic
aggaaccuttaatagaaatuggacagca

SEQ ID NO: 60641 - DNA, 27 bp, Artificial Sequence
  Synthetic
gcccttttgcuaatcatgttcauacct

SEQ ID NO: 60642 - DNA, 20 bp, Artificial Sequence
  Synthetic
ccaaccagagccaucaggug

SEQ ID NO: 60643 - DNA, 18 bp, Artificial Sequence
  Synthetic
aaggaacgggucgugcaa

SEQ ID NO: 60644 - DNA, 25 bp, Artificial Sequence
  Synthetic
gtatttcaaatuacccggtgtggug

SEQ ID NO: 60645 - DNA, 22 bp, Artificial Sequence
  Synthetic
ctcgacguagacacagtgcuaa

SEQ ID NO: 60646 - DNA, 22 bp, Artificial Sequence
  Synthetic
tctctgtucccccagguacaaa

SEQ ID NO: 60647 - DNA, 22 bp, Artificial Sequence
  Synthetic
tttgcutgggaaauccgagaca

SEQ ID NO: 60648 - DNA, 22 bp, Artificial Sequence
  Synthetic
tgaaccaugttugcccaagact

SEQ ID NO: 60649 - DNA, 23 bp, Artificial Sequence
  Synthetic
gcctccctucctcttactctcug

SEQ ID NO: 60650 - DNA, 17 bp, Artificial Sequence
  Synthetic
gcugctguaggcaccca

SEQ ID NO: 60651 - DNA, 17 bp, Artificial Sequence
  Synthetic
gtccgcucccccactuc

SEQ ID NO: 60652 - DNA, 21 bp, Artificial Sequence
  Synthetic
gatctttugggccagccttut

SEQ ID NO: 60653 - DNA, 29 bp, Artificial Sequence
  Synthetic
cacatgtgaaggaauctaaatacgaugat

SEQ ID NO: 60654 - DNA, 20 bp, Artificial Sequence
  Synthetic
gccagcacucatgtcuggat

SEQ ID NO: 60655 - DNA, 25 bp, Artificial Sequence
  Synthetic
caaggacaaauttgactgcuccaac

SEQ ID NO: 60656 - DNA, 22 bp, Artificial Sequence
  Synthetic
gggatggaaucaggctgtauca

SEQ ID NO: 60657 - DNA, 19 bp, Artificial Sequence
  Synthetic
ggtgguggcagaggaguag

SEQ ID NO: 60658 - DNA, 21 bp, Artificial Sequence
  Synthetic
gtgttgccugtaccaggugaa

SEQ ID NO: 60659 - DNA, 21 bp, Artificial Sequence
  Synthetic
caucaagagcccaactuccca

SEQ ID NO: 60660 - DNA, 18 bp, Artificial Sequence
  Synthetic
ccctcccgcutcctacug

SEQ ID NO: 60661 - DNA, 18 bp, Artificial Sequence
  Synthetic
cagctccagugaccgcut

SEQ ID NO: 60662 - DNA, 21 bp, Artificial Sequence
  Synthetic
tgggaaucccugcaacaacag

SEQ ID NO: 60663 - DNA, 21 bp, Artificial Sequence
  Synthetic
gccagcaaguggacaccuaag

SEQ ID NO: 60664 - DNA, 22 bp, Artificial Sequence
  Synthetic
gggaacaccccuaacttuacct

SEQ ID NO: 60665 - DNA, 21 bp, Artificial Sequence
  Synthetic
ggatgccautgccgatgauga

SEQ ID NO: 60666 - DNA, 20 bp, Artificial Sequence
  Synthetic
ccaagaacgacgucatcgug

SEQ ID NO: 60667 - DNA, 23 bp, Artificial Sequence
  Synthetic
cacttcaugcctcttcactucct

SEQ ID NO: 60668 - DNA, 26 bp, Artificial Sequence
  Synthetic
cacactggguatccagaatguaaaga

SEQ ID NO: 60669 - DNA, 20 bp, Artificial Sequence
  Synthetic
aggcatccgcuatcccagua

SEQ ID NO: 60670 - DNA, 31 bp, Artificial Sequence
  Synthetic
agtgcagttttaaaaucctttttctgtaugg

SEQ ID NO: 60671 - DNA, 23 bp, Artificial Sequence
  Synthetic
acagcaucctttgguaacagcat

SEQ ID NO: 60672 - DNA, 28 bp, Artificial Sequence
  Synthetic
ggctacagatugcaacccaattaatauc

SEQ ID NO: 60673 - DNA, 27 bp, Artificial Sequence
  Synthetic
gacttttgtgagcuttctaggttugac

SEQ ID NO: 60674 - DNA, 24 bp, Artificial Sequence
  Synthetic
aaggcaaagcautaggtactuggt

SEQ ID NO: 60675 - DNA, 24 bp, Artificial Sequence
  Synthetic
gacagagaagccaauactggacug

SEQ ID NO: 60676 - DNA, 27 bp, Artificial Sequence
  Synthetic
cccagccugattaggtaaatttugact

SEQ ID NO: 60677 - DNA, 29 bp, Artificial Sequence
  Synthetic
cctccacctccautagatttccattagua

SEQ ID NO: 60678 - DNA, 29 bp, Artificial Sequence
  Synthetic
ctgctaccaagguctatgatatgctuaaa

SEQ ID NO: 60679 - DNA, 28 bp, Artificial Sequence
  Synthetic
gggttggctaugctagataatgatuacc

SEQ ID NO: 60680 - DNA, 25 bp, Artificial Sequence
  Synthetic
caagaaggaagaaggugtguaagca

SEQ ID NO: 60681 - DNA, 29 bp, Artificial Sequence
  Synthetic
atcctaaacguaagaagcaacactcatua

SEQ ID NO: 60682 - DNA, 19 bp, Artificial Sequence
  Synthetic
tgtattugcccgtgucgct

SEQ ID NO: 60683 - DNA, 21 bp, Artificial Sequence
  Synthetic
cctugaggaccccgattctut

SEQ ID NO: 60684 - DNA, 21 bp, Artificial Sequence
  Synthetic
cgacacugtggtcctuagcaa

SEQ ID NO: 60685 - DNA, 23 bp, Artificial Sequence
  Synthetic
ggcagaaaggagaugcagaugag

SEQ ID NO: 60686 - DNA, 27 bp, Artificial Sequence
  Synthetic
tgagctaagucactgactaaaaugcaa

SEQ ID NO: 60687 - DNA, 23 bp, Artificial Sequence
  Synthetic
ccaatctcccaaucccaggtuag

SEQ ID NO: 60688 - DNA, 21 bp, Artificial Sequence
  Synthetic
gcctgtucaaaatcgccauga

SEQ ID NO: 60689 - DNA, 25 bp, Artificial Sequence
  Synthetic
ctgggaaucaaaggtctttcucaga

SEQ ID NO: 60690 - DNA, 21 bp, Artificial Sequence
  Synthetic
agcagacuccctcagaggtut

SEQ ID NO: 60691 - DNA, 23 bp, Artificial Sequence
  Synthetic
ctgtctattuccccatcccaucc

SEQ ID NO: 60692 - DNA, 28 bp, Artificial Sequence
  Synthetic
cccagttacucacctgatcaatgataut

SEQ ID NO: 60693 - DNA, 28 bp, Artificial Sequence
  Synthetic
aatgcccaggtuccaaatagtttaguat

SEQ ID NO: 60694 - DNA, 28 bp, Artificial Sequence
  Synthetic
gaggacagctcucatttcttgactuaaa

SEQ ID NO: 60695 - DNA, 28 bp, Artificial Sequence
  Synthetic
gctgtgattcuaaagcaaaacacattug

SEQ ID NO: 60696 - DNA, 26 bp, Artificial Sequence
  Synthetic
gcccaacagaaaacuggaggaaaaua

SEQ ID NO: 60697 - DNA, 22 bp, Artificial Sequence
  Synthetic
ttcccaagaagaacugguggag

SEQ ID NO: 60698 - DNA, 20 bp, Artificial Sequence
  Synthetic
agggactugagtgtggcauc

SEQ ID NO: 60699 - DNA, 23 bp, Artificial Sequence
  Synthetic
acaatcctggcugatctctcugt

SEQ ID NO: 60700 - DNA, 23 bp, Artificial Sequence
  Synthetic
tggataacuagcccctctgctut

SEQ ID NO: 60701 - DNA, 23 bp, Artificial Sequence
  Synthetic
cctctgcgacgacauaatctgug

SEQ ID NO: 60702 - DNA, 28 bp, Artificial Sequence
  Synthetic
ttttctattcctuagcctatgtgctucc

SEQ ID NO: 60703 - DNA, 26 bp, Artificial Sequence
  Synthetic
accctccaggaugaaatttuaaccat

SEQ ID NO: 60704 - DNA, 26 bp, Artificial Sequence
  Synthetic
gccacagtacutttcaagaaguggaa

SEQ ID NO: 60705 - DNA, 26 bp, Artificial Sequence
  Synthetic
ttgagacaccuattttgtgcctguat

SEQ ID NO: 60706 - DNA, 22 bp, Artificial Sequence
  Synthetic
cttgtagtggcutcctctccuc

SEQ ID NO: 60707 - DNA, 22 bp, Artificial Sequence
  Synthetic
gcctcaccuatgacugccaaaa

SEQ ID NO: 60708 - DNA, 22 bp, Artificial Sequence
  Synthetic
gggtccccaaguccttagcuat

SEQ ID NO: 60709 - DNA, 23 bp, Artificial Sequence
  Synthetic
acgcaatatgutgcctacagucc

SEQ ID NO: 60710 - DNA, 28 bp, Artificial Sequence
  Synthetic
tctgatctctuccagagtaaatgtguca

SEQ ID NO: 60711 - DNA, 28 bp, Artificial Sequence
  Synthetic
gttcccaaaguctctagaauacgacaat

SEQ ID NO: 60712 - DNA, 24 bp, Artificial Sequence
  Synthetic
cttgtggttcuggtaggaagucac

SEQ ID NO: 60713 - DNA, 26 bp, Artificial Sequence
  Synthetic
ggttttatcuggagacaaagggagut

SEQ ID NO: 60714 - DNA, 26 bp, Artificial Sequence
  Synthetic
aggtggtacccautgtaaaggaagua

SEQ ID NO: 60715 - DNA, 28 bp, Artificial Sequence
  Synthetic
ggagagaagaggaaugattucaaagaca

SEQ ID NO: 60716 - DNA, 27 bp, Artificial Sequence
  Synthetic
tcttgattcuggaacagatttgtctut

SEQ ID NO: 60717 - DNA, 26 bp, Artificial Sequence
  Synthetic
gggattccaugattcgatgtucacat

SEQ ID NO: 60718 - DNA, 25 bp, Artificial Sequence
  Synthetic
agtctgacaggutgacatcuacaga

SEQ ID NO: 60719 - DNA, 26 bp, Artificial Sequence
  Synthetic
cgggtcattgcuattttcttctcuga

SEQ ID NO: 60720 - DNA, 20 bp, Artificial Sequence
  Synthetic
gcagctuctccacctuagcc

SEQ ID NO: 60721 - DNA, 26 bp, Artificial Sequence
  Synthetic
gaacctaagtucctggtagctttuca

SEQ ID NO: 60722 - DNA, 24 bp, Artificial Sequence
  Synthetic
gacaacactcuagtctgggaguct

SEQ ID NO: 60723 - DNA, 23 bp, Artificial Sequence
  Synthetic
gatgaatgagaggcuggaggaug

SEQ ID NO: 60724 - DNA, 21 bp, Artificial Sequence
  Synthetic
aagccucagagtctcugggat

SEQ ID NO: 60725 - DNA, 23 bp, Artificial Sequence
  Synthetic
gggcutcactucagaggagaaag

SEQ ID NO: 60726 - DNA, 21 bp, Artificial Sequence
  Synthetic
ccctaggcaucagcgtgtaug

SEQ ID NO: 60727 - DNA, 22 bp, Artificial Sequence
  Synthetic
tctccgacaacgccuatcagua

SEQ ID NO: 60728 - DNA, 26 bp, Artificial Sequence
  Synthetic
tgattgggtuggagactacaaugaac

SEQ ID NO: 60729 - DNA, 28 bp, Artificial Sequence
  Synthetic
tcaaaagtgcaacutcaaggatccuaaa

SEQ ID NO: 60730 - DNA, 30 bp, Artificial Sequence
  Synthetic
ttgaatggaattgcutgaacatgaatctut

SEQ ID NO: 60731 - DNA, 27 bp, Artificial Sequence
  Synthetic
cgtgtcttaaaacaugcctcctcatua

SEQ ID NO: 60732 - DNA, 22 bp, Artificial Sequence
  Synthetic
ccaccagtucacctgccattua

SEQ ID NO: 60733 - DNA, 23 bp, Artificial Sequence
  Synthetic
ccagcatacgaaguggaccttuc

SEQ ID NO: 60734 - DNA, 22 bp, Artificial Sequence
  Synthetic
acagcccaugctttgtggttua

SEQ ID NO: 60735 - DNA, 22 bp, Artificial Sequence
  Synthetic
ccgccaucatcattctcugcaa

SEQ ID NO: 60736 - DNA, 26 bp, Artificial Sequence
  Synthetic
cagcaaatatucctgtatggtuccct

SEQ ID NO: 60737 - DNA, 24 bp, Artificial Sequence
  Synthetic
cgtctacgcgcugatcatattuga

SEQ ID NO: 60738 - DNA, 20 bp, Artificial Sequence
  Synthetic
ctgaccccugtgaaccagut

SEQ ID NO: 60739 - DNA, 24 bp, Artificial Sequence
  Synthetic
agcagutaauccaggagagaagga

SEQ ID NO: 60740 - DNA, 25 bp, Artificial Sequence
  Synthetic
ccaccacaaauaaacatgcagcaut

SEQ ID NO: 60741 - DNA, 29 bp, Artificial Sequence
  Synthetic
tgttttgactttguttgactcatgtgaut

SEQ ID NO: 60742 - DNA, 23 bp, Artificial Sequence
  Synthetic
agaaagttcugacaatgccguca

SEQ ID NO: 60743 - DNA, 22 bp, Artificial Sequence
  Synthetic
cctatcctcccaucccacctut

SEQ ID NO: 60744 - DNA, 26 bp, Artificial Sequence
  Synthetic
ggaagagtcucctaacaagacaguga

SEQ ID NO: 60745 - DNA, 21 bp, Artificial Sequence
  Synthetic
caacaccgutggcaacuacac

SEQ ID NO: 60746 - DNA, 24 bp, Artificial Sequence
  Synthetic
agagtttuaaaggacgtccccuct

SEQ ID NO: 60747 - DNA, 27 bp, Artificial Sequence
  Synthetic
gctcataaacttautttgccccacaut

SEQ ID NO: 60748 - DNA, 23 bp, Artificial Sequence
  Synthetic
ggagtgtgugtctgtaccugaag

SEQ ID NO: 60749 - DNA, 22 bp, Artificial Sequence
  Synthetic
atgtgaagtgutcccaggagug

SEQ ID NO: 60750 - DNA, 26 bp, Artificial Sequence
  Synthetic
aagtataaagugtccattugcccagt

SEQ ID NO: 60751 - DNA, 26 bp, Artificial Sequence
  Synthetic
ctgatattugcccaaatggaatcugt

SEQ ID NO: 60752 - DNA, 23 bp, Artificial Sequence
  Synthetic
cattcaggaaguagccaugcaga

SEQ ID NO: 60753 - DNA, 23 bp, Artificial Sequence
  Synthetic
gcgtctcagcuctctccttatut

SEQ ID NO: 60754 - DNA, 25 bp, Artificial Sequence
  Synthetic
tuccaagtatttugggcagaacaga

SEQ ID NO: 60755 - DNA, 22 bp, Artificial Sequence
  Synthetic
gtcagatagcuccttcctgugg

SEQ ID NO: 60756 - DNA, 17 bp, Artificial Sequence
  Synthetic
gcugcgactuccggact

SEQ ID NO: 60757 - DNA, 18 bp, Artificial Sequence
  Synthetic
tgcaggcuccggatctuc

SEQ ID NO: 60758 - DNA, 24 bp, Artificial Sequence
  Synthetic
ccatccctcucctttttctcucct

SEQ ID NO: 60759 - DNA, 24 bp, Artificial Sequence
  Synthetic
ggcctctttugagcagctctuaaa

SEQ ID NO: 60760 - DNA, 22 bp, Artificial Sequence
  Synthetic
ggaggagaaauggugcgagaag

SEQ ID NO: 60761 - DNA, 21 bp, Artificial Sequence
  Synthetic
tctccctcutcccatcuccag

SEQ ID NO: 60762 - DNA, 19 bp, Artificial Sequence
  Synthetic
cctccaatucggagcgcut

SEQ ID NO: 60763 - DNA, 21 bp, Artificial Sequence
  Synthetic
gctaaggauggacgcaaggut

SEQ ID NO: 60764 - DNA, 25 bp, Artificial Sequence
  Synthetic
acagtcucagagaggaguaaacact

SEQ ID NO: 60765 - DNA, 27 bp, Artificial Sequence
  Synthetic
gggacatctccucattgaaagatttut

SEQ ID NO: 60766 - DNA, 17 bp, Artificial Sequence
  Synthetic
cgcuccacggctttcug

SEQ ID NO: 60767 - DNA, 17 bp, Artificial Sequence
  Synthetic
ctcgguggacaccgcua

SEQ ID NO: 60768 - DNA, 22 bp, Artificial Sequence
  Synthetic
caaagcagagccucagatgcua

SEQ ID NO: 60769 - DNA, 22 bp, Artificial Sequence
  Synthetic
ctttauagcgcagggacucagg

SEQ ID NO: 60770 - DNA, 21 bp, Artificial Sequence
  Synthetic
cggcacucctggagaacuact

SEQ ID NO: 60771 - DNA, 21 bp, Artificial Sequence
  Synthetic
ctgggagagucctcacaaugg

SEQ ID NO: 60772 - DNA, 18 bp, Artificial Sequence
  Synthetic
acctugcgggcttctucc

SEQ ID NO: 60773 - DNA, 19 bp, Artificial Sequence
  Synthetic
aggcuacaggcctccauca

SEQ ID NO: 60774 - DNA, 20 bp, Artificial Sequence
  Synthetic
agacagaccugugagaggca

SEQ ID NO: 60775 - DNA, 24 bp, Artificial Sequence
  Synthetic
ggatgaatucacagcctaccaugt

SEQ ID NO: 60776 - DNA, 18 bp, Artificial Sequence
  Synthetic
gtcaacgugggccuccaa

SEQ ID NO: 60777 - DNA, 17 bp, Artificial Sequence
  Synthetic
agggccgagcacuccua

SEQ ID NO: 60778 - DNA, 19 bp, Artificial Sequence
  Synthetic
ggcugagtcatuggcagca

SEQ ID NO: 60779 - DNA, 17 bp, Artificial Sequence
  Synthetic
cctggcuggtggcaugt

SEQ ID NO: 60780 - DNA, 22 bp, Artificial Sequence
  Synthetic
aaggtccagucgaagagguagt

SEQ ID NO: 60781 - DNA, 19 bp, Artificial Sequence
  Synthetic
aggcaacaguggagcaugt

SEQ ID NO: 60782 - DNA, 19 bp, Artificial Sequence
  Synthetic
cacgucaaagcugcaggag

SEQ ID NO: 60783 - DNA, 17 bp, Artificial Sequence
  Synthetic
cgccaacgccucgucat

SEQ ID NO: 60784 - DNA, 23 bp, Artificial Sequence
  Synthetic
agagaagtugagaggacccauga

SEQ ID NO: 60785 - DNA, 22 bp, Artificial Sequence
  Synthetic
tctttgcauccctttugcagga

SEQ ID NO: 60786 - DNA, 22 bp, Artificial Sequence
  Synthetic
ggatagcaggauggtgggatug

SEQ ID NO: 60787 - DNA, 21 bp, Artificial Sequence
  Synthetic
ctgaagaagauccgggagcug

SEQ ID NO: 60788 - DNA, 27 bp, Artificial Sequence
  Synthetic
cgttaagtcacuaatcctctccucaag

SEQ ID NO: 60789 - DNA, 31 bp, Artificial Sequence
  Synthetic
aactctagttguattttgttataatgugggt

SEQ ID NO: 60790 - DNA, 21 bp, Artificial Sequence
  Synthetic
ggccaaccaucctcctcctua

SEQ ID NO: 60791 - DNA, 23 bp, Artificial Sequence
  Synthetic
ctcagttuacccatgaccctucc

SEQ ID NO: 60792 - DNA, 24 bp, Artificial Sequence
  Synthetic
cggaatccccaaguagttagtgut

SEQ ID NO: 60793 - DNA, 20 bp, Artificial Sequence
  Synthetic
ccaaccacagcaccuaccuc

SEQ ID NO: 60794 - DNA, 20 bp, Artificial Sequence
  Synthetic
ctgttugagcggatgugcat

SEQ ID NO: 60795 - DNA, 28 bp, Artificial Sequence
  Synthetic
aaattcaaagctacguctacaccagaut

SEQ ID NO: 60796 - DNA, 21 bp, Artificial Sequence
  Synthetic
ttttctugccgtagucagcca

SEQ ID NO: 60797 - DNA, 24 bp, Artificial Sequence
  Synthetic
acctaccccacucttccaaatcut

SEQ ID NO: 60798 - DNA, 23 bp, Artificial Sequence
  Synthetic
ccttcucacctccauacaaccat

SEQ ID NO: 60799 - DNA, 22 bp, Artificial Sequence
  Synthetic
cttguaccgctacauacagcca

SEQ ID NO: 60800 - DNA, 24 bp, Artificial Sequence
  Synthetic
cagcaggaaccuatctacccuact

SEQ ID NO: 60801 - DNA, 23 bp, Artificial Sequence
  Synthetic
ggaggcuaatttcatguccacct

SEQ ID NO: 60802 - DNA, 20 bp, Artificial Sequence
  Synthetic
ccttggtggugagcgtttuc

SEQ ID NO: 60803 - DNA, 24 bp, Artificial Sequence
  Synthetic
tgactcttacuctccatgtuccca

SEQ ID NO: 60804 - DNA, 21 bp, Artificial Sequence
  Synthetic
ctccgacaugtagtccgguag

SEQ ID NO: 60805 - DNA, 22 bp, Artificial Sequence
  Synthetic
cgggcctguggttagtgaatut

SEQ ID NO: 60806 - DNA, 26 bp, Artificial Sequence
  Synthetic
agugcaaatgugaaacaagaaaggag

SEQ ID NO: 60807 - DNA, 24 bp, Artificial Sequence
  Synthetic
ctgatgcatucaaagcccugaaaa

SEQ ID NO: 60808 - DNA, 22 bp, Artificial Sequence
  Synthetic
aggtgggucatgataacugggt

SEQ ID NO: 60809 - DNA, 27 bp, Artificial Sequence
  Synthetic
ggcacuccaaaatctaatgtucagaga

SEQ ID NO: 60810 - DNA, 21 bp, Artificial Sequence
  Synthetic
actggaaaccacugcatccug

SEQ ID NO: 60811 - DNA, 24 bp, Artificial Sequence
  Synthetic
caccgtguaagatgtaagcuggaa

SEQ ID NO: 60812 - DNA, 20 bp, Artificial Sequence
  Synthetic
cctugacaccgccatctcut

SEQ ID NO: 60813 - DNA, 22 bp, Artificial Sequence
  Synthetic
tgcttgatcuctgggaaugcag

SEQ ID NO: 60814 - DNA, 17 bp, Artificial Sequence
  Synthetic
cccaggcucuggcagaa

SEQ ID NO: 60815 - DNA, 18 bp, Artificial Sequence
  Synthetic
gtgggcutattgcuccgc

SEQ ID NO: 60816 - DNA, 22 bp, Artificial Sequence
  Synthetic
ccaattaugctgtgccugggaa

SEQ ID NO: 60817 - DNA, 22 bp, Artificial Sequence
  Synthetic
cctgccagagcucagaauaacc

SEQ ID NO: 60818 - DNA, 24 bp, Artificial Sequence
  Synthetic
tttgcacaccccacutcttttcua

SEQ ID NO: 60819 - DNA, 20 bp, Artificial Sequence
  Synthetic
tcatgcaugcccacgatcuc

SEQ ID NO: 60820 - DNA, 21 bp, Artificial Sequence
  Synthetic
cugacgcacacctatugcaag

SEQ ID NO: 60821 - DNA, 22 bp, Artificial Sequence
  Synthetic
tcatctctccuccctgcttcug

SEQ ID NO: 60822 - DNA, 21 bp, Artificial Sequence
  Synthetic
atctggaccugggtctucagt

SEQ ID NO: 60823 - DNA, 24 bp, Artificial Sequence
  Synthetic
gacttccugaaaacaacgttcugg

SEQ ID NO: 60824 - DNA, 28 bp, Artificial Sequence
  Synthetic
ggaaatcaauacatctgccttucgagaa

SEQ ID NO: 60825 - DNA, 25 bp, Artificial Sequence
  Synthetic
cgttcttuaacagccataaggtguc

SEQ ID NO: 60826 - DNA, 20 bp, Artificial Sequence
  Synthetic
acagttugcccggcataucc

SEQ ID NO: 60827 - DNA, 22 bp, Artificial Sequence
  Synthetic
ggtccauagtgaagcucacacc

SEQ ID NO: 60828 - DNA, 21 bp, Artificial Sequence
  Synthetic
ccttggcaggcutattgugct

SEQ ID NO: 60829 - DNA, 27 bp, Artificial Sequence
  Synthetic
gtgtagtagttgaauggcacgttttuc

SEQ ID NO: 60830 - DNA, 20 bp, Artificial Sequence
  Synthetic
ggttcuccccacccttcuga

SEQ ID NO: 60831 - DNA, 27 bp, Artificial Sequence
  Synthetic
aggacttttaggagugtctcctttuct

SEQ ID NO: 60832 - DNA, 21 bp, Artificial Sequence
  Synthetic
gtgtcaagaaccucgtgucca

SEQ ID NO: 60833 - DNA, 20 bp, Artificial Sequence
  Synthetic
gcctggutgcaguagaggaa

SEQ ID NO: 60834 - DNA, 18 bp, Artificial Sequence
  Synthetic
ggagtccgucatccugct

SEQ ID NO: 60835 - DNA, 19 bp, Artificial Sequence
  Synthetic
gcaggctugttgggctuct

SEQ ID NO: 60836 - DNA, 18 bp, Artificial Sequence
  Synthetic
gagccugcacuccacaga

SEQ ID NO: 60837 - DNA, 17 bp, Artificial Sequence
  Synthetic
gucgaagcggcugacca

SEQ ID NO: 60838 - DNA, 22 bp, Artificial Sequence
  Synthetic
acuctaucccccaacacaccaa

SEQ ID NO: 60839 - DNA, 23 bp, Artificial Sequence
  Synthetic
aaccaacacugcatacctuccaa

SEQ ID NO: 60840 - DNA, 27 bp, Artificial Sequence
  Synthetic
gcattccaatauaatccatcccugcaa

SEQ ID NO: 60841 - DNA, 19 bp, Artificial Sequence
  Synthetic
agugagggcggaacaggua

SEQ ID NO: 60842 - DNA, 21 bp, Artificial Sequence
  Synthetic
cacccctugccattgtcauct

SEQ ID NO: 60843 - DNA, 22 bp, Artificial Sequence
  Synthetic
gttcagccuctacugggaaacc

SEQ ID NO: 60844 - DNA, 23 bp, Artificial Sequence
  Synthetic
cacaaccaacuactgtgguccaa

SEQ ID NO: 60845 - DNA, 23 bp, Artificial Sequence
  Synthetic
cctggctttucctttcctctcug

SEQ ID NO: 60846 - DNA, 19 bp, Artificial Sequence
  Synthetic
cccccuggagttcacgtut

SEQ ID NO: 60847 - DNA, 19 bp, Artificial Sequence
  Synthetic
cagcaggcugctttucaga

SEQ ID NO: 60848 - DNA, 21 bp, Artificial Sequence
  Synthetic
tggcgtgucactcatccttut

SEQ ID NO: 60849 - DNA, 26 bp, Artificial Sequence
  Synthetic
cutcctaataatucaagccacagcac

SEQ ID NO: 60850 - DNA, 23 bp, Artificial Sequence
  Synthetic
gctgggatugaagggaagaggua

SEQ ID NO: 60851 - DNA, 28 bp, Artificial Sequence
  Synthetic
acttgtcttcuaacccatctttttccut

SEQ ID NO: 60852 - DNA, 21 bp, Artificial Sequence
  Synthetic
gggtaguccaggcccttcaua

SEQ ID NO: 60853 - DNA, 27 bp, Artificial Sequence
  Synthetic
tctctgaatccuaagaagaagctcuca

SEQ ID NO: 60854 - DNA, 17 bp, Artificial Sequence
  Synthetic
ccccgcgccutccuaag

SEQ ID NO: 60855 - DNA, 20 bp, Artificial Sequence
  Synthetic
ctgctcgucggtcatctuca

SEQ ID NO: 60856 - DNA, 22 bp, Artificial Sequence
  Synthetic
cccttgtugattttctcgugct

SEQ ID NO: 60857 - DNA, 23 bp, Artificial Sequence
  Synthetic
gaaggtctcgaugttggagauga

SEQ ID NO: 60858 - DNA, 22 bp, Artificial Sequence
  Synthetic
gtggcaatuaagccctgtugac

SEQ ID NO: 60859 - DNA, 19 bp, Artificial Sequence
  Synthetic
cctgtgcagguggctcauc

SEQ ID NO: 60860 - DNA, 22 bp, Artificial Sequence
  Synthetic
acaugaccuccaacaagaccac

SEQ ID NO: 60861 - DNA, 19 bp, Artificial Sequence
  Synthetic
ggacggcutgccctcauat

SEQ ID NO: 60862 - DNA, 21 bp, Artificial Sequence
  Synthetic
ggagagacaaaaccuggcuca

SEQ ID NO: 60863 - DNA, 26 bp, Artificial Sequence
  Synthetic
ctgcaccgguttttattcaucaacat

SEQ ID NO: 60864 - DNA, 21 bp, Artificial Sequence
  Synthetic
ctcaactcuccgcctgtgaut

SEQ ID NO: 60865 - DNA, 20 bp, Artificial Sequence
  Synthetic
cacaacguccaggtacugct

SEQ ID NO: 60866 - DNA, 20 bp, Artificial Sequence
  Synthetic
cgtccacuaagagugaggct

SEQ ID NO: 60867 - DNA, 20 bp, Artificial Sequence
  Synthetic
acaatccacaugccgucgaa

SEQ ID NO: 60868 - DNA, 20 bp, Artificial Sequence
  Synthetic
gcuacctgucggcagaagag

SEQ ID NO: 60869 - DNA, 17 bp, Artificial Sequence
  Synthetic
caggugcacgguccaca

SEQ ID NO: 60870 - DNA, 23 bp, Artificial Sequence
  Synthetic
ggagcuagggacaaacugagact

SEQ ID NO: 60871 - DNA, 23 bp, Artificial Sequence
  Synthetic
acactatctucaacctcggtgug

SEQ ID NO: 60872 - DNA, 23 bp, Artificial Sequence
  Synthetic
gccacagacaauagagcagtcut

SEQ ID NO: 60873 - DNA, 28 bp, Artificial Sequence
  Synthetic
cagttgttttatguatttcagtgggcut

SEQ ID NO: 60874 - DNA, 22 bp, Artificial Sequence
  Synthetic
gccactggcuttcagagactua

SEQ ID NO: 60875 - DNA, 27 bp, Artificial Sequence
  Synthetic
gcccaagactaugtcctgacatauaac

SEQ ID NO: 60876 - DNA, 27 bp, Artificial Sequence
  Synthetic
gcautcttgaucgagaagaaacaccat

SEQ ID NO: 60877 - DNA, 26 bp, Artificial Sequence
  Synthetic
tctacattgttucctcttgcauccaa

SEQ ID NO: 60878 - DNA, 26 bp, Artificial Sequence
  Synthetic
gctagatgaccgcutcttagatgaut

SEQ ID NO: 60879 - DNA, 24 bp, Artificial Sequence
  Synthetic
actgccagaggaguaggtattcuc

SEQ ID NO: 60880 - DNA, 20 bp, Artificial Sequence
  Synthetic
gggaauggcggtcaatgugt

SEQ ID NO: 60881 - DNA, 28 bp, Artificial Sequence
  Synthetic
atcacattccacaugacagactguaaat

SEQ ID NO: 60882 - DNA, 19 bp, Artificial Sequence
  Synthetic
gcatctuccacgagcggut

SEQ ID NO: 60883 - DNA, 25 bp, Artificial Sequence
  Synthetic
gaggtaggagcutgagaccttatug

SEQ ID NO: 60884 - DNA, 21 bp, Artificial Sequence
  Synthetic
gcatucgaggccattgugaaa

SEQ ID NO: 60885 - DNA, 22 bp, Artificial Sequence
  Synthetic
gtttccacaaggucaggaguca

SEQ ID NO: 60886 - DNA, 19 bp, Artificial Sequence
  Synthetic
gtgacgtugcggcagtuag

SEQ ID NO: 60887 - DNA, 20 bp, Artificial Sequence
  Synthetic
cttctccucgtgcugcaagt

SEQ ID NO: 60888 - DNA, 21 bp, Artificial Sequence
  Synthetic
acagactgucccccauaacct

SEQ ID NO: 60889 - DNA, 19 bp, Artificial Sequence
  Synthetic
cccctcccgucgatacucc

SEQ ID NO: 60890 - DNA, 21 bp, Artificial Sequence
  Synthetic
atgggtcuggtctctgacuga

SEQ ID NO: 60891 - DNA, 23 bp, Artificial Sequence
  Synthetic
gtgaccagugactccatactucc

SEQ ID NO: 60892 - DNA, 20 bp, Artificial Sequence
  Synthetic
ccccucctcaauagggcaac

SEQ ID NO: 60893 - DNA, 22 bp, Artificial Sequence
  Synthetic
tcagggtcucacatgcatcuct

SEQ ID NO: 60894 - DNA, 20 bp, Artificial Sequence
  Synthetic
cctguggagaccctcaagug

SEQ ID NO: 60895 - DNA, 24 bp, Artificial Sequence
  Synthetic
ttgaggguttcttggauaggagga

SEQ ID NO: 60896 - DNA, 22 bp, Artificial Sequence
  Synthetic
tgcatggaucctgacugaagac

SEQ ID NO: 60897 - DNA, 25 bp, Artificial Sequence
  Synthetic
gcatttctauaccccttgatgugga

SEQ ID NO: 60898 - DNA, 21 bp, Artificial Sequence
  Synthetic
aaagccuggacttgcctucat

SEQ ID NO: 60899 - DNA, 23 bp, Artificial Sequence
  Synthetic
ggaggagugaggttaggaugagt

SEQ ID NO: 60900 - DNA, 21 bp, Artificial Sequence
  Synthetic
ctctgatcccuctggcccuaa

SEQ ID NO: 60901 - DNA, 18 bp, Artificial Sequence
  Synthetic
gcctgtgauggcctggug

SEQ ID NO: 60902 - DNA, 23 bp, Artificial Sequence
  Synthetic
caagttttuagggaacgctgcug

SEQ ID NO: 60903 - DNA, 21 bp, Artificial Sequence
  Synthetic
cttggcgauggtcttgacuga

SEQ ID NO: 60904 - DNA, 22 bp, Artificial Sequence
  Synthetic
acctctguctgtctgtcucaca

SEQ ID NO: 60905 - DNA, 18 bp, Artificial Sequence
  Synthetic
tccctgcugagggtcucc

SEQ ID NO: 60906 - DNA, 21 bp, Artificial Sequence
  Synthetic
gactugggtgaatucgcgaaa

SEQ ID NO: 60907 - DNA, 22 bp, Artificial Sequence
  Synthetic
gctgcagacacucatcgatgua

SEQ ID NO: 60908 - DNA, 21 bp, Artificial Sequence
  Synthetic
ggaagggucccagagauagca

SEQ ID NO: 60909 - DNA, 21 bp, Artificial Sequence
  Synthetic
gccgattguctccccttugat

SEQ ID NO: 60910 - DNA, 22 bp, Artificial Sequence
  Synthetic
gacaggccuggtcctagtcaua

SEQ ID NO: 60911 - DNA, 23 bp, Artificial Sequence
  Synthetic
ggtccaccacucactgttttgut

SEQ ID NO: 60912 - DNA, 29 bp, Artificial Sequence
  Synthetic
ggtgatcagccutttattggtacttacug

SEQ ID NO: 60913 - DNA, 28 bp, Artificial Sequence
  Synthetic
cccaggagtgguaggtctcataatuaaa

SEQ ID NO: 60914 - DNA, 28 bp, Artificial Sequence
  Synthetic
gggaaaatguagccaacatauacaaaga

SEQ ID NO: 60915 - DNA, 28 bp, Artificial Sequence
  Synthetic
cagtcagatgtcauactcaccaagaaua

SEQ ID NO: 60916 - DNA, 25 bp, Artificial Sequence
  Synthetic
cactgtttaaugcaggacgaaugaa

SEQ ID NO: 60917 - DNA, 31 bp, Artificial Sequence
  Synthetic
ctagtcatttctgugttatggacattaguct

SEQ ID NO: 60918 - DNA, 22 bp, Artificial Sequence
  Synthetic
tgtgcactgugtctcctgacua

SEQ ID NO: 60919 - DNA, 22 bp, Artificial Sequence
  Synthetic
cttgaagagacgcuggtcauct

SEQ ID NO: 60920 - DNA, 22 bp, Artificial Sequence
  Synthetic
ccugcaatccatugggaggaaa

SEQ ID NO: 60921 - DNA, 22 bp, Artificial Sequence
  Synthetic
cccaacatcgugctgatcttug

SEQ ID NO: 60922 - DNA, 21 bp, Artificial Sequence
  Synthetic
gcatgcaacauggcaagtugt

SEQ ID NO: 60923 - DNA, 26 bp, Artificial Sequence
  Synthetic
aacaccatacauagttccttctgtuc

SEQ ID NO: 60924 - DNA, 18 bp, Artificial Sequence
  Synthetic
ggcagcagaaggucccua

SEQ ID NO: 60925 - DNA, 18 bp, Artificial Sequence
  Synthetic
ccgagccuggctctacug

SEQ ID NO: 60926 - DNA, 24 bp, Artificial Sequence
  Synthetic
gcugagugggaaaaaggaagagaa

SEQ ID NO: 60927 - DNA, 22 bp, Artificial Sequence
  Synthetic
gcctttgaccgugacttttcug

SEQ ID NO: 60928 - DNA, 28 bp, Artificial Sequence
  Synthetic
agtaggacaccaagacuccatataucac

SEQ ID NO: 60929 - DNA, 29 bp, Artificial Sequence
  Synthetic
ggtaaccatgttcugttgaaattttccut

SEQ ID NO: 60930 - DNA, 28 bp, Artificial Sequence
  Synthetic
ggcggatgaattuctcttctatacagut

SEQ ID NO: 60931 - DNA, 33 bp, Artificial Sequence
  Synthetic
taaaattatcagtgaauccatttttgataggug

SEQ ID NO: 60932 - DNA, 25 bp, Artificial Sequence
  Synthetic
aaaagcacacacucatgactuacct

SEQ ID NO: 60933 - DNA, 27 bp, Artificial Sequence
  Synthetic
cctgtttgctccucttacgtttatcuc

SEQ ID NO: 60934 - DNA, 27 bp, Artificial Sequence
  Synthetic
tgtaactgtgacuccagctgtttatug

SEQ ID NO: 60935 - DNA, 25 bp, Artificial Sequence
  Synthetic
agaauatgaccgtcuaaagcagcag

SEQ ID NO: 60936 - DNA, 29 bp, Artificial Sequence
  Synthetic
ttttattgaaactugtcatgcatctugct

SEQ ID NO: 60937 - DNA, 25 bp, Artificial Sequence
  Synthetic
caacgcugaagaaccctgatacuaa

SEQ ID NO: 60938 - DNA, 28 bp, Artificial Sequence
  Synthetic
ttaccattggttutatcatggtccugaa

SEQ ID NO: 60939 - DNA, 28 bp, Artificial Sequence
  Synthetic
agttgaaggaaugcctagtaattuggat

SEQ ID NO: 60940 - DNA, 27 bp, Artificial Sequence
  Synthetic
tctacttcattuagccacttgttugct

SEQ ID NO: 60941 - DNA, 26 bp, Artificial Sequence
  Synthetic
gctgcatttugaattacctgcuacaa

SEQ ID NO: 60942 - DNA, 25 bp, Artificial Sequence
  Synthetic
actatttgcaatguccatccagguc

SEQ ID NO: 60943 - DNA, 25 bp, Artificial Sequence
  Synthetic
gcagtacaccuggtgttaggagtua

SEQ ID NO: 60944 - DNA, 26 bp, Artificial Sequence
  Synthetic
ccagttgtggutctcttcatctttuc

SEQ ID NO: 60945 - DNA, 23 bp, Artificial Sequence
  Synthetic
ccccaccaguaccaaaatuccaa

SEQ ID NO: 60946 - DNA, 24 bp, Artificial Sequence
  Synthetic
ccacttttccuccttaggctucac

SEQ ID NO: 60947 - DNA, 28 bp, Artificial Sequence
  Synthetic
gacttccctcucagacatattattgcuc

SEQ ID NO: 60948 - DNA, 24 bp, Artificial Sequence
  Synthetic
gacattgacccuagttccagtgut

SEQ ID NO: 60949 - DNA, 20 bp, Artificial Sequence
  Synthetic
cttccccucacagggcauag

SEQ ID NO: 60950 - DNA, 22 bp, Artificial Sequence
  Synthetic
tctgtcccauagggcaggatut

SEQ ID NO: 60951 - DNA, 24 bp, Artificial Sequence
  Synthetic
ggaagttcttcugttcctcctguc

SEQ ID NO: 60952 - DNA, 21 bp, Artificial Sequence
  Synthetic
accctgtgucctctgtctgut

SEQ ID NO: 60953 - DNA, 20 bp, Artificial Sequence
  Synthetic
cttgguccactcccuaagcc

SEQ ID NO: 60954 - DNA, 21 bp, Artificial Sequence
  Synthetic
cctgagactucccatcccugt

SEQ ID NO: 60955 - DNA, 22 bp, Artificial Sequence
  Synthetic
gatggaaucgaagccagcaauc

SEQ ID NO: 60956 - DNA, 21 bp, Artificial Sequence
  Synthetic
gcctgggautgtgagacuagg

SEQ ID NO: 60957 - DNA, 27 bp, Artificial Sequence
  Synthetic
cgggtaggatcuacaagagtaggatug

SEQ ID NO: 60958 - DNA, 28 bp, Artificial Sequence
  Synthetic
agatggagagcaauaagcttggtattuc

SEQ ID NO: 60959 - DNA, 28 bp, Artificial Sequence
  Synthetic
ggccaaccacaaaaauatccactaatuc

SEQ ID NO: 60960 - DNA, 29 bp, Artificial Sequence
  Synthetic
ctcagtggctautttgttccttttatugt

SEQ ID NO: 60961 - DNA, 27 bp, Artificial Sequence
  Synthetic
cactccaaaccuttaaagatcctggua

SEQ ID NO: 60962 - DNA, 23 bp, Artificial Sequence
  Synthetic
tctggaaaggugatguggaggat

SEQ ID NO: 60963 - DNA, 24 bp, Artificial Sequence
  Synthetic
tcactgttacuttcagcagtuccc

SEQ ID NO: 60964 - DNA, 22 bp, Artificial Sequence
  Synthetic
actcgtccutctcgaaaugcaa

SEQ ID NO: 60965 - DNA, 30 bp, Artificial Sequence
  Synthetic
aaatattttctttguacagctgctgtatuc

SEQ ID NO: 60966 - DNA, 25 bp, Artificial Sequence
  Synthetic
gaatgtgtgcagcuatcagtcttug

SEQ ID NO: 60967 - DNA, 27 bp, Artificial Sequence
  Synthetic
cctcatctggcutcagagaaggtauat

SEQ ID NO: 60968 - DNA, 25 bp, Artificial Sequence
  Synthetic
ggagaaaaagguggacaggaaguag

SEQ ID NO: 60969 - DNA, 21 bp, Artificial Sequence
  Synthetic
tgggtaaaggaguggcctgua

SEQ ID NO: 60970 - DNA, 33 bp, Artificial Sequence
  Synthetic
gaacaatgaguagtaataaatagugagacacaa

SEQ ID NO: 60971 - DNA, 21 bp, Artificial Sequence
  Synthetic
gacctggtguccctggaaauc

SEQ ID NO: 60972 - DNA, 26 bp, Artificial Sequence
  Synthetic
ctattttgaugggcttttucacacct

SEQ ID NO: 60973 - DNA, 28 bp, Artificial Sequence
  Synthetic
acaguaagaaaaggaauccacaccaaat

SEQ ID NO: 60974 - DNA, 21 bp, Artificial Sequence
  Synthetic
agtgccttucctttggtggut

SEQ ID NO: 60975 - DNA, 28 bp, Artificial Sequence
  Synthetic
aggtgggaaagauaagaaaaugagaagg

SEQ ID NO: 60976 - DNA, 20 bp, Artificial Sequence
  Synthetic
gccagtggccuactcaacua

SEQ ID NO: 60977 - DNA, 23 bp, Artificial Sequence
  Synthetic
atttggauccattgguccaggag

SEQ ID NO: 60978 - DNA, 22 bp, Artificial Sequence
  Synthetic
gggtaaaggtugtagccctgut

SEQ ID NO: 60979 - DNA, 27 bp, Artificial Sequence
  Synthetic
tctggcugaaagacagaatgaaaacut

SEQ ID NO: 60980 - DNA, 27 bp, Artificial Sequence
  Synthetic
tccataagagtggaucagagcttacut

SEQ ID NO: 60981 - DNA, 24 bp, Artificial Sequence
  Synthetic
gctgtggcgugtaataagaaaucc

SEQ ID NO: 60982 - DNA, 25 bp, Artificial Sequence
  Synthetic
aggctgaacccutagatcaaaggua

SEQ ID NO: 60983 - DNA, 26 bp, Artificial Sequence
  Synthetic
gccaacttucccatttttgatgtuga

SEQ ID NO: 60984 - DNA, 25 bp, Artificial Sequence
  Synthetic
cttgtgaggccagaauatatgcuca

SEQ ID NO: 60985 - DNA, 21 bp, Artificial Sequence
  Synthetic
gcggaucccacattgcuacat

SEQ ID NO: 60986 - DNA, 21 bp, Artificial Sequence
  Synthetic
cagucagugcaccaggaagaa

SEQ ID NO: 60987 - DNA, 28 bp, Artificial Sequence
  Synthetic
ggtagacttgcauttcaaatccttcuct

SEQ ID NO: 60988 - DNA, 21 bp, Artificial Sequence
  Synthetic
cacttgucccaagaggccaut

SEQ ID NO: 60989 - DNA, 28 bp, Artificial Sequence
  Synthetic
tgagtagatatccuaaaaggcagauggt

SEQ ID NO: 60990 - DNA, 23 bp, Artificial Sequence
  Synthetic
tgutactgaaguggaagggacca

SEQ ID NO: 60991 - DNA, 27 bp, Artificial Sequence
  Synthetic
gaggcccugttaattttcaatuccaat

SEQ ID NO: 60992 - DNA, 22 bp, Artificial Sequence
  Synthetic
gtagactgtuccttcacgcuga

SEQ ID NO: 60993 - DNA, 28 bp, Artificial Sequence
  Synthetic
gttcatcacauaccagacaatagcauct

SEQ ID NO: 60994 - DNA, 21 bp, Artificial Sequence
  Synthetic
tcaggttgtgugtccgaagut

SEQ ID NO: 60995 - DNA, 20 bp, Artificial Sequence
  Synthetic
ggctacgugctctccuacca

SEQ ID NO: 60996 - DNA, 20 bp, Artificial Sequence
  Synthetic
ggagggucggtgctugaaag

SEQ ID NO: 60997 - DNA, 23 bp, Artificial Sequence
  Synthetic
cgcaggtacutcatagaggaugg

SEQ ID NO: 60998 - DNA, 20 bp, Artificial Sequence
  Synthetic
tctgaguggttgucggaggt

SEQ ID NO: 60999 - DNA, 24 bp, Artificial Sequence
  Synthetic
tctccggauctactggaugaacag

SEQ ID NO: 61000 - DNA, 21 bp, Artificial Sequence
  Synthetic
gactgutccgtgaugacaggt

SEQ ID NO: 61001 - DNA, 24 bp, Artificial Sequence
  Synthetic
tctcccucttttcatgucccacaa

SEQ ID NO: 61002 - DNA, 21 bp, Artificial Sequence
  Synthetic
tggcacagtutggcacagtua

SEQ ID NO: 61003 - DNA, 21 bp, Artificial Sequence
  Synthetic
ctguagaccagcuccaacagg

SEQ ID NO: 61004 - DNA, 21 bp, Artificial Sequence
  Synthetic
ggcaugccagaatagcttugt

SEQ ID NO: 61005 - DNA, 21 bp, Artificial Sequence
  Synthetic
gcuaccacctcaugggaagag

SEQ ID NO: 61006 - DNA, 22 bp, Artificial Sequence
  Synthetic
ggtgaautcgaagguagcgagt

SEQ ID NO: 61007 - DNA, 28 bp, Artificial Sequence
  Synthetic
cctgtcagacaaccaauaaatgctauct

SEQ ID NO: 61008 - DNA, 24 bp, Artificial Sequence
  Synthetic
aagagcacaaacaagcucauacct

SEQ ID NO: 61009 - DNA, 22 bp, Artificial Sequence
  Synthetic
gcaugggcagcaaugaaaacat

SEQ ID NO: 61010 - DNA, 27 bp, Artificial Sequence
  Synthetic
ttgtaattccacugtccttaacucacc

SEQ ID NO: 61011 - DNA, 24 bp, Artificial Sequence
  Synthetic
tgtccctcagutcaagaaagtugt

SEQ ID NO: 61012 - DNA, 24 bp, Artificial Sequence
  Synthetic
gcctagugctcaguaagaaaaggt

SEQ ID NO: 61013 - DNA, 24 bp, Artificial Sequence
  Synthetic
gacgtaggacucaaagagatggut

SEQ ID NO: 61014 - DNA, 27 bp, Artificial Sequence
  Synthetic
gatttagccucaaagctgtagcattut

SEQ ID NO: 61015 - DNA, 22 bp, Artificial Sequence
  Synthetic
actcacatugatggcccaucat

SEQ ID NO: 61016 - DNA, 22 bp, Artificial Sequence
  Synthetic
ggaacttuaacccccucaacga

SEQ ID NO: 61017 - DNA, 20 bp, Artificial Sequence
  Synthetic
gttctgcugggagtgcauca

SEQ ID NO: 61018 - DNA, 20 bp, Artificial Sequence
  Synthetic
aggtgcagcagugagaugac

SEQ ID NO: 61019 - DNA, 21 bp, Artificial Sequence
  Synthetic
ttctaacgugctctgugccaa

SEQ ID NO: 61020 - DNA, 22 bp, Artificial Sequence
  Synthetic
gcaaccaggagagcautccuaa

SEQ ID NO: 61021 - DNA, 20 bp, Artificial Sequence
  Synthetic
gtgggcagcuctaggaaguc

SEQ ID NO: 61022 - DNA, 23 bp, Artificial Sequence
  Synthetic
ggccugaagggaattttgaugga

SEQ ID NO: 61023 - DNA, 21 bp, Artificial Sequence
  Synthetic
gcctccgcauctgatcttugg

SEQ ID NO: 61024 - DNA, 22 bp, Artificial Sequence
  Synthetic
ggagauggtgttcugggaaaga

SEQ ID NO: 61025 - DNA, 27 bp, Artificial Sequence
  Synthetic
gtgctgatcaauatcactccatuaggg

SEQ ID NO: 61026 - DNA, 22 bp, Artificial Sequence
  Synthetic
ggauccagacccaggcaauaac

SEQ ID NO: 61027 - DNA, 21 bp, Artificial Sequence
  Synthetic
gcccagtucccagtgucaaaa

SEQ ID NO: 61028 - DNA, 21 bp, Artificial Sequence
  Synthetic
gctgtgguggcttacactgua

SEQ ID NO: 61029 - DNA, 22 bp, Artificial Sequence
  Synthetic
gttagtgcagcguctcagaugt

SEQ ID NO: 61030 - DNA, 22 bp, Artificial Sequence
  Synthetic
tcugcaaatggucccagaacaa

SEQ ID NO: 61031 - DNA, 21 bp, Artificial Sequence
  Synthetic
ctgaagaacugcttuggcaca

SEQ ID NO: 61032 - DNA, 21 bp, Artificial Sequence
  Synthetic
gagggtgcgaucagtgatgut

SEQ ID NO: 61033 - DNA, 27 bp, Artificial Sequence
  Synthetic
gcagagcagugactgtatttcttctuc

SEQ ID NO: 61034 - DNA, 22 bp, Artificial Sequence
  Synthetic
actcccaccccaagaucttuct

SEQ ID NO: 61035 - DNA, 26 bp, Artificial Sequence
  Synthetic
gcaccactgaacuttctctcttttug

SEQ ID NO: 61036 - DNA, 23 bp, Artificial Sequence
  Synthetic
aacaggaccaacutcaaauccga

SEQ ID NO: 61037 - DNA, 23 bp, Artificial Sequence
  Synthetic
cuccacucagaagcccaagaaaa

SEQ ID NO: 61038 - DNA, 20 bp, Artificial Sequence
  Synthetic
aaccaatugggccagctgua

SEQ ID NO: 61039 - DNA, 25 bp, Artificial Sequence
  Synthetic
gtggattcaacugtttctcttuggg

SEQ ID NO: 61040 - DNA, 31 bp, Artificial Sequence
  Synthetic
tgtaaagaaattttaaugaccaggtagcugt

SEQ ID NO: 61041 - DNA, 27 bp, Artificial Sequence
  Synthetic
gccagtgacucaggataagaattucat

SEQ ID NO: 61042 - DNA, 22 bp, Artificial Sequence
  Synthetic
gggtgcccaauatcttgcagut

SEQ ID NO: 61043 - DNA, 27 bp, Artificial Sequence
  Synthetic
ccagctggaagugtaacttttgtuact

SEQ ID NO: 61044 - DNA, 21 bp, Artificial Sequence
  Synthetic
cugaggacauccacagggaat

SEQ ID NO: 61045 - DNA, 22 bp, Artificial Sequence
  Synthetic
gctatgagaguacacgcagugg

SEQ ID NO: 61046 - DNA, 23 bp, Artificial Sequence
  Synthetic
ctcctgctugttctttcttuggt

SEQ ID NO: 61047 - DNA, 22 bp, Artificial Sequence
  Synthetic
tttcucaaccccacagatgcuc

SEQ ID NO: 61048 - DNA, 27 bp, Artificial Sequence
  Synthetic
tcccatcaatttugttcttcagccaua

SEQ ID NO: 61049 - DNA, 25 bp, Artificial Sequence
  Synthetic
gagctcatcgutaaatacaggcuct

SEQ ID NO: 61050 - DNA, 26 bp, Artificial Sequence
  Synthetic
ggcttttcagcauttatgatgtguga

SEQ ID NO: 61051 - DNA, 24 bp, Artificial Sequence
  Synthetic
catcaaggatutcagctcagugac

SEQ ID NO: 61052 - DNA, 21 bp, Artificial Sequence
  Synthetic
cccacagugagttgtccauca

SEQ ID NO: 61053 - DNA, 26 bp, Artificial Sequence
  Synthetic
tgtgaaatacucacagcaacttccut

SEQ ID NO: 61054 - DNA, 29 bp, Artificial Sequence
  Synthetic
aagtcacaggaucaaagctaaaaggauag

SEQ ID NO: 61055 - DNA, 23 bp, Artificial Sequence
  Synthetic
aattcagcugggcatacctguag

SEQ ID NO: 61056 - DNA, 21 bp, Artificial Sequence
  Synthetic
gtaggagccagcugagaguct

SEQ ID NO: 61057 - DNA, 26 bp, Artificial Sequence
  Synthetic
aagttatcccttutgcttctgtccut

SEQ ID NO: 61058 - DNA, 29 bp, Artificial Sequence
  Synthetic
ttggagcaguacgcattcttaaataacua

SEQ ID NO: 61059 - DNA, 25 bp, Artificial Sequence
  Synthetic
tttcaaggaagutgtggagtuagca

SEQ ID NO: 61060 - DNA, 23 bp, Artificial Sequence
  Synthetic
attgatgcctuccctgtggaaut

SEQ ID NO: 61061 - DNA, 28 bp, Artificial Sequence
  Synthetic
tcacaaaagccuaccctatgtatgtcua

SEQ ID NO: 61062 - DNA, 24 bp, Artificial Sequence
  Synthetic
attaaatgccautggatguccagt

SEQ ID NO: 61063 - DNA, 25 bp, Artificial Sequence
  Synthetic
tgatauaccaacacccacaatucgt

SEQ ID NO: 61064 - DNA, 26 bp, Artificial Sequence
  Synthetic
tggcccttcuaaagttttcaaugaca

SEQ ID NO: 61065 - DNA, 21 bp, Artificial Sequence
  Synthetic
ctuaaccacacagccaucgac

SEQ ID NO: 61066 - DNA, 22 bp, Artificial Sequence
  Synthetic
acttaacacugcggaagucaca

SEQ ID NO: 61067 - DNA, 28 bp, Artificial Sequence
  Synthetic
cctgtatcgucacactgattctaagtut

SEQ ID NO: 61068 - DNA, 27 bp, Artificial Sequence
  Synthetic
tgggtctacauagaatatcccagugaa

SEQ ID NO: 61069 - DNA, 28 bp, Artificial Sequence
  Synthetic
gctcaaagcgaagcaugtacttatttua

SEQ ID NO: 61070 - DNA, 20 bp, Artificial Sequence
  Synthetic
agttugtcctgcucccgaag

SEQ ID NO: 61071 - DNA, 28 bp, Artificial Sequence
  Synthetic
actgccaaggutatattttcacacugat

SEQ ID NO: 61072 - DNA, 25 bp, Artificial Sequence
  Synthetic
cactttgagccagugacaaattgut

SEQ ID NO: 61073 - DNA, 27 bp, Artificial Sequence
  Synthetic
ccgtcttactcuacaatgctattggua

SEQ ID NO: 61074 - DNA, 20 bp, Artificial Sequence
  Synthetic
gggcgtuaggatgcagauca

SEQ ID NO: 61075 - DNA, 22 bp, Artificial Sequence
  Synthetic
gaaaguttccatcgugccaacc

SEQ ID NO: 61076 - DNA, 22 bp, Artificial Sequence
  Synthetic
ctaggctgtaaugcctccacug

SEQ ID NO: 61077 - DNA, 23 bp, Artificial Sequence
  Synthetic
ttgatgaacacuagggccaugag

SEQ ID NO: 61078 - DNA, 20 bp, Artificial Sequence
  Synthetic
ggaaggtguccggccuaaag

SEQ ID NO: 61079 - DNA, 28 bp, Artificial Sequence
  Synthetic
cctgtaacucagcaaacacaatttucat

SEQ ID NO: 61080 - DNA, 23 bp, Artificial Sequence
  Synthetic
gtctcttagaugtgcctacugct

SEQ ID NO: 61081 - DNA, 27 bp, Artificial Sequence
  Synthetic
gttgtatcggaaacgutgattgtctug

SEQ ID NO: 61082 - DNA, 20 bp, Artificial Sequence
  Synthetic
ggagacagcauggcccttua

SEQ ID NO: 61083 - DNA, 29 bp, Artificial Sequence
  Synthetic
tctcccttctaaautttgtgactctucag

SEQ ID NO: 61084 - DNA, 23 bp, Artificial Sequence
  Synthetic
gcctagccutctgctuaaacact

SEQ ID NO: 61085 - DNA, 28 bp, Artificial Sequence
  Synthetic
cggagattcaugctacaaacaaaaagut

SEQ ID NO: 61086 - DNA, 25 bp, Artificial Sequence
  Synthetic
gggcuaggaaaatatacaucccagt

SEQ ID NO: 61087 - DNA, 22 bp, Artificial Sequence
  Synthetic
ccaucaccaccatugacacaag

SEQ ID NO: 61088 - DNA, 28 bp, Artificial Sequence
  Synthetic
ctggttcgtcaguatagagttgaagtut

SEQ ID NO: 61089 - DNA, 28 bp, Artificial Sequence
  Synthetic
ttgctattaaagugtctcaaaccatuct

SEQ ID NO: 61090 - DNA, 19 bp, Artificial Sequence
  Synthetic
tgtcccccacguctcauct

SEQ ID NO: 61091 - DNA, 17 bp, Artificial Sequence
  Synthetic
caggccaacgugggcua

SEQ ID NO: 61092 - DNA, 23 bp, Artificial Sequence
  Synthetic
cgggaucaaaagaaagcgaagug

SEQ ID NO: 61093 - DNA, 22 bp, Artificial Sequence
  Synthetic
aacuacagatucccccacagga

SEQ ID NO: 61094 - DNA, 23 bp, Artificial Sequence
  Synthetic
gaactgtgcccaauccacattut

SEQ ID NO: 61095 - DNA, 23 bp, Artificial Sequence
  Synthetic
ggagaacacuttgactgcugaga

SEQ ID NO: 61096 - DNA, 23 bp, Artificial Sequence
  Synthetic
agatgttuagagcaccacugacc

SEQ ID NO: 61097 - DNA, 27 bp, Artificial Sequence
  Synthetic
tcatcaccagcuatttttcttccacut

SEQ ID NO: 61098 - DNA, 26 bp, Artificial Sequence
  Synthetic
caaaggcutcugacaaaggaaaaagt

SEQ ID NO: 61099 - DNA, 28 bp, Artificial Sequence
  Synthetic
tgcctttgagaguctttaccaagauaaa

SEQ ID NO: 61100 - DNA, 21 bp, Artificial Sequence
  Synthetic
acaggaaacguagccatuccc

SEQ ID NO: 61101 - DNA, 24 bp, Artificial Sequence
  Synthetic
aattcctucccatcttuccaccaa

SEQ ID NO: 61102 - DNA, 23 bp, Artificial Sequence
  Synthetic
caaaggcauggatugcacaaaga

SEQ ID NO: 61103 - DNA, 25 bp, Artificial Sequence
  Synthetic
ctaagaguttttctagcugcagcct

SEQ ID NO: 61104 - DNA, 21 bp, Artificial Sequence
  Synthetic
gctgcagucacagcugaaaag

SEQ ID NO: 61105 - DNA, 28 bp, Artificial Sequence
  Synthetic
cagaagaattggcutgatttttggaaug

SEQ ID NO: 61106 - DNA, 24 bp, Artificial Sequence
  Synthetic
ggacaucaucaaagcaaagagcag

SEQ ID NO: 61107 - DNA, 28 bp, Artificial Sequence
  Synthetic
ctgtttagagucatcatttcagguagca

SEQ ID NO: 61108 - DNA, 26 bp, Artificial Sequence
  Synthetic
aaggcttgatutgtcactaggucaaa

SEQ ID NO: 61109 - DNA, 22 bp, Artificial Sequence
  Synthetic
ccacaaaagccaautccucgac

SEQ ID NO: 61110 - DNA, 24 bp, Artificial Sequence
  Synthetic
cctctgttguaaccgtttgcatut

SEQ ID NO: 61111 - DNA, 29 bp, Artificial Sequence
  Synthetic
gtgattttccugggctccttttatcuaat

SEQ ID NO: 61112 - DNA, 24 bp, Artificial Sequence
  Synthetic
cctgttgguaaaggtttucccagt

SEQ ID NO: 61113 - DNA, 28 bp, Artificial Sequence
  Synthetic
cctgaagacacuctcacctataatgtuc

SEQ ID NO: 61114 - DNA, 29 bp, Artificial Sequence
  Synthetic
aatctgataaugattgtgaaucaccagga

SEQ ID NO: 61115 - DNA, 21 bp, Artificial Sequence
  Synthetic
tgaggaccaguagggcaugat

SEQ ID NO: 61116 - DNA, 19 bp, Artificial Sequence
  Synthetic
ggaccagccggugctaaug

SEQ ID NO: 61117 - DNA, 23 bp, Artificial Sequence
  Synthetic
cacagggaggautcgacuaacaa

SEQ ID NO: 61118 - DNA, 31 bp, Artificial Sequence
  Synthetic
gtataggatgagaaacutacacattgcuact

SEQ ID NO: 61119 - DNA, 20 bp, Artificial Sequence
  Synthetic
cccauccttgccuggagaac

SEQ ID NO: 61120 - DNA, 28 bp, Artificial Sequence
  Synthetic
ctgaaataccagcaugcattatuggaat

SEQ ID NO: 61121 - DNA, 23 bp, Artificial Sequence
  Synthetic
tgctacaggauttcctggttcug

SEQ ID NO: 61122 - DNA, 24 bp, Artificial Sequence
  Synthetic
gttctcctcttuccccaggattuc

SEQ ID NO: 61123 - DNA, 26 bp, Artificial Sequence
  Synthetic
aatttttccgcaguagaagccattuc

SEQ ID NO: 61124 - DNA, 21 bp, Artificial Sequence
  Synthetic
gaaauccggcaccucaaggat

SEQ ID NO: 61125 - DNA, 25 bp, Artificial Sequence
  Synthetic
tgaggtaaucagtaatcucgagcct

SEQ ID NO: 61126 - DNA, 22 bp, Artificial Sequence
  Synthetic
ccaaggucacagctaagtcugg

SEQ ID NO: 61127 - DNA, 20 bp, Artificial Sequence
  Synthetic
aacctgugggcaaacacuca

SEQ ID NO: 61128 - DNA, 22 bp, Artificial Sequence
  Synthetic
ggagtactucctgctcaagucc

SEQ ID NO: 61129 - DNA, 22 bp, Artificial Sequence
  Synthetic
acagaugggcugaaaaccaaga

SEQ ID NO: 61130 - DNA, 25 bp, Artificial Sequence
  Synthetic
atcgcttaauggactagaaggctut

SEQ ID NO: 61131 - DNA, 25 bp, Artificial Sequence
  Synthetic
ggagaccaaguttcagatgtuccag

SEQ ID NO: 61132 - DNA, 22 bp, Artificial Sequence
  Synthetic
ggctgaaggugaggcttaauag

SEQ ID NO: 61133 - DNA, 24 bp, Artificial Sequence
  Synthetic
agttgaccagcuttccttttcugt

SEQ ID NO: 61134 - DNA, 18 bp, Artificial Sequence
  Synthetic
ctggaguccacgcggaut

SEQ ID NO: 61135 - DNA, 21 bp, Artificial Sequence
  Synthetic
ggcgaaauggaccuagaggac

SEQ ID NO: 61136 - DNA, 22 bp, Artificial Sequence
  Synthetic
cctgcaggaggugtttcauaga

SEQ ID NO: 61137 - DNA, 21 bp, Artificial Sequence
  Synthetic
gctggaagggcugagatgaug

SEQ ID NO: 61138 - DNA, 28 bp, Artificial Sequence
  Synthetic
tttaagaccautgaagagtuggagaagg

SEQ ID NO: 61139 - DNA, 27 bp, Artificial Sequence
  Synthetic
agtcctgagaauaggaatgauggacat

SEQ ID NO: 61140 - DNA, 23 bp, Artificial Sequence
  Synthetic
gggagauggttaaauccacaaca

SEQ ID NO: 61141 - DNA, 25 bp, Artificial Sequence
  Synthetic
ccctgccacuagaaatatctgtcut

SEQ ID NO: 61142 - DNA, 21 bp, Artificial Sequence
  Synthetic
caagtucgcacctggaucact

SEQ ID NO: 61143 - DNA, 22 bp, Artificial Sequence
  Synthetic
tctgtgaagaagcuggctgaug

SEQ ID NO: 61144 - DNA, 22 bp, Artificial Sequence
  Synthetic
cccctccucctgtgtgtgtaua

SEQ ID NO: 61145 - DNA, 25 bp, Artificial Sequence
  Synthetic
ccagtgaacugtcaatgaaactucc

SEQ ID NO: 61146 - DNA, 21 bp, Artificial Sequence
  Synthetic
gggctguccaggguagaagaa

SEQ ID NO: 61147 - DNA, 24 bp, Artificial Sequence
  Synthetic
acaaaaggcuttgatucggaagga

SEQ ID NO: 61148 - DNA, 20 bp, Artificial Sequence
  Synthetic
ctccctaccccucaacggua

SEQ ID NO: 61149 - DNA, 20 bp, Artificial Sequence
  Synthetic
gggagtugacaggcagtuca

SEQ ID NO: 61150 - DNA, 28 bp, Artificial Sequence
  Synthetic
tttccttttctugggaagtctaaccaut

SEQ ID NO: 61151 - DNA, 28 bp, Artificial Sequence
  Synthetic
ggacacaggtcuagtaaatgatagccua

SEQ ID NO: 61152 - DNA, 27 bp, Artificial Sequence
  Synthetic
tgttatcagaucagatccagactguga

SEQ ID NO: 61153 - DNA, 29 bp, Artificial Sequence
  Synthetic
cagagtccataaaugcaagcagaaaatua

SEQ ID NO: 61154 - DNA, 19 bp, Artificial Sequence
  Synthetic
acuggagcagcagcttcut

SEQ ID NO: 61155 - DNA, 18 bp, Artificial Sequence
  Synthetic
gggcaaugccaagccuga

SEQ ID NO: 61156 - DNA, 24 bp, Artificial Sequence
  Synthetic
atgcagacgtutatgatcccctut

SEQ ID NO: 61157 - DNA, 28 bp, Artificial Sequence
  Synthetic
gaacatgtagaugacaaaagactcgtug

SEQ ID NO: 61158 - DNA, 27 bp, Artificial Sequence
  Synthetic
atcttatttgugacgcaagcattgtut

SEQ ID NO: 61159 - DNA, 25 bp, Artificial Sequence
  Synthetic
gttaagcgtacucgagaaatgctuc

SEQ ID NO: 61160 - DNA, 25 bp, Artificial Sequence
  Synthetic
agtcaatgcucatttggtgauggaa

SEQ ID NO: 61161 - DNA, 19 bp, Artificial Sequence
  Synthetic
gcaagggagcgugagacug

SEQ ID NO: 61162 - DNA, 17 bp, Artificial Sequence
  Synthetic
gcgcgcutccaggucaa

SEQ ID NO: 61163 - DNA, 17 bp, Artificial Sequence
  Synthetic
cgcggcuggaggaagug

SEQ ID NO: 61164 - DNA, 20 bp, Artificial Sequence
  Synthetic
cgagttugcacactcauggt

SEQ ID NO: 61165 - DNA, 23 bp, Artificial Sequence
  Synthetic
ctcctcaccuttcagcatctuca

SEQ ID NO: 61166 - DNA, 20 bp, Artificial Sequence
  Synthetic
gccaccuccagaaactguga

SEQ ID NO: 61167 - DNA, 19 bp, Artificial Sequence
  Synthetic
acaaagaguccgggcaugg

SEQ ID NO: 61168 - DNA, 18 bp, Artificial Sequence
  Synthetic
cccgcagugcataggtuc

SEQ ID NO: 61169 - DNA, 19 bp, Artificial Sequence
  Synthetic
ggaggucagacagctucca

SEQ ID NO: 61170 - DNA, 25 bp, Artificial Sequence
  Synthetic
actgcttataaguttgcactgcuct

SEQ ID NO: 61171 - DNA, 25 bp, Artificial Sequence
  Synthetic
tgtggaaaaacugatctgugaacct

SEQ ID NO: 61172 - DNA, 25 bp, Artificial Sequence
  Synthetic
tggctgtattcaugtgttgttgtug

SEQ ID NO: 61173 - DNA, 29 bp, Artificial Sequence
  Synthetic
cgaatttccaatauctcttccaccacaua

SEQ ID NO: 61174 - DNA, 27 bp, Artificial Sequence
  Synthetic
acctgtttggcuttgctattatgtuct

SEQ ID NO: 61175 - DNA, 28 bp, Artificial Sequence
  Synthetic
tgagaagcagugacaactctgatuaaat

SEQ ID NO: 61176 - DNA, 23 bp, Artificial Sequence
  Synthetic
atgtctctgugttgagggugaac

SEQ ID NO: 61177 - DNA, 27 bp, Artificial Sequence
  Synthetic
gtaccaaatcaaauccggttctccuaa

SEQ ID NO: 61178 - DNA, 24 bp, Artificial Sequence
  Synthetic
gtgaagcgcuatactgactgucat

SEQ ID NO: 61179 - DNA, 28 bp, Artificial Sequence
  Synthetic
tttaagaaagccautggtgttcctttut

SEQ ID NO: 61180 - DNA, 28 bp, Artificial Sequence
  Synthetic
aaataatcctgcutcttcctctgatugt

SEQ ID NO: 61181 - DNA, 27 bp, Artificial Sequence
  Synthetic
gcacatacttcuggctgacatcaatua

SEQ ID NO: 61182 - DNA, 24 bp, Artificial Sequence
  Synthetic
gttttgctggcacutctgttcaut

SEQ ID NO: 61183 - DNA, 23 bp, Artificial Sequence
  Synthetic
ccaatcagatugctgtcctgtut

SEQ ID NO: 61184 - DNA, 23 bp, Artificial Sequence
  Synthetic
gccaagtccuctgaaagaauccc

SEQ ID NO: 61185 - DNA, 21 bp, Artificial Sequence
  Synthetic
gagctctccaugagcgatguc

SEQ ID NO: 61186 - DNA, 21 bp, Artificial Sequence
  Synthetic
ggccgaggaacutgagtuaga

SEQ ID NO: 61187 - DNA, 25 bp, Artificial Sequence
  Synthetic
gtgtcagccuatccactaattugga

SEQ ID NO: 61188 - DNA, 27 bp, Artificial Sequence
  Synthetic
ttggagaagugacttcctttcttugaa

SEQ ID NO: 61189 - DNA, 24 bp, Artificial Sequence
  Synthetic
tgttgaaaaccugggtcacatuct

SEQ ID NO: 61190 - DNA, 21 bp, Artificial Sequence
  Synthetic
cttcatagccgutcggctuct

SEQ ID NO: 61191 - DNA, 28 bp, Artificial Sequence
  Synthetic
ccaaacaaguttagatgaguagagcaca

SEQ ID NO: 61192 - DNA, 21 bp, Artificial Sequence
  Synthetic
cccgacucacatactcgucca

SEQ ID NO: 61193 - DNA, 20 bp, Artificial Sequence
  Synthetic
ggagugcguccgaaaagaac

SEQ ID NO: 61194 - DNA, 21 bp, Artificial Sequence
  Synthetic
gggacacuccccacatgtuac

SEQ ID NO: 61195 - DNA, 28 bp, Artificial Sequence
  Synthetic
gctctaaagtggaaauttcaccaagtuc

SEQ ID NO: 61196 - DNA, 24 bp, Artificial Sequence
  Synthetic
gagaagcagagcacaauaugaagg

SEQ ID NO: 61197 - DNA, 25 bp, Artificial Sequence
  Synthetic
ctgaatttgcaugcctgtacttcut

SEQ ID NO: 61198 - DNA, 22 bp, Artificial Sequence
  Synthetic
tggcctcugagcaccttttauc

SEQ ID NO: 61199 - DNA, 29 bp, Artificial Sequence
  Synthetic
tgttccatatuacagatctctcgtgucat

SEQ ID NO: 61200 - DNA, 21 bp, Artificial Sequence
  Synthetic
agaaagcugctccucacacag

SEQ ID NO: 61201 - DNA, 26 bp, Artificial Sequence
  Synthetic
tgcatcattcauccttgggctttaut

SEQ ID NO: 61202 - DNA, 26 bp, Artificial Sequence
  Synthetic
ctctcttgcagaaaugatggactcut

SEQ ID NO: 61203 - DNA, 28 bp, Artificial Sequence
  Synthetic
gtaggacacaucactagagtaacugagt

SEQ ID NO: 61204 - DNA, 24 bp, Artificial Sequence
  Synthetic
cattgagccagaacacuagctgua

SEQ ID NO: 61205 - DNA, 25 bp, Artificial Sequence
  Synthetic
ctactcatcccugaggaaacaucac

SEQ ID NO: 61206 - DNA, 28 bp, Artificial Sequence
  Synthetic
ggtaatatatauaaggtgcgtgcttuga

SEQ ID NO: 61207 - DNA, 29 bp, Artificial Sequence
  Synthetic
cgctctaauaaatcaatctguccagaaga

SEQ ID NO: 61208 - DNA, 27 bp, Artificial Sequence
  Synthetic
agaatgatttgacauaaccctgagcut

SEQ ID NO: 61209 - DNA, 27 bp, Artificial Sequence
  Synthetic
aagaaaggcaauttactaacctcugct

SEQ ID NO: 61210 - DNA, 25 bp, Artificial Sequence
  Synthetic
ctgtagatggugcacttgcatttut

SEQ ID NO: 61211 - DNA, 24 bp, Artificial Sequence
  Synthetic
cctgtggtccucatttgtagcuat

SEQ ID NO: 61212 - DNA, 25 bp, Artificial Sequence
  Synthetic
gaagaagtgucagccattcauacct

SEQ ID NO: 61213 - DNA, 29 bp, Artificial Sequence
  Synthetic
gaacatgtcctatutgaattttccgacut

SEQ ID NO: 61214 - DNA, 22 bp, Artificial Sequence
  Synthetic
ctcuggaaggcaaagtcctuca

SEQ ID NO: 61215 - DNA, 25 bp, Artificial Sequence
  Synthetic
gaaacacatucctgctguccaaaat

SEQ ID NO: 61216 - DNA, 22 bp, Artificial Sequence
  Synthetic
ccaggttcutccagatgcugat

SEQ ID NO: 61217 - DNA, 28 bp, Artificial Sequence
  Synthetic
gcctctttctcutggttttcatttgaut

SEQ ID NO: 61218 - DNA, 22 bp, Artificial Sequence
  Synthetic
ccttcaagcaaacaugcctuca

SEQ ID NO: 61219 - DNA, 23 bp, Artificial Sequence
  Synthetic
ctgtttgaccutcactagggcut

SEQ ID NO: 61220 - DNA, 19 bp, Artificial Sequence
  Synthetic
gcagcagcgaggagucauc

SEQ ID NO: 61221 - DNA, 23 bp, Artificial Sequence
  Synthetic
agtgggagaacaaguccugagaa

SEQ ID NO: 61222 - DNA, 21 bp, Artificial Sequence
  Synthetic
cuagtgauggaggccccaaaa

SEQ ID NO: 61223 - DNA, 28 bp, Artificial Sequence
  Synthetic
tttgttgatacacugtaggatccaacuc

SEQ ID NO: 61224 - DNA, 19 bp, Artificial Sequence
  Synthetic
ctgttgaggugggaucggt

SEQ ID NO: 61225 - DNA, 23 bp, Artificial Sequence
  Synthetic
gccaacaacaacutcgtgaacut

SEQ ID NO: 61226 - DNA, 22 bp, Artificial Sequence
  Synthetic
agugttggactugcagaacagt

SEQ ID NO: 61227 - DNA, 21 bp, Artificial Sequence
  Synthetic
tcgagattuagcgcaaggcut

SEQ ID NO: 61228 - DNA, 22 bp, Artificial Sequence
  Synthetic
gcagaggtcucaggaagtcuga

SEQ ID NO: 61229 - DNA, 25 bp, Artificial Sequence
  Synthetic
tcagctgcagaaucctgaaatgaut

SEQ ID NO: 61230 - DNA, 22 bp, Artificial Sequence
  Synthetic
gggugaaaucacaaaggagcga

SEQ ID NO: 61231 - DNA, 27 bp, Artificial Sequence
  Synthetic
cctgagtatgauggagagaacgaguag

SEQ ID NO: 61232 - DNA, 27 bp, Artificial Sequence
  Synthetic
tctttctttctauggagggatcugagg

SEQ ID NO: 61233 - DNA, 28 bp, Artificial Sequence
  Synthetic
cagaaagtcgaugcacttgagaaauaaa

SEQ ID NO: 61234 - DNA, 25 bp, Artificial Sequence
  Synthetic
acgaagaccaccaucaaggagauat

SEQ ID NO: 61235 - DNA, 24 bp, Artificial Sequence
  Synthetic
tuctgcattatcucagagccacag

SEQ ID NO: 61236 - DNA, 19 bp, Artificial Sequence
  Synthetic
ggtggugacgaacgtguga

SEQ ID NO: 61237 - DNA, 21 bp, Artificial Sequence
  Synthetic
cttcuacgcagggacucaacc

SEQ ID NO: 61238 - DNA, 19 bp, Artificial Sequence
  Synthetic
gggatcucgcgcttctugg

SEQ ID NO: 61239 - DNA, 20 bp, Artificial Sequence
  Synthetic
aagagccuggatccccuaca

SEQ ID NO: 61240 - DNA, 23 bp, Artificial Sequence
  Synthetic
cagtgagaugaggatctgctcut

SEQ ID NO: 61241 - DNA, 21 bp, Artificial Sequence
  Synthetic
agagactucccccttgtucct

SEQ ID NO: 61242 - DNA, 17 bp, Artificial Sequence
  Synthetic
accugucaccccgacga

SEQ ID NO: 61243 - DNA, 21 bp, Artificial Sequence
  Synthetic
gggacaguttgaccactucct

SEQ ID NO: 61244 - DNA, 23 bp, Artificial Sequence
  Synthetic
gggtaaccagagaugaggacuga

SEQ ID NO: 61245 - DNA, 21 bp, Artificial Sequence
  Synthetic
agcgagaggucacagtcuaca

SEQ ID NO: 61246 - DNA, 25 bp, Artificial Sequence
  Synthetic
cagtgacatgcuctttctaggtcut

SEQ ID NO: 61247 - DNA, 24 bp, Artificial Sequence
  Synthetic
gcacaagtacaagaugcacctgua

SEQ ID NO: 61248 - DNA, 21 bp, Artificial Sequence
  Synthetic
gtggaggcuttggcaaaauga

SEQ ID NO: 61249 - DNA, 21 bp, Artificial Sequence
  Synthetic
tggaucccgaccggaagtaua

SEQ ID NO: 61250 - DNA, 22 bp, Artificial Sequence
  Synthetic
acacccatatucccaggtcugt

SEQ ID NO: 61251 - DNA, 20 bp, Artificial Sequence
  Synthetic
caagattcccugggccauct

SEQ ID NO: 61252 - DNA, 22 bp, Artificial Sequence
  Synthetic
ctcacatagaucacagcugcca

SEQ ID NO: 61253 - DNA, 25 bp, Artificial Sequence
  Synthetic
acccttguaggaagctctcuaaact

SEQ ID NO: 61254 - DNA, 21 bp, Artificial Sequence
  Synthetic
cctcacctccugcctgtctua

SEQ ID NO: 61255 - DNA, 24 bp, Artificial Sequence
  Synthetic
gctcccautctatagcaugaaggg

SEQ ID NO: 61256 - DNA, 27 bp, Artificial Sequence
  Synthetic
ttctgaaaacaaagutgcaaaguggaa

SEQ ID NO: 61257 - DNA, 21 bp, Artificial Sequence
  Synthetic
aagctttggguttgccaacug

SEQ ID NO: 61258 - DNA, 24 bp, Artificial Sequence
  Synthetic
gcctacgtugaccaactcttcuat

SEQ ID NO: 61259 - DNA, 28 bp, Artificial Sequence
  Synthetic
tcactgtgauggtttcagtctuagaaaa

SEQ ID NO: 61260 - DNA, 28 bp, Artificial Sequence
  Synthetic
cagcacatguaattttgttgtgatugac

SEQ ID NO: 61261 - DNA, 26 bp, Artificial Sequence
  Synthetic
agacctttgcugtaacatgctgtaut

SEQ ID NO: 61262 - DNA, 27 bp, Artificial Sequence
  Synthetic
gacagccaaaacauagatgaattuccc

SEQ ID NO: 61263 - DNA, 28 bp, Artificial Sequence
  Synthetic
tctttcttuccagcaaccttatcauaca

SEQ ID NO: 61264 - DNA, 23 bp, Artificial Sequence
  Synthetic
ccagaaagttuccctcctccauc

SEQ ID NO: 61265 - DNA, 22 bp, Artificial Sequence
  Synthetic
actcacagcuggtttccugaaa

SEQ ID NO: 61266 - DNA, 28 bp, Artificial Sequence
  Synthetic
atggtgccattuattacaacagaatgug

SEQ ID NO: 61267 - DNA, 28 bp, Artificial Sequence
  Synthetic
aaauttcagtaccacuaaaacagaaggt

SEQ ID NO: 61268 - DNA, 24 bp, Artificial Sequence
  Synthetic
tcctcttcaccuctttctgtcugt

SEQ ID NO: 61269 - DNA, 27 bp, Artificial Sequence
  Synthetic
gaaaatctgtuttgtgagtguccaagg

SEQ ID NO: 61270 - DNA, 28 bp, Artificial Sequence
  Synthetic
tcactactgctautttacctgcaatugt

SEQ ID NO: 61271 - DNA, 28 bp, Artificial Sequence
  Synthetic
ccctgaccagtutgaagcaagaataaua

SEQ ID NO: 61272 - DNA, 23 bp, Artificial Sequence
  Synthetic
ggtcctugctctcctaucaggaa

SEQ ID NO: 61273 - DNA, 24 bp, Artificial Sequence
  Synthetic
gcttucagcaaaacacagtctuct

SEQ ID NO: 61274 - DNA, 23 bp, Artificial Sequence
  Synthetic
tcaaaagtatguccaggcccauc

SEQ ID NO: 61275 - DNA, 25 bp, Artificial Sequence
  Synthetic
agtcagcacauggatttactugcat

SEQ ID NO: 61276 - DNA, 20 bp, Artificial Sequence
  Synthetic
gcagaggccaugcactgaua

SEQ ID NO: 61277 - DNA, 27 bp, Artificial Sequence
  Synthetic
tgcaccccacaacuatcttcatuaaat

SEQ ID NO: 61278 - DNA, 24 bp, Artificial Sequence
  Synthetic
agttgatgcugagcagttuacagt

SEQ ID NO: 61279 - DNA, 28 bp, Artificial Sequence
  Synthetic
gctttttggcuaagatcacaggtatgua

SEQ ID NO: 61280 - DNA, 21 bp, Artificial Sequence
  Synthetic
gggauggagtcuccaaaggga

SEQ ID NO: 61281 - DNA, 25 bp, Artificial Sequence
  Synthetic
ctggtttgauagtgtgcaattgugt

SEQ ID NO: 61282 - DNA, 21 bp, Artificial Sequence
  Synthetic
gagacccuggtcctctcugaa

SEQ ID NO: 61283 - DNA, 25 bp, Artificial Sequence
  Synthetic
tgctccacuaacctatgtctgcuat

SEQ ID NO: 61284 - DNA, 21 bp, Artificial Sequence
  Synthetic
tctcacctugaggctcaccua

SEQ ID NO: 61285 - DNA, 27 bp, Artificial Sequence
  Synthetic
actgtuggcaaacaaagaaaaucaact

SEQ ID NO: 61286 - DNA, 32 bp, Artificial Sequence
  Synthetic
cagcaatttgcauaatatctttctttguacct

SEQ ID NO: 61287 - DNA, 24 bp, Artificial Sequence
  Synthetic
aggcactugttacagacuggaaaa

SEQ ID NO: 61288 - DNA, 19 bp, Artificial Sequence
  Synthetic
tgcagctugccatctugga

SEQ ID NO: 61289 - DNA, 19 bp, Artificial Sequence
  Synthetic
cgcugcggaagatcauccc

SEQ ID NO: 61290 - DNA, 24 bp, Artificial Sequence
  Synthetic
accctctgatugaagatgagcuga

SEQ ID NO: 61291 - DNA, 20 bp, Artificial Sequence
  Synthetic
gtgctctcucctgggaggua

SEQ ID NO: 61292 - DNA, 28 bp, Artificial Sequence
  Synthetic
tccctctctggauacctggaaaattuat

SEQ ID NO: 61293 - DNA, 25 bp, Artificial Sequence
  Synthetic
gcctctctguctagggaaggttuaa

SEQ ID NO: 61294 - DNA, 24 bp, Artificial Sequence
  Synthetic
ccgacagagagcuactgaugaact

SEQ ID NO: 61295 - DNA, 27 bp, Artificial Sequence
  Synthetic
gattatttcaccuctgcacttaccuct

SEQ ID NO: 61296 - DNA, 27 bp, Artificial Sequence
  Synthetic
ttgtttgacguaagctagtuaccaagt

SEQ ID NO: 61297 - DNA, 26 bp, Artificial Sequence
  Synthetic
cgctgtgtauggattttctgcatuaa

SEQ ID NO: 61298 - DNA, 24 bp, Artificial Sequence
  Synthetic
gcaaatgaagagcutgaggcctua

SEQ ID NO: 61299 - DNA, 28 bp, Artificial Sequence
  Synthetic
ctccacaaacugcatatguaaaagaact

SEQ ID NO: 61300 - DNA, 22 bp, Artificial Sequence
  Synthetic
catuggcaccagctgaugaaag

SEQ ID NO: 61301 - DNA, 25 bp, Artificial Sequence
  Synthetic
gcataacacagcaaguagaggcuat

SEQ ID NO: 61302 - DNA, 28 bp, Artificial Sequence
  Synthetic
tttgcctttatuttaggttcagtugcag

SEQ ID NO: 61303 - DNA, 21 bp, Artificial Sequence
  Synthetic
ccaagtucgctggactuccat

SEQ ID NO: 61304 - DNA, 26 bp, Artificial Sequence
  Synthetic
actaugacaaagagcacatuccagag

SEQ ID NO: 61305 - DNA, 26 bp, Artificial Sequence
  Synthetic
ccctttguggagaacatctguaaaca

SEQ ID NO: 61306 - DNA, 25 bp, Artificial Sequence
  Synthetic
accauaggtgatugaagccaaagaa

SEQ ID NO: 61307 - DNA, 28 bp, Artificial Sequence
  Synthetic
caatgtuccagaaacaaattgaacucct

SEQ ID NO: 61308 - DNA, 23 bp, Artificial Sequence
  Synthetic
tcctctcacccuccttcauagac

SEQ ID NO: 61309 - DNA, 26 bp, Artificial Sequence
  Synthetic
cccagtgtctuccctgaaacttaaua

SEQ ID NO: 61310 - DNA, 21 bp, Artificial Sequence
  Synthetic
ggaggccacaucacagaugac

SEQ ID NO: 61311 - DNA, 26 bp, Artificial Sequence
  Synthetic
aaggccaagcaucctcaataacatua

SEQ ID NO: 61312 - DNA, 29 bp, Artificial Sequence
  Synthetic
aactgtgttatctutgcattgcatttcut

SEQ ID NO: 61313 - DNA, 22 bp, Artificial Sequence
  Synthetic
ccacguacagaaaaccctugga

SEQ ID NO: 61314 - DNA, 25 bp, Artificial Sequence
  Synthetic
acaggtaaatggutgcagttttgug

SEQ ID NO: 61315 - DNA, 28 bp, Artificial Sequence
  Synthetic
cagaaagaagtacaugcaggaaaaagut

SEQ ID NO: 61316 - DNA, 28 bp, Artificial Sequence
  Synthetic
agcagtctctugtaaattcaaagucaga

SEQ ID NO: 61317 - DNA, 28 bp, Artificial Sequence
  Synthetic
ctgcttcaagtugtgcaaatttttctug

SEQ ID NO: 61318 - DNA, 28 bp, Artificial Sequence
  Synthetic
gaagagaacagggaauaactuagaaggg

SEQ ID NO: 61319 - DNA, 28 bp, Artificial Sequence
  Synthetic
tggaaggtttucttctccaaatucaagt

SEQ ID NO: 61320 - DNA, 25 bp, Artificial Sequence
  Synthetic
ggttggaaugatggaaagtttugct

SEQ ID NO: 61321 - DNA, 29 bp, Artificial Sequence
  Synthetic
tcctgcucaagacgatctattataucagt

SEQ ID NO: 61322 - DNA, 23 bp, Artificial Sequence
  Synthetic
ttgctacaacutgagagcacugt

SEQ ID NO: 61323 - DNA, 24 bp, Artificial Sequence
  Synthetic
tttgcatattccugaactgccuca

SEQ ID NO: 61324 - DNA, 23 bp, Artificial Sequence
  Synthetic
tcaattccugagctagcacatuc

SEQ ID NO: 61325 - DNA, 28 bp, Artificial Sequence
  Synthetic
accccagtctgauccagaatctaaaaua

SEQ ID NO: 61326 - DNA, 22 bp, Artificial Sequence
  Synthetic
gcactccagcugatttcaaucc

SEQ ID NO: 61327 - DNA, 23 bp, Artificial Sequence
  Synthetic
tgctgccaagaugtggtuaaact

SEQ ID NO: 61328 - DNA, 23 bp, Artificial Sequence
  Synthetic
agagaatccacgucctctagcut

SEQ ID NO: 61329 - DNA, 19 bp, Artificial Sequence
  Synthetic
gggccagagutacucagca

SEQ ID NO: 61330 - DNA, 27 bp, Artificial Sequence
  Synthetic
agtgtattaccugattaggaggcugaa

SEQ ID NO: 61331 - DNA, 29 bp, Artificial Sequence
  Synthetic
cttttcctaagcutttgcactatatugct

SEQ ID NO: 61332 - DNA, 22 bp, Artificial Sequence
  Synthetic
gcgtgtcuttggctgaauaagg

SEQ ID NO: 61333 - DNA, 23 bp, Artificial Sequence
  Synthetic
agccattttucctgtttgggtug

SEQ ID NO: 61334 - DNA, 18 bp, Artificial Sequence
  Synthetic
ctggtccaccuggtccuc

SEQ ID NO: 61335 - DNA, 27 bp, Artificial Sequence
  Synthetic
gagaatggguaaagcagaatctugagt

SEQ ID NO: 61336 - DNA, 21 bp, Artificial Sequence
  Synthetic
ctggtggugggtgtgtcatua

SEQ ID NO: 61337 - DNA, 28 bp, Artificial Sequence
  Synthetic
gtgtgatttgcucagaatcagttugaaa

SEQ ID NO: 61338 - DNA, 24 bp, Artificial Sequence
  Synthetic
catcagttguatgttcccctugga

SEQ ID NO: 61339 - DNA, 27 bp, Artificial Sequence
  Synthetic
cgatggttcuacattgatttuggagga

SEQ ID NO: 61340 - DNA, 20 bp, Artificial Sequence
  Synthetic
tgattgcugccctcctccua

SEQ ID NO: 61341 - DNA, 28 bp, Artificial Sequence
  Synthetic
tggctatttcttcutgaatctttcccut

SEQ ID NO: 61342 - DNA, 25 bp, Artificial Sequence
  Synthetic
atttacagagaucagagagcuggga

SEQ ID NO: 61343 - DNA, 27 bp, Artificial Sequence
  Synthetic
tgaggtggaaguctaccatgauaaaca

SEQ ID NO: 61344 - DNA, 26 bp, Artificial Sequence
  Synthetic
aggaagatgugcctttcaaatucaga

SEQ ID NO: 61345 - DNA, 28 bp, Artificial Sequence
  Synthetic
gcaaatgcttgcuagaccaataatuagt

SEQ ID NO: 61346 - DNA, 28 bp, Artificial Sequence
  Synthetic
tcttaaagctgugtctgtaaactgaugg

SEQ ID NO: 61347 - DNA, 27 bp, Artificial Sequence
  Synthetic
aatcacatcccaugagttttgagcuaa

SEQ ID NO: 61348 - DNA, 24 bp, Artificial Sequence
  Synthetic
gacacactutgtccacttugcaat

SEQ ID NO: 61349 - DNA, 26 bp, Artificial Sequence
  Synthetic
gttgcaacaaagaugtagggttguaa

SEQ ID NO: 61350 - DNA, 22 bp, Artificial Sequence
  Synthetic
agcagaggcutaaggagcuaca

SEQ ID NO: 61351 - DNA, 20 bp, Artificial Sequence
  Synthetic
ttctcagagggcaguccgua

SEQ ID NO: 61352 - DNA, 23 bp, Artificial Sequence
  Synthetic
gcttccagaggcaucattcacua

SEQ ID NO: 61353 - DNA, 26 bp, Artificial Sequence
  Synthetic
agtgcaataagcuggaaatacuggag

SEQ ID NO: 61354 - DNA, 18 bp, Artificial Sequence
  Synthetic
gtgggacuggacgagcut

SEQ ID NO: 61355 - DNA, 18 bp, Artificial Sequence
  Synthetic
tgccugagcgctcttucc

SEQ ID NO: 61356 - DNA, 17 bp, Artificial Sequence
  Synthetic
aggcaagggcgugtugt

SEQ ID NO: 61357 - DNA, 19 bp, Artificial Sequence
  Synthetic
gcgtggcutccacctctuc

SEQ ID NO: 61358 - DNA, 21 bp, Artificial Sequence
  Synthetic
ccaacgaaugaccacaggcut

SEQ ID NO: 61359 - DNA, 21 bp, Artificial Sequence
  Synthetic
gttgccaccauggactctuca

SEQ ID NO: 61360 - DNA, 20 bp, Artificial Sequence
  Synthetic
cactggttguggtccacuca

SEQ ID NO: 61361 - DNA, 21 bp, Artificial Sequence
  Synthetic
ctttuccaggcacugcagaac

SEQ ID NO: 61362 - DNA, 24 bp, Artificial Sequence
  Synthetic
gctgcctuctcttttcaucacagt

SEQ ID NO: 61363 - DNA, 21 bp, Artificial Sequence
  Synthetic
tgccacccuacctagtgtcug

SEQ ID NO: 61364 - DNA, 28 bp, Artificial Sequence
  Synthetic
aggtctttttgutggaattcattuaagg

SEQ ID NO: 61365 - DNA, 26 bp, Artificial Sequence
  Synthetic
cttcctcagagautgaagtcaacugt

SEQ ID NO: 61366 - DNA, 28 bp, Artificial Sequence
  Synthetic
actgaggcccagcaauaatttaaactua

SEQ ID NO: 61367 - DNA, 28 bp, Artificial Sequence
  Synthetic
gttgtcttctacuccatcttcaaaucca

SEQ ID NO: 61368 - DNA, 30 bp, Artificial Sequence
  Synthetic
tccaaagaatcaauagacaagtctgtgtut

SEQ ID NO: 61369 - DNA, 24 bp, Artificial Sequence
  Synthetic
ccaaataaactgugcctgcgauat

SEQ ID NO: 61370 - DNA, 26 bp, Artificial Sequence
  Synthetic
aaacattgacacguaccttauccaca

SEQ ID NO: 61371 - DNA, 28 bp, Artificial Sequence
  Synthetic
ggatatgcaaautgaacaaacugacact

SEQ ID NO: 61372 - DNA, 25 bp, Artificial Sequence
  Synthetic
aggautataggcttugagggcaaac

SEQ ID NO: 61373 - DNA, 23 bp, Artificial Sequence
  Synthetic
ggcatttgcugacccataggaut

SEQ ID NO: 61374 - DNA, 21 bp, Artificial Sequence
  Synthetic
gtgugttttctgugcacggat

SEQ ID NO: 61375 - DNA, 28 bp, Artificial Sequence
  Synthetic
cctgccaatagaugtgaaactgacauaa

SEQ ID NO: 61376 - DNA, 18 bp, Artificial Sequence
  Synthetic
cugcagcaacggagagug

SEQ ID NO: 61377 - DNA, 18 bp, Artificial Sequence
  Synthetic
ccaggcuggagagtggut

SEQ ID NO: 61378 - DNA, 28 bp, Artificial Sequence
  Synthetic
attaaaaactgaugcctcttggtacuca

SEQ ID NO: 61379 - DNA, 25 bp, Artificial Sequence
  Synthetic
ggcaaagacacautgatttggtuct

SEQ ID NO: 61380 - DNA, 27 bp, Artificial Sequence
  Synthetic
tgtatgacaucttcaggguaaacaagg

SEQ ID NO: 61381 - DNA, 28 bp, Artificial Sequence
  Synthetic
tcatcctcactgugtgctatgttttaut

SEQ ID NO: 61382 - DNA, 24 bp, Artificial Sequence
  Synthetic
cctgtccugggatgatcctuagaa

SEQ ID NO: 61383 - DNA, 23 bp, Artificial Sequence
  Synthetic
gagatccaaagugcagagtcucc

SEQ ID NO: 61384 - DNA, 23 bp, Artificial Sequence
  Synthetic
tgagtggacuggtacatgcttug

SEQ ID NO: 61385 - DNA, 32 bp, Artificial Sequence
  Synthetic
aaaacaacctttautgtcactctttaugcaat

SEQ ID NO: 61386 - DNA, 27 bp, Artificial Sequence
  Synthetic
ctatctcaacagcucaaatctguacct

SEQ ID NO: 61387 - DNA, 21 bp, Artificial Sequence
  Synthetic
cggtacaaucccaggatccuc

SEQ ID NO: 61388 - DNA, 27 bp, Artificial Sequence
  Synthetic
tgctgttcacaguataaggaatauggg

SEQ ID NO: 61389 - DNA, 26 bp, Artificial Sequence
  Synthetic
agtgattttggcutttgtcctctuct

SEQ ID NO: 61390 - DNA, 20 bp, Artificial Sequence
  Synthetic
ccagaaagcuaggtcggugt

SEQ ID NO: 61391 - DNA, 21 bp, Artificial Sequence
  Synthetic
ccattggtgaugagcccttug

SEQ ID NO: 61392 - DNA, 22 bp, Artificial Sequence
  Synthetic
tgggagggcagaaucaggaaua

SEQ ID NO: 61393 - DNA, 29 bp, Artificial Sequence
  Synthetic
cagagaccaagaucactgataagaaaugt

SEQ ID NO: 61394 - DNA, 20 bp, Artificial Sequence
  Synthetic
caacgacggcugtcccuaaa

SEQ ID NO: 61395 - DNA, 22 bp, Artificial Sequence
  Synthetic
catcagaaggaaggugtgcgua

SEQ ID NO: 61396 - DNA, 21 bp, Artificial Sequence
  Synthetic
ccugcagatttuccagcggat

SEQ ID NO: 61397 - DNA, 20 bp, Artificial Sequence
  Synthetic
gggatgagcgutccaaccut

SEQ ID NO: 61398 - DNA, 20 bp, Artificial Sequence
  Synthetic
tcccttguagcctguccagt

SEQ ID NO: 61399 - DNA, 23 bp, Artificial Sequence
  Synthetic
gcagaagtcccucaagaggtcua

SEQ ID NO: 61400 - DNA, 23 bp, Artificial Sequence
  Synthetic
acatttctgttuccacagggugt

SEQ ID NO: 61401 - DNA, 22 bp, Artificial Sequence
  Synthetic
gcucagacucagccaagaaacc

SEQ ID NO: 61402 - DNA, 25 bp, Artificial Sequence
  Synthetic
agttcaaagaacucaggttcggtut

SEQ ID NO: 61403 - DNA, 24 bp, Artificial Sequence
  Synthetic
gaaccucucaaaacgaaacaagca

SEQ ID NO: 61404 - DNA, 17 bp, Artificial Sequence
  Synthetic
gctugggccccacguag

SEQ ID NO: 61405 - DNA, 19 bp, Artificial Sequence
  Synthetic
cctgggugtatgcccucat

SEQ ID NO: 61406 - DNA, 21 bp, Artificial Sequence
  Synthetic
gcccagccaacutcuagcaaa

SEQ ID NO: 61407 - DNA, 28 bp, Artificial Sequence
  Synthetic
aagaaggttguattccaaatcauggagt

SEQ ID NO: 61408 - DNA, 20 bp, Artificial Sequence
  Synthetic
gggttgccaccuacagtgut

SEQ ID NO: 61409 - DNA, 23 bp, Artificial Sequence
  Synthetic
gcgatctaaugaagggtcctcut

SEQ ID NO: 61410 - DNA, 26 bp, Artificial Sequence
  Synthetic
tgtgtuacaagaaagcatuggcaaag

SEQ ID NO: 61411 - DNA, 28 bp, Artificial Sequence
  Synthetic
caggatgtttucatgacgtaacatuaca

SEQ ID NO: 61412 - DNA, 25 bp, Artificial Sequence
  Synthetic
ccagctgguctttggtaaagtuaag

SEQ ID NO: 61413 - DNA, 28 bp, Artificial Sequence
  Synthetic
tgattgtcatattucctcctcagtccua

SEQ ID NO: 61414 - DNA, 26 bp, Artificial Sequence
  Synthetic
gtcatcaagacuccaaaagacatugg

SEQ ID NO: 61415 - DNA, 25 bp, Artificial Sequence
  Synthetic
agctccgaguaatctagctagctut

SEQ ID NO: 61416 - DNA, 28 bp, Artificial Sequence
  Synthetic
aagcctgtaagacauctggaataatgut

SEQ ID NO: 61417 - DNA, 28 bp, Artificial Sequence
  Synthetic
ttgttttgattgaagutgcagtcagtut

SEQ ID NO: 61418 - DNA, 21 bp, Artificial Sequence
  Synthetic
caagggtcauacccacaugct

SEQ ID NO: 61419 - DNA, 23 bp, Artificial Sequence
  Synthetic
gtacttgtcucgtgggaaucact

SEQ ID NO: 61420 - DNA, 20 bp, Artificial Sequence
  Synthetic
acagaggugctucaccaaca

SEQ ID NO: 61421 - DNA, 20 bp, Artificial Sequence
  Synthetic
agcattguggcatcctucgt

SEQ ID NO: 61422 - DNA, 20 bp, Artificial Sequence
  Synthetic
aaagcgacugtgctcucaca

SEQ ID NO: 61423 - DNA, 18 bp, Artificial Sequence
  Synthetic
gggcugccactuggaagg

SEQ ID NO: 61424 - DNA, 22 bp, Artificial Sequence
  Synthetic
caaaatttcccugtctgccgut

SEQ ID NO: 61425 - DNA, 27 bp, Artificial Sequence
  Synthetic
agaaaaccuggagactttugaagaagt

SEQ ID NO: 61426 - DNA, 21 bp, Artificial Sequence
  Synthetic
gguctccatcuacaacgagca

SEQ ID NO: 61427 - DNA, 22 bp, Artificial Sequence
  Synthetic
ccacatctggucagtggtauga

SEQ ID NO: 61428 - DNA, 20 bp, Artificial Sequence
  Synthetic
cctttgcaguctgtgcucgt

SEQ ID NO: 61429 - DNA, 24 bp, Artificial Sequence
  Synthetic
caagtcacaggauaaagccggaua

SEQ ID NO: 61430 - DNA, 21 bp, Artificial Sequence
  Synthetic
cacatgtutgtggctuggaca

SEQ ID NO: 61431 - DNA, 23 bp, Artificial Sequence
  Synthetic
gcugtcacuaaaccacacacact

SEQ ID NO: 61432 - DNA, 23 bp, Artificial Sequence
  Synthetic
gaaaggugatgaaggucccagag

SEQ ID NO: 61433 - DNA, 23 bp, Artificial Sequence
  Synthetic
ctacagcactuccagttggaaug

SEQ ID NO: 61434 - DNA, 25 bp, Artificial Sequence
  Synthetic
ggaaagccagugcctcatattaugg

SEQ ID NO: 61435 - DNA, 23 bp, Artificial Sequence
  Synthetic
tgcaagtuaagcttcctguggaa

SEQ ID NO: 61436 - DNA, 19 bp, Artificial Sequence
  Synthetic
gcagtgcaugcgacactug

SEQ ID NO: 61437 - DNA, 23 bp, Artificial Sequence
  Synthetic
cccctcttcuatgggttcctugt

SEQ ID NO: 61438 - DNA, 26 bp, Artificial Sequence
  Synthetic
actatgaaatuccaaagcctcctuga

SEQ ID NO: 61439 - DNA, 23 bp, Artificial Sequence
  Synthetic
acacatgaggagaaugtaccuct

SEQ ID NO: 61440 - DNA, 26 bp, Artificial Sequence
  Synthetic
tgatcaatttccuccctttcaagugt

SEQ ID NO: 61441 - DNA, 19 bp, Artificial Sequence
  Synthetic
ggcuatcagguaccagcgt

SEQ ID NO: 61442 - DNA, 27 bp, Artificial Sequence
  Synthetic
tccacutacttttactugacccacaaa

SEQ ID NO: 61443 - DNA, 26 bp, Artificial Sequence
  Synthetic
gctcctctcacauttaatgcttgugt

SEQ ID NO: 61444 - DNA, 22 bp, Artificial Sequence
  Synthetic
ccctugcagatctcaugaggat

SEQ ID NO: 61445 - DNA, 19 bp, Artificial Sequence
  Synthetic
cctuccggaccctuagcac

SEQ ID NO: 61446 - DNA, 20 bp, Artificial Sequence
  Synthetic
ccagacccgggautgttuca

SEQ ID NO: 61447 - DNA, 27 bp, Artificial Sequence
  Synthetic
ccccuataaaataaaguacaggcagga

SEQ ID NO: 61448 - DNA, 29 bp, Artificial Sequence
  Synthetic
attgttgtgcaugagtgttactactttug

SEQ ID NO: 61449 - DNA, 22 bp, Artificial Sequence
  Synthetic
agtggccacagcuaacatcaut

SEQ ID NO: 61450 - DNA, 21 bp, Artificial Sequence
  Synthetic
catccaugcgcaguacaacac

SEQ ID NO: 61451 - DNA, 21 bp, Artificial Sequence
  Synthetic
gguccaacgugagggaagaaa

SEQ ID NO: 61452 - DNA, 25 bp, Artificial Sequence
  Synthetic
gtgtccatuctaactcaacuccagt

SEQ ID NO: 61453 - DNA, 25 bp, Artificial Sequence
  Synthetic
actaactcagcuctttggattgcut

SEQ ID NO: 61454 - DNA, 27 bp, Artificial Sequence
  Synthetic
ggataaacaugaacacagaggaaccua

SEQ ID NO: 61455 - DNA, 25 bp, Artificial Sequence
  Synthetic
tctatagaatccugtgaagcagcuc

SEQ ID NO: 61456 - DNA, 19 bp, Artificial Sequence
  Synthetic
ccgguaaccacgtccugag

SEQ ID NO: 61457 - DNA, 28 bp, Artificial Sequence
  Synthetic
acaataacagugaccaaaatgacaguga

SEQ ID NO: 61458 - DNA, 23 bp, Artificial Sequence
  Synthetic
acccaagagucttctctgtcucc

SEQ ID NO: 61459 - DNA, 25 bp, Artificial Sequence
  Synthetic
gcttacauttgcttcugacacaact

SEQ ID NO: 61460 - DNA, 22 bp, Artificial Sequence
  Synthetic
gcagtggacuggaaaatgugag

SEQ ID NO: 61461 - DNA, 21 bp, Artificial Sequence
  Synthetic
cgtgcatucaggcactuacca

SEQ ID NO: 61462 - DNA, 20 bp, Artificial Sequence
  Synthetic
tgctcagguccacccattug

SEQ ID NO: 61463 - DNA, 18 bp, Artificial Sequence
  Synthetic
gtgaccgugggtgagugt

SEQ ID NO: 61464 - DNA, 26 bp, Artificial Sequence
  Synthetic
aagctgctatauggcgagttctuaat

SEQ ID NO: 61465 - DNA, 25 bp, Artificial Sequence
  Synthetic
gtcttgtagugaactggtacacugg

SEQ ID NO: 61466 - DNA, 17 bp, Artificial Sequence
  Synthetic
gtgacccgcugguggaa

SEQ ID NO: 61467 - DNA, 18 bp, Artificial Sequence
  Synthetic
caggaugagcacgtugcc

SEQ ID NO: 61468 - DNA, 25 bp, Artificial Sequence
  Synthetic
attaaggtcaugggaatacgctcug

SEQ ID NO: 61469 - DNA, 26 bp, Artificial Sequence
  Synthetic
tttgacttcaagcugttcttcaaugg

SEQ ID NO: 61470 - DNA, 21 bp, Artificial Sequence
  Synthetic
gcggcttucctcgttauaggt

SEQ ID NO: 61471 - DNA, 25 bp, Artificial Sequence
  Synthetic
ccccttcatcguctactacttcauc

SEQ ID NO: 61472 - DNA, 22 bp, Artificial Sequence
  Synthetic
ccagaagcaugacatggtcuct

SEQ ID NO: 61473 - DNA, 22 bp, Artificial Sequence
  Synthetic
ccacggguaagcatatggauga

SEQ ID NO: 61474 - DNA, 20 bp, Artificial Sequence
  Synthetic
ctcttctugttgcgguggga

SEQ ID NO: 61475 - DNA, 28 bp, Artificial Sequence
  Synthetic
ccctactcugacatcgtatatcuagcat

SEQ ID NO: 61476 - DNA, 32 bp, Artificial Sequence
  Synthetic
aatgctgatgguattaaaacagttttuaagaa

SEQ ID NO: 61477 - DNA, 26 bp, Artificial Sequence
  Synthetic
gcaatggactucacctcatcaaaaug

SEQ ID NO: 61478 - DNA, 28 bp, Artificial Sequence
  Synthetic
tgatttattctgttutgtttgccaccut

SEQ ID NO: 61479 - DNA, 24 bp, Artificial Sequence
  Synthetic
ggcttccutcttcaaaugcaagac

SEQ ID NO: 61480 - DNA, 24 bp, Artificial Sequence
  Synthetic
gctgtcaaaccucctaactucact

SEQ ID NO: 61481 - DNA, 25 bp, Artificial Sequence
  Synthetic
ccagcccaugtaattttgacaucaa

SEQ ID NO: 61482 - DNA, 23 bp, Artificial Sequence
  Synthetic
ccttctcaugcccagauggaaat

SEQ ID NO: 61483 - DNA, 26 bp, Artificial Sequence
  Synthetic
attagctuccactccttuccagaaaa

SEQ ID NO: 61484 - DNA, 19 bp, Artificial Sequence
  Synthetic
gatgtugcacggcagctua

SEQ ID NO: 61485 - DNA, 24 bp, Artificial Sequence
  Synthetic
gtaatcacuccccagatagcagug

SEQ ID NO: 61486 - DNA, 22 bp, Artificial Sequence
  Synthetic
actcttuaagggcctcacucgt

SEQ ID NO: 61487 - DNA, 21 bp, Artificial Sequence
  Synthetic
ctgtgcucaacgtcactcuga

SEQ ID NO: 61488 - DNA, 21 bp, Artificial Sequence
  Synthetic
tgaaacacccugtgguagcag

SEQ ID NO: 61489 - DNA, 21 bp, Artificial Sequence
  Synthetic
tgaccatgagcugcagagaug

SEQ ID NO: 61490 - DNA, 21 bp, Artificial Sequence
  Synthetic
aattccccugctcccctctua

SEQ ID NO: 61491 - DNA, 23 bp, Artificial Sequence
  Synthetic
ctctttgcgcutcttgaactucc

SEQ ID NO: 61492 - DNA, 21 bp, Artificial Sequence
  Synthetic
tcaccatccuccccttggaut

SEQ ID NO: 61493 - DNA, 22 bp, Artificial Sequence
  Synthetic
ccaacctctugctccaaacuga

SEQ ID NO: 61494 - DNA, 21 bp, Artificial Sequence
  Synthetic
cuccaacgccaacaucaacaa

SEQ ID NO: 61495 - DNA, 20 bp, Artificial Sequence
  Synthetic
ctgtctccugagggtugcag

SEQ ID NO: 61496 - DNA, 22 bp, Artificial Sequence
  Synthetic
ctcccaagccuatgggttcaut

SEQ ID NO: 61497 - DNA, 21 bp, Artificial Sequence
  Synthetic
tctccccucccactagacuct

SEQ ID NO: 61498 - DNA, 29 bp, Artificial Sequence
  Synthetic
cgatttcacaagtuaaaccatctttccut

SEQ ID NO: 61499 - DNA, 22 bp, Artificial Sequence
  Synthetic
tctctagggcaucaaccugagt

SEQ ID NO: 61500 - DNA, 20 bp, Artificial Sequence
  Synthetic
tggcucgcaagcacaauagt

SEQ ID NO: 61501 - DNA, 26 bp, Artificial Sequence
  Synthetic
ggtcacaaauggatacttttcauggg

SEQ ID NO: 61502 - DNA, 23 bp, Artificial Sequence
  Synthetic
tccagctgguaggagaggttaug

SEQ ID NO: 61503 - DNA, 24 bp, Artificial Sequence
  Synthetic
gctaaagccugtgtcctgtgauat

SEQ ID NO: 61504 - DNA, 23 bp, Artificial Sequence
  Synthetic
gtgctgcautgtttacatuccct

SEQ ID NO: 61505 - DNA, 28 bp, Artificial Sequence
  Synthetic
ggttgagcauccacaagtttctaaauaa

SEQ ID NO: 61506 - DNA, 28 bp, Artificial Sequence
  Synthetic
acttccatggaugagaattcagctaaug

SEQ ID NO: 61507 - DNA, 28 bp, Artificial Sequence
  Synthetic
aaatgcctctguaagaatccccttttua

SEQ ID NO: 61508 - DNA, 27 bp, Artificial Sequence
  Synthetic
gcaatcctcaaautgtcagcatcttut

SEQ ID NO: 61509 - DNA, 27 bp, Artificial Sequence
  Synthetic
acacttgcaacagagguttagaaacua

SEQ ID NO: 61510 - DNA, 27 bp, Artificial Sequence
  Synthetic
gtgaaggcucatttcttgugaaaaaga

SEQ ID NO: 61511 - DNA, 25 bp, Artificial Sequence
  Synthetic
catcagggaaauccctaccaatugt

SEQ ID NO: 61512 - DNA, 26 bp, Artificial Sequence
  Synthetic
atgagtcctctutgatgctgttctut

SEQ ID NO: 61513 - DNA, 29 bp, Artificial Sequence
  Synthetic
gggatgaaatguggttcttactaaggtut

SEQ ID NO: 61514 - DNA, 28 bp, Artificial Sequence
  Synthetic
ggtctagaguagagaaactgcatcttuc

SEQ ID NO: 61515 - DNA, 32 bp, Artificial Sequence
  Synthetic
tggaaatctggattuatagttgacaggaatut

SEQ ID NO: 61516 - DNA, 20 bp, Artificial Sequence
  Synthetic
gtgagcucagaagccacuca

SEQ ID NO: 61517 - DNA, 23 bp, Artificial Sequence
  Synthetic
ctggtcctuctggaaaagauggt

SEQ ID NO: 61518 - DNA, 20 bp, Artificial Sequence
  Synthetic
ggaucctaaugcccagcagt

SEQ ID NO: 61519 - DNA, 24 bp, Artificial Sequence
  Synthetic
tgagaccacagcaaautcctctug

SEQ ID NO: 61520 - DNA, 26 bp, Artificial Sequence
  Synthetic
aaaagccagaccuttgtgattacuct

SEQ ID NO: 61521 - DNA, 23 bp, Artificial Sequence
  Synthetic
gccctagttucagctctgatgug

SEQ ID NO: 61522 - DNA, 25 bp, Artificial Sequence
  Synthetic
aactagtttgaaugcaaggctggua

SEQ ID NO: 61523 - DNA, 23 bp, Artificial Sequence
  Synthetic
ctcgctgauaagttctgugacca

SEQ ID NO: 61524 - DNA, 22 bp, Artificial Sequence
  Synthetic
gccauccttaauccaggaacct

SEQ ID NO: 61525 - DNA, 24 bp, Artificial Sequence
  Synthetic
ggcaaactuaaagcacttgugagt

SEQ ID NO: 61526 - DNA, 24 bp, Artificial Sequence
  Synthetic
gatggcgcucagatcccataauaa

SEQ ID NO: 61527 - DNA, 28 bp, Artificial Sequence
  Synthetic
atccttgagatucagtcttttcatgugt

SEQ ID NO: 61528 - DNA, 20 bp, Artificial Sequence
  Synthetic
tgggacaggcagguauaggt

SEQ ID NO: 61529 - DNA, 17 bp, Artificial Sequence
  Synthetic
cgccggagcugcaauga

SEQ ID NO: 61530 - DNA, 20 bp, Artificial Sequence
  Synthetic
cagagctaguggctcaccut

SEQ ID NO: 61531 - DNA, 28 bp, Artificial Sequence
  Synthetic
gggaatactgaucctgatttaacaguga

SEQ ID NO: 61532 - DNA, 28 bp, Artificial Sequence
  Synthetic
tgctgttattttaugaagacagtgugga

SEQ ID NO: 61533 - DNA, 26 bp, Artificial Sequence
  Synthetic
cctgctcugacaaacatcaucaagat

SEQ ID NO: 61534 - DNA, 28 bp, Artificial Sequence
  Synthetic
agctaggtgaugtttcattgggttuaat

SEQ ID NO: 61535 - DNA, 29 bp, Artificial Sequence
  Synthetic
tgttcagtgtttucttgttttgctttuct

SEQ ID NO: 61536 - DNA, 18 bp, Artificial Sequence
  Synthetic
ccgtugccgttgcuacca

SEQ ID NO: 61537 - DNA, 17 bp, Artificial Sequence
  Synthetic
ccgagtcucgccgctuc

SEQ ID NO: 61538 - DNA, 25 bp, Artificial Sequence
  Synthetic
ggatgattatagucgttgggtucgt

SEQ ID NO: 61539 - DNA, 19 bp, Artificial Sequence
  Synthetic
cctgcccugcgatucgaaa

SEQ ID NO: 61540 - DNA, 29 bp, Artificial Sequence
  Synthetic
tccttccaaaggauatagtagtgattuga

SEQ ID NO: 61541 - DNA, 28 bp, Artificial Sequence
  Synthetic
acttcttcaacagucttgacatagcaut

SEQ ID NO: 61542 - DNA, 21 bp, Artificial Sequence
  Synthetic
ggtggacagccaguacgagua

SEQ ID NO: 61543 - DNA, 28 bp, Artificial Sequence
  Synthetic
gaaacatctcacautgtcttcttcctug

SEQ ID NO: 61544 - DNA, 22 bp, Artificial Sequence
  Synthetic
ggcaagaaagcuacctttuggg

SEQ ID NO: 61545 - DNA, 26 bp, Artificial Sequence
  Synthetic
tgatcacctttuccttctcgatucag

SEQ ID NO: 61546 - DNA, 28 bp, Artificial Sequence
  Synthetic
ttcccttgaguacagagtcctttatuct

SEQ ID NO: 61547 - DNA, 22 bp, Artificial Sequence
  Synthetic
ggttactgcutctctctucggt

SEQ ID NO: 61548 - DNA, 17 bp, Artificial Sequence
  Synthetic
gcuggccgggaacucac

SEQ ID NO: 61549 - DNA, 18 bp, Artificial Sequence
  Synthetic
tgcgtagcgcuggaaguc

SEQ ID NO: 61550 - DNA, 20 bp, Artificial Sequence
  Synthetic
cauaggtggugaggccaagg

SEQ ID NO: 61551 - DNA, 20 bp, Artificial Sequence
  Synthetic
cccctgcagutcaacagcut

SEQ ID NO: 61552 - DNA, 20 bp, Artificial Sequence
  Synthetic
ctacccugcccacccatuat

SEQ ID NO: 61553 - DNA, 24 bp, Artificial Sequence
  Synthetic
caactttgcuacttgcctttucct

SEQ ID NO: 61554 - DNA, 25 bp, Artificial Sequence
  Synthetic
gttaatcccagguctaaccgtuacc

SEQ ID NO: 61555 - DNA, 25 bp, Artificial Sequence
  Synthetic
gccatatttcaaugtcagctccuca

SEQ ID NO: 61556 - DNA, 26 bp, Artificial Sequence
  Synthetic
gcctuccttttacagugaagaagaac

SEQ ID NO: 61557 - DNA, 31 bp, Artificial Sequence
  Synthetic
aatgtactcctgaautaacataacaccatua

SEQ ID NO: 61558 - DNA, 21 bp, Artificial Sequence
  Synthetic
cccagcuggacagcttctuac

SEQ ID NO: 61559 - DNA, 24 bp, Artificial Sequence
  Synthetic
tgctacactcutccaaacctucac

SEQ ID NO: 61560 - DNA, 28 bp, Artificial Sequence
  Synthetic
cacaataatcgaaaaaucccgtttcuga

SEQ ID NO: 61561 - DNA, 24 bp, Artificial Sequence
  Synthetic
actattccaggaagugacggtcut

SEQ ID NO: 61562 - DNA, 22 bp, Artificial Sequence
  Synthetic
gccagatctuctccatgtcguc

SEQ ID NO: 61563 - DNA, 25 bp, Artificial Sequence
  Synthetic
tgacatggugagagcatgatttuct

SEQ ID NO: 61564 - DNA, 22 bp, Artificial Sequence
  Synthetic
cuttttctucccaggaggagca

SEQ ID NO: 61565 - DNA, 26 bp, Artificial Sequence
  Synthetic
ggccctctuaactacactctcatuac

SEQ ID NO: 61566 - DNA, 20 bp, Artificial Sequence
  Synthetic
caguacgagggcatcuccat

SEQ ID NO: 61567 - DNA, 25 bp, Artificial Sequence
  Synthetic
acagtgtgaugacagatgcttctuc

SEQ ID NO: 61568 - DNA, 28 bp, Artificial Sequence
  Synthetic
accagtagagucaaggaacagaatuaca

SEQ ID NO: 61569 - DNA, 23 bp, Artificial Sequence
  Synthetic
gttggtccgcuatctctgucaaa

SEQ ID NO: 61570 - DNA, 23 bp, Artificial Sequence
  Synthetic
cagatatuccactggtggucgag

SEQ ID NO: 61571 - DNA, 24 bp, Artificial Sequence
  Synthetic
cagctcagcugttgtgttttgtut

SEQ ID NO: 61572 - DNA, 20 bp, Artificial Sequence
  Synthetic
agctgtgugagttcgcctuc

SEQ ID NO: 61573 - DNA, 19 bp, Artificial Sequence
  Synthetic
gaggtggcucagtgucgat

SEQ ID NO: 61574 - DNA, 22 bp, Artificial Sequence
  Synthetic
cccgtatcucctttccauccca

SEQ ID NO: 61575 - DNA, 25 bp, Artificial Sequence
  Synthetic
gactgtgagaguagattgggtcuct

SEQ ID NO: 61576 - DNA, 21 bp, Artificial Sequence
  Synthetic
gctgucctgagaauggagcaa

SEQ ID NO: 61577 - DNA, 21 bp, Artificial Sequence
  Synthetic
cctgctccugattgtctuccc

SEQ ID NO: 61578 - DNA, 23 bp, Artificial Sequence
  Synthetic
gtaccuacagagccagtccacua

SEQ ID NO: 61579 - DNA, 21 bp, Artificial Sequence
  Synthetic
ccagcgggagaugaagaaguc

SEQ ID NO: 61580 - DNA, 20 bp, Artificial Sequence
  Synthetic
ggcacaguactgcaucaggt

SEQ ID NO: 61581 - DNA, 21 bp, Artificial Sequence
  Synthetic
ggcaccaugaaggacatucgt

SEQ ID NO: 61582 - DNA, 19 bp, Artificial Sequence
  Synthetic
cccccaugcctgcttaugt

SEQ ID NO: 61583 - DNA, 17 bp, Artificial Sequence
  Synthetic
ccgtacccguggccauc

SEQ ID NO: 61584 - DNA, 20 bp, Artificial Sequence
  Synthetic
gagtggaagucagcctgugt

SEQ ID NO: 61585 - DNA, 17 bp, Artificial Sequence
  Synthetic
gggtcucacaggccuct

SEQ ID NO: 61586 - DNA, 22 bp, Artificial Sequence
  Synthetic
gctggtggtuttgcatcaggua

SEQ ID NO: 61587 - DNA, 21 bp, Artificial Sequence
  Synthetic
gctgaggccutctcaggttuc

SEQ ID NO: 61588 - DNA, 20 bp, Artificial Sequence
  Synthetic
caggttggaugtcgcaguct

SEQ ID NO: 61589 - DNA, 19 bp, Artificial Sequence
  Synthetic
gcucggcuagcaggaggat

SEQ ID NO: 61590 - DNA, 18 bp, Artificial Sequence
  Synthetic
cccagcucccacctccut

SEQ ID NO: 61591 - DNA, 17 bp, Artificial Sequence
  Synthetic
gcgcaggagcaguguca

SEQ ID NO: 61592 - DNA, 21 bp, Artificial Sequence
  Synthetic
cttggagcugaccaggtctuc

SEQ ID NO: 61593 - DNA, 21 bp, Artificial Sequence
  Synthetic
agtcacctcugggtcttgugt

SEQ ID NO: 61594 - DNA, 21 bp, Artificial Sequence
  Synthetic
gggtggautctcttcugccat

SEQ ID NO: 61595 - DNA, 24 bp, Artificial Sequence
  Synthetic
cccattgggaagugaagctaucag

SEQ ID NO: 61596 - DNA, 20 bp, Artificial Sequence
  Synthetic
ccctagcugggagggtagut

SEQ ID NO: 61597 - DNA, 28 bp, Artificial Sequence
  Synthetic
ccctagatcugaaggatgagagattcut

SEQ ID NO: 61598 - DNA, 23 bp, Artificial Sequence
  Synthetic
agaaacagccugaaggtcucaag

SEQ ID NO: 61599 - DNA, 27 bp, Artificial Sequence
  Synthetic
ttgatctgggaggguagagactaaaut

SEQ ID NO: 61600 - DNA, 20 bp, Artificial Sequence
  Synthetic
ggaaccgacutggcatctug

SEQ ID NO: 61601 - DNA, 28 bp, Artificial Sequence
  Synthetic
cccctggctcauctgtaatttactttut

SEQ ID NO: 61602 - DNA, 20 bp, Artificial Sequence
  Synthetic
ggagccagauagcccccuaa

SEQ ID NO: 61603 - DNA, 25 bp, Artificial Sequence
  Synthetic
agctgtgaugcatgatattcuggac

SEQ ID NO: 61604 - DNA, 22 bp, Artificial Sequence
  Synthetic
gcaatgccautggctgtatugt

SEQ ID NO: 61605 - DNA, 24 bp, Artificial Sequence
  Synthetic
ggagctaaacccutagagggatuc

SEQ ID NO: 61606 - DNA, 27 bp, Artificial Sequence
  Synthetic
acctggtguaaacagactaattuggaa

SEQ ID NO: 61607 - DNA, 23 bp, Artificial Sequence
  Synthetic
ccttctttacguccaaggcacuc

SEQ ID NO: 61608 - DNA, 23 bp, Artificial Sequence
  Synthetic
acttctgggaagugtcctgauga

SEQ ID NO: 61609 - DNA, 23 bp, Artificial Sequence
  Synthetic
tcctttgttgcuacgacccauac

SEQ ID NO: 61610 - DNA, 21 bp, Artificial Sequence
  Synthetic
tctcuggcagctctagugact

SEQ ID NO: 61611 - DNA, 25 bp, Artificial Sequence
  Synthetic
aatgatagagcccauggatguagga

SEQ ID NO: 61612 - DNA, 21 bp, Artificial Sequence
  Synthetic
aatggccuggaaacatgguca

SEQ ID NO: 61613 - DNA, 28 bp, Artificial Sequence
  Synthetic
gaccatggtaaacaugaggtacttgaua

SEQ ID NO: 61614 - DNA, 18 bp, Artificial Sequence
  Synthetic
cctcuggagcaccuagcc

SEQ ID NO: 61615 - DNA, 20 bp, Artificial Sequence
  Synthetic
tgcctatcacuccgcctcut

SEQ ID NO: 61616 - DNA, 21 bp, Artificial Sequence
  Synthetic
actgcaguttgttccucggat

SEQ ID NO: 61617 - DNA, 22 bp, Artificial Sequence
  Synthetic
cacaaacucggagcugcaaaag

SEQ ID NO: 61618 - DNA, 28 bp, Artificial Sequence
  Synthetic
cagttctttcaugctattaaacgaggut

SEQ ID NO: 61619 - DNA, 28 bp, Artificial Sequence
  Synthetic
caataauaacccacatccauaagccagt

SEQ ID NO: 61620 - DNA, 21 bp, Artificial Sequence
  Synthetic
ggcucatgucacccacacaat

SEQ ID NO: 61621 - DNA, 26 bp, Artificial Sequence
  Synthetic
ggccacttgcutcttataatagucct

SEQ ID NO: 61622 - DNA, 24 bp, Artificial Sequence
  Synthetic
ccaacacaaugcaaatgacagcut

SEQ ID NO: 61623 - DNA, 24 bp, Artificial Sequence
  Synthetic
actccacaaacuttttccagcuct

SEQ ID NO: 61624 - DNA, 21 bp, Artificial Sequence
  Synthetic
cgcagagautggcttccugac

SEQ ID NO: 61625 - DNA, 25 bp, Artificial Sequence
  Synthetic
gagaaaggtgugcatctatgaucct

SEQ ID NO: 61626 - DNA, 21 bp, Artificial Sequence
  Synthetic
gccaggtgutttcagggacut

SEQ ID NO: 61627 - DNA, 24 bp, Artificial Sequence
  Synthetic
caagcctcuagctccttgattcug

SEQ ID NO: 61628 - DNA, 24 bp, Artificial Sequence
  Synthetic
ccutgcagaauccaagaaaacagg

SEQ ID NO: 61629 - DNA, 24 bp, Artificial Sequence
  Synthetic
cattttccccutacctccatugct

SEQ ID NO: 61630 - DNA, 27 bp, Artificial Sequence
  Synthetic
gggaagugaaagaacttgaaagatuca

SEQ ID NO: 61631 - DNA, 28 bp, Artificial Sequence
  Synthetic
gaaataactgtgauttggcttccaucaa

SEQ ID NO: 61632 - DNA, 28 bp, Artificial Sequence
  Synthetic
gtctgacagagtuctcattacccaaaut

SEQ ID NO: 61633 - DNA, 27 bp, Artificial Sequence
  Synthetic
tcattttggctuctatacctccaugat

SEQ ID NO: 61634 - DNA, 26 bp, Artificial Sequence
  Synthetic
gctattgtugcaagaacagucagaat

SEQ ID NO: 61635 - DNA, 17 bp, Artificial Sequence
  Synthetic
tcugctcugccacgcaa

SEQ ID NO: 61636 - DNA, 22 bp, Artificial Sequence
  Synthetic
cactuggaaggagcaaacgaug

SEQ ID NO: 61637 - DNA, 23 bp, Artificial Sequence
  Synthetic
cttagtgtuggcctgagaaggut

SEQ ID NO: 61638 - DNA, 21 bp, Artificial Sequence
  Synthetic
cccutcuccagagaggcaaag

SEQ ID NO: 61639 - DNA, 22 bp, Artificial Sequence
  Synthetic
ctcaggcuacatttgacgcuca

SEQ ID NO: 61640 - DNA, 23 bp, Artificial Sequence
  Synthetic
gagccugtgctcttugaagagaa

SEQ ID NO: 61641 - DNA, 23 bp, Artificial Sequence
  Synthetic
gtccgtacuagtgctttcuggaa

SEQ ID NO: 61642 - DNA, 20 bp, Artificial Sequence
  Synthetic
ctgtggccutctgcagacut

SEQ ID NO: 61643 - DNA, 19 bp, Artificial Sequence
  Synthetic
gccauagcccggtcagtut

SEQ ID NO: 61644 - DNA, 20 bp, Artificial Sequence
  Synthetic
ctaagtccaggugtggcgut

SEQ ID NO: 61645 - DNA, 18 bp, Artificial Sequence
  Synthetic
guagacggagcggtuggt

SEQ ID NO: 61646 - DNA, 22 bp, Artificial Sequence
  Synthetic
atctucagcacctcugacacag

SEQ ID NO: 61647 - DNA, 20 bp, Artificial Sequence
  Synthetic
cgggatuggcagtcttcaut

SEQ ID NO: 61648 - DNA, 21 bp, Artificial Sequence
  Synthetic
cggaauggctgttcuggaagt

SEQ ID NO: 61649 - DNA, 24 bp, Artificial Sequence
  Synthetic
gacgtgtttcugggtttgcttaut

SEQ ID NO: 61650 - DNA, 28 bp, Artificial Sequence
  Synthetic
gtaaaacttctctuctccgaggacaaua

SEQ ID NO: 61651 - DNA, 21 bp, Artificial Sequence
  Synthetic
ctctccccacgugcatacaut

SEQ ID NO: 61652 - DNA, 27 bp, Artificial Sequence
  Synthetic
cacaagaaaugaaaataagctgctucc

SEQ ID NO: 61653 - DNA, 28 bp, Artificial Sequence
  Synthetic
tcacaccacatuttagtcatatgcaugt

SEQ ID NO: 61654 - DNA, 22 bp, Artificial Sequence
  Synthetic
agggtgtatgcuccagcttcua

SEQ ID NO: 61655 - DNA, 23 bp, Artificial Sequence
  Synthetic
ctttcccucaccatgacguaagg

SEQ ID NO: 61656 - DNA, 22 bp, Artificial Sequence
  Synthetic
ggtggtcagucatgtgtgucat

SEQ ID NO: 61657 - DNA, 20 bp, Artificial Sequence
  Synthetic
gtcctucaggtccacuggag

SEQ ID NO: 61658 - DNA, 21 bp, Artificial Sequence
  Synthetic
cgagagccaggaguctgatuc

SEQ ID NO: 61659 - DNA, 21 bp, Artificial Sequence
  Synthetic
aagagtguacagcggcatugt

SEQ ID NO: 61660 - DNA, 19 bp, Artificial Sequence
  Synthetic
atggcagggucaagctugt

SEQ ID NO: 61661 - DNA, 18 bp, Artificial Sequence
  Synthetic
ggaaagccagcccugcut

SEQ ID NO: 61662 - DNA, 28 bp, Artificial Sequence
  Synthetic
ggaaatgtaacautaggctcaattuggt

SEQ ID NO: 61663 - DNA, 24 bp, Artificial Sequence
  Synthetic
ccattatcaccuctaaccggtgut

SEQ ID NO: 61664 - DNA, 21 bp, Artificial Sequence
  Synthetic
gggacagaaucagggucaggt

SEQ ID NO: 61665 - DNA, 28 bp, Artificial Sequence
  Synthetic
ttgtaggtgacautggtgatgaagauag

SEQ ID NO: 61666 - DNA, 22 bp, Artificial Sequence
  Synthetic
gcgatgaccuctattccuacgg

SEQ ID NO: 61667 - DNA, 28 bp, Artificial Sequence
  Synthetic
caaggtgtauggtcagagactuagaaat

SEQ ID NO: 61668 - DNA, 22 bp, Artificial Sequence
  Synthetic
cctggtggagaugcttttccug

SEQ ID NO: 61669 - DNA, 21 bp, Artificial Sequence
  Synthetic
cagtccctuctttgccgtuct

SEQ ID NO: 61670 - DNA, 21 bp, Artificial Sequence
  Synthetic
ctcatttgtgugtcccccuct

SEQ ID NO: 61671 - DNA, 22 bp, Artificial Sequence
  Synthetic
accctccacauaggccatttug

SEQ ID NO: 61672 - DNA, 20 bp, Artificial Sequence
  Synthetic
gacacguggcagcuaaacac

SEQ ID NO: 61673 - DNA, 21 bp, Artificial Sequence
  Synthetic
ggagauttggacucccagcac

SEQ ID NO: 61674 - DNA, 19 bp, Artificial Sequence
  Synthetic
ctguccggtcugcaacact

SEQ ID NO: 61675 - DNA, 22 bp, Artificial Sequence
  Synthetic
gtaggaagucctagagggugct

SEQ ID NO: 61676 - DNA, 19 bp, Artificial Sequence
  Synthetic
cggtgaccccutgtagcug

SEQ ID NO: 61677 - DNA, 21 bp, Artificial Sequence
  Synthetic
tcgttcaccacgucgaagaug

SEQ ID NO: 61678 - DNA, 20 bp, Artificial Sequence
  Synthetic
ggaatgcccugatccuccat

SEQ ID NO: 61679 - DNA, 26 bp, Artificial Sequence
  Synthetic
gcaaagaagaagutgttgtagtgucc

SEQ ID NO: 61680 - DNA, 18 bp, Artificial Sequence
  Synthetic
tgtgcucccctcccucag

SEQ ID NO: 61681 - DNA, 22 bp, Artificial Sequence
  Synthetic
tgatgucgaagaccaccctgua

SEQ ID NO: 61682 - DNA, 22 bp, Artificial Sequence
  Synthetic
gacccaguacccagacgtcuat

SEQ ID NO: 61683 - DNA, 21 bp, Artificial Sequence
  Synthetic
ggccucctgagaucacaggaa

SEQ ID NO: 61684 - DNA, 19 bp, Artificial Sequence
  Synthetic
gcgtguccccatcccauag

SEQ ID NO: 61685 - DNA, 23 bp, Artificial Sequence
  Synthetic
ggcctcttcuctctggtcctuag

SEQ ID NO: 61686 - DNA, 25 bp, Artificial Sequence
  Synthetic
cttaaactugcctcgaaggucaaag

SEQ ID NO: 61687 - DNA, 24 bp, Artificial Sequence
  Synthetic
cggtacuggaagacgagauaagga

SEQ ID NO: 61688 - DNA, 21 bp, Artificial Sequence
  Synthetic
gagcagtacuccccgcuaaag

SEQ ID NO: 61689 - DNA, 22 bp, Artificial Sequence
  Synthetic
ccatgatccutccttgcuccat

SEQ ID NO: 61690 - DNA, 18 bp, Artificial Sequence
  Synthetic
ccgcgguctgctauacga

SEQ ID NO: 61691 - DNA, 27 bp, Artificial Sequence
  Synthetic
cacaautctgaaguagaagaggacgac

SEQ ID NO: 61692 - DNA, 20 bp, Artificial Sequence
  Synthetic
gtgacgcgggacugatacuc

SEQ ID NO: 61693 - DNA, 21 bp, Artificial Sequence
  Synthetic
gggtcagutcgagtuggagat

SEQ ID NO: 61694 - DNA, 19 bp, Artificial Sequence
  Synthetic
ccccggcutctctgcatua

SEQ ID NO: 61695 - DNA, 18 bp, Artificial Sequence
  Synthetic
gaucccacucgcacagca

SEQ ID NO: 61696 - DNA, 21 bp, Artificial Sequence
  Synthetic
gtgatgcaggucagcacttuc

SEQ ID NO: 61697 - DNA, 29 bp, Artificial Sequence
  Synthetic
gctatcgccautattacaagagtuaagca

SEQ ID NO: 61698 - DNA, 22 bp, Artificial Sequence
  Synthetic
tgggtattgtugggaggaggua

SEQ ID NO: 61699 - DNA, 21 bp, Artificial Sequence
  Synthetic
gccucagactacauccaaggg

SEQ ID NO: 61700 - DNA, 25 bp, Artificial Sequence
  Synthetic
gcaggaaaaguacaagagccaaauc

SEQ ID NO: 61701 - DNA, 27 bp, Artificial Sequence
  Synthetic
gcaaggaacucactttcttcuaagcaa

SEQ ID NO: 61702 - DNA, 21 bp, Artificial Sequence
  Synthetic
ttctggagggugctgtucaag

SEQ ID NO: 61703 - DNA, 20 bp, Artificial Sequence
  Synthetic
caaacaccacuccggtucca

SEQ ID NO: 61704 - DNA, 22 bp, Artificial Sequence
  Synthetic
ctcatgagcagucagagagcug

SEQ ID NO: 61705 - DNA, 22 bp, Artificial Sequence
  Synthetic
ctcacttctucacccaggguaa

SEQ ID NO: 61706 - DNA, 24 bp, Artificial Sequence
  Synthetic
ggattctctcuagctcccctctut

SEQ ID NO: 61707 - DNA, 21 bp, Artificial Sequence
  Synthetic
acactccugagtcccuaaccc

SEQ ID NO: 61708 - DNA, 22 bp, Artificial Sequence
  Synthetic
caggaagagcautagguccaca

SEQ ID NO: 61709 - DNA, 23 bp, Artificial Sequence
  Synthetic
ctatttaugaccgccuggagcaa

SEQ ID NO: 61710 - DNA, 28 bp, Artificial Sequence
  Synthetic
gtctactgttcauttcagctttaacgug

SEQ ID NO: 61711 - DNA, 25 bp, Artificial Sequence
  Synthetic
agggtcccuatacagtagaugcaat

SEQ ID NO: 61712 - DNA, 21 bp, Artificial Sequence
  Synthetic
ctgggagagagcutcctguag

SEQ ID NO: 61713 - DNA, 24 bp, Artificial Sequence
  Synthetic
acaccatttgcuacctttgggaut

SEQ ID NO: 61714 - DNA, 24 bp, Artificial Sequence
  Synthetic
gctgtgactguactacttcctgut

SEQ ID NO: 61715 - DNA, 25 bp, Artificial Sequence
  Synthetic
aggaccagutattgttugaaaggca

SEQ ID NO: 61716 - DNA, 26 bp, Artificial Sequence
  Synthetic
accucttctctuagaaccaggaaaga

SEQ ID NO: 61717 - DNA, 23 bp, Artificial Sequence
  Synthetic
tcagagaugcacgaatggaugac

SEQ ID NO: 61718 - DNA, 25 bp, Artificial Sequence
  Synthetic
agctggtggugaagttgattacaut

SEQ ID NO: 61719 - DNA, 28 bp, Artificial Sequence
  Synthetic
cttgctcaaggaaugcattttcttauga

SEQ ID NO: 61720 - DNA, 24 bp, Artificial Sequence
  Synthetic
gaaaggcatauggaacaggaguca

SEQ ID NO: 61721 - DNA, 24 bp, Artificial Sequence
  Synthetic
ctttcctaugaaggtgtguagcca

SEQ ID NO: 61722 - DNA, 25 bp, Artificial Sequence
  Synthetic
gatcccaaaccuttgacacatgtug

SEQ ID NO: 61723 - DNA, 27 bp, Artificial Sequence
  Synthetic
ctttttattgctutgtggtgaccucat

SEQ ID NO: 61724 - DNA, 20 bp, Artificial Sequence
  Synthetic
ggtcctcugccctcagucat

SEQ ID NO: 61725 - DNA, 17 bp, Artificial Sequence
  Synthetic
gcaggcugcccgtacug

SEQ ID NO: 61726 - DNA, 22 bp, Artificial Sequence
  Synthetic
aactgtaacccugcaaagcuga

SEQ ID NO: 61727 - DNA, 28 bp, Artificial Sequence
  Synthetic
aaccaactcautctgttacugaagaaca

SEQ ID NO: 61728 - DNA, 20 bp, Artificial Sequence
  Synthetic
ccctgaccagacuccacuga

SEQ ID NO: 61729 - DNA, 21 bp, Artificial Sequence
  Synthetic
gttgagaacuggctugcaagt

SEQ ID NO: 61730 - DNA, 22 bp, Artificial Sequence
  Synthetic
aggaaucagaggcaaaguggag

SEQ ID NO: 61731 - DNA, 26 bp, Artificial Sequence
  Synthetic
ccttattaccccuacttgcacuagag

SEQ ID NO: 61732 - DNA, 21 bp, Artificial Sequence
  Synthetic
tgctcacacugttcagucgaa

SEQ ID NO: 61733 - DNA, 28 bp, Artificial Sequence
  Synthetic
ccgttagctgtaaucacaccacattaua

SEQ ID NO: 61734 - DNA, 23 bp, Artificial Sequence
  Synthetic
caacuggtctcatucaggaaggt

SEQ ID NO: 61735 - DNA, 27 bp, Artificial Sequence
  Synthetic
gggtgctguagtgagttauaaaggaat

SEQ ID NO: 61736 - DNA, 26 bp, Artificial Sequence
  Synthetic
aaaatggatccaaguatgggtgugaa

SEQ ID NO: 61737 - DNA, 28 bp, Artificial Sequence
  Synthetic
gcatttgactucagtttccaaagaguaa

SEQ ID NO: 61738 - DNA, 23 bp, Artificial Sequence
  Synthetic
aagggaugacaccagtucaagac

SEQ ID NO: 61739 - DNA, 29 bp, Artificial Sequence
  Synthetic
agctcccaaacuagcacataaaauaacaa

SEQ ID NO: 61740 - DNA, 28 bp, Artificial Sequence
  Synthetic
aaagaatcaatccugtgttacaggugaa

SEQ ID NO: 61741 - DNA, 26 bp, Artificial Sequence
  Synthetic
ggccagtttuagcttttcaggacuat

SEQ ID NO: 61742 - DNA, 23 bp, Artificial Sequence
  Synthetic
gagagagagagutcctccuggaa

SEQ ID NO: 61743 - DNA, 23 bp, Artificial Sequence
  Synthetic
gatgaacugccacattgttucct

SEQ ID NO: 61744 - DNA, 24 bp, Artificial Sequence
  Synthetic
ccttatccugaaggagagcttugg

SEQ ID NO: 61745 - DNA, 28 bp, Artificial Sequence
  Synthetic
tttctccataugggtcatctagguaact

SEQ ID NO: 61746 - DNA, 21 bp, Artificial Sequence
  Synthetic
gggucagaaaggtgaugaagg

SEQ ID NO: 61747 - DNA, 25 bp, Artificial Sequence
  Synthetic
tgaggccaaccuttagctagagtua

SEQ ID NO: 61748 - DNA, 20 bp, Artificial Sequence
  Synthetic
ctttcacgguttccctggug

SEQ ID NO: 61749 - DNA, 23 bp, Artificial Sequence
  Synthetic
ctccaaugcaccggaaaaatuct

SEQ ID NO: 61750 - DNA, 29 bp, Artificial Sequence
  Synthetic
cagtacgactttuccttcttccaatcaua

SEQ ID NO: 61751 - DNA, 28 bp, Artificial Sequence
  Synthetic
cattctttgcuaatttcctttcctugct

SEQ ID NO: 61752 - DNA, 25 bp, Artificial Sequence
  Synthetic
gggtagctgugagatttgtattuca

SEQ ID NO: 61753 - DNA, 24 bp, Artificial Sequence
  Synthetic
caaaggcuacaggtgagtuaacca

SEQ ID NO: 61754 - DNA, 23 bp, Artificial Sequence
  Synthetic
gggttgtuagggaaggagaagua

SEQ ID NO: 61755 - DNA, 27 bp, Artificial Sequence
  Synthetic
agctgattaacauttgttcctcuccaa

SEQ ID NO: 61756 - DNA, 29 bp, Artificial Sequence
  Synthetic
catctaaaataauccccagaactcaccut

SEQ ID NO: 61757 - DNA, 27 bp, Artificial Sequence
  Synthetic
ctgcttacugaaacatgaaaacctugt

SEQ ID NO: 61758 - DNA, 22 bp, Artificial Sequence
  Synthetic
ggagguacggatcctctuccaa

SEQ ID NO: 61759 - DNA, 21 bp, Artificial Sequence
  Synthetic
cattctgcuctgtcgctucct

SEQ ID NO: 61760 - DNA, 19 bp, Artificial Sequence
  Synthetic
cgtgcacccuccaguagga

SEQ ID NO: 61761 - DNA, 22 bp, Artificial Sequence
  Synthetic
gctaccaagcugtttgcuagga

SEQ ID NO: 61762 - DNA, 22 bp, Artificial Sequence
  Synthetic
gacaggagccautcaaguagca

SEQ ID NO: 61763 - DNA, 28 bp, Artificial Sequence
  Synthetic
ttctttttguaccagtattucgaaccct

SEQ ID NO: 61764 - DNA, 20 bp, Artificial Sequence
  Synthetic
gcacgggccugtagtaggua

SEQ ID NO: 61765 - DNA, 22 bp, Artificial Sequence
  Synthetic
tctggguctcgtacucgaagat

SEQ ID NO: 61766 - DNA, 25 bp, Artificial Sequence
  Synthetic
acctttctugtccattatugcccaa

SEQ ID NO: 61767 - DNA, 22 bp, Artificial Sequence
  Synthetic
aaggaaccugaacgtgttucca

SEQ ID NO: 61768 - DNA, 21 bp, Artificial Sequence
  Synthetic
ctcagagguccaccagacuca

SEQ ID NO: 61769 - DNA, 28 bp, Artificial Sequence
  Synthetic
gcaacagagtugaagaaacttgattuca

SEQ ID NO: 61770 - DNA, 26 bp, Artificial Sequence
  Synthetic
ttgtgaactgaaguacagaactcugg

SEQ ID NO: 61771 - DNA, 25 bp, Artificial Sequence
  Synthetic
agctgactctauctttgccttcuct

SEQ ID NO: 61772 - DNA, 19 bp, Artificial Sequence
  Synthetic
ggaagggcuccatcctguc

SEQ ID NO: 61773 - DNA, 19 bp, Artificial Sequence
  Synthetic
gggugacggtgactugact

SEQ ID NO: 61774 - DNA, 24 bp, Artificial Sequence
  Synthetic
ggcctttgtgucctccttaacuaa

SEQ ID NO: 61775 - DNA, 20 bp, Artificial Sequence
  Synthetic
ccucgtaauccaccccgact

SEQ ID NO: 61776 - DNA, 27 bp, Artificial Sequence
  Synthetic
tcttatctcaccgucctttgttcuagt

SEQ ID NO: 61777 - DNA, 28 bp, Artificial Sequence
  Synthetic
ctcagccatgugtctcttatttttctug

SEQ ID NO: 61778 - DNA, 20 bp, Artificial Sequence
  Synthetic
caggctgguatctgcgtugt

SEQ ID NO: 61779 - DNA, 22 bp, Artificial Sequence
  Synthetic
gcagaacuttgucccagagcat

SEQ ID NO: 61780 - DNA, 24 bp, Artificial Sequence
  Synthetic
tctcgaaggucagagccaattcua

SEQ ID NO: 61781 - DNA, 24 bp, Artificial Sequence
  Synthetic
ctgtaagtgacugctccatacucc

SEQ ID NO: 61782 - DNA, 19 bp, Artificial Sequence
  Synthetic
tggtcacugcggaccatuc

SEQ ID NO: 61783 - DNA, 22 bp, Artificial Sequence
  Synthetic
gutgtcattgaguccccaccat

SEQ ID NO: 61784 - DNA, 24 bp, Artificial Sequence
  Synthetic
ggacagttugggtaaacagucact

SEQ ID NO: 61785 - DNA, 27 bp, Artificial Sequence
  Synthetic
cctgtagcttgaucacctcattcttut

SEQ ID NO: 61786 - DNA, 25 bp, Artificial Sequence
  Synthetic
gaaacaggautttgcaagaauggct

SEQ ID NO: 61787 - DNA, 24 bp, Artificial Sequence
  Synthetic
cagtcggagcuaaaactcccttut

SEQ ID NO: 61788 - DNA, 17 bp, Artificial Sequence
  Synthetic
tgcgaccguacgacgug

SEQ ID NO: 61789 - DNA, 23 bp, Artificial Sequence
  Synthetic
cagggaccucctcagtcuagaaa

SEQ ID NO: 61790 - DNA, 17 bp, Artificial Sequence
  Synthetic
gtccccaggugcagucc

SEQ ID NO: 61791 - DNA, 19 bp, Artificial Sequence
  Synthetic
ggagatgcugagcgtcugt

SEQ ID NO: 61792 - DNA, 22 bp, Artificial Sequence
  Synthetic
cctcccagagcugcagauagaa

SEQ ID NO: 61793 - DNA, 26 bp, Artificial Sequence
  Synthetic
cctttaccagtcuatctcagcctcua

SEQ ID NO: 61794 - DNA, 21 bp, Artificial Sequence
  Synthetic
gcagctgtuacctgagcgaua

SEQ ID NO: 61795 - DNA, 24 bp, Artificial Sequence
  Synthetic
cttaactctcccguccttcttgug

SEQ ID NO: 61796 - DNA, 24 bp, Artificial Sequence
  Synthetic
agtccagtcucaatccctttcuct

SEQ ID NO: 61797 - DNA, 26 bp, Artificial Sequence
  Synthetic
cacgtgaaguataagatccgaaugga

SEQ ID NO: 61798 - DNA, 21 bp, Artificial Sequence
  Synthetic
tgccaaugcaccucagaaact

SEQ ID NO: 61799 - DNA, 27 bp, Artificial Sequence
  Synthetic
tcggatggaauggaagaaatattuggt

SEQ ID NO: 61800 - DNA, 22 bp, Artificial Sequence
  Synthetic
tcuccaacaccaccaacugaac

SEQ ID NO: 61801 - DNA, 27 bp, Artificial Sequence
  Synthetic
ttgctttccaacacauttgacaatuct

SEQ ID NO: 61802 - DNA, 26 bp, Artificial Sequence
  Synthetic
agtgactgccaugcatataacacaua

SEQ ID NO: 61803 - DNA, 32 bp, Artificial Sequence
  Synthetic
ttttctattatattutcttagggtcugccagg

SEQ ID NO: 61804 - DNA, 27 bp, Artificial Sequence
  Synthetic
gttaactaaaatgutgtgcagcacuga

SEQ ID NO: 61805 - DNA, 21 bp, Artificial Sequence
  Synthetic
gggtccuccaggtcuacaagg

SEQ ID NO: 61806 - DNA, 28 bp, Artificial Sequence
  Synthetic
tcttcagugtttatcttuccagaaagca

SEQ ID NO: 61807 - DNA, 24 bp, Artificial Sequence
  Synthetic
ccactcatucattttgtcccucac

SEQ ID NO: 61808 - DNA, 24 bp, Artificial Sequence
  Synthetic
tctccatcctucacttctccctua

SEQ ID NO: 61809 - DNA, 23 bp, Artificial Sequence
  Synthetic
caucctgcactaucagcaagagg

SEQ ID NO: 61810 - DNA, 27 bp, Artificial Sequence
  Synthetic
tttttaggacagacgugaagatccauc

SEQ ID NO: 61811 - DNA, 28 bp, Artificial Sequence
  Synthetic
tgggcttttctcuatttcatgttccaut

SEQ ID NO: 61812 - DNA, 22 bp, Artificial Sequence
  Synthetic
ggcttatgguagcagccactua

SEQ ID NO: 61813 - DNA, 22 bp, Artificial Sequence
  Synthetic
ccctgtacucccagccaaauag

SEQ ID NO: 61814 - DNA, 27 bp, Artificial Sequence
  Synthetic
ctttgaacuattcaacaugcccagaac

SEQ ID NO: 61815 - DNA, 24 bp, Artificial Sequence
  Synthetic
tcctgatgtucctgcttgtcttut

SEQ ID NO: 61816 - DNA, 28 bp, Artificial Sequence
  Synthetic
ttgccaagatauaatcacagatgtugga

SEQ ID NO: 61817 - DNA, 26 bp, Artificial Sequence
  Synthetic
ccgtctatacutgagaactccuggaa

SEQ ID NO: 61818 - DNA, 28 bp, Artificial Sequence
  Synthetic
gcaatccatttaautggtcagttcugaa

SEQ ID NO: 61819 - DNA, 24 bp, Artificial Sequence
  Synthetic
gtgagauttactcaguggcagact

SEQ ID NO: 61820 - DNA, 25 bp, Artificial Sequence
  Synthetic
cattttggagcutcgtgtctccuaa

SEQ ID NO: 61821 - DNA, 24 bp, Artificial Sequence
  Synthetic
gagagtcatcuctaccagctcuga

SEQ ID NO: 61822 - DNA, 26 bp, Artificial Sequence
  Synthetic
catcttagguggacttagtcttuggg

SEQ ID NO: 61823 - DNA, 25 bp, Artificial Sequence
  Synthetic
aatatattttgtccugtgcccctut

SEQ ID NO: 61824 - DNA, 23 bp, Artificial Sequence
  Synthetic
cacactgaagucctttggctuct

SEQ ID NO: 61825 - DNA, 26 bp, Artificial Sequence
  Synthetic
tgaaatcatttucccatcctcaccut

SEQ ID NO: 61826 - DNA, 28 bp, Artificial Sequence
  Synthetic
ccttcttcctutgaatccttattuccgt

SEQ ID NO: 61827 - DNA, 27 bp, Artificial Sequence
  Synthetic
gggctatgaaguttctggatgtcuaat

SEQ ID NO: 61828 - DNA, 23 bp, Artificial Sequence
  Synthetic
cgtctgugaggaagggatcugaa

SEQ ID NO: 61829 - DNA, 28 bp, Artificial Sequence
  Synthetic
gataacacaugaaagcataggaugggat

SEQ ID NO: 61830 - DNA, 25 bp, Artificial Sequence
  Synthetic
cagaaattgtugatggcaacgugaa

SEQ ID NO: 61831 - DNA, 28 bp, Artificial Sequence
  Synthetic
ctgttggacttuaaaacatcttgcucaa

SEQ ID NO: 61832 - DNA, 21 bp, Artificial Sequence
  Synthetic
ctcagcagguaacagccugaa

SEQ ID NO: 61833 - DNA, 19 bp, Artificial Sequence
  Synthetic
gacgccgacucgtaaucct

SEQ ID NO: 61834 - DNA, 21 bp, Artificial Sequence
  Synthetic
tccatcauggccauccagaac

SEQ ID NO: 61835 - DNA, 23 bp, Artificial Sequence
  Synthetic
ccttcgacgucagctucaagaat

SEQ ID NO: 61836 - DNA, 24 bp, Artificial Sequence
  Synthetic
tgaagcagtaugagcacaacauca

SEQ ID NO: 61837 - DNA, 22 bp, Artificial Sequence
  Synthetic
augaagaaagcacccugaggag

SEQ ID NO: 61838 - DNA, 28 bp, Artificial Sequence
  Synthetic
cctaactctagttuggaaaagagacgut

SEQ ID NO: 61839 - DNA, 28 bp, Artificial Sequence
  Synthetic
aatgaagtaucaaacaactacgccuaca

SEQ ID NO: 61840 - DNA, 25 bp, Artificial Sequence
  Synthetic
agcagaatgacagutttggatguct

SEQ ID NO: 61841 - DNA, 24 bp, Artificial Sequence
  Synthetic
gttgctaugaacccaatcatgcut

SEQ ID NO: 61842 - DNA, 28 bp, Artificial Sequence
  Synthetic
cagtgaatgttattuatgagggctggua

SEQ ID NO: 61843 - DNA, 28 bp, Artificial Sequence
  Synthetic
tgttaaatcacugtttccauccagagac

SEQ ID NO: 61844 - DNA, 20 bp, Artificial Sequence
  Synthetic
gcatgccacgucttgcuaaa

SEQ ID NO: 61845 - DNA, 26 bp, Artificial Sequence
  Synthetic
catgagtttcuccaaagacggtaugt

SEQ ID NO: 61846 - DNA, 26 bp, Artificial Sequence
  Synthetic
gtcaaggaguccaaaagacagtucat

SEQ ID NO: 61847 - DNA, 22 bp, Artificial Sequence
  Synthetic
tccttattcgcugacctcucgt

SEQ ID NO: 61848 - DNA, 27 bp, Artificial Sequence
  Synthetic
ggtgcuaaaaagatcaaagtugcagaa

SEQ ID NO: 61849 - DNA, 22 bp, Artificial Sequence
  Synthetic
ggtcactttccuctgtcagcuc

SEQ ID NO: 61850 - DNA, 28 bp, Artificial Sequence
  Synthetic
ctaattttattgucacccctctcctugt

SEQ ID NO: 61851 - DNA, 29 bp, Artificial Sequence
  Synthetic
cttgagtgcagaacugaaaagattuagaa

SEQ ID NO: 61852 - DNA, 26 bp, Artificial Sequence
  Synthetic
tgaggttugcaaaaggatctgtaugt

SEQ ID NO: 61853 - DNA, 28 bp, Artificial Sequence
  Synthetic
cttctactuggcaaaacatttuggaact

SEQ ID NO: 61854 - DNA, 26 bp, Artificial Sequence
  Synthetic
acaattctctuggctttgatgucact

SEQ ID NO: 61855 - DNA, 28 bp, Artificial Sequence
  Synthetic
tgcttaatgtucagagtggtauggaaaa

SEQ ID NO: 61856 - DNA, 32 bp, Artificial Sequence
  Synthetic
tcttgcacattguataaacatttaatguaggt

SEQ ID NO: 61857 - DNA, 27 bp, Artificial Sequence
  Synthetic
ctgtgatcagaautcctcctcttugaa

SEQ ID NO: 61858 - DNA, 23 bp, Artificial Sequence
  Synthetic
aggctctgagaaugaagaccuct

SEQ ID NO: 61859 - DNA, 25 bp, Artificial Sequence
  Synthetic
tggtatctgaaccugttccctuaca

SEQ ID NO: 61860 - DNA, 21 bp, Artificial Sequence
  Synthetic
gcaggaugtggatgaugccat

SEQ ID NO: 61861 - DNA, 22 bp, Artificial Sequence
  Synthetic
cccctgcuctatgatcctguga

SEQ ID NO: 61862 - DNA, 22 bp, Artificial Sequence
  Synthetic
cttccttcttutcagggccuct

SEQ ID NO: 61863 - DNA, 21 bp, Artificial Sequence
  Synthetic
tgtaccugagcctgctacuct

SEQ ID NO: 61864 - DNA, 18 bp, Artificial Sequence
  Synthetic
gggaagcugcagatgugg

SEQ ID NO: 61865 - DNA, 21 bp, Artificial Sequence
  Synthetic
catggcccaaauagccugaag

SEQ ID NO: 61866 - DNA, 24 bp, Artificial Sequence
  Synthetic
aagagcaggcagaaaucaagauga

SEQ ID NO: 61867 - DNA, 27 bp, Artificial Sequence
  Synthetic
atgctgaaattcutggttttggaucac

SEQ ID NO: 61868 - DNA, 24 bp, Artificial Sequence
  Synthetic
ggaaagtatgucccacttcucagg

SEQ ID NO: 61869 - DNA, 22 bp, Artificial Sequence
  Synthetic
cctggtauggcctagtgttgut

SEQ ID NO: 61870 - DNA, 19 bp, Artificial Sequence
  Synthetic
cgccccaucatgctgcaua

SEQ ID NO: 61871 - DNA, 24 bp, Artificial Sequence
  Synthetic
gcactggatugagtctaccttcuc

SEQ ID NO: 61872 - DNA, 22 bp, Artificial Sequence
  Synthetic
ggagcaaacauggcacaaacut

SEQ ID NO: 61873 - DNA, 22 bp, Artificial Sequence
  Synthetic
cctcatccccggutctttgtuc

SEQ ID NO: 61874 - DNA, 21 bp, Artificial Sequence
  Synthetic
ctacgacugctcccaacucac

SEQ ID NO: 61875 - DNA, 24 bp, Artificial Sequence
  Synthetic
gcattcctgccugatgtagtttuc

SEQ ID NO: 61876 - DNA, 22 bp, Artificial Sequence
  Synthetic
cttcuagccaccgttagcucag

SEQ ID NO: 61877 - DNA, 26 bp, Artificial Sequence
  Synthetic
tcacttcctttgutccttttgttgug

SEQ ID NO: 61878 - DNA, 26 bp, Artificial Sequence
  Synthetic
acaactattgucatcttggccauacc

SEQ ID NO: 61879 - DNA, 25 bp, Artificial Sequence
  Synthetic
ggtgagctaaaugcctggttactut

SEQ ID NO: 61880 - DNA, 28 bp, Artificial Sequence
  Synthetic
gaaatctatugccaagttctaguccagt

SEQ ID NO: 61881 - DNA, 22 bp, Artificial Sequence
  Synthetic
ttcatgctcucaggctgctuag

SEQ ID NO: 61882 - DNA, 22 bp, Artificial Sequence
  Synthetic
tttgcctuaagcggtaacguct

SEQ ID NO: 61883 - DNA, 26 bp, Artificial Sequence
  Synthetic
cgttcacagauggaagaaaggtucat

SEQ ID NO: 61884 - DNA, 21 bp, Artificial Sequence
  Synthetic
cgtgacccauctgtggtgtua

SEQ ID NO: 61885 - DNA, 27 bp, Artificial Sequence
  Synthetic
atggcatttcttucatgttgcctatut

SEQ ID NO: 61886 - DNA, 28 bp, Artificial Sequence
  Synthetic
aaagagctccacuaaacttaaagucaca

SEQ ID NO: 61887 - DNA, 25 bp, Artificial Sequence
  Synthetic
tctttactggaauctttgcagcuga

SEQ ID NO: 61888 - DNA, 21 bp, Artificial Sequence
  Synthetic
acactgtgcugcctgagatut

SEQ ID NO: 61889 - DNA, 28 bp, Artificial Sequence
  Synthetic
acatctagtaucccaatggaatcttgug

SEQ ID NO: 61890 - DNA, 23 bp, Artificial Sequence
  Synthetic
tcatgctgcagutctgttcauca

SEQ ID NO: 61891 - DNA, 27 bp, Artificial Sequence
  Synthetic
ggagccatuttcctcttttaucccaat

SEQ ID NO: 61892 - DNA, 26 bp, Artificial Sequence
  Synthetic
tgccataaugctgacatucaagaact

SEQ ID NO: 61893 - DNA, 28 bp, Artificial Sequence
  Synthetic
gcgcgttatcugttttatgtctttgtut

SEQ ID NO: 61894 - DNA, 25 bp, Artificial Sequence
  Synthetic
tccatgaagagaaugtgccaauaca

SEQ ID NO: 61895 - DNA, 33 bp, Artificial Sequence
  Synthetic
tttttcatctgaacautgaagaatgacatcuac

SEQ ID NO: 61896 - DNA, 22 bp, Artificial Sequence
  Synthetic
tctaacgttugcatgccaguga

SEQ ID NO: 61897 - DNA, 29 bp, Artificial Sequence
  Synthetic
acttgtctgtgauagattgagggaagaua

SEQ ID NO: 61898 - DNA, 22 bp, Artificial Sequence
  Synthetic
gctggcugcagtaggttaugaa

SEQ ID NO: 61899 - DNA, 28 bp, Artificial Sequence
  Synthetic
gctacccaggtutattatgagaaggtug

SEQ ID NO: 61900 - DNA, 28 bp, Artificial Sequence
  Synthetic
tccttccaggaauacatacactgtguaa

SEQ ID NO: 61901 - DNA, 23 bp, Artificial Sequence
  Synthetic
aggaccagauggacctauagcac

SEQ ID NO: 61902 - DNA, 20 bp, Artificial Sequence
  Synthetic
gaccuggagagcgaggatug

SEQ ID NO: 61903 - DNA, 21 bp, Artificial Sequence
  Synthetic
aggtatcccagcuggacctut

SEQ ID NO: 61904 - DNA, 28 bp, Artificial Sequence
  Synthetic
gagaagagaagauagaacacttgcctua

SEQ ID NO: 61905 - DNA, 22 bp, Artificial Sequence
  Synthetic
ggtttcccaucacttcctgguc

SEQ ID NO: 61906 - DNA, 18 bp, Artificial Sequence
  Synthetic
ggaggcccucctggagut

SEQ ID NO: 61907 - DNA, 27 bp, Artificial Sequence
  Synthetic
acctccaugtttttccatuagaacact

SEQ ID NO: 61908 - DNA, 28 bp, Artificial Sequence
  Synthetic
aggttcagggaaacucatatgatacugt

SEQ ID NO: 61909 - DNA, 21 bp, Artificial Sequence
  Synthetic
gtgtttucccagggtggcaua

SEQ ID NO: 61910 - DNA, 25 bp, Artificial Sequence
  Synthetic
cccccacguaagtatcaacatugac

SEQ ID NO: 61911 - DNA, 28 bp, Artificial Sequence
  Synthetic
ggcttgatgauggctcctaaaacttuat

SEQ ID NO: 61912 - DNA, 27 bp, Artificial Sequence
  Synthetic
ctgtttgtcuccatttacttagugcct

SEQ ID NO: 61913 - DNA, 25 bp, Artificial Sequence
  Synthetic
ttgccttcccaauctcctacattut

SEQ ID NO: 61914 - DNA, 28 bp, Artificial Sequence
  Synthetic
attataatgguggacccaaatgtaacug

SEQ ID NO: 61915 - DNA, 28 bp, Artificial Sequence
  Synthetic
agccaactgtcuaaacaattacactgua

SEQ ID NO: 61916 - DNA, 22 bp, Artificial Sequence
  Synthetic
cagagccaggcautagtccuac

SEQ ID NO: 61917 - DNA, 24 bp, Artificial Sequence
  Synthetic
tccaggcttuaaagtcaagcacut

SEQ ID NO: 61918 - DNA, 18 bp, Artificial Sequence
  Synthetic
aguggccgagctcuacga

SEQ ID NO: 61919 - DNA, 19 bp, Artificial Sequence
  Synthetic
ggagaaggcaggugcugac

SEQ ID NO: 61920 - DNA, 23 bp, Artificial Sequence
  Synthetic
attcctagtguccctctggtcut

SEQ ID NO: 61921 - DNA, 18 bp, Artificial Sequence
  Synthetic
cacagcaucgacggcauc

SEQ ID NO: 61922 - DNA, 17 bp, Artificial Sequence
  Synthetic
gcccuccccacaauggt

SEQ ID NO: 61923 - DNA, 17 bp, Artificial Sequence
  Synthetic
ggcugtucccagcacct

SEQ ID NO: 61924 - DNA, 19 bp, Artificial Sequence
  Synthetic
gagcgcgutccatcctcua

SEQ ID NO: 61925 - DNA, 17 bp, Artificial Sequence
  Synthetic
ccccgccgucttctuca

SEQ ID NO: 61926 - DNA, 27 bp, Artificial Sequence
  Synthetic
aagggauagaaaagaaggcaacaugaa

SEQ ID NO: 61927 - DNA, 23 bp, Artificial Sequence
  Synthetic
gatatcaatgcutgcacgcugac

SEQ ID NO: 61928 - DNA, 22 bp, Artificial Sequence
  Synthetic
ggagaaguctgaacacugcaca

SEQ ID NO: 61929 - DNA, 21 bp, Artificial Sequence
  Synthetic
cgtgggccaucacaagcaaua

SEQ ID NO: 61930 - DNA, 21 bp, Artificial Sequence
  Synthetic
ccccttuggctgtgagauagg

SEQ ID NO: 61931 - DNA, 22 bp, Artificial Sequence
  Synthetic
tgtagacaaagcugcacucagg

SEQ ID NO: 61932 - DNA, 20 bp, Artificial Sequence
  Synthetic
ccagctacuccgttccucac

SEQ ID NO: 61933 - DNA, 22 bp, Artificial Sequence
  Synthetic
ggtgtctgtguccaggaaaguc

SEQ ID NO: 61934 - DNA, 22 bp, Artificial Sequence
  Synthetic
ctcaggaaguccactgtgauga

SEQ ID NO: 61935 - DNA, 22 bp, Artificial Sequence
  Synthetic
ctgtgugaagcccaucaaagac

SEQ ID NO: 61936 - DNA, 25 bp, Artificial Sequence
  Synthetic
ctggaattaaaugatgggccucact

SEQ ID NO: 61937 - DNA, 21 bp, Artificial Sequence
  Synthetic
acacaatgaugctgguccaca

SEQ ID NO: 61938 - DNA, 25 bp, Artificial Sequence
  Synthetic
tggagtttgutatcattgctuggct

SEQ ID NO: 61939 - DNA, 25 bp, Artificial Sequence
  Synthetic
acaaacatccugctactttgaggut

SEQ ID NO: 61940 - DNA, 25 bp, Artificial Sequence
  Synthetic
gacagaucaaagtagggaugaccaa

SEQ ID NO: 61941 - DNA, 23 bp, Artificial Sequence
  Synthetic
acatctucgacagcatcatcguc

SEQ ID NO: 61942 - DNA, 23 bp, Artificial Sequence
  Synthetic
ctccacaggugtagtgtgtucat

SEQ ID NO: 61943 - DNA, 21 bp, Artificial Sequence
  Synthetic
gtacagggagcutcccatcug

SEQ ID NO: 61944 - DNA, 21 bp, Artificial Sequence
  Synthetic
ccccucaauaccaaagccaac

SEQ ID NO: 61945 - DNA, 24 bp, Artificial Sequence
  Synthetic
tccccacgaaugcccatttaauat

SEQ ID NO: 61946 - DNA, 21 bp, Artificial Sequence
  Synthetic
gacaaactcugtgccgacauc

SEQ ID NO: 61947 - DNA, 23 bp, Artificial Sequence
  Synthetic
gggaugaggaugaagaggacact

SEQ ID NO: 61948 - DNA, 21 bp, Artificial Sequence
  Synthetic
ctgcctgutactgaccucacc

SEQ ID NO: 61949 - DNA, 27 bp, Artificial Sequence
  Synthetic
gctggcattugagttaagttcugaaga

SEQ ID NO: 61950 - DNA, 23 bp, Artificial Sequence
  Synthetic
gggtcagaagguaagactucact

SEQ ID NO: 61951 - DNA, 26 bp, Artificial Sequence
  Synthetic
tgtgcagagtuaagacttgcttgtua

SEQ ID NO: 61952 - DNA, 26 bp, Artificial Sequence
  Synthetic
ccataacttaaggugcctttggguaa

SEQ ID NO: 61953 - DNA, 25 bp, Artificial Sequence
  Synthetic
gtcgtttugccactattatcuagcc

SEQ ID NO: 61954 - DNA, 22 bp, Artificial Sequence
  Synthetic
agcugcaggacacaaacaauct

SEQ ID NO: 61955 - DNA, 28 bp, Artificial Sequence
  Synthetic
ggcctcttgauctttattgatcttugga

SEQ ID NO: 61956 - DNA, 23 bp, Artificial Sequence
  Synthetic
gggtgtgtttuctcttgtcagut

SEQ ID NO: 61957 - DNA, 21 bp, Artificial Sequence
  Synthetic
gccttgtgautcatgctgucc

SEQ ID NO: 61958 - DNA, 21 bp, Artificial Sequence
  Synthetic
ctucaccagcaccctcuacac

SEQ ID NO: 61959 - DNA, 24 bp, Artificial Sequence
  Synthetic
gggcttuggataacatugacagga

SEQ ID NO: 61960 - DNA, 28 bp, Artificial Sequence
  Synthetic
acagctttttctutcattgtctcaguct

SEQ ID NO: 61961 - DNA, 23 bp, Artificial Sequence
  Synthetic
gggctaaaauagtggagggtuca

SEQ ID NO: 61962 - DNA, 21 bp, Artificial Sequence
  Synthetic
gggagcacacagcucttctua

SEQ ID NO: 61963 - DNA, 24 bp, Artificial Sequence
  Synthetic
aaaacccaaaaccuaccagtguca

SEQ ID NO: 61964 - DNA, 23 bp, Artificial Sequence
  Synthetic
tucactgacttugaggacaagca

SEQ ID NO: 61965 - DNA, 21 bp, Artificial Sequence
  Synthetic
ctatcccttgucacccccauc

SEQ ID NO: 61966 - DNA, 21 bp, Artificial Sequence
  Synthetic
cctgcgcuttgtcatcaucca

SEQ ID NO: 61967 - DNA, 22 bp, Artificial Sequence
  Synthetic
gcttcgggaaagcacuttccut

SEQ ID NO: 61968 - DNA, 20 bp, Artificial Sequence
  Synthetic
ggtggatcacuccgacgtug

SEQ ID NO: 61969 - DNA, 22 bp, Artificial Sequence
  Synthetic
aagcuagugagagggacacaga

SEQ ID NO: 61970 - DNA, 19 bp, Artificial Sequence
  Synthetic
tgacgcucccccttctcut

SEQ ID NO: 61971 - DNA, 18 bp, Artificial Sequence
  Synthetic
gcccctgugactgcctug

SEQ ID NO: 61972 - DNA, 28 bp, Artificial Sequence
  Synthetic
cgcaaaaatuagagccggaaguaaaaat

SEQ ID NO: 61973 - DNA, 28 bp, Artificial Sequence
  Synthetic
ggtccacatgacautctcaaattgttut

SEQ ID NO: 61974 - DNA, 25 bp, Artificial Sequence
  Synthetic
aatctguaacattcaagugcccact

SEQ ID NO: 61975 - DNA, 22 bp, Artificial Sequence
  Synthetic
cctgataacugtggctgtguct

SEQ ID NO: 61976 - DNA, 20 bp, Artificial Sequence
  Synthetic
tggtgguggagatggacgua

SEQ ID NO: 61977 - DNA, 17 bp, Artificial Sequence
  Synthetic
gggagguggcgaugcag

SEQ ID NO: 61978 - DNA, 29 bp, Artificial Sequence
  Synthetic
ctcgacctatauctcatttggattuccat

SEQ ID NO: 61979 - DNA, 28 bp, Artificial Sequence
  Synthetic
ggaauaggcaacatgtucagagaaagaa

SEQ ID NO: 61980 - DNA, 27 bp, Artificial Sequence
  Synthetic
aaatcacaccacaagutttcactctuc

SEQ ID NO: 61981 - DNA, 27 bp, Artificial Sequence
  Synthetic
gtactttcctgtugggattccatttut

SEQ ID NO: 61982 - DNA, 26 bp, Artificial Sequence
  Synthetic
tgttttacagaugttgatggcaugga

SEQ ID NO: 61983 - DNA, 28 bp, Artificial Sequence
  Synthetic
gcattcatttggauactacctgtucaag

SEQ ID NO: 61984 - DNA, 31 bp, Artificial Sequence; identical to SEQ ID NO: 37154
  Synthetic

SEQ ID NO: 61985 - DNA, 24 bp, Artificial Sequence
  Synthetic
gtgccctctcucagtaagcattut

SEQ ID NO: 61986 - DNA, 23 bp, Artificial Sequence
  Synthetic
tccaatagttgaugagggcccua

SEQ ID NO: 61987 - DNA, 26 bp, Artificial Sequence
  Synthetic
tcaaaattacccugtgggctuaagac

SEQ ID NO: 61988 - DNA, 23 bp, Artificial Sequence
  Synthetic
acccaaaacucaagtggcuacag

SEQ ID NO: 61989 - DNA, 29 bp, Artificial Sequence
  Synthetic
tgctaaggtttggutcagtgaaaataugt

SEQ ID NO: 61990 - DNA, 27 bp, Artificial Sequence
  Synthetic
tcctgtgacauttgtctttcatuacca

SEQ ID NO: 61991 - DNA, 28 bp, Artificial Sequence
  Synthetic
ggatgaaggaacuagaagataactugct

SEQ ID NO: 61992 - DNA, 25 bp, Artificial Sequence
  Synthetic
tccagcaccuccatcttgtattcua

SEQ ID NO: 61993 - DNA, 28 bp, Artificial Sequence
  Synthetic
caaatgaccattutcctagtgtgcuaat

SEQ ID NO: 61994 - DNA, 21 bp, Artificial Sequence
  Synthetic
gatcuccacagccagtaugct

SEQ ID NO: 61995 - DNA, 21 bp, Artificial Sequence
  Synthetic
ccatgauccagacctgctugt

SEQ ID NO: 61996 - DNA, 24 bp, Artificial Sequence
  Synthetic
cttgggaataugaagagcgugaca

SEQ ID NO: 61997 - DNA, 29 bp, Artificial Sequence
  Synthetic
ggtttatgtaagaaauccgttgacacuga

SEQ ID NO: 61998 - DNA, 28 bp, Artificial Sequence
  Synthetic
ctttaagagggugacaatgctattucct

SEQ ID NO: 61999 - DNA, 22 bp, Artificial Sequence
  Synthetic
agtggaaagcuttgacccaucc

SEQ ID NO: 62000 - DNA, 26 bp, Artificial Sequence
  Synthetic
tgactttttgtugcaggatgaacuct

SEQ ID NO: 62001 - DNA, 28 bp, Artificial Sequence
  Synthetic
cacaagcauccagaatcagaaaaaucaa

SEQ ID NO: 62002 - DNA, 19 bp, Artificial Sequence
  Synthetic
cccctaugtacgccuccct

SEQ ID NO: 62003 - DNA, 19 bp, Artificial Sequence
  Synthetic
ccgggaggagacgucaaug

SEQ ID NO: 62004 - DNA, 28 bp, Artificial Sequence
  Synthetic
ccttcaagacucaagggtgataaugaaa

SEQ ID NO: 62005 - DNA, 26 bp, Artificial Sequence
  Synthetic
agcagcagctugatgtaaactactua

SEQ ID NO: 62006 - DNA, 24 bp, Artificial Sequence
  Synthetic
cccacctaatcucagtcccacuat

SEQ ID NO: 62007 - DNA, 28 bp, Artificial Sequence
  Synthetic
gcagaaagaatugaagatgaactuccag

SEQ ID NO: 62008 - DNA, 26 bp, Artificial Sequence
  Synthetic
aggactgtcccautaacaatccuaga

SEQ ID NO: 62009 - DNA, 22 bp, Artificial Sequence
  Synthetic
gggcauccacctgaauaaagga

SEQ ID NO: 62010 - DNA, 20 bp, Artificial Sequence
  Synthetic
ccccagaacaguaccgtcut

SEQ ID NO: 62011 - DNA, 22 bp, Artificial Sequence
  Synthetic
tggatguggcaaaggtgtuaca

SEQ ID NO: 62012 - DNA, 26 bp, Artificial Sequence
  Synthetic
gaacaucccaaaatgcttauggacaa

SEQ ID NO: 62013 - DNA, 24 bp, Artificial Sequence
  Synthetic
gttcctgtttcauagcaagtgcug

SEQ ID NO: 62014 - DNA, 22 bp, Artificial Sequence
  Synthetic
gcucctcagacugaaacacaga

SEQ ID NO: 62015 - DNA, 29 bp, Artificial Sequence
  Synthetic
ccaggtaattcuagcatgtttcctaaugt

SEQ ID NO: 62016 - DNA, 24 bp, Artificial Sequence
  Synthetic
cctgtcaucaagcatatccaguga

SEQ ID NO: 62017 - DNA, 24 bp, Artificial Sequence
  Synthetic
ccactttuagaaatgcuggccaaa

SEQ ID NO: 62018 - DNA, 25 bp, Artificial Sequence
  Synthetic
gggaagatgtuaaaaggtgcctuct

SEQ ID NO: 62019 - DNA, 28 bp, Artificial Sequence
  Synthetic
gaggttttacaautagactgguccacat

SEQ ID NO: 62020 - DNA, 22 bp, Artificial Sequence
  Synthetic
ttgcccagaacgggutttcaua

SEQ ID NO: 62021 - DNA, 23 bp, Artificial Sequence
  Synthetic
ccccaaacautcactggugacat

SEQ ID NO: 62022 - DNA, 24 bp, Artificial Sequence
  Synthetic
gcagaaauaccaggcagagtgtuc

SEQ ID NO: 62023 - DNA, 29 bp, Artificial Sequence
  Synthetic
tgtcttccacagautttcttcttctctut

SEQ ID NO: 62024 - DNA, 17 bp, Artificial Sequence
  Synthetic
cucggguggaccaccac

SEQ ID NO: 62025 - DNA, 17 bp, Artificial Sequence
  Synthetic
gacuccggcagccacut

SEQ ID NO: 62026 - DNA, 20 bp, Artificial Sequence
  Synthetic
gcaugtctggauggcacagt

SEQ ID NO: 62027 - DNA, 18 bp, Artificial Sequence
  Synthetic
tgugcaaggagtgugcct

SEQ ID NO: 62028 - DNA, 21 bp, Artificial Sequence
  Synthetic
guactggtggugacaggacaa

SEQ ID NO: 62029 - DNA, 20 bp, Artificial Sequence
  Synthetic
cccagtugaaccagccacua

SEQ ID NO: 62030 - DNA, 27 bp, Artificial Sequence
  Synthetic
gttcuctatccacaaauaccacacaca

SEQ ID NO: 62031 - DNA, 25 bp, Artificial Sequence
  Synthetic
ttggtgtctcugactctcttctcut

SEQ ID NO: 62032 - DNA, 22 bp, Artificial Sequence
  Synthetic
tggaaggaccaagcuccuaaga

SEQ ID NO: 62033 - DNA, 25 bp, Artificial Sequence
  Synthetic
acactcugaggcccctttataaaug

SEQ ID NO: 62034 - DNA, 21 bp, Artificial Sequence
  Synthetic
cagagcccuctaaagcugaca

SEQ ID NO: 62035 - DNA, 27 bp, Artificial Sequence
  Synthetic
accttaccaaugagggtatccagtauc

SEQ ID NO: 62036 - DNA, 21 bp, Artificial Sequence
  Synthetic
ccaggaccaccucaagatguc

SEQ ID NO: 62037 - DNA, 21 bp, Artificial Sequence
  Synthetic
tgacgcuttcacauccacaca

SEQ ID NO: 62038 - DNA, 27 bp, Artificial Sequence
  Synthetic
gcacaaaatggcuctcagaattatuca

SEQ ID NO: 62039 - DNA, 20 bp, Artificial Sequence
  Synthetic
gcaacccggacuacactugg

SEQ ID NO: 62040 - DNA, 22 bp, Artificial Sequence
  Synthetic
tccaaattccuggcgataugct

SEQ ID NO: 62041 - DNA, 28 bp, Artificial Sequence
  Synthetic
gttaatggaaccaccauttcatgttuca

SEQ ID NO: 62042 - DNA, 23 bp, Artificial Sequence
  Synthetic
tggtatcugagcaactgctctug

SEQ ID NO: 62043 - DNA, 25 bp, Artificial Sequence
  Synthetic
cagttgaugaatggagtguccagaa

SEQ ID NO: 62044 - DNA, 24 bp, Artificial Sequence
  Synthetic
acctggaggagaagugacaguaaa

SEQ ID NO: 62045 - DNA, 27 bp, Artificial Sequence
  Synthetic
agaagacaugaagacattgtucgagat

SEQ ID NO: 62046 - DNA, 27 bp, Artificial Sequence
  Synthetic
ttgtgagaucacataatgacucagcat

SEQ ID NO: 62047 - DNA, 22 bp, Artificial Sequence
  Synthetic
gcagaatggacugcatcctuct

SEQ ID NO: 62048 - DNA, 23 bp, Artificial Sequence
  Synthetic
agctttaggacugataccugcct

SEQ ID NO: 62049 - DNA, 25 bp, Artificial Sequence
  Synthetic
gtatcacatgcaagutgtggcttut

SEQ ID NO: 62050 - DNA, 23 bp, Artificial Sequence
  Synthetic
acaggtggccucagattcuaact

SEQ ID NO: 62051 - DNA, 24 bp, Artificial Sequence
  Synthetic
ctaatgctacagugtctgcctuca

SEQ ID NO: 62052 - DNA, 22 bp, Artificial Sequence
  Synthetic
agaagcggccagugaaatguag

SEQ ID NO: 62053 - DNA, 25 bp, Artificial Sequence
  Synthetic
ctttgttgaugcttctgatgugaca

SEQ ID NO: 62054 - DNA, 23 bp, Artificial Sequence
  Synthetic
gcaacattgguggtgacttcuga

SEQ ID NO: 62055 - DNA, 28 bp, Artificial Sequence
  Synthetic
tcaagagagcutattggacauggaaaaa

SEQ ID NO: 62056 - DNA, 24 bp, Artificial Sequence
  Synthetic
acctuagcaggaaaaaugggagac

SEQ ID NO: 62057 - DNA, 23 bp, Artificial Sequence
  Synthetic
tcctgcttauagctgcctccaua

SEQ ID NO: 62058 - DNA, 25 bp, Artificial Sequence
  Synthetic
gatcttacatugtgtgctaguccca

SEQ ID NO: 62059 - DNA, 25 bp, Artificial Sequence
  Synthetic
aacccaggaauaaactctgcttugt

SEQ ID NO: 62060 - DNA, 23 bp, Artificial Sequence
  Synthetic
acaatgctgauttgcgtcuacca

SEQ ID NO: 62061 - DNA, 27 bp, Artificial Sequence
  Synthetic
atgaatggagguctttgtcatgaauct

SEQ ID NO: 62062 - DNA, 27 bp, Artificial Sequence
  Synthetic
ggctagccauactctttattttctgut

SEQ ID NO: 62063 - DNA, 26 bp, Artificial Sequence
  Synthetic
gcaattccgautccaaauccaacaat

SEQ ID NO: 62064 - DNA, 28 bp, Artificial Sequence
  Synthetic
cagatcttgaaaaauctcagccaaagut

SEQ ID NO: 62065 - DNA, 25 bp, Artificial Sequence
  Synthetic
catctccaaguaggtgctgaauact

SEQ ID NO: 62066 - DNA, 26 bp, Artificial Sequence
  Synthetic
ctttgctaggauctgttgacaaugga

SEQ ID NO: 62067 - DNA, 28 bp, Artificial Sequence
  Synthetic
tgaatcccacugtagtttttctugaagg

SEQ ID NO: 62068 - DNA, 21 bp, Artificial Sequence
  Synthetic
agugtcuccaggagacggaat

SEQ ID NO: 62069 - DNA, 27 bp, Artificial Sequence
  Synthetic
aaacctaccucacagcaacaattctua

SEQ ID NO: 62070 - DNA, 28 bp, Artificial Sequence
  Synthetic
ggagtttgaaagugattatgtggcatut

SEQ ID NO: 62071 - DNA, 29 bp, Artificial Sequence
  Synthetic
aattcaccccttucatttaacagcctaua

SEQ ID NO: 62072 - DNA, 27 bp, Artificial Sequence
  Synthetic
agattcagcuttagccatctucaagaa

SEQ ID NO: 62073 - DNA, 28 bp, Artificial Sequence
  Synthetic
tcaagattuccaatgtacugagcaaaga

SEQ ID NO: 62074 - DNA, 23 bp, Artificial Sequence
  Synthetic
ctctttccuccttccccucagat

SEQ ID NO: 62075 - DNA, 26 bp, Artificial Sequence
  Synthetic
actgaaaaacggcuttctggauagaa

SEQ ID NO: 62076 - DNA, 25 bp, Artificial Sequence
  Synthetic
aatgctagtaggaaaugcaggagug

SEQ ID NO: 62077 - DNA, 28 bp, Artificial Sequence
  Synthetic
ccttgatgatttutgatcccttgttuct

SEQ ID NO: 62078 - DNA, 27 bp, Artificial Sequence
  Synthetic
gattttgctctttugtcatctccagut

SEQ ID NO: 62079 - DNA, 28 bp, Artificial Sequence
  Synthetic
gacctacagtttutgagagcagtatuca

SEQ ID NO: 62080 - DNA, 28 bp, Artificial Sequence
  Synthetic
agaagcaaaaugaggtauccgagaaaaa

SEQ ID NO: 62081 - DNA, 25 bp, Artificial Sequence
  Synthetic
cagtagcagugtattcttggtguca

SEQ ID NO: 62082 - DNA, 26 bp, Artificial Sequence
  Synthetic
gtttttgaatgccautgaaactgcut

SEQ ID NO: 62083 - DNA, 24 bp, Artificial Sequence
  Synthetic
gagatgctgcugctgaaaatcaut

SEQ ID NO: 62084 - DNA, 21 bp, Artificial Sequence
  Synthetic
gcaugcgtgtttugggacaat

SEQ ID NO: 62085 - DNA, 27 bp, Artificial Sequence
  Synthetic
gccccaaaccaaaauacttaagaaguc

SEQ ID NO: 62086 - DNA, 24 bp, Artificial Sequence
  Synthetic
gtcaaagggcutctgggaatguat

SEQ ID NO: 62087 - DNA, 21 bp, Artificial Sequence
  Synthetic
cgttgcaaacgcuatggucac

SEQ ID NO: 62088 - DNA, 20 bp, Artificial Sequence
  Synthetic
ggccaaaugacgtagggcut

SEQ ID NO: 62089 - DNA, 26 bp, Artificial Sequence
  Synthetic
ctaaatggcugcaaagtcacaatgut

SEQ ID NO: 62090 - DNA, 22 bp, Artificial Sequence
  Synthetic
gagaagtucaacgcgtccatug

SEQ ID NO: 62091 - DNA, 22 bp, Artificial Sequence
  Synthetic
gcactgttugctcagggattug

SEQ ID NO: 62092 - DNA, 21 bp, Artificial Sequence
  Synthetic
cuccucagggaagcaacacat

SEQ ID NO: 62093 - DNA, 22 bp, Artificial Sequence
  Synthetic
gcttccaucacacctctgtcug

SEQ ID NO: 62094 - DNA, 18 bp, Artificial Sequence
  Synthetic
gttcucgggcgacgugat

SEQ ID NO: 62095 - DNA, 21 bp, Artificial Sequence
  Synthetic
cctcucgcgcccactttatua

SEQ ID NO: 62096 - DNA, 19 bp, Artificial Sequence
  Synthetic
gccuggcagaaguaccgat

SEQ ID NO: 62097 - DNA, 22 bp, Artificial Sequence
  Synthetic
ctcaggtcugaggatgcatgug

SEQ ID NO: 62098 - DNA, 21 bp, Artificial Sequence
  Synthetic
ccagagcguaggagtctucat

SEQ ID NO: 62099 - DNA, 21 bp, Artificial Sequence
  Synthetic
cutgtggcatgucccaaagag

SEQ ID NO: 62100 - DNA, 28 bp, Artificial Sequence
  Synthetic
atgtagttttcuggtgaatttggaguga

SEQ ID NO: 62101 - DNA, 28 bp, Artificial Sequence
  Synthetic
aaggcucaaagggaatauaaaccaagat

SEQ ID NO: 62102 - DNA, 21 bp, Artificial Sequence
  Synthetic
tggaagcacuaaagcagcugt

SEQ ID NO: 62103 - DNA, 25 bp, Artificial Sequence
  Synthetic
ctgaattggtgauccattgctccua

SEQ ID NO: 62104 - DNA, 21 bp, Artificial Sequence
  Synthetic
ggaacagagcugucacaacga

SEQ ID NO: 62105 - DNA, 28 bp, Artificial Sequence
  Synthetic
cagtcgagagagugggatagtatatugt

SEQ ID NO: 62106 - DNA, 28 bp, Artificial Sequence
  Synthetic
caggttgttgaaaugcatactagttuga

SEQ ID NO: 62107 - DNA, 30 bp, Artificial Sequence
  Synthetic
acaaaactaacctugagaacttcaacauct

SEQ ID NO: 62108 - DNA, 26 bp, Artificial Sequence
  Synthetic
tcaggaggaggacaguatacacatut

SEQ ID NO: 62109 - DNA, 28 bp, Artificial Sequence
  Synthetic
tggagtagaaggcutacagggtaauaat

SEQ ID NO: 62110 - DNA, 32 bp, Artificial Sequence
  Synthetic
aattattgctattgauccatgaagtgatacua

SEQ ID NO: 62111 - DNA, 28 bp, Artificial Sequence
  Synthetic
actgtagccaagggaaucaaagtattut

SEQ ID NO: 62112 - DNA, 23 bp, Artificial Sequence
  Synthetic
gggaagcccugtaaguaagaacc

SEQ ID NO: 62113 - DNA, 27 bp, Artificial Sequence
  Synthetic
tctactccccaacutaggatgtttuca

SEQ ID NO: 62114 - DNA, 21 bp, Artificial Sequence
  Synthetic
cgacagacagagcacugacuc

SEQ ID NO: 62115 - DNA, 28 bp, Artificial Sequence
  Synthetic
accttaccatttcuttgctttgatccua

SEQ ID NO: 62116 - DNA, 27 bp, Artificial Sequence
  Synthetic
tcaagtatcgagugacaaagtcatugg

SEQ ID NO: 62117 - DNA, 27 bp, Artificial Sequence
  Synthetic
tttgaactgtugggagataatggucat

SEQ ID NO: 62118 - DNA, 24 bp, Artificial Sequence
  Synthetic
cactaggttuttgcctccugaact

SEQ ID NO: 62119 - DNA, 24 bp, Artificial Sequence
  Synthetic
cctgttuccagccctauaaaacca

SEQ ID NO: 62120 - DNA, 22 bp, Artificial Sequence
  Synthetic
ctcctcugagcaactgtgacut

SEQ ID NO: 62121 - DNA, 27 bp, Artificial Sequence
  Synthetic
accatcgacautgccatagaaaauagg

SEQ ID NO: 62122 - DNA, 27 bp, Artificial Sequence
  Synthetic
gacgacaacatuagaaaggacacatuc

SEQ ID NO: 62123 - DNA, 28 bp, Artificial Sequence
  Synthetic
agactagacttgugtaatgtttgccaut

SEQ ID NO: 62124 - DNA, 28 bp, Artificial Sequence
  Synthetic
agtgcagaaacuatgtagaaaatgcuga

SEQ ID NO: 62125 - DNA, 25 bp, Artificial Sequence
  Synthetic
tccaggaccagaaccuataactgut

SEQ ID NO: 62126 - DNA, 22 bp, Artificial Sequence
  Synthetic
gccattggugatgtagttgcug

SEQ ID NO: 62127 - DNA, 24 bp, Artificial Sequence
  Synthetic
cattggctuaaaaccacccatgut

SEQ ID NO: 62128 - DNA, 23 bp, Artificial Sequence
  Synthetic
actttaaagcugtcaagccgugt

SEQ ID NO: 62129 - DNA, 28 bp, Artificial Sequence
  Synthetic
aactccgccttuccagttgtataattua

SEQ ID NO: 62130 - DNA, 24 bp, Artificial Sequence
  Synthetic
gtgatgacagccucttcttcagua

SEQ ID NO: 62131 - DNA, 26 bp, Artificial Sequence
  Synthetic
gtgaagaacaaaagaacuacctugcc

SEQ ID NO: 62132 - DNA, 24 bp, Artificial Sequence
  Synthetic
gcaggaguccaattttcactcauc

SEQ ID NO: 62133 - DNA, 27 bp, Artificial Sequence
  Synthetic
acaagaaccagutggcagtatguaaat

SEQ ID NO: 62134 - DNA, 23 bp, Artificial Sequence
  Synthetic
gaaatcccuaccagcaucagaca

SEQ ID NO: 62135 - DNA, 22 bp, Artificial Sequence
  Synthetic
gcaccacacagacacutttcuc

SEQ ID NO: 62136 - DNA, 24 bp, Artificial Sequence
  Synthetic
cccactagucctcatcctctucag

SEQ ID NO: 62137 - DNA, 25 bp, Artificial Sequence
  Synthetic
tccagaataugggaatgggaatugg

SEQ ID NO: 62138 - DNA, 21 bp, Artificial Sequence
  Synthetic
ccctgcacaaggugagtctut

SEQ ID NO: 62139 - DNA, 21 bp, Artificial Sequence
  Synthetic
gctgctcaaaugggacacauc

SEQ ID NO: 62140 - DNA, 19 bp, Artificial Sequence
  Synthetic
gaacaagcgggucacggua

SEQ ID NO: 62141 - DNA, 21 bp, Artificial Sequence
  Synthetic
gctgcuacagaggcagaugac

SEQ ID NO: 62142 - DNA, 23 bp, Artificial Sequence
  Synthetic
atgtgagagcugggcauaaacaa

SEQ ID NO: 62143 - DNA, 22 bp, Artificial Sequence
  Synthetic
tgccgttcaucttgtgguagag

SEQ ID NO: 62144 - DNA, 19 bp, Artificial Sequence
  Synthetic
cccucaggagcgtcuccat

SEQ ID NO: 62145 - DNA, 22 bp, Artificial Sequence
  Synthetic
gtgattatguccccgtgacugt

SEQ ID NO: 62146 - DNA, 18 bp, Artificial Sequence
  Synthetic
cacagucggucccccaaa

SEQ ID NO: 62147 - DNA, 18 bp, Artificial Sequence
  Synthetic
ccautgccccuggacacc

SEQ ID NO: 62148 - DNA, 21 bp, Artificial Sequence
  Synthetic
ccaagacccccaccuttagug

SEQ ID NO: 62149 - DNA, 22 bp, Artificial Sequence
  Synthetic
tcatactctuggcaacgtcugg

SEQ ID NO: 62150 - DNA, 28 bp, Artificial Sequence
  Synthetic
caggtgattaatutgacagcttgatuag

SEQ ID NO: 62151 - DNA, 28 bp, Artificial Sequence
  Synthetic
ctcccagaagaaaucttatcacatggut

SEQ ID NO: 62152 - DNA, 26 bp, Artificial Sequence
  Synthetic
tggagtgatacugtttcagtggttuc

SEQ ID NO: 62153 - DNA, 26 bp, Artificial Sequence
  Synthetic
gcttattctcuaagagctccugcaaa

SEQ ID NO: 62154 - DNA, 21 bp, Artificial Sequence
  Synthetic
ctggctguggaagtcactcut

SEQ ID NO: 62155 - DNA, 21 bp, Artificial Sequence
  Synthetic
ctaacacccugttcgcacuga

SEQ ID NO: 62156 - DNA, 21 bp, Artificial Sequence
  Synthetic
gtctacccuggcaugcagaat

SEQ ID NO: 62157 - DNA, 20 bp, Artificial Sequence
  Synthetic
ccccacgugccatatagcug

SEQ ID NO: 62158 - DNA, 23 bp, Artificial Sequence
  Synthetic
gggcuaagaaggctgaatuggat

SEQ ID NO: 62159 - DNA, 24 bp, Artificial Sequence
  Synthetic
tctgagaacuccatcagctcauct

SEQ ID NO: 62160 - DNA, 23 bp, Artificial Sequence
  Synthetic
cagaagaaugcagatgtgctgut

SEQ ID NO: 62161 - DNA, 25 bp, Artificial Sequence
  Synthetic
gcatagtgaucaattcccttuccca

SEQ ID NO: 62162 - DNA, 22 bp, Artificial Sequence
  Synthetic
ggcttcacucctgatgaaucca

SEQ ID NO: 62163 - DNA, 25 bp, Artificial Sequence
  Synthetic
ggcttatgatgugcaaagcagtuaa

SEQ ID NO: 62164 - DNA, 25 bp, Artificial Sequence
  Synthetic
gggtgcguagataataaacaaucca

SEQ ID NO: 62165 - DNA, 25 bp, Artificial Sequence
  Synthetic
gcactacctgutctttctcttgcut

SEQ ID NO: 62166 - DNA, 18 bp, Artificial Sequence
  Synthetic
gcagcagagcucagggua

SEQ ID NO: 62167 - DNA, 17 bp, Artificial Sequence
  Synthetic
ctccuggagcgcctuct

SEQ ID NO: 62168 - DNA, 21 bp, Artificial Sequence
  Synthetic
gccagagagcuactgcugaat

SEQ ID NO: 62169 - DNA, 25 bp, Artificial Sequence
  Synthetic
aatagtggtugccagaactucaact

SEQ ID NO: 62170 - DNA, 22 bp, Artificial Sequence
  Synthetic
ccacagcccuaactcaacacut

SEQ ID NO: 62171 - DNA, 23 bp, Artificial Sequence
  Synthetic
agtgtgacccuctctgggaaaua

SEQ ID NO: 62172 - DNA, 22 bp, Artificial Sequence
  Synthetic
ggtactgaagguagctccccut

SEQ ID NO: 62173 - DNA, 26 bp, Artificial Sequence
  Synthetic
caaatccttgtaaugtgtcactggut

SEQ ID NO: 62174 - DNA, 20 bp, Artificial Sequence
  Synthetic
cgggugcagcacacatgaua

SEQ ID NO: 62175 - DNA, 21 bp, Artificial Sequence
  Synthetic
gtgaagcugccagatgtccut

SEQ ID NO: 62176 - DNA, 22 bp, Artificial Sequence
  Synthetic
gggtagctgaautctgctggua

SEQ ID NO: 62177 - DNA, 27 bp, Artificial Sequence
  Synthetic
ctgtcaatggagcugggaatataacut

SEQ ID NO: 62178 - DNA, 22 bp, Artificial Sequence
  Synthetic
ggagucatggugggaagaaagg

SEQ ID NO: 62179 - DNA, 20 bp, Artificial Sequence
  Synthetic
ccccagaaaaaggugcacug

SEQ ID NO: 62180 - DNA, 28 bp, Artificial Sequence
  Synthetic
tctagtggctcuaaagtcaatctctuct

SEQ ID NO: 62181 - DNA, 20 bp, Artificial Sequence
  Synthetic
gaacctguagcacacgucct

SEQ ID NO: 62182 - DNA, 24 bp, Artificial Sequence
  Synthetic
ctctgtgagcugctttttcaugag

SEQ ID NO: 62183 - DNA, 22 bp, Artificial Sequence
  Synthetic
ccaagaucccagccagagtuaa

SEQ ID NO: 62184 - DNA, 25 bp, Artificial Sequence
  Synthetic
gagcttgggaaucttactgucagaa

SEQ ID NO: 62185 - DNA, 22 bp, Artificial Sequence
  Synthetic
gcccaaaucactgaggaguagg

SEQ ID NO: 62186 - DNA, 21 bp, Artificial Sequence
  Synthetic
ggaaacgggagcauggttuag

SEQ ID NO: 62187 - DNA, 21 bp, Artificial Sequence
  Synthetic
tgtagcctugcaacttgggut

SEQ ID NO: 62188 - DNA, 23 bp, Artificial Sequence
  Synthetic
ggcctctuacacaaagtcuggaa

SEQ ID NO: 62189 - DNA, 21 bp, Artificial Sequence
  Synthetic
gtgacccauggaatcugggaa

SEQ ID NO: 62190 - DNA, 21 bp, Artificial Sequence
  Synthetic
gcaggcaggauttggcaaaug

SEQ ID NO: 62191 - DNA, 17 bp, Artificial Sequence
  Synthetic
cacccgcucggccauat

SEQ ID NO: 62192 - DNA, 21 bp, Artificial Sequence
  Synthetic
cctagagcuccggacctcaut

SEQ ID NO: 62193 - DNA, 21 bp, Artificial Sequence
  Synthetic
agagacgcuctgcatgagtug

SEQ ID NO: 62194 - DNA, 25 bp, Artificial Sequence
  Synthetic
agatccagauggaactgcuagagaa

SEQ ID NO: 62195 - DNA, 21 bp, Artificial Sequence
  Synthetic
ctagagauccctgcaguggag

SEQ ID NO: 62196 - DNA, 21 bp, Artificial Sequence
  Synthetic
tgaaaacugggctggcaucaa

SEQ ID NO: 62197 - DNA, 24 bp, Artificial Sequence
  Synthetic
agacttgaaguggctaatguacgg

SEQ ID NO: 62198 - DNA, 27 bp, Artificial Sequence
  Synthetic
cagttctttgtcutggatgttgtcaut

SEQ ID NO: 62199 - DNA, 22 bp, Artificial Sequence
  Synthetic
catgagaugggcatggagaugt

SEQ ID NO: 62200 - DNA, 19 bp, Artificial Sequence
  Synthetic
cgcacctuccagaacgcua

SEQ ID NO: 62201 - DNA, 19 bp, Artificial Sequence
  Synthetic
gagggccaccuggaugaag

SEQ ID NO: 62202 - DNA, 26 bp, Artificial Sequence
  Synthetic
ccttcttctugcaagcacaatgttut

SEQ ID NO: 62203 - DNA, 24 bp, Artificial Sequence
  Synthetic
aagcacugtagaaucagaggagga

SEQ ID NO: 62204 - DNA, 24 bp, Artificial Sequence
  Synthetic
tgtcgttgtugatagctgtgucat

SEQ ID NO: 62205 - DNA, 24 bp, Artificial Sequence
  Synthetic
ttttccacttuccgtttcaacguc

SEQ ID NO: 62206 - DNA, 28 bp, Artificial Sequence
  Synthetic
aatagtatuggaagaaaagggcaucaca

SEQ ID NO: 62207 - DNA, 28 bp, Artificial Sequence
  Synthetic
tgttgtttggccuttgatgttttuaagt

SEQ ID NO: 62208 - DNA, 23 bp, Artificial Sequence
  Synthetic
gaatactugccgcgcttctuaaa

SEQ ID NO: 62209 - DNA, 29 bp, Artificial Sequence
  Synthetic
gggagacutcatcatcaauaaaacaacag

SEQ ID NO: 62210 - DNA, 25 bp, Artificial Sequence
  Synthetic
tcaguccaacaaatugaggaagcaa

SEQ ID NO: 62211 - DNA, 26 bp, Artificial Sequence
  Synthetic
catcagauaggccaggaatcctcuat

SEQ ID NO: 62212 - DNA, 22 bp, Artificial Sequence
  Synthetic
ctcaactcagguatggcagcut

SEQ ID NO: 62213 - DNA, 28 bp, Artificial Sequence
  Synthetic
ctcctggctatugtgcctaatttctaua

SEQ ID NO: 62214 - DNA, 18 bp, Artificial Sequence
  Synthetic
accucagcaccgccuaac

SEQ ID NO: 62215 - DNA, 22 bp, Artificial Sequence
  Synthetic
tgugatcaccuggcaagagaaa

SEQ ID NO: 62216 - DNA, 21 bp, Artificial Sequence
  Synthetic
ggcaacaacutccggauccat

SEQ ID NO: 62217 - DNA, 21 bp, Artificial Sequence
  Synthetic
tctgttctagcugtgggctug

SEQ ID NO: 62218 - DNA, 22 bp, Artificial Sequence
  Synthetic
cgagagcacagggcutatcauc

SEQ ID NO: 62219 - DNA, 21 bp, Artificial Sequence
  Synthetic
tgaggcautggagaacugcac

SEQ ID NO: 62220 - DNA, 20 bp, Artificial Sequence
  Synthetic
caggcacugtcatugccaat

SEQ ID NO: 62221 - DNA, 20 bp, Artificial Sequence
  Synthetic
caggccctugtacctgtgut

SEQ ID NO: 62222 - DNA, 23 bp, Artificial Sequence
  Synthetic
ctgagatcccugtctaccuggaa

SEQ ID NO: 62223 - DNA, 22 bp, Artificial Sequence
  Synthetic
actcactgaugcaggcaucaag

SEQ ID NO: 62224 - DNA, 20 bp, Artificial Sequence
  Synthetic
ccacugcagtccuacgagaa

SEQ ID NO: 62225 - DNA, 24 bp, Artificial Sequence
  Synthetic
agctggaagaaggaaauactggug

SEQ ID NO: 62226 - DNA, 21 bp, Artificial Sequence
  Synthetic
gcactgagtcuctgagccgua

SEQ ID NO: 62227 - DNA, 26 bp, Artificial Sequence
  Synthetic
gggatctcgutaatgacgatctugac

SEQ ID NO: 62228 - DNA, 20 bp, Artificial Sequence
  Synthetic
gcccaaggutcagccacaua

SEQ ID NO: 62229 - DNA, 19 bp, Artificial Sequence
  Synthetic
accacauggatcccaucgg

SEQ ID NO: 62230 - DNA, 22 bp, Artificial Sequence
  Synthetic
cccgtggaucctacttctcugt

SEQ ID NO: 62231 - DNA, 22 bp, Artificial Sequence
  Synthetic
cctccucgtgcattaucaccag

SEQ ID NO: 62232 - DNA, 24 bp, Artificial Sequence
  Synthetic
tttgagggugtacaaugacagcat

SEQ ID NO: 62233 - DNA, 22 bp, Artificial Sequence
  Synthetic
cacccctccugaaaatcacugt

SEQ ID NO: 62234 - DNA, 23 bp, Artificial Sequence
  Synthetic
tgtttatgtgugacaggauggct

SEQ ID NO: 62235 - DNA, 22 bp, Artificial Sequence
  Synthetic
cggtcatccacugtgggatuat

SEQ ID NO: 62236 - DNA, 20 bp, Artificial Sequence
  Synthetic
gcatccggccutctgtcuac

SEQ ID NO: 62237 - DNA, 21 bp, Artificial Sequence
  Synthetic
agaccagaugcaggctccaua

SEQ ID NO: 62238 - DNA, 23 bp, Artificial Sequence
  Synthetic
tggtcugctcctcuagagacaac

SEQ ID NO: 62239 - DNA, 24 bp, Artificial Sequence
  Synthetic
tcacctggguccctgttaaacuaa

SEQ ID NO: 62240 - DNA, 22 bp, Artificial Sequence
  Synthetic
ccaccaaacucatctggtcuga

SEQ ID NO: 62241 - DNA, 21 bp, Artificial Sequence
  Synthetic
gcaggagcutctcaugcagaa

SEQ ID NO: 62242 - DNA, 23 bp, Artificial Sequence
  Synthetic
gaagaucgccaactgcaguaaga

SEQ ID NO: 62243 - DNA, 23 bp, Artificial Sequence
  Synthetic
cccatgactutgaggcatcugag

SEQ ID NO: 62244 - DNA, 23 bp, Artificial Sequence
  Synthetic
tcagctttggugtctgcttugat

SEQ ID NO: 62245 - DNA, 26 bp, Artificial Sequence
  Synthetic
agagctgugggcaatagtaatttuca

SEQ ID NO: 62246 - DNA, 26 bp, Artificial Sequence
  Synthetic
acatgaaaagauagcccatccugaag

SEQ ID NO: 62247 - DNA, 24 bp, Artificial Sequence
  Synthetic
ctgaagccagauatggtcatucca

SEQ ID NO: 62248 - DNA, 22 bp, Artificial Sequence
  Synthetic
ggtagctcuccaggaggaaguc

SEQ ID NO: 62249 - DNA, 24 bp, Artificial Sequence
  Synthetic
gctctgggtcugaaaagaagctut

SEQ ID NO: 62250 - DNA, 22 bp, Artificial Sequence
  Synthetic
catgctggcutctgactctgut

SEQ ID NO: 62251 - DNA, 20 bp, Artificial Sequence
  Synthetic
gctgcugcactucaaagacc

SEQ ID NO: 62252 - DNA, 21 bp, Artificial Sequence
  Synthetic
gaacaggtccutctggtggut

SEQ ID NO: 62253 - DNA, 17 bp, Artificial Sequence
  Synthetic
gcaccgcutgaccccut

SEQ ID NO: 62254 - DNA, 21 bp, Artificial Sequence
  Synthetic
caatccccaggugtcttgguc

SEQ ID NO: 62255 - DNA, 28 bp, Artificial Sequence
  Synthetic
gtgatgacaacucctacatgtacatuct

SEQ ID NO: 62256 - DNA, 23 bp, Artificial Sequence
  Synthetic
ccatgaaggugctcatgtucact

SEQ ID NO: 62257 - DNA, 23 bp, Artificial Sequence
  Synthetic
acagaaacugagctgccaauacc

SEQ ID NO: 62258 - DNA, 21 bp, Artificial Sequence
  Synthetic
cctggtggucaccttccuaga

SEQ ID NO: 62259 - DNA, 22 bp, Artificial Sequence
  Synthetic
acagtctgcauaacacccugac

SEQ ID NO: 62260 - DNA, 19 bp, Artificial Sequence
  Synthetic
aggtccugtgacucccgat

SEQ ID NO: 62261 - DNA, 20 bp, Artificial Sequence
  Synthetic
cgctgtaccucagggcttuc

SEQ ID NO: 62262 - DNA, 27 bp, Artificial Sequence
  Synthetic
acagaaugtctgagaauagcaaaacca

SEQ ID NO: 62263 - DNA, 28 bp, Artificial Sequence
  Synthetic
gcgacagtaatcugttaagccatttaut

SEQ ID NO: 62264 - DNA, 25 bp, Artificial Sequence
  Synthetic
agatgcugaacaaaaggacttcuga

SEQ ID NO: 62265 - DNA, 27 bp, Artificial Sequence
  Synthetic
catgaagatggutttctagagcaucct

SEQ ID NO: 62266 - DNA, 24 bp, Artificial Sequence
  Synthetic
tgtauggcaaaagcagaugaggaa

SEQ ID NO: 62267 - DNA, 21 bp, Artificial Sequence
  Synthetic
agtugccacaaacccucagac

SEQ ID NO: 62268 - DNA, 26 bp, Artificial Sequence
  Synthetic
cggaattugaaaacaagcaagctcuc

SEQ ID NO: 62269 - DNA, 28 bp, Artificial Sequence
  Synthetic
gaccaagucactctttctaugcaaaaac

SEQ ID NO: 62270 - DNA, 25 bp, Artificial Sequence
  Synthetic
gctatttggttugagaagcgatugg

SEQ ID NO: 62271 - DNA, 27 bp, Artificial Sequence
  Synthetic
cctgcaacucagaatgtagaaaaagug

SEQ ID NO: 62272 - DNA, 24 bp, Artificial Sequence
  Synthetic
ctctttgacuggaccatgaaucct

SEQ ID NO: 62273 - DNA, 28 bp, Artificial Sequence
  Synthetic
tgaaaaacugacaacaggaccttctuaa

SEQ ID NO: 62274 - DNA, 21 bp, Artificial Sequence
  Synthetic
gggcucaagcatcagttucat

SEQ ID NO: 62275 - DNA, 23 bp, Artificial Sequence
  Synthetic
cctactctugctcctctccucac

SEQ ID NO: 62276 - DNA, 22 bp, Artificial Sequence
  Synthetic
cccacagtugccttttcaguga

SEQ ID NO: 62277 - DNA, 23 bp, Artificial Sequence
  Synthetic
aagaaatgccacagucctcctut

SEQ ID NO: 62278 - DNA, 24 bp, Artificial Sequence
  Synthetic
gcaaaagaaaacccaguccugaca

SEQ ID NO: 62279 - DNA, 21 bp, Artificial Sequence
  Synthetic
tguacacaagaacgggctuca

SEQ ID NO: 62280 - DNA, 21 bp, Artificial Sequence
  Synthetic
gttgctgagugtgcctcacua

SEQ ID NO: 62281 - DNA, 28 bp, Artificial Sequence
  Synthetic
gaauacagccaggaauagcagaaagaat

SEQ ID NO: 62282 - DNA, 22 bp, Artificial Sequence
  Synthetic
cagtgggcagutgtgagaauga

SEQ ID NO: 62283 - DNA, 21 bp, Artificial Sequence
  Synthetic
ttccuccaaagagctgcaucc

SEQ ID NO: 62284 - DNA, 21 bp, Artificial Sequence
  Synthetic
agcggccaaugatttcucaga

SEQ ID NO: 62285 - DNA, 22 bp, Artificial Sequence
  Synthetic
accacacttugtactggtgcug

SEQ ID NO: 62286 - DNA, 22 bp, Artificial Sequence
  Synthetic
gttggtgguggttagtggguat

SEQ ID NO: 62287 - DNA, 22 bp, Artificial Sequence
  Synthetic
gtgtctgcucctgcactatcug

SEQ ID NO: 62288 - DNA, 24 bp, Artificial Sequence
  Synthetic
ggattaagaagcaaugccctcuca

SEQ ID NO: 62289 - DNA, 28 bp, Artificial Sequence
  Synthetic
ggacttagcaagaagutatggaatucct

SEQ ID NO: 62290 - DNA, 21 bp, Artificial Sequence
  Synthetic
ggaacagaaugtgcuggcaat

SEQ ID NO: 62291 - DNA, 21 bp, Artificial Sequence
  Synthetic
gcaucagagctcctuccacag

SEQ ID NO: 62292 - DNA, 26 bp, Artificial Sequence
  Synthetic
gtactgtcugtggtatgtgucaaagt

SEQ ID NO: 62293 - DNA, 22 bp, Artificial Sequence
  Synthetic
ctggagauttctccugacagca

SEQ ID NO: 62294 - DNA, 24 bp, Artificial Sequence
  Synthetic
ttttgatgccaugcactcattucc

SEQ ID NO: 62295 - DNA, 28 bp, Artificial Sequence
  Synthetic
cttgacagacaacucccacttcttaaua

SEQ ID NO: 62296 - DNA, 21 bp, Artificial Sequence
  Synthetic
tggttctgcccucctgtacut

SEQ ID NO: 62297 - DNA, 27 bp, Artificial Sequence
  Synthetic
tggtaatgatguctcatgacgttucat

SEQ ID NO: 62298 - DNA, 28 bp, Artificial Sequence
  Synthetic
ttcaaatacuaggtttctucaacagcga

SEQ ID NO: 62299 - DNA, 28 bp, Artificial Sequence
  Synthetic
cactttgcatuccaagatctgatttcut

SEQ ID NO: 62300 - DNA, 22 bp, Artificial Sequence
  Synthetic
acagtctgguactctcctgguc

SEQ ID NO: 62301 - DNA, 28 bp, Artificial Sequence
  Synthetic
aacaattatgcacacaautcagtcgtut

SEQ ID NO: 62302 - DNA, 22 bp, Artificial Sequence
  Synthetic
ctaccatcuaccccctgucaca

SEQ ID NO: 62303 - DNA, 22 bp, Artificial Sequence
  Synthetic
ccaccctcutctctctccugaa

SEQ ID NO: 62304 - DNA, 21 bp, Artificial Sequence
  Synthetic
gaggagagccacucuaagcaa

SEQ ID NO: 62305 - DNA, 23 bp, Artificial Sequence
  Synthetic
acctcctaacgutgttgggttuc

SEQ ID NO: 62306 - DNA, 21 bp, Artificial Sequence
  Synthetic
caggtcccugaaggugaagaa

SEQ ID NO: 62307 - DNA, 25 bp, Artificial Sequence
  Synthetic
ctctcctctaacutaccatcctgug

SEQ ID NO: 62308 - DNA, 20 bp, Artificial Sequence
  Synthetic
gggagaaggaugcugaggga

SEQ ID NO: 62309 - DNA, 17 bp, Artificial Sequence
  Synthetic
ccgtgcucctgccgtut

SEQ ID NO: 62310 - DNA, 21 bp, Artificial Sequence
  Synthetic
ctgggctcuccttgttgagut

SEQ ID NO: 62311 - DNA, 28 bp, Artificial Sequence
  Synthetic
caaacgaugaagagttcaaaaugcagat

SEQ ID NO: 62312 - DNA, 21 bp, Artificial Sequence
  Synthetic
ggatcccagauggtgacccua

SEQ ID NO: 62313 - DNA, 27 bp, Artificial Sequence
  Synthetic
catctcacauagatcttgactgucact

SEQ ID NO: 62314 - DNA, 22 bp, Artificial Sequence
  Synthetic
gagttgtagcucagccctctut

SEQ ID NO: 62315 - DNA, 24 bp, Artificial Sequence
  Synthetic
gaaatcacagaguttctgcuggga

SEQ ID NO: 62316 - DNA, 24 bp, Artificial Sequence
  Synthetic
tcgttcctugggtttcttucaaca

SEQ ID NO: 62317 - DNA, 28 bp, Artificial Sequence
  Synthetic
ggtcatagtaaucaccagtgttcugaat

SEQ ID NO: 62318 - DNA, 23 bp, Artificial Sequence
  Synthetic
ttctgugcccagctttatucact

SEQ ID NO: 62319 - DNA, 24 bp, Artificial Sequence
  Synthetic
gggtgtctgaugtgacttttcuct

SEQ ID NO: 62320 - DNA, 23 bp, Artificial Sequence
  Synthetic
aataaggugaggcccatgtctuc

SEQ ID NO: 62321 - DNA, 26 bp, Artificial Sequence
  Synthetic
tggaauaaaaggagagaagggttucc

SEQ ID NO: 62322 - DNA, 21 bp, Artificial Sequence
  Synthetic
cctccatacccuccccactua

SEQ ID NO: 62323 - DNA, 21 bp, Artificial Sequence
  Synthetic
ctaaccccacautccccaucc

SEQ ID NO: 62324 - DNA, 23 bp, Artificial Sequence
  Synthetic
acuatggugcaacagcagaagag

SEQ ID NO: 62325 - DNA, 28 bp, Artificial Sequence
  Synthetic
tgttaacaccaaauaacttactgcucaa

SEQ ID NO: 62326 - DNA, 22 bp, Artificial Sequence
  Synthetic
ctacgtccaccaucaagtccuc

SEQ ID NO: 62327 - DNA, 21 bp, Artificial Sequence
  Synthetic
gttgcccaguagagucacaca

SEQ ID NO: 62328 - DNA, 22 bp, Artificial Sequence
  Synthetic
gctccattuctggcacugagat

SEQ ID NO: 62329 - DNA, 20 bp, Artificial Sequence
  Synthetic
cacaagccccucattucacc

SEQ ID NO: 62330 - DNA, 21 bp, Artificial Sequence
  Synthetic
gccaccacaguctcctactuc

SEQ ID NO: 62331 - DNA, 29 bp, Artificial Sequence
  Synthetic
ggatttcatgtttuccacactttgctuat

SEQ ID NO: 62332 - DNA, 21 bp, Artificial Sequence
  Synthetic
tccucagggcagugaagaaga

SEQ ID NO: 62333 - DNA, 26 bp, Artificial Sequence
  Synthetic
aggactgatuggactttgtttcctut

SEQ ID NO: 62334 - DNA, 21 bp, Artificial Sequence
  Synthetic
gctggttgucactgtggcuat

SEQ ID NO: 62335 - DNA, 19 bp, Artificial Sequence
  Synthetic
cgagcagaucgcccucaag

SEQ ID NO: 62336 - DNA, 21 bp, Artificial Sequence
  Synthetic
ggaacacgguaactcggtuga

SEQ ID NO: 62337 - DNA, 24 bp, Artificial Sequence
  Synthetic
ctatgaggaguccctggaacauct

SEQ ID NO: 62338 - DNA, 19 bp, Artificial Sequence
  Synthetic
atggucccgaaugcaccaa

SEQ ID NO: 62339 - DNA, 25 bp, Artificial Sequence
  Synthetic
tgcttcttttgutgactctcctucc

SEQ ID NO: 62340 - DNA, 25 bp, Artificial Sequence
  Synthetic
cttctttctttaguagcagcccugt

SEQ ID NO: 62341 - DNA, 27 bp, Artificial Sequence
  Synthetic
gatgtgttttcugacgttctgtagtuc

SEQ ID NO: 62342 - DNA, 27 bp, Artificial Sequence
  Synthetic
ctgcaactuaaggaagaatctgugaag

SEQ ID NO: 62343 - DNA, 23 bp, Artificial Sequence
  Synthetic
ccagucacaccagcaatcacaua

SEQ ID NO: 62344 - DNA, 25 bp, Artificial Sequence
  Synthetic
gtacttttuaagggttgugggacct

SEQ ID NO: 62345 - DNA, 28 bp, Artificial Sequence
  Synthetic
gcuttaaatgatagcuacacagcacaaa

SEQ ID NO: 62346 - DNA, 22 bp, Artificial Sequence
  Synthetic
cctcgggcutcttcttcaucat

SEQ ID NO: 62347 - DNA, 26 bp, Artificial Sequence
  Synthetic
gcctgatggtugtaagagtggaatua

SEQ ID NO: 62348 - DNA, 22 bp, Artificial Sequence
  Synthetic
gacgtcacaauagcgacucact

SEQ ID NO: 62349 - DNA, 21 bp, Artificial Sequence
  Synthetic
gacagcugccctttacctcuc

SEQ ID NO: 62350 - DNA, 22 bp, Artificial Sequence
  Synthetic
tgggtgggautcaccactttuc

SEQ ID NO: 62351 - DNA, 24 bp, Artificial Sequence
  Synthetic
ttacaacgtguctctgcttctcuc

SEQ ID NO: 62352 - DNA, 22 bp, Artificial Sequence
  Synthetic
tcatcctcugctgcctuaggaa

SEQ ID NO: 62353 - DNA, 21 bp, Artificial Sequence
  Synthetic
acactgcagcugctattgucc

SEQ ID NO: 62354 - DNA, 24 bp, Artificial Sequence
  Synthetic
ggaaacccaaguggcatctatuca

SEQ ID NO: 62355 - DNA, 20 bp, Artificial Sequence
  Synthetic
accggagguctctuccagac

SEQ ID NO: 62356 - DNA, 28 bp, Artificial Sequence
  Synthetic
ggtgaattaaugaagcaaaacctggaut

SEQ ID NO: 62357 - DNA, 21 bp, Artificial Sequence
  Synthetic
aagggaucagctaccuccact

SEQ ID NO: 62358 - DNA, 25 bp, Artificial Sequence
  Synthetic
tgagccaaccaggaauattttcuga

SEQ ID NO: 62359 - DNA, 21 bp, Artificial Sequence
  Synthetic
gtgagatgugtcctgctguga

SEQ ID NO: 62360 - DNA, 24 bp, Artificial Sequence
  Synthetic
aataaaagagccugggctgttcut

SEQ ID NO: 62361 - DNA, 22 bp, Artificial Sequence
  Synthetic
cccagcttuactgtgtgggaut

SEQ ID NO: 62362 - DNA, 21 bp, Artificial Sequence
  Synthetic
gccccctugggaaagtacaua

SEQ ID NO: 62363 - DNA, 24 bp, Artificial Sequence
  Synthetic
gcttcagcauctgcatcttctuct

SEQ ID NO: 62364 - DNA, 18 bp, Artificial Sequence
  Synthetic
gaagttgcugcgggtguc

SEQ ID NO: 62365 - DNA, 20 bp, Artificial Sequence
  Synthetic
gugggugcacagaaccagaa

SEQ ID NO: 62366 - DNA, 28 bp, Artificial Sequence
  Synthetic
atcatctcatccugtgtttgtgatugat

SEQ ID NO: 62367 - DNA, 23 bp, Artificial Sequence
  Synthetic
gaaagaatguggtcgcagcuaag

SEQ ID NO: 62368 - DNA, 22 bp, Artificial Sequence
  Synthetic
gcgtguctccacaaugaggaag

SEQ ID NO: 62369 - DNA, 23 bp, Artificial Sequence
  Synthetic
tcttcaaugtggtgucagacaca

SEQ ID NO: 62370 - DNA, 17 bp, Artificial Sequence
  Synthetic
gccgtucgtgcuggact

SEQ ID NO: 62371 - DNA, 17 bp, Artificial Sequence
  Synthetic
ggccaaggcguggauca

SEQ ID NO: 62372 - DNA, 21 bp, Artificial Sequence
  Synthetic
tgtgagccgguggttaaacug

SEQ ID NO: 62373 - DNA, 22 bp, Artificial Sequence
  Synthetic
tgcttttcucactcctgctugt

SEQ ID NO: 62374 - DNA, 21 bp, Artificial Sequence
  Synthetic
gcccucagagcccagtttcua

SEQ ID NO: 62375 - DNA, 22 bp, Artificial Sequence
  Synthetic
tgctaagacccauttcctuccc

SEQ ID NO: 62376 - DNA, 19 bp, Artificial Sequence
  Synthetic
ttgctaagccucggctgut

SEQ ID NO: 62377 - DNA, 24 bp, Artificial Sequence
  Synthetic
ttgatgatgaugtcaggcatcucc

SEQ ID NO: 62378 - DNA, 22 bp, Artificial Sequence
  Synthetic
gctcctacagguacacggagut

SEQ ID NO: 62379 - DNA, 20 bp, Artificial Sequence
  Synthetic
ggtagcaggacuggauggga

SEQ ID NO: 62380 - DNA, 19 bp, Artificial Sequence
  Synthetic
caggcaguagccgagauca

SEQ ID NO: 62381 - DNA, 17 bp, Artificial Sequence
  Synthetic
gcuctuggcgccacact

SEQ ID NO: 62382 - DNA, 17 bp, Artificial Sequence
  Synthetic
gcguaccgaggugagca

SEQ ID NO: 62383 - DNA, 18 bp, Artificial Sequence
  Synthetic
gccacccgcucctacuga

SEQ ID NO: 62384 - DNA, 20 bp, Artificial Sequence
  Synthetic
ggattuggcaggcgaguagg

SEQ ID NO: 62385 - DNA, 21 bp, Artificial Sequence
  Synthetic
tgtgtgacacaucccctggua

SEQ ID NO: 62386 - DNA, 20 bp, Artificial Sequence
  Synthetic
tcgtgccaacgugtcttgua

SEQ ID NO: 62387 - DNA, 21 bp, Artificial Sequence
  Synthetic
cctacccugggtggtcgauag

SEQ ID NO: 62388 - DNA, 18 bp, Artificial Sequence
  Synthetic
cgttgaugcgcugggact

SEQ ID NO: 62389 - DNA, 19 bp, Artificial Sequence
  Synthetic
gcaagauggccgagcagua

SEQ ID NO: 62390 - DNA, 24 bp, Artificial Sequence
  Synthetic
gagguattaggaugcaggaaagca

SEQ ID NO: 62391 - DNA, 23 bp, Artificial Sequence
  Synthetic
ggagctctucctttccttcctut

SEQ ID NO: 62392 - DNA, 24 bp, Artificial Sequence
  Synthetic
gatgaacauggtgtggtugaagag

SEQ ID NO: 62393 - DNA, 24 bp, Artificial Sequence
  Synthetic
ggctccttgucttctgacttcaua

SEQ ID NO: 62394 - DNA, 26 bp, Artificial Sequence
  Synthetic
tgaagtcacaaucagctaaactugct

SEQ ID NO: 62395 - DNA, 23 bp, Artificial Sequence
  Synthetic
agtttggtgcuttggaaagtgug

SEQ ID NO: 62396 - DNA, 26 bp, Artificial Sequence
  Synthetic
cgcagccuaaacactttuaaaaaggt

SEQ ID NO: 62397 - DNA, 26 bp, Artificial Sequence
  Synthetic
gcttttctgaaaugttggtcttcugt

SEQ ID NO: 62398 - DNA, 22 bp, Artificial Sequence
  Synthetic
tttctcatggucccctctccut

SEQ ID NO: 62399 - DNA, 28 bp, Artificial Sequence
  Synthetic
caagttaggtutagttcaagcaucaaca

SEQ ID NO: 62400 - DNA, 20 bp, Artificial Sequence
  Synthetic
catguccggcttcuccaaca

SEQ ID NO: 62401 - DNA, 24 bp, Artificial Sequence
  Synthetic
aacctgttcugaaagacaucggaa

SEQ ID NO: 62402 - DNA, 27 bp, Artificial Sequence
  Synthetic
cgagctatagcagautatcttcgtuca

SEQ ID NO: 62403 - DNA, 28 bp, Artificial Sequence
  Synthetic
acaaatgacaaaatugtgcgtaactgut

SEQ ID NO: 62404 - DNA, 24 bp, Artificial Sequence
  Synthetic
ggtatagaagutggtccucagcct

SEQ ID NO: 62405 - DNA, 27 bp, Artificial Sequence
  Synthetic
atctgacccaggutccaattgttatut

SEQ ID NO: 62406 - DNA, 19 bp, Artificial Sequence
  Synthetic
ccacccagcguccgaauaa

SEQ ID NO: 62407 - DNA, 21 bp, Artificial Sequence
  Synthetic
gtctccaucaacgtcctgcuc

SEQ ID NO: 62408 - DNA, 21 bp, Artificial Sequence
  Synthetic
cagggtggugtatggcaacua

SEQ ID NO: 62409 - DNA, 22 bp, Artificial Sequence
  Synthetic
cccgtacugccttaagagaugg

SEQ ID NO: 62410 - DNA, 18 bp, Artificial Sequence
  Synthetic
tccccgucgcuagggaaa

SEQ ID NO: 62411 - DNA, 17 bp, Artificial Sequence
  Synthetic
gctccgccucagcacuc

SEQ ID NO: 62412 - DNA, 25 bp, Artificial Sequence
  Synthetic
gggttggctuacagaaaattacgut

SEQ ID NO: 62413 - DNA, 20 bp, Artificial Sequence
  Synthetic
ggagtauccaggaccgagug

SEQ ID NO: 62414 - DNA, 21 bp, Artificial Sequence
  Synthetic
cagccgaauctcgaactucct

SEQ ID NO: 62415 - DNA, 20 bp, Artificial Sequence
  Synthetic
ccggucctccacauagaggt

SEQ ID NO: 62416 - DNA, 20 bp, Artificial Sequence
  Synthetic
tcatcaguccgctggagtug

SEQ ID NO: 62417 - DNA, 21 bp, Artificial Sequence
  Synthetic
caagtcugccgggttgatgua

SEQ ID NO: 62418 - DNA, 22 bp, Artificial Sequence
  Synthetic
gccctgucctctatcuacagca

SEQ ID NO: 62419 - DNA, 19 bp, Artificial Sequence
  Synthetic
gtgtcucggagccgaugaa

SEQ ID NO: 62420 - DNA, 23 bp, Artificial Sequence
  Synthetic
cagctttcaucagctccauggat

SEQ ID NO: 62421 - DNA, 21 bp, Artificial Sequence
  Synthetic
tgatggaacugtggctggtug

SEQ ID NO: 62422 - DNA, 28 bp, Artificial Sequence
  Synthetic
ggaaaactatcacautcttcgcagguaa

SEQ ID NO: 62423 - DNA, 24 bp, Artificial Sequence
  Synthetic
ggtacacagagaaggutatgcugt

SEQ ID NO: 62424 - DNA, 21 bp, Artificial Sequence
  Synthetic
gcctgtguggaggtctttcut

SEQ ID NO: 62425 - DNA, 24 bp, Artificial Sequence
  Synthetic
tcttctgucccagtcatctgugat

SEQ ID NO: 62426 - DNA, 21 bp, Artificial Sequence
  Synthetic
ggatguaggcgaaaccguagg

SEQ ID NO: 62427 - DNA, 25 bp, Artificial Sequence
  Synthetic
agcagatttccutccagagguagaa

SEQ ID NO: 62428 - DNA, 24 bp, Artificial Sequence
  Synthetic
gcutccaauaaaaacaggacagca

SEQ ID NO: 62429 - DNA, 26 bp, Artificial Sequence
  Synthetic
aagcaaatuccccaaaacacaguaac

SEQ ID NO: 62430 - DNA, 28 bp, Artificial Sequence
  Synthetic
gcagttagcagutataaatagccuggaa

SEQ ID NO: 62431 - DNA, 30 bp, Artificial Sequence
  Synthetic
tcctgaaaatgaaugtgaaactatcacuca

SEQ ID NO: 62432 - DNA, 24 bp, Artificial Sequence
  Synthetic
cguataagcccucacaacaaccaa

SEQ ID NO: 62433 - DNA, 31 bp, Artificial Sequence
  Synthetic
gtcttgaaacgaacaucaatacataatagug

SEQ ID NO: 62434 - DNA, 22 bp, Artificial Sequence
  Synthetic
ggtgtgtgtutgcatggtctua

SEQ ID NO: 62435 - DNA, 24 bp, Artificial Sequence
  Synthetic
catcaatctuaggccaccaaucca

SEQ ID NO: 62436 - DNA, 22 bp, Artificial Sequence
  Synthetic
ctactcctttugggtggagcut

SEQ ID NO: 62437 - DNA, 22 bp, Artificial Sequence
  Synthetic
aagaggcutccaaatugagggt

SEQ ID NO: 62438 - DNA, 33 bp, Artificial Sequence
  Synthetic
tttagaatgccttcucttttgtctatatcugat

SEQ ID NO: 62439 - DNA, 28 bp, Artificial Sequence
  Synthetic
ctctccttgccaucattacttcaacuaa

SEQ ID NO: 62440 - DNA, 33 bp, Artificial Sequence
  Synthetic
agcagaaattatatcaaugagaaaattcatgut

SEQ ID NO: 62441 - DNA, 24 bp, Artificial Sequence
  Synthetic
gccgcataugttcttcttttguga

SEQ ID NO: 62442 - DNA, 28 bp, Artificial Sequence
  Synthetic
aggcaucaggtacaugaaaaagaagaat

SEQ ID NO: 62443 - DNA, 27 bp, Artificial Sequence
  Synthetic
tcaattcctgutaagtcaacugggaaa

SEQ ID NO: 62444 - DNA, 26 bp, Artificial Sequence
  Synthetic
tgtgctaaaactutgagtcccatgut

SEQ ID NO: 62445 - DNA, 25 bp, Artificial Sequence
  Synthetic
cacaucaagggaattgtugaaggac

SEQ ID NO: 62446 - DNA, 21 bp, Artificial Sequence
  Synthetic
gggacaccgugtacaccatug

SEQ ID NO: 62447 - DNA, 21 bp, Artificial Sequence
  Synthetic
cagaccaacccutccctctug

SEQ ID NO: 62448 - DNA, 25 bp, Artificial Sequence
  Synthetic
tccaacagaaggaggutcuagagag

SEQ ID NO: 62449 - DNA, 21 bp, Artificial Sequence
  Synthetic
cccatgtacuccagcgatgug

SEQ ID NO: 62450 - DNA, 19 bp, Artificial Sequence
  Synthetic
gctcctucccctcgccuaa

SEQ ID NO: 62451 - DNA, 18 bp, Artificial Sequence
  Synthetic
atccaugccatccugcgt

SEQ ID NO: 62452 - DNA, 28 bp, Artificial Sequence
  Synthetic
ctgatcagaagggauattaaggguacct

SEQ ID NO: 62453 - DNA, 24 bp, Artificial Sequence
  Synthetic
ggcuaaggcaaggcctattttuca

SEQ ID NO: 62454 - DNA, 22 bp, Artificial Sequence
  Synthetic
cctcaccacucttccagucaga

SEQ ID NO: 62455 - DNA, 21 bp, Artificial Sequence
  Synthetic
caagagaaggcucacgauggt

SEQ ID NO: 62456 - DNA, 25 bp, Artificial Sequence
  Synthetic
gagagaaggagagaugcugagagat

SEQ ID NO: 62457 - DNA, 23 bp, Artificial Sequence
  Synthetic
cactccagucttcttggttguca

SEQ ID NO: 62458 - DNA, 22 bp, Artificial Sequence
  Synthetic
gcttcttcutctctggcuacga

SEQ ID NO: 62459 - DNA, 21 bp, Artificial Sequence
  Synthetic
tgggatttucagccaccucac

SEQ ID NO: 62460 - DNA, 21 bp, Artificial Sequence
  Synthetic
cacugggaacaacccgtcuac

SEQ ID NO: 62461 - DNA, 23 bp, Artificial Sequence
  Synthetic
aaagggaattcuggttggtccuc

SEQ ID NO: 62462 - DNA, 21 bp, Artificial Sequence
  Synthetic
acggcgagautgaggcctaua

SEQ ID NO: 62463 - DNA, 20 bp, Artificial Sequence
  Synthetic
ctgagggcaucctctgtguc

SEQ ID NO: 62464 - DNA, 17 bp, Artificial Sequence
  Synthetic
ctgcugagcccgcttuc

SEQ ID NO: 62465 - DNA, 19 bp, Artificial Sequence
  Synthetic
gaggagccacucagctcuc

SEQ ID NO: 62466 - DNA, 20 bp, Artificial Sequence
  Synthetic
ggaggaagcucccuggaaac

SEQ ID NO: 62467 - DNA, 19 bp, Artificial Sequence
  Synthetic
gccccaaccutguaggaca

SEQ ID NO: 62468 - DNA, 21 bp, Artificial Sequence
  Synthetic
gcaggcacutgctugaaacac

SEQ ID NO: 62469 - DNA, 29 bp, Artificial Sequence
  Synthetic
agcagtctctgucttatgattcatttgut

SEQ ID NO: 62470 - DNA, 21 bp, Artificial Sequence
  Synthetic
gccatggauaggctcaucagg

SEQ ID NO: 62471 - DNA, 26 bp, Artificial Sequence
  Synthetic
cagtgcauacttttgtggugaaaact

SEQ ID NO: 62472 - DNA, 22 bp, Artificial Sequence
  Synthetic
tcagaaucagcaggttugcagt

SEQ ID NO: 62473 - DNA, 28 bp, Artificial Sequence
  Synthetic
cttaaatguaggaatgggatgucacaga

SEQ ID NO: 62474 - DNA, 26 bp, Artificial Sequence
  Synthetic
ctatgatgcuaactacgaugggaagg

SEQ ID NO: 62475 - DNA, 22 bp, Artificial Sequence
  Synthetic
aactcccgcaauctcattguga

SEQ ID NO: 62476 - DNA, 25 bp, Artificial Sequence
  Synthetic
tggagtttuaccttggaugcaaaca

SEQ ID NO: 62477 - DNA, 23 bp, Artificial Sequence
  Synthetic
gaaactguccgtagatgcugact

SEQ ID NO: 62478 - DNA, 18 bp, Artificial Sequence
  Synthetic
ccgccuctgauggcgaaa

SEQ ID NO: 62479 - DNA, 19 bp, Artificial Sequence
  Synthetic
cagctcaggcuccttgucc

SEQ ID NO: 62480 - DNA, 21 bp, Artificial Sequence
  Synthetic
atgccaaguatgaccgcuacc

SEQ ID NO: 62481 - DNA, 20 bp, Artificial Sequence
  Synthetic
gtaatgcucccgcgtctuct

SEQ ID NO: 62482 - DNA, 20 bp, Artificial Sequence
  Synthetic
tgtctgccacuccctgguat

SEQ ID NO: 62483 - DNA, 25 bp, Artificial Sequence
  Synthetic
gaaagttcttguactcctccaccuc

SEQ ID NO: 62484 - DNA, 21 bp, Artificial Sequence
  Synthetic
gcaaggccaggaaaugctcut

SEQ ID NO: 62485 - DNA, 23 bp, Artificial Sequence
  Synthetic
cgaccagccaguctctaaaagua

SEQ ID NO: 62486 - DNA, 20 bp, Artificial Sequence
  Synthetic
ccctgcaaucgtctcugact

SEQ ID NO: 62487 - DNA, 23 bp, Artificial Sequence
  Synthetic
agggcaacatuaagggtctgtut

SEQ ID NO: 62488 - DNA, 23 bp, Artificial Sequence
  Synthetic
cgggcagagaaaucctauacagt

SEQ ID NO: 62489 - DNA, 22 bp, Artificial Sequence
  Synthetic
agaguagacaagctgugggaga

SEQ ID NO: 62490 - DNA, 21 bp, Artificial Sequence
  Synthetic
ggcttgaaagcuggctcucat

SEQ ID NO: 62491 - DNA, 24 bp, Artificial Sequence
  Synthetic
ccccaaaatugagggttactgguc

SEQ ID NO: 62492 - DNA, 19 bp, Artificial Sequence
  Synthetic
tctgugcagccacguagac

SEQ ID NO: 62493 - DNA, 23 bp, Artificial Sequence
  Synthetic
gtgaccatttuctgtgctcctuc

SEQ ID NO: 62494 - DNA, 22 bp, Artificial Sequence
  Synthetic
ctcagagutcctgcttugggat

SEQ ID NO: 62495 - DNA, 24 bp, Artificial Sequence
  Synthetic
agaggtcucgagagaaagtuagca

SEQ ID NO: 62496 - DNA, 21 bp, Artificial Sequence
  Synthetic
gtactctgugcagacgucact

SEQ ID NO: 62497 - DNA, 22 bp, Artificial Sequence
  Synthetic
ctcagtggcautgtggttgtuc

SEQ ID NO: 62498 - DNA, 23 bp, Artificial Sequence
  Synthetic
agaaatccagutcctgcttucgt

SEQ ID NO: 62499 - DNA, 19 bp, Artificial Sequence
  Synthetic
gcacatgcuccgacaggut

SEQ ID NO: 62500 - DNA, 19 bp, Artificial Sequence
  Synthetic
gcccacucggctaaccaut

SEQ ID NO: 62501 - DNA, 20 bp, Artificial Sequence
  Synthetic
caagguacagggcatgcauc

SEQ ID NO: 62502 - DNA, 20 bp, Artificial Sequence
  Synthetic
gctcgguggatgaggucaat

SEQ ID NO: 62503 - DNA, 22 bp, Artificial Sequence
  Synthetic
cacaaatcctucccaagctcug

SEQ ID NO: 62504 - DNA, 17 bp, Artificial Sequence
  Synthetic
gcuccgcaggcaaggua

SEQ ID NO: 62505 - DNA, 20 bp, Artificial Sequence
  Synthetic
ccgaguggagagctggauct

SEQ ID NO: 62506 - DNA, 24 bp, Artificial Sequence
  Synthetic
gaagacuatggtttugggacacga

SEQ ID NO: 62507 - DNA, 21 bp, Artificial Sequence
  Synthetic
cccttcgagaagcugcagaug

SEQ ID NO: 62508 - DNA, 24 bp, Artificial Sequence
  Synthetic
agaacaactguaacccaagcauca

SEQ ID NO: 62509 - DNA, 23 bp, Artificial Sequence
  Synthetic
tcatagcgacagugatcgtcauc

SEQ ID NO: 62510 - DNA, 17 bp, Artificial Sequence
  Synthetic
ggaccagccggcaucuc

SEQ ID NO: 62511 - DNA, 18 bp, Artificial Sequence
  Synthetic
gcuccccagggaagguca

SEQ ID NO: 62512 - DNA, 19 bp, Artificial Sequence
  Synthetic
cttggacccggacucgtua

SEQ ID NO: 62513 - DNA, 17 bp, Artificial Sequence
  Synthetic
cgcucgcaggtcuccag

SEQ ID NO: 62514 - DNA, 21 bp, Artificial Sequence
  Synthetic
aagaactucaggcgccaagua

SEQ ID NO: 62515 - DNA, 22 bp, Artificial Sequence
  Synthetic
cctacgtgucttcttggacugg

SEQ ID NO: 62516 - DNA, 19 bp, Artificial Sequence
  Synthetic
catguagcgggcctcuagt

SEQ ID NO: 62517 - DNA, 18 bp, Artificial Sequence
  Synthetic
aaagucccccagccctug

SEQ ID NO: 62518 - DNA, 21 bp, Artificial Sequence
  Synthetic
atgtggtgcaucctgtctgut

SEQ ID NO: 62519 - DNA, 28 bp, Artificial Sequence
  Synthetic
agaagcaaaacaaaagguttaagctugt

SEQ ID NO: 62520 - DNA, 21 bp, Artificial Sequence
  Synthetic
agtggcuccctgauaccaaga

SEQ ID NO: 62521 - DNA, 21 bp, Artificial Sequence
  Synthetic
caaagugaauggcacaacggt

SEQ ID NO: 62522 - DNA, 26 bp, Artificial Sequence
  Synthetic
ctcaagctttucttttagttgcugct

SEQ ID NO: 62523 - DNA, 28 bp, Artificial Sequence
  Synthetic
gtgtcccagttugcattaacaaatagut

SEQ ID NO: 62524 - DNA, 28 bp, Artificial Sequence
  Synthetic
tggcaaaatuaagcactagtgtuacaga

SEQ ID NO: 62525 - DNA, 24 bp, Artificial Sequence
  Synthetic
ttgctcaguttcgaagacucaact

SEQ ID NO: 62526 - DNA, 22 bp, Artificial Sequence
  Synthetic
gctcagguaggctggctaatut

SEQ ID NO: 62527 - DNA, 26 bp, Artificial Sequence
  Synthetic
gcagccagaagugcactatacataua

SEQ ID NO: 62528 - DNA, 27 bp, Artificial Sequence
  Synthetic
tgcccgtugctttacaatttauaagga

SEQ ID NO: 62529 - DNA, 28 bp, Artificial Sequence
  Synthetic
agtctgaaguggaaatggtgauaaagac

SEQ ID NO: 62530 - DNA, 22 bp, Artificial Sequence
  Synthetic
tgacautacagguacccgagga

SEQ ID NO: 62531 - DNA, 27 bp, Artificial Sequence
  Synthetic
aaaagaagaggcagautactgtggaut

SEQ ID NO: 62532 - DNA, 25 bp, Artificial Sequence
  Synthetic
gaagcagtuctctggtttguacaac

SEQ ID NO: 62533 - DNA, 22 bp, Artificial Sequence
  Synthetic
tttcccccucctctctauccac

SEQ ID NO: 62534 - DNA, 24 bp, Artificial Sequence
  Synthetic
tgcgacaucacctgaaattctuca

SEQ ID NO: 62535 - DNA, 28 bp, Artificial Sequence
  Synthetic
cttgatgatgcagauagcagttcatuag

SEQ ID NO: 62536 - DNA, 21 bp, Artificial Sequence
  Synthetic
catggugggaccacatctuga

SEQ ID NO: 62537 - DNA, 28 bp, Artificial Sequence
  Synthetic
tgggacaguaaaaggcaataatagctut

SEQ ID NO: 62538 - DNA, 22 bp, Artificial Sequence
  Synthetic
accacacuttgtcccucaacaa

SEQ ID NO: 62539 - DNA, 24 bp, Artificial Sequence
  Synthetic
tgtgggagaaaacaucatgucgaa

SEQ ID NO: 62540 - DNA, 23 bp, Artificial Sequence
  Synthetic
tcccccugggaactagaaauagg

SEQ ID NO: 62541 - DNA, 26 bp, Artificial Sequence
  Synthetic
cctaaucagaaggaagcaaugcacat

SEQ ID NO: 62542 - DNA, 27 bp, Artificial Sequence
  Synthetic
ctgttttaacugacaccttgtttcuga

SEQ ID NO: 62543 - DNA, 27 bp, Artificial Sequence
  Synthetic
actttttctccagugtcccagtatcua

SEQ ID NO: 62544 - DNA, 28 bp, Artificial Sequence
  Synthetic
agtatcacaagugaagttgagaguacct

SEQ ID NO: 62545 - DNA, 26 bp, Artificial Sequence
  Synthetic
cgtatggatttuacacctggctttut

SEQ ID NO: 62546 - DNA, 27 bp, Artificial Sequence
  Synthetic
ccattgcattugcctactctttgatua

SEQ ID NO: 62547 - DNA, 29 bp, Artificial Sequence
  Synthetic
aggtcatttauccacccaacatttuaaca

SEQ ID NO: 62548 - DNA, 24 bp, Artificial Sequence
  Synthetic
gaaagcaacttucacctaggcaut

SEQ ID NO: 62549 - DNA, 22 bp, Artificial Sequence
  Synthetic
agataagcagugacccgttcug

SEQ ID NO: 62550 - DNA, 25 bp, Artificial Sequence
  Synthetic
ggtgtttgcugaagttctacctuct

SEQ ID NO: 62551 - DNA, 24 bp, Artificial Sequence
  Synthetic
catactccucaaaggucaagccat

SEQ ID NO: 62552 - DNA, 19 bp, Artificial Sequence
  Synthetic
tggtttugcagcccuggat

SEQ ID NO: 62553 - DNA, 28 bp, Artificial Sequence
  Synthetic
ccggccgcuaataataattctcatuaag

SEQ ID NO: 62554 - DNA, 24 bp, Artificial Sequence
  Synthetic
cacaactgtaauaactgcccccut

SEQ ID NO: 62555 - DNA, 28 bp, Artificial Sequence
  Synthetic
gaaaatgagatcuaacagctgtgtcuga

SEQ ID NO: 62556 - DNA, 23 bp, Artificial Sequence
  Synthetic
accttgtccugcattgcttaucc

SEQ ID NO: 62557 - DNA, 24 bp, Artificial Sequence
  Synthetic
cccaagttacugactaagcaucca

SEQ ID NO: 62558 - DNA, 26 bp, Artificial Sequence
  Synthetic
agcaagaauaccaattaacacugcca

SEQ ID NO: 62559 - DNA, 25 bp, Artificial Sequence
  Synthetic
gcattccataucatcactggctuct

SEQ ID NO: 62560 - DNA, 25 bp, Artificial Sequence
  Synthetic
cuatccattcccaugaaaccagaca

SEQ ID NO: 62561 - DNA, 27 bp, Artificial Sequence
  Synthetic
attgaaccaccuttcattaaugggact

SEQ ID NO: 62562 - DNA, 23 bp, Artificial Sequence
  Synthetic
cagauccagggaactagaugcag

SEQ ID NO: 62563 - DNA, 28 bp, Artificial Sequence
  Synthetic
aaagctagtaccutgaacacatcugaag

SEQ ID NO: 62564 - DNA, 28 bp, Artificial Sequence
  Synthetic
gaaatgaccutcatgtgaauaccaggat

SEQ ID NO: 62565 - DNA, 28 bp, Artificial Sequence
  Synthetic
cctattggttuatggctagaacuaagga

SEQ ID NO: 62566 - DNA, 22 bp, Artificial Sequence
  Synthetic
gctcctgugcttggttctcuac

SEQ ID NO: 62567 - DNA, 28 bp, Artificial Sequence
  Synthetic
tctttctcaagagautctccccaattuc

SEQ ID NO: 62568 - DNA, 24 bp, Artificial Sequence
  Synthetic
aaccctacauacctagcugcaaac

SEQ ID NO: 62569 - DNA, 28 bp, Artificial Sequence
  Synthetic
gttaggaatgcaaautgtgctatcauct

SEQ ID NO: 62570 - DNA, 26 bp, Artificial Sequence
  Synthetic
tutcttgatcaugaaaacgccaacaa

SEQ ID NO: 62571 - DNA, 27 bp, Artificial Sequence
  Synthetic
tgcatcugaagggtattatguggaaat

SEQ ID NO: 62572 - DNA, 24 bp, Artificial Sequence
  Synthetic
tgataaccgucagtgctttacugt

SEQ ID NO: 62573 - DNA, 24 bp, Artificial Sequence
  Synthetic
caacgcacaaugaccgtcttatut

SEQ ID NO: 62574 - DNA, 22 bp, Artificial Sequence
  Synthetic
agcggcucatttttgacttucc

SEQ ID NO: 62575 - DNA, 22 bp, Artificial Sequence
  Synthetic
guacctccttguacgacgacat

SEQ ID NO: 62576 - DNA, 20 bp, Artificial Sequence
  Synthetic
accaggcgcacautgtcuat

SEQ ID NO: 62577 - DNA, 20 bp, Artificial Sequence
  Synthetic
gagacctucggcgaguacag

SEQ ID NO: 62578 - DNA, 25 bp, Artificial Sequence
  Synthetic
tcttctgaagaggagugcaaggaua

SEQ ID NO: 62579 - DNA, 22 bp, Artificial Sequence
  Synthetic
gagguggaggaggaaguaggat

SEQ ID NO: 62580 - DNA, 21 bp, Artificial Sequence
  Synthetic
tccttuccctcagguggagat

SEQ ID NO: 62581 - DNA, 26 bp, Artificial Sequence
  Synthetic
gaacaaatctguctaaaagccacgut

SEQ ID NO: 62582 - DNA, 21 bp, Artificial Sequence
  Synthetic
ctgtgtggtugtctgcccaua

SEQ ID NO: 62583 - DNA, 23 bp, Artificial Sequence
  Synthetic
cttcaaaagcucgacttcaccuc

SEQ ID NO: 62584 - DNA, 28 bp, Artificial Sequence
  Synthetic
ttgtattttaggcauaggtgttctgugt

SEQ ID NO: 62585 - DNA, 28 bp, Artificial Sequence
  Synthetic
agttgtgacaagaacacuggtgattaut

SEQ ID NO: 62586 - DNA, 25 bp, Artificial Sequence
  Synthetic
gacagtttcucctgagaaugggaat

SEQ ID NO: 62587 - DNA, 28 bp, Artificial Sequence
  Synthetic
tgtgtctaaatcucttttccccattgut

SEQ ID NO: 62588 - DNA, 24 bp, Artificial Sequence
  Synthetic
aaagacagaaaaugcagtcagugt

SEQ ID NO: 62589 - DNA, 27 bp, Artificial Sequence
  Synthetic
tgtttgtagaatucacggatcacctut

SEQ ID NO: 62590 - DNA, 19 bp, Artificial Sequence
  Synthetic
ccagcggcggutgatuagt

SEQ ID NO: 62591 - DNA, 19 bp, Artificial Sequence
  Synthetic
ctcccagccguatgcugag

SEQ ID NO: 62592 - DNA, 22 bp, Artificial Sequence
  Synthetic
gcggcagaauttgagagatugt

SEQ ID NO: 62593 - DNA, 25 bp, Artificial Sequence
  Synthetic
gggtgacttgauggagtcattaauc

SEQ ID NO: 62594 - DNA, 23 bp, Artificial Sequence
  Synthetic
actcagtcuctccaggatugaca

SEQ ID NO: 62595 - DNA, 21 bp, Artificial Sequence
  Synthetic
aaagtgcuccatctccuccac

SEQ ID NO: 62596 - DNA, 20 bp, Artificial Sequence
  Synthetic
cccctcaccccuctcatgut

SEQ ID NO: 62597 - DNA, 20 bp, Artificial Sequence
  Synthetic
cttcccgagcagaacugguc

SEQ ID NO: 62598 - DNA, 20 bp, Artificial Sequence
  Synthetic
gtgaccagucctgcctguaa

SEQ ID NO: 62599 - DNA, 20 bp, Artificial Sequence
  Synthetic
cccaggcaaaugtgugacag

SEQ ID NO: 62600 - DNA, 20 bp, Artificial Sequence
  Synthetic
ccactguccaccctgtccua

SEQ ID NO: 62601 - DNA, 17 bp, Artificial Sequence
  Synthetic
gccguaggcccccatug

SEQ ID NO: 62602 - DNA, 24 bp, Artificial Sequence
  Synthetic
gcaagtcagtutcggtttcctuct

SEQ ID NO: 62603 - DNA, 22 bp, Artificial Sequence
  Synthetic
gcgagtccaugtgatctcctuc

SEQ ID NO: 62604 - DNA, 22 bp, Artificial Sequence
  Synthetic
gggtctgaugatcaccctucct

SEQ ID NO: 62605 - DNA, 22 bp, Artificial Sequence
  Synthetic
ccaggcuagctctgtgtttuct

SEQ ID NO: 62606 - DNA, 21 bp, Artificial Sequence
  Synthetic
ggacgtgucttgtgactucct

SEQ ID NO: 62607 - DNA, 29 bp, Artificial Sequence
  Synthetic
gctgtacttgtgguattcattgcattaut

SEQ ID NO: 62608 - DNA, 23 bp, Artificial Sequence
  Synthetic
actugacagaaaccagcuggaat

SEQ ID NO: 62609 - DNA, 28 bp, Artificial Sequence
  Synthetic
ggtcaagaacutatcttccttctuccaa

SEQ ID NO: 62610 - DNA, 22 bp, Artificial Sequence
  Synthetic
gacucatcaggaaucacaccgt

SEQ ID NO: 62611 - DNA, 28 bp, Artificial Sequence
  Synthetic
actccttcgacuttctctgtttattugt

SEQ ID NO: 62612 - DNA, 20 bp, Artificial Sequence
  Synthetic
gggagguccaggguacacaa

SEQ ID NO: 62613 - DNA, 26 bp, Artificial Sequence
  Synthetic
tctgtaaaatcugtcccttgtcucct

SEQ ID NO: 62614 - DNA, 25 bp, Artificial Sequence
  Synthetic
tcttggtgtguatgttcatcaugag

SEQ ID NO: 62615 - DNA, 27 bp, Artificial Sequence
  Synthetic
ccacatcttaguggccttacttuacat

SEQ ID NO: 62616 - DNA, 27 bp, Artificial Sequence
  Synthetic
caccactatatcaucaacacaagguaa

SEQ ID NO: 62617 - DNA, 29 bp, Artificial Sequence
  Synthetic
cattggagaagggautagagaagtaacug

SEQ ID NO: 62618 - DNA, 25 bp, Artificial Sequence
  Synthetic
cttaccagcagutgtttucaggaag

SEQ ID NO: 62619 - DNA, 28 bp, Artificial Sequence
  Synthetic
cttagagataagccgguatggttgttua

SEQ ID NO: 62620 - DNA, 32 bp, Artificial Sequence
  Synthetic
aagacactctaaautctttctttgatcauact

SEQ ID NO: 62621 - DNA, 22 bp, Artificial Sequence
  Synthetic
aaggaucuccaggagcaaaagg

SEQ ID NO: 62622 - DNA, 24 bp, Artificial Sequence
  Synthetic
acattttctcccutgtcaccctug

SEQ ID NO: 62623 - DNA, 23 bp, Artificial Sequence
  Synthetic
agugggaacccaagatttuccat

SEQ ID NO: 62624 - DNA, 26 bp, Artificial Sequence
  Synthetic
gaaagagaaagagaagcucugacact

SEQ ID NO: 62625 - DNA, 27 bp, Artificial Sequence
  Synthetic
gtcactgtgaugaagaagctgtaugat

SEQ ID NO: 62626 - DNA, 25 bp, Artificial Sequence
  Synthetic
atcaagcugttttaccttuggacct

SEQ ID NO: 62627 - DNA, 28 bp, Artificial Sequence
  Synthetic
tctgcaaatctuccttttgagtguacaa

SEQ ID NO: 62628 - DNA, 24 bp, Artificial Sequence
  Synthetic
cctcttgguccaatttctccauct

SEQ ID NO: 62629 - DNA, 24 bp, Artificial Sequence
  Synthetic
tgatttaacagggugaacgagguc

SEQ ID NO: 62630 - DNA, 28 bp, Artificial Sequence
  Synthetic
atcttgaaucacccaaatatcgtaauca

SEQ ID NO: 62631 - DNA, 19 bp, Artificial Sequence
  Synthetic
gggccaaaggugagagugg

SEQ ID NO: 62632 - DNA, 24 bp, Artificial Sequence
  Synthetic
ggacacagaucagcatggcuaaat

SEQ ID NO: 62633 - DNA, 22 bp, Artificial Sequence
  Synthetic
acttggcucaagaccaauggag

SEQ ID NO: 62634 - DNA, 22 bp, Artificial Sequence
  Synthetic
agaaaagtugcaggtggucact

SEQ ID NO: 62635 - DNA, 23 bp, Artificial Sequence
  Synthetic
tcatctccaucctcatcctcguc

SEQ ID NO: 62636 - DNA, 21 bp, Artificial Sequence
  Synthetic
ggaagggaccugaccaucaaa

SEQ ID NO: 62637 - DNA, 24 bp, Artificial Sequence
  Synthetic
ctctcauagacactacagtuggct

SEQ ID NO: 62638 - DNA, 25 bp, Artificial Sequence
  Synthetic
ctttgtcactgucactgtcctctut

SEQ ID NO: 62639 - DNA, 20 bp, Artificial Sequence
  Synthetic
ccacatcacuggcagagguc

SEQ ID NO: 62640 - DNA, 25 bp, Artificial Sequence
  Synthetic
tcctcctcuacttgagaagucaacc

SEQ ID NO: 62641 - DNA, 24 bp, Artificial Sequence
  Synthetic
tcgcaatccaugagcctctttaut

SEQ ID NO: 62642 - DNA, 22 bp, Artificial Sequence
  Synthetic
gtgaagggagacagguctcuca

SEQ ID NO: 62643 - DNA, 28 bp, Artificial Sequence
  Synthetic
agctggagtttautcagtttcttcctut

SEQ ID NO: 62644 - DNA, 26 bp, Artificial Sequence
  Synthetic
acatatactcugtgtacggtuggaga

SEQ ID NO: 62645 - DNA, 28 bp, Artificial Sequence
  Synthetic
ttaaaagagauctcatttgauggcagaa

SEQ ID NO: 62646 - DNA, 21 bp, Artificial Sequence
  Synthetic
cctccuggaggcattgcaaut

SEQ ID NO: 62647 - DNA, 24 bp, Artificial Sequence
  Synthetic
aaagucatguacagcggagaagag

SEQ ID NO: 62648 - DNA, 28 bp, Artificial Sequence
  Synthetic
aatttgaggaaacauttgcatucagagg

SEQ ID NO: 62649 - DNA, 28 bp, Artificial Sequence
  Synthetic
agaatcggccaaugaaaatgcatuaaaa

SEQ ID NO: 62650 - DNA, 26 bp, Artificial Sequence
  Synthetic
gaaaccacaacagcauttatccucaa

SEQ ID NO: 62651 - DNA, 27 bp, Artificial Sequence
  Synthetic
cagggatggutttgaaatcuacacaac

SEQ ID NO: 62652 - DNA, 33 bp, Artificial Sequence
  Synthetic
tattttcatttgtuaggccaagattaagtucat

SEQ ID NO: 62653 - DNA, 21 bp, Artificial Sequence
  Synthetic
tcccaggagagcutcacugaa

SEQ ID NO: 62654 - DNA, 26 bp, Artificial Sequence
  Synthetic
gagcatcggguaatcttttguagaca

SEQ ID NO: 62655 - DNA, 22 bp, Artificial Sequence
  Synthetic
tcttggcaaacuccaggugaag

SEQ ID NO: 62656 - DNA, 20 bp, Artificial Sequence
  Synthetic
ggcgaagacgagauccagut

SEQ ID NO: 62657 - DNA, 20 bp, Artificial Sequence
  Synthetic
accugcacacacttggugat

SEQ ID NO: 62658 - DNA, 28 bp, Artificial Sequence
  Synthetic
aatgtcgtgaaauagatggctuagaact

SEQ ID NO: 62659 - DNA, 28 bp, Artificial Sequence
  Synthetic
atggatattctcugccagtttttctcut

SEQ ID NO: 62660 - DNA, 22 bp, Artificial Sequence
  Synthetic
ggctauggcagaaatgauggct

SEQ ID NO: 62661 - DNA, 26 bp, Artificial Sequence
  Synthetic
catacactcauggaattgagcucaga

SEQ ID NO: 62662 - DNA, 28 bp, Artificial Sequence
  Synthetic
gatggcctaaaauatttgttcactuggg

SEQ ID NO: 62663 - DNA, 23 bp, Artificial Sequence
  Synthetic
tctggttcuccgtatctgtgugt

SEQ ID NO: 62664 - DNA, 28 bp, Artificial Sequence
  Synthetic
ggatatgttucacgtagtacacatugct

SEQ ID NO: 62665 - DNA, 28 bp, Artificial Sequence
  Synthetic
gccaggtgacautcagaacattatuagt

SEQ ID NO: 62666 - DNA, 21 bp, Artificial Sequence
  Synthetic
caggcaugcttgtgtugaagt

SEQ ID NO: 62667 - DNA, 27 bp, Artificial Sequence
  Synthetic
tccctttcuaatgttaagaacugggaa

SEQ ID NO: 62668 - DNA, 22 bp, Artificial Sequence
  Synthetic
cacauggctcuggagaagacat

SEQ ID NO: 62669 - DNA, 22 bp, Artificial Sequence
  Synthetic
cgccaaagauctcgatctcgua

SEQ ID NO: 62670 - DNA, 19 bp, Artificial Sequence
  Synthetic
ttcaggccagugcgttcut

SEQ ID NO: 62671 - DNA, 20 bp, Artificial Sequence
  Synthetic
ctgcccaucatctcccctuc

SEQ ID NO: 62672 - DNA, 19 bp, Artificial Sequence
  Synthetic
ctggucagagagcgcuacc

SEQ ID NO: 62673 - DNA, 26 bp, Artificial Sequence
  Synthetic
aaggagcccacaaauaaguaaacagt

SEQ ID NO: 62674 - DNA, 22 bp, Artificial Sequence
  Synthetic
ccatggauagaagctggugaca

SEQ ID NO: 62675 - DNA, 23 bp, Artificial Sequence
  Synthetic
cacaaaccautctggguggaaag

SEQ ID NO: 62676 - DNA, 25 bp, Artificial Sequence
  Synthetic
ggaagagacuttggatcugaaggaa

SEQ ID NO: 62677 - DNA, 24 bp, Artificial Sequence
  Synthetic
agaactcgaaucttgtgcuccaag

SEQ ID NO: 62678 - DNA, 29 bp, Artificial Sequence
  Synthetic
ggctttccagaaaugtcagagataucaat

SEQ ID NO: 62679 - DNA, 22 bp, Artificial Sequence
  Synthetic
tttatgctugcctccuggacaa

SEQ ID NO: 62680 - DNA, 18 bp, Artificial Sequence
  Synthetic
augccccggagcagaauc

SEQ ID NO: 62681 - DNA, 21 bp, Artificial Sequence
  Synthetic
ccctccaccuccttcuccaaa

SEQ ID NO: 62682 - DNA, 28 bp, Artificial Sequence
  Synthetic
ggttttatacatutcctagggctucgat

SEQ ID NO: 62683 - DNA, 30 bp, Artificial Sequence
  Synthetic
cagaaaacaagtuaaggctcacaataugaa

SEQ ID NO: 62684 - DNA, 24 bp, Artificial Sequence
  Synthetic
gtttaaacaggacugaagggugaa

SEQ ID NO: 62685 - DNA, 29 bp, Artificial Sequence
  Synthetic
aactatgcttacuccctctcaactaugat

SEQ ID NO: 62686 - DNA, 21 bp, Artificial Sequence
  Synthetic
ccccttugagaaccacagcut

SEQ ID NO: 62687 - DNA, 26 bp, Artificial Sequence
  Synthetic
cccttcagucttgtgtaugacaaaga

SEQ ID NO: 62688 - DNA, 21 bp, Artificial Sequence
  Synthetic
gttttgcucaaatgggcugct

SEQ ID NO: 62689 - DNA, 24 bp, Artificial Sequence
  Synthetic
ccagatccacutcctgagttuact

SEQ ID NO: 62690 - DNA, 18 bp, Artificial Sequence
  Synthetic
cgttucccagcucgacca

SEQ ID NO: 62691 - DNA, 26 bp, Artificial Sequence
  Synthetic
ctacacatggacauttgcctgattuc

SEQ ID NO: 62692 - DNA, 20 bp, Artificial Sequence
  Synthetic
ggctcaacuctcctgtgcut

SEQ ID NO: 62693 - DNA, 17 bp, Artificial Sequence
  Synthetic
gugaagcuggccccact

SEQ ID NO: 62694 - DNA, 25 bp, Artificial Sequence
  Synthetic
tgtaccttcccaugcactatttugt

SEQ ID NO: 62695 - DNA, 28 bp, Artificial Sequence
  Synthetic
ggattcagacuaaaaggaagagatgugt

SEQ ID NO: 62696 - DNA, 24 bp, Artificial Sequence
  Synthetic
gggaagcacugaaaccucaagaat

SEQ ID NO: 62697 - DNA, 25 bp, Artificial Sequence
  Synthetic
aaagttcctcaaugcactgactcut

SEQ ID NO: 62698 - DNA, 18 bp, Artificial Sequence
  Synthetic
ctcugagcgcgacucgaa

SEQ ID NO: 62699 - DNA, 21 bp, Artificial Sequence
  Synthetic
gctgcttuagcttcggagugt

SEQ ID NO: 62700 - DNA, 18 bp, Artificial Sequence
  Synthetic
ctgagtucgcccgtgtuc

SEQ ID NO: 62701 - DNA, 22 bp, Artificial Sequence
  Synthetic
gtggtcagaaacucctggtuca

SEQ ID NO: 62702 - DNA, 21 bp, Artificial Sequence
  Synthetic
ggaggcacaaagcugtctgua

SEQ ID NO: 62703 - DNA, 29 bp, Artificial Sequence
  Synthetic
gcctaaaagaaaacaugatggtugacaat

SEQ ID NO: 62704 - DNA, 23 bp, Artificial Sequence
  Synthetic
ggagggaaugcgaagaaactcut

SEQ ID NO: 62705 - DNA, 20 bp, Artificial Sequence
  Synthetic
cgtcgtaugcgagagtcugt

SEQ ID NO: 62706 - DNA, 26 bp, Artificial Sequence
  Synthetic
caagagttguctgatgttacuccagt

SEQ ID NO: 62707 - DNA, 28 bp, Artificial Sequence
  Synthetic
tcagcataattuacacctgtgttctugt

SEQ ID NO: 62708 - DNA, 23 bp, Artificial Sequence
  Synthetic
cggttcttccugccatctgauaa

SEQ ID NO: 62709 - DNA, 21 bp, Artificial Sequence
  Synthetic
ggcaggaaucacctctgtguc

SEQ ID NO: 62710 - DNA, 21 bp, Artificial Sequence
  Synthetic
gctgcucggaggagaagatuc

SEQ ID NO: 62711 - DNA, 24 bp, Artificial Sequence
  Synthetic
ggtttuccaggaagcatcagtuca

SEQ ID NO: 62712 - DNA, 22 bp, Artificial Sequence
  Synthetic
ggctctgacauctagtgtgugt

SEQ ID NO: 62713 - DNA, 25 bp, Artificial Sequence
  Synthetic
aaaaccaucccccauaaaccaagaa

SEQ ID NO: 62714 - DNA, 20 bp, Artificial Sequence
  Synthetic
gcgccaugaagagtgtgtug

SEQ ID NO: 62715 - DNA, 27 bp, Artificial Sequence
  Synthetic
acagaatcaaacuaactcattggcugt

SEQ ID NO: 62716 - DNA, 25 bp, Artificial Sequence
  Synthetic
cagagagagagucacttgtagcuga

SEQ ID NO: 62717 - DNA, 28 bp, Artificial Sequence
  Synthetic
gctttgtaatucccaataactgtggtut

SEQ ID NO: 62718 - DNA, 21 bp, Artificial Sequence
  Synthetic
gugccccgaggtaauaggaag

SEQ ID NO: 62719 - DNA, 22 bp, Artificial Sequence
  Synthetic
tctgtcccugggcatagaauca

SEQ ID NO: 62720 - DNA, 21 bp, Artificial Sequence
  Synthetic
gcctgtagccugcagcatuat

SEQ ID NO: 62721 - DNA, 22 bp, Artificial Sequence
  Synthetic
gcagtctcagautccaggccua

SEQ ID NO: 62722 - DNA, 23 bp, Artificial Sequence
  Synthetic
cattacatcuggccaagcguagt

SEQ ID NO: 62723 - DNA, 21 bp, Artificial Sequence
  Synthetic
ctggaccacagcacugactut

SEQ ID NO: 62724 - DNA, 28 bp, Artificial Sequence
  Synthetic
acattaagtaccagugagagaguacaca

SEQ ID NO: 62725 - DNA, 28 bp, Artificial Sequence
  Synthetic
atggattgaauatgtttgaugggacaga

SEQ ID NO: 62726 - DNA, 21 bp, Artificial Sequence
  Synthetic
ggacuctaccauccagccaca

SEQ ID NO: 62727 - DNA, 24 bp, Artificial Sequence
  Synthetic
atgacctggucttcttctctguct

SEQ ID NO: 62728 - DNA, 21 bp, Artificial Sequence
  Synthetic
ggtccaaaggcugtacggaut

SEQ ID NO: 62729 - DNA, 21 bp, Artificial Sequence
  Synthetic
gctcactttcuccctgtccuc

SEQ ID NO: 62730 - DNA, 24 bp, Artificial Sequence
  Synthetic
gcautctacatctucacccaccag

SEQ ID NO: 62731 - DNA, 21 bp, Artificial Sequence
  Synthetic
cctgggaaguagcttgtccut

SEQ ID NO: 62732 - DNA, 17 bp, Artificial Sequence
  Synthetic
gagccgccccuttgtug

SEQ ID NO: 62733 - DNA, 22 bp, Artificial Sequence
  Synthetic
ctcccatcugtgcctctguaag

SEQ ID NO: 62734 - DNA, 19 bp, Artificial Sequence
  Synthetic
gcaaguggcagtccccuaa

SEQ ID NO: 62735 - DNA, 18 bp, Artificial Sequence
  Synthetic
cagggaccugccuaggac

SEQ ID NO: 62736 - DNA, 20 bp, Artificial Sequence
  Synthetic
ccactguctgggucaaggat

SEQ ID NO: 62737 - DNA, 21 bp, Artificial Sequence
  Synthetic
gcactcggcucctttctguag

SEQ ID NO: 62738 - DNA, 22 bp, Artificial Sequence
  Synthetic
gttccacugcaaggtguacagt

SEQ ID NO: 62739 - DNA, 21 bp, Artificial Sequence
  Synthetic
cuccaaccccuagacccaaat

SEQ ID NO: 62740 - DNA, 20 bp, Artificial Sequence
  Synthetic
gccuggcgggcaattctaut

SEQ ID NO: 62741 - DNA, 21 bp, Artificial Sequence
  Synthetic
cggccguaagtcacaggatuc

SEQ ID NO: 62742 - DNA, 18 bp, Artificial Sequence
  Synthetic
ggaggaccuggaccgugt

SEQ ID NO: 62743 - DNA, 17 bp, Artificial Sequence
  Synthetic
ccaccgagccccuctuc

SEQ ID NO: 62744 - DNA, 19 bp, Artificial Sequence
  Synthetic
gcctccuctgacctuggga

SEQ ID NO: 62745 - DNA, 18 bp, Artificial Sequence
  Synthetic
accctcacugcccgguat

SEQ ID NO: 62746 - DNA, 23 bp, Artificial Sequence
  Synthetic
catgcactuccagactttgctut

SEQ ID NO: 62747 - DNA, 31 bp, Artificial Sequence
  Synthetic
atcttagagataacauggtgtttttggtgua

SEQ ID NO: 62748 - DNA, 31 bp, Artificial Sequence
  Synthetic
tcaattttggatucatatgccttctguaaga

SEQ ID NO: 62749 - DNA, 28 bp, Artificial Sequence
  Synthetic
ggcttctggcuagaggtcattaattaut

SEQ ID NO: 62750 - DNA, 22 bp, Artificial Sequence
  Synthetic
actgaagcugacaaccgaagut

SEQ ID NO: 62751 - DNA, 22 bp, Artificial Sequence
  Synthetic
cgaguggcaatgagucacagac

SEQ ID NO: 62752 - DNA, 28 bp, Artificial Sequence
  Synthetic
agctgtcagtgguagctataggaatuaa

SEQ ID NO: 62753 - DNA, 25 bp, Artificial Sequence
  Synthetic
gttgaactguatctgccaataugcc

SEQ ID NO: 62754 - DNA, 26 bp, Artificial Sequence
  Synthetic
tcatcttctgucctcttcacucaagt

SEQ ID NO: 62755 - DNA, 23 bp, Artificial Sequence
  Synthetic
gggttattcugacccaagccaua

SEQ ID NO: 62756 - DNA, 25 bp, Artificial Sequence
  Synthetic
ctaattttccuctccctcugccaat

SEQ ID NO: 62757 - DNA, 24 bp, Artificial Sequence
  Synthetic
gaaaaagaagaaagcguggugagg

SEQ ID NO: 62758 - DNA, 24 bp, Artificial Sequence
  Synthetic
ggaaagacauacccccagaugaga

SEQ ID NO: 62759 - DNA, 28 bp, Artificial Sequence
  Synthetic
ttcacctaatgacucttctgaacuacct

SEQ ID NO: 62760 - DNA, 27 bp, Artificial Sequence
  Synthetic
tccccuaaaacagaaagacactcuact

SEQ ID NO: 62761 - DNA, 25 bp, Artificial Sequence
  Synthetic
cctttcagtttutgtcgagggugat

SEQ ID NO: 62762 - DNA, 19 bp, Artificial Sequence
  Synthetic
acaacugcgagcactucgt

SEQ ID NO: 62763 - DNA, 22 bp, Artificial Sequence
  Synthetic
agagaaaaggucagggauggga

SEQ ID NO: 62764 - DNA, 24 bp, Artificial Sequence
  Synthetic
acctgtaataugaacagcauggca

SEQ ID NO: 62765 - DNA, 22 bp, Artificial Sequence
  Synthetic
gtctcctguctatgggcucaga

SEQ ID NO: 62766 - DNA, 21 bp, Artificial Sequence
  Synthetic
ggctgggutaggcaattuggt

SEQ ID NO: 62767 - DNA, 24 bp, Artificial Sequence
  Synthetic
gacgcctcaugaccatttctttut

SEQ ID NO: 62768 - DNA, 29 bp, Artificial Sequence
  Synthetic
ttctactaatuctgtatagccuccaagga

SEQ ID NO: 62769 - DNA, 27 bp, Artificial Sequence
  Synthetic
cacaaatgacuggactgatgggataut

SEQ ID NO: 62770 - DNA, 25 bp, Artificial Sequence
  Synthetic
gaggaaguaacatttgguccacaca

SEQ ID NO: 62771 - DNA, 22 bp, Artificial Sequence
  Synthetic
accagauggattuccgaggact

SEQ ID NO: 62772 - DNA, 22 bp, Artificial Sequence
  Synthetic
gttcaattgcugggcatgcuaa

SEQ ID NO: 62773 - DNA, 29 bp, Artificial Sequence
  Synthetic
ctacacagtatccucagcttcttgaaaua

SEQ ID NO: 62774 - DNA, 25 bp, Artificial Sequence
  Synthetic
cctgaaacaugataagcctgucact

SEQ ID NO: 62775 - DNA, 23 bp, Artificial Sequence
  Synthetic
atgaatcacttugtgaggcccut

SEQ ID NO: 62776 - DNA, 24 bp, Artificial Sequence
  Synthetic
agatatttgtgcguctgcgtguat

SEQ ID NO: 62777 - DNA, 22 bp, Artificial Sequence
  Synthetic
tgtgaccctutgtacagcagug

SEQ ID NO: 62778 - DNA, 23 bp, Artificial Sequence
  Synthetic
cagcatcgguatcaagtcccaut

SEQ ID NO: 62779 - DNA, 21 bp, Artificial Sequence
  Synthetic
cactactuagcctgugcacca

SEQ ID NO: 62780 - DNA, 24 bp, Artificial Sequence
  Synthetic
cgtgtaaggucttcagacauggac

SEQ ID NO: 62781 - DNA, 25 bp, Artificial Sequence
  Synthetic
gcagcatttagugggcggtttauat

SEQ ID NO: 62782 - DNA, 28 bp, Artificial Sequence
  Synthetic
cctttcaaagtautgtgtcattcaugct

SEQ ID NO: 62783 - DNA, 18 bp, Artificial Sequence
  Synthetic
cccagccucctgtgggua

SEQ ID NO: 62784 - DNA, 28 bp, Artificial Sequence
  Synthetic
acagacacttcauttggagtacctuaac

SEQ ID NO: 62785 - DNA, 25 bp, Artificial Sequence
  Synthetic
gcattagugaccagggtttgtaauc

SEQ ID NO: 62786 - DNA, 20 bp, Artificial Sequence
  Synthetic
tgcagcacuccacaacauca

SEQ ID NO: 62787 - DNA, 28 bp, Artificial Sequence
  Synthetic
acatgcacuacgatgtacactauagaga

SEQ ID NO: 62788 - DNA, 22 bp, Artificial Sequence
  Synthetic
cgagautccaaaacugacagca

SEQ ID NO: 62789 - DNA, 28 bp, Artificial Sequence
  Synthetic
tccagaacaaaaacccucuaacaagaat

SEQ ID NO: 62790 - DNA, 21 bp, Artificial Sequence
  Synthetic
cucaguaaaaccagcccaggt

SEQ ID NO: 62791 - DNA, 21 bp, Artificial Sequence
  Synthetic
ggcctccucctcacttucaga

SEQ ID NO: 62792 - DNA, 22 bp, Artificial Sequence
  Synthetic
ctgatagggcagggugatccua

SEQ ID NO: 62793 - DNA, 21 bp, Artificial Sequence
  Synthetic
ctggagtcuagcttgggagug

SEQ ID NO: 62794 - DNA, 21 bp, Artificial Sequence
  Synthetic
ttgaaagggaggcuccgttut

SEQ ID NO: 62795 - DNA, 26 bp, Artificial Sequence
  Synthetic
tcctgcttccuctaatcatatcugct

SEQ ID NO: 62796 - DNA, 22 bp, Artificial Sequence
  Synthetic
ccaaggagacugtugaggaagg

SEQ ID NO: 62797 - DNA, 25 bp, Artificial Sequence
  Synthetic
atgaaaacacaagugggcaaacaut

SEQ ID NO: 62798 - DNA, 24 bp, Artificial Sequence
  Synthetic
ctcautactagcagucccaaaccc

SEQ ID NO: 62799 - DNA, 22 bp, Artificial Sequence
  Synthetic
ttctggcgaggagutaggtcua

SEQ ID NO: 62800 - DNA, 26 bp, Artificial Sequence
  Synthetic
aggccuttttataugagccaacaact

SEQ ID NO: 62801 - DNA, 26 bp, Artificial Sequence
  Synthetic
ggttaccaacutcttttcttcagugg

SEQ ID NO: 62802 - DNA, 24 bp, Artificial Sequence
  Synthetic
gcaccagcaggaugtactattcuc

SEQ ID NO: 62803 - DNA, 20 bp, Artificial Sequence
  Synthetic
gggaagutcttucgggacct

SEQ ID NO: 62804 - DNA, 23 bp, Artificial Sequence
  Synthetic
cggcaggaagautacaugaagac

SEQ ID NO: 62805 - DNA, 28 bp, Artificial Sequence
  Synthetic
ggttgauacaaagagaaagatgucccaa

SEQ ID NO: 62806 - DNA, 22 bp, Artificial Sequence
  Synthetic
tggcccttugttttgctguact

SEQ ID NO: 62807 - DNA, 28 bp, Artificial Sequence
  Synthetic
gtaagtagttcaaugtaccgagcaugaa

SEQ ID NO: 62808 - DNA, 23 bp, Artificial Sequence
  Synthetic
tguttgatgggcugaggaagaag

SEQ ID NO: 62809 - DNA, 25 bp, Artificial Sequence
  Synthetic
ttctttctcutggcctcuaccaaag

SEQ ID NO: 62810 - DNA, 24 bp, Artificial Sequence
  Synthetic
ggatcctgtuagcaacttgaggut

SEQ ID NO: 62811 - DNA, 21 bp, Artificial Sequence
  Synthetic
cggttgcgauctgtgcttcua

SEQ ID NO: 62812 - DNA, 17 bp, Artificial Sequence
  Synthetic
cttgtgucccggcguct

SEQ ID NO: 62813 - DNA, 21 bp, Artificial Sequence
  Synthetic
cgcacaccutccagttcatug

SEQ ID NO: 62814 - DNA, 20 bp, Artificial Sequence
  Synthetic
cacccaugccgttttctuga

SEQ ID NO: 62815 - DNA, 20 bp, Artificial Sequence
  Synthetic
catcgccucgcatttccuct

SEQ ID NO: 62816 - DNA, 25 bp, Artificial Sequence
  Synthetic
cattcttgtacuggaccaggaagug

SEQ ID NO: 62817 - DNA, 24 bp, Artificial Sequence
  Synthetic
catgcccacccautctattttcug

SEQ ID NO: 62818 - DNA, 20 bp, Artificial Sequence
  Synthetic
gggtcccugtggagagaugg

SEQ ID NO: 62819 - DNA, 18 bp, Artificial Sequence
  Synthetic
cctguggcccccucaaat

SEQ ID NO: 62820 - DNA, 19 bp, Artificial Sequence
  Synthetic
cacagaccccuccccagua

SEQ ID NO: 62821 - DNA, 23 bp, Artificial Sequence
  Synthetic
gtggtctgaggutctctggtaug

SEQ ID NO: 62822 - DNA, 22 bp, Artificial Sequence
  Synthetic
aaagaggcucagggtcacuaga

SEQ ID NO: 62823 - DNA, 24 bp, Artificial Sequence
  Synthetic
ccctgtgactuctctttccctgua

SEQ ID NO: 62824 - DNA, 23 bp, Artificial Sequence
  Synthetic
tcctccauatctttccugcccat

SEQ ID NO: 62825 - DNA, 24 bp, Artificial Sequence
  Synthetic
tcaccccatcutttgcattctcut

SEQ ID NO: 62826 - DNA, 24 bp, Artificial Sequence
  Synthetic
ggutaaaaaucagaggcgacagga

SEQ ID NO: 62827 - DNA, 23 bp, Artificial Sequence
  Synthetic
tgagauggagaaaggcctagugt

SEQ ID NO: 62828 - DNA, 24 bp, Artificial Sequence
  Synthetic
gcttcutcacactcuccagaaagg

SEQ ID NO: 62829 - DNA, 23 bp, Artificial Sequence
  Synthetic
cctgtggtutcctaatgguccag

SEQ ID NO: 62830 - DNA, 23 bp, Artificial Sequence
  Synthetic
tgagcctcagugtccccaataua

SEQ ID NO: 62831 - DNA, 23 bp, Artificial Sequence
  Synthetic
tgaagaagaccaucgacatgcug

SEQ ID NO: 62832 - DNA, 23 bp, Artificial Sequence
  Synthetic
gtgagaagggagutggaauccag

SEQ ID NO: 62833 - DNA, 28 bp, Artificial Sequence
  Synthetic
ctcttcacucaccactatttcttctuca

SEQ ID NO: 62834 - DNA, 25 bp, Artificial Sequence
  Synthetic
acagattgcugcttctttuccaaac

SEQ ID NO: 62835 - DNA, 28 bp, Artificial Sequence
  Synthetic
ccgtgaaaatggaaauagtggctctuat

SEQ ID NO: 62836 - DNA, 25 bp, Artificial Sequence
  Synthetic
ccccaacaguttttagtaccuggaa

SEQ ID NO: 62837 - DNA, 25 bp, Artificial Sequence
  Synthetic
cctcgtcttcutgtagcaaaaaugg

SEQ ID NO: 62838 - DNA, 28 bp, Artificial Sequence
  Synthetic
gcgtcttcttttuccaactggtactuat

SEQ ID NO: 62839 - DNA, 22 bp, Artificial Sequence
  Synthetic
tctcacacccccutctcagaut

SEQ ID NO: 62840 - DNA, 28 bp, Artificial Sequence
  Synthetic
tcttttatctttagcaucctggtccuct

SEQ ID NO: 62841 - DNA, 28 bp, Artificial Sequence
  Synthetic
cgatatttgtggcuggtggtttatauga

SEQ ID NO: 62842 - DNA, 22 bp, Artificial Sequence
  Synthetic
ccagctgugccaaacacaauat

SEQ ID NO: 62843 - DNA, 26 bp, Artificial Sequence
  Synthetic
gaaagtacctgaugacatgcattugt

SEQ ID NO: 62844 - DNA, 24 bp, Artificial Sequence
  Synthetic
aactacagaaaaguatgggcaucc

SEQ ID NO: 62845 - DNA, 28 bp, Artificial Sequence
  Synthetic
gcaggagtatuaccatacaaggaaauct

SEQ ID NO: 62846 - DNA, 19 bp, Artificial Sequence
  Synthetic
gccccagcguttccgtauc

SEQ ID NO: 62847 - DNA, 26 bp, Artificial Sequence
  Synthetic
agattgaugacaccccatttaaccuc

SEQ ID NO: 62848 - DNA, 23 bp, Artificial Sequence
  Synthetic
gcaacaagacagguagctttucc

SEQ ID NO: 62849 - DNA, 22 bp, Artificial Sequence
  Synthetic
gaatcaguctctgtggugggat

SEQ ID NO: 62850 - DNA, 22 bp, Artificial Sequence
  Synthetic
guatgggacuggcaacagagaa

SEQ ID NO: 62851 - DNA, 29 bp, Artificial Sequence
  Synthetic
gttactcttgctugactctatgttcuact

SEQ ID NO: 62852 - DNA, 21 bp, Artificial Sequence
  Synthetic
ccaacautgagugaggcacaa

SEQ ID NO: 62853 - DNA, 22 bp, Artificial Sequence
  Synthetic
cttucaggcagccgacuaaaaa

SEQ ID NO: 62854 - DNA, 27 bp, Artificial Sequence
  Synthetic
tccccguaagcaatgtaucaaagaaat

SEQ ID NO: 62855 - DNA, 32 bp, Artificial Sequence
  Synthetic
agaaggatacaaugtttatgatggagaugaac

SEQ ID NO: 62856 - DNA, 29 bp, Artificial Sequence
  Synthetic
tgaaggtctgaaautctagggagatgtua

SEQ ID NO: 62857 - DNA, 22 bp, Artificial Sequence
  Synthetic
ggcaggaaagagacguaugagt

SEQ ID NO: 62858 - DNA, 25 bp, Artificial Sequence
  Synthetic
tgtgtggaaaugggatctgttctut

SEQ ID NO: 62859 - DNA, 28 bp, Artificial Sequence
  Synthetic
atgtctatggaaaugcaaatggatcuca

SEQ ID NO: 62860 - DNA, 33 bp, Artificial Sequence
  Synthetic
tttctaaaaaucagacaattacaagcuaaagag

SEQ ID NO: 62861 - DNA, 28 bp, Artificial Sequence
  Synthetic
caacctatgugaacgatcctgaagauaa

SEQ ID NO: 62862 - DNA, 28 bp, Artificial Sequence
  Synthetic
ttgatgcatcugcttagaacttaucaat

SEQ ID NO: 62863 - DNA, 25 bp, Artificial Sequence
  Synthetic
gaaautggugaaccaggaagacaag

SEQ ID NO: 62864 - DNA, 26 bp, Artificial Sequence
  Synthetic
tcttccaaatguaatggagtcagcut

SEQ ID NO: 62865 - DNA, 28 bp, Artificial Sequence
  Synthetic
tcacgaaattccacutcagctacaauat

SEQ ID NO: 62866 - DNA, 25 bp, Artificial Sequence
  Synthetic
aagaaatttttcacugggcgatugg

SEQ ID NO: 62867 - DNA, 24 bp, Artificial Sequence
  Synthetic
tgccttcaaaaucagggtttucct

SEQ ID NO: 62868 - DNA, 28 bp, Artificial Sequence
  Synthetic
gattctgactacauagaacaggaagugg

SEQ ID NO: 62869 - DNA, 24 bp, Artificial Sequence
  Synthetic
ttcacuccctatcaucccagaaca

SEQ ID NO: 62870 - DNA, 23 bp, Artificial Sequence
  Synthetic
gcatttcttagugagggcaguca

SEQ ID NO: 62871 - DNA, 27 bp, Artificial Sequence
  Synthetic
gtgtagtgctuaaacagaaaatgcugt

SEQ ID NO: 62872 - DNA, 28 bp, Artificial Sequence
  Synthetic
catgtgtttaccuagggttactttcuca

SEQ ID NO: 62873 - DNA, 20 bp, Artificial Sequence
  Synthetic
cactgggcaguccttcgtua

SEQ ID NO: 62874 - DNA, 23 bp, Artificial Sequence
  Synthetic
cgtaggcauccttcacatgcaut

SEQ ID NO: 62875 - DNA, 23 bp, Artificial Sequence
  Synthetic
ctgccatgutgaactcttcugga

SEQ ID NO: 62876 - DNA, 22 bp, Artificial Sequence
  Synthetic
attatcucctgctguggaagcc

SEQ ID NO: 62877 - DNA, 23 bp, Artificial Sequence
  Synthetic
aaagctccguctgcatagttcut

SEQ ID NO: 62878 - DNA, 23 bp, Artificial Sequence
  Synthetic
cgcttgacugctgatgtuaccaa

SEQ ID NO: 62879 - DNA, 26 bp, Artificial Sequence
  Synthetic
ctgagtaagaaaaggutccccactua

SEQ ID NO: 62880 - DNA, 26 bp, Artificial Sequence
  Synthetic
gattagaaaacgutgtgtgacgugat

SEQ ID NO: 62881 - DNA, 28 bp, Artificial Sequence
  Synthetic
tgtggccttaagutcttaactgcttuaa

SEQ ID NO: 62882 - DNA, 27 bp, Artificial Sequence
  Synthetic
agcaactgcagaugactttattcauca

SEQ ID NO: 62883 - DNA, 24 bp, Artificial Sequence
  Synthetic
ctctttcccutgtcatgtguccaa

SEQ ID NO: 62884 - DNA, 27 bp, Artificial Sequence
  Synthetic
cactagtgcutgaatacctttuacagt

SEQ ID NO: 62885 - DNA, 23 bp, Artificial Sequence
  Synthetic
gcaggatttcutggtcaaagugg

SEQ ID NO: 62886 - DNA, 20 bp, Artificial Sequence
  Synthetic
gcacugacccgagactcuga

SEQ ID NO: 62887 - DNA, 20 bp, Artificial Sequence
  Synthetic
cgtcacctuagcgagagcug

SEQ ID NO: 62888 - DNA, 21 bp, Artificial Sequence
  Synthetic
tgcatucaggaccaactguca

SEQ ID NO: 62889 - DNA, 21 bp, Artificial Sequence
  Synthetic
gcaccugggacaactggaauc

SEQ ID NO: 62890 - DNA, 27 bp, Artificial Sequence
  Synthetic
ctgtgtgucagcaagaacaacattaut

SEQ ID NO: 62891 - DNA, 27 bp, Artificial Sequence
  Synthetic
tutcttctgaaatagucagcacacagt

SEQ ID NO: 62892 - DNA, 24 bp, Artificial Sequence
  Synthetic
attcagtaatgtugggctggagut

SEQ ID NO: 62893 - DNA, 25 bp, Artificial Sequence
  Synthetic
aatggtcctcuccatcactauaggg

SEQ ID NO: 62894 - DNA, 29 bp, Artificial Sequence
  Synthetic
tgttcccttaagauagactgtgataugct

SEQ ID NO: 62895 - DNA, 28 bp, Artificial Sequence
  Synthetic
gttcctcctccautcatttcaatcaaut

SEQ ID NO: 62896 - DNA, 24 bp, Artificial Sequence
  Synthetic
cactgaaagugatgaatggugcaa

SEQ ID NO: 62897 - DNA, 21 bp, Artificial Sequence
  Synthetic
acugggccaaaccagcaauat

SEQ ID NO: 62898 - DNA, 25 bp, Artificial Sequence
  Synthetic
agttgatattuggtggctugcagat

SEQ ID NO: 62899 - DNA, 22 bp, Artificial Sequence
  Synthetic
gaatgaacagugacccauccct

SEQ ID NO: 62900 - DNA, 29 bp, Artificial Sequence
  Synthetic
ttcctttaggctutattgaacaactcuca

SEQ ID NO: 62901 - DNA, 28 bp, Artificial Sequence
  Synthetic
ccaagtcaagcaguctggtaatatcaut

SEQ ID NO: 62902 - DNA, 22 bp, Artificial Sequence
  Synthetic
cacttgagaaautgctggccut

SEQ ID NO: 62903 - DNA, 27 bp, Artificial Sequence
  Synthetic
ccagctcttcuagtcccaaattctuag

SEQ ID NO: 62904 - DNA, 26 bp, Artificial Sequence
  Synthetic
aagtcttgugttgaaattcucagggt

SEQ ID NO: 62905 - DNA, 24 bp, Artificial Sequence
  Synthetic
gataaatcgcgauagagcgtucct

SEQ ID NO: 62906 - DNA, 24 bp, Artificial Sequence
  Synthetic
ccattgugcaaaagactccctuac

SEQ ID NO: 62907 - DNA, 24 bp, Artificial Sequence
  Synthetic
tgaccttggtuaactgagtgtguc

SEQ ID NO: 62908 - DNA, 24 bp, Artificial Sequence
  Synthetic
tgtgauatgtgcccuaggagaagt

SEQ ID NO: 62909 - DNA, 26 bp, Artificial Sequence
  Synthetic
cttaccaagcuatccacatctaugct

SEQ ID NO: 62910 - DNA, 22 bp, Artificial Sequence
  Synthetic
tgaaaacugcccacctctgtut

SEQ ID NO: 62911 - DNA, 23 bp, Artificial Sequence
  Synthetic
caatcuacagcctcacuccacac

SEQ ID NO: 62912 - DNA, 28 bp, Artificial Sequence
  Synthetic
ttgacaagucattatgagtatuggcact

SEQ ID NO: 62913 - DNA, 23 bp, Artificial Sequence
  Synthetic
gatgtgagcaauctgacccgtua

SEQ ID NO: 62914 - DNA, 18 bp, Artificial Sequence
  Synthetic
cagcctgcuctccacguc

SEQ ID NO: 62915 - DNA, 17 bp, Artificial Sequence
  Synthetic
agcgguggtgcgtcuac

SEQ ID NO: 62916 - DNA, 19 bp, Artificial Sequence
  Synthetic
ccattgacucgcactugcc

SEQ ID NO: 62917 - DNA, 21 bp, Artificial Sequence
  Synthetic
gaacaccutccuggacaccat

SEQ ID NO: 62918 - DNA, 20 bp, Artificial Sequence
  Synthetic
gcccagacutacggcttugg

SEQ ID NO: 62919 - DNA, 21 bp, Artificial Sequence
  Synthetic
cgagccugaacggtuagagaa

SEQ ID NO: 62920 - DNA, 23 bp, Artificial Sequence
  Synthetic
ctcttctggcuggcatttttcut

SEQ ID NO: 62921 - DNA, 21 bp, Artificial Sequence
  Synthetic
ggtggctucagggtguaacag

SEQ ID NO: 62922 - DNA, 24 bp, Artificial Sequence
  Synthetic
tccccagggautaaaaatgtugct

SEQ ID NO: 62923 - DNA, 28 bp, Artificial Sequence
  Synthetic
catctgtcaacuccacaaaattctucaa

SEQ ID NO: 62924 - DNA, 22 bp, Artificial Sequence
  Synthetic
gacactgtcaguggttttgcut

SEQ ID NO: 62925 - DNA, 28 bp, Artificial Sequence
  Synthetic
aggtgagtcauttcaaacatactucagt

SEQ ID NO: 62926 - DNA, 25 bp, Artificial Sequence
  Synthetic
acagttccucacagcctgttattuc

SEQ ID NO: 62927 - DNA, 28 bp, Artificial Sequence
  Synthetic
tgctggcaaaauacagaatttuaagcat

SEQ ID NO: 62928 - DNA, 20 bp, Artificial Sequence
  Synthetic
ctgttcccacccuggcatua

SEQ ID NO: 62929 - DNA, 21 bp, Artificial Sequence
  Synthetic
catcguggagtatgccuccaa

SEQ ID NO: 62930 - DNA, 22 bp, Artificial Sequence
  Synthetic
gaccacaucacctgcaaccaua

SEQ ID NO: 62931 - DNA, 20 bp, Artificial Sequence
  Synthetic
tguggagccttgucaccaac

SEQ ID NO: 62932 - DNA, 20 bp, Artificial Sequence
  Synthetic
tgtuaggccgcaaaccctua

SEQ ID NO: 62933 - DNA, 22 bp, Artificial Sequence
  Synthetic
atgggaaucctacagcatuggg

SEQ ID NO: 62934 - DNA, 28 bp, Artificial Sequence
  Synthetic
cacattaaaagugaacactaagcgaucc

SEQ ID NO: 62935 - DNA, 23 bp, Artificial Sequence
  Synthetic
aaataaccaaggcucgggaauca

SEQ ID NO: 62936 - DNA, 24 bp, Artificial Sequence
  Synthetic
catagtggugtggtcttugggaaa

SEQ ID NO: 62937 - DNA, 27 bp, Artificial Sequence
  Synthetic
catgttguaccaattgaaaaguagcca

SEQ ID NO: 62938 - DNA, 26 bp, Artificial Sequence
  Synthetic
tcagagttgutcttatagggucgagt

SEQ ID NO: 62939 - DNA, 20 bp, Artificial Sequence
  Synthetic
gacuacacagcgccauggaa

SEQ ID NO: 62940 - DNA, 23 bp, Artificial Sequence
  Synthetic
aggccagcuctgtgaaaaaugaa

SEQ ID NO: 62941 - DNA, 21 bp, Artificial Sequence
  Synthetic
aaagcaacgcaucucacaacc

SEQ ID NO: 62942 - DNA, 26 bp, Artificial Sequence
  Synthetic
cctttaaagauggagagaccctugaa

SEQ ID NO: 62943 - DNA, 26 bp, Artificial Sequence
  Synthetic
gtgagtguaaacagtaggacuaccac

SEQ ID NO: 62944 - DNA, 24 bp, Artificial Sequence
  Synthetic
ggcuaatgatatagaugggcaggt

SEQ ID NO: 62945 - DNA, 28 bp, Artificial Sequence
  Synthetic
gaaccagtaatttuccatgctgtcttut

SEQ ID NO: 62946 - DNA, 27 bp, Artificial Sequence
  Synthetic
acagggtuaaggaaaatagcaatgugt

SEQ ID NO: 62947 - DNA, 28 bp, Artificial Sequence
  Synthetic
accagctttugaaaatggacagauagat

SEQ ID NO: 62948 - DNA, 27 bp, Artificial Sequence
  Synthetic
gcaacugagcgatcaaaaauagaaagt

SEQ ID NO: 62949 - DNA, 27 bp, Artificial Sequence
  Synthetic
tgtggtattgugcaatgtgattuaacc

SEQ ID NO: 62950 - DNA, 18 bp, Artificial Sequence
  Synthetic
ccggaagggccuctucat

SEQ ID NO: 62951 - DNA, 21 bp, Artificial Sequence
  Synthetic
aaauagcauccgccacaacct

SEQ ID NO: 62952 - DNA, 28 bp, Artificial Sequence
  Synthetic
gcatcttcaagaacutcaacctcttuct

SEQ ID NO: 62953 - DNA, 24 bp, Artificial Sequence
  Synthetic
cagaccacacaauatcaccaccuc

SEQ ID NO: 62954 - DNA, 21 bp, Artificial Sequence
  Synthetic
ccttctggcuccttgactgug

SEQ ID NO: 62955 - DNA, 21 bp, Artificial Sequence
  Synthetic
catccgcaguctccagaagut

SEQ ID NO: 62956 - DNA, 19 bp, Artificial Sequence
  Synthetic
ccgtggaccgcuacatcuc

SEQ ID NO: 62957 - DNA, 19 bp, Artificial Sequence
  Synthetic
gcatguggacguacagcac

SEQ ID NO: 62958 - DNA, 20 bp, Artificial Sequence
  Synthetic
cctggcagcaccaugaacua

SEQ ID NO: 62959 - DNA, 21 bp, Artificial Sequence
  Synthetic
cgtcagagauggacaccucca

SEQ ID NO: 62960 - DNA, 17 bp, Artificial Sequence
  Synthetic
gccucccaggccatugt

SEQ ID NO: 62961 - DNA, 20 bp, Artificial Sequence
  Synthetic
cctatgccucctgccagaug

SEQ ID NO: 62962 - DNA, 23 bp, Artificial Sequence
  Synthetic
ctgacttccuctacatcgaugct

SEQ ID NO: 62963 - DNA, 22 bp, Artificial Sequence
  Synthetic
gttcactaaugccgtgatgcug

SEQ ID NO: 62964 - DNA, 19 bp, Artificial Sequence
  Synthetic
agcugcagaaacctgcuga

SEQ ID NO: 62965 - DNA, 18 bp, Artificial Sequence
  Synthetic
gccuggugccaacagcat

SEQ ID NO: 62966 - DNA, 24 bp, Artificial Sequence
  Synthetic
tttcutcttcagcaucaccaaggt

SEQ ID NO: 62967 - DNA, 25 bp, Artificial Sequence
  Synthetic
atccaaatgucccctgcattuaaga

SEQ ID NO: 62968 - DNA, 19 bp, Artificial Sequence
  Synthetic
tctgcaugggcgtctctug

SEQ ID NO: 62969 - DNA, 20 bp, Artificial Sequence
  Synthetic
cttccctucagggtcagugg

SEQ ID NO: 62970 - DNA, 25 bp, Artificial Sequence
  Synthetic
aaccaatcatugagcactgactcut

SEQ ID NO: 62971 - DNA, 20 bp, Artificial Sequence
  Synthetic
tcctcagccuccgauaagca

SEQ ID NO: 62972 - DNA, 25 bp, Artificial Sequence
  Synthetic
acaatgaccaaautaccagctcucc

SEQ ID NO: 62973 - DNA, 25 bp, Artificial Sequence
  Synthetic
acatgaaatucaacagccctcugat

SEQ ID NO: 62974 - DNA, 21 bp, Artificial Sequence
  Synthetic
aggagcuaggaaaugcaagcc

SEQ ID NO: 62975 - DNA, 26 bp, Artificial Sequence
  Synthetic
tcacagagttucaccccaaaagtuaa

SEQ ID NO: 62976 - DNA, 22 bp, Artificial Sequence
  Synthetic
gcatacccautgtctgcaguga

SEQ ID NO: 62977 - DNA, 22 bp, Artificial Sequence
  Synthetic
agtgctaacuccagtcttugcc

SEQ ID NO: 62978 - DNA, 25 bp, Artificial Sequence
  Synthetic
catcaaacaagagugtgttctgcut

SEQ ID NO: 62979 - DNA, 28 bp, Artificial Sequence
  Synthetic
gtcctaaatctgauctcaccatgatcuc

SEQ ID NO: 62980 - DNA, 22 bp, Artificial Sequence
  Synthetic
cacttuggagacgguacgaact

SEQ ID NO: 62981 - DNA, 23 bp, Artificial Sequence
  Synthetic
ccaagcaucaggccaaatguaac

SEQ ID NO: 62982 - DNA, 22 bp, Artificial Sequence
  Synthetic
tcaaugttacugcccccaaagg

SEQ ID NO: 62983 - DNA, 28 bp, Artificial Sequence
  Synthetic
tgtgttttgacugttgcaattttctuct

SEQ ID NO: 62984 - DNA, 24 bp, Artificial Sequence
  Synthetic
acatttttaggcutgacaggugga

SEQ ID NO: 62985 - DNA, 25 bp, Artificial Sequence
  Synthetic
tctgggttttcucaggattgctaug

SEQ ID NO: 62986 - DNA, 26 bp, Artificial Sequence
  Synthetic
ccatgtgaaagucaaaatgccaucat

SEQ ID NO: 62987 - DNA, 24 bp, Artificial Sequence
  Synthetic
tggaacaactuctcaatgctccug

SEQ ID NO: 62988 - DNA, 26 bp, Artificial Sequence
  Synthetic
gctttttctguacaatctgacgucca

SEQ ID NO: 62989 - DNA, 28 bp, Artificial Sequence
  Synthetic
ccgctgcaaaaugctactctatuaaaat

SEQ ID NO: 62990 - DNA, 23 bp, Artificial Sequence
  Synthetic
gacuggagtataaugcccaacga

SEQ ID NO: 62991 - DNA, 29 bp, Artificial Sequence
  Synthetic
ttgttctttguagagcatgctgactaaua

SEQ ID NO: 62992 - DNA, 28 bp, Artificial Sequence
  Synthetic
ggagtttattcattugctcctctagcut

SEQ ID NO: 62993 - DNA, 25 bp, Artificial Sequence
  Synthetic
aggcttuacaaagttctcugcaaga

SEQ ID NO: 62994 - DNA, 24 bp, Artificial Sequence
  Synthetic
agcacttcagcugattatgagugt

SEQ ID NO: 62995 - DNA, 25 bp, Artificial Sequence
  Synthetic
acatggtgguggtagttgatgaauc

SEQ ID NO: 62996 - DNA, 28 bp, Artificial Sequence
  Synthetic
aaatttaccaaccutcaggatcgaguag

SEQ ID NO: 62997 - DNA, 27 bp, Artificial Sequence
  Synthetic
aagcatggaaguaaatctcauggaaca

SEQ ID NO: 62998 - DNA, 28 bp, Artificial Sequence
  Synthetic
aattttacaaagccacgutactggaaug

SEQ ID NO: 62999 - DNA, 27 bp, Artificial Sequence
  Synthetic
cctggactacugttcattttcatugct

SEQ ID NO: 63000 - DNA, 23 bp, Artificial Sequence
  Synthetic
gatgcagtatuggctcgagtgua

SEQ ID NO: 63001 - DNA, 27 bp, Artificial Sequence
  Synthetic
gcaagtcaggaautatttgatttugct

SEQ ID NO: 63002 - DNA, 18 bp, Artificial Sequence
  Synthetic
cctctcccccutcccgut

SEQ ID NO: 63003 - DNA, 20 bp, Artificial Sequence
  Synthetic
ccuccagagccccgatttuc

SEQ ID NO: 63004 - DNA, 24 bp, Artificial Sequence
  Synthetic
cacctgagtucatgatcgacacuc

SEQ ID NO: 63005 - DNA, 21 bp, Artificial Sequence
  Synthetic
gcccttccucactcaguacac

SEQ ID NO: 63006 - DNA, 22 bp, Artificial Sequence
  Synthetic
agccttaggacauctgggauca

SEQ ID NO: 63007 - DNA, 22 bp, Artificial Sequence
  Synthetic
tcaaacccacugccatctucag

SEQ ID NO: 63008 - DNA, 22 bp, Artificial Sequence
  Synthetic
gcctggtgccugacacatttua

SEQ ID NO: 63009 - DNA, 26 bp, Artificial Sequence
  Synthetic
ccactgccttuctctcattctaacug

SEQ ID NO: 63010 - DNA, 28 bp, Artificial Sequence
  Synthetic
acaaacacgattgutttggcttaatcuc

SEQ ID NO: 63011 - DNA, 25 bp, Artificial Sequence
  Synthetic
tgctgtcttaugcttcagtgcttua

SEQ ID NO: 63012 - DNA, 24 bp, Artificial Sequence
  Synthetic
cacagtgatugctggttccatuaa

SEQ ID NO: 63013 - DNA, 27 bp, Artificial Sequence
  Synthetic
gtttgtgtttcucctagggagtuaagt

SEQ ID NO: 63014 - DNA, 25 bp, Artificial Sequence
  Synthetic
gcccagauactgttttcaaugcaaa

SEQ ID NO: 63015 - DNA, 28 bp, Artificial Sequence
  Synthetic
gggaaaaagaaaaccautgtgatgauaa

SEQ ID NO: 63016 - DNA, 21 bp, Artificial Sequence
  Synthetic
tgactccggacuacctcacut

SEQ ID NO: 63017 - DNA, 26 bp, Artificial Sequence
  Synthetic
agtaatagtcacaugacacgttuccc

SEQ ID NO: 63018 - DNA, 25 bp, Artificial Sequence
  Synthetic
acagtatcccaugaaccattgugaa

SEQ ID NO: 63019 - DNA, 29 bp, Artificial Sequence
  Synthetic
ggaagaaagaauaaaaucacacacacaca

SEQ ID NO: 63020 - DNA, 22 bp, Artificial Sequence
  Synthetic
gaggcaggutgatgttgucaga

SEQ ID NO: 63021 - DNA, 23 bp, Artificial Sequence
  Synthetic
acugtagcttcuaccgaaccaga

SEQ ID NO: 63022 - DNA, 27 bp, Artificial Sequence
  Synthetic
acattaaaacuggcatctgtttccuca

SEQ ID NO: 63023 - DNA, 25 bp, Artificial Sequence
  Synthetic
attagaguaggaaagagggctugga

SEQ ID NO: 63024 - DNA, 24 bp, Artificial Sequence
  Synthetic
gggtcttccucttctagaccuaca

SEQ ID NO: 63025 - DNA, 22 bp, Artificial Sequence
  Synthetic
cccagatgguccccaatuagag

SEQ ID NO: 63026 - DNA, 23 bp, Artificial Sequence
  Synthetic
cugaagggctugaaaggaaagag

SEQ ID NO: 63027 - DNA, 28 bp, Artificial Sequence
  Synthetic
tcattcttgaggcauttattaggcucat

SEQ ID NO: 63028 - DNA, 21 bp, Artificial Sequence
  Synthetic
cagaagcacutgcccccaaua

SEQ ID NO: 63029 - DNA, 28 bp, Artificial Sequence
  Synthetic
gtgtacctauaactgttgtgauggacat

SEQ ID NO: 63030 - DNA, 24 bp, Artificial Sequence
  Synthetic
aacattgctcuctaatgggctgut

SEQ ID NO: 63031 - DNA, 24 bp, Artificial Sequence
  Synthetic
gagugaaattccuggagaaagcac

SEQ ID NO: 63032 - DNA, 21 bp, Artificial Sequence
  Synthetic
cacacccacagcuagaggtuc

SEQ ID NO: 63033 - DNA, 20 bp, Artificial Sequence
  Synthetic
agggagggutcagtgucagt

SEQ ID NO: 63034 - DNA, 23 bp, Artificial Sequence
  Synthetic
ctgggtgtgauctcgagaatuga

SEQ ID NO: 63035 - DNA, 24 bp, Artificial Sequence
  Synthetic
aacgtgcctugttctttgcauaag

SEQ ID NO: 63036 - DNA, 20 bp, Artificial Sequence
  Synthetic
gcagcgtuacatggagcuct

SEQ ID NO: 63037 - DNA, 27 bp, Artificial Sequence
  Synthetic
ccaaatgaaagucagctatcgccttua

SEQ ID NO: 63038 - DNA, 20 bp, Artificial Sequence
  Synthetic
gactgguacacggucacacc

SEQ ID NO: 63039 - DNA, 22 bp, Artificial Sequence
  Synthetic
agaagccccaaaccutgcuaat

SEQ ID NO: 63040 - DNA, 21 bp, Artificial Sequence
  Synthetic
cccaggacutttcuccaggac

SEQ ID NO: 63041 - DNA, 25 bp, Artificial Sequence
  Synthetic
atccctggacccuaatgatttugac

SEQ ID NO: 63042 - DNA, 18 bp, Artificial Sequence
  Synthetic
ccccggucacggatgaug

SEQ ID NO: 63043 - DNA, 27 bp, Artificial Sequence
  Synthetic
aacccctcaaguttaaaaaggugaaga

SEQ ID NO: 63044 - DNA, 28 bp, Artificial Sequence
  Synthetic
tgaggtgtcauccacaattatcctttut

SEQ ID NO: 63045 - DNA, 24 bp, Artificial Sequence
  Synthetic
gaggaagaaaacutggaaggctug

SEQ ID NO: 63046 - DNA, 27 bp, Artificial Sequence
  Synthetic
tcttggctgagguctaatacaguaact

SEQ ID NO: 63047 - DNA, 27 bp, Artificial Sequence
  Synthetic
gccaataactutccttactgcucaaac

SEQ ID NO: 63048 - DNA, 24 bp, Artificial Sequence
  Synthetic
gtctttuaccaggtccacaugaga

SEQ ID NO: 63049 - DNA, 29 bp, Artificial Sequence
  Synthetic
tgagtguacagtggatauagaaaggacaa

SEQ ID NO: 63050 - DNA, 21 bp, Artificial Sequence
  Synthetic
gccttggcutagcgatgtuga

SEQ ID NO: 63051 - DNA, 28 bp, Artificial Sequence
  Synthetic
accaaaatgaacgacuttttcctttcut

SEQ ID NO: 63052 - DNA, 20 bp, Artificial Sequence
  Synthetic
ccatcaacaucgcccugaac

SEQ ID NO: 63053 - DNA, 22 bp, Artificial Sequence
  Synthetic
ctcctccugctagactgugaac

SEQ ID NO: 63054 - DNA, 23 bp, Artificial Sequence
  Synthetic
cgatgcaacuctatcgucacagt

SEQ ID NO: 63055 - DNA, 28 bp, Artificial Sequence
  Synthetic
ccgcaaatcccacuagctaaatatcuaa

SEQ ID NO: 63056 - DNA, 22 bp, Artificial Sequence
  Synthetic
cctgtcaccuttagccctggua

SEQ ID NO: 63057 - DNA, 20 bp, Artificial Sequence
  Synthetic
aaggguaagacctcggugga

SEQ ID NO: 63058 - DNA, 22 bp, Artificial Sequence
  Synthetic
ccaacaggcucacagagaagug

SEQ ID NO: 63059 - DNA, 23 bp, Artificial Sequence
  Synthetic
agtaatucaccagctccaugcag

SEQ ID NO: 63060 - DNA, 24 bp, Artificial Sequence
  Synthetic
agcctcatctucaagctcatcaut

SEQ ID NO: 63061 - DNA, 21 bp, Artificial Sequence
  Synthetic
gtagcagagcucacagauggt

SEQ ID NO: 63062 - DNA, 20 bp, Artificial Sequence
  Synthetic
gggccggaagcuaaactugt

SEQ ID NO: 63063 - DNA, 23 bp, Artificial Sequence
  Synthetic
ggcatctucatcgggttucagaa

SEQ ID NO: 63064 - DNA, 33 bp, Artificial Sequence
  Synthetic
taaagtgaatataccuggaaataactgtttugt

SEQ ID NO: 63065 - DNA, 26 bp, Artificial Sequence
  Synthetic
agctgctccagutgatgtacuaaaag

SEQ ID NO: 63066 - DNA, 28 bp, Artificial Sequence
  Synthetic
gggaggauggttaatgttgcuaaaagaa

SEQ ID NO: 63067 - DNA, 28 bp, Artificial Sequence
  Synthetic
catcttgaaaatguctctcccttcauct

SEQ ID NO: 63068 - DNA, 25 bp, Artificial Sequence
  Synthetic
gtgatgtctacaaugatgggacugt

SEQ ID NO: 63069 - DNA, 22 bp, Artificial Sequence
  Synthetic
cctctcccacaugtgaccctua

SEQ ID NO: 63070 - DNA, 19 bp, Artificial Sequence
  Synthetic
cccgcaagacccutgacuc

SEQ ID NO: 63071 - DNA, 25 bp, Artificial Sequence
  Synthetic
gggaggagacuatggcaaagttauc

SEQ ID NO: 63072 - DNA, 28 bp, Artificial Sequence
  Synthetic
caatgttgttacuggaaatgttctcugg

SEQ ID NO: 63073 - DNA, 28 bp, Artificial Sequence
  Synthetic
cacttcccaaccuattttcctgtctaut

SEQ ID NO: 63074 - DNA, 21 bp, Artificial Sequence
  Synthetic
acacctcatucctcagggcua

SEQ ID NO: 63075 - DNA, 25 bp, Artificial Sequence
  Synthetic
tccaatccttucccctaatttgcut

SEQ ID NO: 63076 - DNA, 29 bp, Artificial Sequence
  Synthetic
ggctgagttgcuatttgtcttctgtauaa

SEQ ID NO: 63077 - DNA, 20 bp, Artificial Sequence
  Synthetic
cacccugggatgtgcaucaa

SEQ ID NO: 63078 - DNA, 23 bp, Artificial Sequence
  Synthetic
cttacttggtutagcccaccuca

SEQ ID NO: 63079 - DNA, 22 bp, Artificial Sequence
  Synthetic
tcgtacacaacagugtgggtut

SEQ ID NO: 63080 - DNA, 24 bp, Artificial Sequence
  Synthetic
agcctcctucatttccctactuct

SEQ ID NO: 63081 - DNA, 22 bp, Artificial Sequence
  Synthetic
tggagggugcacagagagttua

SEQ ID NO: 63082 - DNA, 22 bp, Artificial Sequence
  Synthetic
agcaaagaacugggaagggaut

SEQ ID NO: 63083 - DNA, 27 bp, Artificial Sequence
  Synthetic
acactgttccuaaagcaattacugaca

SEQ ID NO: 63084 - DNA, 23 bp, Artificial Sequence
  Synthetic
caaagagggaggcutguacacat

SEQ ID NO: 63085 - DNA, 26 bp, Artificial Sequence
  Synthetic
ctttctgaacaaucacctcaacaguc

SEQ ID NO: 63086 - DNA, 25 bp, Artificial Sequence
  Synthetic
aggcattcuggaagttttacacugt

SEQ ID NO: 63087 - DNA, 30 bp, Artificial Sequence
  Synthetic
agttcatttacctugtgatttcttccaugt

SEQ ID NO: 63088 - DNA, 22 bp, Artificial Sequence
  Synthetic
gtctggtactucaccactggut

SEQ ID NO: 63089 - DNA, 20 bp, Artificial Sequence
  Synthetic
ggcaggcutgtatccactug

SEQ ID NO: 63090 - DNA, 28 bp, Artificial Sequence
  Synthetic
ttctagucattactttgugaaccccaag

SEQ ID NO: 63091 - DNA, 24 bp, Artificial Sequence
  Synthetic
ttcaaaaactggutgggcattcug

SEQ ID NO: 63092 - DNA, 28 bp, Artificial Sequence
  Synthetic
tcaaattactaugctgtgttcttgucct

SEQ ID NO: 63093 - DNA, 28 bp, Artificial Sequence
  Synthetic
gaaaagagtgtguacttagggtatgugt

SEQ ID NO: 63094 - DNA, 21 bp, Artificial Sequence
  Synthetic
gcuccccacgagaagtucaag

SEQ ID NO: 63095 - DNA, 24 bp, Artificial Sequence
  Synthetic
acaggtacctuggtgccttacuat

SEQ ID NO: 63096 - DNA, 26 bp, Artificial Sequence
  Synthetic
tctttgucttcttttguccacacact

SEQ ID NO: 63097 - DNA, 28 bp, Artificial Sequence
  Synthetic
cagaccttuctgttggtauaagaggaaa

SEQ ID NO: 63098 - DNA, 28 bp, Artificial Sequence
  Synthetic
attcaaagaggaggaautctgaucacag

SEQ ID NO: 63099 - DNA, 25 bp, Artificial Sequence
  Synthetic
tccatttcuggcaatacagcacuat

SEQ ID NO: 63100 - DNA, 20 bp, Artificial Sequence
  Synthetic
cccgtuccccttuaagagca

SEQ ID NO: 63101 - DNA, 21 bp, Artificial Sequence
  Synthetic
gacgttcucggcauagaggat

SEQ ID NO: 63102 - DNA, 18 bp, Artificial Sequence
  Synthetic
aaccuccccagugcgaag

SEQ ID NO: 63103 - DNA, 18 bp, Artificial Sequence
  Synthetic
ctucagacccgccaguga

SEQ ID NO: 63104 - DNA, 20 bp, Artificial Sequence
  Synthetic
cagggtgccutaggctagut

SEQ ID NO: 63105 - DNA, 22 bp, Artificial Sequence
  Synthetic
gcaatgccutggacctuaacct

SEQ ID NO: 63106 - DNA, 21 bp, Artificial Sequence
  Synthetic
caguccagccaggagctatug

SEQ ID NO: 63107 - DNA, 21 bp, Artificial Sequence
  Synthetic
ccgatgcugacctcaaacugg

SEQ ID NO: 63108 - DNA, 22 bp, Artificial Sequence
  Synthetic
agggaacacugcctctctcuaa

SEQ ID NO: 63109 - DNA, 23 bp, Artificial Sequence
  Synthetic
cccatgtgcagaaugggattcua

SEQ ID NO: 63110 - DNA, 20 bp, Artificial Sequence
  Synthetic
gctcaccutgtctgugcaac

SEQ ID NO: 63111 - DNA, 25 bp, Artificial Sequence
  Synthetic
tccgcccacutttatactcctttuc

SEQ ID NO: 63112 - DNA, 20 bp, Artificial Sequence
  Synthetic
ttcgcaggauggcaaacuct

SEQ ID NO: 63113 - DNA, 22 bp, Artificial Sequence
  Synthetic
cactccagaacugcctgactuc

SEQ ID NO: 63114 - DNA, 27 bp, Artificial Sequence
  Synthetic
tctttgtctggcuttgttacactauca

SEQ ID NO: 63115 - DNA, 24 bp, Artificial Sequence
  Synthetic
gctactgtcautcagcgtgctuat

SEQ ID NO: 63116 - DNA, 22 bp, Artificial Sequence
  Synthetic
caatgagcuggactttgtuggg

SEQ ID NO: 63117 - DNA, 26 bp, Artificial Sequence
  Synthetic
tggtgaacatguacattgcagtcaua

SEQ ID NO: 63118 - DNA, 24 bp, Artificial Sequence
  Synthetic
tgagagccuatgattguccaagga

SEQ ID NO: 63119 - DNA, 21 bp, Artificial Sequence
  Synthetic
catcgucacccactttcccut

SEQ ID NO: 63120 - DNA, 28 bp, Artificial Sequence
  Synthetic
cagagtaacaaaaaucaccttucagcaa

SEQ ID NO: 63121 - DNA, 26 bp, Artificial Sequence
  Synthetic
cauattatgtcaucgcagagaacgga

SEQ ID NO: 63122 - DNA, 21 bp, Artificial Sequence
  Synthetic
ctggtacucctggtcugcaag

SEQ ID NO: 63123 - DNA, 26 bp, Artificial Sequence
  Synthetic
cgattacttuccaggagtgttgctut

SEQ ID NO: 63124 - DNA, 22 bp, Artificial Sequence
  Synthetic
ggcugcacagacatttctugga

SEQ ID NO: 63125 - DNA, 23 bp, Artificial Sequence
  Synthetic
acagtcuttgtttctugcagggt

SEQ ID NO: 63126 - DNA, 22 bp, Artificial Sequence
  Synthetic
agagcctgcuattcaggacuca

SEQ ID NO: 63127 - DNA, 28 bp, Artificial Sequence
  Synthetic
gctaagcatgaagauttctgtgcattut

SEQ ID NO: 63128 - DNA, 23 bp, Artificial Sequence
  Synthetic
ccagcaaugtatagtgtugccat

SEQ ID NO: 63129 - DNA, 26 bp, Artificial Sequence
  Synthetic
cactgguagcctgttaaactuacaca

SEQ ID NO: 63130 - DNA, 25 bp, Artificial Sequence
  Synthetic
gcagauatactuacaggagcaccct

SEQ ID NO: 63131 - DNA, 28 bp, Artificial Sequence
  Synthetic
tggtggccaatuatcttgaatctcaaut

SEQ ID NO: 63132 - DNA, 26 bp, Artificial Sequence
  Synthetic
actaatctgttcuggtttgcttgugt

SEQ ID NO: 63133 - DNA, 28 bp, Artificial Sequence
  Synthetic
tugtttttaatgucacagggacaaaagg

SEQ ID NO: 63134 - DNA, 20 bp, Artificial Sequence
  Synthetic
tccagcacaucctggcatuc

SEQ ID NO: 63135 - DNA, 28 bp, Artificial Sequence
  Synthetic
acaagatggcucaccttttattttcuca

SEQ ID NO: 63136 - DNA, 26 bp, Artificial Sequence
  Synthetic
tctaaaactaacuggcctgttgtgut

SEQ ID NO: 63137 - DNA, 28 bp, Artificial Sequence
  Synthetic
gtcttcaaagaccutgcaagaagtacua

SEQ ID NO: 63138 - DNA, 28 bp, Artificial Sequence
  Synthetic
tcttttgaaggagauttcaaggcuaaca

SEQ ID NO: 63139 - DNA, 24 bp, Artificial Sequence
  Synthetic
gtgattcaccugaagagacagcut

SEQ ID NO: 63140 - DNA, 24 bp, Artificial Sequence
  Synthetic
cctttcatugttgcatcucacaca

SEQ ID NO: 63141 - DNA, 25 bp, Artificial Sequence
  Synthetic
cgagtggcuacagaaaagtgtctut

SEQ ID NO: 63142 - DNA, 21 bp, Artificial Sequence
  Synthetic
tcctagaaaucgcccucacct

SEQ ID NO: 63143 - DNA, 21 bp, Artificial Sequence
  Synthetic
cautctgtccuaccgcagagt

SEQ ID NO: 63144 - DNA, 21 bp, Artificial Sequence
  Synthetic
cacaggtuaaacccccucaca

SEQ ID NO: 63145 - DNA, 28 bp, Artificial Sequence
  Synthetic
gagggtactugaatcttcagaagtugaa

SEQ ID NO: 63146 - DNA, 25 bp, Artificial Sequence
  Synthetic
acctcccaauagctgagatcgauaa

SEQ ID NO: 63147 - DNA, 22 bp, Artificial Sequence
  Synthetic
agcugggaaauccgagacaaat

SEQ ID NO: 63148 - DNA, 20 bp, Artificial Sequence
  Synthetic
tttcttguggcccctugaca

SEQ ID NO: 63149 - DNA, 22 bp, Artificial Sequence
  Synthetic
gcttcucgaacatgaggucact

SEQ ID NO: 63150 - DNA, 21 bp, Artificial Sequence
  Synthetic
gctacaccaccutcactguct

SEQ ID NO: 63151 - DNA, 22 bp, Artificial Sequence
  Synthetic
gagtagaugtggctgaugcact

SEQ ID NO: 63152 - DNA, 22 bp, Artificial Sequence
  Synthetic
gctctgcacauagtaggcauct

SEQ ID NO: 63153 - DNA, 23 bp, Artificial Sequence
  Synthetic
actctcccagugatctcaucaca

SEQ ID NO: 63154 - DNA, 24 bp, Artificial Sequence
  Synthetic
ggctgaagcucatttctgacauca

SEQ ID NO: 63155 - DNA, 28 bp, Artificial Sequence
  Synthetic
ggacagggaagaguctatuacagaaaat

SEQ ID NO: 63156 - DNA, 23 bp, Artificial Sequence
  Synthetic
gaugttaatgugcaccccacaaa

SEQ ID NO: 63157 - DNA, 21 bp, Artificial Sequence
  Synthetic
gccccagagaaguagcuggat

SEQ ID NO: 63158 - DNA, 23 bp, Artificial Sequence
  Synthetic
gccatuaccttcagugaagcagt

SEQ ID NO: 63159 - DNA, 21 bp, Artificial Sequence
  Synthetic
ccctaagcucctgcagacuct

SEQ ID NO: 63160 - DNA, 21 bp, Artificial Sequence
  Synthetic
cutccugagagcaaaggcagt

SEQ ID NO: 63161 - DNA, 22 bp, Artificial Sequence
  Synthetic
tgccactcacuctcctcttcut

SEQ ID NO: 63162 - DNA, 22 bp, Artificial Sequence
  Synthetic
acagaguggtttcucccaggat

SEQ ID NO: 63163 - DNA, 24 bp, Artificial Sequence
  Synthetic
cuccagcacattuccaagaacaag

SEQ ID NO: 63164 - DNA, 21 bp, Artificial Sequence
  Synthetic
gagacaaggguttcccagcut

SEQ ID NO: 63165 - DNA, 26 bp, Artificial Sequence
  Synthetic
tgtggcttatguctcatgtgtcatuc

SEQ ID NO: 63166 - DNA, 22 bp, Artificial Sequence
  Synthetic
ggccattcautcaccaguccaa

SEQ ID NO: 63167 - DNA, 21 bp, Artificial Sequence
  Synthetic
ggatggugcctgtgtgttuca

SEQ ID NO: 63168 - DNA, 21 bp, Artificial Sequence
  Synthetic
ccagcccuttctttcucacca

SEQ ID NO: 63169 - DNA, 23 bp, Artificial Sequence
  Synthetic
gagtccaacccucgtgtctatut

SEQ ID NO: 63170 - DNA, 21 bp, Artificial Sequence
  Synthetic
gggtgtcucctgggaucacat

SEQ ID NO: 63171 - DNA, 26 bp, Artificial Sequence
  Synthetic
cctaggaucaggagctttgugaaaaa

SEQ ID NO: 63172 - DNA, 21 bp, Artificial Sequence
  Synthetic
actttccccugtcctccucat

SEQ ID NO: 63173 - DNA, 27 bp, Artificial Sequence
  Synthetic
ggctcttacccuttcttctttttctug

SEQ ID NO: 63174 - DNA, 21 bp, Artificial Sequence
  Synthetic
tgtccccgaacucctacauga

SEQ ID NO: 63175 - DNA, 28 bp, Artificial Sequence
  Synthetic
catttacgutcacgtcuaacacacaaaa

SEQ ID NO: 63176 - DNA, 21 bp, Artificial Sequence
  Synthetic
cttgagucagacgccctucat

SEQ ID NO: 63177 - DNA, 21 bp, Artificial Sequence
  Synthetic
gtctggctcautccacgtcuc

SEQ ID NO: 63178 - DNA, 19 bp, Artificial Sequence
  Synthetic
gggacucctucaccaaggg

SEQ ID NO: 63179 - DNA, 17 bp, Artificial Sequence
  Synthetic
cccaccgugtggtugct

SEQ ID NO: 63180 - DNA, 26 bp, Artificial Sequence
  Synthetic
ccaagttccugaagatagcugaagag

SEQ ID NO: 63181 - DNA, 18 bp, Artificial Sequence
  Synthetic
ccaggguccctgtagcug

SEQ ID NO: 63182 - DNA, 19 bp, Artificial Sequence
  Synthetic
aggaggacucacccgcuaa

SEQ ID NO: 63183 - DNA, 23 bp, Artificial Sequence
  Synthetic
ggtttaggaacugtggagtccug

SEQ ID NO: 63184 - DNA, 21 bp, Artificial Sequence
  Synthetic
gctgaugctggtcuacaagga

SEQ ID NO: 63185 - DNA, 21 bp, Artificial Sequence
  Synthetic
gctgucaaagcccagcaugat

SEQ ID NO: 63186 - DNA, 21 bp, Artificial Sequence
  Synthetic
ctccuccaccgagtcttcuct

SEQ ID NO: 63187 - DNA, 20 bp, Artificial Sequence
  Synthetic
gctctccugctggaggctua

SEQ ID NO: 63188 - DNA, 23 bp, Artificial Sequence
  Synthetic
gtgcatttcuccaccacattugt

SEQ ID NO: 63189 - DNA, 28 bp, Artificial Sequence
  Synthetic
tgtgctacaataugtgctgtttctttug

SEQ ID NO: 63190 - DNA, 27 bp, Artificial Sequence
  Synthetic
ggttattgttgaauggaaacgtgauga

SEQ ID NO: 63191 - DNA, 26 bp, Artificial Sequence
  Synthetic
agtgtggaagcuatctgcatttgaut

SEQ ID NO: 63192 - DNA, 22 bp, Artificial Sequence
  Synthetic
cgaggtgctugtcttgctgtua

SEQ ID NO: 63193 - DNA, 28 bp, Artificial Sequence
  Synthetic
catccatgccgutaagaatttcatucaa

SEQ ID NO: 63194 - DNA, 22 bp, Artificial Sequence
  Synthetic
ctgaggaugacagtctugagca

SEQ ID NO: 63195 - DNA, 23 bp, Artificial Sequence
  Synthetic
tgaacctctttutctccccgtut

SEQ ID NO: 63196 - DNA, 24 bp, Artificial Sequence
  Synthetic
gaaccagugattcgaguacaacct

SEQ ID NO: 63197 - DNA, 22 bp, Artificial Sequence
  Synthetic
tgtctucagcctcaguggaaac

SEQ ID NO: 63198 - DNA, 23 bp, Artificial Sequence
  Synthetic
tgtaaggacuatgcccactucca

SEQ ID NO: 63199 - DNA, 21 bp, Artificial Sequence
  Synthetic
cctgaggagccacugtctuct

SEQ ID NO: 63200 - DNA, 28 bp, Artificial Sequence
  Synthetic
acaaagcaaaaugtagagacugaaacct

SEQ ID NO: 63201 - DNA, 22 bp, Artificial Sequence
  Synthetic
cagtgcaugactctggtctuga

SEQ ID NO: 63202 - DNA, 22 bp, Artificial Sequence
  Synthetic
acctccctutgctttgtcuacc

SEQ ID NO: 63203 - DNA, 22 bp, Artificial Sequence
  Synthetic
actccgaaguaggcagctcuat

SEQ ID NO: 63204 - DNA, 22 bp, Artificial Sequence
  Synthetic
ggagatguccagtgggatgtug

SEQ ID NO: 63205 - DNA, 22 bp, Artificial Sequence
  Synthetic
tggctccutcgtctttugcaat

SEQ ID NO: 63206 - DNA, 22 bp, Artificial Sequence
  Synthetic
aggaaacucctgtagacucgca

SEQ ID NO: 63207 - DNA, 27 bp, Artificial Sequence
  Synthetic
gatttcatggaugagctgatggacaua

SEQ ID NO: 63208 - DNA, 21 bp, Artificial Sequence
  Synthetic
tggagagagaagccguguaga

SEQ ID NO: 63209 - DNA, 23 bp, Artificial Sequence
  Synthetic
ctcttcactcugtgtgtgtccug

SEQ ID NO: 63210 - DNA, 17 bp, Artificial Sequence
  Synthetic
cgtccguccagcuccag

SEQ ID NO: 63211 - DNA, 22 bp, Artificial Sequence
  Synthetic
ccttgttctuggagggcaacua

SEQ ID NO: 63212 - DNA, 22 bp, Artificial Sequence
  Synthetic
cttgugacccaaatugccaaga

SEQ ID NO: 63213 - DNA, 24 bp, Artificial Sequence
  Synthetic
tctgtttuagaacgagtugcggaa

SEQ ID NO: 63214 - DNA, 22 bp, Artificial Sequence
  Synthetic
gactaccuacacatggugcaca

SEQ ID NO: 63215 - DNA, 20 bp, Artificial Sequence
  Synthetic
aggctacuggtcacactuga

SEQ ID NO: 63216 - DNA, 27 bp, Artificial Sequence
  Synthetic
agaaaacaagautctuacccacaggag

SEQ ID NO: 63217 - DNA, 27 bp, Artificial Sequence
  Synthetic
aatcctgagutatagaagccugagagt

SEQ ID NO: 63218 - DNA, 28 bp, Artificial Sequence
  Synthetic
caggttctgtagcuagaaaattgtgtuc

SEQ ID NO: 63219 - DNA, 28 bp, Artificial Sequence
  Synthetic
gataagctgcuaacaatgtcacaaacut

SEQ ID NO: 63220 - DNA, 22 bp, Artificial Sequence
  Synthetic
agctttgtgutgggcctaauga

SEQ ID NO: 63221 - DNA, 21 bp, Artificial Sequence
  Synthetic
aacagugaccacacccttgut

SEQ ID NO: 63222 - DNA, 29 bp, Artificial Sequence
  Synthetic
ttgccactatugaggaagatctaaugaag

SEQ ID NO: 63223 - DNA, 23 bp, Artificial Sequence
  Synthetic
acagctcacacaaugttgcacua

SEQ ID NO: 63224 - DNA, 26 bp, Artificial Sequence
  Synthetic
acacaagcaaaguctctatggtgaut

SEQ ID NO: 63225 - DNA, 27 bp, Artificial Sequence
  Synthetic
gcgttctctcuccaaacttctatctut

SEQ ID NO: 63226 - DNA, 26 bp, Artificial Sequence
  Synthetic
tgaaacagaaucagagcagccuaaag

SEQ ID NO: 63227 - DNA, 21 bp, Artificial Sequence
  Synthetic
cttgccacagguggagguaat

SEQ ID NO: 63228 - DNA, 24 bp, Artificial Sequence
  Synthetic
ctcgaguaagcactuggagaagaa

SEQ ID NO: 63229 - DNA, 26 bp, Artificial Sequence
  Synthetic
cggtctgagaaguactatttguggga

SEQ ID NO: 63230 - DNA, 24 bp, Artificial Sequence
  Synthetic
tctgtcacccagutggtauagaca

SEQ ID NO: 63231 - DNA, 27 bp, Artificial Sequence
  Synthetic
tcaatattccauagcctgtucccaaag

SEQ ID NO: 63232 - DNA, 25 bp, Artificial Sequence
  Synthetic
accttctcccuccttaattccctut

SEQ ID NO: 63233 - DNA, 20 bp, Artificial Sequence
  Synthetic
ctctcuaccccaacccucca

SEQ ID NO: 63234 - DNA, 21 bp, Artificial Sequence
  Synthetic
gggttgugtaatggatucgct

SEQ ID NO: 63235 - DNA, 28 bp, Artificial Sequence
  Synthetic
ccattaatcaaugcaaaccaaagucaga

SEQ ID NO: 63236 - DNA, 19 bp, Artificial Sequence
  Synthetic
ggtaccgcugctgctugaa

SEQ ID NO: 63237 - DNA, 20 bp, Artificial Sequence
  Synthetic
cgtaggucaagccgctctua

SEQ ID NO: 63238 - DNA, 21 bp, Artificial Sequence
  Synthetic
gatggaagcagugaccuggat

SEQ ID NO: 63239 - DNA, 26 bp, Artificial Sequence
  Synthetic
cccattaagtgguctgtatgtgagut

SEQ ID NO: 63240 - DNA, 25 bp, Artificial Sequence
  Synthetic
tcttttgcttguccctgatttucct

SEQ ID NO: 63241 - DNA, 29 bp, Artificial Sequence
  Synthetic
gggtaaagtgatuagggcagatgatacua

SEQ ID NO: 63242 - DNA, 21 bp, Artificial Sequence
  Synthetic
aatgctgccuttgaaccucct

SEQ ID NO: 63243 - DNA, 23 bp, Artificial Sequence
  Synthetic
gtttctgagcgaugttggtgtuc

SEQ ID NO: 63244 - DNA, 22 bp, Artificial Sequence
  Synthetic
gcttgccaacutcagaggtuct

SEQ ID NO: 63245 - DNA, 26 bp, Artificial Sequence
  Synthetic
cagagaaactguaaggcaagcatcua

SEQ ID NO: 63246 - DNA, 28 bp, Artificial Sequence
  Synthetic
cactttttgtauagaacttgcacaguga

SEQ ID NO: 63247 - DNA, 28 bp, Artificial Sequence
  Synthetic
caacaaatcagcaagucatgcagtuaat

SEQ ID NO: 63248 - DNA, 28 bp, Artificial Sequence
  Synthetic
gcatctgcttcucctaaggaaaaauact

SEQ ID NO: 63249 - DNA, 26 bp, Artificial Sequence
  Synthetic
cagtgatagctutttctgctgcauat

SEQ ID NO: 63250 - DNA, 20 bp, Artificial Sequence
  Synthetic
gggccacgguattcgctuat

SEQ ID NO: 63251 - DNA, 28 bp, Artificial Sequence
  Synthetic
tgcatctttctuttagttgcagauaggt

SEQ ID NO: 63252 - DNA, 23 bp, Artificial Sequence
  Synthetic
ttgaaauccaatagugcccaggt

SEQ ID NO: 63253 - DNA, 24 bp, Artificial Sequence
  Synthetic
ctagtuttgtctcctucccacagt

SEQ ID NO: 63254 - DNA, 18 bp, Artificial Sequence
  Synthetic
ccccacucacccgtgaug

SEQ ID NO: 63255 - DNA, 20 bp, Artificial Sequence
  Synthetic
gactcctucaccgtgcagua

SEQ ID NO: 63256 - DNA, 22 bp, Artificial Sequence
  Synthetic
ggaccaggaaguggtcaaacug

SEQ ID NO: 63257 - DNA, 19 bp, Artificial Sequence
  Synthetic
cccacacgugtctguccaa

SEQ ID NO: 63258 - DNA, 21 bp, Artificial Sequence
  Synthetic
cccuagggagagaggaatugg

SEQ ID NO: 63259 - DNA, 22 bp, Artificial Sequence
  Synthetic
cacctctgaccutgcttcacut

SEQ ID NO: 63260 - DNA, 21 bp, Artificial Sequence
  Synthetic
cacgggcuaccagaaaggtut

SEQ ID NO: 63261 - DNA, 19 bp, Artificial Sequence
  Synthetic
cctgtcugaaccccgcauc

SEQ ID NO: 63262 - DNA, 22 bp, Artificial Sequence
  Synthetic
tggcgagaagaacauggactug

SEQ ID NO: 63263 - DNA, 28 bp, Artificial Sequence
  Synthetic
guggagttaagaagauaggacagaacag

SEQ ID NO: 63264 - DNA, 28 bp, Artificial Sequence
  Synthetic
gctatcattacucaagattcccaucaca

SEQ ID NO: 63265 - DNA, 26 bp, Artificial Sequence
  Synthetic
ccctagtucctgaactcaucaaagaa

SEQ ID NO: 63266 - DNA, 27 bp, Artificial Sequence
  Synthetic
actctgaaaagcuaaactggtcaacut

SEQ ID NO: 63267 - DNA, 28 bp, Artificial Sequence
  Synthetic
tcatgtaaattguccctttccttgacut

SEQ ID NO: 63268 - DNA, 22 bp, Artificial Sequence
  Synthetic
ctggcaatucgagcactttuca

SEQ ID NO: 63269 - DNA, 29 bp, Artificial Sequence
  Synthetic
agttgctgtttaaucatgttgctgttuat

SEQ ID NO: 63270 - DNA, 25 bp, Artificial Sequence
  Synthetic
acatggcaccauagtcaaagttcut

SEQ ID NO: 63271 - DNA, 21 bp, Artificial Sequence
  Synthetic
gacaucaacctccauggcaac

SEQ ID NO: 63272 - DNA, 25 bp, Artificial Sequence
  Synthetic
caaaccaaagccutaccaataugcc

SEQ ID NO: 63273 - DNA, 27 bp, Artificial Sequence
  Synthetic
tgcactgttaguatatccaatgccaut

SEQ ID NO: 63274 - DNA, 23 bp, Artificial Sequence
  Synthetic
ctaaucagcacagtggucagaga

SEQ ID NO: 63275 - DNA, 24 bp, Artificial Sequence
  Synthetic
gtgugattttgagttugggagacc

SEQ ID NO: 63276 - DNA, 21 bp, Artificial Sequence
  Synthetic
cttttgaugtgggcucccact

SEQ ID NO: 63277 - DNA, 25 bp, Artificial Sequence
  Synthetic
gccctgtaaugtttatgcgatcuac

SEQ ID NO: 63278 - DNA, 23 bp, Artificial Sequence
  Synthetic
cgaaagaacuaccgtggaguaca

SEQ ID NO: 63279 - DNA, 28 bp, Artificial Sequence
  Synthetic
ggaataattguggaaagcagtttctuca

SEQ ID NO: 63280 - DNA, 23 bp, Artificial Sequence
  Synthetic
cctggttggcauttgcaaacaua

SEQ ID NO: 63281 - DNA, 28 bp, Artificial Sequence
  Synthetic
ccaagatgaaaagugatagtgctcaugt

SEQ ID NO: 63282 - DNA, 22 bp, Artificial Sequence
  Synthetic
cctgagtcuggacgctuaagac

SEQ ID NO: 63283 - DNA, 26 bp, Artificial Sequence
  Synthetic
aaagcccacagagaaautauccaact

SEQ ID NO: 63284 - DNA, 22 bp, Artificial Sequence
  Synthetic
agaccgcggcaaaguaactuaa

SEQ ID NO: 63285 - DNA, 20 bp, Artificial Sequence
  Synthetic
caagggcucagacgacucag

SEQ ID NO: 63286 - DNA, 26 bp, Artificial Sequence
  Synthetic
cctgattttgtuaagttgctgctgut

SEQ ID NO: 63287 - DNA, 23 bp, Artificial Sequence
  Synthetic
ttgaggauaaccgtgttguccag

SEQ ID NO: 63288 - DNA, 22 bp, Artificial Sequence
  Synthetic
tgggcttgcutttctgcagtua

SEQ ID NO: 63289 - DNA, 28 bp, Artificial Sequence
  Synthetic
tttaaggatgtgcugtcacacagaauat

SEQ ID NO: 63290 - DNA, 26 bp, Artificial Sequence
  Synthetic
agtttgcagugaaacacctagtcaut

SEQ ID NO: 63291 - DNA, 28 bp, Artificial Sequence
  Synthetic
cctctcagcagagaaugtaactttaugt

SEQ ID NO: 63292 - DNA, 21 bp, Artificial Sequence
  Synthetic
ggtgauccagcagaccaugag

SEQ ID NO: 63293 - DNA, 28 bp, Artificial Sequence
  Synthetic
ttgctcttcuctgaactcaaugaaaaga

SEQ ID NO: 63294 - DNA, 22 bp, Artificial Sequence
  Synthetic
tgcagagacutgcttucaccaa

SEQ ID NO: 63295 - DNA, 27 bp, Artificial Sequence
  Synthetic
gtggtgcugagaaagataaattgtugt

SEQ ID NO: 63296 - DNA, 27 bp, Artificial Sequence
  Synthetic
caaaaggaaccgutcatatatguggaa

SEQ ID NO: 63297 - DNA, 28 bp, Artificial Sequence
  Synthetic
ccaaaatuagccaagtagaaaugaccca

SEQ ID NO: 63298 - DNA, 28 bp, Artificial Sequence
  Synthetic
ttcattcatguaggctttctctttguga

SEQ ID NO: 63299 - DNA, 28 bp, Artificial Sequence
  Synthetic
cctcagcuaacacagtataauacgagac

SEQ ID NO: 63300 - DNA, 26 bp, Artificial Sequence
  Synthetic
gtattttccccautcttgccttguag

SEQ ID NO: 63301 - DNA, 28 bp, Artificial Sequence
  Synthetic
ggagtaagtagugacctctgacatucat

SEQ ID NO: 63302 - DNA, 20 bp, Artificial Sequence
  Synthetic
gcttcuggccaaggtccaut

SEQ ID NO: 63303 - DNA, 29 bp, Artificial Sequence
  Synthetic
gcttatagtgaggauttgccaattttgug

SEQ ID NO: 63304 - DNA, 27 bp, Artificial Sequence
  Synthetic
tgtcttggaugacatttuggagaaact

SEQ ID NO: 63305 - DNA, 28 bp, Artificial Sequence
  Synthetic
tgctgaagtctacuatagcctcacttua

SEQ ID NO: 63306 - DNA, 28 bp, Artificial Sequence
  Synthetic
agagcagtaugtaagctgtttugaagaa

SEQ ID NO: 63307 - DNA, 27 bp, Artificial Sequence
  Synthetic
cgattaggutcatcgtattucaaccac

SEQ ID NO: 63308 - DNA, 25 bp, Artificial Sequence
  Synthetic
ggaagtaaacacaaucctccctcug

SEQ ID NO: 63309 - DNA, 26 bp, Artificial Sequence
  Synthetic
caagtaacacaautcctggtctugag

SEQ ID NO: 63310 - DNA, 21 bp, Artificial Sequence
  Synthetic
ccctgatgugggaggtcucaa

SEQ ID NO: 63311 - DNA, 22 bp, Artificial Sequence
  Synthetic
cccacagtcuagaagggtcuca

SEQ ID NO: 63312 - DNA, 21 bp, Artificial Sequence
  Synthetic
gaguagttggtgucccaggag

SEQ ID NO: 63313 - DNA, 25 bp, Artificial Sequence
  Synthetic
tatgggcagauggttatggtgtuag

SEQ ID NO: 63314 - DNA, 19 bp, Artificial Sequence
  Synthetic
cattggcccuggtggagut

SEQ ID NO: 63315 - DNA, 22 bp, Artificial Sequence
  Synthetic
ccctaaccagcuctgagaucgt

SEQ ID NO: 63316 - DNA, 20 bp, Artificial Sequence
  Synthetic
gcattccugagccgtcaugt

SEQ ID NO: 63317 - DNA, 24 bp, Artificial Sequence
  Synthetic
ggaatgucccagacaagatctuca

SEQ ID NO: 63318 - DNA, 21 bp, Artificial Sequence
  Synthetic
gggagcutccagtugaaacat

SEQ ID NO: 63319 - DNA, 28 bp, Artificial Sequence
  Synthetic
aaataagaacatucttcagacacugcct

SEQ ID NO: 63320 - DNA, 24 bp, Artificial Sequence
  Synthetic
ctgagguttacttcuagcaggcaa

SEQ ID NO: 63321 - DNA, 25 bp, Artificial Sequence
  Synthetic
tttccatcucacagaccttgctuag

SEQ ID NO: 63322 - DNA, 26 bp, Artificial Sequence
  Synthetic
cagtatcaatttugtgcacagaggut

SEQ ID NO: 63323 - DNA, 29 bp, Artificial Sequence
  Synthetic
acatcttcaggttutctgtctaattccut

SEQ ID NO: 63324 - DNA, 26 bp, Artificial Sequence
  Synthetic
catgtctccuctgatttctccuacct

SEQ ID NO: 63325 - DNA, 22 bp, Artificial Sequence
  Synthetic
cgcatcaacuctgtctgtguca

SEQ ID NO: 63326 - DNA, 21 bp, Artificial Sequence
  Synthetic
tcagacuggcgaggtgaacua

SEQ ID NO: 63327 - DNA, 28 bp, Artificial Sequence
  Synthetic
tgttcttguattctctgtuccaaacagt

SEQ ID NO: 63328 - DNA, 26 bp, Artificial Sequence
  Synthetic
catactgttcacagguatgacaggut

SEQ ID NO: 63329 - DNA, 22 bp, Artificial Sequence
  Synthetic
tggcuacagcagtctacuacca

SEQ ID NO: 63330 - DNA, 23 bp, Artificial Sequence
  Synthetic
gcctttaggcacugtgtttctut

SEQ ID NO: 63331 - DNA, 23 bp, Artificial Sequence
  Synthetic
cctgtgtgcuacaagtagtcugg

SEQ ID NO: 63332 - DNA, 28 bp, Artificial Sequence
  Synthetic
ggaggttgagauttgcatactcugaaaa

SEQ ID NO: 63333 - DNA, 28 bp, Artificial Sequence
  Synthetic
tgggaatcacugaatctaaugaaaacga

SEQ ID NO: 63334 - DNA, 23 bp, Artificial Sequence
  Synthetic
gggaaaaggugcctttgtuagac

SEQ ID NO: 63335 - DNA, 28 bp, Artificial Sequence
  Synthetic
agggtgcaataagugtccttgaaaauat

SEQ ID NO: 63336 - DNA, 21 bp, Artificial Sequence
  Synthetic
ggtgaccaugatgtcucggaa

SEQ ID NO: 63337 - DNA, 28 bp, Artificial Sequence
  Synthetic
gggcttgttagaucaagatgtaaacuct

SEQ ID NO: 63338 - DNA, 25 bp, Artificial Sequence
  Synthetic
tttcagacgauaattgctacugcca

SEQ ID NO: 63339 - DNA, 27 bp, Artificial Sequence
  Synthetic
aaggagtatcagugaaatgaagctugt

SEQ ID NO: 63340 - DNA, 21 bp, Artificial Sequence
  Synthetic
gcagtctgucctgaaccugat

SEQ ID NO: 63341 - DNA, 23 bp, Artificial Sequence
  Synthetic
gtgaaauacccccaagcgatgua

SEQ ID NO: 63342 - DNA, 21 bp, Artificial Sequence
  Synthetic
gatgtgggcaugggaggaaua

SEQ ID NO: 63343 - DNA, 29 bp, Artificial Sequence
  Synthetic
aaacacaatcuacacaataggacauggaa

SEQ ID NO: 63344 - DNA, 26 bp, Artificial Sequence
  Synthetic
ccaagagaugaggatttcatgtcugt

SEQ ID NO: 63345 - DNA, 28 bp, Artificial Sequence
  Synthetic
ggaactctuggagaaaccagaaaguaaa

SEQ ID NO: 63346 - DNA, 19 bp, Artificial Sequence
  Synthetic
gaggccuggguaaagcaga

SEQ ID NO: 63347 - DNA, 22 bp, Artificial Sequence
  Synthetic
gggcccugatactgatttuggt

SEQ ID NO: 63348 - DNA, 21 bp, Artificial Sequence
  Synthetic
cactaccucccaccacatucc

SEQ ID NO: 63349 - DNA, 20 bp, Artificial Sequence
  Synthetic
tcaactuccgcaccaccuac

SEQ ID NO: 63350 - DNA, 21 bp, Artificial Sequence
  Synthetic
gaagacgaggcauagaugcga

SEQ ID NO: 63351 - DNA, 22 bp, Artificial Sequence
  Synthetic
ctgaccgtccutggtgtttcut

SEQ ID NO: 63352 - DNA, 22 bp, Artificial Sequence
  Synthetic
gagggcaaacaugagaguacca

SEQ ID NO: 63353 - DNA, 19 bp, Artificial Sequence
  Synthetic
gccaauggccgttctguct

SEQ ID NO: 63354 - DNA, 28 bp, Artificial Sequence
  Synthetic
cagtggaaacttcuacgtgactttgaua

SEQ ID NO: 63355 - DNA, 33 bp, Artificial Sequence
  Synthetic
aaatctaacattcagauagaaagtacattcugt

SEQ ID NO: 63356 - DNA, 29 bp, Artificial Sequence
  Synthetic
tgtttttacagagguaaataccggatugt

SEQ ID NO: 63357 - DNA, 26 bp, Artificial Sequence
  Synthetic
ccagtgtccauccataggtttaacut

SEQ ID NO: 63358 - DNA, 26 bp, Artificial Sequence
  Synthetic
gtccaacaatcauctactgtcctuct

SEQ ID NO: 63359 - DNA, 24 bp, Artificial Sequence
  Synthetic
cggagagcaaugatgattgaucct

SEQ ID NO: 63360 - DNA, 25 bp, Artificial Sequence
  Synthetic
gatgtttttaaucgacaggcaccut

SEQ ID NO: 63361 - DNA, 28 bp, Artificial Sequence
  Synthetic
gccaaattgttgucttaaaagagcauca

SEQ ID NO: 63362 - DNA, 30 bp, Artificial Sequence
  Synthetic
cattctaaggaaaaaugtggtatcugaagc

SEQ ID NO: 63363 - DNA, 25 bp, Artificial Sequence
  Synthetic
accagtaucttgtttgtugccagaa

SEQ ID NO: 63364 - DNA, 24 bp, Artificial Sequence
  Synthetic
cacatcccagutctgcagtuagag

SEQ ID NO: 63365 - DNA, 25 bp, Artificial Sequence
  Synthetic
ccctaccuagaccctcctaacttut

SEQ ID NO: 63366 - DNA, 25 bp, Artificial Sequence
  Synthetic
cagcagtgtgucatatccatacuca

SEQ ID NO: 63367 - DNA, 21 bp, Artificial Sequence
  Synthetic
ggttcggaautcccttuccca

SEQ ID NO: 63368 - DNA, 25 bp, Artificial Sequence
  Synthetic
tgtgaaacagcaauttgacuggaac

SEQ ID NO: 63369 - DNA, 27 bp, Artificial Sequence
  Synthetic
aagggcattcuacattgtacacttuct

SEQ ID NO: 63370 - DNA, 21 bp, Artificial Sequence
  Synthetic
acacctgtgutgctcatguca

SEQ ID NO: 63371 - DNA, 28 bp, Artificial Sequence
  Synthetic
gaagtctgaagatuatctcagcagcaut

SEQ ID NO: 63372 - DNA, 25 bp, Artificial Sequence
  Synthetic
tcagtcaggaauggtttgatcaugg

SEQ ID NO: 63373 - DNA, 28 bp, Artificial Sequence
  Synthetic
cataagctuagcaagtgtucaaagaaga

SEQ ID NO: 63374 - DNA, 25 bp, Artificial Sequence
  Synthetic
ctacttcauaaactaggccugcagt

SEQ ID NO: 63375 - DNA, 28 bp, Artificial Sequence
  Synthetic
tgccttgaagugagtaggaattuaacaa

SEQ ID NO: 63376 - DNA, 24 bp, Artificial Sequence
  Synthetic
actcagatauggacctgccagtua

SEQ ID NO: 63377 - DNA, 25 bp, Artificial Sequence
  Synthetic
tcagcaaacctuagaaactgtgcut

SEQ ID NO: 63378 - DNA, 23 bp, Artificial Sequence
  Synthetic
cacagtcaucctgttccugaact

SEQ ID NO: 63379 - DNA, 28 bp, Artificial Sequence
  Synthetic
gctcttttcugagacatctgtctguaac

SEQ ID NO: 63380 - DNA, 26 bp, Artificial Sequence
  Synthetic
ttctggactugaagactgtcuagaat

SEQ ID NO: 63381 - DNA, 27 bp, Artificial Sequence
  Synthetic
tcgtagcagugatcatgguaaaagaag

SEQ ID NO: 63382 - DNA, 20 bp, Artificial Sequence
  Synthetic
gcctugctcatcuagcccaa

SEQ ID NO: 63383 - DNA, 20 bp, Artificial Sequence
  Synthetic
cctcacugggcctgaaugac

SEQ ID NO: 63384 - DNA, 25 bp, Artificial Sequence
  Synthetic
gcccacatatutgacttagccauca

SEQ ID NO: 63385 - DNA, 21 bp, Artificial Sequence
  Synthetic
ctttacgtctugcagcagcuc

SEQ ID NO: 63386 - DNA, 21 bp, Artificial Sequence
  Synthetic
cguatgcttcaaugcacccat

SEQ ID NO: 63387 - DNA, 26 bp, Artificial Sequence
  Synthetic
taaagcacccucagtgatttctaucc

SEQ ID NO: 63388 - DNA, 29 bp, Artificial Sequence
  Synthetic
gttatttccattcutctccatgattugct

SEQ ID NO: 63389 - DNA, 24 bp, Artificial Sequence
  Synthetic
tcacacauaagtggaggugcaaaa

SEQ ID NO: 63390 - DNA, 24 bp, Artificial Sequence
  Synthetic
tttgttttgucttccaguggacct

SEQ ID NO: 63391 - DNA, 28 bp, Artificial Sequence
  Synthetic
ttggcctgauagcttttaatgtcctuaa

SEQ ID NO: 63392 - DNA, 23 bp, Artificial Sequence
  Synthetic
gtattgtaggucatgtgggcuga

SEQ ID NO: 63393 - DNA, 21 bp, Artificial Sequence
  Synthetic
ctgccagucctaagtcugcaa

SEQ ID NO: 63394 - DNA, 20 bp, Artificial Sequence
  Synthetic
gtcagucgtccagugccaat

SEQ ID NO: 63395 - DNA, 26 bp, Artificial Sequence
  Synthetic
ctctaacggccutcttttcatttucc

SEQ ID NO: 63396 - DNA, 22 bp, Artificial Sequence
  Synthetic
gaggaaccagaugtccatguca

SEQ ID NO: 63397 - DNA, 21 bp, Artificial Sequence
  Synthetic
ctcccaaggacacutguagcc

SEQ ID NO: 63398 - DNA, 25 bp, Artificial Sequence
  Synthetic
tagatctaaaagagagcucctccug

SEQ ID NO: 63399 - DNA, 28 bp, Artificial Sequence
  Synthetic
ttgccactgcugatgtactttatuaact

SEQ ID NO: 63400 - DNA, 21 bp, Artificial Sequence
  Synthetic
cccatgcagcaugactcatuc

SEQ ID NO: 63401 - DNA, 21 bp, Artificial Sequence
  Synthetic
ggcuggagaaccaacttgcua

SEQ ID NO: 63402 - DNA, 19 bp, Artificial Sequence
  Synthetic
agcaacucaugcagagcgt

SEQ ID NO: 63403 - DNA, 21 bp, Artificial Sequence
  Synthetic
gaagtcaucccacccgctaug

SEQ ID NO: 63404 - DNA, 22 bp, Artificial Sequence
  Synthetic
cctaccacugctaccagucagt

SEQ ID NO: 63405 - DNA, 20 bp, Artificial Sequence
  Synthetic
acagguaaacccgtgcugag

SEQ ID NO: 63406 - DNA, 21 bp, Artificial Sequence
  Synthetic
tgcccccutctagagccuaaa

SEQ ID NO: 63407 - DNA, 20 bp, Artificial Sequence
  Synthetic
cgacuggagaaagcaagcug

SEQ ID NO: 63408 - DNA, 28 bp, Artificial Sequence
  Synthetic
ccacacagaatucagtaaaacccaacua

SEQ ID NO: 63409 - DNA, 23 bp, Artificial Sequence
  Synthetic
ctgagtguacaaagacugcacga

SEQ ID NO: 63410 - DNA, 26 bp, Artificial Sequence
  Synthetic
ccctgccttgucatatattagctgut

SEQ ID NO: 63411 - DNA, 22 bp, Artificial Sequence
  Synthetic
gattcccuggaagtggtcctug

SEQ ID NO: 63412 - DNA, 28 bp, Artificial Sequence
  Synthetic
aaatatgctctguacctgtggaugaaat

SEQ ID NO: 63413 - DNA, 26 bp, Artificial Sequence
  Synthetic
cacaacagttuatgctgaagaugcag

SEQ ID NO: 63414 - DNA, 29 bp, Artificial Sequence
  Synthetic
gttatcagauacaaaccaacaaggaugga

SEQ ID NO: 63415 - DNA, 27 bp, Artificial Sequence
  Synthetic
gcggctgaaugaaactctcttaattut

SEQ ID NO: 63416 - DNA, 22 bp, Artificial Sequence
  Synthetic
gagtgcccugatgaagaaguga

SEQ ID NO: 63417 - DNA, 28 bp, Artificial Sequence
  Synthetic
ggaagaggcucaactatgaagauaagac

SEQ ID NO: 63418 - DNA, 19 bp, Artificial Sequence
  Synthetic
tctgcucaacgagcuggac

SEQ ID NO: 63419 - DNA, 20 bp, Artificial Sequence
  Synthetic
gcgtugaagcggtacgugat

SEQ ID NO: 63420 - DNA, 20 bp, Artificial Sequence
  Synthetic
tgcgcagcuactccctttuc

SEQ ID NO: 63421 - DNA, 21 bp, Artificial Sequence
  Synthetic
ttagcctguaggactccugct

SEQ ID NO: 63422 - DNA, 20 bp, Artificial Sequence
  Synthetic
tcaccatgauggccacugac

SEQ ID NO: 63423 - DNA, 24 bp, Artificial Sequence
  Synthetic
agtagctctggutgagacatccut

SEQ ID NO: 63424 - DNA, 19 bp, Artificial Sequence
  Synthetic
caccccuacccctggcuat

SEQ ID NO: 63425 - DNA, 18 bp, Artificial Sequence
  Synthetic
ctgggagacugcagcuct

SEQ ID NO: 63426 - DNA, 19 bp, Artificial Sequence
  Synthetic
caccaguggagcucaaggg

SEQ ID NO: 63427 - DNA, 20 bp, Artificial Sequence
  Synthetic
ccaugatcacgucgcgaagt

SEQ ID NO: 63428 - DNA, 22 bp, Artificial Sequence
  Synthetic
ttccucaggaccaccttcctua

SEQ ID NO: 63429 - DNA, 22 bp, Artificial Sequence
  Synthetic
cagggtgaggcucaagttguag

SEQ ID NO: 63430 - DNA, 23 bp, Artificial Sequence
  Synthetic
tgcccatauctcaggttcucaga

SEQ ID NO: 63431 - DNA, 23 bp, Artificial Sequence
  Synthetic
gttcuggctcttaaucacagcct

SEQ ID NO: 63432 - DNA, 17 bp, Artificial Sequence
  Synthetic
gcugcccacacugccat

SEQ ID NO: 63433 - DNA, 20 bp, Artificial Sequence
  Synthetic
ccctucacactcugcaccaa

SEQ ID NO: 63434 - DNA, 24 bp, Artificial Sequence
  Synthetic
tcaaatctgggccaucaagaagut

SEQ ID NO: 63435 - DNA, 23 bp, Artificial Sequence
  Synthetic
gtagggagugggactgtaatugg

SEQ ID NO: 63436 - DNA, 21 bp, Artificial Sequence
  Synthetic
gtgctgcauagcctccttcua

SEQ ID NO: 63437 - DNA, 25 bp, Artificial Sequence
  Synthetic
acatcattgtguttctcctctgucc

SEQ ID NO: 63438 - DNA, 19 bp, Artificial Sequence
  Synthetic
gggaggagaagugaugcgt

SEQ ID NO: 63439 - DNA, 17 bp, Artificial Sequence
  Synthetic
ccggcaccgcugaucat

SEQ ID NO: 63440 - DNA, 25 bp, Artificial Sequence
  Synthetic
gaaagaaaacaucaagcgtcccaua

SEQ ID NO: 63441 - DNA, 22 bp, Artificial Sequence
  Synthetic
gatctgtccacucctgatgcug

SEQ ID NO: 63442 - DNA, 22 bp, Artificial Sequence
  Synthetic
tgaaagagggccauguggaaag

SEQ ID NO: 63443 - DNA, 22 bp, Artificial Sequence
  Synthetic
cctgaaucccgagcacacatut

SEQ ID NO: 63444 - DNA, 19 bp, Artificial Sequence
  Synthetic
cccagggugatctcuccac

SEQ ID NO: 63445 - DNA, 18 bp, Artificial Sequence
  Synthetic
aggcatucccggcatcuc

SEQ ID NO: 63446 - DNA, 21 bp, Artificial Sequence
  Synthetic
cagggccaaagaguccaucag

SEQ ID NO: 63447 - DNA, 24 bp, Artificial Sequence
  Synthetic
tgagccttttucccttctttgugt

SEQ ID NO: 63448 - DNA, 20 bp, Artificial Sequence
  Synthetic
tcttttgccggguctgcaut

SEQ ID NO: 63449 - DNA, 29 bp, Artificial Sequence
  Synthetic
ccttgtgactugagatgtggtgattauat

SEQ ID NO: 63450 - DNA, 23 bp, Artificial Sequence
  Synthetic
cctggcccaugttcctgaaatua

SEQ ID NO: 63451 - DNA, 27 bp, Artificial Sequence
  Synthetic
ataaacttctggagguatttggaggug

SEQ ID NO: 63452 - DNA, 24 bp, Artificial Sequence
  Synthetic
cctgcaacacaggutatctuacga

SEQ ID NO: 63453 - DNA, 22 bp, Artificial Sequence
  Synthetic
atgggcaauagctuccagaagg

SEQ ID NO: 63454 - DNA, 21 bp, Artificial Sequence
  Synthetic
ccttcugccagatcacagugg

SEQ ID NO: 63455 - DNA, 23 bp, Artificial Sequence
  Synthetic
ctctcccguttctctgaacuaca

SEQ ID NO: 63456 - DNA, 21 bp, Artificial Sequence
  Synthetic
tgtggaaauagcagcagcuga

SEQ ID NO: 63457 - DNA, 23 bp, Artificial Sequence
  Synthetic
ggaaggtccauggtatggttuct

SEQ ID NO: 63458 - DNA, 21 bp, Artificial Sequence
  Synthetic
ctggctaauacacgaggccut

SEQ ID NO: 63459 - DNA, 21 bp, Artificial Sequence
  Synthetic
actgtgtcuggctgccttauc

SEQ ID NO: 63460 - DNA, 21 bp, Artificial Sequence
  Synthetic
gacaggtugatgaggguccag

SEQ ID NO: 63461 - DNA, 22 bp, Artificial Sequence
  Synthetic
ctcgctaaguaaggtggctuca

SEQ ID NO: 63462 - DNA, 22 bp, Artificial Sequence
  Synthetic
ggtgagaggugactgctgttug

SEQ ID NO: 63463 - DNA, 19 bp, Artificial Sequence
  Synthetic
cttaccauggcgacaucgg

SEQ ID NO: 63464 - DNA, 19 bp, Artificial Sequence
  Synthetic
cccccuggaggctcttcut

SEQ ID NO: 63465 - DNA, 19 bp, Artificial Sequence
  Synthetic
cacucagcccaaacgugga

SEQ ID NO: 63466 - DNA, 21 bp, Artificial Sequence
  Synthetic
cctacacgcuggaggagttut

SEQ ID NO: 63467 - DNA, 22 bp, Artificial Sequence
  Synthetic
tcauccuggcagacagaaacag

SEQ ID NO: 63468 - DNA, 28 bp, Artificial Sequence
  Synthetic
tttaatgaacaggauttgctaguccact

SEQ ID NO: 63469 - DNA, 28 bp, Artificial Sequence
  Synthetic
ccctctatttaaauccaatgagcacgut

SEQ ID NO: 63470 - DNA, 29 bp, Artificial Sequence
  Synthetic
atgggaauagagcaaaatatgtgugaagt

SEQ ID NO: 63471 - DNA, 26 bp, Artificial Sequence
  Synthetic
catctggcaucaaataaguggagaga

SEQ ID NO: 63472 - DNA, 20 bp, Artificial Sequence
  Synthetic
ccagacagccgugactuact

SEQ ID NO: 63473 - DNA, 33 bp, Artificial Sequence
  Synthetic
aacataaaacacucaaatccttctaacaauact

SEQ ID NO: 63474 - DNA, 28 bp, Artificial Sequence
  Synthetic
cccagccuaaaacttacauacacagaat

SEQ ID NO: 63475 - DNA, 28 bp, Artificial Sequence
  Synthetic
ctaagtaactatcutaagggttgcucca

SEQ ID NO: 63476 - DNA, 20 bp, Artificial Sequence
  Synthetic
caacauggccggttaugcac

SEQ ID NO: 63477 - DNA, 27 bp, Artificial Sequence
  Synthetic
ttctgctgacugctcatttaucaagat

SEQ ID NO: 63478 - DNA, 19 bp, Artificial Sequence
  Synthetic
gccctgcucggatctcauc

SEQ ID NO: 63479 - DNA, 22 bp, Artificial Sequence
  Synthetic
gggacatgaucttggtcuccac

SEQ ID NO: 63480 - DNA, 26 bp, Artificial Sequence
  Synthetic
ggagtgcuggagttatttagaauggt

SEQ ID NO: 63481 - DNA, 22 bp, Artificial Sequence
  Synthetic
gcuggtacuagagagagcagga

SEQ ID NO: 63482 - DNA, 23 bp, Artificial Sequence
  Synthetic
ggaaggtuggcagtttctgaugt

SEQ ID NO: 63483 - DNA, 22 bp, Artificial Sequence
  Synthetic
atttgtucccacacttggguca

SEQ ID NO: 63484 - DNA, 21 bp, Artificial Sequence
  Synthetic
tttggttcutcatggcuccca

SEQ ID NO: 63485 - DNA, 20 bp, Artificial Sequence
  Synthetic
gtcccugcagtucacaaagg

SEQ ID NO: 63486 - DNA, 18 bp, Artificial Sequence
  Synthetic
cctucggcaggagggaut

SEQ ID NO: 63487 - DNA, 19 bp, Artificial Sequence
  Synthetic
cuccaccucagaccaccac

SEQ ID NO: 63488 - DNA, 24 bp, Artificial Sequence
  Synthetic
ccaggaacacaggaguagcauaag

SEQ ID NO: 63489 - DNA, 28 bp, Artificial Sequence
  Synthetic
cagccaatattucactgggctaatcaua

SEQ ID NO: 63490 - DNA, 25 bp, Artificial Sequence
  Synthetic
agaagctcccuattcatttgcucaa

SEQ ID NO: 63491 - DNA, 27 bp, Artificial Sequence
  Synthetic
tcttcaccacaaccutctcaauaagat

SEQ ID NO: 63492 - DNA, 23 bp, Artificial Sequence
  Synthetic
cagagtcatcucccccatggaua

SEQ ID NO: 63493 - DNA, 28 bp, Artificial Sequence
  Synthetic
gtagtggctgauttaagaagatgaucct

SEQ ID NO: 63494 - DNA, 21 bp, Artificial Sequence
  Synthetic
gccaacaggaccautctcugt

SEQ ID NO: 63495 - DNA, 27 bp, Artificial Sequence
  Synthetic
tcaaccatttgugaatttgctgucaaa

SEQ ID NO: 63496 - DNA, 24 bp, Artificial Sequence
  Synthetic
attagctaccuaccctgacucgaa

SEQ ID NO: 63497 - DNA, 25 bp, Artificial Sequence
  Synthetic
gtctttttctttucagccctgtucc

SEQ ID NO: 63498 - DNA, 21 bp, Artificial Sequence
  Synthetic
catcacggcuggcauaaagag

SEQ ID NO: 63499 - DNA, 25 bp, Artificial Sequence
  Synthetic
tccgcagaacgaugtctttcaauat

SEQ ID NO: 63500 - DNA, 30 bp, Artificial Sequence
  Synthetic
cacactttgtctutgacttctttttctuct

SEQ ID NO: 63501 - DNA, 26 bp, Artificial Sequence
  Synthetic
cctgtacacaugaagccatcgtauat

SEQ ID NO: 63502 - DNA, 23 bp, Artificial Sequence
  Synthetic
gccggtttaucacctactcctua

SEQ ID NO: 63503 - DNA, 24 bp, Artificial Sequence
  Synthetic
gugacccaagtgugaaaaagacag

SEQ ID NO: 63504 - DNA, 33 bp, Artificial Sequence
  Synthetic
acttgatttatatttugtcagtctataacuggt

SEQ ID NO: 63505 - DNA, 28 bp, Artificial Sequence
  Synthetic
gggataacauctctaatgcaucaggaaa

SEQ ID NO: 63506 - DNA, 21 bp, Artificial Sequence
  Synthetic
cggagcguaaaaatgugccaa

SEQ ID NO: 63507 - DNA, 28 bp, Artificial Sequence
  Synthetic
gcugagctttgaaaauaaggaacgaaaa

SEQ ID NO: 63508 - DNA, 30 bp, Artificial Sequence
  Synthetic
agtcaactaaaaauacatgagccaaacuga

SEQ ID NO: 63509 - DNA, 28 bp, Artificial Sequence
  Synthetic
ctcttactcaacagaugttcgtctcaut

SEQ ID NO: 63510 - DNA, 21 bp, Artificial Sequence
  Synthetic
ccuaaaagaggcccugagcaa

SEQ ID NO: 63511 - DNA, 23 bp, Artificial Sequence
  Synthetic
ctctttccucacgacctctcuct

SEQ ID NO: 63512 - DNA, 21 bp, Artificial Sequence
  Synthetic
gcccutcctugagggaacaat

SEQ ID NO: 63513 - DNA, 21 bp, Artificial Sequence
  Synthetic
aagagcuccagggtttuagcc

SEQ ID NO: 63514 - DNA, 22 bp, Artificial Sequence
  Synthetic
cucagccacagagaucaacact

SEQ ID NO: 63515 - DNA, 19 bp, Artificial Sequence
  Synthetic
cccaaaccauccgccucat

SEQ ID NO: 63516 - DNA, 21 bp, Artificial Sequence
  Synthetic
gctgcggucctagtggtcuat

SEQ ID NO: 63517 - DNA, 28 bp, Artificial Sequence
  Synthetic
ggattgacctgguatcctcattttacut

SEQ ID NO: 63518 - DNA, 30 bp, Artificial Sequence
  Synthetic
tgcaaaatttccugtctaatagatguacct

SEQ ID NO: 63519 - DNA, 28 bp, Artificial Sequence
  Synthetic
aaaaacacaacggaaccuacuaagaaga

SEQ ID NO: 63520 - DNA, 26 bp, Artificial Sequence
  Synthetic
agcacaataauggttttctguaccca

SEQ ID NO: 63521 - DNA, 25 bp, Artificial Sequence
  Synthetic
gtgtgctcucagattgacttuccat

SEQ ID NO: 63522 - DNA, 21 bp, Artificial Sequence
  Synthetic
gguggaagagagtugggacct

SEQ ID NO: 63523 - DNA, 28 bp, Artificial Sequence
  Synthetic
tgtccucaaagggttaaaatguacaaga

SEQ ID NO: 63524 - DNA, 28 bp, Artificial Sequence
  Synthetic
tgctatcatacguagacactacaccaua

SEQ ID NO: 63525 - DNA, 30 bp, Artificial Sequence
  Synthetic
gatgttggutataactgaaugaaagggaac

SEQ ID NO: 63526 - DNA, 27 bp, Artificial Sequence
  Synthetic
acctccatttutcacttgtactucaca

SEQ ID NO: 63527 - DNA, 26 bp, Artificial Sequence
  Synthetic
gtagagccucctgaagaattucaaga

SEQ ID NO: 63528 - DNA, 28 bp, Artificial Sequence
  Synthetic
actaaattagcautgtctctgaguccac

SEQ ID NO: 63529 - DNA, 23 bp, Artificial Sequence
  Synthetic
gggaacgucaatatcgcagucaa

SEQ ID NO: 63530 - DNA, 24 bp, Artificial Sequence
  Synthetic
agaagtctcctuatgacgcagcua

SEQ ID NO: 63531 - DNA, 21 bp, Artificial Sequence
  Synthetic
gcttaacguggcagagttgug

SEQ ID NO: 63532 - DNA, 21 bp, Artificial Sequence
  Synthetic
cagaacaggagugcacggaua

SEQ ID NO: 63533 - DNA, 28 bp, Artificial Sequence
  Synthetic
tgctactgcaaaagagutagcactaaut

SEQ ID NO: 63534 - DNA, 28 bp, Artificial Sequence
  Synthetic
agcataaagtaagucatcgaaagcauca

SEQ ID NO: 63535 - DNA, 29 bp, Artificial Sequence
  Synthetic
cgaaaagacttctugcagtgtaaacaaut

SEQ ID NO: 63536 - DNA, 21 bp, Artificial Sequence
  Synthetic
acatgggugaggaggaacuct

SEQ ID NO: 63537 - DNA, 22 bp, Artificial Sequence
  Synthetic
ccttccctautcccacagguct

SEQ ID NO: 63538 - DNA, 23 bp, Artificial Sequence
  Synthetic
gaagagagaagcaguaaccguca

SEQ ID NO: 63539 - DNA, 26 bp, Artificial Sequence
  Synthetic
ccgcgcgcaguctattatttatuaaa

SEQ ID NO: 63540 - DNA, 22 bp, Artificial Sequence
  Synthetic
cctggcaucccctuaaaggaat

SEQ ID NO: 63541 - DNA, 24 bp, Artificial Sequence
  Synthetic
gtgctgatcugtctctcgaatuct

SEQ ID NO: 63542 - DNA, 24 bp, Artificial Sequence
  Synthetic
acccuggaacagaatagaaaugcc

SEQ ID NO: 63543 - DNA, 24 bp, Artificial Sequence
  Synthetic
ttttgcctgacugatgttcctcut

SEQ ID NO: 63544 - DNA, 21 bp, Artificial Sequence
  Synthetic
cctccttcugtgaggacucca

SEQ ID NO: 63545 - DNA, 22 bp, Artificial Sequence
  Synthetic
accagggacagauctuggacat

SEQ ID NO: 63546 - DNA, 20 bp, Artificial Sequence
  Synthetic
gctcccgucagcttguagac

SEQ ID NO: 63547 - DNA, 20 bp, Artificial Sequence
  Synthetic
gcctccautgatgacuccga

SEQ ID NO: 63548 - DNA, 21 bp, Artificial Sequence
  Synthetic
cttgaggucaaaaggccuggt

SEQ ID NO: 63549 - DNA, 22 bp, Artificial Sequence
  Synthetic
cctcttgacucttgagcauggt

SEQ ID NO: 63550 - DNA, 24 bp, Artificial Sequence
  Synthetic
catttcttgcacaugatgctcuga

SEQ ID NO: 63551 - DNA, 29 bp, Artificial Sequence
  Synthetic
gttgcatgaaggauactggttttgttuaa

SEQ ID NO: 63552 - DNA, 23 bp, Artificial Sequence
  Synthetic
gtacaagcuttacagugcagcag

SEQ ID NO: 63553 - DNA, 28 bp, Artificial Sequence
  Synthetic
acaattggtcaugcacctgtatttctua

SEQ ID NO: 63554 - DNA, 28 bp, Artificial Sequence
  Synthetic
gcactactgtuaactctttctctuagca

SEQ ID NO: 63555 - DNA, 22 bp, Artificial Sequence
  Synthetic
ccttcaatguccctgccatgua

SEQ ID NO: 63556 - DNA, 22 bp, Artificial Sequence
  Synthetic
ccagaagtuccccatccagtuc

SEQ ID NO: 63557 - DNA, 24 bp, Artificial Sequence
  Synthetic
ctccctgcutcacactuaaagaca

SEQ ID NO: 63558 - DNA, 25 bp, Artificial Sequence
  Synthetic
aatttgagtaugtgactctgugcgt

SEQ ID NO: 63559 - DNA, 24 bp, Artificial Sequence
  Synthetic
ccccaccucacattctaaagtgut

SEQ ID NO: 63560 - DNA, 21 bp, Artificial Sequence
  Synthetic
tcacagcagcugcaactctut

SEQ ID NO: 63561 - DNA, 22 bp, Artificial Sequence
  Synthetic
cttacccttcugggtcttccug

SEQ ID NO: 63562 - DNA, 29 bp, Artificial Sequence
  Synthetic
agagaagaagcagautgagaatacugaga

SEQ ID NO: 63563 - DNA, 28 bp, Artificial Sequence
  Synthetic
tgtggagaagcutgtaatgaattgcuat

SEQ ID NO: 63564 - DNA, 23 bp, Artificial Sequence
  Synthetic
gagaauggctcuccagagcaaat

SEQ ID NO: 63565 - DNA, 20 bp, Artificial Sequence
  Synthetic
agatgugccagggacaacuc

SEQ ID NO: 63566 - DNA, 21 bp, Artificial Sequence
  Synthetic
cctcucaaccacctucccaat

SEQ ID NO: 63567 - DNA, 23 bp, Artificial Sequence
  Synthetic
cgtatatcctauggccctgacug

SEQ ID NO: 63568 - DNA, 22 bp, Artificial Sequence
  Synthetic
ttugcaaaaagcacagcugaaa

SEQ ID NO: 63569 - DNA, 23 bp, Artificial Sequence
  Synthetic
gtggcaucctaaccaattugcac

SEQ ID NO: 63570 - DNA, 24 bp, Artificial Sequence
  Synthetic
gggatgaaaagucaaaacugacca

SEQ ID NO: 63571 - DNA, 21 bp, Artificial Sequence
  Synthetic
cgcttcugcatcagcauccat

SEQ ID NO: 63572 - DNA, 22 bp, Artificial Sequence
  Synthetic
cccatagaggccutcctcauca

SEQ ID NO: 63573 - DNA, 20 bp, Artificial Sequence
  Synthetic
tgagccucacgttgtctguc

SEQ ID NO: 63574 - DNA, 19 bp, Artificial Sequence
  Synthetic
agauccggcgctgaauagg

SEQ ID NO: 63575 - DNA, 24 bp, Artificial Sequence
  Synthetic
aacactcctgutgggttttgauga

SEQ ID NO: 63576 - DNA, 19 bp, Artificial Sequence
  Synthetic
ggcatgaggcauccccaua

SEQ ID NO: 63577 - DNA, 20 bp, Artificial Sequence
  Synthetic
ctggccagguagagtctugg

SEQ ID NO: 63578 - DNA, 28 bp, Artificial Sequence
  Synthetic
tttttcagtgacauatcattagccccut

SEQ ID NO: 63579 - DNA, 24 bp, Artificial Sequence
  Synthetic
aacaatgaaggugcacaaacacut

SEQ ID NO: 63580 - DNA, 20 bp, Artificial Sequence
  Synthetic
caagucctgtuccccagcaa

SEQ ID NO: 63581 - DNA, 20 bp, Artificial Sequence
  Synthetic
tgatgggcuaaccgtgtgug

SEQ ID NO: 63582 - DNA, 21 bp, Artificial Sequence
  Synthetic
gcccutgtacatgucgacgat

SEQ ID NO: 63583 - DNA, 22 bp, Artificial Sequence
  Synthetic
gaggaggtcuggaagtaagcug

SEQ ID NO: 63584 - DNA, 21 bp, Artificial Sequence
  Synthetic
ccatctuacccagcatgccut

SEQ ID NO: 63585 - DNA, 22 bp, Artificial Sequence
  Synthetic
ggcttcctugacctcccauaac

SEQ ID NO: 63586 - DNA, 21 bp, Artificial Sequence
  Synthetic
ggagtctcugtgctgcgaaut

SEQ ID NO: 63587 - DNA, 20 bp, Artificial Sequence
  Synthetic
gttcatgcgcugtgttccut

SEQ ID NO: 63588 - DNA, 17 bp, Artificial Sequence
  Synthetic
ggcgcugcatugagggt

SEQ ID NO: 63589 - DNA, 19 bp, Artificial Sequence
  Synthetic
tgcttuccccgctgctuag

SEQ ID NO: 63590 - DNA, 21 bp, Artificial Sequence
  Synthetic
gcaagaagcagcaacugtcut

SEQ ID NO: 63591 - DNA, 24 bp, Artificial Sequence
  Synthetic
gatatcaccucacctgcttctcut

SEQ ID NO: 63592 - DNA, 21 bp, Artificial Sequence
  Synthetic
gggugtgaaaugagcagagga

SEQ ID NO: 63593 - DNA, 25 bp, Artificial Sequence
  Synthetic
cggacatgtuaaccttgactttgug

SEQ ID NO: 63594 - DNA, 24 bp, Artificial Sequence
  Synthetic
ctcctcagcaaautctgagucagt

SEQ ID NO: 63595 - DNA, 22 bp, Artificial Sequence
  Synthetic
gaccacaacauagccgacuaca

SEQ ID NO: 63596 - DNA, 21 bp, Artificial Sequence
  Synthetic
tgtacguggcatcggatugaa

SEQ ID NO: 63597 - DNA, 21 bp, Artificial Sequence
  Synthetic
ggcttcugaaggagacuccca

SEQ ID NO: 63598 - DNA, 21 bp, Artificial Sequence
  Synthetic
cggaagguctgtgtgugacaa

SEQ ID NO: 63599 - DNA, 19 bp, Artificial Sequence
  Synthetic
caaggcugcggtgactuac

SEQ ID NO: 63600 - DNA, 21 bp, Artificial Sequence
  Synthetic
cacatcucagcacgggcauat

SEQ ID NO: 63601 - DNA, 21 bp, Artificial Sequence
  Synthetic
ctacccccacccaautctcug

SEQ ID NO: 63602 - DNA, 22 bp, Artificial Sequence
  Synthetic
ttcctgggcutccttuggaaat

SEQ ID NO: 63603 - DNA, 19 bp, Artificial Sequence
  Synthetic
ctcccgggcuttggaagut

SEQ ID NO: 63604 - DNA, 28 bp, Artificial Sequence
  Synthetic
ctgagacctcacuatcagtacccatuat

SEQ ID NO: 63605 - DNA, 21 bp, Artificial Sequence
  Synthetic
gggtuggaggaggagatctut

SEQ ID NO: 63606 - DNA, 22 bp, Artificial Sequence
  Synthetic
gaaggctaugagagtgccauga

SEQ ID NO: 63607 - DNA, 22 bp, Artificial Sequence
  Synthetic
ctgtacacaaaagugggcaucc

SEQ ID NO: 63608 - DNA, 22 bp, Artificial Sequence
  Synthetic
ctctgtgcucacagggatctug

SEQ ID NO: 63609 - DNA, 26 bp, Artificial Sequence
  Synthetic
ccatgggcttuttattgctgcttuaa

SEQ ID NO: 63610 - DNA, 19 bp, Artificial Sequence
  Synthetic
cctugaccccgaggcauac

SEQ ID NO: 63611 - DNA, 20 bp, Artificial Sequence
  Synthetic
gaacucaagucaggcaggca

SEQ ID NO: 63612 - DNA, 27 bp, Artificial Sequence
  Synthetic
aaagaatgggtuggagttctcttucaa

SEQ ID NO: 63613 - DNA, 22 bp, Artificial Sequence
  Synthetic
tgacaccaagugcaaggaauct

SEQ ID NO: 63614 - DNA, 21 bp, Artificial Sequence
  Synthetic
agccagccccguauaagagaa

SEQ ID NO: 63615 - DNA, 23 bp, Artificial Sequence
  Synthetic
gtgaggtcuccagtgtuaaaggg

SEQ ID NO: 63616 - DNA, 21 bp, Artificial Sequence
  Synthetic
ctggttuccagacctccucaa

SEQ ID NO: 63617 - DNA, 28 bp, Artificial Sequence
  Synthetic
ggactcctaaacucttctctgttctuct

SEQ ID NO: 63618 - DNA, 19 bp, Artificial Sequence
  Synthetic
gcccgtcugaatcgcucat

SEQ ID NO: 63619 - DNA, 21 bp, Artificial Sequence
  Synthetic
tgatgtttccugcgaggtcug

SEQ ID NO: 63620 - DNA, 26 bp, Artificial Sequence
  Synthetic
ggtctttguttttctctaguccgcat

SEQ ID NO: 63621 - DNA, 27 bp, Artificial Sequence
  Synthetic
aggaggtgagautcaaaattcgtgaut

SEQ ID NO: 63622 - DNA, 28 bp, Artificial Sequence
  Synthetic
gctctagacuaagttgctttcaagugat

SEQ ID NO: 63623 - DNA, 28 bp, Artificial Sequence
  Synthetic
gagcgactctugaaagattatcaaagug

SEQ ID NO: 63624 - DNA, 22 bp, Artificial Sequence
  Synthetic
ccuccagcagagaagcaatuct

SEQ ID NO: 63625 - DNA, 28 bp, Artificial Sequence
  Synthetic
cagatccttaacautggtccgtattuga

SEQ ID NO: 63626 - DNA, 25 bp, Artificial Sequence
  Synthetic
aagacgaccutttgataagauggca

SEQ ID NO: 63627 - DNA, 21 bp, Artificial Sequence
  Synthetic
tggtggcaaacuctccttcuc

SEQ ID NO: 63628 - DNA, 33 bp, Artificial Sequence
  Synthetic
aaatagttgatcauactttgtaacagaaucaca

SEQ ID NO: 63629 - DNA, 28 bp, Artificial Sequence
  Synthetic
ggtacaagtuaaggcacacagaagatua

SEQ ID NO: 63630 - DNA, 20 bp, Artificial Sequence
  Synthetic
gcacgcuacatgctgaugct

SEQ ID NO: 63631 - DNA, 27 bp, Artificial Sequence
  Synthetic
gaactgguaaacacaaattccttucct

SEQ ID NO: 63632 - DNA, 28 bp, Artificial Sequence
  Synthetic
tgcacatttaacagguactatgctctut

SEQ ID NO: 63633 - DNA, 28 bp, Artificial Sequence
  Synthetic
cttcgaacttctucagacactgtaagua

SEQ ID NO: 63634 - DNA, 26 bp, Artificial Sequence
  Synthetic
gttaggtgaagugattatccaggugt

SEQ ID NO: 63635 - DNA, 28 bp, Artificial Sequence
  Synthetic
ggatcttcggaucagtaagtacttctuc

SEQ ID NO: 63636 - DNA, 22 bp, Artificial Sequence
  Synthetic
tccacaatcucctccatccuca

SEQ ID NO: 63637 - DNA, 24 bp, Artificial Sequence
  Synthetic
gccaatuccaagaacctgugaagt

SEQ ID NO: 63638 - DNA, 20 bp, Artificial Sequence
  Synthetic
gagcaaggaggagguggaug

SEQ ID NO: 63639 - DNA, 20 bp, Artificial Sequence
  Synthetic
tctgaggcugggatctcugt

SEQ ID NO: 63640 - DNA, 26 bp, Artificial Sequence
  Synthetic
ctgcttctcatugagttacaccctua

SEQ ID NO: 63641 - DNA, 20 bp, Artificial Sequence
  Synthetic
ccaacccucacctuccacag

SEQ ID NO: 63642 - DNA, 23 bp, Artificial Sequence
  Synthetic
catctcagcaaugtctccuccac

SEQ ID NO: 63643 - DNA, 21 bp, Artificial Sequence
  Synthetic
gggccgggucattattcttut

SEQ ID NO: 63644 - DNA, 23 bp, Artificial Sequence
  Synthetic
cacccuggagagagaugaagaag

SEQ ID NO: 63645 - DNA, 21 bp, Artificial Sequence
  Synthetic
ggcagaggcaugatggtctut

SEQ ID NO: 63646 - DNA, 24 bp, Artificial Sequence
  Synthetic
ggcatactccugcttggatttuca

SEQ ID NO: 63647 - DNA, 22 bp, Artificial Sequence
  Synthetic
gaagagtgugttcctccucgac

SEQ ID NO: 63648 - DNA, 21 bp, Artificial Sequence
  Synthetic
ccctggguacagacctcuaca

SEQ ID NO: 63649 - DNA, 19 bp, Artificial Sequence
  Synthetic
ctccgccutacccttcucc

SEQ ID NO: 63650 - DNA, 22 bp, Artificial Sequence
  Synthetic
ggguggcagagaaguaacaagt

SEQ ID NO: 63651 - DNA, 23 bp, Artificial Sequence
  Synthetic
cggaataacugcccauagggaat

SEQ ID NO: 63652 - DNA, 18 bp, Artificial Sequence
  Synthetic
gcagacggucccgtgtug

SEQ ID NO: 63653 - DNA, 21 bp, Artificial Sequence
  Synthetic
ctucccaaagacccacagugt

SEQ ID NO: 63654 - DNA, 20 bp, Artificial Sequence
  Synthetic
agcacccaagugcttcctut

SEQ ID NO: 63655 - DNA, 23 bp, Artificial Sequence
  Synthetic
ctaggucactcacuccaggaaga

SEQ ID NO: 63656 - DNA, 21 bp, Artificial Sequence
  Synthetic
ggcucagcagacuacaggact

SEQ ID NO: 63657 - DNA, 28 bp, Artificial Sequence
  Synthetic
gcaagaaauggcgttgttatugagaaat

SEQ ID NO: 63658 - DNA, 24 bp, Artificial Sequence
  Synthetic
gcaaaactctguccgacgtaguat

SEQ ID NO: 63659 - DNA, 27 bp, Artificial Sequence
  Synthetic
ccctattatgugtgagatcaugcagaa

SEQ ID NO: 63660 - DNA, 27 bp, Artificial Sequence
  Synthetic
gtgttcaattttgugtctgtacagugg

SEQ ID NO: 63661 - DNA, 22 bp, Artificial Sequence
  Synthetic
acacttcccuaggccccttuaa

SEQ ID NO: 63662 - DNA, 22 bp, Artificial Sequence
  Synthetic
ggauggaaggugggaagaacac

SEQ ID NO: 63663 - DNA, 26 bp, Artificial Sequence
  Synthetic
cccaccaccaauacataaaactcauc

SEQ ID NO: 63664 - DNA, 28 bp, Artificial Sequence
  Synthetic
agagattttaaagugttgttcccctugt

SEQ ID NO: 63665 - DNA, 22 bp, Artificial Sequence
  Synthetic
agcgatctcacucttccggaua

SEQ ID NO: 63666 - DNA, 21 bp, Artificial Sequence
  Synthetic
ggagagaacgutccccagaug

SEQ ID NO: 63667 - DNA, 20 bp, Artificial Sequence
  Synthetic
cagtggtgacuctcctcgug

SEQ ID NO: 63668 - DNA, 19 bp, Artificial Sequence
  Synthetic
ccucaaggaggcgcucaac

SEQ ID NO: 63669 - DNA, 19 bp, Artificial Sequence
  Synthetic
ggccgaaugcttgagggua

SEQ ID NO: 63670 - DNA, 19 bp, Artificial Sequence
  Synthetic
agtaccuagcgcucaccga

SEQ ID NO: 63671 - DNA, 22 bp, Artificial Sequence
  Synthetic
cctcctcugcctgtgtgttuag

SEQ ID NO: 63672 - DNA, 18 bp, Artificial Sequence
  Synthetic
ctcctgggcuacggcuac

SEQ ID NO: 63673 - DNA, 22 bp, Artificial Sequence
  Synthetic
ggctgagucaggtcagagauca

SEQ ID NO: 63674 - DNA, 21 bp, Artificial Sequence
  Synthetic
ctccccacaccaugtcttcuc

SEQ ID NO: 63675 - DNA, 22 bp, Artificial Sequence
  Synthetic
caccgtccccaauctcaatcuc

SEQ ID NO: 63676 - DNA, 23 bp, Artificial Sequence
  Synthetic
ccaacaguccagggaaaccaaut

SEQ ID NO: 63677 - DNA, 21 bp, Artificial Sequence
  Synthetic
cttgctgaggucgaagcucat

SEQ ID NO: 63678 - DNA, 22 bp, Artificial Sequence
  Synthetic
cctgatgguctcacctccauct

SEQ ID NO: 63679 - DNA, 20 bp, Artificial Sequence
  Synthetic
gggtacgucttgcagtcuct

SEQ ID NO: 63680 - DNA, 20 bp, Artificial Sequence
  Synthetic
cgtgacgucatcgaggacug

SEQ ID NO: 63681 - DNA, 22 bp, Artificial Sequence
  Synthetic
cgggacaaugcacaagatguag

SEQ ID NO: 63682 - DNA, 21 bp, Artificial Sequence
  Synthetic
ccagcctuccctaagacccut

SEQ ID NO: 63683 - DNA, 25 bp, Artificial Sequence
  Synthetic
ttctctccauaggaccagttgtuct

SEQ ID NO: 63684 - DNA, 20 bp, Artificial Sequence
  Synthetic
gggatgtgacugtcctgcua

SEQ ID NO: 63685 - DNA, 23 bp, Artificial Sequence
  Synthetic
cctccattcuccagactcuccag

SEQ ID NO: 63686 - DNA, 23 bp, Artificial Sequence
  Synthetic
ctcuagaaaccctcuccccaagt

SEQ ID NO: 63687 - DNA, 22 bp, Artificial Sequence
  Synthetic
tcttcaccucttttccgucagg

SEQ ID NO: 63688 - DNA, 22 bp, Artificial Sequence
  Synthetic
tccagaacuaccuacggacaca

SEQ ID NO: 63689 - DNA, 22 bp, Artificial Sequence
  Synthetic
cttgcccgaguagtaccaguag

SEQ ID NO: 63690 - DNA, 20 bp, Artificial Sequence
  Synthetic
gctcguggaatcctcaucca

SEQ ID NO: 63691 - DNA, 17 bp, Artificial Sequence
  Synthetic
gcccacacgauguccca

SEQ ID NO: 63692 - DNA, 25 bp, Artificial Sequence
  Synthetic
ctggtatatggugatgtccctctug

SEQ ID NO: 63693 - DNA, 22 bp, Artificial Sequence
  Synthetic
cttatccctucaccacccacug

SEQ ID NO: 63694 - DNA, 27 bp, Artificial Sequence
  Synthetic
aaataaggtaaggguggttctgactug

SEQ ID NO: 63695 - DNA, 26 bp, Artificial Sequence
  Synthetic
ctactgacuggccttatgtuaaaggg

SEQ ID NO: 63696 - DNA, 23 bp, Artificial Sequence
  Synthetic
agtgtgaaugagtgtgagugcat

SEQ ID NO: 63697 - DNA, 22 bp, Artificial Sequence
  Synthetic
ccautgtuccggcagaagaaga

SEQ ID NO: 63698 - DNA, 27 bp, Artificial Sequence
  Synthetic
gggttttcatuacacttctgcuaggat

SEQ ID NO: 63699 - DNA, 22 bp, Artificial Sequence
  Synthetic
cgtcugagaagagtaggtuggg

SEQ ID NO: 63700 - DNA, 21 bp, Artificial Sequence
  Synthetic
gcctgtgutcacatgctugac

SEQ ID NO: 63701 - DNA, 20 bp, Artificial Sequence
  Synthetic
ccuccacccgtttugaacct

SEQ ID NO: 63702 - DNA, 21 bp, Artificial Sequence
  Synthetic
cttcttccgcugctcgaaaug

SEQ ID NO: 63703 - DNA, 22 bp, Artificial Sequence
  Synthetic
aaacggtucagttcaccaucct

SEQ ID NO: 63704 - DNA, 20 bp, Artificial Sequence
  Synthetic
ccacucccagggtctuggat

SEQ ID NO: 63705 - DNA, 18 bp, Artificial Sequence
  Synthetic
gggtgcgguacgguaagg

SEQ ID NO: 63706 - DNA, 20 bp, Artificial Sequence
  Synthetic
ctttgtctucaccggcugga

SEQ ID NO: 63707 - DNA, 24 bp, Artificial Sequence
  Synthetic
ctgtgttcuggaatcagggaugag

SEQ ID NO: 63708 - DNA, 21 bp, Artificial Sequence
  Synthetic
ccacucaaaucccagggagag

SEQ ID NO: 63709 - DNA, 26 bp, Artificial Sequence
  Synthetic
ctgaaaggtccutcgtgaactcauag

SEQ ID NO: 63710 - DNA, 24 bp, Artificial Sequence
  Synthetic
ggattgtcaaagcugcagaagaug

SEQ ID NO: 63711 - DNA, 25 bp, Artificial Sequence
  Synthetic
agcagtgttutgcacaaactugaaa

SEQ ID NO: 63712 - DNA, 21 bp, Artificial Sequence
  Synthetic
gcacactucccttcagucaca

SEQ ID NO: 63713 - DNA, 25 bp, Artificial Sequence
  Synthetic
ccttttcatgcuaaatgtggtuccc

SEQ ID NO: 63714 - DNA, 27 bp, Artificial Sequence
  Synthetic
agatttttgcauaacagcagactcuga

SEQ ID NO: 63715 - DNA, 20 bp, Artificial Sequence
  Synthetic
autctgctgaugcggaggag

SEQ ID NO: 63716 - DNA, 23 bp, Artificial Sequence
  Synthetic
gttgggutgttctauggccagat

SEQ ID NO: 63717 - DNA, 23 bp, Artificial Sequence
  Synthetic
ctcatggtacugggattctucgg

SEQ ID NO: 63718 - DNA, 18 bp, Artificial Sequence
  Synthetic
cattgcugacgccccuct

SEQ ID NO: 63719 - DNA, 19 bp, Artificial Sequence
  Synthetic
gggcctcucctgtggtcua

SEQ ID NO: 63720 - DNA, 23 bp, Artificial Sequence
  Synthetic
cggtgagccacutcttttctcug

SEQ ID NO: 63721 - DNA, 22 bp, Artificial Sequence
  Synthetic
ctccccaguaggactcugacaa

SEQ ID NO: 63722 - DNA, 22 bp, Artificial Sequence
  Synthetic
ggtgcuggagcgaatcaagtua

SEQ ID NO: 63723 - DNA, 28 bp, Artificial Sequence
  Synthetic
agaaagtttcaagaucttctgtcugagg

SEQ ID NO: 63724 - DNA, 17 bp, Artificial Sequence
  Synthetic
cgggugcggcttcugaa

SEQ ID NO: 63725 - DNA, 18 bp, Artificial Sequence
  Synthetic
ccugcagcccacagauga

SEQ ID NO: 63726 - DNA, 26 bp, Artificial Sequence
  Synthetic
tttcttggcagutctaatacccgaut

SEQ ID NO: 63727 - DNA, 26 bp, Artificial Sequence
  Synthetic
caaagagggtugctcattattcugga

SEQ ID NO: 63728 - DNA, 28 bp, Artificial Sequence
  Synthetic
gaactaaagggaaacauccagatcacut

SEQ ID NO: 63729 - DNA, 24 bp, Artificial Sequence
  Synthetic
gggttgggauagaatggaatggug

SEQ ID NO: 63730 - DNA, 18 bp, Artificial Sequence
  Synthetic
cccauagccgaggtcguc

SEQ ID NO: 63731 - DNA, 19 bp, Artificial Sequence
  Synthetic
gggtcugcggtaucggaaa

SEQ ID NO: 63732 - DNA, 23 bp, Artificial Sequence
  Synthetic
ggtgtcugcaacactgcaaaaua

SEQ ID NO: 63733 - DNA, 19 bp, Artificial Sequence
  Synthetic
gaugcaggctctucccgat

SEQ ID NO: 63734 - DNA, 28 bp, Artificial Sequence
  Synthetic
tggtaaagttaaugtgaaaggaucgaca

SEQ ID NO: 63735 - DNA, 23 bp, Artificial Sequence
  Synthetic
gttttggtaacutcctgctugct

SEQ ID NO: 63736 - DNA, 21 bp, Artificial Sequence
  Synthetic
gggcccugaagcaaagaagua

SEQ ID NO: 63737 - DNA, 27 bp, Artificial Sequence
  Synthetic
ggcagagaaaaauagatgagaccctug

SEQ ID NO: 63738 - DNA, 21 bp, Artificial Sequence
  Synthetic
gtccacgucaatggcaaaugt

SEQ ID NO: 63739 - DNA, 28 bp, Artificial Sequence
  Synthetic
ctgtgaagttaauctgcactataugggt

SEQ ID NO: 63740 - DNA, 27 bp, Artificial Sequence
  Synthetic
cactatgccucacatatgaccatguat

SEQ ID NO: 63741 - DNA, 27 bp, Artificial Sequence
  Synthetic
gaaagtgaaacuccttactgagtcugt

SEQ ID NO: 63742 - DNA, 24 bp, Artificial Sequence
  Synthetic
tcacagauaacaaagcacggagut

SEQ ID NO: 63743 - DNA, 25 bp, Artificial Sequence
  Synthetic
tgcagagtccugaatttgcaatcut

SEQ ID NO: 63744 - DNA, 30 bp, Artificial Sequence; identical to SEQ ID NO: 31726
  Synthetic

SEQ ID NO: 63745 - DNA, 28 bp, Artificial Sequence
  Synthetic
aattctttaatgtcutgcagtgccttut

SEQ ID NO: 63746 - DNA, 23 bp, Artificial Sequence
  Synthetic
catttgtutcacacgucaagggt

SEQ ID NO: 63747 - DNA, 27 bp, Artificial Sequence
  Synthetic
ctaggcattuggtctcttacctucaaa

SEQ ID NO: 63748 - DNA, 27 bp, Artificial Sequence
  Synthetic
catttccctgugtgttagtaacugact

SEQ ID NO: 63749 - DNA, 22 bp, Artificial Sequence
  Synthetic
gaaguaucaggagacaggcgaa

SEQ ID NO: 63750 - DNA, 25 bp, Artificial Sequence
  Synthetic
cacauttatccugagagcagacaga

SEQ ID NO: 63751 - DNA, 22 bp, Artificial Sequence
  Synthetic
ggcctttcugcttgttttcucc

SEQ ID NO: 63752 - DNA, 21 bp, Artificial Sequence
  Synthetic
tcccugcccagcuaacaaaag

SEQ ID NO: 63753 - DNA, 22 bp, Artificial Sequence
  Synthetic
actttcccauctcctcuccaca

SEQ ID NO: 63754 - DNA, 25 bp, Artificial Sequence
  Synthetic
ctcattcattaautctggccccuca

SEQ ID NO: 63755 - DNA, 25 bp, Artificial Sequence
  Synthetic
tggaagtutagtggaguccaagaga

SEQ ID NO: 63756 - DNA, 26 bp, Artificial Sequence
  Synthetic
cagccaguagaaggatattcuaagca

SEQ ID NO: 63757 - DNA, 27 bp, Artificial Sequence
  Synthetic
cggtagtatucagccatcttctguaac

SEQ ID NO: 63758 - DNA, 25 bp, Artificial Sequence
  Synthetic
attcaatgtugcaggagaucaggaa

SEQ ID NO: 63759 - DNA, 21 bp, Artificial Sequence
  Synthetic
acacatggagcugaacgugag

SEQ ID NO: 63760 - DNA, 24 bp, Artificial Sequence
  Synthetic
tcatgggttuagaaccctcctcut

SEQ ID NO: 63761 - DNA, 22 bp, Artificial Sequence
  Synthetic
ccctgagugtccttgugaagat

SEQ ID NO: 63762 - DNA, 21 bp, Artificial Sequence
  Synthetic
ctgtuaagggccccatgtcut

SEQ ID NO: 63763 - DNA, 28 bp, Artificial Sequence
  Synthetic
catgttctcaaugttctttcccattuct

SEQ ID NO: 63764 - DNA, 26 bp, Artificial Sequence
  Synthetic
tgcagtctatugagggtgtcatauca

SEQ ID NO: 63765 - DNA, 28 bp, Artificial Sequence
  Synthetic
aagcagcaaaauggaaguaaaagaacat

SEQ ID NO: 63766 - DNA, 18 bp, Artificial Sequence
  Synthetic
cttguggccctgauggct

SEQ ID NO: 63767 - DNA, 28 bp, Artificial Sequence
  Synthetic
ccatctccttcaucagcattttctauca

SEQ ID NO: 63768 - DNA, 24 bp, Artificial Sequence
  Synthetic
gutctgatgacuggagacaacagt

SEQ ID NO: 63769 - DNA, 28 bp, Artificial Sequence
  Synthetic
ggaaccagauaggactactcagtgauaa

SEQ ID NO: 63770 - DNA, 20 bp, Artificial Sequence
  Synthetic
gcagaggcacgccuaactua

SEQ ID NO: 63771 - DNA, 23 bp, Artificial Sequence
  Synthetic
agagatgugcaaggatgtctgug

SEQ ID NO: 63772 - DNA, 22 bp, Artificial Sequence
  Synthetic
ccctugggagagtgauggaaac

SEQ ID NO: 63773 - DNA, 27 bp, Artificial Sequence
  Synthetic
tcagatgtgauctctctcttcttucct

SEQ ID NO: 63774 - DNA, 27 bp, Artificial Sequence
  Synthetic
accattgattuactcttgcttucaggt

SEQ ID NO: 63775 - DNA, 28 bp, Artificial Sequence
  Synthetic
ccatcggtgtugaagttactttgaaaua

SEQ ID NO: 63776 - DNA, 26 bp, Artificial Sequence
  Synthetic
gagaaaaagguaguaaaggagagcct

SEQ ID NO: 63777 - DNA, 25 bp, Artificial Sequence
  Synthetic
gatgcatttaagugcctttgtuggt

SEQ ID NO: 63778 - DNA, 21 bp, Artificial Sequence
  Synthetic
ggucaaccaggcttuggaaac

SEQ ID NO: 63779 - DNA, 28 bp, Artificial Sequence
  Synthetic
taacgttaacacuaggtttgagtttuct

SEQ ID NO: 63780 - DNA, 24 bp, Artificial Sequence
  Synthetic
gtcctccauaaatgaagucagcgt

SEQ ID NO: 63781 - DNA, 26 bp, Artificial Sequence
  Synthetic
tctactaagctguctgtgtcctttug

SEQ ID NO: 63782 - DNA, 24 bp, Artificial Sequence
  Synthetic
tggcttcugtgatatcagugagga

SEQ ID NO: 63783 - DNA, 24 bp, Artificial Sequence
  Synthetic
cccaactgguctgtcaacguaaaa

SEQ ID NO: 63784 - DNA, 29 bp, Artificial Sequence
  Synthetic
tgctaatcgctacutctgttcatacatut

SEQ ID NO: 63785 - DNA, 28 bp, Artificial Sequence
  Synthetic
caatctcatcucccatctaggaaagtuc

SEQ ID NO: 63786 - DNA, 22 bp, Artificial Sequence
  Synthetic
aagaggaacugctttgggacug

SEQ ID NO: 63787 - DNA, 25 bp, Artificial Sequence
  Synthetic
tccttcttucaccaatgtgtccaut

SEQ ID NO: 63788 - DNA, 27 bp, Artificial Sequence
  Synthetic
gaagaatctcatuggttgtccagttug

SEQ ID NO: 63789 - DNA, 33 bp, Artificial Sequence
  Synthetic
aggtaagcaaattauaaagcaacataaaacugt

SEQ ID NO: 63790 - DNA, 24 bp, Artificial Sequence
  Synthetic
gacagacugggagttaggagguaa

SEQ ID NO: 63791 - DNA, 20 bp, Artificial Sequence
  Synthetic
tgatccugagcaacgugcag

SEQ ID NO: 63792 - DNA, 21 bp, Artificial Sequence
  Synthetic
caggugagagaagcacauggt

SEQ ID NO: 63793 - DNA, 25 bp, Artificial Sequence
  Synthetic
agtatttctctccautccctcccut

SEQ ID NO: 63794 - DNA, 21 bp, Artificial Sequence
  Synthetic
gctcccuggacctgtcctaut

SEQ ID NO: 63795 - DNA, 27 bp, Artificial Sequence
  Synthetic
gaaguggtaaaugaagaagaggacgat

SEQ ID NO: 63796 - DNA, 18 bp, Artificial Sequence
  Synthetic
cgtcgucatgggctuggt

SEQ ID NO: 63797 - DNA, 18 bp, Artificial Sequence
  Synthetic
ctcguacagcaccuccct

SEQ ID NO: 63798 - DNA, 18 bp, Artificial Sequence
  Synthetic
ggtgggugggtccuagca

SEQ ID NO: 63799 - DNA, 18 bp, Artificial Sequence
  Synthetic
cgagucgcccggagtuag

SEQ ID NO: 63800 - DNA, 17 bp, Artificial Sequence
  Synthetic
accutgctgcugcacca

SEQ ID NO: 63801 - DNA, 21 bp, Artificial Sequence
  Synthetic
ggcactucacaaggacctgua

SEQ ID NO: 63802 - DNA, 21 bp, Artificial Sequence
  Synthetic
ggutcctgcctugacacagat

SEQ ID NO: 63803 - DNA, 20 bp, Artificial Sequence
  Synthetic
cctccagcggcuacatgtug

SEQ ID NO: 63804 - DNA, 27 bp, Artificial Sequence
  Synthetic
gggtagtcctaauactgcctatcauca

SEQ ID NO: 63805 - DNA, 20 bp, Artificial Sequence
  Synthetic
ggagcccacauggcactuag

SEQ ID NO: 63806 - DNA, 23 bp, Artificial Sequence
  Synthetic
ggctgcucactgacattuacaga

SEQ ID NO: 63807 - DNA, 20 bp, Artificial Sequence
  Synthetic
ggagcugacccttgaggaug

SEQ ID NO: 63808 - DNA, 23 bp, Artificial Sequence
  Synthetic
ggagtacctagugctctgaggug

SEQ ID NO: 63809 - DNA, 25 bp, Artificial Sequence
  Synthetic
tctgagcttctutcctttgcttcut

SEQ ID NO: 63810 - DNA, 27 bp, Artificial Sequence
  Synthetic
ttccauaaagcttctuacacaggaaca

SEQ ID NO: 63811 - DNA, 24 bp, Artificial Sequence
  Synthetic
gatcctaaatugcagcaaggcuac

SEQ ID NO: 63812 - DNA, 23 bp, Artificial Sequence
  Synthetic
ccacaggaautcgtgatgaucgt

SEQ ID NO: 63813 - DNA, 22 bp, Artificial Sequence
  Synthetic
gagtcgggautgggaguaaagg

SEQ ID NO: 63814 - DNA, 25 bp, Artificial Sequence
  Synthetic
ctattggacacuctactggtggtut

SEQ ID NO: 63815 - DNA, 17 bp, Artificial Sequence
  Synthetic
ctcgccucaggccucag

SEQ ID NO: 63816 - DNA, 22 bp, Artificial Sequence
  Synthetic
gggctctcuctaaagacaugga

SEQ ID NO: 63817 - DNA, 21 bp, Artificial Sequence
  Synthetic
gcctatcugcaggacatggut

SEQ ID NO: 63818 - DNA, 21 bp, Artificial Sequence
  Synthetic
gccuggagctttugcaaggat

SEQ ID NO: 63819 - DNA, 25 bp, Artificial Sequence
  Synthetic
gtggauagaagacactctgtaugcc

SEQ ID NO: 63820 - DNA, 26 bp, Artificial Sequence
  Synthetic
tcaauattgcaaaacauggcaggaac

SEQ ID NO: 63821 - DNA, 23 bp, Artificial Sequence
  Synthetic
ggttgcucaggagattcctucaa

SEQ ID NO: 63822 - DNA, 29 bp, Artificial Sequence
  Synthetic
gctatgttttucaaaggctgattactuct

SEQ ID NO: 63823 - DNA, 23 bp, Artificial Sequence
  Synthetic
gtgacaagggugaagauggagat

SEQ ID NO: 63824 - DNA, 28 bp, Artificial Sequence
  Synthetic
tcacagcaugagagtaaugaaagaagag

SEQ ID NO: 63825 - DNA, 32 bp, Artificial Sequence
  Synthetic
tcagatatctccucctattggtattcaatuca

SEQ ID NO: 63826 - DNA, 28 bp, Artificial Sequence
  Synthetic
agcaatatctuggagtacaauaaacgca

SEQ ID NO: 63827 - DNA, 21 bp, Artificial Sequence
  Synthetic
ctcctggugagcaaggtctuc

SEQ ID NO: 63828 - DNA, 23 bp, Artificial Sequence
  Synthetic
tttccagagugaacugacacagg

SEQ ID NO: 63829 - DNA, 23 bp, Artificial Sequence
  Synthetic
cgcttaatcaugctgttggcaut

SEQ ID NO: 63830 - DNA, 23 bp, Artificial Sequence
  Synthetic
ccctgaattuccaaatgctgcut

SEQ ID NO: 63831 - DNA, 21 bp, Artificial Sequence
  Synthetic
ctgatggtcuacctggtccuc

SEQ ID NO: 63832 - DNA, 24 bp, Artificial Sequence
  Synthetic
cttggctgagguttcaatgaaugg

SEQ ID NO: 63833 - DNA, 28 bp, Artificial Sequence
  Synthetic
acccagcctaaucttgtttttcttaugt

SEQ ID NO: 63834 - DNA, 22 bp, Artificial Sequence
  Synthetic
ggaatggugctctaggaaucca

SEQ ID NO: 63835 - DNA, 18 bp, Artificial Sequence
  Synthetic
aggtccuacccucgccaa

SEQ ID NO: 63836 - DNA, 22 bp, Artificial Sequence
  Synthetic
tctgataaggcccugacctuca

SEQ ID NO: 63837 - DNA, 21 bp, Artificial Sequence
  Synthetic
gggatgucccggaactcttua

SEQ ID NO: 63838 - DNA, 25 bp, Artificial Sequence
  Synthetic
agactgucatttacctugccaaagt

SEQ ID NO: 63839 - DNA, 21 bp, Artificial Sequence
  Synthetic
ctccttctgguccagtgagug

SEQ ID NO: 63840 - DNA, 26 bp, Artificial Sequence
  Synthetic
actgtatcugccaaaaccatttgcua

SEQ ID NO: 63841 - DNA, 26 bp, Artificial Sequence
  Synthetic
ctcttttgguaggttgggauacacat

SEQ ID NO: 63842 - DNA, 21 bp, Artificial Sequence
  Synthetic
cgaggagcagauctttgguga

SEQ ID NO: 63843 - DNA, 21 bp, Artificial Sequence
  Synthetic
ctcaggcugctgtcctatuct

SEQ ID NO: 63844 - DNA, 21 bp, Artificial Sequence
  Synthetic
ccccaucccacctatgctcua

SEQ ID NO: 63845 - DNA, 24 bp, Artificial Sequence
  Synthetic
ctgatgctgacuattcctctcucc

SEQ ID NO: 63846 - DNA, 27 bp, Artificial Sequence
  Synthetic
ccaagacattttaauggtgagcatcug

SEQ ID NO: 63847 - DNA, 20 bp, Artificial Sequence
  Synthetic
tccugaacggccaacugaag

SEQ ID NO: 63848 - DNA, 26 bp, Artificial Sequence
  Synthetic
ctcccacaccggaaautttataaugg

SEQ ID NO: 63849 - DNA, 28 bp, Artificial Sequence
  Synthetic
aagccaaacacagaguattggatcttua

SEQ ID NO: 63850 - DNA, 26 bp, Artificial Sequence
  Synthetic
tccuaagtcugcaaaggagagagaat

SEQ ID NO: 63851 - DNA, 27 bp, Artificial Sequence
  Synthetic
gaggtttatugacaagacttctgcuct

SEQ ID NO: 63852 - DNA, 27 bp, Artificial Sequence
  Synthetic
agttcactuaccattcggatatucagg

SEQ ID NO: 63853 - DNA, 26 bp, Artificial Sequence
  Synthetic
actttugggaccaagagtgaaaugag

SEQ ID NO: 63854 - DNA, 28 bp, Artificial Sequence
  Synthetic
agagatgtgacugtaaacttttgcgtua

SEQ ID NO: 63855 - DNA, 27 bp, Artificial Sequence
  Synthetic
gtgccagaauggattctacaatcuaca

SEQ ID NO: 63856 - DNA, 23 bp, Artificial Sequence
  Synthetic
caggccuacctcatcatgaucag

SEQ ID NO: 63857 - DNA, 21 bp, Artificial Sequence
  Synthetic
cctcugcagaaagggaugcaa

SEQ ID NO: 63858 - DNA, 23 bp, Artificial Sequence
  Synthetic
gcatcaagaggucactgtctcua

SEQ ID NO: 63859 - DNA, 22 bp, Artificial Sequence
  Synthetic
gctattaggucagtguggcaga

SEQ ID NO: 63860 - DNA, 21 bp, Artificial Sequence
  Synthetic
gctggccuctaacccttgtug

SEQ ID NO: 63861 - DNA, 22 bp, Artificial Sequence
  Synthetic
ttaucgcaaggcttgugaacag

SEQ ID NO: 63862 - DNA, 25 bp, Artificial Sequence
  Synthetic
tcagagggcugaattttucaaggaa

SEQ ID NO: 63863 - DNA, 21 bp, Artificial Sequence
  Synthetic
agccauaggcctgtgtcuaca

SEQ ID NO: 63864 - DNA, 21 bp, Artificial Sequence
  Synthetic
ggagcaggaggaccuttcuga

SEQ ID NO: 63865 - DNA, 23 bp, Artificial Sequence
  Synthetic
aggctuacggactctauaggcaa

SEQ ID NO: 63866 - DNA, 27 bp, Artificial Sequence
  Synthetic
gggaaaatguggcttctgataaaauac

SEQ ID NO: 63867 - DNA, 25 bp, Artificial Sequence
  Synthetic
acagcttcauaacaaggagcauacc

SEQ ID NO: 63868 - DNA, 26 bp, Artificial Sequence
  Synthetic
ctcctacugttgtgttgauagaaggg

SEQ ID NO: 63869 - DNA, 23 bp, Artificial Sequence
  Synthetic
tcagtgtgaacaucatggtgugt

SEQ ID NO: 63870 - DNA, 25 bp, Artificial Sequence
  Synthetic
gtagtgttagucctttgtgccuaca

SEQ ID NO: 63871 - DNA, 22 bp, Artificial Sequence
  Synthetic
ccacccagacautagcaggtuc

SEQ ID NO: 63872 - DNA, 22 bp, Artificial Sequence
  Synthetic
aaautcagcaucaaacgcagca

SEQ ID NO: 63873 - DNA, 28 bp, Artificial Sequence
  Synthetic
ctccctagaagacugatatcatcacuga

SEQ ID NO: 63874 - DNA, 23 bp, Artificial Sequence
  Synthetic
ggcatcttucacaacgaggacut

SEQ ID NO: 63875 - DNA, 22 bp, Artificial Sequence
  Synthetic
tgcaattuaactggctcuggca

SEQ ID NO: 63876 - DNA, 33 bp, Artificial Sequence
  Synthetic
aataaagtaacuaagtggttaatcttuggacaa

SEQ ID NO: 63877 - DNA, 23 bp, Artificial Sequence
  Synthetic
gctgcatcauagaaggtcucagt

SEQ ID NO: 63878 - DNA, 28 bp, Artificial Sequence
  Synthetic
tggaaaaacagucatcaatggattcuga

SEQ ID NO: 63879 - DNA, 28 bp, Artificial Sequence
  Synthetic
gggcatgtatuagagaaagttcacttua

SEQ ID NO: 63880 - DNA, 27 bp, Artificial Sequence
  Synthetic
caactaatguggaagatgtttguccaa

SEQ ID NO: 63881 - DNA, 22 bp, Artificial Sequence
  Synthetic
ccaccaacgagacaugtagcug

SEQ ID NO: 63882 - DNA, 23 bp, Artificial Sequence
  Synthetic
aacaaaagtugaggcagctucac

SEQ ID NO: 63883 - DNA, 28 bp, Artificial Sequence
  Synthetic
tgagcctaaautattacggtatugcact

SEQ ID NO: 63884 - DNA, 27 bp, Artificial Sequence
  Synthetic
gcagagtaactuggataaagacgguat

SEQ ID NO: 63885 - DNA, 30 bp, Artificial Sequence
  Synthetic
ttacagcattcuttaaaacgacaaugacaa

SEQ ID NO: 63886 - DNA, 26 bp, Artificial Sequence
  Synthetic
ttgctgaataagugtaaaaccccuca

SEQ ID NO: 63887 - DNA, 28 bp, Artificial Sequence
  Synthetic
gtataatcatgtggguaactgcaggtua

SEQ ID NO: 63888 - DNA, 26 bp, Artificial Sequence
  Synthetic
ggtgatagtacucatggcccaaatug

SEQ ID NO: 63889 - DNA, 26 bp, Artificial Sequence
  Synthetic
ccttcucacaggacagagacauacat

SEQ ID NO: 63890 - DNA, 26 bp, Artificial Sequence
  Synthetic
catgttugcaacccattttcaugaac

SEQ ID NO: 63891 - DNA, 28 bp, Artificial Sequence
  Synthetic
ggtagtaagttucccattaccaagtuct

SEQ ID NO: 63892 - DNA, 20 bp, Artificial Sequence
  Synthetic
ccccagcucctgcaacttut

SEQ ID NO: 63893 - DNA, 19 bp, Artificial Sequence
  Synthetic
cugggacccaagggucaag

SEQ ID NO: 63894 - DNA, 23 bp, Artificial Sequence
  Synthetic
agaaaggtccaggugaggtaguc

SEQ ID NO: 63895 - DNA, 29 bp, Artificial Sequence
  Synthetic
attctttattacuccttctccctcuccaa

SEQ ID NO: 63896 - DNA, 22 bp, Artificial Sequence
  Synthetic
agacaaugacaggcttctuggg

SEQ ID NO: 63897 - DNA, 21 bp, Artificial Sequence
  Synthetic
catccagguaggacccacuct

SEQ ID NO: 63898 - DNA, 21 bp, Artificial Sequence
  Synthetic
cgggacaaagugcaagacaut

SEQ ID NO: 63899 - DNA, 25 bp, Artificial Sequence
  Synthetic
gaggtgattcugcaccatgagtaut

SEQ ID NO: 63900 - DNA, 22 bp, Artificial Sequence
  Synthetic
gcccgtctucttgtcgtactug

SEQ ID NO: 63901 - DNA, 23 bp, Artificial Sequence
  Synthetic
gctaagaaccaugagctgtguct

SEQ ID NO: 63902 - DNA, 28 bp, Artificial Sequence
  Synthetic
ttggtgaatcaaacautcgaaagaaugg

SEQ ID NO: 63903 - DNA, 26 bp, Artificial Sequence
  Synthetic
agcctcattugtctaactgtugaact

SEQ ID NO: 63904 - DNA, 27 bp, Artificial Sequence
  Synthetic
ggaaacuccacaccatattcuacaaga

SEQ ID NO: 63905 - DNA, 28 bp, Artificial Sequence
  Synthetic
ccaacatgatatugatggcacttcttut

SEQ ID NO: 63906 - DNA, 22 bp, Artificial Sequence
  Synthetic
catccaucaaggccugggaaat

SEQ ID NO: 63907 - DNA, 27 bp, Artificial Sequence
  Synthetic
cctgtgacucaagtattagcuaagcag

SEQ ID NO: 63908 - DNA, 21 bp, Artificial Sequence
  Synthetic
gctttguggaaaggctugcat

SEQ ID NO: 63909 - DNA, 23 bp, Artificial Sequence
  Synthetic
cagaguauggaagggagacagag

SEQ ID NO: 63910 - DNA, 25 bp, Artificial Sequence
  Synthetic
gtagtagtguctgagggagaucagt

SEQ ID NO: 63911 - DNA, 28 bp, Artificial Sequence
  Synthetic
ctttgcagaacaaaauccaaggatguat

SEQ ID NO: 63912 - DNA, 28 bp, Artificial Sequence
  Synthetic
tggttgaaautatctatgaugacaccaa

SEQ ID NO: 63913 - DNA, 27 bp, Artificial Sequence
  Synthetic
cctaggauagcactgtttgaatuacct

SEQ ID NO: 63914 - DNA, 28 bp, Artificial Sequence
  Synthetic
ggcaaccttaguttatgtttaccaguct

SEQ ID NO: 63915 - DNA, 28 bp, Artificial Sequence
  Synthetic
ggaatctttgcagcugaaatggtatuaa

SEQ ID NO: 63916 - DNA, 21 bp, Artificial Sequence
  Synthetic
acccatgcaguttgctcacut

SEQ ID NO: 63917 - DNA, 28 bp, Artificial Sequence
  Synthetic
catcagggctcutgataaccttagatut

SEQ ID NO: 63918 - DNA, 22 bp, Artificial Sequence
  Synthetic
agtgctcttguctcaccacaut

SEQ ID NO: 63919 - DNA, 21 bp, Artificial Sequence
  Synthetic
agtgttggugtcatctgcugt

SEQ ID NO: 63920 - DNA, 32 bp, Artificial Sequence
  Synthetic
atctgtattacatugagtttttacctacctut

SEQ ID NO: 63921 - DNA, 24 bp, Artificial Sequence
  Synthetic
gttgttaaggcacuggcaaaacut

SEQ ID NO: 63922 - DNA, 26 bp, Artificial Sequence
  Synthetic
tgttgctauctaggttagugaaggct

SEQ ID NO: 63923 - DNA, 28 bp, Artificial Sequence
  Synthetic
tcatttgtcttgccuttcttctgtcuaa

SEQ ID NO: 63924 - DNA, 28 bp, Artificial Sequence
  Synthetic
agcatgacacaaugggaagatuaaagaa

SEQ ID NO: 63925 - DNA, 27 bp, Artificial Sequence
  Synthetic
gtggacctgtaauatctttctgtgcua

SEQ ID NO: 63926 - DNA, 24 bp, Artificial Sequence
  Synthetic
gggaauggagcaaaacagtcttug

SEQ ID NO: 63927 - DNA, 28 bp, Artificial Sequence
  Synthetic
cuggttgacaagatuagaacaagaggaa

SEQ ID NO: 63928 - DNA, 22 bp, Artificial Sequence
  Synthetic
ttacaggtugcccatcttcucc

SEQ ID NO: 63929 - DNA, 22 bp, Artificial Sequence
  Synthetic
tgccctccutggtgtttcttuc

SEQ ID NO: 63930 - DNA, 25 bp, Artificial Sequence
  Synthetic
caagacaaaugcattcucacaccat

SEQ ID NO: 63931 - DNA, 24 bp, Artificial Sequence
  Synthetic
caautttgtgcuagggagaacgag

SEQ ID NO: 63932 - DNA, 23 bp, Artificial Sequence
  Synthetic
atctttuccaggagctcccuagt

SEQ ID NO: 63933 - DNA, 28 bp, Artificial Sequence
  Synthetic
tggaggaggtaugtttttgacaaatuga

SEQ ID NO: 63934 - DNA, 28 bp, Artificial Sequence
  Synthetic
cagaattcagugcactaucaaacacaat

SEQ ID NO: 63935 - DNA, 28 bp, Artificial Sequence
  Synthetic
cagtctaagattgaucgagacaagtcut

SEQ ID NO: 63936 - DNA, 22 bp, Artificial Sequence
  Synthetic
tgccatgtcutgacactcagut

SEQ ID NO: 63937 - DNA, 29 bp, Artificial Sequence
  Synthetic
cacattactgutctcattgtttuccacat

SEQ ID NO: 63938 - DNA, 21 bp, Artificial Sequence
  Synthetic
cttcgtcagauccatcgggut

SEQ ID NO: 63939 - DNA, 21 bp, Artificial Sequence
  Synthetic
gagtcacccccauctctctuc

SEQ ID NO: 63940 - DNA, 19 bp, Artificial Sequence
  Synthetic
cccagcutgcttccuccat

SEQ ID NO: 63941 - DNA, 29 bp, Artificial Sequence
  Synthetic
cagtaagaagccuctaatctgtttuagca

SEQ ID NO: 63942 - DNA, 20 bp, Artificial Sequence
  Synthetic
cctcatuccacagccctgua

SEQ ID NO: 63943 - DNA, 21 bp, Artificial Sequence
  Synthetic
gggaguggagtgagugaggag

SEQ ID NO: 63944 - DNA, 21 bp, Artificial Sequence
  Synthetic
cctgaauccgcactctguacc

SEQ ID NO: 63945 - DNA, 23 bp, Artificial Sequence
  Synthetic
gcaggacacugatgttuccaaat

SEQ ID NO: 63946 - DNA, 25 bp, Artificial Sequence
  Synthetic
gtgagatccaucagtagtacaggua

SEQ ID NO: 63947 - DNA, 25 bp, Artificial Sequence
  Synthetic
cagtctcctguaattctcaggctug

SEQ ID NO: 63948 - DNA, 24 bp, Artificial Sequence
  Synthetic
gtttgcacauaaatcuccaaggca

SEQ ID NO: 63949 - DNA, 25 bp, Artificial Sequence
  Synthetic
ttgaaaccagagucctuaacaagca

SEQ ID NO: 63950 - DNA, 21 bp, Artificial Sequence
  Synthetic
gtggcaccucatcaccttuct

SEQ ID NO: 63951 - DNA, 20 bp, Artificial Sequence
  Synthetic
cguguccgagcaacaaggat

SEQ ID NO: 63952 - DNA, 21 bp, Artificial Sequence
  Synthetic
cctggtgcuttggtcaaugaa

SEQ ID NO: 63953 - DNA, 23 bp, Artificial Sequence
  Synthetic
gtagcuctgcttgtucacacact

SEQ ID NO: 63954 - DNA, 23 bp, Artificial Sequence
  Synthetic
cgctgtgcugttttcatcatcug

SEQ ID NO: 63955 - DNA, 21 bp, Artificial Sequence
  Synthetic
agagcacatgucatggtcgug

SEQ ID NO: 63956 - DNA, 22 bp, Artificial Sequence
  Synthetic
cagaagactgugaggaccauca

SEQ ID NO: 63957 - DNA, 22 bp, Artificial Sequence
  Synthetic
cccttattcugtccccaccuct

SEQ ID NO: 63958 - DNA, 22 bp, Artificial Sequence
  Synthetic
caaguggaagcaaccgttctuc

SEQ ID NO: 63959 - DNA, 25 bp, Artificial Sequence
  Synthetic
gtttcattuccagcaggtaagctut

SEQ ID NO: 63960 - DNA, 21 bp, Artificial Sequence
  Synthetic
tctagaacccugacugggcat

SEQ ID NO: 63961 - DNA, 22 bp, Artificial Sequence
  Synthetic
gcucctcucccaagaacaacag

SEQ ID NO: 63962 - DNA, 23 bp, Artificial Sequence
  Synthetic
ggaggttcaugttttgtgcctug

SEQ ID NO: 63963 - DNA, 28 bp, Artificial Sequence
  Synthetic
ctgaggatacutaaaggtacugaaaggt

SEQ ID NO: 63964 - DNA, 27 bp, Artificial Sequence
  Synthetic
ccgataatctaucacactaggtgctut

SEQ ID NO: 63965 - DNA, 20 bp, Artificial Sequence
  Synthetic
agtacaccugcaaggctguc

SEQ ID NO: 63966 - DNA, 20 bp, Artificial Sequence
  Synthetic
cctgaggcccacguatctug

SEQ ID NO: 63967 - DNA, 21 bp, Artificial Sequence
  Synthetic
agguggagaacagcgagaaug

SEQ ID NO: 63968 - DNA, 21 bp, Artificial Sequence
  Synthetic
tccactgcuggagcugaaaat

SEQ ID NO: 63969 - DNA, 26 bp, Artificial Sequence
  Synthetic
gcttctgacctuaacttagtgcctut

SEQ ID NO: 63970 - DNA, 20 bp, Artificial Sequence
  Synthetic
gggcgaaccucactaacgug

SEQ ID NO: 63971 - DNA, 23 bp, Artificial Sequence
  Synthetic
ctatagucggccacagagtccua

SEQ ID NO: 63972 - DNA, 28 bp, Artificial Sequence
  Synthetic
ggtgctgtatuacctgttgaaagtaugt

SEQ ID NO: 63973 - DNA, 29 bp, Artificial Sequence
  Synthetic
acacaaaagaugaaacaauggaagaacaa

SEQ ID NO: 63974 - DNA, 28 bp, Artificial Sequence
  Synthetic
tcttgtgctgcuttatccaattcuaact

SEQ ID NO: 63975 - DNA, 23 bp, Artificial Sequence
  Synthetic
catcataggcacugactcugcaa

SEQ ID NO: 63976 - DNA, 19 bp, Artificial Sequence
  Synthetic
cctgctucctgacgcugac

SEQ ID NO: 63977 - DNA, 20 bp, Artificial Sequence
  Synthetic
gccagcccugaatggacauc

SEQ ID NO: 63978 - DNA, 21 bp, Artificial Sequence
  Synthetic
tgtgggaaggccauccctaua

SEQ ID NO: 63979 - DNA, 23 bp, Artificial Sequence
  Synthetic
cggtgctucttgctgatauggat

SEQ ID NO: 63980 - DNA, 27 bp, Artificial Sequence
  Synthetic
gcaaaacagaaauacacatcugacact

SEQ ID NO: 63981 - DNA, 25 bp, Artificial Sequence
  Synthetic
ggattttgcugcttgtggaauagac

SEQ ID NO: 63982 - DNA, 26 bp, Artificial Sequence
  Synthetic
caggacagctuatctctgaaacauga

SEQ ID NO: 63983 - DNA, 27 bp, Artificial Sequence
  Synthetic
accctacttacuaaatgaagacuggga

SEQ ID NO: 63984 - DNA, 24 bp, Artificial Sequence
  Synthetic
ccggaataatuccttgctcgtgua

SEQ ID NO: 63985 - DNA, 28 bp, Artificial Sequence
  Synthetic
ccccagggcuattttatagagtauaggt

SEQ ID NO: 63986 - DNA, 28 bp, Artificial Sequence
  Synthetic
gattatccuaacccatcactcaugaaca

SEQ ID NO: 63987 - DNA, 26 bp, Artificial Sequence
  Synthetic
tttccagtguggtgtaaaggaatuca

SEQ ID NO: 63988 - DNA, 20 bp, Artificial Sequence
  Synthetic
gctcatuggctcacaucgca

SEQ ID NO: 63989 - DNA, 24 bp, Artificial Sequence
  Synthetic
gctgaagctagucagtcactcaua

SEQ ID NO: 63990 - DNA, 26 bp, Artificial Sequence
  Synthetic
agaatctagaguctggagtttugcct

SEQ ID NO: 63991 - DNA, 28 bp, Artificial Sequence
  Synthetic
ggtaacatatcauagtgggcttttcugt

SEQ ID NO: 63992 - DNA, 23 bp, Artificial Sequence
  Synthetic
gcaaatcaaaugtgggugaagca

SEQ ID NO: 63993 - DNA, 28 bp, Artificial Sequence
  Synthetic
actctaccugaattgcactauagcagat

SEQ ID NO: 63994 - DNA, 23 bp, Artificial Sequence
  Synthetic
cctcgutgaatgtcucaccaaga

SEQ ID NO: 63995 - DNA, 23 bp, Artificial Sequence
  Synthetic
ccagugcctcaatuaaccacaca

SEQ ID NO: 63996 - DNA, 27 bp, Artificial Sequence
  Synthetic
tcctcacattauaagcacttgggagua

SEQ ID NO: 63997 - DNA, 28 bp, Artificial Sequence
  Synthetic
ggaagtttgtaaucaaccctgtuaggat

SEQ ID NO: 63998 - DNA, 28 bp, Artificial Sequence
  Synthetic
cctggtgcuggaaaatcaacatttauag

SEQ ID NO: 63999 - DNA, 24 bp, Artificial Sequence
  Synthetic
cgagaccaaacutagctagcagut

SEQ ID NO: 64000 - DNA, 18 bp, Artificial Sequence
  Synthetic
cccccaucgagaggguca

SEQ ID NO: 64001 - DNA, 18 bp, Artificial Sequence
  Synthetic
ggccuggcgcagatttuc

SEQ ID NO: 64002 - DNA, 27 bp, Artificial Sequence
  Synthetic
cctgtgtugataatgtcauccaaacga

SEQ ID NO: 64003 - DNA, 24 bp, Artificial Sequence
  Synthetic
gggacaagaggaacaugaaacuca

SEQ ID NO: 64004 - DNA, 23 bp, Artificial Sequence
  Synthetic
cccaaggcaaugatggaatcugt

SEQ ID NO: 64005 - DNA, 18 bp, Artificial Sequence
  Synthetic
caggcccgcaaguacauc

SEQ ID NO: 64006 - DNA, 26 bp, Artificial Sequence
  Synthetic
agagtgagaaacucttcatgctugac

SEQ ID NO: 64007 - DNA, 28 bp, Artificial Sequence
  Synthetic
ggcagtgggauaagcctgatttaaauat

SEQ ID NO: 64008 - DNA, 24 bp, Artificial Sequence
  Synthetic
gcagaaaaatuggcacacacacua

SEQ ID NO: 64009 - DNA, 20 bp, Artificial Sequence
  Synthetic
gtgatcggautcccauggct

SEQ ID NO: 64010 - DNA, 27 bp, Artificial Sequence
  Synthetic
caatcccaauttccatucaggaaaaca

SEQ ID NO: 64011 - DNA, 25 bp, Artificial Sequence
  Synthetic
gcagcccagcaaauttccattatuc

SEQ ID NO: 64012 - DNA, 21 bp, Artificial Sequence
  Synthetic
ccctctgccaugacaggttua

SEQ ID NO: 64013 - DNA, 26 bp, Artificial Sequence
  Synthetic
actttcttugggaaggacaagucaat

SEQ ID NO: 64014 - DNA, 22 bp, Artificial Sequence
  Synthetic
tcccattcccugggaattccua

SEQ ID NO: 64015 - DNA, 23 bp, Artificial Sequence
  Synthetic
agcccagttucaagaaagagcut

SEQ ID NO: 64016 - DNA, 26 bp, Artificial Sequence
  Synthetic
caatacctgguatttagtggccaugt

SEQ ID NO: 64017 - DNA, 23 bp, Artificial Sequence
  Synthetic
cagcuctgcttucacaagacaaa

SEQ ID NO: 64018 - DNA, 28 bp, Artificial Sequence
  Synthetic
agcgtctatattutgctctttgaaauga

SEQ ID NO: 64019 - DNA, 27 bp, Artificial Sequence
  Synthetic
ttgttgauaattggaagaugcaggact

SEQ ID NO: 64020 - DNA, 29 bp, Artificial Sequence
  Synthetic
agaagaacutaaacagaaugagagcagaa

SEQ ID NO: 64021 - DNA, 22 bp, Artificial Sequence
  Synthetic
aggatgcccaucactctttugt

SEQ ID NO: 64022 - DNA, 23 bp, Artificial Sequence
  Synthetic
agttgtcagucctgcattucagt

SEQ ID NO: 64023 - DNA, 29 bp, Artificial Sequence
  Synthetic
attacaagtagacaugtgaagcugaagaa

SEQ ID NO: 64024 - DNA, 28 bp, Artificial Sequence
  Synthetic
aggagaaaguggagtttgtgaaauagac

SEQ ID NO: 64025 - DNA, 25 bp, Artificial Sequence
  Synthetic
ggtctgtaaucttcttcacctugct

SEQ ID NO: 64026 - DNA, 27 bp, Artificial Sequence
  Synthetic
ggttcatcagutcagtaacaagucaac

SEQ ID NO: 64027 - DNA, 28 bp, Artificial Sequence
  Synthetic
gcaaaactaaugtaaggacaugcaaaga

SEQ ID NO: 64028 - DNA, 23 bp, Artificial Sequence
  Synthetic
ggauagaggaggaggcactucag

SEQ ID NO: 64029 - DNA, 33 bp, Artificial Sequence
  Synthetic
tacattacttggugtacatttaatagacugaca

SEQ ID NO: 64030 - DNA, 29 bp, Artificial Sequence
  Synthetic
acaaggaagtatugaagatgaagctaugg

SEQ ID NO: 64031 - DNA, 23 bp, Artificial Sequence
  Synthetic
acatccugagggtaaggcuaaca

SEQ ID NO: 64032 - DNA, 27 bp, Artificial Sequence
  Synthetic
agcactttagguagagaagttugcaat

SEQ ID NO: 64033 - DNA, 28 bp, Artificial Sequence
  Synthetic
agcgtaataccaguctttttcctttuct

SEQ ID NO: 64034 - DNA, 26 bp, Artificial Sequence
  Synthetic
tagcagatguacttctgtcagtucac

SEQ ID NO: 64035 - DNA, 23 bp, Artificial Sequence
  Synthetic
tgttttactuctgcttgguggca

SEQ ID NO: 64036 - DNA, 28 bp, Artificial Sequence
  Synthetic
cagugacatugaccaagaaaacaacaat

SEQ ID NO: 64037 - DNA, 27 bp, Artificial Sequence
  Synthetic
caacaggtcaucttcagagtcaauact

SEQ ID NO: 64038 - DNA, 20 bp, Artificial Sequence
  Synthetic
gtacgtggugtcctgtguct

SEQ ID NO: 64039 - DNA, 17 bp, Artificial Sequence
  Synthetic
gctgcuctgcgagucct

SEQ ID NO: 64040 - DNA, 21 bp, Artificial Sequence
  Synthetic
ggctcugaaccgcatucaagt

SEQ ID NO: 64041 - DNA, 22 bp, Artificial Sequence
  Synthetic
cctacggutataacgccuaccc

SEQ ID NO: 64042 - DNA, 27 bp, Artificial Sequence
  Synthetic
ggtgaccattttuctgatgtgcattuc

SEQ ID NO: 64043 - DNA, 21 bp, Artificial Sequence
  Synthetic
tgttcatgcgcutacgaggut

SEQ ID NO: 64044 - DNA, 26 bp, Artificial Sequence
  Synthetic
atgacttgcagucttgtgatcugaat

SEQ ID NO: 64045 - DNA, 27 bp, Artificial Sequence
  Synthetic
tttccttcagggauatcaatgtucagg

SEQ ID NO: 64046 - DNA, 22 bp, Artificial Sequence
  Synthetic
acuctgaatgcaucaaccgcat

SEQ ID NO: 64047 - DNA, 25 bp, Artificial Sequence
  Synthetic
aagcaacugcaaagaggagaaagua

SEQ ID NO: 64048 - DNA, 22 bp, Artificial Sequence
  Synthetic
tcatccacaccutcggactgua

SEQ ID NO: 64049 - DNA, 26 bp, Artificial Sequence
  Synthetic
atccagttuggaaatgaaaagcaucc

SEQ ID NO: 64050 - DNA, 22 bp, Artificial Sequence
  Synthetic
aggcctagcaccutgataccua

SEQ ID NO: 64051 - DNA, 21 bp, Artificial Sequence
  Synthetic
cgaatcttcugcagctccauc

SEQ ID NO: 64052 - DNA, 24 bp, Artificial Sequence
  Synthetic
agtcauctttgtctucagcccaaa

SEQ ID NO: 64053 - DNA, 20 bp, Artificial Sequence
  Synthetic
gtcaccguagaggaccugga

SEQ ID NO: 64054 - DNA, 20 bp, Artificial Sequence
  Synthetic
gaaaagguggaggcuggact

SEQ ID NO: 64055 - DNA, 20 bp, Artificial Sequence
  Synthetic
ggcgaatucgactcctucgt

SEQ ID NO: 64056 - DNA, 18 bp, Artificial Sequence
  Synthetic
caccucgcctcacucaca

SEQ ID NO: 64057 - DNA, 19 bp, Artificial Sequence
  Synthetic
ccgctucgactcctucact

SEQ ID NO: 64058 - DNA, 19 bp, Artificial Sequence
  Synthetic
gccccucactcacctguca

SEQ ID NO: 64059 - DNA, 20 bp, Artificial Sequence
  Synthetic
gcagctucgactcttucacc

SEQ ID NO: 64060 - DNA, 24 bp, Artificial Sequence
  Synthetic
cutgttcgcaatuccaaacagagt

SEQ ID NO: 64061 - DNA, 22 bp, Artificial Sequence
  Synthetic
ccagttugacaccttcatgguc

SEQ ID NO: 64062 - DNA, 22 bp, Artificial Sequence
  Synthetic
ccacccucttctgtgaucacct

SEQ ID NO: 64063 - DNA, 22 bp, Artificial Sequence
  Synthetic
cagtcctugcttcagagguaca

SEQ ID NO: 64064 - DNA, 22 bp, Artificial Sequence
  Synthetic
gcccuggguaagagaagagagt

SEQ ID NO: 64065 - DNA, 28 bp, Artificial Sequence
  Synthetic
ttctctaatatctugtctgccttcucct

SEQ ID NO: 64066 - DNA, 21 bp, Artificial Sequence
  Synthetic
gggaactcagcutccttccug

SEQ ID NO: 64067 - DNA, 23 bp, Artificial Sequence
  Synthetic
cttcccacuccttgactctgtut

SEQ ID NO: 64068 - DNA, 22 bp, Artificial Sequence
  Synthetic
ggaagccuggagaactagguca

SEQ ID NO: 64069 - DNA, 23 bp, Artificial Sequence
  Synthetic
gcttgttcugacacttccctugt

SEQ ID NO: 64070 - DNA, 21 bp, Artificial Sequence
  Synthetic
agcacaaccaucccctcatuc

SEQ ID NO: 64071 - DNA, 24 bp, Artificial Sequence
  Synthetic
cacctgaccccuactcttttgtuc

SEQ ID NO: 64072 - DNA, 22 bp, Artificial Sequence
  Synthetic
ggcagaugaaggtaaucacgga

SEQ ID NO: 64073 - DNA, 28 bp, Artificial Sequence
  Synthetic
caagcttctactuaacgccttaacagua

SEQ ID NO: 64074 - DNA, 19 bp, Artificial Sequence
  Synthetic
aggguacaucagccccaga

SEQ ID NO: 64075 - DNA, 20 bp, Artificial Sequence
  Synthetic
tccccagagccucctaacut

SEQ ID NO: 64076 - DNA, 28 bp, Artificial Sequence
  Synthetic
agaaggtgaaugaaggtgaaaaagtcut

SEQ ID NO: 64077 - DNA, 28 bp, Artificial Sequence
  Synthetic
tgccataatttctautaggctgggttut

SEQ ID NO: 64078 - DNA, 30 bp, Artificial Sequence
  Synthetic
gcatgttguaaaaattcctacatucaagga

SEQ ID NO: 64079 - DNA, 26 bp, Artificial Sequence
  Synthetic
aagcttactgguaccatccaaaauga

SEQ ID NO: 64080 - DNA, 28 bp, Artificial Sequence
  Synthetic
tctttcgaguattactattucccagcct

SEQ ID NO: 64081 - DNA, 24 bp, Artificial Sequence
  Synthetic
actctggttcagucagcttcctua

SEQ ID NO: 64082 - DNA, 28 bp, Artificial Sequence
  Synthetic
aactggatauaacttctgaatugcccaa

SEQ ID NO: 64083 - DNA, 28 bp, Artificial Sequence
  Synthetic
gatggcaagagugatggattacaaauaa

SEQ ID NO: 64084 - DNA, 24 bp, Artificial Sequence
  Synthetic
cataatcagatcuggctgggtuca

SEQ ID NO: 64085 - DNA, 24 bp, Artificial Sequence
  Synthetic
ctgaaacauggcaaggtgtugaag

SEQ ID NO: 64086 - DNA, 28 bp, Artificial Sequence
  Synthetic
tccctcaaaucccacatatcatctauca

SEQ ID NO: 64087 - DNA, 24 bp, Artificial Sequence
  Synthetic
ccttccauaagcatctgagcucac

SEQ ID NO: 64088 - DNA, 23 bp, Artificial Sequence
  Synthetic
gcagcttcuccctctcattagug

SEQ ID NO: 64089 - DNA, 28 bp, Artificial Sequence
  Synthetic
agatttggagtgaugtcctcagttcuat

SEQ ID NO: 64090 - DNA, 21 bp, Artificial Sequence
  Synthetic
aaggtccacacgugttcguag

SEQ ID NO: 64091 - DNA, 28 bp, Artificial Sequence
  Synthetic
tgaggatgaaacuctgtaaggtggatua

SEQ ID NO: 64092 - DNA, 21 bp, Artificial Sequence
  Synthetic
gctccaugggacuggaaagag

SEQ ID NO: 64093 - DNA, 21 bp, Artificial Sequence
  Synthetic
tggagccaugtactaccugga

SEQ ID NO: 64094 - DNA, 21 bp, Artificial Sequence
  Synthetic
ccagctcaugagggaccauaa

SEQ ID NO: 64095 - DNA, 29 bp, Artificial Sequence
  Synthetic
tgtatatggcuggattatcacuggaagat

SEQ ID NO: 64096 - DNA, 25 bp, Artificial Sequence
  Synthetic
tgataacttgucggatacagcctug

SEQ ID NO: 64097 - DNA, 27 bp, Artificial Sequence
  Synthetic
atgtaacagaaaaggccuccacuaaaa

SEQ ID NO: 64098 - DNA, 26 bp, Artificial Sequence
  Synthetic
ttccttcuccaggacaaactucaaaa

SEQ ID NO: 64099 - DNA, 32 bp, Artificial Sequence
  Synthetic
actagtgttaccutttcaaatgaatgcuaact

SEQ ID NO: 64100 - DNA, 21 bp, Artificial Sequence
  Synthetic
agagacaucctggtggugagt

SEQ ID NO: 64101 - DNA, 22 bp, Artificial Sequence
  Synthetic
tcagctccuatggacttcugct

SEQ ID NO: 64102 - DNA, 28 bp, Artificial Sequence
  Synthetic
gtgaagttugaacagtgtatgagaucct

SEQ ID NO: 64103 - DNA, 28 bp, Artificial Sequence
  Synthetic
ccttcacaaacuatctcttcagactuga

SEQ ID NO: 64104 - DNA, 25 bp, Artificial Sequence
  Synthetic
agctgccutagttacataaugagca

SEQ ID NO: 64105 - DNA, 28 bp, Artificial Sequence
  Synthetic
ctctgaaccutgcaaaaataauggaaca

SEQ ID NO: 64106 - DNA, 28 bp, Artificial Sequence
  Synthetic
agttttctguacctgaaattgtugacca

SEQ ID NO: 64107 - DNA, 28 bp, Artificial Sequence
  Synthetic
gattgctcatccauactcatctcauact

SEQ ID NO: 64108 - DNA, 28 bp, Artificial Sequence
  Synthetic
acattgttaccaugaaacagttcgauga

SEQ ID NO: 64109 - DNA, 26 bp, Artificial Sequence
  Synthetic
gctggcaacaugtatctggaaaauac

SEQ ID NO: 64110 - DNA, 29 bp, Artificial Sequence
  Synthetic
gcttgctcaucccaattttctcttttaut

SEQ ID NO: 64111 - DNA, 23 bp, Artificial Sequence
  Synthetic
agttcugccaggaatctcugagt

SEQ ID NO: 64112 - DNA, 27 bp, Artificial Sequence
  Synthetic
gccttcatggtuttattaacccccaua

SEQ ID NO: 64113 - DNA, 26 bp, Artificial Sequence
  Synthetic
ccacccaauaaggttcacttgaaaut

SEQ ID NO: 64114 - DNA, 28 bp, Artificial Sequence
  Synthetic
agtattaagguactgaagauaggcaggt

SEQ ID NO: 64115 - DNA, 22 bp, Artificial Sequence
  Synthetic
cattgcagguggcttacaagut

SEQ ID NO: 64116 - DNA, 21 bp, Artificial Sequence
  Synthetic
acaggaccacgagugtgatuc

SEQ ID NO: 64117 - DNA, 25 bp, Artificial Sequence
  Synthetic
agtcttccucctgaaaaacgucaaa

SEQ ID NO: 64118 - DNA, 24 bp, Artificial Sequence
  Synthetic
gagacggtuacagggaaaaacugt

SEQ ID NO: 64119 - DNA, 27 bp, Artificial Sequence
  Synthetic
cttcccataaaguagcttgccaattut

SEQ ID NO: 64120 - DNA, 27 bp, Artificial Sequence
  Synthetic
gcgtattaatgutgccagtttcaugat

SEQ ID NO: 64121 - DNA, 23 bp, Artificial Sequence
  Synthetic
tctctctgaaguccggaatcugt

SEQ ID NO: 64122 - DNA, 22 bp, Artificial Sequence
  Synthetic
agacactaugcccctctuggat

SEQ ID NO: 64123 - DNA, 28 bp, Artificial Sequence
  Synthetic
caaaacaaagacaaaaugtggcagtaut

SEQ ID NO: 64124 - DNA, 25 bp, Artificial Sequence
  Synthetic
ggtttgcattugtcaatgtgcatuc

SEQ ID NO: 64125 - DNA, 21 bp, Artificial Sequence
  Synthetic
gcaccagaugcuaagccacaa

SEQ ID NO: 64126 - DNA, 19 bp, Artificial Sequence
  Synthetic
gccataaugggcgctucct

SEQ ID NO: 64127 - DNA, 21 bp, Artificial Sequence
  Synthetic
ggtcagaagaacugcctgucc

SEQ ID NO: 64128 - DNA, 27 bp, Artificial Sequence
  Synthetic
atgctttattguaatctcccaaaucct

SEQ ID NO: 64129 - DNA, 26 bp, Artificial Sequence
  Synthetic
tgtgccaugaaaaggctaatagaguc

SEQ ID NO: 64130 - DNA, 24 bp, Artificial Sequence
  Synthetic
gttacttctaucgtgtgcctgugt

SEQ ID NO: 64131 - DNA, 28 bp, Artificial Sequence
  Synthetic
gctttcttcgaaugctttaactaagucc

SEQ ID NO: 64132 - DNA, 23 bp, Artificial Sequence
  Synthetic
aagctaaattgutggcgggttuc

SEQ ID NO: 64133 - DNA, 20 bp, Artificial Sequence
  Synthetic
ccctcuaccaacugcggaat

SEQ ID NO: 64134 - DNA, 21 bp, Artificial Sequence
  Synthetic
cccccgcacacacuaaagtua

SEQ ID NO: 64135 - DNA, 28 bp, Artificial Sequence
  Synthetic
gtttcctaaactuccaccacaaacauag

SEQ ID NO: 64136 - DNA, 22 bp, Artificial Sequence
  Synthetic
cttttuccaggcagaagcugac

SEQ ID NO: 64137 - DNA, 28 bp, Artificial Sequence
  Synthetic
tgttcttaacugcaaactggaatcugat

SEQ ID NO: 64138 - DNA, 27 bp, Artificial Sequence
  Synthetic
agaataaagtgcautgtatgcccucat

SEQ ID NO: 64139 - DNA, 27 bp, Artificial Sequence
  Synthetic
gcttgtgctuctttttccgataauact

SEQ ID NO: 64140 - DNA, 24 bp, Artificial Sequence
  Synthetic
ggtattgagugttcttcccaugga

SEQ ID NO: 64141 - DNA, 20 bp, Artificial Sequence
  Synthetic
cttgccugcagcguagagat

SEQ ID NO: 64142 - DNA, 23 bp, Artificial Sequence
  Synthetic
ggacagcagacagauggtaugaa

SEQ ID NO: 64143 - DNA, 29 bp, Artificial Sequence
  Synthetic
ggtcactacgutagctcacatttuaaagt

SEQ ID NO: 64144 - DNA, 22 bp, Artificial Sequence
  Synthetic
ttguttagaaccgugaggccat

SEQ ID NO: 64145 - DNA, 27 bp, Artificial Sequence
  Synthetic
ccccagatattcuagacagttcagtut

SEQ ID NO: 64146 - DNA, 26 bp, Artificial Sequence
  Synthetic
gtgtgtgatcauctctttgagguact

SEQ ID NO: 64147 - DNA, 28 bp, Artificial Sequence
  Synthetic
cattgagctgcuctatttcttcttcuct

SEQ ID NO: 64148 - DNA, 27 bp, Artificial Sequence
  Synthetic
tttttaccttccuttgttacagggugt

SEQ ID NO: 64149 - DNA, 27 bp, Artificial Sequence
  Synthetic
ctgtttgtguaaccatatgagcttguc

SEQ ID NO: 64150 - DNA, 23 bp, Artificial Sequence
  Synthetic
tctgagaaaauggtggttgcuga

SEQ ID NO: 64151 - DNA, 26 bp, Artificial Sequence
  Synthetic
actcccactccutgttacatgtttut

SEQ ID NO: 64152 - DNA, 27 bp, Artificial Sequence
  Synthetic
ttgattttctcguaccaggatcugaag

SEQ ID NO: 64153 - DNA, 28 bp, Artificial Sequence
  Synthetic
ccgaattcgaacuttctcagatucaaga

SEQ ID NO: 64154 - DNA, 26 bp, Artificial Sequence
  Synthetic
ggttactttaggugcagaaaagacug

SEQ ID NO: 64155 - DNA, 26 bp, Artificial Sequence
  Synthetic
acaattccaggcaggutttctcauat

SEQ ID NO: 64156 - DNA, 22 bp, Artificial Sequence
  Synthetic
tgtgaactcuggtgggtcugat

SEQ ID NO: 64157 - DNA, 29 bp, Artificial Sequence
  Synthetic
gcacaaaagaaccautgattuacaaaagg

SEQ ID NO: 64158 - DNA, 27 bp, Artificial Sequence
  Synthetic
gtgcacattcatutctactttggacuc

SEQ ID NO: 64159 - DNA, 27 bp, Artificial Sequence
  Synthetic
agtgaattgatcutttcgtctgtuggt

SEQ ID NO: 64160 - DNA, 26 bp, Artificial Sequence
  Synthetic
cttagtgaaatgaugggtctcccaut

SEQ ID NO: 64161 - DNA, 24 bp, Artificial Sequence
  Synthetic
ctgtcaggcauattcagctttugg

SEQ ID NO: 64162 - DNA, 22 bp, Artificial Sequence
  Synthetic
tccaaccagagugcagugaaag

SEQ ID NO: 64163 - DNA, 27 bp, Artificial Sequence
  Synthetic
ggcgggaaattutagatattgctgtug

SEQ ID NO: 64164 - DNA, 28 bp, Artificial Sequence
  Synthetic
gaacaatacagcugaagaggattcugaa

SEQ ID NO: 64165 - DNA, 24 bp, Artificial Sequence
  Synthetic
acctcatccuggacatcaagtuct

SEQ ID NO: 64166 - DNA, 27 bp, Artificial Sequence
  Synthetic
aaggttgttcaugtcaatggataugga

SEQ ID NO: 64167 - DNA, 25 bp, Artificial Sequence
  Synthetic
cgtgatuccaggaaaaggaguaact

SEQ ID NO: 64168 - DNA, 20 bp, Artificial Sequence
  Synthetic
catuggccgacgacccttua

SEQ ID NO: 64169 - DNA, 28 bp, Artificial Sequence
  Synthetic
ccccaaagccaauacatatttuaagcat

SEQ ID NO: 64170 - DNA, 24 bp, Artificial Sequence
  Synthetic
gaacagaacugaaactgacucgga

SEQ ID NO: 64171 - DNA, 27 bp, Artificial Sequence
  Synthetic
aatgcagaatgagauggtggtgaauat

SEQ ID NO: 64172 - DNA, 28 bp, Artificial Sequence
  Synthetic
cactagaugaccaggaaauagagaggaa

SEQ ID NO: 64173 - DNA, 25 bp, Artificial Sequence
  Synthetic
caatctatgaugggacagtctguct

SEQ ID NO: 64174 - DNA, 26 bp, Artificial Sequence
  Synthetic
ttcatugaaaagcccgacaaauaacc

SEQ ID NO: 64175 - DNA, 24 bp, Artificial Sequence
  Synthetic
cttctgtuggcatgtcaaugaact

SEQ ID NO: 64176 - DNA, 21 bp, Artificial Sequence
  Synthetic
acaaagugcggcagtacgaut

SEQ ID NO: 64177 - DNA, 23 bp, Artificial Sequence
  Synthetic
tgagcaaaugtcccatgucaaca

SEQ ID NO: 64178 - DNA, 22 bp, Artificial Sequence
  Synthetic
ccccaccucattctcattcugg

SEQ ID NO: 64179 - DNA, 22 bp, Artificial Sequence
  Synthetic
cgtggtcugtctttgcugaaca

SEQ ID NO: 64180 - DNA, 23 bp, Artificial Sequence
  Synthetic
tgcagaaaggaggauagugggaa

SEQ ID NO: 64181 - DNA, 25 bp, Artificial Sequence
  Synthetic
tcctagatugcaactctcagucaga

SEQ ID NO: 64182 - DNA, 19 bp, Artificial Sequence
  Synthetic
aagagauggcgcggaagut

SEQ ID NO: 64183 - DNA, 20 bp, Artificial Sequence
  Synthetic
ccagacgacgcutttcccut

SEQ ID NO: 64184 - DNA, 27 bp, Artificial Sequence
  Synthetic
cagagagaaaaggauctgcaaaaugaa

SEQ ID NO: 64185 - DNA, 30 bp, Artificial Sequence
  Synthetic
gcagguacagatttatgaatuagaggaaca

SEQ ID NO: 64186 - DNA, 21 bp, Artificial Sequence
  Synthetic
gcgacaaacacucacctcugt

SEQ ID NO: 64187 - DNA, 28 bp, Artificial Sequence
  Synthetic
ggctctctgatuccatttctaactgtuc

SEQ ID NO: 64188 - DNA, 31 bp, Artificial Sequence
  Synthetic
catctttctgagaauggagtatcatgatuca

SEQ ID NO: 64189 - DNA, 30 bp, Artificial Sequence
  Synthetic
tggtacttgattauaacaatgctcttuggt

SEQ ID NO: 64190 - DNA, 19 bp, Artificial Sequence
  Synthetic
ccccugaggagcacguaga

SEQ ID NO: 64191 - DNA, 22 bp, Artificial Sequence
  Synthetic
cttgaccuccaaccagguaagg

SEQ ID NO: 64192 - DNA, 20 bp, Artificial Sequence
  Synthetic
cagggacguctccuggagat

SEQ ID NO: 64193 - DNA, 20 bp, Artificial Sequence
  Synthetic
cccaguaacugcaccaacga

SEQ ID NO: 64194 - DNA, 22 bp, Artificial Sequence
  Synthetic
ccactcctugcttctcagauga

SEQ ID NO: 64195 - DNA, 25 bp, Artificial Sequence
  Synthetic
ggtgacagaggacaaugtgaugaag

SEQ ID NO: 64196 - DNA, 18 bp, Artificial Sequence
  Synthetic
caggtacucccgcaggut

SEQ ID NO: 64197 - DNA, 25 bp, Artificial Sequence
  Synthetic
gggtaguagaatggattucccaggt

SEQ ID NO: 64198 - DNA, 27 bp, Artificial Sequence
  Synthetic
catgcctgaaautttcttttgtugcag

SEQ ID NO: 64199 - DNA, 25 bp, Artificial Sequence
  Synthetic
cccaggccaugatgacuaaagaaat

SEQ ID NO: 64200 - DNA, 28 bp, Artificial Sequence
  Synthetic
ccataatuaaaagtagcacugggcagat

SEQ ID NO: 64201 - DNA, 23 bp, Artificial Sequence
  Synthetic
tcatcttugaacggtgttcuggt

SEQ ID NO: 64202 - DNA, 28 bp, Artificial Sequence
  Synthetic
aaaggaaaugagaaugaagacgagaaca

SEQ ID NO: 64203 - DNA, 26 bp, Artificial Sequence
  Synthetic
gtagaaacauggatggguagaagagg

SEQ ID NO: 64204 - DNA, 27 bp, Artificial Sequence
  Synthetic
ctataaaagggagauggtcactucaca

SEQ ID NO: 64205 - DNA, 28 bp, Artificial Sequence
  Synthetic
gttgaaaaatccuccaattaaggtgcut

SEQ ID NO: 64206 - DNA, 26 bp, Artificial Sequence
  Synthetic
tguaaggaggaagagagtttucacca

SEQ ID NO: 64207 - DNA, 24 bp, Artificial Sequence
  Synthetic
gcccagtaacautgtgtctctuca

SEQ ID NO: 64208 - DNA, 26 bp, Artificial Sequence
  Synthetic
tgtctcctcutacagatgagtucagg

SEQ ID NO: 64209 - DNA, 27 bp, Artificial Sequence
  Synthetic
aaaauggagacagugaagacacaagaa

SEQ ID NO: 64210 - DNA, 27 bp, Artificial Sequence
  Synthetic
tctugttcttgaatttuccgcaaagat

SEQ ID NO: 64211 - DNA, 24 bp, Artificial Sequence
  Synthetic
tgtattcaccuagtggtcctguga

SEQ ID NO: 64212 - DNA, 23 bp, Artificial Sequence
  Synthetic
ctctccccacugtctctcttcut

SEQ ID NO: 64213 - DNA, 20 bp, Artificial Sequence
  Synthetic
gacgccagacugttcugagt

SEQ ID NO: 64214 - DNA, 28 bp, Artificial Sequence
  Synthetic
agaactgttcatuactggcatctaagug

SEQ ID NO: 64215 - DNA, 27 bp, Artificial Sequence
  Synthetic
ggcttattagttgucttgccaattgut

SEQ ID NO: 64216 - DNA, 21 bp, Artificial Sequence
  Synthetic
ctgagtgtugcagcctgtcua

SEQ ID NO: 64217 - DNA, 24 bp, Artificial Sequence
  Synthetic
ggagaaagauggcctccugaaaaa

SEQ ID NO: 64218 - DNA, 22 bp, Artificial Sequence
  Synthetic
gcacaccatcutcctctgtgut

SEQ ID NO: 64219 - DNA, 22 bp, Artificial Sequence
  Synthetic
atgccagacutcttuggagacc

SEQ ID NO: 64220 - DNA, 23 bp, Artificial Sequence
  Synthetic
ggcugagatttggugagacacag

SEQ ID NO: 64221 - DNA, 24 bp, Artificial Sequence
  Synthetic
cgcttgttctutgctatcagagut

SEQ ID NO: 64222 - DNA, 27 bp, Artificial Sequence
  Synthetic
aacaagcagtutcaatttacctugacc

SEQ ID NO: 64223 - DNA, 22 bp, Artificial Sequence
  Synthetic
gctcttcucaacgggttcctut

SEQ ID NO: 64224 - DNA, 19 bp, Artificial Sequence
  Synthetic
ctctgguggaacgcucaac

SEQ ID NO: 64225 - DNA, 21 bp, Artificial Sequence
  Synthetic
caacaugaccccagggaugac

SEQ ID NO: 64226 - DNA, 21 bp, Artificial Sequence
  Synthetic
tggugcaaggaacgacacaut

SEQ ID NO: 64227 - DNA, 24 bp, Artificial Sequence
  Synthetic
tttcgaaggucattgaccauggat

SEQ ID NO: 64228 - DNA, 25 bp, Artificial Sequence
  Synthetic
tgtcgaugagacttttccaaugcaa

SEQ ID NO: 64229 - DNA, 22 bp, Artificial Sequence
  Synthetic
caaagauctuggcagggaggaa

SEQ ID NO: 64230 - DNA, 26 bp, Artificial Sequence
  Synthetic
tgtttgaggaugcgaaataagtguca

SEQ ID NO: 64231 - DNA, 28 bp, Artificial Sequence
  Synthetic
gggaaagcatgaaaugcagtatgtatua

SEQ ID NO: 64232 - DNA, 21 bp, Artificial Sequence
  Synthetic
cctccccaacccuctcctuag

SEQ ID NO: 64233 - DNA, 23 bp, Artificial Sequence
  Synthetic
ggtgtcaccauaggcaaccttut

SEQ ID NO: 64234 - DNA, 27 bp, Artificial Sequence
  Synthetic
tgcaccaucaatatttuacaacgcaaa

SEQ ID NO: 64235 - DNA, 28 bp, Artificial Sequence
  Synthetic
accagcatuaaaaagagaggagaaaguc

SEQ ID NO: 64236 - DNA, 21 bp, Artificial Sequence
  Synthetic
agggtgtacugctccatcugt

SEQ ID NO: 64237 - DNA, 26 bp, Artificial Sequence
  Synthetic
gcccgtcaaaacutacgtgaatttut

SEQ ID NO: 64238 - DNA, 23 bp, Artificial Sequence
  Synthetic
ctgtggaaacccuccatccauat

SEQ ID NO: 64239 - DNA, 23 bp, Artificial Sequence
  Synthetic
ccatgagggutggtgctgtttua

SEQ ID NO: 64240 - DNA, 20 bp, Artificial Sequence
  Synthetic
tggagcgauggtgauaagcc

SEQ ID NO: 64241 - DNA, 28 bp, Artificial Sequence
  Synthetic
gagacccaagaggauttatgttgtgaut

SEQ ID NO: 64242 - DNA, 22 bp, Artificial Sequence
  Synthetic
tcacaggattuctggaccccua

SEQ ID NO: 64243 - DNA, 21 bp, Artificial Sequence
  Synthetic
ggagcagcagguctctgauac

SEQ ID NO: 64244 - DNA, 20 bp, Artificial Sequence
  Synthetic
tgatgcgcaaaaucgtcguc

SEQ ID NO: 64245 - DNA, 25 bp, Artificial Sequence
  Synthetic
gcgtgggtautactctactctuggt

SEQ ID NO: 64246 - DNA, 21 bp, Artificial Sequence
  Synthetic
ctgtaggtcuctgaccacgut

SEQ ID NO: 64247 - DNA, 21 bp, Artificial Sequence
  Synthetic
gtggatccuggctgttucact

SEQ ID NO: 64248 - DNA, 23 bp, Artificial Sequence
  Synthetic
ctttcttctccutgccctttcug

SEQ ID NO: 64249 - DNA, 21 bp, Artificial Sequence
  Synthetic
atccagcagcaccucatagug

SEQ ID NO: 64250 - DNA, 22 bp, Artificial Sequence
  Synthetic
accaggatcagaugtccgtgua

SEQ ID NO: 64251 - DNA, 20 bp, Artificial Sequence
  Synthetic
tttttgcaccauccgctgug

SEQ ID NO: 64252 - DNA, 28 bp, Artificial Sequence
  Synthetic
attgtcaaactugtagtgtttgtttugt

SEQ ID NO: 64253 - DNA, 26 bp, Artificial Sequence
  Synthetic
ttttaaagctucctctatgcctuggt

SEQ ID NO: 64254 - DNA, 22 bp, Artificial Sequence
  Synthetic
aggtatgugagcgaaucccaac

SEQ ID NO: 64255 - DNA, 26 bp, Artificial Sequence
  Synthetic
tuaaattacugcaaaacggcacagaa

SEQ ID NO: 64256 - DNA, 23 bp, Artificial Sequence
  Synthetic
cccaautcaagtgauccgcaaag

SEQ ID NO: 64257 - DNA, 23 bp, Artificial Sequence
  Synthetic
tggttttggaggugtagcttcug

SEQ ID NO: 64258 - DNA, 23 bp, Artificial Sequence
  Synthetic
tgtcaggaaggutcagaccauct

SEQ ID NO: 64259 - DNA, 21 bp, Artificial Sequence
  Synthetic
cggcacccauctccatgatug

SEQ ID NO: 64260 - DNA, 21 bp, Artificial Sequence
  Synthetic
actgactctcucgtctgccut

SEQ ID NO: 64261 - DNA, 19 bp, Artificial Sequence
  Synthetic
gtaggugggcagggtgtug

SEQ ID NO: 64262 - DNA, 20 bp, Artificial Sequence
  Synthetic
ctggaccagcgccuaaagut

SEQ ID NO: 64263 - DNA, 21 bp, Artificial Sequence
  Synthetic
tctcgguaccaagtcctguca

SEQ ID NO: 64264 - DNA, 24 bp, Artificial Sequence
  Synthetic
gccttgtccuccatgttctcaaug

SEQ ID NO: 64265 - DNA, 22 bp, Artificial Sequence
  Synthetic
ccttggagugatccaggtucag

SEQ ID NO: 64266 - DNA, 20 bp, Artificial Sequence
  Synthetic
gcatccaccgguagctctuc

SEQ ID NO: 64267 - DNA, 21 bp, Artificial Sequence
  Synthetic
agaggacucctgcacaguaca

SEQ ID NO: 64268 - DNA, 22 bp, Artificial Sequence
  Synthetic
catctggatcucctggccatuc

SEQ ID NO: 64269 - DNA, 19 bp, Artificial Sequence
  Synthetic
gccacagccacaguagcut

SEQ ID NO: 64270 - DNA, 22 bp, Artificial Sequence
  Synthetic
caccguggacagtgagatugaa

SEQ ID NO: 64271 - DNA, 17 bp, Artificial Sequence
  Synthetic
gggugcggagccttguc

SEQ ID NO: 64272 - DNA, 21 bp, Artificial Sequence
  Synthetic
gcttccaugggctgattugga

SEQ ID NO: 64273 - DNA, 22 bp, Artificial Sequence
  Synthetic
aacaactauggcaaaggcugga

SEQ ID NO: 64274 - DNA, 21 bp, Artificial Sequence
  Synthetic
gugctggaacugacagagact

SEQ ID NO: 64275 - DNA, 18 bp, Artificial Sequence
  Synthetic
ggtagcgcucgcccuaac

SEQ ID NO: 64276 - DNA, 20 bp, Artificial Sequence
  Synthetic
cctgggcugagttccagtug

SEQ ID NO: 64277 - DNA, 19 bp, Artificial Sequence
  Synthetic
ccacccucggaactcuggt

SEQ ID NO: 64278 - DNA, 20 bp, Artificial Sequence
  Synthetic
ggttucacacggcacttugt

SEQ ID NO: 64279 - DNA, 25 bp, Artificial Sequence
  Synthetic
tgtaaattgcugcgttgatcttguc

SEQ ID NO: 64280 - DNA, 21 bp, Artificial Sequence
  Synthetic
gagaggctguccattccctug

SEQ ID NO: 64281 - DNA, 22 bp, Artificial Sequence
  Synthetic
ccagcccacaucatgggaatut

SEQ ID NO: 64282 - DNA, 20 bp, Artificial Sequence
  Synthetic
caaccuggagaagcugcact

SEQ ID NO: 64283 - DNA, 20 bp, Artificial Sequence
  Synthetic
gtugacagaggcaccacuca

SEQ ID NO: 64284 - DNA, 19 bp, Artificial Sequence
  Synthetic
gcttccugcagucccgaaa

SEQ ID NO: 64285 - DNA, 21 bp, Artificial Sequence
  Synthetic
gtctagcuggcagttgaggua

SEQ ID NO: 64286 - DNA, 22 bp, Artificial Sequence
  Synthetic
ctccucaagtccucagagggat

SEQ ID NO: 64287 - DNA, 22 bp, Artificial Sequence
  Synthetic
gctgcagggauggaagaagaug

SEQ ID NO: 64288 - DNA, 26 bp, Artificial Sequence
  Synthetic
ctgttttactgacgutgatagctgug

SEQ ID NO: 64289 - DNA, 28 bp, Artificial Sequence
  Synthetic
aagtgccacucagaaaatctagcttuaa

SEQ ID NO: 64290 - DNA, 28 bp, Artificial Sequence
  Synthetic
ggttttgatuccacatctggtgatuaga

SEQ ID NO: 64291 - DNA, 29 bp, Artificial Sequence
  Synthetic
gtaccctcauaggcaaaauaaggaagaat

SEQ ID NO: 64292 - DNA, 27 bp, Artificial Sequence
  Synthetic
gaaaattcttcutgccatatgugagca

SEQ ID NO: 64293 - DNA, 28 bp, Artificial Sequence
  Synthetic
gctcctccuaagccactttttatatcut

SEQ ID NO: 64294 - DNA, 26 bp, Artificial Sequence
  Synthetic
ctatatgtagaggcugttggaagcug

SEQ ID NO: 64295 - DNA, 24 bp, Artificial Sequence
  Synthetic
tactcaccaaucttctaccagugt

SEQ ID NO: 64296 - DNA, 27 bp, Artificial Sequence
  Synthetic
tttctgttaagcagucactaccatugt

SEQ ID NO: 64297 - DNA, 23 bp, Artificial Sequence
  Synthetic
gcugtaaagugagcagcacaaga

SEQ ID NO: 64298 - DNA, 25 bp, Artificial Sequence
  Synthetic
agaaggtccugttgtcagttttuca

SEQ ID NO: 64299 - DNA, 22 bp, Artificial Sequence
  Synthetic
gcctgctguatgagcaaatuca

SEQ ID NO: 64300 - DNA, 20 bp, Artificial Sequence
  Synthetic
gguagagcaggtcguggagt

SEQ ID NO: 64301 - DNA, 27 bp, Artificial Sequence
  Synthetic
cgcttccaccguaaaaattaugagaaa

SEQ ID NO: 64302 - DNA, 28 bp, Artificial Sequence
  Synthetic
accaagggtcautttctttaagaaugga

SEQ ID NO: 64303 - DNA, 23 bp, Artificial Sequence
  Synthetic
cagtgggaagacautccacaaug

SEQ ID NO: 64304 - DNA, 24 bp, Artificial Sequence
  Synthetic
gaggatucagaacccaaucaggaa

SEQ ID NO: 64305 - DNA, 24 bp, Artificial Sequence
  Synthetic
ggagaautttagcgtuggacagag

SEQ ID NO: 64306 - DNA, 27 bp, Artificial Sequence
  Synthetic
gagtcaaaggcuaaatcctaaggcaua

SEQ ID NO: 64307 - DNA, 29 bp, Artificial Sequence
  Synthetic
ctatgtgtgtguaacttctgtttctccut

SEQ ID NO: 64308 - DNA, 25 bp, Artificial Sequence
  Synthetic
gttccttctcutaggacactuccat

SEQ ID NO: 64309 - DNA, 26 bp, Artificial Sequence
  Synthetic
actcacaaautacagtatcugacgca

SEQ ID NO: 64310 - DNA, 21 bp, Artificial Sequence
  Synthetic
ctcgugccacacagattcuct

SEQ ID NO: 64311 - DNA, 21 bp, Artificial Sequence
  Synthetic
actgttggccaguagacagut

SEQ ID NO: 64312 - DNA, 26 bp, Artificial Sequence
  Synthetic
ctgttggaaataugctagcacactut

SEQ ID NO: 64313 - DNA, 28 bp, Artificial Sequence
  Synthetic
atgaacattgttugctatacttgcagug

SEQ ID NO: 64314 - DNA, 29 bp, Artificial Sequence
  Synthetic
gcctattugaacaactcataaaacugcat

SEQ ID NO: 64315 - DNA, 25 bp, Artificial Sequence
  Synthetic
gctggaccuctttgtatttcuggaa

SEQ ID NO: 64316 - DNA, 33 bp, Artificial Sequence
  Synthetic
tatttaaggagatuacacttgatgtatcucaca

SEQ ID NO: 64317 - DNA, 24 bp, Artificial Sequence
  Synthetic
gcacatgaagcacaauttcctcut

SEQ ID NO: 64318 - DNA, 28 bp, Artificial Sequence
  Synthetic
tggacttagagutggtcaaactgtuaag

SEQ ID NO: 64319 - DNA, 27 bp, Artificial Sequence
  Synthetic
ttctttctaugccacgttaatgcttug

SEQ ID NO: 64320 - DNA, 26 bp, Artificial Sequence
  Synthetic
ctcttcctgagcaugagaaagaauga

SEQ ID NO: 64321 - DNA, 23 bp, Artificial Sequence
  Synthetic
ggaagaaagcugcagcatuacac

SEQ ID NO: 64322 - DNA, 21 bp, Artificial Sequence
  Synthetic
cttgtgtccaccuccactgut

SEQ ID NO: 64323 - DNA, 25 bp, Artificial Sequence
  Synthetic
caaaagaggagutgaaggtgccuat

SEQ ID NO: 64324 - DNA, 22 bp, Artificial Sequence
  Synthetic
acaggacaagacautgcaugct

SEQ ID NO: 64325 - DNA, 23 bp, Artificial Sequence
  Synthetic
agaatcccucttcttccuccgat

SEQ ID NO: 64326 - DNA, 25 bp, Artificial Sequence
  Synthetic
ctcagaaagaccccutaaactguca

SEQ ID NO: 64327 - DNA, 26 bp, Artificial Sequence
  Synthetic
agtctttgaugcgaagaaaacgttuc

SEQ ID NO: 64328 - DNA, 21 bp, Artificial Sequence
  Synthetic
gatcctccaagcucccactut

SEQ ID NO: 64329 - DNA, 25 bp, Artificial Sequence
  Synthetic
accattctgttugcttctctctcuc

SEQ ID NO: 64330 - DNA, 20 bp, Artificial Sequence
  Synthetic
cagccctcutaccgtctcuc

SEQ ID NO: 64331 - DNA, 19 bp, Artificial Sequence
  Synthetic
gcagaacacugcccggtut

SEQ ID NO: 64332 - DNA, 21 bp, Artificial Sequence
  Synthetic
tcctgctccucatggatguga

SEQ ID NO: 64333 - DNA, 21 bp, Artificial Sequence
  Synthetic
agtcctuggcccaatctctug

SEQ ID NO: 64334 - DNA, 17 bp, Artificial Sequence
  Synthetic
gggcagcugcacaguct

SEQ ID NO: 64335 - DNA, 17 bp, Artificial Sequence
  Synthetic
cctcaccuccgcgaugt

SEQ ID NO: 64336 - DNA, 25 bp, Artificial Sequence
  Synthetic
aagaagtaatgcugatccaggctut

SEQ ID NO: 64337 - DNA, 28 bp, Artificial Sequence
  Synthetic
caagagtgactautactgagcggaauat

SEQ ID NO: 64338 - DNA, 25 bp, Artificial Sequence
  Synthetic
cctgaattugaaaccaagugcaaca

SEQ ID NO: 64339 - DNA, 28 bp, Artificial Sequence
  Synthetic
ggccaatctgacaugtctgatacttuaa

SEQ ID NO: 64340 - DNA, 21 bp, Artificial Sequence
  Synthetic
gtgctggaacautccctcucc

SEQ ID NO: 64341 - DNA, 21 bp, Artificial Sequence
  Synthetic
agaggacaucagcugcaacac

SEQ ID NO: 64342 - DNA, 21 bp, Artificial Sequence
  Synthetic
ctgctggcutacctggguaat

SEQ ID NO: 64343 - DNA, 25 bp, Artificial Sequence
  Synthetic
cagcttgttcuctcttcctcttucc

SEQ ID NO: 64344 - DNA, 21 bp, Artificial Sequence
  Synthetic
ctccttaccugctgggugaag

SEQ ID NO: 64345 - DNA, 22 bp, Artificial Sequence
  Synthetic
ttgtccucagagcagaacctug

SEQ ID NO: 64346 - DNA, 33 bp, Artificial Sequence
  Synthetic
tutttaaattatctgttucaggaagaagaacga

SEQ ID NO: 64347 - DNA, 26 bp, Artificial Sequence
  Synthetic
cgcacgccaauaaagacataugaaaa

SEQ ID NO: 64348 - DNA, 25 bp, Artificial Sequence
  Synthetic
caagatgtauctgggtguacaacct

SEQ ID NO: 64349 - DNA, 28 bp, Artificial Sequence
  Synthetic
gaaagagagguagatttcaatggctuct

SEQ ID NO: 64350 - DNA, 28 bp, Artificial Sequence
  Synthetic
tgagctcagtauggaaagaaataacuct

SEQ ID NO: 64351 - DNA, 25 bp, Artificial Sequence
  Synthetic
tcactttgcauatgccatacaugga

SEQ ID NO: 64352 - DNA, 24 bp, Artificial Sequence
  Synthetic
ccccagacacutaccaucacaaaa

SEQ ID NO: 64353 - DNA, 24 bp, Artificial Sequence
  Synthetic
gaggatgtugagtgtagguaacgg

SEQ ID NO: 64354 - DNA, 22 bp, Artificial Sequence
  Synthetic
cgtctgtgaugggaactcctug

SEQ ID NO: 64355 - DNA, 27 bp, Artificial Sequence
  Synthetic
ccaaacttatggaugttctggtgttut

SEQ ID NO: 64356 - DNA, 28 bp, Artificial Sequence
  Synthetic
cattggttcucacaaatagtaggtgugt

SEQ ID NO: 64357 - DNA, 23 bp, Artificial Sequence
  Synthetic
gggaaaggugattgcatttgcuc

SEQ ID NO: 64358 - DNA, 20 bp, Artificial Sequence
  Synthetic
gccccutcctctcugagagt

SEQ ID NO: 64359 - DNA, 18 bp, Artificial Sequence
  Synthetic
gcatgacugcgaccugct

SEQ ID NO: 64360 - DNA, 20 bp, Artificial Sequence
  Synthetic
gcttctgcagcugcttctug

SEQ ID NO: 64361 - DNA, 22 bp, Artificial Sequence
  Synthetic
tgugaggactugaccagaccat

SEQ ID NO: 64362 - DNA, 20 bp, Artificial Sequence
  Synthetic
cccttuctgcgguacaggac

SEQ ID NO: 64363 - DNA, 25 bp, Artificial Sequence
  Synthetic
gctggtcuccagtagtattgtucac

SEQ ID NO: 64364 - DNA, 22 bp, Artificial Sequence
  Synthetic
ggacauggauggagcaagaaca

SEQ ID NO: 64365 - DNA, 20 bp, Artificial Sequence
  Synthetic
ggctctugcagacagugacc

SEQ ID NO: 64366 - DNA, 28 bp, Artificial Sequence
  Synthetic
cattcctttgagutagatgaaacugcat

SEQ ID NO: 64367 - DNA, 25 bp, Artificial Sequence
  Synthetic
acaugaagugacagaagcacagaag

SEQ ID NO: 64368 - DNA, 27 bp, Artificial Sequence
  Synthetic
acagtgataucagatgagtcugcagat

SEQ ID NO: 64369 - DNA, 23 bp, Artificial Sequence
  Synthetic
ttttagtcucagctguccccaac

SEQ ID NO: 64370 - DNA, 27 bp, Artificial Sequence
  Synthetic
gaaaggattagucttcagcttuacaga

SEQ ID NO: 64371 - DNA, 26 bp, Artificial Sequence
  Synthetic
ggaaagacaaaccucctccaaatgut

SEQ ID NO: 64372 - DNA, 28 bp, Artificial Sequence
  Synthetic
gctaacagguaaagtttguaggagacaa

SEQ ID NO: 64373 - DNA, 24 bp, Artificial Sequence
  Synthetic
gtcttatcuggaggcaccactaug

SEQ ID NO: 64374 - DNA, 21 bp, Artificial Sequence
  Synthetic
gccatttccuagatcgcugga

SEQ ID NO: 64375 - DNA, 19 bp, Artificial Sequence
  Synthetic
ccugcagaacccccugaag

SEQ ID NO: 64376 - DNA, 22 bp, Artificial Sequence
  Synthetic
tggaggcugaggtuaggaaagt

SEQ ID NO: 64377 - DNA, 28 bp, Artificial Sequence
  Synthetic
tgactcttctugtttttggtcctucaat

SEQ ID NO: 64378 - DNA, 25 bp, Artificial Sequence
  Synthetic
ttcatgaagacaaacucttggguag

SEQ ID NO: 64379 - DNA, 27 bp, Artificial Sequence
  Synthetic
accagattctgutctccttcaaatuca

SEQ ID NO: 64380 - DNA, 21 bp, Artificial Sequence
  Synthetic
cccaugcccttctgtuacaca

SEQ ID NO: 64381 - DNA, 24 bp, Artificial Sequence
  Synthetic
gtcatgctgtutagtcactgcuct

SEQ ID NO: 64382 - DNA, 20 bp, Artificial Sequence
  Synthetic
ccgagagtugaggcgaagut

SEQ ID NO: 64383 - DNA, 17 bp, Artificial Sequence
  Synthetic
aggcgcutcacgaucgg

SEQ ID NO: 64384 - DNA, 28 bp, Artificial Sequence
  Synthetic
ggctgtattguccttatcatcagaaucc

SEQ ID NO: 64385 - DNA, 20 bp, Artificial Sequence
  Synthetic
acagauctcuggccagcaac

SEQ ID NO: 64386 - DNA, 24 bp, Artificial Sequence
  Synthetic
gagggctgacuataagcctctgua

SEQ ID NO: 64387 - DNA, 25 bp, Artificial Sequence
  Synthetic
atttgcctaugaacgtttgucacac

SEQ ID NO: 64388 - DNA, 20 bp, Artificial Sequence
  Synthetic
ggccugactcggtauggaaa

SEQ ID NO: 64389 - DNA, 24 bp, Artificial Sequence
  Synthetic
gcattaggcuttcaggatgtugaa

SEQ ID NO: 64390 - DNA, 23 bp, Artificial Sequence
  Synthetic
tggatguggaaggaggaugaaga

SEQ ID NO: 64391 - DNA, 18 bp, Artificial Sequence
  Synthetic
cgcugccaccacttcugt

SEQ ID NO: 64392 - DNA, 21 bp, Artificial Sequence
  Synthetic
ggaaggagaucaggugcagac

SEQ ID NO: 64393 - DNA, 21 bp, Artificial Sequence
  Synthetic
gctgagcguggacaactucaa

SEQ ID NO: 64394 - DNA, 24 bp, Artificial Sequence
  Synthetic
tgagaaaagcagcucaggaacaut

SEQ ID NO: 64395 - DNA, 21 bp, Artificial Sequence
  Synthetic
gagtugaaagccatggugcag

SEQ ID NO: 64396 - DNA, 22 bp, Artificial Sequence
  Synthetic
ctcaggtgugtcactcugaagg

SEQ ID NO: 64397 - DNA, 21 bp, Artificial Sequence
  Synthetic
cagggccugatataggtgugt

SEQ ID NO: 64398 - DNA, 19 bp, Artificial Sequence
  Synthetic
cctgggtgucctctccugt

SEQ ID NO: 64399 - DNA, 24 bp, Artificial Sequence
  Synthetic
aacctuccagagcagttucagaaa

SEQ ID NO: 64400 - DNA, 20 bp, Artificial Sequence
  Synthetic
gccccugataaacgtguggt

SEQ ID NO: 64401 - DNA, 24 bp, Artificial Sequence
  Synthetic
gatggacaggacgauctcauagga

SEQ ID NO: 64402 - DNA, 22 bp, Artificial Sequence
  Synthetic
tctggcttucaccatcctctuc

SEQ ID NO: 64403 - DNA, 22 bp, Artificial Sequence
  Synthetic
acatcccucagacaugcaaaca

SEQ ID NO: 64404 - DNA, 21 bp, Artificial Sequence
  Synthetic
ctttggcccutggtgauaggt

SEQ ID NO: 64405 - DNA, 23 bp, Artificial Sequence
  Synthetic
ccatcatguccagacaggttucc

SEQ ID NO: 64406 - DNA, 20 bp, Artificial Sequence
  Synthetic
aaaaccuggctggtugggaa

SEQ ID NO: 64407 - DNA, 20 bp, Artificial Sequence
  Synthetic
acttaguccccaggctggua

SEQ ID NO: 64408 - DNA, 22 bp, Artificial Sequence
  Synthetic
tcgaccagaucccatcauacga

SEQ ID NO: 64409 - DNA, 20 bp, Artificial Sequence
  Synthetic
cccagacuccctacccacug

SEQ ID NO: 64410 - DNA, 21 bp, Artificial Sequence
  Synthetic
ccagagccccuggagtaauca

SEQ ID NO: 64411 - DNA, 22 bp, Artificial Sequence
  Synthetic
ctcaccggagucattguagaca

SEQ ID NO: 64412 - DNA, 23 bp, Artificial Sequence
  Synthetic
gaacaacuccaccatctcguagt

SEQ ID NO: 64413 - DNA, 20 bp, Artificial Sequence
  Synthetic
gctctcuaccctgtgtccug

SEQ ID NO: 64414 - DNA, 28 bp, Artificial Sequence
  Synthetic
gtacttgtgtuacccttagagtttuggt

SEQ ID NO: 64415 - DNA, 26 bp, Artificial Sequence
  Synthetic
tccgattttgaucttctgcctcaaut

SEQ ID NO: 64416 - DNA, 18 bp, Artificial Sequence
  Synthetic
gcctgucgcggagagtug

SEQ ID NO: 64417 - DNA, 22 bp, Artificial Sequence
  Synthetic
accacctgtuttccttgctgut

SEQ ID NO: 64418 - DNA, 21 bp, Artificial Sequence
  Synthetic
cccaaccccaaagucatuggt

SEQ ID NO: 64419 - DNA, 23 bp, Artificial Sequence
  Synthetic
cattgaccttugtgtctgctcug

SEQ ID NO: 64420 - DNA, 21 bp, Artificial Sequence
  Synthetic
gcuctgataatguggccccaa

SEQ ID NO: 64421 - DNA, 18 bp, Artificial Sequence
  Synthetic
ccgaggcugccagtucag

SEQ ID NO: 64422 - DNA, 21 bp, Artificial Sequence
  Synthetic
cccgggaaggucttctctuca

SEQ ID NO: 64423 - DNA, 22 bp, Artificial Sequence
  Synthetic
tgtccctuaccttccccatuca

SEQ ID NO: 64424 - DNA, 18 bp, Artificial Sequence
  Synthetic
gcctgggcutcagcacuc

SEQ ID NO: 64425 - DNA, 25 bp, Artificial Sequence
  Synthetic
tggtctcaccuaggacttacaugat

SEQ ID NO: 64426 - DNA, 20 bp, Artificial Sequence
  Synthetic
actctgcuggcttgcgtuat

SEQ ID NO: 64427 - DNA, 22 bp, Artificial Sequence
  Synthetic
ttgtcttttggutgcaggtugg

SEQ ID NO: 64428 - DNA, 22 bp, Artificial Sequence
  Synthetic
ccagagttcguggaggtcatug

SEQ ID NO: 64429 - DNA, 23 bp, Artificial Sequence
  Synthetic
agacctcgcuttccttctcuact

SEQ ID NO: 64430 - DNA, 21 bp, Artificial Sequence
  Synthetic
gcttgagcccgacugtcttuc

SEQ ID NO: 64431 - DNA, 22 bp, Artificial Sequence
  Synthetic
gtaccactgaaucctggtguca

SEQ ID NO: 64432 - DNA, 20 bp, Artificial Sequence
  Synthetic
gctgcgatugttccttgguc

SEQ ID NO: 64433 - DNA, 27 bp, Artificial Sequence
  Synthetic
ggauccttgtaatauaacccacaccat

SEQ ID NO: 64434 - DNA, 21 bp, Artificial Sequence
  Synthetic
gccgggagacautccactuat

SEQ ID NO: 64435 - DNA, 28 bp, Artificial Sequence
  Synthetic
gcttccttaacaagucttaatctcucca

SEQ ID NO: 64436 - DNA, 25 bp, Artificial Sequence
  Synthetic
ggatcatgtcugtacggtagttgut

SEQ ID NO: 64437 - DNA, 28 bp, Artificial Sequence
  Synthetic
tgtcagaacugactttaagcagtaucag

SEQ ID NO: 64438 - DNA, 23 bp, Artificial Sequence
  Synthetic
gaatcaaugaactcgctcuccca

SEQ ID NO: 64439 - DNA, 21 bp, Artificial Sequence
  Synthetic
accctattgcucaggcccuaa

SEQ ID NO: 64440 - DNA, 19 bp, Artificial Sequence
  Synthetic
gcgcttgucggcttcauac

SEQ ID NO: 64441 - DNA, 22 bp, Artificial Sequence
  Synthetic
cagttgguggattggtgugaac

SEQ ID NO: 64442 - DNA, 21 bp, Artificial Sequence
  Synthetic
cttgatccccucaggcaucat

SEQ ID NO: 64443 - DNA, 24 bp, Artificial Sequence
  Synthetic
gtaatcccctugggacactcuact

SEQ ID NO: 64444 - DNA, 19 bp, Artificial Sequence
  Synthetic
cagccgauactgcacguga

SEQ ID NO: 64445 - DNA, 23 bp, Artificial Sequence
  Synthetic
atcagttggguccattgctcaut

SEQ ID NO: 64446 - DNA, 20 bp, Artificial Sequence
  Synthetic
tccctccaccugagcgttua

SEQ ID NO: 64447 - DNA, 25 bp, Artificial Sequence
  Synthetic
aactttggcugactcttccttucat

SEQ ID NO: 64448 - DNA, 28 bp, Artificial Sequence
  Synthetic
ctgcagataugaccattaaactauggga

SEQ ID NO: 64449 - DNA, 28 bp, Artificial Sequence
  Synthetic
tgctcttccaccaauactgacaatuaag

SEQ ID NO: 64450 - DNA, 21 bp, Artificial Sequence
  Synthetic
ctctgtgugggtccacatcuc

SEQ ID NO: 64451 - DNA, 25 bp, Artificial Sequence
  Synthetic
ggtacctguggaaaatactugacca

SEQ ID NO: 64452 - DNA, 21 bp, Artificial Sequence
  Synthetic
guagctctucccaccggaaaa

SEQ ID NO: 64453 - DNA, 22 bp, Artificial Sequence
  Synthetic
cctgtgcaaaaagcucggttuc

SEQ ID NO: 64454 - DNA, 20 bp, Artificial Sequence
  Synthetic
gcaccagggcugcacttaut

SEQ ID NO: 64455 - DNA, 21 bp, Artificial Sequence
  Synthetic
cctcaccaggcugatgagtug

SEQ ID NO: 64456 - DNA, 21 bp, Artificial Sequence
  Synthetic
acgtggtcugtctgattuggg

SEQ ID NO: 64457 - DNA, 24 bp, Artificial Sequence
  Synthetic
acacttgtctcutctctcctguga

SEQ ID NO: 64458 - DNA, 29 bp, Artificial Sequence
  Synthetic
catttaaatattucagctggttgcuacct

SEQ ID NO: 64459 - DNA, 24 bp, Artificial Sequence
  Synthetic
agctgcttatagucagggacatug

SEQ ID NO: 64460 - DNA, 24 bp, Artificial Sequence
  Synthetic
ttcaacgtcaccuttccaaacuct

SEQ ID NO: 64461 - DNA, 28 bp, Artificial Sequence
  Synthetic
gatgctgaucatatttgaaugaaggcat

SEQ ID NO: 64462 - DNA, 25 bp, Artificial Sequence
  Synthetic
gcatcctgguctatgtgttcaacug

SEQ ID NO: 64463 - DNA, 21 bp, Artificial Sequence
  Synthetic
ctccagggutcaaacguccaa

SEQ ID NO: 64464 - DNA, 24 bp, Artificial Sequence
  Synthetic
ctgctccugggtcatcaatatugt

SEQ ID NO: 64465 - DNA, 20 bp, Artificial Sequence
  Synthetic
gtatuggaggcggacuagca

SEQ ID NO: 64466 - DNA, 24 bp, Artificial Sequence
  Synthetic
ggagagaucatgtauggaggccat

SEQ ID NO: 64467 - DNA, 22 bp, Artificial Sequence
  Synthetic
cucacgacaucagaagcacaga

SEQ ID NO: 64468 - DNA, 21 bp, Artificial Sequence
  Synthetic
ctccaccuactcctcctcugt

SEQ ID NO: 64469 - DNA, 17 bp, Artificial Sequence
  Synthetic
gcccgacugguaggcat

SEQ ID NO: 64470 - DNA, 20 bp, Artificial Sequence
  Synthetic
agctgctacugctgtgaugg

SEQ ID NO: 64471 - DNA, 19 bp, Artificial Sequence
  Synthetic
ccugcagcccaaagagcut

SEQ ID NO: 64472 - DNA, 21 bp, Artificial Sequence
  Synthetic
catgccagagautgcucagga

SEQ ID NO: 64473 - DNA, 24 bp, Artificial Sequence
  Synthetic
ccugttacucacagaaaccacaca

SEQ ID NO: 64474 - DNA, 20 bp, Artificial Sequence
  Synthetic
cctgtgggugcacttacuct

SEQ ID NO: 64475 - DNA, 23 bp, Artificial Sequence
  Synthetic
caatgctagcutgccctagaugt

SEQ ID NO: 64476 - DNA, 23 bp, Artificial Sequence
  Synthetic
ccaatgaaguctacacgtugcac

SEQ ID NO: 64477 - DNA, 20 bp, Artificial Sequence
  Synthetic
gaaggaggtuccgctggtut

SEQ ID NO: 64478 - DNA, 22 bp, Artificial Sequence
  Synthetic
tggttggttuctggagccttut

SEQ ID NO: 64479 - DNA, 27 bp, Artificial Sequence
  Synthetic
gttaaggtgaacuggttctcatcuact

SEQ ID NO: 64480 - DNA, 27 bp, Artificial Sequence
  Synthetic
caugtggtatgtcuagagagagaacag

SEQ ID NO: 64481 - DNA, 20 bp, Artificial Sequence
  Synthetic
ccuaacacgcaugggaaggt

SEQ ID NO: 64482 - DNA, 21 bp, Artificial Sequence
  Synthetic
cttccggtaguctgggttcut

SEQ ID NO: 64483 - DNA, 20 bp, Artificial Sequence
  Synthetic
actcauggagttgcugcact

SEQ ID NO: 64484 - DNA, 19 bp, Artificial Sequence
  Synthetic
cucatgcagugagcagggt

SEQ ID NO: 64485 - DNA, 18 bp, Artificial Sequence
  Synthetic
cgctgucgtgcguaccat

SEQ ID NO: 64486 - DNA, 24 bp, Artificial Sequence
  Synthetic
cctggtagutgatgagaugcacaa

SEQ ID NO: 64487 - DNA, 19 bp, Artificial Sequence
  Synthetic
actcaguccctguccccat

SEQ ID NO: 64488 - DNA, 22 bp, Artificial Sequence
  Synthetic
caccaguctccatgtugcagaa

SEQ ID NO: 64489 - DNA, 22 bp, Artificial Sequence
  Synthetic
gcccatatgugcccctaccaua

SEQ ID NO: 64490 - DNA, 21 bp, Artificial Sequence
  Synthetic
gaaaccaguagcacccuggaa

SEQ ID NO: 64491 - DNA, 21 bp, Artificial Sequence
  Synthetic
gcttgatgccuctgtgctcuc

SEQ ID NO: 64492 - DNA, 25 bp, Artificial Sequence
  Synthetic
agaagggagggaagguttagaauct

SEQ ID NO: 64493 - DNA, 23 bp, Artificial Sequence
  Synthetic
ccgtgactguagtgttctctcug

SEQ ID NO: 64494 - DNA, 25 bp, Artificial Sequence
  Synthetic
gtgaagaaagauggccactgtaaug

SEQ ID NO: 64495 - DNA, 22 bp, Artificial Sequence
  Synthetic
caagcttugccctctttggaug

SEQ ID NO: 64496 - DNA, 24 bp, Artificial Sequence
  Synthetic
aggaagacgacagugaaaauggag

SEQ ID NO: 64497 - DNA, 24 bp, Artificial Sequence
  Synthetic
tccagagaaggaaucagtcaguca

SEQ ID NO: 64498 - DNA, 21 bp, Artificial Sequence
  Synthetic
tgaatctccuggacccctuca

SEQ ID NO: 64499 - DNA, 21 bp, Artificial Sequence
  Synthetic
gaacttgtccucctcgctcuc

SEQ ID NO: 64500 - DNA, 22 bp, Artificial Sequence
  Synthetic
ctctgcagacugagauggagaa

SEQ ID NO: 64501 - DNA, 28 bp, Artificial Sequence
  Synthetic
ggtgatcattaaacaugtgtcgagttug

SEQ ID NO: 64502 - DNA, 21 bp, Artificial Sequence
  Synthetic
gtgactggcuacttcccctug

SEQ ID NO: 64503 - DNA, 21 bp, Artificial Sequence
  Synthetic
ccgggacucaacacatacgut

SEQ ID NO: 64504 - DNA, 21 bp, Artificial Sequence
  Synthetic
gttcugggacgauggagagag

SEQ ID NO: 64505 - DNA, 23 bp, Artificial Sequence
  Synthetic
ctagagtgtccuagtggcaggua

SEQ ID NO: 64506 - DNA, 21 bp, Artificial Sequence
  Synthetic
gttacactgugcactgctgut

SEQ ID NO: 64507 - DNA, 26 bp, Artificial Sequence
  Synthetic
aaatcgtgaaagugacagtgatguct

SEQ ID NO: 64508 - DNA, 25 bp, Artificial Sequence
  Synthetic
gatauaccatgacatucagccccaa

SEQ ID NO: 64509 - DNA, 20 bp, Artificial Sequence
  Synthetic
ggccccuctcacugacaaac

SEQ ID NO: 64510 - DNA, 21 bp, Artificial Sequence
  Synthetic
ccagccagutccttggcttua

SEQ ID NO: 64511 - DNA, 25 bp, Artificial Sequence
  Synthetic
ccaccaacuggattgaatacatgut

SEQ ID NO: 64512 - DNA, 22 bp, Artificial Sequence
  Synthetic
gtgtatcugcagttguccacct

SEQ ID NO: 64513 - DNA, 21 bp, Artificial Sequence
  Synthetic
tggctucacaacccaaacugt

SEQ ID NO: 64514 - DNA, 27 bp, Artificial Sequence
  Synthetic
actacacaaagaacuccttcattggut

SEQ ID NO: 64515 - DNA, 27 bp, Artificial Sequence
  Synthetic
acgagttactgtugaggataaggacut

SEQ ID NO: 64516 - DNA, 20 bp, Artificial Sequence
  Synthetic
gcaccugcccaatgauggag

SEQ ID NO: 64517 - DNA, 27 bp, Artificial Sequence
  Synthetic
tgaggtgggugaaaaggaatgaaauaa

SEQ ID NO: 64518 - DNA, 22 bp, Artificial Sequence
  Synthetic
gcagctugaagggatggtugaa

SEQ ID NO: 64519 - DNA, 26 bp, Artificial Sequence
  Synthetic
cccacgccagutttgaatacttagua

SEQ ID NO: 64520 - DNA, 26 bp, Artificial Sequence
  Synthetic
tgtggaatttaaugttgcctcaucct

SEQ ID NO: 64521 - DNA, 22 bp, Artificial Sequence
  Synthetic
ctgtgagtguaaggacctgcut

SEQ ID NO: 64522 - DNA, 28 bp, Artificial Sequence
  Synthetic
actctgtgagcaaacuatggttaatuca

SEQ ID NO: 64523 - DNA, 28 bp, Artificial Sequence
  Synthetic
aggaagtttctgutgctatcacattuct

SEQ ID NO: 64524 - DNA, 29 bp, Artificial Sequence
  Synthetic
caattttgttaactuctcacgtgtctuct

SEQ ID NO: 64525 - DNA, 25 bp, Artificial Sequence
  Synthetic
gcaaacgggaagauaaaaccaaguc

SEQ ID NO: 64526 - DNA, 25 bp, Artificial Sequence
  Synthetic
cccccaauctgataactgugaagaa

SEQ ID NO: 64527 - DNA, 28 bp, Artificial Sequence
  Synthetic
tcttctagagaaucaggaaggaggtuac

SEQ ID NO: 64528 - DNA, 20 bp, Artificial Sequence
  Synthetic
cagacgagagggacaucugg

SEQ ID NO: 64529 - DNA, 21 bp, Artificial Sequence
  Synthetic
ctctcgcugtcgctggauaag

SEQ ID NO: 64530 - DNA, 20 bp, Artificial Sequence
  Synthetic
cgcgcaggaacuttgguagt

SEQ ID NO: 64531 - DNA, 23 bp, Artificial Sequence
  Synthetic
tgaactgcaggaucatgtcctug

SEQ ID NO: 64532 - DNA, 21 bp, Artificial Sequence
  Synthetic
cactgtcccugggtgtcttuc

SEQ ID NO: 64533 - DNA, 25 bp, Artificial Sequence
  Synthetic
gacaaaugcggagaugagaacaaaa

SEQ ID NO: 64534 - DNA, 23 bp, Artificial Sequence
  Synthetic
gaggtcagutattggugggacaa

SEQ ID NO: 64535 - DNA, 20 bp, Artificial Sequence
  Synthetic
atggccacguatgaguccac

SEQ ID NO: 64536 - DNA, 22 bp, Artificial Sequence
  Synthetic
gcctgcaggaccucatcatcua

SEQ ID NO: 64537 - DNA, 19 bp, Artificial Sequence
  Synthetic
acttccccaggucccucag

SEQ ID NO: 64538 - DNA, 20 bp, Artificial Sequence
  Synthetic
ctgatgccagugtccuggag

SEQ ID NO: 64539 - DNA, 18 bp, Artificial Sequence
  Synthetic
ctgcccaccccugcauag

SEQ ID NO: 64540 - DNA, 20 bp, Artificial Sequence
  Synthetic
agatttaccgcuggcccauc

SEQ ID NO: 64541 - DNA, 21 bp, Artificial Sequence
  Synthetic
gccaugccccttgttcuagac

SEQ ID NO: 64542 - DNA, 25 bp, Artificial Sequence
  Synthetic
gaacaacuggcagaaaatuaccaca

SEQ ID NO: 64543 - DNA, 22 bp, Artificial Sequence
  Synthetic
tgctggtgcucatctcatuacc

SEQ ID NO: 64544 - DNA, 24 bp, Artificial Sequence
  Synthetic
cttctctgtcccugtctcctcuaa

SEQ ID NO: 64545 - DNA, 22 bp, Artificial Sequence
  Synthetic
ctgggagcuatttctucagggt

SEQ ID NO: 64546 - DNA, 22 bp, Artificial Sequence
  Synthetic
gtttcacatguacgtgggtguc

SEQ ID NO: 64547 - DNA, 21 bp, Artificial Sequence
  Synthetic
gauggccaacaggaugacgat

SEQ ID NO: 64548 - DNA, 21 bp, Artificial Sequence
  Synthetic
ggutggctccaugaccaagat

SEQ ID NO: 64549 - DNA, 23 bp, Artificial Sequence
  Synthetic
tcaaggcuactccatcaaugcag

SEQ ID NO: 64550 - DNA, 18 bp, Artificial Sequence
  Synthetic
ggtggcugctgugcagaa

SEQ ID NO: 64551 - DNA, 18 bp, Artificial Sequence
  Synthetic
ccatcgugacgggtgugg

SEQ ID NO: 64552 - DNA, 22 bp, Artificial Sequence
  Synthetic
ctcctattucagcggccuagac

SEQ ID NO: 64553 - DNA, 25 bp, Artificial Sequence
  Synthetic
ggtccttgaautccaagctauccac

SEQ ID NO: 64554 - DNA, 21 bp, Artificial Sequence
  Synthetic
tgaagugggatcccuccaaca

SEQ ID NO: 64555 - DNA, 26 bp, Artificial Sequence
  Synthetic
gcttcacaaguccttcagttctttut

SEQ ID NO: 64556 - DNA, 22 bp, Artificial Sequence
  Synthetic
gcaagagguggcagaaatgcua

SEQ ID NO: 64557 - DNA, 28 bp, Artificial Sequence
  Synthetic
gaccctgtttcugaattgctaaattgut

SEQ ID NO: 64558 - DNA, 20 bp, Artificial Sequence
  Synthetic
ctggcaccgucatcugaaga

SEQ ID NO: 64559 - DNA, 21 bp, Artificial Sequence
  Synthetic
ccagctgugcctgtacctaug

SEQ ID NO: 64560 - DNA, 21 bp, Artificial Sequence
  Synthetic
caactgcugcaattucagggt

SEQ ID NO: 64561 - DNA, 25 bp, Artificial Sequence
  Synthetic
ctctgtagggcuacctcagaatcut

SEQ ID NO: 64562 - DNA, 20 bp, Artificial Sequence
  Synthetic
ggugaagcgaugaccacaga

SEQ ID NO: 64563 - DNA, 20 bp, Artificial Sequence
  Synthetic
cactguggcgcuagacacat

SEQ ID NO: 64564 - DNA, 22 bp, Artificial Sequence
  Synthetic
cctcaagccuctctttggctut

SEQ ID NO: 64565 - DNA, 28 bp, Artificial Sequence
  Synthetic
gtggattattctgutgttgttggcttut

SEQ ID NO: 64566 - DNA, 25 bp, Artificial Sequence
  Synthetic
cagagcattagugtgtagacgugaa

SEQ ID NO: 64567 - DNA, 22 bp, Artificial Sequence
  Synthetic
accatcttugtcagcagucaca

SEQ ID NO: 64568 - DNA, 27 bp, Artificial Sequence
  Synthetic
cagaaaugagaaaccaccaaucacaaa

SEQ ID NO: 64569 - DNA, 27 bp, Artificial Sequence
  Synthetic
atcagtgaucgcctcttgtgaauaaat

SEQ ID NO: 64570 - DNA, 20 bp, Artificial Sequence
  Synthetic
ccagugaggagccaucacat

SEQ ID NO: 64571 - DNA, 22 bp, Artificial Sequence
  Synthetic
tgaaacagcutcagctgcucaa

SEQ ID NO: 64572 - DNA, 22 bp, Artificial Sequence
  Synthetic
gtacccagagagcutcccuagt

SEQ ID NO: 64573 - DNA, 29 bp, Artificial Sequence
  Synthetic
gcttttgagaagaaugactttggtttucc

SEQ ID NO: 64574 - DNA, 24 bp, Artificial Sequence
  Synthetic
ctgagtgagaautttccgcuacct

SEQ ID NO: 64575 - DNA, 28 bp, Artificial Sequence
  Synthetic
gccttatggagcutcattttgttgatut

SEQ ID NO: 64576 - DNA, 24 bp, Artificial Sequence
  Synthetic
gggagtttcaugaagccactugat

SEQ ID NO: 64577 - DNA, 28 bp, Artificial Sequence
  Synthetic
ttaggtgatgtucacagaagaagatguc

SEQ ID NO: 64578 - DNA, 21 bp, Artificial Sequence
  Synthetic
ggacaggccuttatgttcgug

SEQ ID NO: 64579 - DNA, 21 bp, Artificial Sequence
  Synthetic
ttcttcgguggcagtcagaug

SEQ ID NO: 64580 - DNA, 23 bp, Artificial Sequence
  Synthetic
acgttgaccaaautgttgtgcuc

SEQ ID NO: 64581 - DNA, 26 bp, Artificial Sequence
  Synthetic
ggacacugaaaggaaggttttacuct

SEQ ID NO: 64582 - DNA, 22 bp, Artificial Sequence
  Synthetic
cutaacatgugcaaggcacgag

SEQ ID NO: 64583 - DNA, 22 bp, Artificial Sequence
  Synthetic
acatggtacgcugctgttctut

SEQ ID NO: 64584 - DNA, 27 bp, Artificial Sequence
  Synthetic
acauttaacacatgugacggaagagat

SEQ ID NO: 64585 - DNA, 28 bp, Artificial Sequence
  Synthetic
cattttaaacgtugttgcatttgtcugt

SEQ ID NO: 64586 - DNA, 21 bp, Artificial Sequence
  Synthetic
gttagtgccuttcacccugct

SEQ ID NO: 64587 - DNA, 28 bp, Artificial Sequence
  Synthetic
aaacagaugccagtattcuacaggaaaa

SEQ ID NO: 64588 - DNA, 27 bp, Artificial Sequence
  Synthetic
gagtttctgaugactaagtcugaagca

SEQ ID NO: 64589 - DNA, 28 bp, Artificial Sequence
  Synthetic
gcgagaggaaauaaagauaaaacagcag

SEQ ID NO: 64590 - DNA, 28 bp, Artificial Sequence
  Synthetic
ctcttgatagcutttctgtaatccugct

SEQ ID NO: 64591 - DNA, 28 bp, Artificial Sequence
  Synthetic
gatccctgaucctatagttttgttugct

SEQ ID NO: 64592 - DNA, 21 bp, Artificial Sequence
  Synthetic
ccgagtctcugctccatgaut

SEQ ID NO: 64593 - DNA, 29 bp, Artificial Sequence
  Synthetic
ggcaaagtgugaaacaattaagtgatuct

SEQ ID NO: 64594 - DNA, 28 bp, Artificial Sequence
  Synthetic
agatgctcucaccttttcctaattucag

SEQ ID NO: 64595 - DNA, 28 bp, Artificial Sequence
  Synthetic
gcaatgtctgaccuctgtttcaatacut

SEQ ID NO: 64596 - DNA, 24 bp, Artificial Sequence
  Synthetic
ccagtccaagucctaatttuccgt

SEQ ID NO: 64597 - DNA, 23 bp, Artificial Sequence
  Synthetic
accacagagaccauagagagugt

SEQ ID NO: 64598 - DNA, 26 bp, Artificial Sequence
  Synthetic
tucaacatgttuaaaacacagcagca

SEQ ID NO: 64599 - DNA, 28 bp, Artificial Sequence
  Synthetic
ctgaaaataaucccggtaaattctggut

SEQ ID NO: 64600 - DNA, 21 bp, Artificial Sequence
  Synthetic
ctgttccctugctgctcatug

SEQ ID NO: 64601 - DNA, 23 bp, Artificial Sequence
  Synthetic
caagcatttucgtccaagcauct

SEQ ID NO: 64602 - DNA, 24 bp, Artificial Sequence
  Synthetic
actucagcagcattatugcagaga

SEQ ID NO: 64603 - DNA, 22 bp, Artificial Sequence
  Synthetic
gccugaaggacaggaaacagua

SEQ ID NO: 64604 - DNA, 22 bp, Artificial Sequence
  Synthetic
ggctcuggccttttataugcct

SEQ ID NO: 64605 - DNA, 27 bp, Artificial Sequence
  Synthetic
actatccccaucctttcctcaaacaua

SEQ ID NO: 64606 - DNA, 23 bp, Artificial Sequence
  Synthetic
ccccaccccuagtcaactagtua

SEQ ID NO: 64607 - DNA, 20 bp, Artificial Sequence
  Synthetic
aggccagaaugugggaaagg

SEQ ID NO: 64608 - DNA, 20 bp, Artificial Sequence
  Synthetic
cagagcacccacccutcuac

SEQ ID NO: 64609 - DNA, 26 bp, Artificial Sequence
  Synthetic
atctcttcctagcucaccactactut

SEQ ID NO: 64610 - DNA, 29 bp, Artificial Sequence
  Synthetic
gtaaagtgctauggtcatattgtguagga

SEQ ID NO: 64611 - DNA, 22 bp, Artificial Sequence
  Synthetic
aatuggccaggauggagagaac

SEQ ID NO: 64612 - DNA, 22 bp, Artificial Sequence
  Synthetic
gagctggtuccagaactcagut

SEQ ID NO: 64613 - DNA, 27 bp, Artificial Sequence
  Synthetic
ccutacaaaacaaucaacaccagacac

SEQ ID NO: 64614 - DNA, 28 bp, Artificial Sequence
  Synthetic
tgtaggtagcuaggtaggatatgucact

SEQ ID NO: 64615 - DNA, 26 bp, Artificial Sequence
  Synthetic
agaggctuggaaagcaaatcgtatua

SEQ ID NO: 64616 - DNA, 28 bp, Artificial Sequence
  Synthetic
gagatgagutttgagttucagagacaga

SEQ ID NO: 64617 - DNA, 26 bp, Artificial Sequence
  Synthetic
cctacagacagcutctttttcgtugt

SEQ ID NO: 64618 - DNA, 23 bp, Artificial Sequence
  Synthetic
ggaaguactuggagggagagcat

SEQ ID NO: 64619 - DNA, 23 bp, Artificial Sequence
  Synthetic
gaggaaagcaacutaccatggug

SEQ ID NO: 64620 - DNA, 21 bp, Artificial Sequence
  Synthetic
ttccaaugaagcaggauggct

SEQ ID NO: 64621 - DNA, 27 bp, Artificial Sequence
  Synthetic
tgatgacaaaugcaaggaagagtguaa

SEQ ID NO: 64622 - DNA, 17 bp, Artificial Sequence
  Synthetic
cgcggagcugttccuca

SEQ ID NO: 64623 - DNA, 19 bp, Artificial Sequence
  Synthetic
gcctccccuctcccttcuc

SEQ ID NO: 64624 - DNA, 27 bp, Artificial Sequence
  Synthetic
tcttttggttguagtgagtggtttuct

SEQ ID NO: 64625 - DNA, 29 bp, Artificial Sequence
  Synthetic
caggagacuacaggaaaagatgguaaaat

SEQ ID NO: 64626 - DNA, 22 bp, Artificial Sequence
  Synthetic
ctttctccuggagctccttucc

SEQ ID NO: 64627 - DNA, 22 bp, Artificial Sequence
  Synthetic
acacauccccaggtcaguagaa

SEQ ID NO: 64628 - DNA, 25 bp, Artificial Sequence
  Synthetic
cttcacagaacaugcagtauaccca

SEQ ID NO: 64629 - DNA, 28 bp, Artificial Sequence
  Synthetic
gggtgttgaaagacucatcatgtttuaa

SEQ ID NO: 64630 - DNA, 21 bp, Artificial Sequence
  Synthetic
caacagugccatccgtuacct

SEQ ID NO: 64631 - DNA, 20 bp, Artificial Sequence
  Synthetic
ggagtggcutggtcaggtug

SEQ ID NO: 64632 - DNA, 19 bp, Artificial Sequence
  Synthetic
gcgatgugagcgtguggat

SEQ ID NO: 64633 - DNA, 21 bp, Artificial Sequence
  Synthetic
ccttccttugcatgtccucca

SEQ ID NO: 64634 - DNA, 23 bp, Artificial Sequence
  Synthetic
gggacagaaggacaugaattgug

SEQ ID NO: 64635 - DNA, 23 bp, Artificial Sequence
  Synthetic
ctttcgccacaguatgtcagcua

SEQ ID NO: 64636 - DNA, 21 bp, Artificial Sequence
  Synthetic
cctcaccaucctgtcgcttua

SEQ ID NO: 64637 - DNA, 23 bp, Artificial Sequence
  Synthetic
ctctatccaagucactggtggut

SEQ ID NO: 64638 - DNA, 19 bp, Artificial Sequence
  Synthetic
tggtctgagcuccctgcua

SEQ ID NO: 64639 - DNA, 19 bp, Artificial Sequence
  Synthetic
cacccacccacuttcucct

SEQ ID NO: 64640 - DNA, 24 bp, Artificial Sequence
  Synthetic
cttacaggtccugaaaaaggctug

SEQ ID NO: 64641 - DNA, 25 bp, Artificial Sequence
  Synthetic
ttagtttctccuccagcttcaagug

SEQ ID NO: 64642 - DNA, 28 bp, Artificial Sequence
  Synthetic
gggttatatgaucacgtgtgtttgagua

SEQ ID NO: 64643 - DNA, 21 bp, Artificial Sequence
  Synthetic
cagagtuccaagccuccaaca

SEQ ID NO: 64644 - DNA, 29 bp, Artificial Sequence
  Synthetic
gaggttacgtttugttttcttggaatuca

SEQ ID NO: 64645 - DNA, 21 bp, Artificial Sequence
  Synthetic
gggagucuggccaaggaaaag

SEQ ID NO: 64646 - DNA, 25 bp, Artificial Sequence
  Synthetic
gatgtctattggutccccatctuca

SEQ ID NO: 64647 - DNA, 20 bp, Artificial Sequence
  Synthetic
ccagcaccccuatgucaaga

SEQ ID NO: 64648 - DNA, 21 bp, Artificial Sequence
  Synthetic
gggaccgcaucttctttgugt

SEQ ID NO: 64649 - DNA, 22 bp, Artificial Sequence
  Synthetic
tccucagcacgagacaaaaugt

SEQ ID NO: 64650 - DNA, 21 bp, Artificial Sequence
  Synthetic
tgguagagccctgtcuccaag

SEQ ID NO: 64651 - DNA, 23 bp, Artificial Sequence
  Synthetic
acacagctugtcacagttuaggt

SEQ ID NO: 64652 - DNA, 20 bp, Artificial Sequence
  Synthetic
cagccuctcagcauccacat

SEQ ID NO: 64653 - DNA, 18 bp, Artificial Sequence
  Synthetic
ccagggccgugttuccag

SEQ ID NO: 64654 - DNA, 18 bp, Artificial Sequence
  Synthetic
gccugcagaactggguct

SEQ ID NO: 64655 - DNA, 20 bp, Artificial Sequence
  Synthetic
gggaucagaaaccgggctua

SEQ ID NO: 64656 - DNA, 21 bp, Artificial Sequence
  Synthetic
tcttgttugagcacgugcaac

SEQ ID NO: 64657 - DNA, 25 bp, Artificial Sequence
  Synthetic
agagaggaugaagacagagaaugga

SEQ ID NO: 64658 - DNA, 20 bp, Artificial Sequence
  Synthetic
tguggaccacgaggacauct

SEQ ID NO: 64659 - DNA, 20 bp, Artificial Sequence
  Synthetic
cccacucaggcagctcaaua

SEQ ID NO: 64660 - DNA, 25 bp, Artificial Sequence
  Synthetic
gactctuccaagtgtcaauggagaa

SEQ ID NO: 64661 - DNA, 21 bp, Artificial Sequence
  Synthetic
ggaatccuctcctgcucacct

SEQ ID NO: 64662 - DNA, 28 bp, Artificial Sequence
  Synthetic
ccuagttaatatcttcuacagggagcca

SEQ ID NO: 64663 - DNA, 26 bp, Artificial Sequence
  Synthetic
aaggtaattaacgugggtgtctcaut

SEQ ID NO: 64664 - DNA, 23 bp, Artificial Sequence
  Synthetic
tgtggcagguagagggtgaaaua

SEQ ID NO: 64665 - DNA, 21 bp, Artificial Sequence
  Synthetic
gttactgacgcauggcctcut

SEQ ID NO: 64666 - DNA, 26 bp, Artificial Sequence
  Synthetic
ccagttcaguaaggtcaatctcauca

SEQ ID NO: 64667 - DNA, 28 bp, Artificial Sequence
  Synthetic
agaggaagggtutaactgagagaguaaa

SEQ ID NO: 64668 - DNA, 27 bp, Artificial Sequence
  Synthetic
acttatuaccccacaaaattgacuggt

SEQ ID NO: 64669 - DNA, 27 bp, Artificial Sequence
  Synthetic
ggctcttctggcutcactttaaaaaut

SEQ ID NO: 64670 - DNA, 28 bp, Artificial Sequence
  Synthetic
gcattgcgtaguatgtagtaatcacuca

SEQ ID NO: 64671 - DNA, 21 bp, Artificial Sequence
  Synthetic
gagcagatggugtcagagguc

SEQ ID NO: 64672 - DNA, 28 bp, Artificial Sequence
  Synthetic
gaccaaatuaaggcattttctctuggaa

SEQ ID NO: 64673 - DNA, 26 bp, Artificial Sequence
  Synthetic
tgctaaatauagggtcatccugggaa

SEQ ID NO: 64674 - DNA, 24 bp, Artificial Sequence
  Synthetic
acaugaatgaaatcuccccacact

SEQ ID NO: 64675 - DNA, 21 bp, Artificial Sequence
  Synthetic
gtcttcctgguccacaagguc

SEQ ID NO: 64676 - DNA, 20 bp, Artificial Sequence
  Synthetic
accugaggacctggaucacc

SEQ ID NO: 64677 - DNA, 28 bp, Artificial Sequence
  Synthetic
gcaattggcaggauaaaagtagtuagga

SEQ ID NO: 64678 - DNA, 25 bp, Artificial Sequence
  Synthetic
aggtgtcctaguggtaataggcaut

SEQ ID NO: 64679 - DNA, 26 bp, Artificial Sequence
  Synthetic
cctaatgaagaauttggtccaggugt

SEQ ID NO: 64680 - DNA, 21 bp, Artificial Sequence
  Synthetic
tcccagucaccacagtccuaa

SEQ ID NO: 64681 - DNA, 19 bp, Artificial Sequence
  Synthetic
gcauccggcccagactcua

SEQ ID NO: 64682 - DNA, 21 bp, Artificial Sequence
  Synthetic
gctcacaccuctctcctcugt

SEQ ID NO: 64683 - DNA, 18 bp, Artificial Sequence
  Synthetic
tcaagcccccucccauga

SEQ ID NO: 64684 - DNA, 22 bp, Artificial Sequence
  Synthetic
tccaccccaucagttctctcut

SEQ ID NO: 64685 - DNA, 23 bp, Artificial Sequence
  Synthetic
aattagcaaggucaccaggacuc

SEQ ID NO: 64686 - DNA, 25 bp, Artificial Sequence
  Synthetic
gttttccauacagagtccugaggaa

SEQ ID NO: 64687 - DNA, 22 bp, Artificial Sequence
  Synthetic
gccctcaaauatggtcccaucc

SEQ ID NO: 64688 - DNA, 21 bp, Artificial Sequence
  Synthetic
catgcacgguagggctgtuaa

SEQ ID NO: 64689 - DNA, 21 bp, Artificial Sequence
  Synthetic
gcctgtaacuccaagggtuca

SEQ ID NO: 64690 - DNA, 24 bp, Artificial Sequence
  Synthetic
gcatcacugtgcaattagugacat

SEQ ID NO: 64691 - DNA, 26 bp, Artificial Sequence
  Synthetic
ggacattuccaagaggtctgacttuc

SEQ ID NO: 64692 - DNA, 26 bp, Artificial Sequence
  Synthetic
agaaaaatcucccatcctgctugaaa

SEQ ID NO: 64693 - DNA, 26 bp, Artificial Sequence
  Synthetic
ggatttgctccutggagtttacatuc

SEQ ID NO: 64694 - DNA, 24 bp, Artificial Sequence
  Synthetic
ggattccttucatcatcgtgguca

SEQ ID NO: 64695 - DNA, 28 bp, Artificial Sequence
  Synthetic
gtgtgtcuagagacagaaaccaaatuct

SEQ ID NO: 64696 - DNA, 24 bp, Artificial Sequence
  Synthetic
acatgaagtccutcagtgaagcuc

SEQ ID NO: 64697 - DNA, 23 bp, Artificial Sequence
  Synthetic
ggtgttcctuaggagtgtgugat

SEQ ID NO: 64698 - DNA, 28 bp, Artificial Sequence
  Synthetic
gtacaccttatcguttctcattaccuga

SEQ ID NO: 64699 - DNA, 26 bp, Artificial Sequence
  Synthetic
gcaggagacacagcugataauagagt

SEQ ID NO: 64700 - DNA, 22 bp, Artificial Sequence
  Synthetic
ctgttctcccuggtttctcucc

SEQ ID NO: 64701 - DNA, 28 bp, Artificial Sequence
  Synthetic
acuaaaaccaacagagaguaacacaaca

SEQ ID NO: 64702 - DNA, 27 bp, Artificial Sequence
  Synthetic
agagacttagaacugatctttccccut

SEQ ID NO: 64703 - DNA, 28 bp, Artificial Sequence
  Synthetic
cccagtatugcccttcaaataaguagag

SEQ ID NO: 64704 - DNA, 24 bp, Artificial Sequence
  Synthetic
tcctctctttuccttatgccccua

SEQ ID NO: 64705 - DNA, 30 bp, Artificial Sequence
  Synthetic
accatacagaaaacauacaaaguaccacat

SEQ ID NO: 64706 - DNA, 28 bp, Artificial Sequence
  Synthetic
gttgggaatcautggcaaagaaaauaga

SEQ ID NO: 64707 - DNA, 27 bp, Artificial Sequence
  Synthetic
tcagcagatacaugatcctacttucca

SEQ ID NO: 64708 - DNA, 27 bp, Artificial Sequence
  Synthetic
tcttgatccaauattttagggcugcat

SEQ ID NO: 64709 - DNA, 28 bp, Artificial Sequence
  Synthetic
tgagcacagtttutacgatttcctcuaa

SEQ ID NO: 64710 - DNA, 21 bp, Artificial Sequence
  Synthetic
ctggcatcccutggtcagaut

SEQ ID NO: 64711 - DNA, 27 bp, Artificial Sequence
  Synthetic
aacattuacgagacaaagggttguagt

SEQ ID NO: 64712 - DNA, 22 bp, Artificial Sequence
  Synthetic
cgttaaacaagutgcctcguga

SEQ ID NO: 64713 - DNA, 23 bp, Artificial Sequence
  Synthetic
tctctaggccautgagcactgua

SEQ ID NO: 64714 - DNA, 27 bp, Artificial Sequence
  Synthetic
cgttaacattugcttcatctuccaaga

SEQ ID NO: 64715 - DNA, 28 bp, Artificial Sequence
  Synthetic
ggagacaggugatccttttaatguaagt

SEQ ID NO: 64716 - DNA, 27 bp, Artificial Sequence
  Synthetic
gcagttgcacaggcugtatatattcut

SEQ ID NO: 64717 - DNA, 24 bp, Artificial Sequence
  Synthetic
gactggugaaaacgtttgtggtut

SEQ ID NO: 64718 - DNA, 22 bp, Artificial Sequence
  Synthetic
agaagcagccuggguaaaacat

SEQ ID NO: 64719 - DNA, 27 bp, Artificial Sequence
  Synthetic
ggttttcatgaucgtttccttagucag

SEQ ID NO: 64720 - DNA, 19 bp, Artificial Sequence
  Synthetic
cacagugcgcctttucgac

SEQ ID NO: 64721 - DNA, 19 bp, Artificial Sequence
  Synthetic
tcucugaggcgggaaagga

SEQ ID NO: 64722 - DNA, 25 bp, Artificial Sequence
  Synthetic
tgctgccgtauctgaagaagaaaut

SEQ ID NO: 64723 - DNA, 27 bp, Artificial Sequence
  Synthetic
tcctccagattuggaagctctaaatug

SEQ ID NO: 64724 - DNA, 22 bp, Artificial Sequence
  Synthetic
cattgcttgccugttcggttut

SEQ ID NO: 64725 - DNA, 20 bp, Artificial Sequence
  Synthetic
cautcagtcguccccaccag

SEQ ID NO: 64726 - DNA, 23 bp, Artificial Sequence
  Synthetic
agagtgataccuttccccaggut

SEQ ID NO: 64727 - DNA, 23 bp, Artificial Sequence
  Synthetic
tgtttgttctucccttcccugag

SEQ ID NO: 64728 - DNA, 23 bp, Artificial Sequence
  Synthetic
cuatcacugaggcaagggaagaa

SEQ ID NO: 64729 - DNA, 22 bp, Artificial Sequence
  Synthetic
gctttgatucgacagaggucac

SEQ ID NO: 64730 - DNA, 25 bp, Artificial Sequence
  Synthetic
aataccaagcacucatgaaauggga

SEQ ID NO: 64731 - DNA, 26 bp, Artificial Sequence
  Synthetic
tttgctggcaagutctatgagtguat

SEQ ID NO: 64732 - DNA, 26 bp, Artificial Sequence
  Synthetic
gcacttttagagcucagtttggaugt

SEQ ID NO: 64733 - DNA, 22 bp, Artificial Sequence
  Synthetic
atgtcctgucctagggttucct

SEQ ID NO: 64734 - DNA, 28 bp, Artificial Sequence
  Synthetic
acctcctaauacaggctcttaacauaca

SEQ ID NO: 64735 - DNA, 27 bp, Artificial Sequence
  Synthetic
ccttgtttaggcuaatgacccaagaut

SEQ ID NO: 64736 - DNA, 24 bp, Artificial Sequence
  Synthetic
ccaaattcacacugtagcagctut

SEQ ID NO: 64737 - DNA, 29 bp, Artificial Sequence
  Synthetic
agcataatgaauaccctagagagugaaga

SEQ ID NO: 64738 - DNA, 24 bp, Artificial Sequence
  Synthetic
tgtgttgaugacgatgacagugat

SEQ ID NO: 64739 - DNA, 25 bp, Artificial Sequence
  Synthetic
ccagatggguagttgtgggatttut

SEQ ID NO: 64740 - DNA, 27 bp, Artificial Sequence
  Synthetic
ctaagagacaaagaaccugcctttuct

SEQ ID NO: 64741 - DNA, 28 bp, Artificial Sequence
  Synthetic
atgttttaaaattgcuttggcaggauct

SEQ ID NO: 64742 - DNA, 19 bp, Artificial Sequence
  Synthetic
gcucagcaccacgucacaa

SEQ ID NO: 64743 - DNA, 18 bp, Artificial Sequence
  Synthetic
gcaggaaccgggugagug

SEQ ID NO: 64744 - DNA, 25 bp, Artificial Sequence
  Synthetic
cagtatgccaacaugacaaatgugt

SEQ ID NO: 64745 - DNA, 26 bp, Artificial Sequence
  Synthetic
tctataaccugctgaagaagguagag

SEQ ID NO: 64746 - DNA, 27 bp, Artificial Sequence
  Synthetic
aatgactttcagguacaatgcagauca

SEQ ID NO: 64747 - DNA, 28 bp, Artificial Sequence
  Synthetic
acatacatgaaugctctttctgaagugt

SEQ ID NO: 64748 - DNA, 27 bp, Artificial Sequence
  Synthetic
tctgatgttacaagaaaugtccagcut

SEQ ID NO: 64749 - DNA, 28 bp, Artificial Sequence
  Synthetic
actttgtacaaugccactctcgtattut

SEQ ID NO: 64750 - DNA, 17 bp, Artificial Sequence
  Synthetic
gcccuccccucggacaa

SEQ ID NO: 64751 - DNA, 22 bp, Artificial Sequence
  Synthetic
tcacctcuagcctctctgtucc

SEQ ID NO: 64752 - DNA, 17 bp, Artificial Sequence
  Synthetic
cgccgcauccactcucc

SEQ ID NO: 64753 - DNA, 19 bp, Artificial Sequence
  Synthetic
agcuggaggagccctuaga

SEQ ID NO: 64754 - DNA, 28 bp, Artificial Sequence
  Synthetic
aggaagaaaatcaaucactctccttugt

SEQ ID NO: 64755 - DNA, 23 bp, Artificial Sequence
  Synthetic
cctaaaaagcugcgtgtgttucc

SEQ ID NO: 64756 - DNA, 26 bp, Artificial Sequence
  Synthetic
ctcttctacaucatcaacatccuggt

SEQ ID NO: 64757 - DNA, 19 bp, Artificial Sequence
  Synthetic
gcagggagcuccaggaaug

SEQ ID NO: 64758 - DNA, 27 bp, Artificial Sequence
  Synthetic
aaaaattaccuaacaggcatccuggaa

SEQ ID NO: 64759 - DNA, 28 bp, Artificial Sequence
  Synthetic
gtctctgtaagautactgcaagccuaaa

SEQ ID NO: 64760 - DNA, 24 bp, Artificial Sequence
  Synthetic
agaaatctcugttatgccuggcaa

SEQ ID NO: 64761 - DNA, 26 bp, Artificial Sequence
  Synthetic
aaagcacgctuagattggaatacuga

SEQ ID NO: 64762 - DNA, 20 bp, Artificial Sequence
  Synthetic
tggtcaccccucagctcuaa

SEQ ID NO: 64763 - DNA, 21 bp, Artificial Sequence
  Synthetic
gttccuccaccgtacgaguag

SEQ ID NO: 64764 - DNA, 22 bp, Artificial Sequence
  Synthetic
cactgggagutgccatatcugt

SEQ ID NO: 64765 - DNA, 22 bp, Artificial Sequence
  Synthetic
gcagctcugtgttgtggtugat

SEQ ID NO: 64766 - DNA, 31 bp, Artificial Sequence
  Synthetic
tcctggattaaaucaagaaaatgggaatuca

SEQ ID NO: 64767 - DNA, 28 bp, Artificial Sequence
  Synthetic
ccataggtagaaauactggctaaaucct

SEQ ID NO: 64768 - DNA, 23 bp, Artificial Sequence
  Synthetic
tctcttacccucatgcccucaaa

SEQ ID NO: 64769 - DNA, 22 bp, Artificial Sequence
  Synthetic
cctccccauttctacttugcct

SEQ ID NO: 64770 - DNA, 22 bp, Artificial Sequence
  Synthetic
cagctggaggutgttcatcuct

SEQ ID NO: 64771 - DNA, 20 bp, Artificial Sequence
  Synthetic
cttggtgagccugacccaut

SEQ ID NO: 64772 - DNA, 23 bp, Artificial Sequence
  Synthetic
ggaagatgaugaggaaggcauga

SEQ ID NO: 64773 - DNA, 20 bp, Artificial Sequence
  Synthetic
ggaaccugacactggtgcua

SEQ ID NO: 64774 - DNA, 19 bp, Artificial Sequence
  Synthetic
ggtaccugcagcggaagug

SEQ ID NO: 64775 - DNA, 21 bp, Artificial Sequence
  Synthetic
ggctgacgcaaauctccugat

SEQ ID NO: 64776 - DNA, 29 bp, Artificial Sequence
  Synthetic
ggtcagggcauaaatagaaaatacaguca

SEQ ID NO: 64777 - DNA, 21 bp, Artificial Sequence
  Synthetic
atgcaaggcggaaacuttugg

SEQ ID NO: 64778 - DNA, 23 bp, Artificial Sequence
  Synthetic
agagauggcagaaccaaagctuc

SEQ ID NO: 64779 - DNA, 24 bp, Artificial Sequence
  Synthetic
ggtggaggcugattctaattguct

SEQ ID NO: 64780 - DNA, 28 bp, Artificial Sequence
  Synthetic
ctctagguccagaatgaaaauaacagga

SEQ ID NO: 64781 - DNA, 25 bp, Artificial Sequence
  Synthetic
tcggctgttucctctaaatgtgaug

SEQ ID NO: 64782 - DNA, 21 bp, Artificial Sequence
  Synthetic
tccaugaggcacgaguacaga

SEQ ID NO: 64783 - DNA, 28 bp, Artificial Sequence
  Synthetic
tcatgctgttgutaactgatcttctuca

SEQ ID NO: 64784 - DNA, 21 bp, Artificial Sequence
  Synthetic
gaggtaaugggagccagcauc

SEQ ID NO: 64785 - DNA, 24 bp, Artificial Sequence
  Synthetic
gcatagggagcucacgttcttuac

SEQ ID NO: 64786 - DNA, 21 bp, Artificial Sequence
  Synthetic
ggttgccutcctagcuaccct

SEQ ID NO: 64787 - DNA, 20 bp, Artificial Sequence
  Synthetic
ccgaagcggaagutgcucat

SEQ ID NO: 64788 - DNA, 20 bp, Artificial Sequence
  Synthetic
tctcacgcucccttgcttug

SEQ ID NO: 64789 - DNA, 31 bp, Artificial Sequence
  Synthetic
acaccaactatatugtaatcacagtctaaug

SEQ ID NO: 64790 - DNA, 17 bp, Artificial Sequence
  Synthetic
agggcggacgugaccua

SEQ ID NO: 64791 - DNA, 20 bp, Artificial Sequence
  Synthetic
gttggccaguagcaggtuct

SEQ ID NO: 64792 - DNA, 20 bp, Artificial Sequence
  Synthetic
ctcccaccuttgaggacugt

SEQ ID NO: 64793 - DNA, 19 bp, Artificial Sequence
  Synthetic
gcccugaggcccaagaaug

SEQ ID NO: 64794 - DNA, 23 bp, Artificial Sequence
  Synthetic
attcaatgcuggtggaagucaga

SEQ ID NO: 64795 - DNA, 19 bp, Artificial Sequence
  Synthetic
tgaggacagccutgcgaug

SEQ ID NO: 64796 - DNA, 18 bp, Artificial Sequence
  Synthetic
agguggctgugcgaagag

SEQ ID NO: 64797 - DNA, 17 bp, Artificial Sequence
  Synthetic
cggagucgtccccugag

SEQ ID NO: 64798 - DNA, 28 bp, Artificial Sequence
  Synthetic
aacaaccaaagaugatggattcattgug

SEQ ID NO: 64799 - DNA, 26 bp, Artificial Sequence
  Synthetic
tctcattcctutgggtttttguggat

SEQ ID NO: 64800 - DNA, 21 bp, Artificial Sequence
  Synthetic
aagagtuggaacgcugggaat

SEQ ID NO: 64801 - DNA, 28 bp, Artificial Sequence
  Synthetic
ccacutcctcacttatuagaaacacaca

SEQ ID NO: 64802 - DNA, 21 bp, Artificial Sequence
  Synthetic
ctctgcauattgccgcuagga

SEQ ID NO: 64803 - DNA, 27 bp, Artificial Sequence
  Synthetic
caaagagttcctutccacaaatgtgut

SEQ ID NO: 64804 - DNA, 20 bp, Artificial Sequence
  Synthetic
catccagagcggugggtuaa

SEQ ID NO: 64805 - DNA, 23 bp, Artificial Sequence
  Synthetic
gctgcgauagaagagaaccucag

SEQ ID NO: 64806 - DNA, 23 bp, Artificial Sequence
  Synthetic
aggtgtttcugcatgactgauga

SEQ ID NO: 64807 - DNA, 27 bp, Artificial Sequence
  Synthetic
caaaatgcgaacutgtctttcacttut

SEQ ID NO: 64808 - DNA, 26 bp, Artificial Sequence
  Synthetic
caagagaaagguaaagttcggguaga

SEQ ID NO: 64809 - DNA, 24 bp, Artificial Sequence
  Synthetic
aggttcagguattttgtggcugag

SEQ ID NO: 64810 - DNA, 25 bp, Artificial Sequence
  Synthetic
ggtgctttagauggcagttcugaaa

SEQ ID NO: 64811 - DNA, 24 bp, Artificial Sequence
  Synthetic
gtcttggtgcuttcctttgttucc

SEQ ID NO: 64812 - DNA, 21 bp, Artificial Sequence
  Synthetic
cattcaagugcgcaaccauct

SEQ ID NO: 64813 - DNA, 25 bp, Artificial Sequence
  Synthetic
caagttactuccatccacttuccca

SEQ ID NO: 64814 - DNA, 25 bp, Artificial Sequence
  Synthetic
caggtttatgucctttgtcaauccc

SEQ ID NO: 64815 - DNA, 27 bp, Artificial Sequence
  Synthetic
agtggcttugccagtagttaaaauagt

SEQ ID NO: 64816 - DNA, 28 bp, Artificial Sequence
  Synthetic
cctagtgataaaucagaaagctgcucaa

SEQ ID NO: 64817 - DNA, 26 bp, Artificial Sequence
  Synthetic
ttttaaaggaggugcctcatuagacc

SEQ ID NO: 64818 - DNA, 25 bp, Artificial Sequence
  Synthetic
tgttctgcacautgtcatccauagg

SEQ ID NO: 64819 - DNA, 25 bp, Artificial Sequence
  Synthetic
ccaatagcaaccutgtgatcctgut

SEQ ID NO: 64820 - DNA, 24 bp, Artificial Sequence
  Synthetic
cattggaccaccuccttcttgaut

SEQ ID NO: 64821 - DNA, 28 bp, Artificial Sequence
  Synthetic
gctacaaaaauggtttgcattccuaaga

SEQ ID NO: 64822 - DNA, 25 bp, Artificial Sequence
  Synthetic
acttccatcugtgagtctuaccagt

SEQ ID NO: 64823 - DNA, 28 bp, Artificial Sequence
  Synthetic
tcagattcatauggcttctgcaagtaut

SEQ ID NO: 64824 - DNA, 24 bp, Artificial Sequence
  Synthetic
cccatacccutaaaaatccgucca

SEQ ID NO: 64825 - DNA, 25 bp, Artificial Sequence
  Synthetic
gggctggttcuagtgatgtttcuac

SEQ ID NO: 64826 - DNA, 23 bp, Artificial Sequence
  Synthetic
agctctcgaugatgtctgtugag

SEQ ID NO: 64827 - DNA, 28 bp, Artificial Sequence
  Synthetic
gcatcacttuaaaagccagcaacauaat

SEQ ID NO: 64828 - DNA, 21 bp, Artificial Sequence
  Synthetic
aggtuggagagcttcauccac

SEQ ID NO: 64829 - DNA, 23 bp, Artificial Sequence
  Synthetic
agagcccuacagtttgacccuaa

SEQ ID NO: 64830 - DNA, 28 bp, Artificial Sequence
  Synthetic
cacctgaaatugatgtttggtttcucaa

SEQ ID NO: 64831 - DNA, 28 bp, Artificial Sequence
  Synthetic
ctgtgtgtttuacaaaagcatcatcuga

SEQ ID NO: 64832 - DNA, 25 bp, Artificial Sequence
  Synthetic
caaugattgtcuccaccagaggaat

SEQ ID NO: 64833 - DNA, 23 bp, Artificial Sequence
  Synthetic
gggtatgugtgttcttcaucagg

SEQ ID NO: 64834 - DNA, 28 bp, Artificial Sequence
  Synthetic
caaaaggacagaggguaacaagaguaaa

SEQ ID NO: 64835 - DNA, 24 bp, Artificial Sequence
  Synthetic
tttcggctcucctttcattuccat

SEQ ID NO: 64836 - DNA, 27 bp, Artificial Sequence
  Synthetic
ttgtggaaaaugtcagtgaacuacagt

SEQ ID NO: 64837 - DNA, 29 bp, Artificial Sequence
  Synthetic
tgaatgtacugaaaaccaggtatctucat

SEQ ID NO: 64838 - DNA, 21 bp, Artificial Sequence
  Synthetic
gtgaggtgaaagugccctgua

SEQ ID NO: 64839 - DNA, 28 bp, Artificial Sequence
  Synthetic
ggaaaacaggcuagattgtctgctauat

SEQ ID NO: 64840 - DNA, 28 bp, Artificial Sequence
  Synthetic
ggcttcaagtugtctttttaatgaucct

SEQ ID NO: 64841 - DNA, 26 bp, Artificial Sequence
  Synthetic
gtacctgctguaagtcttcacttuca

SEQ ID NO: 64842 - DNA, 21 bp, Artificial Sequence
  Synthetic
gggaagtcucccaggaaguca

SEQ ID NO: 64843 - DNA, 22 bp, Artificial Sequence
  Synthetic
ggctgtccuggagacaaactut

SEQ ID NO: 64844 - DNA, 23 bp, Artificial Sequence
  Synthetic
agucagagagtagugaggaggga

SEQ ID NO: 64845 - DNA, 25 bp, Artificial Sequence
  Synthetic
ttgctcttcaacutcacaccauagt

SEQ ID NO: 64846 - DNA, 23 bp, Artificial Sequence
  Synthetic
ggctctctccuctcatcctgtut

SEQ ID NO: 64847 - DNA, 21 bp, Artificial Sequence
  Synthetic
gcctccccaucactgtcugat

SEQ ID NO: 64848 - DNA, 21 bp, Artificial Sequence
  Synthetic
agcaaggaguccagtcggaua

SEQ ID NO: 64849 - DNA, 25 bp, Artificial Sequence
  Synthetic
catgtggguaagtatggaaguaggg

SEQ ID NO: 64850 - DNA, 22 bp, Artificial Sequence
  Synthetic
ggaagugcagcagaaaggcaua

SEQ ID NO: 64851 - DNA, 26 bp, Artificial Sequence
  Synthetic
gggcatctaaautcactggatuggaa

SEQ ID NO: 64852 - DNA, 26 bp, Artificial Sequence
  Synthetic
ctgaacautctgcagaugagaaggaa

SEQ ID NO: 64853 - DNA, 27 bp, Artificial Sequence
  Synthetic
ggctatttgcuatcctggaaagtucat

SEQ ID NO: 64854 - DNA, 26 bp, Artificial Sequence
  Synthetic
acttgtgcccaguttctaaatcauct

SEQ ID NO: 64855 - DNA, 19 bp, Artificial Sequence
  Synthetic
gccaaggucccccttctug

SEQ ID NO: 64856 - DNA, 24 bp, Artificial Sequence
  Synthetic
ccccagccuttagataaggucaga

SEQ ID NO: 64857 - DNA, 23 bp, Artificial Sequence
  Synthetic
ggatttauccagccttgggucag

SEQ ID NO: 64858 - DNA, 28 bp, Artificial Sequence
  Synthetic
gcatgagucaactggaagtuaaagaaaa

SEQ ID NO: 64859 - DNA, 27 bp, Artificial Sequence
  Synthetic
tggcacggcuttaagtcatauaagaat

SEQ ID NO: 64860 - DNA, 23 bp, Artificial Sequence
  Synthetic
ctctguggaaccagctctacauc

SEQ ID NO: 64861 - DNA, 24 bp, Artificial Sequence
  Synthetic
aagaaggutgaactgtuggacaca

SEQ ID NO: 64862 - DNA, 22 bp, Artificial Sequence
  Synthetic
cagggtggucctggtagauaga

SEQ ID NO: 64863 - DNA, 22 bp, Artificial Sequence
  Synthetic
tcatgucgggagctgcuaaaaa

SEQ ID NO: 64864 - DNA, 22 bp, Artificial Sequence
  Synthetic
aggtuccactgtatugggagga

SEQ ID NO: 64865 - DNA, 21 bp, Artificial Sequence
  Synthetic
cctcgguggagcttggttuac

SEQ ID NO: 64866 - DNA, 21 bp, Artificial Sequence
  Synthetic
gaggcttaaucctgagcuggt

SEQ ID NO: 64867 - DNA, 19 bp, Artificial Sequence
  Synthetic
ccaaccucaacgggctcua

SEQ ID NO: 64868 - DNA, 18 bp, Artificial Sequence
  Synthetic
ctgcccguccctgtctut

SEQ ID NO: 64869 - DNA, 19 bp, Artificial Sequence
  Synthetic
aacagcucagccgttucct

SEQ ID NO: 64870 - DNA, 21 bp, Artificial Sequence
  Synthetic
ggagaaccaggcuggaggtua

SEQ ID NO: 64871 - DNA, 21 bp, Artificial Sequence
  Synthetic
cgtggguatgtgcuggagaag

SEQ ID NO: 64872 - DNA, 22 bp, Artificial Sequence
  Synthetic
gcagacagacuaatgcuagggt

SEQ ID NO: 64873 - DNA, 23 bp, Artificial Sequence
  Synthetic
tcactgcatuctcctctctucct

SEQ ID NO: 64874 - DNA, 21 bp, Artificial Sequence
  Synthetic
ccctgcaugtgtggatgugaa

SEQ ID NO: 64875 - DNA, 22 bp, Artificial Sequence
  Synthetic
ccaguagacaccttcttugcct

SEQ ID NO: 64876 - DNA, 28 bp, Artificial Sequence
  Synthetic
ccaagcacaaaggaacuatctcattuga

SEQ ID NO: 64877 - DNA, 28 bp, Artificial Sequence
  Synthetic
ccgaaatatacaaautcagcctgacgua

SEQ ID NO: 64878 - DNA, 21 bp, Artificial Sequence
  Synthetic
gccacgagggutagacaaugt

SEQ ID NO: 64879 - DNA, 28 bp, Artificial Sequence
  Synthetic
aggaatgtatuggattcagaaugagcaa

SEQ ID NO: 64880 - DNA, 22 bp, Artificial Sequence
  Synthetic
ccagactgugaagagggaugga

SEQ ID NO: 64881 - DNA, 21 bp, Artificial Sequence
  Synthetic
caugtaugaagcggcagcaac

SEQ ID NO: 64882 - DNA, 26 bp, Artificial Sequence
  Synthetic
ataatcctttatguggcaagtgagut

SEQ ID NO: 64883 - DNA, 21 bp, Artificial Sequence
  Synthetic
ccttccagagcugcggataut

SEQ ID NO: 64884 - DNA, 21 bp, Artificial Sequence
  Synthetic
caggaggugacactguagacc

SEQ ID NO: 64885 - DNA, 28 bp, Artificial Sequence
  Synthetic
aggaatctatgcuttaggtgtgtacuga

SEQ ID NO: 64886 - DNA, 22 bp, Artificial Sequence
  Synthetic
caaaatcccaccuggtcucaac

SEQ ID NO: 64887 - DNA, 29 bp, Artificial Sequence
  Synthetic
agaacaaacatcacaautacaggagacut

SEQ ID NO: 64888 - DNA, 29 bp, Artificial Sequence
  Synthetic
agaaagtaagcaagaugagagagauaggt

SEQ ID NO: 64889 - DNA, 28 bp, Artificial Sequence
  Synthetic
tcctgagttaaugtgtgtttctttgugt

SEQ ID NO: 64890 - DNA, 28 bp, Artificial Sequence
  Synthetic
ttcattttgagcuattcccatccauaca

SEQ ID NO: 64891 - DNA, 28 bp, Artificial Sequence
  Synthetic
tcattttcttacagutgcctgtgtacut

SEQ ID NO: 64892 - DNA, 21 bp, Artificial Sequence
  Synthetic
ggaggcugcatcuaggcaaag

SEQ ID NO: 64893 - DNA, 27 bp, Artificial Sequence
  Synthetic
agacatcagcutccattatgaatucca

SEQ ID NO: 64894 - DNA, 23 bp, Artificial Sequence
  Synthetic
aagaggaaacaucugcggaagaa

SEQ ID NO: 64895 - DNA, 25 bp, Artificial Sequence
  Synthetic
ccaaagtggutcgtttctgatucat

SEQ ID NO: 64896 - DNA, 20 bp, Artificial Sequence
  Synthetic
cagtgtauccacgugggcaa

SEQ ID NO: 64897 - DNA, 26 bp, Artificial Sequence
  Synthetic
acagaggaaggaaaugucaaacaagt

SEQ ID NO: 64898 - DNA, 22 bp, Artificial Sequence
  Synthetic
agtaagccuttcaagggucagg

SEQ ID NO: 64899 - DNA, 24 bp, Artificial Sequence
  Synthetic
tcacatgtgcaaucttctgtgugt

SEQ ID NO: 64900 - DNA, 24 bp, Artificial Sequence
  Synthetic
acccattttccutaccttgtgucc

SEQ ID NO: 64901 - DNA, 26 bp, Artificial Sequence
  Synthetic
gccttctgaucactttctguaccaaa

SEQ ID NO: 64902 - DNA, 24 bp, Artificial Sequence
  Synthetic
cccacaaaacacacacutacucgt

SEQ ID NO: 64903 - DNA, 25 bp, Artificial Sequence
  Synthetic
ggtctcaacttugcacctttttcuc

SEQ ID NO: 64904 - DNA, 22 bp, Artificial Sequence
  Synthetic
ggctcuggacttcgauaggact

SEQ ID NO: 64905 - DNA, 27 bp, Artificial Sequence
  Synthetic
ttctcactttcuccccatcttttctuc

SEQ ID NO: 64906 - DNA, 26 bp, Artificial Sequence
  Synthetic
aaaaatcagaugactgacctgucgaa

SEQ ID NO: 64907 - DNA, 21 bp, Artificial Sequence
  Synthetic
gggagccucgtgactgatuag

SEQ ID NO: 64908 - DNA, 25 bp, Artificial Sequence
  Synthetic
tccttttcttugggccaatctuaca

SEQ ID NO: 64909 - DNA, 24 bp, Artificial Sequence
  Synthetic
agcctccctutcctgtatttcuct

SEQ ID NO: 64910 - DNA, 27 bp, Artificial Sequence
  Synthetic
aaaataaggtggaauctctcctgtugg

SEQ ID NO: 64911 - DNA, 22 bp, Artificial Sequence
  Synthetic
aagacgagcugtctctgttgug

SEQ ID NO: 64912 - DNA, 20 bp, Artificial Sequence
  Synthetic
agacacaucccgggtctcut

SEQ ID NO: 64913 - DNA, 27 bp, Artificial Sequence
  Synthetic
caggaccatagutatgaccagctttut

SEQ ID NO: 64914 - DNA, 21 bp, Artificial Sequence
  Synthetic
gtgaacaaggccagugacgua

SEQ ID NO: 64915 - DNA, 26 bp, Artificial Sequence
  Synthetic
ctccgcactcuaaatgttggaatuag

SEQ ID NO: 64916 - DNA, 20 bp, Artificial Sequence
  Synthetic
gctacaatugccgccuggaa

SEQ ID NO: 64917 - DNA, 25 bp, Artificial Sequence
  Synthetic
agaaagccaguctcttcaaactuca

SEQ ID NO: 64918 - DNA, 27 bp, Artificial Sequence
  Synthetic
ccaagaguacaaacttcacacuaacct

SEQ ID NO: 64919 - DNA, 28 bp, Artificial Sequence
  Synthetic
gtctgcaaaccagugataaaagcttaut

SEQ ID NO: 64920 - DNA, 27 bp, Artificial Sequence
  Synthetic
tgttcctaacucctgagcaaauagaga

SEQ ID NO: 64921 - DNA, 28 bp, Artificial Sequence
  Synthetic
ccatgaatgtuagcagaatgtctttuca

SEQ ID NO: 64922 - DNA, 24 bp, Artificial Sequence
  Synthetic
ccttcctacacucactgctttguc

SEQ ID NO: 64923 - DNA, 21 bp, Artificial Sequence
  Synthetic
ggaucccaccccattucacac

SEQ ID NO: 64924 - DNA, 24 bp, Artificial Sequence
  Synthetic
gaaattucaaccacagcagaugac

SEQ ID NO: 64925 - DNA, 28 bp, Artificial Sequence
  Synthetic
gtgacaagaaaucaagtagcaacaauca

SEQ ID NO: 64926 - DNA, 22 bp, Artificial Sequence
  Synthetic
ctcataguagcacagcugcaga

SEQ ID NO: 64927 - DNA, 27 bp, Artificial Sequence
  Synthetic
gcttctacaagtuagctgacttcctua

SEQ ID NO: 64928 - DNA, 24 bp, Artificial Sequence
  Synthetic
tggctgaaucacaagaagcugaat

SEQ ID NO: 64929 - DNA, 27 bp, Artificial Sequence
  Synthetic
tcaaattgtccutttcaaactgcaugg

SEQ ID NO: 64930 - DNA, 27 bp, Artificial Sequence
  Synthetic
gtcattgauggctatgcagaugaaaaa

SEQ ID NO: 64931 - DNA, 25 bp, Artificial Sequence
  Synthetic
cctctgcttucatagcttcctttug

SEQ ID NO: 64932 - DNA, 29 bp, Artificial Sequence
  Synthetic
aagattttaactgaaugccctactgtuct

SEQ ID NO: 64933 - DNA, 25 bp, Artificial Sequence
  Synthetic
ggatgcaatgcucttactcagttut

SEQ ID NO: 64934 - DNA, 23 bp, Artificial Sequence
  Synthetic
cagctttcacggauctagaggug

SEQ ID NO: 64935 - DNA, 28 bp, Artificial Sequence
  Synthetic
ccagcagagaauagagggagaatuaaaa

SEQ ID NO: 64936 - DNA, 24 bp, Artificial Sequence
  Synthetic
tgatgctacaugctgaaggucaac

SEQ ID NO: 64937 - DNA, 28 bp, Artificial Sequence
  Synthetic
ggctgttggtacauttctcaacttacut

SEQ ID NO: 64938 - DNA, 22 bp, Artificial Sequence
  Synthetic
ttctaagggugctcgtggttuc

SEQ ID NO: 64939 - DNA, 22 bp, Artificial Sequence
  Synthetic
cctttggcaaacuccagggaut

SEQ ID NO: 64940 - DNA, 21 bp, Artificial Sequence
  Synthetic
gcuttcgugggaacccacaat

SEQ ID NO: 64941 - DNA, 25 bp, Artificial Sequence
  Synthetic
gaagagcacaagagugggagaaaua

SEQ ID NO: 64942 - DNA, 21 bp, Artificial Sequence
  Synthetic
tggccaacuatgcctcucaga

SEQ ID NO: 64943 - DNA, 26 bp, Artificial Sequence
  Synthetic
ccacttcccaaagcuattcccataut

SEQ ID NO: 64944 - DNA, 22 bp, Artificial Sequence
  Synthetic
acugcaguacccacaaaaagac

SEQ ID NO: 64945 - DNA, 24 bp, Artificial Sequence
  Synthetic
gccagttccuaaatccaggaucaa

SEQ ID NO: 64946 - DNA, 25 bp, Artificial Sequence
  Synthetic
tgccattaauaagctttaggugcca

SEQ ID NO: 64947 - DNA, 28 bp, Artificial Sequence
  Synthetic
ctgctctcaucagggaaaggaaataaut

SEQ ID NO: 64948 - DNA, 27 bp, Artificial Sequence
  Synthetic
tgcttttatcguagttgatgctgaugt

SEQ ID NO: 64949 - DNA, 25 bp, Artificial Sequence
  Synthetic
tttaccatguttttgccugcaaagt

SEQ ID NO: 64950 - DNA, 26 bp, Artificial Sequence
  Synthetic
acattcatcucccttttcacctucac

SEQ ID NO: 64951 - DNA, 20 bp, Artificial Sequence
  Synthetic
ccagctcuggcttcagucat

SEQ ID NO: 64952 - DNA, 20 bp, Artificial Sequence
  Synthetic
aggagctgugctttcgagut

SEQ ID NO: 64953 - DNA, 18 bp, Artificial Sequence
  Synthetic
acacgacgccuctcccua

SEQ ID NO: 64954 - DNA, 18 bp, Artificial Sequence
  Synthetic
cagccugggagggaauga

SEQ ID NO: 64955 - DNA, 18 bp, Artificial Sequence
  Synthetic
cgcatcuccagcctcgug

SEQ ID NO: 64956 - DNA, 23 bp, Artificial Sequence
  Synthetic
ccacaaagtugagggtgattugg

SEQ ID NO: 64957 - DNA, 23 bp, Artificial Sequence
  Synthetic
cctggtcuccactctcgatcuat

SEQ ID NO: 64958 - DNA, 25 bp, Artificial Sequence
  Synthetic
ctcttactatuctgtccacgauggt

SEQ ID NO: 64959 - DNA, 29 bp, Artificial Sequence
  Synthetic
gctctcttaagcucactaattttggucat

SEQ ID NO: 64960 - DNA, 17 bp, Artificial Sequence
  Synthetic
ggaagcugcggccuaca

SEQ ID NO: 64961 - DNA, 18 bp, Artificial Sequence
  Synthetic
cccacgucggccatguaa

SEQ ID NO: 64962 - DNA, 21 bp, Artificial Sequence
  Synthetic
ctcttggaacagccuggtcut

SEQ ID NO: 64963 - DNA, 21 bp, Artificial Sequence
  Synthetic
ccgcttccccuaaccagatug

SEQ ID NO: 64964 - DNA, 19 bp, Artificial Sequence
  Synthetic
cucauggcccaagcagagt

SEQ ID NO: 64965 - DNA, 19 bp, Artificial Sequence
  Synthetic
ccccaccaucttccuccct

SEQ ID NO: 64966 - DNA, 20 bp, Artificial Sequence
  Synthetic
cccatggugcagtccatcuc

SEQ ID NO: 64967 - DNA, 21 bp, Artificial Sequence
  Synthetic
gctguaaggtgctugggacat

SEQ ID NO: 64968 - DNA, 25 bp, Artificial Sequence
  Synthetic
aactgttttcuccctctatgtggug

SEQ ID NO: 64969 - DNA, 25 bp, Artificial Sequence
  Synthetic
caggttatttgccutttcccttgut

SEQ ID NO: 64970 - DNA, 22 bp, Artificial Sequence
  Synthetic
cttctgaagcagutggcacaut

SEQ ID NO: 64971 - DNA, 23 bp, Artificial Sequence
  Synthetic
ccaaagucccaggatgtatccuc

SEQ ID NO: 64972 - DNA, 19 bp, Artificial Sequence
  Synthetic
ctcagcgucttgccgauca

SEQ ID NO: 64973 - DNA, 22 bp, Artificial Sequence
  Synthetic
gtcaaacaggcagacuccuaca

SEQ ID NO: 64974 - DNA, 22 bp, Artificial Sequence
  Synthetic
caggacaucgagaggagaagut

SEQ ID NO: 64975 - DNA, 23 bp, Artificial Sequence
  Synthetic
tccattttgcutccgttgtcuct

SEQ ID NO: 64976 - DNA, 21 bp, Artificial Sequence
  Synthetic
cctggcucttcccacuaaact

SEQ ID NO: 64977 - DNA, 25 bp, Artificial Sequence
  Synthetic
cctcaatgtauccctttggcattuc

SEQ ID NO: 64978 - DNA, 22 bp, Artificial Sequence
  Synthetic
gattgtccugagctgcggaaua

SEQ ID NO: 64979 - DNA, 24 bp, Artificial Sequence
  Synthetic
tcagtgcaaucaccaatatgguca

SEQ ID NO: 64980 - DNA, 21 bp, Artificial Sequence
  Synthetic
ggcaagcuagtgctgatugac

SEQ ID NO: 64981 - DNA, 26 bp, Artificial Sequence
  Synthetic
gaccccugggaaggtaattttagaut

SEQ ID NO: 64982 - DNA, 22 bp, Artificial Sequence
  Synthetic
gttgaaaggcaaauggccagua

SEQ ID NO: 64983 - DNA, 25 bp, Artificial Sequence
  Synthetic
tttaagcugcagaaacaagccatuc

SEQ ID NO: 64984 - DNA, 19 bp, Artificial Sequence
  Synthetic
gcccaagagccaagugguc

SEQ ID NO: 64985 - DNA, 28 bp, Artificial Sequence
  Synthetic
gggttattttgaucaagtgcatctctut

SEQ ID NO: 64986 - DNA, 27 bp, Artificial Sequence
  Synthetic
aatgattccuaccattgtuccacaagt

SEQ ID NO: 64987 - DNA, 26 bp, Artificial Sequence
  Synthetic
gagaaaaucgccgaaagtuaccaaaa

SEQ ID NO: 64988 - DNA, 20 bp, Artificial Sequence
  Synthetic
gtatcgugggcctagcugag

SEQ ID NO: 64989 - DNA, 23 bp, Artificial Sequence
  Synthetic
attgcgtttccugctttccttut

SEQ ID NO: 64990 - DNA, 20 bp, Artificial Sequence
  Synthetic
ctgggtgggucataaggugt

SEQ ID NO: 64991 - DNA, 25 bp, Artificial Sequence
  Synthetic
gctacaggaautcgaggattucagt

SEQ ID NO: 64992 - DNA, 20 bp, Artificial Sequence
  Synthetic
cgccugggaggttactguaa

SEQ ID NO: 64993 - DNA, 25 bp, Artificial Sequence
  Synthetic
cccgggactuaccactgaataaauc

SEQ ID NO: 64994 - DNA, 20 bp, Artificial Sequence
  Synthetic
ctgcuggcactcaugacaac

SEQ ID NO: 64995 - DNA, 25 bp, Artificial Sequence
  Synthetic
gcatactgatuggagtcacgtttut

SEQ ID NO: 64996 - DNA, 26 bp, Artificial Sequence
  Synthetic
cattttgacuccagctctttuaggga

SEQ ID NO: 64997 - DNA, 21 bp, Artificial Sequence
  Synthetic
tcagggcugtagctucaggat

SEQ ID NO: 64998 - DNA, 21 bp, Artificial Sequence
  Synthetic
gtttgccauaaagcggcaguc

SEQ ID NO: 64999 - DNA, 20 bp, Artificial Sequence
  Synthetic
tgggatguagagggcacuca

SEQ ID NO: 65000 - DNA, 21 bp, Artificial Sequence
  Synthetic
gcttatuccggcacaugcaaa

SEQ ID NO: 65001 - DNA, 29 bp, Artificial Sequence
  Synthetic
ggttgguagagaacttagaguagaaaagg

SEQ ID NO: 65002 - DNA, 23 bp, Artificial Sequence
  Synthetic
tgtttcugccacctctguacaaa

SEQ ID NO: 65003 - DNA, 23 bp, Artificial Sequence
  Synthetic
caatggtccugattgcagcaaua

SEQ ID NO: 65004 - DNA, 23 bp, Artificial Sequence
  Synthetic
cattcaccaucgagtgccaaaug

SEQ ID NO: 65005 - DNA, 28 bp, Artificial Sequence
  Synthetic
ctatctcacattcuagcaagttggctua

SEQ ID NO: 65006 - DNA, 22 bp, Artificial Sequence
  Synthetic
gcatgggugaaagctagcuaga

SEQ ID NO: 65007 - DNA, 28 bp, Artificial Sequence
  Synthetic
ggtgguagaactatgtgauagaaaaggt

SEQ ID NO: 65008 - DNA, 26 bp, Artificial Sequence
  Synthetic
ggctactgauttgaaaactuccacaa

SEQ ID NO: 65009 - DNA, 21 bp, Artificial Sequence
  Synthetic
gcattgutggtgtucaggact

SEQ ID NO: 65010 - DNA, 17 bp, Artificial Sequence
  Synthetic
gccgagguccccaugac

SEQ ID NO: 65011 - DNA, 17 bp, Artificial Sequence
  Synthetic
gcgcttuccagcgggua

SEQ ID NO: 65012 - DNA, 21 bp, Artificial Sequence
  Synthetic
cgacttctggugctctcagut

SEQ ID NO: 65013 - DNA, 21 bp, Artificial Sequence
  Synthetic
ctggatgcugaaggguaggag

SEQ ID NO: 65014 - DNA, 21 bp, Artificial Sequence
  Synthetic
cgggtcctcutgcctagacua

SEQ ID NO: 65015 - DNA, 26 bp, Artificial Sequence
  Synthetic
gagtttacctccautctgagaagcug

SEQ ID NO: 65016 - DNA, 21 bp, Artificial Sequence
  Synthetic
cgcagtcugagagccttugaa

SEQ ID NO: 65017 - DNA, 20 bp, Artificial Sequence
  Synthetic
tcccccaauccaaggcagua

SEQ ID NO: 65018 - DNA, 20 bp, Artificial Sequence
  Synthetic
tggaggtcgugaaagctgug

SEQ ID NO: 65019 - DNA, 22 bp, Artificial Sequence
  Synthetic
cccaaaacaugagccgctagua

SEQ ID NO: 65020 - DNA, 21 bp, Artificial Sequence
  Synthetic
ggttggcuctgaggactugac

SEQ ID NO: 65021 - DNA, 22 bp, Artificial Sequence
  Synthetic
cccctgaggugtgtctggaaua

SEQ ID NO: 65022 - DNA, 20 bp, Artificial Sequence
  Synthetic
agcagaaaugcagcccugat

SEQ ID NO: 65023 - DNA, 23 bp, Artificial Sequence
  Synthetic
ttgtaacccagutcagtctgcuc

SEQ ID NO: 65024 - DNA, 26 bp, Artificial Sequence
  Synthetic
tgtattcaguatagtcgcuggaggat

SEQ ID NO: 65025 - DNA, 27 bp, Artificial Sequence
  Synthetic
agagccagaatautccccatgatttut

SEQ ID NO: 65026 - DNA, 25 bp, Artificial Sequence
  Synthetic
tcctcctcatautcttcctcagcut

SEQ ID NO: 65027 - DNA, 28 bp, Artificial Sequence
  Synthetic
catggtagattcuacagaaatcacauga

SEQ ID NO: 65028 - DNA, 21 bp, Artificial Sequence
  Synthetic
tgttgctgugattagcugcct

SEQ ID NO: 65029 - DNA, 22 bp, Artificial Sequence
  Synthetic
ggaugaagaguggaagggcaaa

SEQ ID NO: 65030 - DNA, 21 bp, Artificial Sequence
  Synthetic
tgaggcctuggctaagcttut

SEQ ID NO: 65031 - DNA, 22 bp, Artificial Sequence
  Synthetic
tccatgaugctgtacuccacct

SEQ ID NO: 65032 - DNA, 23 bp, Artificial Sequence
  Synthetic
ggagtttgtgauctctcctgugg

SEQ ID NO: 65033 - DNA, 26 bp, Artificial Sequence
  Synthetic
tgtttacaagaauctctguggcaagt

SEQ ID NO: 65034 - DNA, 20 bp, Artificial Sequence
  Synthetic
ggccccaugtgatgacaucc

SEQ ID NO: 65035 - DNA, 22 bp, Artificial Sequence
  Synthetic
gtaatcagggcacuagctcugt

SEQ ID NO: 65036 - DNA, 22 bp, Artificial Sequence
  Synthetic
gcuagaggacaucaacgaccag

SEQ ID NO: 65037 - DNA, 22 bp, Artificial Sequence
  Synthetic
ctgttgtugccaatgtcugcat

SEQ ID NO: 65038 - DNA, 22 bp, Artificial Sequence
  Synthetic
gcauctacatccugagggacga

SEQ ID NO: 65039 - DNA, 21 bp, Artificial Sequence
  Synthetic
cacaatgcccugtctctccut

SEQ ID NO: 65040 - DNA, 24 bp, Artificial Sequence
  Synthetic
ggtgatccagaugatcgaugagaa

SEQ ID NO: 65041 - DNA, 22 bp, Artificial Sequence
  Synthetic
ggaggauagccaggacgaugat

SEQ ID NO: 65042 - DNA, 27 bp, Artificial Sequence
  Synthetic
gtagaaaggagugtgtgagtagaucac

SEQ ID NO: 65043 - DNA, 25 bp, Artificial Sequence
  Synthetic
gaagucagagcagatattuccccaa

SEQ ID NO: 65044 - DNA, 21 bp, Artificial Sequence
  Synthetic
gtggagaautccgaggauccc

SEQ ID NO: 65045 - DNA, 23 bp, Artificial Sequence
  Synthetic
ggtgagacauagtgccatgcaut

SEQ ID NO: 65046 - DNA, 25 bp, Artificial Sequence
  Synthetic
ccagcatttcugactagttccctua

SEQ ID NO: 65047 - DNA, 21 bp, Artificial Sequence
  Synthetic
gactccaguaacaggcauggg

SEQ ID NO: 65048 - DNA, 23 bp, Artificial Sequence
  Synthetic
tggaggatcutgttggacuccat

SEQ ID NO: 65049 - DNA, 21 bp, Artificial Sequence
  Synthetic
ctgagaagaccaccugcauct

SEQ ID NO: 65050 - DNA, 27 bp, Artificial Sequence
  Synthetic
ctcagcuaaacctttcatugagacagt

SEQ ID NO: 65051 - DNA, 27 bp, Artificial Sequence
  Synthetic
ctcatgattggtutgaggttcatctuc

SEQ ID NO: 65052 - DNA, 19 bp, Artificial Sequence
  Synthetic
ccaggccguacttgtugct

SEQ ID NO: 65053 - DNA, 17 bp, Artificial Sequence
  Synthetic
ggugcacgcuccaacca

SEQ ID NO: 65054 - DNA, 23 bp, Artificial Sequence
  Synthetic
gccgtautcactaagugagcaga

SEQ ID NO: 65055 - DNA, 22 bp, Artificial Sequence
  Synthetic
aggtgttgaugagctccaagut

SEQ ID NO: 65056 - DNA, 20 bp, Artificial Sequence
  Synthetic
cttgcgcaaccugcttaucc

SEQ ID NO: 65057 - DNA, 20 bp, Artificial Sequence
  Synthetic
gcacagcggacaaagucuca

SEQ ID NO: 65058 - DNA, 22 bp, Artificial Sequence
  Synthetic
gatgttccaacucagcctguct

SEQ ID NO: 65059 - DNA, 21 bp, Artificial Sequence
  Synthetic
catgacguacacactgucggt

SEQ ID NO: 65060 - DNA, 21 bp, Artificial Sequence
  Synthetic
ctgtccccauagtccatcguc

SEQ ID NO: 65061 - DNA, 21 bp, Artificial Sequence
  Synthetic
tggctcttucccacagtccua

SEQ ID NO: 65062 - DNA, 24 bp, Artificial Sequence
  Synthetic
tccucaggagaagtcuaacaacga

SEQ ID NO: 65063 - DNA, 21 bp, Artificial Sequence
  Synthetic
cctccaaucggcuacagacaa

SEQ ID NO: 65064 - DNA, 28 bp, Artificial Sequence
  Synthetic
gtccctugcaaaaggaagaaaauagaac

SEQ ID NO: 65065 - DNA, 27 bp, Artificial Sequence
  Synthetic
ggttgagaugaaaggattccacugaaa

SEQ ID NO: 65066 - DNA, 28 bp, Artificial Sequence
  Synthetic
gtggagaaguagaatcaatggaagauga

SEQ ID NO: 65067 - DNA, 28 bp, Artificial Sequence
  Synthetic
gaggcctcttauactgccaaatcaauat

SEQ ID NO: 65068 - DNA, 29 bp, Artificial Sequence
  Synthetic
ctgagaagtttaaaugttgggtagtucct

SEQ ID NO: 65069 - DNA, 28 bp, Artificial Sequence
  Synthetic
cactgagtggcauctaagtttgctaaua

SEQ ID NO: 65070 - DNA, 22 bp, Artificial Sequence
  Synthetic
agacagugaccuaagggaccaa

SEQ ID NO: 65071 - DNA, 22 bp, Artificial Sequence
  Synthetic
gattcccttuccctgtgtccuc

SEQ ID NO: 65072 - DNA, 20 bp, Artificial Sequence
  Synthetic
ggtguagaggccagagucgt

SEQ ID NO: 65073 - DNA, 24 bp, Artificial Sequence
  Synthetic
cctaccctctuctgctcctctauc

SEQ ID NO: 65074 - DNA, 22 bp, Artificial Sequence
  Synthetic
ggtgatgcutggttcagugagt

SEQ ID NO: 65075 - DNA, 22 bp, Artificial Sequence
  Synthetic
gccgatgauggcgtagatgaug

SEQ ID NO: 65076 - DNA, 20 bp, Artificial Sequence
  Synthetic
ctgaactcugtgcgcuccat

SEQ ID NO: 65077 - DNA, 22 bp, Artificial Sequence
  Synthetic
cgaaucccagcagagaagaguc

SEQ ID NO: 65078 - DNA, 26 bp, Artificial Sequence
  Synthetic
tcactcttttcuccttgtcctcucat

SEQ ID NO: 65079 - DNA, 21 bp, Artificial Sequence
  Synthetic
gggagccacuctcctactcug

SEQ ID NO: 65080 - DNA, 21 bp, Artificial Sequence
  Synthetic
gggagggugatggcagacuaa

SEQ ID NO: 65081 - DNA, 25 bp, Artificial Sequence
  Synthetic
caagautcttgcctuccaaaaccag

SEQ ID NO: 65082 - DNA, 22 bp, Artificial Sequence
  Synthetic
gggtggtcaugatggatcucct

SEQ ID NO: 65083 - DNA, 27 bp, Artificial Sequence
  Synthetic
aaagaaggaagutctggaaccugaaaa

SEQ ID NO: 65084 - DNA, 21 bp, Artificial Sequence
  Synthetic
ctcacatgugccagtgucagt

SEQ ID NO: 65085 - DNA, 21 bp, Artificial Sequence
  Synthetic
ctucagcaggtgucaccagat

SEQ ID NO: 65086 - DNA, 23 bp, Artificial Sequence
  Synthetic
ctgcttcctuccattgttgtuca

SEQ ID NO: 65087 - DNA, 24 bp, Artificial Sequence
  Synthetic
cuaacatagacaaugccaaacgca

SEQ ID NO: 65088 - DNA, 28 bp, Artificial Sequence
  Synthetic
ctgtcttgtcttugctgatgtttcaaua

SEQ ID NO: 65089 - DNA, 28 bp, Artificial Sequence
  Synthetic
gaagatgtaccuatggtcctaguaggaa

SEQ ID NO: 65090 - DNA, 18 bp, Artificial Sequence
  Synthetic
gaaagcccuccccagucc

SEQ ID NO: 65091 - DNA, 27 bp, Artificial Sequence
  Synthetic
tgcactgtaataauccagactgtgtut

SEQ ID NO: 65092 - DNA, 21 bp, Artificial Sequence
  Synthetic
tgaggttcugcagagctccua

SEQ ID NO: 65093 - DNA, 28 bp, Artificial Sequence
  Synthetic
gcattaattctggautccttttgtgugt

SEQ ID NO: 65094 - DNA, 28 bp, Artificial Sequence
  Synthetic
acagttcataaugccagtgtaaactugt

SEQ ID NO: 65095 - DNA, 28 bp, Artificial Sequence
  Synthetic
caagctacccuaatcctgatctucaaaa

SEQ ID NO: 65096 - DNA, 26 bp, Artificial Sequence
  Synthetic
tgcagtcattaugctgccatctatut

SEQ ID NO: 65097 - DNA, 24 bp, Artificial Sequence
  Synthetic
tgcuttcatagctuccaccacaat

SEQ ID NO: 65098 - DNA, 26 bp, Artificial Sequence
  Synthetic
ggaacaaaaggaucaacagguacagt

SEQ ID NO: 65099 - DNA, 27 bp, Artificial Sequence
  Synthetic
aagtaatcatccauagctactttugca

SEQ ID NO: 65100 - DNA, 23 bp, Artificial Sequence
  Synthetic
aggcagcgauggaaatttttcug

SEQ ID NO: 65101 - DNA, 26 bp, Artificial Sequence
  Synthetic
cttgggtccuattgttcaatgucagt

SEQ ID NO: 65102 - DNA, 27 bp, Artificial Sequence
  Synthetic
gaggacucatatcaguaacaacccaat

SEQ ID NO: 65103 - DNA, 29 bp, Artificial Sequence
  Synthetic
acaataagctucaggagaccaattuaagt

SEQ ID NO: 65104 - DNA, 28 bp, Artificial Sequence
  Synthetic
agaaactctgtugaagaaatgggcatua

SEQ ID NO: 65105 - DNA, 31 bp, Artificial Sequence
  Synthetic
gaaggatcactuaaaagcatttgtaagtugt

SEQ ID NO: 65106 - DNA, 23 bp, Artificial Sequence
  Synthetic
gcctggauaacccuagggaacaa

SEQ ID NO: 65107 - DNA, 23 bp, Artificial Sequence
  Synthetic
ctctgaacaccuccacttuggat

SEQ ID NO: 65108 - DNA, 26 bp, Artificial Sequence
  Synthetic
atcaatgttgcuagtacacaaugggt

SEQ ID NO: 65109 - DNA, 28 bp, Artificial Sequence
  Synthetic
actcgtgttggaaaugtatattgtguga

SEQ ID NO: 65110 - DNA, 24 bp, Artificial Sequence
  Synthetic
aacctcugcaatcttucagacact

SEQ ID NO: 65111 - DNA, 28 bp, Artificial Sequence
  Synthetic
catggagacaucactttgaaaggauaca

SEQ ID NO: 65112 - DNA, 22 bp, Artificial Sequence
  Synthetic
agaatgugccaggctaatugct

SEQ ID NO: 65113 - DNA, 23 bp, Artificial Sequence
  Synthetic
ccagcctcaugatgtggaaaaug

SEQ ID NO: 65114 - DNA, 28 bp, Artificial Sequence
  Synthetic
tccatcttguaaaggatttaaggctgut

SEQ ID NO: 65115 - DNA, 23 bp, Artificial Sequence
  Synthetic
gtggcccatuttgatggtgttut

SEQ ID NO: 65116 - DNA, 18 bp, Artificial Sequence
  Synthetic
acgatucacggcaggugt

SEQ ID NO: 65117 - DNA, 18 bp, Artificial Sequence
  Synthetic
gggtcaggucccgucaag

SEQ ID NO: 65118 - DNA, 21 bp, Artificial Sequence
  Synthetic
gcaugacacacagggttucct

SEQ ID NO: 65119 - DNA, 23 bp, Artificial Sequence
  Synthetic
agcacaacagacugtcttuacga

SEQ ID NO: 65120 - DNA, 23 bp, Artificial Sequence
  Synthetic
agaaagaaggutggtucagcaca

SEQ ID NO: 65121 - DNA, 28 bp, Artificial Sequence
  Synthetic
gtccatgtagattucactggcctttaua

SEQ ID NO: 65122 - DNA, 28 bp, Artificial Sequence
  Synthetic
ggatacaaattcuaggccactggataug

SEQ ID NO: 65123 - DNA, 26 bp, Artificial Sequence
  Synthetic
accaaggaaaaacugtagagtgagug

SEQ ID NO: 65124 - DNA, 18 bp, Artificial Sequence
  Synthetic
ggaauccaggccacggua

SEQ ID NO: 65125 - DNA, 20 bp, Artificial Sequence
  Synthetic
tgagccaggccuctaguaca

SEQ ID NO: 65126 - DNA, 28 bp, Artificial Sequence
  Synthetic
tgagacaacagaagcautatactgctut

SEQ ID NO: 65127 - DNA, 25 bp, Artificial Sequence
  Synthetic
ctggagtgtguggaggaattacaut

SEQ ID NO: 65128 - DNA, 24 bp, Artificial Sequence
  Synthetic
gaagttaccuctgatccccugaag

SEQ ID NO: 65129 - DNA, 27 bp, Artificial Sequence
  Synthetic
actttgcaaaucaatttgcttctcugt

SEQ ID NO: 65130 - DNA, 23 bp, Artificial Sequence
  Synthetic
tcccaaaggucctgtgcctauaa

SEQ ID NO: 65131 - DNA, 23 bp, Artificial Sequence
  Synthetic
cggcctgucccatatgtttuaga

SEQ ID NO: 65132 - DNA, 24 bp, Artificial Sequence
  Synthetic
gggtcagtuttaggacactugaac

SEQ ID NO: 65133 - DNA, 27 bp, Artificial Sequence
  Synthetic
tttcctctcuctcctcctaauacacac

SEQ ID NO: 65134 - DNA, 24 bp, Artificial Sequence
  Synthetic
gtcagcctuagggtaaagtggaug

SEQ ID NO: 65135 - DNA, 22 bp, Artificial Sequence
  Synthetic
cctaacuccccaccttcatcug

SEQ ID NO: 65136 - DNA, 22 bp, Artificial Sequence
  Synthetic
tgtctcctgucaggaaggtcut

SEQ ID NO: 65137 - DNA, 22 bp, Artificial Sequence
  Synthetic
cagtacttugccagcatugcag

SEQ ID NO: 65138 - DNA, 19 bp, Artificial Sequence
  Synthetic
caggcucacctgucagcat

SEQ ID NO: 65139 - DNA, 19 bp, Artificial Sequence
  Synthetic
cctcaugcccagccttguc

SEQ ID NO: 65140 - DNA, 22 bp, Artificial Sequence
  Synthetic
ctcccccugttctatgagcuct

SEQ ID NO: 65141 - DNA, 25 bp, Artificial Sequence
  Synthetic
acagactccucctacttccttctug

SEQ ID NO: 65142 - DNA, 22 bp, Artificial Sequence
  Synthetic
ctacagauaccagggugcaaca

SEQ ID NO: 65143 - DNA, 25 bp, Artificial Sequence
  Synthetic
gtgccatgccutgaatttctttuct

SEQ ID NO: 65144 - DNA, 23 bp, Artificial Sequence
  Synthetic
cagaggtgcuttgcgtacctuat

SEQ ID NO: 65145 - DNA, 23 bp, Artificial Sequence
  Synthetic
cactaatgaaaggcugcctcugt

SEQ ID NO: 65146 - DNA, 25 bp, Artificial Sequence
  Synthetic
ctcattgccaauagtgatgactugg

SEQ ID NO: 65147 - DNA, 28 bp, Artificial Sequence
  Synthetic
ctccctataatugacttcttgctucaga

SEQ ID NO: 65148 - DNA, 21 bp, Artificial Sequence
  Synthetic
ggagtcggaaguagggaggut

SEQ ID NO: 65149 - DNA, 25 bp, Artificial Sequence
  Synthetic
catgttgatguaggttttgctccug

SEQ ID NO: 65150 - DNA, 28 bp, Artificial Sequence
  Synthetic
agccatcagaaauagacacttaccuaca

SEQ ID NO: 65151 - DNA, 27 bp, Artificial Sequence
  Synthetic
gtgacccccuacatattaatgttguca

SEQ ID NO: 65152 - DNA, 22 bp, Artificial Sequence
  Synthetic
gaggttguggcaagtuccaaag

SEQ ID NO: 65153 - DNA, 28 bp, Artificial Sequence
  Synthetic
ccagattggtgtuagatactctgcatut

SEQ ID NO: 65154 - DNA, 20 bp, Artificial Sequence
  Synthetic
ctugcacagacagcgguaag

SEQ ID NO: 65155 - DNA, 27 bp, Artificial Sequence
  Synthetic
ggttgcttaucaaggactgcatagaut

SEQ ID NO: 65156 - DNA, 23 bp, Artificial Sequence
  Synthetic
gtggctccautgatgttgatcuc

SEQ ID NO: 65157 - DNA, 27 bp, Artificial Sequence
  Synthetic
atgtcagctttucctgcaaaagaatut

SEQ ID NO: 65158 - DNA, 28 bp, Artificial Sequence
  Synthetic
acatgatcuagggttttauagcacgaac

SEQ ID NO: 65159 - DNA, 27 bp, Artificial Sequence
  Synthetic
ttttcatccagatuggtttccttcgua

SEQ ID NO: 65160 - DNA, 18 bp, Artificial Sequence
  Synthetic
ccaccauggacgccauca

SEQ ID NO: 65161 - DNA, 17 bp, Artificial Sequence
  Synthetic
gtgccaggcucgagucc

SEQ ID NO: 65162 - DNA, 21 bp, Artificial Sequence
  Synthetic
ccctcaguccagggttttcut

SEQ ID NO: 65163 - DNA, 23 bp, Artificial Sequence
  Synthetic
ccagttgtgugcacaaggagaua

SEQ ID NO: 65164 - DNA, 24 bp, Artificial Sequence
  Synthetic
aagttgttcggguaaaggacguag

SEQ ID NO: 65165 - DNA, 21 bp, Artificial Sequence
  Synthetic
tcacgtgautcgccgauaagt

SEQ ID NO: 65166 - DNA, 20 bp, Artificial Sequence
  Synthetic
cagcagtcgucagggaaguc

SEQ ID NO: 65167 - DNA, 23 bp, Artificial Sequence
  Synthetic
actcacctaucccagccaattuc

SEQ ID NO: 65168 - DNA, 20 bp, Artificial Sequence
  Synthetic
gcccuccgaggatagcacut

SEQ ID NO: 65169 - DNA, 17 bp, Artificial Sequence
  Synthetic
catgagccgccugcuct

SEQ ID NO: 65170 - DNA, 19 bp, Artificial Sequence
  Synthetic
cattgccaccccucacugt

SEQ ID NO: 65171 - DNA, 18 bp, Artificial Sequence
  Synthetic
gactuggaggcaccguca

SEQ ID NO: 65172 - DNA, 19 bp, Artificial Sequence
  Synthetic
ccccgaggutacaccauct

SEQ ID NO: 65173 - DNA, 19 bp, Artificial Sequence
  Synthetic
caagugaggcaccaggtuc

SEQ ID NO: 65174 - DNA, 19 bp, Artificial Sequence
  Synthetic
ccacaccuggctaugaggt

SEQ ID NO: 65175 - DNA, 26 bp, Artificial Sequence
  Synthetic
tcaataaaagagcugtctgacugcaa

SEQ ID NO: 65176 - DNA, 20 bp, Artificial Sequence
  Synthetic
ccugcggacgagaaatcugt

SEQ ID NO: 65177 - DNA, 19 bp, Artificial Sequence
  Synthetic
ccaguggacccgtttcgug

SEQ ID NO: 65178 - DNA, 18 bp, Artificial Sequence
  Synthetic
gggaugagccctcugcaa

SEQ ID NO: 65179 - DNA, 17 bp, Artificial Sequence
  Synthetic
ccgcuagtgtgcuccca

SEQ ID NO: 65180 - DNA, 20 bp, Artificial Sequence
  Synthetic
cacattggccuggatgcuct

SEQ ID NO: 65181 - DNA, 20 bp, Artificial Sequence
  Synthetic
agtaccgcugggaggtguat

SEQ ID NO: 65182 - DNA, 17 bp, Artificial Sequence
  Synthetic
gcucugcagggccacat

SEQ ID NO: 65183 - DNA, 18 bp, Artificial Sequence
  Synthetic
ctcgcugcagaaggucca

SEQ ID NO: 65184 - DNA, 18 bp, Artificial Sequence
  Synthetic
ggcatugagccggaugga

SEQ ID NO: 65185 - DNA, 20 bp, Artificial Sequence
  Synthetic
gtggaaguggatgugcaggt

SEQ ID NO: 65186 - DNA, 23 bp, Artificial Sequence
  Synthetic
gcggaaggugtaagagatgguag

SEQ ID NO: 65187 - DNA, 21 bp, Artificial Sequence
  Synthetic
tggctcaaugtgacggugaag

SEQ ID NO: 65188 - DNA, 19 bp, Artificial Sequence
  Synthetic
ctgggacaagagccuggug

SEQ ID NO: 65189 - DNA, 22 bp, Artificial Sequence
  Synthetic
cgtcaccgugaactacaacgua

SEQ ID NO: 65190 - DNA, 20 bp, Artificial Sequence
  Synthetic
cagcaaucgtggcugaagac

SEQ ID NO: 65191 - DNA, 25 bp, Artificial Sequence
  Synthetic
gtgacgccuctttgtuaaaagcaaa

SEQ ID NO: 65192 - DNA, 21 bp, Artificial Sequence
  Synthetic
catctgaggcuctccuagcaa

SEQ ID NO: 65193 - DNA, 24 bp, Artificial Sequence
  Synthetic
ggagtaaggacauctgagcttguc

SEQ ID NO: 65194 - DNA, 21 bp, Artificial Sequence
  Synthetic
ctcctggagguctgagatgug

SEQ ID NO: 65195 - DNA, 23 bp, Artificial Sequence
  Synthetic
gggacatggauagaaggtgttug

SEQ ID NO: 65196 - DNA, 27 bp, Artificial Sequence
  Synthetic
aaatctcttgguagctggtttacctuc

SEQ ID NO: 65197 - DNA, 28 bp, Artificial Sequence
  Synthetic
ggagaggautagtgactuaacgacaaat

SEQ ID NO: 65198 - DNA, 21 bp, Artificial Sequence
  Synthetic
gccattuggccagtgaugaca

SEQ ID NO: 65199 - DNA, 22 bp, Artificial Sequence
  Synthetic
ggaggaatggaugctggaggua

SEQ ID NO: 65200 - DNA, 27 bp, Artificial Sequence
  Synthetic
gcaatgatgtuctgtttgtatcucggt

SEQ ID NO: 65201 - DNA, 23 bp, Artificial Sequence
  Synthetic
gcatagatgaugttcccgtguct

SEQ ID NO: 65202 - DNA, 18 bp, Artificial Sequence
  Synthetic
ctttgggugcgtgtgcug

SEQ ID NO: 65203 - DNA, 20 bp, Artificial Sequence
  Synthetic
tccaccccacccacuagaut

SEQ ID NO: 65204 - DNA, 24 bp, Artificial Sequence
  Synthetic
catatactcaacuccctgcctcuc

SEQ ID NO: 65205 - DNA, 19 bp, Artificial Sequence
  Synthetic
agggcacuctgctgaucac

SEQ ID NO: 65206 - DNA, 22 bp, Artificial Sequence
  Synthetic
caccuccccaggacauagagat

SEQ ID NO: 65207 - DNA, 22 bp, Artificial Sequence
  Synthetic
caagtcctguttctccctcugg

SEQ ID NO: 65208 - DNA, 25 bp, Artificial Sequence
  Synthetic
tgacuctgtugaagcaaagagaaca

SEQ ID NO: 65209 - DNA, 27 bp, Artificial Sequence
  Synthetic
tgagttatgacagugggaactaugact

SEQ ID NO: 65210 - DNA, 24 bp, Artificial Sequence
  Synthetic
tggctttttcaguatcagctccuc

SEQ ID NO: 65211 - DNA, 23 bp, Artificial Sequence
  Synthetic
ttcgtactaaccucgtccccuaa

SEQ ID NO: 65212 - DNA, 18 bp, Artificial Sequence
  Synthetic
ccaguacgcccgttuggt

SEQ ID NO: 65213 - DNA, 23 bp, Artificial Sequence
  Synthetic
ctaagtgccaacuggcctaauct

SEQ ID NO: 65214 - DNA, 22 bp, Artificial Sequence
  Synthetic
aaccagtgguaggaggacucaa

SEQ ID NO: 65215 - DNA, 22 bp, Artificial Sequence
  Synthetic
caggaagaugactaggguccca

SEQ ID NO: 65216 - DNA, 22 bp, Artificial Sequence
  Synthetic
cacagtgaccugcaaaaggtug

SEQ ID NO: 65217 - DNA, 20 bp, Artificial Sequence
  Synthetic
ccgcctgacaucctcacaua

SEQ ID NO: 65218 - DNA, 23 bp, Artificial Sequence
  Synthetic
tctatgccatugagtctgcagug

SEQ ID NO: 65219 - DNA, 28 bp, Artificial Sequence
  Synthetic
agctctagcuttagtctctguaagacat

SEQ ID NO: 65220 - DNA, 24 bp, Artificial Sequence
  Synthetic
tttcctcttttucctccacctucc

SEQ ID NO: 65221 - DNA, 27 bp, Artificial Sequence
  Synthetic
agtaacagaatguccccatcaaaaucc

SEQ ID NO: 65222 - DNA, 22 bp, Artificial Sequence
  Synthetic
tgtgtgggcutcttgagttcug

SEQ ID NO: 65223 - DNA, 26 bp, Artificial Sequence
  Synthetic
cttgggaaggaaacutgactgtttug

SEQ ID NO: 65224 - DNA, 21 bp, Artificial Sequence
  Synthetic
tgagcagtugcctccaatcut

SEQ ID NO: 65225 - DNA, 26 bp, Artificial Sequence
  Synthetic
gtagaguctgatgaacuccagaaagg

SEQ ID NO: 65226 - DNA, 21 bp, Artificial Sequence
  Synthetic
ccuagttgaccucgacaagca

SEQ ID NO: 65227 - DNA, 21 bp, Artificial Sequence
  Synthetic
gtctgucacccgctccaauat

SEQ ID NO: 65228 - DNA, 21 bp, Artificial Sequence
  Synthetic
cccgctuccacatggacttua

SEQ ID NO: 65229 - DNA, 25 bp, Artificial Sequence
  Synthetic
ctctccuaaccaagtgtctcttucc

SEQ ID NO: 65230 - DNA, 19 bp, Artificial Sequence
  Synthetic
aggaggccgacuaccugag

SEQ ID NO: 65231 - DNA, 24 bp, Artificial Sequence
  Synthetic
ctctggaaggagucgtcagattug

SEQ ID NO: 65232 - DNA, 23 bp, Artificial Sequence
  Synthetic
ggaagaaggccuggtaaatgugg

SEQ ID NO: 65233 - DNA, 22 bp, Artificial Sequence
  Synthetic
cctttccggcucctcttctuag

SEQ ID NO: 65234 - DNA, 22 bp, Artificial Sequence
  Synthetic
gcagctggautttactgccaut

SEQ ID NO: 65235 - DNA, 25 bp, Artificial Sequence
  Synthetic
gcaagaaacaaggcagucaatcaut

SEQ ID NO: 65236 - DNA, 23 bp, Artificial Sequence
  Synthetic
agccacaccucacgttagaatut

SEQ ID NO: 65237 - DNA, 31 bp, Artificial Sequence
  Synthetic
agtaaaaatgtaagugaaagtcttcacugga

SEQ ID NO: 65238 - DNA, 22 bp, Artificial Sequence
  Synthetic
gcacugcaagcaaatggaucat

SEQ ID NO: 65239 - DNA, 30 bp, Artificial Sequence
  Synthetic
gcctagtttgcauttaaagtaagacauaag

SEQ ID NO: 65240 - DNA, 23 bp, Artificial Sequence
  Synthetic
cutcaaagtccuaccccaggaag

SEQ ID NO: 65241 - DNA, 22 bp, Artificial Sequence
  Synthetic
cgaggacagutacacccuagca

SEQ ID NO: 65242 - DNA, 20 bp, Artificial Sequence
  Synthetic
gcagacaaggcugtggucat

SEQ ID NO: 65243 - DNA, 25 bp, Artificial Sequence
  Synthetic
gctgactctcacutctctctctcuc

SEQ ID NO: 65244 - DNA, 21 bp, Artificial Sequence
  Synthetic
agattggagagaugcgcugac

SEQ ID NO: 65245 - DNA, 19 bp, Artificial Sequence
  Synthetic
gagcctcutgtccctugct

SEQ ID NO: 65246 - DNA, 18 bp, Artificial Sequence
  Synthetic
actugccagagcccctuc

SEQ ID NO: 65247 - DNA, 20 bp, Artificial Sequence
  Synthetic
gcgtcgtacutggccctauc

SEQ ID NO: 65248 - DNA, 21 bp, Artificial Sequence
  Synthetic
gatgatccgugccatggagut

SEQ ID NO: 65249 - DNA, 21 bp, Artificial Sequence
  Synthetic
gccttccuggagtgttcctug

SEQ ID NO: 65250 - DNA, 21 bp, Artificial Sequence
  Synthetic
catggtggcugagttccauga

SEQ ID NO: 65251 - DNA, 22 bp, Artificial Sequence
  Synthetic
gtgggttcuccagctcattgut

SEQ ID NO: 65252 - DNA, 18 bp, Artificial Sequence
  Synthetic
ggcuccaaccagcuggac

SEQ ID NO: 65253 - DNA, 19 bp, Artificial Sequence
  Synthetic
gcugcccgtguaccagaac

SEQ ID NO: 65254 - DNA, 26 bp, Artificial Sequence
  Synthetic
agcgtcatcucaatttatgtuagcga

SEQ ID NO: 65255 - DNA, 27 bp, Artificial Sequence
  Synthetic
tggatttgaaggaaugaagtgtucaga

SEQ ID NO: 65256 - DNA, 24 bp, Artificial Sequence
  Synthetic
ggcactcagcaucttcaagatgua

SEQ ID NO: 65257 - DNA, 20 bp, Artificial Sequence
  Synthetic
gtggtgtucctagccgucat

SEQ ID NO: 65258 - DNA, 21 bp, Artificial Sequence
  Synthetic
actctcacucccttgcaggua

SEQ ID NO: 65259 - DNA, 25 bp, Artificial Sequence
  Synthetic
tttagaacacaggagucacatgcuc

SEQ ID NO: 65260 - DNA, 20 bp, Artificial Sequence
  Synthetic
gggtcuggcattgctuaggg

SEQ ID NO: 65261 - DNA, 26 bp, Artificial Sequence
  Synthetic
tgcaggagaugcaaagaatttugaag

SEQ ID NO: 65262 - DNA, 21 bp, Artificial Sequence
  Synthetic
ccaaagaccugcaggatcugt

SEQ ID NO: 65263 - DNA, 19 bp, Artificial Sequence
  Synthetic
tccctccauctggctcucc

SEQ ID NO: 65264 - DNA, 20 bp, Artificial Sequence
  Synthetic
gcgtgtacucctcgcagtuc

SEQ ID NO: 65265 - DNA, 21 bp, Artificial Sequence
  Synthetic
caggccccuaacccagagaua

SEQ ID NO: 65266 - DNA, 23 bp, Artificial Sequence
  Synthetic
ggtcttcugacccctcactuaca

SEQ ID NO: 65267 - DNA, 18 bp, Artificial Sequence
  Synthetic
ccaccgugcccuaaacga

SEQ ID NO: 65268 - DNA, 21 bp, Artificial Sequence
  Synthetic
agcctcccautgaccaactuc

SEQ ID NO: 65269 - DNA, 27 bp, Artificial Sequence
  Synthetic
ggaatctggtcccuaatcctactcaua

SEQ ID NO: 65270 - DNA, 25 bp, Artificial Sequence
  Synthetic
agtgtucagggactatauccaaggt

SEQ ID NO: 65271 - DNA, 24 bp, Artificial Sequence
  Synthetic
gatagttgggaugaagtgggacug

SEQ ID NO: 65272 - DNA, 21 bp, Artificial Sequence
  Synthetic
catggccagaugacccuagaa

SEQ ID NO: 65273 - DNA, 26 bp, Artificial Sequence
  Synthetic
gacttggaccaguagatgaagatcuc

SEQ ID NO: 65274 - DNA, 18 bp, Artificial Sequence
  Synthetic
acgcgacaucggctucaa

SEQ ID NO: 65275 - DNA, 22 bp, Artificial Sequence
  Synthetic
ggttggtcuctgagatcucgaa

SEQ ID NO: 65276 - DNA, 20 bp, Artificial Sequence
  Synthetic
ggtctucagcaaccgcatut

SEQ ID NO: 65277 - DNA, 20 bp, Artificial Sequence
  Synthetic
gcugaggccaaggttcugac

SEQ ID NO: 65278 - DNA, 20 bp, Artificial Sequence
  Synthetic
acccccauctccgctctuat

SEQ ID NO: 65279 - DNA, 21 bp, Artificial Sequence
  Synthetic
agagggtcuggacacacauct

SEQ ID NO: 65280 - DNA, 20 bp, Artificial Sequence
  Synthetic
gtcaucgtggaugccaacaa

SEQ ID NO: 65281 - DNA, 21 bp, Artificial Sequence
  Synthetic
ctcgatcugagcttgggctua

SEQ ID NO: 65282 - DNA, 21 bp, Artificial Sequence
  Synthetic
caagagaggutctcgagccut

SEQ ID NO: 65283 - DNA, 22 bp, Artificial Sequence
  Synthetic
cagcctaauccccaatcccaut

SEQ ID NO: 65284 - DNA, 18 bp, Artificial Sequence
  Synthetic
gctccugcaggctgacuc

SEQ ID NO: 65285 - DNA, 25 bp, Artificial Sequence
  Synthetic
gtccatgaggutaaccccttactuc

SEQ ID NO: 65286 - DNA, 20 bp, Artificial Sequence
  Synthetic
ctcacccuaccccgaaggua

SEQ ID NO: 65287 - DNA, 20 bp, Artificial Sequence
  Synthetic
caacacacaccacgutccuc

SEQ ID NO: 65288 - DNA, 27 bp, Artificial Sequence
  Synthetic
ctatcatcacacaaacuagtcccacut

SEQ ID NO: 65289 - DNA, 28 bp, Artificial Sequence
  Synthetic
tctgactctcaaguctgacaattgttut

SEQ ID NO: 65290 - DNA, 21 bp, Artificial Sequence
  Synthetic
gtcagggatucccagcagtuc

SEQ ID NO: 65291 - DNA, 27 bp, Artificial Sequence
  Synthetic
gctatcaaaaggaucgcctatgagtut

SEQ ID NO: 65292 - DNA, 21 bp, Artificial Sequence
  Synthetic
ggtcctccuccgagttgaugt

SEQ ID NO: 65293 - DNA, 21 bp, Artificial Sequence
  Synthetic
caatcagcugtcagggcucat

SEQ ID NO: 65294 - DNA, 17 bp, Artificial Sequence
  Synthetic
cutaggucggcgggaga

SEQ ID NO: 65295 - DNA, 19 bp, Artificial Sequence
  Synthetic
aggtccugggctcctugaa

SEQ ID NO: 65296 - DNA, 19 bp, Artificial Sequence
  Synthetic
ggtggugcacctggactuc

SEQ ID NO: 65297 - DNA, 22 bp, Artificial Sequence
  Synthetic
gaaagcgaggugtaaagcucct

SEQ ID NO: 65298 - DNA, 25 bp, Artificial Sequence
  Synthetic
accacagcacauacacatttuagca

SEQ ID NO: 65299 - DNA, 23 bp, Artificial Sequence
  Synthetic
ggtatccaccuttctcugagcat

SEQ ID NO: 65300 - DNA, 20 bp, Artificial Sequence
  Synthetic
gcagggtcugcagtggtauc

SEQ ID NO: 65301 - DNA, 23 bp, Artificial Sequence
  Synthetic
ggactggaaaguacaaggcucac

SEQ ID NO: 65302 - DNA, 23 bp, Artificial Sequence
  Synthetic
gcgaaatauagccctgtccauct

SEQ ID NO: 65303 - DNA, 19 bp, Artificial Sequence
  Synthetic
ccacggutcagaaccugct

SEQ ID NO: 65304 - DNA, 28 bp, Artificial Sequence
  Synthetic
gtactatgcatguacattacagcctuct

SEQ ID NO: 65305 - DNA, 27 bp, Artificial Sequence
  Synthetic
gtgatgctgtuggatttctctttcaut

SEQ ID NO: 65306 - DNA, 25 bp, Artificial Sequence
  Synthetic
ctatcagctuacaccatgguaccaa

SEQ ID NO: 65307 - DNA, 25 bp, Artificial Sequence
  Synthetic
gtgtacgtgugactatccattguca

SEQ ID NO: 65308 - DNA, 27 bp, Artificial Sequence
  Synthetic
actaatacugcaagcaaactctcucac

SEQ ID NO: 65309 - DNA, 25 bp, Artificial Sequence
  Synthetic
gtggatgaauctggtaauccggaat

SEQ ID NO: 65310 - DNA, 21 bp, Artificial Sequence
  Synthetic
ctgcaaguggagaggtgacua

SEQ ID NO: 65311 - DNA, 28 bp, Artificial Sequence
  Synthetic
gatatctctgccucttcctctctctaut

SEQ ID NO: 65312 - DNA, 25 bp, Artificial Sequence
  Synthetic
gtatttatcgucttgaacccuccca

SEQ ID NO: 65313 - DNA, 26 bp, Artificial Sequence
  Synthetic
tctccgggatuattctgcagatgaua

SEQ ID NO: 65314 - DNA, 26 bp, Artificial Sequence
  Synthetic
tgggaaatgguctaggagaguaaagt

SEQ ID NO: 65315 - DNA, 21 bp, Artificial Sequence
  Synthetic
ctgctcuggcagattucaacc

SEQ ID NO: 65316 - DNA, 26 bp, Artificial Sequence
  Synthetic
ccagtaacaacucacaatttgugcaa

SEQ ID NO: 65317 - DNA, 21 bp, Artificial Sequence
  Synthetic
gggcccugtattggtttugct

SEQ ID NO: 65318 - DNA, 28 bp, Artificial Sequence
  Synthetic
tttccactcctagutcattcacacttut

SEQ ID NO: 65319 - DNA, 29 bp, Artificial Sequence
  Synthetic
gaaggaattggagcaguttaactcagaua

SEQ ID NO: 65320 - DNA, 28 bp, Artificial Sequence
  Synthetic
tctctcaagatacucttcttcagctugt

SEQ ID NO: 65321 - DNA, 24 bp, Artificial Sequence
  Synthetic
ttttguggaaggtctaugccagaa

SEQ ID NO: 65322 - DNA, 23 bp, Artificial Sequence
  Synthetic
gttctguctcaagtcucgaagca

SEQ ID NO: 65323 - DNA, 27 bp, Artificial Sequence
  Synthetic
gccatcagucccaattttacatttuct

SEQ ID NO: 65324 - DNA, 28 bp, Artificial Sequence
  Synthetic
ctctctgtatttgutggtgggatatuct

SEQ ID NO: 65325 - DNA, 28 bp, Artificial Sequence
  Synthetic
tgttcaaaagagucccctcaataaauca

SEQ ID NO: 65326 - DNA, 28 bp, Artificial Sequence
  Synthetic
ggtgttgtttcacugttttctaggatut

SEQ ID NO: 65327 - DNA, 27 bp, Artificial Sequence
  Synthetic
agcatcaggtcutgtctttttcctaut

SEQ ID NO: 65328 - DNA, 24 bp, Artificial Sequence
  Synthetic
cttatgggagcaccuatactgcut

SEQ ID NO: 65329 - DNA, 20 bp, Artificial Sequence
  Synthetic
ctggttcccucctcgagaug

SEQ ID NO: 65330 - DNA, 21 bp, Artificial Sequence
  Synthetic
tttgtccccaccccuacctua

SEQ ID NO: 65331 - DNA, 27 bp, Artificial Sequence
  Synthetic
ttggccaatctugttctcttatctcug

SEQ ID NO: 65332 - DNA, 26 bp, Artificial Sequence
  Synthetic
cttagtactgcugttctgtgaacuga

SEQ ID NO: 65333 - DNA, 23 bp, Artificial Sequence
  Synthetic
acgauctagugcaaggaaaagcc

SEQ ID NO: 65334 - DNA, 27 bp, Artificial Sequence
  Synthetic
ctgctccttcugaagtatcttttgugt

SEQ ID NO: 65335 - DNA, 17 bp, Artificial Sequence
  Synthetic
ccaaccugggcagcugt

SEQ ID NO: 65336 - DNA, 24 bp, Artificial Sequence
  Synthetic
tgggaattauctgagggagugagg

SEQ ID NO: 65337 - DNA, 25 bp, Artificial Sequence
  Synthetic
tggaatgtucaagccaauacaccaa

SEQ ID NO: 65338 - DNA, 20 bp, Artificial Sequence
  Synthetic
ccatcaaacuccggcagtuc

SEQ ID NO: 65339 - DNA, 27 bp, Artificial Sequence
  Synthetic
accagaattcaatuataccttggccut

SEQ ID NO: 65340 - DNA, 27 bp, Artificial Sequence
  Synthetic
gcttatctcugatatgtgttucagcct

SEQ ID NO: 65341 - DNA, 25 bp, Artificial Sequence
  Synthetic
gaaggtggcgcauttgtttgauaat

SEQ ID NO: 65342 - DNA, 25 bp, Artificial Sequence
  Synthetic
tttttggtcugaggaagcattcuga

SEQ ID NO: 65343 - DNA, 28 bp, Artificial Sequence
  Synthetic
gccttgacauccctactatagataucca

SEQ ID NO: 65344 - DNA, 27 bp, Artificial Sequence
  Synthetic
catacgtaaggugagtgagtgattuga

SEQ ID NO: 65345 - DNA, 29 bp, Artificial Sequence
  Synthetic
agatggacggautcatggaaagaaaauaa

SEQ ID NO: 65346 - DNA, 28 bp, Artificial Sequence
  Synthetic
tccctttcctagauagaagctaagtugt

SEQ ID NO: 65347 - DNA, 28 bp, Artificial Sequence
  Synthetic
cacttgcaggcacaauaacaatcttaua

SEQ ID NO: 65348 - DNA, 20 bp, Artificial Sequence
  Synthetic
cgagcgtacuaagccagguc

SEQ ID NO: 65349 - DNA, 21 bp, Artificial Sequence
  Synthetic
gaaccaccuaggcuggagaac

SEQ ID NO: 65350 - DNA, 28 bp, Artificial Sequence
  Synthetic
attgagttgtcucactcttcttgaaugt

SEQ ID NO: 65351 - DNA, 26 bp, Artificial Sequence
  Synthetic
catgtcatcaauagcttcctguaggg

SEQ ID NO: 65352 - DNA, 25 bp, Artificial Sequence
  Synthetic
agaagggacaagaaaaucaauggca

SEQ ID NO: 65353 - DNA, 26 bp, Artificial Sequence
  Synthetic
tcaaaaatuaacccccaaccuccaat

SEQ ID NO: 65354 - DNA, 27 bp, Artificial Sequence
  Synthetic
cacatcatgactutggcttcttcaaug

SEQ ID NO: 65355 - DNA, 28 bp, Artificial Sequence
  Synthetic
ccccaaagaaucacaccaagactttaut

SEQ ID NO: 65356 - DNA, 24 bp, Artificial Sequence
  Synthetic
cccatauggagaaaccacttucca

SEQ ID NO: 65357 - DNA, 28 bp, Artificial Sequence
  Synthetic
ctggacatctttuaaccaggagagaaut

SEQ ID NO: 65358 - DNA, 21 bp, Artificial Sequence
  Synthetic
aatctcaaccaugcctgugct

SEQ ID NO: 65359 - DNA, 24 bp, Artificial Sequence
  Synthetic
gcattactggutggcaacatgaua

SEQ ID NO: 65360 - DNA, 24 bp, Artificial Sequence
  Synthetic
ctttttctggcutgtcaggcttuc

SEQ ID NO: 65361 - DNA, 26 bp, Artificial Sequence
  Synthetic
tttggagatcaaaccuttcactccut

SEQ ID NO: 65362 - DNA, 28 bp, Artificial Sequence
  Synthetic
tgtagctctuaaagcaatgcagttttuc

SEQ ID NO: 65363 - DNA, 25 bp, Artificial Sequence
  Synthetic
gctgaacaugatttgacttucccaa

SEQ ID NO: 65364 - DNA, 21 bp, Artificial Sequence
  Synthetic
ggaaccucctctgtugcacat

SEQ ID NO: 65365 - DNA, 26 bp, Artificial Sequence
  Synthetic
agaacccaacaggauttcugaaacaa

SEQ ID NO: 65366 - DNA, 26 bp, Artificial Sequence
  Synthetic
cccagagttucagcattaagtcaguc

SEQ ID NO: 65367 - DNA, 24 bp, Artificial Sequence
  Synthetic
aatgccacutgcctttaugcaaaa

SEQ ID NO: 65368 - DNA, 28 bp, Artificial Sequence
  Synthetic
ctggtgcaautaatggagauagaagaca

SEQ ID NO: 65369 - DNA, 21 bp, Artificial Sequence
  Synthetic
acccttugctggaauggacaa

SEQ ID NO: 65370 - DNA, 21 bp, Artificial Sequence
  Synthetic
gcagaaucaccaggcctcauc

SEQ ID NO: 65371 - DNA, 29 bp, Artificial Sequence
  Synthetic
gctgttagactcutcaatattgctgucaa

SEQ ID NO: 65372 - DNA, 33 bp, Artificial Sequence
  Synthetic
agataggaaatcaauaccaaaacactttagaua

SEQ ID NO: 65373 - DNA, 28 bp, Artificial Sequence
  Synthetic
actgatctttcugagtcctttugacaaa

SEQ ID NO: 65374 - DNA, 26 bp, Artificial Sequence
  Synthetic
acactaattcauctgcaaagcucaca

SEQ ID NO: 65375 - DNA, 23 bp, Artificial Sequence
  Synthetic
cctccacagaaugcatcaactut

SEQ ID NO: 65376 - DNA, 22 bp, Artificial Sequence
  Synthetic
acaaccaugacattgccctuct

SEQ ID NO: 65377 - DNA, 24 bp, Artificial Sequence
  Synthetic
cggtcaacaaguggaactcuaagg

SEQ ID NO: 65378 - DNA, 28 bp, Artificial Sequence
  Synthetic
tgccatttgttgugtatcttggtatcua

SEQ ID NO: 65379 - DNA, 29 bp, Artificial Sequence
  Synthetic
acgataatttgugatgtaaactctuccct

SEQ ID NO: 65380 - DNA, 23 bp, Artificial Sequence
  Synthetic
gtgctgucatggattcauccaga

SEQ ID NO: 65381 - DNA, 26 bp, Artificial Sequence
  Synthetic
gctaagtguccagcacatcatuaagt

SEQ ID NO: 65382 - DNA, 20 bp, Artificial Sequence
  Synthetic
ggauccgaggcagcaagtuc

SEQ ID NO: 65383 - DNA, 20 bp, Artificial Sequence
  Synthetic
tggutcgttcatuggccagt

SEQ ID NO: 65384 - DNA, 21 bp, Artificial Sequence
  Synthetic
gcttaccucccaaggcttuga

SEQ ID NO: 65385 - DNA, 20 bp, Artificial Sequence
  Synthetic
ggagggccutagacttccug

SEQ ID NO: 65386 - DNA, 24 bp, Artificial Sequence
  Synthetic
cttacaggtcutcagtccttuccc

SEQ ID NO: 65387 - DNA, 22 bp, Artificial Sequence
  Synthetic
gaaagccgugaaggagtctuct

SEQ ID NO: 65388 - DNA, 18 bp, Artificial Sequence
  Synthetic
cgugacgcgacaacgaut

SEQ ID NO: 65389 - DNA, 18 bp, Artificial Sequence
  Synthetic
caagguggtcagcucggt

SEQ ID NO: 65390 - DNA, 27 bp, Artificial Sequence
  Synthetic
gtttaaaaggcauacatttccauggca

SEQ ID NO: 65391 - DNA, 24 bp, Artificial Sequence
  Synthetic
acgtaaaagcaggcautcatcuga

SEQ ID NO: 65392 - DNA, 29 bp, Artificial Sequence
  Synthetic
tctcaaccagugatgtatttacaguaggt

SEQ ID NO: 65393 - DNA, 25 bp, Artificial Sequence
  Synthetic
ctctaaaactuctagccccguaaca

SEQ ID NO: 65394 - DNA, 22 bp, Artificial Sequence
  Synthetic
gcttccagcautgacaccatuc

SEQ ID NO: 65395 - DNA, 20 bp, Artificial Sequence
  Synthetic
agcaagtgugccgtctcuac

SEQ ID NO: 65396 - DNA, 24 bp, Artificial Sequence
  Synthetic
tatttccugacacaagcaaccaut

SEQ ID NO: 65397 - DNA, 23 bp, Artificial Sequence
  Synthetic
ggatgagcacacuttttctggug

SEQ ID NO: 65398 - DNA, 24 bp, Artificial Sequence
  Synthetic
aaaaacgtatugggagtcgucgat

SEQ ID NO: 65399 - DNA, 23 bp, Artificial Sequence
  Synthetic
ttgtcggattucaggtctctgug

SEQ ID NO: 65400 - DNA, 20 bp, Artificial Sequence
  Synthetic
gacaccctugcagcctctua

SEQ ID NO: 65401 - DNA, 20 bp, Artificial Sequence
  Synthetic
ctgctccuagggcttctucc

SEQ ID NO: 65402 - DNA, 21 bp, Artificial Sequence
  Synthetic
ggccctcugatggttccctua

SEQ ID NO: 65403 - DNA, 21 bp, Artificial Sequence
  Synthetic
gcttcttgguatggccagcuc

SEQ ID NO: 65404 - DNA, 21 bp, Artificial Sequence
  Synthetic
ggaagugaacaggcctagcut

SEQ ID NO: 65405 - DNA, 24 bp, Artificial Sequence
  Synthetic
gtcagctcttguaggtacacaguc

SEQ ID NO: 65406 - DNA, 20 bp, Artificial Sequence
  Synthetic
gcaggcacaagagcugaugt

SEQ ID NO: 65407 - DNA, 24 bp, Artificial Sequence
  Synthetic
tctcagtccgguttcttcgtauct

SEQ ID NO: 65408 - DNA, 21 bp, Artificial Sequence
  Synthetic
gggctcacuccactgauaaac

SEQ ID NO: 65409 - DNA, 25 bp, Artificial Sequence
  Synthetic
tcccaaagccugactttgtatctuc

SEQ ID NO: 65410 - DNA, 28 bp, Artificial Sequence
  Synthetic
gcatatgctctgugcttgaagttctuat

SEQ ID NO: 65411 - DNA, 23 bp, Artificial Sequence
  Synthetic
acagagcuggcatcagtctttut

SEQ ID NO: 65412 - DNA, 23 bp, Artificial Sequence
  Synthetic
tggttttcuccaccacgtctaug

SEQ ID NO: 65413 - DNA, 25 bp, Artificial Sequence
  Synthetic
cacactctcucaactttgtgacuct

SEQ ID NO: 65414 - DNA, 26 bp, Artificial Sequence
  Synthetic
gctcctgtcugcttttccaaatagut

SEQ ID NO: 65415 - DNA, 31 bp, Artificial Sequence
  Synthetic
tgtcagttgatcaaautccattttgaaacut

SEQ ID NO: 65416 - DNA, 28 bp, Artificial Sequence
  Synthetic
accttttaaagcutccgtttctatguct

SEQ ID NO: 65417 - DNA, 26 bp, Artificial Sequence
  Synthetic
gtgtctcagttugatagcatctguga

SEQ ID NO: 65418 - DNA, 22 bp, Artificial Sequence
  Synthetic
atctagacauccaccucagcca

SEQ ID NO: 65419 - DNA, 25 bp, Artificial Sequence
  Synthetic
tgatccctacucaaggaagctctut

SEQ ID NO: 65420 - DNA, 24 bp, Artificial Sequence
  Synthetic
gaagcctcutccactgtcuacaat

SEQ ID NO: 65421 - DNA, 22 bp, Artificial Sequence
  Synthetic
tgtccacccaguaggagaucac

SEQ ID NO: 65422 - DNA, 21 bp, Artificial Sequence
  Synthetic
ccagtcucccaaggaaugcag

SEQ ID NO: 65423 - DNA, 23 bp, Artificial Sequence
  Synthetic
ttttgtgcugctgtcatccuagt

SEQ ID NO: 65424 - DNA, 26 bp, Artificial Sequence
  Synthetic
cutctgagagagaucacaagagagga

SEQ ID NO: 65425 - DNA, 23 bp, Artificial Sequence
  Synthetic
tgaaaccacucaaaaggctcgut

SEQ ID NO: 65426 - DNA, 22 bp, Artificial Sequence
  Synthetic
caccaaacutgccaugggaaaa

SEQ ID NO: 65427 - DNA, 22 bp, Artificial Sequence
  Synthetic
gautctggcugagaggaggaag

SEQ ID NO: 65428 - DNA, 22 bp, Artificial Sequence
  Synthetic
tgtgaatgtggugcgttcctua

SEQ ID NO: 65429 - DNA, 22 bp, Artificial Sequence
  Synthetic
gguctgtttuagaccccaccat

SEQ ID NO: 65430 - DNA, 25 bp, Artificial Sequence
  Synthetic
caaccagtccuggatttttagcuct

SEQ ID NO: 65431 - DNA, 24 bp, Artificial Sequence
  Synthetic
ccacgttccaugtgatctcttcua

SEQ ID NO: 65432 - DNA, 27 bp, Artificial Sequence
  Synthetic
cacggaugaagagggtataattgauga

SEQ ID NO: 65433 - DNA, 22 bp, Artificial Sequence
  Synthetic
cccaggtguggagtatagcuac

SEQ ID NO: 65434 - DNA, 28 bp, Artificial Sequence
  Synthetic
ctggtggtauccaagctacaaatauaga

SEQ ID NO: 65435 - DNA, 22 bp, Artificial Sequence
  Synthetic
aagtctcttgugcatggcctua

SEQ ID NO: 65436 - DNA, 28 bp, Artificial Sequence
  Synthetic
gttatgaaggaguttacagatuccacct

SEQ ID NO: 65437 - DNA, 26 bp, Artificial Sequence
  Synthetic
gtgcactttattucttgcttgcttut

SEQ ID NO: 65438 - DNA, 29 bp, Artificial Sequence
  Synthetic
tgtgatactaggutcatatgaggucaagt

SEQ ID NO: 65439 - DNA, 23 bp, Artificial Sequence
  Synthetic
ctggatuggcagagttcugaaga

SEQ ID NO: 65440 - DNA, 28 bp, Artificial Sequence
  Synthetic
gaaaataaagacgucccttcttcaacug

SEQ ID NO: 65441 - DNA, 24 bp, Artificial Sequence
  Synthetic
atcacacttgucttaccaggcaut

SEQ ID NO: 65442 - DNA, 25 bp, Artificial Sequence
  Synthetic
gtgatggtugtcattgttugaggag

SEQ ID NO: 65443 - DNA, 27 bp, Artificial Sequence
  Synthetic
ctaaagtaaccccuttgtctgaugagt

SEQ ID NO: 65444 - DNA, 25 bp, Artificial Sequence
  Synthetic
gcctccaaaccaacucaggaattua

SEQ ID NO: 65445 - DNA, 21 bp, Artificial Sequence
  Synthetic
gccatuccaaaagctgccaut

SEQ ID NO: 65446 - DNA, 22 bp, Artificial Sequence
  Synthetic
gaagutggtggugaagggaagt

SEQ ID NO: 65447 - DNA, 28 bp, Artificial Sequence
  Synthetic
caatggagattuggaaaaacctgatuct

SEQ ID NO: 65448 - DNA, 21 bp, Artificial Sequence
  Synthetic
ctggaggacutccgggatuac

SEQ ID NO: 65449 - DNA, 21 bp, Artificial Sequence
  Synthetic
gacccaggucaaacgccttua

SEQ ID NO: 65450 - DNA, 22 bp, Artificial Sequence
  Synthetic
autgatgguggaccacacagag

SEQ ID NO: 65451 - DNA, 25 bp, Artificial Sequence
  Synthetic
aaaagatcttcuggaacacggugaa

SEQ ID NO: 65452 - DNA, 24 bp, Artificial Sequence
  Synthetic
agaacagaagaaaucctcgcctug

SEQ ID NO: 65453 - DNA, 27 bp, Artificial Sequence
  Synthetic
cuactacatcatctugcaaccgaagaa

SEQ ID NO: 65454 - DNA, 26 bp, Artificial Sequence
  Synthetic
ctaggaattgagcuggatgaagaugg

SEQ ID NO: 65455 - DNA, 21 bp, Artificial Sequence
  Synthetic
tgccagugcactctcatacug

SEQ ID NO: 65456 - DNA, 27 bp, Artificial Sequence
  Synthetic
acaccctttttcugaaattgtgctuac

SEQ ID NO: 65457 - DNA, 26 bp, Artificial Sequence
  Synthetic
aagcctagacccuctttcatctuaga

SEQ ID NO: 65458 - DNA, 27 bp, Artificial Sequence
  Synthetic
gttgctaggutgcttacctttuaaact

SEQ ID NO: 65459 - DNA, 28 bp, Artificial Sequence
  Synthetic
ggctgaaccttuccatgataaaatgtug

SEQ ID NO: 65460 - DNA, 23 bp, Artificial Sequence
  Synthetic
agcaatggaaugaaggtccacut

SEQ ID NO: 65461 - DNA, 24 bp, Artificial Sequence
  Synthetic
gacacctgaugttttctcaagcuc

SEQ ID NO: 65462 - DNA, 24 bp, Artificial Sequence
  Synthetic
acccaugcaggaaagaaaaucagt

SEQ ID NO: 65463 - DNA, 23 bp, Artificial Sequence
  Synthetic
ggctgccuagtgctgatgttuat

SEQ ID NO: 65464 - DNA, 23 bp, Artificial Sequence
  Synthetic
acctcagucttcgtttugcaaga

SEQ ID NO: 65465 - DNA, 25 bp, Artificial Sequence
  Synthetic
ctggttcagauttgtcatttuggct

SEQ ID NO: 65466 - DNA, 27 bp, Artificial Sequence
  Synthetic
tttgaagtggucatgcaaattucacaa

SEQ ID NO: 65467 - DNA, 27 bp, Artificial Sequence
  Synthetic
tccaccucaggagaacaaacttacuat

SEQ ID NO: 65468 - DNA, 33 bp, Artificial Sequence
  Synthetic
tacattgaaaaatgguagtaggtatttauggaa

SEQ ID NO: 65469 - DNA, 23 bp, Artificial Sequence
  Synthetic
cgactugcaaacctgttgguaaa

SEQ ID NO: 65470 - DNA, 21 bp, Artificial Sequence
  Synthetic
tcagcttugctcacgtgucaa

SEQ ID NO: 65471 - DNA, 28 bp, Artificial Sequence
  Synthetic
tgcaatttcaucttgaactucaacacaa

SEQ ID NO: 65472 - DNA, 29 bp, Artificial Sequence
  Synthetic
gatggaaatgaaacaauttgtcactguct

SEQ ID NO: 65473 - DNA, 23 bp, Artificial Sequence
  Synthetic
tgtttcacctuggacaggaacuc

SEQ ID NO: 65474 - DNA, 22 bp, Artificial Sequence
  Synthetic
ggacatugaaagcaacctgcuc

SEQ ID NO: 65475 - DNA, 22 bp, Artificial Sequence
  Synthetic
gttttccuagacgcctctccut

SEQ ID NO: 65476 - DNA, 21 bp, Artificial Sequence
  Synthetic
catccugccagtaucccagac

SEQ ID NO: 65477 - DNA, 25 bp, Artificial Sequence
  Synthetic
gccctaaagacuccaagacucagaa

SEQ ID NO: 65478 - DNA, 21 bp, Artificial Sequence
  Synthetic
cctggguaagggatgctgaut

SEQ ID NO: 65479 - DNA, 24 bp, Artificial Sequence
  Synthetic
cctcctggauctggatauagacca

SEQ ID NO: 65480 - DNA, 22 bp, Artificial Sequence
  Synthetic
ctccctgttugtccacttcugt

SEQ ID NO: 65481 - DNA, 23 bp, Artificial Sequence
  Synthetic
ggcutgatgttcugaggaaccat

SEQ ID NO: 65482 - DNA, 21 bp, Artificial Sequence
  Synthetic
ccgtccucagacccaaacaut

SEQ ID NO: 65483 - DNA, 25 bp, Artificial Sequence
  Synthetic
gcaaagggaacautatcaucagcac

SEQ ID NO: 65484 - DNA, 26 bp, Artificial Sequence
  Synthetic
ggaacaggaagacuacauaggcaaac

SEQ ID NO: 65485 - DNA, 20 bp, Artificial Sequence
  Synthetic
accaacagcuttgcctccut

SEQ ID NO: 65486 - DNA, 23 bp, Artificial Sequence
  Synthetic
cuaggagaacugagcaggaaacc

SEQ ID NO: 65487 - DNA, 22 bp, Artificial Sequence
  Synthetic
cccttgaccutttcctcctugt

SEQ ID NO: 65488 - DNA, 22 bp, Artificial Sequence
  Synthetic
aaugcccaagtcugaaacccat

SEQ ID NO: 65489 - DNA, 27 bp, Artificial Sequence
  Synthetic
tgccctcttttuctaatccttcatugt

SEQ ID NO: 65490 - DNA, 21 bp, Artificial Sequence
  Synthetic
ggaagctgauccgctgaguaa

SEQ ID NO: 65491 - DNA, 25 bp, Artificial Sequence
  Synthetic
gcaauatacattcugaaccccagga

SEQ ID NO: 65492 - DNA, 26 bp, Artificial Sequence
  Synthetic
tcatactgtugccaaaggtcucaaaa

SEQ ID NO: 65493 - DNA, 23 bp, Artificial Sequence
  Synthetic
cguctagucaaaggagcaaaggg

SEQ ID NO: 65494 - DNA, 27 bp, Artificial Sequence
  Synthetic
aatgcatgaacauctggttacauacca

SEQ ID NO: 65495 - DNA, 27 bp, Artificial Sequence
  Synthetic
agaatgtgtcugcaagatcaatgauga

SEQ ID NO: 65496 - DNA, 29 bp, Artificial Sequence
  Synthetic
ggcttcttcatcaucatctttcttttcut

SEQ ID NO: 65497 - DNA, 22 bp, Artificial Sequence
  Synthetic
tttgtttccauccaggcctcut

SEQ ID NO: 65498 - DNA, 23 bp, Artificial Sequence
  Synthetic
actggttgacaauaagcggugaa

SEQ ID NO: 65499 - DNA, 27 bp, Artificial Sequence
  Synthetic
gttcatccaaggaauaatactggugga

SEQ ID NO: 65500 - DNA, 26 bp, Artificial Sequence
  Synthetic
ccaacagttaautggatacccuggaa

SEQ ID NO: 65501 - DNA, 28 bp, Artificial Sequence
  Synthetic
gtgagggaaaauaaccaatcacttucat

SEQ ID NO: 65502 - DNA, 26 bp, Artificial Sequence
  Synthetic
acacatcaguccaacacttuagcaaa

SEQ ID NO: 65503 - DNA, 28 bp, Artificial Sequence
  Synthetic
gcaatacattggagugtacagagatugt

SEQ ID NO: 65504 - DNA, 23 bp, Artificial Sequence
  Synthetic
tttattagccuactcgcccucct

SEQ ID NO: 65505 - DNA, 28 bp, Artificial Sequence
  Synthetic
gtctgttgttuggtgccattatucaaat

SEQ ID NO: 65506 - DNA, 20 bp, Artificial Sequence
  Synthetic
gccctcagguacgtagctut

SEQ ID NO: 65507 - DNA, 29 bp, Artificial Sequence
  Synthetic
cctccaccctautttcatctccaatttua

SEQ ID NO: 65508 - DNA, 28 bp, Artificial Sequence
  Synthetic
tgtatcataaagagugtcagcugagaga

SEQ ID NO: 65509 - DNA, 23 bp, Artificial Sequence
  Synthetic
ggaactuacagcagguccagaac

SEQ ID NO: 65510 - DNA, 28 bp, Artificial Sequence
  Synthetic
tcattcctttgtauacagggtgaaagug

SEQ ID NO: 65511 - DNA, 27 bp, Artificial Sequence
  Synthetic
ttctaccuggctggttgaauaaaaact

SEQ ID NO: 65512 - DNA, 29 bp, Artificial Sequence
  Synthetic
caagcttgaggaauttcatattttucagt

SEQ ID NO: 65513 - DNA, 18 bp, Artificial Sequence
  Synthetic
acctggucgagcugggaa

SEQ ID NO: 65514 - DNA, 27 bp, Artificial Sequence
  Synthetic
tgtttccaugacaccagauaacaagag

SEQ ID NO: 65515 - DNA, 28 bp, Artificial Sequence
  Synthetic
cgttcttcaattucttcacaagtgttug

SEQ ID NO: 65516 - DNA, 26 bp, Artificial Sequence
  Synthetic
cagggtgagaagauctcccttaatug

SEQ ID NO: 65517 - DNA, 28 bp, Artificial Sequence
  Synthetic
cgagtcataaagucatcaatcaccucat

SEQ ID NO: 65518 - DNA, 23 bp, Artificial Sequence
  Synthetic
tgcaggaggagautcagtugaag

SEQ ID NO: 65519 - DNA, 23 bp, Artificial Sequence
  Synthetic
cgatctccucgttgagagatuca

SEQ ID NO: 65520 - DNA, 24 bp, Artificial Sequence
  Synthetic
gcaaagucaacuagaagacaggca

SEQ ID NO: 65521 - DNA, 24 bp, Artificial Sequence
  Synthetic
agggtacaucctgtgtcttugaga

SEQ ID NO: 65522 - DNA, 27 bp, Artificial Sequence
  Synthetic
aatcacagcugcaaacgttaaattcut

SEQ ID NO: 65523 - DNA, 22 bp, Artificial Sequence
  Synthetic
tcauacacggcagccacauaat

SEQ ID NO: 65524 - DNA, 19 bp, Artificial Sequence
  Synthetic
ggagccucaccgctucaat

SEQ ID NO: 65525 - DNA, 28 bp, Artificial Sequence
  Synthetic
gggatgttaagguctcctatcaatctua

SEQ ID NO: 65526 - DNA, 22 bp, Artificial Sequence
  Synthetic
agactauaggacagccugcgaa

SEQ ID NO: 65527 - DNA, 22 bp, Artificial Sequence
  Synthetic
gggtcauggcaaactgtctcua

SEQ ID NO: 65528 - DNA, 23 bp, Artificial Sequence
  Synthetic
ggaaacaauactggctgaucacc

SEQ ID NO: 65529 - DNA, 23 bp, Artificial Sequence
  Synthetic
gttaggucgttctucacgaggat

SEQ ID NO: 65530 - DNA, 23 bp, Artificial Sequence
  Synthetic
tctgaggtaaauccagtggccua

SEQ ID NO: 65531 - DNA, 19 bp, Artificial Sequence
  Synthetic
cccccaacacgutgcauga

SEQ ID NO: 65532 - DNA, 27 bp, Artificial Sequence
  Synthetic
tctcttttccccutgggattagtauct

SEQ ID NO: 65533 - DNA, 28 bp, Artificial Sequence
  Synthetic
aagcttcaacaatutactctcccatgua

SEQ ID NO: 65534 - DNA, 26 bp, Artificial Sequence
  Synthetic
agtttgctgguggagataaggttaug

SEQ ID NO: 65535 - DNA, 22 bp, Artificial Sequence
  Synthetic
agcauttccaaagauggagcga

SEQ ID NO: 65536 - DNA, 23 bp, Artificial Sequence
  Synthetic
acagaggaagauggucccaaaga

SEQ ID NO: 65537 - DNA, 28 bp, Artificial Sequence
  Synthetic
acaacagaagtauaagaatggctgucac

SEQ ID NO: 65538 - DNA, 23 bp, Artificial Sequence
  Synthetic
gtaggagatcutggatgggtugg

SEQ ID NO: 65539 - DNA, 20 bp, Artificial Sequence
  Synthetic
ctgtcugagccactccguat

SEQ ID NO: 65540 - DNA, 21 bp, Artificial Sequence
  Synthetic
tctccguccagctgacttgua

SEQ ID NO: 65541 - DNA, 23 bp, Artificial Sequence
  Synthetic
gtggagacagaugaccaaagucc

SEQ ID NO: 65542 - DNA, 22 bp, Artificial Sequence
  Synthetic
agctctgggcccugtatatgua

SEQ ID NO: 65543 - DNA, 23 bp, Artificial Sequence
  Synthetic
cgagucagacacagaugaccaag

SEQ ID NO: 65544 - DNA, 21 bp, Artificial Sequence
  Synthetic
cagctccaugaggcuaaggat

SEQ ID NO: 65545 - DNA, 22 bp, Artificial Sequence
  Synthetic
tccaucccaaacaattccugct

SEQ ID NO: 65546 - DNA, 22 bp, Artificial Sequence
  Synthetic
atugacaagggagtugcacaga

SEQ ID NO: 65547 - DNA, 20 bp, Artificial Sequence
  Synthetic
cucaaccacctugcaggaga

SEQ ID NO: 65548 - DNA, 21 bp, Artificial Sequence
  Synthetic
ggtcgaacagcaugaaggcut

SEQ ID NO: 65549 - DNA, 25 bp, Artificial Sequence
  Synthetic
gggtctcttutcagattgagtucac

SEQ ID NO: 65550 - DNA, 22 bp, Artificial Sequence
  Synthetic
gtctgcagugctttccatctug

SEQ ID NO: 65551 - DNA, 25 bp, Artificial Sequence
  Synthetic
agaaagagaauauccggcaggagat

SEQ ID NO: 65552 - DNA, 18 bp, Artificial Sequence
  Synthetic
acctcuccagcgctgtuc

SEQ ID NO: 65553 - DNA, 20 bp, Artificial Sequence
  Synthetic
gggaggaccucccuaaccaa

SEQ ID NO: 65554 - DNA, 21 bp, Artificial Sequence
  Synthetic
cttggtuccggctgaactcut

SEQ ID NO: 65555 - DNA, 20 bp, Artificial Sequence
  Synthetic
cgaagcuggacagtcuggag

SEQ ID NO: 65556 - DNA, 21 bp, Artificial Sequence
  Synthetic
tgtgagugggccaggtgtaua

SEQ ID NO: 65557 - DNA, 23 bp, Artificial Sequence
  Synthetic
atgtcagcugaactttccaucca

SEQ ID NO: 65558 - DNA, 26 bp, Artificial Sequence
  Synthetic
ggaaagaacttcutctgccttacugt

SEQ ID NO: 65559 - DNA, 28 bp, Artificial Sequence
  Synthetic
aggcctagcuaatatcttagtcaauggt

SEQ ID NO: 65560 - DNA, 27 bp, Artificial Sequence
  Synthetic
ctgatctaacaugatgtctcacctuca

SEQ ID NO: 65561 - DNA, 28 bp, Artificial Sequence
  Synthetic
tctgaaacatcucaaccatcagtuacaa

SEQ ID NO: 65562 - DNA, 25 bp, Artificial Sequence
  Synthetic
cagcttgtautcctcttcttuccct

SEQ ID NO: 65563 - DNA, 27 bp, Artificial Sequence
  Synthetic
gattcatcagacguccattttgcuaaa

SEQ ID NO: 65564 - DNA, 17 bp, Artificial Sequence
  Synthetic
cugccacgacgguacca

SEQ ID NO: 65565 - DNA, 20 bp, Artificial Sequence
  Synthetic
tcctgcuccaggauggagat

SEQ ID NO: 65566 - DNA, 17 bp, Artificial Sequence
  Synthetic
cgcctccucggagucct

SEQ ID NO: 65567 - DNA, 19 bp, Artificial Sequence
  Synthetic
gcggaauccgggctcuaac

SEQ ID NO: 65568 - DNA, 23 bp, Artificial Sequence
  Synthetic
agctgtccutgtaattgccucaa

SEQ ID NO: 65569 - DNA, 28 bp, Artificial Sequence
  Synthetic
cctctcttgttcutgacaaatccagaua

SEQ ID NO: 65570 - DNA, 20 bp, Artificial Sequence
  Synthetic
gtagccgtuccccacaguaa

SEQ ID NO: 65571 - DNA, 22 bp, Artificial Sequence
  Synthetic
agccacuggctttgucaaaaag

SEQ ID NO: 65572 - DNA, 28 bp, Artificial Sequence
  Synthetic
ctttttctttgtccutgttcatggcuaa

SEQ ID NO: 65573 - DNA, 22 bp, Artificial Sequence
  Synthetic
ggcttccauacttggctgcuac

SEQ ID NO: 65574 - DNA, 21 bp, Artificial Sequence
  Synthetic
cacctgcgucatcatcgagua

SEQ ID NO: 65575 - DNA, 21 bp, Artificial Sequence
  Synthetic
ggugaaacaggcaagcgttut

SEQ ID NO: 65576 - DNA, 22 bp, Artificial Sequence
  Synthetic
gcctgtgaugaaggtcaacgua

SEQ ID NO: 65577 - DNA, 22 bp, Artificial Sequence
  Synthetic
gggagtgcaagutctaacccut

SEQ ID NO: 65578 - DNA, 25 bp, Artificial Sequence
  Synthetic
aauctaatttugagggccaggacat

SEQ ID NO: 65579 - DNA, 20 bp, Artificial Sequence
  Synthetic
agccucaaaggcttcaucgt

SEQ ID NO: 65580 - DNA, 28 bp, Artificial Sequence
  Synthetic
tgttgtgguaataaccaaaatugaacac

SEQ ID NO: 65581 - DNA, 24 bp, Artificial Sequence
  Synthetic
aggcagaaacaaaaaucccaguca

SEQ ID NO: 65582 - DNA, 20 bp, Artificial Sequence
  Synthetic
gggtacttgucaggcgguaa

SEQ ID NO: 65583 - DNA, 28 bp, Artificial Sequence
  Synthetic
gccatgtaggtuaacgtcttaaggaaua

SEQ ID NO: 65584 - DNA, 28 bp, Artificial Sequence
  Synthetic
tctttcttcagugtcacttacattuggt

SEQ ID NO: 65585 - DNA, 20 bp, Artificial Sequence
  Synthetic
ctcugacacgccgactaugg

SEQ ID NO: 65586 - DNA, 28 bp, Artificial Sequence
  Synthetic
tcttaatgtttucctccaaagcguagaa

SEQ ID NO: 65587 - DNA, 26 bp, Artificial Sequence
  Synthetic
gttcacttcccauctgagatgtcuaa

SEQ ID NO: 65588 - DNA, 25 bp, Artificial Sequence
  Synthetic
caggacaaatcuagcaagtcttuga

SEQ ID NO: 65589 - DNA, 27 bp, Artificial Sequence
  Synthetic
tggaaatatgccagaaaucccttacug

SEQ ID NO: 65590 - DNA, 27 bp, Artificial Sequence
  Synthetic
agagtagaaauccttaacucacgggat

SEQ ID NO: 65591 - DNA, 28 bp, Artificial Sequence
  Synthetic
gtggttgtgtuggaagttcctctatuaa

SEQ ID NO: 65592 - DNA, 26 bp, Artificial Sequence
  Synthetic
ccaccacaacugttacttctaucgaa

SEQ ID NO: 65593 - DNA, 24 bp, Artificial Sequence
  Synthetic
gctttctcacuctgctcttttuca

SEQ ID NO: 65594 - DNA, 28 bp, Artificial Sequence
  Synthetic
tgacatggcuaattccaaaaucacagaa

SEQ ID NO: 65595 - DNA, 31 bp, Artificial Sequence
  Synthetic
ttcatgaagcutatattcaatgugaaggaga

SEQ ID NO: 65596 - DNA, 22 bp, Artificial Sequence
  Synthetic
ctcatgcaccaugactgacgua

SEQ ID NO: 65597 - DNA, 27 bp, Artificial Sequence
  Synthetic
ctgatttgccutgcttcatatuccaat

SEQ ID NO: 65598 - DNA, 21 bp, Artificial Sequence
  Synthetic
gctccauccaagttcugcaca

SEQ ID NO: 65599 - DNA, 22 bp, Artificial Sequence
  Synthetic
ctgcttcctgugtcgtctgaut

SEQ ID NO: 65600 - DNA, 29 bp, Artificial Sequence
  Synthetic
agctcccaaauaatgaagatagagucaga

SEQ ID NO: 65601 - DNA, 27 bp, Artificial Sequence
  Synthetic
tttgcctttctuaattcagcctttucc

SEQ ID NO: 65602 - DNA, 28 bp, Artificial Sequence
  Synthetic
gcctccaaaggacuaaatcagatgaaua

SEQ ID NO: 65603 - DNA, 29 bp, Artificial Sequence
  Synthetic
tggtctagatgauggagaaagagatucaa

SEQ ID NO: 65604 - DNA, 22 bp, Artificial Sequence
  Synthetic
gggttuggaaaatcgccugaac

SEQ ID NO: 65605 - DNA, 22 bp, Artificial Sequence
  Synthetic
tgtgtttgcutgagctgcuaga

SEQ ID NO: 65606 - DNA, 17 bp, Artificial Sequence
  Synthetic
cgcgcgaggucuaaggg

SEQ ID NO: 65607 - DNA, 18 bp, Artificial Sequence
  Synthetic
ccgcagcagauggtggua

SEQ ID NO: 65608 - DNA, 23 bp, Artificial Sequence
  Synthetic
agtggacccuttgccttguaaaa

SEQ ID NO: 65609 - DNA, 25 bp, Artificial Sequence
  Synthetic
ggactacgautagggucgacaaaaa

SEQ ID NO: 65610 - DNA, 21 bp, Artificial Sequence
  Synthetic
ccaatucccaggccucaaaag

SEQ ID NO: 65611 - DNA, 21 bp, Artificial Sequence
  Synthetic
tgtccctcugtgtcctgcuat

SEQ ID NO: 65612 - DNA, 20 bp, Artificial Sequence
  Synthetic
ggccctaucggcagtacuac

SEQ ID NO: 65613 - DNA, 28 bp, Artificial Sequence
  Synthetic
tctttttcttactugcttctgtcacuca

SEQ ID NO: 65614 - DNA, 24 bp, Artificial Sequence
  Synthetic
ctcttctgauaccaaaggctcucc

SEQ ID NO: 65615 - DNA, 28 bp, Artificial Sequence
  Synthetic
agtaatggttttgauggctttgatgtuc

SEQ ID NO: 65616 - DNA, 22 bp, Artificial Sequence
  Synthetic
tgaaaaattgggugagctgcug

SEQ ID NO: 65617 - DNA, 25 bp, Artificial Sequence
  Synthetic
ttggaggaagaccgutcgatatcua

SEQ ID NO: 65618 - DNA, 24 bp, Artificial Sequence
  Synthetic
gagtgggcaaucttttaggtcuct

SEQ ID NO: 65619 - DNA, 20 bp, Artificial Sequence
  Synthetic
tgtgccaaugtctgtgugct

SEQ ID NO: 65620 - DNA, 22 bp, Artificial Sequence
  Synthetic
agcatcgguattgttgggtugt

SEQ ID NO: 65621 - DNA, 21 bp, Artificial Sequence
  Synthetic
ctcaucccccttaugcacgat

SEQ ID NO: 65622 - DNA, 20 bp, Artificial Sequence
  Synthetic
gagcugaagaaaacgcccut

SEQ ID NO: 65623 - DNA, 23 bp, Artificial Sequence
  Synthetic
ctcctccugaaactcagcttuga

SEQ ID NO: 65624 - DNA, 22 bp, Artificial Sequence
  Synthetic
aguacgatgaccugaggagagg

SEQ ID NO: 65625 - DNA, 27 bp, Artificial Sequence
  Synthetic
acagtgaagcugtgatcaagtattugt

SEQ ID NO: 65626 - DNA, 19 bp, Artificial Sequence
  Synthetic
tgtcguccaagggctuacc

SEQ ID NO: 65627 - DNA, 23 bp, Artificial Sequence
  Synthetic
tcaaggtauagcaaccacuccca

SEQ ID NO: 65628 - DNA, 27 bp, Artificial Sequence
  Synthetic
tcctccaaccuatagaaggaagugaaa

SEQ ID NO: 65629 - DNA, 21 bp, Artificial Sequence
  Synthetic
gcatccatuggctgcttaucc

SEQ ID NO: 65630 - DNA, 22 bp, Artificial Sequence
  Synthetic
cttgacucccacctggagttuc

SEQ ID NO: 65631 - DNA, 19 bp, Artificial Sequence
  Synthetic
ggcggacagcutcaaaguc

SEQ ID NO: 65632 - DNA, 22 bp, Artificial Sequence
  Synthetic
gcccatcuccattcctgtacug

SEQ ID NO: 65633 - DNA, 23 bp, Artificial Sequence
  Synthetic
ccacctcagucctctcttuccat

SEQ ID NO: 65634 - DNA, 19 bp, Artificial Sequence
  Synthetic
cctcaggcucagctgtgua

SEQ ID NO: 65635 - DNA, 23 bp, Artificial Sequence
  Synthetic
ggtgaatucgactcctttguggt

SEQ ID NO: 65636 - DNA, 27 bp, Artificial Sequence
  Synthetic
tcttatattttcuctcaggcuccaggt

SEQ ID NO: 65637 - DNA, 21 bp, Artificial Sequence
  Synthetic
agatgugacccccaactcugt

SEQ ID NO: 65638 - DNA, 17 bp, Artificial Sequence
  Synthetic
cccctugcgtcgucgag

SEQ ID NO: 65639 - DNA, 22 bp, Artificial Sequence
  Synthetic
ccaggugagggaaccagaagua

SEQ ID NO: 65640 - DNA, 19 bp, Artificial Sequence
  Synthetic
tguagcccgtgucgcaaat

SEQ ID NO: 65641 - DNA, 17 bp, Artificial Sequence
  Synthetic
cuggcgaggactguggt

SEQ ID NO: 65642 - DNA, 21 bp, Artificial Sequence
  Synthetic
agccccuggtggtaucagaat

SEQ ID NO: 65643 - DNA, 24 bp, Artificial Sequence
  Synthetic
ctcatctuccccaaatgtctggut

SEQ ID NO: 65644 - DNA, 22 bp, Artificial Sequence
  Synthetic
caacaagggccugaaaccctua

SEQ ID NO: 65645 - DNA, 27 bp, Artificial Sequence
  Synthetic
atgtgttctatcuccatctccttcuga

SEQ ID NO: 65646 - DNA, 21 bp, Artificial Sequence
  Synthetic
accggtaguctagggugaagg

SEQ ID NO: 65647 - DNA, 25 bp, Artificial Sequence
  Synthetic
tgagatagaagaagggaugggtgut

SEQ ID NO: 65648 - DNA, 21 bp, Artificial Sequence
  Synthetic
gtgctcagggagutggctaut

SEQ ID NO: 65649 - DNA, 22 bp, Artificial Sequence
  Synthetic
cctcacaggcauctgtttccut

SEQ ID NO: 65650 - DNA, 21 bp, Artificial Sequence
  Synthetic
tcttcatgcccacugagggua

SEQ ID NO: 65651 - DNA, 22 bp, Artificial Sequence
  Synthetic
gcucctagaccugcagagaaag

SEQ ID NO: 65652 - DNA, 25 bp, Artificial Sequence
  Synthetic
gaactcgagggutgtctgaatcaua

SEQ ID NO: 65653 - DNA, 28 bp, Artificial Sequence
  Synthetic
ccttgattccagacucttgaatctuaca

SEQ ID NO: 65654 - DNA, 21 bp, Artificial Sequence
  Synthetic
caatguggcggctaacttucc

SEQ ID NO: 65655 - DNA, 29 bp, Artificial Sequence
  Synthetic
gtcagaaatgcuaagtatgcaaaatgugt

SEQ ID NO: 65656 - DNA, 25 bp, Artificial Sequence
  Synthetic
tgctatgaatucctaatggcugcaa

SEQ ID NO: 65657 - DNA, 25 bp, Artificial Sequence
  Synthetic
actttttcttccuccctcctccuat

SEQ ID NO: 65658 - DNA, 24 bp, Artificial Sequence
  Synthetic
atcagcccucatttggatgugaat

SEQ ID NO: 65659 - DNA, 23 bp, Artificial Sequence
  Synthetic
gaaautggtgatucgccaacagt

SEQ ID NO: 65660 - DNA, 22 bp, Artificial Sequence
  Synthetic
agcaagcacuagaccacaaugt

SEQ ID NO: 65661 - DNA, 24 bp, Artificial Sequence
  Synthetic
ggtattctguggcctgtatucacc

SEQ ID NO: 65662 - DNA, 28 bp, Artificial Sequence
  Synthetic
ctgattgagaaagaacuttatgcccuct

SEQ ID NO: 65663 - DNA, 24 bp, Artificial Sequence
  Synthetic
tggatccccuggatttgtugaaac

SEQ ID NO: 65664 - DNA, 25 bp, Artificial Sequence
  Synthetic
aggaaatagugccatgctctaacug

SEQ ID NO: 65665 - DNA, 24 bp, Artificial Sequence
  Synthetic
cctactcaacucccttcttuccct

SEQ ID NO: 65666 - DNA, 23 bp, Artificial Sequence
  Synthetic
gtggcatcuttactcaccaucca

SEQ ID NO: 65667 - DNA, 27 bp, Artificial Sequence
  Synthetic
gtaaagaagggagauttgcctgtauga

SEQ ID NO: 65668 - DNA, 28 bp, Artificial Sequence
  Synthetic
gctggtttgggaaauagaagtatacuct

SEQ ID NO: 65669 - DNA, 21 bp, Artificial Sequence
  Synthetic
ccautaucgccccaggaagac

SEQ ID NO: 65670 - DNA, 22 bp, Artificial Sequence
  Synthetic
tccacatgguatcaacccctug

SEQ ID NO: 65671 - DNA, 28 bp, Artificial Sequence
  Synthetic
cctcagttaaaccutgatcagtatuggt

SEQ ID NO: 65672 - DNA, 22 bp, Artificial Sequence
  Synthetic
ggccccacuagccagaaaauat

SEQ ID NO: 65673 - DNA, 28 bp, Artificial Sequence
  Synthetic
gggaggaauacacaaatatgcgaatcua

SEQ ID NO: 65674 - DNA, 25 bp, Artificial Sequence
  Synthetic
cagaagaaaaugaaugcccagaagt

SEQ ID NO: 65675 - DNA, 24 bp, Artificial Sequence
  Synthetic
catcaaaucacaggctgctgatuc

SEQ ID NO: 65676 - DNA, 25 bp, Artificial Sequence
  Synthetic
gacatacaaatugtccagggauggt

SEQ ID NO: 65677 - DNA, 27 bp, Artificial Sequence
  Synthetic
caccacauactattagtucaagggagt

SEQ ID NO: 65678 - DNA, 25 bp, Artificial Sequence
  Synthetic
gtgcatggaaaaautgatagccgut

SEQ ID NO: 65679 - DNA, 25 bp, Artificial Sequence
  Synthetic
aaccactgugtcgcaatttucaaat

SEQ ID NO: 65680 - DNA, 27 bp, Artificial Sequence
  Synthetic
tttaataccccautgtgugaacaagga

SEQ ID NO: 65681 - DNA, 27 bp, Artificial Sequence
  Synthetic
gggtagcggcaauacttgaatattuca

SEQ ID NO: 65682 - DNA, 23 bp, Artificial Sequence
  Synthetic
ccaagatgugaagatggcacaut

SEQ ID NO: 65683 - DNA, 22 bp, Artificial Sequence
  Synthetic
ccacagccautcgtcccaaaua

SEQ ID NO: 65684 - DNA, 28 bp, Artificial Sequence
  Synthetic
tggaccagaaautacagaaatggaugat

SEQ ID NO: 65685 - DNA, 25 bp, Artificial Sequence
  Synthetic
ggtgtgtgtguatcagtgtcacaua

SEQ ID NO: 65686 - DNA, 22 bp, Artificial Sequence
  Synthetic
ggtucacggaggagaaauggag

SEQ ID NO: 65687 - DNA, 22 bp, Artificial Sequence
  Synthetic
ctgtctccccugggtagtttug

SEQ ID NO: 65688 - DNA, 29 bp, Artificial Sequence
  Synthetic
gtcaaacgaaaggauaatacttcaugcaa

SEQ ID NO: 65689 - DNA, 25 bp, Artificial Sequence
  Synthetic
ttgaggagacaagugaagaccatuc

SEQ ID NO: 65690 - DNA, 25 bp, Artificial Sequence
  Synthetic
agccauctucaagaaaaggaacact

SEQ ID NO: 65691 - DNA, 23 bp, Artificial Sequence
  Synthetic
gcacaagaaggucaagattucca

SEQ ID NO: 65692 - DNA, 21 bp, Artificial Sequence
  Synthetic
gcctuagagccaguaggagga

SEQ ID NO: 65693 - DNA, 27 bp, Artificial Sequence
  Synthetic
aatcaaaaatccacagutccctaggut

SEQ ID NO: 65694 - DNA, 26 bp, Artificial Sequence
  Synthetic
aatttgcaatagcgugcaagagatut

SEQ ID NO: 65695 - DNA, 23 bp, Artificial Sequence
  Synthetic
gacgaagtugagacagccatgua

SEQ ID NO: 65696 - DNA, 19 bp, Artificial Sequence
  Synthetic
tuacacacugcccgcaaga

SEQ ID NO: 65697 - DNA, 27 bp, Artificial Sequence
  Synthetic
gtccatcatgcutaagatttgcttgut

SEQ ID NO: 65698 - DNA, 26 bp, Artificial Sequence
  Synthetic
gactctatgtgutcttttggagugct

SEQ ID NO: 65699 - DNA, 28 bp, Artificial Sequence
  Synthetic
aaaactggaaacuggtcctgtaaacuat

SEQ ID NO: 65700 - DNA, 20 bp, Artificial Sequence
  Synthetic
gcugccacacaatugcaacc

SEQ ID NO: 65701 - DNA, 22 bp, Artificial Sequence
  Synthetic
tcagcctgaagguccagatgua

SEQ ID NO: 65702 - DNA, 22 bp, Artificial Sequence
  Synthetic
actggagcugctcctatctuca

SEQ ID NO: 65703 - DNA, 28 bp, Artificial Sequence
  Synthetic
ggtggagaagaaugagaaaacagguaaa

SEQ ID NO: 65704 - DNA, 25 bp, Artificial Sequence
  Synthetic
ccatgtacutacttcctttugcaca

SEQ ID NO: 65705 - DNA, 25 bp, Artificial Sequence
  Synthetic
ttcccttucagcggtttctaaugaa

SEQ ID NO: 65706 - DNA, 20 bp, Artificial Sequence
  Synthetic
gcctccccacugttcctuac

SEQ ID NO: 65707 - DNA, 21 bp, Artificial Sequence
  Synthetic
gcaacttugacccagggagut

SEQ ID NO: 65708 - DNA, 22 bp, Artificial Sequence
  Synthetic
gagggtccutgggaaacuacat

SEQ ID NO: 65709 - DNA, 20 bp, Artificial Sequence
  Synthetic
tguggccatcucaaggacac

SEQ ID NO: 65710 - DNA, 28 bp, Artificial Sequence
  Synthetic
aaggaaaaacucaaggaagaacuaggac

SEQ ID NO: 65711 - DNA, 26 bp, Artificial Sequence
  Synthetic
tgtctgtctagcuctctgaatctgut

SEQ ID NO: 65712 - DNA, 28 bp, Artificial Sequence
  Synthetic
atcagctaacacaggaautattcagcut

SEQ ID NO: 65713 - DNA, 28 bp, Artificial Sequence
  Synthetic
aggactacttcuagttcaggtttgtcut

SEQ ID NO: 65714 - DNA, 25 bp, Artificial Sequence
  Synthetic
gacagcaaauggaaaaagauaggca

SEQ ID NO: 65715 - DNA, 23 bp, Artificial Sequence
  Synthetic
tcttgcttcuggaattccugcat

SEQ ID NO: 65716 - DNA, 24 bp, Artificial Sequence
  Synthetic
ggtgacatcucacctccttuaaca

SEQ ID NO: 65717 - DNA, 27 bp, Artificial Sequence
  Synthetic
gctgaaatuaacagacaagttggucaa

SEQ ID NO: 65718 - DNA, 29 bp, Artificial Sequence
  Synthetic
tttttacttctcuagaactttgctgcuca

SEQ ID NO: 65719 - DNA, 28 bp, Artificial Sequence
  Synthetic
ggcgtggtaaaaugtgacataaaaugaa

SEQ ID NO: 65720 - DNA, 21 bp, Artificial Sequence
  Synthetic
ccatgtagggugaacctggug

SEQ ID NO: 65721 - DNA, 27 bp, Artificial Sequence
  Synthetic
aatgctgaaggauacagtgatuagcaa

SEQ ID NO: 65722 - DNA, 20 bp, Artificial Sequence
  Synthetic
gggaguagagtgggucggaa

SEQ ID NO: 65723 - DNA, 23 bp, Artificial Sequence
  Synthetic
gatctaatggguagctgctgugt

SEQ ID NO: 65724 - DNA, 21 bp, Artificial Sequence
  Synthetic
gtgggatucaccagcucacat

SEQ ID NO: 65725 - DNA, 27 bp, Artificial Sequence
  Synthetic
cattccttagguccgtgatcttcttua

SEQ ID NO: 65726 - DNA, 23 bp, Artificial Sequence
  Synthetic
tutagtgtgcucagaaccacgaa
